United States Patent Application Publication US 2022/0213167 A1 - sequence listing, part 16

SEQ ID NO: 327779 - protein, 12 aa, Homo sapiens
  CDR3 for alpha chain variable domain of TCR clone 163890 (TRAV21, TRAJ31)
CAVWGNNARLMF

SEQ ID NO: 327780 - protein, 15 aa, Homo sapiens
  CDR3 for beta chain variable domain of TCR clone 163890 (TRBV20-1, TRBJ2-7)
CSAESGTSGAYEQYF

SEQ ID NO: 327781 - protein, 10 aa, Homo sapiens
  CDR3 for alpha chain variable domain of TCR clone 163891 (TRAV30, TRAJ48)
CGIGNEKLTF

SEQ ID NO: 327782 - protein, 15 aa, Homo sapiens
  CDR3 for beta chain variable domain of TCR clone 163891 (TRBV19, TRBJ2-1)
CASSSPGVPLDEQFF

SEQ ID NO: 327783 - protein, 16 aa, Homo sapiens
  CDR3 for alpha chain variable domain of TCR clone 163892 (TRAV12-2, TRAJ45)
CAVNMYSGGGADGLTF

SEQ ID NO: 327784 - protein, 17 aa, Homo sapiens
  CDR3 for beta chain variable domain of TCR clone 163892 (TRBV6-3, TRBJ2-2)
CASSYRGRDFYTGELFS

SEQ ID NO: 327785 - protein, 14 aa, Homo sapiens
  CDR3 for alpha chain variable domain of TCR clone 163893 (TRAV38-1, TRAJ40)
CALRPTSGTYKYIC

SEQ ID NO: 327786 - protein, 14 aa, Homo sapiens
  CDR3 for beta chain variable domain of TCR clone 163893 (TRBV25-1, TRBJ1-1)
CASTHLGGNTEAFF

SEQ ID NO: 327787 - protein, 14 aa, Homo sapiens
  CDR3 for alpha chain variable domain of TCR clone 163894 (TRAV35, TRAJ50)
CAGHRKTSYDKVIF

SEQ ID NO: 327788 - protein, 14 aa, Homo sapiens
  CDR3 for beta chain variable domain of TCR clone 163894 (TRBV7-7, TRBJ1-4)
CASSLEGQSEKLFF

SEQ ID NO: 327789 - protein, 14 aa, Homo sapiens
  CDR3 for alpha chain variable domain of TCR clone 163895 (TRAV1-1, TRAJ27)
CAVIYNTNAGKSTF

SEQ ID NO: 327790 - protein, 15 aa, Homo sapiens
  CDR3 for beta chain variable domain of TCR clone 163895 (TRBV19, TRBJ2-4)
CASRGPRRGENIQYF

SEQ ID NO: 327791 - protein, 13 aa, Homo sapiens
  CDR3 for alpha chain variable domain of TCR clone 163896 (TRAV12-3, TRAJ9)
CAMRNTGGFKTIF

SEQ ID NO: 327792 - protein, 17 aa, Homo sapiens
  CDR3 for beta chain variable domain of TCR clone 163896 (TRBV7-8, TRBJ2-6)
CASSAGTGGAGANVLAF

SEQ ID NO: 327793 - protein, 15 aa, Homo sapiens
  CDR3 for alpha chain variable domain of TCR clone 163897 (TRAV3, TRAJ20)
CAVRDIKLSDYKISF

SEQ ID NO: 327794 - protein, 15 aa, Homo sapiens
  CDR3 for beta chain variable domain of TCR clone 163897 (TRBV7-9, TRBJ1-6)
CASSSPGRGNSPLHL

SEQ ID NO: 327795 - protein, 14 aa, Homo sapiens
  CDR3 for alpha chain variable domain of TCR clone 163898 (TRAV30, TRAJ33)
CGTVAPRSNYQLIW

SEQ ID NO: 327796 - protein, 17 aa, Homo sapiens
  CDR3 for beta chain variable domain of TCR clone 163898 (TRBV7-8, TRBJ2-6)
CASSAGTGGAGANVLTF

SEQ ID NO: 327797 - protein, 12 aa, Homo sapiens
  CDR3 for alpha chain variable domain of TCR clone 163899 (TRAV23/DV6, TRAJ24)
CSANDSWGKLQF

SEQ ID NO: 327798 - protein, 16 aa, Homo sapiens
  CDR3 for beta chain variable domain of TCR clone 163899 (TRBV12-4, TRBJ2-5)
CASSLSTSGGKETQYF

SEQ ID NO: 327799 - protein, 14 aa, Homo sapiens
  CDR3 for alpha chain variable domain of TCR clone 163900 (TRAV25, TRAJ22)
CAVRSSGSARQLTF

SEQ ID NO: 327800 - protein, 15 aa, Homo sapiens
  CDR3 for beta chain variable domain of TCR clone 163900 (TRBV4-2, TRBJ2-1)
CASSLADSLYNEQFF

SEQ ID NO: 327801 - protein, 15 aa, Homo sapiens
  CDR3 for alpha chain variable domain of TCR clone 163901 (TRAV23/DV6, TRAJ18)
CAARYRGSTLGRLYF

SEQ ID NO: 327802 - protein, 13 aa, Homo sapiens
  CDR3 for beta chain variable domain of TCR clone 163901 (TRBV7-2, TRBJ1-4)
CASSLAGLEKLFF

SEQ ID NO: 327803 - protein, 13 aa, Homo sapiens
  CDR3 for alpha chain variable domain of TCR clone 163902 (TRAV12-1, TRAJ21)
CVVIGDNFNEFYF

SEQ ID NO: 327804 - protein, 14 aa, Homo sapiens
  CDR3 for beta chain variable domain of TCR clone 163902 (TRBV7-3, TRBJ2-2)
CASSLYPLTGELFF

SEQ ID NO: 327805 - protein, 13 aa, Homo sapiens
  CDR3 for alpha chain variable domain of TCR clone 163903 (TRAV36/DV7, TRAJ53)
CALSGGSNYKLTF

SEQ ID NO: 327806 - protein, 13 aa, Homo sapiens
  CDR3 for beta chain variable domain of TCR clone 163903 (TRBV28, TRBJ2-4)
CDSSQSSKNIQYF

SEQ ID NO: 327807 - protein, 12 aa, Homo sapiens
  CDR3 for alpha chain variable domain of TCR clone 163904 (TRAV29/DV5, TRAJ15)
CASNQAVTALIF

SEQ ID NO: 327808 - protein, 14 aa, Homo sapiens
  CDR3 for beta chain variable domain of TCR clone 163904 (TRBV15, TRBJ2-5)
CATSGDRGQETQYF

SEQ ID NO: 327809 - protein, 15 aa, Homo sapiens
  CDR3 for alpha chain variable domain of TCR clone 163905 (TRAV38-1, TRAJ45)
CAFMNGGGGADGLTF

SEQ ID NO: 327810 - protein, 13 aa, Homo sapiens
  CDR3 for beta chain variable domain of TCR clone 163905 (TRBV7-9, TRBJ1-2)
CASSLKQNYGYTF

SEQ ID NO: 327811 - protein, 11 aa, Homo sapiens
  CDR3 for alpha chain variable domain of TCR clone 163906 (TRAV5, TRAJ31)
CAESNNARLMF

SEQ ID NO: 327812 - protein, 15 aa, Homo sapiens
  CDR3 for beta chain variable domain of TCR clone 163906 (TRBV2, TRBJ2-3)
CASSDFEKATDTQYF

SEQ ID NO: 327813 - protein, 14 aa, Homo sapiens
  CDR3 for alpha chain variable domain of TCR clone 163907 (TRAV13-1, TRAJ26)
CAASSAHYGQNFVF

SEQ ID NO: 327814 - protein, 13 aa, Homo sapiens
  CDR3 for beta chain variable domain of TCR clone 163907 (TRBV4-1, TRBJ2-1)
CASSQEVQYEQFF

SEQ ID NO: 327815 - protein, 12 aa, Homo sapiens
  CDR3 for alpha chain variable domain of TCR clone 163908 (TRAV1-1, TRAJ33)
CAASDSNYQLIW

SEQ ID NO: 327816 - protein, 18 aa, Homo sapiens
  CDR3 for beta chain variable domain of TCR clone 163908 (TRBV20-1, TRBJ2-2)
CSARVQTARPSGTRELFF

SEQ ID NO: 327817 - protein, 13 aa, Homo sapiens
  CDR3 for alpha chain variable domain of TCR clone 163909 (TRAV8-1, TRAJ28)
CAVSGAGSYHLTF

SEQ ID NO: 327818 - protein, 14 aa, Homo sapiens
  CDR3 for beta chain variable domain of TCR clone 163909 (TRBV7-2, TRBJ2-2)
CASRGQGAAGELFF

SEQ ID NO: 327819 - protein, 16 aa, Homo sapiens
  CDR3 for alpha chain variable domain of TCR clone 163910 (TRAV3, TRAJ10)
CAVRDMMAGGGNKLTF

SEQ ID NO: 327820 - protein, 14 aa, Homo sapiens
  CDR3 for beta chain variable domain of TCR clone 163910 (TRBV7-2, TRBJ2-7)
CASSPKTSFYEQYF

SEQ ID NO: 327821 - protein, 19 aa, Homo sapiens
  CDR3 for alpha chain variable domain of TCR clone 163911 (TRAV4, TRAJ36)
CLVGPRGRSNWGKQPLLWD

SEQ ID NO: 327822 - protein, 16 aa, Homo sapiens
  CDR3 for beta chain variable domain of TCR clone 163911 (TRBV11-2, TRBJ2-7)
CASSPTTGGVSYEQYF

SEQ ID NO: 327823 - protein, 14 aa, Homo sapiens
  CDR3 for alpha chain variable domain of TCR clone 163912 (TRAV4, TRAJ30)
CLVGDMNRDGKLIF

SEQ ID NO: 327824 - protein, 15 aa, Homo sapiens
  CDR3 for beta chain variable domain of TCR clone 163912 (TRBV7-2, TRBJ2-7)
CASSLSSGRTYEQYF

SEQ ID NO: 327825 - protein, 12 aa, Homo sapiens
  CDR3 for alpha chain variable domain of TCR clone 163913 (TRAV21, TRAJ3)
CCFYSSASKIIF

SEQ ID NO: 327826 - protein, 12 aa, Homo sapiens
  CDR3 for beta chain variable domain of TCR clone 163913 (TRBV10-3, TRBJ2-5)
CAISLIGETQYF

SEQ ID NO: 327827 - protein, 13 aa, Homo sapiens
  CDR3 for alpha chain variable domain of TCR clone 163914 (TRAV8-6, TRAJ49)
CAVITNTGNRFYF

SEQ ID NO: 327828 - protein, 15 aa, Homo sapiens
  CDR3 for beta chain variable domain of TCR clone 163914 (TRBV9, TRBJ1-6)
CASSVAGTGDSPLLF

SEQ ID NO: 327829 - protein, 19 aa, Homo sapiens
  CDR3 for alpha chain variable domain of TCR clone 163915 (TRAV12-2, TRAJ52)
PVLQPPTSFRSTSYGKLTF

SEQ ID NO: 327830 - protein, 11 aa, Homo sapiens
  CDR3 for beta chain variable domain of TCR clone 163915 (TRBV11-2, TRBJ2-2)
CASSLPGELFF

SEQ ID NO: 327831 - protein, 15 aa, Homo sapiens
  CDR3 for alpha chain variable domain of TCR clone 163916 (TRAV3, TRAJ9)
CAVRARNSGGFKTIF

SEQ ID NO: 327832 - protein, 12 aa, Homo sapiens
  CDR3 for beta chain variable domain of TCR clone 163916 (TRBV11-2, TRBJ2-7)
CASSLPTYEQYF

SEQ ID NO: 327833 - protein, 12 aa, Homo sapiens
  CDR3 for alpha chain variable domain of TCR clone 163917 (TRAV26-2, TRAJ47)
CILVEYGNKLVF

SEQ ID NO: 327834 - protein, 16 aa, Homo sapiens
  CDR3 for beta chain variable domain of TCR clone 163917 (TRBV18, TRBJ1-4)
CASSPLVGDRAEKLFV

SEQ ID NO: 327835 - protein, 16 aa, Homo sapiens
  CDR3 for alpha chain variable domain of TCR clone 163918 (TRAV21, TRAJ52)
CAVTNAGGTSYGKLTF

SEQ ID NO: 327836 - protein, 14 aa, Homo sapiens
  CDR3 for beta chain variable domain of TCR clone 163918 (TRBV20-1, TRBJ1-1)
CSAQTRIGGTEAFF

SEQ ID NO: 327837 - protein, 15 aa, Homo sapiens
  CDR3 for alpha chain variable domain of TCR clone 163919 (TRAV26-1, TRAJ44)
CIVRANTGTVGKLTF

SEQ ID NO: 327838 - protein, 16 aa, Homo sapiens
  CDR3 for beta chain variable domain of TCR clone 163919 (TRBV7-7, TRBJ2-1)
CASSLASGTSYNEQFF

SEQ ID NO: 327839 - protein, 15 aa, Homo sapiens
  CDR3 for alpha chain variable domain of TCR clone 163920 (TRAV13-1, TRAJ44)
CAASRNTGTASKLTF

SEQ ID NO: 327840 - protein, 14 aa, Homo sapiens
  CDR3 for beta chain variable domain of TCR clone 163920 (TRBV18, TRBJ2-5)
CASSPGVSQETQYF

SEQ ID NO: 327841 - protein, 15 aa, Homo sapiens
  CDR3 for alpha chain variable domain of TCR clone 163921 (TRAV27, TRAJ38)
CAARHNAGNNRKLIL

SEQ ID NO: 327842 - protein, 13 aa, Homo sapiens
  CDR3 for beta chain variable domain of TCR clone 163921 (TRBV12-5, TRBJ2-3)
CASGDRQSDTQYF

SEQ ID NO: 327843 - protein, 12 aa, Homo sapiens
  CDR3 for alpha chain variable domain of TCR clone 163922 (TRAV29/DV5, TRAJ34)
CAARHNTDKLIF

SEQ ID NO: 327844 - protein, 16 aa, Homo sapiens
  CDR3 for beta chain variable domain of TCR clone 163922 (TRBV7-9, TRBJ1-2)
CASSISLDRGGYGYTF

SEQ ID NO: 327845 - protein, 15 aa, Homo sapiens
  CDR3 for alpha chain variable domain of TCR clone 163923 (TRAV3, TRAJ13)
CAVRVYSGGFQKVTF

SEQ ID NO: 327846 - protein, 15 aa, Homo sapiens
  CDR3 for beta chain variable domain of TCR clone 163923 (TRBV7-2, TRBJ2-1)
CASSSGLAGGNEQFF

SEQ ID NO: 327847 - protein, 14 aa, Homo sapiens
  CDR3 for alpha chain variable domain of TCR clone 163924 (TRAV12-2, TRAJ17)
CAVLFKAAGNKLTF

SEQ ID NO: 327848 - protein, 16 aa, Homo sapiens
  CDR3 for beta chain variable domain of TCR clone 163924 (TRBV7-2, TRBJ1-4)
CASSLAPGRRDEKLFF

SEQ ID NO: 327849 - protein, 23 aa, Homo sapiens
  CDR3 for alpha chain variable domain of TCR clone 163925 (TRAV4, TRAJ26)
IPADRKSSTLSLPRVYYGQNFVF

SEQ ID NO: 327850 - protein, 16 aa, Homo sapiens
  CDR3 for beta chain variable domain of TCR clone 163925 (TRBV7-2, TRBJ1-2)
CASNSNQDRRGHGYTF

SEQ ID NO: 327851 - protein, 14 aa, Homo sapiens
  CDR3 for alpha chain variable domain of TCR clone 163926 (TRAV12-3, TRAJ10)
SHLPLTGRGNKLTF

SEQ ID NO: 327852 - protein, 14 aa, Homo sapiens
  CDR3 for beta chain variable domain of TCR clone 163926 (TRBV4-1, TRBJ2-2)
CASSQAVNTGELFF

SEQ ID NO: 327853 - protein, 13 aa, Homo sapiens
  CDR3 for alpha chain variable domain of TCR clone 163927 (TRAV13-1, TRAJ21)
CPASIYNFNKFYF

SEQ ID NO: 327854 - protein, 15 aa, Homo sapiens
  CDR3 for beta chain variable domain of TCR clone 163927 (TRBV5-5, TRBJ1-5)
CASSLKGGGEQPQHF

SEQ ID NO: 327855 - protein, 13 aa, Homo sapiens
  CDR3 for alpha chain variable domain of TCR clone 163928 (TRAV13-1, TRAJ5)
CAARVTGRRALTF

SEQ ID NO: 327856 - protein, 15 aa, Homo sapiens
  CDR3 for beta chain variable domain of TCR clone 163928 (TRBV3-1, TRBJ2-7)
CASSQVRQGAYEQYF

SEQ ID NO: 327857 - protein, 15 aa, Homo sapiens
  CDR3 for alpha chain variable domain of TCR clone 163929 (TRAV12-1, TRAJ44)
CVVDKYTGTASKLTF

SEQ ID NO: 327858 - protein, 14 aa, Homo sapiens
  CDR3 for beta chain variable domain of TCR clone 163929 (TRBV5-1, TRBJ1-2)
CASSLEPVNYGYAF

SEQ ID NO: 327859 - protein, 13 aa, Homo sapiens
  CDR3 for alpha chain variable domain of TCR clone 163930 (TRAV13-1, TRAJ21)
CAASIYSFNKFYF

SEQ ID NO: 327860 - protein, 15 aa, Homo sapiens
  CDR3 for beta chain variable domain of TCR clone 163930 (TRBV27, TRBJ2-1)
CASSNGGGSSNEQFF

SEQ ID NO: 327861 - protein, 17 aa, Homo sapiens
  CDR3 for alpha chain variable domain of TCR clone 163931 (TRAV3, TRAJ42)
CAVRDRDYGGSQGNLIF

SEQ ID NO: 327862 - protein, 14 aa, Homo sapiens
  CDR3 for beta chain variable domain of TCR clone 163931 (TRBV5-1, TRBJ1-4)
CASSSGQGGEKLFF

SEQ ID NO: 327863 - protein, 14 aa, Homo sapiens
  CDR3 for alpha chain variable domain of TCR clone 163932 (TRAV27, TRAJ15)
CAGFENQAGTALIF

SEQ ID NO: 327864 - protein, 11 aa, Homo sapiens
  CDR3 for beta chain variable domain of TCR clone 163932 (TRBV29-1, TRBJ1-1)
CSVEVGTRTFF

SEQ ID NO: 327865 - protein, 13 aa, Homo sapiens
  CDR3 for alpha chain variable domain of TCR clone 163933 (TRAV21, TRAJ27)
CAARPGNAGKSAF

SEQ ID NO: 327866 - protein, 13 aa, Homo sapiens
  CDR3 for beta chain variable domain of TCR clone 163933 (TRBV20-1, TRBJ1-1)
CSARGGGNTEAFF

SEQ ID NO: 327867 - protein, 14 aa, Homo sapiens
  CDR3 for alpha chain variable domain of TCR clone 163934 (TRAV1-2, TRAJ16)
CAVNRFSDGQKLLF

SEQ ID NO: 327868 - protein, 15 aa, Homo sapiens
  CDR3 for beta chain variable domain of TCR clone 163934 (TRBV19, TRBJ2-1)
CASSHRDRGPNEQFF

SEQ ID NO: 327869 - protein, 13 aa, Homo sapiens
  CDR3 for alpha chain variable domain of TCR clone 163935 (TRAV27, TRAJ56)
YAGKPGANSKLTF

SEQ ID NO: 327870 - protein, 15 aa, Homo sapiens
  CDR3 for beta chain variable domain of TCR clone 163935 (TRBV6-1, TRBJ2-3)
CASSERWDSTDTQYF

SEQ ID NO: 327871 - protein, 11 aa, Homo sapiens
  CDR3 for alpha chain variable domain of TCR clone 163936 (TRAV12-3, TRAJ27)
CAMANAGRSTF

SEQ ID NO: 327872 - protein, 15 aa, Homo sapiens
  CDR3 for beta chain variable domain of TCR clone 163936 (TRBV20-1, TRBJ2-5)
CSAEGTGGLQETQYF

SEQ ID NO: 327873 - protein, 13 aa, Homo sapiens
  CDR3 for alpha chain variable domain of TCR clone 163937 (TRAV21, TRAJ20)
CAVGLRVDYKLSF

SEQ ID NO: 327874 - protein, 17 aa, Homo sapiens
  CDR3 for beta chain variable domain of TCR clone 163937 (TRBV5-4, TRBJ2-3)
CISVPAVLTASTDTQYF

SEQ ID NO: 327875 - protein, 14 aa, Homo sapiens
  CDR3 for alpha chain variable domain of TCR clone 163938 (TRAV2, TRAJ9)
CDVEDRSGGFKTIF

SEQ ID NO: 327876 - protein, 12 aa, Homo sapiens
  CDR3 for beta chain variable domain of TCR clone 163938 (TRBV7-9, TRBJ2-7)
CASSLEGYEQYF

SEQ ID NO: 327877 - protein, 15 aa, Homo sapiens
  CDR3 for alpha chain variable domain of TCR clone 163939 (TRAV9-2, TRAJ11)
CALSDGNSGYSTLTF

SEQ ID NO: 327878 - protein, 15 aa, Homo sapiens
  CDR3 for beta chain variable domain of TCR clone 163939 (TRBV2, TRBJ2-1)
CASSEIGGNYNEQFF

SEQ ID NO: 327879 - protein, 11 aa, Homo sapiens
  CDR3 for alpha chain variable domain of TCR clone 163940 (TRAV12-3, TRAJ43)
SAMSVSNDTRF

SEQ ID NO: 327880 - protein, 13 aa, Homo sapiens
  CDR3 for beta chain variable domain of TCR clone 163940 (TRBV20-1, TRBJ1-1)
CSAPLGGGTEAFF

SEQ ID NO: 327881 - protein, 13 aa, Homo sapiens
  CDR3 for alpha chain variable domain of TCR clone 163941 (TRAV27, TRAJ45)
CRSSGGGADGLTF

SEQ ID NO: 327882 - protein, 14 aa, Homo sapiens
  CDR3 for beta chain variable domain of TCR clone 163941 (TRBV20-1, TRBJ2-5)
CSASDSGSGETQYF

SEQ ID NO: 327883 - protein, 17 aa, Homo sapiens
  CDR3 for alpha chain variable domain of TCR clone 163942 (TRAV8-3, TRAJ32)
CAVGPLYYGGATNKLIF

SEQ ID NO: 327884 - protein, 15 aa, Homo sapiens
  CDR3 for beta chain variable domain of TCR clone 163942 (TRBV18, TRBJ1-2)
CASSPGNGLGYGYTF

SEQ ID NO: 327885 - protein, 18 aa, Homo sapiens
  CDR3 for alpha chain variable domain of TCR clone 163943 (TRAV26-2, TRAJ45)
CILRVDKYPGGGADGLTF

SEQ ID NO: 327886 - protein, 16 aa, Homo sapiens
  CDR3 for beta chain variable domain of TCR clone 163943 (TRBV2, TRBJ1-4)
CASNLLQGATNEKLFF

SEQ ID NO: 327887 - protein, 14 aa, Homo sapiens
  CDR3 for alpha chain variable domain of TCR clone 163944 (TRAV1-2, TRAJ8)
CAVREDTGFQKLVF

SEQ ID NO: 327888 - protein, 16 aa, Homo sapiens
  CDR3 for beta chain variable domain of TCR clone 163944 (TRBV29-1, TRBJ2-6)
CSVEYITYSGANVLTF

SEQ ID NO: 327889 - protein, 11 aa, Homo sapiens
  CDR3 for alpha chain variable domain of TCR clone 163945 (TRAV26-1, TRAJ37)
CIVRVGRKLIF

SEQ ID NO: 327890 - protein, 12 aa, Homo sapiens
  CDR3 for beta chain variable domain of TCR clone 163945 (TRBV14, TRBJ1-2)
CSSEDRRYGYTF

SEQ ID NO: 327891 - protein, 12 aa, Homo sapiens
  CDR3 for alpha chain variable domain of TCR clone 163946 (TRAV12-3, TRAJ17)
CAMTLTGNKLTF

SEQ ID NO: 327892 - protein, 14 aa, Homo sapiens
  CDR3 for beta chain variable domain of TCR clone 163946 (TRBV19, TRBJ2-1)
CASPTVVLSGEQFF

SEQ ID NO: 327893 - protein, 11 aa, Homo sapiens
  CDR3 for alpha chain variable domain of TCR clone 163947 (TRAV13-1, TRAJ24)
CAASGGGKWQF

SEQ ID NO: 327894 - protein, 14 aa, Homo sapiens
  CDR3 for beta chain variable domain of TCR clone 163947 (TRBV7-7, TRBJ2-2)
CATRQDSDTGELFF

SEQ ID NO: 327895 - protein, 12 aa, Homo sapiens
  CDR3 for alpha chain variable domain of TCR clone 163948 (TRAV35, TRAJ30)
CAGLNRDDKIIF

SEQ ID NO: 327896 - protein, 14 aa, Homo sapiens
  CDR3 for beta chain variable domain of TCR clone 163948 (TRBV19, TRBJ2-2)
CASSMVGLSGELFF

SEQ ID NO: 327897 - protein, 12 aa, Homo sapiens
  CDR3 for alpha chain variable domain of TCR clone 163949 (TRAV12-3, TRAJ42)
CATGGSQGNLIF

SEQ ID NO: 327898 - protein, 13 aa, Homo sapiens
  CDR3 for beta chain variable domain of TCR clone 163949 (TRBV5-7, TRBJ2-6)
CASTSSGANVLTV

SEQ ID NO: 327899 - protein, 13 aa, Homo sapiens
  CDR3 for alpha chain variable domain of TCR clone 163950 (TRAV13-2, TRAJ39)
CAENKNAGNMLTF

SEQ ID NO: 327900 - protein, 11 aa, Homo sapiens
  CDR3 for beta chain variable domain of TCR clone 163950 (TRBV7-2, TRBJ2-3)
CASSSSDTQYF

SEQ ID NO: 327901 - protein, 11 aa, Homo sapiens
  CDR3 for alpha chain variable domain of TCR clone 163951 (TRAV35, TRAJ30)
CAPGGDDKIIF

SEQ ID NO: 327902 - protein, 14 aa, Homo sapiens
  CDR3 for beta chain variable domain of TCR clone 163951 (TRBV7-6, TRBJ2-1)
CASGLGGGADEQFF

SEQ ID NO: 327903 - protein, 10 aa, Homo sapiens
  CDR3 for alpha chain variable domain of TCR clone 163952 (TRAV13-2, TRAJ49)
CADTGNQFYF

SEQ ID NO: 327904 - protein, 15 aa, Homo sapiens
  CDR3 for beta chain variable domain of TCR clone 163952 (TRBV6-6, TRBJ1-1)
CASSPRGDVETEDFF

SEQ ID NO: 327905 - protein, 12 aa, Homo sapiens
  CDR3 for alpha chain variable domain of TCR clone 163953 (TRAV13-1, TRAJ11)
CAGPSGYSTLTF

SEQ ID NO: 327906 - protein, 13 aa, Homo sapiens
  CDR3 for beta chain variable domain of TCR clone 163953 (TRBV12-4, TRBJ1-5)
CASSPHRAQPHHF

SEQ ID NO: 327907 - protein, 16 aa, Homo sapiens
  CDR3 for alpha chain variable domain of TCR clone 163954 (TRAV12-2, TRAJ32)
CAVNMNYGGATNKLIF

SEQ ID NO: 327908 - protein, 16 aa, Homo sapiens
  CDR3 for beta chain variable domain of TCR clone 163954 (TRBV7-8, TRBJ2-3)
CASSTEGQRETHTQYF

SEQ ID NO: 327909 - protein, 13 aa, Homo sapiens
  CDR3 for alpha chain variable domain of TCR clone 163955 (TRAV27, TRAJ37)
CAGGPSNPGKLIF

SEQ ID NO: 327910 - protein, 14 aa, Homo sapiens
  CDR3 for beta chain variable domain of TCR clone 163955 (TRBV7-8, TRBJ1-5)
CASSLGAFNQPQHF

SEQ ID NO: 327911 - protein, 14 aa, Homo sapiens
  CDR3 for alpha chain variable domain of TCR clone 163956 (TRAV1-2, TRAJ16)
CDVNRFSDGQKRLF

SEQ ID NO: 327912 - protein, 15 aa, Homo sapiens
  CDR3 for beta chain variable domain of TCR clone 163956 (TRBV7-9, TRBJ1-6)
CASSSTGRGNSPLHF

SEQ ID NO: 327913 - protein, 13 aa, Homo sapiens
  CDR3 for alpha chain variable domain of TCR clone 163957 (TRAV2, TRAJ40)
CAVVTSGTYKYIF

SEQ ID NO: 327914 - protein, 14 aa, Homo sapiens
  CDR3 for beta chain variable domain of TCR clone 163957 (TRBV19, TRBJ2-1)
CASPTVVLSSEQFF

SEQ ID NO: 327915 - protein, 12 aa, Homo sapiens
  CDR3 for alpha chain variable domain of TCR clone 163958 (TRAV13-1, TRAJ22)
CVPRGFCKATDL

SEQ ID NO: 327916 - protein, 13 aa, Homo sapiens
  CDR3 for beta chain variable domain of TCR clone 163958 (TRBV27, TRBJ1-1)
CASSLSIGAEAFF

SEQ ID NO: 327917 - protein, 14 aa, Homo sapiens
  CDR3 for alpha chain variable domain of TCR clone 163959 (TRAV12-2, TRAJ45)
CAVYSGGGADGLTF

SEQ ID NO: 327918 - protein, 14 aa, Homo sapiens
  CDR3 for beta chain variable domain of TCR clone 163959 (TRBV7-2, TRBJ2-1)
CASSLGVGYNEQFF

SEQ ID NO: 327919 - protein, 16 aa, Homo sapiens
  CDR3 for alpha chain variable domain of TCR clone 163960 (TRAV25, TRAJ53)
CAGPKGSGGSNDKLTF

SEQ ID NO: 327920 - protein, 15 aa, Homo sapiens
  CDR3 for beta chain variable domain of TCR clone 163960 (TRBV27, TRBJ2-1)
CASSNGGGSSNEQFF

SEQ ID NO: 327921 - protein, 10 aa, Homo sapiens
  CDR3 for alpha chain variable domain of TCR clone 163961 (TRAV8-3, TRAJ10)
LTGGGNKLTF

SEQ ID NO: 327922 - protein, 13 aa, Homo sapiens
  CDR3 for beta chain variable domain of TCR clone 163961 (TRBV7-9, TRBJ1-2)
CASSLKQNYGYTF

SEQ ID NO: 327923 - protein, 12 aa, Homo sapiens
  CDR3 for alpha chain variable domain of TCR clone 163962 (TRAV3, TRAJ31)
CAVRDGNASLIF

SEQ ID NO: 327924 - protein, 18 aa, Homo sapiens
  CDR3 for beta chain variable domain of TCR clone 163962 (TRBV7-2, TRBJ2-3)
CACSLKREGSGITDTQYF

SEQ ID NO: 327925 - protein, 14 aa, Homo sapiens
  CDR3 for alpha chain variable domain of TCR clone 163963 (TRAV20, TRAJ47)
CAVTFGEYGNKLVF

SEQ ID NO: 327926 - protein, 16 aa, Homo sapiens
  CDR3 for beta chain variable domain of TCR clone 163963 (TRBV4-2, TRBJ2-7)
CASSQDGVERGYEQYF

SEQ ID NO: 327927 - protein, 12 aa, Homo sapiens
  CDR3 for alpha chain variable domain of TCR clone 163964 (TRAV26-2, TRAJ21)
CILKGNFNKFYF

SEQ ID NO: 327928 - protein, 13 aa, Homo sapiens
  CDR3 for beta chain variable domain of TCR clone 163964 (TRBV28, TRBJ2-5)
CASSSRNQETQYF

SEQ ID NO: 327929 - protein, 13 aa, Homo sapiens
  CDR3 for alpha chain variable domain of TCR clone 163965 (TRAV27, TRAJ16)
CAGACSDGQTLLF

SEQ ID NO: 327930 - protein, 14 aa, Homo sapiens
  CDR3 for beta chain variable domain of TCR clone 163965 (TRBV11-2, TRBJ1-3)
CASSLAVPGNTIYF

SEQ ID NO: 327931 - protein, 15 aa, Homo sapiens
  CDR3 for alpha chain variable domain of TCR clone 163966 (TRAV14/DV4, TRAJ10)
CAMRELTGGGKKLTF

SEQ ID NO: 327932 - protein, 15 aa, Homo sapiens
  CDR3 for beta chain variable domain of TCR clone 163966 (TRBV3-1, TRBJ2-5)
CASSATLGGPETQYF

SEQ ID NO: 327933 - protein, 11 aa, Homo sapiens
  CDR3 for alpha chain variable domain of TCR clone 163967 (TRAV26-1, TRAJ37)
CIVRFGRKLIF

SEQ ID NO: 327934 - protein, 14 aa, Homo sapiens
  CDR3 for beta chain variable domain of TCR clone 163967 (TRBV11-3, TRBJ2-7)
CASSSRTGRYEQYF

SEQ ID NO: 327935 - protein, 14 aa, Homo sapiens
  CDR3 for alpha chain variable domain of TCR clone 163968 (TRAV1-1, TRAJ35)
CAVRSIGFGNVRHC

SEQ ID NO: 327936 - protein, 14 aa, Homo sapiens
  CDR3 for beta chain variable domain of TCR clone 163968 (TRBV5-7, TRBJ2-7)
CASSGGLSSYEQYF

SEQ ID NO: 327937 - protein, 13 aa, Homo sapiens
  CDR3 for alpha chain variable domain of TCR clone 163969 (TRAV3, TRAJ21)
CAVREPDFNKFYF

SEQ ID NO: 327938 - protein, 15 aa, Homo sapiens
  CDR3 for beta chain variable domain of TCR clone 163969 (TRBV7-2, TRBJ2-1)
CASSLASGRVNEQFF

SEQ ID NO: 327939 - protein, 14 aa, Homo sapiens
  CDR3 for alpha chain variable domain of TCR clone 163970 (TRAV13-1, TRAJ45)
CAAIGGGDADGLTF

SEQ ID NO: 327940 - protein, 16 aa, Homo sapiens
  CDR3 for beta chain variable domain of TCR clone 163970 (TRBV7-2, TRBJ1-1)
CASSLGAGWTNTEAFF

SEQ ID NO: 327941 - protein, 14 aa, Homo sapiens
  CDR3 for alpha chain variable domain of TCR clone 163971 (TRAV23/DV6, TRAJ22)
CAASVSGSARQLTF

SEQ ID NO: 327942 - protein, 16 aa, Homo sapiens
  CDR3 for beta chain variable domain of TCR clone 163971 (TRBV19, TRBJ2-2)
CASRSPGTGATGELFF

SEQ ID NO: 327943 - protein, 14 aa, Homo sapiens
  CDR3 for alpha chain variable domain of TCR clone 163972 (TRAV13-1, TRAJ35)
CAASKGGFGDVLHC

SEQ ID NO: 327944 - protein, 16 aa, Homo sapiens
  CDR3 for beta chain variable domain of TCR clone 163972 (TRBV5-4, TRBJ2-1)
CASSLVGSGQDNEQFF

SEQ ID NO: 327945 - protein, 17 aa, Homo sapiens
  CDR3 for alpha chain variable domain of TCR clone 163973 (TRAV13-1, TRAJ52)
CAASSGAGGTSYGKLTF

SEQ ID NO: 327946 - protein, 15 aa, Homo sapiens
  CDR3 for beta chain variable domain of TCR clone 163973 (TRBV28, TRBJ2-4)
CAAGSETLLMGIQYF

SEQ ID NO: 327947 - protein, 15 aa, Homo sapiens
  CDR3 for alpha chain variable domain of TCR clone 163974 (TRAV3, TRAJ22)
CAVRDRGGSARQLTF

SEQ ID NO: 327948 - protein, 13 aa, Homo sapiens
  CDR3 for beta chain variable domain of TCR clone 163974 (TRBV3-1, TRBJ1-1)
CASSPGVITEAFF

SEQ ID NO: 327949 - protein, 14 aa, Homo sapiens
  CDR3 for alpha chain variable domain of TCR clone 163975 (TRAV4, TRAJ30)
CLVGDMNREYKIIF

SEQ ID NO: 327950 - protein, 15 aa, Homo sapiens
  CDR3 for beta chain variable domain of TCR clone 163975 (TRBV7-2, TRBJ2-7)
CASSLSSGRTYEQYF

SEQ ID NO: 327951 - protein, 14 aa, Homo sapiens
  CDR3 for alpha chain variable domain of TCR clone 163976 (TRAV12-1, TRAJ17)
CVVNPKAAGNKLTF

SEQ ID NO: 327952 - protein, 11 aa, Homo sapiens
  CDR3 for beta chain variable domain of TCR clone 163976 (TRBV7-8, TRBJ2-7)
CASSLSLEQYF

SEQ ID NO: 327953 - protein, 15 aa, Homo sapiens
  CDR3 for alpha chain variable domain of TCR clone 163977 (TRAV1-2, TRAJ30)
CAVRPHGNRDDKIIF

SEQ ID NO: 327954 - protein, 13 aa, Homo sapiens
  CDR3 for beta chain variable domain of TCR clone 163977 (TRBV11-2, TRBJ2-5)
CASSSTGEETQYF

SEQ ID NO: 327955 - protein, 13 aa, Homo sapiens
  CDR3 for alpha chain variable domain of TCR clone 163978 (TRAV29/DV5, TRAJ31)
CAASRNNNARLMF

SEQ ID NO: 327956 - protein, 12 aa, Homo sapiens
  CDR3 for beta chain variable domain of TCR clone 163978 (TRBV14, TRBJ2-7)
CASSSLNGEQYF

SEQ ID NO: 327957 - protein, 15 aa, Homo sapiens
  CDR3 for alpha chain variable domain of TCR clone 163979 (TRAV26-1, TRAJ29)
CICRVEGSGNTPLVF

SEQ ID NO: 327958 - protein, 14 aa, Homo sapiens
  CDR3 for beta chain variable domain of TCR clone 163979 (TRBV18, TRBJ2-5)
CASSPGVSQETQYF

SEQ ID NO: 327959 - protein, 17 aa, Homo sapiens
  CDR3 for alpha chain variable domain of TCR clone 163980 (TRAV3, TRAJ42)
CAGRDRDYGGSQGNLIF

SEQ ID NO: 327960 - protein, 14 aa, Homo sapiens
  CDR3 for beta chain variable domain of TCR clone 163980 (TRBV12-5, TRBJ2-5)
CASGSRTHQETQYF

SEQ ID NO: 327961 - protein, 14 aa, Homo sapiens
  CDR3 for alpha chain variable domain of TCR clone 163981 (TRAV4, TRAJ17)
CLVGDMAAGNKLTF

SEQ ID NO: 327962 - protein, 15 aa, Homo sapiens
  CDR3 for beta chain variable domain of TCR clone 163981 (TRBV5-5, TRBJ1-5)
CASSSTPGSNKPQHF

SEQ ID NO: 327963 - protein, 11 aa, Homo sapiens
  CDR3 for alpha chain variable domain of TCR clone 163982 (TRAV26-1, TRAJ37)
CIVRVGRKLIF

SEQ ID NO: 327964 - protein, 18 aa, Homo sapiens
  CDR3 for beta chain variable domain of TCR clone 163982 (TRBV20-1, TRBJ2-6)
CSAETTPTHGSGANVLTF

SEQ ID NO: 327965 - protein, 14 aa, Homo sapiens
  CDR3 for alpha chain variable domain of TCR clone 163983 (TRAV29/DV5, TRAJ45)
CAASFRGGADGLTF

SEQ ID NO: 327966 - protein, 14 aa, Homo sapiens
  CDR3 for beta chain variable domain of TCR clone 163983 (TRBV7-9, TRBJ2-5)
CASSLDTAQETQYF

SEQ ID NO: 327967 - protein, 16 aa, Homo sapiens
  CDR3 for alpha chain variable domain of TCR clone 163984 (TRAV12-1, TRAJ45)
CVVIPYSGGGADGLTF

SEQ ID NO: 327968 - protein, 12 aa, Homo sapiens
  CDR3 for beta chain variable domain of TCR clone 163984 (TRBV6-5, TRBJ2-2)
CASRQITGELFF

SEQ ID NO: 327969 - protein, 13 aa, Homo sapiens
  CDR3 for alpha chain variable domain of TCR clone 163985 (TRAV3, TRAJ21)
CSVREPDFNKFYF

SEQ ID NO: 327970 - protein, 12 aa, Homo sapiens
  CDR3 for beta chain variable domain of TCR clone 163985 (TRBV11-2, TRBJ2-2)
CASSLPTGELFF

SEQ ID NO: 327971 - protein, 13 aa, Homo sapiens
  CDR3 for alpha chain variable domain of TCR clone 163986 (TRAV12-3, TRAJ33)
CAMSVNSNYQLIW

SEQ ID NO: 327972 - protein, 12 aa, Homo sapiens
  CDR3 for beta chain variable domain of TCR clone 163986 (TRBV11-2, TRBJ2-2)
CACSLGGGELFF

SEQ ID NO: 327973 - protein, 14 aa, Homo sapiens
  CDR3 for alpha chain variable domain of TCR clone 163987 (TRAV1-2, TRAJ8)
CAVRQDTGFQKLVF

SEQ ID NO: 327974 - protein, 16 aa, Homo sapiens
  CDR3 for beta chain variable domain of TCR clone 163987 (TRBV20-1, TRBJ1-4)
CSAPGQGLLTNEKLFF

SEQ ID NO: 327975 - protein, 17 aa, Homo sapiens
  CDR3 for alpha chain variable domain of TCR clone 163988 (TRAV8-6, TRAJ58)
CAVSSWVGETSGSRLTF

SEQ ID NO: 327976 - protein, 14 aa, Homo sapiens
  CDR3 for beta chain variable domain of TCR clone 163988 (TRBV7-2, TRBJ1-5)
CASSRDGSNQPQHF

SEQ ID NO: 327977 - protein, 12 aa, Homo sapiens
  CDR3 for alpha chain variable domain of TCR clone 163989 (TRAV16, TRAJ26)
CALRSYGQNFVF

SEQ ID NO: 327978 - protein, 15 aa, Homo sapiens
  CDR3 for beta chain variable domain of TCR clone 163989 (TRBV5-1, TRBJ2-7)
CASSLGDFTTYEQYF

SEQ ID NO: 327979 - protein, 13 aa, Homo sapiens
  CDR3 for alpha chain variable domain of TCR clone 163990 (TRAV36/DV7, TRAJ33)
CAVDIDSNYQLIW

SEQ ID NO: 327980 - protein, 13 aa, Homo sapiens
  CDR3 for beta chain variable domain of TCR clone 163990 (TRBV19, TRBJ1-2)
CASSVPGQDGYTF

SEQ ID NO: 327981 - protein, 14 aa, Homo sapiens
  CDR3 for alpha chain variable domain of TCR clone 163991 (TRAV1-2, TRAJ8)
CAVREDTGFQKLVF

SEQ ID NO: 327982 - protein, 15 aa, Homo sapiens
  CDR3 for beta chain variable domain of TCR clone 163991 (TRBV11-2, TRBJ2-2)
CASSLDGGNTGELFF

SEQ ID NO: 327983 - protein, 13 aa, Homo sapiens
  CDR3 for alpha chain variable domain of TCR clone 163992 (TRAV21, TRAJ27)
CAARPGNAGKSTF

SEQ ID NO: 327984 - protein, 14 aa, Homo sapiens
  CDR3 for beta chain variable domain of TCR clone 163992 (TRBV20-1, TRBJ2-1)
CRAAGGGEYNEQFF

SEQ ID NO: 327985 - protein, 19 aa, Homo sapiens
  CDR3 for alpha chain variable domain of TCR clone 163993 (TRAV2, TRAJ13)
CAARILGVTRKLPLELEQS

SEQ ID NO: 327986 - protein, 14 aa, Homo sapiens
  CDR3 for beta chain variable domain of TCR clone 163993 (TRBV19, TRBJ2-1)
CASEVTGARNEQFF

SEQ ID NO: 327987 - protein, 15 aa, Homo sapiens
  CDR3 for alpha chain variable domain of TCR clone 163994 (TRAV8-3, TRAJ45)
CASSYSGGGANGLTF

SEQ ID NO: 327988 - protein, 13 aa, Homo sapiens
  CDR3 for beta chain variable domain of TCR clone 163994 (TRBV20-1, TRBJ2-2)
CSASAAGTGELFF

SEQ ID NO: 327989 - protein, 16 aa, Homo sapiens
  CDR3 for alpha chain variable domain of TCR clone 163995 (TRAV3, TRAJ10)
CAVRDMRAGGGNKLTF

SEQ ID NO: 327990 - protein, 15 aa, Homo sapiens
  CDR3 for beta chain variable domain of TCR clone 163995 (TRBV19, TRBJ2-1)
CASSSPGVPLDEQFF

SEQ ID NO: 327991 - protein, 16 aa, Homo sapiens
  CDR3 for alpha chain variable domain of TCR clone 163996 (TRAV14/DV4, TRAJ54)
CAMREGRIQGAQKLVF

SEQ ID NO: 327992 - protein, 16 aa, Homo sapiens
  CDR3 for beta chain variable domain of TCR clone 163996 (TRBV12-4, TRBJ2-2)
CASSSQVGGPGGELFF

SEQ ID NO: 327993 - protein, 12 aa, Homo sapiens
  CDR3 for alpha chain variable domain of TCR clone 163997 (TRAV12-3, TRAJ17)
CAMTLTGNKLTC

SEQ ID NO: 327994 - protein, 14 aa, Homo sapiens
  CDR3 for beta chain variable domain of TCR clone 163997 (TRBV4-1, TRBJ2-7)
CASSQDREHVEQYF

SEQ ID NO: 327995 - protein, 15 aa, Homo sapiens
  CDR3 for alpha chain variable domain of TCR clone 163998 (TRAV13-1, TRAJ44)
CAASRGGGTASKLTF

SEQ ID NO: 327996 - protein, 15 aa, Homo sapiens
  CDR3 for beta chain variable domain of TCR clone 163998 (TRBV11-2, TRBJ2-7)
CASSRDRGIYYEQYF

SEQ ID NO: 327997 - protein, 12 aa, Homo sapiens
  CDR3 for alpha chain variable domain of TCR clone 163999 (TRAV3, TRAJ27)
CAVRDKAGKSTF

SEQ ID NO: 327998 - protein, 15 aa, Homo sapiens
  CDR3 for beta chain variable domain of TCR clone 163999 (TRBV9, TRBJ1-6)
CASSVAGTGDSPLHF

SEQ ID NO: 327999 - protein, 12 aa, Homo sapiens
  CDR3 for alpha chain variable domain of TCR clone 164000 (TRAV36/DV7, TRAJ54)
CAVVRGAQKLVF

SEQ ID NO: 328000 - protein, 15 aa, Homo sapiens
  CDR3 for beta chain variable domain of TCR clone 164000 (TRBV6-3, TRBJ2-2)
CASSFLATLTGELFF

SEQ ID NO: 328001 - protein, 13 aa, Homo sapiens
  CDR3 for alpha chain variable domain of TCR clone 164001 (TRAV13-1, TRAJ26)
CALVFGPGTRLSV

SEQ ID NO: 328002 - protein, 15 aa, Homo sapiens
  CDR3 for beta chain variable domain of TCR clone 164001 (TRBV12-4, TRBJ2-1)
CASSLLGRTYNEQFF

SEQ ID NO: 328003 - protein, 16 aa, Homo sapiens
  CDR3 for alpha chain variable domain of TCR clone 164002 (TRAV12-3, TRAJ53)
CAMSPGSGGSNYKLTF

SEQ ID NO: 328004 - protein, 14 aa, Homo sapiens
  CDR3 for beta chain variable domain of TCR clone 164002 (TRBV12-5, TRBJ2-5)
CASGSRTHQGTQYF

SEQ ID NO: 328005 - protein, 15 aa, Homo sapiens
  CDR3 for alpha chain variable domain of TCR clone 164003 (TRAV35, TRAJ40)
CAGQLGQAGTYKYIF

SEQ ID NO: 328006 - protein, 14 aa, Homo sapiens
  CDR3 for beta chain variable domain of TCR clone 164003 (TRBV7-3, TRBJ2-1)
CASSLAGGANEQFF

SEQ ID NO: 328007 - protein, 15 aa, Homo sapiens
  CDR3 for alpha chain variable domain of TCR clone 164004 (TRAV17, TRAJ37)
CATDGGSSNTRKLIF

SEQ ID NO: 328008 - protein, 15 aa, Homo sapiens
  CDR3 for beta chain variable domain of TCR clone 164004 (TRBV28, TRBJ2-5)
CASSSGRTIQETQYF

SEQ ID NO: 328009 - protein, 11 aa, Homo sapiens
  CDR3 for alpha chain variable domain of TCR clone 164005 (TRAV35, TRAJ34)
CWARNTDKLIF

SEQ ID NO: 328010 - protein, 14 aa, Homo sapiens
  CDR3 for beta chain variable domain of TCR clone 164005 (TRBV5-1, TRBJ2-7)
CASSRGESLYKQYF

SEQ ID NO: 328011 - protein, 14 aa, Homo sapiens
  CDR3 for alpha chain variable domain of TCR clone 164006 (TRAV12-2, TRAJ40)
CAAKIPSGAYKCIL

SEQ ID NO: 328012 - protein, 14 aa, Homo sapiens
  CDR3 for beta chain variable domain of TCR clone 164006 (TRBV20-1, TRBJ1-1)
CSAQTRIGGTDAFF

SEQ ID NO: 328013 - protein, 14 aa, Homo sapiens
  CDR3 for alpha chain variable domain of TCR clone 164007 (TRAV12-2, TRAJ17)
CAVLFKAAGNKLTF

SEQ ID NO: 328014 - protein, 15 aa, Homo sapiens
  CDR3 for beta chain variable domain of TCR clone 164007 (TRBV5-5, TRBJ1-5)
CASSSTPGSNQTQHF

SEQ ID NO: 328015 - protein, 14 aa, Homo sapiens
  CDR3 for alpha chain variable domain of TCR clone 164008 (TRAV3, TRAJ16)
CAVSLFSDGQKLLF

SEQ ID NO: 328016 - protein, 15 aa, Homo sapiens
  CDR3 for beta chain variable domain of TCR clone 164008 (TRBV6-1, TRBJ2-3)
CASSERGGITDTQYF

SEQ ID NO: 328017 - protein, 12 aa, Homo sapiens
  CDR3 for alpha chain variable domain of TCR clone 164009 (TRAV12-3, TRAJ17)
CAMTLTGNKLTF

SEQ ID NO: 328018 - protein, 16 aa, Homo sapiens
  CDR3 for beta chain variable domain of TCR clone 164009 (TRBV19, TRBJ2-1)
CASSKAGPRSYNEQFF

SEQ ID NO: 328019 - protein, 15 aa, Homo sapiens
  CDR3 for alpha chain variable domain of TCR clone 164010 (TRAV20, TRAJ53)
CAVQASGGSNYKLTF

SEQ ID NO: 328020 - protein, 13 aa, Homo sapiens
  CDR3 for beta chain variable domain of TCR clone 164010 (TRBV7-3, TRBJ1-1)
CASSQDWGAEAFF

SEQ ID NO: 328021 - protein, 12 aa, Homo sapiens
  CDR3 for alpha chain variable domain of TCR clone 164011 (TRAV27, TRAJ38)
CADAVMLATTIS

SEQ ID NO: 328022 - protein, 13 aa, Homo sapiens
  CDR3 for beta chain variable domain of TCR clone 164011 (TRBV12-5, TRBJ2-3)
CASGDRQSDTQYF

SEQ ID NO: 328023 - protein, 12 aa, Homo sapiens
  CDR3 for alpha chain variable domain of TCR clone 164012 (TRAV1-1, TRAJ16)
CAEMARSCSLQG

SEQ ID NO: 328024 - protein, 16 aa, Homo sapiens
  CDR3 for beta chain variable domain of TCR clone 164012 (TRBV7-3, TRBJ2-1)
CASSLEGYRSYNEQFF

SEQ ID NO: 328025 - protein, 15 aa, Homo sapiens
  CDR3 for alpha chain variable domain of TCR clone 164013 (TRAV12-1, TRAJ9)
CVVSFGDTGGFKTIF

SEQ ID NO: 328026 - protein, 16 aa, Homo sapiens
  CDR3 for beta chain variable domain of TCR clone 164013 (TRBV7-2, TRBJ2-7)
CASSLEAGGPWYEQYF

SEQ ID NO: 328027 - protein, 14 aa, Homo sapiens
  CDR3 for alpha chain variable domain of TCR clone 164014 (TRAV23/DV6, TRAJ23)
CAAGPYNQGGKLIF

SEQ ID NO: 328028 - protein, 17 aa, Homo sapiens
  CDR3 for beta chain variable domain of TCR clone 164014 (TRBV4-2, TRBJ1-1)
CASSQVATGGMNTDAFF

SEQ ID NO: 328029 - protein, 13 aa, Homo sapiens
  CDR3 for alpha chain variable domain of TCR clone 164015 (TRAV12-2, TRAJ24)
FAVSTDSWGKLRF

SEQ ID NO: 328030 - protein, 14 aa, Homo sapiens
  CDR3 for beta chain variable domain of TCR clone 164015 (TRBV25-1, TRBJ1-1)
CASTHLGGNTEAFF

SEQ ID NO: 328031 - protein, 13 aa, Homo sapiens
  CDR3 for alpha chain variable domain of TCR clone 164016 (TRAV35, TRAJ42)
CAGFPGSQGNLIF

SEQ ID NO: 328032 - protein, 14 aa, Homo sapiens
  CDR3 for beta chain variable domain of TCR clone 164016 (TRBV11-2, TRBJ2-7)
CASSLGAGAYEQYF

SEQ ID NO: 328033 - protein, 12 aa, Homo sapiens
  CDR3 for alpha chain variable domain of TCR clone 164017 (TRAV23/DV6, TRAJ30)
CAASKGDDKIIF

SEQ ID NO: 328034 - protein, 13 aa, Homo sapiens
  CDR3 for beta chain variable domain of TCR clone 164017 (TRBV19, TRBJ1-2)
CASSQGQVYGYTF

SEQ ID NO: 328035 - protein, 13 aa, Homo sapiens
  CDR3 for alpha chain variable domain of TCR clone 164018 (TRAV38-2/DV8, TRAJ34)
CAYRNYNTDELLF

SEQ ID NO: 328036 - protein, 15 aa, Homo sapiens
  CDR3 for beta chain variable domain of TCR clone 164018 (TRBV20-1, TRBJ2-5)
CSAEGTGGLQETQYF

SEQ ID NO: 328037 - protein, 14 aa, Homo sapiens
  CDR3 for alpha chain variable domain of TCR clone 164019 (TRAV13-1, TRAJ40)
CAASMTSGTYKYIF

SEQ ID NO: 328038 - protein, 15 aa, Homo sapiens
  CDR3 for beta chain variable domain of TCR clone 164019 (TRBV7-9, TRBJ1-4)
CASSRTGGFNEKLFF

SEQ ID NO: 328039 - protein, 13 aa, Homo sapiens
  CDR3 for alpha chain variable domain of TCR clone 164020 (TRAV12-3, TRAJ33)
CAMSPNSNYQLIW

SEQ ID NO: 328040 - protein, 13 aa, Homo sapiens
  CDR3 for beta chain variable domain of TCR clone 164020 (TRBV7-2, TRBJ2-2)
CASSLAVTGELFF

SEQ ID NO: 328041 - protein, 19 aa, Homo sapiens
  CDR3 for alpha chain variable domain of TCR clone 164021 (TRAV39, TRAJ43)
PCMTSLPPTSVPWANDMRF

SEQ ID NO: 328042 - protein, 12 aa, Homo sapiens
  CDR3 for beta chain variable domain of TCR clone 164021 (TRBV4-1, TRBJ2-3)
CASSQGTDTQYF

SEQ ID NO: 328043 - protein, 13 aa, Homo sapiens
  CDR3 for alpha chain variable domain of TCR clone 164022 (TRAV12-2, TRAJ37)
CAGGSGNTGKLIF

SEQ ID NO: 328044 - protein, 13 aa, Homo sapiens
  CDR3 for beta chain variable domain of TCR clone 164022 (TRBV7-2, TRBJ2-2)
CASSLAVTGELFF

SEQ ID NO: 328045 - protein, 11 aa, Homo sapiens
  CDR3 for alpha chain variable domain of TCR clone 164023 (TRAV12-1, TRAJ43)
CVEYDNNDMRF

SEQ ID NO: 328046 - protein, 16 aa, Homo sapiens
  CDR3 for beta chain variable domain of TCR clone 164023 (TRBV5-4, TRBJ2-1)
CASRLVGSGQDNEQFF

SEQ ID NO: 328047 - protein, 13 aa, Homo sapiens
  CDR3 for alpha chain variable domain of TCR clone 164024 (TRAV25, TRAJ26)
CAGMDNYGQNFVF

SEQ ID NO: 328048 - protein, 15 aa, Homo sapiens
  CDR3 for beta chain variable domain of TCR clone 164024 (TRBV2, TRBJ2-1)
CASSELAGGYNEQFF

SEQ ID NO: 328049 - protein, 14 aa, Homo sapiens
  CDR3 for alpha chain variable domain of TCR clone 164025 (TRAV12-2, TRAJ31)
CAVSRGPDNARLMF

SEQ ID NO: 328050 - protein, 13 aa, Homo sapiens
  CDR3 for beta chain variable domain of TCR clone 164025 (TRBV10-3, TRBJ2-7)
CASKLAVNYEQYF

SEQ ID NO: 328051 - protein, 16 aa, Homo sapiens
  CDR3 for alpha chain variable domain of TCR clone 164026 (TRAV30, TRAJ24)
CGTEIVDAASWGKLQL

SEQ ID NO: 328052 - protein, 14 aa, Homo sapiens
  CDR3 for beta chain variable domain of TCR clone 164026 (TRBV12-5, TRBJ2-5)
CASGSRTHQETQYF

SEQ ID NO: 328053 - protein, 14 aa, Homo sapiens
  CDR3 for alpha chain variable domain of TCR clone 164027 (TRAV35, TRAJ22)
CAGLEPGSARQLTF

SEQ ID NO: 328054 - protein, 15 aa, Homo sapiens
  CDR3 for beta chain variable domain of TCR clone 164027 (TRBV12-4, TRBJ2-5)
CASSPPTGLQETQYF

SEQ ID NO: 328055 - protein, 18 aa, Homo sapiens
  CDR3 for alpha chain variable domain of TCR clone 164028 (TRAV20, TRAJ4)
CAVQPYYMFSGGYNKLNF

SEQ ID NO: 328056 - protein, 13 aa, Homo sapiens
  CDR3 for beta chain variable domain of TCR clone 164028 (TRBV19, TRBJ2-3)
CATWDKITDTQYF

SEQ ID NO: 328057 - protein, 14 aa, Homo sapiens
  CDR3 for alpha chain variable domain of TCR clone 164029 (TRAV1-2, TRAJ16)
CAVNRFSDGQKLLF

SEQ ID NO: 328058 - protein, 15 aa, Homo sapiens
  CDR3 for beta chain variable domain of TCR clone 164029 (TRBV20-1, TRBJ1-1)
CSARGGGTLKLSLDK

SEQ ID NO: 328059 - protein, 14 aa, Homo sapiens
  CDR3 for alpha chain variable domain of TCR clone 164030 (TRAV2, TRAJ37)
CAVDFTSNTGKLIF

SEQ ID NO: 328060 - protein, 14 aa, Homo sapiens
  CDR3 for beta chain variable domain of TCR clone 164030 (TRBV28, TRBJ2-1)
CASSLVAPYNEQFF

SEQ ID NO: 328061 - protein, 15 aa, Homo sapiens
  CDR3 for alpha chain variable domain of TCR clone 164031 (TRAV2, TRAJ15)
CAVEDRGQAGTALIF

SEQ ID NO: 328062 - protein, 15 aa, Homo sapiens
  CDR3 for beta chain variable domain of TCR clone 164031 (TRBV4-1, TRBJ1-4)
CASSDTGGTNEKLFF

SEQ ID NO: 328063 - protein, 10 aa, Homo sapiens
  CDR3 for alpha chain variable domain of TCR clone 164032 (TRAV2, TRAJ34)
CAVVNDKLIF

SEQ ID NO: 328064 - protein, 14 aa, Homo sapiens
  CDR3 for beta chain variable domain of TCR clone 164032 (TRBV3-1, TRBJ2-2)
CQQPRLDSRRELFF

SEQ ID NO: 328065 - protein, 15 aa, Homo sapiens
  CDR3 for alpha chain variable domain of TCR clone 164033 (TRAV3, TRAJ7)
CAVRDKDNGNNRLAF

SEQ ID NO: 328066 - protein, 14 aa, Homo sapiens
  CDR3 for beta chain variable domain of TCR clone 164033 (TRBV4-1, TRBJ2-2)
CASSQAVNTGELFF

SEQ ID NO: 328067 - protein, 15 aa, Homo sapiens
  CDR3 for alpha chain variable domain of TCR clone 164034 (TRAV4, TRAJ26)
CLVGDMNNYGQNFVF

SEQ ID NO: 328068 - protein, 16 aa, Homo sapiens
  CDR3 for beta chain variable domain of TCR clone 164034 (TRBV28, TRBJ1-4)
CASSSGTGAANEKLFF

SEQ ID NO: 328069 - protein, 15 aa, Homo sapiens
  CDR3 for alpha chain variable domain of TCR clone 164035 (TRAV8-3, TRAJ27)
CAVGASKTNAGKSTS

SEQ ID NO: 328070 - protein, 15 aa, Homo sapiens
  CDR3 for beta chain variable domain of TCR clone 164035 (TRBV7-2, TRBJ2-1)
CASSSGLAGGNEQFF

SEQ ID NO: 328071 - protein, 14 aa, Homo sapiens
  CDR3 for alpha chain variable domain of TCR clone 164036 (TRAV12-1, TRAJ30)
CAVNIGGRDGKIIF

SEQ ID NO: 328072 - protein, 14 aa, Homo sapiens
  CDR3 for beta chain variable domain of TCR clone 164036 (TRBV7-6, TRBJ2-3)
CASSLGTVTDTQYF

SEQ ID NO: 328073 - protein, 10 aa, Homo sapiens
  CDR3 for alpha chain variable domain of TCR clone 164037 (TRAV12-1, TRAJ43)
CVVHNNDMRF

SEQ ID NO: 328074 - protein, 13 aa, Homo sapiens
  CDR3 for beta chain variable domain of TCR clone 164037 (TRBV12-4, TRBJ1-2)
CAISSGLTVISTF

SEQ ID NO: 328075 - protein, 18 aa, Homo sapiens
  CDR3 for alpha chain variable domain of TCR clone 164038 (TRAV1-2, TRAJ18)
CAVRDMGDRGSTLGRLYF

SEQ ID NO: 328076 - protein, 13 aa, Homo sapiens
  CDR3 for beta chain variable domain of TCR clone 164038 (TRBV9, TRBJ2-7)
CASSASDSYEQYF

SEQ ID NO: 328077 - protein, 15 aa, Homo sapiens
  CDR3 for alpha chain variable domain of TCR clone 164039 (TRAV38-1, TRAJ37)
FAFIHGSGNTGQLIF

SEQ ID NO: 328078 - protein, 12 aa, Homo sapiens
  CDR3 for beta chain variable domain of TCR clone 164039 (TRBV7-9, TRBJ2-7)
CASSFGSYEQYF

SEQ ID NO: 328079 - protein, 15 aa, Homo sapiens
  CDR3 for alpha chain variable domain of TCR clone 164040 (TRAV8-4, TRAJ37)
CAVSRGSGNTGKLIF

SEQ ID NO: 328080 - protein, 15 aa, Homo sapiens
  CDR3 for beta chain variable domain of TCR clone 164040 (TRBV6-1, TRBJ2-3)
CASSERGGITDTQYF

SEQ ID NO: 328081 - protein, 14 aa, Homo sapiens
  CDR3 for alpha chain variable domain of TCR clone 164041 (TRAV13-1, TRAJ35)
CAASKGVFGNVLHC

SEQ ID NO: 328082 - protein, 16 aa, Homo sapiens
  CDR3 for beta chain variable domain of TCR clone 164041 (TRBV2, TRBJ1-4)
CASNLLQGATNEKLFF

SEQ ID NO: 328083 - protein, 16 aa, Homo sapiens
  CDR3 for alpha chain variable domain of TCR clone 164042 (TRAV30, TRAJ24)
CGTEIVGADSWGKFQF

SEQ ID NO: 328084 - protein, 13 aa, Homo sapiens
  CDR3 for beta chain variable domain of TCR clone 164042 (TRBV7-2, TRBJ1-3)
CASSLAPGNTIYF

SEQ ID NO: 328085 - protein, 14 aa, Homo sapiens
  CDR3 for alpha chain variable domain of TCR clone 164043 (TRAV29/DV5, TRAJ36)
CAARRKTGANNLFF

SEQ ID NO: 328086 - protein, 13 aa, Homo sapiens
  CDR3 for beta chain variable domain of TCR clone 164043 (TRBV19, TRBJ2-5)
CASSGRAGETQYF

SEQ ID NO: 328087 - protein, 17 aa, Homo sapiens
  CDR3 for alpha chain variable domain of TCR clone 164044 (TRAV3, TRAJ6)
CAVRDGPRVGGSYIPKF

SEQ ID NO: 328088 - protein, 14 aa, Homo sapiens
  CDR3 for beta chain variable domain of TCR clone 164044 (TRBV7-2, TRBJ2-7)
CASSPKTSFYEQYF

SEQ ID NO: 328089 - protein, 14 aa, Homo sapiens
  CDR3 for alpha chain variable domain of TCR clone 164045 (TRAV12-2, TRAJ40)
CAVKIPSGTYKYIF

SEQ ID NO: 328090 - protein, 20 aa, Homo sapiens
  CDR3 for beta chain variable domain of TCR clone 164045 (TRBV28, TRBJ2-1)
CASTPIGRSPGLAEGNEQFF

SEQ ID NO: 328091 - protein, 14 aa, Homo sapiens
  CDR3 for alpha chain variable domain of TCR clone 164046 (TRAV26-2, TRAJ54)
CILSRIQGAQKLVF

SEQ ID NO: 328092 - protein, 15 aa, Homo sapiens
  CDR3 for beta chain variable domain of TCR clone 164046 (TRBV7-9, TRBJ1-1)
CASSLLEQGGTEAFF

SEQ ID NO: 328093 - protein, 13 aa, Homo sapiens
  CDR3 for alpha chain variable domain of TCR clone 164047 (TRAV30, TRAJ34)
RGTVGYNTDKLIF

SEQ ID NO: 328094 - protein, 16 aa, Homo sapiens
  CDR3 for beta chain variable domain of TCR clone 164047 (TRBV7-9, TRBJ1-2)
CASSLGFSSGEDGYSF

SEQ ID NO: 328095 - protein, 21 aa, Homo sapiens
  CDR3 for alpha chain variable domain of TCR clone 164048 (TRAV12-1, TRAJ37)
CVVNGGPWQHRQTNLWARDNF

SEQ ID NO: 328096 - protein, 12 aa, Homo sapiens
  CDR3 for beta chain variable domain of TCR clone 164048 (TRBV20-1, TRBJ1-2)
CSAPGVNYGYTF

SEQ ID NO: 328097 - protein, 15 aa, Homo sapiens
  CDR3 for alpha chain variable domain of TCR clone 164049 (TRAV3, TRAJ27)
CAVRDPLTNAAKSTF

SEQ ID NO: 328098 - protein, 15 aa, Homo sapiens
  CDR3 for beta chain variable domain of TCR clone 164049 (TRBV28, TRBJ2-1)
CASSIIAGGRSEQFF

SEQ ID NO: 328099 - protein, 15 aa, Homo sapiens
  CDR3 for alpha chain variable domain of TCR clone 164050 (TRAV38-1, TRAJ37)
CAFIHGSGNTGKLIF

SEQ ID NO: 328100 - protein, 14 aa, Homo sapiens
  CDR3 for beta chain variable domain of TCR clone 164050 (TRBV19, TRBJ2-1)
CASPTFVLSGEQFF

SEQ ID NO: 328101 - protein, 14 aa, Homo sapiens
  CDR3 for alpha chain variable domain of TCR clone 164051 (TRAV17, TRAJ23)
CATALGGQGGKLIF

SEQ ID NO: 328102 - protein, 14 aa, Homo sapiens
  CDR3 for beta chain variable domain of TCR clone 164051 (TRBV7-2, TRBJ2-7)
CASSPKTSFYEQYF

SEQ ID NO: 328103 - protein, 10 aa, Homo sapiens
  CDR3 for alpha chain variable domain of TCR clone 164052 (TRAV16, TRAJ22)
SAMYLRQLTF

SEQ ID NO: 328104 - protein, 18 aa, Homo sapiens
  CDR3 for beta chain variable domain of TCR clone 164052 (TRBV27, TRBJ2-3)
CASSKGTSGRTSTDTQYF

SEQ ID NO: 328105 - protein, 16 aa, Homo sapiens
  CDR3 for alpha chain variable domain of TCR clone 164053 (TRAV30, TRAJ24)
CGTEIVDADSWGKFQF

SEQ ID NO: 328106 - protein, 18 aa, Homo sapiens
  CDR3 for beta chain variable domain of TCR clone 164053 (TRBV20-1, TRBJ2-3)
CSAAGLAGGPGTTDTQYF

SEQ ID NO: 328107 - protein, 15 aa, Homo sapiens
  CDR3 for alpha chain variable domain of TCR clone 164054 (TRAV21, TRAJ40)
CVVRPQTSGTYKYIF

SEQ ID NO: 328108 - protein, 13 aa, Homo sapiens
  CDR3 for beta chain variable domain of TCR clone 164054 (TRBV7-2, TRBJ2-2)
CASSSVRAGELFF

SEQ ID NO: 328109 - protein, 17 aa, Homo sapiens
  CDR3 for alpha chain variable domain of TCR clone 164055 (TRAV26-1, TRAJ53)
CIVRVDDSGGSNYKMTF

SEQ ID NO: 328110 - protein, 15 aa, Homo sapiens
  CDR3 for beta chain variable domain of TCR clone 164055 (TRBV20-1, TRBJ1-2)
CSARDPLRQGYGYTF

SEQ ID NO: 328111 - protein, 11 aa, Homo sapiens
  CDR3 for alpha chain variable domain of TCR clone 164056 (TRAV3, TRAJ21)
CAVGNFKQFYF

SEQ ID NO: 328112 - protein, 15 aa, Homo sapiens
  CDR3 for beta chain variable domain of TCR clone 164056 (TRBV5-1, TRBJ2-1)
CASSLVANSYNEQFF

SEQ ID NO: 328113 - protein, 14 aa, Homo sapiens
  CDR3 for alpha chain variable domain of TCR clone 164057 (TRAV4, TRAJ23)
CLVGAGNQGGKLIF

SEQ ID NO: 328114 - protein, 15 aa, Homo sapiens
  CDR3 for beta chain variable domain of TCR clone 164057 (TRBV7-8, TRBJ1-5)
CASSLERRGLEPQHF

SEQ ID NO: 328115 - protein, 14 aa, Homo sapiens
  CDR3 for alpha chain variable domain of TCR clone 164058 (TRAV34, TRAJ22)
CGADTSGSARQLTF

SEQ ID NO: 328116 - protein, 12 aa, Homo sapiens
  CDR3 for beta chain variable domain of TCR clone 164058 (TRBV11-2, TRBJ2-2)
CASSLGGGELFF

SEQ ID NO: 328117 - protein, 14 aa, Homo sapiens
  CDR3 for alpha chain variable domain of TCR clone 164059 (TRAV38-1, TRAJ45)
CAYYSGGGADGLTF

SEQ ID NO: 328118 - protein, 16 aa, Homo sapiens
  CDR3 for beta chain variable domain of TCR clone 164059 (TRBV2, TRBJ1-3)
CASSRTGGSTGNTIYF

SEQ ID NO: 328119 - protein, 15 aa, Homo sapiens
  CDR3 for alpha chain variable domain of TCR clone 164060 (TRAV3, TRAJ22)
CAVRDRGGSARQLTF

SEQ ID NO: 328120 - protein, 15 aa, Homo sapiens
  CDR3 for beta chain variable domain of TCR clone 164060 (TRBV11-2, TRBJ1-1)
CASSSRSSLLLSLDR

SEQ ID NO: 328121 - protein, 14 aa, Homo sapiens
  CDR3 for alpha chain variable domain of TCR clone 164061 (TRAV16, TRAJ26)
CALSSANYGQNFVF

SEQ ID NO: 328122 - protein, 16 aa, Homo sapiens
  CDR3 for beta chain variable domain of TCR clone 164061 (TRBV12-5, TRBJ2-5)
CASGPRTSGNQETQYF

SEQ ID NO: 328123 - protein, 13 aa, Homo sapiens
  CDR3 for alpha chain variable domain of TCR clone 164062 (TRAV8-3, TRAJ36)
CAVGATGANNLFF

SEQ ID NO: 328124 - protein, 15 aa, Homo sapiens
  CDR3 for beta chain variable domain of TCR clone 164062 (TRBV28, TRBJ2-5)
CASSPPWSYQETQYF

SEQ ID NO: 328125 - protein, 11 aa, Homo sapiens
  CDR3 for alpha chain variable domain of TCR clone 164063 (TRAV13-2, TRAJ23)
CAESPRGKLIF

SEQ ID NO: 328126 - protein, 15 aa, Homo sapiens
  CDR3 for beta chain variable domain of TCR clone 164063 (TRBV15, TRBJ1-5)
CATSRDPVSNQPQHF

SEQ ID NO: 328127 - protein, 14 aa, Homo sapiens
  CDR3 for alpha chain variable domain of TCR clone 164064 (TRAV1-2, TRAJ16)
CAVNRFSDGQKLLI

SEQ ID NO: 328128 - protein, 14 aa, Homo sapiens
  CDR3 for beta chain variable domain of TCR clone 164064 (TRBV7-2, TRBJ2-7)
CASSPKTSFYEQYF

SEQ ID NO: 328129 - protein, 14 aa, Homo sapiens
  CDR3 for alpha chain variable domain of TCR clone 164065 (TRAV6, TRAJ6)
CALPTSGGSYITTF

SEQ ID NO: 328130 - protein, 17 aa, Homo sapiens
  CDR3 for beta chain variable domain of TCR clone 164065 (TRBV5-1, TRBJ2-5)
CASSPVVLGQNQETQYF

SEQ ID NO: 328131 - protein, 13 aa, Homo sapiens
  CDR3 for alpha chain variable domain of TCR clone 164066 (TRAV21, TRAJ10)
CAVPTGGGNKLTF

SEQ ID NO: 328132 - protein, 16 aa, Homo sapiens
  CDR3 for beta chain variable domain of TCR clone 164066 (TRBV19, TRBJ2-1)
CASSKVGPSSYNEQFF

SEQ ID NO: 328133 - protein, 14 aa, Homo sapiens
  CDR3 for alpha chain variable domain of TCR clone 164067 (TRAV1-2, TRAJ8)
CAVREDTGFQTLVF

SEQ ID NO: 328134 - protein, 15 aa, Homo sapiens
  CDR3 for beta chain variable domain of TCR clone 164067 (TRBV7-3, TRBJ2-2)
CASSETGQGTGELFL

SEQ ID NO: 328135 - protein, 16 aa, Homo sapiens
  CDR3 for alpha chain variable domain of TCR clone 164068 (TRAV26-1, TRAJ37)
CIVRGDCSGNTGKLIF

SEQ ID NO: 328136 - protein, 15 aa, Homo sapiens
  CDR3 for beta chain variable domain of TCR clone 164068 (TRBV19, TRBJ2-1)
CASSIGLAGWDEQFF

SEQ ID NO: 328137 - protein, 11 aa, Homo sapiens
  CDR3 for alpha chain variable domain of TCR clone 164069 (TRAV13-1, TRAJ39)
CAPHAGNMLTF

SEQ ID NO: 328138 - protein, 15 aa, Homo sapiens
  CDR3 for beta chain variable domain of TCR clone 164069 (TRBV6-3, TRBJ2-7)
WASSSPGTVFYEQYF

SEQ ID NO: 328139 - protein, 20 aa, Homo sapiens
  CDR3 for alpha chain variable domain of TCR clone 164070 (TRAV21, TRAJ4)
AASQPGDSATLAGGYNNLIF

SEQ ID NO: 328140 - protein, 14 aa, Homo sapiens
  CDR3 for beta chain variable domain of TCR clone 164070 (TRBV6-3, TRBJ1-1)
CASSYQRRDTEAFF

SEQ ID NO: 328141 - protein, 15 aa, Homo sapiens
  CDR3 for alpha chain variable domain of TCR clone 164071 (TRAV20, TRAJ54)
CAVQARIQGAQKLVF

SEQ ID NO: 328142 - protein, 12 aa, Homo sapiens
  CDR3 for beta chain variable domain of TCR clone 164071 (TRBV7-8, TRBJ2-7)
CASSLGDREQYF

SEQ ID NO: 328143 - protein, 13 aa, Homo sapiens
  CDR3 for alpha chain variable domain of TCR clone 164072 (TRAV2, TRAJ15)
CAVASQAGTALIF

SEQ ID NO: 328144 - protein, 13 aa, Homo sapiens
  CDR3 for beta chain variable domain of TCR clone 164072 (TRBV11-2, TRBJ2-5)
CASSSTGEETQYF

SEQ ID NO: 328145 - protein, 14 aa, Homo sapiens
  CDR3 for alpha chain variable domain of TCR clone 164073 (TRAV1-2, TRAJ8)
CAVREDTGFQKLVF

SEQ ID NO: 328146 - protein, 12 aa, Homo sapiens
  CDR3 for beta chain variable domain of TCR clone 164073 (TRBV12-4, TRBJ2-1)
CASSPGRNEHFF

SEQ ID NO: 328147 - protein, 13 aa, Homo sapiens
  CDR3 for alpha chain variable domain of TCR clone 164074 (TRAV21, TRAJ20)
CAVGLRVDYKLSF

SEQ ID NO: 328148 - protein, 13 aa, Homo sapiens
  CDR3 for beta chain variable domain of TCR clone 164074 (TRBV6-1, TRBJ1-1)
CASSRQGNTEPFF

SEQ ID NO: 328149 - protein, 15 aa, Homo sapiens
  CDR3 for alpha chain variable domain of TCR clone 164075 (TRAV13-1, TRAJ44)
RAASRGGGTASKLTF

SEQ ID NO: 328150 - protein, 12 aa, Homo sapiens
  CDR3 for beta chain variable domain of TCR clone 164075 (TRBV11-2, TRBJ2-2)
CASSLGGGELFF

SEQ ID NO: 328151 - protein, 14 aa, Homo sapiens
  CDR3 for alpha chain variable domain of TCR clone 164076 (TRAV9-2, TRAJ39)
RALYIYNAGNMLTF

SEQ ID NO: 328152 - protein, 19 aa, Homo sapiens
  CDR3 for beta chain variable domain of TCR clone 164076 (TRBV5-1, TRBJ2-3)
CASSLWLAGGITTTDTQYF

SEQ ID NO: 328153 - protein, 12 aa, Homo sapiens
  CDR3 for alpha chain variable domain of TCR clone 164077 (TRAV12-3, TRAJ17)
CAMTLTGNKLTF

SEQ ID NO: 328154 - protein, 13 aa, Homo sapiens
  CDR3 for beta chain variable domain of TCR clone 164077 (TRBV7-2, TRBJ1-5)
CASSLAEGGANEF

SEQ ID NO: 328155 - protein, 13 aa, Homo sapiens
  CDR3 for alpha chain variable domain of TCR clone 164078 (TRAV12-1, TRAJ34)
CGEPLRNTDKLIL

SEQ ID NO: 328156 - protein, 15 aa, Homo sapiens
  CDR3 for beta chain variable domain of TCR clone 164078 (TRBV3-1, TRBJ2-2)
CASSQDWTRAGELFF

SEQ ID NO: 328157 - protein, 17 aa, Homo sapiens
  CDR3 for alpha chain variable domain of TCR clone 164079 (TRAV17, TRAJ31)
CATGVRLMFGDGTQLVV

SEQ ID NO: 328158 - protein, 16 aa, Homo sapiens
  CDR3 for beta chain variable domain of TCR clone 164079 (TRBV7-9, TRBJ1-4)
CASSFVKRTGGEKLFF

SEQ ID NO: 328159 - protein, 14 aa, Homo sapiens
  CDR3 for alpha chain variable domain of TCR clone 164080 (TRAV13-1, TRAJ24)
CAASRTDSWGKLQF

SEQ ID NO: 328160 - protein, 14 aa, Homo sapiens
  CDR3 for beta chain variable domain of TCR clone 164080 (TRBV7-2, TRBJ2-7)
CASSPKTSFYEQYF

SEQ ID NO: 328161 - protein, 13 aa, Homo sapiens
  CDR3 for alpha chain variable domain of TCR clone 164081 (TRAV21, TRAJ57)
CAVTQGGSEKRVF

SEQ ID NO: 328162 - protein, 11 aa, Homo sapiens
  CDR3 for beta chain variable domain of TCR clone 164081 (TRBV11-2, TRBJ2-2)
CASSLPGELFF

SEQ ID NO: 328163 - protein, 16 aa, Homo sapiens
  CDR3 for alpha chain variable domain of TCR clone 164082 (TRAV23/DV6, TRAJ9)
CAASIGGNTGGFKTIF

SEQ ID NO: 328164 - protein, 16 aa, Homo sapiens
  CDR3 for beta chain variable domain of TCR clone 164082 (TRBV5-1, TRBJ2-5)
CASSLSLAGAQETQYF

SEQ ID NO: 328165 - protein, 13 aa, Homo sapiens
  CDR3 for alpha chain variable domain of TCR clone 164083 (TRAV21, TRAJ37)
CAVSSGNTGKLIF

SEQ ID NO: 328166 - protein, 15 aa, Homo sapiens
  CDR3 for beta chain variable domain of TCR clone 164083 (TRBV12-4, TRBJ1-2)
CASSFVDRGSYGYTF

SEQ ID NO: 328167 - protein, 16 aa, Homo sapiens
  CDR3 for alpha chain variable domain of TCR clone 164084 (TRAV12-2, TRAJ45)
CAVNMYSGGGADGLTC

SEQ ID NO: 328168 - protein, 14 aa, Homo sapiens
  CDR3 for beta chain variable domain of TCR clone 164084 (TRBV25-1, TRBJ1-1)
CASTHLGGNTEAFL

SEQ ID NO: 328169 - protein, 12 aa, Homo sapiens
  CDR3 for alpha chain variable domain of TCR clone 164085 (TRAV1-1, TRAJ43)
CAPRVSSNDMRF

SEQ ID NO: 328170 - protein, 13 aa, Homo sapiens
  CDR3 for beta chain variable domain of TCR clone 164085 (TRBV7-3, TRBJ1-1)
CASSQDWGAEAFF

SEQ ID NO: 328171 - protein, 14 aa, Homo sapiens
  CDR3 for alpha chain variable domain of TCR clone 164086 (TRAV12-1, TRAJ45)
CGVNGGGGADGLTF

SEQ ID NO: 328172 - protein, 14 aa, Homo sapiens
  CDR3 for beta chain variable domain of TCR clone 164086 (TRBV29-1, TRBJ2-3)
CSVEPWTRTDTQYF

SEQ ID NO: 328173 - protein, 13 aa, Homo sapiens
  CDR3 for alpha chain variable domain of TCR clone 164087 (TRAV16, TRAJ20)
CALGPSNDYKLIF

SEQ ID NO: 328174 - protein, 15 aa, Homo sapiens
  CDR3 for beta chain variable domain of TCR clone 164087 (TRBV5-1, TRBJ2-2)
CASSRVGSDTGELFF

SEQ ID NO: 328175 - protein, 11 aa, Homo sapiens
  CDR3 for alpha chain variable domain of TCR clone 164088 (TRAV2, TRAJ13)
CASGVYQKVTF

SEQ ID NO: 328176 - protein, 17 aa, Homo sapiens
  CDR3 for beta chain variable domain of TCR clone 164088 (TRBV7-6, TRBJ2-5)
CASSSPQAGDPSETQYF

SEQ ID NO: 328177 - protein, 12 aa, Homo sapiens
  CDR3 for alpha chain variable domain of TCR clone 164089 (TRAV13-1, TRAJ21)
CAAKEGFNKFYF

SEQ ID NO: 328178 - protein, 13 aa, Homo sapiens
  CDR3 for beta chain variable domain of TCR clone 164089 (TRBV19, TRBJ1-2)
CASSVPGQDGFTF

SEQ ID NO: 328179 - protein, 15 aa, Homo sapiens
  CDR3 for alpha chain variable domain of TCR clone 164090 (TRAV35, TRAJ52)
CAGPRGGTSYGKLTF

SEQ ID NO: 328180 - protein, 14 aa, Homo sapiens
  CDR3 for beta chain variable domain of TCR clone 164090 (TRBV20-1, TRBJ2-7)
CSAWTALNSYEQYF

SEQ ID NO: 328181 - protein, 13 aa, Homo sapiens
  CDR3 for alpha chain variable domain of TCR clone 164091 (TRAV27, TRAJ6)
CAGGTRGSYIPTF

SEQ ID NO: 328182 - protein, 17 aa, Homo sapiens
  CDR3 for beta chain variable domain of TCR clone 164091 (TRBV4-1, TRBJ1-4)
CASSQEGPRGVEEKLFF

SEQ ID NO: 328183 - protein, 17 aa, Homo sapiens
  CDR3 for alpha chain variable domain of TCR clone 164092 (TRAV23/DV6, TRAJ18)
CAASMNHRGSTLGWLYF

SEQ ID NO: 328184 - protein, 15 aa, Homo sapiens
  CDR3 for beta chain variable domain of TCR clone 164092 (TRBV27, TRBJ2-7)
CASSPDQGRLYEQYF

SEQ ID NO: 328185 - protein, 12 aa, Homo sapiens
  CDR3 for alpha chain variable domain of TCR clone 164093 (TRAV8-3, TRAJ26)
CAGDNYGQNFVF

SEQ ID NO: 328186 - protein, 15 aa, Homo sapiens
  CDR3 for beta chain variable domain of TCR clone 164093 (TRBV3-1, TRBJ2-1)
CASSQQPSGGNEQFF

SEQ ID NO: 328187 - protein, 14 aa, Homo sapiens
  CDR3 for alpha chain variable domain of TCR clone 164094 (TRAV12-1, TRAJ24)
CVGRSTDSWGKFQF

SEQ ID NO: 328188 - protein, 13 aa, Homo sapiens
  CDR3 for beta chain variable domain of TCR clone 164094 (TRBV2, TRBJ2-3)
CASILAGGQGQYF

SEQ ID NO: 328189 - protein, 14 aa, Homo sapiens
  CDR3 for alpha chain variable domain of TCR clone 164095 (TRAV17, TRAJ56)
CATDYTGANSKLTF

SEQ ID NO: 328190 - protein, 17 aa, Homo sapiens
  CDR3 for beta chain variable domain of TCR clone 164095 (TRBV7-2, TRBJ2-3)
CASSLAGGLAGTAGQYF

SEQ ID NO: 328191 - protein, 16 aa, Homo sapiens
  CDR3 for alpha chain variable domain of TCR clone 164096 (TRAV4, TRAJ18)
CCVLLIGGSTLGRLYF

SEQ ID NO: 328192 - protein, 14 aa, Homo sapiens
  CDR3 for beta chain variable domain of TCR clone 164096 (TRBV10-3, TRBJ1-2)
CAISVGGRVDGYTF

SEQ ID NO: 328193 - protein, 14 aa, Homo sapiens
  CDR3 for alpha chain variable domain of TCR clone 164097 (TRAV1-2, TRAJ16)
CAANRFSDGQKLLF

SEQ ID NO: 328194 - protein, 14 aa, Homo sapiens
  CDR3 for beta chain variable domain of TCR clone 164097 (TRBV7-9, TRBJ2-2)
RASSLGHRTGELFF

SEQ ID NO: 328195 - protein, 15 aa, Homo sapiens
  CDR3 for alpha chain variable domain of TCR clone 164098 (TRAV4, TRAJ10)
CLVGDEEGGGNKLTF

SEQ ID NO: 328196 - protein, 16 aa, Homo sapiens
  CDR3 for beta chain variable domain of TCR clone 164098 (TRBV19, TRBJ2-6)
CQSTGQVFSGANVLTF

SEQ ID NO: 328197 - protein, 11 aa, Homo sapiens
  CDR3 for alpha chain variable domain of TCR clone 164099 (TRAV12-1, TRAJ16)
CVALDGQKLLF

SEQ ID NO: 328198 - protein, 15 aa, Homo sapiens
  CDR3 for beta chain variable domain of TCR clone 164099 (TRBV18, TRBJ1-2)
CACSPPQGLLGGYTF

SEQ ID NO: 328199 - protein, 13 aa, Homo sapiens
  CDR3 for alpha chain variable domain of TCR clone 164100 (TRAV8-4, TRAJ44)
CAVCTGTASKLTF

SEQ ID NO: 328200 - protein, 14 aa, Homo sapiens
  CDR3 for beta chain variable domain of TCR clone 164100 (TRBV6-3, TRBJ2-7)
CASSYSGDHYEQYF

SEQ ID NO: 328201 - protein, 13 aa, Homo sapiens
  CDR3 for alpha chain variable domain of TCR clone 164101 (TRAV24, TRAJ42)
CAFSTGSQGNLIF

SEQ ID NO: 328202 - protein, 13 aa, Homo sapiens
  CDR3 for beta chain variable domain of TCR clone 164101 (TRBV5-1, TRBJ2-7)
CASSATGGNEQYF

SEQ ID NO: 328203 - protein, 14 aa, Homo sapiens
  CDR3 for alpha chain variable domain of TCR clone 164102 (TRAV38-1, TRAJ45)
CASHSGGGADGLTF

SEQ ID NO: 328204 - protein, 13 aa, Homo sapiens
  CDR3 for beta chain variable domain of TCR clone 164102 (TRBV10-3, TRBJ1-2)
CAISERDSYGDAF

SEQ ID NO: 328205 - protein, 12 aa, Homo sapiens
  CDR3 for alpha chain variable domain of TCR clone 164103 (TRAV1-2, TRAJ29)
CAVPSGNTPLVF

SEQ ID NO: 328206 - protein, 13 aa, Homo sapiens
  CDR3 for beta chain variable domain of TCR clone 164103 (TRBV5-4, TRBJ1-1)
CASSVDLGTESFF

SEQ ID NO: 328207 - protein, 13 aa, Homo sapiens
  CDR3 for alpha chain variable domain of TCR clone 164104 (TRAV16, TRAJ10)
CALLTGGGKKLTF

SEQ ID NO: 328208 - protein, 12 aa, Homo sapiens
  CDR3 for beta chain variable domain of TCR clone 164104 (TRBV28, TRBJ2-7)
CASTGNHYEQYF

SEQ ID NO: 328209 - protein, 13 aa, Homo sapiens
  CDR3 for alpha chain variable domain of TCR clone 164105 (TRAV29/DV5, TRAJ54)
CAASVRGAQKLVF

SEQ ID NO: 328210 - protein, 13 aa, Homo sapiens
  CDR3 for beta chain variable domain of TCR clone 164105 (TRBV7-3, TRBJ1-1)
CASSQDWGAEAFF

SEQ ID NO: 328211 - protein, 15 aa, Homo sapiens
  CDR3 for alpha chain variable domain of TCR clone 164106 (TRAV17, TRAJ56)
CATDANNGANSKLTF

SEQ ID NO: 328212 - protein, 14 aa, Homo sapiens
  CDR3 for beta chain variable domain of TCR clone 164106 (TRBV19, TRBJ1-5)
CASSLGTGGQPQHF

SEQ ID NO: 328213 - protein, 13 aa, Homo sapiens
  CDR3 for alpha chain variable domain of TCR clone 164107 (TRAV21, TRAJ20)
CAVGLRVDYKLSL

SEQ ID NO: 328214 - protein, 13 aa, Homo sapiens
  CDR3 for beta chain variable domain of TCR clone 164107 (TRBV29-1, TRBJ2-1)
CSVEGGRVNEQFF

SEQ ID NO: 328215 - protein, 13 aa, Homo sapiens
  CDR3 for alpha chain variable domain of TCR clone 164108 (TRAV30, TRAJ34)
CGTVGYNTDKLIF

SEQ ID NO: 328216 - protein, 16 aa, Homo sapiens
  CDR3 for beta chain variable domain of TCR clone 164108 (TRBV7-9, TRBJ1-2)
CASSLGFSSGEDGCTF

SEQ ID NO: 328217 - protein, 14 aa, Homo sapiens
  CDR3 for alpha chain variable domain of TCR clone 164109 (TRAV12-3, TRAJ58)
CAMSTETSGPRLTF

SEQ ID NO: 328218 - protein, 13 aa, Homo sapiens
  CDR3 for beta chain variable domain of TCR clone 164109 (TRBV27, TRBJ2-3)
CASSWDRTDTQYF

SEQ ID NO: 328219 - protein, 15 aa, Homo sapiens
  CDR3 for alpha chain variable domain of TCR clone 164110 (TRAV23/DV6, TRAJ45)
CAASARGGGADGLTF

SEQ ID NO: 328220 - protein, 14 aa, Homo sapiens
  CDR3 for beta chain variable domain of TCR clone 164110 (TRBV7-2, TRBJ2-7)
CASSPKTSFYEQYF

SEQ ID NO: 328221 - protein, 15 aa, Homo sapiens
  CDR3 for alpha chain variable domain of TCR clone 164111 (TRAV1-2, TRAJ30)
CAVRPHGNRDDKIIF

SEQ ID NO: 328222 - protein, 12 aa, Homo sapiens
  CDR3 for beta chain variable domain of TCR clone 164111 (TRBV14, TRBJ2-5)
CASSQLKETQYF

SEQ ID NO: 328223 - protein, 12 aa, Homo sapiens
  CDR3 for alpha chain variable domain of TCR clone 164112 (TRAV23/DV6, TRAJ31)
CAARPIGASLMF

SEQ ID NO: 328224 - protein, 13 aa, Homo sapiens
  CDR3 for beta chain variable domain of TCR clone 164112 (TRBV28, TRBJ2-7)
CASKAGGVYEQYF

SEQ ID NO: 328225 - protein, 12 aa, Homo sapiens
  CDR3 for alpha chain variable domain of TCR clone 164113 (TRAV35, TRAJ39)
LAPNNAGNMLTF

SEQ ID NO: 328226 - protein, 13 aa, Homo sapiens
  CDR3 for beta chain variable domain of TCR clone 164113 (TRBV11-3, TRBJ2-7)
CASSLDKLYEQYF

SEQ ID NO: 328227 - protein, 18 aa, Homo sapiens
  CDR3 for alpha chain variable domain of TCR clone 164114 (TRAV8-4, TRAJ52)
CAVASFNAGGTSDGKLTF

SEQ ID NO: 328228 - protein, 14 aa, Homo sapiens
  CDR3 for beta chain variable domain of TCR clone 164114 (TRBV18, TRBJ1-5)
CASSRQQRNQPQHF

SEQ ID NO: 328229 - protein, 16 aa, Homo sapiens
  CDR3 for alpha chain variable domain of TCR clone 164115 (TRAV12-2, TRAJ43)
CAGDDIRFGAGTRLTV

SEQ ID NO: 328230 - protein, 13 aa, Homo sapiens
  CDR3 for beta chain variable domain of TCR clone 164115 (TRBV7-8, TRBJ2-7)
CASSLTGGREQYF

SEQ ID NO: 328231 - protein, 12 aa, Homo sapiens
  CDR3 for alpha chain variable domain of TCR clone 164116 (TRAV21, TRAJ11)
CSETSGYSTLTF

SEQ ID NO: 328232 - protein, 14 aa, Homo sapiens
  CDR3 for beta chain variable domain of TCR clone 164116 (TRBV20-1, TRBJ2-7)
CSAPELAGVGEQYF

SEQ ID NO: 328233 - protein, 18 aa, Homo sapiens
  CDR3 for alpha chain variable domain of TCR clone 164117 (TRAV26-1, TRAJ5)
CIVRVVPPRDTDRRALTF

SEQ ID NO: 328234 - protein, 15 aa, Homo sapiens
  CDR3 for beta chain variable domain of TCR clone 164117 (TRBV7-9, TRBJ2-7)
CASSLPMGQANEQYF

SEQ ID NO: 328235 - protein, 13 aa, Homo sapiens
  CDR3 for alpha chain variable domain of TCR clone 164118 (TRAV17, TRAJ5)
CALMDTGRRALTF

SEQ ID NO: 328236 - protein, 13 aa, Homo sapiens
  CDR3 for beta chain variable domain of TCR clone 164118 (TRBV7-9, TRBJ1-2)
CASSLKQNYGYTF

SEQ ID NO: 328237 - protein, 13 aa, Homo sapiens
  CDR3 for alpha chain variable domain of TCR clone 164119 (TRAV20, TRAJ53)
CCAGGGSNYKLTF

SEQ ID NO: 328238 - protein, 14 aa, Homo sapiens
  CDR3 for beta chain variable domain of TCR clone 164119 (TRBV20-1, TRBJ2-7)
CSAWTALSSYEQYF

SEQ ID NO: 328239 - protein, 11 aa, Homo sapiens
  CDR3 for alpha chain variable domain of TCR clone 164120 (TRAV2, TRAJ13)
CASGGYQKVTF

SEQ ID NO: 328240 - protein, 15 aa, Homo sapiens
  CDR3 for beta chain variable domain of TCR clone 164120 (TRBV28, TRBJ1-1)
CASSLDRGWNTEAFF

SEQ ID NO: 328241 - protein, 16 aa, Homo sapiens
  CDR3 for alpha chain variable domain of TCR clone 164121 (TRAV8-3, TRAJ8)
CAVPRDGNTGFQTLVF

SEQ ID NO: 328242 - protein, 14 aa, Homo sapiens
  CDR3 for beta chain variable domain of TCR clone 164121 (TRBV4-1, TRBJ2-2)
CASSQAVNTGELFF

SEQ ID NO: 328243 - protein, 15 aa, Homo sapiens
  CDR3 for alpha chain variable domain of TCR clone 164122 (TRAV26-1, TRAJ29)
CIVRVEGSGNTPLVF

SEQ ID NO: 328244 - protein, 14 aa, Homo sapiens
  CDR3 for beta chain variable domain of TCR clone 164122 (TRBV18, TRBJ2-5)
FASSPGVSQETQYF

SEQ ID NO: 328245 - protein, 14 aa, Homo sapiens
  CDR3 for alpha chain variable domain of TCR clone 164123 (TRAV12-2, TRAJ6)
CASKWGGGSYIPSF

SEQ ID NO: 328246 - protein, 13 aa, Homo sapiens
  CDR3 for beta chain variable domain of TCR clone 164123 (TRBV2, TRBJ1-1)
CASSEGGNTEAFF

SEQ ID NO: 328247 - protein, 13 aa, Homo sapiens
  CDR3 for alpha chain variable domain of TCR clone 164124 (TRAV3, TRAJ30)
GAVRDRGDDKIIF

SEQ ID NO: 328248 - protein, 14 aa, Homo sapiens
  CDR3 for beta chain variable domain of TCR clone 164124 (TRBV5-1, TRBJ1-1)
CASSRTTGDTEAFF

SEQ ID NO: 328249 - protein, 13 aa, Homo sapiens
  CDR3 for alpha chain variable domain of TCR clone 164125 (TRAV4, TRAJ9)
CLVAAGGGFKTIF

SEQ ID NO: 328250 - protein, 17 aa, Homo sapiens
  CDR3 for beta chain variable domain of TCR clone 164125 (TRBV27, TRBJ2-1)
RASSPMKGQGSYNEQFF

SEQ ID NO: 328251 - protein, 12 aa, Homo sapiens
  CDR3 for alpha chain variable domain of TCR clone 164126 (TRAV16, TRAJ26)
CSSKDGGQNFVF

SEQ ID NO: 328252 - protein, 13 aa, Homo sapiens
  CDR3 for beta chain variable domain of TCR clone 164126 (TRBV25-1, TRBJ1-1)
CASSDRGRAEAFF

SEQ ID NO: 328253 - protein, 17 aa, Homo sapiens
  CDR3 for alpha chain variable domain of TCR clone 164127 (TRAV27, TRAJ18)
CAGLHRGRGSTLGRLYF

SEQ ID NO: 328254 - protein, 18 aa, Homo sapiens
  CDR3 for beta chain variable domain of TCR clone 164127 (TRBV24-1, TRBJ2-1)
CATSDLMFLGRGVHEQFF

SEQ ID NO: 328255 - protein, 12 aa, Homo sapiens
  CDR3 for alpha chain variable domain of TCR clone 164128 (TRAV36/DV7, TRAJ54)
CAVGRGAQKLGF

SEQ ID NO: 328256 - protein, 14 aa, Homo sapiens
  CDR3 for beta chain variable domain of TCR clone 164128 (TRBV7-3, TRBJ1-1)
CASSLKGGNTEAFF

SEQ ID NO: 328257 - protein, 14 aa, Homo sapiens
  CDR3 for alpha chain variable domain of TCR clone 164129 (TRAV8-3, TRAJ39)
CAVGANNAGNMFTF

SEQ ID NO: 328258 - protein, 12 aa, Homo sapiens
  CDR3 for beta chain variable domain of TCR clone 164129 (TRBV11-3, TRBJ1-1)
CASSHRQGEAFF

SEQ ID NO: 328259 - protein, 17 aa, Homo sapiens
  CDR3 for alpha chain variable domain of TCR clone 164130 (TRAV9-2, TRAJ45)
CALSGYYSGGGADGLTF

SEQ ID NO: 328260 - protein, 13 aa, Homo sapiens
  CDR3 for beta chain variable domain of TCR clone 164130 (TRBV7-2, TRBJ1-1)
CASNLKGAKVAFF

SEQ ID NO: 328261 - protein, 12 aa, Homo sapiens
  CDR3 for alpha chain variable domain of TCR clone 164131 (TRAV21, TRAJ58)
CAAETSGSRLTF

SEQ ID NO: 328262 - protein, 18 aa, Homo sapiens
  CDR3 for beta chain variable domain of TCR clone 164131 (TRBV20-1, TRBJ2-6)
CSAETTPTRGSGANVLTF

SEQ ID NO: 328263 - protein, 15 aa, Homo sapiens
  CDR3 for alpha chain variable domain of TCR clone 164132 (TRAV4, TRAJ28)
CLVEGSGAGSYQLTF

SEQ ID NO: 328264 - protein, 15 aa, Homo sapiens
  CDR3 for beta chain variable domain of TCR clone 164132 (TRBV9, TRBJ2-3)
CASSVRGLAVDTQDF

SEQ ID NO: 328265 - protein, 15 aa, Homo sapiens
  CDR3 for alpha chain variable domain of TCR clone 164133 (TRAV8-6, TRAJ11)
CAVSDRRSGYSTLTF

SEQ ID NO: 328266 - protein, 15 aa, Homo sapiens
  CDR3 for beta chain variable domain of TCR clone 164133 (TRBV27, TRBJ2-1)
CASSNGGGSSNEQFF

SEQ ID NO: 328267 - protein, 10 aa, Homo sapiens
  CDR3 for alpha chain variable domain of TCR clone 164134 (TRAV8-3, TRAJ4)
CAVGPKGLDF

SEQ ID NO: 328268 - protein, 13 aa, Homo sapiens
  CDR3 for beta chain variable domain of TCR clone 164134 (TRBV7-9, TRBJ1-2)
CASSLKQNYGYTF

SEQ ID NO: 328269 - protein, 12 aa, Homo sapiens
  CDR3 for alpha chain variable domain of TCR clone 164135 (TRAV36/DV7, TRAJ54)
CAVVRGAQKLVF

SEQ ID NO: 328270 - protein, 16 aa, Homo sapiens
  CDR3 for beta chain variable domain of TCR clone 164135 (TRBV7-9, TRBJ1-2)
CASSLGFSSGEDGYTF

SEQ ID NO: 328271 - protein, 14 aa, Homo sapiens
  CDR3 for alpha chain variable domain of TCR clone 164136 (TRAV12-1, TRAJ12)
CVVSRMDSSYKLIF

SEQ ID NO: 328272 - protein, 13 aa, Homo sapiens
  CDR3 for beta chain variable domain of TCR clone 164136 (TRBV20-1, TRBJ1-1)
CSARGGGNTEAFF

SEQ ID NO: 328273 - protein, 16 aa, Homo sapiens
  CDR3 for alpha chain variable domain of TCR clone 164137 (TRAV12-3, TRAJ53)
CAMIPGSGGSNYKVTF

SEQ ID NO: 328274 - protein, 11 aa, Homo sapiens
  CDR3 for beta chain variable domain of TCR clone 164137 (TRBV29-1, TRBJ2-5)
CSEDRTGTQYF

SEQ ID NO: 328275 - protein, 15 aa, Homo sapiens
  CDR3 for alpha chain variable domain of TCR clone 164138 (TRAV21, TRAJ53)
CASLNSGGSNYKLTF

SEQ ID NO: 328276 - protein, 16 aa, Homo sapiens
  CDR3 for beta chain variable domain of TCR clone 164138 (TRBV9, TRBJ2-1)
CASSVGGGGNYNEQFF

SEQ ID NO: 328277 - protein, 15 aa, Homo sapiens
  CDR3 for alpha chain variable domain of TCR clone 164139 (TRAV29/DV5, TRAJ29)
CAASERSSGNTPLVF

SEQ ID NO: 328278 - protein, 14 aa, Homo sapiens
  CDR3 for beta chain variable domain of TCR clone 164139 (TRBV7-6, TRBJ2-3)
CASSLGTVTDTQYF

SEQ ID NO: 328279 - protein, 14 aa, Homo sapiens
  CDR3 for alpha chain variable domain of TCR clone 164140 (TRAV8-2, TRAJ4)
CVVSPSGGYNHLIF

SEQ ID NO: 328280 - protein, 15 aa, Homo sapiens
  CDR3 for beta chain variable domain of TCR clone 164140 (TRBV2, TRBJ2-1)
CASSELAGSYNEQFF

SEQ ID NO: 328281 - protein, 14 aa, Homo sapiens
  CDR3 for alpha chain variable domain of TCR clone 164141 (TRAV12-3, TRAJ10)
SHLPLTGGGNKLTF

SEQ ID NO: 328282 - protein, 13 aa, Homo sapiens
  CDR3 for beta chain variable domain of TCR clone 164141 (TRBV20-1, TRBJ2-5)
CSARWDYQETQYF

SEQ ID NO: 328283 - protein, 13 aa, Homo sapiens
  CDR3 for alpha chain variable domain of TCR clone 164142 (TRAV2, TRAJ35)
CAPPGALGMCCIA

SEQ ID NO: 328284 - protein, 12 aa, Homo sapiens
  CDR3 for beta chain variable domain of TCR clone 164142 (TRBV14, TRBJ1-1)
CASSQLKGLAFF

SEQ ID NO: 328285 - protein, 13 aa, Homo sapiens
  CDR3 for alpha chain variable domain of TCR clone 164143 (TRAV12-2, TRAJ37)
CAVSSGNTGKLIF

SEQ ID NO: 328286 - protein, 12 aa, Homo sapiens
  CDR3 for beta chain variable domain of TCR clone 164143 (TRBV11-2, TRBJ2-2)
CASSLGGGELFF

SEQ ID NO: 328287 - protein, 14 aa, Homo sapiens
  CDR3 for alpha chain variable domain of TCR clone 164144 (TRAV1-2, TRAJ8)
CAVREDTGVQKLVF

SEQ ID NO: 328288 - protein, 14 aa, Homo sapiens
  CDR3 for beta chain variable domain of TCR clone 164144 (TRBV20-1, TRBJ2-7)
CSAPELAGVGEQYF

SEQ ID NO: 328289 - protein, 14 aa, Homo sapiens
  CDR3 for alpha chain variable domain of TCR clone 164145 (TRAV1-2, TRAJ8)
CAVREDTGFQTLVF

SEQ ID NO: 328290 - protein, 12 aa, Homo sapiens
  CDR3 for beta chain variable domain of TCR clone 164145 (TRBV11-2, TRBJ2-1)
CASSPGNNEQFF

SEQ ID NO: 328291 - protein, 14 aa, Homo sapiens
  CDR3 for alpha chain variable domain of TCR clone 164146 (TRAV12-2, TRAJ40)
CAVKIPSGPYKYIF

SEQ ID NO: 328292 - protein, 15 aa, Homo sapiens
  CDR3 for beta chain variable domain of TCR clone 164146 (TRBV11-3, TRBJ2-3)
CASLKDGREGDTQYF

SEQ ID NO: 328293 - protein, 14 aa, Homo sapiens
  CDR3 for alpha chain variable domain of TCR clone 164147 (TRAV26-1, TRAJ26)
CIVRATFLGQNFVF

SEQ ID NO: 328294 - protein, 16 aa, Homo sapiens
  CDR3 for beta chain variable domain of TCR clone 164147 (TRBV12-4, TRBJ2-7)
CASSSTGAGPSYEQYF

SEQ ID NO: 328295 - protein, 10 aa, Homo sapiens
  CDR3 for alpha chain variable domain of TCR clone 164148 (TRAV12-3, TRAJ49)
CAMNEDQFYF

SEQ ID NO: 328296 - protein, 13 aa, Homo sapiens
  CDR3 for beta chain variable domain of TCR clone 164148 (TRBV12-4, TRBJ1-1)
CASSPGAGFEAFF

SEQ ID NO: 328297 - protein, 12 aa, Homo sapiens
  CDR3 for alpha chain variable domain of TCR clone 164149 (TRAV9-2, TRAJ26)
CALRGYGQNFVF

SEQ ID NO: 328298 - protein, 13 aa, Homo sapiens
  CDR3 for beta chain variable domain of TCR clone 164149 (TRBV19, TRBJ1-2)
CASSVPGQDGYTF

SEQ ID NO: 328299 - protein, 14 aa, Homo sapiens
  CDR3 for alpha chain variable domain of TCR clone 164150 (TRAV1-2, TRAJ16)
CAVNRCSDGQKLLF

SEQ ID NO: 328300 - protein, 11 aa, Homo sapiens
  CDR3 for beta chain variable domain of TCR clone 164150 (TRBV7-9, TRBJ2-3)
CASSPTDTQYF

SEQ ID NO: 328301 - protein, 17 aa, Homo sapiens
  CDR3 for alpha chain variable domain of TCR clone 164151 (TRAV26-1, TRAJ53)
CIVRVDDSGGSNYKLTF

SEQ ID NO: 328302 - protein, 15 aa, Homo sapiens
  CDR3 for beta chain variable domain of TCR clone 164151 (TRBV4-1, TRBJ1-4)
CASSLATATNEKLFF

SEQ ID NO: 328303 - protein, 14 aa, Homo sapiens
  CDR3 for alpha chain variable domain of TCR clone 164152 (TRAV12-2, TRAJ9)
CAVNALEGGFKTIF

SEQ ID NO: 328304 - protein, 16 aa, Homo sapiens
  CDR3 for beta chain variable domain of TCR clone 164152 (TRBV19, TRBJ1-6)
CASSVAPVTGNSPLHF

SEQ ID NO: 328305 - protein, 14 aa, Homo sapiens
  CDR3 for alpha chain variable domain of TCR clone 164153 (TRAV8-4, TRAJ9)
CAVRINTGGFKTIF

SEQ ID NO: 328306 - protein, 15 aa, Homo sapiens
  CDR3 for beta chain variable domain of TCR clone 164153 (TRBV10-2, TRBJ2-6)
CASSEQGTGANDLAF

SEQ ID NO: 328307 - protein, 13 aa, Homo sapiens
  CDR3 for alpha chain variable domain of TCR clone 164154 (TRAV39, TRAJ48)
CAAVNFGNEKLTF

SEQ ID NO: 328308 - protein, 16 aa, Homo sapiens
  CDR3 for beta chain variable domain of TCR clone 164154 (TRBV12-5, TRBJ2-5)
CASGPRTSGNQETQYF

SEQ ID NO: 328309 - protein, 16 aa, Homo sapiens
  CDR3 for alpha chain variable domain of TCR clone 164155 (TRAV12-1, TRAJ48)
CVVNTFRAFGNEKLTF

SEQ ID NO: 328310 - protein, 17 aa, Homo sapiens
  CDR3 for beta chain variable domain of TCR clone 164155 (TRBV13, TRBJ2-3)
CASSLSRVAGGRNTQYF

SEQ ID NO: 328311 - protein, 12 aa, Homo sapiens
  CDR3 for alpha chain variable domain of TCR clone 164156 (TRAV12-1, TRAJ50)
CVGRTSYDKVIF

SEQ ID NO: 328312 - protein, 15 aa, Homo sapiens
  CDR3 for beta chain variable domain of TCR clone 164156 (TRBV7-9, TRBJ1-4)
CASSARTGGNEKLFF

SEQ ID NO: 328313 - protein, 13 aa, Homo sapiens
  CDR3 for alpha chain variable domain of TCR clone 164157 (TRAV27, TRAJ54)
CAGAGQGAQKLVF

SEQ ID NO: 328314 - protein, 17 aa, Homo sapiens
  CDR3 for beta chain variable domain of TCR clone 164157 (TRBV13, TRBJ2-3)
CASSLSRVAGGRNTQYF

SEQ ID NO: 328315 - protein, 18 aa, Homo sapiens
  CDR3 for alpha chain variable domain of TCR clone 164158 (TRAV12-3, TRAJ52)
CAMRVGGAGGTSYGKLTF

SEQ ID NO: 328316 - protein, 15 aa, Homo sapiens
  CDR3 for beta chain variable domain of TCR clone 164158 (TRBV27, TRBJ1-6)
CASSFDRGLGSPLHF

SEQ ID NO: 328317 - protein, 14 aa, Homo sapiens
  CDR3 for alpha chain variable domain of TCR clone 164159 (TRAV1-2, TRAJ8)
CAVRADTGFQQLVF

SEQ ID NO: 328318 - protein, 15 aa, Homo sapiens
  CDR3 for beta chain variable domain of TCR clone 164159 (TRBV6-3, TRBJ2-7)
CASSSPGTVFYEQCF

SEQ ID NO: 328319 - protein, 15 aa, Homo sapiens
  CDR3 for alpha chain variable domain of TCR clone 164160 (TRAV25, TRAJ52)
CAGTAGGTSYGKLTF

SEQ ID NO: 328320 - protein, 16 aa, Homo sapiens
  CDR3 for beta chain variable domain of TCR clone 164160 (TRBV7-3, TRBJ2-2)
CASSLKRGTLSGELFF

SEQ ID NO: 328321 - protein, 14 aa, Homo sapiens
  CDR3 for alpha chain variable domain of TCR clone 164161 (TRAV1-2, TRAJ8)
RAVREDTGFQKLVF

SEQ ID NO: 328322 - protein, 15 aa, Homo sapiens
  CDR3 for beta chain variable domain of TCR clone 164161 (TRBV27, TRBJ2-1)
CASSNGGGSSNEQFF

SEQ ID NO: 328323 - protein, 12 aa, Homo sapiens
  CDR3 for alpha chain variable domain of TCR clone 164162 (TRAV16, TRAJ49)
CALNEGGNQFYF

SEQ ID NO: 328324 - protein, 14 aa, Homo sapiens
  CDR3 for beta chain variable domain of TCR clone 164162 (TRBV7-9, TRBJ2-1)
CASMPTGLRNEQFF

SEQ ID NO: 328325 - protein, 12 aa, Homo sapiens
  CDR3 for alpha chain variable domain of TCR clone 164163 (TRAV3, TRAJ20)
CAVRDPDYKLSF

SEQ ID NO: 328326 - protein, 16 aa, Homo sapiens
  CDR3 for beta chain variable domain of TCR clone 164163 (TRBV7-2, TRBJ2-6)
CASSLAGRSGANVLTF

SEQ ID NO: 328327 - protein, 14 aa, Homo sapiens
  CDR3 for alpha chain variable domain of TCR clone 164164 (TRAV1-2, TRAJ16)
CAVRGFSDGQKLLF

SEQ ID NO: 328328 - protein, 16 aa, Homo sapiens
  CDR3 for beta chain variable domain of TCR clone 164164 (TRBV20-1, TRBJ2-1)
CSARDHLAGGRGERFF

SEQ ID NO: 328329 - protein, 13 aa, Homo sapiens
  CDR3 for alpha chain variable domain of TCR clone 164165 (TRAV3, TRAJ9)
CAFWNTGGFKTIF

SEQ ID NO: 328330 - protein, 12 aa, Homo sapiens
  CDR3 for beta chain variable domain of TCR clone 164165 (TRBV19, TRBJ1-5)
CASSIAQQPQHF

SEQ ID NO: 328331 - protein, 13 aa, Homo sapiens
  CDR3 for alpha chain variable domain of TCR clone 164166 (TRAV13-1, TRAJ40)
CAAISPGTYKYIF

SEQ ID NO: 328332 - protein, 13 aa, Homo sapiens
  CDR3 for beta chain variable domain of TCR clone 164166 (TRBV10-3, TRBJ2-7)
CAIRAGGPHEQYF

SEQ ID NO: 328333 - protein, 14 aa, Homo sapiens
  CDR3 for alpha chain variable domain of TCR clone 164167 (TRAV29/DV5, TRAJ36)
CAARRKTGANNLFF

SEQ ID NO: 328334 - protein, 14 aa, Homo sapiens
  CDR3 for beta chain variable domain of TCR clone 164167 (TRBV11-2, TRBJ2-5)
CASSRTGGIETQYF

SEQ ID NO: 328335 - protein, 13 aa, Homo sapiens
  CDR3 for alpha chain variable domain of TCR clone 164168 (TRAV8-3, TRAJ43)
CAVGPDNNNDMRF

SEQ ID NO: 328336 - protein, 16 aa, Homo sapiens
  CDR3 for beta chain variable domain of TCR clone 164168 (TRBV7-2, TRBJ2-7)
CASSLEAGGPWYEQYF

SEQ ID NO: 328337 - protein, 18 aa, Homo sapiens
  CDR3 for alpha chain variable domain of TCR clone 164169 (TRAV21, TRAJ52)
CAVRPSPAGGTSYGKLTF

SEQ ID NO: 328338 - protein, 17 aa, Homo sapiens
  CDR3 for beta chain variable domain of TCR clone 164169 (TRBV13, TRBJ2-3)
CASSPSRVAGGRNAQYF

SEQ ID NO: 328339 - protein, 17 aa, Homo sapiens
  CDR3 for alpha chain variable domain of TCR clone 164170 (TRAV38-2/DV8, TRAJ28)
CAYRFAYSGAGSYQLTF

SEQ ID NO: 328340 - protein, 17 aa, Homo sapiens
  CDR3 for beta chain variable domain of TCR clone 164170 (TRBV4-3, TRBJ2-2)
CASSQDTSARSPGEMFF

SEQ ID NO: 328341 - protein, 13 aa, Homo sapiens
  CDR3 for alpha chain variable domain of TCR clone 164171 (TRAV12-3, TRAJ33)
CAMSVNSNYQLIW

SEQ ID NO: 328342 - protein, 15 aa, Homo sapiens
  CDR3 for beta chain variable domain of TCR clone 164171 (TRBV11-2, TRBJ2-1)
CASSLGNRLANEQFF

SEQ ID NO: 328343 - protein, 13 aa, Homo sapiens
  CDR3 for alpha chain variable domain of TCR clone 164172 (TRAV13-1, TRAJ17)
SAADGAAGNKLTF

SEQ ID NO: 328344 - protein, 14 aa, Homo sapiens
  CDR3 for beta chain variable domain of TCR clone 164172 (TRBV11-2, TRBJ1-3)
CASSLTQGRNTIYF

SEQ ID NO: 328345 - protein, 16 aa, Homo sapiens
  CDR3 for alpha chain variable domain of TCR clone 164173 (TRAV8-3, TRAJ42)
CAVGEGKGGSQGNLIF

SEQ ID NO: 328346 - protein, 14 aa, Homo sapiens
  CDR3 for beta chain variable domain of TCR clone 164173 (TRBV7-2, TRBJ2-1)
CASSRGGARNEQFF

SEQ ID NO: 328347 - protein, 12 aa, Homo sapiens
  CDR3 for alpha chain variable domain of TCR clone 164174 (TRAV25, TRAJ47)
CAGQGYGNKLVF

SEQ ID NO: 328348 - protein, 13 aa, Homo sapiens
  CDR3 for beta chain variable domain of TCR clone 164174 (TRBV20-1, TRBJ1-1)
CSAPLGGGTEAFF

SEQ ID NO: 328349 - protein, 17 aa, Homo sapiens
  CDR3 for alpha chain variable domain of TCR clone 164175 (TRAV26-1, TRAJ37)
CIVRVITVLSNTGKLIF

SEQ ID NO: 328350 - protein, 13 aa, Homo sapiens
  CDR3 for beta chain variable domain of TCR clone 164175 (TRBV2, TRBJ1-4)
CASSERAGEKLFF

SEQ ID NO: 328351 - protein, 17 aa, Homo sapiens
  CDR3 for alpha chain variable domain of TCR clone 164176 (TRAV23/DV6, TRAJ57)
CAASSTLSQGGSEKLVF

SEQ ID NO: 328352 - protein, 15 aa, Homo sapiens
  CDR3 for beta chain variable domain of TCR clone 164176 (TRBV20-1, TRBJ2-7)
CSARDRVSGMDDQYF

SEQ ID NO: 328353 - protein, 12 aa, Homo sapiens
  CDR3 for alpha chain variable domain of TCR clone 164177 (TRAV6, TRAJ34)
CALHRGTDKLIF

SEQ ID NO: 328354 - protein, 16 aa, Homo sapiens
  CDR3 for beta chain variable domain of TCR clone 164177 (TRBV3-1, TRBJ2-5)
CASSKDWASGQETQYF

SEQ ID NO: 328355 - protein, 12 aa, Homo sapiens
  CDR3 for alpha chain variable domain of TCR clone 164178 (TRAV13-1, TRAJ21)
CAAKEGFNKFYF

SEQ ID NO: 328356 - protein, 17 aa, Homo sapiens
  CDR3 for beta chain variable domain of TCR clone 164178 (TRBV19, TRBJ2-7)
CASSISFYDSYPHEQYF

SEQ ID NO: 328357 - protein, 15 aa, Homo sapiens
  CDR3 for alpha chain variable domain of TCR clone 164179 (TRAV8-3, TRAJ45)
CASSYSGGGADGLTF

SEQ ID NO: 328358 - protein, 15 aa, Homo sapiens
  CDR3 for beta chain variable domain of TCR clone 164179 (TRBV20-1, TRBJ1-1)
CSAFDKENTEAFLDK

SEQ ID NO: 328359 - protein, 14 aa, Homo sapiens
  CDR3 for alpha chain variable domain of TCR clone 164180 (TRAV20, TRAJ17)
CAVRREAAGNKLTF

SEQ ID NO: 328360 - protein, 15 aa, Homo sapiens
  CDR3 for beta chain variable domain of TCR clone 164180 (TRBV6-3, TRBJ2-7)
CASSSPGTVFYEQYF

SEQ ID NO: 328361 - protein, 14 aa, Homo sapiens
  CDR3 for alpha chain variable domain of TCR clone 164181 (TRAV2, TRAJ39)
CAVEGDNAGKMLTF

SEQ ID NO: 328362 - protein, 14 aa, Homo sapiens
  CDR3 for beta chain variable domain of TCR clone 164181 (TRBV28, TRBJ2-7)
CASSLRARGNEQYF

SEQ ID NO: 328363 - protein, 12 aa, Homo sapiens
  CDR3 for alpha chain variable domain of TCR clone 164182 (TRAV29/DV5, TRAJ49)
CAATDTGNQFYF

SEQ ID NO: 328364 - protein, 14 aa, Homo sapiens
  CDR3 for beta chain variable domain of TCR clone 164182 (TRBV9, TRBJ2-7)
CASSVRSEGSEQYF

SEQ ID NO: 328365 - protein, 13 aa, Homo sapiens
  CDR3 for alpha chain variable domain of TCR clone 164183 (TRAV3, TRAJ21)
FAVREPDFNKFYF

SEQ ID NO: 328366 - protein, 12 aa, Homo sapiens
  CDR3 for beta chain variable domain of TCR clone 164183 (TRBV5-1, TRBJ2-4)
LAGEWTKNMQYF

SEQ ID NO: 328367 - protein, 13 aa, Homo sapiens
  CDR3 for alpha chain variable domain of TCR clone 164184 (TRAV30, TRAJ24)
CGTVTDRWGKLQF

SEQ ID NO: 328368 - protein, 15 aa, Homo sapiens
  CDR3 for beta chain variable domain of TCR clone 164184 (TRBV4-1, TRBJ2-1)
CASSQDPGNYNEQFF

SEQ ID NO: 328369 - protein, 14 aa, Homo sapiens
  CDR3 for alpha chain variable domain of TCR clone 164185 (TRAV2, TRAJ9)
CAVEDRSGGFKTIF

SEQ ID NO: 328370 - protein, 14 aa, Homo sapiens
  CDR3 for beta chain variable domain of TCR clone 164185 (TRBV18, TRBJ1-5)
CASSRQQRNQPRHF

SEQ ID NO: 328371 - protein, 14 aa, Homo sapiens
  CDR3 for alpha chain variable domain of TCR clone 164186 (TRAV12-1, TRAJ43)
CVVNGRSNNNDKRF

SEQ ID NO: 328372 - protein, 13 aa, Homo sapiens
  CDR3 for beta chain variable domain of TCR clone 164186 (TRBV10-3, TRBJ2-7)
CASKLAVNYEQYF

SEQ ID NO: 328373 - protein, 14 aa, Homo sapiens
  CDR3 for alpha chain variable domain of TCR clone 164187 (TRAV12-2, TRAJ9)
CAVNMEGGGFKTIF

SEQ ID NO: 328374 - protein, 14 aa, Homo sapiens
  CDR3 for beta chain variable domain of TCR clone 164187 (TRBV19, TRBJ2-1)
CASPTFVLSGEQFF

SEQ ID NO: 328375 - protein, 21 aa, Homo sapiens
  CDR3 for alpha chain variable domain of TCR clone 164188 (TRAV1-2, TRAJ37)
CLLPLCCERFHGSGNTGNIIF

SEQ ID NO: 328376 - protein, 14 aa, Homo sapiens
  CDR3 for beta chain variable domain of TCR clone 164188 (TRBV2, TRBJ2-5)
CASSEVLAQETQYF

SEQ ID NO: 328377 - protein, 10 aa, Homo sapiens
  CDR3 for alpha chain variable domain of TCR clone 164189 (TRAV1-2, TRAJ23)
CSGQGGKLIF

SEQ ID NO: 328378 - protein, 13 aa, Homo sapiens
  CDR3 for beta chain variable domain of TCR clone 164189 (TRBV7-7, TRBJ2-3)
CASSLSRADTQYF

SEQ ID NO: 328379 - protein, 13 aa, Homo sapiens
  CDR3 for alpha chain variable domain of TCR clone 164190 (TRAV25, TRAJ10)
CAGRTGGGNKLTF

SEQ ID NO: 328380 - protein, 14 aa, Homo sapiens
  CDR3 for beta chain variable domain of TCR clone 164190 (TRBV4-2, TRBJ2-1)
CASGLDRAYNEQFF

SEQ ID NO: 328381 - protein, 20 aa, Homo sapiens
  CDR3 for alpha chain variable domain of TCR clone 164191 (TRAV4, TRAJ29)
CCVLLPRGCVPFSGNTPLVF

SEQ ID NO: 328382 - protein, 17 aa, Homo sapiens
  CDR3 for beta chain variable domain of TCR clone 164191 (TRBV25-1, TRBJ2-7)
CASSDARVVFSSYEQYS

SEQ ID NO: 328383 - protein, 15 aa, Homo sapiens
  CDR3 for alpha chain variable domain of TCR clone 164192 (TRAV8-3, TRAJ27)
CAVGPSKTNAGKSTF

SEQ ID NO: 328384 - protein, 15 aa, Homo sapiens
  CDR3 for beta chain variable domain of TCR clone 164192 (TRBV11-3, TRBJ2-2)
CASSLGGRPTGELFF

SEQ ID NO: 328385 - protein, 13 aa, Homo sapiens
  CDR3 for alpha chain variable domain of TCR clone 164193 (TRAV6, TRAJ20)
CALAVSNDYKLSF

SEQ ID NO: 328386 - protein, 16 aa, Homo sapiens
  CDR3 for beta chain variable domain of TCR clone 164193 (TRBV7-9, TRBJ2-1)
CASSDVAGGSYNEQFF

SEQ ID NO: 328387 - protein, 14 aa, Homo sapiens
  CDR3 for alpha chain variable domain of TCR clone 164194 (TRAV12-1, TRAJ41)
CVVLNSNSGYSLNF

SEQ ID NO: 328388 - protein, 14 aa, Homo sapiens
  CDR3 for beta chain variable domain of TCR clone 164194 (TRBV5-1, TRBJ2-7)
CASSRGESLYEQYF

SEQ ID NO: 328389 - protein, 11 aa, Homo sapiens
  CDR3 for alpha chain variable domain of TCR clone 164195 (TRAV2, TRAJ33)
CAVDSNYQLIW

SEQ ID NO: 328390 - protein, 15 aa, Homo sapiens
  CDR3 for beta chain variable domain of TCR clone 164195 (TRBV11-3, TRBJ2-7)
CASSPGPASSYEQYF

SEQ ID NO: 328391 - protein, 15 aa, Homo sapiens
  CDR3 for alpha chain variable domain of TCR clone 164196 (TRAV8-4, TRAJ13)
CAVSDWGGGYQKVTF

SEQ ID NO: 328392 - protein, 15 aa, Homo sapiens
  CDR3 for beta chain variable domain of TCR clone 164196 (TRBV25-1, IGLJ4)
CASSPGDSTNEKLFF

SEQ ID NO: 328393 - protein, 18 aa, Homo sapiens
  CDR3 for alpha chain variable domain of TCR clone 164197 (TRAV3, TRAJ17)
CAVRARRGGRSCRQQANF

SEQ ID NO: 328394 - protein, 15 aa, Homo sapiens
  CDR3 for beta chain variable domain of TCR clone 164197 (TRBV5-1, TRBJ2-7)
CASSLNGGPAREQYF

SEQ ID NO: 328395 - protein, 13 aa, Homo sapiens
  CDR3 for alpha chain variable domain of TCR clone 164198 (TRAV13-2, TRAJ48)
CAEMDFGNENLTF

SEQ ID NO: 328396 - protein, 15 aa, Homo sapiens
  CDR3 for beta chain variable domain of TCR clone 164198 (TRBV12-4, TRBJ2-1)
CASSLLATGNNEQFF

SEQ ID NO: 328397 - protein, 15 aa, Homo sapiens
  CDR3 for alpha chain variable domain of TCR clone 164199 (TRAV12-1, TRAJ44)
CVVDTPQGTASKLTF

SEQ ID NO: 328398 - protein, 17 aa, Homo sapiens
  CDR3 for beta chain variable domain of TCR clone 164199 (TRBV7-8, TRBJ2-6)
CASSAGTGGAGANVLTF

SEQ ID NO: 328399 - protein, 17 aa, Homo sapiens
  CDR3 for alpha chain variable domain of TCR clone 164200 (TRAV26-1, TRAJ53)
CIVRVDDSGGSNYKLTF

SEQ ID NO: 328400 - protein, 16 aa, Homo sapiens
  CDR3 for beta chain variable domain of TCR clone 164200 (TRBV12-4, TRBJ1-5)
CASRQPVEGSNQPQHF

SEQ ID NO: 328401 - protein, 14 aa, Homo sapiens
  CDR3 for alpha chain variable domain of TCR clone 164201 (TRAV12-1, TRAJ10)
CVVNSAGGGNKLTF

SEQ ID NO: 328402 - protein, 14 aa, Homo sapiens
  CDR3 for beta chain variable domain of TCR clone 164201 (TRBV12-4, TRBJ1-1)
CASSLGTGGTEAFL

SEQ ID NO: 328403 - protein, 12 aa, Homo sapiens
  CDR3 for alpha chain variable domain of TCR clone 164202 (TRAV12-3, TRAJ17)
CAMTLTGNKLTF

SEQ ID NO: 328404 - protein, 15 aa, Homo sapiens
  CDR3 for beta chain variable domain of TCR clone 164202 (TRBV28, TRBJ1-5)
CASSRTGGYVQPQHF

SEQ ID NO: 328405 - protein, 13 aa, Homo sapiens
  CDR3 for alpha chain variable domain of TCR clone 164203 (TRAV29/DV5, TRAJ31)
CAAGRNNNARLMF

SEQ ID NO: 328406 - protein, 13 aa, Homo sapiens
  CDR3 for beta chain variable domain of TCR clone 164203 (TRBV7-2, TRBJ2-4)
CASSREHANMQYF

SEQ ID NO: 328407 - protein, 14 aa, Homo sapiens
  CDR3 for alpha chain variable domain of TCR clone 164204 (TRAV12-2, TRAJ36)
CAVKISTGANNPYF

SEQ ID NO: 328408 - protein, 14 aa, Homo sapiens
  CDR3 for beta chain variable domain of TCR clone 164204 (TRBV25-1, TRBJ1-2)
CASSDTTGVVGYTF

SEQ ID NO: 328409 - protein, 15 aa, Homo sapiens
  CDR3 for alpha chain variable domain of TCR clone 164205 (TRAV26-1, TRAJ56)
CIVRVATGANSKLTF

SEQ ID NO: 328410 - protein, 16 aa, Homo sapiens
  CDR3 for beta chain variable domain of TCR clone 164205 (TRBV13, TRBJ2-3)
CQQPLQGSGGRNTQYF

SEQ ID NO: 328411 - protein, 11 aa, Homo sapiens
  CDR3 for alpha chain variable domain of TCR clone 164206 (TRAV16, TRAJ31)
GALFNNARLMF

SEQ ID NO: 328412 - protein, 15 aa, Homo sapiens
  CDR3 for beta chain variable domain of TCR clone 164206 (TRBV18, TRBJ1-1)
CASSPRQGENTEAFF

SEQ ID NO: 328413 - protein, 23 aa, Homo sapiens
  CDR3 for alpha chain variable domain of TCR clone 164207 (TRAV26-1, TRAJ38)
CIADNAGNNHIQNPDPAVYQLRD

SEQ ID NO: 328414 - protein, 15 aa, Homo sapiens
  CDR3 for beta chain variable domain of TCR clone 164207 (TRBV4-1, TRBJ2-1)
CASSQDPGNYNEQFF

SEQ ID NO: 328415 - protein, 14 aa, Homo sapiens
  CDR3 for alpha chain variable domain of TCR clone 164208 (TRAV17, TRAJ6)
CATVFQGGSYIPTF

SEQ ID NO: 328416 - protein, 17 aa, Homo sapiens
  CDR3 for beta chain variable domain of TCR clone 164208 (TRBV7-8, TRBJ2-6)
CANSAGTGGAGANVLTF

SEQ ID NO: 328417 - protein, 11 aa, Homo sapiens
  CDR3 for alpha chain variable domain of TCR clone 164209 (TRAV23/DV6, TRAJ58)
CAARLLRGETS

SEQ ID NO: 328418 - protein, 13 aa, Homo sapiens
  CDR3 for beta chain variable domain of TCR clone 164209 (TRBV19, TRBJ1-2)
CASSVPGQDGYTF

SEQ ID NO: 328419 - protein, 18 aa, Homo sapiens
  CDR3 for alpha chain variable domain of TCR clone 164210 (TRAV35, TRAJ45)
CAGQSTMYSGGGADGLTF

SEQ ID NO: 328420 - protein, 14 aa, Homo sapiens
  CDR3 for beta chain variable domain of TCR clone 164210 (TRBV5-1, TRBJ2-7)
CASSRGESLYEQYF

SEQ ID NO: 328421 - protein, 14 aa, Homo sapiens
  CDR3 for alpha chain variable domain of TCR clone 164211 (TRAV12-2, TRAJ3)
CAVKGYSSASKIIF

SEQ ID NO: 328422 - protein, 12 aa, Homo sapiens
  CDR3 for beta chain variable domain of TCR clone 164211 (TRBV11-2, TRBJ2-2)
CASSLGGGELFF

SEQ ID NO: 328423 - protein, 14 aa, Homo sapiens
  CDR3 for alpha chain variable domain of TCR clone 164212 (TRAV16, TRAJ48)
CALTPGFGNEKLTF

SEQ ID NO: 328424 - protein, 14 aa, Homo sapiens
  CDR3 for beta chain variable domain of TCR clone 164212 (TRBV7-2, TRBJ2-7)
CASSSISGFSEQHF

SEQ ID NO: 328425 - protein, 11 aa, Homo sapiens
  CDR3 for alpha chain variable domain of TCR clone 164213 (TRAV2, TRAJ33)
CAVESNYQLIW

SEQ ID NO: 328426 - protein, 18 aa, Homo sapiens
  CDR3 for beta chain variable domain of TCR clone 164213 (TRBV11-2, TRBJ2-3)
CASSLGGASRGAPNTQYS

SEQ ID NO: 328427 - protein, 17 aa, Homo sapiens
  CDR3 for alpha chain variable domain of TCR clone 164214 (TRAV17, TRAJ52)
CATDRNAGGTSYGRLTF

SEQ ID NO: 328428 - protein, 14 aa, Homo sapiens
  CDR3 for beta chain variable domain of TCR clone 164214 (TRBV7-8, TRBJ2-3)
CASSLEAGTDTQYF

SEQ ID NO: 328429 - protein, 14 aa, Homo sapiens
  CDR3 for alpha chain variable domain of TCR clone 164215 (TRAV12-1, TRAJ43)
CVVNGRSNNNDMRC

SEQ ID NO: 328430 - protein, 13 aa, Homo sapiens
  CDR3 for beta chain variable domain of TCR clone 164215 (TRBV10-3, TRBJ2-7)
CASKLAVNYEQYF

SEQ ID NO: 328431 - protein, 12 aa, Homo sapiens
  CDR3 for alpha chain variable domain of TCR clone 164216 (TRAV1-1, TRAJ8)
CAGGTGFQKLVF

SEQ ID NO: 328432 - protein, 16 aa, Homo sapiens
  CDR3 for beta chain variable domain of TCR clone 164216 (TRBV12-5, TRBJ2-5)
CASGPRTSGNQETQYF

SEQ ID NO: 328433 - protein, 14 aa, Homo sapiens
  CDR3 for alpha chain variable domain of TCR clone 164217 (TRAV12-2, TRAJ13)
CAVKKTGGYQKVTF

SEQ ID NO: 328434 - protein, 14 aa, Homo sapiens
  CDR3 for beta chain variable domain of TCR clone 164217 (TRBV5-4, TRBJ2-5)
CASSLYGAEETQYF

SEQ ID NO: 328435 - protein, 15 aa, Homo sapiens
  CDR3 for alpha chain variable domain of TCR clone 164218 (TRAV26-1, TRAJ47)
CIVRVAGEYGNKLVF

SEQ ID NO: 328436 - protein, 13 aa, Homo sapiens
  CDR3 for beta chain variable domain of TCR clone 164218 (TRBV30, TRBJ1-1)
CAWSRMLFPEAFF

SEQ ID NO: 328437 - protein, 14 aa, Homo sapiens
  CDR3 for alpha chain variable domain of TCR clone 164219 (TRAV1-2, TRAJ8)
CTVREDTGFQKLVF

SEQ ID NO: 328438 - protein, 17 aa, Homo sapiens
  CDR3 for beta chain variable domain of TCR clone 164219 (TRBV11-2, TRBJ2-1)
CASSLYPPGVEYNEQFF

SEQ ID NO: 328439 - protein, 15 aa, Homo sapiens
  CDR3 for alpha chain variable domain of TCR clone 164220 (TRAV21, TRAJ53)
CATLNSGGSNYKLTF

SEQ ID NO: 328440 - protein, 16 aa, Homo sapiens
  CDR3 for beta chain variable domain of TCR clone 164220 (TRBV12-4, TRBJ1-5)
CASSRPVGGYNQPQHF

SEQ ID NO: 328441 - protein, 13 aa, Homo sapiens
  CDR3 for alpha chain variable domain of TCR clone 164221 (TRAV19, TRAJ57)
CALLQGGSEKLVF

SEQ ID NO: 328442 - protein, 10 aa, Homo sapiens
  CDR3 for beta chain variable domain of TCR clone 164221 (TRBV20-1, TRBJ2-5)
CGARFETQYF

SEQ ID NO: 328443 - protein, 16 aa, Homo sapiens
  CDR3 for alpha chain variable domain of TCR clone 164222 (TRAV27, TRAJ52)
CAGAGAGGTSSGKLKF

SEQ ID NO: 328444 - protein, 17 aa, Homo sapiens
  CDR3 for beta chain variable domain of TCR clone 164222 (TRBV24-1, TRBJ2-3)
CATSDLPSGEDTDTQYF

SEQ ID NO: 328445 - protein, 15 aa, Homo sapiens
  CDR3 for alpha chain variable domain of TCR clone 164223 (TRAV26-1, TRAJ29)
CIVRVEGSGNTPLVF

SEQ ID NO: 328446 - protein, 14 aa, Homo sapiens
  CDR3 for beta chain variable domain of TCR clone 164223 (TRBV7-2, TRBJ2-7)
CASRSHGAAYEQYF

SEQ ID NO: 328447 - protein, 11 aa, Homo sapiens
  CDR3 for alpha chain variable domain of TCR clone 164224 (TRAV3, TRAJ21)
CAVGNFNQFYF

SEQ ID NO: 328448 - protein, 15 aa, Homo sapiens
  CDR3 for beta chain variable domain of TCR clone 164224 (TRBV29-1, TRBJ2-1)
CSVEGGPASYNEQFF

SEQ ID NO: 328449 - protein, 14 aa, Homo sapiens
  CDR3 for alpha chain variable domain of TCR clone 164225 (TRAV23/DV6, TRAJ40)
CAASLTSGTYEYIF

SEQ ID NO: 328450 - protein, 14 aa, Homo sapiens
  CDR3 for beta chain variable domain of TCR clone 164225 (TRBV5-1, TRBJ2-3)
CASSRGQGGGTQYF

SEQ ID NO: 328451 - protein, 17 aa, Homo sapiens
  CDR3 for alpha chain variable domain of TCR clone 164226 (TRAV16, TRAJ58)
CITLLSNGETSGSRLTF

SEQ ID NO: 328452 - protein, 17 aa, Homo sapiens
  CDR3 for beta chain variable domain of TCR clone 164226 (TRBV18, TRBJ2-1)
CASSTGLSGGADNEQFF

SEQ ID NO: 328453 - protein, 15 aa, Homo sapiens
  CDR3 for alpha chain variable domain of TCR clone 164227 (TRAV13-2, TRAJ10)
CAENKIGGGGNKLTF

SEQ ID NO: 328454 - protein, 15 aa, Homo sapiens
  CDR3 for beta chain variable domain of TCR clone 164227 (TRBV5-1, TRBJ1-2)
CASSPGDRGSYSYTF

SEQ ID NO: 328455 - protein, 11 aa, Homo sapiens
  CDR3 for alpha chain variable domain of TCR clone 164228 (TRAV12-3, TRAJ43)
CAMSVSNDMRF

SEQ ID NO: 328456 - protein, 14 aa, Homo sapiens
  CDR3 for beta chain variable domain of TCR clone 164228 (TRBV2, TRBJ2-1)
CASRTGSSYNEQFF

SEQ ID NO: 328457 - protein, 13 aa, Homo sapiens
  CDR3 for alpha chain variable domain of TCR clone 164229 (TRAV13-1, TRAJ39)
CAASISAGNMLTF

SEQ ID NO: 328458 - protein, 15 aa, Homo sapiens
  CDR3 for beta chain variable domain of TCR clone 164229 (TRBV7-9, TRBJ1-1)
CASSLLEQGGTEAFF

SEQ ID NO: 328459 - protein, 14 aa, Homo sapiens
  CDR3 for alpha chain variable domain of TCR clone 164230 (TRAV1-2, TRAJ16)
CAVNRFSDGQKLLF

SEQ ID NO: 328460 - protein, 14 aa, Homo sapiens
  CDR3 for beta chain variable domain of TCR clone 164230 (TRBV6-1, TRBJ1-3)
CVSVQGGGGNTIYF

SEQ ID NO: 328461 - protein, 16 aa, Homo sapiens
  CDR3 for alpha chain variable domain of TCR clone 164231 (TRAV3, TRAJ37)
CAVRPHGSGNTGKLIF

SEQ ID NO: 328462 - protein, 14 aa, Homo sapiens
  CDR3 for beta chain variable domain of TCR clone 164231 (TRBV7-7, TRBJ2-2)
CASSKGENTGELFF

SEQ ID NO: 328463 - protein, 16 aa, Homo sapiens
  CDR3 for alpha chain variable domain of TCR clone 164232 (TRAV21, TRAJ37)
CAVRTAGSSNTGKLIL

SEQ ID NO: 328464 - protein, 13 aa, Homo sapiens
  CDR3 for beta chain variable domain of TCR clone 164232 (TRBV7-9, TRBJ2-5)
CASLPSGREIQYF

SEQ ID NO: 328465 - protein, 15 aa, Homo sapiens
  CDR3 for alpha chain variable domain of TCR clone 164233 (TRAV16, TRAJ52)
ALSAAGGTSYGKLTF

SEQ ID NO: 328466 - protein, 15 aa, Homo sapiens
  CDR3 for beta chain variable domain of TCR clone 164233 (TRBV15, TRBJ1-1)
CATSLQGGRNTEAFF

SEQ ID NO: 328467 - protein, 15 aa, Homo sapiens
  CDR3 for alpha chain variable domain of TCR clone 164234 (TRAV4, TRAJ39)
CLVGPNNNAGNMLPF

SEQ ID NO: 328468 - protein, 15 aa, Homo sapiens
  CDR3 for beta chain variable domain of TCR clone 164234 (TRBV19, TRBJ1-6)
CASSTQGAVGSPLHF

SEQ ID NO: 328469 - protein, 14 aa, Homo sapiens
  CDR3 for alpha chain variable domain of TCR clone 164235 (TRAV20, TRAJ22)
CAVQGAGSARQLTF

SEQ ID NO: 328470 - protein, 19 aa, Homo sapiens
  CDR3 for beta chain variable domain of TCR clone 164235 (TRBV25-1, TRBJ2-2)
CAILVYRVDRGRKTGELFF

SEQ ID NO: 328471 - protein, 13 aa, Homo sapiens
  CDR3 for alpha chain variable domain of TCR clone 164236 (TRAV8-3, TRAJ28)
CAVGAVGSYQVTF

SEQ ID NO: 328472 - protein, 15 aa, Homo sapiens
  CDR3 for beta chain variable domain of TCR clone 164236 (TRBV7-9, TRBJ1-5)
CASSQGHQPNQPQHF

SEQ ID NO: 328473 - protein, 14 aa, Homo sapiens
  CDR3 for alpha chain variable domain of TCR clone 164237 (TRAV1-1, TRAJ27)
CAVIYNTNAGKSTF

SEQ ID NO: 328474 - protein, 14 aa, Homo sapiens
  CDR3 for beta chain variable domain of TCR clone 164237 (TRBV6-5, TRBJ1-2)
CASSYDGTGGGETF

SEQ ID NO: 328475 - protein, 15 aa, Homo sapiens
  CDR3 for alpha chain variable domain of TCR clone 164238 (TRAV4, TRAJ26)
CLVGDMNNYGQNFVF

SEQ ID NO: 328476 - protein, 16 aa, Homo sapiens
  CDR3 for beta chain variable domain of TCR clone 164238 (TRBV28, TRBJ1-4)
CASSSRTGAANAKLFF

SEQ ID NO: 328477 - protein, 12 aa, Homo sapiens
  CDR3 for alpha chain variable domain of TCR clone 164239 (TRAV8-6, TRAJ43)
CSVSHNNNDMRF

SEQ ID NO: 328478 - protein, 14 aa, Homo sapiens
  CDR3 for beta chain variable domain of TCR clone 164239 (TRBV10-3, TRBJ1-1)
CAISDGSGVTEAFF

SEQ ID NO: 328479 - protein, 12 aa, Homo sapiens
  CDR3 for alpha chain variable domain of TCR clone 164240 (TRAV12-3, TRAJ17)
CAMTLTGNKLTF

SEQ ID NO: 328480 - protein, 16 aa, Homo sapiens
  CDR3 for beta chain variable domain of TCR clone 164240 (TRBV20-1, TRBJ2-7)
CSARDRVSGMDEQYFG

SEQ ID NO: 328481 - protein, 16 aa, Homo sapiens
  CDR3 for alpha chain variable domain of TCR clone 164241 (TRAV30, TRAJ24)
CGTEIVDADSWGKFQF

SEQ ID NO: 328482 - protein, 13 aa, Homo sapiens
  CDR3 for beta chain variable domain of TCR clone 164241 (TRBV18, TRBJ1-2)
CSSSASATEGYTF

SEQ ID NO: 328483 - protein, 13 aa, Homo sapiens
  CDR3 for alpha chain variable domain of TCR clone 164242 (TRAV1-2, TRAJ7)
CAGPYYGNNRLAF

SEQ ID NO: 328484 - protein, 14 aa, Homo sapiens
  CDR3 for beta chain variable domain of TCR clone 164242 (TRBV25-1, TRBJ1-1)
CASTHLGGNTEAFF

SEQ ID NO: 328485 - protein, 17 aa, Homo sapiens
  CDR3 for alpha chain variable domain of TCR clone 164243 (TRAV20, TRAJ53)
CAVQAQGSGGSNYKLTF

SEQ ID NO: 328486 - protein, 15 aa, Homo sapiens
  CDR3 for beta chain variable domain of TCR clone 164243 (TRBV11-3, TRBJ2-5)
CASSLRGRVQETQYF

SEQ ID NO: 328487 - protein, 14 aa, Homo sapiens
  CDR3 for alpha chain variable domain of TCR clone 164244 (TRAV3, TRAJ9)
CAVRLNTGGFKTIF

SEQ ID NO: 328488 - protein, 15 aa, Homo sapiens
  CDR3 for beta chain variable domain of TCR clone 164244 (TRBV7-9, TRBJ2-7)
CASSPGGGLTYEQYF

SEQ ID NO: 328489 - protein, 14 aa, Homo sapiens
  CDR3 for alpha chain variable domain of TCR clone 164245 (TRAV26-1, TRAJ40)
CIVRLLSGTYKYIF

SEQ ID NO: 328490 - protein, 17 aa, Homo sapiens
  CDR3 for beta chain variable domain of TCR clone 164245 (TRBV11-2, TRBJ2-1)
CASSLYPPGVEYNEQFF

SEQ ID NO: 328491 - protein, 14 aa, Homo sapiens
  CDR3 for alpha chain variable domain of TCR clone 164246 (TRAV12-1, TRAJ12)
CVVTRMDSSYKLIF

SEQ ID NO: 328492 - protein, 13 aa, Homo sapiens
  CDR3 for beta chain variable domain of TCR clone 164246 (TRBV20-1, TRBJ1-1)
SAVLEAGNTEAFF

SEQ ID NO: 328493 - protein, 13 aa, Homo sapiens
  CDR3 for alpha chain variable domain of TCR clone 164247 (TRAV29/DV5, TRAJ13)
CAARPGGYQKVTF

SEQ ID NO: 328494 - protein, 16 aa, Homo sapiens
  CDR3 for beta chain variable domain of TCR clone 164247 (TRBV12-5, TRBJ2-5)
CASGPRTSGNQETQYF

SEQ ID NO: 328495 - protein, 15 aa, Homo sapiens
  CDR3 for alpha chain variable domain of TCR clone 164248 (TRAV3, TRAJ5)
CAVIYLDTGRRALTF

SEQ ID NO: 328496 - protein, 15 aa, Homo sapiens
  CDR3 for beta chain variable domain of TCR clone 164248 (TRBV20-1, TRBJ2-1)
CSARSPGGPGNEQFF

SEQ ID NO: 328497 - protein, 13 aa, Homo sapiens
  CDR3 for alpha chain variable domain of TCR clone 164249 (TRAV21, TRAJ27)
CAARPGNAGKSTF

SEQ ID NO: 328498 - protein, 15 aa, Homo sapiens
  CDR3 for beta chain variable domain of TCR clone 164249 (TRBV20-1, TRBJ2-7)
CSARDRVSVMDEQYF

SEQ ID NO: 328499 - protein, 13 aa, Homo sapiens
  CDR3 for alpha chain variable domain of TCR clone 164250 (TRAV2, TRAJ15)
CAVASQAGTALIF

SEQ ID NO: 328500 - protein, 15 aa, Homo sapiens
  CDR3 for beta chain variable domain of TCR clone 164250 (TRBV15, TRBJ2-2)
CATSRGLADTGELFF

SEQ ID NO: 328501 - protein, 15 aa, Homo sapiens
  CDR3 for alpha chain variable domain of TCR clone 164251 (TRAV17, TRAJ57)
CATGPSQGGSEKLVF

SEQ ID NO: 328502 - protein, 18 aa, Homo sapiens
  CDR3 for beta chain variable domain of TCR clone 164251 (TRBV12-4, TRBJ2-2)
CASSLVAGTRGRTGELFF

SEQ ID NO: 328503 - protein, 14 aa, Homo sapiens
  CDR3 for alpha chain variable domain of TCR clone 164252 (TRAV12-3, TRAJ6)
CAMSATGGSYTPTF

SEQ ID NO: 328504 - protein, 16 aa, Homo sapiens
  CDR3 for beta chain variable domain of TCR clone 164252 (TRBV4-2, TRBJ2-1)
CASSPRAGQGANEQFF

SEQ ID NO: 328505 - protein, 10 aa, Homo sapiens
  CDR3 for alpha chain variable domain of TCR clone 164253 (TRAV36/DV7, TRAJ56)
CAGPAVELTF

SEQ ID NO: 328506 - protein, 15 aa, Homo sapiens
  CDR3 for beta chain variable domain of TCR clone 164253 (TRBV7-3, TRBJ2-2)
CASSETGQGTGELFF

SEQ ID NO: 328507 - protein, 14 aa, Homo sapiens
  CDR3 for alpha chain variable domain of TCR clone 164254 (TRAV12-1, TRAJ30)
CVPTGTNRDDKIIF

SEQ ID NO: 328508 - protein, 11 aa, Homo sapiens
  CDR3 for beta chain variable domain of TCR clone 164254 (TRBV4-1, TRBJ2-2)
CASEHTGELFS

SEQ ID NO: 328509 - protein, 12 aa, Homo sapiens
  CDR3 for alpha chain variable domain of TCR clone 164255 (TRAV3, TRAJ26)
CAVRDYGQNFVY

SEQ ID NO: 328510 - protein, 16 aa, Homo sapiens
  CDR3 for beta chain variable domain of TCR clone 164255 (TRBV11-2, TRBJ1-2)
SASSPSGREANYGYTF

SEQ ID NO: 328511 - protein, 18 aa, Homo sapiens
  CDR3 for alpha chain variable domain of TCR clone 164256 (TRAV26-1, TRAJ52)
CIVRVEGAGGTSYGKLTF

SEQ ID NO: 328512 - protein, 13 aa, Homo sapiens
  CDR3 for beta chain variable domain of TCR clone 164256 (TRBV20-1, TRBJ1-1)
CSARGGGNTEAFF

SEQ ID NO: 328513 - protein, 15 aa, Homo sapiens
  CDR3 for alpha chain variable domain of TCR clone 164257 (TRAV3, TRAJ22)
CAVRDRGGSARQLTF

SEQ ID NO: 328514 - protein, 15 aa, Homo sapiens
  CDR3 for beta chain variable domain of TCR clone 164257 (TRBV7-9, TRBJ2-1)
CASSLAIGEYNEQFF

SEQ ID NO: 328515 - protein, 16 aa, Homo sapiens
  CDR3 for alpha chain variable domain of TCR clone 164258 (TRAV17, TRAJ22)
CATDAISSGSARQLTF

SEQ ID NO: 328516 - protein, 15 aa, Homo sapiens
  CDR3 for beta chain variable domain of TCR clone 164258 (TRBV6-3, TRBJ2-7)
CASSSPGTVFYEQYF

SEQ ID NO: 328517 - protein, 16 aa, Homo sapiens
  CDR3 for alpha chain variable domain of TCR clone 164259 (TRAV12-3, TRAJ53)
CAMSPGSGGSNYKLTV

SEQ ID NO: 328518 - protein, 13 aa, Homo sapiens
  CDR3 for beta chain variable domain of TCR clone 164259 (TRBV28, TRBJ1-3)
CASSLLGRSTIYF

SEQ ID NO: 328519 - protein, 15 aa, Homo sapiens
  CDR3 for alpha chain variable domain of TCR clone 164260 (TRAV2, TRAJ22)
CAVPSRGGSARQLTF

SEQ ID NO: 328520 - protein, 15 aa, Homo sapiens
  CDR3 for beta chain variable domain of TCR clone 164260 (TRBV7-9, TRBJ1-6)
CASSSPGRGNSPLHF

SEQ ID NO: 328521 - protein, 12 aa, Homo sapiens
  CDR3 for alpha chain variable domain of TCR clone 164261 (TRAV12-3, TRAJ17)
CAMTLTGNKRTF

SEQ ID NO: 328522 - protein, 18 aa, Homo sapiens
  CDR3 for beta chain variable domain of TCR clone 164261 (TRBV4-3, TRBJ1-6)
CASCQETPASSYNSPLHF

SEQ ID NO: 328523 - protein, 12 aa, Homo sapiens
  CDR3 for alpha chain variable domain of TCR clone 164262 (TRAV26-2, TRAJ21)
CILKGNFNKFYF

SEQ ID NO: 328524 - protein, 14 aa, Homo sapiens
  CDR3 for beta chain variable domain of TCR clone 164262 (TRBV11-3, TRBJ2-3)
CASSPSTRADTQYF

SEQ ID NO: 328525 - protein, 14 aa, Homo sapiens
  CDR3 for alpha chain variable domain of TCR clone 164263 (TRAV29/DV5, TRAJ36)
CAARRKTGAHNLFF

SEQ ID NO: 328526 - protein, 14 aa, Homo sapiens
  CDR3 for beta chain variable domain of TCR clone 164263 (TRBV5-1, TRBJ2-7)
CASSRGESLYEQYF

SEQ ID NO: 328527 - protein, 13 aa, Homo sapiens
  CDR3 for alpha chain variable domain of TCR clone 164264 (TRAV27, TRAJ6)
CAGGTRGSYIPPF

SEQ ID NO: 328528 - protein, 15 aa, Homo sapiens
  CDR3 for beta chain variable domain of TCR clone 164264 (TRBV11-2, TRBJ1-3)
CASSLSPLVRDTIYF

SEQ ID NO: 328529 - protein, 15 aa, Homo sapiens
  CDR3 for alpha chain variable domain of TCR clone 164265 (TRAV8-4, TRAJ37)
CAVSTRSGNTGILIF

SEQ ID NO: 328530 - protein, 20 aa, Homo sapiens
  CDR3 for beta chain variable domain of TCR clone 164265 (TRBV7-8, TRBJ2-2)
CASSHLFPVPTIHITGELFF

SEQ ID NO: 328531 - protein, 17 aa, Homo sapiens
  CDR3 for alpha chain variable domain of TCR clone 164266 (TRAV23/DV6, TRAJ53)
CAASKLGSGGSNYKLSF

SEQ ID NO: 328532 - protein, 13 aa, Homo sapiens
  CDR3 for beta chain variable domain of TCR clone 164266 (TRBV7-2, TRBJ2-7)
CASSSPSGSEQYF

SEQ ID NO: 328533 - protein, 14 aa, Homo sapiens
  CDR3 for alpha chain variable domain of TCR clone 164267 (TRAV1-2, TRAJ8)
CAVREDTGFQKLVF

SEQ ID NO: 328534 - protein, 14 aa, Homo sapiens
  CDR3 for beta chain variable domain of TCR clone 164267 (TRBV29-1, TRBJ2-5)
CSVETSGSGETQYV

SEQ ID NO: 328535 - protein, 15 aa, Homo sapiens
  CDR3 for alpha chain variable domain of TCR clone 164268 (TRAV12-2, TRAJ53)
CSVNGGGGSNYKLTF

SEQ ID NO: 328536 - protein, 14 aa, Homo sapiens
  CDR3 for beta chain variable domain of TCR clone 164268 (TRBV11-2, TRBJ2-5)
CASSRKGGIETQYF

SEQ ID NO: 328537 - protein, 14 aa, Homo sapiens
  CDR3 for alpha chain variable domain of TCR clone 164269 (TRAV19, TRAJ15)
CALRIEQAGSALIF

SEQ ID NO: 328538 - protein, 19 aa, Homo sapiens
  CDR3 for beta chain variable domain of TCR clone 164269 (TRBV28, TRBJ2-4)
CASSFQPGGPAQSKNIQYF

SEQ ID NO: 328539 - protein, 13 aa, Homo sapiens
  CDR3 for alpha chain variable domain of TCR clone 164270 (TRAV3, TRAJ9)
CCEGNTGGFKTIF

SEQ ID NO: 328540 - protein, 14 aa, Homo sapiens
  CDR3 for beta chain variable domain of TCR clone 164270 (TRBV7-6, TRBJ2-5)
CASSSPSGSETQYF

SEQ ID NO: 328541 - protein, 13 aa, Homo sapiens
  CDR3 for alpha chain variable domain of TCR clone 164271 (TRAV21, TRAJ27)
CAARPGNAGKPTF

SEQ ID NO: 328542 - protein, 17 aa, Homo sapiens
  CDR3 for beta chain variable domain of TCR clone 164271 (TRBV13, TRBJ2-3)
CASSLSRVAGGRNTQYF

SEQ ID NO: 328543 - protein, 14 aa, Homo sapiens
  CDR3 for alpha chain variable domain of TCR clone 164272 (TRAV29/DV5, TRAJ22)
CAASATGSARQLTF

SEQ ID NO: 328544 - protein, 14 aa, Homo sapiens
  CDR3 for beta chain variable domain of TCR clone 164272 (TRBV19, TRBJ2-1)
CAGSPGLAPNEQFF

SEQ ID NO: 328545 - protein, 17 aa, Homo sapiens
  CDR3 for alpha chain variable domain of TCR clone 164273 (TRAV27, TRAJ57)
CAGERGLTQGGSEKLVC

SEQ ID NO: 328546 - protein, 15 aa, Homo sapiens
  CDR3 for beta chain variable domain of TCR clone 164273 (TRBV27, TRBJ1-6)
CASSFDRGLGSPLHF

SEQ ID NO: 328547 - protein, 13 aa, Homo sapiens
  CDR3 for alpha chain variable domain of TCR clone 164274 (TRAV8-6, TRAJ13)
CAVSSGGYQKVTF

SEQ ID NO: 328548 - protein, 15 aa, Homo sapiens
  CDR3 for beta chain variable domain of TCR clone 164274 (TRBV7-9, TRBJ2-7)
CASSLPMGLANEQYF

SEQ ID NO: 328549 - protein, 14 aa, Homo sapiens
  CDR3 for alpha chain variable domain of TCR clone 164275 (TRAV16, TRAJ33)
CALSAMDSNCQLIW

SEQ ID NO: 328550 - protein, 15 aa, Homo sapiens
  CDR3 for beta chain variable domain of TCR clone 164275 (TRBV28, TRBJ2-7)
CASSLEAYPIYEQYF

SEQ ID NO: 328551 - protein, 12 aa, Homo sapiens
  CDR3 for alpha chain variable domain of TCR clone 164276 (TRAV8-3, TRAJ26)
CAGDNYSQNFVF

SEQ ID NO: 328552 - protein, 18 aa, Homo sapiens
  CDR3 for beta chain variable domain of TCR clone 164276 (TRBV12-4, TRBJ2-2)
CASSLVAGTRGRTGELFF

SEQ ID NO: 328553 - protein, 12 aa, Homo sapiens
  CDR3 for alpha chain variable domain of TCR clone 164277 (TRAV13-2, TRAJ23)
CAERYRGGKLIF

SEQ ID NO: 328554 - protein, 13 aa, Homo sapiens
  CDR3 for beta chain variable domain of TCR clone 164277 (TRBV2, TRBJ1-6)
CADSGSYNSPLHF

SEQ ID NO: 328555 - protein, 16 aa, Homo sapiens
  CDR3 for alpha chain variable domain of TCR clone 164278 (TRAV30, TRAJ24)
CGTEIVDADSWGKLQF

SEQ ID NO: 328556 - protein, 13 aa, Homo sapiens
  CDR3 for beta chain variable domain of TCR clone 164278 (TRBV20-1, TRBJ1-1)
CSAPPGGHTEAFF

SEQ ID NO: 328557 - protein, 12 aa, Homo sapiens
  CDR3 for alpha chain variable domain of TCR clone 164279 (TRAV25, TRAJ35)
CAGIGFGNVLHC

SEQ ID NO: 328558 - protein, 14 aa, Homo sapiens
  CDR3 for beta chain variable domain of TCR clone 164279 (TRBV7-2, TRBJ2-2)
CASSLAPNTGELFF

SEQ ID NO: 328559 - protein, 15 aa, Homo sapiens
  CDR3 for alpha chain variable domain of TCR clone 164280 (TRAV3, TRAJ3)
CAVRDGPSSASKIIF

SEQ ID NO: 328560 - protein, 14 aa, Homo sapiens
  CDR3 for beta chain variable domain of TCR clone 164280 (TRBV28, TRBJ1-4)
CASSFGTFDEKLFF

SEQ ID NO: 328561 - protein, 10 aa, Homo sapiens
  CDR3 for alpha chain variable domain of TCR clone 164281 (TRAV13-1, TRAJ8)
CAAPFQKLVF

SEQ ID NO: 328562 - protein, 22 aa, Homo sapiens
  CDR3 for beta chain variable domain of TCR clone 164281 (TRBV11-2, TRBJ1-4)
CASSLDITRRGIPRKDNEKLFF

SEQ ID NO: 328563 - protein, 15 aa, Homo sapiens
  CDR3 for alpha chain variable domain of TCR clone 164282 (TRAV8-4, TRAJ48)
CDVSAAYFGNEKLTF

SEQ ID NO: 328564 - protein, 12 aa, Homo sapiens
  CDR3 for beta chain variable domain of TCR clone 164282 (TRBV3-1, TRBJ2-5)
CASSQRGETQYF

SEQ ID NO: 328565 - protein, 15 aa, Homo sapiens
  CDR3 for alpha chain variable domain of TCR clone 164283 (TRAV3, TRAJ22)
CAVRDRGGSARHLTF

SEQ ID NO: 328566 - protein, 16 aa, Homo sapiens
  CDR3 for beta chain variable domain of TCR clone 164283 (TRBV5-4, TRBJ2-3)
CAGQQPGAGGADTQYF

SEQ ID NO: 328567 - protein, 14 aa, Homo sapiens
  CDR3 for alpha chain variable domain of TCR clone 164284 (TRAV1-2, TRAJ16)
CAVNRFSDGQKLFF

SEQ ID NO: 328568 - protein, 15 aa, Homo sapiens
  CDR3 for beta chain variable domain of TCR clone 164284 (TRBV6-1, TRBJ2-3)
CASSERGGITDTQYF

SEQ ID NO: 328569 - protein, 14 aa, Homo sapiens
  CDR3 for alpha chain variable domain of TCR clone 164285 (TRAV26-1, TRAJ38)
CIADNAGNNRKMIW

SEQ ID NO: 328570 - protein, 15 aa, Homo sapiens
  CDR3 for beta chain variable domain of TCR clone 164285 (TRBV20-1, TRBJ2-7)
CSARDRVSGMDEKYF

SEQ ID NO: 328571 - protein, 14 aa, Homo sapiens
  CDR3 for alpha chain variable domain of TCR clone 164286 (TRAV1-2, TRAJ33)
CAVRAPDSNYQLIW

SEQ ID NO: 328572 - protein, 15 aa, Homo sapiens
  CDR3 for beta chain variable domain of TCR clone 164286 (TRBV10-3, TRBJ2-3)
CAISLTSGRTDTQYF

SEQ ID NO: 328573 - protein, 11 aa, Homo sapiens
  CDR3 for alpha chain variable domain of TCR clone 164287 (TRAV2, TRAJ13)
CASGGYQKVTF

SEQ ID NO: 328574 - protein, 12 aa, Homo sapiens
  CDR3 for beta chain variable domain of TCR clone 164287 (TRBV5-5, TRBJ2-5)
CASSYFGETQYF

SEQ ID NO: 328575 - protein, 17 aa, Homo sapiens
  CDR3 for alpha chain variable domain of TCR clone 164288 (TRAV4, TRAJ18)
CLVGERSVGSTLGRLYF

SEQ ID NO: 328576 - protein, 13 aa, Homo sapiens
  CDR3 for beta chain variable domain of TCR clone 164288 (TRBV10-2, TRBJ2-7)
CASGASGGYEQYF

SEQ ID NO: 328577 - protein, 15 aa, Homo sapiens
  CDR3 for alpha chain variable domain of TCR clone 164289 (TRAV25, TRAJ52)
CAGTSGSTSYGKLTF

SEQ ID NO: 328578 - protein, 16 aa, Homo sapiens
  CDR3 for beta chain variable domain of TCR clone 164289 (TRBV15, TRBJ1-2)
CATSRGPRTGGGGYTC

SEQ ID NO: 328579 - protein, 14 aa, Homo sapiens
  CDR3 for alpha chain variable domain of TCR clone 164290 (TRAV8-4, TRAJ23)
CAVSAPGSGGKLIF

SEQ ID NO: 328580 - protein, 16 aa, Homo sapiens
  CDR3 for beta chain variable domain of TCR clone 164290 (TRBV4-2, TRBJ1-1)
CASSQAGFGMNTEAFF

SEQ ID NO: 328581 - protein, 13 aa, Homo sapiens
  CDR3 for alpha chain variable domain of TCR clone 164291 (TRAV2, TRAJ24)
CAVTSDSWGKLQF

SEQ ID NO: 328582 - protein, 14 aa, Homo sapiens
  CDR3 for beta chain variable domain of TCR clone 164291 (TRBV13, TRBJ2-5)
CASSLGRGQETQYF

SEQ ID NO: 328583 - protein, 16 aa, Homo sapiens
  CDR3 for alpha chain variable domain of TCR clone 164292 (TRAV25, TRAJ53)
CGVEGDSGGSNYKLTF

SEQ ID NO: 328584 - protein, 17 aa, Homo sapiens
  CDR3 for beta chain variable domain of TCR clone 164292 (TRBV15, TRBJ1-5)
CATSGGLARTSNQPQHF

SEQ ID NO: 328585 - protein, 13 aa, Homo sapiens
  CDR3 for alpha chain variable domain of TCR clone 164293 (TRAV16, TRAJ16)
CAPRSSDGQKLLF

SEQ ID NO: 328586 - protein, 13 aa, Homo sapiens
  CDR3 for beta chain variable domain of TCR clone 164293 (TRBV3-1, TRBJ2-5)
CASSPVLSETQYF

SEQ ID NO: 328587 - protein, 14 aa, Homo sapiens
  CDR3 for alpha chain variable domain of TCR clone 164294 (TRAV1-2, TRAJ8)
CAVREDTGFQKLVF

SEQ ID NO: 328588 - protein, 15 aa, Homo sapiens
  CDR3 for beta chain variable domain of TCR clone 164294 (TRBV7-2, TRBJ1-2)
CASSLDSGGDYGYTF

SEQ ID NO: 328589 - protein, 14 aa, Homo sapiens
  CDR3 for alpha chain variable domain of TCR clone 164295 (TRAV12-3, TRAJ9)
CAMSPNTGGFKTIF

SEQ ID NO: 328590 - protein, 16 aa, Homo sapiens
  CDR3 for beta chain variable domain of TCR clone 164295 (TRBV13, TRBJ2-2)
CASSEVFGANTGELFF

SEQ ID NO: 328591 - protein, 12 aa, Homo sapiens
  CDR3 for alpha chain variable domain of TCR clone 164296 (TRAV12-1, TRAJ40)
CVVYSGTYKYIL

SEQ ID NO: 328592 - protein, 18 aa, Homo sapiens
  CDR3 for beta chain variable domain of TCR clone 164296 (TRBV11-2, TRBJ2-3)
CASSLGGAARGAPNTQYF

SEQ ID NO: 328593 - protein, 14 aa, Homo sapiens
  CDR3 for alpha chain variable domain of TCR clone 164297 (TRAV12-1, TRAJ17)
CVVNYKAEGNKLTF

SEQ ID NO: 328594 - protein, 15 aa, Homo sapiens
  CDR3 for beta chain variable domain of TCR clone 164297 (TRBV20-1, TRBJ2-7)
CSARDRVSGMDEQYF

SEQ ID NO: 328595 - protein, 13 aa, Homo sapiens
  CDR3 for alpha chain variable domain of TCR clone 164298 (TRAV13-1, TRAJ43)
CAASLSNNNDMRF

SEQ ID NO: 328596 - protein, 14 aa, Homo sapiens
  CDR3 for beta chain variable domain of TCR clone 164298 (TRBV20-1, TRBJ1-1)
CSAQTRIGGTEAFF

SEQ ID NO: 328597 - protein, 18 aa, Homo sapiens
  CDR3 for alpha chain variable domain of TCR clone 164299 (TRAV26-2, TRAJ54)
CILRDVEVGIQGVQKLVF

SEQ ID NO: 328598 - protein, 16 aa, Homo sapiens
  CDR3 for beta chain variable domain of TCR clone 164299 (TRBV2, TRBJ2-1)
CASSVGGSLSYNEQFF

SEQ ID NO: 328599 - protein, 15 aa, Homo sapiens
  CDR3 for alpha chain variable domain of TCR clone 164300 (TRAV12-2, TRAJ53)
CAVNGGGGSNYKLTF

SEQ ID NO: 328600 - protein, 16 aa, Homo sapiens
  CDR3 for beta chain variable domain of TCR clone 164300 (TRBV11-3, TRBJ2-5)
CASSSVVAGSTETQYF

SEQ ID NO: 328601 - protein, 14 aa, Homo sapiens
  CDR3 for alpha chain variable domain of TCR clone 164301 (TRAV1-2, TRAJ8)
CAVREDTGFQKLVF

SEQ ID NO: 328602 - protein, 14 aa, Homo sapiens
  CDR3 for beta chain variable domain of TCR clone 164301 (TRBV7-9, TRBJ2-4)
CASSLAMGGNIQYF

SEQ ID NO: 328603 - protein, 11 aa, Homo sapiens
  CDR3 for alpha chain variable domain of TCR clone 164302 (TRAV1-2, TRAJ20)
CAVSNDYKLSF

SEQ ID NO: 328604 - protein, 15 aa, Homo sapiens
  CDR3 for beta chain variable domain of TCR clone 164302 (TRBV5-1, TRBJ2-2)
CASSSQGGNTGELFL

SEQ ID NO: 328605 - protein, 14 aa, Homo sapiens
  CDR3 for alpha chain variable domain of TCR clone 164303 (TRAV12-2, TRAJ33)
CAVKRARSNYQLIW

SEQ ID NO: 328606 - protein, 14 aa, Homo sapiens
  CDR3 for beta chain variable domain of TCR clone 164303 (TRBV6-1, TRBJ1-3)
GASVQGGGGNTMYF

SEQ ID NO: 328607 - protein, 12 aa, Homo sapiens
  CDR3 for alpha chain variable domain of TCR clone 164304 (TRAV13-2, TRAJ23)
CAERHRGGKLIF

SEQ ID NO: 328608 - protein, 12 aa, Homo sapiens
  CDR3 for beta chain variable domain of TCR clone 164304 (TRBV11-2, TRBJ2-2)
CARSLGGGELFF

SEQ ID NO: 328609 - protein, 14 aa, Homo sapiens
  CDR3 for alpha chain variable domain of TCR clone 164305 (TRAV12-1, TRAJ27)
CGEHIRTNAVKSTF

SEQ ID NO: 328610 - protein, 15 aa, Homo sapiens
  CDR3 for beta chain variable domain of TCR clone 164305 (TRBV19, TRBJ1-1)
CASTSGQIQNTEAFF

SEQ ID NO: 328611 - protein, 18 aa, Homo sapiens
  CDR3 for alpha chain variable domain of TCR clone 164306 (TRAV12-3, TRAJ52)
CAMSMGGAGGTSYGKLTF

SEQ ID NO: 328612 - protein, 15 aa, Homo sapiens
  CDR3 for beta chain variable domain of TCR clone 164306 (TRBV7-2, TRBJ1-2)
CASSPRAGWNYGYTF

SEQ ID NO: 328613 - protein, 14 aa, Homo sapiens
  CDR3 for alpha chain variable domain of TCR clone 164307 (TRAV1-2, TRAJ16)
CAVNRFSDGQKLLF

SEQ ID NO: 328614 - protein, 13 aa, Homo sapiens
  CDR3 for beta chain variable domain of TCR clone 164307 (TRBV11-3, TRBJ1-2)
CASSLPGDVGYTF

SEQ ID NO: 328615 - protein, 14 aa, Homo sapiens
  CDR3 for alpha chain variable domain of TCR clone 164308 (TRAV12-3, TRAJ33)
CAMSVPGSNYQLIW

SEQ ID NO: 328616 - protein, 14 aa, Homo sapiens
  CDR3 for beta chain variable domain of TCR clone 164308 (TRBV7-2, TRBJ2-7)
CASSGLAGRGEQYF

SEQ ID NO: 328617 - protein, 17 aa, Homo sapiens
  CDR3 for alpha chain variable domain of TCR clone 164309 (TRAV13-1, TRAJ5)
CTNPSLSRDTGRRALTF

SEQ ID NO: 328618 - protein, 17 aa, Homo sapiens
  CDR3 for beta chain variable domain of TCR clone 164309 (TRBV24-1, TRBJ2-1)
CATSDVSTSGTYNEQFF

SEQ ID NO: 328619 - protein, 17 aa, Homo sapiens
  CDR3 for alpha chain variable domain of TCR clone 164310 (TRAV4, TRAJ18)
CLVGERSVGSTLGRLYF

SEQ ID NO: 328620 - protein, 18 aa, Homo sapiens
  CDR3 for beta chain variable domain of TCR clone 164310 (TRBV11-2, TRBJ2-3)
CASSLGGASRVAPNTQYF

SEQ ID NO: 328621 - protein, 13 aa, Homo sapiens
  CDR3 for alpha chain variable domain of TCR clone 164311 (TRAV21, TRAJ36)
CAVREAGANNPFF

SEQ ID NO: 328622 - protein, 15 aa, Homo sapiens
  CDR3 for beta chain variable domain of TCR clone 164311 (TRBV10-3, TRBJ1-3)
CAISDSQGAGNTIYF

SEQ ID NO: 328623 - protein, 18 aa, Homo sapiens
  CDR3 for alpha chain variable domain of TCR clone 164312 (TRAV12-3, TRAJ52)
CAMSRTNAGGTSYGKLTF

SEQ ID NO: 328624 - protein, 13 aa, Homo sapiens
  CDR3 for beta chain variable domain of TCR clone 164312 (TRBV19, TRBJ1-2)
CASSQGQVYGYTF

SEQ ID NO: 328625 - protein, 14 aa, Homo sapiens
  CDR3 for alpha chain variable domain of TCR clone 164313 (TRAV35, TRAJ46)
CAGPQKSSGDKLTF

SEQ ID NO: 328626 - protein, 12 aa, Homo sapiens
  CDR3 for beta chain variable domain of TCR clone 164313 (TRBV28, TRBJ2-1)
CASSVQINEQFF

SEQ ID NO: 328627 - protein, 14 aa, Homo sapiens
  CDR3 for alpha chain variable domain of TCR clone 164314 (TRAV12-2, TRAJ13)
CAVKKTGGYQNVTF

SEQ ID NO: 328628 - protein, 15 aa, Homo sapiens
  CDR3 for beta chain variable domain of TCR clone 164314 (TRBV19, TRBJ1-2)
CASSVGQVLNYGYTF

SEQ ID NO: 328629 - protein, 10 aa, Homo sapiens
  CDR3 for alpha chain variable domain of TCR clone 164315 (TRAV1-2, TRAJ23)
CTGQGGKLIF

SEQ ID NO: 328630 - protein, 16 aa, Homo sapiens
  CDR3 for beta chain variable domain of TCR clone 164315 (TRBV11-2, TRBJ1-1)
CASSLRQGGEHSKAFF

SEQ ID NO: 328631 - protein, 16 aa, Homo sapiens
  CDR3 for alpha chain variable domain of TCR clone 164316 (TRAV26-1, TRAJ53)
CIVRVAMGGSNYKLTF

SEQ ID NO: 328632 - protein, 18 aa, Homo sapiens
  CDR3 for beta chain variable domain of TCR clone 164316 (TRBV6-6, TRBJ1-3)
CASSYSKWDSISGNTIYF

SEQ ID NO: 328633 - protein, 13 aa, Homo sapiens
  CDR3 for alpha chain variable domain of TCR clone 164317 (TRAV12-3, TRAJ13)
CAMSSGGLPGSYL

SEQ ID NO: 328634 - protein, 13 aa, Homo sapiens
  CDR3 for beta chain variable domain of TCR clone 164317 (TRBV29-1, TRBJ2-1)
CSVEGGRVNEQFF

SEQ ID NO: 328635 - protein, 17 aa, Homo sapiens
  CDR3 for alpha chain variable domain of TCR clone 164318 (TRAV3, TRAJ6)
CAVRDGPRAGGSYIPTF

SEQ ID NO: 328636 - protein, 16 aa, Homo sapiens
  CDR3 for beta chain variable domain of TCR clone 164318 (TRBV7-8, TRBJ2-3)
CASSTEGRRETDTQYF

SEQ ID NO: 328637 - protein, 16 aa, Homo sapiens
  CDR3 for alpha chain variable domain of TCR clone 164319 (TRAV26-1, TRAJ53)
CTVRVAMGGSNYKMTF

SEQ ID NO: 328638 - protein, 12 aa, Homo sapiens
  CDR3 for beta chain variable domain of TCR clone 164319 (TRBV7-9, TRBJ1-5)
CASSPQGQPQHF

SEQ ID NO: 328639 - protein, 19 aa, Homo sapiens
  CDR3 for alpha chain variable domain of TCR clone 164320 (TRAV26-1, TRAJ52)
CIVRAHRNAGGTSYRKLTF

SEQ ID NO: 328640 - protein, 13 aa, Homo sapiens
  CDR3 for beta chain variable domain of TCR clone 164320 (TRBV20-1, TRBJ1-6)
CSAPLGVGSPLHF

SEQ ID NO: 328641 - protein, 14 aa, Homo sapiens
  CDR3 for alpha chain variable domain of TCR clone 164321 (TRAV2, TRAJ3)
CAVRPYSSASKITF

SEQ ID NO: 328642 - protein, 17 aa, Homo sapiens
  CDR3 for beta chain variable domain of TCR clone 164321 (TRBV7-6, TRBJ2-5)
CASSSPQAGDPSETQYF

SEQ ID NO: 328643 - protein, 15 aa, Homo sapiens
  CDR3 for alpha chain variable domain of TCR clone 164322 (TRAV2, TRAJ24)
CAVVRLKNIWGKLQF

SEQ ID NO: 328644 - protein, 16 aa, Homo sapiens
  CDR3 for beta chain variable domain of TCR clone 164322 (TRBV7-7, TRBJ2-3)
CASSPGTSGSTDTQYF

SEQ ID NO: 328645 - protein, 16 aa, Homo sapiens
  CDR3 for alpha chain variable domain of TCR clone 164323 (TRAV3, TRAJ23)
CAVKTGIYNQGGKIIF

SEQ ID NO: 328646 - protein, 17 aa, Homo sapiens
  CDR3 for beta chain variable domain of TCR clone 164323 (TRBV10-3, TRBJ2-6)
CAISESTAPSGANVLTF

SEQ ID NO: 328647 - protein, 23 aa, Homo sapiens
  CDR3 for alpha chain variable domain of TCR clone 164324 (TRAV26-1, TRAJ38)
CIADNAGNNHIQNPDPAVYQLRD

SEQ ID NO: 328648 - protein, 16 aa, Homo sapiens
  CDR3 for beta chain variable domain of TCR clone 164324 (TRBV12-4, TRBJ2-3)
CASSLRLAETTDTQYF

SEQ ID NO: 328649 - protein, 15 aa, Homo sapiens
  CDR3 for alpha chain variable domain of TCR clone 164325 (TRAV34, TRAJ38)
CGADFTPGNNRKLIW

SEQ ID NO: 328650 - protein, 13 aa, Homo sapiens
  CDR3 for beta chain variable domain of TCR clone 164325 (TRBV9, TRBJ2-1)
CASSPSGGNEQFF

SEQ ID NO: 328651 - protein, 23 aa, Homo sapiens
  CDR3 for alpha chain variable domain of TCR clone 164326 (TRAV30, TRAJ43)
GLPAQLLRNLLLWHRGRGNDMRF

SEQ ID NO: 328652 - protein, 12 aa, Homo sapiens
  CDR3 for beta chain variable domain of TCR clone 164326 (TRBV11-2, TRBJ2-1)
CASSPGNNEQFF

SEQ ID NO: 328653 - protein, 14 aa, Homo sapiens
  CDR3 for alpha chain variable domain of TCR clone 164327 (TRAV2, TRAJ9)
CAVEYRSGGFKTIF

SEQ ID NO: 328654 - protein, 15 aa, Homo sapiens
  CDR3 for beta chain variable domain of TCR clone 164327 (TRBV19, TRBJ2-1)
CASSSPGVPLDEQFF

SEQ ID NO: 328655 - protein, 14 aa, Homo sapiens
  CDR3 for alpha chain variable domain of TCR clone 164328 (TRAV12-2, TRAJ24)
CAVTPADSWGKLEF

SEQ ID NO: 328656 - protein, 15 aa, Homo sapiens
  CDR3 for beta chain variable domain of TCR clone 164328 (TRBV9, TRBJ1-6)
CASSVAGTGDSPLHF

SEQ ID NO: 328657 - protein, 15 aa, Homo sapiens
  CDR3 for alpha chain variable domain of TCR clone 164329 (TRAV20, TRAJ6)
SAVRLQSGGSYIPTF

SEQ ID NO: 328658 - protein, 14 aa, Homo sapiens
  CDR3 for beta chain variable domain of TCR clone 164329 (TRBV12-4, TRBJ2-7)
CASSASGGWYEQYF

SEQ ID NO: 328659 - protein, 11 aa, Homo sapiens
  CDR3 for alpha chain variable domain of TCR clone 164330 (TRAV4, TRAJ20)
CLVGDKVTTTR

SEQ ID NO: 328660 - protein, 15 aa, Homo sapiens
  CDR3 for beta chain variable domain of TCR clone 164330 (TRBV18, TRBJ2-7)
CASSPSSTGNYEQYF

SEQ ID NO: 328661 - protein, 12 aa, Homo sapiens
  CDR3 for alpha chain variable domain of TCR clone 164331 (TRAV12-2, TRAJ3)
CAAWSSASKIIF

SEQ ID NO: 328662 - protein, 14 aa, Homo sapiens
  CDR3 for beta chain variable domain of TCR clone 164331 (TRBV11-2, TRBJ2-3)
CASSRLARTDTQYF

SEQ ID NO: 328663 - protein, 14 aa, Homo sapiens
  CDR3 for alpha chain variable domain of TCR clone 164332 (TRAV1-2, TRAJ16)
CAVTRLSDGQKLLF

SEQ ID NO: 328664 - protein, 15 aa, Homo sapiens
  CDR3 for beta chain variable domain of TCR clone 164332 (TRBV9, TRBJ1-6)
CASSVAGTGDSPLLF

SEQ ID NO: 328665 - protein, 13 aa, Homo sapiens
  CDR3 for alpha chain variable domain of TCR clone 164333 (TRAV26-1, TRAJ30)
CIVRVESNDKIIF

SEQ ID NO: 328666 - protein, 17 aa, Homo sapiens
  CDR3 for beta chain variable domain of TCR clone 164333 (TRBV13, TRBJ2-3)
CASSLSRVAGGRYTQYF

SEQ ID NO: 328667 - protein, 11 aa, Homo sapiens
  CDR3 for alpha chain variable domain of TCR clone 164334 (TRAV12-2, TRAJ21)
CAVRNFTKFYF

SEQ ID NO: 328668 - protein, 14 aa, Homo sapiens
  CDR3 for beta chain variable domain of TCR clone 164334 (TRBV5-4, TRBJ1-1)
CASSLDSRRDEAFF

SEQ ID NO: 328669 - protein, 13 aa, Homo sapiens
  CDR3 for alpha chain variable domain of TCR clone 164335 (TRAV3, TRAJ21)
CAVREPDFNKFYF

SEQ ID NO: 328670 - protein, 12 aa, Homo sapiens
  CDR3 for beta chain variable domain of TCR clone 164335 (TRBV12-4, TRBJ1-5)
CASSLGRQPQHF

SEQ ID NO: 328671 - protein, 14 aa, Homo sapiens
  CDR3 for alpha chain variable domain of TCR clone 164336 (TRAV1-2, TRAJ8)
CAVREDTGFQKLVF

SEQ ID NO: 328672 - protein, 13 aa, Homo sapiens
  CDR3 for beta chain variable domain of TCR clone 164336 (TRBV25-1, TRBJ1-1)
CASSGQVRAEAFF

SEQ ID NO: 328673 - protein, 14 aa, Homo sapiens
  CDR3 for alpha chain variable domain of TCR clone 164337 (TRAV12-1, TRAJ13)
CVVIDSGGYQKVTF

SEQ ID NO: 328674 - protein, 12 aa, Homo sapiens
  CDR3 for beta chain variable domain of TCR clone 164337 (TRBV29-1, TRBJ2-3)
YSVTGGADTQYF

SEQ ID NO: 328675 - protein, 12 aa, Homo sapiens
  CDR3 for alpha chain variable domain of TCR clone 164338 (TRAV36/DV7, TRAJ30)
CAASNRDDKIIF

SEQ ID NO: 328676 - protein, 17 aa, Homo sapiens
  CDR3 for beta chain variable domain of TCR clone 164338 (TRBV19, TRBJ2-6)
CASSTGQVFSGANVLTF

SEQ ID NO: 328677 - protein, 11 aa, Homo sapiens
  CDR3 for alpha chain variable domain of TCR clone 164339 (TRAV13-1, TRAJ39)
CASHAGNMPTF

SEQ ID NO: 328678 - protein, 15 aa, Homo sapiens
  CDR3 for beta chain variable domain of TCR clone 164339 (TRBV6-3, TRBJ2-7)
CASSSPGTVFYEQYF

SEQ ID NO: 328679 - protein, 14 aa, Homo sapiens
  CDR3 for alpha chain variable domain of TCR clone 164340 (TRAV12-2, TRAJ40)
CAVKIPSGTYKYIF

SEQ ID NO: 328680 - protein, 14 aa, Homo sapiens
  CDR3 for beta chain variable domain of TCR clone 164340 (TRBV5-4, TRBJ1-1)
CASSLDSRRDEAFF

SEQ ID NO: 328681 - protein, 12 aa, Homo sapiens
  CDR3 for alpha chain variable domain of TCR clone 164341 (TRAV2, TRAJ33)
CAFMDSNYQLIW

SEQ ID NO: 328682 - protein, 16 aa, Homo sapiens
  CDR3 for beta chain variable domain of TCR clone 164341 (TRBV2, TRBJ2-7)
CASSEPWTGLSYEQYF

SEQ ID NO: 328683 - protein, 14 aa, Homo sapiens
  CDR3 for alpha chain variable domain of TCR clone 164342 (TRAV12-2, TRAJ32)
CAHPESGATNKLIF

SEQ ID NO: 328684 - protein, 14 aa, Homo sapiens
  CDR3 for beta chain variable domain of TCR clone 164342 (TRBV15, TRBJ2-5)
CATSGDRGQETQYF

SEQ ID NO: 328685 - protein, 11 aa, Homo sapiens
  CDR3 for alpha chain variable domain of TCR clone 164343 (TRAV12-3, TRAJ43)
CAMSVSNDVRF

SEQ ID NO: 328686 - protein, 13 aa, Homo sapiens
  CDR3 for beta chain variable domain of TCR clone 164343 (TRBV7-3, TRBJ2-5)
CASSIGFFETQYF

SEQ ID NO: 328687 - protein, 18 aa, Homo sapiens
  CDR3 for alpha chain variable domain of TCR clone 164344 (TRAV3, TRAJ17)
CAVRARRGGRSCRQQANF

SEQ ID NO: 328688 - protein, 13 aa, Homo sapiens
  CDR3 for beta chain variable domain of TCR clone 164344 (TRBV7-3, TRBJ1-1)
CASSQDWGAEAFF

SEQ ID NO: 328689 - protein, 14 aa, Homo sapiens
  CDR3 for alpha chain variable domain of TCR clone 164345 (TRAV4, TRAJ26)
CLVGPHNYGQKFVF

SEQ ID NO: 328690 - protein, 17 aa, Homo sapiens
  CDR3 for beta chain variable domain of TCR clone 164345 (TRBV24-1, TRBJ2-1)
CATSDVSTSGTYNEQFF

SEQ ID NO: 328691 - protein, 14 aa, Homo sapiens
  CDR3 for alpha chain variable domain of TCR clone 164346 (TRAV1-2, TRAJ8)
CAAREDTGFQKLVF

SEQ ID NO: 328692 - protein, 15 aa, Homo sapiens
  CDR3 for beta chain variable domain of TCR clone 164346 (TRBV19, TRBJ2-1)
CASSTGTSSYNEQFF

SEQ ID NO: 328693 - protein, 16 aa, Homo sapiens
  CDR3 for alpha chain variable domain of TCR clone 164347 (TRAV30, TRAJ24)
CGTEIVDADSWGKFQF

SEQ ID NO: 328694 - protein, 16 aa, Homo sapiens
  CDR3 for beta chain variable domain of TCR clone 164347 (TRBV2, TRBJ1-3)
CASSGGAGRSGNAIYF

SEQ ID NO: 328695 - protein, 11 aa, Homo sapiens
  CDR3 for alpha chain variable domain of TCR clone 164348 (TRAV1-1, TRAJ20)
CAVFNDYKLSF

SEQ ID NO: 328696 - protein, 15 aa, Homo sapiens
  CDR3 for beta chain variable domain of TCR clone 164348 (TRBV6-6, TRBJ2-7)
CASSYSYGGSYEQYF

SEQ ID NO: 328697 - protein, 14 aa, Homo sapiens
  CDR3 for alpha chain variable domain of TCR clone 164349 (TRAV38-1, TRAJ45)
CAYYSGGGAVGLTF

SEQ ID NO: 328698 - protein, 15 aa, Homo sapiens
  CDR3 for beta chain variable domain of TCR clone 164349 (TRBV11-2, TRBJ2-1)
CASSKNRGLIYEQFF

SEQ ID NO: 328699 - protein, 12 aa, Homo sapiens
  CDR3 for alpha chain variable domain of TCR clone 164350 (TRAV8-3, TRAJ20)
CAVGANDYKLSF

SEQ ID NO: 328700 - protein, 16 aa, Homo sapiens
  CDR3 for beta chain variable domain of TCR clone 164350 (TRBV19, TRBJ2-2)
CASRSPGTGATGQMFF

SEQ ID NO: 328701 - protein, 15 aa, Homo sapiens
  CDR3 for alpha chain variable domain of TCR clone 164351 (TRAV8-2, TRAJ40)
CVVLGTTSGTYKYIF

SEQ ID NO: 328702 - protein, 14 aa, Homo sapiens
  CDR3 for beta chain variable domain of TCR clone 164351 (TRBV13, TRBJ2-3)
CASSSGSPTDTQYF

SEQ ID NO: 328703 - protein, 14 aa, Homo sapiens
  CDR3 for alpha chain variable domain of TCR clone 164352 (TRAV26-1, TRAJ45)
CIVRVVGGADGLTF

SEQ ID NO: 328704 - protein, 15 aa, Homo sapiens
  CDR3 for beta chain variable domain of TCR clone 164352 (TRBV7-9, TRBJ1-5)
CASSQGHQPNQPQHF

SEQ ID NO: 328705 - protein, 14 aa, Homo sapiens
  CDR3 for alpha chain variable domain of TCR clone 164353 (TRAV1-2, TRAJ8)
CAVREGTGFQKLVF

SEQ ID NO: 328706 - protein, 17 aa, Homo sapiens
  CDR3 for beta chain variable domain of TCR clone 164353 (TRBV20-1, TRBJ2-2)
CSASGSGQGGLTGELFF

SEQ ID NO: 328707 - protein, 10 aa, Homo sapiens
  CDR3 for alpha chain variable domain of TCR clone 164354 (TRAV1-2, TRAJ20)
CALNDYKLSF

SEQ ID NO: 328708 - protein, 13 aa, Homo sapiens
  CDR3 for beta chain variable domain of TCR clone 164354 (TRBV12-4, TRBJ1-1)
CASSSRAGAEAFF

SEQ ID NO: 328709 - protein, 14 aa, Homo sapiens
  CDR3 for alpha chain variable domain of TCR clone 164355 (TRAV27, TRAJ22)
CAGVSVLGKRQLTF

SEQ ID NO: 328710 - protein, 14 aa, Homo sapiens
  CDR3 for beta chain variable domain of TCR clone 164355 (TRBV7-2, TRBJ2-7)
CASSPKTSFYEQYF

SEQ ID NO: 328711 - protein, 13 aa, Homo sapiens
  CDR3 for alpha chain variable domain of TCR clone 164356 (TRAV17, TRAJ40)
CAGALGGNYKYIF

SEQ ID NO: 328712 - protein, 16 aa, Homo sapiens
  CDR3 for beta chain variable domain of TCR clone 164356 (TRBV11-2, TRBJ1-2)
CASSLDTGGADYGYTF

SEQ ID NO: 328713 - protein, 16 aa, Homo sapiens
  CDR3 for alpha chain variable domain of TCR clone 164357 (TRAV13-1, TRAJ48)
CAASIFGNFGNEKLTF

SEQ ID NO: 328714 - protein, 15 aa, Homo sapiens
  CDR3 for beta chain variable domain of TCR clone 164357 (TRBV11-2, TRBJ2-2)
CASSSDRVNAGELFF

SEQ ID NO: 328715 - protein, 17 aa, Homo sapiens
  CDR3 for alpha chain variable domain of TCR clone 164358 (TRAV3, TRAJ42)
CAVRDRDYGGSQGNLIF

SEQ ID NO: 328716 - protein, 17 aa, Homo sapiens
  CDR3 for beta chain variable domain of TCR clone 164358 (TRBV25-1, TRBJ2-7)
CASSDARVVFSSYEQYF

SEQ ID NO: 328717 - protein, 15 aa, Homo sapiens
  CDR3 for alpha chain variable domain of TCR clone 164359 (TRAV3, TRAJ47)
CAVIDIGEYGNKLVF

SEQ ID NO: 328718 - protein, 14 aa, Homo sapiens
  CDR3 for beta chain variable domain of TCR clone 164359 (TRBV13, TRBJ2-5)
CASSLERVGETQYF

SEQ ID NO: 328719 - protein, 12 aa, Homo sapiens
  CDR3 for alpha chain variable domain of TCR clone 164360 (TRAV23/DV6, TRAJ30)
CAASKGDDKIIF

SEQ ID NO: 328720 - protein, 17 aa, Homo sapiens
  CDR3 for beta chain variable domain of TCR clone 164360 (TRBV4-2, TRBJ1-1)
CASTQFGGGSGNTEAFF

SEQ ID NO: 328721 - protein, 17 aa, Homo sapiens
  CDR3 for alpha chain variable domain of TCR clone 164361 (TRAV2, TRAJ22)
ILQVLYSDAAEQRQLTF

SEQ ID NO: 328722 - protein, 16 aa, Homo sapiens
  CDR3 for beta chain variable domain of TCR clone 164361 (TRBV2, TRBJ2-5)
CASSETQGVGEETQYF

SEQ ID NO: 328723 - protein, 14 aa, Homo sapiens
  CDR3 for alpha chain variable domain of TCR clone 164362 (TRAV13-1, TRAJ44)
CAAKATGTASKLTF

SEQ ID NO: 328724 - protein, 14 aa, Homo sapiens
  CDR3 for beta chain variable domain of TCR clone 164362 (TRBV28, TRBJ1-4)
CASSFGTFDEKLFF

SEQ ID NO: 328725 - protein, 13 aa, Homo sapiens
  CDR3 for alpha chain variable domain of TCR clone 164363 (TRAV27, TRAJ6)
CAGGTRGSYIPTF

SEQ ID NO: 328726 - protein, 16 aa, Homo sapiens
  CDR3 for beta chain variable domain of TCR clone 164363 (TRBV7-8, TRBJ2-6)
CASRVGDSSGANDLTF

SEQ ID NO: 328727 - protein, 14 aa, Homo sapiens
  CDR3 for alpha chain variable domain of TCR clone 164364 (TRAV2, TRAJ23)
CAVIIYHQGGKLIF

SEQ ID NO: 328728 - protein, 13 aa, Homo sapiens
  CDR3 for beta chain variable domain of TCR clone 164364 (TRBV20-1, TRBJ2-3)
CSATSGGAGTQYF

SEQ ID NO: 328729 - protein, 10 aa, Homo sapiens
  CDR3 for alpha chain variable domain of TCR clone 164365 (TRAV8-4, TRAJ43)
CAVSADDMRF

SEQ ID NO: 328730 - protein, 15 aa, Homo sapiens
  CDR3 for beta chain variable domain of TCR clone 164365 (TRBV5-1, TRBJ2-3)
CASSATSGSTDTQYF

SEQ ID NO: 328731 - protein, 12 aa, Homo sapiens
  CDR3 for alpha chain variable domain of TCR clone 164366 (TRAV17, TRAJ4)
CATDGGYNKLIF

SEQ ID NO: 328732 - protein, 14 aa, Homo sapiens
  CDR3 for beta chain variable domain of TCR clone 164366 (TRBV11-2, TRBJ2-5)
CASSRTGGIETQYF

SEQ ID NO: 328733 - protein, 14 aa, Homo sapiens
  CDR3 for alpha chain variable domain of TCR clone 164367 (TRAV3, TRAJ21)
CAVRDADNFNKFYF

SEQ ID NO: 328734 - protein, 15 aa, Homo sapiens
  CDR3 for beta chain variable domain of TCR clone 164367 (TRBV6-5, TRBJ1-5)
CASSYSWDSNQPQHF

SEQ ID NO: 328735 - protein, 15 aa, Homo sapiens
  CDR3 for alpha chain variable domain of TCR clone 164368 (TRAV12-1, TRAJ38)
CVVNLHAGNNRKLIW

SEQ ID NO: 328736 - protein, 13 aa, Homo sapiens
  CDR3 for beta chain variable domain of TCR clone 164368 (TRBV19, TRBJ2-2)
CASSIWSTGELFF

SEQ ID NO: 328737 - protein, 16 aa, Homo sapiens
  CDR3 for alpha chain variable domain of TCR clone 164369 (TRAV30, TRAJ24)
CGTEIVDADSWGKFQL

SEQ ID NO: 328738 - protein, 14 aa, Homo sapiens
  CDR3 for beta chain variable domain of TCR clone 164369 (TRBV12-5, TRBJ2-5)
CASGSRTRQETQYF

SEQ ID NO: 328739 - protein, 17 aa, Homo sapiens
  CDR3 for alpha chain variable domain of TCR clone 164370 (TRAV3, TRAJ6)
CAVRDGPRAGGSYIPTF

SEQ ID NO: 328740 - protein, 15 aa, Homo sapiens
  CDR3 for beta chain variable domain of TCR clone 164370 (TRBV7-6, TRBJ2-3)
CASSPIIYSTDTQYC

SEQ ID NO: 328741 - protein, 14 aa, Homo sapiens
  CDR3 for alpha chain variable domain of TCR clone 164371 (TRAV25, TRAJ45)
CARESGGGADGLPF

SEQ ID NO: 328742 - protein, 12 aa, Homo sapiens
  CDR3 for beta chain variable domain of TCR clone 164371 (TRBV7-9, TRBJ2-7)
CASSFDSYEQYF

SEQ ID NO: 328743 - protein, 11 aa, Homo sapiens
  CDR3 for alpha chain variable domain of TCR clone 164372 (TRAV21, TRAJ11)
CAVNGYSTLTF

SEQ ID NO: 328744 - protein, 15 aa, Homo sapiens
  CDR3 for beta chain variable domain of TCR clone 164372 (TRBV7-2, TRBJ2-1)
CASTHGTGIYNEQFF

SEQ ID NO: 328745 - protein, 18 aa, Homo sapiens
  CDR3 for alpha chain variable domain of TCR clone 164373 (TRAV13-1, TRAJ52)
CAAKNPNAGGTSYGKLKF

SEQ ID NO: 328746 - protein, 14 aa, Homo sapiens
  CDR3 for beta chain variable domain of TCR clone 164373 (TRBV4-3, TRBJ2-2)
CASSQGHVTGELFF

SEQ ID NO: 328747 - protein, 12 aa, Homo sapiens
  CDR3 for alpha chain variable domain of TCR clone 164374 (TRAV12-2, TRAJ10)
WGVTGGGNKLTF

SEQ ID NO: 328748 - protein, 14 aa, Homo sapiens
  CDR3 for beta chain variable domain of TCR clone 164374 (TRBV12-4, TRBJ1-4)
CARSRQGANEKLFF

SEQ ID NO: 328749 - protein, 14 aa, Homo sapiens
  CDR3 for alpha chain variable domain of TCR clone 164375 (TRAV1-2, TRAJ16)
CAVNRFSDGQKLLF

SEQ ID NO: 328750 - protein, 15 aa, Homo sapiens
  CDR3 for beta chain variable domain of TCR clone 164375 (TRBV7-9, TRBJ1-6)
CASSSTGRGNSRLHF

SEQ ID NO: 328751 - protein, 15 aa, Homo sapiens
  CDR3 for alpha chain variable domain of TCR clone 164376 (TRAV12-3, TRAJ42)
CAMSGHGGSQGNLIF

SEQ ID NO: 328752 - protein, 14 aa, Homo sapiens
  CDR3 for beta chain variable domain of TCR clone 164376 (TRBV6-5, TRBJ1-1)
CASNRQRSDTEAFF

SEQ ID NO: 328753 - protein, 13 aa, Homo sapiens
  CDR3 for alpha chain variable domain of TCR clone 164377 (TRAV13-1, TRAJ21)
CPASIYNFNKFYF

SEQ ID NO: 328754 - protein, 12 aa, Homo sapiens
  CDR3 for beta chain variable domain of TCR clone 164377 (TRBV11-2, TRBJ2-1)
CASSPGNNEQFF

SEQ ID NO: 328755 - protein, 12 aa, Homo sapiens
  CDR3 for alpha chain variable domain of TCR clone 164378 (TRAV17, TRAJ21)
CVLRYNFNKFYF

SEQ ID NO: 328756 - protein, 13 aa, Homo sapiens
  CDR3 for beta chain variable domain of TCR clone 164378 (TRBV24-1, TRBJ2-5)
CATSTGGTETQYF

SEQ ID NO: 328757 - protein, 12 aa, Homo sapiens
  CDR3 for alpha chain variable domain of TCR clone 164379 (TRAV2, TRAJ16)
CAVVRDGQKLLF

SEQ ID NO: 328758 - protein, 14 aa, Homo sapiens
  CDR3 for beta chain variable domain of TCR clone 164379 (TRBV7-2, TRBJ2-7)
CASSLYPGRYEQYF

SEQ ID NO: 328759 - protein, 12 aa, Homo sapiens
  CDR3 for alpha chain variable domain of TCR clone 164380 (TRAV2, TRAJ5)
CAVDTGRRALTF

SEQ ID NO: 328760 - protein, 15 aa, Homo sapiens
  CDR3 for beta chain variable domain of TCR clone 164380 (TRBV10-3, TRBJ2-1)
CAISDVQDRAYEQFF

SEQ ID NO: 328761 - protein, 15 aa, Homo sapiens
  CDR3 for alpha chain variable domain of TCR clone 164381 (TRAV26-1, TRAJ29)
CIVRVEGAGNTPLVF

SEQ ID NO: 328762 - protein, 13 aa, Homo sapiens
  CDR3 for beta chain variable domain of TCR clone 164381 (TRBV28, TRBJ1-1)
CASSKQGWTEAFF

SEQ ID NO: 328763 - protein, 15 aa, Homo sapiens
  CDR3 for alpha chain variable domain of TCR clone 164382 (TRAV27, TRAJ38)
CAARRNAGNNRKLIW

SEQ ID NO: 328764 - protein, 14 aa, Homo sapiens
  CDR3 for beta chain variable domain of TCR clone 164382 (TRBV10-3, TRBJ2-1)
CAISSDLAYNEQFF

SEQ ID NO: 328765 - protein, 13 aa, Homo sapiens
  CDR3 for alpha chain variable domain of TCR clone 164383 (TRAV17, TRAJ39)
CAISTNAGNMLTF

SEQ ID NO: 328766 - protein, 14 aa, Homo sapiens
  CDR3 for beta chain variable domain of TCR clone 164383 (TRBV4-2, TRBJ1-4)
CASSPSSGNEKLFF

SEQ ID NO: 328767 - protein, 15 aa, Homo sapiens
  CDR3 for alpha chain variable domain of TCR clone 164384 (TRAV35, TRAJ40)
CAGQLGTSGTYKYIF

SEQ ID NO: 328768 - protein, 14 aa, Homo sapiens
  CDR3 for beta chain variable domain of TCR clone 164384 (TRBV7-3, TRBJ2-1)
CASSLAGAANEQFF

SEQ ID NO: 328769 - protein, 14 aa, Homo sapiens
  CDR3 for alpha chain variable domain of TCR clone 164385 (TRAV8-3, TRAJ4)
FAVGASGGYNKLIF

SEQ ID NO: 328770 - protein, 16 aa, Homo sapiens
  CDR3 for beta chain variable domain of TCR clone 164385 (TRBV4-3, TRBJ2-2)
CASSHLQGSGTGELFF

SEQ ID NO: 328771 - protein, 15 aa, Homo sapiens
  CDR3 for alpha chain variable domain of TCR clone 164386 (TRAV38-2/DV8, TRAJ57)
CAYGRVFGKGTKLTV

SEQ ID NO: 328772 - protein, 18 aa, Homo sapiens
  CDR3 for beta chain variable domain of TCR clone 164386 (TRBV18, TRBJ1-1)
CASSFPGAPQGAGTEAFF

SEQ ID NO: 328773 - protein, 17 aa, Homo sapiens
  CDR3 for alpha chain variable domain of TCR clone 164387 (TRAV12-2, TRAJ22)
CAVNRIPFSGSARQLTF

SEQ ID NO: 328774 - protein, 12 aa, Homo sapiens
  CDR3 for beta chain variable domain of TCR clone 164387 (TRBV11-2, TRBJ2-2)
CASGLGGGELFF

SEQ ID NO: 328775 - protein, 13 aa, Homo sapiens
  CDR3 for alpha chain variable domain of TCR clone 164388 (TRAV12-3, TRAJ13)
CAMTSGGYQKVTF

SEQ ID NO: 328776 - protein, 13 aa, Homo sapiens
  CDR3 for beta chain variable domain of TCR clone 164388 (TRBV20-1, TRBJ2-2)
CSALSGVAGELFF

SEQ ID NO: 328777 - protein, 16 aa, Homo sapiens
  CDR3 for alpha chain variable domain of TCR clone 164389 (TRAV12-1, TRAJ13)
CVVNLEVSGGYQKVTF

SEQ ID NO: 328778 - protein, 16 aa, Homo sapiens
  CDR3 for beta chain variable domain of TCR clone 164389 (TRBV24-1, TRBJ2-6)
CATSDRRASGANVLIF

SEQ ID NO: 328779 - protein, 13 aa, Homo sapiens
  CDR3 for alpha chain variable domain of TCR clone 164390 (TRAV36/DV7, TRAJ37)
CAVFSSNTGKLIF

SEQ ID NO: 328780 - protein, 15 aa, Homo sapiens
  CDR3 for beta chain variable domain of TCR clone 164390 (TRBV5-1, TRBJ2-2)
CASSLAAGGSGELFF

SEQ ID NO: 328781 - protein, 17 aa, Homo sapiens
  CDR3 for alpha chain variable domain of TCR clone 164391 (TRAV3, TRAJ38)
CAVRGCLNAGSNRKLIW

SEQ ID NO: 328782 - protein, 16 aa, Homo sapiens
  CDR3 for beta chain variable domain of TCR clone 164391 (TRBV20-1, TRBJ1-4)
CSALGQGLLTNEKLFF

SEQ ID NO: 328783 - protein, 15 aa, Homo sapiens
  CDR3 for alpha chain variable domain of TCR clone 164392 (TRAV8-3, TRAJ41)
CAVGSNSKSGYALNF

SEQ ID NO: 328784 - protein, 17 aa, Homo sapiens
  CDR3 for beta chain variable domain of TCR clone 164392 (TRBV25-1, TRBJ2-1)
CASSAYGQGRGVYEQFF

SEQ ID NO: 328785 - protein, 16 aa, Homo sapiens
  CDR3 for alpha chain variable domain of TCR clone 164393 (TRAV3, TRAJ10)
CAVRDMRAGGGNKLTF

SEQ ID NO: 328786 - protein, 12 aa, Homo sapiens
  CDR3 for beta chain variable domain of TCR clone 164393 (TRBV20-1, TRBJ2-7)
CSAGLEMGEQYF

SEQ ID NO: 328787 - protein, 12 aa, Homo sapiens
  CDR3 for alpha chain variable domain of TCR clone 164394 (TRAV13-1, TRAJ17)
CAAPRCRQQANF

SEQ ID NO: 328788 - protein, 15 aa, Homo sapiens
  CDR3 for beta chain variable domain of TCR clone 164394 (TRBV28, TRBJ2-3)
CAPTFRDWSTDTQYF

SEQ ID NO: 328789 - protein, 13 aa, Homo sapiens
  CDR3 for alpha chain variable domain of TCR clone 164395 (TRAV21, TRAJ27)
CAARPGNAGKSTF

SEQ ID NO: 328790 - protein, 12 aa, Homo sapiens
  CDR3 for beta chain variable domain of TCR clone 164395 (TRBV6-3, TRBJ2-7)
CASILTPYEQYF

SEQ ID NO: 328791 - protein, 12 aa, Homo sapiens
  CDR3 for alpha chain variable domain of TCR clone 164396 (TRAV21, TRAJ13)
PGPSGGYQEVTF

SEQ ID NO: 328792 - protein, 15 aa, Homo sapiens
  CDR3 for beta chain variable domain of TCR clone 164396 (TRBV7-9, TRBJ1-6)
CASSSPGRGNSTLHF

SEQ ID NO: 328793 - protein, 17 aa, Homo sapiens
  CDR3 for alpha chain variable domain of TCR clone 164397 (TRAV26-2, TRAJ42)
CILRDVGYGGSKGNLIF

SEQ ID NO: 328794 - protein, 16 aa, Homo sapiens
  CDR3 for beta chain variable domain of TCR clone 164397 (TRBV6-5, TRBJ2-1)
CASSETLAGHYNEQFF

SEQ ID NO: 328795 - protein, 13 aa, Homo sapiens
  CDR3 for alpha chain variable domain of TCR clone 164398 (TRAV3, TRAJ41)
CAVSSNSGYALNF

SEQ ID NO: 328796 - protein, 13 aa, Homo sapiens
  CDR3 for beta chain variable domain of TCR clone 164398 (TRBV20-1, TRBJ2-2)
FSALSGGAGELFF

SEQ ID NO: 328797 - protein, 11 aa, Homo sapiens
  CDR3 for alpha chain variable domain of TCR clone 164399 (TRAV3, TRAJ21)
CAVGNFDKFYF

SEQ ID NO: 328798 - protein, 16 aa, Homo sapiens
  CDR3 for beta chain variable domain of TCR clone 164399 (TRBV19, TRBJ2-1)
CASSRAGPSSYNEQFF

SEQ ID NO: 328799 - protein, 14 aa, Homo sapiens
  CDR3 for alpha chain variable domain of TCR clone 164400 (TRAV13-2, TRAJ17)
CAENSKAAGNKLTF

SEQ ID NO: 328800 - protein, 16 aa, Homo sapiens
  CDR3 for beta chain variable domain of TCR clone 164400 (TRBV18, TRBJ2-7)
CASSPRSQGISYEQYF

SEQ ID NO: 328801 - protein, 14 aa, Homo sapiens
  CDR3 for alpha chain variable domain of TCR clone 164401 (TRAV38-1, TRAJ40)
CALRPTSGTYKYIF

SEQ ID NO: 328802 - protein, 15 aa, Homo sapiens
  CDR3 for beta chain variable domain of TCR clone 164401 (TRBV15, TRBJ2-2)
CATSGTGGRVGELFF

SEQ ID NO: 328803 - protein, 15 aa, Homo sapiens
  CDR3 for alpha chain variable domain of TCR clone 164402 (TRAV3, TRAJ22)
CAVRDRGGSARQRTF

SEQ ID NO: 328804 - protein, 12 aa, Homo sapiens
  CDR3 for beta chain variable domain of TCR clone 164402 (TRBV12-4, TRBJ1-2)
CASSFIWLHLRF

SEQ ID NO: 328805 - protein, 17 aa, Homo sapiens
  CDR3 for alpha chain variable domain of TCR clone 164403 (TRAV23/DV6, TRAJ58)
CAARLLRGETSGSRLTF

SEQ ID NO: 328806 - protein, 15 aa, Homo sapiens
  CDR3 for beta chain variable domain of TCR clone 164403 (TRBV5-1, TRBJ2-7)
CASSLGDFTTYEQYF

SEQ ID NO: 328807 - protein, 14 aa, Homo sapiens
  CDR3 for alpha chain variable domain of TCR clone 164404 (TRAV3, TRAJ9)
CAVRLNTGGFKTIF

SEQ ID NO: 328808 - protein, 14 aa, Homo sapiens
  CDR3 for beta chain variable domain of TCR clone 164404 (TRBV7-9, TRBJ2-1)
CASSPRDSLYEQFF

SEQ ID NO: 328809 - protein, 12 aa, Homo sapiens
  CDR3 for alpha chain variable domain of TCR clone 164405 (TRAV2, TRAJ10)
CAFTGGGNKLTF

SEQ ID NO: 328810 - protein, 13 aa, Homo sapiens
  CDR3 for beta chain variable domain of TCR clone 164405 (TRBV19, TRBJ1-5)
CASSMRGYQPQHF

SEQ ID NO: 328811 - protein, 10 aa, Homo sapiens
  CDR3 for alpha chain variable domain of TCR clone 164406 (TRAV12-3, TRAJ49)
CAMNDDQFYF

SEQ ID NO: 328812 - protein, 13 aa, Homo sapiens
  CDR3 for beta chain variable domain of TCR clone 164406 (TRBV7-2, TRBJ2-5)
CASSQTSVETQYF

SEQ ID NO: 328813 - protein, 13 aa, Homo sapiens
  CDR3 for alpha chain variable domain of TCR clone 164407 (TRAV20, TRAJ37)
CAGCSSNTGKLIF

SEQ ID NO: 328814 - protein, 16 aa, Homo sapiens
  CDR3 for beta chain variable domain of TCR clone 164407 (TRBV29-1, TRBJ2-7)
CSVEDAEDGTAYEQYF

SEQ ID NO: 328815 - protein, 12 aa, Homo sapiens
  CDR3 for alpha chain variable domain of TCR clone 164408 (TRAV8-4, TRAJ43)
CAVSVNNNDMRF

SEQ ID NO: 328816 - protein, 14 aa, Homo sapiens
  CDR3 for beta chain variable domain of TCR clone 164408 (TRBV11-2, TRBJ1-2)
CVSSLGTANYGDTF

SEQ ID NO: 328817 - protein, 18 aa, Homo sapiens
  CDR3 for alpha chain variable domain of TCR clone 164409 (TRAV21, TRAJ52)
CAVRPSPAGGTSYGRLTF

SEQ ID NO: 328818 - protein, 13 aa, Homo sapiens
  CDR3 for beta chain variable domain of TCR clone 164409 (TRBV27, TRBJ1-1)
CASSLSIGAEAFF

SEQ ID NO: 328819 - protein, 15 aa, Homo sapiens
  CDR3 for alpha chain variable domain of TCR clone 164410 (TRAV16, TRAJ12)
CSKWPLRDSSYNLIF

SEQ ID NO: 328820 - protein, 13 aa, Homo sapiens
  CDR3 for beta chain variable domain of TCR clone 164410 (TRBV4-2, TRBJ1-1)
CASSQAGNTEAFF

SEQ ID NO: 328821 - protein, 15 aa, Homo sapiens
  CDR3 for alpha chain variable domain of TCR clone 164411 (TRAV25, TRAJ52)
CAGRPGGTSYGKLTF

SEQ ID NO: 328822 - protein, 17 aa, Homo sapiens
  CDR3 for beta chain variable domain of TCR clone 164411 (TRBV4-1, TRBJ2-3)
CASSQSATGGPVDTQYF

SEQ ID NO: 328823 - protein, 18 aa, Homo sapiens
  CDR3 for alpha chain variable domain of TCR clone 164412 (TRAV12-3, TRAJ52)
CAMSRTNAGGTSYGKLTF

SEQ ID NO: 328824 - protein, 14 aa, Homo sapiens
  CDR3 for beta chain variable domain of TCR clone 164412 (TRBV2, TRBJ2-1)
CASRAYGIYNEQFF

SEQ ID NO: 328825 - protein, 11 aa, Homo sapiens
  CDR3 for alpha chain variable domain of TCR clone 164413 (TRAV12-2, TRAJ49)
CAVHTGNPFYF

SEQ ID NO: 328826 - protein, 15 aa, Homo sapiens
  CDR3 for beta chain variable domain of TCR clone 164413 (TRBV4-2, TRBJ1-1)
CASSQQGAGDTEAFF

SEQ ID NO: 328827 - protein, 12 aa, Homo sapiens
  CDR3 for alpha chain variable domain of TCR clone 164414 (TRAV13-1, TRAJ21)
CAAKEGFNKFYF

SEQ ID NO: 328828 - protein, 13 aa, Homo sapiens
  CDR3 for beta chain variable domain of TCR clone 164414 (TRBV7-9, TRBJ2-1)
CASSLGTVNVQFF

SEQ ID NO: 328829 - protein, 15 aa, Homo sapiens
  CDR3 for alpha chain variable domain of TCR clone 164415 (TRAV8-3, TRAJ11)
CAVGLLNSVYSTLTF

SEQ ID NO: 328830 - protein, 23 aa, Homo sapiens
  CDR3 for beta chain variable domain of TCR clone 164415 (TRBV7-9, TRBJ1-2)
EAQLEKSRLLSDRFSSGEDGYTF

SEQ ID NO: 328831 - protein, 14 aa, Homo sapiens
  CDR3 for alpha chain variable domain of TCR clone 164416 (TRAV1-2, TRAJ8)
CAVREDTGFQRLVF

SEQ ID NO: 328832 - protein, 14 aa, Homo sapiens
  CDR3 for beta chain variable domain of TCR clone 164416 (TRBV5-4, TRBJ1-1)
CASSLDSRRDEAFF

SEQ ID NO: 328833 - protein, 13 aa, Homo sapiens
  CDR3 for alpha chain variable domain of TCR clone 164417 (TRAV13-1, TRAJ39)
CSKYSNAGNMLTF

SEQ ID NO: 328834 - protein, 15 aa, Homo sapiens
  CDR3 for beta chain variable domain of TCR clone 164417 (TRBV10-2, TRBJ2-2)
CASSASTSRCRGAVF

SEQ ID NO: 328835 - protein, 14 aa, Homo sapiens
  CDR3 for alpha chain variable domain of TCR clone 164418 (TRAV13-1, TRAJ44)
CAAKANGTASKLTF

SEQ ID NO: 328836 - protein, 17 aa, Homo sapiens
  CDR3 for beta chain variable domain of TCR clone 164418 (TRBV4-1, TRBJ1-5)
CASSQQPPTVANQPQHF

SEQ ID NO: 328837 - protein, 17 aa, Homo sapiens
  CDR3 for alpha chain variable domain of TCR clone 164419 (TRAV13-1, TRAJ53)
CAASWTSSGGSNYKLTF

SEQ ID NO: 328838 - protein, 19 aa, Homo sapiens
  CDR3 for beta chain variable domain of TCR clone 164419 (TRBV7-9, TRBJ2-1)
CASSHNRGALLRSYNEQFF

SEQ ID NO: 328839 - protein, 14 aa, Homo sapiens
  CDR3 for alpha chain variable domain of TCR clone 164420 (TRAV16, TRAJ15)
CALRPNQAGTAVIF

SEQ ID NO: 328840 - protein, 16 aa, Homo sapiens
  CDR3 for beta chain variable domain of TCR clone 164420 (TRBV6-5, TRBJ2-2)
CASSYGRVPDTGELFF

SEQ ID NO: 328841 - protein, 14 aa, Homo sapiens
  CDR3 for alpha chain variable domain of TCR clone 164421 (TRAV26-1, TRAJ39)
CIVRDSRAGNIPTF

SEQ ID NO: 328842 - protein, 15 aa, Homo sapiens
  CDR3 for beta chain variable domain of TCR clone 164421 (TRBV7-9, TRBJ1-5)
CASSQGHQPNQPQHF

SEQ ID NO: 328843 - protein, 14 aa, Homo sapiens
  CDR3 for alpha chain variable domain of TCR clone 164422 (TRAV8-4, TRAJ9)
CAVRRNTGGFKTIF

SEQ ID NO: 328844 - protein, 15 aa, Homo sapiens
  CDR3 for beta chain variable domain of TCR clone 164422 (TRBV10-2, TRBJ2-6)
CASSEQGTGTNVLTF

SEQ ID NO: 328845 - protein, 12 aa, Homo sapiens
  CDR3 for alpha chain variable domain of TCR clone 164423 (TRAV12-2, TRAJ21)
CAVRYNFNKFYF

SEQ ID NO: 328846 - protein, 14 aa, Homo sapiens
  CDR3 for beta chain variable domain of TCR clone 164423 (TRBV25-1, TRBJ1-1)
CARTHLGGNTEAFF

SEQ ID NO: 328847 - protein, 13 aa, Homo sapiens
  CDR3 for alpha chain variable domain of TCR clone 164424 (TRAV13-1, TRAJ6)
CAASKGESYIPTF

SEQ ID NO: 328848 - protein, 14 aa, Homo sapiens
  CDR3 for beta chain variable domain of TCR clone 164424 (TRBV7-2, TRBJ2-1)
CASSLGVGYNEQFF

SEQ ID NO: 328849 - protein, 14 aa, Homo sapiens
  CDR3 for alpha chain variable domain of TCR clone 164425 (TRAV26-1, TRAJ45)
CIEVTGGGADGLTF

SEQ ID NO: 328850 - protein, 10 aa, Homo sapiens
  CDR3 for beta chain variable domain of TCR clone 164425 (TRBV7-6, TRBJ1-2)
CASSLVADYA

SEQ ID NO: 328851 - protein, 16 aa, Homo sapiens
  CDR3 for alpha chain variable domain of TCR clone 164426 (TRAV30, TRAJ24)
CGTEIVDADSWVKFQF

SEQ ID NO: 328852 - protein, 12 aa, Homo sapiens
  CDR3 for beta chain variable domain of TCR clone 164426 (TRBV11-2, TRBJ2-2)
CASSLGGGELFF

SEQ ID NO: 328853 - protein, 13 aa, Homo sapiens
  CDR3 for alpha chain variable domain of TCR clone 164427 (TRAV3, TRAJ21)
CAVREPDFSKFYF

SEQ ID NO: 328854 - protein, 16 aa, Homo sapiens
  CDR3 for beta chain variable domain of TCR clone 164427 (TRBV27, TRBJ2-2)
CASSFRGLVRTGELFF

SEQ ID NO: 328855 - protein, 11 aa, Homo sapiens
  CDR3 for alpha chain variable domain of TCR clone 164428 (TRAV1-2, TRAJ11)
CAVRGYSTLTF

SEQ ID NO: 328856 - protein, 15 aa, Homo sapiens
  CDR3 for beta chain variable domain of TCR clone 164428 (TRBV28, TRBJ2-2)
CASTVAGANTGELFF

SEQ ID NO: 328857 - protein, 13 aa, Homo sapiens
  CDR3 for alpha chain variable domain of TCR clone 164429 (TRAV8-6, TRAJ13)
CAVYSGGYQKVTF

SEQ ID NO: 328858 - protein, 15 aa, Homo sapiens
  CDR3 for beta chain variable domain of TCR clone 164429 (TRBV7-9, TRBJ2-7)
CASSLPMGQANEQYF

SEQ ID NO: 328859 - protein, 15 aa, Homo sapiens
  CDR3 for alpha chain variable domain of TCR clone 164430 (TRAV13-1, TRAJ57)
CAASNTQGESEKLVF

SEQ ID NO: 328860 - protein, 16 aa, Homo sapiens
  CDR3 for beta chain variable domain of TCR clone 164430 (TRBV19, TRBJ2-1)
CASSKAGPSSYNEQFF

SEQ ID NO: 328861 - protein, 16 aa, Homo sapiens
  CDR3 for alpha chain variable domain of TCR clone 164431 (TRAV3, TRAJ18)
CAVRDGRGSALGRLYF

SEQ ID NO: 328862 - protein, 17 aa, Homo sapiens
  CDR3 for beta chain variable domain of TCR clone 164431 (TRBV5-1, TRBJ2-5)
CASSLRGVEGPIETQYF

SEQ ID NO: 328863 - protein, 13 aa, Homo sapiens
  CDR3 for alpha chain variable domain of TCR clone 164432 (TRAV13-1, TRAJ21)
CAASIYNFNKFYF

SEQ ID NO: 328864 - protein, 19 aa, Homo sapiens
  CDR3 for beta chain variable domain of TCR clone 164432 (TRBV28, TRBJ2-7)
CASSYSGTSRLGWVYEQYF

SEQ ID NO: 328865 - protein, 16 aa, Homo sapiens
  CDR3 for alpha chain variable domain of TCR clone 164433 (TRAV22, TRAJ45)
CAVERGKRGGDDGLTF

SEQ ID NO: 328866 - protein, 23 aa, Homo sapiens
  CDR3 for beta chain variable domain of TCR clone 164433 (TRBV5-1, TRBJ2-5)
GDGGRGGGGGGLRRTSGQETQYF

SEQ ID NO: 328867 - protein, 14 aa, Homo sapiens
  CDR3 for alpha chain variable domain of TCR clone 164434 (TRAV17, TRAJ35)
CATDRPGFGNVLHC

SEQ ID NO: 328868 - protein, 13 aa, Homo sapiens
  CDR3 for beta chain variable domain of TCR clone 164434 (TRBV7-6, TRBJ2-7)
CASSLDHTHEQYF

SEQ ID NO: 328869 - protein, 12 aa, Homo sapiens
  CDR3 for alpha chain variable domain of TCR clone 164435 (TRAV12-3, TRAJ17)
CAMALTGNKLTF

SEQ ID NO: 328870 - protein, 14 aa, Homo sapiens
  CDR3 for beta chain variable domain of TCR clone 164435 (TRBV25-1, TRBJ1-1)
CASTHLGGNTEAFF

SEQ ID NO: 328871 - protein, 14 aa, Homo sapiens
  CDR3 for alpha chain variable domain of TCR clone 164436 (TRAV4, TRAJ9)
CLVGSGTGGFKTIF

SEQ ID NO: 328872 - protein, 14 aa, Homo sapiens
  CDR3 for beta chain variable domain of TCR clone 164436 (TRBV19, TRBJ2-5)
CASSMTGQQETQYF

SEQ ID NO: 328873 - protein, 18 aa, Homo sapiens
  CDR3 for alpha chain variable domain of TCR clone 164437 (TRAV9-2, TRAJ52)
CALSRHNAGGTSYGKLTL

SEQ ID NO: 328874 - protein, 16 aa, Homo sapiens
  CDR3 for beta chain variable domain of TCR clone 164437 (TRBV19, TRBJ2-1)
CASSKAGPSSYNEQFF

SEQ ID NO: 328875 - protein, 10 aa, Homo sapiens
  CDR3 for alpha chain variable domain of TCR clone 164438 (TRAV23/DV6, TRAJ3)
CAAITFALGG

SEQ ID NO: 328876 - protein, 15 aa, Homo sapiens
  CDR3 for beta chain variable domain of TCR clone 164438 (TRBV19, TRBJ1-6)
CASSTQGAVGSPLHF

SEQ ID NO: 328877 - protein, 16 aa, Homo sapiens
  CDR3 for alpha chain variable domain of TCR clone 164439 (TRAV1-2, TRAJ10)
CAVRGVLTGGGNKLTF

SEQ ID NO: 328878 - protein, 16 aa, Homo sapiens
  CDR3 for beta chain variable domain of TCR clone 164439 (TRBV12-5, TRBJ2-5)
CSSGPRTSGNQETQYF

SEQ ID NO: 328879 - protein, 14 aa, Homo sapiens
  CDR3 for alpha chain variable domain of TCR clone 164440 (TRAV12-2, TRAJ5)
CAVNRSTGRRALTF

SEQ ID NO: 328880 - protein, 15 aa, Homo sapiens
  CDR3 for beta chain variable domain of TCR clone 164440 (TRBV7-3, TRBJ2-1)
CASSPTGGGEVEQFL

SEQ ID NO: 328881 - protein, 17 aa, Homo sapiens
  CDR3 for alpha chain variable domain of TCR clone 164441 (TRAV3, TRAJ12)
FAVRDGGRMDSSYKLIF

SEQ ID NO: 328882 - protein, 12 aa, Homo sapiens
  CDR3 for beta chain variable domain of TCR clone 164441 (TRBV11-2, TRBJ2-2)
CASSLGGGELFF

SEQ ID NO: 328883 - protein, 13 aa, Homo sapiens
  CDR3 for alpha chain variable domain of TCR clone 164442 (TRAV13-2, TRAJ13)
CAERPGGYQKVTF

SEQ ID NO: 328884 - protein, 16 aa, Homo sapiens
  CDR3 for beta chain variable domain of TCR clone 164442 (TRBV18, TRBJ2-5)
GASSPPSSGGAKTQYF

SEQ ID NO: 328885 - protein, 17 aa, Homo sapiens
  CDR3 for alpha chain variable domain of TCR clone 164443 (TRAV21, TRAJ24)
CAGIRLRSTDSWGKLQF

SEQ ID NO: 328886 - protein, 15 aa, Homo sapiens
  CDR3 for beta chain variable domain of TCR clone 164443 (TRBV7-2, TRBJ2-3)
CAGSPRGLSTDTQYF

SEQ ID NO: 328887 - protein, 20 aa, Homo sapiens
  CDR3 for alpha chain variable domain of TCR clone 164444 (TRAV27, TRAJ10)
ASTSVPSRGILTGGGNKLTF

SEQ ID NO: 328888 - protein, 15 aa, Homo sapiens
  CDR3 for beta chain variable domain of TCR clone 164444 (TRBV7-8, TRBJ2-5)
CASSYAGGEQETQYF

SEQ ID NO: 328889 - protein, 16 aa, Homo sapiens
  CDR3 for alpha chain variable domain of TCR clone 164445 (TRAV30, TRAJ24)
CGTEIVDADSWGKFQF

SEQ ID NO: 328890 - protein, 19 aa, Homo sapiens
  CDR3 for beta chain variable domain of TCR clone 164445 (TRBV11-2, TRBJ2-2)
LRTRPCISVPAALEGELFF

SEQ ID NO: 328891 - protein, 14 aa, Homo sapiens
  CDR3 for alpha chain variable domain of TCR clone 164446 (TRAV1-2, TRAJ16)
CAVNRVSDGQKLLF

SEQ ID NO: 328892 - protein, 15 aa, Homo sapiens
  CDR3 for beta chain variable domain of TCR clone 164446 (TRBV4-2, TRBJ1-1)
CASSQQGAGDTEAFF

SEQ ID NO: 328893 - protein, 19 aa, Homo sapiens
  CDR3 for alpha chain variable domain of TCR clone 164447 (TRAV16, TRAJ43)
CSRGRLSHVLLCSLNDMRF

SEQ ID NO: 328894 - protein, 16 aa, Homo sapiens
  CDR3 for beta chain variable domain of TCR clone 164447 (TRBV7-2, TRBJ2-1)
CASSLVAGAGYNEQFF

SEQ ID NO: 328895 - protein, 14 aa, Homo sapiens
  CDR3 for alpha chain variable domain of TCR clone 164448 (TRAV12-2, TRAJ17)
CAVLFKAAGNKLTF

SEQ ID NO: 328896 - protein, 13 aa, Homo sapiens
  CDR3 for beta chain variable domain of TCR clone 164448 (TRBV24-1, TRBJ2-2)
CATTATRTGELFF

SEQ ID NO: 328897 - protein, 15 aa, Homo sapiens
  CDR3 for alpha chain variable domain of TCR clone 164449 (TRAV3, TRAJ5)
CAGRDRKTGRRALTF

SEQ ID NO: 328898 - protein, 15 aa, Homo sapiens
  CDR3 for beta chain variable domain of TCR clone 164449 (TRBV7-9, TRBJ2-2)
CASGPLDTFPGELFF

SEQ ID NO: 328899 - protein, 14 aa, Homo sapiens
  CDR3 for alpha chain variable domain of TCR clone 164450 (TRAV13-1, TRAJ26)
CAASSAPYGQDFVF

SEQ ID NO: 328900 - protein, 17 aa, Homo sapiens
  CDR3 for beta chain variable domain of TCR clone 164450 (TRBV25-1, TRBJ2-5)
CASSRRGGRGGQETQYF

SEQ ID NO: 328901 - protein, 15 aa, Homo sapiens
  CDR3 for alpha chain variable domain of TCR clone 164451 (TRAV25, TRAJ23)
CALAPNYNQGGKLIF

SEQ ID NO: 328902 - protein, 13 aa, Homo sapiens
  CDR3 for beta chain variable domain of TCR clone 164451 (TRBV20-1, TRBJ1-5)
CSASWGRSQPQHF

SEQ ID NO: 328903 - protein, 14 aa, Homo sapiens
  CDR3 for alpha chain variable domain of TCR clone 164452 (TRAV2, TRAJ9)
CAVEDRSGGFQTIF

SEQ ID NO: 328904 - protein, 12 aa, Homo sapiens
  CDR3 for beta chain variable domain of TCR clone 164452 (TRBV11-2, TRBJ2-1)
CASSPGNNEQFF

SEQ ID NO: 328905 - protein, 14 aa, Homo sapiens
  CDR3 for alpha chain variable domain of TCR clone 164453 (TRAV1-2, TRAJ16)
CAVNRFSDGQKLLF

SEQ ID NO: 328906 - protein, 15 aa, Homo sapiens
  CDR3 for beta chain variable domain of TCR clone 164453 (TRBV12-4, TRBJ1-5)
CQQPTGRGSNQPQHF

SEQ ID NO: 328907 - protein, 12 aa, Homo sapiens
  CDR3 for alpha chain variable domain of TCR clone 164454 (TRAV12-3, TRAJ17)
CAMTLTGNKLTF

SEQ ID NO: 328908 - protein, 15 aa, Homo sapiens
  CDR3 for beta chain variable domain of TCR clone 164454 (TRBV27, TRBJ1-4)
CASSAQQDLNEKLFF

SEQ ID NO: 328909 - protein, 14 aa, Homo sapiens
  CDR3 for alpha chain variable domain of TCR clone 164455 (TRAV9-2, TRAJ24)
CALNPRGSWGKLQF

SEQ ID NO: 328910 - protein, 16 aa, Homo sapiens
  CDR3 for beta chain variable domain of TCR clone 164455 (TRBV4-3, TRBJ2-2)
CASSHLQGSGTGELFF

SEQ ID NO: 328911 - protein, 12 aa, Homo sapiens
  CDR3 for alpha chain variable domain of TCR clone 164456 (TRAV16, TRAJ10)
CSRTGGGNKLTF

SEQ ID NO: 328912 - protein, 15 aa, Homo sapiens
  CDR3 for beta chain variable domain of TCR clone 164456 (TRBV28, TRBJ1-3)
CASSMGWASGNTMYF

SEQ ID NO: 328913 - protein, 12 aa, Homo sapiens
  CDR3 for alpha chain variable domain of TCR clone 164457 (TRAV1-1, TRAJ39)
CAVPVVGNMLTF

SEQ ID NO: 328914 - protein, 12 aa, Homo sapiens
  CDR3 for beta chain variable domain of TCR clone 164457 (TRBV29-1, TRBJ2-3)
CSVTGGADTQYF

SEQ ID NO: 328915 - protein, 19 aa, Homo sapiens
  CDR3 for alpha chain variable domain of TCR clone 164458 (TRAV3, TRAJ6)
CAVRDRNPSRSGGSYIPTF

SEQ ID NO: 328916 - protein, 15 aa, Homo sapiens
  CDR3 for beta chain variable domain of TCR clone 164458 (TRBV5-1, TRBJ2-3)
CASSVTSGSTDTQYF

SEQ ID NO: 328917 - protein, 14 aa, Homo sapiens
  CDR3 for alpha chain variable domain of TCR clone 164459 (TRAV2, TRAJ29)
CAVELPSGNTPLVF

SEQ ID NO: 328918 - protein, 13 aa, Homo sapiens
  CDR3 for beta chain variable domain of TCR clone 164459 (TRBV13, TRBJ1-1)
CASSLSIGAEAFF

SEQ ID NO: 328919 - protein, 14 aa, Homo sapiens
  CDR3 for alpha chain variable domain of TCR clone 164460 (TRAV12-1, TRAJ10)
CVVNSAGGGNKLTF

SEQ ID NO: 328920 - protein, 14 aa, Homo sapiens
  CDR3 for beta chain variable domain of TCR clone 164460 (TRBV12-4, TRBJ1-1)
CASSLGTWGTEAFF

SEQ ID NO: 328921 - protein, 13 aa, Homo sapiens
  CDR3 for alpha chain variable domain of TCR clone 164461 (TRAV1-1, TRAJ9)
CAVKNTGGFKTIF

SEQ ID NO: 328922 - protein, 15 aa, Homo sapiens
  CDR3 for beta chain variable domain of TCR clone 164461 (TRBV5-1, TRBJ2-1)
CASTGSGRTYNEQFF

SEQ ID NO: 328923 - protein, 11 aa, Homo sapiens
  CDR3 for alpha chain variable domain of TCR clone 164462 (TRAV2, TRAJ13)
SASGGYQKVTF

SEQ ID NO: 328924 - protein, 18 aa, Homo sapiens
  CDR3 for beta chain variable domain of TCR clone 164462 (TRBV19, TRBJ2-6)
CASIGPTSGGSGANVLTF

SEQ ID NO: 328925 - protein, 13 aa, Homo sapiens
  CDR3 for alpha chain variable domain of TCR clone 164463 (TRAV21, TRAJ15)
CAVANQAGTALIF

SEQ ID NO: 328926 - protein, 16 aa, Homo sapiens
  CDR3 for beta chain variable domain of TCR clone 164463 (TRBV28, TRBJ2-1)
CASSSPEYPRDNEQFF

SEQ ID NO: 328927 - protein, 12 aa, Homo sapiens
  CDR3 for alpha chain variable domain of TCR clone 164464 (TRAV16, TRAJ26)
CALRSYGQNFVF

SEQ ID NO: 328928 - protein, 14 aa, Homo sapiens
  CDR3 for beta chain variable domain of TCR clone 164464 (TRBV10-3, TRBJ2-1)
CAISSVLAYNEQFF

SEQ ID NO: 328929 - protein, 16 aa, Homo sapiens
  CDR3 for alpha chain variable domain of TCR clone 164465 (TRAV30, TRAJ24)
CGTEIVDADSWGKFQF

SEQ ID NO: 328930 - protein, 16 aa, Homo sapiens
  CDR3 for beta chain variable domain of TCR clone 164465 (TRBV12-4, TRBJ2-3)
CASSFPSNTNTDTQYF

SEQ ID NO: 328931 - protein, 15 aa, Homo sapiens
  CDR3 for alpha chain variable domain of TCR clone 164466 (TRAV21, TRAJ45)
CAVSYSGGGADGLTF

SEQ ID NO: 328932 - protein, 13 aa, Homo sapiens
  CDR3 for beta chain variable domain of TCR clone 164466 (TRBV7-2, TRBJ2-4)
CASSREHANIQYF

SEQ ID NO: 328933 - protein, 14 aa, Homo sapiens
  CDR3 for alpha chain variable domain of TCR clone 164467 (TRAV9-2, TRAJ36)
CALPWRTGANNLFF

SEQ ID NO: 328934 - protein, 16 aa, Homo sapiens
  CDR3 for beta chain variable domain of TCR clone 164467 (TRBV19, TRBJ2-1)
CASSIETGSPYNEQFF

SEQ ID NO: 328935 - protein, 15 aa, Homo sapiens
  CDR3 for alpha chain variable domain of TCR clone 164468 (TRAV26-1, TRAJ40)
CIVRAVPSGTCKYIF

SEQ ID NO: 328936 - protein, 14 aa, Homo sapiens
  CDR3 for beta chain variable domain of TCR clone 164468 (TRBV19, TRBJ2-1)
CASKDPGLANEQFF

SEQ ID NO: 328937 - protein, 14 aa, Homo sapiens
  CDR3 for alpha chain variable domain of TCR clone 164469 (TRAV20, TRAJ16)
CAVRFFSDGQKLLF

SEQ ID NO: 328938 - protein, 14 aa, Homo sapiens
  CDR3 for beta chain variable domain of TCR clone 164469 (TRBV19, TRBJ2-7)
CASNFRDTFTGMYF

SEQ ID NO: 328939 - protein, 17 aa, Homo sapiens
  CDR3 for alpha chain variable domain of TCR clone 164470 (TRAV4, TRAJ42)
CLVGVLNYGGSQGTLIF

SEQ ID NO: 328940 - protein, 12 aa, Homo sapiens
  CDR3 for beta chain variable domain of TCR clone 164470 (TRBV20-1, TRBJ2-1)
CSAQYTYNEQFF

SEQ ID NO: 328941 - protein, 12 aa, Homo sapiens
  CDR3 for alpha chain variable domain of TCR clone 164471 (TRAV12-2, TRAJ44)
WGVTGGGNKLTL

SEQ ID NO: 328942 - protein, 16 aa, Homo sapiens
  CDR3 for beta chain variable domain of TCR clone 164471 (TRBV6-4, TRBJ1-2)
CASSEAVGDPNYGYTF

SEQ ID NO: 328943 - protein, 13 aa, Homo sapiens
  CDR3 for alpha chain variable domain of TCR clone 164472 (TRAV2, TRAJ40)
CAVVTSGTYQYIF

SEQ ID NO: 328944 - protein, 13 aa, Homo sapiens
  CDR3 for beta chain variable domain of TCR clone 164472 (TRBV7-9, TRBJ2-5)
CASLPSGRETQYF

SEQ ID NO: 328945 - protein, 14 aa, Homo sapiens
  CDR3 for alpha chain variable domain of TCR clone 164473 (TRAV2, TRAJ37)
CAVDFTSNTGKLIF

SEQ ID NO: 328946 - protein, 12 aa, Homo sapiens
  CDR3 for beta chain variable domain of TCR clone 164473 (TRBV19, TRBJ2-1)
CASSRQGAEQFF

SEQ ID NO: 328947 - protein, 16 aa, Homo sapiens
  CDR3 for alpha chain variable domain of TCR clone 164474 (TRAV3, TRAJ10)
CAVRDMRAGGGNKLTF

SEQ ID NO: 328948 - protein, 15 aa, Homo sapiens
  CDR3 for beta chain variable domain of TCR clone 164474 (TRBV7-2, TRBJ2-1)
CASRKTGSSYNEQFF

SEQ ID NO: 328949 - protein, 10 aa, Homo sapiens
  CDR3 for alpha chain variable domain of TCR clone 164475 (TRAV13-1, TRAJ8)
CAAPFQKLVF

SEQ ID NO: 328950 - protein, 20 aa, Homo sapiens
  CDR3 for beta chain variable domain of TCR clone 164475 (TRBV3-1, TRBJ2-6)
CASSRRPGLEGGAGANVLTF

SEQ ID NO: 328951 - protein, 14 aa, Homo sapiens
  CDR3 for alpha chain variable domain of TCR clone 164476 (TRAV8-2, TRAJ23)
CVVSDDNQGGKLIF

SEQ ID NO: 328952 - protein, 17 aa, Homo sapiens
  CDR3 for beta chain variable domain of TCR clone 164476 (TRBV15, TRBJ1-2)
CATSGREIDVVNYGYTF

SEQ ID NO: 328953 - protein, 13 aa, Homo sapiens
  CDR3 for alpha chain variable domain of TCR clone 164477 (TRAV2, TRAJ16)
CAVEFGDGQKLLF

SEQ ID NO: 328954 - protein, 14 aa, Homo sapiens
  CDR3 for beta chain variable domain of TCR clone 164477 (TRBV6-3, TRBJ2-5)
CAISYSLREKTQYF

SEQ ID NO: 328955 - protein, 12 aa, Homo sapiens
  CDR3 for alpha chain variable domain of TCR clone 164478 (TRAV2, TRAJ31)
CAVEDNNARLMF

SEQ ID NO: 328956 - protein, 14 aa, Homo sapiens
  CDR3 for beta chain variable domain of TCR clone 164478 (TRBV5-7, TRBJ2-7)
CASSGGLSSYEQYF

SEQ ID NO: 328957 - protein, 13 aa, Homo sapiens
  CDR3 for alpha chain variable domain of TCR clone 164479 (TRAV12-2, TRAJ49)
CAVNMGTGNQFYF

SEQ ID NO: 328958 - protein, 11 aa, Homo sapiens
  CDR3 for beta chain variable domain of TCR clone 164479 (TRBV5-5, TRBJ1-1)
CASSLGVEAFF

SEQ ID NO: 328959 - protein, 16 aa, Homo sapiens
  CDR3 for alpha chain variable domain of TCR clone 164480 (TRAV12-2, TRAJ32)
CAVNLGHGGATNKIIF

SEQ ID NO: 328960 - protein, 15 aa, Homo sapiens
  CDR3 for beta chain variable domain of TCR clone 164480 (TRBV20-1, TRBJ2-7)
CSARGPLAGGREQYF

SEQ ID NO: 328961 - protein, 15 aa, Homo sapiens
  CDR3 for alpha chain variable domain of TCR clone 164481 (TRAV21, TRAJ52)
CAVRGGGTSSGKLTF

SEQ ID NO: 328962 - protein, 16 aa, Homo sapiens
  CDR3 for beta chain variable domain of TCR clone 164481 (TRBV7-3, TRBJ2-2)
CASSLKRGTLSGELFF

SEQ ID NO: 328963 - protein, 19 aa, Homo sapiens
  CDR3 for alpha chain variable domain of TCR clone 164482 (TRAV17, TRAJ57)
CFLLLCYGPSQGGSEKLVF

SEQ ID NO: 328964 - protein, 14 aa, Homo sapiens
  CDR3 for beta chain variable domain of TCR clone 164482 (TRBV7-3, TRBJ1-1)
CASSLKGGNTEAFF

SEQ ID NO: 328965 - protein, 11 aa, Homo sapiens
  CDR3 for alpha chain variable domain of TCR clone 164483 (TRAV12-1, TRAJ21)
CVVNNFNKFYF

SEQ ID NO: 328966 - protein, 12 aa, Homo sapiens
  CDR3 for beta chain variable domain of TCR clone 164483 (TRBV11-2, TRBJ2-2)
CASSLGGGELFF

SEQ ID NO: 328967 - protein, 17 aa, Homo sapiens
  CDR3 for alpha chain variable domain of TCR clone 164484 (TRAV3, TRAJ6)
CAVSRRTDTGGSYIPTF

SEQ ID NO: 328968 - protein, 18 aa, Homo sapiens
  CDR3 for beta chain variable domain of TCR clone 164484 (TRBV7-2, TRBJ2-3)
CASSLETSRGRKAGTQYF

SEQ ID NO: 328969 - protein, 17 aa, Homo sapiens
  CDR3 for alpha chain variable domain of TCR clone 164485 (TRAV3, TRAJ42)
WAVRDRDYGGSQGNLIF

SEQ ID NO: 328970 - protein, 14 aa, Homo sapiens
  CDR3 for beta chain variable domain of TCR clone 164485 (TRBV19, TRBJ2-1)
CASSMGSGATEQFF

SEQ ID NO: 328971 - protein, 15 aa, Homo sapiens
  CDR3 for alpha chain variable domain of TCR clone 164486 (TRAV26-1, TRAJ17)
CIVRVVKAACNKLTF

SEQ ID NO: 328972 - protein, 16 aa, Homo sapiens
  CDR3 for beta chain variable domain of TCR clone 164486 (TRBV7-9, TRBJ2-1)
CASSLVSGPSYNEQFF

SEQ ID NO: 328973 - protein, 15 aa, Homo sapiens
  CDR3 for alpha chain variable domain of TCR clone 164487 (TRAV8-6, TRAJ10)
CAVSDQAGGGNKLTF

SEQ ID NO: 328974 - protein, 15 aa, Homo sapiens
  CDR3 for beta chain variable domain of TCR clone 164487 (TRBV20-1, TRBJ2-1)
CSASSAGSSYNEQFF

SEQ ID NO: 328975 - protein, 13 aa, Homo sapiens
  CDR3 for alpha chain variable domain of TCR clone 164488 (TRAV8-3, TRAJ28)
CAVGAVGSYQLTF

SEQ ID NO: 328976 - protein, 14 aa, Homo sapiens
  CDR3 for beta chain variable domain of TCR clone 164488 (TRBV7-2, TRBJ2-7)
CASRSQGPAYEQYF

SEQ ID NO: 328977 - protein, 15 aa, Homo sapiens
  CDR3 for alpha chain variable domain of TCR clone 164489 (TRAV8-4, TRAJ3)
CAVTGENPVQQFFQD

SEQ ID NO: 328978 - protein, 16 aa, Homo sapiens
  CDR3 for beta chain variable domain of TCR clone 164489 (TRBV4-2, TRBJ1-1)
CASSQAGFGMNTEAFF

SEQ ID NO: 328979 - protein, 13 aa, Homo sapiens
  CDR3 for alpha chain variable domain of TCR clone 164490 (TRAV20, TRAJ21)
CAVEGYNLNKFYF

SEQ ID NO: 328980 - protein, 14 aa, Homo sapiens
  CDR3 for beta chain variable domain of TCR clone 164490 (TRBV3-1, TRBJ2-5)
CASSQGPDQETQYF

SEQ ID NO: 328981 - protein, 17 aa, Homo sapiens
  CDR3 for alpha chain variable domain of TCR clone 164491 (TRAV12-2, TRAJ48)
CASNEKLTFWTGTRLTI

SEQ ID NO: 328982 - protein, 14 aa, Homo sapiens
  CDR3 for beta chain variable domain of TCR clone 164491 (TRBV5-1, TRBJ2-5)
CASSLAGKQETQYF

SEQ ID NO: 328983 - protein, 12 aa, Homo sapiens
  CDR3 for alpha chain variable domain of TCR clone 164492 (TRAV1-2, TRAJ33)
CAALDSNYQLIW

SEQ ID NO: 328984 - protein, 11 aa, Homo sapiens
  CDR3 for beta chain variable domain of TCR clone 164492 (TRBV27, TRBJ2-3)
CASSLGDTQYF

SEQ ID NO: 328985 - protein, 11 aa, Homo sapiens
  CDR3 for alpha chain variable domain of TCR clone 164493 (TRAV13-1, TRAJ39)
CASHAGNKLTF

SEQ ID NO: 328986 - protein, 14 aa, Homo sapiens
  CDR3 for beta chain variable domain of TCR clone 164493 (TRBV11-2, TRBJ1-5)
CASSLDRGRQPQHF

SEQ ID NO: 328987 - protein, 15 aa, Homo sapiens
  CDR3 for alpha chain variable domain of TCR clone 164494 (TRAV13-2, TRAJ10)
CAENKIGGGGNKLTV

SEQ ID NO: 328988 - protein, 15 aa, Homo sapiens
  CDR3 for beta chain variable domain of TCR clone 164494 (TRBV5-1, TRBJ1-2)
CASSPGDRGSYGYTF

SEQ ID NO: 328989 - protein, 15 aa, Homo sapiens
  CDR3 for alpha chain variable domain of TCR clone 164495 (TRAV21, TRAJ13)
CAVRPTSGGYQQVTF

SEQ ID NO: 328990 - protein, 15 aa, Homo sapiens
  CDR3 for beta chain variable domain of TCR clone 164495 (TRBV28, TRBJ2-7)
CASSPGGRGFYEQYF

SEQ ID NO: 328991 - protein, 14 aa, Homo sapiens
  CDR3 for alpha chain variable domain of TCR clone 164496 (TRAV12-2, TRAJ6)
CAVNIKAGSYIPTF

SEQ ID NO: 328992 - protein, 14 aa, Homo sapiens
  CDR3 for beta chain variable domain of TCR clone 164496 (TRBV20-1, TRBJ2-7)
CSARDPTGLDEQYF

SEQ ID NO: 328993 - protein, 14 aa, Homo sapiens
  CDR3 for alpha chain variable domain of TCR clone 164497 (TRAV12-3, TRAJ43)
CAMSLGGAGIRLTV

SEQ ID NO: 328994 - protein, 13 aa, Homo sapiens
  CDR3 for beta chain variable domain of TCR clone 164497 (TRBV7-9, TRBJ1-2)
CASSLKQNYGYTF

SEQ ID NO: 328995 - protein, 13 aa, Homo sapiens
  CDR3 for alpha chain variable domain of TCR clone 164498 (TRAV12-1, TRAJ16)
CVVNTRNGQKLLF

SEQ ID NO: 328996 - protein, 15 aa, Homo sapiens
  CDR3 for beta chain variable domain of TCR clone 164498 (TRBV6-1, TRBJ2-3)
CASSERGGITDTQYF

SEQ ID NO: 328997 - protein, 16 aa, Homo sapiens
  CDR3 for alpha chain variable domain of TCR clone 164499 (TRAV1-2, TRAJ10)
CAVRGVLTGGGNKLTF

SEQ ID NO: 328998 - protein, 15 aa, Homo sapiens
  CDR3 for beta chain variable domain of TCR clone 164499 (TRBV7-9, TRBJ1-6)
CASSSPGRGNSPLYF

SEQ ID NO: 328999 - protein, 15 aa, Homo sapiens
  CDR3 for alpha chain variable domain of TCR clone 164500 (TRAV27, TRAJ38)
CAARRKAGNNRKLMW

SEQ ID NO: 329000 - protein, 13 aa, Homo sapiens
  CDR3 for beta chain variable domain of TCR clone 164500 (TRBV12-5, TRBJ2-3)
CASGDRQSDTQYF

SEQ ID NO: 329001 - protein, 16 aa, Homo sapiens
  CDR3 for alpha chain variable domain of TCR clone 164501 (TRAV20, TRAJ28)
CAVRDPSGAGSYQLTF

SEQ ID NO: 329002 - protein, 12 aa, Homo sapiens
  CDR3 for beta chain variable domain of TCR clone 164501 (TRBV12-4, TRBJ1-2)
CASSFIWLHLRF

SEQ ID NO: 329003 - protein, 14 aa, Homo sapiens
  CDR3 for alpha chain variable domain of TCR clone 164502 (TRAV25, TRAJ6)
CAGRESGGSYIPTF

SEQ ID NO: 329004 - protein, 15 aa, Homo sapiens
  CDR3 for beta chain variable domain of TCR clone 164502 (TRBV4-1, TRBJ1-4)
CASSQTGGQAEKLFF

SEQ ID NO: 329005 - protein, 14 aa, Homo sapiens
  CDR3 for alpha chain variable domain of TCR clone 164503 (TRAV2, TRAJ12)
CAVDAMDSSYKLIF

SEQ ID NO: 329006 - protein, 13 aa, Homo sapiens
  CDR3 for beta chain variable domain of TCR clone 164503 (TRBV19, TRBJ2-1)
CASKVGAGGERFF

SEQ ID NO: 329007 - protein, 12 aa, Homo sapiens
  CDR3 for alpha chain variable domain of TCR clone 164504 (TRAV13-1, TRAJ23)
CAERHRGGKLIF

SEQ ID NO: 329008 - protein, 13 aa, Homo sapiens
  CDR3 for beta chain variable domain of TCR clone 164504 (TRBV7-9, TRBJ1-2)
CASSLKQNYGYTF

SEQ ID NO: 329009 - protein, 18 aa, Homo sapiens
  CDR3 for alpha chain variable domain of TCR clone 164505 (TRAV9-2, TRAJ52)
CALSRHNAGGTSYGKLTF

SEQ ID NO: 329010 - protein, 13 aa, Homo sapiens
  CDR3 for beta chain variable domain of TCR clone 164505 (TRBV7-9, TRBJ1-2)
CAGSLKQNYGYTF

SEQ ID NO: 329011 - protein, 15 aa, Homo sapiens
  CDR3 for alpha chain variable domain of TCR clone 164506 (TRAV8-3, TRAJ45)
CASSYSGGGAAGLTF

SEQ ID NO: 329012 - protein, 13 aa, Homo sapiens
  CDR3 for beta chain variable domain of TCR clone 164506 (TRBV10-3, TRBJ2-7)
CSSKLAVNYEQYF

SEQ ID NO: 329013 - protein, 14 aa, Homo sapiens
  CDR3 for alpha chain variable domain of TCR clone 164507 (TRAV21, TRAJ35)
CAVMPIGFGNVLHC

SEQ ID NO: 329014 - protein, 18 aa, Homo sapiens
  CDR3 for beta chain variable domain of TCR clone 164507 (TRBV15, TRBJ2-1)
CVPPPGCSGGPTTNEQFF

SEQ ID NO: 329015 - protein, 14 aa, Homo sapiens
  CDR3 for alpha chain variable domain of TCR clone 164508 (TRAV27, TRAJ22)
YAGVVPGSARQLTF

SEQ ID NO: 329016 - protein, 13 aa, Homo sapiens
  CDR3 for beta chain variable domain of TCR clone 164508 (TRBV9, TRBJ2-1)
CASSPSGGSEQFF

SEQ ID NO: 329017 - protein, 22 aa, Homo sapiens
  CDR3 for alpha chain variable domain of TCR clone 164509 (TRAV26-1, TRAJ30)
CIVRVRTEMTRSSLEKGHDFIF

SEQ ID NO: 329018 - protein, 15 aa, Homo sapiens
  CDR3 for beta chain variable domain of TCR clone 164509 (TRBV27, TRBJ2-1)
CASSNGGGSSNEQFF

SEQ ID NO: 329019 - protein, 14 aa, Homo sapiens
  CDR3 for alpha chain variable domain of TCR clone 164510 (TRAV9-2, TRAJ39)
CALYIYNAGNMLTF

SEQ ID NO: 329020 - protein, 13 aa, Homo sapiens
  CDR3 for beta chain variable domain of TCR clone 164510 (TRBV4-1, TRBJ2-2)
CASSQGNTGELFF

SEQ ID NO: 329021 - protein, 14 aa, Homo sapiens
  CDR3 for alpha chain variable domain of TCR clone 164511 (TRAV8-6, TRAJ39)
CAVSERDAGNMLTF

SEQ ID NO: 329022 - protein, 13 aa, Homo sapiens
  CDR3 for beta chain variable domain of TCR clone 164511 (TRBV7-3, TRBJ1-1)
CASSQDWGAEAFF

SEQ ID NO: 329023 - protein, 16 aa, Homo sapiens
  CDR3 for alpha chain variable domain of TCR clone 164512 (TRAV20, TRAJ53)
CAVQAESGGSNYKLTF

SEQ ID NO: 329024 - protein, 15 aa, Homo sapiens
  CDR3 for beta chain variable domain of TCR clone 164512 (TRBV11-2, TRBJ2-2)
CASSLDGGNTGELFF

SEQ ID NO: 329025 - protein, 15 aa, Homo sapiens
  CDR3 for alpha chain variable domain of TCR clone 164513 (TRAV3, TRAJ5)
CAVRDLYTGRRALTF

SEQ ID NO: 329026 - protein, 16 aa, Homo sapiens
  CDR3 for beta chain variable domain of TCR clone 164513 (TRBV20-1, TRBJ1-4)
CSAPEQGLLTNEKLFF

SEQ ID NO: 329027 - protein, 12 aa, Homo sapiens
  CDR3 for alpha chain variable domain of TCR clone 164514 (TRAV13-1, TRAJ21)
CAAKEGFNKFYF

SEQ ID NO: 329028 - protein, 18 aa, Homo sapiens
  CDR3 for beta chain variable domain of TCR clone 164514 (TRBV20-1, TRBJ2-6)
CSAETRPTHGSGANVLTF

SEQ ID NO: 329029 - protein, 13 aa, Homo sapiens
  CDR3 for alpha chain variable domain of TCR clone 164515 (TRAV12-2, TRAJ20)
CAVYPSNDYKLSF

SEQ ID NO: 329030 - protein, 15 aa, Homo sapiens
  CDR3 for beta chain variable domain of TCR clone 164515 (TRBV27, TRBJ2-5)
CASSLCPRGGETQFF

SEQ ID NO: 329031 - protein, 16 aa, Homo sapiens
  CDR3 for alpha chain variable domain of TCR clone 164516 (TRAV30, TRAJ24)
CGTEIVDADSWGKFQV

SEQ ID NO: 329032 - protein, 15 aa, Homo sapiens
  CDR3 for beta chain variable domain of TCR clone 164516 (TRBV6-5, TRBJ2-1)
CASSYDAGAGNEQFF

SEQ ID NO: 329033 - protein, 11 aa, Homo sapiens
  CDR3 for alpha chain variable domain of TCR clone 164517 (TRAV2, TRAJ33)
CAVDSNYQLIW

SEQ ID NO: 329034 - protein, 17 aa, Homo sapiens
  CDR3 for beta chain variable domain of TCR clone 164517 (TRBV5-1, TRBJ2-5)
CASSPVALGQNQETQYF

SEQ ID NO: 329035 - protein, 16 aa, Homo sapiens
  CDR3 for alpha chain variable domain of TCR clone 164518 (TRAV16, TRAJ4)
CALSRMFSGGYNKLIF

SEQ ID NO: 329036 - protein, 18 aa, Homo sapiens
  CDR3 for beta chain variable domain of TCR clone 164518 (TRBV28, TRBJ2-5)
CASNSRARASGRAETQYF

SEQ ID NO: 329037 - protein, 17 aa, Homo sapiens
  CDR3 for alpha chain variable domain of TCR clone 164519 (TRAV8-2, )
CVVNIQNPDPAVYQLSD

SEQ ID NO: 329038 - protein, 14 aa, Homo sapiens
  CDR3 for beta chain variable domain of TCR clone 164519 (TRBV7-9, TRBJ2-5)
CASSLVGGEETQYF

SEQ ID NO: 329039 - protein, 12 aa, Homo sapiens
  CDR3 for alpha chain variable domain of TCR clone 164520 (TRAV12-3, TRAJ17)
CAMTLTGNKLTF

SEQ ID NO: 329040 - protein, 15 aa, Homo sapiens
  CDR3 for beta chain variable domain of TCR clone 164520 (TRBV20-1, TRBJ2-7)
CSASDRVPGMDEQYF

SEQ ID NO: 329041 - protein, 16 aa, Homo sapiens
  CDR3 for alpha chain variable domain of TCR clone 164521 (TRAV12-3, TRAJ53)
CAMSPGSGGSNYNLTF

SEQ ID NO: 329042 - protein, 11 aa, Homo sapiens
  CDR3 for beta chain variable domain of TCR clone 164521 (TRBV29-1, TRBJ2-5)
RSEDRTGTQYF

SEQ ID NO: 329043 - protein, 13 aa, Homo sapiens
  CDR3 for alpha chain variable domain of TCR clone 164522 (TRAV3, TRAJ27)
CAVRPLGAGNSTV

SEQ ID NO: 329044 - protein, 13 aa, Homo sapiens
  CDR3 for beta chain variable domain of TCR clone 164522 (TRBV7-9, TRBJ2-3)
CASGPGSTDTQYF

SEQ ID NO: 329045 - protein, 15 aa, Homo sapiens
  CDR3 for alpha chain variable domain of TCR clone 164523 (TRAV29/DV5, TRAJ29)
CAASERSSGNTPLVF

SEQ ID NO: 329046 - protein, 11 aa, Homo sapiens
  CDR3 for beta chain variable domain of TCR clone 164523 (TRBV11-2, TRBJ1-1)
CASSINTEAFF

SEQ ID NO: 329047 - protein, 15 aa, Homo sapiens
  CDR3 for alpha chain variable domain of TCR clone 164524 (TRAV12-1, TRAJ44)
CVVFVNTGTASKHTF

SEQ ID NO: 329048 - protein, 17 aa, Homo sapiens
  CDR3 for beta chain variable domain of TCR clone 164524 (TRBV7-8, TRBJ2-6)
CASSAGTGGAGANVLTF

SEQ ID NO: 329049 - protein, 14 aa, Homo sapiens
  CDR3 for alpha chain variable domain of TCR clone 164525 (TRAV29/DV5, TRAJ36)
CAARLKTGANNLFF

SEQ ID NO: 329050 - protein, 16 aa, Homo sapiens
  CDR3 for beta chain variable domain of TCR clone 164525 (TRBV12-5, TRBJ2-5)
CASGPRTSGNQETQYF

SEQ ID NO: 329051 - protein, 11 aa, Homo sapiens
  CDR3 for alpha chain variable domain of TCR clone 164526 (TRAV1-2, TRAJ40)
CAVPGTYKYIF

SEQ ID NO: 329052 - protein, 13 aa, Homo sapiens
  CDR3 for beta chain variable domain of TCR clone 164526 (TRBV7-9, TRBJ2-5)
CASLSPGQETQYF

SEQ ID NO: 329053 - protein, 16 aa, Homo sapiens
  CDR3 for alpha chain variable domain of TCR clone 164527 (TRAV3, TRAJ21)
CAVRDIERGNFNKFYF

SEQ ID NO: 329054 - protein, 17 aa, Homo sapiens
  CDR3 for beta chain variable domain of TCR clone 164527 (TRBV5-4, TRBJ2-2)
CASSSNLAGGGTGELFF

SEQ ID NO: 329055 - protein, 14 aa, Homo sapiens
  CDR3 for alpha chain variable domain of TCR clone 164528 (TRAV6, TRAJ6)
CALPTSGGSYIPTF

SEQ ID NO: 329056 - protein, 17 aa, Homo sapiens
  CDR3 for beta chain variable domain of TCR clone 164528 (TRBV3-1, TRBJ2-2)
CASSQFRDKVDTGELFF

SEQ ID NO: 329057 - protein, 11 aa, Homo sapiens
  CDR3 for alpha chain variable domain of TCR clone 164529 (TRAV13-1, TRAJ23)
CAASSRGKLIF

SEQ ID NO: 329058 - protein, 13 aa, Homo sapiens
  CDR3 for beta chain variable domain of TCR clone 164529 (TRBV7-3, TRBJ2-5)
CAGSFRGGETQYF

SEQ ID NO: 329059 - protein, 13 aa, Homo sapiens
  CDR3 for alpha chain variable domain of TCR clone 164530 (TRAV8-3, TRAJ40)
CAVVVSGTYKYIF

SEQ ID NO: 329060 - protein, 15 aa, Homo sapiens
  CDR3 for beta chain variable domain of TCR clone 164530 (TRBV7-2, TRBJ2-1)
CASRKTWSSYNEQFF

SEQ ID NO: 329061 - protein, 13 aa, Homo sapiens
  CDR3 for alpha chain variable domain of TCR clone 164531 (TRAV8-6, TRAJ49)
CAVITNTGNQFYF

SEQ ID NO: 329062 - protein, 14 aa, Homo sapiens
  CDR3 for beta chain variable domain of TCR clone 164531 (TRBV19, TRBJ2-1)
CASPTLVLSGEQFF

SEQ ID NO: 329063 - protein, 11 aa, Homo sapiens
  CDR3 for alpha chain variable domain of TCR clone 164532 (TRAV1-2, TRAJ31)
CAVNNNARLTF

SEQ ID NO: 329064 - protein, 17 aa, Homo sapiens
  CDR3 for beta chain variable domain of TCR clone 164532 (TRBV20-1, TRBJ2-1)
CSASSSGLAGSYNEQFF

SEQ ID NO: 329065 - protein, 14 aa, Homo sapiens
  CDR3 for alpha chain variable domain of TCR clone 164533 (TRAV13-1, TRAJ39)
CAASYNNAGNMLTF

SEQ ID NO: 329066 - protein, 13 aa, Homo sapiens
  CDR3 for beta chain variable domain of TCR clone 164533 (TRBV24-1, TRBJ1-4)
CATNNVRSEKLFF

SEQ ID NO: 329067 - protein, 13 aa, Homo sapiens
  CDR3 for alpha chain variable domain of TCR clone 164534 (TRAV21, TRAJ42)
CAVGGGSHGNLIF

SEQ ID NO: 329068 - protein, 15 aa, Homo sapiens
  CDR3 for beta chain variable domain of TCR clone 164534 (TRBV20-1, TRBJ2-7)
CSARDRVSGMDEQYF

SEQ ID NO: 329069 - protein, 16 aa, Homo sapiens
  CDR3 for alpha chain variable domain of TCR clone 164535 (TRAV12-1, TRAJ45)
CVVIRYSGGGADGLTF

SEQ ID NO: 329070 - protein, 12 aa, Homo sapiens
  CDR3 for beta chain variable domain of TCR clone 164535 (TRBV6-5, TRBJ2-2)
CASRQIIGELFF

SEQ ID NO: 329071 - protein, 14 aa, Homo sapiens
  CDR3 for alpha chain variable domain of TCR clone 164536 (TRAV12-2, TRAJ36)
CAVKISTGANNLFF

SEQ ID NO: 329072 - protein, 14 aa, Homo sapiens
  CDR3 for beta chain variable domain of TCR clone 164536 (TRBV25-1, TRBJ1-2)
CASGDTTGVGGYTF

SEQ ID NO: 329073 - protein, 14 aa, Homo sapiens
  CDR3 for alpha chain variable domain of TCR clone 164537 (TRAV17, TRAJ54)
CATDANQGAQKLGF

SEQ ID NO: 329074 - protein, 15 aa, Homo sapiens
  CDR3 for beta chain variable domain of TCR clone 164537 (TRBV20-1, TRBJ2-7)
CSARDRASGMDEQYF

SEQ ID NO: 329075 - protein, 12 aa, Homo sapiens
  CDR3 for alpha chain variable domain of TCR clone 164538 (TRAV29/DV5, TRAJ49)
CAATDTGNQFYF

SEQ ID NO: 329076 - protein, 19 aa, Homo sapiens
  CDR3 for beta chain variable domain of TCR clone 164538 (TRBV25-1, TRBJ2-2)
CAILVYRVDRGRKTGELFF

SEQ ID NO: 329077 - protein, 14 aa, Homo sapiens
  CDR3 for alpha chain variable domain of TCR clone 164539 (TRAV3, TRAJ5)
CAVRDGTGRRALTF

SEQ ID NO: 329078 - protein, 13 aa, Homo sapiens
  CDR3 for beta chain variable domain of TCR clone 164539 (TRBV10-3, TRBJ2-7)
CASKLAVNYEQYF

SEQ ID NO: 329079 - protein, 17 aa, Homo sapiens
  CDR3 for alpha chain variable domain of TCR clone 164540 (TRAV23/DV6, TRAJ53)
CAASKLGSGGGNYKLTF

SEQ ID NO: 329080 - protein, 14 aa, Homo sapiens
  CDR3 for beta chain variable domain of TCR clone 164540 (TRBV7-9, TRBJ2-3)
CASSLEQGTNTQYF

SEQ ID NO: 329081 - protein, 15 aa, Homo sapiens
  CDR3 for alpha chain variable domain of TCR clone 164541 (TRAV4, TRAJ10)
CLVGDGSGGGNKLTL

SEQ ID NO: 329082 - protein, 15 aa, Homo sapiens
  CDR3 for beta chain variable domain of TCR clone 164541 (TRBV27, TRBJ2-3)
CASSSLAGVIDTQYF

SEQ ID NO: 329083 - protein, 17 aa, Homo sapiens
  CDR3 for alpha chain variable domain of TCR clone 164542 (TRAV12-3, TRAJ26)
FAMSGGRWDNYGQNFVF

SEQ ID NO: 329084 - protein, 12 aa, Homo sapiens
  CDR3 for beta chain variable domain of TCR clone 164542 (TRBV19, TRBJ1-1)
CASSTTGIEAFF

SEQ ID NO: 329085 - protein, 14 aa, Homo sapiens
  CDR3 for alpha chain variable domain of TCR clone 164543 (TRAV12-2, TRAJ40)
CAVKIPSGTYKYIF

SEQ ID NO: 329086 - protein, 16 aa, Homo sapiens
  CDR3 for beta chain variable domain of TCR clone 164543 (TRBV4-2, TRBJ2-1)
CASSQGEGRTVNEQFF

SEQ ID NO: 329087 - protein, 17 aa, Homo sapiens
  CDR3 for alpha chain variable domain of TCR clone 164544 (TRAV13-1, TRAJ28)
CAASPPYSGAARYQPTF

SEQ ID NO: 329088 - protein, 19 aa, Homo sapiens
  CDR3 for beta chain variable domain of TCR clone 164544 (TRBV25-1, TRBJ2-2)
CAILVYRVDRGRKTGELFF

SEQ ID NO: 329089 - protein, 14 aa, Homo sapiens
  CDR3 for alpha chain variable domain of TCR clone 164545 (TRAV12-2, TRAJ17)
CAVLFKAAGNKLTF

SEQ ID NO: 329090 - protein, 14 aa, Homo sapiens
  CDR3 for beta chain variable domain of TCR clone 164545 (TRBV4-1, TRBJ2-2)
YASSQAVNTGELFF

SEQ ID NO: 329091 - protein, 14 aa, Homo sapiens
  CDR3 for alpha chain variable domain of TCR clone 164546 (TRAV17, TRAJ45)
CATASGGGADGLTF

SEQ ID NO: 329092 - protein, 15 aa, Homo sapiens
  CDR3 for beta chain variable domain of TCR clone 164546 (TRBV11-2, TRBJ2-1)
CASSRNRGLMYEQFC

SEQ ID NO: 329093 - protein, 11 aa, Homo sapiens
  CDR3 for alpha chain variable domain of TCR clone 164547 (TRAV2, TRAJ33)
CAVDSNYQLIW

SEQ ID NO: 329094 - protein, 14 aa, Homo sapiens
  CDR3 for beta chain variable domain of TCR clone 164547 (TRBV11-2, TRBJ2-3)
CASSRLARTATQYF

SEQ ID NO: 329095 - protein, 12 aa, Homo sapiens
  CDR3 for alpha chain variable domain of TCR clone 164548 (TRAV12-3, TRAJ17)
CAMSLTGNKLTF

SEQ ID NO: 329096 - protein, 15 aa, Homo sapiens
  CDR3 for beta chain variable domain of TCR clone 164548 (TRBV20-1, TRBJ2-7)
CSARYRVSGMDEQYF

SEQ ID NO: 329097 - protein, 15 aa, Homo sapiens
  CDR3 for alpha chain variable domain of TCR clone 164549 (TRAV8-3, TRAJ45)
CASSYSGGGADGLTF

SEQ ID NO: 329098 - protein, 16 aa, Homo sapiens
  CDR3 for beta chain variable domain of TCR clone 164549 (TRBV10-3, TRBJ2-7)
CTSVPPKLAVNYEQYF

SEQ ID NO: 329099 - protein, 12 aa, Homo sapiens
  CDR3 for alpha chain variable domain of TCR clone 164550 (TRAV20, TRAJ39)
CAVGNAGNMLTF

SEQ ID NO: 329100 - protein, 13 aa, Homo sapiens
  CDR3 for beta chain variable domain of TCR clone 164550 (TRBV15, TRBJ1-2)
CATSRGPRTGAVA

SEQ ID NO: 329101 - protein, 14 aa, Homo sapiens
  CDR3 for alpha chain variable domain of TCR clone 164551 (TRAV1-2, TRAJ16)
CAVNRFSDGQKLLF

SEQ ID NO: 329102 - protein, 16 aa, Homo sapiens
  CDR3 for beta chain variable domain of TCR clone 164551 (TRBV4-2, TRBJ1-1)
CASSQFWGTDMPEAFF

SEQ ID NO: 329103 - protein, 15 aa, Homo sapiens
  CDR3 for alpha chain variable domain of TCR clone 164552 (TRAV13-1, TRAJ57)
QVPPLSQGGSEKLVF

SEQ ID NO: 329104 - protein, 13 aa, Homo sapiens
  CDR3 for beta chain variable domain of TCR clone 164552 (TRBV24-1, TRBJ2-1)
CATSAGPYNEQFF

SEQ ID NO: 329105 - protein, 14 aa, Homo sapiens
  CDR3 for alpha chain variable domain of TCR clone 164553 (TRAV12-2, TRAJ17)
CAVLFKAAGNKLTF

SEQ ID NO: 329106 - protein, 20 aa, Homo sapiens
  CDR3 for beta chain variable domain of TCR clone 164553 (TRBV19, TRBJ2-1)
CASSLSRTVTSTRLNNEQFF

SEQ ID NO: 329107 - protein, 17 aa, Homo sapiens
  CDR3 for alpha chain variable domain of TCR clone 164554 (TRAV12-1, TRAJ42)
CVVMRMNYGGSQGNLIF

SEQ ID NO: 329108 - protein, 13 aa, Homo sapiens
  CDR3 for beta chain variable domain of TCR clone 164554 (TRBV7-2, TRBJ1-1)
CGSSVARTAEPFF

SEQ ID NO: 329109 - protein, 16 aa, Homo sapiens
  CDR3 for alpha chain variable domain of TCR clone 164555 (TRAV1-2, TRAJ15)
CAVRDEVSQAGTALIF

SEQ ID NO: 329110 - protein, 16 aa, Homo sapiens
  CDR3 for beta chain variable domain of TCR clone 164555 (TRBV5-7, TRBJ2-5)
CASIRGQTGYQETQYF

SEQ ID NO: 329111 - protein, 13 aa, Homo sapiens
  CDR3 for alpha chain variable domain of TCR clone 164556 (TRAV12-3, TRAJ52)
TNAGGTSYGKLTF

SEQ ID NO: 329112 - protein, 17 aa, Homo sapiens
  CDR3 for beta chain variable domain of TCR clone 164556 (TRBV7-3, TRBJ2-3)
CASSLMKRMRGADTQYF

SEQ ID NO: 329113 - protein, 12 aa, Homo sapiens
  CDR3 for alpha chain variable domain of TCR clone 164557 (TRAV12-3, TRAJ17)
CAMTLTGNKLTF

SEQ ID NO: 329114 - protein, 13 aa, Homo sapiens
  CDR3 for beta chain variable domain of TCR clone 164557 (TRBV20-1, TRBJ1-1)
CSARGGGNTEAFY

SEQ ID NO: 329115 - protein, 14 aa, Homo sapiens
  CDR3 for alpha chain variable domain of TCR clone 164558 (TRAV1-2, TRAJ16)
CAVNRFSDGQKLLF

SEQ ID NO: 329116 - protein, 17 aa, Homo sapiens
  CDR3 for beta chain variable domain of TCR clone 164558 (TRBV7-9, TRBJ1-6)
CASSSRDVEIHPSTLGT

SEQ ID NO: 329117 - protein, 15 aa, Homo sapiens
  CDR3 for alpha chain variable domain of TCR clone 164559 (TRAV13-1, TRAJ36)
CAATIRQTGANNLFF

SEQ ID NO: 329118 - protein, 14 aa, Homo sapiens
  CDR3 for beta chain variable domain of TCR clone 164559 (TRBV6-1, TRBJ1-3)
CASVQGGGGNTIYF

SEQ ID NO: 329119 - protein, 14 aa, Homo sapiens
  CDR3 for alpha chain variable domain of TCR clone 164560 (TRAV12-2, TRAJ53)
CAVKGGGSNYKLTF

SEQ ID NO: 329120 - protein, 17 aa, Homo sapiens
  CDR3 for beta chain variable domain of TCR clone 164560 (TRBV16, TRBJ2-1)
CASSPLTSGSSYNEQFF

SEQ ID NO: 329121 - protein, 14 aa, Homo sapiens
  CDR3 for alpha chain variable domain of TCR clone 164561 (TRAV12-3, TRAJ10)
SHLPLTGGGSKLTF

SEQ ID NO: 329122 - protein, 15 aa, Homo sapiens
  CDR3 for beta chain variable domain of TCR clone 164561 (TRBV4-1, TRBJ1-4)
CASSDTGGTNEKLFF

SEQ ID NO: 329123 - protein, 16 aa, Homo sapiens
  CDR3 for alpha chain variable domain of TCR clone 164562 (TRAV13-1, TRAJ37)
CAASSLGSSNTGKLIF

SEQ ID NO: 329124 - protein, 12 aa, Homo sapiens
  CDR3 for beta chain variable domain of TCR clone 164562 (TRBV6-1, TRBJ2-5)
CAGSEGRETQYF

SEQ ID NO: 329125 - protein, 16 aa, Homo sapiens
  CDR3 for alpha chain variable domain of TCR clone 164563 (TRAV3, TRAJ37)
CVVRGKGSGNTGKLIF

SEQ ID NO: 329126 - protein, 13 aa, Homo sapiens
  CDR3 for beta chain variable domain of TCR clone 164563 (TRBV7-2, TRBJ2-2)
CASSSVRAGELFF

SEQ ID NO: 329127 - protein, 14 aa, Homo sapiens
  CDR3 for alpha chain variable domain of TCR clone 164564 (TRAV16, TRAJ17)
CALSGRAAGNKLTF

SEQ ID NO: 329128 - protein, 10 aa, Homo sapiens
  CDR3 for beta chain variable domain of TCR clone 164564 (TRBV18, TRBJ2-6)
GAVGANVLTF

SEQ ID NO: 329129 - protein, 12 aa, Homo sapiens
  CDR3 for alpha chain variable domain of TCR clone 164565 (TRAV12-3, TRAJ17)
CAMTLTGNKLTF

SEQ ID NO: 329130 - protein, 16 aa, Homo sapiens
  CDR3 for beta chain variable domain of TCR clone 164565 (TRBV29-1, TRBJ2-7)
CSVEDAEDSTAYEQYF

SEQ ID NO: 329131 - protein, 17 aa, Homo sapiens
  CDR3 for alpha chain variable domain of TCR clone 164566 (TRAV3, TRAJ6)
CSVRDGPRAGGSYIPTF

SEQ ID NO: 329132 - protein, 16 aa, Homo sapiens
  CDR3 for beta chain variable domain of TCR clone 164566 (TRBV9, TRBJ2-3)
CASSGTSGKDTDTQYF

SEQ ID NO: 329133 - protein, 16 aa, Homo sapiens
  CDR3 for alpha chain variable domain of TCR clone 164567 (TRAV21, TRAJ52)
CAVTNAGGTSYGKLTF

SEQ ID NO: 329134 - protein, 14 aa, Homo sapiens
  CDR3 for beta chain variable domain of TCR clone 164567 (TRBV19, TRBJ2-2)
CASSTLHRSGELFF

SEQ ID NO: 329135 - protein, 15 aa, Homo sapiens
  CDR3 for alpha chain variable domain of TCR clone 164568 (TRAV25, TRAJ52)
CAGTSGGTSYGKRTF

SEQ ID NO: 329136 - protein, 13 aa, Homo sapiens
  CDR3 for beta chain variable domain of TCR clone 164568 (TRBV6-5, TRBJ2-5)
CASSPQGGETQYF

SEQ ID NO: 329137 - protein, 16 aa, Homo sapiens
  CDR3 for alpha chain variable domain of TCR clone 164569 (TRAV27, TRAJ13)
CAGAKSDSGGYQKVTF

SEQ ID NO: 329138 - protein, 13 aa, Homo sapiens
  CDR3 for beta chain variable domain of TCR clone 164569 (TRBV19, TRBJ2-7)
CASSIRSSYEQYF

SEQ ID NO: 329139 - protein, 13 aa, Homo sapiens
  CDR3 for alpha chain variable domain of TCR clone 164570 (TRAV16, TRAJ26)
CIPVLCLGQNFVF

SEQ ID NO: 329140 - protein, 12 aa, Homo sapiens
  CDR3 for beta chain variable domain of TCR clone 164570 (TRBV11-2, TRBJ2-1)
CASSPGNNEQFF

SEQ ID NO: 329141 - protein, 14 aa, Homo sapiens
  CDR3 for alpha chain variable domain of TCR clone 164571 (TRAV13-1, TRAJ6)
CAASITGGSYIPTF

SEQ ID NO: 329142 - protein, 14 aa, Homo sapiens
  CDR3 for beta chain variable domain of TCR clone 164571 (TRBV6-3, TRBJ2-1)
CSSLHSAYYNEQFF

SEQ ID NO: 329143 - protein, 15 aa, Homo sapiens
  CDR3 for alpha chain variable domain of TCR clone 164572 (TRAV3, TRAJ17)
CAVSPKEAAGHKLTF

SEQ ID NO: 329144 - protein, 15 aa, Homo sapiens
  CDR3 for beta chain variable domain of TCR clone 164572 (TRBV19, TRBJ1-5)
CASRRAQRGGQPQHF

SEQ ID NO: 329145 - protein, 13 aa, Homo sapiens
  CDR3 for alpha chain variable domain of TCR clone 164573 (TRAV12-2, TRAJ4)
CAVRSGGYNKLIF

SEQ ID NO: 329146 - protein, 15 aa, Homo sapiens
  CDR3 for beta chain variable domain of TCR clone 164573 (TRBV10-3, TRBJ2-1)
RAISDVQDRAYEQFF

SEQ ID NO: 329147 - protein, 12 aa, Homo sapiens
  CDR3 for alpha chain variable domain of TCR clone 164574 (TRAV16, TRAJ9)
GALSSGGFKTIF

SEQ ID NO: 329148 - protein, 14 aa, Homo sapiens
  CDR3 for beta chain variable domain of TCR clone 164574 (TRBV7-9, TRBJ2-1)
CASSLAGPYNEQFF

SEQ ID NO: 329149 - protein, 12 aa, Homo sapiens
  CDR3 for alpha chain variable domain of TCR clone 164575 (TRAV23/DV6, TRAJ58)
CAARLLRGENSC

SEQ ID NO: 329150 - protein, 13 aa, Homo sapiens
  CDR3 for beta chain variable domain of TCR clone 164575 (TRBV6-4, TRBJ1-5)
CASSADLNQPQHF

SEQ ID NO: 329151 - protein, 18 aa, Homo sapiens
  CDR3 for alpha chain variable domain of TCR clone 164576 (TRAV12-3, TRAJ52)
CAMSRTNAGGTSYGKLPF

SEQ ID NO: 329152 - protein, 17 aa, Homo sapiens
  CDR3 for beta chain variable domain of TCR clone 164576 (TRBV7-3, TRBJ2-3)
CASSLMKWMRGADTQYF

SEQ ID NO: 329153 - protein, 11 aa, Homo sapiens
  CDR3 for alpha chain variable domain of TCR clone 164577 (TRAV21, TRAJ34)
CAHYNTDKLIF

SEQ ID NO: 329154 - protein, 14 aa, Homo sapiens
  CDR3 for beta chain variable domain of TCR clone 164577 (TRBV20-1, TRBJ2-7)
CSAKRGRSSYEQYF

SEQ ID NO: 329155 - protein, 16 aa, Homo sapiens
  CDR3 for alpha chain variable domain of TCR clone 164578 (TRAV29/DV5, TRAJ36)
CAASAHYQSGANNLFF

SEQ ID NO: 329156 - protein, 16 aa, Homo sapiens
  CDR3 for beta chain variable domain of TCR clone 164578 (TRBV4-2, TRBJ2-3)
CASSQELAGDTDTRYF

SEQ ID NO: 329157 - protein, 11 aa, Homo sapiens
  CDR3 for alpha chain variable domain of TCR clone 164579 (TRAV17, TRAJ9)
CGFTGGFKTIF

SEQ ID NO: 329158 - protein, 18 aa, Homo sapiens
  CDR3 for beta chain variable domain of TCR clone 164579 (TRBV12-4, TRBJ2-2)
CASSLVAGTRGRTGKLFF

SEQ ID NO: 329159 - protein, 15 aa, Homo sapiens
  CDR3 for alpha chain variable domain of TCR clone 164580 (TRAV17, TRAJ56)
CATEPFTGANSKLTF

SEQ ID NO: 329160 - protein, 14 aa, Homo sapiens
  CDR3 for beta chain variable domain of TCR clone 164580 (TRBV19, TRBJ2-1)
CDSPTFVLSGEQFF

SEQ ID NO: 329161 - protein, 13 aa, Homo sapiens
  CDR3 for alpha chain variable domain of TCR clone 164581 (TRAV6, TRAJ23)
CALDQNQGGKLIF

SEQ ID NO: 329162 - protein, 15 aa, Homo sapiens
  CDR3 for beta chain variable domain of TCR clone 164581 (TRBV28, TRBJ1-2)
CVSSGSEQRAFGYTF

SEQ ID NO: 329163 - protein, 17 aa, Homo sapiens
  CDR3 for alpha chain variable domain of TCR clone 164582 (TRAV26-2, TRAJ28)
CILRPLLIVAGSYQLTF

SEQ ID NO: 329164 - protein, 11 aa, Homo sapiens
  CDR3 for beta chain variable domain of TCR clone 164582 (TRBV11-2, TRBJ2-2)
CASSLPGELFF

SEQ ID NO: 329165 - protein, 14 aa, Homo sapiens
  CDR3 for alpha chain variable domain of TCR clone 164583 (TRAV1-2, TRAJ8)
CAVREDTGFQKLVF

SEQ ID NO: 329166 - protein, 16 aa, Homo sapiens
  CDR3 for beta chain variable domain of TCR clone 164583 (TRBV4-1, TRBJ2-6)
CASSQVGDPGANVLTF

SEQ ID NO: 329167 - protein, 15 aa, Homo sapiens
  CDR3 for alpha chain variable domain of TCR clone 164584 (TRAV12-3, TRAJ54)
CAISPPFQGAQKLVF

SEQ ID NO: 329168 - protein, 15 aa, Homo sapiens
  CDR3 for beta chain variable domain of TCR clone 164584 (TRBV20-1, TRBJ2-7)
CSARDRVSGMDEQYF

SEQ ID NO: 329169 - protein, 14 aa, Homo sapiens
  CDR3 for alpha chain variable domain of TCR clone 164585 (TRAV1-1, TRAJ27)
CAVIYNTNAGKSTF

SEQ ID NO: 329170 - protein, 15 aa, Homo sapiens
  CDR3 for beta chain variable domain of TCR clone 164585 (TRBV7-2, TRBJ2-1)
CAISSGLAGGNEQFF

SEQ ID NO: 329171 - protein, 11 aa, Homo sapiens
  CDR3 for alpha chain variable domain of TCR clone 164586 (TRAV4, TRAJ31)
CLVGDNARLMF

SEQ ID NO: 329172 - protein, 14 aa, Homo sapiens
  CDR3 for beta chain variable domain of TCR clone 164586 (TRBV4-1, TRBJ2-2)
CASSQEVNTGELFF

SEQ ID NO: 329173 - protein, 17 aa, Homo sapiens
  CDR3 for alpha chain variable domain of TCR clone 164587 (TRAV3, TRAJ6)
CAVRDGPRAGGSYIPTF

SEQ ID NO: 329174 - protein, 14 aa, Homo sapiens
  CDR3 for beta chain variable domain of TCR clone 164587 (TRBV7-9, TRBJ2-5)
CASSLAPDQETQYF

SEQ ID NO: 329175 - protein, 18 aa, Homo sapiens
  CDR3 for alpha chain variable domain of TCR clone 164588 (TRAV26-1, TRAJ22)
CIVRVAVISSGSARQLTF

SEQ ID NO: 329176 - protein, 13 aa, Homo sapiens
  CDR3 for beta chain variable domain of TCR clone 164588 (TRBV13, TRBJ2-5)
CASSPEVGETQYF

SEQ ID NO: 329177 - protein, 14 aa, Homo sapiens
  CDR3 for alpha chain variable domain of TCR clone 164589 (TRAV12-1, TRAJ29)
CVVNEGSGNTPLVF

SEQ ID NO: 329178 - protein, 11 aa, Homo sapiens
  CDR3 for beta chain variable domain of TCR clone 164589 (TRBV19, TRBJ1-2)
CASSLRGRPMA

SEQ ID NO: 329179 - protein, 16 aa, Homo sapiens
  CDR3 for alpha chain variable domain of TCR clone 164590 (TRAV21, TRAJ52)
CAVTNAGGTSYGKLTF

SEQ ID NO: 329180 - protein, 17 aa, Homo sapiens
  CDR3 for beta chain variable domain of TCR clone 164590 (TRBV28, TRBJ2-5)
CASSRQGGLARAETQYF

SEQ ID NO: 329181 - protein, 18 aa, Homo sapiens
  CDR3 for alpha chain variable domain of TCR clone 164591 (TRAV21, TRAJ52)
FAVRPSPAGGTSYGQLTF

SEQ ID NO: 329182 - protein, 17 aa, Homo sapiens
  CDR3 for beta chain variable domain of TCR clone 164591 (TRBV13, TRBJ2-3)
CASSLSRVAGGRNTQYF

SEQ ID NO: 329183 - protein, 13 aa, Homo sapiens
  CDR3 for alpha chain variable domain of TCR clone 164592 (TRAV26-1, TRAJ20)
CIVRVDSDYKLSF

SEQ ID NO: 329184 - protein, 11 aa, Homo sapiens
  CDR3 for beta chain variable domain of TCR clone 164592 (TRBV7-3, TRBJ2-2)
CACSLNSGGLA

SEQ ID NO: 329185 - protein, 12 aa, Homo sapiens
  CDR3 for alpha chain variable domain of TCR clone 164593 (TRAV35, TRAJ30)
CAGLNRDDKIIF

SEQ ID NO: 329186 - protein, 14 aa, Homo sapiens
  CDR3 for beta chain variable domain of TCR clone 164593 (TRBV20-1, TRBJ1-1)
CSAQTRIGGTEAFF

SEQ ID NO: 329187 - protein, 11 aa, Homo sapiens
  CDR3 for alpha chain variable domain of TCR clone 164594 (TRAV1-1, TRAJ23)
CAVRQEGKLIF

SEQ ID NO: 329188 - protein, 14 aa, Homo sapiens
  CDR3 for beta chain variable domain of TCR clone 164594 (TRBV19, TRBJ2-1)
CASPTFVLSGEQFF

SEQ ID NO: 329189 - protein, 15 aa, Homo sapiens
  CDR3 for alpha chain variable domain of TCR clone 164595 (TRAV8-2, TRAJ42)
CVVSAYMGSQGNLIF

SEQ ID NO: 329190 - protein, 11 aa, Homo sapiens
  CDR3 for beta chain variable domain of TCR clone 164595 (TRBV5-1, TRBJ2-1)
RASSIGQEQFF

SEQ ID NO: 329191 - protein, 15 aa, Homo sapiens
  CDR3 for alpha chain variable domain of TCR clone 164596 (TRAV27, TRAJ38)
CAARRNAGNNRKLIW

SEQ ID NO: 329192 - protein, 14 aa, Homo sapiens
  CDR3 for beta chain variable domain of TCR clone 164596 (TRBV4-3, TRBJ2-2)
CASSQGHVTGELFF

SEQ ID NO: 329193 - protein, 14 aa, Homo sapiens
  CDR3 for alpha chain variable domain of TCR clone 164597 (TRAV8-4, TRAJ13)
CAVTLSGGYQKVTF

SEQ ID NO: 329194 - protein, 14 aa, Homo sapiens
  CDR3 for beta chain variable domain of TCR clone 164597 (TRBV7-8, TRBJ1-2)
CASSQTGSTYGYAF

SEQ ID NO: 329195 - protein, 14 aa, Homo sapiens
  CDR3 for alpha chain variable domain of TCR clone 164598 (TRAV1-2, TRAJ29)
CAVRELTSATPLVF

SEQ ID NO: 329196 - protein, 13 aa, Homo sapiens
  CDR3 for beta chain variable domain of TCR clone 164598 (TRBV12-4, TRBJ1-2)
CASSLRQGKGYTF

SEQ ID NO: 329197 - protein, 14 aa, Homo sapiens
  CDR3 for alpha chain variable domain of TCR clone 164599 (TRAV23/DV6, TRAJ9)
CAASIGGKYWRLQN

SEQ ID NO: 329198 - protein, 12 aa, Homo sapiens
  CDR3 for beta chain variable domain of TCR clone 164599 (TRBV7-8, TRBJ2-7)
CASSLGDREQYF

SEQ ID NO: 329199 - protein, 17 aa, Homo sapiens
  CDR3 for alpha chain variable domain of TCR clone 164600 (TRAV13-1, TRAJ43)
CAVGNDMRFGEGTRLTV

SEQ ID NO: 329200 - protein, 14 aa, Homo sapiens
  CDR3 for beta chain variable domain of TCR clone 164600 (TRBV7-9, TRBJ2-5)
CAGSPAQDQETQYF

SEQ ID NO: 329201 - protein, 14 aa, Homo sapiens
  CDR3 for alpha chain variable domain of TCR clone 164601 (TRAV29/DV5, TRAJ44)
CAAFLVGTASKLTF

SEQ ID NO: 329202 - protein, 13 aa, Homo sapiens
  CDR3 for beta chain variable domain of TCR clone 164601 (TRBV7-3, TRBJ2-2)
CASSLAVTGELFF

SEQ ID NO: 329203 - protein, 14 aa, Homo sapiens
  CDR3 for alpha chain variable domain of TCR clone 164602 (TRAV23/DV6, TRAJ5)
CAAKRPAGRRALTF

SEQ ID NO: 329204 - protein, 15 aa, Homo sapiens
  CDR3 for beta chain variable domain of TCR clone 164602 (TRBV15, TRBJ2-2)
CATSRGLADTGELFF

SEQ ID NO: 329205 - protein, 14 aa, Homo sapiens
  CDR3 for alpha chain variable domain of TCR clone 164603 (TRAV12-1, TRAJ54)
CVVNIYQGAQKLVF

SEQ ID NO: 329206 - protein, 15 aa, Homo sapiens
  CDR3 for beta chain variable domain of TCR clone 164603 (TRBV2, TRBJ2-1)
CASSELAGSYNEQSF

SEQ ID NO: 329207 - protein, 15 aa, Homo sapiens
  CDR3 for alpha chain variable domain of TCR clone 164604 (TRAV2, TRAJ9)
CAEEDRGTGGFKTIF

SEQ ID NO: 329208 - protein, 16 aa, Homo sapiens
  CDR3 for beta chain variable domain of TCR clone 164604 (TRBV24-1, TRBJ2-3)
CATSDPGTGATDTQYF

SEQ ID NO: 329209 - protein, 10 aa, Homo sapiens
  CDR3 for alpha chain variable domain of TCR clone 164605 (TRAV38-2/DV8, TRAJ21)
CAYRSNKFYY

SEQ ID NO: 329210 - protein, 12 aa, Homo sapiens
  CDR3 for beta chain variable domain of TCR clone 164605 (TRBV11-3, TRBJ2-3)
CASSLWEDTQYF

SEQ ID NO: 329211 - protein, 15 aa, Homo sapiens
  CDR3 for alpha chain variable domain of TCR clone 164606 (TRAV8-3, TRAJ27)
CAVGPSKINAGKSPF

SEQ ID NO: 329212 - protein, 15 aa, Homo sapiens
  CDR3 for beta chain variable domain of TCR clone 164606 (TRBV7-2, TRBJ2-1)
CASSSGLAGGNEQFF

SEQ ID NO: 329213 - protein, 17 aa, Homo sapiens
  CDR3 for alpha chain variable domain of TCR clone 164607 (TRAV38-2/DV8, TRAJ23)
CALSRKLIFGQGTVLSV

SEQ ID NO: 329214 - protein, 17 aa, Homo sapiens
  CDR3 for beta chain variable domain of TCR clone 164607 (TRBV5-4, TRBJ2-1)
CASSSAGGRGPYNEQFF

SEQ ID NO: 329215 - protein, 16 aa, Homo sapiens
  CDR3 for alpha chain variable domain of TCR clone 164608 (TRAV30, TRAJ24)
CGTEIVDADSWGKFQF

SEQ ID NO: 329216 - protein, 14 aa, Homo sapiens
  CDR3 for beta chain variable domain of TCR clone 164608 (TRBV12-5, TRBJ2-5)
CASGSWTHQETQYV

SEQ ID NO: 329217 - protein, 14 aa, Homo sapiens
  CDR3 for alpha chain variable domain of TCR clone 164609 (TRAV29/DV5, TRAJ22)
CAASATGSARQLTF

SEQ ID NO: 329218 - protein, 14 aa, Homo sapiens
  CDR3 for beta chain variable domain of TCR clone 164609 (TRBV11-2, TRBJ2-7)
CASSLGAGAYEQYF

SEQ ID NO: 329219 - protein, 13 aa, Homo sapiens
  CDR3 for alpha chain variable domain of TCR clone 164610 (TRAV12-1, TRAJ49)
CVVTPFTGNQFYF

SEQ ID NO: 329220 - protein, 13 aa, Homo sapiens
  CDR3 for beta chain variable domain of TCR clone 164610 (TRBV20-1, TRBJ1-1)
CSARGGANTEDFF

SEQ ID NO: 329221 - protein, 16 aa, Homo sapiens
  CDR3 for alpha chain variable domain of TCR clone 164611 (TRAV12-3, TRAJ53)
CAMSPGSGGSNYKLTF

SEQ ID NO: 329222 - protein, 13 aa, Homo sapiens
  CDR3 for beta chain variable domain of TCR clone 164611 (TRBV7-6, TRBJ2-7)
CASSSDHTHEQYF

SEQ ID NO: 329223 - protein, 14 aa, Homo sapiens
  CDR3 for alpha chain variable domain of TCR clone 164612 (TRAV36/DV7, TRAJ48)
CAQRRDFGNEKLTF

SEQ ID NO: 329224 - protein, 13 aa, Homo sapiens
  CDR3 for beta chain variable domain of TCR clone 164612 (TRBV7-9, TRBJ1-2)
CASSLKQNYGYTF

SEQ ID NO: 329225 - protein, 16 aa, Homo sapiens
  CDR3 for alpha chain variable domain of TCR clone 164613 (TRAV1-2, TRAJ10)
CAVRVVLTGGGNKLTF

SEQ ID NO: 329226 - protein, 17 aa, Homo sapiens
  CDR3 for beta chain variable domain of TCR clone 164613 (TRBV20-1, TRBJ2-2)
CSASGSGQGGLTGELFF

SEQ ID NO: 329227 - protein, 15 aa, Homo sapiens
  CDR3 for alpha chain variable domain of TCR clone 164614 (TRAV3, TRAJ3)
CAVRDGHSSASMIIF

SEQ ID NO: 329228 - protein, 14 aa, Homo sapiens
  CDR3 for beta chain variable domain of TCR clone 164614 (TRBV28, TRBJ1-4)
CASSFGTFDEKLFF

SEQ ID NO: 329229 - protein, 14 aa, Homo sapiens
  CDR3 for alpha chain variable domain of TCR clone 164615 (TRAV12-3, TRAJ10)
SHLPLTGGGNKLTF

SEQ ID NO: 329230 - protein, 15 aa, Homo sapiens
  CDR3 for beta chain variable domain of TCR clone 164615 (TRBV7-9, TRBJ2-2)
CASGPLDTCPGELFF

SEQ ID NO: 329231 - protein, 15 aa, Homo sapiens
  CDR3 for alpha chain variable domain of TCR clone 164616 (TRAV12-2, TRAJ43)
CAFDIRFGAGTRLTV

SEQ ID NO: 329232 - protein, 13 aa, Homo sapiens
  CDR3 for beta chain variable domain of TCR clone 164616 (TRBV6-1, TRBJ1-6)
CASSSSWDSPLHF

SEQ ID NO: 329233 - protein, 14 aa, Homo sapiens
  CDR3 for alpha chain variable domain of TCR clone 164617 (TRAV2, TRAJ37)
CAVDFTSNTGKLIF

SEQ ID NO: 329234 - protein, 13 aa, Homo sapiens
  CDR3 for beta chain variable domain of TCR clone 164617 (TRBV20-1, TRBJ1-1)
CSAPLGGGTESFF

SEQ ID NO: 329235 - protein, 16 aa, Homo sapiens
  CDR3 for alpha chain variable domain of TCR clone 164618 (TRAV12-3, TRAJ53)
CAMSVGSGGSNYKLTF

SEQ ID NO: 329236 - protein, 15 aa, Homo sapiens
  CDR3 for beta chain variable domain of TCR clone 164618 (TRBV5-7, TRBJ2-7)
CASSLGPGRGHEQYF

SEQ ID NO: 329237 - protein, 17 aa, Homo sapiens
  CDR3 for alpha chain variable domain of TCR clone 164619 (TRAV16, TRAJ42)
CDLSPKLYGGSQGNLIF

SEQ ID NO: 329238 - protein, 13 aa, Homo sapiens
  CDR3 for beta chain variable domain of TCR clone 164619 (TRBV19, TRBJ1-5)
CASSTRRDQPQHF

SEQ ID NO: 329239 - protein, 14 aa, Homo sapiens
  CDR3 for alpha chain variable domain of TCR clone 164620 (TRAV8-6, TRAJ5)
CAVSVDTGRRALTF

SEQ ID NO: 329240 - protein, 11 aa, Homo sapiens
  CDR3 for beta chain variable domain of TCR clone 164620 (TRBV7-3, TRBJ2-5)
CASSLSETQYS

SEQ ID NO: 329241 - protein, 18 aa, Homo sapiens
  CDR3 for alpha chain variable domain of TCR clone 164621 (TRAV12-3, TRAJ52)
CAMSVVGSGGTSYGKLTF

SEQ ID NO: 329242 - protein, 15 aa, Homo sapiens
  CDR3 for beta chain variable domain of TCR clone 164621 (TRBV27, TRBJ1-6)
CASSFDRGLGSPLHF

SEQ ID NO: 329243 - protein, 13 aa, Homo sapiens
  CDR3 for alpha chain variable domain of TCR clone 164622 (TRAV8-4, TRAJ48)
CAVSLFGNEKLTF

SEQ ID NO: 329244 - protein, 15 aa, Homo sapiens
  CDR3 for beta chain variable domain of TCR clone 164622 (TRBV20-1, TRBJ2-7)
CSARKGPAESYEQDF

SEQ ID NO: 329245 - protein, 17 aa, Homo sapiens
  CDR3 for alpha chain variable domain of TCR clone 164623 (TRAV17, TRAJ17)
TASRAADTASYFCGLTF

SEQ ID NO: 329246 - protein, 15 aa, Homo sapiens
  CDR3 for beta chain variable domain of TCR clone 164623 (TRBV7-9, TRBJ1-5)
CASSQGHQPNQPQHF

SEQ ID NO: 329247 - protein, 13 aa, Homo sapiens
  CDR3 for alpha chain variable domain of TCR clone 164624 (TRAV35, TRAJ36)
CAGPRIGANNLFF

SEQ ID NO: 329248 - protein, 15 aa, Homo sapiens
  CDR3 for beta chain variable domain of TCR clone 164624 (TRBV28, TRBJ2-5)
CTSSPPWSYQETQYF

SEQ ID NO: 329249 - protein, 14 aa, Homo sapiens
  CDR3 for alpha chain variable domain of TCR clone 164625 (TRAV12-2, TRAJ40)
CAVKIPSGTYKYIF

SEQ ID NO: 329250 - protein, 15 aa, Homo sapiens
  CDR3 for beta chain variable domain of TCR clone 164625 (TRBV20-1, TRBJ1-4)
CSDRREWGVNEKLFF

SEQ ID NO: 329251 - protein, 13 aa, Homo sapiens
  CDR3 for alpha chain variable domain of TCR clone 164626 (TRAV3, TRAJ30)
CAVRDRGDDKIIF

SEQ ID NO: 329252 - protein, 13 aa, Homo sapiens
  CDR3 for beta chain variable domain of TCR clone 164626 (TRBV5-5, TRBJ1-2)
CASSFWRGEDYTF

SEQ ID NO: 329253 - protein, 12 aa, Homo sapiens
  CDR3 for alpha chain variable domain of TCR clone 164627 (TRAV13-1, TRAJ53)
AASGGSNYKLTF

SEQ ID NO: 329254 - protein, 15 aa, Homo sapiens
  CDR3 for beta chain variable domain of TCR clone 164627 (TRBV5-1, TRBJ2-1)
CASSPPRAPYNGQFF

SEQ ID NO: 329255 - protein, 19 aa, Homo sapiens
  CDR3 for alpha chain variable domain of TCR clone 164628 (TRAV26-1, TRAJ50)
CCVLLHHQNPKTSYDKVIF

SEQ ID NO: 329256 - protein, 17 aa, Homo sapiens
  CDR3 for beta chain variable domain of TCR clone 164628 (TRBV28, TRBJ2-5)
CASSTPEGDALQETQYF

SEQ ID NO: 329257 - protein, 16 aa, Homo sapiens
  CDR3 for alpha chain variable domain of TCR clone 164629 (TRAV8-3, TRAJ10)
CAVGPILAGGGNKLTF

SEQ ID NO: 329258 - protein, 16 aa, Homo sapiens
  CDR3 for beta chain variable domain of TCR clone 164629 (TRBV7-2, TRBJ2-5)
CASSSKWLSGQETQYF

SEQ ID NO: 329259 - protein, 14 aa, Homo sapiens
  CDR3 for alpha chain variable domain of TCR clone 164630 (TRAV1-2, TRAJ16)
CAVNRFSDGQKLPF

SEQ ID NO: 329260 - protein, 13 aa, Homo sapiens
  CDR3 for beta chain variable domain of TCR clone 164630 (TRBV14, TRBJ2-7)
CASSQDRRYEQYF

SEQ ID NO: 329261 - protein, 12 aa, Homo sapiens
  CDR3 for alpha chain variable domain of TCR clone 164631 (TRAV17, TRAJ4)
CATAGGYIKLIF

SEQ ID NO: 329262 - protein, 13 aa, Homo sapiens
  CDR3 for beta chain variable domain of TCR clone 164631 (TRBV29-1, TRBJ2-2)
CSTTGVNTGELFF

SEQ ID NO: 329263 - protein, 13 aa, Homo sapiens
  CDR3 for alpha chain variable domain of TCR clone 164632 (TRAV26-1, TRAJ30)
CIVRVESNDKIIF

SEQ ID NO: 329264 - protein, 17 aa, Homo sapiens
  CDR3 for beta chain variable domain of TCR clone 164632 (TRBV13, TRBJ2-3)
CASGLSRVAGGRNTQYF

SEQ ID NO: 329265 - protein, 13 aa, Homo sapiens
  CDR3 for alpha chain variable domain of TCR clone 164633 (TRAV12-2, TRAJ20)
CAVYPSNDYKLSF

SEQ ID NO: 329266 - protein, 16 aa, Homo sapiens
  CDR3 for beta chain variable domain of TCR clone 164633 (TRBV12-4, TRBJ1-5)
CASSRPVGGSNQPQHF

SEQ ID NO: 329267 - protein, 18 aa, Homo sapiens
  CDR3 for alpha chain variable domain of TCR clone 164634 (TRAV21, TRAJ52)
CAVRPSPAGGTSYGRLTF

SEQ ID NO: 329268 - protein, 13 aa, Homo sapiens
  CDR3 for beta chain variable domain of TCR clone 164634 (TRBV29-1, TRBJ2-2)
CSVYREDTGELFF

SEQ ID NO: 329269 - protein, 13 aa, Homo sapiens
  CDR3 for alpha chain variable domain of TCR clone 164635 (TRAV17, TRAJ5)
CAPMDTGRRALTF

SEQ ID NO: 329270 - protein, 19 aa, Homo sapiens
  CDR3 for beta chain variable domain of TCR clone 164635 (TRBV7-9, TRBJ2-6)
CASSLESATVLPGANVLTF

SEQ ID NO: 329271 - protein, 17 aa, Homo sapiens
  CDR3 for alpha chain variable domain of TCR clone 164636 (TRAV3, TRAJ6)
CAVRDGPRAGGSYIPTF

SEQ ID NO: 329272 - protein, 16 aa, Homo sapiens
  CDR3 for beta chain variable domain of TCR clone 164636 (TRBV9, TRBJ2-3)
CASSRTSGKDTDTQYF

SEQ ID NO: 329273 - protein, 14 aa, Homo sapiens
  CDR3 for alpha chain variable domain of TCR clone 164637 (TRAV27, TRAJ15)
CAGFDNQAGTALIF

SEQ ID NO: 329274 - protein, 15 aa, Homo sapiens
  CDR3 for beta chain variable domain of TCR clone 164637 (TRBV7-6, TRBJ2-5)
CASSKPTGPQETQYF

SEQ ID NO: 329275 - protein, 14 aa, Homo sapiens
  CDR3 for alpha chain variable domain of TCR clone 164638 (TRAV1-2, TRAJ16)
CAVNRLSDGQKLLF

SEQ ID NO: 329276 - protein, 13 aa, Homo sapiens
  CDR3 for beta chain variable domain of TCR clone 164638 (TRBV12-5, TRBJ2-3)
CASQNRGTDTQYF

SEQ ID NO: 329277 - protein, 16 aa, Homo sapiens
  CDR3 for alpha chain variable domain of TCR clone 164639 (TRAV3, TRAJ37)
CAVRPHGPDNTGKLIF

SEQ ID NO: 329278 - protein, 17 aa, Homo sapiens
  CDR3 for beta chain variable domain of TCR clone 164639 (TRBV20-1, TRBJ2-1)
CSASSSGLAGSYNEQFF

SEQ ID NO: 329279 - protein, 18 aa, Homo sapiens
  CDR3 for alpha chain variable domain of TCR clone 164640 (TRAV26-1, TRAJ52)
YIVRVEGAGGTSYGKLTF

SEQ ID NO: 329280 - protein, 13 aa, Homo sapiens
  CDR3 for beta chain variable domain of TCR clone 164640 (TRBV7-3, TRBJ1-2)
CASSLKRGYGYTF

SEQ ID NO: 329281 - protein, 11 aa, Homo sapiens
  CDR3 for alpha chain variable domain of TCR clone 164641 (TRAV12-1, TRAJ26)
CVVAYGQHFVF

SEQ ID NO: 329282 - protein, 13 aa, Homo sapiens
  CDR3 for beta chain variable domain of TCR clone 164641 (TRBV7-2, TRBJ2-4)
CASSREHANIQYF

SEQ ID NO: 329283 - protein, 12 aa, Homo sapiens
  CDR3 for alpha chain variable domain of TCR clone 164642 (TRAV2, TRAJ17)
CAVKAAGNKLTF

SEQ ID NO: 329284 - protein, 16 aa, Homo sapiens
  CDR3 for beta chain variable domain of TCR clone 164642 (TRBV7-3, TRBJ2-1)
CASSFTGRRSYNEQFF

SEQ ID NO: 329285 - protein, 13 aa, Homo sapiens
  CDR3 for alpha chain variable domain of TCR clone 164643 (TRAV1-2, TRAJ12)
CAVSMDSSYKLIF

SEQ ID NO: 329286 - protein, 15 aa, Homo sapiens
  CDR3 for beta chain variable domain of TCR clone 164643 (TRBV27, TRBJ2-5)
CASRLIPSGGETQYF

SEQ ID NO: 329287 - protein, 14 aa, Homo sapiens
  CDR3 for alpha chain variable domain of TCR clone 164644 (TRAV12-3, TRAJ10)
SHLPLTGGGNKLTF

SEQ ID NO: 329288 - protein, 14 aa, Homo sapiens
  CDR3 for beta chain variable domain of TCR clone 164644 (TRBV6-6, TRBJ1-4)
CASRTDREYEKLFF

SEQ ID NO: 329289 - protein, 13 aa, Homo sapiens
  CDR3 for alpha chain variable domain of TCR clone 164645 (TRAV21, TRAJ57)
YAVTQGGSEKLVF

SEQ ID NO: 329290 - protein, 17 aa, Homo sapiens
  CDR3 for beta chain variable domain of TCR clone 164645 (TRBV20-1, TRBJ2-2)
CSASGSGQGGLTGELFF

SEQ ID NO: 329291 - protein, 12 aa, Homo sapiens
  CDR3 for alpha chain variable domain of TCR clone 164646 (TRAV12-3, TRAJ42)
CAPGGSQGNPIF

SEQ ID NO: 329292 - protein, 14 aa, Homo sapiens
  CDR3 for beta chain variable domain of TCR clone 164646 (TRBV7-2, TRBJ2-7)
CASSVGTRTYEQYF

SEQ ID NO: 329293 - protein, 11 aa, Homo sapiens
  CDR3 for alpha chain variable domain of TCR clone 164647 (TRAV1-2, TRAJ20)
CAVANDYKLSF

SEQ ID NO: 329294 - protein, 12 aa, Homo sapiens
  CDR3 for beta chain variable domain of TCR clone 164647 (TRBV12-4, TRBJ2-3)
CASSTLPDTQYF

SEQ ID NO: 329295 - protein, 13 aa, Homo sapiens
  CDR3 for alpha chain variable domain of TCR clone 164648 (TRAV17, TRAJ54)
CATGLQGDQKLVF

SEQ ID NO: 329296 - protein, 14 aa, Homo sapiens
  CDR3 for beta chain variable domain of TCR clone 164648 (TRBV12-4, TRBJ2-5)
CASGSRTHQETQYF

SEQ ID NO: 329297 - protein, 15 aa, Homo sapiens
  CDR3 for alpha chain variable domain of TCR clone 164649 (TRAV2, TRAJ15)
CAVEDRGQAGTALIF

SEQ ID NO: 329298 - protein, 14 aa, Homo sapiens
  CDR3 for beta chain variable domain of TCR clone 164649 (TRBV28, TRBJ1-2)
CASRIQGANYGYTF

SEQ ID NO: 329299 - protein, 17 aa, Homo sapiens
  CDR3 for alpha chain variable domain of TCR clone 164650 (TRAV3, TRAJ38)
CAVRDCLNAGTNRKRIW

SEQ ID NO: 329300 - protein, 14 aa, Homo sapiens
  CDR3 for beta chain variable domain of TCR clone 164650 (TRBV5-5, TRBJ1-5)
CASSGQGVDQPQHF

SEQ ID NO: 329301 - protein, 12 aa, Homo sapiens
  CDR3 for alpha chain variable domain of TCR clone 164651 (TRAV23/DV6, TRAJ30)
CAASKGGDKIIF

SEQ ID NO: 329302 - protein, 13 aa, Homo sapiens
  CDR3 for beta chain variable domain of TCR clone 164651 (TRBV19, TRBJ1-2)
CASSQGQVYGYTF

SEQ ID NO: 329303 - protein, 16 aa, Homo sapiens
  CDR3 for alpha chain variable domain of TCR clone 164652 (TRAV12-3, TRAJ53)
CAMSPGSGGSNYKLTF

SEQ ID NO: 329304 - protein, 20 aa, Homo sapiens
  CDR3 for beta chain variable domain of TCR clone 164652 (TRBV7-8, TRBJ2-2)
CASSHLFPGPTIHITGELLF

SEQ ID NO: 329305 - protein, 13 aa, Homo sapiens
  CDR3 for alpha chain variable domain of TCR clone 164653 (TRAV38-2/DV8, TRAJ34)
FAYRNYNTDKLIF

SEQ ID NO: 329306 - protein, 17 aa, Homo sapiens
  CDR3 for beta chain variable domain of TCR clone 164653 (TRBV13, TRBJ2-3)
CASSLSRVAGGRNTQYF

SEQ ID NO: 329307 - protein, 14 aa, Homo sapiens
  CDR3 for alpha chain variable domain of TCR clone 164654 (TRAV29/DV5, TRAJ36)
CAAPRKTGANNLFF

SEQ ID NO: 329308 - protein, 14 aa, Homo sapiens
  CDR3 for beta chain variable domain of TCR clone 164654 (TRBV12-5, TRBJ2-5)
CASGSRTHQETQYF

SEQ ID NO: 329309 - protein, 11 aa, Homo sapiens
  CDR3 for alpha chain variable domain of TCR clone 164655 (TRAV21, TRAJ41)
CAVRSGNALNF

SEQ ID NO: 329310 - protein, 13 aa, Homo sapiens
  CDR3 for beta chain variable domain of TCR clone 164655 (TRBV7-2, TRBJ2-5)
CASGQTSVETQYF

SEQ ID NO: 329311 - protein, 11 aa, Homo sapiens
  CDR3 for alpha chain variable domain of TCR clone 164656 (TRAV12-2, TRAJ39)
CAVNNMLTFGG

SEQ ID NO: 329312 - protein, 16 aa, Homo sapiens
  CDR3 for beta chain variable domain of TCR clone 164656 (TRBV9, TRBJ2-7)
CASSAGPDRCPYEQYF

SEQ ID NO: 329313 - protein, 15 aa, Homo sapiens
  CDR3 for alpha chain variable domain of TCR clone 164657 (TRAV12-3, TRAJ27)
CAMRAYNTNAGKSTF

SEQ ID NO: 329314 - protein, 14 aa, Homo sapiens
  CDR3 for beta chain variable domain of TCR clone 164657 (TRBV2, TRBJ2-1)
CASSDRAYYNEQFF

SEQ ID NO: 329315 - protein, 15 aa, Homo sapiens
  CDR3 for alpha chain variable domain of TCR clone 164658 (TRAV35, TRAJ23)
FAGPLGNNQGGKLIF

SEQ ID NO: 329316 - protein, 14 aa, Homo sapiens
  CDR3 for beta chain variable domain of TCR clone 164658 (TRBV7-9, TRBJ1-1)
CASTPLQSYTEAFF

SEQ ID NO: 329317 - protein, 10 aa, Homo sapiens
  CDR3 for alpha chain variable domain of TCR clone 164659 (TRAV26-2, TRAJ49)
CILLGNQFYI

SEQ ID NO: 329318 - protein, 13 aa, Homo sapiens
  CDR3 for beta chain variable domain of TCR clone 164659 (TRBV20-1, TRBJ2-7)
CSADPGATYEQYF

SEQ ID NO: 329319 - protein, 13 aa, Homo sapiens
  CDR3 for alpha chain variable domain of TCR clone 164660 (TRAV13-2, TRAJ8)
CAFMNTGFQQLVF

SEQ ID NO: 329320 - protein, 17 aa, Homo sapiens
  CDR3 for beta chain variable domain of TCR clone 164660 (TRBV28, TRBJ2-1)
CASSSARQALTYNEQFF

SEQ ID NO: 329321 - protein, 15 aa, Homo sapiens
  CDR3 for alpha chain variable domain of TCR clone 164661 (TRAV8-3, TRAJ45)
CASSYSGGGADGLTF

SEQ ID NO: 329322 - protein, 15 aa, Homo sapiens
  CDR3 for beta chain variable domain of TCR clone 164661 (TRBV15, TRBJ1-1)
CATSLQGGRNTEAFF

SEQ ID NO: 329323 - protein, 17 aa, Homo sapiens
  CDR3 for alpha chain variable domain of TCR clone 164662 (TRAV29/DV5, TRAJ21)
CAASNKFYFGSGTKLTV

SEQ ID NO: 329324 - protein, 16 aa, Homo sapiens
  CDR3 for beta chain variable domain of TCR clone 164662 (TRBV27, TRBJ1-5)
CASSLSGGASNQPQHF

SEQ ID NO: 329325 - protein, 13 aa, Homo sapiens
  CDR3 for alpha chain variable domain of TCR clone 164663 (TRAV35, TRAJ37)
CAGFSSNTGKLIF

SEQ ID NO: 329326 - protein, 11 aa, Homo sapiens
  CDR3 for beta chain variable domain of TCR clone 164663 (TRBV12-4, TRBJ2-3)
CASTATDTQYF

SEQ ID NO: 329327 - protein, 13 aa, Homo sapiens
  CDR3 for alpha chain variable domain of TCR clone 164664 (TRAV27, TRAJ8)
CAGGPTGFQKLVF

SEQ ID NO: 329328 - protein, 14 aa, Homo sapiens
  CDR3 for beta chain variable domain of TCR clone 164664 (TRBV18, TRBJ2-5)
CASSPGVSQETQYF

SEQ ID NO: 329329 - protein, 16 aa, Homo sapiens
  CDR3 for alpha chain variable domain of TCR clone 164665 (TRAV12-3, TRAJ53)
CAMSPGSGGSNYKLTF

SEQ ID NO: 329330 - protein, 15 aa, Homo sapiens
  CDR3 for beta chain variable domain of TCR clone 164665 (TRBV7-6, TRBJ1-1)
CASSTQGGANTEAFF

SEQ ID NO: 329331 - protein, 13 aa, Homo sapiens
  CDR3 for alpha chain variable domain of TCR clone 164666 (TRAV12-1, TRAJ31)
CVVIPNNNARLMF

SEQ ID NO: 329332 - protein, 15 aa, Homo sapiens
  CDR3 for beta chain variable domain of TCR clone 164666 (TRBV6-3, TRBJ2-7)
CAGSSPGTVFYEQYF

SEQ ID NO: 329333 - protein, 11 aa, Homo sapiens
  CDR3 for alpha chain variable domain of TCR clone 164667 (TRAV1-2, TRAJ40)
CSVPGTYKYIF

SEQ ID NO: 329334 - protein, 16 aa, Homo sapiens
  CDR3 for beta chain variable domain of TCR clone 164667 (TRBV7-3, TRBJ2-2)
CASSLKRGNLSGELFF

SEQ ID NO: 329335 - protein, 13 aa, Homo sapiens
  CDR3 for alpha chain variable domain of TCR clone 164668 (TRAV12-1, TRAJ43)
CVESHHNNNDMRF

SEQ ID NO: 329336 - protein, 15 aa, Homo sapiens
  CDR3 for beta chain variable domain of TCR clone 164668 (TRBV3-1, TRBJ2-5)
CASSLPSSSREAQYF

SEQ ID NO: 329337 - protein, 14 aa, Homo sapiens
  CDR3 for alpha chain variable domain of TCR clone 164669 (TRAV8-3, TRAJ31)
CAVGRGLNNARLMF

SEQ ID NO: 329338 - protein, 15 aa, Homo sapiens
  CDR3 for beta chain variable domain of TCR clone 164669 (TRBV7-2, TRBJ2-2)
FASSLAGGLTGELFF

SEQ ID NO: 329339 - protein, 12 aa, Homo sapiens
  CDR3 for alpha chain variable domain of TCR clone 164670 (TRAV16, TRAJ10)
CSRTGGGNKLTF

SEQ ID NO: 329340 - protein, 15 aa, Homo sapiens
  CDR3 for beta chain variable domain of TCR clone 164670 (TRBV7-6, TRBJ1-2)
CASSSGGRGGYGYTF

SEQ ID NO: 329341 - protein, 16 aa, Homo sapiens
  CDR3 for alpha chain variable domain of TCR clone 164671 (TRAV30, TRAJ24)
CGTEIVDANSWGKFQF

SEQ ID NO: 329342 - protein, 12 aa, Homo sapiens
  CDR3 for beta chain variable domain of TCR clone 164671 (TRBV11-2, TRBJ2-1)
CASSPGNNEQFF

SEQ ID NO: 329343 - protein, 14 aa, Homo sapiens
  CDR3 for alpha chain variable domain of TCR clone 164672 (TRAV8-4, TRAJ39)
CAVSEGNAGNMLTF

SEQ ID NO: 329344 - protein, 14 aa, Homo sapiens
  CDR3 for beta chain variable domain of TCR clone 164672 (TRBV19, TRBJ2-2)
CASSGQGIAGELFF

SEQ ID NO: 329345 - protein, 14 aa, Homo sapiens
  CDR3 for alpha chain variable domain of TCR clone 164673 (TRAV1-2, TRAJ8)
CAVREDTGFQDLVF

SEQ ID NO: 329346 - protein, 16 aa, Homo sapiens
  CDR3 for beta chain variable domain of TCR clone 164673 (TRBV7-3, TRBJ2-2)
CASSLKRGTLSGELFF

SEQ ID NO: 329347 - protein, 18 aa, Homo sapiens
  CDR3 for alpha chain variable domain of TCR clone 164674 (TRAV26-2, TRAJ54)
CILRDVEVGIQGAQKLVF

SEQ ID NO: 329348 - protein, 16 aa, Homo sapiens
  CDR3 for beta chain variable domain of TCR clone 164674 (TRBV13, TRBJ2-2)
CASSPRTGEHTGELFF

SEQ ID NO: 329349 - protein, 15 aa, Homo sapiens
  CDR3 for alpha chain variable domain of TCR clone 164675 (TRAV35, TRAJ40)
CAGQLGTSGTYKYIF

SEQ ID NO: 329350 - protein, 14 aa, Homo sapiens
  CDR3 for beta chain variable domain of TCR clone 164675 (TRBV5-1, TRBJ2-7)
CVSSRGESLYEQYF

SEQ ID NO: 329351 - protein, 16 aa, Homo sapiens
  CDR3 for alpha chain variable domain of TCR clone 164676 (TRAV30, TRAJ49)
SAAQRVEPNTGNQFYF

SEQ ID NO: 329352 - protein, 15 aa, Homo sapiens
  CDR3 for beta chain variable domain of TCR clone 164676 (TRBV7-2, TRBJ2-1)
CASSSGLAGGNEQFF

SEQ ID NO: 329353 - protein, 13 aa, Homo sapiens
  CDR3 for alpha chain variable domain of TCR clone 164677 (TRAV35, TRAJ42)
CAGFPGSQGNLIF

SEQ ID NO: 329354 - protein, 13 aa, Homo sapiens
  CDR3 for beta chain variable domain of TCR clone 164677 (TRBV29-1, TRBJ2-1)
CSVEGVRVNEQFF

SEQ ID NO: 329355 - protein, 16 aa, Homo sapiens
  CDR3 for alpha chain variable domain of TCR clone 164678 (TRAV4, TRAJ22)
CLVGDLYSGSARQLTF

SEQ ID NO: 329356 - protein, 12 aa, Homo sapiens
  CDR3 for beta chain variable domain of TCR clone 164678 (TRBV19, TRBJ1-5)
CASSIAQQPQHF

SEQ ID NO: 329357 - protein, 16 aa, Homo sapiens
  CDR3 for alpha chain variable domain of TCR clone 164679 (TRAV30, TRAJ24)
CGTEIVDADSWGKFQF

SEQ ID NO: 329358 - protein, 12 aa, Homo sapiens
  CDR3 for beta chain variable domain of TCR clone 164679 (TRBV19, TRBJ2-1)
CASGTSLNEQFF

SEQ ID NO: 329359 - protein, 11 aa, Homo sapiens
  CDR3 for alpha chain variable domain of TCR clone 164680 (TRAV17, TRAJ9)
CGFTGGFKTIF

SEQ ID NO: 329360 - protein, 18 aa, Homo sapiens
  CDR3 for beta chain variable domain of TCR clone 164680 (TRBV27, TRBJ2-1)
CASGNRAVGVGSKNEQFF

SEQ ID NO: 329361 - protein, 13 aa, Homo sapiens
  CDR3 for alpha chain variable domain of TCR clone 164681 (TRAV35, TRAJ42)
CVGFPGSQGNLIF

SEQ ID NO: 329362 - protein, 14 aa, Homo sapiens
  CDR3 for beta chain variable domain of TCR clone 164681 (TRBV4-1, TRBJ2-2)
CASSQAVNTGELFF

SEQ ID NO: 329363 - protein, 14 aa, Homo sapiens
  CDR3 for alpha chain variable domain of TCR clone 164682 (TRAV26-1, TRAJ38)
CIAYNAGNNRKLIW

SEQ ID NO: 329364 - protein, 15 aa, Homo sapiens
  CDR3 for beta chain variable domain of TCR clone 164682 (TRBV27, TRBJ2-7)
CASSTAGTGSYEQYF

SEQ ID NO: 329365 - protein, 13 aa, Homo sapiens
  CDR3 for alpha chain variable domain of TCR clone 164683 (TRAV14/DV4, TRAJ16)
CAMREGSGQKLLF

SEQ ID NO: 329366 - protein, 16 aa, Homo sapiens
  CDR3 for beta chain variable domain of TCR clone 164683 (TRBV7-2, TRBJ2-1)
CASSPRLAGSNNEQFF

SEQ ID NO: 329367 - protein, 14 aa, Homo sapiens
  CDR3 for alpha chain variable domain of TCR clone 164684 (TRAV12-1, TRAJ4)
CVGDFSGGYNKLIF

SEQ ID NO: 329368 - protein, 16 aa, Homo sapiens
  CDR3 for beta chain variable domain of TCR clone 164684 (TRBV20-1, TRBJ2-1)
CSARDLKQGMNNEQFF

SEQ ID NO: 329369 - protein, 22 aa, Homo sapiens
  CDR3 for alpha chain variable domain of TCR clone 164685 (TRAV8-4, TRAJ32)
CAAYMVVLQTSSSLELTLCLLS

SEQ ID NO: 329370 - protein, 16 aa, Homo sapiens
  CDR3 for beta chain variable domain of TCR clone 164685 (TRBV27, TRBJ2-2)
CASSPLAAANTGELFF

SEQ ID NO: 329371 - protein, 13 aa, Homo sapiens
  CDR3 for alpha chain variable domain of TCR clone 164686 (TRAV8-3, TRAJ44)
CAVVPGTASKLTF

SEQ ID NO: 329372 - protein, 14 aa, Homo sapiens
  CDR3 for beta chain variable domain of TCR clone 164686 (TRBV11-2, TRBJ2-3)
CASRRRARTDTQYF

SEQ ID NO: 329373 - protein, 15 aa, Homo sapiens
  CDR3 for alpha chain variable domain of TCR clone 164687 (TRAV2, TRAJ28)
CAVPYSGAGSYQLTF

SEQ ID NO: 329374 - protein, 17 aa, Homo sapiens
  CDR3 for beta chain variable domain of TCR clone 164687 (TRBV20-1, TRBJ2-4)
CSARDWASGGRENIQFF

SEQ ID NO: 329375 - protein, 14 aa, Homo sapiens
  CDR3 for alpha chain variable domain of TCR clone 164688 (TRAV24, TRAJ42)
CAQNYLGSQGNLIF

SEQ ID NO: 329376 - protein, 15 aa, Homo sapiens
  CDR3 for beta chain variable domain of TCR clone 164688 (TRBV19, TRBJ1-5)
CASSIPGGAGQPQHF

SEQ ID NO: 329377 - protein, 18 aa, Homo sapiens
  CDR3 for alpha chain variable domain of TCR clone 164689 (TRAV26-1, TRAJ23)
CIVRDGLEVWNQGGKLIF

SEQ ID NO: 329378 - protein, 14 aa, Homo sapiens
  CDR3 for beta chain variable domain of TCR clone 164689 (TRBV7-6, TRBJ2-3)
CASSLGRVTDTQYF

SEQ ID NO: 329379 - protein, 14 aa, Homo sapiens
  CDR3 for alpha chain variable domain of TCR clone 164690 (TRAV17, TRAJ57)
CATDPQGGSEKLGF

SEQ ID NO: 329380 - protein, 20 aa, Homo sapiens
  CDR3 for beta chain variable domain of TCR clone 164690 (TRBV7-8, TRBJ2-2)
CASSHLFPGPTIHITGELFF

SEQ ID NO: 329381 - protein, 13 aa, Homo sapiens
  CDR3 for alpha chain variable domain of TCR clone 164691 (TRAV36/DV7, TRAJ54)
CAVLIQGAQKLVF

SEQ ID NO: 329382 - protein, 12 aa, Homo sapiens
  CDR3 for beta chain variable domain of TCR clone 164691 (TRBV23-1, TRBJ2-1)
MPSAGGGNEQFF

SEQ ID NO: 329383 - protein, 13 aa, Homo sapiens
  CDR3 for alpha chain variable domain of TCR clone 164692 (TRAV21, TRAJ9)
CAMRNTGGFKTIF

SEQ ID NO: 329384 - protein, 14 aa, Homo sapiens
  CDR3 for beta chain variable domain of TCR clone 164692 (TRBV11-2, TRBJ2-7)
CASSSTGEGYEQYF

SEQ ID NO: 329385 - protein, 12 aa, Homo sapiens
  CDR3 for alpha chain variable domain of TCR clone 164693 (TRAV26-1, TRAJ26)
CIVFIYGQNFVF

SEQ ID NO: 329386 - protein, 15 aa, Homo sapiens
  CDR3 for beta chain variable domain of TCR clone 164693 (TRBV14, TRBJ2-5)
YASSQGEAVQETQYF

SEQ ID NO: 329387 - protein, 14 aa, Homo sapiens
  CDR3 for alpha chain variable domain of TCR clone 164694 (TRAV1-2, TRAJ8)
CAVREDTGVQKLVF

SEQ ID NO: 329388 - protein, 14 aa, Homo sapiens
  CDR3 for beta chain variable domain of TCR clone 164694 (TRBV28, TRBJ2-1)
CASSPSTGYNEQFF

SEQ ID NO: 329389 - protein, 15 aa, Homo sapiens
  CDR3 for alpha chain variable domain of TCR clone 164695 (TRAV29/DV5, TRAJ24)
CAASGATDSWGKFQF

SEQ ID NO: 329390 - protein, 12 aa, Homo sapiens
  CDR3 for beta chain variable domain of TCR clone 164695 (TRBV11-2, TRBJ2-2)
CASSLPTEELFF

SEQ ID NO: 329391 - protein, 17 aa, Homo sapiens
  CDR3 for alpha chain variable domain of TCR clone 164696 (TRAV36/DV7, TRAJ44)
CAVEQIPALPVNSTLGL

SEQ ID NO: 329392 - protein, 16 aa, Homo sapiens
  CDR3 for beta chain variable domain of TCR clone 164696 (TRBV7-9, TRBJ1-2)
CASSLGFSSGEDGYTF

SEQ ID NO: 329393 - protein, 16 aa, Homo sapiens
  CDR3 for alpha chain variable domain of TCR clone 164697 (TRAV29/DV5, TRAJ30)
QCTSVQQANRDDKTIF

SEQ ID NO: 329394 - protein, 13 aa, Homo sapiens
  CDR3 for beta chain variable domain of TCR clone 164697 (TRBV12-5, TRBJ2-3)
CASQNRGIDTQYF

SEQ ID NO: 329395 - protein, 15 aa, Homo sapiens
  CDR3 for alpha chain variable domain of TCR clone 164698 (TRAV12-2, TRAJ22)
CAVNRASGSARQLTF

SEQ ID NO: 329396 - protein, 15 aa, Homo sapiens
  CDR3 for beta chain variable domain of TCR clone 164698 (TRBV18, TRBJ2-2)
CASSPPVGFTGELFF

SEQ ID NO: 329397 - protein, 17 aa, Homo sapiens
  CDR3 for alpha chain variable domain of TCR clone 164699 (TRAV21, TRAJ24)
CVGIRLRSTDSWGKLQF

SEQ ID NO: 329398 - protein, 15 aa, Homo sapiens
  CDR3 for beta chain variable domain of TCR clone 164699 (TRBV7-2, TRBJ2-3)
CASSPRGLSTDTQYF

SEQ ID NO: 329399 - protein, 14 aa, Homo sapiens
  CDR3 for alpha chain variable domain of TCR clone 164700 (TRAV1-2, TRAJ16)
CAVNRFSDGQKLLF

SEQ ID NO: 329400 - protein, 15 aa, Homo sapiens
  CDR3 for beta chain variable domain of TCR clone 164700 (TRBV20-1, TRBJ1-5)
CSACKNGQRNQPQHF

SEQ ID NO: 329401 - protein, 11 aa, Homo sapiens
  CDR3 for alpha chain variable domain of TCR clone 164701 (TRAV2, TRAJ13)
CASGGYQKVTF

SEQ ID NO: 329402 - protein, 17 aa, Homo sapiens
  CDR3 for beta chain variable domain of TCR clone 164701 (TRBV18, TRBJ1-5)
CQLTTCRVRQNNQPQHF

SEQ ID NO: 329403 - protein, 13 aa, Homo sapiens
  CDR3 for alpha chain variable domain of TCR clone 164702 (TRAV13-2, TRAJ13)
CAERPGGYQKVTF

SEQ ID NO: 329404 - protein, 13 aa, Homo sapiens
  CDR3 for beta chain variable domain of TCR clone 164702 (TRBV28, TRBJ2-7)
CASSNSGNYEQYF

SEQ ID NO: 329405 - protein, 12 aa, Homo sapiens
  CDR3 for alpha chain variable domain of TCR clone 164703 (TRAV35, TRAJ39)
LAPNNAGNMLTF

SEQ ID NO: 329406 - protein, 16 aa, Homo sapiens
  CDR3 for beta chain variable domain of TCR clone 164703 (TRBV2, TRBJ2-3)
CASSTSVEGVTETQYF

SEQ ID NO: 329407 - protein, 13 aa, Homo sapiens
  CDR3 for alpha chain variable domain of TCR clone 164704 (TRAV8-3, TRAJ48)
CPVVPFGNEKLTF

SEQ ID NO: 329408 - protein, 14 aa, Homo sapiens
  CDR3 for beta chain variable domain of TCR clone 164704 (TRBV18, TRBJ2-7)
CASSPRGGAYEQYF

SEQ ID NO: 329409 - protein, 11 aa, Homo sapiens
  CDR3 for alpha chain variable domain of TCR clone 164705 (TRAV1-2, TRAJ40)
CAVPGTYKYIF

SEQ ID NO: 329410 - protein, 16 aa, Homo sapiens
  CDR3 for beta chain variable domain of TCR clone 164705 (TRBV7-3, TRBJ2-2)
CASSLKGGTLSGELFL

SEQ ID NO: 329411 - protein, 13 aa, Homo sapiens
  CDR3 for alpha chain variable domain of TCR clone 164706 (TRAV21, TRAJ27)
CAARPGNASKSTF

SEQ ID NO: 329412 - protein, 14 aa, Homo sapiens
  CDR3 for beta chain variable domain of TCR clone 164706 (TRBV11-2, TRBJ2-7)
CASSLGAGAYEQYF

SEQ ID NO: 329413 - protein, 17 aa, Homo sapiens
  CDR3 for alpha chain variable domain of TCR clone 164707 (TRAV14/DV4, TRAJ28)
CAMREVSSGAGSYQLTF

SEQ ID NO: 329414 - protein, 15 aa, Homo sapiens
  CDR3 for beta chain variable domain of TCR clone 164707 (TRBV11-2, TRBJ1-6)
CASTLRETGNSPLYF

SEQ ID NO: 329415 - protein, 14 aa, Homo sapiens
  CDR3 for alpha chain variable domain of TCR clone 164708 (TRAV13-1, TRAJ40)
CAASMTSGTYKYIF

SEQ ID NO: 329416 - protein, 14 aa, Homo sapiens
  CDR3 for beta chain variable domain of TCR clone 164708 (TRBV11-2, TRBJ2-7)
CASSSTGEGYEQYF

SEQ ID NO: 329417 - protein, 14 aa, Homo sapiens
  CDR3 for alpha chain variable domain of TCR clone 164709 (TRAV2, TRAJ9)
CAVEDRSGGFKTIF

SEQ ID NO: 329418 - protein, 13 aa, Homo sapiens
  CDR3 for beta chain variable domain of TCR clone 164709 (TRBV7-9, TRBJ2-3)
CASSPGSTDTQYF

SEQ ID NO: 329419 - protein, 14 aa, Homo sapiens
  CDR3 for alpha chain variable domain of TCR clone 164710 (TRAV12-2, TRAJ40)
CAVKIPSGTYKYIF

SEQ ID NO: 329420 - protein, 10 aa, Homo sapiens
  CDR3 for beta chain variable domain of TCR clone 164710 (TRBV2, TRBJ2-5)
CASSAATQYF

SEQ ID NO: 329421 - protein, 15 aa, Homo sapiens
  CDR3 for alpha chain variable domain of TCR clone 164711 (TRAV2, TRAJ22)
CAVPSRGGSARQLTF

SEQ ID NO: 329422 - protein, 16 aa, Homo sapiens
  CDR3 for beta chain variable domain of TCR clone 164711 (TRBV2, TRBJ2-7)
CASSEPWTGPSYEQYF

SEQ ID NO: 329423 - protein, 13 aa, Homo sapiens
  CDR3 for alpha chain variable domain of TCR clone 164712 (TRAV38-2/DV8, TRAJ46)
CAYSRSSGDKLTF

SEQ ID NO: 329424 - protein, 17 aa, Homo sapiens
  CDR3 for beta chain variable domain of TCR clone 164712 (TRBV28, TRBJ1-2)
CASSSTGDFIQVGGYTF

SEQ ID NO: 329425 - protein, 13 aa, Homo sapiens
  CDR3 for alpha chain variable domain of TCR clone 164713 (TRAV36/DV7, TRAJ53)
CALSGGSNYKLTF

SEQ ID NO: 329426 - protein, 16 aa, Homo sapiens
  CDR3 for beta chain variable domain of TCR clone 164713 (TRBV29-1, TRBJ2-6)
CSVEDITYPGANVLTF

SEQ ID NO: 329427 - protein, 16 aa, Homo sapiens
  CDR3 for alpha chain variable domain of TCR clone 164714 (TRAV30, TRAJ49)
SAAQRVGPNTGNQFYF

SEQ ID NO: 329428 - protein, 15 aa, Homo sapiens
  CDR3 for beta chain variable domain of TCR clone 164714 (TRBV2, TRBJ2-1)
CASSELAGSYDEQFF

SEQ ID NO: 329429 - protein, 14 aa, Homo sapiens
  CDR3 for alpha chain variable domain of TCR clone 164715 (TRAV26-1, TRAJ48)
CIVSVGFGHEKLTF

SEQ ID NO: 329430 - protein, 14 aa, Homo sapiens
  CDR3 for beta chain variable domain of TCR clone 164715 (TRBV4-1, TRBJ2-2)
CASSQAVNTGELFF

SEQ ID NO: 329431 - protein, 10 aa, Homo sapiens
  CDR3 for alpha chain variable domain of TCR clone 164716 (TRAV12-3, TRAJ49)
CAMNDDQFYF

SEQ ID NO: 329432 - protein, 16 aa, Homo sapiens
  CDR3 for beta chain variable domain of TCR clone 164716 (TRBV12-4, TRBJ1-5)
CASSRTVGGSNQPQHF

SEQ ID NO: 329433 - protein, 12 aa, Homo sapiens
  CDR3 for alpha chain variable domain of TCR clone 164717 (TRAV21, TRAJ13)
PGPSGGYQKVTF

SEQ ID NO: 329434 - protein, 13 aa, Homo sapiens
  CDR3 for beta chain variable domain of TCR clone 164717 (TRBV7-9, TRBJ2-1)
CASSLDVGNEQFF

SEQ ID NO: 329435 - protein, 14 aa, Homo sapiens
  CDR3 for alpha chain variable domain of TCR clone 164718 (TRAV12-2, TRAJ40)
CAVKIPSGTYKYIF

SEQ ID NO: 329436 - protein, 15 aa, Homo sapiens
  CDR3 for beta chain variable domain of TCR clone 164718 (TRBV20-1, TRBJ1-4)
CSARRGWGVNEKLFL

SEQ ID NO: 329437 - protein, 11 aa, Homo sapiens
  CDR3 for alpha chain variable domain of TCR clone 164719 (TRAV2, TRAJ13)
CASGGYQKVTF

SEQ ID NO: 329438 - protein, 11 aa, Homo sapiens
  CDR3 for beta chain variable domain of TCR clone 164719 (TRBV5-6, TRBJ2-5)
CASNLERTQYF

SEQ ID NO: 329439 - protein, 15 aa, Homo sapiens
  CDR3 for alpha chain variable domain of TCR clone 164720 (TRAV25, TRAJ52)
CAGRPGGTSYGKLTF

SEQ ID NO: 329440 - protein, 14 aa, Homo sapiens
  CDR3 for beta chain variable domain of TCR clone 164720 (TRBV7-8, TRBJ1-5)
CASSSHGSNQPQHF

SEQ ID NO: 329441 - protein, 12 aa, Homo sapiens
  CDR3 for alpha chain variable domain of TCR clone 164721 (TRAV12-3, TRAJ17)
CAMTLTGNKLTF

SEQ ID NO: 329442 - protein, 16 aa, Homo sapiens
  CDR3 for beta chain variable domain of TCR clone 164721 (TRBV12-5, TRBJ2-5)
CASGPRTSGKQETQYF

SEQ ID NO: 329443 - protein, 12 aa, Homo sapiens
  CDR3 for alpha chain variable domain of TCR clone 164722 (TRAV16, TRAJ10)
CSRTGGGNKLTF

SEQ ID NO: 329444 - protein, 14 aa, Homo sapiens
  CDR3 for beta chain variable domain of TCR clone 164722 (TRBV2, TRBJ1-5)
CASSGTVSNQPQHF

SEQ ID NO: 329445 - protein, 17 aa, Homo sapiens
  CDR3 for alpha chain variable domain of TCR clone 164723 (TRAV12-1, TRAJ32)
CVVNMQGYGGATNKLIC

SEQ ID NO: 329446 - protein, 13 aa, Homo sapiens
  CDR3 for beta chain variable domain of TCR clone 164723 (TRBV6-6, TRBJ2-1)
CASSLHQGDEQFF

SEQ ID NO: 329447 - protein, 13 aa, Homo sapiens
  CDR3 for alpha chain variable domain of TCR clone 164724 (TRAV12-3, TRAJ7)
CAMSASGNNRLAF

SEQ ID NO: 329448 - protein, 13 aa, Homo sapiens
  CDR3 for beta chain variable domain of TCR clone 164724 (TRBV20-1, TRBJ1-1)
CSARGGGNTEAFF

SEQ ID NO: 329449 - protein, 14 aa, Homo sapiens
  CDR3 for alpha chain variable domain of TCR clone 164725 (TRAV8-2, TRAJ4)
CVVSPSRGYNKLIF

SEQ ID NO: 329450 - protein, 17 aa, Homo sapiens
  CDR3 for beta chain variable domain of TCR clone 164725 (TRBV4-1, TRBJ1-4)
CASSDTGGTNEKLFLAV

SEQ ID NO: 329451 - protein, 14 aa, Homo sapiens
  CDR3 for alpha chain variable domain of TCR clone 164726 (TRAV17, TRAJ40)
CATALTSGTYKYIF

SEQ ID NO: 329452 - protein, 13 aa, Homo sapiens
  CDR3 for beta chain variable domain of TCR clone 164726 (TRBV27, TRBJ2-1)
CASSSASYNEQFF

SEQ ID NO: 329453 - protein, 14 aa, Homo sapiens
  CDR3 for alpha chain variable domain of TCR clone 164727 (TRAV3, TRAJ34)
CAVRDIDNTDKLIF

SEQ ID NO: 329454 - protein, 15 aa, Homo sapiens
  CDR3 for beta chain variable domain of TCR clone 164727 (TRBV20-1, TRBJ2-7)
CSARDRVSGMDEQYF

SEQ ID NO: 329455 - protein, 15 aa, Homo sapiens
  CDR3 for alpha chain variable domain of TCR clone 164728 (TRAV34, TRAJ38)
CGADFTPDNNRKLIW

SEQ ID NO: 329456 - protein, 16 aa, Homo sapiens
  CDR3 for beta chain variable domain of TCR clone 164728 (TRBV6-1, TRBJ2-3)
CASSEVIGQGTDTQYF

SEQ ID NO: 329457 - protein, 11 aa, Homo sapiens
  CDR3 for alpha chain variable domain of TCR clone 164729 (TRAV2, TRAJ13)
CASGGFQKVTF

SEQ ID NO: 329458 - protein, 14 aa, Homo sapiens
  CDR3 for beta chain variable domain of TCR clone 164729 (TRBV19, TRBJ2-1)
CASSKDRGQDEQFF

SEQ ID NO: 329459 - protein, 13 aa, Homo sapiens
  CDR3 for alpha chain variable domain of TCR clone 164730 (TRAV12-3, TRAJ40)
CAMSARGTYKNIF

SEQ ID NO: 329460 - protein, 16 aa, Homo sapiens
  CDR3 for beta chain variable domain of TCR clone 164730 (TRBV20-1, TRBJ2-3)
CSGEAGLAGGQDTQYF

SEQ ID NO: 329461 - protein, 13 aa, Homo sapiens
  CDR3 for alpha chain variable domain of TCR clone 164731 (TRAV30, TRAJ24)
CGTVIDSWGKLQF

SEQ ID NO: 329462 - protein, 15 aa, Homo sapiens
  CDR3 for beta chain variable domain of TCR clone 164731 (TRBV25-1, TRBJ1-4)
CASSPGDSTNEKLFF

SEQ ID NO: 329463 - protein, 15 aa, Homo sapiens
  CDR3 for alpha chain variable domain of TCR clone 164732 (TRAV3, TRAJ3)
CAVRDRDSSASQIIF

SEQ ID NO: 329464 - protein, 18 aa, Homo sapiens
  CDR3 for beta chain variable domain of TCR clone 164732 (TRBV25-1, TRBJ1-2)
CASSGLQNGQGLIFGYIF

SEQ ID NO: 329465 - protein, 15 aa, Homo sapiens
  CDR3 for alpha chain variable domain of TCR clone 164733 (TRAV17, TRAJ22)
CATVAPSVSARQPTF

SEQ ID NO: 329466 - protein, 16 aa, Homo sapiens
  CDR3 for beta chain variable domain of TCR clone 164733 (TRBV10-3, TRBJ2-7)
CAISADFADRPYEQYF

SEQ ID NO: 329467 - protein, 13 aa, Homo sapiens
  CDR3 for alpha chain variable domain of TCR clone 164734 (TRAV17, TRAJ9)
CATDYTGGFKTIF

SEQ ID NO: 329468 - protein, 14 aa, Homo sapiens
  CDR3 for beta chain variable domain of TCR clone 164734 (TRBV7-9, TRBJ2-1)
CASSPRDSLYEQFL

SEQ ID NO: 329469 - protein, 12 aa, Homo sapiens
  CDR3 for alpha chain variable domain of TCR clone 164735 (TRAV1-1, TRAJ20)
CAVREDGYKLSF

SEQ ID NO: 329470 - protein, 15 aa, Homo sapiens
  CDR3 for beta chain variable domain of TCR clone 164735 (TRBV5-7, TRBJ2-7)
CASSLPGQVFYEQYF

SEQ ID NO: 329471 - protein, 16 aa, Homo sapiens
  CDR3 for alpha chain variable domain of TCR clone 164736 (TRAV12-2, TRAJ28)
CAVITDSGAGSYQLTF

SEQ ID NO: 329472 - protein, 13 aa, Homo sapiens
  CDR3 for beta chain variable domain of TCR clone 164736 (TRBV18, TRBJ1-1)
CASSPETKPEAFF

SEQ ID NO: 329473 - protein, 14 aa, Homo sapiens
  CDR3 for alpha chain variable domain of TCR clone 164737 (TRAV12-2, TRAJ13)
CAVKKTGGYQKGTF

SEQ ID NO: 329474 - protein, 15 aa, Homo sapiens
  CDR3 for beta chain variable domain of TCR clone 164737 (TRBV9, TRBJ1-6)
CASSVAGTGDSPLHF

SEQ ID NO: 329475 - protein, 14 aa, Homo sapiens
  CDR3 for alpha chain variable domain of TCR clone 164738 (TRAV8-4, TRAJ13)
CAVTLSGGYKKVTF

SEQ ID NO: 329476 - protein, 14 aa, Homo sapiens
  CDR3 for beta chain variable domain of TCR clone 164738 (TRBV7-2, TRBJ1-2)
CASSQTGSTYGYTL

SEQ ID NO: 329477 - protein, 19 aa, Homo sapiens
  CDR3 for alpha chain variable domain of TCR clone 164739 (TRAV26-1, TRAJ42)
CVLLHSQTYYGGSQGNLIF

SEQ ID NO: 329478 - protein, 16 aa, Homo sapiens
  CDR3 for beta chain variable domain of TCR clone 164739 (TRBV7-3, TRBJ2-2)
CASSLKRGTLSGELFF

SEQ ID NO: 329479 - protein, 14 aa, Homo sapiens
  CDR3 for alpha chain variable domain of TCR clone 164740 (TRAV8-3, TRAJ44)
CAVGLTGPASKLTF

SEQ ID NO: 329480 - protein, 12 aa, Homo sapiens
  CDR3 for beta chain variable domain of TCR clone 164740 (TRBV7-3, TRBJ2-1)
CASSLGFNEQFF

SEQ ID NO: 329481 - protein, 13 aa, Homo sapiens
  CDR3 for alpha chain variable domain of TCR clone 164741 (TRAV8-6, TRAJ54)
CAVSEEGAQKLGF

SEQ ID NO: 329482 - protein, 15 aa, Homo sapiens
  CDR3 for beta chain variable domain of TCR clone 164741 (TRBV27, TRBJ2-5)
CASSLYPRGGETQYF

SEQ ID NO: 329483 - protein, 13 aa, Homo sapiens
  CDR3 for alpha chain variable domain of TCR clone 164742 (TRAV13-2, TRAJ54)
CAENYQGAQKLVF

SEQ ID NO: 329484 - protein, 16 aa, Homo sapiens
  CDR3 for beta chain variable domain of TCR clone 164742 (TRBV5-4, TRBJ2-3)
CASQQPGAGGADTQYF

SEQ ID NO: 329485 - protein, 13 aa, Homo sapiens
  CDR3 for alpha chain variable domain of TCR clone 164743 (TRAV13-1, TRAJ9)
CAASGTGGFNTIF

SEQ ID NO: 329486 - protein, 13 aa, Homo sapiens
  CDR3 for beta chain variable domain of TCR clone 164743 (TRBV12-4, TRBJ2-7)
CASSLERVREQYF

SEQ ID NO: 329487 - protein, 15 aa, Homo sapiens
  CDR3 for alpha chain variable domain of TCR clone 164744 (TRAV8-2, TRAJ13)
CVVGDLSGGYQKVTF

SEQ ID NO: 329488 - protein, 15 aa, Homo sapiens
  CDR3 for beta chain variable domain of TCR clone 164744 (TRBV28, TRBJ2-1)
CASSIIAGGRSEQFF

SEQ ID NO: 329489 - protein, 15 aa, Homo sapiens
  CDR3 for alpha chain variable domain of TCR clone 164745 (TRAV12-1, TRAJ44)
CVADLPTGTASKLTV

SEQ ID NO: 329490 - protein, 13 aa, Homo sapiens
  CDR3 for beta chain variable domain of TCR clone 164745 (TRBV20-1, TRBJ2-5)
CSARGDYQETQYF

SEQ ID NO: 329491 - protein, 14 aa, Homo sapiens
  CDR3 for alpha chain variable domain of TCR clone 164746 (TRAV12-2, TRAJ13)
CAVKKTGGYQKVTF

SEQ ID NO: 329492 - protein, 13 aa, Homo sapiens
  CDR3 for beta chain variable domain of TCR clone 164746 (TRBV7-9, TRBJ1-1)
CASSRRDTRRAFF

SEQ ID NO: 329493 - protein, 16 aa, Homo sapiens
  CDR3 for alpha chain variable domain of TCR clone 164747 (TRAV3, TRAJ10)
CAVRDMRAGGGNKLTF

SEQ ID NO: 329494 - protein, 16 aa, Homo sapiens
  CDR3 for beta chain variable domain of TCR clone 164747 (TRBV7-2, TRBJ1-6)
CASSSFESSYNSPLHF

SEQ ID NO: 329495 - protein, 12 aa, Homo sapiens
  CDR3 for alpha chain variable domain of TCR clone 164748 (TRAV12-1, TRAJ40)
CVASSGTYKYIF

SEQ ID NO: 329496 - protein, 14 aa, Homo sapiens
  CDR3 for beta chain variable domain of TCR clone 164748 (TRBV20-1, TRBJ2-2)
CSAPDTANTGELFF

SEQ ID NO: 329497 - protein, 17 aa, Homo sapiens
  CDR3 for alpha chain variable domain of TCR clone 164749 (TRAV3, TRAJ6)
CAVRDGARAGGSYIPTF

SEQ ID NO: 329498 - protein, 14 aa, Homo sapiens
  CDR3 for beta chain variable domain of TCR clone 164749 (TRBV7-2, TRBJ2-7)
CASSPKTSFYEQYV

SEQ ID NO: 329499 - protein, 14 aa, Homo sapiens
  CDR3 for alpha chain variable domain of TCR clone 164750 (TRAV12-2, TRAJ40)
CAVKLPSGTYKYIF

SEQ ID NO: 329500 - protein, 19 aa, Homo sapiens
  CDR3 for beta chain variable domain of TCR clone 164750 (TRBV19, TRBJ2-5)
CASSIGQVTDLFLGETQYF

SEQ ID NO: 329501 - protein, 13 aa, Homo sapiens
  CDR3 for alpha chain variable domain of TCR clone 164751 (TRAV2, TRAJ40)
CAVVTSGTYKYIF

SEQ ID NO: 329502 - protein, 13 aa, Homo sapiens
  CDR3 for beta chain variable domain of TCR clone 164751 (TRBV4-1, TRBJ1-1)
CASSRKMNTEAFF

SEQ ID NO: 329503 - protein, 16 aa, Homo sapiens
  CDR3 for alpha chain variable domain of TCR clone 164752 (TRAV12-2, TRAJ18)
CAVTTDRGSTLGRLYF

SEQ ID NO: 329504 - protein, 14 aa, Homo sapiens
  CDR3 for beta chain variable domain of TCR clone 164752 (TRBV11-2, TRBJ2-3)
CASSRLARTDTQYF

SEQ ID NO: 329505 - protein, 14 aa, Homo sapiens
  CDR3 for alpha chain variable domain of TCR clone 164753 (TRAV26-1, TRAJ21)
CIVRVVYNFNKFYF

SEQ ID NO: 329506 - protein, 11 aa, Homo sapiens
  CDR3 for beta chain variable domain of TCR clone 164753 (TRBV5-6, TRBJ2-5)
CASSLERTKYF

SEQ ID NO: 329507 - protein, 14 aa, Homo sapiens
  CDR3 for alpha chain variable domain of TCR clone 164754 (TRAV20, TRAJ42)
CAVQAGGSQGNLIF

SEQ ID NO: 329508 - protein, 14 aa, Homo sapiens
  CDR3 for beta chain variable domain of TCR clone 164754 (TRBV6-1, TRBJ1-3)
CASVQGGGGNTIYF

SEQ ID NO: 329509 - protein, 13 aa, Homo sapiens
  CDR3 for alpha chain variable domain of TCR clone 164755 (TRAV17, TRAJ5)
CAPMDTGRRAITF

SEQ ID NO: 329510 - protein, 13 aa, Homo sapiens
  CDR3 for beta chain variable domain of TCR clone 164755 (TRBV7-9, TRBJ1-2)
CASSLKQNYGYTF

SEQ ID NO: 329511 - protein, 14 aa, Homo sapiens
  CDR3 for alpha chain variable domain of TCR clone 164756 (TRAV16, TRAJ37)
YALDISGNTGKLIF

SEQ ID NO: 329512 - protein, 14 aa, Homo sapiens
  CDR3 for beta chain variable domain of TCR clone 164756 (TRBV7-6, TRBJ2-7)
CASSFRQGADEQYF

SEQ ID NO: 329513 - protein, 13 aa, Homo sapiens
  CDR3 for alpha chain variable domain of TCR clone 164757 (TRAV2, TRAJ40)
CAGVTSGTYKYIF

SEQ ID NO: 329514 - protein, 14 aa, Homo sapiens
  CDR3 for beta chain variable domain of TCR clone 164757 (TRBV19, TRBJ2-1)
CASPTFVLSGEQFF

SEQ ID NO: 329515 - protein, 20 aa, Homo sapiens
  CDR3 for alpha chain variable domain of TCR clone 164758 (TRAV1-1, TRAJ37)
CLLLLRCERQGSGNTGKLIF

SEQ ID NO: 329516 - protein, 13 aa, Homo sapiens
  CDR3 for beta chain variable domain of TCR clone 164758 (TRBV7-3, TRBJ1-1)
CASSQDWGAEAFF

SEQ ID NO: 329517 - protein, 14 aa, Homo sapiens
  CDR3 for alpha chain variable domain of TCR clone 164759 (TRAV13-1, TRAJ6)
CAVSITGGSYIPTF

SEQ ID NO: 329518 - protein, 14 aa, Homo sapiens
  CDR3 for beta chain variable domain of TCR clone 164759 (TRBV6-3, TRBJ2-1)
CASLHSAYYNEQFF

SEQ ID NO: 329519 - protein, 19 aa, Homo sapiens
  CDR3 for alpha chain variable domain of TCR clone 164760 (TRAV26-1, TRAJ29)
CCVLSIVRVEGSGNTPLVF

SEQ ID NO: 329520 - protein, 14 aa, Homo sapiens
  CDR3 for beta chain variable domain of TCR clone 164760 (TRBV18, TRBJ2-5)
CASSPGVSQETQYF

SEQ ID NO: 329521 - protein, 13 aa, Homo sapiens
  CDR3 for alpha chain variable domain of TCR clone 164761 (TRAV13-1, TRAJ39)
CAASRWAGNMLTF

SEQ ID NO: 329522 - protein, 15 aa, Homo sapiens
  CDR3 for beta chain variable domain of TCR clone 164761 (TRBV7-9, TRBJ1-1)
CASSLLEQGGTEAFF

SEQ ID NO: 329523 - protein, 11 aa, Homo sapiens
  CDR3 for alpha chain variable domain of TCR clone 164762 (TRAV12-1, TRAJ21)
CLVNNFNKFYF

SEQ ID NO: 329524 - protein, 16 aa, Homo sapiens
  CDR3 for beta chain variable domain of TCR clone 164762 (TRBV19, TRBJ2-1)
CASSKAGPSSYNEQFF

SEQ ID NO: 329525 - protein, 14 aa, Homo sapiens
  CDR3 for alpha chain variable domain of TCR clone 164763 (TRAV21, TRAJ36)
CAVPDQTGANNLFF

SEQ ID NO: 329526 - protein, 16 aa, Homo sapiens
  CDR3 for beta chain variable domain of TCR clone 164763 (TRBV20-1, TRBJ2-6)
CSASSQGYDGANVLTF

SEQ ID NO: 329527 - protein, 12 aa, Homo sapiens
  CDR3 for alpha chain variable domain of TCR clone 164764 (TRAV8-3, TRAJ20)
CAVGWGDYKLSF

SEQ ID NO: 329528 - protein, 14 aa, Homo sapiens
  CDR3 for beta chain variable domain of TCR clone 164764 (TRBV5-1, TRBJ2-7)
CASSRGGSLYEQYF

SEQ ID NO: 329529 - protein, 14 aa, Homo sapiens
  CDR3 for alpha chain variable domain of TCR clone 164765 (TRAV3, TRAJ40)
CAVRDRRGTYKYIF

SEQ ID NO: 329530 - protein, 14 aa, Homo sapiens
  CDR3 for beta chain variable domain of TCR clone 164765 (TRBV20-1, TRBJ2-1)
CSPNDEASYNEQFF

SEQ ID NO: 329531 - protein, 11 aa, Homo sapiens
  CDR3 for alpha chain variable domain of TCR clone 164766 (TRAV12-3, TRAJ43)
CAMSVSNDMRF

SEQ ID NO: 329532 - protein, 14 aa, Homo sapiens
  CDR3 for beta chain variable domain of TCR clone 164766 (TRBV7-9, TRBJ2-3)
CASSLEQGTNTQYF

SEQ ID NO: 329533 - protein, 13 aa, Homo sapiens
  CDR3 for alpha chain variable domain of TCR clone 164767 (TRAV13-1, TRAJ5)
CAASDTGRRALTF

SEQ ID NO: 329534 - protein, 16 aa, Homo sapiens
  CDR3 for beta chain variable domain of TCR clone 164767 (TRBV7-6, TRBJ2-1)
CASSAPGPSSYNEQFF

SEQ ID NO: 329535 - protein, 15 aa, Homo sapiens
  CDR3 for alpha chain variable domain of TCR clone 164768 (TRAV26-1, TRAJ44)
CIARVPFGTASKLTF

SEQ ID NO: 329536 - protein, 17 aa, Homo sapiens
  CDR3 for beta chain variable domain of TCR clone 164768 (TRBV24-1, TRBJ2-4)
CAASDAEARGVRNIQYF

SEQ ID NO: 329537 - protein, 12 aa, Homo sapiens
  CDR3 for alpha chain variable domain of TCR clone 164769 (TRAV1-1, TRAJ8)
CAGGTGFPKLVF

SEQ ID NO: 329538 - protein, 16 aa, Homo sapiens
  CDR3 for beta chain variable domain of TCR clone 164769 (TRBV7-9, TRBJ1-2)
CASSLGFSSGEDGYTF

SEQ ID NO: 329539 - protein, 11 aa, Homo sapiens
  CDR3 for alpha chain variable domain of TCR clone 164770 (TRAV12-1, TRAJ34)
CVVNKGREPIF

SEQ ID NO: 329540 - protein, 16 aa, Homo sapiens
  CDR3 for beta chain variable domain of TCR clone 164770 (TRBV5-4, TRBJ2-3)
CASQQPGAGGADTQYF

SEQ ID NO: 329541 - protein, 14 aa, Homo sapiens
  CDR3 for alpha chain variable domain of TCR clone 164771 (TRAV12-3, TRAJ57)
CAMSAWGGSEELVF

SEQ ID NO: 329542 - protein, 16 aa, Homo sapiens
  CDR3 for beta chain variable domain of TCR clone 164771 (TRBV7-3, TRBJ2-2)
CASSLKRGTLSGELFF

SEQ ID NO: 329543 - protein, 15 aa, Homo sapiens
  CDR3 for alpha chain variable domain of TCR clone 164772 (TRAV1-1, TRAJ32)
CAVRDPGWCYKQAHL

SEQ ID NO: 329544 - protein, 14 aa, Homo sapiens
  CDR3 for beta chain variable domain of TCR clone 164772 (TRBV12-4, TRBJ1-1)
CASSLGTGGTEAFF

SEQ ID NO: 329545 - protein, 12 aa, Homo sapiens
  CDR3 for alpha chain variable domain of TCR clone 164773 (TRAV1-2, TRAJ33)
CAALDSNYQLIW

SEQ ID NO: 329546 - protein, 18 aa, Homo sapiens
  CDR3 for beta chain variable domain of TCR clone 164773 (TRBV11-2, TRBJ2-3)
CASSLGGASRGAPNTQYF

SEQ ID NO: 329547 - protein, 11 aa, Homo sapiens
  CDR3 for alpha chain variable domain of TCR clone 164774 (TRAV3, TRAJ21)
CAGGNFNKFYF

SEQ ID NO: 329548 - protein, 16 aa, Homo sapiens
  CDR3 for beta chain variable domain of TCR clone 164774 (TRBV19, TRBJ2-1)
CASSKAGPSSYNEQFF

SEQ ID NO: 329549 - protein, 14 aa, Homo sapiens
  CDR3 for alpha chain variable domain of TCR clone 164775 (TRAV2, TRAJ9)
CAVEDRSGGFKTIF

SEQ ID NO: 329550 - protein, 17 aa, Homo sapiens
  CDR3 for beta chain variable domain of TCR clone 164775 (TRBV13, TRBJ2-3)
CASSLCRVAGGRNTQYF

SEQ ID NO: 329551 - protein, 14 aa, Homo sapiens
  CDR3 for alpha chain variable domain of TCR clone 164776 (TRAV12-2, TRAJ13)
CAVNQTGGYQKVTF

SEQ ID NO: 329552 - protein, 15 aa, Homo sapiens
  CDR3 for beta chain variable domain of TCR clone 164776 (TRBV27, TRBJ2-1)
CASSNGGGSSNEQFF

SEQ ID NO: 329553 - protein, 14 aa, Homo sapiens
  CDR3 for alpha chain variable domain of TCR clone 164777 (TRAV12-2, TRAJ17)
CAVNIKAAGNKLTF

SEQ ID NO: 329554 - protein, 14 aa, Homo sapiens
  CDR3 for beta chain variable domain of TCR clone 164777 (TRBV19, TRBJ2-7)
CASNFRDTFTGMYF

SEQ ID NO: 329555 - protein, 12 aa, Homo sapiens
  CDR3 for alpha chain variable domain of TCR clone 164778 (TRAV20, TRAJ39)
CAVGNAGNMPAF

SEQ ID NO: 329556 - protein, 16 aa, Homo sapiens
  CDR3 for beta chain variable domain of TCR clone 164778 (TRBV15, TRBJ1-2)
CATSRGPRTGGGGYTF

SEQ ID NO: 329557 - protein, 11 aa, Homo sapiens
  CDR3 for alpha chain variable domain of TCR clone 164779 (TRAV23/DV6, TRAJ58)
CAARLLRGETS

SEQ ID NO: 329558 - protein, 16 aa, Homo sapiens
  CDR3 for beta chain variable domain of TCR clone 164779 (TRBV19, TRBJ2-3)
CASSPGAASRTDTQYF

SEQ ID NO: 329559 - protein, 13 aa, Homo sapiens
  CDR3 for alpha chain variable domain of TCR clone 164780 (TRAV21, TRAJ32)
CAVSGGATNKLIF

SEQ ID NO: 329560 - protein, 14 aa, Homo sapiens
  CDR3 for beta chain variable domain of TCR clone 164780 (TRBV23-1, TRBJ2-1)
RQQSMAPAHNEQFF

SEQ ID NO: 329561 - protein, 15 aa, Homo sapiens
  CDR3 for alpha chain variable domain of TCR clone 164781 (TRAV40, TRAJ45)
CLLGDLGGGADGLTF

SEQ ID NO: 329562 - protein, 13 aa, Homo sapiens
  CDR3 for beta chain variable domain of TCR clone 164781 (TRBV4-1, TRBJ1-1)
CASSQLGTGEAFF

SEQ ID NO: 329563 - protein, 15 aa, Homo sapiens
  CDR3 for alpha chain variable domain of TCR clone 164782 (TRAV8-2, TRAJ13)
CVVRDLSGGYQKVTF

SEQ ID NO: 329564 - protein, 16 aa, Homo sapiens
  CDR3 for beta chain variable domain of TCR clone 164782 (TRBV27, TRBJ2-2)
CASSFRGLVRTGELFF

SEQ ID NO: 329565 - protein, 13 aa, Homo sapiens
  CDR3 for alpha chain variable domain of TCR clone 164783 (TRAV17, TRAJ9)
CATDYTGGFKNIF

SEQ ID NO: 329566 - protein, 13 aa, Homo sapiens
  CDR3 for beta chain variable domain of TCR clone 164783 (TRBV7-9, TRBJ1-2)
CASSLKQNYGYTF

SEQ ID NO: 329567 - protein, 11 aa, Homo sapiens
  CDR3 for alpha chain variable domain of TCR clone 164784 (TRAV12-3, TRAJ43)
CSIIFSNDMLF

SEQ ID NO: 329568 - protein, 13 aa, Homo sapiens
  CDR3 for beta chain variable domain of TCR clone 164784 (TRBV20-1, TRBJ1-1)
CSAPLGGGTEAFF

SEQ ID NO: 329569 - protein, 17 aa, Homo sapiens
  CDR3 for alpha chain variable domain of TCR clone 164785 (TRAV4, TRAJ20)
CTTASWVKGNNDYKLIF

SEQ ID NO: 329570 - protein, 17 aa, Homo sapiens
  CDR3 for beta chain variable domain of TCR clone 164785 (TRBV11-2, TRBJ2-1)
CASSLYPPGVEYNEQFF

SEQ ID NO: 329571 - protein, 14 aa, Homo sapiens
  CDR3 for alpha chain variable domain of TCR clone 164786 (TRAV12-2, TRAJ15)
CAPHTGQAGTALIL

SEQ ID NO: 329572 - protein, 17 aa, Homo sapiens
  CDR3 for beta chain variable domain of TCR clone 164786 (TRBV5-5, TRBJ1-2)
CASRLGSLDGQSEGYTF

SEQ ID NO: 329573 - protein, 14 aa, Homo sapiens
  CDR3 for alpha chain variable domain of TCR clone 164787 (TRAV12-2, TRAJ24)
CAVTPADSWGKLQL

SEQ ID NO: 329574 - protein, 16 aa, Homo sapiens
  CDR3 for beta chain variable domain of TCR clone 164787 (TRBV6-4, TRBJ2-3)
APSEGGRAWGTDTQYF

SEQ ID NO: 329575 - protein, 14 aa, Homo sapiens
  CDR3 for alpha chain variable domain of TCR clone 164788 (TRAV1-2, TRAJ16)
CAVNRFSDGQKLLF

SEQ ID NO: 329576 - protein, 13 aa, Homo sapiens
  CDR3 for beta chain variable domain of TCR clone 164788 (TRBV20-1, TRBJ2-2)
CSALSGGAGQLFF

SEQ ID NO: 329577 - protein, 11 aa, Homo sapiens
  CDR3 for alpha chain variable domain of TCR clone 164789 (TRAV4, TRAJ31)
CLVGDNARLMF

SEQ ID NO: 329578 - protein, 17 aa, Homo sapiens
  CDR3 for beta chain variable domain of TCR clone 164789 (TRBV2, TRBJ1-6)
CASSLRSGGLMTSPLHF

SEQ ID NO: 329579 - protein, 14 aa, Homo sapiens
  CDR3 for alpha chain variable domain of TCR clone 164790 (TRAV12-2, TRAJ4)
CAVLIGGGYNKLIF

SEQ ID NO: 329580 - protein, 19 aa, Homo sapiens
  CDR3 for beta chain variable domain of TCR clone 164790 (TRBV7-2, TRBJ2-3)
CASSFLSRNWGGGTDTQYF

SEQ ID NO: 329581 - protein, 14 aa, Homo sapiens
  CDR3 for alpha chain variable domain of TCR clone 164791 (TRAV16, TRAJ54)
CALSLIQGAQKLVS

SEQ ID NO: 329582 - protein, 13 aa, Homo sapiens
  CDR3 for beta chain variable domain of TCR clone 164791 (TRBV4-2, TRBJ1-1)
CASSQAGNTEAFF

SEQ ID NO: 329583 - protein, 13 aa, Homo sapiens
  CDR3 for alpha chain variable domain of TCR clone 164792 (TRAV8-3, TRAJ54)
CAVSIQGAQKLVF

SEQ ID NO: 329584 - protein, 13 aa, Homo sapiens
  CDR3 for beta chain variable domain of TCR clone 164792 (TRBV6-5, TRBJ2-5)
CASSPQGGETQYF

SEQ ID NO: 329585 - protein, 14 aa, Homo sapiens
  CDR3 for alpha chain variable domain of TCR clone 164793 (TRAV12-3, TRAJ10)
SHLPLTGGGNKLTF

SEQ ID NO: 329586 - protein, 13 aa, Homo sapiens
  CDR3 for beta chain variable domain of TCR clone 164793 (TRBV27, TRBJ2-7)
CDSSLTTGYEQYF

SEQ ID NO: 329587 - protein, 12 aa, Homo sapiens
  CDR3 for alpha chain variable domain of TCR clone 164794 (TRAV13-2, TRAJ8)
CAPWLGFQKLVF

SEQ ID NO: 329588 - protein, 16 aa, Homo sapiens
  CDR3 for beta chain variable domain of TCR clone 164794 (TRBV7-2, TRBJ2-5)
CASSPFPTGGEETQYF

SEQ ID NO: 329589 - protein, 13 aa, Homo sapiens
  CDR3 for alpha chain variable domain of TCR clone 164795 (TRAV38-1, TRAJ34)
CAFMKFNTDKLIF

SEQ ID NO: 329590 - protein, 13 aa, Homo sapiens
  CDR3 for beta chain variable domain of TCR clone 164795 (TRBV6-5, TRBJ1-1)
CASKRTEAGEAFF

SEQ ID NO: 329591 - protein, 11 aa, Homo sapiens
  CDR3 for alpha chain variable domain of TCR clone 164796 (TRAV17, TRAJ36)
CAPTGANNLFF

SEQ ID NO: 329592 - protein, 14 aa, Homo sapiens
  CDR3 for beta chain variable domain of TCR clone 164796 (TRBV7-9, TRBJ2-5)
CASSLDTAQETQYF

SEQ ID NO: 329593 - protein, 13 aa, Homo sapiens
  CDR3 for alpha chain variable domain of TCR clone 164797 (TRAV12-2, TRAJ42)
CAVQRGSQGNLIF

SEQ ID NO: 329594 - protein, 13 aa, Homo sapiens
  CDR3 for beta chain variable domain of TCR clone 164797 (TRBV7-9, TRBJ2-3)
CASSPGSTDTQYF

SEQ ID NO: 329595 - protein, 14 aa, Homo sapiens
  CDR3 for alpha chain variable domain of TCR clone 164798 (TRAV8-3, TRAJ4)
CAVGAAGGYNKLIF

SEQ ID NO: 329596 - protein, 14 aa, Homo sapiens
  CDR3 for beta chain variable domain of TCR clone 164798 (TRBV2, TRBJ2-5)
CQHEGRGPQETQYF

SEQ ID NO: 329597 - protein, 14 aa, Homo sapiens
  CDR3 for alpha chain variable domain of TCR clone 164799 (TRAV23/DV6, TRAJ8)
CAASKNTGFQKLIF

SEQ ID NO: 329598 - protein, 16 aa, Homo sapiens
  CDR3 for beta chain variable domain of TCR clone 164799 (TRBV4-1, TRBJ2-6)
CASSQVGDPGANVLTF

SEQ ID NO: 329599 - protein, 13 aa, Homo sapiens
  CDR3 for alpha chain variable domain of TCR clone 164800 (TRAV21, TRAJ45)
CAVMGGGADGLTF

SEQ ID NO: 329600 - protein, 17 aa, Homo sapiens
  CDR3 for beta chain variable domain of TCR clone 164800 (TRBV24-1, TRBJ2-4)
CATSDAEARGVRNIQYF

SEQ ID NO: 329601 - protein, 13 aa, Homo sapiens
  CDR3 for alpha chain variable domain of TCR clone 164801 (TRAV3, TRAJ8)
CAVRHTGFQKPVF

SEQ ID NO: 329602 - protein, 14 aa, Homo sapiens
  CDR3 for beta chain variable domain of TCR clone 164801 (TRBV7-6, TRBJ2-1)
CASSVAGEINEQFF

SEQ ID NO: 329603 - protein, 14 aa, Homo sapiens
  CDR3 for alpha chain variable domain of TCR clone 164802 (TRAV4, TRAJ17)
CLVGDPLVGNKLTF

SEQ ID NO: 329604 - protein, 20 aa, Homo sapiens
  CDR3 for beta chain variable domain of TCR clone 164802 (TRBV20-1, TRBJ2-1)
WSARPYSVAGGPSYYNEQFF

SEQ ID NO: 329605 - protein, 12 aa, Homo sapiens
  CDR3 for alpha chain variable domain of TCR clone 164803 (TRAV12-3, TRAJ5)
CAVDTGRRALTF

SEQ ID NO: 329606 - protein, 13 aa, Homo sapiens
  CDR3 for beta chain variable domain of TCR clone 164803 (TRBV7-7, TRBJ2-2)
CASSLTSAGELFF

SEQ ID NO: 329607 - protein, 15 aa, Homo sapiens
  CDR3 for alpha chain variable domain of TCR clone 164804 (TRAV21, TRAJ24)
CAAWSSTDSWGKLQF

SEQ ID NO: 329608 - protein, 11 aa, Homo sapiens
  CDR3 for beta chain variable domain of TCR clone 164804 (TRBV11-2, TRBJ2-2)
CASSLPGELFF

SEQ ID NO: 329609 - protein, 13 aa, Homo sapiens
  CDR3 for alpha chain variable domain of TCR clone 164805 (TRAV3, TRAJ43)
CAVRDTRGGDMGF

SEQ ID NO: 329610 - protein, 15 aa, Homo sapiens
  CDR3 for beta chain variable domain of TCR clone 164805 (TRBV6-5, TRBJ1-5)
CASSYSRRSNQPQHF

SEQ ID NO: 329611 - protein, 12 aa, Homo sapiens
  CDR3 for alpha chain variable domain of TCR clone 164806 (TRAV8-3, TRAJ40)
CAVTSGTYKYIF

SEQ ID NO: 329612 - protein, 15 aa, Homo sapiens
  CDR3 for beta chain variable domain of TCR clone 164806 (TRBV11-3, TRBJ2-3)
CASQKDGREGDTQYF

SEQ ID NO: 329613 - protein, 14 aa, Homo sapiens
  CDR3 for alpha chain variable domain of TCR clone 164807 (TRAV17, TRAJ6)
CATDASGGSYIPTF

SEQ ID NO: 329614 - protein, 15 aa, Homo sapiens
  CDR3 for beta chain variable domain of TCR clone 164807 (TRBV7-9, TRBJ1-6)
CASSSPGRGNSPLHF

SEQ ID NO: 329615 - protein, 12 aa, Homo sapiens
  CDR3 for alpha chain variable domain of TCR clone 164808 (TRAV30, TRAJ43)
CGTEERGNDMRF

SEQ ID NO: 329616 - protein, 15 aa, Homo sapiens
  CDR3 for beta chain variable domain of TCR clone 164808 (TRBV11-2, TRBJ2-1)
CASSLGTSGLNEQFF

SEQ ID NO: 329617 - protein, 10 aa, Homo sapiens
  CDR3 for alpha chain variable domain of TCR clone 164809 (TRAV12-2, TRAJ52)
RSTSYGKLTF

SEQ ID NO: 329618 - protein, 10 aa, Homo sapiens
  CDR3 for beta chain variable domain of TCR clone 164809 (TRBV11-2, TRBJ2-2)
CQQLTRGLFF

SEQ ID NO: 329619 - protein, 13 aa, Homo sapiens
  CDR3 for alpha chain variable domain of TCR clone 164810 (TRAV2, TRAJ24)
CAVGSTDRGKLQF

SEQ ID NO: 329620 - protein, 15 aa, Homo sapiens
  CDR3 for beta chain variable domain of TCR clone 164810 (TRBV5-7, TRBJ2-3)
CASSPWDRATDTQYV

SEQ ID NO: 329621 - protein, 16 aa, Homo sapiens
  CDR3 for alpha chain variable domain of TCR clone 164811 (TRAV12-2, TRAJ40)
CAVKIPSGTYKYILEQ

SEQ ID NO: 329622 - protein, 13 aa, Homo sapiens
  CDR3 for beta chain variable domain of TCR clone 164811 (TRBV11-2, TRBJ2-5)
CASSRGPSETQYF

SEQ ID NO: 329623 - protein, 14 aa, Homo sapiens
  CDR3 for alpha chain variable domain of TCR clone 164812 (TRAV1-2, TRAJ16)
CAVNRFSDGQKLLF

SEQ ID NO: 329624 - protein, 16 aa, Homo sapiens
  CDR3 for beta chain variable domain of TCR clone 164812 (TRBV28, TRBJ2-3)
CASSRSSGQGSDTQYF

SEQ ID NO: 329625 - protein, 12 aa, Homo sapiens
  CDR3 for alpha chain variable domain of TCR clone 164813 (TRAV12-3, TRAJ17)
CAMTLTGNKPTF

SEQ ID NO: 329626 - protein, 12 aa, Homo sapiens
  CDR3 for beta chain variable domain of TCR clone 164813 (TRBV19, TRBJ1-5)
CASSIAQQPQHF

SEQ ID NO: 329627 - protein, 15 aa, Homo sapiens
  CDR3 for alpha chain variable domain of TCR clone 164814 (TRAV17, TRAJ54)
CATEKLGQGAQKLVF

SEQ ID NO: 329628 - protein, 14 aa, Homo sapiens
  CDR3 for beta chain variable domain of TCR clone 164814 (TRBV7-3, TRBJ1-1)
CQQLRGQMNTEAVF

SEQ ID NO: 329629 - protein, 14 aa, Homo sapiens
  CDR3 for alpha chain variable domain of TCR clone 164815 (TRAV1-2, TRAJ16)
CAVNRFSDGQKLLF

SEQ ID NO: 329630 - protein, 14 aa, Homo sapiens
  CDR3 for beta chain variable domain of TCR clone 164815 (TRBV15, TRBJ2-3)
CAKRSGTSTDTQYF

SEQ ID NO: 329631 - protein, 14 aa, Homo sapiens
  CDR3 for alpha chain variable domain of TCR clone 164816 (TRAV12-1, TRAJ17)
CVVNYKAAGNKPTF

SEQ ID NO: 329632 - protein, 14 aa, Homo sapiens
  CDR3 for beta chain variable domain of TCR clone 164816 (TRBV4-2, TRBJ2-1)
CASGLDRAYNEQFF

SEQ ID NO: 329633 - protein, 14 aa, Homo sapiens
  CDR3 for alpha chain variable domain of TCR clone 164817 (TRAV4, TRAJ20)
CLVGRRSNDYKLSF

SEQ ID NO: 329634 - protein, 13 aa, Homo sapiens
  CDR3 for beta chain variable domain of TCR clone 164817 (TRBV2, TRBJ2-5)
CASSGDPQGRGHK

SEQ ID NO: 329635 - protein, 12 aa, Homo sapiens
  CDR3 for alpha chain variable domain of TCR clone 164818 (TRAV35, TRAJ31)
CAAASNNARLMF

SEQ ID NO: 329636 - protein, 14 aa, Homo sapiens
  CDR3 for beta chain variable domain of TCR clone 164818 (TRBV2, TRBJ2-2)
CASRLFGGNEELFF

SEQ ID NO: 329637 - protein, 15 aa, Homo sapiens
  CDR3 for alpha chain variable domain of TCR clone 164819 (TRAV17, TRAJ57)
CATGPSQGGSEKLVF

SEQ ID NO: 329638 - protein, 15 aa, Homo sapiens
  CDR3 for beta chain variable domain of TCR clone 164819 (TRBV27, TRBJ1-1)
CASSPYADPYTEAFF

SEQ ID NO: 329639 - protein, 17 aa, Homo sapiens
  CDR3 for alpha chain variable domain of TCR clone 164820 (TRAV3, TRAJ38)
CAVRDCLNAGNNRRLIW

SEQ ID NO: 329640 - protein, 13 aa, Homo sapiens
  CDR3 for beta chain variable domain of TCR clone 164820 (TRBV7-3, TRBJ1-1)
CASSQDWGAEAFF

SEQ ID NO: 329641 - protein, 14 aa, Homo sapiens
  CDR3 for alpha chain variable domain of TCR clone 164821 (TRAV20, TRAJ40)
CCAGLDSGTYKYIF

SEQ ID NO: 329642 - protein, 15 aa, Homo sapiens
  CDR3 for beta chain variable domain of TCR clone 164821 (TRBV29-1, TRBJ2-7)
CSVEVQAYETYEQYF

SEQ ID NO: 329643 - protein, 14 aa, Homo sapiens
  CDR3 for alpha chain variable domain of TCR clone 164822 (TRAV12-2, TRAJ40)
CAVKIPSGTYKYIF

SEQ ID NO: 329644 - protein, 20 aa, Homo sapiens
  CDR3 for beta chain variable domain of TCR clone 164822 (TRBV28, TRBJ2-1)
CVSTPIGRSPGLAGGNEQFF

SEQ ID NO: 329645 - protein, 14 aa, Homo sapiens
  CDR3 for alpha chain variable domain of TCR clone 164823 (TRAV12-1, TRAJ10)
CVVNAAGGGNKLTF

SEQ ID NO: 329646 - protein, 14 aa, Homo sapiens
  CDR3 for beta chain variable domain of TCR clone 164823 (TRBV12-4, TRBJ1-1)
CASSLGTGGTEAFF

SEQ ID NO: 329647 - protein, 14 aa, Homo sapiens
  CDR3 for alpha chain variable domain of TCR clone 164824 (TRAV8-3, TRAJ39)
CAVGANNAGNMLTF

SEQ ID NO: 329648 - protein, 16 aa, Homo sapiens
  CDR3 for beta chain variable domain of TCR clone 164824 (TRBV12-5, TRBJ2-5)
CASCPRASGNQETQYF

SEQ ID NO: 329649 - protein, 12 aa, Homo sapiens
  CDR3 for alpha chain variable domain of TCR clone 164825 (TRAV17, TRAJ57)
CATDGGSEKLSF

SEQ ID NO: 329650 - protein, 13 aa, Homo sapiens
  CDR3 for beta chain variable domain of TCR clone 164825 (TRBV7-9, TRBJ2-7)
CASSFAGAYEQYF

SEQ ID NO: 329651 - protein, 15 aa, Homo sapiens
  CDR3 for alpha chain variable domain of TCR clone 164826 (TRAV8-3, TRAJ27)
CAVGPSKTNAGKSTF

SEQ ID NO: 329652 - protein, 16 aa, Homo sapiens
  CDR3 for beta chain variable domain of TCR clone 164826 (TRBV11-2, TRBJ2-7)
CASSLAPTGVNYEQYF

SEQ ID NO: 329653 - protein, 13 aa, Homo sapiens
  CDR3 for alpha chain variable domain of TCR clone 164827 (TRAV20, TRAJ29)
CAVQAVGNKPLVF

SEQ ID NO: 329654 - protein, 15 aa, Homo sapiens
  CDR3 for beta chain variable domain of TCR clone 164827 (TRBV10-2, TRBJ2-5)
CASRGSGGPQETQYF

SEQ ID NO: 329655 - protein, 17 aa, Homo sapiens
  CDR3 for alpha chain variable domain of TCR clone 164828 (TRAV3, TRAJ6)
CAVRDGPRAGGRYIPTF

SEQ ID NO: 329656 - protein, 13 aa, Homo sapiens
  CDR3 for beta chain variable domain of TCR clone 164828 (TRBV15, TRBJ2-7)
CATSTTGHYEQYF

SEQ ID NO: 329657 - protein, 13 aa, Homo sapiens
  CDR3 for alpha chain variable domain of TCR clone 164829 (TRAV3, TRAJ21)
CAVIEPDFNKFYF

SEQ ID NO: 329658 - protein, 16 aa, Homo sapiens
  CDR3 for beta chain variable domain of TCR clone 164829 (TRBV27, TRBJ2-2)
CASSFRGLVRTGELFF

SEQ ID NO: 329659 - protein, 10 aa, Homo sapiens
  CDR3 for alpha chain variable domain of TCR clone 164830 (TRAV13-1, TRAJ8)
CAAPFQKLVF

SEQ ID NO: 329660 - protein, 20 aa, Homo sapiens
  CDR3 for beta chain variable domain of TCR clone 164830 (TRBV3-1, TRBJ2-6)
CASSPRPGLEGGAGDNVLTF

SEQ ID NO: 329661 - protein, 14 aa, Homo sapiens
  CDR3 for alpha chain variable domain of TCR clone 164831 (TRAV1-2, TRAJ8)
CAVREDTGFQKLVF

SEQ ID NO: 329662 - protein, 14 aa, Homo sapiens
  CDR3 for beta chain variable domain of TCR clone 164831 (TRBV7-2, TRBJ2-7)
CASSLYPGGYEQYF

SEQ ID NO: 329663 - protein, 14 aa, Homo sapiens
  CDR3 for alpha chain variable domain of TCR clone 164832 (TRAV12-3, TRAJ17)
CVVNYKAAGNKLTF

SEQ ID NO: 329664 - protein, 16 aa, Homo sapiens
  CDR3 for beta chain variable domain of TCR clone 164832 (TRBV12-4, TRBJ1-5)
CASSRPVGGSNQPQHF

SEQ ID NO: 329665 - protein, 14 aa, Homo sapiens
  CDR3 for alpha chain variable domain of TCR clone 164833 (TRAV12-3, TRAJ58)
CAMSTETSGSRLTF

SEQ ID NO: 329666 - protein, 15 aa, Homo sapiens
  CDR3 for beta chain variable domain of TCR clone 164833 (TRBV4-1, TRBJ1-4)
CASSDTVGTNEKLFF

SEQ ID NO: 329667 - protein, 13 aa, Homo sapiens
  CDR3 for alpha chain variable domain of TCR clone 164834 (TRAV1-2, TRAJ9)
CAALNTGGFKTIF

SEQ ID NO: 329668 - protein, 14 aa, Homo sapiens
  CDR3 for beta chain variable domain of TCR clone 164834 (TRBV13, TRBJ2-5)
CASSLERVEETQYF

SEQ ID NO: 329669 - protein, 10 aa, Homo sapiens
  CDR3 for alpha chain variable domain of TCR clone 164835 (TRAV23/DV6, TRAJ57)
CAASPTLFQG

SEQ ID NO: 329670 - protein, 14 aa, Homo sapiens
  CDR3 for beta chain variable domain of TCR clone 164835 (TRBV25-1, TRBJ1-1)
CASTHLGGNTEAFF

SEQ ID NO: 329671 - protein, 15 aa, Homo sapiens
  CDR3 for alpha chain variable domain of TCR clone 164836 (TRAV12-3, TRAJ6)
CAMSSTTGGSYITTF

SEQ ID NO: 329672 - protein, 16 aa, Homo sapiens
  CDR3 for beta chain variable domain of TCR clone 164836 (TRBV20-1, TRBJ1-2)
CSASMGQGVANYGYTF

SEQ ID NO: 329673 - protein, 16 aa, Homo sapiens
  CDR3 for alpha chain variable domain of TCR clone 164837 (TRAV27, TRAJ53)
CAAPAGSGGSNYKLTF

SEQ ID NO: 329674 - protein, 12 aa, Homo sapiens
  CDR3 for beta chain variable domain of TCR clone 164837 (TRBV6-1, TRBJ2-7)
CASSEPLYEQYF

SEQ ID NO: 329675 - protein, 12 aa, Homo sapiens
  CDR3 for alpha chain variable domain of TCR clone 164838 (TRAV13-1, TRAJ48)
CAANFGNKKLTF

SEQ ID NO: 329676 - protein, 14 aa, Homo sapiens
  CDR3 for beta chain variable domain of TCR clone 164838 (TRBV25-1, TRBJ1-1)
CASTHLGGNTEALF

SEQ ID NO: 329677 - protein, 11 aa, Homo sapiens
  CDR3 for alpha chain variable domain of TCR clone 164839 (TRAV13-1, TRAJ43)
CAAHNNNDMRF

SEQ ID NO: 329678 - protein, 14 aa, Homo sapiens
  CDR3 for beta chain variable domain of TCR clone 164839 (TRBV2, TRBJ1-5)
CASSEAAGGQTQHF

SEQ ID NO: 329679 - protein, 15 aa, Homo sapiens
  CDR3 for alpha chain variable domain of TCR clone 164840 (TRAV38-1, TRAJ57)
CAFMDSQGGSEKLRF

SEQ ID NO: 329680 - protein, 12 aa, Homo sapiens
  CDR3 for beta chain variable domain of TCR clone 164840 (TRBV7-8, TRBJ2-7)
CASSLGDREQYF

SEQ ID NO: 329681 - protein, 14 aa, Homo sapiens
  CDR3 for alpha chain variable domain of TCR clone 164841 (TRAV26-1, TRAJ49)
CIVRPSHTGNQFYF

SEQ ID NO: 329682 - protein, 15 aa, Homo sapiens
  CDR3 for beta chain variable domain of TCR clone 164841 (TRBV19, TRBJ1-1)
CASMGFRDVNTEAFF

SEQ ID NO: 329683 - protein, 16 aa, Homo sapiens
  CDR3 for alpha chain variable domain of TCR clone 164842 (TRAV8-6, TRAJ22)
CAVSPISPDSARQLTF

SEQ ID NO: 329684 - protein, 14 aa, Homo sapiens
  CDR3 for beta chain variable domain of TCR clone 164842 (TRBV2, TRBJ2-1)
CASSARAAYNEQFF

SEQ ID NO: 329685 - protein, 16 aa, Homo sapiens
  CDR3 for alpha chain variable domain of TCR clone 164843 (TRAV8-3, TRAJ8)
CAVPRDWNTGFQKLVF

SEQ ID NO: 329686 - protein, 15 aa, Homo sapiens
  CDR3 for beta chain variable domain of TCR clone 164843 (TRBV6-1, TRBJ2-6)
CASSSRPSGANVLTF

SEQ ID NO: 329687 - protein, 11 aa, Homo sapiens
  CDR3 for alpha chain variable domain of TCR clone 164844 (TRAV12-1, TRAJ43)
CVEYDNNDMRF

SEQ ID NO: 329688 - protein, 19 aa, Homo sapiens
  CDR3 for beta chain variable domain of TCR clone 164844 (TRBV25-1, TRBJ2-2)
CAILVYRVDRGRKTGELFF

SEQ ID NO: 329689 - protein, 11 aa, Homo sapiens
  CDR3 for alpha chain variable domain of TCR clone 164845 (TRAV2, TRAJ33)
CAVECNYQLIW

SEQ ID NO: 329690 - protein, 17 aa, Homo sapiens
  CDR3 for beta chain variable domain of TCR clone 164845 (TRBV11-2, TRBJ2-1)
CASSLYPPGVEYNEQFF

SEQ ID NO: 329691 - protein, 12 aa, Homo sapiens
  CDR3 for alpha chain variable domain of TCR clone 164846 (TRAV25, TRAJ11)
CAGASGYSTLTF

SEQ ID NO: 329692 - protein, 15 aa, Homo sapiens
  CDR3 for beta chain variable domain of TCR clone 164846 (TRBV20-1, TRBJ2-1)
CSARDRVSGMDEQFF

SEQ ID NO: 329693 - protein, 14 aa, Homo sapiens
  CDR3 for alpha chain variable domain of TCR clone 164847 (TRAV3, TRAJ7)
CAVSEGEREQQTRF

SEQ ID NO: 329694 - protein, 12 aa, Homo sapiens
  CDR3 for beta chain variable domain of TCR clone 164847 (TRBV7-8, TRBJ2-7)
CASSLGDREQYF

SEQ ID NO: 329695 - protein, 13 aa, Homo sapiens
  CDR3 for alpha chain variable domain of TCR clone 164848 (TRAV13-1, TRAJ33)
CAAIRAGNYQLIW

SEQ ID NO: 329696 - protein, 12 aa, Homo sapiens
  CDR3 for beta chain variable domain of TCR clone 164848 (TRBV11-2, TRBJ1-2)
CASSREGDGYTF

SEQ ID NO: 329697 - protein, 14 aa, Homo sapiens
  CDR3 for alpha chain variable domain of TCR clone 164849 (TRAV8-6, TRAJ12)
CAVRAADSSYKLIF

SEQ ID NO: 329698 - protein, 15 aa, Homo sapiens
  CDR3 for beta chain variable domain of TCR clone 164849 (TRBV5-1, TRBJ2-5)
CASSLGLAEQETRYF

SEQ ID NO: 329699 - protein, 15 aa, Homo sapiens
  CDR3 for alpha chain variable domain of TCR clone 164850 (TRAV8-1, TRAJ42)
CAVRSYGGSQGNLIF

SEQ ID NO: 329700 - protein, 14 aa, Homo sapiens
  CDR3 for beta chain variable domain of TCR clone 164850 (TRBV19, TRBJ1-5)
CASRAPDSFLSQHF

SEQ ID NO: 329701 - protein, 20 aa, Homo sapiens
  CDR3 for alpha chain variable domain of TCR clone 164851 (TRAV21, TRAJ4)
AASQPGDSATLAGGYNKLIF

SEQ ID NO: 329702 - protein, 19 aa, Homo sapiens
  CDR3 for beta chain variable domain of TCR clone 164851 (TRBV18, TRBJ1-3)
CSSSPLSRTGMSSGNTIYF

SEQ ID NO: 329703 - protein, 18 aa, Homo sapiens
  CDR3 for alpha chain variable domain of TCR clone 164852 (TRAV35, TRAJ52)
CAGLLRYPGGTSYGKLTF

SEQ ID NO: 329704 - protein, 17 aa, Homo sapiens
  CDR3 for beta chain variable domain of TCR clone 164852 (TRBV11-2, TRBJ2-1)
CASSLYPPGVEYNEQFF

SEQ ID NO: 329705 - protein, 20 aa, Homo sapiens
  CDR3 for alpha chain variable domain of TCR clone 164853 (TRAV8-3, TRAJ44)
LSTSVLWVRLYTGTASKLTF

SEQ ID NO: 329706 - protein, 12 aa, Homo sapiens
  CDR3 for beta chain variable domain of TCR clone 164853 (TRBV11-2, TRBJ2-2)
CASSLGGGELFF

SEQ ID NO: 329707 - protein, 12 aa, Homo sapiens
  CDR3 for alpha chain variable domain of TCR clone 164854 (TRAV36/DV7, TRAJ40)
CAVGTGTYKYIF

SEQ ID NO: 329708 - protein, 16 aa, Homo sapiens
  CDR3 for beta chain variable domain of TCR clone 164854 (TRBV29-1, TRBJ2-7)
CSVEDAEDGTAYEQYF

SEQ ID NO: 329709 - protein, 13 aa, Homo sapiens
  CDR3 for alpha chain variable domain of TCR clone 164855 (TRAV8-4, TRAJ48)
CAVSLFGNEKLTF

SEQ ID NO: 329710 - protein, 15 aa, Homo sapiens
  CDR3 for beta chain variable domain of TCR clone 164855 (TRBV20-1, TRBJ2-7)
CSSRKGLAESCEQYF

SEQ ID NO: 329711 - protein, 14 aa, Homo sapiens
  CDR3 for alpha chain variable domain of TCR clone 164856 (TRAV2, TRAJ3)
CAVRPYSSASKLIF

SEQ ID NO: 329712 - protein, 17 aa, Homo sapiens
  CDR3 for beta chain variable domain of TCR clone 164856 (TRBV7-6, TRBJ2-5)
CASSSPQAGDPSETQYF

SEQ ID NO: 329713 - protein, 14 aa, Homo sapiens
  CDR3 for alpha chain variable domain of TCR clone 164857 (TRAV17, TRAJ15)
CATDRGQAGTALIF

SEQ ID NO: 329714 - protein, 16 aa, Homo sapiens
  CDR3 for beta chain variable domain of TCR clone 164857 (TRBV6-1, TRBJ1-3)
CASVQGGVETPYILER

SEQ ID NO: 329715 - protein, 18 aa, Homo sapiens
  CDR3 for alpha chain variable domain of TCR clone 164858 (TRAV26-2, TRAJ33)
CCVLLHPEEPASNYQLIW

SEQ ID NO: 329716 - protein, 14 aa, Homo sapiens
  CDR3 for beta chain variable domain of TCR clone 164858 (TRBV6-3, TRBJ2-5)
CASLWAGGTETQYF

SEQ ID NO: 329717 - protein, 11 aa, Homo sapiens
  CDR3 for alpha chain variable domain of TCR clone 164859 (TRAV2, TRAJ13)
CASGGYQTVTF

SEQ ID NO: 329718 - protein, 11 aa, Homo sapiens
  CDR3 for beta chain variable domain of TCR clone 164859 (TRBV29-1, TRBJ2-5)
CSEDRTGTQYF

SEQ ID NO: 329719 - protein, 14 aa, Homo sapiens
  CDR3 for alpha chain variable domain of TCR clone 164860 (TRAV8-2, TRAJ37)
CAVSISGNTGKLIF

SEQ ID NO: 329720 - protein, 16 aa, Homo sapiens
  CDR3 for beta chain variable domain of TCR clone 164860 (TRBV5-1, TRBJ1-1)
CASSSGGNSLNTEAFF

SEQ ID NO: 329721 - protein, 13 aa, Homo sapiens
  CDR3 for alpha chain variable domain of TCR clone 164861 (TRAV9-2, TRAJ49)
CALRPNTGNQFYF

SEQ ID NO: 329722 - protein, 15 aa, Homo sapiens
  CDR3 for beta chain variable domain of TCR clone 164861 (TRBV5-1, TRBJ2-1)
GASSPPRAPYNEQFF

SEQ ID NO: 329723 - protein, 15 aa, Homo sapiens
  CDR3 for alpha chain variable domain of TCR clone 164862 (TRAV4, TRAJ39)
CLVVPNNNAGNMLTF

SEQ ID NO: 329724 - protein, 14 aa, Homo sapiens
  CDR3 for beta chain variable domain of TCR clone 164862 (TRBV19, TRBJ2-1)
CASPTFVLSGEQFF

SEQ ID NO: 329725 - protein, 16 aa, Homo sapiens
  CDR3 for alpha chain variable domain of TCR clone 164863 (TRAV21, TRAJ37)
CAVRTAGPSNTGKLIF

SEQ ID NO: 329726 - protein, 13 aa, Homo sapiens
  CDR3 for beta chain variable domain of TCR clone 164863 (TRBV7-9, TRBJ2-5)
CASLPSGREAQYF

SEQ ID NO: 329727 - protein, 12 aa, Homo sapiens
  CDR3 for alpha chain variable domain of TCR clone 164864 (TRAV12-3, TRAJ34)
CAMGYNTDKLIF

SEQ ID NO: 329728 - protein, 15 aa, Homo sapiens
  CDR3 for beta chain variable domain of TCR clone 164864 (TRBV28, TRBJ2-1)
CASSIIAGGRSEQFL

SEQ ID NO: 329729 - protein, 12 aa, Homo sapiens
  CDR3 for alpha chain variable domain of TCR clone 164865 (TRAV8-3, TRAJ41)
CAVALSGYALNF

SEQ ID NO: 329730 - protein, 16 aa, Homo sapiens
  CDR3 for beta chain variable domain of TCR clone 164865 (TRBV27, TRBJ2-5)
CASSSERRDSAYEQYF

SEQ ID NO: 329731 - protein, 14 aa, Homo sapiens
  CDR3 for alpha chain variable domain of TCR clone 164866 (TRAV12-1, TRAJ17)
CVVNYKAAGNKLTF

SEQ ID NO: 329732 - protein, 17 aa, Homo sapiens
  CDR3 for beta chain variable domain of TCR clone 164866 (TRBV20-1, TRBJ2-1)
CSARDPIAGAWDNEQFF

SEQ ID NO: 329733 - protein, 14 aa, Homo sapiens
  CDR3 for alpha chain variable domain of TCR clone 164867 (TRAV2, TRAJ9)
CAVVDRSGGFKTIF

SEQ ID NO: 329734 - protein, 17 aa, Homo sapiens
  CDR3 for beta chain variable domain of TCR clone 164867 (TRBV4-2, TRBJ1-1)
CASTQFGGGSGNTEAFF

SEQ ID NO: 329735 - protein, 12 aa, Homo sapiens
  CDR3 for alpha chain variable domain of TCR clone 164868 (TRAV1-1, TRAJ8)
CAGGTGFQKLVF

SEQ ID NO: 329736 - protein, 15 aa, Homo sapiens
  CDR3 for beta chain variable domain of TCR clone 164868 (TRBV4-1, TRBJ2-1)
CASSQDPGNYNEQFF

SEQ ID NO: 329737 - protein, 16 aa, Homo sapiens
  CDR3 for alpha chain variable domain of TCR clone 164869 (TRAV30, TRAJ44)
CGTEDKRTGTASKLTF

SEQ ID NO: 329738 - protein, 15 aa, Homo sapiens
  CDR3 for beta chain variable domain of TCR clone 164869 (TRBV7-3, TRBJ2-1)
CASSPTGGGEVEQFF

SEQ ID NO: 329739 - protein, 11 aa, Homo sapiens
  CDR3 for alpha chain variable domain of TCR clone 164870 (TRAV12-1, TRAJ21)
CVVNNFNKFYF

SEQ ID NO: 329740 - protein, 11 aa, Homo sapiens
  CDR3 for beta chain variable domain of TCR clone 164870 (TRBV10-3, TRBJ2-7)
CAIREGLEQYF

SEQ ID NO: 329741 - protein, 13 aa, Homo sapiens
  CDR3 for alpha chain variable domain of TCR clone 164871 (TRAV2, TRAJ40)
CAVVTSGTYKYIF

SEQ ID NO: 329742 - protein, 12 aa, Homo sapiens
  CDR3 for beta chain variable domain of TCR clone 164871 (TRBV27, TRBJ2-5)
CASSLKGETQYF

SEQ ID NO: 329743 - protein, 13 aa, Homo sapiens
  CDR3 for alpha chain variable domain of TCR clone 164872 (TRAV12-2, TRAJ20)
CAVYPSNDYKLSF

SEQ ID NO: 329744 - protein, 14 aa, Homo sapiens
  CDR3 for beta chain variable domain of TCR clone 164872 (TRBV19, TRBJ1-5)
CASRAPDSFLSQHF

SEQ ID NO: 329745 - protein, 14 aa, Homo sapiens
  CDR3 for alpha chain variable domain of TCR clone 164873 (TRAV21, TRAJ35)
CAVMPIGFGNVLHC

SEQ ID NO: 329746 - protein, 15 aa, Homo sapiens
  CDR3 for beta chain variable domain of TCR clone 164873 (TRBV7-3, TRBJ2-1)
CASSPTGGGEVEQFF

SEQ ID NO: 329747 - protein, 12 aa, Homo sapiens
  CDR3 for alpha chain variable domain of TCR clone 164874 (TRAV13-1, TRAJ21)
CAAKEGFNKFYF

SEQ ID NO: 329748 - protein, 18 aa, Homo sapiens
  CDR3 for beta chain variable domain of TCR clone 164874 (TRBV5-1, TRBJ2-5)
CASSLLGETSGIGETQYF

SEQ ID NO: 329749 - protein, 14 aa, Homo sapiens
  CDR3 for alpha chain variable domain of TCR clone 164875 (TRAV12-2, TRAJ13)
CAVKKTGGYQKVTF

SEQ ID NO: 329750 - protein, 15 aa, Homo sapiens
  CDR3 for beta chain variable domain of TCR clone 164875 (TRBV4-3, TRBJ1-2)
CASSRGQGRNYGYTF

SEQ ID NO: 329751 - protein, 12 aa, Homo sapiens
  CDR3 for alpha chain variable domain of TCR clone 164876 (TRAV12-3, TRAJ17)
CAMTLTGNKITF

SEQ ID NO: 329752 - protein, 15 aa, Homo sapiens
  CDR3 for beta chain variable domain of TCR clone 164876 (TRBV20-1, TRBJ2-7)
CSARERVSGMDEQYF

SEQ ID NO: 329753 - protein, 16 aa, Homo sapiens
  CDR3 for alpha chain variable domain of TCR clone 164877 (TRAV3, TRAJ37)
CAVRGKGPGTTGKLIF

SEQ ID NO: 329754 - protein, 15 aa, Homo sapiens
  CDR3 for beta chain variable domain of TCR clone 164877 (TRBV20-1, TRBJ2-1)
CSARGGTRYYNEQFF

SEQ ID NO: 329755 - protein, 15 aa, Homo sapiens
  CDR3 for alpha chain variable domain of TCR clone 164878 (TRAV17, TRAJ56)
CATDANTGANSKLTF

SEQ ID NO: 329756 - protein, 14 aa, Homo sapiens
  CDR3 for beta chain variable domain of TCR clone 164878 (TRBV19, TRBJ1-5)
CASSFGTGGQPQHF

SEQ ID NO: 329757 - protein, 16 aa, Homo sapiens
  CDR3 for alpha chain variable domain of TCR clone 164879 (TRAV30, TRAJ24)
CGTEIVDADSGGKFQF

SEQ ID NO: 329758 - protein, 16 aa, Homo sapiens
  CDR3 for beta chain variable domain of TCR clone 164879 (TRBV12-4, TRBJ1-5)
CASSRPVGGSNQPQHF

SEQ ID NO: 329759 - protein, 17 aa, Homo sapiens
  CDR3 for alpha chain variable domain of TCR clone 164880 (TRAV3, TRAJ6)
CAVRDGPRAGGSYIPTF

SEQ ID NO: 329760 - protein, 13 aa, Homo sapiens
  CDR3 for beta chain variable domain of TCR clone 164880 (TRBV7-2, TRBJ1-1)
CASNLKGAKVAFF

SEQ ID NO: 329761 - protein, 12 aa, Homo sapiens
  CDR3 for alpha chain variable domain of TCR clone 164881 (TRAV16, TRAJ10)
CSRTGGGNKLTF

SEQ ID NO: 329762 - protein, 15 aa, Homo sapiens
  CDR3 for beta chain variable domain of TCR clone 164881 (TRBV6-3, TRBJ2-7)
CASSSPGTVFYEQYY

SEQ ID NO: 329763 - protein, 13 aa, Homo sapiens
  CDR3 for alpha chain variable domain of TCR clone 164882 (TRAV12-1, TRAJ47)
CVVNMEYGNKLVF

SEQ ID NO: 329764 - protein, 13 aa, Homo sapiens
  CDR3 for beta chain variable domain of TCR clone 164882 (TRBV27, TRBJ1-1)
CASSLSIGAEAFF

SEQ ID NO: 329765 - protein, 10 aa, Homo sapiens
  CDR3 for alpha chain variable domain of TCR clone 164883 (TRAV23/DV6, TRAJ22)
CAASSRGGRF

SEQ ID NO: 329766 - protein, 15 aa, Homo sapiens
  CDR3 for beta chain variable domain of TCR clone 164883 (TRBV10-3, TRBJ2-3)
CAIDTSGRRTDTQYF

SEQ ID NO: 329767 - protein, 16 aa, Homo sapiens
  CDR3 for alpha chain variable domain of TCR clone 164884 (TRAV4, TRAJ22)
CLVGDLYSGSARQLTL

SEQ ID NO: 329768 - protein, 15 aa, Homo sapiens
  CDR3 for beta chain variable domain of TCR clone 164884 (TRBV9, TRBJ1-6)
CASSAAGTGDSPLHF

SEQ ID NO: 329769 - protein, 14 aa, Homo sapiens
  CDR3 for alpha chain variable domain of TCR clone 164885 (TRAV12-2, TRAJ13)
CAVKKTGGYQKVTF

SEQ ID NO: 329770 - protein, 16 aa, Homo sapiens
  CDR3 for beta chain variable domain of TCR clone 164885 (TRBV7-9, TRBJ2-3)
CASSPWREVGTDTQYF

SEQ ID NO: 329771 - protein, 14 aa, Homo sapiens
  CDR3 for alpha chain variable domain of TCR clone 164886 (TRAV16, TRAJ32)
CSLKSGGATNKLIF

SEQ ID NO: 329772 - protein, 13 aa, Homo sapiens
  CDR3 for beta chain variable domain of TCR clone 164886 (TRBV10-2, TRBJ2-7)
CASGASGGYEQYF

SEQ ID NO: 329773 - protein, 15 aa, Homo sapiens
  CDR3 for alpha chain variable domain of TCR clone 164887 (TRAV17, TRAJ57)
CATGPSQGGSEKLVF

SEQ ID NO: 329774 - protein, 13 aa, Homo sapiens
  CDR3 for beta chain variable domain of TCR clone 164887 (TRBV4-1, TRBJ1-1)
CASSQLGTGEAFF

SEQ ID NO: 329775 - protein, 11 aa, Homo sapiens
  CDR3 for alpha chain variable domain of TCR clone 164888 (TRAV12-3, TRAJ26)
CAMSHGQNFVF

SEQ ID NO: 329776 - protein, 17 aa, Homo sapiens
  CDR3 for beta chain variable domain of TCR clone 164888 (TRBV7-9, TRBJ2-3)
CASSPTVAGDLTDTQYF

SEQ ID NO: 329777 - protein, 13 aa, Homo sapiens
  CDR3 for alpha chain variable domain of TCR clone 164889 (TRAV13-2, TRAJ48)
CAEMDFGNEKLTF

SEQ ID NO: 329778 - protein, 16 aa, Homo sapiens
  CDR3 for beta chain variable domain of TCR clone 164889 (TRBV7-3, TRBJ2-2)
CASSFLPSGYTGELFF

SEQ ID NO: 329779 - protein, 13 aa, Homo sapiens
  CDR3 for alpha chain variable domain of TCR clone 164890 (TRAV13-1, TRAJ21)
CAASIYNFNKFYF

SEQ ID NO: 329780 - protein, 18 aa, Homo sapiens
  CDR3 for beta chain variable domain of TCR clone 164890 (TRBV18, TRBJ1-1)
CASSLPGAPQGAGTEAFF

SEQ ID NO: 329781 - protein, 11 aa, Homo sapiens
  CDR3 for alpha chain variable domain of TCR clone 164891 (TRAV21, TRAJ9)
CAVPGGFKTIF

SEQ ID NO: 329782 - protein, 17 aa, Homo sapiens
  CDR3 for beta chain variable domain of TCR clone 164891 (TRBV7-9, TRBJ2-5)
CATSGGARDPVRRARHA

SEQ ID NO: 329783 - protein, 13 aa, Homo sapiens
  CDR3 for alpha chain variable domain of TCR clone 164892 (TRAV26-2, TRAJ43)
CILRAVNNHDMRF

SEQ ID NO: 329784 - protein, 15 aa, Homo sapiens
  CDR3 for beta chain variable domain of TCR clone 164892 (TRBV7-2, TRBJ2-1)
CASTHGTGIYNEQFF

SEQ ID NO: 329785 - protein, 15 aa, Homo sapiens
  CDR3 for alpha chain variable domain of TCR clone 164893 (TRAV8-1, TRAJ6)
CAVNTTPGGSYIPTF

SEQ ID NO: 329786 - protein, 14 aa, Homo sapiens
  CDR3 for beta chain variable domain of TCR clone 164893 (TRBV12-4, TRBJ2-1)
CASSLGQGASEQFF

SEQ ID NO: 329787 - protein, 11 aa, Homo sapiens
  CDR3 for alpha chain variable domain of TCR clone 164894 (TRAV2, TRAJ13)
CASVCYQKVTF

SEQ ID NO: 329788 - protein, 13 aa, Homo sapiens
  CDR3 for beta chain variable domain of TCR clone 164894 (TRBV12-4, TRBJ1-2)
CASSLRQGNGYTF

SEQ ID NO: 329789 - protein, 14 aa, Homo sapiens
  CDR3 for alpha chain variable domain of TCR clone 164895 (TRAV1-2, TRAJ16)
CAVNRFSDGQKLLF

SEQ ID NO: 329790 - protein, 13 aa, Homo sapiens
  CDR3 for beta chain variable domain of TCR clone 164895 (TRBV20-1, TRBJ1-1)
CSARLGHGTEAFF

SEQ ID NO: 329791 - protein, 15 aa, Homo sapiens
  CDR3 for alpha chain variable domain of TCR clone 164896 (TRAV8-6, TRAJ11)
CAVNFMNSGYSTLTF

SEQ ID NO: 329792 - protein, 15 aa, Homo sapiens
  CDR3 for beta chain variable domain of TCR clone 164896 (TRBV4-1, TRBJ1-4)
CASSDTGGTNEKLFF

SEQ ID NO: 329793 - protein, 14 aa, Homo sapiens
  CDR3 for alpha chain variable domain of TCR clone 164897 (TRAV2, TRAJ45)
CAVEDLFQEEVLTD

SEQ ID NO: 329794 - protein, 14 aa, Homo sapiens
  CDR3 for beta chain variable domain of TCR clone 164897 (TRBV11-2, TRBJ2-5)
CASSRTGGIETQYF

SEQ ID NO: 329795 - protein, 16 aa, Homo sapiens
  CDR3 for alpha chain variable domain of TCR clone 164898 (TRAV38-1, TRAJ56)
CAFMKRQTGANSKLTF

SEQ ID NO: 329796 - protein, 16 aa, Homo sapiens
  CDR3 for beta chain variable domain of TCR clone 164898 (TRBV4-1, TRBJ1-2)
CASSQDAGQVLYGYTF

SEQ ID NO: 329797 - protein, 13 aa, Homo sapiens
  CDR3 for alpha chain variable domain of TCR clone 164899 (TRAV8-6, TRAJ50)
CAVIKTSYDKVIF

SEQ ID NO: 329798 - protein, 16 aa, Homo sapiens
  CDR3 for beta chain variable domain of TCR clone 164899 (TRBV19, TRBJ2-2)
CASRSPGTGATGELFF

SEQ ID NO: 329799 - protein, 12 aa, Homo sapiens
  CDR3 for alpha chain variable domain of TCR clone 164900 (TRAV17, TRAJ20)
CATDRYDYKISF

SEQ ID NO: 329800 - protein, 14 aa, Homo sapiens
  CDR3 for beta chain variable domain of TCR clone 164900 (TRBV19, TRBJ2-1)
CASPTFVLSGEQFF

SEQ ID NO: 329801 - protein, 11 aa, Homo sapiens
  CDR3 for alpha chain variable domain of TCR clone 164901 (TRAV29/DV5, TRAJ49)
CAAVPGNQFYF

SEQ ID NO: 329802 - protein, 15 aa, Homo sapiens
  CDR3 for beta chain variable domain of TCR clone 164901 (TRBV5-7, TRBJ2-1)
CASSRRLAGDNEQFF

SEQ ID NO: 329803 - protein, 11 aa, Homo sapiens
  CDR3 for alpha chain variable domain of TCR clone 164902 (TRAV12-1, TRAJ30)
CVVNGQDKIIF

SEQ ID NO: 329804 - protein, 15 aa, Homo sapiens
  CDR3 for beta chain variable domain of TCR clone 164902 (TRBV28, TRBJ2-5)
CASSSGRTIQATQYF

SEQ ID NO: 329805 - protein, 17 aa, Homo sapiens
  CDR3 for alpha chain variable domain of TCR clone 164903 (TRAV3, TRAJ6)
CAVRDGPRAGGSYIPTF

SEQ ID NO: 329806 - protein, 15 aa, Homo sapiens
  CDR3 for beta chain variable domain of TCR clone 164903 (TRBV7-2, TRBJ2-7)
CASSTPGLTRGEQYF

SEQ ID NO: 329807 - protein, 14 aa, Homo sapiens
  CDR3 for alpha chain variable domain of TCR clone 164904 (TRAV8-3, TRAJ4)
CAVGASGGYNKLIF

SEQ ID NO: 329808 - protein, 14 aa, Homo sapiens
  CDR3 for beta chain variable domain of TCR clone 164904 (TRBV18, TRBJ2-1)
CASSPQGRFNEQFF

SEQ ID NO: 329809 - protein, 15 aa, Homo sapiens
  CDR3 for alpha chain variable domain of TCR clone 164905 (TRAV8-3, TRAJ11)
CAVGLLNSGYSTLTF

SEQ ID NO: 329810 - protein, 16 aa, Homo sapiens
  CDR3 for beta chain variable domain of TCR clone 164905 (TRBV7-2, TRBJ2-6)
CASSLAGRAGANVLTF

SEQ ID NO: 329811 - protein, 14 aa, Homo sapiens
  CDR3 for alpha chain variable domain of TCR clone 164906 (TRAV26-1, TRAJ45)
CIEVTGGGADGLTF

SEQ ID NO: 329812 - protein, 14 aa, Homo sapiens
  CDR3 for beta chain variable domain of TCR clone 164906 (TRBV6-1, TRBJ1-3)
CASVQGGGGNTMYF

SEQ ID NO: 329813 - protein, 12 aa, Homo sapiens
  CDR3 for alpha chain variable domain of TCR clone 164907 (TRAV2, TRAJ33)
CAVPDSNYQLIC

SEQ ID NO: 329814 - protein, 20 aa, Homo sapiens
  CDR3 for beta chain variable domain of TCR clone 164907 (TRBV19, TRBJ2-1)
CASSISRTVTSTRLNNEQFF

SEQ ID NO: 329815 - protein, 15 aa, Homo sapiens
  CDR3 for alpha chain variable domain of TCR clone 164908 (TRAV29/DV5, TRAJ42)
CAAKTDGGSQGNLIF

SEQ ID NO: 329816 - protein, 13 aa, Homo sapiens
  CDR3 for beta chain variable domain of TCR clone 164908 (TRBV6-5, TRBJ2-1)
CASSYELSNEQFF

SEQ ID NO: 329817 - protein, 11 aa, Homo sapiens
  CDR3 for alpha chain variable domain of TCR clone 164909 (TRAV2, TRAJ13)
CASGGYQKVTS

SEQ ID NO: 329818 - protein, 13 aa, Homo sapiens
  CDR3 for beta chain variable domain of TCR clone 164909 (TRBV6-1, TRBJ1-2)
CASSEGTHYGYTF

SEQ ID NO: 329819 - protein, 15 aa, Homo sapiens
  CDR3 for alpha chain variable domain of TCR clone 164910 (TRAV2, TRAJ18)
CAVEDRGSTLGRLYF

SEQ ID NO: 329820 - protein, 14 aa, Homo sapiens
  CDR3 for beta chain variable domain of TCR clone 164910 (TRBV4-1, TRBJ2-2)
CASSQAVNTGELFF

SEQ ID NO: 329821 - protein, 13 aa, Homo sapiens
  CDR3 for alpha chain variable domain of TCR clone 164911 (TRAV12-1, TRAJ26)
CVMRRNYGQNFVF

SEQ ID NO: 329822 - protein, 14 aa, Homo sapiens
  CDR3 for beta chain variable domain of TCR clone 164911 (TRBV4-2, TRBJ2-1)
CASGLDRAYNEQFF

SEQ ID NO: 329823 - protein, 13 aa, Homo sapiens
  CDR3 for alpha chain variable domain of TCR clone 164912 (TRAV27, TRAJ42)
CAGARGSQGDLIF

SEQ ID NO: 329824 - protein, 17 aa, Homo sapiens
  CDR3 for beta chain variable domain of TCR clone 164912 (TRBV13, TRBJ2-3)
CASSLSRVAGGRNTQYF

SEQ ID NO: 329825 - protein, 15 aa, Homo sapiens
  CDR3 for alpha chain variable domain of TCR clone 164913 (TRAV25, TRAJ10)
CAGPLLTGGGNKLTF

SEQ ID NO: 329826 - protein, 15 aa, Homo sapiens
  CDR3 for beta chain variable domain of TCR clone 164913 (TRBV12-5, TRBJ2-2)
CASGLLGGNTGELFF

SEQ ID NO: 329827 - protein, 14 aa, Homo sapiens
  CDR3 for alpha chain variable domain of TCR clone 164914 (TRAV8-3, TRAJ10)
CAVGNTGGGNKLTF

SEQ ID NO: 329828 - protein, 13 aa, Homo sapiens
  CDR3 for beta chain variable domain of TCR clone 164914 (TRBV19, TRBJ1-2)
CASSVPGQDGYTF

SEQ ID NO: 329829 - protein, 17 aa, Homo sapiens
  CDR3 for alpha chain variable domain of TCR clone 164915 (TRAV3, TRAJ12)
CAVRDGGGMDSSDKLIF

SEQ ID NO: 329830 - protein, 14 aa, Homo sapiens
  CDR3 for beta chain variable domain of TCR clone 164915 (TRBV7-9, TRBJ1-2)
CASSRQGANYGYTF

SEQ ID NO: 329831 - protein, 12 aa, Homo sapiens
  CDR3 for alpha chain variable domain of TCR clone 164916 (TRAV12-3, TRAJ17)
CAMTLTGNKITF

SEQ ID NO: 329832 - protein, 15 aa, Homo sapiens
  CDR3 for beta chain variable domain of TCR clone 164916 (TRBV20-1, TRBJ2-7)
CSARDRASGMDEQYF

SEQ ID NO: 329833 - protein, 13 aa, Homo sapiens
  CDR3 for alpha chain variable domain of TCR clone 164917 (TRAV35, TRAJ48)
GRSRVFGNEKLTF

SEQ ID NO: 329834 - protein, 20 aa, Homo sapiens
  CDR3 for beta chain variable domain of TCR clone 164917 (TRBV7-8, TRBJ2-2)
CASSHLFPGPTIHITGELFF

SEQ ID NO: 329835 - protein, 14 aa, Homo sapiens
  CDR3 for alpha chain variable domain of TCR clone 164918 (TRAV1-2, TRAJ8)
CAVREDTGFQKLVF

SEQ ID NO: 329836 - protein, 17 aa, Homo sapiens
  CDR3 for beta chain variable domain of TCR clone 164918 (TRBV28, TRBJ2-6)
CTSVPSLAGSGANVLTF

SEQ ID NO: 329837 - protein, 11 aa, Homo sapiens
  CDR3 for alpha chain variable domain of TCR clone 164919 (TRAV17, TRAJ36)
CAPTGANNLFF

SEQ ID NO: 329838 - protein, 12 aa, Homo sapiens
  CDR3 for beta chain variable domain of TCR clone 164919 (TRBV11-2, TRBJ2-1)
CASSPGNNEQFF

SEQ ID NO: 329839 - protein, 12 aa, Homo sapiens
  CDR3 for alpha chain variable domain of TCR clone 164920 (TRAV17, TRAJ12)
CATLRSRHKLIF

SEQ ID NO: 329840 - protein, 16 aa, Homo sapiens
  CDR3 for beta chain variable domain of TCR clone 164920 (TRBV28, TRBJ2-7)
CASSLFFETGGPEQYF

SEQ ID NO: 329841 - protein, 12 aa, Homo sapiens
  CDR3 for alpha chain variable domain of TCR clone 164921 (TRAV12-3, TRAJ17)
CAMTLTGKKLTF

SEQ ID NO: 329842 - protein, 13 aa, Homo sapiens
  CDR3 for beta chain variable domain of TCR clone 164921 (TRBV7-9, TRBJ1-2)
CASRLKQNYGYTF

SEQ ID NO: 329843 - protein, 16 aa, Homo sapiens
  CDR3 for alpha chain variable domain of TCR clone 164922 (TRAV35, TRAJ28)
CAGQRYSGAGSYQLTF

SEQ ID NO: 329844 - protein, 14 aa, Homo sapiens
  CDR3 for beta chain variable domain of TCR clone 164922 (TRBV19, TRBJ2-1)
CASSMGSGRRSSSP

SEQ ID NO: 329845 - protein, 13 aa, Homo sapiens
  CDR3 for alpha chain variable domain of TCR clone 164923 (TRAV3, TRAJ29)
CAVRDIIDTPRVF

SEQ ID NO: 329846 - protein, 14 aa, Homo sapiens
  CDR3 for beta chain variable domain of TCR clone 164923 (TRBV27, TRBJ2-1)
CASSATGGYNEQFF

SEQ ID NO: 329847 - protein, 17 aa, Homo sapiens
  CDR3 for alpha chain variable domain of TCR clone 164924 (TRAV13-1, TRAJ28)
CAASPPYSGAGSYQLTF

SEQ ID NO: 329848 - protein, 16 aa, Homo sapiens
  CDR3 for beta chain variable domain of TCR clone 164924 (TRBV7-8, TRBJ2-4)
CASSAERTLAKNIQYF

SEQ ID NO: 329849 - protein, 13 aa, Homo sapiens
  CDR3 for alpha chain variable domain of TCR clone 164925 (TRAV38-1, TRAJ42)
CARWGGSQGNLIF

SEQ ID NO: 329850 - protein, 18 aa, Homo sapiens
  CDR3 for beta chain variable domain of TCR clone 164925 (TRBV20-1, TRBJ2-6)
CSAETTPTHGSGANVLTF

SEQ ID NO: 329851 - protein, 10 aa, Homo sapiens
  CDR3 for alpha chain variable domain of TCR clone 164926 (TRAV26-2, TRAJ20)
CILGGYKLSF

SEQ ID NO: 329852 - protein, 13 aa, Homo sapiens
  CDR3 for beta chain variable domain of TCR clone 164926 (TRBV10-3, TRBJ2-7)
CASKLAVNYEQYF

SEQ ID NO: 329853 - protein, 13 aa, Homo sapiens
  CDR3 for alpha chain variable domain of TCR clone 164927 (TRAV8-3, TRAJ48)
CCGCNFGNEKLTF

SEQ ID NO: 329854 - protein, 12 aa, Homo sapiens
  CDR3 for beta chain variable domain of TCR clone 164927 (TRBV14, TRBJ2-7)
CASSSLKGEQYF

SEQ ID NO: 329855 - protein, 14 aa, Homo sapiens
  CDR3 for alpha chain variable domain of TCR clone 164928 (TRAV3, TRAJ37)
CAVKESGNTGKLIF

SEQ ID NO: 329856 - protein, 12 aa, Homo sapiens
  CDR3 for beta chain variable domain of TCR clone 164928 (TRBV12-4, TRBJ2-3)
CASSTLPDTQYF

SEQ ID NO: 329857 - protein, 17 aa, Homo sapiens
  CDR3 for alpha chain variable domain of TCR clone 164929 (TRAV16, TRAJ37)
CAFWPKNGSSSTGKLIF

SEQ ID NO: 329858 - protein, 13 aa, Homo sapiens
  CDR3 for beta chain variable domain of TCR clone 164929 (TRBV7-3, TRBJ1-1)
CASSQDWGAESFF

SEQ ID NO: 329859 - protein, 15 aa, Homo sapiens
  CDR3 for alpha chain variable domain of TCR clone 164930 (TRAV8-3, TRAJ27)
CAVVPSKTNAGKSTF

SEQ ID NO: 329860 - protein, 12 aa, Homo sapiens
  CDR3 for beta chain variable domain of TCR clone 164930 (TRBV11-2, TRBJ2-2)
CASSLGGGELFF

SEQ ID NO: 329861 - protein, 13 aa, Homo sapiens
  CDR3 for alpha chain variable domain of TCR clone 164931 (TRAV26-1, TRAJ41)
FIVRINSGYALNF

SEQ ID NO: 329862 - protein, 13 aa, Homo sapiens
  CDR3 for beta chain variable domain of TCR clone 164931 (TRBV20-1, TRBJ1-5)
CSATAAGGQPQHF

SEQ ID NO: 329863 - protein, 14 aa, Homo sapiens
  CDR3 for alpha chain variable domain of TCR clone 164932 (TRAV38-1, TRAJ33)
CAFMKPYSNYQLIW

SEQ ID NO: 329864 - protein, 15 aa, Homo sapiens
  CDR3 for beta chain variable domain of TCR clone 164932 (TRBV9, TRBJ1-6)
CASSVAGTGDSPLHF

SEQ ID NO: 329865 - protein, 13 aa, Homo sapiens
  CDR3 for alpha chain variable domain of TCR clone 164933 (TRAV2, TRAJ15)
CAVASQAGTALIV

SEQ ID NO: 329866 - protein, 15 aa, Homo sapiens
  CDR3 for beta chain variable domain of TCR clone 164933 (TRBV20-1, TRBJ2-7)
CSARDRVSGMDEQYF

SEQ ID NO: 329867 - protein, 14 aa, Homo sapiens
  CDR3 for alpha chain variable domain of TCR clone 164934 (TRAV26-1, TRAJ34)
CIVRVAYNTDKLIF

SEQ ID NO: 329868 - protein, 20 aa, Homo sapiens
  CDR3 for beta chain variable domain of TCR clone 164934 (TRBV28, TRBJ2-1)
CASTPIGRSPGRAGGNEQFF

SEQ ID NO: 329869 - protein, 12 aa, Homo sapiens
  CDR3 for alpha chain variable domain of TCR clone 164935 (TRAV14/DV4, TRAJ9)
CAMNPGGFKTTF

SEQ ID NO: 329870 - protein, 13 aa, Homo sapiens
  CDR3 for beta chain variable domain of TCR clone 164935 (TRBV7-3, TRBJ1-1)
CASSQDWGAEAFF

SEQ ID NO: 329871 - protein, 12 aa, Homo sapiens
  CDR3 for alpha chain variable domain of TCR clone 164936 (TRAV13-1, TRAJ48)
CAANFGNEKLTF

SEQ ID NO: 329872 - protein, 14 aa, Homo sapiens
  CDR3 for beta chain variable domain of TCR clone 164936 (TRBV7-2, TRBJ2-7)
CASSPKTSFYEQHF

SEQ ID NO: 329873 - protein, 10 aa, Homo sapiens
  CDR3 for alpha chain variable domain of TCR clone 164937 (TRAV12-1, TRAJ43)
CVVHNNDMRF

SEQ ID NO: 329874 - protein, 13 aa, Homo sapiens
  CDR3 for beta chain variable domain of TCR clone 164937 (TRBV12-4, TRBJ1-2)
CASSSGLTVISNF

SEQ ID NO: 329875 - protein, 14 aa, Homo sapiens
  CDR3 for alpha chain variable domain of TCR clone 164938 (TRAV17, TRAJ57)
CATDPQGGSEKLVF

SEQ ID NO: 329876 - protein, 18 aa, Homo sapiens
  CDR3 for beta chain variable domain of TCR clone 164938 (TRBV20-1, TRBJ2-3)
CSASGVAGGPGTTDTQYF

SEQ ID NO: 329877 - protein, 15 aa, Homo sapiens
  CDR3 for alpha chain variable domain of TCR clone 164939 (TRAV14/DV4, TRAJ22)
CAMKEGWTTARQLTF

SEQ ID NO: 329878 - protein, 16 aa, Homo sapiens
  CDR3 for beta chain variable domain of TCR clone 164939 (TRBV7-6, TRBJ2-1)
CASSLNEGPSYNEQFF

SEQ ID NO: 329879 - protein, 15 aa, Homo sapiens
  CDR3 for alpha chain variable domain of TCR clone 164940 (TRAV2, TRAJ22)
CAVPSRGGSARQLTF

SEQ ID NO: 329880 - protein, 11 aa, Homo sapiens
  CDR3 for beta chain variable domain of TCR clone 164940 (TRBV27, TRBJ2-3)
CASSLGNTQYF

SEQ ID NO: 329881 - protein, 14 aa, Homo sapiens
  CDR3 for alpha chain variable domain of TCR clone 164941 (TRAV12-2, TRAJ17)
CAALFKAAGNKLAF

SEQ ID NO: 329882 - protein, 16 aa, Homo sapiens
  CDR3 for beta chain variable domain of TCR clone 164941 (TRBV20-1, TRBJ2-2)
CSASASGIPGAGELFF

SEQ ID NO: 329883 - protein, 14 aa, Homo sapiens
  CDR3 for alpha chain variable domain of TCR clone 164942 (TRAV13-2, TRAJ45)
CAEMPGGGADGLTF

SEQ ID NO: 329884 - protein, 11 aa, Homo sapiens
  CDR3 for beta chain variable domain of TCR clone 164942 (TRBV7-3, TRBJ2-5)
CVSSLSETHYF

SEQ ID NO: 329885 - protein, 17 aa, Homo sapiens
  CDR3 for alpha chain variable domain of TCR clone 164943 (TRAV13-1, TRAJ53)
CAASWKSSGGSNYKLTF

SEQ ID NO: 329886 - protein, 19 aa, Homo sapiens
  CDR3 for beta chain variable domain of TCR clone 164943 (TRBV7-9, TRBJ2-1)
CASIHNRGALLRSYNEQFF

SEQ ID NO: 329887 - protein, 12 aa, Homo sapiens
  CDR3 for alpha chain variable domain of TCR clone 164944 (TRAV12-1, TRAJ23)
CVVNIPEGKLIF

SEQ ID NO: 329888 - protein, 15 aa, Homo sapiens
  CDR3 for beta chain variable domain of TCR clone 164944 (TRBV7-2, TRBJ2-7)
CASSLVSSGSYEQYF

SEQ ID NO: 329889 - protein, 12 aa, Homo sapiens
  CDR3 for alpha chain variable domain of TCR clone 164945 (TRAV13-1, TRAJ11)
CAASKGYSPLTF

SEQ ID NO: 329890 - protein, 14 aa, Homo sapiens
  CDR3 for beta chain variable domain of TCR clone 164945 (TRBV12-4, TRBJ2-7)
CASSPRQDLYEQYF

SEQ ID NO: 329891 - protein, 17 aa, Homo sapiens
  CDR3 for alpha chain variable domain of TCR clone 164946 (TRAV3, TRAJ12)
CAVRDGGRMDSSYKLIF

SEQ ID NO: 329892 - protein, 12 aa, Homo sapiens
  CDR3 for beta chain variable domain of TCR clone 164946 (TRBV11-2, TRBJ2-2)
CASSLPTGELFF

SEQ ID NO: 329893 - protein, 14 aa, Homo sapiens
  CDR3 for alpha chain variable domain of TCR clone 164947 (TRAV12-2, TRAJ40)
CAVKIPSGTYKYIF

SEQ ID NO: 329894 - protein, 13 aa, Homo sapiens
  CDR3 for beta chain variable domain of TCR clone 164947 (TRBV24-1, TRBJ2-2)
CATSDWSTGELFF

SEQ ID NO: 329895 - protein, 11 aa, Homo sapiens
  CDR3 for alpha chain variable domain of TCR clone 164948 (TRAV3, TRAJ21)
CAVGNFNKFYL

SEQ ID NO: 329896 - protein, 13 aa, Homo sapiens
  CDR3 for beta chain variable domain of TCR clone 164948 (TRBV20-1, TRBJ2-2)
CSASAAGTGELFF

SEQ ID NO: 329897 - protein, 11 aa, Homo sapiens
  CDR3 for alpha chain variable domain of TCR clone 164949 (TRAV12-3, TRAJ43)
CAMSVSNDMRF

SEQ ID NO: 329898 - protein, 14 aa, Homo sapiens
  CDR3 for beta chain variable domain of TCR clone 164949 (TRBV7-8, TRBJ2-3)
SASSLEAGTDTQYF

SEQ ID NO: 329899 - protein, 13 aa, Homo sapiens
  CDR3 for alpha chain variable domain of TCR clone 164950 (TRAV5, TRAJ30)
CAEIANRDDKIIF

SEQ ID NO: 329900 - protein, 14 aa, Homo sapiens
  CDR3 for beta chain variable domain of TCR clone 164950 (TRBV4-1, TRBJ2-2)
CACSQAVNTGELFF

SEQ ID NO: 329901 - protein, 15 aa, Homo sapiens
  CDR3 for alpha chain variable domain of TCR clone 164951 (TRAV13-1, TRAJ57)
CAASNTQGGSEKWVF

SEQ ID NO: 329902 - protein, 16 aa, Homo sapiens
  CDR3 for beta chain variable domain of TCR clone 164951 (TRBV19, TRBJ2-1)
CASSKAGPSSYNKQFF

SEQ ID NO: 329903 - protein, 14 aa, Homo sapiens
  CDR3 for alpha chain variable domain of TCR clone 164952 (TRAV35, TRAJ33)
CWPRGSDSNYQLIW

SEQ ID NO: 329904 - protein, 11 aa, Homo sapiens
  CDR3 for beta chain variable domain of TCR clone 164952 (TRBV10-3, TRBJ2-7)
CAISEGLEQYF

SEQ ID NO: 329905 - protein, 13 aa, Homo sapiens
  CDR3 for alpha chain variable domain of TCR clone 164953 (TRAV36/DV7, TRAJ41)
CAVEANSGYALNF

SEQ ID NO: 329906 - protein, 15 aa, Homo sapiens
  CDR3 for beta chain variable domain of TCR clone 164953 (TRBV2, TRBJ2-5)
CASSEQGDYRETQYF

SEQ ID NO: 329907 - protein, 14 aa, Homo sapiens
  CDR3 for alpha chain variable domain of TCR clone 164954 (TRAV21, TRAJ58)
CAVRRGRSGSRFTF

SEQ ID NO: 329908 - protein, 13 aa, Homo sapiens
  CDR3 for beta chain variable domain of TCR clone 164954 (TRBV7-2, TRBJ1-6)
CASSLKFDSPLHF

SEQ ID NO: 329909 - protein, 13 aa, Homo sapiens
  CDR3 for alpha chain variable domain of TCR clone 164955 (TRAV21, TRAJ57)
CAVTQGGSEKLVF

SEQ ID NO: 329910 - protein, 20 aa, Homo sapiens
  CDR3 for beta chain variable domain of TCR clone 164955 (TRBV19, TRBJ2-1)
CASSMSRTVTSTRLNNEQFF

SEQ ID NO: 329911 - protein, 13 aa, Homo sapiens
  CDR3 for alpha chain variable domain of TCR clone 164956 (TRAV36/DV7, TRAJ57)
CAVGEGGSEKLVF

SEQ ID NO: 329912 - protein, 16 aa, Homo sapiens
  CDR3 for beta chain variable domain of TCR clone 164956 (TRBV12-5, TRBJ2-5)
CASGPRTSGNQETQYF

SEQ ID NO: 329913 - protein, 17 aa, Homo sapiens
  CDR3 for alpha chain variable domain of TCR clone 164957 (TRAV2, TRAJ22)
ILQVREADAAEQRQLTF

SEQ ID NO: 329914 - protein, 12 aa, Homo sapiens
  CDR3 for beta chain variable domain of TCR clone 164957 (TRBV7-8, TRBJ2-7)
CASSLGDREQYF

SEQ ID NO: 329915 - protein, 12 aa, Homo sapiens
  CDR3 for alpha chain variable domain of TCR clone 164958 (TRAV13-2, TRAJ23)
CAERHRGGKRIF

SEQ ID NO: 329916 - protein, 16 aa, Homo sapiens
  CDR3 for beta chain variable domain of TCR clone 164958 (TRBV4-1, TRBJ2-5)
CASSHADRAGGETQYF

SEQ ID NO: 329917 - protein, 16 aa, Homo sapiens
  CDR3 for alpha chain variable domain of TCR clone 164959 (TRAV12-1, TRAJ42)
CVVTPYYGGSQGNLIF

SEQ ID NO: 329918 - protein, 15 aa, Homo sapiens
  CDR3 for beta chain variable domain of TCR clone 164959 (TRBV7-9, TRBJ1-4)
CASSARTGGNEKLFF

SEQ ID NO: 329919 - protein, 15 aa, Homo sapiens
  CDR3 for alpha chain variable domain of TCR clone 164960 (TRAV8-4, TRAJ37)
CAVSRGSGNTGKLIF

SEQ ID NO: 329920 - protein, 16 aa, Homo sapiens
  CDR3 for beta chain variable domain of TCR clone 164960 (TRBV7-3, TRBJ2-3)
CASSLSGYRPEDTQYV

SEQ ID NO: 329921 - protein, 13 aa, Homo sapiens
  CDR3 for alpha chain variable domain of TCR clone 164961 (TRAV35, TRAJ37)
CAGSSGNTGKLIF

SEQ ID NO: 329922 - protein, 16 aa, Homo sapiens
  CDR3 for beta chain variable domain of TCR clone 164961 (TRBV10-3, TRBJ2-1)
CAISLTSGKSYNEQFF

SEQ ID NO: 329923 - protein, 15 aa, Homo sapiens
  CDR3 for alpha chain variable domain of TCR clone 164962 (TRAV21, TRAJ22)
CAVRLFFWFCKATDL

SEQ ID NO: 329924 - protein, 14 aa, Homo sapiens
  CDR3 for beta chain variable domain of TCR clone 164962 (TRBV19, TRBJ1-5)
CASRAPDSFLSHHF

SEQ ID NO: 329925 - protein, 13 aa, Homo sapiens
  CDR3 for alpha chain variable domain of TCR clone 164963 (TRAV17, TRAJ20)
CATGRSNDYKLSF

SEQ ID NO: 329926 - protein, 14 aa, Homo sapiens
  CDR3 for beta chain variable domain of TCR clone 164963 (TRBV25-1, TRBJ1-1)
CASTHLGGNTEAFF

SEQ ID NO: 329927 - protein, 13 aa, Homo sapiens
  CDR3 for alpha chain variable domain of TCR clone 164964 (TRAV36/DV7, TRAJ54)
CAVDIQGAQKLVF

SEQ ID NO: 329928 - protein, 14 aa, Homo sapiens
  CDR3 for beta chain variable domain of TCR clone 164964 (TRBV19, TRBJ2-7)
CASNFRDTYTGMYF

SEQ ID NO: 329929 - protein, 16 aa, Homo sapiens
  CDR3 for alpha chain variable domain of TCR clone 164965 (TRAV1-2, TRAJ10)
CAVRGVLTGGGNKLTF

SEQ ID NO: 329930 - protein, 12 aa, Homo sapiens
  CDR3 for beta chain variable domain of TCR clone 164965 (TRBV7-3, TRBJ2-7)
CASSLGDREQYF

SEQ ID NO: 329931 - protein, 14 aa, Homo sapiens
  CDR3 for alpha chain variable domain of TCR clone 164966 (TRAV1-2, TRAJ16)
CAVNRFSDGQKLLF

SEQ ID NO: 329932 - protein, 19 aa, Homo sapiens
  CDR3 for beta chain variable domain of TCR clone 164966 (TRBV6-5, TRBJ1-1)
LSAAPSQTSVYFCALRAFF

SEQ ID NO: 329933 - protein, 12 aa, Homo sapiens
  CDR3 for alpha chain variable domain of TCR clone 164967 (TRAV12-3, TRAJ40)
CAVSSGTYKYIF

SEQ ID NO: 329934 - protein, 22 aa, Homo sapiens
  CDR3 for beta chain variable domain of TCR clone 164967 (TRBV7-9, TRBJ2-7)
RGTRPCISVPAAPGGLTYEQYF

SEQ ID NO: 329935 - protein, 13 aa, Homo sapiens
  CDR3 for alpha chain variable domain of TCR clone 164968 (TRAV13-1, TRAJ11)
CAAVLAGYSTLNF

SEQ ID NO: 329936 - protein, 17 aa, Homo sapiens
  CDR3 for beta chain variable domain of TCR clone 164968 (TRBV25-1, TRBJ2-7)
CASSDARVVFSSYEQYF

SEQ ID NO: 329937 - protein, 14 aa, Homo sapiens
  CDR3 for alpha chain variable domain of TCR clone 164969 (TRAV1-2, TRAJ16)
CAVNRFSDGQKLLF

SEQ ID NO: 329938 - protein, 15 aa, Homo sapiens
  CDR3 for beta chain variable domain of TCR clone 164969 (TRBV20-1, TRBJ2-7)
CSAIDRVSGMDEQYF

SEQ ID NO: 329939 - protein, 15 aa, Homo sapiens
  CDR3 for alpha chain variable domain of TCR clone 164970 (TRAV26-1, TRAJ29)
CIVRVAGSGNTPLVF

SEQ ID NO: 329940 - protein, 14 aa, Homo sapiens
  CDR3 for beta chain variable domain of TCR clone 164970 (TRBV25-1, TRBJ1-1)
CASTHLGGNTEAFF

SEQ ID NO: 329941 - protein, 12 aa, Homo sapiens
  CDR3 for alpha chain variable domain of TCR clone 164971 (TRAV1-1, TRAJ15)
CAVGQAGTALIF

SEQ ID NO: 329942 - protein, 16 aa, Homo sapiens
  CDR3 for beta chain variable domain of TCR clone 164971 (TRBV12-4, TRBJ2-7)
CASSPGGQGSSYEQYF

SEQ ID NO: 329943 - protein, 16 aa, Homo sapiens
  CDR3 for alpha chain variable domain of TCR clone 164972 (TRAV17, TRAJ9)
CATGEWGGTGGFKTIF

SEQ ID NO: 329944 - protein, 15 aa, Homo sapiens
  CDR3 for beta chain variable domain of TCR clone 164972 (TRBV20-1, TRBJ1-2)
CSARDSSGRNYGYTF

SEQ ID NO: 329945 - protein, 15 aa, Homo sapiens
  CDR3 for alpha chain variable domain of TCR clone 164973 (TRAV8-3, TRAJ37)
CAVGAPSSNTGKLIL

SEQ ID NO: 329946 - protein, 15 aa, Homo sapiens
  CDR3 for beta chain variable domain of TCR clone 164973 (TRBV11-2, TRBJ1-2)
CASSQMRGLNYGYTF

SEQ ID NO: 329947 - protein, 15 aa, Homo sapiens
  CDR3 for alpha chain variable domain of TCR clone 164974 (TRAV8-2, TRAJ15)
CVVTMGNQAGTALIF

SEQ ID NO: 329948 - protein, 15 aa, Homo sapiens
  CDR3 for beta chain variable domain of TCR clone 164974 (TRBV5-6, TRBJ1-2)
CASSLGVAANYGYTF

SEQ ID NO: 329949 - protein, 14 aa, Homo sapiens
  CDR3 for alpha chain variable domain of TCR clone 164975 (TRAV29/DV5, TRAJ20)
CAASAPIEDYKLSF

SEQ ID NO: 329950 - protein, 15 aa, Homo sapiens
  CDR3 for beta chain variable domain of TCR clone 164975 (TRBV6-1, TRBJ2-1)
CASSEAAYSYNEQLF

SEQ ID NO: 329951 - protein, 15 aa, Homo sapiens
  CDR3 for alpha chain variable domain of TCR clone 164976 (TRAV23/DV6, TRAJ32)
CAASKMGGATNKLIF

SEQ ID NO: 329952 - protein, 12 aa, Homo sapiens
  CDR3 for beta chain variable domain of TCR clone 164976 (TRBV7-3, TRBJ2-1)
CASSFQSGPQFF

SEQ ID NO: 329953 - protein, 13 aa, Homo sapiens
  CDR3 for alpha chain variable domain of TCR clone 164977 (TRAV1-2, TRAJ9)
CAVLNTGGSKTIF

SEQ ID NO: 329954 - protein, 16 aa, Homo sapiens
  CDR3 for beta chain variable domain of TCR clone 164977 (TRBV7-8, TRBJ2-5)
CASSLARQGSQETQYF

SEQ ID NO: 329955 - protein, 16 aa, Homo sapiens
  CDR3 for alpha chain variable domain of TCR clone 164978 (TRAV3, TRAJ37)
CAVRPHGPGNTGKLIF

SEQ ID NO: 329956 - protein, 16 aa, Homo sapiens
  CDR3 for beta chain variable domain of TCR clone 164978 (TRBV4-3, TRBJ2-2)
CASSHLQGSGTGELFF

SEQ ID NO: 329957 - protein, 16 aa, Homo sapiens
  CDR3 for alpha chain variable domain of TCR clone 164979 (TRAV12-3, TRAJ53)
CAMSPGSGGSNYKLTF

SEQ ID NO: 329958 - protein, 17 aa, Homo sapiens
  CDR3 for beta chain variable domain of TCR clone 164979 (TRBV20-1, TRBJ2-2)
CSASGSGQGGLTGELIF

SEQ ID NO: 329959 - protein, 13 aa, Homo sapiens
  CDR3 for alpha chain variable domain of TCR clone 164980 (TRAV13-1, TRAJ5)
CAARVTGRRALTI

SEQ ID NO: 329960 - protein, 15 aa, Homo sapiens
  CDR3 for beta chain variable domain of TCR clone 164980 (TRBV7-9, TRBJ2-7)
CASSPGGGLTYEQYF

SEQ ID NO: 329961 - protein, 14 aa, Homo sapiens
  CDR3 for alpha chain variable domain of TCR clone 164981 (TRAV17, TRAJ32)
CATDPGGATNKLIF

SEQ ID NO: 329962 - protein, 16 aa, Homo sapiens
  CDR3 for beta chain variable domain of TCR clone 164981 (TRBV11-2, TRBJ2-1)
CASSLERDGVDNEQFF

SEQ ID NO: 329963 - protein, 11 aa, Homo sapiens
  CDR3 for alpha chain variable domain of TCR clone 164982 (TRAV1-2, TRAJ20)
CAVANDYKRSF

SEQ ID NO: 329964 - protein, 13 aa, Homo sapiens
  CDR3 for beta chain variable domain of TCR clone 164982 (TRBV7-3, TRBJ1-1)
CASSQDWGAEAFF

SEQ ID NO: 329965 - protein, 15 aa, Homo sapiens
  CDR3 for alpha chain variable domain of TCR clone 164983 (TRAV17, TRAJ28)
CATDPSGAGSYQLTF

SEQ ID NO: 329966 - protein, 14 aa, Homo sapiens
  CDR3 for beta chain variable domain of TCR clone 164983 (TRBV11-2, TRBJ1-2)
CASSLGTANYGYTF

SEQ ID NO: 329967 - protein, 15 aa, Homo sapiens
  CDR3 for alpha chain variable domain of TCR clone 164984 (TRAV27, TRAJ38)
FAARRNTGNNRKLIW

SEQ ID NO: 329968 - protein, 13 aa, Homo sapiens
  CDR3 for beta chain variable domain of TCR clone 164984 (TRBV12-5, TRBJ2-3)
CASGDRQSDTQYF

SEQ ID NO: 329969 - protein, 22 aa, Homo sapiens
  CDR3 for alpha chain variable domain of TCR clone 164985 (TRAV3, TRAJ38)
CAVRDCLNAGNNHIQNPDPVVY

SEQ ID NO: 329970 - protein, 14 aa, Homo sapiens
  CDR3 for beta chain variable domain of TCR clone 164985 (TRBV5-5, TRBJ1-5)
CASSGQGVDQPQHF

SEQ ID NO: 329971 - protein, 13 aa, Homo sapiens
  CDR3 for alpha chain variable domain of TCR clone 164986 (TRAV27, TRAJ45)
CRSSEGGADGLTF

SEQ ID NO: 329972 - protein, 11 aa, Homo sapiens
  CDR3 for beta chain variable domain of TCR clone 164986 (TRBV19, TRBJ1-1)
CASSIGSEAFF

SEQ ID NO: 329973 - protein, 14 aa, Homo sapiens
  CDR3 for alpha chain variable domain of TCR clone 164987 (TRAV35, TRAJ56)
CAGQLTGANSKLTF

SEQ ID NO: 329974 - protein, 13 aa, Homo sapiens
  CDR3 for beta chain variable domain of TCR clone 164987 (TRBV7-3, TRBJ2-5)
CASSFRGGETQYF

SEQ ID NO: 329975 - protein, 16 aa, Homo sapiens
  CDR3 for alpha chain variable domain of TCR clone 164988 (TRAV30, TRAJ49)
SAAQRVGPNTGNQFYF

SEQ ID NO: 329976 - protein, 13 aa, Homo sapiens
  CDR3 for beta chain variable domain of TCR clone 164988 (TRBV7-9, TRBJ1-2)
CASSLKQNYGYTF

SEQ ID NO: 329977 - protein, 16 aa, Homo sapiens
  CDR3 for alpha chain variable domain of TCR clone 164989 (TRAV3, TRAJ37)
CAVRPHGSGNTGKLSF

SEQ ID NO: 329978 - protein, 16 aa, Homo sapiens
  CDR3 for beta chain variable domain of TCR clone 164989 (TRBV9, TRBJ1-2)
CASSVEEKVSPYGYTF

SEQ ID NO: 329979 - protein, 15 aa, Homo sapiens
  CDR3 for alpha chain variable domain of TCR clone 164990 (TRAV8-3, TRAJ45)
CASSYSGGGADGLTF

SEQ ID NO: 329980 - protein, 17 aa, Homo sapiens
  CDR3 for beta chain variable domain of TCR clone 164990 (TRBV7-2, TRBJ2-2)
CASSPRGAGEGTGELFF

SEQ ID NO: 329981 - protein, 14 aa, Homo sapiens
  CDR3 for alpha chain variable domain of TCR clone 164991 (TRAV2, TRAJ37)
CAVDFTSNTGKLLF

SEQ ID NO: 329982 - protein, 16 aa, Homo sapiens
  CDR3 for beta chain variable domain of TCR clone 164991 (TRBV20-1, TRBJ1-2)
CSASMGQGVANYGYTF

SEQ ID NO: 329983 - protein, 18 aa, Homo sapiens
  CDR3 for alpha chain variable domain of TCR clone 164992 (TRAV3, TRAJ32)
CAVRDIRGYGGATNTLIF

SEQ ID NO: 329984 - protein, 15 aa, Homo sapiens
  CDR3 for beta chain variable domain of TCR clone 164992 (TRBV12-4, TRBJ2-2)
CASSLGVRHTGELFV

SEQ ID NO: 329985 - protein, 14 aa, Homo sapiens
  CDR3 for alpha chain variable domain of TCR clone 164993 (TRAV1-2, TRAJ8)
CAVRDDTGFQKLVF

SEQ ID NO: 329986 - protein, 15 aa, Homo sapiens
  CDR3 for beta chain variable domain of TCR clone 164993 (TRBV12-4, TRBJ2-5)
CASSPPTGLQETQYF

SEQ ID NO: 329987 - protein, 13 aa, Homo sapiens
  CDR3 for alpha chain variable domain of TCR clone 164994 (TRAV29/DV5, TRAJ44)
CAASTGTASKLTF

SEQ ID NO: 329988 - protein, 13 aa, Homo sapiens
  CDR3 for beta chain variable domain of TCR clone 164994 (TRBV7-8, TRBJ2-7)
CASSFAGLYEQYF

SEQ ID NO: 329989 - protein, 14 aa, Homo sapiens
  CDR3 for alpha chain variable domain of TCR clone 164995 (TRAV13-1, TRAJ40)
CAASMTSGTYKYTL

SEQ ID NO: 329990 - protein, 15 aa, Homo sapiens
  CDR3 for beta chain variable domain of TCR clone 164995 (TRBV7-3, TRBJ2-1)
CASSPTGGGEVEQFF

SEQ ID NO: 329991 - protein, 13 aa, Homo sapiens
  CDR3 for alpha chain variable domain of TCR clone 164996 (TRAV27, TRAJ29)
CAGAHSGNTPLVF

SEQ ID NO: 329992 - protein, 16 aa, Homo sapiens
  CDR3 for beta chain variable domain of TCR clone 164996 (TRBV7-8, TRBJ2-4)
CASSAERKLAKNIQYF

SEQ ID NO: 329993 - protein, 16 aa, Homo sapiens
  CDR3 for alpha chain variable domain of TCR clone 164997 (TRAV23/DV6, TRAJ9)
CAASIGGNTGGFKTIF

SEQ ID NO: 329994 - protein, 18 aa, Homo sapiens
  CDR3 for beta chain variable domain of TCR clone 164997 (TRBV6-5, TRBJ1-1)
CASSYSAPGGTGGTEAFF

SEQ ID NO: 329995 - protein, 11 aa, Homo sapiens
  CDR3 for alpha chain variable domain of TCR clone 164998 (TRAV21, TRAJ9)
CAVPGGFKTIF

SEQ ID NO: 329996 - protein, 17 aa, Homo sapiens
  CDR3 for beta chain variable domain of TCR clone 164998 (TRBV7-9, TRBJ2-5)
CATSGGEIDPVLRARHA

SEQ ID NO: 329997 - protein, 14 aa, Homo sapiens
  CDR3 for alpha chain variable domain of TCR clone 164999 (TRAV1-2, TRAJ16)
CAVNRFSDGQKLLS

SEQ ID NO: 329998 - protein, 18 aa, Homo sapiens
  CDR3 for beta chain variable domain of TCR clone 164999 (TRBV4-3, TRBJ1-6)
CASSQETPASSYNSPLHF

SEQ ID NO: 329999 - protein, 11 aa, Homo sapiens
  CDR3 for alpha chain variable domain of TCR clone 165000 (TRAV17, TRAJ36)
CAPTGANNLCV

SEQ ID NO: 330000 - protein, 17 aa, Homo sapiens
  CDR3 for beta chain variable domain of TCR clone 165000 (TRBV24-1, TRBJ2-1)
CATSDVSTSGTYNEQFF

SEQ ID NO: 330001 - protein, 14 aa, Homo sapiens
  CDR3 for alpha chain variable domain of TCR clone 165001 (TRAV4, TRAJ30)
CLVGDMNRDDKIIF

SEQ ID NO: 330002 - protein, 17 aa, Homo sapiens
  CDR3 for beta chain variable domain of TCR clone 165001 (TRBV7-9, TRBJ2-3)
CASSPTVAGDLTDTQYF

SEQ ID NO: 330003 - protein, 10 aa, Homo sapiens
  CDR3 for alpha chain variable domain of TCR clone 165002 (TRAV8-4, TRAJ43)
CAGSADDMRF

SEQ ID NO: 330004 - protein, 17 aa, Homo sapiens
  CDR3 for beta chain variable domain of TCR clone 165002 (TRBV7-8, TRBJ2-6)
CASSAGTGGAGANVLTF

SEQ ID NO: 330005 - protein, 12 aa, Homo sapiens
  CDR3 for alpha chain variable domain of TCR clone 165003 (TRAV17, TRAJ39)
CATGAAGNMLTF

SEQ ID NO: 330006 - protein, 17 aa, Homo sapiens
  CDR3 for beta chain variable domain of TCR clone 165003 (TRBV19, TRBJ2-1)
CASSIQGLAGGYNEQFF

SEQ ID NO: 330007 - protein, 13 aa, Homo sapiens
  CDR3 for alpha chain variable domain of TCR clone 165004 (TRAV17, TRAJ7)
CATDNYGNNRLAF

SEQ ID NO: 330008 - protein, 16 aa, Homo sapiens
  CDR3 for beta chain variable domain of TCR clone 165004 (TRBV10-3, TRBJ2-7)
CAISADFADRPYEQYF

SEQ ID NO: 330009 - protein, 15 aa, Homo sapiens
  CDR3 for alpha chain variable domain of TCR clone 165005 (TRAV3, TRAJ4)
CAVRDGTGGYNNVIF

SEQ ID NO: 330010 - protein, 16 aa, Homo sapiens
  CDR3 for beta chain variable domain of TCR clone 165005 (TRBV27, TRBJ2-2)
CASSSSGVSNTGELFF

SEQ ID NO: 330011 - protein, 13 aa, Homo sapiens
  CDR3 for alpha chain variable domain of TCR clone 165006 (TRAV2, TRAJ21)
CAVEDLNFNKFYF

SEQ ID NO: 330012 - protein, 14 aa, Homo sapiens
  CDR3 for beta chain variable domain of TCR clone 165006 (TRBV18, TRBJ1-2)
CASSPDRVVYGYTF

SEQ ID NO: 330013 - protein, 16 aa, Homo sapiens
  CDR3 for alpha chain variable domain of TCR clone 165007 (TRAV30, TRAJ24)
CGTEIVDADSWGKFQF

SEQ ID NO: 330014 - protein, 15 aa, Homo sapiens
  CDR3 for beta chain variable domain of TCR clone 165007 (TRBV11-1, TRBJ1-3)
CASTDPRAFGNTIYF

SEQ ID NO: 330015 - protein, 14 aa, Homo sapiens
  CDR3 for alpha chain variable domain of TCR clone 165008 (TRAV20, TRAJ29)
CAVQAWVGNTPLVF

SEQ ID NO: 330016 - protein, 15 aa, Homo sapiens
  CDR3 for beta chain variable domain of TCR clone 165008 (TRBV20-1, TRBJ2-7)
CSARDPTEVGHEQYF

SEQ ID NO: 330017 - protein, 12 aa, Homo sapiens
  CDR3 for alpha chain variable domain of TCR clone 165009 (TRAV12-2, TRAJ10)
WGVTGGGNKLPF

SEQ ID NO: 330018 - protein, 20 aa, Homo sapiens
  CDR3 for beta chain variable domain of TCR clone 165009 (TRBV19, TRBJ2-1)
CASSISRTVTSARLNNEQFF

SEQ ID NO: 330019 - protein, 13 aa, Homo sapiens
  CDR3 for alpha chain variable domain of TCR clone 165010 (TRAV39, TRAJ17)
CAAQFTAGNKLTF

SEQ ID NO: 330020 - protein, 13 aa, Homo sapiens
  CDR3 for beta chain variable domain of TCR clone 165010 (TRBV3-1, TRBJ1-5)
CAITRWDGQPQHF

SEQ ID NO: 330021 - protein, 15 aa, Homo sapiens
  CDR3 for alpha chain variable domain of TCR clone 165011 (TRAV13-1, TRAJ44)
CAASRGGGTASKLTF

SEQ ID NO: 330022 - protein, 17 aa, Homo sapiens
  CDR3 for beta chain variable domain of TCR clone 165011 (TRBV13, TRBJ2-3)
CASSLSRVAGGRNTQYF

SEQ ID NO: 330023 - protein, 17 aa, Homo sapiens
  CDR3 for alpha chain variable domain of TCR clone 165012 (TRAV3, TRAJ6)
CAVRDGPRAGGSYIPTF

SEQ ID NO: 330024 - protein, 20 aa, Homo sapiens
  CDR3 for beta chain variable domain of TCR clone 165012 (TRBV28, TRBJ2-1)
CAITPIGLSPGLAGVNEQFF

SEQ ID NO: 330025 - protein, 16 aa, Homo sapiens
  CDR3 for alpha chain variable domain of TCR clone 165013 (TRAV36/DV7, TRAJ33)
WRPGNKVQDSNYQLIW

SEQ ID NO: 330026 - protein, 15 aa, Homo sapiens
  CDR3 for beta chain variable domain of TCR clone 165013 (TRBV29-1, TRBJ2-1)
CSVGRHALFYNEQFI

SEQ ID NO: 330027 - protein, 13 aa, Homo sapiens
  CDR3 for alpha chain variable domain of TCR clone 165014 (TRAV21, TRAJ27)
CAARPGNAGKSTF

SEQ ID NO: 330028 - protein, 16 aa, Homo sapiens
  CDR3 for beta chain variable domain of TCR clone 165014 (TRBV12-4, TRBJ1-5)
CASSRPVGGSNQTQHF

SEQ ID NO: 330029 - protein, 12 aa, Homo sapiens
  CDR3 for alpha chain variable domain of TCR clone 165015 (TRAV2, TRAJ10)
CASTGGGNKLTF

SEQ ID NO: 330030 - protein, 20 aa, Homo sapiens
  CDR3 for beta chain variable domain of TCR clone 165015 (TRBV7-8, TRBJ2-2)
CASSHLFRGPTIHITGELFF

SEQ ID NO: 330031 - protein, 10 aa, Homo sapiens
  CDR3 for alpha chain variable domain of TCR clone 165016 (TRAV2, TRAJ34)
CAVVNDKFIF

SEQ ID NO: 330032 - protein, 20 aa, Homo sapiens
  CDR3 for beta chain variable domain of TCR clone 165016 (TRBV28, TRBJ2-1)
CASTPIGRSPGLAGGNEQFF

SEQ ID NO: 330033 - protein, 17 aa, Homo sapiens
  CDR3 for alpha chain variable domain of TCR clone 165017 (TRAV29/DV5, TRAJ52)
CAATSTAAGTSYGKLTF

SEQ ID NO: 330034 - protein, 15 aa, Homo sapiens
  CDR3 for beta chain variable domain of TCR clone 165017 (TRBV3-1, TRBJ2-7)
CASSQEWTGSYEQYF

SEQ ID NO: 330035 - protein, 18 aa, Homo sapiens
  CDR3 for alpha chain variable domain of TCR clone 165018 (TRAV21, TRAJ52)
CAVRPSPAGGSSYGKLTF

SEQ ID NO: 330036 - protein, 12 aa, Homo sapiens
  CDR3 for beta chain variable domain of TCR clone 165018 (TRBV11-2, TRBJ2-2)
CASSLGGGELFF

SEQ ID NO: 330037 - protein, 15 aa, Homo sapiens
  CDR3 for alpha chain variable domain of TCR clone 165019 (TRAV3, TRAJ45)
CAVRTPWGGADGLTF

SEQ ID NO: 330038 - protein, 16 aa, Homo sapiens
  CDR3 for beta chain variable domain of TCR clone 165019 (TRBV6-1, TRBJ2-2)
CASSFGQGAITGELFF

SEQ ID NO: 330039 - protein, 19 aa, Homo sapiens
  CDR3 for alpha chain variable domain of TCR clone 165020 (TRAV2, TRAJ20)
ILQVRAADAAVYRDCKLSF

SEQ ID NO: 330040 - protein, 16 aa, Homo sapiens
  CDR3 for beta chain variable domain of TCR clone 165020 (TRBV5-1, TRBJ2-5)
CASSLALLRAGETQYF

SEQ ID NO: 330041 - protein, 12 aa, Homo sapiens
  CDR3 for alpha chain variable domain of TCR clone 165021 (TRAV12-1, TRAJ40)
CVFYSGTYKYIF

SEQ ID NO: 330042 - protein, 18 aa, Homo sapiens
  CDR3 for beta chain variable domain of TCR clone 165021 (TRBV10-3, TRBJ2-3)
CAISESRVGPMRGDTQYF

SEQ ID NO: 330043 - protein, 15 aa, Homo sapiens
  CDR3 for alpha chain variable domain of TCR clone 165022 (TRAV21, TRAJ24)
CAARSSADSWGKLQF

SEQ ID NO: 330044 - protein, 15 aa, Homo sapiens
  CDR3 for beta chain variable domain of TCR clone 165022 (TRBV4-1, TRBJ1-4)
CASSDTGGTNEKLFF

SEQ ID NO: 330045 - protein, 13 aa, Homo sapiens
  CDR3 for alpha chain variable domain of TCR clone 165023 (TRAV13-1, TRAJ11)
CAAVLAGYSTLTF

SEQ ID NO: 330046 - protein, 17 aa, Homo sapiens
  CDR3 for beta chain variable domain of TCR clone 165023 (TRBV25-1, TRBJ2-7)
CASSDARVVSSSYEQYF

SEQ ID NO: 330047 - protein, 13 aa, Homo sapiens
  CDR3 for alpha chain variable domain of TCR clone 165024 (TRAV12-2, TRAJ6)
CAVNVSRKLHTYI

SEQ ID NO: 330048 - protein, 13 aa, Homo sapiens
  CDR3 for beta chain variable domain of TCR clone 165024 (TRBV19, TRBJ2-5)
CASSIHSQETQYF

SEQ ID NO: 330049 - protein, 13 aa, Homo sapiens
  CDR3 for alpha chain variable domain of TCR clone 165025 (TRAV12-1, TRAJ6)
CVVYPGGSYIPTF

SEQ ID NO: 330050 - protein, 14 aa, Homo sapiens
  CDR3 for beta chain variable domain of TCR clone 165025 (TRBV7-6, TRBJ2-1)
FASSLGGGADEQFF

SEQ ID NO: 330051 - protein, 11 aa, Homo sapiens
  CDR3 for alpha chain variable domain of TCR clone 165026 (TRAV3, TRAJ21)
CAVGNFTKFYF

SEQ ID NO: 330052 - protein, 16 aa, Homo sapiens
  CDR3 for beta chain variable domain of TCR clone 165026 (TRBV19, TRBJ2-1)
CASSKAGPGSYNGQFF

SEQ ID NO: 330053 - protein, 13 aa, Homo sapiens
  CDR3 for alpha chain variable domain of TCR clone 165027 (TRAV13-1, TRAJ21)
CAASIYNCNKFYF

SEQ ID NO: 330054 - protein, 15 aa, Homo sapiens
  CDR3 for beta chain variable domain of TCR clone 165027 (TRBV27, TRBJ2-1)
CASSNGGGSSNEQFF

SEQ ID NO: 330055 - protein, 15 aa, Homo sapiens
  CDR3 for alpha chain variable domain of TCR clone 165028 (TRAV13-1, TRAJ45)
CAASGSGGGADGLNF

SEQ ID NO: 330056 - protein, 14 aa, Homo sapiens
  CDR3 for beta chain variable domain of TCR clone 165028 (TRBV12-4, TRBJ1-2)
CASSFVGTAYGYTF

SEQ ID NO: 330057 - protein, 19 aa, Homo sapiens
  CDR3 for alpha chain variable domain of TCR clone 165029 (TRAV4, TRAJ3)
PRVSLSDTAVSLSASKIIF

SEQ ID NO: 330058 - protein, 16 aa, Homo sapiens
  CDR3 for beta chain variable domain of TCR clone 165029 (TRBV11-2, TRBJ2-1)
CASSLERDGVDNEQFF

SEQ ID NO: 330059 - protein, 11 aa, Homo sapiens
  CDR3 for alpha chain variable domain of TCR clone 165030 (TRAV17, TRAJ31)
CATDQTARLMF

SEQ ID NO: 330060 - protein, 15 aa, Homo sapiens
  CDR3 for beta chain variable domain of TCR clone 165030 (TRBV4-1, TRBJ1-4)
CASSDTGGTNEKLFF

SEQ ID NO: 330061 - protein, 13 aa, Homo sapiens
  CDR3 for alpha chain variable domain of TCR clone 165031 (TRAV12-2, TRAJ20)
CAVNRFDDYKTSF

SEQ ID NO: 330062 - protein, 12 aa, Homo sapiens
  CDR3 for beta chain variable domain of TCR clone 165031 (TRBV19, TRBJ2-1)
CASAQISNEQFF

SEQ ID NO: 330063 - protein, 14 aa, Homo sapiens
  CDR3 for alpha chain variable domain of TCR clone 165032 (TRAV13-1, TRAJ9)
RAASALTGGFKTIF

SEQ ID NO: 330064 - protein, 16 aa, Homo sapiens
  CDR3 for beta chain variable domain of TCR clone 165032 (TRBV12-4, TRBJ2-3)
CASSFGTGGISDTQYF

SEQ ID NO: 330065 - protein, 13 aa, Homo sapiens
  CDR3 for alpha chain variable domain of TCR clone 165033 (TRAV13-2, TRAJ48)
CAEMDFGNEKLTF

SEQ ID NO: 330066 - protein, 15 aa, Homo sapiens
  CDR3 for beta chain variable domain of TCR clone 165033 (TRBV27, TRBJ1-5)
CASTFNRESNQPQHF

SEQ ID NO: 330067 - protein, 13 aa, Homo sapiens
  CDR3 for alpha chain variable domain of TCR clone 165034 (TRAV12-3, TRAJ7)
CAMSASGNNRLAF

SEQ ID NO: 330068 - protein, 16 aa, Homo sapiens
  CDR3 for beta chain variable domain of TCR clone 165034 (TRBV5-5, TRBJ2-5)
CASSPMYGGVGETQYF

SEQ ID NO: 330069 - protein, 10 aa, Homo sapiens
  CDR3 for alpha chain variable domain of TCR clone 165035 (TRAV30, TRAJ48)
CGIGNEKLTF

SEQ ID NO: 330070 - protein, 16 aa, Homo sapiens
  CDR3 for beta chain variable domain of TCR clone 165035 (TRBV7-8, TRBJ2-4)
CASSAERTLAKNIQYF

SEQ ID NO: 330071 - protein, 13 aa, Homo sapiens
  CDR3 for alpha chain variable domain of TCR clone 165036 (TRAV12-1, TRAJ7)
CVVNMRRNNRLAF

SEQ ID NO: 330072 - protein, 15 aa, Homo sapiens
  CDR3 for beta chain variable domain of TCR clone 165036 (TRBV27, TRBJ2-3)
CASSLGLAATDTQYF

SEQ ID NO: 330073 - protein, 13 aa, Homo sapiens
  CDR3 for alpha chain variable domain of TCR clone 165037 (TRAV21, TRAJ11)
CAVPNSGYSTLTF

SEQ ID NO: 330074 - protein, 16 aa, Homo sapiens
  CDR3 for beta chain variable domain of TCR clone 165037 (TRBV7-2, TRBJ2-6)
CAILSGVSSGANVLTF

SEQ ID NO: 330075 - protein, 14 aa, Homo sapiens
  CDR3 for alpha chain variable domain of TCR clone 165038 (TRAV16, TRAJ33)
CALSAMDSNYQLIW

SEQ ID NO: 330076 - protein, 14 aa, Homo sapiens
  CDR3 for beta chain variable domain of TCR clone 165038 (TRBV7-9, TRBJ2-1)
CASSPRDSLYEQFF

SEQ ID NO: 330077 - protein, 11 aa, Homo sapiens
  CDR3 for alpha chain variable domain of TCR clone 165039 (TRAV2, TRAJ13)
CASGGYQKVTF

SEQ ID NO: 330078 - protein, 13 aa, Homo sapiens
  CDR3 for beta chain variable domain of TCR clone 165039 (TRBV24-1, TRBJ2-3)
CANSTGGTDTQYF

SEQ ID NO: 330079 - protein, 11 aa, Homo sapiens
  CDR3 for alpha chain variable domain of TCR clone 165040 (TRAV12-3, TRAJ43)
CAMSVSNDMRF

SEQ ID NO: 330080 - protein, 14 aa, Homo sapiens
  CDR3 for beta chain variable domain of TCR clone 165040 (TRBV11-2, TRBJ1-5)
CASSLDRGRQPQHF

SEQ ID NO: 330081 - protein, 15 aa, Homo sapiens
  CDR3 for alpha chain variable domain of TCR clone 165041 (TRAV3, TRAJ4)
CAARDVTGGYNKLIF

SEQ ID NO: 330082 - protein, 13 aa, Homo sapiens
  CDR3 for beta chain variable domain of TCR clone 165041 (TRBV12-5, TRBJ1-2)
CASGVRTGNGYTF

SEQ ID NO: 330083 - protein, 14 aa, Homo sapiens
  CDR3 for alpha chain variable domain of TCR clone 165042 (TRAV26-1, TRAJ44)
CIVRPTGTARKLTF

SEQ ID NO: 330084 - protein, 12 aa, Homo sapiens
  CDR3 for beta chain variable domain of TCR clone 165042 (TRBV11-3, TRBJ1-1)
CASSLRDSEAFF

SEQ ID NO: 330085 - protein, 12 aa, Homo sapiens
  CDR3 for alpha chain variable domain of TCR clone 165043 (TRAV13-1, TRAJ11)
CAGPAGYSTLTF

SEQ ID NO: 330086 - protein, 13 aa, Homo sapiens
  CDR3 for beta chain variable domain of TCR clone 165043 (TRBV12-4, TRBJ2-1)
CASSLSPSNEQFF

SEQ ID NO: 330087 - protein, 13 aa, Homo sapiens
  CDR3 for alpha chain variable domain of TCR clone 165044 (TRAV8-3, TRAJ36)
CAVGATGANNLFF

SEQ ID NO: 330088 - protein, 14 aa, Homo sapiens
  CDR3 for beta chain variable domain of TCR clone 165044 (TRBV2, TRBJ2-3)
CASSEGQNTDTQYF

SEQ ID NO: 330089 - protein, 15 aa, Homo sapiens
  CDR3 for alpha chain variable domain of TCR clone 165045 (TRAV12-3, TRAJ6)
CAMSATTGGSYIPTF

SEQ ID NO: 330090 - protein, 13 aa, Homo sapiens
  CDR3 for beta chain variable domain of TCR clone 165045 (TRBV15, TRBJ1-6)
CATSGGLNSPLHF

SEQ ID NO: 330091 - protein, 14 aa, Homo sapiens
  CDR3 for alpha chain variable domain of TCR clone 165046 (TRAV1-2, TRAJ16)
CAVNRLSDGQKLLF

SEQ ID NO: 330092 - protein, 16 aa, Homo sapiens
  CDR3 for beta chain variable domain of TCR clone 165046 (TRBV28, TRBJ2-7)
CASSLFFETGGPEQYF

SEQ ID NO: 330093 - protein, 16 aa, Homo sapiens
  CDR3 for alpha chain variable domain of TCR clone 165047 (TRAV30, TRAJ24)
CCTEIVDADSWGKFQF

SEQ ID NO: 330094 - protein, 13 aa, Homo sapiens
  CDR3 for beta chain variable domain of TCR clone 165047 (TRBV20-1, TRBJ1-1)
CSAPLGGGTEAFF

SEQ ID NO: 330095 - protein, 13 aa, Homo sapiens
  CDR3 for alpha chain variable domain of TCR clone 165048 (TRAV13-1, TRAJ11)
FAASKEGYSTLTF

SEQ ID NO: 330096 - protein, 21 aa, Homo sapiens
  CDR3 for beta chain variable domain of TCR clone 165048 (TRBV23-1, TRBJ2-5)
CASTPPGQGPGGDPVLRARHA

SEQ ID NO: 330097 - protein, 14 aa, Homo sapiens
  CDR3 for alpha chain variable domain of TCR clone 165049 (TRAV8-1, TRAJ48)
CAVNAGFGNEKLTF

SEQ ID NO: 330098 - protein, 16 aa, Homo sapiens
  CDR3 for beta chain variable domain of TCR clone 165049 (TRBV7-9, TRBJ2-1)
CASSDVAGGSYNEQFF

SEQ ID NO: 330099 - protein, 12 aa, Homo sapiens
  CDR3 for alpha chain variable domain of TCR clone 165050 (TRAV16, TRAJ10)
CSRTGGGNKLTF

SEQ ID NO: 330100 - protein, 16 aa, Homo sapiens
  CDR3 for beta chain variable domain of TCR clone 165050 (TRBV18, TRBJ2-1)
CASSPRLAGGGDEQFF

SEQ ID NO: 330101 - protein, 18 aa, Homo sapiens
  CDR3 for alpha chain variable domain of TCR clone 165051 (TRAV26-1, TRAJ23)
CIVRVGLEVWNQGGKLIF

SEQ ID NO: 330102 - protein, 17 aa, Homo sapiens
  CDR3 for beta chain variable domain of TCR clone 165051 (TRBV13, TRBJ2-3)
CASSLSRVAGGRNTQYF

SEQ ID NO: 330103 - protein, 13 aa, Homo sapiens
  CDR3 for alpha chain variable domain of TCR clone 165052 (TRAV3, TRAJ21)
CAVREPDFNKFYF

SEQ ID NO: 330104 - protein, 15 aa, Homo sapiens
  CDR3 for beta chain variable domain of TCR clone 165052 (TRBV20-1, TRBJ2-7)
CSAESGTSGAYEQYF

SEQ ID NO: 330105 - protein, 14 aa, Homo sapiens
  CDR3 for alpha chain variable domain of TCR clone 165053 (TRAV6, TRAJ37)
CALGSQGNTGRLIF

SEQ ID NO: 330106 - protein, 15 aa, Homo sapiens
  CDR3 for beta chain variable domain of TCR clone 165053 (TRBV2, TRBJ2-1)
CASSEEREGYNEQFF

SEQ ID NO: 330107 - protein, 14 aa, Homo sapiens
  CDR3 for alpha chain variable domain of TCR clone 165054 (TRAV12-2, TRAJ45)
CAVHSGGGADGLTF

SEQ ID NO: 330108 - protein, 15 aa, Homo sapiens
  CDR3 for beta chain variable domain of TCR clone 165054 (TRBV4-1, TRBJ1-4)
CASSDTGGTNEKLFF

SEQ ID NO: 330109 - protein, 15 aa, Homo sapiens
  CDR3 for alpha chain variable domain of TCR clone 165055 (TRAV3, TRAJ22)
CAVRDRGGSARQLTF

SEQ ID NO: 330110 - protein, 16 aa, Homo sapiens
  CDR3 for beta chain variable domain of TCR clone 165055 (TRBV5-4, TRBJ2-3)
CASQQPGAGGADTRYF

SEQ ID NO: 330111 - protein, 11 aa, Homo sapiens
  CDR3 for alpha chain variable domain of TCR clone 165056 (TRAV12-1, TRAJ21)
CVVNNFNKFYF

SEQ ID NO: 330112 - protein, 14 aa, Homo sapiens
  CDR3 for beta chain variable domain of TCR clone 165056 (TRBV11-2, TRBJ2-3)
CASSRLARTDTQYF

SEQ ID NO: 330113 - protein, 14 aa, Homo sapiens
  CDR3 for alpha chain variable domain of TCR clone 165057 (TRAV17, TRAJ12)
CAILPMDSGYKLIF

SEQ ID NO: 330114 - protein, 13 aa, Homo sapiens
  CDR3 for beta chain variable domain of TCR clone 165057 (TRBV4-1, TRBJ2-2)
CASSQENTGELFF

SEQ ID NO: 330115 - protein, 14 aa, Homo sapiens
  CDR3 for alpha chain variable domain of TCR clone 165058 (TRAV1-2, TRAJ16)
CAVNRFLDGQKLLF

SEQ ID NO: 330116 - protein, 11 aa, Homo sapiens
  CDR3 for beta chain variable domain of TCR clone 165058 (TRBV4-1, TRBJ2-2)
CASEHTGELFF

SEQ ID NO: 330117 - protein, 14 aa, Homo sapiens
  CDR3 for alpha chain variable domain of TCR clone 165059 (TRAV1-2, TRAJ8)
CAVREDTGFQKLVF

SEQ ID NO: 330118 - protein, 18 aa, Homo sapiens
  CDR3 for beta chain variable domain of TCR clone 165059 (TRBV7-2, TRBJ2-7)
CASSLSGRGLAGGYEQYF

SEQ ID NO: 330119 - protein, 16 aa, Homo sapiens
  CDR3 for alpha chain variable domain of TCR clone 165060 (TRAV30, TRAJ24)
GGTEIVDADSWGKFQF

SEQ ID NO: 330120 - protein, 13 aa, Homo sapiens
  CDR3 for beta chain variable domain of TCR clone 165060 (TRBV11-2, TRBJ2-5)
CASSSTGEETQYF

SEQ ID NO: 330121 - protein, 14 aa, Homo sapiens
  CDR3 for alpha chain variable domain of TCR clone 165061 (TRAV8-1, TRAJ13)
CAVKSSGGYQKVTF

SEQ ID NO: 330122 - protein, 13 aa, Homo sapiens
  CDR3 for beta chain variable domain of TCR clone 165061 (TRBV7-3, TRBJ1-1)
CASSQDWGAEAFF

SEQ ID NO: 330123 - protein, 15 aa, Homo sapiens
  CDR3 for alpha chain variable domain of TCR clone 165062 (TRAV26-1, TRAJ29)
CIVRVEGSGNTPLVF

SEQ ID NO: 330124 - protein, 14 aa, Homo sapiens
  CDR3 for beta chain variable domain of TCR clone 165062 (TRBV11-2, TRBJ1-5)
CASSLDRGRQPQHF

SEQ ID NO: 330125 - protein, 15 aa, Homo sapiens
  CDR3 for alpha chain variable domain of TCR clone 165063 (TRAV17, TRAJ54)
YATEKLGQGAQKLVF

SEQ ID NO: 330126 - protein, 14 aa, Homo sapiens
  CDR3 for beta chain variable domain of TCR clone 165063 (TRBV7-3, TRBJ1-1)
CQQLRGQMNTEAFL

SEQ ID NO: 330127 - protein, 12 aa, Homo sapiens
  CDR3 for alpha chain variable domain of TCR clone 165064 (TRAV12-3, TRAJ3)
CAIDSSASKIIF

SEQ ID NO: 330128 - protein, 14 aa, Homo sapiens
  CDR3 for beta chain variable domain of TCR clone 165064 (TRBV7-9, TRBJ2-5)
CASSPRGNSETQYF

SEQ ID NO: 330129 - protein, 14 aa, Homo sapiens
  CDR3 for alpha chain variable domain of TCR clone 165065 (TRAV26-1, TRAJ39)
CIFFTNNAGNMLTF

SEQ ID NO: 330130 - protein, 15 aa, Homo sapiens
  CDR3 for beta chain variable domain of TCR clone 165065 (TRBV19, TRBJ2-4)
CASSLTGLTKNIQYF

SEQ ID NO: 330131 - protein, 16 aa, Homo sapiens
  CDR3 for alpha chain variable domain of TCR clone 165066 (TRAV3, TRAJ18)
CAVRDGRGSTQGRLYF

SEQ ID NO: 330132 - protein, 17 aa, Homo sapiens
  CDR3 for beta chain variable domain of TCR clone 165066 (TRBV5-1, TRBJ2-3)
GASSKSGLVDRTDTQYF

SEQ ID NO: 330133 - protein, 12 aa, Homo sapiens
  CDR3 for alpha chain variable domain of TCR clone 165067 (TRAV13-1, TRAJ5)
CAAKAGRRALTF

SEQ ID NO: 330134 - protein, 15 aa, Homo sapiens
  CDR3 for beta chain variable domain of TCR clone 165067 (TRBV9, TRBJ1-6)
CASSVAGTGDSPLHF

SEQ ID NO: 330135 - protein, 12 aa, Homo sapiens
  CDR3 for alpha chain variable domain of TCR clone 165068 (TRAV13-1, TRAJ53)
AASGGSNYKLTF

SEQ ID NO: 330136 - protein, 15 aa, Homo sapiens
  CDR3 for beta chain variable domain of TCR clone 165068 (TRBV5-1, TRBJ2-1)
SASSPPRAPYNEQFF

SEQ ID NO: 330137 - protein, 13 aa, Homo sapiens
  CDR3 for alpha chain variable domain of TCR clone 165069 (TRAV27, TRAJ57)
CRSAQGGSEKLVF

SEQ ID NO: 330138 - protein, 16 aa, Homo sapiens
  CDR3 for beta chain variable domain of TCR clone 165069 (TRBV10-3, TRBJ2-1)
RAISGVGDGGGGEQFF

SEQ ID NO: 330139 - protein, 15 aa, Homo sapiens
  CDR3 for alpha chain variable domain of TCR clone 165070 (TRAV29/DV5, TRAJ24)
CAASGATDSWGKFKF

SEQ ID NO: 330140 - protein, 12 aa, Homo sapiens
  CDR3 for beta chain variable domain of TCR clone 165070 (TRBV11-2, TRBJ2-2)
CASSLPTGELLF

SEQ ID NO: 330141 - protein, 12 aa, Homo sapiens
  CDR3 for alpha chain variable domain of TCR clone 165071 (TRAV8-3, TRAJ26)
CAGDNYGQIFVF

SEQ ID NO: 330142 - protein, 13 aa, Homo sapiens
  CDR3 for beta chain variable domain of TCR clone 165071 (TRBV7-7, TRBJ2-3)
CASSLSRADTQYF

SEQ ID NO: 330143 - protein, 12 aa, Homo sapiens
  CDR3 for alpha chain variable domain of TCR clone 165072 (TRAV13-1, TRAJ9)
CASHPGGFKTIF

SEQ ID NO: 330144 - protein, 13 aa, Homo sapiens
  CDR3 for beta chain variable domain of TCR clone 165072 (TRBV12-4, TRBJ1-2)
CASSSGSKDGYTF

SEQ ID NO: 330145 - protein, 15 aa, Homo sapiens
  CDR3 for alpha chain variable domain of TCR clone 165073 (TRAV26-1, TRAJ21)
CIVRVPNYNSNKFYF

SEQ ID NO: 330146 - protein, 16 aa, Homo sapiens
  CDR3 for beta chain variable domain of TCR clone 165073 (TRBV7-9, TRBJ2-3)
CASSLQGNPGTDTQYF

SEQ ID NO: 330147 - protein, 13 aa, Homo sapiens
  CDR3 for alpha chain variable domain of TCR clone 165074 (TRAV12-2, TRAJ52)
CAVSGTSNGKLTF

SEQ ID NO: 330148 - protein, 16 aa, Homo sapiens
  CDR3 for beta chain variable domain of TCR clone 165074 (TRBV5-7, TRBJ2-7)
CASSPTSGRELDEQYF

SEQ ID NO: 330149 - protein, 13 aa, Homo sapiens
  CDR3 for alpha chain variable domain of TCR clone 165075 (TRAV16, TRAJ28)
CAPTGAGSYQLTF

SEQ ID NO: 330150 - protein, 16 aa, Homo sapiens
  CDR3 for beta chain variable domain of TCR clone 165075 (TRBV28, TRBJ1-5)
CASILTGQGWNQPQHF

SEQ ID NO: 330151 - protein, 17 aa, Homo sapiens
  CDR3 for alpha chain variable domain of TCR clone 165076 (TRAV30, TRAJ44)
CGTEGPPGSGTASKLTC

SEQ ID NO: 330152 - protein, 14 aa, Homo sapiens
  CDR3 for beta chain variable domain of TCR clone 165076 (TRBV27, TRBJ2-7)
CASTPRAGLYEQYF

SEQ ID NO: 330153 - protein, 13 aa, Homo sapiens
  CDR3 for alpha chain variable domain of TCR clone 165077 (TRAV21, TRAJ56)
CAGWVGANSKLTF

SEQ ID NO: 330154 - protein, 12 aa, Homo sapiens
  CDR3 for beta chain variable domain of TCR clone 165077 (TRBV7-8, TRBJ2-7)
CASSLGDREQYF

SEQ ID NO: 330155 - protein, 13 aa, Homo sapiens
  CDR3 for alpha chain variable domain of TCR clone 165078 (TRAV27, TRAJ45)
CRSSGGGADGLTF

SEQ ID NO: 330156 - protein, 15 aa, Homo sapiens
  CDR3 for beta chain variable domain of TCR clone 165078 (TRBV5-1, TRBJ2-7)
CASSLYPDGGYEQYF

SEQ ID NO: 330157 - protein, 12 aa, Homo sapiens
  CDR3 for alpha chain variable domain of TCR clone 165079 (TRAV21, TRAJ58)
CAAEPSGSRLTF

SEQ ID NO: 330158 - protein, 15 aa, Homo sapiens
  CDR3 for beta chain variable domain of TCR clone 165079 (TRBV20-1, TRBJ2-7)
CSARDPVKGEGEQYF

SEQ ID NO: 330159 - protein, 11 aa, Homo sapiens
  CDR3 for alpha chain variable domain of TCR clone 165080 (TRAV26-1, TRAJ37)
CIVRVGRKLIF

SEQ ID NO: 330160 - protein, 15 aa, Homo sapiens
  CDR3 for beta chain variable domain of TCR clone 165080 (TRBV7-2, TRBJ2-1)
CASSSGLAGGNEQFF

SEQ ID NO: 330161 - protein, 16 aa, Homo sapiens
  CDR3 for alpha chain variable domain of TCR clone 165081 (TRAV23/DV6, TRAJ57)
CAASSTLSQGGSEKLF

SEQ ID NO: 330162 - protein, 14 aa, Homo sapiens
  CDR3 for beta chain variable domain of TCR clone 165081 (TRBV7-2, TRBJ2-7)
CASSPKTSFYEQYF

SEQ ID NO: 330163 - protein, 16 aa, Homo sapiens
  CDR3 for alpha chain variable domain of TCR clone 165082 (TRAV30, TRAJ24)
CGTEIVDADSWGKFQF

SEQ ID NO: 330164 - protein, 14 aa, Homo sapiens
  CDR3 for beta chain variable domain of TCR clone 165082 (TRBV4-1, TRBJ2-2)
CASSQAVDTGELFF

SEQ ID NO: 330165 - protein, 16 aa, Homo sapiens
  CDR3 for alpha chain variable domain of TCR clone 165083 (TRAV30, TRAJ24)
CGTEIVDADSWGKFQF

SEQ ID NO: 330166 - protein, 15 aa, Homo sapiens
  CDR3 for beta chain variable domain of TCR clone 165083 (TRBV20-1, TRBJ2-7)
CGAESGTSGAYEQYF

SEQ ID NO: 330167 - protein, 12 aa, Homo sapiens
  CDR3 for alpha chain variable domain of TCR clone 165084 (TRAV12-3, TRAJ17)
CAMTLTGNKLTF

SEQ ID NO: 330168 - protein, 15 aa, Homo sapiens
  CDR3 for beta chain variable domain of TCR clone 165084 (TRBV20-1, TRBJ2-7)
SSARERVSGMDEQYF

SEQ ID NO: 330169 - protein, 16 aa, Homo sapiens
  CDR3 for alpha chain variable domain of TCR clone 165085 (TRAV3, TRAJ37)
CAVRGKGSSNTGKLIF

SEQ ID NO: 330170 - protein, 15 aa, Homo sapiens
  CDR3 for beta chain variable domain of TCR clone 165085 (TRBV10-2, TRBJ2-3)
CASTSTSGGTDTQYF

SEQ ID NO: 330171 - protein, 16 aa, Homo sapiens
  CDR3 for alpha chain variable domain of TCR clone 165086 (TRAV8-3, TRAJ8)
CAVPRDGNTGFQKLVF

SEQ ID NO: 330172 - protein, 15 aa, Homo sapiens
  CDR3 for beta chain variable domain of TCR clone 165086 (TRBV6-1, TRBJ2-6)
CASSSRPSRANVLTF

SEQ ID NO: 330173 - protein, 17 aa, Homo sapiens
  CDR3 for alpha chain variable domain of TCR clone 165087 (TRAV38-1, TRAJ45)
CAFMKHYMGGGADGLTF

SEQ ID NO: 330174 - protein, 13 aa, Homo sapiens
  CDR3 for beta chain variable domain of TCR clone 165087 (TRBV10-3, TRBJ2-7)
CASKLAVNYEQYF

SEQ ID NO: 330175 - protein, 17 aa, Homo sapiens
  CDR3 for alpha chain variable domain of TCR clone 165088 (TRAV3, TRAJ42)
CAVRDRDYGGSQGNLIF

SEQ ID NO: 330176 - protein, 14 aa, Homo sapiens
  CDR3 for beta chain variable domain of TCR clone 165088 (TRBV25-1, TRBJ1-1)
CASPHLGGNTEAFF

SEQ ID NO: 330177 - protein, 14 aa, Homo sapiens
  CDR3 for alpha chain variable domain of TCR clone 165089 (TRAV23/DV6, TRAJ24)
CAASRTDSWGKLQF

SEQ ID NO: 330178 - protein, 15 aa, Homo sapiens
  CDR3 for beta chain variable domain of TCR clone 165089 (TRBV7-9, TRBJ1-5)
CASSQGHQPNQPQHF

SEQ ID NO: 330179 - protein, 12 aa, Homo sapiens
  CDR3 for alpha chain variable domain of TCR clone 165090 (TRAV12-1, TRAJ40)
CVIYSGTYKYIF

SEQ ID NO: 330180 - protein, 15 aa, Homo sapiens
  CDR3 for beta chain variable domain of TCR clone 165090 (TRBV7-9, TRBJ1-6)
CASSSPGRGNSPLHF

SEQ ID NO: 330181 - protein, 16 aa, Homo sapiens
  CDR3 for alpha chain variable domain of TCR clone 165091 (TRAV30, TRAJ24)
CGTEIVDADNWGKFQF

SEQ ID NO: 330182 - protein, 14 aa, Homo sapiens
  CDR3 for beta chain variable domain of TCR clone 165091 (TRBV12-5, TRBJ2-5)
CASGSRTHHETQYF

SEQ ID NO: 330183 - protein, 15 aa, Homo sapiens
  CDR3 for alpha chain variable domain of TCR clone 165092 (TRAV20, TRAJ23)
CAVQAVRNQGRKLIF

SEQ ID NO: 330184 - protein, 16 aa, Homo sapiens
  CDR3 for beta chain variable domain of TCR clone 165092 (TRBV27, TRBJ2-7)
CASSKQGRGWAYEQYF

SEQ ID NO: 330185 - protein, 12 aa, Homo sapiens
  CDR3 for alpha chain variable domain of TCR clone 165093 (TRAV16, TRAJ36)
CALQTGANNLFF

SEQ ID NO: 330186 - protein, 18 aa, Homo sapiens
  CDR3 for beta chain variable domain of TCR clone 165093 (TRBV4-1, TRBJ1-4)
YASSPRTGGAWTNEKLFF

SEQ ID NO: 330187 - protein, 15 aa, Homo sapiens
  CDR3 for alpha chain variable domain of TCR clone 165094 (TRAV8-6, TRAJ10)
CAVSDQAGGGSKLTF

SEQ ID NO: 330188 - protein, 14 aa, Homo sapiens
  CDR3 for beta chain variable domain of TCR clone 165094 (TRBV7-8, TRBJ2-3)
CASSLEAGTDTQYF

SEQ ID NO: 330189 - protein, 13 aa, Homo sapiens
  CDR3 for alpha chain variable domain of TCR clone 165095 (TRAV8-4, TRAJ3)
CAVSDSGASKIIF

SEQ ID NO: 330190 - protein, 16 aa, Homo sapiens
  CDR3 for beta chain variable domain of TCR clone 165095 (TRBV7-9, TRBJ2-7)
CASSTHGGQEKYEQYS

SEQ ID NO: 330191 - protein, 12 aa, Homo sapiens
  CDR3 for alpha chain variable domain of TCR clone 165096 (TRAV17, TRAJ20)
CATDSNDYKLSF

SEQ ID NO: 330192 - protein, 17 aa, Homo sapiens
  CDR3 for beta chain variable domain of TCR clone 165096 (TRBV5-1, TRBJ2-2)
CASSLAGLSGGTGELSF

SEQ ID NO: 330193 - protein, 13 aa, Homo sapiens
  CDR3 for alpha chain variable domain of TCR clone 165097 (TRAV13-1, TRAJ21)
FAASIYNFNKFYF

SEQ ID NO: 330194 - protein, 13 aa, Homo sapiens
  CDR3 for beta chain variable domain of TCR clone 165097 (TRBV27, TRBJ1-4)
CASSLMGDEKLCF

SEQ ID NO: 330195 - protein, 15 aa, Homo sapiens
  CDR3 for alpha chain variable domain of TCR clone 165098 (TRAV12-3, TRAJ6)
CAMSATSGGSYIPTF

SEQ ID NO: 330196 - protein, 17 aa, Homo sapiens
  CDR3 for beta chain variable domain of TCR clone 165098 (TRBV20-1, TRBJ2-1)
CSAPPRLAGTRYNEQFF

SEQ ID NO: 330197 - protein, 15 aa, Homo sapiens
  CDR3 for alpha chain variable domain of TCR clone 165099 (TRAV1-2, TRAJ28)
CAVQYSGAGSYQLTF

SEQ ID NO: 330198 - protein, 13 aa, Homo sapiens
  CDR3 for beta chain variable domain of TCR clone 165099 (TRBV20-1, TRBJ2-7)
CSATHTSGYKQCF

SEQ ID NO: 330199 - protein, 11 aa, Homo sapiens
  CDR3 for alpha chain variable domain of TCR clone 165100 (TRAV8-2, TRAJ26)
CVVTLLLGSEF

SEQ ID NO: 330200 - protein, 15 aa, Homo sapiens
  CDR3 for beta chain variable domain of TCR clone 165100 (TRBV11-3, TRBJ2-2)
CASSSDRVNAGELFF

SEQ ID NO: 330201 - protein, 11 aa, Homo sapiens
  CDR3 for alpha chain variable domain of TCR clone 165101 (TRAV1-2, TRAJ8)
CAVSSFQKLVF

SEQ ID NO: 330202 - protein, 19 aa, Homo sapiens
  CDR3 for beta chain variable domain of TCR clone 165101 (TRBV7-2, TRBJ2-5)
CASGTSGGTQPLGSEAQYF

SEQ ID NO: 330203 - protein, 18 aa, Homo sapiens
  CDR3 for alpha chain variable domain of TCR clone 165102 (TRAV1-1, TRAJ42)
CAVSPSAFYGGSQGDLIF

SEQ ID NO: 330204 - protein, 14 aa, Homo sapiens
  CDR3 for beta chain variable domain of TCR clone 165102 (TRBV6-3, TRBJ2-7)
CASSYSTGGDEQYF

SEQ ID NO: 330205 - protein, 14 aa, Homo sapiens
  CDR3 for alpha chain variable domain of TCR clone 165103 (TRAV1-2, TRAJ8)
CAVREGTGFQKLVF

SEQ ID NO: 330206 - protein, 13 aa, Homo sapiens
  CDR3 for beta chain variable domain of TCR clone 165103 (TRBV2, TRBJ1-1)
CARNPTGGCHAFF

SEQ ID NO: 330207 - protein, 18 aa, Homo sapiens
  CDR3 for alpha chain variable domain of TCR clone 165104 (TRAV13-1, TRAJ45)
CAASIGVYSGGGADGLTF

SEQ ID NO: 330208 - protein, 14 aa, Homo sapiens
  CDR3 for beta chain variable domain of TCR clone 165104 (TRBV7-2, TRBJ2-7)
CASSGLAGRGEQYF

SEQ ID NO: 330209 - protein, 15 aa, Homo sapiens
  CDR3 for alpha chain variable domain of TCR clone 165105 (TRAV8-4, TRAJ37)
CAVSRGSGNTGKLIF

SEQ ID NO: 330210 - protein, 17 aa, Homo sapiens
  CDR3 for beta chain variable domain of TCR clone 165105 (TRBV5-1, TRBJ2-7)
CASSLDLTSSTSSTSGR

SEQ ID NO: 330211 - protein, 13 aa, Homo sapiens
  CDR3 for alpha chain variable domain of TCR clone 165106 (TRAV21, TRAJ20)
CAMGMRVDYKLSF

SEQ ID NO: 330212 - protein, 13 aa, Homo sapiens
  CDR3 for beta chain variable domain of TCR clone 165106 (TRBV6-1, TRBJ1-1)
CASSRQGNTEAFF

SEQ ID NO: 330213 - protein, 13 aa, Homo sapiens
  CDR3 for alpha chain variable domain of TCR clone 165107 (TRAV1-2, TRAJ9)
CAVLNTGGFKTIF

SEQ ID NO: 330214 - protein, 16 aa, Homo sapiens
  CDR3 for beta chain variable domain of TCR clone 165107 (TRBV12-4, TRBJ1-5)
CASRQPVEGSNQPQHF

SEQ ID NO: 330215 - protein, 16 aa, Homo sapiens
  CDR3 for alpha chain variable domain of TCR clone 165108 (TRAV3, TRAJ37)
CAVRPHGSGNTGKLIF

SEQ ID NO: 330216 - protein, 14 aa, Homo sapiens
  CDR3 for beta chain variable domain of TCR clone 165108 (TRBV20-1, TRBJ2-1)
CSARGGSSCNEQFF

SEQ ID NO: 330217 - protein, 13 aa, Homo sapiens
  CDR3 for alpha chain variable domain of TCR clone 165109 (TRAV27, TRAJ6)
GAGGTRGSYIPTF

SEQ ID NO: 330218 - protein, 15 aa, Homo sapiens
  CDR3 for beta chain variable domain of TCR clone 165109 (TRBV5-5, TRBJ2-7)
CASSLAAPLSYEQYF

SEQ ID NO: 330219 - protein, 16 aa, Homo sapiens
  CDR3 for alpha chain variable domain of TCR clone 165110 (TRAV35, TRAJ37)
CWAFLRGSSNTGKLIF

SEQ ID NO: 330220 - protein, 13 aa, Homo sapiens
  CDR3 for beta chain variable domain of TCR clone 165110 (TRBV2, TRBJ1-2)
CASSVRGNYGYIF

SEQ ID NO: 330221 - protein, 15 aa, Homo sapiens
  CDR3 for alpha chain variable domain of TCR clone 165111 (TRAV17, TRAJ57)
CATGPSQGGSEKLVV

SEQ ID NO: 330222 - protein, 18 aa, Homo sapiens
  CDR3 for beta chain variable domain of TCR clone 165111 (TRBV7-9, TRBJ2-7)
CASSLTTSGSRTWYEQYS

SEQ ID NO: 330223 - protein, 20 aa, Homo sapiens
  CDR3 for alpha chain variable domain of TCR clone 165112 (TRAV12-1, TRAJ42)
SSVIQPPTSVKGGSQGNLIF

SEQ ID NO: 330224 - protein, 14 aa, Homo sapiens
  CDR3 for beta chain variable domain of TCR clone 165112 (TRBV7-2, TRBJ2-7)
CASSPKTSFYEQYF

SEQ ID NO: 330225 - protein, 13 aa, Homo sapiens
  CDR3 for alpha chain variable domain of TCR clone 165113 (TRAV17, TRAJ40)
GATDEGGTYKYIF

SEQ ID NO: 330226 - protein, 13 aa, Homo sapiens
  CDR3 for beta chain variable domain of TCR clone 165113 (TRBV6-3, TRBJ2-5)
CASSYRMTETQYF

SEQ ID NO: 330227 - protein, 19 aa, Homo sapiens
  CDR3 for alpha chain variable domain of TCR clone 165114 (TRAV17, TRAJ40)
TASRAADTASYFCASKYIF

SEQ ID NO: 330228 - protein, 17 aa, Homo sapiens
  CDR3 for beta chain variable domain of TCR clone 165114 (TRBV11-2, TRBJ2-4)
CASSFIALGGAGDIQYF

SEQ ID NO: 330229 - protein, 12 aa, Homo sapiens
  CDR3 for alpha chain variable domain of TCR clone 165115 (TRAV13-1, TRAJ49)
CAASPMGNLFYF

SEQ ID NO: 330230 - protein, 10 aa, Homo sapiens
  CDR3 for beta chain variable domain of TCR clone 165115 (TRBV15, TRBJ2-7)
AETGGYEQYF

SEQ ID NO: 330231 - protein, 12 aa, Homo sapiens
  CDR3 for alpha chain variable domain of TCR clone 165116 (TRAV8-3, TRAJ20)
CAVDFNDYKLSF

SEQ ID NO: 330232 - protein, 15 aa, Homo sapiens
  CDR3 for beta chain variable domain of TCR clone 165116 (TRBV12-4, TRBJ2-5)
CASSPPTGLQETQYF

SEQ ID NO: 330233 - protein, 16 aa, Homo sapiens
  CDR3 for alpha chain variable domain of TCR clone 165117 (TRAV30, TRAJ24)
CGTEIVDSDSWGKFKF

SEQ ID NO: 330234 - protein, 13 aa, Homo sapiens
  CDR3 for beta chain variable domain of TCR clone 165117 (TRBV11-2, TRBJ2-5)
CASSSTGEETQYF

SEQ ID NO: 330235 - protein, 12 aa, Homo sapiens
  CDR3 for alpha chain variable domain of TCR clone 165118 (TRAV13-2, TRAJ23)
CAERHRGGKVIF

SEQ ID NO: 330236 - protein, 13 aa, Homo sapiens
  CDR3 for beta chain variable domain of TCR clone 165118 (TRBV7-9, TRBJ2-3)
CASSPGSTDTQYF

SEQ ID NO: 330237 - protein, 13 aa, Homo sapiens
  CDR3 for alpha chain variable domain of TCR clone 165119 (TRAV21, TRAJ27)
CAARPGNAGKSTF

SEQ ID NO: 330238 - protein, 12 aa, Homo sapiens
  CDR3 for beta chain variable domain of TCR clone 165119 (TRBV2, TRBJ2-1)
CASRPGPREQFF

SEQ ID NO: 330239 - protein, 17 aa, Homo sapiens
  CDR3 for alpha chain variable domain of TCR clone 165120 (TRAV2, TRAJ32)
CCLLQWGGGGATNKLIF

SEQ ID NO: 330240 - protein, 13 aa, Homo sapiens
  CDR3 for beta chain variable domain of TCR clone 165120 (TRBV20-1, TRBJ1-1)
CSARGGGNTEAFF

SEQ ID NO: 330241 - protein, 13 aa, Homo sapiens
  CDR3 for alpha chain variable domain of TCR clone 165121 (TRAV21, TRAJ20)
CAVSRLGDYKLRF

SEQ ID NO: 330242 - protein, 13 aa, Homo sapiens
  CDR3 for beta chain variable domain of TCR clone 165121 (TRBV7-3, TRBJ1-1)
CASSPAGGLEAFF

SEQ ID NO: 330243 - protein, 13 aa, Homo sapiens
  CDR3 for alpha chain variable domain of TCR clone 165122 (TRAV12-1, TRAJ6)
CVVFPGGSYIPTF

SEQ ID NO: 330244 - protein, 12 aa, Homo sapiens
  CDR3 for beta chain variable domain of TCR clone 165122 (TRBV2, TRBJ2-1)
CAYGPPGNEQFF

SEQ ID NO: 330245 - protein, 13 aa, Homo sapiens
  CDR3 for alpha chain variable domain of TCR clone 165123 (TRAV22, TRAJ26)
CALEHNYGQNFVF

SEQ ID NO: 330246 - protein, 16 aa, Homo sapiens
  CDR3 for beta chain variable domain of TCR clone 165123 (TRBV7-2, TRBJ2-6)
RASSERRASGANVLTF

SEQ ID NO: 330247 - protein, 14 aa, Homo sapiens
  CDR3 for alpha chain variable domain of TCR clone 165124 (TRAV12-1, TRAJ26)
CVVKGGNYGQNFVF

SEQ ID NO: 330248 - protein, 17 aa, Homo sapiens
  CDR3 for beta chain variable domain of TCR clone 165124 (TRBV11-2, TRBJ2-6)
CASSQRDIFSGANVLTF

SEQ ID NO: 330249 - protein, 14 aa, Homo sapiens
  CDR3 for alpha chain variable domain of TCR clone 165125 (TRAV12-1, TRAJ43)
CVVNGRSSNNDMRF

SEQ ID NO: 330250 - protein, 13 aa, Homo sapiens
  CDR3 for beta chain variable domain of TCR clone 165125 (TRBV2, TRBJ1-4)
CASSELGVEKLFF

SEQ ID NO: 330251 - protein, 12 aa, Homo sapiens
  CDR3 for alpha chain variable domain of TCR clone 165126 (TRAV12-3, TRAJ17)
CAMTLTGNKQTF

SEQ ID NO: 330252 - protein, 15 aa, Homo sapiens
  CDR3 for beta chain variable domain of TCR clone 165126 (TRBV5-1, TRBJ2-1)
CASSPPRAPYNEQFF

SEQ ID NO: 330253 - protein, 15 aa, Homo sapiens
  CDR3 for alpha chain variable domain of TCR clone 165127 (TRAV2, TRAJ39)
CAVEDRRNAGTMLTF

SEQ ID NO: 330254 - protein, 16 aa, Homo sapiens
  CDR3 for beta chain variable domain of TCR clone 165127 (TRBV7-8, TRBJ2-7)
CASSLASGTSVYEQYF

SEQ ID NO: 330255 - protein, 15 aa, Homo sapiens
  CDR3 for alpha chain variable domain of TCR clone 165128 (TRAV26-1, TRAJ29)
CIVRVEGSGNTPLVF

SEQ ID NO: 330256 - protein, 14 aa, Homo sapiens
  CDR3 for beta chain variable domain of TCR clone 165128 (TRBV18, TRBJ1-2)
CASSPDRVVYGYTF

SEQ ID NO: 330257 - protein, 13 aa, Homo sapiens
  CDR3 for alpha chain variable domain of TCR clone 165129 (TRAV13-2, TRAJ13)
CADLSGGYQKVTF

SEQ ID NO: 330258 - protein, 13 aa, Homo sapiens
  CDR3 for beta chain variable domain of TCR clone 165129 (TRBV10-3, TRBJ2-7)
CASKLAVNYEQYF

SEQ ID NO: 330259 - protein, 16 aa, Homo sapiens
  CDR3 for alpha chain variable domain of TCR clone 165130 (TRAV17, TRAJ28)
CASYAYSGAGSYQLTF

SEQ ID NO: 330260 - protein, 19 aa, Homo sapiens
  CDR3 for beta chain variable domain of TCR clone 165130 (TRBV19, TRBJ2-2)
CASTRPGLAGGRVTGELFF

SEQ ID NO: 330261 - protein, 16 aa, Homo sapiens
  CDR3 for alpha chain variable domain of TCR clone 165131 (TRAV3, TRAJ18)
CAVRDGRGSTLGRLYF

SEQ ID NO: 330262 - protein, 14 aa, Homo sapiens
  CDR3 for beta chain variable domain of TCR clone 165131 (TRBV5-7, TRBJ1-1)
CASSNPGRNTEAFF

SEQ ID NO: 330263 - protein, 14 aa, Homo sapiens
  CDR3 for alpha chain variable domain of TCR clone 165132 (TRAV23/DV6, TRAJ13)
CAASETGGYQKVTF

SEQ ID NO: 330264 - protein, 14 aa, Homo sapiens
  CDR3 for beta chain variable domain of TCR clone 165132 (TRBV11-3, TRBJ2-5)
CASSPRTGQETQYF

SEQ ID NO: 330265 - protein, 12 aa, Homo sapiens
  CDR3 for alpha chain variable domain of TCR clone 165133 (TRAV1-1, TRAJ30)
CAVRGRDDKIIF

SEQ ID NO: 330266 - protein, 13 aa, Homo sapiens
  CDR3 for beta chain variable domain of TCR clone 165133 (TRBV11-3, TRBJ2-7)
CASSLDRLYEQYF

SEQ ID NO: 330267 - protein, 14 aa, Homo sapiens
  CDR3 for alpha chain variable domain of TCR clone 165134 (TRAV29/DV5, TRAJ45)
CAASFRGGADGLPF

SEQ ID NO: 330268 - protein, 11 aa, Homo sapiens
  CDR3 for beta chain variable domain of TCR clone 165134 (TRBV5-4, TRBJ1-1)
CARGQNTEAFF

SEQ ID NO: 330269 - protein, 16 aa, Homo sapiens
  CDR3 for alpha chain variable domain of TCR clone 165135 (TRAV8-3, TRAJ44)
CAVGTLMTVTASKLTF

SEQ ID NO: 330270 - protein, 13 aa, Homo sapiens
  CDR3 for beta chain variable domain of TCR clone 165135 (TRBV11-2, TRBJ2-1)
CASSLRLTHEQFF

SEQ ID NO: 330271 - protein, 14 aa, Homo sapiens
  CDR3 for alpha chain variable domain of TCR clone 165136 (TRAV12-3, TRAJ29)
CAMSFYSGNTTLVF

SEQ ID NO: 330272 - protein, 14 aa, Homo sapiens
  CDR3 for beta chain variable domain of TCR clone 165136 (TRBV7-2, TRBJ2-7)
CASRSQGAAYEQYF

SEQ ID NO: 330273 - protein, 12 aa, Homo sapiens
  CDR3 for alpha chain variable domain of TCR clone 165137 (TRAV8-3, TRAJ15)
CAGNQAGTALIF

SEQ ID NO: 330274 - protein, 16 aa, Homo sapiens
  CDR3 for beta chain variable domain of TCR clone 165137 (TRBV7-3, TRBJ2-2)
CASSLKRGTLSGELFF

SEQ ID NO: 330275 - protein, 14 aa, Homo sapiens
  CDR3 for alpha chain variable domain of TCR clone 165138 (TRAV23/DV6, TRAJ36)
CAASRRTGANNLFF

SEQ ID NO: 330276 - protein, 15 aa, Homo sapiens
  CDR3 for beta chain variable domain of TCR clone 165138 (TRBV5-1, TRBJ2-1)
GASSPPRAPYNEQFF

SEQ ID NO: 330277 - protein, 13 aa, Homo sapiens
  CDR3 for alpha chain variable domain of TCR clone 165139 (TRAV17, TRAJ54)
CATDARGAQKLVF

SEQ ID NO: 330278 - protein, 17 aa, Homo sapiens
  CDR3 for beta chain variable domain of TCR clone 165139 (TRBV7-8, TRBJ2-6)
CASSAGTGGAGANVLTF

SEQ ID NO: 330279 - protein, 14 aa, Homo sapiens
  CDR3 for alpha chain variable domain of TCR clone 165140 (TRAV21, TRAJ58)
CAVRRGKSGSRLTF

SEQ ID NO: 330280 - protein, 13 aa, Homo sapiens
  CDR3 for beta chain variable domain of TCR clone 165140 (TRBV7-2, TRBJ1-6)
CASSLKFDSPLHF

SEQ ID NO: 330281 - protein, 16 aa, Homo sapiens
  CDR3 for alpha chain variable domain of TCR clone 165141 (TRAV30, TRAJ24)
CGTEMVDADSWGKFQF

SEQ ID NO: 330282 - protein, 14 aa, Homo sapiens
  CDR3 for beta chain variable domain of TCR clone 165141 (TRBV7-2, TRBJ1-2)
CASSQTGSTYGYTF

SEQ ID NO: 330283 - protein, 13 aa, Homo sapiens
  CDR3 for alpha chain variable domain of TCR clone 165142 (TRAV3, TRAJ21)
CAVREPDFNKFYF

SEQ ID NO: 330284 - protein, 13 aa, Homo sapiens
  CDR3 for beta chain variable domain of TCR clone 165142 (TRBV12-5, TRBJ2-1)
CASGLGRGNEQFF

SEQ ID NO: 330285 - protein, 15 aa, Homo sapiens
  CDR3 for alpha chain variable domain of TCR clone 165143 (TRAV13-1, TRAJ10)
CAATILTGGGHKLTF

SEQ ID NO: 330286 - protein, 15 aa, Homo sapiens
  CDR3 for beta chain variable domain of TCR clone 165143 (TRBV2, TRBJ2-7)
CASTLLGSGATEQYF

SEQ ID NO: 330287 - protein, 11 aa, Homo sapiens
  CDR3 for alpha chain variable domain of TCR clone 165144 (TRAV1-2, TRAJ40)
CAVPGTYNNIF

SEQ ID NO: 330288 - protein, 16 aa, Homo sapiens
  CDR3 for beta chain variable domain of TCR clone 165144 (TRBV29-1, TRBJ2-7)
CSVEVVGTSGSYEQYF

SEQ ID NO: 330289 - protein, 12 aa, Homo sapiens
  CDR3 for alpha chain variable domain of TCR clone 165145 (TRAV21, TRAJ33)
CAKMDSNYQLIW

SEQ ID NO: 330290 - protein, 13 aa, Homo sapiens
  CDR3 for beta chain variable domain of TCR clone 165145 (TRBV12-4, TRBJ1-2)
CASSLRQGKGYTF

SEQ ID NO: 330291 - protein, 13 aa, Homo sapiens
  CDR3 for alpha chain variable domain of TCR clone 165146 (TRAV21, TRAJ8)
CAETNTGFRKLVF

SEQ ID NO: 330292 - protein, 14 aa, Homo sapiens
  CDR3 for beta chain variable domain of TCR clone 165146 (TRBV20-1, TRBJ2-1)
CSAQIGGSANEQFF

SEQ ID NO: 330293 - protein, 15 aa, Homo sapiens
  CDR3 for alpha chain variable domain of TCR clone 165147 (TRAV12-3, TRAJ49)
CAMTAPGNTGNQFYF

SEQ ID NO: 330294 - protein, 14 aa, Homo sapiens
  CDR3 for beta chain variable domain of TCR clone 165147 (TRBV11-2, TRBJ2-3)
CASSRLARTDTQYF

SEQ ID NO: 330295 - protein, 10 aa, Homo sapiens
  CDR3 for alpha chain variable domain of TCR clone 165148 (TRAV1-2, TRAJ20)
CALNDYKLSF

SEQ ID NO: 330296 - protein, 16 aa, Homo sapiens
  CDR3 for beta chain variable domain of TCR clone 165148 (TRBV20-1, TRBJ1-1)
CSARALTQGMNSEAFF

SEQ ID NO: 330297 - protein, 17 aa, Homo sapiens
  CDR3 for alpha chain variable domain of TCR clone 165149 (TRAV3, TRAJ6)
CAVRDGPRAGGSYIPTF

SEQ ID NO: 330298 - protein, 13 aa, Homo sapiens
  CDR3 for beta chain variable domain of TCR clone 165149 (TRBV28, TRBJ1-1)
CASSKQGWTEAFS

SEQ ID NO: 330299 - protein, 17 aa, Homo sapiens
  CDR3 for alpha chain variable domain of TCR clone 165150 (TRAV8-6, TRAJ4)
CAVSEKMVFGAGTRLAV

SEQ ID NO: 330300 - protein, 19 aa, Homo sapiens
  CDR3 for beta chain variable domain of TCR clone 165150 (TRBV28, TRBJ2-7)
CASSYSGTSRLGGVYEQYF

SEQ ID NO: 330301 - protein, 12 aa, Homo sapiens
  CDR3 for alpha chain variable domain of TCR clone 165151 (TRAV16, TRAJ22)
CALEVSARQLTF

SEQ ID NO: 330302 - protein, 14 aa, Homo sapiens
  CDR3 for beta chain variable domain of TCR clone 165151 (TRBV11-2, TRBJ2-3)
CASSRLARTDTQYF

SEQ ID NO: 330303 - protein, 12 aa, Homo sapiens
  CDR3 for alpha chain variable domain of TCR clone 165152 (TRAV12-1, TRAJ31)
CVSWNNNARLMF

SEQ ID NO: 330304 - protein, 15 aa, Homo sapiens
  CDR3 for beta chain variable domain of TCR clone 165152 (TRBV7-2, TRBJ1-5)
CASSLDRGQDQLQHF

SEQ ID NO: 330305 - protein, 14 aa, Homo sapiens
  CDR3 for alpha chain variable domain of TCR clone 165153 (TRAV12-2, TRAJ15)
CAPHTGQAGTALIF

SEQ ID NO: 330306 - protein, 15 aa, Homo sapiens
  CDR3 for beta chain variable domain of TCR clone 165153 (TRBV5-1, TRBJ2-1)
CASKGLAGVYNEQFF

SEQ ID NO: 330307 - protein, 16 aa, Homo sapiens
  CDR3 for alpha chain variable domain of TCR clone 165154 (TRAV8-3, TRAJ13)
CAVGAYPSGVYQKGTF

SEQ ID NO: 330308 - protein, 14 aa, Homo sapiens
  CDR3 for beta chain variable domain of TCR clone 165154 (TRBV18, TRBJ2-5)
CASSPRASSETQYF

SEQ ID NO: 330309 - protein, 16 aa, Homo sapiens
  CDR3 for alpha chain variable domain of TCR clone 165155 (TRAV3, TRAJ37)
CAVRGKGSGNTGKLIF

SEQ ID NO: 330310 - protein, 13 aa, Homo sapiens
  CDR3 for beta chain variable domain of TCR clone 165155 (TRBV25-1, TRBJ2-6)
CASRGPGANVLTF

SEQ ID NO: 330311 - protein, 12 aa, Homo sapiens
  CDR3 for alpha chain variable domain of TCR clone 165156 (TRAV13-1, TRAJ27)
CAAHTNAGKSTF

SEQ ID NO: 330312 - protein, 14 aa, Homo sapiens
  CDR3 for beta chain variable domain of TCR clone 165156 (TRBV19, TRBJ2-2)
CASSGQWIAGELFF

SEQ ID NO: 330313 - protein, 13 aa, Homo sapiens
  CDR3 for alpha chain variable domain of TCR clone 165157 (TRAV27, TRAJ41)
CAVRTQIPDILNP

SEQ ID NO: 330314 - protein, 16 aa, Homo sapiens
  CDR3 for beta chain variable domain of TCR clone 165157 (TRBV5-1, TRBJ2-3)
CASSLGLAVYTDTQYF

SEQ ID NO: 330315 - protein, 14 aa, Homo sapiens
  CDR3 for alpha chain variable domain of TCR clone 165158 (TRAV29/DV5, TRAJ34)
CAAGASRETDKLIF

SEQ ID NO: 330316 - protein, 15 aa, Homo sapiens
  CDR3 for beta chain variable domain of TCR clone 165158 (TRBV7-8, TRBJ2-7)
CASSLERAGSYEQYF

SEQ ID NO: 330317 - protein, 15 aa, Homo sapiens
  CDR3 for alpha chain variable domain of TCR clone 165159 (TRAV26-1, TRAJ29)
CIVRVEGSGNTPLVF

SEQ ID NO: 330318 - protein, 15 aa, Homo sapiens
  CDR3 for beta chain variable domain of TCR clone 165159 (TRBV7-9, TRBJ1-5)
CASSQGHHPNQPHHF

SEQ ID NO: 330319 - protein, 11 aa, Homo sapiens
  CDR3 for alpha chain variable domain of TCR clone 165160 (TRAV30, TRAJ23)
CGTEIAGKLIF

SEQ ID NO: 330320 - protein, 16 aa, Homo sapiens
  CDR3 for beta chain variable domain of TCR clone 165160 (TRBV7-2, TRBJ2-7)
CASSSQAASGGYEQYF

SEQ ID NO: 330321 - protein, 15 aa, Homo sapiens
  CDR3 for alpha chain variable domain of TCR clone 165161 (TRAV13-1, TRAJ36)
CAASRRQTGANNLFF

SEQ ID NO: 330322 - protein, 14 aa, Homo sapiens
  CDR3 for beta chain variable domain of TCR clone 165161 (TRBV6-1, TRBJ1-3)
CASVQGGGGNTIYF

SEQ ID NO: 330323 - protein, 15 aa, Homo sapiens
  CDR3 for alpha chain variable domain of TCR clone 165162 (TRAV3, TRAJ13)
CDVRVYSGGYQKVTF

SEQ ID NO: 330324 - protein, 15 aa, Homo sapiens
  CDR3 for beta chain variable domain of TCR clone 165162 (TRBV5-7, TRBJ1-2)
CASSLGVAANYGYTF

SEQ ID NO: 330325 - protein, 14 aa, Homo sapiens
  CDR3 for alpha chain variable domain of TCR clone 165163 (TRAV12-3, TRAJ10)
SHLPLTGGGNKLTF

SEQ ID NO: 330326 - protein, 13 aa, Homo sapiens
  CDR3 for beta chain variable domain of TCR clone 165163 (TRBV20-1, TRBJ1-6)
CSAPLGVRSPLHF

SEQ ID NO: 330327 - protein, 16 aa, Homo sapiens
  CDR3 for alpha chain variable domain of TCR clone 165164 (TRAV1-2, TRAJ10)
CAVRGVLTGGGNKLTF

SEQ ID NO: 330328 - protein, 16 aa, Homo sapiens
  CDR3 for beta chain variable domain of TCR clone 165164 (TRBV15, TRBJ2-3)
CATSRDLGIVTDTQYF

SEQ ID NO: 330329 - protein, 15 aa, Homo sapiens
  CDR3 for alpha chain variable domain of TCR clone 165165 (TRAV2, TRAJ15)
CAVGGPNQAGTVLIF

SEQ ID NO: 330330 - protein, 13 aa, Homo sapiens
  CDR3 for beta chain variable domain of TCR clone 165165 (TRBV2, TRBJ1-5)
CATAGPGNQPQHF

SEQ ID NO: 330331 - protein, 14 aa, Homo sapiens
  CDR3 for alpha chain variable domain of TCR clone 165166 (TRAV17, TRAJ22)
CATSPPGSARQLTF

SEQ ID NO: 330332 - protein, 13 aa, Homo sapiens
  CDR3 for beta chain variable domain of TCR clone 165166 (TRBV12-4, TRBJ1-2)
CASSLRQGKGYTF

SEQ ID NO: 330333 - protein, 15 aa, Homo sapiens
  CDR3 for alpha chain variable domain of TCR clone 165167 (TRAV29/DV5, TRAJ24)
CAASWATDSWGKFQF

SEQ ID NO: 330334 - protein, 12 aa, Homo sapiens
  CDR3 for beta chain variable domain of TCR clone 165167 (TRBV11-2, TRBJ2-2)
CASSLPTGELFF

SEQ ID NO: 330335 - protein, 13 aa, Homo sapiens
  CDR3 for alpha chain variable domain of TCR clone 165168 (TRAV21, TRAJ50)
CAAPKTSYDKVIF

SEQ ID NO: 330336 - protein, 19 aa, Homo sapiens
  CDR3 for beta chain variable domain of TCR clone 165168 (TRBV6-5, TRBJ2-1)
CASSYLGASGISSYNEQFF

SEQ ID NO: 330337 - protein, 14 aa, Homo sapiens
  CDR3 for alpha chain variable domain of TCR clone 165169 (TRAV38-1, TRAJ45)
CAYYSGGGADGLTF

SEQ ID NO: 330338 - protein, 14 aa, Homo sapiens
  CDR3 for beta chain variable domain of TCR clone 165169 (TRBV12-4, TRBJ1-1)
CASSLGTGGTEAFF

SEQ ID NO: 330339 - protein, 13 aa, Homo sapiens
  CDR3 for alpha chain variable domain of TCR clone 165170 (TRAV2, TRAJ40)
CAVVTSGTYKYIF

SEQ ID NO: 330340 - protein, 13 aa, Homo sapiens
  CDR3 for beta chain variable domain of TCR clone 165170 (TRBV19, TRBJ1-1)
CASSIGQNTEAFF

SEQ ID NO: 330341 - protein, 14 aa, Homo sapiens
  CDR3 for alpha chain variable domain of TCR clone 165171 (TRAV3, TRAJ36)
CAVRDGTGANNLFF

SEQ ID NO: 330342 - protein, 16 aa, Homo sapiens
  CDR3 for beta chain variable domain of TCR clone 165171 (TRBV20-1, TRBJ2-6)
CSAREGPVVGANVLTF

SEQ ID NO: 330343 - protein, 15 aa, Homo sapiens
  CDR3 for alpha chain variable domain of TCR clone 165172 (TRAV20, TRAJ53)
CAVQASGGSNYKLTF

SEQ ID NO: 330344 - protein, 15 aa, Homo sapiens
  CDR3 for beta chain variable domain of TCR clone 165172 (TRBV9, TRBJ2-1)
CASSLAGSSYKEQFF

SEQ ID NO: 330345 - protein, 13 aa, Homo sapiens
  CDR3 for alpha chain variable domain of TCR clone 165173 (TRAV1-1, TRAJ31)
CASYLNNNARLMF

SEQ ID NO: 330346 - protein, 13 aa, Homo sapiens
  CDR3 for beta chain variable domain of TCR clone 165173 (TRBV15, TRBJ1-6)
CATSAGLNSPLHF

SEQ ID NO: 330347 - protein, 13 aa, Homo sapiens
  CDR3 for alpha chain variable domain of TCR clone 165174 (TRAV1-1, TRAJ15)
CAVGDQAGTALIF

SEQ ID NO: 330348 - protein, 14 aa, Homo sapiens
  CDR3 for beta chain variable domain of TCR clone 165174 (TRBV5-4, TRBJ1-6)
CASSLWSDNSPLHF

SEQ ID NO: 330349 - protein, 10 aa, Homo sapiens
  CDR3 for alpha chain variable domain of TCR clone 165175 (TRAV23/DV6, TRAJ57)
CAASSTLSQC

SEQ ID NO: 330350 - protein, 14 aa, Homo sapiens
  CDR3 for beta chain variable domain of TCR clone 165175 (TRBV25-1, TRBJ1-1)
CASTHLGGNTEAFL

SEQ ID NO: 330351 - protein, 14 aa, Homo sapiens
  CDR3 for alpha chain variable domain of TCR clone 165176 (TRAV12-3, TRAJ41)
CAMSAGNSGYALNF

SEQ ID NO: 330352 - protein, 11 aa, Homo sapiens
  CDR3 for beta chain variable domain of TCR clone 165176 (TRBV7-2, TRBJ2-3)
CASSSSDTQYC

SEQ ID NO: 330353 - protein, 14 aa, Homo sapiens
  CDR3 for alpha chain variable domain of TCR clone 165177 (TRAV9-2, TRAJ39)
CALCIYNAGNMLTF

SEQ ID NO: 330354 - protein, 18 aa, Homo sapiens
  CDR3 for beta chain variable domain of TCR clone 165177 (TRBV20-1, TRBJ2-6)
CSAETTPTHGSGANVLTF

SEQ ID NO: 330355 - protein, 16 aa, Homo sapiens
  CDR3 for alpha chain variable domain of TCR clone 165178 (TRAV12-1, TRAJ22)
YVVNTISSGSARQLTF

SEQ ID NO: 330356 - protein, 13 aa, Homo sapiens
  CDR3 for beta chain variable domain of TCR clone 165178 (TRBV19, TRBJ2-1)
CASNGGVFSEQFF

SEQ ID NO: 330357 - protein, 18 aa, Homo sapiens
  CDR3 for alpha chain variable domain of TCR clone 165179 (TRAV21, TRAJ53)
CAVKGGESSGGSNYKLTL

SEQ ID NO: 330358 - protein, 14 aa, Homo sapiens
  CDR3 for beta chain variable domain of TCR clone 165179 (TRBV6-1, TRBJ1-5)
CASSAGAGSQPQHF

SEQ ID NO: 330359 - protein, 15 aa, Homo sapiens
  CDR3 for alpha chain variable domain of TCR clone 165180 (TRAV21, TRAJ45)
CAVSYSGGGADGLSF

SEQ ID NO: 330360 - protein, 13 aa, Homo sapiens
  CDR3 for beta chain variable domain of TCR clone 165180 (TRBV20-1, TRBJ2-5)
CSAATELQETQYF

SEQ ID NO: 330361 - protein, 14 aa, Homo sapiens
  CDR3 for alpha chain variable domain of TCR clone 165181 (TRAV8-2, TRAJ4)
CAVSPSGGYNKLIF

SEQ ID NO: 330362 - protein, 16 aa, Homo sapiens
  CDR3 for beta chain variable domain of TCR clone 165181 (TRBV7-3, TRBJ2-2)
CASSLKRGTLSGELFF

SEQ ID NO: 330363 - protein, 16 aa, Homo sapiens
  CDR3 for alpha chain variable domain of TCR clone 165182 (TRAV13-1, TRAJ45)
CAARGSRKGGADGLTF

SEQ ID NO: 330364 - protein, 13 aa, Homo sapiens
  CDR3 for beta chain variable domain of TCR clone 165182 (TRBV4-1, TRBJ2-2)
CASSQENTGELFF

SEQ ID NO: 330365 - protein, 14 aa, Homo sapiens
  CDR3 for alpha chain variable domain of TCR clone 165183 (TRAV12-1, TRAJ3)
CVVNPGSSASKIII

SEQ ID NO: 330366 - protein, 14 aa, Homo sapiens
  CDR3 for beta chain variable domain of TCR clone 165183 (TRBV20-1, TRBJ2-3)
CSARGGTSTDTQYF

SEQ ID NO: 330367 - protein, 16 aa, Homo sapiens
  CDR3 for alpha chain variable domain of TCR clone 165184 (TRAV4, TRAJ42)
CLVGPIYGGSQGNLIF

SEQ ID NO: 330368 - protein, 13 aa, Homo sapiens
  CDR3 for beta chain variable domain of TCR clone 165184 (TRBV7-9, TRBJ1-2)
CASSLKQNYGYTF

SEQ ID NO: 330369 - protein, 12 aa, Homo sapiens
  CDR3 for alpha chain variable domain of TCR clone 165185 (TRAV3, TRAJ27)
CAVSDKAVKSTF

SEQ ID NO: 330370 - protein, 14 aa, Homo sapiens
  CDR3 for beta chain variable domain of TCR clone 165185 (TRBV5-1, TRBJ1-2)
CASSVDSTNYGYTF

SEQ ID NO: 330371 - protein, 19 aa, Homo sapiens
  CDR3 for alpha chain variable domain of TCR clone 165186 (TRAV1-2, TRAJ26)
CLLPLCCERPDNYGQNFVF

SEQ ID NO: 330372 - protein, 17 aa, Homo sapiens
  CDR3 for beta chain variable domain of TCR clone 165186 (TRBV28, TRBJ2-5)
CASSRRGGLAGAETQYF

SEQ ID NO: 330373 - protein, 16 aa, Homo sapiens
  CDR3 for alpha chain variable domain of TCR clone 165187 (TRAV12-3, TRAJ53)
CAMSTGSGGSNYKLTF

SEQ ID NO: 330374 - protein, 11 aa, Homo sapiens
  CDR3 for beta chain variable domain of TCR clone 165187 (TRBV29-1, TRBJ2-5)
CSEDRTGNQYF

SEQ ID NO: 330375 - protein, 12 aa, Homo sapiens
  CDR3 for alpha chain variable domain of TCR clone 165188 (TRAV13-1, TRAJ21)
CAAKEGFNKFYF

SEQ ID NO: 330376 - protein, 15 aa, Homo sapiens
  CDR3 for beta chain variable domain of TCR clone 165188 (TRBV4-3, TRBJ1-1)
CASSQELGRGTEAFF

SEQ ID NO: 330377 - protein, 15 aa, Homo sapiens
  CDR3 for alpha chain variable domain of TCR clone 165189 (TRAV13-1, TRAJ5)
CAASPRGHGQESTFF

SEQ ID NO: 330378 - protein, 17 aa, Homo sapiens
  CDR3 for beta chain variable domain of TCR clone 165189 (TRBV3-1, TRBJ2-2)
CASSQFRDKVDTGELFF

SEQ ID NO: 330379 - protein, 14 aa, Homo sapiens
  CDR3 for alpha chain variable domain of TCR clone 165190 (TRAV26-1, TRAJ44)
CIARTTGTASKLTF

SEQ ID NO: 330380 - protein, 17 aa, Homo sapiens
  CDR3 for beta chain variable domain of TCR clone 165190 (TRBV7-3, TRBJ2-3)
CASSRGLAGEVPDTQYF

SEQ ID NO: 330381 - protein, 17 aa, Homo sapiens
  CDR3 for alpha chain variable domain of TCR clone 165191 (TRAV3, TRAJ28)
CAVREAYSGAGSYRLTF

SEQ ID NO: 330382 - protein, 14 aa, Homo sapiens
  CDR3 for beta chain variable domain of TCR clone 165191 (TRBV7-2, TRBJ2-7)
CASSPKTSFYEQYF

SEQ ID NO: 330383 - protein, 14 aa, Homo sapiens
  CDR3 for alpha chain variable domain of TCR clone 165192 (TRAV13-1, TRAJ35)
CAASKGGFGNVLHC

SEQ ID NO: 330384 - protein, 14 aa, Homo sapiens
  CDR3 for beta chain variable domain of TCR clone 165192 (TRBV7-2, TRBJ2-7)
CASSPKISFYEQYF

SEQ ID NO: 330385 - protein, 13 aa, Homo sapiens
  CDR3 for alpha chain variable domain of TCR clone 165193 (TRAV21, TRAJ45)
CAVPGGGADGLTF

SEQ ID NO: 330386 - protein, 13 aa, Homo sapiens
  CDR3 for beta chain variable domain of TCR clone 165193 (TRBV9, TRBJ2-1)
CASSVGQGGEQFF

SEQ ID NO: 330387 - protein, 14 aa, Homo sapiens
  CDR3 for alpha chain variable domain of TCR clone 165194 (TRAV17, TRAJ9)
CATVTLGGGFKTIF

SEQ ID NO: 330388 - protein, 14 aa, Homo sapiens
  CDR3 for beta chain variable domain of TCR clone 165194 (TRBV6-3, TRBJ1-1)
CASSYQRRDTEAFF

SEQ ID NO: 330389 - protein, 13 aa, Homo sapiens
  CDR3 for alpha chain variable domain of TCR clone 165195 (TRAV17, TRAJ33)
CATGADSNYQLIW

SEQ ID NO: 330390 - protein, 17 aa, Homo sapiens
  CDR3 for beta chain variable domain of TCR clone 165195 (TRBV20-1, TRBJ2-3)
CSAVSPGLAGGQDTQYF

SEQ ID NO: 330391 - protein, 17 aa, Homo sapiens
  CDR3 for alpha chain variable domain of TCR clone 165196 (TRAV3, TRAJ38)
CAVRDCLNADNNRKLIW

SEQ ID NO: 330392 - protein, 13 aa, Homo sapiens
  CDR3 for beta chain variable domain of TCR clone 165196 (TRBV19, TRBJ1-2)
CASSVPGQDGYTF

SEQ ID NO: 330393 - protein, 14 aa, Homo sapiens
  CDR3 for alpha chain variable domain of TCR clone 165197 (TRAV26-2, TRAJ32)
CCVGYGGATNKLIF

SEQ ID NO: 330394 - protein, 17 aa, Homo sapiens
  CDR3 for beta chain variable domain of TCR clone 165197 (TRBV20-1, TRBJ2-2)
CSASGSGQGGLTGELFF

SEQ ID NO: 330395 - protein, 15 aa, Homo sapiens
  CDR3 for alpha chain variable domain of TCR clone 165198 (TRAV3, TRAJ4)
CAVRDGTGGYNKLSF

SEQ ID NO: 330396 - protein, 15 aa, Homo sapiens
  CDR3 for beta chain variable domain of TCR clone 165198 (TRBV27, TRBJ2-7)
CASSPDQGRLYEQHF

SEQ ID NO: 330397 - protein, 11 aa, Homo sapiens
  CDR3 for alpha chain variable domain of TCR clone 165199 (TRAV1-1, TRAJ23)
CAVRQGGKLIF

SEQ ID NO: 330398 - protein, 15 aa, Homo sapiens
  CDR3 for beta chain variable domain of TCR clone 165199 (TRBV5-1, TRBJ1-1)
CASSFTGGWNTEAFF

SEQ ID NO: 330399 - protein, 13 aa, Homo sapiens
  CDR3 for alpha chain variable domain of TCR clone 165200 (TRAV1-2, TRAJ9)
CAVLNTGGFKTIF

SEQ ID NO: 330400 - protein, 16 aa, Homo sapiens
  CDR3 for beta chain variable domain of TCR clone 165200 (TRBV12-5, TRBJ2-5)
CASGPRTSGNQETQYF

SEQ ID NO: 330401 - protein, 16 aa, Homo sapiens
  CDR3 for alpha chain variable domain of TCR clone 165201 (TRAV35, TRAJ28)
CAGQKYSGAGSYQLTF

SEQ ID NO: 330402 - protein, 13 aa, Homo sapiens
  CDR3 for beta chain variable domain of TCR clone 165201 (TRBV19, TRBJ1-2)
CASSQEQVYGYTF

SEQ ID NO: 330403 - protein, 11 aa, Homo sapiens
  CDR3 for alpha chain variable domain of TCR clone 165202 (TRAV12-2, TRAJ49)
CAVDTGNQFYF

SEQ ID NO: 330404 - protein, 14 aa, Homo sapiens
  CDR3 for beta chain variable domain of TCR clone 165202 (TRBV20-1, TRBJ1-1)
CSAQTRIGGTEAFF

SEQ ID NO: 330405 - protein, 13 aa, Homo sapiens
  CDR3 for alpha chain variable domain of TCR clone 165203 (TRAV1-2, TRAJ9)
CAVLNTVGFKTIF

SEQ ID NO: 330406 - protein, 14 aa, Homo sapiens
  CDR3 for beta chain variable domain of TCR clone 165203 (TRBV5-1, TRBJ2-2)
CASSLGGGSGELFF

SEQ ID NO: 330407 - protein, 13 aa, Homo sapiens
  CDR3 for alpha chain variable domain of TCR clone 165204 (TRAV6, TRAJ16)
CAIDDSDGQKLLF

SEQ ID NO: 330408 - protein, 15 aa, Homo sapiens
  CDR3 for beta chain variable domain of TCR clone 165204 (TRBV5-1, TRBJ2-1)
CASSPPRAPYNEQFF

SEQ ID NO: 330409 - protein, 16 aa, Homo sapiens
  CDR3 for alpha chain variable domain of TCR clone 165205 (TRAV4, TRAJ18)
CCVLLIGGSTLGRLYF

SEQ ID NO: 330410 - protein, 13 aa, Homo sapiens
  CDR3 for beta chain variable domain of TCR clone 165205 (TRBV20-1, TRBJ2-1)
CSASTGTSNEQFF

SEQ ID NO: 330411 - protein, 12 aa, Homo sapiens
  CDR3 for alpha chain variable domain of TCR clone 165206 (TRAV13-1, TRAJ20)
CAASRGDYKLSF

SEQ ID NO: 330412 - protein, 15 aa, Homo sapiens
  CDR3 for beta chain variable domain of TCR clone 165206 (TRBV11-2, TRBJ2-1)
CASSKNRGLIYEQFF

SEQ ID NO: 330413 - protein, 12 aa, Homo sapiens
  CDR3 for alpha chain variable domain of TCR clone 165207 (TRAV12-3, TRAJ17)
CAMTLTGNKLTF

SEQ ID NO: 330414 - protein, 15 aa, Homo sapiens
  CDR3 for beta chain variable domain of TCR clone 165207 (TRBV20-1, TRBJ2-7)
CSARDRVYEMDEQYF

SEQ ID NO: 330415 - protein, 11 aa, Homo sapiens
  CDR3 for alpha chain variable domain of TCR clone 165208 (TRAV13-1, TRAJ52)
PGGTSYGKLTF

SEQ ID NO: 330416 - protein, 16 aa, Homo sapiens
  CDR3 for beta chain variable domain of TCR clone 165208 (TRBV20-1, TRBJ1-4)
CSAPGQGLLTNEKLFF

SEQ ID NO: 330417 - protein, 13 aa, Homo sapiens
  CDR3 for alpha chain variable domain of TCR clone 165209 (TRAV12-2, TRAJ12)
CAVNWDSSYKLIF

SEQ ID NO: 330418 - protein, 14 aa, Homo sapiens
  CDR3 for beta chain variable domain of TCR clone 165209 (TRBV11-2, TRBJ1-2)
CASSLGTANYGYTF

SEQ ID NO: 330419 - protein, 14 aa, Homo sapiens
  CDR3 for alpha chain variable domain of TCR clone 165210 (TRAV21, TRAJ32)
CCGDYGGATNTLIF

SEQ ID NO: 330420 - protein, 13 aa, Homo sapiens
  CDR3 for beta chain variable domain of TCR clone 165210 (TRBV2, TRBJ1-6)
CASGRGGISPLHF

SEQ ID NO: 330421 - protein, 13 aa, Homo sapiens
  CDR3 for alpha chain variable domain of TCR clone 165211 (TRAV8-4, TRAJ29)
CAVSATGNTPLVF

SEQ ID NO: 330422 - protein, 11 aa, Homo sapiens
  CDR3 for beta chain variable domain of TCR clone 165211 (TRBV12-4, TRBJ2-3)
CASTATDTQYF

SEQ ID NO: 330423 - protein, 13 aa, Homo sapiens
  CDR3 for alpha chain variable domain of TCR clone 165212 (TRAV21, TRAJ27)
CAARPGNAGKSTF

SEQ ID NO: 330424 - protein, 19 aa, Homo sapiens
  CDR3 for beta chain variable domain of TCR clone 165212 (TRBV7-2, TRBJ2-7)
CASSQRAAGPGTSFYEQYF

SEQ ID NO: 330425 - protein, 23 aa, Homo sapiens
  CDR3 for alpha chain variable domain of TCR clone 165213 (TRAV41, TRAJ32)
CAVRIMVGLQTSSSLELALCLLS

SEQ ID NO: 330426 - protein, 15 aa, Homo sapiens
  CDR3 for beta chain variable domain of TCR clone 165213 (TRBV11-2, TRBJ2-1)
CASSKNRGLIYEQFF

SEQ ID NO: 330427 - protein, 12 aa, Homo sapiens
  CDR3 for alpha chain variable domain of TCR clone 165214 (TRAV12-3, TRAJ17)
CAMTLTGNKLTF

SEQ ID NO: 330428 - protein, 14 aa, Homo sapiens
  CDR3 for beta chain variable domain of TCR clone 165214 (TRBV13, TRBJ2-5)
CASSLERVGETQYF

SEQ ID NO: 330429 - protein, 14 aa, Homo sapiens
  CDR3 for alpha chain variable domain of TCR clone 165215 (TRAV16, TRAJ15)
CALSFNQAGTALIF

SEQ ID NO: 330430 - protein, 13 aa, Homo sapiens
  CDR3 for beta chain variable domain of TCR clone 165215 (TRBV9, TRBJ2-1)
CASSVGQGGEQFF

SEQ ID NO: 330431 - protein, 16 aa, Homo sapiens
  CDR3 for alpha chain variable domain of TCR clone 165216 (TRAV23/DV6, TRAJ3)
CSKHAVPYSSASKIIF

SEQ ID NO: 330432 - protein, 15 aa, Homo sapiens
  CDR3 for beta chain variable domain of TCR clone 165216 (TRBV27, TRBJ2-1)
CASSNGGGSSNEQFF

SEQ ID NO: 330433 - protein, 14 aa, Homo sapiens
  CDR3 for alpha chain variable domain of TCR clone 165217 (TRAV13-2, TRAJ17)
CAENSKAAGNKLTF

SEQ ID NO: 330434 - protein, 14 aa, Homo sapiens
  CDR3 for beta chain variable domain of TCR clone 165217 (TRBV19, TRBJ2-2)
CASSMVGLSGELFF

SEQ ID NO: 330435 - protein, 16 aa, Homo sapiens
  CDR3 for alpha chain variable domain of TCR clone 165218 (TRAV3, TRAJ37)
CAVRGKGSGNTGKLIF

SEQ ID NO: 330436 - protein, 13 aa, Homo sapiens
  CDR3 for beta chain variable domain of TCR clone 165218 (TRBV19, TRBJ1-1)
CASSPSNGGEAFF

SEQ ID NO: 330437 - protein, 16 aa, Homo sapiens
  CDR3 for alpha chain variable domain of TCR clone 165219 (TRAV27, TRAJ13)
CAGAKSDSGGYQKVTF

SEQ ID NO: 330438 - protein, 15 aa, Homo sapiens
  CDR3 for beta chain variable domain of TCR clone 165219 (TRBV3-1, TRBJ1-2)
CASSRTRLPEGGYTF

SEQ ID NO: 330439 - protein, 11 aa, Homo sapiens
  CDR3 for alpha chain variable domain of TCR clone 165220 (TRAV16, TRAJ33)
CALHSNYQLIW

SEQ ID NO: 330440 - protein, 15 aa, Homo sapiens
  CDR3 for beta chain variable domain of TCR clone 165220 (TRBV7-9, TRBJ2-1)
CASSLGWGRANEQFL

SEQ ID NO: 330441 - protein, 14 aa, Homo sapiens
  CDR3 for alpha chain variable domain of TCR clone 165221 (TRAV12-2, TRAJ13)
CAVKKTGGYQKVTF

SEQ ID NO: 330442 - protein, 17 aa, Homo sapiens
  CDR3 for beta chain variable domain of TCR clone 165221 (TRBV7-9, TRBJ2-7)
CASSPTLSWGPDYEQYF

SEQ ID NO: 330443 - protein, 18 aa, Homo sapiens
  CDR3 for alpha chain variable domain of TCR clone 165222 (TRAV26-1, TRAJ23)
CIVRVGLEVWNQGGKLIF

SEQ ID NO: 330444 - protein, 16 aa, Homo sapiens
  CDR3 for beta chain variable domain of TCR clone 165222 (TRBV12-4, TRBJ2-5)
CASSCFVRGRQETQYV

SEQ ID NO: 330445 - protein, 13 aa, Homo sapiens
  CDR3 for alpha chain variable domain of TCR clone 165223 (TRAV12-3, TRAJ13)
CAMGTGGYQRVTF

SEQ ID NO: 330446 - protein, 14 aa, Homo sapiens
  CDR3 for beta chain variable domain of TCR clone 165223 (TRBV7-2, TRBJ2-5)
CASSTGGELKTQYF

SEQ ID NO: 330447 - protein, 13 aa, Homo sapiens
  CDR3 for alpha chain variable domain of TCR clone 165224 (TRAV12-2, TRAJ9)
CAVLENGGFKTIF

SEQ ID NO: 330448 - protein, 15 aa, Homo sapiens
  CDR3 for beta chain variable domain of TCR clone 165224 (TRBV6-3, TRBJ2-7)
CASSRTGANLYEQYF

SEQ ID NO: 330449 - protein, 14 aa, Homo sapiens
  CDR3 for alpha chain variable domain of TCR clone 165225 (TRAV8-2, TRAJ23)
CVVSDDNQGGKLNF

SEQ ID NO: 330450 - protein, 16 aa, Homo sapiens
  CDR3 for beta chain variable domain of TCR clone 165225 (TRBV4-2, TRBJ2-5)
CASSQELVGSQETQYF

SEQ ID NO: 330451 - protein, 10 aa, Homo sapiens
  CDR3 for alpha chain variable domain of TCR clone 165226 (TRAV8-4, TRAJ43)
CAVSADDMRF

SEQ ID NO: 330452 - protein, 14 aa, Homo sapiens
  CDR3 for beta chain variable domain of TCR clone 165226 (TRBV15, TRBJ2-5)
CATSSTGYQETQYF

SEQ ID NO: 330453 - protein, 13 aa, Homo sapiens
  CDR3 for alpha chain variable domain of TCR clone 165227 (TRAV2, TRAJ16)
CAVEFGEGQKLLF

SEQ ID NO: 330454 - protein, 14 aa, Homo sapiens
  CDR3 for beta chain variable domain of TCR clone 165227 (TRBV6-3, TRBJ2-5)
CASSYSLREKTQYF

SEQ ID NO: 330455 - protein, 10 aa, Homo sapiens
  CDR3 for alpha chain variable domain of TCR clone 165228 (TRAV1-2, TRAJ23)
CAGQGGKLIF

SEQ ID NO: 330456 - protein, 14 aa, Homo sapiens
  CDR3 for beta chain variable domain of TCR clone 165228 (TRBV6-1, TRBJ1-3)
CASVQGVGGNTIYF

SEQ ID NO: 330457 - protein, 13 aa, Homo sapiens
  CDR3 for alpha chain variable domain of TCR clone 165229 (TRAV12-1, TRAJ9)
CVVLNTGGFKTIF

SEQ ID NO: 330458 - protein, 13 aa, Homo sapiens
  CDR3 for beta chain variable domain of TCR clone 165229 (TRBV20-1, TRBJ1-1)
CSARGGGNTEALF

SEQ ID NO: 330459 - protein, 14 aa, Homo sapiens
  CDR3 for alpha chain variable domain of TCR clone 165230 (TRAV17, TRAJ56)
CATVPAGANSKLTF

SEQ ID NO: 330460 - protein, 18 aa, Homo sapiens
  CDR3 for beta chain variable domain of TCR clone 165230 (TRBV11-2, TRBJ2-3)
CASSLGGASRGAPNTQYF

SEQ ID NO: 330461 - protein, 14 aa, Homo sapiens
  CDR3 for alpha chain variable domain of TCR clone 165231 (TRAV8-3, TRAJ40)
CAVGVISGTYKYIF

SEQ ID NO: 330462 - protein, 16 aa, Homo sapiens
  CDR3 for beta chain variable domain of TCR clone 165231 (TRBV7-3, TRBJ2-2)
CASSLKRGTLSGELFF

SEQ ID NO: 330463 - protein, 11 aa, Homo sapiens
  CDR3 for alpha chain variable domain of TCR clone 165232 (TRAV12-3, TRAJ43)
CAMSISNDMRF

SEQ ID NO: 330464 - protein, 14 aa, Homo sapiens
  CDR3 for beta chain variable domain of TCR clone 165232 (TRBV20-1, TRBJ1-1)
SAVLHLGGGTEAFF

SEQ ID NO: 330465 - protein, 14 aa, Homo sapiens
  CDR3 for alpha chain variable domain of TCR clone 165233 (TRAV3, TRAJ33)
CDVRDMGSNYQLIW

SEQ ID NO: 330466 - protein, 17 aa, Homo sapiens
  CDR3 for beta chain variable domain of TCR clone 165233 (TRBV19, TRBJ2-1)
CASSIWSAQPTHNEQFF

SEQ ID NO: 330467 - protein, 14 aa, Homo sapiens
  CDR3 for alpha chain variable domain of TCR clone 165234 (TRAV16, TRAJ31)
CALSGRNSNARLMF

SEQ ID NO: 330468 - protein, 12 aa, Homo sapiens
  CDR3 for beta chain variable domain of TCR clone 165234 (TRBV11-2, TRBJ1-2)
CASSREGDGYTF

SEQ ID NO: 330469 - protein, 15 aa, Homo sapiens
  CDR3 for alpha chain variable domain of TCR clone 165235 (TRAV21, TRAJ40)
CAVRPQTSGTYKYIF

SEQ ID NO: 330470 - protein, 16 aa, Homo sapiens
  CDR3 for beta chain variable domain of TCR clone 165235 (TRBV20-1, TRBJ1-2)
CSASMGQGVANYGYTF

SEQ ID NO: 330471 - protein, 13 aa, Homo sapiens
  CDR3 for alpha chain variable domain of TCR clone 165236 (TRAV26-1, TRAJ48)
CIVRVVGDEKLTF

SEQ ID NO: 330472 - protein, 16 aa, Homo sapiens
  CDR3 for beta chain variable domain of TCR clone 165236 (TRBV12-5, TRBJ2-5)
CASGPRTSGNQGTQYF

SEQ ID NO: 330473 - protein, 12 aa, Homo sapiens
  CDR3 for alpha chain variable domain of TCR clone 165237 (TRAV13-1, TRAJ15)
CAASQAGTALIF

SEQ ID NO: 330474 - protein, 19 aa, Homo sapiens
  CDR3 for beta chain variable domain of TCR clone 165237 (TRBV25-1, TRBJ2-2)
CAILVYRVDRGRKTGELFF

SEQ ID NO: 330475 - protein, 16 aa, Homo sapiens
  CDR3 for alpha chain variable domain of TCR clone 165238 (TRAV13-1, TRAJ40)
GAASIATTSGTYKYIF

SEQ ID NO: 330476 - protein, 14 aa, Homo sapiens
  CDR3 for beta chain variable domain of TCR clone 165238 (TRBV6-1, TRBJ1-3)
CASVQGGGGNTIYF

SEQ ID NO: 330477 - protein, 13 aa, Homo sapiens
  CDR3 for alpha chain variable domain of TCR clone 165239 (TRAV1-2, TRAJ9)
CAVQNTGGFKTIF

SEQ ID NO: 330478 - protein, 17 aa, Homo sapiens
  CDR3 for beta chain variable domain of TCR clone 165239 (TRBV13, TRBJ2-3)
CASSLSRVAGGEEYAVF

SEQ ID NO: 330479 - protein, 15 aa, Homo sapiens
  CDR3 for alpha chain variable domain of TCR clone 165240 (TRAV8-3, TRAJ45)
CASSYTGGGADGLTF

SEQ ID NO: 330480 - protein, 12 aa, Homo sapiens
  CDR3 for beta chain variable domain of TCR clone 165240 (TRBV12-4, TRBJ2-7)
CASSLGGYEQYF

SEQ ID NO: 330481 - protein, 13 aa, Homo sapiens
  CDR3 for alpha chain variable domain of TCR clone 165241 (TRAV27, TRAJ56)
CAGLTGANSKLTF

SEQ ID NO: 330482 - protein, 15 aa, Homo sapiens
  CDR3 for beta chain variable domain of TCR clone 165241 (TRBV6-3, TRBJ2-7)
CASSSPGTVFYEQYF

SEQ ID NO: 330483 - protein, 12 aa, Homo sapiens
  CDR3 for alpha chain variable domain of TCR clone 165242 (TRAV12-1, TRAJ40)
CVFYSGTYKYIF

SEQ ID NO: 330484 - protein, 12 aa, Homo sapiens
  CDR3 for beta chain variable domain of TCR clone 165242 (TRBV7-3, TRBJ2-1)
CASSVINNEQFF

SEQ ID NO: 330485 - protein, 15 aa, Homo sapiens
  CDR3 for alpha chain variable domain of TCR clone 165243 (TRAV13-2, TRAJ28)
CRESYSGAGSYQLTF

SEQ ID NO: 330486 - protein, 16 aa, Homo sapiens
  CDR3 for beta chain variable domain of TCR clone 165243 (TRBV19, TRBJ2-1)
CASSKAGPSSYNEQFF

SEQ ID NO: 330487 - protein, 16 aa, Homo sapiens
  CDR3 for alpha chain variable domain of TCR clone 165244 (TRAV23/DV6, TRAJ9)
CAASIGGNTGGSKTIF

SEQ ID NO: 330488 - protein, 17 aa, Homo sapiens
  CDR3 for beta chain variable domain of TCR clone 165244 (TRBV13, TRBJ2-3)
CASSLSRVAGGRNTQYF

SEQ ID NO: 330489 - protein, 11 aa, Homo sapiens
  CDR3 for alpha chain variable domain of TCR clone 165245 (TRAV12-3, TRAJ17)
CNDATGNKLTF

SEQ ID NO: 330490 - protein, 15 aa, Homo sapiens
  CDR3 for beta chain variable domain of TCR clone 165245 (TRBV20-1, TRBJ2-7)
CSPRDRVSGMDEQYF

SEQ ID NO: 330491 - protein, 13 aa, Homo sapiens
  CDR3 for alpha chain variable domain of TCR clone 165246 (TRAV13-2, TRAJ20)
CAEKSWNDYKLSF

SEQ ID NO: 330492 - protein, 18 aa, Homo sapiens
  CDR3 for beta chain variable domain of TCR clone 165246 (TRBV4-1, TRBJ1-5)
CASSQDPRGQGLNQPQHF

SEQ ID NO: 330493 - protein, 12 aa, Homo sapiens
  CDR3 for alpha chain variable domain of TCR clone 165247 (TRAV17, TRAJ30)
CATDARDDKIIF

SEQ ID NO: 330494 - protein, 15 aa, Homo sapiens
  CDR3 for beta chain variable domain of TCR clone 165247 (TRBV5-1, TRBJ2-1)
CASSPPRAPYNEQFF

SEQ ID NO: 330495 - protein, 15 aa, Homo sapiens
  CDR3 for alpha chain variable domain of TCR clone 165248 (TRAV9-2, TRAJ56)
CALSDVDGANSKLTF

SEQ ID NO: 330496 - protein, 16 aa, Homo sapiens
  CDR3 for beta chain variable domain of TCR clone 165248 (TRBV27, TRBJ2-2)
CASSFRGLVRTGELFF

SEQ ID NO: 330497 - protein, 15 aa, Homo sapiens
  CDR3 for alpha chain variable domain of TCR clone 165249 (TRAV27, TRAJ38)
CAARRNAGNNRKRIW

SEQ ID NO: 330498 - protein, 13 aa, Homo sapiens
  CDR3 for beta chain variable domain of TCR clone 165249 (TRBV12-5, TRBJ2-3)
CASGDRQSGTQYF

SEQ ID NO: 330499 - protein, 10 aa, Homo sapiens
  CDR3 for alpha chain variable domain of TCR clone 165250 (TRAV9-2, TRAJ49)
CALTGNQIYF

SEQ ID NO: 330500 - protein, 16 aa, Homo sapiens
  CDR3 for beta chain variable domain of TCR clone 165250 (TRBV19, TRBJ2-3)
CASSPGAASRTDTQYF

SEQ ID NO: 330501 - protein, 13 aa, Homo sapiens
  CDR3 for alpha chain variable domain of TCR clone 165251 (TRAV8-6, TRAJ9)
CAVWDTVGFKTIF

SEQ ID NO: 330502 - protein, 14 aa, Homo sapiens
  CDR3 for beta chain variable domain of TCR clone 165251 (TRBV2, TRBJ2-1)
CASSEALIYNEQFF

SEQ ID NO: 330503 - protein, 15 aa, Homo sapiens
  CDR3 for alpha chain variable domain of TCR clone 165252 (TRAV8-3, TRAJ20)
CAVEAKGSNDYKLSF

SEQ ID NO: 330504 - protein, 13 aa, Homo sapiens
  CDR3 for beta chain variable domain of TCR clone 165252 (TRBV28, TRBJ2-7)
CASSLPSRYEQYC

SEQ ID NO: 330505 - protein, 12 aa, Homo sapiens
  CDR3 for alpha chain variable domain of TCR clone 165253 (TRAV13-2, TRAJ23)
CAERHRGGKLIF

SEQ ID NO: 330506 - protein, 12 aa, Homo sapiens
  CDR3 for beta chain variable domain of TCR clone 165253 (TRBV7-3, TRBJ2-1)
CGGGFVGCVTLF

SEQ ID NO: 330507 - protein, 13 aa, Homo sapiens
  CDR3 for alpha chain variable domain of TCR clone 165254 (TRAV2, TRAJ15)
CAVASQAGTALIF

SEQ ID NO: 330508 - protein, 17 aa, Homo sapiens
  CDR3 for beta chain variable domain of TCR clone 165254 (TRBV20-1, TRBJ2-2)
CSASGSGHGGLTGELFF

SEQ ID NO: 330509 - protein, 12 aa, Homo sapiens
  CDR3 for alpha chain variable domain of TCR clone 165255 (TRAV25, TRAJ11)
CAGASGYSTLTF

SEQ ID NO: 330510 - protein, 15 aa, Homo sapiens
  CDR3 for beta chain variable domain of TCR clone 165255 (TRBV9, TRBJ1-6)
CDSSVAGTGDSPLHF

SEQ ID NO: 330511 - protein, 23 aa, Homo sapiens
  CDR3 for alpha chain variable domain of TCR clone 165256 (TRAV26-1, TRAJ38)
CIADNAGNNHIHNPDPAVYQLRD

SEQ ID NO: 330512 - protein, 14 aa, Homo sapiens
  CDR3 for beta chain variable domain of TCR clone 165256 (TRBV7-2, TRBJ2-7)
CASRSQGAAYEQYF

SEQ ID NO: 330513 - protein, 15 aa, Homo sapiens
  CDR3 for alpha chain variable domain of TCR clone 165257 (TRAV29/DV5, TRAJ42)
CAAKTDGGSRGNLIF

SEQ ID NO: 330514 - protein, 15 aa, Homo sapiens
  CDR3 for beta chain variable domain of TCR clone 165257 (TRBV5-1, TRBJ2-2)
CASSSQGGNTGELFF

SEQ ID NO: 330515 - protein, 14 aa, Homo sapiens
  CDR3 for alpha chain variable domain of TCR clone 165258 (TRAV39, TRAJ28)
CASGYWGWELPTHF

SEQ ID NO: 330516 - protein, 13 aa, Homo sapiens
  CDR3 for beta chain variable domain of TCR clone 165258 (TRBV11-2, TRBJ2-1)
CASSSEAYNEQFF

SEQ ID NO: 330517 - protein, 17 aa, Homo sapiens
  CDR3 for alpha chain variable domain of TCR clone 165259 (TRAV3, TRAJ6)
CAVRDGPRAGGSYIPTF

SEQ ID NO: 330518 - protein, 17 aa, Homo sapiens
  CDR3 for beta chain variable domain of TCR clone 165259 (TRBV24-1, TRBJ2-3)
CATSDLPSGEDTDTQYF

SEQ ID NO: 330519 - protein, 17 aa, Homo sapiens
  CDR3 for alpha chain variable domain of TCR clone 165260 (TRAV8-2, )
CVVNIQNPNPAVYQLRD

SEQ ID NO: 330520 - protein, 12 aa, Homo sapiens
  CDR3 for beta chain variable domain of TCR clone 165260 (TRBV11-2, TRBJ2-2)
CASSLGGGELFF

SEQ ID NO: 330521 - protein, 13 aa, Homo sapiens
  CDR3 for alpha chain variable domain of TCR clone 165261 (TRAV26-1, TRAJ29)
CIVRRSGNTPLVF

SEQ ID NO: 330522 - protein, 17 aa, Homo sapiens
  CDR3 for beta chain variable domain of TCR clone 165261 (TRBV5-4, TRBJ2-1)
CASSSAGGRGPYNEQFF

SEQ ID NO: 330523 - protein, 14 aa, Homo sapiens
  CDR3 for alpha chain variable domain of TCR clone 165262 (TRAV1-2, TRAJ16)
CAVNRFSDGRKLLF

SEQ ID NO: 330524 - protein, 11 aa, Homo sapiens
  CDR3 for beta chain variable domain of TCR clone 165262 (TRBV12-4, TRBJ2-2)
CASSSAGELFF

SEQ ID NO: 330525 - protein, 13 aa, Homo sapiens
  CDR3 for alpha chain variable domain of TCR clone 165263 (TRAV12-3, TRAJ33)
CAMSVNSNYQLIG

SEQ ID NO: 330526 - protein, 13 aa, Homo sapiens
  CDR3 for beta chain variable domain of TCR clone 165263 (TRBV7-2, TRBJ2-2)
CASSLAVTGELFF

SEQ ID NO: 330527 - protein, 18 aa, Homo sapiens
  CDR3 for alpha chain variable domain of TCR clone 165264 (TRAV21, TRAJ52)
CAVRPSPAGGTSYGKLTF

SEQ ID NO: 330528 - protein, 14 aa, Homo sapiens
  CDR3 for beta chain variable domain of TCR clone 165264 (TRBV7-2, TRBJ2-5)
CASSTGGELKTQYF

SEQ ID NO: 330529 - protein, 13 aa, Homo sapiens
  CDR3 for alpha chain variable domain of TCR clone 165265 (TRAV13-2, TRAJ53)
CAENMGSNYKLTF

SEQ ID NO: 330530 - protein, 16 aa, Homo sapiens
  CDR3 for beta chain variable domain of TCR clone 165265 (TRBV7-8, TRBJ2-4)
CASSAERTLAKNIQYF

SEQ ID NO: 330531 - protein, 16 aa, Homo sapiens
  CDR3 for alpha chain variable domain of TCR clone 165266 (TRAV12-3, TRAJ53)
CAMSPGSGGSNYKLTF

SEQ ID NO: 330532 - protein, 17 aa, Homo sapiens
  CDR3 for beta chain variable domain of TCR clone 165266 (TRBV15, TRBJ1-4)
CATSRYGTGDPNEKLFF

SEQ ID NO: 330533 - protein, 11 aa, Homo sapiens
  CDR3 for alpha chain variable domain of TCR clone 165267 (TRAV12-1, TRAJ26)
CVVAYGQNFVF

SEQ ID NO: 330534 - protein, 14 aa, Homo sapiens
  CDR3 for beta chain variable domain of TCR clone 165267 (TRBV12-4, TRBJ2-3)
CASTIAGWGDTQYF

SEQ ID NO: 330535 - protein, 13 aa, Homo sapiens
  CDR3 for alpha chain variable domain of TCR clone 165268 (TRAV5, TRAJ30)
CAEIAHRDDKIIF

SEQ ID NO: 330536 - protein, 14 aa, Homo sapiens
  CDR3 for beta chain variable domain of TCR clone 165268 (TRBV4-1, TRBJ2-2)
CASSQAVNTGELFF

SEQ ID NO: 330537 - protein, 17 aa, Homo sapiens
  CDR3 for alpha chain variable domain of TCR clone 165269 (TRAV8-3, TRAJ52)
CAVGAEAGGTSYGKLKF

SEQ ID NO: 330538 - protein, 15 aa, Homo sapiens
  CDR3 for beta chain variable domain of TCR clone 165269 (TRBV5-1, TRBJ2-5)
CASSRQGLGQETQYF

SEQ ID NO: 330539 - protein, 13 aa, Homo sapiens
  CDR3 for alpha chain variable domain of TCR clone 165270 (TRAV12-2, TRAJ12)
CAVKGDSSYKLIF

SEQ ID NO: 330540 - protein, 14 aa, Homo sapiens
  CDR3 for beta chain variable domain of TCR clone 165270 (TRBV7-6, TRBJ2-5)
CASSLSSGEETQYF

SEQ ID NO: 330541 - protein, 15 aa, Homo sapiens
  CDR3 for alpha chain variable domain of TCR clone 165271 (TRAV26-1, TRAJ29)
FIVRVEGLGNTPLVF

SEQ ID NO: 330542 - protein, 15 aa, Homo sapiens
  CDR3 for beta chain variable domain of TCR clone 165271 (TRBV7-9, TRBJ1-5)
CASSQGHQPNQPQHF

SEQ ID NO: 330543 - protein, 13 aa, Homo sapiens
  CDR3 for alpha chain variable domain of TCR clone 165272 (TRAV3, TRAJ20)
CAVRDTPRYKLSV

SEQ ID NO: 330544 - protein, 15 aa, Homo sapiens
  CDR3 for beta chain variable domain of TCR clone 165272 (TRBV4-1, TRBJ2-1)
CASSQDAGGLYEQFF

SEQ ID NO: 330545 - protein, 16 aa, Homo sapiens
  CDR3 for alpha chain variable domain of TCR clone 165273 (TRAV12-3, TRAJ45)
CAMGWGSGGGADGLTF

SEQ ID NO: 330546 - protein, 14 aa, Homo sapiens
  CDR3 for beta chain variable domain of TCR clone 165273 (TRBV7-9, TRBJ2-1)
CASSQGQAEAEQFF

SEQ ID NO: 330547 - protein, 12 aa, Homo sapiens
  CDR3 for alpha chain variable domain of TCR clone 165274 (TRAV16, TRAJ10)
CSRTGGGNKLTF

SEQ ID NO: 330548 - protein, 15 aa, Homo sapiens
  CDR3 for beta chain variable domain of TCR clone 165274 (TRBV7-2, TRBJ2-1)
CASSFQLALYNEQFF

SEQ ID NO: 330549 - protein, 17 aa, Homo sapiens
  CDR3 for alpha chain variable domain of TCR clone 165275 (TRAV3, TRAJ6)
CAVRDGPRAGGSYIPTF

SEQ ID NO: 330550 - protein, 16 aa, Homo sapiens
  CDR3 for beta chain variable domain of TCR clone 165275 (TRBV7-3, TRBJ2-5)
CASSLMGGASQETQYF

SEQ ID NO: 330551 - protein, 13 aa, Homo sapiens
  CDR3 for alpha chain variable domain of TCR clone 165276 (TRAV35, TRAJ44)
CAGLSGTASKLTF

SEQ ID NO: 330552 - protein, 14 aa, Homo sapiens
  CDR3 for beta chain variable domain of TCR clone 165276 (TRBV7-6, TRBJ2-3)
CASSLGTVTDTQYF

SEQ ID NO: 330553 - protein, 12 aa, Homo sapiens
  CDR3 for alpha chain variable domain of TCR clone 165277 (TRAV1-2, TRAJ24)
RAVGGSWGKFQF

SEQ ID NO: 330554 - protein, 13 aa, Homo sapiens
  CDR3 for beta chain variable domain of TCR clone 165277 (TRBV20-1, TRBJ1-1)
CSASKRGLTEAFF

SEQ ID NO: 330555 - protein, 16 aa, Homo sapiens
  CDR3 for alpha chain variable domain of TCR clone 165278 (TRAV30, TRAJ24)
CGTEIVDADSWGKFQI

SEQ ID NO: 330556 - protein, 15 aa, Homo sapiens
  CDR3 for beta chain variable domain of TCR clone 165278 (TRBV20-1, TRBJ2-7)
CSARDRVSGMDEQYF

SEQ ID NO: 330557 - protein, 14 aa, Homo sapiens
  CDR3 for alpha chain variable domain of TCR clone 165279 (TRAV12-3, TRAJ10)
SHLHLTGGGNKLTF

SEQ ID NO: 330558 - protein, 15 aa, Homo sapiens
  CDR3 for beta chain variable domain of TCR clone 165279 (TRBV7-2, TRBJ2-1)
CASSSGLAGGNEQFF

SEQ ID NO: 330559 - protein, 12 aa, Homo sapiens
  CDR3 for alpha chain variable domain of TCR clone 165280 (TRAV1-1, TRAJ39)
CAVPVVGNMLTF

SEQ ID NO: 330560 - protein, 15 aa, Homo sapiens
  CDR3 for beta chain variable domain of TCR clone 165280 (TRBV20-1, TRBJ2-7)
CSARDPVKGEGEQYF

SEQ ID NO: 330561 - protein, 14 aa, Homo sapiens
  CDR3 for alpha chain variable domain of TCR clone 165281 (TRAV3, TRAJ36)
CAVRDGTGAHNLFF

SEQ ID NO: 330562 - protein, 16 aa, Homo sapiens
  CDR3 for beta chain variable domain of TCR clone 165281 (TRBV20-1, TRBJ2-6)
CSAREGPGVGANVLTF

SEQ ID NO: 330563 - protein, 14 aa, Homo sapiens
  CDR3 for alpha chain variable domain of TCR clone 165282 (TRAV12-3, TRAJ10)
SHLPLTGGGNKLTF

SEQ ID NO: 330564 - protein, 16 aa, Homo sapiens
  CDR3 for beta chain variable domain of TCR clone 165282 (TRBV5-1, TRBJ2-5)
CASSLSLAGAQETQYF

SEQ ID NO: 330565 - protein, 15 aa, Homo sapiens
  CDR3 for alpha chain variable domain of TCR clone 165283 (TRAV12-2, TRAJ32)
CAVNHYGGATNKLIF

SEQ ID NO: 330566 - protein, 13 aa, Homo sapiens
  CDR3 for beta chain variable domain of TCR clone 165283 (TRBV20-1, TRBJ2-2)
CSASAAGTGELFF

SEQ ID NO: 330567 - protein, 14 aa, Homo sapiens
  CDR3 for alpha chain variable domain of TCR clone 165284 (TRAV1-2, TRAJ16)
CAVNRFSDGQKLLF

SEQ ID NO: 330568 - protein, 16 aa, Homo sapiens
  CDR3 for beta chain variable domain of TCR clone 165284 (TRBV2, TRBJ2-3)
CASSTSVEGVTDKQYF

SEQ ID NO: 330569 - protein, 13 aa, Homo sapiens
  CDR3 for alpha chain variable domain of TCR clone 165285 (TRAV14/DV4, TRAJ23)
CAMREVKGGKLIF

SEQ ID NO: 330570 - protein, 15 aa, Homo sapiens
  CDR3 for beta chain variable domain of TCR clone 165285 (TRBV5-1, TRBJ2-7)
CASSLGDFTTYEQYF

SEQ ID NO: 330571 - protein, 18 aa, Homo sapiens
  CDR3 for alpha chain variable domain of TCR clone 165286 (TRAV21, TRAJ52)
CAVRPSPAGGTSYGKLTF

SEQ ID NO: 330572 - protein, 13 aa, Homo sapiens
  CDR3 for beta chain variable domain of TCR clone 165286 (TRBV2, TRBJ1-5)
CATAGPGNQAQHF

SEQ ID NO: 330573 - protein, 14 aa, Homo sapiens
  CDR3 for alpha chain variable domain of TCR clone 165287 (TRAV2, TRAJ37)
CAVDFTSNTGKLIF

SEQ ID NO: 330574 - protein, 14 aa, Homo sapiens
  CDR3 for beta chain variable domain of TCR clone 165287 (TRBV20-1, TRBJ2-1)
CSAQIGGSANEQFF

SEQ ID NO: 330575 - protein, 15 aa, Homo sapiens
  CDR3 for alpha chain variable domain of TCR clone 165288 (TRAV8-3, TRAJ45)
CAVSYSGGGADGLTS

SEQ ID NO: 330576 - protein, 13 aa, Homo sapiens
  CDR3 for beta chain variable domain of TCR clone 165288 (TRBV10-3, TRBJ2-7)
CASKLAVNYEQYF

SEQ ID NO: 330577 - protein, 12 aa, Homo sapiens
  CDR3 for alpha chain variable domain of TCR clone 165289 (TRAV23/DV6, TRAJ30)
CAASKGDDKIIF

SEQ ID NO: 330578 - protein, 13 aa, Homo sapiens
  CDR3 for beta chain variable domain of TCR clone 165289 (TRBV19, TRBJ1-2)
CASSVPGHDGYTF

SEQ ID NO: 330579 - protein, 16 aa, Homo sapiens
  CDR3 for alpha chain variable domain of TCR clone 165290 (TRAV30, TRAJ24)
CGTEIVDADSWGKFQF

SEQ ID NO: 330580 - protein, 14 aa, Homo sapiens
  CDR3 for beta chain variable domain of TCR clone 165290 (TRBV20-1, TRBJ2-6)
QCSGQGAWANVLTF

SEQ ID NO: 330581 - protein, 12 aa, Homo sapiens
  CDR3 for alpha chain variable domain of TCR clone 165291 (TRAV17, TRAJ4)
CATDGGYNKLIF

SEQ ID NO: 330582 - protein, 12 aa, Homo sapiens
  CDR3 for beta chain variable domain of TCR clone 165291 (TRBV6-3, TRBJ2-7)
CASSEPGFEQYF

SEQ ID NO: 330583 - protein, 14 aa, Homo sapiens
  CDR3 for alpha chain variable domain of TCR clone 165292 (TRAV8-4, TRAJ38)
CARLNAGNKRKLIW

SEQ ID NO: 330584 - protein, 12 aa, Homo sapiens
  CDR3 for beta chain variable domain of TCR clone 165292 (TRBV6-1, TRBJ2-7)
CASSEPLYEQYF

SEQ ID NO: 330585 - protein, 13 aa, Homo sapiens
  CDR3 for alpha chain variable domain of TCR clone 165293 (TRAV1-2, TRAJ9)
CAVLNTGGFKTIF

SEQ ID NO: 330586 - protein, 13 aa, Homo sapiens
  CDR3 for beta chain variable domain of TCR clone 165293 (TRBV19, TRBJ1-2)
CASSVPGQDGYSF

SEQ ID NO: 330587 - protein, 14 aa, Homo sapiens
  CDR3 for alpha chain variable domain of TCR clone 165294 (TRAV8-4, TRAJ34)
CAVSDPGDTDKLIF

SEQ ID NO: 330588 - protein, 17 aa, Homo sapiens
  CDR3 for beta chain variable domain of TCR clone 165294 (TRBV13, TRBJ2-3)
CASSLSRVAGGRNTQYF

SEQ ID NO: 330589 - protein, 14 aa, Homo sapiens
  CDR3 for alpha chain variable domain of TCR clone 165295 (TRAV4, TRAJ26)
CLVGPHNYGQNFVF

SEQ ID NO: 330590 - protein, 16 aa, Homo sapiens
  CDR3 for beta chain variable domain of TCR clone 165295 (TRBV27, TRBJ2-2)
CASSSSGVSNTGELFF

SEQ ID NO: 330591 - protein, 16 aa, Homo sapiens
  CDR3 for alpha chain variable domain of TCR clone 165296 (TRAV20, TRAJ22)
CAVQASSSGSARPLTF

SEQ ID NO: 330592 - protein, 16 aa, Homo sapiens
  CDR3 for beta chain variable domain of TCR clone 165296 (TRBV20-1, TRBJ1-5)
CSASRGTGYSNQPQHF

SEQ ID NO: 330593 - protein, 13 aa, Homo sapiens
  CDR3 for alpha chain variable domain of TCR clone 165297 (TRAV8-3, TRAJ28)
CAVGAFWSYQLTF

SEQ ID NO: 330594 - protein, 15 aa, Homo sapiens
  CDR3 for beta chain variable domain of TCR clone 165297 (TRBV7-9, TRBJ1-5)
CASSQGHQPNQPQHF

SEQ ID NO: 330595 - protein, 16 aa, Homo sapiens
  CDR3 for alpha chain variable domain of TCR clone 165298 (TRAV14/DV4, TRAJ20)
CAMREGRSRDDYKLSF

SEQ ID NO: 330596 - protein, 16 aa, Homo sapiens
  CDR3 for beta chain variable domain of TCR clone 165298 (TRBV2, TRBJ2-1)
CASSVGGSLSYNEQFF

SEQ ID NO: 330597 - protein, 11 aa, Homo sapiens
  CDR3 for alpha chain variable domain of TCR clone 165299 (TRAV17, TRAJ31)
YATDRTARLMF

SEQ ID NO: 330598 - protein, 14 aa, Homo sapiens
  CDR3 for beta chain variable domain of TCR clone 165299 (TRBV4-2, TRBJ2-3)
CASSQERGTDTQYF

SEQ ID NO: 330599 - protein, 13 aa, Homo sapiens
  CDR3 for alpha chain variable domain of TCR clone 165300 (TRAV2, TRAJ40)
CAVVTSGIYKYIF

SEQ ID NO: 330600 - protein, 12 aa, Homo sapiens
  CDR3 for beta chain variable domain of TCR clone 165300 (TRBV19, TRBJ1-5)
CASSIAQQPQHF

SEQ ID NO: 330601 - protein, 14 aa, Homo sapiens
  CDR3 for alpha chain variable domain of TCR clone 165301 (TRAV4, TRAJ42)
CLVGGGGSQGNLIF

SEQ ID NO: 330602 - protein, 15 aa, Homo sapiens
  CDR3 for beta chain variable domain of TCR clone 165301 (TRBV12-4, TRBJ1-2)
CASSFVDRGNYGYTF

SEQ ID NO: 330603 - protein, 16 aa, Homo sapiens
  CDR3 for alpha chain variable domain of TCR clone 165302 (TRAV21, TRAJ45)
CAVSWGSGGGAYGLTF

SEQ ID NO: 330604 - protein, 14 aa, Homo sapiens
  CDR3 for beta chain variable domain of TCR clone 165302 (TRBV4-2, TRBJ1-2)
CASSPGGSNYGYTF

SEQ ID NO: 330605 - protein, 12 aa, Homo sapiens
  CDR3 for alpha chain variable domain of TCR clone 165303 (TRAV17, TRAJ57)
CATDGGSEKLVF

SEQ ID NO: 330606 - protein, 13 aa, Homo sapiens
  CDR3 for beta chain variable domain of TCR clone 165303 (TRBV29-1, TRBJ2-5)
CSVLLASGETQYF

SEQ ID NO: 330607 - protein, 12 aa, Homo sapiens
  CDR3 for alpha chain variable domain of TCR clone 165304 (TRAV20, TRAJ4)
CRASGGYNKLIF

SEQ ID NO: 330608 - protein, 18 aa, Homo sapiens
  CDR3 for beta chain variable domain of TCR clone 165304 (TRBV19, TRBJ1-5)
CASSKGQVSLHSNQPQHF

SEQ ID NO: 330609 - protein, 14 aa, Homo sapiens
  CDR3 for alpha chain variable domain of TCR clone 165305 (TRAV12-2, TRAJ40)
CAVKIPSGTYKYIF

SEQ ID NO: 330610 - protein, 13 aa, Homo sapiens
  CDR3 for beta chain variable domain of TCR clone 165305 (TRBV7-9, TRBJ1-2)
CASSLNQNYGYTF

SEQ ID NO: 330611 - protein, 13 aa, Homo sapiens
  CDR3 for alpha chain variable domain of TCR clone 165306 (TRAV16, TRAJ22)
CVFRKGSARQLTF

SEQ ID NO: 330612 - protein, 15 aa, Homo sapiens
  CDR3 for beta chain variable domain of TCR clone 165306 (TRBV20-1, TRBJ2-7)
CSARDRVSGMDEQYF

SEQ ID NO: 330613 - protein, 10 aa, Homo sapiens
  CDR3 for alpha chain variable domain of TCR clone 165307 (TRAV9-2, TRAJ49)
CALTGNQFYF

SEQ ID NO: 330614 - protein, 15 aa, Homo sapiens
  CDR3 for beta chain variable domain of TCR clone 165307 (TRBV11-3, TRBJ2-3)
CASLKDGREGDTQYF

SEQ ID NO: 330615 - protein, 18 aa, Homo sapiens
  CDR3 for alpha chain variable domain of TCR clone 165308 (TRAV21, TRAJ52)
CAVRPSPAGGTSYGTLTF

SEQ ID NO: 330616 - protein, 15 aa, Homo sapiens
  CDR3 for beta chain variable domain of TCR clone 165308 (TRBV19, TRBJ1-1)
CASTSGQIQNTEAFF

SEQ ID NO: 330617 - protein, 11 aa, Homo sapiens
  CDR3 for alpha chain variable domain of TCR clone 165309 (TRAV17, TRAJ9)
CATTGGFKTIF

SEQ ID NO: 330618 - protein, 14 aa, Homo sapiens
  CDR3 for beta chain variable domain of TCR clone 165309 (TRBV7-9, TRBJ2-2)
CASSELADTGELFF

SEQ ID NO: 330619 - protein, 18 aa, Homo sapiens
  CDR3 for alpha chain variable domain of TCR clone 165310 (TRAV8-4, TRAJ52)
CAVTRANAVGTSYGKLTF

SEQ ID NO: 330620 - protein, 20 aa, Homo sapiens
  CDR3 for beta chain variable domain of TCR clone 165310 (TRBV19, TRBJ2-1)
CASSISRTVTSTRLNNEQFF

SEQ ID NO: 330621 - protein, 12 aa, Homo sapiens
  CDR3 for alpha chain variable domain of TCR clone 165311 (TRAV27, TRAJ35)
CAGADFGNVLHC

SEQ ID NO: 330622 - protein, 13 aa, Homo sapiens
  CDR3 for beta chain variable domain of TCR clone 165311 (TRBV7-3, TRBJ1-1)
CASSQDWGAKAFF

SEQ ID NO: 330623 - protein, 13 aa, Homo sapiens
  CDR3 for alpha chain variable domain of TCR clone 165312 (TRAV3, TRAJ27)
CAVGPLAQANQPL

SEQ ID NO: 330624 - protein, 13 aa, Homo sapiens
  CDR3 for beta chain variable domain of TCR clone 165312 (TRBV7-9, TRBJ2-3)
CASSPGSTDTQYF

SEQ ID NO: 330625 - protein, 14 aa, Homo sapiens
  CDR3 for alpha chain variable domain of TCR clone 165313 (TRAV26-1, TRAJ45)
CIVRVVGGADGLTF

SEQ ID NO: 330626 - protein, 16 aa, Homo sapiens
  CDR3 for beta chain variable domain of TCR clone 165313 (TRBV7-9, TRBJ1-1)
CASSLTQIRSNTEAFF

SEQ ID NO: 330627 - protein, 10 aa, Homo sapiens
  CDR3 for alpha chain variable domain of TCR clone 165314 (TRAV26-1, TRAJ22)
RSVSARQLTV

SEQ ID NO: 330628 - protein, 11 aa, Homo sapiens
  CDR3 for beta chain variable domain of TCR clone 165314 (TRBV12-4, TRBJ2-3)
CASTATDTQYF

SEQ ID NO: 330629 - protein, 13 aa, Homo sapiens
  CDR3 for alpha chain variable domain of TCR clone 165315 (TRAV17, TRAJ5)
CALRGTGRRALTF

SEQ ID NO: 330630 - protein, 14 aa, Homo sapiens
  CDR3 for beta chain variable domain of TCR clone 165315 (TRBV19, TRBJ2-7)
CASTVQGRPYEQYF

SEQ ID NO: 330631 - protein, 18 aa, Homo sapiens
  CDR3 for alpha chain variable domain of TCR clone 165316 (TRAV21, TRAJ52)
CAVRPSPAGGTSYGQLTF

SEQ ID NO: 330632 - protein, 13 aa, Homo sapiens
  CDR3 for beta chain variable domain of TCR clone 165316 (TRBV29-1, TRBJ2-2)
CSVYREDTGELFF

SEQ ID NO: 330633 - protein, 11 aa, Homo sapiens
  CDR3 for alpha chain variable domain of TCR clone 165317 (TRAV2, TRAJ13)
CASGGYQKVTF

SEQ ID NO: 330634 - protein, 16 aa, Homo sapiens
  CDR3 for beta chain variable domain of TCR clone 165317 (TRBV6-1, TRBJ2-5)
CASSYGPGGQKETQYF

SEQ ID NO: 330635 - protein, 14 aa, Homo sapiens
  CDR3 for alpha chain variable domain of TCR clone 165318 (TRAV12-3, TRAJ10)
SHLPLTGGGNKLTF

SEQ ID NO: 330636 - protein, 15 aa, Homo sapiens
  CDR3 for beta chain variable domain of TCR clone 165318 (TRBV7-9, TRBJ1-4)
CASSRTGGFNEKLFC

SEQ ID NO: 330637 - protein, 11 aa, Homo sapiens
  CDR3 for alpha chain variable domain of TCR clone 165319 (TRAV17, TRAJ31)
CATDRNARLMF

SEQ ID NO: 330638 - protein, 14 aa, Homo sapiens
  CDR3 for beta chain variable domain of TCR clone 165319 (TRBV4-1, TRBJ2-2)
CASSQAVNTGELFF

SEQ ID NO: 330639 - protein, 16 aa, Homo sapiens
  CDR3 for alpha chain variable domain of TCR clone 165320 (TRAV22, TRAJ45)
CAVERGKRGGADGLTF

SEQ ID NO: 330640 - protein, 13 aa, Homo sapiens
  CDR3 for beta chain variable domain of TCR clone 165320 (TRBV7-2, TRBJ2-2)
CASSLAVTGELFF

SEQ ID NO: 330641 - protein, 13 aa, Homo sapiens
  CDR3 for alpha chain variable domain of TCR clone 165321 (TRAV12-1, TRAJ13)
CVVNLGGYQKVTF

SEQ ID NO: 330642 - protein, 13 aa, Homo sapiens
  CDR3 for beta chain variable domain of TCR clone 165321 (TRBV7-9, TRBJ1-2)
CASSLKQNYGYAF

SEQ ID NO: 330643 - protein, 13 aa, Homo sapiens
  CDR3 for alpha chain variable domain of TCR clone 165322 (TRAV13-1, TRAJ21)
CAASVYNFNKFYF

SEQ ID NO: 330644 - protein, 15 aa, Homo sapiens
  CDR3 for beta chain variable domain of TCR clone 165322 (TRBV5-7, TRBJ1-5)
CAGSYGKLWDQPQHF

SEQ ID NO: 330645 - protein, 14 aa, Homo sapiens
  CDR3 for alpha chain variable domain of TCR clone 165323 (TRAV12-2, TRAJ13)
CAMKKTGGYQKVTF

SEQ ID NO: 330646 - protein, 15 aa, Homo sapiens
  CDR3 for beta chain variable domain of TCR clone 165323 (TRBV27, TRBJ2-1)
CASSNGGGSPNEQFF

SEQ ID NO: 330647 - protein, 17 aa, Homo sapiens
  CDR3 for alpha chain variable domain of TCR clone 165324 (TRAV16, TRAJ20)
CALPNELSFGAGTTVTV

SEQ ID NO: 330648 - protein, 14 aa, Homo sapiens
  CDR3 for beta chain variable domain of TCR clone 165324 (TRBV7-2, TRBJ2-7)
CASRSQGAAYEQYF

SEQ ID NO: 330649 - protein, 17 aa, Homo sapiens
  CDR3 for alpha chain variable domain of TCR clone 165325 (TRAV3, TRAJ6)
CAVRDGPRAGGSYIPTF

SEQ ID NO: 330650 - protein, 13 aa, Homo sapiens
  CDR3 for beta chain variable domain of TCR clone 165325 (TRBV29-1, TRBJ2-2)
CSTTGVNTGELFF

SEQ ID NO: 330651 - protein, 15 aa, Homo sapiens
  CDR3 for alpha chain variable domain of TCR clone 165326 (TRAV17, TRAJ16)
CATALRFSDGQKLLF

SEQ ID NO: 330652 - protein, 12 aa, Homo sapiens
  CDR3 for beta chain variable domain of TCR clone 165326 (TRBV2, TRBJ2-7)
CASSDQDYEQYF

SEQ ID NO: 330653 - protein, 14 aa, Homo sapiens
  CDR3 for alpha chain variable domain of TCR clone 165327 (TRAV8-2, TRAJ6)
CVVISAGGSYIPTF

SEQ ID NO: 330654 - protein, 15 aa, Homo sapiens
  CDR3 for beta chain variable domain of TCR clone 165327 (TRBV7-6, TRBJ2-6)
CQQLTRALWGNVLTF

SEQ ID NO: 330655 - protein, 14 aa, Homo sapiens
  CDR3 for alpha chain variable domain of TCR clone 165328 (TRAV12-2, TRAJ33)
CAVKRAMSNYQLIW

SEQ ID NO: 330656 - protein, 12 aa, Homo sapiens
  CDR3 for beta chain variable domain of TCR clone 165328 (TRBV24-1, TRBJ2-3)
CATSDSTDTQYF

SEQ ID NO: 330657 - protein, 14 aa, Homo sapiens
  CDR3 for alpha chain variable domain of TCR clone 165329 (TRAV8-2, TRAJ45)
CGVSAGGGADGLTF

SEQ ID NO: 330658 - protein, 12 aa, Homo sapiens
  CDR3 for beta chain variable domain of TCR clone 165329 (TRBV12-4, TRBJ2-1)
CVSSLVRVEQFV

SEQ ID NO: 330659 - protein, 14 aa, Homo sapiens
  CDR3 for alpha chain variable domain of TCR clone 165330 (TRAV9-2, TRAJ39)
CALYIYNAVNMLTF

SEQ ID NO: 330660 - protein, 15 aa, Homo sapiens
  CDR3 for beta chain variable domain of TCR clone 165330 (TRBV20-1, TRBJ2-7)
CSAESGTSGAYEQYF

SEQ ID NO: 330661 - protein, 12 aa, Homo sapiens
  CDR3 for alpha chain variable domain of TCR clone 165331 (TRAV16, TRAJ57)
CALEGGYEKLVF

SEQ ID NO: 330662 - protein, 12 aa, Homo sapiens
  CDR3 for beta chain variable domain of TCR clone 165331 (TRBV28, TRBJ2-7)
CASSGRPYEQYF

SEQ ID NO: 330663 - protein, 15 aa, Homo sapiens
  CDR3 for alpha chain variable domain of TCR clone 165332 (TRAV8-3, TRAJ40)
CAAPSLGAGTYRYIF

SEQ ID NO: 330664 - protein, 12 aa, Homo sapiens
  CDR3 for beta chain variable domain of TCR clone 165332 (TRBV11-2, TRBJ2-2)
CASSLGGGELFF

SEQ ID NO: 330665 - protein, 19 aa, Homo sapiens
  CDR3 for alpha chain variable domain of TCR clone 165333 (TRAV2, TRAJ20)
ILQVREADATVYRDCKLSL

SEQ ID NO: 330666 - protein, 15 aa, Homo sapiens
  CDR3 for beta chain variable domain of TCR clone 165333 (TRBV15, TRBJ1-6)
CATSGALIHPSTLGA

SEQ ID NO: 330667 - protein, 12 aa, Homo sapiens
  CDR3 for alpha chain variable domain of TCR clone 165334 (TRAV13-1, TRAJ53)
AASGGGNYKLTF

SEQ ID NO: 330668 - protein, 15 aa, Homo sapiens
  CDR3 for beta chain variable domain of TCR clone 165334 (TRBV5-1, TRBJ2-1)
CASSPPRAAYNEQFF

SEQ ID NO: 330669 - protein, 11 aa, Homo sapiens
  CDR3 for alpha chain variable domain of TCR clone 165335 (TRAV13-1, TRAJ49)
CACVGGNQFCF

SEQ ID NO: 330670 - protein, 16 aa, Homo sapiens
  CDR3 for beta chain variable domain of TCR clone 165335 (TRBV11-2, TRBJ2-2)
CASSLRTGNLIGELFF

SEQ ID NO: 330671 - protein, 14 aa, Homo sapiens
  CDR3 for alpha chain variable domain of TCR clone 165336 (TRAV12-1, TRAJ3)
CVVNPGSSASKIIF

SEQ ID NO: 330672 - protein, 14 aa, Homo sapiens
  CDR3 for beta chain variable domain of TCR clone 165336 (TRBV20-1, TRBJ2-3)
CSGRGGTSTDKQYF

SEQ ID NO: 330673 - protein, 16 aa, Homo sapiens
  CDR3 for alpha chain variable domain of TCR clone 165337 (TRAV8-4, TRAJ45)
CAVSAGVGGGADGLTF

SEQ ID NO: 330674 - protein, 12 aa, Homo sapiens
  CDR3 for beta chain variable domain of TCR clone 165337 (TRBV12-4, TRBJ2-7)
CASSLGGYEQYF

SEQ ID NO: 330675 - protein, 10 aa, Homo sapiens
  CDR3 for alpha chain variable domain of TCR clone 165338 (TRAV20, TRAJ22)
CAAPARQLTF

SEQ ID NO: 330676 - protein, 14 aa, Homo sapiens
  CDR3 for beta chain variable domain of TCR clone 165338 (TRBV19, TRBJ2-1)
CVSSMGSGATEQFF

SEQ ID NO: 330677 - protein, 13 aa, Homo sapiens
  CDR3 for alpha chain variable domain of TCR clone 165339 (TRAV21, TRAJ27)
CAARPGNAGKSTF

SEQ ID NO: 330678 - protein, 20 aa, Homo sapiens
  CDR3 for beta chain variable domain of TCR clone 165339 (TRBV4-2, TRBJ2-7)
CASSQASRGNLRAVLRAGHQ

SEQ ID NO: 330679 - protein, 14 aa, Homo sapiens
  CDR3 for alpha chain variable domain of TCR clone 165340 (TRAV1-2, TRAJ8)
CAVREDTGFQKLVF

SEQ ID NO: 330680 - protein, 19 aa, Homo sapiens
  CDR3 for beta chain variable domain of TCR clone 165340 (TRBV7-8, TRBJ2-3)
CASSFLSRNWGGGTDTQYF

SEQ ID NO: 330681 - protein, 12 aa, Homo sapiens
  CDR3 for alpha chain variable domain of TCR clone 165341 (TRAV3, TRAJ31)
CAVRDGNARLMF

SEQ ID NO: 330682 - protein, 16 aa, Homo sapiens
  CDR3 for beta chain variable domain of TCR clone 165341 (TRBV5-1, TRBJ2-3)
CASSLQGRVGADTQYF

SEQ ID NO: 330683 - protein, 14 aa, Homo sapiens
  CDR3 for alpha chain variable domain of TCR clone 165342 (TRAV12-1, TRAJ34)
CGEPASYNTDKLIF

SEQ ID NO: 330684 - protein, 15 aa, Homo sapiens
  CDR3 for beta chain variable domain of TCR clone 165342 (TRBV7-3, TRBJ2-1)
CASSPTGGGEVEQFF

SEQ ID NO: 330685 - protein, 15 aa, Homo sapiens
  CDR3 for alpha chain variable domain of TCR clone 165343 (TRAV35, TRAJ40)
CAGQLGTSGTYKYIF

SEQ ID NO: 330686 - protein, 15 aa, Homo sapiens
  CDR3 for beta chain variable domain of TCR clone 165343 (TRBV28, TRBJ2-5)
CASSQTSGSLETQYF

SEQ ID NO: 330687 - protein, 15 aa, Homo sapiens
  CDR3 for alpha chain variable domain of TCR clone 165344 (TRAV2, TRAJ28)
CAVPYSGAGSYQLTF

SEQ ID NO: 330688 - protein, 17 aa, Homo sapiens
  CDR3 for beta chain variable domain of TCR clone 165344 (TRBV20-1, TRBJ2-4)
CSARDWVSGGRENIQYF

SEQ ID NO: 330689 - protein, 12 aa, Homo sapiens
  CDR3 for alpha chain variable domain of TCR clone 165345 (TRAV2, TRAJ9)
CAVGAGGFKTIF

SEQ ID NO: 330690 - protein, 15 aa, Homo sapiens
  CDR3 for beta chain variable domain of TCR clone 165345 (TRBV6-6, TRBJ2-7)
CASSYSYGGSYEQYF

SEQ ID NO: 330691 - protein, 16 aa, Homo sapiens
  CDR3 for alpha chain variable domain of TCR clone 165346 (TRAV8-3, TRAJ44)
CAVGASNTGTASKLTF

SEQ ID NO: 330692 - protein, 15 aa, Homo sapiens
  CDR3 for beta chain variable domain of TCR clone 165346 (TRBV27, TRBJ1-5)
CASTFNRGSNQPRHF

SEQ ID NO: 330693 - protein, 16 aa, Homo sapiens
  CDR3 for alpha chain variable domain of TCR clone 165347 (TRAV30, TRAJ24)
CGTGIVDADSWGKFQF

SEQ ID NO: 330694 - protein, 16 aa, Homo sapiens
  CDR3 for beta chain variable domain of TCR clone 165347 (TRBV2, TRBJ2-5)
CASSARGLGGRETQYF

SEQ ID NO: 330695 - protein, 14 aa, Homo sapiens
  CDR3 for alpha chain variable domain of TCR clone 165348 (TRAV1-2, TRAJ16)
CAVNRFSDGQKLLF

SEQ ID NO: 330696 - protein, 10 aa, Homo sapiens
  CDR3 for beta chain variable domain of TCR clone 165348 (TRBV9, TRBJ1-6)
CASSVAGTGF

SEQ ID NO: 330697 - protein, 17 aa, Homo sapiens
  CDR3 for alpha chain variable domain of TCR clone 165349 (TRAV26-2, TRAJ42)
CILRDVGYGGSQGNLIF

SEQ ID NO: 330698 - protein, 16 aa, Homo sapiens
  CDR3 for beta chain variable domain of TCR clone 165349 (TRBV12-4, TRBJ2-7)
CTSSLIGGTGTYEQYY

SEQ ID NO: 330699 - protein, 12 aa, Homo sapiens
  CDR3 for alpha chain variable domain of TCR clone 165350 (TRAV38-2/DV8, TRAJ48)
CALLSGNQKLTF

SEQ ID NO: 330700 - protein, 14 aa, Homo sapiens
  CDR3 for beta chain variable domain of TCR clone 165350 (TRBV11-2, TRBJ2-3)
CASSRLARTDTQYF

SEQ ID NO: 330701 - protein, 13 aa, Homo sapiens
  CDR3 for alpha chain variable domain of TCR clone 165351 (TRAV12-2, TRAJ18)
CAVRGSTLGRLYF

SEQ ID NO: 330702 - protein, 16 aa, Homo sapiens
  CDR3 for beta chain variable domain of TCR clone 165351 (TRBV19, TRBJ2-1)
CASSKAGPSSYNEQFF

SEQ ID NO: 330703 - protein, 12 aa, Homo sapiens
  CDR3 for alpha chain variable domain of TCR clone 165352 (TRAV21, TRAJ6)
CAVKGGSYTPTF

SEQ ID NO: 330704 - protein, 13 aa, Homo sapiens
  CDR3 for beta chain variable domain of TCR clone 165352 (TRBV11-2, TRBJ1-1)
CASSFTENTEAFF

SEQ ID NO: 330705 - protein, 10 aa, Homo sapiens
  CDR3 for alpha chain variable domain of TCR clone 165353 (TRAV16, TRAJ22)
SAMYLWQLTF

SEQ ID NO: 330706 - protein, 17 aa, Homo sapiens
  CDR3 for beta chain variable domain of TCR clone 165353 (TRBV5-1, TRBJ2-5)
CASSPVALGQNQETQYF

SEQ ID NO: 330707 - protein, 13 aa, Homo sapiens
  CDR3 for alpha chain variable domain of TCR clone 165354 (TRAV29/DV5, TRAJ44)
CAASTGTASKLTF

SEQ ID NO: 330708 - protein, 13 aa, Homo sapiens
  CDR3 for beta chain variable domain of TCR clone 165354 (TRBV19, TRBJ2-7)
CASRKAGGSERYF

SEQ ID NO: 330709 - protein, 15 aa, Homo sapiens
  CDR3 for alpha chain variable domain of TCR clone 165355 (TRAV8-4, TRAJ12)
CALSDRVDSSYKLIF

SEQ ID NO: 330710 - protein, 15 aa, Homo sapiens
  CDR3 for beta chain variable domain of TCR clone 165355 (TRBV11-3, TRBJ2-1)
CASSLAGQTYNEQFF

SEQ ID NO: 330711 - protein, 16 aa, Homo sapiens
  CDR3 for alpha chain variable domain of TCR clone 165356 (TRAV8-3, TRAJ13)
CAVGAYPSGGYRKVTF

SEQ ID NO: 330712 - protein, 13 aa, Homo sapiens
  CDR3 for beta chain variable domain of TCR clone 165356 (TRBV7-9, TRBJ1-2)
CASSLKQNYGYTF

SEQ ID NO: 330713 - protein, 14 aa, Homo sapiens
  CDR3 for alpha chain variable domain of TCR clone 165357 (TRAV12-3, TRAJ29)
CAMSPYSGNTTLVF

SEQ ID NO: 330714 - protein, 15 aa, Homo sapiens
  CDR3 for beta chain variable domain of TCR clone 165357 (TRBV27, TRBJ2-1)
CASSNGGGSSNEQFF

SEQ ID NO: 330715 - protein, 14 aa, Homo sapiens
  CDR3 for alpha chain variable domain of TCR clone 165358 (TRAV1-1, TRAJ28)
CAAPSGAGSYQLTF

SEQ ID NO: 330716 - protein, 15 aa, Homo sapiens
  CDR3 for beta chain variable domain of TCR clone 165358 (TRBV20-1, TRBJ2-7)
CSARDRVSGMDEQYF

SEQ ID NO: 330717 - protein, 12 aa, Homo sapiens
  CDR3 for alpha chain variable domain of TCR clone 165359 (TRAV12-3, TRAJ17)
CAMTLTGNKLTF

SEQ ID NO: 330718 - protein, 15 aa, Homo sapiens
  CDR3 for beta chain variable domain of TCR clone 165359 (TRBV7-9, TRBJ1-6)
CASSAPGRGNSPLHF

SEQ ID NO: 330719 - protein, 15 aa, Homo sapiens
  CDR3 for alpha chain variable domain of TCR clone 165360 (TRAV26-2, TRAJ45)
CILRDRVDQEVVLTG

SEQ ID NO: 330720 - protein, 15 aa, Homo sapiens
  CDR3 for beta chain variable domain of TCR clone 165360 (TRBV7-6, TRBJ2-5)
CASSKPTGPQETQYF

SEQ ID NO: 330721 - protein, 15 aa, Homo sapiens
  CDR3 for alpha chain variable domain of TCR clone 165361 (TRAV21, TRAJ53)
CATLNSGGSNYKMTF

SEQ ID NO: 330722 - protein, 16 aa, Homo sapiens
  CDR3 for beta chain variable domain of TCR clone 165361 (TRBV20-1, TRBJ1-2)
CSASMGQGVANYSYTF

SEQ ID NO: 330723 - protein, 12 aa, Homo sapiens
  CDR3 for alpha chain variable domain of TCR clone 165362 (TRAV21, TRAJ13)
PGPSGGYQKVTF

SEQ ID NO: 330724 - protein, 14 aa, Homo sapiens
  CDR3 for beta chain variable domain of TCR clone 165362 (TRBV20-1, TRBJ2-7)
CSAKDRKGAYEQYC

SEQ ID NO: 330725 - protein, 14 aa, Homo sapiens
  CDR3 for alpha chain variable domain of TCR clone 165363 (TRAV23/DV6, TRAJ40)
CAASLTSGTYKYIF

SEQ ID NO: 330726 - protein, 14 aa, Homo sapiens
  CDR3 for beta chain variable domain of TCR clone 165363 (TRBV5-1, TRBJ2-3)
FAPAAGDGGGTQYF

SEQ ID NO: 330727 - protein, 12 aa, Homo sapiens
  CDR3 for alpha chain variable domain of TCR clone 165364 (TRAV3, TRAJ26)
CAVRDYGQNFVL

SEQ ID NO: 330728 - protein, 16 aa, Homo sapiens
  CDR3 for beta chain variable domain of TCR clone 165364 (TRBV11-2, TRBJ1-2)
CASSPSGREANYGYTF

SEQ ID NO: 330729 - protein, 12 aa, Homo sapiens
  CDR3 for alpha chain variable domain of TCR clone 165365 (TRAV8-3, TRAJ26)
CAGDNYGQNFVF

SEQ ID NO: 330730 - protein, 15 aa, Homo sapiens
  CDR3 for beta chain variable domain of TCR clone 165365 (TRBV5-1, TRBJ2-3)
CASSGTSGSTDTQYF

SEQ ID NO: 330731 - protein, 16 aa, Homo sapiens
  CDR3 for alpha chain variable domain of TCR clone 165366 (TRAV12-3, TRAJ53)
CAMSPGSGGSNYKLTF

SEQ ID NO: 330732 - protein, 16 aa, Homo sapiens
  CDR3 for beta chain variable domain of TCR clone 165366 (TRBV7-9, TRBJ1-2)
CASSLGFSAGEDGYTF

SEQ ID NO: 330733 - protein, 12 aa, Homo sapiens
  CDR3 for alpha chain variable domain of TCR clone 165367 (TRAV12-3, TRAJ17)
CAMTLTGNKLTF

SEQ ID NO: 330734 - protein, 13 aa, Homo sapiens
  CDR3 for beta chain variable domain of TCR clone 165367 (TRBV12-4, TRBJ1-5)
CASRSRGNQPQHF

SEQ ID NO: 330735 - protein, 15 aa, Homo sapiens
  CDR3 for alpha chain variable domain of TCR clone 165368 (TRAV3, TRAJ10)
CCERHEGGRGNKLTF

SEQ ID NO: 330736 - protein, 15 aa, Homo sapiens
  CDR3 for beta chain variable domain of TCR clone 165368 (TRBV20-1, TRBJ2-7)
CSARDRVSGMDEQYF

SEQ ID NO: 330737 - protein, 12 aa, Homo sapiens
  CDR3 for alpha chain variable domain of TCR clone 165369 (TRAV26-1, TRAJ35)
CIGLSFGNVLHC

SEQ ID NO: 330738 - protein, 13 aa, Homo sapiens
  CDR3 for beta chain variable domain of TCR clone 165369 (TRBV7-8, TRBJ2-7)
CASSLTGGREQYF

SEQ ID NO: 330739 - protein, 18 aa, Homo sapiens
  CDR3 for alpha chain variable domain of TCR clone 165370 (TRAV13-1, TRAJ52)
RAAKNPNAGGTSYGKLTF

SEQ ID NO: 330740 - protein, 17 aa, Homo sapiens
  CDR3 for beta chain variable domain of TCR clone 165370 (TRBV20-1, TRBJ2-1)
CSAPPRLAGTRYNEQFF

SEQ ID NO: 330741 - protein, 11 aa, Homo sapiens
  CDR3 for alpha chain variable domain of TCR clone 165371 (TRAV1-1, TRAJ23)
CAVRQGEKLIF

SEQ ID NO: 330742 - protein, 20 aa, Homo sapiens
  CDR3 for beta chain variable domain of TCR clone 165371 (TRBV7-8, TRBJ2-2)
CASSDLFPGPTIHITGELFF

SEQ ID NO: 330743 - protein, 10 aa, Homo sapiens
  CDR3 for alpha chain variable domain of TCR clone 165372 (TRAV30, TRAJ48)
CGMGNEKLTF

SEQ ID NO: 330744 - protein, 14 aa, Homo sapiens
  CDR3 for beta chain variable domain of TCR clone 165372 (TRBV7-6, TRBJ2-3)
CASSVAGGTDTQYF

SEQ ID NO: 330745 - protein, 12 aa, Homo sapiens
  CDR3 for alpha chain variable domain of TCR clone 165373 (TRAV26-1, TRAJ48)
CIVAGGNEKLTF

SEQ ID NO: 330746 - protein, 13 aa, Homo sapiens
  CDR3 for beta chain variable domain of TCR clone 165373 (TRBV18, TRBJ2-7)
CASFRDSAYEQYF

SEQ ID NO: 330747 - protein, 12 aa, Homo sapiens
  CDR3 for alpha chain variable domain of TCR clone 165374 (TRAV6, TRAJ4)
NMLSGGYNKLIF

SEQ ID NO: 330748 - protein, 13 aa, Homo sapiens
  CDR3 for beta chain variable domain of TCR clone 165374 (TRBV4-1, TRBJ2-1)
CASSQEVQYEQFF

SEQ ID NO: 330749 - protein, 12 aa, Homo sapiens
  CDR3 for alpha chain variable domain of TCR clone 165375 (TRAV12-1, TRAJ40)
CVVYSGTYKYIF

SEQ ID NO: 330750 - protein, 22 aa, Homo sapiens
  CDR3 for beta chain variable domain of TCR clone 165375 (TRBV7-6, TRBJ2-1)
SRTRPCIAWPAAWGGGADEQFF

SEQ ID NO: 330751 - protein, 10 aa, Homo sapiens
  CDR3 for alpha chain variable domain of TCR clone 165376 (TRAV12-3, TRAJ49)
CAMNDDQFYF

SEQ ID NO: 330752 - protein, 16 aa, Homo sapiens
  CDR3 for beta chain variable domain of TCR clone 165376 (TRBV10-3, TRBJ2-1)
CAIRGGGRGDYNEQFF

SEQ ID NO: 330753 - protein, 19 aa, Homo sapiens
  CDR3 for alpha chain variable domain of TCR clone 165377 (TRAV27, TRAJ53)
ASTSVQSRNSGGSNYKLTF

SEQ ID NO: 330754 - protein, 14 aa, Homo sapiens
  CDR3 for beta chain variable domain of TCR clone 165377 (TRBV11-1, TRBJ2-7)
CANTFAVPSYEQYF

SEQ ID NO: 330755 - protein, 14 aa, Homo sapiens
  CDR3 for alpha chain variable domain of TCR clone 165378 (TRAV3, TRAJ20)
CAVRPSLTTTSSAL

SEQ ID NO: 330756 - protein, 16 aa, Homo sapiens
  CDR3 for beta chain variable domain of TCR clone 165378 (TRBV12-5, TRBJ2-5)
CASGPRTSGNQETQYF

SEQ ID NO: 330757 - protein, 16 aa, Homo sapiens
  CDR3 for alpha chain variable domain of TCR clone 165379 (TRAV30, TRAJ24)
CGTEIVDADSGGKFQF

SEQ ID NO: 330758 - protein, 20 aa, Homo sapiens
  CDR3 for beta chain variable domain of TCR clone 165379 (TRBV19, TRBJ2-1)
CASSISRTVTSTRLNNEQFF

SEQ ID NO: 330759 - protein, 12 aa, Homo sapiens
  CDR3 for alpha chain variable domain of TCR clone 165380 (TRAV35, TRAJ12)
CAGMDSSYKLIF

SEQ ID NO: 330760 - protein, 14 aa, Homo sapiens
  CDR3 for beta chain variable domain of TCR clone 165380 (TRBV28, TRBJ2-5)
CASSLYRGTETQSF

SEQ ID NO: 330761 - protein, 13 aa, Homo sapiens
  CDR3 for alpha chain variable domain of TCR clone 165381 (TRAV13-2, TRAJ40)
CAEFTSGTYKYIF

SEQ ID NO: 330762 - protein, 14 aa, Homo sapiens
  CDR3 for beta chain variable domain of TCR clone 165381 (TRBV10-2, TRBJ1-5)
WASSSTGRNQPQHF

SEQ ID NO: 330763 - protein, 16 aa, Homo sapiens
  CDR3 for alpha chain variable domain of TCR clone 165382 (TRAV23/DV6, TRAJ9)
CAASIGGNTGGFKSIF

SEQ ID NO: 330764 - protein, 14 aa, Homo sapiens
  CDR3 for beta chain variable domain of TCR clone 165382 (TRBV9, TRBJ2-7)
CASGVGVGSYEQYF

SEQ ID NO: 330765 - protein, 14 aa, Homo sapiens
  CDR3 for alpha chain variable domain of TCR clone 165383 (TRAV1-2, TRAJ8)
CAVREDTGFQKLVF

SEQ ID NO: 330766 - protein, 13 aa, Homo sapiens
  CDR3 for beta chain variable domain of TCR clone 165383 (TRBV11-3, TRBJ2-3)
CASSHDTKDTQYF

SEQ ID NO: 330767 - protein, 13 aa, Homo sapiens
  CDR3 for alpha chain variable domain of TCR clone 165384 (TRAV27, TRAJ45)
CAGAPSQEEGLTD

SEQ ID NO: 330768 - protein, 12 aa, Homo sapiens
  CDR3 for beta chain variable domain of TCR clone 165384 (TRBV24-1, TRBJ2-7)
CATSDPGYEQYF

SEQ ID NO: 330769 - protein, 17 aa, Homo sapiens
  CDR3 for alpha chain variable domain of TCR clone 165385 (TRAV3, TRAJ6)
CAVRDGPRARGSYIPPF

SEQ ID NO: 330770 - protein, 20 aa, Homo sapiens
  CDR3 for beta chain variable domain of TCR clone 165385 (TRBV28, TRBJ2-1)
CASTPIGRSPGLAGGNEQFF

SEQ ID NO: 330771 - protein, 13 aa, Homo sapiens
  CDR3 for alpha chain variable domain of TCR clone 165386 (TRAV12-1, TRAJ8)
CVGMGPGFQKLVF

SEQ ID NO: 330772 - protein, 14 aa, Homo sapiens
  CDR3 for beta chain variable domain of TCR clone 165386 (TRBV4-3, TRBJ1-5)
CASSQGGQGWPQHF

SEQ ID NO: 330773 - protein, 14 aa, Homo sapiens
  CDR3 for alpha chain variable domain of TCR clone 165387 (TRAV23/DV6, TRAJ38)
CAASFVGNNRKLIW

SEQ ID NO: 330774 - protein, 14 aa, Homo sapiens
  CDR3 for beta chain variable domain of TCR clone 165387 (TRBV4-1, TRBJ2-1)
CASRTSGVFHEHFF

SEQ ID NO: 330775 - protein, 10 aa, Homo sapiens
  CDR3 for alpha chain variable domain of TCR clone 165388 (TRAV29/DV5, TRAJ23)
CAATGGKLIF

SEQ ID NO: 330776 - protein, 12 aa, Homo sapiens
  CDR3 for beta chain variable domain of TCR clone 165388 (TRBV28, TRBJ2-1)
CASSLRYNEQFF

SEQ ID NO: 330777 - protein, 15 aa, Homo sapiens
  CDR3 for alpha chain variable domain of TCR clone 165389 (TRAV3, TRAJ22)
CAVRDRGGSARQLNF

SEQ ID NO: 330778 - protein, 13 aa, Homo sapiens
  CDR3 for beta chain variable domain of TCR clone 165389 (TRBV4-2, TRBJ1-1)
CASSQAGNTEAFF

SEQ ID NO: 330779 - protein, 16 aa, Homo sapiens
  CDR3 for alpha chain variable domain of TCR clone 165390 (TRAV3, TRAJ37)
CAVRGKGSGNTGKLIS

SEQ ID NO: 330780 - protein, 16 aa, Homo sapiens
  CDR3 for beta chain variable domain of TCR clone 165390 (TRBV12-5, TRBJ2-5)
CASGPRTSRSQETQYF

SEQ ID NO: 330781 - protein, 14 aa, Homo sapiens
  CDR3 for alpha chain variable domain of TCR clone 165391 (TRAV12-2, TRAJ13)
CAVKKTGGYQKVTF

SEQ ID NO: 330782 - protein, 15 aa, Homo sapiens
  CDR3 for beta chain variable domain of TCR clone 165391 (TRBV20-1, TRBJ2-1)
CSARSPGGPGNEQFF

SEQ ID NO: 330783 - protein, 15 aa, Homo sapiens
  CDR3 for alpha chain variable domain of TCR clone 165392 (TRAV34, TRAJ38)
CGADFTPGNKRKLIW

SEQ ID NO: 330784 - protein, 16 aa, Homo sapiens
  CDR3 for beta chain variable domain of TCR clone 165392 (TRBV28, TRBJ2-2)
CASSLEGGSNTGELFF

SEQ ID NO: 330785 - protein, 13 aa, Homo sapiens
  CDR3 for alpha chain variable domain of TCR clone 165393 (TRAV13-1, TRAJ6)
CAASGGGSYIPTF

SEQ ID NO: 330786 - protein, 15 aa, Homo sapiens
  CDR3 for beta chain variable domain of TCR clone 165393 (TRBV5-4, TRBJ2-2)
CASRYGDLNTGELFF

SEQ ID NO: 330787 - protein, 14 aa, Homo sapiens
  CDR3 for alpha chain variable domain of TCR clone 165394 (TRAV27, TRAJ23)
CAGAFDNQGGKLIF

SEQ ID NO: 330788 - protein, 12 aa, Homo sapiens
  CDR3 for beta chain variable domain of TCR clone 165394 (TRBV7-9, TRBJ2-7)
CASSFGSYEQYF

SEQ ID NO: 330789 - protein, 11 aa, Homo sapiens
  CDR3 for alpha chain variable domain of TCR clone 165395 (TRAV12-2, TRAJ30)
CAVGRDDKIIF

SEQ ID NO: 330790 - protein, 18 aa, Homo sapiens
  CDR3 for beta chain variable domain of TCR clone 165395 (TRBV7-8, TRBJ2-1)
CASSPAGGLAGGLNEQFF

SEQ ID NO: 330791 - protein, 14 aa, Homo sapiens
  CDR3 for alpha chain variable domain of TCR clone 165396 (TRAV38-2/DV8, TRAJ23)
CAYRSQNQGGKLIF

SEQ ID NO: 330792 - protein, 15 aa, Homo sapiens
  CDR3 for beta chain variable domain of TCR clone 165396 (TRBV11-2, TRBJ2-2)
CASSSDRVNAGELFF

SEQ ID NO: 330793 - protein, 14 aa, Homo sapiens
  CDR3 for alpha chain variable domain of TCR clone 165397 (TRAV12-2, TRAJ17)
CAVLFKAAGNKLTF

SEQ ID NO: 330794 - protein, 16 aa, Homo sapiens
  CDR3 for beta chain variable domain of TCR clone 165397 (TRBV7-2, TRBJ2-7)
CASSLEAGGPWYEQYF

SEQ ID NO: 330795 - protein, 12 aa, Homo sapiens
  CDR3 for alpha chain variable domain of TCR clone 165398 (TRAV21, TRAJ31)
CAVWGNNARLMF

SEQ ID NO: 330796 - protein, 16 aa, Homo sapiens
  CDR3 for beta chain variable domain of TCR clone 165398 (TRBV27, TRBJ2-5)
CASSYGPGCQKETQYF

SEQ ID NO: 330797 - protein, 13 aa, Homo sapiens
  CDR3 for alpha chain variable domain of TCR clone 165399 (TRAV20, TRAJ20)
CAVRLVRDYKLSF

SEQ ID NO: 330798 - protein, 14 aa, Homo sapiens
  CDR3 for beta chain variable domain of TCR clone 165399 (TRBV19, TRBJ2-2)
CASTVTANTGELFF

SEQ ID NO: 330799 - protein, 16 aa, Homo sapiens
  CDR3 for alpha chain variable domain of TCR clone 165400 (TRAV30, TRAJ24)
CGTEIVDADSWGKFQF

SEQ ID NO: 330800 - protein, 14 aa, Homo sapiens
  CDR3 for beta chain variable domain of TCR clone 165400 (TRBV6-1, TRBJ1-1)
CASSENDRTTEAFF

SEQ ID NO: 330801 - protein, 14 aa, Homo sapiens
  CDR3 for alpha chain variable domain of TCR clone 165401 (TRAV12-1, TRAJ17)
CVVNYKAAGNKLTF

SEQ ID NO: 330802 - protein, 16 aa, Homo sapiens
  CDR3 for beta chain variable domain of TCR clone 165401 (TRBV10-3, TRBJ2-1)
CSISGVGDGGGGEQFF

SEQ ID NO: 330803 - protein, 14 aa, Homo sapiens
  CDR3 for alpha chain variable domain of TCR clone 165402 (TRAV2, TRAJ13)
CAVRPPGGYQKVTF

SEQ ID NO: 330804 - protein, 12 aa, Homo sapiens
  CDR3 for beta chain variable domain of TCR clone 165402 (TRBV11-2, TRBJ2-1)
CASSPGNNEQFF

SEQ ID NO: 330805 - protein, 16 aa, Homo sapiens
  CDR3 for alpha chain variable domain of TCR clone 165403 (TRAV1-2, TRAJ10)
CAVRGVLTGGGNKLTF

SEQ ID NO: 330806 - protein, 15 aa, Homo sapiens
  CDR3 for beta chain variable domain of TCR clone 165403 (TRBV7-9, TRBJ1-6)
CASSSAGRGNSPLHF

SEQ ID NO: 330807 - protein, 14 aa, Homo sapiens
  CDR3 for alpha chain variable domain of TCR clone 165404 (TRAV1-2, TRAJ6)
CAVRASGGSYIPTF

SEQ ID NO: 330808 - protein, 14 aa, Homo sapiens
  CDR3 for beta chain variable domain of TCR clone 165404 (TRBV19, TRBJ2-7)
CASSRGRGTYEQYF

SEQ ID NO: 330809 - protein, 14 aa, Homo sapiens
  CDR3 for alpha chain variable domain of TCR clone 165405 (TRAV8-4, TRAJ29)
CAVSAVEGNNPLVF

SEQ ID NO: 330810 - protein, 13 aa, Homo sapiens
  CDR3 for beta chain variable domain of TCR clone 165405 (TRBV12-4, TRBJ2-7)
CASSFQGRYEQYF

SEQ ID NO: 330811 - protein, 10 aa, Homo sapiens
  CDR3 for alpha chain variable domain of TCR clone 165406 (TRAV12-1, TRAJ21)
CVVNPIKFYF

SEQ ID NO: 330812 - protein, 16 aa, Homo sapiens
  CDR3 for beta chain variable domain of TCR clone 165406 (TRBV20-1, TRBJ2-1)
CSARGLAEGSYNEQFF

SEQ ID NO: 330813 - protein, 11 aa, Homo sapiens
  CDR3 for alpha chain variable domain of TCR clone 165407 (TRAV4, TRAJ31)
CLVGDNARLIV

SEQ ID NO: 330814 - protein, 16 aa, Homo sapiens
  CDR3 for beta chain variable domain of TCR clone 165407 (TRBV7-2, TRBJ2-5)
CASSSKWLSGQETQYF

SEQ ID NO: 330815 - protein, 14 aa, Homo sapiens
  CDR3 for alpha chain variable domain of TCR clone 165408 (TRAV12-3, TRAJ10)
SHLPLPGGGNKLTF

SEQ ID NO: 330816 - protein, 14 aa, Homo sapiens
  CDR3 for beta chain variable domain of TCR clone 165408 (TRBV11-3, TRBJ2-7)
CASSPDRNTYEQYF

SEQ ID NO: 330817 - protein, 17 aa, Homo sapiens
  CDR3 for alpha chain variable domain of TCR clone 165409 (TRAV3, TRAJ7)
CAVRDMSPLEGTTDSLL

SEQ ID NO: 330818 - protein, 17 aa, Homo sapiens
  CDR3 for beta chain variable domain of TCR clone 165409 (TRBV15, TRBJ1-2)
SATSGREIDVVNYGYTF

SEQ ID NO: 330819 - protein, 11 aa, Homo sapiens
  CDR3 for alpha chain variable domain of TCR clone 165410 (TRAV12-2, TRAJ23)
CARGRGGKLIF

SEQ ID NO: 330820 - protein, 14 aa, Homo sapiens
  CDR3 for beta chain variable domain of TCR clone 165410 (TRBV28, TRBJ2-5)
CTSSLGDRAETQYF

SEQ ID NO: 330821 - protein, 10 aa, Homo sapiens
  CDR3 for alpha chain variable domain of TCR clone 165411 (TRAV12-3, TRAJ49)
CAMNHDQFYF

SEQ ID NO: 330822 - protein, 13 aa, Homo sapiens
  CDR3 for beta chain variable domain of TCR clone 165411 (TRBV12-4, TRBJ1-1)
CASSPGTGFEAFF

SEQ ID NO: 330823 - protein, 15 aa, Homo sapiens
  CDR3 for alpha chain variable domain of TCR clone 165412 (TRAV27, TRAJ38)
CAARRNAGNNRKLIW

SEQ ID NO: 330824 - protein, 14 aa, Homo sapiens
  CDR3 for beta chain variable domain of TCR clone 165412 (TRBV7-2, TRBJ1-6)
CASSLTGVNSPLHF

SEQ ID NO: 330825 - protein, 12 aa, Homo sapiens
  CDR3 for alpha chain variable domain of TCR clone 165413 (TRAV3, TRAJ20)
CAVRDGDYKPSF

SEQ ID NO: 330826 - protein, 13 aa, Homo sapiens
  CDR3 for beta chain variable domain of TCR clone 165413 (TRBV20-1, TRBJ1-6)
CSAPLGVGSPLHF

SEQ ID NO: 330827 - protein, 17 aa, Homo sapiens
  CDR3 for alpha chain variable domain of TCR clone 165414 (TRAV14/DV4, TRAJ12)
CAMRELPWMDSSYKLIF

SEQ ID NO: 330828 - protein, 14 aa, Homo sapiens
  CDR3 for beta chain variable domain of TCR clone 165414 (TRBV11-1, TRBJ2-7)
CASSFRQGSYEQYF

SEQ ID NO: 330829 - protein, 14 aa, Homo sapiens
  CDR3 for alpha chain variable domain of TCR clone 165415 (TRAV12-2, TRAJ40)
CAVKIPSGTYKYIF

SEQ ID NO: 330830 - protein, 12 aa, Homo sapiens
  CDR3 for beta chain variable domain of TCR clone 165415 (TRBV12-4, TRBJ2-7)
CASSSGPRGQYF

SEQ ID NO: 330831 - protein, 13 aa, Homo sapiens
  CDR3 for alpha chain variable domain of TCR clone 165416 (TRAV12-1, TRAJ54)
CVVITQGAQKLVF

SEQ ID NO: 330832 - protein, 12 aa, Homo sapiens
  CDR3 for beta chain variable domain of TCR clone 165416 (TRBV19, TRBJ2-7)
CASRATGTEQYF

SEQ ID NO: 330833 - protein, 17 aa, Homo sapiens
  CDR3 for alpha chain variable domain of TCR clone 165417 (TRAV23/DV6, TRAJ57)
CAASSTLYQGGSEKLVF

SEQ ID NO: 330834 - protein, 14 aa, Homo sapiens
  CDR3 for beta chain variable domain of TCR clone 165417 (TRBV25-1, TRBJ1-1)
CASTHLGGNTEAFF

SEQ ID NO: 330835 - protein, 17 aa, Homo sapiens
  CDR3 for alpha chain variable domain of TCR clone 165418 (TRAV3, TRAJ6)
CAVRDGPRAGGSYIPTF

SEQ ID NO: 330836 - protein, 12 aa, Homo sapiens
  CDR3 for beta chain variable domain of TCR clone 165418 (TRBV7-6, TRBJ2-7)
CASSLADSEQHF

SEQ ID NO: 330837 - protein, 16 aa, Homo sapiens
  CDR3 for alpha chain variable domain of TCR clone 165419 (TRAV12-3, TRAJ53)
CAMSTGSGGSNYKLTF

SEQ ID NO: 330838 - protein, 11 aa, Homo sapiens
  CDR3 for beta chain variable domain of TCR clone 165419 (TRBV29-1, TRBJ2-5)
RSEDRTGTQYF

SEQ ID NO: 330839 - protein, 15 aa, Homo sapiens
  CDR3 for alpha chain variable domain of TCR clone 165420 (TRAV12-2, TRAJ53)
CAVNGGGGSNYKLTF

SEQ ID NO: 330840 - protein, 17 aa, Homo sapiens
  CDR3 for beta chain variable domain of TCR clone 165420 (TRBV28, TRBJ2-5)
CASSTPEGDALQETQYF

SEQ ID NO: 330841 - protein, 14 aa, Homo sapiens
  CDR3 for alpha chain variable domain of TCR clone 165421 (TRAV12-1, TRAJ12)
CVVTRMDSSYKLIF

SEQ ID NO: 330842 - protein, 13 aa, Homo sapiens
  CDR3 for beta chain variable domain of TCR clone 165421 (TRBV20-1, TRBJ1-1)
CSARGGGNTEACF

SEQ ID NO: 330843 - protein, 13 aa, Homo sapiens
  CDR3 for alpha chain variable domain of TCR clone 165422 (TRAV17, TRAJ5)
CAPMDTGRRALTF

SEQ ID NO: 330844 - protein, 13 aa, Homo sapiens
  CDR3 for beta chain variable domain of TCR clone 165422 (TRBV7-2, TRBJ2-2)
CASSSVRAGELFF

SEQ ID NO: 330845 - protein, 18 aa, Homo sapiens
  CDR3 for alpha chain variable domain of TCR clone 165423 (TRAV8-3, TRAJ4)
WVLDPTSNDPGGYNKLIF

SEQ ID NO: 330846 - protein, 13 aa, Homo sapiens
  CDR3 for beta chain variable domain of TCR clone 165423 (TRBV20-1, TRBJ1-2)
CSATGIQGSGYTF

SEQ ID NO: 330847 - protein, 17 aa, Homo sapiens
  CDR3 for alpha chain variable domain of TCR clone 165424 (TRAV3, TRAJ6)
CAVRDGPRAGGSYIPTF

SEQ ID NO: 330848 - protein, 12 aa, Homo sapiens
  CDR3 for beta chain variable domain of TCR clone 165424 (TRBV7-3, TRBJ2-7)
CASSIKREEQYF

SEQ ID NO: 330849 - protein, 18 aa, Homo sapiens
  CDR3 for alpha chain variable domain of TCR clone 165425 (TRAV3, TRAJ17)
CAVRARRGGRSCRQQANF

SEQ ID NO: 330850 - protein, 14 aa, Homo sapiens
  CDR3 for beta chain variable domain of TCR clone 165425 (TRBV4-1, TRBJ2-2)
CASSQAVKAGELFF

SEQ ID NO: 330851 - protein, 13 aa, Homo sapiens
  CDR3 for alpha chain variable domain of TCR clone 165426 (TRAV12-2, TRAJ20)
CAVYPSNDYKLSF

SEQ ID NO: 330852 - protein, 15 aa, Homo sapiens
  CDR3 for beta chain variable domain of TCR clone 165426 (TRBV18, TRBJ1-2)
CASSPGNGVGYGYTF

SEQ ID NO: 330853 - protein, 18 aa, Homo sapiens
  CDR3 for alpha chain variable domain of TCR clone 165427 (TRAV26-2, TRAJ45)
CILRVDKYSGGGAEGLTF

SEQ ID NO: 330854 - protein, 11 aa, Homo sapiens
  CDR3 for beta chain variable domain of TCR clone 165427 (TRBV29-1, TRBJ2-5)
CSEDRTGTQYF

SEQ ID NO: 330855 - protein, 14 aa, Homo sapiens
  CDR3 for alpha chain variable domain of TCR clone 165428 (TRAV2, TRAJ22)
CAVGRGGSAGQLTF

SEQ ID NO: 330856 - protein, 13 aa, Homo sapiens
  CDR3 for beta chain variable domain of TCR clone 165428 (TRBV7-3, TRBJ1-1)
CASSQDWGAEAFF

SEQ ID NO: 330857 - protein, 12 aa, Homo sapiens
  CDR3 for alpha chain variable domain of TCR clone 165429 (TRAV27, TRAJ17)
CAMTLTGNKLTF

SEQ ID NO: 330858 - protein, 15 aa, Homo sapiens
  CDR3 for beta chain variable domain of TCR clone 165429 (TRBV20-1, TRBJ2-7)
CSARDRVSGMDEQYF

SEQ ID NO: 330859 - protein, 14 aa, Homo sapiens
  CDR3 for alpha chain variable domain of TCR clone 165430 (TRAV16, TRAJ17)
CALSGRAAGNELTF

SEQ ID NO: 330860 - protein, 15 aa, Homo sapiens
  CDR3 for beta chain variable domain of TCR clone 165430 (TRBV3-1, TRBJ1-2)
CASSPTRLPDGGYTF

SEQ ID NO: 330861 - protein, 11 aa, Homo sapiens
  CDR3 for alpha chain variable domain of TCR clone 165431 (TRAV3, TRAJ21)
CAVGNFTNFSF

SEQ ID NO: 330862 - protein, 16 aa, Homo sapiens
  CDR3 for beta chain variable domain of TCR clone 165431 (TRBV19, TRBJ2-1)
CASSKAGPSSYNEQFF

SEQ ID NO: 330863 - protein, 12 aa, Homo sapiens
  CDR3 for alpha chain variable domain of TCR clone 165432 (TRAV13-1, TRAJ52)
HAGGTSYGKLTF

SEQ ID NO: 330864 - protein, 12 aa, Homo sapiens
  CDR3 for beta chain variable domain of TCR clone 165432 (TRBV7-8, TRBJ2-7)
CASSLGDREQYF

SEQ ID NO: 330865 - protein, 13 aa, Homo sapiens
  CDR3 for alpha chain variable domain of TCR clone 165433 (TRAV3, TRAJ30)
CAVRDRRDDKIIF

SEQ ID NO: 330866 - protein, 16 aa, Homo sapiens
  CDR3 for beta chain variable domain of TCR clone 165433 (TRBV7-3, TRBJ2-2)
CASSLKRGTLSGELFF

SEQ ID NO: 330867 - protein, 14 aa, Homo sapiens
  CDR3 for alpha chain variable domain of TCR clone 165434 (TRAV12-1, TRAJ17)
CVVNYKAAGNKLTF

SEQ ID NO: 330868 - protein, 14 aa, Homo sapiens
  CDR3 for beta chain variable domain of TCR clone 165434 (TRBV7-8, TRBJ2-3)
CASSLEAGTDTQYL

SEQ ID NO: 330869 - protein, 15 aa, Homo sapiens
  CDR3 for alpha chain variable domain of TCR clone 165435 (TRAV12-1, TRAJ44)
CVAFVNTGTASKLTF

SEQ ID NO: 330870 - protein, 17 aa, Homo sapiens
  CDR3 for beta chain variable domain of TCR clone 165435 (TRBV7-8, TRBJ2-6)
CASSAGTGGAGANVLTF

SEQ ID NO: 330871 - protein, 17 aa, Homo sapiens
  CDR3 for alpha chain variable domain of TCR clone 165436 (TRAV12-2, TRAJ42)
CAVNILNNGGSQGNLIF

SEQ ID NO: 330872 - protein, 13 aa, Homo sapiens
  CDR3 for beta chain variable domain of TCR clone 165436 (TRBV3-1, TRBJ1-5)
CASSHDLDQPQHF

SEQ ID NO: 330873 - protein, 16 aa, Homo sapiens
  CDR3 for alpha chain variable domain of TCR clone 165437 (TRAV12-3, TRAJ4)
CAMTRLFSVGYNKLIF

SEQ ID NO: 330874 - protein, 16 aa, Homo sapiens
  CDR3 for beta chain variable domain of TCR clone 165437 (TRBV27, TRBJ2-1)
CASSARLAGVYNEQFF

SEQ ID NO: 330875 - protein, 16 aa, Homo sapiens
  CDR3 for alpha chain variable domain of TCR clone 165438 (TRAV38-1, TRAJ37)
CAFKGDGSSNTGKLIF

SEQ ID NO: 330876 - protein, 18 aa, Homo sapiens
  CDR3 for beta chain variable domain of TCR clone 165438 (TRBV11-2, TRBJ2-3)
CASSLGGASRGAPNTQYF

SEQ ID NO: 330877 - protein, 16 aa, Homo sapiens
  CDR3 for alpha chain variable domain of TCR clone 165439 (TRAV13-1, TRAJ18)
CAASRMRGSTLGRLYF

SEQ ID NO: 330878 - protein, 16 aa, Homo sapiens
  CDR3 for beta chain variable domain of TCR clone 165439 (TRBV25-1, TRBJ1-1)
CASSSRGRTGYTEAFF

SEQ ID NO: 330879 - protein, 15 aa, Homo sapiens
  CDR3 for alpha chain variable domain of TCR clone 165440 (TRAV14/DV4, TRAJ49)
CAMREGRDTGNQFYF

SEQ ID NO: 330880 - protein, 17 aa, Homo sapiens
  CDR3 for beta chain variable domain of TCR clone 165440 (TRBV12-4, TRBJ1-5)
CASILRGDRGPNQPQHF

SEQ ID NO: 330881 - protein, 15 aa, Homo sapiens
  CDR3 for alpha chain variable domain of TCR clone 165441 (TRAV3, TRAJ17)
CAVSPKEAAGNKLTF

SEQ ID NO: 330882 - protein, 12 aa, Homo sapiens
  CDR3 for beta chain variable domain of TCR clone 165441 (TRBV7-9, TRBJ1-6)
CASSLMTSRLHF

SEQ ID NO: 330883 - protein, 14 aa, Homo sapiens
  CDR3 for alpha chain variable domain of TCR clone 165442 (TRAV12-2, TRAJ17)
CAALFKAAGNKLTF

SEQ ID NO: 330884 - protein, 16 aa, Homo sapiens
  CDR3 for beta chain variable domain of TCR clone 165442 (TRBV20-1, TRBJ2-2)
CSASASGIPGSGELFF

SEQ ID NO: 330885 - protein, 12 aa, Homo sapiens
  CDR3 for alpha chain variable domain of TCR clone 165443 (TRAV13-2, TRAJ23)
CAERHRGGKLIF

SEQ ID NO: 330886 - protein, 15 aa, Homo sapiens
  CDR3 for beta chain variable domain of TCR clone 165443 (TRBV6-4, TRBJ2-1)
CASSDSTGGYNEQFF

SEQ ID NO: 330887 - protein, 14 aa, Homo sapiens
  CDR3 for alpha chain variable domain of TCR clone 165444 (TRAV1-2, TRAJ8)
CAVREDTGFQKLVF

SEQ ID NO: 330888 - protein, 13 aa, Homo sapiens
  CDR3 for beta chain variable domain of TCR clone 165444 (TRBV12-5, TRBJ2-3)
CASGERQSDTQYF

SEQ ID NO: 330889 - protein, 14 aa, Homo sapiens
  CDR3 for alpha chain variable domain of TCR clone 165445 (TRAV16, TRAJ3)
CALSQYSSASKIIF

SEQ ID NO: 330890 - protein, 16 aa, Homo sapiens
  CDR3 for beta chain variable domain of TCR clone 165445 (TRBV7-9, TRBJ2-7)
CASSYPDREGGYEQYF

SEQ ID NO: 330891 - protein, 12 aa, Homo sapiens
  CDR3 for alpha chain variable domain of TCR clone 165446 (TRAV12-3, TRAJ17)
CAMTLTGDKLTF

SEQ ID NO: 330892 - protein, 12 aa, Homo sapiens
  CDR3 for beta chain variable domain of TCR clone 165446 (TRBV7-8, TRBJ2-7)
CASSLGDREQYF

SEQ ID NO: 330893 - protein, 12 aa, Homo sapiens
  CDR3 for alpha chain variable domain of TCR clone 165447 (TRAV26-2, TRAJ21)
CILKGNFNKFYF

SEQ ID NO: 330894 - protein, 13 aa, Homo sapiens
  CDR3 for beta chain variable domain of TCR clone 165447 (TRBV20-1, TRBJ2-4)
CSAGGGAKNIQYF

SEQ ID NO: 330895 - protein, 14 aa, Homo sapiens
  CDR3 for alpha chain variable domain of TCR clone 165448 (TRAV12-2, TRAJ40)
WAVKIPSGTYKYIF

SEQ ID NO: 330896 - protein, 13 aa, Homo sapiens
  CDR3 for beta chain variable domain of TCR clone 165448 (TRBV7-9, TRBJ1-2)
CASSLKQNYGYTF

SEQ ID NO: 330897 - protein, 12 aa, Homo sapiens
  CDR3 for alpha chain variable domain of TCR clone 165449 (TRAV12-3, TRAJ17)
CAMTLTGTKLTF

SEQ ID NO: 330898 - protein, 15 aa, Homo sapiens
  CDR3 for beta chain variable domain of TCR clone 165449 (TRBV20-1, TRBJ2-7)
CSARDRVSGMGEQYF

SEQ ID NO: 330899 - protein, 15 aa, Homo sapiens
  CDR3 for alpha chain variable domain of TCR clone 165450 (TRAV13-1, TRAJ32)
CAASIYGGATSKLIS

SEQ ID NO: 330900 - protein, 17 aa, Homo sapiens
  CDR3 for beta chain variable domain of TCR clone 165450 (TRBV7-3, TRBJ2-5)
CASSLGSGRSGSETQYF

SEQ ID NO: 330901 - protein, 13 aa, Homo sapiens
  CDR3 for alpha chain variable domain of TCR clone 165451 (TRAV27, TRAJ29)
CAGAHSCNTPLVF

SEQ ID NO: 330902 - protein, 15 aa, Homo sapiens
  CDR3 for beta chain variable domain of TCR clone 165451 (TRBV15, TRBJ1-4)
CATSRDMGSYEKLFF

SEQ ID NO: 330903 - protein, 14 aa, Homo sapiens
  CDR3 for alpha chain variable domain of TCR clone 165452 (TRAV1-2, TRAJ8)
CAVSEDTGFQKLVL

SEQ ID NO: 330904 - protein, 15 aa, Homo sapiens
  CDR3 for beta chain variable domain of TCR clone 165452 (TRBV6-3, TRBJ2-7)
CASSSPGTVFYEQYF

SEQ ID NO: 330905 - protein, 14 aa, Homo sapiens
  CDR3 for alpha chain variable domain of TCR clone 165453 (TRAV38-1, TRAJ45)
CASHSGGGADGLTF

SEQ ID NO: 330906 - protein, 14 aa, Homo sapiens
  CDR3 for beta chain variable domain of TCR clone 165453 (TRBV7-9, TRBJ2-5)
RASSLDTAQETQYF

SEQ ID NO: 330907 - protein, 13 aa, Homo sapiens
  CDR3 for alpha chain variable domain of TCR clone 165454 (TRAV21, TRAJ37)
CAVSSGNTGKLIF

SEQ ID NO: 330908 - protein, 13 aa, Homo sapiens
  CDR3 for beta chain variable domain of TCR clone 165454 (TRBV20-1, TRBJ2-5)
CSAREAFQETQYF

SEQ ID NO: 330909 - protein, 12 aa, Homo sapiens
  CDR3 for alpha chain variable domain of TCR clone 165455 (TRAV12-1, TRAJ34)
CVVAGATDKLIF

SEQ ID NO: 330910 - protein, 14 aa, Homo sapiens
  CDR3 for beta chain variable domain of TCR clone 165455 (TRBV27, TRBJ2-1)
CAGSIAETYNEQFF

SEQ ID NO: 330911 - protein, 14 aa, Homo sapiens
  CDR3 for alpha chain variable domain of TCR clone 165456 (TRAV38-1, TRAJ29)
CVFITPSGTTPLVF

SEQ ID NO: 330912 - protein, 14 aa, Homo sapiens
  CDR3 for beta chain variable domain of TCR clone 165456 (TRBV18, TRBJ2-7)
CASSPRGGAYEQYF

SEQ ID NO: 330913 - protein, 16 aa, Homo sapiens
  CDR3 for alpha chain variable domain of TCR clone 165457 (TRAV3, TRAJ37)
CAVRVSGSGNTGKLIF

SEQ ID NO: 330914 - protein, 16 aa, Homo sapiens
  CDR3 for beta chain variable domain of TCR clone 165457 (TRBV11-2, TRBJ2-7)
CASSPTTGGVSYEQYF

SEQ ID NO: 330915 - protein, 16 aa, Homo sapiens
  CDR3 for alpha chain variable domain of TCR clone 165458 (TRAV26-1, TRAJ33)
CIVPFWGEASNYQLIW

SEQ ID NO: 330916 - protein, 14 aa, Homo sapiens
  CDR3 for beta chain variable domain of TCR clone 165458 (TRBV6-3, TRBJ1-1)
CASSYHSKNTEAFF

SEQ ID NO: 330917 - protein, 16 aa, Homo sapiens
  CDR3 for alpha chain variable domain of TCR clone 165459 (TRAV30, TRAJ32)
CGTESSYGGATNKLIF

SEQ ID NO: 330918 - protein, 11 aa, Homo sapiens
  CDR3 for beta chain variable domain of TCR clone 165459 (TRBV6-3, TRBJ2-3)
CATGQADTQYF

SEQ ID NO: 330919 - protein, 12 aa, Homo sapiens
  CDR3 for alpha chain variable domain of TCR clone 165460 (TRAV12-3, TRAJ17)
CAMTLTGNKLTF

SEQ ID NO: 330920 - protein, 15 aa, Homo sapiens
  CDR3 for beta chain variable domain of TCR clone 165460 (TRBV20-1, TRBJ2-7)
CSARDRVAGIGEQYF

SEQ ID NO: 330921 - protein, 14 aa, Homo sapiens
  CDR3 for alpha chain variable domain of TCR clone 165461 (TRAV1-2, TRAJ16)
CAVNRFSDGQKLLF

SEQ ID NO: 330922 - protein, 16 aa, Homo sapiens
  CDR3 for beta chain variable domain of TCR clone 165461 (TRBV11-2, TRBJ1-2)
WASSLDTGGADYGYTF

SEQ ID NO: 330923 - protein, 15 aa, Homo sapiens
  CDR3 for alpha chain variable domain of TCR clone 165462 (TRAV8-3, TRAJ15)
CAVGAPNQAGTALIF

SEQ ID NO: 330924 - protein, 14 aa, Homo sapiens
  CDR3 for beta chain variable domain of TCR clone 165462 (TRBV20-1, TRBJ2-1)
CSPTDEASYNEQFF

SEQ ID NO: 330925 - protein, 13 aa, Homo sapiens
  CDR3 for alpha chain variable domain of TCR clone 165463 (TRAV17, TRAJ9)
CATDYTGGVKTIF

SEQ ID NO: 330926 - protein, 13 aa, Homo sapiens
  CDR3 for beta chain variable domain of TCR clone 165463 (TRBV7-9, TRBJ1-2)
CASSLKQNYGCTF

SEQ ID NO: 330927 - protein, 17 aa, Homo sapiens
  CDR3 for alpha chain variable domain of TCR clone 165464 (TRAV3, TRAJ42)
CAVRDRDYGGSQGNLIF

SEQ ID NO: 330928 - protein, 13 aa, Homo sapiens
  CDR3 for beta chain variable domain of TCR clone 165464 (TRBV7-9, TRBJ2-1)
CASSAGLYNEQFF

SEQ ID NO: 330929 - protein, 13 aa, Homo sapiens
  CDR3 for alpha chain variable domain of TCR clone 165465 (TRAV29/DV5, TRAJ31)
CAASRNNNARLMF

SEQ ID NO: 330930 - protein, 14 aa, Homo sapiens
  CDR3 for beta chain variable domain of TCR clone 165465 (TRBV2, TRBJ2-7)
CASSRDRSSYEQYF

SEQ ID NO: 330931 - protein, 14 aa, Homo sapiens
  CDR3 for alpha chain variable domain of TCR clone 165466 (TRAV26-1, TRAJ38)
CIADNAGNNRTLIW

SEQ ID NO: 330932 - protein, 15 aa, Homo sapiens
  CDR3 for beta chain variable domain of TCR clone 165466 (TRBV27, TRBJ2-7)
CASSTAGTGSYEQYF

SEQ ID NO: 330933 - protein, 11 aa, Homo sapiens
  CDR3 for alpha chain variable domain of TCR clone 165467 (TRAV12-1, TRAJ37)
YVVNTPGKLIF

SEQ ID NO: 330934 - protein, 13 aa, Homo sapiens
  CDR3 for beta chain variable domain of TCR clone 165467 (TRBV12-4, TRBJ1-5)
CASSPDRAQPQHF

SEQ ID NO: 330935 - protein, 15 aa, Homo sapiens
  CDR3 for alpha chain variable domain of TCR clone 165468 (TRAV12-2, TRAJ43)
CAFDMRFGAGTRLTV

SEQ ID NO: 330936 - protein, 16 aa, Homo sapiens
  CDR3 for beta chain variable domain of TCR clone 165468 (TRBV5-1, TRBJ1-1)
CASSSGVNSLNTEAFF

SEQ ID NO: 330937 - protein, 11 aa, Homo sapiens
  CDR3 for alpha chain variable domain of TCR clone 165469 (TRAV12-1, TRAJ40)
CVPSGTYKYIF

SEQ ID NO: 330938 - protein, 15 aa, Homo sapiens
  CDR3 for beta chain variable domain of TCR clone 165469 (TRBV12-4, TRBJ2-1)
CASSPLSGRNNEQFF

SEQ ID NO: 330939 - protein, 19 aa, Homo sapiens
  CDR3 for alpha chain variable domain of TCR clone 165470 (TRAV1-1, TRAJ37)
CLLLLRCERSGSNTGKLIF

SEQ ID NO: 330940 - protein, 14 aa, Homo sapiens
  CDR3 for beta chain variable domain of TCR clone 165470 (TRBV29-1, TRBJ2-2)
CGALGGVGAGELFF

SEQ ID NO: 330941 - protein, 12 aa, Homo sapiens
  CDR3 for alpha chain variable domain of TCR clone 165471 (TRAV4, TRAJ26)
CLVSDYGQNFVF

SEQ ID NO: 330942 - protein, 16 aa, Homo sapiens
  CDR3 for beta chain variable domain of TCR clone 165471 (TRBV7-2, TRBJ1-2)
CASSSNQDRRGHGYTF

SEQ ID NO: 330943 - protein, 16 aa, Homo sapiens
  CDR3 for alpha chain variable domain of TCR clone 165472 (TRAV16, TRAJ52)
CALSAAGGTSYGKLTF

SEQ ID NO: 330944 - protein, 13 aa, Homo sapiens
  CDR3 for beta chain variable domain of TCR clone 165472 (TRBV3-1, TRBJ1-5)
CASSQCGDQPQHF

SEQ ID NO: 330945 - protein, 12 aa, Homo sapiens
  CDR3 for alpha chain variable domain of TCR clone 165473 (TRAV13-1, TRAJ21)
CAAKEGFNKFYF

SEQ ID NO: 330946 - protein, 15 aa, Homo sapiens
  CDR3 for beta chain variable domain of TCR clone 165473 (TRBV7-3, TRBJ2-3)
CASSLGLTLGDTQYF

SEQ ID NO: 330947 - protein, 11 aa, Homo sapiens
  CDR3 for alpha chain variable domain of TCR clone 165474 (TRAV23/DV6, TRAJ49)
CAVAPVTSSIL

SEQ ID NO: 330948 - protein, 13 aa, Homo sapiens
  CDR3 for beta chain variable domain of TCR clone 165474 (TRBV20-1, TRBJ2-3)
CSARLAGTDTQYF

SEQ ID NO: 330949 - protein, 13 aa, Homo sapiens
  CDR3 for alpha chain variable domain of TCR clone 165475 (TRAV36/DV7, TRAJ54)
CAVDIQGAQKLVF

SEQ ID NO: 330950 - protein, 15 aa, Homo sapiens
  CDR3 for beta chain variable domain of TCR clone 165475 (TRBV7-9, TRBJ1-6)
CASSSPGRGNSPLHF

SEQ ID NO: 330951 - protein, 13 aa, Homo sapiens
  CDR3 for alpha chain variable domain of TCR clone 165476 (TRAV12-1, TRAJ16)
CVVNGPDGQKLLF

SEQ ID NO: 330952 - protein, 16 aa, Homo sapiens
  CDR3 for beta chain variable domain of TCR clone 165476 (TRBV23-1, TRBJ2-1)
CISVPATGPTYNEQFF

SEQ ID NO: 330953 - protein, 14 aa, Homo sapiens
  CDR3 for alpha chain variable domain of TCR clone 165477 (TRAV23/DV6, TRAJ40)
CAASLTSGTYKYIF

SEQ ID NO: 330954 - protein, 13 aa, Homo sapiens
  CDR3 for beta chain variable domain of TCR clone 165477 (TRBV7-9, TRBJ1-2)
CASSLKQNYGYTF

SEQ ID NO: 330955 - protein, 14 aa, Homo sapiens
  CDR3 for alpha chain variable domain of TCR clone 165478 (TRAV4, TRAJ12)
CLVGYMDSGYKLIF

SEQ ID NO: 330956 - protein, 14 aa, Homo sapiens
  CDR3 for beta chain variable domain of TCR clone 165478 (TRBV27, TRBJ1-1)
CASSPGGGATEAFF

SEQ ID NO: 330957 - protein, 15 aa, Homo sapiens
  CDR3 for alpha chain variable domain of TCR clone 165479 (TRAV23/DV6, TRAJ18)
CAARFRGSTLGRLYF

SEQ ID NO: 330958 - protein, 15 aa, Homo sapiens
  CDR3 for beta chain variable domain of TCR clone 165479 (TRBV20-1, TRBJ2-7)
CSARDRVSGMDEQYF

SEQ ID NO: 330959 - protein, 19 aa, Homo sapiens
  CDR3 for alpha chain variable domain of TCR clone 165480 (TRAV3, TRAJ6)
CAVRDRNPSRSGGSYIPTF

SEQ ID NO: 330960 - protein, 15 aa, Homo sapiens
  CDR3 for beta chain variable domain of TCR clone 165480 (TRBV18, TRBJ2-7)
CASSPTFMDSYKQYF

SEQ ID NO: 330961 - protein, 14 aa, Homo sapiens
  CDR3 for alpha chain variable domain of TCR clone 165481 (TRAV12-2, TRAJ13)
CAVKKTGGYQKVTF

SEQ ID NO: 330962 - protein, 15 aa, Homo sapiens
  CDR3 for beta chain variable domain of TCR clone 165481 (TRBV7-2, TRBJ2-1)
CASSLASGRVSEQFF

SEQ ID NO: 330963 - protein, 15 aa, Homo sapiens
  CDR3 for alpha chain variable domain of TCR clone 165482 (TRAV29/DV5, TRAJ13)
CAASLNSGGYQKVTF

SEQ ID NO: 330964 - protein, 16 aa, Homo sapiens
  CDR3 for beta chain variable domain of TCR clone 165482 (TRBV28, TRBJ2-7)
CASSFSGTGGSYEQYF

SEQ ID NO: 330965 - protein, 13 aa, Homo sapiens
  CDR3 for alpha chain variable domain of TCR clone 165483 (TRAV16, TRAJ48)
CSPLNFGNEKLTF

SEQ ID NO: 330966 - protein, 11 aa, Homo sapiens
  CDR3 for beta chain variable domain of TCR clone 165483 (TRBV7-9, TRBJ2-3)
CASSPTDTQDF

SEQ ID NO: 330967 - protein, 11 aa, Homo sapiens
  CDR3 for alpha chain variable domain of TCR clone 165484 (TRAV21, TRAJ34)
FAPLDTDKLIF

SEQ ID NO: 330968 - protein, 16 aa, Homo sapiens
  CDR3 for beta chain variable domain of TCR clone 165484 (TRBV5-1, TRBJ2-3)
CASSLAGDRGTDTQYF

SEQ ID NO: 330969 - protein, 13 aa, Homo sapiens
  CDR3 for alpha chain variable domain of TCR clone 165485 (TRAV13-1, TRAJ11)
CAAVLAGYSTHTF

SEQ ID NO: 330970 - protein, 17 aa, Homo sapiens
  CDR3 for beta chain variable domain of TCR clone 165485 (TRBV25-1, TRBJ2-7)
CASSDARVVFSSYEQYF

SEQ ID NO: 330971 - protein, 13 aa, Homo sapiens
  CDR3 for alpha chain variable domain of TCR clone 165486 (TRAV26-1, TRAJ33)
CIVRVDSNYQLIW

SEQ ID NO: 330972 - protein, 15 aa, Homo sapiens
  CDR3 for beta chain variable domain of TCR clone 165486 (TRBV7-2, TRBJ1-5)
CASSFSAGINQPQHC

SEQ ID NO: 330973 - protein, 13 aa, Homo sapiens
  CDR3 for alpha chain variable domain of TCR clone 165487 (TRAV21, TRAJ37)
CAVSSGNTGKLIF

SEQ ID NO: 330974 - protein, 15 aa, Homo sapiens
  CDR3 for beta chain variable domain of TCR clone 165487 (TRBV19, TRBJ2-1)
CASSTGTSSYNEQFF

SEQ ID NO: 330975 - protein, 13 aa, Homo sapiens
  CDR3 for alpha chain variable domain of TCR clone 165488 (TRAV2, TRAJ40)
CAVVTSGTYKYIF

SEQ ID NO: 330976 - protein, 15 aa, Homo sapiens
  CDR3 for beta chain variable domain of TCR clone 165488 (TRBV10-3, TRBJ2-1)
CAIRNGTSGHNEQFF

SEQ ID NO: 330977 - protein, 11 aa, Homo sapiens
  CDR3 for alpha chain variable domain of TCR clone 165489 (TRAV17, TRAJ43)
CATPRSNDMRF

SEQ ID NO: 330978 - protein, 14 aa, Homo sapiens
  CDR3 for beta chain variable domain of TCR clone 165489 (TRBV11-2, TRBJ2-1)
CQQPGTSGLNEQFF

SEQ ID NO: 330979 - protein, 12 aa, Homo sapiens
  CDR3 for alpha chain variable domain of TCR clone 165490 (TRAV25, TRAJ35)
CAGIGFGNVLHC

SEQ ID NO: 330980 - protein, 13 aa, Homo sapiens
  CDR3 for beta chain variable domain of TCR clone 165490 (TRBV12-4, TRBJ1-1)
CASSPGTGFEAFF

SEQ ID NO: 330981 - protein, 14 aa, Homo sapiens
  CDR3 for alpha chain variable domain of TCR clone 165491 (TRAV1-2, TRAJ8)
CAVREDTGFQKLVF

SEQ ID NO: 330982 - protein, 18 aa, Homo sapiens
  CDR3 for beta chain variable domain of TCR clone 165491 (TRBV2, TRBJ2-6)
CASSTPGQGASGANVLTF

SEQ ID NO: 330983 - protein, 13 aa, Homo sapiens
  CDR3 for alpha chain variable domain of TCR clone 165492 (TRAV2, TRAJ20)
CAVEDPSEYKLSF

SEQ ID NO: 330984 - protein, 15 aa, Homo sapiens
  CDR3 for beta chain variable domain of TCR clone 165492 (TRBV5-5, TRBJ2-2)
CASSRQASGAGELFF

SEQ ID NO: 330985 - protein, 14 aa, Homo sapiens
  CDR3 for alpha chain variable domain of TCR clone 165493 (TRAV29/DV5, TRAJ28)
CAARAGAGSYQLTF

SEQ ID NO: 330986 - protein, 17 aa, Homo sapiens
  CDR3 for beta chain variable domain of TCR clone 165493 (TRBV19, TRBJ1-1)
CASSIAGRGLMNTEAFF

SEQ ID NO: 330987 - protein, 12 aa, Homo sapiens
  CDR3 for alpha chain variable domain of TCR clone 165494 (TRAV12-3, TRAJ17)
CAMTLTGNKLTF

SEQ ID NO: 330988 - protein, 17 aa, Homo sapiens
  CDR3 for beta chain variable domain of TCR clone 165494 (TRBV7-3, TRBJ2-3)
CASSLMTRMRGADTQYF

SEQ ID NO: 330989 - protein, 13 aa, Homo sapiens
  CDR3 for alpha chain variable domain of TCR clone 165495 (TRAV8-6, TRAJ49)
CAVITNTGNQFYF

SEQ ID NO: 330990 - protein, 14 aa, Homo sapiens
  CDR3 for beta chain variable domain of TCR clone 165495 (TRBV5-1, TRBJ2-7)
CASSRGESLYEHYF

SEQ ID NO: 330991 - protein, 14 aa, Homo sapiens
  CDR3 for alpha chain variable domain of TCR clone 165496 (TRAV8-3, TRAJ26)
CAVASGNYGQNFVF

SEQ ID NO: 330992 - protein, 15 aa, Homo sapiens
  CDR3 for beta chain variable domain of TCR clone 165496 (TRBV27, TRBJ2-1)
CASSNGGGSSNEQFF

SEQ ID NO: 330993 - protein, 12 aa, Homo sapiens
  CDR3 for alpha chain variable domain of TCR clone 165497 (TRAV3, TRAJ31)
CAVRDGNARLMF

SEQ ID NO: 330994 - protein, 18 aa, Homo sapiens
  CDR3 for beta chain variable domain of TCR clone 165497 (TRBV7-2, TRBJ2-3)
CASSLKMEGSGITDTQYF

SEQ ID NO: 330995 - protein, 16 aa, Homo sapiens
  CDR3 for alpha chain variable domain of TCR clone 165498 (TRAV30, TRAJ24)
CGTEIVDADRWGKFQV

SEQ ID NO: 330996 - protein, 16 aa, Homo sapiens
  CDR3 for beta chain variable domain of TCR clone 165498 (TRBV12-5, TRBJ2-5)
CASGPRTSGNQETQYF

SEQ ID NO: 330997 - protein, 13 aa, Homo sapiens
  CDR3 for alpha chain variable domain of TCR clone 165499 (TRAV17, TRAJ9)
CATAITGGFKTIF

SEQ ID NO: 330998 - protein, 16 aa, Homo sapiens
  CDR3 for beta chain variable domain of TCR clone 165499 (TRBV15, TRBJ2-1)
CGTSRNLAGGYNEQFF

SEQ ID NO: 330999 - protein, 14 aa, Homo sapiens
  CDR3 for alpha chain variable domain of TCR clone 165500 (TRAV8-2, TRAJ37)
CVVSISGNTCKLIF

SEQ ID NO: 331000 - protein, 11 aa, Homo sapiens
  CDR3 for beta chain variable domain of TCR clone 165500 (TRBV18, TRBJ2-5)
CASSPRETQYF

SEQ ID NO: 331001 - protein, 14 aa, Homo sapiens
  CDR3 for alpha chain variable domain of TCR clone 165501 (TRAV8-3, TRAJ4)
CAVGAAGGYNKLYF

SEQ ID NO: 331002 - protein, 15 aa, Homo sapiens
  CDR3 for beta chain variable domain of TCR clone 165501 (TRBV6-5, TRBJ2-1)
CASSYDAGAGNEQFF

SEQ ID NO: 331003 - protein, 13 aa, Homo sapiens
  CDR3 for alpha chain variable domain of TCR clone 165502 (TRAV2, TRAJ40)
CAVVTSGTYKYNF

SEQ ID NO: 331004 - protein, 14 aa, Homo sapiens
  CDR3 for beta chain variable domain of TCR clone 165502 (TRBV19, TRBJ2-1)
CASPTFVVSGEQFF

SEQ ID NO: 331005 - protein, 14 aa, Homo sapiens
  CDR3 for alpha chain variable domain of TCR clone 165503 (TRAV17, TRAJ57)
CATNPQGGSEKLVF

SEQ ID NO: 331006 - protein, 18 aa, Homo sapiens
  CDR3 for beta chain variable domain of TCR clone 165503 (TRBV20-1, TRBJ2-3)
CSASGLAGGPGTTDTQYF

SEQ ID NO: 331007 - protein, 15 aa, Homo sapiens
  CDR3 for alpha chain variable domain of TCR clone 165504 (TRAV3, TRAJ7)
CAVRDKDNGNNRLAF

SEQ ID NO: 331008 - protein, 19 aa, Homo sapiens
  CDR3 for beta chain variable domain of TCR clone 165504 (TRBV5-8, TRBJ2-3)
CASSFLGTSGSHRTDTQDF

SEQ ID NO: 331009 - protein, 14 aa, Homo sapiens
  CDR3 for alpha chain variable domain of TCR clone 165505 (TRAV17, TRAJ17)
YATDDAAAGNKLTF

SEQ ID NO: 331010 - protein, 16 aa, Homo sapiens
  CDR3 for beta chain variable domain of TCR clone 165505 (TRBV19, TRBJ2-1)
CASSIETGSPYNEQFF

SEQ ID NO: 331011 - protein, 15 aa, Homo sapiens
  CDR3 for alpha chain variable domain of TCR clone 165506 (TRAV8-2, TRAJ40)
CVVLGTTSGTYKYIF

SEQ ID NO: 331012 - protein, 13 aa, Homo sapiens
  CDR3 for beta chain variable domain of TCR clone 165506 (TRBV7-2, TRBJ1-6)
CASSLKFDSPLHF

SEQ ID NO: 331013 - protein, 11 aa, Homo sapiens
  CDR3 for alpha chain variable domain of TCR clone 165507 (TRAV12-3, TRAJ43)
CAMSVSNDMRF

SEQ ID NO: 331014 - protein, 15 aa, Homo sapiens
  CDR3 for beta chain variable domain of TCR clone 165507 (TRBV6-1, TRBJ2-3)
CASSERGGITDTQYF

SEQ ID NO: 331015 - protein, 14 aa, Homo sapiens
  CDR3 for alpha chain variable domain of TCR clone 165508 (TRAV8-6, TRAJ53)
CAVTSGGSNYKLTF

SEQ ID NO: 331016 - protein, 15 aa, Homo sapiens
  CDR3 for beta chain variable domain of TCR clone 165508 (TRBV7-9, TRBJ1-4)
CASSRTGGFNEKLFF

SEQ ID NO: 331017 - protein, 12 aa, Homo sapiens
  CDR3 for alpha chain variable domain of TCR clone 165509 (TRAV25, TRAJ44)
CAGRGTASKLTF

SEQ ID NO: 331018 - protein, 12 aa, Homo sapiens
  CDR3 for beta chain variable domain of TCR clone 165509 (TRBV11-2, TRBJ2-1)
CAISPGNNEQFF

SEQ ID NO: 331019 - protein, 11 aa, Homo sapiens
  CDR3 for alpha chain variable domain of TCR clone 165510 (TRAV13-1, TRAJ47)
CAAAPRNKLVF

SEQ ID NO: 331020 - protein, 14 aa, Homo sapiens
  CDR3 for beta chain variable domain of TCR clone 165510 (TRBV7-2, TRBJ2-5)
CASSLFGREETQYF

SEQ ID NO: 331021 - protein, 11 aa, Homo sapiens
  CDR3 for alpha chain variable domain of TCR clone 165511 (TRAV26-1, TRAJ27)
CIDPNAGKSTF

SEQ ID NO: 331022 - protein, 14 aa, Homo sapiens
  CDR3 for beta chain variable domain of TCR clone 165511 (TRBV7-3, TRBJ2-1)
CASSLAGGTNEQFF

SEQ ID NO: 331023 - protein, 19 aa, Homo sapiens
  CDR3 for alpha chain variable domain of TCR clone 165512 (TRAV26-1, TRAJ52)
CIVRAHRNACGTSYGKLTF

SEQ ID NO: 331024 - protein, 15 aa, Homo sapiens
  CDR3 for beta chain variable domain of TCR clone 165512 (TRBV29-1, TRBJ2-1)
CSGRDRKSSYNEQFF

SEQ ID NO: 331025 - protein, 14 aa, Homo sapiens
  CDR3 for alpha chain variable domain of TCR clone 165513 (TRAV17, TRAJ12)
CAILPMDSSYKLIF

SEQ ID NO: 331026 - protein, 14 aa, Homo sapiens
  CDR3 for beta chain variable domain of TCR clone 165513 (TRBV7-8, TRBJ2-3)
CASSFKSSTDTQYF

SEQ ID NO: 331027 - protein, 12 aa, Homo sapiens
  CDR3 for alpha chain variable domain of TCR clone 165514 (TRAV12-1, TRAJ34)
CVVAGATDKLIF

SEQ ID NO: 331028 - protein, 12 aa, Homo sapiens
  CDR3 for beta chain variable domain of TCR clone 165514 (TRBV7-9, TRBJ1-1)
CASSLVRGEDFF

SEQ ID NO: 331029 - protein, 13 aa, Homo sapiens
  CDR3 for alpha chain variable domain of TCR clone 165515 (TRAV12-1, TRAJ13)
CVVTPGGYQKVTF

SEQ ID NO: 331030 - protein, 15 aa, Homo sapiens
  CDR3 for beta chain variable domain of TCR clone 165515 (TRBV7-9, TRBJ2-3)
CASSLKWGVTDTQYF

SEQ ID NO: 331031 - protein, 13 aa, Homo sapiens
  CDR3 for alpha chain variable domain of TCR clone 165516 (TRAV21, TRAJ57)
FAVTQGGSNKLVF

SEQ ID NO: 331032 - protein, 16 aa, Homo sapiens
  CDR3 for beta chain variable domain of TCR clone 165516 (TRBV29-1, TRBJ2-7)
CSVEDAEDGTAYEQYF

SEQ ID NO: 331033 - protein, 16 aa, Homo sapiens
  CDR3 for alpha chain variable domain of TCR clone 165517 (TRAV3, TRAJ37)
CAVRPHGSGNTGKLIF

SEQ ID NO: 331034 - protein, 12 aa, Homo sapiens
  CDR3 for beta chain variable domain of TCR clone 165517 (TRBV7-9, TRBJ1-5)
CASSPQGQPQHF

SEQ ID NO: 331035 - protein, 13 aa, Homo sapiens
  CDR3 for alpha chain variable domain of TCR clone 165518 (TRAV36/DV7, TRAJ49)
CAGDSNTGNQFYF

SEQ ID NO: 331036 - protein, 15 aa, Homo sapiens
  CDR3 for beta chain variable domain of TCR clone 165518 (TRBV12-4, TRBJ2-5)
CASSPPTGLQETRYF

SEQ ID NO: 331037 - protein, 18 aa, Homo sapiens
  CDR3 for alpha chain variable domain of TCR clone 165519 (TRAV13-1, TRAJ52)
CAASKRSAGGTSYEKLTF

SEQ ID NO: 331038 - protein, 13 aa, Homo sapiens
  CDR3 for beta chain variable domain of TCR clone 165519 (TRBV12-4, TRBJ1-2)
CASSLRQGKGYTF

SEQ ID NO: 331039 - protein, 14 aa, Homo sapiens
  CDR3 for alpha chain variable domain of TCR clone 165520 (TRAV25, TRAJ35)
CARRMEGFGNVLHC

SEQ ID NO: 331040 - protein, 11 aa, Homo sapiens
  CDR3 for beta chain variable domain of TCR clone 165520 (TRBV29-1, TRBJ2-5)
CSEDRTGTQYF

SEQ ID NO: 331041 - protein, 14 aa, Homo sapiens
  CDR3 for alpha chain variable domain of TCR clone 165521 (TRAV35, TRAJ13)
CAGSPSGGYQTVTF

SEQ ID NO: 331042 - protein, 13 aa, Homo sapiens
  CDR3 for beta chain variable domain of TCR clone 165521 (TRBV29-1, TRBJ1-1)
CSVGDSRNTEAFF

SEQ ID NO: 331043 - protein, 13 aa, Homo sapiens
  CDR3 for alpha chain variable domain of TCR clone 165522 (TRAV38-2/DV8, TRAJ34)
CAHRTWNTDKLIL

SEQ ID NO: 331044 - protein, 16 aa, Homo sapiens
  CDR3 for beta chain variable domain of TCR clone 165522 (TRBV10-3, TRBJ2-1)
CAISGVGDGGGGEQFF

SEQ ID NO: 331045 - protein, 19 aa, Homo sapiens
  CDR3 for alpha chain variable domain of TCR clone 165523 (TRAV25, TRAJ20)
TATQTTDVGILPHDYKLSF

SEQ ID NO: 331046 - protein, 15 aa, Homo sapiens
  CDR3 for beta chain variable domain of TCR clone 165523 (TRBV6-6, TRBJ1-5)
CASSPIQGTNQPQHF

SEQ ID NO: 331047 - protein, 12 aa, Homo sapiens
  CDR3 for alpha chain variable domain of TCR clone 165524 (TRAV21, TRAJ31)
CVLAGNNARLMF

SEQ ID NO: 331048 - protein, 16 aa, Homo sapiens
  CDR3 for beta chain variable domain of TCR clone 165524 (TRBV6-1, TRBJ2-1)
CASILRQGSSYNEQFF

SEQ ID NO: 331049 - protein, 12 aa, Homo sapiens
  CDR3 for alpha chain variable domain of TCR clone 165525 (TRAV25, TRAJ38)
CTGTGNNRKLIW

SEQ ID NO: 331050 - protein, 14 aa, Homo sapiens
  CDR3 for beta chain variable domain of TCR clone 165525 (TRBV19, TRBJ1-5)
CASSKMTGPQPQHF

SEQ ID NO: 331051 - protein, 14 aa, Homo sapiens
  CDR3 for alpha chain variable domain of TCR clone 165526 (TRAV12-3, TRAJ10)
SHLPLTGGGNKLTF

SEQ ID NO: 331052 - protein, 13 aa, Homo sapiens
  CDR3 for beta chain variable domain of TCR clone 165526 (TRBV7-9, TRBJ1-1)
CASSLSGETEAFF

SEQ ID NO: 331053 - protein, 16 aa, Homo sapiens
  CDR3 for alpha chain variable domain of TCR clone 165527 (TRAV12-3, TRAJ45)
CAMGWGSGGGADGLTF

SEQ ID NO: 331054 - protein, 14 aa, Homo sapiens
  CDR3 for beta chain variable domain of TCR clone 165527 (TRBV4-1, TRBJ2-2)
CASSQAVNTGELFF

SEQ ID NO: 331055 - protein, 15 aa, Homo sapiens
  CDR3 for alpha chain variable domain of TCR clone 165528 (TRAV13-1, TRAJ17)
CAASIERAAGNKVTF

SEQ ID NO: 331056 - protein, 13 aa, Homo sapiens
  CDR3 for beta chain variable domain of TCR clone 165528 (TRBV7-7, TRBJ2-3)
CASSLSRADTQYF

SEQ ID NO: 331057 - protein, 13 aa, Homo sapiens
  CDR3 for alpha chain variable domain of TCR clone 165529 (TRAV30, TRAJ34)
CGTVGYNTDKLIF

SEQ ID NO: 331058 - protein, 16 aa, Homo sapiens
  CDR3 for beta chain variable domain of TCR clone 165529 (TRBV7-9, TRBJ1-2)
CASSLGFRSGEDGYTF

SEQ ID NO: 331059 - protein, 15 aa, Homo sapiens
  CDR3 for alpha chain variable domain of TCR clone 165530 (TRAV29/DV5, TRAJ24)
CTASGATDSWGKFQF

SEQ ID NO: 331060 - protein, 12 aa, Homo sapiens
  CDR3 for beta chain variable domain of TCR clone 165530 (TRBV11-2, TRBJ2-2)
CASSLPTGELFF

SEQ ID NO: 331061 - protein, 14 aa, Homo sapiens
  CDR3 for alpha chain variable domain of TCR clone 165531 (TRAV38-1, TRAJ40)
CALRPTSGTYKYIF

SEQ ID NO: 331062 - protein, 15 aa, Homo sapiens
  CDR3 for beta chain variable domain of TCR clone 165531 (TRBV7-2, TRBJ2-3)
CASSLAGAFIDTQYF

SEQ ID NO: 331063 - protein, 15 aa, Homo sapiens
  CDR3 for alpha chain variable domain of TCR clone 165532 (TRAV40, TRAJ45)
CLLGDLGGGADGLTF

SEQ ID NO: 331064 - protein, 14 aa, Homo sapiens
  CDR3 for beta chain variable domain of TCR clone 165532 (TRBV15, TRBJ2-1)
CATSGVEDYNEQFF

SEQ ID NO: 331065 - protein, 13 aa, Homo sapiens
  CDR3 for alpha chain variable domain of TCR clone 165533 (TRAV35, TRAJ33)
CAGLMDSNYQLIW

SEQ ID NO: 331066 - protein, 13 aa, Homo sapiens
  CDR3 for beta chain variable domain of TCR clone 165533 (TRBV10-3, TRBJ2-1)
CAISEFSGREQFC

SEQ ID NO: 331067 - protein, 15 aa, Homo sapiens
  CDR3 for alpha chain variable domain of TCR clone 165534 (TRAV23/DV6, TRAJ44)
CAAALNTGTASKHTF

SEQ ID NO: 331068 - protein, 12 aa, Homo sapiens
  CDR3 for beta chain variable domain of TCR clone 165534 (TRBV20-1, TRBJ1-5)
CSARAPDQPQHF

SEQ ID NO: 331069 - protein, 15 aa, Homo sapiens
  CDR3 for alpha chain variable domain of TCR clone 165535 (TRAV26-1, TRAJ40)
CIVRAVPSGTYKYIF

SEQ ID NO: 331070 - protein, 15 aa, Homo sapiens
  CDR3 for beta chain variable domain of TCR clone 165535 (TRBV11-3, TRBJ2-3)
CASLKDGREGDTQYF

SEQ ID NO: 331071 - protein, 16 aa, Homo sapiens
  CDR3 for alpha chain variable domain of TCR clone 165536 (TRAV30, TRAJ24)
CGTEIVDADSWGKFQF

SEQ ID NO: 331072 - protein, 16 aa, Homo sapiens
  CDR3 for beta chain variable domain of TCR clone 165536 (TRBV7-3, TRBJ2-3)
ELSLMKRMRGADTQHF

SEQ ID NO: 331073 - protein, 15 aa, Homo sapiens
  CDR3 for alpha chain variable domain of TCR clone 165537 (TRAV26-1, TRAJ29)
CIVRVEGSGNTPLVF

SEQ ID NO: 331074 - protein, 15 aa, Homo sapiens
  CDR3 for beta chain variable domain of TCR clone 165537 (TRBV7-9, TRBJ1-5)
CASSQGHQPNQNQHF

SEQ ID NO: 331075 - protein, 14 aa, Homo sapiens
  CDR3 for alpha chain variable domain of TCR clone 165538 (TRAV35, TRAJ22)
CAGLRPGSARQLTF

SEQ ID NO: 331076 - protein, 17 aa, Homo sapiens
  CDR3 for beta chain variable domain of TCR clone 165538 (TRBV5-1, TRBJ1-5)
CASSLVGREEGNQPQHF

SEQ ID NO: 331077 - protein, 15 aa, Homo sapiens
  CDR3 for alpha chain variable domain of TCR clone 165539 (TRAV19, TRAJ9)
CALSEARTGGFKTIF

SEQ ID NO: 331078 - protein, 12 aa, Homo sapiens
  CDR3 for beta chain variable domain of TCR clone 165539 (TRBV11-2, TRBJ2-2)
CASSLGGGELFF

SEQ ID NO: 331079 - protein, 11 aa, Homo sapiens
  CDR3 for alpha chain variable domain of TCR clone 165540 (TRAV2, TRAJ13)
CASGGYQEVTF

SEQ ID NO: 331080 - protein, 17 aa, Homo sapiens
  CDR3 for beta chain variable domain of TCR clone 165540 (TRBV7-3, TRBJ2-3)
CASSLMKRMRGADTQYF

SEQ ID NO: 331081 - protein, 18 aa, Homo sapiens
  CDR3 for alpha chain variable domain of TCR clone 165541 (TRAV12-3, TRAJ52)
CAMSVGGAGGTSYGKLTF

SEQ ID NO: 331082 - protein, 16 aa, Homo sapiens
  CDR3 for beta chain variable domain of TCR clone 165541 (TRBV6-1, TRBJ2-5)
CASSETLDRGAETQYF

SEQ ID NO: 331083 - protein, 14 aa, Homo sapiens
  CDR3 for alpha chain variable domain of TCR clone 165542 (TRAV8-3, TRAJ9)
CAVVHNTGGFKPIF

SEQ ID NO: 331084 - protein, 14 aa, Homo sapiens
  CDR3 for beta chain variable domain of TCR clone 165542 (TRBV7-3, TRBJ2-2)
CASSSGGYTGELFF

SEQ ID NO: 331085 - protein, 14 aa, Homo sapiens
  CDR3 for alpha chain variable domain of TCR clone 165543 (TRAV20, TRAJ32)
CCGRYGGATNKLIF

SEQ ID NO: 331086 - protein, 15 aa, Homo sapiens
  CDR3 for beta chain variable domain of TCR clone 165543 (TRBV19, TRBJ2-2)
CQPISRDRGHGELFF

SEQ ID NO: 331087 - protein, 13 aa, Homo sapiens
  CDR3 for alpha chain variable domain of TCR clone 165544 (TRAV26-1, TRAJ48)
CIVRVVGDEKLTF

SEQ ID NO: 331088 - protein, 16 aa, Homo sapiens
  CDR3 for beta chain variable domain of TCR clone 165544 (TRBV20-1, TRBJ1-2)
CSASMGQGVANYGYTF

SEQ ID NO: 331089 - protein, 15 aa, Homo sapiens
  CDR3 for alpha chain variable domain of TCR clone 165545 (TRAV12-3, TRAJ6)
CAMSATSGGSYIPTF

SEQ ID NO: 331090 - protein, 13 aa, Homo sapiens
  CDR3 for beta chain variable domain of TCR clone 165545 (TRBV7-9, TRBJ1-2)
CASSLKQNYGYTF

SEQ ID NO: 331091 - protein, 17 aa, Homo sapiens
  CDR3 for alpha chain variable domain of TCR clone 165546 (TRAV26-1, TRAJ53)
CIVRVDDSGGSNYKLKF

SEQ ID NO: 331092 - protein, 15 aa, Homo sapiens
  CDR3 for beta chain variable domain of TCR clone 165546 (TRBV20-1, TRBJ2-7)
CSARVPAAYSYEQYF

SEQ ID NO: 331093 - protein, 16 aa, Homo sapiens
  CDR3 for alpha chain variable domain of TCR clone 165547 (TRAV12-3, TRAJ53)
CAMSVGSGGSNYKLKF

SEQ ID NO: 331094 - protein, 13 aa, Homo sapiens
  CDR3 for beta chain variable domain of TCR clone 165547 (TRBV7-6, TRBJ1-2)
CASSLVADYGYTF

SEQ ID NO: 331095 - protein, 15 aa, Homo sapiens
  CDR3 for alpha chain variable domain of TCR clone 165548 (TRAV3, TRAJ7)
CAVRDKDNGNNRLAF

SEQ ID NO: 331096 - protein, 19 aa, Homo sapiens
  CDR3 for beta chain variable domain of TCR clone 165548 (TRBV5-8, TRBJ2-3)
CASSFLGTSGSHSTDTQYF

SEQ ID NO: 331097 - protein, 16 aa, Homo sapiens
  CDR3 for alpha chain variable domain of TCR clone 165549 (TRAV3, TRAJ10)
CAVSDMRAGGGNKLTF

SEQ ID NO: 331098 - protein, 13 aa, Homo sapiens
  CDR3 for beta chain variable domain of TCR clone 165549 (TRBV7-9, TRBJ1-2)
CASSLKQNYGYTF

SEQ ID NO: 331099 - protein, 12 aa, Homo sapiens
  CDR3 for alpha chain variable domain of TCR clone 165550 (TRAV25, TRAJ20)
CAGLSNDYKLSF

SEQ ID NO: 331100 - protein, 15 aa, Homo sapiens
  CDR3 for beta chain variable domain of TCR clone 165550 (TRBV7-6, TRBJ2-7)
CASSGRRDTFGEQYF

SEQ ID NO: 331101 - protein, 14 aa, Homo sapiens
  CDR3 for alpha chain variable domain of TCR clone 165551 (TRAV27, TRAJ15)
CAGFDNQSGTALIF

SEQ ID NO: 331102 - protein, 11 aa, Homo sapiens
  CDR3 for beta chain variable domain of TCR clone 165551 (TRBV29-1, TRBJ1-1)
CSVEVGTRNFF

SEQ ID NO: 331103 - protein, 11 aa, Homo sapiens
  CDR3 for alpha chain variable domain of TCR clone 165552 (TRAV2, TRAJ31)
CAAGPPASLMF

SEQ ID NO: 331104 - protein, 13 aa, Homo sapiens
  CDR3 for beta chain variable domain of TCR clone 165552 (TRBV4-1, TRBJ2-3)
CASSQPPTDTQYF

SEQ ID NO: 331105 - protein, 17 aa, Homo sapiens
  CDR3 for alpha chain variable domain of TCR clone 165553 (TRAV3, TRAJ6)
CAVRDGPRAGGIYIPPF

SEQ ID NO: 331106 - protein, 20 aa, Homo sapiens
  CDR3 for beta chain variable domain of TCR clone 165553 (TRBV28, TRBJ2-1)
CASTPIGRSPGLAGGNEQFF

SEQ ID NO: 331107 - protein, 15 aa, Homo sapiens
  CDR3 for alpha chain variable domain of TCR clone 165554 (TRAV1-2, TRAJ9)
CAVRDDGTGGFKTIF

SEQ ID NO: 331108 - protein, 16 aa, Homo sapiens
  CDR3 for beta chain variable domain of TCR clone 165554 (TRBV7-2, TRBJ1-6)
CASSSFESSYKSPLHF

SEQ ID NO: 331109 - protein, 14 aa, Homo sapiens
  CDR3 for alpha chain variable domain of TCR clone 165555 (TRAV12-2, TRAJ40)
CAVKIPSGTYKYIF

SEQ ID NO: 331110 - protein, 17 aa, Homo sapiens
  CDR3 for beta chain variable domain of TCR clone 165555 (TRBV27, TRBJ2-7)
CASSRSMGGMATYEQYF

SEQ ID NO: 331111 - protein, 14 aa, Homo sapiens
  CDR3 for alpha chain variable domain of TCR clone 165556 (TRAV12-2, TRAJ13)
CAVKKTGGYQKVTF

SEQ ID NO: 331112 - protein, 19 aa, Homo sapiens
  CDR3 for beta chain variable domain of TCR clone 165556 (TRBV25-1, TRBJ2-2)
CAILAYRVDRGRKTGELFF

SEQ ID NO: 331113 - protein, 13 aa, Homo sapiens
  CDR3 for alpha chain variable domain of TCR clone 165557 (TRAV13-1, TRAJ39)
CSKYSNGGNMLTF

SEQ ID NO: 331114 - protein, 18 aa, Homo sapiens
  CDR3 for beta chain variable domain of TCR clone 165557 (TRBV10-2, TRBJ2-2)
CISAPAVHRQADAGELFF

SEQ ID NO: 331115 - protein, 14 aa, Homo sapiens
  CDR3 for alpha chain variable domain of TCR clone 165558 (TRAV12-1, TRAJ30)
RVPTGTNRDDKIIF

SEQ ID NO: 331116 - protein, 11 aa, Homo sapiens
  CDR3 for beta chain variable domain of TCR clone 165558 (TRBV4-1, TRBJ2-2)
CASEHTGELFF

SEQ ID NO: 331117 - protein, 10 aa, Homo sapiens
  CDR3 for alpha chain variable domain of TCR clone 165559 (TRAV23/DV6, TRAJ31)
CARGGARPMF

SEQ ID NO: 331118 - protein, 14 aa, Homo sapiens
  CDR3 for beta chain variable domain of TCR clone 165559 (TRBV7-8, TRBJ1-2)
YASSPDSLSYGYTF

SEQ ID NO: 331119 - protein, 14 aa, Homo sapiens
  CDR3 for alpha chain variable domain of TCR clone 165560 (TRAV21, TRAJ58)
CAVRGETSGSRLTF

SEQ ID NO: 331120 - protein, 13 aa, Homo sapiens
  CDR3 for beta chain variable domain of TCR clone 165560 (TRBV7-9, TRBJ2-3)
CASSPGSTDTQYF

SEQ ID NO: 331121 - protein, 15 aa, Homo sapiens
  CDR3 for alpha chain variable domain of TCR clone 165561 (TRAV26-1, TRAJ23)
RIVRVLNNQGGKLIF

SEQ ID NO: 331122 - protein, 15 aa, Homo sapiens
  CDR3 for beta chain variable domain of TCR clone 165561 (TRBV11-3, TRBJ2-1)
CASSLAGQTYNEQFF

SEQ ID NO: 331123 - protein, 14 aa, Homo sapiens
  CDR3 for alpha chain variable domain of TCR clone 165562 (TRAV12-1, TRAJ23)
CVVMIYNQGGKLIF

SEQ ID NO: 331124 - protein, 23 aa, Homo sapiens
  CDR3 for beta chain variable domain of TCR clone 165562 (TRBV7-3, TRBJ1-6)
CASSLTSRDEASDPSSYNSPRHF

SEQ ID NO: 331125 - protein, 18 aa, Homo sapiens
  CDR3 for alpha chain variable domain of TCR clone 165563 (TRAV26-2, TRAJ45)
CILRVDKYSGGVADGLTF

SEQ ID NO: 331126 - protein, 17 aa, Homo sapiens
  CDR3 for beta chain variable domain of TCR clone 165563 (TRBV25-1, TRBJ2-1)
SASSAYGQGRGVYEQFF

SEQ ID NO: 331127 - protein, 16 aa, Homo sapiens
  CDR3 for alpha chain variable domain of TCR clone 165564 (TRAV23/DV6, TRAJ9)
SAASIGGNTGGLKTIF

SEQ ID NO: 331128 - protein, 15 aa, Homo sapiens
  CDR3 for beta chain variable domain of TCR clone 165564 (TRBV12-4, TRBJ2-2)
CASSRQGANTGELFF

SEQ ID NO: 331129 - protein, 12 aa, Homo sapiens
  CDR3 for alpha chain variable domain of TCR clone 165565 (TRAV29/DV5, TRAJ43)
CAAPYNNNDMRV

SEQ ID NO: 331130 - protein, 15 aa, Homo sapiens
  CDR3 for beta chain variable domain of TCR clone 165565 (TRBV18, TRBJ1-6)
CASSRIQGRNSPLHF

SEQ ID NO: 331131 - protein, 14 aa, Homo sapiens
  CDR3 for alpha chain variable domain of TCR clone 165566 (TRAV8-3, TRAJ15)
CAVGRHQAGTALTF

SEQ ID NO: 331132 - protein, 15 aa, Homo sapiens
  CDR3 for beta chain variable domain of TCR clone 165566 (TRBV27, TRBJ2-1)
CASSNGGGSSNEQFF

SEQ ID NO: 331133 - protein, 17 aa, Homo sapiens
  CDR3 for alpha chain variable domain of TCR clone 165567 (TRAV3, TRAJ38)
FAVRDCLNAGNNRKLIG

SEQ ID NO: 331134 - protein, 14 aa, Homo sapiens
  CDR3 for beta chain variable domain of TCR clone 165567 (TRBV5-5, TRBJ1-5)
CASSGQGVDQPQHF

SEQ ID NO: 331135 - protein, 14 aa, Homo sapiens
  CDR3 for alpha chain variable domain of TCR clone 165568 (TRAV13-1, TRAJ26)
CAASRGNYGQNFVF

SEQ ID NO: 331136 - protein, 14 aa, Homo sapiens
  CDR3 for beta chain variable domain of TCR clone 165568 (TRBV7-7, TRBJ2-2)
CATRQDSDTGELFF

SEQ ID NO: 331137 - protein, 16 aa, Homo sapiens
  CDR3 for alpha chain variable domain of TCR clone 165569 (TRAV8-3, TRAJ44)
CAVGASNTGTASKLTF

SEQ ID NO: 331138 - protein, 12 aa, Homo sapiens
  CDR3 for beta chain variable domain of TCR clone 165569 (TRBV11-2, TRBJ2-1)
CASSPGNNEQFF

SEQ ID NO: 331139 - protein, 10 aa, Homo sapiens
  CDR3 for alpha chain variable domain of TCR clone 165570 (TRAV5, TRAJ34)
CAEDTDKLNF

SEQ ID NO: 331140 - protein, 12 aa, Homo sapiens
  CDR3 for beta chain variable domain of TCR clone 165570 (TRBV11-2, TRBJ2-2)
CASSLGGGELFF

SEQ ID NO: 331141 - protein, 14 aa, Homo sapiens
  CDR3 for alpha chain variable domain of TCR clone 165571 (TRAV12-2, TRAJ53)
CAVKGGGSNYKLTF

SEQ ID NO: 331142 - protein, 17 aa, Homo sapiens
  CDR3 for beta chain variable domain of TCR clone 165571 (TRBV7-3, TRBJ2-3)
CASSLTKRMRGADTQYF

SEQ ID NO: 331143 - protein, 14 aa, Homo sapiens
  CDR3 for alpha chain variable domain of TCR clone 165572 (TRAV2, TRAJ9)
CAVEGRSGGFKTIF

SEQ ID NO: 331144 - protein, 15 aa, Homo sapiens
  CDR3 for beta chain variable domain of TCR clone 165572 (TRBV28, TRBJ1-3)
CASSMGWASGNTIYF

SEQ ID NO: 331145 - protein, 15 aa, Homo sapiens
  CDR3 for alpha chain variable domain of TCR clone 165573 (TRAV26-2, TRAJ13)
CILRDLSGGYKKVTF

SEQ ID NO: 331146 - protein, 11 aa, Homo sapiens
  CDR3 for beta chain variable domain of TCR clone 165573 (TRBV7-9, TRBJ2-5)
CASSLSATQYF

SEQ ID NO: 331147 - protein, 11 aa, Homo sapiens
  CDR3 for alpha chain variable domain of TCR clone 165574 (TRAV21, TRAJ23)
CAPQRRGKLIF

SEQ ID NO: 331148 - protein, 13 aa, Homo sapiens
  CDR3 for beta chain variable domain of TCR clone 165574 (TRBV2, TRBJ2-5)
CASGTPYQETQYF

SEQ ID NO: 331149 - protein, 14 aa, Homo sapiens
  CDR3 for alpha chain variable domain of TCR clone 165575 (TRAV17, TRAJ23)
CATALGGQGGKLIF

SEQ ID NO: 331150 - protein, 16 aa, Homo sapiens
  CDR3 for beta chain variable domain of TCR clone 165575 (TRBV4-2, TRBJ2-3)
CASSQELAGDTDTQYF

SEQ ID NO: 331151 - protein, 16 aa, Homo sapiens
  CDR3 for alpha chain variable domain of TCR clone 165576 (TRAV3, TRAJ37)
CAVRVRGSGNTGNLIF

SEQ ID NO: 331152 - protein, 15 aa, Homo sapiens
  CDR3 for beta chain variable domain of TCR clone 165576 (TRBV3-1, TRBJ2-1)
CASSPRDSGFNEQFF

SEQ ID NO: 331153 - protein, 13 aa, Homo sapiens
  CDR3 for alpha chain variable domain of TCR clone 165577 (TRAV2, TRAJ40)
CAVVTSGTYTYIF

SEQ ID NO: 331154 - protein, 15 aa, Homo sapiens
  CDR3 for beta chain variable domain of TCR clone 165577 (TRBV18, TRBJ2-1)
CASSPPSASYNEQFF

SEQ ID NO: 331155 - protein, 14 aa, Homo sapiens
  CDR3 for alpha chain variable domain of TCR clone 165578 (TRAV1-2, TRAJ16)
CTVNRFSDGQKLLF

SEQ ID NO: 331156 - protein, 15 aa, Homo sapiens
  CDR3 for beta chain variable domain of TCR clone 165578 (TRBV9, TRBJ1-6)
GASSVAGTGDSPLHF

SEQ ID NO: 331157 - protein, 12 aa, Homo sapiens
  CDR3 for alpha chain variable domain of TCR clone 165579 (TRAV17, TRAJ53)
CATEGSNYKLTF

SEQ ID NO: 331158 - protein, 12 aa, Homo sapiens
  CDR3 for beta chain variable domain of TCR clone 165579 (TRBV7-9, TRBJ2-7)
CASSIKREEQYF

SEQ ID NO: 331159 - protein, 14 aa, Homo sapiens
  CDR3 for alpha chain variable domain of TCR clone 165580 (TRAV27, TRAJ49)
CAGRPEGAGSQFYF

SEQ ID NO: 331160 - protein, 16 aa, Homo sapiens
  CDR3 for beta chain variable domain of TCR clone 165580 (TRBV12-5, TRBJ2-5)
CASGPRTSGNQETQYF

SEQ ID NO: 331161 - protein, 14 aa, Homo sapiens
  CDR3 for alpha chain variable domain of TCR clone 165581 (TRAV12-1, TRAJ17)
CVVNYKAAGDKLTF

SEQ ID NO: 331162 - protein, 17 aa, Homo sapiens
  CDR3 for beta chain variable domain of TCR clone 165581 (TRBV20-1, TRBJ2-1)
CSASSSVLAGSYNEQFF

SEQ ID NO: 331163 - protein, 13 aa, Homo sapiens
  CDR3 for alpha chain variable domain of TCR clone 165582 (TRAV2, TRAJ40)
CAVVTSGTYKYIF

SEQ ID NO: 331164 - protein, 13 aa, Homo sapiens
  CDR3 for beta chain variable domain of TCR clone 165582 (TRBV2, TRBJ2-7)
CASSGGQANEQYF

SEQ ID NO: 331165 - protein, 11 aa, Homo sapiens
  CDR3 for alpha chain variable domain of TCR clone 165583 (TRAV21, TRAJ11)
CAVNGYSTLTF

SEQ ID NO: 331166 - protein, 13 aa, Homo sapiens
  CDR3 for beta chain variable domain of TCR clone 165583 (TRBV4-2, TRBJ2-2)
CASEDRGTGELFF

SEQ ID NO: 331167 - protein, 14 aa, Homo sapiens
  CDR3 for alpha chain variable domain of TCR clone 165584 (TRAV4, TRAJ17)
CLVGDMAAGNKLTF

SEQ ID NO: 331168 - protein, 15 aa, Homo sapiens
  CDR3 for beta chain variable domain of TCR clone 165584 (TRBV7-3, TRBJ2-2)
CASSETGQGTGELFF

SEQ ID NO: 331169 - protein, 14 aa, Homo sapiens
  CDR3 for alpha chain variable domain of TCR clone 165585 (TRAV8-1, TRAJ5)
CAVRTDTGRRALTF

SEQ ID NO: 331170 - protein, 12 aa, Homo sapiens
  CDR3 for beta chain variable domain of TCR clone 165585 (TRBV11-2, TRBJ2-1)
CASSPGNNEQCF

SEQ ID NO: 331171 - protein, 12 aa, Homo sapiens
  CDR3 for alpha chain variable domain of TCR clone 165586 (TRAV29/DV5, TRAJ49)
CAATDTGNQFYC

SEQ ID NO: 331172 - protein, 12 aa, Homo sapiens
  CDR3 for beta chain variable domain of TCR clone 165586 (TRBV12-4, TRBJ2-7)
CASSLGGYEQYF

SEQ ID NO: 331173 - protein, 14 aa, Homo sapiens
  CDR3 for alpha chain variable domain of TCR clone 165587 (TRAV12-1, TRAJ26)
CVVKGSNYGQNFVF

SEQ ID NO: 331174 - protein, 14 aa, Homo sapiens
  CDR3 for beta chain variable domain of TCR clone 165587 (TRBV5-4, TRBJ1-1)
CASSLDSRRDEAYF

SEQ ID NO: 331175 - protein, 14 aa, Homo sapiens
  CDR3 for alpha chain variable domain of TCR clone 165588 (TRAV1-2, TRAJ16)
CVVNRFSDGQKLLF

SEQ ID NO: 331176 - protein, 15 aa, Homo sapiens
  CDR3 for beta chain variable domain of TCR clone 165588 (TRBV9, TRBJ1-6)
CASSEAGTGDSPLHF

SEQ ID NO: 331177 - protein, 14 aa, Homo sapiens
  CDR3 for alpha chain variable domain of TCR clone 165589 (TRAV12-3, TRAJ33)
CAMSVPGSNYQLIW

SEQ ID NO: 331178 - protein, 17 aa, Homo sapiens
  CDR3 for beta chain variable domain of TCR clone 165589 (TRBV23-1, TRBJ1-2)
CASSNTGGGLLWLHLRF

SEQ ID NO: 331179 - protein, 13 aa, Homo sapiens
  CDR3 for alpha chain variable domain of TCR clone 165590 (TRAV8-6, TRAJ49)
CAVITNTGNQFYF

SEQ ID NO: 331180 - protein, 16 aa, Homo sapiens
  CDR3 for beta chain variable domain of TCR clone 165590 (TRBV3-1, TRBJ2-5)
CASSQDWASGQETQYF

SEQ ID NO: 331181 - protein, 23 aa, Homo sapiens
  CDR3 for alpha chain variable domain of TCR clone 165591 (TRAV26-1, TRAJ38)
CIADNAGNNPIQNPDPAVYQLRD

SEQ ID NO: 331182 - protein, 15 aa, Homo sapiens
  CDR3 for beta chain variable domain of TCR clone 165591 (TRBV27, TRBJ2-1)
CASSNGGGSSNEQFF

SEQ ID NO: 331183 - protein, 14 aa, Homo sapiens
  CDR3 for alpha chain variable domain of TCR clone 165592 (TRAV17, TRAJ35)
CATDRPGFGNVLHC

SEQ ID NO: 331184 - protein, 19 aa, Homo sapiens
  CDR3 for beta chain variable domain of TCR clone 165592 (TRBV11-3, TRBJ2-2)
WASSTRPGAKTTNTGELFF

SEQ ID NO: 331185 - protein, 16 aa, Homo sapiens
  CDR3 for alpha chain variable domain of TCR clone 165593 (TRAV30, TRAJ24)
CGKEIVDDERWGKFQF

SEQ ID NO: 331186 - protein, 14 aa, Homo sapiens
  CDR3 for beta chain variable domain of TCR clone 165593 (TRBV12-5, TRBJ2-5)
CASGSRTHQETQYF

SEQ ID NO: 331187 - protein, 14 aa, Homo sapiens
  CDR3 for alpha chain variable domain of TCR clone 165594 (TRAV12-1, TRAJ24)
CVVRSTDSWGKFQF

SEQ ID NO: 331188 - protein, 13 aa, Homo sapiens
  CDR3 for beta chain variable domain of TCR clone 165594 (TRBV19, TRBJ2-7)
CASSIDRTYEQYF

SEQ ID NO: 331189 - protein, 13 aa, Homo sapiens
  CDR3 for alpha chain variable domain of TCR clone 165595 (TRAV21, TRAJ27)
CAARPGNAGKSTF

SEQ ID NO: 331190 - protein, 14 aa, Homo sapiens
  CDR3 for beta chain variable domain of TCR clone 165595 (TRBV20-1, TRBJ2-1)
CSAAGSGEFNEQFF

SEQ ID NO: 331191 - protein, 15 aa, Homo sapiens
  CDR3 for alpha chain variable domain of TCR clone 165596 (TRAV8-4, TRAJ12)
CAVSDRVDSSYKLIS

SEQ ID NO: 331192 - protein, 15 aa, Homo sapiens
  CDR3 for beta chain variable domain of TCR clone 165596 (TRBV11-3, TRBJ2-1)
CASSLAGQTYNEQFF

SEQ ID NO: 331193 - protein, 11 aa, Homo sapiens
  CDR3 for alpha chain variable domain of TCR clone 165597 (TRAV3, TRAJ17)
CAESAGNKLTF

SEQ ID NO: 331194 - protein, 14 aa, Homo sapiens
  CDR3 for beta chain variable domain of TCR clone 165597 (TRBV20-1, TRBJ2-2)
SAVLALRRTGELFF

SEQ ID NO: 331195 - protein, 15 aa, Homo sapiens
  CDR3 for alpha chain variable domain of TCR clone 165598 (TRAV8-1, TRAJ6)
CAVNAGAGGSYIPTF

SEQ ID NO: 331196 - protein, 13 aa, Homo sapiens
  CDR3 for beta chain variable domain of TCR clone 165598 (TRBV25-1, TRBJ1-6)
CSSLSADISPLHF

SEQ ID NO: 331197 - protein, 12 aa, Homo sapiens
  CDR3 for alpha chain variable domain of TCR clone 165599 (TRAV12-2, TRAJ21)
CAPSDNFNKFYF

SEQ ID NO: 331198 - protein, 13 aa, Homo sapiens
  CDR3 for beta chain variable domain of TCR clone 165599 (TRBV15, TRBJ1-6)
CVTSGGLNSPLHF

SEQ ID NO: 331199 - protein, 14 aa, Homo sapiens
  CDR3 for alpha chain variable domain of TCR clone 165600 (TRAV35, TRAJ13)
CAGSPSRGYQKVTF

SEQ ID NO: 331200 - protein, 13 aa, Homo sapiens
  CDR3 for beta chain variable domain of TCR clone 165600 (TRBV29-1, TRBJ1-1)
CSVWDSRNTEAFF

SEQ ID NO: 331201 - protein, 11 aa, Homo sapiens
  CDR3 for alpha chain variable domain of TCR clone 165601 (TRAV3, TRAJ17)
CAEAAGNKLTF

SEQ ID NO: 331202 - protein, 14 aa, Homo sapiens
  CDR3 for beta chain variable domain of TCR clone 165601 (TRBV19, TRBJ2-7)
CASSIFAGTYEQYF

SEQ ID NO: 331203 - protein, 13 aa, Homo sapiens
  CDR3 for alpha chain variable domain of TCR clone 165602 (TRAV13-2, TRAJ48)
CAEMDFGNEKLTF

SEQ ID NO: 331204 - protein, 16 aa, Homo sapiens
  CDR3 for beta chain variable domain of TCR clone 165602 (TRBV4-2, TRBJ1-1)
CASRPLDGGGDTEAFF

SEQ ID NO: 331205 - protein, 14 aa, Homo sapiens
  CDR3 for alpha chain variable domain of TCR clone 165603 (TRAV12-3, TRAJ10)
SHLPPTGGGNKLTF

SEQ ID NO: 331206 - protein, 15 aa, Homo sapiens
  CDR3 for beta chain variable domain of TCR clone 165603 (TRBV6-3, TRBJ2-7)
CASSSPGTVFYEQYF

SEQ ID NO: 331207 - protein, 12 aa, Homo sapiens
  CDR3 for alpha chain variable domain of TCR clone 165604 (TRAV21, TRAJ11)
CAATSGYSTLNF

SEQ ID NO: 331208 - protein, 16 aa, Homo sapiens
  CDR3 for beta chain variable domain of TCR clone 165604 (TRBV19, TRBJ2-1)
CASSKAGPSSYNEQFF

SEQ ID NO: 331209 - protein, 11 aa, Homo sapiens
  CDR3 for alpha chain variable domain of TCR clone 165605 (TRAV3, TRAJ17)
PRGAAGNKLTF

SEQ ID NO: 331210 - protein, 16 aa, Homo sapiens
  CDR3 for beta chain variable domain of TCR clone 165605 (TRBV7-6, TRBJ2-1)
CDSSAPGPSSYNEQFF

SEQ ID NO: 331211 - protein, 12 aa, Homo sapiens
  CDR3 for alpha chain variable domain of TCR clone 165606 (TRAV16, TRAJ26)
CALRSYGQNFVF

SEQ ID NO: 331212 - protein, 20 aa, Homo sapiens
  CDR3 for beta chain variable domain of TCR clone 165606 (TRBV7-8, TRBJ2-2)
CASSHLFPGPTIHITGELFF

SEQ ID NO: 331213 - protein, 12 aa, Homo sapiens
  CDR3 for alpha chain variable domain of TCR clone 165607 (TRAV2, TRAJ10)
CASKGGGNKLTF

SEQ ID NO: 331214 - protein, 14 aa, Homo sapiens
  CDR3 for beta chain variable domain of TCR clone 165607 (TRBV7-2, TRBJ2-2)
CASRGQGAAGELFF

SEQ ID NO: 331215 - protein, 13 aa, Homo sapiens
  CDR3 for alpha chain variable domain of TCR clone 165608 (TRAV21, TRAJ45)
CAVMGGGADGLTL

SEQ ID NO: 331216 - protein, 12 aa, Homo sapiens
  CDR3 for beta chain variable domain of TCR clone 165608 (TRBV10-2, TRBJ2-5)
CASSGGGKTQYF

SEQ ID NO: 331217 - protein, 14 aa, Homo sapiens
  CDR3 for alpha chain variable domain of TCR clone 165609 (TRAV8-6, TRAJ48)
CAVRTNFGNEKLTF

SEQ ID NO: 331218 - protein, 19 aa, Homo sapiens
  CDR3 for beta chain variable domain of TCR clone 165609 (TRBV12-4, TRBJ2-1)
CASTLAFDPRDKEANEQFF

SEQ ID NO: 331219 - protein, 12 aa, Homo sapiens
  CDR3 for alpha chain variable domain of TCR clone 165610 (TRAV36/DV7, TRAJ13)
CVSSGGYQKVTF

SEQ ID NO: 331220 - protein, 14 aa, Homo sapiens
  CDR3 for beta chain variable domain of TCR clone 165610 (TRBV19, TRBJ2-7)
CASNFRDTFTGMYF

SEQ ID NO: 331221 - protein, 13 aa, Homo sapiens
  CDR3 for alpha chain variable domain of TCR clone 165611 (TRAV12-1, TRAJ16)
CVVNGPDGQKLLL

SEQ ID NO: 331222 - protein, 15 aa, Homo sapiens
  CDR3 for beta chain variable domain of TCR clone 165611 (TRBV6-3, TRBJ2-7)
CASSSPGTVFYEQYF

SEQ ID NO: 331223 - protein, 14 aa, Homo sapiens
  CDR3 for alpha chain variable domain of TCR clone 165612 (TRAV35, TRAJ50)
CAGHRKTSYEKVIF

SEQ ID NO: 331224 - protein, 13 aa, Homo sapiens
  CDR3 for beta chain variable domain of TCR clone 165612 (TRBV7-7, TRBJ2-3)
CASSLSRADTHYF

SEQ ID NO: 331225 - protein, 14 aa, Homo sapiens
  CDR3 for alpha chain variable domain of TCR clone 165613 (TRAV3, TRAJ21)
CALGRGSTNFTLDL

SEQ ID NO: 331226 - protein, 14 aa, Homo sapiens
  CDR3 for beta chain variable domain of TCR clone 165613 (TRBV7-9, TRBJ2-4)
CASSLAMGGNIQYF

SEQ ID NO: 331227 - protein, 14 aa, Homo sapiens
  CDR3 for alpha chain variable domain of TCR clone 165614 (TRAV13-1, TRAJ44)
CAAKATGTASKLTF

SEQ ID NO: 331228 - protein, 17 aa, Homo sapiens
  CDR3 for beta chain variable domain of TCR clone 165614 (TRBV7-3, TRBJ2-3)
CASSLMKSMRGADTQYL

SEQ ID NO: 331229 - protein, 11 aa, Homo sapiens
  CDR3 for alpha chain variable domain of TCR clone 165615 (TRAV2, TRAJ13)
CASGGCQKVTF

SEQ ID NO: 331230 - protein, 16 aa, Homo sapiens
  CDR3 for beta chain variable domain of TCR clone 165615 (TRBV7-3, TRBJ2-1)
CASSKPLAGGYNEQFF

SEQ ID NO: 331231 - protein, 15 aa, Homo sapiens
  CDR3 for alpha chain variable domain of TCR clone 165616 (TRAV16, TRAJ17)
CALSGNKAAGNKLTF

SEQ ID NO: 331232 - protein, 13 aa, Homo sapiens
  CDR3 for beta chain variable domain of TCR clone 165616 (TRBV7-2, TRBJ1-1)
CASNLKGAKVAFF

SEQ ID NO: 331233 - protein, 12 aa, Homo sapiens
  CDR3 for alpha chain variable domain of TCR clone 165617 (TRAV4, TRAJ6)
CLVPGGSYIPTF

SEQ ID NO: 331234 - protein, 18 aa, Homo sapiens
  CDR3 for beta chain variable domain of TCR clone 165617 (TRBV20-1, TRBJ2-3)
CSASGLAGGPGTTDTQYF

SEQ ID NO: 331235 - protein, 12 aa, Homo sapiens
  CDR3 for alpha chain variable domain of TCR clone 165618 (TRAV1-2, TRAJ33)
CAALDSNYQLIW

SEQ ID NO: 331236 - protein, 16 aa, Homo sapiens
  CDR3 for beta chain variable domain of TCR clone 165618 (TRBV6-4, TRBJ1-2)
CASSEAVGDLNYGYTF

SEQ ID NO: 331237 - protein, 13 aa, Homo sapiens
  CDR3 for alpha chain variable domain of TCR clone 165619 (TRAV2, TRAJ15)
CAVASQAGTALIF

SEQ ID NO: 331238 - protein, 16 aa, Homo sapiens
  CDR3 for beta chain variable domain of TCR clone 165619 (TRBV5-1, TRBJ1-1)
CASSSGGNSLNTVAFF

SEQ ID NO: 331239 - protein, 17 aa, Homo sapiens
  CDR3 for alpha chain variable domain of TCR clone 165620 (TRAV4, TRAJ18)
CLVVAAGRGSTLGRRSF

SEQ ID NO: 331240 - protein, 17 aa, Homo sapiens
  CDR3 for beta chain variable domain of TCR clone 165620 (TRBV28, TRBJ2-2)
CASSLATGMGDAGELFF

SEQ ID NO: 331241 - protein, 16 aa, Homo sapiens
  CDR3 for alpha chain variable domain of TCR clone 165621 (TRAV12-2, TRAJ40)
CAVIRGGTSGTYKYIL

SEQ ID NO: 331242 - protein, 14 aa, Homo sapiens
  CDR3 for beta chain variable domain of TCR clone 165621 (TRBV5-7, TRBJ1-5)
CASSRTGGGQPQHF

SEQ ID NO: 331243 - protein, 13 aa, Homo sapiens
  CDR3 for alpha chain variable domain of TCR clone 165622 (TRAV12-1, TRAJ40)
CVLNSSGTYKYIF

SEQ ID NO: 331244 - protein, 14 aa, Homo sapiens
  CDR3 for beta chain variable domain of TCR clone 165622 (TRBV2, TRBJ1-6)
CASEVSSYNSPLHF

SEQ ID NO: 331245 - protein, 15 aa, Homo sapiens
  CDR3 for alpha chain variable domain of TCR clone 165623 (TRAV13-1, TRAJ16)
CAARYQMARRCSLQG

SEQ ID NO: 331246 - protein, 13 aa, Homo sapiens
  CDR3 for beta chain variable domain of TCR clone 165623 (TRBV4-1, TRBJ2-1)
CASSQAGGDEQFF

SEQ ID NO: 331247 - protein, 14 aa, Homo sapiens
  CDR3 for alpha chain variable domain of TCR clone 165624 (TRAV3, TRAJ7)
CAVREEEREQQTRF

SEQ ID NO: 331248 - protein, 15 aa, Homo sapiens
  CDR3 for beta chain variable domain of TCR clone 165624 (TRBV19, TRBJ2-7)
CASRPTPGLSIEQYF

SEQ ID NO: 331249 - protein, 12 aa, Homo sapiens
  CDR3 for alpha chain variable domain of TCR clone 165625 (TRAV16, TRAJ8)
CAPLGGFQKLVF

SEQ ID NO: 331250 - protein, 15 aa, Homo sapiens
  CDR3 for beta chain variable domain of TCR clone 165625 (TRBV19, TRBJ2-1)
CASSSPGVPLDEQFF

SEQ ID NO: 331251 - protein, 13 aa, Homo sapiens
  CDR3 for alpha chain variable domain of TCR clone 165626 (TRAV17, TRAJ9)
CATDYTGGFKIIF

SEQ ID NO: 331252 - protein, 16 aa, Homo sapiens
  CDR3 for beta chain variable domain of TCR clone 165626 (TRBV7-7, TRBJ2-1)
CASSLASGTSYNGQFF

SEQ ID NO: 331253 - protein, 16 aa, Homo sapiens
  CDR3 for alpha chain variable domain of TCR clone 165627 (TRAV26-1, TRAJ36)
CIVRVSYQTGANNLFF

SEQ ID NO: 331254 - protein, 16 aa, Homo sapiens
  CDR3 for beta chain variable domain of TCR clone 165627 (TRBV27, TRBJ2-5)
CASSYGPGGQKENQYF

SEQ ID NO: 331255 - protein, 12 aa, Homo sapiens
  CDR3 for alpha chain variable domain of TCR clone 165628 (TRAV27, TRAJ35)
CAGADFGNVLHC

SEQ ID NO: 331256 - protein, 13 aa, Homo sapiens
  CDR3 for beta chain variable domain of TCR clone 165628 (TRBV7-9, TRBJ1-6)
CASSLASLSPLHF

SEQ ID NO: 331257 - protein, 18 aa, Homo sapiens
  CDR3 for alpha chain variable domain of TCR clone 165629 (TRAV29/DV5, TRAJ52)
CAAGFRGAGGTSYGKLTF

SEQ ID NO: 331258 - protein, 15 aa, Homo sapiens
  CDR3 for beta chain variable domain of TCR clone 165629 (TRBV5-1, TRBJ2-1)
CASSFWTSGDNEQFF

SEQ ID NO: 331259 - protein, 14 aa, Homo sapiens
  CDR3 for alpha chain variable domain of TCR clone 165630 (TRAV9-2, TRAJ39)
CALYIYNAGNMLTF

SEQ ID NO: 331260 - protein, 15 aa, Homo sapiens
  CDR3 for beta chain variable domain of TCR clone 165630 (TRBV7-8, TRBJ1-2)
CASSLVRDGGLGYTF

SEQ ID NO: 331261 - protein, 12 aa, Homo sapiens
  CDR3 for alpha chain variable domain of TCR clone 165631 (TRAV30, TRAJ43)
CGTEERGNDMRF

SEQ ID NO: 331262 - protein, 13 aa, Homo sapiens
  CDR3 for beta chain variable domain of TCR clone 165631 (TRBV27, TRBJ2-7)
CASSFSHGYEQYF

SEQ ID NO: 331263 - protein, 18 aa, Homo sapiens
  CDR3 for alpha chain variable domain of TCR clone 165632 (TRAV26-1, TRAJ52)
CIVRVAGAGGTSYGKLTF

SEQ ID NO: 331264 - protein, 13 aa, Homo sapiens
  CDR3 for beta chain variable domain of TCR clone 165632 (TRBV7-8, TRBJ1-2)
CASSAQRYYGYTF

SEQ ID NO: 331265 - protein, 13 aa, Homo sapiens
  CDR3 for alpha chain variable domain of TCR clone 165633 (TRAV21, TRAJ27)
CAARPGTAGKSTF

SEQ ID NO: 331266 - protein, 13 aa, Homo sapiens
  CDR3 for beta chain variable domain of TCR clone 165633 (TRBV19, TRBJ2-7)
CQLYIRRNNEQYF

SEQ ID NO: 331267 - protein, 13 aa, Homo sapiens
  CDR3 for alpha chain variable domain of TCR clone 165634 (TRAV21, TRAJ27)
CAARPGNAGKSTF

SEQ ID NO: 331268 - protein, 16 aa, Homo sapiens
  CDR3 for beta chain variable domain of TCR clone 165634 (TRBV2, TRBJ1-4)
CASNLLQGATNEKLFF

SEQ ID NO: 331269 - protein, 11 aa, Homo sapiens
  CDR3 for alpha chain variable domain of TCR clone 165635 (TRAV13-1, TRAJ8)
CAARGFQKLVF

SEQ ID NO: 331270 - protein, 16 aa, Homo sapiens
  CDR3 for beta chain variable domain of TCR clone 165635 (TRBV19, TRBJ1-5)
CVSSTRGTRSNQPQHF

SEQ ID NO: 331271 - protein, 12 aa, Homo sapiens
  CDR3 for alpha chain variable domain of TCR clone 165636 (TRAV12-1, TRAJ16)
CVVFRDGQKLLF

SEQ ID NO: 331272 - protein, 14 aa, Homo sapiens
  CDR3 for beta chain variable domain of TCR clone 165636 (TRBV7-9, TRBJ2-2)
CASGLAINTGELFF

SEQ ID NO: 331273 - protein, 13 aa, Homo sapiens
  CDR3 for alpha chain variable domain of TCR clone 165637 (TRAV20, TRAJ40)
CAVPFSGTYKYIF

SEQ ID NO: 331274 - protein, 13 aa, Homo sapiens
  CDR3 for beta chain variable domain of TCR clone 165637 (TRBV7-3, TRBJ1-1)
CASSQDWGAEAFF

SEQ ID NO: 331275 - protein, 14 aa, Homo sapiens
  CDR3 for alpha chain variable domain of TCR clone 165638 (TRAV23/DV6, TRAJ11)
CAASLESGYSNLTF

SEQ ID NO: 331276 - protein, 13 aa, Homo sapiens
  CDR3 for beta chain variable domain of TCR clone 165638 (TRBV4-1, TRBJ2-5)
CASSLTRGETQYF

SEQ ID NO: 331277 - protein, 18 aa, Homo sapiens
  CDR3 for alpha chain variable domain of TCR clone 165639 (TRAV21, TRAJ52)
CAVRPCPAGGTSYGKLTF

SEQ ID NO: 331278 - protein, 17 aa, Homo sapiens
  CDR3 for beta chain variable domain of TCR clone 165639 (TRBV13, TRBJ2-3)
CASSLSRVAGGRDTQYF

SEQ ID NO: 331279 - protein, 10 aa, Homo sapiens
  CDR3 for alpha chain variable domain of TCR clone 165640 (TRAV26-1, TRAJ22)
CIVSLNFFWF

SEQ ID NO: 331280 - protein, 15 aa, Homo sapiens
  CDR3 for beta chain variable domain of TCR clone 165640 (TRBV4-2, TRBJ1-2)
CASSPRTGGRDGYTF

SEQ ID NO: 331281 - protein, 14 aa, Homo sapiens
  CDR3 for alpha chain variable domain of TCR clone 165641 (TRAV12-2, TRAJ53)
CRERGGGSNYKLTF

SEQ ID NO: 331282 - protein, 14 aa, Homo sapiens
  CDR3 for beta chain variable domain of TCR clone 165641 (TRBV7-3, TRBJ1-1)
CASSLKGGNTEAFF

SEQ ID NO: 331283 - protein, 12 aa, Homo sapiens
  CDR3 for alpha chain variable domain of TCR clone 165642 (TRAV36/DV7, TRAJ37)
CACYGNTGKLIF

SEQ ID NO: 331284 - protein, 13 aa, Homo sapiens
  CDR3 for beta chain variable domain of TCR clone 165642 (TRBV10-3, TRBJ2-7)
CASKLAVNNEQYF

SEQ ID NO: 331285 - protein, 13 aa, Homo sapiens
  CDR3 for alpha chain variable domain of TCR clone 165643 (TRAV20, TRAJ21)
CAVEGYNFNKFYF

SEQ ID NO: 331286 - protein, 18 aa, Homo sapiens
  CDR3 for beta chain variable domain of TCR clone 165643 (TRBV7-9, TRBJ2-1)
CASSLAVSGTSGRNEQFF

SEQ ID NO: 331287 - protein, 17 aa, Homo sapiens
  CDR3 for alpha chain variable domain of TCR clone 165644 (TRAV3, TRAJ42)
CAVRDRDYGGSQGNRIF

SEQ ID NO: 331288 - protein, 15 aa, Homo sapiens
  CDR3 for beta chain variable domain of TCR clone 165644 (TRBV5-1, TRBJ2-1)
CASSPPRAPYNEQFF

SEQ ID NO: 331289 - protein, 13 aa, Homo sapiens
  CDR3 for alpha chain variable domain of TCR clone 165645 (TRAV2, TRAJ12)
CAVGADSSYKLIF

SEQ ID NO: 331290 - protein, 12 aa, Homo sapiens
  CDR3 for beta chain variable domain of TCR clone 165645 (TRBV29-1, TRBJ2-2)
CSVDKYTGELFF

SEQ ID NO: 331291 - protein, 13 aa, Homo sapiens
  CDR3 for alpha chain variable domain of TCR clone 165646 (TRAV12-2, TRAJ13)
CRDKTGGYQKVTF

SEQ ID NO: 331292 - protein, 15 aa, Homo sapiens
  CDR3 for beta chain variable domain of TCR clone 165646 (TRBV27, TRBJ2-1)
CASSNGGGSSNEQFF

SEQ ID NO: 331293 - protein, 13 aa, Homo sapiens
  CDR3 for alpha chain variable domain of TCR clone 165647 (TRAV35, TRAJ36)
CAGPRIGANNLFF

SEQ ID NO: 331294 - protein, 15 aa, Homo sapiens
  CDR3 for beta chain variable domain of TCR clone 165647 (TRBV28, TRBJ2-5)
CAISPPWSYQETQYF

SEQ ID NO: 331295 - protein, 12 aa, Homo sapiens
  CDR3 for alpha chain variable domain of TCR clone 165648 (TRAV12-1, TRAJ6)
CVVSERSYIPTF

SEQ ID NO: 331296 - protein, 21 aa, Homo sapiens
  CDR3 for beta chain variable domain of TCR clone 165648 (TRBV7-3, TRBJ2-1)
GGTQPCISVPAAYGLAVAQFF

SEQ ID NO: 331297 - protein, 17 aa, Homo sapiens
  CDR3 for alpha chain variable domain of TCR clone 165649 (TRAV3, TRAJ38)
CAVRDCLNAGNNRKPIW

SEQ ID NO: 331298 - protein, 13 aa, Homo sapiens
  CDR3 for beta chain variable domain of TCR clone 165649 (TRBV23-1, TRBJ1-4)
CASRGKFNEKLFF

SEQ ID NO: 331299 - protein, 15 aa, Homo sapiens
  CDR3 for alpha chain variable domain of TCR clone 165650 (TRAV3, TRAJ5)
CAVRDLDTGRRALTF

SEQ ID NO: 331300 - protein, 14 aa, Homo sapiens
  CDR3 for beta chain variable domain of TCR clone 165650 (TRBV7-2, TRBJ2-5)
CASSPRGSSETQYF

SEQ ID NO: 331301 - protein, 16 aa, Homo sapiens
  CDR3 for alpha chain variable domain of TCR clone 165651 (TRAV26-1, TRAJ23)
YIVRPHGNNQGGKLIF

SEQ ID NO: 331302 - protein, 13 aa, Homo sapiens
  CDR3 for beta chain variable domain of TCR clone 165651 (TRBV27, TRBJ2-7)
CASSLTTGYEQYF

SEQ ID NO: 331303 - protein, 12 aa, Homo sapiens
  CDR3 for alpha chain variable domain of TCR clone 165652 (TRAV12-3, TRAJ17)
VAMTLTGNKLTF

SEQ ID NO: 331304 - protein, 15 aa, Homo sapiens
  CDR3 for beta chain variable domain of TCR clone 165652 (TRBV20-1, TRBJ2-7)
CSARDRVSGMDEQYF

SEQ ID NO: 331305 - protein, 13 aa, Homo sapiens
  CDR3 for alpha chain variable domain of TCR clone 165653 (TRAV13-1, TRAJ43)
CAASLSNNNDVRF

SEQ ID NO: 331306 - protein, 15 aa, Homo sapiens
  CDR3 for beta chain variable domain of TCR clone 165653 (TRBV5-1, TRBJ2-1)
CASSPAGYWWNEQFF

SEQ ID NO: 331307 - protein, 12 aa, Homo sapiens
  CDR3 for alpha chain variable domain of TCR clone 165654 (TRAV12-2, TRAJ4)
GWPEGGYNKLIF

SEQ ID NO: 331308 - protein, 16 aa, Homo sapiens
  CDR3 for beta chain variable domain of TCR clone 165654 (TRBV7-3, TRBJ1-2)
CASSLGAPVPNYGYTF

SEQ ID NO: 331309 - protein, 15 aa, Homo sapiens
  CDR3 for alpha chain variable domain of TCR clone 165655 (TRAV3, TRAJ4)
CAVRDGTGGFNNLIF

SEQ ID NO: 331310 - protein, 15 aa, Homo sapiens
  CDR3 for beta chain variable domain of TCR clone 165655 (TRBV5-1, TRBJ2-7)
CASSFRLAGVHEQYF

SEQ ID NO: 331311 - protein, 12 aa, Homo sapiens
  CDR3 for alpha chain variable domain of TCR clone 165656 (TRAV25, TRAJ38)
CAGTGNNRKLIL

SEQ ID NO: 331312 - protein, 14 aa, Homo sapiens
  CDR3 for beta chain variable domain of TCR clone 165656 (TRBV19, TRBJ1-5)
CASSKMTGPQPQHF

SEQ ID NO: 331313 - protein, 11 aa, Homo sapiens
  CDR3 for alpha chain variable domain of TCR clone 165657 (TRAV35, TRAJ30)
CAGPGDDKIIF

SEQ ID NO: 331314 - protein, 17 aa, Homo sapiens
  CDR3 for beta chain variable domain of TCR clone 165657 (TRBV7-6, TRBJ2-3)
CASSLSRVAGGRNTQYF

SEQ ID NO: 331315 - protein, 14 aa, Homo sapiens
  CDR3 for alpha chain variable domain of TCR clone 165658 (TRAV9-2, TRAJ39)
CALYIYNAGNMLTF

SEQ ID NO: 331316 - protein, 16 aa, Homo sapiens
  CDR3 for beta chain variable domain of TCR clone 165658 (TRBV7-2, TRBJ1-6)
CASSSFESSYNSPLHF

SEQ ID NO: 331317 - protein, 11 aa, Homo sapiens
  CDR3 for alpha chain variable domain of TCR clone 165659 (TRAV13-2, TRAJ31)
CAENMDARIMF

SEQ ID NO: 331318 - protein, 15 aa, Homo sapiens
  CDR3 for beta chain variable domain of TCR clone 165659 (TRBV7-8, TRBJ1-2)
CASSLVRDGGLGYTF

SEQ ID NO: 331319 - protein, 11 aa, Homo sapiens
  CDR3 for alpha chain variable domain of TCR clone 165660 (TRAV27, TRAJ20)
CAGADDYKLSF

SEQ ID NO: 331320 - protein, 14 aa, Homo sapiens
  CDR3 for beta chain variable domain of TCR clone 165660 (TRBV28, TRBJ2-1)
CASSLLQGTNEQFF

SEQ ID NO: 331321 - protein, 18 aa, Homo sapiens
  CDR3 for alpha chain variable domain of TCR clone 165661 (TRAV35, TRAJ28)
CAGHNYPLSGAGSYQLTF

SEQ ID NO: 331322 - protein, 12 aa, Homo sapiens
  CDR3 for beta chain variable domain of TCR clone 165661 (TRBV7-9, TRBJ1-1)
CASSLQGTEAFF

SEQ ID NO: 331323 - protein, 14 aa, Homo sapiens
  CDR3 for alpha chain variable domain of TCR clone 165662 (TRAV25, TRAJ22)
CAVRYSGSARQLTF

SEQ ID NO: 331324 - protein, 16 aa, Homo sapiens
  CDR3 for beta chain variable domain of TCR clone 165662 (TRBV4-2, TRBJ1-1)
CASSPSPGRAAPEAFF

SEQ ID NO: 331325 - protein, 12 aa, Homo sapiens
  CDR3 for alpha chain variable domain of TCR clone 165663 (TRAV8-3, TRAJ20)
GAVGANDYKLSF

SEQ ID NO: 331326 - protein, 16 aa, Homo sapiens
  CDR3 for beta chain variable domain of TCR clone 165663 (TRBV19, TRBJ2-2)
CASRSPGTGGTGELFF

SEQ ID NO: 331327 - protein, 16 aa, Homo sapiens
  CDR3 for alpha chain variable domain of TCR clone 165664 (TRAV30, TRAJ24)
CGTEIVDADSRGKFQF

SEQ ID NO: 331328 - protein, 16 aa, Homo sapiens
  CDR3 for beta chain variable domain of TCR clone 165664 (TRBV20-1, TRBJ1-1)
CSARALTQGMNTEAFF

SEQ ID NO: 331329 - protein, 17 aa, Homo sapiens
  CDR3 for alpha chain variable domain of TCR clone 165665 (TRAV12-2, TRAJ45)
CAVNIPHSGGGADGLTF

SEQ ID NO: 331330 - protein, 16 aa, Homo sapiens
  CDR3 for beta chain variable domain of TCR clone 165665 (TRBV4-3, TRBJ2-3)
CASSLGLAGEGDTQYF

SEQ ID NO: 331331 - protein, 14 aa, Homo sapiens
  CDR3 for alpha chain variable domain of TCR clone 165666 (TRAV13-1, TRAJ35)
CAGSKGGFGNVLHC

SEQ ID NO: 331332 - protein, 13 aa, Homo sapiens
  CDR3 for beta chain variable domain of TCR clone 165666 (TRBV7-3, TRBJ1-1)
CASSQDWGAEAFF

SEQ ID NO: 331333 - protein, 13 aa, Homo sapiens
  CDR3 for alpha chain variable domain of TCR clone 165667 (TRAV13-1, TRAJ40)
CAAISPGTYKYIF

SEQ ID NO: 331334 - protein, 13 aa, Homo sapiens
  CDR3 for beta chain variable domain of TCR clone 165667 (TRBV10-3, TRBJ2-7)
CATRAGGPNEQYF

SEQ ID NO: 331335 - protein, 12 aa, Homo sapiens
  CDR3 for alpha chain variable domain of TCR clone 165668 (TRAV26-1, TRAJ36)
CIVRVRADNLFF

SEQ ID NO: 331336 - protein, 13 aa, Homo sapiens
  CDR3 for beta chain variable domain of TCR clone 165668 (TRBV11-2, TRBJ2-5)
CTSSRGPSETQYF

SEQ ID NO: 331337 - protein, 14 aa, Homo sapiens
  CDR3 for alpha chain variable domain of TCR clone 165669 (TRAV26-1, TRAJ38)
CIAVNAGNNRKLIW

SEQ ID NO: 331338 - protein, 13 aa, Homo sapiens
  CDR3 for beta chain variable domain of TCR clone 165669 (TRBV20-1, TRBJ1-1)
CSARGEGNTEAFF

SEQ ID NO: 331339 - protein, 15 aa, Homo sapiens
  CDR3 for alpha chain variable domain of TCR clone 165670 (TRAV21, TRAJ53)
CATLNSGGSNYKLTF

SEQ ID NO: 331340 - protein, 14 aa, Homo sapiens
  CDR3 for beta chain variable domain of TCR clone 165670 (TRBV7-8, TRBJ2-5)
CASSATGGQETQYF

SEQ ID NO: 331341 - protein, 14 aa, Homo sapiens
  CDR3 for alpha chain variable domain of TCR clone 165671 (TRAV17, TRAJ22)
CTTVLSGSARQLTF

SEQ ID NO: 331342 - protein, 14 aa, Homo sapiens
  CDR3 for beta chain variable domain of TCR clone 165671 (TRBV12-4, TRBJ2-3)
CASSGQGSTDTQYV

SEQ ID NO: 331343 - protein, 14 aa, Homo sapiens
  CDR3 for alpha chain variable domain of TCR clone 165672 (TRAV2, TRAJ9)
CAVEDRRGGFKTIF

SEQ ID NO: 331344 - protein, 15 aa, Homo sapiens
  CDR3 for beta chain variable domain of TCR clone 165672 (TRBV12-4, TRBJ2-5)
CASSLSGAFQETQYF

SEQ ID NO: 331345 - protein, 15 aa, Homo sapiens
  CDR3 for alpha chain variable domain of TCR clone 165673 (TRAV8-1, TRAJ42)
CAVRSYGGSQGNLIF

SEQ ID NO: 331346 - protein, 21 aa, Homo sapiens
  CDR3 for beta chain variable domain of TCR clone 165673 (TRBV5-1, TRBJ1-6)
CASSPRGGADSTGGVRSPLDF

SEQ ID NO: 331347 - protein, 16 aa, Homo sapiens
  CDR3 for alpha chain variable domain of TCR clone 165674 (TRAV12-3, TRAJ53)
CAMSPGSGGSNYKLTF

SEQ ID NO: 331348 - protein, 12 aa, Homo sapiens
  CDR3 for beta chain variable domain of TCR clone 165674 (TRBV11-2, TRBJ2-7)
CASSPPADEQYF

SEQ ID NO: 331349 - protein, 14 aa, Homo sapiens
  CDR3 for alpha chain variable domain of TCR clone 165675 (TRAV4, TRAJ9)
CLLGSGTGGFKTNF

SEQ ID NO: 331350 - protein, 15 aa, Homo sapiens
  CDR3 for beta chain variable domain of TCR clone 165675 (TRBV7-2, TRBJ2-1)
CASSLASGRVNEQFF

SEQ ID NO: 331351 - protein, 15 aa, Homo sapiens
  CDR3 for alpha chain variable domain of TCR clone 165676 (TRAV12-2, TRAJ50)
CAVNGLETSYDKVIF

SEQ ID NO: 331352 - protein, 19 aa, Homo sapiens
  CDR3 for beta chain variable domain of TCR clone 165676 (TRBV19, TRBJ2-6)
CASTPTWGRAASGANVLTF

SEQ ID NO: 331353 - protein, 13 aa, Homo sapiens
  CDR3 for alpha chain variable domain of TCR clone 165677 (TRAV4, TRAJ15)
CLVGPEAGTALIF

SEQ ID NO: 331354 - protein, 15 aa, Homo sapiens
  CDR3 for beta chain variable domain of TCR clone 165677 (TRBV7-2, TRBJ2-1)
CASSFDPGRRNEQLF

SEQ ID NO: 331355 - protein, 17 aa, Homo sapiens
  CDR3 for alpha chain variable domain of TCR clone 165678 (TRAV26-1, TRAJ53)
CIVRVDDSGGHNYKLTF

SEQ ID NO: 331356 - protein, 15 aa, Homo sapiens
  CDR3 for beta chain variable domain of TCR clone 165678 (TRBV20-1, TRBJ2-7)
CSARVPAAYFYEQYF

SEQ ID NO: 331357 - protein, 17 aa, Homo sapiens
  CDR3 for alpha chain variable domain of TCR clone 165679 (TRAV13-1, TRAJ52)
CAASSGAGGTSYGKLTF

SEQ ID NO: 331358 - protein, 14 aa, Homo sapiens
  CDR3 for beta chain variable domain of TCR clone 165679 (TRBV7-9, TRBJ2-7)
CASSIGQGAGEQYF

SEQ ID NO: 331359 - protein, 12 aa, Homo sapiens
  CDR3 for alpha chain variable domain of TCR clone 165680 (TRAV8-6, TRAJ21)
CAVRPNFNKFYF

SEQ ID NO: 331360 - protein, 14 aa, Homo sapiens
  CDR3 for beta chain variable domain of TCR clone 165680 (TRBV18, TRBJ2-7)
CASSPRGGAYEQYF

SEQ ID NO: 331361 - protein, 14 aa, Homo sapiens
  CDR3 for alpha chain variable domain of TCR clone 165681 (TRAV13-1, TRAJ44)
CAAKATGTPSKLTF

SEQ ID NO: 331362 - protein, 15 aa, Homo sapiens
  CDR3 for beta chain variable domain of TCR clone 165681 (TRBV4-3, TRBJ1-1)
CASSQELGRGTEAFF

SEQ ID NO: 331363 - protein, 11 aa, Homo sapiens
  CDR3 for alpha chain variable domain of TCR clone 165682 (TRAV2, TRAJ13)
CASGSYQKVTF

SEQ ID NO: 331364 - protein, 12 aa, Homo sapiens
  CDR3 for beta chain variable domain of TCR clone 165682 (TRBV5-1, TRBJ2-7)
CASSFRGYEQYF

SEQ ID NO: 331365 - protein, 14 aa, Homo sapiens
  CDR3 for alpha chain variable domain of TCR clone 165683 (TRAV1-2, TRAJ13)
CAVKHCGGYQKVTF

SEQ ID NO: 331366 - protein, 12 aa, Homo sapiens
  CDR3 for beta chain variable domain of TCR clone 165683 (TRBV7-3, TRBJ2-5)
CASSSPGGTQYF

SEQ ID NO: 331367 - protein, 15 aa, Homo sapiens
  CDR3 for alpha chain variable domain of TCR clone 165684 (TRAV8-3, TRAJ11)
CAVGLLNSGYSTLAF

SEQ ID NO: 331368 - protein, 16 aa, Homo sapiens
  CDR3 for beta chain variable domain of TCR clone 165684 (TRBV7-9, TRBJ1-2)
CASSLGFSSGEDGYTF

SEQ ID NO: 331369 - protein, 13 aa, Homo sapiens
  CDR3 for alpha chain variable domain of TCR clone 165685 (TRAV20, TRAJ56)
CAVQAGANSKLTF

SEQ ID NO: 331370 - protein, 12 aa, Homo sapiens
  CDR3 for beta chain variable domain of TCR clone 165685 (TRBV5-1, TRBJ1-2)
CASSQDTYGYTF

SEQ ID NO: 331371 - protein, 14 aa, Homo sapiens
  CDR3 for alpha chain variable domain of TCR clone 165686 (TRAV3, TRAJ40)
CAVRDRRGTYKYIS

SEQ ID NO: 331372 - protein, 15 aa, Homo sapiens
  CDR3 for beta chain variable domain of TCR clone 165686 (TRBV11-1, TRBJ1-3)
CASTDPRAFGNTMYF

SEQ ID NO: 331373 - protein, 12 aa, Homo sapiens
  CDR3 for alpha chain variable domain of TCR clone 165687 (TRAV3, TRAJ43)
CAVRDPNNDMRS

SEQ ID NO: 331374 - protein, 16 aa, Homo sapiens
  CDR3 for beta chain variable domain of TCR clone 165687 (TRBV12-4, TRBJ1-5)
CASSRPVGGSNQPQHF

SEQ ID NO: 331375 - protein, 12 aa, Homo sapiens
  CDR3 for alpha chain variable domain of TCR clone 165688 (TRAV27, TRAJ13)
CAGVRGSQKVTF

SEQ ID NO: 331376 - protein, 16 aa, Homo sapiens
  CDR3 for beta chain variable domain of TCR clone 165688 (TRBV28, TRBJ2-1)
CASSSSYSGSLNEQFF

SEQ ID NO: 331377 - protein, 12 aa, Homo sapiens
  CDR3 for alpha chain variable domain of TCR clone 165689 (TRAV30, TRAJ43)
CGTEERGNDMRF

SEQ ID NO: 331378 - protein, 13 aa, Homo sapiens
  CDR3 for beta chain variable domain of TCR clone 165689 (TRBV27, TRBJ2-7)
CASSFSQGYERYF

SEQ ID NO: 331379 - protein, 11 aa, Homo sapiens
  CDR3 for alpha chain variable domain of TCR clone 165690 (TRAV2, TRAJ13)
CASGGYQKVTF

SEQ ID NO: 331380 - protein, 14 aa, Homo sapiens
  CDR3 for beta chain variable domain of TCR clone 165690 (TRBV19, TRBJ2-1)
CASPTFVLSGEQYF

SEQ ID NO: 331381 - protein, 14 aa, Homo sapiens
  CDR3 for alpha chain variable domain of TCR clone 165691 (TRAV1-2, TRAJ16)
CAVNRFSDGQKLLF

SEQ ID NO: 331382 - protein, 13 aa, Homo sapiens
  CDR3 for beta chain variable domain of TCR clone 165691 (TRBV5-1, TRBJ1-1)
CASSKLGNTEAFF

SEQ ID NO: 331383 - protein, 14 aa, Homo sapiens
  CDR3 for alpha chain variable domain of TCR clone 165692 (TRAV35, TRAJ13)
CAGSPSGGYQKVTF

SEQ ID NO: 331384 - protein, 12 aa, Homo sapiens
  CDR3 for beta chain variable domain of TCR clone 165692 (TRBV29-1, TRBJ2-3)
CSVTGGADTQYF

SEQ ID NO: 331385 - protein, 13 aa, Homo sapiens
  CDR3 for alpha chain variable domain of TCR clone 165693 (TRAV6, TRAJ5)
CAPKATGRRALTF

SEQ ID NO: 331386 - protein, 12 aa, Homo sapiens
  CDR3 for beta chain variable domain of TCR clone 165693 (TRBV11-2, TRBJ2-2)
CASSLGGGELFF

SEQ ID NO: 331387 - protein, 14 aa, Homo sapiens
  CDR3 for alpha chain variable domain of TCR clone 165694 (TRAV4, TRAJ6)
CLVGEAGGSYIPTF

SEQ ID NO: 331388 - protein, 15 aa, Homo sapiens
  CDR3 for beta chain variable domain of TCR clone 165694 (TRBV9, TRBJ2-1)
CASSRAGSAYNEQFF

SEQ ID NO: 331389 - protein, 12 aa, Homo sapiens
  CDR3 for alpha chain variable domain of TCR clone 165695 (TRAV12-3, TRAJ29)
CAAREGNTPLVF

SEQ ID NO: 331390 - protein, 17 aa, Homo sapiens
  CDR3 for beta chain variable domain of TCR clone 165695 (TRBV18, TRBJ2-1)
CASTPLAAGAGDNEQFF

SEQ ID NO: 331391 - protein, 13 aa, Homo sapiens
  CDR3 for alpha chain variable domain of TCR clone 165696 (TRAV23/DV6, TRAJ43)
CAASMGGNNAMRF

SEQ ID NO: 331392 - protein, 14 aa, Homo sapiens
  CDR3 for beta chain variable domain of TCR clone 165696 (TRBV3-1, TRBJ2-3)
CASSWSGVGDTQYF

SEQ ID NO: 331393 - protein, 15 aa, Homo sapiens
  CDR3 for alpha chain variable domain of TCR clone 165697 (TRAV34, TRAJ38)
CGADFTPGNHRKLIW

SEQ ID NO: 331394 - protein, 14 aa, Homo sapiens
  CDR3 for beta chain variable domain of TCR clone 165697 (TRBV12-5, TRBJ2-5)
CASGSRTHQETQYF

SEQ ID NO: 331395 - protein, 12 aa, Homo sapiens
  CDR3 for alpha chain variable domain of TCR clone 165698 (TRAV13-2, TRAJ23)
CSERHRGGKLIF

SEQ ID NO: 331396 - protein, 13 aa, Homo sapiens
  CDR3 for beta chain variable domain of TCR clone 165698 (TRBV7-9, TRBJ2-3)
CASSPGSTDTQYF

SEQ ID NO: 331397 - protein, 14 aa, Homo sapiens
  CDR3 for alpha chain variable domain of TCR clone 165699 (TRAV26-1, TRAJ38)
CIADNAGNNRKLIW

SEQ ID NO: 331398 - protein, 15 aa, Homo sapiens
  CDR3 for beta chain variable domain of TCR clone 165699 (TRBV5-1, TRBJ2-3)
YASSVTSGSTDTQYF

SEQ ID NO: 331399 - protein, 14 aa, Homo sapiens
  CDR3 for alpha chain variable domain of TCR clone 165700 (TRAV12-3, TRAJ21)
CAATDLYNFNKFYF

SEQ ID NO: 331400 - protein, 13 aa, Homo sapiens
  CDR3 for beta chain variable domain of TCR clone 165700 (TRBV19, TRBJ2-2)
CASSSKKTGELFF

SEQ ID NO: 331401 - protein, 11 aa, Homo sapiens
  CDR3 for alpha chain variable domain of TCR clone 165701 (TRAV1-2, TRAJ20)
CAVSNDYKLSF

SEQ ID NO: 331402 - protein, 15 aa, Homo sapiens
  CDR3 for beta chain variable domain of TCR clone 165701 (TRBV5-1, TRBJ2-2)
CASSLFGQNTGELFF

SEQ ID NO: 331403 - protein, 17 aa, Homo sapiens
  CDR3 for alpha chain variable domain of TCR clone 165702 (TRAV3, TRAJ6)
CAVRDGPRAGGSYIPTS

SEQ ID NO: 331404 - protein, 21 aa, Homo sapiens
  CDR3 for beta chain variable domain of TCR clone 165702 (TRBV7-2, TRBJ2-7)
RRTRPCISVPAALRLVYEQYF

SEQ ID NO: 331405 - protein, 14 aa, Homo sapiens
  CDR3 for alpha chain variable domain of TCR clone 165703 (TRAV1-2, TRAJ16)
FAVNRVSDGQKLLF

SEQ ID NO: 331406 - protein, 14 aa, Homo sapiens
  CDR3 for beta chain variable domain of TCR clone 165703 (TRBV7-9, TRBJ2-3)
CASSLEDGTDTQYF

SEQ ID NO: 331407 - protein, 17 aa, Homo sapiens
  CDR3 for alpha chain variable domain of TCR clone 165704 (TRAV21, TRAJ52)
CCEAFPSGCTSYGKLTF

SEQ ID NO: 331408 - protein, 16 aa, Homo sapiens
  CDR3 for beta chain variable domain of TCR clone 165704 (TRBV13, TRBJ2-3)
CQQPLQGSGGRNTQYF

SEQ ID NO: 331409 - protein, 15 aa, Homo sapiens
  CDR3 for alpha chain variable domain of TCR clone 165705 (TRAV3, TRAJ17)
CAVRDTGAAGNKLTF

SEQ ID NO: 331410 - protein, 12 aa, Homo sapiens
  CDR3 for beta chain variable domain of TCR clone 165705 (TRBV7-9, TRBJ2-7)
CATRTDAYEQYF

SEQ ID NO: 331411 - protein, 13 aa, Homo sapiens
  CDR3 for alpha chain variable domain of TCR clone 165706 (TRAV36/DV7, TRAJ54)
CAVLIQGAQKLVF

SEQ ID NO: 331412 - protein, 13 aa, Homo sapiens
  CDR3 for beta chain variable domain of TCR clone 165706 (TRBV19, TRBJ1-5)
CASSIDRDQPQHF

SEQ ID NO: 331413 - protein, 19 aa, Homo sapiens
  CDR3 for alpha chain variable domain of TCR clone 165707 (TRAV21, TRAJ41)
CAVREFRVCTPLRQRHLAF

SEQ ID NO: 331414 - protein, 15 aa, Homo sapiens
  CDR3 for beta chain variable domain of TCR clone 165707 (TRBV18, TRBJ1-5)
CASSPQARSNQPQHF

SEQ ID NO: 331415 - protein, 11 aa, Homo sapiens
  CDR3 for alpha chain variable domain of TCR clone 165708 (TRAV16, TRAJ33)
CALHSNYQLIW

SEQ ID NO: 331416 - protein, 13 aa, Homo sapiens
  CDR3 for beta chain variable domain of TCR clone 165708 (TRBV9, TRBJ2-1)
CASSPSGGNEQFF

SEQ ID NO: 331417 - protein, 12 aa, Homo sapiens
  CDR3 for alpha chain variable domain of TCR clone 165709 (TRAV12-3, TRAJ34)
CGMGYNTDKLIF

SEQ ID NO: 331418 - protein, 14 aa, Homo sapiens
  CDR3 for beta chain variable domain of TCR clone 165709 (TRBV4-1, TRBJ2-2)
CASSQAVNTGELFF

SEQ ID NO: 331419 - protein, 15 aa, Homo sapiens
  CDR3 for alpha chain variable domain of TCR clone 165710 (TRAV25, TRAJ52)
CAGTSGGTSYVKLTF

SEQ ID NO: 331420 - protein, 16 aa, Homo sapiens
  CDR3 for beta chain variable domain of TCR clone 165710 (TRBV15, TRBJ1-2)
CATSRGPRTGGGGYAF

SEQ ID NO: 331421 - protein, 12 aa, Homo sapiens
  CDR3 for alpha chain variable domain of TCR clone 165711 (TRAV8-3, TRAJ20)
CAVGANDYKLSF

SEQ ID NO: 331422 - protein, 13 aa, Homo sapiens
  CDR3 for beta chain variable domain of TCR clone 165711 (TRBV10-3, TRBJ2-7)
CASKRAVNYEQYF

SEQ ID NO: 331423 - protein, 11 aa, Homo sapiens
  CDR3 for alpha chain variable domain of TCR clone 165712 (TRAV12-3, TRAJ43)
CAMSVSNDMRF

SEQ ID NO: 331424 - protein, 15 aa, Homo sapiens
  CDR3 for beta chain variable domain of TCR clone 165712 (TRBV24-1, TRBJ2-1)
CATSEPGQGYNEQFF

SEQ ID NO: 331425 - protein, 11 aa, Homo sapiens
  CDR3 for alpha chain variable domain of TCR clone 165713 (TRAV23/DV6, TRAJ47)
CAAGYGNKLVF

SEQ ID NO: 331426 - protein, 14 aa, Homo sapiens
  CDR3 for beta chain variable domain of TCR clone 165713 (TRBV12-5, TRBJ2-5)
CASGSRTHQETQYF

SEQ ID NO: 331427 - protein, 12 aa, Homo sapiens
  CDR3 for alpha chain variable domain of TCR clone 165714 (TRAV27, TRAJ37)
CADSVNTGKLIF

SEQ ID NO: 331428 - protein, 18 aa, Homo sapiens
  CDR3 for beta chain variable domain of TCR clone 165714 (TRBV7-9, TRBJ1-1)
CASSKPWDTMGMNTEAFF

SEQ ID NO: 331429 - protein, 14 aa, Homo sapiens
  CDR3 for alpha chain variable domain of TCR clone 165715 (TRAV23/DV6, TRAJ13)
CAASETGGYQKVTF

SEQ ID NO: 331430 - protein, 13 aa, Homo sapiens
  CDR3 for beta chain variable domain of TCR clone 165715 (TRBV29-1, TRBJ2-1)
CSVEGGRGNEQFF

SEQ ID NO: 331431 - protein, 12 aa, Homo sapiens
  CDR3 for alpha chain variable domain of TCR clone 165716 (TRAV13-2, TRAJ23)
CAERHRGGKLIF

SEQ ID NO: 331432 - protein, 16 aa, Homo sapiens
  CDR3 for beta chain variable domain of TCR clone 165716 (TRBV20-1, TRBJ1-4)
CSAPGQGLLTNEKMFF

SEQ ID NO: 331433 - protein, 13 aa, Homo sapiens
  CDR3 for alpha chain variable domain of TCR clone 165717 (TRAV3, TRAJ4)
CAVRDGGYNKLIF

SEQ ID NO: 331434 - protein, 11 aa, Homo sapiens
  CDR3 for beta chain variable domain of TCR clone 165717 (TRBV12-4, TRBJ2-3)
CASTATDTQYF

SEQ ID NO: 331435 - protein, 13 aa, Homo sapiens
  CDR3 for alpha chain variable domain of TCR clone 165718 (TRAV3, TRAJ30)
CAVRDRGGDKIIF

SEQ ID NO: 331436 - protein, 17 aa, Homo sapiens
  CDR3 for beta chain variable domain of TCR clone 165718 (TRBV20-1, TRBJ2-1)
CSARDPLAGVWDNEQFF

SEQ ID NO: 331437 - protein, 14 aa, Homo sapiens
  CDR3 for alpha chain variable domain of TCR clone 165719 (TRAV1-2, TRAJ16)
CAVNRFSDGQKLLF

SEQ ID NO: 331438 - protein, 18 aa, Homo sapiens
  CDR3 for beta chain variable domain of TCR clone 165719 (TRBV7-9, TRBJ2-6)
CASSFPGAGISGANVLTF

SEQ ID NO: 331439 - protein, 14 aa, Homo sapiens
  CDR3 for alpha chain variable domain of TCR clone 165720 (TRAV29/DV5, TRAJ36)
CAPRRKTGANNLFF

SEQ ID NO: 331440 - protein, 14 aa, Homo sapiens
  CDR3 for beta chain variable domain of TCR clone 165720 (TRBV12-5, TRBJ2-5)
CASGSRTHQETQYF

SEQ ID NO: 331441 - protein, 11 aa, Homo sapiens
  CDR3 for alpha chain variable domain of TCR clone 165721 (TRAV2, TRAJ13)
CASGGYQKVTF

SEQ ID NO: 331442 - protein, 13 aa, Homo sapiens
  CDR3 for beta chain variable domain of TCR clone 165721 (TRBV3-1, TRBJ2-5)
CASSPPAAETQYF

SEQ ID NO: 331443 - protein, 12 aa, Homo sapiens
  CDR3 for alpha chain variable domain of TCR clone 165722 (TRAV8-3, TRAJ26)
CAGDNYCQNFVF

SEQ ID NO: 331444 - protein, 12 aa, Homo sapiens
  CDR3 for beta chain variable domain of TCR clone 165722 (TRBV11-2, TRBJ2-1)
CASSPGNNEQFF

SEQ ID NO: 331445 - protein, 16 aa, Homo sapiens
  CDR3 for alpha chain variable domain of TCR clone 165723 (TRAV3, TRAJ21)
CAVRDIERGNFKKFYF

SEQ ID NO: 331446 - protein, 16 aa, Homo sapiens
  CDR3 for beta chain variable domain of TCR clone 165723 (TRBV12-4, TRBJ1-5)
CASSRPVGGSNQHQHF

SEQ ID NO: 331447 - protein, 13 aa, Homo sapiens
  CDR3 for alpha chain variable domain of TCR clone 165724 (TRAV23/DV6, TRAJ15)
CAALPAGRNCSDL

SEQ ID NO: 331448 - protein, 14 aa, Homo sapiens
  CDR3 for beta chain variable domain of TCR clone 165724 (TRBV7-9, TRBJ1-2)
CASSRQGANYGYPF

SEQ ID NO: 331449 - protein, 17 aa, Homo sapiens
  CDR3 for alpha chain variable domain of TCR clone 165725 (TRAV3, TRAJ6)
CAVRDGPRAGGSYLPTF

SEQ ID NO: 331450 - protein, 14 aa, Homo sapiens
  CDR3 for beta chain variable domain of TCR clone 165725 (TRBV7-2, TRBJ2-7)
CASSPKTSLYEQYF

SEQ ID NO: 331451 - protein, 14 aa, Homo sapiens
  CDR3 for alpha chain variable domain of TCR clone 165726 (TRAV3, TRAJ7)
CAVREGEREQQNRF

SEQ ID NO: 331452 - protein, 12 aa, Homo sapiens
  CDR3 for beta chain variable domain of TCR clone 165726 (TRBV7-8, TRBJ2-7)
CASSLGDREQYF

SEQ ID NO: 331453 - protein, 13 aa, Homo sapiens
  CDR3 for alpha chain variable domain of TCR clone 165727 (TRAV22, TRAJ29)
CAVGGSGNTPLVF

SEQ ID NO: 331454 - protein, 18 aa, Homo sapiens
  CDR3 for beta chain variable domain of TCR clone 165727 (TRBV10-3, TRBJ2-3)
CAISESRVGPMRGDTQHF

SEQ ID NO: 331455 - protein, 13 aa, Homo sapiens
  CDR3 for alpha chain variable domain of TCR clone 165728 (TRAV8-6, TRAJ49)
CAVITNTGNQFYF

SEQ ID NO: 331456 - protein, 16 aa, Homo sapiens
  CDR3 for beta chain variable domain of TCR clone 165728 (TRBV11-2, TRBJ2-1)
CQQLIPPGVEYNEQFF

SEQ ID NO: 331457 - protein, 13 aa, Homo sapiens
  CDR3 for alpha chain variable domain of TCR clone 165729 (TRAV2, TRAJ40)
CAVVTSGAYKCIF

SEQ ID NO: 331458 - protein, 16 aa, Homo sapiens
  CDR3 for beta chain variable domain of TCR clone 165729 (TRBV7-3, TRBJ2-1)
CASSLEGYRSYNEQFF

SEQ ID NO: 331459 - protein, 12 aa, Homo sapiens
  CDR3 for alpha chain variable domain of TCR clone 165730 (TRAV12-3, TRAJ17)
CAMTLTGNKLTY

SEQ ID NO: 331460 - protein, 14 aa, Homo sapiens
  CDR3 for beta chain variable domain of TCR clone 165730 (TRBV4-1, TRBJ2-7)
CASSQDREHVEQYF

SEQ ID NO: 331461 - protein, 16 aa, Homo sapiens
  CDR3 for alpha chain variable domain of TCR clone 165731 (TRAV12-3, TRAJ53)
CAMSPGSGGSNYKLTF

SEQ ID NO: 331462 - protein, 13 aa, Homo sapiens
  CDR3 for beta chain variable domain of TCR clone 165731 (TRBV7-9, TRBJ1-2)
CASSLKQNYGYAF

SEQ ID NO: 331463 - protein, 14 aa, Homo sapiens
  CDR3 for alpha chain variable domain of TCR clone 165732 (TRAV12-2, TRAJ13)
CAVKKTGGYQKVTF

SEQ ID NO: 331464 - protein, 15 aa, Homo sapiens
  CDR3 for beta chain variable domain of TCR clone 165732 (TRBV7-8, TRBJ1-3)
CASSPRGKDGNTIYF

SEQ ID NO: 331465 - protein, 13 aa, Homo sapiens
  CDR3 for alpha chain variable domain of TCR clone 165733 (TRAV35, TRAJ42)
CAGFPGSQGNLNF

SEQ ID NO: 331466 - protein, 14 aa, Homo sapiens
  CDR3 for beta chain variable domain of TCR clone 165733 (TRBV19, TRBJ2-1)
CASPTFVLSGEQFF

SEQ ID NO: 331467 - protein, 15 aa, Homo sapiens
  CDR3 for alpha chain variable domain of TCR clone 165734 (TRAV13-1, TRAJ50)
CAAKGSETSYDKAIF

SEQ ID NO: 331468 - protein, 18 aa, Homo sapiens
  CDR3 for beta chain variable domain of TCR clone 165734 (TRBV10-3, TRBJ2-1)
CTSVPSVSLRGGVDEQFF

SEQ ID NO: 331469 - protein, 17 aa, Homo sapiens
  CDR3 for alpha chain variable domain of TCR clone 165735 (TRAV26-2, TRAJ42)
CILRDVGYGGSQGNPIF

SEQ ID NO: 331470 - protein, 16 aa, Homo sapiens
  CDR3 for beta chain variable domain of TCR clone 165735 (TRBV12-4, TRBJ2-7)
CASSLIGGSGTYEQYF

SEQ ID NO: 331471 - protein, 13 aa, Homo sapiens
  CDR3 for alpha chain variable domain of TCR clone 165736 (TRAV23/DV6, TRAJ10)
ASVLTGGGNKLTF

SEQ ID NO: 331472 - protein, 13 aa, Homo sapiens
  CDR3 for beta chain variable domain of TCR clone 165736 (TRBV11-1, TRBJ1-2)
CDSVGSWGYGYTF

SEQ ID NO: 331473 - protein, 16 aa, Homo sapiens
  CDR3 for alpha chain variable domain of TCR clone 165737 (TRAV30, TRAJ24)
CGTEIGDADSLGQFQF

SEQ ID NO: 331474 - protein, 14 aa, Homo sapiens
  CDR3 for beta chain variable domain of TCR clone 165737 (TRBV12-5, TRBJ2-5)
CASGSRTHQETQYF

SEQ ID NO: 331475 - protein, 14 aa, Homo sapiens
  CDR3 for alpha chain variable domain of TCR clone 165738 (TRAV8-2, TRAJ4)
CVVSPSVGYNKLIF

SEQ ID NO: 331476 - protein, 15 aa, Homo sapiens
  CDR3 for beta chain variable domain of TCR clone 165738 (TRBV4-1, TRBJ1-4)
CASSDTGGTNENLFF

SEQ ID NO: 331477 - protein, 14 aa, Homo sapiens
  CDR3 for alpha chain variable domain of TCR clone 165739 (TRAV8-6, TRAJ37)
CAVRSRSNTGKLIL

SEQ ID NO: 331478 - protein, 14 aa, Homo sapiens
  CDR3 for beta chain variable domain of TCR clone 165739 (TRBV6-5, TRBJ1-1)
CASRTPDRDTEAFF

SEQ ID NO: 331479 - protein, 16 aa, Homo sapiens
  CDR3 for alpha chain variable domain of TCR clone 165740 (TRAV27, TRAJ13)
CAGAKSDSGGYQKVTF

SEQ ID NO: 331480 - protein, 16 aa, Homo sapiens
  CDR3 for beta chain variable domain of TCR clone 165740 (TRBV6-1, TRBJ2-5)
CASSGTLDRGAETQYF

SEQ ID NO: 331481 - protein, 10 aa, Homo sapiens
  CDR3 for alpha chain variable domain of TCR clone 165741 (TRAV13-1, TRAJ41)
CAASGPRRTQ

SEQ ID NO: 331482 - protein, 21 aa, Homo sapiens
  CDR3 for beta chain variable domain of TCR clone 165741 (TRBV18, TRBJ2-3)
CASSPPAGGPRKYEVFWPRHP

SEQ ID NO: 331483 - protein, 12 aa, Homo sapiens
  CDR3 for alpha chain variable domain of TCR clone 165742 (TRAV2, TRAJ33)
CAFMDSNYQLIW

SEQ ID NO: 331484 - protein, 15 aa, Homo sapiens
  CDR3 for beta chain variable domain of TCR clone 165742 (TRBV7-9, TRBJ1-6)
CASSSPGRGNSPLHF

SEQ ID NO: 331485 - protein, 14 aa, Homo sapiens
  CDR3 for alpha chain variable domain of TCR clone 165743 (TRAV26-1, TRAJ38)
CIADNAGNNRKLIW

SEQ ID NO: 331486 - protein, 17 aa, Homo sapiens
  CDR3 for beta chain variable domain of TCR clone 165743 (TRBV15, TRBJ1-1)
CATSRVGGADGDTEAFF

SEQ ID NO: 331487 - protein, 17 aa, Homo sapiens
  CDR3 for alpha chain variable domain of TCR clone 165744 (TRAV13-1, TRAJ52)
CAASSGAGGTSYGKLTF

SEQ ID NO: 331488 - protein, 16 aa, Homo sapiens
  CDR3 for beta chain variable domain of TCR clone 165744 (TRBV7-2, TRBJ1-4)
CASSLAPGRRDEKLFF

SEQ ID NO: 331489 - protein, 14 aa, Homo sapiens
  CDR3 for alpha chain variable domain of TCR clone 165745 (TRAV8-3, TRAJ39)
CAVGANNAGNMLTF

SEQ ID NO: 331490 - protein, 16 aa, Homo sapiens
  CDR3 for beta chain variable domain of TCR clone 165745 (TRBV6-1, TRBJ2-5)
CASSDTLDRGAETQYF

SEQ ID NO: 331491 - protein, 15 aa, Homo sapiens
  CDR3 for alpha chain variable domain of TCR clone 165746 (TRAV3, TRAJ3)
CAVRDGHSSASKIIF

SEQ ID NO: 331492 - protein, 14 aa, Homo sapiens
  CDR3 for beta chain variable domain of TCR clone 165746 (TRBV28, TRBJ1-4)
CASSFGTFDEELFF

SEQ ID NO: 331493 - protein, 14 aa, Homo sapiens
  CDR3 for alpha chain variable domain of TCR clone 165747 (TRAV3, TRAJ21)
CAVRDAYNFNKFYF

SEQ ID NO: 331494 - protein, 17 aa, Homo sapiens
  CDR3 for beta chain variable domain of TCR clone 165747 (TRBV13, TRBJ2-3)
CASSLSRVAGGRNTQYF

SEQ ID NO: 331495 - protein, 13 aa, Homo sapiens
  CDR3 for alpha chain variable domain of TCR clone 165748 (TRAV21, TRAJ27)
CAARPGNAGTSTF

SEQ ID NO: 331496 - protein, 14 aa, Homo sapiens
  CDR3 for beta chain variable domain of TCR clone 165748 (TRBV7-6, TRBJ2-3)
CTSSLGTVTDTQYF

SEQ ID NO: 331497 - protein, 12 aa, Homo sapiens
  CDR3 for alpha chain variable domain of TCR clone 165749 (TRAV21, TRAJ11)
CAATSGYSTLTF

SEQ ID NO: 331498 - protein, 11 aa, Homo sapiens
  CDR3 for beta chain variable domain of TCR clone 165749 (TRBV11-2, TRBJ1-1)
CASSINTEAFF

SEQ ID NO: 331499 - protein, 14 aa, Homo sapiens
  CDR3 for alpha chain variable domain of TCR clone 165750 (TRAV27, TRAJ22)
CAGLPSGSARQLTF

SEQ ID NO: 331500 - protein, 18 aa, Homo sapiens
  CDR3 for beta chain variable domain of TCR clone 165750 (TRBV7-9, TRBJ2-7)
CASSLTTSGSRTWYEQYF

SEQ ID NO: 331501 - protein, 17 aa, Homo sapiens
  CDR3 for alpha chain variable domain of TCR clone 165751 (TRAV13-1, TRAJ52)
FAAGRNAGGTSYGKLTF

SEQ ID NO: 331502 - protein, 13 aa, Homo sapiens
  CDR3 for beta chain variable domain of TCR clone 165751 (TRBV7-2, TRBJ1-1)
CASNLKGAKVAFF

SEQ ID NO: 331503 - protein, 14 aa, Homo sapiens
  CDR3 for alpha chain variable domain of TCR clone 165752 (TRAV2, TRAJ22)
CAVGRGGSARQLTF

SEQ ID NO: 331504 - protein, 15 aa, Homo sapiens
  CDR3 for beta chain variable domain of TCR clone 165752 (TRBV4-1, TRBJ2-5)
CASSQWDLYQETQYF

SEQ ID NO: 331505 - protein, 18 aa, Homo sapiens
  CDR3 for alpha chain variable domain of TCR clone 165753 (TRAV26-2, TRAJ54)
CILRDVEVGIQGAQKLVF

SEQ ID NO: 331506 - protein, 15 aa, Homo sapiens
  CDR3 for beta chain variable domain of TCR clone 165753 (TRBV10-2, TRBJ2-6)
CASSEQGTGANVLTF

SEQ ID NO: 331507 - protein, 12 aa, Homo sapiens
  CDR3 for alpha chain variable domain of TCR clone 165754 (TRAV21, TRAJ31)
CAVSPARGSLMF

SEQ ID NO: 331508 - protein, 14 aa, Homo sapiens
  CDR3 for beta chain variable domain of TCR clone 165754 (TRBV28, TRBJ2-7)
CASSLLRISYEQYF

SEQ ID NO: 331509 - protein, 13 aa, Homo sapiens
  CDR3 for alpha chain variable domain of TCR clone 165755 (TRAV3, TRAJ21)
CAVREPDFNKFYF

SEQ ID NO: 331510 - protein, 18 aa, Homo sapiens
  CDR3 for beta chain variable domain of TCR clone 165755 (TRBV20-1, TRBJ2-6)
CSAETTPTHGSGANGLTF

SEQ ID NO: 331511 - protein, 15 aa, Homo sapiens
  CDR3 for alpha chain variable domain of TCR clone 165756 (TRAV12-3, TRAJ47)
CAMSALVEYGNKLVF

SEQ ID NO: 331512 - protein, 13 aa, Homo sapiens
  CDR3 for beta chain variable domain of TCR clone 165756 (TRBV2, TRBJ2-5)
CASGTPYQETQYF

SEQ ID NO: 331513 - protein, 15 aa, Homo sapiens
  CDR3 for alpha chain variable domain of TCR clone 165757 (TRAV3, TRAJ3)
CAVRDRDSSASKIII

SEQ ID NO: 331514 - protein, 18 aa, Homo sapiens
  CDR3 for beta chain variable domain of TCR clone 165757 (TRBV25-1, TRBJ1-2)
CASSGLQNGQGLIFGCTF

SEQ ID NO: 331515 - protein, 11 aa, Homo sapiens
  CDR3 for alpha chain variable domain of TCR clone 165758 (TRAV2, TRAJ13)
CASGGYQKVTF

SEQ ID NO: 331516 - protein, 13 aa, Homo sapiens
  CDR3 for beta chain variable domain of TCR clone 165758 (TRBV10-3, TRBJ1-2)
CAISERDSYGYSF

SEQ ID NO: 331517 - protein, 12 aa, Homo sapiens
  CDR3 for alpha chain variable domain of TCR clone 165759 (TRAV21, TRAJ29)
CAVTSGNTPLVF

SEQ ID NO: 331518 - protein, 13 aa, Homo sapiens
  CDR3 for beta chain variable domain of TCR clone 165759 (TRBV20-1, TRBJ2-7)
CSARGDTQDEQYF

SEQ ID NO: 331519 - protein, 14 aa, Homo sapiens
  CDR3 for alpha chain variable domain of TCR clone 165760 (TRAV12-1, TRAJ17)
CVVNYKAAGNKLTC

SEQ ID NO: 331520 - protein, 17 aa, Homo sapiens
  CDR3 for beta chain variable domain of TCR clone 165760 (TRBV11-2, TRBJ2-1)
CASSLYPPGVEYNEQFF

SEQ ID NO: 331521 - protein, 14 aa, Homo sapiens
  CDR3 for alpha chain variable domain of TCR clone 165761 (TRAV13-1, TRAJ40)
CAASMTSGTYKYIF

SEQ ID NO: 331522 - protein, 13 aa, Homo sapiens
  CDR3 for beta chain variable domain of TCR clone 165761 (TRBV29-1, TRBJ2-1)
CSVEGWRVNEQFF

SEQ ID NO: 331523 - protein, 12 aa, Homo sapiens
  CDR3 for alpha chain variable domain of TCR clone 165762 (TRAV12-3, TRAJ17)
CAMTLTGNKLTF

SEQ ID NO: 331524 - protein, 14 aa, Homo sapiens
  CDR3 for beta chain variable domain of TCR clone 165762 (TRBV7-3, TRBJ2-3)
CASSLTGSTDTQYF

SEQ ID NO: 331525 - protein, 12 aa, Homo sapiens
  CDR3 for alpha chain variable domain of TCR clone 165763 (TRAV2, TRAJ34)
CAVERNTDKLIF

SEQ ID NO: 331526 - protein, 12 aa, Homo sapiens
  CDR3 for beta chain variable domain of TCR clone 165763 (TRBV7-9, TRBJ2-5)
CASSLSQETQYF

SEQ ID NO: 331527 - protein, 15 aa, Homo sapiens
  CDR3 for alpha chain variable domain of TCR clone 165764 (TRAV13-2, TRAJ50)
CAEEPLKTSYDKVIF

SEQ ID NO: 331528 - protein, 15 aa, Homo sapiens
  CDR3 for beta chain variable domain of TCR clone 165764 (TRBV20-1, TRBJ1-5)
CSARGSVDSNQPQHV

SEQ ID NO: 331529 - protein, 14 aa, Homo sapiens
  CDR3 for alpha chain variable domain of TCR clone 165765 (TRAV9-2, TRAJ39)
CALYIYNPGNMLTF

SEQ ID NO: 331530 - protein, 14 aa, Homo sapiens
  CDR3 for beta chain variable domain of TCR clone 165765 (TRBV6-1, TRBJ1-3)
CASVQGGGGNTIYF

SEQ ID NO: 331531 - protein, 15 aa, Homo sapiens
  CDR3 for alpha chain variable domain of TCR clone 165766 (TRAV8-3, TRAJ27)
CAVGPPKTNAGKSTF

SEQ ID NO: 331532 - protein, 15 aa, Homo sapiens
  CDR3 for beta chain variable domain of TCR clone 165766 (TRBV7-2, TRBJ2-1)
CASSSGLAGGSEQFF

SEQ ID NO: 331533 - protein, 14 aa, Homo sapiens
  CDR3 for alpha chain variable domain of TCR clone 165767 (TRAV12-2, TRAJ15)
CAPHTGQAGTALIF

SEQ ID NO: 331534 - protein, 20 aa, Homo sapiens
  CDR3 for beta chain variable domain of TCR clone 165767 (TRBV11-3, TRBJ2-7)
CASSQRTSGSLRAVLRAGHQ

SEQ ID NO: 331535 - protein, 14 aa, Homo sapiens
  CDR3 for alpha chain variable domain of TCR clone 165768 (TRAV14/DV4, TRAJ15)
CAMRRDQAGTALIL

SEQ ID NO: 331536 - protein, 16 aa, Homo sapiens
  CDR3 for beta chain variable domain of TCR clone 165768 (TRBV15, TRBJ2-3)
CATSRDLGIVTDTQYF

SEQ ID NO: 331537 - protein, 12 aa, Homo sapiens
  CDR3 for alpha chain variable domain of TCR clone 165769 (TRAV12-1, TRAJ34)
CVVAGATDKLIF

SEQ ID NO: 331538 - protein, 15 aa, Homo sapiens
  CDR3 for beta chain variable domain of TCR clone 165769 (TRBV7-9, TRBJ2-5)
CASSDTGRGRETQYF

SEQ ID NO: 331539 - protein, 15 aa, Homo sapiens
  CDR3 for alpha chain variable domain of TCR clone 165770 (TRAV27, TRAJ38)
CAARRNAGNNGKLIW

SEQ ID NO: 331540 - protein, 13 aa, Homo sapiens
  CDR3 for beta chain variable domain of TCR clone 165770 (TRBV10-3, TRBJ2-7)
CASKRAVNYEQYF

SEQ ID NO: 331541 - protein, 14 aa, Homo sapiens
  CDR3 for alpha chain variable domain of TCR clone 165771 (TRAV29/DV5, TRAJ20)
CAATIRSNDYKLSF

SEQ ID NO: 331542 - protein, 15 aa, Homo sapiens
  CDR3 for beta chain variable domain of TCR clone 165771 (TRBV20-1, TRBJ2-1)
CSASSAWSSYNEQFF

SEQ ID NO: 331543 - protein, 14 aa, Homo sapiens
  CDR3 for alpha chain variable domain of TCR clone 165772 (TRAV12-2, TRAJ45)
CAVNKGGGVDGLTF

SEQ ID NO: 331544 - protein, 19 aa, Homo sapiens
  CDR3 for beta chain variable domain of TCR clone 165772 (TRBV7-2, TRBJ2-3)
CASSLVLSAYISRPDTQYF

SEQ ID NO: 331545 - protein, 15 aa, Homo sapiens
  CDR3 for alpha chain variable domain of TCR clone 165773 (TRAV3, TRAJ20)
CAVRDIKLSDYKLSF

SEQ ID NO: 331546 - protein, 13 aa, Homo sapiens
  CDR3 for beta chain variable domain of TCR clone 165773 (TRBV3-1, TRBJ1-1)
CASSPGVITEAFF

SEQ ID NO: 331547 - protein, 12 aa, Homo sapiens
  CDR3 for alpha chain variable domain of TCR clone 165774 (TRAV35, TRAJ39)
LAPNNAGNMLTF

SEQ ID NO: 331548 - protein, 16 aa, Homo sapiens
  CDR3 for beta chain variable domain of TCR clone 165774 (TRBV2, TRBJ2-3)
CASSTSVEGVIDTQYF

SEQ ID NO: 331549 - protein, 15 aa, Homo sapiens
  CDR3 for alpha chain variable domain of TCR clone 165775 (TRAV12-2, TRAJ22)
CAVNGASGSARQLTF

SEQ ID NO: 331550 - protein, 12 aa, Homo sapiens
  CDR3 for beta chain variable domain of TCR clone 165775 (TRBV28, TRBJ2-3)
CASSLYRDTQYF

SEQ ID NO: 331551 - protein, 17 aa, Homo sapiens
  CDR3 for alpha chain variable domain of TCR clone 165776 (TRAV3, TRAJ6)
CAVRDGPSAGGSYIPTF

SEQ ID NO: 331552 - protein, 14 aa, Homo sapiens
  CDR3 for beta chain variable domain of TCR clone 165776 (TRBV7-2, TRBJ2-7)
CASSPRTSFYEQYF

SEQ ID NO: 331553 - protein, 15 aa, Homo sapiens
  CDR3 for alpha chain variable domain of TCR clone 165777 (TRAV21, TRAJ53)
CATFNSGGSNYKLKF

SEQ ID NO: 331554 - protein, 14 aa, Homo sapiens
  CDR3 for beta chain variable domain of TCR clone 165777 (TRBV15, TRBJ2-5)
CATSIGGLGETQYF

SEQ ID NO: 331555 - protein, 15 aa, Homo sapiens
  CDR3 for alpha chain variable domain of TCR clone 165778 (TRAV3, TRAJ22)
CAVRDRGGSARQLTF

SEQ ID NO: 331556 - protein, 15 aa, Homo sapiens
  CDR3 for beta chain variable domain of TCR clone 165778 (TRBV27, TRBJ1-4)
CASSARQDLNEKLFF

SEQ ID NO: 331557 - protein, 14 aa, Homo sapiens
  CDR3 for alpha chain variable domain of TCR clone 165779 (TRAV1-2, TRAJ16)
CAVNRFSDGQKLLF

SEQ ID NO: 331558 - protein, 15 aa, Homo sapiens
  CDR3 for beta chain variable domain of TCR clone 165779 (TRBV28, TRBJ2-7)
CASKKPSGRAYEQYF

SEQ ID NO: 331559 - protein, 11 aa, Homo sapiens
  CDR3 for alpha chain variable domain of TCR clone 165780 (TRAV12-3, TRAJ49)
CAANTGNQFYF

SEQ ID NO: 331560 - protein, 15 aa, Homo sapiens
  CDR3 for beta chain variable domain of TCR clone 165780 (TRBV19, TRBJ2-7)
CASSPAGSGEALRYF

SEQ ID NO: 331561 - protein, 11 aa, Homo sapiens
  CDR3 for alpha chain variable domain of TCR clone 165781 (TRAV12-2, TRAJ21)
CAVRNFNKFYF

SEQ ID NO: 331562 - protein, 18 aa, Homo sapiens
  CDR3 for beta chain variable domain of TCR clone 165781 (TRBV13, TRBJ2-1)
CASSLGTASLFSYNEQFF

SEQ ID NO: 331563 - protein, 15 aa, Homo sapiens
  CDR3 for alpha chain variable domain of TCR clone 165782 (TRAV8-6, TRAJ45)
CAVSEQGGCADGLTF

SEQ ID NO: 331564 - protein, 14 aa, Homo sapiens
  CDR3 for beta chain variable domain of TCR clone 165782 (TRBV28, TRBJ2-5)
CASRGSSFWETQYF

SEQ ID NO: 331565 - protein, 13 aa, Homo sapiens
  CDR3 for alpha chain variable domain of TCR clone 165783 (TRAV36/DV7, TRAJ38)
CVANAGNNRKLIW

SEQ ID NO: 331566 - protein, 13 aa, Homo sapiens
  CDR3 for beta chain variable domain of TCR clone 165783 (TRBV10-3, TRBJ2-7)
RASKLAVNYEQYF

SEQ ID NO: 331567 - protein, 14 aa, Homo sapiens
  CDR3 for alpha chain variable domain of TCR clone 165784 (TRAV38-1, TRAJ40)
CALRPTSGTYKYIF

SEQ ID NO: 331568 - protein, 16 aa, Homo sapiens
  CDR3 for beta chain variable domain of TCR clone 165784 (TRBV6-1, TRBJ1-2)
CASSGVWQGRSHGYTF

SEQ ID NO: 331569 - protein, 13 aa, Homo sapiens
  CDR3 for alpha chain variable domain of TCR clone 165785 (TRAV17, TRAJ31)
CSTDENNNARLMF

SEQ ID NO: 331570 - protein, 14 aa, Homo sapiens
  CDR3 for beta chain variable domain of TCR clone 165785 (TRBV11-2, TRBJ2-1)
CASSPSRQGGGQFF

SEQ ID NO: 331571 - protein, 17 aa, Homo sapiens
  CDR3 for alpha chain variable domain of TCR clone 165786 (TRAV13-1, TRAJ52)
CAAISGAGGTSYGKLTF

SEQ ID NO: 331572 - protein, 15 aa, Homo sapiens
  CDR3 for beta chain variable domain of TCR clone 165786 (TRBV28, TRBJ2-4)
CAAGSGTLLMGIQYF

SEQ ID NO: 331573 - protein, 17 aa, Homo sapiens
  CDR3 for alpha chain variable domain of TCR clone 165787 (TRAV3, TRAJ28)
CAVREAYSGAGSYQLTF

SEQ ID NO: 331574 - protein, 14 aa, Homo sapiens
  CDR3 for beta chain variable domain of TCR clone 165787 (TRBV7-9, TRBJ2-1)
CASSLVVGADEQFF

SEQ ID NO: 331575 - protein, 14 aa, Homo sapiens
  CDR3 for alpha chain variable domain of TCR clone 165788 (TRAV1-2, TRAJ16)
FAVNLFSDGQKLLF

SEQ ID NO: 331576 - protein, 15 aa, Homo sapiens
  CDR3 for beta chain variable domain of TCR clone 165788 (TRBV20-1, TRBJ2-7)
CSARDRVSGMDEQYF

SEQ ID NO: 331577 - protein, 14 aa, Homo sapiens
  CDR3 for alpha chain variable domain of TCR clone 165789 (TRAV13-2, TRAJ57)
CAENFQGGSEKLVF

SEQ ID NO: 331578 - protein, 13 aa, Homo sapiens
  CDR3 for beta chain variable domain of TCR clone 165789 (TRBV5-7, TRBJ1-1)
CASSLFQNTEAFF

SEQ ID NO: 331579 - protein, 13 aa, Homo sapiens
  CDR3 for alpha chain variable domain of TCR clone 165790 (TRAV23/DV6, TRAJ16)
CAARGSDGQKLLF

SEQ ID NO: 331580 - protein, 15 aa, Homo sapiens
  CDR3 for beta chain variable domain of TCR clone 165790 (TRBV5-1, TRBJ1-1)
CASSFTGGWNTEAFF

SEQ ID NO: 331581 - protein, 13 aa, Homo sapiens
  CDR3 for alpha chain variable domain of TCR clone 165791 (TRAV25, TRAJ26)
CAGMDNYGQNFVV

SEQ ID NO: 331582 - protein, 15 aa, Homo sapiens
  CDR3 for beta chain variable domain of TCR clone 165791 (TRBV10-3, TRBJ2-1)
CAIRNGTSGHNEQFF

SEQ ID NO: 331583 - protein, 18 aa, Homo sapiens
  CDR3 for alpha chain variable domain of TCR clone 165792 (TRAV13-1, TRAJ52)
CAAKNPDAGGTSYGKLTF

SEQ ID NO: 331584 - protein, 14 aa, Homo sapiens
  CDR3 for beta chain variable domain of TCR clone 165792 (TRBV4-1, TRBJ2-2)
CASSQAVNTGELFF

SEQ ID NO: 331585 - protein, 14 aa, Homo sapiens
  CDR3 for alpha chain variable domain of TCR clone 165793 (TRAV12-2, TRAJ40)
CAVKIPSGTYKYIF

SEQ ID NO: 331586 - protein, 14 aa, Homo sapiens
  CDR3 for beta chain variable domain of TCR clone 165793 (TRBV7-8, TRBJ2-7)
CASSPRDRVYERYF

SEQ ID NO: 331587 - protein, 20 aa, Homo sapiens
  CDR3 for alpha chain variable domain of TCR clone 165794 (TRAV26-1, TRAJ57)
CCVLLHRQIETQGGPEKLVF

SEQ ID NO: 331588 - protein, 16 aa, Homo sapiens
  CDR3 for beta chain variable domain of TCR clone 165794 (TRBV4-2, TRBJ2-7)
CASSQEELAGTYEQYF

SEQ ID NO: 331589 - protein, 14 aa, Homo sapiens
  CDR3 for alpha chain variable domain of TCR clone 165795 (TRAV12-2, TRAJ45)
CAVTKGGGADGLTF

SEQ ID NO: 331590 - protein, 14 aa, Homo sapiens
  CDR3 for beta chain variable domain of TCR clone 165795 (TRBV20-1, TRBJ1-1)
CSAMGGTANTEAFF

SEQ ID NO: 331591 - protein, 11 aa, Homo sapiens
  CDR3 for alpha chain variable domain of TCR clone 165796 (TRAV17, TRAJ43)
CATPRRNDMRF

SEQ ID NO: 331592 - protein, 14 aa, Homo sapiens
  CDR3 for beta chain variable domain of TCR clone 165796 (TRBV7-2, TRBJ2-7)
CASSPKTSFYEQYF

SEQ ID NO: 331593 - protein, 16 aa, Homo sapiens
  CDR3 for alpha chain variable domain of TCR clone 165797 (TRAV3, TRAJ10)
CAVRDMRAGGGNKLSF

SEQ ID NO: 331594 - protein, 15 aa, Homo sapiens
  CDR3 for beta chain variable domain of TCR clone 165797 (TRBV11-2, TRBJ1-6)
CASTGFGTAVSPLHF

SEQ ID NO: 331595 - protein, 15 aa, Homo sapiens
  CDR3 for alpha chain variable domain of TCR clone 165798 (TRAV38-1, TRAJ58)
CAFMKQETSGSRLTF

SEQ ID NO: 331596 - protein, 15 aa, Homo sapiens
  CDR3 for beta chain variable domain of TCR clone 165798 (TRBV5-1, TRBJ2-2)
CASSSQGGNTGELFF

SEQ ID NO: 331597 - protein, 14 aa, Homo sapiens
  CDR3 for alpha chain variable domain of TCR clone 165799 (TRAV1-2, TRAJ16)
CAVNRFSDGQKLLF

SEQ ID NO: 331598 - protein, 12 aa, Homo sapiens
  CDR3 for beta chain variable domain of TCR clone 165799 (TRBV7-6, TRBJ2-7)
CASSLVDSEQYF

SEQ ID NO: 331599 - protein, 14 aa, Homo sapiens
  CDR3 for alpha chain variable domain of TCR clone 165800 (TRAV1-2, TRAJ8)
CAVREDTGFQKFVF

SEQ ID NO: 331600 - protein, 19 aa, Homo sapiens
  CDR3 for beta chain variable domain of TCR clone 165800 (TRBV14, TRBJ2-1)
CASSQEQLWEAPEYNEQFF

SEQ ID NO: 331601 - protein, 16 aa, Homo sapiens
  CDR3 for alpha chain variable domain of TCR clone 165801 (TRAV26-2, TRAJ45)
CTTASPIGGGADGLTF

SEQ ID NO: 331602 - protein, 14 aa, Homo sapiens
  CDR3 for beta chain variable domain of TCR clone 165801 (TRBV13, TRBJ2-5)
CASYRRLAEETQYF

SEQ ID NO: 331603 - protein, 16 aa, Homo sapiens
  CDR3 for alpha chain variable domain of TCR clone 165802 (TRAV35, TRAJ28)
CAGQRYSGAGSYQLTF

SEQ ID NO: 331604 - protein, 13 aa, Homo sapiens
  CDR3 for beta chain variable domain of TCR clone 165802 (TRBV19, TRBJ1-2)
CASSQGQAYGDTF

SEQ ID NO: 331605 - protein, 10 aa, Homo sapiens
  CDR3 for alpha chain variable domain of TCR clone 165803 (TRAV13-1, TRAJ52)
CAAKTPMLVV

SEQ ID NO: 331606 - protein, 20 aa, Homo sapiens
  CDR3 for beta chain variable domain of TCR clone 165803 (TRBV5-7, TRBJ1-1)
CASSLEENRRLQGPGREAFF

SEQ ID NO: 331607 - protein, 16 aa, Homo sapiens
  CDR3 for alpha chain variable domain of TCR clone 165804 (TRAV30, TRAJ24)
CGTEIVDADSWGKFQF

SEQ ID NO: 331608 - protein, 17 aa, Homo sapiens
  CDR3 for beta chain variable domain of TCR clone 165804 (TRBV4-1, TRBJ2-7)
CASSQGRGLQTSYEQYF

SEQ ID NO: 331609 - protein, 16 aa, Homo sapiens
  CDR3 for alpha chain variable domain of TCR clone 165805 (TRAV3, TRAJ18)
CAVRDGRGSTLGRLYF

SEQ ID NO: 331610 - protein, 17 aa, Homo sapiens
  CDR3 for beta chain variable domain of TCR clone 165805 (TRBV5-1, TRBJ2-3)
CASSKIGLAARTDTQYF

SEQ ID NO: 331611 - protein, 14 aa, Homo sapiens
  CDR3 for alpha chain variable domain of TCR clone 165806 (TRAV8-3, TRAJ35)
CAVVPQGFGNVLHC

SEQ ID NO: 331612 - protein, 14 aa, Homo sapiens
  CDR3 for beta chain variable domain of TCR clone 165806 (TRBV5-1, TRBJ2-7)
CASSFASGVNEQYF

SEQ ID NO: 331613 - protein, 13 aa, Homo sapiens
  CDR3 for alpha chain variable domain of TCR clone 165807 (TRAV27, TRAJ57)
CAGFQGGSEKLVF

SEQ ID NO: 331614 - protein, 14 aa, Homo sapiens
  CDR3 for beta chain variable domain of TCR clone 165807 (TRBV20-1, TRBJ1-2)
CSGRKDGRAYGYSF

SEQ ID NO: 331615 - protein, 14 aa, Homo sapiens
  CDR3 for alpha chain variable domain of TCR clone 165808 (TRAV12-3, TRAJ10)
SHLPLTGGGNKLTF

SEQ ID NO: 331616 - protein, 15 aa, Homo sapiens
  CDR3 for beta chain variable domain of TCR clone 165808 (TRBV4-1, TRBJ2-3)
CASSRGQGIPDTQYF

SEQ ID NO: 331617 - protein, 12 aa, Homo sapiens
  CDR3 for alpha chain variable domain of TCR clone 165809 (TRAV8-4, TRAJ37)
CAVRSNTGKLIF

SEQ ID NO: 331618 - protein, 12 aa, Homo sapiens
  CDR3 for beta chain variable domain of TCR clone 165809 (TRBV7-9, TRBJ2-7)
CASSIKREEQYF

SEQ ID NO: 331619 - protein, 14 aa, Homo sapiens
  CDR3 for alpha chain variable domain of TCR clone 165810 (TRAV12-2, TRAJ13)
CAVKKTGRYQKVTF

SEQ ID NO: 331620 - protein, 14 aa, Homo sapiens
  CDR3 for beta chain variable domain of TCR clone 165810 (TRBV12-5, TRBJ2-5)
CASGSRTHQETQYF

SEQ ID NO: 331621 - protein, 15 aa, Homo sapiens
  CDR3 for alpha chain variable domain of TCR clone 165811 (TRAV2, TRAJ22)
CAVPSRGGFCKSTDL

SEQ ID NO: 331622 - protein, 14 aa, Homo sapiens
  CDR3 for beta chain variable domain of TCR clone 165811 (TRBV7-6, TRBJ2-3)
CASSLGTVTDTQYF

SEQ ID NO: 331623 - protein, 23 aa, Homo sapiens
  CDR3 for alpha chain variable domain of TCR clone 165812 (TRAV8-2, TRAJ23)
SVVSPLITREESLSSDRERSYLL

SEQ ID NO: 331624 - protein, 13 aa, Homo sapiens
  CDR3 for beta chain variable domain of TCR clone 165812 (TRBV27, TRBJ1-1)
CASSLSIGAEAFF

SEQ ID NO: 331625 - protein, 16 aa, Homo sapiens
  CDR3 for alpha chain variable domain of TCR clone 165813 (TRAV12-2, TRAJ28)
CAVNEYSGAGSYQLTF

SEQ ID NO: 331626 - protein, 14 aa, Homo sapiens
  CDR3 for beta chain variable domain of TCR clone 165813 (TRBV18, TRBJ2-3)
CASSLGGGSNTQYF

SEQ ID NO: 331627 - protein, 16 aa, Homo sapiens
  CDR3 for alpha chain variable domain of TCR clone 165814 (TRAV13-1, TRAJ48)
CAASIFGSFGNEKLTF

SEQ ID NO: 331628 - protein, 16 aa, Homo sapiens
  CDR3 for beta chain variable domain of TCR clone 165814 (TRBV18, TRBJ1-5)
CASSPYRVEGNQPQHF

SEQ ID NO: 331629 - protein, 14 aa, Homo sapiens
  CDR3 for alpha chain variable domain of TCR clone 165815 (TRAV26-2, TRAJ38)
CILYNAGNNRKLIW

SEQ ID NO: 331630 - protein, 14 aa, Homo sapiens
  CDR3 for beta chain variable domain of TCR clone 165815 (TRBV19, TRBJ2-1)
CARSTFVLSGEQFF

SEQ ID NO: 331631 - protein, 12 aa, Homo sapiens
  CDR3 for alpha chain variable domain of TCR clone 165816 (TRAV27, TRAJ22)
CAGDGDGVEIWF

SEQ ID NO: 331632 - protein, 17 aa, Homo sapiens
  CDR3 for beta chain variable domain of TCR clone 165816 (TRBV5-5, TRBJ1-1)
CASSLRFRGLMNTEAFF

SEQ ID NO: 331633 - protein, 18 aa, Homo sapiens
  CDR3 for alpha chain variable domain of TCR clone 165817 (TRAV13-1, TRAJ45)
CAANAVADSGGGADGLTF

SEQ ID NO: 331634 - protein, 14 aa, Homo sapiens
  CDR3 for beta chain variable domain of TCR clone 165817 (TRBV7-8, TRBJ1-2)
CASSPDSLSYGYTF

SEQ ID NO: 331635 - protein, 14 aa, Homo sapiens
  CDR3 for alpha chain variable domain of TCR clone 165818 (TRAV12-2, TRAJ13)
CAVKKTGGYQKVTF

SEQ ID NO: 331636 - protein, 11 aa, Homo sapiens
  CDR3 for beta chain variable domain of TCR clone 165818 (TRBV20-1, TRBJ1-1)
CSARVRVGAFF

SEQ ID NO: 331637 - protein, 15 aa, Homo sapiens
  CDR3 for alpha chain variable domain of TCR clone 165819 (TRAV12-3, TRAJ42)
CAMSGHGGSQGNLIF

SEQ ID NO: 331638 - protein, 13 aa, Homo sapiens
  CDR3 for beta chain variable domain of TCR clone 165819 (TRBV6-5, TRBJ2-5)
CASSPQGGETQYF

SEQ ID NO: 331639 - protein, 13 aa, Homo sapiens
  CDR3 for alpha chain variable domain of TCR clone 165820 (TRAV2, TRAJ40)
CAVVTSGTYKYIF

SEQ ID NO: 331640 - protein, 16 aa, Homo sapiens
  CDR3 for beta chain variable domain of TCR clone 165820 (TRBV29-1, TRBJ2-6)
CSVEDITYSGANDLTF

SEQ ID NO: 331641 - protein, 13 aa, Homo sapiens
  CDR3 for alpha chain variable domain of TCR clone 165821 (TRAV22, TRAJ12)
CTGRMDSSYKLIF

SEQ ID NO: 331642 - protein, 14 aa, Homo sapiens
  CDR3 for beta chain variable domain of TCR clone 165821 (TRBV19, TRBJ2-1)
CASPTFVLSGEQFF

SEQ ID NO: 331643 - protein, 15 aa, Homo sapiens
  CDR3 for alpha chain variable domain of TCR clone 165822 (TRAV3, TRAJ7)
WSVRDKDNGNNRLAF

SEQ ID NO: 331644 - protein, 19 aa, Homo sapiens
  CDR3 for beta chain variable domain of TCR clone 165822 (TRBV5-8, TRBJ2-3)
CASSFLGTSGSHRTDTQYF

SEQ ID NO: 331645 - protein, 17 aa, Homo sapiens
  CDR3 for alpha chain variable domain of TCR clone 165823 (TRAV13-1, TRAJ28)
CAASPPYSGAGGYQLTF

SEQ ID NO: 331646 - protein, 13 aa, Homo sapiens
  CDR3 for beta chain variable domain of TCR clone 165823 (TRBV7-9, TRBJ1-2)
CASSLKQNYGYTF

SEQ ID NO: 331647 - protein, 14 aa, Homo sapiens
  CDR3 for alpha chain variable domain of TCR clone 165824 (TRAV36/DV7, TRAJ48)
CAQRRDFGNEKLTF

SEQ ID NO: 331648 - protein, 15 aa, Homo sapiens
  CDR3 for beta chain variable domain of TCR clone 165824 (TRBV11-2, TRBJ2-5)
CASSPSTGGYETQYF

SEQ ID NO: 331649 - protein, 13 aa, Homo sapiens
  CDR3 for alpha chain variable domain of TCR clone 165825 (TRAV13-1, TRAJ43)
CAASKNNNNDMRF

SEQ ID NO: 331650 - protein, 14 aa, Homo sapiens
  CDR3 for beta chain variable domain of TCR clone 165825 (TRBV4-1, TRBJ2-2)
CASSQAVNTGELFF

SEQ ID NO: 331651 - protein, 13 aa, Homo sapiens
  CDR3 for alpha chain variable domain of TCR clone 165826 (TRAV8-3, TRAJ6)
CAVGSGGSYILTF

SEQ ID NO: 331652 - protein, 14 aa, Homo sapiens
  CDR3 for beta chain variable domain of TCR clone 165826 (TRBV11-2, TRBJ1-1)
CARSTQRGRTEAFF

SEQ ID NO: 331653 - protein, 17 aa, Homo sapiens
  CDR3 for alpha chain variable domain of TCR clone 165827 (TRAV12-3, TRAJ6)
CAMSARGGAGGSNIPTF

SEQ ID NO: 331654 - protein, 12 aa, Homo sapiens
  CDR3 for beta chain variable domain of TCR clone 165827 (TRBV12-4, TRBJ2-3)
CARSTLPDTQYF

SEQ ID NO: 331655 - protein, 12 aa, Homo sapiens
  CDR3 for alpha chain variable domain of TCR clone 165828 (TRAV13-2, TRAJ8)
CAPWLGFQKLVF

SEQ ID NO: 331656 - protein, 14 aa, Homo sapiens
  CDR3 for beta chain variable domain of TCR clone 165828 (TRBV19, TRBJ2-5)
CASSMTGQQETHYF

SEQ ID NO: 331657 - protein, 12 aa, Homo sapiens
  CDR3 for alpha chain variable domain of TCR clone 165829 (TRAV13-2, TRAJ54)
CAENKGAQKLVF

SEQ ID NO: 331658 - protein, 15 aa, Homo sapiens
  CDR3 for beta chain variable domain of TCR clone 165829 (TRBV5-1, TRBJ2-1)
CASSLWANSYNEQFF

SEQ ID NO: 331659 - protein, 12 aa, Homo sapiens
  CDR3 for alpha chain variable domain of TCR clone 165830 (TRAV12-2, TRAJ29)
CAVDSGNTPLVF

SEQ ID NO: 331660 - protein, 13 aa, Homo sapiens
  CDR3 for beta chain variable domain of TCR clone 165830 (TRBV19, TRBJ1-2)
CASSQGQVYGYAF

SEQ ID NO: 331661 - protein, 14 aa, Homo sapiens
  CDR3 for alpha chain variable domain of TCR clone 165831 (TRAV29/DV5, TRAJ20)
CAATIRSNDYKLSF

SEQ ID NO: 331662 - protein, 14 aa, Homo sapiens
  CDR3 for beta chain variable domain of TCR clone 165831 (TRBV7-9, TRBJ2-1)
CASSPRGSLYEQFF

SEQ ID NO: 331663 - protein, 16 aa, Homo sapiens
  CDR3 for alpha chain variable domain of TCR clone 165832 (TRAV27, TRAJ52)
CAGAPAGGTSYGKLTF

SEQ ID NO: 331664 - protein, 12 aa, Homo sapiens
  CDR3 for beta chain variable domain of TCR clone 165832 (TRBV27, TRBJ2-1)
CAGRGFYNEQFF

SEQ ID NO: 331665 - protein, 14 aa, Homo sapiens
  CDR3 for alpha chain variable domain of TCR clone 165833 (TRAV12-2, TRAJ17)
CAVLFKAAGNKITF

SEQ ID NO: 331666 - protein, 12 aa, Homo sapiens
  CDR3 for beta chain variable domain of TCR clone 165833 (TRBV14, TRBJ2-5)
CASSQLKETQYF

SEQ ID NO: 331667 - protein, 16 aa, Homo sapiens
  CDR3 for alpha chain variable domain of TCR clone 165834 (TRAV4, TRAJ18)
CCVLLIGGSTLGRLYF

SEQ ID NO: 331668 - protein, 12 aa, Homo sapiens
  CDR3 for beta chain variable domain of TCR clone 165834 (TRBV6-3, TRBJ2-7)
CASSLPPYEQYF

SEQ ID NO: 331669 - protein, 14 aa, Homo sapiens
  CDR3 for alpha chain variable domain of TCR clone 165835 (TRAV2, TRAJ37)
CAVDFTSNTGKLIF

SEQ ID NO: 331670 - protein, 15 aa, Homo sapiens
  CDR3 for beta chain variable domain of TCR clone 165835 (TRBV4-1, TRBJ2-2)
CASSEGQGITGELFF

SEQ ID NO: 331671 - protein, 18 aa, Homo sapiens
  CDR3 for alpha chain variable domain of TCR clone 165836 (TRAV26-1, TRAJ27)
CIVRPSFNYNTNAGKSTF

SEQ ID NO: 331672 - protein, 14 aa, Homo sapiens
  CDR3 for beta chain variable domain of TCR clone 165836 (TRBV10-3, TRBJ2-1)
CAISSDLAYNEQFF

SEQ ID NO: 331673 - protein, 12 aa, Homo sapiens
  CDR3 for alpha chain variable domain of TCR clone 165837 (TRAV8-3, TRAJ26)
CAVDNYGQNFVF

SEQ ID NO: 331674 - protein, 14 aa, Homo sapiens
  CDR3 for beta chain variable domain of TCR clone 165837 (TRBV2, TRBJ2-7)
CASSLTSGGYEQYF

SEQ ID NO: 331675 - protein, 13 aa, Homo sapiens
  CDR3 for alpha chain variable domain of TCR clone 165838 (TRAV26-2, TRAJ43)
CILRAVNNNDMRF

SEQ ID NO: 331676 - protein, 14 aa, Homo sapiens
  CDR3 for beta chain variable domain of TCR clone 165838 (TRBV7-2, TRBJ1-1)
CASSFLTGTTKAFF

SEQ ID NO: 331677 - protein, 18 aa, Homo sapiens
  CDR3 for alpha chain variable domain of TCR clone 165839 (TRAV38-2/DV8, TRAJ42)
CAYRSADLTGGSQENLIF

SEQ ID NO: 331678 - protein, 12 aa, Homo sapiens
  CDR3 for beta chain variable domain of TCR clone 165839 (TRBV11-2, TRBJ2-2)
CASRLGGGELFF

SEQ ID NO: 331679 - protein, 13 aa, Homo sapiens
  CDR3 for alpha chain variable domain of TCR clone 165840 (TRAV13-1, TRAJ5)
CAARVTGRRALTF

SEQ ID NO: 331680 - protein, 17 aa, Homo sapiens
  CDR3 for beta chain variable domain of TCR clone 165840 (TRBV7-9, TRBJ2-7)
CASSPGGGLTSSSTSGR

SEQ ID NO: 331681 - protein, 14 aa, Homo sapiens
  CDR3 for alpha chain variable domain of TCR clone 165841 (TRAV1-2, TRAJ8)
CAVREDIGFQKLVF

SEQ ID NO: 331682 - protein, 14 aa, Homo sapiens
  CDR3 for beta chain variable domain of TCR clone 165841 (TRBV6-1, TRBJ1-3)
CASVQGGGGNTIYF

SEQ ID NO: 331683 - protein, 14 aa, Homo sapiens
  CDR3 for alpha chain variable domain of TCR clone 165842 (TRAV26-1, TRAJ21)
CIVRPPYNFNKFYF

SEQ ID NO: 331684 - protein, 14 aa, Homo sapiens
  CDR3 for beta chain variable domain of TCR clone 165842 (TRBV11-3, TRBJ2-1)
CASSAATSGSIQFF

SEQ ID NO: 331685 - protein, 15 aa, Homo sapiens
  CDR3 for alpha chain variable domain of TCR clone 165843 (TRAV17, TRAJ57)
CATGPSQGGSEKLVF

SEQ ID NO: 331686 - protein, 13 aa, Homo sapiens
  CDR3 for beta chain variable domain of TCR clone 165843 (TRBV11-1, TRBJ2-3)
CASSHDTKDTQYF

SEQ ID NO: 331687 - protein, 14 aa, Homo sapiens
  CDR3 for alpha chain variable domain of TCR clone 165844 (TRAV12-3, TRAJ29)
CAMSPYSVHTPLVF

SEQ ID NO: 331688 - protein, 15 aa, Homo sapiens
  CDR3 for beta chain variable domain of TCR clone 165844 (TRBV27, TRBJ2-1)
CASSNGGGSSNEQFF

SEQ ID NO: 331689 - protein, 17 aa, Homo sapiens
  CDR3 for alpha chain variable domain of TCR clone 165845 (TRAV26-1, TRAJ47)
CIVPSLLYMEYVNKLVF

SEQ ID NO: 331690 - protein, 14 aa, Homo sapiens
  CDR3 for beta chain variable domain of TCR clone 165845 (TRBV7-3, TRBJ1-5)
RASSFSGCNQPQHF

SEQ ID NO: 331691 - protein, 11 aa, Homo sapiens
  CDR3 for alpha chain variable domain of TCR clone 165846 (TRAV2, TRAJ13)
CASGGYQKVTF

SEQ ID NO: 331692 - protein, 16 aa, Homo sapiens
  CDR3 for beta chain variable domain of TCR clone 165846 (TRBV4-1, TRBJ1-2)
CASSQDAGQVLYGYAF

SEQ ID NO: 331693 - protein, 16 aa, Homo sapiens
  CDR3 for alpha chain variable domain of TCR clone 165847 (TRAV22, TRAJ45)
SVLWRGKRGGADGLTF

SEQ ID NO: 331694 - protein, 13 aa, Homo sapiens
  CDR3 for beta chain variable domain of TCR clone 165847 (TRBV27, TRBJ1-1)
CASSLSIGAEAFF

SEQ ID NO: 331695 - protein, 13 aa, Homo sapiens
  CDR3 for alpha chain variable domain of TCR clone 165848 (TRAV17, TRAJ34)
CATVYYNTDKLIF

SEQ ID NO: 331696 - protein, 14 aa, Homo sapiens
  CDR3 for beta chain variable domain of TCR clone 165848 (TRBV7-9, TRBJ1-4)
CAITEGEANEKLFF

SEQ ID NO: 331697 - protein, 18 aa, Homo sapiens
  CDR3 for alpha chain variable domain of TCR clone 165849 (TRAV12-2, )
CAVEDIQNPDPAVYQLRD

SEQ ID NO: 331698 - protein, 18 aa, Homo sapiens
  CDR3 for beta chain variable domain of TCR clone 165849 (TRBV11-2, TRBJ2-3)
WASSLGGASRGAPNTQYF

SEQ ID NO: 331699 - protein, 16 aa, Homo sapiens
  CDR3 for alpha chain variable domain of TCR clone 165850 (TRAV3, TRAJ37)
CAVRGKGSGNTGTLIF

SEQ ID NO: 331700 - protein, 15 aa, Homo sapiens
  CDR3 for beta chain variable domain of TCR clone 165850 (TRBV5-1, TRBJ2-7)
CASSLNGGPAREQYF

SEQ ID NO: 331701 - protein, 11 aa, Homo sapiens
  CDR3 for alpha chain variable domain of TCR clone 165851 (TRAV13-2, TRAJ23)
CAESPRGKLIF

SEQ ID NO: 331702 - protein, 15 aa, Homo sapiens
  CDR3 for beta chain variable domain of TCR clone 165851 (TRBV28, TRBJ2-1)
CASSGLEEVDNEQFF

SEQ ID NO: 331703 - protein, 18 aa, Homo sapiens
  CDR3 for alpha chain variable domain of TCR clone 165852 (TRAV21, TRAJ52)
CAVRPSPAGGTSYGKLTF

SEQ ID NO: 331704 - protein, 12 aa, Homo sapiens
  CDR3 for beta chain variable domain of TCR clone 165852 (TRBV24-1, TRBJ1-1)
CATSDSDRGAFF

SEQ ID NO: 331705 - protein, 14 aa, Homo sapiens
  CDR3 for alpha chain variable domain of TCR clone 165853 (TRAV38-1, TRAJ40)
CALRPTSGTYKYIF

SEQ ID NO: 331706 - protein, 14 aa, Homo sapiens
  CDR3 for beta chain variable domain of TCR clone 165853 (TRBV18, TRBJ2-7)
CASSPRGGSYEQYF

SEQ ID NO: 331707 - protein, 10 aa, Homo sapiens
  CDR3 for alpha chain variable domain of TCR clone 165854 (TRAV5, TRAJ34)
CAEDTDKLIF

SEQ ID NO: 331708 - protein, 15 aa, Homo sapiens
  CDR3 for beta chain variable domain of TCR clone 165854 (TRBV28, TRBJ2-7)
CASSPGGRGFYEQYF

SEQ ID NO: 331709 - protein, 12 aa, Homo sapiens
  CDR3 for alpha chain variable domain of TCR clone 165855 (TRAV17, TRAJ20)
YATDSNDYKLSF

SEQ ID NO: 331710 - protein, 14 aa, Homo sapiens
  CDR3 for beta chain variable domain of TCR clone 165855 (TRBV6-5, TRBJ1-1)
CASSLGQGLSEAFF

SEQ ID NO: 331711 - protein, 14 aa, Homo sapiens
  CDR3 for alpha chain variable domain of TCR clone 165856 (TRAV12-2, TRAJ44)
CAVNPAGTASKLTF

SEQ ID NO: 331712 - protein, 16 aa, Homo sapiens
  CDR3 for beta chain variable domain of TCR clone 165856 (TRBV9, TRBJ2-1)
CASSVGGGGNYNEQFF

SEQ ID NO: 331713 - protein, 14 aa, Homo sapiens
  CDR3 for alpha chain variable domain of TCR clone 165857 (TRAV17, TRAJ45)
CATDGRGGADGLTF

SEQ ID NO: 331714 - protein, 13 aa, Homo sapiens
  CDR3 for beta chain variable domain of TCR clone 165857 (TRBV11-2, TRBJ2-5)
CASSFSSQETQYF

SEQ ID NO: 331715 - protein, 12 aa, Homo sapiens
  CDR3 for alpha chain variable domain of TCR clone 165858 (TRAV3, TRAJ31)
CAVRDANARLMF

SEQ ID NO: 331716 - protein, 18 aa, Homo sapiens
  CDR3 for beta chain variable domain of TCR clone 165858 (TRBV7-2, TRBJ2-3)
CASSLKREGSGITDTQYF

SEQ ID NO: 331717 - protein, 13 aa, Homo sapiens
  CDR3 for alpha chain variable domain of TCR clone 165859 (TRAV23/DV6, TRAJ21)
CAASREQLKQILL

SEQ ID NO: 331718 - protein, 16 aa, Homo sapiens
  CDR3 for beta chain variable domain of TCR clone 165859 (TRBV20-1, TRBJ2-3)
CSAVRDRGPIADTQYF

SEQ ID NO: 331719 - protein, 13 aa, Homo sapiens
  CDR3 for alpha chain variable domain of TCR clone 165860 (TRAV13-2, TRAJ41)
CAESINSGYALNF

SEQ ID NO: 331720 - protein, 14 aa, Homo sapiens
  CDR3 for beta chain variable domain of TCR clone 165860 (TRBV7-6, TRBJ2-3)
CASSLGTVTDTQYF

SEQ ID NO: 331721 - protein, 16 aa, Homo sapiens
  CDR3 for alpha chain variable domain of TCR clone 165861 (TRAV1-2, TRAJ10)
CAVRGVLTGGGNKLTF

SEQ ID NO: 331722 - protein, 17 aa, Homo sapiens
  CDR3 for beta chain variable domain of TCR clone 165861 (TRBV7-8, TRBJ2-6)
CASSAGTGGAGANDLTF

SEQ ID NO: 331723 - protein, 12 aa, Homo sapiens
  CDR3 for alpha chain variable domain of TCR clone 165862 (TRAV16, TRAJ39)
CALWNAGNMLTF

SEQ ID NO: 331724 - protein, 14 aa, Homo sapiens
  CDR3 for beta chain variable domain of TCR clone 165862 (TRBV4-2, TRBJ2-1)
CASGLDRAYNEQFF

SEQ ID NO: 331725 - protein, 17 aa, Homo sapiens
  CDR3 for alpha chain variable domain of TCR clone 165863 (TRAV26-1, TRAJ53)
CIVRVDDRGGSNYKLTL

SEQ ID NO: 331726 - protein, 15 aa, Homo sapiens
  CDR3 for beta chain variable domain of TCR clone 165863 (TRBV20-1, TRBJ2-7)
CSARVPAAYFYEQYF

SEQ ID NO: 331727 - protein, 14 aa, Homo sapiens
  CDR3 for alpha chain variable domain of TCR clone 165864 (TRAV8-2, TRAJ4)
CVVSPSGCYNKLIF

SEQ ID NO: 331728 - protein, 15 aa, Homo sapiens
  CDR3 for beta chain variable domain of TCR clone 165864 (TRBV4-1, TRBJ1-4)
CASSDTGGTNEKLLF

SEQ ID NO: 331729 - protein, 13 aa, Homo sapiens
  CDR3 for alpha chain variable domain of TCR clone 165865 (TRAV12-1, TRAJ3)
CVVNPRGASKIIF

SEQ ID NO: 331730 - protein, 17 aa, Homo sapiens
  CDR3 for beta chain variable domain of TCR clone 165865 (TRBV7-9, TRBJ2-6)
CASSFGAGYSGANVLTF

SEQ ID NO: 331731 - protein, 14 aa, Homo sapiens
  CDR3 for alpha chain variable domain of TCR clone 165866 (TRAV16, TRAJ33)
CALSAMDSNYQLIW

SEQ ID NO: 331732 - protein, 15 aa, Homo sapiens
  CDR3 for beta chain variable domain of TCR clone 165866 (TRBV28, TRBJ2-7)
CASSLEAYPIYEHYF

SEQ ID NO: 331733 - protein, 11 aa, Homo sapiens
  CDR3 for alpha chain variable domain of TCR clone 165867 (TRAV3, TRAJ21)
CAVGNFHKFYF

SEQ ID NO: 331734 - protein, 16 aa, Homo sapiens
  CDR3 for beta chain variable domain of TCR clone 165867 (TRBV19, TRBJ2-1)
CASSKAGPSSYNEQFL

SEQ ID NO: 331735 - protein, 18 aa, Homo sapiens
  CDR3 for alpha chain variable domain of TCR clone 165868 (TRAV21, TRAJ52)
CAVRPSPAGGTSYGKLTV

SEQ ID NO: 331736 - protein, 13 aa, Homo sapiens
  CDR3 for beta chain variable domain of TCR clone 165868 (TRBV7-3, TRBJ1-1)
CASSQDWGAEALF

SEQ ID NO: 331737 - protein, 15 aa, Homo sapiens
  CDR3 for alpha chain variable domain of TCR clone 165869 (TRAV38-2/DV8, TRAJ28)
CAYRTSGAGSYQLPF

SEQ ID NO: 331738 - protein, 13 aa, Homo sapiens
  CDR3 for beta chain variable domain of TCR clone 165869 (TRBV5-1, TRBJ1-5)
CASSLAQDQPQHF

SEQ ID NO: 331739 - protein, 18 aa, Homo sapiens
  CDR3 for alpha chain variable domain of TCR clone 165870 (TRAV21, TRAJ52)
CAVRPSPAGGTSYGKMTF

SEQ ID NO: 331740 - protein, 12 aa, Homo sapiens
  CDR3 for beta chain variable domain of TCR clone 165870 (TRBV11-2, TRBJ2-1)
CASSPGNNEQFF

SEQ ID NO: 331741 - protein, 15 aa, Homo sapiens
  CDR3 for alpha chain variable domain of TCR clone 165871 (TRAV17, TRAJ57)
CATGPSQGGSEKLVF

SEQ ID NO: 331742 - protein, 18 aa, Homo sapiens
  CDR3 for beta chain variable domain of TCR clone 165871 (TRBV7-9, TRBJ2-7)
CDSSLTTSGSRTWYEQYF

SEQ ID NO: 331743 - protein, 13 aa, Homo sapiens
  CDR3 for alpha chain variable domain of TCR clone 165872 (TRAV27, TRAJ45)
CRSPGGGADGLTF

SEQ ID NO: 331744 - protein, 17 aa, Homo sapiens
  CDR3 for beta chain variable domain of TCR clone 165872 (TRBV11-2, TRBJ2-1)
CASSLYPPGVEYSEQFF

SEQ ID NO: 331745 - protein, 14 aa, Homo sapiens
  CDR3 for alpha chain variable domain of TCR clone 165873 (TRAV12-2, TRAJ44)
CAVNPAGTTSKLTF

SEQ ID NO: 331746 - protein, 14 aa, Homo sapiens
  CDR3 for beta chain variable domain of TCR clone 165873 (TRBV7-2, TRBJ1-3)
CASSRLRSGNTIYF

SEQ ID NO: 331747 - protein, 13 aa, Homo sapiens
  CDR3 for alpha chain variable domain of TCR clone 165874 (TRAV21, TRAJ20)
CAVSRLGDYKLSF

SEQ ID NO: 331748 - protein, 13 aa, Homo sapiens
  CDR3 for beta chain variable domain of TCR clone 165874 (TRBV7-3, TRBJ1-1)
CASRPAGGLEAFF

SEQ ID NO: 331749 - protein, 14 aa, Homo sapiens
  CDR3 for alpha chain variable domain of TCR clone 165875 (TRAV12-1, TRAJ3)
CVVGRHSSASKIIF

SEQ ID NO: 331750 - protein, 19 aa, Homo sapiens
  CDR3 for beta chain variable domain of TCR clone 165875 (TRBV7-2, TRBJ2-3)
CASSFLSRNWGGGTDTQYF

SEQ ID NO: 331751 - protein, 12 aa, Homo sapiens
  CDR3 for alpha chain variable domain of TCR clone 165876 (TRAV8-3, TRAJ20)
CAVGANAYKLSF

SEQ ID NO: 331752 - protein, 17 aa, Homo sapiens
  CDR3 for beta chain variable domain of TCR clone 165876 (TRBV13, TRBJ2-3)
CASSLSRVAGGRNTQYF

SEQ ID NO: 331753 - protein, 13 aa, Homo sapiens
  CDR3 for alpha chain variable domain of TCR clone 165877 (TRAV2, TRAJ3)
CAEDGSSASKIIF

SEQ ID NO: 331754 - protein, 16 aa, Homo sapiens
  CDR3 for beta chain variable domain of TCR clone 165877 (TRBV15, TRBJ2-3)
CATSPAGGIATDTQYF

SEQ ID NO: 331755 - protein, 14 aa, Homo sapiens
  CDR3 for alpha chain variable domain of TCR clone 165878 (TRAV12-2, TRAJ17)
CAALFKAAGNKLTF

SEQ ID NO: 331756 - protein, 16 aa, Homo sapiens
  CDR3 for beta chain variable domain of TCR clone 165878 (TRBV20-1, TRBJ2-2)
CSPSASGIPGAGELFF

SEQ ID NO: 331757 - protein, 14 aa, Homo sapiens
  CDR3 for alpha chain variable domain of TCR clone 165879 (TRAV8-3, TRAJ33)
CAVAASDSNYQLIW

SEQ ID NO: 331758 - protein, 17 aa, Homo sapiens
  CDR3 for beta chain variable domain of TCR clone 165879 (TRBV11-2, TRBJ2-1)
CASSLYPPGVEYNEQFF

SEQ ID NO: 331759 - protein, 13 aa, Homo sapiens
  CDR3 for alpha chain variable domain of TCR clone 165880 (TRAV2, TRAJ24)
CAVTTDSWGKLQF

SEQ ID NO: 331760 - protein, 14 aa, Homo sapiens
  CDR3 for beta chain variable domain of TCR clone 165880 (TRBV13, TRBJ2-5)
CASSLGRGQETHYF

SEQ ID NO: 331761 - protein, 12 aa, Homo sapiens
  CDR3 for alpha chain variable domain of TCR clone 165881 (TRAV38-2/DV8, TRAJ29)
CAYLRGNTPLVF

SEQ ID NO: 331762 - protein, 13 aa, Homo sapiens
  CDR3 for beta chain variable domain of TCR clone 165881 (TRBV11-2, TRBJ2-5)
CASSRGPSETQYF

SEQ ID NO: 331763 - protein, 11 aa, Homo sapiens
  CDR3 for alpha chain variable domain of TCR clone 165882 (TRAV13-1, TRAJ49)
CACVGGNRFYF

SEQ ID NO: 331764 - protein, 16 aa, Homo sapiens
  CDR3 for beta chain variable domain of TCR clone 165882 (TRBV11-2, TRBJ2-2)
CASSLRTGNLIGELFF

SEQ ID NO: 331765 - protein, 14 aa, Homo sapiens
  CDR3 for alpha chain variable domain of TCR clone 165883 (TRAV1-2, TRAJ16)
CAVNRFADGQKLLF

SEQ ID NO: 331766 - protein, 17 aa, Homo sapiens
  CDR3 for beta chain variable domain of TCR clone 165883 (TRBV7-8, TRBJ2-6)
CASSAGTGGAGANVLTF

SEQ ID NO: 331767 - protein, 14 aa, Homo sapiens
  CDR3 for alpha chain variable domain of TCR clone 165884 (TRAV12-2, TRAJ40)
CSVKIPSATYKYIF

SEQ ID NO: 331768 - protein, 14 aa, Homo sapiens
  CDR3 for beta chain variable domain of TCR clone 165884 (TRBV20-1, TRBJ1-1)
CSAQTRIGGTEAFF

SEQ ID NO: 331769 - protein, 13 aa, Homo sapiens
  CDR3 for alpha chain variable domain of TCR clone 165885 (TRAV27, TRAJ45)
CRSSGGGAHGLTF

SEQ ID NO: 331770 - protein, 15 aa, Homo sapiens
  CDR3 for beta chain variable domain of TCR clone 165885 (TRBV9, TRBJ2-2)
CASSDFAGASGELFF

SEQ ID NO: 331771 - protein, 15 aa, Homo sapiens
  CDR3 for alpha chain variable domain of TCR clone 165886 (TRAV12-3, TRAJ6)
FAMSATTGGSYIPTL

SEQ ID NO: 331772 - protein, 16 aa, Homo sapiens
  CDR3 for beta chain variable domain of TCR clone 165886 (TRBV20-1, TRBJ1-2)
CSASMGQGVANYGYTF

SEQ ID NO: 331773 - protein, 13 aa, Homo sapiens
  CDR3 for alpha chain variable domain of TCR clone 165887 (TRAV35, TRAJ42)
CAGFPGSQGNPIF

SEQ ID NO: 331774 - protein, 13 aa, Homo sapiens
  CDR3 for beta chain variable domain of TCR clone 165887 (TRBV29-1, TRBJ2-1)
CIVEGGRVNEQFF

SEQ ID NO: 331775 - protein, 16 aa, Homo sapiens
  CDR3 for alpha chain variable domain of TCR clone 165888 (TRAV12-3, TRAJ53)
CAMSPGSGGSHYKLTF

SEQ ID NO: 331776 - protein, 16 aa, Homo sapiens
  CDR3 for beta chain variable domain of TCR clone 165888 (TRBV7-3, TRBJ2-1)
CASSKPLAGGYNEQFF

SEQ ID NO: 331777 - protein, 13 aa, Homo sapiens
  CDR3 for alpha chain variable domain of TCR clone 165889 (TRAV27, TRAJ41)
CAGEGNSGYALNF

SEQ ID NO: 331778 - protein, 14 aa, Homo sapiens
  CDR3 for beta chain variable domain of TCR clone 165889 (TRBV7-9, TRBJ2-1)
CASRPTGLRNEQFF

SEQ ID NO: 331779 - protein, 16 aa, Homo sapiens
  CDR3 for alpha chain variable domain of TCR clone 165890 (TRAV13-1, TRAJ48)
CAASIFGNFGNEKLTF

SEQ ID NO: 331780 - protein, 14 aa, Homo sapiens
  CDR3 for beta chain variable domain of TCR clone 165890 (TRBV24-1, TRBJ1-1)
WATSIPRGDTEAFF

SEQ ID NO: 331781 - protein, 12 aa, Homo sapiens
  CDR3 for alpha chain variable domain of TCR clone 165891 (TRAV12-2, TRAJ45)
LASGGGADGLTF

SEQ ID NO: 331782 - protein, 16 aa, Homo sapiens
  CDR3 for beta chain variable domain of TCR clone 165891 (TRBV19, TRBJ2-3)
CASSPGLLASTDTQYF

SEQ ID NO: 331783 - protein, 12 aa, Homo sapiens
  CDR3 for alpha chain variable domain of TCR clone 165892 (TRAV12-2, TRAJ31)
CAVKGYNARLMF

SEQ ID NO: 331784 - protein, 14 aa, Homo sapiens
  CDR3 for beta chain variable domain of TCR clone 165892 (TRBV3-1, TRBJ2-5)
CASSQGPDQETQYF

SEQ ID NO: 331785 - protein, 12 aa, Homo sapiens
  CDR3 for alpha chain variable domain of TCR clone 165893 (TRAV21, TRAJ33)
CAKMDSDYQLIW

SEQ ID NO: 331786 - protein, 14 aa, Homo sapiens
  CDR3 for beta chain variable domain of TCR clone 165893 (TRBV2, TRBJ2-7)
CASSLTSGGYEQYY

SEQ ID NO: 331787 - protein, 14 aa, Homo sapiens
  CDR3 for alpha chain variable domain of TCR clone 165894 (TRAV9-2, TRAJ39)
CDIYIYNAGNMLTF

SEQ ID NO: 331788 - protein, 17 aa, Homo sapiens
  CDR3 for beta chain variable domain of TCR clone 165894 (TRBV20-1, TRBJ2-2)
CSASGSGQGGLTGELFF

SEQ ID NO: 331789 - protein, 13 aa, Homo sapiens
  CDR3 for alpha chain variable domain of TCR clone 165895 (TRAV12-2, TRAJ43)
CAVSGDNNNDMRF

SEQ ID NO: 331790 - protein, 14 aa, Homo sapiens
  CDR3 for beta chain variable domain of TCR clone 165895 (TRBV5-4, TRBJ1-1)
CASSLDSRRDEAFF

SEQ ID NO: 331791 - protein, 16 aa, Homo sapiens
  CDR3 for alpha chain variable domain of TCR clone 165896 (TRAV3, TRAJ10)
CAVRDMRAGGGHKLTF

SEQ ID NO: 331792 - protein, 14 aa, Homo sapiens
  CDR3 for beta chain variable domain of TCR clone 165896 (TRBV7-2, TRBJ2-7)
CASSPKTSFYEQYF

SEQ ID NO: 331793 - protein, 14 aa, Homo sapiens
  CDR3 for alpha chain variable domain of TCR clone 165897 (TRAV3, TRAJ28)
CAVRRGAGGYQLTF

SEQ ID NO: 331794 - protein, 16 aa, Homo sapiens
  CDR3 for beta chain variable domain of TCR clone 165897 (TRBV4-1, TRBJ2-7)
CASSQEWTSGPLEQYF

SEQ ID NO: 331795 - protein, 16 aa, Homo sapiens
  CDR3 for alpha chain variable domain of TCR clone 165898 (TRAV3, TRAJ37)
CAVRGKGSGNTGILIF

SEQ ID NO: 331796 - protein, 15 aa, Homo sapiens
  CDR3 for beta chain variable domain of TCR clone 165898 (TRBV7-9, TRBJ1-6)
CASSSPGRGNSPLHF

SEQ ID NO: 331797 - protein, 14 aa, Homo sapiens
  CDR3 for alpha chain variable domain of TCR clone 165899 (TRAV29/DV5, TRAJ12)
CPATRMDTSYKLIF

SEQ ID NO: 331798 - protein, 13 aa, Homo sapiens
  CDR3 for beta chain variable domain of TCR clone 165899 (TRBV7-2, TRBJ2-5)
CASSYWTGETQYF

SEQ ID NO: 331799 - protein, 14 aa, Homo sapiens
  CDR3 for alpha chain variable domain of TCR clone 165900 (TRAV17, TRAJ45)
CATASGGGAAGLTF

SEQ ID NO: 331800 - protein, 15 aa, Homo sapiens
  CDR3 for beta chain variable domain of TCR clone 165900 (TRBV11-2, TRBJ2-1)
CASGRNRGLMYEQFF

SEQ ID NO: 331801 - protein, 13 aa, Homo sapiens
  CDR3 for alpha chain variable domain of TCR clone 165901 (TRAV17, TRAJ9)
CATDYPGGFKTIL

SEQ ID NO: 331802 - protein, 14 aa, Homo sapiens
  CDR3 for beta chain variable domain of TCR clone 165901 (TRBV19, TRBJ2-5)
CASSMTGQQETQYF

SEQ ID NO: 331803 - protein, 13 aa, Homo sapiens
  CDR3 for alpha chain variable domain of TCR clone 165902 (TRAV29/DV5, TRAJ58)
CAGEETIGSRLTF

SEQ ID NO: 331804 - protein, 15 aa, Homo sapiens
  CDR3 for beta chain variable domain of TCR clone 165902 (TRBV11-2, TRBJ1-6)
CASTGFGTAVSPLHF

SEQ ID NO: 331805 - protein, 15 aa, Homo sapiens
  CDR3 for alpha chain variable domain of TCR clone 165903 (TRAV3, TRAJ3)
CAVRDRDSSASKIIV

SEQ ID NO: 331806 - protein, 15 aa, Homo sapiens
  CDR3 for beta chain variable domain of TCR clone 165903 (TRBV7-9, TRBJ1-6)
CASSSPGRGNSPLYF

SEQ ID NO: 331807 - protein, 14 aa, Homo sapiens
  CDR3 for alpha chain variable domain of TCR clone 165904 (TRAV26-1, TRAJ34)
CIVRVAYNTDKLIF

SEQ ID NO: 331808 - protein, 15 aa, Homo sapiens
  CDR3 for beta chain variable domain of TCR clone 165904 (TRBV28, TRBJ2-5)
CASSPGQGSIETQYF

SEQ ID NO: 331809 - protein, 13 aa, Homo sapiens
  CDR3 for alpha chain variable domain of TCR clone 165905 (TRAV29/DV5, TRAJ44)
CAASTGTASKLTF

SEQ ID NO: 331810 - protein, 11 aa, Homo sapiens
  CDR3 for beta chain variable domain of TCR clone 165905 (TRBV29-1, TRBJ2-5)
CSVDRTGTQYF

SEQ ID NO: 331811 - protein, 15 aa, Homo sapiens
  CDR3 for alpha chain variable domain of TCR clone 165906 (TRAV26-1, TRAJ29)
CTVRVEGSGNTHLVF

SEQ ID NO: 331812 - protein, 14 aa, Homo sapiens
  CDR3 for beta chain variable domain of TCR clone 165906 (TRBV18, TRBJ2-5)
CASSPGVSQETQYF

SEQ ID NO: 331813 - protein, 12 aa, Homo sapiens
  CDR3 for alpha chain variable domain of TCR clone 165907 (TRAV2, TRAJ31)
CAVEDNIARPMF

SEQ ID NO: 331814 - protein, 16 aa, Homo sapiens
  CDR3 for beta chain variable domain of TCR clone 165907 (TRBV10-3, TRBJ2-1)
CAISGVGDGGGGEQFF

SEQ ID NO: 331815 - protein, 13 aa, Homo sapiens
  CDR3 for alpha chain variable domain of TCR clone 165908 (TRAV12-2, TRAJ4)
CAVRSGGDNKLIF

SEQ ID NO: 331816 - protein, 15 aa, Homo sapiens
  CDR3 for beta chain variable domain of TCR clone 165908 (TRBV10-3, TRBJ2-1)
CAISDVQDRAYEQLF

SEQ ID NO: 331817 - protein, 14 aa, Homo sapiens
  CDR3 for alpha chain variable domain of TCR clone 165909 (TRAV26-1, TRAJ38)
CIADNAGNNRKLIW

SEQ ID NO: 331818 - protein, 15 aa, Homo sapiens
  CDR3 for beta chain variable domain of TCR clone 165909 (TRBV20-1, TRBJ1-1)
CSASRGVTGNSEAFF

SEQ ID NO: 331819 - protein, 16 aa, Homo sapiens
  CDR3 for alpha chain variable domain of TCR clone 165910 (TRAV8-6, TRAJ58)
CAVSDHTETSGPRLPF

SEQ ID NO: 331820 - protein, 14 aa, Homo sapiens
  CDR3 for beta chain variable domain of TCR clone 165910 (TRBV7-2, TRBJ1-5)
CASSPRGGPQPQHF

SEQ ID NO: 331821 - protein, 14 aa, Homo sapiens
  CDR3 for alpha chain variable domain of TCR clone 165911 (TRAV12-2, TRAJ9)
CAVNALEGGFKTIF

SEQ ID NO: 331822 - protein, 14 aa, Homo sapiens
  CDR3 for beta chain variable domain of TCR clone 165911 (TRBV18, TRBJ1-1)
CASSQGQGNTEAFF

SEQ ID NO: 331823 - protein, 15 aa, Homo sapiens
  CDR3 for alpha chain variable domain of TCR clone 165912 (TRAV8-3, TRAJ45)
CASSYSGGGADGLTF

SEQ ID NO: 331824 - protein, 17 aa, Homo sapiens
  CDR3 for beta chain variable domain of TCR clone 165912 (TRBV7-8, TRBJ1-2)
CASSLRPLQGHMYGYTF

SEQ ID NO: 331825 - protein, 13 aa, Homo sapiens
  CDR3 for alpha chain variable domain of TCR clone 165913 (TRAV27, TRAJ58)
FAGAETSGSRLTF

SEQ ID NO: 331826 - protein, 13 aa, Homo sapiens
  CDR3 for beta chain variable domain of TCR clone 165913 (TRBV7-2, TRBJ2-1)
CASNRDRWNEQFF

SEQ ID NO: 331827 - protein, 18 aa, Homo sapiens
  CDR3 for alpha chain variable domain of TCR clone 165914 (TRAV21, TRAJ52)
CAVRPSPAGGTSYGKLTF

SEQ ID NO: 331828 - protein, 17 aa, Homo sapiens
  CDR3 for beta chain variable domain of TCR clone 165914 (TRBV14, TRBJ2-3)
CASSQGPSGLSTDTQYF

SEQ ID NO: 331829 - protein, 12 aa, Homo sapiens
  CDR3 for alpha chain variable domain of TCR clone 165915 (TRAV20, TRAJ4)
CSASGGYNKLIC

SEQ ID NO: 331830 - protein, 13 aa, Homo sapiens
  CDR3 for beta chain variable domain of TCR clone 165915 (TRBV9, TRBJ2-1)
CASSPSGGNEQFF

SEQ ID NO: 331831 - protein, 12 aa, Homo sapiens
  CDR3 for alpha chain variable domain of TCR clone 165916 (TRAV12-3, TRAJ20)
CAMERGDYKLSF

SEQ ID NO: 331832 - protein, 17 aa, Homo sapiens
  CDR3 for beta chain variable domain of TCR clone 165916 (TRBV28, TRBJ2-5)
CASSTPEGDALQETQYF

SEQ ID NO: 331833 - protein, 14 aa, Homo sapiens
  CDR3 for alpha chain variable domain of TCR clone 165917 (TRAV26-1, TRAJ38)
CIADNAGNNRKLIW

SEQ ID NO: 331834 - protein, 15 aa, Homo sapiens
  CDR3 for beta chain variable domain of TCR clone 165917 (TRBV9, TRBJ1-6)
CASSVAGTGDSPPHF

SEQ ID NO: 331835 - protein, 14 aa, Homo sapiens
  CDR3 for alpha chain variable domain of TCR clone 165918 (TRAV13-1, TRAJ12)
CAASYMDSSYKLIF

SEQ ID NO: 331836 - protein, 13 aa, Homo sapiens
  CDR3 for beta chain variable domain of TCR clone 165918 (TRBV2, TRBJ2-5)
CASSYGIQETQYF

SEQ ID NO: 331837 - protein, 14 aa, Homo sapiens
  CDR3 for alpha chain variable domain of TCR clone 165919 (TRAV35, TRAJ13)
CAGSPSGGYQKVTS

SEQ ID NO: 331838 - protein, 13 aa, Homo sapiens
  CDR3 for beta chain variable domain of TCR clone 165919 (TRBV29-1, TRBJ1-1)
CSVGDSRNTEAFF

SEQ ID NO: 331839 - protein, 13 aa, Homo sapiens
  CDR3 for alpha chain variable domain of TCR clone 165920 (TRAV2, TRAJ15)
CAVASQAGTALIF

SEQ ID NO: 331840 - protein, 16 aa, Homo sapiens
  CDR3 for beta chain variable domain of TCR clone 165920 (TRBV9, TRBJ2-1)
CASSVGGGGNYNEQFF

SEQ ID NO: 331841 - protein, 11 aa, Homo sapiens
  CDR3 for alpha chain variable domain of TCR clone 165921 (TRAV25, TRAJ5)
CRGGGRRELTF

SEQ ID NO: 331842 - protein, 15 aa, Homo sapiens
  CDR3 for beta chain variable domain of TCR clone 165921 (TRBV20-1, TRBJ2-7)
CSARDRVSGMDEQYF

SEQ ID NO: 331843 - protein, 13 aa, Homo sapiens
  CDR3 for alpha chain variable domain of TCR clone 165922 (TRAV3, TRAJ40)
CAVRGSGAYKYIF

SEQ ID NO: 331844 - protein, 14 aa, Homo sapiens
  CDR3 for beta chain variable domain of TCR clone 165922 (TRBV18, TRBJ2-3)
CASSGLADTDTQYF

SEQ ID NO: 331845 - protein, 14 aa, Homo sapiens
  CDR3 for alpha chain variable domain of TCR clone 165923 (TRAV36/DV7, TRAJ48)
CAQRRDFGNEKLTF

SEQ ID NO: 331846 - protein, 14 aa, Homo sapiens
  CDR3 for beta chain variable domain of TCR clone 165923 (TRBV28, TRBJ1-5)
CASSLGVLVKPQHF

SEQ ID NO: 331847 - protein, 11 aa, Homo sapiens
  CDR3 for alpha chain variable domain of TCR clone 165924 (TRAV12-3, TRAJ27)
CSMANAGKSTF

SEQ ID NO: 331848 - protein, 12 aa, Homo sapiens
  CDR3 for beta chain variable domain of TCR clone 165924 (TRBV12-4, TRBJ2-7)
CASSLGGYEQYF

SEQ ID NO: 331849 - protein, 13 aa, Homo sapiens
  CDR3 for alpha chain variable domain of TCR clone 165925 (TRAV29/DV5, TRAJ31)
CAASRNNNARLMS

SEQ ID NO: 331850 - protein, 12 aa, Homo sapiens
  CDR3 for beta chain variable domain of TCR clone 165925 (TRBV14, TRBJ1-1)
RASSQLKGLAFF

SEQ ID NO: 331851 - protein, 14 aa, Homo sapiens
  CDR3 for alpha chain variable domain of TCR clone 165926 (TRAV3, TRAJ5)
CAVRSDTGRRALTF

SEQ ID NO: 331852 - protein, 14 aa, Homo sapiens
  CDR3 for beta chain variable domain of TCR clone 165926 (TRBV7-2, TRBJ2-3)
CASSSVMPTDTQYF

SEQ ID NO: 331853 - protein, 11 aa, Homo sapiens
  CDR3 for alpha chain variable domain of TCR clone 165927 (TRAV2, TRAJ33)
CAVESNYQLIW

SEQ ID NO: 331854 - protein, 15 aa, Homo sapiens
  CDR3 for beta chain variable domain of TCR clone 165927 (TRBV20-1, TRBJ2-7)
CSARKGLAESYEQYF

SEQ ID NO: 331855 - protein, 12 aa, Homo sapiens
  CDR3 for alpha chain variable domain of TCR clone 165928 (TRAV13-1, TRAJ21)
CAAKEGFKKFYF

SEQ ID NO: 331856 - protein, 14 aa, Homo sapiens
  CDR3 for beta chain variable domain of TCR clone 165928 (TRBV18, TRBJ2-7)
CASSPRGGAYEQYF

SEQ ID NO: 331857 - protein, 16 aa, Homo sapiens
  CDR3 for alpha chain variable domain of TCR clone 165929 (TRAV27, TRAJ13)
CAGAKSDSGGYQKGTF

SEQ ID NO: 331858 - protein, 15 aa, Homo sapiens
  CDR3 for beta chain variable domain of TCR clone 165929 (TRBV9, TRBJ1-6)
CASSVAGTGDSPLHF

SEQ ID NO: 331859 - protein, 13 aa, Homo sapiens
  CDR3 for alpha chain variable domain of TCR clone 165930 (TRAV36/DV7, TRAJ54)
CAVDIQGAQKLVF

SEQ ID NO: 331860 - protein, 13 aa, Homo sapiens
  CDR3 for beta chain variable domain of TCR clone 165930 (TRBV2, TRBJ2-7)
CASSVGGSGEQYF

SEQ ID NO: 331861 - protein, 14 aa, Homo sapiens
  CDR3 for alpha chain variable domain of TCR clone 165931 (TRAV13-1, TRAJ31)
CAASSRPNNARPMF

SEQ ID NO: 331862 - protein, 15 aa, Homo sapiens
  CDR3 for beta chain variable domain of TCR clone 165931 (TRBV4-2, TRBJ2-4)
CASSPLGAAKNMQYF

SEQ ID NO: 331863 - protein, 16 aa, Homo sapiens
  CDR3 for alpha chain variable domain of TCR clone 165932 (TRAV3, TRAJ10)
CAVRDMRAGGGNKLTF

SEQ ID NO: 331864 - protein, 13 aa, Homo sapiens
  CDR3 for beta chain variable domain of TCR clone 165932 (TRBV19, TRBJ1-2)
CASSVPGQDGYSF

SEQ ID NO: 331865 - protein, 14 aa, Homo sapiens
  CDR3 for alpha chain variable domain of TCR clone 165933 (TRAV29/DV5, TRAJ22)
CAASATGSARKLTF

SEQ ID NO: 331866 - protein, 14 aa, Homo sapiens
  CDR3 for beta chain variable domain of TCR clone 165933 (TRBV19, TRBJ2-1)
CASSPGLAPNEQFF

SEQ ID NO: 331867 - protein, 15 aa, Homo sapiens
  CDR3 for alpha chain variable domain of TCR clone 165934 (TRAV13-2, TRAJ40)
CAENRSRQGTYKYIF

SEQ ID NO: 331868 - protein, 16 aa, Homo sapiens
  CDR3 for beta chain variable domain of TCR clone 165934 (TRBV7-7, TRBJ2-1)
CASSLASGTSYNEQFF

SEQ ID NO: 331869 - protein, 14 aa, Homo sapiens
  CDR3 for alpha chain variable domain of TCR clone 165935 (TRAV13-2, TRAJ22)
CADGTLGSARQLTF

SEQ ID NO: 331870 - protein, 16 aa, Homo sapiens
  CDR3 for beta chain variable domain of TCR clone 165935 (TRBV19, TRBJ2-1)
CASSSKGTRFYNEQFF

SEQ ID NO: 331871 - protein, 16 aa, Homo sapiens
  CDR3 for alpha chain variable domain of TCR clone 165936 (TRAV30, TRAJ24)
CGTEIVDADSWGKFQF

SEQ ID NO: 331872 - protein, 16 aa, Homo sapiens
  CDR3 for beta chain variable domain of TCR clone 165936 (TRBV6-1, TRBJ2-1)
CANILRQGSSYNEQFF

SEQ ID NO: 331873 - protein, 15 aa, Homo sapiens
  CDR3 for alpha chain variable domain of TCR clone 165937 (TRAV26-1, TRAJ3)
CIVRSGYSSASKIIF

SEQ ID NO: 331874 - protein, 14 aa, Homo sapiens
  CDR3 for beta chain variable domain of TCR clone 165937 (TRBV13, TRBJ2-5)
CASYHRLAEETQYF

SEQ ID NO: 331875 - protein, 14 aa, Homo sapiens
  CDR3 for alpha chain variable domain of TCR clone 165938 (TRAV12-2, TRAJ53)
CLNGGGGSNYKLTF

SEQ ID NO: 331876 - protein, 14 aa, Homo sapiens
  CDR3 for beta chain variable domain of TCR clone 165938 (TRBV19, TRBJ2-2)
CASSTLHRSGELFF

SEQ ID NO: 331877 - protein, 13 aa, Homo sapiens
  CDR3 for alpha chain variable domain of TCR clone 165939 (TRAV6, TRAJ20)
CAIAVSNDYKLSF

SEQ ID NO: 331878 - protein, 16 aa, Homo sapiens
  CDR3 for beta chain variable domain of TCR clone 165939 (TRBV7-9, TRBJ2-1)
CASSDVAGGSYNEQFF

SEQ ID NO: 331879 - protein, 13 aa, Homo sapiens
  CDR3 for alpha chain variable domain of TCR clone 165940 (TRAV27, TRAJ45)
CRSSGGGADGLTF

SEQ ID NO: 331880 - protein, 15 aa, Homo sapiens
  CDR3 for beta chain variable domain of TCR clone 165940 (TRBV28, TRBJ2-3)
CASSQELGGTDTQYF

SEQ ID NO: 331881 - protein, 12 aa, Homo sapiens
  CDR3 for alpha chain variable domain of TCR clone 165941 (TRAV12-3, TRAJ17)
CAMTLTGNKLTF

SEQ ID NO: 331882 - protein, 13 aa, Homo sapiens
  CDR3 for beta chain variable domain of TCR clone 165941 (TRBV7-9, TRBJ2-3)
CASSPGATDTQYF

SEQ ID NO: 331883 - protein, 13 aa, Homo sapiens
  CDR3 for alpha chain variable domain of TCR clone 165942 (TRAV29/DV5, TRAJ31)
CAASRNNNARLMF

SEQ ID NO: 331884 - protein, 13 aa, Homo sapiens
  CDR3 for beta chain variable domain of TCR clone 165942 (TRBV7-8, TRBJ2-1)
CASTRDAVDEQFF

SEQ ID NO: 331885 - protein, 15 aa, Homo sapiens
  CDR3 for alpha chain variable domain of TCR clone 165943 (TRAV12-2, TRAJ32)
CAANHYGGATNKLIF

SEQ ID NO: 331886 - protein, 14 aa, Homo sapiens
  CDR3 for beta chain variable domain of TCR clone 165943 (TRBV27, TRBJ2-1)
CASSFGREANEQFF

SEQ ID NO: 331887 - protein, 15 aa, Homo sapiens
  CDR3 for alpha chain variable domain of TCR clone 165944 (TRAV21, TRAJ53)
CAVRQSGGSNYKPTF

SEQ ID NO: 331888 - protein, 14 aa, Homo sapiens
  CDR3 for beta chain variable domain of TCR clone 165944 (TRBV18, TRBJ2-5)
CASSPGVSQETQYF

SEQ ID NO: 331889 - protein, 12 aa, Homo sapiens
  CDR3 for alpha chain variable domain of TCR clone 165945 (TRAV2, TRAJ31)
CAVEDNNARLMF

SEQ ID NO: 331890 - protein, 15 aa, Homo sapiens
  CDR3 for beta chain variable domain of TCR clone 165945 (TRBV5-1, TRBJ1-1)
CASSSWTGRNTEAFF

SEQ ID NO: 331891 - protein, 15 aa, Homo sapiens
  CDR3 for alpha chain variable domain of TCR clone 165946 (TRAV38-1, TRAJ57)
CAFMDSQGGSEKLIF

SEQ ID NO: 331892 - protein, 16 aa, Homo sapiens
  CDR3 for beta chain variable domain of TCR clone 165946 (TRBV10-3, TRBJ2-1)
CAIRGGGRGDYNEQFF

SEQ ID NO: 331893 - protein, 17 aa, Homo sapiens
  CDR3 for alpha chain variable domain of TCR clone 165947 (TRAV3, TRAJ42)
CAVRDRDYGGSQGNLIF

SEQ ID NO: 331894 - protein, 14 aa, Homo sapiens
  CDR3 for beta chain variable domain of TCR clone 165947 (TRBV7-2, TRBJ2-5)
CSSSPRGSSETQYF

SEQ ID NO: 331895 - protein, 14 aa, Homo sapiens
  CDR3 for alpha chain variable domain of TCR clone 165948 (TRAV4, TRAJ6)
CLVGEAGGSYIPKF

SEQ ID NO: 331896 - protein, 15 aa, Homo sapiens
  CDR3 for beta chain variable domain of TCR clone 165948 (TRBV9, TRBJ2-1)
CASSLAGSSYNEQFF

SEQ ID NO: 331897 - protein, 14 aa, Homo sapiens
  CDR3 for alpha chain variable domain of TCR clone 165949 (TRAV1-2, TRAJ16)
CAVNRFSDGQKLLF

SEQ ID NO: 331898 - protein, 15 aa, Homo sapiens
  CDR3 for beta chain variable domain of TCR clone 165949 (TRBV7-3, TRBJ2-2)
GLSLKRGTLSGELFF

SEQ ID NO: 331899 - protein, 14 aa, Homo sapiens
  CDR3 for alpha chain variable domain of TCR clone 165950 (TRAV13-1, TRAJ9)
CAASALTGGFKTIF

SEQ ID NO: 331900 - protein, 13 aa, Homo sapiens
  CDR3 for beta chain variable domain of TCR clone 165950 (TRBV20-1, TRBJ1-1)
CSAGTVWNTEAFF

SEQ ID NO: 331901 - protein, 15 aa, Homo sapiens
  CDR3 for alpha chain variable domain of TCR clone 165951 (TRAV26-1, TRAJ24)
CIVREETDSWGKLQF

SEQ ID NO: 331902 - protein, 15 aa, Homo sapiens
  CDR3 for beta chain variable domain of TCR clone 165951 (TRBV12-4, TRBJ1-1)
CASSLAVSRGAEAFF

SEQ ID NO: 331903 - protein, 15 aa, Homo sapiens
  CDR3 for alpha chain variable domain of TCR clone 165952 (TRAV21, TRAJ53)
CATLNSGGSYYKLTF

SEQ ID NO: 331904 - protein, 16 aa, Homo sapiens
  CDR3 for beta chain variable domain of TCR clone 165952 (TRBV12-4, TRBJ1-5)
CASSRPVGGSNQPQHF

SEQ ID NO: 331905 - protein, 22 aa, Homo sapiens
  CDR3 for alpha chain variable domain of TCR clone 165953 (TRAV8-3, TRAJ32)
CAVEVVLQTSSSFELALCLLSS

SEQ ID NO: 331906 - protein, 15 aa, Homo sapiens
  CDR3 for beta chain variable domain of TCR clone 165953 (TRBV7-2, TRBJ2-1)
CASSSRTSREDEQFF

SEQ ID NO: 331907 - protein, 12 aa, Homo sapiens
  CDR3 for alpha chain variable domain of TCR clone 165954 (TRAV8-4, TRAJ43)
CAVSVNNNDMRF

SEQ ID NO: 331908 - protein, 14 aa, Homo sapiens
  CDR3 for beta chain variable domain of TCR clone 165954 (TRBV12-4, TRBJ1-2)
CASTAQALRYGYTF

SEQ ID NO: 331909 - protein, 15 aa, Homo sapiens
  CDR3 for alpha chain variable domain of TCR clone 165955 (TRAV2, TRAJ9)
CAVEDRGTGGFKTIF

SEQ ID NO: 331910 - protein, 15 aa, Homo sapiens
  CDR3 for beta chain variable domain of TCR clone 165955 (TRBV7-3, TRBJ2-2)
CASSETGQGTGELFF

SEQ ID NO: 331911 - protein, 14 aa, Homo sapiens
  CDR3 for alpha chain variable domain of TCR clone 165956 (TRAV17, TRAJ22)
CATSPSGSARPLIF

SEQ ID NO: 331912 - protein, 15 aa, Homo sapiens
  CDR3 for beta chain variable domain of TCR clone 165956 (TRBV4-1, TRBJ2-5)
CASSQWDLYQETQYF

SEQ ID NO: 331913 - protein, 14 aa, Homo sapiens
  CDR3 for alpha chain variable domain of TCR clone 165957 (TRAV17, TRAJ34)
YATDSLEGTDKLIF

SEQ ID NO: 331914 - protein, 16 aa, Homo sapiens
  CDR3 for beta chain variable domain of TCR clone 165957 (TRBV12-5, TRBJ2-5)
CASGPRTSGNQETQYF

SEQ ID NO: 331915 - protein, 12 aa, Homo sapiens
  CDR3 for alpha chain variable domain of TCR clone 165958 (TRAV23/DV6, TRAJ16)
CAASGRGQKLLF

SEQ ID NO: 331916 - protein, 15 aa, Homo sapiens
  CDR3 for beta chain variable domain of TCR clone 165958 (TRBV15, TRBJ2-1)
CATSRPGQGLHEQFF

SEQ ID NO: 331917 - protein, 13 aa, Homo sapiens
  CDR3 for alpha chain variable domain of TCR clone 165959 (TRAV13-1, TRAJ10)
CAALEGGGNKLTF

SEQ ID NO: 331918 - protein, 17 aa, Homo sapiens
  CDR3 for beta chain variable domain of TCR clone 165959 (TRBV7-3, TRBJ2-2)
CASSLSGTSGGTGELFS

SEQ ID NO: 331919 - protein, 16 aa, Homo sapiens
  CDR3 for alpha chain variable domain of TCR clone 165960 (TRAV1-2, TRAJ10)
CAVRGVLTGGGNKLTF

SEQ ID NO: 331920 - protein, 12 aa, Homo sapiens
  CDR3 for beta chain variable domain of TCR clone 165960 (TRBV7-8, TRBJ2-7)
CASNLGDREQYF

SEQ ID NO: 331921 - protein, 13 aa, Homo sapiens
  CDR3 for alpha chain variable domain of TCR clone 165961 (TRAV26-1, TRAJ48)
CIVRVVGDEKLTF

SEQ ID NO: 331922 - protein, 14 aa, Homo sapiens
  CDR3 for beta chain variable domain of TCR clone 165961 (TRBV7-9, TRBJ2-1)
CASSDNSGYNEQFF

SEQ ID NO: 331923 - protein, 17 aa, Homo sapiens
  CDR3 for alpha chain variable domain of TCR clone 165962 (TRAV4, TRAJ18)
CLVGEKSVGSTLGRLYF

SEQ ID NO: 331924 - protein, 18 aa, Homo sapiens
  CDR3 for beta chain variable domain of TCR clone 165962 (TRBV11-2, TRBJ2-3)
CASSLGGASRGAPNTQYF

SEQ ID NO: 331925 - protein, 11 aa, Homo sapiens
  CDR3 for alpha chain variable domain of TCR clone 165963 (TRAV3, TRAJ21)
CAVGNFNKFYF

SEQ ID NO: 331926 - protein, 14 aa, Homo sapiens
  CDR3 for beta chain variable domain of TCR clone 165963 (TRBV19, TRBJ1-1)
CASSITGWETEAFF

SEQ ID NO: 331927 - protein, 10 aa, Homo sapiens
  CDR3 for alpha chain variable domain of TCR clone 165964 (TRAV9-2, TRAJ49)
FALIGNQFYF

SEQ ID NO: 331928 - protein, 16 aa, Homo sapiens
  CDR3 for beta chain variable domain of TCR clone 165964 (TRBV19, TRBJ2-3)
CASSPGAASRTDTQYF

SEQ ID NO: 331929 - protein, 16 aa, Homo sapiens
  CDR3 for alpha chain variable domain of TCR clone 165965 (TRAV36/DV7, TRAJ28)
CSGTLYSGAGSYQLTF

SEQ ID NO: 331930 - protein, 15 aa, Homo sapiens
  CDR3 for beta chain variable domain of TCR clone 165965 (TRBV9, TRBJ1-6)
CASSVAGTGDSPLHF

SEQ ID NO: 331931 - protein, 18 aa, Homo sapiens
  CDR3 for alpha chain variable domain of TCR clone 165966 (TRAV21, TRAJ52)
CAVRPSPAGGTSYGKLTF

SEQ ID NO: 331932 - protein, 16 aa, Homo sapiens
  CDR3 for beta chain variable domain of TCR clone 165966 (TRBV13, TRBJ2-3)
CQQPRQGSGGGNTQYF

SEQ ID NO: 331933 - protein, 15 aa, Homo sapiens
  CDR3 for alpha chain variable domain of TCR clone 165967 (TRAV21, TRAJ53)
CATLNSGGSNYKLTF

SEQ ID NO: 331934 - protein, 16 aa, Homo sapiens
  CDR3 for beta chain variable domain of TCR clone 165967 (TRBV4-3, TRBJ2-2)
CASGHLQGSGTGELFF

SEQ ID NO: 331935 - protein, 21 aa, Homo sapiens
  CDR3 for alpha chain variable domain of TCR clone 165968 (TRAV20, )
CAVTGANNIQNPYPAVYQLID

SEQ ID NO: 331936 - protein, 14 aa, Homo sapiens
  CDR3 for beta chain variable domain of TCR clone 165968 (TRBV20-1, TRBJ2-5)
CSALVPGYQETQYF

SEQ ID NO: 331937 - protein, 14 aa, Homo sapiens
  CDR3 for alpha chain variable domain of TCR clone 165969 (TRAV38-2/DV8, TRAJ49)
CAYRSPLTGNQFYF

SEQ ID NO: 331938 - protein, 12 aa, Homo sapiens
  CDR3 for beta chain variable domain of TCR clone 165969 (TRBV12-5, TRBJ2-5)
CASGQGVETQYF

SEQ ID NO: 331939 - protein, 12 aa, Homo sapiens
  CDR3 for alpha chain variable domain of TCR clone 165970 (TRAV12-3, TRAJ17)
CAMTLTGNKLTF

SEQ ID NO: 331940 - protein, 15 aa, Homo sapiens
  CDR3 for beta chain variable domain of TCR clone 165970 (TRBV7-9, TRBJ1-6)
CASSSPGRGNSPLQF

SEQ ID NO: 331941 - protein, 18 aa, Homo sapiens
  CDR3 for alpha chain variable domain of TCR clone 165971 (TRAV1-2, TRAJ18)
CAVRDMGDRGSTLGRLYF

SEQ ID NO: 331942 - protein, 17 aa, Homo sapiens
  CDR3 for beta chain variable domain of TCR clone 165971 (TRBV12-4, TRBJ2-2)
CASSFGVGRGGTGELFF

SEQ ID NO: 331943 - protein, 12 aa, Homo sapiens
  CDR3 for alpha chain variable domain of TCR clone 165972 (TRAV8-3, TRAJ20)
CAVGANAYELSF

SEQ ID NO: 331944 - protein, 16 aa, Homo sapiens
  CDR3 for beta chain variable domain of TCR clone 165972 (TRBV19, TRBJ2-2)
CASRSPGTGATGELFF

SEQ ID NO: 331945 - protein, 13 aa, Homo sapiens
  CDR3 for alpha chain variable domain of TCR clone 165973 (TRAV13-1, TRAJ49)
CAAMLYTGNQFYF

SEQ ID NO: 331946 - protein, 16 aa, Homo sapiens
  CDR3 for beta chain variable domain of TCR clone 165973 (TRBV7-3, TRBJ2-2)
CASSLKRGTLSGELFF

SEQ ID NO: 331947 - protein, 13 aa, Homo sapiens
  CDR3 for alpha chain variable domain of TCR clone 165974 (TRAV12-3, TRAJ9)
CAMGNTGGFNTIF

SEQ ID NO: 331948 - protein, 14 aa, Homo sapiens
  CDR3 for beta chain variable domain of TCR clone 165974 (TRBV11-2, TRBJ2-7)
CASSSTGEGYEQYF

SEQ ID NO: 331949 - protein, 14 aa, Homo sapiens
  CDR3 for alpha chain variable domain of TCR clone 165975 (TRAV12-2, TRAJ15)
CAPHTGQAGTALIF

SEQ ID NO: 331950 - protein, 17 aa, Homo sapiens
  CDR3 for beta chain variable domain of TCR clone 165975 (TRBV10-3, TRBJ2-6)
CAISESTAPSGANDLTF

SEQ ID NO: 331951 - protein, 12 aa, Homo sapiens
  CDR3 for alpha chain variable domain of TCR clone 165976 (TRAV12-3, TRAJ17)
CAMTLTGNKLTF

SEQ ID NO: 331952 - protein, 17 aa, Homo sapiens
  CDR3 for beta chain variable domain of TCR clone 165976 (TRBV4-1, TRBJ1-5)
CASSQQPPTVANQPQHF

SEQ ID NO: 331953 - protein, 18 aa, Homo sapiens
  CDR3 for alpha chain variable domain of TCR clone 165977 (TRAV21, TRAJ52)
CAVRPSPAGGTSYGKLTF

SEQ ID NO: 331954 - protein, 17 aa, Homo sapiens
  CDR3 for beta chain variable domain of TCR clone 165977 (TRBV13, TRBJ2-3)
CASILSRVAGGMNTQYF

SEQ ID NO: 331955 - protein, 12 aa, Homo sapiens
  CDR3 for alpha chain variable domain of TCR clone 165978 (TRAV12-1, TRAJ40)
CVVPSGTYKYTF

SEQ ID NO: 331956 - protein, 15 aa, Homo sapiens
  CDR3 for beta chain variable domain of TCR clone 165978 (TRBV12-4, TRBJ2-1)
CAGSPLSGRNSEQFF

SEQ ID NO: 331957 - protein, 14 aa, Homo sapiens
  CDR3 for alpha chain variable domain of TCR clone 165979 (TRAV17, TRAJ16)
CATAYFSDGQKLLF

SEQ ID NO: 331958 - protein, 12 aa, Homo sapiens
  CDR3 for beta chain variable domain of TCR clone 165979 (TRBV24-1, TRBJ1-1)
CATLYPDTEAFF

SEQ ID NO: 331959 - protein, 13 aa, Homo sapiens
  CDR3 for alpha chain variable domain of TCR clone 165980 (TRAV21, TRAJ27)
CAARPGNAGKSTF

SEQ ID NO: 331960 - protein, 14 aa, Homo sapiens
  CDR3 for beta chain variable domain of TCR clone 165980 (TRBV23-1, TRBJ2-5)
CASSFLRSQETEYF

SEQ ID NO: 331961 - protein, 14 aa, Homo sapiens
  CDR3 for alpha chain variable domain of TCR clone 165981 (TRAV21, TRAJ45)
CAVSSGGGADGLTF

SEQ ID NO: 331962 - protein, 15 aa, Homo sapiens
  CDR3 for beta chain variable domain of TCR clone 165981 (TRBV28, TRBJ2-4)
CAAGSGTLLMGIQYF

SEQ ID NO: 331963 - protein, 14 aa, Homo sapiens
  CDR3 for alpha chain variable domain of TCR clone 165982 (TRAV1-2, TRAJ12)
CAVSVTDSSYKLIF

SEQ ID NO: 331964 - protein, 15 aa, Homo sapiens
  CDR3 for beta chain variable domain of TCR clone 165982 (TRBV2, TRBJ2-4)
CASSGTNLAKNIQYF

SEQ ID NO: 331965 - protein, 14 aa, Homo sapiens
  CDR3 for alpha chain variable domain of TCR clone 165983 (TRAV17, TRAJ22)
CATSPSGSARQLTF

SEQ ID NO: 331966 - protein, 10 aa, Homo sapiens
  CDR3 for beta chain variable domain of TCR clone 165983 (TRBV4-1, TRBJ2-5)
CASSQWDLYK

SEQ ID NO: 331967 - protein, 14 aa, Homo sapiens
  CDR3 for alpha chain variable domain of TCR clone 165984 (TRAV8-4, TRAJ15)
CAVIIREAGTALIF

SEQ ID NO: 331968 - protein, 16 aa, Homo sapiens
  CDR3 for beta chain variable domain of TCR clone 165984 (TRBV29-1, TRBJ2-6)
CSVEDITYSGANVLTF

SEQ ID NO: 331969 - protein, 15 aa, Homo sapiens
  CDR3 for alpha chain variable domain of TCR clone 165985 (TRAV26-1, TRAJ22)
CIVRVSFWFCKATDL

SEQ ID NO: 331970 - protein, 12 aa, Homo sapiens
  CDR3 for beta chain variable domain of TCR clone 165985 (TRBV6-6, TRBJ2-3)
CASSSRGDTQYV

SEQ ID NO: 331971 - protein, 23 aa, Homo sapiens
  CDR3 for alpha chain variable domain of TCR clone 165986 (TRAV3, TRAJ13)
CAVTSYRKLPLELEQSSKSSQIS

SEQ ID NO: 331972 - protein, 15 aa, Homo sapiens
  CDR3 for beta chain variable domain of TCR clone 165986 (TRBV7-9, TRBJ2-7)
CASSSSGLAVYEQYF

SEQ ID NO: 331973 - protein, 16 aa, Homo sapiens
  CDR3 for alpha chain variable domain of TCR clone 165987 (TRAV3, TRAJ10)
FAVRDMRGGGGNKLTF

SEQ ID NO: 331974 - protein, 15 aa, Homo sapiens
  CDR3 for beta chain variable domain of TCR clone 165987 (TRBV20-1, TRBJ2-1)
CSASSAGSSYNEQFF

SEQ ID NO: 331975 - protein, 14 aa, Homo sapiens
  CDR3 for alpha chain variable domain of TCR clone 165988 (TRAV8-2, TRAJ4)
CVVSPSGGYNKLIF

SEQ ID NO: 331976 - protein, 17 aa, Homo sapiens
  CDR3 for beta chain variable domain of TCR clone 165988 (TRBV11-2, TRBJ2-1)
CASSLYPPGVEYNEQFF

SEQ ID NO: 331977 - protein, 13 aa, Homo sapiens
  CDR3 for alpha chain variable domain of TCR clone 165989 (TRAV29/DV5, TRAJ39)
CAASDNAGNILTF

SEQ ID NO: 331978 - protein, 17 aa, Homo sapiens
  CDR3 for beta chain variable domain of TCR clone 165989 (TRBV7-9, TRBJ2-3)
CASSLEEAGAYPDTQYF

SEQ ID NO: 331979 - protein, 14 aa, Homo sapiens
  CDR3 for alpha chain variable domain of TCR clone 165990 (TRAV12-2, TRAJ13)
CAVKKTGGYQKLTF

SEQ ID NO: 331980 - protein, 14 aa, Homo sapiens
  CDR3 for beta chain variable domain of TCR clone 165990 (TRBV20-1, TRBJ2-7)
CSAPELAGVGEQYF

SEQ ID NO: 331981 - protein, 15 aa, Homo sapiens
  CDR3 for alpha chain variable domain of TCR clone 165991 (TRAV26-1, TRAJ29)
CTVRVEGSGNTPLVF

SEQ ID NO: 331982 - protein, 14 aa, Homo sapiens
  CDR3 for beta chain variable domain of TCR clone 165991 (TRBV18, TRBJ2-5)
CASSPGVAKETQYF

SEQ ID NO: 331983 - protein, 16 aa, Homo sapiens
  CDR3 for alpha chain variable domain of TCR clone 165992 (TRAV3, TRAJ21)
CAVRDIERGNFNKFYF

SEQ ID NO: 331984 - protein, 16 aa, Homo sapiens
  CDR3 for beta chain variable domain of TCR clone 165992 (TRBV19, TRBJ1-1)
CASRFGGPVTGTEAFF

SEQ ID NO: 331985 - protein, 14 aa, Homo sapiens
  CDR3 for alpha chain variable domain of TCR clone 165993 (TRAV12-3, TRAJ58)
CAMSTETSCSRLTF

SEQ ID NO: 331986 - protein, 15 aa, Homo sapiens
  CDR3 for beta chain variable domain of TCR clone 165993 (TRBV11-3, TRBJ1-1)
CASSLGGPGDTEAFF

SEQ ID NO: 331987 - protein, 17 aa, Homo sapiens
  CDR3 for alpha chain variable domain of TCR clone 165994 (TRAV3, TRAJ42)
CAVRDRDYGGSQGNLIF

SEQ ID NO: 331988 - protein, 13 aa, Homo sapiens
  CDR3 for beta chain variable domain of TCR clone 165994 (TRBV19, TRBJ1-1)
CASSPSNGGEAFF

SEQ ID NO: 331989 - protein, 12 aa, Homo sapiens
  CDR3 for alpha chain variable domain of TCR clone 165995 (TRAV13-1, TRAJ53)
AASGGSNYKLTF

SEQ ID NO: 331990 - protein, 16 aa, Homo sapiens
  CDR3 for beta chain variable domain of TCR clone 165995 (TRBV28, TRBJ2-6)
CASSNRRGSGANGLTF

SEQ ID NO: 331991 - protein, 14 aa, Homo sapiens
  CDR3 for alpha chain variable domain of TCR clone 165996 (TRAV3, TRAJ10)
CAVWGLGGGNKLTF

SEQ ID NO: 331992 - protein, 15 aa, Homo sapiens
  CDR3 for beta chain variable domain of TCR clone 165996 (TRBV5-8, TRBJ2-7)
CASSLGSGSSYEQYF

SEQ ID NO: 331993 - protein, 10 aa, Homo sapiens
  CDR3 for alpha chain variable domain of TCR clone 165997 (TRAV12-2, TRAJ52)
RSTSYGKLTF

SEQ ID NO: 331994 - protein, 15 aa, Homo sapiens
  CDR3 for beta chain variable domain of TCR clone 165997 (TRBV6-3, TRBJ2-7)
CASSSPGTVFYEQYF

SEQ ID NO: 331995 - protein, 12 aa, Homo sapiens
  CDR3 for alpha chain variable domain of TCR clone 165998 (TRAV12-1, TRAJ29)
CVADSGNTPLVF

SEQ ID NO: 331996 - protein, 15 aa, Homo sapiens
  CDR3 for beta chain variable domain of TCR clone 165998 (TRBV10-3, TRBJ2-3)
CAISDWDRDTDTQYF

SEQ ID NO: 331997 - protein, 10 aa, Homo sapiens
  CDR3 for alpha chain variable domain of TCR clone 165999 (TRAV12-2, TRAJ20)
CAVYLYKLSF

SEQ ID NO: 331998 - protein, 17 aa, Homo sapiens
  CDR3 for beta chain variable domain of TCR clone 165999 (TRBV19, TRBJ2-7)
CASSIGTSGDITYEQYF

SEQ ID NO: 331999 - protein, 10 aa, Homo sapiens
  CDR3 for alpha chain variable domain of TCR clone 166000 (TRAV23/DV6, TRAJ57)
CAASSTLSQG

SEQ ID NO: 332000 - protein, 15 aa, Homo sapiens
  CDR3 for beta chain variable domain of TCR clone 166000 (TRBV29-1, TRBJ2-7)
CSVEFFDRGSYEQYF

SEQ ID NO: 332001 - protein, 13 aa, Homo sapiens
  CDR3 for alpha chain variable domain of TCR clone 166001 (TRAV27, TRAJ37)
CAGGPSNTGKLIF

SEQ ID NO: 332002 - protein, 14 aa, Homo sapiens
  CDR3 for beta chain variable domain of TCR clone 166001 (TRBV6-1, TRBJ1-3)
CASVQGGGGNTIYF

SEQ ID NO: 332003 - protein, 18 aa, Homo sapiens
  CDR3 for alpha chain variable domain of TCR clone 166002 (TRAV13-1, TRAJ52)
CAANNPNAGGTSYGKLTF

SEQ ID NO: 332004 - protein, 15 aa, Homo sapiens
  CDR3 for beta chain variable domain of TCR clone 166002 (TRBV6-1, TRBJ2-3)
CASSDRGGITDTQYF

SEQ ID NO: 332005 - protein, 15 aa, Homo sapiens
  CDR3 for alpha chain variable domain of TCR clone 166003 (TRAV13-1, TRAJ10)
CAATILTGGGHKLTF

SEQ ID NO: 332006 - protein, 15 aa, Homo sapiens
  CDR3 for beta chain variable domain of TCR clone 166003 (TRBV2, TRBJ2-7)
CASALPGSGATEQYF

SEQ ID NO: 332007 - protein, 15 aa, Homo sapiens
  CDR3 for alpha chain variable domain of TCR clone 166004 (TRAV26-1, TRAJ12)
IASSELMDSSYKLIF

SEQ ID NO: 332008 - protein, 11 aa, Homo sapiens
  CDR3 for beta chain variable domain of TCR clone 166004 (TRBV7-9, TRBJ2-3)
CASSPPDTQYL

SEQ ID NO: 332009 - protein, 14 aa, Homo sapiens
  CDR3 for alpha chain variable domain of TCR clone 166005 (TRAV29/DV5, TRAJ45)
CAASFRGGADGLTF

SEQ ID NO: 332010 - protein, 14 aa, Homo sapiens
  CDR3 for beta chain variable domain of TCR clone 166005 (TRBV20-1, TRBJ2-1)
CSAQIGGSANEQFF

SEQ ID NO: 332011 - protein, 14 aa, Homo sapiens
  CDR3 for alpha chain variable domain of TCR clone 166006 (TRAV21, TRAJ35)
CAVMPIGFGNVLHF

SEQ ID NO: 332012 - protein, 12 aa, Homo sapiens
  CDR3 for beta chain variable domain of TCR clone 166006 (TRBV7-9, TRBJ2-7)
CASSTKREEQYF

SEQ ID NO: 332013 - protein, 15 aa, Homo sapiens
  CDR3 for alpha chain variable domain of TCR clone 166007 (TRAV12-2, TRAJ50)
CAVNGLVTSYDEVIF

SEQ ID NO: 332014 - protein, 16 aa, Homo sapiens
  CDR3 for beta chain variable domain of TCR clone 166007 (TRBV5-4, TRBJ2-3)
CASQQPGAGGADTQYF

SEQ ID NO: 332015 - protein, 17 aa, Homo sapiens
  CDR3 for alpha chain variable domain of TCR clone 166008 (TRAV3, TRAJ12)
CAVRDGGRMDSSCKLIF

SEQ ID NO: 332016 - protein, 13 aa, Homo sapiens
  CDR3 for beta chain variable domain of TCR clone 166008 (TRBV20-1, TRBJ1-1)
CSAPLGGGTEAFF

SEQ ID NO: 332017 - protein, 23 aa, Homo sapiens
  CDR3 for alpha chain variable domain of TCR clone 166009 (TRAV12-2, TRAJ43)
SLLIRDSQPSDSATYPCAFDMRF

SEQ ID NO: 332018 - protein, 14 aa, Homo sapiens
  CDR3 for beta chain variable domain of TCR clone 166009 (TRBV4-1, TRBJ2-2)
CASSQAVNTGELFF

SEQ ID NO: 332019 - protein, 14 aa, Homo sapiens
  CDR3 for alpha chain variable domain of TCR clone 166010 (TRAV13-2, TRAJ17)
CAENSKAAGNKLTF

SEQ ID NO: 332020 - protein, 11 aa, Homo sapiens
  CDR3 for beta chain variable domain of TCR clone 166010 (TRBV6-3, TRBJ2-3)
CSTGQADTQYF

SEQ ID NO: 332021 - protein, 13 aa, Homo sapiens
  CDR3 for alpha chain variable domain of TCR clone 166011 (TRAV12-1, TRAJ38)
CVVPAGNNRKLIW

SEQ ID NO: 332022 - protein, 16 aa, Homo sapiens
  CDR3 for beta chain variable domain of TCR clone 166011 (TRBV12-5, TRBJ2-5)
CASGPRTSGNQETQYF

SEQ ID NO: 332023 - protein, 13 aa, Homo sapiens
  CDR3 for alpha chain variable domain of TCR clone 166012 (TRAV3, TRAJ20)
CAVRDTGDYKPSF

SEQ ID NO: 332024 - protein, 12 aa, Homo sapiens
  CDR3 for beta chain variable domain of TCR clone 166012 (TRBV29-1, TRBJ2-3)
CSVTGGADTQYF

SEQ ID NO: 332025 - protein, 16 aa, Homo sapiens
  CDR3 for alpha chain variable domain of TCR clone 166013 (TRAV3, TRAJ37)
CAVRGKGSGNTGKLIF

SEQ ID NO: 332026 - protein, 13 aa, Homo sapiens
  CDR3 for beta chain variable domain of TCR clone 166013 (TRBV7-8, TRBJ2-3)
CASSLRGPDTQYF

SEQ ID NO: 332027 - protein, 15 aa, Homo sapiens
  CDR3 for alpha chain variable domain of TCR clone 166014 (TRAV2, TRAJ9)
CAVEDRGTGGFKTIF

SEQ ID NO: 332028 - protein, 16 aa, Homo sapiens
  CDR3 for beta chain variable domain of TCR clone 166014 (TRBV24-1, TRBJ2-3)
CATSDPGTGATDTQYF

SEQ ID NO: 332029 - protein, 13 aa, Homo sapiens
  CDR3 for alpha chain variable domain of TCR clone 166015 (TRAV13-1, TRAJ43)
CAARLSNNNDMRF

SEQ ID NO: 332030 - protein, 15 aa, Homo sapiens
  CDR3 for beta chain variable domain of TCR clone 166015 (TRBV5-1, TRBJ2-1)
CASSQAGYWWNEQFF

SEQ ID NO: 332031 - protein, 13 aa, Homo sapiens
  CDR3 for alpha chain variable domain of TCR clone 166016 (TRAV20, TRAJ37)
CAGGSSNTGKLIF

SEQ ID NO: 332032 - protein, 17 aa, Homo sapiens
  CDR3 for beta chain variable domain of TCR clone 166016 (TRBV28, TRBJ2-5)
CASSRQGGLAGAETQYF

SEQ ID NO: 332033 - protein, 15 aa, Homo sapiens
  CDR3 for alpha chain variable domain of TCR clone 166017 (TRAV21, TRAJ24)
CAARSSTDSWGKLPF

SEQ ID NO: 332034 - protein, 13 aa, Homo sapiens
  CDR3 for beta chain variable domain of TCR clone 166017 (TRBV11-2, TRBJ2-5)
CASGSTGEETQYF

SEQ ID NO: 332035 - protein, 13 aa, Homo sapiens
  CDR3 for alpha chain variable domain of TCR clone 166018 (TRAV13-2, TRAJ40)
CAENTSGTYKYIF

SEQ ID NO: 332036 - protein, 17 aa, Homo sapiens
  CDR3 for beta chain variable domain of TCR clone 166018 (TRBV12-4, TRBJ1-3)
CASRRSGTPSSGNTIDF

SEQ ID NO: 332037 - protein, 14 aa, Homo sapiens
  CDR3 for alpha chain variable domain of TCR clone 166019 (TRAV1-2, TRAJ16)
CAVNRFSDDQKLLF

SEQ ID NO: 332038 - protein, 11 aa, Homo sapiens
  CDR3 for beta chain variable domain of TCR clone 166019 (TRBV29-1, TRBJ2-5)
CSEDRTGTQYF

SEQ ID NO: 332039 - protein, 14 aa, Homo sapiens
  CDR3 for alpha chain variable domain of TCR clone 166020 (TRAV9-2, TRAJ39)
CALYIYNAGNMLTF

SEQ ID NO: 332040 - protein, 16 aa, Homo sapiens
  CDR3 for beta chain variable domain of TCR clone 166020 (TRBV20-1, TRBJ2-1)
CSAPGLAGSYSDEQFF

SEQ ID NO: 332041 - protein, 16 aa, Homo sapiens
  CDR3 for alpha chain variable domain of TCR clone 166021 (TRAV3, TRAJ42)
CAVRDIEGGSQGNLIF

SEQ ID NO: 332042 - protein, 14 aa, Homo sapiens
  CDR3 for beta chain variable domain of TCR clone 166021 (TRBV18, TRBJ1-1)
CASSPPTVRTEAFF

SEQ ID NO: 332043 - protein, 13 aa, Homo sapiens
  CDR3 for alpha chain variable domain of TCR clone 166022 (TRAV2, TRAJ34)
CAVKGWNTDKLIF

SEQ ID NO: 332044 - protein, 13 aa, Homo sapiens
  CDR3 for beta chain variable domain of TCR clone 166022 (TRBV20-1, TRBJ1-1)
CSARGGGNTEAFF

SEQ ID NO: 332045 - protein, 13 aa, Homo sapiens
  CDR3 for alpha chain variable domain of TCR clone 166023 (TRAV3, TRAJ41)
CAVSSNTGYALNF

SEQ ID NO: 332046 - protein, 13 aa, Homo sapiens
  CDR3 for beta chain variable domain of TCR clone 166023 (TRBV20-1, TRBJ2-2)
CSALSGGAGELFF

SEQ ID NO: 332047 - protein, 16 aa, Homo sapiens
  CDR3 for alpha chain variable domain of TCR clone 166024 (TRAV30, TRAJ24)
FGTEIVDADSWGKFQF

SEQ ID NO: 332048 - protein, 14 aa, Homo sapiens
  CDR3 for beta chain variable domain of TCR clone 166024 (TRBV5-1, TRBJ1-2)
CASSLEPVNYGYTF

SEQ ID NO: 332049 - protein, 13 aa, Homo sapiens
  CDR3 for alpha chain variable domain of TCR clone 166025 (TRAV12-1, TRAJ29)
CVVNGPGNTPLVF

SEQ ID NO: 332050 - protein, 14 aa, Homo sapiens
  CDR3 for beta chain variable domain of TCR clone 166025 (TRBV7-3, TRBJ2-1)
CASSLAGGTNEQFF

SEQ ID NO: 332051 - protein, 15 aa, Homo sapiens
  CDR3 for alpha chain variable domain of TCR clone 166026 (TRAV12-1, TRAJ9)
CVVSFGDTGGFKTIF

SEQ ID NO: 332052 - protein, 13 aa, Homo sapiens
  CDR3 for beta chain variable domain of TCR clone 166026 (TRBV12-4, TRBJ1-5)
CASSPDRAQPQHF

SEQ ID NO: 332053 - protein, 12 aa, Homo sapiens
  CDR3 for alpha chain variable domain of TCR clone 166027 (TRAV13-2, TRAJ23)
CAERHRGGKLIF

SEQ ID NO: 332054 - protein, 15 aa, Homo sapiens
  CDR3 for beta chain variable domain of TCR clone 166027 (TRBV7-3, TRBJ2-1)
CASSPTGGGEVEQFF

SEQ ID NO: 332055 - protein, 15 aa, Homo sapiens
  CDR3 for alpha chain variable domain of TCR clone 166028 (TRAV21, TRAJ52)
CAVRGGGTSYGKLTC

SEQ ID NO: 332056 - protein, 15 aa, Homo sapiens
  CDR3 for beta chain variable domain of TCR clone 166028 (TRBV18, TRBJ1-5)
CTSSPSDRSNQPQHF

SEQ ID NO: 332057 - protein, 13 aa, Homo sapiens
  CDR3 for alpha chain variable domain of TCR clone 166029 (TRAV30, TRAJ29)
CGTDDSGNTPLVF

SEQ ID NO: 332058 - protein, 13 aa, Homo sapiens
  CDR3 for beta chain variable domain of TCR clone 166029 (TRBV4-2, TRBJ1-1)
CASSQAGNTEAFF

SEQ ID NO: 332059 - protein, 12 aa, Homo sapiens
  CDR3 for alpha chain variable domain of TCR clone 166030 (TRAV13-2, TRAJ23)
CAERHRGGKLIF

SEQ ID NO: 332060 - protein, 18 aa, Homo sapiens
  CDR3 for beta chain variable domain of TCR clone 166030 (TRBV11-2, TRBJ2-3)
CASSLGGASRGAPNKQYF

SEQ ID NO: 332061 - protein, 16 aa, Homo sapiens
  CDR3 for alpha chain variable domain of TCR clone 166031 (TRAV17, TRAJ35)
CATAEGGIGFGNVLHC

SEQ ID NO: 332062 - protein, 16 aa, Homo sapiens
  CDR3 for beta chain variable domain of TCR clone 166031 (TRBV4-1, TRBJ1-4)
CASSQDLRRGGEKLFF

SEQ ID NO: 332063 - protein, 11 aa, Homo sapiens
  CDR3 for alpha chain variable domain of TCR clone 166032 (TRAV3, TRAJ21)
CAVGNFNKFYF

SEQ ID NO: 332064 - protein, 12 aa, Homo sapiens
  CDR3 for beta chain variable domain of TCR clone 166032 (TRBV14, TRBJ1-1)
CAISQLKGLAFF

SEQ ID NO: 332065 - protein, 14 aa, Homo sapiens
  CDR3 for alpha chain variable domain of TCR clone 166033 (TRAV1-2, TRAJ8)
CAVREDTGFQTLVF

SEQ ID NO: 332066 - protein, 15 aa, Homo sapiens
  CDR3 for beta chain variable domain of TCR clone 166033 (TRBV6-3, TRBJ2-7)
CASSSPGTVFYEQDF

SEQ ID NO: 332067 - protein, 15 aa, Homo sapiens
  CDR3 for alpha chain variable domain of TCR clone 166034 (TRAV4, TRAJ8)
CLVGELHTGFQKLVF

SEQ ID NO: 332068 - protein, 15 aa, Homo sapiens
  CDR3 for beta chain variable domain of TCR clone 166034 (TRBV7-9, TRBJ2-5)
CASSNRDYLQETQYF

SEQ ID NO: 332069 - protein, 15 aa, Homo sapiens
  CDR3 for alpha chain variable domain of TCR clone 166035 (TRAV21, TRAJ53)
CATLNSGGSNYKLTF

SEQ ID NO: 332070 - protein, 13 aa, Homo sapiens
  CDR3 for beta chain variable domain of TCR clone 166035 (TRBV4-1, TRBJ2-2)
CASSQENNGELFF

SEQ ID NO: 332071 - protein, 13 aa, Homo sapiens
  CDR3 for alpha chain variable domain of TCR clone 166036 (TRAV12-3, TRAJ13)
CAMSSGGYQKVTF

SEQ ID NO: 332072 - protein, 13 aa, Homo sapiens
  CDR3 for beta chain variable domain of TCR clone 166036 (TRBV20-1, TRBJ1-1)
CSAPPAGHTEAFF

SEQ ID NO: 332073 - protein, 11 aa, Homo sapiens
  CDR3 for alpha chain variable domain of TCR clone 166037 (TRAV1-2, TRAJ20)
CAVANDYKLSF

SEQ ID NO: 332074 - protein, 13 aa, Homo sapiens
  CDR3 for beta chain variable domain of TCR clone 166037 (TRBV7-3, TRBJ1-2)
CASSLKQNYGYTF

SEQ ID NO: 332075 - protein, 14 aa, Homo sapiens
  CDR3 for alpha chain variable domain of TCR clone 166038 (TRAV1-2, TRAJ8)
CAVREVTGFQKLVF

SEQ ID NO: 332076 - protein, 14 aa, Homo sapiens
  CDR3 for beta chain variable domain of TCR clone 166038 (TRBV29-1, TRBJ2-5)
CSVETSGSGETQYF

SEQ ID NO: 332077 - protein, 14 aa, Homo sapiens
  CDR3 for alpha chain variable domain of TCR clone 166039 (TRAV12-3, TRAJ10)
SHLPLTGGGNKLTF

SEQ ID NO: 332078 - protein, 15 aa, Homo sapiens
  CDR3 for beta chain variable domain of TCR clone 166039 (TRBV18, TRBJ2-4)
CASSPGPDRGNIRYF

SEQ ID NO: 332079 - protein, 14 aa, Homo sapiens
  CDR3 for alpha chain variable domain of TCR clone 166040 (TRAV23/DV6, TRAJ27)
CAARRDTNAGKSTF

SEQ ID NO: 332080 - protein, 13 aa, Homo sapiens
  CDR3 for beta chain variable domain of TCR clone 166040 (TRBV20-1, TRBJ1-5)
CSASGRGNQTQHF

SEQ ID NO: 332081 - protein, 15 aa, Homo sapiens
  CDR3 for alpha chain variable domain of TCR clone 166041 (TRAV27, TRAJ38)
CAGRFNAGNNRKLIW

SEQ ID NO: 332082 - protein, 16 aa, Homo sapiens
  CDR3 for beta chain variable domain of TCR clone 166041 (TRBV7-3, TRBJ2-2)
CASSVKRGTLSGELFF

SEQ ID NO: 332083 - protein, 15 aa, Homo sapiens
  CDR3 for alpha chain variable domain of TCR clone 166042 (TRAV2, TRAJ22)
CAVPSRGGSARQLTF

SEQ ID NO: 332084 - protein, 13 aa, Homo sapiens
  CDR3 for beta chain variable domain of TCR clone 166042 (TRBV12-4, TRBJ1-5)
CASSPQGHQPQHF

SEQ ID NO: 332085 - protein, 16 aa, Homo sapiens
  CDR3 for alpha chain variable domain of TCR clone 166043 (TRAV3, TRAJ6)
CAVRDGMGRRKLHTYI

SEQ ID NO: 332086 - protein, 15 aa, Homo sapiens
  CDR3 for beta chain variable domain of TCR clone 166043 (TRBV9, TRBJ2-1)
CARSLAGSSYNEQFF

SEQ ID NO: 332087 - protein, 12 aa, Homo sapiens
  CDR3 for alpha chain variable domain of TCR clone 166044 (TRAV29/DV5, TRAJ15)
CASNQAGTALIF

SEQ ID NO: 332088 - protein, 14 aa, Homo sapiens
  CDR3 for beta chain variable domain of TCR clone 166044 (TRBV18, TRBJ2-1)
CASSPGTSETEQFF

SEQ ID NO: 332089 - protein, 13 aa, Homo sapiens
  CDR3 for alpha chain variable domain of TCR clone 166045 (TRAV17, TRAJ54)
CAAGIKGAQKLVF

SEQ ID NO: 332090 - protein, 14 aa, Homo sapiens
  CDR3 for beta chain variable domain of TCR clone 166045 (TRBV11-2, TRBJ1-2)
CASSLGTANYGYTF

SEQ ID NO: 332091 - protein, 15 aa, Homo sapiens
  CDR3 for alpha chain variable domain of TCR clone 166046 (TRAV29/DV5, TRAJ47)
CSVLLCSNIWKQTVF

SEQ ID NO: 332092 - protein, 17 aa, Homo sapiens
  CDR3 for beta chain variable domain of TCR clone 166046 (TRBV7-9, TRBJ2-1)
CASSLVASYPSYNEQFF

SEQ ID NO: 332093 - protein, 16 aa, Homo sapiens
  CDR3 for alpha chain variable domain of TCR clone 166047 (TRAV30, TRAJ24)
CGTEIVDADSWGKFKV

SEQ ID NO: 332094 - protein, 13 aa, Homo sapiens
  CDR3 for beta chain variable domain of TCR clone 166047 (TRBV4-1, TRBJ2-2)
CASSQENTGELFF

SEQ ID NO: 332095 - protein, 16 aa, Homo sapiens
  CDR3 for alpha chain variable domain of TCR clone 166048 (TRAV13-1, TRAJ37)
CAASSLVSSNTGKLIF

SEQ ID NO: 332096 - protein, 12 aa, Homo sapiens
  CDR3 for beta chain variable domain of TCR clone 166048 (TRBV6-1, TRBJ2-5)
CASSEGRETQYF

SEQ ID NO: 332097 - protein, 14 aa, Homo sapiens
  CDR3 for alpha chain variable domain of TCR clone 166049 (TRAV1-2, TRAJ8)
CAVREDTGFQKLVF

SEQ ID NO: 332098 - protein, 15 aa, Homo sapiens
  CDR3 for beta chain variable domain of TCR clone 166049 (TRBV19, TRBJ2-1)
CASSTGASAYNEQFF

SEQ ID NO: 332099 - protein, 14 aa, Homo sapiens
  CDR3 for alpha chain variable domain of TCR clone 166050 (TRAV12-1, TRAJ23)
CVVNIGNQGGKLIF

SEQ ID NO: 332100 - protein, 13 aa, Homo sapiens
  CDR3 for beta chain variable domain of TCR clone 166050 (TRBV29-1, TRBJ1-3)
CSVEGGSGNTMYF

SEQ ID NO: 332101 - protein, 16 aa, Homo sapiens
  CDR3 for alpha chain variable domain of TCR clone 166051 (TRAV3, TRAJ37)
CAVRGKGSGNTGKLIF

SEQ ID NO: 332102 - protein, 13 aa, Homo sapiens
  CDR3 for beta chain variable domain of TCR clone 166051 (TRBV7-6, TRBJ1-2)
CASSLVADYGYTF

SEQ ID NO: 332103 - protein, 18 aa, Homo sapiens
  CDR3 for alpha chain variable domain of TCR clone 166052 (TRAV21, TRAJ53)
CAVKGGENSGGSNYQLTF

SEQ ID NO: 332104 - protein, 12 aa, Homo sapiens
  CDR3 for beta chain variable domain of TCR clone 166052 (TRBV11-2, TRBJ2-2)
CASSLPTGELFF

SEQ ID NO: 332105 - protein, 16 aa, Homo sapiens
  CDR3 for alpha chain variable domain of TCR clone 166053 (TRAV13-2, TRAJ28)
CAEKSHSGAGSYQLTF

SEQ ID NO: 332106 - protein, 16 aa, Homo sapiens
  CDR3 for beta chain variable domain of TCR clone 166053 (TRBV19, TRBJ2-1)
CASSKAGPSSYNEQFF

SEQ ID NO: 332107 - protein, 14 aa, Homo sapiens
  CDR3 for alpha chain variable domain of TCR clone 166054 (TRAV1-2, TRAJ16)
CSVNRFSDGQKLLF

SEQ ID NO: 332108 - protein, 15 aa, Homo sapiens
  CDR3 for beta chain variable domain of TCR clone 166054 (TRBV9, TRBJ1-6)
CASSVAGTGDSPPHF

SEQ ID NO: 332109 - protein, 13 aa, Homo sapiens
  CDR3 for alpha chain variable domain of TCR clone 166055 (TRAV12-3, TRAJ9)
CAMRNTGGFKTIF

SEQ ID NO: 332110 - protein, 12 aa, Homo sapiens
  CDR3 for beta chain variable domain of TCR clone 166055 (TRBV5-5, TRBJ2-5)
CASSYFGETQYF

SEQ ID NO: 332111 - protein, 17 aa, Homo sapiens
  CDR3 for alpha chain variable domain of TCR clone 166056 (TRAV12-1, TRAJ42)
CVVIRMNYGGSQGNLIL

SEQ ID NO: 332112 - protein, 13 aa, Homo sapiens
  CDR3 for beta chain variable domain of TCR clone 166056 (TRBV7-2, TRBJ1-1)
CASSLARPAEAFF

SEQ ID NO: 332113 - protein, 12 aa, Homo sapiens
  CDR3 for alpha chain variable domain of TCR clone 166057 (TRAV8-3, TRAJ27)
CAVGAEAGKSTF

SEQ ID NO: 332114 - protein, 14 aa, Homo sapiens
  CDR3 for beta chain variable domain of TCR clone 166057 (TRBV2, TRBJ2-1)
CASRLIVGHDEQVF

SEQ ID NO: 332115 - protein, 13 aa, Homo sapiens
  CDR3 for alpha chain variable domain of TCR clone 166058 (TRAV12-2, TRAJ20)
CAVYPSNDYKLSF

SEQ ID NO: 332116 - protein, 18 aa, Homo sapiens
  CDR3 for beta chain variable domain of TCR clone 166058 (TRBV25-1, TRBJ1-2)
CASSGLQNGQGLICGYTF

SEQ ID NO: 332117 - protein, 14 aa, Homo sapiens
  CDR3 for alpha chain variable domain of TCR clone 166059 (TRAV21, TRAJ21)
CSVKCFGNFNKFYF

SEQ ID NO: 332118 - protein, 13 aa, Homo sapiens
  CDR3 for beta chain variable domain of TCR clone 166059 (TRBV18, TRBJ1-1)
CASSPETKPEAFF

SEQ ID NO: 332119 - protein, 13 aa, Homo sapiens
  CDR3 for alpha chain variable domain of TCR clone 166060 (TRAV38-1, TRAJ42)
CARWGGSQGNLIL

SEQ ID NO: 332120 - protein, 14 aa, Homo sapiens
  CDR3 for beta chain variable domain of TCR clone 166060 (TRBV12-4, TRBJ2-1)
CASSLGQGASEQFF

SEQ ID NO: 332121 - protein, 16 aa, Homo sapiens
  CDR3 for alpha chain variable domain of TCR clone 166061 (TRAV21, TRAJ45)
CAVSWGPGGGADGLTF

SEQ ID NO: 332122 - protein, 14 aa, Homo sapiens
  CDR3 for beta chain variable domain of TCR clone 166061 (TRBV4-2, TRBJ1-2)
CASSPGGSNYGYTF

SEQ ID NO: 332123 - protein, 14 aa, Homo sapiens
  CDR3 for alpha chain variable domain of TCR clone 166062 (TRAV9-2, TRAJ39)
CALYIYNAGNMLAF

SEQ ID NO: 332124 - protein, 15 aa, Homo sapiens
  CDR3 for beta chain variable domain of TCR clone 166062 (TRBV27, TRBJ2-1)
CASSNGGGSSNEQFF

SEQ ID NO: 332125 - protein, 15 aa, Homo sapiens
  CDR3 for alpha chain variable domain of TCR clone 166063 (TRAV12-3, TRAJ49)
CAMAVTPNTGNQFYF

SEQ ID NO: 332126 - protein, 18 aa, Homo sapiens
  CDR3 for beta chain variable domain of TCR clone 166063 (TRBV4-1, TRBJ1-5)
WASSQDPRGQGLNQPQHF

SEQ ID NO: 332127 - protein, 14 aa, Homo sapiens
  CDR3 for alpha chain variable domain of TCR clone 166064 (TRAV13-1, TRAJ35)
CAASKGGFGNVLHC

SEQ ID NO: 332128 - protein, 15 aa, Homo sapiens
  CDR3 for beta chain variable domain of TCR clone 166064 (TRBV2, TRBJ2-1)
CASSELAGSYNEQFF

SEQ ID NO: 332129 - protein, 16 aa, Homo sapiens
  CDR3 for alpha chain variable domain of TCR clone 166065 (TRAV3, TRAJ21)
CAVRDIERGNFNKFYF

SEQ ID NO: 332130 - protein, 13 aa, Homo sapiens
  CDR3 for beta chain variable domain of TCR clone 166065 (TRBV27, TRBJ2-7)
CASSLTTGYAQYF

SEQ ID NO: 332131 - protein, 14 aa, Homo sapiens
  CDR3 for alpha chain variable domain of TCR clone 166066 (TRAV1-2, TRAJ8)
CAVREDTGFQELVF

SEQ ID NO: 332132 - protein, 16 aa, Homo sapiens
  CDR3 for beta chain variable domain of TCR clone 166066 (TRBV7-3, TRBJ2-2)
CASSLKRGTVSGELFF

SEQ ID NO: 332133 - protein, 14 aa, Homo sapiens
  CDR3 for alpha chain variable domain of TCR clone 166067 (TRAV3, TRAJ9)
CAVRGNTGGFKTIF

SEQ ID NO: 332134 - protein, 16 aa, Homo sapiens
  CDR3 for beta chain variable domain of TCR clone 166067 (TRBV4-3, TRBJ2-1)
CASSPALDRGVNEQFF

SEQ ID NO: 332135 - protein, 13 aa, Homo sapiens
  CDR3 for alpha chain variable domain of TCR clone 166068 (TRAV21, TRAJ40)
CAVRQPGTYKYIF

SEQ ID NO: 332136 - protein, 16 aa, Homo sapiens
  CDR3 for beta chain variable domain of TCR clone 166068 (TRBV20-1, TRBJ2-1)
CSAPGLAGSYSDEQFF

SEQ ID NO: 332137 - protein, 13 aa, Homo sapiens
  CDR3 for alpha chain variable domain of TCR clone 166069 (TRAV23/DV6, TRAJ15)
CAALPAGRNCSDL

SEQ ID NO: 332138 - protein, 14 aa, Homo sapiens
  CDR3 for beta chain variable domain of TCR clone 166069 (TRBV7-9, TRBJ1-2)
CASSRQGANYGYTV

SEQ ID NO: 332139 - protein, 14 aa, Homo sapiens
  CDR3 for alpha chain variable domain of TCR clone 166070 (TRAV23/DV6, TRAJ22)
CAASVSGSARQLPF

SEQ ID NO: 332140 - protein, 13 aa, Homo sapiens
  CDR3 for beta chain variable domain of TCR clone 166070 (TRBV11-2, TRBJ2-5)
CASSRGPSETQYF

SEQ ID NO: 332141 - protein, 13 aa, Homo sapiens
  CDR3 for alpha chain variable domain of TCR clone 166071 (TRAV21, TRAJ57)
CAVTQGGSEKLVF

SEQ ID NO: 332142 - protein, 16 aa, Homo sapiens
  CDR3 for beta chain variable domain of TCR clone 166071 (TRBV29-1, TRBJ2-7)
CSVDDAEDGMAYEQYF

SEQ ID NO: 332143 - protein, 17 aa, Homo sapiens
  CDR3 for alpha chain variable domain of TCR clone 166072 (TRAV3, TRAJ42)
CAVRDRDYGGSQGNLIF

SEQ ID NO: 332144 - protein, 11 aa, Homo sapiens
  CDR3 for beta chain variable domain of TCR clone 166072 (TRBV12-4, TRBJ2-3)
CASTATDTQYL

SEQ ID NO: 332145 - protein, 12 aa, Homo sapiens
  CDR3 for alpha chain variable domain of TCR clone 166073 (TRAV27, TRAJ13)
CAGAGGYQKVTF

SEQ ID NO: 332146 - protein, 14 aa, Homo sapiens
  CDR3 for beta chain variable domain of TCR clone 166073 (TRBV6-1, TRBJ2-2)
CASRGQSYTGELFF

SEQ ID NO: 332147 - protein, 12 aa, Homo sapiens
  CDR3 for alpha chain variable domain of TCR clone 166074 (TRAV12-3, TRAJ40)
CAMSSGTYRYIF

SEQ ID NO: 332148 - protein, 20 aa, Homo sapiens
  CDR3 for beta chain variable domain of TCR clone 166074 (TRBV7-8, TRBJ2-2)
CASSHLFPGPTIHITGELFF

SEQ ID NO: 332149 - protein, 19 aa, Homo sapiens
  CDR3 for alpha chain variable domain of TCR clone 166075 (TRAV1-2, TRAJ26)
CLLPLCCERPDNYGQNFVF

SEQ ID NO: 332150 - protein, 16 aa, Homo sapiens
  CDR3 for beta chain variable domain of TCR clone 166075 (TRBV7-2, TRBJ2-5)
CASSSKWLSGQETQYF

SEQ ID NO: 332151 - protein, 18 aa, Homo sapiens
  CDR3 for alpha chain variable domain of TCR clone 166076 (TRAV21, TRAJ52)
CAVRSSPAGGTSYGKLTF

SEQ ID NO: 332152 - protein, 17 aa, Homo sapiens
  CDR3 for beta chain variable domain of TCR clone 166076 (TRBV13, TRBJ2-3)
CASRLSRVAGGRNTQYF

SEQ ID NO: 332153 - protein, 14 aa, Homo sapiens
  CDR3 for alpha chain variable domain of TCR clone 166077 (TRAV1-2, TRAJ8)
CAVREGAGFQKLVF

SEQ ID NO: 332154 - protein, 16 aa, Homo sapiens
  CDR3 for beta chain variable domain of TCR clone 166077 (TRBV19, TRBJ2-3)
CASGTGPNDGTDTQYF

SEQ ID NO: 332155 - protein, 16 aa, Homo sapiens
  CDR3 for alpha chain variable domain of TCR clone 166078 (TRAV27, TRAJ53)
CAAPEGSGGSNYKLTF

SEQ ID NO: 332156 - protein, 15 aa, Homo sapiens
  CDR3 for beta chain variable domain of TCR clone 166078 (TRBV20-1, TRBJ1-1)
CSASRGVTWNTEAFF

SEQ ID NO: 332157 - protein, 12 aa, Homo sapiens
  CDR3 for alpha chain variable domain of TCR clone 166079 (TRAV2, TRAJ26)
CAVGEYGQNFVF

SEQ ID NO: 332158 - protein, 12 aa, Homo sapiens
  CDR3 for beta chain variable domain of TCR clone 166079 (TRBV7-8, TRBJ2-7)
CASSLGDREQYF

SEQ ID NO: 332159 - protein, 11 aa, Homo sapiens
  CDR3 for alpha chain variable domain of TCR clone 166080 (TRAV3, TRAJ13)
CAVTSYQKVTF

SEQ ID NO: 332160 - protein, 15 aa, Homo sapiens
  CDR3 for beta chain variable domain of TCR clone 166080 (TRBV6-1, TRBJ2-3)
CASSERGGITDTQYF

SEQ ID NO: 332161 - protein, 16 aa, Homo sapiens
  CDR3 for alpha chain variable domain of TCR clone 166081 (TRAV3, TRAJ10)
CAVRDMRAGGGNKLTF

SEQ ID NO: 332162 - protein, 14 aa, Homo sapiens
  CDR3 for beta chain variable domain of TCR clone 166081 (TRBV6-1, TRBJ2-1)
CASAKDGFYNEQFF

SEQ ID NO: 332163 - protein, 14 aa, Homo sapiens
  CDR3 for alpha chain variable domain of TCR clone 166082 (TRAV20, TRAJ42)
CAVQAGGSQGKTIF

SEQ ID NO: 332164 - protein, 14 aa, Homo sapiens
  CDR3 for beta chain variable domain of TCR clone 166082 (TRBV28, TRBJ1-2)
CASRIQGANYGYTF

SEQ ID NO: 332165 - protein, 11 aa, Homo sapiens
  CDR3 for alpha chain variable domain of TCR clone 166083 (TRAV12-1, TRAJ43)
CVEYDNNDMRF

SEQ ID NO: 332166 - protein, 15 aa, Homo sapiens
  CDR3 for beta chain variable domain of TCR clone 166083 (TRBV18, TRBJ2-5)
CASSPRASEAETQFF

SEQ ID NO: 332167 - protein, 12 aa, Homo sapiens
  CDR3 for alpha chain variable domain of TCR clone 166084 (TRAV1-1, TRAJ43)
CAPRVSSNDMRF

SEQ ID NO: 332168 - protein, 15 aa, Homo sapiens
  CDR3 for beta chain variable domain of TCR clone 166084 (TRBV5-1, TRBJ2-7)
CASSLGDFTTYDQYF

SEQ ID NO: 332169 - protein, 12 aa, Homo sapiens
  CDR3 for alpha chain variable domain of TCR clone 166085 (TRAV30, TRAJ43)
CGTEERGNDMRF

SEQ ID NO: 332170 - protein, 13 aa, Homo sapiens
  CDR3 for beta chain variable domain of TCR clone 166085 (TRBV19, TRBJ1-2)
CASSQGQVYGYTF

SEQ ID NO: 332171 - protein, 14 aa, Homo sapiens
  CDR3 for alpha chain variable domain of TCR clone 166086 (TRAV3, TRAJ16)
CAVSGFSDGQKLLF

SEQ ID NO: 332172 - protein, 14 aa, Homo sapiens
  CDR3 for beta chain variable domain of TCR clone 166086 (TRBV18, TRBJ2-5)
CASSPGVSQETQYF

SEQ ID NO: 332173 - protein, 17 aa, Homo sapiens
  CDR3 for alpha chain variable domain of TCR clone 166087 (TRAV4, TRAJ42)
CLVGVLNYGVSQGNLLF

SEQ ID NO: 332174 - protein, 12 aa, Homo sapiens
  CDR3 for beta chain variable domain of TCR clone 166087 (TRBV20-1, TRBJ2-1)
CSAQYTYNEQFF

SEQ ID NO: 332175 - protein, 17 aa, Homo sapiens
  CDR3 for alpha chain variable domain of TCR clone 166088 (TRAV4, TRAJ13)
CLVGVQGSSGGYQKVTF

SEQ ID NO: 332176 - protein, 16 aa, Homo sapiens
  CDR3 for beta chain variable domain of TCR clone 166088 (TRBV28, TRBJ2-7)
CASSLFLETGGPEQYF

SEQ ID NO: 332177 - protein, 15 aa, Homo sapiens
  CDR3 for alpha chain variable domain of TCR clone 166089 (TRAV21, TRAJ56)
CAVTKSTGANSKLTF

SEQ ID NO: 332178 - protein, 14 aa, Homo sapiens
  CDR3 for beta chain variable domain of TCR clone 166089 (TRBV20-1, TRBJ2-3)
CSARVRGSTDTQYF

SEQ ID NO: 332179 - protein, 14 aa, Homo sapiens
  CDR3 for alpha chain variable domain of TCR clone 166090 (TRAV34, TRAJ44)
CGADGTGTASKLTF

SEQ ID NO: 332180 - protein, 13 aa, Homo sapiens
  CDR3 for beta chain variable domain of TCR clone 166090 (TRBV24-1, TRBJ1-4)
CATNNGRSEKLFF

SEQ ID NO: 332181 - protein, 13 aa, Homo sapiens
  CDR3 for alpha chain variable domain of TCR clone 166091 (TRAV21, TRAJ20)
CAVGVFADYKLSF

SEQ ID NO: 332182 - protein, 14 aa, Homo sapiens
  CDR3 for beta chain variable domain of TCR clone 166091 (TRBV6-6, TRBJ2-7)
CASSDSGAGYEQYF

SEQ ID NO: 332183 - protein, 14 aa, Homo sapiens
  CDR3 for alpha chain variable domain of TCR clone 166092 (TRAV30, TRAJ26)
CGTEIVSYGQNFVF

SEQ ID NO: 332184 - protein, 13 aa, Homo sapiens
  CDR3 for beta chain variable domain of TCR clone 166092 (TRBV7-3, TRBJ1-1)
CASSQDWGADAFF

SEQ ID NO: 332185 - protein, 12 aa, Homo sapiens
  CDR3 for alpha chain variable domain of TCR clone 166093 (TRAV12-2, TRAJ20)
CAVRPSDYKLSF

SEQ ID NO: 332186 - protein, 15 aa, Homo sapiens
  CDR3 for beta chain variable domain of TCR clone 166093 (TRBV12-5, TRBJ2-2)
CASGRLGGNTGELFF

SEQ ID NO: 332187 - protein, 14 aa, Homo sapiens
  CDR3 for alpha chain variable domain of TCR clone 166094 (TRAV21, TRAJ45)
CAVHSGGGADGLTF

SEQ ID NO: 332188 - protein, 14 aa, Homo sapiens
  CDR3 for beta chain variable domain of TCR clone 166094 (TRBV20-1, TRBJ2-1)
CSARRVAEANEQFF

SEQ ID NO: 332189 - protein, 14 aa, Homo sapiens
  CDR3 for alpha chain variable domain of TCR clone 166095 (TRAV16, TRAJ26)
CALSSANYGQNFVF

SEQ ID NO: 332190 - protein, 14 aa, Homo sapiens
  CDR3 for beta chain variable domain of TCR clone 166095 (TRBV18, TRBJ2-7)
CASSPRGGAYEQYF

SEQ ID NO: 332191 - protein, 13 aa, Homo sapiens
  CDR3 for alpha chain variable domain of TCR clone 166096 (TRAV36/DV7, TRAJ7)
CAGTRYGNNRLAF

SEQ ID NO: 332192 - protein, 14 aa, Homo sapiens
  CDR3 for beta chain variable domain of TCR clone 166096 (TRBV19, TRBJ2-1)
CASPTFVVSGEQFF

SEQ ID NO: 332193 - protein, 14 aa, Homo sapiens
  CDR3 for alpha chain variable domain of TCR clone 166097 (TRAV9-2, TRAJ39)
CALYIYNAGNMLTF

SEQ ID NO: 332194 - protein, 14 aa, Homo sapiens
  CDR3 for beta chain variable domain of TCR clone 166097 (TRBV7-6, TRBJ2-3)
CASSVAGGTDTPYF

SEQ ID NO: 332195 - protein, 18 aa, Homo sapiens
  CDR3 for alpha chain variable domain of TCR clone 166098 (TRAV13-1, TRAJ52)
CAAKNPNAGGTSYGKLTF

SEQ ID NO: 332196 - protein, 14 aa, Homo sapiens
  CDR3 for beta chain variable domain of TCR clone 166098 (TRBV12-4, TRBJ2-1)
CASSLGQGASEQFF

SEQ ID NO: 332197 - protein, 13 aa, Homo sapiens
  CDR3 for alpha chain variable domain of TCR clone 166099 (TRAV2, TRAJ40)
CAVVTSGTYKYIF

SEQ ID NO: 332198 - protein, 13 aa, Homo sapiens
  CDR3 for beta chain variable domain of TCR clone 166099 (TRBV7-3, TRBJ2-5)
CASNFRGGETQYF

SEQ ID NO: 332199 - protein, 15 aa, Homo sapiens
  CDR3 for alpha chain variable domain of TCR clone 166100 (TRAV26-1, TRAJ44)
FIVRANTGTASKLTF

SEQ ID NO: 332200 - protein, 16 aa, Homo sapiens
  CDR3 for beta chain variable domain of TCR clone 166100 (TRBV7-7, TRBJ2-1)
CASSLASGTYYNEQFF

SEQ ID NO: 332201 - protein, 12 aa, Homo sapiens
  CDR3 for alpha chain variable domain of TCR clone 166101 (TRAV21, TRAJ31)
CVLAGNNARLMF

SEQ ID NO: 332202 - protein, 15 aa, Homo sapiens
  CDR3 for beta chain variable domain of TCR clone 166101 (TRBV2, TRBJ2-1)
CASSEEREGDNEQFF

SEQ ID NO: 332203 - protein, 14 aa, Homo sapiens
  CDR3 for alpha chain variable domain of TCR clone 166102 (TRAV17, TRAJ57)
CATDPQGGSEKLVF

SEQ ID NO: 332204 - protein, 18 aa, Homo sapiens
  CDR3 for beta chain variable domain of TCR clone 166102 (TRBV6-5, TRBJ2-6)
CASSYSGNMESGANVLTV

SEQ ID NO: 332205 - protein, 12 aa, Homo sapiens
  CDR3 for alpha chain variable domain of TCR clone 166103 (TRAV3, TRAJ43)
CAVRDPNNDMRF

SEQ ID NO: 332206 - protein, 15 aa, Homo sapiens
  CDR3 for beta chain variable domain of TCR clone 166103 (TRBV6-5, TRBJ2-1)
CASSYDAGAGNEQVF

SEQ ID NO: 332207 - protein, 14 aa, Homo sapiens
  CDR3 for alpha chain variable domain of TCR clone 166104 (TRAV12-3, TRAJ22)
CAMSLFGSARQLIF

SEQ ID NO: 332208 - protein, 11 aa, Homo sapiens
  CDR3 for beta chain variable domain of TCR clone 166104 (TRBV12-4, TRBJ2-2)
CASSAAGELFF

SEQ ID NO: 332209 - protein, 16 aa, Homo sapiens
  CDR3 for alpha chain variable domain of TCR clone 166105 (TRAV3, TRAJ10)
CAVRDMRSGGGNKLTF

SEQ ID NO: 332210 - protein, 15 aa, Homo sapiens
  CDR3 for beta chain variable domain of TCR clone 166105 (TRBV15, TRBJ1-5)
CATSTTGVVNQTQHF

SEQ ID NO: 332211 - protein, 11 aa, Homo sapiens
  CDR3 for alpha chain variable domain of TCR clone 166106 (TRAV3, TRAJ21)
CAVGNFNKFYF

SEQ ID NO: 332212 - protein, 14 aa, Homo sapiens
  CDR3 for beta chain variable domain of TCR clone 166106 (TRBV19, TRBJ2-1)
CASPTFVLSGGQFF

SEQ ID NO: 332213 - protein, 14 aa, Homo sapiens
  CDR3 for alpha chain variable domain of TCR clone 166107 (TRAV8-4, TRAJ13)
CAVTLSGGYQKVTF

SEQ ID NO: 332214 - protein, 13 aa, Homo sapiens
  CDR3 for beta chain variable domain of TCR clone 166107 (TRBV7-3, TRBJ2-1)
CQQLSGGTNGQFF

SEQ ID NO: 332215 - protein, 12 aa, Homo sapiens
  CDR3 for alpha chain variable domain of TCR clone 166108 (TRAV13-1, TRAJ21)
CAAFFNFNKFYF

SEQ ID NO: 332216 - protein, 14 aa, Homo sapiens
  CDR3 for beta chain variable domain of TCR clone 166108 (TRBV4-1, TRBJ2-7)
CASRPTSGSYEQYF

SEQ ID NO: 332217 - protein, 13 aa, Homo sapiens
  CDR3 for alpha chain variable domain of TCR clone 166109 (TRAV20, TRAJ34)
CAVSSYNTDKPIF

SEQ ID NO: 332218 - protein, 15 aa, Homo sapiens
  CDR3 for beta chain variable domain of TCR clone 166109 (TRBV20-1, TRBJ1-2)
CSAAGEGARIYGYTF

SEQ ID NO: 332219 - protein, 14 aa, Homo sapiens
  CDR3 for alpha chain variable domain of TCR clone 166110 (TRAV12-1, TRAJ40)
CVVNRDSGTYKYIF

SEQ ID NO: 332220 - protein, 16 aa, Homo sapiens
  CDR3 for beta chain variable domain of TCR clone 166110 (TRBV10-3, TRBJ2-1)
CAISGVGDGGGGEQFF

SEQ ID NO: 332221 - protein, 18 aa, Homo sapiens
  CDR3 for alpha chain variable domain of TCR clone 166111 (TRAV21, TRAJ52)
CAVRPSPAGGTSYGKLTF

SEQ ID NO: 332222 - protein, 17 aa, Homo sapiens
  CDR3 for beta chain variable domain of TCR clone 166111 (TRBV13, TRBJ2-3)
CASSLSRVAGGSNTQYL

SEQ ID NO: 332223 - protein, 11 aa, Homo sapiens
  CDR3 for alpha chain variable domain of TCR clone 166112 (TRAV13-1, TRAJ49)
CACVGGNQFYF

SEQ ID NO: 332224 - protein, 13 aa, Homo sapiens
  CDR3 for beta chain variable domain of TCR clone 166112 (TRBV10-3, TRBJ2-7)
CASKLAVNYEQYF

SEQ ID NO: 332225 - protein, 18 aa, Homo sapiens
  CDR3 for alpha chain variable domain of TCR clone 166113 (TRAV21, TRAJ52)
CAVRPSPAGGTNYGKLTF

SEQ ID NO: 332226 - protein, 14 aa, Homo sapiens
  CDR3 for beta chain variable domain of TCR clone 166113 (TRBV19, TRBJ2-1)
CASPTFVLSGEQFF

SEQ ID NO: 332227 - protein, 14 aa, Homo sapiens
  CDR3 for alpha chain variable domain of TCR clone 166114 (TRAV1-2, TRAJ6)
CAVSLPGGSYIPTF

SEQ ID NO: 332228 - protein, 15 aa, Homo sapiens
  CDR3 for beta chain variable domain of TCR clone 166114 (TRBV28, TRBJ2-7)
YASSPGGGGFYEQYF

SEQ ID NO: 332229 - protein, 16 aa, Homo sapiens
  CDR3 for alpha chain variable domain of TCR clone 166115 (TRAV3, TRAJ37)
CAVRGKGSGNTGKLIF

SEQ ID NO: 332230 - protein, 15 aa, Homo sapiens
  CDR3 for beta chain variable domain of TCR clone 166115 (TRBV11-2, TRBJ2-1)
CASSKNRGLIYEQFF

SEQ ID NO: 332231 - protein, 10 aa, Homo sapiens
  CDR3 for alpha chain variable domain of TCR clone 166116 (TRAV1-1, TRAJ5)
CAVIYEGTYF

SEQ ID NO: 332232 - protein, 15 aa, Homo sapiens
  CDR3 for beta chain variable domain of TCR clone 166116 (TRBV4-1, TRBJ1-4)
CASSDTGGTNEKLFF

SEQ ID NO: 332233 - protein, 14 aa, Homo sapiens
  CDR3 for alpha chain variable domain of TCR clone 166117 (TRAV27, TRAJ22)
CAGLPSGSARQLTF

SEQ ID NO: 332234 - protein, 11 aa, Homo sapiens
  CDR3 for beta chain variable domain of TCR clone 166117 (TRBV19, TRBJ1-1)
CASSIGSEAFF

SEQ ID NO: 332235 - protein, 16 aa, Homo sapiens
  CDR3 for alpha chain variable domain of TCR clone 166118 (TRAV30, TRAJ24)
CGTEIVDADSWGQFQF

SEQ ID NO: 332236 - protein, 14 aa, Homo sapiens
  CDR3 for beta chain variable domain of TCR clone 166118 (TRBV12-5, TRBJ2-5)
CASGSRTHQENQYF

SEQ ID NO: 332237 - protein, 13 aa, Homo sapiens
  CDR3 for alpha chain variable domain of TCR clone 166119 (TRAV36/DV7, TRAJ49)
CAGDSNTGNQFYF

SEQ ID NO: 332238 - protein, 16 aa, Homo sapiens
  CDR3 for beta chain variable domain of TCR clone 166119 (TRBV19, TRBJ2-1)
CASSKAGPSSYNEQFF

SEQ ID NO: 332239 - protein, 16 aa, Homo sapiens
  CDR3 for alpha chain variable domain of TCR clone 166120 (TRAV3, TRAJ5)
CAVRNLLDTGRRALTF

SEQ ID NO: 332240 - protein, 16 aa, Homo sapiens
  CDR3 for beta chain variable domain of TCR clone 166120 (TRBV4-2, TRBJ2-7)
CASSQEGLAISYEQYF

SEQ ID NO: 332241 - protein, 14 aa, Homo sapiens
  CDR3 for alpha chain variable domain of TCR clone 166121 (TRAV8-4, TRAJ9)
CAVVGNTGGFKTIF

SEQ ID NO: 332242 - protein, 15 aa, Homo sapiens
  CDR3 for beta chain variable domain of TCR clone 166121 (TRBV6-1, TRBJ1-3)
CASSEFGFSGNTIYF

SEQ ID NO: 332243 - protein, 20 aa, Homo sapiens
  CDR3 for alpha chain variable domain of TCR clone 166122 (TRAV12-1, TRAJ42)
SSVIQPPTSVTGGSQGNLIF

SEQ ID NO: 332244 - protein, 18 aa, Homo sapiens
  CDR3 for beta chain variable domain of TCR clone 166122 (TRBV11-2, TRBJ2-3)
CAGSLGGASRGAPNTQYF

SEQ ID NO: 332245 - protein, 12 aa, Homo sapiens
  CDR3 for alpha chain variable domain of TCR clone 166123 (TRAV8-3, TRAJ26)
CDGDNYGQNFVF

SEQ ID NO: 332246 - protein, 13 aa, Homo sapiens
  CDR3 for beta chain variable domain of TCR clone 166123 (TRBV19, TRBJ1-3)
CASRLSLGNTIYF

SEQ ID NO: 332247 - protein, 14 aa, Homo sapiens
  CDR3 for alpha chain variable domain of TCR clone 166124 (TRAV38-1, TRAJ45)
CASHSGGGAEDSPL

SEQ ID NO: 332248 - protein, 13 aa, Homo sapiens
  CDR3 for beta chain variable domain of TCR clone 166124 (TRBV10-3, TRBJ1-2)
CAISERDSYGYTF

SEQ ID NO: 332249 - protein, 13 aa, Homo sapiens
  CDR3 for alpha chain variable domain of TCR clone 166125 (TRAV2, TRAJ40)
CAVVTSGTYKYIF

SEQ ID NO: 332250 - protein, 13 aa, Homo sapiens
  CDR3 for beta chain variable domain of TCR clone 166125 (TRBV29-1, TRBJ1-1)
CSVGDSRNTEAFF

SEQ ID NO: 332251 - protein, 11 aa, Homo sapiens
  CDR3 for alpha chain variable domain of TCR clone 166126 (TRAV4, TRAJ31)
CLVGLNARLMF

SEQ ID NO: 332252 - protein, 16 aa, Homo sapiens
  CDR3 for beta chain variable domain of TCR clone 166126 (TRBV15, TRBJ2-6)
CATSGNGGFLANVLTF

SEQ ID NO: 332253 - protein, 17 aa, Homo sapiens
  CDR3 for alpha chain variable domain of TCR clone 166127 (TRAV3, TRAJ6)
CAVRDGPRAGGSYIPTF

SEQ ID NO: 332254 - protein, 13 aa, Homo sapiens
  CDR3 for beta chain variable domain of TCR clone 166127 (TRBV15, TRBJ2-7)
CAASTTGHYEQYF

SEQ ID NO: 332255 - protein, 17 aa, Homo sapiens
  CDR3 for alpha chain variable domain of TCR clone 166128 (TRAV26-1, TRAJ11)
CIVRVGQSNSGYSTLTF

SEQ ID NO: 332256 - protein, 16 aa, Homo sapiens
  CDR3 for beta chain variable domain of TCR clone 166128 (TRBV2, TRBJ2-3)
CASSTSVEGVTDTQYF

SEQ ID NO: 332257 - protein, 15 aa, Homo sapiens
  CDR3 for alpha chain variable domain of TCR clone 166129 (TRAV35, TRAJ42)
CAGQGYGGSQGNFIF

SEQ ID NO: 332258 - protein, 13 aa, Homo sapiens
  CDR3 for beta chain variable domain of TCR clone 166129 (TRBV7-2, TRBJ1-1)
CASSLVQGAEAFF

SEQ ID NO: 332259 - protein, 14 aa, Homo sapiens
  CDR3 for alpha chain variable domain of TCR clone 166130 (TRAV1-2, TRAJ16)
CAVNRFSDGQKLLF

SEQ ID NO: 332260 - protein, 16 aa, Homo sapiens
  CDR3 for beta chain variable domain of TCR clone 166130 (TRBV7-2, TRBJ2-1)
CASSLLAQLFSKEQFF

SEQ ID NO: 332261 - protein, 13 aa, Homo sapiens
  CDR3 for alpha chain variable domain of TCR clone 166131 (TRAV40, TRAJ41)
CLLGTQSGYALNF

SEQ ID NO: 332262 - protein, 15 aa, Homo sapiens
  CDR3 for beta chain variable domain of TCR clone 166131 (TRBV4-2, TRBJ1-1)
CASSQLQGASAEAFF

SEQ ID NO: 332263 - protein, 16 aa, Homo sapiens
  CDR3 for alpha chain variable domain of TCR clone 166132 (TRAV16, TRAJ52)
CAISAAGGTSYGKLTF

SEQ ID NO: 332264 - protein, 17 aa, Homo sapiens
  CDR3 for beta chain variable domain of TCR clone 166132 (TRBV11-2, TRBJ2-1)
CASSLYPPGVEYNEQFF

SEQ ID NO: 332265 - protein, 15 aa, Homo sapiens
  CDR3 for alpha chain variable domain of TCR clone 166133 (TRAV3, TRAJ22)
CAVRDRGGSARQLTF

SEQ ID NO: 332266 - protein, 13 aa, Homo sapiens
  CDR3 for beta chain variable domain of TCR clone 166133 (TRBV20-1, TRBJ2-7)
CSATHTSGYEQYF

SEQ ID NO: 332267 - protein, 12 aa, Homo sapiens
  CDR3 for alpha chain variable domain of TCR clone 166134 (TRAV12-1, TRAJ40)
CVFYSGTYKYIF

SEQ ID NO: 332268 - protein, 18 aa, Homo sapiens
  CDR3 for beta chain variable domain of TCR clone 166134 (TRBV4-1, TRBJ1-5)
CASSQDPRGQGLNQPQHF

SEQ ID NO: 332269 - protein, 14 aa, Homo sapiens
  CDR3 for alpha chain variable domain of TCR clone 166135 (TRAV16, TRAJ37)
CALDISGNTGKLIF

SEQ ID NO: 332270 - protein, 14 aa, Homo sapiens
  CDR3 for beta chain variable domain of TCR clone 166135 (TRBV25-1, TRBJ1-1)
CASTHLGGNTEAFF

SEQ ID NO: 332271 - protein, 14 aa, Homo sapiens
  CDR3 for alpha chain variable domain of TCR clone 166136 (TRAV8-1, TRAJ39)
CAVNASNAGNMLTF

SEQ ID NO: 332272 - protein, 11 aa, Homo sapiens
  CDR3 for beta chain variable domain of TCR clone 166136 (TRBV12-4, TRBJ2-3)
CASTATDTQYF

SEQ ID NO: 332273 - protein, 11 aa, Homo sapiens
  CDR3 for alpha chain variable domain of TCR clone 166137 (TRAV13-1, TRAJ39)
CASHAGNMLTL

SEQ ID NO: 332274 - protein, 15 aa, Homo sapiens
  CDR3 for beta chain variable domain of TCR clone 166137 (TRBV28, TRBJ2-1)
CASSIIAGGRSEQFF

SEQ ID NO: 332275 - protein, 13 aa, Homo sapiens
  CDR3 for alpha chain variable domain of TCR clone 166138 (TRAV30, TRAJ24)
CGTVTDSWGKVQF

SEQ ID NO: 332276 - protein, 16 aa, Homo sapiens
  CDR3 for beta chain variable domain of TCR clone 166138 (TRBV7-3, TRBJ2-2)
CASSLKRGTLSGELFF

SEQ ID NO: 332277 - protein, 14 aa, Homo sapiens
  CDR3 for alpha chain variable domain of TCR clone 166139 (TRAV26-1, TRAJ38)
CIADNAGHNRKRIW

SEQ ID NO: 332278 - protein, 13 aa, Homo sapiens
  CDR3 for beta chain variable domain of TCR clone 166139 (TRBV20-1, TRBJ1-1)
CSARGGGNTEAFF

SEQ ID NO: 332279 - protein, 14 aa, Homo sapiens
  CDR3 for alpha chain variable domain of TCR clone 166140 (TRAV12-2, TRAJ13)
CAVKTTGGYQKVTF

SEQ ID NO: 332280 - protein, 15 aa, Homo sapiens
  CDR3 for beta chain variable domain of TCR clone 166140 (TRBV2, TRBJ2-7)
CTSSGLERGGVEQYF

SEQ ID NO: 332281 - protein, 19 aa, Homo sapiens
  CDR3 for alpha chain variable domain of TCR clone 166141 (TRAV1-2, TRAJ26)
CLLPLCCERPDNYGQHFVF

SEQ ID NO: 332282 - protein, 12 aa, Homo sapiens
  CDR3 for beta chain variable domain of TCR clone 166141 (TRBV20-1, TRBJ2-1)
CSAQYTYNEQFF

SEQ ID NO: 332283 - protein, 14 aa, Homo sapiens
  CDR3 for alpha chain variable domain of TCR clone 166142 (TRAV13-1, TRAJ35)
CAASKGGFGNMLHC

SEQ ID NO: 332284 - protein, 13 aa, Homo sapiens
  CDR3 for beta chain variable domain of TCR clone 166142 (TRBV7-3, TRBJ1-1)
CASSQDWGAEAFL

SEQ ID NO: 332285 - protein, 15 aa, Homo sapiens
  CDR3 for alpha chain variable domain of TCR clone 166143 (TRAV20, TRAJ53)
CAVQASGGSNYKLTF

SEQ ID NO: 332286 - protein, 17 aa, Homo sapiens
  CDR3 for beta chain variable domain of TCR clone 166143 (TRBV11-2, TRBJ2-1)
CASSLYPPGVEYNEQFF

SEQ ID NO: 332287 - protein, 13 aa, Homo sapiens
  CDR3 for alpha chain variable domain of TCR clone 166144 (TRAV8-3, TRAJ28)
CAVGAVGSYQLTF

SEQ ID NO: 332288 - protein, 14 aa, Homo sapiens
  CDR3 for beta chain variable domain of TCR clone 166144 (TRBV7-3, TRBJ2-1)
CASSLSGSYNEQFF

SEQ ID NO: 332289 - protein, 13 aa, Homo sapiens
  CDR3 for alpha chain variable domain of TCR clone 166145 (TRAV21, TRAJ27)
CAARPGNAGKSTF

SEQ ID NO: 332290 - protein, 15 aa, Homo sapiens
  CDR3 for beta chain variable domain of TCR clone 166145 (TRBV24-1, TRBJ2-1)
CATSEPGQGYNEQFF

SEQ ID NO: 332291 - protein, 16 aa, Homo sapiens
  CDR3 for alpha chain variable domain of TCR clone 166146 (TRAV30, TRAJ24)
CGTEIVDADSWGKFQF

SEQ ID NO: 332292 - protein, 15 aa, Homo sapiens
  CDR3 for beta chain variable domain of TCR clone 166146 (TRBV10-3, TRBJ2-2)
CAISEGDRAAGELFF

SEQ ID NO: 332293 - protein, 16 aa, Homo sapiens
  CDR3 for alpha chain variable domain of TCR clone 166147 (TRAV27, TRAJ34)
CAGGGLGDYNTDKHIF

SEQ ID NO: 332294 - protein, 15 aa, Homo sapiens
  CDR3 for beta chain variable domain of TCR clone 166147 (TRBV9, TRBJ1-4)
CASSVGGSTNEKLFF

SEQ ID NO: 332295 - protein, 14 aa, Homo sapiens
  CDR3 for alpha chain variable domain of TCR clone 166148 (TRAV38-1, TRAJ45)
CAYYSGGGAGGLTF

SEQ ID NO: 332296 - protein, 13 aa, Homo sapiens
  CDR3 for beta chain variable domain of TCR clone 166148 (TRBV19, TRBJ1-2)
CASSVPGQDGYTF

SEQ ID NO: 332297 - protein, 14 aa, Homo sapiens
  CDR3 for alpha chain variable domain of TCR clone 166149 (TRAV1-1, TRAJ27)
FAVIYNTNAGKSTF

SEQ ID NO: 332298 - protein, 18 aa, Homo sapiens
  CDR3 for beta chain variable domain of TCR clone 166149 (TRBV7-9, TRBJ2-2)
CASSFRDLNAGNTGELFF

SEQ ID NO: 332299 - protein, 13 aa, Homo sapiens
  CDR3 for alpha chain variable domain of TCR clone 166150 (TRAV35, TRAJ33)
CAGQLYGVYQLIW

SEQ ID NO: 332300 - protein, 13 aa, Homo sapiens
  CDR3 for beta chain variable domain of TCR clone 166150 (TRBV9, TRBJ2-1)
CASSPSGGSEQFF

SEQ ID NO: 332301 - protein, 14 aa, Homo sapiens
  CDR3 for alpha chain variable domain of TCR clone 166151 (TRAV12-1, TRAJ26)
CVVEGSNYGQNFVF

SEQ ID NO: 332302 - protein, 17 aa, Homo sapiens
  CDR3 for beta chain variable domain of TCR clone 166151 (TRBV11-2, TRBJ2-6)
CASSQRDIFSGANVLTF

SEQ ID NO: 332303 - protein, 14 aa, Homo sapiens
  CDR3 for alpha chain variable domain of TCR clone 166152 (TRAV35, TRAJ50)
CAGHRKTSYDKVIF

SEQ ID NO: 332304 - protein, 16 aa, Homo sapiens
  CDR3 for beta chain variable domain of TCR clone 166152 (TRBV24-1, TRBJ2-3)
CATSDPGTGATDTQYF

SEQ ID NO: 332305 - protein, 14 aa, Homo sapiens
  CDR3 for alpha chain variable domain of TCR clone 166153 (TRAV1-2, TRAJ16)
CAVNRFSDGQKLLF

SEQ ID NO: 332306 - protein, 14 aa, Homo sapiens
  CDR3 for beta chain variable domain of TCR clone 166153 (TRBV7-2, TRBJ2-7)
CASSPKASFYEQYF

SEQ ID NO: 332307 - protein, 12 aa, Homo sapiens
  CDR3 for alpha chain variable domain of TCR clone 166154 (TRAV16, TRAJ10)
CSRTGGGNKPTF

SEQ ID NO: 332308 - protein, 11 aa, Homo sapiens
  CDR3 for beta chain variable domain of TCR clone 166154 (TRBV29-1, TRBJ2-5)
CSEDRTGTQYF

SEQ ID NO: 332309 - protein, 15 aa, Homo sapiens
  CDR3 for alpha chain variable domain of TCR clone 166155 (TRAV8-2, TRAJ24)
CVVSDRTDSWGKLQV

SEQ ID NO: 332310 - protein, 14 aa, Homo sapiens
  CDR3 for beta chain variable domain of TCR clone 166155 (TRBV19, TRBJ2-7)
CASSIEASSYEQYF

SEQ ID NO: 332311 - protein, 14 aa, Homo sapiens
  CDR3 for alpha chain variable domain of TCR clone 166156 (TRAV1-2, TRAJ27)
CTPSEYTNAGKSTF

SEQ ID NO: 332312 - protein, 18 aa, Homo sapiens
  CDR3 for beta chain variable domain of TCR clone 166156 (TRBV28, TRBJ1-2)
CASRQQQGKRGSNYGYTF

SEQ ID NO: 332313 - protein, 13 aa, Homo sapiens
  CDR3 for alpha chain variable domain of TCR clone 166157 (TRAV27, TRAJ54)
CAGAAQGAQKLVF

SEQ ID NO: 332314 - protein, 14 aa, Homo sapiens
  CDR3 for beta chain variable domain of TCR clone 166157 (TRBV2, TRBJ2-1)
CASSEALIYNEQFF

SEQ ID NO: 332315 - protein, 17 aa, Homo sapiens
  CDR3 for alpha chain variable domain of TCR clone 166158 (TRAV3, TRAJ6)
CAVRDGPRAGGSYIPTS

SEQ ID NO: 332316 - protein, 14 aa, Homo sapiens
  CDR3 for beta chain variable domain of TCR clone 166158 (TRBV7-2, TRBJ2-7)
CASGPKTSFYEQYF

SEQ ID NO: 332317 - protein, 10 aa, Homo sapiens
  CDR3 for alpha chain variable domain of TCR clone 166159 (TRAV23/DV6, TRAJ57)
CAASSTLPQG

SEQ ID NO: 332318 - protein, 14 aa, Homo sapiens
  CDR3 for beta chain variable domain of TCR clone 166159 (TRBV13, TRBJ2-5)
CASSLGQGKETQYF

SEQ ID NO: 332319 - protein, 16 aa, Homo sapiens
  CDR3 for alpha chain variable domain of TCR clone 166160 (TRAV26-1, TRAJ28)
CIIRPYSGAGSYQLTF

SEQ ID NO: 332320 - protein, 18 aa, Homo sapiens
  CDR3 for beta chain variable domain of TCR clone 166160 (TRBV20-1, TRBJ2-2)
CSARDLTSGSMDTGELFF

SEQ ID NO: 332321 - protein, 16 aa, Homo sapiens
  CDR3 for alpha chain variable domain of TCR clone 166161 (TRAV13-1, TRAJ8)
CAAFYLLNTGFQKLVF

SEQ ID NO: 332322 - protein, 14 aa, Homo sapiens
  CDR3 for beta chain variable domain of TCR clone 166161 (TRBV29-1, TRBJ2-5)
CSVGPAGGQETPYF

SEQ ID NO: 332323 - protein, 11 aa, Homo sapiens
  CDR3 for alpha chain variable domain of TCR clone 166162 (TRAV21, TRAJ11)
CAVNGDSTLTF

SEQ ID NO: 332324 - protein, 13 aa, Homo sapiens
  CDR3 for beta chain variable domain of TCR clone 166162 (TRBV28, TRBJ2-1)
CASSPLPSSEQFF

SEQ ID NO: 332325 - protein, 13 aa, Homo sapiens
  CDR3 for alpha chain variable domain of TCR clone 166163 (TRAV30, TRAJ24)
CGTVTDSWGKLQF

SEQ ID NO: 332326 - protein, 16 aa, Homo sapiens
  CDR3 for beta chain variable domain of TCR clone 166163 (TRBV13, TRBJ2-2)
CASSPRTGEHTGELFF

SEQ ID NO: 332327 - protein, 17 aa, Homo sapiens
  CDR3 for alpha chain variable domain of TCR clone 166164 (TRAV14/DV4, TRAJ4)
CAMREASGRGGYNKLCF

SEQ ID NO: 332328 - protein, 14 aa, Homo sapiens
  CDR3 for beta chain variable domain of TCR clone 166164 (TRBV19, TRBJ2-7)
CASSMGQGAIEQYF

SEQ ID NO: 332329 - protein, 16 aa, Homo sapiens
  CDR3 for alpha chain variable domain of TCR clone 166165 (TRAV26-1, TRAJ45)
SIVEKYSGGGADGLTF

SEQ ID NO: 332330 - protein, 15 aa, Homo sapiens
  CDR3 for beta chain variable domain of TCR clone 166165 (TRBV15, TRBJ2-7)
CHQQRPIQQAYEQYF

SEQ ID NO: 332331 - protein, 15 aa, Homo sapiens
  CDR3 for alpha chain variable domain of TCR clone 166166 (TRAV3, TRAJ3)
CAVRDRDSNASKIIF

SEQ ID NO: 332332 - protein, 15 aa, Homo sapiens
  CDR3 for beta chain variable domain of TCR clone 166166 (TRBV11-2, TRBJ1-6)
CASTLRGTGNSPLHF

SEQ ID NO: 332333 - protein, 12 aa, Homo sapiens
  CDR3 for alpha chain variable domain of TCR clone 166167 (TRAV12-3, TRAJ17)
CAMTLTGNKPTC

SEQ ID NO: 332334 - protein, 15 aa, Homo sapiens
  CDR3 for beta chain variable domain of TCR clone 166167 (TRBV20-1, TRBJ2-7)
CSARDRVSGMDEQYF

SEQ ID NO: 332335 - protein, 14 aa, Homo sapiens
  CDR3 for alpha chain variable domain of TCR clone 166168 (TRAV23/DV6, TRAJ37)
CAASTSSNTGKLIF

SEQ ID NO: 332336 - protein, 15 aa, Homo sapiens
  CDR3 for beta chain variable domain of TCR clone 166168 (TRBV9, TRBJ1-6)
CASSVAGTGDSPLHF

SEQ ID NO: 332337 - protein, 14 aa, Homo sapiens
  CDR3 for alpha chain variable domain of TCR clone 166169 (TRAV23/DV6, TRAJ4)
CAAPSSGGYNKLIF

SEQ ID NO: 332338 - protein, 16 aa, Homo sapiens
  CDR3 for beta chain variable domain of TCR clone 166169 (TRBV19, TRBJ1-1)
CASRFGGPVTGTVAFF

SEQ ID NO: 332339 - protein, 14 aa, Homo sapiens
  CDR3 for alpha chain variable domain of TCR clone 166170 (TRAV8-3, TRAJ4)
CAVGAAGGYNKLIF

SEQ ID NO: 332340 - protein, 15 aa, Homo sapiens
  CDR3 for beta chain variable domain of TCR clone 166170 (TRBV5-1, TRBJ2-1)
CASSPPRAPYSEQFF

SEQ ID NO: 332341 - protein, 15 aa, Homo sapiens
  CDR3 for alpha chain variable domain of TCR clone 166171 (TRAV3, TRAJ20)
CAVRDIKLSDYKLSL

SEQ ID NO: 332342 - protein, 15 aa, Homo sapiens
  CDR3 for beta chain variable domain of TCR clone 166171 (TRBV7-9, TRBJ1-6)
CASSSPGRGNSPLYF

SEQ ID NO: 332343 - protein, 13 aa, Homo sapiens
  CDR3 for alpha chain variable domain of TCR clone 166172 (TRAV21, TRAJ27)
CAARPGNAGKSTF

SEQ ID NO: 332344 - protein, 16 aa, Homo sapiens
  CDR3 for beta chain variable domain of TCR clone 166172 (TRBV5-1, TRBJ2-3)
CASSLGLAVYTDTQYF

SEQ ID NO: 332345 - protein, 17 aa, Homo sapiens
  CDR3 for alpha chain variable domain of TCR clone 166173 (TRAV38-1, TRAJ45)
CAFMKHYMGGGADGLTF

SEQ ID NO: 332346 - protein, 14 aa, Homo sapiens
  CDR3 for beta chain variable domain of TCR clone 166173 (TRBV11-2, TRBJ1-2)
CASSLYRGNYGYTF

SEQ ID NO: 332347 - protein, 17 aa, Homo sapiens
  CDR3 for alpha chain variable domain of TCR clone 166174 (TRAV13-1, TRAJ52)
WAASSGAGGTSYGKLTF

SEQ ID NO: 332348 - protein, 15 aa, Homo sapiens
  CDR3 for beta chain variable domain of TCR clone 166174 (TRBV2, TRBJ2-1)
CASSELAGSYNEPFF

SEQ ID NO: 332349 - protein, 12 aa, Homo sapiens
  CDR3 for alpha chain variable domain of TCR clone 166175 (TRAV3, TRAJ26)
CAVRDYGQNFVF

SEQ ID NO: 332350 - protein, 16 aa, Homo sapiens
  CDR3 for beta chain variable domain of TCR clone 166175 (TRBV11-2, TRBJ1-2)
CASSPSVRDANYGYTF

SEQ ID NO: 332351 - protein, 14 aa, Homo sapiens
  CDR3 for alpha chain variable domain of TCR clone 166176 (TRAV21, TRAJ58)
CAVRRGRSGSRWTF

SEQ ID NO: 332352 - protein, 13 aa, Homo sapiens
  CDR3 for beta chain variable domain of TCR clone 166176 (TRBV7-2, TRBJ1-6)
CASSVKFDSPLHF

SEQ ID NO: 332353 - protein, 17 aa, Homo sapiens
  CDR3 for alpha chain variable domain of TCR clone 166177 (TRAV3, TRAJ38)
CAVRDCLKAGNNRKLIW

SEQ ID NO: 332354 - protein, 14 aa, Homo sapiens
  CDR3 for beta chain variable domain of TCR clone 166177 (TRBV5-5, TRBJ1-5)
CASSGQGVDQPQHF

SEQ ID NO: 332355 - protein, 14 aa, Homo sapiens
  CDR3 for alpha chain variable domain of TCR clone 166178 (TRAV12-2, TRAJ40)
CAVKIPSGTYKCIF

SEQ ID NO: 332356 - protein, 17 aa, Homo sapiens
  CDR3 for beta chain variable domain of TCR clone 166178 (TRBV11-2, TRBJ2-1)
CASSLYPPGVEYNEQFF

SEQ ID NO: 332357 - protein, 14 aa, Homo sapiens
  CDR3 for alpha chain variable domain of TCR clone 166179 (TRAV26-1, TRAJ54)
CIVRRTQGAQKLVF

SEQ ID NO: 332358 - protein, 12 aa, Homo sapiens
  CDR3 for beta chain variable domain of TCR clone 166179 (TRBV5-1, TRBJ2-7)
CASSDSTYEQYF

SEQ ID NO: 332359 - protein, 12 aa, Homo sapiens
  CDR3 for alpha chain variable domain of TCR clone 166180 (TRAV12-3, TRAJ17)
CAMTLTGNKLTC

SEQ ID NO: 332360 - protein, 16 aa, Homo sapiens
  CDR3 for beta chain variable domain of TCR clone 166180 (TRBV7-2, TRBJ2-1)
CASSLRWGRENNEQFF

SEQ ID NO: 332361 - protein, 15 aa, Homo sapiens
  CDR3 for alpha chain variable domain of TCR clone 166181 (TRAV3, TRAJ3)
CAVRDRRSSASKIIF

SEQ ID NO: 332362 - protein, 16 aa, Homo sapiens
  CDR3 for beta chain variable domain of TCR clone 166181 (TRBV7-2, TRBJ2-7)
CASSLDLSGGAYEQYF

SEQ ID NO: 332363 - protein, 17 aa, Homo sapiens
  CDR3 for alpha chain variable domain of TCR clone 166182 (TRAV12-2, TRAJ53)
CATLTDSQEGSNYKLTF

SEQ ID NO: 332364 - protein, 12 aa, Homo sapiens
  CDR3 for beta chain variable domain of TCR clone 166182 (TRBV11-2, TRBJ2-2)
CASSLGGGELFF

SEQ ID NO: 332365 - protein, 16 aa, Homo sapiens
  CDR3 for alpha chain variable domain of TCR clone 166183 (TRAV12-2, TRAJ18)
CAVFAGRGSTLGRLYF

SEQ ID NO: 332366 - protein, 16 aa, Homo sapiens
  CDR3 for beta chain variable domain of TCR clone 166183 (TRBV27, TRBJ2-3)
CASSLLAGGPGDTQYF

SEQ ID NO: 332367 - protein, 15 aa, Homo sapiens
  CDR3 for alpha chain variable domain of TCR clone 166184 (TRAV23/DV6, TRAJ13)
CAAWPGGGGYQKVTF

SEQ ID NO: 332368 - protein, 15 aa, Homo sapiens
  CDR3 for beta chain variable domain of TCR clone 166184 (TRBV7-2, TRBJ2-7)
CASSLGIGNDYEQYF

SEQ ID NO: 332369 - protein, 12 aa, Homo sapiens
  CDR3 for alpha chain variable domain of TCR clone 166185 (TRAV12-3, TRAJ17)
CAMTLTGNKLTF

SEQ ID NO: 332370 - protein, 15 aa, Homo sapiens
  CDR3 for beta chain variable domain of TCR clone 166185 (TRBV20-1, TRBJ2-7)
CSARGRVSEMDEQYF

SEQ ID NO: 332371 - protein, 14 aa, Homo sapiens
  CDR3 for alpha chain variable domain of TCR clone 166186 (TRAV29/DV5, TRAJ36)
CAARRKTGANNPFF

SEQ ID NO: 332372 - protein, 12 aa, Homo sapiens
  CDR3 for beta chain variable domain of TCR clone 166186 (TRBV28, TRBJ2-1)
CASSFRGNEQFF

SEQ ID NO: 332373 - protein, 14 aa, Homo sapiens
  CDR3 for alpha chain variable domain of TCR clone 166187 (TRAV8-6, TRAJ29)
CAVSGWAGNTPLVF

SEQ ID NO: 332374 - protein, 14 aa, Homo sapiens
  CDR3 for beta chain variable domain of TCR clone 166187 (TRBV4-1, TRBJ1-1)
CASSQQGNGNEAFF

SEQ ID NO: 332375 - protein, 16 aa, Homo sapiens
  CDR3 for alpha chain variable domain of TCR clone 166188 (TRAV30, TRAJ24)
CGTEIVDADSWGKFQS

SEQ ID NO: 332376 - protein, 13 aa, Homo sapiens
  CDR3 for beta chain variable domain of TCR clone 166188 (TRBV4-1, TRBJ2-2)
CASSQENTGELFF

SEQ ID NO: 332377 - protein, 13 aa, Homo sapiens
  CDR3 for alpha chain variable domain of TCR clone 166189 (TRAV39, TRAJ58)
CSGEETSGSRSTF

SEQ ID NO: 332378 - protein, 13 aa, Homo sapiens
  CDR3 for beta chain variable domain of TCR clone 166189 (TRBV15, TRBJ2-7)
CATSTTGHYEQYF

SEQ ID NO: 332379 - protein, 18 aa, Homo sapiens
  CDR3 for alpha chain variable domain of TCR clone 166190 (TRAV21, TRAJ52)
CAVMPSPAGGTSYGKLTF

SEQ ID NO: 332380 - protein, 14 aa, Homo sapiens
  CDR3 for beta chain variable domain of TCR clone 166190 (TRBV20-1, TRBJ2-1)
CSAQIGGSANEQFF

SEQ ID NO: 332381 - protein, 15 aa, Homo sapiens
  CDR3 for alpha chain variable domain of TCR clone 166191 (TRAV23/DV6, TRAJ45)
CAASSAGGGADGLTF

SEQ ID NO: 332382 - protein, 11 aa, Homo sapiens
  CDR3 for beta chain variable domain of TCR clone 166191 (TRBV19, TRBJ2-5)
CASSIKETQYF

SEQ ID NO: 332383 - protein, 13 aa, Homo sapiens
  CDR3 for alpha chain variable domain of TCR clone 166192 (TRAV21, TRAJ15)
CAVANRAGTALIF

SEQ ID NO: 332384 - protein, 14 aa, Homo sapiens
  CDR3 for beta chain variable domain of TCR clone 166192 (TRBV27, TRBJ2-2)
CASSLGAATGELFF

SEQ ID NO: 332385 - protein, 14 aa, Homo sapiens
  CDR3 for alpha chain variable domain of TCR clone 166193 (TRAV30, TRAJ33)
CGTVAPRSNYQLIW

SEQ ID NO: 332386 - protein, 16 aa, Homo sapiens
  CDR3 for beta chain variable domain of TCR clone 166193 (TRBV27, TRBJ2-2)
CASSFRGLVRTGELFF

SEQ ID NO: 332387 - protein, 14 aa, Homo sapiens
  CDR3 for alpha chain variable domain of TCR clone 166194 (TRAV12-2, TRAJ15)
GAPHTGQAGTALIF

SEQ ID NO: 332388 - protein, 17 aa, Homo sapiens
  CDR3 for beta chain variable domain of TCR clone 166194 (TRBV5-5, TRBJ1-2)
CASSLGSLDGQSEGYTF

SEQ ID NO: 332389 - protein, 16 aa, Homo sapiens
  CDR3 for alpha chain variable domain of TCR clone 166195 (TRAV8-4, TRAJ44)
CAVSASLTGTASKLTF

SEQ ID NO: 332390 - protein, 11 aa, Homo sapiens
  CDR3 for beta chain variable domain of TCR clone 166195 (TRBV7-9, TRBJ2-5)
CASSLGETQCF

SEQ ID NO: 332391 - protein, 16 aa, Homo sapiens
  CDR3 for alpha chain variable domain of TCR clone 166196 (TRAV27, TRAJ52)
CAGAPAGGTSSGKLTF

SEQ ID NO: 332392 - protein, 12 aa, Homo sapiens
  CDR3 for beta chain variable domain of TCR clone 166196 (TRBV27, TRBJ2-1)
CASRGFYNEQFF

SEQ ID NO: 332393 - protein, 16 aa, Homo sapiens
  CDR3 for alpha chain variable domain of TCR clone 166197 (TRAV30, TRAJ24)
CGTEIVDADSWGKYQF

SEQ ID NO: 332394 - protein, 13 aa, Homo sapiens
  CDR3 for beta chain variable domain of TCR clone 166197 (TRBV7-9, TRBJ1-2)
CASSLKQNYGYTF

SEQ ID NO: 332395 - protein, 13 aa, Homo sapiens
  CDR3 for alpha chain variable domain of TCR clone 166198 (TRAV13-2, TRAJ48)
CAEMDFGNEKLTF

SEQ ID NO: 332396 - protein, 13 aa, Homo sapiens
  CDR3 for beta chain variable domain of TCR clone 166198 (TRBV15, TRBJ1-6)
CATSGGLNSPLHF

SEQ ID NO: 332397 - protein, 15 aa, Homo sapiens
  CDR3 for alpha chain variable domain of TCR clone 166199 (TRAV16, TRAJ20)
CALKGGPRADYKPSF

SEQ ID NO: 332398 - protein, 16 aa, Homo sapiens
  CDR3 for beta chain variable domain of TCR clone 166199 (TRBV11-3, TRBJ2-2)
CASSSRTSPGTGELFF

SEQ ID NO: 332399 - protein, 14 aa, Homo sapiens
  CDR3 for alpha chain variable domain of TCR clone 166200 (TRAV1-2, TRAJ8)
CAVREDTGFQKLVF

SEQ ID NO: 332400 - protein, 13 aa, Homo sapiens
  CDR3 for beta chain variable domain of TCR clone 166200 (TRBV19, TRBJ1-1)
CASSGQVNTEAFF

SEQ ID NO: 332401 - protein, 12 aa, Homo sapiens
  CDR3 for alpha chain variable domain of TCR clone 166201 (TRAV12-1, TRAJ23)
CVVNIPGGKLIF

SEQ ID NO: 332402 - protein, 15 aa, Homo sapiens
  CDR3 for beta chain variable domain of TCR clone 166201 (TRBV6-3, TRBJ2-7)
CASSSPGTVFYERYF

SEQ ID NO: 332403 - protein, 14 aa, Homo sapiens
  CDR3 for alpha chain variable domain of TCR clone 166202 (TRAV12-2, TRAJ13)
CAVNPSGGYQKFTF

SEQ ID NO: 332404 - protein, 13 aa, Homo sapiens
  CDR3 for beta chain variable domain of TCR clone 166202 (TRBV20-1, TRBJ1-6)
CSAKLGGTSPLHF

SEQ ID NO: 332405 - protein, 15 aa, Homo sapiens
  CDR3 for alpha chain variable domain of TCR clone 166203 (TRAV12-1, TRAJ44)
CVVFVNTGTASKLTL

SEQ ID NO: 332406 - protein, 16 aa, Homo sapiens
  CDR3 for beta chain variable domain of TCR clone 166203 (TRBV7-3, TRBJ2-2)
CASSLKRGTLSGELFF

SEQ ID NO: 332407 - protein, 13 aa, Homo sapiens
  CDR3 for alpha chain variable domain of TCR clone 166204 (TRAV3, TRAJ30)
CAVSDRGDDKIIF

SEQ ID NO: 332408 - protein, 14 aa, Homo sapiens
  CDR3 for beta chain variable domain of TCR clone 166204 (TRBV5-1, TRBJ1-1)
CASSRTTGDTEAFF

SEQ ID NO: 332409 - protein, 12 aa, Homo sapiens
  CDR3 for alpha chain variable domain of TCR clone 166205 (TRAV3, TRAJ43)
CAVRDPNNNMRF

SEQ ID NO: 332410 - protein, 15 aa, Homo sapiens
  CDR3 for beta chain variable domain of TCR clone 166205 (TRBV6-5, TRBJ2-1)
CASSYDAGAGNEQFF

SEQ ID NO: 332411 - protein, 13 aa, Homo sapiens
  CDR3 for alpha chain variable domain of TCR clone 166206 (TRAV13-2, TRAJ48)
CAEMDFGNEKLTF

SEQ ID NO: 332412 - protein, 19 aa, Homo sapiens
  CDR3 for beta chain variable domain of TCR clone 166206 (TRBV7-2, TRBJ2-3)
CASSFLSRNWGGGTDTQYF

SEQ ID NO: 332413 - protein, 13 aa, Homo sapiens
  CDR3 for alpha chain variable domain of TCR clone 166207 (TRAV36/DV7, TRAJ37)
CAVFSSNTGKIIF

SEQ ID NO: 332414 - protein, 16 aa, Homo sapiens
  CDR3 for beta chain variable domain of TCR clone 166207 (TRBV3-1, TRBJ2-5)
CASSPGQFNGFGTQYF

SEQ ID NO: 332415 - protein, 14 aa, Homo sapiens
  CDR3 for alpha chain variable domain of TCR clone 166208 (TRAV12-1, TRAJ30)
CVVRGMNRDDKTIF

SEQ ID NO: 332416 - protein, 14 aa, Homo sapiens
  CDR3 for beta chain variable domain of TCR clone 166208 (TRBV7-2, TRBJ2-1)
CASSLTSGNRRQFF

SEQ ID NO: 332417 - protein, 12 aa, Homo sapiens
  CDR3 for alpha chain variable domain of TCR clone 166209 (TRAV12-3, TRAJ17)
CAMTLTGNKLTF

SEQ ID NO: 332418 - protein, 13 aa, Homo sapiens
  CDR3 for beta chain variable domain of TCR clone 166209 (TRBV10-3, TRBJ1-2)
CAISERDSNGYTF

SEQ ID NO: 332419 - protein, 16 aa, Homo sapiens
  CDR3 for alpha chain variable domain of TCR clone 166210 (TRAV12-3, TRAJ53)
CATSPGSGGSNYKLTF

SEQ ID NO: 332420 - protein, 16 aa, Homo sapiens
  CDR3 for beta chain variable domain of TCR clone 166210 (TRBV4-2, TRBJ1-1)
CASSQAGFGMNTEAFF

SEQ ID NO: 332421 - protein, 14 aa, Homo sapiens
  CDR3 for alpha chain variable domain of TCR clone 166211 (TRAV35, TRAJ10)
CAGILTGGGNKLTF

SEQ ID NO: 332422 - protein, 15 aa, Homo sapiens
  CDR3 for beta chain variable domain of TCR clone 166211 (TRBV18, TRBJ1-5)
CASSETGGNNQPQHF

SEQ ID NO: 332423 - protein, 15 aa, Homo sapiens
  CDR3 for alpha chain variable domain of TCR clone 166212 (TRAV12-3, TRAJ53)
CSEPGERGSNYKLTF

SEQ ID NO: 332424 - protein, 11 aa, Homo sapiens
  CDR3 for beta chain variable domain of TCR clone 166212 (TRBV29-1, TRBJ2-5)
CSEDRTGTQYF

SEQ ID NO: 332425 - protein, 12 aa, Homo sapiens
  CDR3 for alpha chain variable domain of TCR clone 166213 (TRAV12-3, TRAJ29)
CAMTLGNTPLVF

SEQ ID NO: 332426 - protein, 13 aa, Homo sapiens
  CDR3 for beta chain variable domain of TCR clone 166213 (TRBV27, TRBJ1-4)
CASSLMGDEKLFF

SEQ ID NO: 332427 - protein, 16 aa, Homo sapiens
  CDR3 for alpha chain variable domain of TCR clone 166214 (TRAV30, TRAJ24)
CGTEIVDADSWGKFPF

SEQ ID NO: 332428 - protein, 15 aa, Homo sapiens
  CDR3 for beta chain variable domain of TCR clone 166214 (TRBV11-3, TRBJ2-3)
CASLKDGREGDTQYF

SEQ ID NO: 332429 - protein, 14 aa, Homo sapiens
  CDR3 for alpha chain variable domain of TCR clone 166215 (TRAV35, TRAJ10)
CAGILTGGGNKLTF

SEQ ID NO: 332430 - protein, 14 aa, Homo sapiens
  CDR3 for beta chain variable domain of TCR clone 166215 (TRBV7-2, TRBJ2-2)
CASRGQGAAGELFF

SEQ ID NO: 332431 - protein, 14 aa, Homo sapiens
  CDR3 for alpha chain variable domain of TCR clone 166216 (TRAV12-2, TRAJ40)
CAVKIPSGTYKYIF

SEQ ID NO: 332432 - protein, 17 aa, Homo sapiens
  CDR3 for beta chain variable domain of TCR clone 166216 (TRBV7-8, TRBJ2-6)
CASIAGTGGAGANVLTF

SEQ ID NO: 332433 - protein, 12 aa, Homo sapiens
  CDR3 for alpha chain variable domain of TCR clone 166217 (TRAV4, TRAJ26)
CLVGDYGQNFVF

SEQ ID NO: 332434 - protein, 16 aa, Homo sapiens
  CDR3 for beta chain variable domain of TCR clone 166217 (TRBV7-2, TRBJ1-2)
CASSSNQDRRRHGYTF

SEQ ID NO: 332435 - protein, 13 aa, Homo sapiens
  CDR3 for alpha chain variable domain of TCR clone 166218 (TRAV2, TRAJ40)
CAVVTSGTYKYIF

SEQ ID NO: 332436 - protein, 15 aa, Homo sapiens
  CDR3 for beta chain variable domain of TCR clone 166218 (TRBV5-4, TRBJ2-1)
CASSREGLPYNEQFF

SEQ ID NO: 332437 - protein, 13 aa, Homo sapiens
  CDR3 for alpha chain variable domain of TCR clone 166219 (TRAV21, TRAJ27)
CAALPGNAGKSTF

SEQ ID NO: 332438 - protein, 13 aa, Homo sapiens
  CDR3 for beta chain variable domain of TCR clone 166219 (TRBV19, TRBJ1-2)
CASSVPGQDGYTF

SEQ ID NO: 332439 - protein, 15 aa, Homo sapiens
  CDR3 for alpha chain variable domain of TCR clone 166220 (TRAV34, TRAJ38)
CGADFTPGNHRKLIW

SEQ ID NO: 332440 - protein, 16 aa, Homo sapiens
  CDR3 for beta chain variable domain of TCR clone 166220 (TRBV12-5, TRBJ2-5)
CASGPRTSGNQETQYF

SEQ ID NO: 332441 - protein, 11 aa, Homo sapiens
  CDR3 for alpha chain variable domain of TCR clone 166221 (TRAV12-1, TRAJ34)
CVVNKGRERIF

SEQ ID NO: 332442 - protein, 15 aa, Homo sapiens
  CDR3 for beta chain variable domain of TCR clone 166221 (TRBV7-2, TRBJ1-2)
CASSLVSGGDYGYTF

SEQ ID NO: 332443 - protein, 14 aa, Homo sapiens
  CDR3 for alpha chain variable domain of TCR clone 166222 (TRAV8-3, TRAJ4)
CAVGAAGGYNKLIF

SEQ ID NO: 332444 - protein, 15 aa, Homo sapiens
  CDR3 for beta chain variable domain of TCR clone 166222 (TRBV7-3, TRBJ2-6)
CASSRTGTGANVLTF

SEQ ID NO: 332445 - protein, 16 aa, Homo sapiens
  CDR3 for alpha chain variable domain of TCR clone 166223 (TRAV8-3, TRAJ4)
CAVGARGSGGYNKLIF

SEQ ID NO: 332446 - protein, 13 aa, Homo sapiens
  CDR3 for beta chain variable domain of TCR clone 166223 (TRBV7-6, TRBJ2-3)
CASSLRSDNTQYF

SEQ ID NO: 332447 - protein, 13 aa, Homo sapiens
  CDR3 for alpha chain variable domain of TCR clone 166224 (TRAV39, TRAJ40)
CAVYTSGTYKYIF

SEQ ID NO: 332448 - protein, 14 aa, Homo sapiens
  CDR3 for beta chain variable domain of TCR clone 166224 (TRBV11-2, TRBJ2-3)
CASRRLARTDTQYF

SEQ ID NO: 332449 - protein, 16 aa, Homo sapiens
  CDR3 for alpha chain variable domain of TCR clone 166225 (TRAV12-2, TRAJ18)
CAVTTDRGSTLGRLYI

SEQ ID NO: 332450 - protein, 13 aa, Homo sapiens
  CDR3 for beta chain variable domain of TCR clone 166225 (TRBV19, TRBJ2-3)
CATWDKITDTQYF

SEQ ID NO: 332451 - protein, 14 aa, Homo sapiens
  CDR3 for alpha chain variable domain of TCR clone 166226 (TRAV12-2, TRAJ13)
CAVKKTGGYQKVTF

SEQ ID NO: 332452 - protein, 19 aa, Homo sapiens
  CDR3 for beta chain variable domain of TCR clone 166226 (TRBV11-3, TRBJ2-2)
CASSTRPGAKTTNTGELFF

SEQ ID NO: 332453 - protein, 18 aa, Homo sapiens
  CDR3 for alpha chain variable domain of TCR clone 166227 (TRAV4, TRAJ20)
CCVLLPRGCQGNDYKLSF

SEQ ID NO: 332454 - protein, 13 aa, Homo sapiens
  CDR3 for beta chain variable domain of TCR clone 166227 (TRBV10-3, TRBJ2-7)
CASKLAVNYEQYF

SEQ ID NO: 332455 - protein, 14 aa, Homo sapiens
  CDR3 for alpha chain variable domain of TCR clone 166228 (TRAV35, TRAJ33)
CAGSSQDSNYQLIW

SEQ ID NO: 332456 - protein, 15 aa, Homo sapiens
  CDR3 for beta chain variable domain of TCR clone 166228 (TRBV10-2, TRBJ2-6)
CASSEQGTGANVLTF

SEQ ID NO: 332457 - protein, 11 aa, Homo sapiens
  CDR3 for alpha chain variable domain of TCR clone 166229 (TRAV2, TRAJ21)
CAVFNFNKFYF

SEQ ID NO: 332458 - protein, 14 aa, Homo sapiens
  CDR3 for beta chain variable domain of TCR clone 166229 (TRBV15, TRBJ2-3)
GATRSGTSTDTQYF

SEQ ID NO: 332459 - protein, 13 aa, Homo sapiens
  CDR3 for alpha chain variable domain of TCR clone 166230 (TRAV30, TRAJ24)
CGTVTDSWGKLQF

SEQ ID NO: 332460 - protein, 15 aa, Homo sapiens
  CDR3 for beta chain variable domain of TCR clone 166230 (TRBV7-9, TRBJ2-7)
CASSPGGGLTYEQYF

SEQ ID NO: 332461 - protein, 14 aa, Homo sapiens
  CDR3 for alpha chain variable domain of TCR clone 166231 (TRAV4, TRAJ9)
CLVGSGTGGFKTIF

SEQ ID NO: 332462 - protein, 15 aa, Homo sapiens
  CDR3 for beta chain variable domain of TCR clone 166231 (TRBV7-2, TRBJ2-1)
CASSLASGCVNEQFF

SEQ ID NO: 332463 - protein, 10 aa, Homo sapiens
  CDR3 for alpha chain variable domain of TCR clone 166232 (TRAV2, TRAJ11)
CQRGYSTLTF

SEQ ID NO: 332464 - protein, 15 aa, Homo sapiens
  CDR3 for beta chain variable domain of TCR clone 166232 (TRBV28, TRBJ2-1)
CASSGLAEVDNEQFF

SEQ ID NO: 332465 - protein, 13 aa, Homo sapiens
  CDR3 for alpha chain variable domain of TCR clone 166233 (TRAV27, TRAJ6)
CAGGTRGSYIPTF

SEQ ID NO: 332466 - protein, 16 aa, Homo sapiens
  CDR3 for beta chain variable domain of TCR clone 166233 (TRBV28, TRBJ1-1)
CASSLSGTGWNTEAFF

SEQ ID NO: 332467 - protein, 16 aa, Homo sapiens
  CDR3 for alpha chain variable domain of TCR clone 166234 (TRAV3, TRAJ37)
CAVRPHGAGDTGKLIF

SEQ ID NO: 332468 - protein, 16 aa, Homo sapiens
  CDR3 for beta chain variable domain of TCR clone 166234 (TRBV9, TRBJ1-2)
CASSVEEKVSPYGYTF

SEQ ID NO: 332469 - protein, 13 aa, Homo sapiens
  CDR3 for alpha chain variable domain of TCR clone 166235 (TRAV12-3, TRAJ13)
CAMGNGGYQKVTF

SEQ ID NO: 332470 - protein, 14 aa, Homo sapiens
  CDR3 for beta chain variable domain of TCR clone 166235 (TRBV7-2, TRBJ2-5)
CASSTGGELKTQYF

SEQ ID NO: 332471 - protein, 12 aa, Homo sapiens
  CDR3 for alpha chain variable domain of TCR clone 166236 (TRAV12-2, TRAJ47)
CAVAEYGNKPVF

SEQ ID NO: 332472 - protein, 14 aa, Homo sapiens
  CDR3 for beta chain variable domain of TCR clone 166236 (TRBV20-1, TRBJ1-1)
CSAMGGTANTEAFF

SEQ ID NO: 332473 - protein, 15 aa, Homo sapiens
  CDR3 for alpha chain variable domain of TCR clone 166237 (TRAV26-1, TRAJ29)
CIVRVEGSGNTPLVF

SEQ ID NO: 332474 - protein, 14 aa, Homo sapiens
  CDR3 for beta chain variable domain of TCR clone 166237 (TRBV11-1, TRBJ2-7)
CASSFRQGSYEQYF

SEQ ID NO: 332475 - protein, 10 aa, Homo sapiens
  CDR3 for alpha chain variable domain of TCR clone 166238 (TRAV3, TRAJ30)
CAVRAIETIF

SEQ ID NO: 332476 - protein, 14 aa, Homo sapiens
  CDR3 for beta chain variable domain of TCR clone 166238 (TRBV15, TRBJ2-3)
CATRSGTSTDTQYF

SEQ ID NO: 332477 - protein, 12 aa, Homo sapiens
  CDR3 for alpha chain variable domain of TCR clone 166239 (TRAV12-3, TRAJ17)
CAMTLTGNKLTF

SEQ ID NO: 332478 - protein, 13 aa, Homo sapiens
  CDR3 for beta chain variable domain of TCR clone 166239 (TRBV7-9, TRBJ1-2)
CASSLKQNYAYTF

SEQ ID NO: 332479 - protein, 12 aa, Homo sapiens
  CDR3 for alpha chain variable domain of TCR clone 166240 (TRAV12-3, TRAJ17)
CAMTLTGNKLTF

SEQ ID NO: 332480 - protein, 15 aa, Homo sapiens
  CDR3 for beta chain variable domain of TCR clone 166240 (TRBV2, TRBJ2-1)
CASEGRVSAYNEQFF

SEQ ID NO: 332481 - protein, 13 aa, Homo sapiens
  CDR3 for alpha chain variable domain of TCR clone 166241 (TRAV8-4, TRAJ9)
CAVSDTGGFKTIF

SEQ ID NO: 332482 - protein, 14 aa, Homo sapiens
  CDR3 for beta chain variable domain of TCR clone 166241 (TRBV25-1, TRBJ1-1)
CASTHLGGNTEAFF

SEQ ID NO: 332483 - protein, 12 aa, Homo sapiens
  CDR3 for alpha chain variable domain of TCR clone 166242 (TRAV8-3, TRAJ20)
CAVGRGGYKLSF

SEQ ID NO: 332484 - protein, 12 aa, Homo sapiens
  CDR3 for beta chain variable domain of TCR clone 166242 (TRBV2, TRBJ2-4)
CASQGDSGIQYF

SEQ ID NO: 332485 - protein, 11 aa, Homo sapiens
  CDR3 for alpha chain variable domain of TCR clone 166243 (TRAV21, TRAJ41)
CAVRSGYALNF

SEQ ID NO: 332486 - protein, 14 aa, Homo sapiens
  CDR3 for beta chain variable domain of TCR clone 166243 (TRBV4-1, TRBJ2-2)
CASSQAVNTGELFF

SEQ ID NO: 332487 - protein, 15 aa, Homo sapiens
  CDR3 for alpha chain variable domain of TCR clone 166244 (TRAV26-1, TRAJ56)
CIVRGATGANSKLTF

SEQ ID NO: 332488 - protein, 15 aa, Homo sapiens
  CDR3 for beta chain variable domain of TCR clone 166244 (TRBV27, TRBJ2-7)
CASSPQREGQSEQYF

SEQ ID NO: 332489 - protein, 21 aa, Homo sapiens
  CDR3 for alpha chain variable domain of TCR clone 166245 (TRAV25, TRAJ7)
TATQTTDVGTYFCPGNNRLAF

SEQ ID NO: 332490 - protein, 17 aa, Homo sapiens
  CDR3 for beta chain variable domain of TCR clone 166245 (TRBV11-2, TRBJ2-1)
CASSLYPPGVEYNEQFF

SEQ ID NO: 332491 - protein, 14 aa, Homo sapiens
  CDR3 for alpha chain variable domain of TCR clone 166246 (TRAV16, TRAJ37)
CALDISGNTGKLIF

SEQ ID NO: 332492 - protein, 14 aa, Homo sapiens
  CDR3 for beta chain variable domain of TCR clone 166246 (TRBV7-6, TRBJ2-7)
SASSFRQGADEQYF

SEQ ID NO: 332493 - protein, 13 aa, Homo sapiens
  CDR3 for alpha chain variable domain of TCR clone 166247 (TRAV6, TRAJ3)
CSTGYSRASKIIF

SEQ ID NO: 332494 - protein, 13 aa, Homo sapiens
  CDR3 for beta chain variable domain of TCR clone 166247 (TRBV14, TRBJ1-2)
CASSQQGYYGYTF

SEQ ID NO: 332495 - protein, 13 aa, Homo sapiens
  CDR3 for alpha chain variable domain of TCR clone 166248 (TRAV1-2, TRAJ11)
CAVRSSGYSTLTF

SEQ ID NO: 332496 - protein, 13 aa, Homo sapiens
  CDR3 for beta chain variable domain of TCR clone 166248 (TRBV7-9, TRBJ2-1)
CASSWESYNEQFF

SEQ ID NO: 332497 - protein, 15 aa, Homo sapiens
  CDR3 for alpha chain variable domain of TCR clone 166249 (TRAV23/DV6, TRAJ13)
CAAWPGGGGFKKVTF

SEQ ID NO: 332498 - protein, 17 aa, Homo sapiens
  CDR3 for beta chain variable domain of TCR clone 166249 (TRBV19, TRBJ2-7)
CASSISFYDSYPYEQYV

SEQ ID NO: 332499 - protein, 13 aa, Homo sapiens
  CDR3 for alpha chain variable domain of TCR clone 166250 (TRAV23/DV6, TRAJ22)
CAPYSGSTRQLTF

SEQ ID NO: 332500 - protein, 15 aa, Homo sapiens
  CDR3 for beta chain variable domain of TCR clone 166250 (TRBV3-1, TRBJ2-7)
CASSQAPSGSYEQYF

SEQ ID NO: 332501 - protein, 16 aa, Homo sapiens
  CDR3 for alpha chain variable domain of TCR clone 166251 (TRAV3, TRAJ37)
CAVRPRGSGNTGKLIF

SEQ ID NO: 332502 - protein, 16 aa, Homo sapiens
  CDR3 for beta chain variable domain of TCR clone 166251 (TRBV7-9, TRBJ2-3)
CASSPWREVGTDTQYF

SEQ ID NO: 332503 - protein, 12 aa, Homo sapiens
  CDR3 for alpha chain variable domain of TCR clone 166252 (TRAV8-3, TRAJ20)
CAVDFNDYKLSF

SEQ ID NO: 332504 - protein, 14 aa, Homo sapiens
  CDR3 for beta chain variable domain of TCR clone 166252 (TRBV12-5, TRBJ2-5)
CASGSRTHQETQYF

SEQ ID NO: 332505 - protein, 16 aa, Homo sapiens
  CDR3 for alpha chain variable domain of TCR clone 166253 (TRAV12-1, TRAJ45)
CVVIRYSGGGADGLTF

SEQ ID NO: 332506 - protein, 14 aa, Homo sapiens
  CDR3 for beta chain variable domain of TCR clone 166253 (TRBV7-8, TRBJ2-3)
CASSLEAGTDTQYF

SEQ ID NO: 332507 - protein, 12 aa, Homo sapiens
  CDR3 for alpha chain variable domain of TCR clone 166254 (TRAV12-3, TRAJ17)
CAMTLTGNKLTF

SEQ ID NO: 332508 - protein, 16 aa, Homo sapiens
  CDR3 for beta chain variable domain of TCR clone 166254 (TRBV20-1, TRBJ2-3)
CSALAFDTGDPDTQYF

SEQ ID NO: 332509 - protein, 16 aa, Homo sapiens
  CDR3 for alpha chain variable domain of TCR clone 166255 (TRAV3, TRAJ37)
CAVKGKGSGNTGKLIF

SEQ ID NO: 332510 - protein, 12 aa, Homo sapiens
  CDR3 for beta chain variable domain of TCR clone 166255 (TRBV4-1, TRBJ2-3)
CASSQGTDTQYF

SEQ ID NO: 332511 - protein, 13 aa, Homo sapiens
  CDR3 for alpha chain variable domain of TCR clone 166256 (TRAV21, TRAJ27)
CAALNTNAGKSTF

SEQ ID NO: 332512 - protein, 14 aa, Homo sapiens
  CDR3 for beta chain variable domain of TCR clone 166256 (TRBV27, TRBJ1-1)
CASSVLSGLSEAFF

SEQ ID NO: 332513 - protein, 16 aa, Homo sapiens
  CDR3 for alpha chain variable domain of TCR clone 166257 (TRAV16, TRAJ57)
FAPYLITQGGSEKLAF

SEQ ID NO: 332514 - protein, 17 aa, Homo sapiens
  CDR3 for beta chain variable domain of TCR clone 166257 (TRBV24-1, TRBJ2-4)
CGTSDAEARGVRNIQYF

SEQ ID NO: 332515 - protein, 23 aa, Homo sapiens
  CDR3 for alpha chain variable domain of TCR clone 166258 (TRAV26-1, )
CIADDAGNNHIQNPDPAVYQLRN

SEQ ID NO: 332516 - protein, 13 aa, Homo sapiens
  CDR3 for beta chain variable domain of TCR clone 166258 (TRBV20-1, TRBJ1-1)
CSARGGGNTEAFF

SEQ ID NO: 332517 - protein, 17 aa, Homo sapiens
  CDR3 for alpha chain variable domain of TCR clone 166259 (TRAV3, TRAJ12)
SAVRDGGRMDSSYKLIF

SEQ ID NO: 332518 - protein, 14 aa, Homo sapiens
  CDR3 for beta chain variable domain of TCR clone 166259 (TRBV12-4, TRBJ1-3)
CASTLTGAGNTIYF

SEQ ID NO: 332519 - protein, 16 aa, Homo sapiens
  CDR3 for alpha chain variable domain of TCR clone 166260 (TRAV3, TRAJ28)
CAVLPRSGAGSYQLTF

SEQ ID NO: 332520 - protein, 13 aa, Homo sapiens
  CDR3 for beta chain variable domain of TCR clone 166260 (TRBV10-2, TRBJ2-7)
CASGTSGGYEQYF

SEQ ID NO: 332521 - protein, 17 aa, Homo sapiens
  CDR3 for alpha chain variable domain of TCR clone 166261 (TRAV36/DV7, TRAJ44)
CAVEPIPALPVNSPLGL

SEQ ID NO: 332522 - protein, 14 aa, Homo sapiens
  CDR3 for beta chain variable domain of TCR clone 166261 (TRBV20-1, TRBJ1-3)
CSASPTGAGNTIYF

SEQ ID NO: 332523 - protein, 15 aa, Homo sapiens
  CDR3 for alpha chain variable domain of TCR clone 166262 (TRAV12-3, TRAJ27)
CAMRAYNPNAGKSTF

SEQ ID NO: 332524 - protein, 13 aa, Homo sapiens
  CDR3 for beta chain variable domain of TCR clone 166262 (TRBV20-1, TRBJ1-5)
CSAPPRANQPQHF

SEQ ID NO: 332525 - protein, 13 aa, Homo sapiens
  CDR3 for alpha chain variable domain of TCR clone 166263 (TRAV13-1, TRAJ49)
CAAMLYTGNQFYF

SEQ ID NO: 332526 - protein, 15 aa, Homo sapiens
  CDR3 for beta chain variable domain of TCR clone 166263 (TRBV12-4, TRBJ1-5)
CASARGSGFGQTQHF

SEQ ID NO: 332527 - protein, 14 aa, Homo sapiens
  CDR3 for alpha chain variable domain of TCR clone 166264 (TRAV35, TRAJ50)
CAGHRKTSYAKVLF

SEQ ID NO: 332528 - protein, 13 aa, Homo sapiens
  CDR3 for beta chain variable domain of TCR clone 166264 (TRBV7-7, TRBJ2-3)
CASSLSRADTQYF

SEQ ID NO: 332529 - protein, 16 aa, Homo sapiens
  CDR3 for alpha chain variable domain of TCR clone 166265 (TRAV30, TRAJ49)
SAAQRVGPNTGNQFYF

SEQ ID NO: 332530 - protein, 15 aa, Homo sapiens
  CDR3 for beta chain variable domain of TCR clone 166265 (TRBV2, TRBJ2-1)
CASSELAGGYNEQFF

SEQ ID NO: 332531 - protein, 15 aa, Homo sapiens
  CDR3 for alpha chain variable domain of TCR clone 166266 (TRAV25, TRAJ52)
CAGRPGGTSYGELTF

SEQ ID NO: 332532 - protein, 15 aa, Homo sapiens
  CDR3 for beta chain variable domain of TCR clone 166266 (TRBV7-8, TRBJ2-1)
CASSLADSLYNEQFF

SEQ ID NO: 332533 - protein, 12 aa, Homo sapiens
  CDR3 for alpha chain variable domain of TCR clone 166267 (TRAV12-2, TRAJ21)
CAPSDTFNKFYF

SEQ ID NO: 332534 - protein, 13 aa, Homo sapiens
  CDR3 for beta chain variable domain of TCR clone 166267 (TRBV7-3, TRBJ1-1)
CASSQDWGAEAFF

SEQ ID NO: 332535 - protein, 16 aa, Homo sapiens
  CDR3 for alpha chain variable domain of TCR clone 166268 (TRAV8-3, TRAJ13)
CAVGAYPSGGYQKVTF

SEQ ID NO: 332536 - protein, 15 aa, Homo sapiens
  CDR3 for beta chain variable domain of TCR clone 166268 (TRBV7-9, TRBJ1-1)
CASSLLEQGGTEAFF

SEQ ID NO: 332537 - protein, 10 aa, Homo sapiens
  CDR3 for alpha chain variable domain of TCR clone 166269 (TRAV4, TRAJ20)
CLVGDYKLSF

SEQ ID NO: 332538 - protein, 15 aa, Homo sapiens
  CDR3 for beta chain variable domain of TCR clone 166269 (TRBV4-1, TRBJ1-4)
CASSDTGGTNEKLFF

SEQ ID NO: 332539 - protein, 15 aa, Homo sapiens
  CDR3 for alpha chain variable domain of TCR clone 166270 (TRAV13-1, TRAJ17)
CAASIERAAGNKLTF

SEQ ID NO: 332540 - protein, 12 aa, Homo sapiens
  CDR3 for beta chain variable domain of TCR clone 166270 (TRBV5-7, TRBJ1-1)
CARSLGRGKAFF

SEQ ID NO: 332541 - protein, 18 aa, Homo sapiens
  CDR3 for alpha chain variable domain of TCR clone 166271 (TRAV13-1, TRAJ52)
CAAKNPNAGGTSYGKLTF

SEQ ID NO: 332542 - protein, 14 aa, Homo sapiens
  CDR3 for beta chain variable domain of TCR clone 166271 (TRBV7-3, TRBJ2-1)
CASSLAGRTNEQFF

SEQ ID NO: 332543 - protein, 14 aa, Homo sapiens
  CDR3 for alpha chain variable domain of TCR clone 166272 (TRAV12-3, TRAJ10)
SHLPLTGGGNKLTF

SEQ ID NO: 332544 - protein, 14 aa, Homo sapiens
  CDR3 for beta chain variable domain of TCR clone 166272 (TRBV28, TRBJ2-7)
CASTTDRDGFVQYF

SEQ ID NO: 332545 - protein, 14 aa, Homo sapiens
  CDR3 for alpha chain variable domain of TCR clone 166273 (TRAV30, TRAJ26)
CGTEIVSYGQIFFF

SEQ ID NO: 332546 - protein, 13 aa, Homo sapiens
  CDR3 for beta chain variable domain of TCR clone 166273 (TRBV19, TRBJ1-3)
CASRLSLGNTIYF

SEQ ID NO: 332547 - protein, 12 aa, Homo sapiens
  CDR3 for alpha chain variable domain of TCR clone 166274 (TRAV13-2, TRAJ23)
CAERHRGGKLIF

SEQ ID NO: 332548 - protein, 16 aa, Homo sapiens
  CDR3 for beta chain variable domain of TCR clone 166274 (TRBV20-1, TRBJ1-4)
CSAPGQGLLTNETLFF

SEQ ID NO: 332549 - protein, 13 aa, Homo sapiens
  CDR3 for alpha chain variable domain of TCR clone 166275 (TRAV30, TRAJ24)
YGTVTDSWGKLQF

SEQ ID NO: 332550 - protein, 15 aa, Homo sapiens
  CDR3 for beta chain variable domain of TCR clone 166275 (TRBV25-1, TRBJ1-4)
CASSPGDSTNEKLFF

SEQ ID NO: 332551 - protein, 15 aa, Homo sapiens
  CDR3 for alpha chain variable domain of TCR clone 166276 (TRAV20, TRAJ50)
CAVRRMKTSYDKVIF

SEQ ID NO: 332552 - protein, 17 aa, Homo sapiens
  CDR3 for beta chain variable domain of TCR clone 166276 (TRBV28, TRBJ2-7)
CASSPLHRASGVYEQYF

SEQ ID NO: 332553 - protein, 14 aa, Homo sapiens
  CDR3 for alpha chain variable domain of TCR clone 166277 (TRAV1-2, TRAJ6)
CAVSLSGGSYMPTF

SEQ ID NO: 332554 - protein, 15 aa, Homo sapiens
  CDR3 for beta chain variable domain of TCR clone 166277 (TRBV28, TRBJ2-7)
CDSSPGGRGFYEQYF

SEQ ID NO: 332555 - protein, 14 aa, Homo sapiens
  CDR3 for alpha chain variable domain of TCR clone 166278 (TRAV12-2, TRAJ40)
CAVKISSGTSKYIF

SEQ ID NO: 332556 - protein, 15 aa, Homo sapiens
  CDR3 for beta chain variable domain of TCR clone 166278 (TRBV2, TRBJ2-7)
CASREGLARSYEQYF

SEQ ID NO: 332557 - protein, 14 aa, Homo sapiens
  CDR3 for alpha chain variable domain of TCR clone 166279 (TRAV1-2, TRAJ16)
YAVNRFSDGQKLLF

SEQ ID NO: 332558 - protein, 16 aa, Homo sapiens
  CDR3 for beta chain variable domain of TCR clone 166279 (TRBV19, TRBJ2-3)
CASSPEWDRGTDTQYF

SEQ ID NO: 332559 - protein, 12 aa, Homo sapiens
  CDR3 for alpha chain variable domain of TCR clone 166280 (TRAV12-2, TRAJ7)
CAVMRGNNRLAF

SEQ ID NO: 332560 - protein, 14 aa, Homo sapiens
  CDR3 for beta chain variable domain of TCR clone 166280 (TRBV19, TRBJ2-1)
CASPTFVLSGEQFF

SEQ ID NO: 332561 - protein, 14 aa, Homo sapiens
  CDR3 for alpha chain variable domain of TCR clone 166281 (TRAV23/DV6, TRAJ11)
CAASLESGYSTLTF

SEQ ID NO: 332562 - protein, 13 aa, Homo sapiens
  CDR3 for beta chain variable domain of TCR clone 166281 (TRBV4-1, TRBJ2-5)
CASNLTRGETQYF

SEQ ID NO: 332563 - protein, 14 aa, Homo sapiens
  CDR3 for alpha chain variable domain of TCR clone 166282 (TRAV23/DV6, TRAJ11)
CAASLESGYSTLTF

SEQ ID NO: 332564 - protein, 15 aa, Homo sapiens
  CDR3 for beta chain variable domain of TCR clone 166282 (TRBV28, TRBJ2-7)
CASSSPGTEPFDQYS

SEQ ID NO: 332565 - protein, 13 aa, Homo sapiens
  CDR3 for alpha chain variable domain of TCR clone 166283 (TRAV12-1, TRAJ16)
CVVNGPDGQKLLF

SEQ ID NO: 332566 - protein, 13 aa, Homo sapiens
  CDR3 for beta chain variable domain of TCR clone 166283 (TRBV2, TRBJ1-1)
CARNPTGGFDAFF

SEQ ID NO: 332567 - protein, 15 aa, Homo sapiens
  CDR3 for alpha chain variable domain of TCR clone 166284 (TRAV27, TRAJ28)
ASTSHSGAGSYQLTF

SEQ ID NO: 332568 - protein, 15 aa, Homo sapiens
  CDR3 for beta chain variable domain of TCR clone 166284 (TRBV2, TRBJ2-2)
CASSRVTVGTGELFF

SEQ ID NO: 332569 - protein, 15 aa, Homo sapiens
  CDR3 for alpha chain variable domain of TCR clone 166285 (TRAV8-3, TRAJ11)
CAVGLLNSGYSTLTF

SEQ ID NO: 332570 - protein, 12 aa, Homo sapiens
  CDR3 for beta chain variable domain of TCR clone 166285 (TRBV7-8, TRBJ2-1)
CASSLGHNEQFF

SEQ ID NO: 332571 - protein, 14 aa, Homo sapiens
  CDR3 for alpha chain variable domain of TCR clone 166286 (TRAV35, TRAJ13)
CAGSPSGGYQKVTF

SEQ ID NO: 332572 - protein, 17 aa, Homo sapiens
  CDR3 for beta chain variable domain of TCR clone 166286 (TRBV18, TRBJ1-5)
CQITTCRVRQNNQPQHF

SEQ ID NO: 332573 - protein, 13 aa, Homo sapiens
  CDR3 for alpha chain variable domain of TCR clone 166287 (TRAV12-3, TRAJ43)
CPMIRPNNNDMRF

SEQ ID NO: 332574 - protein, 12 aa, Homo sapiens
  CDR3 for beta chain variable domain of TCR clone 166287 (TRBV11-2, TRBJ2-5)
CASSLGQETQYF

SEQ ID NO: 332575 - protein, 12 aa, Homo sapiens
  CDR3 for alpha chain variable domain of TCR clone 166288 (TRAV3, TRAJ20)
CAVRDPDYKPSF

SEQ ID NO: 332576 - protein, 15 aa, Homo sapiens
  CDR3 for beta chain variable domain of TCR clone 166288 (TRBV2, TRBJ2-1)
CASTPTGSSYNEQFF

SEQ ID NO: 332577 - protein, 15 aa, Homo sapiens
  CDR3 for alpha chain variable domain of TCR clone 166289 (TRAV4, TRAJ26)
CLVGDMNNYDQNFVF

SEQ ID NO: 332578 - protein, 16 aa, Homo sapiens
  CDR3 for beta chain variable domain of TCR clone 166289 (TRBV28, TRBJ1-4)
CASCSRTGAANEKLFF

SEQ ID NO: 332579 - protein, 16 aa, Homo sapiens
  CDR3 for alpha chain variable domain of TCR clone 166290 (TRAV30, TRAJ24)
CGTEIVDADSWGKFQA

SEQ ID NO: 332580 - protein, 14 aa, Homo sapiens
  CDR3 for beta chain variable domain of TCR clone 166290 (TRBV12-5, TRBJ2-5)
CASGSRTHQETQYF

SEQ ID NO: 332581 - protein, 14 aa, Homo sapiens
  CDR3 for alpha chain variable domain of TCR clone 166291 (TRAV13-1, TRAJ44)
CAAKAPGTASKLTF

SEQ ID NO: 332582 - protein, 17 aa, Homo sapiens
  CDR3 for beta chain variable domain of TCR clone 166291 (TRBV7-3, TRBJ2-3)
RASSLMKRMRGADTQYF

SEQ ID NO: 332583 - protein, 15 aa, Homo sapiens
  CDR3 for alpha chain variable domain of TCR clone 166292 (TRAV13-1, TRAJ11)
CAASNRNSGYSTLTF

SEQ ID NO: 332584 - protein, 16 aa, Homo sapiens
  CDR3 for beta chain variable domain of TCR clone 166292 (TRBV13, TRBJ2-2)
CASSPRTGEHTGELFF

SEQ ID NO: 332585 - protein, 13 aa, Homo sapiens
  CDR3 for alpha chain variable domain of TCR clone 166293 (TRAV27, TRAJ45)
CRSSGGGADGLTF

SEQ ID NO: 332586 - protein, 14 aa, Homo sapiens
  CDR3 for beta chain variable domain of TCR clone 166293 (TRBV7-9, TRBJ2-1)
CASSSIVGFGEQFF

SEQ ID NO: 332587 - protein, 13 aa, Homo sapiens
  CDR3 for alpha chain variable domain of TCR clone 166294 (TRAV21, TRAJ57)
CAVTQGGSEKLVF

SEQ ID NO: 332588 - protein, 16 aa, Homo sapiens
  CDR3 for beta chain variable domain of TCR clone 166294 (TRBV5-1, TRBJ2-7)
CASSLEGLAGLYEQYF

SEQ ID NO: 332589 - protein, 13 aa, Homo sapiens
  CDR3 for alpha chain variable domain of TCR clone 166295 (TRAV16, TRAJ27)
CALSGGNAGKSTF

SEQ ID NO: 332590 - protein, 12 aa, Homo sapiens
  CDR3 for beta chain variable domain of TCR clone 166295 (TRBV11-2, TRBJ2-2)
CASSLPTGELFF

SEQ ID NO: 332591 - protein, 12 aa, Homo sapiens
  CDR3 for alpha chain variable domain of TCR clone 166296 (TRAV1-2, TRAJ29)
CAFRNLNTPLVF

SEQ ID NO: 332592 - protein, 16 aa, Homo sapiens
  CDR3 for beta chain variable domain of TCR clone 166296 (TRBV27, TRBJ2-2)
CASSFRGLVRTGELFF

SEQ ID NO: 332593 - protein, 11 aa, Homo sapiens
  CDR3 for alpha chain variable domain of TCR clone 166297 (TRAV12-2, TRAJ39)
CAVNNMLTFGG

SEQ ID NO: 332594 - protein, 17 aa, Homo sapiens
  CDR3 for beta chain variable domain of TCR clone 166297 (TRBV19, TRBJ1-6)
CASSISRTQSGNSPLHF

SEQ ID NO: 332595 - protein, 16 aa, Homo sapiens
  CDR3 for alpha chain variable domain of TCR clone 166298 (TRAV12-3, TRAJ53)
CAMSPGSGGSNYKLTF

SEQ ID NO: 332596 - protein, 15 aa, Homo sapiens
  CDR3 for beta chain variable domain of TCR clone 166298 (TRBV10-1, TRBJ2-3)
CASSATSGGFDTQYF

SEQ ID NO: 332597 - protein, 14 aa, Homo sapiens
  CDR3 for alpha chain variable domain of TCR clone 166299 (TRAV12-1, TRAJ18)
CVVSRGSTLGRLYF

SEQ ID NO: 332598 - protein, 16 aa, Homo sapiens
  CDR3 for beta chain variable domain of TCR clone 166299 (TRBV7-9, TRBJ2-1)
CASSDVAGGSYNEQFF

SEQ ID NO: 332599 - protein, 19 aa, Homo sapiens
  CDR3 for alpha chain variable domain of TCR clone 166300 (TRAV26-1, TRAJ52)
CIVRVANNAGGTSYGKLTF

SEQ ID NO: 332600 - protein, 13 aa, Homo sapiens
  CDR3 for beta chain variable domain of TCR clone 166300 (TRBV19, TRBJ2-1)
CASSPRASLEQFF

SEQ ID NO: 332601 - protein, 13 aa, Homo sapiens
  CDR3 for alpha chain variable domain of TCR clone 166301 (TRAV21, TRAJ20)
CAVGVFADYKPSF

SEQ ID NO: 332602 - protein, 14 aa, Homo sapiens
  CDR3 for beta chain variable domain of TCR clone 166301 (TRBV4-2, TRBJ1-4)
CASSLSSGNEKLFF

SEQ ID NO: 332603 - protein, 13 aa, Homo sapiens
  CDR3 for alpha chain variable domain of TCR clone 166302 (TRAV35, TRAJ36)
CARPRIGANNLFF

SEQ ID NO: 332604 - protein, 15 aa, Homo sapiens
  CDR3 for beta chain variable domain of TCR clone 166302 (TRBV28, TRBJ2-5)
CASSPPWSDQETQYF

SEQ ID NO: 332605 - protein, 18 aa, Homo sapiens
  CDR3 for alpha chain variable domain of TCR clone 166303 (TRAV26-2, TRAJ45)
CILRVDKYSAGGADGLTF

SEQ ID NO: 332606 - protein, 16 aa, Homo sapiens
  CDR3 for beta chain variable domain of TCR clone 166303 (TRBV2, TRBJ1-4)
CASNLLQGATNEELFF

SEQ ID NO: 332607 - protein, 13 aa, Homo sapiens
  CDR3 for alpha chain variable domain of TCR clone 166304 (TRAV29/DV5, TRAJ31)
CAASRNNNARLMF

SEQ ID NO: 332608 - protein, 13 aa, Homo sapiens
  CDR3 for beta chain variable domain of TCR clone 166304 (TRBV6-4, TRBJ2-3)
CASSVSWADTQYF

SEQ ID NO: 332609 - protein, 18 aa, Homo sapiens
  CDR3 for alpha chain variable domain of TCR clone 166305 (TRAV21, TRAJ52)
RAVRPSPAGGTSYGKLTF

SEQ ID NO: 332610 - protein, 15 aa, Homo sapiens
  CDR3 for beta chain variable domain of TCR clone 166305 (TRBV19, TRBJ1-1)
CASASGQIQNTEAFF

SEQ ID NO: 332611 - protein, 22 aa, Homo sapiens
  CDR3 for alpha chain variable domain of TCR clone 166306 (TRAV27, TRAJ41)
CAVRTQIPDIQNPDPAVYQLRD

SEQ ID NO: 332612 - protein, 16 aa, Homo sapiens
  CDR3 for beta chain variable domain of TCR clone 166306 (TRBV5-1, TRBJ2-3)
CTSSLGLAVYTDTQYF

SEQ ID NO: 332613 - protein, 15 aa, Homo sapiens
  CDR3 for alpha chain variable domain of TCR clone 166307 (TRAV13-1, TRAJ44)
CAASRGGGTASKITF

SEQ ID NO: 332614 - protein, 14 aa, Homo sapiens
  CDR3 for beta chain variable domain of TCR clone 166307 (TRBV7-2, TRBJ2-5)
CASSPRGRSETQYF

SEQ ID NO: 332615 - protein, 15 aa, Homo sapiens
  CDR3 for alpha chain variable domain of TCR clone 166308 (TRAV21, TRAJ57)
CAVIITQGGSETLVF

SEQ ID NO: 332616 - protein, 14 aa, Homo sapiens
  CDR3 for beta chain variable domain of TCR clone 166308 (TRBV5-1, TRBJ2-2)
CASSLIWIPGELFF

SEQ ID NO: 332617 - protein, 13 aa, Homo sapiens
  CDR3 for alpha chain variable domain of TCR clone 166309 (TRAV2, TRAJ15)
CAVASQSGTALIF

SEQ ID NO: 332618 - protein, 14 aa, Homo sapiens
  CDR3 for beta chain variable domain of TCR clone 166309 (TRBV4-1, TRBJ2-2)
CASSQAVNTGELFF

SEQ ID NO: 332619 - protein, 13 aa, Homo sapiens
  CDR3 for alpha chain variable domain of TCR clone 166310 (TRAV13-2, TRAJ48)
CAEMDFGNEKLTF

SEQ ID NO: 332620 - protein, 16 aa, Homo sapiens
  CDR3 for beta chain variable domain of TCR clone 166310 (TRBV2, TRBJ2-1)
CASSVVGSLSYNEQFF

SEQ ID NO: 332621 - protein, 17 aa, Homo sapiens
  CDR3 for alpha chain variable domain of TCR clone 166311 (TRAV3, TRAJ42)
CAVRDRDYGGSRGNLIF

SEQ ID NO: 332622 - protein, 12 aa, Homo sapiens
  CDR3 for beta chain variable domain of TCR clone 166311 (TRBV4-1, TRBJ2-3)
CASSQGTDTQYF

SEQ ID NO: 332623 - protein, 14 aa, Homo sapiens
  CDR3 for alpha chain variable domain of TCR clone 166312 (TRAV29/DV5, TRAJ49)
CAASAQNNGNQFYF

SEQ ID NO: 332624 - protein, 16 aa, Homo sapiens
  CDR3 for beta chain variable domain of TCR clone 166312 (TRBV12-4, TRBJ1-5)
CASRQPVEGSNQPQHF

SEQ ID NO: 332625 - protein, 18 aa, Homo sapiens
  CDR3 for alpha chain variable domain of TCR clone 166313 (TRAV1-2, TRAJ18)
CAVRDMGDRGSTLGRLYF

SEQ ID NO: 332626 - protein, 17 aa, Homo sapiens
  CDR3 for beta chain variable domain of TCR clone 166313 (TRBV28, TRBJ2-5)
CASSRQGGLAGAETQYF

SEQ ID NO: 332627 - protein, 12 aa, Homo sapiens
  CDR3 for alpha chain variable domain of TCR clone 166314 (TRAV3, TRAJ34)
CAVLGNTDKLIF

SEQ ID NO: 332628 - protein, 13 aa, Homo sapiens
  CDR3 for beta chain variable domain of TCR clone 166314 (TRBV19, TRBJ2-1)
CASSKGTGNEQFF

SEQ ID NO: 332629 - protein, 18 aa, Homo sapiens
  CDR3 for alpha chain variable domain of TCR clone 166315 (TRAV13-1, TRAJ52)
CAAKNPNAGGTSSGKLTF

SEQ ID NO: 332630 - protein, 14 aa, Homo sapiens
  CDR3 for beta chain variable domain of TCR clone 166315 (TRBV4-1, TRBJ2-2)
CASSQAVNTGELFF

SEQ ID NO: 332631 - protein, 18 aa, Homo sapiens
  CDR3 for alpha chain variable domain of TCR clone 166316 (TRAV12-3, TRAJ52)
CAMSRTNAGGTSYGKLTF

SEQ ID NO: 332632 - protein, 16 aa, Homo sapiens
  CDR3 for beta chain variable domain of TCR clone 166316 (TRBV29-1, TRBJ2-7)
CSVEVVGTSGSYEQYF

SEQ ID NO: 332633 - protein, 14 aa, Homo sapiens
  CDR3 for alpha chain variable domain of TCR clone 166317 (TRAV12-2, TRAJ40)
WAVKNPSGTYKYIF

SEQ ID NO: 332634 - protein, 14 aa, Homo sapiens
  CDR3 for beta chain variable domain of TCR clone 166317 (TRBV20-1, TRBJ1-1)
CSAQTRIGGTEAFF

SEQ ID NO: 332635 - protein, 13 aa, Homo sapiens
  CDR3 for alpha chain variable domain of TCR clone 166318 (TRAV13-1, TRAJ5)
CAASDTGRRALTF

SEQ ID NO: 332636 - protein, 12 aa, Homo sapiens
  CDR3 for beta chain variable domain of TCR clone 166318 (TRBV28, TRBJ2-7)
CASSVPPYEQYF

SEQ ID NO: 332637 - protein, 14 aa, Homo sapiens
  CDR3 for alpha chain variable domain of TCR clone 166319 (TRAV2, TRAJ20)
CAVEDVVNDYKLSF

SEQ ID NO: 332638 - protein, 13 aa, Homo sapiens
  CDR3 for beta chain variable domain of TCR clone 166319 (TRBV19, TRBJ2-7)
CASRKAGGSERYF

SEQ ID NO: 332639 - protein, 11 aa, Homo sapiens
  CDR3 for alpha chain variable domain of TCR clone 166320 (TRAV2, TRAJ33)
CAVESNYQLIW

SEQ ID NO: 332640 - protein, 14 aa, Homo sapiens
  CDR3 for beta chain variable domain of TCR clone 166320 (TRBV20-1, TRBJ2-7)
CSAPELAGVGEQYF

SEQ ID NO: 332641 - protein, 14 aa, Homo sapiens
  CDR3 for alpha chain variable domain of TCR clone 166321 (TRAV12-3, TRAJ10)
SHLPLAGGGNKLTF

SEQ ID NO: 332642 - protein, 13 aa, Homo sapiens
  CDR3 for beta chain variable domain of TCR clone 166321 (TRBV7-3, TRBJ1-1)
CASSQDWGAEAFF

SEQ ID NO: 332643 - protein, 14 aa, Homo sapiens
  CDR3 for alpha chain variable domain of TCR clone 166322 (TRAV2, TRAJ37)
CAVDFTSNTGKLIF

SEQ ID NO: 332644 - protein, 22 aa, Homo sapiens
  CDR3 for beta chain variable domain of TCR clone 166322 (TRBV6-1, TRBJ1-3)
CASVQGGGWKHHIFWRGKLAHC

SEQ ID NO: 332645 - protein, 11 aa, Homo sapiens
  CDR3 for alpha chain variable domain of TCR clone 166323 (TRAV1-2, TRAJ20)
CAVANDYKLSF

SEQ ID NO: 332646 - protein, 12 aa, Homo sapiens
  CDR3 for beta chain variable domain of TCR clone 166323 (TRBV11-2, TRBJ2-2)
CASSLPTGELFF

SEQ ID NO: 332647 - protein, 15 aa, Homo sapiens
  CDR3 for alpha chain variable domain of TCR clone 166324 (TRAV3, TRAJ22)
CAVRDRGGSASPLTF

SEQ ID NO: 332648 - protein, 16 aa, Homo sapiens
  CDR3 for beta chain variable domain of TCR clone 166324 (TRBV5-4, TRBJ2-3)
CASQQPGAGGADTQYF

SEQ ID NO: 332649 - protein, 13 aa, Homo sapiens
  CDR3 for alpha chain variable domain of TCR clone 166325 (TRAV2, TRAJ40)
CAVVTSGTYKYIF

SEQ ID NO: 332650 - protein, 16 aa, Homo sapiens
  CDR3 for beta chain variable domain of TCR clone 166325 (TRBV19, TRBJ2-1)
CASSIDGSFAYNEQFF

SEQ ID NO: 332651 - protein, 12 aa, Homo sapiens
  CDR3 for alpha chain variable domain of TCR clone 166326 (TRAV1-1, TRAJ8)
CAGGTGFQKLVF

SEQ ID NO: 332652 - protein, 15 aa, Homo sapiens
  CDR3 for beta chain variable domain of TCR clone 166326 (TRBV7-9, TRBJ1-4)
CASSRTGVFNEKLFC

SEQ ID NO: 332653 - protein, 15 aa, Homo sapiens
  CDR3 for alpha chain variable domain of TCR clone 166327 (TRAV29/DV5, TRAJ53)
CAASASGGSSYKLTF

SEQ ID NO: 332654 - protein, 17 aa, Homo sapiens
  CDR3 for beta chain variable domain of TCR clone 166327 (TRBV20-1, TRBJ2-2)
CSASGSGQGGLTGELFF

SEQ ID NO: 332655 - protein, 23 aa, Homo sapiens
  CDR3 for alpha chain variable domain of TCR clone 166328 (TRAV20, TRAJ32)
CAVDGMVVLQTSSSLEMALCLLS

SEQ ID NO: 332656 - protein, 16 aa, Homo sapiens
  CDR3 for beta chain variable domain of TCR clone 166328 (TRBV19, TRBJ2-2)
CASRSPGTGATGELFF

SEQ ID NO: 332657 - protein, 10 aa, Homo sapiens
  CDR3 for alpha chain variable domain of TCR clone 166329 (TRAV17, TRAJ45)
CATSLDLYSG

SEQ ID NO: 332658 - protein, 15 aa, Homo sapiens
  CDR3 for beta chain variable domain of TCR clone 166329 (TRBV11-2, TRBJ2-1)
CASSKNRGLIYKQFF

SEQ ID NO: 332659 - protein, 13 aa, Homo sapiens
  CDR3 for alpha chain variable domain of TCR clone 166330 (TRAV8-6, TRAJ8)
CAVSNTGFQKLVF

SEQ ID NO: 332660 - protein, 15 aa, Homo sapiens
  CDR3 for beta chain variable domain of TCR clone 166330 (TRBV28, TRBJ2-5)
CAGSSGRTIQETQYF

SEQ ID NO: 332661 - protein, 19 aa, Homo sapiens
  CDR3 for alpha chain variable domain of TCR clone 166331 (TRAV4, TRAJ13)
CLVGVQGSSGGTRKLPLEM

SEQ ID NO: 332662 - protein, 18 aa, Homo sapiens
  CDR3 for beta chain variable domain of TCR clone 166331 (TRBV15, TRBJ2-3)
CATSRDGARSWDTDTQYF

SEQ ID NO: 332663 - protein, 12 aa, Homo sapiens
  CDR3 for alpha chain variable domain of TCR clone 166332 (TRAV3, TRAJ43)
CAVRDPNNDMRF

SEQ ID NO: 332664 - protein, 16 aa, Homo sapiens
  CDR3 for beta chain variable domain of TCR clone 166332 (TRBV7-2, TRBJ2-7)
CASSLDPGGGSGEQYF

SEQ ID NO: 332665 - protein, 14 aa, Homo sapiens
  CDR3 for alpha chain variable domain of TCR clone 166333 (TRAV9-2, TRAJ39)
CALYIYNAGNMLTF

SEQ ID NO: 332666 - protein, 13 aa, Homo sapiens
  CDR3 for beta chain variable domain of TCR clone 166333 (TRBV7-9, TRBJ2-5)
CASSSTGTGTQYF

SEQ ID NO: 332667 - protein, 15 aa, Homo sapiens
  CDR3 for alpha chain variable domain of TCR clone 166334 (TRAV8-4, TRAJ48)
CAVSAAYFGNEKLTF

SEQ ID NO: 332668 - protein, 12 aa, Homo sapiens
  CDR3 for beta chain variable domain of TCR clone 166334 (TRBV3-1, TRBJ2-5)
CASSQGGETQSF

SEQ ID NO: 332669 - protein, 15 aa, Homo sapiens
  CDR3 for alpha chain variable domain of TCR clone 166335 (TRAV17, TRAJ10)
CATDASGEGGNKLTF

SEQ ID NO: 332670 - protein, 14 aa, Homo sapiens
  CDR3 for beta chain variable domain of TCR clone 166335 (TRBV20-1, TRBJ2-5)
CSVPYRGRAETQYF

SEQ ID NO: 332671 - protein, 14 aa, Homo sapiens
  CDR3 for alpha chain variable domain of TCR clone 166336 (TRAV12-3, TRAJ58)
CAMSTETSGSRLTF

SEQ ID NO: 332672 - protein, 13 aa, Homo sapiens
  CDR3 for beta chain variable domain of TCR clone 166336 (TRBV27, TRBJ2-3)
CASSWSRADTQYF

SEQ ID NO: 332673 - protein, 13 aa, Homo sapiens
  CDR3 for alpha chain variable domain of TCR clone 166337 (TRAV1-1, TRAJ9)
CAAKNTGGFKTIF

SEQ ID NO: 332674 - protein, 14 aa, Homo sapiens
  CDR3 for beta chain variable domain of TCR clone 166337 (TRBV20-1, TRBJ2-1)
CSAQIGGCANEQFF

SEQ ID NO: 332675 - protein, 13 aa, Homo sapiens
  CDR3 for alpha chain variable domain of TCR clone 166338 (TRAV6, TRAJ23)
CALDQNQGGKLIF

SEQ ID NO: 332676 - protein, 17 aa, Homo sapiens
  CDR3 for beta chain variable domain of TCR clone 166338 (TRBV7-8, TRBJ2-6)
CASSAGTGGAGANVLTF

SEQ ID NO: 332677 - protein, 16 aa, Homo sapiens
  CDR3 for alpha chain variable domain of TCR clone 166339 (TRAV12-1, TRAJ43)
CVVNPHRVGAGTRLTV

SEQ ID NO: 332678 - protein, 13 aa, Homo sapiens
  CDR3 for beta chain variable domain of TCR clone 166339 (TRBV20-1, TRBJ1-1)
CSARGGGNTEAFF

SEQ ID NO: 332679 - protein, 17 aa, Homo sapiens
  CDR3 for alpha chain variable domain of TCR clone 166340 (TRAV8-6, TRAJ58)
FAVSSWVGETSGSSLTF

SEQ ID NO: 332680 - protein, 14 aa, Homo sapiens
  CDR3 for beta chain variable domain of TCR clone 166340 (TRBV4-2, TRBJ2-1)
CASGLDRAYNEQFF

SEQ ID NO: 332681 - protein, 14 aa, Homo sapiens
  CDR3 for alpha chain variable domain of TCR clone 166341 (TRAV12-3, TRAJ10)
SHLPLTGGGNKLTF

SEQ ID NO: 332682 - protein, 14 aa, Homo sapiens
  CDR3 for beta chain variable domain of TCR clone 166341 (TRBV12-4, TRBJ2-1)
CASSLGQGASEQFF

SEQ ID NO: 332683 - protein, 13 aa, Homo sapiens
  CDR3 for alpha chain variable domain of TCR clone 166342 (TRAV1-2, TRAJ9)
CAALNTGGFKTIF

SEQ ID NO: 332684 - protein, 14 aa, Homo sapiens
  CDR3 for beta chain variable domain of TCR clone 166342 (TRBV19, TRBJ1-1)
CASSPNRGDTEAFF

SEQ ID NO: 332685 - protein, 13 aa, Homo sapiens
  CDR3 for alpha chain variable domain of TCR clone 166343 (TRAV21, TRAJ11)
FAVPNSGYSTLTF

SEQ ID NO: 332686 - protein, 13 aa, Homo sapiens
  CDR3 for beta chain variable domain of TCR clone 166343 (TRBV7-2, TRBJ1-1)
CASNLKGAKVAFF

SEQ ID NO: 332687 - protein, 15 aa, Homo sapiens
  CDR3 for alpha chain variable domain of TCR clone 166344 (TRAV13-1, TRAJ32)
CAASIYGGATNKLIF

SEQ ID NO: 332688 - protein, 12 aa, Homo sapiens
  CDR3 for beta chain variable domain of TCR clone 166344 (TRBV7-6, TRBJ2-3)
WASSTGTDTQYF

SEQ ID NO: 332689 - protein, 15 aa, Homo sapiens
  CDR3 for alpha chain variable domain of TCR clone 166345 (TRAV38-1, TRAJ37)
CAFIFGSCNTGKLLF

SEQ ID NO: 332690 - protein, 12 aa, Homo sapiens
  CDR3 for beta chain variable domain of TCR clone 166345 (TRBV7-9, TRBJ2-7)
CASSLEGYEQYF

SEQ ID NO: 332691 - protein, 22 aa, Homo sapiens
  CDR3 for alpha chain variable domain of TCR clone 166346 (TRAV4, )
CLVGPHNYDIQNPDPAVYQLRD

SEQ ID NO: 332692 - protein, 17 aa, Homo sapiens
  CDR3 for beta chain variable domain of TCR clone 166346 (TRBV24-1, TRBJ2-1)
CATSDVSISGTYNEQFF

SEQ ID NO: 332693 - protein, 14 aa, Homo sapiens
  CDR3 for alpha chain variable domain of TCR clone 166347 (TRAV12-2, TRAJ40)
CAVRIPSGTYKYIF

SEQ ID NO: 332694 - protein, 17 aa, Homo sapiens
  CDR3 for beta chain variable domain of TCR clone 166347 (TRBV11-2, TRBJ2-1)
CASSLYPPGVEYNEQFF

SEQ ID NO: 332695 - protein, 14 aa, Homo sapiens
  CDR3 for alpha chain variable domain of TCR clone 166348 (TRAV39, TRAJ58)
CAVDSETSGSRLTF

SEQ ID NO: 332696 - protein, 14 aa, Homo sapiens
  CDR3 for beta chain variable domain of TCR clone 166348 (TRBV12-5, TRBJ2-5)
CASGSRTHQETQYF

SEQ ID NO: 332697 - protein, 16 aa, Homo sapiens
  CDR3 for alpha chain variable domain of TCR clone 166349 (TRAV16, TRAJ4)
CALSRMFSGGYNKLIF

SEQ ID NO: 332698 - protein, 15 aa, Homo sapiens
  CDR3 for beta chain variable domain of TCR clone 166349 (TRBV7-3, TRBJ2-2)
CASSLEVLPTGELFF

SEQ ID NO: 332699 - protein, 14 aa, Homo sapiens
  CDR3 for alpha chain variable domain of TCR clone 166350 (TRAV1-1, TRAJ28)
CAAPSGAGSYRLTF

SEQ ID NO: 332700 - protein, 15 aa, Homo sapiens
  CDR3 for beta chain variable domain of TCR clone 166350 (TRBV7-2, TRBJ1-2)
CASSLVSGGDYGYTF

SEQ ID NO: 332701 - protein, 15 aa, Homo sapiens
  CDR3 for alpha chain variable domain of TCR clone 166351 (TRAV21, TRAJ21)
CAVRRRTSTNFTLDL

SEQ ID NO: 332702 - protein, 13 aa, Homo sapiens
  CDR3 for beta chain variable domain of TCR clone 166351 (TRBV20-1, TRBJ1-1)
CSARGGGNTEAFF

SEQ ID NO: 332703 - protein, 10 aa, Homo sapiens
  CDR3 for alpha chain variable domain of TCR clone 166352 (TRAV36/DV7, TRAJ56)
CAGPAVELTF

SEQ ID NO: 332704 - protein, 12 aa, Homo sapiens
  CDR3 for beta chain variable domain of TCR clone 166352 (TRBV29-1, TRBJ2-3)
CSVTGGADTQYF

SEQ ID NO: 332705 - protein, 13 aa, Homo sapiens
  CDR3 for alpha chain variable domain of TCR clone 166353 (TRAV20, TRAJ21)
CAVEGYNFNKFYF

SEQ ID NO: 332706 - protein, 14 aa, Homo sapiens
  CDR3 for beta chain variable domain of TCR clone 166353 (TRBV3-1, TRBJ2-5)
CASSQGPDQETQYY

SEQ ID NO: 332707 - protein, 12 aa, Homo sapiens
  CDR3 for alpha chain variable domain of TCR clone 166354 (TRAV12-2, TRAJ8)
CAVATGFQKLVF

SEQ ID NO: 332708 - protein, 12 aa, Homo sapiens
  CDR3 for beta chain variable domain of TCR clone 166354 (TRBV5-7, TRBJ1-1)
CASSLGRGKAFF

SEQ ID NO: 332709 - protein, 14 aa, Homo sapiens
  CDR3 for alpha chain variable domain of TCR clone 166355 (TRAV16, TRAJ32)
CALKSGGAKNKLIF

SEQ ID NO: 332710 - protein, 13 aa, Homo sapiens
  CDR3 for beta chain variable domain of TCR clone 166355 (TRBV15, TRBJ1-6)
CATSGGLNSPLHF

SEQ ID NO: 332711 - protein, 14 aa, Homo sapiens
  CDR3 for alpha chain variable domain of TCR clone 166356 (TRAV13-2, TRAJ15)
CAENPNQAGTALNF

SEQ ID NO: 332712 - protein, 16 aa, Homo sapiens
  CDR3 for beta chain variable domain of TCR clone 166356 (TRBV12-4, TRBJ1-2)
CASSPTATGKTRGYTF

SEQ ID NO: 332713 - protein, 11 aa, Homo sapiens
  CDR3 for alpha chain variable domain of TCR clone 166357 (TRAV29/DV5, TRAJ47)
CAAAYGNKLVF

SEQ ID NO: 332714 - protein, 17 aa, Homo sapiens
  CDR3 for beta chain variable domain of TCR clone 166357 (TRBV7-9, TRBJ2-1)
CASSLVASYPSYNEQFF

SEQ ID NO: 332715 - protein, 14 aa, Homo sapiens
  CDR3 for alpha chain variable domain of TCR clone 166358 (TRAV12-1, TRAJ46)
CVVTAKSSGDKLTF

SEQ ID NO: 332716 - protein, 17 aa, Homo sapiens
  CDR3 for beta chain variable domain of TCR clone 166358 (TRBV4-1, TRBJ2-3)
CASSHDPAGGPLDTQYF

SEQ ID NO: 332717 - protein, 13 aa, Homo sapiens
  CDR3 for alpha chain variable domain of TCR clone 166359 (TRAV12-2, TRAJ20)
CAVYPSNDYKLSF

SEQ ID NO: 332718 - protein, 15 aa, Homo sapiens
  CDR3 for beta chain variable domain of TCR clone 166359 (TRBV14, TRBJ1-1)
CASSQEGMGFTEAFF

SEQ ID NO: 332719 - protein, 11 aa, Homo sapiens
  CDR3 for alpha chain variable domain of TCR clone 166360 (TRAV26-1, TRAJ27)
CIDPNAGKSTI

SEQ ID NO: 332720 - protein, 18 aa, Homo sapiens
  CDR3 for beta chain variable domain of TCR clone 166360 (TRBV7-9, TRBJ2-6)
CASSFPGAGISGANVLTF

SEQ ID NO: 332721 - protein, 14 aa, Homo sapiens
  CDR3 for alpha chain variable domain of TCR clone 166361 (TRAV8-1, TRAJ5)
CAVRTDTGRRALTF

SEQ ID NO: 332722 - protein, 14 aa, Homo sapiens
  CDR3 for beta chain variable domain of TCR clone 166361 (TRBV19, TRBJ2-1)
CASPTFVSSGEQFF

SEQ ID NO: 332723 - protein, 13 aa, Homo sapiens
  CDR3 for alpha chain variable domain of TCR clone 166362 (TRAV12-3, TRAJ43)
CAMIRPNNNDMRF

SEQ ID NO: 332724 - protein, 17 aa, Homo sapiens
  CDR3 for beta chain variable domain of TCR clone 166362 (TRBV20-1, TRBJ2-1)
CSAPPRLAGTRYNEQFF

SEQ ID NO: 332725 - protein, 14 aa, Homo sapiens
  CDR3 for alpha chain variable domain of TCR clone 166363 (TRAV26-1, TRAJ15)
CIVRDNQAGTALIF

SEQ ID NO: 332726 - protein, 16 aa, Homo sapiens
  CDR3 for beta chain variable domain of TCR clone 166363 (TRBV20-1, TRBJ1-4)
CSAIGGPRGANEKLFF

SEQ ID NO: 332727 - protein, 16 aa, Homo sapiens
  CDR3 for alpha chain variable domain of TCR clone 166364 (TRAV30, TRAJ24)
CGTEIVDADSWGKFQF

SEQ ID NO: 332728 - protein, 18 aa, Homo sapiens
  CDR3 for beta chain variable domain of TCR clone 166364 (TRBV12-5, TRBJ2-5)
CARFTDTSRDPVLRARHA

SEQ ID NO: 332729 - protein, 14 aa, Homo sapiens
  CDR3 for alpha chain variable domain of TCR clone 166365 (TRAV17, TRAJ12)
CATDREDSSYKLIF

SEQ ID NO: 332730 - protein, 15 aa, Homo sapiens
  CDR3 for beta chain variable domain of TCR clone 166365 (TRBV20-1, TRBJ2-7)
CSAESGTSGAYEQYF

SEQ ID NO: 332731 - protein, 14 aa, Homo sapiens
  CDR3 for alpha chain variable domain of TCR clone 166366 (TRAV1-1, TRAJ27)
CAVIYITNAGKSTF

SEQ ID NO: 332732 - protein, 15 aa, Homo sapiens
  CDR3 for beta chain variable domain of TCR clone 166366 (TRBV6-3, TRBJ2-7)
CASSSPGTVFYEQYF

SEQ ID NO: 332733 - protein, 15 aa, Homo sapiens
  CDR3 for alpha chain variable domain of TCR clone 166367 (TRAV26-2, TRAJ13)
CILRDLSGGYQKVTF

SEQ ID NO: 332734 - protein, 11 aa, Homo sapiens
  CDR3 for beta chain variable domain of TCR clone 166367 (TRBV7-9, TRBJ2-5)
CASSLSATQDF

SEQ ID NO: 332735 - protein, 14 aa, Homo sapiens
  CDR3 for alpha chain variable domain of TCR clone 166368 (TRAV13-1, TRAJ44)
CAAKATGTASKLTF

SEQ ID NO: 332736 - protein, 13 aa, Homo sapiens
  CDR3 for beta chain variable domain of TCR clone 166368 (TRBV27, TRBJ2-7)
CASSLTTGYEQYF

SEQ ID NO: 332737 - protein, 17 aa, Homo sapiens
  CDR3 for alpha chain variable domain of TCR clone 166369 (TRAV1-1, TRAJ32)
CAVRVEELWWCYKQAHL

SEQ ID NO: 332738 - protein, 13 aa, Homo sapiens
  CDR3 for beta chain variable domain of TCR clone 166369 (TRBV27, TRBJ1-1)
CASSLSIGAEAFF

SEQ ID NO: 332739 - protein, 15 aa, Homo sapiens
  CDR3 for alpha chain variable domain of TCR clone 166370 (TRAV21, TRAJ53)
CATLNSGGSNYNLTF

SEQ ID NO: 332740 - protein, 13 aa, Homo sapiens
  CDR3 for beta chain variable domain of TCR clone 166370 (TRBV4-2, TRBJ1-1)
CASSQAGNTEAFF

SEQ ID NO: 332741 - protein, 12 aa, Homo sapiens
  CDR3 for alpha chain variable domain of TCR clone 166371 (TRAV26-1, TRAJ26)
CIVFIYGQNFVF

SEQ ID NO: 332742 - protein, 13 aa, Homo sapiens
  CDR3 for beta chain variable domain of TCR clone 166371 (TRBV27, TRBJ1-1)
CASSVSIGAEAFF

SEQ ID NO: 332743 - protein, 14 aa, Homo sapiens
  CDR3 for alpha chain variable domain of TCR clone 166372 (TRAV12-2, TRAJ13)
CAVKKTGGYQKVTF

SEQ ID NO: 332744 - protein, 15 aa, Homo sapiens
  CDR3 for beta chain variable domain of TCR clone 166372 (TRBV7-3, TRBJ1-1)
CASSYSGQGSTEAFF

SEQ ID NO: 332745 - protein, 15 aa, Homo sapiens
  CDR3 for alpha chain variable domain of TCR clone 166373 (TRAV4, TRAJ39)
CLVGPNNNTGNMLTF

SEQ ID NO: 332746 - protein, 12 aa, Homo sapiens
  CDR3 for beta chain variable domain of TCR clone 166373 (TRBV12-4, TRBJ2-7)
CASNPGGGEQYF

SEQ ID NO: 332747 - protein, 11 aa, Homo sapiens
  CDR3 for alpha chain variable domain of TCR clone 166374 (TRAV26-1, TRAJ37)
CIVRVGRKLIF

SEQ ID NO: 332748 - protein, 14 aa, Homo sapiens
  CDR3 for beta chain variable domain of TCR clone 166374 (TRBV7-8, TRBJ2-3)
CASSLEAGTDTQYF

SEQ ID NO: 332749 - protein, 11 aa, Homo sapiens
  CDR3 for alpha chain variable domain of TCR clone 166375 (TRAV2, TRAJ30)
CAANRDDKIIF

SEQ ID NO: 332750 - protein, 18 aa, Homo sapiens
  CDR3 for beta chain variable domain of TCR clone 166375 (TRBV7-9, TRBJ2-7)
CASSLTTSGNRTWYEQYF

SEQ ID NO: 332751 - protein, 16 aa, Homo sapiens
  CDR3 for alpha chain variable domain of TCR clone 166376 (TRAV30, TRAJ24)
CGTEIVDAASWGKFQF

SEQ ID NO: 332752 - protein, 17 aa, Homo sapiens
  CDR3 for beta chain variable domain of TCR clone 166376 (TRBV7-3, TRBJ2-3)
CASSLMKRMRGADTQYF

SEQ ID NO: 332753 - protein, 13 aa, Homo sapiens
  CDR3 for alpha chain variable domain of TCR clone 166377 (TRAV13-2, TRAJ13)
CAERPGGSKKVTF

SEQ ID NO: 332754 - protein, 13 aa, Homo sapiens
  CDR3 for beta chain variable domain of TCR clone 166377 (TRBV10-3, TRBJ2-7)
CASKLAVNYEQYF

SEQ ID NO: 332755 - protein, 15 aa, Homo sapiens
  CDR3 for alpha chain variable domain of TCR clone 166378 (TRAV4, TRAJ39)
CLVGPNNNAGNMLTF

SEQ ID NO: 332756 - protein, 13 aa, Homo sapiens
  CDR3 for beta chain variable domain of TCR clone 166378 (TRBV7-9, TRBJ1-6)
RSSPGRGNSPLHF

SEQ ID NO: 332757 - protein, 11 aa, Homo sapiens
  CDR3 for alpha chain variable domain of TCR clone 166379 (TRAV12-2, TRAJ49)
CAVRSGNQFYF

SEQ ID NO: 332758 - protein, 15 aa, Homo sapiens
  CDR3 for beta chain variable domain of TCR clone 166379 (TRBV20-1, TRBJ2-7)
CSARDRVSGMDEQYF

SEQ ID NO: 332759 - protein, 18 aa, Homo sapiens
  CDR3 for alpha chain variable domain of TCR clone 166380 (TRAV26-1, TRAJ30)
CCVLLHRQSTSRDDKIIF

SEQ ID NO: 332760 - protein, 18 aa, Homo sapiens
  CDR3 for beta chain variable domain of TCR clone 166380 (TRBV4-1, TRBJ1-5)
CASSQDPRGQGLNQPQHF

SEQ ID NO: 332761 - protein, 16 aa, Homo sapiens
  CDR3 for alpha chain variable domain of TCR clone 166381 (TRAV3, TRAJ37)
CAVRPHGSGNTGKLIF

SEQ ID NO: 332762 - protein, 15 aa, Homo sapiens
  CDR3 for beta chain variable domain of TCR clone 166381 (TRBV7-2, TRBJ2-2)
CASRRPGQNTGELFF

SEQ ID NO: 332763 - protein, 12 aa, Homo sapiens
  CDR3 for alpha chain variable domain of TCR clone 166382 (TRAV16, TRAJ10)
CSRTGGGSKLTF

SEQ ID NO: 332764 - protein, 19 aa, Homo sapiens
  CDR3 for beta chain variable domain of TCR clone 166382 (TRBV25-1, TRBJ2-2)
CAILVYRVDRGRKTGELFF

SEQ ID NO: 332765 - protein, 14 aa, Homo sapiens
  CDR3 for alpha chain variable domain of TCR clone 166383 (TRAV12-2, TRAJ13)
CAVKKTGGYQKVTF

SEQ ID NO: 332766 - protein, 14 aa, Homo sapiens
  CDR3 for beta chain variable domain of TCR clone 166383 (TRBV7-3, TRBJ2-2)
CASSSGGYTGELFF

SEQ ID NO: 332767 - protein, 15 aa, Homo sapiens
  CDR3 for alpha chain variable domain of TCR clone 166384 (TRAV13-1, TRAJ17)
CAASIHGGCRQQANF

SEQ ID NO: 332768 - protein, 14 aa, Homo sapiens
  CDR3 for beta chain variable domain of TCR clone 166384 (TRBV7-2, TRBJ2-7)
CASSPKTSFYEQYF

SEQ ID NO: 332769 - protein, 16 aa, Homo sapiens
  CDR3 for alpha chain variable domain of TCR clone 166385 (TRAV21, TRAJ37)
CAVRPRGSSDTGKLIF

SEQ ID NO: 332770 - protein, 13 aa, Homo sapiens
  CDR3 for beta chain variable domain of TCR clone 166385 (TRBV20-1, TRBJ2-2)
CSALSGGAGELFF

SEQ ID NO: 332771 - protein, 13 aa, Homo sapiens
  CDR3 for alpha chain variable domain of TCR clone 166386 (TRAV26-1, TRAJ48)
CIVRVVGDEKLIF

SEQ ID NO: 332772 - protein, 16 aa, Homo sapiens
  CDR3 for beta chain variable domain of TCR clone 166386 (TRBV12-5, TRBJ2-5)
CASGPRTSGNQETQYF

SEQ ID NO: 332773 - protein, 18 aa, Homo sapiens
  CDR3 for alpha chain variable domain of TCR clone 166387 (TRAV21, TRAJ52)
CAVRHFPAGGTSYGKLTF

SEQ ID NO: 332774 - protein, 16 aa, Homo sapiens
  CDR3 for beta chain variable domain of TCR clone 166387 (TRBV7-3, TRBJ2-1)
CASSLEGYRSYNEQFF

SEQ ID NO: 332775 - protein, 18 aa, Homo sapiens
  CDR3 for alpha chain variable domain of TCR clone 166388 (TRAV13-1, TRAJ52)
CAASRRRAGGTSYGKLTF

SEQ ID NO: 332776 - protein, 13 aa, Homo sapiens
  CDR3 for beta chain variable domain of TCR clone 166388 (TRBV12-4, TRBJ1-2)
CASSLRQGKGYTF

SEQ ID NO: 332777 - protein, 13 aa, Homo sapiens
  CDR3 for alpha chain variable domain of TCR clone 166389 (TRAV12-2, TRAJ9)
CAVCNTGGFKTIV

SEQ ID NO: 332778 - protein, 14 aa, Homo sapiens
  CDR3 for beta chain variable domain of TCR clone 166389 (TRBV7-2, TRBJ2-7)
CASRSQGAAYEQYF

SEQ ID NO: 332779 - protein, 12 aa, Homo sapiens
  CDR3 for alpha chain variable domain of TCR clone 166390 (TRAV2, TRAJ9)
CAVGAGGFKTIF

SEQ ID NO: 332780 - protein, 11 aa, Homo sapiens
  CDR3 for beta chain variable domain of TCR clone 166390 (TRBV11-2, TRBJ1-1)
CASSINTEAFF

SEQ ID NO: 332781 - protein, 16 aa, Homo sapiens
  CDR3 for alpha chain variable domain of TCR clone 166391 (TRAV23/DV6, TRAJ9)
CAASIGGNTGGFNTIF

SEQ ID NO: 332782 - protein, 16 aa, Homo sapiens
  CDR3 for beta chain variable domain of TCR clone 166391 (TRBV7-2, TRBJ2-1)
CASSLVAGAGYNEQFF

SEQ ID NO: 332783 - protein, 16 aa, Homo sapiens
  CDR3 for alpha chain variable domain of TCR clone 166392 (TRAV3, TRAJ37)
CAVRPHGSGNTGKLIF

SEQ ID NO: 332784 - protein, 16 aa, Homo sapiens
  CDR3 for beta chain variable domain of TCR clone 166392 (TRBV7-3, TRBJ2-2)
CASSLTGTGTTGELFF

SEQ ID NO: 332785 - protein, 14 aa, Homo sapiens
  CDR3 for alpha chain variable domain of TCR clone 166393 (TRAV12-3, TRAJ56)
CAMSVTGANSKLTF

SEQ ID NO: 332786 - protein, 15 aa, Homo sapiens
  CDR3 for beta chain variable domain of TCR clone 166393 (TRBV11-2, TRBJ2-2)
CASSPSGGGTGELFF

SEQ ID NO: 332787 - protein, 13 aa, Homo sapiens
  CDR3 for alpha chain variable domain of TCR clone 166394 (TRAV27, TRAJ29)
CAGAHSGNTPLVF

SEQ ID NO: 332788 - protein, 14 aa, Homo sapiens
  CDR3 for beta chain variable domain of TCR clone 166394 (TRBV7-9, TRBJ2-7)
CASTIGQGAGEQYF

SEQ ID NO: 332789 - protein, 11 aa, Homo sapiens
  CDR3 for alpha chain variable domain of TCR clone 166395 (TRAV1-2, TRAJ20)
CAVGNDYKLSF

SEQ ID NO: 332790 - protein, 16 aa, Homo sapiens
  CDR3 for beta chain variable domain of TCR clone 166395 (TRBV29-1, TRBJ2-6)
CSVEDITYSGANVLTF

SEQ ID NO: 332791 - protein, 14 aa, Homo sapiens
  CDR3 for alpha chain variable domain of TCR clone 166396 (TRAV1-2, TRAJ8)
CAVREDTGFQKLVC

SEQ ID NO: 332792 - protein, 14 aa, Homo sapiens
  CDR3 for beta chain variable domain of TCR clone 166396 (TRBV12-4, TRBJ1-1)
CASSLGTGGTEAFF

SEQ ID NO: 332793 - protein, 13 aa, Homo sapiens
  CDR3 for alpha chain variable domain of TCR clone 166397 (TRAV17, TRAJ15)
CATDAREGTALIF

SEQ ID NO: 332794 - protein, 15 aa, Homo sapiens
  CDR3 for beta chain variable domain of TCR clone 166397 (TRBV20-1, TRBJ2-7)
CSARDRVSGMDEQYF

SEQ ID NO: 332795 - protein, 14 aa, Homo sapiens
  CDR3 for alpha chain variable domain of TCR clone 166398 (TRAV8-4, TRAJ9)
CAVRINTGGFKTIF

SEQ ID NO: 332796 - protein, 15 aa, Homo sapiens
  CDR3 for beta chain variable domain of TCR clone 166398 (TRBV10-2, TRBJ2-6)
CASSEQGTGANALTL

SEQ ID NO: 332797 - protein, 14 aa, Homo sapiens
  CDR3 for alpha chain variable domain of TCR clone 166399 (TRAV17, TRAJ45)
CATDGRGGADGLTF

SEQ ID NO: 332798 - protein, 15 aa, Homo sapiens
  CDR3 for beta chain variable domain of TCR clone 166399 (TRBV28, TRBJ2-4)
CAAGSGTLLMGTQYF

SEQ ID NO: 332799 - protein, 15 aa, Homo sapiens
  CDR3 for alpha chain variable domain of TCR clone 166400 (TRAV21, TRAJ52)
SATRGGGTSYGKLTF

SEQ ID NO: 332800 - protein, 14 aa, Homo sapiens
  CDR3 for beta chain variable domain of TCR clone 166400 (TRBV28, TRBJ2-3)
CASSSAPSTDTQYF

SEQ ID NO: 332801 - protein, 13 aa, Homo sapiens
  CDR3 for alpha chain variable domain of TCR clone 166401 (TRAV12-1, TRAJ31)
CVVNMKNNARLMF

SEQ ID NO: 332802 - protein, 15 aa, Homo sapiens
  CDR3 for beta chain variable domain of TCR clone 166401 (TRBV4-1, TRBJ1-2)
CASSQGQGAAYGYTF

SEQ ID NO: 332803 - protein, 15 aa, Homo sapiens
  CDR3 for alpha chain variable domain of TCR clone 166402 (TRAV26-1, TRAJ29)
CIVRVEGSGKTTLVF

SEQ ID NO: 332804 - protein, 15 aa, Homo sapiens
  CDR3 for beta chain variable domain of TCR clone 166402 (TRBV7-9, TRBJ1-5)
CASSQGHQPNQPQHF

SEQ ID NO: 332805 - protein, 16 aa, Homo sapiens
  CDR3 for alpha chain variable domain of TCR clone 166403 (TRAV30, TRAJ24)
CGTEIVDADSWRKFQF

SEQ ID NO: 332806 - protein, 13 aa, Homo sapiens
  CDR3 for beta chain variable domain of TCR clone 166403 (TRBV11-2, TRBJ2-5)
CASSFSSQETQYF

SEQ ID NO: 332807 - protein, 11 aa, Homo sapiens
  CDR3 for alpha chain variable domain of TCR clone 166404 (TRAV35, TRAJ22)
CAGPGVGQLTF

SEQ ID NO: 332808 - protein, 16 aa, Homo sapiens
  CDR3 for beta chain variable domain of TCR clone 166404 (TRBV19, TRBJ2-2)
CASRSPGTGATGELFF

SEQ ID NO: 332809 - protein, 13 aa, Homo sapiens
  CDR3 for alpha chain variable domain of TCR clone 166405 (TRAV13-2, TRAJ48)
CAEMDFGNEKLTF

SEQ ID NO: 332810 - protein, 15 aa, Homo sapiens
  CDR3 for beta chain variable domain of TCR clone 166405 (TRBV28, TRBJ2-7)
CASSLISGGSYEQYF

SEQ ID NO: 332811 - protein, 14 aa, Homo sapiens
  CDR3 for alpha chain variable domain of TCR clone 166406 (TRAV8-3, TRAJ9)
CAVFYNTGGFKTFF

SEQ ID NO: 332812 - protein, 14 aa, Homo sapiens
  CDR3 for beta chain variable domain of TCR clone 166406 (TRBV7-3, TRBJ2-2)
CASSSGGYTGELFF

SEQ ID NO: 332813 - protein, 14 aa, Homo sapiens
  CDR3 for alpha chain variable domain of TCR clone 166407 (TRAV16, TRAJ32)
CALKSGGATNKHIF

SEQ ID NO: 332814 - protein, 13 aa, Homo sapiens
  CDR3 for beta chain variable domain of TCR clone 166407 (TRBV15, TRBJ1-6)
CATSGGLNSPLHF

SEQ ID NO: 332815 - protein, 12 aa, Homo sapiens
  CDR3 for alpha chain variable domain of TCR clone 166408 (TRAV21, TRAJ56)
CAVYGANSKLTF

SEQ ID NO: 332816 - protein, 16 aa, Homo sapiens
  CDR3 for beta chain variable domain of TCR clone 166408 (TRBV29-1, TRBJ2-7)
CSVDDAEDGTAYEQYF

SEQ ID NO: 332817 - protein, 14 aa, Homo sapiens
  CDR3 for alpha chain variable domain of TCR clone 166409 (TRAV12-3, TRAJ9)
CAKSPNTGGFKTIF

SEQ ID NO: 332818 - protein, 12 aa, Homo sapiens
  CDR3 for beta chain variable domain of TCR clone 166409 (TRBV19, TRBJ1-5)
CASSIAQQPQHF

SEQ ID NO: 332819 - protein, 14 aa, Homo sapiens
  CDR3 for alpha chain variable domain of TCR clone 166410 (TRAV1-2, TRAJ8)
CAVGEHTGFQKLVF

SEQ ID NO: 332820 - protein, 15 aa, Homo sapiens
  CDR3 for beta chain variable domain of TCR clone 166410 (TRBV6-3, TRBJ2-7)
CASSSPGTVFYEQYF

SEQ ID NO: 332821 - protein, 11 aa, Homo sapiens
  CDR3 for alpha chain variable domain of TCR clone 166411 (TRAV13-1, TRAJ43)
CSAHNNNDMRF

SEQ ID NO: 332822 - protein, 15 aa, Homo sapiens
  CDR3 for beta chain variable domain of TCR clone 166411 (TRBV6-1, TRBJ2-2)
CASSRLRGDTGELFF

SEQ ID NO: 332823 - protein, 18 aa, Homo sapiens
  CDR3 for alpha chain variable domain of TCR clone 166412 (TRAV21, TRAJ52)
CAVRPSPAGGTSSGKLTF

SEQ ID NO: 332824 - protein, 16 aa, Homo sapiens
  CDR3 for beta chain variable domain of TCR clone 166412 (TRBV7-3, TRBJ2-1)
CASSLEGYRSYNEQFF

SEQ ID NO: 332825 - protein, 19 aa, Homo sapiens
  CDR3 for alpha chain variable domain of TCR clone 166413 (TRAV2, TRAJ20)
ILQVREADAAVYRDCKLSF

SEQ ID NO: 332826 - protein, 16 aa, Homo sapiens
  CDR3 for beta chain variable domain of TCR clone 166413 (TRBV7-3, TRBJ2-2)
CASSLKRGTLSGELFF

SEQ ID NO: 332827 - protein, 13 aa, Homo sapiens
  CDR3 for alpha chain variable domain of TCR clone 166414 (TRAV17, TRAJ22)
CDHHSGSARQLTF

SEQ ID NO: 332828 - protein, 16 aa, Homo sapiens
  CDR3 for beta chain variable domain of TCR clone 166414 (TRBV4-1, TRBJ1-2)
CASSQDAGQVLYGYTF

SEQ ID NO: 332829 - protein, 14 aa, Homo sapiens
  CDR3 for alpha chain variable domain of TCR clone 166415 (TRAV3, TRAJ9)
CAVRLNPGGFKTIF

SEQ ID NO: 332830 - protein, 16 aa, Homo sapiens
  CDR3 for beta chain variable domain of TCR clone 166415 (TRBV12-5, TRBJ2-5)
CASGPRTSGNQETQYF

SEQ ID NO: 332831 - protein, 16 aa, Homo sapiens
  CDR3 for alpha chain variable domain of TCR clone 166416 (TRAV30, TRAJ24)
CGTEIVDADSWGKFQF

SEQ ID NO: 332832 - protein, 15 aa, Homo sapiens
  CDR3 for beta chain variable domain of TCR clone 166416 (TRBV7-2, TRBJ2-1)
CASTHGTWIYNEQFF

SEQ ID NO: 332833 - protein, 16 aa, Homo sapiens
  CDR3 for alpha chain variable domain of TCR clone 166417 (TRAV1-2, TRAJ10)
CAVRGVLTGGGNKLTF

SEQ ID NO: 332834 - protein, 13 aa, Homo sapiens
  CDR3 for beta chain variable domain of TCR clone 166417 (TRBV12-4, TRBJ1-2)
CASSLDSNYGYTF

SEQ ID NO: 332835 - protein, 14 aa, Homo sapiens
  CDR3 for alpha chain variable domain of TCR clone 166418 (TRAV16, TRAJ31)
CSKWRRGDNARLMF

SEQ ID NO: 332836 - protein, 16 aa, Homo sapiens
  CDR3 for beta chain variable domain of TCR clone 166418 (TRBV28, TRBJ2-7)
CASSLFFETGGPEQYV

SEQ ID NO: 332837 - protein, 13 aa, Homo sapiens
  CDR3 for alpha chain variable domain of TCR clone 166419 (TRAV1-2, TRAJ9)
CAVLNTGGFKTIF

SEQ ID NO: 332838 - protein, 13 aa, Homo sapiens
  CDR3 for beta chain variable domain of TCR clone 166419 (TRBV12-4, TRBJ1-2)
CASSSGSKDGYTF

SEQ ID NO: 332839 - protein, 17 aa, Homo sapiens
  CDR3 for alpha chain variable domain of TCR clone 166420 (TRAV3, TRAJ38)
CAVRDCLNAGNNRKLIW

SEQ ID NO: 332840 - protein, 16 aa, Homo sapiens
  CDR3 for beta chain variable domain of TCR clone 166420 (TRBV7-9, TRBJ1-3)
CASSLGAGSSGNTIYF

SEQ ID NO: 332841 - protein, 15 aa, Homo sapiens
  CDR3 for alpha chain variable domain of TCR clone 166421 (TRAV27, TRAJ38)
CAARRNAGNNRKLIW

SEQ ID NO: 332842 - protein, 15 aa, Homo sapiens
  CDR3 for beta chain variable domain of TCR clone 166421 (TRBV2, TRBJ2-3)
CASSDFEKATDTQYF

SEQ ID NO: 332843 - protein, 17 aa, Homo sapiens
  CDR3 for alpha chain variable domain of TCR clone 166422 (TRAV8-6, TRAJ4)
CAVSEKMDFGAGTRLAV

SEQ ID NO: 332844 - protein, 14 aa, Homo sapiens
  CDR3 for beta chain variable domain of TCR clone 166422 (TRBV20-1, TRBJ1-1)
CSAQTRIGGTEAFF

SEQ ID NO: 332845 - protein, 17 aa, Homo sapiens
  CDR3 for alpha chain variable domain of TCR clone 166423 (TRAV3, TRAJ6)
CAVRDGPRAGGSYIPTF

SEQ ID NO: 332846 - protein, 13 aa, Homo sapiens
  CDR3 for beta chain variable domain of TCR clone 166423 (TRBV11-3, TRBJ2-3)
CQSLVTTTDTQYF

SEQ ID NO: 332847 - protein, 14 aa, Homo sapiens
  CDR3 for alpha chain variable domain of TCR clone 166424 (TRAV12-2, TRAJ13)
CAVKKTGGYQKVTF

SEQ ID NO: 332848 - protein, 18 aa, Homo sapiens
  CDR3 for beta chain variable domain of TCR clone 166424 (TRBV20-1, TRBJ2-6)
CSARGSGTTRSGANVLTF

SEQ ID NO: 332849 - protein, 14 aa, Homo sapiens
  CDR3 for alpha chain variable domain of TCR clone 166425 (TRAV8-2, TRAJ4)
CVVSPSGGYNKLIF

SEQ ID NO: 332850 - protein, 13 aa, Homo sapiens
  CDR3 for beta chain variable domain of TCR clone 166425 (TRBV19, TRBJ1-2)
CASSVPGQDGYTF

SEQ ID NO: 332851 - protein, 14 aa, Homo sapiens
  CDR3 for alpha chain variable domain of TCR clone 166426 (TRAV12-2, TRAJ40)
CAVKIPSGVYKYIF

SEQ ID NO: 332852 - protein, 14 aa, Homo sapiens
  CDR3 for beta chain variable domain of TCR clone 166426 (TRBV20-1, TRBJ1-1)
CSAQTRIGGTEAFF

SEQ ID NO: 332853 - protein, 13 aa, Homo sapiens
  CDR3 for alpha chain variable domain of TCR clone 166427 (TRAV12-1, TRAJ30)
CVVNTYRDDKIIF

SEQ ID NO: 332854 - protein, 13 aa, Homo sapiens
  CDR3 for beta chain variable domain of TCR clone 166427 (TRBV9, TRBJ1-2)
CASSRLGGGGYIF

SEQ ID NO: 332855 - protein, 15 aa, Homo sapiens
  CDR3 for alpha chain variable domain of TCR clone 166428 (TRAV10, TRAJ44)
CVVRGATDTASKLTF

SEQ ID NO: 332856 - protein, 15 aa, Homo sapiens
  CDR3 for beta chain variable domain of TCR clone 166428 (TRBV12-4, TRBJ1-5)
CASTRQGSGNQPQHF

SEQ ID NO: 332857 - protein, 16 aa, Homo sapiens
  CDR3 for alpha chain variable domain of TCR clone 166429 (TRAV12-1, TRAJ45)
CVVIRYSGGGADGLTF

SEQ ID NO: 332858 - protein, 12 aa, Homo sapiens
  CDR3 for beta chain variable domain of TCR clone 166429 (TRBV6-5, TRBJ2-2)
CASRQTTGELFF

SEQ ID NO: 332859 - protein, 19 aa, Homo sapiens
  CDR3 for alpha chain variable domain of TCR clone 166430 (TRAV21, TRAJ20)
SLVTQPPTSVLPNDYKLSF

SEQ ID NO: 332860 - protein, 14 aa, Homo sapiens
  CDR3 for beta chain variable domain of TCR clone 166430 (TRBV7-2, TRBJ1-3)
CASSRRRSGNTIYF

SEQ ID NO: 332861 - protein, 14 aa, Homo sapiens
  CDR3 for alpha chain variable domain of TCR clone 166431 (TRAV20, TRAJ42)
CAVQAGGSQGNLIF

SEQ ID NO: 332862 - protein, 14 aa, Homo sapiens
  CDR3 for beta chain variable domain of TCR clone 166431 (TRBV19, TRBJ2-1)
CASPTFVLSGEQFF

SEQ ID NO: 332863 - protein, 12 aa, Homo sapiens
  CDR3 for alpha chain variable domain of TCR clone 166432 (TRAV20, TRAJ54)
CAVQEGDQKLVF

SEQ ID NO: 332864 - protein, 17 aa, Homo sapiens
  CDR3 for beta chain variable domain of TCR clone 166432 (TRBV13, TRBJ2-3)
CASSLSRVAGGRNTQYF

SEQ ID NO: 332865 - protein, 12 aa, Homo sapiens
  CDR3 for alpha chain variable domain of TCR clone 166433 (TRAV12-3, TRAJ29)
CAAREGNTPLVF

SEQ ID NO: 332866 - protein, 16 aa, Homo sapiens
  CDR3 for beta chain variable domain of TCR clone 166433 (TRBV18, TRBJ2-1)
CQLTISRGGGDNEQFF

SEQ ID NO: 332867 - protein, 12 aa, Homo sapiens
  CDR3 for alpha chain variable domain of TCR clone 166434 (TRAV10, TRAJ43)
CVVVRVGNDMRF

SEQ ID NO: 332868 - protein, 15 aa, Homo sapiens
  CDR3 for beta chain variable domain of TCR clone 166434 (TRBV2, TRBJ2-7)
CASSEGLARSYEQTF

SEQ ID NO: 332869 - protein, 17 aa, Homo sapiens
  CDR3 for alpha chain variable domain of TCR clone 166435 (TRAV20, TRAJ28)
CAVQGGYSGAGSYELTF

SEQ ID NO: 332870 - protein, 15 aa, Homo sapiens
  CDR3 for beta chain variable domain of TCR clone 166435 (TRBV7-2, TRBJ2-7)
CASSLSSGRTYEQYF

SEQ ID NO: 332871 - protein, 15 aa, Homo sapiens
  CDR3 for alpha chain variable domain of TCR clone 166436 (TRAV12-2, TRAJ22)
CAVNGASGSARQLTF

SEQ ID NO: 332872 - protein, 15 aa, Homo sapiens
  CDR3 for beta chain variable domain of TCR clone 166436 (TRBV18, TRBJ2-2)
CASLPPVGFTGELFF

SEQ ID NO: 332873 - protein, 13 aa, Homo sapiens
  CDR3 for alpha chain variable domain of TCR clone 166437 (TRAV27, TRAJ6)
CAGGTRGSYIPTF

SEQ ID NO: 332874 - protein, 14 aa, Homo sapiens
  CDR3 for beta chain variable domain of TCR clone 166437 (TRBV4-2, TRBJ2-7)
CASSHRAGEYEQYF

SEQ ID NO: 332875 - protein, 15 aa, Homo sapiens
  CDR3 for alpha chain variable domain of TCR clone 166438 (TRAV2, TRAJ13)
CSTPSYSGGYQKVTF

SEQ ID NO: 332876 - protein, 13 aa, Homo sapiens
  CDR3 for beta chain variable domain of TCR clone 166438 (TRBV14, TRBJ1-5)
CASSQDRRGPQHF

SEQ ID NO: 332877 - protein, 15 aa, Homo sapiens
  CDR3 for alpha chain variable domain of TCR clone 166439 (TRAV13-1, TRAJ48)
CAASTPVGGDEKLTF

SEQ ID NO: 332878 - protein, 13 aa, Homo sapiens
  CDR3 for beta chain variable domain of TCR clone 166439 (TRBV7-9, TRBJ1-2)
CASSLKQNYGYTF

SEQ ID NO: 332879 - protein, 14 aa, Homo sapiens
  CDR3 for alpha chain variable domain of TCR clone 166440 (TRAV10, TRAJ44)
CVVRDTGTASKLTF

SEQ ID NO: 332880 - protein, 16 aa, Homo sapiens
  CDR3 for beta chain variable domain of TCR clone 166440 (TRBV5-7, TRBJ2-1)
CASSLVPAGAYNEQFF

SEQ ID NO: 332881 - protein, 14 aa, Homo sapiens
  CDR3 for alpha chain variable domain of TCR clone 166441 (TRAV12-2, TRAJ35)
CAMSLIGFGNVLHC

SEQ ID NO: 332882 - protein, 16 aa, Homo sapiens
  CDR3 for beta chain variable domain of TCR clone 166441 (TRBV7-6, TRBJ2-7)
CQQLSSASGNSYEQYF

SEQ ID NO: 332883 - protein, 16 aa, Homo sapiens
  CDR3 for alpha chain variable domain of TCR clone 166442 (TRAV38-2/DV8, TRAJ10)
CAYTNILTGGGNKLTF

SEQ ID NO: 332884 - protein, 13 aa, Homo sapiens
  CDR3 for beta chain variable domain of TCR clone 166442 (TRBV7-2, TRBJ2-2)
CASSSVRAGELFF

SEQ ID NO: 332885 - protein, 13 aa, Homo sapiens
  CDR3 for alpha chain variable domain of TCR clone 166443 (TRAV26-1, TRAJ30)
CIVNMNRDDKSIF

SEQ ID NO: 332886 - protein, 16 aa, Homo sapiens
  CDR3 for beta chain variable domain of TCR clone 166443 (TRBV16, TRBJ2-7)
CASSRPAGGSSYEQYF

SEQ ID NO: 332887 - protein, 17 aa, Homo sapiens
  CDR3 for alpha chain variable domain of TCR clone 166444 (TRAV13-1, TRAJ31)
CAPRDRLMFGDGTQLVV

SEQ ID NO: 332888 - protein, 13 aa, Homo sapiens
  CDR3 for beta chain variable domain of TCR clone 166444 (TRBV19, TRBJ2-1)
CATSRGVYNEQFF

SEQ ID NO: 332889 - protein, 11 aa, Homo sapiens
  CDR3 for alpha chain variable domain of TCR clone 166445 (TRAV35, TRAJ30)
CAGPGDDKIIF

SEQ ID NO: 332890 - protein, 14 aa, Homo sapiens
  CDR3 for beta chain variable domain of TCR clone 166445 (TRBV7-6, TRBJ1-6)
CASSQAGDGSPLHF

SEQ ID NO: 332891 - protein, 15 aa, Homo sapiens
  CDR3 for alpha chain variable domain of TCR clone 166446 (TRAV8-2, TRAJ40)
CVVLGTTSGTYKYIF

SEQ ID NO: 332892 - protein, 13 aa, Homo sapiens
  CDR3 for beta chain variable domain of TCR clone 166446 (TRBV19, TRBJ2-1)
CASTNSDVGEQFF

SEQ ID NO: 332893 - protein, 14 aa, Homo sapiens
  CDR3 for alpha chain variable domain of TCR clone 166447 (TRAV12-1, TRAJ17)
CVVNYKAAGNKLTF

SEQ ID NO: 332894 - protein, 12 aa, Homo sapiens
  CDR3 for beta chain variable domain of TCR clone 166447 (TRBV19, TRBJ2-1)
CASSMQDTEQFF

SEQ ID NO: 332895 - protein, 12 aa, Homo sapiens
  CDR3 for alpha chain variable domain of TCR clone 166448 (TRAV1-2, TRAJ29)
CAVPSGNTPLVF

SEQ ID NO: 332896 - protein, 15 aa, Homo sapiens
  CDR3 for beta chain variable domain of TCR clone 166448 (TRBV5-7, TRBJ2-7)
CASSLGPGRGHEQYF

SEQ ID NO: 332897 - protein, 14 aa, Homo sapiens
  CDR3 for alpha chain variable domain of TCR clone 166449 (TRAV1-2, TRAJ8)
CAVREDTGFQKLVF

SEQ ID NO: 332898 - protein, 18 aa, Homo sapiens
  CDR3 for beta chain variable domain of TCR clone 166449 (TRBV7-9, TRBJ2-5)
CASSLVGGEETVLRARHA

SEQ ID NO: 332899 - protein, 12 aa, Homo sapiens
  CDR3 for alpha chain variable domain of TCR clone 166450 (TRAV27, TRAJ37)
CADSSNTGKLIF

SEQ ID NO: 332900 - protein, 14 aa, Homo sapiens
  CDR3 for beta chain variable domain of TCR clone 166450 (TRBV7-2, TRBJ1-2)
CASSQTGSTYGYTF

SEQ ID NO: 332901 - protein, 11 aa, Homo sapiens
  CDR3 for alpha chain variable domain of TCR clone 166451 (TRAV23/DV6, TRAJ58)
CAARLLRGETS

SEQ ID NO: 332902 - protein, 14 aa, Homo sapiens
  CDR3 for beta chain variable domain of TCR clone 166451 (TRBV2, TRBJ2-7)
CASSLTSGGYKQYF

SEQ ID NO: 332903 - protein, 15 aa, Homo sapiens
  CDR3 for alpha chain variable domain of TCR clone 166452 (TRAV17, TRAJ10)
CATVLLTGGGNKLTF

SEQ ID NO: 332904 - protein, 17 aa, Homo sapiens
  CDR3 for beta chain variable domain of TCR clone 166452 (TRBV11-2, TRBJ2-1)
CASSLYPPGVECNEQFF

SEQ ID NO: 332905 - protein, 14 aa, Homo sapiens
  CDR3 for alpha chain variable domain of TCR clone 166453 (TRAV27, TRAJ22)
CAGVVPGSARQLTF

SEQ ID NO: 332906 - protein, 16 aa, Homo sapiens
  CDR3 for beta chain variable domain of TCR clone 166453 (TRBV9, TRBJ2-7)
CASSVGLGGETYEQYF

SEQ ID NO: 332907 - protein, 16 aa, Homo sapiens
  CDR3 for alpha chain variable domain of TCR clone 166454 (TRAV13-2, TRAJ17)
CAEYKGGEAAGNKLTF

SEQ ID NO: 332908 - protein, 12 aa, Homo sapiens
  CDR3 for beta chain variable domain of TCR clone 166454 (TRBV11-2, TRBJ2-1)
CASSPGNNEQFF

SEQ ID NO: 332909 - protein, 16 aa, Homo sapiens
  CDR3 for alpha chain variable domain of TCR clone 166455 (TRAV16, TRAJ42)
CDRKMNYGGSQGNLIF

SEQ ID NO: 332910 - protein, 15 aa, Homo sapiens
  CDR3 for beta chain variable domain of TCR clone 166455 (TRBV20-1, TRBJ2-7)
CSAREGRDSLYEQYF

SEQ ID NO: 332911 - protein, 14 aa, Homo sapiens
  CDR3 for alpha chain variable domain of TCR clone 166456 (TRAV2, TRAJ9)
CAVEDRSGGFKPIF

SEQ ID NO: 332912 - protein, 15 aa, Homo sapiens
  CDR3 for beta chain variable domain of TCR clone 166456 (TRBV19, TRBJ2-1)
CASSHRDRGPNEQFF

SEQ ID NO: 332913 - protein, 15 aa, Homo sapiens
  CDR3 for alpha chain variable domain of TCR clone 166457 (TRAV21, TRAJ53)
CATLNSGGSNYKLTF

SEQ ID NO: 332914 - protein, 14 aa, Homo sapiens
  CDR3 for beta chain variable domain of TCR clone 166457 (TRBV7-2, TRBJ2-7)
CASSLDPGPYEQYF

SEQ ID NO: 332915 - protein, 14 aa, Homo sapiens
  CDR3 for alpha chain variable domain of TCR clone 166458 (TRAV8-2, TRAJ45)
CVVSAGGGADGVTF

SEQ ID NO: 332916 - protein, 12 aa, Homo sapiens
  CDR3 for beta chain variable domain of TCR clone 166458 (TRBV12-4, TRBJ2-1)
CASSLVRVEQFF

SEQ ID NO: 332917 - protein, 14 aa, Homo sapiens
  CDR3 for alpha chain variable domain of TCR clone 166459 (TRAV34, TRAJ22)
CGADTSGSARQLTF

SEQ ID NO: 332918 - protein, 15 aa, Homo sapiens
  CDR3 for beta chain variable domain of TCR clone 166459 (TRBV2, TRBJ2-3)
CQHGAPRRWTDTQYF

SEQ ID NO: 332919 - protein, 13 aa, Homo sapiens
  CDR3 for alpha chain variable domain of TCR clone 166460 (TRAV20, TRAJ34)
CAVSSYNTDKLIF

SEQ ID NO: 332920 - protein, 16 aa, Homo sapiens
  CDR3 for beta chain variable domain of TCR clone 166460 (TRBV13, TRBJ2-2)
CASSPRTGEHTGELFF

SEQ ID NO: 332921 - protein, 12 aa, Homo sapiens
  CDR3 for alpha chain variable domain of TCR clone 166461 (TRAV12-1, TRAJ40)
CVFYSGTYKYIF

SEQ ID NO: 332922 - protein, 17 aa, Homo sapiens
  CDR3 for beta chain variable domain of TCR clone 166461 (TRBV14, TRBJ2-1)
CASSQDRRVTSYNEQFF

SEQ ID NO: 332923 - protein, 10 aa, Homo sapiens
  CDR3 for alpha chain variable domain of TCR clone 166462 (TRAV12-3, TRAJ49)
CAMNDDQFYF

SEQ ID NO: 332924 - protein, 17 aa, Homo sapiens
  CDR3 for beta chain variable domain of TCR clone 166462 (TRBV7-6, TRBJ2-5)
CASSSPQAGDPSETQYF

SEQ ID NO: 332925 - protein, 11 aa, Homo sapiens
  CDR3 for alpha chain variable domain of TCR clone 166463 (TRAV38-1, TRAJ43)
CAFMKHNSGRH

SEQ ID NO: 332926 - protein, 15 aa, Homo sapiens
  CDR3 for beta chain variable domain of TCR clone 166463 (TRBV11-3, TRBJ2-3)
CASLKDGREGDTQYF

SEQ ID NO: 332927 - protein, 16 aa, Homo sapiens
  CDR3 for alpha chain variable domain of TCR clone 166464 (TRAV8-6, TRAJ4)
CAVTKILSGVYNKLIF

SEQ ID NO: 332928 - protein, 17 aa, Homo sapiens
  CDR3 for beta chain variable domain of TCR clone 166464 (TRBV20-1, TRBJ2-1)
CSASSSGLAGSYNEQFF

SEQ ID NO: 332929 - protein, 15 aa, Homo sapiens
  CDR3 for alpha chain variable domain of TCR clone 166465 (TRAV13-1, TRAJ44)
CAASRNTGTASKLTF

SEQ ID NO: 332930 - protein, 17 aa, Homo sapiens
  CDR3 for beta chain variable domain of TCR clone 166465 (TRBV7-8, TRBJ2-6)
CASSAGTGGAGANVLTF

SEQ ID NO: 332931 - protein, 13 aa, Homo sapiens
  CDR3 for alpha chain variable domain of TCR clone 166466 (TRAV35, TRAJ44)
CAGLSGTASKLTF

SEQ ID NO: 332932 - protein, 13 aa, Homo sapiens
  CDR3 for beta chain variable domain of TCR clone 166466 (TRBV12-5, TRBJ2-3)
CASGDRQSDTQYF

SEQ ID NO: 332933 - protein, 14 aa, Homo sapiens
  CDR3 for alpha chain variable domain of TCR clone 166467 (TRAV38-1, TRAJ40)
CALRPTSGTYKYIF

SEQ ID NO: 332934 - protein, 12 aa, Homo sapiens
  CDR3 for beta chain variable domain of TCR clone 166467 (TRBV7-2, TRBJ2-1)
CASSLRQNEQFF

SEQ ID NO: 332935 - protein, 18 aa, Homo sapiens
  CDR3 for alpha chain variable domain of TCR clone 166468 (TRAV21, TRAJ52)
CAVRPSPAGGTSYGKPTF

SEQ ID NO: 332936 - protein, 15 aa, Homo sapiens
  CDR3 for beta chain variable domain of TCR clone 166468 (TRBV7-2, TRBJ2-1)
CVSSLASGRVNEQFF

SEQ ID NO: 332937 - protein, 14 aa, Homo sapiens
  CDR3 for alpha chain variable domain of TCR clone 166469 (TRAV9-2, TRAJ39)
CALYIYNAGNMLTF

SEQ ID NO: 332938 - protein, 12 aa, Homo sapiens
  CDR3 for beta chain variable domain of TCR clone 166469 (TRBV6-1, TRBJ2-7)
CASSDYSYEQYF

SEQ ID NO: 332939 - protein, 11 aa, Homo sapiens
  CDR3 for alpha chain variable domain of TCR clone 166470 (TRAV12-3, TRAJ43)
CAMSVSNDMRF

SEQ ID NO: 332940 - protein, 11 aa, Homo sapiens
  CDR3 for beta chain variable domain of TCR clone 166470 (TRBV7-2, TRBJ2-3)
CASSASDTQYF

SEQ ID NO: 332941 - protein, 13 aa, Homo sapiens
  CDR3 for alpha chain variable domain of TCR clone 166471 (TRAV12-3, TRAJ13)
CAMSSGGYQKVTF

SEQ ID NO: 332942 - protein, 18 aa, Homo sapiens
  CDR3 for beta chain variable domain of TCR clone 166471 (TRBV3-1, TRBJ1-2)
CASSQDVIGWNGDYGYTF

SEQ ID NO: 332943 - protein, 15 aa, Homo sapiens
  CDR3 for alpha chain variable domain of TCR clone 166472 (TRAV4, TRAJ39)
CLVGPNNNAGNILTF

SEQ ID NO: 332944 - protein, 15 aa, Homo sapiens
  CDR3 for beta chain variable domain of TCR clone 166472 (TRBV19, TRBJ1-1)
CASTSGQIQNTEAFF

SEQ ID NO: 332945 - protein, 14 aa, Homo sapiens
  CDR3 for alpha chain variable domain of TCR clone 166473 (TRAV3, TRAJ26)
CAVRDYNYGQNFVF

SEQ ID NO: 332946 - protein, 15 aa, Homo sapiens
  CDR3 for beta chain variable domain of TCR clone 166473 (TRBV20-1, TRBJ2-5)
GSANPPGRGGETQYF

SEQ ID NO: 332947 - protein, 10 aa, Homo sapiens
  CDR3 for alpha chain variable domain of TCR clone 166474 (TRAV12-1, TRAJ33)
CVASNYQLNW

SEQ ID NO: 332948 - protein, 15 aa, Homo sapiens
  CDR3 for beta chain variable domain of TCR clone 166474 (TRBV5-4, TRBJ1-4)
CASSHGDGENEKLFF

SEQ ID NO: 332949 - protein, 10 aa, Homo sapiens
  CDR3 for alpha chain variable domain of TCR clone 166475 (TRAV1-2, TRAJ31)
CVSEDARLMF

SEQ ID NO: 332950 - protein, 16 aa, Homo sapiens
  CDR3 for beta chain variable domain of TCR clone 166475 (TRBV19, TRBJ2-2)
CASSTARASNTGELFF

SEQ ID NO: 332951 - protein, 18 aa, Homo sapiens
  CDR3 for alpha chain variable domain of TCR clone 166476 (TRAV3, TRAJ17)
CAVIARRGGRSCRQQANF

SEQ ID NO: 332952 - protein, 14 aa, Homo sapiens
  CDR3 for beta chain variable domain of TCR clone 166476 (TRBV4-1, TRBJ2-2)
CASSQAVNTGELFF

SEQ ID NO: 332953 - protein, 12 aa, Homo sapiens
  CDR3 for alpha chain variable domain of TCR clone 166477 (TRAV13-2, TRAJ8)
CAPWLGFKKLVF

SEQ ID NO: 332954 - protein, 14 aa, Homo sapiens
  CDR3 for beta chain variable domain of TCR clone 166477 (TRBV18, TRBJ1-5)
CASSRQQRNQPQHF

SEQ ID NO: 332955 - protein, 14 aa, Homo sapiens
  CDR3 for alpha chain variable domain of TCR clone 166478 (TRAV12-3, TRAJ10)
SHLPLTGGGNKLTF

SEQ ID NO: 332956 - protein, 13 aa, Homo sapiens
  CDR3 for beta chain variable domain of TCR clone 166478 (TRBV19, TRBJ2-2)
CASSPLGIGELFF

SEQ ID NO: 332957 - protein, 14 aa, Homo sapiens
  CDR3 for alpha chain variable domain of TCR clone 166479 (TRAV13-1, TRAJ44)
CAAKATGTASKLTF

SEQ ID NO: 332958 - protein, 16 aa, Homo sapiens
  CDR3 for beta chain variable domain of TCR clone 166479 (TRBV19, TRBJ2-1)
CASSKVGPSSYNEQFF

SEQ ID NO: 332959 - protein, 13 aa, Homo sapiens
  CDR3 for alpha chain variable domain of TCR clone 166480 (TRAV8-6, TRAJ49)
CAVITNTGNQFSF

SEQ ID NO: 332960 - protein, 14 aa, Homo sapiens
  CDR3 for beta chain variable domain of TCR clone 166480 (TRBV28, TRBJ2-7)
CAIVGQGNLYEQYF

SEQ ID NO: 332961 - protein, 12 aa, Homo sapiens
  CDR3 for alpha chain variable domain of TCR clone 166481 (TRAV8-3, TRAJ15)
CAGNQAGTALIF

SEQ ID NO: 332962 - protein, 13 aa, Homo sapiens
  CDR3 for beta chain variable domain of TCR clone 166481 (TRBV13, TRBJ2-1)
CASTPGSYNEQFF

SEQ ID NO: 332963 - protein, 15 aa, Homo sapiens
  CDR3 for alpha chain variable domain of TCR clone 166482 (TRAV13-1, TRAJ53)
CAAHSPGGSNYKLTF

SEQ ID NO: 332964 - protein, 13 aa, Homo sapiens
  CDR3 for beta chain variable domain of TCR clone 166482 (TRBV11-2, TRBJ2-5)
CASSSTGEETQYF

SEQ ID NO: 332965 - protein, 16 aa, Homo sapiens
  CDR3 for alpha chain variable domain of TCR clone 166483 (TRAV8-2, TRAJ36)
CVVSEVNWGKQPLLWD

SEQ ID NO: 332966 - protein, 15 aa, Homo sapiens
  CDR3 for beta chain variable domain of TCR clone 166483 (TRBV6-3, TRBJ2-7)
CASSSPGTVFYEQYF

SEQ ID NO: 332967 - protein, 15 aa, Homo sapiens
  CDR3 for alpha chain variable domain of TCR clone 166484 (TRAV17, TRAJ3)
CATDGPHSSASKIIF

SEQ ID NO: 332968 - protein, 14 aa, Homo sapiens
  CDR3 for beta chain variable domain of TCR clone 166484 (TRBV7-2, TRBJ2-7)
CASSLPPGQGPQYF

SEQ ID NO: 332969 - protein, 15 aa, Homo sapiens
  CDR3 for alpha chain variable domain of TCR clone 166485 (TRAV38-1, TRAJ57)
CAFMDSQGGSEKLVF

SEQ ID NO: 332970 - protein, 14 aa, Homo sapiens
  CDR3 for beta chain variable domain of TCR clone 166485 (TRBV6-1, TRBJ1-3)
CASVQGGGGNTIYF

SEQ ID NO: 332971 - protein, 14 aa, Homo sapiens
  CDR3 for alpha chain variable domain of TCR clone 166486 (TRAV1-1, TRAJ27)
GAVIYNTNAVKSTF

SEQ ID NO: 332972 - protein, 15 aa, Homo sapiens
  CDR3 for beta chain variable domain of TCR clone 166486 (TRBV7-2, TRBJ2-1)
CASSSGLAGGNEQFF

SEQ ID NO: 332973 - protein, 12 aa, Homo sapiens
  CDR3 for alpha chain variable domain of TCR clone 166487 (TRAV2, TRAJ31)
CAVEDNNARLMF

SEQ ID NO: 332974 - protein, 16 aa, Homo sapiens
  CDR3 for beta chain variable domain of TCR clone 166487 (TRBV10-3, TRBJ2-1)
CAISGVGDGEGGEQFF

SEQ ID NO: 332975 - protein, 14 aa, Homo sapiens
  CDR3 for alpha chain variable domain of TCR clone 166488 (TRAV12-2, TRAJ6)
CASKWGGGSYIPTC

SEQ ID NO: 332976 - protein, 13 aa, Homo sapiens
  CDR3 for beta chain variable domain of TCR clone 166488 (TRBV2, TRBJ1-1)
CASSEGGNTEAFF

SEQ ID NO: 332977 - protein, 12 aa, Homo sapiens
  CDR3 for alpha chain variable domain of TCR clone 166489 (TRAV8-3, TRAJ32)
CCGGGAPNKLIF

SEQ ID NO: 332978 - protein, 12 aa, Homo sapiens
  CDR3 for beta chain variable domain of TCR clone 166489 (TRBV7-8, TRBJ2-7)
CASSLGDREQYF

SEQ ID NO: 332979 - protein, 14 aa, Homo sapiens
  CDR3 for alpha chain variable domain of TCR clone 166490 (TRAV1-2, TRAJ16)
CAVNRFSDGQKLLF

SEQ ID NO: 332980 - protein, 16 aa, Homo sapiens
  CDR3 for beta chain variable domain of TCR clone 166490 (TRBV10-3, TRBJ2-1)
CAISGVGDGGGGGQFF

SEQ ID NO: 332981 - protein, 13 aa, Homo sapiens
  CDR3 for alpha chain variable domain of TCR clone 166491 (TRAV36/DV7, TRAJ49)
CAGDSNTGNQFYF

SEQ ID NO: 332982 - protein, 11 aa, Homo sapiens
  CDR3 for beta chain variable domain of TCR clone 166491 (TRBV12-4, TRBJ2-3)
CASTATDTQYF

SEQ ID NO: 332983 - protein, 15 aa, Homo sapiens
  CDR3 for alpha chain variable domain of TCR clone 166492 (TRAV34, TRAJ38)
CGADFTPGNNRKLIW

SEQ ID NO: 332984 - protein, 14 aa, Homo sapiens
  CDR3 for beta chain variable domain of TCR clone 166492 (TRBV9, TRBJ1-2)
CASSVSGTLYGYTF

SEQ ID NO: 332985 - protein, 14 aa, Homo sapiens
  CDR3 for alpha chain variable domain of TCR clone 166493 (TRAV1-1, TRAJ27)
CAVIYNTNAGKSTF

SEQ ID NO: 332986 - protein, 15 aa, Homo sapiens
  CDR3 for beta chain variable domain of TCR clone 166493 (TRBV6-3, TRBJ2-7)
CASSSPWTVFYEQYF

SEQ ID NO: 332987 - protein, 18 aa, Homo sapiens
  CDR3 for alpha chain variable domain of TCR clone 166494 (TRAV29/DV5, TRAJ52)
CAAGFRGAGGTSYGKLTF

SEQ ID NO: 332988 - protein, 16 aa, Homo sapiens
  CDR3 for beta chain variable domain of TCR clone 166494 (TRBV7-3, TRBJ2-2)
CASSLKRGTLTGELFF

SEQ ID NO: 332989 - protein, 10 aa, Homo sapiens
  CDR3 for alpha chain variable domain of TCR clone 166495 (TRAV8-4, TRAJ39)
CAVSGNMLTF

SEQ ID NO: 332990 - protein, 14 aa, Homo sapiens
  CDR3 for beta chain variable domain of TCR clone 166495 (TRBV25-1, TRBJ1-1)
CASTHLGGNTEAFF

SEQ ID NO: 332991 - protein, 12 aa, Homo sapiens
  CDR3 for alpha chain variable domain of TCR clone 166496 (TRAV13-1, TRAJ9)
CASHTGGFKTIF

SEQ ID NO: 332992 - protein, 18 aa, Homo sapiens
  CDR3 for beta chain variable domain of TCR clone 166496 (TRBV11-2, TRBJ2-3)
CASSLGGASRGAPNTQYV

SEQ ID NO: 332993 - protein, 13 aa, Homo sapiens
  CDR3 for alpha chain variable domain of TCR clone 166497 (TRAV8-3, TRAJ44)
CAVVPGTASKLTF

SEQ ID NO: 332994 - protein, 17 aa, Homo sapiens
  CDR3 for beta chain variable domain of TCR clone 166497 (TRBV5-1, TRBJ2-2)
CASSPRTGGMNTGELFF

SEQ ID NO: 332995 - protein, 13 aa, Homo sapiens
  CDR3 for alpha chain variable domain of TCR clone 166498 (TRAV21, TRAJ57)
CAVTQGGSEKLVF

SEQ ID NO: 332996 - protein, 15 aa, Homo sapiens
  CDR3 for beta chain variable domain of TCR clone 166498 (TRBV18, TRBJ2-7)
CASSPSSTGNYEQYF

SEQ ID NO: 332997 - protein, 16 aa, Homo sapiens
  CDR3 for alpha chain variable domain of TCR clone 166499 (TRAV1-2, TRAJ10)
CAVRGVRTGGGNKLTF

SEQ ID NO: 332998 - protein, 16 aa, Homo sapiens
  CDR3 for beta chain variable domain of TCR clone 166499 (TRBV4-2, TRBJ2-5)
CASSQELVGSQETQYF

SEQ ID NO: 332999 - protein, 13 aa, Homo sapiens
  CDR3 for alpha chain variable domain of TCR clone 166500 (TRAV26-1, TRAJ29)
CIVRRSGNTPLVF

SEQ ID NO: 333000 - protein, 15 aa, Homo sapiens
  CDR3 for beta chain variable domain of TCR clone 166500 (TRBV5-1, TRBJ2-3)
CASSVTSGSTDTQYF

SEQ ID NO: 333001 - protein, 14 aa, Homo sapiens
  CDR3 for alpha chain variable domain of TCR clone 166501 (TRAV17, TRAJ29)
CATNSNSGNTPLVF

SEQ ID NO: 333002 - protein, 17 aa, Homo sapiens
  CDR3 for beta chain variable domain of TCR clone 166501 (TRBV19, TRBJ1-1)
ISVPVVGGGALNTEAFF

SEQ ID NO: 333003 - protein, 13 aa, Homo sapiens
  CDR3 for alpha chain variable domain of TCR clone 166502 (TRAV13-1, TRAJ43)
CAASGNNNNDMRF

SEQ ID NO: 333004 - protein, 14 aa, Homo sapiens
  CDR3 for beta chain variable domain of TCR clone 166502 (TRBV14, TRBJ2-1)
CASSQVQGRGEQFF

SEQ ID NO: 333005 - protein, 15 aa, Homo sapiens
  CDR3 for alpha chain variable domain of TCR clone 166503 (TRAV35, TRAJ50)
CAGQLRKTSYDKVIF

SEQ ID NO: 333006 - protein, 12 aa, Homo sapiens
  CDR3 for beta chain variable domain of TCR clone 166503 (TRBV5-1, TRBJ2-5)
CASSVGLENQYF

SEQ ID NO: 333007 - protein, 13 aa, Homo sapiens
  CDR3 for alpha chain variable domain of TCR clone 166504 (TRAV12-1, TRAJ29)
CVVRNSGNTPPVF

SEQ ID NO: 333008 - protein, 12 aa, Homo sapiens
  CDR3 for beta chain variable domain of TCR clone 166504 (TRBV12-4, TRBJ2-7)
CASSLGGYEQYF

SEQ ID NO: 333009 - protein, 11 aa, Homo sapiens
  CDR3 for alpha chain variable domain of TCR clone 166505 (TRAV12-3, TRAJ43)
CAMSVSNDMRF

SEQ ID NO: 333010 - protein, 12 aa, Homo sapiens
  CDR3 for beta chain variable domain of TCR clone 166505 (TRBV29-1, TRBJ2-3)
CSVTGGADTQYF

SEQ ID NO: 333011 - protein, 14 aa, Homo sapiens
  CDR3 for alpha chain variable domain of TCR clone 166506 (TRAV36/DV7, TRAJ40)
CAVETTPGTYKYIF

SEQ ID NO: 333012 - protein, 12 aa, Homo sapiens
  CDR3 for beta chain variable domain of TCR clone 166506 (TRBV11-2, TRBJ2-2)
CASSLGGGELFF

SEQ ID NO: 333013 - protein, 11 aa, Homo sapiens
  CDR3 for alpha chain variable domain of TCR clone 166507 (TRAV1-1, TRAJ23)
CAVRQGGKLIF

SEQ ID NO: 333014 - protein, 13 aa, Homo sapiens
  CDR3 for beta chain variable domain of TCR clone 166507 (TRBV20-1, TRBJ1-2)
CSARGRVYGGYTF

SEQ ID NO: 333015 - protein, 14 aa, Homo sapiens
  CDR3 for alpha chain variable domain of TCR clone 166508 (TRAV12-3, TRAJ54)
CAMRIIQGAQKLVF

SEQ ID NO: 333016 - protein, 14 aa, Homo sapiens
  CDR3 for beta chain variable domain of TCR clone 166508 (TRBV6-5, TRBJ2-5)
CASNSGSPPETQYF

SEQ ID NO: 333017 - protein, 14 aa, Homo sapiens
  CDR3 for alpha chain variable domain of TCR clone 166509 (TRAV12-2, TRAJ24)
CAVTPADSWGKLQF

SEQ ID NO: 333018 - protein, 17 aa, Homo sapiens
  CDR3 for beta chain variable domain of TCR clone 166509 (TRBV7-9, TRBJ2-6)
CASSFGAGYSGANVLTF

SEQ ID NO: 333019 - protein, 15 aa, Homo sapiens
  CDR3 for alpha chain variable domain of TCR clone 166510 (TRAV4, TRAJ39)
CLVGPTNNAGNMLTF

SEQ ID NO: 333020 - protein, 12 aa, Homo sapiens
  CDR3 for beta chain variable domain of TCR clone 166510 (TRBV12-4, TRBJ2-7)
CASNPGGGEQYF

SEQ ID NO: 333021 - protein, 14 aa, Homo sapiens
  CDR3 for alpha chain variable domain of TCR clone 166511 (TRAV12-2, TRAJ13)
CAVKKTGGYQKVTF

SEQ ID NO: 333022 - protein, 15 aa, Homo sapiens
  CDR3 for beta chain variable domain of TCR clone 166511 (TRBV12-5, TRBJ2-2)
CASGFQGSGTGELFF

SEQ ID NO: 333023 - protein, 13 aa, Homo sapiens
  CDR3 for alpha chain variable domain of TCR clone 166512 (TRAV8-3, TRAJ43)
CAVVPYHNNDMRF

SEQ ID NO: 333024 - protein, 17 aa, Homo sapiens
  CDR3 for beta chain variable domain of TCR clone 166512 (TRBV7-7, TRBJ1-1)
CASMGDRPNLGVTEAFF

SEQ ID NO: 333025 - protein, 17 aa, Homo sapiens
  CDR3 for alpha chain variable domain of TCR clone 166513 (TRAV14/DV4, TRAJ4)
CAMREASGRGGYNKLIF

SEQ ID NO: 333026 - protein, 14 aa, Homo sapiens
  CDR3 for beta chain variable domain of TCR clone 166513 (TRBV19, TRBJ2-7)
CASSMGQGAIDQYF

SEQ ID NO: 333027 - protein, 14 aa, Homo sapiens
  CDR3 for alpha chain variable domain of TCR clone 166514 (TRAV26-1, TRAJ34)
CIVRVAYNTDKPIF

SEQ ID NO: 333028 - protein, 12 aa, Homo sapiens
  CDR3 for beta chain variable domain of TCR clone 166514 (TRBV5-1, TRBJ1-2)
CASSQDTYGYTF

SEQ ID NO: 333029 - protein, 13 aa, Homo sapiens
  CDR3 for alpha chain variable domain of TCR clone 166515 (TRAV12-2, TRAJ20)
CAVYPSNEYKLSF

SEQ ID NO: 333030 - protein, 15 aa, Homo sapiens
  CDR3 for beta chain variable domain of TCR clone 166515 (TRBV27, TRBJ2-5)
CASSLYPRGGETQYF

SEQ ID NO: 333031 - protein, 16 aa, Homo sapiens
  CDR3 for alpha chain variable domain of TCR clone 166516 (TRAV25, TRAJ52)
CAGPRAGGTSYGKLTF

SEQ ID NO: 333032 - protein, 15 aa, Homo sapiens
  CDR3 for beta chain variable domain of TCR clone 166516 (TRBV7-9, TRBJ2-2)
CASSPETGAGGELFF

SEQ ID NO: 333033 - protein, 21 aa, Homo sapiens
  CDR3 for alpha chain variable domain of TCR clone 166517 (TRAV9-2, TRAJ38)
CALSNAGNNHIQNPDPAVYQL

SEQ ID NO: 333034 - protein, 13 aa, Homo sapiens
  CDR3 for beta chain variable domain of TCR clone 166517 (TRBV19, TRBJ2-7)
CASSIDRTYEQYF

SEQ ID NO: 333035 - protein, 16 aa, Homo sapiens
  CDR3 for alpha chain variable domain of TCR clone 166518 (TRAV30, TRAJ24)
CGTEIVDADSWGKFQS

SEQ ID NO: 333036 - protein, 16 aa, Homo sapiens
  CDR3 for beta chain variable domain of TCR clone 166518 (TRBV19, TRBJ2-2)
CASSFPGQGLAGELFF

SEQ ID NO: 333037 - protein, 12 aa, Homo sapiens
  CDR3 for alpha chain variable domain of TCR clone 166519 (TRAV26-1, TRAJ33)
CILMDSNYQLIW

SEQ ID NO: 333038 - protein, 14 aa, Homo sapiens
  CDR3 for beta chain variable domain of TCR clone 166519 (TRBV7-2, TRBJ2-1)
CASSLVAGRNEQFF

SEQ ID NO: 333039 - protein, 13 aa, Homo sapiens
  CDR3 for alpha chain variable domain of TCR clone 166520 (TRAV8-3, TRAJ20)
CAVGAQDDYKLSF

SEQ ID NO: 333040 - protein, 16 aa, Homo sapiens
  CDR3 for beta chain variable domain of TCR clone 166520 (TRBV5-4, TRBJ2-3)
CASQQPGAGGADTQYF

SEQ ID NO: 333041 - protein, 12 aa, Homo sapiens
  CDR3 for alpha chain variable domain of TCR clone 166521 (TRAV8-3, TRAJ20)
CAVGANDYKLRF

SEQ ID NO: 333042 - protein, 16 aa, Homo sapiens
  CDR3 for beta chain variable domain of TCR clone 166521 (TRBV19, TRBJ2-2)
CASRSHGTGATGELFF

SEQ ID NO: 333043 - protein, 16 aa, Homo sapiens
  CDR3 for alpha chain variable domain of TCR clone 166522 (TRAV26-1, TRAJ58)
IASSESGETSGSRLTF

SEQ ID NO: 333044 - protein, 16 aa, Homo sapiens
  CDR3 for beta chain variable domain of TCR clone 166522 (TRBV7-2, TRBJ2-5)
CQQPRRGRKSRETQYF

SEQ ID NO: 333045 - protein, 14 aa, Homo sapiens
  CDR3 for alpha chain variable domain of TCR clone 166523 (TRAV17, TRAJ49)
CATDARDTGNQFSF

SEQ ID NO: 333046 - protein, 14 aa, Homo sapiens
  CDR3 for beta chain variable domain of TCR clone 166523 (TRBV5-5, TRBJ1-2)
CASSFGQINYGYTF

SEQ ID NO: 333047 - protein, 14 aa, Homo sapiens
  CDR3 for alpha chain variable domain of TCR clone 166524 (TRAV1-2, TRAJ16)
CAVNRFSDGQKLLF

SEQ ID NO: 333048 - protein, 15 aa, Homo sapiens
  CDR3 for beta chain variable domain of TCR clone 166524 (TRBV28, TRBJ1-3)
CASGATGNSGNTIYF

SEQ ID NO: 333049 - protein, 13 aa, Homo sapiens
  CDR3 for alpha chain variable domain of TCR clone 166525 (TRAV17, TRAJ9)
CATAITGGFKTIF

SEQ ID NO: 333050 - protein, 15 aa, Homo sapiens
  CDR3 for beta chain variable domain of TCR clone 166525 (TRBV11-2, TRBJ1-3)
CASGLDGTVGNTIYF

SEQ ID NO: 333051 - protein, 17 aa, Homo sapiens
  CDR3 for alpha chain variable domain of TCR clone 166526 (TRAV3, TRAJ6)
CAVRDGARAGGSYIPTF

SEQ ID NO: 333052 - protein, 14 aa, Homo sapiens
  CDR3 for beta chain variable domain of TCR clone 166526 (TRBV11-2, TRBJ2-3)
CASSRLARTDTQYF

SEQ ID NO: 333053 - protein, 14 aa, Homo sapiens
  CDR3 for alpha chain variable domain of TCR clone 166527 (TRAV16, TRAJ33)
CALSAMYSNYQLIW

SEQ ID NO: 333054 - protein, 19 aa, Homo sapiens
  CDR3 for beta chain variable domain of TCR clone 166527 (TRBV12-4, TRBJ2-1)
CASTLAFDPRYKEANEQFF

SEQ ID NO: 333055 - protein, 12 aa, Homo sapiens
  CDR3 for alpha chain variable domain of TCR clone 166528 (TRAV8-3, TRAJ26)
CAGDNYGQSFVF

SEQ ID NO: 333056 - protein, 11 aa, Homo sapiens
  CDR3 for beta chain variable domain of TCR clone 166528 (TRBV29-1, TRBJ2-5)
CSEDRTGTQYF

SEQ ID NO: 333057 - protein, 11 aa, Homo sapiens
  CDR3 for alpha chain variable domain of TCR clone 166529 (TRAV17, TRAJ9)
CGFTGGFKTIF

SEQ ID NO: 333058 - protein, 13 aa, Homo sapiens
  CDR3 for beta chain variable domain of TCR clone 166529 (TRBV12-4, TRBJ1-1)
CASSPGTGFEAFF

SEQ ID NO: 333059 - protein, 14 aa, Homo sapiens
  CDR3 for alpha chain variable domain of TCR clone 166530 (TRAV1-2, TRAJ15)
CAVRDRQAGTALIF

SEQ ID NO: 333060 - protein, 17 aa, Homo sapiens
  CDR3 for beta chain variable domain of TCR clone 166530 (TRBV7-8, TRBJ2-6)
CASSAGTGGAGANVLTF

SEQ ID NO: 333061 - protein, 14 aa, Homo sapiens
  CDR3 for alpha chain variable domain of TCR clone 166531 (TRAV12-3, TRAJ12)
CAMSEVDSSYKLIF

SEQ ID NO: 333062 - protein, 13 aa, Homo sapiens
  CDR3 for beta chain variable domain of TCR clone 166531 (TRBV10-3, TRBJ2-7)
CASKLAVNYEQYF

SEQ ID NO: 333063 - protein, 17 aa, Homo sapiens
  CDR3 for alpha chain variable domain of TCR clone 166532 (TRAV3, TRAJ13)
CAVRDMRRTGGYQKVTF

SEQ ID NO: 333064 - protein, 16 aa, Homo sapiens
  CDR3 for beta chain variable domain of TCR clone 166532 (TRBV6-1, TRBJ2-5)
CASSETLDRGAETQYF

SEQ ID NO: 333065 - protein, 14 aa, Homo sapiens
  CDR3 for alpha chain variable domain of TCR clone 166533 (TRAV1-2, TRAJ8)
CAVREDTGFQKLVF

SEQ ID NO: 333066 - protein, 16 aa, Homo sapiens
  CDR3 for beta chain variable domain of TCR clone 166533 (TRBV7-3, TRBJ2-2)
CASSLKRGSLSGELFF

SEQ ID NO: 333067 - protein, 13 aa, Homo sapiens
  CDR3 for alpha chain variable domain of TCR clone 166534 (TRAV35, TRAJ36)
CAGPRIGATNLFF

SEQ ID NO: 333068 - protein, 15 aa, Homo sapiens
  CDR3 for beta chain variable domain of TCR clone 166534 (TRBV28, TRBJ2-5)
CASSPPWTYQETHYF

SEQ ID NO: 333069 - protein, 16 aa, Homo sapiens
  CDR3 for alpha chain variable domain of TCR clone 166535 (TRAV30, TRAJ24)
CGTEIVDADSWGKFQF

SEQ ID NO: 333070 - protein, 14 aa, Homo sapiens
  CDR3 for beta chain variable domain of TCR clone 166535 (TRBV18, TRBJ2-7)
CASSPRGGAYEQCF

SEQ ID NO: 333071 - protein, 16 aa, Homo sapiens
  CDR3 for alpha chain variable domain of TCR clone 166536 (TRAV30, TRAJ24)
CGTEIVDADSWGKFQF

SEQ ID NO: 333072 - protein, 15 aa, Homo sapiens
  CDR3 for beta chain variable domain of TCR clone 166536 (TRBV20-1, TRBJ2-6)
FSARDRGPGANVLTF

SEQ ID NO: 333073 - protein, 15 aa, Homo sapiens
  CDR3 for alpha chain variable domain of TCR clone 166537 (TRAV29/DV5, TRAJ24)
CAASGATDRWGKFQF

SEQ ID NO: 333074 - protein, 13 aa, Homo sapiens
  CDR3 for beta chain variable domain of TCR clone 166537 (TRBV19, TRBJ1-2)
CASSVPGQDGYTF

SEQ ID NO: 333075 - protein, 14 aa, Homo sapiens
  CDR3 for alpha chain variable domain of TCR clone 166538 (TRAV8-4, TRAJ13)
CAVTLSGGYQKVTF

SEQ ID NO: 333076 - protein, 13 aa, Homo sapiens
  CDR3 for beta chain variable domain of TCR clone 166538 (TRBV2, TRBJ1-2)
CASSVRGNYGYTF

SEQ ID NO: 333077 - protein, 14 aa, Homo sapiens
  CDR3 for alpha chain variable domain of TCR clone 166539 (TRAV13-2, TRAJ15)
YAENHNQAGTALIF

SEQ ID NO: 333078 - protein, 16 aa, Homo sapiens
  CDR3 for beta chain variable domain of TCR clone 166539 (TRBV12-4, TRBJ1-2)
CASSPTATGKTRGYTF

SEQ ID NO: 333079 - protein, 15 aa, Homo sapiens
  CDR3 for alpha chain variable domain of TCR clone 166540 (TRAV3, TRAJ4)
CAVRDGTGGYNKLSF

SEQ ID NO: 333080 - protein, 15 aa, Homo sapiens
  CDR3 for beta chain variable domain of TCR clone 166540 (TRBV27, TRBJ2-1)
CASSNGGGSSNEQFF

SEQ ID NO: 333081 - protein, 13 aa, Homo sapiens
  CDR3 for alpha chain variable domain of TCR clone 166541 (TRAV8-1, TRAJ39)
CAVANNAGNMLTF

SEQ ID NO: 333082 - protein, 15 aa, Homo sapiens
  CDR3 for beta chain variable domain of TCR clone 166541 (TRBV7-2, TRBJ2-1)
CASSLNRGAYNERFF

SEQ ID NO: 333083 - protein, 11 aa, Homo sapiens
  CDR3 for alpha chain variable domain of TCR clone 166542 (TRAV1-2, TRAJ40)
CAVPGTYKYIF

SEQ ID NO: 333084 - protein, 16 aa, Homo sapiens
  CDR3 for beta chain variable domain of TCR clone 166542 (TRBV29-1, TRBJ2-7)
CSVEVVGTSGSYEKYF

SEQ ID NO: 333085 - protein, 11 aa, Homo sapiens
  CDR3 for alpha chain variable domain of TCR clone 166543 (TRAV2, TRAJ33)
CAVESNYQLIW

SEQ ID NO: 333086 - protein, 14 aa, Homo sapiens
  CDR3 for beta chain variable domain of TCR clone 166543 (TRBV19, TRBJ2-1)
CASPTFVSSGEQFF

SEQ ID NO: 333087 - protein, 11 aa, Homo sapiens
  CDR3 for alpha chain variable domain of TCR clone 166544 (TRAV12-3, TRAJ43)
CALSVSNDMRF

SEQ ID NO: 333088 - protein, 15 aa, Homo sapiens
  CDR3 for beta chain variable domain of TCR clone 166544 (TRBV5-1, TRBJ2-1)
CASSPPRAPYNEQFF

SEQ ID NO: 333089 - protein, 14 aa, Homo sapiens
  CDR3 for alpha chain variable domain of TCR clone 166545 (TRAV13-1, TRAJ13)
CAASRVGGYQKVTF

SEQ ID NO: 333090 - protein, 17 aa, Homo sapiens
  CDR3 for beta chain variable domain of TCR clone 166545 (TRBV15, TRBJ1-5)
CATSRAPPWTRNQPQHF

SEQ ID NO: 333091 - protein, 11 aa, Homo sapiens
  CDR3 for alpha chain variable domain of TCR clone 166546 (TRAV2, TRAJ13)
CASGGYQKVTF

SEQ ID NO: 333092 - protein, 12 aa, Homo sapiens
  CDR3 for beta chain variable domain of TCR clone 166546 (TRBV7-8, TRBJ2-7)
CAGSLGDREQYF

SEQ ID NO: 333093 - protein, 15 aa, Homo sapiens
  CDR3 for alpha chain variable domain of TCR clone 166547 (TRAV41, TRAJ45)
CAASYSGGGADGLTF

SEQ ID NO: 333094 - protein, 14 aa, Homo sapiens
  CDR3 for beta chain variable domain of TCR clone 166547 (TRBV27, TRBJ2-2)
CASRPGVNTGELFF

SEQ ID NO: 333095 - protein, 13 aa, Homo sapiens
  CDR3 for alpha chain variable domain of TCR clone 166548 (TRAV8-6, TRAJ40)
CAVSLTGTYKYIF

SEQ ID NO: 333096 - protein, 15 aa, Homo sapiens
  CDR3 for beta chain variable domain of TCR clone 166548 (TRBV4-1, TRBJ2-3)
CASSRGQGIPDTQYF

SEQ ID NO: 333097 - protein, 14 aa, Homo sapiens
  CDR3 for alpha chain variable domain of TCR clone 166549 (TRAV12-2, TRAJ15)
CAPHTSQAGTALIF

SEQ ID NO: 333098 - protein, 17 aa, Homo sapiens
  CDR3 for beta chain variable domain of TCR clone 166549 (TRBV5-5, TRBJ1-2)
CASSLGSLDGQSEGYTF

SEQ ID NO: 333099 - protein, 14 aa, Homo sapiens
  CDR3 for alpha chain variable domain of TCR clone 166550 (TRAV19, TRAJ15)
CALRIEQAVTALIF

SEQ ID NO: 333100 - protein, 19 aa, Homo sapiens
  CDR3 for beta chain variable domain of TCR clone 166550 (TRBV28, TRBJ2-4)
CASSFQPGGPAHSKNIQYF

SEQ ID NO: 333101 - protein, 14 aa, Homo sapiens
  CDR3 for alpha chain variable domain of TCR clone 166551 (TRAV21, TRAJ21)
CALGVEDNFNKFYF

SEQ ID NO: 333102 - protein, 13 aa, Homo sapiens
  CDR3 for beta chain variable domain of TCR clone 166551 (TRBV27, TRBJ2-7)
CASSLTTGYEQYF

SEQ ID NO: 333103 - protein, 17 aa, Homo sapiens
  CDR3 for alpha chain variable domain of TCR clone 166552 (TRAV36/DV7, TRAJ42)
CAGGGMNFGGSQGNLIF

SEQ ID NO: 333104 - protein, 13 aa, Homo sapiens
  CDR3 for beta chain variable domain of TCR clone 166552 (TRBV19, TRBJ2-5)
CASSIHSQETQYF

SEQ ID NO: 333105 - protein, 12 aa, Homo sapiens
  CDR3 for alpha chain variable domain of TCR clone 166553 (TRAV6, TRAJ40)
CARTSGTYKYIF

SEQ ID NO: 333106 - protein, 12 aa, Homo sapiens
  CDR3 for beta chain variable domain of TCR clone 166553 (TRBV27, TRBJ2-5)
CASSPTGETQYS

SEQ ID NO: 333107 - protein, 11 aa, Homo sapiens
  CDR3 for alpha chain variable domain of TCR clone 166554 (TRAV21, TRAJ48)
CAVDGTEKLTF

SEQ ID NO: 333108 - protein, 15 aa, Homo sapiens
  CDR3 for beta chain variable domain of TCR clone 166554 (TRBV2, TRBJ2-1)
CASSELAGSYNEQFF

SEQ ID NO: 333109 - protein, 15 aa, Homo sapiens
  CDR3 for alpha chain variable domain of TCR clone 166555 (TRAV8-3, TRAJ11)
CAVGLLNSGYSTLTF

SEQ ID NO: 333110 - protein, 20 aa, Homo sapiens
  CDR3 for beta chain variable domain of TCR clone 166555 (TRBV28, TRBJ2-1)
CASTPIGRSPGLAGGNEQFF

SEQ ID NO: 333111 - protein, 15 aa, Homo sapiens
  CDR3 for alpha chain variable domain of TCR clone 166556 (TRAV12-3, TRAJ6)
CAMSATTGGSYIPTF

SEQ ID NO: 333112 - protein, 15 aa, Homo sapiens
  CDR3 for beta chain variable domain of TCR clone 166556 (TRBV28, TRBJ1-2)
CASSRDREGGYGYTF

SEQ ID NO: 333113 - protein, 16 aa, Homo sapiens
  CDR3 for alpha chain variable domain of TCR clone 166557 (TRAV26-1, TRAJ32)
CIVRTNYGGATNKPIF

SEQ ID NO: 333114 - protein, 14 aa, Homo sapiens
  CDR3 for beta chain variable domain of TCR clone 166557 (TRBV27, TRBJ1-1)
CASSLLGGLSEAFF

SEQ ID NO: 333115 - protein, 14 aa, Homo sapiens
  CDR3 for alpha chain variable domain of TCR clone 166558 (TRAV9-2, TRAJ39)
CALYIYNAGKMLTF

SEQ ID NO: 333116 - protein, 17 aa, Homo sapiens
  CDR3 for beta chain variable domain of TCR clone 166558 (TRBV6-1, TRBJ1-5)
CASSEAEFIRARQPQHF

SEQ ID NO: 333117 - protein, 14 aa, Homo sapiens
  CDR3 for alpha chain variable domain of TCR clone 166559 (TRAV12-2, TRAJ13)
CAVKKTVGYQKVTF

SEQ ID NO: 333118 - protein, 16 aa, Homo sapiens
  CDR3 for beta chain variable domain of TCR clone 166559 (TRBV2, TRBJ2-1)
CASRSPAGGKYNEQFF

SEQ ID NO: 333119 - protein, 18 aa, Homo sapiens
  CDR3 for alpha chain variable domain of TCR clone 166560 (TRAV12-3, TRAJ52)
CAMSVGGAGGTSYGKLTF

SEQ ID NO: 333120 - protein, 11 aa, Homo sapiens
  CDR3 for beta chain variable domain of TCR clone 166560 (TRBV29-1, TRBJ2-5)
CSEDRTGTQYF

SEQ ID NO: 333121 - protein, 13 aa, Homo sapiens
  CDR3 for alpha chain variable domain of TCR clone 166561 (TRAV21, TRAJ20)
CAVGVFADYKLSF

SEQ ID NO: 333122 - protein, 16 aa, Homo sapiens
  CDR3 for beta chain variable domain of TCR clone 166561 (TRBV13, TRBJ2-2)
CASSPRTGEHTGELFF

SEQ ID NO: 333123 - protein, 15 aa, Homo sapiens
  CDR3 for alpha chain variable domain of TCR clone 166562 (TRAV23/DV6, TRAJ37)
CAVGRGSSNTGKLIF

SEQ ID NO: 333124 - protein, 14 aa, Homo sapiens
  CDR3 for beta chain variable domain of TCR clone 166562 (TRBV20-1, TRBJ1-1)
CSAQTRIGGTEAFF

SEQ ID NO: 333125 - protein, 14 aa, Homo sapiens
  CDR3 for alpha chain variable domain of TCR clone 166563 (TRAV27, TRAJ22)
CAGLPSGSARQLTF

SEQ ID NO: 333126 - protein, 16 aa, Homo sapiens
  CDR3 for beta chain variable domain of TCR clone 166563 (TRBV6-1, TRBJ2-5)
CASSETLDRGAETQYL

SEQ ID NO: 333127 - protein, 14 aa, Homo sapiens
  CDR3 for alpha chain variable domain of TCR clone 166564 (TRAV3, TRAJ9)
CAVRGNTGGFKTIF

SEQ ID NO: 333128 - protein, 15 aa, Homo sapiens
  CDR3 for beta chain variable domain of TCR clone 166564 (TRBV7-3, TRBJ2-7)
CASSLTPTGYDEQYF

SEQ ID NO: 333129 - protein, 12 aa, Homo sapiens
  CDR3 for alpha chain variable domain of TCR clone 166565 (TRAV13-2, TRAJ32)
RVYGGATNRLIF

SEQ ID NO: 333130 - protein, 15 aa, Homo sapiens
  CDR3 for beta chain variable domain of TCR clone 166565 (TRBV27, TRBJ1-6)
CASSFDRGLGSPLHF

SEQ ID NO: 333131 - protein, 12 aa, Homo sapiens
  CDR3 for alpha chain variable domain of TCR clone 166566 (TRAV16, TRAJ56)
CAPTGANSKLTF

SEQ ID NO: 333132 - protein, 17 aa, Homo sapiens
  CDR3 for beta chain variable domain of TCR clone 166566 (TRBV27, TRBJ2-6)
CASSLTGFASGANVLAF

SEQ ID NO: 333133 - protein, 14 aa, Homo sapiens
  CDR3 for alpha chain variable domain of TCR clone 166567 (TRAV12-1, TRAJ29)
CVVNEGSGNTPLVF

SEQ ID NO: 333134 - protein, 15 aa, Homo sapiens
  CDR3 for beta chain variable domain of TCR clone 166567 (TRBV20-1, TRBJ2-7)
CSARDRVSGMDEQYF

SEQ ID NO: 333135 - protein, 15 aa, Homo sapiens
  CDR3 for alpha chain variable domain of TCR clone 166568 (TRAV26-1, TRAJ29)
CIVRVDGSGNTPLVF

SEQ ID NO: 333136 - protein, 17 aa, Homo sapiens
  CDR3 for beta chain variable domain of TCR clone 166568 (TRBV7-9, TRBJ1-4)
CASSSGQLGGRSEKLFF

SEQ ID NO: 333137 - protein, 15 aa, Homo sapiens
  CDR3 for alpha chain variable domain of TCR clone 166569 (TRAV12-3, TRAJ47)
CAMSALVEYGNKLVF

SEQ ID NO: 333138 - protein, 16 aa, Homo sapiens
  CDR3 for beta chain variable domain of TCR clone 166569 (TRBV12-5, TRBJ2-5)
CASGPRTSGNQETQYF

SEQ ID NO: 333139 - protein, 16 aa, Homo sapiens
  CDR3 for alpha chain variable domain of TCR clone 166570 (TRAV3, TRAJ10)
CAVRDMRAGGGNKLTF

SEQ ID NO: 333140 - protein, 15 aa, Homo sapiens
  CDR3 for beta chain variable domain of TCR clone 166570 (TRBV6-3, TRBJ2-7)
CASSSPGTVFYEQCF

SEQ ID NO: 333141 - protein, 13 aa, Homo sapiens
  CDR3 for alpha chain variable domain of TCR clone 166571 (TRAV21, TRAJ27)
CAARPGNAGKSTF

SEQ ID NO: 333142 - protein, 16 aa, Homo sapiens
  CDR3 for beta chain variable domain of TCR clone 166571 (TRBV2, TRBJ2-5)
CASSETQGVGEETQCF

SEQ ID NO: 333143 - protein, 14 aa, Homo sapiens
  CDR3 for alpha chain variable domain of TCR clone 166572 (TRAV12-1, TRAJ34)
CVVNLDYNTDKLIF

SEQ ID NO: 333144 - protein, 19 aa, Homo sapiens
  CDR3 for beta chain variable domain of TCR clone 166572 (TRBV20-1, TRBJ2-7)
CSDAGTSGGEAPTSSTSGR

SEQ ID NO: 333145 - protein, 14 aa, Homo sapiens
  CDR3 for alpha chain variable domain of TCR clone 166573 (TRAV13-1, TRAJ44)
CAAKATGTASKLTV

SEQ ID NO: 333146 - protein, 14 aa, Homo sapiens
  CDR3 for beta chain variable domain of TCR clone 166573 (TRBV25-1, TRBJ1-1)
CASTHLGGNTEAFF

SEQ ID NO: 333147 - protein, 13 aa, Homo sapiens
  CDR3 for alpha chain variable domain of TCR clone 166574 (TRAV2, TRAJ15)
RAVASQAGTALIF

SEQ ID NO: 333148 - protein, 15 aa, Homo sapiens
  CDR3 for beta chain variable domain of TCR clone 166574 (TRBV20-1, TRBJ1-1)
CSASRGVTGNTEAFF

SEQ ID NO: 333149 - protein, 14 aa, Homo sapiens
  CDR3 for alpha chain variable domain of TCR clone 166575 (TRAV26-1, TRAJ39)
CIVFTNNTGNMLTF

SEQ ID NO: 333150 - protein, 15 aa, Homo sapiens
  CDR3 for beta chain variable domain of TCR clone 166575 (TRBV19, TRBJ2-4)
CASSLTGLTKNMQYF

SEQ ID NO: 333151 - protein, 12 aa, Homo sapiens
  CDR3 for alpha chain variable domain of TCR clone 166576 (TRAV35, TRAJ39)
LAPNNACNMLTF

SEQ ID NO: 333152 - protein, 13 aa, Homo sapiens
  CDR3 for beta chain variable domain of TCR clone 166576 (TRBV19, TRBJ1-3)
CASRLSLGNTIYF

SEQ ID NO: 333153 - protein, 14 aa, Homo sapiens
  CDR3 for alpha chain variable domain of TCR clone 166577 (TRAV9-2, TRAJ39)
CALYIYNAGNMLTF

SEQ ID NO: 333154 - protein, 17 aa, Homo sapiens
  CDR3 for beta chain variable domain of TCR clone 166577 (TRBV5-5, TRBJ1-1)
CASSLRFRGLMNTEDFF

SEQ ID NO: 333155 - protein, 12 aa, Homo sapiens
  CDR3 for alpha chain variable domain of TCR clone 166578 (TRAV26-1, TRAJ43)
FIVRPRGDDMRF

SEQ ID NO: 333156 - protein, 16 aa, Homo sapiens
  CDR3 for beta chain variable domain of TCR clone 166578 (TRBV3-1, TRBJ2-1)
CASSQGGRRSFDEQFF

SEQ ID NO: 333157 - protein, 12 aa, Homo sapiens
  CDR3 for alpha chain variable domain of TCR clone 166579 (TRAV12-2, TRAJ8)
CAVNTGFQKLVF

SEQ ID NO: 333158 - protein, 14 aa, Homo sapiens
  CDR3 for beta chain variable domain of TCR clone 166579 (TRBV7-8, TRBJ1-5)
CASSTQGAGQPQHF

SEQ ID NO: 333159 - protein, 13 aa, Homo sapiens
  CDR3 for alpha chain variable domain of TCR clone 166580 (TRAV21, TRAJ57)
CAVTQGGSKRLVF

SEQ ID NO: 333160 - protein, 16 aa, Homo sapiens
  CDR3 for beta chain variable domain of TCR clone 166580 (TRBV29-1, TRBJ2-7)
CSVEDAEDGTAYEQYF

SEQ ID NO: 333161 - protein, 12 aa, Homo sapiens
  CDR3 for alpha chain variable domain of TCR clone 166581 (TRAV6, TRAJ9)
CALVTGGFKTIF

SEQ ID NO: 333162 - protein, 18 aa, Homo sapiens
  CDR3 for beta chain variable domain of TCR clone 166581 (TRBV7-9, TRBJ2-7)
CASILTTSGSRTWYEQYF

SEQ ID NO: 333163 - protein, 14 aa, Homo sapiens
  CDR3 for alpha chain variable domain of TCR clone 166582 (TRAV12-1, TRAJ38)
CGELKAGNNRTLIW

SEQ ID NO: 333164 - protein, 12 aa, Homo sapiens
  CDR3 for beta chain variable domain of TCR clone 166582 (TRBV24-1, TRBJ1-1)
CATLYPDAEAFF

SEQ ID NO: 333165 - protein, 13 aa, Homo sapiens
  CDR3 for alpha chain variable domain of TCR clone 166583 (TRAV12-3, TRAJ33)
CAMSVNSNHQLIW

SEQ ID NO: 333166 - protein, 12 aa, Homo sapiens
  CDR3 for beta chain variable domain of TCR clone 166583 (TRBV14, TRBJ2-5)
CASSQLKETQYF

SEQ ID NO: 333167 - protein, 15 aa, Homo sapiens
  CDR3 for alpha chain variable domain of TCR clone 166584 (TRAV17, TRAJ57)
CATGPSQGGSEKLVF

SEQ ID NO: 333168 - protein, 12 aa, Homo sapiens
  CDR3 for beta chain variable domain of TCR clone 166584 (TRBV6-5, TRBJ2-5)
CQQSPGRRDQYF

SEQ ID NO: 333169 - protein, 16 aa, Homo sapiens
  CDR3 for alpha chain variable domain of TCR clone 166585 (TRAV26-1, TRAJ32)
YIVRTNYGGATNKLIF

SEQ ID NO: 333170 - protein, 14 aa, Homo sapiens
  CDR3 for beta chain variable domain of TCR clone 166585 (TRBV27, TRBJ1-1)
CASSLLSGLTEAFF

SEQ ID NO: 333171 - protein, 13 aa, Homo sapiens
  CDR3 for alpha chain variable domain of TCR clone 166586 (TRAV36/DV7, TRAJ49)
CAVEANTGNQFYF

SEQ ID NO: 333172 - protein, 13 aa, Homo sapiens
  CDR3 for beta chain variable domain of TCR clone 166586 (TRBV10-3, TRBJ2-7)
CATRLAVSYEQYF

SEQ ID NO: 333173 - protein, 13 aa, Homo sapiens
  CDR3 for alpha chain variable domain of TCR clone 166587 (TRAV27, TRAJ6)
CAGGTRGSYIPTF

SEQ ID NO: 333174 - protein, 14 aa, Homo sapiens
  CDR3 for beta chain variable domain of TCR clone 166587 (TRBV7-9, TRBJ2-1)
CASSPRDSLYEQFF

SEQ ID NO: 333175 - protein, 14 aa, Homo sapiens
  CDR3 for alpha chain variable domain of TCR clone 166588 (TRAV10, TRAJ34)
CVVIGKHRQAHLWD

SEQ ID NO: 333176 - protein, 14 aa, Homo sapiens
  CDR3 for beta chain variable domain of TCR clone 166588 (TRBV19, TRBJ2-1)
CASPTFVLSGEQFF

SEQ ID NO: 333177 - protein, 16 aa, Homo sapiens
  CDR3 for alpha chain variable domain of TCR clone 166589 (TRAV30, TRAJ24)
CGTEIMDADSWGKFQF

SEQ ID NO: 333178 - protein, 12 aa, Homo sapiens
  CDR3 for beta chain variable domain of TCR clone 166589 (TRBV11-2, TRBJ2-2)
CASSLGGGELFF

SEQ ID NO: 333179 - protein, 12 aa, Homo sapiens
  CDR3 for alpha chain variable domain of TCR clone 166590 (TRAV8-4, TRAJ37)
CAKSSNTGKLIF

SEQ ID NO: 333180 - protein, 14 aa, Homo sapiens
  CDR3 for beta chain variable domain of TCR clone 166590 (TRBV19, TRBJ2-1)
CASPTFVLSGEQFF

SEQ ID NO: 333181 - protein, 18 aa, Homo sapiens
  CDR3 for alpha chain variable domain of TCR clone 166591 (TRAV21, TRAJ52)
LAVRPSPAGGTSYGKLTF

SEQ ID NO: 333182 - protein, 19 aa, Homo sapiens
  CDR3 for beta chain variable domain of TCR clone 166591 (TRBV7-2, TRBJ2-3)
CASSFLSRNWGGGTDTQYF

SEQ ID NO: 333183 - protein, 12 aa, Homo sapiens
  CDR3 for alpha chain variable domain of TCR clone 166592 (TRAV3, TRAJ39)
CAMIEWSNMLTF

SEQ ID NO: 333184 - protein, 14 aa, Homo sapiens
  CDR3 for beta chain variable domain of TCR clone 166592 (TRBV7-8, TRBJ2-3)
CASSFPDGQDTQYF

SEQ ID NO: 333185 - protein, 11 aa, Homo sapiens
  CDR3 for alpha chain variable domain of TCR clone 166593 (TRAV8-6, TRAJ23)
CAVISGGKLIF

SEQ ID NO: 333186 - protein, 14 aa, Homo sapiens
  CDR3 for beta chain variable domain of TCR clone 166593 (TRBV12-5, TRBJ2-5)
CTSGSRTNQETQYF

SEQ ID NO: 333187 - protein, 15 aa, Homo sapiens
  CDR3 for alpha chain variable domain of TCR clone 166594 (TRAV21, TRAJ53)
CATWNSGGSNYKLTF

SEQ ID NO: 333188 - protein, 16 aa, Homo sapiens
  CDR3 for beta chain variable domain of TCR clone 166594 (TRBV9, TRBJ2-1)
CASSVGGGGNYNEQFF

SEQ ID NO: 333189 - protein, 14 aa, Homo sapiens
  CDR3 for alpha chain variable domain of TCR clone 166595 (TRAV35, TRAJ40)
CAGSTTSGTYKYIF

SEQ ID NO: 333190 - protein, 13 aa, Homo sapiens
  CDR3 for beta chain variable domain of TCR clone 166595 (TRBV20-1, TRBJ1-6)
CSAPLRVGSPLHF

SEQ ID NO: 333191 - protein, 12 aa, Homo sapiens
  CDR3 for alpha chain variable domain of TCR clone 166596 (TRAV8-6, TRAJ43)
CAVRYNNNDMRF

SEQ ID NO: 333192 - protein, 12 aa, Homo sapiens
  CDR3 for beta chain variable domain of TCR clone 166596 (TRBV12-4, TRBJ2-7)
CASSLGGYEQYF

SEQ ID NO: 333193 - protein, 12 aa, Homo sapiens
  CDR3 for alpha chain variable domain of TCR clone 166597 (TRAV21, TRAJ20)
CAVRGNDYKLSF

SEQ ID NO: 333194 - protein, 14 aa, Homo sapiens
  CDR3 for beta chain variable domain of TCR clone 166597 (TRBV7-8, TRBJ2-7)
CASSQTQGGDEQYF

SEQ ID NO: 333195 - protein, 11 aa, Homo sapiens
  CDR3 for alpha chain variable domain of TCR clone 166598 (TRAV20, TRAJ53)
CGRGSNYKLTF

SEQ ID NO: 333196 - protein, 13 aa, Homo sapiens
  CDR3 for beta chain variable domain of TCR clone 166598 (TRBV12-5, TRBJ2-3)
CASGDRQSDTQYF

SEQ ID NO: 333197 - protein, 13 aa, Homo sapiens
  CDR3 for alpha chain variable domain of TCR clone 166599 (TRAV38-2/DV8, TRAJ49)
CAYRSAIGNQFYF

SEQ ID NO: 333198 - protein, 13 aa, Homo sapiens
  CDR3 for beta chain variable domain of TCR clone 166599 (TRBV7-9, TRBJ1-2)
CASSLKQNYGYTF

SEQ ID NO: 333199 - protein, 14 aa, Homo sapiens
  CDR3 for alpha chain variable domain of TCR clone 166600 (TRAV35, TRAJ13)
CAGSPSGGYQKVTF

SEQ ID NO: 333200 - protein, 14 aa, Homo sapiens
  CDR3 for beta chain variable domain of TCR clone 166600 (TRBV11-2, TRBJ2-3)
CASSRLARTDTQYF

SEQ ID NO: 333201 - protein, 15 aa, Homo sapiens
  CDR3 for alpha chain variable domain of TCR clone 166601 (TRAV8-4, TRAJ12)
CAVSDRVDSSYKFIF

SEQ ID NO: 333202 - protein, 15 aa, Homo sapiens
  CDR3 for beta chain variable domain of TCR clone 166601 (TRBV11-3, TRBJ2-1)
CASSLAGQTYNEQFF

SEQ ID NO: 333203 - protein, 15 aa, Homo sapiens
  CDR3 for alpha chain variable domain of TCR clone 166602 (TRAV27, TRAJ37)
CAGIHGSSNTGKLIF

SEQ ID NO: 333204 - protein, 13 aa, Homo sapiens
  CDR3 for beta chain variable domain of TCR clone 166602 (TRBV19, TRBJ2-1)
CASSISSSWEQFF

SEQ ID NO: 333205 - protein, 14 aa, Homo sapiens
  CDR3 for alpha chain variable domain of TCR clone 166603 (TRAV12-2, TRAJ13)
CAVKKTGGYQKVTF

SEQ ID NO: 333206 - protein, 15 aa, Homo sapiens
  CDR3 for beta chain variable domain of TCR clone 166603 (TRBV10-1, TRBJ2-1)
CASSTGTELYNEQFF

SEQ ID NO: 333207 - protein, 13 aa, Homo sapiens
  CDR3 for alpha chain variable domain of TCR clone 166604 (TRAV12-3, TRAJ13)
CAMTSGGYQKVTF

SEQ ID NO: 333208 - protein, 11 aa, Homo sapiens
  CDR3 for beta chain variable domain of TCR clone 166604 (TRBV7-9, TRBJ2-7)
CAGQGAGEQYF

SEQ ID NO: 333209 - protein, 16 aa, Homo sapiens
  CDR3 for alpha chain variable domain of TCR clone 166605 (TRAV23/DV6, TRAJ48)
CAASGVVNFGNEKLTF

SEQ ID NO: 333210 - protein, 15 aa, Homo sapiens
  CDR3 for beta chain variable domain of TCR clone 166605 (TRBV20-1, TRBJ2-5)
CSAGLAGVSQETRYF

SEQ ID NO: 333211 - protein, 15 aa, Homo sapiens
  CDR3 for alpha chain variable domain of TCR clone 166606 (TRAV4, TRAJ39)
CLVGPNNNAGNMLTF

SEQ ID NO: 333212 - protein, 14 aa, Homo sapiens
  CDR3 for beta chain variable domain of TCR clone 166606 (TRBV7-2, TRBJ1-1)
CASSFLTGTTEAFF

SEQ ID NO: 333213 - protein, 16 aa, Homo sapiens
  CDR3 for alpha chain variable domain of TCR clone 166607 (TRAV8-3, TRAJ22)
CVVDLLGPGSARQLTF

SEQ ID NO: 333214 - protein, 14 aa, Homo sapiens
  CDR3 for beta chain variable domain of TCR clone 166607 (TRBV11-2, TRBJ2-7)
CASSLELEGYEQYF

SEQ ID NO: 333215 - protein, 12 aa, Homo sapiens
  CDR3 for alpha chain variable domain of TCR clone 166608 (TRAV12-3, TRAJ43)
CAISSNNNDMRF

SEQ ID NO: 333216 - protein, 17 aa, Homo sapiens
  CDR3 for beta chain variable domain of TCR clone 166608 (TRBV11-2, TRBJ2-6)
CASSQRDIFSGANVLTF

SEQ ID NO: 333217 - protein, 15 aa, Homo sapiens
  CDR3 for alpha chain variable domain of TCR clone 166609 (TRAV3, TRAJ45)
CAVRTPWGGADGLTF

SEQ ID NO: 333218 - protein, 12 aa, Homo sapiens
  CDR3 for beta chain variable domain of TCR clone 166609 (TRBV7-8, TRBJ2-7)
CASSLGDREQYF

SEQ ID NO: 333219 - protein, 15 aa, Homo sapiens
  CDR3 for alpha chain variable domain of TCR clone 166610 (TRAV2, TRAJ22)
CAVPSRGGSARRLTF

SEQ ID NO: 333220 - protein, 15 aa, Homo sapiens
  CDR3 for beta chain variable domain of TCR clone 166610 (TRBV7-9, TRBJ1-4)
CASSARTGGNEKLFF

SEQ ID NO: 333221 - protein, 14 aa, Homo sapiens
  CDR3 for alpha chain variable domain of TCR clone 166611 (TRAV17, TRAJ12)
CATDEKYSSYKLIF

SEQ ID NO: 333222 - protein, 16 aa, Homo sapiens
  CDR3 for beta chain variable domain of TCR clone 166611 (TRBV11-2, TRBJ2-1)
CASSPRLAGVYNEQFF

SEQ ID NO: 333223 - protein, 12 aa, Homo sapiens
  CDR3 for alpha chain variable domain of TCR clone 166612 (TRAV1-1, TRAJ30)
CAVRGRDDKIIF

SEQ ID NO: 333224 - protein, 13 aa, Homo sapiens
  CDR3 for beta chain variable domain of TCR clone 166612 (TRBV11-3, TRBJ2-7)
CASSLDKLHEQYF

SEQ ID NO: 333225 - protein, 15 aa, Homo sapiens
  CDR3 for alpha chain variable domain of TCR clone 166613 (TRAV26-2, TRAJ28)
CILVESGAGSYQLTF

SEQ ID NO: 333226 - protein, 14 aa, Homo sapiens
  CDR3 for beta chain variable domain of TCR clone 166613 (TRBV18, TRBJ2-5)
CASSPGVSQETQYF

SEQ ID NO: 333227 - protein, 16 aa, Homo sapiens
  CDR3 for alpha chain variable domain of TCR clone 166614 (TRAV12-3, TRAJ53)
CAMSPGSGGRNYKLTF

SEQ ID NO: 333228 - protein, 14 aa, Homo sapiens
  CDR3 for beta chain variable domain of TCR clone 166614 (TRBV4-1, TRBJ2-7)
CASSPVAGGDEQYF

SEQ ID NO: 333229 - protein, 14 aa, Homo sapiens
  CDR3 for alpha chain variable domain of TCR clone 166615 (TRAV14/DV4, TRAJ15)
CAMRRDQAGTALIF

SEQ ID NO: 333230 - protein, 11 aa, Homo sapiens
  CDR3 for beta chain variable domain of TCR clone 166615 (TRBV7-2, TRBJ2-7)
CVSSSGLWQYF

SEQ ID NO: 333231 - protein, 14 aa, Homo sapiens
  CDR3 for alpha chain variable domain of TCR clone 166616 (TRAV20, TRAJ42)
CAVQAGGSQGNLIF

SEQ ID NO: 333232 - protein, 15 aa, Homo sapiens
  CDR3 for beta chain variable domain of TCR clone 166616 (TRBV6-1, TRBJ1-1)
CASRTPGQLNTDAFF

SEQ ID NO: 333233 - protein, 14 aa, Homo sapiens
  CDR3 for alpha chain variable domain of TCR clone 166617 (TRAV20, TRAJ56)
CAVQFGGANSKLTI

SEQ ID NO: 333234 - protein, 14 aa, Homo sapiens
  CDR3 for beta chain variable domain of TCR clone 166617 (TRBV20-1, TRBJ2-7)
CSAKRGRSSYEQYF

SEQ ID NO: 333235 - protein, 17 aa, Homo sapiens
  CDR3 for alpha chain variable domain of TCR clone 166618 (TRAV8-6, TRAJ58)
CVVSSWVGETSGSRLTF

SEQ ID NO: 333236 - protein, 14 aa, Homo sapiens
  CDR3 for beta chain variable domain of TCR clone 166618 (TRBV4-2, TRBJ2-1)
CASGLDRAYNEQFF

SEQ ID NO: 333237 - protein, 23 aa, Homo sapiens
  CDR3 for alpha chain variable domain of TCR clone 166619 (TRAV13-2, TRAJ54)
ETQLSTFVQRICGAHEGAQKLVF

SEQ ID NO: 333238 - protein, 16 aa, Homo sapiens
  CDR3 for beta chain variable domain of TCR clone 166619 (TRBV12-5, TRBJ2-5)
CASGPRTSGNQETQYF

SEQ ID NO: 333239 - protein, 13 aa, Homo sapiens
  CDR3 for alpha chain variable domain of TCR clone 166620 (TRAV9-2, TRAJ9)
WALSDRGGFKTIF

SEQ ID NO: 333240 - protein, 14 aa, Homo sapiens
  CDR3 for beta chain variable domain of TCR clone 166620 (TRBV20-1, TRBJ2-2)
CSAPDTANTGELFF

SEQ ID NO: 333241 - protein, 15 aa, Homo sapiens
  CDR3 for alpha chain variable domain of TCR clone 166621 (TRAV17, TRAJ57)
CATGPSQGGSEKLVF

SEQ ID NO: 333242 - protein, 12 aa, Homo sapiens
  CDR3 for beta chain variable domain of TCR clone 166621 (TRBV5-1, TRBJ2-7)
CASSLDSYEQYF

SEQ ID NO: 333243 - protein, 11 aa, Homo sapiens
  CDR3 for alpha chain variable domain of TCR clone 166622 (TRAV21, TRAJ11)
RAVNGYSTLTF

SEQ ID NO: 333244 - protein, 11 aa, Homo sapiens
  CDR3 for beta chain variable domain of TCR clone 166622 (TRBV19, TRBJ1-1)
CDSSIGSEAFF

SEQ ID NO: 333245 - protein, 12 aa, Homo sapiens
  CDR3 for alpha chain variable domain of TCR clone 166623 (TRAV20, TRAJ23)
CAVQAPGGKLIF

SEQ ID NO: 333246 - protein, 14 aa, Homo sapiens
  CDR3 for beta chain variable domain of TCR clone 166623 (TRBV7-2, TRBJ2-7)
CASSPKTSFYEQYF

SEQ ID NO: 333247 - protein, 14 aa, Homo sapiens
  CDR3 for alpha chain variable domain of TCR clone 166624 (TRAV8-3, TRAJ4)
CAAGAAGGYNKLIF

SEQ ID NO: 333248 - protein, 14 aa, Homo sapiens
  CDR3 for beta chain variable domain of TCR clone 166624 (TRBV6-5, TRBJ2-1)
CQQLRCGAGNEQFF

SEQ ID NO: 333249 - protein, 16 aa, Homo sapiens
  CDR3 for alpha chain variable domain of TCR clone 166625 (TRAV26-1, TRAJ37)
CIVRGDGSGNTCKLIF

SEQ ID NO: 333250 - protein, 17 aa, Homo sapiens
  CDR3 for beta chain variable domain of TCR clone 166625 (TRBV4-1, TRBJ2-7)
CASSRDPLGGRGGEQYF

SEQ ID NO: 333251 - protein, 14 aa, Homo sapiens
  CDR3 for alpha chain variable domain of TCR clone 166626 (TRAV8-3, TRAJ3)
CAVVPRSSASKIIF

SEQ ID NO: 333252 - protein, 17 aa, Homo sapiens
  CDR3 for beta chain variable domain of TCR clone 166626 (TRBV24-1, TRBJ2-1)
CATSDVSTSGTYNEQFF

SEQ ID NO: 333253 - protein, 14 aa, Homo sapiens
  CDR3 for alpha chain variable domain of TCR clone 166627 (TRAV13-1, TRAJ35)
CAASKGGFGNVLHC

SEQ ID NO: 333254 - protein, 13 aa, Homo sapiens
  CDR3 for beta chain variable domain of TCR clone 166627 (TRBV7-3, TRBJ1-1)
CASSQDWEAEAFF

SEQ ID NO: 333255 - protein, 18 aa, Homo sapiens
  CDR3 for alpha chain variable domain of TCR clone 166628 (TRAV13-1, TRAJ52)
YAAKNPNAGGTSYGKLTF

SEQ ID NO: 333256 - protein, 16 aa, Homo sapiens
  CDR3 for beta chain variable domain of TCR clone 166628 (TRBV4-1, TRBJ1-3)
CASSQDELLAGNTIYF

SEQ ID NO: 333257 - protein, 14 aa, Homo sapiens
  CDR3 for alpha chain variable domain of TCR clone 166629 (TRAV8-6, TRAJ49)
CAVSDPGTGNQFYF

SEQ ID NO: 333258 - protein, 13 aa, Homo sapiens
  CDR3 for beta chain variable domain of TCR clone 166629 (TRBV7-9, TRBJ1-2)
CASSLKQNYGYSF

SEQ ID NO: 333259 - protein, 12 aa, Homo sapiens
  CDR3 for alpha chain variable domain of TCR clone 166630 (TRAV38-1, TRAJ20)
CAFIWNDFKLSF

SEQ ID NO: 333260 - protein, 14 aa, Homo sapiens
  CDR3 for beta chain variable domain of TCR clone 166630 (TRBV19, TRBJ2-1)
CASSMGSGATEQFF

SEQ ID NO: 333261 - protein, 16 aa, Homo sapiens
  CDR3 for alpha chain variable domain of TCR clone 166631 (TRAV21, TRAJ52)
CAVTNDGGTSYGKLTF

SEQ ID NO: 333262 - protein, 15 aa, Homo sapiens
  CDR3 for beta chain variable domain of TCR clone 166631 (TRBV2, TRBJ2-4)
CASRTQGAAKNIQYF

SEQ ID NO: 333263 - protein, 14 aa, Homo sapiens
  CDR3 for alpha chain variable domain of TCR clone 166632 (TRAV1-2, TRAJ16)
CAVNRFSDGQKLLF

SEQ ID NO: 333264 - protein, 15 aa, Homo sapiens
  CDR3 for beta chain variable domain of TCR clone 166632 (TRBV7-9, TRBJ1-4)
CASSARTGGNEKLFI

SEQ ID NO: 333265 - protein, 16 aa, Homo sapiens
  CDR3 for alpha chain variable domain of TCR clone 166633 (TRAV12-3, TRAJ45)
CAMGWGSRGGADGLTF

SEQ ID NO: 333266 - protein, 15 aa, Homo sapiens
  CDR3 for beta chain variable domain of TCR clone 166633 (TRBV3-1, TRBJ1-2)
CASSHPGTPGYGYTF

SEQ ID NO: 333267 - protein, 14 aa, Homo sapiens
  CDR3 for alpha chain variable domain of TCR clone 166634 (TRAV9-2, TRAJ6)
CALSDPGGSYIPTF

SEQ ID NO: 333268 - protein, 16 aa, Homo sapiens
  CDR3 for beta chain variable domain of TCR clone 166634 (TRBV19, TRBJ2-2)
CASRSPGTGATGELFV

SEQ ID NO: 333269 - protein, 12 aa, Homo sapiens
  CDR3 for alpha chain variable domain of TCR clone 166635 (TRAV12-3, TRAJ17)
CALTLTGNKLTF

SEQ ID NO: 333270 - protein, 15 aa, Homo sapiens
  CDR3 for beta chain variable domain of TCR clone 166635 (TRBV20-1, TRBJ2-7)
CSARDRVSGRDEQYF

SEQ ID NO: 333271 - protein, 14 aa, Homo sapiens
  CDR3 for alpha chain variable domain of TCR clone 166636 (TRAV8-4, TRAJ9)
CAVRINTGGFKTIY

SEQ ID NO: 333272 - protein, 15 aa, Homo sapiens
  CDR3 for beta chain variable domain of TCR clone 166636 (TRBV10-2, TRBJ2-6)
CASSEQGTGANVLTF

SEQ ID NO: 333273 - protein, 17 aa, Homo sapiens
  CDR3 for alpha chain variable domain of TCR clone 166637 (TRAV4, TRAJ18)
CLVGERSVGSTLGRLYF

SEQ ID NO: 333274 - protein, 14 aa, Homo sapiens
  CDR3 for beta chain variable domain of TCR clone 166637 (TRBV6-5, TRBJ1-2)
CASSYDGTGGGEAF

SEQ ID NO: 333275 - protein, 16 aa, Homo sapiens
  CDR3 for alpha chain variable domain of TCR clone 166638 (TRAV1-2, TRAJ10)
CAVRVVLTGGGNKLTF

SEQ ID NO: 333276 - protein, 15 aa, Homo sapiens
  CDR3 for beta chain variable domain of TCR clone 166638 (TRBV7-9, TRBJ1-6)
CASSSPGRGNSPLHF

SEQ ID NO: 333277 - protein, 14 aa, Homo sapiens
  CDR3 for alpha chain variable domain of TCR clone 166639 (TRAV26-1, TRAJ34)
CIVRAAHNTDKLIF

SEQ ID NO: 333278 - protein, 15 aa, Homo sapiens
  CDR3 for beta chain variable domain of TCR clone 166639 (TRBV20-1, TRBJ2-7)
CSARVPAAYFYEQYF

SEQ ID NO: 333279 - protein, 16 aa, Homo sapiens
  CDR3 for alpha chain variable domain of TCR clone 166640 (TRAV3, TRAJ37)
CAVRGKGSGNTGKLIF

SEQ ID NO: 333280 - protein, 15 aa, Homo sapiens
  CDR3 for beta chain variable domain of TCR clone 166640 (TRBV12-4, TRBJ2-7)
CASSQVISTGVEQYF

SEQ ID NO: 333281 - protein, 14 aa, Homo sapiens
  CDR3 for alpha chain variable domain of TCR clone 166641 (TRAV35, TRAJ22)
CAGLRPGSARQLTF

SEQ ID NO: 333282 - protein, 15 aa, Homo sapiens
  CDR3 for beta chain variable domain of TCR clone 166641 (TRBV7-3, TRBJ2-1)
CASSLDGNSYNEQFF

SEQ ID NO: 333283 - protein, 11 aa, Homo sapiens
  CDR3 for alpha chain variable domain of TCR clone 166642 (TRAV35, TRAJ30)
CAGLRDDKIIF

SEQ ID NO: 333284 - protein, 15 aa, Homo sapiens
  CDR3 for beta chain variable domain of TCR clone 166642 (TRBV11-3, TRBJ2-3)
CASLKDGREGDTQYF

SEQ ID NO: 333285 - protein, 15 aa, Homo sapiens
  CDR3 for alpha chain variable domain of TCR clone 166643 (TRAV3, TRAJ15)
CAVRPANQAGTALIF

SEQ ID NO: 333286 - protein, 14 aa, Homo sapiens
  CDR3 for beta chain variable domain of TCR clone 166643 (TRBV4-1, TRBJ2-2)
CASSQAVNTGELFL

SEQ ID NO: 333287 - protein, 12 aa, Homo sapiens
  CDR3 for alpha chain variable domain of TCR clone 166644 (TRAV26-2, TRAJ21)
CILKGNFSKFYF

SEQ ID NO: 333288 - protein, 13 aa, Homo sapiens
  CDR3 for beta chain variable domain of TCR clone 166644 (TRBV7-9, TRBJ1-2)
CASSLKQNYGYTF

SEQ ID NO: 333289 - protein, 13 aa, Homo sapiens
  CDR3 for alpha chain variable domain of TCR clone 166645 (TRAV13-1, TRAJ39)
CAASIWAGNMLTF

SEQ ID NO: 333290 - protein, 15 aa, Homo sapiens
  CDR3 for beta chain variable domain of TCR clone 166645 (TRBV7-9, TRBJ1-1)
YASSLLEQGGTEAFF

SEQ ID NO: 333291 - protein, 14 aa, Homo sapiens
  CDR3 for alpha chain variable domain of TCR clone 166646 (TRAV26-1, TRAJ45)
CIEVTGGGADGLTF

SEQ ID NO: 333292 - protein, 11 aa, Homo sapiens
  CDR3 for beta chain variable domain of TCR clone 166646 (TRBV11-2, TRBJ1-1)
CASSINTEAFF

SEQ ID NO: 333293 - protein, 12 aa, Homo sapiens
  CDR3 for alpha chain variable domain of TCR clone 166647 (TRAV13-1, TRAJ21)
CAAKEGFNKFYF

SEQ ID NO: 333294 - protein, 15 aa, Homo sapiens
  CDR3 for beta chain variable domain of TCR clone 166647 (TRBV5-1, TRBJ1-1)
CASSLAPRGNTEAFF

SEQ ID NO: 333295 - protein, 16 aa, Homo sapiens
  CDR3 for alpha chain variable domain of TCR clone 166648 (TRAV23/DV6, TRAJ52)
CAARPSGGTSYGKLTF

SEQ ID NO: 333296 - protein, 14 aa, Homo sapiens
  CDR3 for beta chain variable domain of TCR clone 166648 (TRBV20-1, TRBJ2-3)
CSAGDASSTDTQYF

SEQ ID NO: 333297 - protein, 14 aa, Homo sapiens
  CDR3 for alpha chain variable domain of TCR clone 166649 (TRAV2, TRAJ9)
CAVEDRSGGFETIF

SEQ ID NO: 333298 - protein, 12 aa, Homo sapiens
  CDR3 for beta chain variable domain of TCR clone 166649 (TRBV29-1, TRBJ2-3)
CSVTGGADTQYF

SEQ ID NO: 333299 - protein, 12 aa, Homo sapiens
  CDR3 for alpha chain variable domain of TCR clone 166650 (TRAV23/DV6, TRAJ37)
CAASMNTGKLIF

SEQ ID NO: 333300 - protein, 12 aa, Homo sapiens
  CDR3 for beta chain variable domain of TCR clone 166650 (TRBV7-9, TRBJ2-7)
CASSLFDYEQYF

SEQ ID NO: 333301 - protein, 18 aa, Homo sapiens
  CDR3 for alpha chain variable domain of TCR clone 166651 (TRAV8-6, TRAJ27)
CAVSASLTPMQANQPLVM

SEQ ID NO: 333302 - protein, 15 aa, Homo sapiens
  CDR3 for beta chain variable domain of TCR clone 166651 (TRBV5-1, TRBJ1-1)
CASSWTGRGNTEAFF

SEQ ID NO: 333303 - protein, 16 aa, Homo sapiens
  CDR3 for alpha chain variable domain of TCR clone 166652 (TRAV3, TRAJ10)
CVVRDMRAGGGNKLTF

SEQ ID NO: 333304 - protein, 15 aa, Homo sapiens
  CDR3 for beta chain variable domain of TCR clone 166652 (TRBV9, TRBJ1-6)
CASSVAGTGDSPLHF

SEQ ID NO: 333305 - protein, 13 aa, Homo sapiens
  CDR3 for alpha chain variable domain of TCR clone 166653 (TRAV2, TRAJ40)
RAVVTSGTYKYIF

SEQ ID NO: 333306 - protein, 14 aa, Homo sapiens
  CDR3 for beta chain variable domain of TCR clone 166653 (TRBV19, TRBJ2-1)
CASPTLVLSGEQFF

SEQ ID NO: 333307 - protein, 15 aa, Homo sapiens
  CDR3 for alpha chain variable domain of TCR clone 166654 (TRAV2, TRAJ28)
CAVPYSGAGSYQLTF

SEQ ID NO: 333308 - protein, 12 aa, Homo sapiens
  CDR3 for beta chain variable domain of TCR clone 166654 (TRBV11-2, TRBJ2-1)
CASSPGNNEQFF

SEQ ID NO: 333309 - protein, 13 aa, Homo sapiens
  CDR3 for alpha chain variable domain of TCR clone 166655 (TRAV20, TRAJ15)
CGTINQAGTALIF

SEQ ID NO: 333310 - protein, 13 aa, Homo sapiens
  CDR3 for beta chain variable domain of TCR clone 166655 (TRBV12-4, TRBJ2-1)
CASRQPSNNEQFF

SEQ ID NO: 333311 - protein, 15 aa, Homo sapiens
  CDR3 for alpha chain variable domain of TCR clone 166656 (TRAV23/DV6, TRAJ12)
CAAIDLGAMDSSYKL

SEQ ID NO: 333312 - protein, 14 aa, Homo sapiens
  CDR3 for beta chain variable domain of TCR clone 166656 (TRBV25-1, TRBJ1-1)
CASTHLGGNTEAFF

SEQ ID NO: 333313 - protein, 13 aa, Homo sapiens
  CDR3 for alpha chain variable domain of TCR clone 166657 (TRAV26-1, TRAJ34)
CIVRPWITDKRIF

SEQ ID NO: 333314 - protein, 14 aa, Homo sapiens
  CDR3 for beta chain variable domain of TCR clone 166657 (TRBV12-4, TRBJ1-4)
CASSRQGANEKLFF

SEQ ID NO: 333315 - protein, 15 aa, Homo sapiens
  CDR3 for alpha chain variable domain of TCR clone 166658 (TRAV1-1, TRAJ5)
CAVRHMDTGRRELTF

SEQ ID NO: 333316 - protein, 17 aa, Homo sapiens
  CDR3 for beta chain variable domain of TCR clone 166658 (TRBV28, TRBJ2-7)
CASSPGLAGGDSSEQYF

SEQ ID NO: 333317 - protein, 14 aa, Homo sapiens
  CDR3 for alpha chain variable domain of TCR clone 166659 (TRAV38-1, TRAJ40)
CGLRPTSGTYKYIF

SEQ ID NO: 333318 - protein, 14 aa, Homo sapiens
  CDR3 for beta chain variable domain of TCR clone 166659 (TRBV19, TRBJ2-1)
CASPTFVLSGEQFF

SEQ ID NO: 333319 - protein, 14 aa, Homo sapiens
  CDR3 for alpha chain variable domain of TCR clone 166660 (TRAV1-2, TRAJ16)
CAVNRFSDGQKLLF

SEQ ID NO: 333320 - protein, 13 aa, Homo sapiens
  CDR3 for beta chain variable domain of TCR clone 166660 (TRBV7-9, TRBJ1-2)
CASRTGPNYGYTF

SEQ ID NO: 333321 - protein, 16 aa, Homo sapiens
  CDR3 for alpha chain variable domain of TCR clone 166661 (TRAV30, TRAJ24)
CGTEVVDADSWGKFRF

SEQ ID NO: 333322 - protein, 16 aa, Homo sapiens
  CDR3 for beta chain variable domain of TCR clone 166661 (TRBV7-3, TRBJ2-2)
CASSLKRGTLSGELFF

SEQ ID NO: 333323 - protein, 13 aa, Homo sapiens
  CDR3 for alpha chain variable domain of TCR clone 166662 (TRAV10, TRAJ40)
CVVSALGTYKYIF

SEQ ID NO: 333324 - protein, 13 aa, Homo sapiens
  CDR3 for beta chain variable domain of TCR clone 166662 (TRBV20-1, TRBJ2-3)
CSARLAGTDMQYF

SEQ ID NO: 333325 - protein, 16 aa, Homo sapiens
  CDR3 for alpha chain variable domain of TCR clone 166663 (TRAV13-1, TRAJ18)
CAASRMRGSTLGRLYF

SEQ ID NO: 333326 - protein, 15 aa, Homo sapiens
  CDR3 for beta chain variable domain of TCR clone 166663 (TRBV29-1, TRBJ2-1)
CSVGRHASFYNEQFF

SEQ ID NO: 333327 - protein, 12 aa, Homo sapiens
  CDR3 for alpha chain variable domain of TCR clone 166664 (TRAV12-3, TRAJ17)
CAMTLTGNKLTF

SEQ ID NO: 333328 - protein, 14 aa, Homo sapiens
  CDR3 for beta chain variable domain of TCR clone 166664 (TRBV2, TRBJ2-5)
CASSEVLAQETQYF

SEQ ID NO: 333329 - protein, 19 aa, Homo sapiens
  CDR3 for alpha chain variable domain of TCR clone 166665 (TRAV2, TRAJ20)
ILQVREADDAVYRDCKLSF

SEQ ID NO: 333330 - protein, 13 aa, Homo sapiens
  CDR3 for beta chain variable domain of TCR clone 166665 (TRBV15, TRBJ1-6)
CATSGGLNSPLHF

SEQ ID NO: 333331 - protein, 14 aa, Homo sapiens
  CDR3 for alpha chain variable domain of TCR clone 166666 (TRAV26-1, TRAJ38)
CIADNAGNNRKLIW

SEQ ID NO: 333332 - protein, 16 aa, Homo sapiens
  CDR3 for beta chain variable domain of TCR clone 166666 (TRBV6-6, TRBJ2-4)
CASSNAGQGAKNIQYF

SEQ ID NO: 333333 - protein, 15 aa, Homo sapiens
  CDR3 for alpha chain variable domain of TCR clone 166667 (TRAV8-4, TRAJ42)
CAVSDDRGSQGNLIF

SEQ ID NO: 333334 - protein, 17 aa, Homo sapiens
  CDR3 for beta chain variable domain of TCR clone 166667 (TRBV11-2, TRBJ2-1)
CASSLYPPVVEYNEQFF

SEQ ID NO: 333335 - protein, 17 aa, Homo sapiens
  CDR3 for alpha chain variable domain of TCR clone 166668 (TRAV3, TRAJ42)
CAVRDRDYGGSQGNLIF

SEQ ID NO: 333336 - protein, 13 aa, Homo sapiens
  CDR3 for beta chain variable domain of TCR clone 166668 (TRBV10-3, TRBJ2-7)
CAPKLAVNYEQYF

SEQ ID NO: 333337 - protein, 14 aa, Homo sapiens
  CDR3 for alpha chain variable domain of TCR clone 166669 (TRAV21, TRAJ35)
CAVMPIGFRNVLHC

SEQ ID NO: 333338 - protein, 12 aa, Homo sapiens
  CDR3 for beta chain variable domain of TCR clone 166669 (TRBV7-9, TRBJ2-7)
CASSIKREEQYF

SEQ ID NO: 333339 - protein, 15 aa, Homo sapiens
  CDR3 for alpha chain variable domain of TCR clone 166670 (TRAV8-3, TRAJ11)
CAVGLLNSGYSTLTF

SEQ ID NO: 333340 - protein, 16 aa, Homo sapiens
  CDR3 for beta chain variable domain of TCR clone 166670 (TRBV7-9, TRBJ1-2)
CACSLGFSAGEDGYTF

SEQ ID NO: 333341 - protein, 14 aa, Homo sapiens
  CDR3 for alpha chain variable domain of TCR clone 166671 (TRAV12-3, TRAJ10)
SHLPLTGGGNKLTF

SEQ ID NO: 333342 - protein, 11 aa, Homo sapiens
  CDR3 for beta chain variable domain of TCR clone 166671 (TRBV29-1, TRBJ2-5)
CSEDRTGTQFF

SEQ ID NO: 333343 - protein, 14 aa, Homo sapiens
  CDR3 for alpha chain variable domain of TCR clone 166672 (TRAV8-3, TRAJ9)
CAVVYNTGGFKTIF

SEQ ID NO: 333344 - protein, 13 aa, Homo sapiens
  CDR3 for beta chain variable domain of TCR clone 166672 (TRBV4-2, TRBJ1-1)
CASSPTGDTEAFF

SEQ ID NO: 333345 - protein, 12 aa, Homo sapiens
  CDR3 for alpha chain variable domain of TCR clone 166673 (TRAV8-3, TRAJ41)
CAVGALGYALNF

SEQ ID NO: 333346 - protein, 15 aa, Homo sapiens
  CDR3 for beta chain variable domain of TCR clone 166673 (TRBV7-6, TRBJ2-3)
CQQRFQGEGTDTQYF

SEQ ID NO: 333347 - protein, 12 aa, Homo sapiens
  CDR3 for alpha chain variable domain of TCR clone 166674 (TRAV12-1, TRAJ6)
CVVSERSYIPTF

SEQ ID NO: 333348 - protein, 21 aa, Homo sapiens
  CDR3 for beta chain variable domain of TCR clone 166674 (TRBV7-3, TRBJ2-1)
GGTQPCISVPVAYGLAGAQFF

SEQ ID NO: 333349 - protein, 12 aa, Homo sapiens
  CDR3 for alpha chain variable domain of TCR clone 166675 (TRAV4, TRAJ26)
CLVGDYGQNFVF

SEQ ID NO: 333350 - protein, 13 aa, Homo sapiens
  CDR3 for beta chain variable domain of TCR clone 166675 (TRBV7-3, TRBJ2-1)
CASSLDSYNEQFF

SEQ ID NO: 333351 - protein, 19 aa, Homo sapiens
  CDR3 for alpha chain variable domain of TCR clone 166676 (TRAV1-2, TRAJ18)
CLLPLGCERRGSTLGRLYF

SEQ ID NO: 333352 - protein, 12 aa, Homo sapiens
  CDR3 for beta chain variable domain of TCR clone 166676 (TRBV11-2, TRBJ2-2)
CASSLGGGELFF

SEQ ID NO: 333353 - protein, 13 aa, Homo sapiens
  CDR3 for alpha chain variable domain of TCR clone 166677 (TRAV23/DV6, TRAJ22)
CAPYSGSARQLTF

SEQ ID NO: 333354 - protein, 15 aa, Homo sapiens
  CDR3 for beta chain variable domain of TCR clone 166677 (TRBV11-2, TRBJ1-6)
CTSSLDPWAVSPLHF

SEQ ID NO: 333355 - protein, 13 aa, Homo sapiens
  CDR3 for alpha chain variable domain of TCR clone 166678 (TRAV17, TRAJ15)
CATDARAGTALIF

SEQ ID NO: 333356 - protein, 15 aa, Homo sapiens
  CDR3 for beta chain variable domain of TCR clone 166678 (TRBV7-9, TRBJ1-4)
CASSARTGGNEKLFF

SEQ ID NO: 333357 - protein, 12 aa, Homo sapiens
  CDR3 for alpha chain variable domain of TCR clone 166679 (TRAV16, TRAJ26)
CSLRSYGQNFVF

SEQ ID NO: 333358 - protein, 13 aa, Homo sapiens
  CDR3 for beta chain variable domain of TCR clone 166679 (TRBV12-4, TRBJ1-1)
CASSPGTGFEAFF

SEQ ID NO: 333359 - protein, 17 aa, Homo sapiens
  CDR3 for alpha chain variable domain of TCR clone 166680 (TRAV3, TRAJ6)
CAVRDGPRAGGSYIPTF

SEQ ID NO: 333360 - protein, 14 aa, Homo sapiens
  CDR3 for beta chain variable domain of TCR clone 166680 (TRBV28, TRBJ2-7)
CASRAAGLGYEQYF

SEQ ID NO: 333361 - protein, 13 aa, Homo sapiens
  CDR3 for alpha chain variable domain of TCR clone 166681 (TRAV17, TRAJ5)
CVPMDTGRRALTF

SEQ ID NO: 333362 - protein, 15 aa, Homo sapiens
  CDR3 for beta chain variable domain of TCR clone 166681 (TRBV6-6, TRBJ2-5)
CASSPGGGLEETQYF

SEQ ID NO: 333363 - protein, 13 aa, Homo sapiens
  CDR3 for alpha chain variable domain of TCR clone 166682 (TRAV1-1, TRAJ23)
CAVVANQGGKLIF

SEQ ID NO: 333364 - protein, 12 aa, Homo sapiens
  CDR3 for beta chain variable domain of TCR clone 166682 (TRBV7-8, TRBJ2-7)
CASSLGDREQYF

SEQ ID NO: 333365 - protein, 12 aa, Homo sapiens
  CDR3 for alpha chain variable domain of TCR clone 166683 (TRAV23/DV6, TRAJ30)
CAASKGDDKIIF

SEQ ID NO: 333366 - protein, 18 aa, Homo sapiens
  CDR3 for beta chain variable domain of TCR clone 166683 (TRBV10-3, TRBJ2-3)
CAIGESRVGPMRGDTQYF

SEQ ID NO: 333367 - protein, 15 aa, Homo sapiens
  CDR3 for alpha chain variable domain of TCR clone 166684 (TRAV26-1, TRAJ40)
CIVRAVPSGTYKYIF

SEQ ID NO: 333368 - protein, 14 aa, Homo sapiens
  CDR3 for beta chain variable domain of TCR clone 166684 (TRBV19, TRBJ2-1)
CAIKDPGLANEQFF

SEQ ID NO: 333369 - protein, 12 aa, Homo sapiens
  CDR3 for alpha chain variable domain of TCR clone 166685 (TRAV13-2, TRAJ23)
CAERHRGGKLIF

SEQ ID NO: 333370 - protein, 16 aa, Homo sapiens
  CDR3 for beta chain variable domain of TCR clone 166685 (TRBV20-1, TRBJ1-4)
CSAPGQGLLTNDTLFF

SEQ ID NO: 333371 - protein, 15 aa, Homo sapiens
  CDR3 for alpha chain variable domain of TCR clone 166686 (TRAV34, TRAJ38)
CGADFTPGNNRKLIW

SEQ ID NO: 333372 - protein, 11 aa, Homo sapiens
  CDR3 for beta chain variable domain of TCR clone 166686 (TRBV20-1, TRBJ1-5)
CSAQGDQPQHF

SEQ ID NO: 333373 - protein, 11 aa, Homo sapiens
  CDR3 for alpha chain variable domain of TCR clone 166687 (TRAV12-1, TRAJ26)
CVVAYGQNFVF

SEQ ID NO: 333374 - protein, 11 aa, Homo sapiens
  CDR3 for beta chain variable domain of TCR clone 166687 (TRBV20-1, TRBJ2-7)
CSGRQGHEQYF

SEQ ID NO: 333375 - protein, 11 aa, Homo sapiens
  CDR3 for alpha chain variable domain of TCR clone 166688 (TRAV12-3, TRAJ43)
CAMCVSNDMRF

SEQ ID NO: 333376 - protein, 16 aa, Homo sapiens
  CDR3 for beta chain variable domain of TCR clone 166688 (TRBV20-1, TRBJ2-1)
CSARDSLGAVYNEQFF

SEQ ID NO: 333377 - protein, 17 aa, Homo sapiens
  CDR3 for alpha chain variable domain of TCR clone 166689 (TRAV3, TRAJ6)
CAVRDGPRAGGSYIPTF

SEQ ID NO: 333378 - protein, 13 aa, Homo sapiens
  CDR3 for beta chain variable domain of TCR clone 166689 (TRBV12-4, TRBJ2-5)
CASSLFRRETQYF

SEQ ID NO: 333379 - protein, 14 aa, Homo sapiens
  CDR3 for alpha chain variable domain of TCR clone 166690 (TRAV5, TRAJ4)
CAASFSGGYNRLIF

SEQ ID NO: 333380 - protein, 15 aa, Homo sapiens
  CDR3 for beta chain variable domain of TCR clone 166690 (TRBV14, TRBJ1-1)
CASSQEGMGFTEAFF

SEQ ID NO: 333381 - protein, 14 aa, Homo sapiens
  CDR3 for alpha chain variable domain of TCR clone 166691 (TRAV12-2, TRAJ17)
CAVLFKAAGNKPTF

SEQ ID NO: 333382 - protein, 14 aa, Homo sapiens
  CDR3 for beta chain variable domain of TCR clone 166691 (TRBV19, TRBJ2-1)
CASSMGSGATEQFF

SEQ ID NO: 333383 - protein, 14 aa, Homo sapiens
  CDR3 for alpha chain variable domain of TCR clone 166692 (TRAV1-2, TRAJ8)
CAVREDTGFQKLVF

SEQ ID NO: 333384 - protein, 11 aa, Homo sapiens
  CDR3 for beta chain variable domain of TCR clone 166692 (TRBV11-3, TRBJ2-1)
CASSLGNEQFF

SEQ ID NO: 333385 - protein, 14 aa, Homo sapiens
  CDR3 for alpha chain variable domain of TCR clone 166693 (TRAV12-2, TRAJ45)
CAVNIGGGADGLTF

SEQ ID NO: 333386 - protein, 17 aa, Homo sapiens
  CDR3 for beta chain variable domain of TCR clone 166693 (TRBV20-1, TRBJ2-2)
RSASGSGQGGLTGELFF

SEQ ID NO: 333387 - protein, 14 aa, Homo sapiens
  CDR3 for alpha chain variable domain of TCR clone 166694 (TRAV1-1, TRAJ27)
CAVIYNTNAGKLTF

SEQ ID NO: 333388 - protein, 13 aa, Homo sapiens
  CDR3 for beta chain variable domain of TCR clone 166694 (TRBV6-1, TRBJ1-1)
CASSRQGNTEAFF

SEQ ID NO: 333389 - protein, 13 aa, Homo sapiens
  CDR3 for alpha chain variable domain of TCR clone 166695 (TRAV12-3, TRAJ22)
SAMSLLFCKATDL

SEQ ID NO: 333390 - protein, 11 aa, Homo sapiens
  CDR3 for beta chain variable domain of TCR clone 166695 (TRBV12-4, TRBJ2-2)
CASSSAGELFF

SEQ ID NO: 333391 - protein, 13 aa, Homo sapiens
  CDR3 for alpha chain variable domain of TCR clone 166696 (TRAV39, TRAJ48)
CASVNFGNEKLTF

SEQ ID NO: 333392 - protein, 12 aa, Homo sapiens
  CDR3 for beta chain variable domain of TCR clone 166696 (TRBV5-5, TRBJ2-5)
CASSYFGETQYF

SEQ ID NO: 333393 - protein, 11 aa, Homo sapiens
  CDR3 for alpha chain variable domain of TCR clone 166697 (TRAV12-2, TRAJ23)
CARGRGGKLIF

SEQ ID NO: 333394 - protein, 13 aa, Homo sapiens
  CDR3 for beta chain variable domain of TCR clone 166697 (TRBV28, TRBJ2-5)
CQQPGGQGRDQYF

SEQ ID NO: 333395 - protein, 13 aa, Homo sapiens
  CDR3 for alpha chain variable domain of TCR clone 166698 (TRAV12-1, TRAJ40)
CVLPTSGTYKYIF

SEQ ID NO: 333396 - protein, 16 aa, Homo sapiens
  CDR3 for beta chain variable domain of TCR clone 166698 (TRBV7-9, TRBJ1-2)
CASSLGFSSGEDGYTF

SEQ ID NO: 333397 - protein, 13 aa, Homo sapiens
  CDR3 for alpha chain variable domain of TCR clone 166699 (TRAV12-3, TRAJ13)
CAMSSGGYQQVTF

SEQ ID NO: 333398 - protein, 13 aa, Homo sapiens
  CDR3 for beta chain variable domain of TCR clone 166699 (TRBV7-3, TRBJ1-1)
CASSQDWGAEAFF

SEQ ID NO: 333399 - protein, 14 aa, Homo sapiens
  CDR3 for alpha chain variable domain of TCR clone 166700 (TRAV26-2, TRAJ31)
CILIPGNNNARLMF

SEQ ID NO: 333400 - protein, 12 aa, Homo sapiens
  CDR3 for beta chain variable domain of TCR clone 166700 (TRBV6-3, TRBJ2-7)
CASSLTPYEQYF

SEQ ID NO: 333401 - protein, 10 aa, Homo sapiens
  CDR3 for alpha chain variable domain of TCR clone 166701 (TRAV1-2, TRAJ18)
CAVRGEAQPW

SEQ ID NO: 333402 - protein, 12 aa, Homo sapiens
  CDR3 for beta chain variable domain of TCR clone 166701 (TRBV7-9, TRBJ2-7)
CASSIKREEQYF

SEQ ID NO: 333403 - protein, 15 aa, Homo sapiens
  CDR3 for alpha chain variable domain of TCR clone 166702 (TRAV12-2, TRAJ53)
CALNGGGGSNYKLTF

SEQ ID NO: 333404 - protein, 17 aa, Homo sapiens
  CDR3 for beta chain variable domain of TCR clone 166702 (TRBV7-3, TRBJ2-3)
RASSLMKRMRGAATQYF

SEQ ID NO: 333405 - protein, 13 aa, Homo sapiens
  CDR3 for alpha chain variable domain of TCR clone 166703 (TRAV39, TRAJ33)
CAANPDSNYQLIW

SEQ ID NO: 333406 - protein, 13 aa, Homo sapiens
  CDR3 for beta chain variable domain of TCR clone 166703 (TRBV18, TRBJ1-1)
CASSGGRNTEALF

SEQ ID NO: 333407 - protein, 13 aa, Homo sapiens
  CDR3 for alpha chain variable domain of TCR clone 166704 (TRAV12-1, TRAJ33)
CVVNRKSNYQLIW

SEQ ID NO: 333408 - protein, 13 aa, Homo sapiens
  CDR3 for beta chain variable domain of TCR clone 166704 (TRBV4-2, TRBJ1-1)
CASSQAGNTEAFF

SEQ ID NO: 333409 - protein, 14 aa, Homo sapiens
  CDR3 for alpha chain variable domain of TCR clone 166705 (TRAV12-2, TRAJ13)
CAVKKTGGYQNVTF

SEQ ID NO: 333410 - protein, 15 aa, Homo sapiens
  CDR3 for beta chain variable domain of TCR clone 166705 (TRBV12-4, TRBJ2-5)
CASSPPTGLQETQYF

SEQ ID NO: 333411 - protein, 13 aa, Homo sapiens
  CDR3 for alpha chain variable domain of TCR clone 166706 (TRAV13-1, TRAJ49)
CAAMLDTGNQFYF

SEQ ID NO: 333412 - protein, 14 aa, Homo sapiens
  CDR3 for beta chain variable domain of TCR clone 166706 (TRBV19, TRBJ2-1)
CASPTFVLSGEQFF

SEQ ID NO: 333413 - protein, 12 aa, Homo sapiens
  CDR3 for alpha chain variable domain of TCR clone 166707 (TRAV4, TRAJ6)
CLAPGGSYIPKF

SEQ ID NO: 333414 - protein, 17 aa, Homo sapiens
  CDR3 for beta chain variable domain of TCR clone 166707 (TRBV13, TRBJ2-3)
CASSLSRVAGGRNTQYF

SEQ ID NO: 333415 - protein, 14 aa, Homo sapiens
  CDR3 for alpha chain variable domain of TCR clone 166708 (TRAV8-1, TRAJ5)
CAVRTDTGRGALTF

SEQ ID NO: 333416 - protein, 14 aa, Homo sapiens
  CDR3 for beta chain variable domain of TCR clone 166708 (TRBV5-5, TRBJ1-2)
CASSLDPYSYGYTF

SEQ ID NO: 333417 - protein, 13 aa, Homo sapiens
  CDR3 for alpha chain variable domain of TCR clone 166709 (TRAV21, TRAJ27)
CAARPDNAGKSTF

SEQ ID NO: 333418 - protein, 13 aa, Homo sapiens
  CDR3 for beta chain variable domain of TCR clone 166709 (TRBV7-6, TRBJ2-1)
CQQLGGGADEQFF

SEQ ID NO: 333419 - protein, 14 aa, Homo sapiens
  CDR3 for alpha chain variable domain of TCR clone 166710 (TRAV12-1, TRAJ12)
CVVTRMDSSYKLIF

SEQ ID NO: 333420 - protein, 14 aa, Homo sapiens
  CDR3 for beta chain variable domain of TCR clone 166710 (TRBV7-2, TRBJ2-7)
CASSPKTSFYEQDF

SEQ ID NO: 333421 - protein, 15 aa, Homo sapiens
  CDR3 for alpha chain variable domain of TCR clone 166711 (TRAV17, TRAJ16)
CATALRFPDGQKLLF

SEQ ID NO: 333422 - protein, 15 aa, Homo sapiens
  CDR3 for beta chain variable domain of TCR clone 166711 (TRBV20-1, TRBJ1-1)
CSASRGVTGNTEAFF

SEQ ID NO: 333423 - protein, 11 aa, Homo sapiens
  CDR3 for alpha chain variable domain of TCR clone 166712 (TRAV2, TRAJ13)
CASGGYQKVNF

SEQ ID NO: 333424 - protein, 12 aa, Homo sapiens
  CDR3 for beta chain variable domain of TCR clone 166712 (TRBV19, TRBJ1-4)
CASKDWPGGLFF

SEQ ID NO: 333425 - protein, 14 aa, Homo sapiens
  CDR3 for alpha chain variable domain of TCR clone 166713 (TRAV16, TRAJ32)
CALKSGGATNKLIF

SEQ ID NO: 333426 - protein, 13 aa, Homo sapiens
  CDR3 for beta chain variable domain of TCR clone 166713 (TRBV15, TRBJ1-6)
CATSGGLNSTLHF

SEQ ID NO: 333427 - protein, 14 aa, Homo sapiens
  CDR3 for alpha chain variable domain of TCR clone 166714 (TRAV1-2, TRAJ16)
CAVNRFSDGQKLLF

SEQ ID NO: 333428 - protein, 13 aa, Homo sapiens
  CDR3 for beta chain variable domain of TCR clone 166714 (TRBV10-3, TRBJ2-7)
CVSKLAVNYEQYF

SEQ ID NO: 333429 - protein, 13 aa, Homo sapiens
  CDR3 for alpha chain variable domain of TCR clone 166715 (TRAV12-1, TRAJ40)
CLVPTSGTYKYIL

SEQ ID NO: 333430 - protein, 18 aa, Homo sapiens
  CDR3 for beta chain variable domain of TCR clone 166715 (TRBV7-6, TRBJ2-1)
CASSPRTSGMSSYNEQFF

SEQ ID NO: 333431 - protein, 18 aa, Homo sapiens
  CDR3 for alpha chain variable domain of TCR clone 166716 (TRAV2, TRAJ20)
LQVREADAAVYRDCKLSF

SEQ ID NO: 333432 - protein, 16 aa, Homo sapiens
  CDR3 for beta chain variable domain of TCR clone 166716 (TRBV20-1, TRBJ1-4)
CSAPGQGLLTNETLFF

SEQ ID NO: 333433 - protein, 14 aa, Homo sapiens
  CDR3 for alpha chain variable domain of TCR clone 166717 (TRAV8-2, TRAJ11)
CVVSEKSGYSTLTF

SEQ ID NO: 333434 - protein, 12 aa, Homo sapiens
  CDR3 for beta chain variable domain of TCR clone 166717 (TRBV11-2, TRBJ2-2)
CASSLGGGELFF

SEQ ID NO: 333435 - protein, 18 aa, Homo sapiens
  CDR3 for alpha chain variable domain of TCR clone 166718 (TRAV1-2, TRAJ18)
CAMRDMGDRGSTLGRLYF

SEQ ID NO: 333436 - protein, 17 aa, Homo sapiens
  CDR3 for beta chain variable domain of TCR clone 166718 (TRBV12-4, TRBJ2-2)
CASSLGVGRGGTGELFF

SEQ ID NO: 333437 - protein, 11 aa, Homo sapiens
  CDR3 for alpha chain variable domain of TCR clone 166719 (TRAV2, TRAJ13)
CDSGGYQKVTF

SEQ ID NO: 333438 - protein, 14 aa, Homo sapiens
  CDR3 for beta chain variable domain of TCR clone 166719 (TRBV7-3, TRBJ2-7)
CASSYDQDYYEQYF

SEQ ID NO: 333439 - protein, 14 aa, Homo sapiens
  CDR3 for alpha chain variable domain of TCR clone 166720 (TRAV1-2, TRAJ16)
CAVNRFSDGQKLHF

SEQ ID NO: 333440 - protein, 14 aa, Homo sapiens
  CDR3 for beta chain variable domain of TCR clone 166720 (TRBV18, TRBJ1-5)
CASSPGNSNQPQHF

SEQ ID NO: 333441 - protein, 14 aa, Homo sapiens
  CDR3 for alpha chain variable domain of TCR clone 166721 (TRAV2, TRAJ9)
CAVEDRSGGFKTIF

SEQ ID NO: 333442 - protein, 16 aa, Homo sapiens
  CDR3 for beta chain variable domain of TCR clone 166721 (TRBV7-2, TRBJ2-6)
CASSERRASGANVLTF

SEQ ID NO: 333443 - protein, 16 aa, Homo sapiens
  CDR3 for alpha chain variable domain of TCR clone 166722 (TRAV27, TRAJ13)
CAGAKSDSGGYQKVTF

SEQ ID NO: 333444 - protein, 15 aa, Homo sapiens
  CDR3 for beta chain variable domain of TCR clone 166722 (TRBV29-1, TRBJ2-1)
CRVGRHALFYNEQFV

SEQ ID NO: 333445 - protein, 15 aa, Homo sapiens
  CDR3 for alpha chain variable domain of TCR clone 166723 (TRAV13-1, TRAJ57)
QVPPLSQGGSEKLVF

SEQ ID NO: 333446 - protein, 17 aa, Homo sapiens
  CDR3 for beta chain variable domain of TCR clone 166723 (TRBV7-8, TRBJ2-6)
CASSAGTGGAGANVLTL

SEQ ID NO: 333447 - protein, 13 aa, Homo sapiens
  CDR3 for alpha chain variable domain of TCR clone 166724 (TRAV13-2, TRAJ40)
CAEFTSATYKYIF

SEQ ID NO: 333448 - protein, 14 aa, Homo sapiens
  CDR3 for beta chain variable domain of TCR clone 166724 (TRBV10-2, TRBJ1-5)
CASSSTGRNQPQHF

SEQ ID NO: 333449 - protein, 13 aa, Homo sapiens
  CDR3 for alpha chain variable domain of TCR clone 166725 (TRAV13-1, TRAJ43)
CAASLSNSNDMRF

SEQ ID NO: 333450 - protein, 15 aa, Homo sapiens
  CDR3 for beta chain variable domain of TCR clone 166725 (TRBV13, TRBJ2-5)
CASSLPGGIQETQYF

SEQ ID NO: 333451 - protein, 18 aa, Homo sapiens
  CDR3 for alpha chain variable domain of TCR clone 166726 (TRAV8-4, TRAJ52)
CAVTRATAGGTSYGKLTF

SEQ ID NO: 333452 - protein, 14 aa, Homo sapiens
  CDR3 for beta chain variable domain of TCR clone 166726 (TRBV19, TRBJ2-7)
CASTVQGRPYEQYF

SEQ ID NO: 333453 - protein, 12 aa, Homo sapiens
  CDR3 for alpha chain variable domain of TCR clone 166727 (TRAV30, TRAJ43)
CGTEERGNDMRF

SEQ ID NO: 333454 - protein, 12 aa, Homo sapiens
  CDR3 for beta chain variable domain of TCR clone 166727 (TRBV12-4, TRBJ2-7)
CASSLGGYEQYF

SEQ ID NO: 333455 - protein, 13 aa, Homo sapiens
  CDR3 for alpha chain variable domain of TCR clone 166728 (TRAV3, TRAJ15)
CAVRDQAGTALIF

SEQ ID NO: 333456 - protein, 14 aa, Homo sapiens
  CDR3 for beta chain variable domain of TCR clone 166728 (TRBV7-6, TRBJ2-3)
CASSLGTVTDTQYF

SEQ ID NO: 333457 - protein, 14 aa, Homo sapiens
  CDR3 for alpha chain variable domain of TCR clone 166729 (TRAV12-2, TRAJ40)
CAVKIPSGTYKYIF

SEQ ID NO: 333458 - protein, 12 aa, Homo sapiens
  CDR3 for beta chain variable domain of TCR clone 166729 (TRBV6-3, TRBJ2-7)
CASSLTPYEQYF

SEQ ID NO: 333459 - protein, 16 aa, Homo sapiens
  CDR3 for alpha chain variable domain of TCR clone 166730 (TRAV30, TRAJ24)
CGTEIVDAYSWGKFQF

SEQ ID NO: 333460 - protein, 13 aa, Homo sapiens
  CDR3 for beta chain variable domain of TCR clone 166730 (TRBV7-3, TRBJ1-1)
CASSQDWGAEAFF

SEQ ID NO: 333461 - protein, 15 aa, Homo sapiens
  CDR3 for alpha chain variable domain of TCR clone 166731 (TRAV3, TRAJ22)
CAVRARGGSARQLTF

SEQ ID NO: 333462 - protein, 14 aa, Homo sapiens
  CDR3 for beta chain variable domain of TCR clone 166731 (TRBV20-1, TRBJ2-5)
CSALVPGYQETQYF

SEQ ID NO: 333463 - protein, 12 aa, Homo sapiens
  CDR3 for alpha chain variable domain of TCR clone 166732 (TRAV12-3, TRAJ17)
CAMTLTGNKLTF

SEQ ID NO: 333464 - protein, 16 aa, Homo sapiens
  CDR3 for beta chain variable domain of TCR clone 166732 (TRBV7-2, TRBJ2-1)
RAREGTSTPLGHEQFF

SEQ ID NO: 333465 - protein, 17 aa, Homo sapiens
  CDR3 for alpha chain variable domain of TCR clone 166733 (TRAV12-2, TRAJ22)
CAVSRIPFSGSARQLTF

SEQ ID NO: 333466 - protein, 13 aa, Homo sapiens
  CDR3 for beta chain variable domain of TCR clone 166733 (TRBV11-3, TRBJ1-1)
CASSSNRDTEAFF

SEQ ID NO: 333467 - protein, 18 aa, Homo sapiens
  CDR3 for alpha chain variable domain of TCR clone 166734 (TRAV21, TRAJ52)
CAVRPSPAGGTSYGKLKF

SEQ ID NO: 333468 - protein, 13 aa, Homo sapiens
  CDR3 for beta chain variable domain of TCR clone 166734 (TRBV28, TRBJ2-5)
CASSFAGGETQYF

SEQ ID NO: 333469 - protein, 15 aa, Homo sapiens
  CDR3 for alpha chain variable domain of TCR clone 166735 (TRAV9-2, TRAJ23)
CALSDLYNQGGKLIF

SEQ ID NO: 333470 - protein, 11 aa, Homo sapiens
  CDR3 for beta chain variable domain of TCR clone 166735 (TRBV11-2, TRBJ2-2)
CASSLPGELFF

SEQ ID NO: 333471 - protein, 19 aa, Homo sapiens
  CDR3 for alpha chain variable domain of TCR clone 166736 (TRAV1-1, TRAJ13)
CLLLLRCEGESGGYQKVTF

SEQ ID NO: 333472 - protein, 15 aa, Homo sapiens
  CDR3 for beta chain variable domain of TCR clone 166736 (TRBV7-9, TRBJ1-5)
CASSQGHQPNQPQHF

SEQ ID NO: 333473 - protein, 11 aa, Homo sapiens
  CDR3 for alpha chain variable domain of TCR clone 166737 (TRAV3, TRAJ21)
CAVGNFNKFYF

SEQ ID NO: 333474 - protein, 17 aa, Homo sapiens
  CDR3 for beta chain variable domain of TCR clone 166737 (TRBV24-1, TRBJ2-1)
CASSAVSTSGTYNEQFF

SEQ ID NO: 333475 - protein, 14 aa, Homo sapiens
  CDR3 for alpha chain variable domain of TCR clone 166738 (TRAV12-3, TRAJ10)
SHLPLTGGGNKLTF

SEQ ID NO: 333476 - protein, 13 aa, Homo sapiens
  CDR3 for beta chain variable domain of TCR clone 166738 (TRBV7-9, TRBJ1-2)
CASSLKQNYGYSF

SEQ ID NO: 333477 - protein, 16 aa, Homo sapiens
  CDR3 for alpha chain variable domain of TCR clone 166739 (TRAV12-2, TRAJ10)
CAVNRVFTGGGNKPTF

SEQ ID NO: 333478 - protein, 12 aa, Homo sapiens
  CDR3 for beta chain variable domain of TCR clone 166739 (TRBV28, TRBJ2-7)
CASSFSSYEQYF

SEQ ID NO: 333479 - protein, 14 aa, Homo sapiens
  CDR3 for alpha chain variable domain of TCR clone 166740 (TRAV8-6, TRAJ49)
CAVSEMDSGNQFYF

SEQ ID NO: 333480 - protein, 16 aa, Homo sapiens
  CDR3 for beta chain variable domain of TCR clone 166740 (TRBV12-5, TRBJ2-5)
CASGPRTSGNQETQYF

SEQ ID NO: 333481 - protein, 15 aa, Homo sapiens
  CDR3 for alpha chain variable domain of TCR clone 166741 (TRAV8-3, TRAJ42)
CAGTNYGGSQGNLIF

SEQ ID NO: 333482 - protein, 15 aa, Homo sapiens
  CDR3 for beta chain variable domain of TCR clone 166741 (TRBV5-1, TRBJ2-3)
CASSVTSGSTDTQYF

SEQ ID NO: 333483 - protein, 14 aa, Homo sapiens
  CDR3 for alpha chain variable domain of TCR clone 166742 (TRAV1-2, TRAJ8)
CAVRDDTGFQKLVF

SEQ ID NO: 333484 - protein, 15 aa, Homo sapiens
  CDR3 for beta chain variable domain of TCR clone 166742 (TRBV5-7, TRBJ2-3)
CASSPRLATTDTQYF

SEQ ID NO: 333485 - protein, 14 aa, Homo sapiens
  CDR3 for alpha chain variable domain of TCR clone 166743 (TRAV1-2, TRAJ8)
CAVREDTGFQKLVF

SEQ ID NO: 333486 - protein, 13 aa, Homo sapiens
  CDR3 for beta chain variable domain of TCR clone 166743 (TRBV27, TRBJ2-3)
CASSWGRTDTQYF

SEQ ID NO: 333487 - protein, 12 aa, Homo sapiens
  CDR3 for alpha chain variable domain of TCR clone 166744 (TRAV21, TRAJ13)
PGPSGGYQKVTF

SEQ ID NO: 333488 - protein, 14 aa, Homo sapiens
  CDR3 for beta chain variable domain of TCR clone 166744 (TRBV20-1, TRBJ2-7)
CSAKDRKGAYEEYF

SEQ ID NO: 333489 - protein, 12 aa, Homo sapiens
  CDR3 for alpha chain variable domain of TCR clone 166745 (TRAV14/DV4, TRAJ9)
CAMNPGGFKTIF

SEQ ID NO: 333490 - protein, 16 aa, Homo sapiens
  CDR3 for beta chain variable domain of TCR clone 166745 (TRBV28, TRBJ2-5)
CASSFFPAGGWETQYF

SEQ ID NO: 333491 - protein, 16 aa, Homo sapiens
  CDR3 for alpha chain variable domain of TCR clone 166746 (TRAV26-1, TRAJ47)
CIVRVVLSQYGNKLCF

SEQ ID NO: 333492 - protein, 16 aa, Homo sapiens
  CDR3 for beta chain variable domain of TCR clone 166746 (TRBV5-1, TRBJ2-1)
CASSFGVSGSYNEQFF

SEQ ID NO: 333493 - protein, 14 aa, Homo sapiens
  CDR3 for alpha chain variable domain of TCR clone 166747 (TRAV8-2, TRAJ4)
CVVSPSGGYNKLIF

SEQ ID NO: 333494 - protein, 14 aa, Homo sapiens
  CDR3 for beta chain variable domain of TCR clone 166747 (TRBV20-1, TRBJ2-7)
CSAWTALSSYEQYF

SEQ ID NO: 333495 - protein, 14 aa, Homo sapiens
  CDR3 for alpha chain variable domain of TCR clone 166748 (TRAV4, TRAJ17)
CLVGDMAAGNKLTF

SEQ ID NO: 333496 - protein, 14 aa, Homo sapiens
  CDR3 for beta chain variable domain of TCR clone 166748 (TRBV4-1, TRBJ2-7)
CASSRVAGGDEQYF

SEQ ID NO: 333497 - protein, 13 aa, Homo sapiens
  CDR3 for alpha chain variable domain of TCR clone 166749 (TRAV21, TRAJ40)
CAVRPSRAYKYIF

SEQ ID NO: 333498 - protein, 18 aa, Homo sapiens
  CDR3 for beta chain variable domain of TCR clone 166749 (TRBV18, TRBJ1-3)
CASSPRGGAGPSGNTIYF

SEQ ID NO: 333499 - protein, 12 aa, Homo sapiens
  CDR3 for alpha chain variable domain of TCR clone 166750 (TRAV12-1, TRAJ31)
CVVNDNNARLMF

SEQ ID NO: 333500 - protein, 15 aa, Homo sapiens
  CDR3 for beta chain variable domain of TCR clone 166750 (TRBV6-4, TRBJ2-1)
CASSDSTGGYNEQFF

SEQ ID NO: 333501 - protein, 14 aa, Homo sapiens
  CDR3 for alpha chain variable domain of TCR clone 166751 (TRAV29/DV5, TRAJ36)
CAARRKTGANNLFF

SEQ ID NO: 333502 - protein, 14 aa, Homo sapiens
  CDR3 for beta chain variable domain of TCR clone 166751 (TRBV20-1, TRBJ2-1)
CSAQIGGSANEQFF

SEQ ID NO: 333503 - protein, 13 aa, Homo sapiens
  CDR3 for alpha chain variable domain of TCR clone 166752 (TRAV1-2, TRAJ20)
CAVPRSNDYKISF

SEQ ID NO: 333504 - protein, 14 aa, Homo sapiens
  CDR3 for beta chain variable domain of TCR clone 166752 (TRBV20-1, TRBJ2-7)
CSARYGTTYYEQYF

SEQ ID NO: 333505 - protein, 15 aa, Homo sapiens
  CDR3 for alpha chain variable domain of TCR clone 166753 (TRAV13-2, TRAJ53)
CAERGSRGSNYKLTF

SEQ ID NO: 333506 - protein, 14 aa, Homo sapiens
  CDR3 for beta chain variable domain of TCR clone 166753 (TRBV4-1, TRBJ2-2)
YASSQYPDTGELFF

SEQ ID NO: 333507 - protein, 15 aa, Homo sapiens
  CDR3 for alpha chain variable domain of TCR clone 166754 (TRAV14/DV4, TRAJ33)
CAMREGRDSNYQLIW

SEQ ID NO: 333508 - protein, 12 aa, Homo sapiens
  CDR3 for beta chain variable domain of TCR clone 166754 (TRBV7-8, TRBJ2-7)
CASSLGDREQYF

SEQ ID NO: 333509 - protein, 13 aa, Homo sapiens
  CDR3 for alpha chain variable domain of TCR clone 166755 (TRAV8-6, TRAJ21)
CAVSPSSLNKFYF

SEQ ID NO: 333510 - protein, 15 aa, Homo sapiens
  CDR3 for beta chain variable domain of TCR clone 166755 (TRBV4-1, TRBJ1-4)
CASSDTGGTNEKLFF

SEQ ID NO: 333511 - protein, 13 aa, Homo sapiens
  CDR3 for alpha chain variable domain of TCR clone 166756 (TRAV36/DV7, TRAJ49)
CAVEANTCNQFYF

SEQ ID NO: 333512 - protein, 14 aa, Homo sapiens
  CDR3 for beta chain variable domain of TCR clone 166756 (TRBV20-1, TRBJ2-5)
CSASSGRAAETQYF

SEQ ID NO: 333513 - protein, 16 aa, Homo sapiens
  CDR3 for alpha chain variable domain of TCR clone 166757 (TRAV4, TRAJ9)
CLVGDTNRPGGFQTIF

SEQ ID NO: 333514 - protein, 16 aa, Homo sapiens
  CDR3 for beta chain variable domain of TCR clone 166757 (TRBV28, TRBJ1-4)
CASSPPYRGRSEKLFF

SEQ ID NO: 333515 - protein, 14 aa, Homo sapiens
  CDR3 for alpha chain variable domain of TCR clone 166758 (TRAV12-2, TRAJ13)
CAVKKNGGYHKVTF

SEQ ID NO: 333516 - protein, 15 aa, Homo sapiens
  CDR3 for beta chain variable domain of TCR clone 166758 (TRBV27, TRBJ2-1)
CASSNGGGSSNEQFF

SEQ ID NO: 333517 - protein, 14 aa, Homo sapiens
  CDR3 for alpha chain variable domain of TCR clone 166759 (TRAV13-2, TRAJ17)
CAENAKAAGNKLTF

SEQ ID NO: 333518 - protein, 11 aa, Homo sapiens
  CDR3 for beta chain variable domain of TCR clone 166759 (TRBV6-3, TRBJ2-3)
CATGQADTQCF

SEQ ID NO: 333519 - protein, 15 aa, Homo sapiens
  CDR3 for alpha chain variable domain of TCR clone 166760 (TRAV3, TRAJ3)
CAVRDMSSSASKIFF

SEQ ID NO: 333520 - protein, 14 aa, Homo sapiens
  CDR3 for beta chain variable domain of TCR clone 166760 (TRBV6-6, TRBJ2-7)
CASSIAGGVDEQYF

SEQ ID NO: 333521 - protein, 14 aa, Homo sapiens
  CDR3 for alpha chain variable domain of TCR clone 166761 (TRAV17, TRAJ34)
CATDSLEGTDKLIF

SEQ ID NO: 333522 - protein, 17 aa, Homo sapiens
  CDR3 for beta chain variable domain of TCR clone 166761 (TRBV4-1, TRBJ2-3)
CASSQSATGGPVDTQYF

SEQ ID NO: 333523 - protein, 10 aa, Homo sapiens
  CDR3 for alpha chain variable domain of TCR clone 166762 (TRAV16, TRAJ22)
SAMYLRQLTL

SEQ ID NO: 333524 - protein, 15 aa, Homo sapiens
  CDR3 for beta chain variable domain of TCR clone 166762 (TRBV7-9, TRBJ1-6)
CASSSPGSGNSPLHF

SEQ ID NO: 333525 - protein, 12 aa, Homo sapiens
  CDR3 for alpha chain variable domain of TCR clone 166763 (TRAV29/DV5, TRAJ15)
CASNQAGTALIF

SEQ ID NO: 333526 - protein, 13 aa, Homo sapiens
  CDR3 for beta chain variable domain of TCR clone 166763 (TRBV19, TRBJ2-7)
CASSKQGGYEQYF

SEQ ID NO: 333527 - protein, 18 aa, Homo sapiens
  CDR3 for alpha chain variable domain of TCR clone 166764 (TRAV26-2, TRAJ54)
CILRDVEVEIQEAQKLVF

SEQ ID NO: 333528 - protein, 16 aa, Homo sapiens
  CDR3 for beta chain variable domain of TCR clone 166764 (TRBV6-1, TRBJ2-5)
CASSETLDRGAETQYF

SEQ ID NO: 333529 - protein, 12 aa, Homo sapiens
  CDR3 for alpha chain variable domain of TCR clone 166765 (TRAV16, TRAJ22)
CALEDSARQLTF

SEQ ID NO: 333530 - protein, 14 aa, Homo sapiens
  CDR3 for beta chain variable domain of TCR clone 166765 (TRBV11-2, TRBJ2-3)
CASSSIASTDTQYF

SEQ ID NO: 333531 - protein, 13 aa, Homo sapiens
  CDR3 for alpha chain variable domain of TCR clone 166766 (TRAV8-3, TRAJ43)
CAVGPDNNNDMLF

SEQ ID NO: 333532 - protein, 13 aa, Homo sapiens
  CDR3 for beta chain variable domain of TCR clone 166766 (TRBV29-1, TRBJ2-1)
CSVEGGRVNEQFF

SEQ ID NO: 333533 - protein, 10 aa, Homo sapiens
  CDR3 for alpha chain variable domain of TCR clone 166767 (TRAV2, TRAJ33)
CAVNRIATIS

SEQ ID NO: 333534 - protein, 15 aa, Homo sapiens
  CDR3 for beta chain variable domain of TCR clone 166767 (TRBV7-2, TRBJ2-1)
CASSSGLAGGNEQFF

SEQ ID NO: 333535 - protein, 11 aa, Homo sapiens
  CDR3 for alpha chain variable domain of TCR clone 166768 (TRAV25, TRAJ5)
CRGGGGRALTF

SEQ ID NO: 333536 - protein, 15 aa, Homo sapiens
  CDR3 for beta chain variable domain of TCR clone 166768 (TRBV19, TRBJ2-4)
CASRGPRRGENIQYF

SEQ ID NO: 333537 - protein, 12 aa, Homo sapiens
  CDR3 for alpha chain variable domain of TCR clone 166769 (TRAV12-2, TRAJ31)
CAVNTPDARLMF

SEQ ID NO: 333538 - protein, 14 aa, Homo sapiens
  CDR3 for beta chain variable domain of TCR clone 166769 (TRBV7-2, TRBJ2-7)
CASSLYPGRYEQYF

SEQ ID NO: 333539 - protein, 18 aa, Homo sapiens
  CDR3 for alpha chain variable domain of TCR clone 166770 (TRAV21, TRAJ52)
CAVRPSPAGGTSYGKLTF

SEQ ID NO: 333540 - protein, 12 aa, Homo sapiens
  CDR3 for beta chain variable domain of TCR clone 166770 (TRBV12-4, TRBJ1-2)
CASRLQGSGYTF

SEQ ID NO: 333541 - protein, 15 aa, Homo sapiens
  CDR3 for alpha chain variable domain of TCR clone 166771 (TRAV14/DV4, TRAJ22)
CNERGPPGSARQLTV

SEQ ID NO: 333542 - protein, 15 aa, Homo sapiens
  CDR3 for beta chain variable domain of TCR clone 166771 (TRBV7-9, TRBJ2-7)
CASSPGGGLTYEQYF

SEQ ID NO: 333543 - protein, 14 aa, Homo sapiens
  CDR3 for alpha chain variable domain of TCR clone 166772 (TRAV2, TRAJ37)
CAVDFTSNTGKLIF

SEQ ID NO: 333544 - protein, 13 aa, Homo sapiens
  CDR3 for beta chain variable domain of TCR clone 166772 (TRBV4-1, TRBJ2-2)
CSSSQENTGELFF

SEQ ID NO: 333545 - protein, 14 aa, Homo sapiens
  CDR3 for alpha chain variable domain of TCR clone 166773 (TRAV1-2, TRAJ8)
CAVREDTGFQKLVF

SEQ ID NO: 333546 - protein, 15 aa, Homo sapiens
  CDR3 for beta chain variable domain of TCR clone 166773 (TRBV19, TRBJ1-1)
CASTSGQSQNTEAFF

SEQ ID NO: 333547 - protein, 13 aa, Homo sapiens
  CDR3 for alpha chain variable domain of TCR clone 166774 (TRAV26-1, TRAJ41)
CIVRINSGYALNF

SEQ ID NO: 333548 - protein, 12 aa, Homo sapiens
  CDR3 for beta chain variable domain of TCR clone 166774 (TRBV7-8, TRBJ2-7)
CASSLGDREQYF

SEQ ID NO: 333549 - protein, 12 aa, Homo sapiens
  CDR3 for alpha chain variable domain of TCR clone 166775 (TRAV12-1, TRAJ29)
CVADSGNTPLVF

SEQ ID NO: 333550 - protein, 12 aa, Homo sapiens
  CDR3 for beta chain variable domain of TCR clone 166775 (TRBV2, TRBJ2-7)
CASKRGRYEQYF

SEQ ID NO: 333551 - protein, 12 aa, Homo sapiens
  CDR3 for alpha chain variable domain of TCR clone 166776 (TRAV12-1, TRAJ40)
CVFYSGTYKYIF

SEQ ID NO: 333552 - protein, 14 aa, Homo sapiens
  CDR3 for beta chain variable domain of TCR clone 166776 (TRBV20-1, TRBJ2-3)
CSARGGTSTDTQYF

SEQ ID NO: 333553 - protein, 17 aa, Homo sapiens
  CDR3 for alpha chain variable domain of TCR clone 166777 (TRAV26-1, TRAJ53)
CIVRVDDSGGSNYKLTF

SEQ ID NO: 333554 - protein, 11 aa, Homo sapiens
  CDR3 for beta chain variable domain of TCR clone 166777 (TRBV19, TRBJ2-4)
CASSNKNIQYF

SEQ ID NO: 333555 - protein, 12 aa, Homo sapiens
  CDR3 for alpha chain variable domain of TCR clone 166778 (TRAV3, TRAJ20)
CAVRDGDYKLSF

SEQ ID NO: 333556 - protein, 15 aa, Homo sapiens
  CDR3 for beta chain variable domain of TCR clone 166778 (TRBV27, TRBJ2-1)
CASSNGGGSSNEQFF

SEQ ID NO: 333557 - protein, 18 aa, Homo sapiens
  CDR3 for alpha chain variable domain of TCR clone 166779 (TRAV9-2, TRAJ52)
CALSRHNAGGTSYGKLTF

SEQ ID NO: 333558 - protein, 12 aa, Homo sapiens
  CDR3 for beta chain variable domain of TCR clone 166779 (TRBV7-9, TRBJ2-7)
CATRTDAYEQYF

SEQ ID NO: 333559 - protein, 15 aa, Homo sapiens
  CDR3 for alpha chain variable domain of TCR clone 166780 (TRAV3, TRAJ22)
CAVRDRGGSARQMTF

SEQ ID NO: 333560 - protein, 13 aa, Homo sapiens
  CDR3 for beta chain variable domain of TCR clone 166780 (TRBV12-4, TRBJ1-1)
CASSPGTGFEAFF

SEQ ID NO: 333561 - protein, 14 aa, Homo sapiens
  CDR3 for alpha chain variable domain of TCR clone 166781 (TRAV17, TRAJ45)
CATDGRGGADGLTF

SEQ ID NO: 333562 - protein, 15 aa, Homo sapiens
  CDR3 for beta chain variable domain of TCR clone 166781 (TRBV3-1, TRBJ2-1)
CASSQQPSGGNEQFF

SEQ ID NO: 333563 - protein, 16 aa, Homo sapiens
  CDR3 for alpha chain variable domain of TCR clone 166782 (TRAV27, TRAJ48)
TAAQPGDTGLYLPLTF

SEQ ID NO: 333564 - protein, 13 aa, Homo sapiens
  CDR3 for beta chain variable domain of TCR clone 166782 (TRBV7-2, TRBJ2-5)
CASSQTSVEAQYF

SEQ ID NO: 333565 - protein, 17 aa, Homo sapiens
  CDR3 for alpha chain variable domain of TCR clone 166783 (TRAV26-1, TRAJ47)
CIVPSLLYMEYGNKLVF

SEQ ID NO: 333566 - protein, 14 aa, Homo sapiens
  CDR3 for beta chain variable domain of TCR clone 166783 (TRBV7-3, TRBJ1-5)
RASSVSGCNQPQHF

SEQ ID NO: 333567 - protein, 14 aa, Homo sapiens
  CDR3 for alpha chain variable domain of TCR clone 166784 (TRAV2, TRAJ37)
CAVDFTSNTGKLIF

SEQ ID NO: 333568 - protein, 17 aa, Homo sapiens
  CDR3 for beta chain variable domain of TCR clone 166784 (TRBV6-1, TRBJ1-2)
CASSGTHSQRGNYGYAL

SEQ ID NO: 333569 - protein, 14 aa, Homo sapiens
  CDR3 for alpha chain variable domain of TCR clone 166785 (TRAV12-2, TRAJ44)
CAVNSAGTASKLTF

SEQ ID NO: 333570 - protein, 13 aa, Homo sapiens
  CDR3 for beta chain variable domain of TCR clone 166785 (TRBV20-1, TRBJ1-6)
CSAPLGVGSPLHF

SEQ ID NO: 333571 - protein, 18 aa, Homo sapiens
  CDR3 for alpha chain variable domain of TCR clone 166786 (TRAV21, TRAJ52)
CAVRPSPAGGTSYGKLTF

SEQ ID NO: 333572 - protein, 19 aa, Homo sapiens
  CDR3 for beta chain variable domain of TCR clone 166786 (TRBV7-9, TRBJ2-6)
CASSLESATVLPGANVLTF

SEQ ID NO: 333573 - protein, 17 aa, Homo sapiens
  CDR3 for alpha chain variable domain of TCR clone 166787 (TRAV3, TRAJ6)
CAVRDGPRAGGSYIPTF

SEQ ID NO: 333574 - protein, 15 aa, Homo sapiens
  CDR3 for beta chain variable domain of TCR clone 166787 (TRBV18, TRBJ1-5)
CASSPSDRSNQPQHF

SEQ ID NO: 333575 - protein, 14 aa, Homo sapiens
  CDR3 for alpha chain variable domain of TCR clone 166788 (TRAV12-3, TRAJ10)
SHLPLTGGGNKITF

SEQ ID NO: 333576 - protein, 11 aa, Homo sapiens
  CDR3 for beta chain variable domain of TCR clone 166788 (TRBV19, TRBJ1-1)
CASSIGSEAFF

SEQ ID NO: 333577 - protein, 14 aa, Homo sapiens
  CDR3 for alpha chain variable domain of TCR clone 166789 (TRAV35, TRAJ33)
CAGSSQDSNDQLIW

SEQ ID NO: 333578 - protein, 11 aa, Homo sapiens
  CDR3 for beta chain variable domain of TCR clone 166789 (TRBV5-1, TRBJ2-1)
CASSIGQEQFF

SEQ ID NO: 333579 - protein, 13 aa, Homo sapiens
  CDR3 for alpha chain variable domain of TCR clone 166790 (TRAV27, TRAJ6)
CAGGTRGSYIPTF

SEQ ID NO: 333580 - protein, 17 aa, Homo sapiens
  CDR3 for beta chain variable domain of TCR clone 166790 (TRBV7-3, TRBJ2-3)
CASSRGLAGEVPDTQYF

SEQ ID NO: 333581 - protein, 11 aa, Homo sapiens
  CDR3 for alpha chain variable domain of TCR clone 166791 (TRAV3, TRAJ21)
CAVGNFNKFYF

SEQ ID NO: 333582 - protein, 17 aa, Homo sapiens
  CDR3 for beta chain variable domain of TCR clone 166791 (TRBV5-1, TRBJ2-5)
CASSPVALGQNQETQYF

SEQ ID NO: 333583 - protein, 20 aa, Homo sapiens
  CDR3 for alpha chain variable domain of TCR clone 166792 (TRAV8-6, TRAJ38)
CAVRNAGNNHIQNPDPAVYQ

SEQ ID NO: 333584 - protein, 15 aa, Homo sapiens
  CDR3 for beta chain variable domain of TCR clone 166792 (TRBV4-1, TRBJ2-2)
CASSEGQGITGELFF

SEQ ID NO: 333585 - protein, 11 aa, Homo sapiens
  CDR3 for alpha chain variable domain of TCR clone 166793 (TRAV13-2, TRAJ20)
CADSNDYKLSF

SEQ ID NO: 333586 - protein, 16 aa, Homo sapiens
  CDR3 for beta chain variable domain of TCR clone 166793 (TRBV10-3, TRBJ2-1)
CAISGVGDRGGGEQFF

SEQ ID NO: 333587 - protein, 21 aa, Homo sapiens
  CDR3 for alpha chain variable domain of TCR clone 166794 (TRAV8-3, TRAJ32)
CAVEVVLQTSSSLELALCLLS

SEQ ID NO: 333588 - protein, 17 aa, Homo sapiens
  CDR3 for beta chain variable domain of TCR clone 166794 (TRBV7-2, TRBJ2-3)
CASSLEARGTSTDTQYF

SEQ ID NO: 333589 - protein, 18 aa, Homo sapiens
  CDR3 for alpha chain variable domain of TCR clone 166795 (TRAV13-1, TRAJ52)
CAAKNPNAGGTSYGKLTF

SEQ ID NO: 333590 - protein, 12 aa, Homo sapiens
  CDR3 for beta chain variable domain of TCR clone 166795 (TRBV3-1, TRBJ2-3)
CASSQDRDTQYF

SEQ ID NO: 333591 - protein, 13 aa, Homo sapiens
  CDR3 for alpha chain variable domain of TCR clone 166796 (TRAV13-2, TRAJ48)
CAEMDFGNEKLTF

SEQ ID NO: 333592 - protein, 15 aa, Homo sapiens
  CDR3 for beta chain variable domain of TCR clone 166796 (TRBV7-9, TRBJ1-6)
CASSSPGRRSSPLHF

SEQ ID NO: 333593 - protein, 20 aa, Homo sapiens
  CDR3 for alpha chain variable domain of TCR clone 166797 (TRAV21, TRAJ4)
AASQPGDSATLAGGYNKLIF

SEQ ID NO: 333594 - protein, 19 aa, Homo sapiens
  CDR3 for beta chain variable domain of TCR clone 166797 (TRBV18, TRBJ1-3)
CVSSPLSRTGMSSGNTIYF

SEQ ID NO: 333595 - protein, 14 aa, Homo sapiens
  CDR3 for alpha chain variable domain of TCR clone 166798 (TRAV13-1, TRAJ40)
CASSMTSGTYKYIF

SEQ ID NO: 333596 - protein, 15 aa, Homo sapiens
  CDR3 for beta chain variable domain of TCR clone 166798 (TRBV7-3, TRBJ2-1)
CASSPTGGGEVEQFF

SEQ ID NO: 333597 - protein, 13 aa, Homo sapiens
  CDR3 for alpha chain variable domain of TCR clone 166799 (TRAV2, TRAJ15)
CAVASQAGTALIF

SEQ ID NO: 333598 - protein, 16 aa, Homo sapiens
  CDR3 for beta chain variable domain of TCR clone 166799 (TRBV19, TRBJ2-2)
CASSFPGQGLAGELFF

SEQ ID NO: 333599 - protein, 14 aa, Homo sapiens
  CDR3 for alpha chain variable domain of TCR clone 166800 (TRAV29/DV5, TRAJ30)
CAARLMNRDDTIIF

SEQ ID NO: 333600 - protein, 17 aa, Homo sapiens
  CDR3 for beta chain variable domain of TCR clone 166800 (TRBV12-4, TRBJ2-3)
CASSGPGLAGGADTQYF

SEQ ID NO: 333601 - protein, 18 aa, Homo sapiens
  CDR3 for alpha chain variable domain of TCR clone 166801 (TRAV29/DV5, TRAJ26)
CSVLLRSKRKPEGQNFVF

SEQ ID NO: 333602 - protein, 17 aa, Homo sapiens
  CDR3 for beta chain variable domain of TCR clone 166801 (TRBV20-1, TRBJ2-2)
CSASGSGQGGLTGELFF

SEQ ID NO: 333603 - protein, 18 aa, Homo sapiens
  CDR3 for alpha chain variable domain of TCR clone 166802 (TRAV1-1, TRAJ42)
CAVSPSAFYGGSQGNLIF

SEQ ID NO: 333604 - protein, 18 aa, Homo sapiens
  CDR3 for beta chain variable domain of TCR clone 166802 (TRBV11-2, TRBJ2-3)
CASSLGGASRGAPNTQYF

SEQ ID NO: 333605 - protein, 12 aa, Homo sapiens
  CDR3 for alpha chain variable domain of TCR clone 166803 (TRAV16, TRAJ27)
CALNTNAGKSTF

SEQ ID NO: 333606 - protein, 15 aa, Homo sapiens
  CDR3 for beta chain variable domain of TCR clone 166803 (TRBV12-4, TRBJ2-1)
CASSLLATGNNEQFF

SEQ ID NO: 333607 - protein, 15 aa, Homo sapiens
  CDR3 for alpha chain variable domain of TCR clone 166804 (TRAV27, TRAJ38)
CAARRNAGNNRKLVW

SEQ ID NO: 333608 - protein, 13 aa, Homo sapiens
  CDR3 for beta chain variable domain of TCR clone 166804 (TRBV2, TRBJ1-1)
CASSEGGNTEAFF

SEQ ID NO: 333609 - protein, 13 aa, Homo sapiens
  CDR3 for alpha chain variable domain of TCR clone 166805 (TRAV1-2, TRAJ9)
CAALNTGGFITIF

SEQ ID NO: 333610 - protein, 14 aa, Homo sapiens
  CDR3 for beta chain variable domain of TCR clone 166805 (TRBV13, TRBJ2-5)
CASSLERVGETQYF

SEQ ID NO: 333611 - protein, 14 aa, Homo sapiens
  CDR3 for alpha chain variable domain of TCR clone 166806 (TRAV16, TRAJ33)
CSLSAMDSNYQLIW

SEQ ID NO: 333612 - protein, 15 aa, Homo sapiens
  CDR3 for beta chain variable domain of TCR clone 166806 (TRBV9, TRBJ1-6)
CASSVAGTGDSPLHF

SEQ ID NO: 333613 - protein, 12 aa, Homo sapiens
  CDR3 for alpha chain variable domain of TCR clone 166807 (TRAV27, TRAJ9)
CAGESGGFKTIV

SEQ ID NO: 333614 - protein, 18 aa, Homo sapiens
  CDR3 for beta chain variable domain of TCR clone 166807 (TRBV10-2, TRBJ2-2)
CISAPAVHRQADAGELFF

SEQ ID NO: 333615 - protein, 14 aa, Homo sapiens
  CDR3 for alpha chain variable domain of TCR clone 166808 (TRAV26-1, TRAJ39)
CIVWGSRAGNMLTF

SEQ ID NO: 333616 - protein, 15 aa, Homo sapiens
  CDR3 for beta chain variable domain of TCR clone 166808 (TRBV28, TRBJ2-5)
CASSPGQGSIETQYF

SEQ ID NO: 333617 - protein, 17 aa, Homo sapiens
  CDR3 for alpha chain variable domain of TCR clone 166809 (TRAV38-2/DV8, TRAJ38)
CAYRSARGASNNRKLIW

SEQ ID NO: 333618 - protein, 15 aa, Homo sapiens
  CDR3 for beta chain variable domain of TCR clone 166809 (TRBV7-9, TRBJ1-6)
CASSSPGRGNSPLHF

SEQ ID NO: 333619 - protein, 12 aa, Homo sapiens
  CDR3 for alpha chain variable domain of TCR clone 166810 (TRAV8-6, TRAJ43)
CAVRYNNNDMRF

SEQ ID NO: 333620 - protein, 17 aa, Homo sapiens
  CDR3 for beta chain variable domain of TCR clone 166810 (TRBV13, TRBJ2-3)
CASILSRVAGGRNTQYF

SEQ ID NO: 333621 - protein, 14 aa, Homo sapiens
  CDR3 for alpha chain variable domain of TCR clone 166811 (TRAV27, TRAJ15)
CAGFDNPAGTALIF

SEQ ID NO: 333622 - protein, 11 aa, Homo sapiens
  CDR3 for beta chain variable domain of TCR clone 166811 (TRBV29-1, TRBJ1-1)
CSVEVGTRTFF

SEQ ID NO: 333623 - protein, 13 aa, Homo sapiens
  CDR3 for alpha chain variable domain of TCR clone 166812 (TRAV8-3, TRAJ48)
CAAGRFGDEKLTF

SEQ ID NO: 333624 - protein, 16 aa, Homo sapiens
  CDR3 for beta chain variable domain of TCR clone 166812 (TRBV20-1, TRBJ2-5)
CSARDFASGIQETQYF

SEQ ID NO: 333625 - protein, 12 aa, Homo sapiens
  CDR3 for alpha chain variable domain of TCR clone 166813 (TRAV35, TRAJ30)
CAGLNRDDKIIS

SEQ ID NO: 333626 - protein, 15 aa, Homo sapiens
  CDR3 for beta chain variable domain of TCR clone 166813 (TRBV18, TRBJ2-3)
CASSPLAGETDTQYF

SEQ ID NO: 333627 - protein, 14 aa, Homo sapiens
  CDR3 for alpha chain variable domain of TCR clone 166814 (TRAV30, TRAJ43)
RNPLPIIELNDMRF

SEQ ID NO: 333628 - protein, 14 aa, Homo sapiens
  CDR3 for beta chain variable domain of TCR clone 166814 (TRBV27, TRBJ2-1)
CASRHLGGGKEQFF

SEQ ID NO: 333629 - protein, 15 aa, Homo sapiens
  CDR3 for alpha chain variable domain of TCR clone 166815 (TRAV17, TRAJ57)
CATGPSPGGSEKLVF

SEQ ID NO: 333630 - protein, 13 aa, Homo sapiens
  CDR3 for beta chain variable domain of TCR clone 166815 (TRBV27, TRBJ1-4)
CASSLMGDEKLFF

SEQ ID NO: 333631 - protein, 15 aa, Homo sapiens
  CDR3 for alpha chain variable domain of TCR clone 166816 (TRAV3, TRAJ22)
CAVRDRGGSARQMTF

SEQ ID NO: 333632 - protein, 14 aa, Homo sapiens
  CDR3 for beta chain variable domain of TCR clone 166816 (TRBV5-1, TRBJ2-7)
CASSRGESLYEQYF

SEQ ID NO: 333633 - protein, 11 aa, Homo sapiens
  CDR3 for alpha chain variable domain of TCR clone 166817 (TRAV8-4, TRAJ34)
CAVSWTDKLII

SEQ ID NO: 333634 - protein, 14 aa, Homo sapiens
  CDR3 for beta chain variable domain of TCR clone 166817 (TRBV7-9, TRBJ2-3)
CASSLEDGTDTQYF

SEQ ID NO: 333635 - protein, 12 aa, Homo sapiens
  CDR3 for alpha chain variable domain of TCR clone 166818 (TRAV21, TRAJ13)
PCPSGGYQKVTF

SEQ ID NO: 333636 - protein, 15 aa, Homo sapiens
  CDR3 for beta chain variable domain of TCR clone 166818 (TRBV7-9, TRBJ1-6)
CASSSSGRGNSPLHF

SEQ ID NO: 333637 - protein, 14 aa, Homo sapiens
  CDR3 for alpha chain variable domain of TCR clone 166819 (TRAV12-2, TRAJ15)
CAPHTGQAGTALIF

SEQ ID NO: 333638 - protein, 12 aa, Homo sapiens
  CDR3 for beta chain variable domain of TCR clone 166819 (TRBV5-5, TRBJ2-5)
CASSYFGETQYF

SEQ ID NO: 333639 - protein, 11 aa, Homo sapiens
  CDR3 for alpha chain variable domain of TCR clone 166820 (TRAV12-1, TRAJ21)
CVVNNFNKFYF

SEQ ID NO: 333640 - protein, 12 aa, Homo sapiens
  CDR3 for beta chain variable domain of TCR clone 166820 (TRBV12-4, TRBJ2-7)
CASSLGGYEQYF

SEQ ID NO: 333641 - protein, 16 aa, Homo sapiens
  CDR3 for alpha chain variable domain of TCR clone 166821 (TRAV17, TRAJ28)
CATASVSGAVSYQLTF

SEQ ID NO: 333642 - protein, 11 aa, Homo sapiens
  CDR3 for beta chain variable domain of TCR clone 166821 (TRBV7-9, TRBJ2-5)
CASSLGETQYF

SEQ ID NO: 333643 - protein, 10 aa, Homo sapiens
  CDR3 for alpha chain variable domain of TCR clone 166822 (TRAV1-1, TRAJ26)
CAVNGQNFVF

SEQ ID NO: 333644 - protein, 14 aa, Homo sapiens
  CDR3 for beta chain variable domain of TCR clone 166822 (TRBV15, TRBJ2-3)
CATRSGTSTDTQYF

SEQ ID NO: 333645 - protein, 15 aa, Homo sapiens
  CDR3 for alpha chain variable domain of TCR clone 166823 (TRAV12-1, TRAJ45)
CVVLSGGGGADGRTF

SEQ ID NO: 333646 - protein, 13 aa, Homo sapiens
  CDR3 for beta chain variable domain of TCR clone 166823 (TRBV7-3, TRBJ1-1)
CASSQDWGAEAFF

SEQ ID NO: 333647 - protein, 19 aa, Homo sapiens
  CDR3 for alpha chain variable domain of TCR clone 166824 (TRAV26-1, TRAJ52)
CIVRAHRNAGGTSYGKLTF

SEQ ID NO: 333648 - protein, 14 aa, Homo sapiens
  CDR3 for beta chain variable domain of TCR clone 166824 (TRBV5-5, TRBJ1-5)
CASSGQGVDQPQHF

SEQ ID NO: 333649 - protein, 12 aa, Homo sapiens
  CDR3 for alpha chain variable domain of TCR clone 166825 (TRAV13-1, TRAJ21)
CAAKEGLNKFYF

SEQ ID NO: 333650 - protein, 15 aa, Homo sapiens
  CDR3 for beta chain variable domain of TCR clone 166825 (TRBV19, TRBJ2-7)
CASSPAGSGEALRYF

SEQ ID NO: 333651 - protein, 18 aa, Homo sapiens
  CDR3 for alpha chain variable domain of TCR clone 166826 (TRAV20, TRAJ4)
CAVQPYYMFSGGYNKLIF

SEQ ID NO: 333652 - protein, 13 aa, Homo sapiens
  CDR3 for beta chain variable domain of TCR clone 166826 (TRBV19, TRBJ2-3)
CAAWDKITDTQYF

SEQ ID NO: 333653 - protein, 12 aa, Homo sapiens
  CDR3 for alpha chain variable domain of TCR clone 166827 (TRAV13-1, TRAJ21)
SAAKEGFNKFYF

SEQ ID NO: 333654 - protein, 15 aa, Homo sapiens
  CDR3 for beta chain variable domain of TCR clone 166827 (TRBV12-4, TRBJ2-5)
CASSPPTGLQETQYF

SEQ ID NO: 333655 - protein, 12 aa, Homo sapiens
  CDR3 for alpha chain variable domain of TCR clone 166828 (TRAV3, TRAJ31)
CAVRDGNARLMF

SEQ ID NO: 333656 - protein, 13 aa, Homo sapiens
  CDR3 for beta chain variable domain of TCR clone 166828 (TRBV2, TRBJ1-1)
CASSVLMNTEAFF

SEQ ID NO: 333657 - protein, 14 aa, Homo sapiens
  CDR3 for alpha chain variable domain of TCR clone 166829 (TRAV12-2, TRAJ13)
CAVKKTGGDRKVTF

SEQ ID NO: 333658 - protein, 13 aa, Homo sapiens
  CDR3 for beta chain variable domain of TCR clone 166829 (TRBV28, TRBJ2-7)
CASKAGGVYEQYF

SEQ ID NO: 333659 - protein, 13 aa, Homo sapiens
  CDR3 for alpha chain variable domain of TCR clone 166830 (TRAV23/DV6, TRAJ22)
CAPYSGSARQLTF

SEQ ID NO: 333660 - protein, 17 aa, Homo sapiens
  CDR3 for beta chain variable domain of TCR clone 166830 (TRBV11-2, TRBJ1-6)
CASSLDPWAVYPSTLGT

SEQ ID NO: 333661 - protein, 13 aa, Homo sapiens
  CDR3 for alpha chain variable domain of TCR clone 166831 (TRAV1-2, TRAJ9)
CAALNTGGFKTIF

SEQ ID NO: 333662 - protein, 12 aa, Homo sapiens
  CDR3 for beta chain variable domain of TCR clone 166831 (TRBV19, TRBJ1-2)
CSSVPGQDGYTF

SEQ ID NO: 333663 - protein, 15 aa, Homo sapiens
  CDR3 for alpha chain variable domain of TCR clone 166832 (TRAV3, TRAJ22)
CAVRDRGGSARQLTF

SEQ ID NO: 333664 - protein, 16 aa, Homo sapiens
  CDR3 for beta chain variable domain of TCR clone 166832 (TRBV5-4, TRBJ2-3)
CASQQPGAGGAYTQYF

SEQ ID NO: 333665 - protein, 12 aa, Homo sapiens
  CDR3 for alpha chain variable domain of TCR clone 166833 (TRAV16, TRAJ7)
FALSYGNNRLAF

SEQ ID NO: 333666 - protein, 19 aa, Homo sapiens
  CDR3 for beta chain variable domain of TCR clone 166833 (TRBV28, TRBJ2-7)
CASSYSGTSRLGWVYEQYF

SEQ ID NO: 333667 - protein, 13 aa, Homo sapiens
  CDR3 for alpha chain variable domain of TCR clone 166834 (TRAV12-1, TRAJ21)
CVVTLYTFNKFYF

SEQ ID NO: 333668 - protein, 20 aa, Homo sapiens
  CDR3 for beta chain variable domain of TCR clone 166834 (TRBV7-8, TRBJ2-1)
CASSLAHRLAGVRSYNEQFF

SEQ ID NO: 333669 - protein, 14 aa, Homo sapiens
  CDR3 for alpha chain variable domain of TCR clone 166835 (TRAV12-2, TRAJ13)
CAVKKTGGYQKVTF

SEQ ID NO: 333670 - protein, 15 aa, Homo sapiens
  CDR3 for beta chain variable domain of TCR clone 166835 (TRBV7-8, TRBJ2-5)
CASSDAAGSQETQYF

SEQ ID NO: 333671 - protein, 14 aa, Homo sapiens
  CDR3 for alpha chain variable domain of TCR clone 166836 (TRAV12-1, TRAJ22)
CVVPYRGSARQLTF

SEQ ID NO: 333672 - protein, 15 aa, Homo sapiens
  CDR3 for beta chain variable domain of TCR clone 166836 (TRBV12-4, TRBJ2-1)
CASSLGTSVVNEQFF

SEQ ID NO: 333673 - protein, 14 aa, Homo sapiens
  CDR3 for alpha chain variable domain of TCR clone 166837 (TRAV12-2, TRAJ53)
CAVKGGGSSYKLTF

SEQ ID NO: 333674 - protein, 14 aa, Homo sapiens
  CDR3 for beta chain variable domain of TCR clone 166837 (TRBV7-7, TRBJ2-2)
CATRQDSDTGELFF

SEQ ID NO: 333675 - protein, 15 aa, Homo sapiens
  CDR3 for alpha chain variable domain of TCR clone 166838 (TRAV3, TRAJ22)
CAVRDRGGSVRQLTF

SEQ ID NO: 333676 - protein, 14 aa, Homo sapiens
  CDR3 for beta chain variable domain of TCR clone 166838 (TRBV19, TRBJ1-5)
CASSLGLIGQPQHF

SEQ ID NO: 333677 - protein, 14 aa, Homo sapiens
  CDR3 for alpha chain variable domain of TCR clone 166839 (TRAV26-2, TRAJ27)
CILRDISYAGKSTF

SEQ ID NO: 333678 - protein, 15 aa, Homo sapiens
  CDR3 for beta chain variable domain of TCR clone 166839 (TRBV10-3, TRBJ2-7)
CATREQGLRSYEQYF

SEQ ID NO: 333679 - protein, 18 aa, Homo sapiens
  CDR3 for alpha chain variable domain of TCR clone 166840 (TRAV17, TRAJ45)
CATSLDLYSGGGADGLTF

SEQ ID NO: 333680 - protein, 16 aa, Homo sapiens
  CDR3 for beta chain variable domain of TCR clone 166840 (TRBV3-1, TRBJ2-7)
CASSQGATGVAYEQYF

SEQ ID NO: 333681 - protein, 14 aa, Homo sapiens
  CDR3 for alpha chain variable domain of TCR clone 166841 (TRAV21, TRAJ35)
CAVMPIGFGNVLHC

SEQ ID NO: 333682 - protein, 14 aa, Homo sapiens
  CDR3 for beta chain variable domain of TCR clone 166841 (TRBV20-1, TRBJ1-1)
CSAQTRIGGTEAFF

SEQ ID NO: 333683 - protein, 17 aa, Homo sapiens
  CDR3 for alpha chain variable domain of TCR clone 166842 (TRAV3, TRAJ10)
CAVRVRILTGGGNKLTF

SEQ ID NO: 333684 - protein, 12 aa, Homo sapiens
  CDR3 for beta chain variable domain of TCR clone 166842 (TRBV20-1, TRBJ2-1)
CSARLGTDEQFF

SEQ ID NO: 333685 - protein, 15 aa, Homo sapiens
  CDR3 for alpha chain variable domain of TCR clone 166843 (TRAV8-3, TRAJ11)
CAVGLLDSGYSTLTF

SEQ ID NO: 333686 - protein, 23 aa, Homo sapiens
  CDR3 for beta chain variable domain of TCR clone 166843 (TRBV7-9, TRBJ1-2)
EAQLEKSRLLSDRFSSGEDGYTF

SEQ ID NO: 333687 - protein, 12 aa, Homo sapiens
  CDR3 for alpha chain variable domain of TCR clone 166844 (TRAV13-1, TRAJ21)
CAAKEGVNKFYF

SEQ ID NO: 333688 - protein, 17 aa, Homo sapiens
  CDR3 for beta chain variable domain of TCR clone 166844 (TRBV19, TRBJ2-7)
CASSISFYDSYPYEQYF

SEQ ID NO: 333689 - protein, 14 aa, Homo sapiens
  CDR3 for alpha chain variable domain of TCR clone 166845 (TRAV29/DV5, TRAJ45)
CAASFRGVADGLTF

SEQ ID NO: 333690 - protein, 18 aa, Homo sapiens
  CDR3 for beta chain variable domain of TCR clone 166845 (TRBV20-1, TRBJ2-3)
CSASGLAGGPGTTDTQYF

SEQ ID NO: 333691 - protein, 14 aa, Homo sapiens
  CDR3 for alpha chain variable domain of TCR clone 166846 (TRAV17, TRAJ34)
CATVPTYNTDKLIF

SEQ ID NO: 333692 - protein, 14 aa, Homo sapiens
  CDR3 for beta chain variable domain of TCR clone 166846 (TRBV7-8, TRBJ2-3)
CASSLEAGTDTQYF

SEQ ID NO: 333693 - protein, 17 aa, Homo sapiens
  CDR3 for alpha chain variable domain of TCR clone 166847 (TRAV13-1, TRAJ28)
CAASPPYSGAGSYQLTF

SEQ ID NO: 333694 - protein, 12 aa, Homo sapiens
  CDR3 for beta chain variable domain of TCR clone 166847 (TRBV12-5, TRBJ2-5)
CASGQGVETQYF

SEQ ID NO: 333695 - protein, 16 aa, Homo sapiens
  CDR3 for alpha chain variable domain of TCR clone 166848 (TRAV30, TRAJ24)
CGTEIVDADSWGKFQF

SEQ ID NO: 333696 - protein, 12 aa, Homo sapiens
  CDR3 for beta chain variable domain of TCR clone 166848 (TRBV11-2, TRBJ2-2)
CASSIGGGELFF

SEQ ID NO: 333697 - protein, 14 aa, Homo sapiens
  CDR3 for alpha chain variable domain of TCR clone 166849 (TRAV2, TRAJ9)
CAVDPNTGGFKTIF

SEQ ID NO: 333698 - protein, 13 aa, Homo sapiens
  CDR3 for beta chain variable domain of TCR clone 166849 (TRBV20-1, TRBJ2-1)
CSASTGTSNEQFF

SEQ ID NO: 333699 - protein, 20 aa, Homo sapiens
  CDR3 for alpha chain variable domain of TCR clone 166850 (TRAV13-1, TRAJ10)
CAAKGHGGRKQTHLWDRHSA

SEQ ID NO: 333700 - protein, 13 aa, Homo sapiens
  CDR3 for beta chain variable domain of TCR clone 166850 (TRBV20-1, TRBJ1-1)
CSARGGGNTEAFF

SEQ ID NO: 333701 - protein, 19 aa, Homo sapiens
  CDR3 for alpha chain variable domain of TCR clone 166851 (TRAV26-1, TRAJ28)
CIVRVAHAYSVAGSYQLTF

SEQ ID NO: 333702 - protein, 17 aa, Homo sapiens
  CDR3 for beta chain variable domain of TCR clone 166851 (TRBV9, TRBJ2-2)
CASSVGGQGTDTGELFF

SEQ ID NO: 333703 - protein, 14 aa, Homo sapiens
  CDR3 for alpha chain variable domain of TCR clone 166852 (TRAV12-1, TRAJ12)
CVVISMDSSYKLIF

SEQ ID NO: 333704 - protein, 17 aa, Homo sapiens
  CDR3 for beta chain variable domain of TCR clone 166852 (TRBV13, TRBJ2-3)
CASSLSRVAGGRNTQYF

SEQ ID NO: 333705 - protein, 14 aa, Homo sapiens
  CDR3 for alpha chain variable domain of TCR clone 166853 (TRAV17, TRAJ32)
CATDPGGATNKLIF

SEQ ID NO: 333706 - protein, 15 aa, Homo sapiens
  CDR3 for beta chain variable domain of TCR clone 166853 (TRBV5-1, TRBJ1-1)
CASSSTTGTNTEAFF

SEQ ID NO: 333707 - protein, 12 aa, Homo sapiens
  CDR3 for alpha chain variable domain of TCR clone 166854 (TRAV13-1, TRAJ21)
CAAKEGFNKFYF

SEQ ID NO: 333708 - protein, 14 aa, Homo sapiens
  CDR3 for beta chain variable domain of TCR clone 166854 (TRBV12-4, TRBJ1-3)
CASGQTVSGNTIYF

SEQ ID NO: 333709 - protein, 14 aa, Homo sapiens
  CDR3 for alpha chain variable domain of TCR clone 166855 (TRAV9-2, TRAJ38)
CALSNAGNNRKLIW

SEQ ID NO: 333710 - protein, 15 aa, Homo sapiens
  CDR3 for beta chain variable domain of TCR clone 166855 (TRBV2, TRBJ2-5)
CASSEQGLIGETQYF

SEQ ID NO: 333711 - protein, 14 aa, Homo sapiens
  CDR3 for alpha chain variable domain of TCR clone 166856 (TRAV1-2, TRAJ16)
CAVNRFSDGQKLSL

SEQ ID NO: 333712 - protein, 15 aa, Homo sapiens
  CDR3 for beta chain variable domain of TCR clone 166856 (TRBV9, TRBJ1-6)
CASSVAGTGDSPLHF

SEQ ID NO: 333713 - protein, 12 aa, Homo sapiens
  CDR3 for alpha chain variable domain of TCR clone 166857 (TRAV3, TRAJ39)
CAVIEWSTMLTF

SEQ ID NO: 333714 - protein, 14 aa, Homo sapiens
  CDR3 for beta chain variable domain of TCR clone 166857 (TRBV7-8, TRBJ2-3)
CASGFPDGQDTQYF

SEQ ID NO: 333715 - protein, 13 aa, Homo sapiens
  CDR3 for alpha chain variable domain of TCR clone 166858 (TRAV2, TRAJ15)
CAVASQAGTALIF

SEQ ID NO: 333716 - protein, 10 aa, Homo sapiens
  CDR3 for beta chain variable domain of TCR clone 166858 (TRBV5-1, TRBJ2-2)
CASSLRQGTP

SEQ ID NO: 333717 - protein, 15 aa, Homo sapiens
  CDR3 for alpha chain variable domain of TCR clone 166859 (TRAV29/DV5, TRAJ57)
CAASLLRGGSEKMVF

SEQ ID NO: 333718 - protein, 15 aa, Homo sapiens
  CDR3 for beta chain variable domain of TCR clone 166859 (TRBV5-1, TRBJ1-3)
CASSLEGGSGNTIYF

SEQ ID NO: 333719 - protein, 14 aa, Homo sapiens
  CDR3 for alpha chain variable domain of TCR clone 166860 (TRAV12-2, TRAJ36)
CAVKISTGANNLFF

SEQ ID NO: 333720 - protein, 14 aa, Homo sapiens
  CDR3 for beta chain variable domain of TCR clone 166860 (TRBV25-1, TRBJ1-2)
CASSDTTVVVGYTF

SEQ ID NO: 333721 - protein, 17 aa, Homo sapiens
  CDR3 for alpha chain variable domain of TCR clone 166861 (TRAV4, TRAJ13)
CLVGVQGSSGGYQQVTF

SEQ ID NO: 333722 - protein, 14 aa, Homo sapiens
  CDR3 for beta chain variable domain of TCR clone 166861 (TRBV11-2, TRBJ2-7)
CASSSTGEGYEQYF

SEQ ID NO: 333723 - protein, 12 aa, Homo sapiens
  CDR3 for alpha chain variable domain of TCR clone 166862 (TRAV13-1, TRAJ15)
CAASQAGTALIF

SEQ ID NO: 333724 - protein, 13 aa, Homo sapiens
  CDR3 for beta chain variable domain of TCR clone 166862 (TRBV19, TRBJ1-2)
CASSVPGQDGYTF

SEQ ID NO: 333725 - protein, 18 aa, Homo sapiens
  CDR3 for alpha chain variable domain of TCR clone 166863 (TRAV13-1, TRAJ52)
CAAKNPNAGGTSYVKLTF

SEQ ID NO: 333726 - protein, 17 aa, Homo sapiens
  CDR3 for beta chain variable domain of TCR clone 166863 (TRBV20-1, TRBJ2-1)
CSASSSGLAGSYNEQFF

SEQ ID NO: 333727 - protein, 14 aa, Homo sapiens
  CDR3 for alpha chain variable domain of TCR clone 166864 (TRAV8-4, TRAJ9)
CAVRINTGGFKTTF

SEQ ID NO: 333728 - protein, 14 aa, Homo sapiens
  CDR3 for beta chain variable domain of TCR clone 166864 (TRBV6-1, TRBJ1-3)
CASVQGGGGNTIYF

SEQ ID NO: 333729 - protein, 15 aa, Homo sapiens
  CDR3 for alpha chain variable domain of TCR clone 166865 (TRAV26-1, TRAJ29)
CIARVEGSGNTPLVF

SEQ ID NO: 333730 - protein, 14 aa, Homo sapiens
  CDR3 for beta chain variable domain of TCR clone 166865 (TRBV18, TRBJ2-5)
CASPPGVSQETQYF

SEQ ID NO: 333731 - protein, 14 aa, Homo sapiens
  CDR3 for alpha chain variable domain of TCR clone 166866 (TRAV17, TRAJ4)
CATVPSGGYNKLIF

SEQ ID NO: 333732 - protein, 15 aa, Homo sapiens
  CDR3 for beta chain variable domain of TCR clone 166866 (TRBV19, TRBJ1-6)
CASSTQGAVGSPLHF

SEQ ID NO: 333733 - protein, 13 aa, Homo sapiens
  CDR3 for alpha chain variable domain of TCR clone 166867 (TRAV12-2, TRAJ39)
CAVNNNAGNMLTF

SEQ ID NO: 333734 - protein, 13 aa, Homo sapiens
  CDR3 for beta chain variable domain of TCR clone 166867 (TRBV2, TRBJ1-5)
CATARPGNQPQHF

SEQ ID NO: 333735 - protein, 14 aa, Homo sapiens
  CDR3 for alpha chain variable domain of TCR clone 166868 (TRAV12-2, TRAJ17)
CAVLFKAARNKLTF

SEQ ID NO: 333736 - protein, 14 aa, Homo sapiens
  CDR3 for beta chain variable domain of TCR clone 166868 (TRBV19, TRBJ2-1)
CASPTFVLSGEQFF

SEQ ID NO: 333737 - protein, 14 aa, Homo sapiens
  CDR3 for alpha chain variable domain of TCR clone 166869 (TRAV12-2, TRAJ52)
CRCAGGTSHGKLTF

SEQ ID NO: 333738 - protein, 13 aa, Homo sapiens
  CDR3 for beta chain variable domain of TCR clone 166869 (TRBV11-2, TRBJ2-1)
CASSLGLTHEQFF

SEQ ID NO: 333739 - protein, 16 aa, Homo sapiens
  CDR3 for alpha chain variable domain of TCR clone 166870 (TRAV30, TRAJ57)
CGTGGAPQGGSEKLVF

SEQ ID NO: 333740 - protein, 14 aa, Homo sapiens
  CDR3 for beta chain variable domain of TCR clone 166870 (TRBV18, TRBJ1-1)
CASSPGFQGVEAFF

SEQ ID NO: 333741 - protein, 20 aa, Homo sapiens
  CDR3 for alpha chain variable domain of TCR clone 166871 (TRAV26-1, TRAJ47)
CCVLLHRQSSFMEYGNKLAF

SEQ ID NO: 333742 - protein, 14 aa, Homo sapiens
  CDR3 for beta chain variable domain of TCR clone 166871 (TRBV7-2, TRBJ1-2)
CASSRGGTNYGYTF

SEQ ID NO: 333743 - protein, 15 aa, Homo sapiens
  CDR3 for alpha chain variable domain of TCR clone 166872 (TRAV34, TRAJ38)
CGADFTPGNNRKLIW

SEQ ID NO: 333744 - protein, 13 aa, Homo sapiens
  CDR3 for beta chain variable domain of TCR clone 166872 (TRBV28, TRBJ2-1)
CASRSGGLNEQFF

SEQ ID NO: 333745 - protein, 13 aa, Homo sapiens
  CDR3 for alpha chain variable domain of TCR clone 166873 (TRAV2, TRAJ15)
CAVASHAGTALIF

SEQ ID NO: 333746 - protein, 16 aa, Homo sapiens
  CDR3 for beta chain variable domain of TCR clone 166873 (TRBV20-1, TRBJ1-4)
CSAPGQGLLTNEKLFF

SEQ ID NO: 333747 - protein, 17 aa, Homo sapiens
  CDR3 for alpha chain variable domain of TCR clone 166874 (TRAV8-4, TRAJ45)
CAVSEGGSGGGADGLTF

SEQ ID NO: 333748 - protein, 15 aa, Homo sapiens
  CDR3 for beta chain variable domain of TCR clone 166874 (TRBV7-3, TRBJ2-2)
CASSETGQGTGELFF

SEQ ID NO: 333749 - protein, 14 aa, Homo sapiens
  CDR3 for alpha chain variable domain of TCR clone 166875 (TRAV27, TRAJ22)
CAGVSVLGKRQPTF

SEQ ID NO: 333750 - protein, 14 aa, Homo sapiens
  CDR3 for beta chain variable domain of TCR clone 166875 (TRBV19, TRBJ2-1)
CASPTFVLSGEQFF

SEQ ID NO: 333751 - protein, 14 aa, Homo sapiens
  CDR3 for alpha chain variable domain of TCR clone 166876 (TRAV26-1, TRAJ48)
CIVRVPFGNAKLTF

SEQ ID NO: 333752 - protein, 16 aa, Homo sapiens
  CDR3 for beta chain variable domain of TCR clone 166876 (TRBV18, TRBJ2-1)
CASSPYLSIRGDEQFF

SEQ ID NO: 333753 - protein, 11 aa, Homo sapiens
  CDR3 for alpha chain variable domain of TCR clone 166877 (TRAV1-2, TRAJ40)
CAVPGTYKYIF

SEQ ID NO: 333754 - protein, 15 aa, Homo sapiens
  CDR3 for beta chain variable domain of TCR clone 166877 (TRBV4-2, TRBJ1-2)
CASSQRTGGRDGYTF

SEQ ID NO: 333755 - protein, 14 aa, Homo sapiens
  CDR3 for alpha chain variable domain of TCR clone 166878 (TRAV35, TRAJ22)
CAGLRPGSASQLTF

SEQ ID NO: 333756 - protein, 12 aa, Homo sapiens
  CDR3 for beta chain variable domain of TCR clone 166878 (TRBV20-1, TRBJ2-5)
CSATRNQETQYF

SEQ ID NO: 333757 - protein, 14 aa, Homo sapiens
  CDR3 for alpha chain variable domain of TCR clone 166879 (TRAV13-1, TRAJ23)
CAASRLGRGGELIF

SEQ ID NO: 333758 - protein, 13 aa, Homo sapiens
  CDR3 for beta chain variable domain of TCR clone 166879 (TRBV3-1, TRBJ1-1)
CASSPGVITEAFF

SEQ ID NO: 333759 - protein, 12 aa, Homo sapiens
  CDR3 for alpha chain variable domain of TCR clone 166880 (TRAV8-3, TRAJ41)
CAVGALGYHSTS

SEQ ID NO: 333760 - protein, 16 aa, Homo sapiens
  CDR3 for beta chain variable domain of TCR clone 166880 (TRBV7-6, TRBJ2-3)
CASSDSRGEGTDTQYF

SEQ ID NO: 333761 - protein, 16 aa, Homo sapiens
  CDR3 for alpha chain variable domain of TCR clone 166881 (TRAV13-2, TRAJ23)
CAESLLGRNQGGKLIF

SEQ ID NO: 333762 - protein, 16 aa, Homo sapiens
  CDR3 for beta chain variable domain of TCR clone 166881 (TRBV7-3, TRBJ2-2)
CASSLKRGTLSGELFF

SEQ ID NO: 333763 - protein, 16 aa, Homo sapiens
  CDR3 for alpha chain variable domain of TCR clone 166882 (TRAV3, TRAJ37)
CAGRGKGSGNTGKLIF

SEQ ID NO: 333764 - protein, 13 aa, Homo sapiens
  CDR3 for beta chain variable domain of TCR clone 166882 (TRBV7-2, TRBJ2-2)
CASSSVRAGELFF

SEQ ID NO: 333765 - protein, 14 aa, Homo sapiens
  CDR3 for alpha chain variable domain of TCR clone 166883 (TRAV17, TRAJ22)
CATSPSGSARQLTF

SEQ ID NO: 333766 - protein, 13 aa, Homo sapiens
  CDR3 for beta chain variable domain of TCR clone 166883 (TRBV12-4, TRBJ1-2)
CASSVRQGKGDTF

SEQ ID NO: 333767 - protein, 14 aa, Homo sapiens
  CDR3 for alpha chain variable domain of TCR clone 166884 (TRAV12-2, TRAJ13)
CAVKKTGGYQKVTF

SEQ ID NO: 333768 - protein, 15 aa, Homo sapiens
  CDR3 for beta chain variable domain of TCR clone 166884 (TRBV9, TRBJ1-6)
CASSVAGTGDSPLDF

SEQ ID NO: 333769 - protein, 13 aa, Homo sapiens
  CDR3 for alpha chain variable domain of TCR clone 166885 (TRAV21, TRAJ37)
CAVSSGNTGKLIF

SEQ ID NO: 333770 - protein, 16 aa, Homo sapiens
  CDR3 for beta chain variable domain of TCR clone 166885 (TRBV5-1, TRBJ1-1)
CASSKTGTEVGTEAFF

SEQ ID NO: 333771 - protein, 15 aa, Homo sapiens
  CDR3 for alpha chain variable domain of TCR clone 166886 (TRAV3, TRAJ22)
CAVRDRGGSARQLTF

SEQ ID NO: 333772 - protein, 13 aa, Homo sapiens
  CDR3 for beta chain variable domain of TCR clone 166886 (TRBV7-3, TRBJ2-1)
CASRPVAYNEQFF

SEQ ID NO: 333773 - protein, 13 aa, Homo sapiens
  CDR3 for alpha chain variable domain of TCR clone 166887 (TRAV13-1, TRAJ39)
CSKYSNAGNMLTF

SEQ ID NO: 333774 - protein, 16 aa, Homo sapiens
  CDR3 for beta chain variable domain of TCR clone 166887 (TRBV20-1, TRBJ1-4)
CSAPGQGLLTNVKLFF

SEQ ID NO: 333775 - protein, 14 aa, Homo sapiens
  CDR3 for alpha chain variable domain of TCR clone 166888 (TRAV8-1, TRAJ24)
CAVNAADSWGKLQF

SEQ ID NO: 333776 - protein, 14 aa, Homo sapiens
  CDR3 for beta chain variable domain of TCR clone 166888 (TRBV12-5, TRBJ2-5)
CASGSRTHQETQYF

SEQ ID NO: 333777 - protein, 15 aa, Homo sapiens
  CDR3 for alpha chain variable domain of TCR clone 166889 (TRAV12-1, TRAJ44)
CVVFVNTGTASKLTF

SEQ ID NO: 333778 - protein, 15 aa, Homo sapiens
  CDR3 for beta chain variable domain of TCR clone 166889 (TRBV11-3, TRBJ2-3)
CASLKDGREGDTQYF

SEQ ID NO: 333779 - protein, 18 aa, Homo sapiens
  CDR3 for alpha chain variable domain of TCR clone 166890 (TRAV26-1, TRAJ5)
CIVRVIPPRGTGRRALTF

SEQ ID NO: 333780 - protein, 15 aa, Homo sapiens
  CDR3 for beta chain variable domain of TCR clone 166890 (TRBV7-9, TRBJ2-7)
CASSLPMGQANEQYF

SEQ ID NO: 333781 - protein, 13 aa, Homo sapiens
  CDR3 for alpha chain variable domain of TCR clone 166891 (TRAV26-1, TRAJ31)
CIIRVDGNARLMF

SEQ ID NO: 333782 - protein, 17 aa, Homo sapiens
  CDR3 for beta chain variable domain of TCR clone 166891 (TRBV11-2, TRBJ2-1)
CASSLYPPGVEYNEQFF

SEQ ID NO: 333783 - protein, 13 aa, Homo sapiens
  CDR3 for alpha chain variable domain of TCR clone 166892 (TRAV2, TRAJ40)
CAVVTSGTYKYIF

SEQ ID NO: 333784 - protein, 17 aa, Homo sapiens
  CDR3 for beta chain variable domain of TCR clone 166892 (TRBV7-3, TRBJ2-3)
CASSPRGQGYGTDTQYF

SEQ ID NO: 333785 - protein, 13 aa, Homo sapiens
  CDR3 for alpha chain variable domain of TCR clone 166893 (TRAV12-3, TRAJ53)
CAMRGGSNYKLTF

SEQ ID NO: 333786 - protein, 16 aa, Homo sapiens
  CDR3 for beta chain variable domain of TCR clone 166893 (TRBV3-1, TRBJ2-5)
CASSPGQFNGFGTQYF

SEQ ID NO: 333787 - protein, 15 aa, Homo sapiens
  CDR3 for alpha chain variable domain of TCR clone 166894 (TRAV12-3, TRAJ27)
CAMRAYNTNAGKSTF

SEQ ID NO: 333788 - protein, 13 aa, Homo sapiens
  CDR3 for beta chain variable domain of TCR clone 166894 (TRBV7-9, TRBJ2-1)
CASSLDVGNEQFF

SEQ ID NO: 333789 - protein, 11 aa, Homo sapiens
  CDR3 for alpha chain variable domain of TCR clone 166895 (TRAV29/DV5, TRAJ49)
CAAVPGNQFYF

SEQ ID NO: 333790 - protein, 16 aa, Homo sapiens
  CDR3 for beta chain variable domain of TCR clone 166895 (TRBV20-1, TRBJ2-3)
CSAVRDRGPIADTQYF

SEQ ID NO: 333791 - protein, 12 aa, Homo sapiens
  CDR3 for alpha chain variable domain of TCR clone 166896 (TRAV12-1, TRAJ30)
CAVRNRDDRIIF

SEQ ID NO: 333792 - protein, 13 aa, Homo sapiens
  CDR3 for beta chain variable domain of TCR clone 166896 (TRBV7-8, TRBJ2-7)
CASSLTGGREQYF

SEQ ID NO: 333793 - protein, 14 aa, Homo sapiens
  CDR3 for alpha chain variable domain of TCR clone 166897 (TRAV8-3, TRAJ12)
CAVGARDSSYKLIF

SEQ ID NO: 333794 - protein, 14 aa, Homo sapiens
  CDR3 for beta chain variable domain of TCR clone 166897 (TRBV7-2, TRBJ2-7)
CASSPKTSFYEQYF

SEQ ID NO: 333795 - protein, 11 aa, Homo sapiens
  CDR3 for alpha chain variable domain of TCR clone 166898 (TRAV2, TRAJ13)
CASGGYQKVTF

SEQ ID NO: 333796 - protein, 14 aa, Homo sapiens
  CDR3 for beta chain variable domain of TCR clone 166898 (TRBV6-1, TRBJ1-3)
CASVQGGGGKTIYF

SEQ ID NO: 333797 - protein, 15 aa, Homo sapiens
  CDR3 for alpha chain variable domain of TCR clone 166899 (TRAV17, TRAJ57)
CATGPSQGGSEKLVF

SEQ ID NO: 333798 - protein, 15 aa, Homo sapiens
  CDR3 for beta chain variable domain of TCR clone 166899 (TRBV12-4, TRBJ1-5)
CQQPTGRGVNRPQHF

SEQ ID NO: 333799 - protein, 13 aa, Homo sapiens
  CDR3 for alpha chain variable domain of TCR clone 166900 (TRAV12-2, TRAJ20)
CAVYPSNDYKHSF

SEQ ID NO: 333800 - protein, 15 aa, Homo sapiens
  CDR3 for beta chain variable domain of TCR clone 166900 (TRBV27, TRBJ2-5)
CASSLYPRGGETQYF

SEQ ID NO: 333801 - protein, 17 aa, Homo sapiens
  CDR3 for alpha chain variable domain of TCR clone 166901 (TRAV3, TRAJ6)
CAVRDGPRAGGSYIPTF

SEQ ID NO: 333802 - protein, 14 aa, Homo sapiens
  CDR3 for beta chain variable domain of TCR clone 166901 (TRBV2, TRBJ2-1)
CASSEQMRESEQFF

SEQ ID NO: 333803 - protein, 14 aa, Homo sapiens
  CDR3 for alpha chain variable domain of TCR clone 166902 (TRAV4, TRAJ43)
CPVGPMYNNNDMRF

SEQ ID NO: 333804 - protein, 21 aa, Homo sapiens
  CDR3 for beta chain variable domain of TCR clone 166902 (TRBV11-1, TRBJ2-1)
CASSARERLRPEGPSYNEQFF

SEQ ID NO: 333805 - protein, 12 aa, Homo sapiens
  CDR3 for alpha chain variable domain of TCR clone 166903 (TRAV12-1, TRAJ15)
CVVNQAGTALIF

SEQ ID NO: 333806 - protein, 15 aa, Homo sapiens
  CDR3 for beta chain variable domain of TCR clone 166903 (TRBV10-2, TRBJ2-6)
CASSEQGTGANVLTF

SEQ ID NO: 333807 - protein, 12 aa, Homo sapiens
  CDR3 for alpha chain variable domain of TCR clone 166904 (TRAV12-3, TRAJ17)
CAMTLTGNKLPF

SEQ ID NO: 333808 - protein, 15 aa, Homo sapiens
  CDR3 for beta chain variable domain of TCR clone 166904 (TRBV6-4, TRBJ2-7)
CASSDQGPPNYEQYF

SEQ ID NO: 333809 - protein, 15 aa, Homo sapiens
  CDR3 for alpha chain variable domain of TCR clone 166905 (TRAV26-1, TRAJ29)
CIVRVEGSGNTPLVY

SEQ ID NO: 333810 - protein, 14 aa, Homo sapiens
  CDR3 for beta chain variable domain of TCR clone 166905 (TRBV18, TRBJ2-5)
CASSPGVSQETQYF

SEQ ID NO: 333811 - protein, 14 aa, Homo sapiens
  CDR3 for alpha chain variable domain of TCR clone 166906 (TRAV1-2, TRAJ16)
CAVNRLSDGQKLLF

SEQ ID NO: 333812 - protein, 12 aa, Homo sapiens
  CDR3 for beta chain variable domain of TCR clone 166906 (TRBV7-2, TRBJ2-5)
CASSQYQETQYF

SEQ ID NO: 333813 - protein, 14 aa, Homo sapiens
  CDR3 for alpha chain variable domain of TCR clone 166907 (TRAV8-3, TRAJ13)
CAVFSRGGYQKVTF

SEQ ID NO: 333814 - protein, 16 aa, Homo sapiens
  CDR3 for beta chain variable domain of TCR clone 166907 (TRBV27, TRBJ2-7)
CASSLGSGTGPYEQYF

SEQ ID NO: 333815 - protein, 13 aa, Homo sapiens
  CDR3 for alpha chain variable domain of TCR clone 166908 (TRAV27, TRAJ17)
CAGAATAGNKLTF

SEQ ID NO: 333816 - protein, 12 aa, Homo sapiens
  CDR3 for beta chain variable domain of TCR clone 166908 (TRBV11-2, TRBJ2-2)
CASSLGGGELFF

SEQ ID NO: 333817 - protein, 12 aa, Homo sapiens
  CDR3 for alpha chain variable domain of TCR clone 166909 (TRAV8-1, TRAJ26)
CAVNNYGQNFVF

SEQ ID NO: 333818 - protein, 16 aa, Homo sapiens
  CDR3 for beta chain variable domain of TCR clone 166909 (TRBV13, TRBJ2-2)
CASSPRTGEHTGELFF

SEQ ID NO: 333819 - protein, 12 aa, Homo sapiens
  CDR3 for alpha chain variable domain of TCR clone 166910 (TRAV35, TRAJ42)
CWVPGSQGNLIF

SEQ ID NO: 333820 - protein, 14 aa, Homo sapiens
  CDR3 for beta chain variable domain of TCR clone 166910 (TRBV4-1, TRBJ2-2)
CASSQAVNTGELFF

SEQ ID NO: 333821 - protein, 13 aa, Homo sapiens
  CDR3 for alpha chain variable domain of TCR clone 166911 (TRAV12-2, TRAJ12)
CAVNEDSSYKLIF

SEQ ID NO: 333822 - protein, 12 aa, Homo sapiens
  CDR3 for beta chain variable domain of TCR clone 166911 (TRBV11-2, TRBJ2-2)
CASSLGGGELFF

SEQ ID NO: 333823 - protein, 14 aa, Homo sapiens
  CDR3 for alpha chain variable domain of TCR clone 166912 (TRAV1-2, TRAJ8)
CSVGEDTGFQKLVF

SEQ ID NO: 333824 - protein, 16 aa, Homo sapiens
  CDR3 for beta chain variable domain of TCR clone 166912 (TRBV20-1, TRBJ2-1)
CSARDLKQGMNNEQFF

SEQ ID NO: 333825 - protein, 14 aa, Homo sapiens
  CDR3 for alpha chain variable domain of TCR clone 166913 (TRAV1-2, TRAJ16)
CAVNRFSDGQKLLF

SEQ ID NO: 333826 - protein, 14 aa, Homo sapiens
  CDR3 for beta chain variable domain of TCR clone 166913 (TRBV27, TRBJ2-3)
CASSLSRAADTQYF

SEQ ID NO: 333827 - protein, 15 aa, Homo sapiens
  CDR3 for alpha chain variable domain of TCR clone 166914 (TRAV26-1, TRAJ3)
CIVRSGYSSASKIIF

SEQ ID NO: 333828 - protein, 14 aa, Homo sapiens
  CDR3 for beta chain variable domain of TCR clone 166914 (TRBV13, TRBJ2-5)
CASYRRLAVETQYF

SEQ ID NO: 333829 - protein, 17 aa, Homo sapiens
  CDR3 for alpha chain variable domain of TCR clone 166915 (TRAV12-2, TRAJ6)
CAPQGPPRAGGSYIPTF

SEQ ID NO: 333830 - protein, 13 aa, Homo sapiens
  CDR3 for beta chain variable domain of TCR clone 166915 (TRBV6-5, TRBJ2-5)
CASSPQGGETEYF

SEQ ID NO: 333831 - protein, 17 aa, Homo sapiens
  CDR3 for alpha chain variable domain of TCR clone 166916 (TRAV3, TRAJ42)
CAVRDRDYGGSQGNLIF

SEQ ID NO: 333832 - protein, 12 aa, Homo sapiens
  CDR3 for beta chain variable domain of TCR clone 166916 (TRBV2, TRBJ2-1)
CAKREGYNEQFF

SEQ ID NO: 333833 - protein, 14 aa, Homo sapiens
  CDR3 for alpha chain variable domain of TCR clone 166917 (TRAV12-3, TRAJ10)
SHLPLTGGGNKLTF

SEQ ID NO: 333834 - protein, 15 aa, Homo sapiens
  CDR3 for beta chain variable domain of TCR clone 166917 (TRBV7-3, TRBJ2-2)
CVSSETGQGTGELFF

SEQ ID NO: 333835 - protein, 16 aa, Homo sapiens
  CDR3 for alpha chain variable domain of TCR clone 166918 (TRAV4, TRAJ22)
CLVGDLYSGSARQLTF

SEQ ID NO: 333836 - protein, 16 aa, Homo sapiens
  CDR3 for beta chain variable domain of TCR clone 166918 (TRBV7-9, TRBJ2-1)
CASSDVEGGSYNEQFF

SEQ ID NO: 333837 - protein, 13 aa, Homo sapiens
  CDR3 for alpha chain variable domain of TCR clone 166919 (TRAV21, TRAJ27)
CAARPGNAGKSTF

SEQ ID NO: 333838 - protein, 17 aa, Homo sapiens
  CDR3 for beta chain variable domain of TCR clone 166919 (TRBV18, TRBJ2-3)
CASSPFGDGGFTDTQYF

SEQ ID NO: 333839 - protein, 13 aa, Homo sapiens
  CDR3 for alpha chain variable domain of TCR clone 166920 (TRAV12-3, TRAJ33)
CAMSVNSNYKLIW

SEQ ID NO: 333840 - protein, 15 aa, Homo sapiens
  CDR3 for beta chain variable domain of TCR clone 166920 (TRBV20-1, TRBJ2-7)
CSARDRVSRMDEQYF

SEQ ID NO: 333841 - protein, 18 aa, Homo sapiens
  CDR3 for alpha chain variable domain of TCR clone 166921 (TRAV21, TRAJ52)
CAVRPSPAGGTSYGKLTF

SEQ ID NO: 333842 - protein, 15 aa, Homo sapiens
  CDR3 for beta chain variable domain of TCR clone 166921 (TRBV13, TRBJ2-5)
CASSLRPGRGETQYF

SEQ ID NO: 333843 - protein, 14 aa, Homo sapiens
  CDR3 for alpha chain variable domain of TCR clone 166922 (TRAV35, TRAJ53)
GRVNSGGSNYKLKF

SEQ ID NO: 333844 - protein, 14 aa, Homo sapiens
  CDR3 for beta chain variable domain of TCR clone 166922 (TRBV7-3, TRBJ2-2)
CASSLLGSTGELFF

SEQ ID NO: 333845 - protein, 15 aa, Homo sapiens
  CDR3 for alpha chain variable domain of TCR clone 166923 (TRAV23/DV6, TRAJ4)
CAASPLRGGYNKLIF

SEQ ID NO: 333846 - protein, 14 aa, Homo sapiens
  CDR3 for beta chain variable domain of TCR clone 166923 (TRBV19, TRBJ2-7)
CASSMGQGAIEQYF

SEQ ID NO: 333847 - protein, 14 aa, Homo sapiens
  CDR3 for alpha chain variable domain of TCR clone 166924 (TRAV1-2, TRAJ16)
CAVNRFSDGQELLF

SEQ ID NO: 333848 - protein, 13 aa, Homo sapiens
  CDR3 for beta chain variable domain of TCR clone 166924 (TRBV10-3, TRBJ2-7)
CASKLAVNYEQDF

SEQ ID NO: 333849 - protein, 18 aa, Homo sapiens
  CDR3 for alpha chain variable domain of TCR clone 166925 (TRAV21, TRAJ53)
CAVKGGGNRGGSNYKLTF

SEQ ID NO: 333850 - protein, 13 aa, Homo sapiens
  CDR3 for beta chain variable domain of TCR clone 166925 (TRBV9, TRBJ2-1)
CASSPSGGSEQFF

SEQ ID NO: 333851 - protein, 14 aa, Homo sapiens
  CDR3 for alpha chain variable domain of TCR clone 166926 (TRAV13-1, TRAJ44)
FAAKATGTASKLTF

SEQ ID NO: 333852 - protein, 14 aa, Homo sapiens
  CDR3 for beta chain variable domain of TCR clone 166926 (TRBV20-1, TRBJ2-1)
CSPNDEASYNEQFF

SEQ ID NO: 333853 - protein, 14 aa, Homo sapiens
  CDR3 for alpha chain variable domain of TCR clone 166927 (TRAV1-2, TRAJ8)
CAVREDTGFQKLVF

SEQ ID NO: 333854 - protein, 11 aa, Homo sapiens
  CDR3 for beta chain variable domain of TCR clone 166927 (TRBV20-1, TRBJ2-5)
CSADRAETQCF

SEQ ID NO: 333855 - protein, 15 aa, Homo sapiens
  CDR3 for alpha chain variable domain of TCR clone 166928 (TRAV26-1, TRAJ29)
CIVRVEGSGNTPLVF

SEQ ID NO: 333856 - protein, 13 aa, Homo sapiens
  CDR3 for beta chain variable domain of TCR clone 166928 (TRBV7-9, TRBJ1-1)
CASSLAGVTEAFF

SEQ ID NO: 333857 - protein, 12 aa, Homo sapiens
  CDR3 for alpha chain variable domain of TCR clone 166929 (TRAV4, TRAJ26)
CLVGDYGQNFVF

SEQ ID NO: 333858 - protein, 16 aa, Homo sapiens
  CDR3 for beta chain variable domain of TCR clone 166929 (TRBV4-2, TRBJ2-3)
CASSLSGTGSTDTQYF

SEQ ID NO: 333859 - protein, 18 aa, Homo sapiens
  CDR3 for alpha chain variable domain of TCR clone 166930 (TRAV12-3, TRAJ52)
CAMSVGGAGGTSYGKLTF

SEQ ID NO: 333860 - protein, 15 aa, Homo sapiens
  CDR3 for beta chain variable domain of TCR clone 166930 (TRBV3-1, TRBJ2-7)
CASSQGVGVKVEQYF

SEQ ID NO: 333861 - protein, 16 aa, Homo sapiens
  CDR3 for alpha chain variable domain of TCR clone 166931 (TRAV30, TRAJ24)
CGTEIVDADSWGKFQF

SEQ ID NO: 333862 - protein, 13 aa, Homo sapiens
  CDR3 for beta chain variable domain of TCR clone 166931 (TRBV4-1, TRBJ2-2)
CASSQENTGELFF

SEQ ID NO: 333863 - protein, 14 aa, Homo sapiens
  CDR3 for alpha chain variable domain of TCR clone 166932 (TRAV12-1, TRAJ13)
CVVIDSGGYQKVTF

SEQ ID NO: 333864 - protein, 17 aa, Homo sapiens
  CDR3 for beta chain variable domain of TCR clone 166932 (TRBV15, TRBJ1-5)
CATSRAPPGTRNQPQHV

SEQ ID NO: 333865 - protein, 16 aa, Homo sapiens
  CDR3 for alpha chain variable domain of TCR clone 166933 (TRAV30, TRAJ24)
CGTEIVDADSWGEFQF

SEQ ID NO: 333866 - protein, 13 aa, Homo sapiens
  CDR3 for beta chain variable domain of TCR clone 166933 (TRBV20-1, TRBJ1-1)
CSARGGGNTEAFF

SEQ ID NO: 333867 - protein, 15 aa, Homo sapiens
  CDR3 for alpha chain variable domain of TCR clone 166934 (TRAV8-2, TRAJ40)
CVVLGTTSGTYKYIF

SEQ ID NO: 333868 - protein, 13 aa, Homo sapiens
  CDR3 for beta chain variable domain of TCR clone 166934 (TRBV7-3, TRBJ2-5)
CASSFRGGETQDF

SEQ ID NO: 333869 - protein, 15 aa, Homo sapiens
  CDR3 for alpha chain variable domain of TCR clone 166935 (TRAV29/DV5, TRAJ24)
CAASGATDSWGKFQF

SEQ ID NO: 333870 - protein, 13 aa, Homo sapiens
  CDR3 for beta chain variable domain of TCR clone 166935 (TRBV20-1, TRBJ1-1)
CSARGGGNTEAFF

SEQ ID NO: 333871 - protein, 14 aa, Homo sapiens
  CDR3 for alpha chain variable domain of TCR clone 166936 (TRAV16, TRAJ39)
CALSKNNAGNMLTF

SEQ ID NO: 333872 - protein, 17 aa, Homo sapiens
  CDR3 for beta chain variable domain of TCR clone 166936 (TRBV28, TRBJ2-5)
CASSRQGGLAGAETQYF

SEQ ID NO: 333873 - protein, 15 aa, Homo sapiens
  CDR3 for alpha chain variable domain of TCR clone 166937 (TRAV26-1, TRAJ29)
CIVRVEGSGNTPLVF

SEQ ID NO: 333874 - protein, 15 aa, Homo sapiens
  CDR3 for beta chain variable domain of TCR clone 166937 (TRBV7-9, TRBJ1-5)
CSSSQGHQPNQTQHF

SEQ ID NO: 333875 - protein, 11 aa, Homo sapiens
  CDR3 for alpha chain variable domain of TCR clone 166938 (TRAV13-1, TRAJ5)
CAPKGTRALTF

SEQ ID NO: 333876 - protein, 17 aa, Homo sapiens
  CDR3 for beta chain variable domain of TCR clone 166938 (TRBV28, TRBJ2-5)
CASSTPEGDALQETQYF

SEQ ID NO: 333877 - protein, 12 aa, Homo sapiens
  CDR3 for alpha chain variable domain of TCR clone 166939 (TRAV21, TRAJ23)
CAVGPQGGKLIF

SEQ ID NO: 333878 - protein, 13 aa, Homo sapiens
  CDR3 for beta chain variable domain of TCR clone 166939 (TRBV20-1, TRBJ2-7)
CSARTGGGYEQYF

SEQ ID NO: 333879 - protein, 14 aa, Homo sapiens
  CDR3 for alpha chain variable domain of TCR clone 166940 (TRAV1-2, TRAJ16)
CAVNRFSDGEKLLF

SEQ ID NO: 333880 - protein, 13 aa, Homo sapiens
  CDR3 for beta chain variable domain of TCR clone 166940 (TRBV2, TRBJ1-4)
CASSERAGEKLFF

SEQ ID NO: 333881 - protein, 11 aa, Homo sapiens
  CDR3 for alpha chain variable domain of TCR clone 166941 (TRAV12-3, TRAJ27)
CAMANAGKSTF

SEQ ID NO: 333882 - protein, 14 aa, Homo sapiens
  CDR3 for beta chain variable domain of TCR clone 166941 (TRBV4-1, TRBJ1-1)
CASSRSGQSFEAFF

SEQ ID NO: 333883 - protein, 14 aa, Homo sapiens
  CDR3 for alpha chain variable domain of TCR clone 166942 (TRAV1-2, TRAJ16)
CAVNRFSDGQNLLF

SEQ ID NO: 333884 - protein, 14 aa, Homo sapiens
  CDR3 for beta chain variable domain of TCR clone 166942 (TRBV14, TRBJ2-1)
CASSQVQGRGEQFF

SEQ ID NO: 333885 - protein, 16 aa, Homo sapiens
  CDR3 for alpha chain variable domain of TCR clone 166943 (TRAV20, TRAJ26)
CAVQHRRDSYGQNFVF

SEQ ID NO: 333886 - protein, 15 aa, Homo sapiens
  CDR3 for beta chain variable domain of TCR clone 166943 (TRBV7-2, TRBJ2-7)
CASSWGQGAIYEQYF

SEQ ID NO: 333887 - protein, 15 aa, Homo sapiens
  CDR3 for alpha chain variable domain of TCR clone 166944 (TRAV6, TRAJ4)
CALGGFSGGSNKLIF

SEQ ID NO: 333888 - protein, 13 aa, Homo sapiens
  CDR3 for beta chain variable domain of TCR clone 166944 (TRBV19, TRBJ1-2)
CASSVPGQDGYTF

SEQ ID NO: 333889 - protein, 14 aa, Homo sapiens
  CDR3 for alpha chain variable domain of TCR clone 166945 (TRAV13-1, TRAJ35)
CAASKGVFGNVLHC

SEQ ID NO: 333890 - protein, 13 aa, Homo sapiens
  CDR3 for beta chain variable domain of TCR clone 166945 (TRBV7-3, TRBJ1-1)
CASSQDWGAESFF

SEQ ID NO: 333891 - protein, 14 aa, Homo sapiens
  CDR3 for alpha chain variable domain of TCR clone 166946 (TRAV26-1, TRAJ38)
CIADNAGNNRKLIW

SEQ ID NO: 333892 - protein, 14 aa, Homo sapiens
  CDR3 for beta chain variable domain of TCR clone 166946 (TRBV2, TRBJ2-3)
CASSEGQNTDTQYF

SEQ ID NO: 333893 - protein, 14 aa, Homo sapiens
  CDR3 for alpha chain variable domain of TCR clone 166947 (TRAV9-2, TRAJ21)
CALSDSYNFNKFYF

SEQ ID NO: 333894 - protein, 13 aa, Homo sapiens
  CDR3 for beta chain variable domain of TCR clone 166947 (TRBV12-4, TRBJ2-7)
CASSPTETYEQYF

SEQ ID NO: 333895 - protein, 17 aa, Homo sapiens
  CDR3 for alpha chain variable domain of TCR clone 166948 (TRAV29/DV5, TRAJ52)
CAATSTADGTSYGKLTF

SEQ ID NO: 333896 - protein, 15 aa, Homo sapiens
  CDR3 for beta chain variable domain of TCR clone 166948 (TRBV28, TRBJ2-5)
CASSSGRTIQETQYF

SEQ ID NO: 333897 - protein, 12 aa, Homo sapiens
  CDR3 for alpha chain variable domain of TCR clone 166949 (TRAV17, TRAJ4)
CATDGGCNKLNF

SEQ ID NO: 333898 - protein, 13 aa, Homo sapiens
  CDR3 for beta chain variable domain of TCR clone 166949 (TRBV29-1, TRBJ2-2)
CSTTGVNTGELFF

SEQ ID NO: 333899 - protein, 17 aa, Homo sapiens
  CDR3 for alpha chain variable domain of TCR clone 166950 (TRAV3, TRAJ38)
CAVSDCLNAGNNRKLIW

SEQ ID NO: 333900 - protein, 16 aa, Homo sapiens
  CDR3 for beta chain variable domain of TCR clone 166950 (TRBV6-5, TRBJ2-1)
CASSYSLSGGYNEQFF

SEQ ID NO: 333901 - protein, 18 aa, Homo sapiens
  CDR3 for alpha chain variable domain of TCR clone 166951 (TRAV21, TRAJ52)
CAVRPSPAGGNSYGKLTF

SEQ ID NO: 333902 - protein, 16 aa, Homo sapiens
  CDR3 for beta chain variable domain of TCR clone 166951 (TRBV7-3, TRBJ2-2)
CASSLKRGTLSGELSF

SEQ ID NO: 333903 - protein, 12 aa, Homo sapiens
  CDR3 for alpha chain variable domain of TCR clone 166952 (TRAV8-3, TRAJ20)
CAVGANDYDLSF

SEQ ID NO: 333904 - protein, 16 aa, Homo sapiens
  CDR3 for beta chain variable domain of TCR clone 166952 (TRBV19, TRBJ2-2)
CASRSPGTGATGELFF

SEQ ID NO: 333905 - protein, 18 aa, Homo sapiens
  CDR3 for alpha chain variable domain of TCR clone 166953 (TRAV13-1, TRAJ52)
CAASKRSAGGTIYGKLTF

SEQ ID NO: 333906 - protein, 15 aa, Homo sapiens
  CDR3 for beta chain variable domain of TCR clone 166953 (TRBV20-1, TRBJ1-1)
CSASRGVTGNTEAFF

SEQ ID NO: 333907 - protein, 16 aa, Homo sapiens
  CDR3 for alpha chain variable domain of TCR clone 166954 (TRAV26-1, TRAJ28)
CIVRPYSGAGSYQLPF

SEQ ID NO: 333908 - protein, 18 aa, Homo sapiens
  CDR3 for beta chain variable domain of TCR clone 166954 (TRBV20-1, TRBJ2-2)
CSARDLTSGSMDTGELFF

SEQ ID NO: 333909 - protein, 14 aa, Homo sapiens
  CDR3 for alpha chain variable domain of TCR clone 166955 (TRAV35, TRAJ22)
CAGLGPGSARQLTF

SEQ ID NO: 333910 - protein, 15 aa, Homo sapiens
  CDR3 for beta chain variable domain of TCR clone 166955 (TRBV12-4, TRBJ2-5)
RASSPPTGLQETQYF

SEQ ID NO: 333911 - protein, 17 aa, Homo sapiens
  CDR3 for alpha chain variable domain of TCR clone 166956 (TRAV26-1, TRAJ37)
CIVRVITVSSNTGKLIF

SEQ ID NO: 333912 - protein, 13 aa, Homo sapiens
  CDR3 for beta chain variable domain of TCR clone 166956 (TRBV12-4, TRBJ1-2)
CASSLRQGKGYTF

SEQ ID NO: 333913 - protein, 12 aa, Homo sapiens
  CDR3 for alpha chain variable domain of TCR clone 166957 (TRAV1-1, TRAJ15)
CAVGQAGTALIF

SEQ ID NO: 333914 - protein, 12 aa, Homo sapiens
  CDR3 for beta chain variable domain of TCR clone 166957 (TRBV7-6, TRBJ2-3)
CASSWAEDTQYF

SEQ ID NO: 333915 - protein, 12 aa, Homo sapiens
  CDR3 for alpha chain variable domain of TCR clone 166958 (TRAV12-3, TRAJ40)
CAMSSGTYKYIF

SEQ ID NO: 333916 - protein, 15 aa, Homo sapiens
  CDR3 for beta chain variable domain of TCR clone 166958 (TRBV7-3, TRBJ2-2)
CASIETGQGTGELFF

SEQ ID NO: 333917 - protein, 13 aa, Homo sapiens
  CDR3 for alpha chain variable domain of TCR clone 166959 (TRAV35, TRAJ57)
CAGTQGGSEKLVF

SEQ ID NO: 333918 - protein, 16 aa, Homo sapiens
  CDR3 for beta chain variable domain of TCR clone 166959 (TRBV28, TRBJ2-1)
CASSQTTSGRVNEQFF

SEQ ID NO: 333919 - protein, 13 aa, Homo sapiens
  CDR3 for alpha chain variable domain of TCR clone 166960 (TRAV8-3, TRAJ28)
CAVGAVGSYQLTF

SEQ ID NO: 333920 - protein, 17 aa, Homo sapiens
  CDR3 for beta chain variable domain of TCR clone 166960 (TRBV7-2, TRBJ2-1)
CASSLYPPGAEYNEQSF

SEQ ID NO: 333921 - protein, 18 aa, Homo sapiens
  CDR3 for alpha chain variable domain of TCR clone 166961 (TRAV21, TRAJ52)
CAVRPSPAGGTSYGKLTF

SEQ ID NO: 333922 - protein, 14 aa, Homo sapiens
  CDR3 for beta chain variable domain of TCR clone 166961 (TRBV25-1, TRBJ1-1)
CARTHLGGNTEAFF

SEQ ID NO: 333923 - protein, 13 aa, Homo sapiens
  CDR3 for alpha chain variable domain of TCR clone 166962 (TRAV12-3, TRAJ13)
CAITSGGYQKVTF

SEQ ID NO: 333924 - protein, 13 aa, Homo sapiens
  CDR3 for beta chain variable domain of TCR clone 166962 (TRBV7-9, TRBJ1-2)
CASSLKQNYGYTF

SEQ ID NO: 333925 - protein, 16 aa, Homo sapiens
  CDR3 for alpha chain variable domain of TCR clone 166963 (TRAV3, TRAJ32)
CAVRENYGSATNKFIF

SEQ ID NO: 333926 - protein, 12 aa, Homo sapiens
  CDR3 for beta chain variable domain of TCR clone 166963 (TRBV20-1, TRBJ1-2)
CSVTPEGYGYTF

SEQ ID NO: 333927 - protein, 17 aa, Homo sapiens
  CDR3 for alpha chain variable domain of TCR clone 166964 (TRAV3, TRAJ42)
CAVRDRDYGGSKGNLIF

SEQ ID NO: 333928 - protein, 14 aa, Homo sapiens
  CDR3 for beta chain variable domain of TCR clone 166964 (TRBV12-5, TRBJ2-5)
CASGSRTHQETQYF

SEQ ID NO: 333929 - protein, 19 aa, Homo sapiens
  CDR3 for alpha chain variable domain of TCR clone 166965 (TRAV26-1, TRAJ52)
CIVRAHRNAGGTSHGKLTF

SEQ ID NO: 333930 - protein, 14 aa, Homo sapiens
  CDR3 for beta chain variable domain of TCR clone 166965 (TRBV7-6, TRBJ2-3)
CASSLGTVTDTQYF

SEQ ID NO: 333931 - protein, 14 aa, Homo sapiens
  CDR3 for alpha chain variable domain of TCR clone 166966 (TRAV27, TRAJ37)
CAGERSSNTGKLIF

SEQ ID NO: 333932 - protein, 15 aa, Homo sapiens
  CDR3 for beta chain variable domain of TCR clone 166966 (TRBV11-3, TRBJ1-6)
YASSLDWGANSPLHF

SEQ ID NO: 333933 - protein, 11 aa, Homo sapiens
  CDR3 for alpha chain variable domain of TCR clone 166967 (TRAV21, TRAJ34)
CAVTNTDKLIF

SEQ ID NO: 333934 - protein, 15 aa, Homo sapiens
  CDR3 for beta chain variable domain of TCR clone 166967 (TRBV6-1, TRBJ2-2)
CASSRLRGDTGELFF

SEQ ID NO: 333935 - protein, 16 aa, Homo sapiens
  CDR3 for alpha chain variable domain of TCR clone 166968 (TRAV30, TRAJ24)
CGTEIVDADSWGKFQF

SEQ ID NO: 333936 - protein, 15 aa, Homo sapiens
  CDR3 for beta chain variable domain of TCR clone 166968 (TRBV20-1, TRBJ2-7)
CSSRDRVSGMDEQYF

SEQ ID NO: 333937 - protein, 19 aa, Homo sapiens
  CDR3 for alpha chain variable domain of TCR clone 166969 (TRAV12-1, TRAJ42)
SAIKPPTSVKGGSQGNLIF

SEQ ID NO: 333938 - protein, 18 aa, Homo sapiens
  CDR3 for beta chain variable domain of TCR clone 166969 (TRBV11-2, TRBJ2-3)
CASSLGGASRGAPNTQYF

SEQ ID NO: 333939 - protein, 13 aa, Homo sapiens
  CDR3 for alpha chain variable domain of TCR clone 166970 (TRAV27, TRAJ42)
CSGARGSQGNLIV

SEQ ID NO: 333940 - protein, 15 aa, Homo sapiens
  CDR3 for beta chain variable domain of TCR clone 166970 (TRBV10-3, TRBJ2-2)
CAIRTDREDTGELFF

SEQ ID NO: 333941 - protein, 16 aa, Homo sapiens
  CDR3 for alpha chain variable domain of TCR clone 166971 (TRAV23/DV6, TRAJ9)
CAASIGGNTGGFKTIF

SEQ ID NO: 333942 - protein, 17 aa, Homo sapiens
  CDR3 for beta chain variable domain of TCR clone 166971 (TRBV13, TRBJ2-3)
CASSFSRVAGGRNTQYF

SEQ ID NO: 333943 - protein, 13 aa, Homo sapiens
  CDR3 for alpha chain variable domain of TCR clone 166972 (TRAV12-1, TRAJ49)
CVVILNTGNQFYF

SEQ ID NO: 333944 - protein, 13 aa, Homo sapiens
  CDR3 for beta chain variable domain of TCR clone 166972 (TRBV10-3, TRBJ2-7)
CASKLAVNNEQYF

SEQ ID NO: 333945 - protein, 13 aa, Homo sapiens
  CDR3 for alpha chain variable domain of TCR clone 166973 (TRAV12-3, TRAJ56)
CAMSFGANSELTF

SEQ ID NO: 333946 - protein, 12 aa, Homo sapiens
  CDR3 for beta chain variable domain of TCR clone 166973 (TRBV12-4, TRBJ1-4)
CASSETNEKLFF

SEQ ID NO: 333947 - protein, 21 aa, Homo sapiens
  CDR3 for alpha chain variable domain of TCR clone 166974 (TRAV4, TRAJ31)
CLVGERLQPCQTHVWRWNSAG

SEQ ID NO: 333948 - protein, 19 aa, Homo sapiens
  CDR3 for beta chain variable domain of TCR clone 166974 (TRBV12-4, TRBJ2-1)
CASTLAFDPRDKEANEQFF

SEQ ID NO: 333949 - protein, 15 aa, Homo sapiens
  CDR3 for alpha chain variable domain of TCR clone 166975 (TRAV3, TRAJ29)
CAVRDLYSGNTPLVF

SEQ ID NO: 333950 - protein, 13 aa, Homo sapiens
  CDR3 for beta chain variable domain of TCR clone 166975 (TRBV7-3, TRBJ1-2)
CASSPGAGGSITF

SEQ ID NO: 333951 - protein, 13 aa, Homo sapiens
  CDR3 for alpha chain variable domain of TCR clone 166976 (TRAV23/DV6, TRAJ58)
CAASEIGGSRLPF

SEQ ID NO: 333952 - protein, 14 aa, Homo sapiens
  CDR3 for beta chain variable domain of TCR clone 166976 (TRBV28, TRBJ2-5)
CASSRPAGGETQYF

SEQ ID NO: 333953 - protein, 18 aa, Homo sapiens
  CDR3 for alpha chain variable domain of TCR clone 166977 (TRAV21, TRAJ52)
CAVSPSPAGGTSYGKLTF

SEQ ID NO: 333954 - protein, 16 aa, Homo sapiens
  CDR3 for beta chain variable domain of TCR clone 166977 (TRBV13, TRBJ2-3)
CQHPLQGSGGRNTQYF

SEQ ID NO: 333955 - protein, 13 aa, Homo sapiens
  CDR3 for alpha chain variable domain of TCR clone 166978 (TRAV21, TRAJ34)
CAASEGDTDKLIF

SEQ ID NO: 333956 - protein, 17 aa, Homo sapiens
  CDR3 for beta chain variable domain of TCR clone 166978 (TRBV20-1, TRBJ1-5)
CSARDPSAQGFNQPQHF

SEQ ID NO: 333957 - protein, 14 aa, Homo sapiens
  CDR3 for alpha chain variable domain of TCR clone 166979 (TRAV12-2, TRAJ40)
CAVKIPSGTYKYIF

SEQ ID NO: 333958 - protein, 14 aa, Homo sapiens
  CDR3 for beta chain variable domain of TCR clone 166979 (TRBV20-1, TRBJ1-1)
CSAPTRIGGNEAFF

SEQ ID NO: 333959 - protein, 19 aa, Homo sapiens
  CDR3 for alpha chain variable domain of TCR clone 166980 (TRAV9-2, TRAJ52)
CALSFSLLSGGTSYGKLPF

SEQ ID NO: 333960 - protein, 14 aa, Homo sapiens
  CDR3 for beta chain variable domain of TCR clone 166980 (TRBV7-6, TRBJ2-7)
CASSLFQDSYEQYF

SEQ ID NO: 333961 - protein, 17 aa, Homo sapiens
  CDR3 for alpha chain variable domain of TCR clone 166981 (TRAV13-2, TRAJ42)
CAEKGKNYGGSQGKLIF

SEQ ID NO: 333962 - protein, 16 aa, Homo sapiens
  CDR3 for beta chain variable domain of TCR clone 166981 (TRBV7-9, TRBJ2-1)
CASSLGTGWDYNEQFF

SEQ ID NO: 333963 - protein, 13 aa, Homo sapiens
  CDR3 for alpha chain variable domain of TCR clone 166982 (TRAV2, TRAJ40)
CAVVTSGTYKYIF

SEQ ID NO: 333964 - protein, 15 aa, Homo sapiens
  CDR3 for beta chain variable domain of TCR clone 166982 (TRBV7-9, TRBJ2-5)
CASSRRTGGGETQYF

SEQ ID NO: 333965 - protein, 12 aa, Homo sapiens
  CDR3 for alpha chain variable domain of TCR clone 166983 (TRAV1-2, TRAJ33)
CAALESNYQLIW

SEQ ID NO: 333966 - protein, 14 aa, Homo sapiens
  CDR3 for beta chain variable domain of TCR clone 166983 (TRBV20-1, TRBJ2-1)
CSAQIGGSANEQFF

SEQ ID NO: 333967 - protein, 16 aa, Homo sapiens
  CDR3 for alpha chain variable domain of TCR clone 166984 (TRAV12-3, TRAJ53)
CAMSPGSGGSNYKLTF

SEQ ID NO: 333968 - protein, 16 aa, Homo sapiens
  CDR3 for beta chain variable domain of TCR clone 166984 (TRBV4-2, TRBJ1-1)
CASSQAGFGMNTEAHF

SEQ ID NO: 333969 - protein, 13 aa, Homo sapiens
  CDR3 for alpha chain variable domain of TCR clone 166985 (TRAV3, TRAJ21)
CAVREPDFNKFYF

SEQ ID NO: 333970 - protein, 14 aa, Homo sapiens
  CDR3 for beta chain variable domain of TCR clone 166985 (TRBV4-1, TRBJ2-2)
CASSQAVNTGELCF

SEQ ID NO: 333971 - protein, 14 aa, Homo sapiens
  CDR3 for alpha chain variable domain of TCR clone 166986 (TRAV2, TRAJ9)
CAVEDRSGGFKTIF

SEQ ID NO: 333972 - protein, 14 aa, Homo sapiens
  CDR3 for beta chain variable domain of TCR clone 166986 (TRBV13, TRBJ2-5)
CASSLERVGETQYF

SEQ ID NO: 333973 - protein, 13 aa, Homo sapiens
  CDR3 for alpha chain variable domain of TCR clone 166987 (TRAV21, TRAJ56)
CAVRTGSNSKLTF

SEQ ID NO: 333974 - protein, 15 aa, Homo sapiens
  CDR3 for beta chain variable domain of TCR clone 166987 (TRBV7-9, TRBJ1-1)
CASSHRGTVNTEDFF

SEQ ID NO: 333975 - protein, 16 aa, Homo sapiens
  CDR3 for alpha chain variable domain of TCR clone 166988 (TRAV30, TRAJ24)
RGTEIGDADSWGKFQF

SEQ ID NO: 333976 - protein, 14 aa, Homo sapiens
  CDR3 for beta chain variable domain of TCR clone 166988 (TRBV12-5, TRBJ2-5)
CASGSRTHQETQYF

SEQ ID NO: 333977 - protein, 17 aa, Homo sapiens
  CDR3 for alpha chain variable domain of TCR clone 166989 (TRAV3, TRAJ42)
CAVRDRDYGGSQGKLIF

SEQ ID NO: 333978 - protein, 15 aa, Homo sapiens
  CDR3 for beta chain variable domain of TCR clone 166989 (TRBV2, TRBJ2-7)
CASSEGLARSYEQYF

SEQ ID NO: 333979 - protein, 12 aa, Homo sapiens
  CDR3 for alpha chain variable domain of TCR clone 166990 (TRAV1-2, TRAJ29)
CAVPSGNTPLVF

SEQ ID NO: 333980 - protein, 13 aa, Homo sapiens
  CDR3 for beta chain variable domain of TCR clone 166990 (TRBV5-4, TRBJ1-1)
CASSVDLGTEAFC

SEQ ID NO: 333981 - protein, 14 aa, Homo sapiens
  CDR3 for alpha chain variable domain of TCR clone 166991 (TRAV17, TRAJ35)
CATDRPGFGNVLHC

SEQ ID NO: 333982 - protein, 15 aa, Homo sapiens
  CDR3 for beta chain variable domain of TCR clone 166991 (TRBV28, TRBJ2-5)
CASSSGRVVQETQYF

SEQ ID NO: 333983 - protein, 15 aa, Homo sapiens
  CDR3 for alpha chain variable domain of TCR clone 166992 (TRAV26-2, TRAJ45)
CILRDRVDQEEVLTD

SEQ ID NO: 333984 - protein, 15 aa, Homo sapiens
  CDR3 for beta chain variable domain of TCR clone 166992 (TRBV7-6, TRBJ2-5)
CASSKPTGPQETQCF

SEQ ID NO: 333985 - protein, 19 aa, Homo sapiens
  CDR3 for alpha chain variable domain of TCR clone 166993 (TRAV2, TRAJ20)
ILQVREADAAVYRDCKLSF

SEQ ID NO: 333986 - protein, 13 aa, Homo sapiens
  CDR3 for beta chain variable domain of TCR clone 166993 (TRBV9, TRBJ2-7)
CASSVAEYYEQYF

SEQ ID NO: 333987 - protein, 16 aa, Homo sapiens
  CDR3 for alpha chain variable domain of TCR clone 166994 (TRAV30, TRAJ24)
CGTEIVDADSWGKFQV

SEQ ID NO: 333988 - protein, 13 aa, Homo sapiens
  CDR3 for beta chain variable domain of TCR clone 166994 (TRBV20-1, TRBJ1-1)
CSSRGGGNTEAFF

SEQ ID NO: 333989 - protein, 15 aa, Homo sapiens
  CDR3 for alpha chain variable domain of TCR clone 166995 (TRAV1-2, TRAJ15)
CSVDVMGSAGTALIF

SEQ ID NO: 333990 - protein, 13 aa, Homo sapiens
  CDR3 for beta chain variable domain of TCR clone 166995 (TRBV20-1, TRBJ1-1)
CSAFDREDTEAFF

SEQ ID NO: 333991 - protein, 17 aa, Homo sapiens
  CDR3 for alpha chain variable domain of TCR clone 166996 (TRAV13-2, TRAJ28)
CAEEPAGSGAGSYQLTF

SEQ ID NO: 333992 - protein, 14 aa, Homo sapiens
  CDR3 for beta chain variable domain of TCR clone 166996 (TRBV2, TRBJ2-1)
CASRTGSSYNEQFF

SEQ ID NO: 333993 - protein, 14 aa, Homo sapiens
  CDR3 for alpha chain variable domain of TCR clone 166997 (TRAV12-2, TRAJ13)
CAVKKTGGYQKVTF

SEQ ID NO: 333994 - protein, 15 aa, Homo sapiens
  CDR3 for beta chain variable domain of TCR clone 166997 (TRBV11-2, TRBJ1-6)
CASTLRGTGNSPLHF

SEQ ID NO: 333995 - protein, 12 aa, Homo sapiens
  CDR3 for alpha chain variable domain of TCR clone 166998 (TRAV13-2, TRAJ23)
CAERHRGGELIF

SEQ ID NO: 333996 - protein, 14 aa, Homo sapiens
  CDR3 for beta chain variable domain of TCR clone 166998 (TRBV12-5, TRBJ2-5)
CASGSRTHQETQYF

SEQ ID NO: 333997 - protein, 12 aa, Homo sapiens
  CDR3 for alpha chain variable domain of TCR clone 166999 (TRAV3, TRAJ20)
CAVRDPDYKLSF

SEQ ID NO: 333998 - protein, 16 aa, Homo sapiens
  CDR3 for beta chain variable domain of TCR clone 166999 (TRBV5-1, TRBJ2-7)
CASSLEGLAGLYEQYF

SEQ ID NO: 333999 - protein, 11 aa, Homo sapiens
  CDR3 for alpha chain variable domain of TCR clone 167000 (TRAV2, TRAJ13)
CASGGYQKVTF

SEQ ID NO: 334000 - protein, 14 aa, Homo sapiens
  CDR3 for beta chain variable domain of TCR clone 167000 (TRBV18, TRBJ1-5)
CASSPGNSNQPQHF

SEQ ID NO: 334001 - protein, 14 aa, Homo sapiens
  CDR3 for alpha chain variable domain of TCR clone 167001 (TRAV13-1, TRAJ13)
CAASRVGGYQKVTF

SEQ ID NO: 334002 - protein, 17 aa, Homo sapiens
  CDR3 for beta chain variable domain of TCR clone 167001 (TRBV15, TRBJ1-5)
CATSRAPPRTRNQPQHF

SEQ ID NO: 334003 - protein, 13 aa, Homo sapiens
  CDR3 for alpha chain variable domain of TCR clone 167002 (TRAV36/DV7, TRAJ49)
CAGDSNTGNQFYF

SEQ ID NO: 334004 - protein, 14 aa, Homo sapiens
  CDR3 for beta chain variable domain of TCR clone 167002 (TRBV6-6, TRBJ1-6)
CASSFEGTTSPLHF

SEQ ID NO: 334005 - protein, 15 aa, Homo sapiens
  CDR3 for alpha chain variable domain of TCR clone 167003 (TRAV21, TRAJ32)
CAVNSYGGTTNKLIF

SEQ ID NO: 334006 - protein, 18 aa, Homo sapiens
  CDR3 for beta chain variable domain of TCR clone 167003 (TRBV7-9, TRBJ2-1)
CASSTGLAEGYSYNEQFF

SEQ ID NO: 334007 - protein, 14 aa, Homo sapiens
  CDR3 for alpha chain variable domain of TCR clone 167004 (TRAV26-1, TRAJ54)
CIVRRTQGAQKLVF

SEQ ID NO: 334008 - protein, 16 aa, Homo sapiens
  CDR3 for beta chain variable domain of TCR clone 167004 (TRBV11-3, TRBJ2-5)
CASSSVVAGSTETQYF

SEQ ID NO: 334009 - protein, 14 aa, Homo sapiens
  CDR3 for alpha chain variable domain of TCR clone 167005 (TRAV16, TRAJ33)
CALSAMDSNYQLIW

SEQ ID NO: 334010 - protein, 14 aa, Homo sapiens
  CDR3 for beta chain variable domain of TCR clone 167005 (TRBV7-8, TRBJ2-1)
CASSLAGSYNEQFF

SEQ ID NO: 334011 - protein, 15 aa, Homo sapiens
  CDR3 for alpha chain variable domain of TCR clone 167006 (TRAV17, TRAJ57)
CATGPSQGGSENLVF

SEQ ID NO: 334012 - protein, 16 aa, Homo sapiens
  CDR3 for beta chain variable domain of TCR clone 167006 (TRBV20-1, TRBJ2-2)
CSASASGIPGAGELFF

SEQ ID NO: 334013 - protein, 10 aa, Homo sapiens
  CDR3 for alpha chain variable domain of TCR clone 167007 (TRAV13-2, TRAJ49)
CEGTVNQFYF

SEQ ID NO: 334014 - protein, 13 aa, Homo sapiens
  CDR3 for beta chain variable domain of TCR clone 167007 (TRBV9, TRBJ2-7)
CASSVLQAGEQYF

SEQ ID NO: 334015 - protein, 12 aa, Homo sapiens
  CDR3 for alpha chain variable domain of TCR clone 167008 (TRAV12-3, TRAJ17)
CAMTLTGNEQTF

SEQ ID NO: 334016 - protein, 15 aa, Homo sapiens
  CDR3 for beta chain variable domain of TCR clone 167008 (TRBV20-1, TRBJ2-7)
CSARDRVSGMDEQYF

SEQ ID NO: 334017 - protein, 15 aa, Homo sapiens
  CDR3 for alpha chain variable domain of TCR clone 167009 (TRAV3, TRAJ22)
CAVRDRGGSARQITF

SEQ ID NO: 334018 - protein, 16 aa, Homo sapiens
  CDR3 for beta chain variable domain of TCR clone 167009 (TRBV5-4, TRBJ2-3)
CASQQPGAGGADTQCF

SEQ ID NO: 334019 - protein, 18 aa, Homo sapiens
  CDR3 for alpha chain variable domain of TCR clone 167010 (TRAV13-1, TRAJ52)
CAAKNPNAGGTSYGKLTF

SEQ ID NO: 334020 - protein, 11 aa, Homo sapiens
  CDR3 for beta chain variable domain of TCR clone 167010 (TRBV6-3, TRBJ2-3)
CATGQADTQYF

SEQ ID NO: 334021 - protein, 15 aa, Homo sapiens
  CDR3 for alpha chain variable domain of TCR clone 167011 (TRAV35, TRAJ23)
CAGQWGYNQGGKPIF

SEQ ID NO: 334022 - protein, 16 aa, Homo sapiens
  CDR3 for beta chain variable domain of TCR clone 167011 (TRBV27, TRBJ2-1)
CASSSRLAGNYNEQFF

SEQ ID NO: 334023 - protein, 13 aa, Homo sapiens
  CDR3 for alpha chain variable domain of TCR clone 167012 (TRAV13-1, TRAJ31)
CAAIATMPDSCLE

SEQ ID NO: 334024 - protein, 11 aa, Homo sapiens
  CDR3 for beta chain variable domain of TCR clone 167012 (TRBV20-1, TRBJ2-7)
CSARTSYEQYF

SEQ ID NO: 334025 - protein, 15 aa, Homo sapiens
  CDR3 for alpha chain variable domain of TCR clone 167013 (TRAV17, TRAJ57)
CATGPSQGGSEKLVF

SEQ ID NO: 334026 - protein, 15 aa, Homo sapiens
  CDR3 for beta chain variable domain of TCR clone 167013 (TRBV6-3, TRBJ2-7)
CASSSPGSVFYEQYF

SEQ ID NO: 334027 - protein, 14 aa, Homo sapiens
  CDR3 for alpha chain variable domain of TCR clone 167014 (TRAV5, TRAJ4)
CAASFSGGYNKLIF

SEQ ID NO: 334028 - protein, 19 aa, Homo sapiens
  CDR3 for beta chain variable domain of TCR clone 167014 (TRBV2, TRBJ2-7)
CASSDDETSGRANDYEQYV

SEQ ID NO: 334029 - protein, 16 aa, Homo sapiens
  CDR3 for alpha chain variable domain of TCR clone 167015 (TRAV3, TRAJ37)
CAVRPHGSGNTGKLLF

SEQ ID NO: 334030 - protein, 17 aa, Homo sapiens
  CDR3 for beta chain variable domain of TCR clone 167015 (TRBV5-1, TRBJ2-5)
CTSSPVALGQNQETQYF

SEQ ID NO: 334031 - protein, 16 aa, Homo sapiens
  CDR3 for alpha chain variable domain of TCR clone 167016 (TRAV8-6, TRAJ39)
CAVMPMNNNAGNMLTF

SEQ ID NO: 334032 - protein, 16 aa, Homo sapiens
  CDR3 for beta chain variable domain of TCR clone 167016 (TRBV15, TRBJ2-5)
CATSRYLEAARETQYF

SEQ ID NO: 334033 - protein, 11 aa, Homo sapiens
  CDR3 for alpha chain variable domain of TCR clone 167017 (TRAV8-4, TRAJ26)
CAGGQGQNFGF

SEQ ID NO: 334034 - protein, 17 aa, Homo sapiens
  CDR3 for beta chain variable domain of TCR clone 167017 (TRBV7-9, TRBJ2-3)
CASSPTVAGDLTDTQYF

SEQ ID NO: 334035 - protein, 15 aa, Homo sapiens
  CDR3 for alpha chain variable domain of TCR clone 167018 (TRAV8-3, TRAJ45)
CALSYSGGGADGLTF

SEQ ID NO: 334036 - protein, 15 aa, Homo sapiens
  CDR3 for beta chain variable domain of TCR clone 167018 (TRBV10-3, TRBJ2-7)
CASKLAVNYESTSGR

SEQ ID NO: 334037 - protein, 12 aa, Homo sapiens
  CDR3 for alpha chain variable domain of TCR clone 167019 (TRAV13-1, TRAJ16)
CAAVSDGQKLRF

SEQ ID NO: 334038 - protein, 16 aa, Homo sapiens
  CDR3 for beta chain variable domain of TCR clone 167019 (TRBV7-2, TRBJ2-1)
CASSLVAGAGYNEQFF

SEQ ID NO: 334039 - protein, 12 aa, Homo sapiens
  CDR3 for alpha chain variable domain of TCR clone 167020 (TRAV3, TRAJ6)
CAVRDSRRKLHS

SEQ ID NO: 334040 - protein, 15 aa, Homo sapiens
  CDR3 for beta chain variable domain of TCR clone 167020 (TRBV18, TRBJ2-7)
CASSPLQGRTYEQYF

SEQ ID NO: 334041 - protein, 11 aa, Homo sapiens
  CDR3 for alpha chain variable domain of TCR clone 167021 (TRAV35, TRAJ31)
CAESGDARLMF

SEQ ID NO: 334042 - protein, 14 aa, Homo sapiens
  CDR3 for beta chain variable domain of TCR clone 167021 (TRBV7-3, TRBJ2-2)
CASSSGGYTGELFF

SEQ ID NO: 334043 - protein, 12 aa, Homo sapiens
  CDR3 for alpha chain variable domain of TCR clone 167022 (TRAV4, TRAJ26)
CLVGDYGQNFVF

SEQ ID NO: 334044 - protein, 15 aa, Homo sapiens
  CDR3 for beta chain variable domain of TCR clone 167022 (TRBV7-2, TRBJ2-3)
CASSPRGLSTDTQYF

SEQ ID NO: 334045 - protein, 18 aa, Homo sapiens
  CDR3 for alpha chain variable domain of TCR clone 167023 (TRAV21, TRAJ52)
CAVRPSPAGGTSYGKLTF

SEQ ID NO: 334046 - protein, 14 aa, Homo sapiens
  CDR3 for beta chain variable domain of TCR clone 167023 (TRBV28, TRBJ2-3)
CASSFVQGTDTQYF

SEQ ID NO: 334047 - protein, 15 aa, Homo sapiens
  CDR3 for alpha chain variable domain of TCR clone 167024 (TRAV2, TRAJ22)
CAVPSRGGSARQLTF

SEQ ID NO: 334048 - protein, 14 aa, Homo sapiens
  CDR3 for beta chain variable domain of TCR clone 167024 (TRBV7-2, TRBJ2-1)
CASSLVAGRNEQFF

SEQ ID NO: 334049 - protein, 10 aa, Homo sapiens
  CDR3 for alpha chain variable domain of TCR clone 167025 (TRAV2, TRAJ34)
CAVVNDKLIF

SEQ ID NO: 334050 - protein, 15 aa, Homo sapiens
  CDR3 for beta chain variable domain of TCR clone 167025 (TRBV3-1, TRBJ2-2)
CASSQDWTRAGELYF

SEQ ID NO: 334051 - protein, 14 aa, Homo sapiens
  CDR3 for alpha chain variable domain of TCR clone 167026 (TRAV12-1, TRAJ17)
CVVNHKAVGNKLTF

SEQ ID NO: 334052 - protein, 17 aa, Homo sapiens
  CDR3 for beta chain variable domain of TCR clone 167026 (TRBV20-1, TRBJ2-1)
CSASSSGLAGSYNEQFF

SEQ ID NO: 334053 - protein, 16 aa, Homo sapiens
  CDR3 for alpha chain variable domain of TCR clone 167027 (TRAV8-3, TRAJ13)
CAVGAYPSGGYQKVTI

SEQ ID NO: 334054 - protein, 15 aa, Homo sapiens
  CDR3 for beta chain variable domain of TCR clone 167027 (TRBV19, TRBJ1-5)
CASSIVWADNQPQHF

SEQ ID NO: 334055 - protein, 15 aa, Homo sapiens
  CDR3 for alpha chain variable domain of TCR clone 167028 (TRAV2, TRAJ24)
CAVVRLKNSWGKLQF

SEQ ID NO: 334056 - protein, 16 aa, Homo sapiens
  CDR3 for beta chain variable domain of TCR clone 167028 (TRBV7-9, TRBJ2-1)
CASSDVAGGSYNEQFF

SEQ ID NO: 334057 - protein, 14 aa, Homo sapiens
  CDR3 for alpha chain variable domain of TCR clone 167029 (TRAV27, TRAJ13)
CRSSNSGGYQKVTF

SEQ ID NO: 334058 - protein, 11 aa, Homo sapiens
  CDR3 for beta chain variable domain of TCR clone 167029 (TRBV7-6, TRBJ2-1)
CASSLGGGQMS

SEQ ID NO: 334059 - protein, 16 aa, Homo sapiens
  CDR3 for alpha chain variable domain of TCR clone 167030 (TRAV27, TRAJ53)
CAAPEGSGGSNYKLTF

SEQ ID NO: 334060 - protein, 18 aa, Homo sapiens
  CDR3 for beta chain variable domain of TCR clone 167030 (TRBV11-2, TRBJ2-3)
CASSLGGASWGAPNTQYF

SEQ ID NO: 334061 - protein, 15 aa, Homo sapiens
  CDR3 for alpha chain variable domain of TCR clone 167031 (TRAV12-3, TRAJ27)
CAMRAYNTNAGKSTF

SEQ ID NO: 334062 - protein, 15 aa, Homo sapiens
  CDR3 for beta chain variable domain of TCR clone 167031 (TRBV5-1, TRBJ2-1)
CASSPPRAPYNEQFF

SEQ ID NO: 334063 - protein, 13 aa, Homo sapiens
  CDR3 for alpha chain variable domain of TCR clone 167032 (TRAV14/DV4, TRAJ4)
CAMKAGGYNKLIF

SEQ ID NO: 334064 - protein, 20 aa, Homo sapiens
  CDR3 for beta chain variable domain of TCR clone 167032 (TRBV7-8, TRBJ2-2)
CASSHLFPGPTIHITGELFF

SEQ ID NO: 334065 - protein, 14 aa, Homo sapiens
  CDR3 for alpha chain variable domain of TCR clone 167033 (TRAV1-2, TRAJ8)
CAVREDTGFQKLVF

SEQ ID NO: 334066 - protein, 12 aa, Homo sapiens
  CDR3 for beta chain variable domain of TCR clone 167033 (TRBV28, TRBJ2-3)
CASSLYRVTQYF

SEQ ID NO: 334067 - protein, 14 aa, Homo sapiens
  CDR3 for alpha chain variable domain of TCR clone 167034 (TRAV3, TRAJ34)
CAVRAPGNTDKLIF

SEQ ID NO: 334068 - protein, 17 aa, Homo sapiens
  CDR3 for beta chain variable domain of TCR clone 167034 (TRBV20-1, TRBJ2-7)
CSAAPGLARGISYEQYS

SEQ ID NO: 334069 - protein, 15 aa, Homo sapiens
  CDR3 for alpha chain variable domain of TCR clone 167035 (TRAV26-1, TRAJ44)
CIARVPFGTASKLTF

SEQ ID NO: 334070 - protein, 13 aa, Homo sapiens
  CDR3 for beta chain variable domain of TCR clone 167035 (TRBV15, TRBJ1-6)
CATSGGLNSPLHF

SEQ ID NO: 334071 - protein, 18 aa, Homo sapiens
  CDR3 for alpha chain variable domain of TCR clone 167036 (TRAV21, TRAJ52)
CAVRPPTAGGTSYGKLTF

SEQ ID NO: 334072 - protein, 15 aa, Homo sapiens
  CDR3 for beta chain variable domain of TCR clone 167036 (TRBV27, TRBJ2-1)
CASSNGGGSSNEQFF

SEQ ID NO: 334073 - protein, 13 aa, Homo sapiens
  CDR3 for alpha chain variable domain of TCR clone 167037 (TRAV12-3, TRAJ9)
CAMRNTGGFKPIF

SEQ ID NO: 334074 - protein, 16 aa, Homo sapiens
  CDR3 for beta chain variable domain of TCR clone 167037 (TRBV19, TRBJ2-1)
CASSIDGSFAYNEQFF

SEQ ID NO: 334075 - protein, 15 aa, Homo sapiens
  CDR3 for alpha chain variable domain of TCR clone 167038 (TRAV12-3, TRAJ10)
CASYILTGGGNKLTF

SEQ ID NO: 334076 - protein, 17 aa, Homo sapiens
  CDR3 for beta chain variable domain of TCR clone 167038 (TRBV7-8, TRBJ2-6)
CASSAGTGGAGANVLTF

SEQ ID NO: 334077 - protein, 19 aa, Homo sapiens
  CDR3 for alpha chain variable domain of TCR clone 167039 (TRAV16, )
CALSGDIQNPDPAVYQLID

SEQ ID NO: 334078 - protein, 16 aa, Homo sapiens
  CDR3 for beta chain variable domain of TCR clone 167039 (TRBV12-5, TRBJ2-5)
CASGPRTSGNQEDQYF

SEQ ID NO: 334079 - protein, 12 aa, Homo sapiens
  CDR3 for alpha chain variable domain of TCR clone 167040 (TRAV35, TRAJ30)
CAGQLAEDKIIF

SEQ ID NO: 334080 - protein, 17 aa, Homo sapiens
  CDR3 for beta chain variable domain of TCR clone 167040 (TRBV4-2, TRBJ2-5)
CASSPGRWRNFQETQYF

SEQ ID NO: 334081 - protein, 14 aa, Homo sapiens
  CDR3 for alpha chain variable domain of TCR clone 167041 (TRAV4, TRAJ13)
CLVGYSVGYQKVTF

SEQ ID NO: 334082 - protein, 13 aa, Homo sapiens
  CDR3 for beta chain variable domain of TCR clone 167041 (TRBV18, TRBJ1-1)
CASSGGRNTEAFF

SEQ ID NO: 334083 - protein, 17 aa, Homo sapiens
  CDR3 for alpha chain variable domain of TCR clone 167042 (TRAV2, TRAJ36)
CAVEDRGNWGKQPLLWD

SEQ ID NO: 334084 - protein, 14 aa, Homo sapiens
  CDR3 for beta chain variable domain of TCR clone 167042 (TRBV7-2, TRBJ2-7)
CASRSQGAAYEQYF

SEQ ID NO: 334085 - protein, 13 aa, Homo sapiens
  CDR3 for alpha chain variable domain of TCR clone 167043 (TRAV26-1, TRAJ48)
CIVRVVGDEKLTF

SEQ ID NO: 334086 - protein, 13 aa, Homo sapiens
  CDR3 for beta chain variable domain of TCR clone 167043 (TRBV20-1, TRBJ1-2)
CSASTERIYGYTF

SEQ ID NO: 334087 - protein, 16 aa, Homo sapiens
  CDR3 for alpha chain variable domain of TCR clone 167044 (TRAV30, TRAJ24)
CGTEIVDADSWGKFQF

SEQ ID NO: 334088 - protein, 16 aa, Homo sapiens
  CDR3 for beta chain variable domain of TCR clone 167044 (TRBV28, TRBJ2-7)
CASSVFFETGGPEQYF

SEQ ID NO: 334089 - protein, 12 aa, Homo sapiens
  CDR3 for alpha chain variable domain of TCR clone 167045 (TRAV12-2, TRAJ44)
CADTGTASKLTF

SEQ ID NO: 334090 - protein, 17 aa, Homo sapiens
  CDR3 for beta chain variable domain of TCR clone 167045 (TRBV20-1, TRBJ1-1)
CSARGTGGSYGNTGAFC

SEQ ID NO: 334091 - protein, 12 aa, Homo sapiens
  CDR3 for alpha chain variable domain of TCR clone 167046 (TRAV12-3, TRAJ31)
CAMSVPNARIMF

SEQ ID NO: 334092 - protein, 12 aa, Homo sapiens
  CDR3 for beta chain variable domain of TCR clone 167046 (TRBV11-2, TRBJ2-1)
CASSVQREEQFF

SEQ ID NO: 334093 - protein, 15 aa, Homo sapiens
  CDR3 for alpha chain variable domain of TCR clone 167047 (TRAV8-3, TRAJ45)
CASSYSGGGADGLTF

SEQ ID NO: 334094 - protein, 16 aa, Homo sapiens
  CDR3 for beta chain variable domain of TCR clone 167047 (TRBV2, TRBJ2-5)
CASSETQGVGEETQYF

SEQ ID NO: 334095 - protein, 13 aa, Homo sapiens
  CDR3 for alpha chain variable domain of TCR clone 167048 (TRAV3, TRAJ20)
RAVRDTGDYKLSF

SEQ ID NO: 334096 - protein, 12 aa, Homo sapiens
  CDR3 for beta chain variable domain of TCR clone 167048 (TRBV29-1, TRBJ2-3)
CSVTGGADTQYF

SEQ ID NO: 334097 - protein, 13 aa, Homo sapiens
  CDR3 for alpha chain variable domain of TCR clone 167049 (TRAV8-3, TRAJ48)
CAVVPFGNEKLTF

SEQ ID NO: 334098 - protein, 15 aa, Homo sapiens
  CDR3 for beta chain variable domain of TCR clone 167049 (TRBV6-1, TRBJ2-5)
CASPRWGTEGQTQYF

SEQ ID NO: 334099 - protein, 19 aa, Homo sapiens
  CDR3 for alpha chain variable domain of TCR clone 167050 (TRAV2, TRAJ20)
ILQVREADAAVYRDYKLSF

SEQ ID NO: 334100 - protein, 16 aa, Homo sapiens
  CDR3 for beta chain variable domain of TCR clone 167050 (TRBV5-1, TRBJ2-5)
CASSLALLRAGETQYF

SEQ ID NO: 334101 - protein, 15 aa, Homo sapiens
  CDR3 for alpha chain variable domain of TCR clone 167051 (TRAV9-2, TRAJ49)
CALSPPDHTGNQFYF

SEQ ID NO: 334102 - protein, 14 aa, Homo sapiens
  CDR3 for beta chain variable domain of TCR clone 167051 (TRBV12-4, TRBJ1-1)
CASSLGTGGTEAVF

SEQ ID NO: 334103 - protein, 14 aa, Homo sapiens
  CDR3 for alpha chain variable domain of TCR clone 167052 (TRAV23/DV6, TRAJ11)
CAASLESGYSTLTF

SEQ ID NO: 334104 - protein, 15 aa, Homo sapiens
  CDR3 for beta chain variable domain of TCR clone 167052 (TRBV12-4, TRBJ2-5)
CASSPPTGLQETQYF

SEQ ID NO: 334105 - protein, 13 aa, Homo sapiens
  CDR3 for alpha chain variable domain of TCR clone 167053 (TRAV3, TRAJ21)
CAVREPDFNKFYF

SEQ ID NO: 334106 - protein, 14 aa, Homo sapiens
  CDR3 for beta chain variable domain of TCR clone 167053 (TRBV20-1, TRBJ2-2)
CSAPDTANTGELFF

SEQ ID NO: 334107 - protein, 14 aa, Homo sapiens
  CDR3 for alpha chain variable domain of TCR clone 167054 (TRAV13-2, TRAJ29)
FAENIEPGNTPLVF

SEQ ID NO: 334108 - protein, 14 aa, Homo sapiens
  CDR3 for beta chain variable domain of TCR clone 167054 (TRBV19, TRBJ2-2)
CATTGHANTGELFF

SEQ ID NO: 334109 - protein, 15 aa, Homo sapiens
  CDR3 for alpha chain variable domain of TCR clone 167055 (TRAV27, TRAJ50)
CAGVGRGTSYAKVIF

SEQ ID NO: 334110 - protein, 14 aa, Homo sapiens
  CDR3 for beta chain variable domain of TCR clone 167055 (TRBV7-6, TRBJ2-3)
CASSLGTVTDTQYF

SEQ ID NO: 334111 - protein, 11 aa, Homo sapiens
  CDR3 for alpha chain variable domain of TCR clone 167056 (TRAV2, TRAJ33)
YAVDSNYQLIW

SEQ ID NO: 334112 - protein, 14 aa, Homo sapiens
  CDR3 for beta chain variable domain of TCR clone 167056 (TRBV11-2, TRBJ2-3)
CASRRLARTDTQYF

SEQ ID NO: 334113 - protein, 14 aa, Homo sapiens
  CDR3 for alpha chain variable domain of TCR clone 167057 (TRAV21, TRAJ45)
CAVSSGGGADGLTF

SEQ ID NO: 334114 - protein, 17 aa, Homo sapiens
  CDR3 for beta chain variable domain of TCR clone 167057 (TRBV24-1, TRBJ2-1)
CATSDVLTSGTYNEQFF

SEQ ID NO: 334115 - protein, 13 aa, Homo sapiens
  CDR3 for alpha chain variable domain of TCR clone 167058 (TRAV12-3, TRAJ13)
CAMTSGGYQKVTF

SEQ ID NO: 334116 - protein, 16 aa, Homo sapiens
  CDR3 for beta chain variable domain of TCR clone 167058 (TRBV28, TRBJ2-5)
CASSFSPAGGWETQYF

SEQ ID NO: 334117 - protein, 15 aa, Homo sapiens
  CDR3 for alpha chain variable domain of TCR clone 167059 (TRAV20, TRAJ40)
CAVQRGTSGTYKYIF

SEQ ID NO: 334118 - protein, 19 aa, Homo sapiens
  CDR3 for beta chain variable domain of TCR clone 167059 (TRBV28, TRBJ2-7)
CASSYSGTSRLGWVYEQFF

SEQ ID NO: 334119 - protein, 13 aa, Homo sapiens
  CDR3 for alpha chain variable domain of TCR clone 167060 (TRAV13-2, TRAJ13)
CAERPGGYQKVTF

SEQ ID NO: 334120 - protein, 18 aa, Homo sapiens
  CDR3 for beta chain variable domain of TCR clone 167060 (TRBV7-6, TRBJ2-1)
CASSPRTSWMSSYNEQFF

SEQ ID NO: 334121 - protein, 15 aa, Homo sapiens
  CDR3 for alpha chain variable domain of TCR clone 167061 (TRAV12-3, TRAJ6)
CAMSATSGGSYIHTF

SEQ ID NO: 334122 - protein, 13 aa, Homo sapiens
  CDR3 for beta chain variable domain of TCR clone 167061 (TRBV7-9, TRBJ1-2)
CASSLKQNYGCTF

SEQ ID NO: 334123 - protein, 12 aa, Homo sapiens
  CDR3 for alpha chain variable domain of TCR clone 167062 (TRAV8-3, TRAJ26)
CAGDNYGQNFVF

SEQ ID NO: 334124 - protein, 16 aa, Homo sapiens
  CDR3 for beta chain variable domain of TCR clone 167062 (TRBV6-4, TRBJ1-2)
CASSEAVGDPNYGYTF

SEQ ID NO: 334125 - protein, 14 aa, Homo sapiens
  CDR3 for alpha chain variable domain of TCR clone 167063 (TRAV12-2, TRAJ13)
CAVKKTGGYQKVTF

SEQ ID NO: 334126 - protein, 15 aa, Homo sapiens
  CDR3 for beta chain variable domain of TCR clone 167063 (TRBV28, TRBJ2-5)
GASSPPWSYQETQYF

SEQ ID NO: 334127 - protein, 15 aa, Homo sapiens
  CDR3 for alpha chain variable domain of TCR clone 167064 (TRAV20, TRAJ4)
CAVQVFSGGYNKLIF

SEQ ID NO: 334128 - protein, 14 aa, Homo sapiens
  CDR3 for beta chain variable domain of TCR clone 167064 (TRBV7-6, TRBJ2-3)
CASNSGGDANTQNF

SEQ ID NO: 334129 - protein, 15 aa, Homo sapiens
  CDR3 for alpha chain variable domain of TCR clone 167065 (TRAV13-1, TRAJ17)
CAASIERATGNKLTF

SEQ ID NO: 334130 - protein, 15 aa, Homo sapiens
  CDR3 for beta chain variable domain of TCR clone 167065 (TRBV3-1, TRBJ2-7)
CASSQEWTGSYEQYF

SEQ ID NO: 334131 - protein, 14 aa, Homo sapiens
  CDR3 for alpha chain variable domain of TCR clone 167066 (TRAV21, TRAJ15)
CAVSLNQAGTALIF

SEQ ID NO: 334132 - protein, 14 aa, Homo sapiens
  CDR3 for beta chain variable domain of TCR clone 167066 (TRBV19, TRBJ2-7)
CASSIFAGTYEQYF

SEQ ID NO: 334133 - protein, 12 aa, Homo sapiens
  CDR3 for alpha chain variable domain of TCR clone 167067 (TRAV21, TRAJ33)
CAVQDSNYQLIW

SEQ ID NO: 334134 - protein, 14 aa, Homo sapiens
  CDR3 for beta chain variable domain of TCR clone 167067 (TRBV28, TRBJ2-1)
CASSPGEGGNEQLF

SEQ ID NO: 334135 - protein, 16 aa, Homo sapiens
  CDR3 for alpha chain variable domain of TCR clone 167068 (TRAV12-1, TRAJ43)
CVVNPHRFGAGTRLTV

SEQ ID NO: 334136 - protein, 16 aa, Homo sapiens
  CDR3 for beta chain variable domain of TCR clone 167068 (TRBV28, TRBJ2-1)
CASSSPEYPRDNEQFF

SEQ ID NO: 334137 - protein, 13 aa, Homo sapiens
  CDR3 for alpha chain variable domain of TCR clone 167069 (TRAV20, TRAJ37)
CAGCSSNTGKLIF

SEQ ID NO: 334138 - protein, 16 aa, Homo sapiens
  CDR3 for beta chain variable domain of TCR clone 167069 (TRBV19, TRBJ2-1)
CASSKAGPRSYNEQFF

SEQ ID NO: 334139 - protein, 16 aa, Homo sapiens
  CDR3 for alpha chain variable domain of TCR clone 167070 (TRAV29/DV5, TRAJ22)
CAACSRDSGSARQLTF

SEQ ID NO: 334140 - protein, 13 aa, Homo sapiens
  CDR3 for beta chain variable domain of TCR clone 167070 (TRBV7-3, TRBJ1-1)
CASSLTQGTEAFF

SEQ ID NO: 334141 - protein, 13 aa, Homo sapiens
  CDR3 for alpha chain variable domain of TCR clone 167071 (TRAV27, TRAJ6)
CAGGTRGSYIPTF

SEQ ID NO: 334142 - protein, 23 aa, Homo sapiens
  CDR3 for beta chain variable domain of TCR clone 167071 (TRBV4-2, TRBJ2-3)
CASSQDPPRASSISGGRGDTQYF

SEQ ID NO: 334143 - protein, 16 aa, Homo sapiens
  CDR3 for alpha chain variable domain of TCR clone 167072 (TRAV35, TRAJ28)
CAGQKYSGAGSYQLTF

SEQ ID NO: 334144 - protein, 14 aa, Homo sapiens
  CDR3 for beta chain variable domain of TCR clone 167072 (TRBV20-1, TRBJ2-1)
CSAQIGGSANEQFF

SEQ ID NO: 334145 - protein, 14 aa, Homo sapiens
  CDR3 for alpha chain variable domain of TCR clone 167073 (TRAV17, TRAJ57)
CATDPQGGSEKLVF

SEQ ID NO: 334146 - protein, 14 aa, Homo sapiens
  CDR3 for beta chain variable domain of TCR clone 167073 (TRBV20-1, TRBJ1-1)
CSARAVNGYTEAFF

SEQ ID NO: 334147 - protein, 14 aa, Homo sapiens
  CDR3 for alpha chain variable domain of TCR clone 167074 (TRAV12-2, TRAJ13)
CAVKKTGGCQKVTF

SEQ ID NO: 334148 - protein, 14 aa, Homo sapiens
  CDR3 for beta chain variable domain of TCR clone 167074 (TRBV10-3, TRBJ2-1)
CAISSDLAYNEQFF

SEQ ID NO: 334149 - protein, 16 aa, Homo sapiens
  CDR3 for alpha chain variable domain of TCR clone 167075 (TRAV10, TRAJ10)
CVVSDVLTGGGNKLTF

SEQ ID NO: 334150 - protein, 12 aa, Homo sapiens
  CDR3 for beta chain variable domain of TCR clone 167075 (TRBV11-2, TRBJ2-1)
CASSSGNNEQFF

SEQ ID NO: 334151 - protein, 14 aa, Homo sapiens
  CDR3 for alpha chain variable domain of TCR clone 167076 (TRAV1-2, TRAJ16)
CAVNRFSDGQMLLF

SEQ ID NO: 334152 - protein, 15 aa, Homo sapiens
  CDR3 for beta chain variable domain of TCR clone 167076 (TRBV5-8, TRBJ1-1)
CASSFPGTSLKGAFF

SEQ ID NO: 334153 - protein, 18 aa, Homo sapiens
  CDR3 for alpha chain variable domain of TCR clone 167077 (TRAV26-1, TRAJ23)
CIVRVGLEVWNQGGKLIF

SEQ ID NO: 334154 - protein, 13 aa, Homo sapiens
  CDR3 for beta chain variable domain of TCR clone 167077 (TRBV19, TRBJ2-7)
CASRKAGGSEQYF

SEQ ID NO: 334155 - protein, 13 aa, Homo sapiens
  CDR3 for alpha chain variable domain of TCR clone 167078 (TRAV3, TRAJ3)
CAVADSSASKIIF

SEQ ID NO: 334156 - protein, 13 aa, Homo sapiens
  CDR3 for beta chain variable domain of TCR clone 167078 (TRBV25-1, TRBJ2-7)
CASSEDGDYEQYF

SEQ ID NO: 334157 - protein, 15 aa, Homo sapiens
  CDR3 for alpha chain variable domain of TCR clone 167079 (TRAV2, TRAJ15)
CAVEDREQAGTVLFF

SEQ ID NO: 334158 - protein, 17 aa, Homo sapiens
  CDR3 for beta chain variable domain of TCR clone 167079 (TRBV7-8, TRBJ2-6)
CASSAGTGGAGANVLTF

SEQ ID NO: 334159 - protein, 13 aa, Homo sapiens
  CDR3 for alpha chain variable domain of TCR clone 167080 (TRAV13-1, TRAJ6)
CAASKGGSYIPTF

SEQ ID NO: 334160 - protein, 13 aa, Homo sapiens
  CDR3 for beta chain variable domain of TCR clone 167080 (TRBV7-9, TRBJ2-5)
CASGKVGIETQYF

SEQ ID NO: 334161 - protein, 16 aa, Homo sapiens
  CDR3 for alpha chain variable domain of TCR clone 167081 (TRAV26-1, TRAJ40)
CIVRSRTTSGTYKYIF

SEQ ID NO: 334162 - protein, 14 aa, Homo sapiens
  CDR3 for beta chain variable domain of TCR clone 167081 (TRBV12-5, TRBJ2-5)
CASGSRTHQETQYF

SEQ ID NO: 334163 - protein, 16 aa, Homo sapiens
  CDR3 for alpha chain variable domain of TCR clone 167082 (TRAV38-1, TRAJ12)
CAFMKHARDSSYKLIF

SEQ ID NO: 334164 - protein, 15 aa, Homo sapiens
  CDR3 for beta chain variable domain of TCR clone 167082 (TRBV7-9, TRBJ1-6)
CASSSPGRGNSPLHF

SEQ ID NO: 334165 - protein, 16 aa, Homo sapiens
  CDR3 for alpha chain variable domain of TCR clone 167083 (TRAV30, TRAJ24)
CGTEIVDAHSWGKFPF

SEQ ID NO: 334166 - protein, 14 aa, Homo sapiens
  CDR3 for beta chain variable domain of TCR clone 167083 (TRBV12-5, TRBJ2-5)
CASGSRTHQETQYF

SEQ ID NO: 334167 - protein, 11 aa, Homo sapiens
  CDR3 for alpha chain variable domain of TCR clone 167084 (TRAV13-1, TRAJ39)
CASHAGNMLTF

SEQ ID NO: 334168 - protein, 16 aa, Homo sapiens
  CDR3 for beta chain variable domain of TCR clone 167084 (TRBV11-2, TRBJ1-5)
CASSLDREGSPRILVM

SEQ ID NO: 334169 - protein, 15 aa, Homo sapiens
  CDR3 for alpha chain variable domain of TCR clone 167085 (TRAV26-1, TRAJ17)
CIVRVVKAAGNTLTF

SEQ ID NO: 334170 - protein, 16 aa, Homo sapiens
  CDR3 for beta chain variable domain of TCR clone 167085 (TRBV7-9, TRBJ2-1)
CASSLVSGPSYNEQFF

SEQ ID NO: 334171 - protein, 12 aa, Homo sapiens
  CDR3 for alpha chain variable domain of TCR clone 167086 (TRAV30, TRAJ43)
CGTEERGNDMSF

SEQ ID NO: 334172 - protein, 17 aa, Homo sapiens
  CDR3 for beta chain variable domain of TCR clone 167086 (TRBV11-2, TRBJ2-1)
CASSLYPPGVEYNEQFF

SEQ ID NO: 334173 - protein, 22 aa, Homo sapiens
  CDR3 for alpha chain variable domain of TCR clone 167087 (TRAV24, TRAJ42)
CAFNGAKEISYLEKALNSLLNQ

SEQ ID NO: 334174 - protein, 15 aa, Homo sapiens
  CDR3 for beta chain variable domain of TCR clone 167087 (TRBV5-5, TRBJ1-5)
CASSSTPGSNQPQHF

SEQ ID NO: 334175 - protein, 11 aa, Homo sapiens
  CDR3 for alpha chain variable domain of TCR clone 167088 (TRAV1-2, TRAJ31)
FAVNNNDRLMF

SEQ ID NO: 334176 - protein, 15 aa, Homo sapiens
  CDR3 for beta chain variable domain of TCR clone 167088 (TRBV28, TRBJ2-1)
CASSIIAGGRSEQFF

SEQ ID NO: 334177 - protein, 12 aa, Homo sapiens
  CDR3 for alpha chain variable domain of TCR clone 167089 (TRAV12-3, TRAJ17)
CAMTLTGNKLTF

SEQ ID NO: 334178 - protein, 16 aa, Homo sapiens
  CDR3 for beta chain variable domain of TCR clone 167089 (TRBV6-4, TRBJ1-2)
CASSAAVGDPSSGYTF

SEQ ID NO: 334179 - protein, 15 aa, Homo sapiens
  CDR3 for alpha chain variable domain of TCR clone 167090 (TRAV3, TRAJ4)
CAVRDGTGGYNKLMF

SEQ ID NO: 334180 - protein, 15 aa, Homo sapiens
  CDR3 for beta chain variable domain of TCR clone 167090 (TRBV27, TRBJ2-7)
CASSPDQGRLYEQYF

SEQ ID NO: 334181 - protein, 16 aa, Homo sapiens
  CDR3 for alpha chain variable domain of TCR clone 167091 (TRAV3, TRAJ37)
CAVRVRGSGNTGKLIF

SEQ ID NO: 334182 - protein, 11 aa, Homo sapiens
  CDR3 for beta chain variable domain of TCR clone 167091 (TRBV11-2, TRBJ2-2)
CASSLPGGLFF

SEQ ID NO: 334183 - protein, 11 aa, Homo sapiens
  CDR3 for alpha chain variable domain of TCR clone 167092 (TRAV1-1, TRAJ23)
CAVRQGGKLIF

SEQ ID NO: 334184 - protein, 15 aa, Homo sapiens
  CDR3 for beta chain variable domain of TCR clone 167092 (TRBV7-2, TRBJ2-3)
CASTPTSGETDTQYF

SEQ ID NO: 334185 - protein, 15 aa, Homo sapiens
  CDR3 for alpha chain variable domain of TCR clone 167093 (TRAV21, TRAJ53)
CATLNSGGSKYKLTF

SEQ ID NO: 334186 - protein, 16 aa, Homo sapiens
  CDR3 for beta chain variable domain of TCR clone 167093 (TRBV20-1, TRBJ1-4)
CSAPGQGLLTNEKLFF

SEQ ID NO: 334187 - protein, 15 aa, Homo sapiens
  CDR3 for alpha chain variable domain of TCR clone 167094 (TRAV23/DV6, TRAJ4)
CAASPLRGCYNKLIF

SEQ ID NO: 334188 - protein, 15 aa, Homo sapiens
  CDR3 for beta chain variable domain of TCR clone 167094 (TRBV7-9, TRBJ1-6)
CASSSPGRGNSPLHF

SEQ ID NO: 334189 - protein, 14 aa, Homo sapiens
  CDR3 for alpha chain variable domain of TCR clone 167095 (TRAV21, TRAJ35)
CAVMPIGFGNVLHC

SEQ ID NO: 334190 - protein, 16 aa, Homo sapiens
  CDR3 for beta chain variable domain of TCR clone 167095 (TRBV7-2, TRBJ2-5)
CASSLAVSGRGETQYF

SEQ ID NO: 334191 - protein, 14 aa, Homo sapiens
  CDR3 for alpha chain variable domain of TCR clone 167096 (TRAV20, TRAJ40)
CAVSLTSGTYTYIF

SEQ ID NO: 334192 - protein, 21 aa, Homo sapiens
  CDR3 for beta chain variable domain of TCR clone 167096 (TRBV27, TRBJ1-1)
CASSFLETARREFSLKLSLDK

SEQ ID NO: 334193 - protein, 11 aa, Homo sapiens
  CDR3 for alpha chain variable domain of TCR clone 167097 (TRAV12-2, TRAJ49)
CAVHTGNQFYF

SEQ ID NO: 334194 - protein, 15 aa, Homo sapiens
  CDR3 for beta chain variable domain of TCR clone 167097 (TRBV27, TRBJ2-1)
CASSNGVGSSNEQFF

SEQ ID NO: 334195 - protein, 16 aa, Homo sapiens
  CDR3 for alpha chain variable domain of TCR clone 167098 (TRAV3, TRAJ6)
CAVRDGMGRRKLHTYV

SEQ ID NO: 334196 - protein, 15 aa, Homo sapiens
  CDR3 for beta chain variable domain of TCR clone 167098 (TRBV5-1, TRBJ2-7)
CASSLGDFTTYEQYF

SEQ ID NO: 334197 - protein, 16 aa, Homo sapiens
  CDR3 for alpha chain variable domain of TCR clone 167099 (TRAV12-3, TRAJ53)
CAMSPGSGGSNYKLTF

SEQ ID NO: 334198 - protein, 11 aa, Homo sapiens
  CDR3 for beta chain variable domain of TCR clone 167099 (TRBV29-1, TRBJ2-5)
CSEHRTGTHYF

SEQ ID NO: 334199 - protein, 14 aa, Homo sapiens
  CDR3 for alpha chain variable domain of TCR clone 167100 (TRAV23/DV6, TRAJ22)
CAASVSGSARRLTF

SEQ ID NO: 334200 - protein, 16 aa, Homo sapiens
  CDR3 for beta chain variable domain of TCR clone 167100 (TRBV19, TRBJ2-2)
CASSFPGQGLAGELFF

SEQ ID NO: 334201 - protein, 13 aa, Homo sapiens
  CDR3 for alpha chain variable domain of TCR clone 167101 (TRAV29/DV5, TRAJ31)
CAASRNNNARLMF

SEQ ID NO: 334202 - protein, 16 aa, Homo sapiens
  CDR3 for beta chain variable domain of TCR clone 167101 (TRBV27, TRBJ2-5)
CASSYGPGGQKETQYF

SEQ ID NO: 334203 - protein, 15 aa, Homo sapiens
  CDR3 for alpha chain variable domain of TCR clone 167102 (TRAV21, TRAJ24)
CAARSSTDSWGKLQF

SEQ ID NO: 334204 - protein, 13 aa, Homo sapiens
  CDR3 for beta chain variable domain of TCR clone 167102 (TRBV6-1, TRBJ2-5)
CASMETSLQPQYF

SEQ ID NO: 334205 - protein, 21 aa, Homo sapiens
  CDR3 for alpha chain variable domain of TCR clone 167103 (TRAV8-4, TRAJ26)
CAVSSSMVRILSLVPEPDCPF

SEQ ID NO: 334206 - protein, 15 aa, Homo sapiens
  CDR3 for beta chain variable domain of TCR clone 167103 (TRBV19, TRBJ1-5)
CASSIVWADNQPQHF

SEQ ID NO: 334207 - protein, 15 aa, Homo sapiens
  CDR3 for alpha chain variable domain of TCR clone 167104 (TRAV17, TRAJ4)
CATGTWSGGYNKLFF

SEQ ID NO: 334208 - protein, 16 aa, Homo sapiens
  CDR3 for beta chain variable domain of TCR clone 167104 (TRBV20-1, TRBJ1-4)
CSAPGQGLLTNEKLFF

SEQ ID NO: 334209 - protein, 13 aa, Homo sapiens
  CDR3 for alpha chain variable domain of TCR clone 167105 (TRAV8-3, TRAJ28)
CAVGAVGSYQLTS

SEQ ID NO: 334210 - protein, 17 aa, Homo sapiens
  CDR3 for beta chain variable domain of TCR clone 167105 (TRBV11-2, TRBJ2-1)
CASSLYPPGVEYNEQFF

SEQ ID NO: 334211 - protein, 14 aa, Homo sapiens
  CDR3 for alpha chain variable domain of TCR clone 167106 (TRAV23/DV6, TRAJ13)
CAAMYSGGYQKVTF

SEQ ID NO: 334212 - protein, 11 aa, Homo sapiens
  CDR3 for beta chain variable domain of TCR clone 167106 (TRBV11-2, TRBJ2-2)
CASSLPGELFF

SEQ ID NO: 334213 - protein, 13 aa, Homo sapiens
  CDR3 for alpha chain variable domain of TCR clone 167107 (TRAV21, TRAJ36)
CAVIKTGANNLFF

SEQ ID NO: 334214 - protein, 13 aa, Homo sapiens
  CDR3 for beta chain variable domain of TCR clone 167107 (TRBV29-1, TRBJ2-3)
CSATRGGRDKQYF

SEQ ID NO: 334215 - protein, 17 aa, Homo sapiens
  CDR3 for alpha chain variable domain of TCR clone 167108 (TRAV3, TRAJ6)
CAVRDGPRAGGSSIPTF

SEQ ID NO: 334216 - protein, 14 aa, Homo sapiens
  CDR3 for beta chain variable domain of TCR clone 167108 (TRBV7-2, TRBJ2-7)
CASSHKTSFYEQYF

SEQ ID NO: 334217 - protein, 13 aa, Homo sapiens
  CDR3 for alpha chain variable domain of TCR clone 167109 (TRAV1-1, TRAJ9)
CAAKNTGGFKTIF

SEQ ID NO: 334218 - protein, 14 aa, Homo sapiens
  CDR3 for beta chain variable domain of TCR clone 167109 (TRBV20-1, TRBJ2-1)
GSAQTGGSANEQFF

SEQ ID NO: 334219 - protein, 13 aa, Homo sapiens
  CDR3 for alpha chain variable domain of TCR clone 167110 (TRAV8-4, TRAJ54)
CAVPIQGAQKLVF

SEQ ID NO: 334220 - protein, 15 aa, Homo sapiens
  CDR3 for beta chain variable domain of TCR clone 167110 (TRBV5-5, TRBJ2-7)
CASSLAAPLSYEQYF

SEQ ID NO: 334221 - protein, 15 aa, Homo sapiens
  CDR3 for alpha chain variable domain of TCR clone 167111 (TRAV21, TRAJ32)
CAVNSYGGATNKLIF

SEQ ID NO: 334222 - protein, 18 aa, Homo sapiens
  CDR3 for beta chain variable domain of TCR clone 167111 (TRBV7-9, TRBJ2-1)
CASSTGRAGGSSYNEQFF

SEQ ID NO: 334223 - protein, 13 aa, Homo sapiens
  CDR3 for alpha chain variable domain of TCR clone 167112 (TRAV21, TRAJ27)
CAQWGGNAGKSTF

SEQ ID NO: 334224 - protein, 14 aa, Homo sapiens
  CDR3 for beta chain variable domain of TCR clone 167112 (TRBV7-9, TRBJ1-2)
CASSREGATYGYTF

SEQ ID NO: 334225 - protein, 13 aa, Homo sapiens
  CDR3 for alpha chain variable domain of TCR clone 167113 (TRAV13-2, TRAJ48)
CAEMDFGNEKLTL

SEQ ID NO: 334226 - protein, 15 aa, Homo sapiens
  CDR3 for beta chain variable domain of TCR clone 167113 (TRBV7-9, TRBJ1-6)
CASSSTGRGNSPLHF

SEQ ID NO: 334227 - protein, 14 aa, Homo sapiens
  CDR3 for alpha chain variable domain of TCR clone 167114 (TRAV1-2, TRAJ6)
CAVSLSGGSYIPTF

SEQ ID NO: 334228 - protein, 15 aa, Homo sapiens
  CDR3 for beta chain variable domain of TCR clone 167114 (TRBV7-9, TRBJ2-7)
CASSPGGGLNYEQYF

SEQ ID NO: 334229 - protein, 11 aa, Homo sapiens
  CDR3 for alpha chain variable domain of TCR clone 167115 (TRAV12-3, TRAJ43)
CAMSVSNDMRF

SEQ ID NO: 334230 - protein, 17 aa, Homo sapiens
  CDR3 for beta chain variable domain of TCR clone 167115 (TRBV19, TRBJ2-7)
CASSISFYDSYPYEQYF

SEQ ID NO: 334231 - protein, 13 aa, Homo sapiens
  CDR3 for alpha chain variable domain of TCR clone 167116 (TRAV12-3, TRAJ40)
CAMSASGSYKYIF

SEQ ID NO: 334232 - protein, 16 aa, Homo sapiens
  CDR3 for beta chain variable domain of TCR clone 167116 (TRBV20-1, TRBJ2-3)
CSGEAGLAGGQDTQYF

SEQ ID NO: 334233 - protein, 12 aa, Homo sapiens
  CDR3 for alpha chain variable domain of TCR clone 167117 (TRAV2, TRAJ10)
CASTGGGNKLTF

SEQ ID NO: 334234 - protein, 14 aa, Homo sapiens
  CDR3 for beta chain variable domain of TCR clone 167117 (TRBV7-2, TRBJ2-2)
CTSRGQGAAGELFF

SEQ ID NO: 334235 - protein, 14 aa, Homo sapiens
  CDR3 for alpha chain variable domain of TCR clone 167118 (TRAV14/DV4, TRAJ15)
CAMRRDQAGTALIF

SEQ ID NO: 334236 - protein, 15 aa, Homo sapiens
  CDR3 for beta chain variable domain of TCR clone 167118 (TRBV7-9, TRBJ1-6)
CASSSPGRGNSPLHF

SEQ ID NO: 334237 - protein, 21 aa, Homo sapiens
  CDR3 for alpha chain variable domain of TCR clone 167119 (TRAV13-1, TRAJ26)
SLHITETQPEDSAVYFRAIVF

SEQ ID NO: 334238 - protein, 15 aa, Homo sapiens
  CDR3 for beta chain variable domain of TCR clone 167119 (TRBV12-4, TRBJ2-1)
CASSLLGRTYNEQFF

SEQ ID NO: 334239 - protein, 11 aa, Homo sapiens
  CDR3 for alpha chain variable domain of TCR clone 167120 (TRAV12-1, TRAJ21)
CVVYNFNKFYF

SEQ ID NO: 334240 - protein, 18 aa, Homo sapiens
  CDR3 for beta chain variable domain of TCR clone 167120 (TRBV15, TRBJ2-3)
CATSRDGARSWDTDTQYF

SEQ ID NO: 334241 - protein, 15 aa, Homo sapiens
  CDR3 for alpha chain variable domain of TCR clone 167121 (TRAV26-1, TRAJ29)
CIVRVEGSGNKPLVF

SEQ ID NO: 334242 - protein, 15 aa, Homo sapiens
  CDR3 for beta chain variable domain of TCR clone 167121 (TRBV7-9, TRBJ1-5)
CAISQGHQPNQPQHF

SEQ ID NO: 334243 - protein, 15 aa, Homo sapiens
  CDR3 for alpha chain variable domain of TCR clone 167122 (TRAV16, TRAJ12)
CSKWPLRDSSYKLIF

SEQ ID NO: 334244 - protein, 13 aa, Homo sapiens
  CDR3 for beta chain variable domain of TCR clone 167122 (TRBV4-2, TRBJ1-1)
CASSQAGNTEAIF

SEQ ID NO: 334245 - protein, 13 aa, Homo sapiens
  CDR3 for alpha chain variable domain of TCR clone 167123 (TRAV3, TRAJ26)
CAVRPTPGQNFVF

SEQ ID NO: 334246 - protein, 15 aa, Homo sapiens
  CDR3 for beta chain variable domain of TCR clone 167123 (TRBV7-6, TRBJ1-2)
CASSSGGRGGYGYTF

SEQ ID NO: 334247 - protein, 11 aa, Homo sapiens
  CDR3 for alpha chain variable domain of TCR clone 167124 (TRAV21, TRAJ48)
CAVDGNEELTF

SEQ ID NO: 334248 - protein, 16 aa, Homo sapiens
  CDR3 for beta chain variable domain of TCR clone 167124 (TRBV12-4, TRBJ1-5)
CASSSGPRGSKQPQHF

SEQ ID NO: 334249 - protein, 11 aa, Homo sapiens
  CDR3 for alpha chain variable domain of TCR clone 167125 (TRAV23/DV6, TRAJ58)
CAARLLRGETS

SEQ ID NO: 334250 - protein, 13 aa, Homo sapiens
  CDR3 for beta chain variable domain of TCR clone 167125 (TRBV6-4, TRBJ1-5)
CASSADLNQPKHF

SEQ ID NO: 334251 - protein, 14 aa, Homo sapiens
  CDR3 for alpha chain variable domain of TCR clone 167126 (TRAV12-1, TRAJ30)
CVVNIGGRDDKIIF

SEQ ID NO: 334252 - protein, 13 aa, Homo sapiens
  CDR3 for beta chain variable domain of TCR clone 167126 (TRBV12-5, TRBJ2-1)
CASGLGRGNEQFF

SEQ ID NO: 334253 - protein, 15 aa, Homo sapiens
  CDR3 for alpha chain variable domain of TCR clone 167127 (TRAV17, TRAJ16)
CATALRFSDGQKLLF

SEQ ID NO: 334254 - protein, 17 aa, Homo sapiens
  CDR3 for beta chain variable domain of TCR clone 167127 (TRBV13, TRBJ2-3)
CASSLSRVAGGRNTQYF

SEQ ID NO: 334255 - protein, 14 aa, Homo sapiens
  CDR3 for alpha chain variable domain of TCR clone 167128 (TRAV2, TRAJ37)
CAVDFTSNTGKLIL

SEQ ID NO: 334256 - protein, 13 aa, Homo sapiens
  CDR3 for beta chain variable domain of TCR clone 167128 (TRBV4-1, TRBJ2-2)
CASSQENTGELFF

SEQ ID NO: 334257 - protein, 14 aa, Homo sapiens
  CDR3 for alpha chain variable domain of TCR clone 167129 (TRAV2, TRAJ9)
CAVEDRSGGFKTII

SEQ ID NO: 334258 - protein, 16 aa, Homo sapiens
  CDR3 for beta chain variable domain of TCR clone 167129 (TRBV12-5, TRBJ2-5)
CASGPRTSGNQETQYF

SEQ ID NO: 334259 - protein, 13 aa, Homo sapiens
  CDR3 for alpha chain variable domain of TCR clone 167130 (TRAV12-2, TRAJ54)
CAVNRRGAQKLVF

SEQ ID NO: 334260 - protein, 18 aa, Homo sapiens
  CDR3 for beta chain variable domain of TCR clone 167130 (TRBV7-3, TRBJ2-5)
CASSLGGAAQGRWETQYV

SEQ ID NO: 334261 - protein, 16 aa, Homo sapiens
  CDR3 for alpha chain variable domain of TCR clone 167131 (TRAV3, TRAJ37)
CAVRPHGSGNTGKLIF

SEQ ID NO: 334262 - protein, 14 aa, Homo sapiens
  CDR3 for beta chain variable domain of TCR clone 167131 (TRBV20-1, TRBJ2-7)
CSAKTGTGGYEQYF

SEQ ID NO: 334263 - protein, 14 aa, Homo sapiens
  CDR3 for alpha chain variable domain of TCR clone 167132 (TRAV3, TRAJ24)
CAVILTDSWGKLQF

SEQ ID NO: 334264 - protein, 14 aa, Homo sapiens
  CDR3 for beta chain variable domain of TCR clone 167132 (TRBV7-2, TRBJ2-7)
CASSPKTSFYEQYF

SEQ ID NO: 334265 - protein, 14 aa, Homo sapiens
  CDR3 for alpha chain variable domain of TCR clone 167133 (TRAV12-3, TRAJ11)
CAMTTNSGYSTLTF

SEQ ID NO: 334266 - protein, 16 aa, Homo sapiens
  CDR3 for beta chain variable domain of TCR clone 167133 (TRBV20-1, TRBJ1-1)
CSARALTQGMNTEAFF

SEQ ID NO: 334267 - protein, 14 aa, Homo sapiens
  CDR3 for alpha chain variable domain of TCR clone 167134 (TRAV12-2, TRAJ9)
CAVNALEGGFKTIF

SEQ ID NO: 334268 - protein, 16 aa, Homo sapiens
  CDR3 for beta chain variable domain of TCR clone 167134 (TRBV7-2, TRBJ2-5)
CASSPFPTGGEETQDF

SEQ ID NO: 334269 - protein, 14 aa, Homo sapiens
  CDR3 for alpha chain variable domain of TCR clone 167135 (TRAV1-1, TRAJ27)
CAVIYNTNAGKSTF

SEQ ID NO: 334270 - protein, 14 aa, Homo sapiens
  CDR3 for beta chain variable domain of TCR clone 167135 (TRBV6-5, TRBJ1-2)
CASSYDGTGGGYAF

SEQ ID NO: 334271 - protein, 14 aa, Homo sapiens
  CDR3 for alpha chain variable domain of TCR clone 167136 (TRAV12-2, TRAJ17)
CAVLFKAAGNKITF

SEQ ID NO: 334272 - protein, 15 aa, Homo sapiens
  CDR3 for beta chain variable domain of TCR clone 167136 (TRBV20-1, TRBJ2-7)
CSARDRVSGMDEQYF

SEQ ID NO: 334273 - protein, 17 aa, Homo sapiens
  CDR3 for alpha chain variable domain of TCR clone 167137 (TRAV26-1, TRAJ47)
CIVPSLLYMEYGNKLVF

SEQ ID NO: 334274 - protein, 13 aa, Homo sapiens
  CDR3 for beta chain variable domain of TCR clone 167137 (TRBV7-3, TRBJ1-2)
CASSLKQNYGYTF

SEQ ID NO: 334275 - protein, 11 aa, Homo sapiens
  CDR3 for alpha chain variable domain of TCR clone 167138 (TRAV26-1, TRAJ27)
CIDPNAGKSTL

SEQ ID NO: 334276 - protein, 18 aa, Homo sapiens
  CDR3 for beta chain variable domain of TCR clone 167138 (TRBV7-9, TRBJ2-6)
CASSFPGAGMSGANVLTF

SEQ ID NO: 334277 - protein, 16 aa, Homo sapiens
  CDR3 for alpha chain variable domain of TCR clone 167139 (TRAV12-3, TRAJ53)
CAMSPGSGGSNYKLTF

SEQ ID NO: 334278 - protein, 15 aa, Homo sapiens
  CDR3 for beta chain variable domain of TCR clone 167139 (TRBV12-4, TRBJ1-6)
CASSLGGQGTSTLHF

SEQ ID NO: 334279 - protein, 14 aa, Homo sapiens
  CDR3 for alpha chain variable domain of TCR clone 167140 (TRAV23/DV6, TRAJ27)
CAASGDGNAGKSTF

SEQ ID NO: 334280 - protein, 13 aa, Homo sapiens
  CDR3 for beta chain variable domain of TCR clone 167140 (TRBV7-9, TRBJ2-7)
CASSFAGAYEQYF

SEQ ID NO: 334281 - protein, 21 aa, Homo sapiens
  CDR3 for alpha chain variable domain of TCR clone 167141 (TRAV26-2, TRAJ17)
EGCCCVLLHPAIKAAGNKLTF

SEQ ID NO: 334282 - protein, 12 aa, Homo sapiens
  CDR3 for beta chain variable domain of TCR clone 167141 (TRBV29-1, TRBJ2-7)
CSARDRPYEQYF

SEQ ID NO: 334283 - protein, 13 aa, Homo sapiens
  CDR3 for alpha chain variable domain of TCR clone 167142 (TRAV3, TRAJ21)
CAVREPGFNKFYF

SEQ ID NO: 334284 - protein, 15 aa, Homo sapiens
  CDR3 for beta chain variable domain of TCR clone 167142 (TRBV2, TRBJ2-1)
CASSELAGGYNEQFF

SEQ ID NO: 334285 - protein, 14 aa, Homo sapiens
  CDR3 for alpha chain variable domain of TCR clone 167143 (TRAV12-2, TRAJ5)
CAVNRSTGRRALTF

SEQ ID NO: 334286 - protein, 12 aa, Homo sapiens
  CDR3 for beta chain variable domain of TCR clone 167143 (TRBV19, TRBJ1-5)
CASSISQQPQHF

SEQ ID NO: 334287 - protein, 13 aa, Homo sapiens
  CDR3 for alpha chain variable domain of TCR clone 167144 (TRAV3, TRAJ20)
CAVRSLNDYKLSF

SEQ ID NO: 334288 - protein, 17 aa, Homo sapiens
  CDR3 for beta chain variable domain of TCR clone 167144 (TRBV18, TRBJ1-5)
CASSPTMGQGTNQPQHF

SEQ ID NO: 334289 - protein, 12 aa, Homo sapiens
  CDR3 for alpha chain variable domain of TCR clone 167145 (TRAV26-2, TRAJ21)
CILKGNFNKFYF

SEQ ID NO: 334290 - protein, 12 aa, Homo sapiens
  CDR3 for beta chain variable domain of TCR clone 167145 (TRBV12-4, TRBJ2-7)
LASSLGGYEQYF

SEQ ID NO: 334291 - protein, 15 aa, Homo sapiens
  CDR3 for alpha chain variable domain of TCR clone 167146 (TRAV21, TRAJ32)
CAVRRYGGATNKLIF

SEQ ID NO: 334292 - protein, 13 aa, Homo sapiens
  CDR3 for beta chain variable domain of TCR clone 167146 (TRBV7-2, TRBJ2-2)
CASSSVRAGELFF

SEQ ID NO: 334293 - protein, 12 aa, Homo sapiens
  CDR3 for alpha chain variable domain of TCR clone 167147 (TRAV29/DV5, TRAJ26)
CAASEYGQNFVF

SEQ ID NO: 334294 - protein, 14 aa, Homo sapiens
  CDR3 for beta chain variable domain of TCR clone 167147 (TRBV7-2, TRBJ2-7)
CASSPKTSFYEQYF

SEQ ID NO: 334295 - protein, 13 aa, Homo sapiens
  CDR3 for alpha chain variable domain of TCR clone 167148 (TRAV12-1, TRAJ29)
CVVDTSGNTPLVF

SEQ ID NO: 334296 - protein, 15 aa, Homo sapiens
  CDR3 for beta chain variable domain of TCR clone 167148 (TRBV4-1, TRBJ1-4)
CASSDTGGTNEKLFF

SEQ ID NO: 334297 - protein, 18 aa, Homo sapiens
  CDR3 for alpha chain variable domain of TCR clone 167149 (TRAV13-1, TRAJ52)
CAAKNPNAGGTSYGKLTF

SEQ ID NO: 334298 - protein, 15 aa, Homo sapiens
  CDR3 for beta chain variable domain of TCR clone 167149 (TRBV28, TRBJ2-1)
SASSIIAGGRSEQFF

SEQ ID NO: 334299 - protein, 13 aa, Homo sapiens
  CDR3 for alpha chain variable domain of TCR clone 167150 (TRAV13-2, TRAJ13)
CAERPGGYQKVTF

SEQ ID NO: 334300 - protein, 16 aa, Homo sapiens
  CDR3 for beta chain variable domain of TCR clone 167150 (TRBV7-2, TRBJ2-7)
CASSLGLAGGAYEQYF

SEQ ID NO: 334301 - protein, 15 aa, Homo sapiens
  CDR3 for alpha chain variable domain of TCR clone 167151 (TRAV3, TRAJ22)
CAVRDRGGSARQLTF

SEQ ID NO: 334302 - protein, 13 aa, Homo sapiens
  CDR3 for beta chain variable domain of TCR clone 167151 (TRBV12-4, TRBJ1-2)
CTSSLRQGKGYTF

SEQ ID NO: 334303 - protein, 12 aa, Homo sapiens
  CDR3 for alpha chain variable domain of TCR clone 167152 (TRAV8-3, TRAJ20)
CAVGANDYKLSF

SEQ ID NO: 334304 - protein, 11 aa, Homo sapiens
  CDR3 for beta chain variable domain of TCR clone 167152 (TRBV10-3, TRBJ2-7)
CAISEGLEQYF

SEQ ID NO: 334305 - protein, 14 aa, Homo sapiens
  CDR3 for alpha chain variable domain of TCR clone 167153 (TRAV12-3, TRAJ10)
SHLPLTGGGNKLTF

SEQ ID NO: 334306 - protein, 11 aa, Homo sapiens
  CDR3 for beta chain variable domain of TCR clone 167153 (TRBV11-2, TRBJ2-2)
CASSLPGELFC

SEQ ID NO: 334307 - protein, 17 aa, Homo sapiens
  CDR3 for alpha chain variable domain of TCR clone 167154 (TRAV3, TRAJ6)
RAVRDGPRAGGSYIPTF

SEQ ID NO: 334308 - protein, 13 aa, Homo sapiens
  CDR3 for beta chain variable domain of TCR clone 167154 (TRBV19, TRBJ2-7)
CASSIDRTYEQYF

SEQ ID NO: 334309 - protein, 16 aa, Homo sapiens
  CDR3 for alpha chain variable domain of TCR clone 167155 (TRAV26-2, TRAJ37)
CILRDFGSSKTGKLIF

SEQ ID NO: 334310 - protein, 15 aa, Homo sapiens
  CDR3 for beta chain variable domain of TCR clone 167155 (TRBV6-5, TRBJ2-7)
CASRSLAVSSYEQYF

SEQ ID NO: 334311 - protein, 16 aa, Homo sapiens
  CDR3 for alpha chain variable domain of TCR clone 167156 (TRAV1-2, TRAJ16)
NVLDGLEEKDGQKLLF

SEQ ID NO: 334312 - protein, 16 aa, Homo sapiens
  CDR3 for beta chain variable domain of TCR clone 167156 (TRBV7-9, TRBJ2-1)
CASSDVAGGSYNEQFF

SEQ ID NO: 334313 - protein, 12 aa, Homo sapiens
  CDR3 for alpha chain variable domain of TCR clone 167157 (TRAV12-3, TRAJ17)
CALTLTGNKLTF

SEQ ID NO: 334314 - protein, 15 aa, Homo sapiens
  CDR3 for beta chain variable domain of TCR clone 167157 (TRBV20-1, TRBJ2-7)
CGARDRVSGMDEQYF

SEQ ID NO: 334315 - protein, 14 aa, Homo sapiens
  CDR3 for alpha chain variable domain of TCR clone 167158 (TRAV26-1, TRAJ38)
CIADNAGNNRKLIW

SEQ ID NO: 334316 - protein, 13 aa, Homo sapiens
  CDR3 for beta chain variable domain of TCR clone 167158 (TRBV20-1, TRBJ1-1)
CSARVGGNTEAVF

SEQ ID NO: 334317 - protein, 14 aa, Homo sapiens
  CDR3 for alpha chain variable domain of TCR clone 167159 (TRAV16, TRAJ26)
CALSSANYGRNFVF

SEQ ID NO: 334318 - protein, 16 aa, Homo sapiens
  CDR3 for beta chain variable domain of TCR clone 167159 (TRBV20-1, TRBJ1-4)
CSAPGQGLLTNEKLFF

SEQ ID NO: 334319 - protein, 14 aa, Homo sapiens
  CDR3 for alpha chain variable domain of TCR clone 167160 (TRAV8-3, TRAJ4)
CAAGASGGYNKLIF

SEQ ID NO: 334320 - protein, 16 aa, Homo sapiens
  CDR3 for beta chain variable domain of TCR clone 167160 (TRBV4-3, TRBJ2-2)
CASSHLQGSGTGELFF

SEQ ID NO: 334321 - protein, 18 aa, Homo sapiens
  CDR3 for alpha chain variable domain of TCR clone 167161 (TRAV21, TRAJ52)
CAVRPSPAGGTSYGKLTF

SEQ ID NO: 334322 - protein, 13 aa, Homo sapiens
  CDR3 for beta chain variable domain of TCR clone 167161 (TRBV6-5, TRBJ2-5)
CASSSPGGETQYF

SEQ ID NO: 334323 - protein, 11 aa, Homo sapiens
  CDR3 for alpha chain variable domain of TCR clone 167162 (TRAV1-2, TRAJ20)
CAVANDYKLSL

SEQ ID NO: 334324 - protein, 15 aa, Homo sapiens
  CDR3 for beta chain variable domain of TCR clone 167162 (TRBV28, TRBJ2-1)
CASSIIAGGRSEQFF

SEQ ID NO: 334325 - protein, 13 aa, Homo sapiens
  CDR3 for alpha chain variable domain of TCR clone 167163 (TRAV8-1, TRAJ30)
CAVNGRRDDKIIF

SEQ ID NO: 334326 - protein, 15 aa, Homo sapiens
  CDR3 for beta chain variable domain of TCR clone 167163 (TRBV5-7, TRBJ1-5)
CASSYGKLWDQHQHF

SEQ ID NO: 334327 - protein, 15 aa, Homo sapiens
  CDR3 for alpha chain variable domain of TCR clone 167164 (TRAV20, TRAJ16)
CAVQIRFSDGQKLLF

SEQ ID NO: 334328 - protein, 15 aa, Homo sapiens
  CDR3 for beta chain variable domain of TCR clone 167164 (TRBV11-3, TRBJ2-3)
CASLKDGREGDTQYF

SEQ ID NO: 334329 - protein, 14 aa, Homo sapiens
  CDR3 for alpha chain variable domain of TCR clone 167165 (TRAV38-1, TRAJ40)
CALRPTSGTYKYIF

SEQ ID NO: 334330 - protein, 14 aa, Homo sapiens
  CDR3 for beta chain variable domain of TCR clone 167165 (TRBV11-2, TRBJ1-5)
CASSSRTGNQPQHF

SEQ ID NO: 334331 - protein, 14 aa, Homo sapiens
  CDR3 for alpha chain variable domain of TCR clone 167166 (TRAV21, TRAJ35)
CAVMPIGFGNVLHC

SEQ ID NO: 334332 - protein, 16 aa, Homo sapiens
  CDR3 for beta chain variable domain of TCR clone 167166 (TRBV11-2, TRBJ1-2)
CASSLDTGGADYGYTF

SEQ ID NO: 334333 - protein, 13 aa, Homo sapiens
  CDR3 for alpha chain variable domain of TCR clone 167167 (TRAV8-3, TRAJ36)
CAVGATGANNLFF

SEQ ID NO: 334334 - protein, 15 aa, Homo sapiens
  CDR3 for beta chain variable domain of TCR clone 167167 (TRBV7-2, TRBJ1-2)
CASSPGAGWNYGYTV

SEQ ID NO: 334335 - protein, 14 aa, Homo sapiens
  CDR3 for alpha chain variable domain of TCR clone 167168 (TRAV13-1, TRAJ35)
CAASKGGVGNVLHC

SEQ ID NO: 334336 - protein, 16 aa, Homo sapiens
  CDR3 for beta chain variable domain of TCR clone 167168 (TRBV7-9, TRBJ2-1)
CASSDVAGGSYNEQFF

SEQ ID NO: 334337 - protein, 14 aa, Homo sapiens
  CDR3 for alpha chain variable domain of TCR clone 167169 (TRAV12-3, TRAJ10)
SHLPLTGGGNKLTF

SEQ ID NO: 334338 - protein, 15 aa, Homo sapiens
  CDR3 for beta chain variable domain of TCR clone 167169 (TRBV7-6, TRBJ2-1)
CASSPGQGPYNEQFF

SEQ ID NO: 334339 - protein, 13 aa, Homo sapiens
  CDR3 for alpha chain variable domain of TCR clone 167170 (TRAV12-1, TRAJ26)
CVVRRNYGQNFVF

SEQ ID NO: 334340 - protein, 13 aa, Homo sapiens
  CDR3 for beta chain variable domain of TCR clone 167170 (TRBV12-5, TRBJ2-3)
CASGDRQSDTQYF

SEQ ID NO: 334341 - protein, 11 aa, Homo sapiens
  CDR3 for alpha chain variable domain of TCR clone 167171 (TRAV12-2, TRAJ29)
CAVTLRSPLVF

SEQ ID NO: 334342 - protein, 16 aa, Homo sapiens
  CDR3 for beta chain variable domain of TCR clone 167171 (TRBV19, TRBJ1-5)
CASSIDRGGHRQPQHF

SEQ ID NO: 334343 - protein, 20 aa, Homo sapiens
  CDR3 for alpha chain variable domain of TCR clone 167172 (TRAV1-2, TRAJ34)
LLKELQMKDSASPNTDKLIF

SEQ ID NO: 334344 - protein, 13 aa, Homo sapiens
  CDR3 for beta chain variable domain of TCR clone 167172 (TRBV4-2, TRBJ1-1)
CASSQAGNTEAFF

SEQ ID NO: 334345 - protein, 16 aa, Homo sapiens
  CDR3 for alpha chain variable domain of TCR clone 167173 (TRAV12-3, TRAJ53)
CAMSPGSGGSNYKLTF

SEQ ID NO: 334346 - protein, 14 aa, Homo sapiens
  CDR3 for beta chain variable domain of TCR clone 167173 (TRBV7-2, TRBJ1-1)
CARSFLTGTTEAFF

SEQ ID NO: 334347 - protein, 10 aa, Homo sapiens
  CDR3 for alpha chain variable domain of TCR clone 167174 (TRAV5, TRAJ34)
CAEDTDKLIF

SEQ ID NO: 334348 - protein, 14 aa, Homo sapiens
  CDR3 for beta chain variable domain of TCR clone 167174 (TRBV7-2, TRBJ2-2)
CASRGQGAAGELFF

SEQ ID NO: 334349 - protein, 16 aa, Homo sapiens
  CDR3 for alpha chain variable domain of TCR clone 167175 (TRAV3, TRAJ37)
WAVRGKGSGNTGKLIF

SEQ ID NO: 334350 - protein, 12 aa, Homo sapiens
  CDR3 for beta chain variable domain of TCR clone 167175 (TRBV12-4, TRBJ2-3)
CASSTLPDTQYF

SEQ ID NO: 334351 - protein, 10 aa, Homo sapiens
  CDR3 for alpha chain variable domain of TCR clone 167176 (TRAV12-3, TRAJ10)
CREEETNSPF

SEQ ID NO: 334352 - protein, 17 aa, Homo sapiens
  CDR3 for beta chain variable domain of TCR clone 167176 (TRBV7-3, TRBJ2-3)
CASSLMKRMRGADTQYF

SEQ ID NO: 334353 - protein, 12 aa, Homo sapiens
  CDR3 for alpha chain variable domain of TCR clone 167177 (TRAV12-3, TRAJ21)
CAMFNNSNKFFF

SEQ ID NO: 334354 - protein, 14 aa, Homo sapiens
  CDR3 for beta chain variable domain of TCR clone 167177 (TRBV28, TRBJ2-1)
CASSIQGTVGEQFF

SEQ ID NO: 334355 - protein, 15 aa, Homo sapiens
  CDR3 for alpha chain variable domain of TCR clone 167178 (TRAV12-1, TRAJ42)
CGVTRDGGSQGNLIF

SEQ ID NO: 334356 - protein, 14 aa, Homo sapiens
  CDR3 for beta chain variable domain of TCR clone 167178 (TRBV11-2, TRBJ2-3)
CASSLGGGANTQYF

SEQ ID NO: 334357 - protein, 14 aa, Homo sapiens
  CDR3 for alpha chain variable domain of TCR clone 167179 (TRAV23/DV6, TRAJ22)
CADISSGSARQLIF

SEQ ID NO: 334358 - protein, 16 aa, Homo sapiens
  CDR3 for beta chain variable domain of TCR clone 167179 (TRBV5-7, TRBJ2-5)
CASIRGQTGYQETQYF

SEQ ID NO: 334359 - protein, 17 aa, Homo sapiens
  CDR3 for alpha chain variable domain of TCR clone 167180 (TRAV3, TRAJ6)
CALRDGPRAGGSYIPTF

SEQ ID NO: 334360 - protein, 12 aa, Homo sapiens
  CDR3 for beta chain variable domain of TCR clone 167180 (TRBV11-2, TRBJ2-2)
CASSLGGGELFF

SEQ ID NO: 334361 - protein, 13 aa, Homo sapiens
  CDR3 for alpha chain variable domain of TCR clone 167181 (TRAV8-3, TRAJ28)
CAAGAVGSSQLTF

SEQ ID NO: 334362 - protein, 14 aa, Homo sapiens
  CDR3 for beta chain variable domain of TCR clone 167181 (TRBV7-2, TRBJ2-7)
CASRSQGAAYEQYF

SEQ ID NO: 334363 - protein, 15 aa, Homo sapiens
  CDR3 for alpha chain variable domain of TCR clone 167182 (TRAV3, TRAJ5)
CAVRDLDTGRRALTF

SEQ ID NO: 334364 - protein, 14 aa, Homo sapiens
  CDR3 for beta chain variable domain of TCR clone 167182 (TRBV25-1, TRBJ1-4)
CASSGGGQPEELFF

SEQ ID NO: 334365 - protein, 15 aa, Homo sapiens
  CDR3 for alpha chain variable domain of TCR clone 167183 (TRAV12-2, TRAJ16)
CAVNIVSGGGQKLLF

SEQ ID NO: 334366 - protein, 13 aa, Homo sapiens
  CDR3 for beta chain variable domain of TCR clone 167183 (TRBV29-1, TRBJ1-1)
CSVVHSLNTEAFF

SEQ ID NO: 334367 - protein, 13 aa, Homo sapiens
  CDR3 for alpha chain variable domain of TCR clone 167184 (TRAV2, TRAJ32)
CCVVGGATNKLIF

SEQ ID NO: 334368 - protein, 15 aa, Homo sapiens
  CDR3 for beta chain variable domain of TCR clone 167184 (TRBV12-4, TRBJ2-5)
CASSGTGQAQETQYF

SEQ ID NO: 334369 - protein, 10 aa, Homo sapiens
  CDR3 for alpha chain variable domain of TCR clone 167185 (TRAV12-3, TRAJ49)
CAMNDDQFYF

SEQ ID NO: 334370 - protein, 15 aa, Homo sapiens
  CDR3 for beta chain variable domain of TCR clone 167185 (TRBV7-2, TRBJ1-2)
CASSPMAGWNYGYTF

SEQ ID NO: 334371 - protein, 14 aa, Homo sapiens
  CDR3 for alpha chain variable domain of TCR clone 167186 (TRAV26-1, TRAJ40)
CIVRLLSGTYKYIF

SEQ ID NO: 334372 - protein, 15 aa, Homo sapiens
  CDR3 for beta chain variable domain of TCR clone 167186 (TRBV7-2, TRBJ1-1)
CASSFAGDRDTEAFF

SEQ ID NO: 334373 - protein, 22 aa, Homo sapiens
  CDR3 for alpha chain variable domain of TCR clone 167187 (TRAV8-4, TRAJ32)
CAAYMVVLQTSSSLELALCLLY

SEQ ID NO: 334374 - protein, 16 aa, Homo sapiens
  CDR3 for beta chain variable domain of TCR clone 167187 (TRBV27, TRBJ2-2)
CASSPLAAANTGELFF

SEQ ID NO: 334375 - protein, 15 aa, Homo sapiens
  CDR3 for alpha chain variable domain of TCR clone 167188 (TRAV27, TRAJ38)
CAGRFNAGNNRKLIW

SEQ ID NO: 334376 - protein, 13 aa, Homo sapiens
  CDR3 for beta chain variable domain of TCR clone 167188 (TRBV24-1, TRBJ2-2)
CATAEPNTGELFF

SEQ ID NO: 334377 - protein, 11 aa, Homo sapiens
  CDR3 for alpha chain variable domain of TCR clone 167189 (TRAV23/DV6, TRAJ20)
CPAKDDYKLSF

SEQ ID NO: 334378 - protein, 12 aa, Homo sapiens
  CDR3 for beta chain variable domain of TCR clone 167189 (TRBV3-1, TRBJ2-3)
CASSSGDRAEYF

SEQ ID NO: 334379 - protein, 19 aa, Homo sapiens
  CDR3 for alpha chain variable domain of TCR clone 167190 (TRAV1-2, TRAJ16)
CAVNRFSDGQKQRTRLAIP

SEQ ID NO: 334380 - protein, 15 aa, Homo sapiens
  CDR3 for beta chain variable domain of TCR clone 167190 (TRBV7-9, TRBJ1-6)
CASSSPGRGNSPLHF

SEQ ID NO: 334381 - protein, 12 aa, Homo sapiens
  CDR3 for alpha chain variable domain of TCR clone 167191 (TRAV23/DV6, TRAJ30)
CAASKGDDKIIF

SEQ ID NO: 334382 - protein, 15 aa, Homo sapiens
  CDR3 for beta chain variable domain of TCR clone 167191 (TRBV20-1, TRBJ2-7)
GSARDRVSGMDEQYF

SEQ ID NO: 334383 - protein, 15 aa, Homo sapiens
  CDR3 for alpha chain variable domain of TCR clone 167192 (TRAV21, TRAJ24)
CAARSSTDSWGKLQF

SEQ ID NO: 334384 - protein, 17 aa, Homo sapiens
  CDR3 for beta chain variable domain of TCR clone 167192 (TRBV18, TRBJ2-3)
CASSPFGDGGFTDTQYF

SEQ ID NO: 334385 - protein, 12 aa, Homo sapiens
  CDR3 for alpha chain variable domain of TCR clone 167193 (TRAV21, TRAJ20)
CAVRGNDYKLSF

SEQ ID NO: 334386 - protein, 14 aa, Homo sapiens
  CDR3 for beta chain variable domain of TCR clone 167193 (TRBV7-8, TRBJ2-7)
CASSQTQGADEQYV

SEQ ID NO: 334387 - protein, 14 aa, Homo sapiens
  CDR3 for alpha chain variable domain of TCR clone 167194 (TRAV8-3, TRAJ39)
CAVGADNAGNMLTF

SEQ ID NO: 334388 - protein, 17 aa, Homo sapiens
  CDR3 for beta chain variable domain of TCR clone 167194 (TRBV20-1, TRBJ2-1)
CSASSSGLAGSYNEQFF

SEQ ID NO: 334389 - protein, 17 aa, Homo sapiens
  CDR3 for alpha chain variable domain of TCR clone 167195 (TRAV4, TRAJ18)
CLVDERSVGSTLGRLYF

SEQ ID NO: 334390 - protein, 18 aa, Homo sapiens
  CDR3 for beta chain variable domain of TCR clone 167195 (TRBV11-2, TRBJ2-3)
CASSLGGASRGAPNTQYF

SEQ ID NO: 334391 - protein, 13 aa, Homo sapiens
  CDR3 for alpha chain variable domain of TCR clone 167196 (TRAV27, TRAJ41)
CAVEGNSGYALNF

SEQ ID NO: 334392 - protein, 14 aa, Homo sapiens
  CDR3 for beta chain variable domain of TCR clone 167196 (TRBV7-2, TRBJ1-1)
CASRFLTGTTEAFF

SEQ ID NO: 334393 - protein, 11 aa, Homo sapiens
  CDR3 for alpha chain variable domain of TCR clone 167197 (TRAV1-2, TRAJ20)
CAVANDYKLSF

SEQ ID NO: 334394 - protein, 18 aa, Homo sapiens
  CDR3 for beta chain variable domain of TCR clone 167197 (TRBV20-1, TRBJ2-6)
CSPETTPTHGSGANVLTF

SEQ ID NO: 334395 - protein, 14 aa, Homo sapiens
  CDR3 for alpha chain variable domain of TCR clone 167198 (TRAV13-1, TRAJ10)
CAASSTGGGNKLTF

SEQ ID NO: 334396 - protein, 15 aa, Homo sapiens
  CDR3 for beta chain variable domain of TCR clone 167198 (TRBV11-3, TRBJ1-3)
CASSLFGSSGNTIYF

SEQ ID NO: 334397 - protein, 16 aa, Homo sapiens
  CDR3 for alpha chain variable domain of TCR clone 167199 (TRAV30, TRAJ24)
CGTEIVDADSWGKFRF

SEQ ID NO: 334398 - protein, 14 aa, Homo sapiens
  CDR3 for beta chain variable domain of TCR clone 167199 (TRBV12-5, TRBJ2-5)
CASGSRTHQGTQYF

SEQ ID NO: 334399 - protein, 12 aa, Homo sapiens
  CDR3 for alpha chain variable domain of TCR clone 167200 (TRAV17, TRAJ20)
CATQSNDSKLSF

SEQ ID NO: 334400 - protein, 13 aa, Homo sapiens
  CDR3 for beta chain variable domain of TCR clone 167200 (TRBV10-3, TRBJ1-1)
CAIIPEGGTEAFF

SEQ ID NO: 334401 - protein, 16 aa, Homo sapiens
  CDR3 for alpha chain variable domain of TCR clone 167201 (TRAV8-3, TRAJ18)
CAVALDRGSTLGRLYF

SEQ ID NO: 334402 - protein, 15 aa, Homo sapiens
  CDR3 for beta chain variable domain of TCR clone 167201 (TRBV9, TRBJ1-6)
CASSVAGTGDSPLHF

SEQ ID NO: 334403 - protein, 14 aa, Homo sapiens
  CDR3 for alpha chain variable domain of TCR clone 167202 (TRAV4, TRAJ9)
CLVGSGTGGFKTIF

SEQ ID NO: 334404 - protein, 11 aa, Homo sapiens
  CDR3 for beta chain variable domain of TCR clone 167202 (TRBV11-2, TRBJ2-2)
CASSLPGELFF

SEQ ID NO: 334405 - protein, 14 aa, Homo sapiens
  CDR3 for alpha chain variable domain of TCR clone 167203 (TRAV35, TRAJ13)
CAGSPSGGYQKVTF

SEQ ID NO: 334406 - protein, 16 aa, Homo sapiens
  CDR3 for beta chain variable domain of TCR clone 167203 (TRBV19, TRBJ2-1)
CARSKAGPSSYNEQFF

SEQ ID NO: 334407 - protein, 12 aa, Homo sapiens
  CDR3 for alpha chain variable domain of TCR clone 167204 (TRAV12-3, TRAJ32)
CAGGGATNKLIF

SEQ ID NO: 334408 - protein, 17 aa, Homo sapiens
  CDR3 for beta chain variable domain of TCR clone 167204 (TRBV7-3, TRBJ2-3)
CASSPRGQGYGTDTQYF

SEQ ID NO: 334409 - protein, 13 aa, Homo sapiens
  CDR3 for alpha chain variable domain of TCR clone 167205 (TRAV4, TRAJ33)
CLVSDMNNYQLIW

SEQ ID NO: 334410 - protein, 14 aa, Homo sapiens
  CDR3 for beta chain variable domain of TCR clone 167205 (TRBV7-9, TRBJ1-1)
CASSLGGANTEAFF

SEQ ID NO: 334411 - protein, 15 aa, Homo sapiens
  CDR3 for alpha chain variable domain of TCR clone 167206 (TRAV13-1, TRAJ44)
CAASGGGCTASKLIF

SEQ ID NO: 334412 - protein, 12 aa, Homo sapiens
  CDR3 for beta chain variable domain of TCR clone 167206 (TRBV11-2, TRBJ2-2)
CASSLGGGELFF

SEQ ID NO: 334413 - protein, 12 aa, Homo sapiens
  CDR3 for alpha chain variable domain of TCR clone 167207 (TRAV2, TRAJ24)
CAATDSWGKFQF

SEQ ID NO: 334414 - protein, 15 aa, Homo sapiens
  CDR3 for beta chain variable domain of TCR clone 167207 (TRBV9, TRBJ1-6)
CASSVAGTGDSPLHF

SEQ ID NO: 334415 - protein, 15 aa, Homo sapiens
  CDR3 for alpha chain variable domain of TCR clone 167208 (TRAV21, TRAJ40)
CAVRPQTSGTYKYIF

SEQ ID NO: 334416 - protein, 12 aa, Homo sapiens
  CDR3 for beta chain variable domain of TCR clone 167208 (TRBV7-2, TRBJ2-2)
CQQLGSGRELFF

SEQ ID NO: 334417 - protein, 14 aa, Homo sapiens
  CDR3 for alpha chain variable domain of TCR clone 167209 (TRAV23/DV6, TRAJ4)
CAANLSGGYNKLIF

SEQ ID NO: 334418 - protein, 17 aa, Homo sapiens
  CDR3 for beta chain variable domain of TCR clone 167209 (TRBV4-1, TRBJ1-3)
CASSPRRGIRFGNTMYF

SEQ ID NO: 334419 - protein, 11 aa, Homo sapiens
  CDR3 for alpha chain variable domain of TCR clone 167210 (TRAV3, TRAJ21)
CAVGNFNKFYF

SEQ ID NO: 334420 - protein, 15 aa, Homo sapiens
  CDR3 for beta chain variable domain of TCR clone 167210 (TRBV9, TRBJ1-6)
CASSVAGTGDSTLHF

SEQ ID NO: 334421 - protein, 12 aa, Homo sapiens
  CDR3 for alpha chain variable domain of TCR clone 167211 (TRAV2, TRAJ34)
CAVDRNTDKLIF

SEQ ID NO: 334422 - protein, 14 aa, Homo sapiens
  CDR3 for beta chain variable domain of TCR clone 167211 (TRBV7-9, TRBJ2-1)
CASSDNSGYNEQFF

SEQ ID NO: 334423 - protein, 13 aa, Homo sapiens
  CDR3 for alpha chain variable domain of TCR clone 167212 (TRAV12-1, TRAJ31)
CVVNIRNNARLMF

SEQ ID NO: 334424 - protein, 14 aa, Homo sapiens
  CDR3 for beta chain variable domain of TCR clone 167212 (TRBV7-3, TRBJ1-1)
CASSLKGGNTEAFF

SEQ ID NO: 334425 - protein, 10 aa, Homo sapiens
  CDR3 for alpha chain variable domain of TCR clone 167213 (TRAV23/DV6, TRAJ57)
CAASSTLSQV

SEQ ID NO: 334426 - protein, 14 aa, Homo sapiens
  CDR3 for beta chain variable domain of TCR clone 167213 (TRBV20-1, TRBJ2-7)
CSAKRGRSSYEQYF

SEQ ID NO: 334427 - protein, 16 aa, Homo sapiens
  CDR3 for alpha chain variable domain of TCR clone 167214 (TRAV1-2, TRAJ10)
CAVRGVLKGGGNKLTF

SEQ ID NO: 334428 - protein, 13 aa, Homo sapiens
  CDR3 for beta chain variable domain of TCR clone 167214 (TRBV12-4, TRBJ1-1)
CASSPGTGFEAFF

SEQ ID NO: 334429 - protein, 16 aa, Homo sapiens
  CDR3 for alpha chain variable domain of TCR clone 167215 (TRAV16, TRAJ54)
CALSPPLIQGAQKLVF

SEQ ID NO: 334430 - protein, 14 aa, Homo sapiens
  CDR3 for beta chain variable domain of TCR clone 167215 (TRBV18, TRBJ2-7)
CASSPRGGAYEQYF

SEQ ID NO: 334431 - protein, 16 aa, Homo sapiens
  CDR3 for alpha chain variable domain of TCR clone 167216 (TRAV8-4, TRAJ9)
CAVTFNTRGFKNYLWS

SEQ ID NO: 334432 - protein, 15 aa, Homo sapiens
  CDR3 for beta chain variable domain of TCR clone 167216 (TRBV7-9, TRBJ2-2)
CASSPETGAGGELFF

SEQ ID NO: 334433 - protein, 17 aa, Homo sapiens
  CDR3 for alpha chain variable domain of TCR clone 167217 (TRAV3, TRAJ6)
CAVRDGPRAGGSYIPTF

SEQ ID NO: 334434 - protein, 14 aa, Homo sapiens
  CDR3 for beta chain variable domain of TCR clone 167217 (TRBV18, TRBJ2-1)
CASSPQGRFNEQFF

SEQ ID NO: 334435 - protein, 13 aa, Homo sapiens
  CDR3 for alpha chain variable domain of TCR clone 167218 (TRAV13-1, TRAJ4)
CAASIGGYNKLIF

SEQ ID NO: 334436 - protein, 16 aa, Homo sapiens
  CDR3 for beta chain variable domain of TCR clone 167218 (TRBV20-1, TRBJ2-1)
CSAPWLAGSYSDEQFF

SEQ ID NO: 334437 - protein, 14 aa, Homo sapiens
  CDR3 for alpha chain variable domain of TCR clone 167219 (TRAV4, TRAJ17)
CLVGDLAAGNKLTF

SEQ ID NO: 334438 - protein, 14 aa, Homo sapiens
  CDR3 for beta chain variable domain of TCR clone 167219 (TRBV4-1, TRBJ2-7)
CASSPVAGGDEQYF

SEQ ID NO: 334439 - protein, 14 aa, Homo sapiens
  CDR3 for alpha chain variable domain of TCR clone 167220 (TRAV12-2, TRAJ13)
CAVKKTGGYQKVTF

SEQ ID NO: 334440 - protein, 13 aa, Homo sapiens
  CDR3 for beta chain variable domain of TCR clone 167220 (TRBV12-5, TRBJ2-1)
CASGLGRGNEQFF

SEQ ID NO: 334441 - protein, 12 aa, Homo sapiens
  CDR3 for alpha chain variable domain of TCR clone 167221 (TRAV29/DV5, TRAJ30)
CAASARDDKIIF

SEQ ID NO: 334442 - protein, 13 aa, Homo sapiens
  CDR3 for beta chain variable domain of TCR clone 167221 (TRBV12-4, TRBJ1-1)
CASSFGEDTEAFF

SEQ ID NO: 334443 - protein, 18 aa, Homo sapiens
  CDR3 for alpha chain variable domain of TCR clone 167222 (TRAV21, TRAJ52)
CAVRPSPAGGTSYGKLTF

SEQ ID NO: 334444 - protein, 13 aa, Homo sapiens
  CDR3 for beta chain variable domain of TCR clone 167222 (TRBV14, TRBJ2-7)
CASSQDRRYEQYF

SEQ ID NO: 334445 - protein, 13 aa, Homo sapiens
  CDR3 for alpha chain variable domain of TCR clone 167223 (TRAV12-2, TRAJ24)
CAVATDSWGKFQF

SEQ ID NO: 334446 - protein, 14 aa, Homo sapiens
  CDR3 for beta chain variable domain of TCR clone 167223 (TRBV7-6, TRBJ2-3)
CASSLGTVTDTQYF

SEQ ID NO: 334447 - protein, 16 aa, Homo sapiens
  CDR3 for alpha chain variable domain of TCR clone 167224 (TRAV13-1, TRAJ45)
CAAMGSRKGGADGLTF

SEQ ID NO: 334448 - protein, 13 aa, Homo sapiens
  CDR3 for beta chain variable domain of TCR clone 167224 (TRBV12-4, TRBJ2-5)
CASRKRGKETQYF

SEQ ID NO: 334449 - protein, 14 aa, Homo sapiens
  CDR3 for alpha chain variable domain of TCR clone 167225 (TRAV2, TRAJ20)
CAVEDGTNDYKLSF

SEQ ID NO: 334450 - protein, 13 aa, Homo sapiens
  CDR3 for beta chain variable domain of TCR clone 167225 (TRBV7-2, TRBJ1-1)
CASSRNTNTEAFS

SEQ ID NO: 334451 - protein, 16 aa, Homo sapiens
  CDR3 for alpha chain variable domain of TCR clone 167226 (TRAV1-2, TRAJ42)
CLLPLCGGGSQGNLIF

SEQ ID NO: 334452 - protein, 12 aa, Homo sapiens
  CDR3 for beta chain variable domain of TCR clone 167226 (TRBV24-1, TRBJ1-1)
CATSDSDRGAFF

SEQ ID NO: 334453 - protein, 13 aa, Homo sapiens
  CDR3 for alpha chain variable domain of TCR clone 167227 (TRAV13-1, TRAJ21)
CAASIYNFNKLYF

SEQ ID NO: 334454 - protein, 13 aa, Homo sapiens
  CDR3 for beta chain variable domain of TCR clone 167227 (TRBV27, TRBJ1-4)
CASSVMGDEKLFF

SEQ ID NO: 334455 - protein, 14 aa, Homo sapiens
  CDR3 for alpha chain variable domain of TCR clone 167228 (TRAV17, TRAJ31)
CATVPLSGYARLMF

SEQ ID NO: 334456 - protein, 15 aa, Homo sapiens
  CDR3 for beta chain variable domain of TCR clone 167228 (TRBV15, TRBJ2-2)
CATSGTGGRVGELFI

SEQ ID NO: 334457 - protein, 15 aa, Homo sapiens
  CDR3 for alpha chain variable domain of TCR clone 167229 (TRAV8-3, TRAJ45)
CASSYSGGGADGLNF

SEQ ID NO: 334458 - protein, 13 aa, Homo sapiens
  CDR3 for beta chain variable domain of TCR clone 167229 (TRBV10-3, TRBJ2-7)
CASKLAVSYEQYF

SEQ ID NO: 334459 - protein, 12 aa, Homo sapiens
  CDR3 for alpha chain variable domain of TCR clone 167230 (TRAV8-3, TRAJ26)
CSGDNYGQNFVF

SEQ ID NO: 334460 - protein, 12 aa, Homo sapiens
  CDR3 for beta chain variable domain of TCR clone 167230 (TRBV11-2, TRBJ2-1)
CASSPGNNEQFF

SEQ ID NO: 334461 - protein, 13 aa, Homo sapiens
  CDR3 for alpha chain variable domain of TCR clone 167231 (TRAV23/DV6, TRAJ47)
CAASSQYGNKLVF

SEQ ID NO: 334462 - protein, 15 aa, Homo sapiens
  CDR3 for beta chain variable domain of TCR clone 167231 (TRBV7-3, TRBJ2-1)
CSSSLDGNSYNEQFF

SEQ ID NO: 334463 - protein, 11 aa, Homo sapiens
  CDR3 for alpha chain variable domain of TCR clone 167232 (TRAV12-1, TRAJ21)
CVVNNFNKFYF

SEQ ID NO: 334464 - protein, 16 aa, Homo sapiens
  CDR3 for beta chain variable domain of TCR clone 167232 (TRBV19, TRBJ1-2)
CASSIGLFRDAYGYTF

SEQ ID NO: 334465 - protein, 16 aa, Homo sapiens
  CDR3 for alpha chain variable domain of TCR clone 167233 (TRAV12-3, TRAJ53)
CATSPGSGGSNYKLTF

SEQ ID NO: 334466 - protein, 11 aa, Homo sapiens
  CDR3 for beta chain variable domain of TCR clone 167233 (TRBV29-1, TRBJ2-5)
RSEDRTGTQYF

SEQ ID NO: 334467 - protein, 13 aa, Homo sapiens
  CDR3 for alpha chain variable domain of TCR clone 167234 (TRAV8-4, TRAJ48)
CAVILFGNEKLTF

SEQ ID NO: 334468 - protein, 15 aa, Homo sapiens
  CDR3 for beta chain variable domain of TCR clone 167234 (TRBV20-1, TRBJ2-7)
CSARKGLAESYEQYF

SEQ ID NO: 334469 - protein, 17 aa, Homo sapiens
  CDR3 for alpha chain variable domain of TCR clone 167235 (TRAV4, TRAJ13)
CLVGVQGSSGGYQKVPF

SEQ ID NO: 334470 - protein, 18 aa, Homo sapiens
  CDR3 for beta chain variable domain of TCR clone 167235 (TRBV15, TRBJ2-3)
CATSRDGARSWDTDTQYF

SEQ ID NO: 334471 - protein, 16 aa, Homo sapiens
  CDR3 for alpha chain variable domain of TCR clone 167236 (TRAV17, TRAJ54)
CATDSDIIQGAQKLVF

SEQ ID NO: 334472 - protein, 13 aa, Homo sapiens
  CDR3 for beta chain variable domain of TCR clone 167236 (TRBV6-1, TRBJ1-1)
CASSRQGNTEAFF

SEQ ID NO: 334473 - protein, 10 aa, Homo sapiens
  CDR3 for alpha chain variable domain of TCR clone 167237 (TRAV23/DV6, TRAJ57)
CAASSTLSQG

SEQ ID NO: 334474 - protein, 14 aa, Homo sapiens
  CDR3 for beta chain variable domain of TCR clone 167237 (TRBV25-1, TRBJ1-1)
CASTHLGGNNEDFF

SEQ ID NO: 334475 - protein, 13 aa, Homo sapiens
  CDR3 for alpha chain variable domain of TCR clone 167238 (TRAV17, TRAJ9)
CATDYTGGFKTIF

SEQ ID NO: 334476 - protein, 13 aa, Homo sapiens
  CDR3 for beta chain variable domain of TCR clone 167238 (TRBV10-3, TRBJ2-7)
CASSEKGGYKQYF

SEQ ID NO: 334477 - protein, 13 aa, Homo sapiens
  CDR3 for alpha chain variable domain of TCR clone 167239 (TRAV12-2, TRAJ20)
CAVYPSNDYKLSF

SEQ ID NO: 334478 - protein, 15 aa, Homo sapiens
  CDR3 for beta chain variable domain of TCR clone 167239 (TRBV27, TRBJ2-5)
CASSLYPRVGETQYF

SEQ ID NO: 334479 - protein, 13 aa, Homo sapiens
  CDR3 for alpha chain variable domain of TCR clone 167240 (TRAV13-2, TRAJ53)
CAENMGSNYKLTF

SEQ ID NO: 334480 - protein, 16 aa, Homo sapiens
  CDR3 for beta chain variable domain of TCR clone 167240 (TRBV9, TRBJ2-2)
CASSAMGKGNTGELFF

SEQ ID NO: 334481 - protein, 12 aa, Homo sapiens
  CDR3 for alpha chain variable domain of TCR clone 167241 (TRAV26-1, TRAJ43)
CIVRPRGDDMRF

SEQ ID NO: 334482 - protein, 16 aa, Homo sapiens
  CDR3 for beta chain variable domain of TCR clone 167241 (TRBV3-1, TRBJ2-1)
CARSQGGRRSFDEQFF

SEQ ID NO: 334483 - protein, 10 aa, Homo sapiens
  CDR3 for alpha chain variable domain of TCR clone 167242 (TRAV16, TRAJ22)
SAMYLRQLTF

SEQ ID NO: 334484 - protein, 15 aa, Homo sapiens
  CDR3 for beta chain variable domain of TCR clone 167242 (TRBV7-9, TRBJ1-6)
CASSPPGRGNPPLHF

SEQ ID NO: 334485 - protein, 16 aa, Homo sapiens
  CDR3 for alpha chain variable domain of TCR clone 167243 (TRAV16, TRAJ52)
CAVSAAGGTSYGKLTF

SEQ ID NO: 334486 - protein, 13 aa, Homo sapiens
  CDR3 for beta chain variable domain of TCR clone 167243 (TRBV3-1, TRBJ1-5)
CASSQFGDQPQHF

SEQ ID NO: 334487 - protein, 12 aa, Homo sapiens
  CDR3 for alpha chain variable domain of TCR clone 167244 (TRAV13-2, TRAJ37)
CAEKGNTGKLIF

SEQ ID NO: 334488 - protein, 14 aa, Homo sapiens
  CDR3 for beta chain variable domain of TCR clone 167244 (TRBV20-1, TRBJ2-1)
CSAQIGGSANEQFF

SEQ ID NO: 334489 - protein, 12 aa, Homo sapiens
  CDR3 for alpha chain variable domain of TCR clone 167245 (TRAV36/DV7, TRAJ54)
CAVVRGAQKLVF

SEQ ID NO: 334490 - protein, 17 aa, Homo sapiens
  CDR3 for beta chain variable domain of TCR clone 167245 (TRBV27, TRBJ2-3)
CASSFFPPNTSTDTQYF

SEQ ID NO: 334491 - protein, 12 aa, Homo sapiens
  CDR3 for alpha chain variable domain of TCR clone 167246 (TRAV12-2, TRAJ43)
CAVNVNNNDMRF

SEQ ID NO: 334492 - protein, 15 aa, Homo sapiens
  CDR3 for beta chain variable domain of TCR clone 167246 (TRBV5-1, TRBJ2-1)
CASSPPRAPYNEQFF

SEQ ID NO: 334493 - protein, 14 aa, Homo sapiens
  CDR3 for alpha chain variable domain of TCR clone 167247 (TRAV35, TRAJ42)
CAGRYGGSQGNLIF

SEQ ID NO: 334494 - protein, 15 aa, Homo sapiens
  CDR3 for beta chain variable domain of TCR clone 167247 (TRBV7-9, TRBJ2-1)
CASSLGGGRANEQCF

SEQ ID NO: 334495 - protein, 16 aa, Homo sapiens
  CDR3 for alpha chain variable domain of TCR clone 167248 (TRAV17, TRAJ53)
CATDGGSGGSNYKLTF

SEQ ID NO: 334496 - protein, 14 aa, Homo sapiens
  CDR3 for beta chain variable domain of TCR clone 167248 (TRBV25-1, TRBJ1-1)
CASTHLGGNTEAFF

SEQ ID NO: 334497 - protein, 14 aa, Homo sapiens
  CDR3 for alpha chain variable domain of TCR clone 167249 (TRAV12-2, TRAJ13)
CAVKKTGGYQKVTF

SEQ ID NO: 334498 - protein, 13 aa, Homo sapiens
  CDR3 for beta chain variable domain of TCR clone 167249 (TRBV7-9, TRBJ1-2)
CASSLKQNYGDTF

SEQ ID NO: 334499 - protein, 16 aa, Homo sapiens
  CDR3 for alpha chain variable domain of TCR clone 167250 (TRAV3, TRAJ37)
CAVRGKGFGNTGKLIF

SEQ ID NO: 334500 - protein, 12 aa, Homo sapiens
  CDR3 for beta chain variable domain of TCR clone 167250 (TRBV11-2, TRBJ2-2)
CASSLGGGELFF

SEQ ID NO: 334501 - protein, 14 aa, Homo sapiens
  CDR3 for alpha chain variable domain of TCR clone 167251 (TRAV1-2, TRAJ16)
CAVNRFSDVQKLLF

SEQ ID NO: 334502 - protein, 13 aa, Homo sapiens
  CDR3 for beta chain variable domain of TCR clone 167251 (TRBV18, TRBJ2-5)
CASSPAGKETQYF

SEQ ID NO: 334503 - protein, 14 aa, Homo sapiens
  CDR3 for alpha chain variable domain of TCR clone 167252 (TRAV20, TRAJ29)
CAVQAWVGNTPLDF

SEQ ID NO: 334504 - protein, 14 aa, Homo sapiens
  CDR3 for beta chain variable domain of TCR clone 167252 (TRBV11-2, TRBJ2-3)
CASSRLARTDTQYF

SEQ ID NO: 334505 - protein, 16 aa, Homo sapiens
  CDR3 for alpha chain variable domain of TCR clone 167253 (TRAV16, TRAJ52)
CALSAAGGISYGKLTF

SEQ ID NO: 334506 - protein, 12 aa, Homo sapiens
  CDR3 for beta chain variable domain of TCR clone 167253 (TRBV12-4, TRBJ1-3)
CASSFSGNTIYF

SEQ ID NO: 334507 - protein, 13 aa, Homo sapiens
  CDR3 for alpha chain variable domain of TCR clone 167254 (TRAV21, TRAJ37)
CDVSSGNTGKLIF

SEQ ID NO: 334508 - protein, 17 aa, Homo sapiens
  CDR3 for beta chain variable domain of TCR clone 167254 (TRBV5-1, TRBJ2-5)
CASSRLGLAANQETQYF

SEQ ID NO: 334509 - protein, 17 aa, Homo sapiens
  CDR3 for alpha chain variable domain of TCR clone 167255 (TRAV13-1, TRAJ28)
CAASPPYSGAGSYQLTI

SEQ ID NO: 334510 - protein, 14 aa, Homo sapiens
  CDR3 for beta chain variable domain of TCR clone 167255 (TRBV7-8, TRBJ2-3)
CASSLEAGTDTQYF

SEQ ID NO: 334511 - protein, 13 aa, Homo sapiens
  CDR3 for alpha chain variable domain of TCR clone 167256 (TRAV2, TRAJ40)
CAVVTSGTYKYIF

SEQ ID NO: 334512 - protein, 13 aa, Homo sapiens
  CDR3 for beta chain variable domain of TCR clone 167256 (TRBV19, TRBJ2-5)
CASRDSRRETQYF

SEQ ID NO: 334513 - protein, 13 aa, Homo sapiens
  CDR3 for alpha chain variable domain of TCR clone 167257 (TRAV1-2, TRAJ9)
CAALNTGGFKTIF

SEQ ID NO: 334514 - protein, 14 aa, Homo sapiens
  CDR3 for beta chain variable domain of TCR clone 167257 (TRBV13, TRBJ2-3)
CASSSGSPTDTQYC

SEQ ID NO: 334515 - protein, 14 aa, Homo sapiens
  CDR3 for alpha chain variable domain of TCR clone 167258 (TRAV1-2, TRAJ16)
CAVNRFSDGQKLLF

SEQ ID NO: 334516 - protein, 11 aa, Homo sapiens
  CDR3 for beta chain variable domain of TCR clone 167258 (TRBV12-4, TRBJ2-3)
CASTATDTQYF

SEQ ID NO: 334517 - protein, 15 aa, Homo sapiens
  CDR3 for alpha chain variable domain of TCR clone 167259 (TRAV13-1, TRAJ44)
CAASRGGGTASKLTF

SEQ ID NO: 334518 - protein, 16 aa, Homo sapiens
  CDR3 for beta chain variable domain of TCR clone 167259 (TRBV19, TRBJ2-1)
CASSKAGPSSYNEQFF

SEQ ID NO: 334519 - protein, 15 aa, Homo sapiens
  CDR3 for alpha chain variable domain of TCR clone 167260 (TRAV38-1, TRAJ28)
CAFMNTGAGSYQLTF

SEQ ID NO: 334520 - protein, 16 aa, Homo sapiens
  CDR3 for beta chain variable domain of TCR clone 167260 (TRBV7-3, TRBJ2-1)
CASSLGAISSYNEQFF

SEQ ID NO: 334521 - protein, 14 aa, Homo sapiens
  CDR3 for alpha chain variable domain of TCR clone 167261 (TRAV12-2, TRAJ36)
CAVNLPTGANNLFF

SEQ ID NO: 334522 - protein, 13 aa, Homo sapiens
  CDR3 for beta chain variable domain of TCR clone 167261 (TRBV20-1, TRBJ1-6)
CSAPTGLGSPLHF

SEQ ID NO: 334523 - protein, 17 aa, Homo sapiens
  CDR3 for alpha chain variable domain of TCR clone 167262 (TRAV26-1, TRAJ53)
CIGRVDDSGGSNYKLTF

SEQ ID NO: 334524 - protein, 15 aa, Homo sapiens
  CDR3 for beta chain variable domain of TCR clone 167262 (TRBV20-1, TRBJ2-7)
CSARVPAAYFYEQYF

SEQ ID NO: 334525 - protein, 14 aa, Homo sapiens
  CDR3 for alpha chain variable domain of TCR clone 167263 (TRAV12-2, TRAJ9)
CAVRGQTGGFKTIF

SEQ ID NO: 334526 - protein, 16 aa, Homo sapiens
  CDR3 for beta chain variable domain of TCR clone 167263 (TRBV4-1, TRBJ2-5)
CASSQAIAASSATQYF

SEQ ID NO: 334527 - protein, 13 aa, Homo sapiens
  CDR3 for alpha chain variable domain of TCR clone 167264 (TRAV3, TRAJ20)
CAARDTPRYKLSF

SEQ ID NO: 334528 - protein, 16 aa, Homo sapiens
  CDR3 for beta chain variable domain of TCR clone 167264 (TRBV20-1, TRBJ2-7)
CSARAPGRALSYEQYF

SEQ ID NO: 334529 - protein, 13 aa, Homo sapiens
  CDR3 for alpha chain variable domain of TCR clone 167265 (TRAV12-3, TRAJ33)
CAMSVNRNYKLIW

SEQ ID NO: 334530 - protein, 12 aa, Homo sapiens
  CDR3 for beta chain variable domain of TCR clone 167265 (TRBV12-4, TRBJ1-2)
CASSFIWLHLRF

SEQ ID NO: 334531 - protein, 11 aa, Homo sapiens
  CDR3 for alpha chain variable domain of TCR clone 167266 (TRAV3, TRAJ21)
CAVGNFNKFYF

SEQ ID NO: 334532 - protein, 13 aa, Homo sapiens
  CDR3 for beta chain variable domain of TCR clone 167266 (TRBV28, TRBJ2-5)
CAGVSRGEETQYF

SEQ ID NO: 334533 - protein, 14 aa, Homo sapiens
  CDR3 for alpha chain variable domain of TCR clone 167267 (TRAV14/DV4, TRAJ58)
CAMMKETSGSRLTF

SEQ ID NO: 334534 - protein, 14 aa, Homo sapiens
  CDR3 for beta chain variable domain of TCR clone 167267 (TRBV2, TRBJ2-1)
CASRTGSSYNEQFF

SEQ ID NO: 334535 - protein, 14 aa, Homo sapiens
  CDR3 for alpha chain variable domain of TCR clone 167268 (TRAV8-1, TRAJ36)
CAVNSPTGANNLFF

SEQ ID NO: 334536 - protein, 14 aa, Homo sapiens
  CDR3 for beta chain variable domain of TCR clone 167268 (TRBV7-2, TRBJ2-3)
CSSLEQGGTDTQYF

SEQ ID NO: 334537 - protein, 14 aa, Homo sapiens
  CDR3 for alpha chain variable domain of TCR clone 167269 (TRAV8-3, TRAJ27)
CAGGRNTNAGKSTF

SEQ ID NO: 334538 - protein, 15 aa, Homo sapiens
  CDR3 for beta chain variable domain of TCR clone 167269 (TRBV11-3, TRBJ2-5)
YASSLRGRVQETQYF

SEQ ID NO: 334539 - protein, 15 aa, Homo sapiens
  CDR3 for alpha chain variable domain of TCR clone 167270 (TRAV21, TRAJ53)
CATLNSGGSNYKLTF

SEQ ID NO: 334540 - protein, 18 aa, Homo sapiens
  CDR3 for beta chain variable domain of TCR clone 167270 (TRBV7-9, TRBJ2-7)
CASSRTTSGSRTWYEQYF

SEQ ID NO: 334541 - protein, 13 aa, Homo sapiens
  CDR3 for alpha chain variable domain of TCR clone 167271 (TRAV13-1, TRAJ5)
CAARVTGRSALTF

SEQ ID NO: 334542 - protein, 15 aa, Homo sapiens
  CDR3 for beta chain variable domain of TCR clone 167271 (TRBV7-2, TRBJ1-2)
CASSPRAGWNCGYTF

SEQ ID NO: 334543 - protein, 16 aa, Homo sapiens
  CDR3 for alpha chain variable domain of TCR clone 167272 (TRAV12-2, TRAJ10)
CAVNRVPTGGGKKLTF

SEQ ID NO: 334544 - protein, 12 aa, Homo sapiens
  CDR3 for beta chain variable domain of TCR clone 167272 (TRBV28, TRBJ2-7)
CASSFSSYEQCF

SEQ ID NO: 334545 - protein, 15 aa, Homo sapiens
  CDR3 for alpha chain variable domain of TCR clone 167273 (TRAV23/DV6, TRAJ30)
CAASSQESRDDKIIF

SEQ ID NO: 334546 - protein, 17 aa, Homo sapiens
  CDR3 for beta chain variable domain of TCR clone 167273 (TRBV4-3, TRBJ2-1)
CASSRFSSGRASGEQFF

SEQ ID NO: 334547 - protein, 13 aa, Homo sapiens
  CDR3 for alpha chain variable domain of TCR clone 167274 (TRAV8-2, TRAJ13)
CVVSDLRYQKVTF

SEQ ID NO: 334548 - protein, 15 aa, Homo sapiens
  CDR3 for beta chain variable domain of TCR clone 167274 (TRBV9, TRBJ2-1)
CASSLAGSSYNEQFF

SEQ ID NO: 334549 - protein, 13 aa, Homo sapiens
  CDR3 for alpha chain variable domain of TCR clone 167275 (TRAV1-2, TRAJ9)
CAALNTGGFKTIF

SEQ ID NO: 334550 - protein, 16 aa, Homo sapiens
  CDR3 for beta chain variable domain of TCR clone 167275 (TRBV7-2, TRBJ2-3)
CASSLVALYSTDTQYF

SEQ ID NO: 334551 - protein, 13 aa, Homo sapiens
  CDR3 for alpha chain variable domain of TCR clone 167276 (TRAV13-2, TRAJ48)
CAEMGFGNGKLTF

SEQ ID NO: 334552 - protein, 15 aa, Homo sapiens
  CDR3 for beta chain variable domain of TCR clone 167276 (TRBV7-9, TRBJ1-6)
CASSSPGRGNSPLHF

SEQ ID NO: 334553 - protein, 17 aa, Homo sapiens
  CDR3 for alpha chain variable domain of TCR clone 167277 (TRAV3, TRAJ12)
CAVRDGGRMDSSYKLIF

SEQ ID NO: 334554 - protein, 13 aa, Homo sapiens
  CDR3 for beta chain variable domain of TCR clone 167277 (TRBV15, TRBJ1-6)
CATSGGLHSPLHF

SEQ ID NO: 334555 - protein, 11 aa, Homo sapiens
  CDR3 for alpha chain variable domain of TCR clone 167278 (TRAV4, TRAJ23)
CLVAPGGKLIF

SEQ ID NO: 334556 - protein, 15 aa, Homo sapiens
  CDR3 for beta chain variable domain of TCR clone 167278 (TRBV7-2, TRBJ2-1)
CASSFQADEFNEQFF

SEQ ID NO: 334557 - protein, 14 aa, Homo sapiens
  CDR3 for alpha chain variable domain of TCR clone 167279 (TRAV12-2, TRAJ13)
CAVQTTGGYQKVTF

SEQ ID NO: 334558 - protein, 15 aa, Homo sapiens
  CDR3 for beta chain variable domain of TCR clone 167279 (TRBV27, TRBJ2-1)
CASSNGGGSSNEQFF

SEQ ID NO: 334559 - protein, 15 aa, Homo sapiens
  CDR3 for alpha chain variable domain of TCR clone 167280 (TRAV13-1, TRAJ32)
CAASIYGGATDKLIF

SEQ ID NO: 334560 - protein, 17 aa, Homo sapiens
  CDR3 for beta chain variable domain of TCR clone 167280 (TRBV7-3, TRBJ2-5)
CASSLGSGRSGSETQYF

SEQ ID NO: 334561 - protein, 10 aa, Homo sapiens
  CDR3 for alpha chain variable domain of TCR clone 167281 (TRAV12-3, TRAJ49)
RAMNDDQFYF

SEQ ID NO: 334562 - protein, 13 aa, Homo sapiens
  CDR3 for beta chain variable domain of TCR clone 167281 (TRBV12-4, TRBJ1-1)
CASSPGTGFEAFF

SEQ ID NO: 334563 - protein, 14 aa, Homo sapiens
  CDR3 for alpha chain variable domain of TCR clone 167282 (TRAV1-2, TRAJ8)
CAVREDTGFQKLVF

SEQ ID NO: 334564 - protein, 15 aa, Homo sapiens
  CDR3 for beta chain variable domain of TCR clone 167282 (TRBV7-2, TRBJ2-7)
CASSLTGQGTYEQYF

SEQ ID NO: 334565 - protein, 16 aa, Homo sapiens
  CDR3 for alpha chain variable domain of TCR clone 167283 (TRAV12-3, TRAJ53)
CAMSVGSGGSNYKLTF

SEQ ID NO: 334566 - protein, 13 aa, Homo sapiens
  CDR3 for beta chain variable domain of TCR clone 167283 (TRBV7-9, TRBJ2-1)
CASSLDVGNEQFF

SEQ ID NO: 334567 - protein, 17 aa, Homo sapiens
  CDR3 for alpha chain variable domain of TCR clone 167284 (TRAV23/DV6, TRAJ57)
CSASSTLSQGGSEKLVF

SEQ ID NO: 334568 - protein, 14 aa, Homo sapiens
  CDR3 for beta chain variable domain of TCR clone 167284 (TRBV25-1, TRBJ1-1)
CASTHLGGKTEAFF

SEQ ID NO: 334569 - protein, 13 aa, Homo sapiens
  CDR3 for alpha chain variable domain of TCR clone 167285 (TRAV6, TRAJ16)
CALDDSDGQKLLF

SEQ ID NO: 334570 - protein, 16 aa, Homo sapiens
  CDR3 for beta chain variable domain of TCR clone 167285 (TRBV12-3, TRBJ1-6)
CASNLQGKGSPRHLGT

SEQ ID NO: 334571 - protein, 13 aa, Homo sapiens
  CDR3 for alpha chain variable domain of TCR clone 167286 (TRAV2, TRAJ40)
CAVVTSGTYKYIF

SEQ ID NO: 334572 - protein, 14 aa, Homo sapiens
  CDR3 for beta chain variable domain of TCR clone 167286 (TRBV7-9, TRBJ2-1)
SASSSMVGFGEQFF

SEQ ID NO: 334573 - protein, 12 aa, Homo sapiens
  CDR3 for alpha chain variable domain of TCR clone 167287 (TRAV20, TRAJ39)
CAVGNAGNMLTF

SEQ ID NO: 334574 - protein, 14 aa, Homo sapiens
  CDR3 for beta chain variable domain of TCR clone 167287 (TRBV19, TRBJ2-1)
CASPTFVLSGEQFF

SEQ ID NO: 334575 - protein, 14 aa, Homo sapiens
  CDR3 for alpha chain variable domain of TCR clone 167288 (TRAV20, TRAJ29)
CAVQAWVGNTPLVF

SEQ ID NO: 334576 - protein, 20 aa, Homo sapiens
  CDR3 for beta chain variable domain of TCR clone 167288 (TRBV28, TRBJ2-1)
CASTPIGRSPGLAGGNEQFF

SEQ ID NO: 334577 - protein, 15 aa, Homo sapiens
  CDR3 for alpha chain variable domain of TCR clone 167289 (TRAV8-4, TRAJ15)
CAVSDQVQAGTALIF

SEQ ID NO: 334578 - protein, 14 aa, Homo sapiens
  CDR3 for beta chain variable domain of TCR clone 167289 (TRBV7-2, TRBJ1-3)
CASSLSRSGNTIYF

SEQ ID NO: 334579 - protein, 15 aa, Homo sapiens
  CDR3 for alpha chain variable domain of TCR clone 167290 (TRAV12-2, TRAJ53)
RAVNGGGGSNYKLTF

SEQ ID NO: 334580 - protein, 15 aa, Homo sapiens
  CDR3 for beta chain variable domain of TCR clone 167290 (TRBV20-1, TRBJ2-7)
RSARDRVSGMDEQYF

SEQ ID NO: 334581 - protein, 11 aa, Homo sapiens
  CDR3 for alpha chain variable domain of TCR clone 167291 (TRAV2, TRAJ13)
CASGGYQKVTF

SEQ ID NO: 334582 - protein, 16 aa, Homo sapiens
  CDR3 for beta chain variable domain of TCR clone 167291 (TRBV12-5, TRBJ2-5)
CASGSRTSGNQETQYF

SEQ ID NO: 334583 - protein, 10 aa, Homo sapiens
  CDR3 for alpha chain variable domain of TCR clone 167292 (TRAV23/DV6, TRAJ57)
CAASSTLSQG

SEQ ID NO: 334584 - protein, 15 aa, Homo sapiens
  CDR3 for beta chain variable domain of TCR clone 167292 (TRBV28, TRBJ2-2)
CASTVAGANTGELFF

SEQ ID NO: 334585 - protein, 13 aa, Homo sapiens
  CDR3 for alpha chain variable domain of TCR clone 167293 (TRAV3, TRAJ27)
CAVRPLGAGKSTF

SEQ ID NO: 334586 - protein, 15 aa, Homo sapiens
  CDR3 for beta chain variable domain of TCR clone 167293 (TRBV20-1, TRBJ1-1)
CSASRGVTGNTEAFF

SEQ ID NO: 334587 - protein, 11 aa, Homo sapiens
  CDR3 for alpha chain variable domain of TCR clone 167294 (TRAV1-2, TRAJ20)
CTVSNDYKLSF

SEQ ID NO: 334588 - protein, 16 aa, Homo sapiens
  CDR3 for beta chain variable domain of TCR clone 167294 (TRBV29-1, TRBJ2-6)
CSVEDITYSGANVLTF

SEQ ID NO: 334589 - protein, 15 aa, Homo sapiens
  CDR3 for alpha chain variable domain of TCR clone 167295 (TRAV17, TRAJ13)
CATDAGSGRYQKVTF

SEQ ID NO: 334590 - protein, 17 aa, Homo sapiens
  CDR3 for beta chain variable domain of TCR clone 167295 (TRBV11-2, TRBJ2-1)
CASSLYPPGVEYNEQFF

SEQ ID NO: 334591 - protein, 12 aa, Homo sapiens
  CDR3 for alpha chain variable domain of TCR clone 167296 (TRAV12-3, TRAJ17)
CAMTLTGNKLTF

SEQ ID NO: 334592 - protein, 15 aa, Homo sapiens
  CDR3 for beta chain variable domain of TCR clone 167296 (TRBV5-7, TRBJ2-1)
CASSLVQGAYNEQFF

SEQ ID NO: 334593 - protein, 14 aa, Homo sapiens
  CDR3 for alpha chain variable domain of TCR clone 167297 (TRAV12-3, TRAJ9)
CAMSPNTGGFKTIF

SEQ ID NO: 334594 - protein, 13 aa, Homo sapiens
  CDR3 for beta chain variable domain of TCR clone 167297 (TRBV7-7, TRBJ2-5)
CASSRSGQETQYF

SEQ ID NO: 334595 - protein, 11 aa, Homo sapiens
  CDR3 for alpha chain variable domain of TCR clone 167298 (TRAV12-1, TRAJ30)
CGVNGQDKIIF

SEQ ID NO: 334596 - protein, 12 aa, Homo sapiens
  CDR3 for beta chain variable domain of TCR clone 167298 (TRBV27, TRBJ2-2)
CASKLFAGELFF

SEQ ID NO: 334597 - protein, 16 aa, Homo sapiens
  CDR3 for alpha chain variable domain of TCR clone 167299 (TRAV12-2, TRAJ28)
CAVNEYSGAGSYQLTF

SEQ ID NO: 334598 - protein, 14 aa, Homo sapiens
  CDR3 for beta chain variable domain of TCR clone 167299 (TRBV18, TRBJ2-3)
CACSLGGGSDTQYF

SEQ ID NO: 334599 - protein, 13 aa, Homo sapiens
  CDR3 for alpha chain variable domain of TCR clone 167300 (TRAV12-3, TRAJ6)
CANPSGGSYIPTF

SEQ ID NO: 334600 - protein, 14 aa, Homo sapiens
  CDR3 for beta chain variable domain of TCR clone 167300 (TRBV19, TRBJ1-1)
CATSRDRDATEAFF

SEQ ID NO: 334601 - protein, 14 aa, Homo sapiens
  CDR3 for alpha chain variable domain of TCR clone 167301 (TRAV12-2, TRAJ40)
GAVKIPSGTYKYIF

SEQ ID NO: 334602 - protein, 15 aa, Homo sapiens
  CDR3 for beta chain variable domain of TCR clone 167301 (TRBV20-1, TRBJ2-1)
CSARGIGGTYNEQFF

SEQ ID NO: 334603 - protein, 16 aa, Homo sapiens
  CDR3 for alpha chain variable domain of TCR clone 167302 (TRAV27, TRAJ53)
CAAPEGSGGSNYKLTF

SEQ ID NO: 334604 - protein, 15 aa, Homo sapiens
  CDR3 for beta chain variable domain of TCR clone 167302 (TRBV20-1, TRBJ1-1)
CSASRGVTGNTEAVF

SEQ ID NO: 334605 - protein, 16 aa, Homo sapiens
  CDR3 for alpha chain variable domain of TCR clone 167303 (TRAV30, TRAJ24)
CGTEIVDADSCGKFQF

SEQ ID NO: 334606 - protein, 16 aa, Homo sapiens
  CDR3 for beta chain variable domain of TCR clone 167303 (TRBV6-3, TRBJ1-1)
CASTDLGTVPNTEAFF

SEQ ID NO: 334607 - protein, 16 aa, Homo sapiens
  CDR3 for alpha chain variable domain of TCR clone 167304 (TRAV12-3, TRAJ53)
CAMSPGSGGGNYKLTF

SEQ ID NO: 334608 - protein, 17 aa, Homo sapiens
  CDR3 for beta chain variable domain of TCR clone 167304 (TRBV7-8, TRBJ1-2)
CASSLRPLQGHLYGYTF

SEQ ID NO: 334609 - protein, 14 aa, Homo sapiens
  CDR3 for alpha chain variable domain of TCR clone 167305 (TRAV8-1, TRAJ23)
WAVGTYNQGGKLIF

SEQ ID NO: 334610 - protein, 16 aa, Homo sapiens
  CDR3 for beta chain variable domain of TCR clone 167305 (TRBV18, TRBJ1-5)
CASSPSTGNSNQPQHS

SEQ ID NO: 334611 - protein, 12 aa, Homo sapiens
  CDR3 for alpha chain variable domain of TCR clone 167306 (TRAV12-3, TRAJ17)
CAMTLTGNKLTF

SEQ ID NO: 334612 - protein, 13 aa, Homo sapiens
  CDR3 for beta chain variable domain of TCR clone 167306 (TRBV7-2, TRBJ2-5)
CASSQTSVETQYF

SEQ ID NO: 334613 - protein, 16 aa, Homo sapiens
  CDR3 for alpha chain variable domain of TCR clone 167307 (TRAV12-1, TRAJ12)
CVVNTLLMDSSYKLIF

SEQ ID NO: 334614 - protein, 13 aa, Homo sapiens
  CDR3 for beta chain variable domain of TCR clone 167307 (TRBV11-2, TRBJ2-1)
CTSSSEAYNEQFF

SEQ ID NO: 334615 - protein, 13 aa, Homo sapiens
  CDR3 for alpha chain variable domain of TCR clone 167308 (TRAV21, TRAJ27)
CAARPGNAGKSTF

SEQ ID NO: 334616 - protein, 13 aa, Homo sapiens
  CDR3 for beta chain variable domain of TCR clone 167308 (TRBV6-6, TRBJ2-7)
CASSPKHLAEQYF

SEQ ID NO: 334617 - protein, 15 aa, Homo sapiens
  CDR3 for alpha chain variable domain of TCR clone 167309 (TRAV20, TRAJ53)
CAVQERGGSNYKLTF

SEQ ID NO: 334618 - protein, 12 aa, Homo sapiens
  CDR3 for beta chain variable domain of TCR clone 167309 (TRBV11-2, TRBJ2-2)
CASSLGGGELFF

SEQ ID NO: 334619 - protein, 15 aa, Homo sapiens
  CDR3 for alpha chain variable domain of TCR clone 167310 (TRAV13-1, TRAJ44)
CAASRNTGTASKLTF

SEQ ID NO: 334620 - protein, 14 aa, Homo sapiens
  CDR3 for beta chain variable domain of TCR clone 167310 (TRBV25-1, TRBJ1-1)
CASTHLGGNTEAFF

SEQ ID NO: 334621 - protein, 13 aa, Homo sapiens
  CDR3 for alpha chain variable domain of TCR clone 167311 (TRAV2, TRAJ20)
CAVEDPSEYKLSF

SEQ ID NO: 334622 - protein, 16 aa, Homo sapiens
  CDR3 for beta chain variable domain of TCR clone 167311 (TRBV25-1, TRBJ2-7)
CASSELTGGGIDEQYF

SEQ ID NO: 334623 - protein, 14 aa, Homo sapiens
  CDR3 for alpha chain variable domain of TCR clone 167312 (TRAV16, TRAJ32)
CALKSGGATNKLIF

SEQ ID NO: 334624 - protein, 12 aa, Homo sapiens
  CDR3 for beta chain variable domain of TCR clone 167312 (TRBV11-2, TRBJ2-2)
CASSLGGGELFF

SEQ ID NO: 334625 - protein, 17 aa, Homo sapiens
  CDR3 for alpha chain variable domain of TCR clone 167313 (TRAV27, TRAJ26)
FAGARAPLDNYGQNFVF

SEQ ID NO: 334626 - protein, 15 aa, Homo sapiens
  CDR3 for beta chain variable domain of TCR clone 167313 (TRBV11-2, TRBJ2-5)
CASSPRSGGLETQYF

SEQ ID NO: 334627 - protein, 10 aa, Homo sapiens
  CDR3 for alpha chain variable domain of TCR clone 167314 (TRAV26-1, TRAJ40)
CIAGTYKYTF

SEQ ID NO: 334628 - protein, 12 aa, Homo sapiens
  CDR3 for beta chain variable domain of TCR clone 167314 (TRBV7-9, TRBJ2-7)
CASSLEGYEQYF

SEQ ID NO: 334629 - protein, 14 aa, Homo sapiens
  CDR3 for alpha chain variable domain of TCR clone 167315 (TRAV38-2/DV8, TRAJ30)
CAYGGGDRDDKIIF

SEQ ID NO: 334630 - protein, 13 aa, Homo sapiens
  CDR3 for beta chain variable domain of TCR clone 167315 (TRBV25-1, TRBJ2-5)
CASSESGRETQYF

SEQ ID NO: 334631 - protein, 18 aa, Homo sapiens
  CDR3 for alpha chain variable domain of TCR clone 167316 (TRAV26-1, TRAJ23)
FIVRVGLEVWNHGGKLIF

SEQ ID NO: 334632 - protein, 16 aa, Homo sapiens
  CDR3 for beta chain variable domain of TCR clone 167316 (TRBV12-4, TRBJ2-5)
CASSFFVRGRQETQYF

SEQ ID NO: 334633 - protein, 13 aa, Homo sapiens
  CDR3 for alpha chain variable domain of TCR clone 167317 (TRAV21, TRAJ27)
CAARPGHAGKSTF

SEQ ID NO: 334634 - protein, 14 aa, Homo sapiens
  CDR3 for beta chain variable domain of TCR clone 167317 (TRBV7-6, TRBJ2-3)
CAGSLGTVTDTQYF

SEQ ID NO: 334635 - protein, 16 aa, Homo sapiens
  CDR3 for alpha chain variable domain of TCR clone 167318 (TRAV30, TRAJ24)
CGTEIVDADGWGKFQF

SEQ ID NO: 334636 - protein, 14 aa, Homo sapiens
  CDR3 for beta chain variable domain of TCR clone 167318 (TRBV7-6, TRBJ2-1)
CASSLGGGADEQFF

SEQ ID NO: 334637 - protein, 14 aa, Homo sapiens
  CDR3 for alpha chain variable domain of TCR clone 167319 (TRAV12-1, TRAJ26)
CVVKVSNYGQNFVF

SEQ ID NO: 334638 - protein, 17 aa, Homo sapiens
  CDR3 for beta chain variable domain of TCR clone 167319 (TRBV11-2, TRBJ2-6)
CASSQRDIFSGANVLTF

SEQ ID NO: 334639 - protein, 16 aa, Homo sapiens
  CDR3 for alpha chain variable domain of TCR clone 167320 (TRAV3, TRAJ28)
CAVLPRSGAGSYQLTF

SEQ ID NO: 334640 - protein, 12 aa, Homo sapiens
  CDR3 for beta chain variable domain of TCR clone 167320 (TRBV12-4, TRBJ2-5)
CSRLAVQETQYF

SEQ ID NO: 334641 - protein, 17 aa, Homo sapiens
  CDR3 for alpha chain variable domain of TCR clone 167321 (TRAV3, TRAJ6)
CAVRDGPRAGGSYIPTC

SEQ ID NO: 334642 - protein, 20 aa, Homo sapiens
  CDR3 for beta chain variable domain of TCR clone 167321 (TRBV28, TRBJ2-1)
CASTPIGRSPGLAGGNEQSF

SEQ ID NO: 334643 - protein, 15 aa, Homo sapiens
  CDR3 for alpha chain variable domain of TCR clone 167322 (TRAV26-1, TRAJ29)
CIVRVEGSGNKPLVF

SEQ ID NO: 334644 - protein, 12 aa, Homo sapiens
  CDR3 for beta chain variable domain of TCR clone 167322 (TRBV7-8, TRBJ2-7)
CASSLGDREQYF

SEQ ID NO: 334645 - protein, 14 aa, Homo sapiens
  CDR3 for alpha chain variable domain of TCR clone 167323 (TRAV20, TRAJ56)
CAVQFDGANSKLTF

SEQ ID NO: 334646 - protein, 19 aa, Homo sapiens
  CDR3 for beta chain variable domain of TCR clone 167323 (TRBV7-2, TRBJ2-3)
CASSFLSRNWGGGTDTQYF

SEQ ID NO: 334647 - protein, 16 aa, Homo sapiens
  CDR3 for alpha chain variable domain of TCR clone 167324 (TRAV38-2/DV8, TRAJ45)
CAYRGNSGGGADGLTF

SEQ ID NO: 334648 - protein, 16 aa, Homo sapiens
  CDR3 for beta chain variable domain of TCR clone 167324 (TRBV19, TRBJ2-2)
CASRSPGTGATGELFF

SEQ ID NO: 334649 - protein, 17 aa, Homo sapiens
  CDR3 for alpha chain variable domain of TCR clone 167325 (TRAV12-2, TRAJ52)
CAVNPYAGGTSYGKLTF

SEQ ID NO: 334650 - protein, 12 aa, Homo sapiens
  CDR3 for beta chain variable domain of TCR clone 167325 (TRBV28, TRBJ1-6)
CASLSVPGPLHF

SEQ ID NO: 334651 - protein, 16 aa, Homo sapiens
  CDR3 for alpha chain variable domain of TCR clone 167326 (TRAV22, TRAJ45)
CAVGRGKRGGADGLTF

SEQ ID NO: 334652 - protein, 11 aa, Homo sapiens
  CDR3 for beta chain variable domain of TCR clone 167326 (TRBV29-1, TRBJ2-5)
CSEDRTGTQYF

SEQ ID NO: 334653 - protein, 11 aa, Homo sapiens
  CDR3 for alpha chain variable domain of TCR clone 167327 (TRAV13-2, TRAJ20)
CADSNDYKLSF

SEQ ID NO: 334654 - protein, 13 aa, Homo sapiens
  CDR3 for beta chain variable domain of TCR clone 167327 (TRBV7-9, TRBJ2-3)
CASSPGSTDTQYF

SEQ ID NO: 334655 - protein, 13 aa, Homo sapiens
  CDR3 for alpha chain variable domain of TCR clone 167328 (TRAV13-1, TRAJ35)
CASKGGFGNVLHC

SEQ ID NO: 334656 - protein, 13 aa, Homo sapiens
  CDR3 for beta chain variable domain of TCR clone 167328 (TRBV7-3, TRBJ1-1)
CASSQDWGAEAFF

SEQ ID NO: 334657 - protein, 16 aa, Homo sapiens
  CDR3 for alpha chain variable domain of TCR clone 167329 (TRAV38-1, TRAJ34)
CAFMKHDETYTDKLIF

SEQ ID NO: 334658 - protein, 16 aa, Homo sapiens
  CDR3 for beta chain variable domain of TCR clone 167329 (TRBV7-3, TRBJ2-2)
CASSLKRGTLSGELFF

SEQ ID NO: 334659 - protein, 17 aa, Homo sapiens
  CDR3 for alpha chain variable domain of TCR clone 167330 (TRAV36/DV7, TRAJ52)
CALAQRAGGTSYGKLTF

SEQ ID NO: 334660 - protein, 17 aa, Homo sapiens
  CDR3 for beta chain variable domain of TCR clone 167330 (TRBV28, TRBJ2-5)
CASSTPEGDALQETQYF

SEQ ID NO: 334661 - protein, 14 aa, Homo sapiens
  CDR3 for alpha chain variable domain of TCR clone 167331 (TRAV2, TRAJ37)
CAVDFTSNTGKLIF

SEQ ID NO: 334662 - protein, 13 aa, Homo sapiens
  CDR3 for beta chain variable domain of TCR clone 167331 (TRBV27, TRBJ1-1)
CASSLSIGAEAFF

SEQ ID NO: 334663 - protein, 14 aa, Homo sapiens
  CDR3 for alpha chain variable domain of TCR clone 167332 (TRAV2, TRAJ9)
CAVEDRSGGFKTIF

SEQ ID NO: 334664 - protein, 15 aa, Homo sapiens
  CDR3 for beta chain variable domain of TCR clone 167332 (TRBV7-2, TRBJ1-5)
CASSLGRGAGQPQHF

SEQ ID NO: 334665 - protein, 12 aa, Homo sapiens
  CDR3 for alpha chain variable domain of TCR clone 167333 (TRAV17, TRAJ57)
CATDGGSENLVF

SEQ ID NO: 334666 - protein, 12 aa, Homo sapiens
  CDR3 for beta chain variable domain of TCR clone 167333 (TRBV29-1, TRBJ2-2)
CSVDKYTGELFF

SEQ ID NO: 334667 - protein, 13 aa, Homo sapiens
  CDR3 for alpha chain variable domain of TCR clone 167334 (TRAV35, TRAJ57)
CAGSQGGSEKLVF

SEQ ID NO: 334668 - protein, 14 aa, Homo sapiens
  CDR3 for beta chain variable domain of TCR clone 167334 (TRBV25-1, TRBJ1-1)
CASTHLGENTEAFF

SEQ ID NO: 334669 - protein, 13 aa, Homo sapiens
  CDR3 for alpha chain variable domain of TCR clone 167335 (TRAV35, TRAJ36)
CAGPRIGANNLFF

SEQ ID NO: 334670 - protein, 15 aa, Homo sapiens
  CDR3 for beta chain variable domain of TCR clone 167335 (TRBV28, TRBJ2-5)
WASSPPWSYQETQYF

SEQ ID NO: 334671 - protein, 11 aa, Homo sapiens
  CDR3 for alpha chain variable domain of TCR clone 167336 (TRAV12-3, TRAJ43)
CAMSVSNDMRF

SEQ ID NO: 334672 - protein, 12 aa, Homo sapiens
  CDR3 for beta chain variable domain of TCR clone 167336 (TRBV5-1, TRBJ2-7)
CASSFRGYEQYF

SEQ ID NO: 334673 - protein, 17 aa, Homo sapiens
  CDR3 for alpha chain variable domain of TCR clone 167337 (TRAV3, TRAJ42)
CAVRDRDYGGSQGNLIF

SEQ ID NO: 334674 - protein, 15 aa, Homo sapiens
  CDR3 for beta chain variable domain of TCR clone 167337 (TRBV2, TRBJ2-5)
CASSGTVAAGETQYF

SEQ ID NO: 334675 - protein, 12 aa, Homo sapiens
  CDR3 for alpha chain variable domain of TCR clone 167338 (TRAV13-2, TRAJ39)
CAENSERNMLTF

SEQ ID NO: 334676 - protein, 12 aa, Homo sapiens
  CDR3 for beta chain variable domain of TCR clone 167338 (TRBV18, TRBJ2-5)
CASSPSKETQYF

SEQ ID NO: 334677 - protein, 13 aa, Homo sapiens
  CDR3 for alpha chain variable domain of TCR clone 167339 (TRAV8-6, TRAJ8)
CAVSNTGFQQLGF

SEQ ID NO: 334678 - protein, 15 aa, Homo sapiens
  CDR3 for beta chain variable domain of TCR clone 167339 (TRBV28, TRBJ2-5)
CASSSGRTIQETQYF

SEQ ID NO: 334679 - protein, 14 aa, Homo sapiens
  CDR3 for alpha chain variable domain of TCR clone 167340 (TRAV1-1, TRAJ27)
CAVIYNTNAGKSTF

SEQ ID NO: 334680 - protein, 16 aa, Homo sapiens
  CDR3 for beta chain variable domain of TCR clone 167340 (TRBV28, TRBJ2-1)
CASSSPGLAKGDEQFF

SEQ ID NO: 334681 - protein, 15 aa, Homo sapiens
  CDR3 for alpha chain variable domain of TCR clone 167341 (TRAV21, TRAJ32)
CAVNSYGGATNKLIF

SEQ ID NO: 334682 - protein, 18 aa, Homo sapiens
  CDR3 for beta chain variable domain of TCR clone 167341 (TRBV7-9, TRBJ2-1)
YASSTGLAEGSSYNEQFF

SEQ ID NO: 334683 - protein, 14 aa, Homo sapiens
  CDR3 for alpha chain variable domain of TCR clone 167342 (TRAV23/DV6, TRAJ4)
CAAPSSGGYNKLIF

SEQ ID NO: 334684 - protein, 16 aa, Homo sapiens
  CDR3 for beta chain variable domain of TCR clone 167342 (TRBV19, TRBJ1-1)
CAIRFGGPVTGTEAFF

SEQ ID NO: 334685 - protein, 10 aa, Homo sapiens
  CDR3 for alpha chain variable domain of TCR clone 167343 (TRAV1-2, TRAJ23)
CAGQGGKLIF

SEQ ID NO: 334686 - protein, 12 aa, Homo sapiens
  CDR3 for beta chain variable domain of TCR clone 167343 (TRBV11-2, TRBJ2-1)
CASSPGNNGQFF

SEQ ID NO: 334687 - protein, 14 aa, Homo sapiens
  CDR3 for alpha chain variable domain of TCR clone 167344 (TRAV29/DV5, TRAJ36)
CAARRKTGANNLFF

SEQ ID NO: 334688 - protein, 14 aa, Homo sapiens
  CDR3 for beta chain variable domain of TCR clone 167344 (TRBV12-5, TRBJ2-5)
CASGSPTHQETQYF

SEQ ID NO: 334689 - protein, 15 aa, Homo sapiens
  CDR3 for alpha chain variable domain of TCR clone 167345 (TRAV26-1, TRAJ29)
FIFRVEGSGNTPLVF

SEQ ID NO: 334690 - protein, 15 aa, Homo sapiens
  CDR3 for beta chain variable domain of TCR clone 167345 (TRBV7-9, TRBJ1-5)
CASSQGHQPNQPQHF

SEQ ID NO: 334691 - protein, 14 aa, Homo sapiens
  CDR3 for alpha chain variable domain of TCR clone 167346 (TRAV29/DV5, TRAJ44)
CAAFLVGTASKLTF

SEQ ID NO: 334692 - protein, 15 aa, Homo sapiens
  CDR3 for beta chain variable domain of TCR clone 167346 (TRBV7-2, TRBJ2-1)
CASTHGTGIYNEQFF

SEQ ID NO: 334693 - protein, 16 aa, Homo sapiens
  CDR3 for alpha chain variable domain of TCR clone 167347 (TRAV3, TRAJ28)
CAVLPRSGAGSDQLTF

SEQ ID NO: 334694 - protein, 13 aa, Homo sapiens
  CDR3 for beta chain variable domain of TCR clone 167347 (TRBV12-4, TRBJ2-5)
CASRLAVQETQYF

SEQ ID NO: 334695 - protein, 13 aa, Homo sapiens
  CDR3 for alpha chain variable domain of TCR clone 167348 (TRAV13-1, TRAJ6)
CAASKGGGYIPTF

SEQ ID NO: 334696 - protein, 14 aa, Homo sapiens
  CDR3 for beta chain variable domain of TCR clone 167348 (TRBV7-2, TRBJ2-1)
CASSLGVGYNEQFF

SEQ ID NO: 334697 - protein, 13 aa, Homo sapiens
  CDR3 for alpha chain variable domain of TCR clone 167349 (TRAV14/DV4, TRAJ26)
CAMREPYGQNFVF

SEQ ID NO: 334698 - protein, 19 aa, Homo sapiens
  CDR3 for beta chain variable domain of TCR clone 167349 (TRBV13, TRBJ2-6)
CASSLVHRDRGAGANVLTF

SEQ ID NO: 334699 - protein, 16 aa, Homo sapiens
  CDR3 for alpha chain variable domain of TCR clone 167350 (TRAV19, TRAJ39)
CALSEPPNNAGNMLTF

SEQ ID NO: 334700 - protein, 12 aa, Homo sapiens
  CDR3 for beta chain variable domain of TCR clone 167350 (TRBV27, TRBJ2-1)
CASRGFYNEQFF

SEQ ID NO: 334701 - protein, 13 aa, Homo sapiens
  CDR3 for alpha chain variable domain of TCR clone 167351 (TRAV36/DV7, TRAJ37)
CAVFSSNTGKLIF

SEQ ID NO: 334702 - protein, 14 aa, Homo sapiens
  CDR3 for beta chain variable domain of TCR clone 167351 (TRBV6-1, TRBJ2-7)
CASNRARPDYEQYF

SEQ ID NO: 334703 - protein, 17 aa, Homo sapiens
  CDR3 for alpha chain variable domain of TCR clone 167352 (TRAV3, TRAJ6)
CAVRDGPRAGGSYLPTF

SEQ ID NO: 334704 - protein, 14 aa, Homo sapiens
  CDR3 for beta chain variable domain of TCR clone 167352 (TRBV7-2, TRBJ2-7)
CASSPKTSFHEQYF

SEQ ID NO: 334705 - protein, 13 aa, Homo sapiens
  CDR3 for alpha chain variable domain of TCR clone 167353 (TRAV13-1, TRAJ12)
CSKYMGSSYKLIF

SEQ ID NO: 334706 - protein, 14 aa, Homo sapiens
  CDR3 for beta chain variable domain of TCR clone 167353 (TRBV4-2, TRBJ2-1)
CASGLDRAYNEQFF

SEQ ID NO: 334707 - protein, 16 aa, Homo sapiens
  CDR3 for alpha chain variable domain of TCR clone 167354 (TRAV12-3, TRAJ53)
CAMSPGSGGSSYKLTL

SEQ ID NO: 334708 - protein, 11 aa, Homo sapiens
  CDR3 for beta chain variable domain of TCR clone 167354 (TRBV29-1, TRBJ2-5)
CSEDRTGTQYF

SEQ ID NO: 334709 - protein, 12 aa, Homo sapiens
  CDR3 for alpha chain variable domain of TCR clone 167355 (TRAV3, TRAJ26)
CAVRDYGQNFVF

SEQ ID NO: 334710 - protein, 14 aa, Homo sapiens
  CDR3 for beta chain variable domain of TCR clone 167355 (TRBV5-4, TRBJ1-1)
CASSLDSRRDEAFF

SEQ ID NO: 334711 - protein, 12 aa, Homo sapiens
  CDR3 for alpha chain variable domain of TCR clone 167356 (TRAV1-1, TRAJ8)
CAGGTGFQKLVF

SEQ ID NO: 334712 - protein, 13 aa, Homo sapiens
  CDR3 for beta chain variable domain of TCR clone 167356 (TRBV12-4, TRBJ1-1)
CASSPGTGFEAFF

SEQ ID NO: 334713 - protein, 13 aa, Homo sapiens
  CDR3 for alpha chain variable domain of TCR clone 167357 (TRAV26-2, TRAJ57)
CILSRGGSEKLVF

SEQ ID NO: 334714 - protein, 16 aa, Homo sapiens
  CDR3 for beta chain variable domain of TCR clone 167357 (TRBV18, TRBJ1-5)
CASSTRTGGGNQPQHF

SEQ ID NO: 334715 - protein, 14 aa, Homo sapiens
  CDR3 for alpha chain variable domain of TCR clone 167358 (TRAV1-2, TRAJ16)
CAVNRFSDGQELLF

SEQ ID NO: 334716 - protein, 20 aa, Homo sapiens
  CDR3 for beta chain variable domain of TCR clone 167358 (TRBV7-8, TRBJ2-2)
CASSHLFPGPTIHITGELFF

SEQ ID NO: 334717 - protein, 13 aa, Homo sapiens
  CDR3 for alpha chain variable domain of TCR clone 167359 (TRAV13-1, TRAJ42)
CAASELWSKPRKY

SEQ ID NO: 334718 - protein, 12 aa, Homo sapiens
  CDR3 for beta chain variable domain of TCR clone 167359 (TRBV7-9, TRBJ2-7)
CASSLEGYEQYF

SEQ ID NO: 334719 - protein, 14 aa, Homo sapiens
  CDR3 for alpha chain variable domain of TCR clone 167360 (TRAV1-2, TRAJ8)
CAVREDTGFHKLVF

SEQ ID NO: 334720 - protein, 15 aa, Homo sapiens
  CDR3 for beta chain variable domain of TCR clone 167360 (TRBV6-3, TRBJ2-7)
CASSSPGTVFYDQYF

SEQ ID NO: 334721 - protein, 13 aa, Homo sapiens
  CDR3 for alpha chain variable domain of TCR clone 167361 (TRAV8-2, TRAJ49)
CVVTPNTGNQFYF

SEQ ID NO: 334722 - protein, 15 aa, Homo sapiens
  CDR3 for beta chain variable domain of TCR clone 167361 (TRBV11-2, TRBJ2-1)
CASSLTSGGHNEQFF

SEQ ID NO: 334723 - protein, 14 aa, Homo sapiens
  CDR3 for alpha chain variable domain of TCR clone 167362 (TRAV12-3, TRAJ10)
SHLPLTGGGNKLTF

SEQ ID NO: 334724 - protein, 15 aa, Homo sapiens
  CDR3 for beta chain variable domain of TCR clone 167362 (TRBV27, TRBJ2-3)
CASSLGVAGPDTQYF

SEQ ID NO: 334725 - protein, 13 aa, Homo sapiens
  CDR3 for alpha chain variable domain of TCR clone 167363 (TRAV12-1, TRAJ6)
CVVFPGGSYIPTF

SEQ ID NO: 334726 - protein, 14 aa, Homo sapiens
  CDR3 for beta chain variable domain of TCR clone 167363 (TRBV20-1, TRBJ1-3)
RSASPTGAGNTMYF

SEQ ID NO: 334727 - protein, 11 aa, Homo sapiens
  CDR3 for alpha chain variable domain of TCR clone 167364 (TRAV2, TRAJ33)
CAVESNYQLIW

SEQ ID NO: 334728 - protein, 13 aa, Homo sapiens
  CDR3 for beta chain variable domain of TCR clone 167364 (TRBV2, TRBJ2-7)
CASTGGSSYEQYF

SEQ ID NO: 334729 - protein, 15 aa, Homo sapiens
  CDR3 for alpha chain variable domain of TCR clone 167365 (TRAV20, TRAJ43)
CAAQAGKSSNNDMRF

SEQ ID NO: 334730 - protein, 13 aa, Homo sapiens
  CDR3 for beta chain variable domain of TCR clone 167365 (TRBV27, TRBJ1-1)
CASSLSIGAEAFF

SEQ ID NO: 334731 - protein, 15 aa, Homo sapiens
  CDR3 for alpha chain variable domain of TCR clone 167366 (TRAV8-3, TRAJ45)
CASSYSGGGADGLTF

SEQ ID NO: 334732 - protein, 18 aa, Homo sapiens
  CDR3 for beta chain variable domain of TCR clone 167366 (TRBV18, TRBJ1-3)
YASSPRGGAGPSGNTIYF

SEQ ID NO: 334733 - protein, 10 aa, Homo sapiens
  CDR3 for alpha chain variable domain of TCR clone 167367 (TRAV12-3, TRAJ18)
CAMSAEAQPW

SEQ ID NO: 334734 - protein, 16 aa, Homo sapiens
  CDR3 for beta chain variable domain of TCR clone 167367 (TRBV27, TRBJ2-2)
CASSSTGGGDTGELFF

SEQ ID NO: 334735 - protein, 23 aa, Homo sapiens
  CDR3 for alpha chain variable domain of TCR clone 167368 (TRAV12-2, TRAJ36)
SLLIRDSQPSDSATLERANNLFF

SEQ ID NO: 334736 - protein, 13 aa, Homo sapiens
  CDR3 for beta chain variable domain of TCR clone 167368 (TRBV19, TRBJ1-2)
CASSVPGQDGYTF

SEQ ID NO: 334737 - protein, 17 aa, Homo sapiens
  CDR3 for alpha chain variable domain of TCR clone 167369 (TRAV3, TRAJ6)
CAVRDGPRAGGSYIPTF

SEQ ID NO: 334738 - protein, 20 aa, Homo sapiens
  CDR3 for beta chain variable domain of TCR clone 167369 (TRBV28, TRBJ2-1)
CASTPIGRSRGLAGGNEQFF

SEQ ID NO: 334739 - protein, 17 aa, Homo sapiens
  CDR3 for alpha chain variable domain of TCR clone 167370 (TRAV3, TRAJ6)
CAVRDGPRAGGSYMPTV

SEQ ID NO: 334740 - protein, 14 aa, Homo sapiens
  CDR3 for beta chain variable domain of TCR clone 167370 (TRBV7-2, TRBJ2-7)
CASSPKTSFYEQYF

SEQ ID NO: 334741 - protein, 12 aa, Homo sapiens
  CDR3 for alpha chain variable domain of TCR clone 167371 (TRAV17, TRAJ30)
CVPERRDDKIIF

SEQ ID NO: 334742 - protein, 13 aa, Homo sapiens
  CDR3 for beta chain variable domain of TCR clone 167371 (TRBV7-2, TRBJ1-1)
CASNLKGAKVAFF

SEQ ID NO: 334743 - protein, 13 aa, Homo sapiens
  CDR3 for alpha chain variable domain of TCR clone 167372 (TRAV2, TRAJ40)
CAVVTSGTYKYIF

SEQ ID NO: 334744 - protein, 14 aa, Homo sapiens
  CDR3 for beta chain variable domain of TCR clone 167372 (TRBV19, TRBJ2-1)
CAGPTFLLSGEQFF

SEQ ID NO: 334745 - protein, 13 aa, Homo sapiens
  CDR3 for alpha chain variable domain of TCR clone 167373 (TRAV20, TRAJ21)
WAVAGYNFNKFYF

SEQ ID NO: 334746 - protein, 15 aa, Homo sapiens
  CDR3 for beta chain variable domain of TCR clone 167373 (TRBV11-3, TRBJ2-3)
CASLKDGREGDTQYF

SEQ ID NO: 334747 - protein, 16 aa, Homo sapiens
  CDR3 for alpha chain variable domain of TCR clone 167374 (TRAV3, TRAJ21)
CAVRNIERGNFNKFYF

SEQ ID NO: 334748 - protein, 15 aa, Homo sapiens
  CDR3 for beta chain variable domain of TCR clone 167374 (TRBV11-3, TRBJ2-3)
CASLKDGREGDTQYF

SEQ ID NO: 334749 - protein, 15 aa, Homo sapiens
  CDR3 for alpha chain variable domain of TCR clone 167375 (TRAV26-2, TRAJ26)
CILRDFDNYGQNFVF

SEQ ID NO: 334750 - protein, 14 aa, Homo sapiens
  CDR3 for beta chain variable domain of TCR clone 167375 (TRBV29-1, TRBJ2-5)
CSFWTPYAGETQSF

SEQ ID NO: 334751 - protein, 19 aa, Homo sapiens
  CDR3 for alpha chain variable domain of TCR clone 167376 (TRAV2, TRAJ20)
ILQVREADAAVYRDCKLSF

SEQ ID NO: 334752 - protein, 13 aa, Homo sapiens
  CDR3 for beta chain variable domain of TCR clone 167376 (TRBV28, TRBJ1-2)
CAGRDRGNYGYTF

SEQ ID NO: 334753 - protein, 11 aa, Homo sapiens
  CDR3 for alpha chain variable domain of TCR clone 167377 (TRAV23/DV6, TRAJ58)
CAARLLRGETS

SEQ ID NO: 334754 - protein, 15 aa, Homo sapiens
  CDR3 for beta chain variable domain of TCR clone 167377 (TRBV18, TRBJ2-2)
CASSTSGLHTGELFF

SEQ ID NO: 334755 - protein, 15 aa, Homo sapiens
  CDR3 for alpha chain variable domain of TCR clone 167378 (TRAV23/DV6, TRAJ30)
CAASSQGSRDDKIIF

SEQ ID NO: 334756 - protein, 13 aa, Homo sapiens
  CDR3 for beta chain variable domain of TCR clone 167378 (TRBV7-9, TRBJ1-2)
CASSLKQNYGYTF

SEQ ID NO: 334757 - protein, 15 aa, Homo sapiens
  CDR3 for alpha chain variable domain of TCR clone 167379 (TRAV26-1, TRAJ44)
CIARVPFGTASKLTC

SEQ ID NO: 334758 - protein, 17 aa, Homo sapiens
  CDR3 for beta chain variable domain of TCR clone 167379 (TRBV24-1, TRBJ2-4)
CATSDAEARGVRNIQYF

SEQ ID NO: 334759 - protein, 12 aa, Homo sapiens
  CDR3 for alpha chain variable domain of TCR clone 167380 (TRAV12-3, TRAJ20)
CAMVRGDYKLSF

SEQ ID NO: 334760 - protein, 12 aa, Homo sapiens
  CDR3 for beta chain variable domain of TCR clone 167380 (TRBV6-1, TRBJ2-7)
CASSDYSYEKYF

SEQ ID NO: 334761 - protein, 14 aa, Homo sapiens
  CDR3 for alpha chain variable domain of TCR clone 167381 (TRAV1-2, TRAJ8)
CAVREDTGFQKLVF

SEQ ID NO: 334762 - protein, 16 aa, Homo sapiens
  CDR3 for beta chain variable domain of TCR clone 167381 (TRBV28, TRBJ2-1)
CASRRSGRVVGNEQFF

SEQ ID NO: 334763 - protein, 16 aa, Homo sapiens
  CDR3 for alpha chain variable domain of TCR clone 167382 (TRAV22, TRAJ45)
CAAERGKRGGADGLTF

SEQ ID NO: 334764 - protein, 16 aa, Homo sapiens
  CDR3 for beta chain variable domain of TCR clone 167382 (TRBV5-1, TRBJ2-5)
CASSLRRTSGQETQYF

SEQ ID NO: 334765 - protein, 12 aa, Homo sapiens
  CDR3 for alpha chain variable domain of TCR clone 167383 (TRAV8-1, TRAJ6)
CASSGVSYIPTF

SEQ ID NO: 334766 - protein, 12 aa, Homo sapiens
  CDR3 for beta chain variable domain of TCR clone 167383 (TRBV19, TRBJ1-1)
CASMNRYTEAFF

SEQ ID NO: 334767 - protein, 16 aa, Homo sapiens
  CDR3 for alpha chain variable domain of TCR clone 167384 (TRAV26-1, TRAJ48)
IASSDLSNFGNEKLTF

SEQ ID NO: 334768 - protein, 14 aa, Homo sapiens
  CDR3 for beta chain variable domain of TCR clone 167384 (TRBV13, TRBJ2-7)
CASSLKGASYEQYV

SEQ ID NO: 334769 - protein, 14 aa, Homo sapiens
  CDR3 for alpha chain variable domain of TCR clone 167385 (TRAV12-2, TRAJ13)
CAVKKTGGYQKVTF

SEQ ID NO: 334770 - protein, 14 aa, Homo sapiens
  CDR3 for beta chain variable domain of TCR clone 167385 (TRBV12-4, TRBJ1-2)
CASSFIGTAYGYTF

SEQ ID NO: 334771 - protein, 12 aa, Homo sapiens
  CDR3 for alpha chain variable domain of TCR clone 167386 (TRAV21, TRAJ3)
CCFYSSASKIIF

SEQ ID NO: 334772 - protein, 16 aa, Homo sapiens
  CDR3 for beta chain variable domain of TCR clone 167386 (TRBV7-2, TRBJ1-5)
CASSPWGPEGNQPQHF

SEQ ID NO: 334773 - protein, 13 aa, Homo sapiens
  CDR3 for alpha chain variable domain of TCR clone 167387 (TRAV3, TRAJ21)
CAVREPDFNKFYF

SEQ ID NO: 334774 - protein, 17 aa, Homo sapiens
  CDR3 for beta chain variable domain of TCR clone 167387 (TRBV7-8, TRBJ2-6)
CASSAGTGGAGANVLIF

SEQ ID NO: 334775 - protein, 16 aa, Homo sapiens
  CDR3 for alpha chain variable domain of TCR clone 167388 (TRAV30, TRAJ24)
CGTEIVDAASWGKFQF

SEQ ID NO: 334776 - protein, 14 aa, Homo sapiens
  CDR3 for beta chain variable domain of TCR clone 167388 (TRBV12-5, TRBJ2-5)
CASGSRTHQGTQYF

SEQ ID NO: 334777 - protein, 13 aa, Homo sapiens
  CDR3 for alpha chain variable domain of TCR clone 167389 (TRAV27, TRAJ6)
FAGGTRGSYIPTF

SEQ ID NO: 334778 - protein, 15 aa, Homo sapiens
  CDR3 for beta chain variable domain of TCR clone 167389 (TRBV5-5, TRBJ2-7)
CASSLAAPLSYEQYF

SEQ ID NO: 334779 - protein, 15 aa, Homo sapiens
  CDR3 for alpha chain variable domain of TCR clone 167390 (TRAV21, TRAJ32)
CAVNSYGGATNKLIF

SEQ ID NO: 334780 - protein, 18 aa, Homo sapiens
  CDR3 for beta chain variable domain of TCR clone 167390 (TRBV7-9, TRBJ2-1)
CASSTGLAEGSSYNEQFL

SEQ ID NO: 334781 - protein, 17 aa, Homo sapiens
  CDR3 for alpha chain variable domain of TCR clone 167391 (TRAV36/DV7, TRAJ52)
CAVAQRAGGTSYGKLTF

SEQ ID NO: 334782 - protein, 14 aa, Homo sapiens
  CDR3 for beta chain variable domain of TCR clone 167391 (TRBV7-3, TRBJ2-1)
CASSLAGGTNEQFF

SEQ ID NO: 334783 - protein, 14 aa, Homo sapiens
  CDR3 for alpha chain variable domain of TCR clone 167392 (TRAV2, TRAJ10)
AAVYYTGGVNKLTF

SEQ ID NO: 334784 - protein, 16 aa, Homo sapiens
  CDR3 for beta chain variable domain of TCR clone 167392 (TRBV29-1, TRBJ2-5)
CSVEGLAGDYQETQYF

SEQ ID NO: 334785 - protein, 12 aa, Homo sapiens
  CDR3 for alpha chain variable domain of TCR clone 167393 (TRAV25, TRAJ29)
CAGHSGNTSLVF

SEQ ID NO: 334786 - protein, 14 aa, Homo sapiens
  CDR3 for beta chain variable domain of TCR clone 167393 (TRBV6-1, TRBJ2-7)
CASTRTGDYYEQYF

SEQ ID NO: 334787 - protein, 13 aa, Homo sapiens
  CDR3 for alpha chain variable domain of TCR clone 167394 (TRAV1-2, TRAJ11)
CAVRREGYSTLTF

SEQ ID NO: 334788 - protein, 14 aa, Homo sapiens
  CDR3 for beta chain variable domain of TCR clone 167394 (TRBV25-1, TRBJ1-1)
CASTHLGGNTEAVF

SEQ ID NO: 334789 - protein, 11 aa, Homo sapiens
  CDR3 for alpha chain variable domain of TCR clone 167395 (TRAV21, TRAJ34)
CAVTHTDKLIF

SEQ ID NO: 334790 - protein, 17 aa, Homo sapiens
  CDR3 for beta chain variable domain of TCR clone 167395 (TRBV20-1, TRBJ2-1)
CSARSPSGGPPTMSSSS

SEQ ID NO: 334791 - protein, 13 aa, Homo sapiens
  CDR3 for alpha chain variable domain of TCR clone 167396 (TRAV27, TRAJ56)
CAGKPGANSKLTF

SEQ ID NO: 334792 - protein, 18 aa, Homo sapiens
  CDR3 for beta chain variable domain of TCR clone 167396 (TRBV11-2, TRBJ2-3)
CASTLGGASRGAPNTQYF

SEQ ID NO: 334793 - protein, 18 aa, Homo sapiens
  CDR3 for alpha chain variable domain of TCR clone 167397 (TRAV12-3, TRAJ52)
CAMSVGGAGGTSYGKLTF

SEQ ID NO: 334794 - protein, 15 aa, Homo sapiens
  CDR3 for beta chain variable domain of TCR clone 167397 (TRBV6-1, TRBJ2-4)
CASSEAVWTINIQYF

SEQ ID NO: 334795 - protein, 15 aa, Homo sapiens
  CDR3 for alpha chain variable domain of TCR clone 167398 (TRAV3, TRAJ7)
CAVRDKDNGNNRPAF

SEQ ID NO: 334796 - protein, 19 aa, Homo sapiens
  CDR3 for beta chain variable domain of TCR clone 167398 (TRBV5-8, TRBJ2-3)
CASSFLGTSGSHRTDTQYF

SEQ ID NO: 334797 - protein, 16 aa, Homo sapiens
  CDR3 for alpha chain variable domain of TCR clone 167399 (TRAV30, TRAJ24)
CGTEIVDADSWGKFQF

SEQ ID NO: 334798 - protein, 14 aa, Homo sapiens
  CDR3 for beta chain variable domain of TCR clone 167399 (TRBV5-7, TRBJ2-7)
CASSGGLSSYEQYF

SEQ ID NO: 334799 - protein, 15 aa, Homo sapiens
  CDR3 for alpha chain variable domain of TCR clone 167400 (TRAV21, TRAJ13)
CAVPRSFWGLPESYL

SEQ ID NO: 334800 - protein, 13 aa, Homo sapiens
  CDR3 for beta chain variable domain of TCR clone 167400 (TRBV27, TRBJ2-1)
CASSSEAYNEQFF

SEQ ID NO: 334801 - protein, 14 aa, Homo sapiens
  CDR3 for alpha chain variable domain of TCR clone 167401 (TRAV12-2, TRAJ13)
CAVKKTGGYQKVTF

SEQ ID NO: 334802 - protein, 13 aa, Homo sapiens
  CDR3 for beta chain variable domain of TCR clone 167401 (TRBV4-2, TRBJ2-3)
CASSLTTTDTQYF

SEQ ID NO: 334803 - protein, 15 aa, Homo sapiens
  CDR3 for alpha chain variable domain of TCR clone 167402 (TRAV3, TRAJ3)
CAVRDMSSSACKIIF

SEQ ID NO: 334804 - protein, 14 aa, Homo sapiens
  CDR3 for beta chain variable domain of TCR clone 167402 (TRBV6-6, TRBJ2-7)
CASSIAGGVDEQYF

SEQ ID NO: 334805 - protein, 17 aa, Homo sapiens
  CDR3 for alpha chain variable domain of TCR clone 167403 (TRAV3, TRAJ6)
CAVRDGPRAGGSYIPTF

SEQ ID NO: 334806 - protein, 13 aa, Homo sapiens
  CDR3 for beta chain variable domain of TCR clone 167403 (TRBV19, TRBJ2-7)
CASSIDRTYEQYS

SEQ ID NO: 334807 - protein, 14 aa, Homo sapiens
  CDR3 for alpha chain variable domain of TCR clone 167404 (TRAV2, TRAJ12)
CAVDVMDSSYKLIF

SEQ ID NO: 334808 - protein, 13 aa, Homo sapiens
  CDR3 for beta chain variable domain of TCR clone 167404 (TRBV19, TRBJ2-1)
CASKVGAGGEQFF

SEQ ID NO: 334809 - protein, 17 aa, Homo sapiens
  CDR3 for alpha chain variable domain of TCR clone 167405 (TRAV23/DV6, TRAJ57)
CAASSTLSQGGSEKLVF

SEQ ID NO: 334810 - protein, 15 aa, Homo sapiens
  CDR3 for beta chain variable domain of TCR clone 167405 (TRBV5-7, TRBJ2-7)
CASSLPGQVFYEQYF

SEQ ID NO: 334811 - protein, 14 aa, Homo sapiens
  CDR3 for alpha chain variable domain of TCR clone 167406 (TRAV17, TRAJ15)
CATGPNQAGTARIF

SEQ ID NO: 334812 - protein, 15 aa, Homo sapiens
  CDR3 for beta chain variable domain of TCR clone 167406 (TRBV11-2, TRBJ2-2)
CASSSDRVNAGELFF

SEQ ID NO: 334813 - protein, 13 aa, Homo sapiens
  CDR3 for alpha chain variable domain of TCR clone 167407 (TRAV20, TRAJ37)
CAGCSSTTGQLIF

SEQ ID NO: 334814 - protein, 21 aa, Homo sapiens
  CDR3 for beta chain variable domain of TCR clone 167407 (TRBV4-2, TRBJ2-3)
PCSQKTRPCISVPAAPDTQYF

SEQ ID NO: 334815 - protein, 12 aa, Homo sapiens
  CDR3 for alpha chain variable domain of TCR clone 167408 (TRAV21, TRAJ49)
CAVNDGGNQYYF

SEQ ID NO: 334816 - protein, 14 aa, Homo sapiens
  CDR3 for beta chain variable domain of TCR clone 167408 (TRBV12-5, TRBJ2-5)
CASGSRTHQETQYF

SEQ ID NO: 334817 - protein, 14 aa, Homo sapiens
  CDR3 for alpha chain variable domain of TCR clone 167409 (TRAV8-2, TRAJ6)
CVVISAGGSYIPTF

SEQ ID NO: 334818 - protein, 16 aa, Homo sapiens
  CDR3 for beta chain variable domain of TCR clone 167409 (TRBV7-6, TRBJ2-6)
CAGSLPGLSGANVLTF

SEQ ID NO: 334819 - protein, 16 aa, Homo sapiens
  CDR3 for alpha chain variable domain of TCR clone 167410 (TRAV26-2, TRAJ28)
CILRPYSGAGSYQLTF

SEQ ID NO: 334820 - protein, 14 aa, Homo sapiens
  CDR3 for beta chain variable domain of TCR clone 167410 (TRBV4-1, TRBJ2-2)
CASSQAVNTGELFF

SEQ ID NO: 334821 - protein, 14 aa, Homo sapiens
  CDR3 for alpha chain variable domain of TCR clone 167411 (TRAV12-1, TRAJ27)
CGEQIRTNAGKSTF

SEQ ID NO: 334822 - protein, 14 aa, Homo sapiens
  CDR3 for beta chain variable domain of TCR clone 167411 (TRBV4-1, TRBJ2-2)
CASSQAVNTGELFF

SEQ ID NO: 334823 - protein, 13 aa, Homo sapiens
  CDR3 for alpha chain variable domain of TCR clone 167412 (TRAV23/DV6, TRAJ37)
CAGCSSNTGKLIF

SEQ ID NO: 334824 - protein, 11 aa, Homo sapiens
  CDR3 for beta chain variable domain of TCR clone 167412 (TRBV12-4, TRBJ2-3)
CASTATDTQYF

SEQ ID NO: 334825 - protein, 14 aa, Homo sapiens
  CDR3 for alpha chain variable domain of TCR clone 167413 (TRAV12-2, TRAJ13)
CAVKKTGGYQKVTF

SEQ ID NO: 334826 - protein, 20 aa, Homo sapiens
  CDR3 for beta chain variable domain of TCR clone 167413 (TRBV7-8, TRBJ2-2)
CASSHLFPGPTIHITGELFL

SEQ ID NO: 334827 - protein, 14 aa, Homo sapiens
  CDR3 for alpha chain variable domain of TCR clone 167414 (TRAV35, TRAJ42)
CCVPYGGSQGNLIF

SEQ ID NO: 334828 - protein, 15 aa, Homo sapiens
  CDR3 for beta chain variable domain of TCR clone 167414 (TRBV28, TRBJ2-5)
CASSSGRTIQETQYF

SEQ ID NO: 334829 - protein, 13 aa, Homo sapiens
  CDR3 for alpha chain variable domain of TCR clone 167415 (TRAV29/DV5, TRAJ21)
CSASGDNFNKFYF

SEQ ID NO: 334830 - protein, 14 aa, Homo sapiens
  CDR3 for beta chain variable domain of TCR clone 167415 (TRBV7-2, TRBJ2-7)
CASSPRDGAYEQYF

SEQ ID NO: 334831 - protein, 14 aa, Homo sapiens
  CDR3 for alpha chain variable domain of TCR clone 167416 (TRAV8-3, TRAJ4)
CAVGAAGGYNKLIF

SEQ ID NO: 334832 - protein, 12 aa, Homo sapiens
  CDR3 for beta chain variable domain of TCR clone 167416 (TRBV12-4, TRBJ2-7)
CASSLWGYEQYF

SEQ ID NO: 334833 - protein, 15 aa, Homo sapiens
  CDR3 for alpha chain variable domain of TCR clone 167417 (TRAV16, TRAJ16)
CALQGGGSDGQKLLF

SEQ ID NO: 334834 - protein, 13 aa, Homo sapiens
  CDR3 for beta chain variable domain of TCR clone 167417 (TRBV12-4, TRBJ2-7)
CASSPTETYEQYF

SEQ ID NO: 334835 - protein, 14 aa, Homo sapiens
  CDR3 for alpha chain variable domain of TCR clone 167418 (TRAV8-4, TRAJ5)
CAVSTDTGRRALTF

SEQ ID NO: 334836 - protein, 14 aa, Homo sapiens
  CDR3 for beta chain variable domain of TCR clone 167418 (TRBV19, TRBJ1-5)
CASSRGVGGQPQHF

SEQ ID NO: 334837 - protein, 13 aa, Homo sapiens
  CDR3 for alpha chain variable domain of TCR clone 167419 (TRAV27, TRAJ41)
CAGEGNSGYALNF

SEQ ID NO: 334838 - protein, 14 aa, Homo sapiens
  CDR3 for beta chain variable domain of TCR clone 167419 (TRBV6-6, TRBJ2-3)
CAGRLQREADTQYF

SEQ ID NO: 334839 - protein, 15 aa, Homo sapiens
  CDR3 for alpha chain variable domain of TCR clone 167420 (TRAV23/DV6, TRAJ33)
CAASNSGGGNYQLIW

SEQ ID NO: 334840 - protein, 13 aa, Homo sapiens
  CDR3 for beta chain variable domain of TCR clone 167420 (TRBV7-9, TRBJ1-2)
CASSLKQNYGYTF

SEQ ID NO: 334841 - protein, 13 aa, Homo sapiens
  CDR3 for alpha chain variable domain of TCR clone 167421 (TRAV12-2, TRAJ20)
CAVYPSNDYKLSF

SEQ ID NO: 334842 - protein, 15 aa, Homo sapiens
  CDR3 for beta chain variable domain of TCR clone 167421 (TRBV27, TRBJ2-5)
CASSLYPRGGQTQYF

SEQ ID NO: 334843 - protein, 13 aa, Homo sapiens
  CDR3 for alpha chain variable domain of TCR clone 167422 (TRAV17, TRAJ9)
CATDYTDGFKTNF

SEQ ID NO: 334844 - protein, 16 aa, Homo sapiens
  CDR3 for beta chain variable domain of TCR clone 167422 (TRBV7-7, TRBJ2-1)
CASSLASGTSYNEQFF

SEQ ID NO: 334845 - protein, 14 aa, Homo sapiens
  CDR3 for alpha chain variable domain of TCR clone 167423 (TRAV13-1, TRAJ40)
CAASMTSGTYKYIF

SEQ ID NO: 334846 - protein, 15 aa, Homo sapiens
  CDR3 for beta chain variable domain of TCR clone 167423 (TRBV6-1, TRBJ1-1)
CASRTPGQLNTEAFF

SEQ ID NO: 334847 - protein, 12 aa, Homo sapiens
  CDR3 for alpha chain variable domain of TCR clone 167424 (TRAV38-2/DV8, TRAJ48)
CALLSGNEKLTF

SEQ ID NO: 334848 - protein, 15 aa, Homo sapiens
  CDR3 for beta chain variable domain of TCR clone 167424 (TRBV6-1, TRBJ2-1)
CASSELRGRYNEQFF

SEQ ID NO: 334849 - protein, 16 aa, Homo sapiens
  CDR3 for alpha chain variable domain of TCR clone 167425 (TRAV12-2, TRAJ28)
CAAITDSGAGSYQLTF

SEQ ID NO: 334850 - protein, 12 aa, Homo sapiens
  CDR3 for beta chain variable domain of TCR clone 167425 (TRBV9, TRBJ2-2)
CASSLVTGELFF

SEQ ID NO: 334851 - protein, 16 aa, Homo sapiens
  CDR3 for alpha chain variable domain of TCR clone 167426 (TRAV8-3, TRAJ52)
CAVQPAGGTSYGTLTF

SEQ ID NO: 334852 - protein, 15 aa, Homo sapiens
  CDR3 for beta chain variable domain of TCR clone 167426 (TRBV11-2, TRBJ2-7)
CASSLAGGVATEQYF

SEQ ID NO: 334853 - protein, 14 aa, Homo sapiens
  CDR3 for alpha chain variable domain of TCR clone 167427 (TRAV12-3, TRAJ10)
SHLPLTGGGNKLTF

SEQ ID NO: 334854 - protein, 14 aa, Homo sapiens
  CDR3 for beta chain variable domain of TCR clone 167427 (TRBV19, TRBJ2-1)
CASPTFVLSGEQYF

SEQ ID NO: 334855 - protein, 16 aa, Homo sapiens
  CDR3 for alpha chain variable domain of TCR clone 167428 (TRAV12-3, TRAJ53)
CAMSTGSGGSNYKLTF

SEQ ID NO: 334856 - protein, 17 aa, Homo sapiens
  CDR3 for beta chain variable domain of TCR clone 167428 (TRBV28, TRBJ2-5)
CASSTPEGDALQETQYF

SEQ ID NO: 334857 - protein, 13 aa, Homo sapiens
  CDR3 for alpha chain variable domain of TCR clone 167429 (TRAV1-1, TRAJ9)
CAAKNTGGFKTVF

SEQ ID NO: 334858 - protein, 14 aa, Homo sapiens
  CDR3 for beta chain variable domain of TCR clone 167429 (TRBV20-1, TRBJ2-1)
CSAQIGGSANEQSF

SEQ ID NO: 334859 - protein, 14 aa, Homo sapiens
  CDR3 for alpha chain variable domain of TCR clone 167430 (TRAV9-2, TRAJ39)
FALYIYNAGNMLTF

SEQ ID NO: 334860 - protein, 15 aa, Homo sapiens
  CDR3 for beta chain variable domain of TCR clone 167430 (TRBV27, TRBJ2-1)
CASSNGGGSSNEQFF

SEQ ID NO: 334861 - protein, 13 aa, Homo sapiens
  CDR3 for alpha chain variable domain of TCR clone 167431 (TRAV19, TRAJ53)
CALIGGSNYKLTF

SEQ ID NO: 334862 - protein, 11 aa, Homo sapiens
  CDR3 for beta chain variable domain of TCR clone 167431 (TRBV29-1, TRBJ2-5)
CSEDRTGTQSF

SEQ ID NO: 334863 - protein, 12 aa, Homo sapiens
  CDR3 for alpha chain variable domain of TCR clone 167432 (TRAV29/DV5, TRAJ49)
CAATDTGNQFYF

SEQ ID NO: 334864 - protein, 13 aa, Homo sapiens
  CDR3 for beta chain variable domain of TCR clone 167432 (TRBV3-1, TRBJ1-1)
CASSPGVITEAFF

SEQ ID NO: 334865 - protein, 12 aa, Homo sapiens
  CDR3 for alpha chain variable domain of TCR clone 167433 (TRAV21, TRAJ37)
CAVRGNTGKLIF

SEQ ID NO: 334866 - protein, 14 aa, Homo sapiens
  CDR3 for beta chain variable domain of TCR clone 167433 (TRBV7-3, TRBJ2-1)
CASSLSGSYNEQFF

SEQ ID NO: 334867 - protein, 17 aa, Homo sapiens
  CDR3 for alpha chain variable domain of TCR clone 167434 (TRAV13-1, TRAJ52)
CAAGRNAGGTSYGKLTF

SEQ ID NO: 334868 - protein, 15 aa, Homo sapiens
  CDR3 for beta chain variable domain of TCR clone 167434 (TRBV3-1, TRBJ2-1)
CASSQVVDDGEEQFF

SEQ ID NO: 334869 - protein, 14 aa, Homo sapiens
  CDR3 for alpha chain variable domain of TCR clone 167435 (TRAV38-1, TRAJ30)
CAFMPMNRDDKIIF

SEQ ID NO: 334870 - protein, 13 aa, Homo sapiens
  CDR3 for beta chain variable domain of TCR clone 167435 (TRBV12-4, TRBJ1-2)
CASSLRQGKGDTF

SEQ ID NO: 334871 - protein, 16 aa, Homo sapiens
  CDR3 for alpha chain variable domain of TCR clone 167436 (TRAV12-2, TRAJ10)
CAVNRVLTGGGNKLTF

SEQ ID NO: 334872 - protein, 13 aa, Homo sapiens
  CDR3 for beta chain variable domain of TCR clone 167436 (TRBV19, TRBJ2-7)
CASRKAGGSEQYF

SEQ ID NO: 334873 - protein, 15 aa, Homo sapiens
  CDR3 for alpha chain variable domain of TCR clone 167437 (TRAV20, TRAJ53)
CAVQERGGSNYKLTF

SEQ ID NO: 334874 - protein, 12 aa, Homo sapiens
  CDR3 for beta chain variable domain of TCR clone 167437 (TRBV7-7, TRBJ2-5)
CASSLGGETQYF

SEQ ID NO: 334875 - protein, 17 aa, Homo sapiens
  CDR3 for alpha chain variable domain of TCR clone 167438 (TRAV12-3, TRAJ6)
CSMSARGGAGGSYIPTF

SEQ ID NO: 334876 - protein, 15 aa, Homo sapiens
  CDR3 for beta chain variable domain of TCR clone 167438 (TRBV28, TRBJ2-1)
CASSIIAGGRSEQFF

SEQ ID NO: 334877 - protein, 16 aa, Homo sapiens
  CDR3 for alpha chain variable domain of TCR clone 167439 (TRAV3, TRAJ3)
CAVRDRAKSSASKIIF

SEQ ID NO: 334878 - protein, 15 aa, Homo sapiens
  CDR3 for beta chain variable domain of TCR clone 167439 (TRBV27, TRBJ2-1)
CASSNGGGSSNEQFF

SEQ ID NO: 334879 - protein, 13 aa, Homo sapiens
  CDR3 for alpha chain variable domain of TCR clone 167440 (TRAV12-2, TRAJ42)
CAVKRGSQVNLIF

SEQ ID NO: 334880 - protein, 16 aa, Homo sapiens
  CDR3 for beta chain variable domain of TCR clone 167440 (TRBV9, TRBJ2-2)
CASSAMGKGNTGELFF

SEQ ID NO: 334881 - protein, 12 aa, Homo sapiens
  CDR3 for alpha chain variable domain of TCR clone 167441 (TRAV12-3, TRAJ42)
CAPGGSQENLIF

SEQ ID NO: 334882 - protein, 13 aa, Homo sapiens
  CDR3 for beta chain variable domain of TCR clone 167441 (TRBV5-7, TRBJ2-6)
CASTSSGANVLTF

SEQ ID NO: 334883 - protein, 12 aa, Homo sapiens
  CDR3 for alpha chain variable domain of TCR clone 167442 (TRAV3, TRAJ20)
CAVRDGDYKLSF

SEQ ID NO: 334884 - protein, 13 aa, Homo sapiens
  CDR3 for beta chain variable domain of TCR clone 167442 (TRBV19, TRBJ2-7)
CASSPRQSYEQYF

SEQ ID NO: 334885 - protein, 12 aa, Homo sapiens
  CDR3 for alpha chain variable domain of TCR clone 167443 (TRAV8-3, TRAJ26)
CAGDNYGQNFVF

SEQ ID NO: 334886 - protein, 15 aa, Homo sapiens
  CDR3 for beta chain variable domain of TCR clone 167443 (TRBV9, TRBJ2-1)
CASSLARSADNEQFF

SEQ ID NO: 334887 - protein, 11 aa, Homo sapiens
  CDR3 for alpha chain variable domain of TCR clone 167444 (TRAV21, TRAJ34)
CAPLDTDKLIF

SEQ ID NO: 334888 - protein, 16 aa, Homo sapiens
  CDR3 for beta chain variable domain of TCR clone 167444 (TRBV5-1, TRBJ2-3)
CARSLAGDRGTDTQYF

SEQ ID NO: 334889 - protein, 13 aa, Homo sapiens
  CDR3 for alpha chain variable domain of TCR clone 167445 (TRAV26-2, TRAJ43)
CILRAVNNNDMRY

SEQ ID NO: 334890 - protein, 15 aa, Homo sapiens
  CDR3 for beta chain variable domain of TCR clone 167445 (TRBV7-2, TRBJ2-1)
CASTHGTGIYNEQFF

SEQ ID NO: 334891 - protein, 13 aa, Homo sapiens
  CDR3 for alpha chain variable domain of TCR clone 167446 (TRAV13-1, TRAJ21)
CAASIYNFNKFYF

SEQ ID NO: 334892 - protein, 12 aa, Homo sapiens
  CDR3 for beta chain variable domain of TCR clone 167446 (TRBV7-6, TRBJ2-7)
CASSSADSEQYF

SEQ ID NO: 334893 - protein, 19 aa, Homo sapiens
  CDR3 for alpha chain variable domain of TCR clone 167447 (TRAV38-1, TRAJ53)
CAFMKHGLESGGNNYKLTF

SEQ ID NO: 334894 - protein, 13 aa, Homo sapiens
  CDR3 for beta chain variable domain of TCR clone 167447 (TRBV19, TRBJ2-7)
CASSPRQSYEQYF

SEQ ID NO: 334895 - protein, 16 aa, Homo sapiens
  CDR3 for alpha chain variable domain of TCR clone 167448 (TRAV30, TRAJ24)
CGTAIVDADSWGKFQF

SEQ ID NO: 334896 - protein, 13 aa, Homo sapiens
  CDR3 for beta chain variable domain of TCR clone 167448 (TRBV18, TRBJ1-2)
CASSASATEGYTF

SEQ ID NO: 334897 - protein, 11 aa, Homo sapiens
  CDR3 for alpha chain variable domain of TCR clone 167449 (TRAV2, TRAJ33)
CAVESNYQVIW

SEQ ID NO: 334898 - protein, 18 aa, Homo sapiens
  CDR3 for beta chain variable domain of TCR clone 167449 (TRBV11-2, TRBJ2-3)
CASSLGGASRGAPNTQYF

SEQ ID NO: 334899 - protein, 16 aa, Homo sapiens
  CDR3 for alpha chain variable domain of TCR clone 167450 (TRAV26-1, TRAJ50)
CIVRALMKTSYDKVIF

SEQ ID NO: 334900 - protein, 15 aa, Homo sapiens
  CDR3 for beta chain variable domain of TCR clone 167450 (TRBV11-2, TRBJ2-2)
CASRGLAANTGELFF

SEQ ID NO: 334901 - protein, 17 aa, Homo sapiens
  CDR3 for alpha chain variable domain of TCR clone 167451 (TRAV36/DV7, TRAJ52)
CAVAQRAGGTSYGNLTF

SEQ ID NO: 334902 - protein, 13 aa, Homo sapiens
  CDR3 for beta chain variable domain of TCR clone 167451 (TRBV7-9, TRBJ2-5)
CASLPSGRETQYF

SEQ ID NO: 334903 - protein, 15 aa, Homo sapiens
  CDR3 for alpha chain variable domain of TCR clone 167452 (TRAV21, TRAJ17)
CAVRPGEEGRQQANF

SEQ ID NO: 334904 - protein, 16 aa, Homo sapiens
  CDR3 for beta chain variable domain of TCR clone 167452 (TRBV2, TRBJ2-7)
CASSEPWTGPSYEQYF

SEQ ID NO: 334905 - protein, 18 aa, Homo sapiens
  CDR3 for alpha chain variable domain of TCR clone 167453 (TRAV21, TRAJ52)
CAVRPSPAGGTIYGKLTF

SEQ ID NO: 334906 - protein, 17 aa, Homo sapiens
  CDR3 for beta chain variable domain of TCR clone 167453 (TRBV13, TRBJ2-3)
CASSLSRGAGGRNTQYF

SEQ ID NO: 334907 - protein, 16 aa, Homo sapiens
  CDR3 for alpha chain variable domain of TCR clone 167454 (TRAV30, TRAJ24)
CGTEIVGADSWGKFQF

SEQ ID NO: 334908 - protein, 12 aa, Homo sapiens
  CDR3 for beta chain variable domain of TCR clone 167454 (TRBV7-8, TRBJ2-7)
CASSLGDREQYF

SEQ ID NO: 334909 - protein, 12 aa, Homo sapiens
  CDR3 for alpha chain variable domain of TCR clone 167455 (TRAV20, TRAJ39)
CAVGNAGNMLTF

SEQ ID NO: 334910 - protein, 18 aa, Homo sapiens
  CDR3 for beta chain variable domain of TCR clone 167455 (TRBV23-1, TRBJ2-1)
CASGMFRLALSSYNEQFF

SEQ ID NO: 334911 - protein, 14 aa, Homo sapiens
  CDR3 for alpha chain variable domain of TCR clone 167456 (TRAV1-2, TRAJ16)
CAVNRFSDVQKLLF

SEQ ID NO: 334912 - protein, 15 aa, Homo sapiens
  CDR3 for beta chain variable domain of TCR clone 167456 (TRBV7-9, TRBJ1-6)
CASSSPGRGDSHLHF

SEQ ID NO: 334913 - protein, 14 aa, Homo sapiens
  CDR3 for alpha chain variable domain of TCR clone 167457 (TRAV16, TRAJ33)
CALSAMDSNYQLIW

SEQ ID NO: 334914 - protein, 14 aa, Homo sapiens
  CDR3 for beta chain variable domain of TCR clone 167457 (TRBV5-1, TRBJ1-2)
CASSQTPMATPSVR

SEQ ID NO: 334915 - protein, 12 aa, Homo sapiens
  CDR3 for alpha chain variable domain of TCR clone 167458 (TRAV16, TRAJ57)
CALEGGSEKLVF

SEQ ID NO: 334916 - protein, 12 aa, Homo sapiens
  CDR3 for beta chain variable domain of TCR clone 167458 (TRBV28, TRBJ2-7)
CASSARPYEQYF

SEQ ID NO: 334917 - protein, 15 aa, Homo sapiens
  CDR3 for alpha chain variable domain of TCR clone 167459 (TRAV12-3, TRAJ27)
CAMRAYNTNAGKSTF

SEQ ID NO: 334918 - protein, 12 aa, Homo sapiens
  CDR3 for beta chain variable domain of TCR clone 167459 (TRBV11-2, TRBJ2-2)
CASSLPTGELFF

SEQ ID NO: 334919 - protein, 17 aa, Homo sapiens
  CDR3 for alpha chain variable domain of TCR clone 167460 (TRAV26-1, TRAJ37)
CIVRVITVSSNTGKLIF

SEQ ID NO: 334920 - protein, 13 aa, Homo sapiens
  CDR3 for beta chain variable domain of TCR clone 167460 (TRBV20-1, TRBJ2-7)
QCPELAGVGEQYF

SEQ ID NO: 334921 - protein, 17 aa, Homo sapiens
  CDR3 for alpha chain variable domain of TCR clone 167461 (TRAV26-1, TRAJ37)
CIVRVITVSGNTGKLIF

SEQ ID NO: 334922 - protein, 15 aa, Homo sapiens
  CDR3 for beta chain variable domain of TCR clone 167461 (TRBV9, TRBJ1-6)
CASSVAGTGDSPLHF

SEQ ID NO: 334923 - protein, 15 aa, Homo sapiens
  CDR3 for alpha chain variable domain of TCR clone 167462 (TRAV1-2, TRAJ35)
CAVRDREGFGNVLHC

SEQ ID NO: 334924 - protein, 15 aa, Homo sapiens
  CDR3 for beta chain variable domain of TCR clone 167462 (TRBV10-2, TRBJ2-6)
CASSEQGTGANVLTF

SEQ ID NO: 334925 - protein, 14 aa, Homo sapiens
  CDR3 for alpha chain variable domain of TCR clone 167463 (TRAV13-1, TRAJ40)
CAASMTSGTYKYIF

SEQ ID NO: 334926 - protein, 15 aa, Homo sapiens
  CDR3 for beta chain variable domain of TCR clone 167463 (TRBV7-3, TRBJ2-1)
CASSPTGGGEVEEFF

SEQ ID NO: 334927 - protein, 19 aa, Homo sapiens
  CDR3 for alpha chain variable domain of TCR clone 167464 (TRAV3, TRAJ6)
CAVRDRNPSRSGGSYIPTF

SEQ ID NO: 334928 - protein, 15 aa, Homo sapiens
  CDR3 for beta chain variable domain of TCR clone 167464 (TRBV18, TRBJ2-7)
CASSPTFVDSYEQYF

SEQ ID NO: 334929 - protein, 19 aa, Homo sapiens
  CDR3 for alpha chain variable domain of TCR clone 167465 (TRAV13-1, TRAJ52)
CAASPYQNAGGTSYGKLTF

SEQ ID NO: 334930 - protein, 13 aa, Homo sapiens
  CDR3 for beta chain variable domain of TCR clone 167465 (TRBV7-3, TRBJ1-1)
CASSQDWGAEAFF

SEQ ID NO: 334931 - protein, 13 aa, Homo sapiens
  CDR3 for alpha chain variable domain of TCR clone 167466 (TRAV12-3, TRAJ43)
CAMIRPNNNDMRF

SEQ ID NO: 334932 - protein, 14 aa, Homo sapiens
  CDR3 for beta chain variable domain of TCR clone 167466 (TRBV7-8, TRBJ2-3)
CASSLEAGTDTQYF

SEQ ID NO: 334933 - protein, 15 aa, Homo sapiens
  CDR3 for alpha chain variable domain of TCR clone 167467 (TRAV12-2, TRAJ53)
CAVNGGGGSNYKLTF

SEQ ID NO: 334934 - protein, 11 aa, Homo sapiens
  CDR3 for beta chain variable domain of TCR clone 167467 (TRBV19, TRBJ1-2)
CASSISSGYTF

SEQ ID NO: 334935 - protein, 13 aa, Homo sapiens
  CDR3 for alpha chain variable domain of TCR clone 167468 (TRAV20, TRAJ21)
CAVEGYNFNKFYF

SEQ ID NO: 334936 - protein, 19 aa, Homo sapiens
  CDR3 for beta chain variable domain of TCR clone 167468 (TRBV11-3, TRBJ2-2)
CASSTRPGAKTTNTGELFF

SEQ ID NO: 334937 - protein, 15 aa, Homo sapiens
  CDR3 for alpha chain variable domain of TCR clone 167469 (TRAV8-4, TRAJ48)
CAVSAAYFGNEKLTF

SEQ ID NO: 334938 - protein, 12 aa, Homo sapiens
  CDR3 for beta chain variable domain of TCR clone 167469 (TRBV7-8, TRBJ2-7)
CASSLGDREQYF

SEQ ID NO: 334939 - protein, 14 aa, Homo sapiens
  CDR3 for alpha chain variable domain of TCR clone 167470 (TRAV1-2, TRAJ16)
CAVNRFSDGQKLLF

SEQ ID NO: 334940 - protein, 13 aa, Homo sapiens
  CDR3 for beta chain variable domain of TCR clone 167470 (TRBV7-3, TRBJ1-1)
CASRQDWGAEAFF

SEQ ID NO: 334941 - protein, 15 aa, Homo sapiens
  CDR3 for alpha chain variable domain of TCR clone 167471 (TRAV3, TRAJ22)
CAVRDRGGSARQLTF

SEQ ID NO: 334942 - protein, 16 aa, Homo sapiens
  CDR3 for beta chain variable domain of TCR clone 167471 (TRBV4-2, TRBJ2-4)
CASSQELRRAKNRQYF

SEQ ID NO: 334943 - protein, 15 aa, Homo sapiens
  CDR3 for alpha chain variable domain of TCR clone 167472 (TRAV21, TRAJ38)
CAVRQDAGNNRKLIW

SEQ ID NO: 334944 - protein, 16 aa, Homo sapiens
  CDR3 for beta chain variable domain of TCR clone 167472 (TRBV4-2, TRBJ1-1)
CASRPLDGGGDSEAFF

SEQ ID NO: 334945 - protein, 19 aa, Homo sapiens
  CDR3 for alpha chain variable domain of TCR clone 167473 (TRAV26-1, TRAJ52)
CIVRAHRNAGGTSYGKLTF

SEQ ID NO: 334946 - protein, 15 aa, Homo sapiens
  CDR3 for beta chain variable domain of TCR clone 167473 (TRBV2, TRBJ2-4)
CASRTQGAAKNIQYF

SEQ ID NO: 334947 - protein, 17 aa, Homo sapiens
  CDR3 for alpha chain variable domain of TCR clone 167474 (TRAV4, TRAJ18)
CLVGERSVGSTLGRLHF

SEQ ID NO: 334948 - protein, 14 aa, Homo sapiens
  CDR3 for beta chain variable domain of TCR clone 167474 (TRBV6-5, TRBJ1-2)
CASSYDGTGGGYTF

SEQ ID NO: 334949 - protein, 13 aa, Homo sapiens
  CDR3 for alpha chain variable domain of TCR clone 167475 (TRAV13-1, TRAJ43)
CGASKNNNNDMRF

SEQ ID NO: 334950 - protein, 17 aa, Homo sapiens
  CDR3 for beta chain variable domain of TCR clone 167475 (TRBV27, TRBJ2-6)
CASSLTGFASGANVLTF

SEQ ID NO: 334951 - protein, 16 aa, Homo sapiens
  CDR3 for alpha chain variable domain of TCR clone 167476 (TRAV26-1, TRAJ33)
CIVPFWGEDSNYQLIW

SEQ ID NO: 334952 - protein, 15 aa, Homo sapiens
  CDR3 for beta chain variable domain of TCR clone 167476 (TRBV5-4, TRBJ2-6)
CASSAGRTGANVLTF

SEQ ID NO: 334953 - protein, 15 aa, Homo sapiens
  CDR3 for alpha chain variable domain of TCR clone 167477 (TRAV21, TRAJ53)
CATLNSGGSNYKLTF

SEQ ID NO: 334954 - protein, 14 aa, Homo sapiens
  CDR3 for beta chain variable domain of TCR clone 167477 (TRBV7-2, TRBJ2-7)
CASSVPPGQGPQYF

SEQ ID NO: 334955 - protein, 13 aa, Homo sapiens
  CDR3 for alpha chain variable domain of TCR clone 167478 (TRAV20, TRAJ34)
CAVRSYNTDRLIF

SEQ ID NO: 334956 - protein, 15 aa, Homo sapiens
  CDR3 for beta chain variable domain of TCR clone 167478 (TRBV27, TRBJ1-3)
CASSPSPGSGNTIYF

SEQ ID NO: 334957 - protein, 15 aa, Homo sapiens
  CDR3 for alpha chain variable domain of TCR clone 167479 (TRAV29/DV5, TRAJ29)
CAASARSSGNTPLVF

SEQ ID NO: 334958 - protein, 17 aa, Homo sapiens
  CDR3 for beta chain variable domain of TCR clone 167479 (TRBV4-1, TRBJ1-4)
CASSQEVPRGVEEKLFF

SEQ ID NO: 334959 - protein, 11 aa, Homo sapiens
  CDR3 for alpha chain variable domain of TCR clone 167480 (TRAV4, TRAJ40)
TPVAGAYKYIF

SEQ ID NO: 334960 - protein, 14 aa, Homo sapiens
  CDR3 for beta chain variable domain of TCR clone 167480 (TRBV7-3, TRBJ1-1)
CASSLKGGNTEAFF

SEQ ID NO: 334961 - protein, 15 aa, Homo sapiens
  CDR3 for alpha chain variable domain of TCR clone 167481 (TRAV21, TRAJ24)
CAARSSTDSWGKLQF

SEQ ID NO: 334962 - protein, 13 aa, Homo sapiens
  CDR3 for beta chain variable domain of TCR clone 167481 (TRBV11-2, TRBJ2-5)
CSSRTGGIETQYF

SEQ ID NO: 334963 - protein, 14 aa, Homo sapiens
  CDR3 for alpha chain variable domain of TCR clone 167482 (TRAV12-3, TRAJ29)
CAMSPYSGNTPLVF

SEQ ID NO: 334964 - protein, 12 aa, Homo sapiens
  CDR3 for beta chain variable domain of TCR clone 167482 (TRBV7-9, TRBJ2-7)
CASSIKREEQYF

SEQ ID NO: 334965 - protein, 14 aa, Homo sapiens
  CDR3 for alpha chain variable domain of TCR clone 167483 (TRAV12-1, TRAJ54)
CVVNIYQGAQKLVF

SEQ ID NO: 334966 - protein, 12 aa, Homo sapiens
  CDR3 for beta chain variable domain of TCR clone 167483 (TRBV20-1, TRBJ2-1)
CSARLGTDEQFF

SEQ ID NO: 334967 - protein, 11 aa, Homo sapiens
  CDR3 for alpha chain variable domain of TCR clone 167484 (TRAV2, TRAJ33)
CAVDSNYQLIW

SEQ ID NO: 334968 - protein, 13 aa, Homo sapiens
  CDR3 for beta chain variable domain of TCR clone 167484 (TRBV27, TRBJ2-1)
CASRTLGVGEQFF

SEQ ID NO: 334969 - protein, 16 aa, Homo sapiens
  CDR3 for alpha chain variable domain of TCR clone 167485 (TRAV8-3, TRAJ44)
CAVGTLMTGTASNLTF

SEQ ID NO: 334970 - protein, 13 aa, Homo sapiens
  CDR3 for beta chain variable domain of TCR clone 167485 (TRBV11-2, TRBJ2-1)
CASSLRLTHEQFF

SEQ ID NO: 334971 - protein, 14 aa, Homo sapiens
  CDR3 for alpha chain variable domain of TCR clone 167486 (TRAV16, TRAJ42)
CSLSGMGSQGNLIF

SEQ ID NO: 334972 - protein, 16 aa, Homo sapiens
  CDR3 for beta chain variable domain of TCR clone 167486 (TRBV5-1, TRBJ2-2)
CASSSRTGGRTGELFF

SEQ ID NO: 334973 - protein, 12 aa, Homo sapiens
  CDR3 for alpha chain variable domain of TCR clone 167487 (TRAV27, TRAJ9)
CSGESGGLKTIF

SEQ ID NO: 334974 - protein, 14 aa, Homo sapiens
  CDR3 for beta chain variable domain of TCR clone 167487 (TRBV6-1, TRBJ2-1)
CASAKDGFYNEQFV

SEQ ID NO: 334975 - protein, 11 aa, Homo sapiens
  CDR3 for alpha chain variable domain of TCR clone 167488 (TRAV3, TRAJ21)
CAVGNFNKFYF

SEQ ID NO: 334976 - protein, 14 aa, Homo sapiens
  CDR3 for beta chain variable domain of TCR clone 167488 (TRBV27, TRBJ1-5)
CASSPSGSNQPQHF

SEQ ID NO: 334977 - protein, 15 aa, Homo sapiens
  CDR3 for alpha chain variable domain of TCR clone 167489 (TRAV21, TRAJ24)
CAARSSTDRWGTLQF

SEQ ID NO: 334978 - protein, 13 aa, Homo sapiens
  CDR3 for beta chain variable domain of TCR clone 167489 (TRBV11-2, TRBJ2-5)
CASSSTGEETQYF

SEQ ID NO: 334979 - protein, 16 aa, Homo sapiens
  CDR3 for alpha chain variable domain of TCR clone 167490 (TRAV30, TRAJ28)
CGTVTPRRAGSYQLTF

SEQ ID NO: 334980 - protein, 11 aa, Homo sapiens
  CDR3 for beta chain variable domain of TCR clone 167490 (TRBV27, TRBJ2-3)
CASSLGDTQYF

SEQ ID NO: 334981 - protein, 14 aa, Homo sapiens
  CDR3 for alpha chain variable domain of TCR clone 167491 (TRAV16, TRAJ8)
CALLLNTGFQKLVF

SEQ ID NO: 334982 - protein, 15 aa, Homo sapiens
  CDR3 for beta chain variable domain of TCR clone 167491 (TRBV7-7, TRBJ2-2)
CATSKLAKNTEELFF

SEQ ID NO: 334983 - protein, 14 aa, Homo sapiens
  CDR3 for alpha chain variable domain of TCR clone 167492 (TRAV12-2, TRAJ15)
CAPHTGQARTALIF

SEQ ID NO: 334984 - protein, 17 aa, Homo sapiens
  CDR3 for beta chain variable domain of TCR clone 167492 (TRBV5-5, TRBJ1-2)
CASSLGSLDGQSEGYTF

SEQ ID NO: 334985 - protein, 14 aa, Homo sapiens
  CDR3 for alpha chain variable domain of TCR clone 167493 (TRAV1-2, TRAJ16)
CAVNRFSDGQKLLF

SEQ ID NO: 334986 - protein, 15 aa, Homo sapiens
  CDR3 for beta chain variable domain of TCR clone 167493 (TRBV20-1, TRBJ1-1)
CSARDPRGEYTEACF

SEQ ID NO: 334987 - protein, 15 aa, Homo sapiens
  CDR3 for alpha chain variable domain of TCR clone 167494 (TRAV29/DV5, TRAJ29)
CAASERSSGNTPLVF

SEQ ID NO: 334988 - protein, 16 aa, Homo sapiens
  CDR3 for beta chain variable domain of TCR clone 167494 (TRBV24-1, TRBJ2-3)
CATSDRRQDLTDTQYF

SEQ ID NO: 334989 - protein, 14 aa, Homo sapiens
  CDR3 for alpha chain variable domain of TCR clone 167495 (TRAV13-2, TRAJ43)
CAEIPTYDNNDMRF

SEQ ID NO: 334990 - protein, 13 aa, Homo sapiens
  CDR3 for beta chain variable domain of TCR clone 167495 (TRBV28, TRBJ2-7)
CASTPGLAGEQYF

SEQ ID NO: 334991 - protein, 11 aa, Homo sapiens
  CDR3 for alpha chain variable domain of TCR clone 167496 (TRAV1-1, TRAJ23)
CAVRQGGKLIF

SEQ ID NO: 334992 - protein, 12 aa, Homo sapiens
  CDR3 for beta chain variable domain of TCR clone 167496 (TRBV3-1, TRBJ2-1)
CASSQGSSGQFF

SEQ ID NO: 334993 - protein, 14 aa, Homo sapiens
  CDR3 for alpha chain variable domain of TCR clone 167497 (TRAV27, TRAJ22)
CAGLPSVSARQLTF

SEQ ID NO: 334994 - protein, 13 aa, Homo sapiens
  CDR3 for beta chain variable domain of TCR clone 167497 (TRBV7-2, TRBJ2-7)
CASSSPSGSEQYF

SEQ ID NO: 334995 - protein, 14 aa, Homo sapiens
  CDR3 for alpha chain variable domain of TCR clone 167498 (TRAV3, TRAJ33)
CAVRDMGSNYQLIW

SEQ ID NO: 334996 - protein, 17 aa, Homo sapiens
  CDR3 for beta chain variable domain of TCR clone 167498 (TRBV19, TRBJ2-1)
CASSIWSAQPTHNEQFF

SEQ ID NO: 334997 - protein, 12 aa, Homo sapiens
  CDR3 for alpha chain variable domain of TCR clone 167499 (TRAV2, TRAJ34)
CAVEDNTDKLIF

SEQ ID NO: 334998 - protein, 17 aa, Homo sapiens
  CDR3 for beta chain variable domain of TCR clone 167499 (TRBV7-8, TRBJ2-6)
CASSAGTGGAGANVLTF

SEQ ID NO: 334999 - protein, 14 aa, Homo sapiens
  CDR3 for alpha chain variable domain of TCR clone 167500 (TRAV2, TRAJ9)
CAVEDRSGGFKTIF

SEQ ID NO: 335000 - protein, 15 aa, Homo sapiens
  CDR3 for beta chain variable domain of TCR clone 167500 (TRBV11-1, TRBJ2-1)
CASSGQAEPYNEQFF

SEQ ID NO: 335001 - protein, 13 aa, Homo sapiens
  CDR3 for alpha chain variable domain of TCR clone 167501 (TRAV21, TRAJ15)
CAVANQAGTALIF

SEQ ID NO: 335002 - protein, 15 aa, Homo sapiens
  CDR3 for beta chain variable domain of TCR clone 167501 (TRBV27, TRBJ2-7)
CASSLGSSVSPEQYF

SEQ ID NO: 335003 - protein, 15 aa, Homo sapiens
  CDR3 for alpha chain variable domain of TCR clone 167502 (TRAV12-2, TRAJ53)
CAVNGGGGSNYKLTF

SEQ ID NO: 335004 - protein, 11 aa, Homo sapiens
  CDR3 for beta chain variable domain of TCR clone 167502 (TRBV5-1, TRBJ2-1)
CASSIGQEQFF

SEQ ID NO: 335005 - protein, 10 aa, Homo sapiens
  CDR3 for alpha chain variable domain of TCR clone 167503 (TRAV26-1, TRAJ40)
CIAGAYKYIF

SEQ ID NO: 335006 - protein, 15 aa, Homo sapiens
  CDR3 for beta chain variable domain of TCR clone 167503 (TRBV19, TRBJ2-1)
CASSSPGVPLDEQFF

SEQ ID NO: 335007 - protein, 14 aa, Homo sapiens
  CDR3 for alpha chain variable domain of TCR clone 167504 (TRAV12-2, TRAJ5)
CAVNRSTGRRALTF

SEQ ID NO: 335008 - protein, 12 aa, Homo sapiens
  CDR3 for beta chain variable domain of TCR clone 167504 (TRBV14, TRBJ2-5)
CASSHLKETQYF

SEQ ID NO: 335009 - protein, 14 aa, Homo sapiens
  CDR3 for alpha chain variable domain of TCR clone 167505 (TRAV29/DV5, TRAJ45)
CAASFRGGADGLTF

SEQ ID NO: 335010 - protein, 19 aa, Homo sapiens
  CDR3 for beta chain variable domain of TCR clone 167505 (TRBV7-2, TRBJ2-3)
CASSFLSRNWGGGTDTQYF

SEQ ID NO: 335011 - protein, 15 aa, Homo sapiens
  CDR3 for alpha chain variable domain of TCR clone 167506 (TRAV2, TRAJ15)
CAVEDREQAGTALIF

SEQ ID NO: 335012 - protein, 16 aa, Homo sapiens
  CDR3 for beta chain variable domain of TCR clone 167506 (TRBV7-2, TRBJ1-4)
CASSLAPGRRDEKLFF

SEQ ID NO: 335013 - protein, 14 aa, Homo sapiens
  CDR3 for alpha chain variable domain of TCR clone 167507 (TRAV26-1, TRAJ40)
CIVRLLSGTYKYIF

SEQ ID NO: 335014 - protein, 13 aa, Homo sapiens
  CDR3 for beta chain variable domain of TCR clone 167507 (TRBV3-1, TRBJ1-1)
CASSQLQGAEAFY

SEQ ID NO: 335015 - protein, 10 aa, Homo sapiens
  CDR3 for alpha chain variable domain of TCR clone 167508 (TRAV2, TRAJ15)
RGQAGTALIC

SEQ ID NO: 335016 - protein, 13 aa, Homo sapiens
  CDR3 for beta chain variable domain of TCR clone 167508 (TRBV27, TRBJ2-1)
CASRTLGVGEQFF

SEQ ID NO: 335017 - protein, 16 aa, Homo sapiens
  CDR3 for alpha chain variable domain of TCR clone 167509 (TRAV30, TRAJ24)
CGTEIVDADSWGKFQF

SEQ ID NO: 335018 - protein, 13 aa, Homo sapiens
  CDR3 for beta chain variable domain of TCR clone 167509 (TRBV7-3, TRBJ2-7)
CASSPGQGSEQYF

SEQ ID NO: 335019 - protein, 11 aa, Homo sapiens
  CDR3 for alpha chain variable domain of TCR clone 167510 (TRAV27, TRAJ45)
SSGGGAAGLTF

SEQ ID NO: 335020 - protein, 17 aa, Homo sapiens
  CDR3 for beta chain variable domain of TCR clone 167510 (TRBV11-2, TRBJ2-1)
CASSLYPPGVKYNEQFF

SEQ ID NO: 335021 - protein, 14 aa, Homo sapiens
  CDR3 for alpha chain variable domain of TCR clone 167511 (TRAV1-2, TRAJ16)
CAVKRFSDGQKLLF

SEQ ID NO: 335022 - protein, 13 aa, Homo sapiens
  CDR3 for beta chain variable domain of TCR clone 167511 (TRBV4-1, TRBJ2-1)
CASSQAGGDDQFF

SEQ ID NO: 335023 - protein, 15 aa, Homo sapiens
  CDR3 for alpha chain variable domain of TCR clone 167512 (TRAV3, TRAJ5)
CAVRDLDTGRRELTF

SEQ ID NO: 335024 - protein, 13 aa, Homo sapiens
  CDR3 for beta chain variable domain of TCR clone 167512 (TRBV12-4, TRBJ2-7)
CASSPTESHEQYF

SEQ ID NO: 335025 - protein, 15 aa, Homo sapiens
  CDR3 for alpha chain variable domain of TCR clone 167513 (TRAV12-3, TRAJ6)
CAMSATTGGSYIPTF

SEQ ID NO: 335026 - protein, 16 aa, Homo sapiens
  CDR3 for beta chain variable domain of TCR clone 167513 (TRBV28, TRBJ2-7)
CASSLFFETGGPEQYF

SEQ ID NO: 335027 - protein, 16 aa, Homo sapiens
  CDR3 for alpha chain variable domain of TCR clone 167514 (TRAV13-1, TRAJ48)
CAASILGNFGNEKLTY

SEQ ID NO: 335028 - protein, 16 aa, Homo sapiens
  CDR3 for beta chain variable domain of TCR clone 167514 (TRBV18, TRBJ1-5)
CASSPYRVEGNQPQHF

SEQ ID NO: 335029 - protein, 19 aa, Homo sapiens
  CDR3 for alpha chain variable domain of TCR clone 167515 (TRAV25, TRAJ20)
TATQTTDVGILPHDYKLSF

SEQ ID NO: 335030 - protein, 20 aa, Homo sapiens
  CDR3 for beta chain variable domain of TCR clone 167515 (TRBV19, TRBJ2-7)
CASTQVAPESLRAVLRAGHQ

SEQ ID NO: 335031 - protein, 13 aa, Homo sapiens
  CDR3 for alpha chain variable domain of TCR clone 167516 (TRAV21, TRAJ15)
CASPNQAGTALIF

SEQ ID NO: 335032 - protein, 16 aa, Homo sapiens
  CDR3 for beta chain variable domain of TCR clone 167516 (TRBV12-5, TRBJ2-5)
CASGPRTSGNQETQYF

SEQ ID NO: 335033 - protein, 16 aa, Homo sapiens
  CDR3 for alpha chain variable domain of TCR clone 167517 (TRAV2, TRAJ4)
CAVEDRFSGGYNKLIF

SEQ ID NO: 335034 - protein, 13 aa, Homo sapiens
  CDR3 for beta chain variable domain of TCR clone 167517 (TRBV7-6, TRBJ2-7)
CASSLDHTHEQYF

SEQ ID NO: 335035 - protein, 14 aa, Homo sapiens
  CDR3 for alpha chain variable domain of TCR clone 167518 (TRAV35, TRAJ13)
CAGSPSGGYQKVTF

SEQ ID NO: 335036 - protein, 17 aa, Homo sapiens
  CDR3 for beta chain variable domain of TCR clone 167518 (TRBV18, TRBJ1-5)
CQLTTCRFRQNNQPQHF

SEQ ID NO: 335037 - protein, 14 aa, Homo sapiens
  CDR3 for alpha chain variable domain of TCR clone 167519 (TRAV13-1, TRAJ21)
CAARKASTNFTLDL

SEQ ID NO: 335038 - protein, 13 aa, Homo sapiens
  CDR3 for beta chain variable domain of TCR clone 167519 (TRBV7-3, TRBJ1-1)
CASSQDWGAEAFF

SEQ ID NO: 335039 - protein, 15 aa, Homo sapiens
  CDR3 for alpha chain variable domain of TCR clone 167520 (TRAV34, TRAJ38)
CGADFTPGNNRKLIW

SEQ ID NO: 335040 - protein, 16 aa, Homo sapiens
  CDR3 for beta chain variable domain of TCR clone 167520 (TRBV6-1, TRBJ2-3)
GASSEVIGQGTDTQYF

SEQ ID NO: 335041 - protein, 12 aa, Homo sapiens
  CDR3 for alpha chain variable domain of TCR clone 167521 (TRAV2, TRAJ10)
CASTGGGNKLTF

SEQ ID NO: 335042 - protein, 14 aa, Homo sapiens
  CDR3 for beta chain variable domain of TCR clone 167521 (TRBV5-4, TRBJ1-1)
CASSLDSRRDEAFF

SEQ ID NO: 335043 - protein, 13 aa, Homo sapiens
  CDR3 for alpha chain variable domain of TCR clone 167522 (TRAV8-3, TRAJ4)
WVFYSGGYNKLIF

SEQ ID NO: 335044 - protein, 13 aa, Homo sapiens
  CDR3 for beta chain variable domain of TCR clone 167522 (TRBV10-3, TRBJ2-7)
CASKLAVNYEQYF

SEQ ID NO: 335045 - protein, 14 aa, Homo sapiens
  CDR3 for alpha chain variable domain of TCR clone 167523 (TRAV1-2, TRAJ33)
CAVRAPDSNYQLIW

SEQ ID NO: 335046 - protein, 13 aa, Homo sapiens
  CDR3 for beta chain variable domain of TCR clone 167523 (TRBV10-3, TRBJ2-7)
CASKLAVNYEQYF

SEQ ID NO: 335047 - protein, 15 aa, Homo sapiens
  CDR3 for alpha chain variable domain of TCR clone 167524 (TRAV21, TRAJ24)
CAARSSTGSWGKLQF

SEQ ID NO: 335048 - protein, 13 aa, Homo sapiens
  CDR3 for beta chain variable domain of TCR clone 167524 (TRBV10-3, TRBJ2-7)
RASKLAVNYEQYF

SEQ ID NO: 335049 - protein, 13 aa, Homo sapiens
  CDR3 for alpha chain variable domain of TCR clone 167525 (TRAV29/DV5, TRAJ31)
CAASRNNNASIMF

SEQ ID NO: 335050 - protein, 12 aa, Homo sapiens
  CDR3 for beta chain variable domain of TCR clone 167525 (TRBV14, TRBJ2-7)
CASSLYKDEQYF

SEQ ID NO: 335051 - protein, 12 aa, Homo sapiens
  CDR3 for alpha chain variable domain of TCR clone 167526 (TRAV35, TRAJ30)
CAGRLADDKIIF

SEQ ID NO: 335052 - protein, 17 aa, Homo sapiens
  CDR3 for beta chain variable domain of TCR clone 167526 (TRBV4-2, TRBJ2-5)
CASSPGRWRNFQETQYF

SEQ ID NO: 335053 - protein, 13 aa, Homo sapiens
  CDR3 for alpha chain variable domain of TCR clone 167527 (TRAV2, TRAJ40)
CAVVTSGTYKYNF

SEQ ID NO: 335054 - protein, 14 aa, Homo sapiens
  CDR3 for beta chain variable domain of TCR clone 167527 (TRBV19, TRBJ2-1)
CASPTFVLSGERFF

SEQ ID NO: 335055 - protein, 17 aa, Homo sapiens
  CDR3 for alpha chain variable domain of TCR clone 167528 (TRAV26-1, TRAJ53)
CIVRVDDSGGSNYKLTF

SEQ ID NO: 335056 - protein, 15 aa, Homo sapiens
  CDR3 for beta chain variable domain of TCR clone 167528 (TRBV20-1, TRBJ2-7)
CSARFPAAYFYEQYF

SEQ ID NO: 335057 - protein, 11 aa, Homo sapiens
  CDR3 for alpha chain variable domain of TCR clone 167529 (TRAV8-6, TRAJ34)
CAVWNTDKLIF

SEQ ID NO: 335058 - protein, 16 aa, Homo sapiens
  CDR3 for beta chain variable domain of TCR clone 167529 (TRBV5-1, TRBJ2-7)
CASSSASTSPGGEQYF

SEQ ID NO: 335059 - protein, 14 aa, Homo sapiens
  CDR3 for alpha chain variable domain of TCR clone 167530 (TRAV13-2, TRAJ17)
FAENSKAAGNKLTF

SEQ ID NO: 335060 - protein, 17 aa, Homo sapiens
  CDR3 for beta chain variable domain of TCR clone 167530 (TRBV28, TRBJ2-5)
CASSTPEGDALQETQYF

SEQ ID NO: 335061 - protein, 14 aa, Homo sapiens
  CDR3 for alpha chain variable domain of TCR clone 167531 (TRAV12-3, TRAJ54)
CSMRGIQGAQKLVF

SEQ ID NO: 335062 - protein, 13 aa, Homo sapiens
  CDR3 for beta chain variable domain of TCR clone 167531 (TRBV19, TRBJ1-1)
CASSPSNGGEAFF

SEQ ID NO: 335063 - protein, 15 aa, Homo sapiens
  CDR3 for alpha chain variable domain of TCR clone 167532 (TRAV12-3, TRAJ6)
CAMSATSGGSYIPTF

SEQ ID NO: 335064 - protein, 14 aa, Homo sapiens
  CDR3 for beta chain variable domain of TCR clone 167532 (TRBV4-1, TRBJ1-4)
CASSQERKNEKLFF

SEQ ID NO: 335065 - protein, 13 aa, Homo sapiens
  CDR3 for alpha chain variable domain of TCR clone 167533 (TRAV8-6, TRAJ49)
CAVITNTGNQFYF

SEQ ID NO: 335066 - protein, 14 aa, Homo sapiens
  CDR3 for beta chain variable domain of TCR clone 167533 (TRBV5-1, TRBJ2-7)
CASSTGESLYEQYF

SEQ ID NO: 335067 - protein, 14 aa, Homo sapiens
  CDR3 for alpha chain variable domain of TCR clone 167534 (TRAV4, TRAJ17)
CLVGPRAAGNKLTF

SEQ ID NO: 335068 - protein, 17 aa, Homo sapiens
  CDR3 for beta chain variable domain of TCR clone 167534 (TRBV13, TRBJ2-3)
CASSLSRVAGGRNTQYF

SEQ ID NO: 335069 - protein, 12 aa, Homo sapiens
  CDR3 for alpha chain variable domain of TCR clone 167535 (TRAV1-1, TRAJ9)
CAVDTGGFKTIF

SEQ ID NO: 335070 - protein, 13 aa, Homo sapiens
  CDR3 for beta chain variable domain of TCR clone 167535 (TRBV7-9, TRBJ1-2)
CASSLKQNYGYTF

SEQ ID NO: 335071 - protein, 16 aa, Homo sapiens
  CDR3 for alpha chain variable domain of TCR clone 167536 (TRAV3, TRAJ37)
CAVRGKGSGNTGKLIF

SEQ ID NO: 335072 - protein, 15 aa, Homo sapiens
  CDR3 for beta chain variable domain of TCR clone 167536 (TRBV7-9, TRBJ1-6)
WASSSPGRGNSPLHF

SEQ ID NO: 335073 - protein, 17 aa, Homo sapiens
  CDR3 for alpha chain variable domain of TCR clone 167537 (TRAV13-1, TRAJ52)
CAASSCAGGTSYGKLTV

SEQ ID NO: 335074 - protein, 15 aa, Homo sapiens
  CDR3 for beta chain variable domain of TCR clone 167537 (TRBV28, TRBJ2-4)
CAAGSGTLLMGIQYF

SEQ ID NO: 335075 - protein, 13 aa, Homo sapiens
  CDR3 for alpha chain variable domain of TCR clone 167538 (TRAV13-1, TRAJ47)
CAATLTGGNKLVF

SEQ ID NO: 335076 - protein, 18 aa, Homo sapiens
  CDR3 for beta chain variable domain of TCR clone 167538 (TRBV15, TRBJ2-3)
CATSRDGARSWDTDTQYF

SEQ ID NO: 335077 - protein, 13 aa, Homo sapiens
  CDR3 for alpha chain variable domain of TCR clone 167539 (TRAV2, TRAJ40)
CAVVTSGPYKYIF

SEQ ID NO: 335078 - protein, 14 aa, Homo sapiens
  CDR3 for beta chain variable domain of TCR clone 167539 (TRBV19, TRBJ2-1)
CASPTFVLSSEQFF

SEQ ID NO: 335079 - protein, 14 aa, Homo sapiens
  CDR3 for alpha chain variable domain of TCR clone 167540 (TRAV12-2, TRAJ44)
CAVNPAGTASKLTF

SEQ ID NO: 335080 - protein, 16 aa, Homo sapiens
  CDR3 for beta chain variable domain of TCR clone 167540 (TRBV4-1, TRBJ2-3)
CASSQSTSGAEDTQYF

SEQ ID NO: 335081 - protein, 11 aa, Homo sapiens
  CDR3 for alpha chain variable domain of TCR clone 167541 (TRAV17, TRAJ43)
CATPRSNDMRF

SEQ ID NO: 335082 - protein, 13 aa, Homo sapiens
  CDR3 for beta chain variable domain of TCR clone 167541 (TRBV2, TRBJ2-3)
CASGRGRTDTQYF

SEQ ID NO: 335083 - protein, 13 aa, Homo sapiens
  CDR3 for alpha chain variable domain of TCR clone 167542 (TRAV21, TRAJ45)
CAVMGGGADGLTF

SEQ ID NO: 335084 - protein, 15 aa, Homo sapiens
  CDR3 for beta chain variable domain of TCR clone 167542 (TRBV6-1, TRBJ2-2)
CASSAGQGYTGELFF

SEQ ID NO: 335085 - protein, 14 aa, Homo sapiens
  CDR3 for alpha chain variable domain of TCR clone 167543 (TRAV1-2, TRAJ16)
CAVNRFSDVQKLLF

SEQ ID NO: 335086 - protein, 14 aa, Homo sapiens
  CDR3 for beta chain variable domain of TCR clone 167543 (TRBV12-4, TRBJ1-1)
CASSLGTGGTEAFF

SEQ ID NO: 335087 - protein, 17 aa, Homo sapiens
  CDR3 for alpha chain variable domain of TCR clone 167544 (TRAV26-1, TRAJ53)
CIVRVDDSGGSNYKLTF

SEQ ID NO: 335088 - protein, 15 aa, Homo sapiens
  CDR3 for beta chain variable domain of TCR clone 167544 (TRBV20-1, TRBJ2-7)
CSARVPAAYFCEQYF

SEQ ID NO: 335089 - protein, 15 aa, Homo sapiens
  CDR3 for alpha chain variable domain of TCR clone 167545 (TRAV23/DV6, TRAJ18)
YAARYNGSTLGRLYF

SEQ ID NO: 335090 - protein, 12 aa, Homo sapiens
  CDR3 for beta chain variable domain of TCR clone 167545 (TRBV7-8, TRBJ2-7)
CASSLGDREQYF

SEQ ID NO: 335091 - protein, 15 aa, Homo sapiens
  CDR3 for alpha chain variable domain of TCR clone 167546 (TRAV26-1, TRAJ29)
SIVRVEGSGNTPLFF

SEQ ID NO: 335092 - protein, 15 aa, Homo sapiens
  CDR3 for beta chain variable domain of TCR clone 167546 (TRBV7-9, TRBJ1-5)
CASSQGHQPNQPQHF

SEQ ID NO: 335093 - protein, 13 aa, Homo sapiens
  CDR3 for alpha chain variable domain of TCR clone 167547 (TRAV17, TRAJ21)
CATDGGNFNKFYF

SEQ ID NO: 335094 - protein, 16 aa, Homo sapiens
  CDR3 for beta chain variable domain of TCR clone 167547 (TRBV29-1, TRBJ2-7)
CSVEDAEDGTAYEQYF

SEQ ID NO: 335095 - protein, 15 aa, Homo sapiens
  CDR3 for alpha chain variable domain of TCR clone 167548 (TRAV8-3, TRAJ40)
SAAPSLGSGTYKYIF

SEQ ID NO: 335096 - protein, 16 aa, Homo sapiens
  CDR3 for beta chain variable domain of TCR clone 167548 (TRBV7-3, TRBJ2-3)
CASSLSGYRPEDTQYF

SEQ ID NO: 335097 - protein, 13 aa, Homo sapiens
  CDR3 for alpha chain variable domain of TCR clone 167549 (TRAV27, TRAJ3)
ASLRGSSASKIIF

SEQ ID NO: 335098 - protein, 15 aa, Homo sapiens
  CDR3 for beta chain variable domain of TCR clone 167549 (TRBV28, TRBJ1-3)
CASSMGWASGKQLYF

SEQ ID NO: 335099 - protein, 12 aa, Homo sapiens
  CDR3 for alpha chain variable domain of TCR clone 167550 (TRAV38-1, TRAJ57)
CAFMKLPPTLVF

SEQ ID NO: 335100 - protein, 17 aa, Homo sapiens
  CDR3 for beta chain variable domain of TCR clone 167550 (TRBV18, TRBJ2-2)
CASSQRSSGQGPGELFF

SEQ ID NO: 335101 - protein, 15 aa, Homo sapiens
  CDR3 for alpha chain variable domain of TCR clone 167551 (TRAV21, TRAJ53)
CATLNSGGSNYTLTF

SEQ ID NO: 335102 - protein, 16 aa, Homo sapiens
  CDR3 for beta chain variable domain of TCR clone 167551 (TRBV20-1, TRBJ1-2)
CSASMGQGVANYDYTF

SEQ ID NO: 335103 - protein, 16 aa, Homo sapiens
  CDR3 for alpha chain variable domain of TCR clone 167552 (TRAV2, TRAJ13)
CAARILGVTRKLPLEL

SEQ ID NO: 335104 - protein, 14 aa, Homo sapiens
  CDR3 for beta chain variable domain of TCR clone 167552 (TRBV19, TRBJ2-1)
CASAVTGARNEQFF

SEQ ID NO: 335105 - protein, 16 aa, Homo sapiens
  CDR3 for alpha chain variable domain of TCR clone 167553 (TRAV30, TRAJ24)
CGTEIVDADSWGKFQF

SEQ ID NO: 335106 - protein, 19 aa, Homo sapiens
  CDR3 for beta chain variable domain of TCR clone 167553 (TRBV25-1, TRBJ2-2)
CATLVYRVDRGRKTGELVF

SEQ ID NO: 335107 - protein, 16 aa, Homo sapiens
  CDR3 for alpha chain variable domain of TCR clone 167554 (TRAV26-1, TRAJ52)
CIVSNAGGTSYGKLTC

SEQ ID NO: 335108 - protein, 15 aa, Homo sapiens
  CDR3 for beta chain variable domain of TCR clone 167554 (TRBV7-3, TRBJ2-1)
CASSPTGGGEVEQFF

SEQ ID NO: 335109 - protein, 17 aa, Homo sapiens
  CDR3 for alpha chain variable domain of TCR clone 167555 (TRAV3, TRAJ6)
CAVRDGPRAGGSYIPTF

SEQ ID NO: 335110 - protein, 16 aa, Homo sapiens
  CDR3 for beta chain variable domain of TCR clone 167555 (TRBV12-4, TRBJ1-5)
CASRQPVEGSNQPQHF

SEQ ID NO: 335111 - protein, 15 aa, Homo sapiens
  CDR3 for alpha chain variable domain of TCR clone 167556 (TRAV4, TRAJ17)
CLVGDIGAAVNKLTF

SEQ ID NO: 335112 - protein, 14 aa, Homo sapiens
  CDR3 for beta chain variable domain of TCR clone 167556 (TRBV6-3, TRBJ2-7)
CASSYSVRVYEQYF

SEQ ID NO: 335113 - protein, 14 aa, Homo sapiens
  CDR3 for alpha chain variable domain of TCR clone 167557 (TRAV13-1, TRAJ17)
LSSRSKAAGKKLTF

SEQ ID NO: 335114 - protein, 14 aa, Homo sapiens
  CDR3 for beta chain variable domain of TCR clone 167557 (TRBV7-9, TRBJ2-1)
CASSSMVGFGEQFF

SEQ ID NO: 335115 - protein, 14 aa, Homo sapiens
  CDR3 for alpha chain variable domain of TCR clone 167558 (TRAV12-1, TRAJ3)
CGAARYSSASKIIF

SEQ ID NO: 335116 - protein, 15 aa, Homo sapiens
  CDR3 for beta chain variable domain of TCR clone 167558 (TRBV7-2, TRBJ2-6)
CARSSEGSGANVLTF

SEQ ID NO: 335117 - protein, 17 aa, Homo sapiens
  CDR3 for alpha chain variable domain of TCR clone 167559 (TRAV1-1, TRAJ4)
CALYNKLIFGAGTRLAV

SEQ ID NO: 335118 - protein, 11 aa, Homo sapiens
  CDR3 for beta chain variable domain of TCR clone 167559 (TRBV27, TRBJ2-3)
CASSLGDTQYF

SEQ ID NO: 335119 - protein, 15 aa, Homo sapiens
  CDR3 for alpha chain variable domain of TCR clone 167560 (TRAV27, TRAJ53)
CRTINSGGSNYKLTF

SEQ ID NO: 335120 - protein, 14 aa, Homo sapiens
  CDR3 for beta chain variable domain of TCR clone 167560 (TRBV7-3, TRBJ2-1)
CASSLAGGTNEQFF

SEQ ID NO: 335121 - protein, 16 aa, Homo sapiens
  CDR3 for alpha chain variable domain of TCR clone 167561 (TRAV1-2, TRAJ10)
CAVRDQGGGGGNKPTF

SEQ ID NO: 335122 - protein, 13 aa, Homo sapiens
  CDR3 for beta chain variable domain of TCR clone 167561 (TRBV29-1, TRBJ1-1)
CSVGDSRNTEAFF

SEQ ID NO: 335123 - protein, 17 aa, Homo sapiens
  CDR3 for alpha chain variable domain of TCR clone 167562 (TRAV8-1, TRAJ43)
CAVTSDMRFGAGTRLTV

SEQ ID NO: 335124 - protein, 17 aa, Homo sapiens
  CDR3 for beta chain variable domain of TCR clone 167562 (TRBV5-4, TRBJ2-1)
CASSSAGGRGPYDEQFF

SEQ ID NO: 335125 - protein, 14 aa, Homo sapiens
  CDR3 for alpha chain variable domain of TCR clone 167563 (TRAV12-2, TRAJ17)
CAVLFKAAGNKLTF

SEQ ID NO: 335126 - protein, 12 aa, Homo sapiens
  CDR3 for beta chain variable domain of TCR clone 167563 (TRBV7-9, TRBJ2-1)
CASDTSYNEQFF

SEQ ID NO: 335127 - protein, 12 aa, Homo sapiens
  CDR3 for alpha chain variable domain of TCR clone 167564 (TRAV2, TRAJ26)
CAGSTGRLWSEF

SEQ ID NO: 335128 - protein, 16 aa, Homo sapiens
  CDR3 for beta chain variable domain of TCR clone 167564 (TRBV13, TRBJ2-2)
CASSPRTGEHTGELFF

SEQ ID NO: 335129 - protein, 14 aa, Homo sapiens
  CDR3 for alpha chain variable domain of TCR clone 167565 (TRAV8-1, TRAJ13)
CVVKSSGGYQKVTF

SEQ ID NO: 335130 - protein, 12 aa, Homo sapiens
  CDR3 for beta chain variable domain of TCR clone 167565 (TRBV11-2, TRBJ2-1)
CASSPGNNEQFF

SEQ ID NO: 335131 - protein, 16 aa, Homo sapiens
  CDR3 for alpha chain variable domain of TCR clone 167566 (TRAV23/DV6, TRAJ9)
CAASIGGNTGDFKTIF

SEQ ID NO: 335132 - protein, 16 aa, Homo sapiens
  CDR3 for beta chain variable domain of TCR clone 167566 (TRBV15, TRBJ2-1)
CATSRNLAGGHNEQFF

SEQ ID NO: 335133 - protein, 11 aa, Homo sapiens
  CDR3 for alpha chain variable domain of TCR clone 167567 (TRAV25, TRAJ52)
PRGTSYGKLTF

SEQ ID NO: 335134 - protein, 16 aa, Homo sapiens
  CDR3 for beta chain variable domain of TCR clone 167567 (TRBV15, TRBJ1-2)
CATSRGPRTGGGGYTF

SEQ ID NO: 335135 - protein, 13 aa, Homo sapiens
  CDR3 for alpha chain variable domain of TCR clone 167568 (TRAV8-6, TRAJ49)
CAVITNTGNQFYF

SEQ ID NO: 335136 - protein, 14 aa, Homo sapiens
  CDR3 for beta chain variable domain of TCR clone 167568 (TRBV7-9, TRBJ2-2)
CASSGLADTGELFF

SEQ ID NO: 335137 - protein, 13 aa, Homo sapiens
  CDR3 for alpha chain variable domain of TCR clone 167569 (TRAV2, TRAJ40)
CAVVTSGTYKYIF

SEQ ID NO: 335138 - protein, 12 aa, Homo sapiens
  CDR3 for beta chain variable domain of TCR clone 167569 (TRBV6-3, TRBJ2-7)
CAGSLTAYEQYF

SEQ ID NO: 335139 - protein, 13 aa, Homo sapiens
  CDR3 for alpha chain variable domain of TCR clone 167570 (TRAV17, TRAJ9)
CATDYTGGFKTIF

SEQ ID NO: 335140 - protein, 16 aa, Homo sapiens
  CDR3 for beta chain variable domain of TCR clone 167570 (TRBV7-7, TRBJ2-1)
CAGSLASGTSCNEQFF

SEQ ID NO: 335141 - protein, 13 aa, Homo sapiens
  CDR3 for alpha chain variable domain of TCR clone 167571 (TRAV21, TRAJ20)
CAVGLRVDYKLSF

SEQ ID NO: 335142 - protein, 16 aa, Homo sapiens
  CDR3 for beta chain variable domain of TCR clone 167571 (TRBV29-1, TRBJ2-6)
CSVEDITYSGANVLTF

SEQ ID NO: 335143 - protein, 10 aa, Homo sapiens
  CDR3 for alpha chain variable domain of TCR clone 167572 (TRAV1-2, TRAJ31)
CVSEDARLMF

SEQ ID NO: 335144 - protein, 14 aa, Homo sapiens
  CDR3 for beta chain variable domain of TCR clone 167572 (TRBV19, TRBJ2-1)
RASPTFVLSGEQFF

SEQ ID NO: 335145 - protein, 14 aa, Homo sapiens
  CDR3 for alpha chain variable domain of TCR clone 167573 (TRAV1-2, TRAJ16)
CAVNRFSDGQKLLF

SEQ ID NO: 335146 - protein, 11 aa, Homo sapiens
  CDR3 for beta chain variable domain of TCR clone 167573 (TRBV6-5, TRBJ1-1)
CATGTGGAAFF

SEQ ID NO: 335147 - protein, 15 aa, Homo sapiens
  CDR3 for alpha chain variable domain of TCR clone 167574 (TRAV12-1, TRAJ15)
CVVTRANQARTALIF

SEQ ID NO: 335148 - protein, 14 aa, Homo sapiens
  CDR3 for beta chain variable domain of TCR clone 167574 (TRBV5-1, TRBJ1-1)
CASSLVSINTEAFF

SEQ ID NO: 335149 - protein, 13 aa, Homo sapiens
  CDR3 for alpha chain variable domain of TCR clone 167575 (TRAV27, TRAJ8)
CAGGPTGFQKLVF

SEQ ID NO: 335150 - protein, 16 aa, Homo sapiens
  CDR3 for beta chain variable domain of TCR clone 167575 (TRBV19, TRBJ2-1)
CASSKAGPSSYNEQFF

SEQ ID NO: 335151 - protein, 14 aa, Homo sapiens
  CDR3 for alpha chain variable domain of TCR clone 167576 (TRAV35, TRAJ13)
CAGSPSGVYHKVTF

SEQ ID NO: 335152 - protein, 14 aa, Homo sapiens
  CDR3 for beta chain variable domain of TCR clone 167576 (TRBV12-5, TRBJ2-5)
CASGSRTHQETQYF

SEQ ID NO: 335153 - protein, 14 aa, Homo sapiens
  CDR3 for alpha chain variable domain of TCR clone 167577 (TRAV1-2, TRAJ16)
CAVARFSDGQKLLF

SEQ ID NO: 335154 - protein, 16 aa, Homo sapiens
  CDR3 for beta chain variable domain of TCR clone 167577 (TRBV5-1, TRBJ2-5)
CASSLRRTSGQETQYF

SEQ ID NO: 335155 - protein, 13 aa, Homo sapiens
  CDR3 for alpha chain variable domain of TCR clone 167578 (TRAV8-2, TRAJ49)
CVVTPNTGNQFYF

SEQ ID NO: 335156 - protein, 15 aa, Homo sapiens
  CDR3 for beta chain variable domain of TCR clone 167578 (TRBV11-2, TRBJ2-1)
CDSSLTSGGYNEQFF

SEQ ID NO: 335157 - protein, 14 aa, Homo sapiens
  CDR3 for alpha chain variable domain of TCR clone 167579 (TRAV12-3, TRAJ7)
CAMSEIGGNNRLAL

SEQ ID NO: 335158 - protein, 18 aa, Homo sapiens
  CDR3 for beta chain variable domain of TCR clone 167579 (TRBV19, TRBJ2-6)
CASSADRAGSSGANVLTF

SEQ ID NO: 335159 - protein, 23 aa, Homo sapiens
  CDR3 for alpha chain variable domain of TCR clone 167580 (TRAV26-1, TRAJ38)
CIADNAGNNHIQDPDPAVYKLRD

SEQ ID NO: 335160 - protein, 13 aa, Homo sapiens
  CDR3 for beta chain variable domain of TCR clone 167580 (TRBV20-1, TRBJ1-1)
CSARGGGNTEAFF

SEQ ID NO: 335161 - protein, 13 aa, Homo sapiens
  CDR3 for alpha chain variable domain of TCR clone 167581 (TRAV12-2, TRAJ49)
CAVKPNTGNQFYF

SEQ ID NO: 335162 - protein, 13 aa, Homo sapiens
  CDR3 for beta chain variable domain of TCR clone 167581 (TRBV19, TRBJ1-2)
CASSQGQVYGYTF

SEQ ID NO: 335163 - protein, 14 aa, Homo sapiens
  CDR3 for alpha chain variable domain of TCR clone 167582 (TRAV26-1, TRAJ21)
CIVRPPYNFNTFYF

SEQ ID NO: 335164 - protein, 14 aa, Homo sapiens
  CDR3 for beta chain variable domain of TCR clone 167582 (TRBV19, TRBJ2-1)
CASPTFVLSGEQFF

SEQ ID NO: 335165 - protein, 13 aa, Homo sapiens
  CDR3 for alpha chain variable domain of TCR clone 167583 (TRAV27, TRAJ8)
CAGGPTGFQKLVI

SEQ ID NO: 335166 - protein, 15 aa, Homo sapiens
  CDR3 for beta chain variable domain of TCR clone 167583 (TRBV6-1, TRBJ2-7)
CASSESMGDFYEQYF

SEQ ID NO: 335167 - protein, 10 aa, Homo sapiens
  CDR3 for alpha chain variable domain of TCR clone 167584 (TRAV23/DV6, TRAJ57)
CAASSTLSQG

SEQ ID NO: 335168 - protein, 14 aa, Homo sapiens
  CDR3 for beta chain variable domain of TCR clone 167584 (TRBV25-1, TRBJ1-1)
CATTHLGGNTEAFF

SEQ ID NO: 335169 - protein, 15 aa, Homo sapiens
  CDR3 for alpha chain variable domain of TCR clone 167585 (TRAV8-2, TRAJ40)
CVVLGPTSGTYKYIF

SEQ ID NO: 335170 - protein, 16 aa, Homo sapiens
  CDR3 for beta chain variable domain of TCR clone 167585 (TRBV7-3, TRBJ2-1)
CASSLEGYRSYNEQFV

SEQ ID NO: 335171 - protein, 16 aa, Homo sapiens
  CDR3 for alpha chain variable domain of TCR clone 167586 (TRAV21, TRAJ45)
CAVSWGSGGCADGLTF

SEQ ID NO: 335172 - protein, 14 aa, Homo sapiens
  CDR3 for beta chain variable domain of TCR clone 167586 (TRBV4-2, TRBJ1-2)
CASSPGGSNYGYTF

SEQ ID NO: 335173 - protein, 11 aa, Homo sapiens
  CDR3 for alpha chain variable domain of TCR clone 167587 (TRAV27, TRAJ45)
CAGAQEEVLTD

SEQ ID NO: 335174 - protein, 15 aa, Homo sapiens
  CDR3 for beta chain variable domain of TCR clone 167587 (TRBV9, TRBJ1-6)
CASSVAGTGDSTLHF

SEQ ID NO: 335175 - protein, 13 aa, Homo sapiens
  CDR3 for alpha chain variable domain of TCR clone 167588 (TRAV1-2, TRAJ9)
CAALNTGGFKTIF

SEQ ID NO: 335176 - protein, 12 aa, Homo sapiens
  CDR3 for beta chain variable domain of TCR clone 167588 (TRBV11-3, TRBJ1-1)
CASSHRQGEASF

SEQ ID NO: 335177 - protein, 14 aa, Homo sapiens
  CDR3 for alpha chain variable domain of TCR clone 167589 (TRAV9-2, TRAJ36)
CALPWITGSNNLFF

SEQ ID NO: 335178 - protein, 14 aa, Homo sapiens
  CDR3 for beta chain variable domain of TCR clone 167589 (TRBV2, TRBJ1-2)
CASSELQVNYGYTF

SEQ ID NO: 335179 - protein, 15 aa, Homo sapiens
  CDR3 for alpha chain variable domain of TCR clone 167590 (TRAV13-1, TRAJ44)
CAASRGGGTASKLTF

SEQ ID NO: 335180 - protein, 13 aa, Homo sapiens
  CDR3 for beta chain variable domain of TCR clone 167590 (TRBV20-1, TRBJ1-1)
CSARGGGNTEAFF

SEQ ID NO: 335181 - protein, 14 aa, Homo sapiens
  CDR3 for alpha chain variable domain of TCR clone 167591 (TRAV1-2, TRAJ8)
CAMREDTGFQKLVF

SEQ ID NO: 335182 - protein, 15 aa, Homo sapiens
  CDR3 for beta chain variable domain of TCR clone 167591 (TRBV10-3, TRBJ2-3)
CAISVLGQETDTQYF

SEQ ID NO: 335183 - protein, 17 aa, Homo sapiens
  CDR3 for alpha chain variable domain of TCR clone 167592 (TRAV36/DV7, TRAJ52)
CAVAQRAGGTSYGKLTF

SEQ ID NO: 335184 - protein, 14 aa, Homo sapiens
  CDR3 for beta chain variable domain of TCR clone 167592 (TRBV12-4, TRBJ2-5)
CASSLPAGVGTQYF

SEQ ID NO: 335185 - protein, 12 aa, Homo sapiens
  CDR3 for alpha chain variable domain of TCR clone 167593 (TRAV8-3, TRAJ41)
CSVALSGYALNF

SEQ ID NO: 335186 - protein, 18 aa, Homo sapiens
  CDR3 for beta chain variable domain of TCR clone 167593 (TRBV20-1, TRBJ2-6)
CSAETTTTHGSGANVLTF

SEQ ID NO: 335187 - protein, 12 aa, Homo sapiens
  CDR3 for alpha chain variable domain of TCR clone 167594 (TRAV20, TRAJ20)
CAVRCNDYKLSF

SEQ ID NO: 335188 - protein, 14 aa, Homo sapiens
  CDR3 for beta chain variable domain of TCR clone 167594 (TRBV20-1, TRBJ2-1)
CSAQIGGSANEQFF

SEQ ID NO: 335189 - protein, 12 aa, Homo sapiens
  CDR3 for alpha chain variable domain of TCR clone 167595 (TRAV25, TRAJ17)
CAGEAAGNKLTF

SEQ ID NO: 335190 - protein, 18 aa, Homo sapiens
  CDR3 for beta chain variable domain of TCR clone 167595 (TRBV24-1, TRBJ2-3)
CATSDRHRISQIRSILAQ

SEQ ID NO: 335191 - protein, 15 aa, Homo sapiens
  CDR3 for alpha chain variable domain of TCR clone 167596 (TRAV21, TRAJ24)
CAARSSTGSWGKLQS

SEQ ID NO: 335192 - protein, 13 aa, Homo sapiens
  CDR3 for beta chain variable domain of TCR clone 167596 (TRBV10-3, TRBJ2-7)
CASKLAVNYEQYF

SEQ ID NO: 335193 - protein, 13 aa, Homo sapiens
  CDR3 for alpha chain variable domain of TCR clone 167597 (TRAV3, TRAJ3)
CAVRALGASKIIF

SEQ ID NO: 335194 - protein, 15 aa, Homo sapiens
  CDR3 for beta chain variable domain of TCR clone 167597 (TRBV6-3, TRBJ2-7)
CASSSPGTVFYEQYF

SEQ ID NO: 335195 - protein, 17 aa, Homo sapiens
  CDR3 for alpha chain variable domain of TCR clone 167598 (TRAV26-1, TRAJ36)
CIVRPPGDHTGANNLFF

SEQ ID NO: 335196 - protein, 16 aa, Homo sapiens
  CDR3 for beta chain variable domain of TCR clone 167598 (TRBV19, TRBJ2-1)
CASSKAGPSSYNEQFF

SEQ ID NO: 335197 - protein, 16 aa, Homo sapiens
  CDR3 for alpha chain variable domain of TCR clone 167599 (TRAV12-2, TRAJ40)
CAVIRGGTSGTYKYIF

SEQ ID NO: 335198 - protein, 12 aa, Homo sapiens
  CDR3 for beta chain variable domain of TCR clone 167599 (TRBV19, TRBJ1-5)
CASSIAQQPQHF

SEQ ID NO: 335199 - protein, 13 aa, Homo sapiens
  CDR3 for alpha chain variable domain of TCR clone 167600 (TRAV1-2, TRAJ9)
YAALNTGGFKTIF

SEQ ID NO: 335200 - protein, 15 aa, Homo sapiens
  CDR3 for beta chain variable domain of TCR clone 167600 (TRBV6-3, TRBJ2-7)
CASSSPGTVFYEQYF

SEQ ID NO: 335201 - protein, 14 aa, Homo sapiens
  CDR3 for alpha chain variable domain of TCR clone 167601 (TRAV12-2, TRAJ9)
CAVNALEGGFKTIF

SEQ ID NO: 335202 - protein, 11 aa, Homo sapiens
  CDR3 for beta chain variable domain of TCR clone 167601 (TRBV7-9, TRBJ2-5)
CASSLGETQYF

SEQ ID NO: 335203 - protein, 13 aa, Homo sapiens
  CDR3 for alpha chain variable domain of TCR clone 167602 (TRAV16, TRAJ26)
CITVLCLGQNFVF

SEQ ID NO: 335204 - protein, 17 aa, Homo sapiens
  CDR3 for beta chain variable domain of TCR clone 167602 (TRBV20-1, TRBJ2-1)
CSASSSGLAGSYNEQFF

SEQ ID NO: 335205 - protein, 12 aa, Homo sapiens
  CDR3 for alpha chain variable domain of TCR clone 167603 (TRAV6, TRAJ3)
CALYSSASKIIF

SEQ ID NO: 335206 - protein, 15 aa, Homo sapiens
  CDR3 for beta chain variable domain of TCR clone 167603 (TRBV4-1, TRBJ1-4)
CASSDTGGTNEKLFF

SEQ ID NO: 335207 - protein, 12 aa, Homo sapiens
  CDR3 for alpha chain variable domain of TCR clone 167604 (TRAV12-3, TRAJ17)
CAMTLTGNKLTF

SEQ ID NO: 335208 - protein, 16 aa, Homo sapiens
  CDR3 for beta chain variable domain of TCR clone 167604 (TRBV12-4, TRBJ2-5)
CASSFFVRARQETQYF

SEQ ID NO: 335209 - protein, 10 aa, Homo sapiens
  CDR3 for alpha chain variable domain of TCR clone 167605 (TRAV12-1, TRAJ37)
ARDNTGKLIF

SEQ ID NO: 335210 - protein, 15 aa, Homo sapiens
  CDR3 for beta chain variable domain of TCR clone 167605 (TRBV7-2, TRBJ2-3)
CASSLEQGGTDTQYF

SEQ ID NO: 335211 - protein, 14 aa, Homo sapiens
  CDR3 for alpha chain variable domain of TCR clone 167606 (TRAV9-2, TRAJ39)
CALYIYNAGNMLTL

SEQ ID NO: 335212 - protein, 16 aa, Homo sapiens
  CDR3 for beta chain variable domain of TCR clone 167606 (TRBV12-5, TRBJ2-5)
CASGPRTSGNQETQYF

SEQ ID NO: 335213 - protein, 16 aa, Homo sapiens
  CDR3 for alpha chain variable domain of TCR clone 167607 (TRAV12-3, TRAJ53)
CAMNPGSGGSNYKLTF

SEQ ID NO: 335214 - protein, 11 aa, Homo sapiens
  CDR3 for beta chain variable domain of TCR clone 167607 (TRBV29-1, TRBJ2-5)
CSEDRTETQYF

SEQ ID NO: 335215 - protein, 13 aa, Homo sapiens
  CDR3 for alpha chain variable domain of TCR clone 167608 (TRAV30, TRAJ24)
CGTVTDSWGKLQC

SEQ ID NO: 335216 - protein, 16 aa, Homo sapiens
  CDR3 for beta chain variable domain of TCR clone 167608 (TRBV7-3, TRBJ2-2)
CASSLKRGTLSGELFF

SEQ ID NO: 335217 - protein, 12 aa, Homo sapiens
  CDR3 for alpha chain variable domain of TCR clone 167609 (TRAV8-3, TRAJ26)
CAGDNYGQNFVF

SEQ ID NO: 335218 - protein, 16 aa, Homo sapiens
  CDR3 for beta chain variable domain of TCR clone 167609 (TRBV29-1, TRBJ2-7)
CSVEVVGTSGSYEQYF

SEQ ID NO: 335219 - protein, 14 aa, Homo sapiens
  CDR3 for alpha chain variable domain of TCR clone 167610 (TRAV16, TRAJ33)
CALSAMDSNYTLIW

SEQ ID NO: 335220 - protein, 15 aa, Homo sapiens
  CDR3 for beta chain variable domain of TCR clone 167610 (TRBV28, TRBJ2-7)
CASSLEAYPIYEQYF

SEQ ID NO: 335221 - protein, 14 aa, Homo sapiens
  CDR3 for alpha chain variable domain of TCR clone 167611 (TRAV8-6, TRAJ30)
CAVRPVNRDDKIIF

SEQ ID NO: 335222 - protein, 14 aa, Homo sapiens
  CDR3 for beta chain variable domain of TCR clone 167611 (TRBV7-2, TRBJ1-1)
CASSFLTGTTEAFF

SEQ ID NO: 335223 - protein, 13 aa, Homo sapiens
  CDR3 for alpha chain variable domain of TCR clone 167612 (TRAV17, TRAJ9)
CATDYTGGFKTVF

SEQ ID NO: 335224 - protein, 14 aa, Homo sapiens
  CDR3 for beta chain variable domain of TCR clone 167612 (TRBV19, TRBJ2-5)
CASSVTGQQETQYF

SEQ ID NO: 335225 - protein, 15 aa, Homo sapiens
  CDR3 for alpha chain variable domain of TCR clone 167613 (TRAV1-2, TRAJ30)
CAVRPHGNRDDKIIF

SEQ ID NO: 335226 - protein, 19 aa, Homo sapiens
  CDR3 for beta chain variable domain of TCR clone 167613 (TRBV4-1, TRBJ2-1)
CASSQGPLPGLGSRNEQFF

SEQ ID NO: 335227 - protein, 15 aa, Homo sapiens
  CDR3 for alpha chain variable domain of TCR clone 167614 (TRAV13-1, TRAJ17)
CAASIERAAGNKLTF

SEQ ID NO: 335228 - protein, 11 aa, Homo sapiens
  CDR3 for beta chain variable domain of TCR clone 167614 (TRBV5-6, TRBJ1-1)
CQQLREGKAFF

SEQ ID NO: 335229 - protein, 11 aa, Homo sapiens
  CDR3 for alpha chain variable domain of TCR clone 167615 (TRAV12-3, TRAJ26)
CAMSHGQNFVF

SEQ ID NO: 335230 - protein, 15 aa, Homo sapiens
  CDR3 for beta chain variable domain of TCR clone 167615 (TRBV7-9, TRBJ1-6)
CASSSPGRGNSPLHF

SEQ ID NO: 335231 - protein, 16 aa, Homo sapiens
  CDR3 for alpha chain variable domain of TCR clone 167616 (TRAV30, TRAJ24)
CGTEIVDAGSWGKFQF

SEQ ID NO: 335232 - protein, 15 aa, Homo sapiens
  CDR3 for beta chain variable domain of TCR clone 167616 (TRBV7-9, TRBJ1-4)
CASSARTGGNEKLFF

SEQ ID NO: 335233 - protein, 16 aa, Homo sapiens
  CDR3 for alpha chain variable domain of TCR clone 167617 (TRAV12-2, TRAJ36)
CGTNNLFFGTGTRLTV

SEQ ID NO: 335234 - protein, 15 aa, Homo sapiens
  CDR3 for beta chain variable domain of TCR clone 167617 (TRBV12-4, TRBJ2-5)
CASSPPTGLQETQYF

SEQ ID NO: 335235 - protein, 12 aa, Homo sapiens
  CDR3 for alpha chain variable domain of TCR clone 167618 (TRAV20, TRAJ37)
CALPSNTGKLIF

SEQ ID NO: 335236 - protein, 16 aa, Homo sapiens
  CDR3 for beta chain variable domain of TCR clone 167618 (TRBV28, TRBJ1-2)
CASSHGQGVYKEGYTF

SEQ ID NO: 335237 - protein, 13 aa, Homo sapiens
  CDR3 for alpha chain variable domain of TCR clone 167619 (TRAV35, TRAJ48)
CWVSNFGNEKLTF

SEQ ID NO: 335238 - protein, 14 aa, Homo sapiens
  CDR3 for beta chain variable domain of TCR clone 167619 (TRBV4-2, TRBJ2-1)
CASGLDRAYNEQFF

SEQ ID NO: 335239 - protein, 14 aa, Homo sapiens
  CDR3 for alpha chain variable domain of TCR clone 167620 (TRAV26-2, TRAJ39)
CSLRGNNNAGNMRT

SEQ ID NO: 335240 - protein, 15 aa, Homo sapiens
  CDR3 for beta chain variable domain of TCR clone 167620 (TRBV5-4, TRBJ1-1)
CASSSLGWANTEAFF

SEQ ID NO: 335241 - protein, 12 aa, Homo sapiens
  CDR3 for alpha chain variable domain of TCR clone 167621 (TRAV3, TRAJ26)
CAVRDYGQNFVF

SEQ ID NO: 335242 - protein, 16 aa, Homo sapiens
  CDR3 for beta chain variable domain of TCR clone 167621 (TRBV11-2, TRBJ1-2)
CASSPSGREPNYGYTL

SEQ ID NO: 335243 - protein, 12 aa, Homo sapiens
  CDR3 for alpha chain variable domain of TCR clone 167622 (TRAV1-2, TRAJ42)
CVAGGSQGNLIF

SEQ ID NO: 335244 - protein, 13 aa, Homo sapiens
  CDR3 for beta chain variable domain of TCR clone 167622 (TRBV12-5, TRBJ2-3)
CASGDRQSDTQYF

SEQ ID NO: 335245 - protein, 14 aa, Homo sapiens
  CDR3 for alpha chain variable domain of TCR clone 167623 (TRAV17, TRAJ31)
CATVLRNNNARLMF

SEQ ID NO: 335246 - protein, 14 aa, Homo sapiens
  CDR3 for beta chain variable domain of TCR clone 167623 (TRBV7-2, TRBJ2-7)
CASSTKTSFYEQYF

SEQ ID NO: 335247 - protein, 19 aa, Homo sapiens
  CDR3 for alpha chain variable domain of TCR clone 167624 (TRAV29/DV5, TRAJ49)
CRVLLCSKLTVDTGNQFYF

SEQ ID NO: 335248 - protein, 17 aa, Homo sapiens
  CDR3 for beta chain variable domain of TCR clone 167624 (TRBV13, TRBJ2-3)
CASSLSRVAGGRNTQYF

SEQ ID NO: 335249 - protein, 13 aa, Homo sapiens
  CDR3 for alpha chain variable domain of TCR clone 167625 (TRAV36/DV7, TRAJ53)
CALSGGSNYKLTF

SEQ ID NO: 335250 - protein, 13 aa, Homo sapiens
  CDR3 for beta chain variable domain of TCR clone 167625 (TRBV28, TRBJ2-7)
CASSLTSRYEQYF

SEQ ID NO: 335251 - protein, 16 aa, Homo sapiens
  CDR3 for alpha chain variable domain of TCR clone 167626 (TRAV29/DV5, TRAJ36)
CAASAHYQSGANNLFF

SEQ ID NO: 335252 - protein, 13 aa, Homo sapiens
  CDR3 for beta chain variable domain of TCR clone 167626 (TRBV20-1, TRBJ2-5)
CSARGDYQETQYF

SEQ ID NO: 335253 - protein, 13 aa, Homo sapiens
  CDR3 for alpha chain variable domain of TCR clone 167627 (TRAV12-3, TRAJ49)
RAMSRNTGNQFYF

SEQ ID NO: 335254 - protein, 16 aa, Homo sapiens
  CDR3 for beta chain variable domain of TCR clone 167627 (TRBV5-8, TRBJ2-2)
CASSWINPGGAGELFF

SEQ ID NO: 335255 - protein, 13 aa, Homo sapiens
  CDR3 for alpha chain variable domain of TCR clone 167628 (TRAV12-1, TRAJ6)
CVVFPGGSYIPTF

SEQ ID NO: 335256 - protein, 15 aa, Homo sapiens
  CDR3 for beta chain variable domain of TCR clone 167628 (TRBV20-1, TRBJ2-2)
CSATGGFRGTGELFF

SEQ ID NO: 335257 - protein, 12 aa, Homo sapiens
  CDR3 for alpha chain variable domain of TCR clone 167629 (TRAV13-1, TRAJ49)
CAASPRGNQFYF

SEQ ID NO: 335258 - protein, 13 aa, Homo sapiens
  CDR3 for beta chain variable domain of TCR clone 167629 (TRBV20-1, TRBJ2-2)
CSASAAGTGELFF

SEQ ID NO: 335259 - protein, 12 aa, Homo sapiens
  CDR3 for alpha chain variable domain of TCR clone 167630 (TRAV26-2, TRAJ21)
CILKGNFNKFYF

SEQ ID NO: 335260 - protein, 14 aa, Homo sapiens
  CDR3 for beta chain variable domain of TCR clone 167630 (TRBV7-9, TRBJ1-1)
CASSPLQSYTEAFF

SEQ ID NO: 335261 - protein, 15 aa, Homo sapiens
  CDR3 for alpha chain variable domain of TCR clone 167631 (TRAV1-2, TRAJ28)
CAVQYSGAGSYQLTF

SEQ ID NO: 335262 - protein, 15 aa, Homo sapiens
  CDR3 for beta chain variable domain of TCR clone 167631 (TRBV9, TRBJ1-6)
CASSVAGTGDSTLDF

SEQ ID NO: 335263 - protein, 15 aa, Homo sapiens
  CDR3 for alpha chain variable domain of TCR clone 167632 (TRAV8-3, TRAJ45)
CASSYSGGGAEGLTF

SEQ ID NO: 335264 - protein, 15 aa, Homo sapiens
  CDR3 for beta chain variable domain of TCR clone 167632 (TRBV18, TRBJ1-1)
CASSPRQGENTEAFF

SEQ ID NO: 335265 - protein, 13 aa, Homo sapiens
  CDR3 for alpha chain variable domain of TCR clone 167633 (TRAV12-2, TRAJ56)
CAVKRRANSKLTF

SEQ ID NO: 335266 - protein, 16 aa, Homo sapiens
  CDR3 for beta chain variable domain of TCR clone 167633 (TRBV13, TRBJ2-2)
CASSPRTGEHTGELFF

SEQ ID NO: 335267 - protein, 15 aa, Homo sapiens
  CDR3 for alpha chain variable domain of TCR clone 167634 (TRAV26-2, TRAJ39)
CSLRGNNNAGNMLTF

SEQ ID NO: 335268 - protein, 15 aa, Homo sapiens
  CDR3 for beta chain variable domain of TCR clone 167634 (TRBV7-9, TRBJ2-1)
CASSFVGAGKNEQFF

SEQ ID NO: 335269 - protein, 17 aa, Homo sapiens
  CDR3 for alpha chain variable domain of TCR clone 167635 (TRAV35, TRAJ28)
CAGLQVYSGAGSYQLTL

SEQ ID NO: 335270 - protein, 13 aa, Homo sapiens
  CDR3 for beta chain variable domain of TCR clone 167635 (TRBV7-9, TRBJ1-2)
CASSLKQNYGYTF

SEQ ID NO: 335271 - protein, 12 aa, Homo sapiens
  CDR3 for alpha chain variable domain of TCR clone 167636 (TRAV12-3, TRAJ17)
CAMTLTGNKLTF

SEQ ID NO: 335272 - protein, 11 aa, Homo sapiens
  CDR3 for beta chain variable domain of TCR clone 167636 (TRBV28, TRBJ2-1)
CASRRVNEQFF

SEQ ID NO: 335273 - protein, 11 aa, Homo sapiens
  CDR3 for alpha chain variable domain of TCR clone 167637 (TRAV3, TRAJ21)
CAVGNFNKFYF

SEQ ID NO: 335274 - protein, 16 aa, Homo sapiens
  CDR3 for beta chain variable domain of TCR clone 167637 (TRBV19, TRBJ2-1)
CASSKARPSSYNEQFL

SEQ ID NO: 335275 - protein, 14 aa, Homo sapiens
  CDR3 for alpha chain variable domain of TCR clone 167638 (TRAV26-1, TRAJ39)
CIVRGSRAGHMLTF

SEQ ID NO: 335276 - protein, 14 aa, Homo sapiens
  CDR3 for beta chain variable domain of TCR clone 167638 (TRBV27, TRBJ1-1)
CASSLLSGLSEAFF

SEQ ID NO: 335277 - protein, 13 aa, Homo sapiens
  CDR3 for alpha chain variable domain of TCR clone 167639 (TRAV3, TRAJ15)
CAVRDQAGTALIF

SEQ ID NO: 335278 - protein, 15 aa, Homo sapiens
  CDR3 for beta chain variable domain of TCR clone 167639 (TRBV11-1, TRBJ2-7)
GASSLSYGASYEQYF

SEQ ID NO: 335279 - protein, 22 aa, Homo sapiens
  CDR3 for alpha chain variable domain of TCR clone 167640 (TRAV27, )
CAVRTQIPDIQNPDPAVYQLRD

SEQ ID NO: 335280 - protein, 15 aa, Homo sapiens
  CDR3 for beta chain variable domain of TCR clone 167640 (TRBV5-1, TRBJ2-3)
CASSVTSGSTDTQYF

SEQ ID NO: 335281 - protein, 13 aa, Homo sapiens
  CDR3 for alpha chain variable domain of TCR clone 167641 (TRAV1-2, TRAJ9)
CAAFNTGCFKTIF

SEQ ID NO: 335282 - protein, 13 aa, Homo sapiens
  CDR3 for beta chain variable domain of TCR clone 167641 (TRBV19, TRBJ1-2)
CASSVPGQDGYTF

SEQ ID NO: 335283 - protein, 10 aa, Homo sapiens
  CDR3 for alpha chain variable domain of TCR clone 167642 (TRAV17, TRAJ52)
SATSYGKLTF

SEQ ID NO: 335284 - protein, 13 aa, Homo sapiens
  CDR3 for beta chain variable domain of TCR clone 167642 (TRBV29-1, TRBJ2-5)
CSVGGPSAETQYF

SEQ ID NO: 335285 - protein, 13 aa, Homo sapiens
  CDR3 for alpha chain variable domain of TCR clone 167643 (TRAV12-3, TRAJ48)
CAILRFGNEKLTF

SEQ ID NO: 335286 - protein, 17 aa, Homo sapiens
  CDR3 for beta chain variable domain of TCR clone 167643 (TRBV7-3, TRBJ2-3)
RASSLMKRMRGADTQYF

SEQ ID NO: 335287 - protein, 22 aa, Homo sapiens
  CDR3 for alpha chain variable domain of TCR clone 167644 (TRAV27, TRAJ38)
CAARRNAGNNHIQNPDPAVYQL

SEQ ID NO: 335288 - protein, 14 aa, Homo sapiens
  CDR3 for beta chain variable domain of TCR clone 167644 (TRBV20-1, TRBJ2-1)
CSARSGTGGNEQFF

SEQ ID NO: 335289 - protein, 14 aa, Homo sapiens
  CDR3 for alpha chain variable domain of TCR clone 167645 (TRAV30, TRAJ33)
CGTVAPRSNYQLIW

SEQ ID NO: 335290 - protein, 15 aa, Homo sapiens
  CDR3 for beta chain variable domain of TCR clone 167645 (TRBV5-4, TRBJ2-1)
CASSQPVSAYNEQFF

SEQ ID NO: 335291 - protein, 12 aa, Homo sapiens
  CDR3 for alpha chain variable domain of TCR clone 167646 (TRAV21, TRAJ20)
CAVRRNDYKLSF

SEQ ID NO: 335292 - protein, 13 aa, Homo sapiens
  CDR3 for beta chain variable domain of TCR clone 167646 (TRBV7-9, TRBJ1-2)
CASSLKQNYGYTF

SEQ ID NO: 335293 - protein, 11 aa, Homo sapiens
  CDR3 for alpha chain variable domain of TCR clone 167647 (TRAV17, TRAJ9)
CATTGGFKTIF

SEQ ID NO: 335294 - protein, 15 aa, Homo sapiens
  CDR3 for beta chain variable domain of TCR clone 167647 (TRBV11-2, TRBJ2-1)
CASSKNRGLIYEQFF

SEQ ID NO: 335295 - protein, 14 aa, Homo sapiens
  CDR3 for alpha chain variable domain of TCR clone 167648 (TRAV27, TRAJ49)
CAGRPEGTGNPFYF

SEQ ID NO: 335296 - protein, 14 aa, Homo sapiens
  CDR3 for beta chain variable domain of TCR clone 167648 (TRBV18, TRBJ2-5)
CASSPGVSQETQYF

SEQ ID NO: 335297 - protein, 16 aa, Homo sapiens
  CDR3 for alpha chain variable domain of TCR clone 167649 (TRAV12-1, TRAJ48)
CVVNTFREFGNEKVTF

SEQ ID NO: 335298 - protein, 17 aa, Homo sapiens
  CDR3 for beta chain variable domain of TCR clone 167649 (TRBV13, TRBJ2-3)
CASSLSRVAGGRNTQYF

SEQ ID NO: 335299 - protein, 23 aa, Homo sapiens
  CDR3 for alpha chain variable domain of TCR clone 167650 (TRAV35, TRAJ48)
LVMYASTSVLGRSRVFGNEKLTF

SEQ ID NO: 335300 - protein, 14 aa, Homo sapiens
  CDR3 for beta chain variable domain of TCR clone 167650 (TRBV20-1, TRBJ2-5)
CSALVPGYQETQYF

SEQ ID NO: 335301 - protein, 14 aa, Homo sapiens
  CDR3 for alpha chain variable domain of TCR clone 167651 (TRAV2, TRAJ37)
GAVDFTSNTGKLIF

SEQ ID NO: 335302 - protein, 13 aa, Homo sapiens
  CDR3 for beta chain variable domain of TCR clone 167651 (TRBV4-2, TRBJ1-1)
CASSQAGNTEAFF

SEQ ID NO: 335303 - protein, 15 aa, Homo sapiens
  CDR3 for alpha chain variable domain of TCR clone 167652 (TRAV3, TRAJ10)
CAVRDGTGGGNKLTF

SEQ ID NO: 335304 - protein, 15 aa, Homo sapiens
  CDR3 for beta chain variable domain of TCR clone 167652 (TRBV4-2, TRBJ1-4)
CASSLVQWEVEKLFF

SEQ ID NO: 335305 - protein, 11 aa, Homo sapiens
  CDR3 for alpha chain variable domain of TCR clone 167653 (TRAV23/DV6, TRAJ58)
CAARLLRGETS

SEQ ID NO: 335306 - protein, 13 aa, Homo sapiens
  CDR3 for beta chain variable domain of TCR clone 167653 (TRBV6-4, TRBJ1-5)
CASSAYLNQPQHF

SEQ ID NO: 335307 - protein, 15 aa, Homo sapiens
  CDR3 for alpha chain variable domain of TCR clone 167654 (TRAV23/DV6, TRAJ44)
CAARTLTGTASKLTF

SEQ ID NO: 335308 - protein, 17 aa, Homo sapiens
  CDR3 for beta chain variable domain of TCR clone 167654 (TRBV24-1, TRBJ2-1)
CATSDVSTSGNYNEQFF

SEQ ID NO: 335309 - protein, 11 aa, Homo sapiens
  CDR3 for alpha chain variable domain of TCR clone 167655 (TRAV3, TRAJ21)
CAVGNFNKFYF

SEQ ID NO: 335310 - protein, 17 aa, Homo sapiens
  CDR3 for beta chain variable domain of TCR clone 167655 (TRBV28, TRBJ2-5)
CASSRQGGLAGAETQYF

SEQ ID NO: 335311 - protein, 12 aa, Homo sapiens
  CDR3 for alpha chain variable domain of TCR clone 167656 (TRAV12-3, TRAJ17)
CATTLTGNKLTF

SEQ ID NO: 335312 - protein, 16 aa, Homo sapiens
  CDR3 for beta chain variable domain of TCR clone 167656 (TRBV19, TRBJ2-2)
CASTIGARAGAGELFF

SEQ ID NO: 335313 - protein, 15 aa, Homo sapiens
  CDR3 for alpha chain variable domain of TCR clone 167657 (TRAV17, TRAJ42)
CATDHYGGSQGNRIF

SEQ ID NO: 335314 - protein, 13 aa, Homo sapiens
  CDR3 for beta chain variable domain of TCR clone 167657 (TRBV7-2, TRBJ1-5)
CASSFARNQPQHF

SEQ ID NO: 335315 - protein, 15 aa, Homo sapiens
  CDR3 for alpha chain variable domain of TCR clone 167658 (TRAV21, TRAJ53)
CATLNSGGSNYKLTF

SEQ ID NO: 335316 - protein, 13 aa, Homo sapiens
  CDR3 for beta chain variable domain of TCR clone 167658 (TRBV2, TRBJ1-5)
CATAGPGNQPQHF

SEQ ID NO: 335317 - protein, 15 aa, Homo sapiens
  CDR3 for alpha chain variable domain of TCR clone 167659 (TRAV3, TRAJ22)
CAVRDRGGSSRQLTF

SEQ ID NO: 335318 - protein, 17 aa, Homo sapiens
  CDR3 for beta chain variable domain of TCR clone 167659 (TRBV13, TRBJ2-3)
CASSLSRVAGGRNTQYF

SEQ ID NO: 335319 - protein, 17 aa, Homo sapiens
  CDR3 for alpha chain variable domain of TCR clone 167660 (TRAV3, TRAJ28)
CAVRDQNSGAGSYQLTF

SEQ ID NO: 335320 - protein, 14 aa, Homo sapiens
  CDR3 for beta chain variable domain of TCR clone 167660 (TRBV11-2, TRBJ2-3)
CASSRLARTDTQYF

SEQ ID NO: 335321 - protein, 14 aa, Homo sapiens
  CDR3 for alpha chain variable domain of TCR clone 167661 (TRAV26-2, TRAJ31)
CILIPGNNNARLMF

SEQ ID NO: 335322 - protein, 16 aa, Homo sapiens
  CDR3 for beta chain variable domain of TCR clone 167661 (TRBV7-3, TRBJ2-1)
CASSLVSGSANKEQFF

SEQ ID NO: 335323 - protein, 11 aa, Homo sapiens
  CDR3 for alpha chain variable domain of TCR clone 167662 (TRAV17, TRAJ31)
CATSNNARLMF

SEQ ID NO: 335324 - protein, 16 aa, Homo sapiens
  CDR3 for beta chain variable domain of TCR clone 167662 (TRBV7-8, TRBJ2-4)
WASSAERTLAKNIQYF

SEQ ID NO: 335325 - protein, 18 aa, Homo sapiens
  CDR3 for alpha chain variable domain of TCR clone 167663 (TRAV13-1, TRAJ28)
CAASPVPILWGWELPTPF

SEQ ID NO: 335326 - protein, 13 aa, Homo sapiens
  CDR3 for beta chain variable domain of TCR clone 167663 (TRBV15, TRBJ2-7)
CATSTTGHYEQYF

SEQ ID NO: 335327 - protein, 13 aa, Homo sapiens
  CDR3 for alpha chain variable domain of TCR clone 167664 (TRAV21, TRAJ57)
CAVTQGGSEKLVF

SEQ ID NO: 335328 - protein, 11 aa, Homo sapiens
  CDR3 for beta chain variable domain of TCR clone 167664 (TRBV11-2, TRBJ2-2)
CGSSLPGELFF

SEQ ID NO: 335329 - protein, 15 aa, Homo sapiens
  CDR3 for alpha chain variable domain of TCR clone 167665 (TRAV12-3, TRAJ6)
CAMSATTGGSYIPTF

SEQ ID NO: 335330 - protein, 17 aa, Homo sapiens
  CDR3 for beta chain variable domain of TCR clone 167665 (TRBV13, TRBJ2-3)
CASSLARVAGGRNTQYF

SEQ ID NO: 335331 - protein, 15 aa, Homo sapiens
  CDR3 for alpha chain variable domain of TCR clone 167666 (TRAV21, TRAJ9)
CAVRPPDTGGFKTIF

SEQ ID NO: 335332 - protein, 15 aa, Homo sapiens
  CDR3 for beta chain variable domain of TCR clone 167666 (TRBV5-7, TRBJ1-5)
CAGSYGKLWDQPQHF

SEQ ID NO: 335333 - protein, 12 aa, Homo sapiens
  CDR3 for alpha chain variable domain of TCR clone 167667 (TRAV27, TRAJ36)
CAGMTGANKLFF

SEQ ID NO: 335334 - protein, 14 aa, Homo sapiens
  CDR3 for beta chain variable domain of TCR clone 167667 (TRBV12-4, TRBJ2-3)
CASSLVPSTDTQYF

SEQ ID NO: 335335 - protein, 15 aa, Homo sapiens
  CDR3 for alpha chain variable domain of TCR clone 167668 (TRAV34, TRAJ38)
CGADFTPGNNRKLIW

SEQ ID NO: 335336 - protein, 15 aa, Homo sapiens
  CDR3 for beta chain variable domain of TCR clone 167668 (TRBV7-2, TRBJ2-1)
CASSLVLAGGNEQFF

SEQ ID NO: 335337 - protein, 13 aa, Homo sapiens
  CDR3 for alpha chain variable domain of TCR clone 167669 (TRAV26-2, TRAJ37)
CIRGPSNTGKLIF

SEQ ID NO: 335338 - protein, 16 aa, Homo sapiens
  CDR3 for beta chain variable domain of TCR clone 167669 (TRBV7-2, TRBJ2-5)
CASSPGGARRGETQYF

SEQ ID NO: 335339 - protein, 15 aa, Homo sapiens
  CDR3 for alpha chain variable domain of TCR clone 167670 (TRAV2, TRAJ9)
CAVEDRGTGGFKIIF

SEQ ID NO: 335340 - protein, 17 aa, Homo sapiens
  CDR3 for beta chain variable domain of TCR clone 167670 (TRBV20-1, TRBJ2-2)
CSASGSGQGGLTGELFF

SEQ ID NO: 335341 - protein, 13 aa, Homo sapiens
  CDR3 for alpha chain variable domain of TCR clone 167671 (TRAV8-2, TRAJ49)
CVVSPSTGNQIYF

SEQ ID NO: 335342 - protein, 14 aa, Homo sapiens
  CDR3 for beta chain variable domain of TCR clone 167671 (TRBV11-2, TRBJ2-7)
CASSRSGGAGEQYF

SEQ ID NO: 335343 - protein, 12 aa, Homo sapiens
  CDR3 for alpha chain variable domain of TCR clone 167672 (TRAV13-2, TRAJ23)
CAERHRGGKLIF

SEQ ID NO: 335344 - protein, 16 aa, Homo sapiens
  CDR3 for beta chain variable domain of TCR clone 167672 (TRBV27, TRBJ2-2)
CASSLSGVWVTGELFF

SEQ ID NO: 335345 - protein, 15 aa, Homo sapiens
  CDR3 for alpha chain variable domain of TCR clone 167673 (TRAV3, TRAJ9)
CAVRYINTGCFKTIF

SEQ ID NO: 335346 - protein, 13 aa, Homo sapiens
  CDR3 for beta chain variable domain of TCR clone 167673 (TRBV19, TRBJ2-7)
CASSIPSVREQYF

SEQ ID NO: 335347 - protein, 14 aa, Homo sapiens
  CDR3 for alpha chain variable domain of TCR clone 167674 (TRAV1-2, TRAJ16)
CAVNRFSDGQKLLF

SEQ ID NO: 335348 - protein, 13 aa, Homo sapiens
  CDR3 for beta chain variable domain of TCR clone 167674 (TRBV11-3, TRBJ1-1)
CASTGSLNTEAFF

SEQ ID NO: 335349 - protein, 13 aa, Homo sapiens
  CDR3 for alpha chain variable domain of TCR clone 167675 (TRAV9-2, TRAJ49)
CALIQIGGNQFYF

SEQ ID NO: 335350 - protein, 14 aa, Homo sapiens
  CDR3 for beta chain variable domain of TCR clone 167675 (TRBV19, TRBJ2-5)
CASSSSGIQETQYF

SEQ ID NO: 335351 - protein, 19 aa, Homo sapiens
  CDR3 for alpha chain variable domain of TCR clone 167676 (TRAV2, TRAJ20)
ILQVREADAAVYRDCKLSF

SEQ ID NO: 335352 - protein, 17 aa, Homo sapiens
  CDR3 for beta chain variable domain of TCR clone 167676 (TRBV4-3, TRBJ2-1)
CASSQFSSGRASGEQFF

SEQ ID NO: 335353 - protein, 14 aa, Homo sapiens
  CDR3 for alpha chain variable domain of TCR clone 167677 (TRAV13-1, TRAJ44)
CAAKATGTASKLTF

SEQ ID NO: 335354 - protein, 14 aa, Homo sapiens
  CDR3 for beta chain variable domain of TCR clone 167677 (TRBV20-1, TRBJ2-3)
CSAGGRRGTDTQYF

SEQ ID NO: 335355 - protein, 13 aa, Homo sapiens
  CDR3 for alpha chain variable domain of TCR clone 167678 (TRAV13-1, TRAJ15)
CAAINQAGTALIF

SEQ ID NO: 335356 - protein, 15 aa, Homo sapiens
  CDR3 for beta chain variable domain of TCR clone 167678 (TRBV20-1, TRBJ2-7)
CSARVPAAYFYEQYF

SEQ ID NO: 335357 - protein, 14 aa, Homo sapiens
  CDR3 for alpha chain variable domain of TCR clone 167679 (TRAV17, TRAJ12)
CAILPMDSSYKLIL

SEQ ID NO: 335358 - protein, 15 aa, Homo sapiens
  CDR3 for beta chain variable domain of TCR clone 167679 (TRBV5-1, TRBJ1-1)
CASSLGEGENTEAFF

SEQ ID NO: 335359 - protein, 14 aa, Homo sapiens
  CDR3 for alpha chain variable domain of TCR clone 167680 (TRAV8-3, TRAJ44)
CAVGLTGTASKLTF

SEQ ID NO: 335360 - protein, 12 aa, Homo sapiens
  CDR3 for beta chain variable domain of TCR clone 167680 (TRBV7-3, TRBJ2-1)
CTSSLGFNEQFF

SEQ ID NO: 335361 - protein, 14 aa, Homo sapiens
  CDR3 for alpha chain variable domain of TCR clone 167681 (TRAV12-2, TRAJ13)
CAVKKTGGYQKVTF

SEQ ID NO: 335362 - protein, 14 aa, Homo sapiens
  CDR3 for beta chain variable domain of TCR clone 167681 (TRBV12-5, TRBJ2-5)
CASGSRAHQETQYF

SEQ ID NO: 335363 - protein, 13 aa, Homo sapiens
  CDR3 for alpha chain variable domain of TCR clone 167682 (TRAV38-2/DV8, TRAJ49)
CAYRRRTGNKFYF

SEQ ID NO: 335364 - protein, 15 aa, Homo sapiens
  CDR3 for beta chain variable domain of TCR clone 167682 (TRBV24-1, TRBJ1-1)
CATSDSKTVNTEAFF

SEQ ID NO: 335365 - protein, 14 aa, Homo sapiens
  CDR3 for alpha chain variable domain of TCR clone 167683 (TRAV12-2, TRAJ24)
CAVTPADSWGKLQF

SEQ ID NO: 335366 - protein, 12 aa, Homo sapiens
  CDR3 for beta chain variable domain of TCR clone 167683 (TRBV3-1, TRBJ2-1)
CASSQGARGQFF

SEQ ID NO: 335367 - protein, 15 aa, Homo sapiens
  CDR3 for alpha chain variable domain of TCR clone 167684 (TRAV12-2, TRAJ9)
CAVNNERTGGFKTIF

SEQ ID NO: 335368 - protein, 17 aa, Homo sapiens
  CDR3 for beta chain variable domain of TCR clone 167684 (TRBV15, TRBJ1-2)
CATSGREIDVVNYGYTF

SEQ ID NO: 335369 - protein, 15 aa, Homo sapiens
  CDR3 for alpha chain variable domain of TCR clone 167685 (TRAV26-1, TRAJ42)
CIVRVKGGSQGNLIF

SEQ ID NO: 335370 - protein, 15 aa, Homo sapiens
  CDR3 for beta chain variable domain of TCR clone 167685 (TRBV5-1, TRBJ2-1)
CASSPPRAPYNEQFF

SEQ ID NO: 335371 - protein, 18 aa, Homo sapiens
  CDR3 for alpha chain variable domain of TCR clone 167686 (TRAV21, TRAJ52)
CAVRPSPVGGTSYGKLTF

SEQ ID NO: 335372 - protein, 15 aa, Homo sapiens
  CDR3 for beta chain variable domain of TCR clone 167686 (TRBV7-2, TRBJ2-1)
CASTHGTGIYNEQLF

SEQ ID NO: 335373 - protein, 12 aa, Homo sapiens
  CDR3 for alpha chain variable domain of TCR clone 167687 (TRAV12-3, TRAJ17)
CAITLTGNKLTF

SEQ ID NO: 335374 - protein, 15 aa, Homo sapiens
  CDR3 for beta chain variable domain of TCR clone 167687 (TRBV20-1, TRBJ2-7)
CSARDRVSGMDVQYF

SEQ ID NO: 335375 - protein, 14 aa, Homo sapiens
  CDR3 for alpha chain variable domain of TCR clone 167688 (TRAV12-2, TRAJ52)
CAVPGGTSYGKLTF

SEQ ID NO: 335376 - protein, 15 aa, Homo sapiens
  CDR3 for beta chain variable domain of TCR clone 167688 (TRBV2, TRBJ2-1)
CASSELAGSYNEQFF

SEQ ID NO: 335377 - protein, 13 aa, Homo sapiens
  CDR3 for alpha chain variable domain of TCR clone 167689 (TRAV3, TRAJ9)
CAFCNTGGFKTIF

SEQ ID NO: 335378 - protein, 15 aa, Homo sapiens
  CDR3 for beta chain variable domain of TCR clone 167689 (TRBV11-3, TRBJ2-3)
CASLKDGREGDTQYF

SEQ ID NO: 335379 - protein, 14 aa, Homo sapiens
  CDR3 for alpha chain variable domain of TCR clone 167690 (TRAV27, TRAJ49)
CAGRPEGTGNQFYF

SEQ ID NO: 335380 - protein, 16 aa, Homo sapiens
  CDR3 for beta chain variable domain of TCR clone 167690 (TRBV12-5, TRBJ2-5)
CASGPRTSGDQETQYF

SEQ ID NO: 335381 - protein, 10 aa, Homo sapiens
  CDR3 for alpha chain variable domain of TCR clone 167691 (TRAV12-2, TRAJ22)
CAVSETQLTF

SEQ ID NO: 335382 - protein, 13 aa, Homo sapiens
  CDR3 for beta chain variable domain of TCR clone 167691 (TRBV6-5, TRBJ2-6)
CASSTSGPFRLDF

SEQ ID NO: 335383 - protein, 17 aa, Homo sapiens
  CDR3 for alpha chain variable domain of TCR clone 167692 (TRAV26-1, TRAJ46)
IASSEAEKKSSGDKLTF

SEQ ID NO: 335384 - protein, 13 aa, Homo sapiens
  CDR3 for beta chain variable domain of TCR clone 167692 (TRBV12-5, TRBJ2-3)
CASGDRQSDTQYF

SEQ ID NO: 335385 - protein, 14 aa, Homo sapiens
  CDR3 for alpha chain variable domain of TCR clone 167693 (TRAV12-2, TRAJ44)
CAVNPAATASKLTF

SEQ ID NO: 335386 - protein, 15 aa, Homo sapiens
  CDR3 for beta chain variable domain of TCR clone 167693 (TRBV28, TRBJ2-7)
CASSVRQVSSYEQYF

SEQ ID NO: 335387 - protein, 17 aa, Homo sapiens
  CDR3 for alpha chain variable domain of TCR clone 167694 (TRAV13-1, TRAJ31)
CAPRDRLMFGDGTQLVV

SEQ ID NO: 335388 - protein, 15 aa, Homo sapiens
  CDR3 for beta chain variable domain of TCR clone 167694 (TRBV2, TRBJ2-1)
CASSELAGSYNEQFF

SEQ ID NO: 335389 - protein, 18 aa, Homo sapiens
  CDR3 for alpha chain variable domain of TCR clone 167695 (TRAV8-4, TRAJ52)
CAVTRANAGDTSYGKLTF

SEQ ID NO: 335390 - protein, 20 aa, Homo sapiens
  CDR3 for beta chain variable domain of TCR clone 167695 (TRBV19, TRBJ2-1)
CASSISRTVTSTRLNNEQFF

SEQ ID NO: 335391 - protein, 11 aa, Homo sapiens
  CDR3 for alpha chain variable domain of TCR clone 167696 (TRAV8-3, TRAJ31)
CAVDNNARLMF

SEQ ID NO: 335392 - protein, 12 aa, Homo sapiens
  CDR3 for beta chain variable domain of TCR clone 167696 (TRBV2, TRBJ2-1)
CAYGPPGNEQFF

SEQ ID NO: 335393 - protein, 12 aa, Homo sapiens
  CDR3 for alpha chain variable domain of TCR clone 167697 (TRAV8-6, TRAJ43)
CAVSHNNDDMRF

SEQ ID NO: 335394 - protein, 14 aa, Homo sapiens
  CDR3 for beta chain variable domain of TCR clone 167697 (TRBV10-3, TRBJ1-1)
CAISYGSGVTEAFF

SEQ ID NO: 335395 - protein, 11 aa, Homo sapiens
  CDR3 for alpha chain variable domain of TCR clone 167698 (TRAV17, TRAJ49)
CATDAGNQFYF

SEQ ID NO: 335396 - protein, 13 aa, Homo sapiens
  CDR3 for beta chain variable domain of TCR clone 167698 (TRBV19, TRBJ1-2)
CASSQGQVYGYTF

SEQ ID NO: 335397 - protein, 19 aa, Homo sapiens
  CDR3 for alpha chain variable domain of TCR clone 167699 (TRAV1-1, TRAJ27)
CAGSEMTRSSLEKGHDLIF

SEQ ID NO: 335398 - protein, 14 aa, Homo sapiens
  CDR3 for beta chain variable domain of TCR clone 167699 (TRBV11-3, TRBJ1-6)
CASSFSGGDSPLHF

SEQ ID NO: 335399 - protein, 14 aa, Homo sapiens
  CDR3 for alpha chain variable domain of TCR clone 167700 (TRAV16, TRAJ44)
CALSTTGTASKLTF

SEQ ID NO: 335400 - protein, 15 aa, Homo sapiens
  CDR3 for beta chain variable domain of TCR clone 167700 (TRBV7-3, TRBJ2-2)
CASSETGQGTGELFF

SEQ ID NO: 335401 - protein, 13 aa, Homo sapiens
  CDR3 for alpha chain variable domain of TCR clone 167701 (TRAV12-2, TRAJ50)
CAVIVTSYDKVIF

SEQ ID NO: 335402 - protein, 17 aa, Homo sapiens
  CDR3 for beta chain variable domain of TCR clone 167701 (TRBV11-2, TRBJ2-1)
CASSFYPPGVEYNEQFF

SEQ ID NO: 335403 - protein, 17 aa, Homo sapiens
  CDR3 for alpha chain variable domain of TCR clone 167702 (TRAV13-2, TRAJ42)
CAEKGKNYGGSQGNLIF

SEQ ID NO: 335404 - protein, 16 aa, Homo sapiens
  CDR3 for beta chain variable domain of TCR clone 167702 (TRBV7-9, TRBJ2-1)
CARSLGTGWDYNEQFF

SEQ ID NO: 335405 - protein, 14 aa, Homo sapiens
  CDR3 for alpha chain variable domain of TCR clone 167703 (TRAV3, TRAJ21)
RAVESQANFNKFYF

SEQ ID NO: 335406 - protein, 18 aa, Homo sapiens
  CDR3 for beta chain variable domain of TCR clone 167703 (TRBV7-9, TRBJ2-1)
CASSLAVSGTSGRNEQFF

SEQ ID NO: 335407 - protein, 16 aa, Homo sapiens
  CDR3 for alpha chain variable domain of TCR clone 167704 (TRAV3, TRAJ10)
CAVRDMMAGGGNKLTF

SEQ ID NO: 335408 - protein, 16 aa, Homo sapiens
  CDR3 for beta chain variable domain of TCR clone 167704 (TRBV7-2, TRBJ2-3)
CASSLVALYSTDTQYF

SEQ ID NO: 335409 - protein, 13 aa, Homo sapiens
  CDR3 for alpha chain variable domain of TCR clone 167705 (TRAV29/DV5, TRAJ31)
CAASRNNNARLMF

SEQ ID NO: 335410 - protein, 16 aa, Homo sapiens
  CDR3 for beta chain variable domain of TCR clone 167705 (TRBV20-1, TRBJ1-2)
CSASMGQGVANYGYTF

SEQ ID NO: 335411 - protein, 13 aa, Homo sapiens
  CDR3 for alpha chain variable domain of TCR clone 167706 (TRAV8-3, TRAJ36)
CAVGATGANNLFF

SEQ ID NO: 335412 - protein, 16 aa, Homo sapiens
  CDR3 for beta chain variable domain of TCR clone 167706 (TRBV13, TRBJ2-2)
CASSPRSGEHTGELFF

SEQ ID NO: 335413 - protein, 11 aa, Homo sapiens
  CDR3 for alpha chain variable domain of TCR clone 167707 (TRAV12-3, TRAJ43)
CTMSVSNDMRF

SEQ ID NO: 335414 - protein, 13 aa, Homo sapiens
  CDR3 for beta chain variable domain of TCR clone 167707 (TRBV20-1, TRBJ1-1)
CSAPLGGGTEAFF

SEQ ID NO: 335415 - protein, 17 aa, Homo sapiens
  CDR3 for alpha chain variable domain of TCR clone 167708 (TRAV3, TRAJ42)
CAVRDRDYGGSQGNLIF

SEQ ID NO: 335416 - protein, 14 aa, Homo sapiens
  CDR3 for beta chain variable domain of TCR clone 167708 (TRBV28, TRBJ2-7)
CASSPWDSSYEQYF

SEQ ID NO: 335417 - protein, 16 aa, Homo sapiens
  CDR3 for alpha chain variable domain of TCR clone 167709 (TRAV30, TRAJ24)
CGTEIVDADSWGKFQF

SEQ ID NO: 335418 - protein, 18 aa, Homo sapiens
  CDR3 for beta chain variable domain of TCR clone 167709 (TRBV20-1, TRBJ2-6)
CSAETTPTHVSGANVLTF

SEQ ID NO: 335419 - protein, 14 aa, Homo sapiens
  CDR3 for alpha chain variable domain of TCR clone 167710 (TRAV12-2, TRAJ13)
CAVKKTGGYQKVTF

SEQ ID NO: 335420 - protein, 18 aa, Homo sapiens
  CDR3 for beta chain variable domain of TCR clone 167710 (TRBV20-1, TRBJ2-6)
GSAETTPTHGSGANVLTF

SEQ ID NO: 335421 - protein, 14 aa, Homo sapiens
  CDR3 for alpha chain variable domain of TCR clone 167711 (TRAV12-2, TRAJ13)
CAVKKTGGYQKVTF

SEQ ID NO: 335422 - protein, 15 aa, Homo sapiens
  CDR3 for beta chain variable domain of TCR clone 167711 (TRBV27, TRBJ2-1)
CASSNGGGAANEHFF

SEQ ID NO: 335423 - protein, 12 aa, Homo sapiens
  CDR3 for alpha chain variable domain of TCR clone 167712 (TRAV8-3, TRAJ26)
CAGDNYGQTFVF

SEQ ID NO: 335424 - protein, 13 aa, Homo sapiens
  CDR3 for beta chain variable domain of TCR clone 167712 (TRBV20-1, TRBJ2-5)
CSARGDYQETQYF

SEQ ID NO: 335425 - protein, 14 aa, Homo sapiens
  CDR3 for alpha chain variable domain of TCR clone 167713 (TRAV2, TRAJ39)
CAVEGDNAGNMLTF

SEQ ID NO: 335426 - protein, 14 aa, Homo sapiens
  CDR3 for beta chain variable domain of TCR clone 167713 (TRBV28, TRBJ2-7)
CASSLRARGNEHYF

SEQ ID NO: 335427 - protein, 15 aa, Homo sapiens
  CDR3 for alpha chain variable domain of TCR clone 167714 (TRAV17, TRAJ13)
CATDAGSGGYQQVTF

SEQ ID NO: 335428 - protein, 17 aa, Homo sapiens
  CDR3 for beta chain variable domain of TCR clone 167714 (TRBV11-2, TRBJ2-1)
CASSLYPLGVEYNEQFF

SEQ ID NO: 335429 - protein, 11 aa, Homo sapiens
  CDR3 for alpha chain variable domain of TCR clone 167715 (TRAV1-1, TRAJ23)
CAVRQGGKLVF

SEQ ID NO: 335430 - protein, 16 aa, Homo sapiens
  CDR3 for beta chain variable domain of TCR clone 167715 (TRBV20-1, TRBJ1-4)
CSAPGQGLLTNEKLFF

SEQ ID NO: 335431 - protein, 14 aa, Homo sapiens
  CDR3 for alpha chain variable domain of TCR clone 167716 (TRAV21, TRAJ58)
CAVGRGRSGSRLTF

SEQ ID NO: 335432 - protein, 13 aa, Homo sapiens
  CDR3 for beta chain variable domain of TCR clone 167716 (TRBV7-2, TRBJ1-6)
CASSLKFDSPLHF

SEQ ID NO: 335433 - protein, 11 aa, Homo sapiens
  CDR3 for alpha chain variable domain of TCR clone 167717 (TRAV2, TRAJ13)
CASGGYQKVTF

SEQ ID NO: 335434 - protein, 14 aa, Homo sapiens
  CDR3 for beta chain variable domain of TCR clone 167717 (TRBV4-1, TRBJ2-3)
CASSQDWSTDTQYF

SEQ ID NO: 335435 - protein, 13 aa, Homo sapiens
  CDR3 for alpha chain variable domain of TCR clone 167718 (TRAV13-2, TRAJ13)
CAEMDFGNAKLTF

SEQ ID NO: 335436 - protein, 15 aa, Homo sapiens
  CDR3 for beta chain variable domain of TCR clone 167718 (TRBV7-9, TRBJ1-6)
CASSSPGRGNSPLHF

SEQ ID NO: 335437 - protein, 12 aa, Homo sapiens
  CDR3 for alpha chain variable domain of TCR clone 167719 (TRAV13-1, TRAJ21)
CAAKEGFNKFYF

SEQ ID NO: 335438 - protein, 13 aa, Homo sapiens
  CDR3 for beta chain variable domain of TCR clone 167719 (TRBV2, TRBJ2-3)
CASILAGGQGQYF

SEQ ID NO: 335439 - protein, 15 aa, Homo sapiens
  CDR3 for alpha chain variable domain of TCR clone 167720 (TRAV26-1, TRAJ37)
CIVRCATGNTGKLIF

SEQ ID NO: 335440 - protein, 12 aa, Homo sapiens
  CDR3 for beta chain variable domain of TCR clone 167720 (TRBV12-4, TRBJ1-1)
CASSLVDTEAFF

SEQ ID NO: 335441 - protein, 15 aa, Homo sapiens
  CDR3 for alpha chain variable domain of TCR clone 167721 (TRAV17, TRAJ28)
CATVDSGAGSYQLTF

SEQ ID NO: 335442 - protein, 14 aa, Homo sapiens
  CDR3 for beta chain variable domain of TCR clone 167721 (TRBV4-2, TRBJ2-1)
CASSLDRAYNEQFF

SEQ ID NO: 335443 - protein, 14 aa, Homo sapiens
  CDR3 for alpha chain variable domain of TCR clone 167722 (TRAV2, TRAJ39)
CAVEGDNAGNMLTF

SEQ ID NO: 335444 - protein, 15 aa, Homo sapiens
  CDR3 for beta chain variable domain of TCR clone 167722 (TRBV12-4, TRBJ2-3)
CASSLAERPTDTQYF

SEQ ID NO: 335445 - protein, 12 aa, Homo sapiens
  CDR3 for alpha chain variable domain of TCR clone 167723 (TRAV13-1, TRAJ21)
CAAKEGFNKFYF

SEQ ID NO: 335446 - protein, 16 aa, Homo sapiens
  CDR3 for beta chain variable domain of TCR clone 167723 (TRBV20-1, TRBJ2-7)
QCDACGGVAGVEEQYF

SEQ ID NO: 335447 - protein, 14 aa, Homo sapiens
  CDR3 for alpha chain variable domain of TCR clone 167724 (TRAV3, TRAJ22)
CAVRDYGSARQLTI

SEQ ID NO: 335448 - protein, 13 aa, Homo sapiens
  CDR3 for beta chain variable domain of TCR clone 167724 (TRBV11-2, TRBJ2-5)
CASGHGAKETQYF

SEQ ID NO: 335449 - protein, 14 aa, Homo sapiens
  CDR3 for alpha chain variable domain of TCR clone 167725 (TRAV1-2, TRAJ16)
CAVNRFSDGQKLLF

SEQ ID NO: 335450 - protein, 18 aa, Homo sapiens
  CDR3 for beta chain variable domain of TCR clone 167725 (TRBV7-9, TRBJ2-6)
CASSFPGAGISGANDLTF

SEQ ID NO: 335451 - protein, 14 aa, Homo sapiens
  CDR3 for alpha chain variable domain of TCR clone 167726 (TRAV36/DV7, TRAJ53)
CAVVDGGSNYKLTF

SEQ ID NO: 335452 - protein, 14 aa, Homo sapiens
  CDR3 for beta chain variable domain of TCR clone 167726 (TRBV19, TRBJ2-1)
CASPTFALSGEQFF

SEQ ID NO: 335453 - protein, 13 aa, Homo sapiens
  CDR3 for alpha chain variable domain of TCR clone 167727 (TRAV13-1, TRAJ5)
CAASDTGRRALTF

SEQ ID NO: 335454 - protein, 12 aa, Homo sapiens
  CDR3 for beta chain variable domain of TCR clone 167727 (TRBV28, TRBJ2-3)
CARSLYRDTQYF

SEQ ID NO: 335455 - protein, 14 aa, Homo sapiens
  CDR3 for alpha chain variable domain of TCR clone 167728 (TRAV12-3, TRAJ4)
CAMSATGGYNKLIF

SEQ ID NO: 335456 - protein, 12 aa, Homo sapiens
  CDR3 for beta chain variable domain of TCR clone 167728 (TRBV11-3, TRBJ2-1)
CASSAAENEQFF

SEQ ID NO: 335457 - protein, 14 aa, Homo sapiens
  CDR3 for alpha chain variable domain of TCR clone 167729 (TRAV20, TRAJ56)
CAVQFGGANSKLTF

SEQ ID NO: 335458 - protein, 13 aa, Homo sapiens
  CDR3 for beta chain variable domain of TCR clone 167729 (TRBV19, TRBJ1-2)
CASSVPGQDGYTF

SEQ ID NO: 335459 - protein, 11 aa, Homo sapiens
  CDR3 for alpha chain variable domain of TCR clone 167730 (TRAV3, TRAJ49)
CVPITGNQFYF

SEQ ID NO: 335460 - protein, 16 aa, Homo sapiens
  CDR3 for beta chain variable domain of TCR clone 167730 (TRBV5-1, TRBJ2-3)
CASSVFPMSSTDTQYF

SEQ ID NO: 335461 - protein, 16 aa, Homo sapiens
  CDR3 for alpha chain variable domain of TCR clone 167731 (TRAV30, TRAJ24)
RGTEIVDADSWGKFQV

SEQ ID NO: 335462 - protein, 14 aa, Homo sapiens
  CDR3 for beta chain variable domain of TCR clone 167731 (TRBV12-5, TRBJ2-5)
CASGSRTHKETQYF

SEQ ID NO: 335463 - protein, 14 aa, Homo sapiens
  CDR3 for alpha chain variable domain of TCR clone 167732 (TRAV1-2, TRAJ16)
CAVNRLSDGQKLLF

SEQ ID NO: 335464 - protein, 16 aa, Homo sapiens
  CDR3 for beta chain variable domain of TCR clone 167732 (TRBV18, TRBJ1-4)
CASSLQTVATNEKLFF

SEQ ID NO: 335465 - protein, 14 aa, Homo sapiens
  CDR3 for alpha chain variable domain of TCR clone 167733 (TRAV1-2, TRAJ8)
CAVREDTGFQQLVF

SEQ ID NO: 335466 - protein, 16 aa, Homo sapiens
  CDR3 for beta chain variable domain of TCR clone 167733 (TRBV4-1, TRBJ2-3)
CASSQSTSGAEDTQYF

SEQ ID NO: 335467 - protein, 13 aa, Homo sapiens
  CDR3 for alpha chain variable domain of TCR clone 167734 (TRAV13-1, TRAJ20)
CPASVSNYHKLSF

SEQ ID NO: 335468 - protein, 12 aa, Homo sapiens
  CDR3 for beta chain variable domain of TCR clone 167734 (TRBV20-1, TRBJ2-1)
CSARLGTDEQFF

SEQ ID NO: 335469 - protein, 13 aa, Homo sapiens
  CDR3 for alpha chain variable domain of TCR clone 167735 (TRAV20, TRAJ20)
CAVQNAGDYKLSF

SEQ ID NO: 335470 - protein, 14 aa, Homo sapiens
  CDR3 for beta chain variable domain of TCR clone 167735 (TRBV2, TRBJ2-7)
CASSLTSGGYEQYF

SEQ ID NO: 335471 - protein, 14 aa, Homo sapiens
  CDR3 for alpha chain variable domain of TCR clone 167736 (TRAV12-1, TRAJ17)
CVVNYKAAGNKLTF

SEQ ID NO: 335472 - protein, 17 aa, Homo sapiens
  CDR3 for beta chain variable domain of TCR clone 167736 (TRBV20-1, TRBJ2-1)
WSASSSGLAGSYNEQFF

SEQ ID NO: 335473 - protein, 14 aa, Homo sapiens
  CDR3 for alpha chain variable domain of TCR clone 167737 (TRAV26-1, TRAJ39)
CIVFTNNAGNILTF

SEQ ID NO: 335474 - protein, 15 aa, Homo sapiens
  CDR3 for beta chain variable domain of TCR clone 167737 (TRBV19, TRBJ2-4)
CASSLTGLTKNIQYF

SEQ ID NO: 335475 - protein, 10 aa, Homo sapiens
  CDR3 for alpha chain variable domain of TCR clone 167738 (TRAV2, TRAJ34)
CAVVNDKLIF

SEQ ID NO: 335476 - protein, 15 aa, Homo sapiens
  CDR3 for beta chain variable domain of TCR clone 167738 (TRBV3-1, TRBJ2-2)
CASSQEWTRAGELFF

SEQ ID NO: 335477 - protein, 15 aa, Homo sapiens
  CDR3 for alpha chain variable domain of TCR clone 167739 (TRAV8-3, TRAJ27)
CAVGPSKTNSGKSTF

SEQ ID NO: 335478 - protein, 14 aa, Homo sapiens
  CDR3 for beta chain variable domain of TCR clone 167739 (TRBV11-2, TRBJ2-7)
CASSLGAGAYEQYF

SEQ ID NO: 335479 - protein, 18 aa, Homo sapiens
  CDR3 for alpha chain variable domain of TCR clone 167740 (TRAV29/DV5, TRAJ52)
CASGFRGAGGTSYGKLAF

SEQ ID NO: 335480 - protein, 16 aa, Homo sapiens
  CDR3 for beta chain variable domain of TCR clone 167740 (TRBV7-3, TRBJ2-2)
CASSLKRGTLSGELFF

SEQ ID NO: 335481 - protein, 15 aa, Homo sapiens
  CDR3 for alpha chain variable domain of TCR clone 167741 (TRAV3, TRAJ5)
CAVRDPDTGRRALTF

SEQ ID NO: 335482 - protein, 14 aa, Homo sapiens
  CDR3 for beta chain variable domain of TCR clone 167741 (TRBV25-1, TRBJ1-4)
CASSGGGQPEKLFF

SEQ ID NO: 335483 - protein, 13 aa, Homo sapiens
  CDR3 for alpha chain variable domain of TCR clone 167742 (TRAV35, TRAJ57)
CWSPQGGSEKLVF

SEQ ID NO: 335484 - protein, 18 aa, Homo sapiens
  CDR3 for beta chain variable domain of TCR clone 167742 (TRBV12-4, TRBJ1-2)
CASSPNPGQAGPYYGYTF

SEQ ID NO: 335485 - protein, 15 aa, Homo sapiens
  CDR3 for alpha chain variable domain of TCR clone 167743 (TRAV12-1, TRAJ45)
CVVIRRGGGADGLTF

SEQ ID NO: 335486 - protein, 18 aa, Homo sapiens
  CDR3 for beta chain variable domain of TCR clone 167743 (TRBV23-1, TRBJ1-1)
CASEKQGAEATLRRSLDK

SEQ ID NO: 335487 - protein, 15 aa, Homo sapiens
  CDR3 for alpha chain variable domain of TCR clone 167744 (TRAV2, TRAJ37)
CAVEDGSSNTGKLIF

SEQ ID NO: 335488 - protein, 13 aa, Homo sapiens
  CDR3 for beta chain variable domain of TCR clone 167744 (TRBV20-1, TRBJ1-6)
CSTFREGNSPHHF

SEQ ID NO: 335489 - protein, 12 aa, Homo sapiens
  CDR3 for alpha chain variable domain of TCR clone 167745 (TRAV12-3, TRAJ17)
CAMTLTGNKLTF

SEQ ID NO: 335490 - protein, 15 aa, Homo sapiens
  CDR3 for beta chain variable domain of TCR clone 167745 (TRBV2, TRBJ2-3)
CASSDFEKATDTQYF

SEQ ID NO: 335491 - protein, 16 aa, Homo sapiens
  CDR3 for alpha chain variable domain of TCR clone 167746 (TRAV21, TRAJ17)
CAVRPGEEAAGNKLTF

SEQ ID NO: 335492 - protein, 16 aa, Homo sapiens
  CDR3 for beta chain variable domain of TCR clone 167746 (TRBV2, TRBJ2-7)
CGSSEPWTGPSYEQYF

SEQ ID NO: 335493 - protein, 17 aa, Homo sapiens
  CDR3 for alpha chain variable domain of TCR clone 167747 (TRAV3, TRAJ42)
CAVRDRDYGGSQGNLIF

SEQ ID NO: 335494 - protein, 13 aa, Homo sapiens
  CDR3 for beta chain variable domain of TCR clone 167747 (TRBV12-4, TRBJ1-2)
CASSLRQGKGYTF

SEQ ID NO: 335495 - protein, 15 aa, Homo sapiens
  CDR3 for alpha chain variable domain of TCR clone 167748 (TRAV9-2, TRAJ23)
CALSDLYNQGGKLIF

SEQ ID NO: 335496 - protein, 12 aa, Homo sapiens
  CDR3 for beta chain variable domain of TCR clone 167748 (TRBV3-1, TRBJ2-2)
CASSLFPGELFF

SEQ ID NO: 335497 - protein, 14 aa, Homo sapiens
  CDR3 for alpha chain variable domain of TCR clone 167749 (TRAV3, TRAJ33)
CAVRDMDSNYKLIW

SEQ ID NO: 335498 - protein, 19 aa, Homo sapiens
  CDR3 for beta chain variable domain of TCR clone 167749 (TRBV7-3, TRBJ1-2)
CASSFPQGNDGELWRHLRF

SEQ ID NO: 335499 - protein, 10 aa, Homo sapiens
  CDR3 for alpha chain variable domain of TCR clone 167750 (TRAV36/DV7, TRAJ48)
CAVGNEKLTF

SEQ ID NO: 335500 - protein, 13 aa, Homo sapiens
  CDR3 for beta chain variable domain of TCR clone 167750 (TRBV19, TRBJ1-2)
CASSVPGQDGYTF

SEQ ID NO: 335501 - protein, 13 aa, Homo sapiens
  CDR3 for alpha chain variable domain of TCR clone 167751 (TRAV12-3, TRAJ5)
CAMIYTGRRALTF

SEQ ID NO: 335502 - protein, 12 aa, Homo sapiens
  CDR3 for beta chain variable domain of TCR clone 167751 (TRBV18, TRBJ1-4)
CASSPSREEPFF

SEQ ID NO: 335503 - protein, 14 aa, Homo sapiens
  CDR3 for alpha chain variable domain of TCR clone 167752 (TRAV1-2, TRAJ16)
CAVNRFSDGQKLLF

SEQ ID NO: 335504 - protein, 13 aa, Homo sapiens
  CDR3 for beta chain variable domain of TCR clone 167752 (TRBV28, TRBJ2-1)
CASRSGGLNEQFF

SEQ ID NO: 335505 - protein, 12 aa, Homo sapiens
  CDR3 for alpha chain variable domain of TCR clone 167753 (TRAV13-1, TRAJ48)
CAANFGNEKLTF

SEQ ID NO: 335506 - protein, 13 aa, Homo sapiens
  CDR3 for beta chain variable domain of TCR clone 167753 (TRBV7-6, TRBJ1-2)
CASSLVADYGYTF

SEQ ID NO: 335507 - protein, 14 aa, Homo sapiens
  CDR3 for alpha chain variable domain of TCR clone 167754 (TRAV12-1, TRAJ37)
CVVTGSSNTGKLIF

SEQ ID NO: 335508 - protein, 18 aa, Homo sapiens
  CDR3 for beta chain variable domain of TCR clone 167754 (TRBV23-1, TRBJ2-5)
PAPAVPERVLLIQETQYF

SEQ ID NO: 335509 - protein, 11 aa, Homo sapiens
  CDR3 for alpha chain variable domain of TCR clone 167755 (TRAV1-2, TRAJ20)
CAVANDYKLSF

SEQ ID NO: 335510 - protein, 14 aa, Homo sapiens
  CDR3 for beta chain variable domain of TCR clone 167755 (TRBV19, TRBJ2-5)
CASSMTGQQETRYF

SEQ ID NO: 335511 - protein, 14 aa, Homo sapiens
  CDR3 for alpha chain variable domain of TCR clone 167756 (TRAV9-2, TRAJ39)
GALYIYNAGNMLTF

SEQ ID NO: 335512 - protein, 15 aa, Homo sapiens
  CDR3 for beta chain variable domain of TCR clone 167756 (TRBV20-1, TRBJ2-7)
CSARDRVSGMDEQYF

SEQ ID NO: 335513 - protein, 11 aa, Homo sapiens
  CDR3 for alpha chain variable domain of TCR clone 167757 (TRAV17, TRAJ43)
CATPRSNDMRF

SEQ ID NO: 335514 - protein, 14 aa, Homo sapiens
  CDR3 for beta chain variable domain of TCR clone 167757 (TRBV19, TRBJ2-2)
CASSTLHRSGGLFF

SEQ ID NO: 335515 - protein, 16 aa, Homo sapiens
  CDR3 for alpha chain variable domain of TCR clone 167758 (TRAV2, TRAJ4)
CSVEDRFSGGYNKLIF

SEQ ID NO: 335516 - protein, 13 aa, Homo sapiens
  CDR3 for beta chain variable domain of TCR clone 167758 (TRBV7-7, TRBJ2-5)
CASSRSGQETQYF

SEQ ID NO: 335517 - protein, 16 aa, Homo sapiens
  CDR3 for alpha chain variable domain of TCR clone 167759 (TRAV17, TRAJ52)
CATGIIGGTSYGKLTF

SEQ ID NO: 335518 - protein, 12 aa, Homo sapiens
  CDR3 for beta chain variable domain of TCR clone 167759 (TRBV7-3, TRBJ2-1)
CASRFINNEQFF

SEQ ID NO: 335519 - protein, 14 aa, Homo sapiens
  CDR3 for alpha chain variable domain of TCR clone 167760 (TRAV29/DV5, TRAJ45)
CAASEWGGAAGLTF

SEQ ID NO: 335520 - protein, 15 aa, Homo sapiens
  CDR3 for beta chain variable domain of TCR clone 167760 (TRBV12-4, TRBJ1-5)
CASTQGTGPLQPQHF

SEQ ID NO: 335521 - protein, 12 aa, Homo sapiens
  CDR3 for alpha chain variable domain of TCR clone 167761 (TRAV12-3, TRAJ20)
CAMVRGDYKLSF

SEQ ID NO: 335522 - protein, 12 aa, Homo sapiens
  CDR3 for beta chain variable domain of TCR clone 167761 (TRBV5-1, TRBJ2-7)
CASSFRGYEQYF

SEQ ID NO: 335523 - protein, 13 aa, Homo sapiens
  CDR3 for alpha chain variable domain of TCR clone 167762 (TRAV8-3, TRAJ48)
CAVVPFGNEKLTF

SEQ ID NO: 335524 - protein, 15 aa, Homo sapiens
  CDR3 for beta chain variable domain of TCR clone 167762 (TRBV11-2, TRBJ2-1)
CASSSPSTRYNEQVF

SEQ ID NO: 335525 - protein, 18 aa, Homo sapiens
  CDR3 for alpha chain variable domain of TCR clone 167763 (TRAV21, TRAJ52)
CAVRPSPAGGTSYGKLTF

SEQ ID NO: 335526 - protein, 16 aa, Homo sapiens
  CDR3 for beta chain variable domain of TCR clone 167763 (TRBV7-3, TRBJ2-1)
CASSLEGYRSYSEQFF

SEQ ID NO: 335527 - protein, 15 aa, Homo sapiens
  CDR3 for alpha chain variable domain of TCR clone 167764 (TRAV23/DV6, TRAJ13)
CAAWLGGGGYQKVTF

SEQ ID NO: 335528 - protein, 17 aa, Homo sapiens
  CDR3 for beta chain variable domain of TCR clone 167764 (TRBV19, TRBJ2-7)
CASSISFYDSYPYEQYF

SEQ ID NO: 335529 - protein, 20 aa, Homo sapiens
  CDR3 for alpha chain variable domain of TCR clone 167765 (TRAV26-1, TRAJ42)
CCVLLHRQTYYGGSQGNLIF

SEQ ID NO: 335530 - protein, 15 aa, Homo sapiens
  CDR3 for beta chain variable domain of TCR clone 167765 (TRBV18, TRBJ2-7)
CASSPLQGRTYEQYF

SEQ ID NO: 335531 - protein, 13 aa, Homo sapiens
  CDR3 for alpha chain variable domain of TCR clone 167766 (TRAV8-3, TRAJ28)
CAVGAVGSYQLTF

SEQ ID NO: 335532 - protein, 13 aa, Homo sapiens
  CDR3 for beta chain variable domain of TCR clone 167766 (TRBV11-2, TRBJ2-5)
CASSFSSQETQYF

SEQ ID NO: 335533 - protein, 14 aa, Homo sapiens
  CDR3 for alpha chain variable domain of TCR clone 167767 (TRAV17, TRAJ35)
CATDRPGFGNVLHC

SEQ ID NO: 335534 - protein, 14 aa, Homo sapiens
  CDR3 for beta chain variable domain of TCR clone 167767 (TRBV19, TRBJ2-1)
CASSRLASINEQFF

SEQ ID NO: 335535 - protein, 14 aa, Homo sapiens
  CDR3 for alpha chain variable domain of TCR clone 167768 (TRAV12-3, TRAJ10)
SHLPLTGGGNKLTF

SEQ ID NO: 335536 - protein, 15 aa, Homo sapiens
  CDR3 for beta chain variable domain of TCR clone 167768 (TRBV18, TRBJ2-1)
CASSLPSASYNEQFF

SEQ ID NO: 335537 - protein, 13 aa, Homo sapiens
  CDR3 for alpha chain variable domain of TCR clone 167769 (TRAV13-2, TRAJ48)
CAEMDFGDEKLTF

SEQ ID NO: 335538 - protein, 15 aa, Homo sapiens
  CDR3 for beta chain variable domain of TCR clone 167769 (TRBV7-9, TRBJ1-6)
CASSSPGRGNSPLHS

SEQ ID NO: 335539 - protein, 15 aa, Homo sapiens
  CDR3 for alpha chain variable domain of TCR clone 167770 (TRAV17, TRAJ57)
CATGPSQGGSEKLVF

SEQ ID NO: 335540 - protein, 12 aa, Homo sapiens
  CDR3 for beta chain variable domain of TCR clone 167770 (TRBV5-1, TRBJ1-1)
CASSLTGAEAFF

SEQ ID NO: 335541 - protein, 17 aa, Homo sapiens
  CDR3 for alpha chain variable domain of TCR clone 167771 (TRAV13-1, TRAJ31)
CAPRDRLLFGDGTQLGV

SEQ ID NO: 335542 - protein, 12 aa, Homo sapiens
  CDR3 for beta chain variable domain of TCR clone 167771 (TRBV7-9, TRBJ2-7)
CASSLEGYEQYF

SEQ ID NO: 335543 - protein, 13 aa, Homo sapiens
  CDR3 for alpha chain variable domain of TCR clone 167772 (TRAV2, TRAJ20)
CAVEGPSEDKLSF

SEQ ID NO: 335544 - protein, 16 aa, Homo sapiens
  CDR3 for beta chain variable domain of TCR clone 167772 (TRBV25-1, TRBJ2-7)
CASSELTGGGVYEQYF

SEQ ID NO: 335545 - protein, 16 aa, Homo sapiens
  CDR3 for alpha chain variable domain of TCR clone 167773 (TRAV12-2, TRAJ32)
CAVNLGQGGATNKLIF

SEQ ID NO: 335546 - protein, 15 aa, Homo sapiens
  CDR3 for beta chain variable domain of TCR clone 167773 (TRBV20-1, TRBJ2-7)
CSARGPLTGGREQYF

SEQ ID NO: 335547 - protein, 13 aa, Homo sapiens
  CDR3 for alpha chain variable domain of TCR clone 167774 (TRAV26-1, TRAJ48)
CIVRVVGDEKLTF

SEQ ID NO: 335548 - protein, 16 aa, Homo sapiens
  CDR3 for beta chain variable domain of TCR clone 167774 (TRBV19, TRBJ2-6)
CASSMSGLSGANVLTF

SEQ ID NO: 335549 - protein, 13 aa, Homo sapiens
  CDR3 for alpha chain variable domain of TCR clone 167775 (TRAV8-3, TRAJ28)
CAVGAVGSYQLTF

SEQ ID NO: 335550 - protein, 15 aa, Homo sapiens
  CDR3 for beta chain variable domain of TCR clone 167775 (TRBV7-2, TRBJ2-2)
CASRRPGQNTGELFF

SEQ ID NO: 335551 - protein, 12 aa, Homo sapiens
  CDR3 for alpha chain variable domain of TCR clone 167776 (TRAV12-3, TRAJ32)
CAGGGATNKPIF

SEQ ID NO: 335552 - protein, 15 aa, Homo sapiens
  CDR3 for beta chain variable domain of TCR clone 167776 (TRBV6-3, TRBJ2-7)
CASSSPGTVFYEQYF

SEQ ID NO: 335553 - protein, 18 aa, Homo sapiens
  CDR3 for alpha chain variable domain of TCR clone 167777 (TRAV21, TRAJ52)
CAVRPSPAGGTSYGKLTF

SEQ ID NO: 335554 - protein, 17 aa, Homo sapiens
  CDR3 for beta chain variable domain of TCR clone 167777 (TRBV20-1, TRBJ2-1)
CSASSSGLGDPTMSSSS

SEQ ID NO: 335555 - protein, 16 aa, Homo sapiens
  CDR3 for alpha chain variable domain of TCR clone 167778 (TRAV8-2, TRAJ45)
CVVSEVTGGGADGLTF

SEQ ID NO: 335556 - protein, 15 aa, Homo sapiens
  CDR3 for beta chain variable domain of TCR clone 167778 (TRBV7-9, TRBJ2-5)
CASSLVAGGLETQYF

SEQ ID NO: 335557 - protein, 16 aa, Homo sapiens
  CDR3 for alpha chain variable domain of TCR clone 167779 (TRAV3, TRAJ10)
CAVRDMRAGGGNKLTF

SEQ ID NO: 335558 - protein, 13 aa, Homo sapiens
  CDR3 for beta chain variable domain of TCR clone 167779 (TRBV6-1, TRBJ1-1)
CASSRQGNTEAFS

SEQ ID NO: 335559 - protein, 15 aa, Homo sapiens
  CDR3 for alpha chain variable domain of TCR clone 167780 (TRAV8-2, TRAJ10)
CVVSHSTGGGNKRTF

SEQ ID NO: 335560 - protein, 15 aa, Homo sapiens
  CDR3 for beta chain variable domain of TCR clone 167780 (TRBV6-5, TRBJ2-1)
CASSYDAGAGNEQFF

SEQ ID NO: 335561 - protein, 14 aa, Homo sapiens
  CDR3 for alpha chain variable domain of TCR clone 167781 (TRAV1-1, TRAJ27)
CAVIYNTNAGKSTF

SEQ ID NO: 335562 - protein, 15 aa, Homo sapiens
  CDR3 for beta chain variable domain of TCR clone 167781 (TRBV7-2, TRBJ2-1)
CASSSGLGGGNEQFF

SEQ ID NO: 335563 - protein, 12 aa, Homo sapiens
  CDR3 for alpha chain variable domain of TCR clone 167782 (TRAV12-3, TRAJ17)
CAMTLTGNNLTF

SEQ ID NO: 335564 - protein, 15 aa, Homo sapiens
  CDR3 for beta chain variable domain of TCR clone 167782 (TRBV20-1, TRBJ2-7)
CSARNRVSGMDEQYF

SEQ ID NO: 335565 - protein, 16 aa, Homo sapiens
  CDR3 for alpha chain variable domain of TCR clone 167783 (TRAV27, TRAJ53)
CAAPEGSGGSNYKLTF

SEQ ID NO: 335566 - protein, 13 aa, Homo sapiens
  CDR3 for beta chain variable domain of TCR clone 167783 (TRBV12-5, TRBJ2-3)
CASGDRQSDTQYF

SEQ ID NO: 335567 - protein, 14 aa, Homo sapiens
  CDR3 for alpha chain variable domain of TCR clone 167784 (TRAV38-1, TRAJ45)
CAYYSGGGADGLTF

SEQ ID NO: 335568 - protein, 12 aa, Homo sapiens
  CDR3 for beta chain variable domain of TCR clone 167784 (TRBV19, TRBJ1-5)
CASSIAQQPQHF

SEQ ID NO: 335569 - protein, 14 aa, Homo sapiens
  CDR3 for alpha chain variable domain of TCR clone 167785 (TRAV8-3, TRAJ4)
CAVGAAGGYNKLIF

SEQ ID NO: 335570 - protein, 18 aa, Homo sapiens
  CDR3 for beta chain variable domain of TCR clone 167785 (TRBV20-1, TRBJ2-6)
CSAETTPTHGSGANVLTF

SEQ ID NO: 335571 - protein, 13 aa, Homo sapiens
  CDR3 for alpha chain variable domain of TCR clone 167786 (TRAV2, TRAJ40)
CAVVPSGTYKYIF

SEQ ID NO: 335572 - protein, 14 aa, Homo sapiens
  CDR3 for beta chain variable domain of TCR clone 167786 (TRBV7-9, TRBJ2-1)
CASSSMVGFGEQFF

SEQ ID NO: 335573 - protein, 14 aa, Homo sapiens
  CDR3 for alpha chain variable domain of TCR clone 167787 (TRAV2, TRAJ9)
CAVEDRSGGFKTIF

SEQ ID NO: 335574 - protein, 15 aa, Homo sapiens
  CDR3 for beta chain variable domain of TCR clone 167787 (TRBV20-1, TRBJ2-5)
CSATPLTGDQETQYF

SEQ ID NO: 335575 - protein, 13 aa, Homo sapiens
  CDR3 for alpha chain variable domain of TCR clone 167788 (TRAV12-3, TRAJ13)
CAMTSGGYQKVAF

SEQ ID NO: 335576 - protein, 13 aa, Homo sapiens
  CDR3 for beta chain variable domain of TCR clone 167788 (TRBV7-9, TRBJ1-2)
CACSLKQNYGYTF

SEQ ID NO: 335577 - protein, 15 aa, Homo sapiens
  CDR3 for alpha chain variable domain of TCR clone 167789 (TRAV4, TRAJ10)
CLVGDGSGGGNKLTF

SEQ ID NO: 335578 - protein, 14 aa, Homo sapiens
  CDR3 for beta chain variable domain of TCR clone 167789 (TRBV4-1, TRBJ2-5)
CASSQERGRETQYF

SEQ ID NO: 335579 - protein, 13 aa, Homo sapiens
  CDR3 for alpha chain variable domain of TCR clone 167790 (TRAV12-2, TRAJ20)
CAVYPSNDYKLSF

SEQ ID NO: 335580 - protein, 18 aa, Homo sapiens
  CDR3 for beta chain variable domain of TCR clone 167790 (TRBV11-2, TRBJ2-3)
CASSLGGASRGAPNTRYF

SEQ ID NO: 335581 - protein, 12 aa, Homo sapiens
  CDR3 for alpha chain variable domain of TCR clone 167791 (TRAV3, TRAJ31)
CAVRPRVPRLMF

SEQ ID NO: 335582 - protein, 17 aa, Homo sapiens
  CDR3 for beta chain variable domain of TCR clone 167791 (TRBV7-9, TRBJ1-5)
CASSASQGGDSNQTQHF

SEQ ID NO: 335583 - protein, 17 aa, Homo sapiens
  CDR3 for alpha chain variable domain of TCR clone 167792 (TRAV3, TRAJ6)
CAVRDGPRAGGSYIPTF

SEQ ID NO: 335584 - protein, 18 aa, Homo sapiens
  CDR3 for beta chain variable domain of TCR clone 167792 (TRBV25-1, TRBJ1-2)
CASSGLQNGQGLIYGYTF

SEQ ID NO: 335585 - protein, 14 aa, Homo sapiens
  CDR3 for alpha chain variable domain of TCR clone 167793 (TRAV17, TRAJ39)
CATDPVRAGNMLTF

SEQ ID NO: 335586 - protein, 18 aa, Homo sapiens
  CDR3 for beta chain variable domain of TCR clone 167793 (TRBV11-2, TRBJ2-7)
CASSWRTVQTGQSYEQYF

SEQ ID NO: 335587 - protein, 13 aa, Homo sapiens
  CDR3 for alpha chain variable domain of TCR clone 167794 (TRAV23/DV6, TRAJ21)
CAASIGNFNKFYF

SEQ ID NO: 335588 - protein, 13 aa, Homo sapiens
  CDR3 for beta chain variable domain of TCR clone 167794 (TRBV10-3, TRBJ2-7)
CASKLAVNYEQYF

SEQ ID NO: 335589 - protein, 13 aa, Homo sapiens
  CDR3 for alpha chain variable domain of TCR clone 167795 (TRAV1-2, TRAJ9)
CAVLNTGGFKTIF

SEQ ID NO: 335590 - protein, 17 aa, Homo sapiens
  CDR3 for beta chain variable domain of TCR clone 167795 (TRBV13, TRBJ2-3)
CASSHSRVAGGRNTQYF

SEQ ID NO: 335591 - protein, 14 aa, Homo sapiens
  CDR3 for alpha chain variable domain of TCR clone 167796 (TRAV38-1, TRAJ43)
CAFMKDNNNNDMRF

SEQ ID NO: 335592 - protein, 17 aa, Homo sapiens
  CDR3 for beta chain variable domain of TCR clone 167796 (TRBV7-7, TRBJ1-4)
CASSLVGQGASNEKLFF

SEQ ID NO: 335593 - protein, 14 aa, Homo sapiens
  CDR3 for alpha chain variable domain of TCR clone 167797 (TRAV12-3, TRAJ13)
GAMKNSGGDQKVTF

SEQ ID NO: 335594 - protein, 13 aa, Homo sapiens
  CDR3 for beta chain variable domain of TCR clone 167797 (TRBV29-1, TRBJ2-5)
CSARDRVEETQYF

SEQ ID NO: 335595 - protein, 11 aa, Homo sapiens
  CDR3 for alpha chain variable domain of TCR clone 167798 (TRAV3, TRAJ17)
PRGAAGNKLTF

SEQ ID NO: 335596 - protein, 16 aa, Homo sapiens
  CDR3 for beta chain variable domain of TCR clone 167798 (TRBV7-6, TRBJ2-1)
CASSAPGPSSYNEHFF

SEQ ID NO: 335597 - protein, 15 aa, Homo sapiens
  CDR3 for alpha chain variable domain of TCR clone 167799 (TRAV21, TRAJ24)
CAARSSTDSWGKLQF

SEQ ID NO: 335598 - protein, 15 aa, Homo sapiens
  CDR3 for beta chain variable domain of TCR clone 167799 (TRBV19, TRBJ1-5)
CASSIVWADNQPQHF

SEQ ID NO: 335599 - protein, 17 aa, Homo sapiens
  CDR3 for alpha chain variable domain of TCR clone 167800 (TRAV3, TRAJ42)
CAVRDRDYGGSQRNLIF

SEQ ID NO: 335600 - protein, 15 aa, Homo sapiens
  CDR3 for beta chain variable domain of TCR clone 167800 (TRBV6-6, TRBJ2-7)
CASSYSYGGSYEQYF

SEQ ID NO: 335601 - protein, 15 aa, Homo sapiens
  CDR3 for alpha chain variable domain of TCR clone 167801 (TRAV12-3, TRAJ6)
CAMSATTGGSYIPSF

SEQ ID NO: 335602 - protein, 14 aa, Homo sapiens
  CDR3 for beta chain variable domain of TCR clone 167801 (TRBV13, TRBJ2-5)
CASSLERVGETQYF

SEQ ID NO: 335603 - protein, 15 aa, Homo sapiens
  CDR3 for alpha chain variable domain of TCR clone 167802 (TRAV20, TRAJ4)
CAVTMFSGGYNKLIF

SEQ ID NO: 335604 - protein, 16 aa, Homo sapiens
  CDR3 for beta chain variable domain of TCR clone 167802 (TRBV19, TRBJ2-3)
CASSPGLAGLTDTQYF

SEQ ID NO: 335605 - protein, 16 aa, Homo sapiens
  CDR3 for alpha chain variable domain of TCR clone 167803 (TRAV30, TRAJ24)
CGTEIVDADSWGKFQF

SEQ ID NO: 335606 - protein, 15 aa, Homo sapiens
  CDR3 for beta chain variable domain of TCR clone 167803 (TRBV6-1, TRBJ2-3)
CASSERGGIIDTQYF

SEQ ID NO: 335607 - protein, 15 aa, Homo sapiens
  CDR3 for alpha chain variable domain of TCR clone 167804 (TRAV13-1, TRAJ44)
CAASRGGGTASKLTF

SEQ ID NO: 335608 - protein, 15 aa, Homo sapiens
  CDR3 for beta chain variable domain of TCR clone 167804 (TRBV18, TRBJ2-1)
CASSPPGASYNEQFF

SEQ ID NO: 335609 - protein, 12 aa, Homo sapiens
  CDR3 for alpha chain variable domain of TCR clone 167805 (TRAV8-3, TRAJ26)
CAGDNYGQNFVF

SEQ ID NO: 335610 - protein, 18 aa, Homo sapiens
  CDR3 for beta chain variable domain of TCR clone 167805 (TRBV12-4, TRBJ2-2)
CASSLVAGTRGRTEELFF

SEQ ID NO: 335611 - protein, 14 aa, Homo sapiens
  CDR3 for alpha chain variable domain of TCR clone 167806 (TRAV27, TRAJ40)
CAGAKASGTYKYIF

SEQ ID NO: 335612 - protein, 13 aa, Homo sapiens
  CDR3 for beta chain variable domain of TCR clone 167806 (TRBV19, TRBJ1-2)
CASSVPGQDGYTF

SEQ ID NO: 335613 - protein, 10 aa, Homo sapiens
  CDR3 for alpha chain variable domain of TCR clone 167807 (TRAV23/DV6, TRAJ57)
CAASSTLSQG

SEQ ID NO: 335614 - protein, 12 aa, Homo sapiens
  CDR3 for beta chain variable domain of TCR clone 167807 (TRBV6-5, TRBJ2-2)
CASSLATGELFF

SEQ ID NO: 335615 - protein, 15 aa, Homo sapiens
  CDR3 for alpha chain variable domain of TCR clone 167808 (TRAV12-2, TRAJ50)
CAVNGLETSYDKVIF

SEQ ID NO: 335616 - protein, 16 aa, Homo sapiens
  CDR3 for beta chain variable domain of TCR clone 167808 (TRBV5-8, TRBJ2-3)
CASQQPGAGGADTQYF

SEQ ID NO: 335617 - protein, 15 aa, Homo sapiens
  CDR3 for alpha chain variable domain of TCR clone 167809 (TRAV3, TRAJ22)
CAVRDRGGSARQLTF

SEQ ID NO: 335618 - protein, 17 aa, Homo sapiens
  CDR3 for beta chain variable domain of TCR clone 167809 (TRBV13, TRBJ2-3)
CPSSLSRVAGGRNTQYF

SEQ ID NO: 335619 - protein, 15 aa, Homo sapiens
  CDR3 for alpha chain variable domain of TCR clone 167810 (TRAV12-3, TRAJ11)
CAMSEENSGYSTLTF

SEQ ID NO: 335620 - protein, 12 aa, Homo sapiens
  CDR3 for beta chain variable domain of TCR clone 167810 (TRBV12-4, TRBJ2-1)
CQQFPLGSEQFF

SEQ ID NO: 335621 - protein, 13 aa, Homo sapiens
  CDR3 for alpha chain variable domain of TCR clone 167811 (TRAV13-2, TRAJ40)
CAENLHYLRNLQI

SEQ ID NO: 335622 - protein, 12 aa, Homo sapiens
  CDR3 for beta chain variable domain of TCR clone 167811 (TRBV7-8, TRBJ2-7)
CASSLGDREQYF

SEQ ID NO: 335623 - protein, 13 aa, Homo sapiens
  CDR3 for alpha chain variable domain of TCR clone 167812 (TRAV12-3, TRAJ33)
CAMSVNSNYQLIW

SEQ ID NO: 335624 - protein, 17 aa, Homo sapiens
  CDR3 for beta chain variable domain of TCR clone 167812 (TRBV4-3, TRBJ2-1)
CASSQFSSGRASGEQFF

SEQ ID NO: 335625 - protein, 10 aa, Homo sapiens
  CDR3 for alpha chain variable domain of TCR clone 167813 (TRAV26-1, TRAJ40)
CIAGTYKYIF

SEQ ID NO: 335626 - protein, 14 aa, Homo sapiens
  CDR3 for beta chain variable domain of TCR clone 167813 (TRBV25-1, TRBJ1-1)
CASTHLGGNTEAFF

SEQ ID NO: 335627 - protein, 13 aa, Homo sapiens
  CDR3 for alpha chain variable domain of TCR clone 167814 (TRAV12-3, TRAJ43)
CAMIRPNNNDMRF

SEQ ID NO: 335628 - protein, 15 aa, Homo sapiens
  CDR3 for beta chain variable domain of TCR clone 167814 (TRBV7-2, TRBJ2-1)
CASSSRTSREDEQFF

SEQ ID NO: 335629 - protein, 11 aa, Homo sapiens
  CDR3 for alpha chain variable domain of TCR clone 167815 (TRAV3, TRAJ49)
CAPITGNQFYF

SEQ ID NO: 335630 - protein, 15 aa, Homo sapiens
  CDR3 for beta chain variable domain of TCR clone 167815 (TRBV2, TRBJ2-1)
CASSELAGSYNEQFF

SEQ ID NO: 335631 - protein, 14 aa, Homo sapiens
  CDR3 for alpha chain variable domain of TCR clone 167816 (TRAV23/DV6, TRAJ8)
CAASKATGFQKLIF

SEQ ID NO: 335632 - protein, 15 aa, Homo sapiens
  CDR3 for beta chain variable domain of TCR clone 167816 (TRBV28, TRBJ2-3)
CASSPDRQGANTQYF

SEQ ID NO: 335633 - protein, 14 aa, Homo sapiens
  CDR3 for alpha chain variable domain of TCR clone 167817 (TRAV23/DV6, TRAJ13)
CAAMYSGGYQKVTF

SEQ ID NO: 335634 - protein, 14 aa, Homo sapiens
  CDR3 for beta chain variable domain of TCR clone 167817 (TRBV7-6, TRBJ2-3)
CASSLGTVTDTQYF

SEQ ID NO: 335635 - protein, 13 aa, Homo sapiens
  CDR3 for alpha chain variable domain of TCR clone 167818 (TRAV20, TRAJ21)
CAVEGYNFNKFYF

SEQ ID NO: 335636 - protein, 14 aa, Homo sapiens
  CDR3 for beta chain variable domain of TCR clone 167818 (TRBV12-5, TRBJ2-5)
CASGSRTNQETQYF

SEQ ID NO: 335637 - protein, 13 aa, Homo sapiens
  CDR3 for alpha chain variable domain of TCR clone 167819 (TRAV1-2, TRAJ9)
CAALNTGGFKTIF

SEQ ID NO: 335638 - protein, 12 aa, Homo sapiens
  CDR3 for beta chain variable domain of TCR clone 167819 (TRBV4-1, TRBJ2-3)
CASSKGTDTQYF

SEQ ID NO: 335639 - protein, 23 aa, Homo sapiens
  CDR3 for alpha chain variable domain of TCR clone 167820 (TRAV12-2, TRAJ36)
SLLIRDSQPSDSATLERANNLFF

SEQ ID NO: 335640 - protein, 13 aa, Homo sapiens
  CDR3 for beta chain variable domain of TCR clone 167820 (TRBV7-3, TRBJ2-1)
CASSLDSYNEQFF

SEQ ID NO: 335641 - protein, 17 aa, Homo sapiens
  CDR3 for alpha chain variable domain of TCR clone 167821 (TRAV8-1, TRAJ43)
CAVTNDMRFGAGTRMTV

SEQ ID NO: 335642 - protein, 13 aa, Homo sapiens
  CDR3 for beta chain variable domain of TCR clone 167821 (TRBV7-3, TRBJ1-1)
CASSQDWGAEAFF

SEQ ID NO: 335643 - protein, 14 aa, Homo sapiens
  CDR3 for alpha chain variable domain of TCR clone 167822 (TRAV12-2, TRAJ5)
CAVNIRVRGRALTF

SEQ ID NO: 335644 - protein, 18 aa, Homo sapiens
  CDR3 for beta chain variable domain of TCR clone 167822 (TRBV5-1, TRBJ1-6)
CASSFTGTGGDSPSTLGT

SEQ ID NO: 335645 - protein, 18 aa, Homo sapiens
  CDR3 for alpha chain variable domain of TCR clone 167823 (TRAV26-2, TRAJ45)
FILRVAKYSGGGADGLTF

SEQ ID NO: 335646 - protein, 16 aa, Homo sapiens
  CDR3 for beta chain variable domain of TCR clone 167823 (TRBV2, TRBJ1-4)
CASNLLQGATNEKLFF

SEQ ID NO: 335647 - protein, 15 aa, Homo sapiens
  CDR3 for alpha chain variable domain of TCR clone 167824 (TRAV3, TRAJ5)
CAVRDLDTGRRALTL

SEQ ID NO: 335648 - protein, 16 aa, Homo sapiens
  CDR3 for beta chain variable domain of TCR clone 167824 (TRBV20-1, TRBJ1-2)
CSASMGQGVANYGYTF

SEQ ID NO: 335649 - protein, 12 aa, Homo sapiens
  CDR3 for alpha chain variable domain of TCR clone 167825 (TRAV8-2, TRAJ45)
CVQGGGAYGLTF

SEQ ID NO: 335650 - protein, 15 aa, Homo sapiens
  CDR3 for beta chain variable domain of TCR clone 167825 (TRBV19, TRBJ1-1)
CASSIRRQMNTEAFF

SEQ ID NO: 335651 - protein, 16 aa, Homo sapiens
  CDR3 for alpha chain variable domain of TCR clone 167826 (TRAV26-1, TRAJ37)
CIVRWDGSGNTGKLIF

SEQ ID NO: 335652 - protein, 14 aa, Homo sapiens
  CDR3 for beta chain variable domain of TCR clone 167826 (TRBV19, TRBJ2-2)
CASSGQGIAGELFF

SEQ ID NO: 335653 - protein, 14 aa, Homo sapiens
  CDR3 for alpha chain variable domain of TCR clone 167827 (TRAV12-2, TRAJ13)
CAVKKTGGYQKVTF

SEQ ID NO: 335654 - protein, 17 aa, Homo sapiens
  CDR3 for beta chain variable domain of TCR clone 167827 (TRBV3-1, TRBJ2-3)
CASSQGPLGAGTDTQYF

SEQ ID NO: 335655 - protein, 10 aa, Homo sapiens
  CDR3 for alpha chain variable domain of TCR clone 167828 (TRAV23/DV6, TRAJ57)
CAASPTLSQG

SEQ ID NO: 335656 - protein, 14 aa, Homo sapiens
  CDR3 for beta chain variable domain of TCR clone 167828 (TRBV7-8, TRBJ2-7)
CASSPGLADYEQYF

SEQ ID NO: 335657 - protein, 16 aa, Homo sapiens
  CDR3 for alpha chain variable domain of TCR clone 167829 (TRAV12-3, TRAJ53)
FAMSPGSGGSNYKLTF

SEQ ID NO: 335658 - protein, 16 aa, Homo sapiens
  CDR3 for beta chain variable domain of TCR clone 167829 (TRBV4-2, TRBJ1-1)
CASSQAGFGMNTEAFF

SEQ ID NO: 335659 - protein, 12 aa, Homo sapiens
  CDR3 for alpha chain variable domain of TCR clone 167830 (TRAV12-3, TRAJ17)
CAMTLTGNKLTF

SEQ ID NO: 335660 - protein, 14 aa, Homo sapiens
  CDR3 for beta chain variable domain of TCR clone 167830 (TRBV27, TRBJ2-1)
CASRHLGGGKEQFF

SEQ ID NO: 335661 - protein, 14 aa, Homo sapiens
  CDR3 for alpha chain variable domain of TCR clone 167831 (TRAV29/DV5, TRAJ36)
CAALRKTGANNLFF

SEQ ID NO: 335662 - protein, 17 aa, Homo sapiens
  CDR3 for beta chain variable domain of TCR clone 167831 (TRBV20-1, TRBJ2-2)
CSASGSGQGGLTGELFF

SEQ ID NO: 335663 - protein, 18 aa, Homo sapiens
  CDR3 for alpha chain variable domain of TCR clone 167832 (TRAV26-2, TRAJ45)
CILRLWGYSGGGADGLTF

SEQ ID NO: 335664 - protein, 13 aa, Homo sapiens
  CDR3 for beta chain variable domain of TCR clone 167832 (TRBV7-9, TRBJ1-2)
CASSLKQNYGYTF

SEQ ID NO: 335665 - protein, 13 aa, Homo sapiens
  CDR3 for alpha chain variable domain of TCR clone 167833 (TRAV12-2, TRAJ24)
CAVSTDSGGKLQF

SEQ ID NO: 335666 - protein, 15 aa, Homo sapiens
  CDR3 for beta chain variable domain of TCR clone 167833 (TRBV7-2, TRBJ2-2)
CASSPTGANTGELFF

SEQ ID NO: 335667 - protein, 11 aa, Homo sapiens
  CDR3 for alpha chain variable domain of TCR clone 167834 (TRAV3, TRAJ21)
CSVGNFNKFYF

SEQ ID NO: 335668 - protein, 13 aa, Homo sapiens
  CDR3 for beta chain variable domain of TCR clone 167834 (TRBV7-3, TRBJ1-1)
CASSQDWGAEAFF

SEQ ID NO: 335669 - protein, 14 aa, Homo sapiens
  CDR3 for alpha chain variable domain of TCR clone 167835 (TRAV12-2, TRAJ13)
CAVKKTGVYQKVTF

SEQ ID NO: 335670 - protein, 13 aa, Homo sapiens
  CDR3 for beta chain variable domain of TCR clone 167835 (TRBV7-9, TRBJ1-2)
CASSLKQNYGYTF

SEQ ID NO: 335671 - protein, 17 aa, Homo sapiens
  CDR3 for alpha chain variable domain of TCR clone 167836 (TRAV3, TRAJ38)
CAVRDCLNAGNNRKLIW

SEQ ID NO: 335672 - protein, 11 aa, Homo sapiens
  CDR3 for beta chain variable domain of TCR clone 167836 (TRBV29-1, TRBJ2-5)
CSEDRTGTQYF

SEQ ID NO: 335673 - protein, 14 aa, Homo sapiens
  CDR3 for alpha chain variable domain of TCR clone 167837 (TRAV8-2, TRAJ4)
CVVSPSGGYNKLFF

SEQ ID NO: 335674 - protein, 17 aa, Homo sapiens
  CDR3 for beta chain variable domain of TCR clone 167837 (TRBV4-1, TRBJ1-4)
CASSDTGELMKNCFLAV

SEQ ID NO: 335675 - protein, 16 aa, Homo sapiens
  CDR3 for alpha chain variable domain of TCR clone 167838 (TRAV12-3, TRAJ53)
CAMSPGSGGSNYKLTF

SEQ ID NO: 335676 - protein, 14 aa, Homo sapiens
  CDR3 for beta chain variable domain of TCR clone 167838 (TRBV4-1, TRBJ2-7)
CARRPVAGGDEQYF

SEQ ID NO: 335677 - protein, 15 aa, Homo sapiens
  CDR3 for alpha chain variable domain of TCR clone 167839 (TRAV12-3, TRAJ6)
CAMSATTGGSHIPTS

SEQ ID NO: 335678 - protein, 16 aa, Homo sapiens
  CDR3 for beta chain variable domain of TCR clone 167839 (TRBV20-1, TRBJ1-2)
CSASMGQGVANYGYTF

SEQ ID NO: 335679 - protein, 14 aa, Homo sapiens
  CDR3 for alpha chain variable domain of TCR clone 167840 (TRAV9-2, TRAJ38)
CAQNNAGNNRKLIW

SEQ ID NO: 335680 - protein, 14 aa, Homo sapiens
  CDR3 for beta chain variable domain of TCR clone 167840 (TRBV12-4, TRBJ2-2)
CASSFWERDGELFF

SEQ ID NO: 335681 - protein, 16 aa, Homo sapiens
  CDR3 for alpha chain variable domain of TCR clone 167841 (TRAV14/DV4, TRAJ12)
CAMREVLMDSSYKLIF

SEQ ID NO: 335682 - protein, 13 aa, Homo sapiens
  CDR3 for beta chain variable domain of TCR clone 167841 (TRBV18, TRBJ1-1)
CASSGGRNTEAVF

SEQ ID NO: 335683 - protein, 16 aa, Homo sapiens
  CDR3 for alpha chain variable domain of TCR clone 167842 (TRAV4, TRAJ9)
CIVGDPNRPGGFKTIF

SEQ ID NO: 335684 - protein, 16 aa, Homo sapiens
  CDR3 for beta chain variable domain of TCR clone 167842 (TRBV28, TRBJ1-4)
CASSPPYRGRSEKLFF

SEQ ID NO: 335685 - protein, 18 aa, Homo sapiens
  CDR3 for alpha chain variable domain of TCR clone 167843 (TRAV21, TRAJ52)
CAVRPSPAGGTSYGKLTF

SEQ ID NO: 335686 - protein, 15 aa, Homo sapiens
  CDR3 for beta chain variable domain of TCR clone 167843 (TRBV20-1, TRBJ1-5)
CSAFKNGQRNQAQHF

SEQ ID NO: 335687 - protein, 16 aa, Homo sapiens
  CDR3 for alpha chain variable domain of TCR clone 167844 (TRAV12-2, TRAJ10)
CAVSRVLTGGGNKLTF

SEQ ID NO: 335688 - protein, 14 aa, Homo sapiens
  CDR3 for beta chain variable domain of TCR clone 167844 (TRBV9, TRBJ2-1)
CASSVALAVNEQFF

SEQ ID NO: 335689 - protein, 12 aa, Homo sapiens
  CDR3 for alpha chain variable domain of TCR clone 167845 (TRAV21, TRAJ13)
PGPSGGYQKVTF

SEQ ID NO: 335690 - protein, 14 aa, Homo sapiens
  CDR3 for beta chain variable domain of TCR clone 167845 (TRBV20-1, TRBJ2-7)
CSAKDRTGAYEQYF

SEQ ID NO: 335691 - protein, 13 aa, Homo sapiens
  CDR3 for alpha chain variable domain of TCR clone 167846 (TRAV12-2, TRAJ48)
CAAPNFGNEKLTF

SEQ ID NO: 335692 - protein, 13 aa, Homo sapiens
  CDR3 for beta chain variable domain of TCR clone 167846 (TRBV7-2, TRBJ2-5)
CASSQTSVETQYF

SEQ ID NO: 335693 - protein, 17 aa, Homo sapiens
  CDR3 for alpha chain variable domain of TCR clone 167847 (TRAV8-3, TRAJ34)
CAIPGKLIFGTGTSLQV

SEQ ID NO: 335694 - protein, 12 aa, Homo sapiens
  CDR3 for beta chain variable domain of TCR clone 167847 (TRBV5-1, TRBJ2-3)
CASSLAADTQYF

SEQ ID NO: 335695 - protein, 15 aa, Homo sapiens
  CDR3 for alpha chain variable domain of TCR clone 167848 (TRAV1-2, TRAJ15)
CAVDVMGSAGTALIF

SEQ ID NO: 335696 - protein, 12 aa, Homo sapiens
  CDR3 for beta chain variable domain of TCR clone 167848 (TRBV11-2, TRBJ2-2)
CASSLGGGELFF

SEQ ID NO: 335697 - protein, 16 aa, Homo sapiens
  CDR3 for alpha chain variable domain of TCR clone 167849 (TRAV22, TRAJ45)
CAVERGKRGGADGLTF

SEQ ID NO: 335698 - protein, 16 aa, Homo sapiens
  CDR3 for beta chain variable domain of TCR clone 167849 (TRBV7-9, TRBJ1-2)
CASSLGFSSGEDGYTF

SEQ ID NO: 335699 - protein, 17 aa, Homo sapiens
  CDR3 for alpha chain variable domain of TCR clone 167850 (TRAV12-2, TRAJ6)
CAPQGPPMAGGSYIPTF

SEQ ID NO: 335700 - protein, 16 aa, Homo sapiens
  CDR3 for beta chain variable domain of TCR clone 167850 (TRBV19, TRBJ2-2)
CASSTARASNTGELFF

SEQ ID NO: 335701 - protein, 13 aa, Homo sapiens
  CDR3 for alpha chain variable domain of TCR clone 167851 (TRAV2, TRAJ13)
CAVESGGYQKVTF

SEQ ID NO: 335702 - protein, 13 aa, Homo sapiens
  CDR3 for beta chain variable domain of TCR clone 167851 (TRBV28, TRBJ2-5)
CASSLAGGETQYF

SEQ ID NO: 335703 - protein, 15 aa, Homo sapiens
  CDR3 for alpha chain variable domain of TCR clone 167852 (TRAV12-2, TRAJ8)
CAVREENTGFQKLVF

SEQ ID NO: 335704 - protein, 16 aa, Homo sapiens
  CDR3 for beta chain variable domain of TCR clone 167852 (TRBV7-3, TRBJ2-2)
CASSLTRGTLSGELFF

SEQ ID NO: 335705 - protein, 12 aa, Homo sapiens
  CDR3 for alpha chain variable domain of TCR clone 167853 (TRAV3, TRAJ7)
CADLLWAQQTRF

SEQ ID NO: 335706 - protein, 13 aa, Homo sapiens
  CDR3 for beta chain variable domain of TCR clone 167853 (TRBV7-3, TRBJ2-5)
CASSFRGGETQYF

SEQ ID NO: 335707 - protein, 13 aa, Homo sapiens
  CDR3 for alpha chain variable domain of TCR clone 167854 (TRAV2, TRAJ34)
CAVEEDNTDKLIF

SEQ ID NO: 335708 - protein, 16 aa, Homo sapiens
  CDR3 for beta chain variable domain of TCR clone 167854 (TRBV12-4, TRBJ2-5)
CASSWRPSGDLETQYF

SEQ ID NO: 335709 - protein, 13 aa, Homo sapiens
  CDR3 for alpha chain variable domain of TCR clone 167855 (TRAV2, TRAJ15)
CAVASQTGTALIF

SEQ ID NO: 335710 - protein, 14 aa, Homo sapiens
  CDR3 for beta chain variable domain of TCR clone 167855 (TRBV20-1, TRBJ1-1)
CSAQTRIGGTEAFF

SEQ ID NO: 335711 - protein, 11 aa, Homo sapiens
  CDR3 for alpha chain variable domain of TCR clone 167856 (TRAV12-2, TRAJ39)
CAVNNMLTFGG

SEQ ID NO: 335712 - protein, 13 aa, Homo sapiens
  CDR3 for beta chain variable domain of TCR clone 167856 (TRBV20-1, TRBJ2-2)
CSASAAGTGELFF

SEQ ID NO: 335713 - protein, 15 aa, Homo sapiens
  CDR3 for alpha chain variable domain of TCR clone 167857 (TRAV3, TRAJ5)
CAVRDRKTGRRALTF

SEQ ID NO: 335714 - protein, 15 aa, Homo sapiens
  CDR3 for beta chain variable domain of TCR clone 167857 (TRBV7-8, TRBJ2-1)
CASSLAVSLYNEQFF

SEQ ID NO: 335715 - protein, 15 aa, Homo sapiens
  CDR3 for alpha chain variable domain of TCR clone 167858 (TRAV12-2, TRAJ22)
CAVNGASGSARQLNF

SEQ ID NO: 335716 - protein, 15 aa, Homo sapiens
  CDR3 for beta chain variable domain of TCR clone 167858 (TRBV18, TRBJ2-2)
CASSPPVGFTGELFF

SEQ ID NO: 335717 - protein, 12 aa, Homo sapiens
  CDR3 for alpha chain variable domain of TCR clone 167859 (TRAV16, TRAJ26)
CVLRSYGQNFVF

SEQ ID NO: 335718 - protein, 17 aa, Homo sapiens
  CDR3 for beta chain variable domain of TCR clone 167859 (TRBV11-2, TRBJ2-1)
CASSLYPPGVEYNEQFF

SEQ ID NO: 335719 - protein, 14 aa, Homo sapiens
  CDR3 for alpha chain variable domain of TCR clone 167860 (TRAV1-2, TRAJ6)
CAVSLSGGSYIPTF

SEQ ID NO: 335720 - protein, 16 aa, Homo sapiens
  CDR3 for beta chain variable domain of TCR clone 167860 (TRBV7-3, TRBJ2-2)
CASSLKRGTLSGELFF

SEQ ID NO: 335721 - protein, 15 aa, Homo sapiens
  CDR3 for alpha chain variable domain of TCR clone 167861 (TRAV27, TRAJ38)
CSARRNAGNNRKLIW

SEQ ID NO: 335722 - protein, 14 aa, Homo sapiens
  CDR3 for beta chain variable domain of TCR clone 167861 (TRBV19, TRBJ2-1)
CASPTFVLSGEQFF

SEQ ID NO: 335723 - protein, 18 aa, Homo sapiens
  CDR3 for alpha chain variable domain of TCR clone 167862 (TRAV21, TRAJ52)
CAVRPSPAGGTRYGKLTF

SEQ ID NO: 335724 - protein, 13 aa, Homo sapiens
  CDR3 for beta chain variable domain of TCR clone 167862 (TRBV10-3, TRBJ2-1)
CAISEFSGREQFF

SEQ ID NO: 335725 - protein, 17 aa, Homo sapiens
  CDR3 for alpha chain variable domain of TCR clone 167863 (TRAV3, TRAJ6)
CAVRDGPRAGGSYIPTF

SEQ ID NO: 335726 - protein, 14 aa, Homo sapiens
  CDR3 for beta chain variable domain of TCR clone 167863 (TRBV7-2, TRBJ2-7)
CASSTKPSFYEQYF

SEQ ID NO: 335727 - protein, 14 aa, Homo sapiens
  CDR3 for alpha chain variable domain of TCR clone 167864 (TRAV35, TRAJ22)
CAGLRPGSARQLTL

SEQ ID NO: 335728 - protein, 15 aa, Homo sapiens
  CDR3 for beta chain variable domain of TCR clone 167864 (TRBV12-4, TRBJ2-5)
CAGSPPTGLQETQYF

SEQ ID NO: 335729 - protein, 14 aa, Homo sapiens
  CDR3 for alpha chain variable domain of TCR clone 167865 (TRAV12-2, TRAJ40)
CAVKIPSGTYKYSF

SEQ ID NO: 335730 - protein, 17 aa, Homo sapiens
  CDR3 for beta chain variable domain of TCR clone 167865 (TRBV7-8, TRBJ2-6)
CASSAGTGGAGANVLTF

SEQ ID NO: 335731 - protein, 13 aa, Homo sapiens
  CDR3 for alpha chain variable domain of TCR clone 167866 (TRAV13-1, TRAJ27)
CAASTHQCRQINL

SEQ ID NO: 335732 - protein, 16 aa, Homo sapiens
  CDR3 for beta chain variable domain of TCR clone 167866 (TRBV27, TRBJ2-2)
CASSFRGRVRTGELFF

SEQ ID NO: 335733 - protein, 15 aa, Homo sapiens
  CDR3 for alpha chain variable domain of TCR clone 167867 (TRAV3, TRAJ3)
CAVRDGHISASKIIF

SEQ ID NO: 335734 - protein, 17 aa, Homo sapiens
  CDR3 for beta chain variable domain of TCR clone 167867 (TRBV25-1, TRBJ2-7)
CASSDARVVFSSYEQYF

SEQ ID NO: 335735 - protein, 16 aa, Homo sapiens
  CDR3 for alpha chain variable domain of TCR clone 167868 (TRAV3, TRAJ37)
CAVRPHGSGNTGKLIF

SEQ ID NO: 335736 - protein, 14 aa, Homo sapiens
  CDR3 for beta chain variable domain of TCR clone 167868 (TRBV27, TRBJ2-7)
CASSLAGLSYEQYF

SEQ ID NO: 335737 - protein, 12 aa, Homo sapiens
  CDR3 for alpha chain variable domain of TCR clone 167869 (TRAV13-1, TRAJ21)
CAAKEGFNKFYF

SEQ ID NO: 335738 - protein, 13 aa, Homo sapiens
  CDR3 for beta chain variable domain of TCR clone 167869 (TRBV7-3, TRBJ1-1)
GASSQDWGAEAFF

SEQ ID NO: 335739 - protein, 14 aa, Homo sapiens
  CDR3 for alpha chain variable domain of TCR clone 167870 (TRAV12-3, TRAJ47)
CAMSVREYGNKLVF

SEQ ID NO: 335740 - protein, 15 aa, Homo sapiens
  CDR3 for beta chain variable domain of TCR clone 167870 (TRBV20-1, TRBJ2-2)
CSARDTRLNTGELSF

SEQ ID NO: 335741 - protein, 15 aa, Homo sapiens
  CDR3 for alpha chain variable domain of TCR clone 167871 (TRAV13-1, TRAJ8)
CAASITNTGFQKLVF

SEQ ID NO: 335742 - protein, 13 aa, Homo sapiens
  CDR3 for beta chain variable domain of TCR clone 167871 (TRBV5-4, TRBJ1-1)
CASSFQVNTEAFF

SEQ ID NO: 335743 - protein, 13 aa, Homo sapiens
  CDR3 for alpha chain variable domain of TCR clone 167872 (TRAV13-1, TRAJ39)
CSKYSNAGNMLTF

SEQ ID NO: 335744 - protein, 13 aa, Homo sapiens
  CDR3 for beta chain variable domain of TCR clone 167872 (TRBV7-3, TRBJ1-2)
CASSLKRGYGYTF

SEQ ID NO: 335745 - protein, 13 aa, Homo sapiens
  CDR3 for alpha chain variable domain of TCR clone 167873 (TRAV12-3, TRAJ9)
CAMSADGGFKTIF

SEQ ID NO: 335746 - protein, 14 aa, Homo sapiens
  CDR3 for beta chain variable domain of TCR clone 167873 (TRBV19, TRBJ2-5)
CASSMTGQQETQYF

SEQ ID NO: 335747 - protein, 16 aa, Homo sapiens
  CDR3 for alpha chain variable domain of TCR clone 167874 (TRAV30, TRAJ24)
CGTESVDADSWGKFQL

SEQ ID NO: 335748 - protein, 14 aa, Homo sapiens
  CDR3 for beta chain variable domain of TCR clone 167874 (TRBV12-5, TRBJ2-5)
CASGSRTHQETQYF

SEQ ID NO: 335749 - protein, 11 aa, Homo sapiens
  CDR3 for alpha chain variable domain of TCR clone 167875 (TRAV8-2, TRAJ26)
CVVTLLVGSEF

SEQ ID NO: 335750 - protein, 15 aa, Homo sapiens
  CDR3 for beta chain variable domain of TCR clone 167875 (TRBV11-2, TRBJ2-2)
CASSSDRVNAGELFF

SEQ ID NO: 335751 - protein, 12 aa, Homo sapiens
  CDR3 for alpha chain variable domain of TCR clone 167876 (TRAV13-1, TRAJ21)
CAAKEGFNKFYF

SEQ ID NO: 335752 - protein, 14 aa, Homo sapiens
  CDR3 for beta chain variable domain of TCR clone 167876 (TRBV18, TRBJ1-2)
RVAIFLCANYGYTF

SEQ ID NO: 335753 - protein, 11 aa, Homo sapiens
  CDR3 for alpha chain variable domain of TCR clone 167877 (TRAV2, TRAJ13)
CASGGYQKVTF

SEQ ID NO: 335754 - protein, 17 aa, Homo sapiens
  CDR3 for beta chain variable domain of TCR clone 167877 (TRBV20-1, TRBJ1-5)
CSASLSPGQGGNQPQHF

SEQ ID NO: 335755 - protein, 13 aa, Homo sapiens
  CDR3 for alpha chain variable domain of TCR clone 167878 (TRAV29/DV5, TRAJ29)
CEASAAGNTPLVF

SEQ ID NO: 335756 - protein, 14 aa, Homo sapiens
  CDR3 for beta chain variable domain of TCR clone 167878 (TRBV19, TRBJ2-3)
CASSAPRGTDTQYF

SEQ ID NO: 335757 - protein, 16 aa, Homo sapiens
  CDR3 for alpha chain variable domain of TCR clone 167879 (TRAV26-2, TRAJ48)
CILRPPFHFRNEKLTF

SEQ ID NO: 335758 - protein, 15 aa, Homo sapiens
  CDR3 for beta chain variable domain of TCR clone 167879 (TRBV20-1, TRBJ2-3)
CSARVEGTYTDTQYF

SEQ ID NO: 335759 - protein, 17 aa, Homo sapiens
  CDR3 for alpha chain variable domain of TCR clone 167880 (TRAV13-1, TRAJ28)
CAASPPYSGAGSYQLTF

SEQ ID NO: 335760 - protein, 15 aa, Homo sapiens
  CDR3 for beta chain variable domain of TCR clone 167880 (TRBV18, TRBJ2-1)
CASSPPSASYNEQFF

SEQ ID NO: 335761 - protein, 14 aa, Homo sapiens
  CDR3 for alpha chain variable domain of TCR clone 167881 (TRAV13-1, TRAJ3)
CAASKSSSASKIFF

SEQ ID NO: 335762 - protein, 13 aa, Homo sapiens
  CDR3 for beta chain variable domain of TCR clone 167881 (TRBV25-1, TRBJ2-5)
CASSESGRETQYF

SEQ ID NO: 335763 - protein, 12 aa, Homo sapiens
  CDR3 for alpha chain variable domain of TCR clone 167882 (TRAV8-4, TRAJ31)
CAVSDSNARLMF

SEQ ID NO: 335764 - protein, 15 aa, Homo sapiens
  CDR3 for beta chain variable domain of TCR clone 167882 (TRBV9, TRBJ2-1)
CASSLAGSSYNEQFF

SEQ ID NO: 335765 - protein, 13 aa, Homo sapiens
  CDR3 for alpha chain variable domain of TCR clone 167883 (TRAV23/DV6, TRAJ27)
CGASKPMQANQPL

SEQ ID NO: 335766 - protein, 14 aa, Homo sapiens
  CDR3 for beta chain variable domain of TCR clone 167883 (TRBV5-4, TRBJ1-1)
CASSLDSRRDEAFF

SEQ ID NO: 335767 - protein, 12 aa, Homo sapiens
  CDR3 for alpha chain variable domain of TCR clone 167884 (TRAV10, TRAJ43)
CVVVGVGNDMRF

SEQ ID NO: 335768 - protein, 15 aa, Homo sapiens
  CDR3 for beta chain variable domain of TCR clone 167884 (TRBV2, TRBJ2-7)
CASSEGLARSYEQYF

SEQ ID NO: 335769 - protein, 11 aa, Homo sapiens
  CDR3 for alpha chain variable domain of TCR clone 167885 (TRAV17, TRAJ9)
CGFTGGFKTIF

SEQ ID NO: 335770 - protein, 15 aa, Homo sapiens
  CDR3 for beta chain variable domain of TCR clone 167885 (TRBV5-1, TRBJ2-3)
CASSVTSGSTDTQYF

SEQ ID NO: 335771 - protein, 14 aa, Homo sapiens
  CDR3 for alpha chain variable domain of TCR clone 167886 (TRAV12-2, TRAJ6)
CASKRGGGSYIPTL

SEQ ID NO: 335772 - protein, 13 aa, Homo sapiens
  CDR3 for beta chain variable domain of TCR clone 167886 (TRBV2, TRBJ1-1)
CASSEGGNTEAFF

SEQ ID NO: 335773 - protein, 12 aa, Homo sapiens
  CDR3 for alpha chain variable domain of TCR clone 167887 (TRAV13-1, TRAJ42)
VNYGGSQGNLIF

SEQ ID NO: 335774 - protein, 12 aa, Homo sapiens
  CDR3 for beta chain variable domain of TCR clone 167887 (TRBV7-9, TRBJ1-5)
RASSSDQAPQHF

SEQ ID NO: 335775 - protein, 10 aa, Homo sapiens
  CDR3 for alpha chain variable domain of TCR clone 167888 (TRAV23/DV6, TRAJ57)
CAASSTLSQG

SEQ ID NO: 335776 - protein, 13 aa, Homo sapiens
  CDR3 for beta chain variable domain of TCR clone 167888 (TRBV24-1, TRBJ2-1)
CATSAGPYNEQFF

SEQ ID NO: 335777 - protein, 12 aa, Homo sapiens
  CDR3 for alpha chain variable domain of TCR clone 167889 (TRAV20, TRAJ33)
CAVRGSNYQLIW

SEQ ID NO: 335778 - protein, 13 aa, Homo sapiens
  CDR3 for beta chain variable domain of TCR clone 167889 (TRBV4-3, TRBJ1-1)
CASSPTGNTDAFF

SEQ ID NO: 335779 - protein, 14 aa, Homo sapiens
  CDR3 for alpha chain variable domain of TCR clone 167890 (TRAV13-2, TRAJ39)
CAENKNNAGNMLTF

SEQ ID NO: 335780 - protein, 16 aa, Homo sapiens
  CDR3 for beta chain variable domain of TCR clone 167890 (TRBV2, TRBJ2-1)
CASSVGGSLSYNEQFF

SEQ ID NO: 335781 - protein, 18 aa, Homo sapiens
  CDR3 for alpha chain variable domain of TCR clone 167891 (TRAV26-1, TRAJ30)
CCVLLHRQSTNRDEKIIF

SEQ ID NO: 335782 - protein, 18 aa, Homo sapiens
  CDR3 for beta chain variable domain of TCR clone 167891 (TRBV4-1, TRBJ1-5)
CASSQDPRGQGLNQPQHF

SEQ ID NO: 335783 - protein, 14 aa, Homo sapiens
  CDR3 for alpha chain variable domain of TCR clone 167892 (TRAV12-2, TRAJ13)
CAVKKTGGYQKVTF

SEQ ID NO: 335784 - protein, 18 aa, Homo sapiens
  CDR3 for beta chain variable domain of TCR clone 167892 (TRBV27, TRBJ2-1)
CTSVPAVNGGGSSNEQFF

SEQ ID NO: 335785 - protein, 19 aa, Homo sapiens
  CDR3 for alpha chain variable domain of TCR clone 167893 (TRAV26-1, TRAJ52)
CIVRAHRNAGGTSYGKLTF

SEQ ID NO: 335786 - protein, 18 aa, Homo sapiens
  CDR3 for beta chain variable domain of TCR clone 167893 (TRBV7-2, TRBJ2-7)
CASSLPGRGLAGGYEQYF

SEQ ID NO: 335787 - protein, 15 aa, Homo sapiens
  CDR3 for alpha chain variable domain of TCR clone 167894 (TRAV8-2, TRAJ40)
CVVLGTTSGNYKYIF

SEQ ID NO: 335788 - protein, 16 aa, Homo sapiens
  CDR3 for beta chain variable domain of TCR clone 167894 (TRBV7-3, TRBJ2-1)
CASSLEGYRSYNEQFL

SEQ ID NO: 335789 - protein, 17 aa, Homo sapiens
  CDR3 for alpha chain variable domain of TCR clone 167895 (TRAV3, TRAJ6)
CAVRDGPRAGGSYIPSF

SEQ ID NO: 335790 - protein, 15 aa, Homo sapiens
  CDR3 for beta chain variable domain of TCR clone 167895 (TRBV20-1, TRBJ1-1)
CSASWDRFLNTEAFF

SEQ ID NO: 335791 - protein, 12 aa, Homo sapiens
  CDR3 for alpha chain variable domain of TCR clone 167896 (TRAV27, TRAJ54)
CAGDEGAQKLVF

SEQ ID NO: 335792 - protein, 13 aa, Homo sapiens
  CDR3 for beta chain variable domain of TCR clone 167896 (TRBV10-2, TRBJ2-3)
CASSESGDHTQYF

SEQ ID NO: 335793 - protein, 14 aa, Homo sapiens
  CDR3 for alpha chain variable domain of TCR clone 167897 (TRAV12-2, TRAJ44)
CAVNPAGTASKLTF

SEQ ID NO: 335794 - protein, 16 aa, Homo sapiens
  CDR3 for beta chain variable domain of TCR clone 167897 (TRBV2, TRBJ2-1)
CASSVGGSLAYNEQFF

SEQ ID NO: 335795 - protein, 13 aa, Homo sapiens
  CDR3 for alpha chain variable domain of TCR clone 167898 (TRAV2, TRAJ40)
CAVVTSGTYKYIF

SEQ ID NO: 335796 - protein, 13 aa, Homo sapiens
  CDR3 for beta chain variable domain of TCR clone 167898 (TRBV11-3, TRBJ2-3)
CANSHDTKDTQYF

SEQ ID NO: 335797 - protein, 12 aa, Homo sapiens
  CDR3 for alpha chain variable domain of TCR clone 167899 (TRAV36/DV7, TRAJ30)
CAASNRDDKIIF

SEQ ID NO: 335798 - protein, 16 aa, Homo sapiens
  CDR3 for beta chain variable domain of TCR clone 167899 (TRBV28, TRBJ2-7)
CASSPWVATGDLSQYF

SEQ ID NO: 335799 - protein, 18 aa, Homo sapiens
  CDR3 for alpha chain variable domain of TCR clone 167900 (TRAV29/DV5, TRAJ52)
CAAGFRGAGGTSHGKLTF

SEQ ID NO: 335800 - protein, 16 aa, Homo sapiens
  CDR3 for beta chain variable domain of TCR clone 167900 (TRBV7-3, TRBJ2-2)
CASSLKRGTVSGELFF

SEQ ID NO: 335801 - protein, 14 aa, Homo sapiens
  CDR3 for alpha chain variable domain of TCR clone 167901 (TRAV17, TRAJ15)
CATDAWQAGTALIF

SEQ ID NO: 335802 - protein, 14 aa, Homo sapiens
  CDR3 for beta chain variable domain of TCR clone 167901 (TRBV7-2, TRBJ2-2)
CASRGQGAAGELFF

SEQ ID NO: 335803 - protein, 13 aa, Homo sapiens
  CDR3 for alpha chain variable domain of TCR clone 167902 (TRAV2, TRAJ43)
TTVLKRGNNDMRF

SEQ ID NO: 335804 - protein, 13 aa, Homo sapiens
  CDR3 for beta chain variable domain of TCR clone 167902 (TRBV19, TRBJ1-2)
CASSVPGQDGYTF

SEQ ID NO: 335805 - protein, 12 aa, Homo sapiens
  CDR3 for alpha chain variable domain of TCR clone 167903 (TRAV8-3, TRAJ45)
CASSYSEEVLTD

SEQ ID NO: 335806 - protein, 15 aa, Homo sapiens
  CDR3 for beta chain variable domain of TCR clone 167903 (TRBV27, TRBJ2-1)
CASSNGGGSSNEQFF

SEQ ID NO: 335807 - protein, 14 aa, Homo sapiens
  CDR3 for alpha chain variable domain of TCR clone 167904 (TRAV1-2, TRAJ8)
CSVREDTGFQKLVF

SEQ ID NO: 335808 - protein, 15 aa, Homo sapiens
  CDR3 for beta chain variable domain of TCR clone 167904 (TRBV29-1, TRBJ2-1)
CSVPTGLALYNEQFF

SEQ ID NO: 335809 - protein, 15 aa, Homo sapiens
  CDR3 for alpha chain variable domain of TCR clone 167905 (TRAV1-2, TRAJ26)
CALRDLITMVRILSF

SEQ ID NO: 335810 - protein, 11 aa, Homo sapiens
  CDR3 for beta chain variable domain of TCR clone 167905 (TRBV12-4, TRBJ2-3)
CASTATDTQYF

SEQ ID NO: 335811 - protein, 13 aa, Homo sapiens
  CDR3 for alpha chain variable domain of TCR clone 167906 (TRAV1-2, TRAJ9)
RAALNTGGFKTIF

SEQ ID NO: 335812 - protein, 13 aa, Homo sapiens
  CDR3 for beta chain variable domain of TCR clone 167906 (TRBV7-9, TRBJ1-2)
CASSLKQNYGYTF

SEQ ID NO: 335813 - protein, 14 aa, Homo sapiens
  CDR3 for alpha chain variable domain of TCR clone 167907 (TRAV26-1, TRAJ38)
CIADNAGNNRKLIW

SEQ ID NO: 335814 - protein, 14 aa, Homo sapiens
  CDR3 for beta chain variable domain of TCR clone 167907 (TRBV13, TRBJ2-7)
CASSLKGASYEQYF

SEQ ID NO: 335815 - protein, 15 aa, Homo sapiens
  CDR3 for alpha chain variable domain of TCR clone 167908 (TRAV23/DV6, TRAJ53)
CAASFGGGSNYKLTF

SEQ ID NO: 335816 - protein, 12 aa, Homo sapiens
  CDR3 for beta chain variable domain of TCR clone 167908 (TRBV11-2, TRBJ2-2)
CASSLGGGELFF

SEQ ID NO: 335817 - protein, 14 aa, Homo sapiens
  CDR3 for alpha chain variable domain of TCR clone 167909 (TRAV35, TRAJ38)
CAGSNAGNNRKLIW

SEQ ID NO: 335818 - protein, 13 aa, Homo sapiens
  CDR3 for beta chain variable domain of TCR clone 167909 (TRBV10-3, TRBJ2-7)
CASKLAVNYEQYF

SEQ ID NO: 335819 - protein, 17 aa, Homo sapiens
  CDR3 for alpha chain variable domain of TCR clone 167910 (TRAV12-1, TRAJ42)
CVVMRMNYGGSQGKLIF

SEQ ID NO: 335820 - protein, 13 aa, Homo sapiens
  CDR3 for beta chain variable domain of TCR clone 167910 (TRBV7-2, TRBJ1-1)
CASSLARPAEAFF

SEQ ID NO: 335821 - protein, 16 aa, Homo sapiens
  CDR3 for alpha chain variable domain of TCR clone 167911 (TRAV30, TRAJ24)
CGTEIVDADSWGKFQF

SEQ ID NO: 335822 - protein, 14 aa, Homo sapiens
  CDR3 for beta chain variable domain of TCR clone 167911 (TRBV7-2, TRBJ1-2)
FASSQTGSTYGYTF

SEQ ID NO: 335823 - protein, 13 aa, Homo sapiens
  CDR3 for alpha chain variable domain of TCR clone 167912 (TRAV27, TRAJ39)
CAGVNNAGNMLTF

SEQ ID NO: 335824 - protein, 12 aa, Homo sapiens
  CDR3 for beta chain variable domain of TCR clone 167912 (TRBV11-2, TRBJ2-2)
CASSLGGGELFF

SEQ ID NO: 335825 - protein, 16 aa, Homo sapiens
  CDR3 for alpha chain variable domain of TCR clone 167913 (TRAV12-1, TRAJ43)
CVVNPHRFGAGTRLTV

SEQ ID NO: 335826 - protein, 15 aa, Homo sapiens
  CDR3 for beta chain variable domain of TCR clone 167913 (TRBV20-1, TRBJ1-1)
CSARGGGTLKLSLDK

SEQ ID NO: 335827 - protein, 14 aa, Homo sapiens
  CDR3 for alpha chain variable domain of TCR clone 167914 (TRAV38-1, TRAJ29)
CAFITPSGNTPLVF

SEQ ID NO: 335828 - protein, 12 aa, Homo sapiens
  CDR3 for beta chain variable domain of TCR clone 167914 (TRBV6-4, TRBJ2-7)
LSTSANSYEQYF

SEQ ID NO: 335829 - protein, 17 aa, Homo sapiens
  CDR3 for alpha chain variable domain of TCR clone 167915 (TRAV3, TRAJ12)
CAVRDGGRMDSSYKLIF

SEQ ID NO: 335830 - protein, 13 aa, Homo sapiens
  CDR3 for beta chain variable domain of TCR clone 167915 (TRBV20-1, TRBJ1-1)
CSARGGGNTEAFF

SEQ ID NO: 335831 - protein, 15 aa, Homo sapiens
  CDR3 for alpha chain variable domain of TCR clone 167916 (TRAV8-4, TRAJ29)
CAVSEDFRGNTPLVF

SEQ ID NO: 335832 - protein, 12 aa, Homo sapiens
  CDR3 for beta chain variable domain of TCR clone 167916 (TRBV14, TRBJ2-7)
RASSSLKGEQYF

SEQ ID NO: 335833 - protein, 13 aa, Homo sapiens
  CDR3 for alpha chain variable domain of TCR clone 167917 (TRAV27, TRAJ29)
CAGAHSGNTPLVF

SEQ ID NO: 335834 - protein, 16 aa, Homo sapiens
  CDR3 for beta chain variable domain of TCR clone 167917 (TRBV7-2, TRBJ2-1)
CASSLLAQLFSKGQFF

SEQ ID NO: 335835 - protein, 13 aa, Homo sapiens
  CDR3 for alpha chain variable domain of TCR clone 167918 (TRAV17, TRAJ9)
CATAYTGGFKTIF

SEQ ID NO: 335836 - protein, 14 aa, Homo sapiens
  CDR3 for beta chain variable domain of TCR clone 167918 (TRBV19, TRBJ2-1)
CASPTFVLSGEQFF

SEQ ID NO: 335837 - protein, 10 aa, Homo sapiens
  CDR3 for alpha chain variable domain of TCR clone 167919 (TRAV26-1, TRAJ22)
CIAGSRQLTF

SEQ ID NO: 335838 - protein, 17 aa, Homo sapiens
  CDR3 for beta chain variable domain of TCR clone 167919 (TRBV5-4, TRBJ1-1)
CASFPPKGRLHNTEAFF

SEQ ID NO: 335839 - protein, 11 aa, Homo sapiens
  CDR3 for alpha chain variable domain of TCR clone 167920 (TRAV21, TRAJ31)
CAVRNNARLMF

SEQ ID NO: 335840 - protein, 16 aa, Homo sapiens
  CDR3 for beta chain variable domain of TCR clone 167920 (TRBV5-1, TRBJ2-2)
CASSSRTGGRTGELFF

SEQ ID NO: 335841 - protein, 15 aa, Homo sapiens
  CDR3 for alpha chain variable domain of TCR clone 167921 (TRAV12-1, TRAJ44)
WVADLPTGTASKLTF

SEQ ID NO: 335842 - protein, 13 aa, Homo sapiens
  CDR3 for beta chain variable domain of TCR clone 167921 (TRBV6-5, TRBJ2-5)
CASSPQGGETQYF

SEQ ID NO: 335843 - protein, 12 aa, Homo sapiens
  CDR3 for alpha chain variable domain of TCR clone 167922 (TRAV12-3, TRAJ17)
CAMTLTGNKLTF

SEQ ID NO: 335844 - protein, 15 aa, Homo sapiens
  CDR3 for beta chain variable domain of TCR clone 167922 (TRBV20-1, TRBJ2-7)
CSARDRFSGMDERYF

SEQ ID NO: 335845 - protein, 14 aa, Homo sapiens
  CDR3 for alpha chain variable domain of TCR clone 167923 (TRAV20, TRAJ42)
CAVQARGSQGNLIF

SEQ ID NO: 335846 - protein, 13 aa, Homo sapiens
  CDR3 for beta chain variable domain of TCR clone 167923 (TRBV10-3, TRBJ2-7)
CASKLAVNYEQYF

SEQ ID NO: 335847 - protein, 14 aa, Homo sapiens
  CDR3 for alpha chain variable domain of TCR clone 167924 (TRAV3, TRAJ9)
CAVRDDTGGFKPIF

SEQ ID NO: 335848 - protein, 18 aa, Homo sapiens
  CDR3 for beta chain variable domain of TCR clone 167924 (TRBV20-1, TRBJ2-6)
CSAETTPTHGSGANVLTF

SEQ ID NO: 335849 - protein, 13 aa, Homo sapiens
  CDR3 for alpha chain variable domain of TCR clone 167925 (TRAV3, TRAJ43)
FAVRDTRGGDMRF

SEQ ID NO: 335850 - protein, 15 aa, Homo sapiens
  CDR3 for beta chain variable domain of TCR clone 167925 (TRBV6-5, TRBJ1-5)
CASSYSRRSNQPQHF

SEQ ID NO: 335851 - protein, 10 aa, Homo sapiens
  CDR3 for alpha chain variable domain of TCR clone 167926 (TRAV12-1, TRAJ33)
CVASNYHLIW

SEQ ID NO: 335852 - protein, 15 aa, Homo sapiens
  CDR3 for beta chain variable domain of TCR clone 167926 (TRBV5-4, TRBJ1-4)
CASSHGDGENEKLFF

SEQ ID NO: 335853 - protein, 12 aa, Homo sapiens
  CDR3 for alpha chain variable domain of TCR clone 167927 (TRAV13-1, TRAJ42)
VNYGGSHGNLIF

SEQ ID NO: 335854 - protein, 15 aa, Homo sapiens
  CDR3 for beta chain variable domain of TCR clone 167927 (TRBV20-1, TRBJ2-1)
CSASSAGSSYNEQFF

SEQ ID NO: 335855 - protein, 14 aa, Homo sapiens
  CDR3 for alpha chain variable domain of TCR clone 167928 (TRAV1-2, TRAJ16)
CAVNRVSDVQKLLF

SEQ ID NO: 335856 - protein, 13 aa, Homo sapiens
  CDR3 for beta chain variable domain of TCR clone 167928 (TRBV25-1, TRBJ1-1)
CQHPPGGNTEAFF

SEQ ID NO: 335857 - protein, 14 aa, Homo sapiens
  CDR3 for alpha chain variable domain of TCR clone 167929 (TRAV8-2, TRAJ4)
CVVSPSGGYNKLIF

SEQ ID NO: 335858 - protein, 15 aa, Homo sapiens
  CDR3 for beta chain variable domain of TCR clone 167929 (TRBV7-3, TRBJ2-1)
CASSPTGGGEVEQFF

SEQ ID NO: 335859 - protein, 15 aa, Homo sapiens
  CDR3 for alpha chain variable domain of TCR clone 167930 (TRAV4, TRAJ39)
FLVGPNNNAGNMPTF

SEQ ID NO: 335860 - protein, 13 aa, Homo sapiens
  CDR3 for beta chain variable domain of TCR clone 167930 (TRBV11-2, TRBJ2-5)
SASSSTGEETQYF

SEQ ID NO: 335861 - protein, 13 aa, Homo sapiens
  CDR3 for alpha chain variable domain of TCR clone 167931 (TRAV21, TRAJ20)
CAVGLRVDYKLSF

SEQ ID NO: 335862 - protein, 16 aa, Homo sapiens
  CDR3 for beta chain variable domain of TCR clone 167931 (TRBV4-1, TRBJ2-7)
CASSQEWTSGPIEQYF

SEQ ID NO: 335863 - protein, 14 aa, Homo sapiens
  CDR3 for alpha chain variable domain of TCR clone 167932 (TRAV8-4, TRAJ22)
CAVSPQGSARQLTF

SEQ ID NO: 335864 - protein, 15 aa, Homo sapiens
  CDR3 for beta chain variable domain of TCR clone 167932 (TRBV19, TRBJ2-2)
CASRGPGANTGELFF

SEQ ID NO: 335865 - protein, 18 aa, Homo sapiens
  CDR3 for alpha chain variable domain of TCR clone 167933 (TRAV21, TRAJ52)
RAVRPSPAGGTSYGKLTF

SEQ ID NO: 335866 - protein, 17 aa, Homo sapiens
  CDR3 for beta chain variable domain of TCR clone 167933 (TRBV13, TRBJ2-3)
CASSRSRVAGGRNTQYF

SEQ ID NO: 335867 - protein, 14 aa, Homo sapiens
  CDR3 for alpha chain variable domain of TCR clone 167934 (TRAV26-1, TRAJ21)
CIAHTTSTNFTLNL

SEQ ID NO: 335868 - protein, 15 aa, Homo sapiens
  CDR3 for beta chain variable domain of TCR clone 167934 (TRBV20-1, TRBJ2-7)
CSARDRVSVMDEQYF

SEQ ID NO: 335869 - protein, 13 aa, Homo sapiens
  CDR3 for alpha chain variable domain of TCR clone 167935 (TRAV12-3, TRAJ33)
CAMSVNSNYQLIW

SEQ ID NO: 335870 - protein, 13 aa, Homo sapiens
  CDR3 for beta chain variable domain of TCR clone 167935 (TRBV10-3, TRBJ1-2)
CAISERDSYGYTF

SEQ ID NO: 335871 - protein, 14 aa, Homo sapiens
  CDR3 for alpha chain variable domain of TCR clone 167936 (TRAV1-2, TRAJ16)
CAVNRFSDVQKLLF

SEQ ID NO: 335872 - protein, 13 aa, Homo sapiens
  CDR3 for beta chain variable domain of TCR clone 167936 (TRBV4-2, TRBJ1-1)
CASSQAGNTEAFF

SEQ ID NO: 335873 - protein, 18 aa, Homo sapiens
  CDR3 for alpha chain variable domain of TCR clone 167937 (TRAV26-2, TRAJ17)
CCVLLHPAIKAAGNKLTL

SEQ ID NO: 335874 - protein, 12 aa, Homo sapiens
  CDR3 for beta chain variable domain of TCR clone 167937 (TRBV29-1, TRBJ2-7)
CSARDRPYEQYF

SEQ ID NO: 335875 - protein, 15 aa, Homo sapiens
  CDR3 for alpha chain variable domain of TCR clone 167938 (TRAV26-1, TRAJ34)
CIVETQLAYTDKLIF

SEQ ID NO: 335876 - protein, 13 aa, Homo sapiens
  CDR3 for beta chain variable domain of TCR clone 167938 (TRBV20-1, TRBJ2-5)
CSAPTSGRETQYF

SEQ ID NO: 335877 - protein, 13 aa, Homo sapiens
  CDR3 for alpha chain variable domain of TCR clone 167939 (TRAV13-1, TRAJ10)
CAALEGGGNTLTF

SEQ ID NO: 335878 - protein, 17 aa, Homo sapiens
  CDR3 for beta chain variable domain of TCR clone 167939 (TRBV7-3, TRBJ2-2)
CASSLSGTSGGTGELFF

SEQ ID NO: 335879 - protein, 12 aa, Homo sapiens
  CDR3 for alpha chain variable domain of TCR clone 167940 (TRAV6, TRAJ9)
CALVTGGFQTIF

SEQ ID NO: 335880 - protein, 16 aa, Homo sapiens
  CDR3 for beta chain variable domain of TCR clone 167940 (TRBV7-3, TRBJ2-2)
GGTQPCIQWNTGELFF

SEQ ID NO: 335881 - protein, 15 aa, Homo sapiens
  CDR3 for alpha chain variable domain of TCR clone 167941 (TRAV12-3, TRAJ6)
CAMSAASGGSYIPTF

SEQ ID NO: 335882 - protein, 13 aa, Homo sapiens
  CDR3 for beta chain variable domain of TCR clone 167941 (TRBV20-1, TRBJ1-2)
FSASTERIYGYTF

SEQ ID NO: 335883 - protein, 12 aa, Homo sapiens
  CDR3 for alpha chain variable domain of TCR clone 167942 (TRAV12-2, TRAJ52)
IGGGTSYGKLTF

SEQ ID NO: 335884 - protein, 12 aa, Homo sapiens
  CDR3 for beta chain variable domain of TCR clone 167942 (TRBV11-2, TRBJ2-2)
CASSLGGGELFF

SEQ ID NO: 335885 - protein, 13 aa, Homo sapiens
  CDR3 for alpha chain variable domain of TCR clone 167943 (TRAV21, TRAJ27)
CAARPGNAGKSTF

SEQ ID NO: 335886 - protein, 15 aa, Homo sapiens
  CDR3 for beta chain variable domain of TCR clone 167943 (TRBV28, TRBJ2-7)
CASSLISGGSYEQYF

SEQ ID NO: 335887 - protein, 15 aa, Homo sapiens
  CDR3 for alpha chain variable domain of TCR clone 167944 (TRAV8-3, TRAJ45)
CASSYSGGGADGLTF

SEQ ID NO: 335888 - protein, 14 aa, Homo sapiens
  CDR3 for beta chain variable domain of TCR clone 167944 (TRBV15, TRBJ2-5)
CATSIGGLGETQYF

SEQ ID NO: 335889 - protein, 17 aa, Homo sapiens
  CDR3 for alpha chain variable domain of TCR clone 167945 (TRAV16, TRAJ37)
CAFWPKNGSSNTGKLIF

SEQ ID NO: 335890 - protein, 16 aa, Homo sapiens
  CDR3 for beta chain variable domain of TCR clone 167945 (TRBV20-1, TRBJ1-4)
CSAPGQGLLTNEKLFF

SEQ ID NO: 335891 - protein, 15 aa, Homo sapiens
  CDR3 for alpha chain variable domain of TCR clone 167946 (TRAV26-1, TRAJ22)
CIVRGSFWFCKATDL

SEQ ID NO: 335892 - protein, 13 aa, Homo sapiens
  CDR3 for beta chain variable domain of TCR clone 167946 (TRBV7-9, TRBJ1-2)
CASSLKRNYGYTF

SEQ ID NO: 335893 - protein, 15 aa, Homo sapiens
  CDR3 for alpha chain variable domain of TCR clone 167947 (TRAV36/DV7, TRAJ45)
CVPCIQDEVLTDSPL

SEQ ID NO: 335894 - protein, 16 aa, Homo sapiens
  CDR3 for beta chain variable domain of TCR clone 167947 (TRBV5-1, TRBJ2-2)
CASSLWDTTNTGELFF

SEQ ID NO: 335895 - protein, 11 aa, Homo sapiens
  CDR3 for alpha chain variable domain of TCR clone 167948 (TRAV3, TRAJ21)
CAVGNFNKFYF

SEQ ID NO: 335896 - protein, 16 aa, Homo sapiens
  CDR3 for beta chain variable domain of TCR clone 167948 (TRBV7-6, TRBJ2-1)
CASSAPGPSSYNKQFF

SEQ ID NO: 335897 - protein, 13 aa, Homo sapiens
  CDR3 for alpha chain variable domain of TCR clone 167949 (TRAV16, TRAJ22)
SAMLAGSARQLTF

SEQ ID NO: 335898 - protein, 14 aa, Homo sapiens
  CDR3 for beta chain variable domain of TCR clone 167949 (TRBV7-2, TRBJ2-1)
CASSLAGRTNEQFF

SEQ ID NO: 335899 - protein, 13 aa, Homo sapiens
  CDR3 for alpha chain variable domain of TCR clone 167950 (TRAV12-2, TRAJ4)
CAVRSGGYNKLIF

SEQ ID NO: 335900 - protein, 15 aa, Homo sapiens
  CDR3 for beta chain variable domain of TCR clone 167950 (TRBV10-3, TRBJ2-1)
CANSDVQDRAYEQLF

SEQ ID NO: 335901 - protein, 16 aa, Homo sapiens
  CDR3 for alpha chain variable domain of TCR clone 167951 (TRAV3, TRAJ18)
CAVRDGRGSTLGRLYF

SEQ ID NO: 335902 - protein, 14 aa, Homo sapiens
  CDR3 for beta chain variable domain of TCR clone 167951 (TRBV7-9, TRBJ1-6)
CASRPGTVNSPLHF

SEQ ID NO: 335903 - protein, 10 aa, Homo sapiens
  CDR3 for alpha chain variable domain of TCR clone 167952 (TRAV1-2, TRAJ31)
CAFFDARLMF

SEQ ID NO: 335904 - protein, 14 aa, Homo sapiens
  CDR3 for beta chain variable domain of TCR clone 167952 (TRBV12-4, TRBJ1-3)
CASTVTGAGNTIYF

SEQ ID NO: 335905 - protein, 13 aa, Homo sapiens
  CDR3 for alpha chain variable domain of TCR clone 167953 (TRAV13-2, TRAJ8)
CAFMNTGFQKIVF

SEQ ID NO: 335906 - protein, 17 aa, Homo sapiens
  CDR3 for beta chain variable domain of TCR clone 167953 (TRBV28, TRBJ2-1)
CASSSARQALTYNEQFF

SEQ ID NO: 335907 - protein, 12 aa, Homo sapiens
  CDR3 for alpha chain variable domain of TCR clone 167954 (TRAV1-1, TRAJ9)
CAVDTGGFKTIF

SEQ ID NO: 335908 - protein, 13 aa, Homo sapiens
  CDR3 for beta chain variable domain of TCR clone 167954 (TRBV4-2, TRBJ1-1)
CASSQAGNTEAFF

SEQ ID NO: 335909 - protein, 13 aa, Homo sapiens
  CDR3 for alpha chain variable domain of TCR clone 167955 (TRAV17, TRAJ26)
CATVDNYGQNFVF

SEQ ID NO: 335910 - protein, 16 aa, Homo sapiens
  CDR3 for beta chain variable domain of TCR clone 167955 (TRBV2, TRBJ2-1)
CASSVGGSLSYNERFF

SEQ ID NO: 335911 - protein, 15 aa, Homo sapiens
  CDR3 for alpha chain variable domain of TCR clone 167956 (TRAV34, TRAJ38)
CGADFTPGNNCKLIW

SEQ ID NO: 335912 - protein, 14 aa, Homo sapiens
  CDR3 for beta chain variable domain of TCR clone 167956 (TRBV11-2, TRBJ2-3)
CASSLGGGANTQYF

SEQ ID NO: 335913 - protein, 23 aa, Homo sapiens
  CDR3 for alpha chain variable domain of TCR clone 167957 (TRAV1-1, TRAJ29)
LLQELQMKDSASYFLGGKTPLVF

SEQ ID NO: 335914 - protein, 13 aa, Homo sapiens
  CDR3 for beta chain variable domain of TCR clone 167957 (TRBV25-1, TRBJ2-7)
CASSEDGDYEQYF

SEQ ID NO: 335915 - protein, 14 aa, Homo sapiens
  CDR3 for alpha chain variable domain of TCR clone 167958 (TRAV12-2, TRAJ4)
CAEDPSGGYNKLIF

SEQ ID NO: 335916 - protein, 13 aa, Homo sapiens
  CDR3 for beta chain variable domain of TCR clone 167958 (TRBV7-9, TRBJ1-2)
CASSLKQNYGYAF

SEQ ID NO: 335917 - protein, 14 aa, Homo sapiens
  CDR3 for alpha chain variable domain of TCR clone 167959 (TRAV12-2, TRAJ17)
CAVLFKAAGNKLTF

SEQ ID NO: 335918 - protein, 14 aa, Homo sapiens
  CDR3 for beta chain variable domain of TCR clone 167959 (TRBV29-1, TRBJ2-1)
CSGGAVAGGNEQFF

SEQ ID NO: 335919 - protein, 12 aa, Homo sapiens
  CDR3 for alpha chain variable domain of TCR clone 167960 (TRAV2, TRAJ9)
CAVGAGGFKTIF

SEQ ID NO: 335920 - protein, 15 aa, Homo sapiens
  CDR3 for beta chain variable domain of TCR clone 167960 (TRBV7-2, TRBJ2-2)
CASSTRTGYTGELFF

SEQ ID NO: 335921 - protein, 15 aa, Homo sapiens
  CDR3 for alpha chain variable domain of TCR clone 167961 (TRAV25, TRAJ52)
CAGRPGGTSYGKLTF

SEQ ID NO: 335922 - protein, 17 aa, Homo sapiens
  CDR3 for beta chain variable domain of TCR clone 167961 (TRBV18, TRBJ2-6)
CASSPDRGVGGANVLTF

SEQ ID NO: 335923 - protein, 11 aa, Homo sapiens
  CDR3 for alpha chain variable domain of TCR clone 167962 (TRAV2, TRAJ13)
CASGGYQKVTF

SEQ ID NO: 335924 - protein, 15 aa, Homo sapiens
  CDR3 for beta chain variable domain of TCR clone 167962 (TRBV5-1, TRBJ2-7)
CASSLYPDGGYEQYF

SEQ ID NO: 335925 - protein, 12 aa, Homo sapiens
  CDR3 for alpha chain variable domain of TCR clone 167963 (TRAV29/DV5, TRAJ43)
CAAPYNNNDMRF

SEQ ID NO: 335926 - protein, 17 aa, Homo sapiens
  CDR3 for beta chain variable domain of TCR clone 167963 (TRBV19, TRBJ2-6)
CASSTGQLFSGANVLTF

SEQ ID NO: 335927 - protein, 13 aa, Homo sapiens
  CDR3 for alpha chain variable domain of TCR clone 167964 (TRAV21, TRAJ27)
CAARPGNAGKSTF

SEQ ID NO: 335928 - protein, 15 aa, Homo sapiens
  CDR3 for beta chain variable domain of TCR clone 167964 (TRBV7-9, TRBJ2-7)
CASSLALAEAYEQYF

SEQ ID NO: 335929 - protein, 12 aa, Homo sapiens
  CDR3 for alpha chain variable domain of TCR clone 167965 (TRAV13-1, TRAJ40)
CAAGKGTYKYIF

SEQ ID NO: 335930 - protein, 14 aa, Homo sapiens
  CDR3 for beta chain variable domain of TCR clone 167965 (TRBV11-2, TRBJ1-5)
CASSLDRGRQPQHF

SEQ ID NO: 335931 - protein, 13 aa, Homo sapiens
  CDR3 for alpha chain variable domain of TCR clone 167966 (TRAV2, TRAJ40)
RAVVTSGTYKYIF

SEQ ID NO: 335932 - protein, 13 aa, Homo sapiens
  CDR3 for beta chain variable domain of TCR clone 167966 (TRBV7-2, TRBJ1-1)
CASNLKGAKVAFF

SEQ ID NO: 335933 - protein, 13 aa, Homo sapiens
  CDR3 for alpha chain variable domain of TCR clone 167967 (TRAV30, TRAJ39)
CGTENNAGNMLTF

SEQ ID NO: 335934 - protein, 16 aa, Homo sapiens
  CDR3 for beta chain variable domain of TCR clone 167967 (TRBV6-1, TRBJ2-5)
CASSETLDRGAETQYF

SEQ ID NO: 335935 - protein, 12 aa, Homo sapiens
  CDR3 for alpha chain variable domain of TCR clone 167968 (TRAV29/DV5, TRAJ34)
CAASGNTDKLIF

SEQ ID NO: 335936 - protein, 20 aa, Homo sapiens
  CDR3 for beta chain variable domain of TCR clone 167968 (TRBV19, TRBJ2-7)
CASPQVAPESLRAVLRAGHQ

SEQ ID NO: 335937 - protein, 15 aa, Homo sapiens
  CDR3 for alpha chain variable domain of TCR clone 167969 (TRAV8-3, TRAJ45)
CASSYSGGGADGLTF

SEQ ID NO: 335938 - protein, 13 aa, Homo sapiens
  CDR3 for beta chain variable domain of TCR clone 167969 (TRBV5-1, TRBJ2-1)
CASSLGSYNEQFF

SEQ ID NO: 335939 - protein, 15 aa, Homo sapiens
  CDR3 for alpha chain variable domain of TCR clone 167970 (TRAV3, TRAJ22)
CAVRDRGGFARQLTF

SEQ ID NO: 335940 - protein, 14 aa, Homo sapiens
  CDR3 for beta chain variable domain of TCR clone 167970 (TRBV20-1, TRBJ2-5)
CSALVPGYQETQYF

SEQ ID NO: 335941 - protein, 16 aa, Homo sapiens
  CDR3 for alpha chain variable domain of TCR clone 167971 (TRAV30, TRAJ24)
CGTEIVDADSWGKFQF

SEQ ID NO: 335942 - protein, 13 aa, Homo sapiens
  CDR3 for beta chain variable domain of TCR clone 167971 (TRBV11-2, TRBJ2-5)
SASSSTGEETQYF

SEQ ID NO: 335943 - protein, 12 aa, Homo sapiens
  CDR3 for alpha chain variable domain of TCR clone 167972 (TRAV12-2, TRAJ20)
CAVRPSDYKLSF

SEQ ID NO: 335944 - protein, 14 aa, Homo sapiens
  CDR3 for beta chain variable domain of TCR clone 167972 (TRBV12-5, TRBJ2-5)
CASGSRTHQETQYF

SEQ ID NO: 335945 - protein, 18 aa, Homo sapiens
  CDR3 for alpha chain variable domain of TCR clone 167973 (TRAV12-3, TRAJ52)
CAMSVGGAGGTSYGKLKF

SEQ ID NO: 335946 - protein, 15 aa, Homo sapiens
  CDR3 for beta chain variable domain of TCR clone 167973 (TRBV27, TRBJ1-6)
CASSFDRGLGSPLHL

SEQ ID NO: 335947 - protein, 15 aa, Homo sapiens
  CDR3 for alpha chain variable domain of TCR clone 167974 (TRAV26-1, TRAJ29)
RIVRVEGSGNTPLVF

SEQ ID NO: 335948 - protein, 15 aa, Homo sapiens
  CDR3 for beta chain variable domain of TCR clone 167974 (TRBV28, TRBJ2-5)
CASSPGQGSIETQYF

SEQ ID NO: 335949 - protein, 13 aa, Homo sapiens
  CDR3 for alpha chain variable domain of TCR clone 167975 (TRAV1-2, TRAJ11)
CAVRDSGYSTLTF

SEQ ID NO: 335950 - protein, 16 aa, Homo sapiens
  CDR3 for beta chain variable domain of TCR clone 167975 (TRBV19, TRBJ2-1)
CASSKAGPSSYNEQFF

SEQ ID NO: 335951 - protein, 13 aa, Homo sapiens
  CDR3 for alpha chain variable domain of TCR clone 167976 (TRAV12-1, TRAJ7)
CVVNMRGNNRLAF

SEQ ID NO: 335952 - protein, 15 aa, Homo sapiens
  CDR3 for beta chain variable domain of TCR clone 167976 (TRBV27, TRBJ2-3)
CASSLRLAATDTQYF

SEQ ID NO: 335953 - protein, 14 aa, Homo sapiens
  CDR3 for alpha chain variable domain of TCR clone 167977 (TRAV26-1, TRAJ21)
CIVRPPYNFNKFSF

SEQ ID NO: 335954 - protein, 11 aa, Homo sapiens
  CDR3 for beta chain variable domain of TCR clone 167977 (TRBV10-3, TRBJ2-7)
CAISEGLEQYF

SEQ ID NO: 335955 - protein, 13 aa, Homo sapiens
  CDR3 for alpha chain variable domain of TCR clone 167978 (TRAV12-2, TRAJ39)
CAVNNNAGNMLTF

SEQ ID NO: 335956 - protein, 13 aa, Homo sapiens
  CDR3 for beta chain variable domain of TCR clone 167978 (TRBV11-2, TRBJ2-5)
CASSFSSQETQYF

SEQ ID NO: 335957 - protein, 14 aa, Homo sapiens
  CDR3 for alpha chain variable domain of TCR clone 167979 (TRAV12-2, TRAJ13)
CAVKKTGGYQNVTF

SEQ ID NO: 335958 - protein, 12 aa, Homo sapiens
  CDR3 for beta chain variable domain of TCR clone 167979 (TRBV11-2, TRBJ2-2)
CASSLGGGELFF

SEQ ID NO: 335959 - protein, 15 aa, Homo sapiens
  CDR3 for alpha chain variable domain of TCR clone 167980 (TRAV26-1, TRAJ40)
CIVRAVPSGTYKYIF

SEQ ID NO: 335960 - protein, 14 aa, Homo sapiens
  CDR3 for beta chain variable domain of TCR clone 167980 (TRBV19, TRBJ2-1)
CTSKDPGLANEQFF

SEQ ID NO: 335961 - protein, 14 aa, Homo sapiens
  CDR3 for alpha chain variable domain of TCR clone 167981 (TRAV13-1, TRAJ39)
CAASEGNAGNMLTF

SEQ ID NO: 335962 - protein, 15 aa, Homo sapiens
  CDR3 for beta chain variable domain of TCR clone 167981 (TRBV7-9, TRBJ1-5)
CASSQGHQPNQPQHF

SEQ ID NO: 335963 - protein, 13 aa, Homo sapiens
  CDR3 for alpha chain variable domain of TCR clone 167982 (TRAV1-2, TRAJ9)
CAVLNTGGFETIF

SEQ ID NO: 335964 - protein, 17 aa, Homo sapiens
  CDR3 for beta chain variable domain of TCR clone 167982 (TRBV13, TRBJ2-3)
CASSLSRVAGGRNTQYF

SEQ ID NO: 335965 - protein, 14 aa, Homo sapiens
  CDR3 for alpha chain variable domain of TCR clone 167983 (TRAV13-1, TRAJ26)
CAASSAHYGQNFLF

SEQ ID NO: 335966 - protein, 17 aa, Homo sapiens
  CDR3 for beta chain variable domain of TCR clone 167983 (TRBV25-1, TRBJ2-5)
CASSRRGGRGGQETQYF

SEQ ID NO: 335967 - protein, 13 aa, Homo sapiens
  CDR3 for alpha chain variable domain of TCR clone 167984 (TRAV13-2, TRAJ40)
CAEFTSGTYKYIF

SEQ ID NO: 335968 - protein, 13 aa, Homo sapiens
  CDR3 for beta chain variable domain of TCR clone 167984 (TRBV7-2, TRBJ2-2)
CASSLAVTGELFF

SEQ ID NO: 335969 - protein, 15 aa, Homo sapiens
  CDR3 for alpha chain variable domain of TCR clone 167985 (TRAV23/DV6, TRAJ39)
CAASMGNNAGNMLTL

SEQ ID NO: 335970 - protein, 17 aa, Homo sapiens
  CDR3 for beta chain variable domain of TCR clone 167985 (TRBV28, TRBJ2-1)
CASSAPWGTPSYNEQFF

SEQ ID NO: 335971 - protein, 15 aa, Homo sapiens
  CDR3 for alpha chain variable domain of TCR clone 167986 (TRAV12-2, TRAJ43)
CAFDMRFGAGTRLTV

SEQ ID NO: 335972 - protein, 12 aa, Homo sapiens
  CDR3 for beta chain variable domain of TCR clone 167986 (TRBV6-3, TRBJ2-7)
CASSLTPYEQYF

SEQ ID NO: 335973 - protein, 14 aa, Homo sapiens
  CDR3 for alpha chain variable domain of TCR clone 167987 (TRAV1-2, TRAJ28)
CVARSGAGSYQLTF

SEQ ID NO: 335974 - protein, 12 aa, Homo sapiens
  CDR3 for beta chain variable domain of TCR clone 167987 (TRBV7-8, TRBJ2-7)
CASSLGDREQYF

SEQ ID NO: 335975 - protein, 12 aa, Homo sapiens
  CDR3 for alpha chain variable domain of TCR clone 167988 (TRAV27, TRAJ13)
CAGAGGYQKVTF

SEQ ID NO: 335976 - protein, 12 aa, Homo sapiens
  CDR3 for beta chain variable domain of TCR clone 167988 (TRBV11-2, TRBJ2-2)
CASSLGGGELFF

SEQ ID NO: 335977 - protein, 15 aa, Homo sapiens
  CDR3 for alpha chain variable domain of TCR clone 167989 (TRAV17, TRAJ57)
CATGPSQGGSEQLVF

SEQ ID NO: 335978 - protein, 14 aa, Homo sapiens
  CDR3 for beta chain variable domain of TCR clone 167989 (TRBV12-5, TRBJ2-5)
CASGSRTRQETQYF

SEQ ID NO: 335979 - protein, 14 aa, Homo sapiens
  CDR3 for alpha chain variable domain of TCR clone 167990 (TRAV12-2, TRAJ13)
CAVKKTGGYQNVTF

SEQ ID NO: 335980 - protein, 15 aa, Homo sapiens
  CDR3 for beta chain variable domain of TCR clone 167990 (TRBV11-1, TRBJ2-1)
CASSNGGGSSNEQFF

SEQ ID NO: 335981 - protein, 14 aa, Homo sapiens
  CDR3 for alpha chain variable domain of TCR clone 167991 (TRAV1-2, TRAJ8)
CAVREDTGFQKLVF

SEQ ID NO: 335982 - protein, 13 aa, Homo sapiens
  CDR3 for beta chain variable domain of TCR clone 167991 (TRBV25-1, TRBJ1-2)
CASSEAGASGYTF

SEQ ID NO: 335983 - protein, 14 aa, Homo sapiens
  CDR3 for alpha chain variable domain of TCR clone 167992 (TRAV30, TRAJ26)
CGTEIVSYGQNFVF

SEQ ID NO: 335984 - protein, 12 aa, Homo sapiens
  CDR3 for beta chain variable domain of TCR clone 167992 (TRBV7-2, TRBJ2-2)
CASSLPPGMLFF

SEQ ID NO: 335985 - protein, 14 aa, Homo sapiens
  CDR3 for alpha chain variable domain of TCR clone 167993 (TRAV12-3, TRAJ10)
SHLPLTGGGNKLSF

SEQ ID NO: 335986 - protein, 12 aa, Homo sapiens
  CDR3 for beta chain variable domain of TCR clone 167993 (TRBV11-2, TRBJ2-2)
CASSLGGGELFF

SEQ ID NO: 335987 - protein, 15 aa, Homo sapiens
  CDR3 for alpha chain variable domain of TCR clone 167994 (TRAV8-4, TRAJ47)
CAVSDPEEYGNKLVF

SEQ ID NO: 335988 - protein, 15 aa, Homo sapiens
  CDR3 for beta chain variable domain of TCR clone 167994 (TRBV11-2, TRBJ2-1)
CASSLGPDSCNEQFF

SEQ ID NO: 335989 - protein, 14 aa, Homo sapiens
  CDR3 for alpha chain variable domain of TCR clone 167995 (TRAV8-3, TRAJ9)
CAVVYNTGGFKTIF

SEQ ID NO: 335990 - protein, 14 aa, Homo sapiens
  CDR3 for beta chain variable domain of TCR clone 167995 (TRBV7-3, TRBJ2-2)
CPSSSGGYTGELFF

SEQ ID NO: 335991 - protein, 15 aa, Homo sapiens
  CDR3 for alpha chain variable domain of TCR clone 167996 (TRAV8-2, TRAJ40)
CVVSDRGSGTYKYIF

SEQ ID NO: 335992 - protein, 13 aa, Homo sapiens
  CDR3 for beta chain variable domain of TCR clone 167996 (TRBV12-4, TRBJ2-2)
CASSITGSGELFF

SEQ ID NO: 335993 - protein, 10 aa, Homo sapiens
  CDR3 for alpha chain variable domain of TCR clone 167997 (TRAV23/DV6, TRAJ57)
CAASPTLSQG

SEQ ID NO: 335994 - protein, 12 aa, Homo sapiens
  CDR3 for beta chain variable domain of TCR clone 167997 (TRBV7-8, TRBJ2-7)
CASSLGDREQYF

SEQ ID NO: 335995 - protein, 13 aa, Homo sapiens
  CDR3 for alpha chain variable domain of TCR clone 167998 (TRAV12-3, TRAJ13)
CAMTSGGYKKVTF

SEQ ID NO: 335996 - protein, 13 aa, Homo sapiens
  CDR3 for beta chain variable domain of TCR clone 167998 (TRBV7-9, TRBJ1-2)
CASSLKQNYGYTF

SEQ ID NO: 335997 - protein, 13 aa, Homo sapiens
  CDR3 for alpha chain variable domain of TCR clone 167999 (TRAV27, TRAJ40)
CAGPPSGTYKYIF

SEQ ID NO: 335998 - protein, 14 aa, Homo sapiens
  CDR3 for beta chain variable domain of TCR clone 167999 (TRBV7-9, TRBJ2-5)
CASSLDTAQETQYF

SEQ ID NO: 335999 - protein, 12 aa, Homo sapiens
  CDR3 for alpha chain variable domain of TCR clone 168000 (TRAV8-6, TRAJ21)
CAVRPNFNKFYF

SEQ ID NO: 336000 - protein, 14 aa, Homo sapiens
  CDR3 for beta chain variable domain of TCR clone 168000 (TRBV19, TRBJ2-3)
CASSVGRGSDTQYF

SEQ ID NO: 336001 - protein, 16 aa, Homo sapiens
  CDR3 for alpha chain variable domain of TCR clone 168001 (TRAV12-3, TRAJ28)
CAMRANSGAGSYQLTF

SEQ ID NO: 336002 - protein, 15 aa, Homo sapiens
  CDR3 for beta chain variable domain of TCR clone 168001 (TRBV6-3, TRBJ2-7)
CASSSPGTVFYELYF

SEQ ID NO: 336003 - protein, 15 aa, Homo sapiens
  CDR3 for alpha chain variable domain of TCR clone 168002 (TRAV12-2, TRAJ20)
CAVKGGFGAGTTVTV

SEQ ID NO: 336004 - protein, 14 aa, Homo sapiens
  CDR3 for beta chain variable domain of TCR clone 168002 (TRBV4-1, TRBJ2-2)
CASSQAVNTGELFF

SEQ ID NO: 336005 - protein, 16 aa, Homo sapiens
  CDR3 for alpha chain variable domain of TCR clone 168003 (TRAV8-1, TRAJ42)
CAVTSRDGGSQGTLIF

SEQ ID NO: 336006 - protein, 12 aa, Homo sapiens
  CDR3 for beta chain variable domain of TCR clone 168003 (TRBV6-3, TRBJ2-7)
CASSLGRRGLYF

SEQ ID NO: 336007 - protein, 12 aa, Homo sapiens
  CDR3 for alpha chain variable domain of TCR clone 168004 (TRAV17, TRAJ57)
CATDGGSEKLVF

SEQ ID NO: 336008 - protein, 13 aa, Homo sapiens
  CDR3 for beta chain variable domain of TCR clone 168004 (TRBV7-9, TRBJ2-7)
CASSFAGAYEQYY

SEQ ID NO: 336009 - protein, 13 aa, Homo sapiens
  CDR3 for alpha chain variable domain of TCR clone 168005 (TRAV12-2, TRAJ13)
CREEDWGYQKVTF

SEQ ID NO: 336010 - protein, 13 aa, Homo sapiens
  CDR3 for beta chain variable domain of TCR clone 168005 (TRBV7-3, TRBJ1-1)
CASSQDWGAEAFF

SEQ ID NO: 336011 - protein, 14 aa, Homo sapiens
  CDR3 for alpha chain variable domain of TCR clone 168006 (TRAV23/DV6, TRAJ4)
CAARSAGGYTKLIF

SEQ ID NO: 336012 - protein, 14 aa, Homo sapiens
  CDR3 for beta chain variable domain of TCR clone 168006 (TRBV18, TRBJ2-7)
CASSPRGGAYEQYF

SEQ ID NO: 336013 - protein, 16 aa, Homo sapiens
  CDR3 for alpha chain variable domain of TCR clone 168007 (TRAV8-6, TRAJ53)
CAVTSNSGGSNYKLTF

SEQ ID NO: 336014 - protein, 14 aa, Homo sapiens
  CDR3 for beta chain variable domain of TCR clone 168007 (TRBV7-9, TRBJ2-2)
CASSLVQDTGELFF

SEQ ID NO: 336015 - protein, 12 aa, Homo sapiens
  CDR3 for alpha chain variable domain of TCR clone 168008 (TRAV38-1, TRAJ54)
CAFHEGAQKLVF

SEQ ID NO: 336016 - protein, 14 aa, Homo sapiens
  CDR3 for beta chain variable domain of TCR clone 168008 (TRBV7-2, TRBJ2-7)
CASSPKTSFYEQYF

SEQ ID NO: 336017 - protein, 16 aa, Homo sapiens
  CDR3 for alpha chain variable domain of TCR clone 168009 (TRAV13-1, TRAJ18)
CAASRMRGSTLGRLYF

SEQ ID NO: 336018 - protein, 15 aa, Homo sapiens
  CDR3 for beta chain variable domain of TCR clone 168009 (TRBV28, TRBJ2-5)
CASSPGQGSIETQYF

SEQ ID NO: 336019 - protein, 12 aa, Homo sapiens
  CDR3 for alpha chain variable domain of TCR clone 168010 (TRAV16, TRAJ10)
CSRTGGGNKLTF

SEQ ID NO: 336020 - protein, 15 aa, Homo sapiens
  CDR3 for beta chain variable domain of TCR clone 168010 (TRBV6-3, TRBJ2-7)
YASSSPGTVFYEQYF

SEQ ID NO: 336021 - protein, 12 aa, Homo sapiens
  CDR3 for alpha chain variable domain of TCR clone 168011 (TRAV12-3, TRAJ17)
CAMTLTGNKLTL

SEQ ID NO: 336022 - protein, 15 aa, Homo sapiens
  CDR3 for beta chain variable domain of TCR clone 168011 (TRBV20-1, TRBJ2-7)
CSTRDRVSGMDEQYF

SEQ ID NO: 336023 - protein, 14 aa, Homo sapiens
  CDR3 for alpha chain variable domain of TCR clone 168012 (TRAV8-4, TRAJ13)
CAVTLSGGYQKVTF

SEQ ID NO: 336024 - protein, 14 aa, Homo sapiens
  CDR3 for beta chain variable domain of TCR clone 168012 (TRBV7-2, TRBJ1-2)
CASSQTGSAYGYTF

SEQ ID NO: 336025 - protein, 12 aa, Homo sapiens
  CDR3 for alpha chain variable domain of TCR clone 168013 (TRAV13-2, TRAJ23)
CAERHRGGKLIF

SEQ ID NO: 336026 - protein, 15 aa, Homo sapiens
  CDR3 for beta chain variable domain of TCR clone 168013 (TRBV28, TRBJ2-4)
CAAGSGTLLMGIQYF

SEQ ID NO: 336027 - protein, 17 aa, Homo sapiens
  CDR3 for alpha chain variable domain of TCR clone 168014 (TRAV3, TRAJ6)
CAVRDGPRAGGSYIPTF

SEQ ID NO: 336028 - protein, 15 aa, Homo sapiens
  CDR3 for beta chain variable domain of TCR clone 168014 (TRBV11-3, TRBJ2-1)
CASSLGDSSHNEQFF

SEQ ID NO: 336029 - protein, 16 aa, Homo sapiens
  CDR3 for alpha chain variable domain of TCR clone 168015 (TRAV14/DV4, TRAJ37)
CAMREYGSGNTAKLIF

SEQ ID NO: 336030 - protein, 15 aa, Homo sapiens
  CDR3 for beta chain variable domain of TCR clone 168015 (TRBV2, TRBJ2-5)
CASSEQGLIGETQYF

SEQ ID NO: 336031 - protein, 18 aa, Homo sapiens
  CDR3 for alpha chain variable domain of TCR clone 168016 (TRAV29/DV5, TRAJ52)
CAAGFRGAGGTSYGKLTF

SEQ ID NO: 336032 - protein, 16 aa, Homo sapiens
  CDR3 for beta chain variable domain of TCR clone 168016 (TRBV9, TRBJ1-2)
CASSVEEKVSPYGYTF

SEQ ID NO: 336033 - protein, 20 aa, Homo sapiens
  CDR3 for alpha chain variable domain of TCR clone 168017 (TRAV8-3, TRAJ44)
LSTSVLWVRLYTGTASKLTF

SEQ ID NO: 336034 - protein, 12 aa, Homo sapiens
  CDR3 for beta chain variable domain of TCR clone 168017 (TRBV11-2, TRBJ2-1)
CASSPGNNEQFF

SEQ ID NO: 336035 - protein, 15 aa, Homo sapiens
  CDR3 for alpha chain variable domain of TCR clone 168018 (TRAV17, TRAJ54)
FATEKLGQGAQKLVF

SEQ ID NO: 336036 - protein, 14 aa, Homo sapiens
  CDR3 for beta chain variable domain of TCR clone 168018 (TRBV7-3, TRBJ1-1)
CQQLRGQMNTEAFF

SEQ ID NO: 336037 - protein, 15 aa, Homo sapiens
  CDR3 for alpha chain variable domain of TCR clone 168019 (TRAV12-3, TRAJ6)
CAMSATPGGSYIPTF

SEQ ID NO: 336038 - protein, 14 aa, Homo sapiens
  CDR3 for beta chain variable domain of TCR clone 168019 (TRBV7-2, TRBJ2-7)
CASSPKTSFYEQYF

SEQ ID NO: 336039 - protein, 14 aa, Homo sapiens
  CDR3 for alpha chain variable domain of TCR clone 168020 (TRAV4, TRAJ26)
CLVGHHNYGQSFVF

SEQ ID NO: 336040 - protein, 17 aa, Homo sapiens
  CDR3 for beta chain variable domain of TCR clone 168020 (TRBV24-1, TRBJ2-1)
CATSDVSTSGTYNEQFF

SEQ ID NO: 336041 - protein, 14 aa, Homo sapiens
  CDR3 for alpha chain variable domain of TCR clone 168021 (TRAV1-2, TRAJ15)
CAVRDRQAGTALIF

SEQ ID NO: 336042 - protein, 14 aa, Homo sapiens
  CDR3 for beta chain variable domain of TCR clone 168021 (TRBV4-1, TRBJ2-2)
CASSQAVNTGELLF

SEQ ID NO: 336043 - protein, 14 aa, Homo sapiens
  CDR3 for alpha chain variable domain of TCR clone 168022 (TRAV12-2, TRAJ13)
SAVKKTGGYQKVTF

SEQ ID NO: 336044 - protein, 15 aa, Homo sapiens
  CDR3 for beta chain variable domain of TCR clone 168022 (TRBV27, TRBJ2-1)
CASSNGGGSSKEQFF

SEQ ID NO: 336045 - protein, 14 aa, Homo sapiens
  CDR3 for alpha chain variable domain of TCR clone 168023 (TRAV27, TRAJ58)
CAGDGETSGSRLTF

SEQ ID NO: 336046 - protein, 14 aa, Homo sapiens
  CDR3 for beta chain variable domain of TCR clone 168023 (TRBV19, TRBJ2-1)
CASKDPGLANEQFF

SEQ ID NO: 336047 - protein, 12 aa, Homo sapiens
  CDR3 for alpha chain variable domain of TCR clone 168024 (TRAV27, TRAJ35)
CAGADFGNVLHC

SEQ ID NO: 336048 - protein, 14 aa, Homo sapiens
  CDR3 for beta chain variable domain of TCR clone 168024 (TRBV7-2, TRBJ2-7)
CASSPKTSFYEQYF

SEQ ID NO: 336049 - protein, 14 aa, Homo sapiens
  CDR3 for alpha chain variable domain of TCR clone 168025 (TRAV8-3, TRAJ44)
CAVCLTGTASKLTF

SEQ ID NO: 336050 - protein, 12 aa, Homo sapiens
  CDR3 for beta chain variable domain of TCR clone 168025 (TRBV7-3, TRBJ2-1)
CASSLGFNEQFF

SEQ ID NO: 336051 - protein, 17 aa, Homo sapiens
  CDR3 for alpha chain variable domain of TCR clone 168026 (TRAV26-1, TRAJ53)
CIVRVDDSAGSNYKLTF

SEQ ID NO: 336052 - protein, 15 aa, Homo sapiens
  CDR3 for beta chain variable domain of TCR clone 168026 (TRBV20-1, TRBJ2-7)
CSARVPAAYFYEQYF

SEQ ID NO: 336053 - protein, 16 aa, Homo sapiens
  CDR3 for alpha chain variable domain of TCR clone 168027 (TRAV22, TRAJ45)
CAVERGKRGGADGLTF

SEQ ID NO: 336054 - protein, 13 aa, Homo sapiens
  CDR3 for beta chain variable domain of TCR clone 168027 (TRBV27, TRBJ1-1)
CASILSIGAEAFF

SEQ ID NO: 336055 - protein, 13 aa, Homo sapiens
  CDR3 for alpha chain variable domain of TCR clone 168028 (TRAV12-1, TRAJ11)
CVVTRGGYSTLTF

SEQ ID NO: 336056 - protein, 16 aa, Homo sapiens
  CDR3 for beta chain variable domain of TCR clone 168028 (TRBV7-3, TRBJ2-2)
CASSLKRGTLSGELFF

SEQ ID NO: 336057 - protein, 16 aa, Homo sapiens
  CDR3 for alpha chain variable domain of TCR clone 168029 (TRAV12-3, TRAJ53)
CAMSPGSGGSNYKLTF

SEQ ID NO: 336058 - protein, 16 aa, Homo sapiens
  CDR3 for beta chain variable domain of TCR clone 168029 (TRBV24-1, TRBJ2-3)
CATSDRRQDLTDTQYF

SEQ ID NO: 336059 - protein, 16 aa, Homo sapiens
  CDR3 for alpha chain variable domain of TCR clone 168030 (TRAV12-3, TRAJ28)
CAMRANSGAGSYQLTF

SEQ ID NO: 336060 - protein, 16 aa, Homo sapiens
  CDR3 for beta chain variable domain of TCR clone 168030 (TRBV7-2, TRBJ1-3)
CASSRLEASSGNTIYV

SEQ ID NO: 336061 - protein, 15 aa, Homo sapiens
  CDR3 for alpha chain variable domain of TCR clone 168031 (TRAV17, TRAJ52)
CATEAGGTSYGKLTF

SEQ ID NO: 336062 - protein, 16 aa, Homo sapiens
  CDR3 for beta chain variable domain of TCR clone 168031 (TRBV20-1, TRBJ2-1)
CSAGRPAGGAYNEQFF

SEQ ID NO: 336063 - protein, 14 aa, Homo sapiens
  CDR3 for alpha chain variable domain of TCR clone 168032 (TRAV12-2, TRAJ13)
CAVKKTGGYQKATF

SEQ ID NO: 336064 - protein, 15 aa, Homo sapiens
  CDR3 for beta chain variable domain of TCR clone 168032 (TRBV27, TRBJ2-1)
CASSNGGGSSNEHFF

SEQ ID NO: 336065 - protein, 14 aa, Homo sapiens
  CDR3 for alpha chain variable domain of TCR clone 168033 (TRAV1-2, TRAJ16)
CAVNRFSDGQKLLF

SEQ ID NO: 336066 - protein, 17 aa, Homo sapiens
  CDR3 for beta chain variable domain of TCR clone 168033 (TRBV9, TRBJ1-6)
CASSVAGTGDHPSTLGT

SEQ ID NO: 336067 - protein, 11 aa, Homo sapiens
  CDR3 for alpha chain variable domain of TCR clone 168034 (TRAV16, TRAJ33)
CALHSNYQLIW

SEQ ID NO: 336068 - protein, 15 aa, Homo sapiens
  CDR3 for beta chain variable domain of TCR clone 168034 (TRBV7-2, TRBJ1-2)
CASSLVSGGDYGYTF

SEQ ID NO: 336069 - protein, 14 aa, Homo sapiens
  CDR3 for alpha chain variable domain of TCR clone 168035 (TRAV9-2, TRAJ39)
CALYIDNAGNMLTF

SEQ ID NO: 336070 - protein, 11 aa, Homo sapiens
  CDR3 for beta chain variable domain of TCR clone 168035 (TRBV7-9, TRBJ2-3)
CASSPTDTQYF

SEQ ID NO: 336071 - protein, 13 aa, Homo sapiens
  CDR3 for alpha chain variable domain of TCR clone 168036 (TRAV23/DV6, TRAJ15)
CAALPAARNCSDL

SEQ ID NO: 336072 - protein, 14 aa, Homo sapiens
  CDR3 for beta chain variable domain of TCR clone 168036 (TRBV7-9, TRBJ1-2)
CASSRQGANYGYTF

SEQ ID NO: 336073 - protein, 14 aa, Homo sapiens
  CDR3 for alpha chain variable domain of TCR clone 168037 (TRAV12-1, TRAJ9)
CVVNINTGGFKTIF

SEQ ID NO: 336074 - protein, 12 aa, Homo sapiens
  CDR3 for beta chain variable domain of TCR clone 168037 (TRBV5-1, TRBJ2-7)
CASSFRGYEQYF

SEQ ID NO: 336075 - protein, 14 aa, Homo sapiens
  CDR3 for alpha chain variable domain of TCR clone 168038 (TRAV13-1, TRAJ44)
CAAKATGTASKLTF

SEQ ID NO: 336076 - protein, 13 aa, Homo sapiens
  CDR3 for beta chain variable domain of TCR clone 168038 (TRBV14, TRBJ2-1)
CASSQDRRKEQFF

SEQ ID NO: 336077 - protein, 14 aa, Homo sapiens
  CDR3 for alpha chain variable domain of TCR clone 168039 (TRAV8-4, TRAJ9)
CAVRINTGGFKTIF

SEQ ID NO: 336078 - protein, 14 aa, Homo sapiens
  CDR3 for beta chain variable domain of TCR clone 168039 (TRBV12-5, TRBJ2-5)
CGSGSRTHQETQYF

SEQ ID NO: 336079 - protein, 12 aa, Homo sapiens
  CDR3 for alpha chain variable domain of TCR clone 168040 (TRAV12-2, TRAJ49)
CAVLNTGNQFYF

SEQ ID NO: 336080 - protein, 13 aa, Homo sapiens
  CDR3 for beta chain variable domain of TCR clone 168040 (TRBV10-3, TRBJ1-2)
CAISERDSYGYTF

SEQ ID NO: 336081 - protein, 18 aa, Homo sapiens
  CDR3 for alpha chain variable domain of TCR clone 168041 (TRAV8-4, TRAJ52)
CAVTRANAGGTSYGKMTF

SEQ ID NO: 336082 - protein, 20 aa, Homo sapiens
  CDR3 for beta chain variable domain of TCR clone 168041 (TRBV19, TRBJ2-1)
CASSISRTVTSTRLNNEQFF

SEQ ID NO: 336083 - protein, 14 aa, Homo sapiens
  CDR3 for alpha chain variable domain of TCR clone 168042 (TRAV12-2, TRAJ13)
CAVKKTGGYQKVTF

SEQ ID NO: 336084 - protein, 15 aa, Homo sapiens
  CDR3 for beta chain variable domain of TCR clone 168042 (TRBV20-1, TRBJ2-7)
CSARDRVSGTDEQYF

SEQ ID NO: 336085 - protein, 15 aa, Homo sapiens
  CDR3 for alpha chain variable domain of TCR clone 168043 (TRAV23/DV6, TRAJ18)
CAARYRGSTLGRLYF

SEQ ID NO: 336086 - protein, 13 aa, Homo sapiens
  CDR3 for beta chain variable domain of TCR clone 168043 (TRBV19, TRBJ1-1)
CASSPSNGGEAFF

SEQ ID NO: 336087 - protein, 13 aa, Homo sapiens
  CDR3 for alpha chain variable domain of TCR clone 168044 (TRAV12-3, TRAJ33)
CAMSVNSNYQLIW

SEQ ID NO: 336088 - protein, 15 aa, Homo sapiens
  CDR3 for beta chain variable domain of TCR clone 168044 (TRBV7-9, TRBJ1-5)
CASSQGHQPNQPQHF

SEQ ID NO: 336089 - protein, 11 aa, Homo sapiens
  CDR3 for alpha chain variable domain of TCR clone 168045 (TRAV14/DV4, )
CARREISRTLT

SEQ ID NO: 336090 - protein, 14 aa, Homo sapiens
  CDR3 for beta chain variable domain of TCR clone 168045 (TRBV2, TRBJ2-1)
CASSDRAYYNEQFF

SEQ ID NO: 336091 - protein, 16 aa, Homo sapiens
  CDR3 for alpha chain variable domain of TCR clone 168046 (TRAV27, TRAJ13)
CAGAKSDSGGYQIVTF

SEQ ID NO: 336092 - protein, 15 aa, Homo sapiens
  CDR3 for beta chain variable domain of TCR clone 168046 (TRBV29-1, TRBJ2-1)
CSVGRHALFYNEQFF

SEQ ID NO: 336093 - protein, 15 aa, Homo sapiens
  CDR3 for alpha chain variable domain of TCR clone 168047 (TRAV3, TRAJ47)
FALRDIGEYGNKLVF

SEQ ID NO: 336094 - protein, 14 aa, Homo sapiens
  CDR3 for beta chain variable domain of TCR clone 168047 (TRBV13, TRBJ2-5)
CASSLERVGETQYF

SEQ ID NO: 336095 - protein, 13 aa, Homo sapiens
  CDR3 for alpha chain variable domain of TCR clone 168048 (TRAV39, TRAJ33)
FAANPDSNYQLIW

SEQ ID NO: 336096 - protein, 13 aa, Homo sapiens
  CDR3 for beta chain variable domain of TCR clone 168048 (TRBV18, TRBJ1-1)
CASSGGRNTEAFF

SEQ ID NO: 336097 - protein, 14 aa, Homo sapiens
  CDR3 for alpha chain variable domain of TCR clone 168049 (TRAV1-1, TRAJ27)
CAVIYNTNAGKSTF

SEQ ID NO: 336098 - protein, 16 aa, Homo sapiens
  CDR3 for beta chain variable domain of TCR clone 168049 (TRBV4-2, TRBJ2-3)
CASSQELAGDTDTQHF

SEQ ID NO: 336099 - protein, 16 aa, Homo sapiens
  CDR3 for alpha chain variable domain of TCR clone 168050 (TRAV22, TRAJ45)
CAVERGKRGGADGLTF

SEQ ID NO: 336100 - protein, 13 aa, Homo sapiens
  CDR3 for beta chain variable domain of TCR clone 168050 (TRBV10-2, TRBJ2-7)
CASGASGGYEQYF

SEQ ID NO: 336101 - protein, 13 aa, Homo sapiens
  CDR3 for alpha chain variable domain of TCR clone 168051 (TRAV3, TRAJ21)
CAVREPDFNNFYF

SEQ ID NO: 336102 - protein, 17 aa, Homo sapiens
  CDR3 for beta chain variable domain of TCR clone 168051 (TRBV13, TRBJ2-3)
CASSLSRVAGGRNTQYF

SEQ ID NO: 336103 - protein, 16 aa, Homo sapiens
  CDR3 for alpha chain variable domain of TCR clone 168052 (TRAV26-1, TRAJ28)
CIVRPYSGAGSYQLTF

SEQ ID NO: 336104 - protein, 14 aa, Homo sapiens
  CDR3 for beta chain variable domain of TCR clone 168052 (TRBV6-3, TRBJ2-7)
CASSYSRLSYEQYF

SEQ ID NO: 336105 - protein, 14 aa, Homo sapiens
  CDR3 for alpha chain variable domain of TCR clone 168053 (TRAV1-2, TRAJ16)
CAVNRFSDGPKLLF

SEQ ID NO: 336106 - protein, 13 aa, Homo sapiens
  CDR3 for beta chain variable domain of TCR clone 168053 (TRBV4-1, TRBJ2-1)
CASSQAGGDEQFF

SEQ ID NO: 336107 - protein, 13 aa, Homo sapiens
  CDR3 for alpha chain variable domain of TCR clone 168054 (TRAV3, TRAJ27)
CAVRPLGAGKSTF

SEQ ID NO: 336108 - protein, 13 aa, Homo sapiens
  CDR3 for beta chain variable domain of TCR clone 168054 (TRBV2, TRBJ2-5)
CASSDGIQETQYF

SEQ ID NO: 336109 - protein, 13 aa, Homo sapiens
  CDR3 for alpha chain variable domain of TCR clone 168055 (TRAV8-3, TRAJ12)
WVLRRDSSYKLIF

SEQ ID NO: 336110 - protein, 15 aa, Homo sapiens
  CDR3 for beta chain variable domain of TCR clone 168055 (TRBV6-5, TRBJ1-5)
CASSYSWGSNQPQHF

SEQ ID NO: 336111 - protein, 18 aa, Homo sapiens
  CDR3 for alpha chain variable domain of TCR clone 168056 (TRAV21, TRAJ52)
CAVRPSPAGGTSYGKLTF

SEQ ID NO: 336112 - protein, 17 aa, Homo sapiens
  CDR3 for beta chain variable domain of TCR clone 168056 (TRBV13, TRBJ2-3)
RASSLPRVAGGRNTQYF

SEQ ID NO: 336113 - protein, 13 aa, Homo sapiens
  CDR3 for alpha chain variable domain of TCR clone 168057 (TRAV27, TRAJ16)
CAGACSDGQKLLS

SEQ ID NO: 336114 - protein, 15 aa, Homo sapiens
  CDR3 for beta chain variable domain of TCR clone 168057 (TRBV28, TRBJ2-5)
CASSPPWSYQETQYF

SEQ ID NO: 336115 - protein, 15 aa, Homo sapiens
  CDR3 for alpha chain variable domain of TCR clone 168058 (TRAV25, TRAJ53)
CSTSNSGGSNYKLTL

SEQ ID NO: 336116 - protein, 14 aa, Homo sapiens
  CDR3 for beta chain variable domain of TCR clone 168058 (TRBV11-2, TRBJ2-3)
CASSRLARTDTQYF

SEQ ID NO: 336117 - protein, 14 aa, Homo sapiens
  CDR3 for alpha chain variable domain of TCR clone 168059 (TRAV2, TRAJ29)
CAVTPPSGNTPLVF

SEQ ID NO: 336118 - protein, 15 aa, Homo sapiens
  CDR3 for beta chain variable domain of TCR clone 168059 (TRBV19, TRBJ2-3)
CAAGDTNAPNDTQYF

SEQ ID NO: 336119 - protein, 15 aa, Homo sapiens
  CDR3 for alpha chain variable domain of TCR clone 168060 (TRAV38-1, TRAJ57)
CAFMDSQGGSEKLVF

SEQ ID NO: 336120 - protein, 16 aa, Homo sapiens
  CDR3 for beta chain variable domain of TCR clone 168060 (TRBV10-3, TRBJ2-1)
CAIRGGGRGDYNGQFF

SEQ ID NO: 336121 - protein, 13 aa, Homo sapiens
  CDR3 for alpha chain variable domain of TCR clone 168061 (TRAV16, TRAJ34)
CALSPYNTDKLIF

SEQ ID NO: 336122 - protein, 17 aa, Homo sapiens
  CDR3 for beta chain variable domain of TCR clone 168061 (TRBV5-1, TRBJ2-1)
CASSTGTSGYSYNERFF

SEQ ID NO: 336123 - protein, 14 aa, Homo sapiens
  CDR3 for alpha chain variable domain of TCR clone 168062 (TRAV12-2, TRAJ45)
CAVYSGGGADGLTF

SEQ ID NO: 336124 - protein, 17 aa, Homo sapiens
  CDR3 for beta chain variable domain of TCR clone 168062 (TRBV24-1, TRBJ2-1)
CATSDVSTSGTYNEQFF

SEQ ID NO: 336125 - protein, 15 aa, Homo sapiens
  CDR3 for alpha chain variable domain of TCR clone 168063 (TRAV8-4, TRAJ47)
CAVSDHEEYGNKLVF

SEQ ID NO: 336126 - protein, 15 aa, Homo sapiens
  CDR3 for beta chain variable domain of TCR clone 168063 (TRBV11-2, TRBJ2-1)
CASSLGPDSYNEQFF

SEQ ID NO: 336127 - protein, 15 aa, Homo sapiens
  CDR3 for alpha chain variable domain of TCR clone 168064 (TRAV12-3, TRAJ6)
CAMSATSGGSYIPTF

SEQ ID NO: 336128 - protein, 13 aa, Homo sapiens
  CDR3 for beta chain variable domain of TCR clone 168064 (TRBV7-9, TRBJ1-2)
CASSLKQNYSYTF

SEQ ID NO: 336129 - protein, 13 aa, Homo sapiens
  CDR3 for alpha chain variable domain of TCR clone 168065 (TRAV2, TRAJ40)
CAVVTSGTYKSIF

SEQ ID NO: 336130 - protein, 14 aa, Homo sapiens
  CDR3 for beta chain variable domain of TCR clone 168065 (TRBV28, TRBJ2-1)
CASSYYTAYNEQFF

SEQ ID NO: 336131 - protein, 17 aa, Homo sapiens
  CDR3 for alpha chain variable domain of TCR clone 168066 (TRAV3, TRAJ42)
CAVKDRDYGGSQGNLIF

SEQ ID NO: 336132 - protein, 12 aa, Homo sapiens
  CDR3 for beta chain variable domain of TCR clone 168066 (TRBV29-1, TRBJ2-2)
CSVDKYTGELFF

SEQ ID NO: 336133 - protein, 10 aa, Homo sapiens
  CDR3 for alpha chain variable domain of TCR clone 168067 (TRAV1-2, TRAJ20)
CACNDYKLSF

SEQ ID NO: 336134 - protein, 18 aa, Homo sapiens
  CDR3 for beta chain variable domain of TCR clone 168067 (TRBV11-2, TRBJ2-3)
CASSLGGASRGAPNTQYF

SEQ ID NO: 336135 - protein, 14 aa, Homo sapiens
  CDR3 for alpha chain variable domain of TCR clone 168068 (TRAV12-3, TRAJ28)
CAMWSGAGSYQLTF

SEQ ID NO: 336136 - protein, 14 aa, Homo sapiens
  CDR3 for beta chain variable domain of TCR clone 168068 (TRBV19, TRBJ1-5)
CASSLSGGSKPQHF

SEQ ID NO: 336137 - protein, 10 aa, Homo sapiens
  CDR3 for alpha chain variable domain of TCR clone 168069 (TRAV12-3, TRAJ43)
CNERSNDMRF

SEQ ID NO: 336138 - protein, 19 aa, Homo sapiens
  CDR3 for beta chain variable domain of TCR clone 168069 (TRBV28, TRBJ2-7)
CASSYSGTSRLGWVYEQYF

SEQ ID NO: 336139 - protein, 15 aa, Homo sapiens
  CDR3 for alpha chain variable domain of TCR clone 168070 (TRAV8-3, TRAJ45)
CASSYSGGGADGLTF

SEQ ID NO: 336140 - protein, 14 aa, Homo sapiens
  CDR3 for beta chain variable domain of TCR clone 168070 (TRBV7-9, TRBJ1-6)
CASSVMTDYSPLHF

SEQ ID NO: 336141 - protein, 14 aa, Homo sapiens
  CDR3 for alpha chain variable domain of TCR clone 168071 (TRAV2, TRAJ37)
CAVDFTSNTGKLIF

SEQ ID NO: 336142 - protein, 16 aa, Homo sapiens
  CDR3 for beta chain variable domain of TCR clone 168071 (TRBV7-8, TRBJ2-4)
CASSAERTLAKNIQYF

SEQ ID NO: 336143 - protein, 14 aa, Homo sapiens
  CDR3 for alpha chain variable domain of TCR clone 168072 (TRAV1-2, TRAJ16)
CAVIRFSDGQQLLF

SEQ ID NO: 336144 - protein, 15 aa, Homo sapiens
  CDR3 for beta chain variable domain of TCR clone 168072 (TRBV9, TRBJ1-6)
CASSVAGTGDSPLHF

SEQ ID NO: 336145 - protein, 13 aa, Homo sapiens
  CDR3 for alpha chain variable domain of TCR clone 168073 (TRAV26-1, TRAJ34)
CIVRPWITDKLIF

SEQ ID NO: 336146 - protein, 16 aa, Homo sapiens
  CDR3 for beta chain variable domain of TCR clone 168073 (TRBV28, TRBJ2-2)
CASSLEGGSNTGELFF

SEQ ID NO: 336147 - protein, 12 aa, Homo sapiens
  CDR3 for alpha chain variable domain of TCR clone 168074 (TRAV12-3, TRAJ31)
CAMSVPNARLMC

SEQ ID NO: 336148 - protein, 12 aa, Homo sapiens
  CDR3 for beta chain variable domain of TCR clone 168074 (TRBV11-2, TRBJ2-1)
CASSVQREGQFF

SEQ ID NO: 336149 - protein, 15 aa, Homo sapiens
  CDR3 for alpha chain variable domain of TCR clone 168075 (TRAV12-1, TRAJ44)
CVVFVNTGTASKLTF

SEQ ID NO: 336150 - protein, 16 aa, Homo sapiens
  CDR3 for beta chain variable domain of TCR clone 168075 (TRBV20-1, TRBJ2-5)
CSPGGTSGGYMETQYY

SEQ ID NO: 336151 - protein, 14 aa, Homo sapiens
  CDR3 for alpha chain variable domain of TCR clone 168076 (TRAV20, TRAJ4)
CAVRLGGGYNKLSF

SEQ ID NO: 336152 - protein, 21 aa, Homo sapiens
  CDR3 for beta chain variable domain of TCR clone 168076 (TRBV15, TRBJ2-1)
AWGTQPCTCVPPAEVDTARFF

SEQ ID NO: 336153 - protein, 12 aa, Homo sapiens
  CDR3 for alpha chain variable domain of TCR clone 168077 (TRAV16, TRAJ10)
CSRTGGGNKLTF

SEQ ID NO: 336154 - protein, 16 aa, Homo sapiens
  CDR3 for beta chain variable domain of TCR clone 168077 (TRBV28, TRBJ2-2)
CASSLEGGSNTGELFF

SEQ ID NO: 336155 - protein, 20 aa, Homo sapiens
  CDR3 for alpha chain variable domain of TCR clone 168078 (TRAV8-3, TRAJ45)
LSTSVLWGSYSGGGADGLTF

SEQ ID NO: 336156 - protein, 11 aa, Homo sapiens
  CDR3 for beta chain variable domain of TCR clone 168078 (TRBV20-1, TRBJ2-5)
CSADRAENQYF

SEQ ID NO: 336157 - protein, 13 aa, Homo sapiens
  CDR3 for alpha chain variable domain of TCR clone 168079 (TRAV1-2, TRAJ9)
CAALNTGCFKTIF

SEQ ID NO: 336158 - protein, 15 aa, Homo sapiens
  CDR3 for beta chain variable domain of TCR clone 168079 (TRBV6-3, TRBJ2-7)
CASRSPGTVFYEQYF

SEQ ID NO: 336159 - protein, 14 aa, Homo sapiens
  CDR3 for alpha chain variable domain of TCR clone 168080 (TRAV23/DV6, TRAJ22)
CAAISSGSARQLTF

SEQ ID NO: 336160 - protein, 16 aa, Homo sapiens
  CDR3 for beta chain variable domain of TCR clone 168080 (TRBV5-7, TRBJ2-5)
CASIRGQTGYQETQYF

SEQ ID NO: 336161 - protein, 15 aa, Homo sapiens
  CDR3 for alpha chain variable domain of TCR clone 168081 (TRAV26-2, TRAJ28)
CILVESGAGMYQLTF

SEQ ID NO: 336162 - protein, 16 aa, Homo sapiens
  CDR3 for beta chain variable domain of TCR clone 168081 (TRBV4-2, TRBJ1-2)
CASSQEIGGASYGYTF

SEQ ID NO: 336163 - protein, 12 aa, Homo sapiens
  CDR3 for alpha chain variable domain of TCR clone 168082 (TRAV4, TRAJ9)
CLVPTGGFKTIF

SEQ ID NO: 336164 - protein, 13 aa, Homo sapiens
  CDR3 for beta chain variable domain of TCR clone 168082 (TRBV20-1, TRBJ1-1)
CSARLGQGTEAFF

SEQ ID NO: 336165 - protein, 14 aa, Homo sapiens
  CDR3 for alpha chain variable domain of TCR clone 168083 (TRAV23/DV6, TRAJ17)
CAARGRAAGNKLTL

SEQ ID NO: 336166 - protein, 12 aa, Homo sapiens
  CDR3 for beta chain variable domain of TCR clone 168083 (TRBV7-9, TRBJ2-3)
CASSFITDTQYF

SEQ ID NO: 336167 - protein, 12 aa, Homo sapiens
  CDR3 for alpha chain variable domain of TCR clone 168084 (TRAV27, TRAJ13)
CAGAVGYQKVTF

SEQ ID NO: 336168 - protein, 15 aa, Homo sapiens
  CDR3 for beta chain variable domain of TCR clone 168084 (TRBV20-1, TRBJ2-6)
CSVRDRGPGANVLTF

SEQ ID NO: 336169 - protein, 13 aa, Homo sapiens
  CDR3 for alpha chain variable domain of TCR clone 168085 (TRAV8-3, TRAJ43)
CAVGPANNNDRRF

SEQ ID NO: 336170 - protein, 12 aa, Homo sapiens
  CDR3 for beta chain variable domain of TCR clone 168085 (TRBV7-2, TRBJ1-6)
CASSLSSSPLHF

SEQ ID NO: 336171 - protein, 16 aa, Homo sapiens
  CDR3 for alpha chain variable domain of TCR clone 168086 (TRAV26-1, TRAJ23)
CIVRPRFFNQGGKLIF

SEQ ID NO: 336172 - protein, 13 aa, Homo sapiens
  CDR3 for beta chain variable domain of TCR clone 168086 (TRBV20-1, TRBJ1-1)
CSARGGGNTEAFF

SEQ ID NO: 336173 - protein, 16 aa, Homo sapiens
  CDR3 for alpha chain variable domain of TCR clone 168087 (TRAV30, TRAJ24)
CGTEIVDADGWGKFQF

SEQ ID NO: 336174 - protein, 14 aa, Homo sapiens
  CDR3 for beta chain variable domain of TCR clone 168087 (TRBV7-2, TRBJ2-7)
CASSPKTSFHEQYF

SEQ ID NO: 336175 - protein, 12 aa, Homo sapiens
  CDR3 for alpha chain variable domain of TCR clone 168088 (TRAV13-1, TRAJ21)
CAAKEGFNKFYF

SEQ ID NO: 336176 - protein, 12 aa, Homo sapiens
  CDR3 for beta chain variable domain of TCR clone 168088 (TRBV7-3, TRBJ1-3)
CASSLGGNAMYF

SEQ ID NO: 336177 - protein, 18 aa, Homo sapiens
  CDR3 for alpha chain variable domain of TCR clone 168089 (TRAV21, TRAJ52)
CAVRPSPAGGTSCGKLTF

SEQ ID NO: 336178 - protein, 15 aa, Homo sapiens
  CDR3 for beta chain variable domain of TCR clone 168089 (TRBV5-1, TRBJ2-7)
CASSLNGGPAREQYF

SEQ ID NO: 336179 - protein, 19 aa, Homo sapiens
  CDR3 for alpha chain variable domain of TCR clone 168090 (TRAV12-1, TRAJ45)
CVVTHDVGYSGGGADGLTL

SEQ ID NO: 336180 - protein, 13 aa, Homo sapiens
  CDR3 for beta chain variable domain of TCR clone 168090 (TRBV7-3, TRBJ1-1)
CASSQDWGAEAFF

SEQ ID NO: 336181 - protein, 12 aa, Homo sapiens
  CDR3 for alpha chain variable domain of TCR clone 168091 (TRAV12-3, TRAJ17)
CAMTLTGNKLTF

SEQ ID NO: 336182 - protein, 16 aa, Homo sapiens
  CDR3 for beta chain variable domain of TCR clone 168091 (TRBV7-9, TRBJ2-7)
CASSNHGGQEKYEQYF

SEQ ID NO: 336183 - protein, 13 aa, Homo sapiens
  CDR3 for alpha chain variable domain of TCR clone 168092 (TRAV36/DV7, TRAJ37)
WAVFSSNTGKLIF

SEQ ID NO: 336184 - protein, 16 aa, Homo sapiens
  CDR3 for beta chain variable domain of TCR clone 168092 (TRBV3-1, TRBJ2-5)
CASSPGQFNGFGTQYF

SEQ ID NO: 336185 - protein, 13 aa, Homo sapiens
  CDR3 for alpha chain variable domain of TCR clone 168093 (TRAV21, TRAJ27)
CAARPGNAGKSTF

SEQ ID NO: 336186 - protein, 13 aa, Homo sapiens
  CDR3 for beta chain variable domain of TCR clone 168093 (TRBV18, TRBJ2-7)
CASQSGGGYEQYC

SEQ ID NO: 336187 - protein, 12 aa, Homo sapiens
  CDR3 for alpha chain variable domain of TCR clone 168094 (TRAV3, TRAJ39)
CAVIEWSNMLTF

SEQ ID NO: 336188 - protein, 14 aa, Homo sapiens
  CDR3 for beta chain variable domain of TCR clone 168094 (TRBV7-8, TRBJ2-3)
CASSFPDGQDTQCF

SEQ ID NO: 336189 - protein, 17 aa, Homo sapiens
  CDR3 for alpha chain variable domain of TCR clone 168095 (TRAV3, TRAJ6)
CAVRDGPGAGGRYIPTF

SEQ ID NO: 336190 - protein, 20 aa, Homo sapiens
  CDR3 for beta chain variable domain of TCR clone 168095 (TRBV28, TRBJ2-1)
CASTPIGRSPGLAGGNEQFF

SEQ ID NO: 336191 - protein, 13 aa, Homo sapiens
  CDR3 for alpha chain variable domain of TCR clone 168096 (TRAV21, TRAJ27)
CAARPGNAGKSTF

SEQ ID NO: 336192 - protein, 15 aa, Homo sapiens
  CDR3 for beta chain variable domain of TCR clone 168096 (TRBV5-1, TRBJ2-2)
CASSSQGGNTGELFF

SEQ ID NO: 336193 - protein, 15 aa, Homo sapiens
  CDR3 for alpha chain variable domain of TCR clone 168097 (TRAV12-2, TRAJ53)
CAVNGGGGSNYKLTF

SEQ ID NO: 336194 - protein, 13 aa, Homo sapiens
  CDR3 for beta chain variable domain of TCR clone 168097 (TRBV18, TRBJ2-7)
CSSPRGGAYEQYF

SEQ ID NO: 336195 - protein, 14 aa, Homo sapiens
  CDR3 for alpha chain variable domain of TCR clone 168098 (TRAV1-2, TRAJ16)
CAVNRFSDGQKLPF

SEQ ID NO: 336196 - protein, 17 aa, Homo sapiens
  CDR3 for beta chain variable domain of TCR clone 168098 (TRBV15, TRBJ1-2)
CATSGREIDVVNYGYTF

SEQ ID NO: 336197 - protein, 14 aa, Homo sapiens
  CDR3 for alpha chain variable domain of TCR clone 168099 (TRAV8-3, TRAJ23)
CAVIIYNQGGKLIF

SEQ ID NO: 336198 - protein, 15 aa, Homo sapiens
  CDR3 for beta chain variable domain of TCR clone 168099 (TRBV18, TRBJ2-1)
CASSSPSASYNEQFF

SEQ ID NO: 336199 - protein, 15 aa, Homo sapiens
  CDR3 for alpha chain variable domain of TCR clone 168100 (TRAV17, TRAJ56)
CATEPFTGANSKLTF

SEQ ID NO: 336200 - protein, 18 aa, Homo sapiens
  CDR3 for beta chain variable domain of TCR clone 168100 (TRBV28, TRBJ1-5)
CTSVPAVGQGGYVQPQHF

SEQ ID NO: 336201 - protein, 15 aa, Homo sapiens
  CDR3 for alpha chain variable domain of TCR clone 168101 (TRAV16, TRAJ53)
CALIDSGGSNYKLTF

SEQ ID NO: 336202 - protein, 13 aa, Homo sapiens
  CDR3 for beta chain variable domain of TCR clone 168101 (TRBV7-3, TRBJ1-1)
CASSQDWGAEAFF

SEQ ID NO: 336203 - protein, 15 aa, Homo sapiens
  CDR3 for alpha chain variable domain of TCR clone 168102 (TRAV12-1, TRAJ45)
CVVLSGGGGADGLTF

SEQ ID NO: 336204 - protein, 14 aa, Homo sapiens
  CDR3 for beta chain variable domain of TCR clone 168102 (TRBV18, TRBJ2-3)
CASSGLADTDTQYF

SEQ ID NO: 336205 - protein, 15 aa, Homo sapiens
  CDR3 for alpha chain variable domain of TCR clone 168103 (TRAV20, TRAJ53)
CVVQASGGSNYKLTF

SEQ ID NO: 336206 - protein, 12 aa, Homo sapiens
  CDR3 for beta chain variable domain of TCR clone 168103 (TRBV7-6, TRBJ2-5)
CASSLSQETQYF

SEQ ID NO: 336207 - protein, 17 aa, Homo sapiens
  CDR3 for alpha chain variable domain of TCR clone 168104 (TRAV1-2, TRAJ27)
CAVRDKTGDTNAGKSTF

SEQ ID NO: 336208 - protein, 15 aa, Homo sapiens
  CDR3 for beta chain variable domain of TCR clone 168104 (TRBV9, TRBJ1-6)
CASSVAGTGDSPLHF

SEQ ID NO: 336209 - protein, 14 aa, Homo sapiens
  CDR3 for alpha chain variable domain of TCR clone 168105 (TRAV20, TRAJ13)
CAVLNSGGYQKVTF

SEQ ID NO: 336210 - protein, 14 aa, Homo sapiens
  CDR3 for beta chain variable domain of TCR clone 168105 (TRBV7-2, TRBJ1-1)
CASSFLTGTTEAFC

SEQ ID NO: 336211 - protein, 15 aa, Homo sapiens
  CDR3 for alpha chain variable domain of TCR clone 168106 (TRAV8-6, TRAJ10)
CAVSDQAGGGNKLTL

SEQ ID NO: 336212 - protein, 13 aa, Homo sapiens
  CDR3 for beta chain variable domain of TCR clone 168106 (TRBV10-2, TRBJ2-3)
CASSESGDHTQYF

SEQ ID NO: 336213 - protein, 20 aa, Homo sapiens
  CDR3 for alpha chain variable domain of TCR clone 168107 (TRAV25, TRAJ21)
TATQTTDVGTYPLSFNKFYF

SEQ ID NO: 336214 - protein, 15 aa, Homo sapiens
  CDR3 for beta chain variable domain of TCR clone 168107 (TRBV10-3, TRBJ2-1)
CATNGGPGQGDEQFF

SEQ ID NO: 336215 - protein, 13 aa, Homo sapiens
  CDR3 for alpha chain variable domain of TCR clone 168108 (TRAV2, TRAJ5)
CAVPDTGREHLLL

SEQ ID NO: 336216 - protein, 15 aa, Homo sapiens
  CDR3 for beta chain variable domain of TCR clone 168108 (TRBV7-2, TRBJ2-2)
CASSTRTGYTGELFF

SEQ ID NO: 336217 - protein, 15 aa, Homo sapiens
  CDR3 for alpha chain variable domain of TCR clone 168109 (TRAV2, TRAJ9)
CAVAALNTGGFKTSF

SEQ ID NO: 336218 - protein, 14 aa, Homo sapiens
  CDR3 for beta chain variable domain of TCR clone 168109 (TRBV7-8, TRBJ2-5)
CASSATGGQETQYF

SEQ ID NO: 336219 - protein, 12 aa, Homo sapiens
  CDR3 for alpha chain variable domain of TCR clone 168110 (TRAV12-3, TRAJ53)
CAMKGSNYKLTF

SEQ ID NO: 336220 - protein, 11 aa, Homo sapiens
  CDR3 for beta chain variable domain of TCR clone 168110 (TRBV7-6, TRBJ2-7)
CASSQGSEQYF

SEQ ID NO: 336221 - protein, 11 aa, Homo sapiens
  CDR3 for alpha chain variable domain of TCR clone 168111 (TRAV2, TRAJ13)
CASGGYQKVTL

SEQ ID NO: 336222 - protein, 16 aa, Homo sapiens
  CDR3 for beta chain variable domain of TCR clone 168111 (TRBV19, TRBJ2-1)
CASSMGGGSSYNEQFF

SEQ ID NO: 336223 - protein, 13 aa, Homo sapiens
  CDR3 for alpha chain variable domain of TCR clone 168112 (TRAV14/DV4, TRAJ23)
GAMREVKGGKLIF

SEQ ID NO: 336224 - protein, 15 aa, Homo sapiens
  CDR3 for beta chain variable domain of TCR clone 168112 (TRBV6-3, TRBJ2-1)
CASSYASDSYNEQFF

SEQ ID NO: 336225 - protein, 14 aa, Homo sapiens
  CDR3 for alpha chain variable domain of TCR clone 168113 (TRAV26-2, TRAJ11)
CIPRLNSGYSTLTF

SEQ ID NO: 336226 - protein, 15 aa, Homo sapiens
  CDR3 for beta chain variable domain of TCR clone 168113 (TRBV19, TRBJ1-2)
CASSVGQVLNYGYTF

SEQ ID NO: 336227 - protein, 15 aa, Homo sapiens
  CDR3 for alpha chain variable domain of TCR clone 168114 (TRAV13-2, TRAJ10)
CAENRDTGGGNKLTF

SEQ ID NO: 336228 - protein, 16 aa, Homo sapiens
  CDR3 for beta chain variable domain of TCR clone 168114 (TRBV2, TRBJ1-3)
CASSRTGGSTGNTMYL

SEQ ID NO: 336229 - protein, 14 aa, Homo sapiens
  CDR3 for alpha chain variable domain of TCR clone 168115 (TRAV26-1, TRAJ49)
CIVRPSNTGNQFYF

SEQ ID NO: 336230 - protein, 15 aa, Homo sapiens
  CDR3 for beta chain variable domain of TCR clone 168115 (TRBV19, TRBJ1-1)
CASMGCRDVNTEAFF

SEQ ID NO: 336231 - protein, 11 aa, Homo sapiens
  CDR3 for alpha chain variable domain of TCR clone 168116 (TRAV35, TRAJ30)
CAGPGDDKIIF

SEQ ID NO: 336232 - protein, 15 aa, Homo sapiens
  CDR3 for beta chain variable domain of TCR clone 168116 (TRBV4-1, TRBJ2-7)
CASSQQGQGFDEQYF

SEQ ID NO: 336233 - protein, 16 aa, Homo sapiens
  CDR3 for alpha chain variable domain of TCR clone 168117 (TRAV23/DV6, TRAJ9)
CAASIGGNTGGFKTIF

SEQ ID NO: 336234 - protein, 13 aa, Homo sapiens
  CDR3 for beta chain variable domain of TCR clone 168117 (TRBV5-4, TRBJ1-1)
CASSVDLGTEAFF

SEQ ID NO: 336235 - protein, 14 aa, Homo sapiens
  CDR3 for alpha chain variable domain of TCR clone 168118 (TRAV12-2, TRAJ13)
CVVKKTGGYQKVNF

SEQ ID NO: 336236 - protein, 15 aa, Homo sapiens
  CDR3 for beta chain variable domain of TCR clone 168118 (TRBV27, TRBJ2-1)
CASSNGGGSSNEQFF

SEQ ID NO: 336237 - protein, 15 aa, Homo sapiens
  CDR3 for alpha chain variable domain of TCR clone 168119 (TRAV23/DV6, TRAJ18)
CAARYRGSTLGRLYF

SEQ ID NO: 336238 - protein, 15 aa, Homo sapiens
  CDR3 for beta chain variable domain of TCR clone 168119 (TRBV7-8, TRBJ2-1)
CVSSLADSLYNEQFF

SEQ ID NO: 336239 - protein, 15 aa, Homo sapiens
  CDR3 for alpha chain variable domain of TCR clone 168120 (TRAV2, TRAJ15)
CAVGDRGQAGTSLIF

SEQ ID NO: 336240 - protein, 13 aa, Homo sapiens
  CDR3 for beta chain variable domain of TCR clone 168120 (TRBV10-2, TRBJ2-7)
CASGASGGYEQYF

SEQ ID NO: 336241 - protein, 12 aa, Homo sapiens
  CDR3 for alpha chain variable domain of TCR clone 168121 (TRAV12-1, TRAJ40)
CVVYSGTYKYIF

SEQ ID NO: 336242 - protein, 14 aa, Homo sapiens
  CDR3 for beta chain variable domain of TCR clone 168121 (TRBV7-9, TRBJ2-5)
CTSSLDTAQETQYF

SEQ ID NO: 336243 - protein, 15 aa, Homo sapiens
  CDR3 for alpha chain variable domain of TCR clone 168122 (TRAV25, TRAJ41)
CAGPWNSNSGYALNF

SEQ ID NO: 336244 - protein, 13 aa, Homo sapiens
  CDR3 for beta chain variable domain of TCR clone 168122 (TRBV12-4, TRBJ2-2)
CASSITGSGELFF

SEQ ID NO: 336245 - protein, 15 aa, Homo sapiens
  CDR3 for alpha chain variable domain of TCR clone 168123 (TRAV8-4, TRAJ3)
CAVTGENLVQQCFQD

SEQ ID NO: 336246 - protein, 16 aa, Homo sapiens
  CDR3 for beta chain variable domain of TCR clone 168123 (TRBV4-2, TRBJ1-1)
CDSSQAGFGMNTEAFF

SEQ ID NO: 336247 - protein, 11 aa, Homo sapiens
  CDR3 for alpha chain variable domain of TCR clone 168124 (TRAV2, TRAJ13)
CASGGYQKVTF

SEQ ID NO: 336248 - protein, 11 aa, Homo sapiens
  CDR3 for beta chain variable domain of TCR clone 168124 (TRBV12-4, TRBJ2-7)
CATPEKGEQYF

SEQ ID NO: 336249 - protein, 14 aa, Homo sapiens
  CDR3 for alpha chain variable domain of TCR clone 168125 (TRAV8-1, TRAJ39)
CAVNASNAGNMLTF

SEQ ID NO: 336250 - protein, 15 aa, Homo sapiens
  CDR3 for beta chain variable domain of TCR clone 168125 (TRBV11-2, TRBJ2-1)
CASSLGPDSYNEQFF

SEQ ID NO: 336251 - protein, 15 aa, Homo sapiens
  CDR3 for alpha chain variable domain of TCR clone 168126 (TRAV12-2, TRAJ53)
CAVNGGGGSNYKLTF

SEQ ID NO: 336252 - protein, 17 aa, Homo sapiens
  CDR3 for beta chain variable domain of TCR clone 168126 (TRBV7-3, TRBJ2-3)
CASSLMQRMRGADTQYF

SEQ ID NO: 336253 - protein, 14 aa, Homo sapiens
  CDR3 for alpha chain variable domain of TCR clone 168127 (TRAV12-2, TRAJ17)
CGVLFKAAGNKLTF

SEQ ID NO: 336254 - protein, 14 aa, Homo sapiens
  CDR3 for beta chain variable domain of TCR clone 168127 (TRBV12-5, TRBJ2-5)
CASGSRTHQETQYF

SEQ ID NO: 336255 - protein, 13 aa, Homo sapiens
  CDR3 for alpha chain variable domain of TCR clone 168128 (TRAV3, TRAJ21)
CAVGEPDFNKFYF

SEQ ID NO: 336256 - protein, 15 aa, Homo sapiens
  CDR3 for beta chain variable domain of TCR clone 168128 (TRBV4-3, TRBJ2-2)
CASSQGQGGTGELFF

SEQ ID NO: 336257 - protein, 12 aa, Homo sapiens
  CDR3 for alpha chain variable domain of TCR clone 168129 (TRAV4, TRAJ6)
CLAPGGSYIPTF

SEQ ID NO: 336258 - protein, 17 aa, Homo sapiens
  CDR3 for beta chain variable domain of TCR clone 168129 (TRBV13, TRBJ2-3)
CASSLTRVAGGRNTQYF

SEQ ID NO: 336259 - protein, 13 aa, Homo sapiens
  CDR3 for alpha chain variable domain of TCR clone 168130 (TRAV23/DV6, TRAJ16)
CAASISDVQKLLF

SEQ ID NO: 336260 - protein, 15 aa, Homo sapiens
  CDR3 for beta chain variable domain of TCR clone 168130 (TRBV7-2, TRBJ2-5)
CASSLGLGGLETQYF

SEQ ID NO: 336261 - protein, 14 aa, Homo sapiens
  CDR3 for alpha chain variable domain of TCR clone 168131 (TRAV16, TRAJ39)
CAVSKNNAGNMLTF

SEQ ID NO: 336262 - protein, 16 aa, Homo sapiens
  CDR3 for beta chain variable domain of TCR clone 168131 (TRBV6-6, TRBJ2-1)
CASSYSFSGSYNEQFF

SEQ ID NO: 336263 - protein, 14 aa, Homo sapiens
  CDR3 for alpha chain variable domain of TCR clone 168132 (TRAV20, TRAJ42)
CALQAGGSQGNLIF

SEQ ID NO: 336264 - protein, 14 aa, Homo sapiens
  CDR3 for beta chain variable domain of TCR clone 168132 (TRBV28, TRBJ1-2)
CASMIQGANYGYTF

SEQ ID NO: 336265 - protein, 14 aa, Homo sapiens
  CDR3 for alpha chain variable domain of TCR clone 168133 (TRAV17, TRAJ16)
CATADFSDGQKLLF

SEQ ID NO: 336266 - protein, 15 aa, Homo sapiens
  CDR3 for beta chain variable domain of TCR clone 168133 (TRBV7-3, TRBJ2-1)
CASSPTGGGEVEQFF

SEQ ID NO: 336267 - protein, 16 aa, Homo sapiens
  CDR3 for alpha chain variable domain of TCR clone 168134 (TRAV3, TRAJ10)
CAVRDMRAGGGNKLTF

SEQ ID NO: 336268 - protein, 13 aa, Homo sapiens
  CDR3 for beta chain variable domain of TCR clone 168134 (TRBV28, TRBJ2-7)
CASSLPSRYEQYF

SEQ ID NO: 336269 - protein, 13 aa, Homo sapiens
  CDR3 for alpha chain variable domain of TCR clone 168135 (TRAV21, TRAJ27)
CAARPGNAGKSTF

SEQ ID NO: 336270 - protein, 15 aa, Homo sapiens
  CDR3 for beta chain variable domain of TCR clone 168135 (TRBV2, TRBJ2-3)
CSSSDAGGPPDTQYF

SEQ ID NO: 336271 - protein, 14 aa, Homo sapiens
  CDR3 for alpha chain variable domain of TCR clone 168136 (TRAV23/DV6, TRAJ4)
CAANLFGGYNKLLF

SEQ ID NO: 336272 - protein, 11 aa, Homo sapiens
  CDR3 for beta chain variable domain of TCR clone 168136 (TRBV7-9, TRBJ2-3)
CASSPTDTQYF

SEQ ID NO: 336273 - protein, 14 aa, Homo sapiens
  CDR3 for alpha chain variable domain of TCR clone 168137 (TRAV1-2, TRAJ8)
CAVREDTGFQKLVF

SEQ ID NO: 336274 - protein, 11 aa, Homo sapiens
  CDR3 for beta chain variable domain of TCR clone 168137 (TRBV29-1, TRBJ1-4)
CSVSSGENLFF

SEQ ID NO: 336275 - protein, 13 aa, Homo sapiens
  CDR3 for alpha chain variable domain of TCR clone 168138 (TRAV8-6, TRAJ49)
CAVITNTGNQFYF

SEQ ID NO: 336276 - protein, 13 aa, Homo sapiens
  CDR3 for beta chain variable domain of TCR clone 168138 (TRBV19, TRBJ2-7)
CASRKAGGSEQYF

SEQ ID NO: 336277 - protein, 14 aa, Homo sapiens
  CDR3 for alpha chain variable domain of TCR clone 168139 (TRAV13-2, TRAJ22)
CADGTVGSARQLTF

SEQ ID NO: 336278 - protein, 16 aa, Homo sapiens
  CDR3 for beta chain variable domain of TCR clone 168139 (TRBV19, TRBJ2-1)
CASSSKGTRSYNEQFF

SEQ ID NO: 336279 - protein, 15 aa, Homo sapiens
  CDR3 for alpha chain variable domain of TCR clone 168140 (TRAV38-2/DV8, TRAJ47)
CAYRSAKGYGNKLVF

SEQ ID NO: 336280 - protein, 13 aa, Homo sapiens
  CDR3 for beta chain variable domain of TCR clone 168140 (TRBV12-4, TRBJ1-2)
CASSLRQGKGDTF

SEQ ID NO: 336281 - protein, 14 aa, Homo sapiens
  CDR3 for alpha chain variable domain of TCR clone 168141 (TRAV13-1, TRAJ39)
CAASKNNAGNMFTF

SEQ ID NO: 336282 - protein, 15 aa, Homo sapiens
  CDR3 for beta chain variable domain of TCR clone 168141 (TRBV7-9, TRBJ1-6)
CASSSPGRGNSPLHF

SEQ ID NO: 336283 - protein, 18 aa, Homo sapiens
  CDR3 for alpha chain variable domain of TCR clone 168142 (TRAV40, TRAJ42)
SSGSRLLNYGGSQGNLIF

SEQ ID NO: 336284 - protein, 14 aa, Homo sapiens
  CDR3 for beta chain variable domain of TCR clone 168142 (TRBV11-3, TRBJ1-2)
CASSRQGANYGDTF

SEQ ID NO: 336285 - protein, 15 aa, Homo sapiens
  CDR3 for alpha chain variable domain of TCR clone 168143 (TRAV27, TRAJ45)
CRSPQSGGGADGFTF

SEQ ID NO: 336286 - protein, 12 aa, Homo sapiens
  CDR3 for beta chain variable domain of TCR clone 168143 (TRBV24-1, TRBJ2-7)
CATSDPGYEQYF

SEQ ID NO: 336287 - protein, 17 aa, Homo sapiens
  CDR3 for alpha chain variable domain of TCR clone 168144 (TRAV1-1, TRAJ32)
CAVRVNELWWCYKQAHL

SEQ ID NO: 336288 - protein, 12 aa, Homo sapiens
  CDR3 for beta chain variable domain of TCR clone 168144 (TRBV7-8, TRBJ2-1)
CASSLGHNEQFF

SEQ ID NO: 336289 - protein, 14 aa, Homo sapiens
  CDR3 for alpha chain variable domain of TCR clone 168145 (TRAV41, TRAJ57)
CAVLLQCGSEKLVF

SEQ ID NO: 336290 - protein, 12 aa, Homo sapiens
  CDR3 for beta chain variable domain of TCR clone 168145 (TRBV10-3, TRBJ1-1)
CATMDRPPEAFF

SEQ ID NO: 336291 - protein, 13 aa, Homo sapiens
  CDR3 for alpha chain variable domain of TCR clone 168146 (TRAV21, TRAJ27)
CAARPGHAGKSTL

SEQ ID NO: 336292 - protein, 14 aa, Homo sapiens
  CDR3 for beta chain variable domain of TCR clone 168146 (TRBV7-6, TRBJ2-3)
CASSLGTVTDTQYF

SEQ ID NO: 336293 - protein, 16 aa, Homo sapiens
  CDR3 for alpha chain variable domain of TCR clone 168147 (TRAV30, TRAJ24)
CGTEIVDADSWGKFRF

SEQ ID NO: 336294 - protein, 14 aa, Homo sapiens
  CDR3 for beta chain variable domain of TCR clone 168147 (TRBV12-5, TRBJ2-5)
CASGARTHQETQYF

SEQ ID NO: 336295 - protein, 17 aa, Homo sapiens
  CDR3 for alpha chain variable domain of TCR clone 168148 (TRAV12-3, TRAJ52)
CNEPTNAGGTSYGKLTF

SEQ ID NO: 336296 - protein, 13 aa, Homo sapiens
  CDR3 for beta chain variable domain of TCR clone 168148 (TRBV10-3, TRBJ1-2)
CAINADLNYGYTF

SEQ ID NO: 336297 - protein, 15 aa, Homo sapiens
  CDR3 for alpha chain variable domain of TCR clone 168149 (TRAV14/DV4, TRAJ26)
CAMREGQNYGQNFVF

SEQ ID NO: 336298 - protein, 13 aa, Homo sapiens
  CDR3 for beta chain variable domain of TCR clone 168149 (TRBV7-9, TRBJ1-2)
CASSLKQNYGYTF

SEQ ID NO: 336299 - protein, 18 aa, Homo sapiens
  CDR3 for alpha chain variable domain of TCR clone 168150 (TRAV21, TRAJ52)
CAVRPSPAGGTSYGKLTF

SEQ ID NO: 336300 - protein, 17 aa, Homo sapiens
  CDR3 for beta chain variable domain of TCR clone 168150 (TRBV13, TRBJ2-3)
CARSLSRVAGGRSTQYF

SEQ ID NO: 336301 - protein, 14 aa, Homo sapiens
  CDR3 for alpha chain variable domain of TCR clone 168151 (TRAV12-2, TRAJ6)
CASKWGGGSYIPTF

SEQ ID NO: 336302 - protein, 14 aa, Homo sapiens
  CDR3 for beta chain variable domain of TCR clone 168151 (TRBV5-1, TRBJ1-1)
CASSLQGASTEAFF

SEQ ID NO: 336303 - protein, 13 aa, Homo sapiens
  CDR3 for alpha chain variable domain of TCR clone 168152 (TRAV12-2, TRAJ15)
CAVFNQAGTALIF

SEQ ID NO: 336304 - protein, 13 aa, Homo sapiens
  CDR3 for beta chain variable domain of TCR clone 168152 (TRBV12-4, TRBJ1-2)
CASSSGLTVISTF

SEQ ID NO: 336305 - protein, 13 aa, Homo sapiens
  CDR3 for alpha chain variable domain of TCR clone 168153 (TRAV1-2, TRAJ9)
CAALNTAGFKTIF

SEQ ID NO: 336306 - protein, 20 aa, Homo sapiens
  CDR3 for beta chain variable domain of TCR clone 168153 (TRBV28, TRBJ2-1)
CASTPIGRSPGLAGGNEQFF

SEQ ID NO: 336307 - protein, 14 aa, Homo sapiens
  CDR3 for alpha chain variable domain of TCR clone 168154 (TRAV12-1, TRAJ12)
CVVTRMDSSYKLIF

SEQ ID NO: 336308 - protein, 15 aa, Homo sapiens
  CDR3 for beta chain variable domain of TCR clone 168154 (TRBV6-3, TRBJ2-7)
CASSSPGTVFYEQYF

SEQ ID NO: 336309 - protein, 13 aa, Homo sapiens
  CDR3 for alpha chain variable domain of TCR clone 168155 (TRAV12-1, TRAJ40)
CVVKEAGTYKYIF

SEQ ID NO: 336310 - protein, 15 aa, Homo sapiens
  CDR3 for beta chain variable domain of TCR clone 168155 (TRBV9, TRBJ1-6)
CASSVAGTGDSPLHF

SEQ ID NO: 336311 - protein, 14 aa, Homo sapiens
  CDR3 for alpha chain variable domain of TCR clone 168156 (TRAV2, TRAJ29)
CAVTPPSGNTPLVF

SEQ ID NO: 336312 - protein, 15 aa, Homo sapiens
  CDR3 for beta chain variable domain of TCR clone 168156 (TRBV7-3, TRBJ2-1)
CASSLAGAGADEQFF

SEQ ID NO: 336313 - protein, 15 aa, Homo sapiens
  CDR3 for alpha chain variable domain of TCR clone 168157 (TRAV8-3, TRAJ11)
CAVGLLNSGYSTLTP

SEQ ID NO: 336314 - protein, 16 aa, Homo sapiens
  CDR3 for beta chain variable domain of TCR clone 168157 (TRBV7-9, TRBJ1-2)
CASSLGFSSGEDGYTF

SEQ ID NO: 336315 - protein, 14 aa, Homo sapiens
  CDR3 for alpha chain variable domain of TCR clone 168158 (TRAV3, TRAJ9)
CAVRLNTGGFKTIF

SEQ ID NO: 336316 - protein, 15 aa, Homo sapiens
  CDR3 for beta chain variable domain of TCR clone 168158 (TRBV7-2, TRBJ1-2)
CASSLARRSIYGDTF

SEQ ID NO: 336317 - protein, 12 aa, Homo sapiens
  CDR3 for alpha chain variable domain of TCR clone 168159 (TRAV12-3, TRAJ17)
CAMTLTGNKLTF

SEQ ID NO: 336318 - protein, 15 aa, Homo sapiens
  CDR3 for beta chain variable domain of TCR clone 168159 (TRBV20-1, TRBJ2-7)
CSASDRVYGMDEQYF

SEQ ID NO: 336319 - protein, 15 aa, Homo sapiens
  CDR3 for alpha chain variable domain of TCR clone 168160 (TRAV27, TRAJ38)
CAARRNAGNNRKLIW

SEQ ID NO: 336320 - protein, 13 aa, Homo sapiens
  CDR3 for beta chain variable domain of TCR clone 168160 (TRBV10-3, TRBJ2-7)
CASKLAVKYEQYF

SEQ ID NO: 336321 - protein, 14 aa, Homo sapiens
  CDR3 for alpha chain variable domain of TCR clone 168161 (TRAV38-1, TRAJ45)
CAYYSGGGADGLTF

SEQ ID NO: 336322 - protein, 15 aa, Homo sapiens
  CDR3 for beta chain variable domain of TCR clone 168161 (TRBV11-2, TRBJ2-1)
CASGKNRGLIYEQFF

SEQ ID NO: 336323 - protein, 11 aa, Homo sapiens
  CDR3 for alpha chain variable domain of TCR clone 168162 (TRAV13-2, TRAJ43)
CAENEDIRFGA

SEQ ID NO: 336324 - protein, 15 aa, Homo sapiens
  CDR3 for beta chain variable domain of TCR clone 168162 (TRBV20-1, TRBJ2-7)
CSARREAGAPREQYF

SEQ ID NO: 336325 - protein, 12 aa, Homo sapiens
  CDR3 for alpha chain variable domain of TCR clone 168163 (TRAV17, TRAJ53)
CGGGGSNYKLTF

SEQ ID NO: 336326 - protein, 16 aa, Homo sapiens
  CDR3 for beta chain variable domain of TCR clone 168163 (TRBV11-2, TRBJ2-3)
CASSFQGRGALDTQYF

SEQ ID NO: 336327 - protein, 15 aa, Homo sapiens
  CDR3 for alpha chain variable domain of TCR clone 168164 (TRAV23/DV6, TRAJ42)
CAARGYGGSQGNLIF

SEQ ID NO: 336328 - protein, 17 aa, Homo sapiens
  CDR3 for beta chain variable domain of TCR clone 168164 (TRBV7-3, TRBJ2-3)
CASSLMKRMRGADTQYF

SEQ ID NO: 336329 - protein, 12 aa, Homo sapiens
  CDR3 for alpha chain variable domain of TCR clone 168165 (TRAV8-3, TRAJ20)
CAVGANDYKLSF

SEQ ID NO: 336330 - protein, 15 aa, Homo sapiens
  CDR3 for beta chain variable domain of TCR clone 168165 (TRBV27, TRBJ1-5)
CASSLGTGFDQPQHF

SEQ ID NO: 336331 - protein, 15 aa, Homo sapiens
  CDR3 for alpha chain variable domain of TCR clone 168166 (TRAV12-3, TRAJ47)
CAMSALVEYGNKLVF

SEQ ID NO: 336332 - protein, 15 aa, Homo sapiens
  CDR3 for beta chain variable domain of TCR clone 168166 (TRBV24-1, TRBJ2-4)
CATSDPRDRANIQYF

SEQ ID NO: 336333 - protein, 15 aa, Homo sapiens
  CDR3 for alpha chain variable domain of TCR clone 168167 (TRAV12-3, TRAJ13)
CAMSARSGGYQKVTF

SEQ ID NO: 336334 - protein, 18 aa, Homo sapiens
  CDR3 for beta chain variable domain of TCR clone 168167 (TRBV3-1, TRBJ2-7)
CASSQDGGGRSWHYEQYF

SEQ ID NO: 336335 - protein, 14 aa, Homo sapiens
  CDR3 for alpha chain variable domain of TCR clone 168168 (TRAV12-2, TRAJ5)
CAVNRSTGRRALTF

SEQ ID NO: 336336 - protein, 14 aa, Homo sapiens
  CDR3 for beta chain variable domain of TCR clone 168168 (TRBV7-9, TRBJ2-2)
CASSLVQDTGELFF

SEQ ID NO: 336337 - protein, 19 aa, Homo sapiens
  CDR3 for alpha chain variable domain of TCR clone 168169 (TRAV2, TRAJ20)
ILQVREADAAVYRDCKLSF

SEQ ID NO: 336338 - protein, 13 aa, Homo sapiens
  CDR3 for beta chain variable domain of TCR clone 168169 (TRBV7-9, TRBJ2-5)
CASLPSRRETQYF

SEQ ID NO: 336339 - protein, 14 aa, Homo sapiens
  CDR3 for alpha chain variable domain of TCR clone 168170 (TRAV12-3, TRAJ10)
SHLPLTEGGNKLTF

SEQ ID NO: 336340 - protein, 12 aa, Homo sapiens
  CDR3 for beta chain variable domain of TCR clone 168170 (TRBV11-2, TRBJ2-4)
CASSSASGSEYF

SEQ ID NO: 336341 - protein, 12 aa, Homo sapiens
  CDR3 for alpha chain variable domain of TCR clone 168171 (TRAV20, TRAJ33)
CAVRGSNYQLIW

SEQ ID NO: 336342 - protein, 13 aa, Homo sapiens
  CDR3 for beta chain variable domain of TCR clone 168171 (TRBV4-3, TRBJ1-1)
CASSPTGNTESFF

SEQ ID NO: 336343 - protein, 14 aa, Homo sapiens
  CDR3 for alpha chain variable domain of TCR clone 168172 (TRAV13-1, TRAJ26)
CAASSTHYGQNFVF

SEQ ID NO: 336344 - protein, 14 aa, Homo sapiens
  CDR3 for beta chain variable domain of TCR clone 168172 (TRBV19, TRBJ2-1)
CASPTFVLSGEQFF

SEQ ID NO: 336345 - protein, 15 aa, Homo sapiens
  CDR3 for alpha chain variable domain of TCR clone 168173 (TRAV27, TRAJ50)
CAGRERGTSYDKVLF

SEQ ID NO: 336346 - protein, 16 aa, Homo sapiens
  CDR3 for beta chain variable domain of TCR clone 168173 (TRBV10-3, TRBJ1-5)
CAISDQVGAPNQPQHF

SEQ ID NO: 336347 - protein, 14 aa, Homo sapiens
  CDR3 for alpha chain variable domain of TCR clone 168174 (TRAV23/DV6, TRAJ26)
CAPPCGNYGQNFVF

SEQ ID NO: 336348 - protein, 16 aa, Homo sapiens
  CDR3 for beta chain variable domain of TCR clone 168174 (TRBV7-6, TRBJ2-2)
CASSPGLADYIGELFF

SEQ ID NO: 336349 - protein, 15 aa, Homo sapiens
  CDR3 for alpha chain variable domain of TCR clone 168175 (TRAV3, TRAJ15)
CAVRPANQAGTALIF

SEQ ID NO: 336350 - protein, 15 aa, Homo sapiens
  CDR3 for beta chain variable domain of TCR clone 168175 (TRBV7-7, TRBJ1-3)
CASSQGEHSGNTIDF

SEQ ID NO: 336351 - protein, 15 aa, Homo sapiens
  CDR3 for alpha chain variable domain of TCR clone 168176 (TRAV13-1, TRAJ17)
CAASIERAAGNKLTF

SEQ ID NO: 336352 - protein, 13 aa, Homo sapiens
  CDR3 for beta chain variable domain of TCR clone 168176 (TRBV7-3, TRBJ2-1)
CASSLDSYNEQFF

SEQ ID NO: 336353 - protein, 18 aa, Homo sapiens
  CDR3 for alpha chain variable domain of TCR clone 168177 (TRAV21, TRAJ52)
CAGRPSPAGGTSHGKLTF

SEQ ID NO: 336354 - protein, 17 aa, Homo sapiens
  CDR3 for beta chain variable domain of TCR clone 168177 (TRBV13, TRBJ2-3)
CASSLSRVAGGRNTQYF

SEQ ID NO: 336355 - protein, 16 aa, Homo sapiens
  CDR3 for alpha chain variable domain of TCR clone 168178 (TRAV35, TRAJ28)
CAGQRYSGAGSYQLTF

SEQ ID NO: 336356 - protein, 16 aa, Homo sapiens
  CDR3 for beta chain variable domain of TCR clone 168178 (TRBV24-1, TRBJ2-3)
CATSDPGTGATDTQYF

SEQ ID NO: 336357 - protein, 14 aa, Homo sapiens
  CDR3 for alpha chain variable domain of TCR clone 168179 (TRAV23/DV6, TRAJ40)
CAASTTSGTYKYIF

SEQ ID NO: 336358 - protein, 14 aa, Homo sapiens
  CDR3 for beta chain variable domain of TCR clone 168179 (TRBV12-5, TRBJ2-5)
CASGSRTHQETQYF

SEQ ID NO: 336359 - protein, 14 aa, Homo sapiens
  CDR3 for alpha chain variable domain of TCR clone 168180 (TRAV1-2, TRAJ16)
CAVNRFSDGKKLLF

SEQ ID NO: 336360 - protein, 14 aa, Homo sapiens
  CDR3 for beta chain variable domain of TCR clone 168180 (TRBV7-2, TRBJ2-7)
CASSLYPGRYEQYF

SEQ ID NO: 336361 - protein, 15 aa, Homo sapiens
  CDR3 for alpha chain variable domain of TCR clone 168181 (TRAV21, TRAJ53)
CATLNSGGSNYKLTF

SEQ ID NO: 336362 - protein, 16 aa, Homo sapiens
  CDR3 for beta chain variable domain of TCR clone 168181 (TRBV4-2, TRBJ1-1)
CASSQAGFGMNTEAFF

SEQ ID NO: 336363 - protein, 16 aa, Homo sapiens
  CDR3 for alpha chain variable domain of TCR clone 168182 (TRAV36/DV7, TRAJ33)
WRPGNKVQDINYQLIW

SEQ ID NO: 336364 - protein, 15 aa, Homo sapiens
  CDR3 for beta chain variable domain of TCR clone 168182 (TRBV29-1, TRBJ2-1)
CSVGRHALFYNEQFF

SEQ ID NO: 336365 - protein, 17 aa, Homo sapiens
  CDR3 for alpha chain variable domain of TCR clone 168183 (TRAV3, TRAJ6)
CAVRDGPRAGGSYIPTF

SEQ ID NO: 336366 - protein, 11 aa, Homo sapiens
  CDR3 for beta chain variable domain of TCR clone 168183 (TRBV7-9, TRBJ1-6)
CASSSNSPLHF

SEQ ID NO: 336367 - protein, 14 aa, Homo sapiens
  CDR3 for alpha chain variable domain of TCR clone 168184 (TRAV17, TRAJ16)
CATADFSDGQKLLF

SEQ ID NO: 336368 - protein, 12 aa, Homo sapiens
  CDR3 for beta chain variable domain of TCR clone 168184 (TRBV24-1, TRBJ1-1)
CATLYQDTEAFF

SEQ ID NO: 336369 - protein, 14 aa, Homo sapiens
  CDR3 for alpha chain variable domain of TCR clone 168185 (TRAV1-2, TRAJ8)
CAVRADTGFPKLVF

SEQ ID NO: 336370 - protein, 15 aa, Homo sapiens
  CDR3 for beta chain variable domain of TCR clone 168185 (TRBV6-3, TRBJ2-7)
CASSSPGTVFYEQYF

SEQ ID NO: 336371 - protein, 11 aa, Homo sapiens
  CDR3 for alpha chain variable domain of TCR clone 168186 (TRAV2, TRAJ33)
CAVDSNYQLIW

SEQ ID NO: 336372 - protein, 14 aa, Homo sapiens
  CDR3 for beta chain variable domain of TCR clone 168186 (TRBV7-9, TRBJ1-1)
CASTPLQSYTEAFF

SEQ ID NO: 336373 - protein, 12 aa, Homo sapiens
  CDR3 for alpha chain variable domain of TCR clone 168187 (TRAV8-4, TRAJ22)
CAATGSARQLTF

SEQ ID NO: 336374 - protein, 14 aa, Homo sapiens
  CDR3 for beta chain variable domain of TCR clone 168187 (TRBV18, TRBJ2-7)
CASSPRGGAYEQYF

SEQ ID NO: 336375 - protein, 11 aa, Homo sapiens
  CDR3 for alpha chain variable domain of TCR clone 168188 (TRAV1-2, TRAJ40)
CAVPGTYKYTF

SEQ ID NO: 336376 - protein, 16 aa, Homo sapiens
  CDR3 for beta chain variable domain of TCR clone 168188 (TRBV29-1, TRBJ2-7)
CSVEGVGTSGSYEQYF

SEQ ID NO: 336377 - protein, 13 aa, Homo sapiens
  CDR3 for alpha chain variable domain of TCR clone 168189 (TRAV17, TRAJ5)
CATLDTGRRALTF

SEQ ID NO: 336378 - protein, 15 aa, Homo sapiens
  CDR3 for beta chain variable domain of TCR clone 168189 (TRBV20-1, TRBJ2-5)
CSATRTSGSLETQYF

SEQ ID NO: 336379 - protein, 14 aa, Homo sapiens
  CDR3 for alpha chain variable domain of TCR clone 168190 (TRAV12-3, TRAJ35)
CAMSLIGSGNVLHC

SEQ ID NO: 336380 - protein, 12 aa, Homo sapiens
  CDR3 for beta chain variable domain of TCR clone 168190 (TRBV12-4, TRBJ1-1)
CASSLAGLEAFF

SEQ ID NO: 336381 - protein, 16 aa, Homo sapiens
  CDR3 for alpha chain variable domain of TCR clone 168191 (TRAV16, TRAJ4)
CALSRMFSGGYNKLIF

SEQ ID NO: 336382 - protein, 14 aa, Homo sapiens
  CDR3 for beta chain variable domain of TCR clone 168191 (TRBV4-1, TRBJ2-2)
CASSQPVNTGELFF

SEQ ID NO: 336383 - protein, 11 aa, Homo sapiens
  CDR3 for alpha chain variable domain of TCR clone 168192 (TRAV17, TRAJ36)
CAPTWANNLFF

SEQ ID NO: 336384 - protein, 13 aa, Homo sapiens
  CDR3 for beta chain variable domain of TCR clone 168192 (TRBV20-1, TRBJ1-1)
CSPPPGGHTEAFF

SEQ ID NO: 336385 - protein, 13 aa, Homo sapiens
  CDR3 for alpha chain variable domain of TCR clone 168193 (TRAV8-4, TRAJ48)
CAVSLFGNETLTF

SEQ ID NO: 336386 - protein, 15 aa, Homo sapiens
  CDR3 for beta chain variable domain of TCR clone 168193 (TRBV20-1, TRBJ2-7)
CSARKGLAESYEQYF

SEQ ID NO: 336387 - protein, 17 aa, Homo sapiens
  CDR3 for alpha chain variable domain of TCR clone 168194 (TRAV3, TRAJ28)
CAVRPLYSGAGSSQLTF

SEQ ID NO: 336388 - protein, 16 aa, Homo sapiens
  CDR3 for beta chain variable domain of TCR clone 168194 (TRBV4-2, TRBJ1-4)
CASSQARGPTNEKLFF

SEQ ID NO: 336389 - protein, 13 aa, Homo sapiens
  CDR3 for alpha chain variable domain of TCR clone 168195 (TRAV13-1, TRAJ43)
CAASLSNNNDMRF

SEQ ID NO: 336390 - protein, 16 aa, Homo sapiens
  CDR3 for beta chain variable domain of TCR clone 168195 (TRBV19, TRBJ2-1)
CASSKAGPSSYNEQFF

SEQ ID NO: 336391 - protein, 15 aa, Homo sapiens
  CDR3 for alpha chain variable domain of TCR clone 168196 (TRAV27, TRAJ38)
CAARRNAGNNRKLIW

SEQ ID NO: 336392 - protein, 17 aa, Homo sapiens
  CDR3 for beta chain variable domain of TCR clone 168196 (TRBV28, TRBJ2-5)
CASSTPDGDALQETQYF

SEQ ID NO: 336393 - protein, 14 aa, Homo sapiens
  CDR3 for alpha chain variable domain of TCR clone 168197 (TRAV1-2, TRAJ8)
CAVREDTGCQKLVF

SEQ ID NO: 336394 - protein, 13 aa, Homo sapiens
  CDR3 for beta chain variable domain of TCR clone 168197 (TRBV20-1, TRBJ1-4)
CSARTPYNEKLFF

SEQ ID NO: 336395 - protein, 10 aa, Homo sapiens
  CDR3 for alpha chain variable domain of TCR clone 168198 (TRAV13-2, TRAJ20)
CAENICRLQA

SEQ ID NO: 336396 - protein, 13 aa, Homo sapiens
  CDR3 for beta chain variable domain of TCR clone 168198 (TRBV4-2, TRBJ1-1)
CASSQAGNTEAFF

SEQ ID NO: 336397 - protein, 14 aa, Homo sapiens
  CDR3 for alpha chain variable domain of TCR clone 168199 (TRAV23/DV6, TRAJ40)
CAASLTSGTYKYIF

SEQ ID NO: 336398 - protein, 15 aa, Homo sapiens
  CDR3 for beta chain variable domain of TCR clone 168199 (TRBV19, TRBJ2-5)
CASSQLHGAGETQYF

SEQ ID NO: 336399 - protein, 14 aa, Homo sapiens
  CDR3 for alpha chain variable domain of TCR clone 168200 (TRAV26-2, TRAJ11)
CIPRLNSGYSTLTF

SEQ ID NO: 336400 - protein, 15 aa, Homo sapiens
  CDR3 for beta chain variable domain of TCR clone 168200 (TRBV10-2, TRBJ2-6)
CASSEQGTGANVLTF

SEQ ID NO: 336401 - protein, 14 aa, Homo sapiens
  CDR3 for alpha chain variable domain of TCR clone 168201 (TRAV12-3, TRAJ17)
CAMTLTGNKLTLEE

SEQ ID NO: 336402 - protein, 15 aa, Homo sapiens
  CDR3 for beta chain variable domain of TCR clone 168201 (TRBV20-1, TRBJ2-7)
CSARDRVSGMDEQYF

SEQ ID NO: 336403 - protein, 13 aa, Homo sapiens
  CDR3 for alpha chain variable domain of TCR clone 168202 (TRAV12-3, TRAJ43)
CAMIRPNNNDMSF

SEQ ID NO: 336404 - protein, 12 aa, Homo sapiens
  CDR3 for beta chain variable domain of TCR clone 168202 (TRBV11-2, TRBJ2-5)
CASSLGQETQYF

SEQ ID NO: 336405 - protein, 14 aa, Homo sapiens
  CDR3 for alpha chain variable domain of TCR clone 168203 (TRAV12-2, TRAJ4)
CAEDLSGGYSKLIF

SEQ ID NO: 336406 - protein, 13 aa, Homo sapiens
  CDR3 for beta chain variable domain of TCR clone 168203 (TRBV7-9, TRBJ1-2)
CASSVKQNYGYTF

SEQ ID NO: 336407 - protein, 15 aa, Homo sapiens
  CDR3 for alpha chain variable domain of TCR clone 168204 (TRAV26-1, TRAJ29)
CIVRVEVSGNTPLVF

SEQ ID NO: 336408 - protein, 14 aa, Homo sapiens
  CDR3 for beta chain variable domain of TCR clone 168204 (TRBV25-1, TRBJ1-1)
CASTHLGGNTEAFF

SEQ ID NO: 336409 - protein, 12 aa, Homo sapiens
  CDR3 for alpha chain variable domain of TCR clone 168205 (TRAV12-3, TRAJ17)
CAMTLTGNRLTF

SEQ ID NO: 336410 - protein, 15 aa, Homo sapiens
  CDR3 for beta chain variable domain of TCR clone 168205 (TRBV2, TRBJ2-1)
CASSELAGSYNEQFF

SEQ ID NO: 336411 - protein, 14 aa, Homo sapiens
  CDR3 for alpha chain variable domain of TCR clone 168206 (TRAV12-1, TRAJ17)
CVANYKAAGNKLTF

SEQ ID NO: 336412 - protein, 15 aa, Homo sapiens
  CDR3 for beta chain variable domain of TCR clone 168206 (TRBV7-6, TRBJ2-3)
CASSYLAGEADTQYF

SEQ ID NO: 336413 - protein, 14 aa, Homo sapiens
  CDR3 for alpha chain variable domain of TCR clone 168207 (TRAV12-1, TRAJ3)
CVVNPGSSASKIIF

SEQ ID NO: 336414 - protein, 18 aa, Homo sapiens
  CDR3 for beta chain variable domain of TCR clone 168207 (TRBV4-2, TRBJ1-2)
CASSQDNVGHTANYGYTF

SEQ ID NO: 336415 - protein, 13 aa, Homo sapiens
  CDR3 for alpha chain variable domain of TCR clone 168208 (TRAV17, TRAJ5)
CAPMDTGRRALTF

SEQ ID NO: 336416 - protein, 16 aa, Homo sapiens
  CDR3 for beta chain variable domain of TCR clone 168208 (TRBV27, TRBJ2-7)
CATSSERRDSAYEQYF

SEQ ID NO: 336417 - protein, 14 aa, Homo sapiens
  CDR3 for alpha chain variable domain of TCR clone 168209 (TRAV27, TRAJ49)
CAGRPEGTGNQFYF

SEQ ID NO: 336418 - protein, 14 aa, Homo sapiens
  CDR3 for beta chain variable domain of TCR clone 168209 (TRBV19, TRBJ2-1)
CASPTFVLSGEQFF

SEQ ID NO: 336419 - protein, 14 aa, Homo sapiens
  CDR3 for alpha chain variable domain of TCR clone 168210 (TRAV38-1, TRAJ31)
CAFMKHDNNPRLMF

SEQ ID NO: 336420 - protein, 16 aa, Homo sapiens
  CDR3 for beta chain variable domain of TCR clone 168210 (TRBV23-1, TRBJ2-1)
CISAPATGPTYNEQFF

SEQ ID NO: 336421 - protein, 12 aa, Homo sapiens
  CDR3 for alpha chain variable domain of TCR clone 168211 (TRAV13-1, TRAJ20)
CAARQNDYKLSF

SEQ ID NO: 336422 - protein, 15 aa, Homo sapiens
  CDR3 for beta chain variable domain of TCR clone 168211 (TRBV5-1, TRBJ2-7)
CASSLNGGPAREQYF

SEQ ID NO: 336423 - protein, 14 aa, Homo sapiens
  CDR3 for alpha chain variable domain of TCR clone 168212 (TRAV1-2, TRAJ16)
CAVNRFSDGQKLLF

SEQ ID NO: 336424 - protein, 15 aa, Homo sapiens
  CDR3 for beta chain variable domain of TCR clone 168212 (TRBV2, TRBJ2-1)
CASSEEREGDNEQLF

SEQ ID NO: 336425 - protein, 12 aa, Homo sapiens
  CDR3 for alpha chain variable domain of TCR clone 168213 (TRAV12-3, TRAJ17)
CAMTLPGNKLTF

SEQ ID NO: 336426 - protein, 17 aa, Homo sapiens
  CDR3 for beta chain variable domain of TCR clone 168213 (TRBV11-2, TRBJ2-1)
CASSLYPPGVEYNEQFF

SEQ ID NO: 336427 - protein, 15 aa, Homo sapiens
  CDR3 for alpha chain variable domain of TCR clone 168214 (TRAV29/DV5, TRAJ24)
CAASGATDSWGKFQF

SEQ ID NO: 336428 - protein, 16 aa, Homo sapiens
  CDR3 for beta chain variable domain of TCR clone 168214 (TRBV2, TRBJ2-1)
CASRSPAGGKYNEQFF

SEQ ID NO: 336429 - protein, 13 aa, Homo sapiens
  CDR3 for alpha chain variable domain of TCR clone 168215 (TRAV21, TRAJ10)
CAVPMGGGNKLTF

SEQ ID NO: 336430 - protein, 22 aa, Homo sapiens
  CDR3 for beta chain variable domain of TCR clone 168215 (TRBV19, TRBJ2-1)
CASSVRDRVTGTSGRIYNEQFF

SEQ ID NO: 336431 - protein, 11 aa, Homo sapiens
  CDR3 for alpha chain variable domain of TCR clone 168216 (TRAV12-1, TRAJ3)
CVVSSASKIIF

SEQ ID NO: 336432 - protein, 12 aa, Homo sapiens
  CDR3 for beta chain variable domain of TCR clone 168216 (TRBV11-2, TRBJ2-2)
CASSLGGGELFF

SEQ ID NO: 336433 - protein, 12 aa, Homo sapiens
  CDR3 for alpha chain variable domain of TCR clone 168217 (TRAV12-3, TRAJ17)
CAMTLTGNNLTF

SEQ ID NO: 336434 - protein, 14 aa, Homo sapiens
  CDR3 for beta chain variable domain of TCR clone 168217 (TRBV7-2, TRBJ2-7)
CASSPKTSFYEQYF

SEQ ID NO: 336435 - protein, 13 aa, Homo sapiens
  CDR3 for alpha chain variable domain of TCR clone 168218 (TRAV12-1, TRAJ6)
CVVFPGGSYVPTF

SEQ ID NO: 336436 - protein, 13 aa, Homo sapiens
  CDR3 for beta chain variable domain of TCR clone 168218 (TRBV7-9, TRBJ1-2)
CASSLKQNYGYIF

SEQ ID NO: 336437 - protein, 13 aa, Homo sapiens
  CDR3 for alpha chain variable domain of TCR clone 168219 (TRAV21, TRAJ39)
CAVNNNAGNMLTF

SEQ ID NO: 336438 - protein, 13 aa, Homo sapiens
  CDR3 for beta chain variable domain of TCR clone 168219 (TRBV2, TRBJ1-5)
CATAGPGKQTQHF

SEQ ID NO: 336439 - protein, 11 aa, Homo sapiens
  CDR3 for alpha chain variable domain of TCR clone 168220 (TRAV1-2, TRAJ40)
FAVPGTYKYIF

SEQ ID NO: 336440 - protein, 16 aa, Homo sapiens
  CDR3 for beta chain variable domain of TCR clone 168220 (TRBV7-3, TRBJ2-2)
GASSLKRGTLSGELFF

SEQ ID NO: 336441 - protein, 14 aa, Homo sapiens
  CDR3 for alpha chain variable domain of TCR clone 168221 (TRAV2, TRAJ9)
CAVDPNTGGFKTIF

SEQ ID NO: 336442 - protein, 13 aa, Homo sapiens
  CDR3 for beta chain variable domain of TCR clone 168221 (TRBV20-1, TRBJ2-1)
CSASTWTSNEHFF

SEQ ID NO: 336443 - protein, 14 aa, Homo sapiens
  CDR3 for alpha chain variable domain of TCR clone 168222 (TRAV8-1, TRAJ36)
CAVDSPTGANNLFF

SEQ ID NO: 336444 - protein, 14 aa, Homo sapiens
  CDR3 for beta chain variable domain of TCR clone 168222 (TRBV7-2, TRBJ2-3)
CQQLRTGGTDTQYF

SEQ ID NO: 336445 - protein, 12 aa, Homo sapiens
  CDR3 for alpha chain variable domain of TCR clone 168223 (TRAV3, TRAJ43)
CAVRDPNHDMRF

SEQ ID NO: 336446 - protein, 13 aa, Homo sapiens
  CDR3 for beta chain variable domain of TCR clone 168223 (TRBV19, TRBJ1-2)
CASSVPGQDGYTF

SEQ ID NO: 336447 - protein, 13 aa, Homo sapiens
  CDR3 for alpha chain variable domain of TCR clone 168224 (TRAV12-1, TRAJ16)
CVMNGPDGQKLLF

SEQ ID NO: 336448 - protein, 13 aa, Homo sapiens
  CDR3 for beta chain variable domain of TCR clone 168224 (TRBV19, TRBJ1-2)
CTSSQGQVYGYTF

SEQ ID NO: 336449 - protein, 11 aa, Homo sapiens
  CDR3 for alpha chain variable domain of TCR clone 168225 (TRAV5, TRAJ3)
CAPGSASKMIF

SEQ ID NO: 336450 - protein, 12 aa, Homo sapiens
  CDR3 for beta chain variable domain of TCR clone 168225 (TRBV18, TRBJ2-1)
CASSSDEDEQFF

SEQ ID NO: 336451 - protein, 12 aa, Homo sapiens
  CDR3 for alpha chain variable domain of TCR clone 168226 (TRAV12-1, TRAJ40)
CVFYSGTYKYII

SEQ ID NO: 336452 - protein, 18 aa, Homo sapiens
  CDR3 for beta chain variable domain of TCR clone 168226 (TRBV12-4, TRBJ2-2)
CASSLVAGTRGRTGELFF

SEQ ID NO: 336453 - protein, 15 aa, Homo sapiens
  CDR3 for alpha chain variable domain of TCR clone 168227 (TRAV27, TRAJ38)
CAARRNAGNNRKLIW

SEQ ID NO: 336454 - protein, 19 aa, Homo sapiens
  CDR3 for beta chain variable domain of TCR clone 168227 (TRBV23-1, TRBJ2-3)
TVSLRQQPRSTGSTDTQYF

SEQ ID NO: 336455 - protein, 13 aa, Homo sapiens
  CDR3 for alpha chain variable domain of TCR clone 168228 (TRAV26-1, TRAJ33)
CIVRVEGNYQLIW

SEQ ID NO: 336456 - protein, 16 aa, Homo sapiens
  CDR3 for beta chain variable domain of TCR clone 168228 (TRBV15, TRBJ2-7)
CATSRDRGLRRGEQYF

SEQ ID NO: 336457 - protein, 15 aa, Homo sapiens
  CDR3 for alpha chain variable domain of TCR clone 168229 (TRAV8-3, TRAJ45)
CASSYSGGGADGLTF

SEQ ID NO: 336458 - protein, 17 aa, Homo sapiens
  CDR3 for beta chain variable domain of TCR clone 168229 (TRBV7-8, TRBJ1-2)
CASSLRPLEGHLYGYTF

SEQ ID NO: 336459 - protein, 14 aa, Homo sapiens
  CDR3 for alpha chain variable domain of TCR clone 168230 (TRAV35, TRAJ13)
CAGRSAGGYQKVTF

SEQ ID NO: 336460 - protein, 14 aa, Homo sapiens
  CDR3 for beta chain variable domain of TCR clone 168230 (TRBV19, TRBJ2-2)
CASSMVGLSGELFF

SEQ ID NO: 336461 - protein, 17 aa, Homo sapiens
  CDR3 for alpha chain variable domain of TCR clone 168231 (TRAV3, TRAJ13)
CAVRDMRRTGGYQKVSF

SEQ ID NO: 336462 - protein, 14 aa, Homo sapiens
  CDR3 for beta chain variable domain of TCR clone 168231 (TRBV5-1, TRBJ2-7)
CASSLTGSGYEQYF

SEQ ID NO: 336463 - protein, 16 aa, Homo sapiens
  CDR3 for alpha chain variable domain of TCR clone 168232 (TRAV12-3, TRAJ53)
CAMSPGSGGSNYKLTF

SEQ ID NO: 336464 - protein, 18 aa, Homo sapiens
  CDR3 for beta chain variable domain of TCR clone 168232 (TRBV7-7, TRBJ2-1)
CASSLALTSGRSYNEQFF

SEQ ID NO: 336465 - protein, 14 aa, Homo sapiens
  CDR3 for alpha chain variable domain of TCR clone 168233 (TRAV35, TRAJ13)
CAGSPSGGYQKVTF

SEQ ID NO: 336466 - protein, 17 aa, Homo sapiens
  CDR3 for beta chain variable domain of TCR clone 168233 (TRBV18, TRBJ1-5)
CQLTTCRVRQNNQLQHF

SEQ ID NO: 336467 - protein, 13 aa, Homo sapiens
  CDR3 for alpha chain variable domain of TCR clone 168234 (TRAV12-2, TRAJ34)
CAVRGDNTDKPIF

SEQ ID NO: 336468 - protein, 15 aa, Homo sapiens
  CDR3 for beta chain variable domain of TCR clone 168234 (TRBV28, TRBJ2-1)
CASRTGAGVIARQFF

SEQ ID NO: 336469 - protein, 14 aa, Homo sapiens
  CDR3 for alpha chain variable domain of TCR clone 168235 (TRAV2, TRAJ22)
CAVGRGGSARQVTF

SEQ ID NO: 336470 - protein, 12 aa, Homo sapiens
  CDR3 for beta chain variable domain of TCR clone 168235 (TRBV19, TRBJ2-1)
CASSMQDTEQFF

SEQ ID NO: 336471 - protein, 12 aa, Homo sapiens
  CDR3 for alpha chain variable domain of TCR clone 168236 (TRAV17, TRAJ20)
CATDSNDYKLSF

SEQ ID NO: 336472 - protein, 19 aa, Homo sapiens
  CDR3 for beta chain variable domain of TCR clone 168236 (TRBV11-3, TRBJ2-5)
CASSDTSGGSRPSTSGQAR

SEQ ID NO: 336473 - protein, 12 aa, Homo sapiens
  CDR3 for alpha chain variable domain of TCR clone 168237 (TRAV4, TRAJ26)
CLVGDYGQNFVF

SEQ ID NO: 336474 - protein, 15 aa, Homo sapiens
  CDR3 for beta chain variable domain of TCR clone 168237 (TRBV20-1, TRBJ2-2)
CSARDTRLNTGELFF

SEQ ID NO: 336475 - protein, 14 aa, Homo sapiens
  CDR3 for alpha chain variable domain of TCR clone 168238 (TRAV1-2, TRAJ8)
CSVREDTGFQKLVF

SEQ ID NO: 336476 - protein, 13 aa, Homo sapiens
  CDR3 for beta chain variable domain of TCR clone 168238 (TRBV19, TRBJ2-1)
CASTNSDVGEQFF

SEQ ID NO: 336477 - protein, 21 aa, Homo sapiens
  CDR3 for alpha chain variable domain of TCR clone 168239 (TRAV8-3, TRAJ13)
CAVGAYPSGVTRKLPLELEQI

SEQ ID NO: 336478 - protein, 15 aa, Homo sapiens
  CDR3 for beta chain variable domain of TCR clone 168239 (TRBV19, TRBJ1-5)
CASSIVWADNQPQHF

SEQ ID NO: 336479 - protein, 23 aa, Homo sapiens
  CDR3 for alpha chain variable domain of TCR clone 168240 (TRAV12-2, TRAJ43)
SLLIRDSQPSDSATFLCAFDMRF

SEQ ID NO: 336480 - protein, 18 aa, Homo sapiens
  CDR3 for beta chain variable domain of TCR clone 168240 (TRBV20-1, TRBJ2-3)
CSASGLAGGPGTTDTQYF

SEQ ID NO: 336481 - protein, 20 aa, Homo sapiens
  CDR3 for alpha chain variable domain of TCR clone 168241 (TRAV1-1, TRAJ4)
CLLLLRCEGFLSGGYNKLIL

SEQ ID NO: 336482 - protein, 16 aa, Homo sapiens
  CDR3 for beta chain variable domain of TCR clone 168241 (TRBV28, TRBJ1-4)
CASSPPYRGRSEKLFF

SEQ ID NO: 336483 - protein, 11 aa, Homo sapiens
  CDR3 for alpha chain variable domain of TCR clone 168242 (TRAV13-1, TRAJ40)
CAVSGTYKYIF

SEQ ID NO: 336484 - protein, 15 aa, Homo sapiens
  CDR3 for beta chain variable domain of TCR clone 168242 (TRBV7-2, TRBJ2-7)
CASSLKGALTYEQYF

SEQ ID NO: 336485 - protein, 14 aa, Homo sapiens
  CDR3 for alpha chain variable domain of TCR clone 168243 (TRAV23/DV6, TRAJ39)
CAASIGNAGNMLTF

SEQ ID NO: 336486 - protein, 11 aa, Homo sapiens
  CDR3 for beta chain variable domain of TCR clone 168243 (TRBV20-1, TRBJ2-5)
QCWDRVRDQYF

SEQ ID NO: 336487 - protein, 13 aa, Homo sapiens
  CDR3 for alpha chain variable domain of TCR clone 168244 (TRAV29/DV5, TRAJ31)
CAASRNNNARLMF

SEQ ID NO: 336488 - protein, 11 aa, Homo sapiens
  CDR3 for beta chain variable domain of TCR clone 168244 (TRBV14, TRBJ1-1)
CQQPTKGLAFF

SEQ ID NO: 336489 - protein, 14 aa, Homo sapiens
  CDR3 for alpha chain variable domain of TCR clone 168245 (TRAV8-6, TRAJ41)
CAVRNSNSGYALNF

SEQ ID NO: 336490 - protein, 13 aa, Homo sapiens
  CDR3 for beta chain variable domain of TCR clone 168245 (TRBV4-2, TRBJ1-1)
CASSQAGNTEAFF

SEQ ID NO: 336491 - protein, 14 aa, Homo sapiens
  CDR3 for alpha chain variable domain of TCR clone 168246 (TRAV13-1, TRAJ35)
CAASKGGFGNVLHC

SEQ ID NO: 336492 - protein, 15 aa, Homo sapiens
  CDR3 for beta chain variable domain of TCR clone 168246 (TRBV7-3, TRBJ2-3)
CASLKDGREGDTQYF

SEQ ID NO: 336493 - protein, 16 aa, Homo sapiens
  CDR3 for alpha chain variable domain of TCR clone 168247 (TRAV3, TRAJ5)
CAVRNLMDTGRRALTF

SEQ ID NO: 336494 - protein, 16 aa, Homo sapiens
  CDR3 for beta chain variable domain of TCR clone 168247 (TRBV12-5, TRBJ2-5)
CASGPRTSGNQETQYI

SEQ ID NO: 336495 - protein, 15 aa, Homo sapiens
  CDR3 for alpha chain variable domain of TCR clone 168248 (TRAV3, TRAJ11)
CAVRDRGSGYSTLTF

SEQ ID NO: 336496 - protein, 16 aa, Homo sapiens
  CDR3 for beta chain variable domain of TCR clone 168248 (TRBV6-1, TRBJ2-1)
CASILRQGSSYNEQFF

SEQ ID NO: 336497 - protein, 13 aa, Homo sapiens
  CDR3 for alpha chain variable domain of TCR clone 168249 (TRAV13-2, TRAJ40)
CAKFTSGTYKYIF

SEQ ID NO: 336498 - protein, 14 aa, Homo sapiens
  CDR3 for beta chain variable domain of TCR clone 168249 (TRBV10-2, TRBJ1-5)
CASSSTGRNQPQHF

SEQ ID NO: 336499 - protein, 11 aa, Homo sapiens
  CDR3 for alpha chain variable domain of TCR clone 168250 (TRAV1-2, TRAJ40)
CAVPGTYKYIF

SEQ ID NO: 336500 - protein, 17 aa, Homo sapiens
  CDR3 for beta chain variable domain of TCR clone 168250 (TRBV20-1, TRBJ2-2)
CSASGSGQGGLTGELFF

SEQ ID NO: 336501 - protein, 10 aa, Homo sapiens
  CDR3 for alpha chain variable domain of TCR clone 168251 (TRAV13-2, TRAJ49)
CADTGNQFYF

SEQ ID NO: 336502 - protein, 16 aa, Homo sapiens
  CDR3 for beta chain variable domain of TCR clone 168251 (TRBV6-3, TRBJ2-1)
CASSYRRGDSYNEQFF

SEQ ID NO: 336503 - protein, 13 aa, Homo sapiens
  CDR3 for alpha chain variable domain of TCR clone 168252 (TRAV35, TRAJ42)
CAGFPGSQGNLIF

SEQ ID NO: 336504 - protein, 13 aa, Homo sapiens
  CDR3 for beta chain variable domain of TCR clone 168252 (TRBV7-6, TRBJ1-2)
CASSLVADYGYTF

SEQ ID NO: 336505 - protein, 22 aa, Homo sapiens
  CDR3 for alpha chain variable domain of TCR clone 168253 (TRAV3, TRAJ38)
CAVRDCLNAGNNHIQNPDPAVY

SEQ ID NO: 336506 - protein, 14 aa, Homo sapiens
  CDR3 for beta chain variable domain of TCR clone 168253 (TRBV18, TRBJ2-7)
CASSPRGGAYEQYF

SEQ ID NO: 336507 - protein, 13 aa, Homo sapiens
  CDR3 for alpha chain variable domain of TCR clone 168254 (TRAV12-3, TRAJ43)
CAMIRPNNNDMRF

SEQ ID NO: 336508 - protein, 16 aa, Homo sapiens
  CDR3 for beta chain variable domain of TCR clone 168254 (TRBV20-1, TRBJ1-2)
CSASMGQGVAKYGYTF

SEQ ID NO: 336509 - protein, 14 aa, Homo sapiens
  CDR3 for alpha chain variable domain of TCR clone 168255 (TRAV8-3, TRAJ13)
CAVGGTFGYQKVTF

SEQ ID NO: 336510 - protein, 17 aa, Homo sapiens
  CDR3 for beta chain variable domain of TCR clone 168255 (TRBV7-9, TRBJ2-1)
CAISAGTLGRSYNEQFF

SEQ ID NO: 336511 - protein, 18 aa, Homo sapiens
  CDR3 for alpha chain variable domain of TCR clone 168256 (TRAV13-1, TRAJ28)
CAASPVPILWGWELPTHF

SEQ ID NO: 336512 - protein, 13 aa, Homo sapiens
  CDR3 for beta chain variable domain of TCR clone 168256 (TRBV15, TRBJ2-7)
CATSTTGHYEQYF

SEQ ID NO: 336513 - protein, 13 aa, Homo sapiens
  CDR3 for alpha chain variable domain of TCR clone 168257 (TRAV21, TRAJ57)
CAVTQGGSEKLVF

SEQ ID NO: 336514 - protein, 16 aa, Homo sapiens
  CDR3 for beta chain variable domain of TCR clone 168257 (TRBV29-1, TRBJ2-7)
CSVEDPEDGTAYEQYF

SEQ ID NO: 336515 - protein, 14 aa, Homo sapiens
  CDR3 for alpha chain variable domain of TCR clone 168258 (TRAV17, TRAJ7)
CATLGRLAFGKGNQ

SEQ ID NO: 336516 - protein, 13 aa, Homo sapiens
  CDR3 for beta chain variable domain of TCR clone 168258 (TRBV12-4, TRBJ2-7)
CASSLERVMEQYF

SEQ ID NO: 336517 - protein, 13 aa, Homo sapiens
  CDR3 for alpha chain variable domain of TCR clone 168259 (TRAV8-6, TRAJ9)
CAVWDTGGLNTIF

SEQ ID NO: 336518 - protein, 14 aa, Homo sapiens
  CDR3 for beta chain variable domain of TCR clone 168259 (TRBV2, TRBJ2-1)
CASSEALIYNEQFF

SEQ ID NO: 336519 - protein, 15 aa, Homo sapiens
  CDR3 for alpha chain variable domain of TCR clone 168260 (TRAV2, TRAJ13)
CCLLLCFRGYQKVTF

SEQ ID NO: 336520 - protein, 15 aa, Homo sapiens
  CDR3 for beta chain variable domain of TCR clone 168260 (TRBV20-1, TRBJ2-7)
CSARDRVSGMDEQYL

SEQ ID NO: 336521 - protein, 13 aa, Homo sapiens
  CDR3 for alpha chain variable domain of TCR clone 168261 (TRAV29/DV5, TRAJ31)
CAASRNNNARLMF

SEQ ID NO: 336522 - protein, 14 aa, Homo sapiens
  CDR3 for beta chain variable domain of TCR clone 168261 (TRBV4-2, TRBJ1-5)
CASSRDRGNQPQHF

SEQ ID NO: 336523 - protein, 11 aa, Homo sapiens
  CDR3 for alpha chain variable domain of TCR clone 168262 (TRAV6, TRAJ31)
CALRDNARLMF

SEQ ID NO: 336524 - protein, 12 aa, Homo sapiens
  CDR3 for beta chain variable domain of TCR clone 168262 (TRBV11-2, TRBJ2-2)
CSSSLGGGELFF

SEQ ID NO: 336525 - protein, 14 aa, Homo sapiens
  CDR3 for alpha chain variable domain of TCR clone 168263 (TRAV17, TRAJ57)
CATDPQGGSEKLVF

SEQ ID NO: 336526 - protein, 14 aa, Homo sapiens
  CDR3 for beta chain variable domain of TCR clone 168263 (TRBV5-8, TRBJ1-1)
CASSPRTGFSEAFF

SEQ ID NO: 336527 - protein, 15 aa, Homo sapiens
  CDR3 for alpha chain variable domain of TCR clone 168264 (TRAV27, TRAJ38)
CAARRNAGNNRKPIG

SEQ ID NO: 336528 - protein, 13 aa, Homo sapiens
  CDR3 for beta chain variable domain of TCR clone 168264 (TRBV12-5, TRBJ2-3)
CASGDRQSDTQYF

SEQ ID NO: 336529 - protein, 16 aa, Homo sapiens
  CDR3 for alpha chain variable domain of TCR clone 168265 (TRAV12-2, TRAJ10)
CAVNRVLTGGGNKLTF

SEQ ID NO: 336530 - protein, 14 aa, Homo sapiens
  CDR3 for beta chain variable domain of TCR clone 168265 (TRBV9, TRBJ2-1)
CASSVALAVNEQFL

SEQ ID NO: 336531 - protein, 13 aa, Homo sapiens
  CDR3 for alpha chain variable domain of TCR clone 168266 (TRAV35, TRAJ48)
CAGHEFGNEKLTF

SEQ ID NO: 336532 - protein, 13 aa, Homo sapiens
  CDR3 for beta chain variable domain of TCR clone 168266 (TRBV7-2, TRBJ1-6)
CASSLVGSSALHF

SEQ ID NO: 336533 - protein, 14 aa, Homo sapiens
  CDR3 for alpha chain variable domain of TCR clone 168267 (TRAV12-3, TRAJ56)
CAMSVTGANSKLTF

SEQ ID NO: 336534 - protein, 12 aa, Homo sapiens
  CDR3 for beta chain variable domain of TCR clone 168267 (TRBV6-3, TRBJ2-7)
CASSVTPYEQYF

SEQ ID NO: 336535 - protein, 11 aa, Homo sapiens
  CDR3 for alpha chain variable domain of TCR clone 168268 (TRAV2, TRAJ13)
CASGGYQKVTF

SEQ ID NO: 336536 - protein, 20 aa, Homo sapiens
  CDR3 for beta chain variable domain of TCR clone 168268 (TRBV7-8, TRBJ2-2)
CVSSHLFPGPTIHITGELFF

SEQ ID NO: 336537 - protein, 12 aa, Homo sapiens
  CDR3 for alpha chain variable domain of TCR clone 168269 (TRAV12-1, TRAJ40)
CVFYSGTYKYIF

SEQ ID NO: 336538 - protein, 14 aa, Homo sapiens
  CDR3 for beta chain variable domain of TCR clone 168269 (TRBV25-1, TRBJ1-1)
CASTHLGGNTGAFF

SEQ ID NO: 336539 - protein, 13 aa, Homo sapiens
  CDR3 for alpha chain variable domain of TCR clone 168270 (TRAV13-2, TRAJ48)
CAEMDFGNETLNF

SEQ ID NO: 336540 - protein, 15 aa, Homo sapiens
  CDR3 for beta chain variable domain of TCR clone 168270 (TRBV7-9, TRBJ1-6)
CASSSPGRGNSPLHF

SEQ ID NO: 336541 - protein, 16 aa, Homo sapiens
  CDR3 for alpha chain variable domain of TCR clone 168271 (TRAV12-3, TRAJ53)
CAMSPGSGGSNYKLTF

SEQ ID NO: 336542 - protein, 14 aa, Homo sapiens
  CDR3 for beta chain variable domain of TCR clone 168271 (TRBV7-9, TRBJ1-1)
RASSLGGANTEAFF

SEQ ID NO: 336543 - protein, 16 aa, Homo sapiens
  CDR3 for alpha chain variable domain of TCR clone 168272 (TRAV3, TRAJ37)
CAMRVRGSGNTGKLIF

SEQ ID NO: 336544 - protein, 13 aa, Homo sapiens
  CDR3 for beta chain variable domain of TCR clone 168272 (TRBV7-9, TRBJ1-2)
CASSLKQNYGYTF

SEQ ID NO: 336545 - protein, 14 aa, Homo sapiens
  CDR3 for alpha chain variable domain of TCR clone 168273 (TRAV3, TRAJ8)
CAVSRNTGFQKLVF

SEQ ID NO: 336546 - protein, 15 aa, Homo sapiens
  CDR3 for beta chain variable domain of TCR clone 168273 (TRBV5-5, TRBJ2-2)
RASSRQASGAGELFF

SEQ ID NO: 336547 - protein, 13 aa, Homo sapiens
  CDR3 for alpha chain variable domain of TCR clone 168274 (TRAV13-1, TRAJ11)
CAAVLAGYSTLTF

SEQ ID NO: 336548 - protein, 14 aa, Homo sapiens
  CDR3 for beta chain variable domain of TCR clone 168274 (TRBV7-9, TRBJ2-4)
CASSLAMGGNIQYF

SEQ ID NO: 336549 - protein, 13 aa, Homo sapiens
  CDR3 for alpha chain variable domain of TCR clone 168275 (TRAV2, TRAJ40)
CAVVTSGTYKYTF

SEQ ID NO: 336550 - protein, 16 aa, Homo sapiens
  CDR3 for beta chain variable domain of TCR clone 168275 (TRBV19, TRBJ2-2)
CASRSPGTGATGELFF

SEQ ID NO: 336551 - protein, 16 aa, Homo sapiens
  CDR3 for alpha chain variable domain of TCR clone 168276 (TRAV3, TRAJ37)
CAVRGKGSGNTGKPIF

SEQ ID NO: 336552 - protein, 15 aa, Homo sapiens
  CDR3 for beta chain variable domain of TCR clone 168276 (TRBV9, TRBJ1-4)
CASSVGGSTNEKLFF

SEQ ID NO: 336553 - protein, 15 aa, Homo sapiens
  CDR3 for alpha chain variable domain of TCR clone 168277 (TRAV21, TRAJ53)
CATLNSGGSNYKLTF

SEQ ID NO: 336554 - protein, 15 aa, Homo sapiens
  CDR3 for beta chain variable domain of TCR clone 168277 (TRBV5-1, TRBJ2-1)
CASSPPRAAYNEQFF

SEQ ID NO: 336555 - protein, 13 aa, Homo sapiens
  CDR3 for alpha chain variable domain of TCR clone 168278 (TRAV21, TRAJ20)
CAVGLRVDYKLSF

SEQ ID NO: 336556 - protein, 13 aa, Homo sapiens
  CDR3 for beta chain variable domain of TCR clone 168278 (TRBV11-2, TRBJ2-5)
CASSSTGEETQYF

SEQ ID NO: 336557 - protein, 11 aa, Homo sapiens
  CDR3 for alpha chain variable domain of TCR clone 168279 (TRAV12-2, TRAJ43)
CAAYNNNDMRF

SEQ ID NO: 336558 - protein, 14 aa, Homo sapiens
  CDR3 for beta chain variable domain of TCR clone 168279 (TRBV7-8, TRBJ1-2)
CASSAGTAINGYTF

SEQ ID NO: 336559 - protein, 13 aa, Homo sapiens
  CDR3 for alpha chain variable domain of TCR clone 168280 (TRAV20, TRAJ34)
CAVRSYNTDKLIF

SEQ ID NO: 336560 - protein, 12 aa, Homo sapiens
  CDR3 for beta chain variable domain of TCR clone 168280 (TRBV11-2, TRBJ2-1)
CASSPGHNEQFF

SEQ ID NO: 336561 - protein, 13 aa, Homo sapiens
  CDR3 for alpha chain variable domain of TCR clone 168281 (TRAV13-1, TRAJ6)
CAASKGGSYIPTF

SEQ ID NO: 336562 - protein, 14 aa, Homo sapiens
  CDR3 for beta chain variable domain of TCR clone 168281 (TRBV7-6, TRBJ2-3)
CASSLGTVTDTQYF

SEQ ID NO: 336563 - protein, 14 aa, Homo sapiens
  CDR3 for alpha chain variable domain of TCR clone 168282 (TRAV12-2, TRAJ17)
CAVLFKAAGNKLTF

SEQ ID NO: 336564 - protein, 12 aa, Homo sapiens
  CDR3 for beta chain variable domain of TCR clone 168282 (TRBV24-1, TRBJ2-3)
CATSDSTDTQYF

SEQ ID NO: 336565 - protein, 14 aa, Homo sapiens
  CDR3 for alpha chain variable domain of TCR clone 168283 (TRAV26-1, TRAJ38)
CISDNAGNNLKLIW

SEQ ID NO: 336566 - protein, 13 aa, Homo sapiens
  CDR3 for beta chain variable domain of TCR clone 168283 (TRBV20-1, TRBJ1-1)
CSARGGGNTEAFF

SEQ ID NO: 336567 - protein, 15 aa, Homo sapiens
  CDR3 for alpha chain variable domain of TCR clone 168284 (TRAV26-2, TRAJ45)
CILRDRVDQDEVLTD

SEQ ID NO: 336568 - protein, 15 aa, Homo sapiens
  CDR3 for beta chain variable domain of TCR clone 168284 (TRBV7-6, TRBJ2-5)
CASSKPTGPQETQYF

SEQ ID NO: 336569 - protein, 12 aa, Homo sapiens
  CDR3 for alpha chain variable domain of TCR clone 168285 (TRAV21, TRAJ3)
CCFYSSASKIIF

SEQ ID NO: 336570 - protein, 16 aa, Homo sapiens
  CDR3 for beta chain variable domain of TCR clone 168285 (TRBV19, TRBJ2-1)
CASSKAGPSSDNEQFF

SEQ ID NO: 336571 - protein, 13 aa, Homo sapiens
  CDR3 for alpha chain variable domain of TCR clone 168286 (TRAV2, TRAJ40)
CAVVTSGTYKYIF

SEQ ID NO: 336572 - protein, 14 aa, Homo sapiens
  CDR3 for beta chain variable domain of TCR clone 168286 (TRBV19, TRBJ2-1)
CASPTVVWSGEQFF

SEQ ID NO: 336573 - protein, 16 aa, Homo sapiens
  CDR3 for alpha chain variable domain of TCR clone 168287 (TRAV30, TRAJ24)
CGTEIVDADSWGKFQF

SEQ ID NO: 336574 - protein, 13 aa, Homo sapiens
  CDR3 for beta chain variable domain of TCR clone 168287 (TRBV11-3, TRBJ2-1)
CASSSRRVDEQFF

SEQ ID NO: 336575 - protein, 11 aa, Homo sapiens
  CDR3 for alpha chain variable domain of TCR clone 168288 (TRAV12-2, TRAJ54)
CAVEGAQKLAF

SEQ ID NO: 336576 - protein, 17 aa, Homo sapiens
  CDR3 for beta chain variable domain of TCR clone 168288 (TRBV18, TRBJ1-3)
CASSPYPTGPSGNTIYF

SEQ ID NO: 336577 - protein, 12 aa, Homo sapiens
  CDR3 for alpha chain variable domain of TCR clone 168289 (TRAV20, TRAJ56)
CAVTGANSKLTF

SEQ ID NO: 336578 - protein, 14 aa, Homo sapiens
  CDR3 for beta chain variable domain of TCR clone 168289 (TRBV20-1, TRBJ2-5)
CSALVPGYQETQCF

SEQ ID NO: 336579 - protein, 15 aa, Homo sapiens
  CDR3 for alpha chain variable domain of TCR clone 168290 (TRAV13-1, TRAJ9)
CAASTLNTGGFKTIF

SEQ ID NO: 336580 - protein, 16 aa, Homo sapiens
  CDR3 for beta chain variable domain of TCR clone 168290 (TRBV7-2, TRBJ2-1)
CASTLDSGGSRNEQFF

SEQ ID NO: 336581 - protein, 16 aa, Homo sapiens
  CDR3 for alpha chain variable domain of TCR clone 168291 (TRAV1-2, TRAJ10)
CAVRGVLTGGGNKLTF

SEQ ID NO: 336582 - protein, 16 aa, Homo sapiens
  CDR3 for beta chain variable domain of TCR clone 168291 (TRBV24-1, TRBJ2-3)
CATSDPGTGATDTQYF

SEQ ID NO: 336583 - protein, 11 aa, Homo sapiens
  CDR3 for alpha chain variable domain of TCR clone 168292 (TRAV12-3, TRAJ43)
SAMSVSNDIRF

SEQ ID NO: 336584 - protein, 13 aa, Homo sapiens
  CDR3 for beta chain variable domain of TCR clone 168292 (TRBV20-1, TRBJ1-1)
CSAPLGGGTEAFF

SEQ ID NO: 336585 - protein, 12 aa, Homo sapiens
  CDR3 for alpha chain variable domain of TCR clone 168293 (TRAV12-3, TRAJ17)
CAMTLTGNKLTF

SEQ ID NO: 336586 - protein, 16 aa, Homo sapiens
  CDR3 for beta chain variable domain of TCR clone 168293 (TRBV18, TRBJ1-5)
CASPPRTGGGNQPQHF

SEQ ID NO: 336587 - protein, 14 aa, Homo sapiens
  CDR3 for alpha chain variable domain of TCR clone 168294 (TRAV8-4, TRAJ45)
CAAGGGGGADGLTF

SEQ ID NO: 336588 - protein, 20 aa, Homo sapiens
  CDR3 for beta chain variable domain of TCR clone 168294 (TRBV4-3, TRBJ2-3)
CASSPRVEMRASGRPDTQYF

SEQ ID NO: 336589 - protein, 13 aa, Homo sapiens
  CDR3 for alpha chain variable domain of TCR clone 168295 (TRAV26-1, TRAJ48)
CIVRVVGDVKLTF

SEQ ID NO: 336590 - protein, 19 aa, Homo sapiens
  CDR3 for beta chain variable domain of TCR clone 168295 (TRBV11-3, TRBJ2-2)
CASSTRPGAKTTNTGELFF

SEQ ID NO: 336591 - protein, 14 aa, Homo sapiens
  CDR3 for alpha chain variable domain of TCR clone 168296 (TRAV1-2, TRAJ16)
CAVNRFTDGQKLLF

SEQ ID NO: 336592 - protein, 15 aa, Homo sapiens
  CDR3 for beta chain variable domain of TCR clone 168296 (TRBV5-1, TRBJ2-2)
CASSSQGGNTGELFF

SEQ ID NO: 336593 - protein, 12 aa, Homo sapiens
  CDR3 for alpha chain variable domain of TCR clone 168297 (TRAV26-1, TRAJ26)
CIVFIYGQNFVF

SEQ ID NO: 336594 - protein, 13 aa, Homo sapiens
  CDR3 for beta chain variable domain of TCR clone 168297 (TRBV19, TRBJ2-7)
CASSPRQSYEQYF

SEQ ID NO: 336595 - protein, 12 aa, Homo sapiens
  CDR3 for alpha chain variable domain of TCR clone 168298 (TRAV16, TRAJ10)
CSRTGGGNKLTF

SEQ ID NO: 336596 - protein, 13 aa, Homo sapiens
  CDR3 for beta chain variable domain of TCR clone 168298 (TRBV7-8, TRBJ2-7)
CASSLTGGREQYF

SEQ ID NO: 336597 - protein, 14 aa, Homo sapiens
  CDR3 for alpha chain variable domain of TCR clone 168299 (TRAV17, TRAJ11)
CATDTIRGYSTLTF

SEQ ID NO: 336598 - protein, 13 aa, Homo sapiens
  CDR3 for beta chain variable domain of TCR clone 168299 (TRBV19, TRBJ2-5)
CASRDSRRETQYF

SEQ ID NO: 336599 - protein, 16 aa, Homo sapiens
  CDR3 for alpha chain variable domain of TCR clone 168300 (TRAV1-2, TRAJ10)
CAVRGVLTGGGNKLTF

SEQ ID NO: 336600 - protein, 12 aa, Homo sapiens
  CDR3 for beta chain variable domain of TCR clone 168300 (TRBV12-4, TRBJ2-7)
CASSLGGYEQCF

SEQ ID NO: 336601 - protein, 11 aa, Homo sapiens
  CDR3 for alpha chain variable domain of TCR clone 168301 (TRAV9-2, TRAJ47)
CALSAGNKLVF

SEQ ID NO: 336602 - protein, 13 aa, Homo sapiens
  CDR3 for beta chain variable domain of TCR clone 168301 (TRBV2, TRBJ2-7)
CASSGAAAYEQYF

SEQ ID NO: 336603 - protein, 14 aa, Homo sapiens
  CDR3 for alpha chain variable domain of TCR clone 168302 (TRAV8-6, TRAJ20)
CAVSDRRVRDKLSF

SEQ ID NO: 336604 - protein, 14 aa, Homo sapiens
  CDR3 for beta chain variable domain of TCR clone 168302 (TRBV5-7, TRBJ1-2)
CASSLVRGDYGYTF

SEQ ID NO: 336605 - protein, 12 aa, Homo sapiens
  CDR3 for alpha chain variable domain of TCR clone 168303 (TRAV30, TRAJ20)
CGTESNDYTLSF

SEQ ID NO: 336606 - protein, 15 aa, Homo sapiens
  CDR3 for beta chain variable domain of TCR clone 168303 (TRBV20-1, TRBJ2-7)
CSARDRVSGMDEQYF

SEQ ID NO: 336607 - protein, 14 aa, Homo sapiens
  CDR3 for alpha chain variable domain of TCR clone 168304 (TRAV38-1, TRAJ45)
CAYYSGGGADGLTF

SEQ ID NO: 336608 - protein, 14 aa, Homo sapiens
  CDR3 for beta chain variable domain of TCR clone 168304 (TRBV25-1, TRBJ1-1)
CASTHLGGNTEALF

SEQ ID NO: 336609 - protein, 11 aa, Homo sapiens
  CDR3 for alpha chain variable domain of TCR clone 168305 (TRAV13-1, TRAJ40)
CAVSGTYKYIF

SEQ ID NO: 336610 - protein, 13 aa, Homo sapiens
  CDR3 for beta chain variable domain of TCR clone 168305 (TRBV19, TRBJ1-5)
CASSIGSNQPQHF

SEQ ID NO: 336611 - protein, 15 aa, Homo sapiens
  CDR3 for alpha chain variable domain of TCR clone 168306 (TRAV3, TRAJ5)
CAVRDLDTGRRALTF

SEQ ID NO: 336612 - protein, 17 aa, Homo sapiens
  CDR3 for beta chain variable domain of TCR clone 168306 (TRBV5-1, TRBJ2-2)
CASSPRTGGMNTGELFF

SEQ ID NO: 336613 - protein, 12 aa, Homo sapiens
  CDR3 for alpha chain variable domain of TCR clone 168307 (TRAV27, TRAJ49)
CAGARLGNQFYF

SEQ ID NO: 336614 - protein, 16 aa, Homo sapiens
  CDR3 for beta chain variable domain of TCR clone 168307 (TRBV4-2, TRBJ1-1)
CASSQAGFGMNTEAFF

SEQ ID NO: 336615 - protein, 15 aa, Homo sapiens
  CDR3 for alpha chain variable domain of TCR clone 168308 (TRAV17, TRAJ45)
TSVLRTGGGADGLTF

SEQ ID NO: 336616 - protein, 15 aa, Homo sapiens
  CDR3 for beta chain variable domain of TCR clone 168308 (TRBV5-7, TRBJ1-5)
CASSYGKWWDQPQHF

SEQ ID NO: 336617 - protein, 17 aa, Homo sapiens
  CDR3 for alpha chain variable domain of TCR clone 168309 (TRAV3, TRAJ6)
CAVRDGPRAGGSYIPTF

SEQ ID NO: 336618 - protein, 15 aa, Homo sapiens
  CDR3 for beta chain variable domain of TCR clone 168309 (TRBV19, TRBJ2-1)
CASNAQGLAGREQFF

SEQ ID NO: 336619 - protein, 16 aa, Homo sapiens
  CDR3 for alpha chain variable domain of TCR clone 168310 (TRAV30, TRAJ24)
CGTGIVAADSWGKFQF

SEQ ID NO: 336620 - protein, 15 aa, Homo sapiens
  CDR3 for beta chain variable domain of TCR clone 168310 (TRBV20-1, TRBJ2-7)
CSARDRVSGMDEQYF

SEQ ID NO: 336621 - protein, 17 aa, Homo sapiens
  CDR3 for alpha chain variable domain of TCR clone 168311 (TRAV3, TRAJ6)
CAVRDGPRAGGSHIPTF

SEQ ID NO: 336622 - protein, 16 aa, Homo sapiens
  CDR3 for beta chain variable domain of TCR clone 168311 (TRBV4-1, TRBJ2-7)
CASSLTAGQATYEQYF

SEQ ID NO: 336623 - protein, 14 aa, Homo sapiens
  CDR3 for alpha chain variable domain of TCR clone 168312 (TRAV26-1, TRAJ38)
CIADNAGNNRKLIW

SEQ ID NO: 336624 - protein, 13 aa, Homo sapiens
  CDR3 for beta chain variable domain of TCR clone 168312 (TRBV20-1, TRBJ1-1)
CSAWGGGNTEAFF

SEQ ID NO: 336625 - protein, 13 aa, Homo sapiens
  CDR3 for alpha chain variable domain of TCR clone 168313 (TRAV12-2, TRAJ20)
CAVYPSNDYKLSF

SEQ ID NO: 336626 - protein, 14 aa, Homo sapiens
  CDR3 for beta chain variable domain of TCR clone 168313 (TRBV7-2, TRBJ1-2)
CASSQTGSAYGYTF

SEQ ID NO: 336627 - protein, 16 aa, Homo sapiens
  CDR3 for alpha chain variable domain of TCR clone 168314 (TRAV13-1, TRAJ18)
CAASRMTGSTLGRLYF

SEQ ID NO: 336628 - protein, 16 aa, Homo sapiens
  CDR3 for beta chain variable domain of TCR clone 168314 (TRBV27, TRBJ1-1)
CASSSRGRTGYTEAFF

SEQ ID NO: 336629 - protein, 12 aa, Homo sapiens
  CDR3 for alpha chain variable domain of TCR clone 168315 (TRAV1-1, TRAJ12)
CAVGDSSYKLIF

SEQ ID NO: 336630 - protein, 14 aa, Homo sapiens
  CDR3 for beta chain variable domain of TCR clone 168315 (TRBV20-1, TRBJ2-7)
CSAPELAGVREQYF

SEQ ID NO: 336631 - protein, 13 aa, Homo sapiens
  CDR3 for alpha chain variable domain of TCR clone 168316 (TRAV8-6, TRAJ39)
CAVSSPPGNMLTF

SEQ ID NO: 336632 - protein, 15 aa, Homo sapiens
  CDR3 for beta chain variable domain of TCR clone 168316 (TRBV9, TRBJ2-6)
CASSVALSGANVLTF

SEQ ID NO: 336633 - protein, 16 aa, Homo sapiens
  CDR3 for alpha chain variable domain of TCR clone 168317 (TRAV21, TRAJ37)
CAVRPRGSSNTGKLIF

SEQ ID NO: 336634 - protein, 14 aa, Homo sapiens
  CDR3 for beta chain variable domain of TCR clone 168317 (TRBV7-2, TRBJ2-7)
CASSPKTSFYEQYF

SEQ ID NO: 336635 - protein, 11 aa, Homo sapiens
  CDR3 for alpha chain variable domain of TCR clone 168318 (TRAV2, TRAJ13)
CASGGYQKVTF

SEQ ID NO: 336636 - protein, 20 aa, Homo sapiens
  CDR3 for beta chain variable domain of TCR clone 168318 (TRBV7-8, TRBJ2-2)
CASSHLFPGPTIHITGELFV

SEQ ID NO: 336637 - protein, 17 aa, Homo sapiens
  CDR3 for alpha chain variable domain of TCR clone 168319 (TRAV21, TRAJ24)
CAGLRLRSTDSWGKLQF

SEQ ID NO: 336638 - protein, 15 aa, Homo sapiens
  CDR3 for beta chain variable domain of TCR clone 168319 (TRBV7-2, TRBJ2-3)
CASSPRGLSTDTQYF

SEQ ID NO: 336639 - protein, 13 aa, Homo sapiens
  CDR3 for alpha chain variable domain of TCR clone 168320 (TRAV2, TRAJ21)
CAVFNFNKFYLDL

SEQ ID NO: 336640 - protein, 14 aa, Homo sapiens
  CDR3 for beta chain variable domain of TCR clone 168320 (TRBV15, TRBJ2-3)
CATRSGTSTDTQYF

SEQ ID NO: 336641 - protein, 10 aa, Homo sapiens
  CDR3 for alpha chain variable domain of TCR clone 168321 (TRAV8-4, TRAJ39)
CAVAGNMLTF

SEQ ID NO: 336642 - protein, 17 aa, Homo sapiens
  CDR3 for beta chain variable domain of TCR clone 168321 (TRBV20-1, TRBJ2-2)
CSASGSGQGGLTGELFF

SEQ ID NO: 336643 - protein, 12 aa, Homo sapiens
  CDR3 for alpha chain variable domain of TCR clone 168322 (TRAV4, TRAJ26)
CLVGDYGQNFVF

SEQ ID NO: 336644 - protein, 16 aa, Homo sapiens
  CDR3 for beta chain variable domain of TCR clone 168322 (TRBV7-2, TRBJ1-2)
CASSSNQDKRGHGYTF

SEQ ID NO: 336645 - protein, 15 aa, Homo sapiens
  CDR3 for alpha chain variable domain of TCR clone 168323 (TRAV12-2, TRAJ53)
CAVNGGGGSNYKLTF

SEQ ID NO: 336646 - protein, 14 aa, Homo sapiens
  CDR3 for beta chain variable domain of TCR clone 168323 (TRBV7-3, TRBJ1-1)
CASSPTGGVSEAFF

SEQ ID NO: 336647 - protein, 14 aa, Homo sapiens
  CDR3 for alpha chain variable domain of TCR clone 168324 (TRAV8-4, TRAJ49)
CAVKRGLPVTSSIL

SEQ ID NO: 336648 - protein, 15 aa, Homo sapiens
  CDR3 for beta chain variable domain of TCR clone 168324 (TRBV7-9, TRBJ1-5)
CASSQGHQPNQPQHF

SEQ ID NO: 336649 - protein, 14 aa, Homo sapiens
  CDR3 for alpha chain variable domain of TCR clone 168325 (TRAV23/DV6, TRAJ13)
CPASETGGYQKVTF

SEQ ID NO: 336650 - protein, 16 aa, Homo sapiens
  CDR3 for beta chain variable domain of TCR clone 168325 (TRBV5-1, TRBJ1-3)
CASSPWAPSSGNTIYF

SEQ ID NO: 336651 - protein, 12 aa, Homo sapiens
  CDR3 for alpha chain variable domain of TCR clone 168326 (TRAV36/DV7, TRAJ54)
CAVVRGAQKLVF

SEQ ID NO: 336652 - protein, 16 aa, Homo sapiens
  CDR3 for beta chain variable domain of TCR clone 168326 (TRBV7-3, TRBJ2-1)
CASSLEGYRPYNEQFF

SEQ ID NO: 336653 - protein, 12 aa, Homo sapiens
  CDR3 for alpha chain variable domain of TCR clone 168327 (TRAV21, TRAJ29)
CAVTSGNTPLVF

SEQ ID NO: 336654 - protein, 14 aa, Homo sapiens
  CDR3 for beta chain variable domain of TCR clone 168327 (TRBV7-9, TRBJ1-4)
CAITEGEANEKLFF

SEQ ID NO: 336655 - protein, 13 aa, Homo sapiens
  CDR3 for alpha chain variable domain of TCR clone 168328 (TRAV16, TRAJ34)
CALISYNTDKLIF

SEQ ID NO: 336656 - protein, 12 aa, Homo sapiens
  CDR3 for beta chain variable domain of TCR clone 168328 (TRBV7-8, TRBJ2-7)
CASSLGDREQYF

SEQ ID NO: 336657 - protein, 13 aa, Homo sapiens
  CDR3 for alpha chain variable domain of TCR clone 168329 (TRAV25, TRAJ30)
CAGRVDRDDKIIF

SEQ ID NO: 336658 - protein, 12 aa, Homo sapiens
  CDR3 for beta chain variable domain of TCR clone 168329 (TRBV20-1, TRBJ1-2)
CSAPPRQGPDTF

SEQ ID NO: 336659 - protein, 14 aa, Homo sapiens
  CDR3 for alpha chain variable domain of TCR clone 168330 (TRAV17, TRAJ35)
CATDRPGFGNVLHR

SEQ ID NO: 336660 - protein, 14 aa, Homo sapiens
  CDR3 for beta chain variable domain of TCR clone 168330 (TRBV7-8, TRBJ2-3)
CASSLEAGTDTQYF

SEQ ID NO: 336661 - protein, 14 aa, Homo sapiens
  CDR3 for alpha chain variable domain of TCR clone 168331 (TRAV29/DV5, TRAJ36)
CAARRKTVANNLSF

SEQ ID NO: 336662 - protein, 14 aa, Homo sapiens
  CDR3 for beta chain variable domain of TCR clone 168331 (TRBV12-5, TRBJ2-5)
CASGSRTHQETQYF

SEQ ID NO: 336663 - protein, 11 aa, Homo sapiens
  CDR3 for alpha chain variable domain of TCR clone 168332 (TRAV27, TRAJ45)
CAGAQEEVLTD

SEQ ID NO: 336664 - protein, 11 aa, Homo sapiens
  CDR3 for beta chain variable domain of TCR clone 168332 (TRBV19, TRBJ1-1)
CAGSIGSEAFF

SEQ ID NO: 336665 - protein, 12 aa, Homo sapiens
  CDR3 for alpha chain variable domain of TCR clone 168333 (TRAV30, TRAJ43)
CGTEERGNDMRF

SEQ ID NO: 336666 - protein, 17 aa, Homo sapiens
  CDR3 for beta chain variable domain of TCR clone 168333 (TRBV7-8, TRBJ2-6)
CASSAATGGAGANVLTV

SEQ ID NO: 336667 - protein, 16 aa, Homo sapiens
  CDR3 for alpha chain variable domain of TCR clone 168334 (TRAV30, TRAJ24)
CGPEIVDADSWGKFQF

SEQ ID NO: 336668 - protein, 10 aa, Homo sapiens
  CDR3 for beta chain variable domain of TCR clone 168334 (TRBV2, TRBJ2-7)
CASSVYEQYF

SEQ ID NO: 336669 - protein, 17 aa, Homo sapiens
  CDR3 for alpha chain variable domain of TCR clone 168335 (TRAV12-2, TRAJ48)
CASNEKLTFGTGTRLTI

SEQ ID NO: 336670 - protein, 12 aa, Homo sapiens
  CDR3 for beta chain variable domain of TCR clone 168335 (TRBV5-1, TRBJ2-5)
GCWGAGEKTQYF

SEQ ID NO: 336671 - protein, 15 aa, Homo sapiens
  CDR3 for alpha chain variable domain of TCR clone 168336 (TRAV21, TRAJ22)
CAVRLFFWFCKATDF

SEQ ID NO: 336672 - protein, 14 aa, Homo sapiens
  CDR3 for beta chain variable domain of TCR clone 168336 (TRBV19, TRBJ1-5)
CASRAPDSFLSQHF

SEQ ID NO: 336673 - protein, 15 aa, Homo sapiens
  CDR3 for alpha chain variable domain of TCR clone 168337 (TRAV3, TRAJ13)
CAVRDIAGGYQKVTF

SEQ ID NO: 336674 - protein, 13 aa, Homo sapiens
  CDR3 for beta chain variable domain of TCR clone 168337 (TRBV2, TRBJ2-2)
CASSKKNTVELFF

SEQ ID NO: 336675 - protein, 12 aa, Homo sapiens
  CDR3 for alpha chain variable domain of TCR clone 168338 (TRAV12-2, TRAJ30)
CAVRNRDDKIIF

SEQ ID NO: 336676 - protein, 15 aa, Homo sapiens
  CDR3 for beta chain variable domain of TCR clone 168338 (TRBV6-3, TRBJ1-5)
CASRVDRWINQPQHF

SEQ ID NO: 336677 - protein, 14 aa, Homo sapiens
  CDR3 for alpha chain variable domain of TCR clone 168339 (TRAV1-2, TRAJ16)
CAVNRFPDSQKLLF

SEQ ID NO: 336678 - protein, 20 aa, Homo sapiens
  CDR3 for beta chain variable domain of TCR clone 168339 (TRBV28, TRBJ2-1)
CASTPIGRSPGLAGGNEQFF

SEQ ID NO: 336679 - protein, 12 aa, Homo sapiens
  CDR3 for alpha chain variable domain of TCR clone 168340 (TRAV8-3, TRAJ26)
CAGDNYGQNFVF

SEQ ID NO: 336680 - protein, 12 aa, Homo sapiens
  CDR3 for beta chain variable domain of TCR clone 168340 (TRBV11-2, TRBJ2-1)
CASSPGNNEQFC

SEQ ID NO: 336681 - protein, 11 aa, Homo sapiens
  CDR3 for alpha chain variable domain of TCR clone 168341 (TRAV2, TRAJ13)
CASGGYQKVTF

SEQ ID NO: 336682 - protein, 14 aa, Homo sapiens
  CDR3 for beta chain variable domain of TCR clone 168341 (TRBV7-3, TRBJ2-7)
CASSYNQDYYEQYF

SEQ ID NO: 336683 - protein, 13 aa, Homo sapiens
  CDR3 for alpha chain variable domain of TCR clone 168342 (TRAV5, TRAJ30)
CAEIANRDDKIIS

SEQ ID NO: 336684 - protein, 14 aa, Homo sapiens
  CDR3 for beta chain variable domain of TCR clone 168342 (TRBV4-1, TRBJ2-2)
CASSQAVNTGELFF

SEQ ID NO: 336685 - protein, 14 aa, Homo sapiens
  CDR3 for alpha chain variable domain of TCR clone 168343 (TRAV17, TRAJ6)
CATPAMGGSYIPTF

SEQ ID NO: 336686 - protein, 13 aa, Homo sapiens
  CDR3 for beta chain variable domain of TCR clone 168343 (TRBV7-9, TRBJ1-2)
CASSLKQNYGYTF

SEQ ID NO: 336687 - protein, 11 aa, Homo sapiens
  CDR3 for alpha chain variable domain of TCR clone 168344 (TRAV21, TRAJ48)
RAVDGNEKLTF

SEQ ID NO: 336688 - protein, 15 aa, Homo sapiens
  CDR3 for beta chain variable domain of TCR clone 168344 (TRBV27, TRBJ2-1)
CASSNGGGSSNEQFF

SEQ ID NO: 336689 - protein, 14 aa, Homo sapiens
  CDR3 for alpha chain variable domain of TCR clone 168345 (TRAV16, TRAJ57)
CALSGQGGSEKLVV

SEQ ID NO: 336690 - protein, 13 aa, Homo sapiens
  CDR3 for beta chain variable domain of TCR clone 168345 (TRBV5-4, TRBJ2-1)
CASSLQGPREQFF

SEQ ID NO: 336691 - protein, 14 aa, Homo sapiens
  CDR3 for alpha chain variable domain of TCR clone 168346 (TRAV1-2, TRAJ8)
CAVREDTGFQKLVF

SEQ ID NO: 336692 - protein, 11 aa, Homo sapiens
  CDR3 for beta chain variable domain of TCR clone 168346 (TRBV11-2, TRBJ2-2)
CQQPWRRGLFF

SEQ ID NO: 336693 - protein, 13 aa, Homo sapiens
  CDR3 for alpha chain variable domain of TCR clone 168347 (TRAV8-3, TRAJ43)
CAVGPDNNNDMRF

SEQ ID NO: 336694 - protein, 15 aa, Homo sapiens
  CDR3 for beta chain variable domain of TCR clone 168347 (TRBV5-7, TRBJ1-3)
CASSGRGFSGNTIYF

SEQ ID NO: 336695 - protein, 14 aa, Homo sapiens
  CDR3 for alpha chain variable domain of TCR clone 168348 (TRAV12-2, TRAJ17)
CAALFKAAGNKLTF

SEQ ID NO: 336696 - protein, 16 aa, Homo sapiens
  CDR3 for beta chain variable domain of TCR clone 168348 (TRBV7-2, TRBJ2-5)
CASSSKWLSGQETQYF

SEQ ID NO: 336697 - protein, 14 aa, Homo sapiens
  CDR3 for alpha chain variable domain of TCR clone 168349 (TRAV1-2, TRAJ28)
CVARSGAGSYQLTF

SEQ ID NO: 336698 - protein, 16 aa, Homo sapiens
  CDR3 for beta chain variable domain of TCR clone 168349 (TRBV5-1, TRBJ2-5)
CAISLRRTSGQETQYF

SEQ ID NO: 336699 - protein, 13 aa, Homo sapiens
  CDR3 for alpha chain variable domain of TCR clone 168350 (TRAV27, TRAJ39)
CAGDTPAGDMLTF

SEQ ID NO: 336700 - protein, 13 aa, Homo sapiens
  CDR3 for beta chain variable domain of TCR clone 168350 (TRBV4-1, TRBJ2-4)
CASSQVGIDIQYF

SEQ ID NO: 336701 - protein, 13 aa, Homo sapiens
  CDR3 for alpha chain variable domain of TCR clone 168351 (TRAV17, TRAJ9)
CATAITGGFKTIF

SEQ ID NO: 336702 - protein, 16 aa, Homo sapiens
  CDR3 for beta chain variable domain of TCR clone 168351 (TRBV15, TRBJ2-1)
YATSRNLAGGYNEQFF

SEQ ID NO: 336703 - protein, 16 aa, Homo sapiens
  CDR3 for alpha chain variable domain of TCR clone 168352 (TRAV2, TRAJ4)
CAVEYRFSCGYNKLIF

SEQ ID NO: 336704 - protein, 13 aa, Homo sapiens
  CDR3 for beta chain variable domain of TCR clone 168352 (TRBV7-7, TRBJ2-5)
CASSRSGQETQYF

SEQ ID NO: 336705 - protein, 13 aa, Homo sapiens
  CDR3 for alpha chain variable domain of TCR clone 168353 (TRAV20, TRAJ21)
CAVEGYNFNKFYF

SEQ ID NO: 336706 - protein, 14 aa, Homo sapiens
  CDR3 for beta chain variable domain of TCR clone 168353 (TRBV7-2, TRBJ2-7)
CASRSQGAAYEQYF

SEQ ID NO: 336707 - protein, 12 aa, Homo sapiens
  CDR3 for alpha chain variable domain of TCR clone 168354 (TRAV12-1, TRAJ20)
CVVNPDDYKLSF

SEQ ID NO: 336708 - protein, 13 aa, Homo sapiens
  CDR3 for beta chain variable domain of TCR clone 168354 (TRBV20-1, TRBJ2-7)
CSARWGYNYEQYF

SEQ ID NO: 336709 - protein, 12 aa, Homo sapiens
  CDR3 for alpha chain variable domain of TCR clone 168355 (TRAV12-2, TRAJ42)
CAVGGSQRNLIF

SEQ ID NO: 336710 - protein, 16 aa, Homo sapiens
  CDR3 for beta chain variable domain of TCR clone 168355 (TRBV7-3, TRBJ2-2)
CASSLKRGTLSGELFF

SEQ ID NO: 336711 - protein, 12 aa, Homo sapiens
  CDR3 for alpha chain variable domain of TCR clone 168356 (TRAV40, TRAJ20)
CLRGLNDDKLSF

SEQ ID NO: 336712 - protein, 14 aa, Homo sapiens
  CDR3 for beta chain variable domain of TCR clone 168356 (TRBV19, TRBJ2-1)
CASSSGRDYNEQFF

SEQ ID NO: 336713 - protein, 16 aa, Homo sapiens
  CDR3 for alpha chain variable domain of TCR clone 168357 (TRAV35, TRAJ28)
CAVQRYSGAGSYQLAF

SEQ ID NO: 336714 - protein, 13 aa, Homo sapiens
  CDR3 for beta chain variable domain of TCR clone 168357 (TRBV19, TRBJ1-2)
CASSQGQVYGYTF

SEQ ID NO: 336715 - protein, 12 aa, Homo sapiens
  CDR3 for alpha chain variable domain of TCR clone 168358 (TRAV35, TRAJ30)
CAGLNRDDKIIF

SEQ ID NO: 336716 - protein, 15 aa, Homo sapiens
  CDR3 for beta chain variable domain of TCR clone 168358 (TRBV7-9, TRBJ1-5)
CASSQGHQPNQPQHF

SEQ ID NO: 336717 - protein, 15 aa, Homo sapiens
  CDR3 for alpha chain variable domain of TCR clone 168359 (TRAV36/DV7, TRAJ53)
CAVEGSGGSNYKLTF

SEQ ID NO: 336718 - protein, 12 aa, Homo sapiens
  CDR3 for beta chain variable domain of TCR clone 168359 (TRBV27, TRBJ2-1)
CASRGFYNEQFF

SEQ ID NO: 336719 - protein, 12 aa, Homo sapiens
  CDR3 for alpha chain variable domain of TCR clone 168360 (TRAV13-1, TRAJ21)
CAAKEGFNKFYF

SEQ ID NO: 336720 - protein, 15 aa, Homo sapiens
  CDR3 for beta chain variable domain of TCR clone 168360 (TRBV7-3, TRBJ1-1)
CASSQDWGAEAFLDK

SEQ ID NO: 336721 - protein, 13 aa, Homo sapiens
  CDR3 for alpha chain variable domain of TCR clone 168361 (TRAV2, TRAJ13)
CAVESGGYQQVTF

SEQ ID NO: 336722 - protein, 13 aa, Homo sapiens
  CDR3 for beta chain variable domain of TCR clone 168361 (TRBV7-2, TRBJ1-1)
CASNLKGAKVAFF

SEQ ID NO: 336723 - protein, 14 aa, Homo sapiens
  CDR3 for alpha chain variable domain of TCR clone 168362 (TRAV8-3, TRAJ4)
CAVGAAGGYNKLIF

SEQ ID NO: 336724 - protein, 12 aa, Homo sapiens
  CDR3 for beta chain variable domain of TCR clone 168362 (TRBV7-9, TRBJ2-7)
CASSLEGYEHYF

SEQ ID NO: 336725 - protein, 13 aa, Homo sapiens
  CDR3 for alpha chain variable domain of TCR clone 168363 (TRAV1-1, TRAJ23)
CAVVANQGGKLIL

SEQ ID NO: 336726 - protein, 16 aa, Homo sapiens
  CDR3 for beta chain variable domain of TCR clone 168363 (TRBV5-5, TRBJ1-2)
CASSPTWGRGLYGYTF

SEQ ID NO: 336727 - protein, 15 aa, Homo sapiens
  CDR3 for alpha chain variable domain of TCR clone 168364 (TRAV3, TRAJ3)
CAVRDMSSSASKIIF

SEQ ID NO: 336728 - protein, 13 aa, Homo sapiens
  CDR3 for beta chain variable domain of TCR clone 168364 (TRBV2, TRBJ2-7)
CASSVGGSGEQYF

SEQ ID NO: 336729 - protein, 18 aa, Homo sapiens
  CDR3 for alpha chain variable domain of TCR clone 168365 (TRAV9-2, TRAJ52)
CALSRHNAGGTSYGKLTF

SEQ ID NO: 336730 - protein, 13 aa, Homo sapiens
  CDR3 for beta chain variable domain of TCR clone 168365 (TRBV7-9, TRBJ1-2)
CASSLEQNYGYTF

SEQ ID NO: 336731 - protein, 11 aa, Homo sapiens
  CDR3 for alpha chain variable domain of TCR clone 168366 (TRAV41, TRAJ49)
CAVRSRNQFYF

SEQ ID NO: 336732 - protein, 14 aa, Homo sapiens
  CDR3 for beta chain variable domain of TCR clone 168366 (TRBV12-4, TRBJ2-5)
CASSFSSGGETQYF

SEQ ID NO: 336733 - protein, 12 aa, Homo sapiens
  CDR3 for alpha chain variable domain of TCR clone 168367 (TRAV2, TRAJ31)
CAVEDNNARPTF

SEQ ID NO: 336734 - protein, 16 aa, Homo sapiens
  CDR3 for beta chain variable domain of TCR clone 168367 (TRBV10-3, TRBJ2-1)
CAISGVGDGGGGEQFF

SEQ ID NO: 336735 - protein, 16 aa, Homo sapiens
  CDR3 for alpha chain variable domain of TCR clone 168368 (TRAV16, TRAJ4)
CALSRMFSGGHNKLIF

SEQ ID NO: 336736 - protein, 14 aa, Homo sapiens
  CDR3 for beta chain variable domain of TCR clone 168368 (TRBV25-1, TRBJ1-1)
CASTHLGGNTEAFF

SEQ ID NO: 336737 - protein, 13 aa, Homo sapiens
  CDR3 for alpha chain variable domain of TCR clone 168369 (TRAV21, TRAJ27)
CAARPGNAGKSTF

SEQ ID NO: 336738 - protein, 15 aa, Homo sapiens
  CDR3 for beta chain variable domain of TCR clone 168369 (TRBV12-5, TRBJ2-2)
CASGRLGGNTGELFF

SEQ ID NO: 336739 - protein, 14 aa, Homo sapiens
  CDR3 for alpha chain variable domain of TCR clone 168370 (TRAV8-3, TRAJ42)
CAVGAWGSQGNLIF

SEQ ID NO: 336740 - protein, 15 aa, Homo sapiens
  CDR3 for beta chain variable domain of TCR clone 168370 (TRBV29-1, TRBJ1-2)
CRVVLEAGSNYGYTF

SEQ ID NO: 336741 - protein, 17 aa, Homo sapiens
  CDR3 for alpha chain variable domain of TCR clone 168371 (TRAV3, TRAJ6)
CAVRDGPRAVGSYILTF

SEQ ID NO: 336742 - protein, 20 aa, Homo sapiens
  CDR3 for beta chain variable domain of TCR clone 168371 (TRBV28, TRBJ2-1)
CASTPIGRSPGLAGGNEQFF

SEQ ID NO: 336743 - protein, 15 aa, Homo sapiens
  CDR3 for alpha chain variable domain of TCR clone 168372 (TRAV27, TRAJ38)
CAGRFNAGNNRKLIW

SEQ ID NO: 336744 - protein, 13 aa, Homo sapiens
  CDR3 for beta chain variable domain of TCR clone 168372 (TRBV12-5, TRBJ2-3)
CASQNRGTDMQYF

SEQ ID NO: 336745 - protein, 11 aa, Homo sapiens
  CDR3 for alpha chain variable domain of TCR clone 168373 (TRAV1-1, TRAJ23)
CAVRQGGKLIF

SEQ ID NO: 336746 - protein, 12 aa, Homo sapiens
  CDR3 for beta chain variable domain of TCR clone 168373 (TRBV19, TRBJ1-5)
CGSSIAQQPQHF

SEQ ID NO: 336747 - protein, 10 aa, Homo sapiens
  CDR3 for alpha chain variable domain of TCR clone 168374 (TRAV13-1, TRAJ41)
CAASGPRRTQ

SEQ ID NO: 336748 - protein, 15 aa, Homo sapiens
  CDR3 for beta chain variable domain of TCR clone 168374 (TRBV18, TRBJ2-3)
PAHHRREGRGNTQYF

SEQ ID NO: 336749 - protein, 14 aa, Homo sapiens
  CDR3 for alpha chain variable domain of TCR clone 168375 (TRAV13-1, TRAJ45)
CAATSGGGADGLTS

SEQ ID NO: 336750 - protein, 13 aa, Homo sapiens
  CDR3 for beta chain variable domain of TCR clone 168375 (TRBV20-1, TRBJ1-1)
CSARGGGNTEAFF

SEQ ID NO: 336751 - protein, 10 aa, Homo sapiens
  CDR3 for alpha chain variable domain of TCR clone 168376 (TRAV5, TRAJ34)
CAEDTDKLIF

SEQ ID NO: 336752 - protein, 12 aa, Homo sapiens
  CDR3 for beta chain variable domain of TCR clone 168376 (TRBV11-2, TRBJ2-2)
CTSSLGGGELFF

SEQ ID NO: 336753 - protein, 13 aa, Homo sapiens
  CDR3 for alpha chain variable domain of TCR clone 168377 (TRAV39, TRAJ58)
CAGEETSGSRLTF

SEQ ID NO: 336754 - protein, 13 aa, Homo sapiens
  CDR3 for beta chain variable domain of TCR clone 168377 (TRBV24-1, TRBJ2-2)
CATSDWSTGELFF

SEQ ID NO: 336755 - protein, 12 aa, Homo sapiens
  CDR3 for alpha chain variable domain of TCR clone 168378 (TRAV29/DV5, TRAJ49)
CAATDTGNQFYF

SEQ ID NO: 336756 - protein, 19 aa, Homo sapiens
  CDR3 for beta chain variable domain of TCR clone 168378 (TRBV25-1, TRBJ2-2)
CAILVFRVDRGRKTGELFF

SEQ ID NO: 336757 - protein, 15 aa, Homo sapiens
  CDR3 for alpha chain variable domain of TCR clone 168379 (TRAV38-1, TRAJ37)
CAFIHGSGNTGKLIF

SEQ ID NO: 336758 - protein, 12 aa, Homo sapiens
  CDR3 for beta chain variable domain of TCR clone 168379 (TRBV7-9, TRBJ2-1)
CASSFGSYEQYF

SEQ ID NO: 336759 - protein, 12 aa, Homo sapiens
  CDR3 for alpha chain variable domain of TCR clone 168380 (TRAV12-2, TRAJ42)
CAVGGSQGNLIF

SEQ ID NO: 336760 - protein, 14 aa, Homo sapiens
  CDR3 for beta chain variable domain of TCR clone 168380 (TRBV19, TRBJ2-7)
CASSIEASSYEQYF

SEQ ID NO: 336761 - protein, 13 aa, Homo sapiens
  CDR3 for alpha chain variable domain of TCR clone 168381 (TRAV3, TRAJ20)
CAVRDTPRYKLSF

SEQ ID NO: 336762 - protein, 14 aa, Homo sapiens
  CDR3 for beta chain variable domain of TCR clone 168381 (TRBV11-1, TRBJ2-5)
CASTFAVPSYEQYF

SEQ ID NO: 336763 - protein, 14 aa, Homo sapiens
  CDR3 for alpha chain variable domain of TCR clone 168382 (TRAV1-2, TRAJ16)
CAVNRFSDGQKLLF

SEQ ID NO: 336764 - protein, 12 aa, Homo sapiens
  CDR3 for beta chain variable domain of TCR clone 168382 (TRBV5-1, TRBJ2-7)
CASSSTPYEQYF

SEQ ID NO: 336765 - protein, 14 aa, Homo sapiens
  CDR3 for alpha chain variable domain of TCR clone 168383 (TRAV12-3, TRAJ10)
SHLPLTGGGTKLTF

SEQ ID NO: 336766 - protein, 16 aa, Homo sapiens
  CDR3 for beta chain variable domain of TCR clone 168383 (TRBV19, TRBJ2-1)
CASSKAGPSSYNEQFF

SEQ ID NO: 336767 - protein, 15 aa, Homo sapiens
  CDR3 for alpha chain variable domain of TCR clone 168384 (TRAV27, TRAJ39)
ASTSVQENAGNMLTF

SEQ ID NO: 336768 - protein, 14 aa, Homo sapiens
  CDR3 for beta chain variable domain of TCR clone 168384 (TRBV7-3, TRBJ2-1)
CASSLAGGTNEQFF

SEQ ID NO: 336769 - protein, 11 aa, Homo sapiens
  CDR3 for alpha chain variable domain of TCR clone 168385 (TRAV4, TRAJ23)
CLVAPGGKPIF

SEQ ID NO: 336770 - protein, 15 aa, Homo sapiens
  CDR3 for beta chain variable domain of TCR clone 168385 (TRBV7-2, TRBJ2-1)
CAGSFQADEYNEQFF

SEQ ID NO: 336771 - protein, 14 aa, Homo sapiens
  CDR3 for alpha chain variable domain of TCR clone 168386 (TRAV13-2, TRAJ17)
CAENSKAAGNKLTF

SEQ ID NO: 336772 - protein, 12 aa, Homo sapiens
  CDR3 for beta chain variable domain of TCR clone 168386 (TRBV14, TRBJ2-7)
CASSSVKGEQYF

SEQ ID NO: 336773 - protein, 13 aa, Homo sapiens
  CDR3 for alpha chain variable domain of TCR clone 168387 (TRAV23/DV6, TRAJ16)
CAASLSDGQKLLF

SEQ ID NO: 336774 - protein, 15 aa, Homo sapiens
  CDR3 for beta chain variable domain of TCR clone 168387 (TRBV2, TRBJ2-2)
CASSRETVGTGELFF

SEQ ID NO: 336775 - protein, 18 aa, Homo sapiens
  CDR3 for alpha chain variable domain of TCR clone 168388 (TRAV1-2, TRAJ10)
CAVRALTPVTGGGNKLTF

SEQ ID NO: 336776 - protein, 14 aa, Homo sapiens
  CDR3 for beta chain variable domain of TCR clone 168388 (TRBV4-1, TRBJ1-1)
CASSQQGNGNAAFF

SEQ ID NO: 336777 - protein, 14 aa, Homo sapiens
  CDR3 for alpha chain variable domain of TCR clone 168389 (TRAV34, TRAJ44)
CGADGTGTASKLTF

SEQ ID NO: 336778 - protein, 15 aa, Homo sapiens
  CDR3 for beta chain variable domain of TCR clone 168389 (TRBV29-1, TRBJ2-1)
CSGRDRKSSYNEQFF

SEQ ID NO: 336779 - protein, 13 aa, Homo sapiens
  CDR3 for alpha chain variable domain of TCR clone 168390 (TRAV16, TRAJ28)
CVLTGAGSYQLTF

SEQ ID NO: 336780 - protein, 16 aa, Homo sapiens
  CDR3 for beta chain variable domain of TCR clone 168390 (TRBV28, TRBJ1-5)
CASSMTGQGWNQPQHF

SEQ ID NO: 336781 - protein, 14 aa, Homo sapiens
  CDR3 for alpha chain variable domain of TCR clone 168391 (TRAV2, TRAJ9)
CAVEDRSGGFKTIF

SEQ ID NO: 336782 - protein, 13 aa, Homo sapiens
  CDR3 for beta chain variable domain of TCR clone 168391 (TRBV11-3, TRBJ2-3)
CASSHDTKDTQYF

SEQ ID NO: 336783 - protein, 17 aa, Homo sapiens
  CDR3 for alpha chain variable domain of TCR clone 168392 (TRAV3, TRAJ6)
CAVRDGPRAGGSYIPTF

SEQ ID NO: 336784 - protein, 15 aa, Homo sapiens
  CDR3 for beta chain variable domain of TCR clone 168392 (TRBV4-1, TRBJ1-3)
CASSHPGTSGNTIYF

SEQ ID NO: 336785 - protein, 16 aa, Homo sapiens
  CDR3 for alpha chain variable domain of TCR clone 168393 (TRAV13-1, TRAJ48)
CAASIFGNFGNEKLTF

SEQ ID NO: 336786 - protein, 14 aa, Homo sapiens
  CDR3 for beta chain variable domain of TCR clone 168393 (TRBV19, TRBJ2-5)
CASSMTGQQETQYF

SEQ ID NO: 336787 - protein, 14 aa, Homo sapiens
  CDR3 for alpha chain variable domain of TCR clone 168394 (TRAV20, TRAJ47)
CAVTFGEYGNKLVF

SEQ ID NO: 336788 - protein, 14 aa, Homo sapiens
  CDR3 for beta chain variable domain of TCR clone 168394 (TRBV12-5, TRBJ2-5)
CASGSRTHQETQYF

SEQ ID NO: 336789 - protein, 13 aa, Homo sapiens
  CDR3 for alpha chain variable domain of TCR clone 168395 (TRAV2, TRAJ21)
CTVEDLNFNKLYF

SEQ ID NO: 336790 - protein, 15 aa, Homo sapiens
  CDR3 for beta chain variable domain of TCR clone 168395 (TRBV28, TRBJ2-5)
CASSPGQGSIETQYF

SEQ ID NO: 336791 - protein, 18 aa, Homo sapiens
  CDR3 for alpha chain variable domain of TCR clone 168396 (TRAV9-2, TRAJ52)
CALSRHNAVGTSYGKLTF

SEQ ID NO: 336792 - protein, 16 aa, Homo sapiens
  CDR3 for beta chain variable domain of TCR clone 168396 (TRBV19, TRBJ2-1)
CASSKAGPSSYNEQFF

SEQ ID NO: 336793 - protein, 14 aa, Homo sapiens
  CDR3 for alpha chain variable domain of TCR clone 168397 (TRAV29/DV5, TRAJ36)
CAARRKTGANNLFF

SEQ ID NO: 336794 - protein, 14 aa, Homo sapiens
  CDR3 for beta chain variable domain of TCR clone 168397 (TRBV18, TRBJ2-5)
CASSPGVSQETQYF

SEQ ID NO: 336795 - protein, 16 aa, Homo sapiens
  CDR3 for alpha chain variable domain of TCR clone 168398 (TRAV12-3, TRAJ53)
CAMSPGSGGSDYKLTF

SEQ ID NO: 336796 - protein, 12 aa, Homo sapiens
  CDR3 for beta chain variable domain of TCR clone 168398 (TRBV11-2, TRBJ2-2)
CASSLGGGELFF

SEQ ID NO: 336797 - protein, 13 aa, Homo sapiens
  CDR3 for alpha chain variable domain of TCR clone 168399 (TRAV17, TRAJ5)
CAPMDTGRRALTF

SEQ ID NO: 336798 - protein, 13 aa, Homo sapiens
  CDR3 for beta chain variable domain of TCR clone 168399 (TRBV15, TRBJ1-6)
CATSGGLNSPLHF

SEQ ID NO: 336799 - protein, 12 aa, Homo sapiens
  CDR3 for alpha chain variable domain of TCR clone 168400 (TRAV12-2, TRAJ31)
CAVNTPDARLMF

SEQ ID NO: 336800 - protein, 17 aa, Homo sapiens
  CDR3 for beta chain variable domain of TCR clone 168400 (TRBV20-1, TRBJ1-6)
CSARGGYTCSYNSPLHF

SEQ ID NO: 336801 - protein, 15 aa, Homo sapiens
  CDR3 for alpha chain variable domain of TCR clone 168401 (TRAV16, TRAJ57)
CALSGGQGGSEKLVF

SEQ ID NO: 336802 - protein, 15 aa, Homo sapiens
  CDR3 for beta chain variable domain of TCR clone 168401 (TRBV6-3, TRBJ2-7)
CASSSPGTVFYEQYF

SEQ ID NO: 336803 - protein, 15 aa, Homo sapiens
  CDR3 for alpha chain variable domain of TCR clone 168402 (TRAV13-1, TRAJ44)
CAASRGGGTASKLTF

SEQ ID NO: 336804 - protein, 13 aa, Homo sapiens
  CDR3 for beta chain variable domain of TCR clone 168402 (TRBV20-1, TRBJ1-6)
CSAPLGVGSPLHF

SEQ ID NO: 336805 - protein, 13 aa, Homo sapiens
  CDR3 for alpha chain variable domain of TCR clone 168403 (TRAV12-1, TRAJ29)
CVVVGSGNTPLVF

SEQ ID NO: 336806 - protein, 15 aa, Homo sapiens
  CDR3 for beta chain variable domain of TCR clone 168403 (TRBV20-1, TRBJ1-1)
CSASRGVTGNTEAFF

SEQ ID NO: 336807 - protein, 21 aa, Homo sapiens
  CDR3 for alpha chain variable domain of TCR clone 168404 (TRAV8-3, TRAJ6)
CAVGGEEATYLHLEEEPSLLF

SEQ ID NO: 336808 - protein, 14 aa, Homo sapiens
  CDR3 for beta chain variable domain of TCR clone 168404 (TRBV5-1, TRBJ2-7)
CASSRGESLYEQYF

SEQ ID NO: 336809 - protein, 18 aa, Homo sapiens
  CDR3 for alpha chain variable domain of TCR clone 168405 (TRAV13-1, TRAJ52)
CVASKRSAGGTSYGKLTF

SEQ ID NO: 336810 - protein, 15 aa, Homo sapiens
  CDR3 for beta chain variable domain of TCR clone 168405 (TRBV20-1, TRBJ1-1)
CSASRGVTGNTEAFF

SEQ ID NO: 336811 - protein, 15 aa, Homo sapiens
  CDR3 for alpha chain variable domain of TCR clone 168406 (TRAV26-1, TRAJ22)
CIVRVSFWFCKATDL

SEQ ID NO: 336812 - protein, 16 aa, Homo sapiens
  CDR3 for beta chain variable domain of TCR clone 168406 (TRBV24-1, TRBJ2-3)
CATSDPGTGAIDTQYF

SEQ ID NO: 336813 - protein, 15 aa, Homo sapiens
  CDR3 for alpha chain variable domain of TCR clone 168407 (TRAV1-1, TRAJ20)
CAVRDNVANDYKLSF

SEQ ID NO: 336814 - protein, 13 aa, Homo sapiens
  CDR3 for beta chain variable domain of TCR clone 168407 (TRBV4-1, TRBJ2-2)
CASSQENTWELFF

SEQ ID NO: 336815 - protein, 12 aa, Homo sapiens
  CDR3 for alpha chain variable domain of TCR clone 168408 (TRAV3, TRAJ20)
CAVRDGDYKLSF

SEQ ID NO: 336816 - protein, 14 aa, Homo sapiens
  CDR3 for beta chain variable domain of TCR clone 168408 (TRBV18, TRBJ1-2)
CASSPDRVVYGYTF

SEQ ID NO: 336817 - protein, 13 aa, Homo sapiens
  CDR3 for alpha chain variable domain of TCR clone 168409 (TRAV8-3, TRAJ28)
CAVGAVGGYQLTF

SEQ ID NO: 336818 - protein, 14 aa, Homo sapiens
  CDR3 for beta chain variable domain of TCR clone 168409 (TRBV7-2, TRBJ2-7)
CASKSQGAAYEQYF

SEQ ID NO: 336819 - protein, 16 aa, Homo sapiens
  CDR3 for alpha chain variable domain of TCR clone 168410 (TRAV12-3, TRAJ53)
CPISPWSGGSNYKLTF

SEQ ID NO: 336820 - protein, 11 aa, Homo sapiens
  CDR3 for beta chain variable domain of TCR clone 168410 (TRBV29-1, TRBJ2-5)
CSEDRTGTQYF

SEQ ID NO: 336821 - protein, 14 aa, Homo sapiens
  CDR3 for alpha chain variable domain of TCR clone 168411 (TRAV26-1, TRAJ29)
CIVRVEPGNTPLVF

SEQ ID NO: 336822 - protein, 14 aa, Homo sapiens
  CDR3 for beta chain variable domain of TCR clone 168411 (TRBV6-5, TRBJ1-6)
CASSPGRADSPLHF

SEQ ID NO: 336823 - protein, 14 aa, Homo sapiens
  CDR3 for alpha chain variable domain of TCR clone 168412 (TRAV13-1, TRAJ16)
CAAAYFFRWPEAAL

SEQ ID NO: 336824 - protein, 12 aa, Homo sapiens
  CDR3 for beta chain variable domain of TCR clone 168412 (TRBV12-5, TRBJ2-5)
CASGQGVETQYF

SEQ ID NO: 336825 - protein, 14 aa, Homo sapiens
  CDR3 for alpha chain variable domain of TCR clone 168413 (TRAV38-1, TRAJ45)
CASHSGGGADGLTF

SEQ ID NO: 336826 - protein, 15 aa, Homo sapiens
  CDR3 for beta chain variable domain of TCR clone 168413 (TRBV5-1, TRBJ2-7)
CASSLGDFTTYEQYF

SEQ ID NO: 336827 - protein, 12 aa, Homo sapiens
  CDR3 for alpha chain variable domain of TCR clone 168414 (TRAV3, TRAJ26)
CAVRDYGQNFVF

SEQ ID NO: 336828 - protein, 15 aa, Homo sapiens
  CDR3 for beta chain variable domain of TCR clone 168414 (TRBV15, TRBJ1-3)
CATSRDRGPGNTIYF

SEQ ID NO: 336829 - protein, 13 aa, Homo sapiens
  CDR3 for alpha chain variable domain of TCR clone 168415 (TRAV27, TRAJ54)
CAGAGQGAQKLVF

SEQ ID NO: 336830 - protein, 14 aa, Homo sapiens
  CDR3 for beta chain variable domain of TCR clone 168415 (TRBV5-8, TRBJ2-3)
CASSPGTFTDTQYF

SEQ ID NO: 336831 - protein, 10 aa, Homo sapiens
  CDR3 for alpha chain variable domain of TCR clone 168416 (TRAV12-3, TRAJ18)
CAMSAEAQPW

SEQ ID NO: 336832 - protein, 17 aa, Homo sapiens
  CDR3 for beta chain variable domain of TCR clone 168416 (TRBV15, TRBJ1-4)
RATSRYGTGDPNEKLFF

SEQ ID NO: 336833 - protein, 15 aa, Homo sapiens
  CDR3 for alpha chain variable domain of TCR clone 168417 (TRAV14/DV4, TRAJ12)
CSMRELMDSSYNLIF

SEQ ID NO: 336834 - protein, 10 aa, Homo sapiens
  CDR3 for beta chain variable domain of TCR clone 168417 (TRBV20-1, TRBJ2-7)
CSEGYYEQYF

SEQ ID NO: 336835 - protein, 17 aa, Homo sapiens
  CDR3 for alpha chain variable domain of TCR clone 168418 (TRAV3, TRAJ38)
CAVRDCLNAGTNRKLIW

SEQ ID NO: 336836 - protein, 14 aa, Homo sapiens
  CDR3 for beta chain variable domain of TCR clone 168418 (TRBV5-5, TRBJ1-5)
CASSGQGVDQPQNF

SEQ ID NO: 336837 - protein, 12 aa, Homo sapiens
  CDR3 for alpha chain variable domain of TCR clone 168419 (TRAV21, TRAJ43)
CAVSWNNNDMRF

SEQ ID NO: 336838 - protein, 15 aa, Homo sapiens
  CDR3 for beta chain variable domain of TCR clone 168419 (TRBV20-1, TRBJ2-1)
CSASPPSGGYNGQFF

SEQ ID NO: 336839 - protein, 11 aa, Homo sapiens
  CDR3 for alpha chain variable domain of TCR clone 168420 (TRAV1-1, TRAJ23)
CAVRQGGKLIF

SEQ ID NO: 336840 - protein, 14 aa, Homo sapiens
  CDR3 for beta chain variable domain of TCR clone 168420 (TRBV7-6, TRBJ2-7)
CASSLTGTGNEQYF

SEQ ID NO: 336841 - protein, 14 aa, Homo sapiens
  CDR3 for alpha chain variable domain of TCR clone 168421 (TRAV12-3, TRAJ10)
SHLPLTGGGNKLTF

SEQ ID NO: 336842 - protein, 15 aa, Homo sapiens
  CDR3 for beta chain variable domain of TCR clone 168421 (TRBV20-1, TRBJ1-2)
CSATGGARGFYGYTF

SEQ ID NO: 336843 - protein, 14 aa, Homo sapiens
  CDR3 for alpha chain variable domain of TCR clone 168422 (TRAV35, TRAJ13)
CAGSPSGGYQKVTF

SEQ ID NO: 336844 - protein, 13 aa, Homo sapiens
  CDR3 for beta chain variable domain of TCR clone 168422 (TRBV29-1, TRBJ1-1)
CSIGDSRNTEAFF

SEQ ID NO: 336845 - protein, 15 aa, Homo sapiens
  CDR3 for alpha chain variable domain of TCR clone 168423 (TRAV12-2, TRAJ43)
CAFDIRFGAGTRLTV

SEQ ID NO: 336846 - protein, 15 aa, Homo sapiens
  CDR3 for beta chain variable domain of TCR clone 168423 (TRBV5-1, TRBJ2-3)
CASSVTSGSTDTQYF

SEQ ID NO: 336847 - protein, 21 aa, Homo sapiens
  CDR3 for alpha chain variable domain of TCR clone 168424 (TRAV27, TRAJ3)
TAAQPGDTGLLRGSSASKIIF

SEQ ID NO: 336848 - protein, 15 aa, Homo sapiens
  CDR3 for beta chain variable domain of TCR clone 168424 (TRBV28, TRBJ1-3)
CASSMGWASGNTIYF

SEQ ID NO: 336849 - protein, 17 aa, Homo sapiens
  CDR3 for alpha chain variable domain of TCR clone 168425 (TRAV3, TRAJ38)
CAVRDCLNDGNNRKLIW

SEQ ID NO: 336850 - protein, 14 aa, Homo sapiens
  CDR3 for beta chain variable domain of TCR clone 168425 (TRBV5-5, TRBJ1-5)
CASSGQGVDQPQHF

SEQ ID NO: 336851 - protein, 14 aa, Homo sapiens
  CDR3 for alpha chain variable domain of TCR clone 168426 (TRAV12-1, TRAJ30)
CVATGTNRDDKIIF

SEQ ID NO: 336852 - protein, 11 aa, Homo sapiens
  CDR3 for beta chain variable domain of TCR clone 168426 (TRBV4-1, TRBJ2-2)
CASEHTGELFF

SEQ ID NO: 336853 - protein, 17 aa, Homo sapiens
  CDR3 for alpha chain variable domain of TCR clone 168427 (TRAV3, TRAJ6)
CAVRDGSRAGGSCIPTF

SEQ ID NO: 336854 - protein, 14 aa, Homo sapiens
  CDR3 for beta chain variable domain of TCR clone 168427 (TRBV7-2, TRBJ2-7)
CASSPKTSFYEQYF

SEQ ID NO: 336855 - protein, 14 aa, Homo sapiens
  CDR3 for alpha chain variable domain of TCR clone 168428 (TRAV12-3, TRAJ56)
CAMSVTGANSKLTF

SEQ ID NO: 336856 - protein, 11 aa, Homo sapiens
  CDR3 for beta chain variable domain of TCR clone 168428 (TRBV7-9, TRBJ2-3)
CASSGPDTQYF

SEQ ID NO: 336857 - protein, 13 aa, Homo sapiens
  CDR3 for alpha chain variable domain of TCR clone 168429 (TRAV36/DV7, TRAJ34)
CAGRPYNTDKLIF

SEQ ID NO: 336858 - protein, 14 aa, Homo sapiens
  CDR3 for beta chain variable domain of TCR clone 168429 (TRBV12-5, TRBJ2-5)
CASGSRTHQETQYF

SEQ ID NO: 336859 - protein, 13 aa, Homo sapiens
  CDR3 for alpha chain variable domain of TCR clone 168430 (TRAV24, TRAJ13)
GAFDSGGYQKVTF

SEQ ID NO: 336860 - protein, 14 aa, Homo sapiens
  CDR3 for beta chain variable domain of TCR clone 168430 (TRBV5-4, TRBJ2-1)
CASSLDQGLNEQFF

SEQ ID NO: 336861 - protein, 14 aa, Homo sapiens
  CDR3 for alpha chain variable domain of TCR clone 168431 (TRAV12-2, TRAJ53)
CAVKGGGSNYKLTF

SEQ ID NO: 336862 - protein, 16 aa, Homo sapiens
  CDR3 for beta chain variable domain of TCR clone 168431 (TRBV19, TRBJ2-3)
CASSPGAASRTDTQYF

SEQ ID NO: 336863 - protein, 14 aa, Homo sapiens
  CDR3 for alpha chain variable domain of TCR clone 168432 (TRAV2, TRAJ37)
CAVDFTSNTGKLIF

SEQ ID NO: 336864 - protein, 16 aa, Homo sapiens
  CDR3 for beta chain variable domain of TCR clone 168432 (TRBV7-2, TRBJ2-1)
CASSLVAGAGYNEQFF

SEQ ID NO: 336865 - protein, 14 aa, Homo sapiens
  CDR3 for alpha chain variable domain of TCR clone 168433 (TRAV12-1, TRAJ12)
CVVTSGDSSYKLIF

SEQ ID NO: 336866 - protein, 14 aa, Homo sapiens
  CDR3 for beta chain variable domain of TCR clone 168433 (TRBV7-3, TRBJ2-1)
CASSLAGGTNEQFF

SEQ ID NO: 336867 - protein, 12 aa, Homo sapiens
  CDR3 for alpha chain variable domain of TCR clone 168434 (TRAV35, TRAJ49)
CGGWNTGNQFYF

SEQ ID NO: 336868 - protein, 15 aa, Homo sapiens
  CDR3 for beta chain variable domain of TCR clone 168434 (TRBV27, TRBJ1-5)
CASSLGTGFDQPQHF

SEQ ID NO: 336869 - protein, 13 aa, Homo sapiens
  CDR3 for alpha chain variable domain of TCR clone 168435 (TRAV8-3, TRAJ28)
CAVGAVGSYQLTF

SEQ ID NO: 336870 - protein, 15 aa, Homo sapiens
  CDR3 for beta chain variable domain of TCR clone 168435 (TRBV19, TRBJ1-2)
CASSVGQVLNYGYTF

SEQ ID NO: 336871 - protein, 18 aa, Homo sapiens
  CDR3 for alpha chain variable domain of TCR clone 168436 (TRAV12-3, TRAJ52)
CAMSRTNAGGTSYGKLTF

SEQ ID NO: 336872 - protein, 19 aa, Homo sapiens
  CDR3 for beta chain variable domain of TCR clone 168436 (TRBV25-1, TRBJ2-2)
CAILVYRMDRGRKTGELFF

SEQ ID NO: 336873 - protein, 16 aa, Homo sapiens
  CDR3 for alpha chain variable domain of TCR clone 168437 (TRAV13-1, TRAJ37)
CAASSLGSSKTGKLIF

SEQ ID NO: 336874 - protein, 12 aa, Homo sapiens
  CDR3 for beta chain variable domain of TCR clone 168437 (TRBV6-1, TRBJ2-5)
CASSEGRETQYF

SEQ ID NO: 336875 - protein, 15 aa, Homo sapiens
  CDR3 for alpha chain variable domain of TCR clone 168438 (TRAV40, TRAJ45)
CLLGDLGGGAYGLTF

SEQ ID NO: 336876 - protein, 17 aa, Homo sapiens
  CDR3 for beta chain variable domain of TCR clone 168438 (TRBV18, TRBJ1-5)
CASSPTMGQGTNQPQHF

SEQ ID NO: 336877 - protein, 15 aa, Homo sapiens
  CDR3 for alpha chain variable domain of TCR clone 168439 (TRAV35, TRAJ58)
CAGRRQETSGSRLTF

SEQ ID NO: 336878 - protein, 12 aa, Homo sapiens
  CDR3 for beta chain variable domain of TCR clone 168439 (TRBV29-1, TRBJ2-3)
CSVTGGADTQYF

SEQ ID NO: 336879 - protein, 13 aa, Homo sapiens
  CDR3 for alpha chain variable domain of TCR clone 168440 (TRAV8-6, TRAJ49)
CAVITNTSNQFYF

SEQ ID NO: 336880 - protein, 14 aa, Homo sapiens
  CDR3 for beta chain variable domain of TCR clone 168440 (TRBV19, TRBJ2-1)
CASPTFVLSGEQFF

SEQ ID NO: 336881 - protein, 14 aa, Homo sapiens
  CDR3 for alpha chain variable domain of TCR clone 168441 (TRAV3, TRAJ22)
CAVRGYGSARQLTF

SEQ ID NO: 336882 - protein, 13 aa, Homo sapiens
  CDR3 for beta chain variable domain of TCR clone 168441 (TRBV11-2, TRBJ2-5)
CASGHGAKETQYF

SEQ ID NO: 336883 - protein, 12 aa, Homo sapiens
  CDR3 for alpha chain variable domain of TCR clone 168442 (TRAV2, TRAJ31)
CAVEDNNARLMF

SEQ ID NO: 336884 - protein, 12 aa, Homo sapiens
  CDR3 for beta chain variable domain of TCR clone 168442 (TRBV7-8, TRBJ2-7)
CGSSLGDREQYF

SEQ ID NO: 336885 - protein, 14 aa, Homo sapiens
  CDR3 for alpha chain variable domain of TCR clone 168443 (TRAV16, TRAJ39)
CALSKNNAGNVLTF

SEQ ID NO: 336886 - protein, 14 aa, Homo sapiens
  CDR3 for beta chain variable domain of TCR clone 168443 (TRBV25-1, TRBJ1-1)
CASTHLGGNTEAFF

SEQ ID NO: 336887 - protein, 15 aa, Homo sapiens
  CDR3 for alpha chain variable domain of TCR clone 168444 (TRAV4, TRAJ12)
CLVGDLMDSRYKLIF

SEQ ID NO: 336888 - protein, 14 aa, Homo sapiens
  CDR3 for beta chain variable domain of TCR clone 168444 (TRBV7-2, TRBJ1-1)
CASSHRQGRTEAFF

SEQ ID NO: 336889 - protein, 11 aa, Homo sapiens
  CDR3 for alpha chain variable domain of TCR clone 168445 (TRAV13-1, TRAJ39)
CASHAGNMLTF

SEQ ID NO: 336890 - protein, 14 aa, Homo sapiens
  CDR3 for beta chain variable domain of TCR clone 168445 (TRBV28, TRBJ1-1)
CASSPRTRWAEAFF

SEQ ID NO: 336891 - protein, 13 aa, Homo sapiens
  CDR3 for alpha chain variable domain of TCR clone 168446 (TRAV12-3, TRAJ13)
CAMSSGGYQKVTF

SEQ ID NO: 336892 - protein, 14 aa, Homo sapiens
  CDR3 for beta chain variable domain of TCR clone 168446 (TRBV7-6, TRBJ2-1)
CASSLGGGADEQFF

SEQ ID NO: 336893 - protein, 13 aa, Homo sapiens
  CDR3 for alpha chain variable domain of TCR clone 168447 (TRAV8-4, TRAJ40)
CAVSEGGTYKHIF

SEQ ID NO: 336894 - protein, 13 aa, Homo sapiens
  CDR3 for beta chain variable domain of TCR clone 168447 (TRBV20-1, TRBJ1-5)
CSAPGGPNQPQHF

SEQ ID NO: 336895 - protein, 16 aa, Homo sapiens
  CDR3 for alpha chain variable domain of TCR clone 168448 (TRAV3, TRAJ23)
CAVKIGIYNQGGKLIF

SEQ ID NO: 336896 - protein, 17 aa, Homo sapiens
  CDR3 for beta chain variable domain of TCR clone 168448 (TRBV10-3, TRBJ2-6)
CAISESTAPSRANVLTF

SEQ ID NO: 336897 - protein, 15 aa, Homo sapiens
  CDR3 for alpha chain variable domain of TCR clone 168449 (TRAV2, TRAJ9)
CAVEDRGTGGFKTIF

SEQ ID NO: 336898 - protein, 17 aa, Homo sapiens
  CDR3 for beta chain variable domain of TCR clone 168449 (TRBV28, TRBJ2-7)
CASSPLHRASGVYEQYF

SEQ ID NO: 336899 - protein, 16 aa, Homo sapiens
  CDR3 for alpha chain variable domain of TCR clone 168450 (TRAV30, TRAJ24)
CGTEIVDADSWGKFQF

SEQ ID NO: 336900 - protein, 14 aa, Homo sapiens
  CDR3 for beta chain variable domain of TCR clone 168450 (TRBV7-2, TRBJ2-7)
CASSPKTSFYEQYF

SEQ ID NO: 336901 - protein, 14 aa, Homo sapiens
  CDR3 for alpha chain variable domain of TCR clone 168451 (TRAV26-2, TRAJ44)
CIGTYTGTASKLTF

SEQ ID NO: 336902 - protein, 14 aa, Homo sapiens
  CDR3 for beta chain variable domain of TCR clone 168451 (TRBV4-2, TRBJ2-1)
CASGLDRAYNEQFF

SEQ ID NO: 336903 - protein, 13 aa, Homo sapiens
  CDR3 for alpha chain variable domain of TCR clone 168452 (TRAV21, TRAJ27)
CAARPGTAGKSTF

SEQ ID NO: 336904 - protein, 17 aa, Homo sapiens
  CDR3 for beta chain variable domain of TCR clone 168452 (TRBV4-1, TRBJ1-4)
CASSQEGPRGVEEKLFF

SEQ ID NO: 336905 - protein, 12 aa, Homo sapiens
  CDR3 for alpha chain variable domain of TCR clone 168453 (TRAV35, TRAJ36)
CAVLEGANNLFF

SEQ ID NO: 336906 - protein, 17 aa, Homo sapiens
  CDR3 for beta chain variable domain of TCR clone 168453 (TRBV19, TRBJ2-6)
CASSTGQVFSGANVLTF

SEQ ID NO: 336907 - protein, 16 aa, Homo sapiens
  CDR3 for alpha chain variable domain of TCR clone 168454 (TRAV14/DV4, TRAJ53)
CAMREGGGGSNYKLTF

SEQ ID NO: 336908 - protein, 16 aa, Homo sapiens
  CDR3 for beta chain variable domain of TCR clone 168454 (TRBV2, TRBJ2-1)
CASSVGGSLSYNEQFF

SEQ ID NO: 336909 - protein, 13 aa, Homo sapiens
  CDR3 for alpha chain variable domain of TCR clone 168455 (TRAV38-1, TRAJ42)
FARWGGSQGDLIF

SEQ ID NO: 336910 - protein, 17 aa, Homo sapiens
  CDR3 for beta chain variable domain of TCR clone 168455 (TRBV20-1, TRBJ2-1)
CSARDPLAGVWDNEQFF

SEQ ID NO: 336911 - protein, 13 aa, Homo sapiens
  CDR3 for alpha chain variable domain of TCR clone 168456 (TRAV1-2, TRAJ9)
CAALNTGGFKTIF

SEQ ID NO: 336912 - protein, 15 aa, Homo sapiens
  CDR3 for beta chain variable domain of TCR clone 168456 (TRBV28, TRBJ2-7)
CASRPWDRFSYEQYF

SEQ ID NO: 336913 - protein, 11 aa, Homo sapiens
  CDR3 for alpha chain variable domain of TCR clone 168457 (TRAV35, TRAJ30)
CVPGGDDKIIF

SEQ ID NO: 336914 - protein, 15 aa, Homo sapiens
  CDR3 for beta chain variable domain of TCR clone 168457 (TRBV9, TRBJ1-6)
CASSVAGTGDSPLHF

SEQ ID NO: 336915 - protein, 13 aa, Homo sapiens
  CDR3 for alpha chain variable domain of TCR clone 168458 (TRAV3, TRAJ27)
CAVRPLGAGKSTF

SEQ ID NO: 336916 - protein, 12 aa, Homo sapiens
  CDR3 for beta chain variable domain of TCR clone 168458 (TRBV5-1, TRBJ2-7)
CASSLDSYEQYF

SEQ ID NO: 336917 - protein, 11 aa, Homo sapiens
  CDR3 for alpha chain variable domain of TCR clone 168459 (TRAV21, TRAJ48)
CAVDGNETLTF

SEQ ID NO: 336918 - protein, 16 aa, Homo sapiens
  CDR3 for beta chain variable domain of TCR clone 168459 (TRBV19, TRBJ2-1)
CASSSKGTRSYNEQFF

SEQ ID NO: 336919 - protein, 15 aa, Homo sapiens
  CDR3 for alpha chain variable domain of TCR clone 168460 (TRAV26-1, TRAJ22)
CIVRVSFWFCKATDL

SEQ ID NO: 336920 - protein, 13 aa, Homo sapiens
  CDR3 for beta chain variable domain of TCR clone 168460 (TRBV20-1, TRBJ1-1)
CSARVGGNTEAFF

SEQ ID NO: 336921 - protein, 14 aa, Homo sapiens
  CDR3 for alpha chain variable domain of TCR clone 168461 (TRAV16, TRAJ33)
CALSAMDSNYQLIW

SEQ ID NO: 336922 - protein, 13 aa, Homo sapiens
  CDR3 for beta chain variable domain of TCR clone 168461 (TRBV24-1, TRBJ2-2)
CATSDWSTGELFV

SEQ ID NO: 336923 - protein, 12 aa, Homo sapiens
  CDR3 for alpha chain variable domain of TCR clone 168462 (TRAV12-3, TRAJ42)
CAPGGSQGSLIF

SEQ ID NO: 336924 - protein, 13 aa, Homo sapiens
  CDR3 for beta chain variable domain of TCR clone 168462 (TRBV5-7, TRBJ2-6)
CASTSSGANVLTF

SEQ ID NO: 336925 - protein, 12 aa, Homo sapiens
  CDR3 for alpha chain variable domain of TCR clone 168463 (TRAV3, TRAJ26)
CAVRDYGQNFVF

SEQ ID NO: 336926 - protein, 14 aa, Homo sapiens
  CDR3 for beta chain variable domain of TCR clone 168463 (TRBV20-1, TRBJ1-1)
CSAQTRIGGTEAFF

SEQ ID NO: 336927 - protein, 13 aa, Homo sapiens
  CDR3 for alpha chain variable domain of TCR clone 168464 (TRAV12-3, TRAJ33)
CAMSVNSNYQLIW

SEQ ID NO: 336928 - protein, 22 aa, Homo sapiens
  CDR3 for beta chain variable domain of TCR clone 168464 (TRBV11-2, TRBJ1-4)
CASSLDITRRGIPRKDNEKLFF

SEQ ID NO: 336929 - protein, 11 aa, Homo sapiens
  CDR3 for alpha chain variable domain of TCR clone 168465 (TRAV1-2, TRAJ40)
CAVPGTYKYIF

SEQ ID NO: 336930 - protein, 15 aa, Homo sapiens
  CDR3 for beta chain variable domain of TCR clone 168465 (TRBV5-7, TRBJ1-5)
CASCYGKLWDQPQHF

SEQ ID NO: 336931 - protein, 14 aa, Homo sapiens
  CDR3 for alpha chain variable domain of TCR clone 168466 (TRAV13-2, TRAJ45)
CAEMSGGGADGLTF

SEQ ID NO: 336932 - protein, 11 aa, Homo sapiens
  CDR3 for beta chain variable domain of TCR clone 168466 (TRBV7-3, TRBJ2-5)
CVSSLRETQYF

SEQ ID NO: 336933 - protein, 13 aa, Homo sapiens
  CDR3 for alpha chain variable domain of TCR clone 168467 (TRAV21, TRAJ57)
CAVIEGGSEKLVF

SEQ ID NO: 336934 - protein, 15 aa, Homo sapiens
  CDR3 for beta chain variable domain of TCR clone 168467 (TRBV10-3, TRBJ2-5)
CAISEFGRGRETQYF

SEQ ID NO: 336935 - protein, 16 aa, Homo sapiens
  CDR3 for alpha chain variable domain of TCR clone 168468 (TRAV1-2, TRAJ10)
CAVRGVLTGGGNKLTF

SEQ ID NO: 336936 - protein, 13 aa, Homo sapiens
  CDR3 for beta chain variable domain of TCR clone 168468 (TRBV28, TRBJ2-7)
CASSPGGVYEQYF

SEQ ID NO: 336937 - protein, 15 aa, Homo sapiens
  CDR3 for alpha chain variable domain of TCR clone 168469 (TRAV3, TRAJ29)
CAVRAWNSGNTPLVF

SEQ ID NO: 336938 - protein, 13 aa, Homo sapiens
  CDR3 for beta chain variable domain of TCR clone 168469 (TRBV7-3, TRBJ1-1)
CASSLTQGTEAFF

SEQ ID NO: 336939 - protein, 11 aa, Homo sapiens
  CDR3 for alpha chain variable domain of TCR clone 168470 (TRAV21, TRAJ34)
CAVTNADKLIF

SEQ ID NO: 336940 - protein, 13 aa, Homo sapiens
  CDR3 for beta chain variable domain of TCR clone 168470 (TRBV11-2, TRBJ2-7)
CASSPLGSYEQYF

SEQ ID NO: 336941 - protein, 16 aa, Homo sapiens
  CDR3 for alpha chain variable domain of TCR clone 168471 (TRAV1-2, TRAJ10)
CAVRGVLTGGGNKLTF

SEQ ID NO: 336942 - protein, 16 aa, Homo sapiens
  CDR3 for beta chain variable domain of TCR clone 168471 (TRBV29-1, TRBJ2-7)
CSVEVVWTSGSYEQYF

SEQ ID NO: 336943 - protein, 16 aa, Homo sapiens
  CDR3 for alpha chain variable domain of TCR clone 168472 (TRAV8-3, TRAJ18)
CAVALDRGSTLGRLYF

SEQ ID NO: 336944 - protein, 11 aa, Homo sapiens
  CDR3 for beta chain variable domain of TCR clone 168472 (TRBV29-1, TRBJ1-1)
CSVEILTEAFF

SEQ ID NO: 336945 - protein, 22 aa, Homo sapiens
  CDR3 for alpha chain variable domain of TCR clone 168473 (TRAV2, TRAJ10)
ILQVREADAAVYYTGGGNQLTF

SEQ ID NO: 336946 - protein, 16 aa, Homo sapiens
  CDR3 for beta chain variable domain of TCR clone 168473 (TRBV5-6, TRBJ1-2)
CASSRGVTGGSYGYTF

SEQ ID NO: 336947 - protein, 15 aa, Homo sapiens
  CDR3 for alpha chain variable domain of TCR clone 168474 (TRAV35, TRAJ58)
CAGRRQETSGSRLTF

SEQ ID NO: 336948 - protein, 13 aa, Homo sapiens
  CDR3 for beta chain variable domain of TCR clone 168474 (TRBV7-9, TRBJ2-1)
CASSLDVGNEQFF

SEQ ID NO: 336949 - protein, 13 aa, Homo sapiens
  CDR3 for alpha chain variable domain of TCR clone 168475 (TRAV12-2, TRAJ20)
CAVGLRVDYKPSF

SEQ ID NO: 336950 - protein, 13 aa, Homo sapiens
  CDR3 for beta chain variable domain of TCR clone 168475 (TRBV6-1, TRBJ1-1)
CASSRQGNTEAFF

SEQ ID NO: 336951 - protein, 13 aa, Homo sapiens
  CDR3 for alpha chain variable domain of TCR clone 168476 (TRAV12-1, TRAJ11)
CVVTRGEYSTLTF

SEQ ID NO: 336952 - protein, 13 aa, Homo sapiens
  CDR3 for beta chain variable domain of TCR clone 168476 (TRBV20-1, TRBJ1-2)
CSARDQGAYGYTF

SEQ ID NO: 336953 - protein, 13 aa, Homo sapiens
  CDR3 for alpha chain variable domain of TCR clone 168477 (TRAV12-2, TRAJ6)
CAVNVSRKLHTYI

SEQ ID NO: 336954 - protein, 12 aa, Homo sapiens
  CDR3 for beta chain variable domain of TCR clone 168477 (TRBV29-1, TRBJ2-3)
CSVTGGADTEYF

SEQ ID NO: 336955 - protein, 14 aa, Homo sapiens
  CDR3 for alpha chain variable domain of TCR clone 168478 (TRAV8-3, TRAJ3)
CAVVPRSSASKIIF

SEQ ID NO: 336956 - protein, 16 aa, Homo sapiens
  CDR3 for beta chain variable domain of TCR clone 168478 (TRBV12-5, TRBJ2-5)
CASGPRTSGNQETQYF

SEQ ID NO: 336957 - protein, 13 aa, Homo sapiens
  CDR3 for alpha chain variable domain of TCR clone 168479 (TRAV27, TRAJ3)
ASLRGRSASKIIF

SEQ ID NO: 336958 - protein, 15 aa, Homo sapiens
  CDR3 for beta chain variable domain of TCR clone 168479 (TRBV28, TRBJ1-3)
CASSMGWASGKTIYF

SEQ ID NO: 336959 - protein, 16 aa, Homo sapiens
  CDR3 for alpha chain variable domain of TCR clone 168480 (TRAV8-3, TRAJ8)
CAVPRDGNTGFQKLGF

SEQ ID NO: 336960 - protein, 15 aa, Homo sapiens
  CDR3 for beta chain variable domain of TCR clone 168480 (TRBV6-1, TRBJ2-6)
CASSSRPSGANALTF

SEQ ID NO: 336961 - protein, 14 aa, Homo sapiens
  CDR3 for alpha chain variable domain of TCR clone 168481 (TRAV8-6, TRAJ49)
CAVSDPGTVNQFYF

SEQ ID NO: 336962 - protein, 13 aa, Homo sapiens
  CDR3 for beta chain variable domain of TCR clone 168481 (TRBV7-9, TRBJ1-2)
CASSLKQNYGYTF

SEQ ID NO: 336963 - protein, 13 aa, Homo sapiens
  CDR3 for alpha chain variable domain of TCR clone 168482 (TRAV36/DV7, TRAJ37)
RAVFSSNTGKLIF

SEQ ID NO: 336964 - protein, 15 aa, Homo sapiens
  CDR3 for beta chain variable domain of TCR clone 168482 (TRBV12-4, TRBJ2-5)
CRQFFVRGRQETQYF

SEQ ID NO: 336965 - protein, 12 aa, Homo sapiens
  CDR3 for alpha chain variable domain of TCR clone 168483 (TRAV26-1, TRAJ36)
CIVRVRADNFFF

SEQ ID NO: 336966 - protein, 15 aa, Homo sapiens
  CDR3 for beta chain variable domain of TCR clone 168483 (TRBV6-3, TRBJ2-7)
CASSSPGTVFYEQYF

SEQ ID NO: 336967 - protein, 13 aa, Homo sapiens
  CDR3 for alpha chain variable domain of TCR clone 168484 (TRAV10, TRAJ16)
CVVSPQAGQKLLF

SEQ ID NO: 336968 - protein, 13 aa, Homo sapiens
  CDR3 for beta chain variable domain of TCR clone 168484 (TRBV4-1, TRBJ2-7)
CASSQGQAYEQYF

SEQ ID NO: 336969 - protein, 14 aa, Homo sapiens
  CDR3 for alpha chain variable domain of TCR clone 168485 (TRAV12-2, TRAJ44)
CAVNPAGTASKLTF

SEQ ID NO: 336970 - protein, 14 aa, Homo sapiens
  CDR3 for beta chain variable domain of TCR clone 168485 (TRBV7-9, TRBJ2-7)
CASSLDRPTDEQYF

SEQ ID NO: 336971 - protein, 15 aa, Homo sapiens
  CDR3 for alpha chain variable domain of TCR clone 168486 (TRAV1-2, TRAJ17)
CAVRGYGAAGNKLTF

SEQ ID NO: 336972 - protein, 23 aa, Homo sapiens
  CDR3 for beta chain variable domain of TCR clone 168486 (TRBV11-2, TRBJ2-5)
CASSSPGGEGAASRDPVLRARQA

SEQ ID NO: 336973 - protein, 14 aa, Homo sapiens
  CDR3 for alpha chain variable domain of TCR clone 168487 (TRAV12-2, TRAJ13)
RAVKKTGGYQNVTF

SEQ ID NO: 336974 - protein, 11 aa, Homo sapiens
  CDR3 for beta chain variable domain of TCR clone 168487 (TRBV11-2, TRBJ2-2)
CASSLPGELFF

SEQ ID NO: 336975 - protein, 12 aa, Homo sapiens
  CDR3 for alpha chain variable domain of TCR clone 168488 (TRAV34, TRAJ27)
CGADTNTGKPTF

SEQ ID NO: 336976 - protein, 14 aa, Homo sapiens
  CDR3 for beta chain variable domain of TCR clone 168488 (TRBV4-1, TRBJ2-2)
CASSQAVNTGELFF

SEQ ID NO: 336977 - protein, 14 aa, Homo sapiens
  CDR3 for alpha chain variable domain of TCR clone 168489 (TRAV35, TRAJ22)
CAGLRPGSARQLTF

SEQ ID NO: 336978 - protein, 15 aa, Homo sapiens
  CDR3 for beta chain variable domain of TCR clone 168489 (TRBV12-4, TRBJ2-5)
CASSPPTGPQETQYL

SEQ ID NO: 336979 - protein, 12 aa, Homo sapiens
  CDR3 for alpha chain variable domain of TCR clone 168490 (TRAV12-3, TRAJ32)
CAGGGASNKLIF

SEQ ID NO: 336980 - protein, 17 aa, Homo sapiens
  CDR3 for beta chain variable domain of TCR clone 168490 (TRBV28, TRBJ2-5)
CASSTPEGDALQETQYF

SEQ ID NO: 336981 - protein, 11 aa, Homo sapiens
  CDR3 for alpha chain variable domain of TCR clone 168491 (TRAV12-2, TRAJ56)
CAAPANSKLTF

SEQ ID NO: 336982 - protein, 14 aa, Homo sapiens
  CDR3 for beta chain variable domain of TCR clone 168491 (TRBV27, TRBJ2-1)
CASSFGREANEQFF

SEQ ID NO: 336983 - protein, 10 aa, Homo sapiens
  CDR3 for alpha chain variable domain of TCR clone 168492 (TRAV8-4, TRAJ43)
CAVSADDMRF

SEQ ID NO: 336984 - protein, 17 aa, Homo sapiens
  CDR3 for beta chain variable domain of TCR clone 168492 (TRBV14, TRBJ2-3)
CASSQEPSGLSTDTQYF

SEQ ID NO: 336985 - protein, 14 aa, Homo sapiens
  CDR3 for alpha chain variable domain of TCR clone 168493 (TRAV17, TRAJ57)
CATDPQGGSEKLVC

SEQ ID NO: 336986 - protein, 18 aa, Homo sapiens
  CDR3 for beta chain variable domain of TCR clone 168493 (TRBV20-1, TRBJ2-3)
CSASGLAGGPGTTDTQYF

SEQ ID NO: 336987 - protein, 11 aa, Homo sapiens
  CDR3 for alpha chain variable domain of TCR clone 168494 (TRAV12-2, TRAJ43)
CASPIGNDIRF

SEQ ID NO: 336988 - protein, 12 aa, Homo sapiens
  CDR3 for beta chain variable domain of TCR clone 168494 (TRBV20-1, TRBJ2-7)
CSAGLKMGEQYL

SEQ ID NO: 336989 - protein, 10 aa, Homo sapiens
  CDR3 for alpha chain variable domain of TCR clone 168495 (TRAV23/DV6, TRAJ57)
CAASSTLSQG

SEQ ID NO: 336990 - protein, 14 aa, Homo sapiens
  CDR3 for beta chain variable domain of TCR clone 168495 (TRBV7-8, TRBJ2-7)
CASTFRGGPNEQYF

SEQ ID NO: 336991 - protein, 16 aa, Homo sapiens
  CDR3 for alpha chain variable domain of TCR clone 168496 (TRAV30, TRAJ24)
CGTEIVDADSWRKFQF

SEQ ID NO: 336992 - protein, 14 aa, Homo sapiens
  CDR3 for beta chain variable domain of TCR clone 168496 (TRBV12-5, TRBJ2-5)
CASGSRTHQGTQYF

SEQ ID NO: 336993 - protein, 15 aa, Homo sapiens
  CDR3 for alpha chain variable domain of TCR clone 168497 (TRAV35, TRAJ23)
CAGQRGYNQGGKLIF

SEQ ID NO: 336994 - protein, 15 aa, Homo sapiens
  CDR3 for beta chain variable domain of TCR clone 168497 (TRBV20-1, TRBJ2-7)
CSAESGTSGAYEQYF

SEQ ID NO: 336995 - protein, 11 aa, Homo sapiens
  CDR3 for alpha chain variable domain of TCR clone 168498 (TRAV2, TRAJ33)
CAVDSNYQLIL

SEQ ID NO: 336996 - protein, 13 aa, Homo sapiens
  CDR3 for beta chain variable domain of TCR clone 168498 (TRBV7-2, TRBJ2-7)
CASSSPSGSEQYF

SEQ ID NO: 336997 - protein, 14 aa, Homo sapiens
  CDR3 for alpha chain variable domain of TCR clone 168499 (TRAV35, TRAJ33)
CAGSSQDSNYQLIW

SEQ ID NO: 336998 - protein, 12 aa, Homo sapiens
  CDR3 for beta chain variable domain of TCR clone 168499 (TRBV7-8, TRBJ2-7)
CASSLGDREQYF

SEQ ID NO: 336999 - protein, 13 aa, Homo sapiens
  CDR3 for alpha chain variable domain of TCR clone 168500 (TRAV20, TRAJ37)
CAGCSSNTGKLIF

SEQ ID NO: 337000 - protein, 13 aa, Homo sapiens
  CDR3 for beta chain variable domain of TCR clone 168500 (TRBV20-1, TRBJ2-2)
CSASAAGTGELFF

SEQ ID NO: 337001 - protein, 16 aa, Homo sapiens
  CDR3 for alpha chain variable domain of TCR clone 168501 (TRAV30, TRAJ24)
CGTEVVDADSWGKFQF

SEQ ID NO: 337002 - protein, 15 aa, Homo sapiens
  CDR3 for beta chain variable domain of TCR clone 168501 (TRBV18, TRBJ2-1)
CASLPDRGRDNEQFF

SEQ ID NO: 337003 - protein, 13 aa, Homo sapiens
  CDR3 for alpha chain variable domain of TCR clone 168502 (TRAV13-2, TRAJ48)
CAEMDFGNEKLTF

SEQ ID NO: 337004 - protein, 15 aa, Homo sapiens
  CDR3 for beta chain variable domain of TCR clone 168502 (TRBV7-9, TRBJ1-6)
CASSATGRGNSPLHF

SEQ ID NO: 337005 - protein, 13 aa, Homo sapiens
  CDR3 for alpha chain variable domain of TCR clone 168503 (TRAV12-3, TRAJ39)
CAMRSNAGNMLTF

SEQ ID NO: 337006 - protein, 14 aa, Homo sapiens
  CDR3 for beta chain variable domain of TCR clone 168503 (TRBV12-5, TRBJ2-5)
CASGSRTHQETQYF

SEQ ID NO: 337007 - protein, 11 aa, Homo sapiens
  CDR3 for alpha chain variable domain of TCR clone 168504 (TRAV2, TRAJ23)
CAVETRGKLIF

SEQ ID NO: 337008 - protein, 12 aa, Homo sapiens
  CDR3 for beta chain variable domain of TCR clone 168504 (TRBV29-1, TRBJ2-3)
CSVTGGADTQYF

SEQ ID NO: 337009 - protein, 13 aa, Homo sapiens
  CDR3 for alpha chain variable domain of TCR clone 168505 (TRAV22, TRAJ29)
CAVGGSGNTPLVF

SEQ ID NO: 337010 - protein, 15 aa, Homo sapiens
  CDR3 for beta chain variable domain of TCR clone 168505 (TRBV10-2, TRBJ2-6)
CASSEQGTGANVLTF

SEQ ID NO: 337011 - protein, 11 aa, Homo sapiens
  CDR3 for alpha chain variable domain of TCR clone 168506 (TRAV2, TRAJ13)
CASGGYQTVTF

SEQ ID NO: 337012 - protein, 14 aa, Homo sapiens
  CDR3 for beta chain variable domain of TCR clone 168506 (TRBV7-8, TRBJ1-2)
CASSPDSLSYGYTF

SEQ ID NO: 337013 - protein, 14 aa, Homo sapiens
  CDR3 for alpha chain variable domain of TCR clone 168507 (TRAV17, TRAJ16)
CATADFSDGQKLLF

SEQ ID NO: 337014 - protein, 15 aa, Homo sapiens
  CDR3 for beta chain variable domain of TCR clone 168507 (TRBV18, TRBJ2-1)
CASSPPSASYTEQFF

SEQ ID NO: 337015 - protein, 11 aa, Homo sapiens
  CDR3 for alpha chain variable domain of TCR clone 168508 (TRAV17, TRAJ36)
CAPTGANNLFF

SEQ ID NO: 337016 - protein, 15 aa, Homo sapiens
  CDR3 for beta chain variable domain of TCR clone 168508 (TRBV7-2, TRBJ2-7)
CASSTPGLTRGEQYF

SEQ ID NO: 337017 - protein, 15 aa, Homo sapiens
  CDR3 for alpha chain variable domain of TCR clone 168509 (TRAV8-3, TRAJ11)
CAVGLLNSGYSTPPF

SEQ ID NO: 337018 - protein, 16 aa, Homo sapiens
  CDR3 for beta chain variable domain of TCR clone 168509 (TRBV7-9, TRBJ1-2)
CASSLGFSSGEDGYTF

SEQ ID NO: 337019 - protein, 13 aa, Homo sapiens
  CDR3 for alpha chain variable domain of TCR clone 168510 (TRAV21, TRAJ20)
CAVSGLGDYKLSF

SEQ ID NO: 337020 - protein, 13 aa, Homo sapiens
  CDR3 for beta chain variable domain of TCR clone 168510 (TRBV7-3, TRBJ1-1)
CASSPAGGLEAFF

SEQ ID NO: 337021 - protein, 22 aa, Homo sapiens
  CDR3 for alpha chain variable domain of TCR clone 168511 (TRAV8-6, TRAJ6)
CAVTLGVEATYLHLEEEPALLF

SEQ ID NO: 337022 - protein, 15 aa, Homo sapiens
  CDR3 for beta chain variable domain of TCR clone 168511 (TRBV7-2, TRBJ1-1)
CASSPQGGANTEAFF

SEQ ID NO: 337023 - protein, 15 aa, Homo sapiens
  CDR3 for alpha chain variable domain of TCR clone 168512 (TRAV13-1, TRAJ6)
CAAIHPSGGSYILTF

SEQ ID NO: 337024 - protein, 14 aa, Homo sapiens
  CDR3 for beta chain variable domain of TCR clone 168512 (TRBV7-9, TRBJ2-2)
CASGLAINTGELFF

SEQ ID NO: 337025 - protein, 15 aa, Homo sapiens
  CDR3 for alpha chain variable domain of TCR clone 168513 (TRAV3, TRAJ17)
CAVSPKEAAGNKLTF

SEQ ID NO: 337026 - protein, 12 aa, Homo sapiens
  CDR3 for beta chain variable domain of TCR clone 168513 (TRBV7-9, TRBJ1-6)
CASSVMTSALHF

SEQ ID NO: 337027 - protein, 16 aa, Homo sapiens
  CDR3 for alpha chain variable domain of TCR clone 168514 (TRAV3, TRAJ3)
CAVRDRAKSSASKIIF

SEQ ID NO: 337028 - protein, 13 aa, Homo sapiens
  CDR3 for beta chain variable domain of TCR clone 168514 (TRBV10-3, TRBJ2-7)
CAYKLAVNYEQYF

SEQ ID NO: 337029 - protein, 12 aa, Homo sapiens
  CDR3 for alpha chain variable domain of TCR clone 168515 (TRAV12-3, TRAJ17)
CAMTLTGNKLTF

SEQ ID NO: 337030 - protein, 14 aa, Homo sapiens
  CDR3 for beta chain variable domain of TCR clone 168515 (TRBV20-1, TRBJ2-1)
CSAQIGGAANEQFF

SEQ ID NO: 337031 - protein, 15 aa, Homo sapiens
  CDR3 for alpha chain variable domain of TCR clone 168516 (TRAV12-1, TRAJ45)
CVVLSGGGGADGLTF

SEQ ID NO: 337032 - protein, 15 aa, Homo sapiens
  CDR3 for beta chain variable domain of TCR clone 168516 (TRBV20-1, TRBJ2-7)
CSARDRVSGMYEQYF

SEQ ID NO: 337033 - protein, 15 aa, Homo sapiens
  CDR3 for alpha chain variable domain of TCR clone 168517 (TRAV12-2, TRAJ43)
CAFDMRFGAGTRLTV

SEQ ID NO: 337034 - protein, 16 aa, Homo sapiens
  CDR3 for beta chain variable domain of TCR clone 168517 (TRBV12-4, TRBJ1-5)
CASSRPVGGSNQPQHF

SEQ ID NO: 337035 - protein, 15 aa, Homo sapiens
  CDR3 for alpha chain variable domain of TCR clone 168518 (TRAV26-1, TRAJ29)
CIVGVEGSGHTPLVF

SEQ ID NO: 337036 - protein, 15 aa, Homo sapiens
  CDR3 for beta chain variable domain of TCR clone 168518 (TRBV7-9, TRBJ1-5)
CASSQGHQPNQPQHF

SEQ ID NO: 337037 - protein, 12 aa, Homo sapiens
  CDR3 for alpha chain variable domain of TCR clone 168519 (TRAV17, TRAJ58)
CATDASGSRLTF

SEQ ID NO: 337038 - protein, 14 aa, Homo sapiens
  CDR3 for beta chain variable domain of TCR clone 168519 (TRBV20-1, TRBJ2-7)
CSARVGPTSSTSGR

SEQ ID NO: 337039 - protein, 13 aa, Homo sapiens
  CDR3 for alpha chain variable domain of TCR clone 168520 (TRAV27, TRAJ45)
CRSSGGGADGLTF

SEQ ID NO: 337040 - protein, 14 aa, Homo sapiens
  CDR3 for beta chain variable domain of TCR clone 168520 (TRBV9, TRBJ2-3)
CASSVGLSTDTQYF

SEQ ID NO: 337041 - protein, 15 aa, Homo sapiens
  CDR3 for alpha chain variable domain of TCR clone 168521 (TRAV8-3, TRAJ45)
CASSYSGRGADGLTF

SEQ ID NO: 337042 - protein, 16 aa, Homo sapiens
  CDR3 for beta chain variable domain of TCR clone 168521 (TRBV20-1, TRBJ2-2)
CSASASGIPGAGELFF

SEQ ID NO: 337043 - protein, 12 aa, Homo sapiens
  CDR3 for alpha chain variable domain of TCR clone 168522 (TRAV25, TRAJ11)
CAGASGYSTLTF

SEQ ID NO: 337044 - protein, 16 aa, Homo sapiens
  CDR3 for beta chain variable domain of TCR clone 168522 (TRBV5-4, TRBJ2-3)
CASQQPGAGGADTQYF

SEQ ID NO: 337045 - protein, 15 aa, Homo sapiens
  CDR3 for alpha chain variable domain of TCR clone 168523 (TRAV8-3, TRAJ45)
CASSYSGGGADGLTF

SEQ ID NO: 337046 - protein, 14 aa, Homo sapiens
  CDR3 for beta chain variable domain of TCR clone 168523 (TRBV28, TRBJ2-1)
CASSLNGRNNEQFF

SEQ ID NO: 337047 - protein, 13 aa, Homo sapiens
  CDR3 for alpha chain variable domain of TCR clone 168524 (TRAV2, TRAJ21)
CAVEDFNFNKFYF

SEQ ID NO: 337048 - protein, 15 aa, Homo sapiens
  CDR3 for beta chain variable domain of TCR clone 168524 (TRBV28, TRBJ2-5)
CASSPGQGSIETQYF

SEQ ID NO: 337049 - protein, 11 aa, Homo sapiens
  CDR3 for alpha chain variable domain of TCR clone 168525 (TRAV12-3, TRAJ11)
CNATGYSTLTF

SEQ ID NO: 337050 - protein, 18 aa, Homo sapiens
  CDR3 for beta chain variable domain of TCR clone 168525 (TRBV7-2, TRBJ2-3)
CASSLKREGSGMTDTQYF

SEQ ID NO: 337051 - protein, 14 aa, Homo sapiens
  CDR3 for alpha chain variable domain of TCR clone 168526 (TRAV12-2, TRAJ24)
CAVTPADSWGNCSL

SEQ ID NO: 337052 - protein, 13 aa, Homo sapiens
  CDR3 for beta chain variable domain of TCR clone 168526 (TRBV6-4, TRBJ1-5)
CASSADLNQPQHF

SEQ ID NO: 337053 - protein, 13 aa, Homo sapiens
  CDR3 for alpha chain variable domain of TCR clone 168527 (TRAV12-2, TRAJ6)
CAVNVSRKLHTYI

SEQ ID NO: 337054 - protein, 15 aa, Homo sapiens
  CDR3 for beta chain variable domain of TCR clone 168527 (TRBV28, TRBJ2-4)
CAAGSGTLLMVIRYF

SEQ ID NO: 337055 - protein, 14 aa, Homo sapiens
  CDR3 for alpha chain variable domain of TCR clone 168528 (TRAV12-2, TRAJ13)
CAVKKTGGYQKVTF

SEQ ID NO: 337056 - protein, 10 aa, Homo sapiens
  CDR3 for beta chain variable domain of TCR clone 168528 (TRBV12-4, TRBJ2-7)
CASSFIWLHL

SEQ ID NO: 337057 - protein, 11 aa, Homo sapiens
  CDR3 for alpha chain variable domain of TCR clone 168529 (TRAV21, TRAJ39)
LLVNAGNMLTL

SEQ ID NO: 337058 - protein, 18 aa, Homo sapiens
  CDR3 for beta chain variable domain of TCR clone 168529 (TRBV7-2, TRBJ2-7)
CASSLSGRGLAGGYEQYF

SEQ ID NO: 337059 - protein, 14 aa, Homo sapiens
  CDR3 for alpha chain variable domain of TCR clone 168530 (TRAV6, TRAJ37)
CALGSQGNTGKLNF

SEQ ID NO: 337060 - protein, 15 aa, Homo sapiens
  CDR3 for beta chain variable domain of TCR clone 168530 (TRBV2, TRBJ2-1)
CASSEEREGDNEQFF

SEQ ID NO: 337061 - protein, 16 aa, Homo sapiens
  CDR3 for alpha chain variable domain of TCR clone 168531 (TRAV36/DV7, TRAJ30)
CAVETYGLDRDDKIIF

SEQ ID NO: 337062 - protein, 15 aa, Homo sapiens
  CDR3 for beta chain variable domain of TCR clone 168531 (TRBV7-9, TRBJ1-6)
CASSSPGRGNSPLHF

SEQ ID NO: 337063 - protein, 12 aa, Homo sapiens
  CDR3 for alpha chain variable domain of TCR clone 168532 (TRAV21, TRAJ20)
CAVRGNDYKLSF

SEQ ID NO: 337064 - protein, 12 aa, Homo sapiens
  CDR3 for beta chain variable domain of TCR clone 168532 (TRBV19, TRBJ2-1)
CASSRQGAEQFF

SEQ ID NO: 337065 - protein, 14 aa, Homo sapiens
  CDR3 for alpha chain variable domain of TCR clone 168533 (TRAV16, TRAJ54)
CALSDGQGAQTLVF

SEQ ID NO: 337066 - protein, 13 aa, Homo sapiens
  CDR3 for beta chain variable domain of TCR clone 168533 (TRBV20-1, TRBJ2-4)
CSAPTWAGNIQYF

SEQ ID NO: 337067 - protein, 11 aa, Homo sapiens
  CDR3 for alpha chain variable domain of TCR clone 168534 (TRAV12-2, TRAJ43)
CAASNNNDMRF

SEQ ID NO: 337068 - protein, 14 aa, Homo sapiens
  CDR3 for beta chain variable domain of TCR clone 168534 (TRBV7-8, TRBJ1-2)
CASSAGTAIYGYTF

SEQ ID NO: 337069 - protein, 14 aa, Homo sapiens
  CDR3 for alpha chain variable domain of TCR clone 168535 (TRAV38-1, TRAJ40)
CALRPTSGTYKYIF

SEQ ID NO: 337070 - protein, 14 aa, Homo sapiens
  CDR3 for beta chain variable domain of TCR clone 168535 (TRBV5-4, TRBJ1-1)
CASSLDNRRDEAFF

SEQ ID NO: 337071 - protein, 14 aa, Homo sapiens
  CDR3 for alpha chain variable domain of TCR clone 168536 (TRAV16, TRAJ48)
CALTPGFGNEKLTF

SEQ ID NO: 337072 - protein, 14 aa, Homo sapiens
  CDR3 for beta chain variable domain of TCR clone 168536 (TRBV20-1, TRBJ2-2)
CSAPDTANTGELFF

SEQ ID NO: 337073 - protein, 17 aa, Homo sapiens
  CDR3 for alpha chain variable domain of TCR clone 168537 (TRAV3, TRAJ6)
CAVRDGPKAGGNYIPTF

SEQ ID NO: 337074 - protein, 14 aa, Homo sapiens
  CDR3 for beta chain variable domain of TCR clone 168537 (TRBV7-2, TRBJ2-7)
CASSPKTSFYEQYF

SEQ ID NO: 337075 - protein, 17 aa, Homo sapiens
  CDR3 for alpha chain variable domain of TCR clone 168538 (TRAV4, TRAJ42)
CLVGVLNYGGSQGNLIF

SEQ ID NO: 337076 - protein, 12 aa, Homo sapiens
  CDR3 for beta chain variable domain of TCR clone 168538 (TRBV20-1, TRBJ2-1)
CSAQYTYNEEFF

SEQ ID NO: 337077 - protein, 14 aa, Homo sapiens
  CDR3 for alpha chain variable domain of TCR clone 168539 (TRAV12-2, TRAJ44)
CAVTPAGTASKLTF

SEQ ID NO: 337078 - protein, 15 aa, Homo sapiens
  CDR3 for beta chain variable domain of TCR clone 168539 (TRBV5-1, TRBJ2-1)
CASSPPRAPYNEQFF

SEQ ID NO: 337079 - protein, 19 aa, Homo sapiens
  CDR3 for alpha chain variable domain of TCR clone 168540 (TRAV2, TRAJ20)
ILQVREADAAVYRDCKLSF

SEQ ID NO: 337080 - protein, 13 aa, Homo sapiens
  CDR3 for beta chain variable domain of TCR clone 168540 (TRBV15, TRBJ1-6)
CVTSGGLNSPLHF

SEQ ID NO: 337081 - protein, 13 aa, Homo sapiens
  CDR3 for alpha chain variable domain of TCR clone 168541 (TRAV12-3, TRAJ9)
CAMRNIGGFKTIF

SEQ ID NO: 337082 - protein, 14 aa, Homo sapiens
  CDR3 for beta chain variable domain of TCR clone 168541 (TRBV12-5, TRBJ2-5)
CASGSRTHQETQYF

SEQ ID NO: 337083 - protein, 13 aa, Homo sapiens
  CDR3 for alpha chain variable domain of TCR clone 168542 (TRAV8-4, TRAJ48)
CAVSLFGNEKLTF

SEQ ID NO: 337084 - protein, 16 aa, Homo sapiens
  CDR3 for beta chain variable domain of TCR clone 168542 (TRBV7-3, TRBJ2-1)
CASSLVSGSSNNEQFF

SEQ ID NO: 337085 - protein, 12 aa, Homo sapiens
  CDR3 for alpha chain variable domain of TCR clone 168543 (TRAV12-3, TRAJ17)
CAMMLTGNKLTF

SEQ ID NO: 337086 - protein, 15 aa, Homo sapiens
  CDR3 for beta chain variable domain of TCR clone 168543 (TRBV11-2, TRBJ2-2)
CASSSDRVNAGELFF

SEQ ID NO: 337087 - protein, 15 aa, Homo sapiens
  CDR3 for alpha chain variable domain of TCR clone 168544 (TRAV12-1, TRAJ42)
CVVTRDGGSQGNLIF

SEQ ID NO: 337088 - protein, 14 aa, Homo sapiens
  CDR3 for beta chain variable domain of TCR clone 168544 (TRBV11-2, TRBJ2-3)
CASSLGEGANTQYF

SEQ ID NO: 337089 - protein, 21 aa, Homo sapiens
  CDR3 for alpha chain variable domain of TCR clone 168545 (TRAV8-4, TRAJ47)
HLTKPSAHMSDAAGRGNKLVF

SEQ ID NO: 337090 - protein, 14 aa, Homo sapiens
  CDR3 for beta chain variable domain of TCR clone 168545 (TRBV7-9, TRBJ2-1)
CASSPRDSLYEQFF

SEQ ID NO: 337091 - protein, 15 aa, Homo sapiens
  CDR3 for alpha chain variable domain of TCR clone 168546 (TRAV26-1, TRAJ39)
CIVRVASNAGNMLSF

SEQ ID NO: 337092 - protein, 14 aa, Homo sapiens
  CDR3 for beta chain variable domain of TCR clone 168546 (TRBV7-6, TRBJ2-3)
CASSVAGGTDTQYF

SEQ ID NO: 337093 - protein, 16 aa, Homo sapiens
  CDR3 for alpha chain variable domain of TCR clone 168547 (TRAV3, TRAJ10)
CAVRDMRAGVGNKLTF

SEQ ID NO: 337094 - protein, 15 aa, Homo sapiens
  CDR3 for beta chain variable domain of TCR clone 168547 (TRBV20-1, TRBJ2-7)
CSARDRVSGMDEQYF

SEQ ID NO: 337095 - protein, 14 aa, Homo sapiens
  CDR3 for alpha chain variable domain of TCR clone 168548 (TRAV3, TRAJ6)
CAVRDSRRKLHTYI

SEQ ID NO: 337096 - protein, 15 aa, Homo sapiens
  CDR3 for beta chain variable domain of TCR clone 168548 (TRBV11-2, TRBJ2-1)
CASSKNRGLIYEQFF

SEQ ID NO: 337097 - protein, 17 aa, Homo sapiens
  CDR3 for alpha chain variable domain of TCR clone 168549 (TRAV8-6, TRAJ58)
CAVSSWVGETSGSRLTF

SEQ ID NO: 337098 - protein, 13 aa, Homo sapiens
  CDR3 for beta chain variable domain of TCR clone 168549 (TRBV12-5, TRBJ2-3)
CASGDRQSDTQYF

SEQ ID NO: 337099 - protein, 18 aa, Homo sapiens
  CDR3 for alpha chain variable domain of TCR clone 168550 (TRAV29/DV5, TRAJ26)
CSVLLCSKRKPEGQNFVF

SEQ ID NO: 337100 - protein, 14 aa, Homo sapiens
  CDR3 for beta chain variable domain of TCR clone 168550 (TRBV7-2, TRBJ2-7)
CASRSQGAAYEQYF

SEQ ID NO: 337101 - protein, 14 aa, Homo sapiens
  CDR3 for alpha chain variable domain of TCR clone 168551 (TRAV12-1, TRAJ13)
CVVIVSGGYQKVTF

SEQ ID NO: 337102 - protein, 13 aa, Homo sapiens
  CDR3 for beta chain variable domain of TCR clone 168551 (TRBV20-1, TRBJ1-1)
CSAPPGGHTEAFF

SEQ ID NO: 337103 - protein, 12 aa, Homo sapiens
  CDR3 for alpha chain variable domain of TCR clone 168552 (TRAV16, TRAJ26)
CALWSYGQNFVF

SEQ ID NO: 337104 - protein, 14 aa, Homo sapiens
  CDR3 for beta chain variable domain of TCR clone 168552 (TRBV10-3, TRBJ2-1)
CAISSDRAYNEQFF

SEQ ID NO: 337105 - protein, 14 aa, Homo sapiens
  CDR3 for alpha chain variable domain of TCR clone 168553 (TRAV21, TRAJ58)
CAVRRGRSGSRLTF

SEQ ID NO: 337106 - protein, 15 aa, Homo sapiens
  CDR3 for beta chain variable domain of TCR clone 168553 (TRBV20-1, TRBJ2-7)
CSARDRVSGMDEQYF

SEQ ID NO: 337107 - protein, 13 aa, Homo sapiens
  CDR3 for alpha chain variable domain of TCR clone 168554 (TRAV3, TRAJ3)
CAVADSSASKLIF

SEQ ID NO: 337108 - protein, 16 aa, Homo sapiens
  CDR3 for beta chain variable domain of TCR clone 168554 (TRBV5-1, TRBJ2-3)
CASSLGLAVYTDTQYF

SEQ ID NO: 337109 - protein, 14 aa, Homo sapiens
  CDR3 for alpha chain variable domain of TCR clone 168555 (TRAV2, TRAJ23)
CAVGLRNQGGKLIF

SEQ ID NO: 337110 - protein, 12 aa, Homo sapiens
  CDR3 for beta chain variable domain of TCR clone 168555 (TRBV14, TRBJ2-5)
CASSQLKETQYF

SEQ ID NO: 337111 - protein, 11 aa, Homo sapiens
  CDR3 for alpha chain variable domain of TCR clone 168556 (TRAV12-1, TRAJ30)
CVVNGQDKIIF

SEQ ID NO: 337112 - protein, 15 aa, Homo sapiens
  CDR3 for beta chain variable domain of TCR clone 168556 (TRBV28, TRBJ2-5)
CASSSGRTTQETQYF

SEQ ID NO: 337113 - protein, 13 aa, Homo sapiens
  CDR3 for alpha chain variable domain of TCR clone 168557 (TRAV3, TRAJ35)
CGMRKSFGNVLHC

SEQ ID NO: 337114 - protein, 14 aa, Homo sapiens
  CDR3 for beta chain variable domain of TCR clone 168557 (TRBV6-5, TRBJ1-4)
CASSYRAAEEKLFF

SEQ ID NO: 337115 - protein, 12 aa, Homo sapiens
  CDR3 for alpha chain variable domain of TCR clone 168558 (TRAV12-3, TRAJ29)
CAAREGNTPLVF

SEQ ID NO: 337116 - protein, 17 aa, Homo sapiens
  CDR3 for beta chain variable domain of TCR clone 168558 (TRBV18, TRBJ2-1)
CASLPLAAGAGDNEQFF

SEQ ID NO: 337117 - protein, 14 aa, Homo sapiens
  CDR3 for alpha chain variable domain of TCR clone 168559 (TRAV26-2, TRAJ31)
CILIPGNNNARLMF

SEQ ID NO: 337118 - protein, 16 aa, Homo sapiens
  CDR3 for beta chain variable domain of TCR clone 168559 (TRBV7-3, TRBJ2-1)
CASSLVSGRSNNEQFF

SEQ ID NO: 337119 - protein, 16 aa, Homo sapiens
  CDR3 for alpha chain variable domain of TCR clone 168560 (TRAV30, TRAJ24)
CGTEIVDADSWWKLQF

SEQ ID NO: 337120 - protein, 14 aa, Homo sapiens
  CDR3 for beta chain variable domain of TCR clone 168560 (TRBV12-5, TRBJ2-5)
CASGSRTHQETQYF

SEQ ID NO: 337121 - protein, 14 aa, Homo sapiens
  CDR3 for alpha chain variable domain of TCR clone 168561 (TRAV12-2, TRAJ11)
CAVEGGSGYSTLTF

SEQ ID NO: 337122 - protein, 17 aa, Homo sapiens
  CDR3 for beta chain variable domain of TCR clone 168561 (TRBV15, TRBJ2-7)
CVPPAGIGGRGPHEQYF

SEQ ID NO: 337123 - protein, 13 aa, Homo sapiens
  CDR3 for alpha chain variable domain of TCR clone 168562 (TRAV13-1, TRAJ39)
CAASIWTGDMLTF

SEQ ID NO: 337124 - protein, 15 aa, Homo sapiens
  CDR3 for beta chain variable domain of TCR clone 168562 (TRBV7-9, TRBJ1-1)
CASSLLEQGGTEAFF

SEQ ID NO: 337125 - protein, 14 aa, Homo sapiens
  CDR3 for alpha chain variable domain of TCR clone 168563 (TRAV2, TRAJ9)
CAVEDRSGGVKTIF

SEQ ID NO: 337126 - protein, 16 aa, Homo sapiens
  CDR3 for beta chain variable domain of TCR clone 168563 (TRBV7-3, TRBJ2-1)
CASSLEGYRSYNEQFF

SEQ ID NO: 337127 - protein, 16 aa, Homo sapiens
  CDR3 for alpha chain variable domain of TCR clone 168564 (TRAV3, TRAJ5)
CAVRNLMDTGRRALTF

SEQ ID NO: 337128 - protein, 17 aa, Homo sapiens
  CDR3 for beta chain variable domain of TCR clone 168564 (TRBV7-8, TRBJ2-6)
CASSAGTGGAGANDLTF

SEQ ID NO: 337129 - protein, 12 aa, Homo sapiens
  CDR3 for alpha chain variable domain of TCR clone 168565 (TRAV12-3, TRAJ17)
CAMTLTGNKRTF

SEQ ID NO: 337130 - protein, 15 aa, Homo sapiens
  CDR3 for beta chain variable domain of TCR clone 168565 (TRBV20-1, TRBJ2-7)
CSARDRVSGMDERYF

SEQ ID NO: 337131 - protein, 18 aa, Homo sapiens
  CDR3 for alpha chain variable domain of TCR clone 168566 (TRAV3, TRAJ17)
CAVRARRGGRSCRQQANF

SEQ ID NO: 337132 - protein, 15 aa, Homo sapiens
  CDR3 for beta chain variable domain of TCR clone 168566 (TRBV10-2, TRBJ2-6)
CASSEQGTGANVLTY

SEQ ID NO: 337133 - protein, 18 aa, Homo sapiens
  CDR3 for alpha chain variable domain of TCR clone 168567 (TRAV21, TRAJ52)
CAVRPSPAGGTSYVKLTF

SEQ ID NO: 337134 - protein, 16 aa, Homo sapiens
  CDR3 for beta chain variable domain of TCR clone 168567 (TRBV7-3, TRBJ2-1)
CASSLEGYRSYNEQFF

SEQ ID NO: 337135 - protein, 16 aa, Homo sapiens
  CDR3 for alpha chain variable domain of TCR clone 168568 (TRAV36/DV7, TRAJ30)
CAVETYGLDRDDKIIF

SEQ ID NO: 337136 - protein, 13 aa, Homo sapiens
  CDR3 for beta chain variable domain of TCR clone 168568 (TRBV4-2, TRBJ1-1)
CASSQAGNTEAFF

SEQ ID NO: 337137 - protein, 11 aa, Homo sapiens
  CDR3 for alpha chain variable domain of TCR clone 168569 (TRAV2, TRAJ33)
CAVESNYQLIW

SEQ ID NO: 337138 - protein, 16 aa, Homo sapiens
  CDR3 for beta chain variable domain of TCR clone 168569 (TRBV20-1, TRBJ1-4)
CSAPEQGLLTNEKLFF

SEQ ID NO: 337139 - protein, 11 aa, Homo sapiens
  CDR3 for alpha chain variable domain of TCR clone 168570 (TRAV12-1, TRAJ34)
CVVNKGRELIF

SEQ ID NO: 337140 - protein, 14 aa, Homo sapiens
  CDR3 for beta chain variable domain of TCR clone 168570 (TRBV4-1, TRBJ2-7)
CASSPVAGGDEQYF

SEQ ID NO: 337141 - protein, 13 aa, Homo sapiens
  CDR3 for alpha chain variable domain of TCR clone 168571 (TRAV12-1, TRAJ26)
CVVRSNYGQNFVF

SEQ ID NO: 337142 - protein, 15 aa, Homo sapiens
  CDR3 for beta chain variable domain of TCR clone 168571 (TRBV28, TRBJ2-1)
CASSIIAGGRSEQFF

SEQ ID NO: 337143 - protein, 23 aa, Homo sapiens
  CDR3 for alpha chain variable domain of TCR clone 168572 (TRAV26-1, TRAJ38)
CIADNAGNNHIQNPDPAVYQLTD

SEQ ID NO: 337144 - protein, 13 aa, Homo sapiens
  CDR3 for beta chain variable domain of TCR clone 168572 (TRBV5-4, TRBJ1-1)
CASSVDLGTEAFF

SEQ ID NO: 337145 - protein, 10 aa, Homo sapiens
  CDR3 for alpha chain variable domain of TCR clone 168573 (TRAV26-1, TRAJ40)
CIAGTYKYIF

SEQ ID NO: 337146 - protein, 16 aa, Homo sapiens
  CDR3 for beta chain variable domain of TCR clone 168573 (TRBV5-1, TRBJ2-2)
CASSSRTGGRTGELFF

SEQ ID NO: 337147 - protein, 14 aa, Homo sapiens
  CDR3 for alpha chain variable domain of TCR clone 168574 (TRAV12-2, TRAJ17)
CAVLVKDAGNKLTF

SEQ ID NO: 337148 - protein, 17 aa, Homo sapiens
  CDR3 for beta chain variable domain of TCR clone 168574 (TRBV20-1, TRBJ2-2)
CSASGSGQGGLTGELFF

SEQ ID NO: 337149 - protein, 13 aa, Homo sapiens
  CDR3 for alpha chain variable domain of TCR clone 168575 (TRAV21, TRAJ36)
CAVIKTGANHLFS

SEQ ID NO: 337150 - protein, 13 aa, Homo sapiens
  CDR3 for beta chain variable domain of TCR clone 168575 (TRBV29-1, TRBJ2-3)
CSATRGGRDTQYF

SEQ ID NO: 337151 - protein, 11 aa, Homo sapiens
  CDR3 for alpha chain variable domain of TCR clone 168576 (TRAV2, TRAJ13)
CASGGYQKVTF

SEQ ID NO: 337152 - protein, 15 aa, Homo sapiens
  CDR3 for beta chain variable domain of TCR clone 168576 (TRBV11-2, TRBJ1-6)
CASSLDPWAVSPLHF

SEQ ID NO: 337153 - protein, 14 aa, Homo sapiens
  CDR3 for alpha chain variable domain of TCR clone 168577 (TRAV20, TRAJ29)
CAVQAWVGNTPLVF

SEQ ID NO: 337154 - protein, 15 aa, Homo sapiens
  CDR3 for beta chain variable domain of TCR clone 168577 (TRBV19, TRBJ1-1)
CASTSGQIQNTEAFF

SEQ ID NO: 337155 - protein, 16 aa, Homo sapiens
  CDR3 for alpha chain variable domain of TCR clone 168578 (TRAV3, TRAJ37)
CAVRPHGSGNTGKRIF

SEQ ID NO: 337156 - protein, 13 aa, Homo sapiens
  CDR3 for beta chain variable domain of TCR clone 168578 (TRBV2, TRBJ1-5)
CASGTGGYQPQHF

SEQ ID NO: 337157 - protein, 15 aa, Homo sapiens
  CDR3 for alpha chain variable domain of TCR clone 168579 (TRAV9-2, TRAJ57)
CALRPNQGGPEKLVF

SEQ ID NO: 337158 - protein, 17 aa, Homo sapiens
  CDR3 for beta chain variable domain of TCR clone 168579 (TRBV20-1, TRBJ2-1)
CSAPPRLAGTRYNEQFF

SEQ ID NO: 337159 - protein, 14 aa, Homo sapiens
  CDR3 for alpha chain variable domain of TCR clone 168580 (TRAV35, TRAJ42)
CAGRYGGSQGNLIF

SEQ ID NO: 337160 - protein, 12 aa, Homo sapiens
  CDR3 for beta chain variable domain of TCR clone 168580 (TRBV11-2, TRBJ2-2)
CASSLGGGELFF

SEQ ID NO: 337161 - protein, 18 aa, Homo sapiens
  CDR3 for alpha chain variable domain of TCR clone 168581 (TRAV35, TRAJ28)
CAGHNYPLSGAGSYQLTY

SEQ ID NO: 337162 - protein, 12 aa, Homo sapiens
  CDR3 for beta chain variable domain of TCR clone 168581 (TRBV7-9, TRBJ1-1)
CASSLEGTEAFF

SEQ ID NO: 337163 - protein, 12 aa, Homo sapiens
  CDR3 for alpha chain variable domain of TCR clone 168582 (TRAV3, TRAJ20)
CAVRDPDYKLSF

SEQ ID NO: 337164 - protein, 15 aa, Homo sapiens
  CDR3 for beta chain variable domain of TCR clone 168582 (TRBV6-1, TRBJ2-1)
CASSEAAYSYNEQFF

SEQ ID NO: 337165 - protein, 13 aa, Homo sapiens
  CDR3 for alpha chain variable domain of TCR clone 168583 (TRAV3, TRAJ43)
CAVKARNNNGMRF

SEQ ID NO: 337166 - protein, 16 aa, Homo sapiens
  CDR3 for beta chain variable domain of TCR clone 168583 (TRBV7-9, TRBJ2-3)
CASSFSVAGGTDTQYF

SEQ ID NO: 337167 - protein, 10 aa, Homo sapiens
  CDR3 for alpha chain variable domain of TCR clone 168584 (TRAV13-1, TRAJ52)
GGTSYGKLTF

SEQ ID NO: 337168 - protein, 16 aa, Homo sapiens
  CDR3 for beta chain variable domain of TCR clone 168584 (TRBV28, TRBJ2-7)
CASSPWVATGDLSQYF

SEQ ID NO: 337169 - protein, 16 aa, Homo sapiens
  CDR3 for alpha chain variable domain of TCR clone 168585 (TRAV20, TRAJ53)
CAVRRGSGGRNYKLTF

SEQ ID NO: 337170 - protein, 12 aa, Homo sapiens
  CDR3 for beta chain variable domain of TCR clone 168585 (TRBV29-1, TRBJ2-3)
CSVVLGADTHYF

SEQ ID NO: 337171 - protein, 12 aa, Homo sapiens
  CDR3 for alpha chain variable domain of TCR clone 168586 (TRAV2, TRAJ31)
CAVEDNNARLMF

SEQ ID NO: 337172 - protein, 14 aa, Homo sapiens
  CDR3 for beta chain variable domain of TCR clone 168586 (TRBV27, TRBJ2-2)
CASRPGVNTGELFF

SEQ ID NO: 337173 - protein, 15 aa, Homo sapiens
  CDR3 for alpha chain variable domain of TCR clone 168587 (TRAV3, TRAJ3)
CAVRDRRSSASKIIF

SEQ ID NO: 337174 - protein, 13 aa, Homo sapiens
  CDR3 for beta chain variable domain of TCR clone 168587 (TRBV29-1, TRBJ1-1)
CSVGDSRNTEAFF

SEQ ID NO: 337175 - protein, 14 aa, Homo sapiens
  CDR3 for alpha chain variable domain of TCR clone 168588 (TRAV38-1, TRAJ40)
CALRPTSGTYTYIF

SEQ ID NO: 337176 - protein, 13 aa, Homo sapiens
  CDR3 for beta chain variable domain of TCR clone 168588 (TRBV4-1, TRBJ2-7)
CASSQGQAYEQYF

SEQ ID NO: 337177 - protein, 16 aa, Homo sapiens
  CDR3 for alpha chain variable domain of TCR clone 168589 (TRAV12-2, TRAJ50)
CAVGTATKTSYDTVIF

SEQ ID NO: 337178 - protein, 12 aa, Homo sapiens
  CDR3 for beta chain variable domain of TCR clone 168589 (TRBV12-4, TRBJ1-5)
CASSLGRQPQHF

SEQ ID NO: 337179 - protein, 15 aa, Homo sapiens
  CDR3 for alpha chain variable domain of TCR clone 168590 (TRAV8-6, TRAJ38)
CAVSSNAGNNRKLIW

SEQ ID NO: 337180 - protein, 13 aa, Homo sapiens
  CDR3 for beta chain variable domain of TCR clone 168590 (TRBV29-1, TRBJ2-2)
CSTTGVNTGELFF

SEQ ID NO: 337181 - protein, 12 aa, Homo sapiens
  CDR3 for alpha chain variable domain of TCR clone 168591 (TRAV12-2, TRAJ8)
CAVKGGFQKLVF

SEQ ID NO: 337182 - protein, 14 aa, Homo sapiens
  CDR3 for beta chain variable domain of TCR clone 168591 (TRBV25-1, TRBJ1-1)
CASTHLGGNTEAFF

SEQ ID NO: 337183 - protein, 14 aa, Homo sapiens
  CDR3 for alpha chain variable domain of TCR clone 168592 (TRAV12-3, TRAJ10)
SHLPLTGGGNKLTF

SEQ ID NO: 337184 - protein, 12 aa, Homo sapiens
  CDR3 for beta chain variable domain of TCR clone 168592 (TRBV7-8, TRBJ2-7)
CASSRGDREQYF

SEQ ID NO: 337185 - protein, 14 aa, Homo sapiens
  CDR3 for alpha chain variable domain of TCR clone 168593 (TRAV1-2, TRAJ8)
CAVREDTGFQKLVF

SEQ ID NO: 337186 - protein, 15 aa, Homo sapiens
  CDR3 for beta chain variable domain of TCR clone 168593 (TRBV12-4, TRBJ2-5)
CASSPQTGLQETQYF

SEQ ID NO: 337187 - protein, 15 aa, Homo sapiens
  CDR3 for alpha chain variable domain of TCR clone 168594 (TRAV13-1, TRAJ27)
CAARELNTNAGKSTF

SEQ ID NO: 337188 - protein, 14 aa, Homo sapiens
  CDR3 for beta chain variable domain of TCR clone 168594 (TRBV6-5, TRBJ1-2)
CANSYTRDRGRYTF

SEQ ID NO: 337189 - protein, 15 aa, Homo sapiens
  CDR3 for alpha chain variable domain of TCR clone 168595 (TRAV23/DV6, TRAJ18)
CAARYRGSTLGRRYF

SEQ ID NO: 337190 - protein, 15 aa, Homo sapiens
  CDR3 for beta chain variable domain of TCR clone 168595 (TRBV7-3, TRBJ2-3)
CASSLTSGVGDTQYF

SEQ ID NO: 337191 - protein, 14 aa, Homo sapiens
  CDR3 for alpha chain variable domain of TCR clone 168596 (TRAV13-2, TRAJ9)
CAENLETRGFKTIF

SEQ ID NO: 337192 - protein, 16 aa, Homo sapiens
  CDR3 for beta chain variable domain of TCR clone 168596 (TRBV28, TRBJ2-5)
CASSFSPAGGWETQYF

SEQ ID NO: 337193 - protein, 11 aa, Homo sapiens
  CDR3 for alpha chain variable domain of TCR clone 168597 (TRAV21, TRAJ34)
CAVTKTDKLIF

SEQ ID NO: 337194 - protein, 12 aa, Homo sapiens
  CDR3 for beta chain variable domain of TCR clone 168597 (TRBV7-6, TRBJ2-3)
CASSTGTDTQYF

SEQ ID NO: 337195 - protein, 12 aa, Homo sapiens
  CDR3 for alpha chain variable domain of TCR clone 168598 (TRAV13-1, TRAJ3)
CAPRGDASKIIF

SEQ ID NO: 337196 - protein, 13 aa, Homo sapiens
  CDR3 for beta chain variable domain of TCR clone 168598 (TRBV5-7, TRBJ1-2)
CASSMGTGYGYTF

SEQ ID NO: 337197 - protein, 14 aa, Homo sapiens
  CDR3 for alpha chain variable domain of TCR clone 168599 (TRAV12-3, TRAJ54)
CAMRGIQGAQKLVF

SEQ ID NO: 337198 - protein, 15 aa, Homo sapiens
  CDR3 for beta chain variable domain of TCR clone 168599 (TRBV12-4, TRBJ2-5)
CASSPPTGLQETQYF

SEQ ID NO: 337199 - protein, 13 aa, Homo sapiens
  CDR3 for alpha chain variable domain of TCR clone 168600 (TRAV1-1, TRAJ9)
CAAKNTGGFKTIF

SEQ ID NO: 337200 - protein, 14 aa, Homo sapiens
  CDR3 for beta chain variable domain of TCR clone 168600 (TRBV6-6, TRBJ1-3)
SASVAGDSGNTIYF

SEQ ID NO: 337201 - protein, 21 aa, Homo sapiens
  CDR3 for alpha chain variable domain of TCR clone 168601 (TRAV12-1, TRAJ32)
SSVIQPPTSMNSGGATNKLIF

SEQ ID NO: 337202 - protein, 14 aa, Homo sapiens
  CDR3 for beta chain variable domain of TCR clone 168601 (TRBV11-2, TRBJ2-3)
CASSRLARTDTQYF

SEQ ID NO: 337203 - protein, 16 aa, Homo sapiens
  CDR3 for alpha chain variable domain of TCR clone 168602 (TRAV17, TRAJ52)
CATGIIGGTSYGKLTF

SEQ ID NO: 337204 - protein, 15 aa, Homo sapiens
  CDR3 for beta chain variable domain of TCR clone 168602 (TRBV10-3, TRBJ2-3)
CAIDTSGRRTDTQYF

SEQ ID NO: 337205 - protein, 14 aa, Homo sapiens
  CDR3 for alpha chain variable domain of TCR clone 168603 (TRAV1-2, TRAJ8)
CAVREDTGFQKLVF

SEQ ID NO: 337206 - protein, 16 aa, Homo sapiens
  CDR3 for beta chain variable domain of TCR clone 168603 (TRBV4-1, TRBJ2-3)
CASSPSTSGAEDTQYF

SEQ ID NO: 337207 - protein, 13 aa, Homo sapiens
  CDR3 for alpha chain variable domain of TCR clone 168604 (TRAV8-4, TRAJ48)
CVVSLFGNEKLTF

SEQ ID NO: 337208 - protein, 15 aa, Homo sapiens
  CDR3 for beta chain variable domain of TCR clone 168604 (TRBV20-1, TRBJ2-7)
CSARKGLAESYEQYF

SEQ ID NO: 337209 - protein, 15 aa, Homo sapiens
  CDR3 for alpha chain variable domain of TCR clone 168605 (TRAV13-1, TRAJ10)
CAATILTGGGNKLTF

SEQ ID NO: 337210 - protein, 15 aa, Homo sapiens
  CDR3 for beta chain variable domain of TCR clone 168605 (TRBV2, TRBJ2-7)
CASTLLGSGATQQYF

SEQ ID NO: 337211 - protein, 11 aa, Homo sapiens
  CDR3 for alpha chain variable domain of TCR clone 168606 (TRAV17, TRAJ9)
CGFTGGFKTIP

SEQ ID NO: 337212 - protein, 14 aa, Homo sapiens
  CDR3 for beta chain variable domain of TCR clone 168606 (TRBV7-9, TRBJ2-2)
CASSLVQDTGELFF

SEQ ID NO: 337213 - protein, 14 aa, Homo sapiens
  CDR3 for alpha chain variable domain of TCR clone 168607 (TRAV2, TRAJ9)
CAVEDRSGGFKTIF

SEQ ID NO: 337214 - protein, 17 aa, Homo sapiens
  CDR3 for beta chain variable domain of TCR clone 168607 (TRBV4-1, TRBJ2-7)
CASSRAPLGVRGGEQYF

SEQ ID NO: 337215 - protein, 11 aa, Homo sapiens
  CDR3 for alpha chain variable domain of TCR clone 168608 (TRAV23/DV6, TRAJ58)
CAARLLRGETS

SEQ ID NO: 337216 - protein, 13 aa, Homo sapiens
  CDR3 for beta chain variable domain of TCR clone 168608 (TRBV5-7, TRBJ1-2)
CASSLIRAPGYTF

SEQ ID NO: 337217 - protein, 14 aa, Homo sapiens
  CDR3 for alpha chain variable domain of TCR clone 168609 (TRAV12-2, TRAJ13)
CAVKKTGGYQKVTF

SEQ ID NO: 337218 - protein, 13 aa, Homo sapiens
  CDR3 for beta chain variable domain of TCR clone 168609 (TRBV14, TRBJ2-7)
CASSQDRRYEQYF

SEQ ID NO: 337219 - protein, 12 aa, Homo sapiens
  CDR3 for alpha chain variable domain of TCR clone 168610 (TRAV3, TRAJ27)
CAGRDGAGKSTF

SEQ ID NO: 337220 - protein, 13 aa, Homo sapiens
  CDR3 for beta chain variable domain of TCR clone 168610 (TRBV10-3, TRBJ1-2)
CAINADLNYGYTF

SEQ ID NO: 337221 - protein, 20 aa, Homo sapiens
  CDR3 for alpha chain variable domain of TCR clone 168611 (TRAV1-1, TRAJ36)
CLLLLRCERHAPPGANNLFF

SEQ ID NO: 337222 - protein, 15 aa, Homo sapiens
  CDR3 for beta chain variable domain of TCR clone 168611 (TRBV7-2, TRBJ2-5)
CASSLRGASGETQYF

SEQ ID NO: 337223 - protein, 14 aa, Homo sapiens
  CDR3 for alpha chain variable domain of TCR clone 168612 (TRAV4, TRAJ17)
CLVGDMAAGNKLTL

SEQ ID NO: 337224 - protein, 14 aa, Homo sapiens
  CDR3 for beta chain variable domain of TCR clone 168612 (TRBV7-6, TRBJ2-3)
CASSLGTVTDTQYF

SEQ ID NO: 337225 - protein, 12 aa, Homo sapiens
  CDR3 for alpha chain variable domain of TCR clone 168613 (TRAV30, TRAJ39)
CGRGNAGNMLTF

SEQ ID NO: 337226 - protein, 17 aa, Homo sapiens
  CDR3 for beta chain variable domain of TCR clone 168613 (TRBV18, TRBJ2-1)
CASSKGLSGGADNEQFF

SEQ ID NO: 337227 - protein, 18 aa, Homo sapiens
  CDR3 for alpha chain variable domain of TCR clone 168614 (TRAV21, TRAJ52)
YAVRPSPAGGTSYGKLTF

SEQ ID NO: 337228 - protein, 16 aa, Homo sapiens
  CDR3 for beta chain variable domain of TCR clone 168614 (TRBV13, TRBJ2-3)
CQQPLQGSGGRNTQYF

SEQ ID NO: 337229 - protein, 16 aa, Homo sapiens
  CDR3 for alpha chain variable domain of TCR clone 168615 (TRAV26-1, TRAJ56)
CIVRVAETGANSKLTF

SEQ ID NO: 337230 - protein, 15 aa, Homo sapiens
  CDR3 for beta chain variable domain of TCR clone 168615 (TRBV20-1, TRBJ2-7)
CSARDRVSGMDEQYF

SEQ ID NO: 337231 - protein, 15 aa, Homo sapiens
  CDR3 for alpha chain variable domain of TCR clone 168616 (TRAV12-3, TRAJ6)
CAMGATTGGSYIPTF

SEQ ID NO: 337232 - protein, 16 aa, Homo sapiens
  CDR3 for beta chain variable domain of TCR clone 168616 (TRBV20-1, TRBJ1-2)
CSASMGQGVANYGYSF

SEQ ID NO: 337233 - protein, 13 aa, Homo sapiens
  CDR3 for alpha chain variable domain of TCR clone 168617 (TRAV27, TRAJ56)
CAGKPGANSKLTF

SEQ ID NO: 337234 - protein, 18 aa, Homo sapiens
  CDR3 for beta chain variable domain of TCR clone 168617 (TRBV11-2, TRBJ2-3)
CASSLGGSSRGAPNTQYF

SEQ ID NO: 337235 - protein, 11 aa, Homo sapiens
  CDR3 for alpha chain variable domain of TCR clone 168618 (TRAV1-2, TRAJ20)
CAVANDYKLSF

SEQ ID NO: 337236 - protein, 18 aa, Homo sapiens
  CDR3 for beta chain variable domain of TCR clone 168618 (TRBV20-1, TRBJ2-6)
CSAETTPTQGSGANVLTF

SEQ ID NO: 337237 - protein, 14 aa, Homo sapiens
  CDR3 for alpha chain variable domain of TCR clone 168619 (TRAV8-1, TRAJ13)
CAVKSSGGYQKVTF

SEQ ID NO: 337238 - protein, 15 aa, Homo sapiens
  CDR3 for beta chain variable domain of TCR clone 168619 (TRBV7-8, TRBJ2-1)
CASSLAGGLYNEQFF

SEQ ID NO: 337239 - protein, 16 aa, Homo sapiens
  CDR3 for alpha chain variable domain of TCR clone 168620 (TRAV3, TRAJ37)
CAVGPHGSGNTGKLIF

SEQ ID NO: 337240 - protein, 14 aa, Homo sapiens
  CDR3 for beta chain variable domain of TCR clone 168620 (TRBV2, TRBJ2-1)
CASSDRAYYNEQFF

SEQ ID NO: 337241 - protein, 14 aa, Homo sapiens
  CDR3 for alpha chain variable domain of TCR clone 168621 (TRAV1-2, TRAJ16)
CAVNRFSDGQKLLF

SEQ ID NO: 337242 - protein, 13 aa, Homo sapiens
  CDR3 for beta chain variable domain of TCR clone 168621 (TRBV4-2, TRBJ1-1)
CAWSQAGNTEAFF

SEQ ID NO: 337243 - protein, 12 aa, Homo sapiens
  CDR3 for alpha chain variable domain of TCR clone 168622 (TRAV13-1, TRAJ48)
CAANFGNEKSTF

SEQ ID NO: 337244 - protein, 12 aa, Homo sapiens
  CDR3 for beta chain variable domain of TCR clone 168622 (TRBV7-8, TRBJ2-7)
CASSLGDREQYF

SEQ ID NO: 337245 - protein, 14 aa, Homo sapiens
  CDR3 for alpha chain variable domain of TCR clone 168623 (TRAV23/DV6, TRAJ13)
CAAMYSGGYQQVTF

SEQ ID NO: 337246 - protein, 14 aa, Homo sapiens
  CDR3 for beta chain variable domain of TCR clone 168623 (TRBV7-9, TRBJ2-1)
CASSPRDSLYEQFF

SEQ ID NO: 337247 - protein, 14 aa, Homo sapiens
  CDR3 for alpha chain variable domain of TCR clone 168624 (TRAV12-2, TRAJ13)
CAVKKTGGYQKVTF

SEQ ID NO: 337248 - protein, 16 aa, Homo sapiens
  CDR3 for beta chain variable domain of TCR clone 168624 (TRBV7-3, TRBJ2-2)
CAGSLKRGTLSGELFF

SEQ ID NO: 337249 - protein, 14 aa, Homo sapiens
  CDR3 for alpha chain variable domain of TCR clone 168625 (TRAV1-2, TRAJ16)
CAVNRFSDGEKLLL

SEQ ID NO: 337250 - protein, 13 aa, Homo sapiens
  CDR3 for beta chain variable domain of TCR clone 168625 (TRBV18, TRBJ2-5)
CASSPAGKETQYF

SEQ ID NO: 337251 - protein, 14 aa, Homo sapiens
  CDR3 for alpha chain variable domain of TCR clone 168626 (TRAV8-3, TRAJ4)
CAVGASGGYKKLIF

SEQ ID NO: 337252 - protein, 13 aa, Homo sapiens
  CDR3 for beta chain variable domain of TCR clone 168626 (TRBV18, TRBJ2-5)
CASSLQGQETQYF

SEQ ID NO: 337253 - protein, 13 aa, Homo sapiens
  CDR3 for alpha chain variable domain of TCR clone 168627 (TRAV16, TRAJ48)
CSPLNFGNEKLTL

SEQ ID NO: 337254 - protein, 11 aa, Homo sapiens
  CDR3 for beta chain variable domain of TCR clone 168627 (TRBV7-9, TRBJ2-3)
CASSPTDTQYF

SEQ ID NO: 337255 - protein, 13 aa, Homo sapiens
  CDR3 for alpha chain variable domain of TCR clone 168628 (TRAV21, TRAJ27)
CAARPGNAGKATF

SEQ ID NO: 337256 - protein, 14 aa, Homo sapiens
  CDR3 for beta chain variable domain of TCR clone 168628 (TRBV11-2, TRBJ2-7)
CASSLGAGAYEQYF

SEQ ID NO: 337257 - protein, 13 aa, Homo sapiens
  CDR3 for alpha chain variable domain of TCR clone 168629 (TRAV27, TRAJ11)
CAGGGSGYSTLTF

SEQ ID NO: 337258 - protein, 19 aa, Homo sapiens
  CDR3 for beta chain variable domain of TCR clone 168629 (TRBV7-2, TRBJ2-3)
CASSFLSRNWGGGTDTQYF

SEQ ID NO: 337259 - protein, 12 aa, Homo sapiens
  CDR3 for alpha chain variable domain of TCR clone 168630 (TRAV2, TRAJ10)
CASTGGGNKLTF

SEQ ID NO: 337260 - protein, 14 aa, Homo sapiens
  CDR3 for beta chain variable domain of TCR clone 168630 (TRBV7-2, TRBJ1-2)
CASSQTGSTYGYTF

SEQ ID NO: 337261 - protein, 12 aa, Homo sapiens
  CDR3 for alpha chain variable domain of TCR clone 168631 (TRAV12-3, TRAJ17)
CAMTLTGNKLTF

SEQ ID NO: 337262 - protein, 18 aa, Homo sapiens
  CDR3 for beta chain variable domain of TCR clone 168631 (TRBV7-6, TRBJ1-3)
CASSSPIGGDSSGNTIYF

SEQ ID NO: 337263 - protein, 12 aa, Homo sapiens
  CDR3 for alpha chain variable domain of TCR clone 168632 (TRAV12-3, TRAJ31)
CAMSVTNARLMF

SEQ ID NO: 337264 - protein, 12 aa, Homo sapiens
  CDR3 for beta chain variable domain of TCR clone 168632 (TRBV11-2, TRBJ2-1)
CASSVEREEQFF

SEQ ID NO: 337265 - protein, 16 aa, Homo sapiens
  CDR3 for alpha chain variable domain of TCR clone 168633 (TRAV14/DV4, TRAJ20)
CAMREGRSRDDYKSSF

SEQ ID NO: 337266 - protein, 17 aa, Homo sapiens
  CDR3 for beta chain variable domain of TCR clone 168633 (TRBV15, TRBJ1-1)
CATSRVGGADGDTEAFF

SEQ ID NO: 337267 - protein, 12 aa, Homo sapiens
  CDR3 for alpha chain variable domain of TCR clone 168634 (TRAV20, TRAJ39)
CAVGNAGNRLTF

SEQ ID NO: 337268 - protein, 16 aa, Homo sapiens
  CDR3 for beta chain variable domain of TCR clone 168634 (TRBV15, TRBJ1-2)
CATSRGPRTGGGGYTF

SEQ ID NO: 337269 - protein, 13 aa, Homo sapiens
  CDR3 for alpha chain variable domain of TCR clone 168635 (TRAV2, TRAJ15)
CTVASQAGTALIF

SEQ ID NO: 337270 - protein, 14 aa, Homo sapiens
  CDR3 for beta chain variable domain of TCR clone 168635 (TRBV5-1, TRBJ2-7)
CASSRGESLYEQYF

SEQ ID NO: 337271 - protein, 13 aa, Homo sapiens
  CDR3 for alpha chain variable domain of TCR clone 168636 (TRAV12-3, TRAJ30)
WAMSAKWDDKIIF

SEQ ID NO: 337272 - protein, 16 aa, Homo sapiens
  CDR3 for beta chain variable domain of TCR clone 168636 (TRBV11-3, TRBJ2-5)
CASSSVVAGSTETQYF

SEQ ID NO: 337273 - protein, 18 aa, Homo sapiens
  CDR3 for alpha chain variable domain of TCR clone 168637 (TRAV21, TRAJ52)
CAVRPSPAGSTSYGKLTF

SEQ ID NO: 337274 - protein, 17 aa, Homo sapiens
  CDR3 for beta chain variable domain of TCR clone 168637 (TRBV13, TRBJ2-3)
CACSLSRVAGGRNTQYF

SEQ ID NO: 337275 - protein, 15 aa, Homo sapiens
  CDR3 for alpha chain variable domain of TCR clone 168638 (TRAV1-2, TRAJ8)
TSVVREDTGFQKLVF

SEQ ID NO: 337276 - protein, 15 aa, Homo sapiens
  CDR3 for beta chain variable domain of TCR clone 168638 (TRBV6-3, TRBJ2-7)
CASSSPGTVFYEQYF

SEQ ID NO: 337277 - protein, 16 aa, Homo sapiens
  CDR3 for alpha chain variable domain of TCR clone 168639 (TRAV30, TRAJ24)
CGTEIVDADSWGNSSL

SEQ ID NO: 337278 - protein, 14 aa, Homo sapiens
  CDR3 for beta chain variable domain of TCR clone 168639 (TRBV18, TRBJ2-7)
CASSPRGGAYEQYF

SEQ ID NO: 337279 - protein, 17 aa, Homo sapiens
  CDR3 for alpha chain variable domain of TCR clone 168640 (TRAV38-2/DV8, TRAJ40)
CAYRSARLTSGTYKYIF

SEQ ID NO: 337280 - protein, 12 aa, Homo sapiens
  CDR3 for beta chain variable domain of TCR clone 168640 (TRBV11-2, TRBJ2-2)
CASSLGGGELVF

SEQ ID NO: 337281 - protein, 14 aa, Homo sapiens
  CDR3 for alpha chain variable domain of TCR clone 168641 (TRAV21, TRAJ35)
CAVMPIGFRNVLHC

SEQ ID NO: 337282 - protein, 12 aa, Homo sapiens
  CDR3 for beta chain variable domain of TCR clone 168641 (TRBV7-9, TRBJ2-7)
YASSIKREEQYF

SEQ ID NO: 337283 - protein, 12 aa, Homo sapiens
  CDR3 for alpha chain variable domain of TCR clone 168642 (TRAV6, TRAJ20)
CALDRGDYKLSF

SEQ ID NO: 337284 - protein, 13 aa, Homo sapiens
  CDR3 for beta chain variable domain of TCR clone 168642 (TRBV15, TRBJ1-6)
SATSGGLNSPLHF

SEQ ID NO: 337285 - protein, 11 aa, Homo sapiens
  CDR3 for alpha chain variable domain of TCR clone 168643 (TRAV2, TRAJ13)
CASGGYQKVTF

SEQ ID NO: 337286 - protein, 13 aa, Homo sapiens
  CDR3 for beta chain variable domain of TCR clone 168643 (TRBV20-1, TRBJ2-7)
CSATHTSGYEQYF

SEQ ID NO: 337287 - protein, 13 aa, Homo sapiens
  CDR3 for alpha chain variable domain of TCR clone 168644 (TRAV8-3, TRAJ43)
CAVVPDNNNDMRF

SEQ ID NO: 337288 - protein, 17 aa, Homo sapiens
  CDR3 for beta chain variable domain of TCR clone 168644 (TRBV7-7, TRBJ1-1)
CASIGDRPNLGATEAFF

SEQ ID NO: 337289 - protein, 14 aa, Homo sapiens
  CDR3 for alpha chain variable domain of TCR clone 168645 (TRAV8-4, TRAJ13)
CAVTLSGGYQKVTF

SEQ ID NO: 337290 - protein, 17 aa, Homo sapiens
  CDR3 for beta chain variable domain of TCR clone 168645 (TRBV20-1, TRBJ2-2)
CSASGSGQGGLTGELFF

SEQ ID NO: 337291 - protein, 15 aa, Homo sapiens
  CDR3 for alpha chain variable domain of TCR clone 168646 (TRAV8-6, TRAJ38)
CAVSSNAGNNRKLLW

SEQ ID NO: 337292 - protein, 14 aa, Homo sapiens
  CDR3 for beta chain variable domain of TCR clone 168646 (TRBV14, TRBJ2-1)
CASSQVQGRGEQFF

SEQ ID NO: 337293 - protein, 16 aa, Homo sapiens
  CDR3 for alpha chain variable domain of TCR clone 168647 (TRAV38-1, TRAJ32)
CAFMKGGGGATNKLIF

SEQ ID NO: 337294 - protein, 14 aa, Homo sapiens
  CDR3 for beta chain variable domain of TCR clone 168647 (TRBV4-1, TRBJ2-2)
CASSQAVNTGELFF

SEQ ID NO: 337295 - protein, 12 aa, Homo sapiens
  CDR3 for alpha chain variable domain of TCR clone 168648 (TRAV35, TRAJ30)
CAGLNRDDKIIF

SEQ ID NO: 337296 - protein, 15 aa, Homo sapiens
  CDR3 for beta chain variable domain of TCR clone 168648 (TRBV18, TRBJ2-3)
CASSRLAGETDTQYF

SEQ ID NO: 337297 - protein, 14 aa, Homo sapiens
  CDR3 for alpha chain variable domain of TCR clone 168649 (TRAV38-1, TRAJ29)
CAFITPSGNTPLVF

SEQ ID NO: 337298 - protein, 15 aa, Homo sapiens
  CDR3 for beta chain variable domain of TCR clone 168649 (TRBV5-1, TRBJ1-1)
CASSSTTGTNTEAFF

SEQ ID NO: 337299 - protein, 11 aa, Homo sapiens
  CDR3 for alpha chain variable domain of TCR clone 168650 (TRAV12-2, TRAJ43)
CAAYNNNDMPF

SEQ ID NO: 337300 - protein, 14 aa, Homo sapiens
  CDR3 for beta chain variable domain of TCR clone 168650 (TRBV7-8, TRBJ1-2)
CASSAGTAIYGYTF

SEQ ID NO: 337301 - protein, 14 aa, Homo sapiens
  CDR3 for alpha chain variable domain of TCR clone 168651 (TRAV12-3, TRAJ10)
SHLRLTGGGNKLTF

SEQ ID NO: 337302 - protein, 12 aa, Homo sapiens
  CDR3 for beta chain variable domain of TCR clone 168651 (TRBV7-8, TRBJ2-7)
CASSLGDREQYF

SEQ ID NO: 337303 - protein, 14 aa, Homo sapiens
  CDR3 for alpha chain variable domain of TCR clone 168652 (TRAV12-3, TRAJ12)
CAMSEMDSSYKLIF

SEQ ID NO: 337304 - protein, 14 aa, Homo sapiens
  CDR3 for beta chain variable domain of TCR clone 168652 (TRBV11-2, TRBJ1-2)
CASSLYRGNYGYTF

SEQ ID NO: 337305 - protein, 14 aa, Homo sapiens
  CDR3 for alpha chain variable domain of TCR clone 168653 (TRAV8-4, TRAJ37)
CAVSESSNTGKLVF

SEQ ID NO: 337306 - protein, 15 aa, Homo sapiens
  CDR3 for beta chain variable domain of TCR clone 168653 (TRBV9, TRBJ1-6)
CASSVAGTGDSPLHF

SEQ ID NO: 337307 - protein, 12 aa, Homo sapiens
  CDR3 for alpha chain variable domain of TCR clone 168654 (TRAV8-3, TRAJ20)
CAVDYNDYKLSF

SEQ ID NO: 337308 - protein, 17 aa, Homo sapiens
  CDR3 for beta chain variable domain of TCR clone 168654 (TRBV7-8, TRBJ2-6)
CASSAGTGGAGANVLTF

SEQ ID NO: 337309 - protein, 16 aa, Homo sapiens
  CDR3 for alpha chain variable domain of TCR clone 168655 (TRAV22, TRAJ45)
CAVERGKRGGDDGLTF

SEQ ID NO: 337310 - protein, 16 aa, Homo sapiens
  CDR3 for beta chain variable domain of TCR clone 168655 (TRBV5-1, TRBJ2-5)
CASSLRRTSGQETQYF

SEQ ID NO: 337311 - protein, 13 aa, Homo sapiens
  CDR3 for alpha chain variable domain of TCR clone 168656 (TRAV35, TRAJ42)
CAGFPGSQGNLIF

SEQ ID NO: 337312 - protein, 13 aa, Homo sapiens
  CDR3 for beta chain variable domain of TCR clone 168656 (TRBV3-1, TRBJ2-2)
CASLARGSGELFF

SEQ ID NO: 337313 - protein, 15 aa, Homo sapiens
  CDR3 for alpha chain variable domain of TCR clone 168657 (TRAV12-1, TRAJ42)
CVVTRDGGSQGNLIF

SEQ ID NO: 337314 - protein, 15 aa, Homo sapiens
  CDR3 for beta chain variable domain of TCR clone 168657 (TRBV11-2, TRBJ2-1)
CASSKNRGLIYEQFF

SEQ ID NO: 337315 - protein, 18 aa, Homo sapiens
  CDR3 for alpha chain variable domain of TCR clone 168658 (TRAV21, TRAJ52)
CAVRPSPAGGTSYGKLTF

SEQ ID NO: 337316 - protein, 13 aa, Homo sapiens
  CDR3 for beta chain variable domain of TCR clone 168658 (TRBV10-3, TRBJ2-7)
CAIRAGGPHGQYF

SEQ ID NO: 337317 - protein, 14 aa, Homo sapiens
  CDR3 for alpha chain variable domain of TCR clone 168659 (TRAV12-3, TRAJ11)
CAMTTNSGYSTLTF

SEQ ID NO: 337318 - protein, 16 aa, Homo sapiens
  CDR3 for beta chain variable domain of TCR clone 168659 (TRBV20-1, TRBJ1-1)
CSARAVTQGMNTEAFF

SEQ ID NO: 337319 - protein, 14 aa, Homo sapiens
  CDR3 for alpha chain variable domain of TCR clone 168660 (TRAV12-3, TRAJ22)
CAMSLFGSARQLTF

SEQ ID NO: 337320 - protein, 15 aa, Homo sapiens
  CDR3 for beta chain variable domain of TCR clone 168660 (TRBV9, TRBJ1-6)
CASSVAGTGDSPLHF

SEQ ID NO: 337321 - protein, 18 aa, Homo sapiens
  CDR3 for alpha chain variable domain of TCR clone 168661 (TRAV14/DV4, TRAJ15)
CAMREFPPTGQAGTALIF

SEQ ID NO: 337322 - protein, 13 aa, Homo sapiens
  CDR3 for beta chain variable domain of TCR clone 168661 (TRBV19, TRBJ2-1)
CASSMYRVNEQFF

SEQ ID NO: 337323 - protein, 16 aa, Homo sapiens
  CDR3 for alpha chain variable domain of TCR clone 168662 (TRAV12-3, TRAJ53)
CAMSPGSGGSNYKLTC

SEQ ID NO: 337324 - protein, 20 aa, Homo sapiens
  CDR3 for beta chain variable domain of TCR clone 168662 (TRBV7-8, TRBJ2-2)
CASSHLFPGPTIHITGELFF

SEQ ID NO: 337325 - protein, 15 aa, Homo sapiens
  CDR3 for alpha chain variable domain of TCR clone 168663 (TRAV25, TRAJ41)
CAGPWNSISGYALNF

SEQ ID NO: 337326 - protein, 13 aa, Homo sapiens
  CDR3 for beta chain variable domain of TCR clone 168663 (TRBV15, TRBJ1-1)
CATSRGIQARAFF

SEQ ID NO: 337327 - protein, 13 aa, Homo sapiens
  CDR3 for alpha chain variable domain of TCR clone 168664 (TRAV30, TRAJ24)
CGTVTDSWGKLQF

SEQ ID NO: 337328 - protein, 12 aa, Homo sapiens
  CDR3 for beta chain variable domain of TCR clone 168664 (TRBV5-5, TRBJ2-5)
CASSYFGETQYF

SEQ ID NO: 337329 - protein, 15 aa, Homo sapiens
  CDR3 for alpha chain variable domain of TCR clone 168665 (TRAV17, TRAJ56)
CATEPFTGANSKLTF

SEQ ID NO: 337330 - protein, 15 aa, Homo sapiens
  CDR3 for beta chain variable domain of TCR clone 168665 (TRBV28, TRBJ1-5)
CATSRTGGYVQPQHF

SEQ ID NO: 337331 - protein, 12 aa, Homo sapiens
  CDR3 for alpha chain variable domain of TCR clone 168666 (TRAV12-2, TRAJ20)
CAVRPSDYKLSF

SEQ ID NO: 337332 - protein, 15 aa, Homo sapiens
  CDR3 for beta chain variable domain of TCR clone 168666 (TRBV11-2, TRBJ1-2)
CASSLEGVQRNGYTF

SEQ ID NO: 337333 - protein, 16 aa, Homo sapiens
  CDR3 for alpha chain variable domain of TCR clone 168667 (TRAV1-2, TRAJ10)
CAVRGVLTGGGNKLTF

SEQ ID NO: 337334 - protein, 15 aa, Homo sapiens
  CDR3 for beta chain variable domain of TCR clone 168667 (TRBV7-8, TRBJ2-2)
CASSLEAGDTGELFF

SEQ ID NO: 337335 - protein, 13 aa, Homo sapiens
  CDR3 for alpha chain variable domain of TCR clone 168668 (TRAV12-2, TRAJ9)
CAVKWAGGFKTIF

SEQ ID NO: 337336 - protein, 15 aa, Homo sapiens
  CDR3 for beta chain variable domain of TCR clone 168668 (TRBV5-1, TRBJ1-4)
CASSLTVDSDEKLFF

SEQ ID NO: 337337 - protein, 17 aa, Homo sapiens
  CDR3 for alpha chain variable domain of TCR clone 168669 (TRAV3, TRAJ42)
CAERDRDYGGSQGNLIF

SEQ ID NO: 337338 - protein, 15 aa, Homo sapiens
  CDR3 for beta chain variable domain of TCR clone 168669 (TRBV6-6, TRBJ2-7)
CASSYSYGGSYEQYF

SEQ ID NO: 337339 - protein, 17 aa, Homo sapiens
  CDR3 for alpha chain variable domain of TCR clone 168670 (TRAV19, TRAJ28)
CALSEASSGAGSYQLTF

SEQ ID NO: 337340 - protein, 13 aa, Homo sapiens
  CDR3 for beta chain variable domain of TCR clone 168670 (TRBV3-1, TRBJ1-1)
CASSPGVITEDFF

SEQ ID NO: 337341 - protein, 15 aa, Homo sapiens
  CDR3 for alpha chain variable domain of TCR clone 168671 (TRAV35, TRAJ23)
CAGQRGYNQGGKLIF

SEQ ID NO: 337342 - protein, 13 aa, Homo sapiens
  CDR3 for beta chain variable domain of TCR clone 168671 (TRBV19, TRBJ2-2)
CASSQRSTGELFF

SEQ ID NO: 337343 - protein, 12 aa, Homo sapiens
  CDR3 for alpha chain variable domain of TCR clone 168672 (TRAV13-1, TRAJ17)
CAARTACNKLTF

SEQ ID NO: 337344 - protein, 15 aa, Homo sapiens
  CDR3 for beta chain variable domain of TCR clone 168672 (TRBV7-6, TRBJ1-1)
CASSPQGGANTEAFF

SEQ ID NO: 337345 - protein, 11 aa, Homo sapiens
  CDR3 for alpha chain variable domain of TCR clone 168673 (TRAV13-1, TRAJ49)
CACVGGNQFYF

SEQ ID NO: 337346 - protein, 16 aa, Homo sapiens
  CDR3 for beta chain variable domain of TCR clone 168673 (TRBV11-2, TRBJ2-2)
CASSLRTGNLIGELFL

SEQ ID NO: 337347 - protein, 17 aa, Homo sapiens
  CDR3 for alpha chain variable domain of TCR clone 168674 (TRAV3, TRAJ42)
CAVIDRDYGGSQGNRIF

SEQ ID NO: 337348 - protein, 15 aa, Homo sapiens
  CDR3 for beta chain variable domain of TCR clone 168674 (TRBV27, TRBJ1-6)
CASSFDRGLGSPLHF

SEQ ID NO: 337349 - protein, 14 aa, Homo sapiens
  CDR3 for alpha chain variable domain of TCR clone 168675 (TRAV13-1, TRAJ35)
CAAGKGGFGNVLHC

SEQ ID NO: 337350 - protein, 17 aa, Homo sapiens
  CDR3 for beta chain variable domain of TCR clone 168675 (TRBV7-8, TRBJ2-6)
CASSAGTGGAGANVLTF

SEQ ID NO: 337351 - protein, 16 aa, Homo sapiens
  CDR3 for alpha chain variable domain of TCR clone 168676 (TRAV12-3, TRAJ50)
CAMRDPMKTSYDKVIF

SEQ ID NO: 337352 - protein, 17 aa, Homo sapiens
  CDR3 for beta chain variable domain of TCR clone 168676 (TRBV4-1, TRBJ1-4)
CASSQEGPRGVEEKLFF

SEQ ID NO: 337353 - protein, 15 aa, Homo sapiens
  CDR3 for alpha chain variable domain of TCR clone 168677 (TRAV3, TRAJ9)
CAVRARNTGGFITIF

SEQ ID NO: 337354 - protein, 12 aa, Homo sapiens
  CDR3 for beta chain variable domain of TCR clone 168677 (TRBV11-2, TRBJ2-7)
CASSLPTYEQYF

SEQ ID NO: 337355 - protein, 13 aa, Homo sapiens
  CDR3 for alpha chain variable domain of TCR clone 168678 (TRAV2, TRAJ40)
CAVVTSGTYKYIF

SEQ ID NO: 337356 - protein, 16 aa, Homo sapiens
  CDR3 for beta chain variable domain of TCR clone 168678 (TRBV7-9, TRBJ1-3)
CARSLGAGSSGNTIYF

SEQ ID NO: 337357 - protein, 14 aa, Homo sapiens
  CDR3 for alpha chain variable domain of TCR clone 168679 (TRAV1-1, TRAJ27)
CAVIYNTNAGKSTF

SEQ ID NO: 337358 - protein, 16 aa, Homo sapiens
  CDR3 for beta chain variable domain of TCR clone 168679 (TRBV4-3, TRBJ2-2)
CASSHLQGSGTGELFF

SEQ ID NO: 337359 - protein, 14 aa, Homo sapiens
  CDR3 for alpha chain variable domain of TCR clone 168680 (TRAV29/DV5, TRAJ44)
CAAFLVGTASKPTF

SEQ ID NO: 337360 - protein, 16 aa, Homo sapiens
  CDR3 for beta chain variable domain of TCR clone 168680 (TRBV19, TRBJ1-5)
CASSIQGGYSNQPQHF

SEQ ID NO: 337361 - protein, 12 aa, Homo sapiens
  CDR3 for alpha chain variable domain of TCR clone 168681 (TRAV35, TRAJ39)
LAPNNAGNMLTF

SEQ ID NO: 337362 - protein, 16 aa, Homo sapiens
  CDR3 for beta chain variable domain of TCR clone 168681 (TRBV19, TRBJ2-2)
RASRSPGTGATGELFF

SEQ ID NO: 337363 - protein, 14 aa, Homo sapiens
  CDR3 for alpha chain variable domain of TCR clone 168682 (TRAV17, TRAJ16)
CATADFSDGQKLLF

SEQ ID NO: 337364 - protein, 11 aa, Homo sapiens
  CDR3 for beta chain variable domain of TCR clone 168682 (TRBV27, TRBJ2-3)
CASSLGDTQYF

SEQ ID NO: 337365 - protein, 13 aa, Homo sapiens
  CDR3 for alpha chain variable domain of TCR clone 168683 (TRAV26-2, TRAJ39)
CIPFNNAGNMLTF

SEQ ID NO: 337366 - protein, 16 aa, Homo sapiens
  CDR3 for beta chain variable domain of TCR clone 168683 (TRBV18, TRBJ2-1)
CASSPYLSIRGDEQFF

SEQ ID NO: 337367 - protein, 19 aa, Homo sapiens
  CDR3 for alpha chain variable domain of TCR clone 168684 (TRAV1-1, TRAJ37)
CLLLLRCERSGSNTGKLIF

SEQ ID NO: 337368 - protein, 15 aa, Homo sapiens
  CDR3 for beta chain variable domain of TCR clone 168684 (TRBV20-1, TRBJ2-7)
CSAESGTSGAYEQYF

SEQ ID NO: 337369 - protein, 14 aa, Homo sapiens
  CDR3 for alpha chain variable domain of TCR clone 168685 (TRAV12-2, TRAJ40)
CAVKIPSVTYKYIF

SEQ ID NO: 337370 - protein, 14 aa, Homo sapiens
  CDR3 for beta chain variable domain of TCR clone 168685 (TRBV7-8, TRBJ2-7)
CASSPRDRVYEQYF

SEQ ID NO: 337371 - protein, 15 aa, Homo sapiens
  CDR3 for alpha chain variable domain of TCR clone 168686 (TRAV14/DV4, TRAJ15)
CAMRGSNQAGTALIF

SEQ ID NO: 337372 - protein, 13 aa, Homo sapiens
  CDR3 for beta chain variable domain of TCR clone 168686 (TRBV7-9, TRBJ1-2)
CASSLKQNYGYTF

SEQ ID NO: 337373 - protein, 19 aa, Homo sapiens
  CDR3 for alpha chain variable domain of TCR clone 168687 (TRAV1-2, TRAJ26)
CLLPLCYERPDNYGQNFVF

SEQ ID NO: 337374 - protein, 14 aa, Homo sapiens
  CDR3 for beta chain variable domain of TCR clone 168687 (TRBV7-2, TRBJ2-7)
CASSPKTSFYEQYF

SEQ ID NO: 337375 - protein, 14 aa, Homo sapiens
  CDR3 for alpha chain variable domain of TCR clone 168688 (TRAV12-1, TRAJ42)
CVVIYGGSQGNLIF

SEQ ID NO: 337376 - protein, 14 aa, Homo sapiens
  CDR3 for beta chain variable domain of TCR clone 168688 (TRBV7-2, TRBJ2-7)
CASSPKTSFYEQYF

SEQ ID NO: 337377 - protein, 14 aa, Homo sapiens
  CDR3 for alpha chain variable domain of TCR clone 168689 (TRAV13-1, TRAJ35)
CAASKGGFGNVLHC

SEQ ID NO: 337378 - protein, 17 aa, Homo sapiens
  CDR3 for beta chain variable domain of TCR clone 168689 (TRBV28, TRBJ1-1)
CASSLSGTGYENTEAFF

SEQ ID NO: 337379 - protein, 14 aa, Homo sapiens
  CDR3 for alpha chain variable domain of TCR clone 168690 (TRAV3, TRAJ9)
CAVRGNNGGFKTIF

SEQ ID NO: 337380 - protein, 14 aa, Homo sapiens
  CDR3 for beta chain variable domain of TCR clone 168690 (TRBV15, TRBJ2-1)
CATGGVEDYNEQFF

SEQ ID NO: 337381 - protein, 15 aa, Homo sapiens
  CDR3 for alpha chain variable domain of TCR clone 168691 (TRAV3, TRAJ22)
CAVRDRGGSARQLTF

SEQ ID NO: 337382 - protein, 14 aa, Homo sapiens
  CDR3 for beta chain variable domain of TCR clone 168691 (TRBV7-9, TRBJ2-1)
CASSLGVADNEQFF

SEQ ID NO: 337383 - protein, 14 aa, Homo sapiens
  CDR3 for alpha chain variable domain of TCR clone 168692 (TRAV12-1, TRAJ42)
CVVIYGGSQGNLIF

SEQ ID NO: 337384 - protein, 16 aa, Homo sapiens
  CDR3 for beta chain variable domain of TCR clone 168692 (TRBV7-3, TRBJ2-2)
CASSLKRGTLSGELFF

SEQ ID NO: 337385 - protein, 12 aa, Homo sapiens
  CDR3 for alpha chain variable domain of TCR clone 168693 (TRAV1-1, TRAJ20)
CAVREDDYKLSF

SEQ ID NO: 337386 - protein, 13 aa, Homo sapiens
  CDR3 for beta chain variable domain of TCR clone 168693 (TRBV12-5, TRBJ2-3)
CASGDRQSDTQYF

SEQ ID NO: 337387 - protein, 13 aa, Homo sapiens
  CDR3 for alpha chain variable domain of TCR clone 168694 (TRAV3, TRAJ30)
CAVRDRGDDKIIL

SEQ ID NO: 337388 - protein, 16 aa, Homo sapiens
  CDR3 for beta chain variable domain of TCR clone 168694 (TRBV7-3, TRBJ2-2)
CAGSLKRGTLSGELFF

SEQ ID NO: 337389 - protein, 12 aa, Homo sapiens
  CDR3 for alpha chain variable domain of TCR clone 168695 (TRAV23/DV6, TRAJ24)
CAANDSWGKLQF

SEQ ID NO: 337390 - protein, 16 aa, Homo sapiens
  CDR3 for beta chain variable domain of TCR clone 168695 (TRBV12-4, TRBJ2-5)
CASSSSTSGGKETQYF

SEQ ID NO: 337391 - protein, 12 aa, Homo sapiens
  CDR3 for alpha chain variable domain of TCR clone 168696 (TRAV12-3, TRAJ17)
CAMTLTGNKLTF

SEQ ID NO: 337392 - protein, 14 aa, Homo sapiens
  CDR3 for beta chain variable domain of TCR clone 168696 (TRBV15, TRBJ2-7)
CATSRVARGYEQYF

SEQ ID NO: 337393 - protein, 13 aa, Homo sapiens
  CDR3 for alpha chain variable domain of TCR clone 168697 (TRAV8-6, TRAJ49)
CAVITNTGNQFYF

SEQ ID NO: 337394 - protein, 12 aa, Homo sapiens
  CDR3 for beta chain variable domain of TCR clone 168697 (TRBV5-7, TRBJ1-1)
CASSLGRGKAFF

SEQ ID NO: 337395 - protein, 13 aa, Homo sapiens
  CDR3 for alpha chain variable domain of TCR clone 168698 (TRAV9-2, TRAJ53)
CALSGGSNYKLTF

SEQ ID NO: 337396 - protein, 18 aa, Homo sapiens
  CDR3 for beta chain variable domain of TCR clone 168698 (TRBV7-3, TRBJ2-3)
CASSSTGTYPGSTDTQYF

SEQ ID NO: 337397 - protein, 14 aa, Homo sapiens
  CDR3 for alpha chain variable domain of TCR clone 168699 (TRAV12-1, TRAJ8)
CVVNSNTGFQKLVF

SEQ ID NO: 337398 - protein, 16 aa, Homo sapiens
  CDR3 for beta chain variable domain of TCR clone 168699 (TRBV19, TRBJ2-2)
CASRSPGTGATGELFF

SEQ ID NO: 337399 - protein, 11 aa, Homo sapiens
  CDR3 for alpha chain variable domain of TCR clone 168700 (TRAV17, TRAJ9)
CATTGGFKTIF

SEQ ID NO: 337400 - protein, 15 aa, Homo sapiens
  CDR3 for beta chain variable domain of TCR clone 168700 (TRBV20-1, TRBJ2-7)
CSAESGTSGAYEQYF

SEQ ID NO: 337401 - protein, 16 aa, Homo sapiens
  CDR3 for alpha chain variable domain of TCR clone 168701 (TRAV36/DV7, TRAJ30)
CAVETYGLDRDDKIVF

SEQ ID NO: 337402 - protein, 15 aa, Homo sapiens
  CDR3 for beta chain variable domain of TCR clone 168701 (TRBV6-6, TRBJ2-5)
CASSYGKIIQETQYF

SEQ ID NO: 337403 - protein, 16 aa, Homo sapiens
  CDR3 for alpha chain variable domain of TCR clone 168702 (TRAV20, TRAJ10)
CAVLRGLTGGGNKLTF

SEQ ID NO: 337404 - protein, 14 aa, Homo sapiens
  CDR3 for beta chain variable domain of TCR clone 168702 (TRBV18, TRBJ2-5)
CASSPGVSQETQYF

SEQ ID NO: 337405 - protein, 13 aa, Homo sapiens
  CDR3 for alpha chain variable domain of TCR clone 168703 (TRAV13-1, TRAJ37)
CAAVSGNTGKLIF

SEQ ID NO: 337406 - protein, 17 aa, Homo sapiens
  CDR3 for beta chain variable domain of TCR clone 168703 (TRBV10-2, TRBJ1-6)
CASSENRGSSYNAHLHF

SEQ ID NO: 337407 - protein, 12 aa, Homo sapiens
  CDR3 for alpha chain variable domain of TCR clone 168704 (TRAV12-3, TRAJ40)
CAMSSGTYKYIF

SEQ ID NO: 337408 - protein, 13 aa, Homo sapiens
  CDR3 for beta chain variable domain of TCR clone 168704 (TRBV7-3, TRBJ1-2)
CASSLKRGYGYTF

SEQ ID NO: 337409 - protein, 14 aa, Homo sapiens
  CDR3 for alpha chain variable domain of TCR clone 168705 (TRAV13-1, TRAJ44)
CAAKAAGTASKLTF

SEQ ID NO: 337410 - protein, 14 aa, Homo sapiens
  CDR3 for beta chain variable domain of TCR clone 168705 (TRBV19, TRBJ2-2)
CASSTLHRSGELFF

SEQ ID NO: 337411 - protein, 11 aa, Homo sapiens
  CDR3 for alpha chain variable domain of TCR clone 168706 (TRAV2, TRAJ33)
CAVASNYQLIW

SEQ ID NO: 337412 - protein, 15 aa, Homo sapiens
  CDR3 for beta chain variable domain of TCR clone 168706 (TRBV19, TRBJ1-1)
CDSTSGQIQNTEAFF

SEQ ID NO: 337413 - protein, 13 aa, Homo sapiens
  CDR3 for alpha chain variable domain of TCR clone 168707 (TRAV8-3, TRAJ48)
WAVVPFGNEKLTF

SEQ ID NO: 337414 - protein, 15 aa, Homo sapiens
  CDR3 for beta chain variable domain of TCR clone 168707 (TRBV11-2, TRBJ2-1)
CASSSPSTRYNEQFF

SEQ ID NO: 337415 - protein, 13 aa, Homo sapiens
  CDR3 for alpha chain variable domain of TCR clone 168708 (TRAV12-1, TRAJ11)
CVVNRAGYSTLTF

SEQ ID NO: 337416 - protein, 14 aa, Homo sapiens
  CDR3 for beta chain variable domain of TCR clone 168708 (TRBV19, TRBJ2-1)
CASPTFVLSGEQFF

SEQ ID NO: 337417 - protein, 12 aa, Homo sapiens
  CDR3 for alpha chain variable domain of TCR clone 168709 (TRAV12-3, TRAJ17)
CAMTLTGNKLPF

SEQ ID NO: 337418 - protein, 12 aa, Homo sapiens
  CDR3 for beta chain variable domain of TCR clone 168709 (TRBV11-2, TRBJ2-7)
CASSLPTYEQYF

SEQ ID NO: 337419 - protein, 14 aa, Homo sapiens
  CDR3 for alpha chain variable domain of TCR clone 168710 (TRAV12-1, TRAJ3)
CVVNPGSSASKIIF

SEQ ID NO: 337420 - protein, 14 aa, Homo sapiens
  CDR3 for beta chain variable domain of TCR clone 168710 (TRBV20-1, TRBJ2-3)
CSARGRTSTDTQYF

SEQ ID NO: 337421 - protein, 12 aa, Homo sapiens
  CDR3 for alpha chain variable domain of TCR clone 168711 (TRAV16, TRAJ56)
CAPTGANSKLTF

SEQ ID NO: 337422 - protein, 16 aa, Homo sapiens
  CDR3 for beta chain variable domain of TCR clone 168711 (TRBV7-9, TRBJ1-2)
CASSLGFSSGEDGYIF

SEQ ID NO: 337423 - protein, 16 aa, Homo sapiens
  CDR3 for alpha chain variable domain of TCR clone 168712 (TRAV26-2, TRAJ48)
CILRPPFDFGNEKLTF

SEQ ID NO: 337424 - protein, 15 aa, Homo sapiens
  CDR3 for beta chain variable domain of TCR clone 168712 (TRBV20-1, TRBJ2-3)
CSARVEGTYTDTQYF

SEQ ID NO: 337425 - protein, 13 aa, Homo sapiens
  CDR3 for alpha chain variable domain of TCR clone 168713 (TRAV3, TRAJ27)
CAVRPLGAGKSTF

SEQ ID NO: 337426 - protein, 15 aa, Homo sapiens
  CDR3 for beta chain variable domain of TCR clone 168713 (TRBV2, TRBJ2-1)
RASSEARSAYNEQFF

SEQ ID NO: 337427 - protein, 17 aa, Homo sapiens
  CDR3 for alpha chain variable domain of TCR clone 168714 (TRAV13-1, TRAJ53)
CAASWKSSGGRNYKLTF

SEQ ID NO: 337428 - protein, 19 aa, Homo sapiens
  CDR3 for beta chain variable domain of TCR clone 168714 (TRBV7-9, TRBJ2-1)
CASSHNRGALLRSYNEQFF

SEQ ID NO: 337429 - protein, 14 aa, Homo sapiens
  CDR3 for alpha chain variable domain of TCR clone 168715 (TRAV12-1, TRAJ13)
CVVIDSGGHRKVTF

SEQ ID NO: 337430 - protein, 17 aa, Homo sapiens
  CDR3 for beta chain variable domain of TCR clone 168715 (TRBV15, TRBJ1-5)
CATSRAPPGTRNQPQHF

SEQ ID NO: 337431 - protein, 13 aa, Homo sapiens
  CDR3 for alpha chain variable domain of TCR clone 168716 (TRAV2, TRAJ40)
CAVVTSGTYKYIF

SEQ ID NO: 337432 - protein, 16 aa, Homo sapiens
  CDR3 for beta chain variable domain of TCR clone 168716 (TRBV6-6, TRBJ2-4)
CASSNAGQGAKNIQYF

SEQ ID NO: 337433 - protein, 13 aa, Homo sapiens
  CDR3 for alpha chain variable domain of TCR clone 168717 (TRAV2, TRAJ15)
CAVASQAGTALIF

SEQ ID NO: 337434 - protein, 13 aa, Homo sapiens
  CDR3 for beta chain variable domain of TCR clone 168717 (TRBV7-2, TRBJ2-4)
CASSREHANIQYF

SEQ ID NO: 337435 - protein, 14 aa, Homo sapiens
  CDR3 for alpha chain variable domain of TCR clone 168718 (TRAV12-2, TRAJ40)
CAVKIPSGTYKYIF

SEQ ID NO: 337436 - protein, 16 aa, Homo sapiens
  CDR3 for beta chain variable domain of TCR clone 168718 (TRBV7-8, TRBJ2-7)
CASSPGTGSTSSTSGR

SEQ ID NO: 337437 - protein, 14 aa, Homo sapiens
  CDR3 for alpha chain variable domain of TCR clone 168719 (TRAV23/DV6, TRAJ36)
CAASRRTGANNLFF

SEQ ID NO: 337438 - protein, 14 aa, Homo sapiens
  CDR3 for beta chain variable domain of TCR clone 168719 (TRBV6-1, TRBJ1-2)
CASSETGASYGYTF

SEQ ID NO: 337439 - protein, 13 aa, Homo sapiens
  CDR3 for alpha chain variable domain of TCR clone 168720 (TRAV13-2, TRAJ13)
CAERPGGYQKVTF

SEQ ID NO: 337440 - protein, 19 aa, Homo sapiens
  CDR3 for beta chain variable domain of TCR clone 168720 (TRBV4-1, TRBJ2-1)
CASSQGPRPGLGSRNEQFF

SEQ ID NO: 337441 - protein, 16 aa, Homo sapiens
  CDR3 for alpha chain variable domain of TCR clone 168721 (TRAV26-1, TRAJ37)
CIVRGDGPGNTGELIF

SEQ ID NO: 337442 - protein, 17 aa, Homo sapiens
  CDR3 for beta chain variable domain of TCR clone 168721 (TRBV4-1, TRBJ2-7)
CASSRDPLGVRGGEQYF

SEQ ID NO: 337443 - protein, 16 aa, Homo sapiens
  CDR3 for alpha chain variable domain of TCR clone 168722 (TRAV30, TRAJ24)
CGTEIVDADSWGKFQF

SEQ ID NO: 337444 - protein, 15 aa, Homo sapiens
  CDR3 for beta chain variable domain of TCR clone 168722 (TRBV12-4, TRBJ1-6)
CASSQSTGKTSPLHF

SEQ ID NO: 337445 - protein, 14 aa, Homo sapiens
  CDR3 for alpha chain variable domain of TCR clone 168723 (TRAV8-3, TRAJ44)
CAVGLTGTASKLTF

SEQ ID NO: 337446 - protein, 12 aa, Homo sapiens
  CDR3 for beta chain variable domain of TCR clone 168723 (TRBV12-4, TRBJ2-7)
CASSLGGYEQYF

SEQ ID NO: 337447 - protein, 10 aa, Homo sapiens
  CDR3 for alpha chain variable domain of TCR clone 168724 (TRAV36/DV7, TRAJ48)
CAVGNEKLTF

SEQ ID NO: 337448 - protein, 15 aa, Homo sapiens
  CDR3 for beta chain variable domain of TCR clone 168724 (TRBV2, TRBJ2-2)
CASSRETVGTGELFF

SEQ ID NO: 337449 - protein, 12 aa, Homo sapiens
  CDR3 for alpha chain variable domain of TCR clone 168725 (TRAV10, TRAJ34)
CVVSGKHRQAHL

SEQ ID NO: 337450 - protein, 14 aa, Homo sapiens
  CDR3 for beta chain variable domain of TCR clone 168725 (TRBV19, TRBJ2-1)
CASPTFVLSGERFF

SEQ ID NO: 337451 - protein, 17 aa, Homo sapiens
  CDR3 for alpha chain variable domain of TCR clone 168726 (TRAV13-1, TRAJ31)
CAPRDRLMFGDGTQLVV

SEQ ID NO: 337452 - protein, 14 aa, Homo sapiens
  CDR3 for beta chain variable domain of TCR clone 168726 (TRBV11-2, TRBJ2-3)
CASSRLARTDTPYF

SEQ ID NO: 337453 - protein, 14 aa, Homo sapiens
  CDR3 for alpha chain variable domain of TCR clone 168727 (TRAV35, TRAJ33)
CAGSSQDSNYQLIW

SEQ ID NO: 337454 - protein, 14 aa, Homo sapiens
  CDR3 for beta chain variable domain of TCR clone 168727 (TRBV20-1, TRBJ2-1)
CSAQIGGSANEQFF

SEQ ID NO: 337455 - protein, 12 aa, Homo sapiens
  CDR3 for alpha chain variable domain of TCR clone 168728 (TRAV21, TRAJ31)
CAVSPARGRLMF

SEQ ID NO: 337456 - protein, 14 aa, Homo sapiens
  CDR3 for beta chain variable domain of TCR clone 168728 (TRBV28, TRBJ2-7)
CASSFLRISYEQYF

SEQ ID NO: 337457 - protein, 18 aa, Homo sapiens
  CDR3 for alpha chain variable domain of TCR clone 168729 (TRAV26-2, TRAJ54)
CILRDVEVGIQGAQKLGF

SEQ ID NO: 337458 - protein, 15 aa, Homo sapiens
  CDR3 for beta chain variable domain of TCR clone 168729 (TRBV20-1, TRBJ2-7)
CSARDRVSGMDEQYF

SEQ ID NO: 337459 - protein, 14 aa, Homo sapiens
  CDR3 for alpha chain variable domain of TCR clone 168730 (TRAV1-2, TRAJ8)
CAVREDTGLQKLVF

SEQ ID NO: 337460 - protein, 13 aa, Homo sapiens
  CDR3 for beta chain variable domain of TCR clone 168730 (TRBV5-1, TRBJ1-2)
CASSIDRPEGYTF

SEQ ID NO: 337461 - protein, 17 aa, Homo sapiens
  CDR3 for alpha chain variable domain of TCR clone 168731 (TRAV26-1, TRAJ37)
CIVRVSTVSSNTGKLIF

SEQ ID NO: 337462 - protein, 14 aa, Homo sapiens
  CDR3 for beta chain variable domain of TCR clone 168731 (TRBV19, TRBJ2-1)
CASPTFVVSGEQFF

SEQ ID NO: 337463 - protein, 19 aa, Homo sapiens
  CDR3 for alpha chain variable domain of TCR clone 168732 (TRAV21, TRAJ45)
CAVEAPRGDQEEVLTDSPF

SEQ ID NO: 337464 - protein, 15 aa, Homo sapiens
  CDR3 for beta chain variable domain of TCR clone 168732 (TRBV7-3, TRBJ2-3)
CASSLQGGHTDTQYF

SEQ ID NO: 337465 - protein, 14 aa, Homo sapiens
  CDR3 for alpha chain variable domain of TCR clone 168733 (TRAV12-2, TRAJ5)
CAVKGDTGRRALTF

SEQ ID NO: 337466 - protein, 15 aa, Homo sapiens
  CDR3 for beta chain variable domain of TCR clone 168733 (TRBV11-2, TRBJ2-2)
CASSSDRVNAGELFF

SEQ ID NO: 337467 - protein, 14 aa, Homo sapiens
  CDR3 for alpha chain variable domain of TCR clone 168734 (TRAV26-1, TRAJ22)
CIVRVYGSARQLTF

SEQ ID NO: 337468 - protein, 17 aa, Homo sapiens
  CDR3 for beta chain variable domain of TCR clone 168734 (TRBV7-3, TRBJ2-3)
CASSPGALAGFGDTQYF

SEQ ID NO: 337469 - protein, 15 aa, Homo sapiens
  CDR3 for alpha chain variable domain of TCR clone 168735 (TRAV2, TRAJ9)
CAVEDRGTGGFKTIF

SEQ ID NO: 337470 - protein, 12 aa, Homo sapiens
  CDR3 for beta chain variable domain of TCR clone 168735 (TRBV12-5, TRBJ2-5)
CASGQGVETQYF

SEQ ID NO: 337471 - protein, 14 aa, Homo sapiens
  CDR3 for alpha chain variable domain of TCR clone 168736 (TRAV12-2, TRAJ5)
CAVNRSTGRRTLTF

SEQ ID NO: 337472 - protein, 15 aa, Homo sapiens
  CDR3 for beta chain variable domain of TCR clone 168736 (TRBV28, TRBJ2-1)
CASRVGRDEYNEQFF

SEQ ID NO: 337473 - protein, 15 aa, Homo sapiens
  CDR3 for alpha chain variable domain of TCR clone 168737 (TRAV21, TRAJ53)
CATLNSGGSNYKLTF

SEQ ID NO: 337474 - protein, 12 aa, Homo sapiens
  CDR3 for beta chain variable domain of TCR clone 168737 (TRBV19, TRBJ1-1)
CASMNRYTEAFF

SEQ ID NO: 337475 - protein, 12 aa, Homo sapiens
  CDR3 for alpha chain variable domain of TCR clone 168738 (TRAV12-3, TRAJ17)
CAMTLTGNKLTF

SEQ ID NO: 337476 - protein, 16 aa, Homo sapiens
  CDR3 for beta chain variable domain of TCR clone 168738 (TRBV13, TRBJ2-2)
CASSPRTGEHAGELFF

SEQ ID NO: 337477 - protein, 13 aa, Homo sapiens
  CDR3 for alpha chain variable domain of TCR clone 168739 (TRAV13-2, TRAJ48)
CAEMDFGNEKLTF

SEQ ID NO: 337478 - protein, 15 aa, Homo sapiens
  CDR3 for beta chain variable domain of TCR clone 168739 (TRBV7-9, TRBJ1-6)
CASTSPGRGNSPLHF

SEQ ID NO: 337479 - protein, 14 aa, Homo sapiens
  CDR3 for alpha chain variable domain of TCR clone 168740 (TRAV12-2, TRAJ24)
CAVTPADSWGKLQF

SEQ ID NO: 337480 - protein, 16 aa, Homo sapiens
  CDR3 for beta chain variable domain of TCR clone 168740 (TRBV13, TRBJ2-2)
CASSPRTGEHTGELFF

SEQ ID NO: 337481 - protein, 14 aa, Homo sapiens
  CDR3 for alpha chain variable domain of TCR clone 168741 (TRAV12-3, TRAJ47)
CAMSVREYGNKLVF

SEQ ID NO: 337482 - protein, 13 aa, Homo sapiens
  CDR3 for beta chain variable domain of TCR clone 168741 (TRBV12-4, TRBJ2-7)
CASSPTETYEQYF

SEQ ID NO: 337483 - protein, 19 aa, Homo sapiens
  CDR3 for alpha chain variable domain of TCR clone 168742 (TRAV1-2, TRAJ26)
CLLPLCCERPDNYGQNFVF

SEQ ID NO: 337484 - protein, 14 aa, Homo sapiens
  CDR3 for beta chain variable domain of TCR clone 168742 (TRBV7-9, TRBJ2-7)
CASSPSGGQNEQYF

SEQ ID NO: 337485 - protein, 18 aa, Homo sapiens
  CDR3 for alpha chain variable domain of TCR clone 168743 (TRAV12-3, TRAJ52)
CAMSRTNSGGTSYGKLTF

SEQ ID NO: 337486 - protein, 14 aa, Homo sapiens
  CDR3 for beta chain variable domain of TCR clone 168743 (TRBV12-4, TRBJ1-1)
CASSLGTGGTEAFF

SEQ ID NO: 337487 - protein, 15 aa, Homo sapiens
  CDR3 for alpha chain variable domain of TCR clone 168744 (TRAV2, TRAJ44)
CAVEAYTGTASKLTF

SEQ ID NO: 337488 - protein, 17 aa, Homo sapiens
  CDR3 for beta chain variable domain of TCR clone 168744 (TRBV12-4, TRBJ2-1)
CASSPGLAGGRIKEQFF

SEQ ID NO: 337489 - protein, 15 aa, Homo sapiens
  CDR3 for alpha chain variable domain of TCR clone 168745 (TRAV25, TRAJ52)
CAGTSGGSSYGKLTF

SEQ ID NO: 337490 - protein, 13 aa, Homo sapiens
  CDR3 for beta chain variable domain of TCR clone 168745 (TRBV6-5, TRBJ2-5)
CASSPQGGETQYF

SEQ ID NO: 337491 - protein, 12 aa, Homo sapiens
  CDR3 for alpha chain variable domain of TCR clone 168746 (TRAV3, TRAJ27)
CAVRDKAGKSTF

SEQ ID NO: 337492 - protein, 14 aa, Homo sapiens
  CDR3 for beta chain variable domain of TCR clone 168746 (TRBV5-1, TRBJ1-2)
CASSADSTNYGYTF

SEQ ID NO: 337493 - protein, 14 aa, Homo sapiens
  CDR3 for alpha chain variable domain of TCR clone 168747 (TRAV39, TRAJ54)
CAVVLIQGAQQLVF

SEQ ID NO: 337494 - protein, 16 aa, Homo sapiens
  CDR3 for beta chain variable domain of TCR clone 168747 (TRBV3-1, TRBJ2-7)
CASSQGATGVAYEQYF

SEQ ID NO: 337495 - protein, 15 aa, Homo sapiens
  CDR3 for alpha chain variable domain of TCR clone 168748 (TRAV3, TRAJ4)
CAVRDGTGCYNKLIF

SEQ ID NO: 337496 - protein, 13 aa, Homo sapiens
  CDR3 for beta chain variable domain of TCR clone 168748 (TRBV12-5, TRBJ1-2)
CASGVRTGNGYTF

SEQ ID NO: 337497 - protein, 10 aa, Homo sapiens
  CDR3 for alpha chain variable domain of TCR clone 168749 (TRAV1-2, TRAJ31)
CAFFDARLMF

SEQ ID NO: 337498 - protein, 13 aa, Homo sapiens
  CDR3 for beta chain variable domain of TCR clone 168749 (TRBV6-5, TRBJ2-5)
CASSPQGGETQYF

SEQ ID NO: 337499 - protein, 16 aa, Homo sapiens
  CDR3 for alpha chain variable domain of TCR clone 168750 (TRAV3, TRAJ3)
CAVRDRAKSSASQIIF

SEQ ID NO: 337500 - protein, 13 aa, Homo sapiens
  CDR3 for beta chain variable domain of TCR clone 168750 (TRBV10-3, TRBJ2-7)
CASKLAVNYEQYF

SEQ ID NO: 337501 - protein, 16 aa, Homo sapiens
  CDR3 for alpha chain variable domain of TCR clone 168751 (TRAV27, TRAJ53)
CAAPEGSGVSNYKLTF

SEQ ID NO: 337502 - protein, 14 aa, Homo sapiens
  CDR3 for beta chain variable domain of TCR clone 168751 (TRBV4-3, TRBJ1-5)
CASSQGGQGWPQHF

SEQ ID NO: 337503 - protein, 11 aa, Homo sapiens
  CDR3 for alpha chain variable domain of TCR clone 168752 (TRAV35, TRAJ34)
CWARNTDKLIF

SEQ ID NO: 337504 - protein, 12 aa, Homo sapiens
  CDR3 for beta chain variable domain of TCR clone 168752 (TRBV11-3, TRBJ2-2)
CASSLGGGELFF

SEQ ID NO: 337505 - protein, 13 aa, Homo sapiens
  CDR3 for alpha chain variable domain of TCR clone 168753 (TRAV17, TRAJ5)
CALRGTGRRALTF

SEQ ID NO: 337506 - protein, 14 aa, Homo sapiens
  CDR3 for beta chain variable domain of TCR clone 168753 (TRBV7-3, TRBJ2-1)
CASSLGTSANEQFF

SEQ ID NO: 337507 - protein, 12 aa, Homo sapiens
  CDR3 for alpha chain variable domain of TCR clone 168754 (TRAV12-3, TRAJ21)
CAMFNNFNKFYF

SEQ ID NO: 337508 - protein, 13 aa, Homo sapiens
  CDR3 for beta chain variable domain of TCR clone 168754 (TRBV29-1, TRBJ2-7)
CSVKRGGNYEQYF

SEQ ID NO: 337509 - protein, 14 aa, Homo sapiens
  CDR3 for alpha chain variable domain of TCR clone 168755 (TRAV3, TRAJ37)
CAVKESGNTGKLIF

SEQ ID NO: 337510 - protein, 16 aa, Homo sapiens
  CDR3 for beta chain variable domain of TCR clone 168755 (TRBV12-5, TRBJ2-5)
CASGPRTSGNQETQYF

SEQ ID NO: 337511 - protein, 17 aa, Homo sapiens
  CDR3 for alpha chain variable domain of TCR clone 168756 (TRAV26-1, TRAJ53)
CIVRVDDSGGSNYKLTF

SEQ ID NO: 337512 - protein, 15 aa, Homo sapiens
  CDR3 for beta chain variable domain of TCR clone 168756 (TRBV4-2, TRBJ2-7)
CASSQVDRSSYEQYF

SEQ ID NO: 337513 - protein, 15 aa, Homo sapiens
  CDR3 for alpha chain variable domain of TCR clone 168757 (TRAV21, TRAJ53)
CATLTSGGSNYKLTF

SEQ ID NO: 337514 - protein, 15 aa, Homo sapiens
  CDR3 for beta chain variable domain of TCR clone 168757 (TRBV20-1, TRBJ2-5)
CSAEGTGGLQETQYF

SEQ ID NO: 337515 - protein, 14 aa, Homo sapiens
  CDR3 for alpha chain variable domain of TCR clone 168758 (TRAV12-3, TRAJ15)
CAMIPPPAGTALIF

SEQ ID NO: 337516 - protein, 14 aa, Homo sapiens
  CDR3 for beta chain variable domain of TCR clone 168758 (TRBV20-1, TRBJ2-2)
CSARKRLATGELFF

SEQ ID NO: 337517 - protein, 10 aa, Homo sapiens
  CDR3 for alpha chain variable domain of TCR clone 168759 (TRAV12-1, TRAJ13)
MIGGYQKVTF

SEQ ID NO: 337518 - protein, 15 aa, Homo sapiens
  CDR3 for beta chain variable domain of TCR clone 168759 (TRBV6-1, TRBJ2-3)
CASSERGGITDTQYF

SEQ ID NO: 337519 - protein, 13 aa, Homo sapiens
  CDR3 for alpha chain variable domain of TCR clone 168760 (TRAV12-3, TRAJ56)
CALATGANSKLTF

SEQ ID NO: 337520 - protein, 12 aa, Homo sapiens
  CDR3 for beta chain variable domain of TCR clone 168760 (TRBV10-2, TRBJ2-3)
CASSPGSDTQYF

SEQ ID NO: 337521 - protein, 14 aa, Homo sapiens
  CDR3 for alpha chain variable domain of TCR clone 168761 (TRAV12-2, TRAJ53)
CAVKRGGSNYKLTF

SEQ ID NO: 337522 - protein, 14 aa, Homo sapiens
  CDR3 for beta chain variable domain of TCR clone 168761 (TRBV7-7, TRBJ2-2)
CATRQDSDTGELFF

SEQ ID NO: 337523 - protein, 18 aa, Homo sapiens
  CDR3 for alpha chain variable domain of TCR clone 168762 (TRAV12-3, TRAJ52)
CAMSVGGAGGTSYGKLTF

SEQ ID NO: 337524 - protein, 15 aa, Homo sapiens
  CDR3 for beta chain variable domain of TCR clone 168762 (TRBV27, TRBJ1-6)
CAGSFDRGLGSPLHL

SEQ ID NO: 337525 - protein, 16 aa, Homo sapiens
  CDR3 for alpha chain variable domain of TCR clone 168763 (TRAV12-2, TRAJ45)
CAVNMYSGGGADGLTF

SEQ ID NO: 337526 - protein, 17 aa, Homo sapiens
  CDR3 for beta chain variable domain of TCR clone 168763 (TRBV11-2, TRBJ2-4)
CASSSVGPGGHRNIQYF

SEQ ID NO: 337527 - protein, 14 aa, Homo sapiens
  CDR3 for alpha chain variable domain of TCR clone 168764 (TRAV17, TRAJ15)
CATAPNQAGTALIF

SEQ ID NO: 337528 - protein, 12 aa, Homo sapiens
  CDR3 for beta chain variable domain of TCR clone 168764 (TRBV28, TRBJ2-1)
CASSFRGNEQFF

SEQ ID NO: 337529 - protein, 11 aa, Homo sapiens
  CDR3 for alpha chain variable domain of TCR clone 168765 (TRAV3, TRAJ21)
CSVGNFNKFYF

SEQ ID NO: 337530 - protein, 14 aa, Homo sapiens
  CDR3 for beta chain variable domain of TCR clone 168765 (TRBV19, TRBJ2-3)
CASSAPRGTDTQYF

SEQ ID NO: 337531 - protein, 13 aa, Homo sapiens
  CDR3 for alpha chain variable domain of TCR clone 168766 (TRAV27, TRAJ49)
CAPRPYTGNQFCF

SEQ ID NO: 337532 - protein, 14 aa, Homo sapiens
  CDR3 for beta chain variable domain of TCR clone 168766 (TRBV25-1, TRBJ1-1)
CASTHLGGNTEAFF

SEQ ID NO: 337533 - protein, 14 aa, Homo sapiens
  CDR3 for alpha chain variable domain of TCR clone 168767 (TRAV17, TRAJ54)
CATDANQGAQKPVF

SEQ ID NO: 337534 - protein, 12 aa, Homo sapiens
  CDR3 for beta chain variable domain of TCR clone 168767 (TRBV7-9, TRBJ2-7)
CASSIKREEQYF

SEQ ID NO: 337535 - protein, 14 aa, Homo sapiens
  CDR3 for alpha chain variable domain of TCR clone 168768 (TRAV12-2, TRAJ9)
CAVNMEGGGFQTIF

SEQ ID NO: 337536 - protein, 14 aa, Homo sapiens
  CDR3 for beta chain variable domain of TCR clone 168768 (TRBV27, TRBJ2-3)
CASRKGGRTDTQYF

SEQ ID NO: 337537 - protein, 19 aa, Homo sapiens
  CDR3 for alpha chain variable domain of TCR clone 168769 (TRAV3, TRAJ37)
CAVRDIVGGYPSNTGKLIF

SEQ ID NO: 337538 - protein, 14 aa, Homo sapiens
  CDR3 for beta chain variable domain of TCR clone 168769 (TRBV7-8, TRBJ2-3)
CASSLEAGTDTLYF

SEQ ID NO: 337539 - protein, 12 aa, Homo sapiens
  CDR3 for alpha chain variable domain of TCR clone 168770 (TRAV13-2, TRAJ16)
CAENMYGQKLLF

SEQ ID NO: 337540 - protein, 15 aa, Homo sapiens
  CDR3 for beta chain variable domain of TCR clone 168770 (TRBV6-3, TRBJ2-7)
CASSFPGTVFYEQYF

SEQ ID NO: 337541 - protein, 14 aa, Homo sapiens
  CDR3 for alpha chain variable domain of TCR clone 168771 (TRAV8-4, TRAJ38)
CARLNAGNNRKLIW

SEQ ID NO: 337542 - protein, 12 aa, Homo sapiens
  CDR3 for beta chain variable domain of TCR clone 168771 (TRBV6-1, TRBJ2-7)
CASSEPLYEQFF

SEQ ID NO: 337543 - protein, 18 aa, Homo sapiens
  CDR3 for alpha chain variable domain of TCR clone 168772 (TRAV12-3, TRAJ52)
CAMSVGGAGGTSYGNLTF

SEQ ID NO: 337544 - protein, 15 aa, Homo sapiens
  CDR3 for beta chain variable domain of TCR clone 168772 (TRBV27, TRBJ1-6)
CASSCDRGLGSPLHF

SEQ ID NO: 337545 - protein, 18 aa, Homo sapiens
  CDR3 for alpha chain variable domain of TCR clone 168773 (TRAV16, TRAJ52)
CALSGVDAGGTSYGKLTF

SEQ ID NO: 337546 - protein, 15 aa, Homo sapiens
  CDR3 for beta chain variable domain of TCR clone 168773 (TRBV5-1, TRBJ2-3)
CASSSTSGSTDTQYF

SEQ ID NO: 337547 - protein, 16 aa, Homo sapiens
  CDR3 for alpha chain variable domain of TCR clone 168774 (TRAV30, TRAJ26)
CGTESVGDNYGKNFVF

SEQ ID NO: 337548 - protein, 13 aa, Homo sapiens
  CDR3 for beta chain variable domain of TCR clone 168774 (TRBV19, TRBJ1-2)
CASSISEDYGYTF

SEQ ID NO: 337549 - protein, 15 aa, Homo sapiens
  CDR3 for alpha chain variable domain of TCR clone 168775 (TRAV8-4, TRAJ45)
CAVIWTGGGADGLTF

SEQ ID NO: 337550 - protein, 14 aa, Homo sapiens
  CDR3 for beta chain variable domain of TCR clone 168775 (TRBV29-1, TRBJ2-7)
CSVGPSGDESTSGR

SEQ ID NO: 337551 - protein, 17 aa, Homo sapiens
  CDR3 for alpha chain variable domain of TCR clone 168776 (TRAV3, TRAJ42)
CAVRDRDYGGSQGNPIF

SEQ ID NO: 337552 - protein, 14 aa, Homo sapiens
  CDR3 for beta chain variable domain of TCR clone 168776 (TRBV12-5, TRBJ2-5)
CASGSRTHQETQYF

SEQ ID NO: 337553 - protein, 21 aa, Homo sapiens
  CDR3 for alpha chain variable domain of TCR clone 168777 (TRAV1-1, TRAJ6)
CLLLLRCERLERTGESYIPTF

SEQ ID NO: 337554 - protein, 13 aa, Homo sapiens
  CDR3 for beta chain variable domain of TCR clone 168777 (TRBV7-3, TRBJ1-1)
CASSQDWGAEAFF

SEQ ID NO: 337555 - protein, 12 aa, Homo sapiens
  CDR3 for alpha chain variable domain of TCR clone 168778 (TRAV26-1, TRAJ43)
CIVRPRGDDMRF

SEQ ID NO: 337556 - protein, 16 aa, Homo sapiens
  CDR3 for beta chain variable domain of TCR clone 168778 (TRBV3-1, TRBJ2-1)
CASSQGGRRSFDVQFF

SEQ ID NO: 337557 - protein, 12 aa, Homo sapiens
  CDR3 for alpha chain variable domain of TCR clone 168779 (TRAV8-4, TRAJ37)
YAVRSNTGKLIF

SEQ ID NO: 337558 - protein, 16 aa, Homo sapiens
  CDR3 for beta chain variable domain of TCR clone 168779 (TRBV7-2, TRBJ2-3)
CASSLVGDASTDTQYF

SEQ ID NO: 337559 - protein, 17 aa, Homo sapiens
  CDR3 for alpha chain variable domain of TCR clone 168780 (TRAV12-2, TRAJ52)
CAVNPYAGGTSYGKLTF

SEQ ID NO: 337560 - protein, 16 aa, Homo sapiens
  CDR3 for beta chain variable domain of TCR clone 168780 (TRBV5-5, TRBJ2-2)
CASSGRREGATGEPFF

SEQ ID NO: 337561 - protein, 12 aa, Homo sapiens
  CDR3 for alpha chain variable domain of TCR clone 168781 (TRAV8-3, TRAJ26)
CAGDNYGQNFVF

SEQ ID NO: 337562 - protein, 13 aa, Homo sapiens
  CDR3 for beta chain variable domain of TCR clone 168781 (TRBV4-2, TRBJ1-1)
CTSSQAGNTEAFF

SEQ ID NO: 337563 - protein, 16 aa, Homo sapiens
  CDR3 for alpha chain variable domain of TCR clone 168782 (TRAV8-6, TRAJ53)
CAVTSNSGGSNYKLTF

SEQ ID NO: 337564 - protein, 17 aa, Homo sapiens
  CDR3 for beta chain variable domain of TCR clone 168782 (TRBV9, TRBJ2-7)
CASSVEDSGVPSYEQYF

SEQ ID NO: 337565 - protein, 15 aa, Homo sapiens
  CDR3 for alpha chain variable domain of TCR clone 168783 (TRAV8-3, TRAJ42)
CAGTNYGGSQGNLIF

SEQ ID NO: 337566 - protein, 20 aa, Homo sapiens
  CDR3 for beta chain variable domain of TCR clone 168783 (TRBV7-8, TRBJ2-2)
CASSHLFPGPTIHITGELFF

SEQ ID NO: 337567 - protein, 14 aa, Homo sapiens
  CDR3 for alpha chain variable domain of TCR clone 168784 (TRAV29/DV5, TRAJ36)
CAARRKTGANNLFF

SEQ ID NO: 337568 - protein, 14 aa, Homo sapiens
  CDR3 for beta chain variable domain of TCR clone 168784 (TRBV12-5, TRBJ2-5)
CASGSRTHQGTQYC

SEQ ID NO: 337569 - protein, 12 aa, Homo sapiens
  CDR3 for alpha chain variable domain of TCR clone 168785 (TRAV12-3, TRAJ17)
CAMTLTGTKLTF

SEQ ID NO: 337570 - protein, 15 aa, Homo sapiens
  CDR3 for beta chain variable domain of TCR clone 168785 (TRBV20-1, TRBJ2-7)
CSARDRVSGMEEQYF

SEQ ID NO: 337571 - protein, 13 aa, Homo sapiens
  CDR3 for alpha chain variable domain of TCR clone 168786 (TRAV3, TRAJ15)
CAVRDQAGTALIF

SEQ ID NO: 337572 - protein, 14 aa, Homo sapiens
  CDR3 for beta chain variable domain of TCR clone 168786 (TRBV19, TRBJ2-1)
CASPTFVLSGEQFF

SEQ ID NO: 337573 - protein, 12 aa, Homo sapiens
  CDR3 for alpha chain variable domain of TCR clone 168787 (TRAV8-4, TRAJ37)
CAVRSNTGKLIF

SEQ ID NO: 337574 - protein, 16 aa, Homo sapiens
  CDR3 for beta chain variable domain of TCR clone 168787 (TRBV7-2, TRBJ2-3)
CASSLVGDASTDTQCF

SEQ ID NO: 337575 - protein, 11 aa, Homo sapiens
  CDR3 for alpha chain variable domain of TCR clone 168788 (TRAV23/DV6, TRAJ48)
CAPRWGEKLTS

SEQ ID NO: 337576 - protein, 13 aa, Homo sapiens
  CDR3 for beta chain variable domain of TCR clone 168788 (TRBV12-4, TRBJ2-5)
CASSPGTEETQYF

SEQ ID NO: 337577 - protein, 12 aa, Homo sapiens
  CDR3 for alpha chain variable domain of TCR clone 168789 (TRAV1-1, TRAJ8)
RAGGTGFQKLVF

SEQ ID NO: 337578 - protein, 13 aa, Homo sapiens
  CDR3 for beta chain variable domain of TCR clone 168789 (TRBV7-9, TRBJ1-2)
CASSSKQNYGYTF

SEQ ID NO: 337579 - protein, 16 aa, Homo sapiens
  CDR3 for alpha chain variable domain of TCR clone 168790 (TRAV30, TRAJ24)
CGTEIVDADSWGKFQF

SEQ ID NO: 337580 - protein, 12 aa, Homo sapiens
  CDR3 for beta chain variable domain of TCR clone 168790 (TRBV11-2, TRBJ2-5)
CSSSTGEETQYF

SEQ ID NO: 337581 - protein, 12 aa, Homo sapiens
  CDR3 for alpha chain variable domain of TCR clone 168791 (TRAV8-6, TRAJ43)
CAVSHNNNDMRF

SEQ ID NO: 337582 - protein, 13 aa, Homo sapiens
  CDR3 for beta chain variable domain of TCR clone 168791 (TRBV7-3, TRBJ1-1)
CASSQEWGAEAFF

SEQ ID NO: 337583 - protein, 16 aa, Homo sapiens
  CDR3 for alpha chain variable domain of TCR clone 168792 (TRAV26-1, TRAJ23)
CIVRVERYNQGGKLIF

SEQ ID NO: 337584 - protein, 16 aa, Homo sapiens
  CDR3 for beta chain variable domain of TCR clone 168792 (TRBV12-4, TRBJ1-5)
CASSRPVGGSNQPQHF

SEQ ID NO: 337585 - protein, 12 aa, Homo sapiens
  CDR3 for alpha chain variable domain of TCR clone 168793 (TRAV12-3, TRAJ20)
CAIVRGDCKLSF

SEQ ID NO: 337586 - protein, 14 aa, Homo sapiens
  CDR3 for beta chain variable domain of TCR clone 168793 (TRBV5-5, TRBJ1-5)
CASSGQGVDQPQHF

SEQ ID NO: 337587 - protein, 17 aa, Homo sapiens
  CDR3 for alpha chain variable domain of TCR clone 168794 (TRAV1-1, TRAJ28)
CAVDPAYSVAGSYQLTF

SEQ ID NO: 337588 - protein, 14 aa, Homo sapiens
  CDR3 for beta chain variable domain of TCR clone 168794 (TRBV19, TRBJ2-1)
CASPTFVLSGKQFF

SEQ ID NO: 337589 - protein, 14 aa, Homo sapiens
  CDR3 for alpha chain variable domain of TCR clone 168795 (TRAV20, TRAJ29)
CAVQAWVGNTPLVF

SEQ ID NO: 337590 - protein, 12 aa, Homo sapiens
  CDR3 for beta chain variable domain of TCR clone 168795 (TRBV14, TRBJ2-7)
CASSRLKGEQYF

SEQ ID NO: 337591 - protein, 14 aa, Homo sapiens
  CDR3 for alpha chain variable domain of TCR clone 168796 (TRAV3, TRAJ8)
GAALMNTGFQKLVF

SEQ ID NO: 337592 - protein, 15 aa, Homo sapiens
  CDR3 for beta chain variable domain of TCR clone 168796 (TRBV28, TRBJ2-5)
CASSLGLGNQETQYF

SEQ ID NO: 337593 - protein, 10 aa, Homo sapiens
  CDR3 for alpha chain variable domain of TCR clone 168797 (TRAV30, TRAJ48)
CGIGNEKLTF

SEQ ID NO: 337594 - protein, 15 aa, Homo sapiens
  CDR3 for beta chain variable domain of TCR clone 168797 (TRBV9, TRBJ1-6)
CANSVAGTGDSPLHF

SEQ ID NO: 337595 - protein, 13 aa, Homo sapiens
  CDR3 for alpha chain variable domain of TCR clone 168798 (TRAV2, TRAJ15)
CAVASQAGTALIF

SEQ ID NO: 337596 - protein, 14 aa, Homo sapiens
  CDR3 for beta chain variable domain of TCR clone 168798 (TRBV5-1, TRBJ1-1)
CASSLELVGTEAFF

SEQ ID NO: 337597 - protein, 14 aa, Homo sapiens
  CDR3 for alpha chain variable domain of TCR clone 168799 (TRAV13-1, TRAJ35)
CAASKGGLGNVLHG

SEQ ID NO: 337598 - protein, 13 aa, Homo sapiens
  CDR3 for beta chain variable domain of TCR clone 168799 (TRBV7-3, TRBJ1-1)
CANSQDWGAEAFF

SEQ ID NO: 337599 - protein, 18 aa, Homo sapiens
  CDR3 for alpha chain variable domain of TCR clone 168800 (TRAV13-1, TRAJ52)
CSAKNPNAGGTIYGKLTF

SEQ ID NO: 337600 - protein, 15 aa, Homo sapiens
  CDR3 for beta chain variable domain of TCR clone 168800 (TRBV2, TRBJ2-2)
CASSRETVGTGELFF

SEQ ID NO: 337601 - protein, 15 aa, Homo sapiens
  CDR3 for alpha chain variable domain of TCR clone 168801 (TRAV12-3, TRAJ6)
CAMSASTGGSYIPTF

SEQ ID NO: 337602 - protein, 12 aa, Homo sapiens
  CDR3 for beta chain variable domain of TCR clone 168801 (TRBV28, TRBJ2-3)
CASSLYRDTQYF

SEQ ID NO: 337603 - protein, 13 aa, Homo sapiens
  CDR3 for alpha chain variable domain of TCR clone 168802 (TRAV8-6, TRAJ54)
CAGEAQGAQKLVF

SEQ ID NO: 337604 - protein, 13 aa, Homo sapiens
  CDR3 for beta chain variable domain of TCR clone 168802 (TRBV6-5, TRBJ2-2)
CASRTVNTGELFF

SEQ ID NO: 337605 - protein, 16 aa, Homo sapiens
  CDR3 for alpha chain variable domain of TCR clone 168803 (TRAV30, TRAJ24)
CGTEIVDADSWGKFQF

SEQ ID NO: 337606 - protein, 15 aa, Homo sapiens
  CDR3 for beta chain variable domain of TCR clone 168803 (TRBV18, TRBJ2-7)
CAISPRSGTAYEQYF

SEQ ID NO: 337607 - protein, 15 aa, Homo sapiens
  CDR3 for alpha chain variable domain of TCR clone 168804 (TRAV26-2, TRAJ57)
CILRDIRGGSEKLVF

SEQ ID NO: 337608 - protein, 15 aa, Homo sapiens
  CDR3 for beta chain variable domain of TCR clone 168804 (TRBV2, TRBJ2-1)
CASDIGLAGEGEKFF

SEQ ID NO: 337609 - protein, 15 aa, Homo sapiens
  CDR3 for alpha chain variable domain of TCR clone 168805 (TRAV3, TRAJ22)
CAVRDRGGSARQLTF

SEQ ID NO: 337610 - protein, 16 aa, Homo sapiens
  CDR3 for beta chain variable domain of TCR clone 168805 (TRBV3-1, TRBJ2-5)
CASSPGQFNGFGTQYF

SEQ ID NO: 337611 - protein, 15 aa, Homo sapiens
  CDR3 for alpha chain variable domain of TCR clone 168806 (TRAV3, TRAJ20)
CAVRDIKWSDYKLSL

SEQ ID NO: 337612 - protein, 15 aa, Homo sapiens
  CDR3 for beta chain variable domain of TCR clone 168806 (TRBV7-9, TRBJ1-6)
CASSSPGRGNSPLHF

SEQ ID NO: 337613 - protein, 14 aa, Homo sapiens
  CDR3 for alpha chain variable domain of TCR clone 168807 (TRAV4, TRAJ10)
CLVGDTGGGNKLTF

SEQ ID NO: 337614 - protein, 13 aa, Homo sapiens
  CDR3 for beta chain variable domain of TCR clone 168807 (TRBV10-2, TRBJ2-5)
CASSIGPQETQYF

SEQ ID NO: 337615 - protein, 15 aa, Homo sapiens
  CDR3 for alpha chain variable domain of TCR clone 168808 (TRAV21, TRAJ10)
CAVPLLTGGGNKLTF

SEQ ID NO: 337616 - protein, 16 aa, Homo sapiens
  CDR3 for beta chain variable domain of TCR clone 168808 (TRBV4-1, TRBJ2-3)
CASSQSTSGAEDTQYF

SEQ ID NO: 337617 - protein, 17 aa, Homo sapiens
  CDR3 for alpha chain variable domain of TCR clone 168809 (TRAV38-2/DV8, TRAJ45)
CAYRSRYSGGGADGLTF

SEQ ID NO: 337618 - protein, 15 aa, Homo sapiens
  CDR3 for beta chain variable domain of TCR clone 168809 (TRBV27, TRBJ2-1)
CASSNGGGSSNEQFF

SEQ ID NO: 337619 - protein, 17 aa, Homo sapiens
  CDR3 for alpha chain variable domain of TCR clone 168810 (TRAV3, TRAJ42)
CAVRDRDYGGSQGNLIF

SEQ ID NO: 337620 - protein, 15 aa, Homo sapiens
  CDR3 for beta chain variable domain of TCR clone 168810 (TRBV6-6, TRBJ2-7)
CASSYSYGGSYEQYY

SEQ ID NO: 337621 - protein, 16 aa, Homo sapiens
  CDR3 for alpha chain variable domain of TCR clone 168811 (TRAV3, TRAJ37)
CAVRGKGSGNTGKLIF

SEQ ID NO: 337622 - protein, 15 aa, Homo sapiens
  CDR3 for beta chain variable domain of TCR clone 168811 (TRBV20-1, TRBJ2-7)
RSARDRVSGMDEQYF

SEQ ID NO: 337623 - protein, 11 aa, Homo sapiens
  CDR3 for alpha chain variable domain of TCR clone 168812 (TRAV4, TRAJ31)
CLVGLNASLMF

SEQ ID NO: 337624 - protein, 16 aa, Homo sapiens
  CDR3 for beta chain variable domain of TCR clone 168812 (TRBV15, TRBJ2-6)
CATSVNGGFLANVLTF

SEQ ID NO: 337625 - protein, 15 aa, Homo sapiens
  CDR3 for alpha chain variable domain of TCR clone 168813 (TRAV23/DV6, TRAJ18)
CAARYRGSTLGRLYF

SEQ ID NO: 337626 - protein, 14 aa, Homo sapiens
  CDR3 for beta chain variable domain of TCR clone 168813 (TRBV7-8, TRBJ2-3)
CASSLEAGTDTQYF

SEQ ID NO: 337627 - protein, 15 aa, Homo sapiens
  CDR3 for alpha chain variable domain of TCR clone 168814 (TRAV2, TRAJ39)
CAVEDRRNAGNMLTF

SEQ ID NO: 337628 - protein, 16 aa, Homo sapiens
  CDR3 for beta chain variable domain of TCR clone 168814 (TRBV7-8, TRBJ2-7)
CASSLASWTSVYEQYF

SEQ ID NO: 337629 - protein, 14 aa, Homo sapiens
  CDR3 for alpha chain variable domain of TCR clone 168815 (TRAV8-2, TRAJ4)
CVVSPSGGYNKLIL

SEQ ID NO: 337630 - protein, 13 aa, Homo sapiens
  CDR3 for beta chain variable domain of TCR clone 168815 (TRBV7-9, TRBJ1-2)
CASSLKQNYGYTF

SEQ ID NO: 337631 - protein, 11 aa, Homo sapiens
  CDR3 for alpha chain variable domain of TCR clone 168816 (TRAV35, TRAJ34)
CWARNTDKLIF

SEQ ID NO: 337632 - protein, 14 aa, Homo sapiens
  CDR3 for beta chain variable domain of TCR clone 168816 (TRBV11-2, TRBJ1-5)
CASSLDRGRQPQHF

SEQ ID NO: 337633 - protein, 17 aa, Homo sapiens
  CDR3 for alpha chain variable domain of TCR clone 168817 (TRAV23/DV6, TRAJ57)
CAASSTLFQGGSAKLVF

SEQ ID NO: 337634 - protein, 14 aa, Homo sapiens
  CDR3 for beta chain variable domain of TCR clone 168817 (TRBV25-1, TRBJ1-1)
CASTHLGGNTEAFF

SEQ ID NO: 337635 - protein, 12 aa, Homo sapiens
  CDR3 for alpha chain variable domain of TCR clone 168818 (TRAV17, TRAJ4)
CATDGGYNKLIF

SEQ ID NO: 337636 - protein, 14 aa, Homo sapiens
  CDR3 for beta chain variable domain of TCR clone 168818 (TRBV11-2, TRBJ2-3)
CASSRLARTDTQYF

SEQ ID NO: 337637 - protein, 16 aa, Homo sapiens
  CDR3 for alpha chain variable domain of TCR clone 168819 (TRAV2, TRAJ23)
CVGGKLIFGQGTELSV

SEQ ID NO: 337638 - protein, 10 aa, Homo sapiens
  CDR3 for beta chain variable domain of TCR clone 168819 (TRBV20-1, TRBJ2-5)
LAGHLETQYF

SEQ ID NO: 337639 - protein, 13 aa, Homo sapiens
  CDR3 for alpha chain variable domain of TCR clone 168820 (TRAV1-1, TRAJ9)
CAAKNTGGFKTIF

SEQ ID NO: 337640 - protein, 12 aa, Homo sapiens
  CDR3 for beta chain variable domain of TCR clone 168820 (TRBV11-2, TRBJ2-1)
CASSPGNNEQFF

SEQ ID NO: 337641 - protein, 11 aa, Homo sapiens
  CDR3 for alpha chain variable domain of TCR clone 168821 (TRAV8-3, TRAJ4)
CAVGARPDFKR

SEQ ID NO: 337642 - protein, 13 aa, Homo sapiens
  CDR3 for beta chain variable domain of TCR clone 168821 (TRBV10-3, TRBJ2-7)
CASKLAVNYEQYF

SEQ ID NO: 337643 - protein, 17 aa, Homo sapiens
  CDR3 for alpha chain variable domain of TCR clone 168822 (TRAV3, TRAJ6)
CAVSDGPRAGGSYIPTL

SEQ ID NO: 337644 - protein, 14 aa, Homo sapiens
  CDR3 for beta chain variable domain of TCR clone 168822 (TRBV7-2, TRBJ2-7)
CASSPKTSFYEQYF

SEQ ID NO: 337645 - protein, 13 aa, Homo sapiens
  CDR3 for alpha chain variable domain of TCR clone 168823 (TRAV2, TRAJ29)
CAEQNSGNTPLVF

SEQ ID NO: 337646 - protein, 15 aa, Homo sapiens
  CDR3 for beta chain variable domain of TCR clone 168823 (TRBV28, TRBJ1-2)
CASSPGNRNGYTLVR

SEQ ID NO: 337647 - protein, 14 aa, Homo sapiens
  CDR3 for alpha chain variable domain of TCR clone 168824 (TRAV1-2, TRAJ16)
CAVNRFSDGQKLLF

SEQ ID NO: 337648 - protein, 19 aa, Homo sapiens
  CDR3 for beta chain variable domain of TCR clone 168824 (TRBV6-1, TRBJ2-5)
CASSEQGLAGGLYQETQYF

SEQ ID NO: 337649 - protein, 12 aa, Homo sapiens
  CDR3 for alpha chain variable domain of TCR clone 168825 (TRAV21, TRAJ49)
CAVRNTGNQFYF

SEQ ID NO: 337650 - protein, 15 aa, Homo sapiens
  CDR3 for beta chain variable domain of TCR clone 168825 (TRBV6-5, TRBJ1-2)
CASSYSQAFNYGYTF

SEQ ID NO: 337651 - protein, 15 aa, Homo sapiens
  CDR3 for alpha chain variable domain of TCR clone 168826 (TRAV38-2/DV8, TRAJ57)
CAYGRVFGKGTKLTV

SEQ ID NO: 337652 - protein, 18 aa, Homo sapiens
  CDR3 for beta chain variable domain of TCR clone 168826 (TRBV18, TRBJ1-1)
CASSLPVAPQGAGTEAFF

SEQ ID NO: 337653 - protein, 11 aa, Homo sapiens
  CDR3 for alpha chain variable domain of TCR clone 168827 (TRAV8-4, TRAJ52)
AGGTSYGKLTF

SEQ ID NO: 337654 - protein, 13 aa, Homo sapiens
  CDR3 for beta chain variable domain of TCR clone 168827 (TRBV4-1, TRBJ2-2)
CASSQENTGELFF

SEQ ID NO: 337655 - protein, 16 aa, Homo sapiens
  CDR3 for alpha chain variable domain of TCR clone 168828 (TRAV38-1, TRAJ37)
CAFKGDGSSNTGKLIF

SEQ ID NO: 337656 - protein, 13 aa, Homo sapiens
  CDR3 for beta chain variable domain of TCR clone 168828 (TRBV12-4, TRBJ2-5)
CASSLFMRETQYF

SEQ ID NO: 337657 - protein, 13 aa, Homo sapiens
  CDR3 for alpha chain variable domain of TCR clone 168829 (TRAV12-1, TRAJ9)
CVVLNTGGLKTIF

SEQ ID NO: 337658 - protein, 13 aa, Homo sapiens
  CDR3 for beta chain variable domain of TCR clone 168829 (TRBV20-1, TRBJ1-1)
CSARSGGNTEAFF

SEQ ID NO: 337659 - protein, 13 aa, Homo sapiens
  CDR3 for alpha chain variable domain of TCR clone 168830 (TRAV35, TRAJ22)
FAGLSGSASQLTF

SEQ ID NO: 337660 - protein, 16 aa, Homo sapiens
  CDR3 for beta chain variable domain of TCR clone 168830 (TRBV7-9, TRBJ2-1)
CASSLVLTGQGNEQFF

SEQ ID NO: 337661 - protein, 10 aa, Homo sapiens
  CDR3 for alpha chain variable domain of TCR clone 168831 (TRAV8-4, TRAJ30)
VFYRDDKIIF

SEQ ID NO: 337662 - protein, 16 aa, Homo sapiens
  CDR3 for beta chain variable domain of TCR clone 168831 (TRBV20-1, TRBJ1-5)
CSAELTGQQTNQPQHF

SEQ ID NO: 337663 - protein, 18 aa, Homo sapiens
  CDR3 for alpha chain variable domain of TCR clone 168832 (TRAV12-1, TRAJ52)
CVVKLINAGGTSYGKLTF

SEQ ID NO: 337664 - protein, 16 aa, Homo sapiens
  CDR3 for beta chain variable domain of TCR clone 168832 (TRBV7-6, TRBJ2-7)
CASSGGTGALSYEQFF

SEQ ID NO: 337665 - protein, 15 aa, Homo sapiens
  CDR3 for alpha chain variable domain of TCR clone 168833 (TRAV23/DV6, TRAJ18)
CAARYRGSTLGRLYF

SEQ ID NO: 337666 - protein, 14 aa, Homo sapiens
  CDR3 for beta chain variable domain of TCR clone 168833 (TRBV7-9, TRBJ2-1)
CASSLASGSNEQFF

SEQ ID NO: 337667 - protein, 13 aa, Homo sapiens
  CDR3 for alpha chain variable domain of TCR clone 168834 (TRAV16, TRAJ5)
CALTNTGRRALTF

SEQ ID NO: 337668 - protein, 15 aa, Homo sapiens
  CDR3 for beta chain variable domain of TCR clone 168834 (TRBV11-2, TRBJ2-4)
CASSHPGTGINIQYF

SEQ ID NO: 337669 - protein, 14 aa, Homo sapiens
  CDR3 for alpha chain variable domain of TCR clone 168835 (TRAV12-3, TRAJ10)
SHLPLTGGGNKLTF

SEQ ID NO: 337670 - protein, 14 aa, Homo sapiens
  CDR3 for beta chain variable domain of TCR clone 168835 (TRBV13, TRBJ2-5)
CASYRRLAEETQYF

SEQ ID NO: 337671 - protein, 14 aa, Homo sapiens
  CDR3 for alpha chain variable domain of TCR clone 168836 (TRAV16, TRAJ39)
CALSKNNAGNMLTF

SEQ ID NO: 337672 - protein, 13 aa, Homo sapiens
  CDR3 for beta chain variable domain of TCR clone 168836 (TRBV4-1, TRBJ2-1)
CASSQEVQYEQFF

SEQ ID NO: 337673 - protein, 12 aa, Homo sapiens
  CDR3 for alpha chain variable domain of TCR clone 168837 (TRAV35, TRAJ39)
LALNNAGNMLTF

SEQ ID NO: 337674 - protein, 15 aa, Homo sapiens
  CDR3 for beta chain variable domain of TCR clone 168837 (TRBV7-3, TRBJ2-1)
CASSQRGGALIEQFF

SEQ ID NO: 337675 - protein, 13 aa, Homo sapiens
  CDR3 for alpha chain variable domain of TCR clone 168838 (TRAV12-2, TRAJ52)
CAVSGTSYGKLTF

SEQ ID NO: 337676 - protein, 13 aa, Homo sapiens
  CDR3 for beta chain variable domain of TCR clone 168838 (TRBV19, TRBJ2-7)
CASSIDRTYEQYF

SEQ ID NO: 337677 - protein, 14 aa, Homo sapiens
  CDR3 for alpha chain variable domain of TCR clone 168839 (TRAV38-1, TRAJ45)
CAYYSGGGADGLPF

SEQ ID NO: 337678 - protein, 15 aa, Homo sapiens
  CDR3 for beta chain variable domain of TCR clone 168839 (TRBV11-2, TRBJ2-1)
CASSKNRGLIYEQFF

SEQ ID NO: 337679 - protein, 13 aa, Homo sapiens
  CDR3 for alpha chain variable domain of TCR clone 168840 (TRAV2, TRAJ29)
CAAGNSGNTPLVF

SEQ ID NO: 337680 - protein, 16 aa, Homo sapiens
  CDR3 for beta chain variable domain of TCR clone 168840 (TRBV7-9, TRBJ1-2)
CASIPGGGAINYGYTF

SEQ ID NO: 337681 - protein, 12 aa, Homo sapiens
  CDR3 for alpha chain variable domain of TCR clone 168841 (TRAV21, TRAJ31)
CAVSPARGRLMF

SEQ ID NO: 337682 - protein, 14 aa, Homo sapiens
  CDR3 for beta chain variable domain of TCR clone 168841 (TRBV28, TRBJ2-7)
CASSLLRISHEQYF

SEQ ID NO: 337683 - protein, 14 aa, Homo sapiens
  CDR3 for alpha chain variable domain of TCR clone 168842 (TRAV1-2, TRAJ16)
CAVNRFSDGEKLLF

SEQ ID NO: 337684 - protein, 14 aa, Homo sapiens
  CDR3 for beta chain variable domain of TCR clone 168842 (TRBV7-2, TRBJ2-7)
CASSPKTSFYEQYF

SEQ ID NO: 337685 - protein, 14 aa, Homo sapiens
  CDR3 for alpha chain variable domain of TCR clone 168843 (TRAV8-3, TRAJ4)
CAVGAAGGYNKLIF

SEQ ID NO: 337686 - protein, 14 aa, Homo sapiens
  CDR3 for beta chain variable domain of TCR clone 168843 (TRBV7-9, TRBJ2-1)
CASSPRDSLYEQFF

SEQ ID NO: 337687 - protein, 13 aa, Homo sapiens
  CDR3 for alpha chain variable domain of TCR clone 168844 (TRAV27, TRAJ17)
CAGAATAGNKLTF

SEQ ID NO: 337688 - protein, 14 aa, Homo sapiens
  CDR3 for beta chain variable domain of TCR clone 168844 (TRBV5-1, TRBJ2-5)
CASSFWGAQETQYF

SEQ ID NO: 337689 - protein, 15 aa, Homo sapiens
  CDR3 for alpha chain variable domain of TCR clone 168845 (TRAV26-1, TRAJ29)
CIVRVEGSGNTPLVF

SEQ ID NO: 337690 - protein, 15 aa, Homo sapiens
  CDR3 for beta chain variable domain of TCR clone 168845 (TRBV7-9, TRBJ1-5)
CASSQSHQPQQPQHF

SEQ ID NO: 337691 - protein, 15 aa, Homo sapiens
  CDR3 for alpha chain variable domain of TCR clone 168846 (TRAV29/DV5, TRAJ53)
CAASASGGSNYKLTF

SEQ ID NO: 337692 - protein, 14 aa, Homo sapiens
  CDR3 for beta chain variable domain of TCR clone 168846 (TRBV28, TRBJ1-5)
CASSRTGLNQPQHF

SEQ ID NO: 337693 - protein, 14 aa, Homo sapiens
  CDR3 for alpha chain variable domain of TCR clone 168847 (TRAV4, TRAJ6)
CLVGEAGGSYIPPF

SEQ ID NO: 337694 - protein, 13 aa, Homo sapiens
  CDR3 for beta chain variable domain of TCR clone 168847 (TRBV7-3, TRBJ1-1)
CASSQDWGAEAFF

SEQ ID NO: 337695 - protein, 14 aa, Homo sapiens
  CDR3 for alpha chain variable domain of TCR clone 168848 (TRAV23/DV6, TRAJ23)
CAAGPYNQGGKLIF

SEQ ID NO: 337696 - protein, 13 aa, Homo sapiens
  CDR3 for beta chain variable domain of TCR clone 168848 (TRBV20-1, TRBJ2-2)
CSALSGGAGELFF

SEQ ID NO: 337697 - protein, 13 aa, Homo sapiens
  CDR3 for alpha chain variable domain of TCR clone 168849 (TRAV23/DV6, TRAJ47)
CAAIIRNGIWKQT

SEQ ID NO: 337698 - protein, 13 aa, Homo sapiens
  CDR3 for beta chain variable domain of TCR clone 168849 (TRBV19, TRBJ1-2)
CASSQGQVYGYTF

SEQ ID NO: 337699 - protein, 14 aa, Homo sapiens
  CDR3 for alpha chain variable domain of TCR clone 168850 (TRAV1-2, TRAJ16)
CAVNRFSDGQKLLF

SEQ ID NO: 337700 - protein, 12 aa, Homo sapiens
  CDR3 for beta chain variable domain of TCR clone 168850 (TRBV11-2, TRBJ2-1)
CASSHGNNEQFF

SEQ ID NO: 337701 - protein, 15 aa, Homo sapiens
  CDR3 for alpha chain variable domain of TCR clone 168851 (TRAV8-3, TRAJ45)
GSSSYSGGGADGLTF

SEQ ID NO: 337702 - protein, 13 aa, Homo sapiens
  CDR3 for beta chain variable domain of TCR clone 168851 (TRBV10-3, TRBJ2-7)
CASKLAVNYEQYF

SEQ ID NO: 337703 - protein, 16 aa, Homo sapiens
  CDR3 for alpha chain variable domain of TCR clone 168852 (TRAV3, TRAJ37)
CAVRPHGSGNTGKLIF

SEQ ID NO: 337704 - protein, 15 aa, Homo sapiens
  CDR3 for beta chain variable domain of TCR clone 168852 (TRBV28, TRBJ2-1)
CASSIIAGGRSEQFF

SEQ ID NO: 337705 - protein, 14 aa, Homo sapiens
  CDR3 for alpha chain variable domain of TCR clone 168853 (TRAV2, TRAJ9)
CAVEDRSGGFKTIF

SEQ ID NO: 337706 - protein, 16 aa, Homo sapiens
  CDR3 for beta chain variable domain of TCR clone 168853 (TRBV4-1, TRBJ2-1)
CASSQARQGWINEQFF

SEQ ID NO: 337707 - protein, 15 aa, Homo sapiens
  CDR3 for alpha chain variable domain of TCR clone 168854 (TRAV13-1, TRAJ16)
CAARYQMARSCSLQG

SEQ ID NO: 337708 - protein, 13 aa, Homo sapiens
  CDR3 for beta chain variable domain of TCR clone 168854 (TRBV4-1, TRBJ2-1)
CASSQAGGDEQLF

SEQ ID NO: 337709 - protein, 11 aa, Homo sapiens
  CDR3 for alpha chain variable domain of TCR clone 168855 (TRAV12-1, TRAJ40)
CVYSGTYKYIF

SEQ ID NO: 337710 - protein, 18 aa, Homo sapiens
  CDR3 for beta chain variable domain of TCR clone 168855 (TRBV12-4, TRBJ2-2)
CASSLVAGTRGRTGELFF

SEQ ID NO: 337711 - protein, 13 aa, Homo sapiens
  CDR3 for alpha chain variable domain of TCR clone 168856 (TRAV12-2, TRAJ15)
CPHTGQAGTALIF

SEQ ID NO: 337712 - protein, 11 aa, Homo sapiens
  CDR3 for beta chain variable domain of TCR clone 168856 (TRBV7-8, TRBJ2-7)
CASSPSLEQYF

SEQ ID NO: 337713 - protein, 11 aa, Homo sapiens
  CDR3 for alpha chain variable domain of TCR clone 168857 (TRAV17, TRAJ31)
CATSNNARLMF

SEQ ID NO: 337714 - protein, 14 aa, Homo sapiens
  CDR3 for beta chain variable domain of TCR clone 168857 (TRBV20-1, TRBJ2-1)
CSAQIGGSANEQFF

SEQ ID NO: 337715 - protein, 12 aa, Homo sapiens
  CDR3 for alpha chain variable domain of TCR clone 168858 (TRAV3, TRAJ20)
CAVIDPDSKLSF

SEQ ID NO: 337716 - protein, 13 aa, Homo sapiens
  CDR3 for beta chain variable domain of TCR clone 168858 (TRBV9, TRBJ2-1)
CASSVGQGGEQFF

SEQ ID NO: 337717 - protein, 11 aa, Homo sapiens
  CDR3 for alpha chain variable domain of TCR clone 168859 (TRAV1-2, TRAJ20)
CAVANDYKLSF

SEQ ID NO: 337718 - protein, 15 aa, Homo sapiens
  CDR3 for beta chain variable domain of TCR clone 168859 (TRBV19, TRBJ2-1)
CASSIVRGEGREQFF

SEQ ID NO: 337719 - protein, 15 aa, Homo sapiens
  CDR3 for alpha chain variable domain of TCR clone 168860 (TRAV23/DV6, TRAJ18)
CAARYRGSTLGRPHF

SEQ ID NO: 337720 - protein, 13 aa, Homo sapiens
  CDR3 for beta chain variable domain of TCR clone 168860 (TRBV7-2, TRBJ2-7)
CASSSPSGSEQYF

SEQ ID NO: 337721 - protein, 12 aa, Homo sapiens
  CDR3 for alpha chain variable domain of TCR clone 168861 (TRAV13-1, TRAJ27)
CAAHTNAGKSTF

SEQ ID NO: 337722 - protein, 14 aa, Homo sapiens
  CDR3 for beta chain variable domain of TCR clone 168861 (TRBV12-5, TRBJ2-5)
CASGSRTHQEAQYV

SEQ ID NO: 337723 - protein, 13 aa, Homo sapiens
  CDR3 for alpha chain variable domain of TCR clone 168862 (TRAV38-1, TRAJ42)
CARWGGSQGNLIY

SEQ ID NO: 337724 - protein, 14 aa, Homo sapiens
  CDR3 for beta chain variable domain of TCR clone 168862 (TRBV12-4, TRBJ2-1)
CASSLGQGASEQFF

SEQ ID NO: 337725 - protein, 13 aa, Homo sapiens
  CDR3 for alpha chain variable domain of TCR clone 168863 (TRAV36/DV7, TRAJ49)
CAGDSNTGNQFYF

SEQ ID NO: 337726 - protein, 15 aa, Homo sapiens
  CDR3 for beta chain variable domain of TCR clone 168863 (TRBV19, TRBJ1-1)
CASTSGQIQNTEAFF

SEQ ID NO: 337727 - protein, 18 aa, Homo sapiens
  CDR3 for alpha chain variable domain of TCR clone 168864 (TRAV12-3, TRAJ52)
CAMSVVGAGGTSYGKLTF

SEQ ID NO: 337728 - protein, 14 aa, Homo sapiens
  CDR3 for beta chain variable domain of TCR clone 168864 (TRBV7-2, TRBJ2-7)
CASRSQGAAYEQYF

SEQ ID NO: 337729 - protein, 18 aa, Homo sapiens
  CDR3 for alpha chain variable domain of TCR clone 168865 (TRAV13-1, TRAJ52)
CAASKRSAGGTSYGKLTF

SEQ ID NO: 337730 - protein, 17 aa, Homo sapiens
  CDR3 for beta chain variable domain of TCR clone 168865 (TRBV18, TRBJ2-3)
CASSPFGDGGFTDTQYF

SEQ ID NO: 337731 - protein, 14 aa, Homo sapiens
  CDR3 for alpha chain variable domain of TCR clone 168866 (TRAV12-3, TRAJ10)
GHLPLTGGGNKLTF

SEQ ID NO: 337732 - protein, 15 aa, Homo sapiens
  CDR3 for beta chain variable domain of TCR clone 168866 (TRBV10-2, TRBJ2-6)
CASSEQGTGANVLTF

SEQ ID NO: 337733 - protein, 12 aa, Homo sapiens
  CDR3 for alpha chain variable domain of TCR clone 168867 (TRAV35, TRAJ58)
GAVKKPVARLTF

SEQ ID NO: 337734 - protein, 11 aa, Homo sapiens
  CDR3 for beta chain variable domain of TCR clone 168867 (TRBV11-2, TRBJ1-1)
CASSINTEAFF

SEQ ID NO: 337735 - protein, 15 aa, Homo sapiens
  CDR3 for alpha chain variable domain of TCR clone 168868 (TRAV3, TRAJ17)
CAVRDTGAAGNKLTF

SEQ ID NO: 337736 - protein, 14 aa, Homo sapiens
  CDR3 for beta chain variable domain of TCR clone 168868 (TRBV6-3, TRBJ1-1)
CASSNLLPGAEAFL

SEQ ID NO: 337737 - protein, 14 aa, Homo sapiens
  CDR3 for alpha chain variable domain of TCR clone 168869 (TRAV12-1, TRAJ24)
CVVRSTDSCGKFQF

SEQ ID NO: 337738 - protein, 13 aa, Homo sapiens
  CDR3 for beta chain variable domain of TCR clone 168869 (TRBV20-1, TRBJ1-1)
CSAGTVGNTEAFF

SEQ ID NO: 337739 - protein, 14 aa, Homo sapiens
  CDR3 for alpha chain variable domain of TCR clone 168870 (TRAV8-4, TRAJ54)
CAVSEVLGAQKLVF

SEQ ID NO: 337740 - protein, 16 aa, Homo sapiens
  CDR3 for beta chain variable domain of TCR clone 168870 (TRBV28, TRBJ1-4)
CASSPPYRGRSEKLFF

SEQ ID NO: 337741 - protein, 16 aa, Homo sapiens
  CDR3 for alpha chain variable domain of TCR clone 168871 (TRAV8-4, TRAJ16)
CAVSPVGRWPEAALRT

SEQ ID NO: 337742 - protein, 15 aa, Homo sapiens
  CDR3 for beta chain variable domain of TCR clone 168871 (TRBV11-3, TRBJ2-7)
CASSPGPASSYEQYF

SEQ ID NO: 337743 - protein, 16 aa, Homo sapiens
  CDR3 for alpha chain variable domain of TCR clone 168872 (TRAV3, TRAJ37)
CAVRGKGSGNTGKLIF

SEQ ID NO: 337744 - protein, 15 aa, Homo sapiens
  CDR3 for beta chain variable domain of TCR clone 168872 (TRBV7-2, TRBJ2-3)
CASSSTGLETDTQYF

SEQ ID NO: 337745 - protein, 15 aa, Homo sapiens
  CDR3 for alpha chain variable domain of TCR clone 168873 (TRAV8-4, TRAJ36)
CAVRKSWTGANNLFF

SEQ ID NO: 337746 - protein, 17 aa, Homo sapiens
  CDR3 for beta chain variable domain of TCR clone 168873 (TRBV3-1, TRBJ2-2)
CASSQDSQGPNTGELFV

SEQ ID NO: 337747 - protein, 11 aa, Homo sapiens
  CDR3 for alpha chain variable domain of TCR clone 168874 (TRAV1-2, TRAJ20)
CAVSNDYKLSF

SEQ ID NO: 337748 - protein, 13 aa, Homo sapiens
  CDR3 for beta chain variable domain of TCR clone 168874 (TRBV7-9, TRBJ1-2)
CACSLKQNYGYTY

SEQ ID NO: 337749 - protein, 17 aa, Homo sapiens
  CDR3 for alpha chain variable domain of TCR clone 168875 (TRAV3, TRAJ42)
CAVRDRDYGGSQGNLIF

SEQ ID NO: 337750 - protein, 18 aa, Homo sapiens
  CDR3 for beta chain variable domain of TCR clone 168875 (TRBV20-1, TRBJ2-3)
CSASGLAGGAGTTDTQYF

SEQ ID NO: 337751 - protein, 16 aa, Homo sapiens
  CDR3 for alpha chain variable domain of TCR clone 168876 (TRAV21, TRAJ37)
CAVRPRGPSNTGKLIF

SEQ ID NO: 337752 - protein, 14 aa, Homo sapiens
  CDR3 for beta chain variable domain of TCR clone 168876 (TRBV25-1, TRBJ1-1)
CASTHLGGNTEAFF

SEQ ID NO: 337753 - protein, 14 aa, Homo sapiens
  CDR3 for alpha chain variable domain of TCR clone 168877 (TRAV12-2, TRAJ13)
CAVKKTGGYQKVTF

SEQ ID NO: 337754 - protein, 14 aa, Homo sapiens
  CDR3 for beta chain variable domain of TCR clone 168877 (TRBV3-1, TRBJ2-5)
CACSQGPDQETQYF

SEQ ID NO: 337755 - protein, 14 aa, Homo sapiens
  CDR3 for alpha chain variable domain of TCR clone 168878 (TRAV12-2, TRAJ13)
CAVKKTGGYHKVTF

SEQ ID NO: 337756 - protein, 14 aa, Homo sapiens
  CDR3 for beta chain variable domain of TCR clone 168878 (TRBV12-5, TRBJ2-5)
CASGSRTHQETQYF

SEQ ID NO: 337757 - protein, 17 aa, Homo sapiens
  CDR3 for alpha chain variable domain of TCR clone 168879 (TRAV12-1, TRAJ42)
CVVMRMNYGGSQGNLIF

SEQ ID NO: 337758 - protein, 13 aa, Homo sapiens
  CDR3 for beta chain variable domain of TCR clone 168879 (TRBV7-2, TRBJ1-1)
CASGLARPAEAFF

SEQ ID NO: 337759 - protein, 12 aa, Homo sapiens
  CDR3 for alpha chain variable domain of TCR clone 168880 (TRAV17, TRAJ39)
CATGAAGNMLTF

SEQ ID NO: 337760 - protein, 12 aa, Homo sapiens
  CDR3 for beta chain variable domain of TCR clone 168880 (TRBV12-4, TRBJ2-7)
CASSLGGYEQYF

SEQ ID NO: 337761 - protein, 14 aa, Homo sapiens
  CDR3 for alpha chain variable domain of TCR clone 168881 (TRAV1-2, TRAJ8)
CAVREDTGFQRLVF

SEQ ID NO: 337762 - protein, 12 aa, Homo sapiens
  CDR3 for beta chain variable domain of TCR clone 168881 (TRBV7-8, TRBJ2-7)
CASSLGDREQYF

SEQ ID NO: 337763 - protein, 16 aa, Homo sapiens
  CDR3 for alpha chain variable domain of TCR clone 168882 (TRAV30, TRAJ24)
CGTEVVDADSWGKFQF

SEQ ID NO: 337764 - protein, 13 aa, Homo sapiens
  CDR3 for beta chain variable domain of TCR clone 168882 (TRBV7-9, TRBJ1-2)
CASSVKQNYGYTF

SEQ ID NO: 337765 - protein, 15 aa, Homo sapiens
  CDR3 for alpha chain variable domain of TCR clone 168883 (TRAV13-1, TRAJ40)
CAASKGASGTYKYIF

SEQ ID NO: 337766 - protein, 15 aa, Homo sapiens
  CDR3 for beta chain variable domain of TCR clone 168883 (TRBV9, TRBJ1-6)
CASSVAGTGDSPLHF

SEQ ID NO: 337767 - protein, 16 aa, Homo sapiens
  CDR3 for alpha chain variable domain of TCR clone 168884 (TRAV3, TRAJ32)
CAVRDMGGGVTTKLIF

SEQ ID NO: 337768 - protein, 11 aa, Homo sapiens
  CDR3 for beta chain variable domain of TCR clone 168884 (TRBV12-4, TRBJ2-1)
CASSRLNEQFF

SEQ ID NO: 337769 - protein, 16 aa, Homo sapiens
  CDR3 for alpha chain variable domain of TCR clone 168885 (TRAV27, TRAJ13)
CAGAKSDSGGYQKVTF

SEQ ID NO: 337770 - protein, 16 aa, Homo sapiens
  CDR3 for beta chain variable domain of TCR clone 168885 (TRBV4-1, TRBJ2-1)
CASSQEAGQGSDEQFF

SEQ ID NO: 337771 - protein, 10 aa, Homo sapiens
  CDR3 for alpha chain variable domain of TCR clone 168886 (TRAV6, TRAJ36)
PLCTANNLFF

SEQ ID NO: 337772 - protein, 16 aa, Homo sapiens
  CDR3 for beta chain variable domain of TCR clone 168886 (TRBV10-2, TRBJ1-5)
CASSSTGRNHPSILVM

SEQ ID NO: 337773 - protein, 13 aa, Homo sapiens
  CDR3 for alpha chain variable domain of TCR clone 168887 (TRAV27, TRAJ27)
CAGPDTNAGKSTF

SEQ ID NO: 337774 - protein, 15 aa, Homo sapiens
  CDR3 for beta chain variable domain of TCR clone 168887 (TRBV10-3, TRBJ2-3)
CAISLTSGGTDTQYF

SEQ ID NO: 337775 - protein, 14 aa, Homo sapiens
  CDR3 for alpha chain variable domain of TCR clone 168888 (TRAV3, TRAJ27)
CAVRDDTNAGKSTF

SEQ ID NO: 337776 - protein, 14 aa, Homo sapiens
  CDR3 for beta chain variable domain of TCR clone 168888 (TRBV20-1, TRBJ2-7)
CSAKTGTGGYEQYF

SEQ ID NO: 337777 - protein, 15 aa, Homo sapiens
  CDR3 for alpha chain variable domain of TCR clone 168889 (TRAV1-2, TRAJ9)
CAVRDDGTGGFKTIF

SEQ ID NO: 337778 - protein, 16 aa, Homo sapiens
  CDR3 for beta chain variable domain of TCR clone 168889 (TRBV7-2, TRBJ1-6)
CASSAFESSYNSPLHF

SEQ ID NO: 337779 - protein, 16 aa, Homo sapiens
  CDR3 for alpha chain variable domain of TCR clone 168890 (TRAV12-3, TRAJ56)
CAMSPGHTGANSKLTF

SEQ ID NO: 337780 - protein, 12 aa, Homo sapiens
  CDR3 for beta chain variable domain of TCR clone 168890 (TRBV11-2, TRBJ2-1)
CASSPGNNEQSF

SEQ ID NO: 337781 - protein, 14 aa, Homo sapiens
  CDR3 for alpha chain variable domain of TCR clone 168891 (TRAV2, TRAJ9)
CAVEDRSEGFKTIF

SEQ ID NO: 337782 - protein, 15 aa, Homo sapiens
  CDR3 for beta chain variable domain of TCR clone 168891 (TRBV20-1, TRBJ2-7)
CSARDRVSGMDEQYF

SEQ ID NO: 337783 - protein, 11 aa, Homo sapiens
  CDR3 for alpha chain variable domain of TCR clone 168892 (TRAV21, TRAJ48)
CAVDGNEKLTF

SEQ ID NO: 337784 - protein, 16 aa, Homo sapiens
  CDR3 for beta chain variable domain of TCR clone 168892 (TRBV19, TRBJ2-1)
CASSSKGTRSYNEQLF

SEQ ID NO: 337785 - protein, 14 aa, Homo sapiens
  CDR3 for alpha chain variable domain of TCR clone 168893 (TRAV26-1, TRAJ45)
CIEVTGGGADGLTF

SEQ ID NO: 337786 - protein, 12 aa, Homo sapiens
  CDR3 for beta chain variable domain of TCR clone 168893 (TRBV29-1, TRBJ2-3)
CSVTGGADTQYF

SEQ ID NO: 337787 - protein, 12 aa, Homo sapiens
  CDR3 for alpha chain variable domain of TCR clone 168894 (TRAV27, TRAJ33)
CAGDGSNYQLIW

SEQ ID NO: 337788 - protein, 13 aa, Homo sapiens
  CDR3 for beta chain variable domain of TCR clone 168894 (TRBV24-1, TRBJ2-2)
CATSDWSTGELFF

SEQ ID NO: 337789 - protein, 23 aa, Homo sapiens
  CDR3 for alpha chain variable domain of TCR clone 168895 (TRAV26-1, )
CIADNAVNNHIQNPDPAVYQLRD

SEQ ID NO: 337790 - protein, 12 aa, Homo sapiens
  CDR3 for beta chain variable domain of TCR clone 168895 (TRBV11-2, TRBJ2-2)
CASSLGGGELFF

SEQ ID NO: 337791 - protein, 12 aa, Homo sapiens
  CDR3 for alpha chain variable domain of TCR clone 168896 (TRAV12-1, TRAJ40)
CVFYSGTYIYIF

SEQ ID NO: 337792 - protein, 12 aa, Homo sapiens
  CDR3 for beta chain variable domain of TCR clone 168896 (TRBV7-3, TRBJ2-1)
CASSFINNEQFF

SEQ ID NO: 337793 - protein, 14 aa, Homo sapiens
  CDR3 for alpha chain variable domain of TCR clone 168897 (TRAV8-4, TRAJ9)
CAVMINTGGFKTIF

SEQ ID NO: 337794 - protein, 15 aa, Homo sapiens
  CDR3 for beta chain variable domain of TCR clone 168897 (TRBV10-2, TRBJ2-6)
CASSEQGTGANVLTF

SEQ ID NO: 337795 - protein, 11 aa, Homo sapiens
  CDR3 for alpha chain variable domain of TCR clone 168898 (TRAV1-2, TRAJ31)
CAVNNNARLMF

SEQ ID NO: 337796 - protein, 16 aa, Homo sapiens
  CDR3 for beta chain variable domain of TCR clone 168898 (TRBV4-2, TRBJ2-1)
CASSQGEGRTVNEQFF

SEQ ID NO: 337797 - protein, 14 aa, Homo sapiens
  CDR3 for alpha chain variable domain of TCR clone 168899 (TRAV12-2, TRAJ40)
CAVKIPSGSYKYIF

SEQ ID NO: 337798 - protein, 15 aa, Homo sapiens
  CDR3 for beta chain variable domain of TCR clone 168899 (TRBV2, TRBJ2-7)
CASSEGIARSYEQYF

SEQ ID NO: 337799 - protein, 14 aa, Homo sapiens
  CDR3 for alpha chain variable domain of TCR clone 168900 (TRAV35, TRAJ33)
CAGSSQDSDYQLIW

SEQ ID NO: 337800 - protein, 15 aa, Homo sapiens
  CDR3 for beta chain variable domain of TCR clone 168900 (TRBV29-1, TRBJ2-7)
CSVEFFDRGSYEQYF

SEQ ID NO: 337801 - protein, 14 aa, Homo sapiens
  CDR3 for alpha chain variable domain of TCR clone 168901 (TRAV3, TRAJ20)
CAVRPSVTTTSLAL

SEQ ID NO: 337802 - protein, 15 aa, Homo sapiens
  CDR3 for beta chain variable domain of TCR clone 168901 (TRBV19, TRBJ2-6)
CASVRRDSGANVLTF

SEQ ID NO: 337803 - protein, 14 aa, Homo sapiens
  CDR3 for alpha chain variable domain of TCR clone 168902 (TRAV35, TRAJ33)
CAGSSQDSNYQLIW

SEQ ID NO: 337804 - protein, 15 aa, Homo sapiens
  CDR3 for beta chain variable domain of TCR clone 168902 (TRBV20-1, TRBJ2-7)
CSAESGASGAYEHYF

SEQ ID NO: 337805 - protein, 16 aa, Homo sapiens
  CDR3 for alpha chain variable domain of TCR clone 168903 (TRAV30, TRAJ24)
CGTEIVDADSWGKFHF

SEQ ID NO: 337806 - protein, 15 aa, Homo sapiens
  CDR3 for beta chain variable domain of TCR clone 168903 (TRBV5-1, TRBJ1-1)
CASSSTTGTNTEAFF

SEQ ID NO: 337807 - protein, 15 aa, Homo sapiens
  CDR3 for alpha chain variable domain of TCR clone 168904 (TRAV26-1, TRAJ39)
CIVRVARNAGNMLTF

SEQ ID NO: 337808 - protein, 12 aa, Homo sapiens
  CDR3 for beta chain variable domain of TCR clone 168904 (TRBV28, TRBJ2-6)
CAIQAGANVLTF

SEQ ID NO: 337809 - protein, 13 aa, Homo sapiens
  CDR3 for alpha chain variable domain of TCR clone 168905 (TRAV3, TRAJ27)
CAVRPLVAGKSTF

SEQ ID NO: 337810 - protein, 14 aa, Homo sapiens
  CDR3 for beta chain variable domain of TCR clone 168905 (TRBV11-2, TRBJ1-2)
CASSLGTANYGYTF

SEQ ID NO: 337811 - protein, 15 aa, Homo sapiens
  CDR3 for alpha chain variable domain of TCR clone 168906 (TRAV2, TRAJ15)
CAVEDRGQAGTALIF

SEQ ID NO: 337812 - protein, 13 aa, Homo sapiens
  CDR3 for beta chain variable domain of TCR clone 168906 (TRBV5-7, TRBJ2-6)
CASTSSGANVLTF

SEQ ID NO: 337813 - protein, 10 aa, Homo sapiens
  CDR3 for alpha chain variable domain of TCR clone 168907 (TRAV1-2, TRAJ34)
SAVNTDKLIF

SEQ ID NO: 337814 - protein, 18 aa, Homo sapiens
  CDR3 for beta chain variable domain of TCR clone 168907 (TRBV7-9, TRBJ2-7)
CASSLTTSGSRTWYEQYF

SEQ ID NO: 337815 - protein, 18 aa, Homo sapiens
  CDR3 for alpha chain variable domain of TCR clone 168908 (TRAV12-3, TRAJ52)
CAMSVGGAGGTSYGQLTF

SEQ ID NO: 337816 - protein, 14 aa, Homo sapiens
  CDR3 for beta chain variable domain of TCR clone 168908 (TRBV7-2, TRBJ2-7)
CASRSQGAAYEQYV

SEQ ID NO: 337817 - protein, 16 aa, Homo sapiens
  CDR3 for alpha chain variable domain of TCR clone 168909 (TRAV38-2/DV8, TRAJ33)
CAYRTGLFDSNYQLIW

SEQ ID NO: 337818 - protein, 14 aa, Homo sapiens
  CDR3 for beta chain variable domain of TCR clone 168909 (TRBV12-4, TRBJ1-1)
CASSLGTGGTEAFF

SEQ ID NO: 337819 - protein, 14 aa, Homo sapiens
  CDR3 for alpha chain variable domain of TCR clone 168910 (TRAV12-3, TRAJ10)
SHLPLTGGGNKLTF

SEQ ID NO: 337820 - protein, 15 aa, Homo sapiens
  CDR3 for beta chain variable domain of TCR clone 168910 (TRBV6-1, TRBJ2-6)
CASSSRHSGANVLTF

SEQ ID NO: 337821 - protein, 14 aa, Homo sapiens
  CDR3 for alpha chain variable domain of TCR clone 168911 (TRAV13-1, TRAJ44)
CAAKATGTASKLTF

SEQ ID NO: 337822 - protein, 15 aa, Homo sapiens
  CDR3 for beta chain variable domain of TCR clone 168911 (TRBV15, TRBJ2-1)
CATSRADRGHNEQFF

SEQ ID NO: 337823 - protein, 12 aa, Homo sapiens
  CDR3 for alpha chain variable domain of TCR clone 168912 (TRAV36/DV7, TRAJ40)
CAVGTGTYKYIF

SEQ ID NO: 337824 - protein, 15 aa, Homo sapiens
  CDR3 for beta chain variable domain of TCR clone 168912 (TRBV11-2, TRBJ1-2)
CASSLGGVQRNGYTF

SEQ ID NO: 337825 - protein, 11 aa, Homo sapiens
  CDR3 for alpha chain variable domain of TCR clone 168913 (TRAV12-3, TRAJ27)
CAMANVGKSTF

SEQ ID NO: 337826 - protein, 15 aa, Homo sapiens
  CDR3 for beta chain variable domain of TCR clone 168913 (TRBV6-3, TRBJ2-7)
CASSSPGTVFYEQYL

SEQ ID NO: 337827 - protein, 17 aa, Homo sapiens
  CDR3 for alpha chain variable domain of TCR clone 168914 (TRAV3, TRAJ6)
CAVRDGPRAGGSYIPTF

SEQ ID NO: 337828 - protein, 14 aa, Homo sapiens
  CDR3 for beta chain variable domain of TCR clone 168914 (TRBV27, TRBJ2-1)
CASRHLGGGKEQFF

SEQ ID NO: 337829 - protein, 14 aa, Homo sapiens
  CDR3 for alpha chain variable domain of TCR clone 168915 (TRAV12-1, TRAJ12)
CEVTRMDSSYKLIF

SEQ ID NO: 337830 - protein, 14 aa, Homo sapiens
  CDR3 for beta chain variable domain of TCR clone 168915 (TRBV7-2, TRBJ2-2)
CASSLGQNTGELFF

SEQ ID NO: 337831 - protein, 15 aa, Homo sapiens
  CDR3 for alpha chain variable domain of TCR clone 168916 (TRAV4, TRAJ39)
CLVGPNNNAGNMLTF

SEQ ID NO: 337832 - protein, 13 aa, Homo sapiens
  CDR3 for beta chain variable domain of TCR clone 168916 (TRBV4-1, TRBJ1-1)
CASSRKMNTEAFF

SEQ ID NO: 337833 - protein, 14 aa, Homo sapiens
  CDR3 for alpha chain variable domain of TCR clone 168917 (TRAV35, TRAJ42)
CAGRYGGSQGSLIF

SEQ ID NO: 337834 - protein, 14 aa, Homo sapiens
  CDR3 for beta chain variable domain of TCR clone 168917 (TRBV19, TRBJ2-1)
CASPTFVLSGEQFF

SEQ ID NO: 337835 - protein, 13 aa, Homo sapiens
  CDR3 for alpha chain variable domain of TCR clone 168918 (TRAV13-1, TRAJ49)
CATMLYTGNQLYF

SEQ ID NO: 337836 - protein, 15 aa, Homo sapiens
  CDR3 for beta chain variable domain of TCR clone 168918 (TRBV12-4, TRBJ1-5)
CASTRGSGFGQPQHF

SEQ ID NO: 337837 - protein, 14 aa, Homo sapiens
  CDR3 for alpha chain variable domain of TCR clone 168919 (TRAV12-1, TRAJ29)
CVVNEGSGNTPLVF

SEQ ID NO: 337838 - protein, 13 aa, Homo sapiens
  CDR3 for beta chain variable domain of TCR clone 168919 (TRBV7-8, TRBJ2-1)
CASSLMAYNEQFF

SEQ ID NO: 337839 - protein, 11 aa, Homo sapiens
  CDR3 for alpha chain variable domain of TCR clone 168920 (TRAV13-1, TRAJ15)
CAATPGTALIF

SEQ ID NO: 337840 - protein, 14 aa, Homo sapiens
  CDR3 for beta chain variable domain of TCR clone 168920 (TRBV6-3, TRBJ1-1)
CASSYQRRDTEAFF

SEQ ID NO: 337841 - protein, 14 aa, Homo sapiens
  CDR3 for alpha chain variable domain of TCR clone 168921 (TRAV12-1, TRAJ4)
CVVSLKSGYNKLIF

SEQ ID NO: 337842 - protein, 13 aa, Homo sapiens
  CDR3 for beta chain variable domain of TCR clone 168921 (TRBV27, TRBJ2-7)
CASGRGGAYEQYF

SEQ ID NO: 337843 - protein, 16 aa, Homo sapiens
  CDR3 for alpha chain variable domain of TCR clone 168922 (TRAV16, TRAJ52)
CALSAAGGTSYGKLTF

SEQ ID NO: 337844 - protein, 12 aa, Homo sapiens
  CDR3 for beta chain variable domain of TCR clone 168922 (TRBV12-4, TRBJ1-3)
CASSFSENTMYF

SEQ ID NO: 337845 - protein, 14 aa, Homo sapiens
  CDR3 for alpha chain variable domain of TCR clone 168923 (TRAV12-2, TRAJ13)
CAVKKNGGYQKVTF

SEQ ID NO: 337846 - protein, 12 aa, Homo sapiens
  CDR3 for beta chain variable domain of TCR clone 168923 (TRBV11-2, TRBJ2-2)
CASSLGGGELFF

SEQ ID NO: 337847 - protein, 15 aa, Homo sapiens
  CDR3 for alpha chain variable domain of TCR clone 168924 (TRAV9-2, TRAJ56)
CALSDVDGANSKLTF

SEQ ID NO: 337848 - protein, 11 aa, Homo sapiens
  CDR3 for beta chain variable domain of TCR clone 168924 (TRBV29-1, TRBJ2-5)
CSEDRTGTQYF

SEQ ID NO: 337849 - protein, 14 aa, Homo sapiens
  CDR3 for alpha chain variable domain of TCR clone 168925 (TRAV8-4, TRAJ17)
CAVSDQAAGNKLTS

SEQ ID NO: 337850 - protein, 15 aa, Homo sapiens
  CDR3 for beta chain variable domain of TCR clone 168925 (TRBV7-2, TRBJ1-2)
CASSLAPDRGLGYTF

SEQ ID NO: 337851 - protein, 12 aa, Homo sapiens
  CDR3 for alpha chain variable domain of TCR clone 168926 (TRAV12-1, TRAJ27)
CVVNTNAGKSTF

SEQ ID NO: 337852 - protein, 20 aa, Homo sapiens
  CDR3 for beta chain variable domain of TCR clone 168926 (TRBV28, TRBJ2-1)
CASTPIGRSPGLAGGNEQFF

SEQ ID NO: 337853 - protein, 11 aa, Homo sapiens
  CDR3 for alpha chain variable domain of TCR clone 168927 (TRAV2, TRAJ13)
CASGVYQKVTF

SEQ ID NO: 337854 - protein, 15 aa, Homo sapiens
  CDR3 for beta chain variable domain of TCR clone 168927 (TRBV6-3, TRBJ2-3)
RLIHYSVGQADTQYF

SEQ ID NO: 337855 - protein, 14 aa, Homo sapiens
  CDR3 for alpha chain variable domain of TCR clone 168928 (TRAV26-1, TRAJ26)
CIVRATFLGQNFVF

SEQ ID NO: 337856 - protein, 16 aa, Homo sapiens
  CDR3 for beta chain variable domain of TCR clone 168928 (TRBV19, TRBJ2-1)
CASSKAGPSSYNEQFF

SEQ ID NO: 337857 - protein, 15 aa, Homo sapiens
  CDR3 for alpha chain variable domain of TCR clone 168929 (TRAV12-3, TRAJ49)
CAMAVTPNTGNQFYF

SEQ ID NO: 337858 - protein, 18 aa, Homo sapiens
  CDR3 for beta chain variable domain of TCR clone 168929 (TRBV4-1, TRBJ1-5)
CASSQDPRGQGLNPPQHF

SEQ ID NO: 337859 - protein, 14 aa, Homo sapiens
  CDR3 for alpha chain variable domain of TCR clone 168930 (TRAV13-2, TRAJ41)
CAEYLSNSGYALNF

SEQ ID NO: 337860 - protein, 15 aa, Homo sapiens
  CDR3 for beta chain variable domain of TCR clone 168930 (TRBV16, TRBJ1-5)
CASSQSGTADQPQHF

SEQ ID NO: 337861 - protein, 14 aa, Homo sapiens
  CDR3 for alpha chain variable domain of TCR clone 168931 (TRAV1-2, TRAJ16)
CAVNRFSDGQKLLF

SEQ ID NO: 337862 - protein, 15 aa, Homo sapiens
  CDR3 for beta chain variable domain of TCR clone 168931 (TRBV9, TRBJ1-6)
SASSVAGTGDSPLHF

SEQ ID NO: 337863 - protein, 14 aa, Homo sapiens
  CDR3 for alpha chain variable domain of TCR clone 168932 (TRAV12-2, TRAJ44)
CAVNPAGTASKLTF

SEQ ID NO: 337864 - protein, 13 aa, Homo sapiens
  CDR3 for beta chain variable domain of TCR clone 168932 (TRBV7-8, TRBJ2-7)
CASSLTGGREQYF

SEQ ID NO: 337865 - protein, 14 aa, Homo sapiens
  CDR3 for alpha chain variable domain of TCR clone 168933 (TRAV12-3, TRAJ10)
SHLPLTGGGNKLTF

SEQ ID NO: 337866 - protein, 15 aa, Homo sapiens
  CDR3 for beta chain variable domain of TCR clone 168933 (TRBV10-3, TRBJ1-3)
CAISDSQGAGNTIYC

SEQ ID NO: 337867 - protein, 15 aa, Homo sapiens
  CDR3 for alpha chain variable domain of TCR clone 168934 (TRAV13-1, TRAJ32)
CAASIYGGATKKLIF

SEQ ID NO: 337868 - protein, 14 aa, Homo sapiens
  CDR3 for beta chain variable domain of TCR clone 168934 (TRBV7-9, TRBJ2-1)
CASSLASGSNEQFF

SEQ ID NO: 337869 - protein, 18 aa, Homo sapiens
  CDR3 for alpha chain variable domain of TCR clone 168935 (TRAV12-3, TRAJ52)
CAMSRTNAGGTSYGKLTF

SEQ ID NO: 337870 - protein, 12 aa, Homo sapiens
  CDR3 for beta chain variable domain of TCR clone 168935 (TRBV24-1, TRBJ1-1)
CATLYPDTEAFF

SEQ ID NO: 337871 - protein, 15 aa, Homo sapiens
  CDR3 for alpha chain variable domain of TCR clone 168936 (TRAV8-4, TRAJ7)
CAVSGGNYGNNRLAF

SEQ ID NO: 337872 - protein, 14 aa, Homo sapiens
  CDR3 for beta chain variable domain of TCR clone 168936 (TRBV28, TRBJ2-3)
CASSFVSGTDTQYF

SEQ ID NO: 337873 - protein, 22 aa, Homo sapiens
  CDR3 for alpha chain variable domain of TCR clone 168937 (TRAV34, TRAJ52)
STSVEQTRRSNAGGTSYGELTF

SEQ ID NO: 337874 - protein, 15 aa, Homo sapiens
  CDR3 for beta chain variable domain of TCR clone 168937 (TRBV5-1, TRBJ2-7)
CASSLNGGPAREQYF

SEQ ID NO: 337875 - protein, 13 aa, Homo sapiens
  CDR3 for alpha chain variable domain of TCR clone 168938 (TRAV2, TRAJ23)
CAVMGNQGGKLIF

SEQ ID NO: 337876 - protein, 13 aa, Homo sapiens
  CDR3 for beta chain variable domain of TCR clone 168938 (TRBV7-7, TRBJ1-1)
CASSLGANTEAFF

SEQ ID NO: 337877 - protein, 15 aa, Homo sapiens
  CDR3 for alpha chain variable domain of TCR clone 168939 (TRAV21, TRAJ53)
CATLHSGGSNSKLTF

SEQ ID NO: 337878 - protein, 16 aa, Homo sapiens
  CDR3 for beta chain variable domain of TCR clone 168939 (TRBV9, TRBJ2-1)
CASSVGGGGNYNEQFF

SEQ ID NO: 337879 - protein, 15 aa, Homo sapiens
  CDR3 for alpha chain variable domain of TCR clone 168940 (TRAV3, TRAJ22)
CAVRDRGGFARQLPF

SEQ ID NO: 337880 - protein, 16 aa, Homo sapiens
  CDR3 for beta chain variable domain of TCR clone 168940 (TRBV5-4, TRBJ2-3)
CASQQPGAGGADTQYF

SEQ ID NO: 337881 - protein, 14 aa, Homo sapiens
  CDR3 for alpha chain variable domain of TCR clone 168941 (TRAV12-2, TRAJ9)
CAVNLNTGGFKTIF

SEQ ID NO: 337882 - protein, 12 aa, Homo sapiens
  CDR3 for beta chain variable domain of TCR clone 168941 (TRBV7-8, TRBJ2-7)
CASSLGDREQYF

SEQ ID NO: 337883 - protein, 12 aa, Homo sapiens
  CDR3 for alpha chain variable domain of TCR clone 168942 (TRAV12-3, TRAJ4)
CAMTGAGTRLAV

SEQ ID NO: 337884 - protein, 15 aa, Homo sapiens
  CDR3 for beta chain variable domain of TCR clone 168942 (TRBV10-2, TRBJ2-6)
CASSEQGAGANVLTF

SEQ ID NO: 337885 - protein, 10 aa, Homo sapiens
  CDR3 for alpha chain variable domain of TCR clone 168943 (TRAV12-3, TRAJ49)
CAMNDNQFYF

SEQ ID NO: 337886 - protein, 13 aa, Homo sapiens
  CDR3 for beta chain variable domain of TCR clone 168943 (TRBV12-4, TRBJ1-1)
CASSAGTGFEAFF

SEQ ID NO: 337887 - protein, 21 aa, Homo sapiens
  CDR3 for alpha chain variable domain of TCR clone 168944 (TRAV3, TRAJ27)
CAVRPLGAGKSTSGDGNTLTV

SEQ ID NO: 337888 - protein, 13 aa, Homo sapiens
  CDR3 for beta chain variable domain of TCR clone 168944 (TRBV7-9, TRBJ2-3)
CASSPGSTDTQYF

SEQ ID NO: 337889 - protein, 13 aa, Homo sapiens
  CDR3 for alpha chain variable domain of TCR clone 168945 (TRAV29/DV5, TRAJ31)
CAASRNNNARLMI

SEQ ID NO: 337890 - protein, 14 aa, Homo sapiens
  CDR3 for beta chain variable domain of TCR clone 168945 (TRBV7-9, TRBJ2-2)
CASSLVQDTGELFF

SEQ ID NO: 337891 - protein, 12 aa, Homo sapiens
  CDR3 for alpha chain variable domain of TCR clone 168946 (TRAV10, TRAJ31)
CVVRMNNARLMF

SEQ ID NO: 337892 - protein, 15 aa, Homo sapiens
  CDR3 for beta chain variable domain of TCR clone 168946 (TRBV5-1, TRBJ2-1)
CASSPPRAPYNEQFF

SEQ ID NO: 337893 - protein, 16 aa, Homo sapiens
  CDR3 for alpha chain variable domain of TCR clone 168947 (TRAV25, TRAJ52)
CAPANAGGTSYGKLTF

SEQ ID NO: 337894 - protein, 16 aa, Homo sapiens
  CDR3 for beta chain variable domain of TCR clone 168947 (TRBV19, TRBJ2-7)
CASSIVVGGGSYEQYF

SEQ ID NO: 337895 - protein, 14 aa, Homo sapiens
  CDR3 for alpha chain variable domain of TCR clone 168948 (TRAV12-2, TRAJ40)
CAVKIPSGTYKYIF

SEQ ID NO: 337896 - protein, 15 aa, Homo sapiens
  CDR3 for beta chain variable domain of TCR clone 168948 (TRBV12-4, TRBJ2-1)
CASSLLATGNNEQFF

SEQ ID NO: 337897 - protein, 13 aa, Homo sapiens
  CDR3 for alpha chain variable domain of TCR clone 168949 (TRAV1-2, TRAJ9)
CAALNTGGFKTIF

SEQ ID NO: 337898 - protein, 15 aa, Homo sapiens
  CDR3 for beta chain variable domain of TCR clone 168949 (TRBV27, TRBJ2-5)
CASSLIPSGGETQYF

SEQ ID NO: 337899 - protein, 15 aa, Homo sapiens
  CDR3 for alpha chain variable domain of TCR clone 168950 (TRAV17, TRAJ4)
CATGTWSGGYNKLIF

SEQ ID NO: 337900 - protein, 15 aa, Homo sapiens
  CDR3 for beta chain variable domain of TCR clone 168950 (TRBV11-3, TRBJ2-7)
CASSPGPASSYEQYF

SEQ ID NO: 337901 - protein, 17 aa, Homo sapiens
  CDR3 for alpha chain variable domain of TCR clone 168951 (TRAV16, TRAJ53)
CALILIDSGGSNYKLTF

SEQ ID NO: 337902 - protein, 16 aa, Homo sapiens
  CDR3 for beta chain variable domain of TCR clone 168951 (TRBV7-8, TRBJ1-5)
CASSARRRTGSQPQHF

SEQ ID NO: 337903 - protein, 15 aa, Homo sapiens
  CDR3 for alpha chain variable domain of TCR clone 168952 (TRAV38-1, TRAJ37)
CAFIFGSGNTGKLIF

SEQ ID NO: 337904 - protein, 13 aa, Homo sapiens
  CDR3 for beta chain variable domain of TCR clone 168952 (TRBV19, TRBJ1-2)
CVSSVPGQDGHTF

SEQ ID NO: 337905 - protein, 12 aa, Homo sapiens
  CDR3 for alpha chain variable domain of TCR clone 168953 (TRAV35, TRAJ39)
LAPNNTGNMLTF

SEQ ID NO: 337906 - protein, 14 aa, Homo sapiens
  CDR3 for beta chain variable domain of TCR clone 168953 (TRBV10-2, TRBJ1-5)
CASSSTGKNQPQHF

SEQ ID NO: 337907 - protein, 15 aa, Homo sapiens
  CDR3 for alpha chain variable domain of TCR clone 168954 (TRAV13-1, TRAJ44)
CAASRGGGTASKLTF

SEQ ID NO: 337908 - protein, 16 aa, Homo sapiens
  CDR3 for beta chain variable domain of TCR clone 168954 (TRBV29-1, TRBJ2-7)
CSVDVVGTSGSYEQYF

SEQ ID NO: 337909 - protein, 14 aa, Homo sapiens
  CDR3 for alpha chain variable domain of TCR clone 168955 (TRAV1-2, TRAJ8)
CAVREDTGFQILVF

SEQ ID NO: 337910 - protein, 16 aa, Homo sapiens
  CDR3 for beta chain variable domain of TCR clone 168955 (TRBV7-2, TRBJ2-5)
CASSLAVSGRGETQYF

SEQ ID NO: 337911 - protein, 18 aa, Homo sapiens
  CDR3 for alpha chain variable domain of TCR clone 168956 (TRAV26-1, TRAJ56)
CIVRFASRVTGANSKLTF

SEQ ID NO: 337912 - protein, 15 aa, Homo sapiens
  CDR3 for beta chain variable domain of TCR clone 168956 (TRBV7-9, TRBJ2-5)
CASSDTGRGRETQYF

SEQ ID NO: 337913 - protein, 14 aa, Homo sapiens
  CDR3 for alpha chain variable domain of TCR clone 168957 (TRAV13-2, TRAJ17)
CAENSKAAGNKLTF

SEQ ID NO: 337914 - protein, 18 aa, Homo sapiens
  CDR3 for beta chain variable domain of TCR clone 168957 (TRBV18, TRBJ1-3)
CASSPRGGAGPSGNTIYF

SEQ ID NO: 337915 - protein, 12 aa, Homo sapiens
  CDR3 for alpha chain variable domain of TCR clone 168958 (TRAV8-3, TRAJ20)
CAVGANDYKLSF

SEQ ID NO: 337916 - protein, 12 aa, Homo sapiens
  CDR3 for beta chain variable domain of TCR clone 168958 (TRBV7-8, TRBJ2-7)
CASSLAGYEQYF

SEQ ID NO: 337917 - protein, 14 aa, Homo sapiens
  CDR3 for alpha chain variable domain of TCR clone 168959 (TRAV17, TRAJ56)
CATVPAGANSKLTF

SEQ ID NO: 337918 - protein, 12 aa, Homo sapiens
  CDR3 for beta chain variable domain of TCR clone 168959 (TRBV12-4, TRBJ2-2)
CQEYYRVRGAVF

SEQ ID NO: 337919 - protein, 13 aa, Homo sapiens
  CDR3 for alpha chain variable domain of TCR clone 168960 (TRAV36/DV7, TRAJ7)
CAVERYGNNRLAF

SEQ ID NO: 337920 - protein, 12 aa, Homo sapiens
  CDR3 for beta chain variable domain of TCR clone 168960 (TRBV12-4, TRBJ1-3)
CASSFSGNTIYF

SEQ ID NO: 337921 - protein, 14 aa, Homo sapiens
  CDR3 for alpha chain variable domain of TCR clone 168961 (TRAV12-1, TRAJ12)
CVVTRMDSSYKLIF

SEQ ID NO: 337922 - protein, 14 aa, Homo sapiens
  CDR3 for beta chain variable domain of TCR clone 168961 (TRBV4-1, TRBJ2-7)
CASSPGAGGDEQYF

SEQ ID NO: 337923 - protein, 13 aa, Homo sapiens
  CDR3 for alpha chain variable domain of TCR clone 168962 (TRAV21, TRAJ32)
CAVSGGATNKLIF

SEQ ID NO: 337924 - protein, 12 aa, Homo sapiens
  CDR3 for beta chain variable domain of TCR clone 168962 (TRBV12-4, TRBJ2-7)
CASSLGGYEQYF

SEQ ID NO: 337925 - protein, 14 aa, Homo sapiens
  CDR3 for alpha chain variable domain of TCR clone 168963 (TRAV1-2, TRAJ16)
CVVNRFSDGQKLLF

SEQ ID NO: 337926 - protein, 13 aa, Homo sapiens
  CDR3 for beta chain variable domain of TCR clone 168963 (TRBV5-5, TRBJ1-2)
CASSFWRGEDYSF

SEQ ID NO: 337927 - protein, 10 aa, Homo sapiens
  CDR3 for alpha chain variable domain of TCR clone 168964 (TRAV17, TRAJ52)
SATSYGKLTF

SEQ ID NO: 337928 - protein, 13 aa, Homo sapiens
  CDR3 for beta chain variable domain of TCR clone 168964 (TRBV12-4, TRBJ2-7)
CASSPTETYEQYF

SEQ ID NO: 337929 - protein, 15 aa, Homo sapiens
  CDR3 for alpha chain variable domain of TCR clone 168965 (TRAV12-1, TRAJ31)
CVVNPARDNNARLMF

SEQ ID NO: 337930 - protein, 15 aa, Homo sapiens
  CDR3 for beta chain variable domain of TCR clone 168965 (TRBV6-6, TRBJ2-7)
CASSYSYGGSYEQYF

SEQ ID NO: 337931 - protein, 13 aa, Homo sapiens
  CDR3 for alpha chain variable domain of TCR clone 168966 (TRAV16, TRAJ11)
CALTQSGYSTFTF

SEQ ID NO: 337932 - protein, 17 aa, Homo sapiens
  CDR3 for beta chain variable domain of TCR clone 168966 (TRBV5-1, TRBJ1-5)
CASSLAFLTRGNQPQHF

SEQ ID NO: 337933 - protein, 11 aa, Homo sapiens
  CDR3 for alpha chain variable domain of TCR clone 168967 (TRAV22, TRAJ20)
CAPLHDYKLSF

SEQ ID NO: 337934 - protein, 11 aa, Homo sapiens
  CDR3 for beta chain variable domain of TCR clone 168967 (TRBV11-2, TRBJ2-2)
CASSLPGELFF

SEQ ID NO: 337935 - protein, 15 aa, Homo sapiens
  CDR3 for alpha chain variable domain of TCR clone 168968 (TRAV3, TRAJ32)
CAVSSYGGATNKLIL

SEQ ID NO: 337936 - protein, 16 aa, Homo sapiens
  CDR3 for beta chain variable domain of TCR clone 168968 (TRBV5-1, TRBJ2-5)
CASSLSLAGAQETQYF

SEQ ID NO: 337937 - protein, 14 aa, Homo sapiens
  CDR3 for alpha chain variable domain of TCR clone 168969 (TRAV8-4, TRAJ34)
WAVSDPGDTDKLIF

SEQ ID NO: 337938 - protein, 13 aa, Homo sapiens
  CDR3 for beta chain variable domain of TCR clone 168969 (TRBV7-9, TRBJ2-5)
CASLSPGQETQYF

SEQ ID NO: 337939 - protein, 14 aa, Homo sapiens
  CDR3 for alpha chain variable domain of TCR clone 168970 (TRAV17, TRAJ17)
CATDHRAAGNKLTF

SEQ ID NO: 337940 - protein, 12 aa, Homo sapiens
  CDR3 for beta chain variable domain of TCR clone 168970 (TRBV11-2, TRBJ2-2)
CASSLGGGELFF

SEQ ID NO: 337941 - protein, 17 aa, Homo sapiens
  CDR3 for alpha chain variable domain of TCR clone 168971 (TRAV26-1, TRAJ53)
CIVRVDDSGGSNYKLTF

SEQ ID NO: 337942 - protein, 12 aa, Homo sapiens
  CDR3 for beta chain variable domain of TCR clone 168971 (TRBV11-2, TRBJ2-2)
CASSLPTGELFF

SEQ ID NO: 337943 - protein, 16 aa, Homo sapiens
  CDR3 for alpha chain variable domain of TCR clone 168972 (TRAV30, TRAJ24)
CGTEIVDADCWGKFQF

SEQ ID NO: 337944 - protein, 13 aa, Homo sapiens
  CDR3 for beta chain variable domain of TCR clone 168972 (TRBV28, TRBJ2-7)
CASTPGLAGEQYF

SEQ ID NO: 337945 - protein, 16 aa, Homo sapiens
  CDR3 for alpha chain variable domain of TCR clone 168973 (TRAV4, TRAJ22)
CLVGDLYTGSARKLTF

SEQ ID NO: 337946 - protein, 16 aa, Homo sapiens
  CDR3 for beta chain variable domain of TCR clone 168973 (TRBV7-9, TRBJ2-1)
CASGDVAGGSYNEQFF

SEQ ID NO: 337947 - protein, 13 aa, Homo sapiens
  CDR3 for alpha chain variable domain of TCR clone 168974 (TRAV14/DV4, TRAJ49)
CAMVENTGNQFYF

SEQ ID NO: 337948 - protein, 13 aa, Homo sapiens
  CDR3 for beta chain variable domain of TCR clone 168974 (TRBV11-3, TRBJ2-1)
CANSSRRVDEQFF

SEQ ID NO: 337949 - protein, 18 aa, Homo sapiens
  CDR3 for alpha chain variable domain of TCR clone 168975 (TRAV13-1, TRAJ52)
CAAKNPNAGGTSYGKLTF

SEQ ID NO: 337950 - protein, 15 aa, Homo sapiens
  CDR3 for beta chain variable domain of TCR clone 168975 (TRBV6-1, TRBJ2-3)
CASSERCVITDTQYF

SEQ ID NO: 337951 - protein, 12 aa, Homo sapiens
  CDR3 for alpha chain variable domain of TCR clone 168976 (TRAV12-2, TRAJ31)
CAVNTPDARLMF

SEQ ID NO: 337952 - protein, 15 aa, Homo sapiens
  CDR3 for beta chain variable domain of TCR clone 168976 (TRBV4-1, TRBJ1-2)
CASSQDPGRAYGYTF

SEQ ID NO: 337953 - protein, 12 aa, Homo sapiens
  CDR3 for alpha chain variable domain of TCR clone 168977 (TRAV13-1, TRAJ21)
CAAKEGVNKFYF

SEQ ID NO: 337954 - protein, 13 aa, Homo sapiens
  CDR3 for beta chain variable domain of TCR clone 168977 (TRBV7-3, TRBJ1-1)
CASSQDWGAEAFF

SEQ ID NO: 337955 - protein, 14 aa, Homo sapiens
  CDR3 for alpha chain variable domain of TCR clone 168978 (TRAV16, TRAJ39)
CALSKNNAGNMLTF

SEQ ID NO: 337956 - protein, 14 aa, Homo sapiens
  CDR3 for beta chain variable domain of TCR clone 168978 (TRBV7-2, TRBJ2-7)
CASSPKTSFYEQYF

SEQ ID NO: 337957 - protein, 16 aa, Homo sapiens
  CDR3 for alpha chain variable domain of TCR clone 168979 (TRAV30, TRAJ24)
CGTAIVDADSWGKFQF

SEQ ID NO: 337958 - protein, 16 aa, Homo sapiens
  CDR3 for beta chain variable domain of TCR clone 168979 (TRBV28, TRBJ2-7)
CASSLFFETGGPEQYF

SEQ ID NO: 337959 - protein, 17 aa, Homo sapiens
  CDR3 for alpha chain variable domain of TCR clone 168980 (TRAV20, TRAJ42)
CAVRGHRGGGSQGNLIF

SEQ ID NO: 337960 - protein, 12 aa, Homo sapiens
  CDR3 for beta chain variable domain of TCR clone 168980 (TRBV11-2, TRBJ2-1)
CASRPGNNEQFF

SEQ ID NO: 337961 - protein, 13 aa, Homo sapiens
  CDR3 for alpha chain variable domain of TCR clone 168981 (TRAV2, TRAJ15)
CAVASQAGTALIF

SEQ ID NO: 337962 - protein, 16 aa, Homo sapiens
  CDR3 for beta chain variable domain of TCR clone 168981 (TRBV12-5, TRBJ2-5)
CASGPRTSGNRETQYF

SEQ ID NO: 337963 - protein, 16 aa, Homo sapiens
  CDR3 for alpha chain variable domain of TCR clone 168982 (TRAV3, TRAJ37)
WAVRPHGSVNTGKLIF

SEQ ID NO: 337964 - protein, 14 aa, Homo sapiens
  CDR3 for beta chain variable domain of TCR clone 168982 (TRBV25-1, TRBJ1-1)
CASTHLGGNPEAFF

SEQ ID NO: 337965 - protein, 11 aa, Homo sapiens
  CDR3 for alpha chain variable domain of TCR clone 168983 (TRAV1-2, TRAJ31)
CAVNNNARLMF

SEQ ID NO: 337966 - protein, 14 aa, Homo sapiens
  CDR3 for beta chain variable domain of TCR clone 168983 (TRBV28, TRBJ1-1)
CASSESGRGTEAFF

SEQ ID NO: 337967 - protein, 15 aa, Homo sapiens
  CDR3 for alpha chain variable domain of TCR clone 168984 (TRAV1-2, TRAJ28)
CAVQYSGAGSYQLTF

SEQ ID NO: 337968 - protein, 13 aa, Homo sapiens
  CDR3 for beta chain variable domain of TCR clone 168984 (TRBV20-1, TRBJ2-7)
CSATDTSGYEQYF

SEQ ID NO: 337969 - protein, 13 aa, Homo sapiens
  CDR3 for alpha chain variable domain of TCR clone 168985 (TRAV1-2, TRAJ12)
CAVSMDSSYKLIF

SEQ ID NO: 337970 - protein, 15 aa, Homo sapiens
  CDR3 for beta chain variable domain of TCR clone 168985 (TRBV7-2, TRBJ2-1)
CASSSGLAGGNEQFF

SEQ ID NO: 337971 - protein, 14 aa, Homo sapiens
  CDR3 for alpha chain variable domain of TCR clone 168986 (TRAV1-1, TRAJ27)
CAVIYNTNAGKSTF

SEQ ID NO: 337972 - protein, 16 aa, Homo sapiens
  CDR3 for beta chain variable domain of TCR clone 168986 (TRBV19, TRBJ2-3)
CASSPGAASRTDTQYF

SEQ ID NO: 337973 - protein, 14 aa, Homo sapiens
  CDR3 for alpha chain variable domain of TCR clone 168987 (TRAV26-1, TRAJ39)
CIVRVEGSGNMLTF

SEQ ID NO: 337974 - protein, 15 aa, Homo sapiens
  CDR3 for beta chain variable domain of TCR clone 168987 (TRBV7-9, TRBJ1-5)
CASSQGHQPNQPQHF

SEQ ID NO: 337975 - protein, 13 aa, Homo sapiens
  CDR3 for alpha chain variable domain of TCR clone 168988 (TRAV21, TRAJ33)
CAVAGDSNYQLIW

SEQ ID NO: 337976 - protein, 14 aa, Homo sapiens
  CDR3 for beta chain variable domain of TCR clone 168988 (TRBV20-1, TRBJ2-1)
CSAMGQSSYNEQFF

SEQ ID NO: 337977 - protein, 18 aa, Homo sapiens
  CDR3 for alpha chain variable domain of TCR clone 168989 (TRAV21, TRAJ52)
CAVRPSPAGGTSYGKLTF

SEQ ID NO: 337978 - protein, 12 aa, Homo sapiens
  CDR3 for beta chain variable domain of TCR clone 168989 (TRBV7-2, TRBJ1-6)
CASSLSSLPLHF

SEQ ID NO: 337979 - protein, 15 aa, Homo sapiens
  CDR3 for alpha chain variable domain of TCR clone 168990 (TRAV8-2, TRAJ44)
CVVSPTTGTASKLTF

SEQ ID NO: 337980 - protein, 12 aa, Homo sapiens
  CDR3 for beta chain variable domain of TCR clone 168990 (TRBV11-2, TRBJ2-2)
CAVPRNTGELFF

SEQ ID NO: 337981 - protein, 15 aa, Homo sapiens
  CDR3 for alpha chain variable domain of TCR clone 168991 (TRAV3, TRAJ22)
CAVRDRGGSARQLTF

SEQ ID NO: 337982 - protein, 16 aa, Homo sapiens
  CDR3 for beta chain variable domain of TCR clone 168991 (TRBV11-2, TRBJ2-1)
CASARGSYAHHNEQFF

SEQ ID NO: 337983 - protein, 17 aa, Homo sapiens
  CDR3 for alpha chain variable domain of TCR clone 168992 (TRAV26-1, TRAJ11)
CIVRVGQSNSGYSTLTF

SEQ ID NO: 337984 - protein, 15 aa, Homo sapiens
  CDR3 for beta chain variable domain of TCR clone 168992 (TRBV27, TRBJ2-5)
CASSLIPSGGETQYV

SEQ ID NO: 337985 - protein, 15 aa, Homo sapiens
  CDR3 for alpha chain variable domain of TCR clone 168993 (TRAV1-1, TRAJ20)
FAVRDNVANDYKLSF

SEQ ID NO: 337986 - protein, 13 aa, Homo sapiens
  CDR3 for beta chain variable domain of TCR clone 168993 (TRBV4-1, TRBJ2-2)
CASSQENTGELFF

SEQ ID NO: 337987 - protein, 18 aa, Homo sapiens
  CDR3 for alpha chain variable domain of TCR clone 168994 (TRAV21, TRAJ52)
CAVRPSPAGGTSYGKLTF

SEQ ID NO: 337988 - protein, 17 aa, Homo sapiens
  CDR3 for beta chain variable domain of TCR clone 168994 (TRBV25-1, TRBJ2-1)
CASSAYVQGRGVYEQFF

SEQ ID NO: 337989 - protein, 11 aa, Homo sapiens
  CDR3 for alpha chain variable domain of TCR clone 168995 (TRAV1-1, TRAJ23)
CAVRQGGKLIF

SEQ ID NO: 337990 - protein, 13 aa, Homo sapiens
  CDR3 for beta chain variable domain of TCR clone 168995 (TRBV7-2, TRBJ1-1)
CASNLKGAKVAFF

SEQ ID NO: 337991 - protein, 12 aa, Homo sapiens
  CDR3 for alpha chain variable domain of TCR clone 168996 (TRAV12-2, TRAJ7)
CAHGRGEQQTRF

SEQ ID NO: 337992 - protein, 15 aa, Homo sapiens
  CDR3 for beta chain variable domain of TCR clone 168996 (TRBV27, TRBJ2-1)
CASSNGGGSSNEQFF

SEQ ID NO: 337993 - protein, 12 aa, Homo sapiens
  CDR3 for alpha chain variable domain of TCR clone 168997 (TRAV17, TRAJ49)
CATVTTGNQFYF

SEQ ID NO: 337994 - protein, 16 aa, Homo sapiens
  CDR3 for beta chain variable domain of TCR clone 168997 (TRBV20-1, TRBJ1-4)
CSAPGQGLLTNEKLFF

SEQ ID NO: 337995 - protein, 13 aa, Homo sapiens
  CDR3 for alpha chain variable domain of TCR clone 168998 (TRAV27, TRAJ11)
CAGARSGYSTLTF

SEQ ID NO: 337996 - protein, 16 aa, Homo sapiens
  CDR3 for beta chain variable domain of TCR clone 168998 (TRBV10-2, TRBJ2-2)
CASSDSRDRGSGELFF

SEQ ID NO: 337997 - protein, 14 aa, Homo sapiens
  CDR3 for alpha chain variable domain of TCR clone 168999 (TRAV1-2, TRAJ8)
CAVREDTGFQKLVF

SEQ ID NO: 337998 - protein, 15 aa, Homo sapiens
  CDR3 for beta chain variable domain of TCR clone 168999 (TRBV5-4, TRBJ2-1)
CASSPTSGGDVGQFF

SEQ ID NO: 337999 - protein, 14 aa, Homo sapiens
  CDR3 for alpha chain variable domain of TCR clone 169000 (TRAV34, TRAJ22)
CGADTSGSARQLTF

SEQ ID NO: 338000 - protein, 14 aa, Homo sapiens
  CDR3 for beta chain variable domain of TCR clone 169000 (TRBV7-2, TRBJ2-7)
CASRSQGAAYEQYF

SEQ ID NO: 338001 - protein, 12 aa, Homo sapiens
  CDR3 for alpha chain variable domain of TCR clone 169001 (TRAV13-1, TRAJ21)
CAAKEGFNKFYF

SEQ ID NO: 338002 - protein, 18 aa, Homo sapiens
  CDR3 for beta chain variable domain of TCR clone 169001 (TRBV20-1, TRBJ2-3)
CSASGLAGGPGTTDTQYF

SEQ ID NO: 338003 - protein, 14 aa, Homo sapiens
  CDR3 for alpha chain variable domain of TCR clone 169002 (TRAV26-1, TRAJ34)
CIVRVAYNTAKLIF

SEQ ID NO: 338004 - protein, 15 aa, Homo sapiens
  CDR3 for beta chain variable domain of TCR clone 169002 (TRBV20-1, TRBJ2-7)
CSARVPAAYFYEQYL

SEQ ID NO: 338005 - protein, 12 aa, Homo sapiens
  CDR3 for alpha chain variable domain of TCR clone 169003 (TRAV12-3, TRAJ17)
CAMTLTGNKLTF

SEQ ID NO: 338006 - protein, 13 aa, Homo sapiens
  CDR3 for beta chain variable domain of TCR clone 169003 (TRBV14, TRBJ1-2)
CASSEGRRYGYTF

SEQ ID NO: 338007 - protein, 17 aa, Homo sapiens
  CDR3 for alpha chain variable domain of TCR clone 169004 (TRAV13-1, TRAJ52)
CAASSGAGGTSYGKLTF

SEQ ID NO: 338008 - protein, 15 aa, Homo sapiens
  CDR3 for beta chain variable domain of TCR clone 169004 (TRBV2, TRBJ2-1)
CARSELAGSYNEQFF

SEQ ID NO: 338009 - protein, 18 aa, Homo sapiens
  CDR3 for alpha chain variable domain of TCR clone 169005 (TRAV26-1, TRAJ45)
CIVRVGHHSGGGADGLTF

SEQ ID NO: 338010 - protein, 15 aa, Homo sapiens
  CDR3 for beta chain variable domain of TCR clone 169005 (TRBV7-6, TRBJ2-1)
CASSSLAGEGNEQFF

SEQ ID NO: 338011 - protein, 18 aa, Homo sapiens
  CDR3 for alpha chain variable domain of TCR clone 169006 (TRAV13-1, TRAJ52)
CAAKNPNAGGTSYGKLTF

SEQ ID NO: 338012 - protein, 14 aa, Homo sapiens
  CDR3 for beta chain variable domain of TCR clone 169006 (TRBV13, TRBJ2-5)
CASSLGPRGETQYF

SEQ ID NO: 338013 - protein, 15 aa, Homo sapiens
  CDR3 for alpha chain variable domain of TCR clone 169007 (TRAV13-1, TRAJ44)
CAASRGGGTASKLTF

SEQ ID NO: 338014 - protein, 13 aa, Homo sapiens
  CDR3 for beta chain variable domain of TCR clone 169007 (TRBV7-2, TRBJ2-2)
CASSLAVTGELFF

SEQ ID NO: 338015 - protein, 16 aa, Homo sapiens
  CDR3 for alpha chain variable domain of TCR clone 169008 (TRAV12-2, TRAJ45)
CAVNMYSGGVADGLTF

SEQ ID NO: 338016 - protein, 17 aa, Homo sapiens
  CDR3 for beta chain variable domain of TCR clone 169008 (TRBV6-3, TRBJ2-2)
CASSYRGRDFYTGELFF

SEQ ID NO: 338017 - protein, 17 aa, Homo sapiens
  CDR3 for alpha chain variable domain of TCR clone 169009 (TRAV3, TRAJ42)
CAVSDRDYGGSQGNLIF

SEQ ID NO: 338018 - protein, 13 aa, Homo sapiens
  CDR3 for beta chain variable domain of TCR clone 169009 (TRBV2, TRBJ1-5)
CASGTGGYQPQHF

SEQ ID NO: 338019 - protein, 14 aa, Homo sapiens
  CDR3 for alpha chain variable domain of TCR clone 169010 (TRAV17, TRAJ57)
CATDPQGGSEKLVF

SEQ ID NO: 338020 - protein, 18 aa, Homo sapiens
  CDR3 for beta chain variable domain of TCR clone 169010 (TRBV12-4, TRBJ2-4)
CASSRTGAVDVAKNIQYF

SEQ ID NO: 338021 - protein, 17 aa, Homo sapiens
  CDR3 for alpha chain variable domain of TCR clone 169011 (TRAV38-2/DV8, TRAJ45)
GAYRSRYSGGGADGLTF

SEQ ID NO: 338022 - protein, 15 aa, Homo sapiens
  CDR3 for beta chain variable domain of TCR clone 169011 (TRBV19, TRBJ2-1)
CASIKGRGPYNEQFF

SEQ ID NO: 338023 - protein, 14 aa, Homo sapiens
  CDR3 for alpha chain variable domain of TCR clone 169012 (TRAV16, TRAJ33)
CALSAMDSYYQLIW

SEQ ID NO: 338024 - protein, 12 aa, Homo sapiens
  CDR3 for beta chain variable domain of TCR clone 169012 (TRBV5-1, TRBJ1-2)
CASSQDTYGYTF

SEQ ID NO: 338025 - protein, 14 aa, Homo sapiens
  CDR3 for alpha chain variable domain of TCR clone 169013 (TRAV27, TRAJ22)
RAGVAVLGKRQLTF

SEQ ID NO: 338026 - protein, 17 aa, Homo sapiens
  CDR3 for beta chain variable domain of TCR clone 169013 (TRBV14, TRBJ2-1)
CASSQDRRVTSYNEQFF

SEQ ID NO: 338027 - protein, 13 aa, Homo sapiens
  CDR3 for alpha chain variable domain of TCR clone 169014 (TRAV35, TRAJ42)
CAGVPGSQGNLIF

SEQ ID NO: 338028 - protein, 14 aa, Homo sapiens
  CDR3 for beta chain variable domain of TCR clone 169014 (TRBV29-1, TRBJ2-2)
CSVLAETNTGELFF

SEQ ID NO: 338029 - protein, 15 aa, Homo sapiens
  CDR3 for alpha chain variable domain of TCR clone 169015 (TRAV3, TRAJ4)
CAVRDGTGGYNKLIF

SEQ ID NO: 338030 - protein, 14 aa, Homo sapiens
  CDR3 for beta chain variable domain of TCR clone 169015 (TRBV10-3, TRBJ1-1)
CAISDTDRGVEAFF

SEQ ID NO: 338031 - protein, 11 aa, Homo sapiens
  CDR3 for alpha chain variable domain of TCR clone 169016 (TRAV12-2, TRAJ3)
CAVKRASKIIF

SEQ ID NO: 338032 - protein, 15 aa, Homo sapiens
  CDR3 for beta chain variable domain of TCR clone 169016 (TRBV7-8, TRBJ1-2)
CASSLVRDGGLGYTF

SEQ ID NO: 338033 - protein, 15 aa, Homo sapiens
  CDR3 for alpha chain variable domain of TCR clone 169017 (TRAV35, TRAJ50)
YAGQLRKTSYDKVIF

SEQ ID NO: 338034 - protein, 12 aa, Homo sapiens
  CDR3 for beta chain variable domain of TCR clone 169017 (TRBV5-1, TRBJ2-5)
CASSLGLETQYF

SEQ ID NO: 338035 - protein, 15 aa, Homo sapiens
  CDR3 for alpha chain variable domain of TCR clone 169018 (TRAV25, TRAJ53)
CPTSNSGGSNYKLTF

SEQ ID NO: 338036 - protein, 15 aa, Homo sapiens
  CDR3 for beta chain variable domain of TCR clone 169018 (TRBV11-2, TRBJ1-3)
CASSLSPLVRDTMYF

SEQ ID NO: 338037 - protein, 14 aa, Homo sapiens
  CDR3 for alpha chain variable domain of TCR clone 169019 (TRAV21, TRAJ35)
CAVMPVGFGNVLHW

SEQ ID NO: 338038 - protein, 12 aa, Homo sapiens
  CDR3 for beta chain variable domain of TCR clone 169019 (TRBV7-9, TRBJ2-7)
CASSIKREEQYF

SEQ ID NO: 338039 - protein, 14 aa, Homo sapiens
  CDR3 for alpha chain variable domain of TCR clone 169020 (TRAV26-1, TRAJ38)
CSADNAGNNRKLIW

SEQ ID NO: 338040 - protein, 13 aa, Homo sapiens
  CDR3 for beta chain variable domain of TCR clone 169020 (TRBV19, TRBJ1-2)
CASSVPGQDGYTF

SEQ ID NO: 338041 - protein, 16 aa, Homo sapiens
  CDR3 for alpha chain variable domain of TCR clone 169021 (TRAV26-1, TRAJ37)
CIVRGDGSGNTGKLIF

SEQ ID NO: 338042 - protein, 15 aa, Homo sapiens
  CDR3 for beta chain variable domain of TCR clone 169021 (TRBV11-2, TRBJ2-2)
CASSSDRVNAGELFF

SEQ ID NO: 338043 - protein, 14 aa, Homo sapiens
  CDR3 for alpha chain variable domain of TCR clone 169022 (TRAV2, TRAJ22)
CAVGRGGSARQLTF

SEQ ID NO: 338044 - protein, 18 aa, Homo sapiens
  CDR3 for beta chain variable domain of TCR clone 169022 (TRBV20-1, TRBJ2-6)
CSAETTPTHGSGANVLTF

SEQ ID NO: 338045 - protein, 14 aa, Homo sapiens
  CDR3 for alpha chain variable domain of TCR clone 169023 (TRAV23/DV6, TRAJ23)
FAAGPYNQGGKLIF

SEQ ID NO: 338046 - protein, 17 aa, Homo sapiens
  CDR3 for beta chain variable domain of TCR clone 169023 (TRBV4-2, TRBJ1-1)
CASSQVATGGMNTEAFF

SEQ ID NO: 338047 - protein, 12 aa, Homo sapiens
  CDR3 for alpha chain variable domain of TCR clone 169024 (TRAV12-2, TRAJ43)
CAVTVNNNDMRF

SEQ ID NO: 338048 - protein, 14 aa, Homo sapiens
  CDR3 for beta chain variable domain of TCR clone 169024 (TRBV25-1, TRBJ2-2)
CASSELGLPGELFF

SEQ ID NO: 338049 - protein, 11 aa, Homo sapiens
  CDR3 for alpha chain variable domain of TCR clone 169025 (TRAV2, TRAJ13)
CASGGYQKVTF

SEQ ID NO: 338050 - protein, 11 aa, Homo sapiens
  CDR3 for beta chain variable domain of TCR clone 169025 (TRBV5-6, TRBJ2-5)
CASRLERTQYF

SEQ ID NO: 338051 - protein, 11 aa, Homo sapiens
  CDR3 for alpha chain variable domain of TCR clone 169026 (TRAV27, TRAJ45)
CAGAQEEVLTD

SEQ ID NO: 338052 - protein, 11 aa, Homo sapiens
  CDR3 for beta chain variable domain of TCR clone 169026 (TRBV19, TRBJ1-1)
CASGIGSEAFF

SEQ ID NO: 338053 - protein, 12 aa, Homo sapiens
  CDR3 for alpha chain variable domain of TCR clone 169027 (TRAV21, TRAJ13)
PGPSGGYQKVTF

SEQ ID NO: 338054 - protein, 15 aa, Homo sapiens
  CDR3 for beta chain variable domain of TCR clone 169027 (TRBV7-9, TRBJ1-6)
CASSSPVRGNSPLHF

SEQ ID NO: 338055 - protein, 12 aa, Homo sapiens
  CDR3 for alpha chain variable domain of TCR clone 169028 (TRAV12-1, TRAJ40)
FVVYSGTYKYIF

SEQ ID NO: 338056 - protein, 18 aa, Homo sapiens
  CDR3 for beta chain variable domain of TCR clone 169028 (TRBV11-2, TRBJ2-3)
RASSLGGASRGAPNTQYF

SEQ ID NO: 338057 - protein, 15 aa, Homo sapiens
  CDR3 for alpha chain variable domain of TCR clone 169029 (TRAV23/DV6, TRAJ37)
CAAVEGSSNTGKLIF

SEQ ID NO: 338058 - protein, 17 aa, Homo sapiens
  CDR3 for beta chain variable domain of TCR clone 169029 (TRBV20-1, TRBJ2-7)
CSATRTGGVAGVEEQYF

SEQ ID NO: 338059 - protein, 15 aa, Homo sapiens
  CDR3 for alpha chain variable domain of TCR clone 169030 (TRAV14/DV4, TRAJ10)
CAMRELTGGGNKLTF

SEQ ID NO: 338060 - protein, 18 aa, Homo sapiens
  CDR3 for beta chain variable domain of TCR clone 169030 (TRBV7-9, TRBJ2-7)
YASSLTTSGSRTWYEQYF

SEQ ID NO: 338061 - protein, 14 aa, Homo sapiens
  CDR3 for alpha chain variable domain of TCR clone 169031 (TRAV2, TRAJ29)
CARPFQYGNTPLVF

SEQ ID NO: 338062 - protein, 14 aa, Homo sapiens
  CDR3 for beta chain variable domain of TCR clone 169031 (TRBV7-2, TRBJ2-5)
CQQLKEQGRETQYF

SEQ ID NO: 338063 - protein, 11 aa, Homo sapiens
  CDR3 for alpha chain variable domain of TCR clone 169032 (TRAV17, TRAJ31)
CATSNNARLMF

SEQ ID NO: 338064 - protein, 13 aa, Homo sapiens
  CDR3 for beta chain variable domain of TCR clone 169032 (TRBV20-1, TRBJ2-5)
CSAREGGKETQYF

SEQ ID NO: 338065 - protein, 16 aa, Homo sapiens
  CDR3 for alpha chain variable domain of TCR clone 169033 (TRAV21, TRAJ52)
CAVTNTGGTSYGKLTF

SEQ ID NO: 338066 - protein, 16 aa, Homo sapiens
  CDR3 for beta chain variable domain of TCR clone 169033 (TRBV2, TRBJ2-1)
CASSVGGSLSYNEQFF

SEQ ID NO: 338067 - protein, 14 aa, Homo sapiens
  CDR3 for alpha chain variable domain of TCR clone 169034 (TRAV12-3, TRAJ10)
SHLPLTGGGNKLTF

SEQ ID NO: 338068 - protein, 15 aa, Homo sapiens
  CDR3 for beta chain variable domain of TCR clone 169034 (TRBV29-1, TRBJ2-7)
CSVEFFERGSYEQYF

SEQ ID NO: 338069 - protein, 12 aa, Homo sapiens
  CDR3 for alpha chain variable domain of TCR clone 169035 (TRAV12-3, TRAJ17)
CAMTLTGNKLTL

SEQ ID NO: 338070 - protein, 15 aa, Homo sapiens
  CDR3 for beta chain variable domain of TCR clone 169035 (TRBV5-1, TRBJ2-7)
CASSLNGGPAREQYF

SEQ ID NO: 338071 - protein, 16 aa, Homo sapiens
  CDR3 for alpha chain variable domain of TCR clone 169036 (TRAV12-2, TRAJ52)
CRLANAGGTSYGKLTF

SEQ ID NO: 338072 - protein, 13 aa, Homo sapiens
  CDR3 for beta chain variable domain of TCR clone 169036 (TRBV10-3, TRBJ2-7)
CASRLAVNYEQYF

SEQ ID NO: 338073 - protein, 14 aa, Homo sapiens
  CDR3 for alpha chain variable domain of TCR clone 169037 (TRAV16, TRAJ8)
CALLMNTGFQKLVF

SEQ ID NO: 338074 - protein, 17 aa, Homo sapiens
  CDR3 for beta chain variable domain of TCR clone 169037 (TRBV13, TRBJ2-3)
CASSLSRVAGGRNTQYF

SEQ ID NO: 338075 - protein, 16 aa, Homo sapiens
  CDR3 for alpha chain variable domain of TCR clone 169038 (TRAV25, TRAJ52)
CAGGILSGTSYGKLTF

SEQ ID NO: 338076 - protein, 16 aa, Homo sapiens
  CDR3 for beta chain variable domain of TCR clone 169038 (TRBV28, TRBJ2-3)
CASSRSSGQGSDTQYF

SEQ ID NO: 338077 - protein, 13 aa, Homo sapiens
  CDR3 for alpha chain variable domain of TCR clone 169039 (TRAV13-1, TRAJ12)
CSKYMGSSYKLIF

SEQ ID NO: 338078 - protein, 14 aa, Homo sapiens
  CDR3 for beta chain variable domain of TCR clone 169039 (TRBV29-1, TRBJ2-3)
CSARAGAGADTQYF

SEQ ID NO: 338079 - protein, 12 aa, Homo sapiens
  CDR3 for alpha chain variable domain of TCR clone 169040 (TRAV27, TRAJ9)
CAGESGGFKTIF

SEQ ID NO: 338080 - protein, 18 aa, Homo sapiens
  CDR3 for beta chain variable domain of TCR clone 169040 (TRBV10-2, TRBJ2-2)
CISAPAVLRQADAGELFF

SEQ ID NO: 338081 - protein, 14 aa, Homo sapiens
  CDR3 for alpha chain variable domain of TCR clone 169041 (TRAV1-2, TRAJ8)
CAVREDTGFQTLVF

SEQ ID NO: 338082 - protein, 17 aa, Homo sapiens
  CDR3 for beta chain variable domain of TCR clone 169041 (TRBV7-2, TRBJ2-3)
CASSLEARGTSTDTQYF

SEQ ID NO: 338083 - protein, 13 aa, Homo sapiens
  CDR3 for alpha chain variable domain of TCR clone 169042 (TRAV30, TRAJ26)
CGTEIPLGQNFVF

SEQ ID NO: 338084 - protein, 15 aa, Homo sapiens
  CDR3 for beta chain variable domain of TCR clone 169042 (TRBV4-1, TRBJ1-4)
CASSDTGGTNEKLFF

SEQ ID NO: 338085 - protein, 15 aa, Homo sapiens
  CDR3 for alpha chain variable domain of TCR clone 169043 (TRAV41, TRAJ45)
CAASYSGGGADGLTF

SEQ ID NO: 338086 - protein, 13 aa, Homo sapiens
  CDR3 for beta chain variable domain of TCR clone 169043 (TRBV7-2, TRBJ1-1)
CASNLKGAKVAFF

SEQ ID NO: 338087 - protein, 14 aa, Homo sapiens
  CDR3 for alpha chain variable domain of TCR clone 169044 (TRAV30, TRAJ33)
CGTVAPRSNYQLIW

SEQ ID NO: 338088 - protein, 17 aa, Homo sapiens
  CDR3 for beta chain variable domain of TCR clone 169044 (TRBV4-1, TRBJ1-4)
CASSQEGPRGVEEKLFF

SEQ ID NO: 338089 - protein, 15 aa, Homo sapiens
  CDR3 for alpha chain variable domain of TCR clone 169045 (TRAV23/DV6, TRAJ13)
CAASPGGGGYQKVTF

SEQ ID NO: 338090 - protein, 17 aa, Homo sapiens
  CDR3 for beta chain variable domain of TCR clone 169045 (TRBV19, TRBJ2-7)
CASSISFYDSYPYEQYF

SEQ ID NO: 338091 - protein, 13 aa, Homo sapiens
  CDR3 for alpha chain variable domain of TCR clone 169046 (TRAV13-2, TRAJ13)
CAERPGGYQKVTF

SEQ ID NO: 338092 - protein, 16 aa, Homo sapiens
  CDR3 for beta chain variable domain of TCR clone 169046 (TRBV12-4, TRBJ1-5)
CASRQPVEGSNQPQHF

SEQ ID NO: 338093 - protein, 16 aa, Homo sapiens
  CDR3 for alpha chain variable domain of TCR clone 169047 (TRAV13-1, TRAJ48)
CAESIFGNFGNEKLTF

SEQ ID NO: 338094 - protein, 16 aa, Homo sapiens
  CDR3 for beta chain variable domain of TCR clone 169047 (TRBV18, TRBJ1-5)
CASSPYRVEGNQPQHF

SEQ ID NO: 338095 - protein, 13 aa, Homo sapiens
  CDR3 for alpha chain variable domain of TCR clone 169048 (TRAV29/DV5, TRAJ31)
CAASRNNNASLMF

SEQ ID NO: 338096 - protein, 12 aa, Homo sapiens
  CDR3 for beta chain variable domain of TCR clone 169048 (TRBV14, TRBJ2-5)
CASSHLKETQYF

SEQ ID NO: 338097 - protein, 13 aa, Homo sapiens
  CDR3 for alpha chain variable domain of TCR clone 169049 (TRAV23/DV6, TRAJ6)
CAAKTGGSYIPTF

SEQ ID NO: 338098 - protein, 15 aa, Homo sapiens
  CDR3 for beta chain variable domain of TCR clone 169049 (TRBV5-1, TRBJ1-2)
CASSSYGEFDYGYAV

SEQ ID NO: 338099 - protein, 15 aa, Homo sapiens
  CDR3 for alpha chain variable domain of TCR clone 169050 (TRAV13-1, TRAJ44)
CAASRNTGTASKLTF

SEQ ID NO: 338100 - protein, 11 aa, Homo sapiens
  CDR3 for beta chain variable domain of TCR clone 169050 (TRBV29-1, TRBJ2-5)
CSEDRTGTQYF

SEQ ID NO: 338101 - protein, 16 aa, Homo sapiens
  CDR3 for alpha chain variable domain of TCR clone 169051 (TRAV17, TRAJ28)
CASYAYSGAGSYQLTF

SEQ ID NO: 338102 - protein, 14 aa, Homo sapiens
  CDR3 for beta chain variable domain of TCR clone 169051 (TRBV7-6, TRBJ2-3)
CASSLGTVTDTQYF

SEQ ID NO: 338103 - protein, 11 aa, Homo sapiens
  CDR3 for alpha chain variable domain of TCR clone 169052 (TRAV2, TRAJ13)
CASGGYQKVTF

SEQ ID NO: 338104 - protein, 19 aa, Homo sapiens
  CDR3 for beta chain variable domain of TCR clone 169052 (TRBV6-1, TRBJ2-5)
CASSEVAMGVLAGVETQYF

SEQ ID NO: 338105 - protein, 12 aa, Homo sapiens
  CDR3 for alpha chain variable domain of TCR clone 169053 (TRAV3, TRAJ26)
CAVRDYGQNFVY

SEQ ID NO: 338106 - protein, 12 aa, Homo sapiens
  CDR3 for beta chain variable domain of TCR clone 169053 (TRBV29-1, TRBJ2-3)
CSVTGGADTQYF

SEQ ID NO: 338107 - protein, 13 aa, Homo sapiens
  CDR3 for alpha chain variable domain of TCR clone 169054 (TRAV8-4, TRAJ9)
CAVSETGGFKTNF

SEQ ID NO: 338108 - protein, 14 aa, Homo sapiens
  CDR3 for beta chain variable domain of TCR clone 169054 (TRBV13, TRBJ2-5)
CASSLERVGETQYF

SEQ ID NO: 338109 - protein, 13 aa, Homo sapiens
  CDR3 for alpha chain variable domain of TCR clone 169055 (TRAV3, TRAJ33)
CAVRDRSNYQLIW

SEQ ID NO: 338110 - protein, 15 aa, Homo sapiens
  CDR3 for beta chain variable domain of TCR clone 169055 (TRBV7-2, TRBJ2-3)
CASSSTGLETDTQYF

SEQ ID NO: 338111 - protein, 19 aa, Homo sapiens
  CDR3 for alpha chain variable domain of TCR clone 169056 (TRAV35, TRAJ30)
CAPGGMTRSSLEKGRDFIF

SEQ ID NO: 338112 - protein, 14 aa, Homo sapiens
  CDR3 for beta chain variable domain of TCR clone 169056 (TRBV7-6, TRBJ2-3)
CASSLGTVTDTQYF

SEQ ID NO: 338113 - protein, 14 aa, Homo sapiens
  CDR3 for alpha chain variable domain of TCR clone 169057 (TRAV3, TRAJ36)
CAVRDGTGANNLFF

SEQ ID NO: 338114 - protein, 16 aa, Homo sapiens
  CDR3 for beta chain variable domain of TCR clone 169057 (TRBV7-3, TRBJ2-5)
CASIQPGGAVQETQYF

SEQ ID NO: 338115 - protein, 15 aa, Homo sapiens
  CDR3 for alpha chain variable domain of TCR clone 169058 (TRAV2, TRAJ22)
CAVPSRGGSARQLTF

SEQ ID NO: 338116 - protein, 13 aa, Homo sapiens
  CDR3 for beta chain variable domain of TCR clone 169058 (TRBV6-1, TRBJ1-1)
CASSRQGNTEAFF

SEQ ID NO: 338117 - protein, 16 aa, Homo sapiens
  CDR3 for alpha chain variable domain of TCR clone 169059 (TRAV4, TRAJ22)
CLVGDLYSCSAGQLTF

SEQ ID NO: 338118 - protein, 16 aa, Homo sapiens
  CDR3 for beta chain variable domain of TCR clone 169059 (TRBV7-9, TRBJ2-1)
CASSDVAGGSYNEQFF

SEQ ID NO: 338119 - protein, 14 aa, Homo sapiens
  CDR3 for alpha chain variable domain of TCR clone 169060 (TRAV1-2, TRAJ8)
CAVREDTGFQKLVF

SEQ ID NO: 338120 - protein, 16 aa, Homo sapiens
  CDR3 for beta chain variable domain of TCR clone 169060 (TRBV28, TRBJ1-4)
CASSSRTGAANEKLFF

SEQ ID NO: 338121 - protein, 16 aa, Homo sapiens
  CDR3 for alpha chain variable domain of TCR clone 169061 (TRAV12-1, TRAJ13)
CVVNLEVSGGYQKVTF

SEQ ID NO: 338122 - protein, 16 aa, Homo sapiens
  CDR3 for beta chain variable domain of TCR clone 169061 (TRBV24-1, TRBJ2-6)
CATSARRASGANGLTF

SEQ ID NO: 338123 - protein, 12 aa, Homo sapiens
  CDR3 for alpha chain variable domain of TCR clone 169062 (TRAV12-1, TRAJ40)
CVFYSGTYKYIF

SEQ ID NO: 338124 - protein, 14 aa, Homo sapiens
  CDR3 for beta chain variable domain of TCR clone 169062 (TRBV19, TRBJ1-2)
CASSLQGQAYGYTF

SEQ ID NO: 338125 - protein, 17 aa, Homo sapiens
  CDR3 for alpha chain variable domain of TCR clone 169063 (TRAV8-2, )
CVISRTLTLPCTSCETL

SEQ ID NO: 338126 - protein, 13 aa, Homo sapiens
  CDR3 for beta chain variable domain of TCR clone 169063 (TRBV27, TRBJ1-1)
CASSLSIGAEAFF

SEQ ID NO: 338127 - protein, 13 aa, Homo sapiens
  CDR3 for alpha chain variable domain of TCR clone 169064 (TRAV13-1, TRAJ5)
CAASDTGRRALTF

SEQ ID NO: 338128 - protein, 13 aa, Homo sapiens
  CDR3 for beta chain variable domain of TCR clone 169064 (TRBV24-1, TRBJ2-2)
CATAEPNTGELFF

SEQ ID NO: 338129 - protein, 12 aa, Homo sapiens
  CDR3 for alpha chain variable domain of TCR clone 169065 (TRAV3, TRAJ20)
CAVRNPDYKLSF

SEQ ID NO: 338130 - protein, 14 aa, Homo sapiens
  CDR3 for beta chain variable domain of TCR clone 169065 (TRBV4-2, TRBJ2-1)
CASGLDRAYNEQFF

SEQ ID NO: 338131 - protein, 15 aa, Homo sapiens
  CDR3 for alpha chain variable domain of TCR clone 169066 (TRAV12-2, TRAJ32)
CAVNHYGGATNKLIF

SEQ ID NO: 338132 - protein, 14 aa, Homo sapiens
  CDR3 for beta chain variable domain of TCR clone 169066 (TRBV27, TRBJ2-1)
CASSVGREANEQFF

SEQ ID NO: 338133 - protein, 13 aa, Homo sapiens
  CDR3 for alpha chain variable domain of TCR clone 169067 (TRAV2, TRAJ40)
CAVVTSGTYKYIF

SEQ ID NO: 338134 - protein, 20 aa, Homo sapiens
  CDR3 for beta chain variable domain of TCR clone 169067 (TRBV28, TRBJ2-1)
CASTPTGRSPGLAGGNEQFF

SEQ ID NO: 338135 - protein, 15 aa, Homo sapiens
  CDR3 for alpha chain variable domain of TCR clone 169068 (TRAV21, TRAJ53)
CATLNSGGSNYKLTF

SEQ ID NO: 338136 - protein, 12 aa, Homo sapiens
  CDR3 for beta chain variable domain of TCR clone 169068 (TRBV14, TRBJ2-4)
WASRNLKSIQYF

SEQ ID NO: 338137 - protein, 14 aa, Homo sapiens
  CDR3 for alpha chain variable domain of TCR clone 169069 (TRAV12-3, TRAJ10)
SHLPLTGGGNKLTF

SEQ ID NO: 338138 - protein, 17 aa, Homo sapiens
  CDR3 for beta chain variable domain of TCR clone 169069 (TRBV7-9, TRBJ1-1)
CASSLGIAGAENTEAFF

SEQ ID NO: 338139 - protein, 12 aa, Homo sapiens
  CDR3 for alpha chain variable domain of TCR clone 169070 (TRAV3, TRAJ20)
CAVRDGDYKLSF

SEQ ID NO: 338140 - protein, 15 aa, Homo sapiens
  CDR3 for beta chain variable domain of TCR clone 169070 (TRBV5-1, TRBJ2-3)
CASSVTSGSTDTQYF

SEQ ID NO: 338141 - protein, 12 aa, Homo sapiens
  CDR3 for alpha chain variable domain of TCR clone 169071 (TRAV12-3, TRAJ17)
CAMTLTCNKLTF

SEQ ID NO: 338142 - protein, 13 aa, Homo sapiens
  CDR3 for beta chain variable domain of TCR clone 169071 (TRBV12-4, TRBJ1-1)
CASSPGTGFEAFF

SEQ ID NO: 338143 - protein, 12 aa, Homo sapiens
  CDR3 for alpha chain variable domain of TCR clone 169072 (TRAV9-2, TRAJ36)
CALKKGANNLFF

SEQ ID NO: 338144 - protein, 15 aa, Homo sapiens
  CDR3 for beta chain variable domain of TCR clone 169072 (TRBV4-1, TRBJ1-4)
CASSDTGGTNEKLFF

SEQ ID NO: 338145 - protein, 14 aa, Homo sapiens
  CDR3 for alpha chain variable domain of TCR clone 169073 (TRAV35, TRAJ22)
CAGLRPGSARQLTF

SEQ ID NO: 338146 - protein, 13 aa, Homo sapiens
  CDR3 for beta chain variable domain of TCR clone 169073 (TRBV11-3, TRBJ2-5)
CASSSTGEETQYF

SEQ ID NO: 338147 - protein, 14 aa, Homo sapiens
  CDR3 for alpha chain variable domain of TCR clone 169074 (TRAV4, TRAJ41)
CLVGDGDSVYALNF

SEQ ID NO: 338148 - protein, 15 aa, Homo sapiens
  CDR3 for beta chain variable domain of TCR clone 169074 (TRBV27, TRBJ2-7)
CASSLVGGGAHEQYF

SEQ ID NO: 338149 - protein, 14 aa, Homo sapiens
  CDR3 for alpha chain variable domain of TCR clone 169075 (TRAV23/DV6, TRAJ37)
CAASTTGNKGKLIF

SEQ ID NO: 338150 - protein, 16 aa, Homo sapiens
  CDR3 for beta chain variable domain of TCR clone 169075 (TRBV24-1, TRBJ2-1)
CATSDLAGPTYNEQFF

SEQ ID NO: 338151 - protein, 13 aa, Homo sapiens
  CDR3 for alpha chain variable domain of TCR clone 169076 (TRAV13-1, TRAJ40)
CAASKGGTYKYIF

SEQ ID NO: 338152 - protein, 13 aa, Homo sapiens
  CDR3 for beta chain variable domain of TCR clone 169076 (TRBV7-6, TRBJ1-2)
CASSLVADYGYTF

SEQ ID NO: 338153 - protein, 15 aa, Homo sapiens
  CDR3 for alpha chain variable domain of TCR clone 169077 (TRAV26-1, TRAJ29)
CIVRVEGSGNTPLVF

SEQ ID NO: 338154 - protein, 14 aa, Homo sapiens
  CDR3 for beta chain variable domain of TCR clone 169077 (TRBV19, TRBJ1-5)
CASSIGGGGQPQHF

SEQ ID NO: 338155 - protein, 12 aa, Homo sapiens
  CDR3 for alpha chain variable domain of TCR clone 169078 (TRAV21, TRAJ15)
CCANQAGTALIF

SEQ ID NO: 338156 - protein, 14 aa, Homo sapiens
  CDR3 for beta chain variable domain of TCR clone 169078 (TRBV27, TRBJ2-2)
CASSLGAATGELFF

SEQ ID NO: 338157 - protein, 11 aa, Homo sapiens
  CDR3 for alpha chain variable domain of TCR clone 169079 (TRAV13-1, TRAJ39)
CASHAGNLLTF

SEQ ID NO: 338158 - protein, 15 aa, Homo sapiens
  CDR3 for beta chain variable domain of TCR clone 169079 (TRBV28, TRBJ2-1)
CASSIIAGGRSEQFF

SEQ ID NO: 338159 - protein, 15 aa, Homo sapiens
  CDR3 for alpha chain variable domain of TCR clone 169080 (TRAV1-2, TRAJ9)
CAVRDDGTGGFKTIF

SEQ ID NO: 338160 - protein, 12 aa, Homo sapiens
  CDR3 for beta chain variable domain of TCR clone 169080 (TRBV11-2, TRBJ2-1)
CASSPGNNEQFF

SEQ ID NO: 338161 - protein, 14 aa, Homo sapiens
  CDR3 for alpha chain variable domain of TCR clone 169081 (TRAV17, TRAJ6)
CATDASGGSYIPTF

SEQ ID NO: 338162 - protein, 19 aa, Homo sapiens
  CDR3 for beta chain variable domain of TCR clone 169081 (TRBV4-3, TRBJ2-7)
CAGSQEFIGWQVTPYEQYF

SEQ ID NO: 338163 - protein, 14 aa, Homo sapiens
  CDR3 for alpha chain variable domain of TCR clone 169082 (TRAV17, TRAJ22)
CATSPSGSARQLTF

SEQ ID NO: 338164 - protein, 20 aa, Homo sapiens
  CDR3 for beta chain variable domain of TCR clone 169082 (TRBV7-8, TRBJ2-2)
GASSHLFPGPTIHITGELFF

SEQ ID NO: 338165 - protein, 13 aa, Homo sapiens
  CDR3 for alpha chain variable domain of TCR clone 169083 (TRAV12-3, TRAJ47)
CARKKEYGNKLVF

SEQ ID NO: 338166 - protein, 13 aa, Homo sapiens
  CDR3 for beta chain variable domain of TCR clone 169083 (TRBV11-2, TRBJ1-1)
CASSLETSTEAFF

SEQ ID NO: 338167 - protein, 14 aa, Homo sapiens
  CDR3 for alpha chain variable domain of TCR clone 169084 (TRAV3, TRAJ36)
CAVRAGTGANNPFF

SEQ ID NO: 338168 - protein, 16 aa, Homo sapiens
  CDR3 for beta chain variable domain of TCR clone 169084 (TRBV20-1, TRBJ2-6)
CSAREGPGVGANVLTF

SEQ ID NO: 338169 - protein, 20 aa, Homo sapiens
  CDR3 for alpha chain variable domain of TCR clone 169085 (TRAV12-1, TRAJ42)
SSVIQPPTSVKGGSQGTLIF

SEQ ID NO: 338170 - protein, 14 aa, Homo sapiens
  CDR3 for beta chain variable domain of TCR clone 169085 (TRBV25-1, TRBJ1-2)
CASSDTTGVVGYTF

SEQ ID NO: 338171 - protein, 15 aa, Homo sapiens
  CDR3 for alpha chain variable domain of TCR clone 169086 (TRAV17, TRAJ22)
CATAPISGSARQLTF

SEQ ID NO: 338172 - protein, 14 aa, Homo sapiens
  CDR3 for beta chain variable domain of TCR clone 169086 (TRBV9, TRBJ2-1)
CASSVEPRGKEQFF

SEQ ID NO: 338173 - protein, 14 aa, Homo sapiens
  CDR3 for alpha chain variable domain of TCR clone 169087 (TRAV16, TRAJ33)
CALSAMDSNYLLIW

SEQ ID NO: 338174 - protein, 12 aa, Homo sapiens
  CDR3 for beta chain variable domain of TCR clone 169087 (TRBV5-1, TRBJ1-2)
CASSQDTYGYTF

SEQ ID NO: 338175 - protein, 13 aa, Homo sapiens
  CDR3 for alpha chain variable domain of TCR clone 169088 (TRAV22, TRAJ29)
CVVGGSGNTPLVV

SEQ ID NO: 338176 - protein, 13 aa, Homo sapiens
  CDR3 for beta chain variable domain of TCR clone 169088 (TRBV19, TRBJ2-7)
CASRKAGGSEQYF

SEQ ID NO: 338177 - protein, 14 aa, Homo sapiens
  CDR3 for alpha chain variable domain of TCR clone 169089 (TRAV17, TRAJ12)
CAILPMDSSYKLIF

SEQ ID NO: 338178 - protein, 15 aa, Homo sapiens
  CDR3 for beta chain variable domain of TCR clone 169089 (TRBV5-1, TRBJ1-1)
CASSLGEGENTEALF

SEQ ID NO: 338179 - protein, 15 aa, Homo sapiens
  CDR3 for alpha chain variable domain of TCR clone 169090 (TRAV2, TRAJ15)
CAVEDREHAGTALIF

SEQ ID NO: 338180 - protein, 13 aa, Homo sapiens
  CDR3 for beta chain variable domain of TCR clone 169090 (TRBV10-2, TRBJ2-3)
CASSESGDHTQYF

SEQ ID NO: 338181 - protein, 14 aa, Homo sapiens
  CDR3 for alpha chain variable domain of TCR clone 169091 (TRAV30, TRAJ33)
CGTERRFSNYQLIW

SEQ ID NO: 338182 - protein, 14 aa, Homo sapiens
  CDR3 for beta chain variable domain of TCR clone 169091 (TRBV7-3, TRBJ2-7)
CASRPQGAAYEQYF

SEQ ID NO: 338183 - protein, 14 aa, Homo sapiens
  CDR3 for alpha chain variable domain of TCR clone 169092 (TRAV1-2, TRAJ16)
CAVNRFSDGQKLLF

SEQ ID NO: 338184 - protein, 16 aa, Homo sapiens
  CDR3 for beta chain variable domain of TCR clone 169092 (TRBV11-3, TRBJ1-2)
CASSPSGREANYGYTF

SEQ ID NO: 338185 - protein, 16 aa, Homo sapiens
  CDR3 for alpha chain variable domain of TCR clone 169093 (TRAV12-2, TRAJ40)
CAVIRGGTSGTYKYIF

SEQ ID NO: 338186 - protein, 13 aa, Homo sapiens
  CDR3 for beta chain variable domain of TCR clone 169093 (TRBV7-7, TRBJ2-3)
CASSLSRADTQYF

SEQ ID NO: 338187 - protein, 12 aa, Homo sapiens
  CDR3 for alpha chain variable domain of TCR clone 169094 (TRAV23/DV6, TRAJ49)
CAASSTGNPFYF

SEQ ID NO: 338188 - protein, 15 aa, Homo sapiens
  CDR3 for beta chain variable domain of TCR clone 169094 (TRBV10-3, TRBJ2-3)
CAIDTSGRRTDTQYF

SEQ ID NO: 338189 - protein, 13 aa, Homo sapiens
  CDR3 for alpha chain variable domain of TCR clone 169095 (TRAV12-1, TRAJ11)
CVVNRAGYSTLTF

SEQ ID NO: 338190 - protein, 13 aa, Homo sapiens
  CDR3 for beta chain variable domain of TCR clone 169095 (TRBV9, TRBJ2-1)
CASSPSGGSEQFF

SEQ ID NO: 338191 - protein, 15 aa, Homo sapiens
  CDR3 for alpha chain variable domain of TCR clone 169096 (TRAV13-1, TRAJ50)
CAAKGSETSYDKVIF

SEQ ID NO: 338192 - protein, 12 aa, Homo sapiens
  CDR3 for beta chain variable domain of TCR clone 169096 (TRBV20-1, TRBJ2-3)
QCRAGGRDTQYF

SEQ ID NO: 338193 - protein, 12 aa, Homo sapiens
  CDR3 for alpha chain variable domain of TCR clone 169097 (TRAV12-3, TRAJ17)
CAMTLTGNKLTF

SEQ ID NO: 338194 - protein, 16 aa, Homo sapiens
  CDR3 for beta chain variable domain of TCR clone 169097 (TRBV4-2, TRBJ1-1)
CASSPSPGRAAPEAFF

SEQ ID NO: 338195 - protein, 14 aa, Homo sapiens
  CDR3 for alpha chain variable domain of TCR clone 169098 (TRAV12-2, TRAJ13)
CAVKKTGGYQKVTF

SEQ ID NO: 338196 - protein, 14 aa, Homo sapiens
  CDR3 for beta chain variable domain of TCR clone 169098 (TRBV25-1, TRBJ1-1)
CASTHLRGNTEAFF

SEQ ID NO: 338197 - protein, 14 aa, Homo sapiens
  CDR3 for alpha chain variable domain of TCR clone 169099 (TRAV2, TRAJ9)
CAVEDRSGGFKTTF

SEQ ID NO: 338198 - protein, 15 aa, Homo sapiens
  CDR3 for beta chain variable domain of TCR clone 169099 (TRBV7-2, TRBJ2-1)
CASSSGLAGGNEQFF

SEQ ID NO: 338199 - protein, 13 aa, Homo sapiens
  CDR3 for alpha chain variable domain of TCR clone 169100 (TRAV29/DV5, TRAJ31)
CAASLNNNARLMF

SEQ ID NO: 338200 - protein, 12 aa, Homo sapiens
  CDR3 for beta chain variable domain of TCR clone 169100 (TRBV14, TRBJ2-7)
CASSSLKGEQYF

SEQ ID NO: 338201 - protein, 16 aa, Homo sapiens
  CDR3 for alpha chain variable domain of TCR clone 169101 (TRAV26-2, TRAJ48)
CILRPPFNFGNEKLTF

SEQ ID NO: 338202 - protein, 15 aa, Homo sapiens
  CDR3 for beta chain variable domain of TCR clone 169101 (TRBV20-1, TRBJ2-3)
CSARVEGTYTDTHYF

SEQ ID NO: 338203 - protein, 13 aa, Homo sapiens
  CDR3 for alpha chain variable domain of TCR clone 169102 (TRAV8-3, TRAJ28)
CAVGAVGCYQLTF

SEQ ID NO: 338204 - protein, 15 aa, Homo sapiens
  CDR3 for beta chain variable domain of TCR clone 169102 (TRBV7-9, TRBJ1-5)
CASSQGHQHNQPQHF

SEQ ID NO: 338205 - protein, 16 aa, Homo sapiens
  CDR3 for alpha chain variable domain of TCR clone 169103 (TRAV16, TRAJ4)
FALSRMFSGGYNKLIF

SEQ ID NO: 338206 - protein, 17 aa, Homo sapiens
  CDR3 for beta chain variable domain of TCR clone 169103 (TRBV25-1, TRBJ2-1)
CASSAYGQGRGVYEQFF

SEQ ID NO: 338207 - protein, 17 aa, Homo sapiens
  CDR3 for alpha chain variable domain of TCR clone 169104 (TRAV3, TRAJ6)
CAVRDGPRAGGSYIPTF

SEQ ID NO: 338208 - protein, 14 aa, Homo sapiens
  CDR3 for beta chain variable domain of TCR clone 169104 (TRBV15, TRBJ2-3)
CATRSGTSTDTQYV

SEQ ID NO: 338209 - protein, 20 aa, Homo sapiens
  CDR3 for alpha chain variable domain of TCR clone 169105 (TRAV12-1, TRAJ42)
SSVIQPPTSVTGGSQGNLIF

SEQ ID NO: 338210 - protein, 18 aa, Homo sapiens
  CDR3 for beta chain variable domain of TCR clone 169105 (TRBV11-2, TRBJ2-3)
CASSFGGASRGAPNTQYF

SEQ ID NO: 338211 - protein, 12 aa, Homo sapiens
  CDR3 for alpha chain variable domain of TCR clone 169106 (TRAV1-2, TRAJ29)
CAVPSGNTPLVF

SEQ ID NO: 338212 - protein, 14 aa, Homo sapiens
  CDR3 for beta chain variable domain of TCR clone 169106 (TRBV10-3, TRBJ2-5)
CAISERDYQETQYF

SEQ ID NO: 338213 - protein, 15 aa, Homo sapiens
  CDR3 for alpha chain variable domain of TCR clone 169107 (TRAV8-3, TRAJ11)
CAVGLLNSGYSTLTF

SEQ ID NO: 338214 - protein, 15 aa, Homo sapiens
  CDR3 for beta chain variable domain of TCR clone 169107 (TRBV7-9, TRBJ1-2)
CASSLVSGGDYGYTF

SEQ ID NO: 338215 - protein, 18 aa, Homo sapiens
  CDR3 for alpha chain variable domain of TCR clone 169108 (TRAV13-1, TRAJ52)
CAAKKPNAGVTSYGKLTF

SEQ ID NO: 338216 - protein, 15 aa, Homo sapiens
  CDR3 for beta chain variable domain of TCR clone 169108 (TRBV6-1, TRBJ2-3)
CASSERGGITDTQYF

SEQ ID NO: 338217 - protein, 14 aa, Homo sapiens
  CDR3 for alpha chain variable domain of TCR clone 169109 (TRAV12-2, TRAJ17)
CAVNIKAAGNKLTF

SEQ ID NO: 338218 - protein, 13 aa, Homo sapiens
  CDR3 for beta chain variable domain of TCR clone 169109 (TRBV11-2, TRBJ1-5)
CASSFGRNQPQHF

SEQ ID NO: 338219 - protein, 14 aa, Homo sapiens
  CDR3 for alpha chain variable domain of TCR clone 169110 (TRAV8-3, TRAJ33)
CAVAASDSNYQLIW

SEQ ID NO: 338220 - protein, 14 aa, Homo sapiens
  CDR3 for beta chain variable domain of TCR clone 169110 (TRBV7-2, TRBJ2-7)
CASRSQGAAYEHYF

SEQ ID NO: 338221 - protein, 14 aa, Homo sapiens
  CDR3 for alpha chain variable domain of TCR clone 169111 (TRAV12-2, TRAJ9)
CAVRVNTGGFKTIF

SEQ ID NO: 338222 - protein, 13 aa, Homo sapiens
  CDR3 for beta chain variable domain of TCR clone 169111 (TRBV4-2, TRBJ1-1)
CASSQAGNTEAFF

SEQ ID NO: 338223 - protein, 13 aa, Homo sapiens
  CDR3 for alpha chain variable domain of TCR clone 169112 (TRAV1-1, TRAJ9)
CAAKYTGGFNTIF

SEQ ID NO: 338224 - protein, 14 aa, Homo sapiens
  CDR3 for beta chain variable domain of TCR clone 169112 (TRBV20-1, TRBJ2-1)
CSAQIGGSANEQFF

SEQ ID NO: 338225 - protein, 13 aa, Homo sapiens
  CDR3 for alpha chain variable domain of TCR clone 169113 (TRAV22, TRAJ44)
CALNPGTASKLTF

SEQ ID NO: 338226 - protein, 15 aa, Homo sapiens
  CDR3 for beta chain variable domain of TCR clone 169113 (TRBV7-2, TRBJ2-3)
CASSLASARTDTQYF

SEQ ID NO: 338227 - protein, 14 aa, Homo sapiens
  CDR3 for alpha chain variable domain of TCR clone 169114 (TRAV26-1, TRAJ38)
CIADNAGNNRKLIW

SEQ ID NO: 338228 - protein, 15 aa, Homo sapiens
  CDR3 for beta chain variable domain of TCR clone 169114 (TRBV18, TRBJ2-1)
CASSPPSAAYNEQFF

SEQ ID NO: 338229 - protein, 14 aa, Homo sapiens
  CDR3 for alpha chain variable domain of TCR clone 169115 (TRAV8-4, TRAJ54)
CAVSEVLGAQQLVF

SEQ ID NO: 338230 - protein, 13 aa, Homo sapiens
  CDR3 for beta chain variable domain of TCR clone 169115 (TRBV27, TRBJ2-7)
CASSFVSSYEQYF

SEQ ID NO: 338231 - protein, 11 aa, Homo sapiens
  CDR3 for alpha chain variable domain of TCR clone 169116 (TRAV21, TRAJ31)
CAVSDNARLMF

SEQ ID NO: 338232 - protein, 16 aa, Homo sapiens
  CDR3 for beta chain variable domain of TCR clone 169116 (TRBV11-2, TRBJ2-7)
CASSSSLTSGTYEQYF

SEQ ID NO: 338233 - protein, 16 aa, Homo sapiens
  CDR3 for alpha chain variable domain of TCR clone 169117 (TRAV3, TRAJ18)
CAVRDGRGSTLGRLYF

SEQ ID NO: 338234 - protein, 15 aa, Homo sapiens
  CDR3 for beta chain variable domain of TCR clone 169117 (TRBV7-9, TRBJ1-6)
CASRSPGRGNSPLHF

SEQ ID NO: 338235 - protein, 13 aa, Homo sapiens
  CDR3 for alpha chain variable domain of TCR clone 169118 (TRAV3, TRAJ8)
CAVRLTGFQKLVF

SEQ ID NO: 338236 - protein, 12 aa, Homo sapiens
  CDR3 for beta chain variable domain of TCR clone 169118 (TRBV2, TRBJ1-2)
CASSGQTYGYTF

SEQ ID NO: 338237 - protein, 11 aa, Homo sapiens
  CDR3 for alpha chain variable domain of TCR clone 169119 (TRAV13-1, TRAJ6)
CATLGSYIPTF

SEQ ID NO: 338238 - protein, 15 aa, Homo sapiens
  CDR3 for beta chain variable domain of TCR clone 169119 (TRBV6-6, TRBJ2-1)
CTSVPAVCTRDEQFF

SEQ ID NO: 338239 - protein, 10 aa, Homo sapiens
  CDR3 for alpha chain variable domain of TCR clone 169120 (TRAV2, TRAJ34)
CAVVNDKPIF

SEQ ID NO: 338240 - protein, 13 aa, Homo sapiens
  CDR3 for beta chain variable domain of TCR clone 169120 (TRBV4-2, TRBJ1-1)
CASSQAGNTEAFF

SEQ ID NO: 338241 - protein, 14 aa, Homo sapiens
  CDR3 for alpha chain variable domain of TCR clone 169121 (TRAV13-1, TRAJ9)
CGASALTGGFKTIF

SEQ ID NO: 338242 - protein, 13 aa, Homo sapiens
  CDR3 for beta chain variable domain of TCR clone 169121 (TRBV20-1, TRBJ1-1)
CSAGTVGNTEAFF

SEQ ID NO: 338243 - protein, 16 aa, Homo sapiens
  CDR3 for alpha chain variable domain of TCR clone 169122 (TRAV16, TRAJ24)
CALGGGSTDSWGKLQF

SEQ ID NO: 338244 - protein, 15 aa, Homo sapiens
  CDR3 for beta chain variable domain of TCR clone 169122 (TRBV27, TRBJ2-1)
CASSNGGGSSNEQFF

SEQ ID NO: 338245 - protein, 14 aa, Homo sapiens
  CDR3 for alpha chain variable domain of TCR clone 169123 (TRAV8-2, TRAJ6)
CVVISAGGSYIPTF

SEQ ID NO: 338246 - protein, 16 aa, Homo sapiens
  CDR3 for beta chain variable domain of TCR clone 169123 (TRBV7-6, TRBJ2-6)
CASSVAGLSGANVLTF

SEQ ID NO: 338247 - protein, 11 aa, Homo sapiens
  CDR3 for alpha chain variable domain of TCR clone 169124 (TRAV2, TRAJ13)
CASGGYQKVTF

SEQ ID NO: 338248 - protein, 13 aa, Homo sapiens
  CDR3 for beta chain variable domain of TCR clone 169124 (TRBV7-2, TRBJ2-2)
CTSSSVRAGELFF

SEQ ID NO: 338249 - protein, 15 aa, Homo sapiens
  CDR3 for alpha chain variable domain of TCR clone 169125 (TRAV21, TRAJ53)
CATLNSGGSNYKLTF

SEQ ID NO: 338250 - protein, 16 aa, Homo sapiens
  CDR3 for beta chain variable domain of TCR clone 169125 (TRBV9, TRBJ2-1)
CASSIGGGGNYNEQFF

SEQ ID NO: 338251 - protein, 14 aa, Homo sapiens
  CDR3 for alpha chain variable domain of TCR clone 169126 (TRAV27, TRAJ36)
CAGPPKRGANTLFF

SEQ ID NO: 338252 - protein, 15 aa, Homo sapiens
  CDR3 for beta chain variable domain of TCR clone 169126 (TRBV18, TRBJ2-7)
CASSPASTPNYEQYF

SEQ ID NO: 338253 - protein, 13 aa, Homo sapiens
  CDR3 for alpha chain variable domain of TCR clone 169127 (TRAV2, TRAJ24)
CAVTTDSLGKLQF

SEQ ID NO: 338254 - protein, 14 aa, Homo sapiens
  CDR3 for beta chain variable domain of TCR clone 169127 (TRBV13, TRBJ2-5)
CASSLGRGQETQYF

SEQ ID NO: 338255 - protein, 12 aa, Homo sapiens
  CDR3 for alpha chain variable domain of TCR clone 169128 (TRAV12-2, TRAJ43)
CAVNVNNNDMRF

SEQ ID NO: 338256 - protein, 14 aa, Homo sapiens
  CDR3 for beta chain variable domain of TCR clone 169128 (TRBV25-1, TRBJ2-2)
CAISELGLPGELFF

SEQ ID NO: 338257 - protein, 16 aa, Homo sapiens
  CDR3 for alpha chain variable domain of TCR clone 169129 (TRAV20, TRAJ28)
CAVRDPSGAGSYQLTF

SEQ ID NO: 338258 - protein, 14 aa, Homo sapiens
  CDR3 for beta chain variable domain of TCR clone 169129 (TRBV11-2, TRBJ2-5)
CASSRTGGIETQYF

SEQ ID NO: 338259 - protein, 14 aa, Homo sapiens
  CDR3 for alpha chain variable domain of TCR clone 169130 (TRAV12-2, TRAJ40)
CAVKIPSGTYKYIF

SEQ ID NO: 338260 - protein, 14 aa, Homo sapiens
  CDR3 for beta chain variable domain of TCR clone 169130 (TRBV20-1, TRBJ1-1)
CSAQTRIGGTEACF

SEQ ID NO: 338261 - protein, 11 aa, Homo sapiens
  CDR3 for alpha chain variable domain of TCR clone 169131 (TRAV2, TRAJ13)
CASGGYQKATF

SEQ ID NO: 338262 - protein, 16 aa, Homo sapiens
  CDR3 for beta chain variable domain of TCR clone 169131 (TRBV19, TRBJ2-1)
CASSMGGGSSYNEQFF

SEQ ID NO: 338263 - protein, 14 aa, Homo sapiens
  CDR3 for alpha chain variable domain of TCR clone 169132 (TRAV13-2, TRAJ43)
CAEIPTYNNNDMRF

SEQ ID NO: 338264 - protein, 12 aa, Homo sapiens
  CDR3 for beta chain variable domain of TCR clone 169132 (TRBV7-8, TRBJ2-7)
CASSLGDREQYF

SEQ ID NO: 338265 - protein, 15 aa, Homo sapiens
  CDR3 for alpha chain variable domain of TCR clone 169133 (TRAV8-2, TRAJ40)
CVVLGTTSGTYKYIF

SEQ ID NO: 338266 - protein, 15 aa, Homo sapiens
  CDR3 for beta chain variable domain of TCR clone 169133 (TRBV2, TRBJ2-7)
CASSEGLARSYEQYF

SEQ ID NO: 338267 - protein, 14 aa, Homo sapiens
  CDR3 for alpha chain variable domain of TCR clone 169134 (TRAV12-3, TRAJ13)
CAMRNSGGYQKVIF

SEQ ID NO: 338268 - protein, 14 aa, Homo sapiens
  CDR3 for beta chain variable domain of TCR clone 169134 (TRBV4-1, TRBJ1-6)
CASSPGSDSSPLHF

SEQ ID NO: 338269 - protein, 14 aa, Homo sapiens
  CDR3 for alpha chain variable domain of TCR clone 169135 (TRAV3, TRAJ34)
CAVRAPGNTDKLIF

SEQ ID NO: 338270 - protein, 16 aa, Homo sapiens
  CDR3 for beta chain variable domain of TCR clone 169135 (TRBV7-3, TRBJ2-5)
CASIQPGGSVQETQYF

SEQ ID NO: 338271 - protein, 17 aa, Homo sapiens
  CDR3 for alpha chain variable domain of TCR clone 169136 (TRAV3, TRAJ6)
CAVRDGPRAGGSYMPTF

SEQ ID NO: 338272 - protein, 15 aa, Homo sapiens
  CDR3 for beta chain variable domain of TCR clone 169136 (TRBV11-3, TRBJ2-7)
CASSPGPASSYEQYF

SEQ ID NO: 338273 - protein, 15 aa, Homo sapiens
  CDR3 for alpha chain variable domain of TCR clone 169137 (TRAV20, TRAJ50)
CAVRQMKTSYDKVIF

SEQ ID NO: 338274 - protein, 13 aa, Homo sapiens
  CDR3 for beta chain variable domain of TCR clone 169137 (TRBV7-9, TRBJ1-2)
CASSLKQNYGYTF

SEQ ID NO: 338275 - protein, 15 aa, Homo sapiens
  CDR3 for alpha chain variable domain of TCR clone 169138 (TRAV10, TRAJ6)
CVVRPRTGGSYITTF

SEQ ID NO: 338276 - protein, 15 aa, Homo sapiens
  CDR3 for beta chain variable domain of TCR clone 169138 (TRBV20-1, TRBJ2-7)
CSARDRVSGMDEQYF

SEQ ID NO: 338277 - protein, 14 aa, Homo sapiens
  CDR3 for alpha chain variable domain of TCR clone 169139 (TRAV13-1, TRAJ9)
CAASALTGGFKTIF

SEQ ID NO: 338278 - protein, 13 aa, Homo sapiens
  CDR3 for beta chain variable domain of TCR clone 169139 (TRBV20-1, TRBJ1-1)
CSAGTVGNTAAFF

SEQ ID NO: 338279 - protein, 14 aa, Homo sapiens
  CDR3 for alpha chain variable domain of TCR clone 169140 (TRAV8-1, TRAJ5)
CAVRTDTGRRALTF

SEQ ID NO: 338280 - protein, 14 aa, Homo sapiens
  CDR3 for beta chain variable domain of TCR clone 169140 (TRBV7-8, TRBJ2-3)
CASSFPDEQDTQYF

SEQ ID NO: 338281 - protein, 14 aa, Homo sapiens
  CDR3 for alpha chain variable domain of TCR clone 169141 (TRAV36/DV7, TRAJ32)
CAVGHVGATNKLIF

SEQ ID NO: 338282 - protein, 15 aa, Homo sapiens
  CDR3 for beta chain variable domain of TCR clone 169141 (TRBV13, TRBJ1-2)
CASSLGRQPGYGYTF

SEQ ID NO: 338283 - protein, 14 aa, Homo sapiens
  CDR3 for alpha chain variable domain of TCR clone 169142 (TRAV12-2, TRAJ5)
CAVNRSTGRRALTF

SEQ ID NO: 338284 - protein, 15 aa, Homo sapiens
  CDR3 for beta chain variable domain of TCR clone 169142 (TRBV19, TRBJ2-1)
CASSIQATSYNEQFF

SEQ ID NO: 338285 - protein, 17 aa, Homo sapiens
  CDR3 for alpha chain variable domain of TCR clone 169143 (TRAV3, TRAJ6)
CAVRDGTRAGGSYIPTF

SEQ ID NO: 338286 - protein, 18 aa, Homo sapiens
  CDR3 for beta chain variable domain of TCR clone 169143 (TRBV7-3, TRBJ2-3)
CASSSTGTYPGSTDTQYF

SEQ ID NO: 338287 - protein, 14 aa, Homo sapiens
  CDR3 for alpha chain variable domain of TCR clone 169144 (TRAV12-3, TRAJ10)
SHLPLTGGGNKLTF

SEQ ID NO: 338288 - protein, 13 aa, Homo sapiens
  CDR3 for beta chain variable domain of TCR clone 169144 (TRBV24-1, TRBJ2-1)
CATSAGPYNEQFF

SEQ ID NO: 338289 - protein, 14 aa, Homo sapiens
  CDR3 for alpha chain variable domain of TCR clone 169145 (TRAV1-2, TRAJ8)
CAVREDTGFQKLVF

SEQ ID NO: 338290 - protein, 14 aa, Homo sapiens
  CDR3 for beta chain variable domain of TCR clone 169145 (TRBV19, TRBJ2-1)
CASPTVVLSGEQSF

SEQ ID NO: 338291 - protein, 10 aa, Homo sapiens
  CDR3 for alpha chain variable domain of TCR clone 169146 (TRAV8-4, TRAJ43)
CAVSADDMRF

SEQ ID NO: 338292 - protein, 13 aa, Homo sapiens
  CDR3 for beta chain variable domain of TCR clone 169146 (TRBV12-4, TRBJ2-5)
CARSPGTEETQYF

SEQ ID NO: 338293 - protein, 16 aa, Homo sapiens
  CDR3 for alpha chain variable domain of TCR clone 169147 (TRAV16, TRAJ52)
CALSGVGGTSSGKLTF

SEQ ID NO: 338294 - protein, 14 aa, Homo sapiens
  CDR3 for beta chain variable domain of TCR clone 169147 (TRBV19, TRBJ1-2)
CASSLQGQAYGYTF

SEQ ID NO: 338295 - protein, 14 aa, Homo sapiens
  CDR3 for alpha chain variable domain of TCR clone 169148 (TRAV12-2, TRAJ13)
CAVKKTGGYQKVTF

SEQ ID NO: 338296 - protein, 13 aa, Homo sapiens
  CDR3 for beta chain variable domain of TCR clone 169148 (TRBV20-1, TRBJ2-7)
CSLLGEGWPEVLL

SEQ ID NO: 338297 - protein, 14 aa, Homo sapiens
  CDR3 for alpha chain variable domain of TCR clone 169149 (TRAV23/DV6, TRAJ8)
CAASKATGFQKLVF

SEQ ID NO: 338298 - protein, 15 aa, Homo sapiens
  CDR3 for beta chain variable domain of TCR clone 169149 (TRBV28, TRBJ2-3)
CASSPDRKGANTQYF

SEQ ID NO: 338299 - protein, 14 aa, Homo sapiens
  CDR3 for alpha chain variable domain of TCR clone 169150 (TRAV27, TRAJ53)
CAGGDGGSNYKLTF

SEQ ID NO: 338300 - protein, 13 aa, Homo sapiens
  CDR3 for beta chain variable domain of TCR clone 169150 (TRBV19, TRBJ1-2)
CASSVPGQDGYTF

SEQ ID NO: 338301 - protein, 17 aa, Homo sapiens
  CDR3 for alpha chain variable domain of TCR clone 169151 (TRAV36/DV7, TRAJ52)
CAVAQRAGGTSYGKLTF

SEQ ID NO: 338302 - protein, 13 aa, Homo sapiens
  CDR3 for beta chain variable domain of TCR clone 169151 (TRBV29-1, TRBJ2-2)
CSTAGVNTGELFF

SEQ ID NO: 338303 - protein, 14 aa, Homo sapiens
  CDR3 for alpha chain variable domain of TCR clone 169152 (TRAV23/DV6, TRAJ4)
CAANHSGGYNKLIF

SEQ ID NO: 338304 - protein, 11 aa, Homo sapiens
  CDR3 for beta chain variable domain of TCR clone 169152 (TRBV7-9, TRBJ2-3)
CASSPTDTQYF

SEQ ID NO: 338305 - protein, 20 aa, Homo sapiens
  CDR3 for alpha chain variable domain of TCR clone 169153 (TRAV12-2, TRAJ52)
SPVIQPPARAGGTSYGKLTF

SEQ ID NO: 338306 - protein, 16 aa, Homo sapiens
  CDR3 for beta chain variable domain of TCR clone 169153 (TRBV15, TRBJ1-2)
CATSRGPRTGGRGYTF

SEQ ID NO: 338307 - protein, 13 aa, Homo sapiens
  CDR3 for alpha chain variable domain of TCR clone 169154 (TRAV13-1, TRAJ48)
CAAASFGYEKLTF

SEQ ID NO: 338308 - protein, 12 aa, Homo sapiens
  CDR3 for beta chain variable domain of TCR clone 169154 (TRBV19, TRBJ1-1)
CASMNRYTEAFF

SEQ ID NO: 338309 - protein, 13 aa, Homo sapiens
  CDR3 for alpha chain variable domain of TCR clone 169155 (TRAV8-3, TRAJ28)
CAVGAVGSYQLTF

SEQ ID NO: 338310 - protein, 13 aa, Homo sapiens
  CDR3 for beta chain variable domain of TCR clone 169155 (TRBV7-2, TRBJ1-6)
CASSLKVDSPLHF

SEQ ID NO: 338311 - protein, 14 aa, Homo sapiens
  CDR3 for alpha chain variable domain of TCR clone 169156 (TRAV20, TRAJ56)
CAVQFGGANSKLTV

SEQ ID NO: 338312 - protein, 14 aa, Homo sapiens
  CDR3 for beta chain variable domain of TCR clone 169156 (TRBV20-1, TRBJ2-7)
CSANRGRRSYEQYF

SEQ ID NO: 338313 - protein, 19 aa, Homo sapiens
  CDR3 for alpha chain variable domain of TCR clone 169157 (TRAV38-1, TRAJ53)
CAFMKHGLESGGSNYKLKF

SEQ ID NO: 338314 - protein, 13 aa, Homo sapiens
  CDR3 for beta chain variable domain of TCR clone 169157 (TRBV19, TRBJ2-7)
CASSSRQSYEQYF

SEQ ID NO: 338315 - protein, 15 aa, Homo sapiens
  CDR3 for alpha chain variable domain of TCR clone 169158 (TRAV3, TRAJ4)
CAVRDGTGGYNKLIF

SEQ ID NO: 338316 - protein, 11 aa, Homo sapiens
  CDR3 for beta chain variable domain of TCR clone 169158 (TRBV6-5, TRBJ2-2)
CASSRTGEPFF

SEQ ID NO: 338317 - protein, 13 aa, Homo sapiens
  CDR3 for alpha chain variable domain of TCR clone 169159 (TRAV27, TRAJ40)
CAGPPSGTYKYIF

SEQ ID NO: 338318 - protein, 14 aa, Homo sapiens
  CDR3 for beta chain variable domain of TCR clone 169159 (TRBV20-1, TRBJ2-4)
CSARDRGQGGSQYF

SEQ ID NO: 338319 - protein, 13 aa, Homo sapiens
  CDR3 for alpha chain variable domain of TCR clone 169160 (TRAV13-2, TRAJ48)
CAEMDFGNEKLTF

SEQ ID NO: 338320 - protein, 15 aa, Homo sapiens
  CDR3 for beta chain variable domain of TCR clone 169160 (TRBV7-9, TRBJ1-6)
CASSSPGRGNSPLVF

SEQ ID NO: 338321 - protein, 11 aa, Homo sapiens
  CDR3 for alpha chain variable domain of TCR clone 169161 (TRAV12-2, TRAJ31)
CAVTRWARLMF

SEQ ID NO: 338322 - protein, 15 aa, Homo sapiens
  CDR3 for beta chain variable domain of TCR clone 169161 (TRBV19, TRBJ2-7)
CASSIVGGLVNEQYF

SEQ ID NO: 338323 - protein, 16 aa, Homo sapiens
  CDR3 for alpha chain variable domain of TCR clone 169162 (TRAV14/DV4, TRAJ53)
CAMREGGGGSNYKLTF

SEQ ID NO: 338324 - protein, 12 aa, Homo sapiens
  CDR3 for beta chain variable domain of TCR clone 169162 (TRBV12-4, TRBJ2-1)
CASSPGRNEQFF

SEQ ID NO: 338325 - protein, 14 aa, Homo sapiens
  CDR3 for alpha chain variable domain of TCR clone 169163 (TRAV35, TRAJ13)
CAGSPSGGNQKVTF

SEQ ID NO: 338326 - protein, 17 aa, Homo sapiens
  CDR3 for beta chain variable domain of TCR clone 169163 (TRBV18, TRBJ1-5)
CQLTTCRVRQNNQPQHF

SEQ ID NO: 338327 - protein, 12 aa, Homo sapiens
  CDR3 for alpha chain variable domain of TCR clone 169164 (TRAV17, TRAJ4)
CATDGGYNKLIF

SEQ ID NO: 338328 - protein, 12 aa, Homo sapiens
  CDR3 for beta chain variable domain of TCR clone 169164 (TRBV11-2, TRBJ2-1)
CASSPGNNEQFF

SEQ ID NO: 338329 - protein, 11 aa, Homo sapiens
  CDR3 for alpha chain variable domain of TCR clone 169165 (TRAV4, TRAJ31)
SLVGDNARLMF

SEQ ID NO: 338330 - protein, 16 aa, Homo sapiens
  CDR3 for beta chain variable domain of TCR clone 169165 (TRBV7-2, TRBJ2-5)
CASSSKWLSGQETQYF

SEQ ID NO: 338331 - protein, 13 aa, Homo sapiens
  CDR3 for alpha chain variable domain of TCR clone 169166 (TRAV29/DV5, TRAJ47)
CAASAEYGNKLVF

SEQ ID NO: 338332 - protein, 12 aa, Homo sapiens
  CDR3 for beta chain variable domain of TCR clone 169166 (TRBV11-2, TRBJ2-1)
CASSPGNNEQFF

SEQ ID NO: 338333 - protein, 15 aa, Homo sapiens
  CDR3 for alpha chain variable domain of TCR clone 169167 (TRAV12-1, TRAJ44)
CVVFVNTGTASKLTF

SEQ ID NO: 338334 - protein, 13 aa, Homo sapiens
  CDR3 for beta chain variable domain of TCR clone 169167 (TRBV19, TRBJ1-1)
RASSPSNGGEAFF

SEQ ID NO: 338335 - protein, 10 aa, Homo sapiens
  CDR3 for alpha chain variable domain of TCR clone 169168 (TRAV12-3, TRAJ49)
CAMNDDQFYF

SEQ ID NO: 338336 - protein, 14 aa, Homo sapiens
  CDR3 for beta chain variable domain of TCR clone 169168 (TRBV7-9, TRBJ2-7)
CASSLSQGSYEQYF

SEQ ID NO: 338337 - protein, 15 aa, Homo sapiens
  CDR3 for alpha chain variable domain of TCR clone 169169 (TRAV20, TRAJ43)
CAVQAGKSSNNDIGF

SEQ ID NO: 338338 - protein, 14 aa, Homo sapiens
  CDR3 for beta chain variable domain of TCR clone 169169 (TRBV27, TRBJ2-1)
CASRHLGGGKEQFF

SEQ ID NO: 338339 - protein, 12 aa, Homo sapiens
  CDR3 for alpha chain variable domain of TCR clone 169170 (TRAV12-2, TRAJ8)
CAVNTGFQKLEF

SEQ ID NO: 338340 - protein, 15 aa, Homo sapiens
  CDR3 for beta chain variable domain of TCR clone 169170 (TRBV7-8, TRBJ1-5)
CASSLERRGLEPQHF

SEQ ID NO: 338341 - protein, 12 aa, Homo sapiens
  CDR3 for alpha chain variable domain of TCR clone 169171 (TRAV21, TRAJ23)
CAVMLQGGKLIF

SEQ ID NO: 338342 - protein, 14 aa, Homo sapiens
  CDR3 for beta chain variable domain of TCR clone 169171 (TRBV4-2, TRBJ2-1)
CASGLDRAYNEQFF

SEQ ID NO: 338343 - protein, 14 aa, Homo sapiens
  CDR3 for alpha chain variable domain of TCR clone 169172 (TRAV26-1, TRAJ38)
CIADNAGNNRKLIW

SEQ ID NO: 338344 - protein, 13 aa, Homo sapiens
  CDR3 for beta chain variable domain of TCR clone 169172 (TRBV20-1, TRBJ1-1)
CSARGGGNTQAFF

SEQ ID NO: 338345 - protein, 17 aa, Homo sapiens
  CDR3 for alpha chain variable domain of TCR clone 169173 (TRAV1-1, TRAJ4)
CALYNKLIFGAGTRLAV

SEQ ID NO: 338346 - protein, 18 aa, Homo sapiens
  CDR3 for beta chain variable domain of TCR clone 169173 (TRBV27, TRBJ2-7)
CASRAGQFFPGARDGQYF

SEQ ID NO: 338347 - protein, 20 aa, Homo sapiens
  CDR3 for alpha chain variable domain of TCR clone 169174 (TRAV8-3, TRAJ44)
LSTSVLWVRLGTGTASKLTF

SEQ ID NO: 338348 - protein, 15 aa, Homo sapiens
  CDR3 for beta chain variable domain of TCR clone 169174 (TRBV6-5, TRBJ1-2)
CASSYSQAFNYGYTF

SEQ ID NO: 338349 - protein, 17 aa, Homo sapiens
  CDR3 for alpha chain variable domain of TCR clone 169175 (TRAV3, TRAJ6)
CAVRDGPRAGGSYIPTF

SEQ ID NO: 338350 - protein, 13 aa, Homo sapiens
  CDR3 for beta chain variable domain of TCR clone 169175 (TRBV15, TRBJ2-7)
CATSTAGHYEQYF

SEQ ID NO: 338351 - protein, 13 aa, Homo sapiens
  CDR3 for alpha chain variable domain of TCR clone 169176 (TRAV3, TRAJ43)
CAVKARNNNDMRF

SEQ ID NO: 338352 - protein, 13 aa, Homo sapiens
  CDR3 for beta chain variable domain of TCR clone 169176 (TRBV9, TRBJ2-5)
CASSPAGLGTQYF

SEQ ID NO: 338353 - protein, 14 aa, Homo sapiens
  CDR3 for alpha chain variable domain of TCR clone 169177 (TRAV17, TRAJ15)
CATGPNQAGTALIF

SEQ ID NO: 338354 - protein, 15 aa, Homo sapiens
  CDR3 for beta chain variable domain of TCR clone 169177 (TRBV11-2, TRBJ2-2)
CASSSDRGNAEELFF

SEQ ID NO: 338355 - protein, 18 aa, Homo sapiens
  CDR3 for alpha chain variable domain of TCR clone 169178 (TRAV21, TRAJ52)
CAVRPSPAGGTSYGKLTF

SEQ ID NO: 338356 - protein, 17 aa, Homo sapiens
  CDR3 for beta chain variable domain of TCR clone 169178 (TRBV13, TRBJ2-3)
CASSLSRVAGGEEYAVF

SEQ ID NO: 338357 - protein, 11 aa, Homo sapiens
  CDR3 for alpha chain variable domain of TCR clone 169179 (TRAV12-1, TRAJ26)
CVVAYGQNIVF

SEQ ID NO: 338358 - protein, 15 aa, Homo sapiens
  CDR3 for beta chain variable domain of TCR clone 169179 (TRBV12-4, TRBJ2-5)
CASSGTGQAQETQYF

SEQ ID NO: 338359 - protein, 11 aa, Homo sapiens
  CDR3 for alpha chain variable domain of TCR clone 169180 (TRAV13-1, TRAJ20)
CSPHGIYKLSF

SEQ ID NO: 338360 - protein, 14 aa, Homo sapiens
  CDR3 for beta chain variable domain of TCR clone 169180 (TRBV28, TRBJ2-5)
CASTGAGGVETQYF

SEQ ID NO: 338361 - protein, 17 aa, Homo sapiens
  CDR3 for alpha chain variable domain of TCR clone 169181 (TRAV12-3, TRAJ6)
CAMSARGGAGGSYIPKF

SEQ ID NO: 338362 - protein, 15 aa, Homo sapiens
  CDR3 for beta chain variable domain of TCR clone 169181 (TRBV9, TRBJ1-6)
CASSVAGTGDSPLHF

SEQ ID NO: 338363 - protein, 12 aa, Homo sapiens
  CDR3 for alpha chain variable domain of TCR clone 169182 (TRAV38-1, TRAJ20)
CAFIWNDYKLSF

SEQ ID NO: 338364 - protein, 17 aa, Homo sapiens
  CDR3 for beta chain variable domain of TCR clone 169182 (TRBV7-3, TRBJ2-3)
CASSLMKRMRGADTQYF

SEQ ID NO: 338365 - protein, 11 aa, Homo sapiens
  CDR3 for alpha chain variable domain of TCR clone 169183 (TRAV12-3, TRAJ20)
CAMSYDYKLSF

SEQ ID NO: 338366 - protein, 14 aa, Homo sapiens
  CDR3 for beta chain variable domain of TCR clone 169183 (TRBV7-2, TRBJ2-7)
CASSPKTSVYEQYF

SEQ ID NO: 338367 - protein, 13 aa, Homo sapiens
  CDR3 for alpha chain variable domain of TCR clone 169184 (TRAV17, TRAJ21)
CATDGGNFNKFYF

SEQ ID NO: 338368 - protein, 17 aa, Homo sapiens
  CDR3 for beta chain variable domain of TCR clone 169184 (TRBV11-2, TRBJ2-1)
CASSLYPPGVEYNEQFF

SEQ ID NO: 338369 - protein, 14 aa, Homo sapiens
  CDR3 for alpha chain variable domain of TCR clone 169185 (TRAV8-2, TRAJ4)
CVVSPSGGYNKLLF

SEQ ID NO: 338370 - protein, 11 aa, Homo sapiens
  CDR3 for beta chain variable domain of TCR clone 169185 (TRBV12-4, TRBJ2-2)
CASSSAGELFF

SEQ ID NO: 338371 - protein, 12 aa, Homo sapiens
  CDR3 for alpha chain variable domain of TCR clone 169186 (TRAV13-1, TRAJ53)
AASGGSNYKLTF

SEQ ID NO: 338372 - protein, 14 aa, Homo sapiens
  CDR3 for beta chain variable domain of TCR clone 169186 (TRBV7-2, TRBJ1-5)
CASSTQGAGQPQHF

SEQ ID NO: 338373 - protein, 15 aa, Homo sapiens
  CDR3 for alpha chain variable domain of TCR clone 169187 (TRAV21, TRAJ40)
CAVRPQTSGTYKYIF

SEQ ID NO: 338374 - protein, 15 aa, Homo sapiens
  CDR3 for beta chain variable domain of TCR clone 169187 (TRBV5-1, TRBJ2-1)
FASSPPRAPYNEQSF

SEQ ID NO: 338375 - protein, 16 aa, Homo sapiens
  CDR3 for alpha chain variable domain of TCR clone 169188 (TRAV12-3, TRAJ53)
CAMGPGSGGSNYKLTF

SEQ ID NO: 338376 - protein, 13 aa, Homo sapiens
  CDR3 for beta chain variable domain of TCR clone 169188 (TRBV19, TRBJ1-2)
CASSVLGQDGYTF

SEQ ID NO: 338377 - protein, 14 aa, Homo sapiens
  CDR3 for alpha chain variable domain of TCR clone 169189 (TRAV1-2, TRAJ16)
CAVNRFSDAQKLLF

SEQ ID NO: 338378 - protein, 13 aa, Homo sapiens
  CDR3 for beta chain variable domain of TCR clone 169189 (TRBV19, TRBJ2-7)
CASSTSGSYEQYF

SEQ ID NO: 338379 - protein, 11 aa, Homo sapiens
  CDR3 for alpha chain variable domain of TCR clone 169190 (TRAV26-1, TRAJ37)
CIVRVGRKLIF

SEQ ID NO: 338380 - protein, 12 aa, Homo sapiens
  CDR3 for beta chain variable domain of TCR clone 169190 (TRBV27, TRBJ2-7)
CASSGGFYEQYF

SEQ ID NO: 338381 - protein, 18 aa, Homo sapiens
  CDR3 for alpha chain variable domain of TCR clone 169191 (TRAV13-1, TRAJ52)
CAASKRSAGGTSYGKLTF

SEQ ID NO: 338382 - protein, 16 aa, Homo sapiens
  CDR3 for beta chain variable domain of TCR clone 169191 (TRBV7-2, TRBJ1-2)
CASSSNQDRRGHGYTF

SEQ ID NO: 338383 - protein, 14 aa, Homo sapiens
  CDR3 for alpha chain variable domain of TCR clone 169192 (TRAV13-1, TRAJ13)
CAASRVGGCQKVTF

SEQ ID NO: 338384 - protein, 17 aa, Homo sapiens
  CDR3 for beta chain variable domain of TCR clone 169192 (TRBV15, TRBJ1-5)
CATSRAPPGTRNQPQHF

SEQ ID NO: 338385 - protein, 16 aa, Homo sapiens
  CDR3 for alpha chain variable domain of TCR clone 169193 (TRAV19, TRAJ4)
CALSGPLVGGYNKLIF

SEQ ID NO: 338386 - protein, 15 aa, Homo sapiens
  CDR3 for beta chain variable domain of TCR clone 169193 (TRBV11-2, TRBJ2-7)
CASSLNYEGVDEQYF

SEQ ID NO: 338387 - protein, 14 aa, Homo sapiens
  CDR3 for alpha chain variable domain of TCR clone 169194 (TRAV1-2, TRAJ16)
CAVNRVSDGQKLLF

SEQ ID NO: 338388 - protein, 14 aa, Homo sapiens
  CDR3 for beta chain variable domain of TCR clone 169194 (TRBV7-2, TRBJ2-7)
CASSPKTSFYEQYF

SEQ ID NO: 338389 - protein, 10 aa, Homo sapiens
  CDR3 for alpha chain variable domain of TCR clone 169195 (TRAV23/DV6, TRAJ57)
CAASSTLSQG

SEQ ID NO: 338390 - protein, 14 aa, Homo sapiens
  CDR3 for beta chain variable domain of TCR clone 169195 (TRBV25-1, TRBJ1-1)
CASTHLGGDAEAFF

SEQ ID NO: 338391 - protein, 14 aa, Homo sapiens
  CDR3 for alpha chain variable domain of TCR clone 169196 (TRAV12-2, TRAJ40)
CAVKIPSGTYKYIF

SEQ ID NO: 338392 - protein, 17 aa, Homo sapiens
  CDR3 for beta chain variable domain of TCR clone 169196 (TRBV25-1, TRBJ2-1)
CASSAYGQGRGVYEQFF

SEQ ID NO: 338393 - protein, 15 aa, Homo sapiens
  CDR3 for alpha chain variable domain of TCR clone 169197 (TRAV13-1, TRAJ52)
CAATSPRTSYGKLTF

SEQ ID NO: 338394 - protein, 16 aa, Homo sapiens
  CDR3 for beta chain variable domain of TCR clone 169197 (TRBV12-5, TRBJ2-5)
CASGPRTSGNQETQYF

SEQ ID NO: 338395 - protein, 14 aa, Homo sapiens
  CDR3 for alpha chain variable domain of TCR clone 169198 (TRAV12-1, TRAJ17)
CVVNYKAAGNKLTF

SEQ ID NO: 338396 - protein, 17 aa, Homo sapiens
  CDR3 for beta chain variable domain of TCR clone 169198 (TRBV20-1, TRBJ2-1)
CSASFSGLAGSYKEQFF

SEQ ID NO: 338397 - protein, 13 aa, Homo sapiens
  CDR3 for alpha chain variable domain of TCR clone 169199 (TRAV3, TRAJ36)
CAVRDTGANNLFF

SEQ ID NO: 338398 - protein, 15 aa, Homo sapiens
  CDR3 for beta chain variable domain of TCR clone 169199 (TRBV27, TRBJ1-5)
CASSLGTGFDQPQHF

SEQ ID NO: 338399 - protein, 13 aa, Homo sapiens
  CDR3 for alpha chain variable domain of TCR clone 169200 (TRAV29/DV5, TRAJ31)
CAASRNNNARLRF

SEQ ID NO: 338400 - protein, 12 aa, Homo sapiens
  CDR3 for beta chain variable domain of TCR clone 169200 (TRBV14, TRBJ2-7)
CASSLYKDEQYF

SEQ ID NO: 338401 - protein, 15 aa, Homo sapiens
  CDR3 for alpha chain variable domain of TCR clone 169201 (TRAV8-4, TRAJ3)
CAVTGENLVQQCFQD

SEQ ID NO: 338402 - protein, 16 aa, Homo sapiens
  CDR3 for beta chain variable domain of TCR clone 169201 (TRBV4-2, TRBJ1-1)
CAISQAGFGMNTEAFF

SEQ ID NO: 338403 - protein, 11 aa, Homo sapiens
  CDR3 for alpha chain variable domain of TCR clone 169202 (TRAV2, TRAJ20)
CAVLNDYKLSF

SEQ ID NO: 338404 - protein, 13 aa, Homo sapiens
  CDR3 for beta chain variable domain of TCR clone 169202 (TRBV7-3, TRBJ2-1)
CASSPVAYNEQFF

SEQ ID NO: 338405 - protein, 12 aa, Homo sapiens
  CDR3 for alpha chain variable domain of TCR clone 169203 (TRAV27, TRAJ9)
CAGESGGFKTIF

SEQ ID NO: 338406 - protein, 15 aa, Homo sapiens
  CDR3 for beta chain variable domain of TCR clone 169203 (TRBV11-3, TRBJ2-3)
CASSAGTVVTNTQYF

SEQ ID NO: 338407 - protein, 15 aa, Homo sapiens
  CDR3 for alpha chain variable domain of TCR clone 169204 (TRAV3, TRAJ22)
CAVRDRGGSARQLTF

SEQ ID NO: 338408 - protein, 10 aa, Homo sapiens
  CDR3 for beta chain variable domain of TCR clone 169204 (TRBV11-2, TRBJ1-1)
QLSLQPAAFF

SEQ ID NO: 338409 - protein, 12 aa, Homo sapiens
  CDR3 for alpha chain variable domain of TCR clone 169205 (TRAV21, TRAJ31)
CAVSPARGRLML

SEQ ID NO: 338410 - protein, 14 aa, Homo sapiens
  CDR3 for beta chain variable domain of TCR clone 169205 (TRBV28, TRBJ2-7)
CASSLLRISYEQYF

SEQ ID NO: 338411 - protein, 16 aa, Homo sapiens
  CDR3 for alpha chain variable domain of TCR clone 169206 (TRAV26-1, TRAJ31)
CIVRPPGLNNNARLMF

SEQ ID NO: 338412 - protein, 11 aa, Homo sapiens
  CDR3 for beta chain variable domain of TCR clone 169206 (TRBV7-8, TRBJ2-7)
CASSLSLEQYF

SEQ ID NO: 338413 - protein, 14 aa, Homo sapiens
  CDR3 for alpha chain variable domain of TCR clone 169207 (TRAV38-1, TRAJ54)
CAFMSPSGAQKLVF

SEQ ID NO: 338414 - protein, 15 aa, Homo sapiens
  CDR3 for beta chain variable domain of TCR clone 169207 (TRBV28, TRBJ2-1)
CQQFRWEWLLNEQFF

SEQ ID NO: 338415 - protein, 14 aa, Homo sapiens
  CDR3 for alpha chain variable domain of TCR clone 169208 (TRAV1-2, TRAJ16)
CAVNRFSDGQKLLF

SEQ ID NO: 338416 - protein, 15 aa, Homo sapiens
  CDR3 for beta chain variable domain of TCR clone 169208 (TRBV7-2, TRBJ1-5)
CASSLGRGAGQPQHF

SEQ ID NO: 338417 - protein, 10 aa, Homo sapiens
  CDR3 for alpha chain variable domain of TCR clone 169209 (TRAV1-2, TRAJ20)
CVPNDYKLSF

SEQ ID NO: 338418 - protein, 13 aa, Homo sapiens
  CDR3 for beta chain variable domain of TCR clone 169209 (TRBV11-2, TRBJ2-2)
CASGRDREEELFF

SEQ ID NO: 338419 - protein, 16 aa, Homo sapiens
  CDR3 for alpha chain variable domain of TCR clone 169210 (TRAV3, TRAJ3)
CAARDRAKSSASKIIF

SEQ ID NO: 338420 - protein, 16 aa, Homo sapiens
  CDR3 for beta chain variable domain of TCR clone 169210 (TRBV20-1, TRBJ2-4)
CSATSLAELAKNIQYF

SEQ ID NO: 338421 - protein, 15 aa, Homo sapiens
  CDR3 for alpha chain variable domain of TCR clone 169211 (TRAV3, TRAJ5)
CAVRDLDTGRRALTF

SEQ ID NO: 338422 - protein, 14 aa, Homo sapiens
  CDR3 for beta chain variable domain of TCR clone 169211 (TRBV25-1, TRDJ2)
CASSGGGQPEKLFF

SEQ ID NO: 338423 - protein, 17 aa, Homo sapiens
  CDR3 for alpha chain variable domain of TCR clone 169212 (TRAV3, TRAJ6)
CAVRDGPRAGGSYIPTF

SEQ ID NO: 338424 - protein, 15 aa, Homo sapiens
  CDR3 for beta chain variable domain of TCR clone 169212 (TRBV11-2, TRBJ2-3)
CASSPGGGATDTQYF

SEQ ID NO: 338425 - protein, 12 aa, Homo sapiens
  CDR3 for alpha chain variable domain of TCR clone 169213 (TRAV12-3, TRAJ17)
CSMTLTGNKLTF

SEQ ID NO: 338426 - protein, 15 aa, Homo sapiens
  CDR3 for beta chain variable domain of TCR clone 169213 (TRBV11-3, TRBJ2-3)
CASLRDGREGDTQYF

SEQ ID NO: 338427 - protein, 13 aa, Homo sapiens
  CDR3 for alpha chain variable domain of TCR clone 169214 (TRAV27, TRAJ45)
CRSSGGGADGLTF

SEQ ID NO: 338428 - protein, 15 aa, Homo sapiens
  CDR3 for beta chain variable domain of TCR clone 169214 (TRBV7-8, TRBJ1-1)
CASSLGDSRNTEAFF

SEQ ID NO: 338429 - protein, 17 aa, Homo sapiens
  CDR3 for alpha chain variable domain of TCR clone 169215 (TRAV3, TRAJ6)
CAVRDGPRAGGSYIHTF

SEQ ID NO: 338430 - protein, 19 aa, Homo sapiens
  CDR3 for beta chain variable domain of TCR clone 169215 (TRBV25-1, TRBJ2-2)
CAILVYRVDRGRKTGELFF

SEQ ID NO: 338431 - protein, 15 aa, Homo sapiens
  CDR3 for alpha chain variable domain of TCR clone 169216 (TRAV26-1, TRAJ29)
CIVKVEGSGNTPLVF

SEQ ID NO: 338432 - protein, 12 aa, Homo sapiens
  CDR3 for beta chain variable domain of TCR clone 169216 (TRBV19, TRBJ2-1)
CASSMQYTEQFF

SEQ ID NO: 338433 - protein, 14 aa, Homo sapiens
  CDR3 for alpha chain variable domain of TCR clone 169217 (TRAV17, TRAJ22)
CATSPSGSARQLTF

SEQ ID NO: 338434 - protein, 16 aa, Homo sapiens
  CDR3 for beta chain variable domain of TCR clone 169217 (TRBV24-1, TRBJ2-3)
CATSDPGTGATDTQYF

SEQ ID NO: 338435 - protein, 14 aa, Homo sapiens
  CDR3 for alpha chain variable domain of TCR clone 169218 (TRAV13-1, TRAJ35)
CAASKGGFGKVLHC

SEQ ID NO: 338436 - protein, 13 aa, Homo sapiens
  CDR3 for beta chain variable domain of TCR clone 169218 (TRBV7-3, TRBJ1-1)
CASSQDWGAEAIF

SEQ ID NO: 338437 - protein, 15 aa, Homo sapiens
  CDR3 for alpha chain variable domain of TCR clone 169219 (TRAV12-1, TRAJ4)
CVVNPFSGGYNKLIY

SEQ ID NO: 338438 - protein, 13 aa, Homo sapiens
  CDR3 for beta chain variable domain of TCR clone 169219 (TRBV20-1, TRBJ1-2)
CSARGTADYGYTF

SEQ ID NO: 338439 - protein, 14 aa, Homo sapiens
  CDR3 for alpha chain variable domain of TCR clone 169220 (TRAV9-2, TRAJ39)
CALYIYNAGNMPTF

SEQ ID NO: 338440 - protein, 14 aa, Homo sapiens
  CDR3 for beta chain variable domain of TCR clone 169220 (TRBV9, TRBJ2-7)
CASSPLRAVGEQYF

SEQ ID NO: 338441 - protein, 11 aa, Homo sapiens
  CDR3 for alpha chain variable domain of TCR clone 169221 (TRAV3, TRAJ21)
CAVGNFNKVYF

SEQ ID NO: 338442 - protein, 13 aa, Homo sapiens
  CDR3 for beta chain variable domain of TCR clone 169221 (TRBV12-5, TRBJ2-3)
CASGDRQSDTQYF

SEQ ID NO: 338443 - protein, 14 aa, Homo sapiens
  CDR3 for alpha chain variable domain of TCR clone 169222 (TRAV12-2, TRAJ17)
CAVLFKAAGNKLTF

SEQ ID NO: 338444 - protein, 15 aa, Homo sapiens
  CDR3 for beta chain variable domain of TCR clone 169222 (TRBV6-5, TRBJ2-1)
CASSYDAGAGNEQFF

SEQ ID NO: 338445 - protein, 15 aa, Homo sapiens
  CDR3 for alpha chain variable domain of TCR clone 169223 (TRAV8-3, TRAJ7)
CAVGSISYGNNRLAF

SEQ ID NO: 338446 - protein, 17 aa, Homo sapiens
  CDR3 for beta chain variable domain of TCR clone 169223 (TRBV13, TRBJ2-3)
CASSLSRVAGGRNTQYF

SEQ ID NO: 338447 - protein, 13 aa, Homo sapiens
  CDR3 for alpha chain variable domain of TCR clone 169224 (TRAV29/DV5, TRAJ31)
CAASRNNNTRLMF

SEQ ID NO: 338448 - protein, 11 aa, Homo sapiens
  CDR3 for beta chain variable domain of TCR clone 169224 (TRBV12-4, TRBJ2-3)
CASTATDTQYF

SEQ ID NO: 338449 - protein, 11 aa, Homo sapiens
  CDR3 for alpha chain variable domain of TCR clone 169225 (TRAV2, TRAJ13)
CASGGYQKVTF

SEQ ID NO: 338450 - protein, 15 aa, Homo sapiens
  CDR3 for beta chain variable domain of TCR clone 169225 (TRBV29-1, TRBJ2-1)
CSGGDRKSFYNEQFF

SEQ ID NO: 338451 - protein, 14 aa, Homo sapiens
  CDR3 for alpha chain variable domain of TCR clone 169226 (TRAV13-1, TRAJ35)
CAASKGGFGNVLHC

SEQ ID NO: 338452 - protein, 11 aa, Homo sapiens
  CDR3 for beta chain variable domain of TCR clone 169226 (TRBV18, TRBJ2-5)
CASSPRETQYF

SEQ ID NO: 338453 - protein, 12 aa, Homo sapiens
  CDR3 for alpha chain variable domain of TCR clone 169227 (TRAV26-1, TRAJ48)
CIAVFGNEKLTI

SEQ ID NO: 338454 - protein, 17 aa, Homo sapiens
  CDR3 for beta chain variable domain of TCR clone 169227 (TRBV7-6, TRBJ2-1)
CASSFGLAGGTYNEQFF

SEQ ID NO: 338455 - protein, 16 aa, Homo sapiens
  CDR3 for alpha chain variable domain of TCR clone 169228 (TRAV20, TRAJ22)
CAVKAPSSGSARQLTF

SEQ ID NO: 338456 - protein, 13 aa, Homo sapiens
  CDR3 for beta chain variable domain of TCR clone 169228 (TRBV7-2, TRBJ2-5)
CASSQTSVETQYF

SEQ ID NO: 338457 - protein, 13 aa, Homo sapiens
  CDR3 for alpha chain variable domain of TCR clone 169229 (TRAV2, TRAJ15)
CAVASQAGTALIF

SEQ ID NO: 338458 - protein, 11 aa, Homo sapiens
  CDR3 for beta chain variable domain of TCR clone 169229 (TRBV10-3, TRBJ2-7)
CAISEGLEQYF

SEQ ID NO: 338459 - protein, 10 aa, Homo sapiens
  CDR3 for alpha chain variable domain of TCR clone 169230 (TRAV14/DV4, TRAJ48)
CAPRSEKLTF

SEQ ID NO: 338460 - protein, 17 aa, Homo sapiens
  CDR3 for beta chain variable domain of TCR clone 169230 (TRBV28, TRBJ2-5)
CASSTPEGDALQETQCF

SEQ ID NO: 338461 - protein, 15 aa, Homo sapiens
  CDR3 for alpha chain variable domain of TCR clone 169231 (TRAV8-3, TRAJ45)
CASSYSGGGADGLTF

SEQ ID NO: 338462 - protein, 18 aa, Homo sapiens
  CDR3 for beta chain variable domain of TCR clone 169231 (TRBV20-1, TRBJ2-3)
CSASGLAGGPGTTDTQYF

SEQ ID NO: 338463 - protein, 10 aa, Homo sapiens
  CDR3 for alpha chain variable domain of TCR clone 169232 (TRAV12-3, TRAJ49)
CSMNDDQFYF

SEQ ID NO: 338464 - protein, 16 aa, Homo sapiens
  CDR3 for beta chain variable domain of TCR clone 169232 (TRBV27, TRBJ2-2)
CASSFRGLVRTGELFF

SEQ ID NO: 338465 - protein, 13 aa, Homo sapiens
  CDR3 for alpha chain variable domain of TCR clone 169233 (TRAV26-1, TRAJ48)
CIVRVVGDEKLTF

SEQ ID NO: 338466 - protein, 17 aa, Homo sapiens
  CDR3 for beta chain variable domain of TCR clone 169233 (TRBV7-3, TRBJ2-2)
CASSLSGTSGGTGDLFF

SEQ ID NO: 338467 - protein, 12 aa, Homo sapiens
  CDR3 for alpha chain variable domain of TCR clone 169234 (TRAV26-1, TRAJ35)
CIGLSFGNVLYC

SEQ ID NO: 338468 - protein, 17 aa, Homo sapiens
  CDR3 for beta chain variable domain of TCR clone 169234 (TRBV7-8, TRBJ2-6)
CASSAGTGGAGANVLTF

SEQ ID NO: 338469 - protein, 15 aa, Homo sapiens
  CDR3 for alpha chain variable domain of TCR clone 169235 (TRAV2, TRAJ9)
CAVEDRGTGGFKTIF

SEQ ID NO: 338470 - protein, 15 aa, Homo sapiens
  CDR3 for beta chain variable domain of TCR clone 169235 (TRBV12-4, TRBJ2-5)
CASSPPTGLQETQYF

SEQ ID NO: 338471 - protein, 14 aa, Homo sapiens
  CDR3 for alpha chain variable domain of TCR clone 169236 (TRAV8-3, TRAJ4)
CAVGAAGGYNKLIF

SEQ ID NO: 338472 - protein, 15 aa, Homo sapiens
  CDR3 for beta chain variable domain of TCR clone 169236 (TRBV6-5, TRBJ2-1)
CASSYAAGAGNEQLL

SEQ ID NO: 338473 - protein, 13 aa, Homo sapiens
  CDR3 for alpha chain variable domain of TCR clone 169237 (TRAV38-2/DV8, TRAJ34)
CAYRNYNPDKLIF

SEQ ID NO: 338474 - protein, 15 aa, Homo sapiens
  CDR3 for beta chain variable domain of TCR clone 169237 (TRBV20-1, TRBJ2-5)
CSAEGTGGLQETQYF

SEQ ID NO: 338475 - protein, 14 aa, Homo sapiens
  CDR3 for alpha chain variable domain of TCR clone 169238 (TRAV27, TRAJ52)
CAGGYGMIGWWYQL

SEQ ID NO: 338476 - protein, 12 aa, Homo sapiens
  CDR3 for beta chain variable domain of TCR clone 169238 (TRBV12-4, TRBJ2-7)
CASSLGGYEQYF

SEQ ID NO: 338477 - protein, 14 aa, Homo sapiens
  CDR3 for alpha chain variable domain of TCR clone 169239 (TRAV13-1, TRAJ26)
CAASSAHYGQNFVF

SEQ ID NO: 338478 - protein, 17 aa, Homo sapiens
  CDR3 for beta chain variable domain of TCR clone 169239 (TRBV25-1, TRBJ2-5)
WASSRRGGRGGQETQYF

SEQ ID NO: 338479 - protein, 12 aa, Homo sapiens
  CDR3 for alpha chain variable domain of TCR clone 169240 (TRAV13-1, TRAJ17)
CAAPRCRQHANF

SEQ ID NO: 338480 - protein, 15 aa, Homo sapiens
  CDR3 for beta chain variable domain of TCR clone 169240 (TRBV28, TRBJ2-3)
CAPTFRDWSTDTQYF

SEQ ID NO: 338481 - protein, 16 aa, Homo sapiens
  CDR3 for alpha chain variable domain of TCR clone 169241 (TRAV3, TRAJ37)
CAVRPHGSGNTGKLTF

SEQ ID NO: 338482 - protein, 16 aa, Homo sapiens
  CDR3 for beta chain variable domain of TCR clone 169241 (TRBV20-1, TRBJ1-4)
CSAPGQGLLTNEKLFF

SEQ ID NO: 338483 - protein, 17 aa, Homo sapiens
  CDR3 for alpha chain variable domain of TCR clone 169242 (TRAV38-2/DV8, TRAJ23)
CALSRKLIFGQGTELSV

SEQ ID NO: 338484 - protein, 15 aa, Homo sapiens
  CDR3 for beta chain variable domain of TCR clone 169242 (TRBV2, TRBJ2-1)
CASSELAGSYNEQFF

SEQ ID NO: 338485 - protein, 14 aa, Homo sapiens
  CDR3 for alpha chain variable domain of TCR clone 169243 (TRAV12-1, TRAJ23)
CVVIVYNQGGKLIF

SEQ ID NO: 338486 - protein, 13 aa, Homo sapiens
  CDR3 for beta chain variable domain of TCR clone 169243 (TRBV11-2, TRBJ2-5)
CASSFSSQVTQYF

SEQ ID NO: 338487 - protein, 13 aa, Homo sapiens
  CDR3 for alpha chain variable domain of TCR clone 169244 (TRAV3, TRAJ41)
CAVSSNAGYALNF

SEQ ID NO: 338488 - protein, 12 aa, Homo sapiens
  CDR3 for beta chain variable domain of TCR clone 169244 (TRBV2, TRBJ2-1)
CASRPGPREQFF

SEQ ID NO: 338489 - protein, 14 aa, Homo sapiens
  CDR3 for alpha chain variable domain of TCR clone 169245 (TRAV12-2, TRAJ13)
LAVKKTGGYQQVTF

SEQ ID NO: 338490 - protein, 15 aa, Homo sapiens
  CDR3 for beta chain variable domain of TCR clone 169245 (TRBV27, TRBJ2-1)
CASSNGGGSSNEQFF

SEQ ID NO: 338491 - protein, 14 aa, Homo sapiens
  CDR3 for alpha chain variable domain of TCR clone 169246 (TRAV16, TRAJ31)
CALSGRNNNARLMF

SEQ ID NO: 338492 - protein, 12 aa, Homo sapiens
  CDR3 for beta chain variable domain of TCR clone 169246 (TRBV11-2, TRBJ1-2)
CASSREGDGYTF

SEQ ID NO: 338493 - protein, 13 aa, Homo sapiens
  CDR3 for alpha chain variable domain of TCR clone 169247 (TRAV12-3, TRAJ13)
CAMTSGGYQKFTF

SEQ ID NO: 338494 - protein, 13 aa, Homo sapiens
  CDR3 for beta chain variable domain of TCR clone 169247 (TRBV20-1, TRBJ2-2)
CSALSGGAGELFF

SEQ ID NO: 338495 - protein, 12 aa, Homo sapiens
  CDR3 for alpha chain variable domain of TCR clone 169248 (TRAV12-3, TRAJ17)
CEMTLTGSKLTF

SEQ ID NO: 338496 - protein, 12 aa, Homo sapiens
  CDR3 for beta chain variable domain of TCR clone 169248 (TRBV29-1, TRBJ1-3)
CSTRDSGNTIYF

SEQ ID NO: 338497 - protein, 14 aa, Homo sapiens
  CDR3 for alpha chain variable domain of TCR clone 169249 (TRAV1-2, TRAJ8)
CAVREDTGFQKLVF

SEQ ID NO: 338498 - protein, 15 aa, Homo sapiens
  CDR3 for beta chain variable domain of TCR clone 169249 (TRBV7-9, TRBJ1-6)
CASSSPGRGNSPLHY

SEQ ID NO: 338499 - protein, 13 aa, Homo sapiens
  CDR3 for alpha chain variable domain of TCR clone 169250 (TRAV13-2, TRAJ10)
CADSTGGGNKLTF

SEQ ID NO: 338500 - protein, 16 aa, Homo sapiens
  CDR3 for beta chain variable domain of TCR clone 169250 (TRBV5-1, TRBJ2-3)
CASSLGLAVYTDTQYF

SEQ ID NO: 338501 - protein, 13 aa, Homo sapiens
  CDR3 for alpha chain variable domain of TCR clone 169251 (TRAV21, TRAJ27)
CAARPGNAGKSTF

SEQ ID NO: 338502 - protein, 14 aa, Homo sapiens
  CDR3 for beta chain variable domain of TCR clone 169251 (TRBV18, TRBJ2-7)
CASSPRGGSYEQYF

SEQ ID NO: 338503 - protein, 16 aa, Homo sapiens
  CDR3 for alpha chain variable domain of TCR clone 169252 (TRAV30, TRAJ24)
CGTEIVDADSWVTFQF

SEQ ID NO: 338504 - protein, 14 aa, Homo sapiens
  CDR3 for beta chain variable domain of TCR clone 169252 (TRBV12-5, TRBJ2-5)
CASGSRTHQETQYF

SEQ ID NO: 338505 - protein, 15 aa, Homo sapiens
  CDR3 for alpha chain variable domain of TCR clone 169253 (TRAV3, TRAJ10)
CAVRDGPGGGNKLTF

SEQ ID NO: 338506 - protein, 15 aa, Homo sapiens
  CDR3 for beta chain variable domain of TCR clone 169253 (TRBV4-2, TRBJ1-4)
CASSLVQREVEKLFF

SEQ ID NO: 338507 - protein, 13 aa, Homo sapiens
  CDR3 for alpha chain variable domain of TCR clone 169254 (TRAV27, TRAJ42)
CAGARGSQGNLIF

SEQ ID NO: 338508 - protein, 15 aa, Homo sapiens
  CDR3 for beta chain variable domain of TCR clone 169254 (TRBV10-3, TRBJ2-2)
CAIRTDREDTRELFF

SEQ ID NO: 338509 - protein, 14 aa, Homo sapiens
  CDR3 for alpha chain variable domain of TCR clone 169255 (TRAV12-2, TRAJ13)
CAVKKTGGYQKVTF

SEQ ID NO: 338510 - protein, 14 aa, Homo sapiens
  CDR3 for beta chain variable domain of TCR clone 169255 (TRBV4-1, TRBJ2-2)
CASSQAVDTGELFF

SEQ ID NO: 338511 - protein, 16 aa, Homo sapiens
  CDR3 for alpha chain variable domain of TCR clone 169256 (TRAV12-2, TRAJ10)
CAANRVLTGGGNKLTC

SEQ ID NO: 338512 - protein, 14 aa, Homo sapiens
  CDR3 for beta chain variable domain of TCR clone 169256 (TRBV9, TRBJ2-1)
CASSVALAVNEQFF

SEQ ID NO: 338513 - protein, 15 aa, Homo sapiens
  CDR3 for alpha chain variable domain of TCR clone 169257 (TRAV2, TRAJ9)
CAVEDRGTGGFKTLF

SEQ ID NO: 338514 - protein, 15 aa, Homo sapiens
  CDR3 for beta chain variable domain of TCR clone 169257 (TRBV7-9, TRBJ1-6)
CASSSPGRGNSTLHF

SEQ ID NO: 338515 - protein, 16 aa, Homo sapiens
  CDR3 for alpha chain variable domain of TCR clone 169258 (TRAV12-1, TRAJ43)
CVVNPHRFGAGTRLTV

SEQ ID NO: 338516 - protein, 13 aa, Homo sapiens
  CDR3 for beta chain variable domain of TCR clone 169258 (TRBV20-1, TRBJ1-1)
CSAKGGGNTEAFF

SEQ ID NO: 338517 - protein, 18 aa, Homo sapiens
  CDR3 for alpha chain variable domain of TCR clone 169259 (TRAV21, TRAJ52)
CAVRPSPAGGTSYGKLTF

SEQ ID NO: 338518 - protein, 20 aa, Homo sapiens
  CDR3 for beta chain variable domain of TCR clone 169259 (TRBV19, TRBJ2-1)
CASSISRKVTSTRLNNEQFF

SEQ ID NO: 338519 - protein, 16 aa, Homo sapiens
  CDR3 for alpha chain variable domain of TCR clone 169260 (TRAV12-1, TRAJ45)
CVVIRYSGGGADGLTF

SEQ ID NO: 338520 - protein, 15 aa, Homo sapiens
  CDR3 for beta chain variable domain of TCR clone 169260 (TRBV5-1, TRBJ2-7)
CASSLNGGPAREQYF

SEQ ID NO: 338521 - protein, 11 aa, Homo sapiens
  CDR3 for alpha chain variable domain of TCR clone 169261 (TRAV1-1, TRAJ23)
CAVHPGGKLIF

SEQ ID NO: 338522 - protein, 20 aa, Homo sapiens
  CDR3 for beta chain variable domain of TCR clone 169261 (TRBV7-8, TRBJ2-2)
CASSHLFPGPTIHITGELFF

SEQ ID NO: 338523 - protein, 13 aa, Homo sapiens
  CDR3 for alpha chain variable domain of TCR clone 169262 (TRAV30, TRAJ24)
CGTVTDSWGNCSL

SEQ ID NO: 338524 - protein, 14 aa, Homo sapiens
  CDR3 for beta chain variable domain of TCR clone 169262 (TRBV6-3, TRBJ2-2)
CASTYTPDTGELFF

SEQ ID NO: 338525 - protein, 17 aa, Homo sapiens
  CDR3 for alpha chain variable domain of TCR clone 169263 (TRAV12-2, TRAJ48)
CASNEKLTFGTGTRLTI

SEQ ID NO: 338526 - protein, 14 aa, Homo sapiens
  CDR3 for beta chain variable domain of TCR clone 169263 (TRBV19, TRBJ2-1)
CASPPFVLSGEQFF

SEQ ID NO: 338527 - protein, 12 aa, Homo sapiens
  CDR3 for alpha chain variable domain of TCR clone 169264 (TRAV3, TRAJ20)
CAVRDPDYKLSF

SEQ ID NO: 338528 - protein, 16 aa, Homo sapiens
  CDR3 for beta chain variable domain of TCR clone 169264 (TRBV20-1, TRBJ2-6)
CSASSQGYDGANVLTF

SEQ ID NO: 338529 - protein, 14 aa, Homo sapiens
  CDR3 for alpha chain variable domain of TCR clone 169265 (TRAV30, TRAJ33)
CGTVAPRSNYQLIW

SEQ ID NO: 338530 - protein, 15 aa, Homo sapiens
  CDR3 for beta chain variable domain of TCR clone 169265 (TRBV7-3, TRBJ2-2)
CASSETGQGTGELFF

SEQ ID NO: 338531 - protein, 11 aa, Homo sapiens
  CDR3 for alpha chain variable domain of TCR clone 169266 (TRAV26-1, TRAJ37)
CIVRVGRKLIF

SEQ ID NO: 338532 - protein, 14 aa, Homo sapiens
  CDR3 for beta chain variable domain of TCR clone 169266 (TRBV19, TRBJ2-7)
CASTVQGRPYEQYF

SEQ ID NO: 338533 - protein, 15 aa, Homo sapiens
  CDR3 for alpha chain variable domain of TCR clone 169267 (TRAV12-2, TRAJ43)
CAFDMRFGAGTRLTG

SEQ ID NO: 338534 - protein, 18 aa, Homo sapiens
  CDR3 for beta chain variable domain of TCR clone 169267 (TRBV20-1, TRBJ2-3)
CSASGLAGGPGTTGTQYL

SEQ ID NO: 338535 - protein, 16 aa, Homo sapiens
  CDR3 for alpha chain variable domain of TCR clone 169268 (TRAV3, TRAJ10)
CAVRDMRAGGGNKLTF

SEQ ID NO: 338536 - protein, 14 aa, Homo sapiens
  CDR3 for beta chain variable domain of TCR clone 169268 (TRBV25-1, TRBJ1-1)
CASTHLGGNAEALF

SEQ ID NO: 338537 - protein, 14 aa, Homo sapiens
  CDR3 for alpha chain variable domain of TCR clone 169269 (TRAV16, TRAJ33)
CSLSAMDSNYQLIW

SEQ ID NO: 338538 - protein, 15 aa, Homo sapiens
  CDR3 for beta chain variable domain of TCR clone 169269 (TRBV28, TRBJ2-7)
CASSLEAYPIYEQYF

SEQ ID NO: 338539 - protein, 13 aa, Homo sapiens
  CDR3 for alpha chain variable domain of TCR clone 169270 (TRAV21, TRAJ40)
CAVRPSRAYKYIF

SEQ ID NO: 338540 - protein, 12 aa, Homo sapiens
  CDR3 for beta chain variable domain of TCR clone 169270 (TRBV14, TRBJ2-5)
CASSRLKETQYF

SEQ ID NO: 338541 - protein, 17 aa, Homo sapiens
  CDR3 for alpha chain variable domain of TCR clone 169271 (TRAV3, TRAJ6)
CAVRDGPRAGESYIPTF

SEQ ID NO: 338542 - protein, 14 aa, Homo sapiens
  CDR3 for beta chain variable domain of TCR clone 169271 (TRBV7-2, TRBJ2-7)
CASSPKTSFYGQYF

SEQ ID NO: 338543 - protein, 15 aa, Homo sapiens
  CDR3 for alpha chain variable domain of TCR clone 169272 (TRAV26-1, TRAJ29)
CIVRGEGSGNTPLVF

SEQ ID NO: 338544 - protein, 15 aa, Homo sapiens
  CDR3 for beta chain variable domain of TCR clone 169272 (TRBV7-9, TRBJ1-5)
CASSQGHQPNQTQHF

SEQ ID NO: 338545 - protein, 14 aa, Homo sapiens
  CDR3 for alpha chain variable domain of TCR clone 169273 (TRAV16, TRAJ15)
CALRPNQAGTALIF

SEQ ID NO: 338546 - protein, 15 aa, Homo sapiens
  CDR3 for beta chain variable domain of TCR clone 169273 (TRBV20-1, TRBJ2-7)
CSAESGTSGAYEQYF

SEQ ID NO: 338547 - protein, 16 aa, Homo sapiens
  CDR3 for alpha chain variable domain of TCR clone 169274 (TRAV3, TRAJ21)
CAVRDIERGNYNKFYF

SEQ ID NO: 338548 - protein, 13 aa, Homo sapiens
  CDR3 for beta chain variable domain of TCR clone 169274 (TRBV4-2, TRBJ1-1)
CASSQAGNTEAFF

SEQ ID NO: 338549 - protein, 14 aa, Homo sapiens
  CDR3 for alpha chain variable domain of TCR clone 169275 (TRAV12-2, TRAJ22)
CAVRFSGSARHLTF

SEQ ID NO: 338550 - protein, 13 aa, Homo sapiens
  CDR3 for beta chain variable domain of TCR clone 169275 (TRBV6-1, TRBJ2-1)
CASTGTGLNEQFF

SEQ ID NO: 338551 - protein, 16 aa, Homo sapiens
  CDR3 for alpha chain variable domain of TCR clone 169276 (TRAV13-1, TRAJ48)
CAASIFGNFGNEKLTF

SEQ ID NO: 338552 - protein, 12 aa, Homo sapiens
  CDR3 for beta chain variable domain of TCR clone 169276 (TRBV14, TRBJ2-4)
CASSNLKGIQYF

SEQ ID NO: 338553 - protein, 14 aa, Homo sapiens
  CDR3 for alpha chain variable domain of TCR clone 169277 (TRAV8-4, TRAJ9)
CAVTFNTGGFKTIF

SEQ ID NO: 338554 - protein, 11 aa, Homo sapiens
  CDR3 for beta chain variable domain of TCR clone 169277 (TRBV7-9, TRBJ2-3)
CASSGPDTQYF

SEQ ID NO: 338555 - protein, 11 aa, Homo sapiens
  CDR3 for alpha chain variable domain of TCR clone 169278 (TRAV13-1, TRAJ5)
CAPKGRRALTF

SEQ ID NO: 338556 - protein, 15 aa, Homo sapiens
  CDR3 for beta chain variable domain of TCR clone 169278 (TRBV11-2, TRBJ1-1)
CASSSRSSLLPSLDK

SEQ ID NO: 338557 - protein, 20 aa, Homo sapiens
  CDR3 for alpha chain variable domain of TCR clone 169279 (TRAV1-1, TRAJ39)
CLLLLRCESSAYNAGNMLTF

SEQ ID NO: 338558 - protein, 17 aa, Homo sapiens
  CDR3 for beta chain variable domain of TCR clone 169279 (TRBV28, TRBJ1-5)
CASSLSWLVSSNQPQHF

SEQ ID NO: 338559 - protein, 16 aa, Homo sapiens
  CDR3 for alpha chain variable domain of TCR clone 169280 (TRAV30, TRAJ24)
CGTEIVDTDSWGKFQF

SEQ ID NO: 338560 - protein, 14 aa, Homo sapiens
  CDR3 for beta chain variable domain of TCR clone 169280 (TRBV12-5, TRBJ2-5)
CASSSRTHQETQYF

SEQ ID NO: 338561 - protein, 14 aa, Homo sapiens
  CDR3 for alpha chain variable domain of TCR clone 169281 (TRAV24, TRAJ42)
CAQNYGGSQGNLIF

SEQ ID NO: 338562 - protein, 14 aa, Homo sapiens
  CDR3 for beta chain variable domain of TCR clone 169281 (TRBV19, TRBJ2-1)
CASPTFVLSGEQFF

SEQ ID NO: 338563 - protein, 12 aa, Homo sapiens
  CDR3 for alpha chain variable domain of TCR clone 169282 (TRAV27, TRAJ20)
CAGASKDYKLSF

SEQ ID NO: 338564 - protein, 15 aa, Homo sapiens
  CDR3 for beta chain variable domain of TCR clone 169282 (TRBV5-4, TRBJ1-2)
CASRGSRGTSGGYTF

SEQ ID NO: 338565 - protein, 13 aa, Homo sapiens
  CDR3 for alpha chain variable domain of TCR clone 169283 (TRAV2, TRAJ40)
CAVVTSGTYKSIF

SEQ ID NO: 338566 - protein, 14 aa, Homo sapiens
  CDR3 for beta chain variable domain of TCR clone 169283 (TRBV7-6, TRBJ2-1)
CASSLGGGADEQFF

SEQ ID NO: 338567 - protein, 16 aa, Homo sapiens
  CDR3 for alpha chain variable domain of TCR clone 169284 (TRAV30, TRAJ24)
CGTEIVDADSCGKFQF

SEQ ID NO: 338568 - protein, 15 aa, Homo sapiens
  CDR3 for beta chain variable domain of TCR clone 169284 (TRBV25-1, TRBJ2-4)
CASSETESAKNIQYF

SEQ ID NO: 338569 - protein, 11 aa, Homo sapiens
  CDR3 for alpha chain variable domain of TCR clone 169285 (TRAV1-2, TRAJ40)
CAVPGTYKYIF

SEQ ID NO: 338570 - protein, 16 aa, Homo sapiens
  CDR3 for beta chain variable domain of TCR clone 169285 (TRBV29-1, TRBJ2-7)
CSVEAVGTSGSYDQYF

SEQ ID NO: 338571 - protein, 12 aa, Homo sapiens
  CDR3 for alpha chain variable domain of TCR clone 169286 (TRAV25, TRAJ20)
CAGRSKDYKLSF

SEQ ID NO: 338572 - protein, 15 aa, Homo sapiens
  CDR3 for beta chain variable domain of TCR clone 169286 (TRBV7-6, TRBJ2-7)
CASSGRRDTLGEQYF

SEQ ID NO: 338573 - protein, 14 aa, Homo sapiens
  CDR3 for alpha chain variable domain of TCR clone 169287 (TRAV13-1, TRAJ35)
CAASKGGFGNVLHC

SEQ ID NO: 338574 - protein, 13 aa, Homo sapiens
  CDR3 for beta chain variable domain of TCR clone 169287 (TRBV19, TRBJ1-2)
CASSQGQVYGYTF

SEQ ID NO: 338575 - protein, 14 aa, Homo sapiens
  CDR3 for alpha chain variable domain of TCR clone 169288 (TRAV21, TRAJ35)
CAVMPIGFGYVLHC

SEQ ID NO: 338576 - protein, 12 aa, Homo sapiens
  CDR3 for beta chain variable domain of TCR clone 169288 (TRBV7-9, TRBJ2-7)
CASSIKREGQYF

SEQ ID NO: 338577 - protein, 16 aa, Homo sapiens
  CDR3 for alpha chain variable domain of TCR clone 169289 (TRAV17, TRAJ35)
CATAEGGIGFGHVLHC

SEQ ID NO: 338578 - protein, 16 aa, Homo sapiens
  CDR3 for beta chain variable domain of TCR clone 169289 (TRBV6-5, TRBJ2-7)
CASSSDPTSGFYEQYF

SEQ ID NO: 338579 - protein, 12 aa, Homo sapiens
  CDR3 for alpha chain variable domain of TCR clone 169290 (TRAV21, TRAJ33)
CAKMDSNYQLIW

SEQ ID NO: 338580 - protein, 13 aa, Homo sapiens
  CDR3 for beta chain variable domain of TCR clone 169290 (TRBV4-3, TRBJ1-5)
CASSQDQGQPQHF

SEQ ID NO: 338581 - protein, 13 aa, Homo sapiens
  CDR3 for alpha chain variable domain of TCR clone 169291 (TRAV27, TRAJ45)
CRSSGGGADGLTF

SEQ ID NO: 338582 - protein, 20 aa, Homo sapiens
  CDR3 for beta chain variable domain of TCR clone 169291 (TRBV7-8, TRBJ2-2)
CASSHLFPGPTIHIAGELLF

SEQ ID NO: 338583 - protein, 16 aa, Homo sapiens
  CDR3 for alpha chain variable domain of TCR clone 169292 (TRAV13-2, TRAJ37)
CAENIRGSSNTGKLIF

SEQ ID NO: 338584 - protein, 15 aa, Homo sapiens
  CDR3 for beta chain variable domain of TCR clone 169292 (TRBV5-1, TRBJ2-7)
CASSPQGRPFDEQYF

SEQ ID NO: 338585 - protein, 14 aa, Homo sapiens
  CDR3 for alpha chain variable domain of TCR clone 169293 (TRAV1-2, TRAJ16)
CAVNRFSDSQKLLF

SEQ ID NO: 338586 - protein, 15 aa, Homo sapiens
  CDR3 for beta chain variable domain of TCR clone 169293 (TRBV9, TRBJ1-6)
CASSVAGTGDSTLHF

SEQ ID NO: 338587 - protein, 10 aa, Homo sapiens
  CDR3 for alpha chain variable domain of TCR clone 169294 (TRAV1-2, TRAJ31)
CALFDARLMF

SEQ ID NO: 338588 - protein, 14 aa, Homo sapiens
  CDR3 for beta chain variable domain of TCR clone 169294 (TRBV19, TRBJ2-1)
CASPTFVLSGEQFF

SEQ ID NO: 338589 - protein, 12 aa, Homo sapiens
  CDR3 for alpha chain variable domain of TCR clone 169295 (TRAV16, TRAJ49)
CALTEGGNQFYF

SEQ ID NO: 338590 - protein, 14 aa, Homo sapiens
  CDR3 for beta chain variable domain of TCR clone 169295 (TRBV7-9, TRBJ2-1)
CASRPTGLRNEQFF

SEQ ID NO: 338591 - protein, 16 aa, Homo sapiens
  CDR3 for alpha chain variable domain of TCR clone 169296 (TRAV20, TRAJ16)
CAVQDKRFSDGQKLLF

SEQ ID NO: 338592 - protein, 16 aa, Homo sapiens
  CDR3 for beta chain variable domain of TCR clone 169296 (TRBV7-3, TRBJ2-2)
CASSLKRGTLSGELFF

SEQ ID NO: 338593 - protein, 15 aa, Homo sapiens
  CDR3 for alpha chain variable domain of TCR clone 169297 (TRAV12-1, TRAJ44)
CVVDEYTGTASKLTC

SEQ ID NO: 338594 - protein, 14 aa, Homo sapiens
  CDR3 for beta chain variable domain of TCR clone 169297 (TRBV5-1, TRBJ1-2)
CASSLEPVNYGYTF

SEQ ID NO: 338595 - protein, 15 aa, Homo sapiens
  CDR3 for alpha chain variable domain of TCR clone 169298 (TRAV34, TRAJ38)
CGADFTPGNNRKLIW

SEQ ID NO: 338596 - protein, 15 aa, Homo sapiens
  CDR3 for beta chain variable domain of TCR clone 169298 (TRBV19, TRBJ1-6)
CASSTQGAVGSPLHF

SEQ ID NO: 338597 - protein, 14 aa, Homo sapiens
  CDR3 for alpha chain variable domain of TCR clone 169299 (TRAV12-2, TRAJ13)
CAVQKTGGYQKVTF

SEQ ID NO: 338598 - protein, 11 aa, Homo sapiens
  CDR3 for beta chain variable domain of TCR clone 169299 (TRBV29-1, TRBJ2-5)
RSEDRTGTQYF

SEQ ID NO: 338599 - protein, 10 aa, Homo sapiens
  CDR3 for alpha chain variable domain of TCR clone 169300 (TRAV8-2, TRAJ29)
CIGGNTPLVF

SEQ ID NO: 338600 - protein, 17 aa, Homo sapiens
  CDR3 for beta chain variable domain of TCR clone 169300 (TRBV2, TRBJ2-7)
CASSQALTGWDSYEQYF

SEQ ID NO: 338601 - protein, 10 aa, Homo sapiens
  CDR3 for alpha chain variable domain of TCR clone 169301 (TRAV23/DV6, TRAJ31)
CARGGARLMC

SEQ ID NO: 338602 - protein, 14 aa, Homo sapiens
  CDR3 for beta chain variable domain of TCR clone 169301 (TRBV11-3, TRBJ2-1)
CASSATTSGSIQFF

SEQ ID NO: 338603 - protein, 13 aa, Homo sapiens
  CDR3 for alpha chain variable domain of TCR clone 169302 (TRAV2, TRAJ12)
CAVGADSSYKLIF

SEQ ID NO: 338604 - protein, 13 aa, Homo sapiens
  CDR3 for beta chain variable domain of TCR clone 169302 (TRBV20-1, TRBJ2-1)
CSARSSTRDEQFF

SEQ ID NO: 338605 - protein, 18 aa, Homo sapiens
  CDR3 for alpha chain variable domain of TCR clone 169303 (TRAV21, TRAJ53)
FAVKGGENSGGSNYKLTF

SEQ ID NO: 338606 - protein, 14 aa, Homo sapiens
  CDR3 for beta chain variable domain of TCR clone 169303 (TRBV5-4, TRBJ1-1)
CASSLDSRRDEAFF

SEQ ID NO: 338607 - protein, 12 aa, Homo sapiens
  CDR3 for alpha chain variable domain of TCR clone 169304 (TRAV8-4, TRAJ43)
CAVSVNNNDIRF

SEQ ID NO: 338608 - protein, 14 aa, Homo sapiens
  CDR3 for beta chain variable domain of TCR clone 169304 (TRBV7-2, TRBJ2-7)
CASRSQGAAYEQYF

SEQ ID NO: 338609 - protein, 13 aa, Homo sapiens
  CDR3 for alpha chain variable domain of TCR clone 169305 (TRAV26-1, TRAJ48)
CIVRVVGDGKLTF

SEQ ID NO: 338610 - protein, 16 aa, Homo sapiens
  CDR3 for beta chain variable domain of TCR clone 169305 (TRBV12-5, TRBJ2-5)
CASGPRTSGNQETQYF

SEQ ID NO: 338611 - protein, 13 aa, Homo sapiens
  CDR3 for alpha chain variable domain of TCR clone 169306 (TRAV2, TRAJ40)
CAAVTSGTYKYSF

SEQ ID NO: 338612 - protein, 15 aa, Homo sapiens
  CDR3 for beta chain variable domain of TCR clone 169306 (TRBV11-3, TRBJ2-3)
CASLKDGREGDTQYF

SEQ ID NO: 338613 - protein, 17 aa, Homo sapiens
  CDR3 for alpha chain variable domain of TCR clone 169307 (TRAV23/DV6, TRAJ3)
CSNHFCFGWSSAPKIIF

SEQ ID NO: 338614 - protein, 15 aa, Homo sapiens
  CDR3 for beta chain variable domain of TCR clone 169307 (TRBV19, TRBJ1-6)
CASSTQGAVGSPLHF

SEQ ID NO: 338615 - protein, 10 aa, Homo sapiens
  CDR3 for alpha chain variable domain of TCR clone 169308 (TRAV20, TRAJ22)
CAAPARQLTF

SEQ ID NO: 338616 - protein, 14 aa, Homo sapiens
  CDR3 for beta chain variable domain of TCR clone 169308 (TRBV19, TRBJ2-1)
SASSMGSGATEQFF

SEQ ID NO: 338617 - protein, 12 aa, Homo sapiens
  CDR3 for alpha chain variable domain of TCR clone 169309 (TRAV13-1, TRAJ49)
CAASIWGNQFHF

SEQ ID NO: 338618 - protein, 14 aa, Homo sapiens
  CDR3 for beta chain variable domain of TCR clone 169309 (TRBV12-4, TRBJ1-1)
CASSLDGLNTEAFF

SEQ ID NO: 338619 - protein, 14 aa, Homo sapiens
  CDR3 for alpha chain variable domain of TCR clone 169310 (TRAV2, TRAJ9)
CAVEDRCGGFKTIV

SEQ ID NO: 338620 - protein, 13 aa, Homo sapiens
  CDR3 for beta chain variable domain of TCR clone 169310 (TRBV7-3, TRBJ1-1)
CASSQDWGAEDFF

SEQ ID NO: 338621 - protein, 15 aa, Homo sapiens
  CDR3 for alpha chain variable domain of TCR clone 169311 (TRAV21, TRAJ52)
CAVRGGGTSYGKLTF

SEQ ID NO: 338622 - protein, 14 aa, Homo sapiens
  CDR3 for beta chain variable domain of TCR clone 169311 (TRBV12-4, TRBJ1-1)
CASSLGTGGTEAFF

SEQ ID NO: 338623 - protein, 15 aa, Homo sapiens
  CDR3 for alpha chain variable domain of TCR clone 169312 (TRAV25, TRAJ53)
CAATGGGGSNYKLIF

SEQ ID NO: 338624 - protein, 11 aa, Homo sapiens
  CDR3 for beta chain variable domain of TCR clone 169312 (TRBV11-3, TRBJ2-2)
CASSSGGELFF

SEQ ID NO: 338625 - protein, 14 aa, Homo sapiens
  CDR3 for alpha chain variable domain of TCR clone 169313 (TRAV1-2, TRAJ8)
CAVREDTGFQKLVF

SEQ ID NO: 338626 - protein, 14 aa, Homo sapiens
  CDR3 for beta chain variable domain of TCR clone 169313 (TRBV2, TRBJ2-5)
CASKRDGTTETQYF

SEQ ID NO: 338627 - protein, 13 aa, Homo sapiens
  CDR3 for alpha chain variable domain of TCR clone 169314 (TRAV13-1, TRAJ10)
CAALEGGGNKLTF

SEQ ID NO: 338628 - protein, 13 aa, Homo sapiens
  CDR3 for beta chain variable domain of TCR clone 169314 (TRBV7-9, TRBJ1-2)
CACSLKQNYGYTF

SEQ ID NO: 338629 - protein, 13 aa, Homo sapiens
  CDR3 for alpha chain variable domain of TCR clone 169315 (TRAV9-2, TRAJ37)
CALHSSNTGKLLF

SEQ ID NO: 338630 - protein, 15 aa, Homo sapiens
  CDR3 for beta chain variable domain of TCR clone 169315 (TRBV7-2, TRBJ2-7)
CASSTPGLTRGEQYF

SEQ ID NO: 338631 - protein, 14 aa, Homo sapiens
  CDR3 for alpha chain variable domain of TCR clone 169316 (TRAV3, TRAJ8)
CASLMNTGFQKLVF

SEQ ID NO: 338632 - protein, 15 aa, Homo sapiens
  CDR3 for beta chain variable domain of TCR clone 169316 (TRBV28, TRBJ2-5)
CASSLGLGNQETQYF

SEQ ID NO: 338633 - protein, 15 aa, Homo sapiens
  CDR3 for alpha chain variable domain of TCR clone 169317 (TRAV27, TRAJ38)
CAGRFNAGNNRKLIR

SEQ ID NO: 338634 - protein, 13 aa, Homo sapiens
  CDR3 for beta chain variable domain of TCR clone 169317 (TRBV12-5, TRBJ2-3)
CASQNRGTDTQYF

SEQ ID NO: 338635 - protein, 14 aa, Homo sapiens
  CDR3 for alpha chain variable domain of TCR clone 169318 (TRAV12-2, TRAJ13)
CAVKKTGGYQKVTF

SEQ ID NO: 338636 - protein, 17 aa, Homo sapiens
  CDR3 for beta chain variable domain of TCR clone 169318 (TRBV2, TRBJ2-7)
CASSQALTGWDSYEQYF

SEQ ID NO: 338637 - protein, 17 aa, Homo sapiens
  CDR3 for alpha chain variable domain of TCR clone 169319 (TRAV26-1, TRAJ53)
CIVRADDSGGSHYKLTF

SEQ ID NO: 338638 - protein, 15 aa, Homo sapiens
  CDR3 for beta chain variable domain of TCR clone 169319 (TRBV20-1, TRBJ2-7)
CSARVPAAYFYEQYF

SEQ ID NO: 338639 - protein, 12 aa, Homo sapiens
  CDR3 for alpha chain variable domain of TCR clone 169320 (TRAV12-3, TRAJ17)
CAMTLTGNKLTF

SEQ ID NO: 338640 - protein, 15 aa, Homo sapiens
  CDR3 for beta chain variable domain of TCR clone 169320 (TRBV10-2, TRBJ2-5)
CASKPEDRRQETQYF

SEQ ID NO: 338641 - protein, 12 aa, Homo sapiens
  CDR3 for alpha chain variable domain of TCR clone 169321 (TRAV12-1, TRAJ40)
CVVYSGTYKYIF

SEQ ID NO: 338642 - protein, 18 aa, Homo sapiens
  CDR3 for beta chain variable domain of TCR clone 169321 (TRBV12-4, TRBJ2-2)
CASSLVAGTRGRTGELFF

SEQ ID NO: 338643 - protein, 13 aa, Homo sapiens
  CDR3 for alpha chain variable domain of TCR clone 169322 (TRAV3, TRAJ21)
YAVREPDFNKFYF

SEQ ID NO: 338644 - protein, 18 aa, Homo sapiens
  CDR3 for beta chain variable domain of TCR clone 169322 (TRBV20-1, TRBJ2-6)
CSAETTPTHGSGANVLTF

SEQ ID NO: 338645 - protein, 14 aa, Homo sapiens
  CDR3 for alpha chain variable domain of TCR clone 169323 (TRAV1-2, TRAJ8)
CAVREDTGFQKLVF

SEQ ID NO: 338646 - protein, 15 aa, Homo sapiens
  CDR3 for beta chain variable domain of TCR clone 169323 (TRBV9, TRBJ1-6)
CASRVAGTGDSPLHF

SEQ ID NO: 338647 - protein, 12 aa, Homo sapiens
  CDR3 for alpha chain variable domain of TCR clone 169324 (TRAV13-2, TRAJ23)
CAERHRGGKLIF

SEQ ID NO: 338648 - protein, 14 aa, Homo sapiens
  CDR3 for beta chain variable domain of TCR clone 169324 (TRBV2, TRBJ2-7)
CASSLTSGGYEQYL

SEQ ID NO: 338649 - protein, 11 aa, Homo sapiens
  CDR3 for alpha chain variable domain of TCR clone 169325 (TRAV3, TRAJ21)
CAVGNFNKFYF

SEQ ID NO: 338650 - protein, 13 aa, Homo sapiens
  CDR3 for beta chain variable domain of TCR clone 169325 (TRBV15, TRBJ1-6)
CATSGGVNSPLHF

SEQ ID NO: 338651 - protein, 13 aa, Homo sapiens
  CDR3 for alpha chain variable domain of TCR clone 169326 (TRAV21, TRAJ27)
CAARPGNAGKPTF

SEQ ID NO: 338652 - protein, 14 aa, Homo sapiens
  CDR3 for beta chain variable domain of TCR clone 169326 (TRBV19, TRBJ2-1)
CASPTFVLSGEQFF

SEQ ID NO: 338653 - protein, 10 aa, Homo sapiens
  CDR3 for alpha chain variable domain of TCR clone 169327 (TRAV1-2, TRAJ23)
CAAWAGKLIF

SEQ ID NO: 338654 - protein, 13 aa, Homo sapiens
  CDR3 for beta chain variable domain of TCR clone 169327 (TRBV9, TRBJ2-1)
CASSPSGGNEQFF

SEQ ID NO: 338655 - protein, 14 aa, Homo sapiens
  CDR3 for alpha chain variable domain of TCR clone 169328 (TRAV12-1, TRAJ12)
CVVTRMDSSYKLIF

SEQ ID NO: 338656 - protein, 18 aa, Homo sapiens
  CDR3 for beta chain variable domain of TCR clone 169328 (TRBV20-1, TRBJ2-6)
CSAEATPTHGSGANVLTF

SEQ ID NO: 338657 - protein, 12 aa, Homo sapiens
  CDR3 for alpha chain variable domain of TCR clone 169329 (TRAV1-2, TRAJ24)
CAVGGSWGKFQF

SEQ ID NO: 338658 - protein, 14 aa, Homo sapiens
  CDR3 for beta chain variable domain of TCR clone 169329 (TRBV7-2, TRBJ2-7)
CASRSQGAAYEQYF

SEQ ID NO: 338659 - protein, 16 aa, Homo sapiens
  CDR3 for alpha chain variable domain of TCR clone 169330 (TRAV3, TRAJ37)
CAVRPHGSGNTGKLIF

SEQ ID NO: 338660 - protein, 14 aa, Homo sapiens
  CDR3 for beta chain variable domain of TCR clone 169330 (TRBV25-1, TRBJ1-1)
CASTHLGGNTEGFF

SEQ ID NO: 338661 - protein, 14 aa, Homo sapiens
  CDR3 for alpha chain variable domain of TCR clone 169331 (TRAV4, TRAJ9)
CLVGSGTGGLKTIF

SEQ ID NO: 338662 - protein, 13 aa, Homo sapiens
  CDR3 for beta chain variable domain of TCR clone 169331 (TRBV20-1, TRBJ1-3)
CSARLGVGNTIYF

SEQ ID NO: 338663 - protein, 10 aa, Homo sapiens
  CDR3 for alpha chain variable domain of TCR clone 169332 (TRAV3, TRAJ30)
CAVREIEIIF

SEQ ID NO: 338664 - protein, 12 aa, Homo sapiens
  CDR3 for beta chain variable domain of TCR clone 169332 (TRBV11-2, TRBJ2-1)
CASSPGNNEQFF

SEQ ID NO: 338665 - protein, 13 aa, Homo sapiens
  CDR3 for alpha chain variable domain of TCR clone 169333 (TRAV3, TRAJ27)
CAVRPLGAGKSTF

SEQ ID NO: 338666 - protein, 14 aa, Homo sapiens
  CDR3 for beta chain variable domain of TCR clone 169333 (TRBV5-1, TRBJ2-7)
CASSLQGAVDEQYF

SEQ ID NO: 338667 - protein, 17 aa, Homo sapiens
  CDR3 for alpha chain variable domain of TCR clone 169334 (TRAV3, TRAJ6)
CAVRDGPMAGGSYIPTF

SEQ ID NO: 338668 - protein, 15 aa, Homo sapiens
  CDR3 for beta chain variable domain of TCR clone 169334 (TRBV5-1, TRBJ2-1)
CASSPPRAPYNEQFF

SEQ ID NO: 338669 - protein, 21 aa, Homo sapiens
  CDR3 for alpha chain variable domain of TCR clone 169335 (TRAV26-1, TRAJ17)
CCVLLYRQSSGSKAAGNKLTF

SEQ ID NO: 338670 - protein, 14 aa, Homo sapiens
  CDR3 for beta chain variable domain of TCR clone 169335 (TRBV28, TRBJ1-2)
CASRIQGANYGYTF

SEQ ID NO: 338671 - protein, 15 aa, Homo sapiens
  CDR3 for alpha chain variable domain of TCR clone 169336 (TRAV8-4, TRAJ47)
CAVSDLLGYGNKRVF

SEQ ID NO: 338672 - protein, 16 aa, Homo sapiens
  CDR3 for beta chain variable domain of TCR clone 169336 (TRBV19, TRBJ2-2)
CASSPSGGLNTGELFF

SEQ ID NO: 338673 - protein, 14 aa, Homo sapiens
  CDR3 for alpha chain variable domain of TCR clone 169337 (TRAV12-2, TRAJ17)
CAVLFKAAGNKLTF

SEQ ID NO: 338674 - protein, 11 aa, Homo sapiens
  CDR3 for beta chain variable domain of TCR clone 169337 (TRBV29-1, TRBJ2-5)
CSEGRTGTQYF

SEQ ID NO: 338675 - protein, 14 aa, Homo sapiens
  CDR3 for alpha chain variable domain of TCR clone 169338 (TRAV12-2, TRAJ44)
CDVNKAGTASKLTF

SEQ ID NO: 338676 - protein, 12 aa, Homo sapiens
  CDR3 for beta chain variable domain of TCR clone 169338 (TRBV19, TRBJ1-4)
CASKDWPGGLFF

SEQ ID NO: 338677 - protein, 18 aa, Homo sapiens
  CDR3 for alpha chain variable domain of TCR clone 169339 (TRAV21, TRAJ4)
SLVTQPPTPRGGYNKLIF

SEQ ID NO: 338678 - protein, 12 aa, Homo sapiens
  CDR3 for beta chain variable domain of TCR clone 169339 (TRBV11-2, TRBJ2-2)
CASSLGGGELFF

SEQ ID NO: 338679 - protein, 11 aa, Homo sapiens
  CDR3 for alpha chain variable domain of TCR clone 169340 (TRAV21, TRAJ48)
CAVDGNEKLTF

SEQ ID NO: 338680 - protein, 16 aa, Homo sapiens
  CDR3 for beta chain variable domain of TCR clone 169340 (TRBV12-4, TRBJ1-5)
CASSSGPRGSNQPQHL

SEQ ID NO: 338681 - protein, 12 aa, Homo sapiens
  CDR3 for alpha chain variable domain of TCR clone 169341 (TRAV13-1, TRAJ27)
CSAHTNAGKSTF

SEQ ID NO: 338682 - protein, 14 aa, Homo sapiens
  CDR3 for beta chain variable domain of TCR clone 169341 (TRBV19, TRBJ2-2)
CASSGQGIAEELFF

SEQ ID NO: 338683 - protein, 12 aa, Homo sapiens
  CDR3 for alpha chain variable domain of TCR clone 169342 (TRAV27, TRAJ35)
CAGADFGNVLHC

SEQ ID NO: 338684 - protein, 13 aa, Homo sapiens
  CDR3 for beta chain variable domain of TCR clone 169342 (TRBV4-2, TRBJ1-1)
CASSQAGNTEAFF

SEQ ID NO: 338685 - protein, 14 aa, Homo sapiens
  CDR3 for alpha chain variable domain of TCR clone 169343 (TRAV13-1, TRAJ44)
CAAKATGTASKLTF

SEQ ID NO: 338686 - protein, 15 aa, Homo sapiens
  CDR3 for beta chain variable domain of TCR clone 169343 (TRBV4-1, TRBJ2-7)
CASSQQGQGFDEQYF

SEQ ID NO: 338687 - protein, 17 aa, Homo sapiens
  CDR3 for alpha chain variable domain of TCR clone 169344 (TRAV38-2/DV8, TRAJ48)
CAYRSVFRGLGNEKLTF

SEQ ID NO: 338688 - protein, 15 aa, Homo sapiens
  CDR3 for beta chain variable domain of TCR clone 169344 (TRBV5-1, TRBJ2-5)
CASSRRGTVQETQYF

SEQ ID NO: 338689 - protein, 17 aa, Homo sapiens
  CDR3 for alpha chain variable domain of TCR clone 169345 (TRAV3, TRAJ6)
CAVRDGPRAGGSYIPTF

SEQ ID NO: 338690 - protein, 14 aa, Homo sapiens
  CDR3 for beta chain variable domain of TCR clone 169345 (TRBV7-2, TRBJ2-7)
FASSPKTSCYEQYF

SEQ ID NO: 338691 - protein, 16 aa, Homo sapiens
  CDR3 for alpha chain variable domain of TCR clone 169346 (TRAV30, TRAJ24)
CGTEIVDTDSWGKFQF

SEQ ID NO: 338692 - protein, 16 aa, Homo sapiens
  CDR3 for beta chain variable domain of TCR clone 169346 (TRBV2, TRBJ1-3)
CASSGGAGRSGNTIYF

SEQ ID NO: 338693 - protein, 15 aa, Homo sapiens
  CDR3 for alpha chain variable domain of TCR clone 169347 (TRAV26-1, TRAJ29)
CIVRVEGSGNTPLVF

SEQ ID NO: 338694 - protein, 16 aa, Homo sapiens
  CDR3 for beta chain variable domain of TCR clone 169347 (TRBV2, TRBJ1-5)
CASSLALGLYNQPQHF

SEQ ID NO: 338695 - protein, 13 aa, Homo sapiens
  CDR3 for alpha chain variable domain of TCR clone 169348 (TRAV3, TRAJ15)
CAVRDQAGTALIF

SEQ ID NO: 338696 - protein, 17 aa, Homo sapiens
  CDR3 for beta chain variable domain of TCR clone 169348 (TRBV19, TRBJ1-5)
CASSRDRILSRFQPQHF

SEQ ID NO: 338697 - protein, 18 aa, Homo sapiens
  CDR3 for alpha chain variable domain of TCR clone 169349 (TRAV13-1, TRAJ10)
CAASKGRAVTGGGKKLTF

SEQ ID NO: 338698 - protein, 14 aa, Homo sapiens
  CDR3 for beta chain variable domain of TCR clone 169349 (TRBV18, TRBJ2-7)
CASSPRGGAYAQYF

SEQ ID NO: 338699 - protein, 12 aa, Homo sapiens
  CDR3 for alpha chain variable domain of TCR clone 169350 (TRAV3, TRAJ43)
CAVSDPNNDMRF

SEQ ID NO: 338700 - protein, 17 aa, Homo sapiens
  CDR3 for beta chain variable domain of TCR clone 169350 (TRBV7-8, TRBJ2-6)
CASSAGTGGAGANVLTF

SEQ ID NO: 338701 - protein, 16 aa, Homo sapiens
  CDR3 for alpha chain variable domain of TCR clone 169351 (TRAV21, TRAJ45)
CAATMYSGGGADGLTF

SEQ ID NO: 338702 - protein, 15 aa, Homo sapiens
  CDR3 for beta chain variable domain of TCR clone 169351 (TRBV7-9, TRBJ1-6)
CASSSPGRGNSPLHF

SEQ ID NO: 338703 - protein, 15 aa, Homo sapiens
  CDR3 for alpha chain variable domain of TCR clone 169352 (TRAV8-3, TRAJ28)
CAVAYSGAGSDQLTF

SEQ ID NO: 338704 - protein, 12 aa, Homo sapiens
  CDR3 for beta chain variable domain of TCR clone 169352 (TRBV5-1, TRBJ2-1)
CASIGGYNEQFF

SEQ ID NO: 338705 - protein, 16 aa, Homo sapiens
  CDR3 for alpha chain variable domain of TCR clone 169353 (TRAV35, TRAJ28)
CAGQKYSGAGSYQLTF

SEQ ID NO: 338706 - protein, 16 aa, Homo sapiens
  CDR3 for beta chain variable domain of TCR clone 169353 (TRBV7-3, TRBJ2-2)
CASSLKRGTLAGELFF

SEQ ID NO: 338707 - protein, 15 aa, Homo sapiens
  CDR3 for alpha chain variable domain of TCR clone 169354 (TRAV8-4, TRAJ36)
CAVRKSWNGANNRFF

SEQ ID NO: 338708 - protein, 17 aa, Homo sapiens
  CDR3 for beta chain variable domain of TCR clone 169354 (TRBV3-1, TRBJ2-2)
CASSQDSQGPNTGELFF

SEQ ID NO: 338709 - protein, 17 aa, Homo sapiens
  CDR3 for alpha chain variable domain of TCR clone 169355 (TRAV3, TRAJ42)
CAVRDRDYGGSQGNLIF

SEQ ID NO: 338710 - protein, 13 aa, Homo sapiens
  CDR3 for beta chain variable domain of TCR clone 169355 (TRBV20-1, TRBJ2-5)
GSARRGTGATQYF

SEQ ID NO: 338711 - protein, 14 aa, Homo sapiens
  CDR3 for alpha chain variable domain of TCR clone 169356 (TRAV1-2, TRAJ17)
CALRRGAAGNKLTF

SEQ ID NO: 338712 - protein, 15 aa, Homo sapiens
  CDR3 for beta chain variable domain of TCR clone 169356 (TRBV10-2, TRBJ2-6)
CASSEQGTGANVLTF

SEQ ID NO: 338713 - protein, 16 aa, Homo sapiens
  CDR3 for alpha chain variable domain of TCR clone 169357 (TRAV17, TRAJ53)
CATDALSGGSNYKLTF

SEQ ID NO: 338714 - protein, 12 aa, Homo sapiens
  CDR3 for beta chain variable domain of TCR clone 169357 (TRBV5-1, TRBJ2-7)
CAGSFRGYEQYF

SEQ ID NO: 338715 - protein, 14 aa, Homo sapiens
  CDR3 for alpha chain variable domain of TCR clone 169358 (TRAV12-2, TRAJ45)
CAVYSGGGADGLTF

SEQ ID NO: 338716 - protein, 17 aa, Homo sapiens
  CDR3 for beta chain variable domain of TCR clone 169358 (TRBV13, TRBJ2-3)
CASSLSRVAGGRNTQYF

SEQ ID NO: 338717 - protein, 14 aa, Homo sapiens
  CDR3 for alpha chain variable domain of TCR clone 169359 (TRAV38-1, TRAJ58)
CAFRWETSGSRLTF

SEQ ID NO: 338718 - protein, 16 aa, Homo sapiens
  CDR3 for beta chain variable domain of TCR clone 169359 (TRBV19, TRBJ2-1)
CASSKAGPSSYNEQFF

SEQ ID NO: 338719 - protein, 18 aa, Homo sapiens
  CDR3 for alpha chain variable domain of TCR clone 169360 (TRAV21, TRAJ52)
CAVRPSPAGGTSYGKLTF

SEQ ID NO: 338720 - protein, 15 aa, Homo sapiens
  CDR3 for beta chain variable domain of TCR clone 169360 (TRBV5-1, TRBJ2-3)
CAGSVTSGSTDTQYF

SEQ ID NO: 338721 - protein, 12 aa, Homo sapiens
  CDR3 for alpha chain variable domain of TCR clone 169361 (TRAV25, TRAJ11)
CAGASGYSTLTF

SEQ ID NO: 338722 - protein, 14 aa, Homo sapiens
  CDR3 for beta chain variable domain of TCR clone 169361 (TRBV5-8, TRBJ2-3)
CGSSVGQGTDTQYF

SEQ ID NO: 338723 - protein, 11 aa, Homo sapiens
  CDR3 for alpha chain variable domain of TCR clone 169362 (TRAV2, TRAJ33)
CAVDSTYQLIW

SEQ ID NO: 338724 - protein, 15 aa, Homo sapiens
  CDR3 for beta chain variable domain of TCR clone 169362 (TRBV19, TRBJ1-2)
CASSVGQVLNYGYTF

SEQ ID NO: 338725 - protein, 14 aa, Homo sapiens
  CDR3 for alpha chain variable domain of TCR clone 169363 (TRAV8-2, TRAJ37)
CVVSISGNTGKLIF

SEQ ID NO: 338726 - protein, 17 aa, Homo sapiens
  CDR3 for beta chain variable domain of TCR clone 169363 (TRBV7-9, TRBJ2-3)
CASSATVAGDLTDTQYF

SEQ ID NO: 338727 - protein, 16 aa, Homo sapiens
  CDR3 for alpha chain variable domain of TCR clone 169364 (TRAV1-2, TRAJ10)
CAVRGVLTGGGNKLTF

SEQ ID NO: 338728 - protein, 13 aa, Homo sapiens
  CDR3 for beta chain variable domain of TCR clone 169364 (TRBV9, TRBJ2-1)
CASSVGQGGEQFF

SEQ ID NO: 338729 - protein, 11 aa, Homo sapiens
  CDR3 for alpha chain variable domain of TCR clone 169365 (TRAV1-2, TRAJ20)
CAVANDYKLSF

SEQ ID NO: 338730 - protein, 11 aa, Homo sapiens
  CDR3 for beta chain variable domain of TCR clone 169365 (TRBV6-3, TRBJ2-3)
CATGQADTQYF

SEQ ID NO: 338731 - protein, 14 aa, Homo sapiens
  CDR3 for alpha chain variable domain of TCR clone 169366 (TRAV1-2, TRAJ8)
CAVREDTGFQKLVF

SEQ ID NO: 338732 - protein, 15 aa, Homo sapiens
  CDR3 for beta chain variable domain of TCR clone 169366 (TRBV20-1, TRBJ1-4)
CSARREWGVNEKLFF

SEQ ID NO: 338733 - protein, 14 aa, Homo sapiens
  CDR3 for alpha chain variable domain of TCR clone 169367 (TRAV2, TRAJ9)
CAVEVRSGGFKTIF

SEQ ID NO: 338734 - protein, 15 aa, Homo sapiens
  CDR3 for beta chain variable domain of TCR clone 169367 (TRBV6-6, TRBJ2-7)
CASSYSYGGSYEQYF

SEQ ID NO: 338735 - protein, 16 aa, Homo sapiens
  CDR3 for alpha chain variable domain of TCR clone 169368 (TRAV13-1, TRAJ45)
CAARGSRKGGDDGLTF

SEQ ID NO: 338736 - protein, 13 aa, Homo sapiens
  CDR3 for beta chain variable domain of TCR clone 169368 (TRBV12-4, TRBJ2-5)
CASRKRGKENQYF

SEQ ID NO: 338737 - protein, 13 aa, Homo sapiens
  CDR3 for alpha chain variable domain of TCR clone 169369 (TRAV20, TRAJ49)
CAVQARTGNQFYF

SEQ ID NO: 338738 - protein, 14 aa, Homo sapiens
  CDR3 for beta chain variable domain of TCR clone 169369 (TRBV7-2, TRBJ2-7)
CASSPKTGFYEQYF

SEQ ID NO: 338739 - protein, 14 aa, Homo sapiens
  CDR3 for alpha chain variable domain of TCR clone 169370 (TRAV2, TRAJ37)
CAVDFTSNTGKLIF

SEQ ID NO: 338740 - protein, 20 aa, Homo sapiens
  CDR3 for beta chain variable domain of TCR clone 169370 (TRBV28, TRBJ2-1)
CASTPIGRSPGLAGENEQFF

SEQ ID NO: 338741 - protein, 15 aa, Homo sapiens
  CDR3 for alpha chain variable domain of TCR clone 169371 (TRAV12-1, TRAJ42)
CVVTRNGGSQGNLIF

SEQ ID NO: 338742 - protein, 14 aa, Homo sapiens
  CDR3 for beta chain variable domain of TCR clone 169371 (TRBV11-2, TRBJ2-3)
CARGLGGGANTQYF

SEQ ID NO: 338743 - protein, 19 aa, Homo sapiens
  CDR3 for alpha chain variable domain of TCR clone 169372 (TRAV25, TRAJ20)
TATQTTDVGILPHDYKLSF

SEQ ID NO: 338744 - protein, 15 aa, Homo sapiens
  CDR3 for beta chain variable domain of TCR clone 169372 (TRBV9, TRBJ1-6)
CASSVAGTGDSPLHF

SEQ ID NO: 338745 - protein, 15 aa, Homo sapiens
  CDR3 for alpha chain variable domain of TCR clone 169373 (TRAV3, TRAJ22)
CAVRDRGGSARHLTF

SEQ ID NO: 338746 - protein, 15 aa, Homo sapiens
  CDR3 for beta chain variable domain of TCR clone 169373 (TRBV7-9, TRBJ1-5)
CASSQGNQPNQPQHF

SEQ ID NO: 338747 - protein, 13 aa, Homo sapiens
  CDR3 for alpha chain variable domain of TCR clone 169374 (TRAV27, TRAJ56)
CAGLTGANSKLTF

SEQ ID NO: 338748 - protein, 12 aa, Homo sapiens
  CDR3 for beta chain variable domain of TCR clone 169374 (TRBV11-2, TRBJ2-2)
CPSSLGGGELFF

SEQ ID NO: 338749 - protein, 12 aa, Homo sapiens
  CDR3 for alpha chain variable domain of TCR clone 169375 (TRAV12-3, TRAJ17)
GAMTLTGNKLTF

SEQ ID NO: 338750 - protein, 15 aa, Homo sapiens
  CDR3 for beta chain variable domain of TCR clone 169375 (TRBV20-1, TRBJ2-7)
CSASDRVSGMDEQYF

SEQ ID NO: 338751 - protein, 14 aa, Homo sapiens
  CDR3 for alpha chain variable domain of TCR clone 169376 (TRAV4, TRAJ41)
CLVGDGDSGYALNF

SEQ ID NO: 338752 - protein, 13 aa, Homo sapiens
  CDR3 for beta chain variable domain of TCR clone 169376 (TRBV7-3, TRBJ1-1)
CASSQDWGAEAFC

SEQ ID NO: 338753 - protein, 19 aa, Homo sapiens
  CDR3 for alpha chain variable domain of TCR clone 169377 (TRAV30, TRAJ52)
CGTEANTNAGGTSYGKLTF

SEQ ID NO: 338754 - protein, 16 aa, Homo sapiens
  CDR3 for beta chain variable domain of TCR clone 169377 (TRBV13, TRBJ2-2)
CASSPRTGEHTGELFF

SEQ ID NO: 338755 - protein, 11 aa, Homo sapiens
  CDR3 for alpha chain variable domain of TCR clone 169378 (TRAV21, TRAJ11)
CAVNGYSTLTF

SEQ ID NO: 338756 - protein, 14 aa, Homo sapiens
  CDR3 for beta chain variable domain of TCR clone 169378 (TRBV4-1, TRBJ2-7)
CASSPVAGGDEQYF

SEQ ID NO: 338757 - protein, 13 aa, Homo sapiens
  CDR3 for alpha chain variable domain of TCR clone 169379 (TRAV21, TRAJ20)
CAVGLRVDYKPSF

SEQ ID NO: 338758 - protein, 15 aa, Homo sapiens
  CDR3 for beta chain variable domain of TCR clone 169379 (TRBV27, TRBJ2-1)
CASSNGGGSSNEQFF

SEQ ID NO: 338759 - protein, 15 aa, Homo sapiens
  CDR3 for alpha chain variable domain of TCR clone 169380 (TRAV8-4, TRAJ45)
CAVMWTGGGADGLTF

SEQ ID NO: 338760 - protein, 12 aa, Homo sapiens
  CDR3 for beta chain variable domain of TCR clone 169380 (TRBV29-1, TRBJ2-7)
CSVGPSGDEQYF

SEQ ID NO: 338761 - protein, 15 aa, Homo sapiens
  CDR3 for alpha chain variable domain of TCR clone 169381 (TRAV25, TRAJ53)
CPTSNSGGSNYKLTF

SEQ ID NO: 338762 - protein, 14 aa, Homo sapiens
  CDR3 for beta chain variable domain of TCR clone 169381 (TRBV18, TRBJ1-2)
CASSPDRVVYGYTF

SEQ ID NO: 338763 - protein, 13 aa, Homo sapiens
  CDR3 for alpha chain variable domain of TCR clone 169382 (TRAV30, TRAJ24)
CGTVTDSWGKSQF

SEQ ID NO: 338764 - protein, 16 aa, Homo sapiens
  CDR3 for beta chain variable domain of TCR clone 169382 (TRBV7-3, TRBJ2-2)
CASSLKRETLSGELFF

SEQ ID NO: 338765 - protein, 14 aa, Homo sapiens
  CDR3 for alpha chain variable domain of TCR clone 169383 (TRAV8-1, TRAJ24)
CAANAADSWGKLQF

SEQ ID NO: 338766 - protein, 16 aa, Homo sapiens
  CDR3 for beta chain variable domain of TCR clone 169383 (TRBV4-3, TRBJ2-1)
CASSPALDRGVNEQFF

SEQ ID NO: 338767 - protein, 13 aa, Homo sapiens
  CDR3 for alpha chain variable domain of TCR clone 169384 (TRAV13-2, TRAJ13)
CAERPGGYQKVTF

SEQ ID NO: 338768 - protein, 14 aa, Homo sapiens
  CDR3 for beta chain variable domain of TCR clone 169384 (TRBV23-1, TRBJ2-5)
CASSFLRSQETKYL

SEQ ID NO: 338769 - protein, 13 aa, Homo sapiens
  CDR3 for alpha chain variable domain of TCR clone 169385 (TRAV23/DV6, TRAJ47)
CAASMTRGNKLVL

SEQ ID NO: 338770 - protein, 14 aa, Homo sapiens
  CDR3 for beta chain variable domain of TCR clone 169385 (TRBV7-3, TRBJ1-1)
CASSLKGGNTEAVF

SEQ ID NO: 338771 - protein, 14 aa, Homo sapiens
  CDR3 for alpha chain variable domain of TCR clone 169386 (TRAV26-1, TRAJ38)
CIADNAGNNRKLIW

SEQ ID NO: 338772 - protein, 16 aa, Homo sapiens
  CDR3 for beta chain variable domain of TCR clone 169386 (TRBV4-3, TRBJ2-3)
CASSQGGLAGTDTRYF

SEQ ID NO: 338773 - protein, 17 aa, Homo sapiens
  CDR3 for alpha chain variable domain of TCR clone 169387 (TRAV8-1, TRAJ43)
CAVTNDMRFGAGTRLTV

SEQ ID NO: 338774 - protein, 17 aa, Homo sapiens
  CDR3 for beta chain variable domain of TCR clone 169387 (TRBV5-4, TRBJ2-1)
CASSSAGRRGPYNEQFF

SEQ ID NO: 338775 - protein, 13 aa, Homo sapiens
  CDR3 for alpha chain variable domain of TCR clone 169388 (TRAV29/DV5, TRAJ33)
CAASVASNYQLIW

SEQ ID NO: 338776 - protein, 14 aa, Homo sapiens
  CDR3 for beta chain variable domain of TCR clone 169388 (TRBV5-6, TRBJ1-1)
CASSLAGEWTEAFF

SEQ ID NO: 338777 - protein, 15 aa, Homo sapiens
  CDR3 for alpha chain variable domain of TCR clone 169389 (TRAV17, TRAJ13)
CATDAGSGGYQKVTF

SEQ ID NO: 338778 - protein, 14 aa, Homo sapiens
  CDR3 for beta chain variable domain of TCR clone 169389 (TRBV7-2, TRBJ2-7)
CASRSQGAAYEQYF

SEQ ID NO: 338779 - protein, 13 aa, Homo sapiens
  CDR3 for alpha chain variable domain of TCR clone 169390 (TRAV8-3, TRAJ43)
CAVVPYNNNDMRF

SEQ ID NO: 338780 - protein, 15 aa, Homo sapiens
  CDR3 for beta chain variable domain of TCR clone 169390 (TRBV4-1, TRBJ2-3)
CASSRGQGIPDTQYF

SEQ ID NO: 338781 - protein, 11 aa, Homo sapiens
  CDR3 for alpha chain variable domain of TCR clone 169391 (TRAV1-1, TRAJ23)
CAVRQGGKLIF

SEQ ID NO: 338782 - protein, 16 aa, Homo sapiens
  CDR3 for beta chain variable domain of TCR clone 169391 (TRBV6-5, TRBJ2-3)
CASRFHRGGGSDTQYF

SEQ ID NO: 338783 - protein, 14 aa, Homo sapiens
  CDR3 for alpha chain variable domain of TCR clone 169392 (TRAV12-3, TRAJ10)
SHLPLTGGGNKLTF

SEQ ID NO: 338784 - protein, 13 aa, Homo sapiens
  CDR3 for beta chain variable domain of TCR clone 169392 (TRBV20-1, TRBJ1-5)
CSASQQVIQPQHF

SEQ ID NO: 338785 - protein, 16 aa, Homo sapiens
  CDR3 for alpha chain variable domain of TCR clone 169393 (TRAV21, TRAJ37)
CAVRTAGSSNTGKLIF

SEQ ID NO: 338786 - protein, 12 aa, Homo sapiens
  CDR3 for beta chain variable domain of TCR clone 169393 (TRBV12-4, TRBJ2-7)
CASSLGGYEQYF

SEQ ID NO: 338787 - protein, 12 aa, Homo sapiens
  CDR3 for alpha chain variable domain of TCR clone 169394 (TRAV35, TRAJ49)
CAGWNTGNHFYF

SEQ ID NO: 338788 - protein, 16 aa, Homo sapiens
  CDR3 for beta chain variable domain of TCR clone 169394 (TRBV5-1, TRBJ2-2)
CASSLWDTTNTGELFF

SEQ ID NO: 338789 - protein, 12 aa, Homo sapiens
  CDR3 for alpha chain variable domain of TCR clone 169395 (TRAV29/DV5, TRAJ34)
CAARHNTDKLIF

SEQ ID NO: 338790 - protein, 20 aa, Homo sapiens
  CDR3 for beta chain variable domain of TCR clone 169395 (TRBV7-8, TRBJ2-2)
CASSHLFPGPTIHITGELFF

SEQ ID NO: 338791 - protein, 17 aa, Homo sapiens
  CDR3 for alpha chain variable domain of TCR clone 169396 (TRAV1-1, TRAJ4)
CAVRAFSGGYNKLILEQ

SEQ ID NO: 338792 - protein, 18 aa, Homo sapiens
  CDR3 for beta chain variable domain of TCR clone 169396 (TRBV12-4, TRBJ2-2)
CASSLVAGTRGRTGELFF

SEQ ID NO: 338793 - protein, 13 aa, Homo sapiens
  CDR3 for alpha chain variable domain of TCR clone 169397 (TRAV1-2, TRAJ20)
CAVRDGNDYKLSF

SEQ ID NO: 338794 - protein, 14 aa, Homo sapiens
  CDR3 for beta chain variable domain of TCR clone 169397 (TRBV12-5, TRBJ2-5)
CASGSRTHQETQYF

SEQ ID NO: 338795 - protein, 11 aa, Homo sapiens
  CDR3 for alpha chain variable domain of TCR clone 169398 (TRAV3, TRAJ17)
HRGAAGNKLTF

SEQ ID NO: 338796 - protein, 16 aa, Homo sapiens
  CDR3 for beta chain variable domain of TCR clone 169398 (TRBV7-6, TRBJ2-1)
CASSAPGPSSYNEQFF

SEQ ID NO: 338797 - protein, 10 aa, Homo sapiens
  CDR3 for alpha chain variable domain of TCR clone 169399 (TRAV1-1, TRAJ26)
CSVNGQNFVF

SEQ ID NO: 338798 - protein, 15 aa, Homo sapiens
  CDR3 for beta chain variable domain of TCR clone 169399 (TRBV9, TRBJ1-6)
CACSVAGTGDSPLHF

SEQ ID NO: 338799 - protein, 17 aa, Homo sapiens
  CDR3 for alpha chain variable domain of TCR clone 169400 (TRAV3, TRAJ6)
CAVRDGPRAGGSYIPTF

SEQ ID NO: 338800 - protein, 15 aa, Homo sapiens
  CDR3 for beta chain variable domain of TCR clone 169400 (TRBV5-8, TRBJ2-2)
CVSSLDRGATGELFF

SEQ ID NO: 338801 - protein, 12 aa, Homo sapiens
  CDR3 for alpha chain variable domain of TCR clone 169401 (TRAV29/DV5, TRAJ49)
CAATDTGNQFYF

SEQ ID NO: 338802 - protein, 15 aa, Homo sapiens
  CDR3 for beta chain variable domain of TCR clone 169401 (TRBV10-3, TRBJ2-3)
CAISLTSGGTDTQYF

SEQ ID NO: 338803 - protein, 17 aa, Homo sapiens
  CDR3 for alpha chain variable domain of TCR clone 169402 (TRAV3, TRAJ6)
CAVRDGPRAGGSYIPTF

SEQ ID NO: 338804 - protein, 14 aa, Homo sapiens
  CDR3 for beta chain variable domain of TCR clone 169402 (TRBV5-7, TRBJ2-7)
CASSGGLSSYEQYF

SEQ ID NO: 338805 - protein, 13 aa, Homo sapiens
  CDR3 for alpha chain variable domain of TCR clone 169403 (TRAV30, TRAJ49)
CGTEPNTGNQFYF

SEQ ID NO: 338806 - protein, 14 aa, Homo sapiens
  CDR3 for beta chain variable domain of TCR clone 169403 (TRBV29-1, TRBJ2-1)
FSVEFRGIPFEQFF

SEQ ID NO: 338807 - protein, 16 aa, Homo sapiens
  CDR3 for alpha chain variable domain of TCR clone 169404 (TRAV26-1, TRAJ32)
CIVRTNYGGATNKLIF

SEQ ID NO: 338808 - protein, 14 aa, Homo sapiens
  CDR3 for beta chain variable domain of TCR clone 169404 (TRBV7-2, TRBJ2-5)
CASSPRGSSETQYF

SEQ ID NO: 338809 - protein, 16 aa, Homo sapiens
  CDR3 for alpha chain variable domain of TCR clone 169405 (TRAV12-3, TRAJ53)
CAMSPGSGVSNYKLTF

SEQ ID NO: 338810 - protein, 13 aa, Homo sapiens
  CDR3 for beta chain variable domain of TCR clone 169405 (TRBV7-3, TRBJ1-1)
CASSQDWGAEAFF

SEQ ID NO: 338811 - protein, 14 aa, Homo sapiens
  CDR3 for alpha chain variable domain of TCR clone 169406 (TRAV12-2, TRAJ53)
CAVPSRGSNYKLTF

SEQ ID NO: 338812 - protein, 17 aa, Homo sapiens
  CDR3 for beta chain variable domain of TCR clone 169406 (TRBV13, TRBJ2-3)
CASSLSRVAGGEEYAVF

SEQ ID NO: 338813 - protein, 13 aa, Homo sapiens
  CDR3 for alpha chain variable domain of TCR clone 169407 (TRAV36/DV7, TRAJ33)
CAVDMDSNYQLIW

SEQ ID NO: 338814 - protein, 16 aa, Homo sapiens
  CDR3 for beta chain variable domain of TCR clone 169407 (TRBV15, TRBJ2-3)
CATRLSGGRAPETQYF

SEQ ID NO: 338815 - protein, 15 aa, Homo sapiens
  CDR3 for alpha chain variable domain of TCR clone 169408 (TRAV8-3, TRAJ11)
CAVGLLNSGYSTLTF

SEQ ID NO: 338816 - protein, 17 aa, Homo sapiens
  CDR3 for beta chain variable domain of TCR clone 169408 (TRBV20-1, TRBJ2-2)
CSASGSGQGGLTGELFF

SEQ ID NO: 338817 - protein, 14 aa, Homo sapiens
  CDR3 for alpha chain variable domain of TCR clone 169409 (TRAV1-2, TRAJ16)
CAVNRFTDGQKLLF

SEQ ID NO: 338818 - protein, 15 aa, Homo sapiens
  CDR3 for beta chain variable domain of TCR clone 169409 (TRBV7-6, TRBJ2-2)
CASRRTSGNTGELFF

SEQ ID NO: 338819 - protein, 14 aa, Homo sapiens
  CDR3 for alpha chain variable domain of TCR clone 169410 (TRAV12-3, TRAJ42)
CAMNYGGSQGNLIF

SEQ ID NO: 338820 - protein, 15 aa, Homo sapiens
  CDR3 for beta chain variable domain of TCR clone 169410 (TRBV5-7, TRBJ1-5)
CDSSYGKLWDQTQHF

SEQ ID NO: 338821 - protein, 10 aa, Homo sapiens
  CDR3 for alpha chain variable domain of TCR clone 169411 (TRAV1-2, TRAJ31)
CAFFDARLMF

SEQ ID NO: 338822 - protein, 15 aa, Homo sapiens
  CDR3 for beta chain variable domain of TCR clone 169411 (TRBV10-2, TRBJ2-6)
CASSEQGTGANVLTF

SEQ ID NO: 338823 - protein, 12 aa, Homo sapiens
  CDR3 for alpha chain variable domain of TCR clone 169412 (TRAV12-3, TRAJ17)
CAMTLTGNKLTF

SEQ ID NO: 338824 - protein, 13 aa, Homo sapiens
  CDR3 for beta chain variable domain of TCR clone 169412 (TRBV18, TRBJ2-2)
CASSPTRGGELFF

SEQ ID NO: 338825 - protein, 17 aa, Homo sapiens
  CDR3 for alpha chain variable domain of TCR clone 169413 (TRAV20, TRAJ52)
CAVQANAGGTSYGKLTF

SEQ ID NO: 338826 - protein, 16 aa, Homo sapiens
  CDR3 for beta chain variable domain of TCR clone 169413 (TRBV7-7, TRBJ2-1)
CASSLASGTSYNEQFF

SEQ ID NO: 338827 - protein, 17 aa, Homo sapiens
  CDR3 for alpha chain variable domain of TCR clone 169414 (TRAV3, TRAJ42)
CAVRDRDYGGSQGNLLF

SEQ ID NO: 338828 - protein, 16 aa, Homo sapiens
  CDR3 for beta chain variable domain of TCR clone 169414 (TRBV7-3, TRBJ2-2)
CASSLKRGTLSGGLFF

SEQ ID NO: 338829 - protein, 13 aa, Homo sapiens
  CDR3 for alpha chain variable domain of TCR clone 169415 (TRAV8-1, TRAJ30)
CAVIMNRDDKIIF

SEQ ID NO: 338830 - protein, 14 aa, Homo sapiens
  CDR3 for beta chain variable domain of TCR clone 169415 (TRBV11-2, TRBJ2-5)
CASSRTGGIETQYF

SEQ ID NO: 338831 - protein, 13 aa, Homo sapiens
  CDR3 for alpha chain variable domain of TCR clone 169416 (TRAV26-2, TRAJ43)
CILRAVNNNDMRF

SEQ ID NO: 338832 - protein, 15 aa, Homo sapiens
  CDR3 for beta chain variable domain of TCR clone 169416 (TRBV7-3, TRBJ2-1)
CASSPTGGGEVEQFF

SEQ ID NO: 338833 - protein, 15 aa, Homo sapiens
  CDR3 for alpha chain variable domain of TCR clone 169417 (TRAV2, TRAJ44)
CAVEAYTGTASKPTF

SEQ ID NO: 338834 - protein, 17 aa, Homo sapiens
  CDR3 for beta chain variable domain of TCR clone 169417 (TRBV12-4, TRBJ2-1)
CASSPGLAGGRINEQFF

SEQ ID NO: 338835 - protein, 12 aa, Homo sapiens
  CDR3 for alpha chain variable domain of TCR clone 169418 (TRAV12-3, TRAJ17)
CAMTLTGNKLTF

SEQ ID NO: 338836 - protein, 14 aa, Homo sapiens
  CDR3 for beta chain variable domain of TCR clone 169418 (TRBV7-9, TRBJ2-5)
CASSPAQDQETQYF

SEQ ID NO: 338837 - protein, 14 aa, Homo sapiens
  CDR3 for alpha chain variable domain of TCR clone 169419 (TRAV12-3, TRAJ10)
SHLPLTGGGNKLTF

SEQ ID NO: 338838 - protein, 16 aa, Homo sapiens
  CDR3 for beta chain variable domain of TCR clone 169419 (TRBV15, TRBJ2-7)
CATSRGRAGGTYEQYF

SEQ ID NO: 338839 - protein, 18 aa, Homo sapiens
  CDR3 for alpha chain variable domain of TCR clone 169420 (TRAV21, TRAJ52)
CAVRPSPAGGTSYGKLTF

SEQ ID NO: 338840 - protein, 15 aa, Homo sapiens
  CDR3 for beta chain variable domain of TCR clone 169420 (TRBV5-1, TRBJ2-3)
CASSVTAGSTDTQYF

SEQ ID NO: 338841 - protein, 20 aa, Homo sapiens
  CDR3 for alpha chain variable domain of TCR clone 169421 (TRAV8-2, TRAJ26)
CVVTLLLGSEFCLWSRNPIF

SEQ ID NO: 338842 - protein, 15 aa, Homo sapiens
  CDR3 for beta chain variable domain of TCR clone 169421 (TRBV11-2, TRBJ2-2)
CASSSDRVNAGELFF

SEQ ID NO: 338843 - protein, 13 aa, Homo sapiens
  CDR3 for alpha chain variable domain of TCR clone 169422 (TRAV2, TRAJ40)
CAVVTSGTYKYIF

SEQ ID NO: 338844 - protein, 14 aa, Homo sapiens
  CDR3 for beta chain variable domain of TCR clone 169422 (TRBV28, TRBJ1-1)
CASSSEQGYTEAFF

SEQ ID NO: 338845 - protein, 14 aa, Homo sapiens
  CDR3 for alpha chain variable domain of TCR clone 169423 (TRAV12-1, TRAJ30)
CVVNIGGRGDKIIF

SEQ ID NO: 338846 - protein, 15 aa, Homo sapiens
  CDR3 for beta chain variable domain of TCR clone 169423 (TRBV18, TRBJ1-2)
CASSPSNTPNYGYTF

SEQ ID NO: 338847 - protein, 10 aa, Homo sapiens
  CDR3 for alpha chain variable domain of TCR clone 169424 (TRAV23/DV6, TRAJ4)
CPARAFWSRD

SEQ ID NO: 338848 - protein, 13 aa, Homo sapiens
  CDR3 for beta chain variable domain of TCR clone 169424 (TRBV7-2, TRBJ1-1)
CASSRNTNTEAFF

SEQ ID NO: 338849 - protein, 15 aa, Homo sapiens
  CDR3 for alpha chain variable domain of TCR clone 169425 (TRAV17, TRAJ57)
CATGPSQGRPEKLVF

SEQ ID NO: 338850 - protein, 16 aa, Homo sapiens
  CDR3 for beta chain variable domain of TCR clone 169425 (TRBV12-4, TRBJ1-5)
CASSRPVGGSNQPQHF

SEQ ID NO: 338851 - protein, 11 aa, Homo sapiens
  CDR3 for alpha chain variable domain of TCR clone 169426 (TRAV12-3, TRAJ27)
CAMANAGKSTF

SEQ ID NO: 338852 - protein, 18 aa, Homo sapiens
  CDR3 for beta chain variable domain of TCR clone 169426 (TRBV20-1, TRBJ2-6)
CSAETTPTHGSGANVLTF

SEQ ID NO: 338853 - protein, 14 aa, Homo sapiens
  CDR3 for alpha chain variable domain of TCR clone 169427 (TRAV12-2, TRAJ17)
CAVNIKAAGNKLTF

SEQ ID NO: 338854 - protein, 15 aa, Homo sapiens
  CDR3 for beta chain variable domain of TCR clone 169427 (TRBV3-1, TRBJ2-1)
CASSQDYTPRGEQFF

SEQ ID NO: 338855 - protein, 16 aa, Homo sapiens
  CDR3 for alpha chain variable domain of TCR clone 169428 (TRAV30, TRAJ24)
CGTEIAYADSWGKFQF

SEQ ID NO: 338856 - protein, 14 aa, Homo sapiens
  CDR3 for beta chain variable domain of TCR clone 169428 (TRBV13, TRBJ2-1)
CASSPRPRYNEQFF

SEQ ID NO: 338857 - protein, 13 aa, Homo sapiens
  CDR3 for alpha chain variable domain of TCR clone 169429 (TRAV29/DV5, TRAJ40)
CAAVWSPGYKYIF

SEQ ID NO: 338858 - protein, 15 aa, Homo sapiens
  CDR3 for beta chain variable domain of TCR clone 169429 (TRBV7-6, TRBJ1-5)
CASSQSSGINQPQHF

SEQ ID NO: 338859 - protein, 11 aa, Homo sapiens
  CDR3 for alpha chain variable domain of TCR clone 169430 (TRAV12-1, TRAJ30)
CVVNGQDKIIF

SEQ ID NO: 338860 - protein, 12 aa, Homo sapiens
  CDR3 for beta chain variable domain of TCR clone 169430 (TRBV27, TRBJ2-2)
CAIKLFTGELFL

SEQ ID NO: 338861 - protein, 18 aa, Homo sapiens
  CDR3 for alpha chain variable domain of TCR clone 169431 (TRAV26-1, TRAJ5)
CIVRVVPPRDTGRRALTF

SEQ ID NO: 338862 - protein, 15 aa, Homo sapiens
  CDR3 for beta chain variable domain of TCR clone 169431 (TRBV7-9, TRBJ2-7)
CASSLPMAQANEQYF

SEQ ID NO: 338863 - protein, 23 aa, Homo sapiens
  CDR3 for alpha chain variable domain of TCR clone 169432 (TRAV1-1, TRAJ11)
LLQELQMKDSASYFCAGYITLTF

SEQ ID NO: 338864 - protein, 15 aa, Homo sapiens
  CDR3 for beta chain variable domain of TCR clone 169432 (TRBV6-5, TRBJ2-1)
CASRGDFDSYNEQFF

SEQ ID NO: 338865 - protein, 13 aa, Homo sapiens
  CDR3 for alpha chain variable domain of TCR clone 169433 (TRAV38-2/DV8, TRAJ34)
CAYRTWYTDKLIF

SEQ ID NO: 338866 - protein, 18 aa, Homo sapiens
  CDR3 for beta chain variable domain of TCR clone 169433 (TRBV6-6, TRBJ1-3)
CASSYSKWDSISGNTIYF

SEQ ID NO: 338867 - protein, 13 aa, Homo sapiens
  CDR3 for alpha chain variable domain of TCR clone 169434 (TRAV8-3, TRAJ44)
CAVVPGTASKLTF

SEQ ID NO: 338868 - protein, 14 aa, Homo sapiens
  CDR3 for beta chain variable domain of TCR clone 169434 (TRBV11-2, TRBJ2-3)
CASRRIARTDTQCF

SEQ ID NO: 338869 - protein, 13 aa, Homo sapiens
  CDR3 for alpha chain variable domain of TCR clone 169435 (TRAV21, TRAJ20)
CAVGLRVDYKLTF

SEQ ID NO: 338870 - protein, 13 aa, Homo sapiens
  CDR3 for beta chain variable domain of TCR clone 169435 (TRBV6-1, TRBJ1-1)
CASSRQGNTEAFF

SEQ ID NO: 338871 - protein, 12 aa, Homo sapiens
  CDR3 for alpha chain variable domain of TCR clone 169436 (TRAV13-2, TRAJ39)
CAENSERNMLTC

SEQ ID NO: 338872 - protein, 13 aa, Homo sapiens
  CDR3 for beta chain variable domain of TCR clone 169436 (TRBV6-1, TRBJ1-2)
CASSGGISFGYTF

SEQ ID NO: 338873 - protein, 10 aa, Homo sapiens
  CDR3 for alpha chain variable domain of TCR clone 169437 (TRAV12-3, TRAJ34)
CAMSADKLIF

SEQ ID NO: 338874 - protein, 15 aa, Homo sapiens
  CDR3 for beta chain variable domain of TCR clone 169437 (TRBV7-2, TRBJ2-1)
CASSSGLAGGNEQFF

SEQ ID NO: 338875 - protein, 14 aa, Homo sapiens
  CDR3 for alpha chain variable domain of TCR clone 169438 (TRAV2, TRAJ37)
CAVDFTSNTGKLIF

SEQ ID NO: 338876 - protein, 14 aa, Homo sapiens
  CDR3 for beta chain variable domain of TCR clone 169438 (TRBV5-1, TRBJ2-5)
CASSFGGSKETQYF

SEQ ID NO: 338877 - protein, 15 aa, Homo sapiens
  CDR3 for alpha chain variable domain of TCR clone 169439 (TRAV8-6, TRAJ23)
CAVREFYNQGGKLIF

SEQ ID NO: 338878 - protein, 15 aa, Homo sapiens
  CDR3 for beta chain variable domain of TCR clone 169439 (TRBV20-1, TRBJ2-1)
CSDITGTSGSNEQFF

SEQ ID NO: 338879 - protein, 13 aa, Homo sapiens
  CDR3 for alpha chain variable domain of TCR clone 169440 (TRAV3, TRAJ15)
CAVRDQAGTALIF

SEQ ID NO: 338880 - protein, 14 aa, Homo sapiens
  CDR3 for beta chain variable domain of TCR clone 169440 (TRBV19, TRBJ2-3)
CASSVGRGSDTQYF

SEQ ID NO: 338881 - protein, 16 aa, Homo sapiens
  CDR3 for alpha chain variable domain of TCR clone 169441 (TRAV8-1, TRAJ36)
CAVNSPTGANNLFLVL

SEQ ID NO: 338882 - protein, 15 aa, Homo sapiens
  CDR3 for beta chain variable domain of TCR clone 169441 (TRBV7-2, TRBJ2-3)
CASSLEQGGTDTQYF

SEQ ID NO: 338883 - protein, 20 aa, Homo sapiens
  CDR3 for alpha chain variable domain of TCR clone 169442 (TRAV30, TRAJ54)
SAAQSRSETQVVQGAQKLVF

SEQ ID NO: 338884 - protein, 14 aa, Homo sapiens
  CDR3 for beta chain variable domain of TCR clone 169442 (TRBV19, TRBJ2-1)
CASPTFVLSGEQFF

SEQ ID NO: 338885 - protein, 15 aa, Homo sapiens
  CDR3 for alpha chain variable domain of TCR clone 169443 (TRAV3, TRAJ20)
CAVSDIKLSDYKLSF

SEQ ID NO: 338886 - protein, 12 aa, Homo sapiens
  CDR3 for beta chain variable domain of TCR clone 169443 (TRBV12-4, TRBJ2-5)
CACSSAQETQYF

SEQ ID NO: 338887 - protein, 13 aa, Homo sapiens
  CDR3 for alpha chain variable domain of TCR clone 169444 (TRAV12-2, TRAJ52)
CAVSGTSYVKLTF

SEQ ID NO: 338888 - protein, 16 aa, Homo sapiens
  CDR3 for beta chain variable domain of TCR clone 169444 (TRBV7-2, TRBJ2-7)
CASTSQAASGGYEQYF

SEQ ID NO: 338889 - protein, 14 aa, Homo sapiens
  CDR3 for alpha chain variable domain of TCR clone 169445 (TRAV13-1, TRAJ24)
CAARRTDSWGKLQF

SEQ ID NO: 338890 - protein, 17 aa, Homo sapiens
  CDR3 for beta chain variable domain of TCR clone 169445 (TRBV11-2, TRBJ2-1)
CASSLYPPGVEYNEQFF

SEQ ID NO: 338891 - protein, 14 aa, Homo sapiens
  CDR3 for alpha chain variable domain of TCR clone 169446 (TRAV4, TRAJ9)
CLVCSGTGGFKTIF

SEQ ID NO: 338892 - protein, 14 aa, Homo sapiens
  CDR3 for beta chain variable domain of TCR clone 169446 (TRBV7-9, TRBJ2-4)
CASSLAMGGNIQYF

SEQ ID NO: 338893 - protein, 12 aa, Homo sapiens
  CDR3 for alpha chain variable domain of TCR clone 169447 (TRAV21, TRAJ33)
CANMGSNYQLIW

SEQ ID NO: 338894 - protein, 14 aa, Homo sapiens
  CDR3 for beta chain variable domain of TCR clone 169447 (TRBV2, TRBJ2-7)
CASSLTSGGYEQYF

SEQ ID NO: 338895 - protein, 14 aa, Homo sapiens
  CDR3 for alpha chain variable domain of TCR clone 169448 (TRAV12-3, TRAJ9)
CAMSVETGGFKTIF

SEQ ID NO: 338896 - protein, 15 aa, Homo sapiens
  CDR3 for beta chain variable domain of TCR clone 169448 (TRBV7-2, TRBJ2-1)
CASSSGLAGGNEQFF

SEQ ID NO: 338897 - protein, 14 aa, Homo sapiens
  CDR3 for alpha chain variable domain of TCR clone 169449 (TRAV12-2, TRAJ40)
CAVRIPSGTYKYIF

SEQ ID NO: 338898 - protein, 14 aa, Homo sapiens
  CDR3 for beta chain variable domain of TCR clone 169449 (TRBV20-1, TRBJ1-1)
CSVQTRIGGTEAFF

SEQ ID NO: 338899 - protein, 14 aa, Homo sapiens
  CDR3 for alpha chain variable domain of TCR clone 169450 (TRAV20, TRAJ22)
CAVQGAGSARQLTF

SEQ ID NO: 338900 - protein, 16 aa, Homo sapiens
  CDR3 for beta chain variable domain of TCR clone 169450 (TRBV4-1, TRBJ2-5)
CASSSGLAGVLGTQYF

SEQ ID NO: 338901 - protein, 15 aa, Homo sapiens
  CDR3 for alpha chain variable domain of TCR clone 169451 (TRAV3, TRAJ22)
CAARDRGGYARQLTF

SEQ ID NO: 338902 - protein, 13 aa, Homo sapiens
  CDR3 for beta chain variable domain of TCR clone 169451 (TRBV7-3, TRBJ2-5)
CASSFRGGETQYF

SEQ ID NO: 338903 - protein, 11 aa, Homo sapiens
  CDR3 for alpha chain variable domain of TCR clone 169452 (TRAV1-1, TRAJ23)
CAVRQGGKLIF

SEQ ID NO: 338904 - protein, 16 aa, Homo sapiens
  CDR3 for beta chain variable domain of TCR clone 169452 (TRBV4-2, TRBJ2-1)
CASSQGEGRTVNEQFF

SEQ ID NO: 338905 - protein, 13 aa, Homo sapiens
  CDR3 for alpha chain variable domain of TCR clone 169453 (TRAV12-2, TRAJ18)
CAVRGSTLGRLYF

SEQ ID NO: 338906 - protein, 15 aa, Homo sapiens
  CDR3 for beta chain variable domain of TCR clone 169453 (TRBV18, TRBJ2-1)
CASSPPSASYNEQFF

SEQ ID NO: 338907 - protein, 15 aa, Homo sapiens
  CDR3 for alpha chain variable domain of TCR clone 169454 (TRAV16, TRAJ10)
CALRELTGGGKKLTF

SEQ ID NO: 338908 - protein, 14 aa, Homo sapiens
  CDR3 for beta chain variable domain of TCR clone 169454 (TRBV5-5, TRBJ2-7)
CASSLGQGTYEQYF

SEQ ID NO: 338909 - protein, 17 aa, Homo sapiens
  CDR3 for alpha chain variable domain of TCR clone 169455 (TRAV3, TRAJ42)
CAVRDRDSGGSQGNLIF

SEQ ID NO: 338910 - protein, 15 aa, Homo sapiens
  CDR3 for beta chain variable domain of TCR clone 169455 (TRBV27, TRBJ1-6)
CASSFDRGLGSPLLF

SEQ ID NO: 338911 - protein, 14 aa, Homo sapiens
  CDR3 for alpha chain variable domain of TCR clone 169456 (TRAV1-1, TRAJ27)
CAVIYNTNAGKSTF

SEQ ID NO: 338912 - protein, 15 aa, Homo sapiens
  CDR3 for beta chain variable domain of TCR clone 169456 (TRBV11-3, TRBJ2-3)
CASLKDGREGDMQYF

SEQ ID NO: 338913 - protein, 13 aa, Homo sapiens
  CDR3 for alpha chain variable domain of TCR clone 169457 (TRAV3, TRAJ20)
CAVRDTGDYKLSF

SEQ ID NO: 338914 - protein, 13 aa, Homo sapiens
  CDR3 for beta chain variable domain of TCR clone 169457 (TRBV11-2, TRBJ2-1)
CASSLDLVNEQFF

SEQ ID NO: 338915 - protein, 14 aa, Homo sapiens
  CDR3 for alpha chain variable domain of TCR clone 169458 (TRAV22, TRAJ6)
CAVFGPGGSYIPTF

SEQ ID NO: 338916 - protein, 11 aa, Homo sapiens
  CDR3 for beta chain variable domain of TCR clone 169458 (TRBV20-1, TRBJ2-1)
CSLSSGSEQFF

SEQ ID NO: 338917 - protein, 15 aa, Homo sapiens
  CDR3 for alpha chain variable domain of TCR clone 169459 (TRAV17, TRAJ57)
CATGPSQGGSERLVF

SEQ ID NO: 338918 - protein, 13 aa, Homo sapiens
  CDR3 for beta chain variable domain of TCR clone 169459 (TRBV11-2, TRBJ2-5)
CASSSTGEETQYF

SEQ ID NO: 338919 - protein, 11 aa, Homo sapiens
  CDR3 for alpha chain variable domain of TCR clone 169460 (TRAV12-2, TRAJ29)
CAVTLRSPLVF

SEQ ID NO: 338920 - protein, 16 aa, Homo sapiens
  CDR3 for beta chain variable domain of TCR clone 169460 (TRBV19, TRBJ1-5)
CASSIDRGGPRQPQLF

SEQ ID NO: 338921 - protein, 17 aa, Homo sapiens
  CDR3 for alpha chain variable domain of TCR clone 169461 (TRAV3, TRAJ6)
CAVRDGPRAGGSYIPTF

SEQ ID NO: 338922 - protein, 14 aa, Homo sapiens
  CDR3 for beta chain variable domain of TCR clone 169461 (TRBV7-2, TRBJ2-7)
CASRSRGAAYEQYF

SEQ ID NO: 338923 - protein, 14 aa, Homo sapiens
  CDR3 for alpha chain variable domain of TCR clone 169462 (TRAV9-2, TRAJ39)
CALYIYNAGTMLTF

SEQ ID NO: 338924 - protein, 14 aa, Homo sapiens
  CDR3 for beta chain variable domain of TCR clone 169462 (TRBV12-5, TRBJ2-5)
CASGSRTHQETQYF

SEQ ID NO: 338925 - protein, 12 aa, Homo sapiens
  CDR3 for alpha chain variable domain of TCR clone 169463 (TRAV1-1, TRAJ30)
CAVRGRDAKIIF

SEQ ID NO: 338926 - protein, 13 aa, Homo sapiens
  CDR3 for beta chain variable domain of TCR clone 169463 (TRBV11-3, TRBJ2-7)
CASSLDKLYEQYF

SEQ ID NO: 338927 - protein, 15 aa, Homo sapiens
  CDR3 for alpha chain variable domain of TCR clone 169464 (TRAV8-4, TRAJ37)
CAVTYGSSNTGKLIF

SEQ ID NO: 338928 - protein, 13 aa, Homo sapiens
  CDR3 for beta chain variable domain of TCR clone 169464 (TRBV12-4, TRBJ2-5)
CASSLGGPRTQYF

SEQ ID NO: 338929 - protein, 17 aa, Homo sapiens
  CDR3 for alpha chain variable domain of TCR clone 169465 (TRAV3, TRAJ6)
CAVRDGTRAGGSYIPTF

SEQ ID NO: 338930 - protein, 14 aa, Homo sapiens
  CDR3 for beta chain variable domain of TCR clone 169465 (TRBV7-2, TRBJ2-7)
CASSPKTSFYERYF

SEQ ID NO: 338931 - protein, 12 aa, Homo sapiens
  CDR3 for alpha chain variable domain of TCR clone 169466 (TRAV23/DV6, TRAJ3)
CAARAPQRCFQD

SEQ ID NO: 338932 - protein, 17 aa, Homo sapiens
  CDR3 for beta chain variable domain of TCR clone 169466 (TRBV7-9, TRBJ2-3)
CASSPTVAGDLTDTQYF

SEQ ID NO: 338933 - protein, 13 aa, Homo sapiens
  CDR3 for alpha chain variable domain of TCR clone 169467 (TRAV17, TRAJ9)
CATDYTGGFKTIF

SEQ ID NO: 338934 - protein, 14 aa, Homo sapiens
  CDR3 for beta chain variable domain of TCR clone 169467 (TRBV19, TRBJ2-5)
CASCMTGQQETQYF

SEQ ID NO: 338935 - protein, 15 aa, Homo sapiens
  CDR3 for alpha chain variable domain of TCR clone 169468 (TRAV4, TRAJ39)
CLVGPNNNAGNMLTF

SEQ ID NO: 338936 - protein, 12 aa, Homo sapiens
  CDR3 for beta chain variable domain of TCR clone 169468 (TRBV12-4, TRBJ2-7)
CASNPEGGEQYF

SEQ ID NO: 338937 - protein, 14 aa, Homo sapiens
  CDR3 for alpha chain variable domain of TCR clone 169469 (TRAV12-2, TRAJ13)
CAVKKTGGYQKVTF

SEQ ID NO: 338938 - protein, 14 aa, Homo sapiens
  CDR3 for beta chain variable domain of TCR clone 169469 (TRBV2, TRBJ1-5)
CASKKTDGNQPQHF

SEQ ID NO: 338939 - protein, 15 aa, Homo sapiens
  CDR3 for alpha chain variable domain of TCR clone 169470 (TRAV3, TRAJ22)
CAVRDRGGSARQLTF

SEQ ID NO: 338940 - protein, 14 aa, Homo sapiens
  CDR3 for beta chain variable domain of TCR clone 169470 (TRBV28, TRBJ2-7)
CASKPGPDLYEQYF

SEQ ID NO: 338941 - protein, 18 aa, Homo sapiens
  CDR3 for alpha chain variable domain of TCR clone 169471 (TRAV17, TRAJ45)
CATSLDLYSGGGADGLTF

SEQ ID NO: 338942 - protein, 13 aa, Homo sapiens
  CDR3 for beta chain variable domain of TCR clone 169471 (TRBV10-3, TRBJ2-7)
CAPKLAVNYEQYF

SEQ ID NO: 338943 - protein, 14 aa, Homo sapiens
  CDR3 for alpha chain variable domain of TCR clone 169472 (TRAV13-1, TRAJ24)
CAASRTDSWGKLKF

SEQ ID NO: 338944 - protein, 15 aa, Homo sapiens
  CDR3 for beta chain variable domain of TCR clone 169472 (TRBV7-9, TRBJ1-5)
CASSQGHQPNQPQHF

SEQ ID NO: 338945 - protein, 13 aa, Homo sapiens
  CDR3 for alpha chain variable domain of TCR clone 169473 (TRAV21, TRAJ27)
CAARPGNAGKSTC

SEQ ID NO: 338946 - protein, 13 aa, Homo sapiens
  CDR3 for beta chain variable domain of TCR clone 169473 (TRBV7-6, TRBJ2-3)
CASSLGTVTYAVF

SEQ ID NO: 338947 - protein, 11 aa, Homo sapiens
  CDR3 for alpha chain variable domain of TCR clone 169474 (TRAV21, TRAJ9)
CAVPGGFKTIF

SEQ ID NO: 338948 - protein, 17 aa, Homo sapiens
  CDR3 for beta chain variable domain of TCR clone 169474 (TRBV7-9, TRBJ2-5)
CATSGGARDPVLRARQA

SEQ ID NO: 338949 - protein, 13 aa, Homo sapiens
  CDR3 for alpha chain variable domain of TCR clone 169475 (TRAV30, TRAJ24)
CGTVTDSWGKLEF

SEQ ID NO: 338950 - protein, 15 aa, Homo sapiens
  CDR3 for beta chain variable domain of TCR clone 169475 (TRBV25-1, TRBJ1-4)
CASSPGDSTNEKLFF

SEQ ID NO: 338951 - protein, 12 aa, Homo sapiens
  CDR3 for alpha chain variable domain of TCR clone 169476 (TRAV12-3, TRAJ17)
CAMTLTGNKLTF

SEQ ID NO: 338952 - protein, 16 aa, Homo sapiens
  CDR3 for beta chain variable domain of TCR clone 169476 (TRBV29-1, TRBJ2-7)
CSVDDAEDGTAYEQYF

SEQ ID NO: 338953 - protein, 12 aa, Homo sapiens
  CDR3 for alpha chain variable domain of TCR clone 169477 (TRAV2, TRAJ31)
CDVEDNNARLMF

SEQ ID NO: 338954 - protein, 16 aa, Homo sapiens
  CDR3 for beta chain variable domain of TCR clone 169477 (TRBV10-3, TRBJ2-1)
CAISGVGDGGGGEQFF

SEQ ID NO: 338955 - protein, 12 aa, Homo sapiens
  CDR3 for alpha chain variable domain of TCR clone 169478 (TRAV12-1, TRAJ26)
CVGSPYGQNFVF

SEQ ID NO: 338956 - protein, 13 aa, Homo sapiens
  CDR3 for beta chain variable domain of TCR clone 169478 (TRBV27, TRBJ2-3)
CASSWGRTDTQYF

SEQ ID NO: 338957 - protein, 14 aa, Homo sapiens
  CDR3 for alpha chain variable domain of TCR clone 169479 (TRAV27, TRAJ22)
CAGLPSGSARQLTF

SEQ ID NO: 338958 - protein, 17 aa, Homo sapiens
  CDR3 for beta chain variable domain of TCR clone 169479 (TRBV28, TRBJ2-5)
CASSRQGGLAGAETQYF

SEQ ID NO: 338959 - protein, 12 aa, Homo sapiens
  CDR3 for alpha chain variable domain of TCR clone 169480 (TRAV21, TRAJ31)
CAVWGNNARLMF

SEQ ID NO: 338960 - protein, 15 aa, Homo sapiens
  CDR3 for beta chain variable domain of TCR clone 169480 (TRBV27, TRBJ2-5)
CQQLRPGRSEGDQYF

SEQ ID NO: 338961 - protein, 12 aa, Homo sapiens
  CDR3 for alpha chain variable domain of TCR clone 169481 (TRAV12-3, TRAJ17)
CAMTLTGNKLTF

SEQ ID NO: 338962 - protein, 15 aa, Homo sapiens
  CDR3 for beta chain variable domain of TCR clone 169481 (TRBV20-1, TRBJ2-7)
CSARDRVSGMDEQYP

SEQ ID NO: 338963 - protein, 18 aa, Homo sapiens
  CDR3 for alpha chain variable domain of TCR clone 169482 (TRAV12-3, TRAJ52)
CAMSRTNAGGTSYGKLTF

SEQ ID NO: 338964 - protein, 15 aa, Homo sapiens
  CDR3 for beta chain variable domain of TCR clone 169482 (TRBV28, TRBJ2-5)
CASSSGRTIQETQYF

SEQ ID NO: 338965 - protein, 13 aa, Homo sapiens
  CDR3 for alpha chain variable domain of TCR clone 169483 (TRAV21, TRAJ27)
CAARPGNAGKSTF

SEQ ID NO: 338966 - protein, 11 aa, Homo sapiens
  CDR3 for beta chain variable domain of TCR clone 169483 (TRBV12-4, TRBJ2-3)
CASTATDKQYF

SEQ ID NO: 338967 - protein, 14 aa, Homo sapiens
  CDR3 for alpha chain variable domain of TCR clone 169484 (TRAV38-1, TRAJ45)
CASHSGGGADGLTF

SEQ ID NO: 338968 - protein, 19 aa, Homo sapiens
  CDR3 for beta chain variable domain of TCR clone 169484 (TRBV18, TRBJ1-3)
CASSPLSRTGMSSGNTIYF

SEQ ID NO: 338969 - protein, 13 aa, Homo sapiens
  CDR3 for alpha chain variable domain of TCR clone 169485 (TRAV20, TRAJ26)
CAVPTSYGQNFVF

SEQ ID NO: 338970 - protein, 16 aa, Homo sapiens
  CDR3 for beta chain variable domain of TCR clone 169485 (TRBV28, TRBJ2-7)
CASSSPQGRDVYEHYF

SEQ ID NO: 338971 - protein, 14 aa, Homo sapiens
  CDR3 for alpha chain variable domain of TCR clone 169486 (TRAV38-1, TRAJ29)
CAFITPSGNTPLVF

SEQ ID NO: 338972 - protein, 14 aa, Homo sapiens
  CDR3 for beta chain variable domain of TCR clone 169486 (TRBV28, TRBJ2-3)
CASSLTDLLDTQYF

SEQ ID NO: 338973 - protein, 14 aa, Homo sapiens
  CDR3 for alpha chain variable domain of TCR clone 169487 (TRAV1-2, TRAJ16)
CAVNRFSDGQKLLF

SEQ ID NO: 338974 - protein, 12 aa, Homo sapiens
  CDR3 for beta chain variable domain of TCR clone 169487 (TRBV11-2, TRBJ2-2)
CASSFGGGELFF

SEQ ID NO: 338975 - protein, 18 aa, Homo sapiens
  CDR3 for alpha chain variable domain of TCR clone 169488 (TRAV13-1, TRAJ52)
CAAKNPNAGGTSYGNLTF

SEQ ID NO: 338976 - protein, 13 aa, Homo sapiens
  CDR3 for beta chain variable domain of TCR clone 169488 (TRBV5-5, TRBJ1-2)
CASSFWRGEDYTF

SEQ ID NO: 338977 - protein, 13 aa, Homo sapiens
  CDR3 for alpha chain variable domain of TCR clone 169489 (TRAV13-1, TRAJ5)
CAARVTGRRALTF

SEQ ID NO: 338978 - protein, 17 aa, Homo sapiens
  CDR3 for beta chain variable domain of TCR clone 169489 (TRBV20-1, TRBJ2-1)
CSAPPRLAGTRYNEQFF

SEQ ID NO: 338979 - protein, 14 aa, Homo sapiens
  CDR3 for alpha chain variable domain of TCR clone 169490 (TRAV13-2, TRAJ57)
CAENFQGGSEKLVF

SEQ ID NO: 338980 - protein, 14 aa, Homo sapiens
  CDR3 for beta chain variable domain of TCR clone 169490 (TRBV7-3, TRBJ2-2)
CASSLYPLTGELFF

SEQ ID NO: 338981 - protein, 16 aa, Homo sapiens
  CDR3 for alpha chain variable domain of TCR clone 169491 (TRAV26-1, TRAJ40)
CIVRGYPTSGTYKYIF

SEQ ID NO: 338982 - protein, 14 aa, Homo sapiens
  CDR3 for beta chain variable domain of TCR clone 169491 (TRBV5-1, TRBJ1-4)
CASSYGQGGEKLFF

SEQ ID NO: 338983 - protein, 13 aa, Homo sapiens
  CDR3 for alpha chain variable domain of TCR clone 169492 (TRAV12-3, TRAJ5)
CAMIYTGRIALTF

SEQ ID NO: 338984 - protein, 12 aa, Homo sapiens
  CDR3 for beta chain variable domain of TCR clone 169492 (TRBV18, TRBJ1-4)
WASSPSREKLFF

SEQ ID NO: 338985 - protein, 13 aa, Homo sapiens
  CDR3 for alpha chain variable domain of TCR clone 169493 (TRAV1-1, TRAJ11)
CAVLNSGYRPLTF

SEQ ID NO: 338986 - protein, 17 aa, Homo sapiens
  CDR3 for beta chain variable domain of TCR clone 169493 (TRBV6-3, TRBJ2-2)
CASSYAGQGINTGELFF

SEQ ID NO: 338987 - protein, 13 aa, Homo sapiens
  CDR3 for alpha chain variable domain of TCR clone 169494 (TRAV12-2, TRAJ39)
CAVNNNAGNMLTF

SEQ ID NO: 338988 - protein, 13 aa, Homo sapiens
  CDR3 for beta chain variable domain of TCR clone 169494 (TRBV7-3, TRBJ2-1)
CRQPGGGGNEQFF

SEQ ID NO: 338989 - protein, 12 aa, Homo sapiens
  CDR3 for alpha chain variable domain of TCR clone 169495 (TRAV3, TRAJ26)
CAVRDYGQNFVF

SEQ ID NO: 338990 - protein, 14 aa, Homo sapiens
  CDR3 for beta chain variable domain of TCR clone 169495 (TRBV11-2, TRBJ2-5)
CASSRTGGIETQYF

SEQ ID NO: 338991 - protein, 11 aa, Homo sapiens
  CDR3 for alpha chain variable domain of TCR clone 169496 (TRAV3, TRAJ21)
CAVGNFNKLYL

SEQ ID NO: 338992 - protein, 16 aa, Homo sapiens
  CDR3 for beta chain variable domain of TCR clone 169496 (TRBV19, TRBJ2-1)
CASSKAGPSSYNEQFF

SEQ ID NO: 338993 - protein, 14 aa, Homo sapiens
  CDR3 for alpha chain variable domain of TCR clone 169497 (TRAV12-3, TRAJ10)
SRLPLTGGGNKLTF

SEQ ID NO: 338994 - protein, 13 aa, Homo sapiens
  CDR3 for beta chain variable domain of TCR clone 169497 (TRBV7-7, TRBJ2-5)
CASSRSGQETQYF

SEQ ID NO: 338995 - protein, 18 aa, Homo sapiens
  CDR3 for alpha chain variable domain of TCR clone 169498 (TRAV12-2, )
CAVEDIQNPDPAVYQLRE

SEQ ID NO: 338996 - protein, 20 aa, Homo sapiens
  CDR3 for beta chain variable domain of TCR clone 169498 (TRBV11-3, TRBJ2-7)
CASSQRTSGSLRAVLRAGHQ

SEQ ID NO: 338997 - protein, 14 aa, Homo sapiens
  CDR3 for alpha chain variable domain of TCR clone 169499 (TRAV1-2, TRAJ8)
CAVREDTGFQTLVF

SEQ ID NO: 338998 - protein, 15 aa, Homo sapiens
  CDR3 for beta chain variable domain of TCR clone 169499 (TRBV6-3, TRBJ2-7)
CASSSPGTVCYEQYF

SEQ ID NO: 338999 - protein, 14 aa, Homo sapiens
  CDR3 for alpha chain variable domain of TCR clone 169500 (TRAV26-1, TRAJ49)
CIVRLTNTGNQFYF

SEQ ID NO: 339000 - protein, 12 aa, Homo sapiens
  CDR3 for beta chain variable domain of TCR clone 169500 (TRBV7-8, TRBJ2-7)
CASSLGDREQYF

SEQ ID NO: 339001 - protein, 11 aa, Homo sapiens
  CDR3 for alpha chain variable domain of TCR clone 169501 (TRAV2, TRAJ13)
CASGGYQEVTF

SEQ ID NO: 339002 - protein, 13 aa, Homo sapiens
  CDR3 for beta chain variable domain of TCR clone 169501 (TRBV6-1, TRBJ2-5)
CASGYQSVETQYF

SEQ ID NO: 339003 - protein, 17 aa, Homo sapiens
  CDR3 for alpha chain variable domain of TCR clone 169502 (TRAV4, TRAJ13)
CLVGVQGSSGGYQKVTF

SEQ ID NO: 339004 - protein, 16 aa, Homo sapiens
  CDR3 for beta chain variable domain of TCR clone 169502 (TRBV28, TRBJ2-7)
CASSSFFETGGPEQYF

SEQ ID NO: 339005 - protein, 12 aa, Homo sapiens
  CDR3 for alpha chain variable domain of TCR clone 169503 (TRAV27, TRAJ9)
CAGESGGFKTIF

SEQ ID NO: 339006 - protein, 13 aa, Homo sapiens
  CDR3 for beta chain variable domain of TCR clone 169503 (TRBV29-1, TRBJ1-3)
CSADVDSGNTIYF

SEQ ID NO: 339007 - protein, 14 aa, Homo sapiens
  CDR3 for alpha chain variable domain of TCR clone 169504 (TRAV12-2, TRAJ44)
CAVNKAGTASKLTF

SEQ ID NO: 339008 - protein, 16 aa, Homo sapiens
  CDR3 for beta chain variable domain of TCR clone 169504 (TRBV6-1, TRBJ1-3)
CASSEGVVTSGNTIYF

SEQ ID NO: 339009 - protein, 14 aa, Homo sapiens
  CDR3 for alpha chain variable domain of TCR clone 169505 (TRAV1-1, TRAJ27)
CAFSETPMQANQPL

SEQ ID NO: 339010 - protein, 17 aa, Homo sapiens
  CDR3 for beta chain variable domain of TCR clone 169505 (TRBV20-1, TRBJ2-3)
CSARAPKGVSATDTQYF

SEQ ID NO: 339011 - protein, 13 aa, Homo sapiens
  CDR3 for alpha chain variable domain of TCR clone 169506 (TRAV21, TRAJ57)
CAVTQGGSEKLVF

SEQ ID NO: 339012 - protein, 17 aa, Homo sapiens
  CDR3 for beta chain variable domain of TCR clone 169506 (TRBV13, TRBJ2-3)
CASNLSRVAGGRNTQYF

SEQ ID NO: 339013 - protein, 13 aa, Homo sapiens
  CDR3 for alpha chain variable domain of TCR clone 169507 (TRAV8-3, TRAJ28)
CAVGAVGSYQLTF

SEQ ID NO: 339014 - protein, 12 aa, Homo sapiens
  CDR3 for beta chain variable domain of TCR clone 169507 (TRBV2, TRBJ2-1)
CAYGPPGNEQFF

SEQ ID NO: 339015 - protein, 12 aa, Homo sapiens
  CDR3 for alpha chain variable domain of TCR clone 169508 (TRAV12-2, TRAJ21)
CTVNRNFNKFYF

SEQ ID NO: 339016 - protein, 14 aa, Homo sapiens
  CDR3 for beta chain variable domain of TCR clone 169508 (TRBV12-4, TRBJ2-3)
CASSLSGATDTQYF

SEQ ID NO: 339017 - protein, 13 aa, Homo sapiens
  CDR3 for alpha chain variable domain of TCR clone 169509 (TRAV8-6, TRAJ49)
CAVITNTGNQFYF

SEQ ID NO: 339018 - protein, 13 aa, Homo sapiens
  CDR3 for beta chain variable domain of TCR clone 169509 (TRBV10-3, TRBJ2-7)
CASKLAVNYEQYS

SEQ ID NO: 339019 - protein, 11 aa, Homo sapiens
  CDR3 for alpha chain variable domain of TCR clone 169510 (TRAV12-1, TRAJ30)
CVVNGQDKIIF

SEQ ID NO: 339020 - protein, 13 aa, Homo sapiens
  CDR3 for beta chain variable domain of TCR clone 169510 (TRBV19, TRBJ2-1)
CQSDFRLSGEQFF

SEQ ID NO: 339021 - protein, 15 aa, Homo sapiens
  CDR3 for alpha chain variable domain of TCR clone 169511 (TRAV17, TRAJ56)
CATDANTAANSKLTF

SEQ ID NO: 339022 - protein, 14 aa, Homo sapiens
  CDR3 for beta chain variable domain of TCR clone 169511 (TRBV19, TRBJ1-5)
CASSLGTGGQPQHF

SEQ ID NO: 339023 - protein, 16 aa, Homo sapiens
  CDR3 for alpha chain variable domain of TCR clone 169512 (TRAV8-3, TRAJ22)
CAVDLLGPGSARQLTF

SEQ ID NO: 339024 - protein, 14 aa, Homo sapiens
  CDR3 for beta chain variable domain of TCR clone 169512 (TRBV11-2, TRBJ2-7)
CARSLELEGYEQYF

SEQ ID NO: 339025 - protein, 14 aa, Homo sapiens
  CDR3 for alpha chain variable domain of TCR clone 169513 (TRAV12-2, TRAJ40)
CAVKIPSGTYKYIF

SEQ ID NO: 339026 - protein, 15 aa, Homo sapiens
  CDR3 for beta chain variable domain of TCR clone 169513 (TRBV20-1, TRBJ1-4)
CIARREWGVNEKLFF

SEQ ID NO: 339027 - protein, 15 aa, Homo sapiens
  CDR3 for alpha chain variable domain of TCR clone 169514 (TRAV12-3, TRAJ27)
CAMGAYNTNAGKSTF

SEQ ID NO: 339028 - protein, 13 aa, Homo sapiens
  CDR3 for beta chain variable domain of TCR clone 169514 (TRBV11-2, TRBJ2-5)
CASSRGPAETQYF

SEQ ID NO: 339029 - protein, 13 aa, Homo sapiens
  CDR3 for alpha chain variable domain of TCR clone 169515 (TRAV1-1, TRAJ9)
CAAKNTGGFKTIL

SEQ ID NO: 339030 - protein, 16 aa, Homo sapiens
  CDR3 for beta chain variable domain of TCR clone 169515 (TRBV15, TRBJ2-5)
CATSRYLEAAQETQYF

SEQ ID NO: 339031 - protein, 14 aa, Homo sapiens
  CDR3 for alpha chain variable domain of TCR clone 169516 (TRAV12-2, TRAJ13)
CAAKKTGGYQKVTF

SEQ ID NO: 339032 - protein, 13 aa, Homo sapiens
  CDR3 for beta chain variable domain of TCR clone 169516 (TRBV20-1, TRBJ1-1)
CSARVEQGTEAFF

SEQ ID NO: 339033 - protein, 12 aa, Homo sapiens
  CDR3 for alpha chain variable domain of TCR clone 169517 (TRAV2, TRAJ3)
CAVRSSASKIIF

SEQ ID NO: 339034 - protein, 15 aa, Homo sapiens
  CDR3 for beta chain variable domain of TCR clone 169517 (TRBV15, TRBJ2-5)
CATSRDGGPQETQYF

SEQ ID NO: 339035 - protein, 17 aa, Homo sapiens
  CDR3 for alpha chain variable domain of TCR clone 169518 (TRAV8-6, TRAJ58)
CAVCSWVGETSGSRLTF

SEQ ID NO: 339036 - protein, 14 aa, Homo sapiens
  CDR3 for beta chain variable domain of TCR clone 169518 (TRBV4-3, TRBJ2-1)
CASGLDRAYNEQFF

SEQ ID NO: 339037 - protein, 15 aa, Homo sapiens
  CDR3 for alpha chain variable domain of TCR clone 169519 (TRAV8-2, TRAJ15)
CVVTMGNQAGTALIF

SEQ ID NO: 339038 - protein, 14 aa, Homo sapiens
  CDR3 for beta chain variable domain of TCR clone 169519 (TRBV12-5, TRBJ1-3)
CASGPAGSGNTIYF

SEQ ID NO: 339039 - protein, 15 aa, Homo sapiens
  CDR3 for alpha chain variable domain of TCR clone 169520 (TRAV8-6, TRAJ6)
CAVRDASGGSYIPTF

SEQ ID NO: 339040 - protein, 15 aa, Homo sapiens
  CDR3 for beta chain variable domain of TCR clone 169520 (TRBV19, TRBJ2-4)
CASRGPRRGENSQYF

SEQ ID NO: 339041 - protein, 16 aa, Homo sapiens
  CDR3 for alpha chain variable domain of TCR clone 169521 (TRAV3, TRAJ10)
CAVRDMRAGGGDKLTF

SEQ ID NO: 339042 - protein, 20 aa, Homo sapiens
  CDR3 for beta chain variable domain of TCR clone 169521 (TRBV11-3, TRBJ2-7)
CASSQRTSGSLRAVLRAGHQ

SEQ ID NO: 339043 - protein, 14 aa, Homo sapiens
  CDR3 for alpha chain variable domain of TCR clone 169522 (TRAV1-2, TRAJ8)
CAVREDTGFQKLVF

SEQ ID NO: 339044 - protein, 16 aa, Homo sapiens
  CDR3 for beta chain variable domain of TCR clone 169522 (TRBV27, TRBJ2-2)
CASSPSGVANTGELFF

SEQ ID NO: 339045 - protein, 12 aa, Homo sapiens
  CDR3 for alpha chain variable domain of TCR clone 169523 (TRAV13-1, TRAJ53)
AASGGSNYKLTF

SEQ ID NO: 339046 - protein, 15 aa, Homo sapiens
  CDR3 for beta chain variable domain of TCR clone 169523 (TRBV7-2, TRBJ1-2)
CASSPRAGWNYGYTF

SEQ ID NO: 339047 - protein, 12 aa, Homo sapiens
  CDR3 for alpha chain variable domain of TCR clone 169524 (TRAV12-1, TRAJ40)
CVVYSGTYKYIF

SEQ ID NO: 339048 - protein, 14 aa, Homo sapiens
  CDR3 for beta chain variable domain of TCR clone 169524 (TRBV27, TRBJ2-2)
CASRPGVNTGELFF

SEQ ID NO: 339049 - protein, 13 aa, Homo sapiens
  CDR3 for alpha chain variable domain of TCR clone 169525 (TRAV1-1, TRAJ9)
CAAKHTGGFKTIF

SEQ ID NO: 339050 - protein, 11 aa, Homo sapiens
  CDR3 for beta chain variable domain of TCR clone 169525 (TRBV7-2, TRBJ2-3)
CASSLGDTQYF

SEQ ID NO: 339051 - protein, 14 aa, Homo sapiens
  CDR3 for alpha chain variable domain of TCR clone 169526 (TRAV2, TRAJ37)
CAVDFTSNTGKLIF

SEQ ID NO: 339052 - protein, 14 aa, Homo sapiens
  CDR3 for beta chain variable domain of TCR clone 169526 (TRBV2, TRBJ2-1)
CASRTGSSYNEQFF

SEQ ID NO: 339053 - protein, 13 aa, Homo sapiens
  CDR3 for alpha chain variable domain of TCR clone 169527 (TRAV38-1, TRAJ42)
CALWGGSQGNLIF

SEQ ID NO: 339054 - protein, 12 aa, Homo sapiens
  CDR3 for beta chain variable domain of TCR clone 169527 (TRBV12-4, TRBJ2-7)
CASSLGGYEQYF

SEQ ID NO: 339055 - protein, 14 aa, Homo sapiens
  CDR3 for alpha chain variable domain of TCR clone 169528 (TRAV12-2, TRAJ40)
CAVKIPSGTYRYIF

SEQ ID NO: 339056 - protein, 12 aa, Homo sapiens
  CDR3 for beta chain variable domain of TCR clone 169528 (TRBV11-2, TRBJ2-1)
CASSPGNNEQFF

SEQ ID NO: 339057 - protein, 14 aa, Homo sapiens
  CDR3 for alpha chain variable domain of TCR clone 169529 (TRAV2, TRAJ9)
CAVEDRSGGFKTIF

SEQ ID NO: 339058 - protein, 13 aa, Homo sapiens
  CDR3 for beta chain variable domain of TCR clone 169529 (TRBV27, TRBJ1-1)
CGSSLSIGAEAFF

SEQ ID NO: 339059 - protein, 16 aa, Homo sapiens
  CDR3 for alpha chain variable domain of TCR clone 169530 (TRAV3, TRAJ10)
CAVRDMRAGGGNKLTL

SEQ ID NO: 339060 - protein, 15 aa, Homo sapiens
  CDR3 for beta chain variable domain of TCR clone 169530 (TRBV15, TRBJ1-5)
CATSTTGVVNQPQHF

SEQ ID NO: 339061 - protein, 14 aa, Homo sapiens
  CDR3 for alpha chain variable domain of TCR clone 169531 (TRAV12-2, TRAJ6)
CAVIASVGSYIPTF

SEQ ID NO: 339062 - protein, 15 aa, Homo sapiens
  CDR3 for beta chain variable domain of TCR clone 169531 (TRBV20-1, TRBJ2-7)
CSARDRVSGMDEQYF

SEQ ID NO: 339063 - protein, 16 aa, Homo sapiens
  CDR3 for alpha chain variable domain of TCR clone 169532 (TRAV30, TRAJ24)
CGTEIVDADRWGKFKF

SEQ ID NO: 339064 - protein, 14 aa, Homo sapiens
  CDR3 for beta chain variable domain of TCR clone 169532 (TRBV12-5, TRBJ2-5)
CASGSRTHQETQYF

SEQ ID NO: 339065 - protein, 16 aa, Homo sapiens
  CDR3 for alpha chain variable domain of TCR clone 169533 (TRAV21, TRAJ37)
CAVRPRGSSNTGKLIF

SEQ ID NO: 339066 - protein, 13 aa, Homo sapiens
  CDR3 for beta chain variable domain of TCR clone 169533 (TRBV7-9, TRBJ2-5)
CASLSPEQETQYF

SEQ ID NO: 339067 - protein, 22 aa, Homo sapiens
  CDR3 for alpha chain variable domain of TCR clone 169534 (TRAV21, TRAJ35)
CAVMPIGFGNVLHCGSSTPVIV

SEQ ID NO: 339068 - protein, 12 aa, Homo sapiens
  CDR3 for beta chain variable domain of TCR clone 169534 (TRBV7-9, TRBJ2-7)
CASSIKREEQYF

SEQ ID NO: 339069 - protein, 13 aa, Homo sapiens
  CDR3 for alpha chain variable domain of TCR clone 169535 (TRAV8-6, TRAJ8)
CAFMNTGFQKLVF

SEQ ID NO: 339070 - protein, 15 aa, Homo sapiens
  CDR3 for beta chain variable domain of TCR clone 169535 (TRBV28, TRBJ2-5)
CASSSGRVIQETQVF

SEQ ID NO: 339071 - protein, 16 aa, Homo sapiens
  CDR3 for alpha chain variable domain of TCR clone 169536 (TRAV17, TRAJ52)
CATSNAGGTSYGKLTF

SEQ ID NO: 339072 - protein, 14 aa, Homo sapiens
  CDR3 for beta chain variable domain of TCR clone 169536 (TRBV25-1, TRBJ1-1)
CASTHLGGNTEAFF

SEQ ID NO: 339073 - protein, 11 aa, Homo sapiens
  CDR3 for alpha chain variable domain of TCR clone 169537 (TRAV8-6, TRAJ20)
CAVSYDYELSF

SEQ ID NO: 339074 - protein, 14 aa, Homo sapiens
  CDR3 for beta chain variable domain of TCR clone 169537 (TRBV10-2, TRBJ2-2)
CASSERSNTGELFF

SEQ ID NO: 339075 - protein, 14 aa, Homo sapiens
  CDR3 for alpha chain variable domain of TCR clone 169538 (TRAV38-1, TRAJ54)
CAFMSPSGAQKLVF

SEQ ID NO: 339076 - protein, 13 aa, Homo sapiens
  CDR3 for beta chain variable domain of TCR clone 169538 (TRBV7-9, TRBJ1-2)
CASSLKQNYGYTF

SEQ ID NO: 339077 - protein, 10 aa, Homo sapiens
  CDR3 for alpha chain variable domain of TCR clone 169539 (TRAV20, TRAJ22)
CAAPARQLTF

SEQ ID NO: 339078 - protein, 13 aa, Homo sapiens
  CDR3 for beta chain variable domain of TCR clone 169539 (TRBV3-1, TRBJ1-5)
CASSQDLDQPQHF

SEQ ID NO: 339079 - protein, 17 aa, Homo sapiens
  CDR3 for alpha chain variable domain of TCR clone 169540 (TRAV23/DV6, TRAJ57)
CAAGSTLSQGGSEKLVF

SEQ ID NO: 339080 - protein, 14 aa, Homo sapiens
  CDR3 for beta chain variable domain of TCR clone 169540 (TRBV25-1, TRBJ1-1)
CASTHLGGNTGAFF

SEQ ID NO: 339081 - protein, 21 aa, Homo sapiens
  CDR3 for alpha chain variable domain of TCR clone 169541 (TRAV25, TRAJ47)
TATQTTDVGTYFWEYGNKRVF

SEQ ID NO: 339082 - protein, 16 aa, Homo sapiens
  CDR3 for beta chain variable domain of TCR clone 169541 (TRBV6-6, TRBJ2-1)
CASSWGGQGPYNEQFF

SEQ ID NO: 339083 - protein, 11 aa, Homo sapiens
  CDR3 for alpha chain variable domain of TCR clone 169542 (TRAV12-3, TRAJ27)
CAMANAGKSTF

SEQ ID NO: 339084 - protein, 14 aa, Homo sapiens
  CDR3 for beta chain variable domain of TCR clone 169542 (TRBV19, TRBJ2-7)
CASSIRLGDHEQYF

SEQ ID NO: 339085 - protein, 16 aa, Homo sapiens
  CDR3 for alpha chain variable domain of TCR clone 169543 (TRAV23/DV6, TRAJ52)
CAARPSGGTSYGNLTF

SEQ ID NO: 339086 - protein, 14 aa, Homo sapiens
  CDR3 for beta chain variable domain of TCR clone 169543 (TRBV20-1, TRBJ2-3)
CSARDASSTDTQYF

SEQ ID NO: 339087 - protein, 16 aa, Homo sapiens
  CDR3 for alpha chain variable domain of TCR clone 169544 (TRAV27, TRAJ53)
CAAPEGSGGSNYKLTF

SEQ ID NO: 339088 - protein, 15 aa, Homo sapiens
  CDR3 for beta chain variable domain of TCR clone 169544 (TRBV20-1, TRBJ1-1)
CSASRGVTGNTEAFI

SEQ ID NO: 339089 - protein, 13 aa, Homo sapiens
  CDR3 for alpha chain variable domain of TCR clone 169545 (TRAV8-3, TRAJ28)
CAVGAVGSYQLTF

SEQ ID NO: 339090 - protein, 10 aa, Homo sapiens
  CDR3 for beta chain variable domain of TCR clone 169545 (TRBV7-9, TRBJ1-5)
CASSQGHQPN

SEQ ID NO: 339091 - protein, 12 aa, Homo sapiens
  CDR3 for alpha chain variable domain of TCR clone 169546 (TRAV2, TRAJ9)
CAVGAGGFKTIL

SEQ ID NO: 339092 - protein, 16 aa, Homo sapiens
  CDR3 for beta chain variable domain of TCR clone 169546 (TRBV13, TRBJ2-2)
CAGSPRTGEHTGELFF

SEQ ID NO: 339093 - protein, 15 aa, Homo sapiens
  CDR3 for alpha chain variable domain of TCR clone 169547 (TRAV21, TRAJ56)
CAVTKYTGANSKLTF

SEQ ID NO: 339094 - protein, 19 aa, Homo sapiens
  CDR3 for beta chain variable domain of TCR clone 169547 (TRBV6-1, TRBJ2-5)
CASSEQGLAGGLYQETQYF

SEQ ID NO: 339095 - protein, 13 aa, Homo sapiens
  CDR3 for alpha chain variable domain of TCR clone 169548 (TRAV3, TRAJ27)
CSVTNTNAGKSTF

SEQ ID NO: 339096 - protein, 13 aa, Homo sapiens
  CDR3 for beta chain variable domain of TCR clone 169548 (TRBV19, TRBJ2-7)
CASQSYGAGEQYS

SEQ ID NO: 339097 - protein, 14 aa, Homo sapiens
  CDR3 for alpha chain variable domain of TCR clone 169549 (TRAV12-2, TRAJ17)
CAVLFKAAGNKLTF

SEQ ID NO: 339098 - protein, 13 aa, Homo sapiens
  CDR3 for beta chain variable domain of TCR clone 169549 (TRBV7-8, TRBJ2-7)
CASSLTGGREQYF

SEQ ID NO: 339099 - protein, 15 aa, Homo sapiens
  CDR3 for alpha chain variable domain of TCR clone 169550 (TRAV3, TRAJ22)
CAVRDRGGSARQLTF

SEQ ID NO: 339100 - protein, 13 aa, Homo sapiens
  CDR3 for beta chain variable domain of TCR clone 169550 (TRBV7-9, TRBJ1-2)
CASSLNQNYGYTF

SEQ ID NO: 339101 - protein, 18 aa, Homo sapiens
  CDR3 for alpha chain variable domain of TCR clone 169551 (TRAV36/DV7, )
CALTDIQNPDPAVYQLSD

SEQ ID NO: 339102 - protein, 13 aa, Homo sapiens
  CDR3 for beta chain variable domain of TCR clone 169551 (TRBV4-1, TRBJ2-7)
CASSQGQAYEQYF

SEQ ID NO: 339103 - protein, 17 aa, Homo sapiens
  CDR3 for alpha chain variable domain of TCR clone 169552 (TRAV13-1, TRAJ28)
CAASPPYSGAGSDQLTF

SEQ ID NO: 339104 - protein, 19 aa, Homo sapiens
  CDR3 for beta chain variable domain of TCR clone 169552 (TRBV25-1, TRBJ2-2)
CAILVYRVDRGRKTGELFF

SEQ ID NO: 339105 - protein, 14 aa, Homo sapiens
  CDR3 for alpha chain variable domain of TCR clone 169553 (TRAV8-4, TRAJ48)
CAVSEPFGNEKLTF

SEQ ID NO: 339106 - protein, 14 aa, Homo sapiens
  CDR3 for beta chain variable domain of TCR clone 169553 (TRBV13, TRBJ2-7)
CASSLKGASYEQYF

SEQ ID NO: 339107 - protein, 12 aa, Homo sapiens
  CDR3 for alpha chain variable domain of TCR clone 169554 (TRAV35, TRAJ54)
CADLQGAQKLVF

SEQ ID NO: 339108 - protein, 12 aa, Homo sapiens
  CDR3 for beta chain variable domain of TCR clone 169554 (TRBV5-4, TRBJ2-5)
CASSSTRENQYF

SEQ ID NO: 339109 - protein, 16 aa, Homo sapiens
  CDR3 for alpha chain variable domain of TCR clone 169555 (TRAV27, TRAJ13)
CAGAKSDSGGYQKGTF

SEQ ID NO: 339110 - protein, 15 aa, Homo sapiens
  CDR3 for beta chain variable domain of TCR clone 169555 (TRBV29-1, TRBJ2-1)
CSVGRHALFYNQQFF

SEQ ID NO: 339111 - protein, 16 aa, Homo sapiens
  CDR3 for alpha chain variable domain of TCR clone 169556 (TRAV3, TRAJ37)
CAVRPHGSGNTGKLIF

SEQ ID NO: 339112 - protein, 17 aa, Homo sapiens
  CDR3 for beta chain variable domain of TCR clone 169556 (TRBV7-2, TRBJ2-7)
CASSFETSGFTSSTSGR

SEQ ID NO: 339113 - protein, 10 aa, Homo sapiens
  CDR3 for alpha chain variable domain of TCR clone 169557 (TRAV12-1, TRAJ33)
CVASNYQLIW

SEQ ID NO: 339114 - protein, 15 aa, Homo sapiens
  CDR3 for beta chain variable domain of TCR clone 169557 (TRBV5-4, TRBJ1-4)
CARSHGDGENEKLFF

SEQ ID NO: 339115 - protein, 15 aa, Homo sapiens
  CDR3 for alpha chain variable domain of TCR clone 169558 (TRAV23/DV6, TRAJ18)
CAARYRGSTLGRLYF

SEQ ID NO: 339116 - protein, 16 aa, Homo sapiens
  CDR3 for beta chain variable domain of TCR clone 169558 (TRBV12-4, TRBJ2-5)
CASSFFVRGRQETQYF

SEQ ID NO: 339117 - protein, 14 aa, Homo sapiens
  CDR3 for alpha chain variable domain of TCR clone 169559 (TRAV12-3, TRAJ10)
SHLPLTGGGNKLTF

SEQ ID NO: 339118 - protein, 13 aa, Homo sapiens
  CDR3 for beta chain variable domain of TCR clone 169559 (TRBV12-4, TRBJ2-7)
CASRLSGVYEQYF

SEQ ID NO: 339119 - protein, 13 aa, Homo sapiens
  CDR3 for alpha chain variable domain of TCR clone 169560 (TRAV21, TRAJ27)
CAARPGNAGKSTF

SEQ ID NO: 339120 - protein, 14 aa, Homo sapiens
  CDR3 for beta chain variable domain of TCR clone 169560 (TRBV7-9, TRBJ2-7)
CASSIGQGAGEQYF

SEQ ID NO: 339121 - protein, 16 aa, Homo sapiens
  CDR3 for alpha chain variable domain of TCR clone 169561 (TRAV12-3, TRAJ53)
CAMSPGSGGSNYKLTF

SEQ ID NO: 339122 - protein, 13 aa, Homo sapiens
  CDR3 for beta chain variable domain of TCR clone 169561 (TRBV7-3, TRBJ1-1)
CASSQDWGTEAFF

SEQ ID NO: 339123 - protein, 13 aa, Homo sapiens
  CDR3 for alpha chain variable domain of TCR clone 169562 (TRAV3, TRAJ21)
CAVREPDFNKFYF

SEQ ID NO: 339124 - protein, 15 aa, Homo sapiens
  CDR3 for beta chain variable domain of TCR clone 169562 (TRBV18, TRBJ2-1)
CASLPDRGRDNEQFF

SEQ ID NO: 339125 - protein, 14 aa, Homo sapiens
  CDR3 for alpha chain variable domain of TCR clone 169563 (TRAV9-2, TRAJ39)
CALYIYNAGNMLTF

SEQ ID NO: 339126 - protein, 14 aa, Homo sapiens
  CDR3 for beta chain variable domain of TCR clone 169563 (TRBV7-7, TRBJ2-2)
CASSRDRSTGELFF

SEQ ID NO: 339127 - protein, 18 aa, Homo sapiens
  CDR3 for alpha chain variable domain of TCR clone 169564 (TRAV21, TRAJ52)
CAVRPSPAGGTSYGKLKF

SEQ ID NO: 339128 - protein, 14 aa, Homo sapiens
  CDR3 for beta chain variable domain of TCR clone 169564 (TRBV4-1, TRBJ2-2)
CASSQAVNTGELFF

SEQ ID NO: 339129 - protein, 14 aa, Homo sapiens
  CDR3 for alpha chain variable domain of TCR clone 169565 (TRAV1-1, TRAJ12)
CAVRDQDSSYKLIF

SEQ ID NO: 339130 - protein, 14 aa, Homo sapiens
  CDR3 for beta chain variable domain of TCR clone 169565 (TRBV7-2, TRBJ2-7)
CASSPKTSFYEQYF

SEQ ID NO: 339131 - protein, 15 aa, Homo sapiens
  CDR3 for alpha chain variable domain of TCR clone 169566 (TRAV23/DV6, TRAJ4)
CAASPLRGGYTKLIF

SEQ ID NO: 339132 - protein, 15 aa, Homo sapiens
  CDR3 for beta chain variable domain of TCR clone 169566 (TRBV7-9, TRBJ1-6)
CASSSPGRGNSPLHF

SEQ ID NO: 339133 - protein, 13 aa, Homo sapiens
  CDR3 for alpha chain variable domain of TCR clone 169567 (TRAV2, TRAJ13)
CAVESGGYQKVTF

SEQ ID NO: 339134 - protein, 16 aa, Homo sapiens
  CDR3 for beta chain variable domain of TCR clone 169567 (TRBV2, TRBJ2-1)
CASSVGGSLSYNGQFF

SEQ ID NO: 339135 - protein, 12 aa, Homo sapiens
  CDR3 for alpha chain variable domain of TCR clone 169568 (TRAV13-1, TRAJ21)
CAAKEGFNKFYF

SEQ ID NO: 339136 - protein, 14 aa, Homo sapiens
  CDR3 for beta chain variable domain of TCR clone 169568 (TRBV7-2, TRBJ2-7)
CASSPKPSFYEQYF

SEQ ID NO: 339137 - protein, 19 aa, Homo sapiens
  CDR3 for alpha chain variable domain of TCR clone 169569 (TRAV17, TRAJ17)
CATDGRPGVIKAAGNKLTF

SEQ ID NO: 339138 - protein, 15 aa, Homo sapiens
  CDR3 for beta chain variable domain of TCR clone 169569 (TRBV10-3, TRBJ2-5)
CAISESRDRGETQYF

SEQ ID NO: 339139 - protein, 14 aa, Homo sapiens
  CDR3 for alpha chain variable domain of TCR clone 169570 (TRAV12-1, TRAJ9)
CVVTGYTGGFKTIF

SEQ ID NO: 339140 - protein, 13 aa, Homo sapiens
  CDR3 for beta chain variable domain of TCR clone 169570 (TRBV20-1, TRBJ1-1)
CSARAGGNTEALF

SEQ ID NO: 339141 - protein, 14 aa, Homo sapiens
  CDR3 for alpha chain variable domain of TCR clone 169571 (TRAV1-2, TRAJ16)
CAVNRISDGQKLLF

SEQ ID NO: 339142 - protein, 12 aa, Homo sapiens
  CDR3 for beta chain variable domain of TCR clone 169571 (TRBV11-2, TRBJ2-2)
CASSLGGGELFF

SEQ ID NO: 339143 - protein, 13 aa, Homo sapiens
  CDR3 for alpha chain variable domain of TCR clone 169572 (TRAV27, TRAJ41)
CAGEGNSGYALNF

SEQ ID NO: 339144 - protein, 15 aa, Homo sapiens
  CDR3 for beta chain variable domain of TCR clone 169572 (TRBV12-4, TRBJ2-5)
CASSGTGQAQETQYF

SEQ ID NO: 339145 - protein, 23 aa, Homo sapiens
  CDR3 for alpha chain variable domain of TCR clone 169573 (TRAV12-2, TRAJ22)
CSSETPSPVIQPPGRSSARQLTF

SEQ ID NO: 339146 - protein, 16 aa, Homo sapiens
  CDR3 for beta chain variable domain of TCR clone 169573 (TRBV7-3, TRBJ2-2)
CASSLKRGTLSGELFF

SEQ ID NO: 339147 - protein, 10 aa, Homo sapiens
  CDR3 for alpha chain variable domain of TCR clone 169574 (TRAV23/DV6, TRAJ57)
CAASSTLSQG

SEQ ID NO: 339148 - protein, 13 aa, Homo sapiens
  CDR3 for beta chain variable domain of TCR clone 169574 (TRBV7-3, TRBJ2-5)
CASSFRGGETQYF

SEQ ID NO: 339149 - protein, 15 aa, Homo sapiens
  CDR3 for alpha chain variable domain of TCR clone 169575 (TRAV34, TRAJ38)
CGADFTPGNNRKLIW

SEQ ID NO: 339150 - protein, 16 aa, Homo sapiens
  CDR3 for beta chain variable domain of TCR clone 169575 (TRBV5-4, TRBJ2-5)
CASSLGLAGGRETQYF

SEQ ID NO: 339151 - protein, 17 aa, Homo sapiens
  CDR3 for alpha chain variable domain of TCR clone 169576 (TRAV13-1, TRAJ28)
CAASPPYSGAGSYQLTF

SEQ ID NO: 339152 - protein, 15 aa, Homo sapiens
  CDR3 for beta chain variable domain of TCR clone 169576 (TRBV4-1, TRBJ2-5)
CASSQWDLYQETQYF

SEQ ID NO: 339153 - protein, 16 aa, Homo sapiens
  CDR3 for alpha chain variable domain of TCR clone 169577 (TRAV8-6, TRAJ53)
CAVSVSSGGSNYKLTF

SEQ ID NO: 339154 - protein, 16 aa, Homo sapiens
  CDR3 for beta chain variable domain of TCR clone 169577 (TRBV7-3, TRBJ2-3)
CASSLGGYRPEDTQYF

SEQ ID NO: 339155 - protein, 13 aa, Homo sapiens
  CDR3 for alpha chain variable domain of TCR clone 169578 (TRAV20, TRAJ37)
CAGCSSNTGELIF

SEQ ID NO: 339156 - protein, 13 aa, Homo sapiens
  CDR3 for beta chain variable domain of TCR clone 169578 (TRBV10-2, TRBJ2-3)
CASSESGDHTQYF

SEQ ID NO: 339157 - protein, 17 aa, Homo sapiens
  CDR3 for alpha chain variable domain of TCR clone 169579 (TRAV3, TRAJ42)
CAVRDRDYGGSQGNLIF

SEQ ID NO: 339158 - protein, 18 aa, Homo sapiens
  CDR3 for beta chain variable domain of TCR clone 169579 (TRBV20-1, TRBJ2-3)
CSASGLAGGPGTTETQYF

SEQ ID NO: 339159 - protein, 13 aa, Homo sapiens
  CDR3 for alpha chain variable domain of TCR clone 169580 (TRAV38-2/DV8, TRAJ21)
CAYSGYNFNKFYF

SEQ ID NO: 339160 - protein, 15 aa, Homo sapiens
  CDR3 for beta chain variable domain of TCR clone 169580 (TRBV20-1, TRBJ2-1)
CSARDLQEGPNEQFF

SEQ ID NO: 339161 - protein, 18 aa, Homo sapiens
  CDR3 for alpha chain variable domain of TCR clone 169581 (TRAV13-1, TRAJ52)
CAAKNPNAGGTSYGKLTF

SEQ ID NO: 339162 - protein, 17 aa, Homo sapiens
  CDR3 for beta chain variable domain of TCR clone 169581 (TRBV11-3, TRBJ2-1)
CASSLYPPGVEYNEQFF

SEQ ID NO: 339163 - protein, 13 aa, Homo sapiens
  CDR3 for alpha chain variable domain of TCR clone 169582 (TRAV8-3, TRAJ48)
CAGVPFGNEKLTF

SEQ ID NO: 339164 - protein, 19 aa, Homo sapiens
  CDR3 for beta chain variable domain of TCR clone 169582 (TRBV25-1, TRBJ2-2)
CAILVYRVDRGRKTGELFS

SEQ ID NO: 339165 - protein, 11 aa, Homo sapiens
  CDR3 for alpha chain variable domain of TCR clone 169583 (TRAV3, TRAJ13)
CAVTSYQKVTF

SEQ ID NO: 339166 - protein, 15 aa, Homo sapiens
  CDR3 for beta chain variable domain of TCR clone 169583 (TRBV7-9, TRBJ2-7)
CASNSSGLAVYEQYF

SEQ ID NO: 339167 - protein, 11 aa, Homo sapiens
  CDR3 for alpha chain variable domain of TCR clone 169584 (TRAV1-2, TRAJ40)
FAVPGTYKYIF

SEQ ID NO: 339168 - protein, 15 aa, Homo sapiens
  CDR3 for beta chain variable domain of TCR clone 169584 (TRBV25-1, TRBJ1-4)
CASSPGDSTNEELFF

SEQ ID NO: 339169 - protein, 15 aa, Homo sapiens
  CDR3 for alpha chain variable domain of TCR clone 169585 (TRAV8-3, TRAJ45)
CASSHSGGGADGLTF

SEQ ID NO: 339170 - protein, 16 aa, Homo sapiens
  CDR3 for beta chain variable domain of TCR clone 169585 (TRBV7-9, TRBJ2-2)
CASSGFGGANTGELFF

SEQ ID NO: 339171 - protein, 14 aa, Homo sapiens
  CDR3 for alpha chain variable domain of TCR clone 169586 (TRAV1-2, TRAJ16)
CAVNRFSDGQKLLF

SEQ ID NO: 339172 - protein, 14 aa, Homo sapiens
  CDR3 for beta chain variable domain of TCR clone 169586 (TRBV25-1, TRBJ2-7)
CASSEYGRGYEQYF

SEQ ID NO: 339173 - protein, 15 aa, Homo sapiens
  CDR3 for alpha chain variable domain of TCR clone 169587 (TRAV3, TRAJ5)
CAVRDLDTGRRAFTF

SEQ ID NO: 339174 - protein, 15 aa, Homo sapiens
  CDR3 for beta chain variable domain of TCR clone 169587 (TRBV6-3, TRBJ2-2)
CASSFLATLTGELFF

SEQ ID NO: 339175 - protein, 15 aa, Homo sapiens
  CDR3 for alpha chain variable domain of TCR clone 169588 (TRAV12-1, TRAJ42)
PPTSVKGGSQGTLIF

SEQ ID NO: 339176 - protein, 14 aa, Homo sapiens
  CDR3 for beta chain variable domain of TCR clone 169588 (TRBV25-1, TRBJ1-2)
CASSDTTGVVGYTF

SEQ ID NO: 339177 - protein, 14 aa, Homo sapiens
  CDR3 for alpha chain variable domain of TCR clone 169589 (TRAV13-1, TRAJ10)
CAAKEPGGGNKLTF

SEQ ID NO: 339178 - protein, 16 aa, Homo sapiens
  CDR3 for beta chain variable domain of TCR clone 169589 (TRBV19, TRBJ2-2)
CASRSPGTGATGELFF

SEQ ID NO: 339179 - protein, 14 aa, Homo sapiens
  CDR3 for alpha chain variable domain of TCR clone 169590 (TRAV1-2, TRAJ8)
CAVREDTGFQKLVF

SEQ ID NO: 339180 - protein, 15 aa, Homo sapiens
  CDR3 for beta chain variable domain of TCR clone 169590 (TRBV5-5, TRBJ1-5)
CARSSTPGSNQPQHF

SEQ ID NO: 339181 - protein, 14 aa, Homo sapiens
  CDR3 for alpha chain variable domain of TCR clone 169591 (TRAV17, TRAJ57)
CATDPQGGSEQLVF

SEQ ID NO: 339182 - protein, 15 aa, Homo sapiens
  CDR3 for beta chain variable domain of TCR clone 169591 (TRBV6-3, TRBJ2-7)
CASSSPGTVFYEQYF

SEQ ID NO: 339183 - protein, 21 aa, Homo sapiens
  CDR3 for alpha chain variable domain of TCR clone 169592 (TRAV29/DV5, TRAJ24)
CSVLLCSKRVMTTDSWGKFQF

SEQ ID NO: 339184 - protein, 14 aa, Homo sapiens
  CDR3 for beta chain variable domain of TCR clone 169592 (TRBV4-1, TRBJ2-2)
CASSQAVNTGELFF

SEQ ID NO: 339185 - protein, 13 aa, Homo sapiens
  CDR3 for alpha chain variable domain of TCR clone 169593 (TRAV26-1, TRAJ4)
CIVIGGGYNKLIF

SEQ ID NO: 339186 - protein, 13 aa, Homo sapiens
  CDR3 for beta chain variable domain of TCR clone 169593 (TRBV7-3, TRBJ2-1)
CASSLDSYNEQFF

SEQ ID NO: 339187 - protein, 12 aa, Homo sapiens
  CDR3 for alpha chain variable domain of TCR clone 169594 (TRAV12-3, TRAJ4)
CAMTGAGTRLAV

SEQ ID NO: 339188 - protein, 14 aa, Homo sapiens
  CDR3 for beta chain variable domain of TCR clone 169594 (TRBV10-3, TRBJ1-1)
CDISDTDRGVEAFF

SEQ ID NO: 339189 - protein, 15 aa, Homo sapiens
  CDR3 for alpha chain variable domain of TCR clone 169595 (TRAV8-2, TRAJ40)
CVVLGTTSGTYKYIF

SEQ ID NO: 339190 - protein, 16 aa, Homo sapiens
  CDR3 for beta chain variable domain of TCR clone 169595 (TRBV7-3, TRBJ2-1)
CASSLEGYRSYNVQFF

SEQ ID NO: 339191 - protein, 13 aa, Homo sapiens
  CDR3 for alpha chain variable domain of TCR clone 169596 (TRAV8-3, TRAJ28)
CAVSSVGSYQLTF

SEQ ID NO: 339192 - protein, 14 aa, Homo sapiens
  CDR3 for beta chain variable domain of TCR clone 169596 (TRBV7-2, TRBJ2-7)
CASRSQGAAYEQYF

SEQ ID NO: 339193 - protein, 11 aa, Homo sapiens
  CDR3 for alpha chain variable domain of TCR clone 169597 (TRAV12-1, TRAJ8)
CVVTGFQKLVF

SEQ ID NO: 339194 - protein, 14 aa, Homo sapiens
  CDR3 for beta chain variable domain of TCR clone 169597 (TRBV19, TRBJ2-1)
CASGKSTQYNEQFF

SEQ ID NO: 339195 - protein, 12 aa, Homo sapiens
  CDR3 for alpha chain variable domain of TCR clone 169598 (TRAV26-1, TRAJ54)
CIGGWGAQKLIF

SEQ ID NO: 339196 - protein, 14 aa, Homo sapiens
  CDR3 for beta chain variable domain of TCR clone 169598 (TRBV11-2, TRBJ1-2)
CASSSGQAGDGYTF

SEQ ID NO: 339197 - protein, 17 aa, Homo sapiens
  CDR3 for alpha chain variable domain of TCR clone 169599 (TRAV27, TRAJ26)
CAGARAPLDNYGQNFVF

SEQ ID NO: 339198 - protein, 15 aa, Homo sapiens
  CDR3 for beta chain variable domain of TCR clone 169599 (TRBV11-2, TRBJ2-5)
CASSPRSGGLESQYF

SEQ ID NO: 339199 - protein, 11 aa, Homo sapiens
  CDR3 for alpha chain variable domain of TCR clone 169600 (TRAV12-3, TRAJ41)
CAMNARDALNF

SEQ ID NO: 339200 - protein, 16 aa, Homo sapiens
  CDR3 for beta chain variable domain of TCR clone 169600 (TRBV7-8, TRBJ2-3)
CASSTEGQRETDTQYF

SEQ ID NO: 339201 - protein, 12 aa, Homo sapiens
  CDR3 for alpha chain variable domain of TCR clone 169601 (TRAV12-1, TRAJ40)
CVVYSGTYKYIF

SEQ ID NO: 339202 - protein, 16 aa, Homo sapiens
  CDR3 for beta chain variable domain of TCR clone 169601 (TRBV7-3, TRBJ2-1)
CASSLSGGVHYNEQFF

SEQ ID NO: 339203 - protein, 16 aa, Homo sapiens
  CDR3 for alpha chain variable domain of TCR clone 169602 (TRAV13-1, TRAJ45)
CAARGCRKGGADGLTF

SEQ ID NO: 339204 - protein, 13 aa, Homo sapiens
  CDR3 for beta chain variable domain of TCR clone 169602 (TRBV12-4, TRBJ2-5)
CASRKRGKETQYF

SEQ ID NO: 339205 - protein, 12 aa, Homo sapiens
  CDR3 for alpha chain variable domain of TCR clone 169603 (TRAV21, TRAJ33)
CAKMDSNYQLIW

SEQ ID NO: 339206 - protein, 14 aa, Homo sapiens
  CDR3 for beta chain variable domain of TCR clone 169603 (TRBV2, TRBJ2-7)
CASSLTSRGYEQYF

SEQ ID NO: 339207 - protein, 13 aa, Homo sapiens
  CDR3 for alpha chain variable domain of TCR clone 169604 (TRAV29/DV5, TRAJ29)
CAANAAGNTPLVF

SEQ ID NO: 339208 - protein, 14 aa, Homo sapiens
  CDR3 for beta chain variable domain of TCR clone 169604 (TRBV19, TRBJ2-3)
CASSAPRGTDTQYF

SEQ ID NO: 339209 - protein, 14 aa, Homo sapiens
  CDR3 for alpha chain variable domain of TCR clone 169605 (TRAV2, TRAJ37)
CAVDFTSNTGKLIF

SEQ ID NO: 339210 - protein, 13 aa, Homo sapiens
  CDR3 for beta chain variable domain of TCR clone 169605 (TRBV20-1, TRBJ2-2)
CSASAAGTGELFF

SEQ ID NO: 339211 - protein, 14 aa, Homo sapiens
  CDR3 for alpha chain variable domain of TCR clone 169606 (TRAV13-1, TRAJ26)
CAASSAHYGQDFVF

SEQ ID NO: 339212 - protein, 17 aa, Homo sapiens
  CDR3 for beta chain variable domain of TCR clone 169606 (TRBV25-1, TRBJ2-5)
CASSRRGGRGGQETRYF

SEQ ID NO: 339213 - protein, 12 aa, Homo sapiens
  CDR3 for alpha chain variable domain of TCR clone 169607 (TRAV1-1, TRAJ20)
CAVREDDYKLSF

SEQ ID NO: 339214 - protein, 14 aa, Homo sapiens
  CDR3 for beta chain variable domain of TCR clone 169607 (TRBV18, TRBJ2-7)
CASSSRTLAYEQYF

SEQ ID NO: 339215 - protein, 10 aa, Homo sapiens
  CDR3 for alpha chain variable domain of TCR clone 169608 (TRAV36/DV7, TRAJ49)
CALTGNQFYF

SEQ ID NO: 339216 - protein, 14 aa, Homo sapiens
  CDR3 for beta chain variable domain of TCR clone 169608 (TRBV12-5, TRBJ2-5)
CASGSRTHQETQYF

SEQ ID NO: 339217 - protein, 20 aa, Homo sapiens
  CDR3 for alpha chain variable domain of TCR clone 169609 (TRAV30, TRAJ54)
SAAQSRSETQVVLGAQKLVF

SEQ ID NO: 339218 - protein, 11 aa, Homo sapiens
  CDR3 for beta chain variable domain of TCR clone 169609 (TRBV25-1, TRBJ2-4)
CQSRDQNIQYF

SEQ ID NO: 339219 - protein, 12 aa, Homo sapiens
  CDR3 for alpha chain variable domain of TCR clone 169610 (TRAV3, TRAJ43)
CAVRDPNNDMRF

SEQ ID NO: 339220 - protein, 14 aa, Homo sapiens
  CDR3 for beta chain variable domain of TCR clone 169610 (TRBV24-1, TRBJ1-1)
CATSDSDRVLSLDE

SEQ ID NO: 339221 - protein, 14 aa, Homo sapiens
  CDR3 for alpha chain variable domain of TCR clone 169611 (TRAV13-1, TRAJ24)
CAASRTDSWGKLQF

SEQ ID NO: 339222 - protein, 15 aa, Homo sapiens
  CDR3 for beta chain variable domain of TCR clone 169611 (TRBV7-9, TRBJ1-5)
CASSQGHQHNQPQHF

SEQ ID NO: 339223 - protein, 13 aa, Homo sapiens
  CDR3 for alpha chain variable domain of TCR clone 169612 (TRAV8-3, TRAJ36)
CAVGATGANNLFF

SEQ ID NO: 339224 - protein, 13 aa, Homo sapiens
  CDR3 for beta chain variable domain of TCR clone 169612 (TRBV11-2, TRBJ1-6)
CASSLAGTSPLHF

SEQ ID NO: 339225 - protein, 12 aa, Homo sapiens
  CDR3 for alpha chain variable domain of TCR clone 169613 (TRAV12-1, TRAJ15)
CVVNQAGTALIF

SEQ ID NO: 339226 - protein, 14 aa, Homo sapiens
  CDR3 for beta chain variable domain of TCR clone 169613 (TRBV11-3, TRBJ2-1)
CASSLAVAYNEQFF

SEQ ID NO: 339227 - protein, 16 aa, Homo sapiens
  CDR3 for alpha chain variable domain of TCR clone 169614 (TRAV3, TRAJ3)
CAVRDRAKSSASKIIF

SEQ ID NO: 339228 - protein, 16 aa, Homo sapiens
  CDR3 for beta chain variable domain of TCR clone 169614 (TRBV6-1, TRBJ2-5)
CASSETLDRGAETQYF

SEQ ID NO: 339229 - protein, 14 aa, Homo sapiens
  CDR3 for alpha chain variable domain of TCR clone 169615 (TRAV14/DV4, TRAJ49)
CAFNRYLTGNQFYF

SEQ ID NO: 339230 - protein, 13 aa, Homo sapiens
  CDR3 for beta chain variable domain of TCR clone 169615 (TRBV7-3, TRBJ1-1)
CASSQDWGAEAFF

SEQ ID NO: 339231 - protein, 12 aa, Homo sapiens
  CDR3 for alpha chain variable domain of TCR clone 169616 (TRAV5, TRAJ27)
CAEITNAGKSTF

SEQ ID NO: 339232 - protein, 13 aa, Homo sapiens
  CDR3 for beta chain variable domain of TCR clone 169616 (TRBV19, TRBJ1-2)
CASSVPGQDGYTF

SEQ ID NO: 339233 - protein, 18 aa, Homo sapiens
  CDR3 for alpha chain variable domain of TCR clone 169617 (TRAV26-1, TRAJ23)
CIVRVGLEGWNQGGKLIF

SEQ ID NO: 339234 - protein, 13 aa, Homo sapiens
  CDR3 for beta chain variable domain of TCR clone 169617 (TRBV27, TRBJ2-7)
CASSLTTGYEQYF

SEQ ID NO: 339235 - protein, 12 aa, Homo sapiens
  CDR3 for alpha chain variable domain of TCR clone 169618 (TRAV12-2, TRAJ21)
CAVNRNFNKFYF

SEQ ID NO: 339236 - protein, 15 aa, Homo sapiens
  CDR3 for beta chain variable domain of TCR clone 169618 (TRBV11-2, TRBJ2-1)
CASSLGTSGLNEQFF

SEQ ID NO: 339237 - protein, 16 aa, Homo sapiens
  CDR3 for alpha chain variable domain of TCR clone 169619 (TRAV20, TRAJ22)
CAVQASSSGSARQLTF

SEQ ID NO: 339238 - protein, 14 aa, Homo sapiens
  CDR3 for beta chain variable domain of TCR clone 169619 (TRBV11-2, TRBJ1-5)
CASSLDRGRQPQHF

SEQ ID NO: 339239 - protein, 11 aa, Homo sapiens
  CDR3 for alpha chain variable domain of TCR clone 169620 (TRAV21, TRAJ11)
CAVNGYSTLTF

SEQ ID NO: 339240 - protein, 15 aa, Homo sapiens
  CDR3 for beta chain variable domain of TCR clone 169620 (TRBV6-3, TRBJ1-5)
CASSPEVGFNQPQHF

SEQ ID NO: 339241 - protein, 15 aa, Homo sapiens
  CDR3 for alpha chain variable domain of TCR clone 169621 (TRAV36/DV7, TRAJ54)
CAVEKPAQGAQKLVF

SEQ ID NO: 339242 - protein, 14 aa, Homo sapiens
  CDR3 for beta chain variable domain of TCR clone 169621 (TRBV4-3, TRBJ2-2)
CASSQGHVTGELFF

SEQ ID NO: 339243 - protein, 17 aa, Homo sapiens
  CDR3 for alpha chain variable domain of TCR clone 169622 (TRAV38-1, TRAJ54)
CAFVKPTGLQGAQKLVF

SEQ ID NO: 339244 - protein, 14 aa, Homo sapiens
  CDR3 for beta chain variable domain of TCR clone 169622 (TRBV19, TRBJ2-7)
CASSIRLGDHEQYF

SEQ ID NO: 339245 - protein, 16 aa, Homo sapiens
  CDR3 for alpha chain variable domain of TCR clone 169623 (TRAV4, TRAJ22)
CLVGDLYSGSARQLTF

SEQ ID NO: 339246 - protein, 16 aa, Homo sapiens
  CDR3 for beta chain variable domain of TCR clone 169623 (TRBV7-3, TRBJ2-2)
CASSLKRGTLSGELFF

SEQ ID NO: 339247 - protein, 13 aa, Homo sapiens
  CDR3 for alpha chain variable domain of TCR clone 169624 (TRAV13-1, TRAJ10)
CAATAGGGNKRTF

SEQ ID NO: 339248 - protein, 14 aa, Homo sapiens
  CDR3 for beta chain variable domain of TCR clone 169624 (TRBV12-4, TRBJ2-7)
CASSPAGLKYEQYF

SEQ ID NO: 339249 - protein, 14 aa, Homo sapiens
  CDR3 for alpha chain variable domain of TCR clone 169625 (TRAV17, TRAJ57)
CATDPQGGSEKLVF

SEQ ID NO: 339250 - protein, 15 aa, Homo sapiens
  CDR3 for beta chain variable domain of TCR clone 169625 (TRBV7-9, TRBJ2-7)
CASSSSGLAVYEQYF

SEQ ID NO: 339251 - protein, 15 aa, Homo sapiens
  CDR3 for alpha chain variable domain of TCR clone 169626 (TRAV27, TRAJ53)
CRAINSGGSNYELTF

SEQ ID NO: 339252 - protein, 14 aa, Homo sapiens
  CDR3 for beta chain variable domain of TCR clone 169626 (TRBV7-3, TRBJ2-1)
CASSLAGGTNEQFF

SEQ ID NO: 339253 - protein, 14 aa, Homo sapiens
  CDR3 for alpha chain variable domain of TCR clone 169627 (TRAV13-1, TRAJ5)
CAAHPDTGRRALTF

SEQ ID NO: 339254 - protein, 15 aa, Homo sapiens
  CDR3 for beta chain variable domain of TCR clone 169627 (TRBV7-2, TRBJ2-1)
CASTHGTGIYNEQFF

SEQ ID NO: 339255 - protein, 17 aa, Homo sapiens
  CDR3 for alpha chain variable domain of TCR clone 169628 (TRAV4, TRAJ22)
CCVLLPRGGGSARQLSF

SEQ ID NO: 339256 - protein, 14 aa, Homo sapiens
  CDR3 for beta chain variable domain of TCR clone 169628 (TRBV20-1, TRBJ1-1)
CSARAVNGYTEAFF

SEQ ID NO: 339257 - protein, 13 aa, Homo sapiens
  CDR3 for alpha chain variable domain of TCR clone 169629 (TRAV17, TRAJ40)
CATRSPGTYKYLF

SEQ ID NO: 339258 - protein, 13 aa, Homo sapiens
  CDR3 for beta chain variable domain of TCR clone 169629 (TRBV2, TRBJ1-5)
CATAGPGNQPQHF

SEQ ID NO: 339259 - protein, 14 aa, Homo sapiens
  CDR3 for alpha chain variable domain of TCR clone 169630 (TRAV13-2, TRAJ26)
CAENLGNYGQNFVF

SEQ ID NO: 339260 - protein, 14 aa, Homo sapiens
  CDR3 for beta chain variable domain of TCR clone 169630 (TRBV19, TRBJ1-3)
CASNRGKSGNTIYF

SEQ ID NO: 339261 - protein, 14 aa, Homo sapiens
  CDR3 for alpha chain variable domain of TCR clone 169631 (TRAV1-2, TRAJ8)
CAVRDDTGFQKLVF

SEQ ID NO: 339262 - protein, 12 aa, Homo sapiens
  CDR3 for beta chain variable domain of TCR clone 169631 (TRBV11-2, TRBJ2-1)
CASSPGNNEQFF

SEQ ID NO: 339263 - protein, 14 aa, Homo sapiens
  CDR3 for alpha chain variable domain of TCR clone 169632 (TRAV26-1, TRAJ38)
CIAANAGNNRKLIW

SEQ ID NO: 339264 - protein, 13 aa, Homo sapiens
  CDR3 for beta chain variable domain of TCR clone 169632 (TRBV15, TRBJ1-6)
CATSGGLNSPLHF

SEQ ID NO: 339265 - protein, 10 aa, Homo sapiens
  CDR3 for alpha chain variable domain of TCR clone 169633 (TRAV4, TRAJ20)
CLVGDKVTTT

SEQ ID NO: 339266 - protein, 13 aa, Homo sapiens
  CDR3 for beta chain variable domain of TCR clone 169633 (TRBV10-3, TRBJ2-7)
CASRLAVNYEQYF

SEQ ID NO: 339267 - protein, 21 aa, Homo sapiens
  CDR3 for alpha chain variable domain of TCR clone 169634 (TRAV8-3, TRAJ10)
CAVGHTHGRRKQTHLWDMHSA

SEQ ID NO: 339268 - protein, 10 aa, Homo sapiens
  CDR3 for beta chain variable domain of TCR clone 169634 (TRBV20-1, TRBJ2-5)
CSARFETQYF

SEQ ID NO: 339269 - protein, 13 aa, Homo sapiens
  CDR3 for alpha chain variable domain of TCR clone 169635 (TRAV27, TRAJ41)
CAGEGNSGDALNF

SEQ ID NO: 339270 - protein, 13 aa, Homo sapiens
  CDR3 for beta chain variable domain of TCR clone 169635 (TRBV12-5, TRBJ2-3)
CASGDRQSDTQYF

SEQ ID NO: 339271 - protein, 12 aa, Homo sapiens
  CDR3 for alpha chain variable domain of TCR clone 169636 (TRAV3, TRAJ26)
CAVRDYGQNFVF

SEQ ID NO: 339272 - protein, 13 aa, Homo sapiens
  CDR3 for beta chain variable domain of TCR clone 169636 (TRBV20-1, TRBJ1-2)
CSARGTADYGYTF

SEQ ID NO: 339273 - protein, 12 aa, Homo sapiens
  CDR3 for alpha chain variable domain of TCR clone 169637 (TRAV17, TRAJ20)
CATLANDYKLSF

SEQ ID NO: 339274 - protein, 14 aa, Homo sapiens
  CDR3 for beta chain variable domain of TCR clone 169637 (TRBV10-3, TRBJ1-2)
CAISEDTPYYCYTF

SEQ ID NO: 339275 - protein, 14 aa, Homo sapiens
  CDR3 for alpha chain variable domain of TCR clone 169638 (TRAV35, TRAJ38)
CAGSNAGNNRKLIW

SEQ ID NO: 339276 - protein, 15 aa, Homo sapiens
  CDR3 for beta chain variable domain of TCR clone 169638 (TRBV19, TRBJ2-2)
CASSLNRGVTGELFF

SEQ ID NO: 339277 - protein, 14 aa, Homo sapiens
  CDR3 for alpha chain variable domain of TCR clone 169639 (TRAV8-3, TRAJ3)
CAVVPRSRASKIIF

SEQ ID NO: 339278 - protein, 16 aa, Homo sapiens
  CDR3 for beta chain variable domain of TCR clone 169639 (TRBV4-1, TRBJ2-3)
CASSQLTSGGGDTQYF

SEQ ID NO: 339279 - protein, 14 aa, Homo sapiens
  CDR3 for alpha chain variable domain of TCR clone 169640 (TRAV16, TRAJ33)
CALSAMDSNYQLIW

SEQ ID NO: 339280 - protein, 16 aa, Homo sapiens
  CDR3 for beta chain variable domain of TCR clone 169640 (TRBV2, TRBJ2-7)
CASSEPWTGPSYEQYF

SEQ ID NO: 339281 - protein, 11 aa, Homo sapiens
  CDR3 for alpha chain variable domain of TCR clone 169641 (TRAV3, TRAJ33)
CAVRRNYQLIW

SEQ ID NO: 339282 - protein, 11 aa, Homo sapiens
  CDR3 for beta chain variable domain of TCR clone 169641 (TRBV6-3, TRBJ2-3)
CATGQADTQYF

SEQ ID NO: 339283 - protein, 15 aa, Homo sapiens
  CDR3 for alpha chain variable domain of TCR clone 169642 (TRAV2, TRAJ45)
CAVDGTGGGADGLTF

SEQ ID NO: 339284 - protein, 14 aa, Homo sapiens
  CDR3 for beta chain variable domain of TCR clone 169642 (TRBV20-1, TRBJ1-1)
CSAQTRIGGTEAFF

SEQ ID NO: 339285 - protein, 17 aa, Homo sapiens
  CDR3 for alpha chain variable domain of TCR clone 169643 (TRAV3, TRAJ6)
SAVRDGPMAGGSYIPTF

SEQ ID NO: 339286 - protein, 20 aa, Homo sapiens
  CDR3 for beta chain variable domain of TCR clone 169643 (TRBV28, TRBJ2-1)
CTSTPIGRSPGLAGGNEQFF

SEQ ID NO: 339287 - protein, 14 aa, Homo sapiens
  CDR3 for alpha chain variable domain of TCR clone 169644 (TRAV26-1, TRAJ48)
CIVRVGFGNEKLTF

SEQ ID NO: 339288 - protein, 15 aa, Homo sapiens
  CDR3 for beta chain variable domain of TCR clone 169644 (TRBV20-1, TRBJ2-5)
CSAEGTGGLQETQYF

SEQ ID NO: 339289 - protein, 13 aa, Homo sapiens
  CDR3 for alpha chain variable domain of TCR clone 169645 (TRAV35, TRAJ48)
CAGHEFGNEKLTF

SEQ ID NO: 339290 - protein, 13 aa, Homo sapiens
  CDR3 for beta chain variable domain of TCR clone 169645 (TRBV7-9, TRBJ2-3)
CASSPGSTDTQYF

SEQ ID NO: 339291 - protein, 12 aa, Homo sapiens
  CDR3 for alpha chain variable domain of TCR clone 169646 (TRAV17, TRAJ45)
CAAGGGADGLTF

SEQ ID NO: 339292 - protein, 14 aa, Homo sapiens
  CDR3 for beta chain variable domain of TCR clone 169646 (TRBV20-1, TRBJ1-1)
CSAQTRIGGTEAFS

SEQ ID NO: 339293 - protein, 14 aa, Homo sapiens
  CDR3 for alpha chain variable domain of TCR clone 169647 (TRAV12-3, TRAJ10)
SHLPLTGGGNKLTF

SEQ ID NO: 339294 - protein, 16 aa, Homo sapiens
  CDR3 for beta chain variable domain of TCR clone 169647 (TRBV19, TRBJ2-1)
CASSKAGPSSYNEQLF

SEQ ID NO: 339295 - protein, 13 aa, Homo sapiens
  CDR3 for alpha chain variable domain of TCR clone 169648 (TRAV2, TRAJ40)
CAVVTSGTYKYIF

SEQ ID NO: 339296 - protein, 15 aa, Homo sapiens
  CDR3 for beta chain variable domain of TCR clone 169648 (TRBV7-3, TRBJ2-1)
CASSLGQGPFGEQFF

SEQ ID NO: 339297 - protein, 16 aa, Homo sapiens
  CDR3 for alpha chain variable domain of TCR clone 169649 (TRAV26-1, TRAJ23)
CIVRVERYNQGGKLIF

SEQ ID NO: 339298 - protein, 15 aa, Homo sapiens
  CDR3 for beta chain variable domain of TCR clone 169649 (TRBV18, TRBJ2-7)
CASAPRGGKGYEQYF

SEQ ID NO: 339299 - protein, 14 aa, Homo sapiens
  CDR3 for alpha chain variable domain of TCR clone 169650 (TRAV12-2, TRAJ13)
CAVKKTGGYQKVTF

SEQ ID NO: 339300 - protein, 16 aa, Homo sapiens
  CDR3 for beta chain variable domain of TCR clone 169650 (TRBV20-1, TRBJ2-2)
CSASASGIPGAGELFF

SEQ ID NO: 339301 - protein, 16 aa, Homo sapiens
  CDR3 for alpha chain variable domain of TCR clone 169651 (TRAV13-1, TRAJ10)
CAAGYKLTGGGNKLTF

SEQ ID NO: 339302 - protein, 15 aa, Homo sapiens
  CDR3 for beta chain variable domain of TCR clone 169651 (TRBV12-4, TRBJ2-7)
CASSQTGAISYEQYF

SEQ ID NO: 339303 - protein, 14 aa, Homo sapiens
  CDR3 for alpha chain variable domain of TCR clone 169652 (TRAV2, TRAJ9)
CAVEDRSGGFKTIF

SEQ ID NO: 339304 - protein, 15 aa, Homo sapiens
  CDR3 for beta chain variable domain of TCR clone 169652 (TRBV19, TRBJ1-1)
CASRETGGVNTEAFF

SEQ ID NO: 339305 - protein, 18 aa, Homo sapiens
  CDR3 for alpha chain variable domain of TCR clone 169653 (TRAV26-2, TRAJ45)
CILRLWGYSGGGADGLTF

SEQ ID NO: 339306 - protein, 17 aa, Homo sapiens
  CDR3 for beta chain variable domain of TCR clone 169653 (TRBV28, TRBJ2-3)
CVSSPTPAGGRVDTQYF

SEQ ID NO: 339307 - protein, 12 aa, Homo sapiens
  CDR3 for alpha chain variable domain of TCR clone 169654 (TRAV2, TRAJ40)
CCGYSGTYKYIF

SEQ ID NO: 339308 - protein, 14 aa, Homo sapiens
  CDR3 for beta chain variable domain of TCR clone 169654 (TRBV19, TRBJ2-1)
CASPTFVLSGEQFF

SEQ ID NO: 339309 - protein, 13 aa, Homo sapiens
  CDR3 for alpha chain variable domain of TCR clone 169655 (TRAV29/DV5, TRAJ31)
CAASRNNNARLMF

SEQ ID NO: 339310 - protein, 15 aa, Homo sapiens
  CDR3 for beta chain variable domain of TCR clone 169655 (TRBV2, TRBJ2-5)
CASTRDGGPQETQYF

SEQ ID NO: 339311 - protein, 14 aa, Homo sapiens
  CDR3 for alpha chain variable domain of TCR clone 169656 (TRAV20, TRAJ22)
CAVQVSGSARQLTF

SEQ ID NO: 339312 - protein, 15 aa, Homo sapiens
  CDR3 for beta chain variable domain of TCR clone 169656 (TRBV2, TRBJ2-1)
CASSELAGSYNEQFF

SEQ ID NO: 339313 - protein, 15 aa, Homo sapiens
  CDR3 for alpha chain variable domain of TCR clone 169657 (TRAV27, TRAJ38)
CAARRNAGNNRKLIW

SEQ ID NO: 339314 - protein, 15 aa, Homo sapiens
  CDR3 for beta chain variable domain of TCR clone 169657 (TRBV7-8, TRBJ2-1)
RASSLADSLYNEQFF

SEQ ID NO: 339315 - protein, 13 aa, Homo sapiens
  CDR3 for alpha chain variable domain of TCR clone 169658 (TRAV13-1, TRAJ6)
CAASRGGSYIPTF

SEQ ID NO: 339316 - protein, 15 aa, Homo sapiens
  CDR3 for beta chain variable domain of TCR clone 169658 (TRBV27, TRBJ1-6)
CASSFDRGLGSPLHF

SEQ ID NO: 339317 - protein, 12 aa, Homo sapiens
  CDR3 for alpha chain variable domain of TCR clone 169659 (TRAV21, TRAJ27)
CAARRQCRQINL

SEQ ID NO: 339318 - protein, 14 aa, Homo sapiens
  CDR3 for beta chain variable domain of TCR clone 169659 (TRBV7-6, TRBJ2-3)
CASSLGTVTDTQYF

SEQ ID NO: 339319 - protein, 13 aa, Homo sapiens
  CDR3 for alpha chain variable domain of TCR clone 169660 (TRAV27, TRAJ3)
ASLRGISASKIIF

SEQ ID NO: 339320 - protein, 15 aa, Homo sapiens
  CDR3 for beta chain variable domain of TCR clone 169660 (TRBV28, TRBJ1-3)
CASSMGWASGNTIYF

SEQ ID NO: 339321 - protein, 12 aa, Homo sapiens
  CDR3 for alpha chain variable domain of TCR clone 169661 (TRAV27, TRAJ13)
CAGAGGYQKVTF

SEQ ID NO: 339322 - protein, 15 aa, Homo sapiens
  CDR3 for beta chain variable domain of TCR clone 169661 (TRBV20-1, TRBJ2-6)
CSARDRGPEANVLTF

SEQ ID NO: 339323 - protein, 14 aa, Homo sapiens
  CDR3 for alpha chain variable domain of TCR clone 169662 (TRAV8-3, TRAJ30)
CAVGDMNRDDKIIF

SEQ ID NO: 339324 - protein, 17 aa, Homo sapiens
  CDR3 for beta chain variable domain of TCR clone 169662 (TRBV19, TRBJ2-2)
CASSRNPWGFGTGELFF

SEQ ID NO: 339325 - protein, 15 aa, Homo sapiens
  CDR3 for alpha chain variable domain of TCR clone 169663 (TRAV8-2, TRAJ16)
GVVSDGFSDGQKLPF

SEQ ID NO: 339326 - protein, 15 aa, Homo sapiens
  CDR3 for beta chain variable domain of TCR clone 169663 (TRBV12-4, TRBJ2-5)
CASSPPTGLQETQYF

SEQ ID NO: 339327 - protein, 11 aa, Homo sapiens
  CDR3 for alpha chain variable domain of TCR clone 169664 (TRAV21, TRAJ11)
CAVNGYSTLTF

SEQ ID NO: 339328 - protein, 13 aa, Homo sapiens
  CDR3 for beta chain variable domain of TCR clone 169664 (TRBV19, TRBJ1-2)
CASSQGQVYGYTF

SEQ ID NO: 339329 - protein, 13 aa, Homo sapiens
  CDR3 for alpha chain variable domain of TCR clone 169665 (TRAV13-2, TRAJ8)
CAFMNTGFQKLVF

SEQ ID NO: 339330 - protein, 14 aa, Homo sapiens
  CDR3 for beta chain variable domain of TCR clone 169665 (TRBV25-1, TRBJ1-1)
CASTHLGGNTEAFF

SEQ ID NO: 339331 - protein, 15 aa, Homo sapiens
  CDR3 for alpha chain variable domain of TCR clone 169666 (TRAV23/DV6, TRAJ30)
CAASSQESRDDKIIF

SEQ ID NO: 339332 - protein, 13 aa, Homo sapiens
  CDR3 for beta chain variable domain of TCR clone 169666 (TRBV7-9, TRBJ2-7)
CASSFAGAYEQYF

SEQ ID NO: 339333 - protein, 13 aa, Homo sapiens
  CDR3 for alpha chain variable domain of TCR clone 169667 (TRAV3, TRAJ20)
CWEAFCNDYKISF

SEQ ID NO: 339334 - protein, 15 aa, Homo sapiens
  CDR3 for beta chain variable domain of TCR clone 169667 (TRBV19, TRBJ2-6)
CASVRRDSGANVLTF

SEQ ID NO: 339335 - protein, 18 aa, Homo sapiens
  CDR3 for alpha chain variable domain of TCR clone 169668 (TRAV12-3, TRAJ52)
CAMSVGGAGGTSYGKLTF

SEQ ID NO: 339336 - protein, 15 aa, Homo sapiens
  CDR3 for beta chain variable domain of TCR clone 169668 (TRBV5-1, TRBJ2-1)
CASSPPRAPYNEQFF

SEQ ID NO: 339337 - protein, 14 aa, Homo sapiens
  CDR3 for alpha chain variable domain of TCR clone 169669 (TRAV1-2, TRAJ15)
CAVRDRQAGTALIF

SEQ ID NO: 339338 - protein, 12 aa, Homo sapiens
  CDR3 for beta chain variable domain of TCR clone 169669 (TRBV29-1, TRBJ2-3)
CSVTGGADTQYF

SEQ ID NO: 339339 - protein, 15 aa, Homo sapiens
  CDR3 for alpha chain variable domain of TCR clone 169670 (TRAV35, TRAJ40)
CAGQLGTSGTYKYIF

SEQ ID NO: 339340 - protein, 15 aa, Homo sapiens
  CDR3 for beta chain variable domain of TCR clone 169670 (TRBV12-4, TRBJ2-5)
CASSPPTGLQETQYF

SEQ ID NO: 339341 - protein, 14 aa, Homo sapiens
  CDR3 for alpha chain variable domain of TCR clone 169671 (TRAV1-2, TRAJ8)
CAVREDTGFQKLVF

SEQ ID NO: 339342 - protein, 16 aa, Homo sapiens
  CDR3 for beta chain variable domain of TCR clone 169671 (TRBV7-9, TRBJ2-1)
CASSDVAGGSYNEHFF

SEQ ID NO: 339343 - protein, 11 aa, Homo sapiens
  CDR3 for alpha chain variable domain of TCR clone 169672 (TRAV2, TRAJ21)
CAVFNFNKFYF

SEQ ID NO: 339344 - protein, 15 aa, Homo sapiens
  CDR3 for beta chain variable domain of TCR clone 169672 (TRBV7-9, TRBJ1-5)
CASSQGHQPNQPQHF

SEQ ID NO: 339345 - protein, 18 aa, Homo sapiens
  CDR3 for alpha chain variable domain of TCR clone 169673 (TRAV13-1, TRAJ52)
CAAKNPNAGGTSYGKLTF

SEQ ID NO: 339346 - protein, 14 aa, Homo sapiens
  CDR3 for beta chain variable domain of TCR clone 169673 (TRBV28, TRBJ2-5)
CASTGAGGVETQYF

SEQ ID NO: 339347 - protein, 13 aa, Homo sapiens
  CDR3 for alpha chain variable domain of TCR clone 169674 (TRAV21, TRAJ31)
CAPFRNNNARLMF

SEQ ID NO: 339348 - protein, 12 aa, Homo sapiens
  CDR3 for beta chain variable domain of TCR clone 169674 (TRBV5-1, TRBJ1-1)
CASSFGNTEAFC

SEQ ID NO: 339349 - protein, 13 aa, Homo sapiens
  CDR3 for alpha chain variable domain of TCR clone 169675 (TRAV36/DV7, TRAJ49)
CAVEANTGNQFHF

SEQ ID NO: 339350 - protein, 14 aa, Homo sapiens
  CDR3 for beta chain variable domain of TCR clone 169675 (TRBV20-1, TRBJ2-5)
CSASSGRAAETQYF

SEQ ID NO: 339351 - protein, 13 aa, Homo sapiens
  CDR3 for alpha chain variable domain of TCR clone 169676 (TRAV8-6, TRAJ21)
CAVSPSSLNKFYF

SEQ ID NO: 339352 - protein, 16 aa, Homo sapiens
  CDR3 for beta chain variable domain of TCR clone 169676 (TRBV5-1, TRBJ2-2)
CASSSRTGGRTGELFF

SEQ ID NO: 339353 - protein, 15 aa, Homo sapiens
  CDR3 for alpha chain variable domain of TCR clone 169677 (TRAV2, TRAJ22)
CAVPSRGGSARQLTF

SEQ ID NO: 339354 - protein, 13 aa, Homo sapiens
  CDR3 for beta chain variable domain of TCR clone 169677 (TRBV6-5, TRBJ2-5)
CASSPQGGETQYF

SEQ ID NO: 339355 - protein, 17 aa, Homo sapiens
  CDR3 for alpha chain variable domain of TCR clone 169678 (TRAV3, TRAJ6)
CAVRDGPRAGGSYLPTF

SEQ ID NO: 339356 - protein, 14 aa, Homo sapiens
  CDR3 for beta chain variable domain of TCR clone 169678 (TRBV7-2, TRBJ2-7)
CASSPKTSFYEQYV

SEQ ID NO: 339357 - protein, 17 aa, Homo sapiens
  CDR3 for alpha chain variable domain of TCR clone 169679 (TRAV12-1, TRAJ42)
CVVNMQRKGGSQGNLIF

SEQ ID NO: 339358 - protein, 15 aa, Homo sapiens
  CDR3 for beta chain variable domain of TCR clone 169679 (TRBV28, TRBJ2-7)
CASSPGGRGFYEQYF

SEQ ID NO: 339359 - protein, 14 aa, Homo sapiens
  CDR3 for alpha chain variable domain of TCR clone 169680 (TRAV26-1, TRAJ38)
CIADNAGNNRKLLW

SEQ ID NO: 339360 - protein, 15 aa, Homo sapiens
  CDR3 for beta chain variable domain of TCR clone 169680 (TRBV20-1, TRBJ1-1)
CSASRGVTGNTEAFF

SEQ ID NO: 339361 - protein, 13 aa, Homo sapiens
  CDR3 for alpha chain variable domain of TCR clone 169681 (TRAV30, TRAJ26)
CGTEIPLGQNFVF

SEQ ID NO: 339362 - protein, 14 aa, Homo sapiens
  CDR3 for beta chain variable domain of TCR clone 169681 (TRBV19, TRBJ1-4)
CASSMGRHNEKLFF

SEQ ID NO: 339363 - protein, 15 aa, Homo sapiens
  CDR3 for alpha chain variable domain of TCR clone 169682 (TRAV13-1, TRAJ44)
CAASRGGGTASKLTF

SEQ ID NO: 339364 - protein, 12 aa, Homo sapiens
  CDR3 for beta chain variable domain of TCR clone 169682 (TRBV11-2, TRBJ2-2)
CASSLGGGGLFF

SEQ ID NO: 339365 - protein, 14 aa, Homo sapiens
  CDR3 for alpha chain variable domain of TCR clone 169683 (TRAV12-3, TRAJ42)
CAMNYGGSQGNLIF

SEQ ID NO: 339366 - protein, 16 aa, Homo sapiens
  CDR3 for beta chain variable domain of TCR clone 169683 (TRBV19, TRBJ2-1)
CASSMGGGSSYNEQFF

SEQ ID NO: 339367 - protein, 14 aa, Homo sapiens
  CDR3 for alpha chain variable domain of TCR clone 169684 (TRAV1-2, TRAJ16)
CAVNRFSDGQKLLF

SEQ ID NO: 339368 - protein, 14 aa, Homo sapiens
  CDR3 for beta chain variable domain of TCR clone 169684 (TRBV7-2, TRBJ1-3)
CASSLGTAGNTIYF

SEQ ID NO: 339369 - protein, 15 aa, Homo sapiens
  CDR3 for alpha chain variable domain of TCR clone 169685 (TRAV17, TRAJ4)
CATGTWSGGYNKLIF

SEQ ID NO: 339370 - protein, 15 aa, Homo sapiens
  CDR3 for beta chain variable domain of TCR clone 169685 (TRBV27, TRBJ2-1)
CASSNGGGSSNEQFF

SEQ ID NO: 339371 - protein, 16 aa, Homo sapiens
  CDR3 for alpha chain variable domain of TCR clone 169686 (TRAV30, TRAJ24)
CGTEIVDADSWGKFQF

SEQ ID NO: 339372 - protein, 15 aa, Homo sapiens
  CDR3 for beta chain variable domain of TCR clone 169686 (TRBV12-4, TRBJ2-5)
CASSRTGMNQETQYF

SEQ ID NO: 339373 - protein, 12 aa, Homo sapiens
  CDR3 for alpha chain variable domain of TCR clone 169687 (TRAV12-3, TRAJ17)
CAMTLTGNKLTF

SEQ ID NO: 339374 - protein, 15 aa, Homo sapiens
  CDR3 for beta chain variable domain of TCR clone 169687 (TRBV20-1, TRBJ2-7)
CSARDRVSRVDEQYF

SEQ ID NO: 339375 - protein, 15 aa, Homo sapiens
  CDR3 for alpha chain variable domain of TCR clone 169688 (TRAV3, TRAJ29)
CAVRDPLSGNTPLVF

SEQ ID NO: 339376 - protein, 16 aa, Homo sapiens
  CDR3 for beta chain variable domain of TCR clone 169688 (TRBV7-2, TRBJ2-7)
CSSLGTGTSGRYEQYF

SEQ ID NO: 339377 - protein, 16 aa, Homo sapiens
  CDR3 for alpha chain variable domain of TCR clone 169689 (TRAV17, TRAJ52)
CATGIIGGTSYGELTF

SEQ ID NO: 339378 - protein, 12 aa, Homo sapiens
  CDR3 for beta chain variable domain of TCR clone 169689 (TRBV7-3, TRBJ2-1)
CASSFINNEQFF

SEQ ID NO: 339379 - protein, 12 aa, Homo sapiens
  CDR3 for alpha chain variable domain of TCR clone 169690 (TRAV3, TRAJ20)
CAVRDGDYKLSF

SEQ ID NO: 339380 - protein, 13 aa, Homo sapiens
  CDR3 for beta chain variable domain of TCR clone 169690 (TRBV9, TRBJ2-1)
CASSLGQGGEQFF

SEQ ID NO: 339381 - protein, 16 aa, Homo sapiens
  CDR3 for alpha chain variable domain of TCR clone 169691 (TRAV3, TRAJ3)
LAVRDRAKSSASKIIF

SEQ ID NO: 339382 - protein, 16 aa, Homo sapiens
  CDR3 for beta chain variable domain of TCR clone 169691 (TRBV20-1, TRBJ2-4)
CSATSLAELAKNIQYF

SEQ ID NO: 339383 - protein, 18 aa, Homo sapiens
  CDR3 for alpha chain variable domain of TCR clone 169692 (TRAV26-2, TRAJ32)
CILRAPLNYCGATNKLIF

SEQ ID NO: 339384 - protein, 13 aa, Homo sapiens
  CDR3 for beta chain variable domain of TCR clone 169692 (TRBV7-3, TRBJ2-1)
CASSLWPYNEQFF

SEQ ID NO: 339385 - protein, 14 aa, Homo sapiens
  CDR3 for alpha chain variable domain of TCR clone 169693 (TRAV12-3, TRAJ10)
SHLHLTGGGNKLTF

SEQ ID NO: 339386 - protein, 14 aa, Homo sapiens
  CDR3 for beta chain variable domain of TCR clone 169693 (TRBV4-2, TRBJ2-1)
CASGLDRAYNEQFF

SEQ ID NO: 339387 - protein, 14 aa, Homo sapiens
  CDR3 for alpha chain variable domain of TCR clone 169694 (TRAV12-2, TRAJ13)
CAVKKTGGYQIVTF

SEQ ID NO: 339388 - protein, 14 aa, Homo sapiens
  CDR3 for beta chain variable domain of TCR clone 169694 (TRBV20-1, TRBJ1-1)
CSAQTRIGGTEAFF

SEQ ID NO: 339389 - protein, 13 aa, Homo sapiens
  CDR3 for alpha chain variable domain of TCR clone 169695 (TRAV13-1, TRAJ5)
CAAEHTGRRALTF

SEQ ID NO: 339390 - protein, 15 aa, Homo sapiens
  CDR3 for beta chain variable domain of TCR clone 169695 (TRBV6-1, TRBJ2-1)
CASSELGGQYNEQFF

SEQ ID NO: 339391 - protein, 13 aa, Homo sapiens
  CDR3 for alpha chain variable domain of TCR clone 169696 (TRAV3, TRAJ21)
CAAREPDFNKFYF

SEQ ID NO: 339392 - protein, 18 aa, Homo sapiens
  CDR3 for beta chain variable domain of TCR clone 169696 (TRBV11-2, TRBJ2-3)
CASSLGGASRGAPNTQYF

SEQ ID NO: 339393 - protein, 12 aa, Homo sapiens
  CDR3 for alpha chain variable domain of TCR clone 169697 (TRAV12-1, TRAJ32)
CVVKGATNKLTF

SEQ ID NO: 339394 - protein, 15 aa, Homo sapiens
  CDR3 for beta chain variable domain of TCR clone 169697 (TRBV20-1, TRBJ2-3)
CSASGTSGYTDTQYF

SEQ ID NO: 339395 - protein, 14 aa, Homo sapiens
  CDR3 for alpha chain variable domain of TCR clone 169698 (TRAV1-2, TRAJ16)
CAVNRFSDGQKLVF

SEQ ID NO: 339396 - protein, 17 aa, Homo sapiens
  CDR3 for beta chain variable domain of TCR clone 169698 (TRBV13, TRBJ2-3)
CASSLSRVAGGRNTQYF

SEQ ID NO: 339397 - protein, 14 aa, Homo sapiens
  CDR3 for alpha chain variable domain of TCR clone 169699 (TRAV35, TRAJ22)
FAGLRPGSARQLPF

SEQ ID NO: 339398 - protein, 15 aa, Homo sapiens
  CDR3 for beta chain variable domain of TCR clone 169699 (TRBV12-4, TRBJ2-5)
CASSPPTGLQETQYF

SEQ ID NO: 339399 - protein, 19 aa, Homo sapiens
  CDR3 for alpha chain variable domain of TCR clone 169700 (TRAV14/DV4, TRAJ53)
CISVQWGLGGGGGNYKLTF

SEQ ID NO: 339400 - protein, 14 aa, Homo sapiens
  CDR3 for beta chain variable domain of TCR clone 169700 (TRBV5-1, TRBJ2-3)
CASSRGQGGGTQYF

SEQ ID NO: 339401 - protein, 13 aa, Homo sapiens
  CDR3 for alpha chain variable domain of TCR clone 169701 (TRAV8-1, TRAJ34)
CAVRPYNTDKLIF

SEQ ID NO: 339402 - protein, 15 aa, Homo sapiens
  CDR3 for beta chain variable domain of TCR clone 169701 (TRBV7-9, TRBJ1-3)
CASSLRSGSGNTIYV

SEQ ID NO: 339403 - protein, 14 aa, Homo sapiens
  CDR3 for alpha chain variable domain of TCR clone 169702 (TRAV1-2, TRAJ8)
CAVREDTGFQKLVF

SEQ ID NO: 339404 - protein, 13 aa, Homo sapiens
  CDR3 for beta chain variable domain of TCR clone 169702 (TRBV4-1, TRBJ2-2)
CASSQENTVELFF

SEQ ID NO: 339405 - protein, 13 aa, Homo sapiens
  CDR3 for alpha chain variable domain of TCR clone 169703 (TRAV8-6, TRAJ21)
CAVSPSSLNKFYF

SEQ ID NO: 339406 - protein, 14 aa, Homo sapiens
  CDR3 for beta chain variable domain of TCR clone 169703 (TRBV7-9, TRBJ2-5)
CASSLDTAQETHYF

SEQ ID NO: 339407 - protein, 12 aa, Homo sapiens
  CDR3 for alpha chain variable domain of TCR clone 169704 (TRAV13-1, TRAJ27)
CAAHTTACKSTF

SEQ ID NO: 339408 - protein, 14 aa, Homo sapiens
  CDR3 for beta chain variable domain of TCR clone 169704 (TRBV19, TRBJ2-2)
CASSGQGIAGELFF

SEQ ID NO: 339409 - protein, 16 aa, Homo sapiens
  CDR3 for alpha chain variable domain of TCR clone 169705 (TRAV1-2, TRAJ18)
CAGRVERGSTLGRLYF

SEQ ID NO: 339410 - protein, 16 aa, Homo sapiens
  CDR3 for beta chain variable domain of TCR clone 169705 (TRBV20-1, TRBJ2-7)
CSASTSGRLSSYEQYF

SEQ ID NO: 339411 - protein, 12 aa, Homo sapiens
  CDR3 for alpha chain variable domain of TCR clone 169706 (TRAV12-3, TRAJ41)
CAMSYSGYALNF

SEQ ID NO: 339412 - protein, 14 aa, Homo sapiens
  CDR3 for beta chain variable domain of TCR clone 169706 (TRBV7-2, TRBJ1-1)
CASSFLTGTTEAFF

SEQ ID NO: 339413 - protein, 14 aa, Homo sapiens
  CDR3 for alpha chain variable domain of TCR clone 169707 (TRAV2, TRAJ3)
CAVRPYSSASKIIF

SEQ ID NO: 339414 - protein, 15 aa, Homo sapiens
  CDR3 for beta chain variable domain of TCR clone 169707 (TRBV5-1, TRBJ2-3)
CASSVTSGSTDTQYF

SEQ ID NO: 339415 - protein, 16 aa, Homo sapiens
  CDR3 for alpha chain variable domain of TCR clone 169708 (TRAV30, TRAJ24)
CGTEIVDADIWGKFQF

SEQ ID NO: 339416 - protein, 16 aa, Homo sapiens
  CDR3 for beta chain variable domain of TCR clone 169708 (TRBV28, TRBJ2-7)
CASSLFFETGGHEQYF

SEQ ID NO: 339417 - protein, 16 aa, Homo sapiens
  CDR3 for alpha chain variable domain of TCR clone 169709 (TRAV8-3, TRAJ44)
CAVGTLMTGTASILTF

SEQ ID NO: 339418 - protein, 15 aa, Homo sapiens
  CDR3 for beta chain variable domain of TCR clone 169709 (TRBV10-2, TRBJ2-6)
CASSEQGTGANVLTF

SEQ ID NO: 339419 - protein, 17 aa, Homo sapiens
  CDR3 for alpha chain variable domain of TCR clone 169710 (TRAV26-1, TRAJ53)
CIVRVDDSGGSNYKLTF

SEQ ID NO: 339420 - protein, 14 aa, Homo sapiens
  CDR3 for beta chain variable domain of TCR clone 169710 (TRBV11-3, TRBJ2-1)
CASSATTSGSIQFF

SEQ ID NO: 339421 - protein, 14 aa, Homo sapiens
  CDR3 for alpha chain variable domain of TCR clone 169711 (TRAV1-2, TRAJ8)
CAVREDTGFQKLVF

SEQ ID NO: 339422 - protein, 14 aa, Homo sapiens
  CDR3 for beta chain variable domain of TCR clone 169711 (TRBV7-9, TRBJ1-1)
CASTPLQSYTEAFS

SEQ ID NO: 339423 - protein, 13 aa, Homo sapiens
  CDR3 for alpha chain variable domain of TCR clone 169712 (TRAV27, TRAJ3)
ASLRGSSASKIIF

SEQ ID NO: 339424 - protein, 15 aa, Homo sapiens
  CDR3 for beta chain variable domain of TCR clone 169712 (TRBV28, TRBJ1-3)
CASSKGWASGNTIYF

SEQ ID NO: 339425 - protein, 17 aa, Homo sapiens
  CDR3 for alpha chain variable domain of TCR clone 169713 (TRAV4, TRAJ18)
CLVGERSVSSTLGRLYF

SEQ ID NO: 339426 - protein, 16 aa, Homo sapiens
  CDR3 for beta chain variable domain of TCR clone 169713 (TRBV4-2, TRBJ1-1)
CASSPSPGRAAPEAFF

SEQ ID NO: 339427 - protein, 11 aa, Homo sapiens
  CDR3 for alpha chain variable domain of TCR clone 169714 (TRAV27, TRAJ43)
CAGANNNDMRF

SEQ ID NO: 339428 - protein, 16 aa, Homo sapiens
  CDR3 for beta chain variable domain of TCR clone 169714 (TRBV7-2, TRBJ2-1)
CASSLRWGRENNEQFF

SEQ ID NO: 339429 - protein, 14 aa, Homo sapiens
  CDR3 for alpha chain variable domain of TCR clone 169715 (TRAV26-1, TRAJ48)
CIVRVGFGHEKLTC

SEQ ID NO: 339430 - protein, 13 aa, Homo sapiens
  CDR3 for beta chain variable domain of TCR clone 169715 (TRBV11-3, TRBJ2-3)
CASSHDTKDTQYF

SEQ ID NO: 339431 - protein, 15 aa, Homo sapiens
  CDR3 for alpha chain variable domain of TCR clone 169716 (TRAV41, TRAJ45)
CAASYSGGGSDGLPF

SEQ ID NO: 339432 - protein, 14 aa, Homo sapiens
  CDR3 for beta chain variable domain of TCR clone 169716 (TRBV12-5, TRBJ2-5)
CASGSRTHQETQYF

SEQ ID NO: 339433 - protein, 13 aa, Homo sapiens
  CDR3 for alpha chain variable domain of TCR clone 169717 (TRAV1-1, TRAJ31)
CASYLNNNARLMF

SEQ ID NO: 339434 - protein, 14 aa, Homo sapiens
  CDR3 for beta chain variable domain of TCR clone 169717 (TRBV4-1, TRBJ2-2)
CASSQAVNTGELFF

SEQ ID NO: 339435 - protein, 16 aa, Homo sapiens
  CDR3 for alpha chain variable domain of TCR clone 169718 (TRAV3, TRAJ10)
CAVRDMRAGGGNKLTF

SEQ ID NO: 339436 - protein, 18 aa, Homo sapiens
  CDR3 for beta chain variable domain of TCR clone 169718 (TRBV4-1, TRBJ1-5)
CASSQDPRGQGLNQPQHF

SEQ ID NO: 339437 - protein, 15 aa, Homo sapiens
  CDR3 for alpha chain variable domain of TCR clone 169719 (TRAV21, TRAJ3)
CAASTAVLPRKSLDQ

SEQ ID NO: 339438 - protein, 16 aa, Homo sapiens
  CDR3 for beta chain variable domain of TCR clone 169719 (TRBV19, TRBJ2-1)
CASSKAGPSSYNEQFF

SEQ ID NO: 339439 - protein, 15 aa, Homo sapiens
  CDR3 for alpha chain variable domain of TCR clone 169720 (TRAV17, TRAJ57)
CATGPSQGGSEKLVF

SEQ ID NO: 339440 - protein, 15 aa, Homo sapiens
  CDR3 for beta chain variable domain of TCR clone 169720 (TRBV7-9, TRBJ1-4)
CASSARTGGNEKPFF

SEQ ID NO: 339441 - protein, 16 aa, Homo sapiens
  CDR3 for alpha chain variable domain of TCR clone 169721 (TRAV30, TRAJ24)
CGTEIVDADSWGKFQF

SEQ ID NO: 339442 - protein, 14 aa, Homo sapiens
  CDR3 for beta chain variable domain of TCR clone 169721 (TRBV7-9, TRBJ2-1)
CASRPTGLRNEQFF

SEQ ID NO: 339443 - protein, 12 aa, Homo sapiens
  CDR3 for alpha chain variable domain of TCR clone 169722 (TRAV16, TRAJ13)
CITLRCYQKVTF

SEQ ID NO: 339444 - protein, 17 aa, Homo sapiens
  CDR3 for beta chain variable domain of TCR clone 169722 (TRBV28, TRBJ2-5)
CASSRQGGLAGAETQYF

SEQ ID NO: 339445 - protein, 14 aa, Homo sapiens
  CDR3 for alpha chain variable domain of TCR clone 169723 (TRAV9-2, TRAJ39)
CALYIYNAGHMLTF

SEQ ID NO: 339446 - protein, 17 aa, Homo sapiens
  CDR3 for beta chain variable domain of TCR clone 169723 (TRBV9, TRBJ2-3)
CASRSTAGGPSTDTQYF

SEQ ID NO: 339447 - protein, 12 aa, Homo sapiens
  CDR3 for alpha chain variable domain of TCR clone 169724 (TRAV2, TRAJ9)
CAVGAGGFNTIF

SEQ ID NO: 339448 - protein, 11 aa, Homo sapiens
  CDR3 for beta chain variable domain of TCR clone 169724 (TRBV13, TRBJ2-2)
CASSPRTGEHT

SEQ ID NO: 339449 - protein, 15 aa, Homo sapiens
  CDR3 for alpha chain variable domain of TCR clone 169725 (TRAV26-1, TRAJ17)
CIGSSFKAAGNKLTL

SEQ ID NO: 339450 - protein, 14 aa, Homo sapiens
  CDR3 for beta chain variable domain of TCR clone 169725 (TRBV6-1, TRBJ2-2)
CASTWQGNTGELFF

SEQ ID NO: 339451 - protein, 15 aa, Homo sapiens
  CDR3 for alpha chain variable domain of TCR clone 169726 (TRAV8-2, TRAJ44)
CVVSPNNGTASRLTF

SEQ ID NO: 339452 - protein, 12 aa, Homo sapiens
  CDR3 for beta chain variable domain of TCR clone 169726 (TRBV11-2, TRBJ2-2)
CAVPRNTGELFF

SEQ ID NO: 339453 - protein, 19 aa, Homo sapiens
  CDR3 for alpha chain variable domain of TCR clone 169727 (TRAV25, TRAJ20)
TATQTTDVGILPHDYKLSF

SEQ ID NO: 339454 - protein, 17 aa, Homo sapiens
  CDR3 for beta chain variable domain of TCR clone 169727 (TRBV4-3, TRBJ2-1)
CASSQFSSGRESGEQFF

SEQ ID NO: 339455 - protein, 12 aa, Homo sapiens
  CDR3 for alpha chain variable domain of TCR clone 169728 (TRAV12-3, TRAJ54)
CGADRGAQKLVF

SEQ ID NO: 339456 - protein, 15 aa, Homo sapiens
  CDR3 for beta chain variable domain of TCR clone 169728 (TRBV19, TRBJ2-7)
CASSPAGSGEALRYF

SEQ ID NO: 339457 - protein, 21 aa, Homo sapiens
  CDR3 for alpha chain variable domain of TCR clone 169729 (TRAV30, TRAJ43)
GLPAQLLRNLLPIIELNDMRF

SEQ ID NO: 339458 - protein, 14 aa, Homo sapiens
  CDR3 for beta chain variable domain of TCR clone 169729 (TRBV27, TRBJ2-1)
CARRHLGGGKEQFF

SEQ ID NO: 339459 - protein, 11 aa, Homo sapiens
  CDR3 for alpha chain variable domain of TCR clone 169730 (TRAV27, TRAJ20)
CAGLNDYKLSF

SEQ ID NO: 339460 - protein, 13 aa, Homo sapiens
  CDR3 for beta chain variable domain of TCR clone 169730 (TRBV4-1, TRBJ2-7)
CASSQGQAYEQYF

SEQ ID NO: 339461 - protein, 16 aa, Homo sapiens
  CDR3 for alpha chain variable domain of TCR clone 169731 (TRAV21, TRAJ17)
CAVRPGEEAAGNKLTF

SEQ ID NO: 339462 - protein, 16 aa, Homo sapiens
  CDR3 for beta chain variable domain of TCR clone 169731 (TRBV2, TRBJ2-7)
CASSEPWTGPSYEHYF

SEQ ID NO: 339463 - protein, 11 aa, Homo sapiens
  CDR3 for alpha chain variable domain of TCR clone 169732 (TRAV1-2, TRAJ20)
CAVANDYKLSF

SEQ ID NO: 339464 - protein, 16 aa, Homo sapiens
  CDR3 for beta chain variable domain of TCR clone 169732 (TRBV12-4, TRBJ2-3)
CASSLRLAETTDTQYF

SEQ ID NO: 339465 - protein, 14 aa, Homo sapiens
  CDR3 for alpha chain variable domain of TCR clone 169733 (TRAV12-2, TRAJ45)
CAVNKGGGADGLTF

SEQ ID NO: 339466 - protein, 18 aa, Homo sapiens
  CDR3 for beta chain variable domain of TCR clone 169733 (TRBV12-4, TRBJ2-2)
CASSLVAGTRGRTGELFF

SEQ ID NO: 339467 - protein, 13 aa, Homo sapiens
  CDR3 for alpha chain variable domain of TCR clone 169734 (TRAV12-3, TRAJ33)
FAMSVNSNYQLIW

SEQ ID NO: 339468 - protein, 11 aa, Homo sapiens
  CDR3 for beta chain variable domain of TCR clone 169734 (TRBV7-3, TRBJ2-5)
CASSLSETQYF

SEQ ID NO: 339469 - protein, 19 aa, Homo sapiens
  CDR3 for alpha chain variable domain of TCR clone 169735 (TRAV1-1, TRAJ37)
CLLLLRFERSGSNTGKLIF

SEQ ID NO: 339470 - protein, 14 aa, Homo sapiens
  CDR3 for beta chain variable domain of TCR clone 169735 (TRBV29-1, TRBJ2-2)
CSALGGVGAGELFF

SEQ ID NO: 339471 - protein, 17 aa, Homo sapiens
  CDR3 for alpha chain variable domain of TCR clone 169736 (TRAV3, TRAJ12)
CAVRDGGRMDSSYKLIF

SEQ ID NO: 339472 - protein, 14 aa, Homo sapiens
  CDR3 for beta chain variable domain of TCR clone 169736 (TRBV7-3, TRBJ2-1)
CASSLAGGTNEQFF

SEQ ID NO: 339473 - protein, 16 aa, Homo sapiens
  CDR3 for alpha chain variable domain of TCR clone 169737 (TRAV8-3, TRAJ8)
CDVPRDGNTGFQKLVF

SEQ ID NO: 339474 - protein, 14 aa, Homo sapiens
  CDR3 for beta chain variable domain of TCR clone 169737 (TRBV28, TRBJ1-1)
CASSESGRGTEAFF

SEQ ID NO: 339475 - protein, 13 aa, Homo sapiens
  CDR3 for alpha chain variable domain of TCR clone 169738 (TRAV2, TRAJ40)
CAVVTSGTYKYIF

SEQ ID NO: 339476 - protein, 16 aa, Homo sapiens
  CDR3 for beta chain variable domain of TCR clone 169738 (TRBV2, TRBJ2-1)
CASSVGGSLAYNEQFF

SEQ ID NO: 339477 - protein, 14 aa, Homo sapiens
  CDR3 for alpha chain variable domain of TCR clone 169739 (TRAV12-2, TRAJ13)
CAVKKTGGYQKVTF

SEQ ID NO: 339478 - protein, 17 aa, Homo sapiens
  CDR3 for beta chain variable domain of TCR clone 169739 (TRBV20-1, TRBJ2-2)
CSASRSGQGGLTGELFF

SEQ ID NO: 339479 - protein, 16 aa, Homo sapiens
  CDR3 for alpha chain variable domain of TCR clone 169740 (TRAV8-2, TRAJ48)
CVVSDVSNFGNEKLTF

SEQ ID NO: 339480 - protein, 14 aa, Homo sapiens
  CDR3 for beta chain variable domain of TCR clone 169740 (TRBV3-1, TRBJ2-7)
CASSQPGLLDEQYF

SEQ ID NO: 339481 - protein, 14 aa, Homo sapiens
  CDR3 for alpha chain variable domain of TCR clone 169741 (TRAV1-2, TRAJ16)
CAVNRFSDGQKLLF

SEQ ID NO: 339482 - protein, 10 aa, Homo sapiens
  CDR3 for beta chain variable domain of TCR clone 169741 (TRBV23-1, TRBJ2-7)
SAGTGLEQYF

SEQ ID NO: 339483 - protein, 12 aa, Homo sapiens
  CDR3 for alpha chain variable domain of TCR clone 169742 (TRAV1-1, TRAJ8)
CAGGTGFQKLVF

SEQ ID NO: 339484 - protein, 15 aa, Homo sapiens
  CDR3 for beta chain variable domain of TCR clone 169742 (TRBV20-1, TRBJ2-7)
CSARDRVSGMEEQYF

SEQ ID NO: 339485 - protein, 13 aa, Homo sapiens
  CDR3 for alpha chain variable domain of TCR clone 169743 (TRAV38-2/DV8, TRAJ34)
CAYRTWNTDKLIF

SEQ ID NO: 339486 - protein, 18 aa, Homo sapiens
  CDR3 for beta chain variable domain of TCR clone 169743 (TRBV6-6, TRBJ1-3)
CASSYSKWDSISGNTISL

SEQ ID NO: 339487 - protein, 12 aa, Homo sapiens
  CDR3 for alpha chain variable domain of TCR clone 169744 (TRAV26-1, TRAJ36)
CIVRVRADNLFF

SEQ ID NO: 339488 - protein, 12 aa, Homo sapiens
  CDR3 for beta chain variable domain of TCR clone 169744 (TRBV12-4, TRBJ2-1)
CASSPGRNEQFF

SEQ ID NO: 339489 - protein, 12 aa, Homo sapiens
  CDR3 for alpha chain variable domain of TCR clone 169745 (TRAV12-3, TRAJ17)
CAMTLTGNKLNF

SEQ ID NO: 339490 - protein, 10 aa, Homo sapiens
  CDR3 for beta chain variable domain of TCR clone 169745 (TRBV20-1, TRBJ2-7)
IGSGMDEQYF

SEQ ID NO: 339491 - protein, 13 aa, Homo sapiens
  CDR3 for alpha chain variable domain of TCR clone 169746 (TRAV21, TRAJ27)
CAARPGNAGKSTF

SEQ ID NO: 339492 - protein, 19 aa, Homo sapiens
  CDR3 for beta chain variable domain of TCR clone 169746 (TRBV7-9, TRBJ2-6)
CASSLESATVLPGANVLTF

SEQ ID NO: 339493 - protein, 11 aa, Homo sapiens
  CDR3 for alpha chain variable domain of TCR clone 169747 (TRAV21, TRAJ34)
CAHYNTGKLIF

SEQ ID NO: 339494 - protein, 17 aa, Homo sapiens
  CDR3 for beta chain variable domain of TCR clone 169747 (TRBV11-2, TRBJ2-1)
CASSLYPPGVEYNEQFF

SEQ ID NO: 339495 - protein, 13 aa, Homo sapiens
  CDR3 for alpha chain variable domain of TCR clone 169748 (TRAV16, TRAJ26)
CITVLCLGQNFVF

SEQ ID NO: 339496 - protein, 12 aa, Homo sapiens
  CDR3 for beta chain variable domain of TCR clone 169748 (TRBV11-2, TRBJ2-1)
CASSPGDNEQLF

SEQ ID NO: 339497 - protein, 10 aa, Homo sapiens
  CDR3 for alpha chain variable domain of TCR clone 169749 (TRAV25, TRAJ17)
CQAAGNKLTF

SEQ ID NO: 339498 - protein, 13 aa, Homo sapiens
  CDR3 for beta chain variable domain of TCR clone 169749 (TRBV6-5, TRBJ2-2)
CTSSLPGVGELFF

SEQ ID NO: 339499 - protein, 13 aa, Homo sapiens
  CDR3 for alpha chain variable domain of TCR clone 169750 (TRAV29/DV5, TRAJ31)
CAASRNNNARLVF

SEQ ID NO: 339500 - protein, 12 aa, Homo sapiens
  CDR3 for beta chain variable domain of TCR clone 169750 (TRBV11-2, TRBJ2-1)
CASSPGNNEQFF

SEQ ID NO: 339501 - protein, 14 aa, Homo sapiens
  CDR3 for alpha chain variable domain of TCR clone 169751 (TRAV8-3, TRAJ44)
CAVGLTGTASKLTF

SEQ ID NO: 339502 - protein, 12 aa, Homo sapiens
  CDR3 for beta chain variable domain of TCR clone 169751 (TRBV7-3, TRBJ2-1)
CATSLGFNEQFL

SEQ ID NO: 339503 - protein, 15 aa, Homo sapiens
  CDR3 for alpha chain variable domain of TCR clone 169752 (TRAV3, TRAJ29)
CAVRAPLSGNTPLGF

SEQ ID NO: 339504 - protein, 15 aa, Homo sapiens
  CDR3 for beta chain variable domain of TCR clone 169752 (TRBV28, TRBJ1-1)
CASRIKGGLNTEAFF

SEQ ID NO: 339505 - protein, 16 aa, Homo sapiens
  CDR3 for alpha chain variable domain of TCR clone 169753 (TRAV35, TRAJ54)
SDVGIYPLQGAQKLVF

SEQ ID NO: 339506 - protein, 16 aa, Homo sapiens
  CDR3 for beta chain variable domain of TCR clone 169753 (TRBV7-3, TRBJ2-2)
CASSLKRGTLSGELFF

SEQ ID NO: 339507 - protein, 14 aa, Homo sapiens
  CDR3 for alpha chain variable domain of TCR clone 169754 (TRAV12-2, TRAJ44)
CAVKKAGTASKLTF

SEQ ID NO: 339508 - protein, 12 aa, Homo sapiens
  CDR3 for beta chain variable domain of TCR clone 169754 (TRBV19, TRBJ1-4)
CASKDWPGGLFF

SEQ ID NO: 339509 - protein, 11 aa, Homo sapiens
  CDR3 for alpha chain variable domain of TCR clone 169755 (TRAV35, TRAJ30)
CAGLRDDKIIF

SEQ ID NO: 339510 - protein, 13 aa, Homo sapiens
  CDR3 for beta chain variable domain of TCR clone 169755 (TRBV7-9, TRBJ2-3)
CASSPGSTDTQYF

SEQ ID NO: 339511 - protein, 16 aa, Homo sapiens
  CDR3 for alpha chain variable domain of TCR clone 169756 (TRAV30, TRAJ24)
CGTGIVDADGWGKFQF

SEQ ID NO: 339512 - protein, 14 aa, Homo sapiens
  CDR3 for beta chain variable domain of TCR clone 169756 (TRBV12-5, TRBJ2-5)
CASGSRTHQETQYF

SEQ ID NO: 339513 - protein, 15 aa, Homo sapiens
  CDR3 for alpha chain variable domain of TCR clone 169757 (TRAV12-3, TRAJ49)
CAMAVTPNTGNQFYF

SEQ ID NO: 339514 - protein, 15 aa, Homo sapiens
  CDR3 for beta chain variable domain of TCR clone 169757 (TRBV9, TRBJ1-6)
CASSVAGTGDSPLHF

SEQ ID NO: 339515 - protein, 13 aa, Homo sapiens
  CDR3 for alpha chain variable domain of TCR clone 169758 (TRAV8-3, TRAJ21)
CAVGAYNFNKFYF

SEQ ID NO: 339516 - protein, 13 aa, Homo sapiens
  CDR3 for beta chain variable domain of TCR clone 169758 (TRBV2, TRBJ2-7)
CASSRDRAYEQYF

SEQ ID NO: 339517 - protein, 13 aa, Homo sapiens
  CDR3 for alpha chain variable domain of TCR clone 169759 (TRAV36/DV7, TRAJ53)
CALSGGSNYKLTF

SEQ ID NO: 339518 - protein, 13 aa, Homo sapiens
  CDR3 for beta chain variable domain of TCR clone 169759 (TRBV7-3, TRBJ2-5)
CASSFRGGETQYF

SEQ ID NO: 339519 - protein, 14 aa, Homo sapiens
  CDR3 for alpha chain variable domain of TCR clone 169760 (TRAV1-2, TRAJ8)
CAVREDTGFEKLVF

SEQ ID NO: 339520 - protein, 18 aa, Homo sapiens
  CDR3 for beta chain variable domain of TCR clone 169760 (TRBV6-6, TRBJ1-3)
CASSYSKWDSISGNTIYF

SEQ ID NO: 339521 - protein, 14 aa, Homo sapiens
  CDR3 for alpha chain variable domain of TCR clone 169761 (TRAV12-2, TRAJ13)
CAVKKTGGYQKVTF

SEQ ID NO: 339522 - protein, 16 aa, Homo sapiens
  CDR3 for beta chain variable domain of TCR clone 169761 (TRBV12-4, TRBJ2-1)
CASSAVGQGNGDEQFF

SEQ ID NO: 339523 - protein, 12 aa, Homo sapiens
  CDR3 for alpha chain variable domain of TCR clone 169762 (TRAV12-2, TRAJ47)
CAVAEYGNKLVF

SEQ ID NO: 339524 - protein, 14 aa, Homo sapiens
  CDR3 for beta chain variable domain of TCR clone 169762 (TRBV12-5, TRBJ2-5)
CASGSRTHQETQYF

SEQ ID NO: 339525 - protein, 14 aa, Homo sapiens
  CDR3 for alpha chain variable domain of TCR clone 169763 (TRAV4, TRAJ17)
CLVGDMAAGNNLTF

SEQ ID NO: 339526 - protein, 14 aa, Homo sapiens
  CDR3 for beta chain variable domain of TCR clone 169763 (TRBV4-1, TRBJ2-7)
CASSPVAGGDEQYF

SEQ ID NO: 339527 - protein, 12 aa, Homo sapiens
  CDR3 for alpha chain variable domain of TCR clone 169764 (TRAV24, TRAJ37)
CASSSKTGKLIF

SEQ ID NO: 339528 - protein, 16 aa, Homo sapiens
  CDR3 for beta chain variable domain of TCR clone 169764 (TRBV19, TRBJ1-1)
CASRFGGPVTGTEAFF

SEQ ID NO: 339529 - protein, 13 aa, Homo sapiens
  CDR3 for alpha chain variable domain of TCR clone 169765 (TRAV35, TRAJ21)
CAGQLSNFNKFYL

SEQ ID NO: 339530 - protein, 11 aa, Homo sapiens
  CDR3 for beta chain variable domain of TCR clone 169765 (TRBV7-6, TRBJ2-5)
CASSSQETQYL

SEQ ID NO: 339531 - protein, 14 aa, Homo sapiens
  CDR3 for alpha chain variable domain of TCR clone 169766 (TRAV21, TRAJ32)
CCGDYGGATNKLIF

SEQ ID NO: 339532 - protein, 13 aa, Homo sapiens
  CDR3 for beta chain variable domain of TCR clone 169766 (TRBV2, TRBJ1-6)
CASGRGGISPLHV

SEQ ID NO: 339533 - protein, 13 aa, Homo sapiens
  CDR3 for alpha chain variable domain of TCR clone 169767 (TRAV27, TRAJ39)
CAGDTPAGNMLTF

SEQ ID NO: 339534 - protein, 15 aa, Homo sapiens
  CDR3 for beta chain variable domain of TCR clone 169767 (TRBV20-1, TRBJ2-7)
CSARGPLAGGREQYF

SEQ ID NO: 339535 - protein, 12 aa, Homo sapiens
  CDR3 for alpha chain variable domain of TCR clone 169768 (TRAV8-3, TRAJ20)
CAVDFNDYKLRF

SEQ ID NO: 339536 - protein, 12 aa, Homo sapiens
  CDR3 for beta chain variable domain of TCR clone 169768 (TRBV29-1, TRBJ2-3)
CSVTGGADTQYF

SEQ ID NO: 339537 - protein, 14 aa, Homo sapiens
  CDR3 for alpha chain variable domain of TCR clone 169769 (TRAV9-2, TRAJ39)
CVLYIYNAGNMLTF

SEQ ID NO: 339538 - protein, 15 aa, Homo sapiens
  CDR3 for beta chain variable domain of TCR clone 169769 (TRBV19, TRBJ2-4)
CASRGPRRGENIQYF

SEQ ID NO: 339539 - protein, 14 aa, Homo sapiens
  CDR3 for alpha chain variable domain of TCR clone 169770 (TRAV26-1, TRAJ45)
CIEVTGGGADGLTF

SEQ ID NO: 339540 - protein, 12 aa, Homo sapiens
  CDR3 for beta chain variable domain of TCR clone 169770 (TRBV12-4, TRBJ2-7)
CASSLGGYEQYL

SEQ ID NO: 339541 - protein, 11 aa, Homo sapiens
  CDR3 for alpha chain variable domain of TCR clone 169771 (TRAV12-3, TRAJ27)
CAMANAGKSTF

SEQ ID NO: 339542 - protein, 15 aa, Homo sapiens
  CDR3 for beta chain variable domain of TCR clone 169771 (TRBV19, TRBJ2-1)
CASSMGSSSYNEQFF

SEQ ID NO: 339543 - protein, 12 aa, Homo sapiens
  CDR3 for alpha chain variable domain of TCR clone 169772 (TRAV13-2, TRAJ23)
CAERHRGGKLIF

SEQ ID NO: 339544 - protein, 17 aa, Homo sapiens
  CDR3 for beta chain variable domain of TCR clone 169772 (TRBV7-3, TRBJ2-5)
CASSLGSGRSGSETQYF

SEQ ID NO: 339545 - protein, 15 aa, Homo sapiens
  CDR3 for alpha chain variable domain of TCR clone 169773 (TRAV20, TRAJ24)
CAVQAAPDSWGKFQF

SEQ ID NO: 339546 - protein, 14 aa, Homo sapiens
  CDR3 for beta chain variable domain of TCR clone 169773 (TRBV5-1, TRBJ2-3)
CASSLFGPTDTQYF

SEQ ID NO: 339547 - protein, 15 aa, Homo sapiens
  CDR3 for alpha chain variable domain of TCR clone 169774 (TRAV12-1, TRAJ41)
CVVNGASNSGYALNF

SEQ ID NO: 339548 - protein, 15 aa, Homo sapiens
  CDR3 for beta chain variable domain of TCR clone 169774 (TRBV7-2, TRBJ1-5)
YASSSTGVDNQPQHF

SEQ ID NO: 339549 - protein, 14 aa, Homo sapiens
  CDR3 for alpha chain variable domain of TCR clone 169775 (TRAV1-2, TRAJ8)
CAVREDTGFQQLVF

SEQ ID NO: 339550 - protein, 15 aa, Homo sapiens
  CDR3 for beta chain variable domain of TCR clone 169775 (TRBV7-3, TRBJ2-2)
CASSETGQGTGELSF

SEQ ID NO: 339551 - protein, 15 aa, Homo sapiens
  CDR3 for alpha chain variable domain of TCR clone 169776 (TRAV8-4, TRAJ8)
CAVSDLNTGFQKLVF

SEQ ID NO: 339552 - protein, 14 aa, Homo sapiens
  CDR3 for beta chain variable domain of TCR clone 169776 (TRBV12-5, TRBJ2-5)
CASGSRTHQETQYF

SEQ ID NO: 339553 - protein, 15 aa, Homo sapiens
  CDR3 for alpha chain variable domain of TCR clone 169777 (TRAV3, TRAJ7)
CAVRDKTMGTTDSLL

SEQ ID NO: 339554 - protein, 19 aa, Homo sapiens
  CDR3 for beta chain variable domain of TCR clone 169777 (TRBV5-8, TRBJ2-3)
CASSFLGTSGSHRTDTQYF

SEQ ID NO: 339555 - protein, 15 aa, Homo sapiens
  CDR3 for alpha chain variable domain of TCR clone 169778 (TRAV8-3, TRAJ15)
CAVGAPNQAGTALIF

SEQ ID NO: 339556 - protein, 14 aa, Homo sapiens
  CDR3 for beta chain variable domain of TCR clone 169778 (TRBV20-1, TRBJ2-1)
CSPNAEASYNEQFF

SEQ ID NO: 339557 - protein, 13 aa, Homo sapiens
  CDR3 for alpha chain variable domain of TCR clone 169779 (TRAV9-2, TRAJ58)
CSATGTSGSRLTF

SEQ ID NO: 339558 - protein, 13 aa, Homo sapiens
  CDR3 for beta chain variable domain of TCR clone 169779 (TRBV7-9, TRBJ1-2)
CASSLKQNYGYTF

SEQ ID NO: 339559 - protein, 18 aa, Homo sapiens
  CDR3 for alpha chain variable domain of TCR clone 169780 (TRAV26-1, TRAJ52)
CIVRVAGAGGTSYGKLTF

SEQ ID NO: 339560 - protein, 13 aa, Homo sapiens
  CDR3 for beta chain variable domain of TCR clone 169780 (TRBV7-8, TRBJ1-2)
CASSAQSYYGYPF

SEQ ID NO: 339561 - protein, 15 aa, Homo sapiens
  CDR3 for alpha chain variable domain of TCR clone 169781 (TRAV27, TRAJ38)
FAGRFNAGNNRKLIW

SEQ ID NO: 339562 - protein, 13 aa, Homo sapiens
  CDR3 for beta chain variable domain of TCR clone 169781 (TRBV12-5, TRBJ2-3)
CASQNRGTDTQYF

SEQ ID NO: 339563 - protein, 16 aa, Homo sapiens
  CDR3 for alpha chain variable domain of TCR clone 169782 (TRAV21, TRAJ37)
CAVRPRGSSNTGKLIF

SEQ ID NO: 339564 - protein, 14 aa, Homo sapiens
  CDR3 for beta chain variable domain of TCR clone 169782 (TRBV19, TRBJ2-1)
CASPTLVLSGEQFF

SEQ ID NO: 339565 - protein, 15 aa, Homo sapiens
  CDR3 for alpha chain variable domain of TCR clone 169783 (TRAV17, TRAJ45)
CATAYSGGGADGLTF

SEQ ID NO: 339566 - protein, 13 aa, Homo sapiens
  CDR3 for beta chain variable domain of TCR clone 169783 (TRBV7-9, TRBJ1-2)
CASSLKQNYGYTF

SEQ ID NO: 339567 - protein, 14 aa, Homo sapiens
  CDR3 for alpha chain variable domain of TCR clone 169784 (TRAV4, TRAJ10)
CTTASCKGGNKLTF

SEQ ID NO: 339568 - protein, 16 aa, Homo sapiens
  CDR3 for beta chain variable domain of TCR clone 169784 (TRBV6-1, TRBJ2-1)
CASILRQGSSYNGQFF

SEQ ID NO: 339569 - protein, 15 aa, Homo sapiens
  CDR3 for alpha chain variable domain of TCR clone 169785 (TRAV12-2, TRAJ28)
CRDPHSGAGSYQLTF

SEQ ID NO: 339570 - protein, 13 aa, Homo sapiens
  CDR3 for beta chain variable domain of TCR clone 169785 (TRBV7-9, TRBJ1-2)
CASSLKQNYGYTF

SEQ ID NO: 339571 - protein, 14 aa, Homo sapiens
  CDR3 for alpha chain variable domain of TCR clone 169786 (TRAV13-2, TRAJ43)
CAEIPTYNNNDMRF

SEQ ID NO: 339572 - protein, 15 aa, Homo sapiens
  CDR3 for beta chain variable domain of TCR clone 169786 (TRBV7-9, TRBJ2-2)
CASVPLDTFPGELFF

SEQ ID NO: 339573 - protein, 15 aa, Homo sapiens
  CDR3 for alpha chain variable domain of TCR clone 169787 (TRAV16, TRAJ4)
CALDDPSGGYNKLIF

SEQ ID NO: 339574 - protein, 13 aa, Homo sapiens
  CDR3 for beta chain variable domain of TCR clone 169787 (TRBV7-3, TRBJ2-7)
CASSQAGGYEQYF

SEQ ID NO: 339575 - protein, 14 aa, Homo sapiens
  CDR3 for alpha chain variable domain of TCR clone 169788 (TRAV3, TRAJ6)
CAVRDWGGSYMPTF

SEQ ID NO: 339576 - protein, 15 aa, Homo sapiens
  CDR3 for beta chain variable domain of TCR clone 169788 (TRBV5-1, TRBJ2-1)
CASSPPRAPYNEQFF

SEQ ID NO: 339577 - protein, 14 aa, Homo sapiens
  CDR3 for alpha chain variable domain of TCR clone 169789 (TRAV16, TRAJ33)
CALSAMDSNYQLIW

SEQ ID NO: 339578 - protein, 12 aa, Homo sapiens
  CDR3 for beta chain variable domain of TCR clone 169789 (TRBV5-1, TRBJ1-2)
CASSQDTYGETF

SEQ ID NO: 339579 - protein, 15 aa, Homo sapiens
  CDR3 for alpha chain variable domain of TCR clone 169790 (TRAV3, TRAJ3)
CAVRDVSSSASKIIF

SEQ ID NO: 339580 - protein, 14 aa, Homo sapiens
  CDR3 for beta chain variable domain of TCR clone 169790 (TRBV19, TRBJ2-1)
CASPTFVLSGEQFF

SEQ ID NO: 339581 - protein, 15 aa, Homo sapiens
  CDR3 for alpha chain variable domain of TCR clone 169791 (TRAV8-3, TRAJ45)
CASSYSGGGADGLTF

SEQ ID NO: 339582 - protein, 13 aa, Homo sapiens
  CDR3 for beta chain variable domain of TCR clone 169791 (TRBV4-1, TRBJ1-1)
CASSRKMNTEAFF

SEQ ID NO: 339583 - protein, 15 aa, Homo sapiens
  CDR3 for alpha chain variable domain of TCR clone 169792 (TRAV25, TRAJ52)
CAGRPGGTSYGKLTF

SEQ ID NO: 339584 - protein, 17 aa, Homo sapiens
  CDR3 for beta chain variable domain of TCR clone 169792 (TRBV7-8, TRBJ2-6)
CASSAGTGGAGAYVLTF

SEQ ID NO: 339585 - protein, 15 aa, Homo sapiens
  CDR3 for alpha chain variable domain of TCR clone 169793 (TRAV4, TRAJ8)
CLVGEQHTGFQKLVF

SEQ ID NO: 339586 - protein, 15 aa, Homo sapiens
  CDR3 for beta chain variable domain of TCR clone 169793 (TRBV7-9, TRBJ2-5)
CASSNRDYLKETQYF

SEQ ID NO: 339587 - protein, 12 aa, Homo sapiens
  CDR3 for alpha chain variable domain of TCR clone 169794 (TRAV8-3, TRAJ7)
CAVEGGNNSLAF

SEQ ID NO: 339588 - protein, 15 aa, Homo sapiens
  CDR3 for beta chain variable domain of TCR clone 169794 (TRBV10-3, TRBJ2-1)
CAISDVQDRAYEQFF

SEQ ID NO: 339589 - protein, 15 aa, Homo sapiens
  CDR3 for alpha chain variable domain of TCR clone 169795 (TRAV38-1, TRAJ37)
CAFIHGSGNTGKLIF

SEQ ID NO: 339590 - protein, 12 aa, Homo sapiens
  CDR3 for beta chain variable domain of TCR clone 169795 (TRBV7-9, TRBJ2-7)
CASSFGSYEQYS

SEQ ID NO: 339591 - protein, 15 aa, Homo sapiens
  CDR3 for alpha chain variable domain of TCR clone 169796 (TRAV2, TRAJ9)
CAVAALNTGGFKNIF

SEQ ID NO: 339592 - protein, 17 aa, Homo sapiens
  CDR3 for beta chain variable domain of TCR clone 169796 (TRBV28, TRBJ2-5)
CASSRQGGLAGAETQYF

SEQ ID NO: 339593 - protein, 14 aa, Homo sapiens
  CDR3 for alpha chain variable domain of TCR clone 169797 (TRAV13-1, TRAJ35)
CSASKGGFGNVLHC

SEQ ID NO: 339594 - protein, 18 aa, Homo sapiens
  CDR3 for beta chain variable domain of TCR clone 169797 (TRBV12-4, TRBJ2-5)
CASSSGGGRDPVLRARHA

SEQ ID NO: 339595 - protein, 14 aa, Homo sapiens
  CDR3 for alpha chain variable domain of TCR clone 169798 (TRAV13-1, TRAJ44)
CAAKATGTASKLTF

SEQ ID NO: 339596 - protein, 12 aa, Homo sapiens
  CDR3 for beta chain variable domain of TCR clone 169798 (TRBV20-1, TRBJ2-1)
CSAQYTYNEQFF

SEQ ID NO: 339597 - protein, 12 aa, Homo sapiens
  CDR3 for alpha chain variable domain of TCR clone 169799 (TRAV8-3, TRAJ26)
CAGDNYGQNFLF

SEQ ID NO: 339598 - protein, 13 aa, Homo sapiens
  CDR3 for beta chain variable domain of TCR clone 169799 (TRBV10-3, TRBJ2-7)
CASKLAVNYEQYF

SEQ ID NO: 339599 - protein, 19 aa, Homo sapiens
  CDR3 for alpha chain variable domain of TCR clone 169800 (TRAV21, TRAJ45)
CAVEAPRGDQEEGLTDYPF

SEQ ID NO: 339600 - protein, 12 aa, Homo sapiens
  CDR3 for beta chain variable domain of TCR clone 169800 (TRBV29-1, TRBJ1-3)
CSTRDSGNTIYF

SEQ ID NO: 339601 - protein, 13 aa, Homo sapiens
  CDR3 for alpha chain variable domain of TCR clone 169801 (TRAV27, TRAJ8)
CAGGHTGFQKLVF

SEQ ID NO: 339602 - protein, 20 aa, Homo sapiens
  CDR3 for beta chain variable domain of TCR clone 169801 (TRBV28, TRBJ2-1)
CASTPIGRSPGLAGGNEQFF

SEQ ID NO: 339603 - protein, 16 aa, Homo sapiens
  CDR3 for alpha chain variable domain of TCR clone 169802 (TRAV12-2, TRAJ6)
CAAPLAGAGGSYIPTF

SEQ ID NO: 339604 - protein, 13 aa, Homo sapiens
  CDR3 for beta chain variable domain of TCR clone 169802 (TRBV6-9, TRBJ2-5)
CASKGDGRRTQYF

SEQ ID NO: 339605 - protein, 15 aa, Homo sapiens
  CDR3 for alpha chain variable domain of TCR clone 169803 (TRAV26-1, TRAJ44)
CIARVPFDTASKLTF

SEQ ID NO: 339606 - protein, 15 aa, Homo sapiens
  CDR3 for beta chain variable domain of TCR clone 169803 (TRBV20-1, TRBJ1-1)
CSASRGVTGNTEAFF

SEQ ID NO: 339607 - protein, 13 aa, Homo sapiens
  CDR3 for alpha chain variable domain of TCR clone 169804 (TRAV12-2, TRAJ18)
CAVRGSTLGRLYF

SEQ ID NO: 339608 - protein, 14 aa, Homo sapiens
  CDR3 for beta chain variable domain of TCR clone 169804 (TRBV11-3, TRBJ2-1)
CASSATTSGSSQFF

SEQ ID NO: 339609 - protein, 23 aa, Homo sapiens
  CDR3 for alpha chain variable domain of TCR clone 169805 (TRAV8-3, TRAJ38)
CVVGASNAGNNHIQNPDPAVYQL

SEQ ID NO: 339610 - protein, 15 aa, Homo sapiens
  CDR3 for beta chain variable domain of TCR clone 169805 (TRBV11-3, TRBJ1-3)
CASSLFGPSGDTIYF

SEQ ID NO: 339611 - protein, 15 aa, Homo sapiens
  CDR3 for alpha chain variable domain of TCR clone 169806 (TRAV14/DV4, TRAJ48)
CAMREGNAGNDKLTF

SEQ ID NO: 339612 - protein, 14 aa, Homo sapiens
  CDR3 for beta chain variable domain of TCR clone 169806 (TRBV28, TRBJ1-5)
CASSGQALYQPQHF

SEQ ID NO: 339613 - protein, 15 aa, Homo sapiens
  CDR3 for alpha chain variable domain of TCR clone 169807 (TRAV3, TRAJ20)
CAVRDIKLSDYKLSF

SEQ ID NO: 339614 - protein, 14 aa, Homo sapiens
  CDR3 for beta chain variable domain of TCR clone 169807 (TRBV12-4, TRBJ1-6)
CASNLQGKGSPLHF

SEQ ID NO: 339615 - protein, 13 aa, Homo sapiens
  CDR3 for alpha chain variable domain of TCR clone 169808 (TRAV26-1, TRAJ34)
CMVRGHNTDKLIF

SEQ ID NO: 339616 - protein, 15 aa, Homo sapiens
  CDR3 for beta chain variable domain of TCR clone 169808 (TRBV4-1, TRBJ2-7)
CASSQEWGPSYEQYF

SEQ ID NO: 339617 - protein, 14 aa, Homo sapiens
  CDR3 for alpha chain variable domain of TCR clone 169809 (TRAV12-2, TRAJ17)
CAVLFKAAGNKLTF

SEQ ID NO: 339618 - protein, 14 aa, Homo sapiens
  CDR3 for beta chain variable domain of TCR clone 169809 (TRBV12-5, TRBJ2-5)
CASGSRTHQETQYF

SEQ ID NO: 339619 - protein, 13 aa, Homo sapiens
  CDR3 for alpha chain variable domain of TCR clone 169810 (TRAV30, TRAJ6)
CGFIEGGSYIPTF

SEQ ID NO: 339620 - protein, 12 aa, Homo sapiens
  CDR3 for beta chain variable domain of TCR clone 169810 (TRBV7-3, TRBJ1-2)
RASSKKGVPVTF

SEQ ID NO: 339621 - protein, 12 aa, Homo sapiens
  CDR3 for alpha chain variable domain of TCR clone 169811 (TRAV21, TRAJ37)
CAVRGNTGKLIF

SEQ ID NO: 339622 - protein, 16 aa, Homo sapiens
  CDR3 for beta chain variable domain of TCR clone 169811 (TRBV5-1, TRBJ1-1)
CASSSGGNSLNTEAFF

SEQ ID NO: 339623 - protein, 13 aa, Homo sapiens
  CDR3 for alpha chain variable domain of TCR clone 169812 (TRAV17, TRAJ5)
CALRGTGRRALTF

SEQ ID NO: 339624 - protein, 12 aa, Homo sapiens
  CDR3 for beta chain variable domain of TCR clone 169812 (TRBV6-3, TRBJ2-7)
CASSLTPYEQYF

SEQ ID NO: 339625 - protein, 12 aa, Homo sapiens
  CDR3 for alpha chain variable domain of TCR clone 169813 (TRAV12-3, TRAJ17)
CAMTLTGHKLTF

SEQ ID NO: 339626 - protein, 15 aa, Homo sapiens
  CDR3 for beta chain variable domain of TCR clone 169813 (TRBV19, TRBJ2-1)
CASSILGEGRNEQFF

SEQ ID NO: 339627 - protein, 11 aa, Homo sapiens
  CDR3 for alpha chain variable domain of TCR clone 169814 (TRAV21, TRAJ34)
CAHYNTDKLIF

SEQ ID NO: 339628 - protein, 13 aa, Homo sapiens
  CDR3 for beta chain variable domain of TCR clone 169814 (TRBV7-6, TRBJ1-2)
CASSLVADYGYTL

SEQ ID NO: 339629 - protein, 14 aa, Homo sapiens
  CDR3 for alpha chain variable domain of TCR clone 169815 (TRAV8-3, TRAJ36)
CAAVGNNGANNLFF

SEQ ID NO: 339630 - protein, 14 aa, Homo sapiens
  CDR3 for beta chain variable domain of TCR clone 169815 (TRBV18, TRBJ2-7)
CASSPRGGAYEQYF

SEQ ID NO: 339631 - protein, 15 aa, Homo sapiens
  CDR3 for alpha chain variable domain of TCR clone 169816 (TRAV3, TRAJ17)
CAVRDTVAAGNKLTF

SEQ ID NO: 339632 - protein, 16 aa, Homo sapiens
  CDR3 for beta chain variable domain of TCR clone 169816 (TRBV7-3, TRBJ2-2)
CASSLKRGTLSGELFF

SEQ ID NO: 339633 - protein, 13 aa, Homo sapiens
  CDR3 for alpha chain variable domain of TCR clone 169817 (TRAV35, TRAJ42)
CAGFPVSQGNLIF

SEQ ID NO: 339634 - protein, 14 aa, Homo sapiens
  CDR3 for beta chain variable domain of TCR clone 169817 (TRBV19, TRBJ2-1)
CASPTFVLSGEQFF

SEQ ID NO: 339635 - protein, 15 aa, Homo sapiens
  CDR3 for alpha chain variable domain of TCR clone 169818 (TRAV2, TRAJ9)
CAVEDRGTGGFKTIF

SEQ ID NO: 339636 - protein, 14 aa, Homo sapiens
  CDR3 for beta chain variable domain of TCR clone 169818 (TRBV5-1, TRBJ1-4)
CASSSGQGGEKLFF

SEQ ID NO: 339637 - protein, 13 aa, Homo sapiens
  CDR3 for alpha chain variable domain of TCR clone 169819 (TRAV12-1, TRAJ39)
CVARSGAGNMLTF

SEQ ID NO: 339638 - protein, 16 aa, Homo sapiens
  CDR3 for beta chain variable domain of TCR clone 169819 (TRBV12-5, TRBJ2-5)
CASGPRTSGNQETQYF

SEQ ID NO: 339639 - protein, 13 aa, Homo sapiens
  CDR3 for alpha chain variable domain of TCR clone 169820 (TRAV29/DV5, TRAJ31)
FAASRNNNARLMF

SEQ ID NO: 339640 - protein, 20 aa, Homo sapiens
  CDR3 for beta chain variable domain of TCR clone 169820 (TRBV19, TRBJ2-1)
CASSISRTVTSTRLNNEQFF

SEQ ID NO: 339641 - protein, 11 aa, Homo sapiens
  CDR3 for alpha chain variable domain of TCR clone 169821 (TRAV2, TRAJ13)
CASGGYQKVTF

SEQ ID NO: 339642 - protein, 16 aa, Homo sapiens
  CDR3 for beta chain variable domain of TCR clone 169821 (TRBV13, TRBJ2-2)
CASSEVFGANTGELFF

SEQ ID NO: 339643 - protein, 15 aa, Homo sapiens
  CDR3 for alpha chain variable domain of TCR clone 169822 (TRAV35, TRAJ52)
CAELAGGTSYGKLTS

SEQ ID NO: 339644 - protein, 15 aa, Homo sapiens
  CDR3 for beta chain variable domain of TCR clone 169822 (TRBV11-3, TRBJ2-3)
CASSLLATYTDTQYF

SEQ ID NO: 339645 - protein, 14 aa, Homo sapiens
  CDR3 for alpha chain variable domain of TCR clone 169823 (TRAV8-3, TRAJ4)
GAVGAAGGYNKLIF

SEQ ID NO: 339646 - protein, 18 aa, Homo sapiens
  CDR3 for beta chain variable domain of TCR clone 169823 (TRBV6-5, TRBJ1-1)
CASSYSAPGGTGGTEAFF

SEQ ID NO: 339647 - protein, 14 aa, Homo sapiens
  CDR3 for alpha chain variable domain of TCR clone 169824 (TRAV2, TRAJ3)
CAVRPYSSASKIIF

SEQ ID NO: 339648 - protein, 17 aa, Homo sapiens
  CDR3 for beta chain variable domain of TCR clone 169824 (TRBV7-6, TRBJ2-5)
CASSSPQAGDPSDTQYF

SEQ ID NO: 339649 - protein, 15 aa, Homo sapiens
  CDR3 for alpha chain variable domain of TCR clone 169825 (TRAV2, TRAJ15)
CAVEDRGQAGTALTF

SEQ ID NO: 339650 - protein, 14 aa, Homo sapiens
  CDR3 for beta chain variable domain of TCR clone 169825 (TRBV7-7, TRBJ2-2)
CASSRDRSTGELFF

SEQ ID NO: 339651 - protein, 13 aa, Homo sapiens
  CDR3 for alpha chain variable domain of TCR clone 169826 (TRAV13-1, TRAJ5)
CAASDTGRRALTF

SEQ ID NO: 339652 - protein, 18 aa, Homo sapiens
  CDR3 for beta chain variable domain of TCR clone 169826 (TRBV11-2, TRBJ2-3)
CASSLGGASRGAPNTQYF

SEQ ID NO: 339653 - protein, 17 aa, Homo sapiens
  CDR3 for alpha chain variable domain of TCR clone 169827 (TRAV26-1, TRAJ53)
CIVRVDYSGGSNYKLTF

SEQ ID NO: 339654 - protein, 15 aa, Homo sapiens
  CDR3 for beta chain variable domain of TCR clone 169827 (TRBV7-9, TRBJ1-4)
CASSRTGGFNEKLFF

SEQ ID NO: 339655 - protein, 10 aa, Homo sapiens
  CDR3 for alpha chain variable domain of TCR clone 169828 (TRAV4, TRAJ33)
TLDSNYQLIW

SEQ ID NO: 339656 - protein, 14 aa, Homo sapiens
  CDR3 for beta chain variable domain of TCR clone 169828 (TRBV25-1, TRBJ1-1)
CASTHLGGNTEAFF

SEQ ID NO: 339657 - protein, 17 aa, Homo sapiens
  CDR3 for alpha chain variable domain of TCR clone 169829 (TRAV3, TRAJ6)
CAVRDGPRAGGSYIPTF

SEQ ID NO: 339658 - protein, 16 aa, Homo sapiens
  CDR3 for beta chain variable domain of TCR clone 169829 (TRBV25-1, TRBJ1-1)
CASSGDRDRGRIEAFF

SEQ ID NO: 339659 - protein, 14 aa, Homo sapiens
  CDR3 for alpha chain variable domain of TCR clone 169830 (TRAV12-1, TRAJ3)
CVVNPVSSASKIIF

SEQ ID NO: 339660 - protein, 15 aa, Homo sapiens
  CDR3 for beta chain variable domain of TCR clone 169830 (TRBV5-7, TRBJ1-2)
CAGSSPGQGNYGYTF

SEQ ID NO: 339661 - protein, 12 aa, Homo sapiens
  CDR3 for alpha chain variable domain of TCR clone 169831 (TRAV13-1, TRAJ11)
CAGPSVYSTLTF

SEQ ID NO: 339662 - protein, 13 aa, Homo sapiens
  CDR3 for beta chain variable domain of TCR clone 169831 (TRBV12-4, TRBJ2-1)
CASSLSPSNEQFF

SEQ ID NO: 339663 - protein, 13 aa, Homo sapiens
  CDR3 for alpha chain variable domain of TCR clone 169832 (TRAV12-1, TRAJ34)
CVVTGYNTDKLIF

SEQ ID NO: 339664 - protein, 13 aa, Homo sapiens
  CDR3 for beta chain variable domain of TCR clone 169832 (TRBV12-5, TRBJ2-3)
CASGDRQSDTQYF

SEQ ID NO: 339665 - protein, 12 aa, Homo sapiens
  CDR3 for alpha chain variable domain of TCR clone 169833 (TRAV2, TRAJ37)
CAVTMNTGKLIF

SEQ ID NO: 339666 - protein, 13 aa, Homo sapiens
  CDR3 for beta chain variable domain of TCR clone 169833 (TRBV18, TRBJ2-5)
CASSLQGQETQYF

SEQ ID NO: 339667 - protein, 14 aa, Homo sapiens
  CDR3 for alpha chain variable domain of TCR clone 169834 (TRAV16, TRAJ32)
CALKSGGATNRLTF

SEQ ID NO: 339668 - protein, 13 aa, Homo sapiens
  CDR3 for beta chain variable domain of TCR clone 169834 (TRBV15, TRBJ1-6)
CATSGGLNSPLHF

SEQ ID NO: 339669 - protein, 17 aa, Homo sapiens
  CDR3 for alpha chain variable domain of TCR clone 169835 (TRAV26-2, TRAJ52)
CVLSSSSGGTSYGKLTF

SEQ ID NO: 339670 - protein, 11 aa, Homo sapiens
  CDR3 for beta chain variable domain of TCR clone 169835 (TRBV19, TRBJ1-1)
CATLRNTEAFF

SEQ ID NO: 339671 - protein, 15 aa, Homo sapiens
  CDR3 for alpha chain variable domain of TCR clone 169836 (TRAV3, TRAJ4)
CAARDGTGGYNKLIF

SEQ ID NO: 339672 - protein, 13 aa, Homo sapiens
  CDR3 for beta chain variable domain of TCR clone 169836 (TRBV10-3, TRBJ2-7)
CASKLAVNYEQYF

SEQ ID NO: 339673 - protein, 13 aa, Homo sapiens
  CDR3 for alpha chain variable domain of TCR clone 169837 (TRAV36/DV7, TRAJ38)
CVANAGNNRKLIW

SEQ ID NO: 339674 - protein, 14 aa, Homo sapiens
  CDR3 for beta chain variable domain of TCR clone 169837 (TRBV7-2, TRBJ2-7)
CASCLRWEVNEQYF

SEQ ID NO: 339675 - protein, 17 aa, Homo sapiens
  CDR3 for alpha chain variable domain of TCR clone 169838 (TRAV3, TRAJ42)
CAVRDRDYGGSQGNLIF

SEQ ID NO: 339676 - protein, 12 aa, Homo sapiens
  CDR3 for beta chain variable domain of TCR clone 169838 (TRBV11-2, TRBJ2-7)
CASSLPTYEQYF

SEQ ID NO: 339677 - protein, 15 aa, Homo sapiens
  CDR3 for alpha chain variable domain of TCR clone 169839 (TRAV17, TRAJ56)
GATEPFTGANSKLTF

SEQ ID NO: 339678 - protein, 14 aa, Homo sapiens
  CDR3 for beta chain variable domain of TCR clone 169839 (TRBV19, TRBJ2-1)
CASPTFVLSGEQFF

SEQ ID NO: 339679 - protein, 14 aa, Homo sapiens
  CDR3 for alpha chain variable domain of TCR clone 169840 (TRAV16, TRAJ17)
CALSGRAAGNKLTF

SEQ ID NO: 339680 - protein, 15 aa, Homo sapiens
  CDR3 for beta chain variable domain of TCR clone 169840 (TRBV3-1, TRBJ1-2)
CASSPTRLAEGGYTF

SEQ ID NO: 339681 - protein, 12 aa, Homo sapiens
  CDR3 for alpha chain variable domain of TCR clone 169841 (TRAV12-2, TRAJ31)
CAVNTPDARLMF

SEQ ID NO: 339682 - protein, 15 aa, Homo sapiens
  CDR3 for beta chain variable domain of TCR clone 169841 (TRBV4-2, TRBJ1-1)
CASSQDQGLNNEAFF

SEQ ID NO: 339683 - protein, 15 aa, Homo sapiens
  CDR3 for alpha chain variable domain of TCR clone 169842 (TRAV3, TRAJ5)
CAVRDLDTGRRALTF

SEQ ID NO: 339684 - protein, 14 aa, Homo sapiens
  CDR3 for beta chain variable domain of TCR clone 169842 (TRBV2, TRBJ2-7)
CASSLTSGGYEQYF

SEQ ID NO: 339685 - protein, 13 aa, Homo sapiens
  CDR3 for alpha chain variable domain of TCR clone 169843 (TRAV35, TRAJ42)
CAGFPGSQGNLIF

SEQ ID NO: 339686 - protein, 12 aa, Homo sapiens
  CDR3 for beta chain variable domain of TCR clone 169843 (TRBV27, TRBJ2-7)
CASSGGFYEQYF

SEQ ID NO: 339687 - protein, 12 aa, Homo sapiens
  CDR3 for alpha chain variable domain of TCR clone 169844 (TRAV4, TRAJ6)
CLAPGGSSIPTF

SEQ ID NO: 339688 - protein, 18 aa, Homo sapiens
  CDR3 for beta chain variable domain of TCR clone 169844 (TRBV20-1, TRBJ2-3)
CSASGLAGGPGTTDTQYF

SEQ ID NO: 339689 - protein, 15 aa, Homo sapiens
  CDR3 for alpha chain variable domain of TCR clone 169845 (TRAV29/DV5, TRAJ44)
CAARAGTGTASKLTF

SEQ ID NO: 339690 - protein, 12 aa, Homo sapiens
  CDR3 for beta chain variable domain of TCR clone 169845 (TRBV11-2, TRBJ2-2)
CASSLGGGELFF

SEQ ID NO: 339691 - protein, 13 aa, Homo sapiens
  CDR3 for alpha chain variable domain of TCR clone 169846 (TRAV12-3, TRAJ5)
CAMIYTGRRALTF

SEQ ID NO: 339692 - protein, 16 aa, Homo sapiens
  CDR3 for beta chain variable domain of TCR clone 169846 (TRBV24-1, TRBJ2-3)
CATSDRRQDLTDTQYF

SEQ ID NO: 339693 - protein, 13 aa, Homo sapiens
  CDR3 for alpha chain variable domain of TCR clone 169847 (TRAV3, TRAJ21)
CAVREPDFNKFYF

SEQ ID NO: 339694 - protein, 18 aa, Homo sapiens
  CDR3 for beta chain variable domain of TCR clone 169847 (TRBV11-2, TRBJ2-3)
CASSLGGASRGVPNTQYF

SEQ ID NO: 339695 - protein, 14 aa, Homo sapiens
  CDR3 for alpha chain variable domain of TCR clone 169848 (TRAV12-2, TRAJ13)
CVVKKTGGYQKVTF

SEQ ID NO: 339696 - protein, 14 aa, Homo sapiens
  CDR3 for beta chain variable domain of TCR clone 169848 (TRBV10-3, TRBJ2-1)
CAISSDLAYNEQFF

SEQ ID NO: 339697 - protein, 14 aa, Homo sapiens
  CDR3 for alpha chain variable domain of TCR clone 169849 (TRAV8-4, TRAJ29)
CAVSAVEGNTPLVF

SEQ ID NO: 339698 - protein, 14 aa, Homo sapiens
  CDR3 for beta chain variable domain of TCR clone 169849 (TRBV12-4, TRBJ2-5)
CASSRTGGIETQYF

SEQ ID NO: 339699 - protein, 10 aa, Homo sapiens
  CDR3 for alpha chain variable domain of TCR clone 169850 (TRAV23/DV6, TRAJ57)
CAASPTLSQG

SEQ ID NO: 339700 - protein, 13 aa, Homo sapiens
  CDR3 for beta chain variable domain of TCR clone 169850 (TRBV11-3, TRBJ2-3)
CASSHDTKDTQYL

SEQ ID NO: 339701 - protein, 13 aa, Homo sapiens
  CDR3 for alpha chain variable domain of TCR clone 169851 (TRAV8-1, TRAJ8)
CAVNRKGFQNLVF

SEQ ID NO: 339702 - protein, 14 aa, Homo sapiens
  CDR3 for beta chain variable domain of TCR clone 169851 (TRBV7-9, TRBJ2-2)
CASSLVQDTGELFF

SEQ ID NO: 339703 - protein, 11 aa, Homo sapiens
  CDR3 for alpha chain variable domain of TCR clone 169852 (TRAV12-3, TRAJ27)
CAMANAGKSTF

SEQ ID NO: 339704 - protein, 15 aa, Homo sapiens
  CDR3 for beta chain variable domain of TCR clone 169852 (TRBV28, TRBJ2-5)
CASSSGRVIQETQYF

SEQ ID NO: 339705 - protein, 13 aa, Homo sapiens
  CDR3 for alpha chain variable domain of TCR clone 169853 (TRAV21, TRAJ57)
CAVTQGGSEKLVF

SEQ ID NO: 339706 - protein, 13 aa, Homo sapiens
  CDR3 for beta chain variable domain of TCR clone 169853 (TRBV15, TRBJ2-7)
CATSTTGHYEQYF

SEQ ID NO: 339707 - protein, 16 aa, Homo sapiens
  CDR3 for alpha chain variable domain of TCR clone 169854 (TRAV12-2, TRAJ45)
CAVIFLSGGGADGLTF

SEQ ID NO: 339708 - protein, 19 aa, Homo sapiens
  CDR3 for beta chain variable domain of TCR clone 169854 (TRBV28, TRBJ2-4)
CASSVQPGGPAHSKNIQYF

SEQ ID NO: 339709 - protein, 12 aa, Homo sapiens
  CDR3 for alpha chain variable domain of TCR clone 169855 (TRAV1-1, TRAJ39)
CAVPVVGNMLPF

SEQ ID NO: 339710 - protein, 13 aa, Homo sapiens
  CDR3 for beta chain variable domain of TCR clone 169855 (TRBV4-1, TRBJ1-1)
CASSRKMNTEAFF

SEQ ID NO: 339711 - protein, 12 aa, Homo sapiens
  CDR3 for alpha chain variable domain of TCR clone 169856 (TRAV13-2, TRAJ23)
CAERHRGGKLIF

SEQ ID NO: 339712 - protein, 13 aa, Homo sapiens
  CDR3 for beta chain variable domain of TCR clone 169856 (TRBV7-8, TRBJ2-7)
CASSLTGGRGQYF

SEQ ID NO: 339713 - protein, 15 aa, Homo sapiens
  CDR3 for alpha chain variable domain of TCR clone 169857 (TRAV12-3, TRAJ49)
CAMAVTPNTGNQFYF

SEQ ID NO: 339714 - protein, 15 aa, Homo sapiens
  CDR3 for beta chain variable domain of TCR clone 169857 (TRBV7-6, TRBJ1-5)
CASSQSSGINQPQHF

SEQ ID NO: 339715 - protein, 13 aa, Homo sapiens
  CDR3 for alpha chain variable domain of TCR clone 169858 (TRAV9-2, TRAJ49)
CALIQIGGNQFYF

SEQ ID NO: 339716 - protein, 15 aa, Homo sapiens
  CDR3 for beta chain variable domain of TCR clone 169858 (TRBV7-9, TRBJ1-4)
CASSARTGGNEKLFF

SEQ ID NO: 339717 - protein, 13 aa, Homo sapiens
  CDR3 for alpha chain variable domain of TCR clone 169859 (TRAV4, TRAJ43)
CLVGFYNNNDMRF

SEQ ID NO: 339718 - protein, 11 aa, Homo sapiens
  CDR3 for beta chain variable domain of TCR clone 169859 (TRBV7-8, TRBJ2-7)
CASSLSLEQYF

SEQ ID NO: 339719 - protein, 14 aa, Homo sapiens
  CDR3 for alpha chain variable domain of TCR clone 169860 (TRAV12-2, TRAJ13)
CAVKKTGGYQKVTC

SEQ ID NO: 339720 - protein, 11 aa, Homo sapiens
  CDR3 for beta chain variable domain of TCR clone 169860 (TRBV29-1, TRBJ2-5)
CSEDRTGTQYF

SEQ ID NO: 339721 - protein, 15 aa, Homo sapiens
  CDR3 for alpha chain variable domain of TCR clone 169861 (TRAV34, TRAJ38)
CGADFTPGNNRKLIW

SEQ ID NO: 339722 - protein, 12 aa, Homo sapiens
  CDR3 for beta chain variable domain of TCR clone 169861 (TRBV7-9, TRBJ2-7)
CATRTDAYEQNF

SEQ ID NO: 339723 - protein, 16 aa, Homo sapiens
  CDR3 for alpha chain variable domain of TCR clone 169862 (TRAV30, TRAJ24)
CGTEIVDADSWRKFQF

SEQ ID NO: 339724 - protein, 14 aa, Homo sapiens
  CDR3 for beta chain variable domain of TCR clone 169862 (TRBV7-2, TRBJ2-7)
CASSPKTSFYEQYF

SEQ ID NO: 339725 - protein, 13 aa, Homo sapiens
  CDR3 for alpha chain variable domain of TCR clone 169863 (TRAV3, TRAJ27)
CAVRPLGAGKSTF

SEQ ID NO: 339726 - protein, 14 aa, Homo sapiens
  CDR3 for beta chain variable domain of TCR clone 169863 (TRBV9, TRBJ1-6)
CSSVAGTGDSPLHF

SEQ ID NO: 339727 - protein, 17 aa, Homo sapiens
  CDR3 for alpha chain variable domain of TCR clone 169864 (TRAV3, TRAJ42)
CAVRDRDYGGSQGNLIF

SEQ ID NO: 339728 - protein, 15 aa, Homo sapiens
  CDR3 for beta chain variable domain of TCR clone 169864 (TRBV2, TRBJ2-7)
CAGSEGLARSYEQYF

SEQ ID NO: 339729 - protein, 12 aa, Homo sapiens
  CDR3 for alpha chain variable domain of TCR clone 169865 (TRAV1-1, TRAJ15)
CAVDQAGTALIF

SEQ ID NO: 339730 - protein, 16 aa, Homo sapiens
  CDR3 for beta chain variable domain of TCR clone 169865 (TRBV12-4, TRBJ2-7)
CASSPEGQGSSYEQYF

SEQ ID NO: 339731 - protein, 14 aa, Homo sapiens
  CDR3 for alpha chain variable domain of TCR clone 169866 (TRAV12-2, TRAJ48)
CAVNAFFGNEKLTF

SEQ ID NO: 339732 - protein, 13 aa, Homo sapiens
  CDR3 for beta chain variable domain of TCR clone 169866 (TRBV10-3, TRBJ2-7)
CASKLAVNYEQYF

SEQ ID NO: 339733 - protein, 11 aa, Homo sapiens
  CDR3 for alpha chain variable domain of TCR clone 169867 (TRAV12-1, TRAJ26)
CEVAYGQNFVF

SEQ ID NO: 339734 - protein, 15 aa, Homo sapiens
  CDR3 for beta chain variable domain of TCR clone 169867 (TRBV12-4, TRBJ2-5)
CASSGTGQAQETQYF

SEQ ID NO: 339735 - protein, 13 aa, Homo sapiens
  CDR3 for alpha chain variable domain of TCR clone 169868 (TRAV23/DV6, TRAJ16)
RAASGSDGQKLLF

SEQ ID NO: 339736 - protein, 13 aa, Homo sapiens
  CDR3 for beta chain variable domain of TCR clone 169868 (TRBV7-3, TRBJ1-1)
CASSQDWGAEAFF

SEQ ID NO: 339737 - protein, 16 aa, Homo sapiens
  CDR3 for alpha chain variable domain of TCR clone 169869 (TRAV17, TRAJ16)
CATATFQMARSCSLQG

SEQ ID NO: 339738 - protein, 15 aa, Homo sapiens
  CDR3 for beta chain variable domain of TCR clone 169869 (TRBV18, TRBJ2-1)
CASSPPSASYNEQFF

SEQ ID NO: 339739 - protein, 10 aa, Homo sapiens
  CDR3 for alpha chain variable domain of TCR clone 169870 (TRAV12-2, TRAJ52)
RSTSYGKLTF

SEQ ID NO: 339740 - protein, 14 aa, Homo sapiens
  CDR3 for beta chain variable domain of TCR clone 169870 (TRBV5-1, TRBJ2-7)
CASSLQGAVDEQYF

SEQ ID NO: 339741 - protein, 13 aa, Homo sapiens
  CDR3 for alpha chain variable domain of TCR clone 169871 (TRAV4, TRAJ33)
CLVGEDSNYQLIW

SEQ ID NO: 339742 - protein, 14 aa, Homo sapiens
  CDR3 for beta chain variable domain of TCR clone 169871 (TRBV18, TRBJ2-5)
CASSPGVSQETQYF

SEQ ID NO: 339743 - protein, 15 aa, Homo sapiens
  CDR3 for alpha chain variable domain of TCR clone 169872 (TRAV17, TRAJ23)
CATDAEDNQGGKLIF

SEQ ID NO: 339744 - protein, 17 aa, Homo sapiens
  CDR3 for beta chain variable domain of TCR clone 169872 (TRBV13, TRBJ2-3)
WASSLSRVAGGRNTQYF

SEQ ID NO: 339745 - protein, 14 aa, Homo sapiens
  CDR3 for alpha chain variable domain of TCR clone 169873 (TRAV26-1, TRAJ34)
CIVRVAYNTDKLIF

SEQ ID NO: 339746 - protein, 14 aa, Homo sapiens
  CDR3 for beta chain variable domain of TCR clone 169873 (TRBV12-5, TRBJ2-5)
CASGSRTQLETQYF

SEQ ID NO: 339747 - protein, 21 aa, Homo sapiens
  CDR3 for alpha chain variable domain of TCR clone 169874 (TRAV26-1, TRAJ38)
CIADNAGNNHIQNPDPAVYQL

SEQ ID NO: 339748 - protein, 13 aa, Homo sapiens
  CDR3 for beta chain variable domain of TCR clone 169874 (TRBV20-1, TRBJ1-1)
CSARGGGNTEDFF

SEQ ID NO: 339749 - protein, 16 aa, Homo sapiens
  CDR3 for alpha chain variable domain of TCR clone 169875 (TRAV1-2, TRAJ10)
CAVRGVLTVGGSKLTF

SEQ ID NO: 339750 - protein, 12 aa, Homo sapiens
  CDR3 for beta chain variable domain of TCR clone 169875 (TRBV7-8, TRBJ2-7)
CASSLGDREQYF

SEQ ID NO: 339751 - protein, 13 aa, Homo sapiens
  CDR3 for alpha chain variable domain of TCR clone 169876 (TRAV13-1, TRAJ39)
CSKYSNAGNMLTF

SEQ ID NO: 339752 - protein, 14 aa, Homo sapiens
  CDR3 for beta chain variable domain of TCR clone 169876 (TRBV2, TRBJ1-1)
CASRALLMNTEAFF

SEQ ID NO: 339753 - protein, 11 aa, Homo sapiens
  CDR3 for alpha chain variable domain of TCR clone 169877 (TRAV1-1, TRAJ23)
CAVRQGGKLIF

SEQ ID NO: 339754 - protein, 20 aa, Homo sapiens
  CDR3 for beta chain variable domain of TCR clone 169877 (TRBV7-8, TRBJ2-2)
CASCHLFPGPTIHITGGLFF

SEQ ID NO: 339755 - protein, 13 aa, Homo sapiens
  CDR3 for alpha chain variable domain of TCR clone 169878 (TRAV20, TRAJ37)
CAGCSSNTGKLIF

SEQ ID NO: 339756 - protein, 16 aa, Homo sapiens
  CDR3 for beta chain variable domain of TCR clone 169878 (TRBV25-1, TRBJ1-1)
CASSGDSDRGRSEAFF

SEQ ID NO: 339757 - protein, 14 aa, Homo sapiens
  CDR3 for alpha chain variable domain of TCR clone 169879 (TRAV12-2, TRAJ17)
CAGLFKAAGKKLTS

SEQ ID NO: 339758 - protein, 17 aa, Homo sapiens
  CDR3 for beta chain variable domain of TCR clone 169879 (TRBV20-1, TRBJ2-2)
CSASGSGQGGLTGELFF

SEQ ID NO: 339759 - protein, 13 aa, Homo sapiens
  CDR3 for alpha chain variable domain of TCR clone 169880 (TRAV29/DV5, TRAJ31)
CAASRNNNARLMF

SEQ ID NO: 339760 - protein, 15 aa, Homo sapiens
  CDR3 for beta chain variable domain of TCR clone 169880 (TRBV2, TRBJ2-1)
CASSDLAGSYNEQFF

SEQ ID NO: 339761 - protein, 11 aa, Homo sapiens
  CDR3 for alpha chain variable domain of TCR clone 169881 (TRAV2, TRAJ13)
CASGGYQKVTF

SEQ ID NO: 339762 - protein, 13 aa, Homo sapiens
  CDR3 for beta chain variable domain of TCR clone 169881 (TRBV11-3, TRBJ2-3)
CASSHDTKDTQYF

SEQ ID NO: 339763 - protein, 13 aa, Homo sapiens
  CDR3 for alpha chain variable domain of TCR clone 169882 (TRAV27, TRAJ43)
CAGAGNNNNDMRF

SEQ ID NO: 339764 - protein, 14 aa, Homo sapiens
  CDR3 for beta chain variable domain of TCR clone 169882 (TRBV7-2, TRBJ2-7)
CASRSQGAAYEQYF

SEQ ID NO: 339765 - protein, 12 aa, Homo sapiens
  CDR3 for alpha chain variable domain of TCR clone 169883 (TRAV1-2, TRAJ33)
CAALDSNYQLIW

SEQ ID NO: 339766 - protein, 14 aa, Homo sapiens
  CDR3 for beta chain variable domain of TCR clone 169883 (TRBV19, TRBJ2-3)
CVSSAPRGTDTQYF

SEQ ID NO: 339767 - protein, 14 aa, Homo sapiens
  CDR3 for alpha chain variable domain of TCR clone 169884 (TRAV12-2, TRAJ17)
CAVLFKAAGNKPTF

SEQ ID NO: 339768 - protein, 16 aa, Homo sapiens
  CDR3 for beta chain variable domain of TCR clone 169884 (TRBV12-5, TRBJ2-5)
CASGPRTSGNQETQYF

SEQ ID NO: 339769 - protein, 14 aa, Homo sapiens
  CDR3 for alpha chain variable domain of TCR clone 169885 (TRAV1-2, TRAJ16)
CAVNRFSDSQKLLF

SEQ ID NO: 339770 - protein, 11 aa, Homo sapiens
  CDR3 for beta chain variable domain of TCR clone 169885 (TRBV11-2, TRBJ2-2)
CASSLPGELFF

SEQ ID NO: 339771 - protein, 14 aa, Homo sapiens
  CDR3 for alpha chain variable domain of TCR clone 169886 (TRAV1-2, TRAJ8)
CAVREDTGFPQLVF

SEQ ID NO: 339772 - protein, 15 aa, Homo sapiens
  CDR3 for beta chain variable domain of TCR clone 169886 (TRBV6-3, TRBJ2-7)
CASSSPGTVFYEQYF

SEQ ID NO: 339773 - protein, 12 aa, Homo sapiens
  CDR3 for alpha chain variable domain of TCR clone 169887 (TRAV12-3, TRAJ17)
CAMTLTGNKLTF

SEQ ID NO: 339774 - protein, 16 aa, Homo sapiens
  CDR3 for beta chain variable domain of TCR clone 169887 (TRBV7-6, TRBJ2-3)
CASSARTSRGTDTQYF

SEQ ID NO: 339775 - protein, 13 aa, Homo sapiens
  CDR3 for alpha chain variable domain of TCR clone 169888 (TRAV12-2, TRAJ53)
CAGVGGSNYKLTF

SEQ ID NO: 339776 - protein, 14 aa, Homo sapiens
  CDR3 for beta chain variable domain of TCR clone 169888 (TRBV19, TRBJ1-5)
CASRAPDSFLSQHF

SEQ ID NO: 339777 - protein, 13 aa, Homo sapiens
  CDR3 for alpha chain variable domain of TCR clone 169889 (TRAV20, TRAJ34)
CAVSSYNTAKLIF

SEQ ID NO: 339778 - protein, 15 aa, Homo sapiens
  CDR3 for beta chain variable domain of TCR clone 169889 (TRBV20-1, TRBJ1-2)
CSAAGEGARIYGYTF

SEQ ID NO: 339779 - protein, 12 aa, Homo sapiens
  CDR3 for alpha chain variable domain of TCR clone 169890 (TRAV1-2, TRAJ33)
CAALDSNYQLIW

SEQ ID NO: 339780 - protein, 14 aa, Homo sapiens
  CDR3 for beta chain variable domain of TCR clone 169890 (TRBV19, TRBJ2-7)
CASSIFAGTYEQYF

SEQ ID NO: 339781 - protein, 14 aa, Homo sapiens
  CDR3 for alpha chain variable domain of TCR clone 169891 (TRAV12-2, TRAJ53)
CAVNDGGSNYKLTF

SEQ ID NO: 339782 - protein, 13 aa, Homo sapiens
  CDR3 for beta chain variable domain of TCR clone 169891 (TRBV7-6, TRBJ1-2)
CAGSLVADYGYTF

SEQ ID NO: 339783 - protein, 17 aa, Homo sapiens
  CDR3 for alpha chain variable domain of TCR clone 169892 (TRAV3, TRAJ6)
CAVRDGPRAGGSYIPTF

SEQ ID NO: 339784 - protein, 19 aa, Homo sapiens
  CDR3 for beta chain variable domain of TCR clone 169892 (TRBV2, TRBJ2-2)
CASSQPGLAGGGNTGELFF

SEQ ID NO: 339785 - protein, 14 aa, Homo sapiens
  CDR3 for alpha chain variable domain of TCR clone 169893 (TRAV27, TRAJ22)
CAGLPPGSARQLTF

SEQ ID NO: 339786 - protein, 16 aa, Homo sapiens
  CDR3 for beta chain variable domain of TCR clone 169893 (TRBV7-3, TRBJ2-2)
CASSLKRGTLSGELFF

SEQ ID NO: 339787 - protein, 16 aa, Homo sapiens
  CDR3 for alpha chain variable domain of TCR clone 169894 (TRAV30, TRAJ24)
CGTEIVDADSWVKFQF

SEQ ID NO: 339788 - protein, 15 aa, Homo sapiens
  CDR3 for beta chain variable domain of TCR clone 169894 (TRBV27, TRBJ2-1)
CASSNGGGSSNEQFF

SEQ ID NO: 339789 - protein, 15 aa, Homo sapiens
  CDR3 for alpha chain variable domain of TCR clone 169895 (TRAV30, TRAJ32)
CGTEILGGATHKLIF

SEQ ID NO: 339790 - protein, 13 aa, Homo sapiens
  CDR3 for beta chain variable domain of TCR clone 169895 (TRBV6-3, TRBJ2-7)
CASSFSGGYEQYF

SEQ ID NO: 339791 - protein, 13 aa, Homo sapiens
  CDR3 for alpha chain variable domain of TCR clone 169896 (TRAV21, TRAJ11)
CAVPNSGCSTLTF

SEQ ID NO: 339792 - protein, 13 aa, Homo sapiens
  CDR3 for beta chain variable domain of TCR clone 169896 (TRBV7-2, TRBJ1-1)
CASNLKGAKVAFF

SEQ ID NO: 339793 - protein, 14 aa, Homo sapiens
  CDR3 for alpha chain variable domain of TCR clone 169897 (TRAV12-2, TRAJ48)
CAVNTFFGNEKLTF

SEQ ID NO: 339794 - protein, 13 aa, Homo sapiens
  CDR3 for beta chain variable domain of TCR clone 169897 (TRBV28, TRBJ2-7)
CAGAQQGLDEQYF

SEQ ID NO: 339795 - protein, 10 aa, Homo sapiens
  CDR3 for alpha chain variable domain of TCR clone 169898 (TRAV23/DV6, TRAJ57)
CAASSTLSQG

SEQ ID NO: 339796 - protein, 12 aa, Homo sapiens
  CDR3 for beta chain variable domain of TCR clone 169898 (TRBV11-2, TRBJ2-4)
CASSSASGSEYF

SEQ ID NO: 339797 - protein, 12 aa, Homo sapiens
  CDR3 for alpha chain variable domain of TCR clone 169899 (TRAV23/DV6, TRAJ30)
CAASKGDDKITF

SEQ ID NO: 339798 - protein, 15 aa, Homo sapiens
  CDR3 for beta chain variable domain of TCR clone 169899 (TRBV29-1, TRBJ2-1)
CSGRDRKSSYNEQFF

SEQ ID NO: 339799 - protein, 15 aa, Homo sapiens
  CDR3 for alpha chain variable domain of TCR clone 169900 (TRAV3, TRAJ4)
CAVRDRAGGYNKLIF

SEQ ID NO: 339800 - protein, 14 aa, Homo sapiens
  CDR3 for beta chain variable domain of TCR clone 169900 (TRBV7-3, TRBJ2-2)
CASSSGGYTGELFF

SEQ ID NO: 339801 - protein, 12 aa, Homo sapiens
  CDR3 for alpha chain variable domain of TCR clone 169901 (TRAV12-1, TRAJ40)
CVVYSGTYKYIF

SEQ ID NO: 339802 - protein, 18 aa, Homo sapiens
  CDR3 for beta chain variable domain of TCR clone 169901 (TRBV11-2, TRBJ2-5)
CASSVGGASRGAPNTQYF

SEQ ID NO: 339803 - protein, 17 aa, Homo sapiens
  CDR3 for alpha chain variable domain of TCR clone 169902 (TRAV2, TRAJ31)
CAVEEGNARLVWRWNSA

SEQ ID NO: 339804 - protein, 18 aa, Homo sapiens
  CDR3 for beta chain variable domain of TCR clone 169902 (TRBV7-9, TRBJ2-3)
CASSLDLAGLATPDTQYF

SEQ ID NO: 339805 - protein, 14 aa, Homo sapiens
  CDR3 for alpha chain variable domain of TCR clone 169903 (TRAV26-1, TRAJ45)
CSEVTGGGADGLTF

SEQ ID NO: 339806 - protein, 13 aa, Homo sapiens
  CDR3 for beta chain variable domain of TCR clone 169903 (TRBV7-6, TRBJ1-2)
CASSLVADYGYTF

SEQ ID NO: 339807 - protein, 15 aa, Homo sapiens
  CDR3 for alpha chain variable domain of TCR clone 169904 (TRAV17, TRAJ9)
CFLLLRIYWRLKTIF

SEQ ID NO: 339808 - protein, 14 aa, Homo sapiens
  CDR3 for beta chain variable domain of TCR clone 169904 (TRBV7-9, TRBJ2-2)
CASSLVQDTGELFF

SEQ ID NO: 339809 - protein, 15 aa, Homo sapiens
  CDR3 for alpha chain variable domain of TCR clone 169905 (TRAV25, TRAJ53)
CPTSNGGGSNYKLTF

SEQ ID NO: 339810 - protein, 14 aa, Homo sapiens
  CDR3 for beta chain variable domain of TCR clone 169905 (TRBV11-2, TRBJ2-3)
CASSRLARTDTQYF

SEQ ID NO: 339811 - protein, 11 aa, Homo sapiens
  CDR3 for alpha chain variable domain of TCR clone 169906 (TRAV2, TRAJ13)
CASGGYQKVTF

SEQ ID NO: 339812 - protein, 15 aa, Homo sapiens
  CDR3 for beta chain variable domain of TCR clone 169906 (TRBV12-4, TRBJ1-5)
CASTRGSGFGQPQHF

SEQ ID NO: 339813 - protein, 15 aa, Homo sapiens
  CDR3 for alpha chain variable domain of TCR clone 169907 (TRAV13-1, TRAJ10)
CRGYILTGGGNKLTF

SEQ ID NO: 339814 - protein, 15 aa, Homo sapiens
  CDR3 for beta chain variable domain of TCR clone 169907 (TRBV12-4, TRBJ2-7)
CASSQTGAISYEQYF

SEQ ID NO: 339815 - protein, 14 aa, Homo sapiens
  CDR3 for alpha chain variable domain of TCR clone 169908 (TRAV1-2, TRAJ16)
CAVNRFSDGQKLLF

SEQ ID NO: 339816 - protein, 14 aa, Homo sapiens
  CDR3 for beta chain variable domain of TCR clone 169908 (TRBV25-1, TRBJ1-1)
CASTHLGGNTKAFF

SEQ ID NO: 339817 - protein, 14 aa, Homo sapiens
  CDR3 for alpha chain variable domain of TCR clone 169909 (TRAV23/DV6, TRAJ22)
CAASVSGSARQRTF

SEQ ID NO: 339818 - protein, 16 aa, Homo sapiens
  CDR3 for beta chain variable domain of TCR clone 169909 (TRBV19, TRBJ2-2)
CASSFPGQGLAGELFF

SEQ ID NO: 339819 - protein, 16 aa, Homo sapiens
  CDR3 for alpha chain variable domain of TCR clone 169910 (TRAV8-3, TRAJ18)
CALGARRGSTLGRLYF

SEQ ID NO: 339820 - protein, 14 aa, Homo sapiens
  CDR3 for beta chain variable domain of TCR clone 169910 (TRBV5-4, TRBJ1-3)
CASSSQSAGNTIYF

SEQ ID NO: 339821 - protein, 16 aa, Homo sapiens
  CDR3 for alpha chain variable domain of TCR clone 169911 (TRAV30, TRAJ24)
CGTEIVDADSWGKFQF

SEQ ID NO: 339822 - protein, 13 aa, Homo sapiens
  CDR3 for beta chain variable domain of TCR clone 169911 (TRBV6-4, TRBJ1-5)
CASSADLNQPQHF

SEQ ID NO: 339823 - protein, 15 aa, Homo sapiens
  CDR3 for alpha chain variable domain of TCR clone 169912 (TRAV26-1, TRAJ23)
CIVRVLNNQGGKLIF

SEQ ID NO: 339824 - protein, 13 aa, Homo sapiens
  CDR3 for beta chain variable domain of TCR clone 169912 (TRBV11-2, TRBJ2-5)
CASSFSSQETQYF

SEQ ID NO: 339825 - protein, 12 aa, Homo sapiens
  CDR3 for alpha chain variable domain of TCR clone 169913 (TRAV2, TRAJ15)
CAVAQAGTALIF

SEQ ID NO: 339826 - protein, 15 aa, Homo sapiens
  CDR3 for beta chain variable domain of TCR clone 169913 (TRBV6-3, TRBJ2-7)
CASSSPGTVFYEQYF

SEQ ID NO: 339827 - protein, 14 aa, Homo sapiens
  CDR3 for alpha chain variable domain of TCR clone 169914 (TRAV12-3, TRAJ22)
CAMSLFGSARQLTF

SEQ ID NO: 339828 - protein, 17 aa, Homo sapiens
  CDR3 for beta chain variable domain of TCR clone 169914 (TRBV10-3, TRBJ2-6)
CAISESTAPSGANVLTF

SEQ ID NO: 339829 - protein, 13 aa, Homo sapiens
  CDR3 for alpha chain variable domain of TCR clone 169915 (TRAV12-3, TRAJ4)
CNEQSGGYNKLIF

SEQ ID NO: 339830 - protein, 15 aa, Homo sapiens
  CDR3 for beta chain variable domain of TCR clone 169915 (TRBV5-1, TRBJ1-1)
CASSLSDLGGTEAFF

SEQ ID NO: 339831 - protein, 11 aa, Homo sapiens
  CDR3 for alpha chain variable domain of TCR clone 169916 (TRAV21, TRAJ31)
CAVRNNARRMF

SEQ ID NO: 339832 - protein, 15 aa, Homo sapiens
  CDR3 for beta chain variable domain of TCR clone 169916 (TRBV20-1, TRBJ2-7)
CSARDRVSGMDEQYF

SEQ ID NO: 339833 - protein, 16 aa, Homo sapiens
  CDR3 for alpha chain variable domain of TCR clone 169917 (TRAV4, TRAJ22)
CLVGDLYAGSARQLTF

SEQ ID NO: 339834 - protein, 16 aa, Homo sapiens
  CDR3 for beta chain variable domain of TCR clone 169917 (TRBV7-9, TRBJ2-1)
CASSDVAGGSYNEQFF

SEQ ID NO: 339835 - protein, 14 aa, Homo sapiens
  CDR3 for alpha chain variable domain of TCR clone 169918 (TRAV29/DV5, TRAJ20)
CAASAPIEDYKLSF

SEQ ID NO: 339836 - protein, 11 aa, Homo sapiens
  CDR3 for beta chain variable domain of TCR clone 169918 (TRBV12-4, TRBJ2-3)
CASTATDTQYF

SEQ ID NO: 339837 - protein, 14 aa, Homo sapiens
  CDR3 for alpha chain variable domain of TCR clone 169919 (TRAV8-3, TRAJ9)
CAVVYNTGGFKTIF

SEQ ID NO: 339838 - protein, 11 aa, Homo sapiens
  CDR3 for beta chain variable domain of TCR clone 169919 (TRBV7-8, TRBJ2-7)
CASSLSLEQYF

SEQ ID NO: 339839 - protein, 14 aa, Homo sapiens
  CDR3 for alpha chain variable domain of TCR clone 169920 (TRAV12-2, TRAJ13)
CAVKKTGGYHKVTF

SEQ ID NO: 339840 - protein, 15 aa, Homo sapiens
  CDR3 for beta chain variable domain of TCR clone 169920 (TRBV27, TRBJ2-1)
CASSNGGGSSNAQFF

SEQ ID NO: 339841 - protein, 14 aa, Homo sapiens
  CDR3 for alpha chain variable domain of TCR clone 169921 (TRAV20, TRAJ16)
CAVQENSDGQKLPF

SEQ ID NO: 339842 - protein, 13 aa, Homo sapiens
  CDR3 for beta chain variable domain of TCR clone 169921 (TRBV27, TRBJ2-3)
CASSSLPGDTQYS

SEQ ID NO: 339843 - protein, 15 aa, Homo sapiens
  CDR3 for alpha chain variable domain of TCR clone 169922 (TRAV21, TRAJ22)
CAVRLFFWFCKATDL

SEQ ID NO: 339844 - protein, 14 aa, Homo sapiens
  CDR3 for beta chain variable domain of TCR clone 169922 (TRBV19, TRBJ1-5)
CASRAPESFLSQHF

SEQ ID NO: 339845 - protein, 14 aa, Homo sapiens
  CDR3 for alpha chain variable domain of TCR clone 169923 (TRAV1-2, TRAJ16)
CAVNRFSDGQKLLF

SEQ ID NO: 339846 - protein, 15 aa, Homo sapiens
  CDR3 for beta chain variable domain of TCR clone 169923 (TRBV6-5, TRBJ2-1)
CASSYDAGAGNEQSF

SEQ ID NO: 339847 - protein, 15 aa, Homo sapiens
  CDR3 for alpha chain variable domain of TCR clone 169924 (TRAV21, TRAJ56)
CAVTKYTGANSKLTF

SEQ ID NO: 339848 - protein, 14 aa, Homo sapiens
  CDR3 for beta chain variable domain of TCR clone 169924 (TRBV18, TRBJ2-5)
CASSPGVSQETQYF

SEQ ID NO: 339849 - protein, 14 aa, Homo sapiens
  CDR3 for alpha chain variable domain of TCR clone 169925 (TRAV23/DV6, TRAJ40)
CAASLTSGIYKYIF

SEQ ID NO: 339850 - protein, 14 aa, Homo sapiens
  CDR3 for beta chain variable domain of TCR clone 169925 (TRBV5-1, TRBJ2-3)
CASSRGQGGGTQYF

SEQ ID NO: 339851 - protein, 14 aa, Homo sapiens
  CDR3 for alpha chain variable domain of TCR clone 169926 (TRAV8-6, TRAJ9)
CAVTPATGGFKTIF

SEQ ID NO: 339852 - protein, 14 aa, Homo sapiens
  CDR3 for beta chain variable domain of TCR clone 169926 (TRBV7-2, TRBJ2-2)
CASSLNSNTGELFF

SEQ ID NO: 339853 - protein, 16 aa, Homo sapiens
  CDR3 for alpha chain variable domain of TCR clone 169927 (TRAV3, TRAJ17)
CAVRDGSPAAGNKLTF

SEQ ID NO: 339854 - protein, 15 aa, Homo sapiens
  CDR3 for beta chain variable domain of TCR clone 169927 (TRBV7-8, TRBJ2-1)
CTSSLADSLYNEQFF

SEQ ID NO: 339855 - protein, 16 aa, Homo sapiens
  CDR3 for alpha chain variable domain of TCR clone 169928 (TRAV26-1, TRAJ22)
CIVSRSYSGSARQLTF

SEQ ID NO: 339856 - protein, 14 aa, Homo sapiens
  CDR3 for beta chain variable domain of TCR clone 169928 (TRBV20-1, TRBJ1-5)
CSAPGTGVGQPQHF

SEQ ID NO: 339857 - protein, 13 aa, Homo sapiens
  CDR3 for alpha chain variable domain of TCR clone 169929 (TRAV36/DV7, TRAJ34)
CAGRPYNTDKLIF

SEQ ID NO: 339858 - protein, 15 aa, Homo sapiens
  CDR3 for beta chain variable domain of TCR clone 169929 (TRBV27, TRBJ1-6)
CASSFDRGLGSPLQF

SEQ ID NO: 339859 - protein, 14 aa, Homo sapiens
  CDR3 for alpha chain variable domain of TCR clone 169930 (TRAV4, TRAJ26)
CLVGPHNYGQSFVF

SEQ ID NO: 339860 - protein, 17 aa, Homo sapiens
  CDR3 for beta chain variable domain of TCR clone 169930 (TRBV24-1, TRBJ2-1)
CATSDVLTSGTYNEQFF

SEQ ID NO: 339861 - protein, 14 aa, Homo sapiens
  CDR3 for alpha chain variable domain of TCR clone 169931 (TRAV29/DV5, TRAJ36)
CAARRKTGANNLLW

SEQ ID NO: 339862 - protein, 14 aa, Homo sapiens
  CDR3 for beta chain variable domain of TCR clone 169931 (TRBV12-5, TRBJ2-5)
CASGSRTHQETQYF

SEQ ID NO: 339863 - protein, 13 aa, Homo sapiens
  CDR3 for alpha chain variable domain of TCR clone 169932 (TRAV13-1, TRAJ9)
CAASGTGGFNTIF

SEQ ID NO: 339864 - protein, 12 aa, Homo sapiens
  CDR3 for beta chain variable domain of TCR clone 169932 (TRBV11-2, TRBJ2-2)
CASSLGGGELFF

SEQ ID NO: 339865 - protein, 13 aa, Homo sapiens
  CDR3 for alpha chain variable domain of TCR clone 169933 (TRAV26-2, TRAJ43)
CILRAVNNNDMRF

SEQ ID NO: 339866 - protein, 13 aa, Homo sapiens
  CDR3 for beta chain variable domain of TCR clone 169933 (TRBV12-4, TRBJ1-5)
CASSPDRAQPQHF

SEQ ID NO: 339867 - protein, 12 aa, Homo sapiens
  CDR3 for alpha chain variable domain of TCR clone 169934 (TRAV17, TRAJ49)
CATVTTGNQFYF

SEQ ID NO: 339868 - protein, 15 aa, Homo sapiens
  CDR3 for beta chain variable domain of TCR clone 169934 (TRBV18, TRBJ2-5)
CASSPDPGLQETQYF

SEQ ID NO: 339869 - protein, 13 aa, Homo sapiens
  CDR3 for alpha chain variable domain of TCR clone 169935 (TRAV13-1, TRAJ40)
CAARTSGTYKYIF

SEQ ID NO: 339870 - protein, 17 aa, Homo sapiens
  CDR3 for beta chain variable domain of TCR clone 169935 (TRBV20-1, TRBJ2-1)
CSARDPLAGVWDNEQLF

SEQ ID NO: 339871 - protein, 14 aa, Homo sapiens
  CDR3 for alpha chain variable domain of TCR clone 169936 (TRAV12-3, TRAJ57)
CARALEGGSEKRVF

SEQ ID NO: 339872 - protein, 17 aa, Homo sapiens
  CDR3 for beta chain variable domain of TCR clone 169936 (TRBV11-3, TRBJ2-3)
CASSLGLTGGGTDTQYF

SEQ ID NO: 339873 - protein, 15 aa, Homo sapiens
  CDR3 for alpha chain variable domain of TCR clone 169937 (TRAV26-1, TRAJ56)
CIVRVDNGANSKLTF

SEQ ID NO: 339874 - protein, 14 aa, Homo sapiens
  CDR3 for beta chain variable domain of TCR clone 169937 (TRBV5-1, TRBJ2-7)
GASSRGESLYEQYF

SEQ ID NO: 339875 - protein, 16 aa, Homo sapiens
  CDR3 for alpha chain variable domain of TCR clone 169938 (TRAV3, TRAJ37)
CAVRPHGSGNTGKLIF

SEQ ID NO: 339876 - protein, 12 aa, Homo sapiens
  CDR3 for beta chain variable domain of TCR clone 169938 (TRBV7-8, TRBJ2-7)
CASSLGDREQYF

SEQ ID NO: 339877 - protein, 14 aa, Homo sapiens
  CDR3 for alpha chain variable domain of TCR clone 169939 (TRAV12-3, TRAJ10)
SHLPLTGGGNKLTF

SEQ ID NO: 339878 - protein, 15 aa, Homo sapiens
  CDR3 for beta chain variable domain of TCR clone 169939 (TRBV5-8, TRBJ1-5)
CASSWTPGTPQPQHF

SEQ ID NO: 339879 - protein, 14 aa, Homo sapiens
  CDR3 for alpha chain variable domain of TCR clone 169940 (TRAV17, TRAJ31)
CATVLRNNNARLMF

SEQ ID NO: 339880 - protein, 14 aa, Homo sapiens
  CDR3 for beta chain variable domain of TCR clone 169940 (TRBV12-4, TRBJ2-5)
CASSLWQKQQTQYF

SEQ ID NO: 339881 - protein, 15 aa, Homo sapiens
  CDR3 for alpha chain variable domain of TCR clone 169941 (TRAV21, TRAJ32)
CAAAPYGGATNRLIF

SEQ ID NO: 339882 - protein, 17 aa, Homo sapiens
  CDR3 for beta chain variable domain of TCR clone 169941 (TRBV18, TRBJ2-3)
CVSSPFGDGGFTDTQYF

SEQ ID NO: 339883 - protein, 13 aa, Homo sapiens
  CDR3 for alpha chain variable domain of TCR clone 169942 (TRAV1-2, TRAJ9)
CAALNTGGFKTIF

SEQ ID NO: 339884 - protein, 15 aa, Homo sapiens
  CDR3 for beta chain variable domain of TCR clone 169942 (TRBV27, TRBJ1-5)
CASTFNRGSNQPQHF

SEQ ID NO: 339885 - protein, 16 aa, Homo sapiens
  CDR3 for alpha chain variable domain of TCR clone 169943 (TRAV2, TRAJ20)
TAVLWSFRSNDYNLSF

SEQ ID NO: 339886 - protein, 12 aa, Homo sapiens
  CDR3 for beta chain variable domain of TCR clone 169943 (TRBV7-6, TRBJ2-3)
CASSTGTDTQYF

SEQ ID NO: 339887 - protein, 14 aa, Homo sapiens
  CDR3 for alpha chain variable domain of TCR clone 169944 (TRAV29/DV5, TRAJ7)
CAASARIGNNRLAF

SEQ ID NO: 339888 - protein, 15 aa, Homo sapiens
  CDR3 for beta chain variable domain of TCR clone 169944 (TRBV10-3, TRBJ2-3)
CAISLTSGGTDTQYF

SEQ ID NO: 339889 - protein, 11 aa, Homo sapiens
  CDR3 for alpha chain variable domain of TCR clone 169945 (TRAV12-3, TRAJ16)
LAGGDGQKLLF

SEQ ID NO: 339890 - protein, 13 aa, Homo sapiens
  CDR3 for beta chain variable domain of TCR clone 169945 (TRBV12-4, TRBJ1-4)
CASAMGHNEKLFF

SEQ ID NO: 339891 - protein, 13 aa, Homo sapiens
  CDR3 for alpha chain variable domain of TCR clone 169946 (TRAV21, TRAJ20)
CAVGLRVDYKLNF

SEQ ID NO: 339892 - protein, 16 aa, Homo sapiens
  CDR3 for beta chain variable domain of TCR clone 169946 (TRBV6-1, TRBJ2-5)
CASSETLDRGAETQYF

SEQ ID NO: 339893 - protein, 14 aa, Homo sapiens
  CDR3 for alpha chain variable domain of TCR clone 169947 (TRAV8-3, TRAJ44)
CAVGNTGTASKLTF

SEQ ID NO: 339894 - protein, 17 aa, Homo sapiens
  CDR3 for beta chain variable domain of TCR clone 169947 (TRBV28, TRBJ2-7)
CTSVPAVSGDRGYEQYF

SEQ ID NO: 339895 - protein, 16 aa, Homo sapiens
  CDR3 for alpha chain variable domain of TCR clone 169948 (TRAV3, TRAJ6)
CAVRVALSGGSYIPTF

SEQ ID NO: 339896 - protein, 14 aa, Homo sapiens
  CDR3 for beta chain variable domain of TCR clone 169948 (TRBV18, TRBJ2-7)
CASSPRGGAYEQYF

SEQ ID NO: 339897 - protein, 14 aa, Homo sapiens
  CDR3 for alpha chain variable domain of TCR clone 169949 (TRAV21, TRAJ35)
CAVMPIGFGNVLHC

SEQ ID NO: 339898 - protein, 16 aa, Homo sapiens
  CDR3 for beta chain variable domain of TCR clone 169949 (TRBV7-9, TRBJ2-3)
CASSFSVAGGTDTQYF

SEQ ID NO: 339899 - protein, 14 aa, Homo sapiens
  CDR3 for alpha chain variable domain of TCR clone 169950 (TRAV1-2, TRAJ16)
CAVNRFSDGQKLLF

SEQ ID NO: 339900 - protein, 15 aa, Homo sapiens
  CDR3 for beta chain variable domain of TCR clone 169950 (TRBV9, TRBJ1-6)
CASSVAGTGDETLYF

SEQ ID NO: 339901 - protein, 17 aa, Homo sapiens
  CDR3 for alpha chain variable domain of TCR clone 169951 (TRAV17, TRAJ52)
CATERPSGGTSYGKLTF

SEQ ID NO: 339902 - protein, 15 aa, Homo sapiens
  CDR3 for beta chain variable domain of TCR clone 169951 (TRBV5-1, TRBJ2-1)
CASSLVANSYNEQFC

SEQ ID NO: 339903 - protein, 19 aa, Homo sapiens
  CDR3 for alpha chain variable domain of TCR clone 169952 (TRAV3, TRAJ6)
CAVRDGPRAGGSYIPTLEE

SEQ ID NO: 339904 - protein, 14 aa, Homo sapiens
  CDR3 for beta chain variable domain of TCR clone 169952 (TRBV19, TRBJ2-1)
CASPTFVLSGEQFF

SEQ ID NO: 339905 - protein, 13 aa, Homo sapiens
  CDR3 for alpha chain variable domain of TCR clone 169953 (TRAV14/DV4, TRAJ4)
CAMKAGGYNKLIF

SEQ ID NO: 339906 - protein, 14 aa, Homo sapiens
  CDR3 for beta chain variable domain of TCR clone 169953 (TRBV12-5, TRBJ2-5)
CASGSRTHQETQYF

SEQ ID NO: 339907 - protein, 10 aa, Homo sapiens
  CDR3 for alpha chain variable domain of TCR clone 169954 (TRAV26-1, TRAJ40)
CIAGTYKYIF

SEQ ID NO: 339908 - protein, 15 aa, Homo sapiens
  CDR3 for beta chain variable domain of TCR clone 169954 (TRBV19, TRBJ2-7)
CASSSPGVPLDEQFF

SEQ ID NO: 339909 - protein, 10 aa, Homo sapiens
  CDR3 for alpha chain variable domain of TCR clone 169955 (TRAV26-1, TRAJ40)
CIAGTYKYIF

SEQ ID NO: 339910 - protein, 15 aa, Homo sapiens
  CDR3 for beta chain variable domain of TCR clone 169955 (TRBV19, TRBJ2-5)
CASSSPGVPLDEQFF

SEQ ID NO: 339911 - protein, 15 aa, Homo sapiens
  CDR3 for alpha chain variable domain of TCR clone 169956 (TRAV3, TRAJ45)
CAVRTPWGGADGLTF

SEQ ID NO: 339912 - protein, 12 aa, Homo sapiens
  CDR3 for beta chain variable domain of TCR clone 169956 (TRBV7-9, TRBJ2-7)
CASSIKREEQYF

SEQ ID NO: 339913 - protein, 11 aa, Homo sapiens
  CDR3 for alpha chain variable domain of TCR clone 169957 (TRAV3, TRAJ37)
CAVWNTGKLIF

SEQ ID NO: 339914 - protein, 13 aa, Homo sapiens
  CDR3 for beta chain variable domain of TCR clone 169957 (TRBV20-1, TRBJ2-7)
CSASFQGGGEQYF

SEQ ID NO: 339915 - protein, 16 aa, Homo sapiens
  CDR3 for alpha chain variable domain of TCR clone 169958 (TRAV30, TRAJ24)
CGTEIVDADSWGNFKF

SEQ ID NO: 339916 - protein, 14 aa, Homo sapiens
  CDR3 for beta chain variable domain of TCR clone 169958 (TRBV12-5, TRBJ2-5)
CASGSRTHQETQYF

SEQ ID NO: 339917 - protein, 12 aa, Homo sapiens
  CDR3 for alpha chain variable domain of TCR clone 169959 (TRAV9-2, TRAJ9)
CAMSTGGFKTIF

SEQ ID NO: 339918 - protein, 17 aa, Homo sapiens
  CDR3 for beta chain variable domain of TCR clone 169959 (TRBV28, TRBJ2-5)
CASSRQGGLAGAETQYF

SEQ ID NO: 339919 - protein, 14 aa, Homo sapiens
  CDR3 for alpha chain variable domain of TCR clone 169960 (TRAV2, TRAJ15)
CAVTVNQAGTAQIF

SEQ ID NO: 339920 - protein, 14 aa, Homo sapiens
  CDR3 for beta chain variable domain of TCR clone 169960 (TRBV7-9, TRBJ2-5)
CASSLAPDQETQYF

SEQ ID NO: 339921 - protein, 13 aa, Homo sapiens
  CDR3 for alpha chain variable domain of TCR clone 169961 (TRAV21, TRAJ45)
CAVMGGGADGLTF

SEQ ID NO: 339922 - protein, 16 aa, Homo sapiens
  CDR3 for beta chain variable domain of TCR clone 169961 (TRBV20-1, TRBJ2-1)
CSARDHLAGGRGEQLF

SEQ ID NO: 339923 - protein, 17 aa, Homo sapiens
  CDR3 for alpha chain variable domain of TCR clone 169962 (TRAV4, TRAJ18)
CLVGERSVGSTLGRLYF

SEQ ID NO: 339924 - protein, 18 aa, Homo sapiens
  CDR3 for beta chain variable domain of TCR clone 169962 (TRBV11-2, TRBJ2-3)
CASGLGGASRGAPNTQYF

SEQ ID NO: 339925 - protein, 13 aa, Homo sapiens
  CDR3 for alpha chain variable domain of TCR clone 169963 (TRAV13-2, TRAJ40)
CAETLSGTYKYIF

SEQ ID NO: 339926 - protein, 16 aa, Homo sapiens
  CDR3 for beta chain variable domain of TCR clone 169963 (TRBV20-1, TRBJ2-1)
CCARDFSGRIGDEQFF

SEQ ID NO: 339927 - protein, 17 aa, Homo sapiens
  CDR3 for alpha chain variable domain of TCR clone 169964 (TRAV12-1, TRAJ44)
CVVDTPQGTASNSPLGL

SEQ ID NO: 339928 - protein, 14 aa, Homo sapiens
  CDR3 for beta chain variable domain of TCR clone 169964 (TRBV7-9, TRBJ2-1)
CASSPRDSLYEQFF

SEQ ID NO: 339929 - protein, 16 aa, Homo sapiens
  CDR3 for alpha chain variable domain of TCR clone 169965 (TRAV30, TRAJ24)
CGTEIVDADSWGKSQF

SEQ ID NO: 339930 - protein, 16 aa, Homo sapiens
  CDR3 for beta chain variable domain of TCR clone 169965 (TRBV13, TRBJ2-2)
CASSPRTGEHTGELFF

SEQ ID NO: 339931 - protein, 16 aa, Homo sapiens
  CDR3 for alpha chain variable domain of TCR clone 169966 (TRAV16, TRAJ4)
CALSRLFSGGYNKLIF

SEQ ID NO: 339932 - protein, 16 aa, Homo sapiens
  CDR3 for beta chain variable domain of TCR clone 169966 (TRBV24-1, TRBJ2-3)
CATSDPGTGATDTQYF

SEQ ID NO: 339933 - protein, 14 aa, Homo sapiens
  CDR3 for alpha chain variable domain of TCR clone 169967 (TRAV13-1, TRAJ9)
CAASRPSGGFKTIF

SEQ ID NO: 339934 - protein, 16 aa, Homo sapiens
  CDR3 for beta chain variable domain of TCR clone 169967 (TRBV7-8, TRBJ2-6)
CASRVGDSSGANVLTF

SEQ ID NO: 339935 - protein, 16 aa, Homo sapiens
  CDR3 for alpha chain variable domain of TCR clone 169968 (TRAV4, TRAJ22)
CLVGDLYSGSARQLTF

SEQ ID NO: 339936 - protein, 16 aa, Homo sapiens
  CDR3 for beta chain variable domain of TCR clone 169968 (TRBV7-9, TRBJ2-1)
CASSDVAGGSYNEHFF

SEQ ID NO: 339937 - protein, 14 aa, Homo sapiens
  CDR3 for alpha chain variable domain of TCR clone 169969 (TRAV2, TRAJ20)
CAVEDVVNDYKLSF

SEQ ID NO: 339938 - protein, 15 aa, Homo sapiens
  CDR3 for beta chain variable domain of TCR clone 169969 (TRBV6-1, TRBJ2-3)
CASSEIAPSTDTQYF

SEQ ID NO: 339939 - protein, 13 aa, Homo sapiens
  CDR3 for alpha chain variable domain of TCR clone 169970 (TRAV17, TRAJ29)
CATDAFRKQTSCL

SEQ ID NO: 339940 - protein, 13 aa, Homo sapiens
  CDR3 for beta chain variable domain of TCR clone 169970 (TRBV5-7, TRBJ2-6)
CASTSSGANVLTF

SEQ ID NO: 339941 - protein, 11 aa, Homo sapiens
  CDR3 for alpha chain variable domain of TCR clone 169971 (TRAV35, TRAJ30)
CAPGGDEKIIF

SEQ ID NO: 339942 - protein, 13 aa, Homo sapiens
  CDR3 for beta chain variable domain of TCR clone 169971 (TRBV7-6, TRBJ2-1)
CQQLGGGADEQFF

SEQ ID NO: 339943 - protein, 12 aa, Homo sapiens
  CDR3 for alpha chain variable domain of TCR clone 169972 (TRAV36/DV7, TRAJ54)
CAVVRGAQKLVF

SEQ ID NO: 339944 - protein, 14 aa, Homo sapiens
  CDR3 for beta chain variable domain of TCR clone 169972 (TRBV20-1, TRBJ2-3)
RTSEGPGTTDTQYF

SEQ ID NO: 339945 - protein, 18 aa, Homo sapiens
  CDR3 for alpha chain variable domain of TCR clone 169973 (TRAV21, TRAJ52)
CAVRPSPAGGTSYGKLTF

SEQ ID NO: 339946 - protein, 15 aa, Homo sapiens
  CDR3 for beta chain variable domain of TCR clone 169973 (TRBV20-1, TRBJ1-5)
CSATSDRGLGQPQHF

SEQ ID NO: 339947 - protein, 13 aa, Homo sapiens
  CDR3 for alpha chain variable domain of TCR clone 169974 (TRAV30, TRAJ39)
CGTEKNAGNMLAF

SEQ ID NO: 339948 - protein, 12 aa, Homo sapiens
  CDR3 for beta chain variable domain of TCR clone 169974 (TRBV12-4, TRBJ2-5)
CASSSAQETQYF

SEQ ID NO: 339949 - protein, 16 aa, Homo sapiens
  CDR3 for alpha chain variable domain of TCR clone 169975 (TRAV38-2/DV8, TRAJ45)
CAYTTTSGGGADGLTF

SEQ ID NO: 339950 - protein, 14 aa, Homo sapiens
  CDR3 for beta chain variable domain of TCR clone 169975 (TRBV7-9, TRBJ2-2)
CASSVGHRTGELFF

SEQ ID NO: 339951 - protein, 13 aa, Homo sapiens
  CDR3 for alpha chain variable domain of TCR clone 169976 (TRAV12-3, TRAJ9)
CAMSGGGGFKTIF

SEQ ID NO: 339952 - protein, 13 aa, Homo sapiens
  CDR3 for beta chain variable domain of TCR clone 169976 (TRBV9, TRBJ2-7)
CASSASDSYEQYF

SEQ ID NO: 339953 - protein, 15 aa, Homo sapiens
  CDR3 for alpha chain variable domain of TCR clone 169977 (TRAV12-2, TRAJ53)
CAVNGGGGSNSKLTF

SEQ ID NO: 339954 - protein, 14 aa, Homo sapiens
  CDR3 for beta chain variable domain of TCR clone 169977 (TRBV7-2, TRBJ2-7)
CASSPKTSFYEQYF

SEQ ID NO: 339955 - protein, 15 aa, Homo sapiens
  CDR3 for alpha chain variable domain of TCR clone 169978 (TRAV3, TRAJ17)
CAVSPKEAPGKKLTF

SEQ ID NO: 339956 - protein, 12 aa, Homo sapiens
  CDR3 for beta chain variable domain of TCR clone 169978 (TRBV7-9, TRBJ1-6)
CASSLMTSPLHF

SEQ ID NO: 339957 - protein, 11 aa, Homo sapiens
  CDR3 for alpha chain variable domain of TCR clone 169979 (TRAV26-1, TRAJ37)
CIVRVGRKLIF

SEQ ID NO: 339958 - protein, 14 aa, Homo sapiens
  CDR3 for beta chain variable domain of TCR clone 169979 (TRBV11-2, TRBJ2-7)
CASSSTGEGYEQYF

SEQ ID NO: 339959 - protein, 15 aa, Homo sapiens
  CDR3 for alpha chain variable domain of TCR clone 169980 (TRAV25, TRAJ41)
FAGPWNSNSGYALNF

SEQ ID NO: 339960 - protein, 13 aa, Homo sapiens
  CDR3 for beta chain variable domain of TCR clone 169980 (TRBV15, TRBJ1-1)
CATSRGIQARAFF

SEQ ID NO: 339961 - protein, 16 aa, Homo sapiens
  CDR3 for alpha chain variable domain of TCR clone 169981 (TRAV23/DV6, TRAJ9)
CTASIGGNTGGFKTIF

SEQ ID NO: 339962 - protein, 13 aa, Homo sapiens
  CDR3 for beta chain variable domain of TCR clone 169981 (TRBV12-4, TRBJ1-1)
CASSPGTGFEAFF

SEQ ID NO: 339963 - protein, 12 aa, Homo sapiens
  CDR3 for alpha chain variable domain of TCR clone 169982 (TRAV21, TRAJ6)
CAVKGGSYIHTF

SEQ ID NO: 339964 - protein, 13 aa, Homo sapiens
  CDR3 for beta chain variable domain of TCR clone 169982 (TRBV11-2, TRBJ1-1)
CASSFTENTGAFF

SEQ ID NO: 339965 - protein, 14 aa, Homo sapiens
  CDR3 for alpha chain variable domain of TCR clone 169983 (TRAV1-1, TRAJ27)
CAVIYNTNAGKSTF

SEQ ID NO: 339966 - protein, 15 aa, Homo sapiens
  CDR3 for beta chain variable domain of TCR clone 169983 (TRBV11-2, TRBJ1-2)
CASSLEGVQRNGYTF

SEQ ID NO: 339967 - protein, 13 aa, Homo sapiens
  CDR3 for alpha chain variable domain of TCR clone 169984 (TRAV16, TRAJ34)
CALSPYNTDKLIF

SEQ ID NO: 339968 - protein, 16 aa, Homo sapiens
  CDR3 for beta chain variable domain of TCR clone 169984 (TRBV11-2, TRBJ2-7)
CASSPLAGGPRYEQYF

SEQ ID NO: 339969 - protein, 14 aa, Homo sapiens
  CDR3 for alpha chain variable domain of TCR clone 169985 (TRAV29/DV5, TRAJ36)
CAARRKTGATNLFF

SEQ ID NO: 339970 - protein, 14 aa, Homo sapiens
  CDR3 for beta chain variable domain of TCR clone 169985 (TRBV19, TRBJ2-1)
CASPTFVLSGEQFF

SEQ ID NO: 339971 - protein, 16 aa, Homo sapiens
  CDR3 for alpha chain variable domain of TCR clone 169986 (TRAV30, TRAJ24)
CGTEIVDADSWGKFRF

SEQ ID NO: 339972 - protein, 14 aa, Homo sapiens
  CDR3 for beta chain variable domain of TCR clone 169986 (TRBV12-5, TRBJ2-5)
CAGGSRTHQETQYF

SEQ ID NO: 339973 - protein, 16 aa, Homo sapiens
  CDR3 for alpha chain variable domain of TCR clone 169987 (TRAV30, TRAJ24)
CGTEIVDADSCGKFQF

SEQ ID NO: 339974 - protein, 13 aa, Homo sapiens
  CDR3 for beta chain variable domain of TCR clone 169987 (TRBV7-3, TRBJ1-1)
CASSQDWGAEAFF

SEQ ID NO: 339975 - protein, 14 aa, Homo sapiens
  CDR3 for alpha chain variable domain of TCR clone 169988 (TRAV2, TRAJ37)
CVFDVTSNTGKLIF

SEQ ID NO: 339976 - protein, 15 aa, Homo sapiens
  CDR3 for beta chain variable domain of TCR clone 169988 (TRBV20-1, TRBJ1-1)
CSASRGVTGNTEAFF

SEQ ID NO: 339977 - protein, 11 aa, Homo sapiens
  CDR3 for alpha chain variable domain of TCR clone 169989 (TRAV12-2, TRAJ49)
CSLQGGNQFYF

SEQ ID NO: 339978 - protein, 14 aa, Homo sapiens
  CDR3 for beta chain variable domain of TCR clone 169989 (TRBV7-2, TRBJ2-7)
CASSPKTSFYEQYF

SEQ ID NO: 339979 - protein, 10 aa, Homo sapiens
  CDR3 for alpha chain variable domain of TCR clone 169990 (TRAV8-4, TRAJ43)
CAVSADDMRF

SEQ ID NO: 339980 - protein, 13 aa, Homo sapiens
  CDR3 for beta chain variable domain of TCR clone 169990 (TRBV12-4, TRBJ2-5)
CASSAGTEETQYF

SEQ ID NO: 339981 - protein, 11 aa, Homo sapiens
  CDR3 for alpha chain variable domain of TCR clone 169991 (TRAV12-1, TRAJ21)
CVVNNFNKFYF

SEQ ID NO: 339982 - protein, 14 aa, Homo sapiens
  CDR3 for beta chain variable domain of TCR clone 169991 (TRBV4-3, TRBJ1-1)
CASSQGWTPARAFF

SEQ ID NO: 339983 - protein, 13 aa, Homo sapiens
  CDR3 for alpha chain variable domain of TCR clone 169992 (TRAV21, TRAJ20)
CAVGLRVDYKLSF

SEQ ID NO: 339984 - protein, 15 aa, Homo sapiens
  CDR3 for beta chain variable domain of TCR clone 169992 (TRBV2, TRBJ2-2)
CASSRETVGTGELFF

SEQ ID NO: 339985 - protein, 14 aa, Homo sapiens
  CDR3 for alpha chain variable domain of TCR clone 169993 (TRAV1-2, TRAJ16)
CAVNRFSDGQKLLF

SEQ ID NO: 339986 - protein, 15 aa, Homo sapiens
  CDR3 for beta chain variable domain of TCR clone 169993 (TRBV19, TRBJ1-5)
CASSIVWADNQAQHF

SEQ ID NO: 339987 - protein, 14 aa, Homo sapiens
  CDR3 for alpha chain variable domain of TCR clone 169994 (TRAV8-4, TRAJ27)
CAVSKGTNAGKSTF

SEQ ID NO: 339988 - protein, 16 aa, Homo sapiens
  CDR3 for beta chain variable domain of TCR clone 169994 (TRBV2, TRBJ2-7)
CASSSTRRGSSYEQYL

SEQ ID NO: 339989 - protein, 14 aa, Homo sapiens
  CDR3 for alpha chain variable domain of TCR clone 169995 (TRAV12-3, TRAJ10)
SHLPLTGGGNKLTF

SEQ ID NO: 339990 - protein, 15 aa, Homo sapiens
  CDR3 for beta chain variable domain of TCR clone 169995 (TRBV4-1, TRBJ1-4)
CACSDTGGTNEKLFF

SEQ ID NO: 339991 - protein, 13 aa, Homo sapiens
  CDR3 for alpha chain variable domain of TCR clone 169996 (TRAV8-3, TRAJ36)
CAFGATGANNLFF

SEQ ID NO: 339992 - protein, 13 aa, Homo sapiens
  CDR3 for beta chain variable domain of TCR clone 169996 (TRBV12-4, TRBJ1-2)
CASSLRQGKGYTF

SEQ ID NO: 339993 - protein, 13 aa, Homo sapiens
  CDR3 for alpha chain variable domain of TCR clone 169997 (TRAV8-6, TRAJ5)
CAVLDTGRRALTF

SEQ ID NO: 339994 - protein, 18 aa, Homo sapiens
  CDR3 for beta chain variable domain of TCR clone 169997 (TRBV20-1, TRBJ2-6)
CSAETTPTHGSGANVLTF

SEQ ID NO: 339995 - protein, 14 aa, Homo sapiens
  CDR3 for alpha chain variable domain of TCR clone 169998 (TRAV8-4, TRAJ34)
CAVSDPGDTDKLIF

SEQ ID NO: 339996 - protein, 16 aa, Homo sapiens
  CDR3 for beta chain variable domain of TCR clone 169998 (TRBV7-9, TRBJ2-2)
CASSGFGGANTGELFF

SEQ ID NO: 339997 - protein, 13 aa, Homo sapiens
  CDR3 for alpha chain variable domain of TCR clone 169999 (TRAV3, TRAJ13)
CAVRDGGYQKVTF

SEQ ID NO: 339998 - protein, 14 aa, Homo sapiens
  CDR3 for beta chain variable domain of TCR clone 169999 (TRBV15, TRBJ2-2)
CATSSGWNTGGLFF

SEQ ID NO: 339999 - protein, 15 aa, Homo sapiens
  CDR3 for alpha chain variable domain of TCR clone 170000 (TRAV26-1, TRAJ22)
CIVRVSFWFCKATDL

SEQ ID NO: 340000 - protein, 13 aa, Homo sapiens
  CDR3 for beta chain variable domain of TCR clone 170000 (TRBV12-4, TRBJ2-2)
CASSITGSGELFF

SEQ ID NO: 340001 - protein, 15 aa, Homo sapiens
  CDR3 for alpha chain variable domain of TCR clone 170001 (TRAV21, TRAJ53)
CATLNSGGSNYTLTF

SEQ ID NO: 340002 - protein, 13 aa, Homo sapiens
  CDR3 for beta chain variable domain of TCR clone 170001 (TRBV12-4, TRBJ2-7)
CASSFVPTAEQYF

SEQ ID NO: 340003 - protein, 12 aa, Homo sapiens
  CDR3 for alpha chain variable domain of TCR clone 170002 (TRAV27, TRAJ9)
CEGESGGFETIF

SEQ ID NO: 340004 - protein, 18 aa, Homo sapiens
  CDR3 for beta chain variable domain of TCR clone 170002 (TRBV10-2, TRBJ2-2)
CISAPAVHRQADAGELFF

SEQ ID NO: 340005 - protein, 15 aa, Homo sapiens
  CDR3 for alpha chain variable domain of TCR clone 170003 (TRAV12-1, TRAJ9)
CVVSFGDTGGFKSIF

SEQ ID NO: 340006 - protein, 15 aa, Homo sapiens
  CDR3 for beta chain variable domain of TCR clone 170003 (TRBV20-1, TRBJ2-7)
CSARDRVYGMDEQYF

SEQ ID NO: 340007 - protein, 14 aa, Homo sapiens
  CDR3 for alpha chain variable domain of TCR clone 170004 (TRAV12-1, TRAJ17)
CVVNYKAAGNKLTF

SEQ ID NO: 340008 - protein, 14 aa, Homo sapiens
  CDR3 for beta chain variable domain of TCR clone 170004 (TRBV13, TRBJ2-5)
CASSLGPRGETQYF

SEQ ID NO: 340009 - protein, 17 aa, Homo sapiens
  CDR3 for alpha chain variable domain of TCR clone 170005 (TRAV12-2, TRAJ36)
CAVKDNLFFGTGTRLTV

SEQ ID NO: 340010 - protein, 13 aa, Homo sapiens
  CDR3 for beta chain variable domain of TCR clone 170005 (TRBV4-1, TRBJ2-7)
CASSWTGGYEQYF

SEQ ID NO: 340011 - protein, 14 aa, Homo sapiens
  CDR3 for alpha chain variable domain of TCR clone 170006 (TRAV12-1, TRAJ30)
CVVNIGGRDDKIIF

SEQ ID NO: 340012 - protein, 13 aa, Homo sapiens
  CDR3 for beta chain variable domain of TCR clone 170006 (TRBV12-5, TRBJ2-1)
CASGWGRGNERFL

SEQ ID NO: 340013 - protein, 10 aa, Homo sapiens
  CDR3 for alpha chain variable domain of TCR clone 170007 (TRAV26-1, TRAJ22)
RSGSARQLTF

SEQ ID NO: 340014 - protein, 13 aa, Homo sapiens
  CDR3 for beta chain variable domain of TCR clone 170007 (TRBV7-9, TRBJ1-2)
CASSLKQTYGYTF

SEQ ID NO: 340015 - protein, 19 aa, Homo sapiens
  CDR3 for alpha chain variable domain of TCR clone 170008 (TRAV26-2, TRAJ52)
CTLRTGFNAGGTSYGKLTF

SEQ ID NO: 340016 - protein, 17 aa, Homo sapiens
  CDR3 for beta chain variable domain of TCR clone 170008 (TRBV4-1, TRBJ2-3)
CASSQDMAGGPVDTQYF

SEQ ID NO: 340017 - protein, 17 aa, Homo sapiens
  CDR3 for alpha chain variable domain of TCR clone 170009 (TRAV26-2, TRAJ42)
CILRDVGYGGSQGNLIF

SEQ ID NO: 340018 - protein, 17 aa, Homo sapiens
  CDR3 for beta chain variable domain of TCR clone 170009 (TRBV3-1, TRBJ2-2)
CASSQFRDKVDTGELFF

SEQ ID NO: 340019 - protein, 11 aa, Homo sapiens
  CDR3 for alpha chain variable domain of TCR clone 170010 (TRAV26-1, TRAJ37)
CIVRVGRKLIF

SEQ ID NO: 340020 - protein, 15 aa, Homo sapiens
  CDR3 for beta chain variable domain of TCR clone 170010 (TRBV19, TRBJ2-7)
CASSIVLAVSYEQYF

SEQ ID NO: 340021 - protein, 14 aa, Homo sapiens
  CDR3 for alpha chain variable domain of TCR clone 170011 (TRAV26-1, TRAJ45)
CIEVTGGGADGLTF

SEQ ID NO: 340022 - protein, 15 aa, Homo sapiens
  CDR3 for beta chain variable domain of TCR clone 170011 (TRBV20-1, TRBJ2-1)
CSASSAGSSYNEQFF

SEQ ID NO: 340023 - protein, 13 aa, Homo sapiens
  CDR3 for alpha chain variable domain of TCR clone 170012 (TRAV26-2, TRAJ43)
CILRAVNNNDMRF

SEQ ID NO: 340024 - protein, 14 aa, Homo sapiens
  CDR3 for beta chain variable domain of TCR clone 170012 (TRBV7-2, TRBJ2-7)
CASSPKTSSYEQYF

SEQ ID NO: 340025 - protein, 18 aa, Homo sapiens
  CDR3 for alpha chain variable domain of TCR clone 170013 (TRAV12-3, TRAJ52)
CAMSALNAGGTSYGKLTF

SEQ ID NO: 340026 - protein, 15 aa, Homo sapiens
  CDR3 for beta chain variable domain of TCR clone 170013 (TRBV6-3, TRBJ2-7)
CASSSPGTVFYEQYF

SEQ ID NO: 340027 - protein, 14 aa, Homo sapiens
  CDR3 for alpha chain variable domain of TCR clone 170014 (TRAV26-1, TRAJ45)
CIEVTGGCADGLTF

SEQ ID NO: 340028 - protein, 15 aa, Homo sapiens
  CDR3 for beta chain variable domain of TCR clone 170014 (TRBV27, TRBJ2-1)
CASSNGGGSSNEQFF

SEQ ID NO: 340029 - protein, 15 aa, Homo sapiens
  CDR3 for alpha chain variable domain of TCR clone 170015 (TRAV21, TRAJ53)
CAPLNSGGSHYKLTF

SEQ ID NO: 340030 - protein, 16 aa, Homo sapiens
  CDR3 for beta chain variable domain of TCR clone 170015 (TRBV9, TRBJ2-1)
CASSVGGGGNYNEQFF

SEQ ID NO: 340031 - protein, 17 aa, Homo sapiens
  CDR3 for alpha chain variable domain of TCR clone 170016 (TRAV4, TRAJ13)
CIVGVQGSSVGYQKVTF

SEQ ID NO: 340032 - protein, 18 aa, Homo sapiens
  CDR3 for beta chain variable domain of TCR clone 170016 (TRBV15, TRBJ2-3)
CATSRDGARSWDTDTQYF

SEQ ID NO: 340033 - protein, 14 aa, Homo sapiens
  CDR3 for alpha chain variable domain of TCR clone 170017 (TRAV13-1, TRAJ35)
CAASKGGFGNVLHC

SEQ ID NO: 340034 - protein, 17 aa, Homo sapiens
  CDR3 for beta chain variable domain of TCR clone 170017 (TRBV28, TRBJ2-3)
CASSPTPAGGRVDTQYF

SEQ ID NO: 340035 - protein, 13 aa, Homo sapiens
  CDR3 for alpha chain variable domain of TCR clone 170018 (TRAV13-1, TRAJ43)
CAASIPNNNDMRF

SEQ ID NO: 340036 - protein, 14 aa, Homo sapiens
  CDR3 for beta chain variable domain of TCR clone 170018 (TRBV7-9, TRBJ1-1)
CASTPLQSYTEAFF

SEQ ID NO: 340037 - protein, 16 aa, Homo sapiens
  CDR3 for alpha chain variable domain of TCR clone 170019 (TRAV38-1, TRAJ56)
CAFMKRQTGANSKLTF

SEQ ID NO: 340038 - protein, 14 aa, Homo sapiens
  CDR3 for beta chain variable domain of TCR clone 170019 (TRBV4-2, TRBJ2-1)
CASGLDRAYNEQFF

SEQ ID NO: 340039 - protein, 14 aa, Homo sapiens
  CDR3 for alpha chain variable domain of TCR clone 170020 (TRAV24, TRAJ42)
WAQNYGGSQGNLIF

SEQ ID NO: 340040 - protein, 14 aa, Homo sapiens
  CDR3 for beta chain variable domain of TCR clone 170020 (TRBV7-8, TRBJ2-7)
CASSPRDRVYEQYF

SEQ ID NO: 340041 - protein, 18 aa, Homo sapiens
  CDR3 for alpha chain variable domain of TCR clone 170021 (TRAV13-1, TRAJ52)
CAASKRRAGGTSYGKLTF

SEQ ID NO: 340042 - protein, 13 aa, Homo sapiens
  CDR3 for beta chain variable domain of TCR clone 170021 (TRBV12-4, TRBJ1-2)
CASSLRQGKGYAF

SEQ ID NO: 340043 - protein, 13 aa, Homo sapiens
  CDR3 for alpha chain variable domain of TCR clone 170022 (TRAV27, TRAJ56)
CAGKPGANSKLTF

SEQ ID NO: 340044 - protein, 15 aa, Homo sapiens
  CDR3 for beta chain variable domain of TCR clone 170022 (TRBV6-1, TRBJ2-2)
CASSRLRGDTGELFF

SEQ ID NO: 340045 - protein, 16 aa, Homo sapiens
  CDR3 for alpha chain variable domain of TCR clone 170023 (TRAV30, TRAJ24)
CGTEIVDADSWGKFEV

SEQ ID NO: 340046 - protein, 14 aa, Homo sapiens
  CDR3 for beta chain variable domain of TCR clone 170023 (TRBV12-5, TRBJ2-5)
CASGSRTHQETQYF

SEQ ID NO: 340047 - protein, 11 aa, Homo sapiens
  CDR3 for alpha chain variable domain of TCR clone 170024 (TRAV12-1, TRAJ30)
CVVNGQDKIIF

SEQ ID NO: 340048 - protein, 14 aa, Homo sapiens
  CDR3 for beta chain variable domain of TCR clone 170024 (TRBV7-2, TRBJ2-7)
CASSLYPGRYEQYF

SEQ ID NO: 340049 - protein, 12 aa, Homo sapiens
  CDR3 for alpha chain variable domain of TCR clone 170025 (TRAV2, TRAJ34)
CAVERNTDQLIF

SEQ ID NO: 340050 - protein, 14 aa, Homo sapiens
  CDR3 for beta chain variable domain of TCR clone 170025 (TRBV7-9, TRBJ2-1)
CASSDNSGYNEQFF

SEQ ID NO: 340051 - protein, 12 aa, Homo sapiens
  CDR3 for alpha chain variable domain of TCR clone 170026 (TRAV13-1, TRAJ21)
CAAKVGFNKFYF

SEQ ID NO: 340052 - protein, 14 aa, Homo sapiens
  CDR3 for beta chain variable domain of TCR clone 170026 (TRBV18, TRBJ2-7)
CASSPRGGAYEQYF

SEQ ID NO: 340053 - protein, 14 aa, Homo sapiens
  CDR3 for alpha chain variable domain of TCR clone 170027 (TRAV13-1, TRAJ44)
CAALDTGTASKLTF

SEQ ID NO: 340054 - protein, 14 aa, Homo sapiens
  CDR3 for beta chain variable domain of TCR clone 170027 (TRBV4-1, TRBJ2-2)
CASSQAVNTGELFF

SEQ ID NO: 340055 - protein, 14 aa, Homo sapiens
  CDR3 for alpha chain variable domain of TCR clone 170028 (TRAV13-1, TRAJ35)
CVASKGGFGNVLHC

SEQ ID NO: 340056 - protein, 13 aa, Homo sapiens
  CDR3 for beta chain variable domain of TCR clone 170028 (TRBV7-3, TRBJ1-1)
CASSQDWGAEAFF

SEQ ID NO: 340057 - protein, 14 aa, Homo sapiens
  CDR3 for alpha chain variable domain of TCR clone 170029 (TRAV26-1, TRAJ21)
CIVRPPYNFNKFYF

SEQ ID NO: 340058 - protein, 12 aa, Homo sapiens
  CDR3 for beta chain variable domain of TCR clone 170029 (TRBV11-2, TRBJ2-2)
CASSLGGGELFF

SEQ ID NO: 340059 - protein, 11 aa, Homo sapiens
  CDR3 for alpha chain variable domain of TCR clone 170030 (TRAV4, TRAJ31)
CLVGDNARLMF

SEQ ID NO: 340060 - protein, 16 aa, Homo sapiens
  CDR3 for beta chain variable domain of TCR clone 170030 (TRBV7-3, TRBJ2-2)
CASSLKRGTLSGELFF

SEQ ID NO: 340061 - protein, 13 aa, Homo sapiens
  CDR3 for alpha chain variable domain of TCR clone 170031 (TRAV13-1, TRAJ39)
CSKYSNAGNMLTF

SEQ ID NO: 340062 - protein, 11 aa, Homo sapiens
  CDR3 for beta chain variable domain of TCR clone 170031 (TRBV7-8, TRBJ2-7)
CASSLSLEQYF

SEQ ID NO: 340063 - protein, 16 aa, Homo sapiens
  CDR3 for alpha chain variable domain of TCR clone 170032 (TRAV30, TRAJ24)
CGTEIVDADSCGKFQF

SEQ ID NO: 340064 - protein, 17 aa, Homo sapiens
  CDR3 for beta chain variable domain of TCR clone 170032 (TRBV20-1, TRBJ2-1)
CSAPPRPAGTRYNEQFF

SEQ ID NO: 340065 - protein, 12 aa, Homo sapiens
  CDR3 for alpha chain variable domain of TCR clone 170033 (TRAV13-1, TRAJ21)
CTAKEGFNKFYF

SEQ ID NO: 340066 - protein, 17 aa, Homo sapiens
  CDR3 for beta chain variable domain of TCR clone 170033 (TRBV20-1, TRBJ2-1)
CSASSSGLAGSYNEQFF

SEQ ID NO: 340067 - protein, 16 aa, Homo sapiens
  CDR3 for alpha chain variable domain of TCR clone 170034 (TRAV35, TRAJ37)
CWAFLRGSSNTGKLIF

SEQ ID NO: 340068 - protein, 10 aa, Homo sapiens
  CDR3 for beta chain variable domain of TCR clone 170034 (TRBV2, TRBJ1-2)
CASSVRGNYA

SEQ ID NO: 340069 - protein, 13 aa, Homo sapiens
  CDR3 for alpha chain variable domain of TCR clone 170035 (TRAV1-2, TRAJ12)
CAVSMDSSYKLIF

SEQ ID NO: 340070 - protein, 14 aa, Homo sapiens
  CDR3 for beta chain variable domain of TCR clone 170035 (TRBV18, TRBJ2-5)
CASSPPGHQETQYF

SEQ ID NO: 340071 - protein, 16 aa, Homo sapiens
  CDR3 for alpha chain variable domain of TCR clone 170036 (TRAV21, TRAJ52)
CAVTNAGGTSYGKLTF

SEQ ID NO: 340072 - protein, 16 aa, Homo sapiens
  CDR3 for beta chain variable domain of TCR clone 170036 (TRBV6-6, TRBJ2-5)
CASSYDWAGGSETQYF

SEQ ID NO: 340073 - protein, 14 aa, Homo sapiens
  CDR3 for alpha chain variable domain of TCR clone 170037 (TRAV35, TRAJ33)
CAGSSQDSNYQLSG

SEQ ID NO: 340074 - protein, 15 aa, Homo sapiens
  CDR3 for beta chain variable domain of TCR clone 170037 (TRBV20-1, TRBJ2-7)
CSAESGTSGAYEQYF

SEQ ID NO: 340075 - protein, 14 aa, Homo sapiens
  CDR3 for alpha chain variable domain of TCR clone 170038 (TRAV12-3, TRAJ35)
CAMSLIGFGNVLHC

SEQ ID NO: 340076 - protein, 15 aa, Homo sapiens
  CDR3 for beta chain variable domain of TCR clone 170038 (TRBV7-6, TRBJ1-6)
CASSLQARFNSPLHF

SEQ ID NO: 340077 - protein, 13 aa, Homo sapiens
  CDR3 for alpha chain variable domain of TCR clone 170039 (TRAV8-3, TRAJ44)
CAVVPGPASKLTF

SEQ ID NO: 340078 - protein, 13 aa, Homo sapiens
  CDR3 for beta chain variable domain of TCR clone 170039 (TRBV10-3, TRBJ1-2)
CAISERDSYGYTF

SEQ ID NO: 340079 - protein, 12 aa, Homo sapiens
  CDR3 for alpha chain variable domain of TCR clone 170040 (TRAV26-2, TRAJ21)
CILKGNFNKFYF

SEQ ID NO: 340080 - protein, 14 aa, Homo sapiens
  CDR3 for beta chain variable domain of TCR clone 170040 (TRBV12-4, TRBJ1-1)
CASSLGTGGTEAFF

SEQ ID NO: 340081 - protein, 18 aa, Homo sapiens
  CDR3 for alpha chain variable domain of TCR clone 170041 (TRAV21, TRAJ52)
CAVRPSPAGGASSGKLTF

SEQ ID NO: 340082 - protein, 11 aa, Homo sapiens
  CDR3 for beta chain variable domain of TCR clone 170041 (TRBV11-2, TRBJ2-2)
CASSLPGELFF

SEQ ID NO: 340083 - protein, 14 aa, Homo sapiens
  CDR3 for alpha chain variable domain of TCR clone 170042 (TRAV12-3, TRAJ56)
CAMSVTGANSKLSF

SEQ ID NO: 340084 - protein, 17 aa, Homo sapiens
  CDR3 for beta chain variable domain of TCR clone 170042 (TRBV20-1, TRBJ2-3)
CSASLLGRGGSADTQYF

SEQ ID NO: 340085 - protein, 10 aa, Homo sapiens
  CDR3 for alpha chain variable domain of TCR clone 170043 (TRAV23/DV6, TRAJ31)
CARGGSRPMF

SEQ ID NO: 340086 - protein, 14 aa, Homo sapiens
  CDR3 for beta chain variable domain of TCR clone 170043 (TRBV7-8, TRBJ1-2)
CASSPDSLSYGYTF

SEQ ID NO: 340087 - protein, 14 aa, Homo sapiens
  CDR3 for alpha chain variable domain of TCR clone 170044 (TRAV9-2, TRAJ39)
CALYIYNAGNMLTF

SEQ ID NO: 340088 - protein, 17 aa, Homo sapiens
  CDR3 for beta chain variable domain of TCR clone 170044 (TRBV2, TRBJ2-1)
CASSRNSLLAGGDEQFF

SEQ ID NO: 340089 - protein, 15 aa, Homo sapiens
  CDR3 for alpha chain variable domain of TCR clone 170045 (TRAV21, TRAJ10)
CAVPLLTGGGNKLTF

SEQ ID NO: 340090 - protein, 14 aa, Homo sapiens
  CDR3 for beta chain variable domain of TCR clone 170045 (TRBV12-4, TRBJ1-1)
CASSLGTGGTQAFF

SEQ ID NO: 340091 - protein, 16 aa, Homo sapiens
  CDR3 for alpha chain variable domain of TCR clone 170046 (TRAV26-1, TRAJ23)
CIVRVERYNQGGKLIF

SEQ ID NO: 340092 - protein, 15 aa, Homo sapiens
  CDR3 for beta chain variable domain of TCR clone 170046 (TRBV18, TRBJ2-7)
CASSPRGGKGYEQYC

SEQ ID NO: 340093 - protein, 13 aa, Homo sapiens
  CDR3 for alpha chain variable domain of TCR clone 170047 (TRAV8-3, TRAJ4)
WVFYSGGYNKLIF

SEQ ID NO: 340094 - protein, 23 aa, Homo sapiens
  CDR3 for beta chain variable domain of TCR clone 170047 (TRBV7-8, TRBJ2-3)
RRTPPCISVPAAPRDRETDTQYF

SEQ ID NO: 340095 - protein, 15 aa, Homo sapiens
  CDR3 for alpha chain variable domain of TCR clone 170048 (TRAV12-1, TRAJ44)
CVVDTPQGTASNLTF

SEQ ID NO: 340096 - protein, 13 aa, Homo sapiens
  CDR3 for beta chain variable domain of TCR clone 170048 (TRBV27, TRBJ2-1)
CASSSGSYNEQYF

SEQ ID NO: 340097 - protein, 12 aa, Homo sapiens
  CDR3 for alpha chain variable domain of TCR clone 170049 (TRAV12-2, TRAJ53)
TGGGGSNYKLTF

SEQ ID NO: 340098 - protein, 13 aa, Homo sapiens
  CDR3 for beta chain variable domain of TCR clone 170049 (TRBV3-1, TRBJ1-1)
CASSPGVITEAFF

SEQ ID NO: 340099 - protein, 14 aa, Homo sapiens
  CDR3 for alpha chain variable domain of TCR clone 170050 (TRAV1-2, TRAJ16)
CAVNRFSDGQKLLF

SEQ ID NO: 340100 - protein, 14 aa, Homo sapiens
  CDR3 for beta chain variable domain of TCR clone 170050 (TRBV3-1, TRBJ2-5)
CASSQAVRQETQYF

SEQ ID NO: 340101 - protein, 12 aa, Homo sapiens
  CDR3 for alpha chain variable domain of TCR clone 170051 (TRAV4, TRAJ26)
CLVGDYGQNFVF

SEQ ID NO: 340102 - protein, 18 aa, Homo sapiens
  CDR3 for beta chain variable domain of TCR clone 170051 (TRBV10-3, TRBJ2-3)
CAISESRVGPMRGDTQYF

SEQ ID NO: 340103 - protein, 15 aa, Homo sapiens
  CDR3 for alpha chain variable domain of TCR clone 170052 (TRAV12-3, TRAJ53)
CNEPGSGGSNYKLPF

SEQ ID NO: 340104 - protein, 13 aa, Homo sapiens
  CDR3 for beta chain variable domain of TCR clone 170052 (TRBV10-3, TRBJ2-7)
CASKLAVNYEQYF

SEQ ID NO: 340105 - protein, 13 aa, Homo sapiens
  CDR3 for alpha chain variable domain of TCR clone 170053 (TRAV13-1, TRAJ40)
CASMTSGTYKYIF

SEQ ID NO: 340106 - protein, 15 aa, Homo sapiens
  CDR3 for beta chain variable domain of TCR clone 170053 (TRBV7-3, TRBJ2-1)
CASSPTGGGEVEQFF

SEQ ID NO: 340107 - protein, 16 aa, Homo sapiens
  CDR3 for alpha chain variable domain of TCR clone 170054 (TRAV3, TRAJ21)
CAVRDIERGNFNKFFF

SEQ ID NO: 340108 - protein, 12 aa, Homo sapiens
  CDR3 for beta chain variable domain of TCR clone 170054 (TRBV11-2, TRBJ2-1)
CASSPGNNEQFF

SEQ ID NO: 340109 - protein, 12 aa, Homo sapiens
  CDR3 for alpha chain variable domain of TCR clone 170055 (TRAV27, TRAJ35)
CAGADFGNVLHC

SEQ ID NO: 340110 - protein, 12 aa, Homo sapiens
  CDR3 for beta chain variable domain of TCR clone 170055 (TRBV5-5, TRBJ2-5)
CASSYFGETQYF

SEQ ID NO: 340111 - protein, 14 aa, Homo sapiens
  CDR3 for alpha chain variable domain of TCR clone 170056 (TRAV1-2, TRAJ8)
CAVREDTGFQKLAF

SEQ ID NO: 340112 - protein, 16 aa, Homo sapiens
  CDR3 for beta chain variable domain of TCR clone 170056 (TRBV19, TRBJ2-1)
CASSKAGPSSYNEQFF

SEQ ID NO: 340113 - protein, 14 aa, Homo sapiens
  CDR3 for alpha chain variable domain of TCR clone 170057 (TRAV16, TRAJ42)
CALLAGGSHGNLIF

SEQ ID NO: 340114 - protein, 13 aa, Homo sapiens
  CDR3 for beta chain variable domain of TCR clone 170057 (TRBV7-9, TRBJ1-2)
CASSLKQNYGYTF

SEQ ID NO: 340115 - protein, 13 aa, Homo sapiens
  CDR3 for alpha chain variable domain of TCR clone 170058 (TRAV26-2, TRAJ43)
FILRAVNNNDMRF

SEQ ID NO: 340116 - protein, 15 aa, Homo sapiens
  CDR3 for beta chain variable domain of TCR clone 170058 (TRBV7-2, TRBJ2-1)
CASTHGTGIYNEQFF

SEQ ID NO: 340117 - protein, 13 aa, Homo sapiens
  CDR3 for alpha chain variable domain of TCR clone 170059 (TRAV2, TRAJ15)
CAVEAQAGTALIF

SEQ ID NO: 340118 - protein, 11 aa, Homo sapiens
  CDR3 for beta chain variable domain of TCR clone 170059 (TRBV29-1, TRBJ2-5)
CSEDRTGTQYF

SEQ ID NO: 340119 - protein, 12 aa, Homo sapiens
  CDR3 for alpha chain variable domain of TCR clone 170060 (TRAV23/DV6, TRAJ17)
CARGSCRQQANF

SEQ ID NO: 340120 - protein, 14 aa, Homo sapiens
  CDR3 for beta chain variable domain of TCR clone 170060 (TRBV12-5, TRBJ2-5)
CASGSRTHQETQYF

SEQ ID NO: 340121 - protein, 12 aa, Homo sapiens
  CDR3 for alpha chain variable domain of TCR clone 170061 (TRAV12-3, TRAJ20)
CAMVRGDYKLSF

SEQ ID NO: 340122 - protein, 14 aa, Homo sapiens
  CDR3 for beta chain variable domain of TCR clone 170061 (TRBV5-5, TRBJ1-5)
CASSGQGADKPQHF

SEQ ID NO: 340123 - protein, 14 aa, Homo sapiens
  CDR3 for alpha chain variable domain of TCR clone 170062 (TRAV12-2, TRAJ3)
CAVKGYSSASKIIF

SEQ ID NO: 340124 - protein, 14 aa, Homo sapiens
  CDR3 for beta chain variable domain of TCR clone 170062 (TRBV11-2, TRBJ2-5)
CASSRTGGIETQYF

SEQ ID NO: 340125 - protein, 14 aa, Homo sapiens
  CDR3 for alpha chain variable domain of TCR clone 170063 (TRAV16, TRAJ17)
CALSGRTAGNKLTF

SEQ ID NO: 340126 - protein, 15 aa, Homo sapiens
  CDR3 for beta chain variable domain of TCR clone 170063 (TRBV3-1, TRBJ1-2)
CASSPTRLPEGGDTF

SEQ ID NO: 340127 - protein, 15 aa, Homo sapiens
  CDR3 for alpha chain variable domain of TCR clone 170064 (TRAV1-2, TRAJ10)
CAVRGFTGGGNKLTF

SEQ ID NO: 340128 - protein, 13 aa, Homo sapiens
  CDR3 for beta chain variable domain of TCR clone 170064 (TRBV7-9, TRBJ1-2)
CASSLKQNYGYTF

SEQ ID NO: 340129 - protein, 16 aa, Homo sapiens
  CDR3 for alpha chain variable domain of TCR clone 170065 (TRAV30, TRAJ24)
CGTEIVDADSWGKFQF

SEQ ID NO: 340130 - protein, 13 aa, Homo sapiens
  CDR3 for beta chain variable domain of TCR clone 170065 (TRBV3-1, TRBJ1-1)
CASSQLQGAEAFF

SEQ ID NO: 340131 - protein, 14 aa, Homo sapiens
  CDR3 for alpha chain variable domain of TCR clone 170066 (TRAV26-1, TRAJ38)
CIADKAGNNRKLIW

SEQ ID NO: 340132 - protein, 17 aa, Homo sapiens
  CDR3 for beta chain variable domain of TCR clone 170066 (TRBV20-1, TRBJ2-2)
CSASGSGQGGLTGELFF

SEQ ID NO: 340133 - protein, 15 aa, Homo sapiens
  CDR3 for alpha chain variable domain of TCR clone 170067 (TRAV35, TRAJ58)
CAGRRQETSGSRLTF

SEQ ID NO: 340134 - protein, 16 aa, Homo sapiens
  CDR3 for beta chain variable domain of TCR clone 170067 (TRBV12-4, TRBJ2-5)
CASSFFVRGRQETQYF

SEQ ID NO: 340135 - protein, 17 aa, Homo sapiens
  CDR3 for alpha chain variable domain of TCR clone 170068 (TRAV3, TRAJ38)
CAERDCLNAGNNRKLIW

SEQ ID NO: 340136 - protein, 16 aa, Homo sapiens
  CDR3 for beta chain variable domain of TCR clone 170068 (TRBV20-1, TRBJ1-4)
CSAPGQGLLTNEKLFF

SEQ ID NO: 340137 - protein, 14 aa, Homo sapiens
  CDR3 for alpha chain variable domain of TCR clone 170069 (TRAV2, TRAJ37)
CAVDFTSNTSKLIF

SEQ ID NO: 340138 - protein, 15 aa, Homo sapiens
  CDR3 for beta chain variable domain of TCR clone 170069 (TRBV20-1, TRBJ1-1)
CSASRVVTGNTEAFF

SEQ ID NO: 340139 - protein, 14 aa, Homo sapiens
  CDR3 for alpha chain variable domain of TCR clone 170070 (TRAV26-1, TRAJ38)
CIADNAGNNRKLIW

SEQ ID NO: 340140 - protein, 13 aa, Homo sapiens
  CDR3 for beta chain variable domain of TCR clone 170070 (TRBV7-9, TRBJ1-2)
CAGSLKQNYGYTF

SEQ ID NO: 340141 - protein, 15 aa, Homo sapiens
  CDR3 for alpha chain variable domain of TCR clone 170071 (TRAV26-1, TRAJ22)
CIVRVSFWFCKATDL

SEQ ID NO: 340142 - protein, 17 aa, Homo sapiens
  CDR3 for beta chain variable domain of TCR clone 170071 (TRBV28, TRBJ2-1)
CASSSARQALTYNEQFF

SEQ ID NO: 340143 - protein, 12 aa, Homo sapiens
  CDR3 for alpha chain variable domain of TCR clone 170072 (TRAV12-1, TRAJ50)
CVGRTSYDKVIF

SEQ ID NO: 340144 - protein, 12 aa, Homo sapiens
  CDR3 for beta chain variable domain of TCR clone 170072 (TRBV5-7, TRBJ1-1)
CASSLVGTEAFC

SEQ ID NO: 340145 - protein, 15 aa, Homo sapiens
  CDR3 for alpha chain variable domain of TCR clone 170073 (TRAV8-6, TRAJ10)
CAVSDQAGGGNKLTF

SEQ ID NO: 340146 - protein, 15 aa, Homo sapiens
  CDR3 for beta chain variable domain of TCR clone 170073 (TRBV3-1, TRBJ2-5)
CASSAELGGPETQYF

SEQ ID NO: 340147 - protein, 17 aa, Homo sapiens
  CDR3 for alpha chain variable domain of TCR clone 170074 (TRAV3, TRAJ42)
CGVRDRDYGGSQGNLIF

SEQ ID NO: 340148 - protein, 18 aa, Homo sapiens
  CDR3 for beta chain variable domain of TCR clone 170074 (TRBV20-1, TRBJ2-3)
CSASGLAGGPGTTDTQYF

SEQ ID NO: 340149 - protein, 14 aa, Homo sapiens
  CDR3 for alpha chain variable domain of TCR clone 170075 (TRAV2, TRAJ42)
CAVVGGGSQGNLIF

SEQ ID NO: 340150 - protein, 12 aa, Homo sapiens
  CDR3 for beta chain variable domain of TCR clone 170075 (TRBV7-9, TRBJ2-7)
CASSIKREEQYF

SEQ ID NO: 340151 - protein, 15 aa, Homo sapiens
  CDR3 for alpha chain variable domain of TCR clone 170076 (TRAV8-3, TRAJ45)
CASSYSGGGADGLTF

SEQ ID NO: 340152 - protein, 12 aa, Homo sapiens
  CDR3 for beta chain variable domain of TCR clone 170076 (TRBV3-1, TRBJ2-2)
CASSLFPGELFF

SEQ ID NO: 340153 - protein, 14 aa, Homo sapiens
  CDR3 for alpha chain variable domain of TCR clone 170077 (TRAV26-2, TRAJ36)
CILRDWGKQPLLWD

SEQ ID NO: 340154 - protein, 13 aa, Homo sapiens
  CDR3 for beta chain variable domain of TCR clone 170077 (TRBV10-3, TRBJ2-7)
CASKLAVNYEQYF

SEQ ID NO: 340155 - protein, 13 aa, Homo sapiens
  CDR3 for alpha chain variable domain of TCR clone 170078 (TRAV38-2/DV8, TRAJ34)
CAYRTWNTDKLIF

SEQ ID NO: 340156 - protein, 17 aa, Homo sapiens
  CDR3 for beta chain variable domain of TCR clone 170078 (TRBV28, TRBJ2-5)
CASSTPEGDALQETQYF

SEQ ID NO: 340157 - protein, 13 aa, Homo sapiens
  CDR3 for alpha chain variable domain of TCR clone 170079 (TRAV12-3, TRAJ54)
CALVPQGAQKLVF

SEQ ID NO: 340158 - protein, 17 aa, Homo sapiens
  CDR3 for beta chain variable domain of TCR clone 170079 (TRBV4-1, TRBJ2-3)
CASSQGYVSGGTDTQYF

SEQ ID NO: 340159 - protein, 15 aa, Homo sapiens
  CDR3 for alpha chain variable domain of TCR clone 170080 (TRAV8-6, TRAJ10)
CAVSDQAGGGNKLTF

SEQ ID NO: 340160 - protein, 16 aa, Homo sapiens
  CDR3 for beta chain variable domain of TCR clone 170080 (TRBV7-6, TRBJ1-6)
CASSLSSRIGDSPLHF

SEQ ID NO: 340161 - protein, 14 aa, Homo sapiens
  CDR3 for alpha chain variable domain of TCR clone 170081 (TRAV17, TRAJ6)
CATDASGGSYIPTF

SEQ ID NO: 340162 - protein, 16 aa, Homo sapiens
  CDR3 for beta chain variable domain of TCR clone 170081 (TRBV6-6, TRBJ1-5)
CASSYSTLVGNQPQHF

SEQ ID NO: 340163 - protein, 14 aa, Homo sapiens
  CDR3 for alpha chain variable domain of TCR clone 170082 (TRAV12-2, TRAJ13)
CAVTKTGGYQKVTF

SEQ ID NO: 340164 - protein, 15 aa, Homo sapiens
  CDR3 for beta chain variable domain of TCR clone 170082 (TRBV27, TRBJ2-1)
CASSNGGGSANEQFF

SEQ ID NO: 340165 - protein, 14 aa, Homo sapiens
  CDR3 for alpha chain variable domain of TCR clone 170083 (TRAV38-2/DV8, TRAJ23)
CAYRSQNQGGKLIF

SEQ ID NO: 340166 - protein, 15 aa, Homo sapiens
  CDR3 for beta chain variable domain of TCR clone 170083 (TRBV7-2, TRBJ1-2)
CASSPRAGWNYGYTF

SEQ ID NO: 340167 - protein, 14 aa, Homo sapiens
  CDR3 for alpha chain variable domain of TCR clone 170084 (TRAV1-1, TRAJ27)
CAVIYNTDAGKSTF

SEQ ID NO: 340168 - protein, 15 aa, Homo sapiens
  CDR3 for beta chain variable domain of TCR clone 170084 (TRBV6-3, TRBJ2-7)
CASSSPGTVFYEQYF

SEQ ID NO: 340169 - protein, 13 aa, Homo sapiens
  CDR3 for alpha chain variable domain of TCR clone 170085 (TRAV29/DV5, TRAJ49)
CAASTNTGNQFYF

SEQ ID NO: 340170 - protein, 11 aa, Homo sapiens
  CDR3 for beta chain variable domain of TCR clone 170085 (TRBV6-1, TRBJ2-1)
CASISSNEQLF

SEQ ID NO: 340171 - protein, 12 aa, Homo sapiens
  CDR3 for alpha chain variable domain of TCR clone 170086 (TRAV12-3, TRAJ40)
CAMSSGTYKYIF

SEQ ID NO: 340172 - protein, 16 aa, Homo sapiens
  CDR3 for beta chain variable domain of TCR clone 170086 (TRBV7-9, TRBJ2-1)
CASSDVAGGSYNEQFF

SEQ ID NO: 340173 - protein, 12 aa, Homo sapiens
  CDR3 for alpha chain variable domain of TCR clone 170087 (TRAV12-3, TRAJ20)
CAMVRGDYKLSF

SEQ ID NO: 340174 - protein, 14 aa, Homo sapiens
  CDR3 for beta chain variable domain of TCR clone 170087 (TRBV20-1, TRBJ2-7)
RSAISREASYEQYF

SEQ ID NO: 340175 - protein, 13 aa, Homo sapiens
  CDR3 for alpha chain variable domain of TCR clone 170088 (TRAV25, TRAJ17)
CEGLRAAGNKLTF

SEQ ID NO: 340176 - protein, 15 aa, Homo sapiens
  CDR3 for beta chain variable domain of TCR clone 170088 (TRBV6-5, TRBJ1-1)
CASTLRLGSGTEAFF

SEQ ID NO: 340177 - protein, 14 aa, Homo sapiens
  CDR3 for alpha chain variable domain of TCR clone 170089 (TRAV36/DV7, TRAJ53)
CAVVDGGSNYKLTF

SEQ ID NO: 340178 - protein, 13 aa, Homo sapiens
  CDR3 for beta chain variable domain of TCR clone 170089 (TRBV7-9, TRBJ1-2)
CASSLKQNYGYTF

SEQ ID NO: 340179 - protein, 14 aa, Homo sapiens
  CDR3 for alpha chain variable domain of TCR clone 170090 (TRAV12-2, TRAJ17)
CAVLFKAAGNKLTF

SEQ ID NO: 340180 - protein, 14 aa, Homo sapiens
  CDR3 for beta chain variable domain of TCR clone 170090 (TRBV19, TRBJ2-1)
CARGARSFQWEQFF

SEQ ID NO: 340181 - protein, 13 aa, Homo sapiens
  CDR3 for alpha chain variable domain of TCR clone 170091 (TRAV16, TRAJ26)
CITVLGLGQNFVF

SEQ ID NO: 340182 - protein, 12 aa, Homo sapiens
  CDR3 for beta chain variable domain of TCR clone 170091 (TRBV11-2, TRBJ2-1)
CASSPGNNEQFF

SEQ ID NO: 340183 - protein, 13 aa, Homo sapiens
  CDR3 for alpha chain variable domain of TCR clone 170092 (TRAV8-1, TRAJ7)
CAVMPYGNNRLAF

SEQ ID NO: 340184 - protein, 12 aa, Homo sapiens
  CDR3 for beta chain variable domain of TCR clone 170092 (TRBV11-2, TRBJ2-2)
CASSLGGGELFF

SEQ ID NO: 340185 - protein, 13 aa, Homo sapiens
  CDR3 for alpha chain variable domain of TCR clone 170093 (TRAV13-1, TRAJ21)
CAASKYNFNKFYF

SEQ ID NO: 340186 - protein, 13 aa, Homo sapiens
  CDR3 for beta chain variable domain of TCR clone 170093 (TRBV27, TRBJ1-4)
CASSLMGDEKLFF

SEQ ID NO: 340187 - protein, 12 aa, Homo sapiens
  CDR3 for alpha chain variable domain of TCR clone 170094 (TRAV27, TRAJ35)
CAGADFGNVLHC

SEQ ID NO: 340188 - protein, 14 aa, Homo sapiens
  CDR3 for beta chain variable domain of TCR clone 170094 (TRBV18, TRBJ2-5)
CASSPGVSKETQYF

SEQ ID NO: 340189 - protein, 11 aa, Homo sapiens
  CDR3 for alpha chain variable domain of TCR clone 170095 (TRAV21, TRAJ4)
HVSGAYNKLIF

SEQ ID NO: 340190 - protein, 13 aa, Homo sapiens
  CDR3 for beta chain variable domain of TCR clone 170095 (TRBV7-3, TRBJ2-5)
CASSLTAGETQYF

SEQ ID NO: 340191 - protein, 15 aa, Homo sapiens
  CDR3 for alpha chain variable domain of TCR clone 170096 (TRAV27, TRAJ22)
TVPGWKSGSARQLTF

SEQ ID NO: 340192 - protein, 17 aa, Homo sapiens
  CDR3 for beta chain variable domain of TCR clone 170096 (TRBV5-5, TRBJ1-1)
CASSWRFRGLMNTEAFF

SEQ ID NO: 340193 - protein, 15 aa, Homo sapiens
  CDR3 for alpha chain variable domain of TCR clone 170097 (TRAV20, TRAJ50)
CAVRQMKTSYAKVIF

SEQ ID NO: 340194 - protein, 17 aa, Homo sapiens
  CDR3 for beta chain variable domain of TCR clone 170097 (TRBV28, TRBJ2-7)
CASSPLHRASGVYEQYF

SEQ ID NO: 340195 - protein, 14 aa, Homo sapiens
  CDR3 for alpha chain variable domain of TCR clone 170098 (TRAV1-2, TRAJ8)
CAVREDTGFQKLVF

SEQ ID NO: 340196 - protein, 17 aa, Homo sapiens
  CDR3 for beta chain variable domain of TCR clone 170098 (TRBV6-3, TRBJ2-7)
CASSSPGTVFTSSTSGR

SEQ ID NO: 340197 - protein, 11 aa, Homo sapiens
  CDR3 for alpha chain variable domain of TCR clone 170099 (TRAV21, TRAJ33)
CKMDSNYQLIW

SEQ ID NO: 340198 - protein, 16 aa, Homo sapiens
  CDR3 for beta chain variable domain of TCR clone 170099 (TRBV24-1, TRBJ2-3)
CATSGYRDRDTDTQYF

SEQ ID NO: 340199 - protein, 14 aa, Homo sapiens
  CDR3 for alpha chain variable domain of TCR clone 170100 (TRAV1-2, TRAJ8)
CAVREDTGFQKLVF

SEQ ID NO: 340200 - protein, 15 aa, Homo sapiens
  CDR3 for beta chain variable domain of TCR clone 170100 (TRBV6-3, TRBJ2-7)
WASSSPGTVFYEPYF

SEQ ID NO: 340201 - protein, 13 aa, Homo sapiens
  CDR3 for alpha chain variable domain of TCR clone 170101 (TRAV12-1, TRAJ40)
CVVPTSGPYKYIF

SEQ ID NO: 340202 - protein, 16 aa, Homo sapiens
  CDR3 for beta chain variable domain of TCR clone 170101 (TRBV7-9, TRBJ1-2)
CASSLGFSSGEDGYTF

SEQ ID NO: 340203 - protein, 13 aa, Homo sapiens
  CDR3 for alpha chain variable domain of TCR clone 170102 (TRAV8-3, TRAJ20)
CAVGRPNDYKLSF

SEQ ID NO: 340204 - protein, 14 aa, Homo sapiens
  CDR3 for beta chain variable domain of TCR clone 170102 (TRBV12-5, TRBJ2-5)
CASGSRTHQESQYF

SEQ ID NO: 340205 - protein, 15 aa, Homo sapiens
  CDR3 for alpha chain variable domain of TCR clone 170103 (TRAV3, TRAJ32)
FAVSSYGGATNKLIF

SEQ ID NO: 340206 - protein, 14 aa, Homo sapiens
  CDR3 for beta chain variable domain of TCR clone 170103 (TRBV20-1, TRBJ1-4)
CSARDGSGWEKLFF

SEQ ID NO: 340207 - protein, 12 aa, Homo sapiens
  CDR3 for alpha chain variable domain of TCR clone 170104 (TRAV23/DV6, TRAJ52)
CAASPNAGGTSY

SEQ ID NO: 340208 - protein, 14 aa, Homo sapiens
  CDR3 for beta chain variable domain of TCR clone 170104 (TRBV19, TRBJ2-2)
CASSGQGIAGELFF

SEQ ID NO: 340209 - protein, 17 aa, Homo sapiens
  CDR3 for alpha chain variable domain of TCR clone 170105 (TRAV26-1, TRAJ53)
CIVRVDDSGGSNYKLTF

SEQ ID NO: 340210 - protein, 16 aa, Homo sapiens
  CDR3 for beta chain variable domain of TCR clone 170105 (TRBV2, TRBJ2-1)
CASSVGGSLSYNEQFF

SEQ ID NO: 340211 - protein, 18 aa, Homo sapiens
  CDR3 for alpha chain variable domain of TCR clone 170106 (TRAV26-1, TRAJ23)
CIVRVGLEVWNQGGKLIF

SEQ ID NO: 340212 - protein, 16 aa, Homo sapiens
  CDR3 for beta chain variable domain of TCR clone 170106 (TRBV12-4, TRBJ2-5)
CVSSFFVRGRQETQYF

SEQ ID NO: 340213 - protein, 15 aa, Homo sapiens
  CDR3 for alpha chain variable domain of TCR clone 170107 (TRAV17, TRAJ57)
CATGPSQGGSEKLVF

SEQ ID NO: 340214 - protein, 12 aa, Homo sapiens
  CDR3 for beta chain variable domain of TCR clone 170107 (TRBV7-9, TRBJ1-4)
CASSTDREKLFF

SEQ ID NO: 340215 - protein, 15 aa, Homo sapiens
  CDR3 for alpha chain variable domain of TCR clone 170108 (TRAV26-1, TRAJ29)
CIVRVEGSGNTPLVF

SEQ ID NO: 340216 - protein, 12 aa, Homo sapiens
  CDR3 for beta chain variable domain of TCR clone 170108 (TRBV12-4, TRBJ1-1)
CASSLAGLEAFF

SEQ ID NO: 340217 - protein, 16 aa, Homo sapiens
  CDR3 for alpha chain variable domain of TCR clone 170109 (TRAV30, TRAJ24)
CGTEIVDADSWGKFQF

SEQ ID NO: 340218 - protein, 17 aa, Homo sapiens
  CDR3 for beta chain variable domain of TCR clone 170109 (TRBV5-7, TRBJ1-1)
CASSLRFRGLMNTEAFF

SEQ ID NO: 340219 - protein, 15 aa, Homo sapiens
  CDR3 for alpha chain variable domain of TCR clone 170110 (TRAV13-2, TRAJ45)
CAEHHSGGGADGLTF

SEQ ID NO: 340220 - protein, 15 aa, Homo sapiens
  CDR3 for beta chain variable domain of TCR clone 170110 (TRBV7-2, TRBJ2-7)
CASSLGLGSAYEQYF

SEQ ID NO: 340221 - protein, 17 aa, Homo sapiens
  CDR3 for alpha chain variable domain of TCR clone 170111 (TRAV8-6, TRAJ58)
CAVSSWVGETSGSRLTF

SEQ ID NO: 340222 - protein, 13 aa, Homo sapiens
  CDR3 for beta chain variable domain of TCR clone 170111 (TRBV7-2, TRBJ2-2)
CASSLAVTGELFF

SEQ ID NO: 340223 - protein, 13 aa, Homo sapiens
  CDR3 for alpha chain variable domain of TCR clone 170112 (TRAV2, TRAJ40)
CAVVTSGTYRYIL

SEQ ID NO: 340224 - protein, 15 aa, Homo sapiens
  CDR3 for beta chain variable domain of TCR clone 170112 (TRBV11-3, TRBJ2-3)
CASLKDGREGDTQYF

SEQ ID NO: 340225 - protein, 13 aa, Homo sapiens
  CDR3 for alpha chain variable domain of TCR clone 170113 (TRAV20, TRAJ31)
CAVQAWNNARLMF

SEQ ID NO: 340226 - protein, 17 aa, Homo sapiens
  CDR3 for beta chain variable domain of TCR clone 170113 (TRBV24-1, TRBJ2-4)
CSTSDAEARGVRNIQYF

SEQ ID NO: 340227 - protein, 14 aa, Homo sapiens
  CDR3 for alpha chain variable domain of TCR clone 170114 (TRAV8-3, TRAJ33)
CAVGPLGGNYQLIW

SEQ ID NO: 340228 - protein, 12 aa, Homo sapiens
  CDR3 for beta chain variable domain of TCR clone 170114 (TRBV7-2, TRBJ2-5)
CASSLGPETQYF

SEQ ID NO: 340229 - protein, 14 aa, Homo sapiens
  CDR3 for alpha chain variable domain of TCR clone 170115 (TRAV16, TRAJ31)
CSKWRRGDNARLMF

SEQ ID NO: 340230 - protein, 16 aa, Homo sapiens
  CDR3 for beta chain variable domain of TCR clone 170115 (TRBV28, TRBJ2-7)
CASSLCFETGGPEQYF

SEQ ID NO: 340231 - protein, 11 aa, Homo sapiens
  CDR3 for alpha chain variable domain of TCR clone 170116 (TRAV12-2, TRAJ43)
CAAYNNNDMRF

SEQ ID NO: 340232 - protein, 14 aa, Homo sapiens
  CDR3 for beta chain variable domain of TCR clone 170116 (TRBV7-8, TRBJ1-2)
CASSAGTAIDGYTF

SEQ ID NO: 340233 - protein, 15 aa, Homo sapiens
  CDR3 for alpha chain variable domain of TCR clone 170117 (TRAV16, TRAJ17)
CALSGNKAAGNKLTF

SEQ ID NO: 340234 - protein, 16 aa, Homo sapiens
  CDR3 for beta chain variable domain of TCR clone 170117 (TRBV19, TRBJ2-2)
CASTIGARAGAGELFF

SEQ ID NO: 340235 - protein, 14 aa, Homo sapiens
  CDR3 for alpha chain variable domain of TCR clone 170118 (TRAV17, TRAJ54)
CATDANQGAQKLVF

SEQ ID NO: 340236 - protein, 13 aa, Homo sapiens
  CDR3 for beta chain variable domain of TCR clone 170118 (TRBV7-2, TRBJ2-7)
CASSSPSGSEQYF

SEQ ID NO: 340237 - protein, 16 aa, Homo sapiens
  CDR3 for alpha chain variable domain of TCR clone 170119 (TRAV30, TRAJ24)
CGTEIVDADSWGKFQF

SEQ ID NO: 340238 - protein, 16 aa, Homo sapiens
  CDR3 for beta chain variable domain of TCR clone 170119 (TRBV7-3, TRBJ2-2)
CASSLKRGTLSGELFL

SEQ ID NO: 340239 - protein, 11 aa, Homo sapiens
  CDR3 for alpha chain variable domain of TCR clone 170120 (TRAV35, TRAJ34)
CWARNTDKLIF

SEQ ID NO: 340240 - protein, 14 aa, Homo sapiens
  CDR3 for beta chain variable domain of TCR clone 170120 (TRBV5-1, TRBJ2-7)
RASSRGESLYEQYF

SEQ ID NO: 340241 - protein, 21 aa, Homo sapiens
  CDR3 for alpha chain variable domain of TCR clone 170121 (TRAV8-3, TRAJ6)
CAVGGEEATYLHLEAEPALLF

SEQ ID NO: 340242 - protein, 14 aa, Homo sapiens
  CDR3 for beta chain variable domain of TCR clone 170121 (TRBV5-1, TRBJ2-7)
CASSRGESLYEQYF

SEQ ID NO: 340243 - protein, 10 aa, Homo sapiens
  CDR3 for alpha chain variable domain of TCR clone 170122 (TRAV13-1, TRAJ52)
CAAKTQMLVV

SEQ ID NO: 340244 - protein, 14 aa, Homo sapiens
  CDR3 for beta chain variable domain of TCR clone 170122 (TRBV6-5, TRBJ1-1)
CASSFGQGLTEAFF

SEQ ID NO: 340245 - protein, 17 aa, Homo sapiens
  CDR3 for alpha chain variable domain of TCR clone 170123 (TRAV3, TRAJ6)
CAVRDGPRAGGSYIPTF

SEQ ID NO: 340246 - protein, 13 aa, Homo sapiens
  CDR3 for beta chain variable domain of TCR clone 170123 (TRBV15, TRBJ1-6)
CAPSGGLSSPLHF

SEQ ID NO: 340247 - protein, 15 aa, Homo sapiens
  CDR3 for alpha chain variable domain of TCR clone 170124 (TRAV8-6, TRAJ10)
CAVSDQAGGGNKLTF

SEQ ID NO: 340248 - protein, 15 aa, Homo sapiens
  CDR3 for beta chain variable domain of TCR clone 170124 (TRBV11-2, TRBJ2-1)
CASSSPSTRYNEQFF

SEQ ID NO: 340249 - protein, 18 aa, Homo sapiens
  CDR3 for alpha chain variable domain of TCR clone 170125 (TRAV21, TRAJ52)
CAVRPSPAGGTSYGRLTF

SEQ ID NO: 340250 - protein, 17 aa, Homo sapiens
  CDR3 for beta chain variable domain of TCR clone 170125 (TRBV13, TRBJ2-3)
CASSLSRVAGGTNTQYF

SEQ ID NO: 340251 - protein, 14 aa, Homo sapiens
  CDR3 for alpha chain variable domain of TCR clone 170126 (TRAV12-2, TRAJ17)
CAVLFKAAGNKLTF

SEQ ID NO: 340252 - protein, 13 aa, Homo sapiens
  CDR3 for beta chain variable domain of TCR clone 170126 (TRBV4-1, TRBJ2-7)
CASSQGQAYEQYF

SEQ ID NO: 340253 - protein, 10 aa, Homo sapiens
  CDR3 for alpha chain variable domain of TCR clone 170127 (TRAV1-2, TRAJ20)
CACNDYKLSF

SEQ ID NO: 340254 - protein, 15 aa, Homo sapiens
  CDR3 for beta chain variable domain of TCR clone 170127 (TRBV11-3, TRBJ2-7)
CASSPGPASSYEQYF

SEQ ID NO: 340255 - protein, 12 aa, Homo sapiens
  CDR3 for alpha chain variable domain of TCR clone 170128 (TRAV27, TRAJ47)
CAGEVRGNKLVF

SEQ ID NO: 340256 - protein, 15 aa, Homo sapiens
  CDR3 for beta chain variable domain of TCR clone 170128 (TRBV5-7, TRBJ1-6)
CASSWGLGPNSPLHF

SEQ ID NO: 340257 - protein, 15 aa, Homo sapiens
  CDR3 for alpha chain variable domain of TCR clone 170129 (TRAV8-3, TRAJ45)
CASSYSGGGADGLTF

SEQ ID NO: 340258 - protein, 13 aa, Homo sapiens
  CDR3 for beta chain variable domain of TCR clone 170129 (TRBV20-1, TRBJ2-2)
CNASAAGTGELFF

SEQ ID NO: 340259 - protein, 14 aa, Homo sapiens
  CDR3 for alpha chain variable domain of TCR clone 170130 (TRAV12-1, TRAJ23)
CVVMIYNQGGKLIF

SEQ ID NO: 340260 - protein, 14 aa, Homo sapiens
  CDR3 for beta chain variable domain of TCR clone 170130 (TRBV18, TRBJ2-7)
CASSPRGGAYEQYF

SEQ ID NO: 340261 - protein, 11 aa, Homo sapiens
  CDR3 for alpha chain variable domain of TCR clone 170131 (TRAV21, TRAJ34)
CAVTNTDKLIF

SEQ ID NO: 340262 - protein, 16 aa, Homo sapiens
  CDR3 for beta chain variable domain of TCR clone 170131 (TRBV28, TRBJ1-4)
CASSPPYRGRSEKLFF

SEQ ID NO: 340263 - protein, 16 aa, Homo sapiens
  CDR3 for alpha chain variable domain of TCR clone 170132 (TRAV21, TRAJ52)
CAVTNAGGTSYGKLTF

SEQ ID NO: 340264 - protein, 16 aa, Homo sapiens
  CDR3 for beta chain variable domain of TCR clone 170132 (TRBV12-4, TRBJ2-5)
CASSFFVRGRQETQYF

SEQ ID NO: 340265 - protein, 13 aa, Homo sapiens
  CDR3 for alpha chain variable domain of TCR clone 170133 (TRAV12-2, TRAJ20)
CAVYPSNDYKLSF

SEQ ID NO: 340266 - protein, 15 aa, Homo sapiens
  CDR3 for beta chain variable domain of TCR clone 170133 (TRBV10-3, TRBJ2-3)
CAISVRVSATDTQYF

SEQ ID NO: 340267 - protein, 15 aa, Homo sapiens
  CDR3 for alpha chain variable domain of TCR clone 170134 (TRAV34, TRAJ38)
CGADFTPGNNRKPIW

SEQ ID NO: 340268 - protein, 15 aa, Homo sapiens
  CDR3 for beta chain variable domain of TCR clone 170134 (TRBV6-3, TRBJ2-7)
CASSSPGTVFYEQYF

SEQ ID NO: 340269 - protein, 11 aa, Homo sapiens
  CDR3 for alpha chain variable domain of TCR clone 170135 (TRAV12-1, TRAJ30)
CVVNGQDKIIF

SEQ ID NO: 340270 - protein, 13 aa, Homo sapiens
  CDR3 for beta chain variable domain of TCR clone 170135 (TRBV5-1, TRBJ1-2)
CASSFQDGYGYTF

SEQ ID NO: 340271 - protein, 12 aa, Homo sapiens
  CDR3 for alpha chain variable domain of TCR clone 170136 (TRAV20, TRAJ13)
RCVKRGYQKVTF

SEQ ID NO: 340272 - protein, 13 aa, Homo sapiens
  CDR3 for beta chain variable domain of TCR clone 170136 (TRBV12-5, TRBJ2-1)
CASGLGRGNEQFF

SEQ ID NO: 340273 - protein, 13 aa, Homo sapiens
  CDR3 for alpha chain variable domain of TCR clone 170137 (TRAV36/DV7, TRAJ49)
CAVEANTGNQFYF

SEQ ID NO: 340274 - protein, 14 aa, Homo sapiens
  CDR3 for beta chain variable domain of TCR clone 170137 (TRBV20-1, TRBJ2-5)
CSAGSGRAAETQYF

SEQ ID NO: 340275 - protein, 10 aa, Homo sapiens
  CDR3 for alpha chain variable domain of TCR clone 170138 (TRAV13-2, TRAJ49)
CADTGNQFYF

SEQ ID NO: 340276 - protein, 17 aa, Homo sapiens
  CDR3 for beta chain variable domain of TCR clone 170138 (TRBV4-1, TRBJ2-5)
CASSQDLTGGPIETQYF

SEQ ID NO: 340277 - protein, 17 aa, Homo sapiens
  CDR3 for alpha chain variable domain of TCR clone 170139 (TRAV3, TRAJ6)
CDVRDGPRAGGSYIPTF

SEQ ID NO: 340278 - protein, 17 aa, Homo sapiens
  CDR3 for beta chain variable domain of TCR clone 170139 (TRBV4-1, TRBJ2-5)
CASSQDLTGGPIETQYF

SEQ ID NO: 340279 - protein, 12 aa, Homo sapiens
  CDR3 for alpha chain variable domain of TCR clone 170140 (TRAV12-2, TRAJ43)
CAVNVNNNDMRL

SEQ ID NO: 340280 - protein, 14 aa, Homo sapiens
  CDR3 for beta chain variable domain of TCR clone 170140 (TRBV25-1, TRBJ2-2)
CASSELGLPGELFF

SEQ ID NO: 340281 - protein, 13 aa, Homo sapiens
  CDR3 for alpha chain variable domain of TCR clone 170141 (TRAV8-3, TRAJ28)
CAVGAVGSYQLTF

SEQ ID NO: 340282 - protein, 14 aa, Homo sapiens
  CDR3 for beta chain variable domain of TCR clone 170141 (TRBV7-9, TRBJ2-7)
CASSPRDRVYEQYF

SEQ ID NO: 340283 - protein, 16 aa, Homo sapiens
  CDR3 for alpha chain variable domain of TCR clone 170142 (TRAV12-2, TRAJ56)
CAVRRGDTGANSKLTF

SEQ ID NO: 340284 - protein, 11 aa, Homo sapiens
  CDR3 for beta chain variable domain of TCR clone 170142 (TRBV3-1, TRBJ2-7)
CASSQVREQYF

SEQ ID NO: 340285 - protein, 12 aa, Homo sapiens
  CDR3 for alpha chain variable domain of TCR clone 170143 (TRAV13-2, TRAJ23)
CAERHRGGKLIF

SEQ ID NO: 340286 - protein, 15 aa, Homo sapiens
  CDR3 for beta chain variable domain of TCR clone 170143 (TRBV28, TRBJ1-3)
CASSMGWASGNTIYF

SEQ ID NO: 340287 - protein, 16 aa, Homo sapiens
  CDR3 for alpha chain variable domain of TCR clone 170144 (TRAV30, TRAJ24)
CGTEIVDADSWGTFQF

SEQ ID NO: 340288 - protein, 17 aa, Homo sapiens
  CDR3 for beta chain variable domain of TCR clone 170144 (TRBV7-3, TRBJ2-3)
CASSLMKRMRGADTQYF

SEQ ID NO: 340289 - protein, 16 aa, Homo sapiens
  CDR3 for alpha chain variable domain of TCR clone 170145 (TRAV26-1, TRAJ23)
CIVRVHPYNQGGKLIF

SEQ ID NO: 340290 - protein, 15 aa, Homo sapiens
  CDR3 for beta chain variable domain of TCR clone 170145 (TRBV5-7, TRBJ2-7)
CASSPYFEGSCEQYF

SEQ ID NO: 340291 - protein, 14 aa, Homo sapiens
  CDR3 for alpha chain variable domain of TCR clone 170146 (TRAV29/DV5, TRAJ36)
CAAHRKTGANNLFF

SEQ ID NO: 340292 - protein, 15 aa, Homo sapiens
  CDR3 for beta chain variable domain of TCR clone 170146 (TRBV7-2, TRBJ2-1)
CASSLVAGGYNEQFF

SEQ ID NO: 340293 - protein, 11 aa, Homo sapiens
  CDR3 for alpha chain variable domain of TCR clone 170147 (TRAV2, TRAJ33)
CAVESNYQLIW

SEQ ID NO: 340294 - protein, 15 aa, Homo sapiens
  CDR3 for beta chain variable domain of TCR clone 170147 (TRBV28, TRBJ2-1)
CASSLSGQGFDEQFF

SEQ ID NO: 340295 - protein, 16 aa, Homo sapiens
  CDR3 for alpha chain variable domain of TCR clone 170148 (TRAV3, TRAJ10)
CAGRDMRAGGGNKLTF

SEQ ID NO: 340296 - protein, 16 aa, Homo sapiens
  CDR3 for beta chain variable domain of TCR clone 170148 (TRBV19, TRBJ2-2)
CASSFPGQGLAGELFF

SEQ ID NO: 340297 - protein, 17 aa, Homo sapiens
  CDR3 for alpha chain variable domain of TCR clone 170149 (TRAV13-1, TRAJ53)
CAASWKSSGGSNYKLTF

SEQ ID NO: 340298 - protein, 19 aa, Homo sapiens
  CDR3 for beta chain variable domain of TCR clone 170149 (TRBV7-9, TRBJ2-1)
WASSHNRGALRRSYNEQFF

SEQ ID NO: 340299 - protein, 13 aa, Homo sapiens
  CDR3 for alpha chain variable domain of TCR clone 170150 (TRAV21, TRAJ34)
CAVSEGDTDKLIF

SEQ ID NO: 340300 - protein, 12 aa, Homo sapiens
  CDR3 for beta chain variable domain of TCR clone 170150 (TRBV19, TRBJ1-5)
CASSIAQQPQHF

SEQ ID NO: 340301 - protein, 14 aa, Homo sapiens
  CDR3 for alpha chain variable domain of TCR clone 170151 (TRAV17, TRAJ54)
CATDAKQGAQKLVF

SEQ ID NO: 340302 - protein, 12 aa, Homo sapiens
  CDR3 for beta chain variable domain of TCR clone 170151 (TRBV7-9, TRBJ2-7)
CASSIKREEQHF

SEQ ID NO: 340303 - protein, 13 aa, Homo sapiens
  CDR3 for alpha chain variable domain of TCR clone 170152 (TRAV35, TRAJ48)
CAGHEFGNKKLTF

SEQ ID NO: 340304 - protein, 16 aa, Homo sapiens
  CDR3 for beta chain variable domain of TCR clone 170152 (TRBV12-5, TRBJ2-5)
CASGPRTSGNQETQYF

SEQ ID NO: 340305 - protein, 12 aa, Homo sapiens
  CDR3 for alpha chain variable domain of TCR clone 170153 (TRAV16, TRAJ10)
CSRTGGGNKLTF

SEQ ID NO: 340306 - protein, 15 aa, Homo sapiens
  CDR3 for beta chain variable domain of TCR clone 170153 (TRBV7-2, TRBJ2-1)
CASSLASGRVNEQFF

SEQ ID NO: 340307 - protein, 15 aa, Homo sapiens
  CDR3 for alpha chain variable domain of TCR clone 170154 (TRAV21, TRAJ17)
CAVDEQKAAGNKLTF

SEQ ID NO: 340308 - protein, 14 aa, Homo sapiens
  CDR3 for beta chain variable domain of TCR clone 170154 (TRBV7-8, TRBJ2-3)
CASSSRDSTDTQYF

SEQ ID NO: 340309 - protein, 13 aa, Homo sapiens
  CDR3 for alpha chain variable domain of TCR clone 170155 (TRAV2, TRAJ24)
CAVSTDSWGKLKF

SEQ ID NO: 340310 - protein, 14 aa, Homo sapiens
  CDR3 for beta chain variable domain of TCR clone 170155 (TRBV13, TRBJ2-5)
CASSLGTAQETQYF

SEQ ID NO: 340311 - protein, 13 aa, Homo sapiens
  CDR3 for alpha chain variable domain of TCR clone 170156 (TRAV26-2, TRAJ43)
CILRAVNNNDMRF

SEQ ID NO: 340312 - protein, 14 aa, Homo sapiens
  CDR3 for beta chain variable domain of TCR clone 170156 (TRBV7-2, TRBJ2-5)
CASSFTQGQETQYF

SEQ ID NO: 340313 - protein, 14 aa, Homo sapiens
  CDR3 for alpha chain variable domain of TCR clone 170157 (TRAV16, TRAJ54)
CALRLIQGAQKLVF

SEQ ID NO: 340314 - protein, 17 aa, Homo sapiens
  CDR3 for beta chain variable domain of TCR clone 170157 (TRBV11-3, TRBJ2-4)
CASSSVGPGGHRNIQYF

SEQ ID NO: 340315 - protein, 13 aa, Homo sapiens
  CDR3 for alpha chain variable domain of TCR clone 170158 (TRAV13-1, TRAJ20)
CAARVSNDYKLSF

SEQ ID NO: 340316 - protein, 16 aa, Homo sapiens
  CDR3 for beta chain variable domain of TCR clone 170158 (TRBV11-1, TRBJ1-1)
CATNPRDRAFNTEDFF

SEQ ID NO: 340317 - protein, 11 aa, Homo sapiens
  CDR3 for alpha chain variable domain of TCR clone 170159 (TRAV1-1, TRAJ23)
CAVRQGGKLIF

SEQ ID NO: 340318 - protein, 16 aa, Homo sapiens
  CDR3 for beta chain variable domain of TCR clone 170159 (TRBV11-2, TRBJ2-1)
CASSLLLLSSYNEQFF

SEQ ID NO: 340319 - protein, 12 aa, Homo sapiens
  CDR3 for alpha chain variable domain of TCR clone 170160 (TRAV13-2, TRAJ23)
CAERHRGGKLIF

SEQ ID NO: 340320 - protein, 13 aa, Homo sapiens
  CDR3 for beta chain variable domain of TCR clone 170160 (TRBV2, TRBJ1-6)
CADSGSYNSPLYF

SEQ ID NO: 340321 - protein, 11 aa, Homo sapiens
  CDR3 for alpha chain variable domain of TCR clone 170161 (TRAV13-1, TRAJ15)
CAATPGTPLIF

SEQ ID NO: 340322 - protein, 13 aa, Homo sapiens
  CDR3 for beta chain variable domain of TCR clone 170161 (TRBV7-2, TRBJ2-1)
CASSLGVYNEQFF

SEQ ID NO: 340323 - protein, 18 aa, Homo sapiens
  CDR3 for alpha chain variable domain of TCR clone 170162 (TRAV21, TRAJ52)
CAVRPSPAGGTSYGKLTF

SEQ ID NO: 340324 - protein, 13 aa, Homo sapiens
  CDR3 for beta chain variable domain of TCR clone 170162 (TRBV10-3, TRBJ2-7)
CASKLAVNYEQYL

SEQ ID NO: 340325 - protein, 13 aa, Homo sapiens
  CDR3 for alpha chain variable domain of TCR clone 170163 (TRAV13-2, TRAJ48)
CAEMDCGNEKLTF

SEQ ID NO: 340326 - protein, 16 aa, Homo sapiens
  CDR3 for beta chain variable domain of TCR clone 170163 (TRBV27, TRBJ2-2)
CASSFRGLVRTGELFF

SEQ ID NO: 340327 - protein, 15 aa, Homo sapiens
  CDR3 for alpha chain variable domain of TCR clone 170164 (TRAV3, TRAJ22)
CAVRDRGGSARQLTF

SEQ ID NO: 340328 - protein, 15 aa, Homo sapiens
  CDR3 for beta chain variable domain of TCR clone 170164 (TRBV10-3, TRBJ2-3)
RAISLTSGGTDTQYF

SEQ ID NO: 340329 - protein, 14 aa, Homo sapiens
  CDR3 for alpha chain variable domain of TCR clone 170165 (TRAV2, TRAJ20)
CAVELTPNDYKLSF

SEQ ID NO: 340330 - protein, 11 aa, Homo sapiens
  CDR3 for beta chain variable domain of TCR clone 170165 (TRBV29-1, TRBJ2-5)
CSEDRTGTQYF

SEQ ID NO: 340331 - protein, 13 aa, Homo sapiens
  CDR3 for alpha chain variable domain of TCR clone 170166 (TRAV17, TRAJ8)
CATPPRGFQKLVF

SEQ ID NO: 340332 - protein, 14 aa, Homo sapiens
  CDR3 for beta chain variable domain of TCR clone 170166 (TRBV18, TRBJ2-3)
CASSGLADTDTQYF

SEQ ID NO: 340333 - protein, 13 aa, Homo sapiens
  CDR3 for alpha chain variable domain of TCR clone 170167 (TRAV8-3, TRAJ28)
CAVGAVGSYQLTF

SEQ ID NO: 340334 - protein, 14 aa, Homo sapiens
  CDR3 for beta chain variable domain of TCR clone 170167 (TRBV7-2, TRBJ2-7)
CAGRSQGAAYGQYF

SEQ ID NO: 340335 - protein, 16 aa, Homo sapiens
  CDR3 for alpha chain variable domain of TCR clone 170168 (TRAV26-1, TRAJ37)
CIVRGDGSGNAGQLIF

SEQ ID NO: 340336 - protein, 17 aa, Homo sapiens
  CDR3 for beta chain variable domain of TCR clone 170168 (TRBV4-1, TRBJ2-7)
CASSRDPLGVRGGEQYF

SEQ ID NO: 340337 - protein, 18 aa, Homo sapiens
  CDR3 for alpha chain variable domain of TCR clone 170169 (TRAV21, TRAJ52)
CAVRPSPACGTSYGKLTF

SEQ ID NO: 340338 - protein, 15 aa, Homo sapiens
  CDR3 for beta chain variable domain of TCR clone 170169 (TRBV7-9, TRBJ2-2)
CASRPEGTSTGELFF

SEQ ID NO: 340339 - protein, 13 aa, Homo sapiens
  CDR3 for alpha chain variable domain of TCR clone 170170 (TRAV30, TRAJ6)
CGTEAGGSYIPTF

SEQ ID NO: 340340 - protein, 16 aa, Homo sapiens
  CDR3 for beta chain variable domain of TCR clone 170170 (TRBV4-3, TRBJ2-3)
CASRLGLAGEGDTQYF

SEQ ID NO: 340341 - protein, 13 aa, Homo sapiens
  CDR3 for alpha chain variable domain of TCR clone 170171 (TRAV1-2, TRAJ33)
CAVSEDSNYQLIW

SEQ ID NO: 340342 - protein, 14 aa, Homo sapiens
  CDR3 for beta chain variable domain of TCR clone 170171 (TRBV19, TRBJ2-1)
CASPTFVLSGEQFF

SEQ ID NO: 340343 - protein, 17 aa, Homo sapiens
  CDR3 for alpha chain variable domain of TCR clone 170172 (TRAV3, TRAJ13)
CAVRDMRRTGGYQKVTF

SEQ ID NO: 340344 - protein, 15 aa, Homo sapiens
  CDR3 for beta chain variable domain of TCR clone 170172 (TRBV7-9, TRBJ1-6)
CASSSPGRGNSPLHF

SEQ ID NO: 340345 - protein, 13 aa, Homo sapiens
  CDR3 for alpha chain variable domain of TCR clone 170173 (TRAV20, TRAJ31)
CAVKAWNNARLMF

SEQ ID NO: 340346 - protein, 16 aa, Homo sapiens
  CDR3 for beta chain variable domain of TCR clone 170173 (TRBV6-1, TRBJ2-5)
CASSETLDRGAETQYF

SEQ ID NO: 340347 - protein, 14 aa, Homo sapiens
  CDR3 for alpha chain variable domain of TCR clone 170174 (TRAV12-3, TRAJ10)
SHLPLTGGGNKLTF

SEQ ID NO: 340348 - protein, 15 aa, Homo sapiens
  CDR3 for beta chain variable domain of TCR clone 170174 (TRBV11-1, TRBJ2-1)
CASHTGLAGSNEQFF

SEQ ID NO: 340349 - protein, 14 aa, Homo sapiens
  CDR3 for alpha chain variable domain of TCR clone 170175 (TRAV12-3, TRAJ9)
CAMNPNTGGFKTIF

SEQ ID NO: 340350 - protein, 15 aa, Homo sapiens
  CDR3 for beta chain variable domain of TCR clone 170175 (TRBV20-1, TRBJ1-1)
CSASRGVTGNTEAFF

SEQ ID NO: 340351 - protein, 15 aa, Homo sapiens
  CDR3 for alpha chain variable domain of TCR clone 170176 (TRAV2, TRAJ9)
CAVAALNTGGFKTIF

SEQ ID NO: 340352 - protein, 14 aa, Homo sapiens
  CDR3 for beta chain variable domain of TCR clone 170176 (TRBV7-8, TRBJ2-3)
CASSLTGSTDTQYF

SEQ ID NO: 340353 - protein, 14 aa, Homo sapiens
  CDR3 for alpha chain variable domain of TCR clone 170177 (TRAV17, TRAJ12)
CAILPMDSSDKLIF

SEQ ID NO: 340354 - protein, 11 aa, Homo sapiens
  CDR3 for beta chain variable domain of TCR clone 170177 (TRBV19, TRBJ1-1)
CASSIGSEAFF

SEQ ID NO: 340355 - protein, 15 aa, Homo sapiens
  CDR3 for alpha chain variable domain of TCR clone 170178 (TRAV8-6, TRAJ10)
CAVSSKGGGGNKLTF

SEQ ID NO: 340356 - protein, 15 aa, Homo sapiens
  CDR3 for beta chain variable domain of TCR clone 170178 (TRBV28, TRBJ1-2)
CASSSHSIANYGYTV

SEQ ID NO: 340357 - protein, 12 aa, Homo sapiens
  CDR3 for alpha chain variable domain of TCR clone 170179 (TRAV3, TRAJ20)
CAVRDPDYKLSF

SEQ ID NO: 340358 - protein, 17 aa, Homo sapiens
  CDR3 for beta chain variable domain of TCR clone 170179 (TRBV24-1, TRBJ2-3)
CATSDLPSGEDTDTQYF

SEQ ID NO: 340359 - protein, 11 aa, Homo sapiens
  CDR3 for alpha chain variable domain of TCR clone 170180 (TRAV21, TRAJ56)
SATGANSKLTF

SEQ ID NO: 340360 - protein, 16 aa, Homo sapiens
  CDR3 for beta chain variable domain of TCR clone 170180 (TRBV20-1, TRBJ1-4)
CSARPYGGELNEKLFF

SEQ ID NO: 340361 - protein, 16 aa, Homo sapiens
  CDR3 for alpha chain variable domain of TCR clone 170181 (TRAV30, TRAJ24)
CGTEIVDAASWGKFQV

SEQ ID NO: 340362 - protein, 19 aa, Homo sapiens
  CDR3 for beta chain variable domain of TCR clone 170181 (TRBV25-1, TRBJ2-2)
CAILVYRVDRGRKTGELFF

SEQ ID NO: 340363 - protein, 15 aa, Homo sapiens
  CDR3 for alpha chain variable domain of TCR clone 170182 (TRAV27, TRAJ38)
CAARRNAGNNRKLIW

SEQ ID NO: 340364 - protein, 13 aa, Homo sapiens
  CDR3 for beta chain variable domain of TCR clone 170182 (TRBV7-9, TRBJ2-5)
CASLPSGRETQYF

SEQ ID NO: 340365 - protein, 13 aa, Homo sapiens
  CDR3 for alpha chain variable domain of TCR clone 170183 (TRAV12-3, TRAJ40)
CAMSARGTYKYIF

SEQ ID NO: 340366 - protein, 20 aa, Homo sapiens
  CDR3 for beta chain variable domain of TCR clone 170183 (TRBV7-8, TRBJ2-2)
CASSHLFPGPTIHITGELFF

SEQ ID NO: 340367 - protein, 15 aa, Homo sapiens
  CDR3 for alpha chain variable domain of TCR clone 170184 (TRAV20, TRAJ40)
CAVQRGPSGTYKYIF

SEQ ID NO: 340368 - protein, 15 aa, Homo sapiens
  CDR3 for beta chain variable domain of TCR clone 170184 (TRBV25-1, TRBJ1-4)
CASSPGDSTNEKLFF

SEQ ID NO: 340369 - protein, 10 aa, Homo sapiens
  CDR3 for alpha chain variable domain of TCR clone 170185 (TRAV12-3, TRAJ49)
CAMSDDQFYF

SEQ ID NO: 340370 - protein, 17 aa, Homo sapiens
  CDR3 for beta chain variable domain of TCR clone 170185 (TRBV7-8, TRBJ2-6)
CASSAGTGGAGANVLTF

SEQ ID NO: 340371 - protein, 15 aa, Homo sapiens
  CDR3 for alpha chain variable domain of TCR clone 170186 (TRAV13-2, TRAJ16)
CAENDRFSDGQKLLF

SEQ ID NO: 340372 - protein, 15 aa, Homo sapiens
  CDR3 for beta chain variable domain of TCR clone 170186 (TRBV10-2, TRBJ2-6)
CASSEQGTGANVLTF

SEQ ID NO: 340373 - protein, 16 aa, Homo sapiens
  CDR3 for alpha chain variable domain of TCR clone 170187 (TRAV3, TRAJ37)
CAVRGKGSVNTGKLIF

SEQ ID NO: 340374 - protein, 13 aa, Homo sapiens
  CDR3 for beta chain variable domain of TCR clone 170187 (TRBV7-3, TRBJ1-1)
CASSQDWGAEAFF

SEQ ID NO: 340375 - protein, 12 aa, Homo sapiens
  CDR3 for alpha chain variable domain of TCR clone 170188 (TRAV12-2, TRAJ10)
WGVTGGGNKLTI

SEQ ID NO: 340376 - protein, 14 aa, Homo sapiens
  CDR3 for beta chain variable domain of TCR clone 170188 (TRBV27, TRBJ2-7)
CASATGTERREQYF

SEQ ID NO: 340377 - protein, 14 aa, Homo sapiens
  CDR3 for alpha chain variable domain of TCR clone 170189 (TRAV1-2, TRAJ8)
CAVREDTGFQKLVF

SEQ ID NO: 340378 - protein, 19 aa, Homo sapiens
  CDR3 for beta chain variable domain of TCR clone 170189 (TRBV7-9, TRBJ2-1)
CASSHNRGALLRSYNEQFF

SEQ ID NO: 340379 - protein, 13 aa, Homo sapiens
  CDR3 for alpha chain variable domain of TCR clone 170190 (TRAV12-3, TRAJ52)
CSMSRTNPGGTSY

SEQ ID NO: 340380 - protein, 17 aa, Homo sapiens
  CDR3 for beta chain variable domain of TCR clone 170190 (TRBV7-3, TRBJ2-3)
CASSLMKRMRGADTQYF

SEQ ID NO: 340381 - protein, 16 aa, Homo sapiens
  CDR3 for alpha chain variable domain of TCR clone 170191 (TRAV1-2, TRAJ10)
CAVRGVLTGGRNKLTF

SEQ ID NO: 340382 - protein, 15 aa, Homo sapiens
  CDR3 for beta chain variable domain of TCR clone 170191 (TRBV7-9, TRBJ1-6)
CASSSPGRGNSPLHF

SEQ ID NO: 340383 - protein, 11 aa, Homo sapiens
  CDR3 for alpha chain variable domain of TCR clone 170192 (TRAV3, TRAJ35)
CYKGGANNLFF

SEQ ID NO: 340384 - protein, 16 aa, Homo sapiens
  CDR3 for beta chain variable domain of TCR clone 170192 (TRBV7-2, TRBJ1-3)
CASSSGRVLSGNTIYF

SEQ ID NO: 340385 - protein, 10 aa, Homo sapiens
  CDR3 for alpha chain variable domain of TCR clone 170193 (TRAV30, TRAJ48)
CGIGNEKLTF

SEQ ID NO: 340386 - protein, 16 aa, Homo sapiens
  CDR3 for beta chain variable domain of TCR clone 170193 (TRBV27, TRBJ2-1)
SMNVEPGTSWDNEQFF

SEQ ID NO: 340387 - protein, 14 aa, Homo sapiens
  CDR3 for alpha chain variable domain of TCR clone 170194 (TRAV1-1, TRAJ27)
CAVIYNTNAGKSTF

SEQ ID NO: 340388 - protein, 13 aa, Homo sapiens
  CDR3 for beta chain variable domain of TCR clone 170194 (TRBV7-9, TRBJ1-2)
CASSLKQNYAYTF

SEQ ID NO: 340389 - protein, 13 aa, Homo sapiens
  CDR3 for alpha chain variable domain of TCR clone 170195 (TRAV12-3, TRAJ9)
CAMRNTGGFKTIF

SEQ ID NO: 340390 - protein, 16 aa, Homo sapiens
  CDR3 for beta chain variable domain of TCR clone 170195 (TRBV19, TRBJ2-1)
CASSIDGSCAYNEQFF

SEQ ID NO: 340391 - protein, 11 aa, Homo sapiens
  CDR3 for alpha chain variable domain of TCR clone 170196 (TRAV27, TRAJ47)
FIVEYGSKLVF

SEQ ID NO: 340392 - protein, 18 aa, Homo sapiens
  CDR3 for beta chain variable domain of TCR clone 170196 (TRBV2, TRBJ2-1)
CASRGLAGGPRTYNEQFF

SEQ ID NO: 340393 - protein, 15 aa, Homo sapiens
  CDR3 for alpha chain variable domain of TCR clone 170197 (TRAV3, TRAJ22)
CAVRDRGGSARQPTF

SEQ ID NO: 340394 - protein, 16 aa, Homo sapiens
  CDR3 for beta chain variable domain of TCR clone 170197 (TRBV11-2, TRBJ2-1)
CASARGSYSHHNEQFF

SEQ ID NO: 340395 - protein, 14 aa, Homo sapiens
  CDR3 for alpha chain variable domain of TCR clone 170198 (TRAV2, TRAJ29)
CAGPFQYGNTPLVV

SEQ ID NO: 340396 - protein, 11 aa, Homo sapiens
  CDR3 for beta chain variable domain of TCR clone 170198 (TRBV29-1, TRBJ2-5)
CSEDRTGTQYF

SEQ ID NO: 340397 - protein, 13 aa, Homo sapiens
  CDR3 for alpha chain variable domain of TCR clone 170199 (TRAV8-6, TRAJ50)
CAVIKTSYDKVIF

SEQ ID NO: 340398 - protein, 15 aa, Homo sapiens
  CDR3 for beta chain variable domain of TCR clone 170199 (TRBV27, TRBJ1-5)
CASSLGTGFDQPQHF

SEQ ID NO: 340399 - protein, 13 aa, Homo sapiens
  CDR3 for alpha chain variable domain of TCR clone 170200 (TRAV3, TRAJ29)
CAVRDIIDTPLVF

SEQ ID NO: 340400 - protein, 15 aa, Homo sapiens
  CDR3 for beta chain variable domain of TCR clone 170200 (TRBV11-1, TRBJ1-3)
CASTDPRAFGNTIYF

SEQ ID NO: 340401 - protein, 14 aa, Homo sapiens
  CDR3 for alpha chain variable domain of TCR clone 170201 (TRAV6, TRAJ40)
CALDIKGGTYKYIF

SEQ ID NO: 340402 - protein, 13 aa, Homo sapiens
  CDR3 for beta chain variable domain of TCR clone 170201 (TRBV7-9, TRBJ1-2)
CASSLKQSYGYTF

SEQ ID NO: 340403 - protein, 14 aa, Homo sapiens
  CDR3 for alpha chain variable domain of TCR clone 170202 (TRAV17, TRAJ57)
CATDPQGGSEKLVF

SEQ ID NO: 340404 - protein, 16 aa, Homo sapiens
  CDR3 for beta chain variable domain of TCR clone 170202 (TRBV5-1, TRBJ2-7)
CASSLVAGGPSGEQYF

SEQ ID NO: 340405 - protein, 13 aa, Homo sapiens
  CDR3 for alpha chain variable domain of TCR clone 170203 (TRAV21, TRAJ27)
CAARPGNAGKSTF

SEQ ID NO: 340406 - protein, 13 aa, Homo sapiens
  CDR3 for beta chain variable domain of TCR clone 170203 (TRBV19, TRBJ1-5)
CASSIGGSQPQHF

SEQ ID NO: 340407 - protein, 15 aa, Homo sapiens
  CDR3 for alpha chain variable domain of TCR clone 170204 (TRAV2, TRAJ32)
CAVANYGGATNKLIF

SEQ ID NO: 340408 - protein, 15 aa, Homo sapiens
  CDR3 for beta chain variable domain of TCR clone 170204 (TRBV7-7, TRBJ2-5)
CASSPLERAEETQYF

SEQ ID NO: 340409 - protein, 14 aa, Homo sapiens
  CDR3 for alpha chain variable domain of TCR clone 170205 (TRAV12-2, TRAJ5)
CAVNRSTGRRALTF

SEQ ID NO: 340410 - protein, 13 aa, Homo sapiens
  CDR3 for beta chain variable domain of TCR clone 170205 (TRBV12-5, TRBJ2-3)
CASGDRQSDTQYF

SEQ ID NO: 340411 - protein, 13 aa, Homo sapiens
  CDR3 for alpha chain variable domain of TCR clone 170206 (TRAV3, TRAJ29)
CAVRDWGNTPLVF

SEQ ID NO: 340412 - protein, 15 aa, Homo sapiens
  CDR3 for beta chain variable domain of TCR clone 170206 (TRBV12-4, TRBJ2-5)
CASIGRTGEGEAQYF

SEQ ID NO: 340413 - protein, 14 aa, Homo sapiens
  CDR3 for alpha chain variable domain of TCR clone 170207 (TRAV38-1, TRAJ45)
CAYYSGGGAGGFNF

SEQ ID NO: 340414 - protein, 20 aa, Homo sapiens
  CDR3 for beta chain variable domain of TCR clone 170207 (TRBV28, TRBJ2-1)
CASTPIGRSPGLAGGNEQFF

SEQ ID NO: 340415 - protein, 13 aa, Homo sapiens
  CDR3 for alpha chain variable domain of TCR clone 170208 (TRAV1-2, TRAJ9)
CAALNTGGFKTIF

SEQ ID NO: 340416 - protein, 12 aa, Homo sapiens
  CDR3 for beta chain variable domain of TCR clone 170208 (TRBV7-9, TRBJ1-1)
CASSLSGGVAFF

SEQ ID NO: 340417 - protein, 17 aa, Homo sapiens
  CDR3 for alpha chain variable domain of TCR clone 170209 (TRAV17, TRAJ28)
CATDPRRGGAGSYQLTF

SEQ ID NO: 340418 - protein, 16 aa, Homo sapiens
  CDR3 for beta chain variable domain of TCR clone 170209 (TRBV25-1, TRBJ1-1)
CANSGDRDRGRIEAFF

SEQ ID NO: 340419 - protein, 13 aa, Homo sapiens
  CDR3 for alpha chain variable domain of TCR clone 170210 (TRAV12-1, TRAJ11)
CVVNRAGYSTLTF

SEQ ID NO: 340420 - protein, 14 aa, Homo sapiens
  CDR3 for beta chain variable domain of TCR clone 170210 (TRBV3-1, TRBJ2-5)
CASSQGPDQETQYF

SEQ ID NO: 340421 - protein, 14 aa, Homo sapiens
  CDR3 for alpha chain variable domain of TCR clone 170211 (TRAV12-2, TRAJ13)
CAVKKTGGYLKVTF

SEQ ID NO: 340422 - protein, 14 aa, Homo sapiens
  CDR3 for beta chain variable domain of TCR clone 170211 (TRBV25-1, TRBJ1-1)
CASTHLGGNTEAFF

SEQ ID NO: 340423 - protein, 14 aa, Homo sapiens
  CDR3 for alpha chain variable domain of TCR clone 170212 (TRAV35, TRAJ33)
CAGSSQDSNYQLIW

SEQ ID NO: 340424 - protein, 18 aa, Homo sapiens
  CDR3 for beta chain variable domain of TCR clone 170212 (TRBV12-4, TRBJ2-2)
CASSLVAGTRGRTGELFF

SEQ ID NO: 340425 - protein, 12 aa, Homo sapiens
  CDR3 for alpha chain variable domain of TCR clone 170213 (TRAV25, TRAJ5)
CAGGGGQESTYF

SEQ ID NO: 340426 - protein, 15 aa, Homo sapiens
  CDR3 for beta chain variable domain of TCR clone 170213 (TRBV20-1, TRBJ2-7)
CSARDRVSGMDEQYF

SEQ ID NO: 340427 - protein, 14 aa, Homo sapiens
  CDR3 for alpha chain variable domain of TCR clone 170214 (TRAV1-2, TRAJ16)
CAVNRFSDGQKLLF

SEQ ID NO: 340428 - protein, 16 aa, Homo sapiens
  CDR3 for beta chain variable domain of TCR clone 170214 (TRBV3-1, TRBJ2-5)
CASSPGQFNGLGTQYF

SEQ ID NO: 340429 - protein, 13 aa, Homo sapiens
  CDR3 for alpha chain variable domain of TCR clone 170215 (TRAV12-3, TRAJ43)
CAMIRPNNNDMRF

SEQ ID NO: 340430 - protein, 17 aa, Homo sapiens
  CDR3 for beta chain variable domain of TCR clone 170215 (TRBV4-1, TRBJ2-5)
CASSQDPSGGPQETQYF

SEQ ID NO: 340431 - protein, 12 aa, Homo sapiens
  CDR3 for alpha chain variable domain of TCR clone 170216 (TRAV2, TRAJ9)
CAVVAGGFKTIF

SEQ ID NO: 340432 - protein, 16 aa, Homo sapiens
  CDR3 for beta chain variable domain of TCR clone 170216 (TRBV13, TRBJ2-2)
CASSARTGEHTRELFF

SEQ ID NO: 340433 - protein, 13 aa, Homo sapiens
  CDR3 for alpha chain variable domain of TCR clone 170217 (TRAV1-2, TRAJ20)
CAVRDGNDYKLSF

SEQ ID NO: 340434 - protein, 17 aa, Homo sapiens
  CDR3 for beta chain variable domain of TCR clone 170217 (TRBV20-1, TRBJ2-1)
CSASSSGLAGSYNEQFF

SEQ ID NO: 340435 - protein, 12 aa, Homo sapiens
  CDR3 for alpha chain variable domain of TCR clone 170218 (TRAV8-3, TRAJ27)
CAVGAEPGKSTF

SEQ ID NO: 340436 - protein, 14 aa, Homo sapiens
  CDR3 for beta chain variable domain of TCR clone 170218 (TRBV2, TRBJ2-1)
CASRLIVGHDEQFF

SEQ ID NO: 340437 - protein, 14 aa, Homo sapiens
  CDR3 for alpha chain variable domain of TCR clone 170219 (TRAV23/DV6, TRAJ17)
CAASIGAAGNKLTF

SEQ ID NO: 340438 - protein, 12 aa, Homo sapiens
  CDR3 for beta chain variable domain of TCR clone 170219 (TRBV20-1, TRBJ2-5)
CSAGGARETQYF

SEQ ID NO: 340439 - protein, 14 aa, Homo sapiens
  CDR3 for alpha chain variable domain of TCR clone 170220 (TRAV26-1, TRAJ38)
CIADNAGNNRKLIW

SEQ ID NO: 340440 - protein, 16 aa, Homo sapiens
  CDR3 for beta chain variable domain of TCR clone 170220 (TRBV10-2, TRBJ1-5)
CASSVRDRASNQHQHF

SEQ ID NO: 340441 - protein, 13 aa, Homo sapiens
  CDR3 for alpha chain variable domain of TCR clone 170221 (TRAV29/DV5, TRAJ31)
CAASRNNNARLMF

SEQ ID NO: 340442 - protein, 13 aa, Homo sapiens
  CDR3 for beta chain variable domain of TCR clone 170221 (TRBV13, TRBJ2-5)
CASSPEVGETQVF

SEQ ID NO: 340443 - protein, 15 aa, Homo sapiens
  CDR3 for alpha chain variable domain of TCR clone 170222 (TRAV2, TRAJ24)
CAVEVLTNSWGKFQV

SEQ ID NO: 340444 - protein, 14 aa, Homo sapiens
  CDR3 for beta chain variable domain of TCR clone 170222 (TRBV19, TRBJ2-1)
CASSMGSGRRSSSS

SEQ ID NO: 340445 - protein, 14 aa, Homo sapiens
  CDR3 for alpha chain variable domain of TCR clone 170223 (TRAV16, TRAJ37)
CALDISGNTGKLIF

SEQ ID NO: 340446 - protein, 14 aa, Homo sapiens
  CDR3 for beta chain variable domain of TCR clone 170223 (TRBV7-6, TRBJ2-7)
CASSFRQVADEKYF

SEQ ID NO: 340447 - protein, 11 aa, Homo sapiens
  CDR3 for alpha chain variable domain of TCR clone 170224 (TRAV1-1, TRAJ20)
CAVFNDYKLSF

SEQ ID NO: 340448 - protein, 13 aa, Homo sapiens
  CDR3 for beta chain variable domain of TCR clone 170224 (TRBV19, TRBJ2-1)
CSSKDRGQDEQFF

SEQ ID NO: 340449 - protein, 13 aa, Homo sapiens
  CDR3 for alpha chain variable domain of TCR clone 170225 (TRAV2, TRAJ16)
CAVEDRDGQKLLF

SEQ ID NO: 340450 - protein, 19 aa, Homo sapiens
  CDR3 for beta chain variable domain of TCR clone 170225 (TRBV25-1, TRBJ2-2)
CAILVYRVDRGRKTGELFF

SEQ ID NO: 340451 - protein, 14 aa, Homo sapiens
  CDR3 for alpha chain variable domain of TCR clone 170226 (TRAV12-2, TRAJ17)
CAVLLKAAGNKLTF

SEQ ID NO: 340452 - protein, 14 aa, Homo sapiens
  CDR3 for beta chain variable domain of TCR clone 170226 (TRBV12-5, TRBJ2-5)
CASGSRTHQETQYF

SEQ ID NO: 340453 - protein, 14 aa, Homo sapiens
  CDR3 for alpha chain variable domain of TCR clone 170227 (TRAV12-1, TRAJ9)
CVVTLNTGGFKTIF

SEQ ID NO: 340454 - protein, 11 aa, Homo sapiens
  CDR3 for beta chain variable domain of TCR clone 170227 (TRBV29-1, TRBJ2-5)
CSEDRTGTHYF

SEQ ID NO: 340455 - protein, 15 aa, Homo sapiens
  CDR3 for alpha chain variable domain of TCR clone 170228 (TRAV21, TRAJ53)
CATLNSRGSNCKLTF

SEQ ID NO: 340456 - protein, 16 aa, Homo sapiens
  CDR3 for beta chain variable domain of TCR clone 170228 (TRBV9, TRBJ2-1)
CASSVGGGGNYNEQFF

SEQ ID NO: 340457 - protein, 16 aa, Homo sapiens
  CDR3 for alpha chain variable domain of TCR clone 170229 (TRAV4, TRAJ5)
CLVGPDHGHGQESTYF

SEQ ID NO: 340458 - protein, 17 aa, Homo sapiens
  CDR3 for beta chain variable domain of TCR clone 170229 (TRBV11-2, TRBJ2-1)
SASSLYPPGVEYNEQFF

SEQ ID NO: 340459 - protein, 14 aa, Homo sapiens
  CDR3 for alpha chain variable domain of TCR clone 170230 (TRAV2, TRAJ9)
CAVEDRSGGFKTIF

SEQ ID NO: 340460 - protein, 14 aa, Homo sapiens
  CDR3 for beta chain variable domain of TCR clone 170230 (TRBV18, TRBJ1-5)
CASSLQQRNQPQHF

SEQ ID NO: 340461 - protein, 14 aa, Homo sapiens
  CDR3 for alpha chain variable domain of TCR clone 170231 (TRAV26-1, TRAJ21)
CIVRPPYNCNKFYF

SEQ ID NO: 340462 - protein, 14 aa, Homo sapiens
  CDR3 for beta chain variable domain of TCR clone 170231 (TRBV11-3, TRBJ2-1)
CASSATTSGSIQFF

SEQ ID NO: 340463 - protein, 15 aa, Homo sapiens
  CDR3 for alpha chain variable domain of TCR clone 170232 (TRAV23/DV6, TRAJ23)
CAASERGNQGGKLIF

SEQ ID NO: 340464 - protein, 16 aa, Homo sapiens
  CDR3 for beta chain variable domain of TCR clone 170232 (TRBV4-1, TRBJ2-5)
CASSSGLAGVLGTQYF

SEQ ID NO: 340465 - protein, 16 aa, Homo sapiens
  CDR3 for alpha chain variable domain of TCR clone 170233 (TRAV12-2, TRAJ32)
FAVNLGQGGATNKLIF

SEQ ID NO: 340466 - protein, 12 aa, Homo sapiens
  CDR3 for beta chain variable domain of TCR clone 170233 (TRBV29-1, TRBJ2-3)
CSVTGGADTQYF

SEQ ID NO: 340467 - protein, 17 aa, Homo sapiens
  CDR3 for alpha chain variable domain of TCR clone 170234 (TRAV3, TRAJ12)
CAVRDGGRMDSSYKLVF

SEQ ID NO: 340468 - protein, 12 aa, Homo sapiens
  CDR3 for beta chain variable domain of TCR clone 170234 (TRBV11-2, TRBJ2-2)
CASSLGGGELFF

SEQ ID NO: 340469 - protein, 16 aa, Homo sapiens
  CDR3 for alpha chain variable domain of TCR clone 170235 (TRAV30, TRAJ24)
CGTEIVAADSWGKFQF

SEQ ID NO: 340470 - protein, 12 aa, Homo sapiens
  CDR3 for beta chain variable domain of TCR clone 170235 (TRBV7-3, TRBJ2-1)
CASSFINNEQFF

SEQ ID NO: 340471 - protein, 12 aa, Homo sapiens
  CDR3 for alpha chain variable domain of TCR clone 170236 (TRAV1-1, TRAJ8)
CAGGTGFQKLVF

SEQ ID NO: 340472 - protein, 13 aa, Homo sapiens
  CDR3 for beta chain variable domain of TCR clone 170236 (TRBV7-9, TRBJ2-7)
CASSFAGAYEQYF

SEQ ID NO: 340473 - protein, 13 aa, Homo sapiens
  CDR3 for alpha chain variable domain of TCR clone 170237 (TRAV2, TRAJ40)
CAVVTSGTYKYIF

SEQ ID NO: 340474 - protein, 14 aa, Homo sapiens
  CDR3 for beta chain variable domain of TCR clone 170237 (TRBV19, TRBJ2-1)
CASPTFVLSGEQPF

SEQ ID NO: 340475 - protein, 16 aa, Homo sapiens
  CDR3 for alpha chain variable domain of TCR clone 170238 (TRAV12-3, TRAJ58)
CVMTDTEETSGSRLTF

SEQ ID NO: 340476 - protein, 22 aa, Homo sapiens
  CDR3 for beta chain variable domain of TCR clone 170238 (TRBV23-1, TRBJ2-7)
CASSRRLDSGQGYVGGGYEQYF

SEQ ID NO: 340477 - protein, 14 aa, Homo sapiens
  CDR3 for alpha chain variable domain of TCR clone 170239 (TRAV21, TRAJ35)
CAVMPIGFVNVLHC

SEQ ID NO: 340478 - protein, 12 aa, Homo sapiens
  CDR3 for beta chain variable domain of TCR clone 170239 (TRBV7-9, TRBJ2-7)
CASSIKREEQYF

SEQ ID NO: 340479 - protein, 13 aa, Homo sapiens
  CDR3 for alpha chain variable domain of TCR clone 170240 (TRAV21, TRAJ37)
CAVSSGNRGKLIF

SEQ ID NO: 340480 - protein, 17 aa, Homo sapiens
  CDR3 for beta chain variable domain of TCR clone 170240 (TRBV5-1, TRBJ2-5)
CASSLLGLAANQETQYF

SEQ ID NO: 340481 - protein, 10 aa, Homo sapiens
  CDR3 for alpha chain variable domain of TCR clone 170241 (TRAV13-1, TRAJ41)
CAASGPRRTQ

SEQ ID NO: 340482 - protein, 19 aa, Homo sapiens
  CDR3 for beta chain variable domain of TCR clone 170241 (TRBV18, TRBJ2-3)
LISVPAHHRREGRGNTQYF

SEQ ID NO: 340483 - protein, 15 aa, Homo sapiens
  CDR3 for alpha chain variable domain of TCR clone 170242 (TRAV21, TRAJ45)
CAVSYSGGGADGLTF

SEQ ID NO: 340484 - protein, 12 aa, Homo sapiens
  CDR3 for beta chain variable domain of TCR clone 170242 (TRBV18, TRBJ2-7)
CASSPRSWEQYF

SEQ ID NO: 340485 - protein, 17 aa, Homo sapiens
  CDR3 for alpha chain variable domain of TCR clone 170243 (TRAV26-1, TRAJ10)
CIVYFRGLTGGGNKLTF

SEQ ID NO: 340486 - protein, 13 aa, Homo sapiens
  CDR3 for beta chain variable domain of TCR clone 170243 (TRBV20-1, TRBJ2-3)
CSASRQAADTQYF

SEQ ID NO: 340487 - protein, 15 aa, Homo sapiens
  CDR3 for alpha chain variable domain of TCR clone 170244 (TRAV4, TRAJ39)
CLVGPNNNAGNILTF

SEQ ID NO: 340488 - protein, 15 aa, Homo sapiens
  CDR3 for beta chain variable domain of TCR clone 170244 (TRBV27, TRBJ1-4)
CASSAQQDLNEKLFF

SEQ ID NO: 340489 - protein, 14 aa, Homo sapiens
  CDR3 for alpha chain variable domain of TCR clone 170245 (TRAV21, TRAJ45)
CAVVSGGGADGLTF

SEQ ID NO: 340490 - protein, 14 aa, Homo sapiens
  CDR3 for beta chain variable domain of TCR clone 170245 (TRBV20-1, TRBJ2-3)
CSALGLEVADTQYF

SEQ ID NO: 340491 - protein, 14 aa, Homo sapiens
  CDR3 for alpha chain variable domain of TCR clone 170246 (TRAV35, TRAJ40)
CAGSTTSGTYKYIF

SEQ ID NO: 340492 - protein, 17 aa, Homo sapiens
  CDR3 for beta chain variable domain of TCR clone 170246 (TRBV4-1, TRBJ1-5)
CASSQQPPTVANQPRHF

SEQ ID NO: 340493 - protein, 14 aa, Homo sapiens
  CDR3 for alpha chain variable domain of TCR clone 170247 (TRAV16, TRAJ17)
CALSGRAAGNKLTF

SEQ ID NO: 340494 - protein, 18 aa, Homo sapiens
  CDR3 for beta chain variable domain of TCR clone 170247 (TRBV12-4, TRBJ2-2)
CASSLVAGTRGRTGELFF

SEQ ID NO: 340495 - protein, 13 aa, Homo sapiens
  CDR3 for alpha chain variable domain of TCR clone 170248 (TRAV13-1, TRAJ11)
CTAVLAGYSTLTF

SEQ ID NO: 340496 - protein, 17 aa, Homo sapiens
  CDR3 for beta chain variable domain of TCR clone 170248 (TRBV25-1, TRBJ2-7)
CASSDARVVFSSYEQYF

SEQ ID NO: 340497 - protein, 15 aa, Homo sapiens
  CDR3 for alpha chain variable domain of TCR clone 170249 (TRAV23/DV6, TRAJ42)
CAANYYGGSQGNLIF

SEQ ID NO: 340498 - protein, 11 aa, Homo sapiens
  CDR3 for beta chain variable domain of TCR clone 170249 (TRBV29-1, TRBJ2-5)
CSEDRTGTQYF

SEQ ID NO: 340499 - protein, 14 aa, Homo sapiens
  CDR3 for alpha chain variable domain of TCR clone 170250 (TRAV12-3, TRAJ22)
CAMSLFGSARQLTF

SEQ ID NO: 340500 - protein, 11 aa, Homo sapiens
  CDR3 for beta chain variable domain of TCR clone 170250 (TRBV12-4, TRBJ2-2)
CASSSAWELFF

SEQ ID NO: 340501 - protein, 14 aa, Homo sapiens
  CDR3 for alpha chain variable domain of TCR clone 170251 (TRAV2, TRAJ37)
CAVDFASNTGKLIF

SEQ ID NO: 340502 - protein, 17 aa, Homo sapiens
  CDR3 for beta chain variable domain of TCR clone 170251 (TRBV20-1, TRBJ1-1)
CSASRGVTGNTEASLDK

SEQ ID NO: 340503 - protein, 12 aa, Homo sapiens
  CDR3 for alpha chain variable domain of TCR clone 170252 (TRAV12-3, TRAJ17)
CAMTLTGNTLTF

SEQ ID NO: 340504 - protein, 13 aa, Homo sapiens
  CDR3 for beta chain variable domain of TCR clone 170252 (TRBV5-1, TRBJ1-1)
CASSADWDTEAFF

SEQ ID NO: 340505 - protein, 11 aa, Homo sapiens
  CDR3 for alpha chain variable domain of TCR clone 170253 (TRAV21, TRAJ31)
CAVRNNARLMF

SEQ ID NO: 340506 - protein, 14 aa, Homo sapiens
  CDR3 for beta chain variable domain of TCR clone 170253 (TRBV11-2, TRBJ2-5)
CASSRTGGIEAQYF

SEQ ID NO: 340507 - protein, 14 aa, Homo sapiens
  CDR3 for alpha chain variable domain of TCR clone 170254 (TRAV17, TRAJ36)
CATVSLNWGKQPLL

SEQ ID NO: 340508 - protein, 13 aa, Homo sapiens
  CDR3 for beta chain variable domain of TCR clone 170254 (TRBV4-1, TRBJ1-1)
CASSQLGTGEAFL

SEQ ID NO: 340509 - protein, 13 aa, Homo sapiens
  CDR3 for alpha chain variable domain of TCR clone 170255 (TRAV2, TRAJ15)
CAVASQAGTALIF

SEQ ID NO: 340510 - protein, 15 aa, Homo sapiens
  CDR3 for beta chain variable domain of TCR clone 170255 (TRBV5-1, TRBJ2-5)
CASSFKGGDQETQYF

SEQ ID NO: 340511 - protein, 16 aa, Homo sapiens
  CDR3 for alpha chain variable domain of TCR clone 170256 (TRAV30, TRAJ24)
CGTEMVDADSWGKFQF

SEQ ID NO: 340512 - protein, 12 aa, Homo sapiens
  CDR3 for beta chain variable domain of TCR clone 170256 (TRBV7-8, TRBJ2-7)
CASSLGDREQYF

SEQ ID NO: 340513 - protein, 12 aa, Homo sapiens
  CDR3 for alpha chain variable domain of TCR clone 170257 (TRAV4, TRAJ26)
CLVGDYGQNVVF

SEQ ID NO: 340514 - protein, 13 aa, Homo sapiens
  CDR3 for beta chain variable domain of TCR clone 170257 (TRBV7-3, TRBJ1-1)
CASSQDWGAEAFF

SEQ ID NO: 340515 - protein, 13 aa, Homo sapiens
  CDR3 for alpha chain variable domain of TCR clone 170258 (TRAV8-3, TRAJ21)
CAVGAYNFNKFYF

SEQ ID NO: 340516 - protein, 14 aa, Homo sapiens
  CDR3 for beta chain variable domain of TCR clone 170258 (TRBV19, TRBJ2-5)
CASSMTGQQETQYF

SEQ ID NO: 340517 - protein, 13 aa, Homo sapiens
  CDR3 for alpha chain variable domain of TCR clone 170259 (TRAV12-2, TRAJ10)
CAVPTGGGNKLTF

SEQ ID NO: 340518 - protein, 14 aa, Homo sapiens
  CDR3 for beta chain variable domain of TCR clone 170259 (TRBV7-3, TRBJ2-7)
CASTILSRGDEQYF

SEQ ID NO: 340519 - protein, 16 aa, Homo sapiens
  CDR3 for alpha chain variable domain of TCR clone 170260 (TRAV26-1, TRAJ28)
CIVRPYSGAGSYQLTF

SEQ ID NO: 340520 - protein, 18 aa, Homo sapiens
  CDR3 for beta chain variable domain of TCR clone 170260 (TRBV20-1, TRBJ2-2)
CSARDLTSWSMDTGELFF

SEQ ID NO: 340521 - protein, 16 aa, Homo sapiens
  CDR3 for alpha chain variable domain of TCR clone 170261 (TRAV2, TRAJ10)
CCGGSTVTGGGNKLTF

SEQ ID NO: 340522 - protein, 16 aa, Homo sapiens
  CDR3 for beta chain variable domain of TCR clone 170261 (TRBV18, TRBJ1-5)
CDSSPSTGNSNQPQHF

SEQ ID NO: 340523 - protein, 13 aa, Homo sapiens
  CDR3 for alpha chain variable domain of TCR clone 170262 (TRAV13-2, TRAJ13)
CAERPGGYQKVTF

SEQ ID NO: 340524 - protein, 15 aa, Homo sapiens
  CDR3 for beta chain variable domain of TCR clone 170262 (TRBV7-3, TRBJ2-2)
CASKANGANTGELFF

SEQ ID NO: 340525 - protein, 13 aa, Homo sapiens
  CDR3 for alpha chain variable domain of TCR clone 170263 (TRAV21, TRAJ27)
CAARPGNAGKSTF

SEQ ID NO: 340526 - protein, 13 aa, Homo sapiens
  CDR3 for beta chain variable domain of TCR clone 170263 (TRBV7-6, TRBJ2-1)
CPQLGGGADEQFF

SEQ ID NO: 340527 - protein, 12 aa, Homo sapiens
  CDR3 for alpha chain variable domain of TCR clone 170264 (TRAV13-1, TRAJ21)
CAAKEGFNKFYF

SEQ ID NO: 340528 - protein, 13 aa, Homo sapiens
  CDR3 for beta chain variable domain of TCR clone 170264 (TRBV12-4, TRBJ2-2)
CASSITGSGELFF

SEQ ID NO: 340529 - protein, 14 aa, Homo sapiens
  CDR3 for alpha chain variable domain of TCR clone 170265 (TRAV12-2, TRAJ24)
CAVTPADSWGNLQF

SEQ ID NO: 340530 - protein, 13 aa, Homo sapiens
  CDR3 for beta chain variable domain of TCR clone 170265 (TRBV7-2, TRBJ2-2)
CASSLAVTGELFF

SEQ ID NO: 340531 - protein, 13 aa, Homo sapiens
  CDR3 for alpha chain variable domain of TCR clone 170266 (TRAV3, TRAJ20)
CCEAFCNDYKLSF

SEQ ID NO: 340532 - protein, 12 aa, Homo sapiens
  CDR3 for beta chain variable domain of TCR clone 170266 (TRBV14, TRBJ2-7)
CASSALKGEQYF

SEQ ID NO: 340533 - protein, 17 aa, Homo sapiens
  CDR3 for alpha chain variable domain of TCR clone 170267 (TRAV4, TRAJ13)
CLVGVQVSSGGYQKVTF

SEQ ID NO: 340534 - protein, 18 aa, Homo sapiens
  CDR3 for beta chain variable domain of TCR clone 170267 (TRBV15, TRBJ2-3)
CATSRDGARSWDTDTQYF

SEQ ID NO: 340535 - protein, 15 aa, Homo sapiens
  CDR3 for alpha chain variable domain of TCR clone 170268 (TRAV8-3, TRAJ15)
CTVGAPNQAGTALIF

SEQ ID NO: 340536 - protein, 14 aa, Homo sapiens
  CDR3 for beta chain variable domain of TCR clone 170268 (TRBV20-1, TRBJ2-1)
CSPNDEASYNEQFF

SEQ ID NO: 340537 - protein, 12 aa, Homo sapiens
  CDR3 for alpha chain variable domain of TCR clone 170269 (TRAV21, TRAJ31)
CVLAGNNARLMF

SEQ ID NO: 340538 - protein, 16 aa, Homo sapiens
  CDR3 for beta chain variable domain of TCR clone 170269 (TRBV27, TRBJ2-5)
CAISFGPGGTKETQYF

SEQ ID NO: 340539 - protein, 14 aa, Homo sapiens
  CDR3 for alpha chain variable domain of TCR clone 170270 (TRAV13-1, TRAJ35)
CAASKGGFGNVLHC

SEQ ID NO: 340540 - protein, 15 aa, Homo sapiens
  CDR3 for beta chain variable domain of TCR clone 170270 (TRBV13, TRBJ1-5)
CASSFGQGGVQPQHF

SEQ ID NO: 340541 - protein, 13 aa, Homo sapiens
  CDR3 for alpha chain variable domain of TCR clone 170271 (TRAV27, TRAJ6)
CAGGTRGSYLPTF

SEQ ID NO: 340542 - protein, 14 aa, Homo sapiens
  CDR3 for beta chain variable domain of TCR clone 170271 (TRBV6-1, TRBJ1-3)
CASVQGGGGNTIYF

SEQ ID NO: 340543 - protein, 12 aa, Homo sapiens
  CDR3 for alpha chain variable domain of TCR clone 170272 (TRAV12-3, TRAJ17)
CAMTLTGNKLTF

SEQ ID NO: 340544 - protein, 12 aa, Homo sapiens
  CDR3 for beta chain variable domain of TCR clone 170272 (TRBV5-1, TRBJ2-1)
QPAEGPYNEQFF

SEQ ID NO: 340545 - protein, 12 aa, Homo sapiens
  CDR3 for alpha chain variable domain of TCR clone 170273 (TRAV3, TRAJ43)
CAVRDPNNDMRF

SEQ ID NO: 340546 - protein, 13 aa, Homo sapiens
  CDR3 for beta chain variable domain of TCR clone 170273 (TRBV11-3, TRBJ2-7)
CASSLDKLYEQYF

SEQ ID NO: 340547 - protein, 16 aa, Homo sapiens
  CDR3 for alpha chain variable domain of TCR clone 170274 (TRAV30, TRAJ24)
CGTEIVDADSWGKFQF

SEQ ID NO: 340548 - protein, 14 aa, Homo sapiens
  CDR3 for beta chain variable domain of TCR clone 170274 (TRBV19, TRBJ2-1)
CASPTCVLSGEQFF

SEQ ID NO: 340549 - protein, 14 aa, Homo sapiens
  CDR3 for alpha chain variable domain of TCR clone 170275 (TRAV26-1, TRAJ38)
CIADNASNNRKLIR

SEQ ID NO: 340550 - protein, 13 aa, Homo sapiens
  CDR3 for beta chain variable domain of TCR clone 170275 (TRBV20-1, TRBJ1-1)
CSARGGGNTEAFF

SEQ ID NO: 340551 - protein, 12 aa, Homo sapiens
  CDR3 for alpha chain variable domain of TCR clone 170276 (TRAV8-3, TRAJ26)
CAVDNYGQNSVF

SEQ ID NO: 340552 - protein, 15 aa, Homo sapiens
  CDR3 for beta chain variable domain of TCR clone 170276 (TRBV9, TRBJ2-1)
CASSLAGSSYNEQFF

SEQ ID NO: 340553 - protein, 10 aa, Homo sapiens
  CDR3 for alpha chain variable domain of TCR clone 170277 (TRAV12-2, TRAJ20)
CAVYHYKLSF

SEQ ID NO: 340554 - protein, 16 aa, Homo sapiens
  CDR3 for beta chain variable domain of TCR clone 170277 (TRBV4-3, TRBJ1-6)
CASSAQPGGEGSPLHF

SEQ ID NO: 340555 - protein, 15 aa, Homo sapiens
  CDR3 for alpha chain variable domain of TCR clone 170278 (TRAV26-1, TRAJ29)
CIVRVEGSGNTPLVF

SEQ ID NO: 340556 - protein, 13 aa, Homo sapiens
  CDR3 for beta chain variable domain of TCR clone 170278 (TRBV5-5, TRBJ1-2)
CASSFWRGEDYTF

SEQ ID NO: 340557 - protein, 16 aa, Homo sapiens
  CDR3 for alpha chain variable domain of TCR clone 170279 (TRAV12-3, TRAJ50)
CAMRDPMKTSYDKVIF

SEQ ID NO: 340558 - protein, 13 aa, Homo sapiens
  CDR3 for beta chain variable domain of TCR clone 170279 (TRBV4-1, TRBJ2-3)
CASSLDFTDTQYF

SEQ ID NO: 340559 - protein, 14 aa, Homo sapiens
  CDR3 for alpha chain variable domain of TCR clone 170280 (TRAV12-2, TRAJ36)
CAVNPPTGANNRFV

SEQ ID NO: 340560 - protein, 13 aa, Homo sapiens
  CDR3 for beta chain variable domain of TCR clone 170280 (TRBV20-1, TRBJ1-6)
CSAPTGLGSPLHF

SEQ ID NO: 340561 - protein, 13 aa, Homo sapiens
  CDR3 for alpha chain variable domain of TCR clone 170281 (TRAV8-6, TRAJ9)
CAVRNTGGFKTIF

SEQ ID NO: 340562 - protein, 13 aa, Homo sapiens
  CDR3 for beta chain variable domain of TCR clone 170281 (TRBV12-4, TRBJ1-1)
CASSPGTGFEAFF

SEQ ID NO: 340563 - protein, 12 aa, Homo sapiens
  CDR3 for alpha chain variable domain of TCR clone 170282 (TRAV21, TRAJ39)
CAADNAGNMLAF

SEQ ID NO: 340564 - protein, 12 aa, Homo sapiens
  CDR3 for beta chain variable domain of TCR clone 170282 (TRBV5-4, TRBJ2-7)
CASSWAGQGENF

SEQ ID NO: 340565 - protein, 16 aa, Homo sapiens
  CDR3 for alpha chain variable domain of TCR clone 170283 (TRAV12-2, TRAJ52)
CAVNNRGGTSYGKRTF

SEQ ID NO: 340566 - protein, 12 aa, Homo sapiens
  CDR3 for beta chain variable domain of TCR clone 170283 (TRBV7-3, TRBJ2-1)
CASSFQSGPQFF

SEQ ID NO: 340567 - protein, 18 aa, Homo sapiens
  CDR3 for alpha chain variable domain of TCR clone 170284 (TRAV21, TRAJ52)
CAVRPSPAGGTSYGKLTF

SEQ ID NO: 340568 - protein, 15 aa, Homo sapiens
  CDR3 for beta chain variable domain of TCR clone 170284 (TRBV6-3, TRBJ2-3)
RLIHYSVGQADTQYF

SEQ ID NO: 340569 - protein, 18 aa, Homo sapiens
  CDR3 for alpha chain variable domain of TCR clone 170285 (TRAV13-1, TRAJ52)
CAAKNPNAGGTSYGKLTF

SEQ ID NO: 340570 - protein, 14 aa, Homo sapiens
  CDR3 for beta chain variable domain of TCR clone 170285 (TRBV7-3, TRBJ2-1)
CAGSLAGGTNEQFF

SEQ ID NO: 340571 - protein, 12 aa, Homo sapiens
  CDR3 for alpha chain variable domain of TCR clone 170286 (TRAV21, TRAJ11)
CAATSGYSTLPF

SEQ ID NO: 340572 - protein, 14 aa, Homo sapiens
  CDR3 for beta chain variable domain of TCR clone 170286 (TRBV20-1, TRBJ2-7)
CSAPEMAGVGEQYF

SEQ ID NO: 340573 - protein, 13 aa, Homo sapiens
  CDR3 for alpha chain variable domain of TCR clone 170287 (TRAV26-1, TRAJ48)
CIVRVVGAEKLTF

SEQ ID NO: 340574 - protein, 17 aa, Homo sapiens
  CDR3 for beta chain variable domain of TCR clone 170287 (TRBV7-3, TRBJ2-2)
CASSLSGTSGGTGELFF

SEQ ID NO: 340575 - protein, 13 aa, Homo sapiens
  CDR3 for alpha chain variable domain of TCR clone 170288 (TRAV35, TRAJ47)
CAGSGEYGNKLVF

SEQ ID NO: 340576 - protein, 15 aa, Homo sapiens
  CDR3 for beta chain variable domain of TCR clone 170288 (TRBV15, TRBJ1-5)
CATSRDPVSNQPQHF

SEQ ID NO: 340577 - protein, 17 aa, Homo sapiens
  CDR3 for alpha chain variable domain of TCR clone 170289 (TRAV13-1, TRAJ53)
CAASWKSSGGSNYKLTF

SEQ ID NO: 340578 - protein, 14 aa, Homo sapiens
  CDR3 for beta chain variable domain of TCR clone 170289 (TRBV12-5, TRBJ2-5)
CASGSRTHQETQYF

SEQ ID NO: 340579 - protein, 10 aa, Homo sapiens
  CDR3 for alpha chain variable domain of TCR clone 170290 (TRAV25, TRAJ44)
GTGTASKLTF

SEQ ID NO: 340580 - protein, 13 aa, Homo sapiens
  CDR3 for beta chain variable domain of TCR clone 170290 (TRBV10-3, TRBJ2-7)
CASKLAVNYEQYF

SEQ ID NO: 340581 - protein, 13 aa, Homo sapiens
  CDR3 for alpha chain variable domain of TCR clone 170291 (TRAV8-3, TRAJ43)
CAVVPYNNNDMRF

SEQ ID NO: 340582 - protein, 14 aa, Homo sapiens
  CDR3 for beta chain variable domain of TCR clone 170291 (TRBV2, TRBJ2-1)
CASSEALIYNEQFF

SEQ ID NO: 340583 - protein, 12 aa, Homo sapiens
  CDR3 for alpha chain variable domain of TCR clone 170292 (TRAV3, TRAJ31)
RAVRDGNARLMF

SEQ ID NO: 340584 - protein, 18 aa, Homo sapiens
  CDR3 for beta chain variable domain of TCR clone 170292 (TRBV7-2, TRBJ2-3)
CASSLKREGSGITDTQYF

SEQ ID NO: 340585 - protein, 15 aa, Homo sapiens
  CDR3 for alpha chain variable domain of TCR clone 170293 (TRAV8-3, TRAJ27)
CAVGPSKTNAGKSTF

SEQ ID NO: 340586 - protein, 15 aa, Homo sapiens
  CDR3 for beta chain variable domain of TCR clone 170293 (TRBV7-2, TRBJ1-2)
CASSPRAGWNYGYTF

SEQ ID NO: 340587 - protein, 13 aa, Homo sapiens
  CDR3 for alpha chain variable domain of TCR clone 170294 (TRAV8-1, TRAJ23)
CACRDNQGGKLIF

SEQ ID NO: 340588 - protein, 13 aa, Homo sapiens
  CDR3 for beta chain variable domain of TCR clone 170294 (TRBV20-1, TRBJ2-7)
CSATHTSGYELYF

SEQ ID NO: 340589 - protein, 14 aa, Homo sapiens
  CDR3 for alpha chain variable domain of TCR clone 170295 (TRAV12-2, TRAJ13)
CAVKKSGGYQKVTF

SEQ ID NO: 340590 - protein, 13 aa, Homo sapiens
  CDR3 for beta chain variable domain of TCR clone 170295 (TRBV10-3, TRBJ2-7)
CASKLAVNYEQYF

SEQ ID NO: 340591 - protein, 15 aa, Homo sapiens
  CDR3 for alpha chain variable domain of TCR clone 170296 (TRAV20, TRAJ50)
CAVRHMKTSYDKVIF

SEQ ID NO: 340592 - protein, 17 aa, Homo sapiens
  CDR3 for beta chain variable domain of TCR clone 170296 (TRBV28, TRBJ2-7)
CASSPLHRASGVYEQYF

SEQ ID NO: 340593 - protein, 14 aa, Homo sapiens
  CDR3 for alpha chain variable domain of TCR clone 170297 (TRAV20, TRAJ17)
CAVRREAAGNKLTF

SEQ ID NO: 340594 - protein, 16 aa, Homo sapiens
  CDR3 for beta chain variable domain of TCR clone 170297 (TRBV20-1, TRBJ1-4)
CSARGLMGPTNEKLFF

SEQ ID NO: 340595 - protein, 13 aa, Homo sapiens
  CDR3 for alpha chain variable domain of TCR clone 170298 (TRAV8-3, TRAJ43)
CAVVPYNNNYMRF

SEQ ID NO: 340596 - protein, 16 aa, Homo sapiens
  CDR3 for beta chain variable domain of TCR clone 170298 (TRBV7-2, TRBJ2-5)
CASSPFPTGGEETQYF

SEQ ID NO: 340597 - protein, 14 aa, Homo sapiens
  CDR3 for alpha chain variable domain of TCR clone 170299 (TRAV13-1, TRAJ9)
CAASALTGGFKTIF

SEQ ID NO: 340598 - protein, 17 aa, Homo sapiens
  CDR3 for beta chain variable domain of TCR clone 170299 (TRBV4-1, TRBJ2-5)
CASSQDLTGGPIETQYF

SEQ ID NO: 340599 - protein, 12 aa, Homo sapiens
  CDR3 for alpha chain variable domain of TCR clone 170300 (TRAV1-1, TRAJ30)
CAVRGRDDKIIL

SEQ ID NO: 340600 - protein, 15 aa, Homo sapiens
  CDR3 for beta chain variable domain of TCR clone 170300 (TRBV2, TRBJ2-4)
CASSGTNLAKNIQYF

SEQ ID NO: 340601 - protein, 14 aa, Homo sapiens
  CDR3 for alpha chain variable domain of TCR clone 170301 (TRAV1-2, TRAJ8)
CAVREDTGFQKLVF

SEQ ID NO: 340602 - protein, 14 aa, Homo sapiens
  CDR3 for beta chain variable domain of TCR clone 170301 (TRBV19, TRBJ2-1)
CARGARSFQWEQFF

SEQ ID NO: 340603 - protein, 16 aa, Homo sapiens
  CDR3 for alpha chain variable domain of TCR clone 170302 (TRAV3, TRAJ3)
CAVRDRAKSGASKIIF

SEQ ID NO: 340604 - protein, 16 aa, Homo sapiens
  CDR3 for beta chain variable domain of TCR clone 170302 (TRBV20-1, TRBJ2-4)
CSATSLAELAKNIQYF

SEQ ID NO: 340605 - protein, 12 aa, Homo sapiens
  CDR3 for alpha chain variable domain of TCR clone 170303 (TRAV17, TRAJ20)
CATDSNDYKLSF

SEQ ID NO: 340606 - protein, 17 aa, Homo sapiens
  CDR3 for beta chain variable domain of TCR clone 170303 (TRBV5-1, TRBJ2-2)
SASSLAGLSGGTGELFF

SEQ ID NO: 340607 - protein, 11 aa, Homo sapiens
  CDR3 for alpha chain variable domain of TCR clone 170304 (TRAV12-1, TRAJ21)
CVVNNFNKFYF

SEQ ID NO: 340608 - protein, 15 aa, Homo sapiens
  CDR3 for beta chain variable domain of TCR clone 170304 (TRBV7-2, TRBJ2-1)
CASSLVAGRYNEQFF

SEQ ID NO: 340609 - protein, 12 aa, Homo sapiens
  CDR3 for alpha chain variable domain of TCR clone 170305 (TRAV21, TRAJ37)
CAVRGNTGKLIY

SEQ ID NO: 340610 - protein, 14 aa, Homo sapiens
  CDR3 for beta chain variable domain of TCR clone 170305 (TRBV19, TRBJ2-1)
CASEVTGARNEQFF

SEQ ID NO: 340611 - protein, 16 aa, Homo sapiens
  CDR3 for alpha chain variable domain of TCR clone 170306 (TRAV13-2, TRAJ32)
CAENMNYGGATNKFIF

SEQ ID NO: 340612 - protein, 14 aa, Homo sapiens
  CDR3 for beta chain variable domain of TCR clone 170306 (TRBV15, TRBJ2-5)
CATSSTGYQETQYF

SEQ ID NO: 340613 - protein, 13 aa, Homo sapiens
  CDR3 for alpha chain variable domain of TCR clone 170307 (TRAV16, TRAJ10)
YALLTGGGNKLTF

SEQ ID NO: 340614 - protein, 12 aa, Homo sapiens
  CDR3 for beta chain variable domain of TCR clone 170307 (TRBV28, TRBJ2-7)
CASTGNHYEQYF

SEQ ID NO: 340615 - protein, 16 aa, Homo sapiens
  CDR3 for alpha chain variable domain of TCR clone 170308 (TRAV12-2, TRAJ18)
CAVTTDRGSTLGRLYF

SEQ ID NO: 340616 - protein, 13 aa, Homo sapiens
  CDR3 for beta chain variable domain of TCR clone 170308 (TRBV4-2, TRBJ1-1)
CASSQVGNTEAFF

SEQ ID NO: 340617 - protein, 13 aa, Homo sapiens
  CDR3 for alpha chain variable domain of TCR clone 170309 (TRAV12-1, TRAJ26)
CVVRRNYGQNFVF

SEQ ID NO: 340618 - protein, 15 aa, Homo sapiens
  CDR3 for beta chain variable domain of TCR clone 170309 (TRBV28, TRBJ2-1)
CASSIIAGGRSEQYF

SEQ ID NO: 340619 - protein, 12 aa, Homo sapiens
  CDR3 for alpha chain variable domain of TCR clone 170310 (TRAV13-2, TRAJ23)
CAERHRGGKLIF

SEQ ID NO: 340620 - protein, 16 aa, Homo sapiens
  CDR3 for beta chain variable domain of TCR clone 170310 (TRBV3-1, TRBJ2-5)
CASSPGQFNGFGTQYF

SEQ ID NO: 340621 - protein, 14 aa, Homo sapiens
  CDR3 for alpha chain variable domain of TCR clone 170311 (TRAV8-4, TRAJ43)
CAASDPRNNNNMRF

SEQ ID NO: 340622 - protein, 15 aa, Homo sapiens
  CDR3 for beta chain variable domain of TCR clone 170311 (TRBV4-2, TRBJ1-2)
CASSQRTGGRDGYTF

SEQ ID NO: 340623 - protein, 14 aa, Homo sapiens
  CDR3 for alpha chain variable domain of TCR clone 170312 (TRAV13-1, TRAJ9)
CAASALTGGFKTIF

SEQ ID NO: 340624 - protein, 13 aa, Homo sapiens
  CDR3 for beta chain variable domain of TCR clone 170312 (TRBV20-1, TRBJ1-1)
CSAPLGGGTEAFF

SEQ ID NO: 340625 - protein, 14 aa, Homo sapiens
  CDR3 for alpha chain variable domain of TCR clone 170313 (TRAV13-1, TRAJ35)
CAASKGGFGNVLHC

SEQ ID NO: 340626 - protein, 11 aa, Homo sapiens
  CDR3 for beta chain variable domain of TCR clone 170313 (TRBV13, TRBJ2-2)
CASSPRTGEHT

SEQ ID NO: 340627 - protein, 14 aa, Homo sapiens
  CDR3 for alpha chain variable domain of TCR clone 170314 (TRAV25, TRAJ44)
CAVFPTGTASKLTF

SEQ ID NO: 340628 - protein, 18 aa, Homo sapiens
  CDR3 for beta chain variable domain of TCR clone 170314 (TRBV11-2, TRBJ2-3)
CASSLGGASRGAPNTQYF

SEQ ID NO: 340629 - protein, 13 aa, Homo sapiens
  CDR3 for alpha chain variable domain of TCR clone 170315 (TRAV21, TRAJ57)
CAVIEGGSEQLVF

SEQ ID NO: 340630 - protein, 14 aa, Homo sapiens
  CDR3 for beta chain variable domain of TCR clone 170315 (TRBV12-5, TRBJ2-5)
CASGSRTHQETQYF

SEQ ID NO: 340631 - protein, 13 aa, Homo sapiens
  CDR3 for alpha chain variable domain of TCR clone 170316 (TRAV8-3, TRAJ37)
CAVPSSNTGKLIF

SEQ ID NO: 340632 - protein, 18 aa, Homo sapiens
  CDR3 for beta chain variable domain of TCR clone 170316 (TRBV25-1, TRBJ1-2)
CASSGLQNGQGLIFGYTF

SEQ ID NO: 340633 - protein, 12 aa, Homo sapiens
  CDR3 for alpha chain variable domain of TCR clone 170317 (TRAV13-1, TRAJ22)
DLSSGSARQLTF

SEQ ID NO: 340634 - protein, 13 aa, Homo sapiens
  CDR3 for beta chain variable domain of TCR clone 170317 (TRBV7-7, TRBJ1-5)
CASSPGNNQPQHF

SEQ ID NO: 340635 - protein, 18 aa, Homo sapiens
  CDR3 for alpha chain variable domain of TCR clone 170318 (TRAV13-1, TRAJ52)
CAAKNPNAGCTIYGKLTF

SEQ ID NO: 340636 - protein, 15 aa, Homo sapiens
  CDR3 for beta chain variable domain of TCR clone 170318 (TRBV28, TRBJ2-3)
CASSPDRQGANTQYF

SEQ ID NO: 340637 - protein, 14 aa, Homo sapiens
  CDR3 for alpha chain variable domain of TCR clone 170319 (TRAV1-2, TRAJ16)
CAVNRFSDGQNLLF

SEQ ID NO: 340638 - protein, 17 aa, Homo sapiens
  CDR3 for beta chain variable domain of TCR clone 170319 (TRBV20-1, TRBJ2-1)
CSASSSGLAGSYNEQFF

SEQ ID NO: 340639 - protein, 12 aa, Homo sapiens
  CDR3 for alpha chain variable domain of TCR clone 170320 (TRAV12-2, TRAJ45)
CASGVGADGLTF

SEQ ID NO: 340640 - protein, 16 aa, Homo sapiens
  CDR3 for beta chain variable domain of TCR clone 170320 (TRBV19, TRBJ2-3)
CASSPGLLASTDTQYF

SEQ ID NO: 340641 - protein, 10 aa, Homo sapiens
  CDR3 for alpha chain variable domain of TCR clone 170321 (TRAV30, TRAJ48)
CGIGNEKLTF

SEQ ID NO: 340642 - protein, 15 aa, Homo sapiens
  CDR3 for beta chain variable domain of TCR clone 170321 (TRBV19, TRBJ1-5)
CASSIVWADNQPQHF

SEQ ID NO: 340643 - protein, 18 aa, Homo sapiens
  CDR3 for alpha chain variable domain of TCR clone 170322 (TRAV17, TRAJ45)
CATSLDLYSGGGADGLTF

SEQ ID NO: 340644 - protein, 12 aa, Homo sapiens
  CDR3 for beta chain variable domain of TCR clone 170322 (TRBV11-2, TRBJ2-2)
CASSLGGGELFF

SEQ ID NO: 340645 - protein, 15 aa, Homo sapiens
  CDR3 for alpha chain variable domain of TCR clone 170323 (TRAV25, TRAJ43)
CAVFMRFVAGTRLTL

SEQ ID NO: 340646 - protein, 13 aa, Homo sapiens
  CDR3 for beta chain variable domain of TCR clone 170323 (TRBV7-9, TRBJ1-2)
CASSLKQNYGYTF

SEQ ID NO: 340647 - protein, 15 aa, Homo sapiens
  CDR3 for alpha chain variable domain of TCR clone 170324 (TRAV20, TRAJ53)
CAVQASGGSNYKLTF

SEQ ID NO: 340648 - protein, 16 aa, Homo sapiens
  CDR3 for beta chain variable domain of TCR clone 170324 (TRBV7-9, TRBJ1-2)
CASSLGFSSGEDGYTF

SEQ ID NO: 340649 - protein, 12 aa, Homo sapiens
  CDR3 for alpha chain variable domain of TCR clone 170325 (TRAV20, TRAJ45)
CAVRGGADGLTF

SEQ ID NO: 340650 - protein, 17 aa, Homo sapiens
  CDR3 for beta chain variable domain of TCR clone 170325 (TRBV20-1, TRBJ2-2)
CSASGSGQGGLTGELFF

SEQ ID NO: 340651 - protein, 15 aa, Homo sapiens
  CDR3 for alpha chain variable domain of TCR clone 170326 (TRAV12-2, TRAJ28)
CRDPHSGAGSYQLTF

SEQ ID NO: 340652 - protein, 14 aa, Homo sapiens
  CDR3 for beta chain variable domain of TCR clone 170326 (TRBV7-8, TRBJ2-3)
CASSLEAGTDTQYF

SEQ ID NO: 340653 - protein, 10 aa, Homo sapiens
  CDR3 for alpha chain variable domain of TCR clone 170327 (TRAV16, TRAJ22)
SAMYLRQLTF

SEQ ID NO: 340654 - protein, 15 aa, Homo sapiens
  CDR3 for beta chain variable domain of TCR clone 170327 (TRBV7-2, TRBJ2-2)
CASRRPGQNTGELFF

SEQ ID NO: 340655 - protein, 13 aa, Homo sapiens
  CDR3 for alpha chain variable domain of TCR clone 170328 (TRAV16, TRAJ20)
CALSEGFKAALEP

SEQ ID NO: 340656 - protein, 12 aa, Homo sapiens
  CDR3 for beta chain variable domain of TCR clone 170328 (TRBV19, TRBJ1-5)
CASSIAQQPQHF

SEQ ID NO: 340657 - protein, 12 aa, Homo sapiens
  CDR3 for alpha chain variable domain of TCR clone 170329 (TRAV12-1, TRAJ40)
CVVYSGTYKYIF

SEQ ID NO: 340658 - protein, 17 aa, Homo sapiens
  CDR3 for beta chain variable domain of TCR clone 170329 (TRBV11-3, TRBJ1-5)
CAISPLTGLRGNQPQHF

SEQ ID NO: 340659 - protein, 13 aa, Homo sapiens
  CDR3 for alpha chain variable domain of TCR clone 170330 (TRAV13-1, TRAJ11)
CAASIRGYSTLTF

SEQ ID NO: 340660 - protein, 17 aa, Homo sapiens
  CDR3 for beta chain variable domain of TCR clone 170330 (TRBV4-3, TRBJ1-2)
CASISRLQAGGSVGYTF

SEQ ID NO: 340661 - protein, 14 aa, Homo sapiens
  CDR3 for alpha chain variable domain of TCR clone 170331 (TRAV1-2, TRAJ16)
CAVNRFSDGQKLLF

SEQ ID NO: 340662 - protein, 11 aa, Homo sapiens
  CDR3 for beta chain variable domain of TCR clone 170331 (TRBV29-1, TRBJ2-5)
CSEDLTGTQYF

SEQ ID NO: 340663 - protein, 14 aa, Homo sapiens
  CDR3 for alpha chain variable domain of TCR clone 170332 (TRAV8-6, TRAJ54)
CAVSDFQGAQKLVF

SEQ ID NO: 340664 - protein, 13 aa, Homo sapiens
  CDR3 for beta chain variable domain of TCR clone 170332 (TRBV7-9, TRBJ1-2)
CASSLKQNYGYTF

SEQ ID NO: 340665 - protein, 14 aa, Homo sapiens
  CDR3 for alpha chain variable domain of TCR clone 170333 (TRAV1-2, TRAJ16)
CAVNRFSDGQKLLF

SEQ ID NO: 340666 - protein, 16 aa, Homo sapiens
  CDR3 for beta chain variable domain of TCR clone 170333 (TRBV12-4, TRBJ2-7)
CASSPGGQGSSYEQYF

SEQ ID NO: 340667 - protein, 11 aa, Homo sapiens
  CDR3 for alpha chain variable domain of TCR clone 170334 (TRAV13-2, TRAJ54)
RAVQGAQKLVF

SEQ ID NO: 340668 - protein, 13 aa, Homo sapiens
  CDR3 for beta chain variable domain of TCR clone 170334 (TRBV7-9, TRBJ2-1)
CASSLDVGNEQFF

SEQ ID NO: 340669 - protein, 13 aa, Homo sapiens
  CDR3 for alpha chain variable domain of TCR clone 170335 (TRAV21, TRAJ27)
CAARPGNAGKSTF

SEQ ID NO: 340670 - protein, 13 aa, Homo sapiens
  CDR3 for beta chain variable domain of TCR clone 170335 (TRBV7-2, TRBJ2-2)
CASSSVRAGELFF

SEQ ID NO: 340671 - protein, 13 aa, Homo sapiens
  CDR3 for alpha chain variable domain of TCR clone 170336 (TRAV12-2, TRAJ47)
CAVTMEYGNKLVF

SEQ ID NO: 340672 - protein, 13 aa, Homo sapiens
  CDR3 for beta chain variable domain of TCR clone 170336 (TRBV7-2, TRBJ2-2)
CASSLAVTGELFF

SEQ ID NO: 340673 - protein, 12 aa, Homo sapiens
  CDR3 for alpha chain variable domain of TCR clone 170337 (TRAV12-1, TRAJ20)
CVVNPDDYKPSF

SEQ ID NO: 340674 - protein, 15 aa, Homo sapiens
  CDR3 for beta chain variable domain of TCR clone 170337 (TRBV11-3, TRBJ2-2)
CASSLVGTGAGELFF

SEQ ID NO: 340675 - protein, 15 aa, Homo sapiens
  CDR3 for alpha chain variable domain of TCR clone 170338 (TRAV35, TRAJ32)
CAGQLPIGATNKLIF

SEQ ID NO: 340676 - protein, 15 aa, Homo sapiens
  CDR3 for beta chain variable domain of TCR clone 170338 (TRBV2, TRBJ2-3)
CASSDFEKATDTQYF

SEQ ID NO: 340677 - protein, 13 aa, Homo sapiens
  CDR3 for alpha chain variable domain of TCR clone 170339 (TRAV2, TRAJ29)
CAAQYSGNTPLVF

SEQ ID NO: 340678 - protein, 14 aa, Homo sapiens
  CDR3 for beta chain variable domain of TCR clone 170339 (TRBV7-9, TRBJ2-4)
CASSLAMGGNMQYF

SEQ ID NO: 340679 - protein, 14 aa, Homo sapiens
  CDR3 for alpha chain variable domain of TCR clone 170340 (TRAV12-3, TRAJ12)
CALSEVDGSYKLIF

SEQ ID NO: 340680 - protein, 12 aa, Homo sapiens
  CDR3 for beta chain variable domain of TCR clone 170340 (TRBV18, TRBJ1-4)
CASSPSREKLFF

SEQ ID NO: 340681 - protein, 12 aa, Homo sapiens
  CDR3 for alpha chain variable domain of TCR clone 170341 (TRAV13-2, TRAJ23)
CAERHRGGKLIF

SEQ ID NO: 340682 - protein, 14 aa, Homo sapiens
  CDR3 for beta chain variable domain of TCR clone 170341 (TRBV18, TRBJ2-7)
RASSPRGGAYEQYF

SEQ ID NO: 340683 - protein, 14 aa, Homo sapiens
  CDR3 for alpha chain variable domain of TCR clone 170342 (TRAV8-4, TRAJ13)
CAVTLSGGYQKVTF

SEQ ID NO: 340684 - protein, 14 aa, Homo sapiens
  CDR3 for beta chain variable domain of TCR clone 170342 (TRBV7-2, TRBJ1-2)
CASSQTGSNYGQHF

SEQ ID NO: 340685 - protein, 14 aa, Homo sapiens
  CDR3 for alpha chain variable domain of TCR clone 170343 (TRAV17, TRAJ22)
CATSPSGSARQLTF

SEQ ID NO: 340686 - protein, 15 aa, Homo sapiens
  CDR3 for beta chain variable domain of TCR clone 170343 (TRBV4-1, TRBJ2-5)
CASRQWGLYQETQYF

SEQ ID NO: 340687 - protein, 13 aa, Homo sapiens
  CDR3 for alpha chain variable domain of TCR clone 170344 (TRAV2, TRAJ15)
CAVASQAGTALIF

SEQ ID NO: 340688 - protein, 12 aa, Homo sapiens
  CDR3 for beta chain variable domain of TCR clone 170344 (TRBV6-5, TRBJ2-3)
CASMGRGDTQYF

SEQ ID NO: 340689 - protein, 14 aa, Homo sapiens
  CDR3 for alpha chain variable domain of TCR clone 170345 (TRAV21, TRAJ35)
CAVMPIGFGNVLHC

SEQ ID NO: 340690 - protein, 17 aa, Homo sapiens
  CDR3 for beta chain variable domain of TCR clone 170345 (TRBV7-9, TRBJ2-7)
CASSGRGTGGRFYEQYF

SEQ ID NO: 340691 - protein, 12 aa, Homo sapiens
  CDR3 for alpha chain variable domain of TCR clone 170346 (TRAV1-2, TRAJ29)
CAVPSGNKPLVF

SEQ ID NO: 340692 - protein, 12 aa, Homo sapiens
  CDR3 for beta chain variable domain of TCR clone 170346 (TRBV7-9, TRBJ2-7)
CASSFGSYEQYF

SEQ ID NO: 340693 - protein, 12 aa, Homo sapiens
  CDR3 for alpha chain variable domain of TCR clone 170347 (TRAV23/DV6, TRAJ43)
CAASYIKGDMRF

SEQ ID NO: 340694 - protein, 13 aa, Homo sapiens
  CDR3 for beta chain variable domain of TCR clone 170347 (TRBV10-3, TRBJ2-7)
CASKLAVNYEQYF

SEQ ID NO: 340695 - protein, 16 aa, Homo sapiens
  CDR3 for alpha chain variable domain of TCR clone 170348 (TRAV13-1, TRAJ10)
CAAGYILTGVGNKLTF

SEQ ID NO: 340696 - protein, 15 aa, Homo sapiens
  CDR3 for beta chain variable domain of TCR clone 170348 (TRBV12-4, TRBJ2-7)
CASSQTGAISYEQYF

SEQ ID NO: 340697 - protein, 15 aa, Homo sapiens
  CDR3 for alpha chain variable domain of TCR clone 170349 (TRAV12-1, TRAJ44)
CVADLPTGTASKLTF

SEQ ID NO: 340698 - protein, 13 aa, Homo sapiens
  CDR3 for beta chain variable domain of TCR clone 170349 (TRBV6-6, TRBJ2-5)
CASSPQGGETQYF

SEQ ID NO: 340699 - protein, 14 aa, Homo sapiens
  CDR3 for alpha chain variable domain of TCR clone 170350 (TRAV4, TRAJ30)
CLVGDMNRDDKIIF

SEQ ID NO: 340700 - protein, 15 aa, Homo sapiens
  CDR3 for beta chain variable domain of TCR clone 170350 (TRBV7-2, TRBJ2-7)
CVSSLSSGRTYEQYF

SEQ ID NO: 340701 - protein, 15 aa, Homo sapiens
  CDR3 for alpha chain variable domain of TCR clone 170351 (TRAV8-3, TRAJ45)
CASSYSGGGADGLTF

SEQ ID NO: 340702 - protein, 13 aa, Homo sapiens
  CDR3 for beta chain variable domain of TCR clone 170351 (TRBV7-9, TRBJ2-7)
CASRVAGAYEQYF

SEQ ID NO: 340703 - protein, 14 aa, Homo sapiens
  CDR3 for alpha chain variable domain of TCR clone 170352 (TRAV3, TRAJ36)
CAVRDGTGANNLFF

SEQ ID NO: 340704 - protein, 14 aa, Homo sapiens
  CDR3 for beta chain variable domain of TCR clone 170352 (TRBV5-5, TRBJ1-5)
CASSGQGVDQPQHF

SEQ ID NO: 340705 - protein, 16 aa, Homo sapiens
  CDR3 for alpha chain variable domain of TCR clone 170353 (TRAV30, TRAJ24)
CGTEIVDADSWGKFQF

SEQ ID NO: 340706 - protein, 15 aa, Homo sapiens
  CDR3 for beta chain variable domain of TCR clone 170353 (TRBV7-8, TRBJ2-7)
CASSVGRAGSYEQYF

SEQ ID NO: 340707 - protein, 14 aa, Homo sapiens
  CDR3 for alpha chain variable domain of TCR clone 170354 (TRAV23/DV6, TRAJ11)
CAALIGGGYSTLTF

SEQ ID NO: 340708 - protein, 15 aa, Homo sapiens
  CDR3 for beta chain variable domain of TCR clone 170354 (TRBV9, TRBJ1-6)
CASSVAGTGDSPLHF

SEQ ID NO: 340709 - protein, 15 aa, Homo sapiens
  CDR3 for alpha chain variable domain of TCR clone 170355 (TRAV3, TRAJ47)
CAVRDIGEYGNKLVF

SEQ ID NO: 340710 - protein, 12 aa, Homo sapiens
  CDR3 for beta chain variable domain of TCR clone 170355 (TRBV7-8, TRBJ2-7)
CASSLGDREQYF

SEQ ID NO: 340711 - protein, 14 aa, Homo sapiens
  CDR3 for alpha chain variable domain of TCR clone 170356 (TRAV1-2, TRAJ16)
CAVNRFSDGQKLLF

SEQ ID NO: 340712 - protein, 14 aa, Homo sapiens
  CDR3 for beta chain variable domain of TCR clone 170356 (TRBV7-2, TRBJ1-2)
CASSQTGSTYGYAF

SEQ ID NO: 340713 - protein, 11 aa, Homo sapiens
  CDR3 for alpha chain variable domain of TCR clone 170357 (TRAV21, TRAJ49)
CAVSFGNQFYF

SEQ ID NO: 340714 - protein, 15 aa, Homo sapiens
  CDR3 for beta chain variable domain of TCR clone 170357 (TRBV10-3, TRBJ2-1)
CAANGGPGQGDEQFF

SEQ ID NO: 340715 - protein, 15 aa, Homo sapiens
  CDR3 for alpha chain variable domain of TCR clone 170358 (TRAV17, TRAJ22)
CATAPISGSARQLTF

SEQ ID NO: 340716 - protein, 17 aa, Homo sapiens
  CDR3 for beta chain variable domain of TCR clone 170358 (TRBV11-2, TRBJ2-1)
CASSLYPPGVEYNEQFF

SEQ ID NO: 340717 - protein, 12 aa, Homo sapiens
  CDR3 for alpha chain variable domain of TCR clone 170359 (TRAV13-1, TRAJ49)
CAASIRSNQFNF

SEQ ID NO: 340718 - protein, 14 aa, Homo sapiens
  CDR3 for beta chain variable domain of TCR clone 170359 (TRBV7-2, TRBJ2-1)
CASSPGLAGNEQFF

SEQ ID NO: 340719 - protein, 13 aa, Homo sapiens
  CDR3 for alpha chain variable domain of TCR clone 170360 (TRAV12-2, TRAJ20)
CAVGLRVDYKLSF

SEQ ID NO: 340720 - protein, 13 aa, Homo sapiens
  CDR3 for beta chain variable domain of TCR clone 170360 (TRBV6-1, TRBJ1-1)
CASSRQGNTEAFF

SEQ ID NO: 340721 - protein, 15 aa, Homo sapiens
  CDR3 for alpha chain variable domain of TCR clone 170361 (TRAV3, TRAJ5)
SAVRDLDTGRRALTS

SEQ ID NO: 340722 - protein, 13 aa, Homo sapiens
  CDR3 for beta chain variable domain of TCR clone 170361 (TRBV12-4, TRBJ2-7)
CASSPTETYEQYF

SEQ ID NO: 340723 - protein, 15 aa, Homo sapiens
  CDR3 for alpha chain variable domain of TCR clone 170362 (TRAV8-3, TRAJ45)
CASSYSGGGADGLTF

SEQ ID NO: 340724 - protein, 15 aa, Homo sapiens
  CDR3 for beta chain variable domain of TCR clone 170362 (TRBV2, TRBJ2-1)
RASSVTSEGTDEQFF

SEQ ID NO: 340725 - protein, 17 aa, Homo sapiens
  CDR3 for alpha chain variable domain of TCR clone 170363 (TRAV38-2/DV8, TRAJ57)
CAYRSVLTQGGSETLVF

SEQ ID NO: 340726 - protein, 16 aa, Homo sapiens
  CDR3 for beta chain variable domain of TCR clone 170363 (TRBV7-3, TRBJ2-2)
CASSLKRGTLSGELFF

SEQ ID NO: 340727 - protein, 18 aa, Homo sapiens
  CDR3 for alpha chain variable domain of TCR clone 170364 (TRAV26-1, TRAJ23)
CIVRVGLEVWNQGGKLIF

SEQ ID NO: 340728 - protein, 20 aa, Homo sapiens
  CDR3 for beta chain variable domain of TCR clone 170364 (TRBV12-4, TRBJ2-5)
CASSFLSGGAKRPSTSGQHA

SEQ ID NO: 340729 - protein, 13 aa, Homo sapiens
  CDR3 for alpha chain variable domain of TCR clone 170365 (TRAV12-2, TRAJ42)
CAVKRGSQGNVIF

SEQ ID NO: 340730 - protein, 13 aa, Homo sapiens
  CDR3 for beta chain variable domain of TCR clone 170365 (TRBV7-9, TRBJ2-3)
CASSPGSTDTQYF

SEQ ID NO: 340731 - protein, 14 aa, Homo sapiens
  CDR3 for alpha chain variable domain of TCR clone 170366 (TRAV1-2, TRAJ16)
CAVNRFSAGQKLLF

SEQ ID NO: 340732 - protein, 12 aa, Homo sapiens
  CDR3 for beta chain variable domain of TCR clone 170366 (TRBV5-7, TRBJ1-1)
CASSLGRGKAFF

SEQ ID NO: 340733 - protein, 15 aa, Homo sapiens
  CDR3 for alpha chain variable domain of TCR clone 170367 (TRAV29/DV5, TRAJ24)
CAASGATDSWGKFHF

SEQ ID NO: 340734 - protein, 13 aa, Homo sapiens
  CDR3 for beta chain variable domain of TCR clone 170367 (TRBV19, TRBJ1-2)
CASSVPGQDGYTF

SEQ ID NO: 340735 - protein, 14 aa, Homo sapiens
  CDR3 for alpha chain variable domain of TCR clone 170368 (TRAV2, TRAJ9)
CAGEDRSGGFKTIF

SEQ ID NO: 340736 - protein, 14 aa, Homo sapiens
  CDR3 for beta chain variable domain of TCR clone 170368 (TRBV28, TRBJ2-7)
CASTFYGRAHEQYF

SEQ ID NO: 340737 - protein, 17 aa, Homo sapiens
  CDR3 for alpha chain variable domain of TCR clone 170369 (TRAV12-1, TRAJ42)
CVVNMQRKGGSQGNLIF

SEQ ID NO: 340738 - protein, 15 aa, Homo sapiens
  CDR3 for beta chain variable domain of TCR clone 170369 (TRBV20-1, TRBJ2-7)
CSARVPAAYFYEQYF

SEQ ID NO: 340739 - protein, 13 aa, Homo sapiens
  CDR3 for alpha chain variable domain of TCR clone 170370 (TRAV27, TRAJ58)
CAGAETSGSRLTF

SEQ ID NO: 340740 - protein, 13 aa, Homo sapiens
  CDR3 for beta chain variable domain of TCR clone 170370 (TRBV7-2, TRBJ2-1)
CAINRDRWNEQFF

SEQ ID NO: 340741 - protein, 13 aa, Homo sapiens
  CDR3 for alpha chain variable domain of TCR clone 170371 (TRAV39, TRAJ58)
CAGEETSGSRLTF

SEQ ID NO: 340742 - protein, 13 aa, Homo sapiens
  CDR3 for beta chain variable domain of TCR clone 170371 (TRBV27, TRBJ2-1)
CASSSGSYNEQFF

SEQ ID NO: 340743 - protein, 13 aa, Homo sapiens
  CDR3 for alpha chain variable domain of TCR clone 170372 (TRAV27, TRAJ6)
CAGGTRGSYITTF

SEQ ID NO: 340744 - protein, 13 aa, Homo sapiens
  CDR3 for beta chain variable domain of TCR clone 170372 (TRBV4-1, TRBJ2-2)
CASSQENSGELFF

SEQ ID NO: 340745 - protein, 15 aa, Homo sapiens
  CDR3 for alpha chain variable domain of TCR clone 170373 (TRAV8-3, TRAJ27)
CAVGPSKTNAGKSTF

SEQ ID NO: 340746 - protein, 14 aa, Homo sapiens
  CDR3 for beta chain variable domain of TCR clone 170373 (TRBV11-2, TRBJ2-3)
CASSRLTRTDTQYF

SEQ ID NO: 340747 - protein, 14 aa, Homo sapiens
  CDR3 for alpha chain variable domain of TCR clone 170374 (TRAV8-2, TRAJ23)
CVVSDDNQGGKLIF

SEQ ID NO: 340748 - protein, 15 aa, Homo sapiens
  CDR3 for beta chain variable domain of TCR clone 170374 (TRBV20-1, TRBJ2-7)
CSARDRVSGMDEQYF

SEQ ID NO: 340749 - protein, 13 aa, Homo sapiens
  CDR3 for alpha chain variable domain of TCR clone 170375 (TRAV29/DV5, TRAJ33)
CSASVESNYQLIW

SEQ ID NO: 340750 - protein, 14 aa, Homo sapiens
  CDR3 for beta chain variable domain of TCR clone 170375 (TRBV11-2, TRBJ2-5)
CASSRTGGIETQYF

SEQ ID NO: 340751 - protein, 16 aa, Homo sapiens
  CDR3 for alpha chain variable domain of TCR clone 170376 (TRAV1-2, TRAJ10)
CAVRGVLTGGGKKLTF

SEQ ID NO: 340752 - protein, 16 aa, Homo sapiens
  CDR3 for beta chain variable domain of TCR clone 170376 (TRBV4-2, TRBJ2-5)
CASSQELVGSQETQYF

SEQ ID NO: 340753 - protein, 13 aa, Homo sapiens
  CDR3 for alpha chain variable domain of TCR clone 170377 (TRAV27, TRAJ6)
CAGGTRGSYIPIF

SEQ ID NO: 340754 - protein, 15 aa, Homo sapiens
  CDR3 for beta chain variable domain of TCR clone 170377 (TRBV11-2, TRBJ1-3)
CASSLSPLVRDTIYF

SEQ ID NO: 340755 - protein, 15 aa, Homo sapiens
  CDR3 for alpha chain variable domain of TCR clone 170378 (TRAV19, TRAJ53)
CALSSSGGSNYKLTF

SEQ ID NO: 340756 - protein, 13 aa, Homo sapiens
  CDR3 for beta chain variable domain of TCR clone 170378 (TRBV7-6, TRBJ2-7)
CASSVDHTHEQYF

SEQ ID NO: 340757 - protein, 14 aa, Homo sapiens
  CDR3 for alpha chain variable domain of TCR clone 170379 (TRAV13-1, TRAJ35)
CAAREGGFGNVLHC

SEQ ID NO: 340758 - protein, 13 aa, Homo sapiens
  CDR3 for beta chain variable domain of TCR clone 170379 (TRBV7-3, TRBJ1-1)
CASSQDWGAEAFF

SEQ ID NO: 340759 - protein, 13 aa, Homo sapiens
  CDR3 for alpha chain variable domain of TCR clone 170380 (TRAV21, TRAJ57)
CAVTQGGSEKLVF

SEQ ID NO: 340760 - protein, 16 aa, Homo sapiens
  CDR3 for beta chain variable domain of TCR clone 170380 (TRBV12-5, TRBJ2-5)
CASGPRTSGNRETQYF

SEQ ID NO: 340761 - protein, 14 aa, Homo sapiens
  CDR3 for alpha chain variable domain of TCR clone 170381 (TRAV13-1, TRAJ44)
CAAKATGTASKLTF

SEQ ID NO: 340762 - protein, 14 aa, Homo sapiens
  CDR3 for beta chain variable domain of TCR clone 170381 (TRBV7-6, TRBJ2-3)
CASSLGTVTDTQYL

SEQ ID NO: 340763 - protein, 14 aa, Homo sapiens
  CDR3 for alpha chain variable domain of TCR clone 170382 (TRAV13-1, TRAJ20)
CAARPGSNDYKLSF

SEQ ID NO: 340764 - protein, 13 aa, Homo sapiens
  CDR3 for beta chain variable domain of TCR clone 170382 (TRBV12-4, TRBJ1-1)
CARSKGIGFEAFF

SEQ ID NO: 340765 - protein, 11 aa, Homo sapiens
  CDR3 for alpha chain variable domain of TCR clone 170383 (TRAV21, TRAJ34)
CDVTNTDKLIF

SEQ ID NO: 340766 - protein, 12 aa, Homo sapiens
  CDR3 for beta chain variable domain of TCR clone 170383 (TRBV11-2, TRBJ2-2)
CASSLGGGELFF

SEQ ID NO: 340767 - protein, 17 aa, Homo sapiens
  CDR3 for alpha chain variable domain of TCR clone 170384 (TRAV8-3, TRAJ34)
CAIPGKLIFWTGTRLQV

SEQ ID NO: 340768 - protein, 15 aa, Homo sapiens
  CDR3 for beta chain variable domain of TCR clone 170384 (TRBV5-7, TRBJ2-1)
CASSRRLAGDNEQFF

SEQ ID NO: 340769 - protein, 12 aa, Homo sapiens
  CDR3 for alpha chain variable domain of TCR clone 170385 (TRAV12-1, TRAJ31)
CVSWSNNARLMF

SEQ ID NO: 340770 - protein, 15 aa, Homo sapiens
  CDR3 for beta chain variable domain of TCR clone 170385 (TRBV7-2, TRBJ1-5)
CASSLDRGQDPPQHF

SEQ ID NO: 340771 - protein, 15 aa, Homo sapiens
  CDR3 for alpha chain variable domain of TCR clone 170386 (TRAV12-1, TRAJ44)
CVVDKYTGTASKLPF

SEQ ID NO: 340772 - protein, 14 aa, Homo sapiens
  CDR3 for beta chain variable domain of TCR clone 170386 (TRBV5-1, TRBJ1-2)
CASSLEPVNYGYTF

SEQ ID NO: 340773 - protein, 11 aa, Homo sapiens
  CDR3 for alpha chain variable domain of TCR clone 170387 (TRAV12-2, TRAJ29)
CAVTLRSPLVF

SEQ ID NO: 340774 - protein, 16 aa, Homo sapiens
  CDR3 for beta chain variable domain of TCR clone 170387 (TRBV5-1, TRBJ2-2)
CASSLGGTGSTGELFL

SEQ ID NO: 340775 - protein, 15 aa, Homo sapiens
  CDR3 for alpha chain variable domain of TCR clone 170388 (TRAV25, TRAJ52)
CAGRPGGTSYGELTF

SEQ ID NO: 340776 - protein, 16 aa, Homo sapiens
  CDR3 for beta chain variable domain of TCR clone 170388 (TRBV13, TRBJ2-2)
CASSLGRGYGTGELFF

SEQ ID NO: 340777 - protein, 14 aa, Homo sapiens
  CDR3 for alpha chain variable domain of TCR clone 170389 (TRAV17, TRAJ57)
CATDPQGGSEKLVF

SEQ ID NO: 340778 - protein, 14 aa, Homo sapiens
  CDR3 for beta chain variable domain of TCR clone 170389 (TRBV5-8, TRBJ2-3)
CASSLGQGTDKQYF

SEQ ID NO: 340779 - protein, 12 aa, Homo sapiens
  CDR3 for alpha chain variable domain of TCR clone 170390 (TRAV13-1, TRAJ21)
CAAKEGFKKFYF

SEQ ID NO: 340780 - protein, 13 aa, Homo sapiens
  CDR3 for beta chain variable domain of TCR clone 170390 (TRBV19, TRBJ2-7)
CASSPRQSYEQYF

SEQ ID NO: 340781 - protein, 12 aa, Homo sapiens
  CDR3 for alpha chain variable domain of TCR clone 170391 (TRAV16, TRAJ10)
CSRTGGGNKRTF

SEQ ID NO: 340782 - protein, 15 aa, Homo sapiens
  CDR3 for beta chain variable domain of TCR clone 170391 (TRBV6-3, TRBJ2-7)
CVSSSPGTVFYEQYF

SEQ ID NO: 340783 - protein, 16 aa, Homo sapiens
  CDR3 for alpha chain variable domain of TCR clone 170392 (TRAV23/DV6, TRAJ3)
CAARAPPQCFQDNLCL

SEQ ID NO: 340784 - protein, 17 aa, Homo sapiens
  CDR3 for beta chain variable domain of TCR clone 170392 (TRBV7-9, TRBJ2-3)
CASSPTVAGDLTDTQYF

SEQ ID NO: 340785 - protein, 17 aa, Homo sapiens
  CDR3 for alpha chain variable domain of TCR clone 170393 (TRAV3, TRAJ42)
CAVRDRDYGGSQGNLIF

SEQ ID NO: 340786 - protein, 13 aa, Homo sapiens
  CDR3 for beta chain variable domain of TCR clone 170393 (TRBV20-1, TRBJ1-1)
CSARGGGNTEAFF

SEQ ID NO: 340787 - protein, 14 aa, Homo sapiens
  CDR3 for alpha chain variable domain of TCR clone 170394 (TRAV4, TRAJ20)
CLVGDFINDYKLSF

SEQ ID NO: 340788 - protein, 13 aa, Homo sapiens
  CDR3 for beta chain variable domain of TCR clone 170394 (TRBV10-3, TRBJ2-7)
CASKLAVNYEQYF

SEQ ID NO: 340789 - protein, 13 aa, Homo sapiens
  CDR3 for alpha chain variable domain of TCR clone 170395 (TRAV21, TRAJ45)
CAVMGGGADGLTF

SEQ ID NO: 340790 - protein, 16 aa, Homo sapiens
  CDR3 for beta chain variable domain of TCR clone 170395 (TRBV5-1, TRBJ2-7)
CASSYASTSSGGEQYF

SEQ ID NO: 340791 - protein, 11 aa, Homo sapiens
  CDR3 for alpha chain variable domain of TCR clone 170396 (TRAV12-2, TRAJ33)
CAVDSNYQLIW

SEQ ID NO: 340792 - protein, 15 aa, Homo sapiens
  CDR3 for beta chain variable domain of TCR clone 170396 (TRBV19, TRBJ1-2)
CASSVGQVLNYGYTF

SEQ ID NO: 340793 - protein, 13 aa, Homo sapiens
  CDR3 for alpha chain variable domain of TCR clone 170397 (TRAV8-6, TRAJ9)
CALWDTGGFKTIF

SEQ ID NO: 340794 - protein, 14 aa, Homo sapiens
  CDR3 for beta chain variable domain of TCR clone 170397 (TRBV2, TRBJ2-1)
CASSEALIYNEQFF

SEQ ID NO: 340795 - protein, 16 aa, Homo sapiens
  CDR3 for alpha chain variable domain of TCR clone 170398 (TRAV30, TRAJ24)
CGTEIVDADSWGKFQF

SEQ ID NO: 340796 - protein, 17 aa, Homo sapiens
  CDR3 for beta chain variable domain of TCR clone 170398 (TRBV20-1, TRBJ2-1)
CSARDTLAGVWDNEQFF

SEQ ID NO: 340797 - protein, 11 aa, Homo sapiens
  CDR3 for alpha chain variable domain of TCR clone 170399 (TRAV17, TRAJ31)
CATSNNARLMF

SEQ ID NO: 340798 - protein, 19 aa, Homo sapiens
  CDR3 for beta chain variable domain of TCR clone 170399 (TRBV19, TRBJ2-5)
CASSIGQVTDFFLGETQYF

SEQ ID NO: 340799 - protein, 15 aa, Homo sapiens
  CDR3 for alpha chain variable domain of TCR clone 170400 (TRAV12-1, TRAJ15)
CVVTRANPAGTALIF

SEQ ID NO: 340800 - protein, 14 aa, Homo sapiens
  CDR3 for beta chain variable domain of TCR clone 170400 (TRBV5-1, TRBJ1-1)
CASSLVSINTEAFF

SEQ ID NO: 340801 - protein, 13 aa, Homo sapiens
  CDR3 for alpha chain variable domain of TCR clone 170401 (TRAV13-1, TRAJ6)
CAASRGGSYIPTF

SEQ ID NO: 340802 - protein, 18 aa, Homo sapiens
  CDR3 for beta chain variable domain of TCR clone 170401 (TRBV20-1, TRBJ2-3)
CSASGLAGGPGTTDTQYF

SEQ ID NO: 340803 - protein, 12 aa, Homo sapiens
  CDR3 for alpha chain variable domain of TCR clone 170402 (TRAV13-1, TRAJ9)
CASHTGGFKTIF

SEQ ID NO: 340804 - protein, 13 aa, Homo sapiens
  CDR3 for beta chain variable domain of TCR clone 170402 (TRBV12-4, TRBJ1-2)
CASSSGGKDGYTF

SEQ ID NO: 340805 - protein, 16 aa, Homo sapiens
  CDR3 for alpha chain variable domain of TCR clone 170403 (TRAV30, TRAJ24)
CGTEIVDADRWGKFQF

SEQ ID NO: 340806 - protein, 12 aa, Homo sapiens
  CDR3 for beta chain variable domain of TCR clone 170403 (TRBV11-2, TRBJ2-2)
CASSLPTGELFF

SEQ ID NO: 340807 - protein, 16 aa, Homo sapiens
  CDR3 for alpha chain variable domain of TCR clone 170404 (TRAV8-4, TRAJ28)
CAVESNSGAGSYQLTF

SEQ ID NO: 340808 - protein, 14 aa, Homo sapiens
  CDR3 for beta chain variable domain of TCR clone 170404 (TRBV7-2, TRBJ2-7)
CASSLPPGQGPQYF

SEQ ID NO: 340809 - protein, 14 aa, Homo sapiens
  CDR3 for alpha chain variable domain of TCR clone 170405 (TRAV12-2, TRAJ13)
CAVKKTGGYQKVTF

SEQ ID NO: 340810 - protein, 16 aa, Homo sapiens
  CDR3 for beta chain variable domain of TCR clone 170405 (TRBV4-1, TRBJ1-1)
CASSQDAGMGNTEAFF

SEQ ID NO: 340811 - protein, 12 aa, Homo sapiens
  CDR3 for alpha chain variable domain of TCR clone 170406 (TRAV27, TRAJ37)
CADSGSTGQLIF

SEQ ID NO: 340812 - protein, 18 aa, Homo sapiens
  CDR3 for beta chain variable domain of TCR clone 170406 (TRBV7-9, TRBJ1-1)
CASSKPWDTMGMNTEAFF

SEQ ID NO: 340813 - protein, 10 aa, Homo sapiens
  CDR3 for alpha chain variable domain of TCR clone 170407 (TRAV13-1, TRAJ52)
CAAKTPMLVV

SEQ ID NO: 340814 - protein, 18 aa, Homo sapiens
  CDR3 for beta chain variable domain of TCR clone 170407 (TRBV12-4, TRBJ2-4)
CASSRTGAVDVARNIQYF

SEQ ID NO: 340815 - protein, 15 aa, Homo sapiens
  CDR3 for alpha chain variable domain of TCR clone 170408 (TRAV12-1, TRAJ15)
WCLPPANQAGTALIF

SEQ ID NO: 340816 - protein, 13 aa, Homo sapiens
  CDR3 for beta chain variable domain of TCR clone 170408 (TRBV7-2, TRBJ2-4)
CASSREHANIQYF

SEQ ID NO: 340817 - protein, 13 aa, Homo sapiens
  CDR3 for alpha chain variable domain of TCR clone 170409 (TRAV8-3, TRAJ44)
CAVVPGTASKLNF

SEQ ID NO: 340818 - protein, 13 aa, Homo sapiens
  CDR3 for beta chain variable domain of TCR clone 170409 (TRBV2, TRBJ2-7)
CASSVGGSGEQYF

SEQ ID NO: 340819 - protein, 17 aa, Homo sapiens
  CDR3 for alpha chain variable domain of TCR clone 170410 (TRAV24, TRAJ42)
CAFRVKNYVGSQGNLIF

SEQ ID NO: 340820 - protein, 15 aa, Homo sapiens
  CDR3 for beta chain variable domain of TCR clone 170410 (TRBV4-3, TRBJ2-7)
CASSQGDWGDYEQYF

SEQ ID NO: 340821 - protein, 14 aa, Homo sapiens
  CDR3 for alpha chain variable domain of TCR clone 170411 (TRAV16, TRAJ54)
CALSGVQGAQTLVF

SEQ ID NO: 340822 - protein, 15 aa, Homo sapiens
  CDR3 for beta chain variable domain of TCR clone 170411 (TRBV18, TRBJ2-2)
CASSTSGLHTWELFF

SEQ ID NO: 340823 - protein, 16 aa, Homo sapiens
  CDR3 for alpha chain variable domain of TCR clone 170412 (TRAV30, TRAJ24)
CGTEIVDADSWGKFQF

SEQ ID NO: 340824 - protein, 14 aa, Homo sapiens
  CDR3 for beta chain variable domain of TCR clone 170412 (TRBV27, TRBJ2-5)
CASSRTFLVDTQYF

SEQ ID NO: 340825 - protein, 14 aa, Homo sapiens
  CDR3 for alpha chain variable domain of TCR clone 170413 (TRAV12-2, TRAJ17)
CAVLFKAAGNKLTF

SEQ ID NO: 340826 - protein, 17 aa, Homo sapiens
  CDR3 for beta chain variable domain of TCR clone 170413 (TRBV11-2, TRBJ2-1)
CASSLYPPGVEYNEEFF

SEQ ID NO: 340827 - protein, 18 aa, Homo sapiens
  CDR3 for alpha chain variable domain of TCR clone 170414 (TRAV13-1, TRAJ52)
CAAKNTNAGGTSYGKLTF

SEQ ID NO: 340828 - protein, 12 aa, Homo sapiens
  CDR3 for beta chain variable domain of TCR clone 170414 (TRBV7-9, TRBJ2-7)
CASSLEGYEQYF

SEQ ID NO: 340829 - protein, 12 aa, Homo sapiens
  CDR3 for alpha chain variable domain of TCR clone 170415 (TRAV12-3, TRAJ17)
CAMTLTGHKLTF

SEQ ID NO: 340830 - protein, 13 aa, Homo sapiens
  CDR3 for beta chain variable domain of TCR clone 170415 (TRBV12-4, TRBJ1-1)
CASSPGTGFEAFF

SEQ ID NO: 340831 - protein, 13 aa, Homo sapiens
  CDR3 for alpha chain variable domain of TCR clone 170416 (TRAV26-1, TRAJ40)
CIVRVEGTYKYIF

SEQ ID NO: 340832 - protein, 15 aa, Homo sapiens
  CDR3 for beta chain variable domain of TCR clone 170416 (TRBV11-2, TRBJ2-5)
CASSLGAGGVETQYF

SEQ ID NO: 340833 - protein, 14 aa, Homo sapiens
  CDR3 for alpha chain variable domain of TCR clone 170417 (TRAV23/DV6, TRAJ37)
CAASTSSNTGILIF

SEQ ID NO: 340834 - protein, 12 aa, Homo sapiens
  CDR3 for beta chain variable domain of TCR clone 170417 (TRBV27, TRBJ2-2)
CASKLFTGELFF

SEQ ID NO: 340835 - protein, 10 aa, Homo sapiens
  CDR3 for alpha chain variable domain of TCR clone 170418 (TRAV8-1, TRAJ43)
CAVNVDDMRF

SEQ ID NO: 340836 - protein, 16 aa, Homo sapiens
  CDR3 for beta chain variable domain of TCR clone 170418 (TRBV28, TRBJ2-7)
CASSLFFETGGPEQYF

SEQ ID NO: 340837 - protein, 12 aa, Homo sapiens
  CDR3 for alpha chain variable domain of TCR clone 170419 (TRAV27, TRAJ35)
CAGADCGNVLHC

SEQ ID NO: 340838 - protein, 17 aa, Homo sapiens
  CDR3 for beta chain variable domain of TCR clone 170419 (TRBV3-1, TRBJ2-2)
CASSQDSQGPNTGELFF

SEQ ID NO: 340839 - protein, 16 aa, Homo sapiens
  CDR3 for alpha chain variable domain of TCR clone 170420 (TRAV30, TRAJ24)
CGTEIVDADSGGKFQF

SEQ ID NO: 340840 - protein, 14 aa, Homo sapiens
  CDR3 for beta chain variable domain of TCR clone 170420 (TRBV12-5, TRBJ2-5)
CASGSRTHQETQYF

SEQ ID NO: 340841 - protein, 15 aa, Homo sapiens
  CDR3 for alpha chain variable domain of TCR clone 170421 (TRAV13-1, TRAJ52)
CAASSPSTSYGKLTF

SEQ ID NO: 340842 - protein, 13 aa, Homo sapiens
  CDR3 for beta chain variable domain of TCR clone 170421 (TRBV29-1, TRBJ1-1)
CSVGDSRNTEAFF

SEQ ID NO: 340843 - protein, 11 aa, Homo sapiens
  CDR3 for alpha chain variable domain of TCR clone 170422 (TRAV23/DV6, TRAJ48)
CAPRWGEKLTF

SEQ ID NO: 340844 - protein, 16 aa, Homo sapiens
  CDR3 for beta chain variable domain of TCR clone 170422 (TRBV12-5, TRBJ2-5)
CASGPRTSGNQETQYF

SEQ ID NO: 340845 - protein, 15 aa, Homo sapiens
  CDR3 for alpha chain variable domain of TCR clone 170423 (TRAV4, TRAJ39)
CLVGPNNNAGNMLTF

SEQ ID NO: 340846 - protein, 14 aa, Homo sapiens
  CDR3 for beta chain variable domain of TCR clone 170423 (TRBV7-8, TRBJ2-1)
CATERERSYNEQFF

SEQ ID NO: 340847 - protein, 16 aa, Homo sapiens
  CDR3 for alpha chain variable domain of TCR clone 170424 (TRAV12-3, TRAJ53)
CAMSPGSGGSNYKLTF

SEQ ID NO: 340848 - protein, 16 aa, Homo sapiens
  CDR3 for beta chain variable domain of TCR clone 170424 (TRBV7-2, TRBJ2-7)
CASSWEAGGPWYEQYF

SEQ ID NO: 340849 - protein, 13 aa, Homo sapiens
  CDR3 for alpha chain variable domain of TCR clone 170425 (TRAV3, TRAJ33)
CAVRDRSNYQLIW

SEQ ID NO: 340850 - protein, 16 aa, Homo sapiens
  CDR3 for beta chain variable domain of TCR clone 170425 (TRBV4-2, TRBJ2-7)
CASSQYRGTSSYEQYF

SEQ ID NO: 340851 - protein, 11 aa, Homo sapiens
  CDR3 for alpha chain variable domain of TCR clone 170426 (TRAV39, TRAJ49)
CAVDISTQFYF

SEQ ID NO: 340852 - protein, 11 aa, Homo sapiens
  CDR3 for beta chain variable domain of TCR clone 170426 (TRBV7-8, TRBJ2-7)
CAISLSLEQYF

SEQ ID NO: 340853 - protein, 16 aa, Homo sapiens
  CDR3 for alpha chain variable domain of TCR clone 170427 (TRAV12-3, TRAJ53)
CAMSTGSGGSNDKLTF

SEQ ID NO: 340854 - protein, 16 aa, Homo sapiens
  CDR3 for beta chain variable domain of TCR clone 170427 (TRBV4-2, TRBJ1-1)
CASSQAGFGMNTEAFF

SEQ ID NO: 340855 - protein, 12 aa, Homo sapiens
  CDR3 for alpha chain variable domain of TCR clone 170428 (TRAV3, TRAJ20)
GAVRDPDYKLSC

SEQ ID NO: 340856 - protein, 15 aa, Homo sapiens
  CDR3 for beta chain variable domain of TCR clone 170428 (TRBV27, TRBJ2-1)
CASSNGGGSSNEQFF

SEQ ID NO: 340857 - protein, 15 aa, Homo sapiens
  CDR3 for alpha chain variable domain of TCR clone 170429 (TRAV24, TRAJ10)
KGSRPVTGGGNKLTF

SEQ ID NO: 340858 - protein, 21 aa, Homo sapiens
  CDR3 for beta chain variable domain of TCR clone 170429 (TRBV15, TRBJ2-1)
AWGTQPRTCVPPAEVDTARFF

SEQ ID NO: 340859 - protein, 11 aa, Homo sapiens
  CDR3 for alpha chain variable domain of TCR clone 170430 (TRAV13-1, TRAJ24)
CATDSWGKFQF

SEQ ID NO: 340860 - protein, 16 aa, Homo sapiens
  CDR3 for beta chain variable domain of TCR clone 170430 (TRBV5-1, TRBJ2-2)
CASSSRTGGRTGELFF

SEQ ID NO: 340861 - protein, 13 aa, Homo sapiens
  CDR3 for alpha chain variable domain of TCR clone 170431 (TRAV1-2, TRAJ12)
CAVSMASSYKLIF

SEQ ID NO: 340862 - protein, 14 aa, Homo sapiens
  CDR3 for beta chain variable domain of TCR clone 170431 (TRBV7-8, TRBJ1-2)
CASSPDSLSYGYTF

SEQ ID NO: 340863 - protein, 13 aa, Homo sapiens
  CDR3 for alpha chain variable domain of TCR clone 170432 (TRAV26-1, TRAJ33)
CIVRVKGNYQLIW

SEQ ID NO: 340864 - protein, 16 aa, Homo sapiens
  CDR3 for beta chain variable domain of TCR clone 170432 (TRBV15, TRBJ2-7)
CATSRDRGRRRGEQYF

SEQ ID NO: 340865 - protein, 11 aa, Homo sapiens
  CDR3 for alpha chain variable domain of TCR clone 170433 (TRAV21, TRAJ34)
CAVTNTDKLIF

SEQ ID NO: 340866 - protein, 13 aa, Homo sapiens
  CDR3 for beta chain variable domain of TCR clone 170433 (TRBV7-2, TRBJ2-7)
CASRTSSSWEQYF

SEQ ID NO: 340867 - protein, 14 aa, Homo sapiens
  CDR3 for alpha chain variable domain of TCR clone 170434 (TRAV29/DV5, TRAJ36)
CAARRKTGANNLFF

SEQ ID NO: 340868 - protein, 12 aa, Homo sapiens
  CDR3 for beta chain variable domain of TCR clone 170434 (TRBV11-2, TRBJ2-2)
CASSLGGGELFF

SEQ ID NO: 340869 - protein, 14 aa, Homo sapiens
  CDR3 for alpha chain variable domain of TCR clone 170435 (TRAV13-1, TRAJ44)
CAAKATGTASKLTF

SEQ ID NO: 340870 - protein, 15 aa, Homo sapiens
  CDR3 for beta chain variable domain of TCR clone 170435 (TRBV2, TRBJ2-1)
CASSELAGGHNEQFF

SEQ ID NO: 340871 - protein, 13 aa, Homo sapiens
  CDR3 for alpha chain variable domain of TCR clone 170436 (TRAV16, TRAJ20)
CALGPSNDYKVSF

SEQ ID NO: 340872 - protein, 15 aa, Homo sapiens
  CDR3 for beta chain variable domain of TCR clone 170436 (TRBV5-1, TRBJ2-2)
CASSRVGSDTGELFF

SEQ ID NO: 340873 - protein, 16 aa, Homo sapiens
  CDR3 for alpha chain variable domain of TCR clone 170437 (TRAV22, TRAJ45)
CAVERGKRGGADGLTF

SEQ ID NO: 340874 - protein, 13 aa, Homo sapiens
  CDR3 for beta chain variable domain of TCR clone 170437 (TRBV27, TRBJ1-1)
CASSLTIGAEAFF

SEQ ID NO: 340875 - protein, 12 aa, Homo sapiens
  CDR3 for alpha chain variable domain of TCR clone 170438 (TRAV16, TRAJ8)
CALYKGFQKLVF

SEQ ID NO: 340876 - protein, 16 aa, Homo sapiens
  CDR3 for beta chain variable domain of TCR clone 170438 (TRBV7-7, TRBJ2-1)
CASSLASGTSYNEQFF

SEQ ID NO: 340877 - protein, 12 aa, Homo sapiens
  CDR3 for alpha chain variable domain of TCR clone 170439 (TRAV12-2, TRAJ10)
WGVTGGGNKLTF

SEQ ID NO: 340878 - protein, 13 aa, Homo sapiens
  CDR3 for beta chain variable domain of TCR clone 170439 (TRBV20-1, TRBJ1-1)
CSAPLGGGTEAFF

SEQ ID NO: 340879 - protein, 14 aa, Homo sapiens
  CDR3 for alpha chain variable domain of TCR clone 170440 (TRAV27, TRAJ23)
CAGLSYNQGGKLIF

SEQ ID NO: 340880 - protein, 15 aa, Homo sapiens
  CDR3 for beta chain variable domain of TCR clone 170440 (TRBV19, TRBJ2-2)
CASSLNRGVTVELFF

SEQ ID NO: 340881 - protein, 14 aa, Homo sapiens
  CDR3 for alpha chain variable domain of TCR clone 170441 (TRAV26-1, TRAJ45)
CIEVTGGGADGLTF

SEQ ID NO: 340882 - protein, 15 aa, Homo sapiens
  CDR3 for beta chain variable domain of TCR clone 170441 (TRBV6-5, TRBJ2-1)
CASSDDAGAGNEQFF

SEQ ID NO: 340883 - protein, 17 aa, Homo sapiens
  CDR3 for alpha chain variable domain of TCR clone 170442 (TRAV13-1, TRAJ52)
CAAGRNAGGTSYGKLTF

SEQ ID NO: 340884 - protein, 19 aa, Homo sapiens
  CDR3 for beta chain variable domain of TCR clone 170442 (TRBV7-2, TRBJ2-3)
CASSFLSRNWGGGTDTQYF

SEQ ID NO: 340885 - protein, 12 aa, Homo sapiens
  CDR3 for alpha chain variable domain of TCR clone 170443 (TRAV21, TRAJ31)
FAAWGNNARLMF

SEQ ID NO: 340886 - protein, 16 aa, Homo sapiens
  CDR3 for beta chain variable domain of TCR clone 170443 (TRBV27, TRBJ2-5)
CASSYGPGGQKETQYF

SEQ ID NO: 340887 - protein, 15 aa, Homo sapiens
  CDR3 for alpha chain variable domain of TCR clone 170444 (TRAV8-1, TRAJ37)
CAVKKGSGNTGKLIF

SEQ ID NO: 340888 - protein, 17 aa, Homo sapiens
  CDR3 for beta chain variable domain of TCR clone 170444 (TRBV12-4, TRBJ1-1)
CARSLSGFRTMNTEAFF

SEQ ID NO: 340889 - protein, 14 aa, Homo sapiens
  CDR3 for alpha chain variable domain of TCR clone 170445 (TRAV8-3, TRAJ4)
CAVGAAGGYNKLIF

SEQ ID NO: 340890 - protein, 14 aa, Homo sapiens
  CDR3 for beta chain variable domain of TCR clone 170445 (TRBV18, TRBJ2-7)
CASSPGGGAYEQYF

SEQ ID NO: 340891 - protein, 13 aa, Homo sapiens
  CDR3 for alpha chain variable domain of TCR clone 170446 (TRAV3, TRAJ27)
CAVRPLGAGKSTF

SEQ ID NO: 340892 - protein, 14 aa, Homo sapiens
  CDR3 for beta chain variable domain of TCR clone 170446 (TRBV11-2, TRBJ2-7)
CASSLGAGAYEQYF

SEQ ID NO: 340893 - protein, 12 aa, Homo sapiens
  CDR3 for alpha chain variable domain of TCR clone 170447 (TRAV20, TRAJ39)
CAVGNAGNMLTF

SEQ ID NO: 340894 - protein, 16 aa, Homo sapiens
  CDR3 for beta chain variable domain of TCR clone 170447 (TRBV15, TRBJ1-2)
CATSRCPRTGGGGYAF

SEQ ID NO: 340895 - protein, 13 aa, Homo sapiens
  CDR3 for alpha chain variable domain of TCR clone 170448 (TRAV1-1, TRAJ23)
CAVVANQGGKLIF

SEQ ID NO: 340896 - protein, 12 aa, Homo sapiens
  CDR3 for beta chain variable domain of TCR clone 170448 (TRBV5-6, TRBJ1-1)
CASSLGRGKAFF

SEQ ID NO: 340897 - protein, 16 aa, Homo sapiens
  CDR3 for alpha chain variable domain of TCR clone 170449 (TRAV3, TRAJ21)
CAGRDIERGNFNKFYF

SEQ ID NO: 340898 - protein, 12 aa, Homo sapiens
  CDR3 for beta chain variable domain of TCR clone 170449 (TRBV7-8, TRBJ2-7)
CASSLGDREQYF

SEQ ID NO: 340899 - protein, 13 aa, Homo sapiens
  CDR3 for alpha chain variable domain of TCR clone 170450 (TRAV3, TRAJ8)
CAVRFTGFQKLVF

SEQ ID NO: 340900 - protein, 15 aa, Homo sapiens
  CDR3 for beta chain variable domain of TCR clone 170450 (TRBV5-7, TRBJ1-5)
CASSYGKLWDQPQHF

SEQ ID NO: 340901 - protein, 17 aa, Homo sapiens
  CDR3 for alpha chain variable domain of TCR clone 170451 (TRAV4, TRAJ18)
SLVGERSVGSTLGRLSF

SEQ ID NO: 340902 - protein, 16 aa, Homo sapiens
  CDR3 for beta chain variable domain of TCR clone 170451 (TRBV19, TRBJ2-1)
CASSKAGPSSYNEQFF

SEQ ID NO: 340903 - protein, 13 aa, Homo sapiens
  CDR3 for alpha chain variable domain of TCR clone 170452 (TRAV26-1, TRAJ29)
CIVRRSGNTPLVF

SEQ ID NO: 340904 - protein, 14 aa, Homo sapiens
  CDR3 for beta chain variable domain of TCR clone 170452 (TRBV12-5, TRBJ2-5)
CASGSRTHQETQYF

SEQ ID NO: 340905 - protein, 16 aa, Homo sapiens
  CDR3 for alpha chain variable domain of TCR clone 170453 (TRAV13-2, TRAJ32)
CAENMHYGGATNKLIF

SEQ ID NO: 340906 - protein, 14 aa, Homo sapiens
  CDR3 for beta chain variable domain of TCR clone 170453 (TRBV15, TRBJ2-5)
CATSSTGYQETQYF

SEQ ID NO: 340907 - protein, 16 aa, Homo sapiens
  CDR3 for alpha chain variable domain of TCR clone 170454 (TRAV12-3, TRAJ45)
CAMGCGSGGGADGLTF

SEQ ID NO: 340908 - protein, 18 aa, Homo sapiens
  CDR3 for beta chain variable domain of TCR clone 170454 (TRBV12-4, TRBJ2-2)
CASSLVAGTRGRTGELFF

SEQ ID NO: 340909 - protein, 11 aa, Homo sapiens
  CDR3 for alpha chain variable domain of TCR clone 170455 (TRAV26-1, TRAJ20)
CIVRVDYKLSF

SEQ ID NO: 340910 - protein, 14 aa, Homo sapiens
  CDR3 for beta chain variable domain of TCR clone 170455 (TRBV7-2, TRBJ2-5)
CASSPDGRAETQYF

SEQ ID NO: 340911 - protein, 14 aa, Homo sapiens
  CDR3 for alpha chain variable domain of TCR clone 170456 (TRAV8-3, TRAJ13)
CAVGAQEGYQKVTF

SEQ ID NO: 340912 - protein, 13 aa, Homo sapiens
  CDR3 for beta chain variable domain of TCR clone 170456 (TRBV11-2, TRBJ2-5)
CASSSTGGETQYF

SEQ ID NO: 340913 - protein, 14 aa, Homo sapiens
  CDR3 for alpha chain variable domain of TCR clone 170457 (TRAV12-2, TRAJ9)
CAVNMEGGGFKTIF

SEQ ID NO: 340914 - protein, 14 aa, Homo sapiens
  CDR3 for beta chain variable domain of TCR clone 170457 (TRBV28, TRBJ2-7)
CASKPGPDLYEQYF

SEQ ID NO: 340915 - protein, 12 aa, Homo sapiens
  CDR3 for alpha chain variable domain of TCR clone 170458 (TRAV16, TRAJ8)
CTPLGGFQKLVF

SEQ ID NO: 340916 - protein, 15 aa, Homo sapiens
  CDR3 for beta chain variable domain of TCR clone 170458 (TRBV6-1, TRBJ1-5)
CASIPDRLGNQPQHF

SEQ ID NO: 340917 - protein, 15 aa, Homo sapiens
  CDR3 for alpha chain variable domain of TCR clone 170459 (TRAV3, TRAJ20)
CAVRDIKLSDYKLSF

SEQ ID NO: 340918 - protein, 16 aa, Homo sapiens
  CDR3 for beta chain variable domain of TCR clone 170459 (TRBV20-1, TRBJ1-4)
CSAPGQGLLTNEKLFV

SEQ ID NO: 340919 - protein, 19 aa, Homo sapiens
  CDR3 for alpha chain variable domain of TCR clone 170460 (TRAV26-1, TRAJ37)
CALLHRQINGSSNTGKLIF

SEQ ID NO: 340920 - protein, 13 aa, Homo sapiens
  CDR3 for beta chain variable domain of TCR clone 170460 (TRBV20-1, TRBJ2-7)
CSARTSGNYEQYF

SEQ ID NO: 340921 - protein, 11 aa, Homo sapiens
  CDR3 for alpha chain variable domain of TCR clone 170461 (TRAV1-2, TRAJ31)
CAVNNNARLMF

SEQ ID NO: 340922 - protein, 13 aa, Homo sapiens
  CDR3 for beta chain variable domain of TCR clone 170461 (TRBV19, TRBJ1-5)
CASSIGGEQPQHF

SEQ ID NO: 340923 - protein, 15 aa, Homo sapiens
  CDR3 for alpha chain variable domain of TCR clone 170462 (TRAV8-6, TRAJ57)
CAVSLTQGGSEKLVF

SEQ ID NO: 340924 - protein, 15 aa, Homo sapiens
  CDR3 for beta chain variable domain of TCR clone 170462 (TRBV2, TRBJ2-1)
CASSELAGSYNEQFF

SEQ ID NO: 340925 - protein, 12 aa, Homo sapiens
  CDR3 for alpha chain variable domain of TCR clone 170463 (TRAV16, TRAJ21)
CALMGPFNKFYF

SEQ ID NO: 340926 - protein, 15 aa, Homo sapiens
  CDR3 for beta chain variable domain of TCR clone 170463 (TRBV5-7, TRBJ1-5)
CAGSYGKLWDQPQHF

SEQ ID NO: 340927 - protein, 20 aa, Homo sapiens
  CDR3 for alpha chain variable domain of TCR clone 170464 (TRAV25, TRAJ33)
TATQTTDVGTSRGSNYQLIW

SEQ ID NO: 340928 - protein, 16 aa, Homo sapiens
  CDR3 for beta chain variable domain of TCR clone 170464 (TRBV12-5, TRBJ2-5)
CASGPRTSGNQETQYF

SEQ ID NO: 340929 - protein, 14 aa, Homo sapiens
  CDR3 for alpha chain variable domain of TCR clone 170465 (TRAV35, TRAJ10)
CAGILTGGVNKLTF

SEQ ID NO: 340930 - protein, 16 aa, Homo sapiens
  CDR3 for beta chain variable domain of TCR clone 170465 (TRBV12-5, TRBJ2-5)
CASGPRTSGNQETQYF

SEQ ID NO: 340931 - protein, 16 aa, Homo sapiens
  CDR3 for alpha chain variable domain of TCR clone 170466 (TRAV8-3, TRAJ28)
CAVPPQRGAGSYQPTF

SEQ ID NO: 340932 - protein, 13 aa, Homo sapiens
  CDR3 for beta chain variable domain of TCR clone 170466 (TRBV7-6, TRBJ2-3)
CASSLRSDNTQYF

SEQ ID NO: 340933 - protein, 13 aa, Homo sapiens
  CDR3 for alpha chain variable domain of TCR clone 170467 (TRAV21, TRAJ20)
CAVGVFADYRLSF

SEQ ID NO: 340934 - protein, 17 aa, Homo sapiens
  CDR3 for beta chain variable domain of TCR clone 170467 (TRBV20-1, TRBJ2-2)
CSASGSGQGGLTGELFF

SEQ ID NO: 340935 - protein, 12 aa, Homo sapiens
  CDR3 for alpha chain variable domain of TCR clone 170468 (TRAV12-2, TRAJ33)
CAVGDSNYQLIW

SEQ ID NO: 340936 - protein, 13 aa, Homo sapiens
  CDR3 for beta chain variable domain of TCR clone 170468 (TRBV7-2, TRBJ2-7)
CASGSPSGSEQYF

SEQ ID NO: 340937 - protein, 11 aa, Homo sapiens
  CDR3 for alpha chain variable domain of TCR clone 170469 (TRAV12-1, TRAJ34)
CVVNKGRELIF

SEQ ID NO: 340938 - protein, 17 aa, Homo sapiens
  CDR3 for beta chain variable domain of TCR clone 170469 (TRBV19, TRBJ2-7)
CASSISFYDSYPYEQYF

SEQ ID NO: 340939 - protein, 17 aa, Homo sapiens
  CDR3 for alpha chain variable domain of TCR clone 170470 (TRAV13-1, TRAJ31)
CAPRDRLMFGDGAQLVV

SEQ ID NO: 340940 - protein, 12 aa, Homo sapiens
  CDR3 for beta chain variable domain of TCR clone 170470 (TRBV7-9, TRBJ2-7)
CASSLEGYERYF

SEQ ID NO: 340941 - protein, 12 aa, Homo sapiens
  CDR3 for alpha chain variable domain of TCR clone 170471 (TRAV12-3, TRAJ17)
CAITLTGNKLTF

SEQ ID NO: 340942 - protein, 20 aa, Homo sapiens
  CDR3 for beta chain variable domain of TCR clone 170471 (TRBV7-8, TRBJ2-2)
CASSHLFPGPTIHITGELFF

SEQ ID NO: 340943 - protein, 11 aa, Homo sapiens
  CDR3 for alpha chain variable domain of TCR clone 170472 (TRAV12-1, TRAJ43)
CVVVRNNDMRF

SEQ ID NO: 340944 - protein, 16 aa, Homo sapiens
  CDR3 for beta chain variable domain of TCR clone 170472 (TRBV14, TRBJ2-1)
CASSPRLAGEGNEQFF

SEQ ID NO: 340945 - protein, 13 aa, Homo sapiens
  CDR3 for alpha chain variable domain of TCR clone 170473 (TRAV23/DV6, TRAJ58)
CAASDIGGSRLTF

SEQ ID NO: 340946 - protein, 15 aa, Homo sapiens
  CDR3 for beta chain variable domain of TCR clone 170473 (TRBV19, TRBJ1-1)
CASTSGQIQNTEAFF

SEQ ID NO: 340947 - protein, 11 aa, Homo sapiens
  CDR3 for alpha chain variable domain of TCR clone 170474 (TRAV1-2, TRAJ40)
CAVPGTYKYIF

SEQ ID NO: 340948 - protein, 16 aa, Homo sapiens
  CDR3 for beta chain variable domain of TCR clone 170474 (TRBV5-1, TRBJ2-2)
CASSSRTGGRTGELFF

SEQ ID NO: 340949 - protein, 14 aa, Homo sapiens
  CDR3 for alpha chain variable domain of TCR clone 170475 (TRAV26-1, TRAJ49)
CIVRLTNTGNQFYF

SEQ ID NO: 340950 - protein, 13 aa, Homo sapiens
  CDR3 for beta chain variable domain of TCR clone 170475 (TRBV10-1, TRBJ1-1)
CASQGQTNTEAFC

SEQ ID NO: 340951 - protein, 13 aa, Homo sapiens
  CDR3 for alpha chain variable domain of TCR clone 170476 (TRAV12-2, TRAJ50)
CAVLVTSYAKVIF

SEQ ID NO: 340952 - protein, 14 aa, Homo sapiens
  CDR3 for beta chain variable domain of TCR clone 170476 (TRBV9, TRBJ2-1)
CASSVDPRGKEQFF

SEQ ID NO: 340953 - protein, 14 aa, Homo sapiens
  CDR3 for alpha chain variable domain of TCR clone 170477 (TRAV1-2, TRAJ8)
CAVSEDTGFQKLVF

SEQ ID NO: 340954 - protein, 15 aa, Homo sapiens
  CDR3 for beta chain variable domain of TCR clone 170477 (TRBV7-9, TRBJ2-2)
CASGPLDTFPGELFF

SEQ ID NO: 340955 - protein, 16 aa, Homo sapiens
  CDR3 for alpha chain variable domain of TCR clone 170478 (TRAV3, TRAJ37)
CAVRPHGSGNTGKLIF

SEQ ID NO: 340956 - protein, 14 aa, Homo sapiens
  CDR3 for beta chain variable domain of TCR clone 170478 (TRBV25-1, TRBJ1-1)
CASTQLGGNTEAFF

SEQ ID NO: 340957 - protein, 16 aa, Homo sapiens
  CDR3 for alpha chain variable domain of TCR clone 170479 (TRAV12-1, TRAJ48)
CVVYGGSNFGNEKLTF

SEQ ID NO: 340958 - protein, 15 aa, Homo sapiens
  CDR3 for beta chain variable domain of TCR clone 170479 (TRBV28, TRBJ1-2)
CASTPQGSDDYGYTF

SEQ ID NO: 340959 - protein, 14 aa, Homo sapiens
  CDR3 for alpha chain variable domain of TCR clone 170480 (TRAV17, TRAJ6)
CATDASGGSYIPTF

SEQ ID NO: 340960 - protein, 19 aa, Homo sapiens
  CDR3 for beta chain variable domain of TCR clone 170480 (TRBV4-3, TRBJ2-7)
CASSQKFIGWQVTPYEQYF

SEQ ID NO: 340961 - protein, 17 aa, Homo sapiens
  CDR3 for alpha chain variable domain of TCR clone 170481 (TRAV3, TRAJ7)
CAVRDMSPLEGTTDSLL

SEQ ID NO: 340962 - protein, 17 aa, Homo sapiens
  CDR3 for beta chain variable domain of TCR clone 170481 (TRBV15, TRBJ1-2)
CATSGRGIDVVNYGYTF

SEQ ID NO: 340963 - protein, 11 aa, Homo sapiens
  CDR3 for alpha chain variable domain of TCR clone 170482 (TRAV2, TRAJ13)
CASGGYQKVTF

SEQ ID NO: 340964 - protein, 12 aa, Homo sapiens
  CDR3 for beta chain variable domain of TCR clone 170482 (TRBV6-5, TRBJ2-7)
CASSDRQNEQYF

SEQ ID NO: 340965 - protein, 21 aa, Homo sapiens
  CDR3 for alpha chain variable domain of TCR clone 170483 (TRAV25, TRAJ47)
TATQTTDVGTYFWEYGNKLVF

SEQ ID NO: 340966 - protein, 13 aa, Homo sapiens
  CDR3 for beta chain variable domain of TCR clone 170483 (TRBV20-1, TRBJ2-5)
CSARGAFQETQYF

SEQ ID NO: 340967 - protein, 16 aa, Homo sapiens
  CDR3 for alpha chain variable domain of TCR clone 170484 (TRAV12-2, TRAJ39)
CAVNRGPNNAGNMLTF

SEQ ID NO: 340968 - protein, 10 aa, Homo sapiens
  CDR3 for beta chain variable domain of TCR clone 170484 (TRBV2, TRBJ2-4)
CAIRGSIQYF

SEQ ID NO: 340969 - protein, 12 aa, Homo sapiens
  CDR3 for alpha chain variable domain of TCR clone 170485 (TRAV13-1, TRAJ49)
CAASPMGNQFYF

SEQ ID NO: 340970 - protein, 12 aa, Homo sapiens
  CDR3 for beta chain variable domain of TCR clone 170485 (TRBV5-1, TRBJ2-1)
CASIGGYNEQFF

SEQ ID NO: 340971 - protein, 12 aa, Homo sapiens
  CDR3 for alpha chain variable domain of TCR clone 170486 (TRAV25, TRAJ53)
CQSGGSNYILTF

SEQ ID NO: 340972 - protein, 12 aa, Homo sapiens
  CDR3 for beta chain variable domain of TCR clone 170486 (TRBV14, TRBJ2-7)
CASSSLKGEQYF

SEQ ID NO: 340973 - protein, 14 aa, Homo sapiens
  CDR3 for alpha chain variable domain of TCR clone 170487 (TRAV12-3, TRAJ29)
CAMSPYLGNTPLVF

SEQ ID NO: 340974 - protein, 15 aa, Homo sapiens
  CDR3 for beta chain variable domain of TCR clone 170487 (TRBV27, TRBJ2-1)
CASSNGGGSSNEQFF

SEQ ID NO: 340975 - protein, 11 aa, Homo sapiens
  CDR3 for alpha chain variable domain of TCR clone 170488 (TRAV12-3, TRAJ43)
CAMSVSNDMRF

SEQ ID NO: 340976 - protein, 15 aa, Homo sapiens
  CDR3 for beta chain variable domain of TCR clone 170488 (TRBV11-2, TRBJ1-2)
CASSLEGVQRNGYTF

SEQ ID NO: 340977 - protein, 14 aa, Homo sapiens
  CDR3 for alpha chain variable domain of TCR clone 170489 (TRAV12-3, TRAJ10)
SHLPLTGGGHKLTF

SEQ ID NO: 340978 - protein, 13 aa, Homo sapiens
  CDR3 for beta chain variable domain of TCR clone 170489 (TRBV7-9, TRBJ2-3)
CASSPGSTDTQYF

SEQ ID NO: 340979 - protein, 14 aa, Homo sapiens
  CDR3 for alpha chain variable domain of TCR clone 170490 (TRAV17, TRAJ35)
CATDRPGFGNVLHC

SEQ ID NO: 340980 - protein, 15 aa, Homo sapiens
  CDR3 for beta chain variable domain of TCR clone 170490 (TRBV7-9, TRBJ1-5)
CASSQGHQPNQPQHF

SEQ ID NO: 340981 - protein, 15 aa, Homo sapiens
  CDR3 for alpha chain variable domain of TCR clone 170491 (TRAV2, TRAJ24)
CAVEVLTDSWGKFQF

SEQ ID NO: 340982 - protein, 14 aa, Homo sapiens
  CDR3 for beta chain variable domain of TCR clone 170491 (TRBV7-2, TRBJ2-1)
CASSLSGVYNEQFF

SEQ ID NO: 340983 - protein, 12 aa, Homo sapiens
  CDR3 for alpha chain variable domain of TCR clone 170492 (TRAV23/DV6, TRAJ30)
CAASKGDDKIIF

SEQ ID NO: 340984 - protein, 13 aa, Homo sapiens
  CDR3 for beta chain variable domain of TCR clone 170492 (TRBV7-2, TRBJ2-7)
CASSSPSGSEQYF

SEQ ID NO: 340985 - protein, 14 aa, Homo sapiens
  CDR3 for alpha chain variable domain of TCR clone 170493 (TRAV27, TRAJ12)
CAGARMDSSYKLIF

SEQ ID NO: 340986 - protein, 18 aa, Homo sapiens
  CDR3 for beta chain variable domain of TCR clone 170493 (TRBV10-3, TRBJ2-7)
CAISESGRPSGVRVEQYF

SEQ ID NO: 340987 - protein, 13 aa, Homo sapiens
  CDR3 for alpha chain variable domain of TCR clone 170494 (TRAV12-1, TRAJ29)
CVVNGPGNTPLVF

SEQ ID NO: 340988 - protein, 17 aa, Homo sapiens
  CDR3 for beta chain variable domain of TCR clone 170494 (TRBV7-3, TRBJ2-3)
CASSLMKRMRGADTQYF

SEQ ID NO: 340989 - protein, 12 aa, Homo sapiens
  CDR3 for alpha chain variable domain of TCR clone 170495 (TRAV3, TRAJ43)
CAVRDPNNDMRV

SEQ ID NO: 340990 - protein, 15 aa, Homo sapiens
  CDR3 for beta chain variable domain of TCR clone 170495 (TRBV4-3, TRBJ2-7)
CASSQGDWGDYEQYF

SEQ ID NO: 340991 - protein, 13 aa, Homo sapiens
  CDR3 for alpha chain variable domain of TCR clone 170496 (TRAV12-1, TRAJ7)
CVVNMRGNNRLAF

SEQ ID NO: 340992 - protein, 15 aa, Homo sapiens
  CDR3 for beta chain variable domain of TCR clone 170496 (TRBV4-1, TRBJ2-7)
CASSQQGQGFDEQYF

SEQ ID NO: 340993 - protein, 15 aa, Homo sapiens
  CDR3 for alpha chain variable domain of TCR clone 170497 (TRAV27, TRAJ38)
CAARRNSGNNRKLIW

SEQ ID NO: 340994 - protein, 13 aa, Homo sapiens
  CDR3 for beta chain variable domain of TCR clone 170497 (TRBV12-5, TRBJ2-3)
CASGDRQSDTQYV

SEQ ID NO: 340995 - protein, 13 aa, Homo sapiens
  CDR3 for alpha chain variable domain of TCR clone 170498 (TRAV1-2, TRAJ9)
CAALNPGGFKTII

SEQ ID NO: 340996 - protein, 13 aa, Homo sapiens
  CDR3 for beta chain variable domain of TCR clone 170498 (TRBV19, TRBJ1-2)
CASSVPGQDGYTF

SEQ ID NO: 340997 - protein, 12 aa, Homo sapiens
  CDR3 for alpha chain variable domain of TCR clone 170499 (TRAV12-2, TRAJ43)
CAVNVNNNDMRF

SEQ ID NO: 340998 - protein, 14 aa, Homo sapiens
  CDR3 for beta chain variable domain of TCR clone 170499 (TRBV25-1, TRBJ2-2)
CSSSELGLPGELFF

SEQ ID NO: 340999 - protein, 12 aa, Homo sapiens
  CDR3 for alpha chain variable domain of TCR clone 170500 (TRAV13-1, TRAJ48)
CAANFGNEKLTF

SEQ ID NO: 341000 - protein, 14 aa, Homo sapiens
  CDR3 for beta chain variable domain of TCR clone 170500 (TRBV4-1, TRBJ2-7)
CASIPSREGFEQSF

SEQ ID NO: 341001 - protein, 14 aa, Homo sapiens
  CDR3 for alpha chain variable domain of TCR clone 170501 (TRAV12-3, TRAJ10)
SHLPLTGGGNKLTF

SEQ ID NO: 341002 - protein, 15 aa, Homo sapiens
  CDR3 for beta chain variable domain of TCR clone 170501 (TRBV7-9, TRBJ1-4)
CASSRTGGFIEKLFF

SEQ ID NO: 341003 - protein, 13 aa, Homo sapiens
  CDR3 for alpha chain variable domain of TCR clone 170502 (TRAV22, TRAJ29)
FAVGGSGNTPLVF

SEQ ID NO: 341004 - protein, 13 aa, Homo sapiens
  CDR3 for beta chain variable domain of TCR clone 170502 (TRBV4-2, TRBJ1-1)
CASSQAGNTEAFC

SEQ ID NO: 341005 - protein, 13 aa, Homo sapiens
  CDR3 for alpha chain variable domain of TCR clone 170503 (TRAV17, TRAJ34)
CATDLYNTDKLIF

SEQ ID NO: 341006 - protein, 15 aa, Homo sapiens
  CDR3 for beta chain variable domain of TCR clone 170503 (TRBV11-3, TRBJ2-3)
CASLKDGREGDTQYF

SEQ ID NO: 341007 - protein, 13 aa, Homo sapiens
  CDR3 for alpha chain variable domain of TCR clone 170504 (TRAV8-4, TRAJ40)
CAVSDRGTYKYIF

SEQ ID NO: 341008 - protein, 18 aa, Homo sapiens
  CDR3 for beta chain variable domain of TCR clone 170504 (TRBV25-1, TRBJ1-2)
CASSGLQNGQGLIFGYTF

SEQ ID NO: 341009 - protein, 13 aa, Homo sapiens
  CDR3 for alpha chain variable domain of TCR clone 170505 (TRAV17, TRAJ9)
CATDYIGGFKTIF

SEQ ID NO: 341010 - protein, 14 aa, Homo sapiens
  CDR3 for beta chain variable domain of TCR clone 170505 (TRBV19, TRBJ2-5)
CASSMTGQQETQYF

SEQ ID NO: 341011 - protein, 13 aa, Homo sapiens
  CDR3 for alpha chain variable domain of TCR clone 170506 (TRAV1-1, TRAJ29)
CAATLSGNTPLVF

SEQ ID NO: 341012 - protein, 16 aa, Homo sapiens
  CDR3 for beta chain variable domain of TCR clone 170506 (TRBV20-1, TRBJ1-4)
CSAPGQGLLTNEKLFF

SEQ ID NO: 341013 - protein, 15 aa, Homo sapiens
  CDR3 for alpha chain variable domain of TCR clone 170507 (TRAV8-3, TRAJ45)
CASSHSGGGADGLTF

SEQ ID NO: 341014 - protein, 12 aa, Homo sapiens
  CDR3 for beta chain variable domain of TCR clone 170507 (TRBV11-2, TRBJ2-1)
CASSPGNNEQFF

SEQ ID NO: 341015 - protein, 16 aa, Homo sapiens
  CDR3 for alpha chain variable domain of TCR clone 170508 (TRAV4, TRAJ13)
CLVGYSAVTRKLPLEL

SEQ ID NO: 341016 - protein, 13 aa, Homo sapiens
  CDR3 for beta chain variable domain of TCR clone 170508 (TRBV18, TRBJ1-1)
CASSGGRNTEAFF

SEQ ID NO: 341017 - protein, 17 aa, Homo sapiens
  CDR3 for alpha chain variable domain of TCR clone 170509 (TRAV1-2, TRAJ6)
CAVRDTTRTGGSYIPTF

SEQ ID NO: 341018 - protein, 15 aa, Homo sapiens
  CDR3 for beta chain variable domain of TCR clone 170509 (TRBV25-1, TRBJ2-5)
CASSDTRGYQETQYF

SEQ ID NO: 341019 - protein, 15 aa, Homo sapiens
  CDR3 for alpha chain variable domain of TCR clone 170510 (TRAV29/DV5, TRAJ24)
CASSGATDSWGTFQF

SEQ ID NO: 341020 - protein, 12 aa, Homo sapiens
  CDR3 for beta chain variable domain of TCR clone 170510 (TRBV11-2, TRBJ2-2)
CASSLPTGELFF

SEQ ID NO: 341021 - protein, 14 aa, Homo sapiens
  CDR3 for alpha chain variable domain of TCR clone 170511 (TRAV12-1, TRAJ17)
CVVNFKAAGNKLTF

SEQ ID NO: 341022 - protein, 17 aa, Homo sapiens
  CDR3 for beta chain variable domain of TCR clone 170511 (TRBV20-1, TRBJ2-1)
CSASAAGLAGSYNEQFF

SEQ ID NO: 341023 - protein, 13 aa, Homo sapiens
  CDR3 for alpha chain variable domain of TCR clone 170512 (TRAV12-1, TRAJ16)
CVVNTRNGQKLLF

SEQ ID NO: 341024 - protein, 15 aa, Homo sapiens
  CDR3 for beta chain variable domain of TCR clone 170512 (TRBV6-1, TRBJ2-3)
CASSERWDSTDTQYF

SEQ ID NO: 341025 - protein, 15 aa, Homo sapiens
  CDR3 for alpha chain variable domain of TCR clone 170513 (TRAV8-3, TRAJ11)
CAVGLLNSGYSTLTC

SEQ ID NO: 341026 - protein, 13 aa, Homo sapiens
  CDR3 for beta chain variable domain of TCR clone 170513 (TRBV11-2, TRBJ2-5)
CASSSTGEETQYF

SEQ ID NO: 341027 - protein, 14 aa, Homo sapiens
  CDR3 for alpha chain variable domain of TCR clone 170514 (TRAV8-2, TRAJ44)
CVVSLTCTASKLTF

SEQ ID NO: 341028 - protein, 15 aa, Homo sapiens
  CDR3 for beta chain variable domain of TCR clone 170514 (TRBV7-2, TRBJ2-1)
CASSFSGGIYNEQFF

SEQ ID NO: 341029 - protein, 13 aa, Homo sapiens
  CDR3 for alpha chain variable domain of TCR clone 170515 (TRAV8-3, TRAJ28)
CAVGAVGSYQLTF

SEQ ID NO: 341030 - protein, 15 aa, Homo sapiens
  CDR3 for beta chain variable domain of TCR clone 170515 (TRBV7-9, TRBJ1-5)
CASSQGHQPKQAQHF

SEQ ID NO: 341031 - protein, 14 aa, Homo sapiens
  CDR3 for alpha chain variable domain of TCR clone 170516 (TRAV3, TRAJ27)
CAVRDDTNAGKSTF

SEQ ID NO: 341032 - protein, 12 aa, Homo sapiens
  CDR3 for beta chain variable domain of TCR clone 170516 (TRBV7-8, TRBJ2-7)
CASSLGDREQYF

SEQ ID NO: 341033 - protein, 12 aa, Homo sapiens
  CDR3 for alpha chain variable domain of TCR clone 170517 (TRAV21, TRAJ49)
CAVRNTGNQFYF

SEQ ID NO: 341034 - protein, 15 aa, Homo sapiens
  CDR3 for beta chain variable domain of TCR clone 170517 (TRBV4-1, TRBJ1-4)
CASSDTGGTNENLFF

SEQ ID NO: 341035 - protein, 11 aa, Homo sapiens
  CDR3 for alpha chain variable domain of TCR clone 170518 (TRAV21, TRAJ48)
CAVDGNEKLTF

SEQ ID NO: 341036 - protein, 12 aa, Homo sapiens
  CDR3 for beta chain variable domain of TCR clone 170518 (TRBV7-9, TRBJ2-7)
CASSLEGYEQYF

SEQ ID NO: 341037 - protein, 18 aa, Homo sapiens
  CDR3 for alpha chain variable domain of TCR clone 170519 (TRAV21, TRAJ52)
CAVRPSPAGGTSYGKLTF

SEQ ID NO: 341038 - protein, 14 aa, Homo sapiens
  CDR3 for beta chain variable domain of TCR clone 170519 (TRBV12-4, TRBJ1-5)
CASSPTGPRGGTYF

SEQ ID NO: 341039 - protein, 15 aa, Homo sapiens
  CDR3 for alpha chain variable domain of TCR clone 170520 (TRAV12-2, TRAJ23)
CAVKPIYNQGGKLIF

SEQ ID NO: 341040 - protein, 15 aa, Homo sapiens
  CDR3 for beta chain variable domain of TCR clone 170520 (TRBV6-3, TRBJ2-7)
CASSSPGTVFYEQYF

SEQ ID NO: 341041 - protein, 16 aa, Homo sapiens
  CDR3 for alpha chain variable domain of TCR clone 170521 (TRAV30, TRAJ24)
CGTEIVDADSWGKFQF

SEQ ID NO: 341042 - protein, 13 aa, Homo sapiens
  CDR3 for beta chain variable domain of TCR clone 170521 (TRBV12-4, TRBJ2-7)
CASSPTETYEQCF

SEQ ID NO: 341043 - protein, 13 aa, Homo sapiens
  CDR3 for alpha chain variable domain of TCR clone 170522 (TRAV8-1, TRAJ39)
CAGLNNAGNTLTF

SEQ ID NO: 341044 - protein, 17 aa, Homo sapiens
  CDR3 for beta chain variable domain of TCR clone 170522 (TRBV19, TRBJ2-3)
CASSIDPAGGGTDTQYF

SEQ ID NO: 341045 - protein, 12 aa, Homo sapiens
  CDR3 for alpha chain variable domain of TCR clone 170523 (TRAV3, TRAJ43)
CAVRDPNNDMRF

SEQ ID NO: 341046 - protein, 14 aa, Homo sapiens
  CDR3 for beta chain variable domain of TCR clone 170523 (TRBV19, TRBJ2-1)
CTSPTFVLSGEQFF

SEQ ID NO: 341047 - protein, 16 aa, Homo sapiens
  CDR3 for alpha chain variable domain of TCR clone 170524 (TRAV12-3, TRAJ53)
CAMIPGSGGSKYKLTF

SEQ ID NO: 341048 - protein, 11 aa, Homo sapiens
  CDR3 for beta chain variable domain of TCR clone 170524 (TRBV29-1, TRBJ2-5)
CSEDRTGTQYF

SEQ ID NO: 341049 - protein, 13 aa, Homo sapiens
  CDR3 for alpha chain variable domain of TCR clone 170525 (TRAV12-3, TRAJ9)
CAMRNTGGFKTNF

SEQ ID NO: 341050 - protein, 13 aa, Homo sapiens
  CDR3 for beta chain variable domain of TCR clone 170525 (TRBV27, TRBJ2-1)
CASRTLGVGEQFF

SEQ ID NO: 341051 - protein, 19 aa, Homo sapiens
  CDR3 for alpha chain variable domain of TCR clone 170526 (TRAV2, TRAJ20)
ILQVREADAAVYRDCKLSF

SEQ ID NO: 341052 - protein, 15 aa, Homo sapiens
  CDR3 for beta chain variable domain of TCR clone 170526 (TRBV27, TRBJ2-1)
CASSNGGGSSNEQFF

SEQ ID NO: 341053 - protein, 12 aa, Homo sapiens
  CDR3 for alpha chain variable domain of TCR clone 170527 (TRAV2, TRAJ9)
CTVGAGGFKTIF

SEQ ID NO: 341054 - protein, 16 aa, Homo sapiens
  CDR3 for beta chain variable domain of TCR clone 170527 (TRBV13, TRBJ2-2)
CASSPRTGEHTGELFF

SEQ ID NO: 341055 - protein, 13 aa, Homo sapiens
  CDR3 for alpha chain variable domain of TCR clone 170528 (TRAV1-2, TRAJ36)
CAVDQTGANNLFF

SEQ ID NO: 341056 - protein, 14 aa, Homo sapiens
  CDR3 for beta chain variable domain of TCR clone 170528 (TRBV20-1, TRBJ2-5)
CRAREMTKQETQYF

SEQ ID NO: 341057 - protein, 15 aa, Homo sapiens
  CDR3 for alpha chain variable domain of TCR clone 170529 (TRAV2, TRAJ37)
CAVVVRSGNTGKLIF

SEQ ID NO: 341058 - protein, 15 aa, Homo sapiens
  CDR3 for beta chain variable domain of TCR clone 170529 (TRBV9, TRBJ1-6)
CASSVAGTGDSPLHF

SEQ ID NO: 341059 - protein, 12 aa, Homo sapiens
  CDR3 for alpha chain variable domain of TCR clone 170530 (TRAV12-1, TRAJ40)
CVVYSGTYKYIF

SEQ ID NO: 341060 - protein, 14 aa, Homo sapiens
  CDR3 for beta chain variable domain of TCR clone 170530 (TRBV7-6, TRBJ2-1)
FASSLGGGADEQFF

SEQ ID NO: 341061 - protein, 14 aa, Homo sapiens
  CDR3 for alpha chain variable domain of TCR clone 170531 (TRAV8-6, TRAJ16)
CAVTSFSDGQKLLF

SEQ ID NO: 341062 - protein, 12 aa, Homo sapiens
  CDR3 for beta chain variable domain of TCR clone 170531 (TRBV11-2, TRBJ2-5)
CASSLDTQTQYF

SEQ ID NO: 341063 - protein, 18 aa, Homo sapiens
  CDR3 for alpha chain variable domain of TCR clone 170532 (TRAV12-3, TRAJ52)
CAMSRTDAGGTSYGKLTF

SEQ ID NO: 341064 - protein, 17 aa, Homo sapiens
  CDR3 for beta chain variable domain of TCR clone 170532 (TRBV7-3, TRBJ2-3)
CASSLMKRMRGADTQYF

SEQ ID NO: 341065 - protein, 14 aa, Homo sapiens
  CDR3 for alpha chain variable domain of TCR clone 170533 (TRAV25, TRAJ35)
CARRMEGFGNVLHC

SEQ ID NO: 341066 - protein, 13 aa, Homo sapiens
  CDR3 for beta chain variable domain of TCR clone 170533 (TRBV7-2, TRBJ2-2)
CASSLAVTGELFF

SEQ ID NO: 341067 - protein, 13 aa, Homo sapiens
  CDR3 for alpha chain variable domain of TCR clone 170534 (TRAV8-3, TRAJ28)
CAVGAVGSYQLTF

SEQ ID NO: 341068 - protein, 13 aa, Homo sapiens
  CDR3 for beta chain variable domain of TCR clone 170534 (TRBV7-9, TRBJ2-7)
CASSFAGAYEQYF

SEQ ID NO: 341069 - protein, 14 aa, Homo sapiens
  CDR3 for alpha chain variable domain of TCR clone 170535 (TRAV8-2, TRAJ4)
CVVSPSGGYNKLIF

SEQ ID NO: 341070 - protein, 18 aa, Homo sapiens
  CDR3 for beta chain variable domain of TCR clone 170535 (TRBV7-9, TRBJ2-7)
CASSPTTSGSRTWYEQYF

SEQ ID NO: 341071 - protein, 12 aa, Homo sapiens
  CDR3 for alpha chain variable domain of TCR clone 170536 (TRAV12-2, TRAJ31)
CAVNTPDARLMF

SEQ ID NO: 341072 - protein, 12 aa, Homo sapiens
  CDR3 for beta chain variable domain of TCR clone 170536 (TRBV12-4, TRBJ2-7)
CASSLGGYEQYV

SEQ ID NO: 341073 - protein, 15 aa, Homo sapiens
  CDR3 for alpha chain variable domain of TCR clone 170537 (TRAV23/DV6, TRAJ18)
CAARYRGSTLGRLYF

SEQ ID NO: 341074 - protein, 16 aa, Homo sapiens
  CDR3 for beta chain variable domain of TCR clone 170537 (TRBV27, TRBJ2-5)
CASSYGPGGQKETQYF

SEQ ID NO: 341075 - protein, 15 aa, Homo sapiens
  CDR3 for alpha chain variable domain of TCR clone 170538 (TRAV12-3, TRAJ13)
CAMSARSGGYQKVTF

SEQ ID NO: 341076 - protein, 18 aa, Homo sapiens
  CDR3 for beta chain variable domain of TCR clone 170538 (TRBV3-1, TRBJ2-7)
CASSQGGGGRSWHYEQYF

SEQ ID NO: 341077 - protein, 15 aa, Homo sapiens
  CDR3 for alpha chain variable domain of TCR clone 170539 (TRAV1-2, TRAJ15)
CAVDVMGSAGTALFF

SEQ ID NO: 341078 - protein, 13 aa, Homo sapiens
  CDR3 for beta chain variable domain of TCR clone 170539 (TRBV20-1, TRBJ1-1)
CSAFDRENTEAFF

SEQ ID NO: 341079 - protein, 13 aa, Homo sapiens
  CDR3 for alpha chain variable domain of TCR clone 170540 (TRAV13-1, TRAJ29)
CAASIGLNTPLVF

SEQ ID NO: 341080 - protein, 15 aa, Homo sapiens
  CDR3 for beta chain variable domain of TCR clone 170540 (TRBV20-1, TRBJ2-7)
CSARDRVSGMDEQYF

SEQ ID NO: 341081 - protein, 12 aa, Homo sapiens
  CDR3 for alpha chain variable domain of TCR clone 170541 (TRAV21, TRAJ11)
CAATSGYSTLTF

SEQ ID NO: 341082 - protein, 16 aa, Homo sapiens
  CDR3 for beta chain variable domain of TCR clone 170541 (TRBV20-1, TRBJ1-2)
CSASMGQGVANYGYTF

SEQ ID NO: 341083 - protein, 14 aa, Homo sapiens
  CDR3 for alpha chain variable domain of TCR clone 170542 (TRAV13-1, TRAJ35)
CAASKGGLGNVLHC

SEQ ID NO: 341084 - protein, 14 aa, Homo sapiens
  CDR3 for beta chain variable domain of TCR clone 170542 (TRBV2, TRBJ2-5)
CQRPLWAAGETQYF

SEQ ID NO: 341085 - protein, 11 aa, Homo sapiens
  CDR3 for alpha chain variable domain of TCR clone 170543 (TRAV3, TRAJ21)
CAVGNFNKFYF

SEQ ID NO: 341086 - protein, 14 aa, Homo sapiens
  CDR3 for beta chain variable domain of TCR clone 170543 (TRBV18, TRBJ2-5)
CASSPGVSQGTQYF

SEQ ID NO: 341087 - protein, 16 aa, Homo sapiens
  CDR3 for alpha chain variable domain of TCR clone 170544 (TRAV3, TRAJ37)
CAVRGKGSGNTGKLIF

SEQ ID NO: 341088 - protein, 13 aa, Homo sapiens
  CDR3 for beta chain variable domain of TCR clone 170544 (TRBV27, TRBJ1-1)
CASSLSIGAEAFF

SEQ ID NO: 341089 - protein, 15 aa, Homo sapiens
  CDR3 for alpha chain variable domain of TCR clone 170545 (TRAV17, TRAJ48)
CATDETNFGNEKLTF

SEQ ID NO: 341090 - protein, 20 aa, Homo sapiens
  CDR3 for beta chain variable domain of TCR clone 170545 (TRBV28, TRBJ2-1)
CASTPIGRSPGLAGGNEQFF

SEQ ID NO: 341091 - protein, 11 aa, Homo sapiens
  CDR3 for alpha chain variable domain of TCR clone 170546 (TRAV35, TRAJ34)
CCARNTDKLIF

SEQ ID NO: 341092 - protein, 13 aa, Homo sapiens
  CDR3 for beta chain variable domain of TCR clone 170546 (TRBV19, TRBJ2-7)
CASSIDRTYEQYF

SEQ ID NO: 341093 - protein, 12 aa, Homo sapiens
  CDR3 for alpha chain variable domain of TCR clone 170547 (TRAV17, TRAJ20)
CATQSNDYKLSF

SEQ ID NO: 341094 - protein, 15 aa, Homo sapiens
  CDR3 for beta chain variable domain of TCR clone 170547 (TRBV5-1, TRBJ2-7)
CASSLNGGPAREQYF

SEQ ID NO: 341095 - protein, 16 aa, Homo sapiens
  CDR3 for alpha chain variable domain of TCR clone 170548 (TRAV30, TRAJ24)
CGTEIVDADSWGKFQS

SEQ ID NO: 341096 - protein, 14 aa, Homo sapiens
  CDR3 for beta chain variable domain of TCR clone 170548 (TRBV12-5, TRBJ2-5)
CASVSRTHQETQYF

SEQ ID NO: 341097 - protein, 15 aa, Homo sapiens
  CDR3 for alpha chain variable domain of TCR clone 170549 (TRAV12-1, TRAJ45)
CVVIRRGGGADGLTF

SEQ ID NO: 341098 - protein, 18 aa, Homo sapiens
  CDR3 for beta chain variable domain of TCR clone 170549 (TRBV23-1, TRBJ1-1)
CASETQGAEATLKLSLDK

SEQ ID NO: 341099 - protein, 13 aa, Homo sapiens
  CDR3 for alpha chain variable domain of TCR clone 170550 (TRAV35, TRAJ42)
CAGFPGSQGNLIF

SEQ ID NO: 341100 - protein, 13 aa, Homo sapiens
  CDR3 for beta chain variable domain of TCR clone 170550 (TRBV29-1, TRBJ2-1)
CSVQGGRVNEQFF

SEQ ID NO: 341101 - protein, 14 aa, Homo sapiens
  CDR3 for alpha chain variable domain of TCR clone 170551 (TRAV12-3, TRAJ9)
CAMSTNTGGSKTIF

SEQ ID NO: 341102 - protein, 12 aa, Homo sapiens
  CDR3 for beta chain variable domain of TCR clone 170551 (TRBV11-2, TRBJ2-2)
CASNLGGGELFF

SEQ ID NO: 341103 - protein, 15 aa, Homo sapiens
  CDR3 for alpha chain variable domain of TCR clone 170552 (TRAV12-2, TRAJ53)
CAVNGGGGSNYKLTF

SEQ ID NO: 341104 - protein, 12 aa, Homo sapiens
  CDR3 for beta chain variable domain of TCR clone 170552 (TRBV7-9, TRBJ1-5)
CASSPQGQPQHF

SEQ ID NO: 341105 - protein, 16 aa, Homo sapiens
  CDR3 for alpha chain variable domain of TCR clone 170553 (TRAV8-3, TRAJ52)
CAVQPAGGTSYGKLTF

SEQ ID NO: 341106 - protein, 15 aa, Homo sapiens
  CDR3 for beta chain variable domain of TCR clone 170553 (TRBV11-2, TRBJ2-7)
CASSLAGGVATEQYY

SEQ ID NO: 341107 - protein, 12 aa, Homo sapiens
  CDR3 for alpha chain variable domain of TCR clone 170554 (TRAV27, TRAJ33)
CAGDGSNYQLIW

SEQ ID NO: 341108 - protein, 14 aa, Homo sapiens
  CDR3 for beta chain variable domain of TCR clone 170554 (TRBV7-2, TRBJ2-7)
CASSPKTSFYEQYF

SEQ ID NO: 341109 - protein, 16 aa, Homo sapiens
  CDR3 for alpha chain variable domain of TCR clone 170555 (TRAV8-3, TRAJ13)
CAVGAYPSRGYQKVTF

SEQ ID NO: 341110 - protein, 14 aa, Homo sapiens
  CDR3 for beta chain variable domain of TCR clone 170555 (TRBV18, TRBJ2-5)
CASSPRASSETQYF

SEQ ID NO: 341111 - protein, 11 aa, Homo sapiens
  CDR3 for alpha chain variable domain of TCR clone 170556 (TRAV35, TRAJ30)
CAPGGDDKIIF

SEQ ID NO: 341112 - protein, 13 aa, Homo sapiens
  CDR3 for beta chain variable domain of TCR clone 170556 (TRBV7-6, TRBJ2-1)
CASSLGGADEQFF

SEQ ID NO: 341113 - protein, 18 aa, Homo sapiens
  CDR3 for alpha chain variable domain of TCR clone 170557 (TRAV21, TRAJ52)
CAVRPSPAGGTSYGKLTF

SEQ ID NO: 341114 - protein, 13 aa, Homo sapiens
  CDR3 for beta chain variable domain of TCR clone 170557 (TRBV7-3, TRBJ1-1)
WASSQDWGAEAFF

SEQ ID NO: 341115 - protein, 16 aa, Homo sapiens
  CDR3 for alpha chain variable domain of TCR clone 170558 (TRAV3, TRAJ10)
CAVRYMRAGGGNKLTF

SEQ ID NO: 341116 - protein, 15 aa, Homo sapiens
  CDR3 for beta chain variable domain of TCR clone 170558 (TRBV11-2, TRBJ1-6)
CASTGFGTAVSPLLF

SEQ ID NO: 341117 - protein, 13 aa, Homo sapiens
  CDR3 for alpha chain variable domain of TCR clone 170559 (TRAV21, TRAJ27)
CAARPGNAGKSTF

SEQ ID NO: 341118 - protein, 15 aa, Homo sapiens
  CDR3 for beta chain variable domain of TCR clone 170559 (TRBV11-3, TRBJ2-7)
CASSPGPASSYKQYF

SEQ ID NO: 341119 - protein, 12 aa, Homo sapiens
  CDR3 for alpha chain variable domain of TCR clone 170560 (TRAV8-4, TRAJ43)
CAVSVNNNDMRF

SEQ ID NO: 341120 - protein, 11 aa, Homo sapiens
  CDR3 for beta chain variable domain of TCR clone 170560 (TRBV11-2, TRBJ2-5)
CASGQTETQYF

SEQ ID NO: 341121 - protein, 18 aa, Homo sapiens
  CDR3 for alpha chain variable domain of TCR clone 170561 (TRAV26-2, TRAJ45)
CILRVDKYSGGGADGLTF

SEQ ID NO: 341122 - protein, 14 aa, Homo sapiens
  CDR3 for beta chain variable domain of TCR clone 170561 (TRBV7-8, TRBJ2-7)
CASSPGLADYEQYF

SEQ ID NO: 341123 - protein, 14 aa, Homo sapiens
  CDR3 for alpha chain variable domain of TCR clone 170562 (TRAV16, TRAJ42)
CALLAGGSQGNLIF

SEQ ID NO: 341124 - protein, 13 aa, Homo sapiens
  CDR3 for beta chain variable domain of TCR clone 170562 (TRBV7-9, TRBJ1-2)
CASSLKQNYGYNF

SEQ ID NO: 341125 - protein, 16 aa, Homo sapiens
  CDR3 for alpha chain variable domain of TCR clone 170563 (TRAV8-2, TRAJ7)
CVVSEGPYSGNNRLAF

SEQ ID NO: 341126 - protein, 15 aa, Homo sapiens
  CDR3 for beta chain variable domain of TCR clone 170563 (TRBV27, TRBJ2-3)
CASSLGLAATDTQYF

SEQ ID NO: 341127 - protein, 14 aa, Homo sapiens
  CDR3 for alpha chain variable domain of TCR clone 170564 (TRAV1-2, TRAJ16)
CAVNRFSDVQKLLF

SEQ ID NO: 341128 - protein, 15 aa, Homo sapiens
  CDR3 for beta chain variable domain of TCR clone 170564 (TRBV27, TRBJ1-6)
CASSFDRGLGSPLHF

SEQ ID NO: 341129 - protein, 15 aa, Homo sapiens
  CDR3 for alpha chain variable domain of TCR clone 170565 (TRAV13-1, TRAJ5)
CAVYIRDSGRRALTF

SEQ ID NO: 341130 - protein, 16 aa, Homo sapiens
  CDR3 for beta chain variable domain of TCR clone 170565 (TRBV12-4, TRBJ2-1)
CASTEQGMDRSNEQFF

SEQ ID NO: 341131 - protein, 13 aa, Homo sapiens
  CDR3 for alpha chain variable domain of TCR clone 170566 (TRAV17, TRAJ5)
CALRGTGRKALTF

SEQ ID NO: 341132 - protein, 12 aa, Homo sapiens
  CDR3 for beta chain variable domain of TCR clone 170566 (TRBV7-8, TRBJ2-7)
CASSLGDREQYF

SEQ ID NO: 341133 - protein, 10 aa, Homo sapiens
  CDR3 for alpha chain variable domain of TCR clone 170567 (TRAV12-2, TRAJ48)
CAVTSEKLTF

SEQ ID NO: 341134 - protein, 17 aa, Homo sapiens
  CDR3 for beta chain variable domain of TCR clone 170567 (TRBV13, TRBJ2-3)
CASSLSRVAGGRNTQYF

SEQ ID NO: 341135 - protein, 13 aa, Homo sapiens
  CDR3 for alpha chain variable domain of TCR clone 170568 (TRAV8-6, TRAJ16)
CAVSSPDGQKLLF

SEQ ID NO: 341136 - protein, 15 aa, Homo sapiens
  CDR3 for beta chain variable domain of TCR clone 170568 (TRBV7-6, TRBJ2-7)
CASSLGGAEPYEQYF

SEQ ID NO: 341137 - protein, 15 aa, Homo sapiens
  CDR3 for alpha chain variable domain of TCR clone 170569 (TRAV12-3, TRAJ6)
RAMSATTGGSYIPTF

SEQ ID NO: 341138 - protein, 12 aa, Homo sapiens
  CDR3 for beta chain variable domain of TCR clone 170569 (TRBV11-2, TRBJ2-2)
CASSLGGGELFF

SEQ ID NO: 341139 - protein, 15 aa, Homo sapiens
  CDR3 for alpha chain variable domain of TCR clone 170570 (TRAV34, TRAJ38)
CGADFTPGNNRKLIW

SEQ ID NO: 341140 - protein, 13 aa, Homo sapiens
  CDR3 for beta chain variable domain of TCR clone 170570 (TRBV7-2, TRBJ2-2)
CASSLAVTGELFF

SEQ ID NO: 341141 - protein, 17 aa, Homo sapiens
  CDR3 for alpha chain variable domain of TCR clone 170571 (TRAV3, TRAJ6)
YAVRDGPRAGGSYIPTF

SEQ ID NO: 341142 - protein, 15 aa, Homo sapiens
  CDR3 for beta chain variable domain of TCR clone 170571 (TRBV5-1, TRBJ2-1)
CASSPPRAPYNEQFF

SEQ ID NO: 341143 - protein, 13 aa, Homo sapiens
  CDR3 for alpha chain variable domain of TCR clone 170572 (TRAV17, TRAJ54)
CAAGIQGAQKLVF

SEQ ID NO: 341144 - protein, 18 aa, Homo sapiens
  CDR3 for beta chain variable domain of TCR clone 170572 (TRBV27, TRBJ2-1)
CASGNRAVGVGSKNEQFF

SEQ ID NO: 341145 - protein, 15 aa, Homo sapiens
  CDR3 for alpha chain variable domain of TCR clone 170573 (TRAV3, TRAJ5)
CAVRDRKTGRRAITF

SEQ ID NO: 341146 - protein, 15 aa, Homo sapiens
  CDR3 for beta chain variable domain of TCR clone 170573 (TRBV7-8, TRBJ2-2)
CASGPLDTFPGELFF

SEQ ID NO: 341147 - protein, 16 aa, Homo sapiens
  CDR3 for alpha chain variable domain of TCR clone 170574 (TRAV16, TRAJ52)
CALSAAGGTSYGKLTF

SEQ ID NO: 341148 - protein, 13 aa, Homo sapiens
  CDR3 for beta chain variable domain of TCR clone 170574 (TRBV3-1, TRBJ2-7)
CASSQQGPYEQYF

SEQ ID NO: 341149 - protein, 18 aa, Homo sapiens
  CDR3 for alpha chain variable domain of TCR clone 170575 (TRAV26-1, TRAJ23)
CIVRVGLEVWNQGGKLTF

SEQ ID NO: 341150 - protein, 16 aa, Homo sapiens
  CDR3 for beta chain variable domain of TCR clone 170575 (TRBV12-4, TRBJ2-5)
CASSFFARGRQETQYF

SEQ ID NO: 341151 - protein, 13 aa, Homo sapiens
  CDR3 for alpha chain variable domain of TCR clone 170576 (TRAV13-1, TRAJ21)
CAASIYNFNKFYF

SEQ ID NO: 341152 - protein, 13 aa, Homo sapiens
  CDR3 for beta chain variable domain of TCR clone 170576 (TRBV27, TRAJ31)
CASSLMGDEKLFF

SEQ ID NO: 341153 - protein, 16 aa, Homo sapiens
  CDR3 for alpha chain variable domain of TCR clone 170577 (TRAV26-1, TRAJ37)
CIVRGDGSGNTGKLIF

SEQ ID NO: 341154 - protein, 19 aa, Homo sapiens
  CDR3 for beta chain variable domain of TCR clone 170577 (TRBV19, TRBJ2-5)
CASSIGQVTDFFLGETQYF

SEQ ID NO: 341155 - protein, 12 aa, Homo sapiens
  CDR3 for alpha chain variable domain of TCR clone 170578 (TRAV13-1, TRAJ21)
CAAKEGFNKFYF

SEQ ID NO: 341156 - protein, 13 aa, Homo sapiens
  CDR3 for beta chain variable domain of TCR clone 170578 (TRBV19, TRBJ1-5)
CASSMRGYQPQHF

SEQ ID NO: 341157 - protein, 13 aa, Homo sapiens
  CDR3 for alpha chain variable domain of TCR clone 170579 (TRAV4, TRAJ34)
CLVGDYNTDKLIF

SEQ ID NO: 341158 - protein, 23 aa, Homo sapiens
  CDR3 for beta chain variable domain of TCR clone 170579 (TRBV4-2, TRBJ2-3)
CDSSQDPPRASSISGGRGDTQYF

SEQ ID NO: 341159 - protein, 14 aa, Homo sapiens
  CDR3 for alpha chain variable domain of TCR clone 170580 (TRAV17, TRAJ11)
CATDARSGYSTLTF

SEQ ID NO: 341160 - protein, 16 aa, Homo sapiens
  CDR3 for beta chain variable domain of TCR clone 170580 (TRBV14, TRBJ1-5)
CASSLSRVHSNQPQHI

SEQ ID NO: 341161 - protein, 13 aa, Homo sapiens
  CDR3 for alpha chain variable domain of TCR clone 170581 (TRAV2, TRAJ40)
CAVVTSGTYKYIF

SEQ ID NO: 341162 - protein, 17 aa, Homo sapiens
  CDR3 for beta chain variable domain of TCR clone 170581 (TRBV13, TRBJ2-3)
CAISLSRVAGGRNTQYF

SEQ ID NO: 341163 - protein, 14 aa, Homo sapiens
  CDR3 for alpha chain variable domain of TCR clone 170582 (TRAV26-1, TRAJ38)
CIADNAGNNRKLIW

SEQ ID NO: 341164 - protein, 12 aa, Homo sapiens
  CDR3 for beta chain variable domain of TCR clone 170582 (TRBV7-9, TRBJ2-7)
CASSIKREEQYF

SEQ ID NO: 341165 - protein, 18 aa, Homo sapiens
  CDR3 for alpha chain variable domain of TCR clone 170583 (TRAV21, TRAJ52)
CAVRPSPAGGTSSGKLTF

SEQ ID NO: 341166 - protein, 13 aa, Homo sapiens
  CDR3 for beta chain variable domain of TCR clone 170583 (TRBV2, TRBJ1-5)
CATAGPGNQPQHF

SEQ ID NO: 341167 - protein, 12 aa, Homo sapiens
  CDR3 for alpha chain variable domain of TCR clone 170584 (TRAV12-3, TRAJ17)
CAMTLTGNKLTF

SEQ ID NO: 341168 - protein, 16 aa, Homo sapiens
  CDR3 for beta chain variable domain of TCR clone 170584 (TRBV6-5, TRBJ2-1)
CASSETLAGHYNEQFF

SEQ ID NO: 341169 - protein, 21 aa, Homo sapiens
  CDR3 for alpha chain variable domain of TCR clone 170585 (TRAV12-2, TRAJ6)
CAVNVSRKLHTHLEEEPALLF

SEQ ID NO: 341170 - protein, 12 aa, Homo sapiens
  CDR3 for beta chain variable domain of TCR clone 170585 (TRBV29-1, TRBJ2-3)
CSVTGGADTQYF

SEQ ID NO: 341171 - protein, 14 aa, Homo sapiens
  CDR3 for alpha chain variable domain of TCR clone 170586 (TRAV1-2, TRAJ8)
FAVREDTGFQKLVF

SEQ ID NO: 341172 - protein, 12 aa, Homo sapiens
  CDR3 for beta chain variable domain of TCR clone 170586 (TRBV29-1, TRBJ2-3)
CSVTGGADTQYF

SEQ ID NO: 341173 - protein, 17 aa, Homo sapiens
  CDR3 for alpha chain variable domain of TCR clone 170587 (TRAV13-1, TRAJ28)
CAAIPPYSGAGSYQLTF

SEQ ID NO: 341174 - protein, 12 aa, Homo sapiens
  CDR3 for beta chain variable domain of TCR clone 170587 (TRBV11-2, TRBJ2-2)
CASSLPTGELFF

SEQ ID NO: 341175 - protein, 14 aa, Homo sapiens
  CDR3 for alpha chain variable domain of TCR clone 170588 (TRAV8-3, TRAJ36)
CAVGTQTGENNLFF

SEQ ID NO: 341176 - protein, 17 aa, Homo sapiens
  CDR3 for beta chain variable domain of TCR clone 170588 (TRBV28, TRBJ1-1)
CASSLSGTGYENTEAFF

SEQ ID NO: 341177 - protein, 14 aa, Homo sapiens
  CDR3 for alpha chain variable domain of TCR clone 170589 (TRAV13-1, TRAJ35)
CAAGKGGFGNVLLC

SEQ ID NO: 341178 - protein, 13 aa, Homo sapiens
  CDR3 for beta chain variable domain of TCR clone 170589 (TRBV7-3, TRBJ1-1)
CASSQDWGAEAFF

SEQ ID NO: 341179 - protein, 12 aa, Homo sapiens
  CDR3 for alpha chain variable domain of TCR clone 170590 (TRAV36/DV7, TRAJ45)
CVPCIQEEVLTD

SEQ ID NO: 341180 - protein, 14 aa, Homo sapiens
  CDR3 for beta chain variable domain of TCR clone 170590 (TRBV12-4, TRBJ2-5)
CASSFGASGGTQYF

SEQ ID NO: 341181 - protein, 16 aa, Homo sapiens
  CDR3 for alpha chain variable domain of TCR clone 170591 (TRAV12-2, TRAJ40)
CAVIRGGTSGTYKYIF

SEQ ID NO: 341182 - protein, 14 aa, Homo sapiens
  CDR3 for beta chain variable domain of TCR clone 170591 (TRBV20-1, TRBJ2-1)
CSARDGRAGETQYF

SEQ ID NO: 341183 - protein, 15 aa, Homo sapiens
  CDR3 for alpha chain variable domain of TCR clone 170592 (TRAV25, TRAJ52)
CAGRPGGTSYGKLTF

SEQ ID NO: 341184 - protein, 14 aa, Homo sapiens
  CDR3 for beta chain variable domain of TCR clone 170592 (TRBV11-2, TRBJ2-5)
CASSRTGGIETQYF

SEQ ID NO: 341185 - protein, 14 aa, Homo sapiens
  CDR3 for alpha chain variable domain of TCR clone 170593 (TRAV9-2, TRAJ39)
CALYIYNAGNMLTF

SEQ ID NO: 341186 - protein, 13 aa, Homo sapiens
  CDR3 for beta chain variable domain of TCR clone 170593 (TRBV28, TRBJ2-5)
CASSFAGGETQYF

SEQ ID NO: 341187 - protein, 16 aa, Homo sapiens
  CDR3 for alpha chain variable domain of TCR clone 170594 (TRAV30, TRAJ24)
CGTEIVDADSWGKFRF

SEQ ID NO: 341188 - protein, 15 aa, Homo sapiens
  CDR3 for beta chain variable domain of TCR clone 170594 (TRBV13, TRBJ2-1)
CASSLLSGLNNEQFF

SEQ ID NO: 341189 - protein, 14 aa, Homo sapiens
  CDR3 for alpha chain variable domain of TCR clone 170595 (TRAV12-3, TRAJ10)
SHLPLTGGGNKLTF

SEQ ID NO: 341190 - protein, 15 aa, Homo sapiens
  CDR3 for beta chain variable domain of TCR clone 170595 (TRBV12-4, TRBJ1-1)
CASSSSGTGNTEAFF

SEQ ID NO: 341191 - protein, 14 aa, Homo sapiens
  CDR3 for alpha chain variable domain of TCR clone 170596 (TRAV17, TRAJ35)
CATDRPVFGNVLHC

SEQ ID NO: 341192 - protein, 13 aa, Homo sapiens
  CDR3 for beta chain variable domain of TCR clone 170596 (TRBV7-9, TRBJ1-2)
CASSLKQNYGYTF

SEQ ID NO: 341193 - protein, 14 aa, Homo sapiens
  CDR3 for alpha chain variable domain of TCR clone 170597 (TRAV26-1, TRAJ39)
CIVRGSRAGNMLTF

SEQ ID NO: 341194 - protein, 15 aa, Homo sapiens
  CDR3 for beta chain variable domain of TCR clone 170597 (TRBV7-9, TRBJ1-5)
CASSQGHQPNQRQHF

SEQ ID NO: 341195 - protein, 15 aa, Homo sapiens
  CDR3 for alpha chain variable domain of TCR clone 170598 (TRAV3, TRAJ32)
CAVSSYGGATNKLIF

SEQ ID NO: 341196 - protein, 14 aa, Homo sapiens
  CDR3 for beta chain variable domain of TCR clone 170598 (TRBV20-1, TRBJ1-4)
RSARDGSGWEKLFF

SEQ ID NO: 341197 - protein, 13 aa, Homo sapiens
  CDR3 for alpha chain variable domain of TCR clone 170599 (TRAV9-2, TRAJ53)
CALSGGSNYKLTF

SEQ ID NO: 341198 - protein, 17 aa, Homo sapiens
  CDR3 for beta chain variable domain of TCR clone 170599 (TRBV11-2, TRBJ2-1)
CASSLYPPGGEYNEQFF

SEQ ID NO: 341199 - protein, 12 aa, Homo sapiens
  CDR3 for alpha chain variable domain of TCR clone 170600 (TRAV13-1, TRAJ21)
CAAKEGFHKFYF

SEQ ID NO: 341200 - protein, 14 aa, Homo sapiens
  CDR3 for beta chain variable domain of TCR clone 170600 (TRBV7-2, TRBJ2-7)
CASSPKTSFYEQYF

SEQ ID NO: 341201 - protein, 14 aa, Homo sapiens
  CDR3 for alpha chain variable domain of TCR clone 170601 (TRAV13-1, TRAJ9)
CAASALTGGLKTIF

SEQ ID NO: 341202 - protein, 16 aa, Homo sapiens
  CDR3 for beta chain variable domain of TCR clone 170601 (TRBV7-8, TRBJ2-4)
CASSAERTLAKNIQYF

SEQ ID NO: 341203 - protein, 14 aa, Homo sapiens
  CDR3 for alpha chain variable domain of TCR clone 170602 (TRAV12-3, TRAJ22)
CAMSSFGSARQLTF

SEQ ID NO: 341204 - protein, 11 aa, Homo sapiens
  CDR3 for beta chain variable domain of TCR clone 170602 (TRBV12-4, TRBJ2-2)
CASSSAGELFC

SEQ ID NO: 341205 - protein, 13 aa, Homo sapiens
  CDR3 for alpha chain variable domain of TCR clone 170603 (TRAV12-1, TRAJ22)
CVASGGSARQLTF

SEQ ID NO: 341206 - protein, 12 aa, Homo sapiens
  CDR3 for beta chain variable domain of TCR clone 170603 (TRBV29-1, TRBJ2-3)
CSVTGGADTEYF

SEQ ID NO: 341207 - protein, 12 aa, Homo sapiens
  CDR3 for alpha chain variable domain of TCR clone 170604 (TRAV2, TRAJ31)
CAMEDNNARLMF

SEQ ID NO: 341208 - protein, 13 aa, Homo sapiens
  CDR3 for beta chain variable domain of TCR clone 170604 (TRBV6-1, TRBJ2-7)
CASSADTSYERYF

SEQ ID NO: 341209 - protein, 13 aa, Homo sapiens
  CDR3 for alpha chain variable domain of TCR clone 170605 (TRAV8-4, TRAJ48)
CAVSLFGNEKLTF

SEQ ID NO: 341210 - protein, 14 aa, Homo sapiens
  CDR3 for beta chain variable domain of TCR clone 170605 (TRBV4-2, TRBJ2-1)
CASGLDRAYNEQFF

SEQ ID NO: 341211 - protein, 17 aa, Homo sapiens
  CDR3 for alpha chain variable domain of TCR clone 170606 (TRAV3, TRAJ6)
CAVRDGPRAGGSYIPTS

SEQ ID NO: 341212 - protein, 15 aa, Homo sapiens
  CDR3 for beta chain variable domain of TCR clone 170606 (TRBV7-9, TRBJ1-6)
CASSSPGRGNSPLHF

SEQ ID NO: 341213 - protein, 13 aa, Homo sapiens
  CDR3 for alpha chain variable domain of TCR clone 170607 (TRAV21, TRAJ17)
CAPVKAAGNKLTF

SEQ ID NO: 341214 - protein, 12 aa, Homo sapiens
  CDR3 for beta chain variable domain of TCR clone 170607 (TRBV7-9, TRBJ2-7)
CASSIKREEQYF

SEQ ID NO: 341215 - protein, 17 aa, Homo sapiens
  CDR3 for alpha chain variable domain of TCR clone 170608 (TRAV4, TRAJ18)
CLVGERSVGSTLGRLYF

SEQ ID NO: 341216 - protein, 14 aa, Homo sapiens
  CDR3 for beta chain variable domain of TCR clone 170608 (TRBV15, TRBJ2-5)
CATSIGGLGETQYF

SEQ ID NO: 341217 - protein, 14 aa, Homo sapiens
  CDR3 for alpha chain variable domain of TCR clone 170609 (TRAV35, TRAJ50)
CAGHRKTSYDKVIF

SEQ ID NO: 341218 - protein, 13 aa, Homo sapiens
  CDR3 for beta chain variable domain of TCR clone 170609 (TRBV7-7, TRBJ2-3)
CSSSLSRADTQYF

SEQ ID NO: 341219 - protein, 15 aa, Homo sapiens
  CDR3 for alpha chain variable domain of TCR clone 170610 (TRAV26-1, TRAJ48)
CIVRVASFGNEKLTF

SEQ ID NO: 341220 - protein, 17 aa, Homo sapiens
  CDR3 for beta chain variable domain of TCR clone 170610 (TRBV11-2, TRBJ2-1)
CASSLYPPGVEYNEQFF

SEQ ID NO: 341221 - protein, 16 aa, Homo sapiens
  CDR3 for alpha chain variable domain of TCR clone 170611 (TRAV26-1, TRAJ23)
CIVRVHPYNQGGKLIF

SEQ ID NO: 341222 - protein, 15 aa, Homo sapiens
  CDR3 for beta chain variable domain of TCR clone 170611 (TRBV3-1, TRBJ2-2)
CASSQDWTRAGELFF

SEQ ID NO: 341223 - protein, 13 aa, Homo sapiens
  CDR3 for alpha chain variable domain of TCR clone 170612 (TRAV12-1, TRAJ16)
CVVNGPDGQKLLL

SEQ ID NO: 341224 - protein, 13 aa, Homo sapiens
  CDR3 for beta chain variable domain of TCR clone 170612 (TRBV2, TRBJ1-1)
CARNPIGGFHAFF

SEQ ID NO: 341225 - protein, 13 aa, Homo sapiens
  CDR3 for alpha chain variable domain of TCR clone 170613 (TRAV8-3, TRAJ28)
CAVGAIGSYQLTF

SEQ ID NO: 341226 - protein, 15 aa, Homo sapiens
  CDR3 for beta chain variable domain of TCR clone 170613 (TRBV28, TRBJ2-5)
CASSPGQGSIETQYF

SEQ ID NO: 341227 - protein, 12 aa, Homo sapiens
  CDR3 for alpha chain variable domain of TCR clone 170614 (TRAV12-2, TRAJ10)
WGVTGGGTKLTF

SEQ ID NO: 341228 - protein, 11 aa, Homo sapiens
  CDR3 for beta chain variable domain of TCR clone 170614 (TRBV19, TRBJ1-1)
CASSIGSEAFF

SEQ ID NO: 341229 - protein, 12 aa, Homo sapiens
  CDR3 for alpha chain variable domain of TCR clone 170615 (TRAV12-3, TRAJ17)
CAMTLTGNKLTF

SEQ ID NO: 341230 - protein, 15 aa, Homo sapiens
  CDR3 for beta chain variable domain of TCR clone 170615 (TRBV20-1, TRBJ2-7)
CSARDHVSGMDEQYF

SEQ ID NO: 341231 - protein, 18 aa, Homo sapiens
  CDR3 for alpha chain variable domain of TCR clone 170616 (TRAV21, TRAJ52)
CAVRPCPAGGTSYGKLTF

SEQ ID NO: 341232 - protein, 16 aa, Homo sapiens
  CDR3 for beta chain variable domain of TCR clone 170616 (TRBV7-3, TRBJ2-1)
CASSLEGYRSYNEQFF

SEQ ID NO: 341233 - protein, 16 aa, Homo sapiens
  CDR3 for alpha chain variable domain of TCR clone 170617 (TRAV23/DV6, TRAJ9)
CAASIGGNTGGFKTIF

SEQ ID NO: 341234 - protein, 14 aa, Homo sapiens
  CDR3 for beta chain variable domain of TCR clone 170617 (TRBV9, TRBJ2-7)
CASSVVVGSYEQYF

SEQ ID NO: 341235 - protein, 15 aa, Homo sapiens
  CDR3 for alpha chain variable domain of TCR clone 170618 (TRAV27, TRAJ38)
CAARRNAGNNRKLIW

SEQ ID NO: 341236 - protein, 13 aa, Homo sapiens
  CDR3 for beta chain variable domain of TCR clone 170618 (TRBV7-6, TRBJ2-1)
CQQLGGGADEQFF

SEQ ID NO: 341237 - protein, 13 aa, Homo sapiens
  CDR3 for alpha chain variable domain of TCR clone 170619 (TRAV29/DV5, TRAJ31)
CAASRNNNARPMF

SEQ ID NO: 341238 - protein, 14 aa, Homo sapiens
  CDR3 for beta chain variable domain of TCR clone 170619 (TRBV7-9, TRBJ2-2)
CASSLVQDTGELFF

SEQ ID NO: 341239 - protein, 15 aa, Homo sapiens
  CDR3 for alpha chain variable domain of TCR clone 170620 (TRAV26-2, TRAJ39)
CSLRGNNNAGNMLTF

SEQ ID NO: 341240 - protein, 15 aa, Homo sapiens
  CDR3 for beta chain variable domain of TCR clone 170620 (TRBV5-4, TRBJ1-1)
CASSSLGWANPEAFF

SEQ ID NO: 341241 - protein, 15 aa, Homo sapiens
  CDR3 for alpha chain variable domain of TCR clone 170621 (TRAV12-2, TRAJ53)
CAVNGGGGSNYKLIF

SEQ ID NO: 341242 - protein, 17 aa, Homo sapiens
  CDR3 for beta chain variable domain of TCR clone 170621 (TRBV7-3, TRBJ2-3)
RASSLMKRMRGADTQYF

SEQ ID NO: 341243 - protein, 13 aa, Homo sapiens
  CDR3 for alpha chain variable domain of TCR clone 170622 (TRAV13-1, TRAJ12)
CAASPDSSYKLIF

SEQ ID NO: 341244 - protein, 13 aa, Homo sapiens
  CDR3 for beta chain variable domain of TCR clone 170622 (TRBV7-2, TRBJ1-1)
CASSSQGVTEAFF

SEQ ID NO: 341245 - protein, 18 aa, Homo sapiens
  CDR3 for alpha chain variable domain of TCR clone 170623 (TRAV13-1, TRAJ52)
CAAKNPNAGGTSYGNLTF

SEQ ID NO: 341246 - protein, 15 aa, Homo sapiens
  CDR3 for beta chain variable domain of TCR clone 170623 (TRBV28, TRBJ2-3)
CASSPDRQGANTQYF

SEQ ID NO: 341247 - protein, 14 aa, Homo sapiens
  CDR3 for alpha chain variable domain of TCR clone 170624 (TRAV12-1, TRAJ13)
CVVIDSGGYQKVTF

SEQ ID NO: 341248 - protein, 13 aa, Homo sapiens
  CDR3 for beta chain variable domain of TCR clone 170624 (TRBV29-1, TRBJ2-1)
CSVEGGRVNEQFF

SEQ ID NO: 341249 - protein, 12 aa, Homo sapiens
  CDR3 for alpha chain variable domain of TCR clone 170625 (TRAV21, TRAJ11)
CAATSGYSTLTF

SEQ ID NO: 341250 - protein, 15 aa, Homo sapiens
  CDR3 for beta chain variable domain of TCR clone 170625 (TRBV2, TRBJ2-1)
CASSELAGSYNEQFF

SEQ ID NO: 341251 - protein, 15 aa, Homo sapiens
  CDR3 for alpha chain variable domain of TCR clone 170626 (TRAV3, TRAJ20)
CAVMDIKLSDYKLSF

SEQ ID NO: 341252 - protein, 15 aa, Homo sapiens
  CDR3 for beta chain variable domain of TCR clone 170626 (TRBV7-9, TRBJ1-6)
CASSSPGRGNSPLHF

SEQ ID NO: 341253 - protein, 14 aa, Homo sapiens
  CDR3 for alpha chain variable domain of TCR clone 170627 (TRAV12-3, TRAJ13)
CAMKNTGGYQKVTF

SEQ ID NO: 341254 - protein, 13 aa, Homo sapiens
  CDR3 for beta chain variable domain of TCR clone 170627 (TRBV29-1, TRBJ2-5)
CSAGDRVEETQYF

SEQ ID NO: 341255 - protein, 13 aa, Homo sapiens
  CDR3 for alpha chain variable domain of TCR clone 170628 (TRAV8-3, TRAJ37)
CAVPSSNTSKLIF

SEQ ID NO: 341256 - protein, 12 aa, Homo sapiens
  CDR3 for beta chain variable domain of TCR clone 170628 (TRBV11-2, TRBJ2-1)
CASSPGNNEQFF

SEQ ID NO: 341257 - protein, 12 aa, Homo sapiens
  CDR3 for alpha chain variable domain of TCR clone 170629 (TRAV13-2, TRAJ23)
CAERHRGGRLIF

SEQ ID NO: 341258 - protein, 13 aa, Homo sapiens
  CDR3 for beta chain variable domain of TCR clone 170629 (TRBV2, TRBJ1-6)
CADSGSYNSPLHF

SEQ ID NO: 341259 - protein, 15 aa, Homo sapiens
  CDR3 for alpha chain variable domain of TCR clone 170630 (TRAV8-3, TRAJ37)
CAAGARASNTGKLIF

SEQ ID NO: 341260 - protein, 15 aa, Homo sapiens
  CDR3 for beta chain variable domain of TCR clone 170630 (TRBV5-4, TRBJ2-3)
CASSLAGRVTDTQYF

SEQ ID NO: 341261 - protein, 15 aa, Homo sapiens
  CDR3 for alpha chain variable domain of TCR clone 170631 (TRAV1-1, TRAJ20)
CAVRDNVANDYKLSF

SEQ ID NO: 341262 - protein, 14 aa, Homo sapiens
  CDR3 for beta chain variable domain of TCR clone 170631 (TRBV18, TRBJ2-1)
CASSPQGRFNEQFF

SEQ ID NO: 341263 - protein, 11 aa, Homo sapiens
  CDR3 for alpha chain variable domain of TCR clone 170632 (TRAV4, TRAJ31)
CLVGDNAGLMF

SEQ ID NO: 341264 - protein, 14 aa, Homo sapiens
  CDR3 for beta chain variable domain of TCR clone 170632 (TRBV2, TRBJ1-5)
CASGEAAGGQAQHF

SEQ ID NO: 341265 - protein, 12 aa, Homo sapiens
  CDR3 for alpha chain variable domain of TCR clone 170633 (TRAV13-2, TRAJ48)
VQMDFGNEKLTF

SEQ ID NO: 341266 - protein, 15 aa, Homo sapiens
  CDR3 for beta chain variable domain of TCR clone 170633 (TRBV7-9, TRBJ1-6)
CASSSPGRGNSPLHF

SEQ ID NO: 341267 - protein, 13 aa, Homo sapiens
  CDR3 for alpha chain variable domain of TCR clone 170634 (TRAV21, TRAJ45)
CAVMGGGADGLTF

SEQ ID NO: 341268 - protein, 16 aa, Homo sapiens
  CDR3 for beta chain variable domain of TCR clone 170634 (TRBV20-1, TRBJ2-1)
CSARDHLVGGRGEQFF

SEQ ID NO: 341269 - protein, 18 aa, Homo sapiens
  CDR3 for alpha chain variable domain of TCR clone 170635 (TRAV13-1, TRAJ52)
CAAKNPNAGGTSYGKLTF

SEQ ID NO: 341270 - protein, 15 aa, Homo sapiens
  CDR3 for beta chain variable domain of TCR clone 170635 (TRBV6-1, TRBJ2-3)
CACSERGGITDTQYF

SEQ ID NO: 341271 - protein, 13 aa, Homo sapiens
  CDR3 for alpha chain variable domain of TCR clone 170636 (TRAV23/DV6, TRAJ41)
CSDRINSGYALNF

SEQ ID NO: 341272 - protein, 17 aa, Homo sapiens
  CDR3 for beta chain variable domain of TCR clone 170636 (TRBV7-3, TRBJ2-3)
CASSLMKRMRGADTRYF

SEQ ID NO: 341273 - protein, 16 aa, Homo sapiens
  CDR3 for alpha chain variable domain of TCR clone 170637 (TRAV14/DV4, TRAJ12)
CAMREVLMDSSYKLIF

SEQ ID NO: 341274 - protein, 14 aa, Homo sapiens
  CDR3 for beta chain variable domain of TCR clone 170637 (TRBV7-2, TRBJ2-5)
CASSFTQGQETQFF

SEQ ID NO: 341275 - protein, 16 aa, Homo sapiens
  CDR3 for alpha chain variable domain of TCR clone 170638 (TRAV3, TRAJ13)
CAVRDPNSGGYQKVTF

SEQ ID NO: 341276 - protein, 13 aa, Homo sapiens
  CDR3 for beta chain variable domain of TCR clone 170638 (TRBV7-9, TRBJ2-7)
CASSLQGSYQQYF

SEQ ID NO: 341277 - protein, 13 aa, Homo sapiens
  CDR3 for alpha chain variable domain of TCR clone 170639 (TRAV12-2, TRAJ12)
CAVNEDSSYKLIF

SEQ ID NO: 341278 - protein, 17 aa, Homo sapiens
  CDR3 for beta chain variable domain of TCR clone 170639 (TRBV20-1, TRBJ2-7)
CSATCAGGVAGVEEQYF

SEQ ID NO: 341279 - protein, 15 aa, Homo sapiens
  CDR3 for alpha chain variable domain of TCR clone 170640 (TRAV12-1, TRAJ44)
CVADLHTGTASKLTF

SEQ ID NO: 341280 - protein, 14 aa, Homo sapiens
  CDR3 for beta chain variable domain of TCR clone 170640 (TRBV7-6, TRBJ2-3)
CASSLGTVTDTQYF

SEQ ID NO: 341281 - protein, 16 aa, Homo sapiens
  CDR3 for alpha chain variable domain of TCR clone 170641 (TRAV8-3, TRAJ18)
CAVALDRGSTLGRLYF

SEQ ID NO: 341282 - protein, 11 aa, Homo sapiens
  CDR3 for beta chain variable domain of TCR clone 170641 (TRBV29-1, TRBJ1-1)
CSVEILSEAFF

SEQ ID NO: 341283 - protein, 13 aa, Homo sapiens
  CDR3 for alpha chain variable domain of TCR clone 170642 (TRAV3, TRAJ21)
CAVREPDFNKFYF

SEQ ID NO: 341284 - protein, 15 aa, Homo sapiens
  CDR3 for beta chain variable domain of TCR clone 170642 (TRBV7-3, TRBJ2-1)
CASSQRGGALIEQFF

SEQ ID NO: 341285 - protein, 12 aa, Homo sapiens
  CDR3 for alpha chain variable domain of TCR clone 170643 (TRAV21, TRAJ23)
CAVMLQGGKLIF

SEQ ID NO: 341286 - protein, 13 aa, Homo sapiens
  CDR3 for beta chain variable domain of TCR clone 170643 (TRBV7-9, TRBJ1-2)
CASSLKQNYGYTF

SEQ ID NO: 341287 - protein, 15 aa, Homo sapiens
  CDR3 for alpha chain variable domain of TCR clone 170644 (TRAV3, TRAJ22)
CAVRDRGGSARQLTF

SEQ ID NO: 341288 - protein, 12 aa, Homo sapiens
  CDR3 for beta chain variable domain of TCR clone 170644 (TRBV11-2, TRBJ2-7)
CASSLPTYEQYF

SEQ ID NO: 341289 - protein, 14 aa, Homo sapiens
  CDR3 for alpha chain variable domain of TCR clone 170645 (TRAV29/DV5, TRAJ36)
CAARRKTGANNLFF

SEQ ID NO: 341290 - protein, 15 aa, Homo sapiens
  CDR3 for beta chain variable domain of TCR clone 170645 (TRBV6-3, TRBJ2-7)
CASRSPGTVFYEQYF

SEQ ID NO: 341291 - protein, 17 aa, Homo sapiens
  CDR3 for alpha chain variable domain of TCR clone 170646 (TRAV21, TRAJ24)
CAGIRLRSTYSWGKLQF

SEQ ID NO: 341292 - protein, 15 aa, Homo sapiens
  CDR3 for beta chain variable domain of TCR clone 170646 (TRBV7-2, TRBJ2-3)
CASSPRGLSTDTQYF

SEQ ID NO: 341293 - protein, 14 aa, Homo sapiens
  CDR3 for alpha chain variable domain of TCR clone 170647 (TRAV26-1, TRAJ39)
CIVRGSWSGNMLTF

SEQ ID NO: 341294 - protein, 15 aa, Homo sapiens
  CDR3 for beta chain variable domain of TCR clone 170647 (TRBV7-9, TRBJ1-5)
CASSQGHQPNQPQHF

SEQ ID NO: 341295 - protein, 16 aa, Homo sapiens
  CDR3 for alpha chain variable domain of TCR clone 170648 (TRAV1-2, TRAJ10)
CAVRDQGGGGGNKLTF

SEQ ID NO: 341296 - protein, 13 aa, Homo sapiens
  CDR3 for beta chain variable domain of TCR clone 170648 (TRBV29-1, TRBJ1-1)
CSVGGSRNTEAFF

SEQ ID NO: 341297 - protein, 11 aa, Homo sapiens
  CDR3 for alpha chain variable domain of TCR clone 170649 (TRAV12-2, TRAJ29)
CAVTLRSPLVF

SEQ ID NO: 341298 - protein, 15 aa, Homo sapiens
  CDR3 for beta chain variable domain of TCR clone 170649 (TRBV11-2, TRBJ2-2)
CASRGLAANTGELFF

SEQ ID NO: 341299 - protein, 14 aa, Homo sapiens
  CDR3 for alpha chain variable domain of TCR clone 170650 (TRAV13-1, TRAJ40)
CAASMTSGTYKYIF

SEQ ID NO: 341300 - protein, 15 aa, Homo sapiens
  CDR3 for beta chain variable domain of TCR clone 170650 (TRBV4-1, TRBJ1-4)
CASSDTGGTNEKLFF

SEQ ID NO: 341301 - protein, 14 aa, Homo sapiens
  CDR3 for alpha chain variable domain of TCR clone 170651 (TRAV1-2, TRAJ16)
CAVNRFSDGQKLLF

SEQ ID NO: 341302 - protein, 16 aa, Homo sapiens
  CDR3 for beta chain variable domain of TCR clone 170651 (TRBV20-1, TRBJ1-4)
CSAPGQGLLTNEKLIF

SEQ ID NO: 341303 - protein, 12 aa, Homo sapiens
  CDR3 for alpha chain variable domain of TCR clone 170652 (TRAV1-2, TRAJ9)
CAGYTGVFKTIF

SEQ ID NO: 341304 - protein, 15 aa, Homo sapiens
  CDR3 for beta chain variable domain of TCR clone 170652 (TRBV11-2, TRBJ2-1)
CASSPAGQSLNEQFF

SEQ ID NO: 341305 - protein, 12 aa, Homo sapiens
  CDR3 for alpha chain variable domain of TCR clone 170653 (TRAV21, TRAJ31)
CAVWGNNARLMF

SEQ ID NO: 341306 - protein, 13 aa, Homo sapiens
  CDR3 for beta chain variable domain of TCR clone 170653 (TRBV28, TRBJ2-4)
CASSQSSKNIQYF

SEQ ID NO: 341307 - protein, 16 aa, Homo sapiens
  CDR3 for alpha chain variable domain of TCR clone 170654 (TRAV8-2, TRAJ45)
CVVSEGTGGGADGLTF

SEQ ID NO: 341308 - protein, 17 aa, Homo sapiens
  CDR3 for beta chain variable domain of TCR clone 170654 (TRBV11-2, TRBJ2-1)
CASSLYPPGVEYNEQFF

SEQ ID NO: 341309 - protein, 12 aa, Homo sapiens
  CDR3 for alpha chain variable domain of TCR clone 170655 (TRAV8-3, TRAJ26)
CAGDNYGQNFVF

SEQ ID NO: 341310 - protein, 14 aa, Homo sapiens
  CDR3 for beta chain variable domain of TCR clone 170655 (TRBV11-2, TRBJ2-3)
CASSRRARTDTQYF

SEQ ID NO: 341311 - protein, 12 aa, Homo sapiens
  CDR3 for alpha chain variable domain of TCR clone 170656 (TRAV3, TRAJ21)
CAVRDRSASTNF

SEQ ID NO: 341312 - protein, 16 aa, Homo sapiens
  CDR3 for beta chain variable domain of TCR clone 170656 (TRBV7-2, TRBJ2-5)
CASSLESAGGRETQYF

SEQ ID NO: 341313 - protein, 12 aa, Homo sapiens
  CDR3 for alpha chain variable domain of TCR clone 170657 (TRAV1-2, TRAJ29)
CAVPSGNTPLVF

SEQ ID NO: 341314 - protein, 13 aa, Homo sapiens
  CDR3 for beta chain variable domain of TCR clone 170657 (TRBV5-4, TRBJ1-1)
CASSVNLGTEAFF

SEQ ID NO: 341315 - protein, 16 aa, Homo sapiens
  CDR3 for alpha chain variable domain of TCR clone 170658 (TRAV29/DV5, TRAJ37)
CAASAHGSSNTGKLIF

SEQ ID NO: 341316 - protein, 12 aa, Homo sapiens
  CDR3 for beta chain variable domain of TCR clone 170658 (TRBV11-2, TRBJ2-1)
CASSPGNNEQFF

SEQ ID NO: 341317 - protein, 11 aa, Homo sapiens
  CDR3 for alpha chain variable domain of TCR clone 170659 (TRAV4, TRAJ31)
CLEGDNARLMF

SEQ ID NO: 341318 - protein, 14 aa, Homo sapiens
  CDR3 for beta chain variable domain of TCR clone 170659 (TRBV2, TRBJ1-5)
CASSEAAGGQPQHF

SEQ ID NO: 341319 - protein, 13 aa, Homo sapiens
  CDR3 for alpha chain variable domain of TCR clone 170660 (TRAV13-1, TRAJ43)
CAASLSNKMTCAL

SEQ ID NO: 341320 - protein, 14 aa, Homo sapiens
  CDR3 for beta chain variable domain of TCR clone 170660 (TRBV5-1, TRBJ2-5)
CASSLAGKQETQYF

SEQ ID NO: 341321 - protein, 17 aa, Homo sapiens
  CDR3 for alpha chain variable domain of TCR clone 170661 (TRAV38-1, TRAJ28)
CAFMKPTSGAGSYQLTF

SEQ ID NO: 341322 - protein, 17 aa, Homo sapiens
  CDR3 for beta chain variable domain of TCR clone 170661 (TRBV5-1, TRBJ2-4)
CASSLGGEGVTFSTSAP

SEQ ID NO: 341323 - protein, 12 aa, Homo sapiens
  CDR3 for alpha chain variable domain of TCR clone 170662 (TRAV12-2, TRAJ47)
CAVAEYGNKLVF

SEQ ID NO: 341324 - protein, 14 aa, Homo sapiens
  CDR3 for beta chain variable domain of TCR clone 170662 (TRBV20-1, TRBJ1-1)
CSAMGGTANTEAFY

SEQ ID NO: 341325 - protein, 15 aa, Homo sapiens
  CDR3 for alpha chain variable domain of TCR clone 170663 (TRAV3, TRAJ29)
CAVRAPLSGNTPFVF

SEQ ID NO: 341326 - protein, 14 aa, Homo sapiens
  CDR3 for beta chain variable domain of TCR clone 170663 (TRBV7-2, TRBJ2-7)
CASRSQGAAYEQYF

SEQ ID NO: 341327 - protein, 15 aa, Homo sapiens
  CDR3 for alpha chain variable domain of TCR clone 170664 (TRAV12-1, TRAJ44)
CVADLPTGTASKLTF

SEQ ID NO: 341328 - protein, 15 aa, Homo sapiens
  CDR3 for beta chain variable domain of TCR clone 170664 (TRBV20-1, TRBJ2-7)
CSARGRGPSSYEQYF

SEQ ID NO: 341329 - protein, 16 aa, Homo sapiens
  CDR3 for alpha chain variable domain of TCR clone 170665 (TRAV38-2/DV8, TRAJ47)
CAYRSSIMQYGNKLVF

SEQ ID NO: 341330 - protein, 14 aa, Homo sapiens
  CDR3 for beta chain variable domain of TCR clone 170665 (TRBV19, TRBJ2-7)
CASSIFAGTYEQYF

SEQ ID NO: 341331 - protein, 16 aa, Homo sapiens
  CDR3 for alpha chain variable domain of TCR clone 170666 (TRAV30, TRAJ24)
CGTEIVDADSWGKFQF

SEQ ID NO: 341332 - protein, 14 aa, Homo sapiens
  CDR3 for beta chain variable domain of TCR clone 170666 (TRBV7-2, TRBJ1-5)
CASSRDGSNQPQHF

SEQ ID NO: 341333 - protein, 14 aa, Homo sapiens
  CDR3 for alpha chain variable domain of TCR clone 170667 (TRAV12-2, TRAJ40)
CAVKIPSGTYKYIF

SEQ ID NO: 341334 - protein, 17 aa, Homo sapiens
  CDR3 for beta chain variable domain of TCR clone 170667 (TRBV13, TRBJ2-3)
CSSSLSRVAGGRNTQYF

SEQ ID NO: 341335 - protein, 11 aa, Homo sapiens
  CDR3 for alpha chain variable domain of TCR clone 170668 (TRAV2, TRAJ13)
CASGGYQKVTF

SEQ ID NO: 341336 - protein, 16 aa, Homo sapiens
  CDR3 for beta chain variable domain of TCR clone 170668 (TRBV19, TRBJ2-2)
CASRSPETGATGELFF

SEQ ID NO: 341337 - protein, 13 aa, Homo sapiens
  CDR3 for alpha chain variable domain of TCR clone 170669 (TRAV21, TRAJ27)
CAARPGNAGKSTF

SEQ ID NO: 341338 - protein, 12 aa, Homo sapiens
  CDR3 for beta chain variable domain of TCR clone 170669 (TRBV12-4, TRBJ2-1)
CASSKDRRWQFF

SEQ ID NO: 341339 - protein, 11 aa, Homo sapiens
  CDR3 for alpha chain variable domain of TCR clone 170670 (TRAV3, TRAJ21)
CAVGNFNKFYF

SEQ ID NO: 341340 - protein, 17 aa, Homo sapiens
  CDR3 for beta chain variable domain of TCR clone 170670 (TRBV6-5, TRBJ1-4)
CASSLRWTGTTNEKLFF

SEQ ID NO: 341341 - protein, 10 aa, Homo sapiens
  CDR3 for alpha chain variable domain of TCR clone 170671 (TRAV8-4, TRAJ43)
CAVSADDMRF

SEQ ID NO: 341342 - protein, 13 aa, Homo sapiens
  CDR3 for beta chain variable domain of TCR clone 170671 (TRBV15, TRBJ1-6)
CATSGGLNSTLHF

SEQ ID NO: 341343 - protein, 18 aa, Homo sapiens
  CDR3 for alpha chain variable domain of TCR clone 170672 (TRAV12-3, TRAJ52)
CAISVGGAGGTSYGKLTF

SEQ ID NO: 341344 - protein, 17 aa, Homo sapiens
  CDR3 for beta chain variable domain of TCR clone 170672 (TRBV13, TRBJ2-3)
CASSLSRVAGGRNTQYF

SEQ ID NO: 341345 - protein, 16 aa, Homo sapiens
  CDR3 for alpha chain variable domain of TCR clone 170673 (TRAV8-3, TRAJ28)
CAVPPQRGAGSYQLTF

SEQ ID NO: 341346 - protein, 13 aa, Homo sapiens
  CDR3 for beta chain variable domain of TCR clone 170673 (TRBV7-6, TRBJ2-3)
CASSLGSDNTQYF

SEQ ID NO: 341347 - protein, 17 aa, Homo sapiens
  CDR3 for alpha chain variable domain of TCR clone 170674 (TRAV3, TRAJ42)
CAVRARDYGGSQGNLIF

SEQ ID NO: 341348 - protein, 12 aa, Homo sapiens
  CDR3 for beta chain variable domain of TCR clone 170674 (TRBV7-3, TRBJ2-1)
CASSFINNEQFF

SEQ ID NO: 341349 - protein, 17 aa, Homo sapiens
  CDR3 for alpha chain variable domain of TCR clone 170675 (TRAV3, TRAJ6)
CAVRDGPRAVGSYIPTF

SEQ ID NO: 341350 - protein, 14 aa, Homo sapiens
  CDR3 for beta chain variable domain of TCR clone 170675 (TRBV7-2, TRBJ2-7)
CASSPKDSFYEQYF

SEQ ID NO: 341351 - protein, 13 aa, Homo sapiens
  CDR3 for alpha chain variable domain of TCR clone 170676 (TRAV2, TRAJ47)
CAVDREYGNKLVF

SEQ ID NO: 341352 - protein, 17 aa, Homo sapiens
  CDR3 for beta chain variable domain of TCR clone 170676 (TRBV15, TRBJ1-5)
CATSRVKGIYSNQPQHI

SEQ ID NO: 341353 - protein, 10 aa, Homo sapiens
  CDR3 for alpha chain variable domain of TCR clone 170677 (TRAV30, TRAJ24)
CAQRLWMLTA

SEQ ID NO: 341354 - protein, 14 aa, Homo sapiens
  CDR3 for beta chain variable domain of TCR clone 170677 (TRBV13, TRBJ2-1)
CASSPRPRYNEQFF

SEQ ID NO: 341355 - protein, 13 aa, Homo sapiens
  CDR3 for alpha chain variable domain of TCR clone 170678 (TRAV36/DV7, TRAJ49)
CAGDSNTGNQFYC

SEQ ID NO: 341356 - protein, 12 aa, Homo sapiens
  CDR3 for beta chain variable domain of TCR clone 170678 (TRBV11-2, TRBJ2-2)
CASSLGGGELFF

SEQ ID NO: 341357 - protein, 23 aa, Homo sapiens
  CDR3 for alpha chain variable domain of TCR clone 170679 (TRAV26-1, TRAJ38)
CIADNAGNNHIQNPDPAVSQLRD

SEQ ID NO: 341358 - protein, 13 aa, Homo sapiens
  CDR3 for beta chain variable domain of TCR clone 170679 (TRBV20-1, TRBJ1-1)
CSARGGGNTEAVF

SEQ ID NO: 341359 - protein, 14 aa, Homo sapiens
  CDR3 for alpha chain variable domain of TCR clone 170680 (TRAV1-2, TRAJ16)
CAVNRFSDGQKLLF

SEQ ID NO: 341360 - protein, 16 aa, Homo sapiens
  CDR3 for beta chain variable domain of TCR clone 170680 (TRBV13, TRBJ2-2)
CASSHRTGEHTGELFF

SEQ ID NO: 341361 - protein, 14 aa, Homo sapiens
  CDR3 for alpha chain variable domain of TCR clone 170681 (TRAV26-1, TRAJ9)
CIADNAGNNRKLIW

SEQ ID NO: 341362 - protein, 12 aa, Homo sapiens
  CDR3 for beta chain variable domain of TCR clone 170681 (TRBV12-4, TRBJ2-4)
CASSSSGNIQYF

SEQ ID NO: 341363 - protein, 13 aa, Homo sapiens
  CDR3 for alpha chain variable domain of TCR clone 170682 (TRAV27, TRAJ29)
CAGAHSGNTPLVF

SEQ ID NO: 341364 - protein, 14 aa, Homo sapiens
  CDR3 for beta chain variable domain of TCR clone 170682 (TRBV7-9, TRBJ2-7)
CASSIGQGGGEQYF

SEQ ID NO: 341365 - protein, 10 aa, Homo sapiens
  CDR3 for alpha chain variable domain of TCR clone 170683 (TRAV8-4, TRAJ39)
CAVSGNMLTF

SEQ ID NO: 341366 - protein, 14 aa, Homo sapiens
  CDR3 for beta chain variable domain of TCR clone 170683 (TRBV7-6, TRBJ2-7)
CASSFRQGADEQYF

SEQ ID NO: 341367 - protein, 16 aa, Homo sapiens
  CDR3 for alpha chain variable domain of TCR clone 170684 (TRAV3, TRAJ21)
CAVRDIERGNFNKFYF

SEQ ID NO: 341368 - protein, 13 aa, Homo sapiens
  CDR3 for beta chain variable domain of TCR clone 170684 (TRBV27, TRBJ2-7)
CASSLTTGYEQYV

SEQ ID NO: 341369 - protein, 18 aa, Homo sapiens
  CDR3 for alpha chain variable domain of TCR clone 170685 (TRAV26-2, TRAJ54)
CILRDVEVGIQGAQKLGV

SEQ ID NO: 341370 - protein, 16 aa, Homo sapiens
  CDR3 for beta chain variable domain of TCR clone 170685 (TRBV6-1, TRBJ2-5)
CASSETLDRGAETQYF

SEQ ID NO: 341371 - protein, 15 aa, Homo sapiens
  CDR3 for alpha chain variable domain of TCR clone 170686 (TRAV26-1, TRAJ23)
CIVRVLNNKGGKLIF

SEQ ID NO: 341372 - protein, 15 aa, Homo sapiens
  CDR3 for beta chain variable domain of TCR clone 170686 (TRBV7-3, TRBJ2-1)
CASSFGQSNYNEQFF

SEQ ID NO: 341373 - protein, 17 aa, Homo sapiens
  CDR3 for alpha chain variable domain of TCR clone 170687 (TRAV3, TRAJ6)
CAVRDGPRAGGSYIPKL

SEQ ID NO: 341374 - protein, 14 aa, Homo sapiens
  CDR3 for beta chain variable domain of TCR clone 170687 (TRBV7-2, TRBJ2-7)
CASSPKTSFYEQYF

SEQ ID NO: 341375 - protein, 13 aa, Homo sapiens
  CDR3 for alpha chain variable domain of TCR clone 170688 (TRAV21, TRAJ16)
CAVRFSDGQKLLF

SEQ ID NO: 341376 - protein, 14 aa, Homo sapiens
  CDR3 for beta chain variable domain of TCR clone 170688 (TRBV18, TRBJ2-5)
CASSPPGHQETQYF

SEQ ID NO: 341377 - protein, 13 aa, Homo sapiens
  CDR3 for alpha chain variable domain of TCR clone 170689 (TRAV8-4, TRAJ34)
CAVTLYNTDKLIF

SEQ ID NO: 341378 - protein, 17 aa, Homo sapiens
  CDR3 for beta chain variable domain of TCR clone 170689 (TRBV7-2, TRBJ2-2)
CASSPSWRGGRTGELFF

SEQ ID NO: 341379 - protein, 13 aa, Homo sapiens
  CDR3 for alpha chain variable domain of TCR clone 170690 (TRAV21, TRAJ57)
CTVTQGGSEKLVF

SEQ ID NO: 341380 - protein, 16 aa, Homo sapiens
  CDR3 for beta chain variable domain of TCR clone 170690 (TRBV29-1, TRBJ2-7)
CSVEDAEDGTDYEQYF

SEQ ID NO: 341381 - protein, 14 aa, Homo sapiens
  CDR3 for alpha chain variable domain of TCR clone 170691 (TRAV17, TRAJ16)
CATADFSDGQKLLF

SEQ ID NO: 341382 - protein, 16 aa, Homo sapiens
  CDR3 for beta chain variable domain of TCR clone 170691 (TRBV5-4, TRBJ2-3)
CASQQPGAGGADTQYF

SEQ ID NO: 341383 - protein, 13 aa, Homo sapiens
  CDR3 for alpha chain variable domain of TCR clone 170692 (TRAV2, TRAJ40)
CAVVTSGTYTYIF

SEQ ID NO: 341384 - protein, 17 aa, Homo sapiens
  CDR3 for beta chain variable domain of TCR clone 170692 (TRBV20-1, TRBJ2-2)
CSASGSGQGGLTGELFF

SEQ ID NO: 341385 - protein, 12 aa, Homo sapiens
  CDR3 for alpha chain variable domain of TCR clone 170693 (TRAV30, TRAJ15)
CGTNQPGTALIF

SEQ ID NO: 341386 - protein, 13 aa, Homo sapiens
  CDR3 for beta chain variable domain of TCR clone 170693 (TRBV24-1, TRBJ2-7)
CATSDLGPYEQYF

SEQ ID NO: 341387 - protein, 17 aa, Homo sapiens
  CDR3 for alpha chain variable domain of TCR clone 170694 (TRAV12-3, TRAJ18)
CAMIRADRGSTPGRLYF

SEQ ID NO: 341388 - protein, 14 aa, Homo sapiens
  CDR3 for beta chain variable domain of TCR clone 170694 (TRBV5-7, TRBJ1-6)
CASTPWPADSPLHF

SEQ ID NO: 341389 - protein, 13 aa, Homo sapiens
  CDR3 for alpha chain variable domain of TCR clone 170695 (TRAV20, TRAJ3)
CASRYSSASKIIF

SEQ ID NO: 341390 - protein, 16 aa, Homo sapiens
  CDR3 for beta chain variable domain of TCR clone 170695 (TRBV6-1, TRBJ1-6)
CASSSDGSPRNSPLHC

SEQ ID NO: 341391 - protein, 14 aa, Homo sapiens
  CDR3 for alpha chain variable domain of TCR clone 170696 (TRAV12-3, TRAJ58)
CAVSTETSGSRLTF

SEQ ID NO: 341392 - protein, 15 aa, Homo sapiens
  CDR3 for beta chain variable domain of TCR clone 170696 (TRBV4-1, TRBJ1-4)
CASSDTGGTNEKLFF

SEQ ID NO: 341393 - protein, 11 aa, Homo sapiens
  CDR3 for alpha chain variable domain of TCR clone 170697 (TRAV12-3, TRAJ27)
CAMANAGKSTF

SEQ ID NO: 341394 - protein, 16 aa, Homo sapiens
  CDR3 for beta chain variable domain of TCR clone 170697 (TRBV7-3, TRBJ2-3)
CASSLSGYRPEDTQYF

SEQ ID NO: 341395 - protein, 17 aa, Homo sapiens
  CDR3 for alpha chain variable domain of TCR clone 170698 (TRAV3, TRAJ42)
FAVRGRDYGGSQGNLIF

SEQ ID NO: 341396 - protein, 15 aa, Homo sapiens
  CDR3 for beta chain variable domain of TCR clone 170698 (TRBV6-6, TRBJ2-7)
CASSYSYGGSYEQYF

SEQ ID NO: 341397 - protein, 13 aa, Homo sapiens
  CDR3 for alpha chain variable domain of TCR clone 170699 (TRAV29/DV5, TRAJ31)
CAASRNKNARLMF

SEQ ID NO: 341398 - protein, 14 aa, Homo sapiens
  CDR3 for beta chain variable domain of TCR clone 170699 (TRBV7-2, TRBJ2-7)
CASSPKTSFYEQYF

SEQ ID NO: 341399 - protein, 15 aa, Homo sapiens
  CDR3 for alpha chain variable domain of TCR clone 170700 (TRAV2, TRAJ15)
CAVEDRNQAGTALIF

SEQ ID NO: 341400 - protein, 13 aa, Homo sapiens
  CDR3 for beta chain variable domain of TCR clone 170700 (TRBV10-2, TRBJ2-1)
RASGASGEAKQFF

SEQ ID NO: 341401 - protein, 14 aa, Homo sapiens
  CDR3 for alpha chain variable domain of TCR clone 170701 (TRAV12-1, TRAJ9)
CVVNGDTGGFKTIF

SEQ ID NO: 341402 - protein, 16 aa, Homo sapiens
  CDR3 for beta chain variable domain of TCR clone 170701 (TRBV29-1, TRBJ1-2)
CSVEANRDIANYGYTF

SEQ ID NO: 341403 - protein, 16 aa, Homo sapiens
  CDR3 for alpha chain variable domain of TCR clone 170702 (TRAV12-1, TRAJ48)
CVVNTFREFGNEKLTF

SEQ ID NO: 341404 - protein, 15 aa, Homo sapiens
  CDR3 for beta chain variable domain of TCR clone 170702 (TRBV20-1, TRBJ2-7)
CSARDRVSGMDEQYF

SEQ ID NO: 341405 - protein, 17 aa, Homo sapiens
  CDR3 for alpha chain variable domain of TCR clone 170703 (TRAV26-1, TRAJ53)
CIVRVDDSGGSNYKLTF

SEQ ID NO: 341406 - protein, 15 aa, Homo sapiens
  CDR3 for beta chain variable domain of TCR clone 170703 (TRBV20-1, TRBJ2-7)
CSARARAAYFYEQYF

SEQ ID NO: 341407 - protein, 18 aa, Homo sapiens
  CDR3 for alpha chain variable domain of TCR clone 170704 (TRAV26-1, TRAJ22)
CIVRVALISSGSARHLTF

SEQ ID NO: 341408 - protein, 13 aa, Homo sapiens
  CDR3 for beta chain variable domain of TCR clone 170704 (TRBV13, TRBJ2-5)
CASSPEVGETQFF

SEQ ID NO: 341409 - protein, 15 aa, Homo sapiens
  CDR3 for alpha chain variable domain of TCR clone 170705 (TRAV17, TRAJ40)
CATVSSTSGTYKYIF

SEQ ID NO: 341410 - protein, 22 aa, Homo sapiens
  CDR3 for beta chain variable domain of TCR clone 170705 (TRBV11-2, TRBJ1-4)
CASSLDITRRGIPRKDNEKLFF

SEQ ID NO: 341411 - protein, 19 aa, Homo sapiens
  CDR3 for alpha chain variable domain of TCR clone 170706 (TRAV1-2, TRAJ26)
CLLPLCCERPDNYGQNFVF

SEQ ID NO: 341412 - protein, 11 aa, Homo sapiens
  CDR3 for beta chain variable domain of TCR clone 170706 (TRBV12-4, TRBJ2-3)
CASTATGTQYF

SEQ ID NO: 341413 - protein, 15 aa, Homo sapiens
  CDR3 for alpha chain variable domain of TCR clone 170707 (TRAV27, TRAJ38)
CAARRNAGNNRKLIW

SEQ ID NO: 341414 - protein, 15 aa, Homo sapiens
  CDR3 for beta chain variable domain of TCR clone 170707 (TRBV6-1, TRBJ2-3)
CASSERWDSTDTQYF

SEQ ID NO: 341415 - protein, 13 aa, Homo sapiens
  CDR3 for alpha chain variable domain of TCR clone 170708 (TRAV21, TRAJ20)
CAVGLRVDYKLSF

SEQ ID NO: 341416 - protein, 13 aa, Homo sapiens
  CDR3 for beta chain variable domain of TCR clone 170708 (TRBV7-2, TRBJ2-2)
CASSSVRAGELFF

SEQ ID NO: 341417 - protein, 14 aa, Homo sapiens
  CDR3 for alpha chain variable domain of TCR clone 170709 (TRAV12-3, TRAJ10)
SHLPLTGGGNKLTF

SEQ ID NO: 341418 - protein, 15 aa, Homo sapiens
  CDR3 for beta chain variable domain of TCR clone 170709 (TRBV6-3, TRBJ2-7)
CASSSPGTVCYEQYF

SEQ ID NO: 341419 - protein, 13 aa, Homo sapiens
  CDR3 for alpha chain variable domain of TCR clone 170710 (TRAV4, TRAJ42)
CLVGGGSQGNLIF

SEQ ID NO: 341420 - protein, 12 aa, Homo sapiens
  CDR3 for beta chain variable domain of TCR clone 170710 (TRBV12-4, TRBJ1-5)
CASSLGRQPQHF

SEQ ID NO: 341421 - protein, 13 aa, Homo sapiens
  CDR3 for alpha chain variable domain of TCR clone 170711 (TRAV8-3, TRAJ28)
CAVGAVGSYQLTF

SEQ ID NO: 341422 - protein, 14 aa, Homo sapiens
  CDR3 for beta chain variable domain of TCR clone 170711 (TRBV7-2, TRBJ2-7)
CASIPSREGFEQYF

SEQ ID NO: 341423 - protein, 15 aa, Homo sapiens
  CDR3 for alpha chain variable domain of TCR clone 170712 (TRAV12-2, TRAJ53)
CAVNGGGGSNYKLTF

SEQ ID NO: 341424 - protein, 15 aa, Homo sapiens
  CDR3 for beta chain variable domain of TCR clone 170712 (TRBV27, TRBJ2-7)
CASRFWGQGADEQYF

SEQ ID NO: 341425 - protein, 11 aa, Homo sapiens
  CDR3 for alpha chain variable domain of TCR clone 170713 (TRAV1-1, TRAJ23)
CAVRQGGKLIF

SEQ ID NO: 341426 - protein, 15 aa, Homo sapiens
  CDR3 for beta chain variable domain of TCR clone 170713 (TRBV27, TRBJ2-7)
FASSTAGTGSYEQYF

SEQ ID NO: 341427 - protein, 12 aa, Homo sapiens
  CDR3 for alpha chain variable domain of TCR clone 170714 (TRAV13-2, TRAJ8)
FAPWLGFQKLVF

SEQ ID NO: 341428 - protein, 13 aa, Homo sapiens
  CDR3 for beta chain variable domain of TCR clone 170714 (TRBV12-4, TRBJ1-5)
CASSPDRAQTQHF

SEQ ID NO: 341429 - protein, 14 aa, Homo sapiens
  CDR3 for alpha chain variable domain of TCR clone 170715 (TRAV17, TRAJ40)
CATALTSGTYKYIF

SEQ ID NO: 341430 - protein, 14 aa, Homo sapiens
  CDR3 for beta chain variable domain of TCR clone 170715 (TRBV4-1, TRBJ2-2)
CASSQAVNTGELFF

SEQ ID NO: 341431 - protein, 17 aa, Homo sapiens
  CDR3 for alpha chain variable domain of TCR clone 170716 (TRAV3, TRAJ6)
CAVRDGPRPGGSYIPPF

SEQ ID NO: 341432 - protein, 14 aa, Homo sapiens
  CDR3 for beta chain variable domain of TCR clone 170716 (TRBV7-2, TRBJ2-7)
CASSPKTSFYEQYF

SEQ ID NO: 341433 - protein, 18 aa, Homo sapiens
  CDR3 for alpha chain variable domain of TCR clone 170717 (TRAV26-1, TRAJ22)
CIVIVSFWFCKSTDLLIW

SEQ ID NO: 341434 - protein, 13 aa, Homo sapiens
  CDR3 for beta chain variable domain of TCR clone 170717 (TRBV7-9, TRBJ1-2)
CASSLKQNYGYTF

SEQ ID NO: 341435 - protein, 12 aa, Homo sapiens
  CDR3 for alpha chain variable domain of TCR clone 170718 (TRAV30, TRAJ43)
CGTEERGNDMRF

SEQ ID NO: 341436 - protein, 13 aa, Homo sapiens
  CDR3 for beta chain variable domain of TCR clone 170718 (TRBV7-8, TRBJ2-7)
CASSLTGGREQYF

SEQ ID NO: 341437 - protein, 14 aa, Homo sapiens
  CDR3 for alpha chain variable domain of TCR clone 170719 (TRAV1-2, TRAJ16)
CAVNRFSDGQKLLF

SEQ ID NO: 341438 - protein, 14 aa, Homo sapiens
  CDR3 for beta chain variable domain of TCR clone 170719 (TRBV4-1, TRBJ2-3)
CASSQDWSTDTQYF

SEQ ID NO: 341439 - protein, 13 aa, Homo sapiens
  CDR3 for alpha chain variable domain of TCR clone 170720 (TRAV16, TRAJ37)
CALRGSNTGKLIF

SEQ ID NO: 341440 - protein, 14 aa, Homo sapiens
  CDR3 for beta chain variable domain of TCR clone 170720 (TRBV7-2, TRBJ2-7)
CASRSQGAAYEQYF

SEQ ID NO: 341441 - protein, 13 aa, Homo sapiens
  CDR3 for alpha chain variable domain of TCR clone 170721 (TRAV30, TRAJ39)
CGTEKNAGNMLTF

SEQ ID NO: 341442 - protein, 11 aa, Homo sapiens
  CDR3 for beta chain variable domain of TCR clone 170721 (TRBV5-6, TRBJ1-2)
CASSRGGGYTF

SEQ ID NO: 341443 - protein, 15 aa, Homo sapiens
  CDR3 for alpha chain variable domain of TCR clone 170722 (TRAV21, TRAJ21)
CAVRRRTSTNFTLDL

SEQ ID NO: 341444 - protein, 14 aa, Homo sapiens
  CDR3 for beta chain variable domain of TCR clone 170722 (TRBV25-1, TRBJ1-1)
CASTHLGGNTEAFF

SEQ ID NO: 341445 - protein, 17 aa, Homo sapiens
  CDR3 for alpha chain variable domain of TCR clone 170723 (TRAV1-1, TRAJ4)
CALYNKLIFGAGTRLAV

SEQ ID NO: 341446 - protein, 12 aa, Homo sapiens
  CDR3 for beta chain variable domain of TCR clone 170723 (TRBV3-1, TRBJ2-1)
CASSQGSSGQFF

SEQ ID NO: 341447 - protein, 12 aa, Homo sapiens
  CDR3 for alpha chain variable domain of TCR clone 170724 (TRAV8-2, TRAJ45)
CVQGGGAEGLTF

SEQ ID NO: 341448 - protein, 14 aa, Homo sapiens
  CDR3 for beta chain variable domain of TCR clone 170724 (TRBV4-3, TRBJ1-1)
CASSQGWTPARAFF

SEQ ID NO: 341449 - protein, 11 aa, Homo sapiens
  CDR3 for alpha chain variable domain of TCR clone 170725 (TRAV2, TRAJ33)
CAVDSNYQLIW

SEQ ID NO: 341450 - protein, 16 aa, Homo sapiens
  CDR3 for beta chain variable domain of TCR clone 170725 (TRBV5-5, TRBJ2-2)
CASSGRREGATGELFF

SEQ ID NO: 341451 - protein, 14 aa, Homo sapiens
  CDR3 for alpha chain variable domain of TCR clone 170726 (TRAV17, TRAJ49)
CATDARDTGNQFYF

SEQ ID NO: 341452 - protein, 14 aa, Homo sapiens
  CDR3 for beta chain variable domain of TCR clone 170726 (TRBV5-5, TRBJ1-2)
CASSFRQINYGYTF

SEQ ID NO: 341453 - protein, 12 aa, Homo sapiens
  CDR3 for alpha chain variable domain of TCR clone 170727 (TRAV8-3, TRAJ20)
CAVGGGDSKLSF

SEQ ID NO: 341454 - protein, 14 aa, Homo sapiens
  CDR3 for beta chain variable domain of TCR clone 170727 (TRBV5-1, TRBJ2-7)
CASSRGESLYEQYF

SEQ ID NO: 341455 - protein, 13 aa, Homo sapiens
  CDR3 for alpha chain variable domain of TCR clone 170728 (TRAV2, TRAJ24)
CAVTTDSWGKLQF

SEQ ID NO: 341456 - protein, 14 aa, Homo sapiens
  CDR3 for beta chain variable domain of TCR clone 170728 (TRBV13, TRBJ2-5)
RASSVGRGQETQYS

SEQ ID NO: 341457 - protein, 12 aa, Homo sapiens
  CDR3 for alpha chain variable domain of TCR clone 170729 (TRAV3, TRAJ43)
CAVRDPNNDMRF

SEQ ID NO: 341458 - protein, 16 aa, Homo sapiens
  CDR3 for beta chain variable domain of TCR clone 170729 (TRBV6-5, TRBJ2-1)
CASSYSNSGGHNEQFF

SEQ ID NO: 341459 - protein, 11 aa, Homo sapiens
  CDR3 for alpha chain variable domain of TCR clone 170730 (TRAV13-1, TRAJ43)
CAAHNNNDVRI

SEQ ID NO: 341460 - protein, 15 aa, Homo sapiens
  CDR3 for beta chain variable domain of TCR clone 170730 (TRBV6-1, TRBJ2-2)
CASSRLRGDTGELFF

SEQ ID NO: 341461 - protein, 11 aa, Homo sapiens
  CDR3 for alpha chain variable domain of TCR clone 170731 (TRAV1-1, TRAJ23)
CAVRQGGKLIF

SEQ ID NO: 341462 - protein, 14 aa, Homo sapiens
  CDR3 for beta chain variable domain of TCR clone 170731 (TRBV25-1, TRBJ1-1)
CASTHLGGNTEASF

SEQ ID NO: 341463 - protein, 14 aa, Homo sapiens
  CDR3 for alpha chain variable domain of TCR clone 170732 (TRAV13-1, TRAJ32)
CAARGSGATNKLIF

SEQ ID NO: 341464 - protein, 15 aa, Homo sapiens
  CDR3 for beta chain variable domain of TCR clone 170732 (TRBV9, TRBJ1-6)
CASSVAGTGDSPLHF

SEQ ID NO: 341465 - protein, 14 aa, Homo sapiens
  CDR3 for alpha chain variable domain of TCR clone 170733 (TRAV26-1, TRAJ38)
CIADNAGNNRKLIC

SEQ ID NO: 341466 - protein, 12 aa, Homo sapiens
  CDR3 for beta chain variable domain of TCR clone 170733 (TRBV5-1, TRBJ2-7)
CASSFRGYEQYF

SEQ ID NO: 341467 - protein, 13 aa, Homo sapiens
  CDR3 for alpha chain variable domain of TCR clone 170734 (TRAV13-2, TRAJ13)
CAERPGGYQKVTF

SEQ ID NO: 341468 - protein, 15 aa, Homo sapiens
  CDR3 for beta chain variable domain of TCR clone 170734 (TRBV6-5, TRBJ2-1)
CASSYDAGAGNEQFF

SEQ ID NO: 341469 - protein, 13 aa, Homo sapiens
  CDR3 for alpha chain variable domain of TCR clone 170735 (TRAV14/DV4, TRAJ54)
CNERGPGAQKLVC

SEQ ID NO: 341470 - protein, 15 aa, Homo sapiens
  CDR3 for beta chain variable domain of TCR clone 170735 (TRBV5-1, TRBJ2-7)
CASSLNGGPAREQYF

SEQ ID NO: 341471 - protein, 12 aa, Homo sapiens
  CDR3 for alpha chain variable domain of TCR clone 170736 (TRAV12-3, TRAJ17)
CAMALTGNKLTF

SEQ ID NO: 341472 - protein, 15 aa, Homo sapiens
  CDR3 for beta chain variable domain of TCR clone 170736 (TRBV20-1, TRBJ2-7)
CSARDRVSGMDEPYF

SEQ ID NO: 341473 - protein, 13 aa, Homo sapiens
  CDR3 for alpha chain variable domain of TCR clone 170737 (TRAV13-1, TRAJ20)
CAARVSNDYKLGF

SEQ ID NO: 341474 - protein, 12 aa, Homo sapiens
  CDR3 for beta chain variable domain of TCR clone 170737 (TRBV20-1, TRBJ2-1)
CSARLGTDEQFF

SEQ ID NO: 341475 - protein, 13 aa, Homo sapiens
  CDR3 for alpha chain variable domain of TCR clone 170738 (TRAV2, TRAJ40)
CAVATSGTYKYIF

SEQ ID NO: 341476 - protein, 14 aa, Homo sapiens
  CDR3 for beta chain variable domain of TCR clone 170738 (TRBV20-1, TRBJ1-1)
CSAMGGTANTEAFF

SEQ ID NO: 341477 - protein, 12 aa, Homo sapiens
  CDR3 for alpha chain variable domain of TCR clone 170739 (TRAV40, TRAJ20)
CLRGLNDYKLSF

SEQ ID NO: 341478 - protein, 14 aa, Homo sapiens
  CDR3 for beta chain variable domain of TCR clone 170739 (TRBV7-8, TRBJ1-2)
CASSPDSLSYGYTF

SEQ ID NO: 341479 - protein, 13 aa, Homo sapiens
  CDR3 for alpha chain variable domain of TCR clone 170740 (TRAV12-2, TRAJ20)
CAVYPSNDYKLSF

SEQ ID NO: 341480 - protein, 14 aa, Homo sapiens
  CDR3 for beta chain variable domain of TCR clone 170740 (TRBV7-9, TRBJ2-3)
CASSLEDGTDTQYF

SEQ ID NO: 341481 - protein, 19 aa, Homo sapiens
  CDR3 for alpha chain variable domain of TCR clone 170741 (TRAV3, TRAJ6)
CAVRDRNPSRSGGSYIPTF

SEQ ID NO: 341482 - protein, 15 aa, Homo sapiens
  CDR3 for beta chain variable domain of TCR clone 170741 (TRBV18, TRBJ2-7)
CSSSPTFMDSYEQYF

SEQ ID NO: 341483 - protein, 16 aa, Homo sapiens
  CDR3 for alpha chain variable domain of TCR clone 170742 (TRAV12-2, TRAJ6)
CAAPLAGSGGSYIPTF

SEQ ID NO: 341484 - protein, 12 aa, Homo sapiens
  CDR3 for beta chain variable domain of TCR clone 170742 (TRBV7-9, TRBJ2-7)
CASSVVSYEQYF

SEQ ID NO: 341485 - protein, 14 aa, Homo sapiens
  CDR3 for alpha chain variable domain of TCR clone 170743 (TRAV1-2, TRAJ8)
CAVREDTGFQKLVF

SEQ ID NO: 341486 - protein, 13 aa, Homo sapiens
  CDR3 for beta chain variable domain of TCR clone 170743 (TRBV23-1, TRBJ1-4)
CASRGKFNEKLFC

SEQ ID NO: 341487 - protein, 12 aa, Homo sapiens
  CDR3 for alpha chain variable domain of TCR clone 170744 (TRAV8-4, TRAJ31)
CAVSDSNARLMF

SEQ ID NO: 341488 - protein, 14 aa, Homo sapiens
  CDR3 for beta chain variable domain of TCR clone 170744 (TRBV20-1, TRBJ2-1)
CSAQIGGSANEQFF

SEQ ID NO: 341489 - protein, 12 aa, Homo sapiens
  CDR3 for alpha chain variable domain of TCR clone 170745 (TRAV2, TRAJ9)
CAVGAGGFKTIF

SEQ ID NO: 341490 - protein, 17 aa, Homo sapiens
  CDR3 for beta chain variable domain of TCR clone 170745 (TRBV7-3, TRBJ2-3)
CASSRGLAGEVPDTQYF

SEQ ID NO: 341491 - protein, 13 aa, Homo sapiens
  CDR3 for alpha chain variable domain of TCR clone 170746 (TRAV13-1, TRAJ10)
CAALEGGGNKLTF

SEQ ID NO: 341492 - protein, 11 aa, Homo sapiens
  CDR3 for beta chain variable domain of TCR clone 170746 (TRBV6-3, TRBJ2-7)
CASSFCYEQYF

SEQ ID NO: 341493 - protein, 14 aa, Homo sapiens
  CDR3 for alpha chain variable domain of TCR clone 170747 (TRAV8-1, TRAJ24)
CAVNAAHSWGKLQF

SEQ ID NO: 341494 - protein, 16 aa, Homo sapiens
  CDR3 for beta chain variable domain of TCR clone 170747 (TRBV4-3, TRBJ2-1)
CASSPALDRGVNEQFF

SEQ ID NO: 341495 - protein, 14 aa, Homo sapiens
  CDR3 for alpha chain variable domain of TCR clone 170748 (TRAV1-2, TRAJ16)
CAVRGFSDGQKLLF

SEQ ID NO: 341496 - protein, 14 aa, Homo sapiens
  CDR3 for beta chain variable domain of TCR clone 170748 (TRBV7-9, TRBJ2-3)
CASSLEDGTDTQYF

SEQ ID NO: 341497 - protein, 14 aa, Homo sapiens
  CDR3 for alpha chain variable domain of TCR clone 170749 (TRAV12-2, TRAJ13)
CAVKQTGGYQKVTF

SEQ ID NO: 341498 - protein, 12 aa, Homo sapiens
  CDR3 for beta chain variable domain of TCR clone 170749 (TRBV12-4, TRBJ1-2)
CASSFIWLHLLF

SEQ ID NO: 341499 - protein, 13 aa, Homo sapiens
  CDR3 for alpha chain variable domain of TCR clone 170750 (TRAV8-3, TRAJ48)
CSVVPFGNEKLTF

SEQ ID NO: 341500 - protein, 12 aa, Homo sapiens
  CDR3 for beta chain variable domain of TCR clone 170750 (TRBV11-2, TRBJ2-2)
CASSLGGGELFF

SEQ ID NO: 341501 - protein, 18 aa, Homo sapiens
  CDR3 for alpha chain variable domain of TCR clone 170751 (TRAV13-1, TRAJ52)
CAASKRSAGGTSYGKLTF

SEQ ID NO: 341502 - protein, 11 aa, Homo sapiens
  CDR3 for beta chain variable domain of TCR clone 170751 (TRBV12-4, TRBJ2-3)
CASSSVRGRYF

SEQ ID NO: 341503 - protein, 12 aa, Homo sapiens
  CDR3 for alpha chain variable domain of TCR clone 170752 (TRAV30, TRAJ20)
CGTESNDYKLSF

SEQ ID NO: 341504 - protein, 15 aa, Homo sapiens
  CDR3 for beta chain variable domain of TCR clone 170752 (TRBV20-1, TRBJ2-7)
CSARDRVSGMDEQYL

SEQ ID NO: 341505 - protein, 16 aa, Homo sapiens
  CDR3 for alpha chain variable domain of TCR clone 170753 (TRAV2, TRAJ23)
CVGGKLIFGQGTELSV

SEQ ID NO: 341506 - protein, 20 aa, Homo sapiens
  CDR3 for beta chain variable domain of TCR clone 170753 (TRBV20-1, TRBJ2-5)
CSARAGLAGRLAGHLETQYF

SEQ ID NO: 341507 - protein, 13 aa, Homo sapiens
  CDR3 for alpha chain variable domain of TCR clone 170754 (TRAV1-1, TRAJ9)
CAAKNTGGFETIF

SEQ ID NO: 341508 - protein, 15 aa, Homo sapiens
  CDR3 for beta chain variable domain of TCR clone 170754 (TRBV5-1, TRBJ2-1)
CASTGSGRTYNEQFF

SEQ ID NO: 341509 - protein, 15 aa, Homo sapiens
  CDR3 for alpha chain variable domain of TCR clone 170755 (TRAV26-1, TRAJ48)
CIVRVGDFGNEKFTY

SEQ ID NO: 341510 - protein, 16 aa, Homo sapiens
  CDR3 for beta chain variable domain of TCR clone 170755 (TRBV4-1, TRBJ2-3)
CASSQRAGGLTDTQYF

SEQ ID NO: 341511 - protein, 12 aa, Homo sapiens
  CDR3 for alpha chain variable domain of TCR clone 170756 (TRAV13-2, TRAJ8)
CAPWLGFQKLVF

SEQ ID NO: 341512 - protein, 12 aa, Homo sapiens
  CDR3 for beta chain variable domain of TCR clone 170756 (TRBV2, TRBJ2-1)
CAYGPPGNEQFF

SEQ ID NO: 341513 - protein, 13 aa, Homo sapiens
  CDR3 for alpha chain variable domain of TCR clone 170757 (TRAV8-1, TRAJ39)
CAGLNNAGNMLTF

SEQ ID NO: 341514 - protein, 17 aa, Homo sapiens
  CDR3 for beta chain variable domain of TCR clone 170757 (TRBV19, TRBJ2-3)
CASSIDPAGGSTDTQYF

SEQ ID NO: 341515 - protein, 15 aa, Homo sapiens
  CDR3 for alpha chain variable domain of TCR clone 170758 (TRAV2, TRAJ24)
CAVVRLKNSWGKLQF

SEQ ID NO: 341516 - protein, 16 aa, Homo sapiens
  CDR3 for beta chain variable domain of TCR clone 170758 (TRBV7-7, TRBJ2-3)
GASSPGTSGSTDTQYF

SEQ ID NO: 341517 - protein, 13 aa, Homo sapiens
  CDR3 for alpha chain variable domain of TCR clone 170759 (TRAV23/DV6, TRAJ9)
CAASTTVGFKTIF

SEQ ID NO: 341518 - protein, 14 aa, Homo sapiens
  CDR3 for beta chain variable domain of TCR clone 170759 (TRBV5-1, TRBJ2-3)
CASRVDGVSDTQYF

SEQ ID NO: 341519 - protein, 10 aa, Homo sapiens
  CDR3 for alpha chain variable domain of TCR clone 170760 (TRAV21, TRAJ43)
CAVSANDMRF

SEQ ID NO: 341520 - protein, 13 aa, Homo sapiens
  CDR3 for beta chain variable domain of TCR clone 170760 (TRBV7-2, TRBJ1-2)
CASSLDGICGYTF

SEQ ID NO: 341521 - protein, 14 aa, Homo sapiens
  CDR3 for alpha chain variable domain of TCR clone 170761 (TRAV12-3, TRAJ58)
CAMSRETSGSRLTF

SEQ ID NO: 341522 - protein, 13 aa, Homo sapiens
  CDR3 for beta chain variable domain of TCR clone 170761 (TRBV27, TRBJ2-3)
CASSWGRTDTQYF

SEQ ID NO: 341523 - protein, 16 aa, Homo sapiens
  CDR3 for alpha chain variable domain of TCR clone 170762 (TRAV1-2, TRAJ10)
CAVRGVLTGGGNKRTF

SEQ ID NO: 341524 - protein, 12 aa, Homo sapiens
  CDR3 for beta chain variable domain of TCR clone 170762 (TRBV7-8, TRBJ2-7)
CASSRGDREQYF

SEQ ID NO: 341525 - protein, 12 aa, Homo sapiens
  CDR3 for alpha chain variable domain of TCR clone 170763 (TRAV6, TRAJ41)
CALRNSGYALNF

SEQ ID NO: 341526 - protein, 18 aa, Homo sapiens
  CDR3 for beta chain variable domain of TCR clone 170763 (TRBV20-1, TRBJ2-6)
CSAETTPTHGSGANVLTF

SEQ ID NO: 341527 - protein, 13 aa, Homo sapiens
  CDR3 for alpha chain variable domain of TCR clone 170764 (TRAV8-6, TRAJ41)
CVVSENAGYALNF

SEQ ID NO: 341528 - protein, 17 aa, Homo sapiens
  CDR3 for beta chain variable domain of TCR clone 170764 (TRBV7-2, TRBJ2-3)
CASSLEARGTSTDTQYF

SEQ ID NO: 341529 - protein, 12 aa, Homo sapiens
  CDR3 for alpha chain variable domain of TCR clone 170765 (TRAV2, TRAJ9)
CAVGAGGFKTIF

SEQ ID NO: 341530 - protein, 15 aa, Homo sapiens
  CDR3 for beta chain variable domain of TCR clone 170765 (TRBV2, TRBJ2-7)
CASSEGLARSYEQYF

SEQ ID NO: 341531 - protein, 14 aa, Homo sapiens
  CDR3 for alpha chain variable domain of TCR clone 170766 (TRAV26-1, TRAJ44)
CIVRPTGTASKLTF

SEQ ID NO: 341532 - protein, 13 aa, Homo sapiens
  CDR3 for beta chain variable domain of TCR clone 170766 (TRBV10-2, TRBJ2-6)
CASKSAGANVLTF

SEQ ID NO: 341533 - protein, 14 aa, Homo sapiens
  CDR3 for alpha chain variable domain of TCR clone 170767 (TRAV9-2, TRAJ39)
CALYTYNAGNMLTF

SEQ ID NO: 341534 - protein, 15 aa, Homo sapiens
  CDR3 for beta chain variable domain of TCR clone 170767 (TRBV27, TRBJ1-6)
CASSFDRGLGSPLHF

SEQ ID NO: 341535 - protein, 16 aa, Homo sapiens
  CDR3 for alpha chain variable domain of TCR clone 170768 (TRAV12-2, TRAJ43)
CAGDDMRFGAGTRLTV

SEQ ID NO: 341536 - protein, 13 aa, Homo sapiens
  CDR3 for beta chain variable domain of TCR clone 170768 (TRBV7-8, TRBJ2-7)
CASSLTGGREQYC

SEQ ID NO: 341537 - protein, 11 aa, Homo sapiens
  CDR3 for alpha chain variable domain of TCR clone 170769 (TRAV21, TRAJ48)
CAVDGNEKLTF

SEQ ID NO: 341538 - protein, 16 aa, Homo sapiens
  CDR3 for beta chain variable domain of TCR clone 170769 (TRBV12-4, TRBJ1-5)
CASSFGPRGSNQPQHF

SEQ ID NO: 341539 - protein, 14 aa, Homo sapiens
  CDR3 for alpha chain variable domain of TCR clone 170770 (TRAV12-2, TRAJ11)
CAVEGGSGYSTPTF

SEQ ID NO: 341540 - protein, 11 aa, Homo sapiens
  CDR3 for beta chain variable domain of TCR clone 170770 (TRBV12-4, TRBJ2-3)
CASTATDTQYF

SEQ ID NO: 341541 - protein, 15 aa, Homo sapiens
  CDR3 for alpha chain variable domain of TCR clone 170771 (TRAV23/DV6, TRAJ38)
CVARSNAGNNRKLIW

SEQ ID NO: 341542 - protein, 16 aa, Homo sapiens
  CDR3 for beta chain variable domain of TCR clone 170771 (TRBV10-2, TRBJ1-5)
CASSRDRDYSNQPQHF

SEQ ID NO: 341543 - protein, 16 aa, Homo sapiens
  CDR3 for alpha chain variable domain of TCR clone 170772 (TRAV30, TRAJ24)
CGTEIVDADSWGKFQF

SEQ ID NO: 341544 - protein, 12 aa, Homo sapiens
  CDR3 for beta chain variable domain of TCR clone 170772 (TRBV29-1, TRBJ2-7)
CSVGQTNYEQYF

SEQ ID NO: 341545 - protein, 16 aa, Homo sapiens
  CDR3 for alpha chain variable domain of TCR clone 170773 (TRAV12-3, TRAJ53)
FAMSPGSGGSNYKLTF

SEQ ID NO: 341546 - protein, 16 aa, Homo sapiens
  CDR3 for beta chain variable domain of TCR clone 170773 (TRBV29-1, TRBJ2-5)
SAARTERDPVLRARHA

SEQ ID NO: 341547 - protein, 14 aa, Homo sapiens
  CDR3 for alpha chain variable domain of TCR clone 170774 (TRAV6, TRAJ8)
CALERGTGFQKLVF

SEQ ID NO: 341548 - protein, 14 aa, Homo sapiens
  CDR3 for beta chain variable domain of TCR clone 170774 (TRBV4-2, TRBJ2-1)
CASGLDRAYNEQFF

SEQ ID NO: 341549 - protein, 15 aa, Homo sapiens
  CDR3 for alpha chain variable domain of TCR clone 170775 (TRAV13-1, TRAJ32)
CAASIYGGATNKLIF

SEQ ID NO: 341550 - protein, 17 aa, Homo sapiens
  CDR3 for beta chain variable domain of TCR clone 170775 (TRBV7-3, TRBJ2-5)
CASGLGSGRSGSETQYF

SEQ ID NO: 341551 - protein, 14 aa, Homo sapiens
  CDR3 for alpha chain variable domain of TCR clone 170776 (TRAV12-3, TRAJ10)
SHLPLTGGGNKLTF

SEQ ID NO: 341552 - protein, 11 aa, Homo sapiens
  CDR3 for beta chain variable domain of TCR clone 170776 (TRBV5-4, TRBJ2-3)
CASSPTDTQYF

SEQ ID NO: 341553 - protein, 13 aa, Homo sapiens
  CDR3 for alpha chain variable domain of TCR clone 170777 (TRAV35, TRAJ42)
CAGFPGSQGNLIF

SEQ ID NO: 341554 - protein, 14 aa, Homo sapiens
  CDR3 for beta chain variable domain of TCR clone 170777 (TRBV29-1, TRBJ2-2)
CSVLAETNTGERFF

SEQ ID NO: 341555 - protein, 14 aa, Homo sapiens
  CDR3 for alpha chain variable domain of TCR clone 170778 (TRAV12-1, TRAJ24)
CVVRSTDSWGKFQF

SEQ ID NO: 341556 - protein, 13 aa, Homo sapiens
  CDR3 for beta chain variable domain of TCR clone 170778 (TRBV2, TRBJ2-3)
CASILVGGQEQYF

SEQ ID NO: 341557 - protein, 13 aa, Homo sapiens
  CDR3 for alpha chain variable domain of TCR clone 170779 (TRAV13-2, TRAJ16)
CADARTDGQKLLF

SEQ ID NO: 341558 - protein, 17 aa, Homo sapiens
  CDR3 for beta chain variable domain of TCR clone 170779 (TRBV11-2, TRBJ2-1)
CASSLYPPGVEYNEQFF

SEQ ID NO: 341559 - protein, 12 aa, Homo sapiens
  CDR3 for alpha chain variable domain of TCR clone 170780 (TRAV29/DV5, TRAJ15)
CASNQAGTALIF

SEQ ID NO: 341560 - protein, 16 aa, Homo sapiens
  CDR3 for beta chain variable domain of TCR clone 170780 (TRBV12-4, TRBJ1-5)
CASRQPVEGSNQPQHF

SEQ ID NO: 341561 - protein, 11 aa, Homo sapiens
  CDR3 for alpha chain variable domain of TCR clone 170781 (TRAV27, TRAJ43)
CAGANNNDMRF

SEQ ID NO: 341562 - protein, 16 aa, Homo sapiens
  CDR3 for beta chain variable domain of TCR clone 170781 (TRBV19, TRBJ2-1)
CASSKAGPSSYNEQFF

SEQ ID NO: 341563 - protein, 16 aa, Homo sapiens
  CDR3 for alpha chain variable domain of TCR clone 170782 (TRAV30, TRAJ24)
CGTEIVDADSWGKFQF

SEQ ID NO: 341564 - protein, 15 aa, Homo sapiens
  CDR3 for beta chain variable domain of TCR clone 170782 (TRBV7-2, TRBJ1-5)
CASSRGQGDNQPQHF

SEQ ID NO: 341565 - protein, 11 aa, Homo sapiens
  CDR3 for alpha chain variable domain of TCR clone 170783 (TRAV23/DV6, TRAJ58)
CAARLLRGETS

SEQ ID NO: 341566 - protein, 14 aa, Homo sapiens
  CDR3 for beta chain variable domain of TCR clone 170783 (TRBV19, TRBJ2-2)
CASSMTGMSGELFF

SEQ ID NO: 341567 - protein, 16 aa, Homo sapiens
  CDR3 for alpha chain variable domain of TCR clone 170784 (TRAV26-1, TRAJ23)
CIVRVHPYNQGGKLIF

SEQ ID NO: 341568 - protein, 17 aa, Homo sapiens
  CDR3 for beta chain variable domain of TCR clone 170784 (TRBV20-1, TRBJ2-2)
CSASGSGQGGLTGELFF

SEQ ID NO: 341569 - protein, 15 aa, Homo sapiens
  CDR3 for alpha chain variable domain of TCR clone 170785 (TRAV3, TRAJ3)
CAVRDMSSSAPKIIF

SEQ ID NO: 341570 - protein, 14 aa, Homo sapiens
  CDR3 for beta chain variable domain of TCR clone 170785 (TRBV19, TRBJ2-1)
CASPTFVLSGEQFF

SEQ ID NO: 341571 - protein, 14 aa, Homo sapiens
  CDR3 for alpha chain variable domain of TCR clone 170786 (TRAV1-2, TRAJ16)
CTVNRFSDGQKLLF

SEQ ID NO: 341572 - protein, 15 aa, Homo sapiens
  CDR3 for beta chain variable domain of TCR clone 170786 (TRBV28, TRBJ2-1)
CASSIIAGGRSEQFF

SEQ ID NO: 341573 - protein, 12 aa, Homo sapiens
  CDR3 for alpha chain variable domain of TCR clone 170787 (TRAV8-3, TRAJ20)
CAVGANDYKLSF

SEQ ID NO: 341574 - protein, 17 aa, Homo sapiens
  CDR3 for beta chain variable domain of TCR clone 170787 (TRBV28, TRBJ2-5)
CASSTPEGDALQETQYF

SEQ ID NO: 341575 - protein, 19 aa, Homo sapiens
  CDR3 for alpha chain variable domain of TCR clone 170788 (TRAV21, TRAJ52)
CAVKWPLGAGGTSYGKLTF

SEQ ID NO: 341576 - protein, 20 aa, Homo sapiens
  CDR3 for beta chain variable domain of TCR clone 170788 (TRBV11-2, TRBJ2-2)
LRTRPCISVPAALEAGSCFF

SEQ ID NO: 341577 - protein, 18 aa, Homo sapiens
  CDR3 for alpha chain variable domain of TCR clone 170789 (TRAV12-3, TRAJ52)
CAMSVGGAGGTSYGKLTF

SEQ ID NO: 341578 - protein, 15 aa, Homo sapiens
  CDR3 for beta chain variable domain of TCR clone 170789 (TRBV27, TRBJ1-6)
CASSFDRGLGSPLVF

SEQ ID NO: 341579 - protein, 16 aa, Homo sapiens
  CDR3 for alpha chain variable domain of TCR clone 170790 (TRAV30, TRAJ24)
CGAEIVDADSWGKSQF

SEQ ID NO: 341580 - protein, 14 aa, Homo sapiens
  CDR3 for beta chain variable domain of TCR clone 170790 (TRBV12-5, TRBJ2-5)
CASGSRTHQETQSF

SEQ ID NO: 341581 - protein, 14 aa, Homo sapiens
  CDR3 for alpha chain variable domain of TCR clone 170791 (TRAV35, TRAJ22)
CAGLRPGSASQLTF

SEQ ID NO: 341582 - protein, 14 aa, Homo sapiens
  CDR3 for beta chain variable domain of TCR clone 170791 (TRBV19, TRBJ2-1)
CASPTFVLSGEQFF

SEQ ID NO: 341583 - protein, 10 aa, Homo sapiens
  CDR3 for alpha chain variable domain of TCR clone 170792 (TRAV12-1, TRAJ37)
ARGNTGKLSF

SEQ ID NO: 341584 - protein, 15 aa, Homo sapiens
  CDR3 for beta chain variable domain of TCR clone 170792 (TRBV7-2, TRBJ2-3)
CASSLEQGGTDTQYF

SEQ ID NO: 341585 - protein, 18 aa, Homo sapiens
  CDR3 for alpha chain variable domain of TCR clone 170793 (TRAV21, TRAJ52)
CAVRPSPAGGTSYVKLTF

SEQ ID NO: 341586 - protein, 14 aa, Homo sapiens
  CDR3 for beta chain variable domain of TCR clone 170793 (TRBV7-2, TRBJ2-7)
CASSPKTSFYEQYF

SEQ ID NO: 341587 - protein, 15 aa, Homo sapiens
  CDR3 for alpha chain variable domain of TCR clone 170794 (TRAV8-3, TRAJ45)
CASSYPGGGADGLTF

SEQ ID NO: 341588 - protein, 13 aa, Homo sapiens
  CDR3 for beta chain variable domain of TCR clone 170794 (TRBV10-3, TRBJ2-7)
CASKLAVNDEQYF

SEQ ID NO: 341589 - protein, 12 aa, Homo sapiens
  CDR3 for alpha chain variable domain of TCR clone 170795 (TRAV21, TRAJ13)
PGPSGGYQKVTF

SEQ ID NO: 341590 - protein, 12 aa, Homo sapiens
  CDR3 for beta chain variable domain of TCR clone 170795 (TRBV7-9, TRBJ2-7)
CASSIKREEQYF

SEQ ID NO: 341591 - protein, 16 aa, Homo sapiens
  CDR3 for alpha chain variable domain of TCR clone 170796 (TRAV1-2, TRAJ10)
CAVRGVLTGGGNKLTF

SEQ ID NO: 341592 - protein, 12 aa, Homo sapiens
  CDR3 for beta chain variable domain of TCR clone 170796 (TRBV7-8, TRBJ2-7)
CASSLGHREQYF

SEQ ID NO: 341593 - protein, 18 aa, Homo sapiens
  CDR3 for alpha chain variable domain of TCR clone 170797 (TRAV12-3, TRAJ52)
CAMSALNAGGTSYGKLTF

SEQ ID NO: 341594 - protein, 13 aa, Homo sapiens
  CDR3 for beta chain variable domain of TCR clone 170797 (TRBV27, TRBJ1-1)
CASSLSIGDEAFF

SEQ ID NO: 341595 - protein, 17 aa, Homo sapiens
  CDR3 for alpha chain variable domain of TCR clone 170798 (TRAV12-1, TRAJ52)
CVVTPNAGGTSYGKLTF

SEQ ID NO: 341596 - protein, 14 aa, Homo sapiens
  CDR3 for beta chain variable domain of TCR clone 170798 (TRBV7-9, TRBJ2-1)
CASSPRDSLYEQFF

SEQ ID NO: 341597 - protein, 17 aa, Homo sapiens
  CDR3 for alpha chain variable domain of TCR clone 170799 (TRAV3, TRAJ6)
CAVRDGPRAGGSYIPTF

SEQ ID NO: 341598 - protein, 17 aa, Homo sapiens
  CDR3 for beta chain variable domain of TCR clone 170799 (TRBV4-2, TRBJ2-1)
CASSQVAGLAMNNEQFF

SEQ ID NO: 341599 - protein, 13 aa, Homo sapiens
  CDR3 for alpha chain variable domain of TCR clone 170800 (TRAV35, TRAJ57)
CAGSQGGSQKLVF

SEQ ID NO: 341600 - protein, 14 aa, Homo sapiens
  CDR3 for beta chain variable domain of TCR clone 170800 (TRBV25-1, TRBJ1-1)
CASTHLGGNTEAFF

SEQ ID NO: 341601 - protein, 16 aa, Homo sapiens
  CDR3 for alpha chain variable domain of TCR clone 170801 (TRAV12-2, TRAJ6)
CAAPLAGSGGSYIPTF

SEQ ID NO: 341602 - protein, 10 aa, Homo sapiens
  CDR3 for beta chain variable domain of TCR clone 170801 (TRBV28, TRBJ1-2)
CASSSDRAVF

SEQ ID NO: 341603 - protein, 17 aa, Homo sapiens
  CDR3 for alpha chain variable domain of TCR clone 170802 (TRAV3, TRAJ42)
CAVRDRDYGGSQGNLIF

SEQ ID NO: 341604 - protein, 15 aa, Homo sapiens
  CDR3 for beta chain variable domain of TCR clone 170802 (TRBV6-6, TRBJ2-7)
CASSYSNGGSYEQYF

SEQ ID NO: 341605 - protein, 10 aa, Homo sapiens
  CDR3 for alpha chain variable domain of TCR clone 170803 (TRAV1-2, TRAJ20)
CACNDYKLSF

SEQ ID NO: 341606 - protein, 13 aa, Homo sapiens
  CDR3 for beta chain variable domain of TCR clone 170803 (TRBV7-9, TRBJ2-7)
CASSLKAGQEQYF

SEQ ID NO: 341607 - protein, 15 aa, Homo sapiens
  CDR3 for alpha chain variable domain of TCR clone 170804 (TRAV17, TRAJ3)
CATDGPHSSASKIIF

SEQ ID NO: 341608 - protein, 14 aa, Homo sapiens
  CDR3 for beta chain variable domain of TCR clone 170804 (TRBV4-3, TRBJ2-2)
CASSQAVNTGELFF

SEQ ID NO: 341609 - protein, 15 aa, Homo sapiens
  CDR3 for alpha chain variable domain of TCR clone 170805 (TRAV4, TRAJ39)
CLVVPNNNAGNMLTF

SEQ ID NO: 341610 - protein, 15 aa, Homo sapiens
  CDR3 for beta chain variable domain of TCR clone 170805 (TRBV5-1, TRBJ2-1)
CASSPPRAPYNEQFF

SEQ ID NO: 341611 - protein, 15 aa, Homo sapiens
  CDR3 for alpha chain variable domain of TCR clone 170806 (TRAV12-3, TRAJ6)
CAMSATTGGSYIPTF

SEQ ID NO: 341612 - protein, 14 aa, Homo sapiens
  CDR3 for beta chain variable domain of TCR clone 170806 (TRBV7-9, TRBJ2-2)
CASSGLADTGELFF

SEQ ID NO: 341613 - protein, 14 aa, Homo sapiens
  CDR3 for alpha chain variable domain of TCR clone 170807 (TRAV12-1, TRAJ17)
CVVNYKASGNKLTF

SEQ ID NO: 341614 - protein, 15 aa, Homo sapiens
  CDR3 for beta chain variable domain of TCR clone 170807 (TRBV18, TRBJ2-7)
CASSTTFMDSYEQYF

SEQ ID NO: 341615 - protein, 15 aa, Homo sapiens
  CDR3 for alpha chain variable domain of TCR clone 170808 (TRAV23/DV6, TRAJ13)
CAAWPGGGGYQKVTF

SEQ ID NO: 341616 - protein, 17 aa, Homo sapiens
  CDR3 for beta chain variable domain of TCR clone 170808 (TRBV19, TRBJ2-7)
CASSISFSDSYPYEQYF

SEQ ID NO: 341617 - protein, 15 aa, Homo sapiens
  CDR3 for alpha chain variable domain of TCR clone 170809 (TRAV12-2, TRAJ9)
CAVNNERTGGFKIIF

SEQ ID NO: 341618 - protein, 14 aa, Homo sapiens
  CDR3 for beta chain variable domain of TCR clone 170809 (TRBV4-1, TRBJ1-4)
CASSQERKNEKLFF

SEQ ID NO: 341619 - protein, 17 aa, Homo sapiens
  CDR3 for alpha chain variable domain of TCR clone 170810 (TRAV3, TRAJ6)
CAVRDGPRAGVSYILTC

SEQ ID NO: 341620 - protein, 20 aa, Homo sapiens
  CDR3 for beta chain variable domain of TCR clone 170810 (TRBV28, TRBJ2-1)
CASTPIGRSPGLAGGNEQFF

SEQ ID NO: 341621 - protein, 13 aa, Homo sapiens
  CDR3 for alpha chain variable domain of TCR clone 170811 (TRAV29/DV5, TRAJ31)
CAASRNNNAQLMF

SEQ ID NO: 341622 - protein, 12 aa, Homo sapiens
  CDR3 for beta chain variable domain of TCR clone 170811 (TRBV14, TRBJ2-5)
CASSQLKETQYF

SEQ ID NO: 341623 - protein, 12 aa, Homo sapiens
  CDR3 for alpha chain variable domain of TCR clone 170812 (TRAV23/DV6, TRAJ30)
CAASKGDDKIIF

SEQ ID NO: 341624 - protein, 18 aa, Homo sapiens
  CDR3 for beta chain variable domain of TCR clone 170812 (TRBV10-3, TRBJ2-3)
CAISESRGGPMRGDTQYF

SEQ ID NO: 341625 - protein, 11 aa, Homo sapiens
  CDR3 for alpha chain variable domain of TCR clone 170813 (TRAV2, TRAJ33)
CAVDSNCQLIW

SEQ ID NO: 341626 - protein, 12 aa, Homo sapiens
  CDR3 for beta chain variable domain of TCR clone 170813 (TRBV11-2, TRBJ2-2)
CASSLGGGELFF

SEQ ID NO: 341627 - protein, 12 aa, Homo sapiens
  CDR3 for alpha chain variable domain of TCR clone 170814 (TRAV12-3, TRAJ17)
CAMTLTGNKLPF

SEQ ID NO: 341628 - protein, 12 aa, Homo sapiens
  CDR3 for beta chain variable domain of TCR clone 170814 (TRBV24-1, TRBJ1-1)
CATLYPDTEAFF

SEQ ID NO: 341629 - protein, 14 aa, Homo sapiens
  CDR3 for alpha chain variable domain of TCR clone 170815 (TRAV12-2, TRAJ11)
CAVEGGSGYSTLTF

SEQ ID NO: 341630 - protein, 14 aa, Homo sapiens
  CDR3 for beta chain variable domain of TCR clone 170815 (TRBV12-4, TRBJ2-5)
CASSLWQKQETQYF

SEQ ID NO: 341631 - protein, 14 aa, Homo sapiens
  CDR3 for alpha chain variable domain of TCR clone 170816 (TRAV1-2, TRAJ16)
CAVNRVSDGRKLLF

SEQ ID NO: 341632 - protein, 13 aa, Homo sapiens
  CDR3 for beta chain variable domain of TCR clone 170816 (TRBV10-3, TRBJ2-1)
CATGLADNNEQFF

SEQ ID NO: 341633 - protein, 16 aa, Homo sapiens
  CDR3 for alpha chain variable domain of TCR clone 170817 (TRAV3, TRAJ5)
CAVRNLMDTGRRALTF

SEQ ID NO: 341634 - protein, 15 aa, Homo sapiens
  CDR3 for beta chain variable domain of TCR clone 170817 (TRBV5-7, TRBJ1-5)
CAGSYGKLWDQPQHF

SEQ ID NO: 341635 - protein, 15 aa, Homo sapiens
  CDR3 for alpha chain variable domain of TCR clone 170818 (TRAV35, TRAJ20)
CAGQLVGANDYKLSF

SEQ ID NO: 341636 - protein, 13 aa, Homo sapiens
  CDR3 for beta chain variable domain of TCR clone 170818 (TRBV19, TRBJ2-7)
CASSKTGTHKQYF

SEQ ID NO: 341637 - protein, 11 aa, Homo sapiens
  CDR3 for alpha chain variable domain of TCR clone 170819 (TRAV26-1, TRAJ27)
CIHPNAGKSTF

SEQ ID NO: 341638 - protein, 18 aa, Homo sapiens
  CDR3 for beta chain variable domain of TCR clone 170819 (TRBV7-9, TRBJ2-6)
CASSFPGAGISGANVLTF

SEQ ID NO: 341639 - protein, 13 aa, Homo sapiens
  CDR3 for alpha chain variable domain of TCR clone 170820 (TRAV3, TRAJ16)
CAGRDRNGQKLLF

SEQ ID NO: 341640 - protein, 15 aa, Homo sapiens
  CDR3 for beta chain variable domain of TCR clone 170820 (TRBV5-1, TRBJ2-1)
CASSPPRAPYNEQFF

SEQ ID NO: 341641 - protein, 13 aa, Homo sapiens
  CDR3 for alpha chain variable domain of TCR clone 170821 (TRAV3, TRAJ15)
CAVRDQAGTALIF

SEQ ID NO: 341642 - protein, 15 aa, Homo sapiens
  CDR3 for beta chain variable domain of TCR clone 170821 (TRBV6-3, TRBJ2-7)
CASSSPGTVFYEQYF

SEQ ID NO: 341643 - protein, 11 aa, Homo sapiens
  CDR3 for alpha chain variable domain of TCR clone 170822 (TRAV8-4, TRAJ26)
CAGGEGQNFVF

SEQ ID NO: 341644 - protein, 16 aa, Homo sapiens
  CDR3 for beta chain variable domain of TCR clone 170822 (TRBV5-4, TRBJ2-3)
CASQQPGAGGADTQYF

SEQ ID NO: 341645 - protein, 11 aa, Homo sapiens
  CDR3 for alpha chain variable domain of TCR clone 170823 (TRAV3, TRAJ21)
CAVGNFNKFYF

SEQ ID NO: 341646 - protein, 16 aa, Homo sapiens
  CDR3 for beta chain variable domain of TCR clone 170823 (TRBV19, TRBJ2-1)
CASSKAGPRSYDEQFF

SEQ ID NO: 341647 - protein, 14 aa, Homo sapiens
  CDR3 for alpha chain variable domain of TCR clone 170824 (TRAV13-1, TRAJ45)
CAATSGGGADGLTF

SEQ ID NO: 341648 - protein, 14 aa, Homo sapiens
  CDR3 for beta chain variable domain of TCR clone 170824 (TRBV7-9, TRBJ2-1)
CASSPRDSLYEQFF

SEQ ID NO: 341649 - protein, 14 aa, Homo sapiens
  CDR3 for alpha chain variable domain of TCR clone 170825 (TRAV1-2, TRAJ16)
CAVNRFSDGQKLLF

SEQ ID NO: 341650 - protein, 13 aa, Homo sapiens
  CDR3 for beta chain variable domain of TCR clone 170825 (TRBV20-1, TRBJ1-6)
CSAPLGVGSTLHF

SEQ ID NO: 341651 - protein, 19 aa, Homo sapiens
  CDR3 for alpha chain variable domain of TCR clone 170826 (TRAV1-2, TRAJ26)
CLLPLCCERPDNYGQNFVF

SEQ ID NO: 341652 - protein, 16 aa, Homo sapiens
  CDR3 for beta chain variable domain of TCR clone 170826 (TRBV11-2, TRBJ2-7)
CASSPTTGGVSYEQYF

SEQ ID NO: 341653 - protein, 16 aa, Homo sapiens
  CDR3 for alpha chain variable domain of TCR clone 170827 (TRAV30, TRAJ24)
CGTAIVAADSWGKFQF

SEQ ID NO: 341654 - protein, 14 aa, Homo sapiens
  CDR3 for beta chain variable domain of TCR clone 170827 (TRBV12-5, TRBJ2-5)
CASGSRTHQETQYF

SEQ ID NO: 341655 - protein, 15 aa, Homo sapiens
  CDR3 for alpha chain variable domain of TCR clone 170828 (TRAV3, TRAJ22)
CAVRDRGGSARQLTF

SEQ ID NO: 341656 - protein, 15 aa, Homo sapiens
  CDR3 for beta chain variable domain of TCR clone 170828 (TRBV20-1, TRBJ2-7)
CSARGPLAGGREQYF

SEQ ID NO: 341657 - protein, 16 aa, Homo sapiens
  CDR3 for alpha chain variable domain of TCR clone 170829 (TRAV3, TRAJ37)
CAVRPHGSGNTGTLIF

SEQ ID NO: 341658 - protein, 17 aa, Homo sapiens
  CDR3 for beta chain variable domain of TCR clone 170829 (TRBV7-2, TRBJ2-7)
CASSFETSGSTSSTSGR

SEQ ID NO: 341659 - protein, 16 aa, Homo sapiens
  CDR3 for alpha chain variable domain of TCR clone 170830 (TRAV13-2, TRAJ53)
CAENANSGGSNYKLTF

SEQ ID NO: 341660 - protein, 19 aa, Homo sapiens
  CDR3 for beta chain variable domain of TCR clone 170830 (TRBV28, TRBJ2-7)
CARSYSGTSRLGWVYEQYF

SEQ ID NO: 341661 - protein, 16 aa, Homo sapiens
  CDR3 for alpha chain variable domain of TCR clone 170831 (TRAV30, TRAJ24)
CGTEIVGAESWGKFQF

SEQ ID NO: 341662 - protein, 14 aa, Homo sapiens
  CDR3 for beta chain variable domain of TCR clone 170831 (TRBV12-5, TRBJ2-5)
CASGSRTHQETQYF

SEQ ID NO: 341663 - protein, 14 aa, Homo sapiens
  CDR3 for alpha chain variable domain of TCR clone 170832 (TRAV26-1, TRAJ21)
CIVRVVYNFNKFYF

SEQ ID NO: 341664 - protein, 11 aa, Homo sapiens
  CDR3 for beta chain variable domain of TCR clone 170832 (TRBV5-6, TRBJ2-5)
CASSLERTQSF

SEQ ID NO: 341665 - protein, 13 aa, Homo sapiens
  CDR3 for alpha chain variable domain of TCR clone 170833 (TRAV2, TRAJ5)
CAVPDTGRRALTF

SEQ ID NO: 341666 - protein, 15 aa, Homo sapiens
  CDR3 for beta chain variable domain of TCR clone 170833 (TRBV7-2, TRBJ2-2)
CVSSTRTGYTGELFF

SEQ ID NO: 341667 - protein, 14 aa, Homo sapiens
  CDR3 for alpha chain variable domain of TCR clone 170834 (TRAV23/DV6, TRAJ24)
CAASLSDSGGKLQF

SEQ ID NO: 341668 - protein, 16 aa, Homo sapiens
  CDR3 for beta chain variable domain of TCR clone 170834 (TRBV7-9, TRBJ2-6)
CASSLKGPLRANVLTF

SEQ ID NO: 341669 - protein, 13 aa, Homo sapiens
  CDR3 for alpha chain variable domain of TCR clone 170835 (TRAV8-4, TRAJ10)
CAAFTGGGNKLTF

SEQ ID NO: 341670 - protein, 15 aa, Homo sapiens
  CDR3 for beta chain variable domain of TCR clone 170835 (TRBV2, TRBJ2-3)
CASSDFEKATDTQYL

SEQ ID NO: 341671 - protein, 16 aa, Homo sapiens
  CDR3 for alpha chain variable domain of TCR clone 170836 (TRAV12-2, TRAJ18)
CAVTTDRGSTLGRLYF

SEQ ID NO: 341672 - protein, 15 aa, Homo sapiens
  CDR3 for beta chain variable domain of TCR clone 170836 (TRBV7-6, TRBJ1-5)
CASSQSSGINQPQHF

SEQ ID NO: 341673 - protein, 17 aa, Homo sapiens
  CDR3 for alpha chain variable domain of TCR clone 170837 (TRAV13-1, TRAJ31)
CAPRDRLMSGDGTQLGV

SEQ ID NO: 341674 - protein, 12 aa, Homo sapiens
  CDR3 for beta chain variable domain of TCR clone 170837 (TRBV7-9, TRBJ2-7)
CASSLEGYEQYF

SEQ ID NO: 341675 - protein, 12 aa, Homo sapiens
  CDR3 for alpha chain variable domain of TCR clone 170838 (TRAV21, TRAJ11)
CAANSGYSTLTF

SEQ ID NO: 341676 - protein, 14 aa, Homo sapiens
  CDR3 for beta chain variable domain of TCR clone 170838 (TRBV20-1, TRBJ2-7)
CSAPELAGVGEQYF

SEQ ID NO: 341677 - protein, 13 aa, Homo sapiens
  CDR3 for alpha chain variable domain of TCR clone 170839 (TRAV25, TRAJ17)
CAGLRAAGYKLTF

SEQ ID NO: 341678 - protein, 15 aa, Homo sapiens
  CDR3 for beta chain variable domain of TCR clone 170839 (TRBV6-5, TRBJ1-1)
CASTLRLGSGTEAFF

SEQ ID NO: 341679 - protein, 10 aa, Homo sapiens
  CDR3 for alpha chain variable domain of TCR clone 170840 (TRAV23/DV6, TRAJ57)
CAASSTLSQD

SEQ ID NO: 341680 - protein, 14 aa, Homo sapiens
  CDR3 for beta chain variable domain of TCR clone 170840 (TRBV7-8, TRBJ2-5)
CASSATGGQETQYF

SEQ ID NO: 341681 - protein, 12 aa, Homo sapiens
  CDR3 for alpha chain variable domain of TCR clone 170841 (TRAV40, TRAJ20)
CLRGLNDYKLRF

SEQ ID NO: 341682 - protein, 14 aa, Homo sapiens
  CDR3 for beta chain variable domain of TCR clone 170841 (TRBV19, TRBJ2-1)
CASSSGRDYNEQFF

SEQ ID NO: 341683 - protein, 12 aa, Homo sapiens
  CDR3 for alpha chain variable domain of TCR clone 170842 (TRAV1-1, TRAJ39)
CAVPVVGNMLTF

SEQ ID NO: 341684 - protein, 13 aa, Homo sapiens
  CDR3 for beta chain variable domain of TCR clone 170842 (TRBV4-1, TRBJ1-1)
CASSRKMNTEAFF

SEQ ID NO: 341685 - protein, 14 aa, Homo sapiens
  CDR3 for alpha chain variable domain of TCR clone 170843 (TRAV13-2, TRAJ17)
CAENSKAAGNKLTF

SEQ ID NO: 341686 - protein, 15 aa, Homo sapiens
  CDR3 for beta chain variable domain of TCR clone 170843 (TRBV9, TRBJ2-1)
CASSLAGSSYNEQFF

SEQ ID NO: 341687 - protein, 23 aa, Homo sapiens
  CDR3 for alpha chain variable domain of TCR clone 170844 (TRAV26-1, TRAJ38)
CIADNAGNNHIQNPDPAVYQLRD

SEQ ID NO: 341688 - protein, 14 aa, Homo sapiens
  CDR3 for beta chain variable domain of TCR clone 170844 (TRBV12-4, TRBJ2-2)
CASNQGANTGELFF

SEQ ID NO: 341689 - protein, 14 aa, Homo sapiens
  CDR3 for alpha chain variable domain of TCR clone 170845 (TRAV36/DV7, TRAJ44)
CCGANTGTASKLTF

SEQ ID NO: 341690 - protein, 17 aa, Homo sapiens
  CDR3 for beta chain variable domain of TCR clone 170845 (TRBV11-2, TRBJ2-1)
CASSLYPPGAEYNEQFF

SEQ ID NO: 341691 - protein, 15 aa, Homo sapiens
  CDR3 for alpha chain variable domain of TCR clone 170846 (TRAV13-1, TRAJ17)
CAASIERAAGNKLTF

SEQ ID NO: 341692 - protein, 15 aa, Homo sapiens
  CDR3 for beta chain variable domain of TCR clone 170846 (TRBV27, TRBJ1-5)
CASSLGTGFDQPQHF

SEQ ID NO: 341693 - protein, 14 aa, Homo sapiens
  CDR3 for alpha chain variable domain of TCR clone 170847 (TRAV38-1, TRAJ45)
CAYYSGGGADGRTF

SEQ ID NO: 341694 - protein, 20 aa, Homo sapiens
  CDR3 for beta chain variable domain of TCR clone 170847 (TRBV28, TRBJ2-1)
WASTPIGRSPGLAGGNEQFF

SEQ ID NO: 341695 - protein, 14 aa, Homo sapiens
  CDR3 for alpha chain variable domain of TCR clone 170848 (TRAV9-2, TRAJ39)
CALYIYNAGNMLTF

SEQ ID NO: 341696 - protein, 14 aa, Homo sapiens
  CDR3 for beta chain variable domain of TCR clone 170848 (TRBV6-1, TRBJ1-3)
CASVQGRGGNTIYF

SEQ ID NO: 341697 - protein, 14 aa, Homo sapiens
  CDR3 for alpha chain variable domain of TCR clone 170849 (TRAV17, TRAJ57)
CATDPQGGSEKLVF

SEQ ID NO: 341698 - protein, 14 aa, Homo sapiens
  CDR3 for beta chain variable domain of TCR clone 170849 (TRBV7-2, TRBJ2-7)
CASSLPPGQGPQYF

SEQ ID NO: 341699 - protein, 13 aa, Homo sapiens
  CDR3 for alpha chain variable domain of TCR clone 170850 (TRAV30, TRAJ6)
CGFIEGGSYIPTF

SEQ ID NO: 341700 - protein, 13 aa, Homo sapiens
  CDR3 for beta chain variable domain of TCR clone 170850 (TRBV5-4, TRBJ2-5)
CASSPGSQETQYF

SEQ ID NO: 341701 - protein, 15 aa, Homo sapiens
  CDR3 for alpha chain variable domain of TCR clone 170851 (TRAV14/DV4, TRAJ26)
CAMREGQNYGQNFAF

SEQ ID NO: 341702 - protein, 13 aa, Homo sapiens
  CDR3 for beta chain variable domain of TCR clone 170851 (TRBV24-1, TRBJ2-2)
CATSDWSTGELFF

SEQ ID NO: 341703 - protein, 14 aa, Homo sapiens
  CDR3 for alpha chain variable domain of TCR clone 170852 (TRAV8-3, TRAJ9)
CAVVYNTGGFKTIF

SEQ ID NO: 341704 - protein, 15 aa, Homo sapiens
  CDR3 for beta chain variable domain of TCR clone 170852 (TRBV5-1, TRBJ1-1)
CASSSTTGTNTEAFF

SEQ ID NO: 341705 - protein, 14 aa, Homo sapiens
  CDR3 for alpha chain variable domain of TCR clone 170853 (TRAV12-2, TRAJ13)
CAVKKTGGYQKVTF

SEQ ID NO: 341706 - protein, 17 aa, Homo sapiens
  CDR3 for beta chain variable domain of TCR clone 170853 (TRBV27, TRBJ2-1)
CTSVPAVMGGSSNEQFF

SEQ ID NO: 341707 - protein, 14 aa, Homo sapiens
  CDR3 for alpha chain variable domain of TCR clone 170854 (TRAV23/DV6, TRAJ13)
CAASETGGYQKGTF

SEQ ID NO: 341708 - protein, 16 aa, Homo sapiens
  CDR3 for beta chain variable domain of TCR clone 170854 (TRBV5-1, TRBJ1-3)
CASSPWAPSSGNTIYF

SEQ ID NO: 341709 - protein, 12 aa, Homo sapiens
  CDR3 for alpha chain variable domain of TCR clone 170855 (TRAV12-3, TRAJ17)
CVMTLTGNKLTF

SEQ ID NO: 341710 - protein, 16 aa, Homo sapiens
  CDR3 for beta chain variable domain of TCR clone 170855 (TRBV20-1, TRBJ1-2)
CSASMGQGVANYGYTF

SEQ ID NO: 341711 - protein, 16 aa, Homo sapiens
  CDR3 for alpha chain variable domain of TCR clone 170856 (TRAV1-2, TRAJ18)
CAVRVERGSTLGMLYF

SEQ ID NO: 341712 - protein, 16 aa, Homo sapiens
  CDR3 for beta chain variable domain of TCR clone 170856 (TRBV20-1, TRBJ2-7)
CSASTSGRLSSYEQYF

SEQ ID NO: 341713 - protein, 15 aa, Homo sapiens
  CDR3 for alpha chain variable domain of TCR clone 170857 (TRAV3, TRAJ5)
CAVRDLDTGRRALTF

SEQ ID NO: 341714 - protein, 13 aa, Homo sapiens
  CDR3 for beta chain variable domain of TCR clone 170857 (TRBV12-4, TRBJ2-7)
CASSTTETYEQHF

SEQ ID NO: 341715 - protein, 14 aa, Homo sapiens
  CDR3 for alpha chain variable domain of TCR clone 170858 (TRAV12-1, TRAJ37)
CVVGGVENTGKLIF

SEQ ID NO: 341716 - protein, 13 aa, Homo sapiens
  CDR3 for beta chain variable domain of TCR clone 170858 (TRBV2, TRBJ1-1)
CASRWTVNTEAFF

SEQ ID NO: 341717 - protein, 19 aa, Homo sapiens
  CDR3 for alpha chain variable domain of TCR clone 170859 (TRAV38-1, TRAJ53)
CAFMKHGLESGGSNYKLTF

SEQ ID NO: 341718 - protein, 17 aa, Homo sapiens
  CDR3 for beta chain variable domain of TCR clone 170859 (TRBV19, TRBJ2-7)
CASSISFYDSYPYEQYF

SEQ ID NO: 341719 - protein, 15 aa, Homo sapiens
  CDR3 for alpha chain variable domain of TCR clone 170860 (TRAV21, TRAJ38)
CAVRQDAGKNRKLIW

SEQ ID NO: 341720 - protein, 16 aa, Homo sapiens
  CDR3 for beta chain variable domain of TCR clone 170860 (TRBV4-2, TRBJ1-1)
CASRPLDGGGDTEAFF

SEQ ID NO: 341721 - protein, 13 aa, Homo sapiens
  CDR3 for alpha chain variable domain of TCR clone 170861 (TRAV13-2, TRAJ53)
CAENMGSNYKLTF

SEQ ID NO: 341722 - protein, 12 aa, Homo sapiens
  CDR3 for beta chain variable domain of TCR clone 170861 (TRBV4-1, TRBJ2-2)
RSSQENTGELFF

SEQ ID NO: 341723 - protein, 14 aa, Homo sapiens
  CDR3 for alpha chain variable domain of TCR clone 170862 (TRAV1-2, TRAJ16)
CAVNWFSDGQKLLF

SEQ ID NO: 341724 - protein, 16 aa, Homo sapiens
  CDR3 for beta chain variable domain of TCR clone 170862 (TRBV6-6, TRBJ2-1)
CASSYSFSGSYNEQFF

SEQ ID NO: 341725 - protein, 14 aa, Homo sapiens
  CDR3 for alpha chain variable domain of TCR clone 170863 (TRAV35, TRAJ33)
CAGSSQDSNYQLIW

SEQ ID NO: 341726 - protein, 15 aa, Homo sapiens
  CDR3 for beta chain variable domain of TCR clone 170863 (TRBV20-1, TRBJ2-7)
CSAESGTSGANEQYF

SEQ ID NO: 341727 - protein, 14 aa, Homo sapiens
  CDR3 for alpha chain variable domain of TCR clone 170864 (TRAV8-4, TRAJ33)
CAVSSFDSNYQLIW

SEQ ID NO: 341728 - protein, 17 aa, Homo sapiens
  CDR3 for beta chain variable domain of TCR clone 170864 (TRBV11-2, TRBJ2-1)
CASSLYPPGVEYNEQFF

SEQ ID NO: 341729 - protein, 15 aa, Homo sapiens
  CDR3 for alpha chain variable domain of TCR clone 170865 (TRAV27, TRAJ45)
CRSPQAGGGADGLTF

SEQ ID NO: 341730 - protein, 12 aa, Homo sapiens
  CDR3 for beta chain variable domain of TCR clone 170865 (TRBV24-1, TRBJ2-7)
CATSDPGYEQYF

SEQ ID NO: 341731 - protein, 12 aa, Homo sapiens
  CDR3 for alpha chain variable domain of TCR clone 170866 (TRAV36/DV7, TRAJ37)
CACYGNTGKLIF

SEQ ID NO: 341732 - protein, 13 aa, Homo sapiens
  CDR3 for beta chain variable domain of TCR clone 170866 (TRBV10-3, TRBJ2-7)
CASKLAVSYEQYL

SEQ ID NO: 341733 - protein, 10 aa, Homo sapiens
  CDR3 for alpha chain variable domain of TCR clone 170867 (TRAV3, TRAJ30)
CAVRGIEIIF

SEQ ID NO: 341734 - protein, 12 aa, Homo sapiens
  CDR3 for beta chain variable domain of TCR clone 170867 (TRBV20-1, TRBJ2-3)
CSADGAGDTQYF

SEQ ID NO: 341735 - protein, 13 aa, Homo sapiens
  CDR3 for alpha chain variable domain of TCR clone 170868 (TRAV17, TRAJ6)
CATGFGGCYIPTF

SEQ ID NO: 341736 - protein, 14 aa, Homo sapiens
  CDR3 for beta chain variable domain of TCR clone 170868 (TRBV5-1, TRBJ2-5)
CASSFGGSQETQYF

SEQ ID NO: 341737 - protein, 14 aa, Homo sapiens
  CDR3 for alpha chain variable domain of TCR clone 170869 (TRAV8-1, TRAJ15)
CAVNGQQAGTALIF

SEQ ID NO: 341738 - protein, 16 aa, Homo sapiens
  CDR3 for beta chain variable domain of TCR clone 170869 (TRBV4-2, TRBJ2-3)
CASSQELAGDTDTQYF

SEQ ID NO: 341739 - protein, 14 aa, Homo sapiens
  CDR3 for alpha chain variable domain of TCR clone 170870 (TRAV12-1, TRAJ9)
CVVTGYTGGFKTIF

SEQ ID NO: 341740 - protein, 13 aa, Homo sapiens
  CDR3 for beta chain variable domain of TCR clone 170870 (TRBV20-1, TRBJ1-1)
CSARAGGNTEAFV

SEQ ID NO: 341741 - protein, 15 aa, Homo sapiens
  CDR3 for alpha chain variable domain of TCR clone 170871 (TRAV3, TRAJ11)
CAVRDRGSGYSTLTF

SEQ ID NO: 341742 - protein, 15 aa, Homo sapiens
  CDR3 for beta chain variable domain of TCR clone 170871 (TRBV3-1, TRBJ1-1)
CASSQGGSGPTEAFF

SEQ ID NO: 341743 - protein, 13 aa, Homo sapiens
  CDR3 for alpha chain variable domain of TCR clone 170872 (TRAV8-3, TRAJ28)
CALGAVGSYQLTF

SEQ ID NO: 341744 - protein, 15 aa, Homo sapiens
  CDR3 for beta chain variable domain of TCR clone 170872 (TRBV28, TRBJ2-5)
CASSPGQGSIETQYF

SEQ ID NO: 341745 - protein, 17 aa, Homo sapiens
  CDR3 for alpha chain variable domain of TCR clone 170873 (TRAV3, TRAJ37)
CAVRDMRTPGNTGKIIF

SEQ ID NO: 341746 - protein, 14 aa, Homo sapiens
  CDR3 for beta chain variable domain of TCR clone 170873 (TRBV7-2, TRBJ2-7)
CASSPKTSFYEQYF

SEQ ID NO: 341747 - protein, 14 aa, Homo sapiens
  CDR3 for alpha chain variable domain of TCR clone 170874 (TRAV9-2, TRAJ39)
CALYIYNAGNMLTF

SEQ ID NO: 341748 - protein, 12 aa, Homo sapiens
  CDR3 for beta chain variable domain of TCR clone 170874 (TRBV5-1, TRBJ2-1)
CASIGGYNEQFF

SEQ ID NO: 341749 - protein, 14 aa, Homo sapiens
  CDR3 for alpha chain variable domain of TCR clone 170875 (TRAV36/DV7, TRAJ44)
CCGANTGTASKLTF

SEQ ID NO: 341750 - protein, 14 aa, Homo sapiens
  CDR3 for beta chain variable domain of TCR clone 170875 (TRBV5-1, TRBJ2-7)
CASSRGESLYEQYF

SEQ ID NO: 341751 - protein, 12 aa, Homo sapiens
  CDR3 for alpha chain variable domain of TCR clone 170876 (TRAV12-3, TRAJ4)
CAMTEAGTRLAV

SEQ ID NO: 341752 - protein, 14 aa, Homo sapiens
  CDR3 for beta chain variable domain of TCR clone 170876 (TRBV10-3, TRBJ1-1)
CAISDTDRGVEAFF

SEQ ID NO: 341753 - protein, 15 aa, Homo sapiens
  CDR3 for alpha chain variable domain of TCR clone 170877 (TRAV3, TRAJ20)
CAVRDIKLSDYKLSF

SEQ ID NO: 341754 - protein, 15 aa, Homo sapiens
  CDR3 for beta chain variable domain of TCR clone 170877 (TRBV7-9, TRBJ2-2)
CASGPLDTFPGELFF

SEQ ID NO: 341755 - protein, 14 aa, Homo sapiens
  CDR3 for alpha chain variable domain of TCR clone 170878 (TRAV1-2, TRAJ8)
CAVGEDTGFQKLVF

SEQ ID NO: 341756 - protein, 14 aa, Homo sapiens
  CDR3 for beta chain variable domain of TCR clone 170878 (TRBV6-1, TRBJ1-3)
CASVQGGGGNTIYF

SEQ ID NO: 341757 - protein, 18 aa, Homo sapiens
  CDR3 for alpha chain variable domain of TCR clone 170879 (TRAV26-2, TRAJ45)
CILRVDKYSGGGADGLTF

SEQ ID NO: 341758 - protein, 12 aa, Homo sapiens
  CDR3 for beta chain variable domain of TCR clone 170879 (TRBV6-3, TRBJ2-7)
CASSEPGFEQYF

SEQ ID NO: 341759 - protein, 14 aa, Homo sapiens
  CDR3 for alpha chain variable domain of TCR clone 170880 (TRAV13-1, TRAJ10)
CAAKEPGGGSKLTF

SEQ ID NO: 341760 - protein, 14 aa, Homo sapiens
  CDR3 for beta chain variable domain of TCR clone 170880 (TRBV6-6, TRBJ2-7)
CASSDSGAGYEQYF

SEQ ID NO: 341761 - protein, 23 aa, Homo sapiens
  CDR3 for alpha chain variable domain of TCR clone 170881 (TRAV12-2, TRAJ36)
SLLIRDSQPSDSTTLERANNLFF

SEQ ID NO: 341762 - protein, 16 aa, Homo sapiens
  CDR3 for beta chain variable domain of TCR clone 170881 (TRBV7-3, TRBJ2-2)
CASSLKRGTLSGELFF

SEQ ID NO: 341763 - protein, 15 aa, Homo sapiens
  CDR3 for alpha chain variable domain of TCR clone 170882 (TRAV8-2, TRAJ11)
CVVSEDPSGYSTLTF

SEQ ID NO: 341764 - protein, 15 aa, Homo sapiens
  CDR3 for beta chain variable domain of TCR clone 170882 (TRBV11-2, TRBJ2-1)
CASSLGTSGLNEQFF

SEQ ID NO: 341765 - protein, 17 aa, Homo sapiens
  CDR3 for alpha chain variable domain of TCR clone 170883 (TRAV26-1, TRAJ37)
CIVRVITVSSNTGKLIF

SEQ ID NO: 341766 - protein, 15 aa, Homo sapiens
  CDR3 for beta chain variable domain of TCR clone 170883 (TRBV28, TRBJ2-5)
CASSPGQGSIETQYF

SEQ ID NO: 341767 - protein, 14 aa, Homo sapiens
  CDR3 for alpha chain variable domain of TCR clone 170884 (TRAV23/DV6, TRAJ13)
CAARETGGYQKVTF

SEQ ID NO: 341768 - protein, 16 aa, Homo sapiens
  CDR3 for beta chain variable domain of TCR clone 170884 (TRBV5-1, TRBJ1-3)
CASSPWAPSSGNTIYF

SEQ ID NO: 341769 - protein, 14 aa, Homo sapiens
  CDR3 for alpha chain variable domain of TCR clone 170885 (TRAV14/DV4, TRAJ20)
CAMRESLNYYKLSF

SEQ ID NO: 341770 - protein, 15 aa, Homo sapiens
  CDR3 for beta chain variable domain of TCR clone 170885 (TRBV7-9, TRBJ2-7)
CASSLALAEAYEQYF

SEQ ID NO: 341771 - protein, 15 aa, Homo sapiens
  CDR3 for alpha chain variable domain of TCR clone 170886 (TRAV8-3, TRAJ23)
CAVGDRHNQGGKLIF

SEQ ID NO: 341772 - protein, 22 aa, Homo sapiens
  CDR3 for beta chain variable domain of TCR clone 170886 (TRBV29-1, TRBJ2-5)
TVSNMSPEDSSIYLCSAGTRYF

SEQ ID NO: 341773 - protein, 13 aa, Homo sapiens
  CDR3 for alpha chain variable domain of TCR clone 170887 (TRAV2, TRAJ40)
CAVVTSGTYKYIL

SEQ ID NO: 341774 - protein, 15 aa, Homo sapiens
  CDR3 for beta chain variable domain of TCR clone 170887 (TRBV20-1, TRBJ2-7)
CSAESGTSGAYEQYF

SEQ ID NO: 341775 - protein, 13 aa, Homo sapiens
  CDR3 for alpha chain variable domain of TCR clone 170888 (TRAV26-1, TRAJ30)
CIVRVESNEQIIF

SEQ ID NO: 341776 - protein, 15 aa, Homo sapiens
  CDR3 for beta chain variable domain of TCR clone 170888 (TRBV6-1, TRBJ2-3)
CASSERGGITDTQYF

SEQ ID NO: 341777 - protein, 15 aa, Homo sapiens
  CDR3 for alpha chain variable domain of TCR clone 170889 (TRAV34, TRAJ38)
CGADFTPGNNRKLIW

SEQ ID NO: 341778 - protein, 15 aa, Homo sapiens
  CDR3 for beta chain variable domain of TCR clone 170889 (TRBV2, TRBJ1-3)
CASSISPRSGNTIYF

SEQ ID NO: 341779 - protein, 13 aa, Homo sapiens
  CDR3 for alpha chain variable domain of TCR clone 170890 (TRAV21, TRAJ27)
CAARPGNAGKSTF

SEQ ID NO: 341780 - protein, 12 aa, Homo sapiens
  CDR3 for beta chain variable domain of TCR clone 170890 (TRBV11-2, TRBJ2-2)
CASSLGGGEMFF

SEQ ID NO: 341781 - protein, 14 aa, Homo sapiens
  CDR3 for alpha chain variable domain of TCR clone 170891 (TRAV1-2, TRAJ8)
CAVREDTGFQKLVF

SEQ ID NO: 341782 - protein, 17 aa, Homo sapiens
  CDR3 for beta chain variable domain of TCR clone 170891 (TRBV6-3, TRBJ2-7)
CASSSPGTVFYEQYSGR

SEQ ID NO: 341783 - protein, 11 aa, Homo sapiens
  CDR3 for alpha chain variable domain of TCR clone 170892 (TRAV12-3, TRAJ43)
CAMSVYNDIRF

SEQ ID NO: 341784 - protein, 13 aa, Homo sapiens
  CDR3 for beta chain variable domain of TCR clone 170892 (TRBV20-1, TRBJ1-1)
CSAPLGGGTEAFF

SEQ ID NO: 341785 - protein, 14 aa, Homo sapiens
  CDR3 for alpha chain variable domain of TCR clone 170893 (TRAV1-2, TRAJ16)
CAVNRLSDCQKLLF

SEQ ID NO: 341786 - protein, 14 aa, Homo sapiens
  CDR3 for beta chain variable domain of TCR clone 170893 (TRBV12-5, TRBJ2-5)
CASGSRTHQETQYF

SEQ ID NO: 341787 - protein, 12 aa, Homo sapiens
  CDR3 for alpha chain variable domain of TCR clone 170894 (TRAV12-3, TRAJ17)
CAMTLTGNKLTF

SEQ ID NO: 341788 - protein, 15 aa, Homo sapiens
  CDR3 for beta chain variable domain of TCR clone 170894 (TRBV19, TRBJ2-2)
CASSPRTGWTGELFF

SEQ ID NO: 341789 - protein, 14 aa, Homo sapiens
  CDR3 for alpha chain variable domain of TCR clone 170895 (TRAV26-1, TRAJ38)
CISDNAGNNRKLIW

SEQ ID NO: 341790 - protein, 13 aa, Homo sapiens
  CDR3 for beta chain variable domain of TCR clone 170895 (TRBV20-1, TRBJ1-1)
CSARGGGNNEDFF

SEQ ID NO: 341791 - protein, 14 aa, Homo sapiens
  CDR3 for alpha chain variable domain of TCR clone 170896 (TRAV12-3, TRAJ10)
SHLPLTGGGNKLTF

SEQ ID NO: 341792 - protein, 14 aa, Homo sapiens
  CDR3 for beta chain variable domain of TCR clone 170896 (TRBV7-9, TRBJ1-1)
CASSLGGANTEAFF

SEQ ID NO: 341793 - protein, 15 aa, Homo sapiens
  CDR3 for alpha chain variable domain of TCR clone 170897 (TRAV8-3, TRAJ45)
CASSYSGGGADGLTF

SEQ ID NO: 341794 - protein, 15 aa, Homo sapiens
  CDR3 for beta chain variable domain of TCR clone 170897 (TRBV18, TRBJ1-1)
CAGSPRQGENTEAFF

SEQ ID NO: 341795 - protein, 14 aa, Homo sapiens
  CDR3 for alpha chain variable domain of TCR clone 170898 (TRAV12-2, TRAJ13)
CAVKKTGGYQKVNF

SEQ ID NO: 341796 - protein, 13 aa, Homo sapiens
  CDR3 for beta chain variable domain of TCR clone 170898 (TRBV12-5, TRBJ2-3)
CASGDRQSDTQYF

SEQ ID NO: 341797 - protein, 13 aa, Homo sapiens
  CDR3 for alpha chain variable domain of TCR clone 170899 (TRAV26-1, TRAJ24)
CIVGVDSWGKLQF

SEQ ID NO: 341798 - protein, 15 aa, Homo sapiens
  CDR3 for beta chain variable domain of TCR clone 170899 (TRBV7-6, TRBJ2-1)
CASSSLAGEGNEQFF

SEQ ID NO: 341799 - protein, 16 aa, Homo sapiens
  CDR3 for alpha chain variable domain of TCR clone 170900 (TRAV16, TRAJ52)
CALIGVGGTSYGKLTF

SEQ ID NO: 341800 - protein, 14 aa, Homo sapiens
  CDR3 for beta chain variable domain of TCR clone 170900 (TRBV19, TRBJ1-2)
CASSLQGQAYGYTF

SEQ ID NO: 341801 - protein, 14 aa, Homo sapiens
  CDR3 for alpha chain variable domain of TCR clone 170901 (TRAV8-3, TRAJ39)
CAVGANNAGNMLIF

SEQ ID NO: 341802 - protein, 15 aa, Homo sapiens
  CDR3 for beta chain variable domain of TCR clone 170901 (TRBV4-3, TRBJ1-1)
CASSQELGRGTEAFF

SEQ ID NO: 341803 - protein, 16 aa, Homo sapiens
  CDR3 for alpha chain variable domain of TCR clone 170902 (TRAV21, TRAJ37)
CAVRTAGSSNTGKPIF

SEQ ID NO: 341804 - protein, 13 aa, Homo sapiens
  CDR3 for beta chain variable domain of TCR clone 170902 (TRBV7-9, TRBJ2-5)
CASLPAGRETQYF

SEQ ID NO: 341805 - protein, 14 aa, Homo sapiens
  CDR3 for alpha chain variable domain of TCR clone 170903 (TRAV12-2, TRAJ13)
CAVKKTGGYQKVTF

SEQ ID NO: 341806 - protein, 12 aa, Homo sapiens
  CDR3 for beta chain variable domain of TCR clone 170903 (TRBV11-2, TRBJ2-2)
RASSLGGGKLFF

SEQ ID NO: 341807 - protein, 15 aa, Homo sapiens
  CDR3 for alpha chain variable domain of TCR clone 170904 (TRAV12-3, TRAJ45)
CAMRLTGGGADGLTF

SEQ ID NO: 341808 - protein, 14 aa, Homo sapiens
  CDR3 for beta chain variable domain of TCR clone 170904 (TRBV2, TRBJ2-5)
CASSEGSYQETQYF

SEQ ID NO: 341809 - protein, 15 aa, Homo sapiens
  CDR3 for alpha chain variable domain of TCR clone 170905 (TRAV12-2, TRAJ56)
CAVNPFTGANSKMTF

SEQ ID NO: 341810 - protein, 13 aa, Homo sapiens
  CDR3 for beta chain variable domain of TCR clone 170905 (TRBV20-1, TRBJ1-2)
CSARDRVYGGYTF

SEQ ID NO: 341811 - protein, 12 aa, Homo sapiens
  CDR3 for alpha chain variable domain of TCR clone 170906 (TRAV3, TRAJ20)
CAVRDPDYKLRF

SEQ ID NO: 341812 - protein, 13 aa, Homo sapiens
  CDR3 for beta chain variable domain of TCR clone 170906 (TRBV18, TRBJ1-1)
CASSPETKPEAFF

SEQ ID NO: 341813 - protein, 12 aa, Homo sapiens
  CDR3 for alpha chain variable domain of TCR clone 170907 (TRAV12-3, TRAJ17)
CAMTLTGNKLTF

SEQ ID NO: 341814 - protein, 12 aa, Homo sapiens
  CDR3 for beta chain variable domain of TCR clone 170907 (TRBV18, TRBJ2-1)
CASSPGTSEGFF

SEQ ID NO: 341815 - protein, 12 aa, Homo sapiens
  CDR3 for alpha chain variable domain of TCR clone 170908 (TRAV2, TRAJ9)
CAVGAGGFKTIF

SEQ ID NO: 341816 - protein, 14 aa, Homo sapiens
  CDR3 for beta chain variable domain of TCR clone 170908 (TRBV5-4, TRBJ2-1)
CASSLNQGLNEQFF

SEQ ID NO: 341817 - protein, 13 aa, Homo sapiens
  CDR3 for alpha chain variable domain of TCR clone 170909 (TRAV24, TRAJ42)
CAFSRGSQGNLIF

SEQ ID NO: 341818 - protein, 19 aa, Homo sapiens
  CDR3 for beta chain variable domain of TCR clone 170909 (TRBV5-1, TRBJ2-3)
CASSLWLAGGITTTDTQYF

SEQ ID NO: 341819 - protein, 15 aa, Homo sapiens
  CDR3 for alpha chain variable domain of TCR clone 170910 (TRAV17, TRAJ4)
CATGTLSGGYNKLIF

SEQ ID NO: 341820 - protein, 13 aa, Homo sapiens
  CDR3 for beta chain variable domain of TCR clone 170910 (TRBV6-6, TRBJ2-7)
CASSPKHLAEQYF

SEQ ID NO: 341821 - protein, 14 aa, Homo sapiens
  CDR3 for alpha chain variable domain of TCR clone 170911 (TRAV1-2, TRAJ16)
CAVNRFSDGQKLPF

SEQ ID NO: 341822 - protein, 12 aa, Homo sapiens
  CDR3 for beta chain variable domain of TCR clone 170911 (TRBV20-1, TRBJ2-5)
CSAPRSQETQYF

SEQ ID NO: 341823 - protein, 13 aa, Homo sapiens
  CDR3 for alpha chain variable domain of TCR clone 170912 (TRAV13-1, TRAJ10)
CVALEGGGNKLTF

SEQ ID NO: 341824 - protein, 13 aa, Homo sapiens
  CDR3 for beta chain variable domain of TCR clone 170912 (TRBV7-9, TRBJ1-2)
CASSLKQNYGYTF

SEQ ID NO: 341825 - protein, 23 aa, Homo sapiens
  CDR3 for alpha chain variable domain of TCR clone 170913 (TRAV9-2, TRAJ4)
CQTQRCTSVLWVIRSGGYNKLIF

SEQ ID NO: 341826 - protein, 12 aa, Homo sapiens
  CDR3 for beta chain variable domain of TCR clone 170913 (TRBV11-2, TRBJ2-2)
RASSLGGGELFF

SEQ ID NO: 341827 - protein, 15 aa, Homo sapiens
  CDR3 for alpha chain variable domain of TCR clone 170914 (TRAV2, TRAJ9)
CAMEDRGTGGFKTIF

SEQ ID NO: 341828 - protein, 19 aa, Homo sapiens
  CDR3 for beta chain variable domain of TCR clone 170914 (TRBV28, TRBJ2-7)
CASSYSGTSRLGWVYEQYF

SEQ ID NO: 341829 - protein, 17 aa, Homo sapiens
  CDR3 for alpha chain variable domain of TCR clone 170915 (TRAV1-2, TRAJ8)
CAVRDPDENTGFQKLVF

SEQ ID NO: 341830 - protein, 16 aa, Homo sapiens
  CDR3 for beta chain variable domain of TCR clone 170915 (TRBV7-9, TRBJ2-2)
CASSGCGGANTGELFF

SEQ ID NO: 341831 - protein, 14 aa, Homo sapiens
  CDR3 for alpha chain variable domain of TCR clone 170916 (TRAV1-2, TRAJ8)
CAVREDTGLQKLVF

SEQ ID NO: 341832 - protein, 13 aa, Homo sapiens
  CDR3 for beta chain variable domain of TCR clone 170916 (TRBV7-9, TRBJ2-7)
CASSFAGAYEQYF

SEQ ID NO: 341833 - protein, 13 aa, Homo sapiens
  CDR3 for alpha chain variable domain of TCR clone 170917 (TRAV17, TRAJ24)
CATKSGGYNKLIF

SEQ ID NO: 341834 - protein, 15 aa, Homo sapiens
  CDR3 for beta chain variable domain of TCR clone 170917 (TRBV12-4, TRBJ1-6)
CASSLGGQGTSPLHF

SEQ ID NO: 341835 - protein, 10 aa, Homo sapiens
  CDR3 for alpha chain variable domain of TCR clone 170918 (TRAV1-2, TRAJ20)
CAVTDYKLSF

SEQ ID NO: 341836 - protein, 13 aa, Homo sapiens
  CDR3 for beta chain variable domain of TCR clone 170918 (TRBV28, TRBJ2-7)
CASSPGGVYEQYF

SEQ ID NO: 341837 - protein, 13 aa, Homo sapiens
  CDR3 for alpha chain variable domain of TCR clone 170919 (TRAV16, TRAJ26)
CITVLCLGQNFVF

SEQ ID NO: 341838 - protein, 14 aa, Homo sapiens
  CDR3 for beta chain variable domain of TCR clone 170919 (TRBV11-2, TRBJ2-3)
CASSRLARTDTQYF

SEQ ID NO: 341839 - protein, 10 aa, Homo sapiens
  CDR3 for alpha chain variable domain of TCR clone 170920 (TRAV12-2, TRAJ52)
RSTSYGKLTF

SEQ ID NO: 341840 - protein, 12 aa, Homo sapiens
  CDR3 for beta chain variable domain of TCR clone 170920 (TRBV3-1, TRBJ2-1)
CASGGLGNEQFF

SEQ ID NO: 341841 - protein, 13 aa, Homo sapiens
  CDR3 for alpha chain variable domain of TCR clone 170921 (TRAV3, TRAJ30)
SAVRDRGDEKIIF

SEQ ID NO: 341842 - protein, 14 aa, Homo sapiens
  CDR3 for beta chain variable domain of TCR clone 170921 (TRBV5-1, TRBJ1-1)
CASSRTTGDTEAFF

SEQ ID NO: 341843 - protein, 14 aa, Homo sapiens
  CDR3 for alpha chain variable domain of TCR clone 170922 (TRAV16, TRAJ54)
CALSGLQGAQKLVF

SEQ ID NO: 341844 - protein, 14 aa, Homo sapiens
  CDR3 for beta chain variable domain of TCR clone 170922 (TRBV18, TRBJ2-5)
CASSPGVSQETQYF

SEQ ID NO: 341845 - protein, 13 aa, Homo sapiens
  CDR3 for alpha chain variable domain of TCR clone 170923 (TRAV1-2, TRAJ9)
CAVLNTGGFKTIF

SEQ ID NO: 341846 - protein, 17 aa, Homo sapiens
  CDR3 for beta chain variable domain of TCR clone 170923 (TRBV13, TRBJ2-3)
CASSLARVAGGRNTQYF

SEQ ID NO: 341847 - protein, 12 aa, Homo sapiens
  CDR3 for alpha chain variable domain of TCR clone 170924 (TRAV12-3, TRAJ5)
CAMDTGRRALTF

SEQ ID NO: 341848 - protein, 15 aa, Homo sapiens
  CDR3 for beta chain variable domain of TCR clone 170924 (TRBV28, TRBJ2-5)
CASSSGRTIQETQYF

SEQ ID NO: 341849 - protein, 11 aa, Homo sapiens
  CDR3 for alpha chain variable domain of TCR clone 170925 (TRAV16, TRAJ49)
CSLNTGNQFYF

SEQ ID NO: 341850 - protein, 15 aa, Homo sapiens
  CDR3 for beta chain variable domain of TCR clone 170925 (TRBV19, TRBJ2-7)
CASSPAGSGEALRYF

SEQ ID NO: 341851 - protein, 10 aa, Homo sapiens
  CDR3 for alpha chain variable domain of TCR clone 170926 (TRAV12-3, TRAJ49)
CAMNDDQFYF

SEQ ID NO: 341852 - protein, 13 aa, Homo sapiens
  CDR3 for beta chain variable domain of TCR clone 170926 (TRBV12-4, TRBJ1-1)
CSSSPGTGFEAFF

SEQ ID NO: 341853 - protein, 13 aa, Homo sapiens
  CDR3 for alpha chain variable domain of TCR clone 170927 (TRAV35, TRAJ36)
CAGPRIGANNRFF

SEQ ID NO: 341854 - protein, 15 aa, Homo sapiens
  CDR3 for beta chain variable domain of TCR clone 170927 (TRBV28, TRBJ2-5)
CASSPPWSYQETQYF

SEQ ID NO: 341855 - protein, 11 aa, Homo sapiens
  CDR3 for alpha chain variable domain of TCR clone 170928 (TRAV1-1, TRAJ23)
CAVRQGGKLIF

SEQ ID NO: 341856 - protein, 20 aa, Homo sapiens
  CDR3 for beta chain variable domain of TCR clone 170928 (TRBV7-8, TRBJ2-2)
CVSSHLFPGPTVHITRELFF

SEQ ID NO: 341857 - protein, 17 aa, Homo sapiens
  CDR3 for alpha chain variable domain of TCR clone 170929 (TRAV26-1, TRAJ58)
CIVRVGAEETSGSRLTF

SEQ ID NO: 341858 - protein, 18 aa, Homo sapiens
  CDR3 for beta chain variable domain of TCR clone 170929 (TRBV7-9, TRBJ2-7)
CASSLTTSRSRTWYEQYF

SEQ ID NO: 341859 - protein, 14 aa, Homo sapiens
  CDR3 for alpha chain variable domain of TCR clone 170930 (TRAV3, TRAJ20)
CAVPPAPNDYKLSF

SEQ ID NO: 341860 - protein, 15 aa, Homo sapiens
  CDR3 for beta chain variable domain of TCR clone 170930 (TRBV19, TRBJ2-7)
CASSPAGSGEALRYF

SEQ ID NO: 341861 - protein, 19 aa, Homo sapiens
  CDR3 for alpha chain variable domain of TCR clone 170931 (TRAV21, TRAJ20)
SLVTQPPTSVLPNDYKLSF

SEQ ID NO: 341862 - protein, 13 aa, Homo sapiens
  CDR3 for beta chain variable domain of TCR clone 170931 (TRBV7-2, TRBJ1-4)
CASSLVGLEKLFF

SEQ ID NO: 341863 - protein, 13 aa, Homo sapiens
  CDR3 for alpha chain variable domain of TCR clone 170932 (TRAV30, TRAJ24)
CGTVTDSWGKLQF

SEQ ID NO: 341864 - protein, 14 aa, Homo sapiens
  CDR3 for beta chain variable domain of TCR clone 170932 (TRBV20-1, TRBJ1-1)
CSAQTRIGGTEAFF

SEQ ID NO: 341865 - protein, 13 aa, Homo sapiens
  CDR3 for alpha chain variable domain of TCR clone 170933 (TRAV35, TRAJ42)
CAGFPGSQGNLIF

SEQ ID NO: 341866 - protein, 12 aa, Homo sapiens
  CDR3 for beta chain variable domain of TCR clone 170933 (TRBV6-3, TRBJ2-7)
CASSLTPYEQYF

SEQ ID NO: 341867 - protein, 18 aa, Homo sapiens
  CDR3 for alpha chain variable domain of TCR clone 170934 (TRAV9-2, TRAJ52)
CALSRHNAGGTSYGKLTS

SEQ ID NO: 341868 - protein, 20 aa, Homo sapiens
  CDR3 for beta chain variable domain of TCR clone 170934 (TRBV28, TRBJ2-1)
CASTPIGRSPGLAGGNEQFF

SEQ ID NO: 341869 - protein, 16 aa, Homo sapiens
  CDR3 for alpha chain variable domain of TCR clone 170935 (TRAV3, TRAJ10)
CAVRDMRAGGGNKLTF

SEQ ID NO: 341870 - protein, 13 aa, Homo sapiens
  CDR3 for beta chain variable domain of TCR clone 170935 (TRBV6-1, TRBJ1-1)
GASSRQGNTEAFF

SEQ ID NO: 341871 - protein, 15 aa, Homo sapiens
  CDR3 for alpha chain variable domain of TCR clone 170936 (TRAV36/DV7, TRAJ54)
CAVEKPVRGAQKLVF

SEQ ID NO: 341872 - protein, 17 aa, Homo sapiens
  CDR3 for beta chain variable domain of TCR clone 170936 (TRBV6-5, TRBJ1-2)
CASSSPWEGAFDYGYTF

SEQ ID NO: 341873 - protein, 13 aa, Homo sapiens
  CDR3 for alpha chain variable domain of TCR clone 170937 (TRAV12-1, TRAJ21)
CVVIGDNFNNFYF

SEQ ID NO: 341874 - protein, 14 aa, Homo sapiens
  CDR3 for beta chain variable domain of TCR clone 170937 (TRBV7-3, TRBJ2-2)
CASSLYPLTGELFF

SEQ ID NO: 341875 - protein, 16 aa, Homo sapiens
  CDR3 for alpha chain variable domain of TCR clone 170938 (TRAV30, TRAJ24)
CGTEMLDADSWGKFQF

SEQ ID NO: 341876 - protein, 14 aa, Homo sapiens
  CDR3 for beta chain variable domain of TCR clone 170938 (TRBV12-5, TRBJ2-5)
CASGSRTHQETQYF

SEQ ID NO: 341877 - protein, 13 aa, Homo sapiens
  CDR3 for alpha chain variable domain of TCR clone 170939 (TRAV26-2, TRAJ43)
CILRVVNNNDMRF

SEQ ID NO: 341878 - protein, 15 aa, Homo sapiens
  CDR3 for beta chain variable domain of TCR clone 170939 (TRBV7-2, TRBJ2-1)
CASTHGTGIYNEQFF

SEQ ID NO: 341879 - protein, 13 aa, Homo sapiens
  CDR3 for alpha chain variable domain of TCR clone 170940 (TRAV3, TRAJ20)
CVVRSLNDYKLSF

SEQ ID NO: 341880 - protein, 13 aa, Homo sapiens
  CDR3 for beta chain variable domain of TCR clone 170940 (TRBV7-3, TRBJ1-1)
CASSQDWGAEAFF

SEQ ID NO: 341881 - protein, 15 aa, Homo sapiens
  CDR3 for alpha chain variable domain of TCR clone 170941 (TRAV3, TRAJ13)
CAVRDIAGGYQKVTF

SEQ ID NO: 341882 - protein, 13 aa, Homo sapiens
  CDR3 for beta chain variable domain of TCR clone 170941 (TRBV12-4, TRBJ1-3)
CASSLASGNTMYF

SEQ ID NO: 341883 - protein, 12 aa, Homo sapiens
  CDR3 for alpha chain variable domain of TCR clone 170942 (TRAV35, TRAJ31)
CAAASNNARLMF

SEQ ID NO: 341884 - protein, 16 aa, Homo sapiens
  CDR3 for beta chain variable domain of TCR clone 170942 (TRBV7-2, TRBJ2-7)
CASSFPLAGGPLEQYF

SEQ ID NO: 341885 - protein, 17 aa, Homo sapiens
  CDR3 for alpha chain variable domain of TCR clone 170943 (TRAV13-1, TRAJ52)
CAAGRNAGGTSYGKLTF

SEQ ID NO: 341886 - protein, 13 aa, Homo sapiens
  CDR3 for beta chain variable domain of TCR clone 170943 (TRBV4-1, TRBJ2-3)
CASSQPPTDTQYF

SEQ ID NO: 341887 - protein, 14 aa, Homo sapiens
  CDR3 for alpha chain variable domain of TCR clone 170944 (TRAV13-2, TRAJ10)
CAENITGGGNKPTF

SEQ ID NO: 341888 - protein, 17 aa, Homo sapiens
  CDR3 for beta chain variable domain of TCR clone 170944 (TRBV7-2, TRBJ2-7)
CASSLGGPNRGSSTSGR

SEQ ID NO: 341889 - protein, 12 aa, Homo sapiens
  CDR3 for alpha chain variable domain of TCR clone 170945 (TRAV12-2, TRAJ9)
CAVYNGGFKTIF

SEQ ID NO: 341890 - protein, 16 aa, Homo sapiens
  CDR3 for beta chain variable domain of TCR clone 170945 (TRBV12-5, TRBJ2-5)
CASGPRTSGNQETQYF

SEQ ID NO: 341891 - protein, 18 aa, Homo sapiens
  CDR3 for alpha chain variable domain of TCR clone 170946 (TRAV21, TRAJ52)
CAVRPSPAGVTSYGKLTF

SEQ ID NO: 341892 - protein, 11 aa, Homo sapiens
  CDR3 for beta chain variable domain of TCR clone 170946 (TRBV12-4, TRBJ2-3)
CASTATDTQYF

SEQ ID NO: 341893 - protein, 12 aa, Homo sapiens
  CDR3 for alpha chain variable domain of TCR clone 170947 (TRAV38-2/DV8, TRAJ48)
CALLSGHEKLTF

SEQ ID NO: 341894 - protein, 14 aa, Homo sapiens
  CDR3 for beta chain variable domain of TCR clone 170947 (TRBV11-2, TRBJ2-3)
CASSRLARTDTQYF

SEQ ID NO: 341895 - protein, 15 aa, Homo sapiens
  CDR3 for alpha chain variable domain of TCR clone 170948 (TRAV25, TRAJ52)
CAGRPGGTSYGKLTF

SEQ ID NO: 341896 - protein, 16 aa, Homo sapiens
  CDR3 for beta chain variable domain of TCR clone 170948 (TRBV7-3, TRBJ2-3)
CASSLSGYRPEDTQYF

SEQ ID NO: 341897 - protein, 12 aa, Homo sapiens
  CDR3 for alpha chain variable domain of TCR clone 170949 (TRAV16, TRAJ27)
CALNHQCRQINL

SEQ ID NO: 341898 - protein, 16 aa, Homo sapiens
  CDR3 for beta chain variable domain of TCR clone 170949 (TRBV7-3, TRBJ2-2)
CASSLKRGTLSGELFF

SEQ ID NO: 341899 - protein, 12 aa, Homo sapiens
  CDR3 for alpha chain variable domain of TCR clone 170950 (TRAV12-3, TRAJ17)
CAMALTGNKLTF

SEQ ID NO: 341900 - protein, 15 aa, Homo sapiens
  CDR3 for beta chain variable domain of TCR clone 170950 (TRBV20-1, TRBJ2-7)
CSARDWVSGMDEQYF

SEQ ID NO: 341901 - protein, 13 aa, Homo sapiens
  CDR3 for alpha chain variable domain of TCR clone 170951 (TRAV12-2, TRAJ4)
CAGFSGGYNKLSF

SEQ ID NO: 341902 - protein, 14 aa, Homo sapiens
  CDR3 for beta chain variable domain of TCR clone 170951 (TRBV24-1, TRBJ1-1)
CATSIPRGDTEAFF

SEQ ID NO: 341903 - protein, 12 aa, Homo sapiens
  CDR3 for alpha chain variable domain of TCR clone 170952 (TRAV12-3, TRAJ17)
CAMTLTGNKLTF

SEQ ID NO: 341904 - protein, 17 aa, Homo sapiens
  CDR3 for beta chain variable domain of TCR clone 170952 (TRBV7-3, TRBJ2-1)
CASSLYPPGVEYNEQFF

SEQ ID NO: 341905 - protein, 14 aa, Homo sapiens
  CDR3 for alpha chain variable domain of TCR clone 170953 (TRAV1-2, TRAJ16)
CAVNRFSDGQKLLF

SEQ ID NO: 341906 - protein, 14 aa, Homo sapiens
  CDR3 for beta chain variable domain of TCR clone 170953 (TRBV19, TRBJ2-1)
FASPTFVLSGEQFF

SEQ ID NO: 341907 - protein, 13 aa, Homo sapiens
  CDR3 for alpha chain variable domain of TCR clone 170954 (TRAV13-1, TRAJ12)
CSKYMGSSYKLIF

SEQ ID NO: 341908 - protein, 15 aa, Homo sapiens
  CDR3 for beta chain variable domain of TCR clone 170954 (TRBV11-3, TRBJ2-3)
CASLKDGREGDTQYF

SEQ ID NO: 341909 - protein, 13 aa, Homo sapiens
  CDR3 for alpha chain variable domain of TCR clone 170955 (TRAV8-4, TRAJ49)
CAVRTLTGNQFYF

SEQ ID NO: 341910 - protein, 17 aa, Homo sapiens
  CDR3 for beta chain variable domain of TCR clone 170955 (TRBV13, TRBJ2-3)
CASSLSRVAGGRNTQYF

SEQ ID NO: 341911 - protein, 12 aa, Homo sapiens
  CDR3 for alpha chain variable domain of TCR clone 170956 (TRAV12-2, TRAJ8)
CAVNTGFQKLVF

SEQ ID NO: 341912 - protein, 15 aa, Homo sapiens
  CDR3 for beta chain variable domain of TCR clone 170956 (TRBV18, TRBJ2-1)
CASSPPSASYNEQFF

SEQ ID NO: 341913 - protein, 15 aa, Homo sapiens
  CDR3 for alpha chain variable domain of TCR clone 170957 (TRAV8-6, TRAJ21)
CAVSDRGGNFNKFYF

SEQ ID NO: 341914 - protein, 13 aa, Homo sapiens
  CDR3 for beta chain variable domain of TCR clone 170957 (TRBV19, TRBJ1-2)
CASSQGQVYGYTF

SEQ ID NO: 341915 - protein, 14 aa, Homo sapiens
  CDR3 for alpha chain variable domain of TCR clone 170958 (TRAV12-3, TRAJ11)
CAMTTNSGYSTLTF

SEQ ID NO: 341916 - protein, 16 aa, Homo sapiens
  CDR3 for beta chain variable domain of TCR clone 170958 (TRBV20-1, TRBJ1-1)
CSARALTQGMNTEASF

SEQ ID NO: 341917 - protein, 15 aa, Homo sapiens
  CDR3 for alpha chain variable domain of TCR clone 170959 (TRAV21, TRAJ13)
CAVRPTSGGYQKVTF

SEQ ID NO: 341918 - protein, 18 aa, Homo sapiens
  CDR3 for beta chain variable domain of TCR clone 170959 (TRBV11-3, TRBJ2-1)
CASSSYPGGRDSYDEQFF

SEQ ID NO: 341919 - protein, 12 aa, Homo sapiens
  CDR3 for alpha chain variable domain of TCR clone 170960 (TRAV21, TRAJ13)
PGPSGGYQKVTF

SEQ ID NO: 341920 - protein, 15 aa, Homo sapiens
  CDR3 for beta chain variable domain of TCR clone 170960 (TRBV7-9, TRBJ1-6)
CASISPGRGNSPLHF

SEQ ID NO: 341921 - protein, 17 aa, Homo sapiens
  CDR3 for alpha chain variable domain of TCR clone 170961 (TRAV8-6, TRAJ58)
CAVSSWVGETSCSRLTF

SEQ ID NO: 341922 - protein, 14 aa, Homo sapiens
  CDR3 for beta chain variable domain of TCR clone 170961 (TRBV4-3, TRBJ2-1)
YASGLDRAYNEQFF

SEQ ID NO: 341923 - protein, 13 aa, Homo sapiens
  CDR3 for alpha chain variable domain of TCR clone 170962 (TRAV2, TRAJ29)
CAEQNSGNTPLVF

SEQ ID NO: 341924 - protein, 13 aa, Homo sapiens
  CDR3 for beta chain variable domain of TCR clone 170962 (TRBV28, TRBJ1-2)
CASSPGNRNAYTF

SEQ ID NO: 341925 - protein, 15 aa, Homo sapiens
  CDR3 for alpha chain variable domain of TCR clone 170963 (TRAV27, TRAJ38)
CAARRNAGNNRKLTW

SEQ ID NO: 341926 - protein, 14 aa, Homo sapiens
  CDR3 for beta chain variable domain of TCR clone 170963 (TRBV7-8, TRBJ2-3)
CASSLEAGTDTQYF

SEQ ID NO: 341927 - protein, 15 aa, Homo sapiens
  CDR3 for alpha chain variable domain of TCR clone 170964 (TRAV38-1, TRAJ37)
CAFIFGSGNTGKLIF

SEQ ID NO: 341928 - protein, 15 aa, Homo sapiens
  CDR3 for beta chain variable domain of TCR clone 170964 (TRBV28, TRBJ2-7)
CASSVRQVSSYEQYF

SEQ ID NO: 341929 - protein, 13 aa, Homo sapiens
  CDR3 for alpha chain variable domain of TCR clone 170965 (TRAV30, TRAJ20)
CGTEDRSDYKLSV

SEQ ID NO: 341930 - protein, 15 aa, Homo sapiens
  CDR3 for beta chain variable domain of TCR clone 170965 (TRBV2, TRBJ1-2)
CASTQVQDSNYGYTF

SEQ ID NO: 341931 - protein, 12 aa, Homo sapiens
  CDR3 for alpha chain variable domain of TCR clone 170966 (TRAV8-3, TRAJ20)
CAVGANDYKPSF

SEQ ID NO: 341932 - protein, 16 aa, Homo sapiens
  CDR3 for beta chain variable domain of TCR clone 170966 (TRBV19, TRBJ2-2)
CASRSPGTGATGELFS

SEQ ID NO: 341933 - protein, 16 aa, Homo sapiens
  CDR3 for alpha chain variable domain of TCR clone 170967 (TRAV1-2, TRAJ10)
CDVRGVLTGGGNKLTF

SEQ ID NO: 341934 - protein, 12 aa, Homo sapiens
  CDR3 for beta chain variable domain of TCR clone 170967 (TRBV12-4, TRBJ2-7)
CASSLGGYEQYF

SEQ ID NO: 341935 - protein, 17 aa, Homo sapiens
  CDR3 for alpha chain variable domain of TCR clone 170968 (TRAV3, TRAJ6)
CAVRDGPRAGGSYIPTF

SEQ ID NO: 341936 - protein, 16 aa, Homo sapiens
  CDR3 for beta chain variable domain of TCR clone 170968 (TRBV18, TRBJ2-3)
CASSPGGLASTDTQYF

SEQ ID NO: 341937 - protein, 11 aa, Homo sapiens
  CDR3 for alpha chain variable domain of TCR clone 170969 (TRAV1-1, TRAJ23)
CAVRQGGKLIF

SEQ ID NO: 341938 - protein, 15 aa, Homo sapiens
  CDR3 for beta chain variable domain of TCR clone 170969 (TRBV7-3, TRBJ2-7)
CASSLNAQGAYEQYF

SEQ ID NO: 341939 - protein, 16 aa, Homo sapiens
  CDR3 for alpha chain variable domain of TCR clone 170970 (TRAV3, TRAJ37)
WAVRVRGSGNTGKLIF

SEQ ID NO: 341940 - protein, 11 aa, Homo sapiens
  CDR3 for beta chain variable domain of TCR clone 170970 (TRBV11-2, TRBJ2-2)
CASSLPGELFF

SEQ ID NO: 341941 - protein, 12 aa, Homo sapiens
  CDR3 for alpha chain variable domain of TCR clone 170971 (TRAV24, TRAJ37)
CVSSSNTGKLIF

SEQ ID NO: 341942 - protein, 16 aa, Homo sapiens
  CDR3 for beta chain variable domain of TCR clone 170971 (TRBV19, TRBJ1-1)
CASRFGGPVTGTEAFF

SEQ ID NO: 341943 - protein, 16 aa, Homo sapiens
  CDR3 for alpha chain variable domain of TCR clone 170972 (TRAV3, TRAJ22)
CAVRDMGSGSARQLTF

SEQ ID NO: 341944 - protein, 13 aa, Homo sapiens
  CDR3 for beta chain variable domain of TCR clone 170972 (TRBV7-3, TRBJ1-1)
CASSQDWGAEAFF

SEQ ID NO: 341945 - protein, 11 aa, Homo sapiens
  CDR3 for alpha chain variable domain of TCR clone 170973 (TRAV13-1, TRAJ6)
CATLGSYIPTF

SEQ ID NO: 341946 - protein, 12 aa, Homo sapiens
  CDR3 for beta chain variable domain of TCR clone 170973 (TRBV11-2, TRBJ2-1)
CASSRGNNEQFF

SEQ ID NO: 341947 - protein, 15 aa, Homo sapiens
  CDR3 for alpha chain variable domain of TCR clone 170974 (TRAV21, TRAJ53)
CATLNSGGSHYKLTF

SEQ ID NO: 341948 - protein, 12 aa, Homo sapiens
  CDR3 for beta chain variable domain of TCR clone 170974 (TRBV7-8, TRBJ2-7)
CASSLGDREQYF

SEQ ID NO: 341949 - protein, 14 aa, Homo sapiens
  CDR3 for alpha chain variable domain of TCR clone 170975 (TRAV16, TRAJ33)
CALLAMDSNYQLIW

SEQ ID NO: 341950 - protein, 12 aa, Homo sapiens
  CDR3 for beta chain variable domain of TCR clone 170975 (TRBV5-1, TRBJ1-2)
CASSQDTYGYTF

SEQ ID NO: 341951 - protein, 14 aa, Homo sapiens
  CDR3 for alpha chain variable domain of TCR clone 170976 (TRAV12-1, TRAJ17)
CVVNYKAAGNNLTF

SEQ ID NO: 341952 - protein, 15 aa, Homo sapiens
  CDR3 for beta chain variable domain of TCR clone 170976 (TRBV7-2, TRBJ2-1)
CASTHGTGIYNEQFF

SEQ ID NO: 341953 - protein, 16 aa, Homo sapiens
  CDR3 for alpha chain variable domain of TCR clone 170977 (TRAV13-1, TRAJ10)
CAASSHFTGGGNKLTF

SEQ ID NO: 341954 - protein, 15 aa, Homo sapiens
  CDR3 for beta chain variable domain of TCR clone 170977 (TRBV7-9, TRBJ1-6)
CASSSPGRGNSHLHF

SEQ ID NO: 341955 - protein, 14 aa, Homo sapiens
  CDR3 for alpha chain variable domain of TCR clone 170978 (TRAV8-3, TRAJ30)
CAVGDMNRDDKIIF

SEQ ID NO: 341956 - protein, 13 aa, Homo sapiens
  CDR3 for beta chain variable domain of TCR clone 170978 (TRBV4-1, TRBJ2-2)
CASSQENTGELFF

SEQ ID NO: 341957 - protein, 14 aa, Homo sapiens
  CDR3 for alpha chain variable domain of TCR clone 170979 (TRAV1-2, TRAJ16)
FAVNRFSYVQKLLF

SEQ ID NO: 341958 - protein, 13 aa, Homo sapiens
  CDR3 for beta chain variable domain of TCR clone 170979 (TRBV4-1, TRBJ2-1)
CASSQAGGDEQFF

SEQ ID NO: 341959 - protein, 13 aa, Homo sapiens
  CDR3 for alpha chain variable domain of TCR clone 170980 (TRAV13-2, TRAJ8)
CAFMNKGFQKLVF

SEQ ID NO: 341960 - protein, 15 aa, Homo sapiens
  CDR3 for beta chain variable domain of TCR clone 170980 (TRBV19, TRBJ2-3)
CAAGDTNAPNDTQYF

SEQ ID NO: 341961 - protein, 14 aa, Homo sapiens
  CDR3 for alpha chain variable domain of TCR clone 170981 (TRAV26-2, TRAJ31)
CIMIPGNNNARLMF

SEQ ID NO: 341962 - protein, 16 aa, Homo sapiens
  CDR3 for beta chain variable domain of TCR clone 170981 (TRBV7-3, TRBJ2-1)
CASSLVSGSSNNEQFF

SEQ ID NO: 341963 - protein, 10 aa, Homo sapiens
  CDR3 for alpha chain variable domain of TCR clone 170982 (TRAV16, TRAJ26)
CAPEELWSEF

SEQ ID NO: 341964 - protein, 15 aa, Homo sapiens
  CDR3 for beta chain variable domain of TCR clone 170982 (TRBV7-2, TRBJ2-3)
SASSLTGTSTDTQYF

SEQ ID NO: 341965 - protein, 14 aa, Homo sapiens
  CDR3 for alpha chain variable domain of TCR clone 170983 (TRAV13-1, TRAJ35)
CAASKGGFGNVLHC

SEQ ID NO: 341966 - protein, 14 aa, Homo sapiens
  CDR3 for beta chain variable domain of TCR clone 170983 (TRBV11-2, TRBJ2-5)
CASGRTGGIETQYF

SEQ ID NO: 341967 - protein, 13 aa, Homo sapiens
  CDR3 for alpha chain variable domain of TCR clone 170984 (TRAV29/DV5, TRAJ9)
CAASETGGFKTIF

SEQ ID NO: 341968 - protein, 15 aa, Homo sapiens
  CDR3 for beta chain variable domain of TCR clone 170984 (TRBV19, TRBJ2-1)
CASSMGSGTGRQQFV

SEQ ID NO: 341969 - protein, 14 aa, Homo sapiens
  CDR3 for alpha chain variable domain of TCR clone 170985 (TRAV12-2, TRAJ40)
CAVKIPSGTYKSIF

SEQ ID NO: 341970 - protein, 14 aa, Homo sapiens
  CDR3 for beta chain variable domain of TCR clone 170985 (TRBV7-8, TRBJ2-7)
CASSPRDRVYEQYF

SEQ ID NO: 341971 - protein, 16 aa, Homo sapiens
  CDR3 for alpha chain variable domain of TCR clone 170986 (TRAV3, TRAJ10)
CAVRDMMAGGGNKLTF

SEQ ID NO: 341972 - protein, 13 aa, Homo sapiens
  CDR3 for beta chain variable domain of TCR clone 170986 (TRBV7-3, TRBJ1-1)
CASSQDWGAEAFF

SEQ ID NO: 341973 - protein, 14 aa, Homo sapiens
  CDR3 for alpha chain variable domain of TCR clone 170987 (TRAV12-2, TRAJ17)
CAALFKAAGNKLTF

SEQ ID NO: 341974 - protein, 16 aa, Homo sapiens
  CDR3 for beta chain variable domain of TCR clone 170987 (TRBV7-3, TRBJ2-2)
CASSLKRGTLSGELFF

SEQ ID NO: 341975 - protein, 14 aa, Homo sapiens
  CDR3 for alpha chain variable domain of TCR clone 170988 (TRAV1-2, TRAJ16)
FAVNRFSDGQKLLF

SEQ ID NO: 341976 - protein, 15 aa, Homo sapiens
  CDR3 for beta chain variable domain of TCR clone 170988 (TRBV5-1, TRBJ2-1)
CASSPPRAPYNEQFF

SEQ ID NO: 341977 - protein, 14 aa, Homo sapiens
  CDR3 for alpha chain variable domain of TCR clone 170989 (TRAV3, TRAJ7)
CAVREEEREQQTRF

SEQ ID NO: 341978 - protein, 13 aa, Homo sapiens
  CDR3 for beta chain variable domain of TCR clone 170989 (TRBV7-3, TRBJ1-1)
CASSQDWGAEAFF

SEQ ID NO: 341979 - protein, 14 aa, Homo sapiens
  CDR3 for alpha chain variable domain of TCR clone 170990 (TRAV12-1, TRAJ17)
CVVNYKAAGNKLTF

SEQ ID NO: 341980 - protein, 15 aa, Homo sapiens
  CDR3 for beta chain variable domain of TCR clone 170990 (TRBV20-1, TRBJ2-7)
CSARVPAAYFYEQYF

SEQ ID NO: 341981 - protein, 11 aa, Homo sapiens
  CDR3 for alpha chain variable domain of TCR clone 170991 (TRAV12-3, TRAJ43)
CAMSISNDMRF

SEQ ID NO: 341982 - protein, 11 aa, Homo sapiens
  CDR3 for beta chain variable domain of TCR clone 170991 (TRBV29-1, TRBJ2-5)
CSEDRTGTQYF

SEQ ID NO: 341983 - protein, 13 aa, Homo sapiens
  CDR3 for alpha chain variable domain of TCR clone 170992 (TRAV1-1, TRAJ28)
CVTSGAGGYQLTF

SEQ ID NO: 341984 - protein, 17 aa, Homo sapiens
  CDR3 for beta chain variable domain of TCR clone 170992 (TRBV18, TRBJ2-2)
CASSQRSSGQGPGELFF

SEQ ID NO: 341985 - protein, 15 aa, Homo sapiens
  CDR3 for alpha chain variable domain of TCR clone 170993 (TRAV12-2, TRAJ43)
CAFDMRFGAGTRLTV

SEQ ID NO: 341986 - protein, 16 aa, Homo sapiens
  CDR3 for beta chain variable domain of TCR clone 170993 (TRBV11-2, TRBJ2-1)
CASARGSYSHHNEQFF

SEQ ID NO: 341987 - protein, 13 aa, Homo sapiens
  CDR3 for alpha chain variable domain of TCR clone 170994 (TRAV24, TRAJ15)
CALSNQAGTALIF

SEQ ID NO: 341988 - protein, 11 aa, Homo sapiens
  CDR3 for beta chain variable domain of TCR clone 170994 (TRBV29-1, TRBJ2-5)
CSEDRTGTQYF

SEQ ID NO: 341989 - protein, 14 aa, Homo sapiens
  CDR3 for alpha chain variable domain of TCR clone 170995 (TRAV17, TRAJ15)
CATAPNQAGPALIF

SEQ ID NO: 341990 - protein, 14 aa, Homo sapiens
  CDR3 for beta chain variable domain of TCR clone 170995 (TRBV19, TRBJ2-7)
CASSMGQGAIEQYF

SEQ ID NO: 341991 - protein, 12 aa, Homo sapiens
  CDR3 for alpha chain variable domain of TCR clone 170996 (TRAV36/DV7, TRAJ39)
CWTNNAGNMLTF

SEQ ID NO: 341992 - protein, 17 aa, Homo sapiens
  CDR3 for beta chain variable domain of TCR clone 170996 (TRBV13, TRBJ2-3)
CASSLSRVAGGRNTQYF

SEQ ID NO: 341993 - protein, 14 aa, Homo sapiens
  CDR3 for alpha chain variable domain of TCR clone 170997 (TRAV8-3, TRAJ39)
CAVGANNAGNMLTF

SEQ ID NO: 341994 - protein, 16 aa, Homo sapiens
  CDR3 for beta chain variable domain of TCR clone 170997 (TRBV12-4, TRBJ1-5)
CASSRPVGGSNQPQHF

SEQ ID NO: 341995 - protein, 13 aa, Homo sapiens
  CDR3 for alpha chain variable domain of TCR clone 170998 (TRAV1-2, TRAJ36)
CAVDQTGANNLFF

SEQ ID NO: 341996 - protein, 14 aa, Homo sapiens
  CDR3 for beta chain variable domain of TCR clone 170998 (TRBV20-1, TRBJ2-5)
CSAREMTKQETQYC

SEQ ID NO: 341997 - protein, 13 aa, Homo sapiens
  CDR3 for alpha chain variable domain of TCR clone 170999 (TRAV27, TRAJ45)
CRSSGGGADGLTF

SEQ ID NO: 341998 - protein, 17 aa, Homo sapiens
  CDR3 for beta chain variable domain of TCR clone 170999 (TRBV11-2, TRBJ2-1)
CASSLYPPGVERNEQFF

SEQ ID NO: 341999 - protein, 16 aa, Homo sapiens
  CDR3 for alpha chain variable domain of TCR clone 171000 (TRAV30, TRAJ24)
CRTEIVDADSWGTFQF

SEQ ID NO: 342000 - protein, 14 aa, Homo sapiens
  CDR3 for beta chain variable domain of TCR clone 171000 (TRBV12-5, TRBJ2-5)
CASGSRTHQETQYF

SEQ ID NO: 342001 - protein, 18 aa, Homo sapiens
  CDR3 for alpha chain variable domain of TCR clone 171001 (TRAV21, TRAJ52)
CAVRPSPAGGTSYGKLTF

SEQ ID NO: 342002 - protein, 17 aa, Homo sapiens
  CDR3 for beta chain variable domain of TCR clone 171001 (TRBV3-1, TRBJ2-5)
CASSNWGGTSGQETQYF

SEQ ID NO: 342003 - protein, 13 aa, Homo sapiens
  CDR3 for alpha chain variable domain of TCR clone 171002 (TRAV20, TRAJ35)
CAVQEGFGNVLHC

SEQ ID NO: 342004 - protein, 14 aa, Homo sapiens
  CDR3 for beta chain variable domain of TCR clone 171002 (TRBV7-2, TRBJ2-7)
CASRSQGAAYEQYF

SEQ ID NO: 342005 - protein, 17 aa, Homo sapiens
  CDR3 for alpha chain variable domain of TCR clone 171003 (TRAV3, TRAJ6)
CAVRDGPRAGGSYIPTF

SEQ ID NO: 342006 - protein, 14 aa, Homo sapiens
  CDR3 for beta chain variable domain of TCR clone 171003 (TRBV7-9, TRBJ2-5)
CASSPAQDQETQYF

SEQ ID NO: 342007 - protein, 14 aa, Homo sapiens
  CDR3 for alpha chain variable domain of TCR clone 171004 (TRAV12-2, TRAJ24)
CAVTPADSWGKLQF

SEQ ID NO: 342008 - protein, 14 aa, Homo sapiens
  CDR3 for beta chain variable domain of TCR clone 171004 (TRBV7-2, TRBJ2-7)
CASSPKTSFYEQYF

SEQ ID NO: 342009 - protein, 14 aa, Homo sapiens
  CDR3 for alpha chain variable domain of TCR clone 171005 (TRAV1-2, TRAJ16)
CAVNRFSDVQKLLF

SEQ ID NO: 342010 - protein, 16 aa, Homo sapiens
  CDR3 for beta chain variable domain of TCR clone 171005 (TRBV28, TRBJ2-1)
CASSSSYSGSLNEQFF

SEQ ID NO: 342011 - protein, 14 aa, Homo sapiens
  CDR3 for alpha chain variable domain of TCR clone 171006 (TRAV13-1, TRAJ35)
CAASKGGFGNVLHC

SEQ ID NO: 342012 - protein, 13 aa, Homo sapiens
  CDR3 for beta chain variable domain of TCR clone 171006 (TRBV19, TRBJ2-7)
CASSIDRTYEQYF

SEQ ID NO: 342013 - protein, 13 aa, Homo sapiens
  CDR3 for alpha chain variable domain of TCR clone 171007 (TRAV3, TRAJ27)
CSVRPLGAGKSTF

SEQ ID NO: 342014 - protein, 12 aa, Homo sapiens
  CDR3 for beta chain variable domain of TCR clone 171007 (TRBV7-9, TRBJ2-7)
CATRTDAYEQYF

SEQ ID NO: 342015 - protein, 13 aa, Homo sapiens
  CDR3 for alpha chain variable domain of TCR clone 171008 (TRAV4, TRAJ28)
CLFIWGWVLPTHF

SEQ ID NO: 342016 - protein, 14 aa, Homo sapiens
  CDR3 for beta chain variable domain of TCR clone 171008 (TRBV7-9, TRBJ2-5)
CASSLDTAQETQYF

SEQ ID NO: 342017 - protein, 13 aa, Homo sapiens
  CDR3 for alpha chain variable domain of TCR clone 171009 (TRAV20, TRAJ37)
CAGCSSNTGKLIF

SEQ ID NO: 342018 - protein, 12 aa, Homo sapiens
  CDR3 for beta chain variable domain of TCR clone 171009 (TRBV12-4, TRBJ1-2)
CASSFIWLHLRF

SEQ ID NO: 342019 - protein, 11 aa, Homo sapiens
  CDR3 for alpha chain variable domain of TCR clone 171010 (TRAV21, TRAJ11)
CAVNGYSTLTF

SEQ ID NO: 342020 - protein, 16 aa, Homo sapiens
  CDR3 for beta chain variable domain of TCR clone 171010 (TRBV4-3, TRBJ2-2)
CAGSHLQGSGTGELFF

SEQ ID NO: 342021 - protein, 17 aa, Homo sapiens
  CDR3 for alpha chain variable domain of TCR clone 171011 (TRAV23/DV6, TRAJ57)
CAASSTLSQGGPEKLVF

SEQ ID NO: 342022 - protein, 13 aa, Homo sapiens
  CDR3 for beta chain variable domain of TCR clone 171011 (TRBV15, TRBJ1-6)
CATSGGLNSPLHF

SEQ ID NO: 342023 - protein, 16 aa, Homo sapiens
  CDR3 for alpha chain variable domain of TCR clone 171012 (TRAV12-2, TRAJ40)
CAVIRGGTSGTYKYIF

SEQ ID NO: 342024 - protein, 16 aa, Homo sapiens
  CDR3 for beta chain variable domain of TCR clone 171012 (TRBV7-9, TRBJ2-1)
WASSDVAGGSYNEQFF

SEQ ID NO: 342025 - protein, 16 aa, Homo sapiens
  CDR3 for alpha chain variable domain of TCR clone 171013 (TRAV30, TRAJ24)
CGTEIVDADSWGKFHF

SEQ ID NO: 342026 - protein, 12 aa, Homo sapiens
  CDR3 for beta chain variable domain of TCR clone 171013 (TRBV29-1, TRBJ2-7)
CSVGQTNYEQYF

SEQ ID NO: 342027 - protein, 11 aa, Homo sapiens
  CDR3 for alpha chain variable domain of TCR clone 171014 (TRAV35, TRAJ30)
CAGPGDDKIIS

SEQ ID NO: 342028 - protein, 14 aa, Homo sapiens
  CDR3 for beta chain variable domain of TCR clone 171014 (TRBV7-6, TRBJ1-6)
CASSQAGGGSPLHF

SEQ ID NO: 342029 - protein, 14 aa, Homo sapiens
  CDR3 for alpha chain variable domain of TCR clone 171015 (TRAV26-1, TRAJ38)
CIADNAGNNRKLIW

SEQ ID NO: 342030 - protein, 16 aa, Homo sapiens
  CDR3 for beta chain variable domain of TCR clone 171015 (TRBV29-1, TRBJ2-7)
CSVEDAEDGTAYEQYF

SEQ ID NO: 342031 - protein, 22 aa, Homo sapiens
  CDR3 for alpha chain variable domain of TCR clone 171016 (TRAV4, TRAJ37)
CLVGDGRLWQHRQTNLWARANF

SEQ ID NO: 342032 - protein, 15 aa, Homo sapiens
  CDR3 for beta chain variable domain of TCR clone 171016 (TRBV6-6, TRBJ1-1)
CASSYASGAGTEAFF

SEQ ID NO: 342033 - protein, 13 aa, Homo sapiens
  CDR3 for alpha chain variable domain of TCR clone 171017 (TRAV12-1, TRAJ7)
CVVNMRGNNRLAF

SEQ ID NO: 342034 - protein, 15 aa, Homo sapiens
  CDR3 for beta chain variable domain of TCR clone 171017 (TRBV27, TRBJ2-3)
CASSLGLAAADTQYF

SEQ ID NO: 342035 - protein, 21 aa, Homo sapiens
  CDR3 for alpha chain variable domain of TCR clone 171018 (TRAV26-1, TRAJ17)
CCVLLHRQSSGSKAAANKRTF

SEQ ID NO: 342036 - protein, 14 aa, Homo sapiens
  CDR3 for beta chain variable domain of TCR clone 171018 (TRBV28, TRBJ1-2)
CASRIQGANYGYTF

SEQ ID NO: 342037 - protein, 11 aa, Homo sapiens
  CDR3 for alpha chain variable domain of TCR clone 171019 (TRAV21, TRAJ27)
CAVRMQANQPL

SEQ ID NO: 342038 - protein, 13 aa, Homo sapiens
  CDR3 for beta chain variable domain of TCR clone 171019 (TRBV7-9, TRBJ1-2)
CASSLKQNYGYTF

SEQ ID NO: 342039 - protein, 15 aa, Homo sapiens
  CDR3 for alpha chain variable domain of TCR clone 171020 (TRAV26-1, TRAJ23)
CIVRVAGYQGGNLIF

SEQ ID NO: 342040 - protein, 18 aa, Homo sapiens
  CDR3 for beta chain variable domain of TCR clone 171020 (TRBV28, TRBJ2-1)
CASSSTSGRANSYNEQFF

SEQ ID NO: 342041 - protein, 15 aa, Homo sapiens
  CDR3 for alpha chain variable domain of TCR clone 171021 (TRAV3, TRAJ22)
CAVRDRGGSARQLTF

SEQ ID NO: 342042 - protein, 13 aa, Homo sapiens
  CDR3 for beta chain variable domain of TCR clone 171021 (TRBV2, TRBJ2-3)
CASILAGGQGQYF

SEQ ID NO: 342043 - protein, 12 aa, Homo sapiens
  CDR3 for alpha chain variable domain of TCR clone 171022 (TRAV30, TRAJ43)
CGTEERGNDMRF

SEQ ID NO: 342044 - protein, 15 aa, Homo sapiens
  CDR3 for beta chain variable domain of TCR clone 171022 (TRBV11-2, TRBJ2-1)
CASSLTSGGYNEQFF

SEQ ID NO: 342045 - protein, 15 aa, Homo sapiens
  CDR3 for alpha chain variable domain of TCR clone 171023 (TRAV8-3, TRAJ45)
CASSYSGGGADGLTF

SEQ ID NO: 342046 - protein, 15 aa, Homo sapiens
  CDR3 for beta chain variable domain of TCR clone 171023 (TRBV7-8, TRBJ2-1)
CASSLHGGPYNEQFF

SEQ ID NO: 342047 - protein, 17 aa, Homo sapiens
  CDR3 for alpha chain variable domain of TCR clone 171024 (TRAV3, TRAJ42)
CAVRDRDYGGSQGNLIF

SEQ ID NO: 342048 - protein, 14 aa, Homo sapiens
  CDR3 for beta chain variable domain of TCR clone 171024 (TRBV7-2, TRBJ2-5)
CASSPRGSAETQYF

SEQ ID NO: 342049 - protein, 14 aa, Homo sapiens
  CDR3 for alpha chain variable domain of TCR clone 171025 (TRAV1-2, TRAJ16)
CAVNRFSAGQKLLF

SEQ ID NO: 342050 - protein, 18 aa, Homo sapiens
  CDR3 for beta chain variable domain of TCR clone 171025 (TRBV20-1, TRBJ2-3)
CSASGLAGGPGTTDTQYF

SEQ ID NO: 342051 - protein, 13 aa, Homo sapiens
  CDR3 for alpha chain variable domain of TCR clone 171026 (TRAV3, TRAJ27)
CAVRHLGAGKSTF

SEQ ID NO: 342052 - protein, 12 aa, Homo sapiens
  CDR3 for beta chain variable domain of TCR clone 171026 (TRBV7-9, TRBJ2-7)
CATGTDAYEQYF

SEQ ID NO: 342053 - protein, 13 aa, Homo sapiens
  CDR3 for alpha chain variable domain of TCR clone 171027 (TRAV13-1, TRAJ12)
CAASPASSYKLIF

SEQ ID NO: 342054 - protein, 16 aa, Homo sapiens
  CDR3 for beta chain variable domain of TCR clone 171027 (TRBV15, TRBJ2-1)
CATSRERLAGAYEQFF

SEQ ID NO: 342055 - protein, 15 aa, Homo sapiens
  CDR3 for alpha chain variable domain of TCR clone 171028 (TRAV26-1, TRAJ39)
CIVRVYNNAGNMLTF

SEQ ID NO: 342056 - protein, 15 aa, Homo sapiens
  CDR3 for beta chain variable domain of TCR clone 171028 (TRBV6-6, TRBJ2-7)
CASSYSYGGSYEQYF

SEQ ID NO: 342057 - protein, 13 aa, Homo sapiens
  CDR3 for alpha chain variable domain of TCR clone 171029 (TRAV38-2/DV8, TRAJ34)
CAYRNDNTDKLIF

SEQ ID NO: 342058 - protein, 15 aa, Homo sapiens
  CDR3 for beta chain variable domain of TCR clone 171029 (TRBV6-3, TRBJ2-7)
CASSSPGTVFYEQYF

SEQ ID NO: 342059 - protein, 16 aa, Homo sapiens
  CDR3 for alpha chain variable domain of TCR clone 171030 (TRAV12-2, TRAJ32)
CAVNLGQGGATTKLIF

SEQ ID NO: 342060 - protein, 15 aa, Homo sapiens
  CDR3 for beta chain variable domain of TCR clone 171030 (TRBV27, TRBJ2-1)
CASSNGGGSSNEQFF

SEQ ID NO: 342061 - protein, 15 aa, Homo sapiens
  CDR3 for alpha chain variable domain of TCR clone 171031 (TRAV8-3, TRAJ45)
CASSYSGGGADGLTF

SEQ ID NO: 342062 - protein, 13 aa, Homo sapiens
  CDR3 for beta chain variable domain of TCR clone 171031 (TRBV20-1, TRBJ1-1)
CSARVGGNTEAFF

SEQ ID NO: 342063 - protein, 15 aa, Homo sapiens
  CDR3 for alpha chain variable domain of TCR clone 171032 (TRAV23/DV6, TRAJ37)
CASGEGSSNTGKLII

SEQ ID NO: 342064 - protein, 17 aa, Homo sapiens
  CDR3 for beta chain variable domain of TCR clone 171032 (TRBV20-1, TRBJ2-7)
CSATRAGGVAGVEEQYF

SEQ ID NO: 342065 - protein, 14 aa, Homo sapiens
  CDR3 for alpha chain variable domain of TCR clone 171033 (TRAV13-1, TRAJ24)
CAARRTDRWGKLQF

SEQ ID NO: 342066 - protein, 15 aa, Homo sapiens
  CDR3 for beta chain variable domain of TCR clone 171033 (TRBV6-1, TRBJ2-1)
CASSAAVAGSVEQFF

SEQ ID NO: 342067 - protein, 16 aa, Homo sapiens
  CDR3 for alpha chain variable domain of TCR clone 171034 (TRAV30, TRAJ24)
CGTEIVDANSWGKFQF

SEQ ID NO: 342068 - protein, 13 aa, Homo sapiens
  CDR3 for beta chain variable domain of TCR clone 171034 (TRBV7-3, TRBJ1-1)
CASSQDWGAEAFF

SEQ ID NO: 342069 - protein, 10 aa, Homo sapiens
  CDR3 for alpha chain variable domain of TCR clone 171035 (TRAV12-2, TRAJ10)
CAAWTGVETH

SEQ ID NO: 342070 - protein, 14 aa, Homo sapiens
  CDR3 for beta chain variable domain of TCR clone 171035 (TRBV7-2, TRBJ1-5)
CASSRDGSNQPQHF

SEQ ID NO: 342071 - protein, 15 aa, Homo sapiens
  CDR3 for alpha chain variable domain of TCR clone 171036 (TRAV12-3, TRAJ6)
CAMSATTGGSYIPTF

SEQ ID NO: 342072 - protein, 13 aa, Homo sapiens
  CDR3 for beta chain variable domain of TCR clone 171036 (TRBV7-6, TRBJ2-3)
CASSLRSDNTQYF

SEQ ID NO: 342073 - protein, 15 aa, Homo sapiens
  CDR3 for alpha chain variable domain of TCR clone 171037 (TRAV23/DV6, TRAJ30)
CAASSQESRDDKIIF

SEQ ID NO: 342074 - protein, 17 aa, Homo sapiens
  CDR3 for beta chain variable domain of TCR clone 171037 (TRBV4-3, TRBJ2-1)
CASSQLSSGRASGEQFF

SEQ ID NO: 342075 - protein, 14 aa, Homo sapiens
  CDR3 for alpha chain variable domain of TCR clone 171038 (TRAV8-1, TRAJ4)
CAVKFSGGYNKLIF

SEQ ID NO: 342076 - protein, 12 aa, Homo sapiens
  CDR3 for beta chain variable domain of TCR clone 171038 (TRBV28, TRBJ2-7)
CASSRSGYEQYF

SEQ ID NO: 342077 - protein, 14 aa, Homo sapiens
  CDR3 for alpha chain variable domain of TCR clone 171039 (TRAV12-1, TRAJ30)
CVPTGTNRDDKIIF

SEQ ID NO: 342078 - protein, 11 aa, Homo sapiens
  CDR3 for beta chain variable domain of TCR clone 171039 (TRBV4-1, TRBJ2-2)
YASEHTGELFF

SEQ ID NO: 342079 - protein, 17 aa, Homo sapiens
  CDR3 for alpha chain variable domain of TCR clone 171040 (TRAV3, TRAJ6)
CAVRDGPRAGGSYIPTL

SEQ ID NO: 342080 - protein, 14 aa, Homo sapiens
  CDR3 for beta chain variable domain of TCR clone 171040 (TRBV7-2, TRBJ2-7)
CASSPKTGFYEQYF

SEQ ID NO: 342081 - protein, 16 aa, Homo sapiens
  CDR3 for alpha chain variable domain of TCR clone 171041 (TRAV3, TRAJ37)
CAVRPHGSGNTGKLIF

SEQ ID NO: 342082 - protein, 16 aa, Homo sapiens
  CDR3 for beta chain variable domain of TCR clone 171041 (TRBV5-1, TRBJ2-2)
CASSLWDTTNTGELFF

SEQ ID NO: 342083 - protein, 18 aa, Homo sapiens
  CDR3 for alpha chain variable domain of TCR clone 171042 (TRAV21, TRAJ52)
CAVRPSPAGGTSYGKLTF

SEQ ID NO: 342084 - protein, 15 aa, Homo sapiens
  CDR3 for beta chain variable domain of TCR clone 171042 (TRBV7-6, TRBJ2-1)
CASSSLAGEGNEQFF

SEQ ID NO: 342085 - protein, 16 aa, Homo sapiens
  CDR3 for alpha chain variable domain of TCR clone 171043 (TRAV26-2, TRAJ45)
CTTASPFGGGADGLTF

SEQ ID NO: 342086 - protein, 20 aa, Homo sapiens
  CDR3 for beta chain variable domain of TCR clone 171043 (TRBV28, TRBJ2-1)
CASTPIGRSPGLAGGNEQFF

SEQ ID NO: 342087 - protein, 14 aa, Homo sapiens
  CDR3 for alpha chain variable domain of TCR clone 171044 (TRAV13-1, TRAJ40)
CAARSTSGTYKYIF

SEQ ID NO: 342088 - protein, 16 aa, Homo sapiens
  CDR3 for beta chain variable domain of TCR clone 171044 (TRBV27, TRBJ2-2)
CASSFRGLVRTGELFF

SEQ ID NO: 342089 - protein, 17 aa, Homo sapiens
  CDR3 for alpha chain variable domain of TCR clone 171045 (TRAV1-2, TRAJ8)
CAVRDPDENTGFKKLVF

SEQ ID NO: 342090 - protein, 16 aa, Homo sapiens
  CDR3 for beta chain variable domain of TCR clone 171045 (TRBV7-9, TRBJ2-2)
CASSGFGGANTGELFF

SEQ ID NO: 342091 - protein, 17 aa, Homo sapiens
  CDR3 for alpha chain variable domain of TCR clone 171046 (TRAV26-1, TRAJ11)
CIVRVGQSNSGYSTLIF

SEQ ID NO: 342092 - protein, 15 aa, Homo sapiens
  CDR3 for beta chain variable domain of TCR clone 171046 (TRBV27, TRBJ2-5)
CASSLIPSGGETQYF

SEQ ID NO: 342093 - protein, 19 aa, Homo sapiens
  CDR3 for alpha chain variable domain of TCR clone 171047 (TRAV26-1, TRAJ10)
CIVRVGLEVWNQGGNKPTF

SEQ ID NO: 342094 - protein, 11 aa, Homo sapiens
  CDR3 for beta chain variable domain of TCR clone 171047 (TRBV6-1, TRBJ2-1)
CASISSNEQFF

SEQ ID NO: 342095 - protein, 12 aa, Homo sapiens
  CDR3 for alpha chain variable domain of TCR clone 171048 (TRAV17, TRAJ30)
CAADARDDKIIF

SEQ ID NO: 342096 - protein, 15 aa, Homo sapiens
  CDR3 for beta chain variable domain of TCR clone 171048 (TRBV4-1, TRBJ2-1)
CASSQGGELYNEQFF

SEQ ID NO: 342097 - protein, 14 aa, Homo sapiens
  CDR3 for alpha chain variable domain of TCR clone 171049 (TRAV1-2, TRAJ16)
CAVNRFSDGQKLLS

SEQ ID NO: 342098 - protein, 15 aa, Homo sapiens
  CDR3 for beta chain variable domain of TCR clone 171049 (TRBV9, TRBJ1-6)
CASSVAGTGDSPRHF

SEQ ID NO: 342099 - protein, 11 aa, Homo sapiens
  CDR3 for alpha chain variable domain of TCR clone 171050 (TRAV3, TRAJ21)
SALGNFNKFYF

SEQ ID NO: 342100 - protein, 16 aa, Homo sapiens
  CDR3 for beta chain variable domain of TCR clone 171050 (TRBV19, TRBJ2-1)
CASSKAGPSSYNEQFF

SEQ ID NO: 342101 - protein, 11 aa, Homo sapiens
  CDR3 for alpha chain variable domain of TCR clone 171051 (TRAV35, TRAJ30)
CAGPGYDKIIF

SEQ ID NO: 342102 - protein, 14 aa, Homo sapiens
  CDR3 for beta chain variable domain of TCR clone 171051 (TRBV7-6, TRBJ1-6)
CASSQAGGGSPLHF

SEQ ID NO: 342103 - protein, 14 aa, Homo sapiens
  CDR3 for alpha chain variable domain of TCR clone 171052 (TRAV12-2, TRAJ44)
CAVNPVGTASKLTF

SEQ ID NO: 342104 - protein, 16 aa, Homo sapiens
  CDR3 for beta chain variable domain of TCR clone 171052 (TRBV7-3, TRBJ2-2)
CASSLKRGTLSGELFF

SEQ ID NO: 342105 - protein, 15 aa, Homo sapiens
  CDR3 for alpha chain variable domain of TCR clone 171053 (TRAV2, TRAJ45)
CAVDGTGGGADGLTF

SEQ ID NO: 342106 - protein, 15 aa, Homo sapiens
  CDR3 for beta chain variable domain of TCR clone 171053 (TRBV4-1, TRBJ2-7)
CASSQNTGRLYEQYF

SEQ ID NO: 342107 - protein, 16 aa, Homo sapiens
  CDR3 for alpha chain variable domain of TCR clone 171054 (TRAV3, TRAJ37)
CAVRGKGSGNTGRLIF

SEQ ID NO: 342108 - protein, 14 aa, Homo sapiens
  CDR3 for beta chain variable domain of TCR clone 171054 (TRBV7-2, TRBJ2-7)
CASSPKTSFYEQYF

SEQ ID NO: 342109 - protein, 13 aa, Homo sapiens
  CDR3 for alpha chain variable domain of TCR clone 171055 (TRAV8-6, TRAJ49)
CAVITNTGNQFYF

SEQ ID NO: 342110 - protein, 14 aa, Homo sapiens
  CDR3 for beta chain variable domain of TCR clone 171055 (TRBV7-2, TRBJ2-2)
CASSLNSNTGELFF

SEQ ID NO: 342111 - protein, 14 aa, Homo sapiens
  CDR3 for alpha chain variable domain of TCR clone 171056 (TRAV29/DV5, TRAJ32)
CAAAYGCATNKLIF

SEQ ID NO: 342112 - protein, 11 aa, Homo sapiens
  CDR3 for beta chain variable domain of TCR clone 171056 (TRBV11-2, TRBJ2-2)
CASSLPGELFF

SEQ ID NO: 342113 - protein, 17 aa, Homo sapiens
  CDR3 for alpha chain variable domain of TCR clone 171057 (TRAV26-1, TRAJ37)
CIVRVITVSSNTGKLNF

SEQ ID NO: 342114 - protein, 15 aa, Homo sapiens
  CDR3 for beta chain variable domain of TCR clone 171057 (TRBV10-1, TRBJ2-3)
CASSATSGGFDTQYF

SEQ ID NO: 342115 - protein, 13 aa, Homo sapiens
  CDR3 for alpha chain variable domain of TCR clone 171058 (TRAV25, TRAJ10)
CAGRTGEGNKLTF

SEQ ID NO: 342116 - protein, 15 aa, Homo sapiens
  CDR3 for beta chain variable domain of TCR clone 171058 (TRBV19, TRBJ2-1)
CASSSPGVPLDEQFF

SEQ ID NO: 342117 - protein, 17 aa, Homo sapiens
  CDR3 for alpha chain variable domain of TCR clone 171059 (TRAV26-1, TRAJ53)
CIVRVDDSGGSNYKLTF

SEQ ID NO: 342118 - protein, 15 aa, Homo sapiens
  CDR3 for beta chain variable domain of TCR clone 171059 (TRBV11-2, TRBJ2-2)
CASSSDSVNAGELFF

SEQ ID NO: 342119 - protein, 17 aa, Homo sapiens
  CDR3 for alpha chain variable domain of TCR clone 171060 (TRAV8-2, TRAJ17)
CVVSDRRFKAAGNKLTL

SEQ ID NO: 342120 - protein, 18 aa, Homo sapiens
  CDR3 for beta chain variable domain of TCR clone 171060 (TRBV7-9, TRBJ2-7)
CASSLTTSGSRTWYERYF

SEQ ID NO: 342121 - protein, 18 aa, Homo sapiens
  CDR3 for alpha chain variable domain of TCR clone 171061 (TRAV8-2, TRAJ8)
CVVSDRSADEHRLSETCI

SEQ ID NO: 342122 - protein, 16 aa, Homo sapiens
  CDR3 for beta chain variable domain of TCR clone 171061 (TRBV12-5, TRBJ2-5)
CASGPRTSGNQETQYF

SEQ ID NO: 342123 - protein, 11 aa, Homo sapiens
  CDR3 for alpha chain variable domain of TCR clone 171062 (TRAV12-3, TRAJ41)
CAMNAREAVNF

SEQ ID NO: 342124 - protein, 16 aa, Homo sapiens
  CDR3 for beta chain variable domain of TCR clone 171062 (TRBV7-8, TRBJ2-3)
CASSTEGQRETDTQYF

SEQ ID NO: 342125 - protein, 16 aa, Homo sapiens
  CDR3 for alpha chain variable domain of TCR clone 171063 (TRAV30, TRAJ24)
CGTEIVDANSWGKFQF

SEQ ID NO: 342126 - protein, 15 aa, Homo sapiens
  CDR3 for beta chain variable domain of TCR clone 171063 (TRBV28, TRBJ2-1)
CASSIIAGGRSEQFF

SEQ ID NO: 342127 - protein, 16 aa, Homo sapiens
  CDR3 for alpha chain variable domain of TCR clone 171064 (TRAV20, TRAJ26)
CAVQHRRDNYGQNFVV

SEQ ID NO: 342128 - protein, 15 aa, Homo sapiens
  CDR3 for beta chain variable domain of TCR clone 171064 (TRBV7-2, TRBJ2-7)
CASSWGQGAIYEQYF

SEQ ID NO: 342129 - protein, 14 aa, Homo sapiens
  CDR3 for alpha chain variable domain of TCR clone 171065 (TRAV26-1, TRAJ34)
CIVRVAYNTDKLIF

SEQ ID NO: 342130 - protein, 15 aa, Homo sapiens
  CDR3 for beta chain variable domain of TCR clone 171065 (TRBV6-3, TRBJ2-7)
CASSSPGTVFYEQYF

SEQ ID NO: 342131 - protein, 16 aa, Homo sapiens
  CDR3 for alpha chain variable domain of TCR clone 171066 (TRAV38-1, TRAJ37)
CAFKGDGSSNTGKLIF

SEQ ID NO: 342132 - protein, 13 aa, Homo sapiens
  CDR3 for beta chain variable domain of TCR clone 171066 (TRBV12-4, TRBJ2-5)
CASSLFRRETQFF

SEQ ID NO: 342133 - protein, 11 aa, Homo sapiens
  CDR3 for alpha chain variable domain of TCR clone 171067 (TRAV13-1, TRAJ52)
PGGTSYGKLTF

SEQ ID NO: 342134 - protein, 16 aa, Homo sapiens
  CDR3 for beta chain variable domain of TCR clone 171067 (TRBV28, TRBJ2-7)
SASSPWVATGDLSQYF

SEQ ID NO: 342135 - protein, 13 aa, Homo sapiens
  CDR3 for alpha chain variable domain of TCR clone 171068 (TRAV1-2, TRAJ12)
CAVSMDSSYKLTF

SEQ ID NO: 342136 - protein, 15 aa, Homo sapiens
  CDR3 for beta chain variable domain of TCR clone 171068 (TRBV27, TRBJ2-5)
CASSLIPSGGETQYF

SEQ ID NO: 342137 - protein, 15 aa, Homo sapiens
  CDR3 for alpha chain variable domain of TCR clone 171069 (TRAV27, TRAJ38)
CAARRNAGNNRKLIW

SEQ ID NO: 342138 - protein, 15 aa, Homo sapiens
  CDR3 for beta chain variable domain of TCR clone 171069 (TRBV5-1, TRBJ2-1)
CASSPPRAPDNEQFF

SEQ ID NO: 342139 - protein, 14 aa, Homo sapiens
  CDR3 for alpha chain variable domain of TCR clone 171070 (TRAV12-1, TRAJ17)
CVVNYKAAGNKLTF

SEQ ID NO: 342140 - protein, 14 aa, Homo sapiens
  CDR3 for beta chain variable domain of TCR clone 171070 (TRBV7-9, TRBJ1-6)
CASSVMTDYSPLHF

SEQ ID NO: 342141 - protein, 14 aa, Homo sapiens
  CDR3 for alpha chain variable domain of TCR clone 171071 (TRAV16, TRAJ42)
CALLAGGSQGNLIF

SEQ ID NO: 342142 - protein, 16 aa, Homo sapiens
  CDR3 for beta chain variable domain of TCR clone 171071 (TRBV4-1, TRBJ1-4)
CASSQDLRRGGEKLFF

SEQ ID NO: 342143 - protein, 14 aa, Homo sapiens
  CDR3 for alpha chain variable domain of TCR clone 171072 (TRAV8-4, TRAJ16)
CAVSPVRRWPEAAL

SEQ ID NO: 342144 - protein, 14 aa, Homo sapiens
  CDR3 for beta chain variable domain of TCR clone 171072 (TRBV23-1, TRBJ2-5)
CASSFLRSQETQYF

SEQ ID NO: 342145 - protein, 11 aa, Homo sapiens
  CDR3 for alpha chain variable domain of TCR clone 171073 (TRAV3, TRAJ21)
CAVGNFNKFYF

SEQ ID NO: 342146 - protein, 14 aa, Homo sapiens
  CDR3 for beta chain variable domain of TCR clone 171073 (TRBV25-1, TRBJ1-1)
CASTHLGGDTEAFF

SEQ ID NO: 342147 - protein, 14 aa, Homo sapiens
  CDR3 for alpha chain variable domain of TCR clone 171074 (TRAV16, TRAJ54)
CALSLIQGAQKLVF

SEQ ID NO: 342148 - protein, 14 aa, Homo sapiens
  CDR3 for beta chain variable domain of TCR clone 171074 (TRBV7-9, TRBJ2-2)
CASSLGHRTGELFF

SEQ ID NO: 342149 - protein, 15 aa, Homo sapiens
  CDR3 for alpha chain variable domain of TCR clone 171075 (TRAV12-3, TRAJ6)
CAMSATTGGSYIPTF

SEQ ID NO: 342150 - protein, 17 aa, Homo sapiens
  CDR3 for beta chain variable domain of TCR clone 171075 (TRBV28, TRBJ2-1)
CASSSARQALTYNEQFF

SEQ ID NO: 342151 - protein, 14 aa, Homo sapiens
  CDR3 for alpha chain variable domain of TCR clone 171076 (TRAV26-1, TRAJ38)
CIADNAGNNRKLIW

SEQ ID NO: 342152 - protein, 14 aa, Homo sapiens
  CDR3 for beta chain variable domain of TCR clone 171076 (TRBV3-1, TRBJ2-5)
CASSQGPDQETQYF

SEQ ID NO: 342153 - protein, 16 aa, Homo sapiens
  CDR3 for alpha chain variable domain of TCR clone 171077 (TRAV21, TRAJ17)
RAVRPGEEAAGNKLTI

SEQ ID NO: 342154 - protein, 16 aa, Homo sapiens
  CDR3 for beta chain variable domain of TCR clone 171077 (TRBV2, TRBJ2-7)
CASSEPWTGPSYEQYF

SEQ ID NO: 342155 - protein, 19 aa, Homo sapiens
  CDR3 for alpha chain variable domain of TCR clone 171078 (TRAV1-2, TRAJ26)
CLLPLCCERPANYGQNFVF

SEQ ID NO: 342156 - protein, 15 aa, Homo sapiens
  CDR3 for beta chain variable domain of TCR clone 171078 (TRBV9, TRBJ1-6)
CASSVAGTGDSPLHF

SEQ ID NO: 342157 - protein, 14 aa, Homo sapiens
  CDR3 for alpha chain variable domain of TCR clone 171079 (TRAV13-2, TRAJ6)
CAERGSGGSYIPTF

SEQ ID NO: 342158 - protein, 13 aa, Homo sapiens
  CDR3 for beta chain variable domain of TCR clone 171079 (TRBV19, TRBJ1-2)
CASSQGQVYGYTF

SEQ ID NO: 342159 - protein, 15 aa, Homo sapiens
  CDR3 for alpha chain variable domain of TCR clone 171080 (TRAV8-3, TRAJ41)
CAVGSKSNSGYALNF

SEQ ID NO: 342160 - protein, 17 aa, Homo sapiens
  CDR3 for beta chain variable domain of TCR clone 171080 (TRBV25-1, TRBJ2-1)
CASSAYGQGRGVYEQFF

SEQ ID NO: 342161 - protein, 14 aa, Homo sapiens
  CDR3 for alpha chain variable domain of TCR clone 171081 (TRAV8-3, TRAJ4)
CAVGAAGGYNKLIF

SEQ ID NO: 342162 - protein, 15 aa, Homo sapiens
  CDR3 for beta chain variable domain of TCR clone 171081 (TRBV20-1, TRBJ2-5)
CSAPPRTGFGETQSF

SEQ ID NO: 342163 - protein, 15 aa, Homo sapiens
  CDR3 for alpha chain variable domain of TCR clone 171082 (TRAV26-2, TRAJ13)
CILRDLSGGYQKVTF

SEQ ID NO: 342164 - protein, 15 aa, Homo sapiens
  CDR3 for beta chain variable domain of TCR clone 171082 (TRBV28, TRBJ1-3)
CASSMGWASGNTLYF

SEQ ID NO: 342165 - protein, 13 aa, Homo sapiens
  CDR3 for alpha chain variable domain of TCR clone 171083 (TRAV12-2, TRAJ20)
CAGYPSNDYKLSF

SEQ ID NO: 342166 - protein, 18 aa, Homo sapiens
  CDR3 for beta chain variable domain of TCR clone 171083 (TRBV25-1, TRBJ1-2)
CASSGLQNGQGLIFGYTF

SEQ ID NO: 342167 - protein, 14 aa, Homo sapiens
  CDR3 for alpha chain variable domain of TCR clone 171084 (TRAV1-2, TRAJ8)
CAVREDPGFQQLVF

SEQ ID NO: 342168 - protein, 16 aa, Homo sapiens
  CDR3 for beta chain variable domain of TCR clone 171084 (TRBV7-3, TRBJ2-2)
CASSLKRGTLSGELFF

SEQ ID NO: 342169 - protein, 12 aa, Homo sapiens
  CDR3 for alpha chain variable domain of TCR clone 171085 (TRAV13-1, TRAJ53)
AASGGSNHKLTF

SEQ ID NO: 342170 - protein, 15 aa, Homo sapiens
  CDR3 for beta chain variable domain of TCR clone 171085 (TRBV20-1, TRBJ2-7)
CSARGPLAGGREQYF

SEQ ID NO: 342171 - protein, 16 aa, Homo sapiens
  CDR3 for alpha chain variable domain of TCR clone 171086 (TRAV3, TRAJ21)
CAVRDIERGNFHKFYF

SEQ ID NO: 342172 - protein, 13 aa, Homo sapiens
  CDR3 for beta chain variable domain of TCR clone 171086 (TRBV27, TRBJ2-7)
CASSLTTGYEQYF

SEQ ID NO: 342173 - protein, 10 aa, Homo sapiens
  CDR3 for alpha chain variable domain of TCR clone 171087 (TRAV12-2, TRAJ31)
CAVNNARLMF

SEQ ID NO: 342174 - protein, 16 aa, Homo sapiens
  CDR3 for beta chain variable domain of TCR clone 171087 (TRBV7-2, TRBJ1-2)
CASSSNQDRRGHGYTF

SEQ ID NO: 342175 - protein, 15 aa, Homo sapiens
  CDR3 for alpha chain variable domain of TCR clone 171088 (TRAV21, TRAJ45)
CAVSYSGGGADGLTF

SEQ ID NO: 342176 - protein, 15 aa, Homo sapiens
  CDR3 for beta chain variable domain of TCR clone 171088 (TRBV4-1, TRBJ2-7)
CASSQNTGRLYEQYF

SEQ ID NO: 342177 - protein, 15 aa, Homo sapiens
  CDR3 for alpha chain variable domain of TCR clone 171089 (TRAV8-3, TRAJ27)
CAVGPSKTNAGNPPL

SEQ ID NO: 342178 - protein, 15 aa, Homo sapiens
  CDR3 for beta chain variable domain of TCR clone 171089 (TRBV7-2, TRBJ2-1)
CASSSGLAGGNEQFF

SEQ ID NO: 342179 - protein, 14 aa, Homo sapiens
  CDR3 for alpha chain variable domain of TCR clone 171090 (TRAV12-3, TRAJ10)
SPLPLTGGGNKLTF

SEQ ID NO: 342180 - protein, 12 aa, Homo sapiens
  CDR3 for beta chain variable domain of TCR clone 171090 (TRBV7-9, TRBJ2-7)
CASSIKREEQYF

SEQ ID NO: 342181 - protein, 14 aa, Homo sapiens
  CDR3 for alpha chain variable domain of TCR clone 171091 (TRAV12-2, TRAJ13)
CAVKKTGGYQKVTF

SEQ ID NO: 342182 - protein, 13 aa, Homo sapiens
  CDR3 for beta chain variable domain of TCR clone 171091 (TRBV20-1, TRBJ1-1)
CSARLGLGTEAFF

SEQ ID NO: 342183 - protein, 15 aa, Homo sapiens
  CDR3 for alpha chain variable domain of TCR clone 171092 (TRAV26-1, TRAJ15)
CIVRPANQAGTALIF

SEQ ID NO: 342184 - protein, 12 aa, Homo sapiens
  CDR3 for beta chain variable domain of TCR clone 171092 (TRBV7-3, TRBJ2-5)
RASSPGKETQYF

SEQ ID NO: 342185 - protein, 15 aa, Homo sapiens
  CDR3 for alpha chain variable domain of TCR clone 171093 (TRAV12-3, TRAJ42)
CAMSGHGGSQGNLIF

SEQ ID NO: 342186 - protein, 13 aa, Homo sapiens
  CDR3 for beta chain variable domain of TCR clone 171093 (TRBV19, TRBJ2-5)
CARSGRGGETQYF

SEQ ID NO: 342187 - protein, 11 aa, Homo sapiens
  CDR3 for alpha chain variable domain of TCR clone 171094 (TRAV35, TRAJ30)
CAGEGDDKIIF

SEQ ID NO: 342188 - protein, 14 aa, Homo sapiens
  CDR3 for beta chain variable domain of TCR clone 171094 (TRBV15, TRBJ2-5)
CATSGDRGQETQYF

SEQ ID NO: 342189 - protein, 13 aa, Homo sapiens
  CDR3 for alpha chain variable domain of TCR clone 171095 (TRAV12-3, TRAJ33)
CAMSVNSNYQLIW

SEQ ID NO: 342190 - protein, 12 aa, Homo sapiens
  CDR3 for beta chain variable domain of TCR clone 171095 (TRBV11-3, TRBJ2-2)
CASSLGGGELFF

SEQ ID NO: 342191 - protein, 16 aa, Homo sapiens
  CDR3 for alpha chain variable domain of TCR clone 171096 (TRAV27, TRAJ53)
CAALEGSGGSNYKLTF

SEQ ID NO: 342192 - protein, 15 aa, Homo sapiens
  CDR3 for beta chain variable domain of TCR clone 171096 (TRBV20-1, TRBJ1-1)
CSASRGVTGNTEAFF

SEQ ID NO: 342193 - protein, 14 aa, Homo sapiens
  CDR3 for alpha chain variable domain of TCR clone 171097 (TRAV12-1, TRAJ13)
CVVIDSGGYQKVTF

SEQ ID NO: 342194 - protein, 17 aa, Homo sapiens
  CDR3 for beta chain variable domain of TCR clone 171097 (TRBV15, TRBJ1-5)
CAASRAPPGTRNQPQHF

SEQ ID NO: 342195 - protein, 12 aa, Homo sapiens
  CDR3 for alpha chain variable domain of TCR clone 171098 (TRAV25, TRAJ48)
SLSNFGNEKLTF

SEQ ID NO: 342196 - protein, 16 aa, Homo sapiens
  CDR3 for beta chain variable domain of TCR clone 171098 (TRBV28, TRBJ2-1)
CASRQRTSGRASDRFF

SEQ ID NO: 342197 - protein, 13 aa, Homo sapiens
  CDR3 for alpha chain variable domain of TCR clone 171099 (TRAV12-1, TRAJ29)
CVVNGPGTTPLVF

SEQ ID NO: 342198 - protein, 13 aa, Homo sapiens
  CDR3 for beta chain variable domain of TCR clone 171099 (TRBV7-2, TRBJ2-5)
CASSRGGLETQYF

SEQ ID NO: 342199 - protein, 17 aa, Homo sapiens
  CDR3 for alpha chain variable domain of TCR clone 171100 (TRAV23/DV6, TRAJ57)
CAASSTLSQGVSETLVF

SEQ ID NO: 342200 - protein, 14 aa, Homo sapiens
  CDR3 for beta chain variable domain of TCR clone 171100 (TRBV25-1, TRBJ1-1)
CASTHLGGNTEAFF

SEQ ID NO: 342201 - protein, 15 aa, Homo sapiens
  CDR3 for alpha chain variable domain of TCR clone 171101 (TRAV13-1, TRAJ57)
RAASNTQGGFEKLVF

SEQ ID NO: 342202 - protein, 16 aa, Homo sapiens
  CDR3 for beta chain variable domain of TCR clone 171101 (TRBV19, TRBJ2-1)
CASSKAGPSSYNEQFF

SEQ ID NO: 342203 - protein, 14 aa, Homo sapiens
  CDR3 for alpha chain variable domain of TCR clone 171102 (TRAV2, TRAJ23)
CAVGLRNQGGKLIF

SEQ ID NO: 342204 - protein, 13 aa, Homo sapiens
  CDR3 for beta chain variable domain of TCR clone 171102 (TRBV12-3, TRBJ2-5)
CASSPGTEETQYF

SEQ ID NO: 342205 - protein, 12 aa, Homo sapiens
  CDR3 for alpha chain variable domain of TCR clone 171103 (TRAV12-2, TRAJ31)
CAVKTPDARLMF

SEQ ID NO: 342206 - protein, 17 aa, Homo sapiens
  CDR3 for beta chain variable domain of TCR clone 171103 (TRBV20-1, TRBJ1-6)
CSARGGYTFSYNSHLHF

SEQ ID NO: 342207 - protein, 14 aa, Homo sapiens
  CDR3 for alpha chain variable domain of TCR clone 171104 (TRAV1-2, TRAJ8)
CAVREDAGFQKLVF

SEQ ID NO: 342208 - protein, 14 aa, Homo sapiens
  CDR3 for beta chain variable domain of TCR clone 171104 (TRBV11-2, TRBJ2-3)
CASSRLARTDTQYF

SEQ ID NO: 342209 - protein, 13 aa, Homo sapiens
  CDR3 for alpha chain variable domain of TCR clone 171105 (TRAV8-3, TRAJ36)
CAVGATGANNLFF

SEQ ID NO: 342210 - protein, 13 aa, Homo sapiens
  CDR3 for beta chain variable domain of TCR clone 171105 (TRBV4-1, TRBJ2-1)
CASSQAGGDEQFF

SEQ ID NO: 342211 - protein, 16 aa, Homo sapiens
  CDR3 for alpha chain variable domain of TCR clone 171106 (TRAV12-3, TRAJ53)
CAMSPGSGGSNYKLTF

SEQ ID NO: 342212 - protein, 15 aa, Homo sapiens
  CDR3 for beta chain variable domain of TCR clone 171106 (TRBV9, TRBJ1-6)
CAGSVARTGDSPLHF

SEQ ID NO: 342213 - protein, 13 aa, Homo sapiens
  CDR3 for alpha chain variable domain of TCR clone 171107 (TRAV13-1, TRAJ45)
CAESGGGADGLAF

SEQ ID NO: 342214 - protein, 20 aa, Homo sapiens
  CDR3 for beta chain variable domain of TCR clone 171107 (TRBV28, TRBJ2-1)
CASTPIGRSPGLAGGNEQFF

SEQ ID NO: 342215 - protein, 14 aa, Homo sapiens
  CDR3 for alpha chain variable domain of TCR clone 171108 (TRAV12-1, TRAJ12)
CVVTRMDSSYKLIF

SEQ ID NO: 342216 - protein, 15 aa, Homo sapiens
  CDR3 for beta chain variable domain of TCR clone 171108 (TRBV19, TRBJ2-2)
CASSPRTGWTGELFF

SEQ ID NO: 342217 - protein, 17 aa, Homo sapiens
  CDR3 for alpha chain variable domain of TCR clone 171109 (TRAV26-2, TRAJ42)
CILRDVGYGGGQGNLIF

SEQ ID NO: 342218 - protein, 16 aa, Homo sapiens
  CDR3 for beta chain variable domain of TCR clone 171109 (TRBV12-4, TRBJ2-7)
CTSSLIGGTGTYEQYF

SEQ ID NO: 342219 - protein, 12 aa, Homo sapiens
  CDR3 for alpha chain variable domain of TCR clone 171110 (TRAV12-1, TRAJ31)
CVSWNNNARPMF

SEQ ID NO: 342220 - protein, 15 aa, Homo sapiens
  CDR3 for beta chain variable domain of TCR clone 171110 (TRBV7-2, TRBJ1-5)
CASSLDRGQDPPQHF

SEQ ID NO: 342221 - protein, 12 aa, Homo sapiens
  CDR3 for alpha chain variable domain of TCR clone 171111 (TRAV1-1, TRAJ8)
CAGGTGFQKLVF

SEQ ID NO: 342222 - protein, 12 aa, Homo sapiens
  CDR3 for beta chain variable domain of TCR clone 171111 (TRBV12-4, TRBJ2-7)
CASSFRGAGQYF

SEQ ID NO: 342223 - protein, 15 aa, Homo sapiens
  CDR3 for alpha chain variable domain of TCR clone 171112 (TRAV8-2, TRAJ28)
CVVSESGAGSYQLNF

SEQ ID NO: 342224 - protein, 16 aa, Homo sapiens
  CDR3 for beta chain variable domain of TCR clone 171112 (TRBV10-3, TRBJ2-1)
CAISLTSGNSYNEQFF

SEQ ID NO: 342225 - protein, 15 aa, Homo sapiens
  CDR3 for alpha chain variable domain of TCR clone 171113 (TRAV35, TRAJ58)
CTGRRQETSGSRLTF

SEQ ID NO: 342226 - protein, 14 aa, Homo sapiens
  CDR3 for beta chain variable domain of TCR clone 171113 (TRBV19, TRBJ2-3)
CASSIDLGGDTQYF

SEQ ID NO: 342227 - protein, 12 aa, Homo sapiens
  CDR3 for alpha chain variable domain of TCR clone 171114 (TRAV4, TRAJ26)
CLVGDYGQNFVF

SEQ ID NO: 342228 - protein, 15 aa, Homo sapiens
  CDR3 for beta chain variable domain of TCR clone 171114 (TRBV2, TRBJ2-7)
CASSEGLARSYEQYF

SEQ ID NO: 342229 - protein, 15 aa, Homo sapiens
  CDR3 for alpha chain variable domain of TCR clone 171115 (TRAV26-1, TRAJ29)
CIVRVTNSGNTPLVF

SEQ ID NO: 342230 - protein, 16 aa, Homo sapiens
  CDR3 for beta chain variable domain of TCR clone 171115 (TRBV12-5, TRBJ2-5)
CASGPRTSGNQETQYF

SEQ ID NO: 342231 - protein, 14 aa, Homo sapiens
  CDR3 for alpha chain variable domain of TCR clone 171116 (TRAV13-2, TRAJ43)
CAEIPTYNNNDMRF

SEQ ID NO: 342232 - protein, 13 aa, Homo sapiens
  CDR3 for beta chain variable domain of TCR clone 171116 (TRBV12-5, TRBJ2-3)
CASGDRQSDTQYF

SEQ ID NO: 342233 - protein, 13 aa, Homo sapiens
  CDR3 for alpha chain variable domain of TCR clone 171117 (TRAV21, TRAJ49)
CAVRQSTGNQFYF

SEQ ID NO: 342234 - protein, 15 aa, Homo sapiens
  CDR3 for beta chain variable domain of TCR clone 171117 (TRBV7-2, TRBJ2-1)
CASSSGLAGGNEQFF

SEQ ID NO: 342235 - protein, 11 aa, Homo sapiens
  CDR3 for alpha chain variable domain of TCR clone 171118 (TRAV23/DV6, TRAJ24)
CAASSWGKLQF

SEQ ID NO: 342236 - protein, 16 aa, Homo sapiens
  CDR3 for beta chain variable domain of TCR clone 171118 (TRBV6-1, TRBJ2-5)
CASSETLDRGAETQYF

SEQ ID NO: 342237 - protein, 16 aa, Homo sapiens
  CDR3 for alpha chain variable domain of TCR clone 171119 (TRAV12-3, TRAJ53)
CAMSPGSGCSNYKLTF

SEQ ID NO: 342238 - protein, 17 aa, Homo sapiens
  CDR3 for beta chain variable domain of TCR clone 171119 (TRBV28, TRBJ2-5)
CASSTPEGDALQETQYF

SEQ ID NO: 342239 - protein, 15 aa, Homo sapiens
  CDR3 for alpha chain variable domain of TCR clone 171120 (TRAV26-1, TRAJ17)
CIVSSFKAAGNKLTF

SEQ ID NO: 342240 - protein, 16 aa, Homo sapiens
  CDR3 for beta chain variable domain of TCR clone 171120 (TRBV5-7, TRBJ2-1)
CASSGGLAGTYNEQFF

SEQ ID NO: 342241 - protein, 12 aa, Homo sapiens
  CDR3 for alpha chain variable domain of TCR clone 171121 (TRAV13-2, TRAJ23)
CAERHRGGKLIF

SEQ ID NO: 342242 - protein, 10 aa, Homo sapiens
  CDR3 for beta chain variable domain of TCR clone 171121 (TRBV7-9, TRBJ1-2)
CASSLKQNYG

SEQ ID NO: 342243 - protein, 13 aa, Homo sapiens
  CDR3 for alpha chain variable domain of TCR clone 171122 (TRAV35, TRAJ53)
CAGQESSNYKLIF

SEQ ID NO: 342244 - protein, 11 aa, Homo sapiens
  CDR3 for beta chain variable domain of TCR clone 171122 (TRBV29-1, TRBJ2-5)
CSEDRTGTQYF

SEQ ID NO: 342245 - protein, 16 aa, Homo sapiens
  CDR3 for alpha chain variable domain of TCR clone 171123 (TRAV8-3, TRAJ10)
CAVGPILTGGENKLTF

SEQ ID NO: 342246 - protein, 16 aa, Homo sapiens
  CDR3 for beta chain variable domain of TCR clone 171123 (TRBV7-2, TRBJ2-5)
CASSSKWLSGQETQYF

SEQ ID NO: 342247 - protein, 14 aa, Homo sapiens
  CDR3 for alpha chain variable domain of TCR clone 171124 (TRAV12-3, TRAJ10)
SHLPLTGGGNQLTF

SEQ ID NO: 342248 - protein, 15 aa, Homo sapiens
  CDR3 for beta chain variable domain of TCR clone 171124 (TRBV7-3, TRBJ2-2)
CASSETGQGTGELFF

SEQ ID NO: 342249 - protein, 14 aa, Homo sapiens
  CDR3 for alpha chain variable domain of TCR clone 171125 (TRAV12-2, TRAJ6)
CAAKWGGGSYIPTF

SEQ ID NO: 342250 - protein, 13 aa, Homo sapiens
  CDR3 for beta chain variable domain of TCR clone 171125 (TRBV2, TRBJ1-1)
CASSEGGNTEAFF

SEQ ID NO: 342251 - protein, 14 aa, Homo sapiens
  CDR3 for alpha chain variable domain of TCR clone 171126 (TRAV2, TRAJ37)
CAVDFTSNTGKLIF

SEQ ID NO: 342252 - protein, 11 aa, Homo sapiens
  CDR3 for beta chain variable domain of TCR clone 171126 (TRBV7-8, TRBJ2-7)
CASSLSLEQYF

SEQ ID NO: 342253 - protein, 13 aa, Homo sapiens
  CDR3 for alpha chain variable domain of TCR clone 171127 (TRAV12-2, TRAJ15)
CAVFNQAGTALIF

SEQ ID NO: 342254 - protein, 23 aa, Homo sapiens
  CDR3 for beta chain variable domain of TCR clone 171127 (TRBV7-8, TRBJ1-5)
RRTPPGISVPAAGGGGADQPQHF

SEQ ID NO: 342255 - protein, 12 aa, Homo sapiens
  CDR3 for alpha chain variable domain of TCR clone 171128 (TRAV23/DV6, TRAJ16)
CAATGTGQKLLF

SEQ ID NO: 342256 - protein, 11 aa, Homo sapiens
  CDR3 for beta chain variable domain of TCR clone 171128 (TRBV11-2, TRBJ2-2)
CASSLPGELFF

SEQ ID NO: 342257 - protein, 15 aa, Homo sapiens
  CDR3 for alpha chain variable domain of TCR clone 171129 (TRAV26-1, TRAJ22)
CIVRVSFLFCKATYL

SEQ ID NO: 342258 - protein, 13 aa, Homo sapiens
  CDR3 for beta chain variable domain of TCR clone 171129 (TRBV7-9, TRBJ1-2)
CASSLKQNYGYTF

SEQ ID NO: 342259 - protein, 14 aa, Homo sapiens
  CDR3 for alpha chain variable domain of TCR clone 171130 (TRAV2, TRAJ37)
CAVDFTSNTGKLIF

SEQ ID NO: 342260 - protein, 16 aa, Homo sapiens
  CDR3 for beta chain variable domain of TCR clone 171130 (TRBV7-9, TRBJ2-6)
CASSLKGPLRANVLTF

SEQ ID NO: 342261 - protein, 14 aa, Homo sapiens
  CDR3 for alpha chain variable domain of TCR clone 171131 (TRAV9-2, TRAJ39)
CALYIYNAGNMLTF

SEQ ID NO: 342262 - protein, 16 aa, Homo sapiens
  CDR3 for beta chain variable domain of TCR clone 171131 (TRBV6-1, TRBJ1-3)
CASVQGGGGNTIYLER

SEQ ID NO: 342263 - protein, 11 aa, Homo sapiens
  CDR3 for alpha chain variable domain of TCR clone 171132 (TRAV12-1, TRAJ34)
CVVNKGRELIF

SEQ ID NO: 342264 - protein, 12 aa, Homo sapiens
  CDR3 for beta chain variable domain of TCR clone 171132 (TRBV2, TRBJ2-1)
CSYGPPGNEQFF

SEQ ID NO: 342265 - protein, 14 aa, Homo sapiens
  CDR3 for alpha chain variable domain of TCR clone 171133 (TRAV16, TRAJ33)
CALSAMDSNYQLIW

SEQ ID NO: 342266 - protein, 14 aa, Homo sapiens
  CDR3 for beta chain variable domain of TCR clone 171133 (TRBV7-2, TRBJ2-7)
CASRSQGAAYEQYF

SEQ ID NO: 342267 - protein, 13 aa, Homo sapiens
  CDR3 for alpha chain variable domain of TCR clone 171134 (TRAV13-2, TRAJ41)
CAESINSGYALNF

SEQ ID NO: 342268 - protein, 14 aa, Homo sapiens
  CDR3 for beta chain variable domain of TCR clone 171134 (TRBV19, TRBJ2-1)
CASPTFVLSGEQFF

SEQ ID NO: 342269 - protein, 11 aa, Homo sapiens
  CDR3 for alpha chain variable domain of TCR clone 171135 (TRAV12-2, TRAJ23)
CAVDQGGKLIF

SEQ ID NO: 342270 - protein, 16 aa, Homo sapiens
  CDR3 for beta chain variable domain of TCR clone 171135 (TRBV2, TRBJ2-1)
CASSVGGSLSYNEQFF

SEQ ID NO: 342271 - protein, 14 aa, Homo sapiens
  CDR3 for alpha chain variable domain of TCR clone 171136 (TRAV1-2, TRAJ6)
CAVSLSGGRYIPTF

SEQ ID NO: 342272 - protein, 15 aa, Homo sapiens
  CDR3 for beta chain variable domain of TCR clone 171136 (TRBV28, TRBJ2-7)
CAGSPGGRGFYEQYF

SEQ ID NO: 342273 - protein, 17 aa, Homo sapiens
  CDR3 for alpha chain variable domain of TCR clone 171137 (TRAV3, TRAJ42)
CAVRDRDYGGSQGNLIF

SEQ ID NO: 342274 - protein, 12 aa, Homo sapiens
  CDR3 for beta chain variable domain of TCR clone 171137 (TRBV14, TRBJ2-7)
CASSLYKDEQYF

SEQ ID NO: 342275 - protein, 14 aa, Homo sapiens
  CDR3 for alpha chain variable domain of TCR clone 171138 (TRAV25, TRAJ22)
CAVRSSGSARQLTF

SEQ ID NO: 342276 - protein, 13 aa, Homo sapiens
  CDR3 for beta chain variable domain of TCR clone 171138 (TRBV4-2, TRBJ1-1)
CASSQAGNTEAFF

SEQ ID NO: 342277 - protein, 14 aa, Homo sapiens
  CDR3 for alpha chain variable domain of TCR clone 171139 (TRAV20, TRAJ22)
CAVQGAGSARQLTF

SEQ ID NO: 342278 - protein, 13 aa, Homo sapiens
  CDR3 for beta chain variable domain of TCR clone 171139 (TRBV7-9, TRBJ1-2)
CASSLKQNYGYTF

SEQ ID NO: 342279 - protein, 13 aa, Homo sapiens
  CDR3 for alpha chain variable domain of TCR clone 171140 (TRAV29/DV5, TRAJ31)
CAASRNNNARPMF

SEQ ID NO: 342280 - protein, 14 aa, Homo sapiens
  CDR3 for beta chain variable domain of TCR clone 171140 (TRBV4-1, TRBJ2-2)
CASSQAVNTGELFF

SEQ ID NO: 342281 - protein, 14 aa, Homo sapiens
  CDR3 for alpha chain variable domain of TCR clone 171141 (TRAV1-2, TRAJ16)
CAVNRFSDGQKLLF

SEQ ID NO: 342282 - protein, 16 aa, Homo sapiens
  CDR3 for beta chain variable domain of TCR clone 171141 (TRBV7-3, TRBJ2-2)
CASSLKRGTLSGELYF

SEQ ID NO: 342283 - protein, 12 aa, Homo sapiens
  CDR3 for alpha chain variable domain of TCR clone 171142 (TRAV8-6, TRAJ36)
CAVSDWLGQTTS

SEQ ID NO: 342284 - protein, 16 aa, Homo sapiens
  CDR3 for beta chain variable domain of TCR clone 171142 (TRBV19, TRBJ2-1)
CASSKAGPSSYNEQFF

SEQ ID NO: 342285 - protein, 15 aa, Homo sapiens
  CDR3 for alpha chain variable domain of TCR clone 171143 (TRAV26-2, TRAJ37)
CILRGGLRNTGKLIF

SEQ ID NO: 342286 - protein, 16 aa, Homo sapiens
  CDR3 for beta chain variable domain of TCR clone 171143 (TRBV7-3, TRBJ2-2)
CASSLKRGTLSGELFF

SEQ ID NO: 342287 - protein, 16 aa, Homo sapiens
  CDR3 for alpha chain variable domain of TCR clone 171144 (TRAV3, TRAJ37)
CAVRPHGSGNTGKLIF

SEQ ID NO: 342288 - protein, 16 aa, Homo sapiens
  CDR3 for beta chain variable domain of TCR clone 171144 (TRBV9, TRBJ1-2)
CASSVEEKVSPYDYTF

SEQ ID NO: 342289 - protein, 11 aa, Homo sapiens
  CDR3 for alpha chain variable domain of TCR clone 171145 (TRAV21, TRAJ39)
LLVNAGNMLTF

SEQ ID NO: 342290 - protein, 16 aa, Homo sapiens
  CDR3 for beta chain variable domain of TCR clone 171145 (TRBV7-3, TRBJ2-1)
CASSLEGYRSYNEQFF

SEQ ID NO: 342291 - protein, 14 aa, Homo sapiens
  CDR3 for alpha chain variable domain of TCR clone 171146 (TRAV29/DV5, TRAJ29)
CAARLDAGNTPLVF

SEQ ID NO: 342292 - protein, 14 aa, Homo sapiens
  CDR3 for beta chain variable domain of TCR clone 171146 (TRBV7-2, TRBJ2-1)
CASSVGFSYNEQFF

SEQ ID NO: 342293 - protein, 12 aa, Homo sapiens
  CDR3 for alpha chain variable domain of TCR clone 171147 (TRAV13-2, TRAJ8)
CAPWLGFQKLVF

SEQ ID NO: 342294 - protein, 16 aa, Homo sapiens
  CDR3 for beta chain variable domain of TCR clone 171147 (TRBV29-1, TRBJ2-7)
CSVEDAEDGTAYEQYF

SEQ ID NO: 342295 - protein, 13 aa, Homo sapiens
  CDR3 for alpha chain variable domain of TCR clone 171148 (TRAV12-3, TRAJ54)
CAMFAQGAQKLVF

SEQ ID NO: 342296 - protein, 16 aa, Homo sapiens
  CDR3 for beta chain variable domain of TCR clone 171148 (TRBV7-6, TRBJ2-3)
CASNPRRGGLGDTQYF

SEQ ID NO: 342297 - protein, 13 aa, Homo sapiens
  CDR3 for alpha chain variable domain of TCR clone 171149 (TRAV13-1, TRAJ20)
CAVRVSNDYKLSF

SEQ ID NO: 342298 - protein, 12 aa, Homo sapiens
  CDR3 for beta chain variable domain of TCR clone 171149 (TRBV5-1, TRBJ2-7)
CASSLDSYEQYF

SEQ ID NO: 342299 - protein, 10 aa, Homo sapiens
  CDR3 for alpha chain variable domain of TCR clone 171150 (TRAV1-2, TRAJ20)
CSLNDYKLSF

SEQ ID NO: 342300 - protein, 11 aa, Homo sapiens
  CDR3 for beta chain variable domain of TCR clone 171150 (TRBV29-1, TRBJ2-5)
CSEDRTGTQYF

SEQ ID NO: 342301 - protein, 16 aa, Homo sapiens
  CDR3 for alpha chain variable domain of TCR clone 171151 (TRAV12-2, TRAJ45)
CAVNRGSGGGADGLNF

SEQ ID NO: 342302 - protein, 14 aa, Homo sapiens
  CDR3 for beta chain variable domain of TCR clone 171151 (TRBV23-1, TRBJ2-2)
EDRGVEKDTGELFF

SEQ ID NO: 342303 - protein, 15 aa, Homo sapiens
  CDR3 for alpha chain variable domain of TCR clone 171152 (TRAV3, TRAJ36)
CAVRASQTGVNNLFF

SEQ ID NO: 342304 - protein, 15 aa, Homo sapiens
  CDR3 for beta chain variable domain of TCR clone 171152 (TRBV3-1, TRBJ2-1)
CASSQDYTPRGEQFF

SEQ ID NO: 342305 - protein, 14 aa, Homo sapiens
  CDR3 for alpha chain variable domain of TCR clone 171153 (TRAV29/DV5, TRAJ49)
CAASLSNTGNQFYF

SEQ ID NO: 342306 - protein, 13 aa, Homo sapiens
  CDR3 for beta chain variable domain of TCR clone 171153 (TRBV10-3, TRBJ2-7)
CASKLAVNYEQYF

SEQ ID NO: 342307 - protein, 13 aa, Homo sapiens
  CDR3 for alpha chain variable domain of TCR clone 171154 (TRAV3, TRAJ27)
CAVRPLGAGESTV

SEQ ID NO: 342308 - protein, 13 aa, Homo sapiens
  CDR3 for beta chain variable domain of TCR clone 171154 (TRBV7-9, TRBJ2-3)
CASSPGSTDTQYF

SEQ ID NO: 342309 - protein, 12 aa, Homo sapiens
  CDR3 for alpha chain variable domain of TCR clone 171155 (TRAV16, TRAJ10)
CSRTGGGNKLTF

SEQ ID NO: 342310 - protein, 19 aa, Homo sapiens
  CDR3 for beta chain variable domain of TCR clone 171155 (TRBV25-1, TRBJ2-2)
CAMLVYRVDRGRKTGELFF

SEQ ID NO: 342311 - protein, 13 aa, Homo sapiens
  CDR3 for alpha chain variable domain of TCR clone 171156 (TRAV12-1, TRAJ40)
CVVNFSGTYNYIL

SEQ ID NO: 342312 - protein, 14 aa, Homo sapiens
  CDR3 for beta chain variable domain of TCR clone 171156 (TRBV2, TRBJ1-6)
CASEVSSYNSPLHF

SEQ ID NO: 342313 - protein, 12 aa, Homo sapiens
  CDR3 for alpha chain variable domain of TCR clone 171157 (TRAV4, TRAJ6)
CLAPGGSYIPTF

SEQ ID NO: 342314 - protein, 15 aa, Homo sapiens
  CDR3 for beta chain variable domain of TCR clone 171157 (TRBV15, TRBJ1-1)
CATSLQGGRNTEAFF

SEQ ID NO: 342315 - protein, 13 aa, Homo sapiens
  CDR3 for alpha chain variable domain of TCR clone 171158 (TRAV12-2, TRAJ12)
CAVNWDSSYKLIF

SEQ ID NO: 342316 - protein, 15 aa, Homo sapiens
  CDR3 for beta chain variable domain of TCR clone 171158 (TRBV20-1, TRBJ2-7)
CSARGPLAGGREQYF

SEQ ID NO: 342317 - protein, 14 aa, Homo sapiens
  CDR3 for alpha chain variable domain of TCR clone 171159 (TRAV12-3, TRAJ29)
CAMILLSGNTPLVF

SEQ ID NO: 342318 - protein, 16 aa, Homo sapiens
  CDR3 for beta chain variable domain of TCR clone 171159 (TRBV28, TRBJ2-7)
CASRSGTSGRGYEQYF

SEQ ID NO: 342319 - protein, 16 aa, Homo sapiens
  CDR3 for alpha chain variable domain of TCR clone 171160 (TRAV3, TRAJ37)
CAVRGKGSGNTGKLIF

SEQ ID NO: 342320 - protein, 13 aa, Homo sapiens
  CDR3 for beta chain variable domain of TCR clone 171160 (TRBV4-2, TRBJ1-1)
CASSQDWGAEAFF

SEQ ID NO: 342321 - protein, 14 aa, Homo sapiens
  CDR3 for alpha chain variable domain of TCR clone 171161 (TRAV16, TRAJ32)
CALKSGGATNKLIF

SEQ ID NO: 342322 - protein, 16 aa, Homo sapiens
  CDR3 for beta chain variable domain of TCR clone 171161 (TRBV27, TRBJ2-2)
CASSFRGLVRTGELFF

SEQ ID NO: 342323 - protein, 16 aa, Homo sapiens
  CDR3 for alpha chain variable domain of TCR clone 171162 (TRAV3, TRAJ10)
RAVRDMRAGGGNKLNF

SEQ ID NO: 342324 - protein, 13 aa, Homo sapiens
  CDR3 for beta chain variable domain of TCR clone 171162 (TRBV6-1, TRBJ1-1)
CASSRQGNTEAFF

SEQ ID NO: 342325 - protein, 16 aa, Homo sapiens
  CDR3 for alpha chain variable domain of TCR clone 171163 (TRAV12-1, TRAJ12)
CVVNTLLMDSSYKLIF

SEQ ID NO: 342326 - protein, 13 aa, Homo sapiens
  CDR3 for beta chain variable domain of TCR clone 171163 (TRBV11-2, TRBJ2-1)
CDSSSEAYNEQFF

SEQ ID NO: 342327 - protein, 12 aa, Homo sapiens
  CDR3 for alpha chain variable domain of TCR clone 171164 (TRAV1-2, TRAJ9)
CAGYTGGFKTIF

SEQ ID NO: 342328 - protein, 15 aa, Homo sapiens
  CDR3 for beta chain variable domain of TCR clone 171164 (TRBV11-2, TRBJ2-1)
CASRPAGQSLNEQFF

SEQ ID NO: 342329 - protein, 14 aa, Homo sapiens
  CDR3 for alpha chain variable domain of TCR clone 171165 (TRAV17, TRAJ53)
CATDAGGSNYKLTF

SEQ ID NO: 342330 - protein, 13 aa, Homo sapiens
  CDR3 for beta chain variable domain of TCR clone 171165 (TRBV4-1, TRBJ2-2)
CASSQENTGELFF

SEQ ID NO: 342331 - protein, 13 aa, Homo sapiens
  CDR3 for alpha chain variable domain of TCR clone 171166 (TRAV20, TRAJ57)
CAGPQGGSEKLVF

SEQ ID NO: 342332 - protein, 15 aa, Homo sapiens
  CDR3 for beta chain variable domain of TCR clone 171166 (TRBV20-1, TRBJ2-7)
CSARDRVSGMDEQYF

SEQ ID NO: 342333 - protein, 11 aa, Homo sapiens
  CDR3 for alpha chain variable domain of TCR clone 171167 (TRAV25, TRAJ5)
CRGGGRRELTF

SEQ ID NO: 342334 - protein, 15 aa, Homo sapiens
  CDR3 for beta chain variable domain of TCR clone 171167 (TRBV19, TRBJ2-4)
CASRGPRRGENIQYF

SEQ ID NO: 342335 - protein, 14 aa, Homo sapiens
  CDR3 for alpha chain variable domain of TCR clone 171168 (TRAV17, TRAJ4)
CATVPSGGYNKLIF

SEQ ID NO: 342336 - protein, 14 aa, Homo sapiens
  CDR3 for beta chain variable domain of TCR clone 171168 (TRBV7-6, TRBJ2-3)
CASSLGTVTDTQYF

SEQ ID NO: 342337 - protein, 14 aa, Homo sapiens
  CDR3 for alpha chain variable domain of TCR clone 171169 (TRAV1-2, TRAJ16)
CAVNRFSDGQKLLF

SEQ ID NO: 342338 - protein, 16 aa, Homo sapiens
  CDR3 for beta chain variable domain of TCR clone 171169 (TRBV12-4, TRBJ2-5)
CASSVFGRGRQETQYF

SEQ ID NO: 342339 - protein, 16 aa, Homo sapiens
  CDR3 for alpha chain variable domain of TCR clone 171170 (TRAV3, TRAJ37)
CAVRGNGSGNTGKLIF

SEQ ID NO: 342340 - protein, 15 aa, Homo sapiens
  CDR3 for beta chain variable domain of TCR clone 171170 (TRBV7-9, TRBJ1-6)
CASSSPGRGNSTLHF

SEQ ID NO: 342341 - protein, 15 aa, Homo sapiens
  CDR3 for alpha chain variable domain of TCR clone 171171 (TRAV3, TRAJ3)
CAVRDGHSNASKIIF

SEQ ID NO: 342342 - protein, 17 aa, Homo sapiens
  CDR3 for beta chain variable domain of TCR clone 171171 (TRBV25-1, TRBJ2-7)
CASSDARVVFSSYEQYF

SEQ ID NO: 342343 - protein, 13 aa, Homo sapiens
  CDR3 for alpha chain variable domain of TCR clone 171172 (TRAV22, TRAJ9)
FAVGSTGGFKTIF

SEQ ID NO: 342344 - protein, 13 aa, Homo sapiens
  CDR3 for beta chain variable domain of TCR clone 171172 (TRBV9, TRBJ2-7)
CASSVAGTGEQYF

SEQ ID NO: 342345 - protein, 12 aa, Homo sapiens
  CDR3 for alpha chain variable domain of TCR clone 171173 (TRAV26-2, TRAJ21)
CILMGNFNKFYF

SEQ ID NO: 342346 - protein, 14 aa, Homo sapiens
  CDR3 for beta chain variable domain of TCR clone 171173 (TRBV7-9, TRBJ1-1)
CASTPLQSYTEAFF

SEQ ID NO: 342347 - protein, 14 aa, Homo sapiens
  CDR3 for alpha chain variable domain of TCR clone 171174 (TRAV8-3, TRAJ30)
CAVGDMNRDDKIIF

SEQ ID NO: 342348 - protein, 17 aa, Homo sapiens
  CDR3 for beta chain variable domain of TCR clone 171174 (TRBV19, TRBJ2-2)
CAGSRNPGGFGTGELFF

SEQ ID NO: 342349 - protein, 14 aa, Homo sapiens
  CDR3 for alpha chain variable domain of TCR clone 171175 (TRAV13-1, TRAJ3)
CAASKSTSASKIIF

SEQ ID NO: 342350 - protein, 16 aa, Homo sapiens
  CDR3 for beta chain variable domain of TCR clone 171175 (TRBV15, TRBJ2-3)
CATSRDLGIVTDTQYF

SEQ ID NO: 342351 - protein, 12 aa, Homo sapiens
  CDR3 for alpha chain variable domain of TCR clone 171176 (TRAV12-3, TRAJ17)
CAMTLTGNKLTF

SEQ ID NO: 342352 - protein, 17 aa, Homo sapiens
  CDR3 for beta chain variable domain of TCR clone 171176 (TRBV7-3, TRBJ2-3)
CVSSLMKRMRGADTQYF

SEQ ID NO: 342353 - protein, 14 aa, Homo sapiens
  CDR3 for alpha chain variable domain of TCR clone 171177 (TRAV29/DV5, TRAJ36)
CAARRKTGANNLLF

SEQ ID NO: 342354 - protein, 12 aa, Homo sapiens
  CDR3 for beta chain variable domain of TCR clone 171177 (TRBV11-2, TRBJ2-2)
CASSLGGGELFF

SEQ ID NO: 342355 - protein, 13 aa, Homo sapiens
  CDR3 for alpha chain variable domain of TCR clone 171178 (TRAV12-3, TRAJ13)
CAMNSGGYQKVTF

SEQ ID NO: 342356 - protein, 13 aa, Homo sapiens
  CDR3 for beta chain variable domain of TCR clone 171178 (TRBV7-9, TRBJ1-2)
CVSSLKQNYGYTF

SEQ ID NO: 342357 - protein, 13 aa, Homo sapiens
  CDR3 for alpha chain variable domain of TCR clone 171179 (TRAV2, TRAJ32)
CLLYGGATNKLIF

SEQ ID NO: 342358 - protein, 16 aa, Homo sapiens
  CDR3 for beta chain variable domain of TCR clone 171179 (TRBV7-9, TRBJ2-7)
CASSYPDREGGYEQYF

SEQ ID NO: 342359 - protein, 14 aa, Homo sapiens
  CDR3 for alpha chain variable domain of TCR clone 171180 (TRAV23/DV6, TRAJ13)
CAAGETGGYQKVTF

SEQ ID NO: 342360 - protein, 16 aa, Homo sapiens
  CDR3 for beta chain variable domain of TCR clone 171180 (TRBV5-1, TRBJ1-3)
CASSPWAPSSGNAIYF

SEQ ID NO: 342361 - protein, 15 aa, Homo sapiens
  CDR3 for alpha chain variable domain of TCR clone 171181 (TRAV8-3, TRAJ7)
CAVGSISYGNNRLAF

SEQ ID NO: 342362 - protein, 15 aa, Homo sapiens
  CDR3 for beta chain variable domain of TCR clone 171181 (TRBV4-2, TRBJ1-1)
CASSQEDLPRTEDFF

SEQ ID NO: 342363 - protein, 16 aa, Homo sapiens
  CDR3 for alpha chain variable domain of TCR clone 171182 (TRAV12-1, TRAJ26)
CALWSEFCLWSRNQIF

SEQ ID NO: 342364 - protein, 14 aa, Homo sapiens
  CDR3 for beta chain variable domain of TCR clone 171182 (TRBV5-4, TRBJ2-1)
CASSLDQGLNEQFF

SEQ ID NO: 342365 - protein, 17 aa, Homo sapiens
  CDR3 for alpha chain variable domain of TCR clone 171183 (TRAV8-1, TRAJ42)
CGVKWGNYGGSQGNLIF

SEQ ID NO: 342366 - protein, 15 aa, Homo sapiens
  CDR3 for beta chain variable domain of TCR clone 171183 (TRBV9, TRBJ1-6)
CASSVAGTGDSPLHF

SEQ ID NO: 342367 - protein, 14 aa, Homo sapiens
  CDR3 for alpha chain variable domain of TCR clone 171184 (TRAV12-3, TRAJ10)
SHLPLTGGGNKLTF

SEQ ID NO: 342368 - protein, 13 aa, Homo sapiens
  CDR3 for beta chain variable domain of TCR clone 171184 (TRBV7-6, TRBJ2-3)
CARSLAVGDTQYF

SEQ ID NO: 342369 - protein, 16 aa, Homo sapiens
  CDR3 for alpha chain variable domain of TCR clone 171185 (TRAV30, TRAJ24)
CGTEIADADSWGKFQF

SEQ ID NO: 342370 - protein, 14 aa, Homo sapiens
  CDR3 for beta chain variable domain of TCR clone 171185 (TRBV12-5, TRBJ2-5)
CASGPRTHQETQYF

SEQ ID NO: 342371 - protein, 12 aa, Homo sapiens
  CDR3 for alpha chain variable domain of TCR clone 171186 (TRAV35, TRAJ33)
CWAAPSNYQLIW

SEQ ID NO: 342372 - protein, 12 aa, Homo sapiens
  CDR3 for beta chain variable domain of TCR clone 171186 (TRBV14, TRBJ2-7)
CASSRLKGEQYF

SEQ ID NO: 342373 - protein, 17 aa, Homo sapiens
  CDR3 for alpha chain variable domain of TCR clone 171187 (TRAV35, TRAJ47)
GLLDCRTHTEYGNKLVF

SEQ ID NO: 342374 - protein, 11 aa, Homo sapiens
  CDR3 for beta chain variable domain of TCR clone 171187 (TRBV29-1, TRBJ1-1)
CSVEVGTLTFF

SEQ ID NO: 342375 - protein, 14 aa, Homo sapiens
  CDR3 for alpha chain variable domain of TCR clone 171188 (TRAV1-2, TRAJ16)
CAVNRFSDGHKLLF

SEQ ID NO: 342376 - protein, 15 aa, Homo sapiens
  CDR3 for beta chain variable domain of TCR clone 171188 (TRBV28, TRBJ2-5)
CASSADRGRGETQYF

SEQ ID NO: 342377 - protein, 17 aa, Homo sapiens
  CDR3 for alpha chain variable domain of TCR clone 171189 (TRAV3, TRAJ42)
CAVRDRDYGVSQGNLIF

SEQ ID NO: 342378 - protein, 12 aa, Homo sapiens
  CDR3 for beta chain variable domain of TCR clone 171189 (TRBV29-1, TRBJ2-2)
CSVDKYTGELFF

SEQ ID NO: 342379 - protein, 12 aa, Homo sapiens
  CDR3 for alpha chain variable domain of TCR clone 171190 (TRAV21, TRAJ27)
CAPNTNAGKSTF

SEQ ID NO: 342380 - protein, 15 aa, Homo sapiens
  CDR3 for beta chain variable domain of TCR clone 171190 (TRBV29-1, TRBJ1-4)
CSVVGIGDINEKLFF

SEQ ID NO: 342381 - protein, 11 aa, Homo sapiens
  CDR3 for alpha chain variable domain of TCR clone 171191 (TRAV8-3, TRAJ15)
CAVGPGTALIF

SEQ ID NO: 342382 - protein, 18 aa, Homo sapiens
  CDR3 for beta chain variable domain of TCR clone 171191 (TRBV18, TRBJ2-3)
GASSYTSGAAGGTDTQYV

SEQ ID NO: 342383 - protein, 15 aa, Homo sapiens
  CDR3 for alpha chain variable domain of TCR clone 171192 (TRAV4, TRAJ17)
CLVGDIGAAGNKLTF

SEQ ID NO: 342384 - protein, 14 aa, Homo sapiens
  CDR3 for beta chain variable domain of TCR clone 171192 (TRBV6-3, TRBJ2-7)
CASSYSMRVYEQYF

SEQ ID NO: 342385 - protein, 14 aa, Homo sapiens
  CDR3 for alpha chain variable domain of TCR clone 171193 (TRAV1-2, TRAJ16)
CAVNRVSDGQKLLF

SEQ ID NO: 342386 - protein, 13 aa, Homo sapiens
  CDR3 for beta chain variable domain of TCR clone 171193 (TRBV6-1, TRBJ2-5)
CASGYQSVETQYF

SEQ ID NO: 342387 - protein, 13 aa, Homo sapiens
  CDR3 for alpha chain variable domain of TCR clone 171194 (TRAV8-3, TRAJ43)
CAVVPYNNNDMRF

SEQ ID NO: 342388 - protein, 16 aa, Homo sapiens
  CDR3 for beta chain variable domain of TCR clone 171194 (TRBV7-2, TRBJ2-5)
CASGPFPTGGEETQYF

SEQ ID NO: 342389 - protein, 18 aa, Homo sapiens
  CDR3 for alpha chain variable domain of TCR clone 171195 (TRAV26-1, TRAJ23)
CIVRVGLEVWYQGGKLIF

SEQ ID NO: 342390 - protein, 16 aa, Homo sapiens
  CDR3 for beta chain variable domain of TCR clone 171195 (TRBV12-4, TRBJ2-5)
CASSFFVRGRQETQYF

SEQ ID NO: 342391 - protein, 14 aa, Homo sapiens
  CDR3 for alpha chain variable domain of TCR clone 171196 (TRAV8-3, TRAJ4)
CAVGASGGYNKLIF

SEQ ID NO: 342392 - protein, 16 aa, Homo sapiens
  CDR3 for beta chain variable domain of TCR clone 171196 (TRBV19, TRBJ2-2)
CASSPSGGLNTGELFF

SEQ ID NO: 342393 - protein, 14 aa, Homo sapiens
  CDR3 for alpha chain variable domain of TCR clone 171197 (TRAV13-1, TRAJ6)
CAASITGGSYIPTF

SEQ ID NO: 342394 - protein, 13 aa, Homo sapiens
  CDR3 for beta chain variable domain of TCR clone 171197 (TRBV7-3, TRBJ1-1)
CASSQDWGAEAFF

SEQ ID NO: 342395 - protein, 14 aa, Homo sapiens
  CDR3 for alpha chain variable domain of TCR clone 171198 (TRAV23/DV6, TRAJ23)
CAAGPYNQGGKLIF

SEQ ID NO: 342396 - protein, 17 aa, Homo sapiens
  CDR3 for beta chain variable domain of TCR clone 171198 (TRBV4-2, TRBJ1-1)
CASSQVATGGMNTEAFF

SEQ ID NO: 342397 - protein, 18 aa, Homo sapiens
  CDR3 for alpha chain variable domain of TCR clone 171199 (TRAV8-3, TRAJ28)
CAVGATLGLGVTNSLLGR

SEQ ID NO: 342398 - protein, 14 aa, Homo sapiens
  CDR3 for beta chain variable domain of TCR clone 171199 (TRBV7-2, TRBJ2-1)
CASSLGVGYNEQFF

SEQ ID NO: 342399 - protein, 15 aa, Homo sapiens
  CDR3 for alpha chain variable domain of TCR clone 171200 (TRAV2, TRAJ15)
CAVEDRGQAGTALIF

SEQ ID NO: 342400 - protein, 16 aa, Homo sapiens
  CDR3 for beta chain variable domain of TCR clone 171200 (TRBV12-5, TRBJ2-5)
CASGPRTSGNQETQYF

SEQ ID NO: 342401 - protein, 13 aa, Homo sapiens
  CDR3 for alpha chain variable domain of TCR clone 171201 (TRAV2, TRAJ18)
CAVEDKDLGRLYF

SEQ ID NO: 342402 - protein, 13 aa, Homo sapiens
  CDR3 for beta chain variable domain of TCR clone 171201 (TRBV19, TRBJ1-2)
CASSVPGQDGYTF

SEQ ID NO: 342403 - protein, 15 aa, Homo sapiens
  CDR3 for alpha chain variable domain of TCR clone 171202 (TRAV2, TRAJ41)
CAVGLGSNSGYALNF

SEQ ID NO: 342404 - protein, 13 aa, Homo sapiens
  CDR3 for beta chain variable domain of TCR clone 171202 (TRBV7-9, TRBJ1-2)
CVSSLKQNYGYTF

SEQ ID NO: 342405 - protein, 16 aa, Homo sapiens
  CDR3 for alpha chain variable domain of TCR clone 171203 (TRAV8-3, TRAJ18)
CAVGARRGSTLGRLYF

SEQ ID NO: 342406 - protein, 14 aa, Homo sapiens
  CDR3 for beta chain variable domain of TCR clone 171203 (TRBV5-4, TRBJ1-3)
CASSSQRAGNTIYF

SEQ ID NO: 342407 - protein, 13 aa, Homo sapiens
  CDR3 for alpha chain variable domain of TCR clone 171204 (TRAV9-2, TRAJ53)
CALSGGSNYKLTF

SEQ ID NO: 342408 - protein, 16 aa, Homo sapiens
  CDR3 for beta chain variable domain of TCR clone 171204 (TRBV13, TRBJ2-2)
CASSPRTGEHTGELFF

SEQ ID NO: 342409 - protein, 18 aa, Homo sapiens
  CDR3 for alpha chain variable domain of TCR clone 171205 (TRAV13-1, TRAJ52)
CAAKNPNAGGTSYGKLTL

SEQ ID NO: 342410 - protein, 15 aa, Homo sapiens
  CDR3 for beta chain variable domain of TCR clone 171205 (TRBV2, TRBJ2-2)
CASSRETVGTGELFF

SEQ ID NO: 342411 - protein, 15 aa, Homo sapiens
  CDR3 for alpha chain variable domain of TCR clone 171206 (TRAV26-1, TRAJ44)
CIVRANTGTASKLTF

SEQ ID NO: 342412 - protein, 14 aa, Homo sapiens
  CDR3 for beta chain variable domain of TCR clone 171206 (TRBV12-4, TRBJ1-5)
CASSRGQVDQPQHF

SEQ ID NO: 342413 - protein, 13 aa, Homo sapiens
  CDR3 for alpha chain variable domain of TCR clone 171207 (TRAV12-1, TRAJ21)
CVVTLYNFYKFYF

SEQ ID NO: 342414 - protein, 20 aa, Homo sapiens
  CDR3 for beta chain variable domain of TCR clone 171207 (TRBV7-8, TRBJ2-1)
CASSLAHRLAGVRSYNEQFF

SEQ ID NO: 342415 - protein, 11 aa, Homo sapiens
  CDR3 for alpha chain variable domain of TCR clone 171208 (TRAV2, TRAJ13)
CASGGYQKVTF

SEQ ID NO: 342416 - protein, 16 aa, Homo sapiens
  CDR3 for beta chain variable domain of TCR clone 171208 (TRBV19, TRBJ1-5)
CASSIDRGGPRQPQHF

SEQ ID NO: 342417 - protein, 15 aa, Homo sapiens
  CDR3 for alpha chain variable domain of TCR clone 171209 (TRAV1-1, TRAJ23)
CAVREGDNQGGKLIF

SEQ ID NO: 342418 - protein, 13 aa, Homo sapiens
  CDR3 for beta chain variable domain of TCR clone 171209 (TRBV9, TRBJ2-7)
CASSVGTAYEQYL

SEQ ID NO: 342419 - protein, 14 aa, Homo sapiens
  CDR3 for alpha chain variable domain of TCR clone 171210 (TRAV1-2, TRAJ8)
CALREDTGFQKLVF

SEQ ID NO: 342420 - protein, 12 aa, Homo sapiens
  CDR3 for beta chain variable domain of TCR clone 171210 (TRBV27, TRBJ2-2)
CASKLFTGELFF

SEQ ID NO: 342421 - protein, 13 aa, Homo sapiens
  CDR3 for alpha chain variable domain of TCR clone 171211 (TRAV8-1, TRAJ7)
CAVMPYGNNRLAF

SEQ ID NO: 342422 - protein, 15 aa, Homo sapiens
  CDR3 for beta chain variable domain of TCR clone 171211 (TRBV20-1, TRBJ1-1)
CSASRGVTGNTEAFF

SEQ ID NO: 342423 - protein, 13 aa, Homo sapiens
  CDR3 for alpha chain variable domain of TCR clone 171212 (TRAV12-3, TRAJ13)
FAMGTGGYQKVTF

SEQ ID NO: 342424 - protein, 16 aa, Homo sapiens
  CDR3 for beta chain variable domain of TCR clone 171212 (TRBV9, TRBJ2-1)
CASSVGGGGNYNEQFF

SEQ ID NO: 342425 - protein, 16 aa, Homo sapiens
  CDR3 for alpha chain variable domain of TCR clone 171213 (TRAV26-1, TRAJ32)
CIVRTNYGGATNKLIF

SEQ ID NO: 342426 - protein, 14 aa, Homo sapiens
  CDR3 for beta chain variable domain of TCR clone 171213 (TRBV7-8, TRBJ2-1)
CASSPRDSLYEQFF

SEQ ID NO: 342427 - protein, 14 aa, Homo sapiens
  CDR3 for alpha chain variable domain of TCR clone 171214 (TRAV35, TRAJ28)
CAGRRGGWELPTNF

SEQ ID NO: 342428 - protein, 15 aa, Homo sapiens
  CDR3 for beta chain variable domain of TCR clone 171214 (TRBV27, TRBJ2-1)
CASSNGGGSSNEQFF

SEQ ID NO: 342429 - protein, 14 aa, Homo sapiens
  CDR3 for alpha chain variable domain of TCR clone 171215 (TRAV3, TRAJ9)
CAVRGNTGAFKTIF

SEQ ID NO: 342430 - protein, 14 aa, Homo sapiens
  CDR3 for beta chain variable domain of TCR clone 171215 (TRBV15, TRBJ2-1)
CATSGVEDYNEQFF

SEQ ID NO: 342431 - protein, 13 aa, Homo sapiens
  CDR3 for alpha chain variable domain of TCR clone 171216 (TRAV9-2, TRAJ49)
CALRNFTGNQFYF

SEQ ID NO: 342432 - protein, 16 aa, Homo sapiens
  CDR3 for beta chain variable domain of TCR clone 171216 (TRBV7-9, TRBJ2-1)
CASSPRLGSSYNEQFF

SEQ ID NO: 342433 - protein, 17 aa, Homo sapiens
  CDR3 for alpha chain variable domain of TCR clone 171217 (TRAV3, TRAJ6)
CAVRDGPRAGGSYITTF

SEQ ID NO: 342434 - protein, 14 aa, Homo sapiens
  CDR3 for beta chain variable domain of TCR clone 171217 (TRBV7-3, TRBJ2-1)
CASSTSGGWDEQFF

SEQ ID NO: 342435 - protein, 13 aa, Homo sapiens
  CDR3 for alpha chain variable domain of TCR clone 171218 (TRAV6, TRAJ33)
CALPMDSNYQLIW

SEQ ID NO: 342436 - protein, 15 aa, Homo sapiens
  CDR3 for beta chain variable domain of TCR clone 171218 (TRBV11-2, TRBJ2-2)
CASRGLVANTGELFF

SEQ ID NO: 342437 - protein, 23 aa, Homo sapiens
  CDR3 for alpha chain variable domain of TCR clone 171219 (TRAV12-2, )
CAWSVARHTPGSREAADSASYSH

SEQ ID NO: 342438 - protein, 15 aa, Homo sapiens
  CDR3 for beta chain variable domain of TCR clone 171219 (TRBV12-4, TRBJ2-2)
CASSLVRGLGGELFF

SEQ ID NO: 342439 - protein, 18 aa, Homo sapiens
  CDR3 for alpha chain variable domain of TCR clone 171220 (TRAV21, TRAJ52)
CAVRPSPAGGTSYGKLTF

SEQ ID NO: 342440 - protein, 13 aa, Homo sapiens
  CDR3 for beta chain variable domain of TCR clone 171220 (TRBV4-1, TRBJ2-2)
CASQAVNTGELFF

SEQ ID NO: 342441 - protein, 12 aa, Homo sapiens
  CDR3 for alpha chain variable domain of TCR clone 171221 (TRAV20, TRAJ54)
CAVQEGAQKMVF

SEQ ID NO: 342442 - protein, 17 aa, Homo sapiens
  CDR3 for beta chain variable domain of TCR clone 171221 (TRBV13, TRBJ2-3)
CASSLSRVAGGRNTQYF

SEQ ID NO: 342443 - protein, 15 aa, Homo sapiens
  CDR3 for alpha chain variable domain of TCR clone 171222 (TRAV3, TRAJ5)
CAVRDLDTGRRAITL

SEQ ID NO: 342444 - protein, 13 aa, Homo sapiens
  CDR3 for beta chain variable domain of TCR clone 171222 (TRBV12-4, TRBJ2-7)
CASSPTETYEQYF

SEQ ID NO: 342445 - protein, 10 aa, Homo sapiens
  CDR3 for alpha chain variable domain of TCR clone 171223 (TRAV1-2, TRAJ20)
CALNDYKLSF

SEQ ID NO: 342446 - protein, 16 aa, Homo sapiens
  CDR3 for beta chain variable domain of TCR clone 171223 (TRBV27, TRBJ2-2)
CASSSSGVSNTGELFF

SEQ ID NO: 342447 - protein, 14 aa, Homo sapiens
  CDR3 for alpha chain variable domain of TCR clone 171224 (TRAV26-1, TRAJ21)
CIVRVLGNFNKFYF

SEQ ID NO: 342448 - protein, 15 aa, Homo sapiens
  CDR3 for beta chain variable domain of TCR clone 171224 (TRBV7-2, TRBJ2-1)
CASSSGLAVGNEQFF

SEQ ID NO: 342449 - protein, 12 aa, Homo sapiens
  CDR3 for alpha chain variable domain of TCR clone 171225 (TRAV17, TRAJ49)
CATVTTGNQFYF

SEQ ID NO: 342450 - protein, 17 aa, Homo sapiens
  CDR3 for beta chain variable domain of TCR clone 171225 (TRBV18, TRBJ1-5)
CASSPTMGQGTNQPQHF

SEQ ID NO: 342451 - protein, 13 aa, Homo sapiens
  CDR3 for alpha chain variable domain of TCR clone 171226 (TRAV3, TRAJ4)
CAVRDGGYNKLIF

SEQ ID NO: 342452 - protein, 15 aa, Homo sapiens
  CDR3 for beta chain variable domain of TCR clone 171226 (TRBV7-9, TRBJ1-6)
CASSSPGRGNSPLHF

SEQ ID NO: 342453 - protein, 13 aa, Homo sapiens
  CDR3 for alpha chain variable domain of TCR clone 171227 (TRAV27, TRAJ53)
CEGQGGSNYKLTF

SEQ ID NO: 342454 - protein, 13 aa, Homo sapiens
  CDR3 for beta chain variable domain of TCR clone 171227 (TRBV29-1, TRBJ1-1)
CSVESGFGTEAFF

SEQ ID NO: 342455 - protein, 11 aa, Homo sapiens
  CDR3 for alpha chain variable domain of TCR clone 171228 (TRAV2, TRAJ13)
CASGGYQKVTF

SEQ ID NO: 342456 - protein, 11 aa, Homo sapiens
  CDR3 for beta chain variable domain of TCR clone 171228 (TRBV19, TRBJ2-2)
CASRYSGELFF

SEQ ID NO: 342457 - protein, 15 aa, Homo sapiens
  CDR3 for alpha chain variable domain of TCR clone 171229 (TRAV12-3, TRAJ49)
CAMAVTPNTGNQFYF

SEQ ID NO: 342458 - protein, 16 aa, Homo sapiens
  CDR3 for beta chain variable domain of TCR clone 171229 (TRBV5-7, TRBJ2-7)
CASSPTSGRELDEQYF

SEQ ID NO: 342459 - protein, 15 aa, Homo sapiens
  CDR3 for alpha chain variable domain of TCR clone 171230 (TRAV4, TRAJ10)
CLVGAEEGGGNKLTF

SEQ ID NO: 342460 - protein, 15 aa, Homo sapiens
  CDR3 for beta chain variable domain of TCR clone 171230 (TRBV7-2, TRBJ2-7)
CASSLTGQGTYEQYF

SEQ ID NO: 342461 - protein, 16 aa, Homo sapiens
  CDR3 for alpha chain variable domain of TCR clone 171231 (TRAV27, TRAJ56)
CAGGSRKDGANSKLTF

SEQ ID NO: 342462 - protein, 15 aa, Homo sapiens
  CDR3 for beta chain variable domain of TCR clone 171231 (TRBV4-1, TRBJ2-5)
CASSQLAGGQETQYF

SEQ ID NO: 342463 - protein, 14 aa, Homo sapiens
  CDR3 for alpha chain variable domain of TCR clone 171232 (TRAV3, TRAJ40)
CAVRDRRGTYKYIF

SEQ ID NO: 342464 - protein, 15 aa, Homo sapiens
  CDR3 for beta chain variable domain of TCR clone 171232 (TRBV11-1, TRBJ1-3)
CASTDPRAFRNTIYF

SEQ ID NO: 342465 - protein, 13 aa, Homo sapiens
  CDR3 for alpha chain variable domain of TCR clone 171233 (TRAV41, TRAJ10)
CAVYSNTGNQFYF

SEQ ID NO: 342466 - protein, 16 aa, Homo sapiens
  CDR3 for beta chain variable domain of TCR clone 171233 (TRBV5-8, TRBJ2-2)
CASSLINPGGAGELFF

SEQ ID NO: 342467 - protein, 11 aa, Homo sapiens
  CDR3 for alpha chain variable domain of TCR clone 171234 (TRAV16, TRAJ33)
CALHSNYQLIW

SEQ ID NO: 342468 - protein, 12 aa, Homo sapiens
  CDR3 for beta chain variable domain of TCR clone 171234 (TRBV5-1, TRBJ1-2)
CASSQDTYGYTF

SEQ ID NO: 342469 - protein, 14 aa, Homo sapiens
  CDR3 for alpha chain variable domain of TCR clone 171235 (TRAV12-2, TRAJ45)
CALPERGGADGLTF

SEQ ID NO: 342470 - protein, 13 aa, Homo sapiens
  CDR3 for beta chain variable domain of TCR clone 171235 (TRBV12-5, TRBJ2-3)
CASGDRQSDTQYC

SEQ ID NO: 342471 - protein, 16 aa, Homo sapiens
  CDR3 for alpha chain variable domain of TCR clone 171236 (TRAV20, TRAJ38)
CAVQASNAGTNRKPIW

SEQ ID NO: 342472 - protein, 16 aa, Homo sapiens
  CDR3 for beta chain variable domain of TCR clone 171236 (TRBV7-8, TRBJ2-6)
CASRVGDSSGANVLTF

SEQ ID NO: 342473 - protein, 17 aa, Homo sapiens
  CDR3 for alpha chain variable domain of TCR clone 171237 (TRAV13-1, TRAJ31)
CAPRDRLMFGDGTQLVV

SEQ ID NO: 342474 - protein, 13 aa, Homo sapiens
  CDR3 for beta chain variable domain of TCR clone 171237 (TRBV12-4, TRBJ2-7)
CASSPTETYEQYF

SEQ ID NO: 342475 - protein, 17 aa, Homo sapiens
  CDR3 for alpha chain variable domain of TCR clone 171238 (TRAV3, TRAJ6)
CAVRDVPRAGGSYIPTF

SEQ ID NO: 342476 - protein, 17 aa, Homo sapiens
  CDR3 for beta chain variable domain of TCR clone 171238 (TRBV28, TRBJ2-5)
CASSRQGGLAGAETQYF

SEQ ID NO: 342477 - protein, 14 aa, Homo sapiens
  CDR3 for alpha chain variable domain of TCR clone 171239 (TRAV3, TRAJ21)
CAVETQANFNKFYF

SEQ ID NO: 342478 - protein, 18 aa, Homo sapiens
  CDR3 for beta chain variable domain of TCR clone 171239 (TRBV7-9, TRBJ2-1)
CASSLAVSGTSGRNEQFF

SEQ ID NO: 342479 - protein, 14 aa, Homo sapiens
  CDR3 for alpha chain variable domain of TCR clone 171240 (TRAV29/DV5, TRAJ32)
CAAAYGGATNKLIF

SEQ ID NO: 342480 - protein, 13 aa, Homo sapiens
  CDR3 for beta chain variable domain of TCR clone 171240 (TRBV7-2, TRBJ2-2)
CASSLAVTGELFF

SEQ ID NO: 342481 - protein, 12 aa, Homo sapiens
  CDR3 for alpha chain variable domain of TCR clone 171241 (TRAV27, TRAJ33)
CAGDGSNYQLIW

SEQ ID NO: 342482 - protein, 15 aa, Homo sapiens
  CDR3 for beta chain variable domain of TCR clone 171241 (TRBV6-5, TRBJ2-7)
CASSYLTSGNYEQYF

SEQ ID NO: 342483 - protein, 13 aa, Homo sapiens
  CDR3 for alpha chain variable domain of TCR clone 171242 (TRAV4, TRAJ9)
CLVAEVGGFKTIF

SEQ ID NO: 342484 - protein, 17 aa, Homo sapiens
  CDR3 for beta chain variable domain of TCR clone 171242 (TRBV27, TRBJ2-1)
CASSPMKGQGSYNEQFF

SEQ ID NO: 342485 - protein, 12 aa, Homo sapiens
  CDR3 for alpha chain variable domain of TCR clone 171243 (TRAV12-1, TRAJ40)
CVVYSGTYKYIF

SEQ ID NO: 342486 - protein, 17 aa, Homo sapiens
  CDR3 for beta chain variable domain of TCR clone 171243 (TRBV11-3, TRBJ1-5)
CPSSPLTGLRGNQPQHF

SEQ ID NO: 342487 - protein, 12 aa, Homo sapiens
  CDR3 for alpha chain variable domain of TCR clone 171244 (TRAV13-1, TRAJ48)
CAANFGNEKLTF

SEQ ID NO: 342488 - protein, 13 aa, Homo sapiens
  CDR3 for beta chain variable domain of TCR clone 171244 (TRBV7-3, TRBJ1-1)
CASRQDWGADAFF

SEQ ID NO: 342489 - protein, 15 aa, Homo sapiens
  CDR3 for alpha chain variable domain of TCR clone 171245 (TRAV13-1, TRAJ32)
CAASNGWWCYKQAHL

SEQ ID NO: 342490 - protein, 13 aa, Homo sapiens
  CDR3 for beta chain variable domain of TCR clone 171245 (TRBV7-9, TRBJ2-3)
CASSPGSTDTQYF

SEQ ID NO: 342491 - protein, 12 aa, Homo sapiens
  CDR3 for alpha chain variable domain of TCR clone 171246 (TRAV17, TRAJ47)
CATDFDGNKLVF

SEQ ID NO: 342492 - protein, 13 aa, Homo sapiens
  CDR3 for beta chain variable domain of TCR clone 171246 (TRBV4-2, TRBJ1-1)
CASSQAGNTEAVF

SEQ ID NO: 342493 - protein, 15 aa, Homo sapiens
  CDR3 for alpha chain variable domain of TCR clone 171247 (TRAV12-2, TRAJ53)
CAVNGGGGSNHKLTF

SEQ ID NO: 342494 - protein, 14 aa, Homo sapiens
  CDR3 for beta chain variable domain of TCR clone 171247 (TRBV4-2, TRBJ2-1)
CASGLDRAYNEQFF

SEQ ID NO: 342495 - protein, 12 aa, Homo sapiens
  CDR3 for alpha chain variable domain of TCR clone 171248 (TRAV3, TRAJ43)
CAVRDPNNDMRF

SEQ ID NO: 342496 - protein, 15 aa, Homo sapiens
  CDR3 for beta chain variable domain of TCR clone 171248 (TRBV27, TRBJ1-5)
CVSSLGTAFDQPQHF

SEQ ID NO: 342497 - protein, 16 aa, Homo sapiens
  CDR3 for alpha chain variable domain of TCR clone 171249 (TRAV8-3, TRAJ52)
CAVQPAGGPSYGKLTF

SEQ ID NO: 342498 - protein, 15 aa, Homo sapiens
  CDR3 for beta chain variable domain of TCR clone 171249 (TRBV11-2, TRBJ2-7)
CASSLAGGVATEQYF

SEQ ID NO: 342499 - protein, 14 aa, Homo sapiens
  CDR3 for alpha chain variable domain of TCR clone 171250 (TRAV8-2, TRAJ37)
CVVSISGNTGKLIF

SEQ ID NO: 342500 - protein, 17 aa, Homo sapiens
  CDR3 for beta chain variable domain of TCR clone 171250 (TRBV7-3, TRBJ2-3)
CASSLMKRMRGADTQYF

SEQ ID NO: 342501 - protein, 15 aa, Homo sapiens
  CDR3 for alpha chain variable domain of TCR clone 171251 (TRAV21, TRAJ53)
CATLNSGGSNYKLTF

SEQ ID NO: 342502 - protein, 12 aa, Homo sapiens
  CDR3 for beta chain variable domain of TCR clone 171251 (TRBV5-4, TRBJ2-7)
CASSLEDYEQYF

SEQ ID NO: 342503 - protein, 14 aa, Homo sapiens
  CDR3 for alpha chain variable domain of TCR clone 171252 (TRAV2, TRAJ12)
CAVDAMDSSYELIF

SEQ ID NO: 342504 - protein, 13 aa, Homo sapiens
  CDR3 for beta chain variable domain of TCR clone 171252 (TRBV19, TRBJ2-1)
CASKVGAGGEQFF

SEQ ID NO: 342505 - protein, 13 aa, Homo sapiens
  CDR3 for alpha chain variable domain of TCR clone 171253 (TRAV12-3, TRAJ16)
CAVQLSDGQKLLF

SEQ ID NO: 342506 - protein, 12 aa, Homo sapiens
  CDR3 for beta chain variable domain of TCR clone 171253 (TRBV12-5, TRBJ2-5)
CARGQGVETQYF

SEQ ID NO: 342507 - protein, 16 aa, Homo sapiens
  CDR3 for alpha chain variable domain of TCR clone 171254 (TRAV8-4, TRAJ9)
CAVTFNTGGFKNYLWS

SEQ ID NO: 342508 - protein, 15 aa, Homo sapiens
  CDR3 for beta chain variable domain of TCR clone 171254 (TRBV7-9, TRBJ2-2)
CASSPETGAGGELFL

SEQ ID NO: 342509 - protein, 14 aa, Homo sapiens
  CDR3 for alpha chain variable domain of TCR clone 171255 (TRAV8-3, TRAJ35)
CAVGARGFGNVLHC

SEQ ID NO: 342510 - protein, 15 aa, Homo sapiens
  CDR3 for beta chain variable domain of TCR clone 171255 (TRBV11-2, TRBJ2-1)
CASSRNRGLMYEQFF

SEQ ID NO: 342511 - protein, 13 aa, Homo sapiens
  CDR3 for alpha chain variable domain of TCR clone 171256 (TRAV21, TRAJ26)
CAVLDNYGQNFVF

SEQ ID NO: 342512 - protein, 16 aa, Homo sapiens
  CDR3 for beta chain variable domain of TCR clone 171256 (TRBV5-1, TRBJ1-1)
CASSKTGTEVGTEAFF

SEQ ID NO: 342513 - protein, 12 aa, Homo sapiens
  CDR3 for alpha chain variable domain of TCR clone 171257 (TRAV13-1, TRAJ53)
CAAGGSNYKLTF

SEQ ID NO: 342514 - protein, 13 aa, Homo sapiens
  CDR3 for beta chain variable domain of TCR clone 171257 (TRBV19, TRBJ2-1)
CASSIGTGNEQFF

SEQ ID NO: 342515 - protein, 14 aa, Homo sapiens
  CDR3 for alpha chain variable domain of TCR clone 171258 (TRAV2, TRAJ9)
CAVEDRSGGFKTIF

SEQ ID NO: 342516 - protein, 14 aa, Homo sapiens
  CDR3 for beta chain variable domain of TCR clone 171258 (TRBV7-2, TRBJ2-2)
CASRGQGAAGELFF

SEQ ID NO: 342517 - protein, 13 aa, Homo sapiens
  CDR3 for alpha chain variable domain of TCR clone 171259 (TRAV12-2, TRAJ3)
CAFQYSIASKIIF

SEQ ID NO: 342518 - protein, 11 aa, Homo sapiens
  CDR3 for beta chain variable domain of TCR clone 171259 (TRBV20-1, TRBJ2-3)
CSGTSSTTQYF

SEQ ID NO: 342519 - protein, 14 aa, Homo sapiens
  CDR3 for alpha chain variable domain of TCR clone 171260 (TRAV1-2, TRAJ29)
CAVRELTSATPLVF

SEQ ID NO: 342520 - protein, 14 aa, Homo sapiens
  CDR3 for beta chain variable domain of TCR clone 171260 (TRBV3-1, TRBJ2-5)
CARSHGPAQETQYF

SEQ ID NO: 342521 - protein, 12 aa, Homo sapiens
  CDR3 for alpha chain variable domain of TCR clone 171261 (TRAV8-3, TRAJ26)
CAGDNYGKNFVL

SEQ ID NO: 342522 - protein, 15 aa, Homo sapiens
  CDR3 for beta chain variable domain of TCR clone 171261 (TRBV9, TRBJ2-1)
CASSLAGSSYNEQFF

SEQ ID NO: 342523 - protein, 14 aa, Homo sapiens
  CDR3 for alpha chain variable domain of TCR clone 171262 (TRAV12-1, TRAJ12)
CVVTRMDSSYKLIF

SEQ ID NO: 342524 - protein, 14 aa, Homo sapiens
  CDR3 for beta chain variable domain of TCR clone 171262 (TRBV7-2, TRBJ2-2)
CASSLVQNTGELFF

SEQ ID NO: 342525 - protein, 14 aa, Homo sapiens
  CDR3 for alpha chain variable domain of TCR clone 171263 (TRAV12-1, TRAJ30)
CVVSIGGRDYKIIF

SEQ ID NO: 342526 - protein, 14 aa, Homo sapiens
  CDR3 for beta chain variable domain of TCR clone 171263 (TRBV7-6, TRBJ2-3)
CASSVGTVTDTQYF

SEQ ID NO: 342527 - protein, 13 aa, Homo sapiens
  CDR3 for alpha chain variable domain of TCR clone 171264 (TRAV8-2, TRAJ36)
CVVSHLPTNNFFF

SEQ ID NO: 342528 - protein, 18 aa, Homo sapiens
  CDR3 for beta chain variable domain of TCR clone 171264 (TRBV7-9, TRBJ2-6)
CASSFPGAGSSGANVLAF

SEQ ID NO: 342529 - protein, 14 aa, Homo sapiens
  CDR3 for alpha chain variable domain of TCR clone 171265 (TRAV1-2, TRAJ16)
CSVNRFSDGQKLLF

SEQ ID NO: 342530 - protein, 15 aa, Homo sapiens
  CDR3 for beta chain variable domain of TCR clone 171265 (TRBV7-9, TRBJ2-2)
CASGPLDTFPGELFF

SEQ ID NO: 342531 - protein, 16 aa, Homo sapiens
  CDR3 for alpha chain variable domain of TCR clone 171266 (TRAV12-2, TRAJ6)
CAAPLAGSGGRYIPTF

SEQ ID NO: 342532 - protein, 13 aa, Homo sapiens
  CDR3 for beta chain variable domain of TCR clone 171266 (TRBV12-4, TRBJ1-2)
CASRTDGNYGYTF

SEQ ID NO: 342533 - protein, 14 aa, Homo sapiens
  CDR3 for alpha chain variable domain of TCR clone 171267 (TRAV12-1, TRAJ17)
CVVNYKAAGNKLTF

SEQ ID NO: 342534 - protein, 14 aa, Homo sapiens
  CDR3 for beta chain variable domain of TCR clone 171267 (TRBV7-8, TRBJ2-3)
CAGSLEAGTDTQYF

SEQ ID NO: 342535 - protein, 14 aa, Homo sapiens
  CDR3 for alpha chain variable domain of TCR clone 171268 (TRAV1-2, TRAJ16)
CAVNRFSDGQKRLF

SEQ ID NO: 342536 - protein, 12 aa, Homo sapiens
  CDR3 for beta chain variable domain of TCR clone 171268 (TRBV28, TRBJ2-6)
CAIQAGANVLTF

SEQ ID NO: 342537 - protein, 12 aa, Homo sapiens
  CDR3 for alpha chain variable domain of TCR clone 171269 (TRAV17, TRAJ57)
CATDGGSEQLAF

SEQ ID NO: 342538 - protein, 13 aa, Homo sapiens
  CDR3 for beta chain variable domain of TCR clone 171269 (TRBV7-9, TRBJ2-7)
CASSCAGAYEQYF

SEQ ID NO: 342539 - protein, 16 aa, Homo sapiens
  CDR3 for alpha chain variable domain of TCR clone 171270 (TRAV8-3, TRAJ13)
CAVGAYPSGGYQKVTF

SEQ ID NO: 342540 - protein, 14 aa, Homo sapiens
  CDR3 for beta chain variable domain of TCR clone 171270 (TRBV3-1, TRBJ2-3)
CASSWSGVGDTQYF

SEQ ID NO: 342541 - protein, 11 aa, Homo sapiens
  CDR3 for alpha chain variable domain of TCR clone 171271 (TRAV12-3, TRAJ27)
CAMANAGKSTF

SEQ ID NO: 342542 - protein, 16 aa, Homo sapiens
  CDR3 for beta chain variable domain of TCR clone 171271 (TRBV7-9, TRBJ2-3)
CASSPWREVGTDTQYF

SEQ ID NO: 342543 - protein, 14 aa, Homo sapiens
  CDR3 for alpha chain variable domain of TCR clone 171272 (TRAV16, TRAJ33)
CALPAMDSNYQLIW

SEQ ID NO: 342544 - protein, 17 aa, Homo sapiens
  CDR3 for beta chain variable domain of TCR clone 171272 (TRBV25-1, TRBJ2-7)
CASSDARVVFSSYEQYF

SEQ ID NO: 342545 - protein, 11 aa, Homo sapiens
  CDR3 for alpha chain variable domain of TCR clone 171273 (TRAV13-1, TRAJ33)
CAANSNYQLIW

SEQ ID NO: 342546 - protein, 14 aa, Homo sapiens
  CDR3 for beta chain variable domain of TCR clone 171273 (TRBV7-2, TRBJ2-3)
CASSLGGGERYAVF

SEQ ID NO: 342547 - protein, 16 aa, Homo sapiens
  CDR3 for alpha chain variable domain of TCR clone 171274 (TRAV1-2, TRAJ10)
CAVRGVLTGGGNKLTF

SEQ ID NO: 342548 - protein, 16 aa, Homo sapiens
  CDR3 for beta chain variable domain of TCR clone 171274 (TRBV28, TRBJ1-4)
CASSPPYRGRSEKLFF

SEQ ID NO: 342549 - protein, 18 aa, Homo sapiens
  CDR3 for alpha chain variable domain of TCR clone 171275 (TRAV21, TRAJ52)
CAVTPSPAGVTSYGKLTF

SEQ ID NO: 342550 - protein, 17 aa, Homo sapiens
  CDR3 for beta chain variable domain of TCR clone 171275 (TRBV13, TRBJ2-3)
CASSLSRVAGGRNTQYF

SEQ ID NO: 342551 - protein, 12 aa, Homo sapiens
  CDR3 for alpha chain variable domain of TCR clone 171276 (TRAV12-3, TRAJ40)
CAMSSGTYKYIF

SEQ ID NO: 342552 - protein, 15 aa, Homo sapiens
  CDR3 for beta chain variable domain of TCR clone 171276 (TRBV7-3, TRBJ2-2)
CASSETGQGTGELFI

SEQ ID NO: 342553 - protein, 14 aa, Homo sapiens
  CDR3 for alpha chain variable domain of TCR clone 171277 (TRAV1-2, TRAJ8)
CAVREDTGFHKLVF

SEQ ID NO: 342554 - protein, 15 aa, Homo sapiens
  CDR3 for beta chain variable domain of TCR clone 171277 (TRBV20-1, TRBJ2-7)
CSARDRVSGMDEQYF

SEQ ID NO: 342555 - protein, 14 aa, Homo sapiens
  CDR3 for alpha chain variable domain of TCR clone 171278 (TRAV1-2, TRAJ8)
FAVREGTGFQKLVF

SEQ ID NO: 342556 - protein, 12 aa, Homo sapiens
  CDR3 for beta chain variable domain of TCR clone 171278 (TRBV29-1, TRBJ2-3)
CSVTGGADTQYF

SEQ ID NO: 342557 - protein, 15 aa, Homo sapiens
  CDR3 for alpha chain variable domain of TCR clone 171279 (TRAV3, TRAJ29)
CAVRDSISGNTLLVF

SEQ ID NO: 342558 - protein, 15 aa, Homo sapiens
  CDR3 for beta chain variable domain of TCR clone 171279 (TRBV18, TRBJ2-3)
CASSPGLAGGDTQYF

SEQ ID NO: 342559 - protein, 17 aa, Homo sapiens
  CDR3 for alpha chain variable domain of TCR clone 171280 (TRAV4, TRAJ13)
CLGGVQGSSGGYQKVTF

SEQ ID NO: 342560 - protein, 15 aa, Homo sapiens
  CDR3 for beta chain variable domain of TCR clone 171280 (TRBV6-3, TRBJ2-7)
CASSSPGTVFYEQYF

SEQ ID NO: 342561 - protein, 15 aa, Homo sapiens
  CDR3 for alpha chain variable domain of TCR clone 171281 (TRAV13-1, TRAJ17)
CAASIHGGCRQQPNF

SEQ ID NO: 342562 - protein, 14 aa, Homo sapiens
  CDR3 for beta chain variable domain of TCR clone 171281 (TRBV20-1, TRBJ2-4)
CSARDRGQGGIQYF

SEQ ID NO: 342563 - protein, 10 aa, Homo sapiens
  CDR3 for alpha chain variable domain of TCR clone 171282 (TRAV12-3, TRAJ49)
CAMSGNQFYF

SEQ ID NO: 342564 - protein, 16 aa, Homo sapiens
  CDR3 for beta chain variable domain of TCR clone 171282 (TRBV12-4, TRBJ1-5)
CASSRPVGGSNQPQHF

SEQ ID NO: 342565 - protein, 14 aa, Homo sapiens
  CDR3 for alpha chain variable domain of TCR clone 171283 (TRAV12-3, TRAJ10)
SHLPLTGGGDKLTF

SEQ ID NO: 342566 - protein, 14 aa, Homo sapiens
  CDR3 for beta chain variable domain of TCR clone 171283 (TRBV3-1, TRBJ1-5)
CASSLGLDDQPQHF

SEQ ID NO: 342567 - protein, 16 aa, Homo sapiens
  CDR3 for alpha chain variable domain of TCR clone 171284 (TRAV26-1, TRAJ36)
CIVRVPDQTVANNLFF

SEQ ID NO: 342568 - protein, 15 aa, Homo sapiens
  CDR3 for beta chain variable domain of TCR clone 171284 (TRBV19, TRBJ2-4)
CASRGPRRGENIQYF

SEQ ID NO: 342569 - protein, 14 aa, Homo sapiens
  CDR3 for alpha chain variable domain of TCR clone 171285 (TRAV23/DV6, TRAJ4)
CAAPSSGGYNKLIF

SEQ ID NO: 342570 - protein, 12 aa, Homo sapiens
  CDR3 for beta chain variable domain of TCR clone 171285 (TRBV19, TRBJ2-5)
CASSISEETQYF

SEQ ID NO: 342571 - protein, 12 aa, Homo sapiens
  CDR3 for alpha chain variable domain of TCR clone 171286 (TRAV13-1, TRAJ21)
CAAKEGLKKFYF

SEQ ID NO: 342572 - protein, 14 aa, Homo sapiens
  CDR3 for beta chain variable domain of TCR clone 171286 (TRBV5-4, TRBJ1-1)
CASSLDSRRDEAFF

SEQ ID NO: 342573 - protein, 14 aa, Homo sapiens
  CDR3 for alpha chain variable domain of TCR clone 171287 (TRAV12-1, TRAJ17)
CVVNYKAAGNKLTF

SEQ ID NO: 342574 - protein, 11 aa, Homo sapiens
  CDR3 for beta chain variable domain of TCR clone 171287 (TRBV20-1, TRBJ2-1)
GASGSYNEQFF

SEQ ID NO: 342575 - protein, 14 aa, Homo sapiens
  CDR3 for alpha chain variable domain of TCR clone 171288 (TRAV1-2, TRAJ8)
CAVREDTGFQKLVL

SEQ ID NO: 342576 - protein, 11 aa, Homo sapiens
  CDR3 for beta chain variable domain of TCR clone 171288 (TRBV11-2, TRBJ2-2)
CASSLPGELFF

SEQ ID NO: 342577 - protein, 16 aa, Homo sapiens
  CDR3 for alpha chain variable domain of TCR clone 171289 (TRAV1-1, TRAJ37)
CAVRDKALATQANKSL

SEQ ID NO: 342578 - protein, 12 aa, Homo sapiens
  CDR3 for beta chain variable domain of TCR clone 171289 (TRBV11-2, TRBJ2-2)
CASSLGGGELFF

SEQ ID NO: 342579 - protein, 14 aa, Homo sapiens
  CDR3 for alpha chain variable domain of TCR clone 171290 (TRAV38-2/DV8, TRAJ54)
AAMYQIQGAQKLVF

SEQ ID NO: 342580 - protein, 17 aa, Homo sapiens
  CDR3 for beta chain variable domain of TCR clone 171290 (TRBV6-1, TRBJ2-3)
CASSEAIRLISTDTQYF

SEQ ID NO: 342581 - protein, 13 aa, Homo sapiens
  CDR3 for alpha chain variable domain of TCR clone 171291 (TRAV3, TRAJ5)
CAVRDTGRRALTF

SEQ ID NO: 342582 - protein, 12 aa, Homo sapiens
  CDR3 for beta chain variable domain of TCR clone 171291 (TRBV7-2, TRBJ1-6)
CASSLSSSPLHF

SEQ ID NO: 342583 - protein, 15 aa, Homo sapiens
  CDR3 for alpha chain variable domain of TCR clone 171292 (TRAV21, TRAJ24)
CAARSSTDSWGKLQF

SEQ ID NO: 342584 - protein, 18 aa, Homo sapiens
  CDR3 for beta chain variable domain of TCR clone 171292 (TRBV20-1, TRBJ2-6)
CSAETTPTHGSGANDLTF

SEQ ID NO: 342585 - protein, 13 aa, Homo sapiens
  CDR3 for alpha chain variable domain of TCR clone 171293 (TRAV12-3, TRAJ23)
CRPLYNQGGKLIF

SEQ ID NO: 342586 - protein, 13 aa, Homo sapiens
  CDR3 for beta chain variable domain of TCR clone 171293 (TRBV27, TRBJ1-1)
CASSLSIGAEAFS

SEQ ID NO: 342587 - protein, 11 aa, Homo sapiens
  CDR3 for alpha chain variable domain of TCR clone 171294 (TRAV2, TRAJ13)
CASGGYQKATF

SEQ ID NO: 342588 - protein, 13 aa, Homo sapiens
  CDR3 for beta chain variable domain of TCR clone 171294 (TRBV12-4, TRBJ1-2)
CASSLRQGKGYTF

SEQ ID NO: 342589 - protein, 16 aa, Homo sapiens
  CDR3 for alpha chain variable domain of TCR clone 171295 (TRAV8-2, TRAJ7)
CVVSEGPYYGNNRLAF

SEQ ID NO: 342590 - protein, 18 aa, Homo sapiens
  CDR3 for beta chain variable domain of TCR clone 171295 (TRBV11-2, TRBJ2-3)
CASSLGGASRGAPNTQYF

SEQ ID NO: 342591 - protein, 16 aa, Homo sapiens
  CDR3 for alpha chain variable domain of TCR clone 171296 (TRAV30, TRAJ24)
CGTEIVDADSWGKFQF

SEQ ID NO: 342592 - protein, 13 aa, Homo sapiens
  CDR3 for beta chain variable domain of TCR clone 171296 (TRBV20-1, TRBJ1-6)
CSAPGSGISPLHF

SEQ ID NO: 342593 - protein, 21 aa, Homo sapiens
  CDR3 for alpha chain variable domain of TCR clone 171297 (TRAV12-2, TRAJ10)
CAVRGLPGRRKQTHLWDRHSA

SEQ ID NO: 342594 - protein, 12 aa, Homo sapiens
  CDR3 for beta chain variable domain of TCR clone 171297 (TRBV7-9, TRBJ1-1)
CASSLVRGEAFF

SEQ ID NO: 342595 - protein, 14 aa, Homo sapiens
  CDR3 for alpha chain variable domain of TCR clone 171298 (TRAV2, TRAJ9)
CAVEDRSGGFKTIF

SEQ ID NO: 342596 - protein, 14 aa, Homo sapiens
  CDR3 for beta chain variable domain of TCR clone 171298 (TRBV7-6, TRBJ2-3)
CASSVAGGTDTQYF

SEQ ID NO: 342597 - protein, 13 aa, Homo sapiens
  CDR3 for alpha chain variable domain of TCR clone 171299 (TRAV8-3, TRAJ28)
CAVGAVGSYQLTF

SEQ ID NO: 342598 - protein, 11 aa, Homo sapiens
  CDR3 for beta chain variable domain of TCR clone 171299 (TRBV4-1, TRBJ2-2)
CASEHTGELFF

SEQ ID NO: 342599 - protein, 13 aa, Homo sapiens
  CDR3 for alpha chain variable domain of TCR clone 171300 (TRAV20, TRAJ37)
CAGCSSNTGKLIF

SEQ ID NO: 342600 - protein, 15 aa, Homo sapiens
  CDR3 for beta chain variable domain of TCR clone 171300 (TRBV6-1, TRBJ2-1)
CASSELRGQYNEQFF

SEQ ID NO: 342601 - protein, 15 aa, Homo sapiens
  CDR3 for alpha chain variable domain of TCR clone 171301 (TRAV2, TRAJ42)
CAVEGYGGSQGTLIF

SEQ ID NO: 342602 - protein, 14 aa, Homo sapiens
  CDR3 for beta chain variable domain of TCR clone 171301 (TRBV11-3, TRBJ2-7)
CASSPDRNTYEQYF

SEQ ID NO: 342603 - protein, 14 aa, Homo sapiens
  CDR3 for alpha chain variable domain of TCR clone 171302 (TRAV26-1, TRAJ34)
CIVRVAYNTDKLIF

SEQ ID NO: 342604 - protein, 16 aa, Homo sapiens
  CDR3 for beta chain variable domain of TCR clone 171302 (TRBV7-9, TRBJ2-3)
CASSPWREVGTDTQYF

SEQ ID NO: 342605 - protein, 14 aa, Homo sapiens
  CDR3 for alpha chain variable domain of TCR clone 171303 (TRAV27, TRAJ36)
CAGAPKRGANNLFF

SEQ ID NO: 342606 - protein, 15 aa, Homo sapiens
  CDR3 for beta chain variable domain of TCR clone 171303 (TRBV18, TRBJ2-7)
CASSPASTPNYEQYF

SEQ ID NO: 342607 - protein, 12 aa, Homo sapiens
  CDR3 for alpha chain variable domain of TCR clone 171304 (TRAV12-3, TRAJ3)
CAIDRSASKIIF

SEQ ID NO: 342608 - protein, 17 aa, Homo sapiens
  CDR3 for beta chain variable domain of TCR clone 171304 (TRBV7-9, TRBJ2-3)
CASSFEEAGAYPGTQYF

SEQ ID NO: 342609 - protein, 14 aa, Homo sapiens
  CDR3 for alpha chain variable domain of TCR clone 171305 (TRAV26-1, TRAJ26)
CIVRATFLGENFVF

SEQ ID NO: 342610 - protein, 14 aa, Homo sapiens
  CDR3 for beta chain variable domain of TCR clone 171305 (TRBV12-4, TRBJ2-5)
CASSLWQKQETQYF

SEQ ID NO: 342611 - protein, 14 aa, Homo sapiens
  CDR3 for alpha chain variable domain of TCR clone 171306 (TRAV26-1, TRAJ38)
CIADNAGNNSKLIW

SEQ ID NO: 342612 - protein, 13 aa, Homo sapiens
  CDR3 for beta chain variable domain of TCR clone 171306 (TRBV2, TRBJ1-5)
CATAGPGNQPQHF

SEQ ID NO: 342613 - protein, 14 aa, Homo sapiens
  CDR3 for alpha chain variable domain of TCR clone 171307 (TRAV13-1, TRAJ44)
CAARATGTASKLTF

SEQ ID NO: 342614 - protein, 14 aa, Homo sapiens
  CDR3 for beta chain variable domain of TCR clone 171307 (TRBV25-1, TRBJ1-1)
CASTHLGGNTEAFF

SEQ ID NO: 342615 - protein, 13 aa, Homo sapiens
  CDR3 for alpha chain variable domain of TCR clone 171308 (TRAV12-3, TRAJ7)
CAMTPYGDNRLAF

SEQ ID NO: 342616 - protein, 13 aa, Homo sapiens
  CDR3 for beta chain variable domain of TCR clone 171308 (TRBV10-3, TRBJ1-2)
CAINADLNYGYTF

SEQ ID NO: 342617 - protein, 17 aa, Homo sapiens
  CDR3 for alpha chain variable domain of TCR clone 171309 (TRAV26-1, TRAJ53)
FIVRVDDSGGSNYKLTF

SEQ ID NO: 342618 - protein, 19 aa, Homo sapiens
  CDR3 for beta chain variable domain of TCR clone 171309 (TRBV25-1, TRBJ2-2)
CAILVYRVDRGRKTGELFF

SEQ ID NO: 342619 - protein, 15 aa, Homo sapiens
  CDR3 for alpha chain variable domain of TCR clone 171310 (TRAV17, TRAJ57)
CATGHSQGGSENLVF

SEQ ID NO: 342620 - protein, 14 aa, Homo sapiens
  CDR3 for beta chain variable domain of TCR clone 171310 (TRBV12-5, TRBJ2-5)
CASGSRTHQETQYF

SEQ ID NO: 342621 - protein, 13 aa, Homo sapiens
  CDR3 for alpha chain variable domain of TCR clone 171311 (TRAV20, TRAJ20)
CAVQAGSGYKLSF

SEQ ID NO: 342622 - protein, 17 aa, Homo sapiens
  CDR3 for beta chain variable domain of TCR clone 171311 (TRBV4-1, TRBJ2-5)
CASSQGWLGKVQETQYF

SEQ ID NO: 342623 - protein, 13 aa, Homo sapiens
  CDR3 for alpha chain variable domain of TCR clone 171312 (TRAV2, TRAJ15)
CAVASQAGTALIF

SEQ ID NO: 342624 - protein, 13 aa, Homo sapiens
  CDR3 for beta chain variable domain of TCR clone 171312 (TRBV19, TRBJ2-7)
CASSIDRTYEQYF

SEQ ID NO: 342625 - protein, 15 aa, Homo sapiens
  CDR3 for alpha chain variable domain of TCR clone 171313 (TRAV3, TRAJ20)
CAVRDIKLSDYKLSF

SEQ ID NO: 342626 - protein, 16 aa, Homo sapiens
  CDR3 for beta chain variable domain of TCR clone 171313 (TRBV7-9, TRBJ2-3)
CASSLGKQGGTDTQYF

SEQ ID NO: 342627 - protein, 14 aa, Homo sapiens
  CDR3 for alpha chain variable domain of TCR clone 171314 (TRAV12-2, TRAJ13)
CAVKKTGGYQKVTF

SEQ ID NO: 342628 - protein, 14 aa, Homo sapiens
  CDR3 for beta chain variable domain of TCR clone 171314 (TRBV12-5, TRBJ2-5)
CASGSRTHQETQYV

SEQ ID NO: 342629 - protein, 14 aa, Homo sapiens
  CDR3 for alpha chain variable domain of TCR clone 171315 (TRAV12-2, TRAJ13)
CALKKTGGYQKVTF

SEQ ID NO: 342630 - protein, 11 aa, Homo sapiens
  CDR3 for beta chain variable domain of TCR clone 171315 (TRBV29-1, TRBJ2-5)
CSEDRTGTQYF

SEQ ID NO: 342631 - protein, 15 aa, Homo sapiens
  CDR3 for alpha chain variable domain of TCR clone 171316 (TRAV27, TRAJ38)
CAGRFNAGNNRKLIW

SEQ ID NO: 342632 - protein, 13 aa, Homo sapiens
  CDR3 for beta chain variable domain of TCR clone 171316 (TRBV12-5, TRBJ2-3)
CASQKRGKDTQYF

SEQ ID NO: 342633 - protein, 12 aa, Homo sapiens
  CDR3 for alpha chain variable domain of TCR clone 171317 (TRAV23/DV6, TRAJ16)
CAATGTGQKLLF

SEQ ID NO: 342634 - protein, 14 aa, Homo sapiens
  CDR3 for beta chain variable domain of TCR clone 171317 (TRBV12-4, TRBJ1-3)
CASTLTGAGNTIYF

SEQ ID NO: 342635 - protein, 23 aa, Homo sapiens
  CDR3 for alpha chain variable domain of TCR clone 171318 (TRAV26-1, )
CIADNAGNDHIQNPAPAVSQLRD

SEQ ID NO: 342636 - protein, 15 aa, Homo sapiens
  CDR3 for beta chain variable domain of TCR clone 171318 (TRBV19, TRBJ1-1)
CASTSGQIQNTEAFF

SEQ ID NO: 342637 - protein, 14 aa, Homo sapiens
  CDR3 for alpha chain variable domain of TCR clone 171319 (TRAV1-2, TRAJ16)
CAVNRFSDGQKLLF

SEQ ID NO: 342638 - protein, 14 aa, Homo sapiens
  CDR3 for beta chain variable domain of TCR clone 171319 (TRBV12-4, TRBJ1-6)
CASRPDGYNSPLHF

SEQ ID NO: 342639 - protein, 14 aa, Homo sapiens
  CDR3 for alpha chain variable domain of TCR clone 171320 (TRAV12-2, TRAJ13)
CAVNKTGGYQKATF

SEQ ID NO: 342640 - protein, 15 aa, Homo sapiens
  CDR3 for beta chain variable domain of TCR clone 171320 (TRBV27, TRBJ2-1)
CASSNGGGSSNEQFF

SEQ ID NO: 342641 - protein, 15 aa, Homo sapiens
  CDR3 for alpha chain variable domain of TCR clone 171321 (TRAV14/DV4, TRAJ10)
CAMRELTGGGNKLTF

SEQ ID NO: 342642 - protein, 18 aa, Homo sapiens
  CDR3 for beta chain variable domain of TCR clone 171321 (TRBV7-9, TRBJ2-7)
CASSLTTSGSRTWYEQYF

SEQ ID NO: 342643 - protein, 11 aa, Homo sapiens
  CDR3 for alpha chain variable domain of TCR clone 171322 (TRAV23/DV6, TRAJ58)
CAARLLRGETS

SEQ ID NO: 342644 - protein, 14 aa, Homo sapiens
  CDR3 for beta chain variable domain of TCR clone 171322 (TRBV7-2, TRBJ2-5)
CASSCTQGQETQYF

SEQ ID NO: 342645 - protein, 15 aa, Homo sapiens
  CDR3 for alpha chain variable domain of TCR clone 171323 (TRAV8-6, TRAJ10)
CAVSDQAGGGNKLTF

SEQ ID NO: 342646 - protein, 13 aa, Homo sapiens
  CDR3 for beta chain variable domain of TCR clone 171323 (TRBV7-2, TRBJ2-2)
CASSSVRAGELFF

SEQ ID NO: 342647 - protein, 14 aa, Homo sapiens
  CDR3 for alpha chain variable domain of TCR clone 171324 (TRAV12-1, TRAJ10)
CVAILTGGGNKLTF

SEQ ID NO: 342648 - protein, 15 aa, Homo sapiens
  CDR3 for beta chain variable domain of TCR clone 171324 (TRBV20-1, TRBJ2-7)
CSARGFSPQTYEQYF

SEQ ID NO: 342649 - protein, 13 aa, Homo sapiens
  CDR3 for alpha chain variable domain of TCR clone 171325 (TRAV2, TRAJ40)
CAVVTSGTYKYIF

SEQ ID NO: 342650 - protein, 16 aa, Homo sapiens
  CDR3 for beta chain variable domain of TCR clone 171325 (TRBV7-3, TRBJ2-1)
CASSFTGRRSYNEQFF

SEQ ID NO: 342651 - protein, 20 aa, Homo sapiens
  CDR3 for alpha chain variable domain of TCR clone 171326 (TRAV8-4, TRAJ3)
CAVSPLYRGTAVLPRSSLDQ

SEQ ID NO: 342652 - protein, 16 aa, Homo sapiens
  CDR3 for beta chain variable domain of TCR clone 171326 (TRBV6-5, TRBJ2-2)
CASSFDDAGVAGELFF

SEQ ID NO: 342653 - protein, 11 aa, Homo sapiens
  CDR3 for alpha chain variable domain of TCR clone 171327 (TRAV21, TRAJ27)
CAVRMQANQPL

SEQ ID NO: 342654 - protein, 14 aa, Homo sapiens
  CDR3 for beta chain variable domain of TCR clone 171327 (TRBV11-2, TRBJ2-3)
CASSRLARTDTQYF

SEQ ID NO: 342655 - protein, 13 aa, Homo sapiens
  CDR3 for alpha chain variable domain of TCR clone 171328 (TRAV3, TRAJ5)
CAVRDTGRRALTF

SEQ ID NO: 342656 - protein, 15 aa, Homo sapiens
  CDR3 for beta chain variable domain of TCR clone 171328 (TRBV10-3, TRBJ1-2)
CAISESRESNYGYTF

SEQ ID NO: 342657 - protein, 14 aa, Homo sapiens
  CDR3 for alpha chain variable domain of TCR clone 171329 (TRAV8-3, TRAJ36)
CAVGPLAGANNLFF

SEQ ID NO: 342658 - protein, 15 aa, Homo sapiens
  CDR3 for beta chain variable domain of TCR clone 171329 (TRBV4-1, TRBJ2-1)
CASSQDPGNYNEQFF

SEQ ID NO: 342659 - protein, 13 aa, Homo sapiens
  CDR3 for alpha chain variable domain of TCR clone 171330 (TRAV12-3, TRAJ33)
CAMSVNSNYQLIW

SEQ ID NO: 342660 - protein, 15 aa, Homo sapiens
  CDR3 for beta chain variable domain of TCR clone 171330 (TRBV7-9, TRBJ2-7)
CASSPGGGLTYEKYF

SEQ ID NO: 342661 - protein, 15 aa, Homo sapiens
  CDR3 for alpha chain variable domain of TCR clone 171331 (TRAV2, TRAJ9)
CAVEDRGTEGFKTIF

SEQ ID NO: 342662 - protein, 14 aa, Homo sapiens
  CDR3 for beta chain variable domain of TCR clone 171331 (TRBV13, TRBJ2-5)
CASSLGTAQETQYF

SEQ ID NO: 342663 - protein, 17 aa, Homo sapiens
  CDR3 for alpha chain variable domain of TCR clone 171332 (TRAV4, TRAJ13)
CLVGVQGSSGGYQKVTF

SEQ ID NO: 342664 - protein, 15 aa, Homo sapiens
  CDR3 for beta chain variable domain of TCR clone 171332 (TRBV20-1, TRBJ2-7)
CSARDRVSGMDEQYF

SEQ ID NO: 342665 - protein, 18 aa, Homo sapiens
  CDR3 for alpha chain variable domain of TCR clone 171333 (TRAV13-1, TRAJ52)
CAAKNPNAGGTSNGKLTF

SEQ ID NO: 342666 - protein, 15 aa, Homo sapiens
  CDR3 for beta chain variable domain of TCR clone 171333 (TRBV11-3, TRBJ2-3)
CASLKDGREGDTQYF

SEQ ID NO: 342667 - protein, 15 aa, Homo sapiens
  CDR3 for alpha chain variable domain of TCR clone 171334 (TRAV2, TRAJ9)
CAVEDRGTGGFKTIF

SEQ ID NO: 342668 - protein, 13 aa, Homo sapiens
  CDR3 for beta chain variable domain of TCR clone 171334 (TRBV7-2, TRBJ2-7)
CASSSPSGSEQYF

SEQ ID NO: 342669 - protein, 11 aa, Homo sapiens
  CDR3 for alpha chain variable domain of TCR clone 171335 (TRAV26-2, TRAJ8)
CILTGFQKLVF

SEQ ID NO: 342670 - protein, 15 aa, Homo sapiens
  CDR3 for beta chain variable domain of TCR clone 171335 (TRBV10-3, TRBJ2-3)
CAISLTSGGTDTQYF

SEQ ID NO: 342671 - protein, 12 aa, Homo sapiens
  CDR3 for alpha chain variable domain of TCR clone 171336 (TRAV38-1, TRAJ57)
CAFMKLPPTLVF

SEQ ID NO: 342672 - protein, 14 aa, Homo sapiens
  CDR3 for beta chain variable domain of TCR clone 171336 (TRBV7-8, TRBJ2-3)
CASSLEAGTDTQYL

SEQ ID NO: 342673 - protein, 14 aa, Homo sapiens
  CDR3 for alpha chain variable domain of TCR clone 171337 (TRAV8-1, TRAJ5)
CAVRTDTGRRALTF

SEQ ID NO: 342674 - protein, 19 aa, Homo sapiens
  CDR3 for beta chain variable domain of TCR clone 171337 (TRBV28, TRBJ2-1)
CASSFSIRGSGRTRYEQFF

SEQ ID NO: 342675 - protein, 13 aa, Homo sapiens
  CDR3 for alpha chain variable domain of TCR clone 171338 (TRAV2, TRAJ40)
CAVVPSGTYKYIF

SEQ ID NO: 342676 - protein, 16 aa, Homo sapiens
  CDR3 for beta chain variable domain of TCR clone 171338 (TRBV29-1, TRBJ2-6)
CSVEDITYSGANDLTF

SEQ ID NO: 342677 - protein, 10 aa, Homo sapiens
  CDR3 for alpha chain variable domain of TCR clone 171339 (TRAV1-2, TRAJ31)
CVSEDARLRF

SEQ ID NO: 342678 - protein, 14 aa, Homo sapiens
  CDR3 for beta chain variable domain of TCR clone 171339 (TRBV19, TRBJ2-1)
CASPTFVLGGEQFF

SEQ ID NO: 342679 - protein, 19 aa, Homo sapiens
  CDR3 for alpha chain variable domain of TCR clone 171340 (TRAV13-1, TRAJ52)
CAASPYQNAGGTSYGKLTF

SEQ ID NO: 342680 - protein, 13 aa, Homo sapiens
  CDR3 for beta chain variable domain of TCR clone 171340 (TRBV2, TRBJ1-5)
CATAGPGNQPQHF

SEQ ID NO: 342681 - protein, 12 aa, Homo sapiens
  CDR3 for alpha chain variable domain of TCR clone 171341 (TRAV3, TRAJ20)
CAVRDGDYKLSF

SEQ ID NO: 342682 - protein, 17 aa, Homo sapiens
  CDR3 for beta chain variable domain of TCR clone 171341 (TRBV15, TRBJ1-2)
CATSGREIDVVNYGYTF

SEQ ID NO: 342683 - protein, 14 aa, Homo sapiens
  CDR3 for alpha chain variable domain of TCR clone 171342 (TRAV26-1, TRAJ38)
CIAYNAGNNRKLIW

SEQ ID NO: 342684 - protein, 13 aa, Homo sapiens
  CDR3 for beta chain variable domain of TCR clone 171342 (TRBV7-3, TRBJ1-1)
CASSQDWGAEAFF

SEQ ID NO: 342685 - protein, 15 aa, Homo sapiens
  CDR3 for alpha chain variable domain of TCR clone 171343 (TRAV21, TRAJ10)
CAVPLLTGGGNKLTF

SEQ ID NO: 342686 - protein, 15 aa, Homo sapiens
  CDR3 for beta chain variable domain of TCR clone 171343 (TRBV6-1, TRBJ2-2)
CASSRLRGDTGELFF

SEQ ID NO: 342687 - protein, 13 aa, Homo sapiens
  CDR3 for alpha chain variable domain of TCR clone 171344 (TRAV25, TRAJ17)
CAGLRAAGNKLTF

SEQ ID NO: 342688 - protein, 17 aa, Homo sapiens
  CDR3 for beta chain variable domain of TCR clone 171344 (TRBV28, TRBJ1-1)
CASSLSGTGYENTEAFF

SEQ ID NO: 342689 - protein, 14 aa, Homo sapiens
  CDR3 for alpha chain variable domain of TCR clone 171345 (TRAV26-1, TRAJ38)
CIADNAGNNRRLLW

SEQ ID NO: 342690 - protein, 13 aa, Homo sapiens
  CDR3 for beta chain variable domain of TCR clone 171345 (TRBV20-1, TRBJ1-1)
CSARGGGNTEAFF

SEQ ID NO: 342691 - protein, 13 aa, Homo sapiens
  CDR3 for alpha chain variable domain of TCR clone 171346 (TRAV16, TRAJ34)
CALTGYNTDKLIF

SEQ ID NO: 342692 - protein, 14 aa, Homo sapiens
  CDR3 for beta chain variable domain of TCR clone 171346 (TRBV13, TRBJ2-7)
CASSLKGASYEQYF

SEQ ID NO: 342693 - protein, 15 aa, Homo sapiens
  CDR3 for alpha chain variable domain of TCR clone 171347 (TRAV17, TRAJ13)
CATVPNSGGYQNVTF

SEQ ID NO: 342694 - protein, 13 aa, Homo sapiens
  CDR3 for beta chain variable domain of TCR clone 171347 (TRBV3-1, TRBJ1-5)
CASSQAGGQPQHF

SEQ ID NO: 342695 - protein, 18 aa, Homo sapiens
  CDR3 for alpha chain variable domain of TCR clone 171348 (TRAV13-1, TRAJ52)
CAASKRSAGGTSYGKLTF

SEQ ID NO: 342696 - protein, 12 aa, Homo sapiens
  CDR3 for beta chain variable domain of TCR clone 171348 (TRBV19, TRBJ1-1)
CASSTTGIEAFF

SEQ ID NO: 342697 - protein, 15 aa, Homo sapiens
  CDR3 for alpha chain variable domain of TCR clone 171349 (TRAV27, TRAJ38)
CAARRNAGNNRELIW

SEQ ID NO: 342698 - protein, 13 aa, Homo sapiens
  CDR3 for beta chain variable domain of TCR clone 171349 (TRBV20-1, TRBJ1-1)
CSARAGGNTEAFF

SEQ ID NO: 342699 - protein, 16 aa, Homo sapiens
  CDR3 for alpha chain variable domain of TCR clone 171350 (TRAV16, TRAJ52)
CALSAAGGTSYGKLTF

SEQ ID NO: 342700 - protein, 13 aa, Homo sapiens
  CDR3 for beta chain variable domain of TCR clone 171350 (TRBV12-4, TRBJ1-2)
CASSLRQGKGYTF

SEQ ID NO: 342701 - protein, 15 aa, Homo sapiens
  CDR3 for alpha chain variable domain of TCR clone 171351 (TRAV26-1, TRAJ22)
CIVRVSFWFCKATDV

SEQ ID NO: 342702 - protein, 13 aa, Homo sapiens
  CDR3 for beta chain variable domain of TCR clone 171351 (TRBV7-9, TRBJ1-2)
CASSLKQNYGYTF

SEQ ID NO: 342703 - protein, 14 aa, Homo sapiens
  CDR3 for alpha chain variable domain of TCR clone 171352 (TRAV12-2, TRAJ13)
CAVKKTGGYQKVTF

SEQ ID NO: 342704 - protein, 13 aa, Homo sapiens
  CDR3 for beta chain variable domain of TCR clone 171352 (TRBV10-3, TRBJ2-7)
CAYKLAVNYEQYF

SEQ ID NO: 342705 - protein, 18 aa, Homo sapiens
  CDR3 for alpha chain variable domain of TCR clone 171353 (TRAV21, TRAJ13)
CAVPRSFWGLPESYFWNW

SEQ ID NO: 342706 - protein, 15 aa, Homo sapiens
  CDR3 for beta chain variable domain of TCR clone 171353 (TRBV7-9, TRBJ1-6)
CASSSPGRGNSPLHF

SEQ ID NO: 342707 - protein, 15 aa, Homo sapiens
  CDR3 for alpha chain variable domain of TCR clone 171354 (TRAV27, TRAJ38)
CAARRNAGNNRKLIW

SEQ ID NO: 342708 - protein, 14 aa, Homo sapiens
  CDR3 for beta chain variable domain of TCR clone 171354 (TRBV5-5, TRBJ1-5)
CASSGQGVDQPQHF

SEQ ID NO: 342709 - protein, 13 aa, Homo sapiens
  CDR3 for alpha chain variable domain of TCR clone 171355 (TRAV21, TRAJ57)
CSVTQGGSEKLVF

SEQ ID NO: 342710 - protein, 15 aa, Homo sapiens
  CDR3 for beta chain variable domain of TCR clone 171355 (TRBV5-1, TRBJ1-1)
CASSSTTVTNTEAFF

SEQ ID NO: 342711 - protein, 14 aa, Homo sapiens
  CDR3 for alpha chain variable domain of TCR clone 171356 (TRAV1-2, TRAJ16)
CAVNRFSDGQKLHF

SEQ ID NO: 342712 - protein, 14 aa, Homo sapiens
  CDR3 for beta chain variable domain of TCR clone 171356 (TRBV10-2, TRBJ1-5)
CASSPTGRNQPQHF

SEQ ID NO: 342713 - protein, 15 aa, Homo sapiens
  CDR3 for alpha chain variable domain of TCR clone 171357 (TRAV21, TRAJ24)
CATRSSTDSWGKLQF

SEQ ID NO: 342714 - protein, 16 aa, Homo sapiens
  CDR3 for beta chain variable domain of TCR clone 171357 (TRBV28, TRBJ2-7)
CASSPWVATGDLSQYF

SEQ ID NO: 342715 - protein, 10 aa, Homo sapiens
  CDR3 for alpha chain variable domain of TCR clone 171358 (TRAV5, TRAJ34)
CAKDTDKLIF

SEQ ID NO: 342716 - protein, 13 aa, Homo sapiens
  CDR3 for beta chain variable domain of TCR clone 171358 (TRBV7-9, TRBJ1-2)
CASSLKQNYGYTF

SEQ ID NO: 342717 - protein, 13 aa, Homo sapiens
  CDR3 for alpha chain variable domain of TCR clone 171359 (TRAV8-3, TRAJ28)
CAVGAVGSYQLTF

SEQ ID NO: 342718 - protein, 14 aa, Homo sapiens
  CDR3 for beta chain variable domain of TCR clone 171359 (TRBV7-2, TRBJ2-7)
CASRSPGAAYEQYF

SEQ ID NO: 342719 - protein, 14 aa, Homo sapiens
  CDR3 for alpha chain variable domain of TCR clone 171360 (TRAV13-1, TRAJ32)
CAARGSGATNKLIF

SEQ ID NO: 342720 - protein, 15 aa, Homo sapiens
  CDR3 for beta chain variable domain of TCR clone 171360 (TRBV5-5, TRBJ1-1)
CASSLVGKENTEAFF

SEQ ID NO: 342721 - protein, 13 aa, Homo sapiens
  CDR3 for alpha chain variable domain of TCR clone 171361 (TRAV12-2, TRAJ50)
CAVIVTSYDKVIF

SEQ ID NO: 342722 - protein, 15 aa, Homo sapiens
  CDR3 for beta chain variable domain of TCR clone 171361 (TRBV27, TRBJ2-7)
CASSLFGTGLDEQYF

SEQ ID NO: 342723 - protein, 11 aa, Homo sapiens
  CDR3 for alpha chain variable domain of TCR clone 171362 (TRAV1-2, TRAJ40)
YAVPGTYKYIF

SEQ ID NO: 342724 - protein, 16 aa, Homo sapiens
  CDR3 for beta chain variable domain of TCR clone 171362 (TRBV29-1, TRBJ2-7)
CSVEVVGTSGSYEQYF

SEQ ID NO: 342725 - protein, 15 aa, Homo sapiens
  CDR3 for alpha chain variable domain of TCR clone 171363 (TRAV2, TRAJ9)
CAVEDRGTGGFKTFF

SEQ ID NO: 342726 - protein, 13 aa, Homo sapiens
  CDR3 for beta chain variable domain of TCR clone 171363 (TRBV19, TRBJ1-2)
CASSVPGQDGYTF

SEQ ID NO: 342727 - protein, 16 aa, Homo sapiens
  CDR3 for alpha chain variable domain of TCR clone 171364 (TRAV12-3, TRAJ53)
CAMSPGSGGSNYKLTF

SEQ ID NO: 342728 - protein, 16 aa, Homo sapiens
  CDR3 for beta chain variable domain of TCR clone 171364 (TRBV15, TRBJ1-4)
CATSRDSPPGREKLFF

SEQ ID NO: 342729 - protein, 12 aa, Homo sapiens
  CDR3 for alpha chain variable domain of TCR clone 171365 (TRAV26-1, TRAJ48)
CIAVVGNEKLTF

SEQ ID NO: 342730 - protein, 17 aa, Homo sapiens
  CDR3 for beta chain variable domain of TCR clone 171365 (TRBV7-6, TRBJ2-1)
CASSFGLAGGTYNEQFF

SEQ ID NO: 342731 - protein, 14 aa, Homo sapiens
  CDR3 for alpha chain variable domain of TCR clone 171366 (TRAV3, TRAJ6)
CAVRDPGGSYIPTF

SEQ ID NO: 342732 - protein, 16 aa, Homo sapiens
  CDR3 for beta chain variable domain of TCR clone 171366 (TRBV27, TRBJ2-5)
CASSLSRTAGGETQYF

SEQ ID NO: 342733 - protein, 23 aa, Homo sapiens
  CDR3 for alpha chain variable domain of TCR clone 171367 (TRAV26-1, )
CIADNASKNHIQNPDPAVYQLRD

SEQ ID NO: 342734 - protein, 13 aa, Homo sapiens
  CDR3 for beta chain variable domain of TCR clone 171367 (TRBV20-1, TRBJ1-1)
CSARGGGNTEAFF

SEQ ID NO: 342735 - protein, 15 aa, Homo sapiens
  CDR3 for alpha chain variable domain of TCR clone 171368 (TRAV23/DV6, TRAJ18)
CAARYRGSTLGRLYF

SEQ ID NO: 342736 - protein, 13 aa, Homo sapiens
  CDR3 for beta chain variable domain of TCR clone 171368 (TRBV7-2, TRBJ2-7)
CASSSPSGSEQSF

SEQ ID NO: 342737 - protein, 14 aa, Homo sapiens
  CDR3 for alpha chain variable domain of TCR clone 171369 (TRAV9-2, TRAJ39)
CALYIYNAGNMLTF

SEQ ID NO: 342738 - protein, 15 aa, Homo sapiens
  CDR3 for beta chain variable domain of TCR clone 171369 (TRBV27, TRBJ1-6)
CASSFDRGLGSPLYF

SEQ ID NO: 342739 - protein, 14 aa, Homo sapiens
  CDR3 for alpha chain variable domain of TCR clone 171370 (TRAV26-1, TRAJ45)
CIEVTGGGADGLTF

SEQ ID NO: 342740 - protein, 13 aa, Homo sapiens
  CDR3 for beta chain variable domain of TCR clone 171370 (TRBV7-6, TRBJ1-2)
CASCLVADYGYTF

SEQ ID NO: 342741 - protein, 15 aa, Homo sapiens
  CDR3 for alpha chain variable domain of TCR clone 171371 (TRAV1-2, TRAJ28)
CAVQYSGAGSYQLTF

SEQ ID NO: 342742 - protein, 15 aa, Homo sapiens
  CDR3 for beta chain variable domain of TCR clone 171371 (TRBV9, TRBJ1-6)
CASSVAGTGDSPLLF

SEQ ID NO: 342743 - protein, 13 aa, Homo sapiens
  CDR3 for alpha chain variable domain of TCR clone 171372 (TRAV1-2, TRAJ9)
CAALNTGGFKTIF

SEQ ID NO: 342744 - protein, 13 aa, Homo sapiens
  CDR3 for beta chain variable domain of TCR clone 171372 (TRBV19, TRBJ1-2)
CASSVSGQDGCTF

SEQ ID NO: 342745 - protein, 15 aa, Homo sapiens
  CDR3 for alpha chain variable domain of TCR clone 171373 (TRAV3, TRAJ22)
CAVRDRGGSARQLTF

SEQ ID NO: 342746 - protein, 15 aa, Homo sapiens
  CDR3 for beta chain variable domain of TCR clone 171373 (TRBV7-9, TRBJ2-3)
CASSSSGGATDTQYF

SEQ ID NO: 342747 - protein, 11 aa, Homo sapiens
  CDR3 for alpha chain variable domain of TCR clone 171374 (TRAV4, TRAJ31)
CLVGLNARLMF

SEQ ID NO: 342748 - protein, 16 aa, Homo sapiens
  CDR3 for beta chain variable domain of TCR clone 171374 (TRBV15, TRBJ2-6)
CATSVNGGFLANVLTI

SEQ ID NO: 342749 - protein, 14 aa, Homo sapiens
  CDR3 for alpha chain variable domain of TCR clone 171375 (TRAV2, TRAJ37)
RAVDFTSNTGKLIF

SEQ ID NO: 342750 - protein, 15 aa, Homo sapiens
  CDR3 for beta chain variable domain of TCR clone 171375 (TRBV20-1, TRBJ1-1)
CSASRGVTGNTVAFF

SEQ ID NO: 342751 - protein, 14 aa, Homo sapiens
  CDR3 for alpha chain variable domain of TCR clone 171376 (TRAV29/DV5, TRAJ53)
CAASVEVATINLHL

SEQ ID NO: 342752 - protein, 17 aa, Homo sapiens
  CDR3 for beta chain variable domain of TCR clone 171376 (TRBV7-8, TRBJ2-6)
CASSAGTGGAGANVLTF

SEQ ID NO: 342753 - protein, 13 aa, Homo sapiens
  CDR3 for alpha chain variable domain of TCR clone 171377 (TRAV13-1, TRAJ39)
CSKHSNAGNMLTF

SEQ ID NO: 342754 - protein, 13 aa, Homo sapiens
  CDR3 for beta chain variable domain of TCR clone 171377 (TRBV20-1, TRBJ1-1)
CSARGGGNTEAFF

SEQ ID NO: 342755 - protein, 16 aa, Homo sapiens
  CDR3 for alpha chain variable domain of TCR clone 171378 (TRAV17, TRAJ12)
CATDGGLMDSSYKLIF

SEQ ID NO: 342756 - protein, 14 aa, Homo sapiens
  CDR3 for beta chain variable domain of TCR clone 171378 (TRBV29-1, TRBJ1-2)
CSVEGTDSNYGYTF

SEQ ID NO: 342757 - protein, 12 aa, Homo sapiens
  CDR3 for alpha chain variable domain of TCR clone 171379 (TRAV10, TRAJ43)
CVVVRVGNDMRF

SEQ ID NO: 342758 - protein, 14 aa, Homo sapiens
  CDR3 for beta chain variable domain of TCR clone 171379 (TRBV7-2, TRBJ2-7)
CASSPKTSFYEQYF

SEQ ID NO: 342759 - protein, 14 aa, Homo sapiens
  CDR3 for alpha chain variable domain of TCR clone 171380 (TRAV21, TRAJ35)
RAVMPIGFGNVLHC

SEQ ID NO: 342760 - protein, 12 aa, Homo sapiens
  CDR3 for beta chain variable domain of TCR clone 171380 (TRBV7-9, TRBJ2-7)
CASSIKREEQYF

SEQ ID NO: 342761 - protein, 13 aa, Homo sapiens
  CDR3 for alpha chain variable domain of TCR clone 171381 (TRAV13-1, TRAJ21)
CAASIYNFNKFYF

SEQ ID NO: 342762 - protein, 12 aa, Homo sapiens
  CDR3 for beta chain variable domain of TCR clone 171381 (TRBV12-4, TRBJ2-3)
CASSSTTDTQYF

SEQ ID NO: 342763 - protein, 15 aa, Homo sapiens
  CDR3 for alpha chain variable domain of TCR clone 171382 (TRAV8-3, TRAJ45)
CASSYSGGGADGLTL

SEQ ID NO: 342764 - protein, 17 aa, Homo sapiens
  CDR3 for beta chain variable domain of TCR clone 171382 (TRBV20-1, TRBJ2-2)
CSASGSGQGGLTGELFF

SEQ ID NO: 342765 - protein, 11 aa, Homo sapiens
  CDR3 for alpha chain variable domain of TCR clone 171383 (TRAV1-2, TRAJ20)
CAVANDYKLSF

SEQ ID NO: 342766 - protein, 20 aa, Homo sapiens
  CDR3 for beta chain variable domain of TCR clone 171383 (TRBV11-2, TRBJ2-2)
LRTRPCISVPAALEAGSCFF

SEQ ID NO: 342767 - protein, 13 aa, Homo sapiens
  CDR3 for alpha chain variable domain of TCR clone 171384 (TRAV29/DV5, TRAJ49)
CAASQNTANQFYF

SEQ ID NO: 342768 - protein, 12 aa, Homo sapiens
  CDR3 for beta chain variable domain of TCR clone 171384 (TRBV25-1, TRBJ2-3)
CASRAGGDTQYF

SEQ ID NO: 342769 - protein, 15 aa, Homo sapiens
  CDR3 for alpha chain variable domain of TCR clone 171385 (TRAV17, TRAJ37)
CATDGGSSNTGKLIF

SEQ ID NO: 342770 - protein, 15 aa, Homo sapiens
  CDR3 for beta chain variable domain of TCR clone 171385 (TRBV7-9, TRBJ2-1)
CASSLGTSGDNEQFF

SEQ ID NO: 342771 - protein, 14 aa, Homo sapiens
  CDR3 for alpha chain variable domain of TCR clone 171386 (TRAV13-2, TRAJ27)
CAENIEPGNTPLVF

SEQ ID NO: 342772 - protein, 14 aa, Homo sapiens
  CDR3 for beta chain variable domain of TCR clone 171386 (TRBV19, TRBJ2-2)
CATTGNANTGELFF

SEQ ID NO: 342773 - protein, 12 aa, Homo sapiens
  CDR3 for alpha chain variable domain of TCR clone 171387 (TRAV13-2, TRAJ23)
CAERHRGGKLIF

SEQ ID NO: 342774 - protein, 15 aa, Homo sapiens
  CDR3 for beta chain variable domain of TCR clone 171387 (TRBV7-9, TRBJ1-6)
CTSSSPRRGNSTLHF

SEQ ID NO: 342775 - protein, 10 aa, Homo sapiens
  CDR3 for alpha chain variable domain of TCR clone 171388 (TRAV26-1, TRAJ40)
CIAGTDKYIF

SEQ ID NO: 342776 - protein, 15 aa, Homo sapiens
  CDR3 for beta chain variable domain of TCR clone 171388 (TRBV19, TRBJ2-1)
CASSSPGVPLGEQFF

SEQ ID NO: 342777 - protein, 17 aa, Homo sapiens
  CDR3 for alpha chain variable domain of TCR clone 171389 (TRAV3, TRAJ22)
CAVRDQTLEGFCKATDL

SEQ ID NO: 342778 - protein, 15 aa, Homo sapiens
  CDR3 for beta chain variable domain of TCR clone 171389 (TRBV12-4, TRBJ2-5)
CASSPPTGLQETQYF

SEQ ID NO: 342779 - protein, 11 aa, Homo sapiens
  CDR3 for alpha chain variable domain of TCR clone 171390 (TRAV2, TRAJ13)
CAPGGYQKVTF

SEQ ID NO: 342780 - protein, 14 aa, Homo sapiens
  CDR3 for beta chain variable domain of TCR clone 171390 (TRBV18, TRBJ1-2)
CASSPDRVVYGYTF

SEQ ID NO: 342781 - protein, 11 aa, Homo sapiens
  CDR3 for alpha chain variable domain of TCR clone 171391 (TRAV8-3, TRAJ6)
CAVETRRKLHT

SEQ ID NO: 342782 - protein, 14 aa, Homo sapiens
  CDR3 for beta chain variable domain of TCR clone 171391 (TRBV7-2, TRBJ1-1)
CASSFLTGTTEAFF

SEQ ID NO: 342783 - protein, 14 aa, Homo sapiens
  CDR3 for alpha chain variable domain of TCR clone 171392 (TRAV1-2, TRAJ16)
CAVNRFSDGQKLLF

SEQ ID NO: 342784 - protein, 17 aa, Homo sapiens
  CDR3 for beta chain variable domain of TCR clone 171392 (TRBV12-4, TRBJ2-1)
CASSPGLAVGRINEQFF

SEQ ID NO: 342785 - protein, 15 aa, Homo sapiens
  CDR3 for alpha chain variable domain of TCR clone 171393 (TRAV12-3, TRAJ52)
CNGGAGGSSYGKLTF

SEQ ID NO: 342786 - protein, 13 aa, Homo sapiens
  CDR3 for beta chain variable domain of TCR clone 171393 (TRBV20-1, TRBJ2-5)
CSARGDYQETQYF

SEQ ID NO: 342787 - protein, 14 aa, Homo sapiens
  CDR3 for alpha chain variable domain of TCR clone 171394 (TRAV12-2, TRAJ13)
CAVKKTGGYQKVTF

SEQ ID NO: 342788 - protein, 14 aa, Homo sapiens
  CDR3 for beta chain variable domain of TCR clone 171394 (TRBV25-1, TRBJ1-1)
CASTHLGGNTGAFF

SEQ ID NO: 342789 - protein, 16 aa, Homo sapiens
  CDR3 for alpha chain variable domain of TCR clone 171395 (TRAV16, TRAJ52)
CALSAAGGTSYGKLTF

SEQ ID NO: 342790 - protein, 17 aa, Homo sapiens
  CDR3 for beta chain variable domain of TCR clone 171395 (TRBV11-2, TRBJ2-1)
CASGLYPPGVEYNEQFF

SEQ ID NO: 342791 - protein, 16 aa, Homo sapiens
  CDR3 for alpha chain variable domain of TCR clone 171396 (TRAV27, TRAJ13)
CAGAKSDSGGYQKVTF

SEQ ID NO: 342792 - protein, 14 aa, Homo sapiens
  CDR3 for beta chain variable domain of TCR clone 171396 (TRBV28, TRBJ2-7)
CASSLLRISYEQYF

SEQ ID NO: 342793 - protein, 12 aa, Homo sapiens
  CDR3 for alpha chain variable domain of TCR clone 171397 (TRAV13-1, TRAJ11)
CAGPSGYRTLTF

SEQ ID NO: 342794 - protein, 13 aa, Homo sapiens
  CDR3 for beta chain variable domain of TCR clone 171397 (TRBV12-4, TRBJ2-1)
CASSLSPSNEQFF

SEQ ID NO: 342795 - protein, 15 aa, Homo sapiens
  CDR3 for alpha chain variable domain of TCR clone 171398 (TRAV17, TRAJ57)
CATGPSQGGSEKLVF

SEQ ID NO: 342796 - protein, 13 aa, Homo sapiens
  CDR3 for beta chain variable domain of TCR clone 171398 (TRBV6-5, TRBJ2-5)
CASSPQGCETQYF

SEQ ID NO: 342797 - protein, 11 aa, Homo sapiens
  CDR3 for alpha chain variable domain of TCR clone 171399 (TRAV2, TRAJ33)
CAVDSNYQLIW

SEQ ID NO: 342798 - protein, 14 aa, Homo sapiens
  CDR3 for beta chain variable domain of TCR clone 171399 (TRBV11-2, TRBJ2-3)
CASSRLARTDTQYC

SEQ ID NO: 342799 - protein, 15 aa, Homo sapiens
  CDR3 for alpha chain variable domain of TCR clone 171400 (TRAV12-2, TRAJ38)
CAVNKEAGNNRKLIW

SEQ ID NO: 342800 - protein, 18 aa, Homo sapiens
  CDR3 for beta chain variable domain of TCR clone 171400 (TRBV10-2, TRBJ2-2)
CISAPAVHRQADAGELFF

SEQ ID NO: 342801 - protein, 12 aa, Homo sapiens
  CDR3 for alpha chain variable domain of TCR clone 171401 (TRAV12-1, TRAJ40)
CVVYSGTYKYIF

SEQ ID NO: 342802 - protein, 15 aa, Homo sapiens
  CDR3 for beta chain variable domain of TCR clone 171401 (TRBV27, TRBJ1-6)
CASSFDRGLGSPLHC

SEQ ID NO: 342803 - protein, 13 aa, Homo sapiens
  CDR3 for alpha chain variable domain of TCR clone 171402 (TRAV25, TRAJ30)
CAGRVDRDDKIIF

SEQ ID NO: 342804 - protein, 15 aa, Homo sapiens
  CDR3 for beta chain variable domain of TCR clone 171402 (TRBV28, TRBJ1-1)
CASTSTRGLNTEAFF

SEQ ID NO: 342805 - protein, 13 aa, Homo sapiens
  CDR3 for alpha chain variable domain of TCR clone 171403 (TRAV8-3, TRAJ6)
CAVGSGGSYIPNF

SEQ ID NO: 342806 - protein, 14 aa, Homo sapiens
  CDR3 for beta chain variable domain of TCR clone 171403 (TRBV11-2, TRBJ1-1)
CASSTQRGRTEAFF

SEQ ID NO: 342807 - protein, 14 aa, Homo sapiens
  CDR3 for alpha chain variable domain of TCR clone 171404 (TRAV29/DV5, TRAJ32)
CAAAYGGATNKLVF

SEQ ID NO: 342808 - protein, 15 aa, Homo sapiens
  CDR3 for beta chain variable domain of TCR clone 171404 (TRBV27, TRBJ2-7)
CASSTAGTGSYEQYF

SEQ ID NO: 342809 - protein, 15 aa, Homo sapiens
  CDR3 for alpha chain variable domain of TCR clone 171405 (TRAV3, TRAJ22)
CAVRDRGGSARQLTF

SEQ ID NO: 342810 - protein, 13 aa, Homo sapiens
  CDR3 for beta chain variable domain of TCR clone 171405 (TRBV28, TRBJ2-1)
CASSPLPSSEQFF

SEQ ID NO: 342811 - protein, 17 aa, Homo sapiens
  CDR3 for alpha chain variable domain of TCR clone 171406 (TRAV12-2, TRAJ17)
CAVNKGVIKAAGNKLTF

SEQ ID NO: 342812 - protein, 12 aa, Homo sapiens
  CDR3 for beta chain variable domain of TCR clone 171406 (TRBV18, TRBJ1-4)
CASSPSREKLLF

SEQ ID NO: 342813 - protein, 15 aa, Homo sapiens
  CDR3 for alpha chain variable domain of TCR clone 171407 (TRAV26-1, TRAJ48)
CIVRVGDFGNEKLTF

SEQ ID NO: 342814 - protein, 16 aa, Homo sapiens
  CDR3 for beta chain variable domain of TCR clone 171407 (TRBV4-1, TRBJ2-3)
CASSQRAGGLTETQYF

SEQ ID NO: 342815 - protein, 14 aa, Homo sapiens
  CDR3 for alpha chain variable domain of TCR clone 171408 (TRAV8-3, TRAJ27)
CAGGRNTNAGKLTF

SEQ ID NO: 342816 - protein, 16 aa, Homo sapiens
  CDR3 for beta chain variable domain of TCR clone 171408 (TRBV7-6, TRBJ1-1)
CASSSAPWYRNTEAFF

SEQ ID NO: 342817 - protein, 16 aa, Homo sapiens
  CDR3 for alpha chain variable domain of TCR clone 171409 (TRAV12-3, TRAJ53)
CAISPGSGGSNYKLTF

SEQ ID NO: 342818 - protein, 16 aa, Homo sapiens
  CDR3 for beta chain variable domain of TCR clone 171409 (TRBV7-9, TRBJ1-2)
CASSLGFSSGEDGYTF

SEQ ID NO: 342819 - protein, 13 aa, Homo sapiens
  CDR3 for alpha chain variable domain of TCR clone 171410 (TRAV17, TRAJ26)
CATVDNYGQNFVF

SEQ ID NO: 342820 - protein, 16 aa, Homo sapiens
  CDR3 for beta chain variable domain of TCR clone 171410 (TRBV12-4, TRBJ1-5)
CASSRPVGGSNQPQHF

SEQ ID NO: 342821 - protein, 14 aa, Homo sapiens
  CDR3 for alpha chain variable domain of TCR clone 171411 (TRAV4, TRAJ10)
CLVGDTGGGNKLTF

SEQ ID NO: 342822 - protein, 13 aa, Homo sapiens
  CDR3 for beta chain variable domain of TCR clone 171411 (TRBV15, TRBJ2-7)
CATSTTGHYEQYF

SEQ ID NO: 342823 - protein, 10 aa, Homo sapiens
  CDR3 for alpha chain variable domain of TCR clone 171412 (TRAV13-1, TRAJ27)
CAPLARQINL

SEQ ID NO: 342824 - protein, 13 aa, Homo sapiens
  CDR3 for beta chain variable domain of TCR clone 171412 (TRBV28, TRBJ1-1)
CASGKHGWTEAFF

SEQ ID NO: 342825 - protein, 14 aa, Homo sapiens
  CDR3 for alpha chain variable domain of TCR clone 171413 (TRAV26-1, TRAJ49)
CIVRLTNTGNQFYF

SEQ ID NO: 342826 - protein, 13 aa, Homo sapiens
  CDR3 for beta chain variable domain of TCR clone 171413 (TRBV4-1, TRBJ2-7)
CARSHGQAYERYF

SEQ ID NO: 342827 - protein, 12 aa, Homo sapiens
  CDR3 for alpha chain variable domain of TCR clone 171414 (TRAV13-2, TRAJ39)
CAENNAGNMITF

SEQ ID NO: 342828 - protein, 12 aa, Homo sapiens
  CDR3 for beta chain variable domain of TCR clone 171414 (TRBV11-2, TRBJ2-2)
CASSLGGGELFF

SEQ ID NO: 342829 - protein, 12 aa, Homo sapiens
  CDR3 for alpha chain variable domain of TCR clone 171415 (TRAV36/DV7, TRAJ37)
CACYGNTGKLIF

SEQ ID NO: 342830 - protein, 14 aa, Homo sapiens
  CDR3 for beta chain variable domain of TCR clone 171415 (TRBV7-2, TRBJ1-4)
CASSHSKTNEKLFF

SEQ ID NO: 342831 - protein, 13 aa, Homo sapiens
  CDR3 for alpha chain variable domain of TCR clone 171416 (TRAV27, TRAJ43)
CAGAGNNNNDMRF

SEQ ID NO: 342832 - protein, 15 aa, Homo sapiens
  CDR3 for beta chain variable domain of TCR clone 171416 (TRBV20-1, TRBJ2-7)
CRARDRVSGMDEQYF

SEQ ID NO: 342833 - protein, 15 aa, Homo sapiens
  CDR3 for alpha chain variable domain of TCR clone 171417 (TRAV23/DV6, TRAJ28)
CAALLAYSGAGSYQL

SEQ ID NO: 342834 - protein, 13 aa, Homo sapiens
  CDR3 for beta chain variable domain of TCR clone 171417 (TRBV4-2, TRBJ2-3)
CASSQGNTDTQYL

SEQ ID NO: 342835 - protein, 14 aa, Homo sapiens
  CDR3 for alpha chain variable domain of TCR clone 171418 (TRAV38-1, TRAJ29)
CAFITPSGDTPLVF

SEQ ID NO: 342836 - protein, 14 aa, Homo sapiens
  CDR3 for beta chain variable domain of TCR clone 171418 (TRBV18, TRBJ2-7)
CASSPRGEAYEQYF

SEQ ID NO: 342837 - protein, 11 aa, Homo sapiens
  CDR3 for alpha chain variable domain of TCR clone 171419 (TRAV12-1, TRAJ8)
CVVTGFQKLVF

SEQ ID NO: 342838 - protein, 15 aa, Homo sapiens
  CDR3 for beta chain variable domain of TCR clone 171419 (TRBV4-1, TRBJ2-7)
CASSQNTGRLYEQYF

SEQ ID NO: 342839 - protein, 13 aa, Homo sapiens
  CDR3 for alpha chain variable domain of TCR clone 171420 (TRAV3, TRAJ21)
CAVREPDFNKFYF

SEQ ID NO: 342840 - protein, 17 aa, Homo sapiens
  CDR3 for beta chain variable domain of TCR clone 171420 (TRBV7-6, TRBJ2-1)
CASSLSLLRGSYNEQFF

SEQ ID NO: 342841 - protein, 13 aa, Homo sapiens
  CDR3 for alpha chain variable domain of TCR clone 171421 (TRAV27, TRAJ24)
CAGVTDSWGKFQF

SEQ ID NO: 342842 - protein, 13 aa, Homo sapiens
  CDR3 for beta chain variable domain of TCR clone 171421 (TRBV20-1, TRBJ1-1)
CSARGGGNTEAFF

SEQ ID NO: 342843 - protein, 15 aa, Homo sapiens
  CDR3 for alpha chain variable domain of TCR clone 171422 (TRAV3, TRAJ42)
CAVRGGTGSQGNLIF

SEQ ID NO: 342844 - protein, 16 aa, Homo sapiens
  CDR3 for beta chain variable domain of TCR clone 171422 (TRBV13, TRBJ2-2)
CASSPRTGEHTGELFF

SEQ ID NO: 342845 - protein, 16 aa, Homo sapiens
  CDR3 for alpha chain variable domain of TCR clone 171423 (TRAV8-6, TRAJ58)
CAVSDHTETSGSRLTF

SEQ ID NO: 342846 - protein, 14 aa, Homo sapiens
  CDR3 for beta chain variable domain of TCR clone 171423 (TRBV7-2, TRBJ1-5)
CTSSPRGGPQPQHF

SEQ ID NO: 342847 - protein, 16 aa, Homo sapiens
  CDR3 for alpha chain variable domain of TCR clone 171424 (TRAV17, TRAJ53)
CATDAISGGSNYKLTF

SEQ ID NO: 342848 - protein, 12 aa, Homo sapiens
  CDR3 for beta chain variable domain of TCR clone 171424 (TRBV5-1, TRBJ2-7)
CASSCRGYEQYF

SEQ ID NO: 342849 - protein, 11 aa, Homo sapiens
  CDR3 for alpha chain variable domain of TCR clone 171425 (TRAV13-2, TRAJ15)
CSHQAGTALIF

SEQ ID NO: 342850 - protein, 14 aa, Homo sapiens
  CDR3 for beta chain variable domain of TCR clone 171425 (TRBV19, TRBJ2-5)
CASSMTGQQETQYF

SEQ ID NO: 342851 - protein, 12 aa, Homo sapiens
  CDR3 for alpha chain variable domain of TCR clone 171426 (TRAV12-3, TRAJ17)
CAMTLTGNKLTF

SEQ ID NO: 342852 - protein, 11 aa, Homo sapiens
  CDR3 for beta chain variable domain of TCR clone 171426 (TRBV28, TRBJ2-1)
CASRRVNAQFF

SEQ ID NO: 342853 - protein, 13 aa, Homo sapiens
  CDR3 for alpha chain variable domain of TCR clone 171427 (TRAV29/DV5, TRAJ31)
CAASRNNNARLMF

SEQ ID NO: 342854 - protein, 14 aa, Homo sapiens
  CDR3 for beta chain variable domain of TCR clone 171427 (TRBV5-4, TRBJ2-3)
CASSFDSWHRYAVF

SEQ ID NO: 342855 - protein, 12 aa, Homo sapiens
  CDR3 for alpha chain variable domain of TCR clone 171428 (TRAV29/DV5, TRAJ34)
CAERHNTDKLIF

SEQ ID NO: 342856 - protein, 15 aa, Homo sapiens
  CDR3 for beta chain variable domain of TCR clone 171428 (TRBV19, TRBJ2-7)
CASSPAGSGEALRYF

SEQ ID NO: 342857 - protein, 12 aa, Homo sapiens
  CDR3 for alpha chain variable domain of TCR clone 171429 (TRAV13-2, TRAJ16)
CAASLDGQKLLF

SEQ ID NO: 342858 - protein, 13 aa, Homo sapiens
  CDR3 for beta chain variable domain of TCR clone 171429 (TRBV11-2, TRBJ2-5)
CASSSTGEETQYF

SEQ ID NO: 342859 - protein, 14 aa, Homo sapiens
  CDR3 for alpha chain variable domain of TCR clone 171430 (TRAV12-2, TRAJ44)
CAVNPAGTASKLTF

SEQ ID NO: 342860 - protein, 14 aa, Homo sapiens
  CDR3 for beta chain variable domain of TCR clone 171430 (TRBV7-3, TRBJ2-1)
CASSPEGGGNEQFF

SEQ ID NO: 342861 - protein, 14 aa, Homo sapiens
  CDR3 for alpha chain variable domain of TCR clone 171431 (TRAV23/DV6, TRAJ40)
CAASLTSGTYKYIF

SEQ ID NO: 342862 - protein, 23 aa, Homo sapiens
  CDR3 for beta chain variable domain of TCR clone 171431 (TRBV5-1, TRBJ2-3)
GAGGLGPLSLRQHRGQGGGTQYF

SEQ ID NO: 342863 - protein, 13 aa, Homo sapiens
  CDR3 for alpha chain variable domain of TCR clone 171432 (TRAV21, TRAJ27)
CAARPGNAGKSTF

SEQ ID NO: 342864 - protein, 16 aa, Homo sapiens
  CDR3 for beta chain variable domain of TCR clone 171432 (TRBV20-1, TRBJ1-2)
CSASMGQGVANYGYIF

SEQ ID NO: 342865 - protein, 11 aa, Homo sapiens
  CDR3 for alpha chain variable domain of TCR clone 171433 (TRAV20, TRAJ23)
CACNQGGKLIF

SEQ ID NO: 342866 - protein, 16 aa, Homo sapiens
  CDR3 for beta chain variable domain of TCR clone 171433 (TRBV7-8, TRBJ2-5)
CASSFGGQHAQETQYF

SEQ ID NO: 342867 - protein, 16 aa, Homo sapiens
  CDR3 for alpha chain variable domain of TCR clone 171434 (TRAV8-3, TRAJ10)
CAVGPGVTGGGNKLTF

SEQ ID NO: 342868 - protein, 17 aa, Homo sapiens
  CDR3 for beta chain variable domain of TCR clone 171434 (TRBV7-8, TRBJ2-6)
CASSAGTGGAGANVLTF

SEQ ID NO: 342869 - protein, 14 aa, Homo sapiens
  CDR3 for alpha chain variable domain of TCR clone 171435 (TRAV1-2, TRAJ16)
GAVNRFADGQKLLF

SEQ ID NO: 342870 - protein, 15 aa, Homo sapiens
  CDR3 for beta chain variable domain of TCR clone 171435 (TRBV9, TRBJ1-6)
CASSVAGTGDSPLHF

SEQ ID NO: 342871 - protein, 17 aa, Homo sapiens
  CDR3 for alpha chain variable domain of TCR clone 171436 (TRAV3, TRAJ42)
CAVRDRHYGGSQGNLIF

SEQ ID NO: 342872 - protein, 14 aa, Homo sapiens
  CDR3 for beta chain variable domain of TCR clone 171436 (TRBV7-3, TRBJ2-2)
CASSLNSNTGELFF

SEQ ID NO: 342873 - protein, 13 aa, Homo sapiens
  CDR3 for alpha chain variable domain of TCR clone 171437 (TRAV13-1, TRAJ6)
CAARRGGIYIPTF

SEQ ID NO: 342874 - protein, 16 aa, Homo sapiens
  CDR3 for beta chain variable domain of TCR clone 171437 (TRBV20-1, TRBJ1-4)
CSAPGQGLLTNEKLFF

SEQ ID NO: 342875 - protein, 16 aa, Homo sapiens
  CDR3 for alpha chain variable domain of TCR clone 171438 (TRAV30, TRAJ24)
CGTEIVDADSWGKFQF

SEQ ID NO: 342876 - protein, 14 aa, Homo sapiens
  CDR3 for beta chain variable domain of TCR clone 171438 (TRBV5-5, TRBJ1-2)
CASSLDAYSYGYTF

SEQ ID NO: 342877 - protein, 14 aa, Homo sapiens
  CDR3 for alpha chain variable domain of TCR clone 171439 (TRAV13-1, TRAJ35)
CSASKGGFGNVLHC

SEQ ID NO: 342878 - protein, 16 aa, Homo sapiens
  CDR3 for beta chain variable domain of TCR clone 171439 (TRBV2, TRBJ1-4)
CASNLLQGATNEKLFF

SEQ ID NO: 342879 - protein, 12 aa, Homo sapiens
  CDR3 for alpha chain variable domain of TCR clone 171440 (TRAV12-2, TRAJ4)
GWPEGGYNKLIF

SEQ ID NO: 342880 - protein, 16 aa, Homo sapiens
  CDR3 for beta chain variable domain of TCR clone 171440 (TRBV15, TRBJ2-6)
CATSVNGGFLANVLTF

SEQ ID NO: 342881 - protein, 12 aa, Homo sapiens
  CDR3 for alpha chain variable domain of TCR clone 171441 (TRAV10, TRAJ6)
CAVSEGSYIPTF

SEQ ID NO: 342882 - protein, 17 aa, Homo sapiens
  CDR3 for beta chain variable domain of TCR clone 171441 (TRBV7-8, TRBJ2-6)
CASSAGTGGAGANVLTF

SEQ ID NO: 342883 - protein, 15 aa, Homo sapiens
  CDR3 for alpha chain variable domain of TCR clone 171442 (TRAV16, TRAJ48)
CALFISNFGNEKLTF

SEQ ID NO: 342884 - protein, 13 aa, Homo sapiens
  CDR3 for beta chain variable domain of TCR clone 171442 (TRBV7-3, TRBJ1-1)
CASSQDWGAEAFF

SEQ ID NO: 342885 - protein, 13 aa, Homo sapiens
  CDR3 for alpha chain variable domain of TCR clone 171443 (TRAV12-1, TRAJ6)
CVVFPGGSYLPTF

SEQ ID NO: 342886 - protein, 11 aa, Homo sapiens
  CDR3 for beta chain variable domain of TCR clone 171443 (TRBV29-1, TRBJ2-5)
CSEDRTGTQYF

SEQ ID NO: 342887 - protein, 17 aa, Homo sapiens
  CDR3 for alpha chain variable domain of TCR clone 171444 (TRAV3, TRAJ6)
CAVRDGPRAGGSYIPRF

SEQ ID NO: 342888 - protein, 13 aa, Homo sapiens
  CDR3 for beta chain variable domain of TCR clone 171444 (TRBV27, TRBJ2-1)
CASRTLGVGEQFF

SEQ ID NO: 342889 - protein, 15 aa, Homo sapiens
  CDR3 for alpha chain variable domain of TCR clone 171445 (TRAV23/DV6, TRAJ44)
CAASGGTGTASKLPF

SEQ ID NO: 342890 - protein, 15 aa, Homo sapiens
  CDR3 for beta chain variable domain of TCR clone 171445 (TRBV6-3, TRBJ2-7)
CASSSPGTVFYEQYF

SEQ ID NO: 342891 - protein, 14 aa, Homo sapiens
  CDR3 for alpha chain variable domain of TCR clone 171446 (TRAV8-3, TRAJ39)
CAVGANNAGNMLTF

SEQ ID NO: 342892 - protein, 18 aa, Homo sapiens
  CDR3 for beta chain variable domain of TCR clone 171446 (TRBV11-2, TRBJ2-3)
CASSLGGASRGAPNTQYF

SEQ ID NO: 342893 - protein, 15 aa, Homo sapiens
  CDR3 for alpha chain variable domain of TCR clone 171447 (TRAV3, TRAJ32)
CAVSSYGGATNKSIF

SEQ ID NO: 342894 - protein, 13 aa, Homo sapiens
  CDR3 for beta chain variable domain of TCR clone 171447 (TRBV20-1, TRBJ2-7)
CSARPSTNYEQYF

SEQ ID NO: 342895 - protein, 14 aa, Homo sapiens
  CDR3 for alpha chain variable domain of TCR clone 171448 (TRAV1-2, TRAJ16)
CAVNRFSDGQKLLF

SEQ ID NO: 342896 - protein, 16 aa, Homo sapiens
  CDR3 for beta chain variable domain of TCR clone 171448 (TRBV28, TRBJ2-1)
CASSSSYSGGLNEQFF

SEQ ID NO: 342897 - protein, 13 aa, Homo sapiens
  CDR3 for alpha chain variable domain of TCR clone 171449 (TRAV13-1, TRAJ6)
CAASKGGSYIPTF

SEQ ID NO: 342898 - protein, 14 aa, Homo sapiens
  CDR3 for beta chain variable domain of TCR clone 171449 (TRBV7-8, TRBJ1-2)
CASSSSEANYGYTF

SEQ ID NO: 342899 - protein, 12 aa, Homo sapiens
  CDR3 for alpha chain variable domain of TCR clone 171450 (TRAV20, TRAJ56)
CAVTGANSKLTF

SEQ ID NO: 342900 - protein, 12 aa, Homo sapiens
  CDR3 for beta chain variable domain of TCR clone 171450 (TRBV5-1, TRBJ1-1)
CASSFGNTEAFF

SEQ ID NO: 342901 - protein, 16 aa, Homo sapiens
  CDR3 for alpha chain variable domain of TCR clone 171451 (TRAV23/DV6, TRAJ9)
CAASIGGNTGVFKTIF

SEQ ID NO: 342902 - protein, 15 aa, Homo sapiens
  CDR3 for beta chain variable domain of TCR clone 171451 (TRBV6-3, TRBJ2-7)
CASSSPGTVLYEQYF

SEQ ID NO: 342903 - protein, 18 aa, Homo sapiens
  CDR3 for alpha chain variable domain of TCR clone 171452 (TRAV12-3, TRAJ10)
SPVIQPPTSGGRRNKLTF

SEQ ID NO: 342904 - protein, 15 aa, Homo sapiens
  CDR3 for beta chain variable domain of TCR clone 171452 (TRBV7-9, TRBJ1-4)
CASSRTGGFNEKLFF

SEQ ID NO: 342905 - protein, 12 aa, Homo sapiens
  CDR3 for alpha chain variable domain of TCR clone 171453 (TRAV1-1, TRAJ39)
CAVPVVGNMLTF

SEQ ID NO: 342906 - protein, 13 aa, Homo sapiens
  CDR3 for beta chain variable domain of TCR clone 171453 (TRBV7-3, TRBJ1-2)
CASSLKRGYGYTF

SEQ ID NO: 342907 - protein, 14 aa, Homo sapiens
  CDR3 for alpha chain variable domain of TCR clone 171454 (TRAV17, TRAJ37)
CSTVPSSNTGKLIF

SEQ ID NO: 342908 - protein, 15 aa, Homo sapiens
  CDR3 for beta chain variable domain of TCR clone 171454 (TRBV12-4, TRBJ2-2)
CASLRRGDLTGELFF

SEQ ID NO: 342909 - protein, 13 aa, Homo sapiens
  CDR3 for alpha chain variable domain of TCR clone 171455 (TRAV20, TRAJ31)
CAVQAWNNASLMF

SEQ ID NO: 342910 - protein, 13 aa, Homo sapiens
  CDR3 for beta chain variable domain of TCR clone 171455 (TRBV12-4, TRBJ1-2)
CASSLRQGKGYTF

SEQ ID NO: 342911 - protein, 14 aa, Homo sapiens
  CDR3 for alpha chain variable domain of TCR clone 171456 (TRAV26-1, TRAJ38)
CIADNAGNNRRLIW

SEQ ID NO: 342912 - protein, 13 aa, Homo sapiens
  CDR3 for beta chain variable domain of TCR clone 171456 (TRBV4-2, TRBJ1-1)
CASSQAGNTEAFF

SEQ ID NO: 342913 - protein, 13 aa, Homo sapiens
  CDR3 for alpha chain variable domain of TCR clone 171457 (TRAV27, TRAJ11)
CTGARSGYSTLTF

SEQ ID NO: 342914 - protein, 15 aa, Homo sapiens
  CDR3 for beta chain variable domain of TCR clone 171457 (TRBV19, TRBJ2-3)
CASSIEAGEADTQYF

SEQ ID NO: 342915 - protein, 15 aa, Homo sapiens
  CDR3 for alpha chain variable domain of TCR clone 171458 (TRAV20, TRAJ40)
CAVQRGTSGTYKYIF

SEQ ID NO: 342916 - protein, 15 aa, Homo sapiens
  CDR3 for beta chain variable domain of TCR clone 171458 (TRBV19, TRBJ1-6)
CASSTQGAVGSPLHF

SEQ ID NO: 342917 - protein, 13 aa, Homo sapiens
  CDR3 for alpha chain variable domain of TCR clone 171459 (TRAV1-2, TRAJ9)
CAALNTGGFKTIF

SEQ ID NO: 342918 - protein, 16 aa, Homo sapiens
  CDR3 for beta chain variable domain of TCR clone 171459 (TRBV11-2, TRBJ2-1)
CASSPRLAGVSDEQFF

SEQ ID NO: 342919 - protein, 13 aa, Homo sapiens
  CDR3 for alpha chain variable domain of TCR clone 171460 (TRAV2, TRAJ40)
CAVVTSGTYKYIF

SEQ ID NO: 342920 - protein, 16 aa, Homo sapiens
  CDR3 for beta chain variable domain of TCR clone 171460 (TRBV4-2, TRBJ1-1)
CASSQAGFGMNTEAFF

SEQ ID NO: 342921 - protein, 15 aa, Homo sapiens
  CDR3 for alpha chain variable domain of TCR clone 171461 (TRAV3, TRAJ21)
CAVRDRRYNFNKFYF

SEQ ID NO: 342922 - protein, 12 aa, Homo sapiens
  CDR3 for beta chain variable domain of TCR clone 171461 (TRBV11-2, TRBJ2-2)
CASSLGGGELFF

SEQ ID NO: 342923 - protein, 12 aa, Homo sapiens
  CDR3 for alpha chain variable domain of TCR clone 171462 (TRAV12-1, TRAJ29)
CVADSGNTPLVF

SEQ ID NO: 342924 - protein, 13 aa, Homo sapiens
  CDR3 for beta chain variable domain of TCR clone 171462 (TRBV18, TRBJ2-7)
CASSRSGSYEQYF

SEQ ID NO: 342925 - protein, 15 aa, Homo sapiens
  CDR3 for alpha chain variable domain of TCR clone 171463 (TRAV21, TRAJ24)
CAARSSTDSWGKLQF

SEQ ID NO: 342926 - protein, 16 aa, Homo sapiens
  CDR3 for beta chain variable domain of TCR clone 171463 (TRBV5-1, TRBJ1-1)
CASSSGNPPRDTEAFF

SEQ ID NO: 342927 - protein, 13 aa, Homo sapiens
  CDR3 for alpha chain variable domain of TCR clone 171464 (TRAV8-3, TRAJ43)
CAVVPYNNNDIRF

SEQ ID NO: 342928 - protein, 16 aa, Homo sapiens
  CDR3 for beta chain variable domain of TCR clone 171464 (TRBV7-2, TRBJ2-5)
CASSPFPTGGEVTQYF

SEQ ID NO: 342929 - protein, 13 aa, Homo sapiens
  CDR3 for alpha chain variable domain of TCR clone 171465 (TRAV38-1, TRAJ43)
CAFMKHNSGRHAL

SEQ ID NO: 342930 - protein, 13 aa, Homo sapiens
  CDR3 for beta chain variable domain of TCR clone 171465 (TRBV2, TRBJ1-1)
CASSVLMNTEAFF

SEQ ID NO: 342931 - protein, 13 aa, Homo sapiens
  CDR3 for alpha chain variable domain of TCR clone 171466 (TRAV13-2, TRAJ48)
CAEMDFGNEKLTF

SEQ ID NO: 342932 - protein, 12 aa, Homo sapiens
  CDR3 for beta chain variable domain of TCR clone 171466 (TRBV27, TRBJ2-2)
CASKLFTGELFF

SEQ ID NO: 342933 - protein, 14 aa, Homo sapiens
  CDR3 for alpha chain variable domain of TCR clone 171467 (TRAV1-2, TRAJ16)
CAVNRFSDCQKLLF

SEQ ID NO: 342934 - protein, 13 aa, Homo sapiens
  CDR3 for beta chain variable domain of TCR clone 171467 (TRBV7-9, TRBJ1-2)
CASSLKQNDGYSF

SEQ ID NO: 342935 - protein, 15 aa, Homo sapiens
  CDR3 for alpha chain variable domain of TCR clone 171468 (TRAV29/DV5, TRAJ29)
CSASEGSSGNTPLVF

SEQ ID NO: 342936 - protein, 12 aa, Homo sapiens
  CDR3 for beta chain variable domain of TCR clone 171468 (TRBV7-9, TRBJ1-4)
CASSTDREKLFF

SEQ ID NO: 342937 - protein, 15 aa, Homo sapiens
  CDR3 for alpha chain variable domain of TCR clone 171469 (TRAV3, TRAJ22)
CAVRDRGCSARQLTV

SEQ ID NO: 342938 - protein, 16 aa, Homo sapiens
  CDR3 for beta chain variable domain of TCR clone 171469 (TRBV5-4, TRBJ2-3)
CASQQPGAGGADTQYF

SEQ ID NO: 342939 - protein, 13 aa, Homo sapiens
  CDR3 for alpha chain variable domain of TCR clone 171470 (TRAV21, TRAJ20)
CAVGLRVDYKLSF

SEQ ID NO: 342940 - protein, 11 aa, Homo sapiens
  CDR3 for beta chain variable domain of TCR clone 171470 (TRBV25-1, TRBJ2-1)
CAITRISEQFF

SEQ ID NO: 342941 - protein, 12 aa, Homo sapiens
  CDR3 for alpha chain variable domain of TCR clone 171471 (TRAV2, TRAJ33)
CAFMDSNYQLIW

SEQ ID NO: 342942 - protein, 16 aa, Homo sapiens
  CDR3 for beta chain variable domain of TCR clone 171471 (TRBV2, TRBJ2-7)
CPSSEPWTGPSYEQYF

SEQ ID NO: 342943 - protein, 14 aa, Homo sapiens
  CDR3 for alpha chain variable domain of TCR clone 171472 (TRAV1-2, TRAJ16)
CAVNRFSDGQKLPF

SEQ ID NO: 342944 - protein, 15 aa, Homo sapiens
  CDR3 for beta chain variable domain of TCR clone 171472 (TRBV7-2, TRBJ2-1)
CASSSGLAGGNGQFF

SEQ ID NO: 342945 - protein, 15 aa, Homo sapiens
  CDR3 for alpha chain variable domain of TCR clone 171473 (TRAV12-3, TRAJ49)
CAMAVAPNTGNPFYF

SEQ ID NO: 342946 - protein, 18 aa, Homo sapiens
  CDR3 for beta chain variable domain of TCR clone 171473 (TRBV4-1, TRBJ1-5)
CASSQDPRGQGLNQPQHF

SEQ ID NO: 342947 - protein, 12 aa, Homo sapiens
  CDR3 for alpha chain variable domain of TCR clone 171474 (TRAV20, TRAJ3)
CPPVQQCFQEIF

SEQ ID NO: 342948 - protein, 12 aa, Homo sapiens
  CDR3 for beta chain variable domain of TCR clone 171474 (TRBV28, TRBJ2-1)
CASSFRGNEQFF

SEQ ID NO: 342949 - protein, 13 aa, Homo sapiens
  CDR3 for alpha chain variable domain of TCR clone 171475 (TRAV3, TRAJ21)
CAVRDPDFNKFYF

SEQ ID NO: 342950 - protein, 16 aa, Homo sapiens
  CDR3 for beta chain variable domain of TCR clone 171475 (TRBV5-1, TRBJ2-3)
CASSLGLAVYTDTQYF

SEQ ID NO: 342951 - protein, 12 aa, Homo sapiens
  CDR3 for alpha chain variable domain of TCR clone 171476 (TRAV21, TRAJ39)
CAADNAVNMLTF

SEQ ID NO: 342952 - protein, 13 aa, Homo sapiens
  CDR3 for beta chain variable domain of TCR clone 171476 (TRBV12-4, TRBJ1-1)
CASSPGTGFEAFF

SEQ ID NO: 342953 - protein, 10 aa, Homo sapiens
  CDR3 for alpha chain variable domain of TCR clone 171477 (TRAV12-3, TRAJ49)
CAMNDDQFYF

SEQ ID NO: 342954 - protein, 13 aa, Homo sapiens
  CDR3 for beta chain variable domain of TCR clone 171477 (TRBV12-4, TRBJ1-1)
CASSPGTGFEAVL

SEQ ID NO: 342955 - protein, 11 aa, Homo sapiens
  CDR3 for alpha chain variable domain of TCR clone 171478 (TRAV13-1, TRAJ15)
CAATPGTALIF

SEQ ID NO: 342956 - protein, 15 aa, Homo sapiens
  CDR3 for beta chain variable domain of TCR clone 171478 (TRBV28, TRBJ2-5)
FASSPPWSYQETQYF

SEQ ID NO: 342957 - protein, 14 aa, Homo sapiens
  CDR3 for alpha chain variable domain of TCR clone 171479 (TRAV13-1, TRAJ20)
CAARPGSNDYKLSV

SEQ ID NO: 342958 - protein, 13 aa, Homo sapiens
  CDR3 for beta chain variable domain of TCR clone 171479 (TRBV20-1, TRBJ1-1)
CSAPPGGHTEAFF

SEQ ID NO: 342959 - protein, 17 aa, Homo sapiens
  CDR3 for alpha chain variable domain of TCR clone 171480 (TRAV3, TRAJ42)
CAVRDRDHGGSQGNLIF

SEQ ID NO: 342960 - protein, 13 aa, Homo sapiens
  CDR3 for beta chain variable domain of TCR clone 171480 (TRBV20-1, TRBJ2-5)
CSARRGTGATQYF

SEQ ID NO: 342961 - protein, 12 aa, Homo sapiens
  CDR3 for alpha chain variable domain of TCR clone 171481 (TRAV16, TRAJ10)
CSRTGGGNKLTF

SEQ ID NO: 342962 - protein, 16 aa, Homo sapiens
  CDR3 for beta chain variable domain of TCR clone 171481 (TRBV13, TRBJ2-1)
CASSLNPGQPSNEQFF

SEQ ID NO: 342963 - protein, 16 aa, Homo sapiens
  CDR3 for alpha chain variable domain of TCR clone 171482 (TRAV12-3, TRAJ53)
CAMSPGSGGSNYKLTF

SEQ ID NO: 342964 - protein, 15 aa, Homo sapiens
  CDR3 for beta chain variable domain of TCR clone 171482 (TRBV20-1, TRBJ1-1)
CSASRGVTGNTEAFF

SEQ ID NO: 342965 - protein, 16 aa, Homo sapiens
  CDR3 for alpha chain variable domain of TCR clone 171483 (TRAV30, TRAJ26)
CGTESVGDNYGQNFVF

SEQ ID NO: 342966 - protein, 13 aa, Homo sapiens
  CDR3 for beta chain variable domain of TCR clone 171483 (TRBV19, TRBJ1-2)
CASSISEDYGYIF

SEQ ID NO: 342967 - protein, 10 aa, Homo sapiens
  CDR3 for alpha chain variable domain of TCR clone 171484 (TRAV13-1, TRAJ42)
CAASELWRTP

SEQ ID NO: 342968 - protein, 15 aa, Homo sapiens
  CDR3 for beta chain variable domain of TCR clone 171484 (TRBV20-1, TRBJ2-1)
CSASSAGSSYNEQFF

SEQ ID NO: 342969 - protein, 12 aa, Homo sapiens
  CDR3 for alpha chain variable domain of TCR clone 171485 (TRAV16, TRAJ27)
CALNTNAGKSTF

SEQ ID NO: 342970 - protein, 15 aa, Homo sapiens
  CDR3 for beta chain variable domain of TCR clone 171485 (TRBV5-1, TRBJ2-2)
CASSSQGGNTGELFF

SEQ ID NO: 342971 - protein, 14 aa, Homo sapiens
  CDR3 for alpha chain variable domain of TCR clone 171486 (TRAV12-2, TRAJ17)
CVVLFKAAGNKLTF

SEQ ID NO: 342972 - protein, 17 aa, Homo sapiens
  CDR3 for beta chain variable domain of TCR clone 171486 (TRBV20-1, TRBJ2-2)
CSAIGSGQGGLTGELFF

SEQ ID NO: 342973 - protein, 16 aa, Homo sapiens
  CDR3 for alpha chain variable domain of TCR clone 171487 (TRAV16, TRAJ42)
CARKMNYGGSQGNLIF

SEQ ID NO: 342974 - protein, 13 aa, Homo sapiens
  CDR3 for beta chain variable domain of TCR clone 171487 (TRBV2, TRBJ2-7)
CASSGGQANEQYF

SEQ ID NO: 342975 - protein, 12 aa, Homo sapiens
  CDR3 for alpha chain variable domain of TCR clone 171488 (TRAV8-3, TRAJ26)
CAGDNYGQNFVF

SEQ ID NO: 342976 - protein, 11 aa, Homo sapiens
  CDR3 for beta chain variable domain of TCR clone 171488 (TRBV11-2, TRBJ2-2)
CASSLPGELFF

SEQ ID NO: 342977 - protein, 13 aa, Homo sapiens
  CDR3 for alpha chain variable domain of TCR clone 171489 (TRAV16, TRAJ9)
CALRATGGFKTIT

SEQ ID NO: 342978 - protein, 16 aa, Homo sapiens
  CDR3 for beta chain variable domain of TCR clone 171489 (TRBV5-1, TRBJ1-3)
CASSRSGEDSGNTIYF

SEQ ID NO: 342979 - protein, 18 aa, Homo sapiens
  CDR3 for alpha chain variable domain of TCR clone 171490 (TRAV21, TRAJ13)
CAVPRSFWGLPESYLCNW

SEQ ID NO: 342980 - protein, 15 aa, Homo sapiens
  CDR3 for beta chain variable domain of TCR clone 171490 (TRBV7-9, TRBJ1-6)
CASSSPGRGDSPLHF

SEQ ID NO: 342981 - protein, 17 aa, Homo sapiens
  CDR3 for alpha chain variable domain of TCR clone 171491 (TRAV3, TRAJ6)
CAVRDGPRAGGSYMPTF

SEQ ID NO: 342982 - protein, 16 aa, Homo sapiens
  CDR3 for beta chain variable domain of TCR clone 171491 (TRBV7-8, TRBJ2-3)
CASSTEGQRETDTQYF

SEQ ID NO: 342983 - protein, 17 aa, Homo sapiens
  CDR3 for alpha chain variable domain of TCR clone 171492 (TRAV3, TRAJ6)
CAVTDGPRAGGSYIPTF

SEQ ID NO: 342984 - protein, 20 aa, Homo sapiens
  CDR3 for beta chain variable domain of TCR clone 171492 (TRBV7-8, TRBJ2-2)
CASSHLFPGPTIHITGELFF

SEQ ID NO: 342985 - protein, 12 aa, Homo sapiens
  CDR3 for alpha chain variable domain of TCR clone 171493 (TRAV12-3, TRAJ17)
FAMTLTDNKLTF

SEQ ID NO: 342986 - protein, 15 aa, Homo sapiens
  CDR3 for beta chain variable domain of TCR clone 171493 (TRBV20-1, TRBJ2-7)
CSARDRVSGMDEQYF

SEQ ID NO: 342987 - protein, 16 aa, Homo sapiens
  CDR3 for alpha chain variable domain of TCR clone 171494 (TRAV12-2, TRAJ32)
CAVNLGQGGATNKLIF

SEQ ID NO: 342988 - protein, 15 aa, Homo sapiens
  CDR3 for beta chain variable domain of TCR clone 171494 (TRBV20-1, TRBJ2-7)
CSARGPLAGVREQYF

SEQ ID NO: 342989 - protein, 14 aa, Homo sapiens
  CDR3 for alpha chain variable domain of TCR clone 171495 (TRAV35, TRAJ50)
CAGHRKTSYDKVIF

SEQ ID NO: 342990 - protein, 15 aa, Homo sapiens
  CDR3 for beta chain variable domain of TCR clone 171495 (TRBV19, TRBJ1-1)
CASTSGQIQNTEAFF

SEQ ID NO: 342991 - protein, 15 aa, Homo sapiens
  CDR3 for alpha chain variable domain of TCR clone 171496 (TRAV3, TRAJ20)
CAVRDIKLSDYKLSF

SEQ ID NO: 342992 - protein, 18 aa, Homo sapiens
  CDR3 for beta chain variable domain of TCR clone 171496 (TRBV20-1, TRBJ2-5)
CSQTGDSGRLGGKDTQYF

SEQ ID NO: 342993 - protein, 16 aa, Homo sapiens
  CDR3 for alpha chain variable domain of TCR clone 171497 (TRAV30, TRAJ24)
CDTEIVDADSWGKFQF

SEQ ID NO: 342994 - protein, 16 aa, Homo sapiens
  CDR3 for beta chain variable domain of TCR clone 171497 (TRBV12-4, TRBJ2-5)
CASSFFVRGRQETQYF

SEQ ID NO: 342995 - protein, 15 aa, Homo sapiens
  CDR3 for alpha chain variable domain of TCR clone 171498 (TRAV8-2, TRAJ8)
CVVTDFPTGFQKLVF

SEQ ID NO: 342996 - protein, 16 aa, Homo sapiens
  CDR3 for beta chain variable domain of TCR clone 171498 (TRBV20-1, TRBJ2-4)
CSGRAILAGQGDIQYF

SEQ ID NO: 342997 - protein, 15 aa, Homo sapiens
  CDR3 for alpha chain variable domain of TCR clone 171499 (TRAV12-1, TRAJ15)
CVVTRANQAGTALIF

SEQ ID NO: 342998 - protein, 14 aa, Homo sapiens
  CDR3 for beta chain variable domain of TCR clone 171499 (TRBV5-1, TRBJ1-1)
CASSLVSIDTEAFF

SEQ ID NO: 342999 - protein, 12 aa, Homo sapiens
  CDR3 for alpha chain variable domain of TCR clone 171500 (TRAV13-1, TRAJ49)
CSAPNTGNQFYF

SEQ ID NO: 343000 - protein, 17 aa, Homo sapiens
  CDR3 for beta chain variable domain of TCR clone 171500 (TRBV25-1, TRBJ2-7)
CASSDARVVFSSYEQYF

SEQ ID NO: 343001 - protein, 15 aa, Homo sapiens
  CDR3 for alpha chain variable domain of TCR clone 171501 (TRAV2, TRAJ9)
CAVAAVNTGGFKTIF

SEQ ID NO: 343002 - protein, 14 aa, Homo sapiens
  CDR3 for beta chain variable domain of TCR clone 171501 (TRBV7-2, TRBJ2-7)
CASSSISGFSEQYF

SEQ ID NO: 343003 - protein, 15 aa, Homo sapiens
  CDR3 for alpha chain variable domain of TCR clone 171502 (TRAV17, TRAJ48)
CATDETNFGNEKLTF

SEQ ID NO: 343004 - protein, 14 aa, Homo sapiens
  CDR3 for beta chain variable domain of TCR clone 171502 (TRBV10-3, TRBJ1-3)
CASRGQRAGNTIYF

SEQ ID NO: 343005 - protein, 16 aa, Homo sapiens
  CDR3 for alpha chain variable domain of TCR clone 171503 (TRAV12-3, TRAJ53)
CAMSPGSGGSNYKQTF

SEQ ID NO: 343006 - protein, 15 aa, Homo sapiens
  CDR3 for beta chain variable domain of TCR clone 171503 (TRBV25-1, TRBJ1-4)
CASSKRIATNEKLFF

SEQ ID NO: 343007 - protein, 12 aa, Homo sapiens
  CDR3 for alpha chain variable domain of TCR clone 171504 (TRAV17, TRAJ4)
CATDGGYNKLIF

SEQ ID NO: 343008 - protein, 15 aa, Homo sapiens
  CDR3 for beta chain variable domain of TCR clone 171504 (TRBV6-5, TRBJ2-1)
CASSYDAGAGNEQFF

SEQ ID NO: 343009 - protein, 13 aa, Homo sapiens
  CDR3 for alpha chain variable domain of TCR clone 171505 (TRAV29/DV5, TRAJ31)
CAASRNNNARLMF

SEQ ID NO: 343010 - protein, 12 aa, Homo sapiens
  CDR3 for beta chain variable domain of TCR clone 171505 (TRBV14, TRBJ1-1)
CASSQLKELAFF

SEQ ID NO: 343011 - protein, 14 aa, Homo sapiens
  CDR3 for alpha chain variable domain of TCR clone 171506 (TRAV12-2, TRAJ24)
CAVTPADSWGKLQF

SEQ ID NO: 343012 - protein, 13 aa, Homo sapiens
  CDR3 for beta chain variable domain of TCR clone 171506 (TRBV6-1, TRBJ1-1)
CASSRQGNTEAFF

SEQ ID NO: 343013 - protein, 14 aa, Homo sapiens
  CDR3 for alpha chain variable domain of TCR clone 171507 (TRAV29/DV5, TRAJ36)
CAARRKTGANNLFF

SEQ ID NO: 343014 - protein, 16 aa, Homo sapiens
  CDR3 for beta chain variable domain of TCR clone 171507 (TRBV6-1, TRBJ2-5)
CASSETLDRGAETQYF

SEQ ID NO: 343015 - protein, 17 aa, Homo sapiens
  CDR3 for alpha chain variable domain of TCR clone 171508 (TRAV17, TRAJ52)
CATERPSGGTSYGKLTF

SEQ ID NO: 343016 - protein, 15 aa, Homo sapiens
  CDR3 for beta chain variable domain of TCR clone 171508 (TRBV5-1, TRBJ2-1)
CASSLVANAYNEQFF

SEQ ID NO: 343017 - protein, 14 aa, Homo sapiens
  CDR3 for alpha chain variable domain of TCR clone 171509 (TRAV13-1, TRAJ3)
CAPSKSSSASKIIF

SEQ ID NO: 343018 - protein, 16 aa, Homo sapiens
  CDR3 for beta chain variable domain of TCR clone 171509 (TRBV15, TRBJ2-3)
CATSRDLGIVTDTQYF

SEQ ID NO: 343019 - protein, 11 aa, Homo sapiens
  CDR3 for alpha chain variable domain of TCR clone 171510 (TRAV3, TRAJ21)
CAVGNFNNFYF

SEQ ID NO: 343020 - protein, 16 aa, Homo sapiens
  CDR3 for beta chain variable domain of TCR clone 171510 (TRBV19, TRBJ2-1)
CASSRAGPSSYNEQFF

SEQ ID NO: 343021 - protein, 16 aa, Homo sapiens
  CDR3 for alpha chain variable domain of TCR clone 171511 (TRAV3, TRAJ37)
WAVRGKGSGNTGKLIF

SEQ ID NO: 343022 - protein, 15 aa, Homo sapiens
  CDR3 for beta chain variable domain of TCR clone 171511 (TRBV7-3, TRBJ2-2)
CASSETGQGTGELFF

SEQ ID NO: 343023 - protein, 10 aa, Homo sapiens
  CDR3 for alpha chain variable domain of TCR clone 171512 (TRAV20, TRAJ37)
GASNTGKLIF

SEQ ID NO: 343024 - protein, 16 aa, Homo sapiens
  CDR3 for beta chain variable domain of TCR clone 171512 (TRBV12-4, TRBJ1-5)
CASSRPVGGSNQPQHF

SEQ ID NO: 343025 - protein, 16 aa, Homo sapiens
  CDR3 for alpha chain variable domain of TCR clone 171513 (TRAV30, TRAJ57)
CGTGWAPQGGSERLVF

SEQ ID NO: 343026 - protein, 14 aa, Homo sapiens
  CDR3 for beta chain variable domain of TCR clone 171513 (TRBV18, TRBJ1-1)
CASSPGFQGVEAFF

SEQ ID NO: 343027 - protein, 13 aa, Homo sapiens
  CDR3 for alpha chain variable domain of TCR clone 171514 (TRAV8-3, TRAJ36)
CAVGATGANNRFF

SEQ ID NO: 343028 - protein, 14 aa, Homo sapiens
  CDR3 for beta chain variable domain of TCR clone 171514 (TRBV6-1, TRBJ1-3)
CASVQGGGGNTIYF

SEQ ID NO: 343029 - protein, 16 aa, Homo sapiens
  CDR3 for alpha chain variable domain of TCR clone 171515 (TRAV12-3, TRAJ53)
CAMSPGSGGSNYKLTF

SEQ ID NO: 343030 - protein, 18 aa, Homo sapiens
  CDR3 for beta chain variable domain of TCR clone 171515 (TRBV6-3, TRBJ2-2)
CASSYRPGGLDRPGELFF

SEQ ID NO: 343031 - protein, 10 aa, Homo sapiens
  CDR3 for alpha chain variable domain of TCR clone 171516 (TRAV12-3, TRAJ18)
CAMSAEAQPW

SEQ ID NO: 343032 - protein, 13 aa, Homo sapiens
  CDR3 for beta chain variable domain of TCR clone 171516 (TRBV15, TRBJ1-6)
CATSGGLNSPLVF

SEQ ID NO: 343033 - protein, 15 aa, Homo sapiens
  CDR3 for alpha chain variable domain of TCR clone 171517 (TRAV27, TRAJ38)
CAARRNAGNNRKLIW

SEQ ID NO: 343034 - protein, 15 aa, Homo sapiens
  CDR3 for beta chain variable domain of TCR clone 171517 (TRBV18, TRBJ2-7)
CASSPTFMDSYEQYF

SEQ ID NO: 343035 - protein, 13 aa, Homo sapiens
  CDR3 for alpha chain variable domain of TCR clone 171518 (TRAV12-2, TRAJ15)
CAVFNQAGTALIF

SEQ ID NO: 343036 - protein, 14 aa, Homo sapiens
  CDR3 for beta chain variable domain of TCR clone 171518 (TRBV18, TRBJ2-5)
CASSPGVSQETQYF

SEQ ID NO: 343037 - protein, 14 aa, Homo sapiens
  CDR3 for alpha chain variable domain of TCR clone 171519 (TRAV13-1, TRAJ35)
CAASKGGFGNVLHC

SEQ ID NO: 343038 - protein, 15 aa, Homo sapiens
  CDR3 for beta chain variable domain of TCR clone 171519 (TRBV7-3, TRBJ2-2)
CQQLKAGDLVRGAVF

SEQ ID NO: 343039 - protein, 16 aa, Homo sapiens
  CDR3 for alpha chain variable domain of TCR clone 171520 (TRAV26-1, TRAJ36)
CIVRSIGRSGANNLFF

SEQ ID NO: 343040 - protein, 14 aa, Homo sapiens
  CDR3 for beta chain variable domain of TCR clone 171520 (TRBV25-1, TRBJ2-1)
CASSKTGGYNEQFF

SEQ ID NO: 343041 - protein, 15 aa, Homo sapiens
  CDR3 for alpha chain variable domain of TCR clone 171521 (TRAV12-1, TRAJ44)
CVADLPTGTASKLTF

SEQ ID NO: 343042 - protein, 13 aa, Homo sapiens
  CDR3 for beta chain variable domain of TCR clone 171521 (TRBV6-5, TRBJ2-5)
CASRPRGGETQYF

SEQ ID NO: 343043 - protein, 16 aa, Homo sapiens
  CDR3 for alpha chain variable domain of TCR clone 171522 (TRAV3, TRAJ21)
CAVRDIERGNFNKFYF

SEQ ID NO: 343044 - protein, 16 aa, Homo sapiens
  CDR3 for beta chain variable domain of TCR clone 171522 (TRBV12-4, TRBJ1-5)
CARSRPVGGSNQPQRF

SEQ ID NO: 343045 - protein, 14 aa, Homo sapiens
  CDR3 for alpha chain variable domain of TCR clone 171523 (TRAV1-2, TRAJ8)
CAVREDTGFQKLVF

SEQ ID NO: 343046 - protein, 19 aa, Homo sapiens
  CDR3 for beta chain variable domain of TCR clone 171523 (TRBV12-4, TRBJ2-1)
CASTLAFDPRDKEANEQFF

SEQ ID NO: 343047 - protein, 14 aa, Homo sapiens
  CDR3 for alpha chain variable domain of TCR clone 171524 (TRAV12-2, TRAJ53)
CAVKGGGSNYKLTS

SEQ ID NO: 343048 - protein, 14 aa, Homo sapiens
  CDR3 for beta chain variable domain of TCR clone 171524 (TRBV7-7, TRBJ2-2)
CATRQDSDTGELFF

SEQ ID NO: 343049 - protein, 15 aa, Homo sapiens
  CDR3 for alpha chain variable domain of TCR clone 171525 (TRAV21, TRAJ22)
CAVRLFFWFCKATDL

SEQ ID NO: 343050 - protein, 15 aa, Homo sapiens
  CDR3 for beta chain variable domain of TCR clone 171525 (TRBV5-1, TRBJ2-7)
CASSFRLAGVHEQYF

SEQ ID NO: 343051 - protein, 16 aa, Homo sapiens
  CDR3 for alpha chain variable domain of TCR clone 171526 (TRAV30, TRAJ24)
CGTEIVDADSWGKFQV

SEQ ID NO: 343052 - protein, 14 aa, Homo sapiens
  CDR3 for beta chain variable domain of TCR clone 171526 (TRBV12-5, TRBJ2-5)
CASGSRTHQETQYL

SEQ ID NO: 343053 - protein, 14 aa, Homo sapiens
  CDR3 for alpha chain variable domain of TCR clone 171527 (TRAV23/DV6, TRAJ8)
CAASTNTGFQKLVF

SEQ ID NO: 343054 - protein, 16 aa, Homo sapiens
  CDR3 for beta chain variable domain of TCR clone 171527 (TRBV4-1, TRBJ2-6)
CASSQVGDPGANVLTF

SEQ ID NO: 343055 - protein, 11 aa, Homo sapiens
  CDR3 for alpha chain variable domain of TCR clone 171528 (TRAV12-3, TRAJ49)
CAANTGNQFYF

SEQ ID NO: 343056 - protein, 15 aa, Homo sapiens
  CDR3 for beta chain variable domain of TCR clone 171528 (TRBV11-3, TRBJ2-3)
CASLKDGREGDTQYF

SEQ ID NO: 343057 - protein, 15 aa, Homo sapiens
  CDR3 for alpha chain variable domain of TCR clone 171529 (TRAV30, TRAJ32)
CGTEILGGATNKLIF

SEQ ID NO: 343058 - protein, 13 aa, Homo sapiens
  CDR3 for beta chain variable domain of TCR clone 171529 (TRBV6-3, TRBJ2-7)
CASSFNGGYEQYF

SEQ ID NO: 343059 - protein, 14 aa, Homo sapiens
  CDR3 for alpha chain variable domain of TCR clone 171530 (TRAV26-2, TRAJ32)
CCVGYGGATNKLTF

SEQ ID NO: 343060 - protein, 13 aa, Homo sapiens
  CDR3 for beta chain variable domain of TCR clone 171530 (TRBV12-5, TRBJ2-3)
CASGDRQSDTQYF

SEQ ID NO: 343061 - protein, 14 aa, Homo sapiens
  CDR3 for alpha chain variable domain of TCR clone 171531 (TRAV1-2, TRAJ27)
CAVRSGTNAGKSTF

SEQ ID NO: 343062 - protein, 15 aa, Homo sapiens
  CDR3 for beta chain variable domain of TCR clone 171531 (TRBV18, TRBJ2-7)
CASSPLQGRTNEQYF

SEQ ID NO: 343063 - protein, 13 aa, Homo sapiens
  CDR3 for alpha chain variable domain of TCR clone 171532 (TRAV13-1, TRAJ39)
CAVSIWAGKMLTF

SEQ ID NO: 343064 - protein, 15 aa, Homo sapiens
  CDR3 for beta chain variable domain of TCR clone 171532 (TRBV7-9, TRBJ1-1)
CASSLLEQGGTEAFF

SEQ ID NO: 343065 - protein, 18 aa, Homo sapiens
  CDR3 for alpha chain variable domain of TCR clone 171533 (TRAV12-3, TRAJ52)
CAMSVGGAGGTSYGKLTF

SEQ ID NO: 343066 - protein, 15 aa, Homo sapiens
  CDR3 for beta chain variable domain of TCR clone 171533 (TRBV25-1, TRBJ1-4)
CASSKRIATNEKLFF

SEQ ID NO: 343067 - protein, 17 aa, Homo sapiens
  CDR3 for alpha chain variable domain of TCR clone 171534 (TRAV26-1, TRAJ37)
CIVRVITVSSNTGKLIF

SEQ ID NO: 343068 - protein, 15 aa, Homo sapiens
  CDR3 for beta chain variable domain of TCR clone 171534 (TRBV4-1, TRBJ2-1)
CASSQDAGGLYEQFF

SEQ ID NO: 343069 - protein, 16 aa, Homo sapiens
  CDR3 for alpha chain variable domain of TCR clone 171535 (TRAV30, TRAJ24)
CGTEIVDADSWGKFQF

SEQ ID NO: 343070 - protein, 16 aa, Homo sapiens
  CDR3 for beta chain variable domain of TCR clone 171535 (TRBV7-8, TRBJ2-5)
CASSFGGQPAQETQYF

SEQ ID NO: 343071 - protein, 15 aa, Homo sapiens
  CDR3 for alpha chain variable domain of TCR clone 171536 (TRAV14/DV4, TRAJ39)
CAMRAVNNAGNMLTF

SEQ ID NO: 343072 - protein, 18 aa, Homo sapiens
  CDR3 for beta chain variable domain of TCR clone 171536 (TRBV5-8, TRBJ2-7)
CASSPHYRVWVTSSTSGR

SEQ ID NO: 343073 - protein, 14 aa, Homo sapiens
  CDR3 for alpha chain variable domain of TCR clone 171537 (TRAV12-3, TRAJ56)
CAMSVTGANSKLTF

SEQ ID NO: 343074 - protein, 13 aa, Homo sapiens
  CDR3 for beta chain variable domain of TCR clone 171537 (TRBV10-2, TRBJ2-7)
CASGASGGYEQYF

SEQ ID NO: 343075 - protein, 17 aa, Homo sapiens
  CDR3 for alpha chain variable domain of TCR clone 171538 (TRAV3, TRAJ6)
RAVRDGPRAGGSYIPAF

SEQ ID NO: 343076 - protein, 20 aa, Homo sapiens
  CDR3 for beta chain variable domain of TCR clone 171538 (TRBV28, TRBJ2-1)
CASTPIGRSPGLAGGNEQFF

SEQ ID NO: 343077 - protein, 15 aa, Homo sapiens
  CDR3 for alpha chain variable domain of TCR clone 171539 (TRAV8-4, TRAJ3)
CAVTGENLVQQCFQD

SEQ ID NO: 343078 - protein, 14 aa, Homo sapiens
  CDR3 for beta chain variable domain of TCR clone 171539 (TRBV6-1, TRBJ1-3)
CASVQGGGGNTIYF

SEQ ID NO: 343079 - protein, 17 aa, Homo sapiens
  CDR3 for alpha chain variable domain of TCR clone 171540 (TRAV12-2, TRAJ36)
CAGKDNLFFGTGTRLTV

SEQ ID NO: 343080 - protein, 15 aa, Homo sapiens
  CDR3 for beta chain variable domain of TCR clone 171540 (TRBV28, TRBJ2-2)
CASTVAGANTGELFF

SEQ ID NO: 343081 - protein, 12 aa, Homo sapiens
  CDR3 for alpha chain variable domain of TCR clone 171541 (TRAV27, TRAJ38)
CAARVMLATTIS

SEQ ID NO: 343082 - protein, 13 aa, Homo sapiens
  CDR3 for beta chain variable domain of TCR clone 171541 (TRBV12-5, TRBJ2-3)
CASGDRQSDTQYF

SEQ ID NO: 343083 - protein, 18 aa, Homo sapiens
  CDR3 for alpha chain variable domain of TCR clone 171542 (TRAV8-3, TRAJ4)
WVRDPTSNDPGGYNKLIF

SEQ ID NO: 343084 - protein, 17 aa, Homo sapiens
  CDR3 for beta chain variable domain of TCR clone 171542 (TRBV4-1, TRBJ2-5)
CASSQDLTGGPIETQYF

SEQ ID NO: 343085 - protein, 14 aa, Homo sapiens
  CDR3 for alpha chain variable domain of TCR clone 171543 (TRAV12-3, TRAJ37)
CVSEGSSNTGKLIF

SEQ ID NO: 343086 - protein, 13 aa, Homo sapiens
  CDR3 for beta chain variable domain of TCR clone 171543 (TRBV20-1, TRBJ1-1)
QCTNTDWGTEAFF

SEQ ID NO: 343087 - protein, 14 aa, Homo sapiens
  CDR3 for alpha chain variable domain of TCR clone 171544 (TRAV13-1, TRAJ35)
CAASKGGLGNVLHC

SEQ ID NO: 343088 - protein, 14 aa, Homo sapiens
  CDR3 for beta chain variable domain of TCR clone 171544 (TRBV20-1, TRBJ2-2)
CSAPDTANTGELFF

SEQ ID NO: 343089 - protein, 17 aa, Homo sapiens
  CDR3 for alpha chain variable domain of TCR clone 171545 (TRAV23/DV6, TRAJ57)
CAASSTLSQGGSEQLVF

SEQ ID NO: 343090 - protein, 14 aa, Homo sapiens
  CDR3 for beta chain variable domain of TCR clone 171545 (TRBV25-1, TRBJ1-1)
CASTRLGGNTEAFF

SEQ ID NO: 343091 - protein, 14 aa, Homo sapiens
  CDR3 for alpha chain variable domain of TCR clone 171546 (TRAV1-2, TRAJ16)
CAVNRFSDGQKLLF

SEQ ID NO: 343092 - protein, 13 aa, Homo sapiens
  CDR3 for beta chain variable domain of TCR clone 171546 (TRBV10-3, TRBJ2-7)
CASKLAVNEEQYF

SEQ ID NO: 343093 - protein, 17 aa, Homo sapiens
  CDR3 for alpha chain variable domain of TCR clone 171547 (TRAV35, TRAJ52)
CAGQLAAGGTSYGKLTF

SEQ ID NO: 343094 - protein, 12 aa, Homo sapiens
  CDR3 for beta chain variable domain of TCR clone 171547 (TRBV20-1, TRBJ2-7)
CSAGRRQSKQYF

SEQ ID NO: 343095 - protein, 15 aa, Homo sapiens
  CDR3 for alpha chain variable domain of TCR clone 171548 (TRAV12-3, TRAJ10)
CASYILTGGGNKLTF

SEQ ID NO: 343096 - protein, 14 aa, Homo sapiens
  CDR3 for beta chain variable domain of TCR clone 171548 (TRBV19, TRBJ2-1)
CASPTFVFSGEQFF

SEQ ID NO: 343097 - protein, 15 aa, Homo sapiens
  CDR3 for alpha chain variable domain of TCR clone 171549 (TRAV8-3, TRAJ11)
CAVGLLNSGYSTLTF

SEQ ID NO: 343098 - protein, 17 aa, Homo sapiens
  CDR3 for beta chain variable domain of TCR clone 171549 (TRBV11-2, TRBJ2-6)
CASSQRDIFSGANVLTF

SEQ ID NO: 343099 - protein, 12 aa, Homo sapiens
  CDR3 for alpha chain variable domain of TCR clone 171550 (TRAV2, TRAJ10)
CASTGGGNKLTF

SEQ ID NO: 343100 - protein, 12 aa, Homo sapiens
  CDR3 for beta chain variable domain of TCR clone 171550 (TRBV7-3, TRBJ2-5)
CASSSPGGTQYF

SEQ ID NO: 343101 - protein, 11 aa, Homo sapiens
  CDR3 for alpha chain variable domain of TCR clone 171551 (TRAV12-1, TRAJ43)
CVVIRNNDMSF

SEQ ID NO: 343102 - protein, 16 aa, Homo sapiens
  CDR3 for beta chain variable domain of TCR clone 171551 (TRBV14, TRBJ2-1)
CASSPRLAGEGNEQFF

SEQ ID NO: 343103 - protein, 14 aa, Homo sapiens
  CDR3 for alpha chain variable domain of TCR clone 171552 (TRAV21, TRAJ3)
CAVTGYSSASKIIF

SEQ ID NO: 343104 - protein, 17 aa, Homo sapiens
  CDR3 for beta chain variable domain of TCR clone 171552 (TRBV28, TRBJ2-5)
CASSRQGGPAGAETQYF

SEQ ID NO: 343105 - protein, 15 aa, Homo sapiens
  CDR3 for alpha chain variable domain of TCR clone 171553 (TRAV20, TRAJ4)
CAVQVFSGGYNKLIF

SEQ ID NO: 343106 - protein, 13 aa, Homo sapiens
  CDR3 for beta chain variable domain of TCR clone 171553 (TRBV7-6, TRBJ2-3)
CSNSGGDANTQYF

SEQ ID NO: 343107 - protein, 14 aa, Homo sapiens
  CDR3 for alpha chain variable domain of TCR clone 171554 (TRAV21, TRAJ58)
CAVRRGRSGSRLTF

SEQ ID NO: 343108 - protein, 18 aa, Homo sapiens
  CDR3 for beta chain variable domain of TCR clone 171554 (TRBV4-2, TRBJ2-7)
CASSPGLAGRSLSYEQYF

SEQ ID NO: 343109 - protein, 12 aa, Homo sapiens
  CDR3 for alpha chain variable domain of TCR clone 171555 (TRAV16, TRAJ22)
CALEVSASQLTF

SEQ ID NO: 343110 - protein, 14 aa, Homo sapiens
  CDR3 for beta chain variable domain of TCR clone 171555 (TRBV11-2, TRBJ2-3)
CASSSIASTDTHYF

SEQ ID NO: 343111 - protein, 16 aa, Homo sapiens
  CDR3 for alpha chain variable domain of TCR clone 171556 (TRAV17, TRAJ28)
CATDEYSWAGSYQLTF

SEQ ID NO: 343112 - protein, 13 aa, Homo sapiens
  CDR3 for beta chain variable domain of TCR clone 171556 (TRBV7-9, TRBJ1-2)
CASRTGPNYGYTF

SEQ ID NO: 343113 - protein, 13 aa, Homo sapiens
  CDR3 for alpha chain variable domain of TCR clone 171557 (TRAV12-2, TRAJ39)
CAVNNNAGNMLTF

SEQ ID NO: 343114 - protein, 13 aa, Homo sapiens
  CDR3 for beta chain variable domain of TCR clone 171557 (TRBV7-3, TRBJ2-5)
CASSFRGGETQYF

SEQ ID NO: 343115 - protein, 13 aa, Homo sapiens
  CDR3 for alpha chain variable domain of TCR clone 171558 (TRAV30, TRAJ34)
CGTVGYNTDKLIF

SEQ ID NO: 343116 - protein, 16 aa, Homo sapiens
  CDR3 for beta chain variable domain of TCR clone 171558 (TRBV7-9, TRBJ1-2)
CASSLGFSSGEDVYIF

SEQ ID NO: 343117 - protein, 14 aa, Homo sapiens
  CDR3 for alpha chain variable domain of TCR clone 171559 (TRAV1-2, TRAJ16)
CAVRGFSDGQKLLF

SEQ ID NO: 343118 - protein, 16 aa, Homo sapiens
  CDR3 for beta chain variable domain of TCR clone 171559 (TRBV20-1, TRBJ2-1)
CSARDNLAGGRGEQFF

SEQ ID NO: 343119 - protein, 12 aa, Homo sapiens
  CDR3 for alpha chain variable domain of TCR clone 171560 (TRAV21, TRAJ33)
CAKMDSNYQLIW

SEQ ID NO: 343120 - protein, 14 aa, Homo sapiens
  CDR3 for beta chain variable domain of TCR clone 171560 (TRBV2, TRBJ2-7)
CASSITAGGYEQYF

SEQ ID NO: 343121 - protein, 18 aa, Homo sapiens
  CDR3 for alpha chain variable domain of TCR clone 171561 (TRAV2, TRAJ32)
CCLLLFLHYGGSTNKLIF

SEQ ID NO: 343122 - protein, 16 aa, Homo sapiens
  CDR3 for beta chain variable domain of TCR clone 171561 (TRBV7-9, TRBJ2-7)
CASSYPDREGGYEQYF

SEQ ID NO: 343123 - protein, 11 aa, Homo sapiens
  CDR3 for alpha chain variable domain of TCR clone 171562 (TRAV21, TRAJ9)
CAVPGGFRTIF

SEQ ID NO: 343124 - protein, 12 aa, Homo sapiens
  CDR3 for beta chain variable domain of TCR clone 171562 (TRBV20-1, TRBJ2-3)
CSARVGTDTQYF

SEQ ID NO: 343125 - protein, 19 aa, Homo sapiens
  CDR3 for alpha chain variable domain of TCR clone 171563 (TRAV1-2, TRAJ26)
CLLPLCCERPDNYGQNFVF

SEQ ID NO: 343126 - protein, 17 aa, Homo sapiens
  CDR3 for beta chain variable domain of TCR clone 171563 (TRBV28, TRBJ2-5)
CASSRQGGLAGAETQYY

SEQ ID NO: 343127 - protein, 17 aa, Homo sapiens
  CDR3 for alpha chain variable domain of TCR clone 171564 (TRAV38-1, TRAJ28)
CAFMKPTSGAGSYQLTI

SEQ ID NO: 343128 - protein, 15 aa, Homo sapiens
  CDR3 for beta chain variable domain of TCR clone 171564 (TRBV5-1, TRBJ2-4)
CASSLGGGGSYIQYF

SEQ ID NO: 343129 - protein, 14 aa, Homo sapiens
  CDR3 for alpha chain variable domain of TCR clone 171565 (TRAV12-3, TRAJ9)
CAMSVENGGFKTIF

SEQ ID NO: 343130 - protein, 14 aa, Homo sapiens
  CDR3 for beta chain variable domain of TCR clone 171565 (TRBV7-2, TRBJ2-7)
CASRSQGAAYEQYF

SEQ ID NO: 343131 - protein, 13 aa, Homo sapiens
  CDR3 for alpha chain variable domain of TCR clone 171566 (TRAV12-1, TRAJ16)
CMVNGPDGQKLLF

SEQ ID NO: 343132 - protein, 13 aa, Homo sapiens
  CDR3 for beta chain variable domain of TCR clone 171566 (TRBV2, TRBJ1-1)
CARNPTGGFHAFF

SEQ ID NO: 343133 - protein, 14 aa, Homo sapiens
  CDR3 for alpha chain variable domain of TCR clone 171567 (TRAV22, TRAJ6)
CAGVGPGGSYIPTF

SEQ ID NO: 343134 - protein, 17 aa, Homo sapiens
  CDR3 for beta chain variable domain of TCR clone 171567 (TRBV4-2, TRBJ1-1)
CASTQFGGGSGNTEAFF

SEQ ID NO: 343135 - protein, 15 aa, Homo sapiens
  CDR3 for alpha chain variable domain of TCR clone 171568 (TRAV8-3, TRAJ45)
CSSSYSGGGADGLTF

SEQ ID NO: 343136 - protein, 13 aa, Homo sapiens
  CDR3 for beta chain variable domain of TCR clone 171568 (TRBV7-9, TRBJ2-7)
CASSFAGAYEQYF

SEQ ID NO: 343137 - protein, 23 aa, Homo sapiens
  CDR3 for alpha chain variable domain of TCR clone 171569 (TRAV26-1, )
CIADSAGNNHIQNPDPAVYQLRD

SEQ ID NO: 343138 - protein, 16 aa, Homo sapiens
  CDR3 for beta chain variable domain of TCR clone 171569 (TRBV20-1, TRBJ1-4)
CSAPGQGLLTNEKLFF

SEQ ID NO: 343139 - protein, 13 aa, Homo sapiens
  CDR3 for alpha chain variable domain of TCR clone 171570 (TRAV27, TRAJ29)
CAGAHSGNTPLVF

SEQ ID NO: 343140 - protein, 15 aa, Homo sapiens
  CDR3 for beta chain variable domain of TCR clone 171570 (TRBV7-9, TRBJ1-4)
CASSRTGGFNEKLFF

SEQ ID NO: 343141 - protein, 15 aa, Homo sapiens
  CDR3 for alpha chain variable domain of TCR clone 171571 (TRAV17, TRAJ57)
CATGPSQGGSEKLVF

SEQ ID NO: 343142 - protein, 13 aa, Homo sapiens
  CDR3 for beta chain variable domain of TCR clone 171571 (TRBV3-1, TRBJ1-1)
CASSPGVITEAFF

SEQ ID NO: 343143 - protein, 13 aa, Homo sapiens
  CDR3 for alpha chain variable domain of TCR clone 171572 (TRAV35, TRAJ32)
CAGVGGATNKLIF

SEQ ID NO: 343144 - protein, 14 aa, Homo sapiens
  CDR3 for beta chain variable domain of TCR clone 171572 (TRBV7-2, TRBJ1-1)
CASSFLTGTTEAFF

SEQ ID NO: 343145 - protein, 15 aa, Homo sapiens
  CDR3 for alpha chain variable domain of TCR clone 171573 (TRAV12-2, TRAJ50)
CAVNGLATSYDKVIF

SEQ ID NO: 343146 - protein, 14 aa, Homo sapiens
  CDR3 for beta chain variable domain of TCR clone 171573 (TRBV7-2, TRBJ1-1)
CASSFLTGTTEAFF

SEQ ID NO: 343147 - protein, 15 aa, Homo sapiens
  CDR3 for alpha chain variable domain of TCR clone 171574 (TRAV38-2/DV8, TRAJ57)
CAYKSGLGGSEKLAF

SEQ ID NO: 343148 - protein, 14 aa, Homo sapiens
  CDR3 for beta chain variable domain of TCR clone 171574 (TRBV4-1, TRBJ2-2)
CASSQAVNAGELFF

SEQ ID NO: 343149 - protein, 16 aa, Homo sapiens
  CDR3 for alpha chain variable domain of TCR clone 171575 (TRAV20, TRAJ26)
CAVQHRRDNYGQTFVF

SEQ ID NO: 343150 - protein, 15 aa, Homo sapiens
  CDR3 for beta chain variable domain of TCR clone 171575 (TRBV7-2, TRBJ2-7)
CASSWGQGAIYEQYF

SEQ ID NO: 343151 - protein, 12 aa, Homo sapiens
  CDR3 for alpha chain variable domain of TCR clone 171576 (TRAV12-3, TRAJ17)
CAMTLTGNKLTF

SEQ ID NO: 343152 - protein, 14 aa, Homo sapiens
  CDR3 for beta chain variable domain of TCR clone 171576 (TRBV4-1, TRBJ2-7)
CASSQDREHFEQYF

SEQ ID NO: 343153 - protein, 14 aa, Homo sapiens
  CDR3 for alpha chain variable domain of TCR clone 171577 (TRAV12-2, TRAJ17)
CAVLFKAAGNKLTF

SEQ ID NO: 343154 - protein, 15 aa, Homo sapiens
  CDR3 for beta chain variable domain of TCR clone 171577 (TRBV20-1, TRBJ2-7)
CSARDPVKGEGEQYF

SEQ ID NO: 343155 - protein, 12 aa, Homo sapiens
  CDR3 for alpha chain variable domain of TCR clone 171578 (TRAV35, TRAJ50)
QLRKTSYDKVIF

SEQ ID NO: 343156 - protein, 12 aa, Homo sapiens
  CDR3 for beta chain variable domain of TCR clone 171578 (TRBV5-1, TRBJ2-5)
CASSLGLETQYF

SEQ ID NO: 343157 - protein, 17 aa, Homo sapiens
  CDR3 for alpha chain variable domain of TCR clone 171579 (TRAV3, TRAJ6)
CAVRDGPRAGGSYIPTF

SEQ ID NO: 343158 - protein, 18 aa, Homo sapiens
  CDR3 for beta chain variable domain of TCR clone 171579 (TRBV7-3, TRBJ2-3)
CASSSTGTYPGSADTQYF

SEQ ID NO: 343159 - protein, 12 aa, Homo sapiens
  CDR3 for alpha chain variable domain of TCR clone 171580 (TRAV8-3, TRAJ26)
CAGDNYGRKFVF

SEQ ID NO: 343160 - protein, 15 aa, Homo sapiens
  CDR3 for beta chain variable domain of TCR clone 171580 (TRBV9, TRBJ2-1)
CASSLAGSSYNEQFF

SEQ ID NO: 343161 - protein, 13 aa, Homo sapiens
  CDR3 for alpha chain variable domain of TCR clone 171581 (TRAV2, TRAJ40)
CAVVTSGTYKYIF

SEQ ID NO: 343162 - protein, 15 aa, Homo sapiens
  CDR3 for beta chain variable domain of TCR clone 171581 (TRBV12-4, TRBJ1-1)
CASSLAVSRGAEAFF

SEQ ID NO: 343163 - protein, 15 aa, Homo sapiens
  CDR3 for alpha chain variable domain of TCR clone 171582 (TRAV3, TRAJ3)
CCERPRYSSASKIIF

SEQ ID NO: 343164 - protein, 16 aa, Homo sapiens
  CDR3 for beta chain variable domain of TCR clone 171582 (TRBV19, TRBJ1-5)
CASSIDRGGPRQPHHF

SEQ ID NO: 343165 - protein, 15 aa, Homo sapiens
  CDR3 for alpha chain variable domain of TCR clone 171583 (TRAV26-1, TRAJ29)
CIVRVEGSGNTPLVF

SEQ ID NO: 343166 - protein, 12 aa, Homo sapiens
  CDR3 for beta chain variable domain of TCR clone 171583 (TRBV5-1, TRBJ1-1)
CASSYGNTEAFF

SEQ ID NO: 343167 - protein, 11 aa, Homo sapiens
  CDR3 for alpha chain variable domain of TCR clone 171584 (TRAV12-3, TRAJ27)
CAMANAGKSTF

SEQ ID NO: 343168 - protein, 12 aa, Homo sapiens
  CDR3 for beta chain variable domain of TCR clone 171584 (TRBV12-4, TRBJ2-7)
CASSLGGNEQYF

SEQ ID NO: 343169 - protein, 13 aa, Homo sapiens
  CDR3 for alpha chain variable domain of TCR clone 171585 (TRAV22, TRAJ29)
CAVGGSGNTPLVF

SEQ ID NO: 343170 - protein, 13 aa, Homo sapiens
  CDR3 for beta chain variable domain of TCR clone 171585 (TRBV11-2, TRBJ2-5)
CASSSTGEETQYF

SEQ ID NO: 343171 - protein, 11 aa, Homo sapiens
  CDR3 for alpha chain variable domain of TCR clone 171586 (TRAV13-1, TRAJ27)
CAAYNAGKSTF

SEQ ID NO: 343172 - protein, 14 aa, Homo sapiens
  CDR3 for beta chain variable domain of TCR clone 171586 (TRBV25-1, TRBJ1-1)
CASTHLGGNTEAFF

SEQ ID NO: 343173 - protein, 14 aa, Homo sapiens
  CDR3 for alpha chain variable domain of TCR clone 171587 (TRAV12-1, TRAJ45)
CVVMRSGGADGLTF

SEQ ID NO: 343174 - protein, 15 aa, Homo sapiens
  CDR3 for beta chain variable domain of TCR clone 171587 (TRBV7-2, TRBJ2-1)
CASSSELAGGNEQFF

SEQ ID NO: 343175 - protein, 12 aa, Homo sapiens
  CDR3 for alpha chain variable domain of TCR clone 171588 (TRAV8-3, TRAJ41)
CAVAPSGHALNF

SEQ ID NO: 343176 - protein, 18 aa, Homo sapiens
  CDR3 for beta chain variable domain of TCR clone 171588 (TRBV20-1, TRBJ2-6)
CSAETTPTHGSGANVLTF

SEQ ID NO: 343177 - protein, 15 aa, Homo sapiens
  CDR3 for alpha chain variable domain of TCR clone 171589 (TRAV21, TRAJ40)
CAVRPQTSGTYKYIF

SEQ ID NO: 343178 - protein, 13 aa, Homo sapiens
  CDR3 for beta chain variable domain of TCR clone 171589 (TRBV29-1, TRBJ2-2)
CSTTGVNTGELFF

SEQ ID NO: 343179 - protein, 14 aa, Homo sapiens
  CDR3 for alpha chain variable domain of TCR clone 171590 (TRAV8-3, TRAJ9)
CAVVYNTGGFKTIF

SEQ ID NO: 343180 - protein, 15 aa, Homo sapiens
  CDR3 for beta chain variable domain of TCR clone 171590 (TRBV7-2, TRBJ1-2)
CASSPRAGWNYGYTF

SEQ ID NO: 343181 - protein, 12 aa, Homo sapiens
  CDR3 for alpha chain variable domain of TCR clone 171591 (TRAV10, TRAJ31)
CVVRAHRARLMF

SEQ ID NO: 343182 - protein, 15 aa, Homo sapiens
  CDR3 for beta chain variable domain of TCR clone 171591 (TRBV7-2, TRBJ2-1)
CASSSGLAGGNEQFF

SEQ ID NO: 343183 - protein, 15 aa, Homo sapiens
  CDR3 for alpha chain variable domain of TCR clone 171592 (TRAV26-1, TRAJ3)
CTVRSGYSSASKIIF

SEQ ID NO: 343184 - protein, 14 aa, Homo sapiens
  CDR3 for beta chain variable domain of TCR clone 171592 (TRBV13, TRBJ2-5)
CASYRRLAEETQYF

SEQ ID NO: 343185 - protein, 11 aa, Homo sapiens
  CDR3 for alpha chain variable domain of TCR clone 171593 (TRAV4, TRAJ20)
CLVGDKVTTTS

SEQ ID NO: 343186 - protein, 13 aa, Homo sapiens
  CDR3 for beta chain variable domain of TCR clone 171593 (TRBV10-3, TRBJ2-7)
CASKLAVNDEQYF

SEQ ID NO: 343187 - protein, 14 aa, Homo sapiens
  CDR3 for alpha chain variable domain of TCR clone 171594 (TRAV16, TRAJ33)
CALSAMDSNYQLVW

SEQ ID NO: 343188 - protein, 12 aa, Homo sapiens
  CDR3 for beta chain variable domain of TCR clone 171594 (TRBV28, TRBJ2-6)
CAIQAGANVLTF

SEQ ID NO: 343189 - protein, 13 aa, Homo sapiens
  CDR3 for alpha chain variable domain of TCR clone 171595 (TRAV1-2, TRAJ13)
CAVNSGGYQTVTF

SEQ ID NO: 343190 - protein, 14 aa, Homo sapiens
  CDR3 for beta chain variable domain of TCR clone 171595 (TRBV4-1, TRBJ1-5)
CASSPKGDNQPQHF

SEQ ID NO: 343191 - protein, 14 aa, Homo sapiens
  CDR3 for alpha chain variable domain of TCR clone 171596 (TRAV8-2, TRAJ4)
CVVTPSGGYNKLIF

SEQ ID NO: 343192 - protein, 15 aa, Homo sapiens
  CDR3 for beta chain variable domain of TCR clone 171596 (TRBV6-6, TRBJ2-7)
CASSYSYGGSYEQYF

SEQ ID NO: 343193 - protein, 14 aa, Homo sapiens
  CDR3 for alpha chain variable domain of TCR clone 171597 (TRAV23/DV6, TRAJ37)
CEARTSSNTGKLIF

SEQ ID NO: 343194 - protein, 15 aa, Homo sapiens
  CDR3 for beta chain variable domain of TCR clone 171597 (TRBV7-9, TRBJ2-7)
CASSPGGGLTYEQYF

SEQ ID NO: 343195 - protein, 16 aa, Homo sapiens
  CDR3 for alpha chain variable domain of TCR clone 171598 (TRAV30, TRAJ24)
CGTEIVDADSLGKFQF

SEQ ID NO: 343196 - protein, 14 aa, Homo sapiens
  CDR3 for beta chain variable domain of TCR clone 171598 (TRBV5-5, TRBJ1-2)
CASSLDPYNYGYTF

SEQ ID NO: 343197 - protein, 15 aa, Homo sapiens
  CDR3 for alpha chain variable domain of TCR clone 171599 (TRAV21, TRAJ57)
CAVILTQGGSEKLVF

SEQ ID NO: 343198 - protein, 14 aa, Homo sapiens
  CDR3 for beta chain variable domain of TCR clone 171599 (TRBV5-1, TRBJ2-2)
CASSLIWIPGELFF

SEQ ID NO: 343199 - protein, 15 aa, Homo sapiens
  CDR3 for alpha chain variable domain of TCR clone 171600 (TRAV12-1, TRAJ9)
CVVSFGDTGGFKTIF

SEQ ID NO: 343200 - protein, 13 aa, Homo sapiens
  CDR3 for beta chain variable domain of TCR clone 171600 (TRBV7-6, TRBJ1-2)
CASSLVADYGYTF

SEQ ID NO: 343201 - protein, 16 aa, Homo sapiens
  CDR3 for alpha chain variable domain of TCR clone 171601 (TRAV2, TRAJ4)
CAVEDRFSGAYNKLIF

SEQ ID NO: 343202 - protein, 13 aa, Homo sapiens
  CDR3 for beta chain variable domain of TCR clone 171601 (TRBV7-7, TRBJ2-5)
CASSRSGQETQYF

SEQ ID NO: 343203 - protein, 11 aa, Homo sapiens
  CDR3 for alpha chain variable domain of TCR clone 171602 (TRAV3, TRAJ21)
CAVGNFNKFYF

SEQ ID NO: 343204 - protein, 17 aa, Homo sapiens
  CDR3 for beta chain variable domain of TCR clone 171602 (TRBV24-1, TRBJ2-1)
GATSDVSTSGTYNEQFF

SEQ ID NO: 343205 - protein, 12 aa, Homo sapiens
  CDR3 for alpha chain variable domain of TCR clone 171603 (TRAV29/DV5, TRAJ34)
CAASGNTDKLIF

SEQ ID NO: 343206 - protein, 16 aa, Homo sapiens
  CDR3 for beta chain variable domain of TCR clone 171603 (TRBV7-3, TRBJ2-2)
CASSLKRGTLSGELFF

SEQ ID NO: 343207 - protein, 15 aa, Homo sapiens
  CDR3 for alpha chain variable domain of TCR clone 171604 (TRAV1-2, TRAJ17)
CAVRGYGAAGNKLTF

SEQ ID NO: 343208 - protein, 23 aa, Homo sapiens
  CDR3 for beta chain variable domain of TCR clone 171604 (TRBV11-2, TRBJ2-5)
CAGSSPGGEGAASRDPVLRARHA

SEQ ID NO: 343209 - protein, 11 aa, Homo sapiens
  CDR3 for alpha chain variable domain of TCR clone 171605 (TRAV8-3, TRAJ42)
NYGGSQGNLIF

SEQ ID NO: 343210 - protein, 16 aa, Homo sapiens
  CDR3 for beta chain variable domain of TCR clone 171605 (TRBV6-1, TRBJ1-3)
CASVQGGVETPYILER

SEQ ID NO: 343211 - protein, 14 aa, Homo sapiens
  CDR3 for alpha chain variable domain of TCR clone 171606 (TRAV8-3, TRAJ4)
CDVGASGGYNKLMF

SEQ ID NO: 343212 - protein, 16 aa, Homo sapiens
  CDR3 for beta chain variable domain of TCR clone 171606 (TRBV4-3, TRBJ2-2)
CASSHLQGSGTGELFF

SEQ ID NO: 343213 - protein, 12 aa, Homo sapiens
  CDR3 for alpha chain variable domain of TCR clone 171607 (TRAV12-3, TRAJ17)
CAMTLTGNKLTF

SEQ ID NO: 343214 - protein, 11 aa, Homo sapiens
  CDR3 for beta chain variable domain of TCR clone 171607 (TRBV28, TRBJ2-7)
CASSTQGGKSF

SEQ ID NO: 343215 - protein, 23 aa, Homo sapiens
  CDR3 for alpha chain variable domain of TCR clone 171608 (TRAV30, TRAJ29)
PAQLLRNLLLWHRAFSGNTPLVF

SEQ ID NO: 343216 - protein, 15 aa, Homo sapiens
  CDR3 for beta chain variable domain of TCR clone 171608 (TRBV5-1, TRBJ2-2)
CASSLVGQNTGELFF

SEQ ID NO: 343217 - protein, 16 aa, Homo sapiens
  CDR3 for alpha chain variable domain of TCR clone 171609 (TRAV29/DV5, TRAJ28)
CAADAYSGAGSYQLTL

SEQ ID NO: 343218 - protein, 15 aa, Homo sapiens
  CDR3 for beta chain variable domain of TCR clone 171609 (TRBV24-1, TRBJ1-4)
CATSDPQGADEKLFF

SEQ ID NO: 343219 - protein, 19 aa, Homo sapiens
  CDR3 for alpha chain variable domain of TCR clone 171610 (TRAV8-4, TRAJ3)
CAVTGENLVQQGFQDNLLI

SEQ ID NO: 343220 - protein, 16 aa, Homo sapiens
  CDR3 for beta chain variable domain of TCR clone 171610 (TRBV4-2, TRBJ1-1)
CASSQAGFGMNTEAFF

SEQ ID NO: 343221 - protein, 18 aa, Homo sapiens
  CDR3 for alpha chain variable domain of TCR clone 171611 (TRAV1-2, TRAJ18)
CAVRDMGDRGSTLGRLYF

SEQ ID NO: 343222 - protein, 16 aa, Homo sapiens
  CDR3 for beta chain variable domain of TCR clone 171611 (TRBV29-1, TRBJ1-2)
CSVEANRDIPNYGYTF

SEQ ID NO: 343223 - protein, 12 aa, Homo sapiens
  CDR3 for alpha chain variable domain of TCR clone 171612 (TRAV12-3, TRAJ17)
CAMTLTGNKLTF

SEQ ID NO: 343224 - protein, 14 aa, Homo sapiens
  CDR3 for beta chain variable domain of TCR clone 171612 (TRBV7-2, TRBJ2-1)
CASSLDRRGGEQFF

SEQ ID NO: 343225 - protein, 15 aa, Homo sapiens
  CDR3 for alpha chain variable domain of TCR clone 171613 (TRAV8-4, TRAJ13)
CAVSDWGGGYQKVTF

SEQ ID NO: 343226 - protein, 14 aa, Homo sapiens
  CDR3 for beta chain variable domain of TCR clone 171613 (TRBV7-2, TRBJ2-7)
CASSLRWEVNEQYF

SEQ ID NO: 343227 - protein, 14 aa, Homo sapiens
  CDR3 for alpha chain variable domain of TCR clone 171614 (TRAV9-2, TRAJ39)
CALYIYNAGNMLTF

SEQ ID NO: 343228 - protein, 13 aa, Homo sapiens
  CDR3 for beta chain variable domain of TCR clone 171614 (TRBV27, TRBJ2-7)
CASGRGGAYEQYF

SEQ ID NO: 343229 - protein, 17 aa, Homo sapiens
  CDR3 for alpha chain variable domain of TCR clone 171615 (TRAV35, TRAJ47)
GLLDCRTHTAYGNKLVF

SEQ ID NO: 343230 - protein, 11 aa, Homo sapiens
  CDR3 for beta chain variable domain of TCR clone 171615 (TRBV29-1, TRBJ1-1)
CSVEVGKRTFF

SEQ ID NO: 343231 - protein, 12 aa, Homo sapiens
  CDR3 for alpha chain variable domain of TCR clone 171616 (TRAV13-1, TRAJ22)
CVPRGFCKATDL

SEQ ID NO: 343232 - protein, 16 aa, Homo sapiens
  CDR3 for beta chain variable domain of TCR clone 171616 (TRBV7-3, TRBJ2-5)
CASSLMGGASQETQYF

SEQ ID NO: 343233 - protein, 14 aa, Homo sapiens
  CDR3 for alpha chain variable domain of TCR clone 171617 (TRAV12-2, TRAJ44)
CAVNPAGTVSKLTF

SEQ ID NO: 343234 - protein, 13 aa, Homo sapiens
  CDR3 for beta chain variable domain of TCR clone 171617 (TRBV20-1, TRBJ1-6)
CSAPLGVGSPLHF

SEQ ID NO: 343235 - protein, 15 aa, Homo sapiens
  CDR3 for alpha chain variable domain of TCR clone 171618 (TRAV26-1, TRAJ56)
CIVRVDNGANSKLSF

SEQ ID NO: 343236 - protein, 15 aa, Homo sapiens
  CDR3 for beta chain variable domain of TCR clone 171618 (TRBV20-1, TRBJ2-7)
CSARDPTEVGHEQYF

SEQ ID NO: 343237 - protein, 13 aa, Homo sapiens
  CDR3 for alpha chain variable domain of TCR clone 171619 (TRAV1-1, TRAJ13)
CAGHLNWGKQPLL

SEQ ID NO: 343238 - protein, 15 aa, Homo sapiens
  CDR3 for beta chain variable domain of TCR clone 171619 (TRBV9, TRBJ1-6)
CASSVAGTGDSPLHF

SEQ ID NO: 343239 - protein, 15 aa, Homo sapiens
  CDR3 for alpha chain variable domain of TCR clone 171620 (TRAV8-3, TRAJ40)
CAVGPYTSGTYKYIL

SEQ ID NO: 343240 - protein, 16 aa, Homo sapiens
  CDR3 for beta chain variable domain of TCR clone 171620 (TRBV7-2, TRBJ2-7)
CASSLEPGGGSGEQYF

SEQ ID NO: 343241 - protein, 14 aa, Homo sapiens
  CDR3 for alpha chain variable domain of TCR clone 171621 (TRAV17, TRAJ22)
CATSPSGSARQLTF

SEQ ID NO: 343242 - protein, 15 aa, Homo sapiens
  CDR3 for beta chain variable domain of TCR clone 171621 (TRBV4-1, TRBJ2-5)
CAGSQWDLCQETQYF

SEQ ID NO: 343243 - protein, 15 aa, Homo sapiens
  CDR3 for alpha chain variable domain of TCR clone 171622 (TRAV29/DV5, TRAJ29)
CAASERTSGNTPLVF

SEQ ID NO: 343244 - protein, 17 aa, Homo sapiens
  CDR3 for beta chain variable domain of TCR clone 171622 (TRBV4-1, TRBJ1-4)
CASSQEGPRGVEEKLFF

SEQ ID NO: 343245 - protein, 11 aa, Homo sapiens
  CDR3 for alpha chain variable domain of TCR clone 171623 (TRAV3, TRAJ21)
CAVGNFNKFYF

SEQ ID NO: 343246 - protein, 16 aa, Homo sapiens
  CDR3 for beta chain variable domain of TCR clone 171623 (TRBV20-1, TRBJ1-4)
CSAPGQGLLANEKLFF

SEQ ID NO: 343247 - protein, 14 aa, Homo sapiens
  CDR3 for alpha chain variable domain of TCR clone 171624 (TRAV39, TRAJ54)
CAVVLIQGSQKLVF

SEQ ID NO: 343248 - protein, 16 aa, Homo sapiens
  CDR3 for beta chain variable domain of TCR clone 171624 (TRBV3-1, TRBJ2-7)
CASSQGATGVAYEQYF

SEQ ID NO: 343249 - protein, 14 aa, Homo sapiens
  CDR3 for alpha chain variable domain of TCR clone 171625 (TRAV12-2, TRAJ40)
CAVKIPSGTYKYIF

SEQ ID NO: 343250 - protein, 15 aa, Homo sapiens
  CDR3 for beta chain variable domain of TCR clone 171625 (TRBV4-1, TRBJ2-7)
CASSQNTGRLYEQYF

SEQ ID NO: 343251 - protein, 14 aa, Homo sapiens
  CDR3 for alpha chain variable domain of TCR clone 171626 (TRAV3, TRAJ6)
CAVRDPWGSYIPTC

SEQ ID NO: 343252 - protein, 15 aa, Homo sapiens
  CDR3 for beta chain variable domain of TCR clone 171626 (TRBV19, TRBJ1-6)
CASSTQGAVGSPLHF

SEQ ID NO: 343253 - protein, 15 aa, Homo sapiens
  CDR3 for alpha chain variable domain of TCR clone 171627 (TRAV34, TRAJ38)
CGADFTPGNNRKLIW

SEQ ID NO: 343254 - protein, 16 aa, Homo sapiens
  CDR3 for beta chain variable domain of TCR clone 171627 (TRBV12-5, TRBJ2-5)
CASGPLTSGNQETQYF

SEQ ID NO: 343255 - protein, 16 aa, Homo sapiens
  CDR3 for alpha chain variable domain of TCR clone 171628 (TRAV38-2/DV8, TRAJ44)
CAYRSARGGTDSKLTF

SEQ ID NO: 343256 - protein, 16 aa, Homo sapiens
  CDR3 for beta chain variable domain of TCR clone 171628 (TRBV4-2, TRBJ2-3)
CASSLSSGGHTDTQYF

SEQ ID NO: 343257 - protein, 16 aa, Homo sapiens
  CDR3 for alpha chain variable domain of TCR clone 171629 (TRAV30, TRAJ24)
CGSEIVDADSWGKFRF

SEQ ID NO: 343258 - protein, 14 aa, Homo sapiens
  CDR3 for beta chain variable domain of TCR clone 171629 (TRBV12-5, TRBJ2-5)
CASGSRTHQETQYF

SEQ ID NO: 343259 - protein, 16 aa, Homo sapiens
  CDR3 for alpha chain variable domain of TCR clone 171630 (TRAV30, TRAJ24)
CGTEIVDADSWGKFKF

SEQ ID NO: 343260 - protein, 20 aa, Homo sapiens
  CDR3 for beta chain variable domain of TCR clone 171630 (TRBV19, TRBJ2-1)
CASSISRTVTSTRLNNEQFF

SEQ ID NO: 343261 - protein, 17 aa, Homo sapiens
  CDR3 for alpha chain variable domain of TCR clone 171631 (TRAV8-6, TRAJ58)
CAVSSWVGETSGSRLTF

SEQ ID NO: 343262 - protein, 14 aa, Homo sapiens
  CDR3 for beta chain variable domain of TCR clone 171631 (TRBV28, TRBJ2-3)
CASSWRGRADTQYF

SEQ ID NO: 343263 - protein, 13 aa, Homo sapiens
  CDR3 for alpha chain variable domain of TCR clone 171632 (TRAV16, TRAJ47)
CALSRGYGNKLVF

SEQ ID NO: 343264 - protein, 17 aa, Homo sapiens
  CDR3 for beta chain variable domain of TCR clone 171632 (TRBV28, TRBJ2-5)
CASSTPEGDALQETQYF

SEQ ID NO: 343265 - protein, 14 aa, Homo sapiens
  CDR3 for alpha chain variable domain of TCR clone 171633 (TRAV35, TRAJ22)
CAGLRPGSARQQTF

SEQ ID NO: 343266 - protein, 15 aa, Homo sapiens
  CDR3 for beta chain variable domain of TCR clone 171633 (TRBV12-4, TRBJ2-5)
CASSPPTGLQETQYL

SEQ ID NO: 343267 - protein, 13 aa, Homo sapiens
  CDR3 for alpha chain variable domain of TCR clone 171634 (TRAV13-1, TRAJ39)
CAASIVMQATCSP

SEQ ID NO: 343268 - protein, 13 aa, Homo sapiens
  CDR3 for beta chain variable domain of TCR clone 171634 (TRBV10-3, TRBJ2-7)
CASKLAVNYEQYF

SEQ ID NO: 343269 - protein, 12 aa, Homo sapiens
  CDR3 for alpha chain variable domain of TCR clone 171635 (TRAV12-3, TRAJ17)
CAMTLTGNKLTF

SEQ ID NO: 343270 - protein, 15 aa, Homo sapiens
  CDR3 for beta chain variable domain of TCR clone 171635 (TRBV12-4, TRBJ2-5)
CASSPPTGLQETQYC

SEQ ID NO: 343271 - protein, 14 aa, Homo sapiens
  CDR3 for alpha chain variable domain of TCR clone 171636 (TRAV12-2, TRAJ4)
CAEDLSGGYTKLIF

SEQ ID NO: 343272 - protein, 13 aa, Homo sapiens
  CDR3 for beta chain variable domain of TCR clone 171636 (TRBV7-9, TRBJ1-2)
CASSLKQNYGYTF

SEQ ID NO: 343273 - protein, 16 aa, Homo sapiens
  CDR3 for alpha chain variable domain of TCR clone 171637 (TRAV17, TRAJ53)
FATDAPSGGSNYKLTF

SEQ ID NO: 343274 - protein, 12 aa, Homo sapiens
  CDR3 for beta chain variable domain of TCR clone 171637 (TRBV5-1, TRBJ2-7)
CASSFRGYEQYF

SEQ ID NO: 343275 - protein, 12 aa, Homo sapiens
  CDR3 for alpha chain variable domain of TCR clone 171638 (TRAV21, TRAJ49)
CAVNDGGNQFYF

SEQ ID NO: 343276 - protein, 16 aa, Homo sapiens
  CDR3 for beta chain variable domain of TCR clone 171638 (TRBV7-3, TRBJ2-2)
CASSLKRGTLSGELFF

SEQ ID NO: 343277 - protein, 13 aa, Homo sapiens
  CDR3 for alpha chain variable domain of TCR clone 171639 (TRAV29/DV5, TRAJ37)
CAAVPVNTGKLIL

SEQ ID NO: 343278 - protein, 13 aa, Homo sapiens
  CDR3 for beta chain variable domain of TCR clone 171639 (TRBV28, TRBJ2-7)
CASSPTLKREQYF

SEQ ID NO: 343279 - protein, 17 aa, Homo sapiens
  CDR3 for alpha chain variable domain of TCR clone 171640 (TRAV3, TRAJ6)
CAVREGPRAGGSYIPTF

SEQ ID NO: 343280 - protein, 20 aa, Homo sapiens
  CDR3 for beta chain variable domain of TCR clone 171640 (TRBV28, TRBJ2-1)
CASTPIGRSPGLAGGNEQFF

SEQ ID NO: 343281 - protein, 19 aa, Homo sapiens
  CDR3 for alpha chain variable domain of TCR clone 171641 (TRAV3, TRAJ6)
CPVRDRNPSRSGGSYIPTF

SEQ ID NO: 343282 - protein, 15 aa, Homo sapiens
  CDR3 for beta chain variable domain of TCR clone 171641 (TRBV18, TRBJ2-7)
CASSPTFMDSYEQYF

SEQ ID NO: 343283 - protein, 13 aa, Homo sapiens
  CDR3 for alpha chain variable domain of TCR clone 171642 (TRAV3, TRAJ41)
CAVSSNSGYTLNF

SEQ ID NO: 343284 - protein, 13 aa, Homo sapiens
  CDR3 for beta chain variable domain of TCR clone 171642 (TRBV20-1, TRBJ2-2)
CSAVSGGAGELFF

SEQ ID NO: 343285 - protein, 14 aa, Homo sapiens
  CDR3 for alpha chain variable domain of TCR clone 171643 (TRAV8-2, TRAJ23)
CVVSDDKQGGKLIF

SEQ ID NO: 343286 - protein, 13 aa, Homo sapiens
  CDR3 for beta chain variable domain of TCR clone 171643 (TRBV7-7, TRBJ2-2)
CASSLTSAGELFF

SEQ ID NO: 343287 - protein, 14 aa, Homo sapiens
  CDR3 for alpha chain variable domain of TCR clone 171644 (TRAV2, TRAJ9)
CAVDPNTGGFKTIF

SEQ ID NO: 343288 - protein, 14 aa, Homo sapiens
  CDR3 for beta chain variable domain of TCR clone 171644 (TRBV18, TRBJ2-7)
CASSPRGGAYEQYF

SEQ ID NO: 343289 - protein, 14 aa, Homo sapiens
  CDR3 for alpha chain variable domain of TCR clone 171645 (TRAV12-3, TRAJ10)
SHLPLTGGGNKLTF

SEQ ID NO: 343290 - protein, 15 aa, Homo sapiens
  CDR3 for beta chain variable domain of TCR clone 171645 (TRBV9, TRBJ1-6)
CSSSAAGTGDSPLHF

SEQ ID NO: 343291 - protein, 12 aa, Homo sapiens
  CDR3 for alpha chain variable domain of TCR clone 171646 (TRAV13-1, TRAJ9)
CASHTGGFKTIF

SEQ ID NO: 343292 - protein, 18 aa, Homo sapiens
  CDR3 for beta chain variable domain of TCR clone 171646 (TRBV11-2, TRBJ2-3)
GASSLGGASRGAPNTQYF

SEQ ID NO: 343293 - protein, 12 aa, Homo sapiens
  CDR3 for alpha chain variable domain of TCR clone 171647 (TRAV3, TRAJ20)
CAVRDGDYKLSF

SEQ ID NO: 343294 - protein, 13 aa, Homo sapiens
  CDR3 for beta chain variable domain of TCR clone 171647 (TRBV28, TRBJ1-1)
CASSKQGWTEAFF

SEQ ID NO: 343295 - protein, 18 aa, Homo sapiens
  CDR3 for alpha chain variable domain of TCR clone 171648 (TRAV21, TRAJ52)
CAVMPSPAGGTSYGKLTF

SEQ ID NO: 343296 - protein, 17 aa, Homo sapiens
  CDR3 for beta chain variable domain of TCR clone 171648 (TRBV4-1, TRBJ1-4)
CASSQEGPRGVEEKLFF

SEQ ID NO: 343297 - protein, 14 aa, Homo sapiens
  CDR3 for alpha chain variable domain of TCR clone 171649 (TRAV12-3, TRAJ58)
CAMSTETSGSRLTF

SEQ ID NO: 343298 - protein, 14 aa, Homo sapiens
  CDR3 for beta chain variable domain of TCR clone 171649 (TRBV20-1, TRBJ1-3)
CSASPTGAGNTIYF

SEQ ID NO: 343299 - protein, 15 aa, Homo sapiens
  CDR3 for alpha chain variable domain of TCR clone 171650 (TRAV26-1, TRAJ48)
CIARWSWFGNEKLTF

SEQ ID NO: 343300 - protein, 12 aa, Homo sapiens
  CDR3 for beta chain variable domain of TCR clone 171650 (TRBV19, TRBJ2-5)
CASSISDETQYF

SEQ ID NO: 343301 - protein, 14 aa, Homo sapiens
  CDR3 for alpha chain variable domain of TCR clone 171651 (TRAV27, TRAJ13)
CRSSDSGGYQKVTF

SEQ ID NO: 343302 - protein, 17 aa, Homo sapiens
  CDR3 for beta chain variable domain of TCR clone 171651 (TRBV13, TRBJ2-3)
CASSLSRVAGGRNTQYF

SEQ ID NO: 343303 - protein, 15 aa, Homo sapiens
  CDR3 for alpha chain variable domain of TCR clone 171652 (TRAV23/DV6, TRAJ13)
CAAWPGGGGYQKVTF

SEQ ID NO: 343304 - protein, 15 aa, Homo sapiens
  CDR3 for beta chain variable domain of TCR clone 171652 (TRBV10-3, TRBJ2-2)
CAISEGDRAAGELFF

SEQ ID NO: 343305 - protein, 14 aa, Homo sapiens
  CDR3 for alpha chain variable domain of TCR clone 171653 (TRAV2, TRAJ37)
CTVDFTSNTVKLIF

SEQ ID NO: 343306 - protein, 15 aa, Homo sapiens
  CDR3 for beta chain variable domain of TCR clone 171653 (TRBV20-1, TRBJ1-1)
CSASRGVTGNTEDFF

SEQ ID NO: 343307 - protein, 13 aa, Homo sapiens
  CDR3 for alpha chain variable domain of TCR clone 171654 (TRAV13-2, TRAJ16)
CADARTDGQKLPF

SEQ ID NO: 343308 - protein, 19 aa, Homo sapiens
  CDR3 for beta chain variable domain of TCR clone 171654 (TRBV5-5, TRBJ2-5)
CASGIGGGWGDPVLRARHA

SEQ ID NO: 343309 - protein, 15 aa, Homo sapiens
  CDR3 for alpha chain variable domain of TCR clone 171655 (TRAV26-1, TRAJ22)
CIVRVSFWFCKATDL

SEQ ID NO: 343310 - protein, 14 aa, Homo sapiens
  CDR3 for beta chain variable domain of TCR clone 171655 (TRBV7-9, TRBJ1-2)
CASSRQGANYGYTF

SEQ ID NO: 343311 - protein, 16 aa, Homo sapiens
  CDR3 for alpha chain variable domain of TCR clone 171656 (TRAV3, TRAJ10)
CAVRDMRAGGGNKLTI

SEQ ID NO: 343312 - protein, 15 aa, Homo sapiens
  CDR3 for beta chain variable domain of TCR clone 171656 (TRBV11-2, TRBJ1-6)
CASTGFGTAVSPLHF

SEQ ID NO: 343313 - protein, 14 aa, Homo sapiens
  CDR3 for alpha chain variable domain of TCR clone 171657 (TRAV12-2, TRAJ32)
CAHPESGATNKLIF

SEQ ID NO: 343314 - protein, 12 aa, Homo sapiens
  CDR3 for beta chain variable domain of TCR clone 171657 (TRBV27, TRBJ2-2)
CASKLFTGELFF

SEQ ID NO: 343315 - protein, 13 aa, Homo sapiens
  CDR3 for alpha chain variable domain of TCR clone 171658 (TRAV12-3, TRAJ40)
CAMSYSGTYKYIF

SEQ ID NO: 343316 - protein, 14 aa, Homo sapiens
  CDR3 for beta chain variable domain of TCR clone 171658 (TRBV7-2, TRBJ1-5)
CASSTQGAGQPQHF

SEQ ID NO: 343317 - protein, 12 aa, Homo sapiens
  CDR3 for alpha chain variable domain of TCR clone 171659 (TRAV25, TRAJ30)
CAVKNRDDKIIF

SEQ ID NO: 343318 - protein, 11 aa, Homo sapiens
  CDR3 for beta chain variable domain of TCR clone 171659 (TRBV12-4, TRBJ2-7)
CATPEKGEQYF

SEQ ID NO: 343319 - protein, 16 aa, Homo sapiens
  CDR3 for alpha chain variable domain of TCR clone 171660 (TRAV30, TRAJ24)
CGTEIVDAGSWGKFQF

SEQ ID NO: 343320 - protein, 14 aa, Homo sapiens
  CDR3 for beta chain variable domain of TCR clone 171660 (TRBV13, TRBJ2-7)
CASSLKGASYEQYF

SEQ ID NO: 343321 - protein, 12 aa, Homo sapiens
  CDR3 for alpha chain variable domain of TCR clone 171661 (TRAV8-3, TRAJ8)
DAMNTGFQKLVF

SEQ ID NO: 343322 - protein, 13 aa, Homo sapiens
  CDR3 for beta chain variable domain of TCR clone 171661 (TRBV10-2, TRBJ2-3)
CASSESGDHTQYF

SEQ ID NO: 343323 - protein, 13 aa, Homo sapiens
  CDR3 for alpha chain variable domain of TCR clone 171662 (TRAV3, TRAJ20)
CCEAFCTDYKLSF

SEQ ID NO: 343324 - protein, 16 aa, Homo sapiens
  CDR3 for beta chain variable domain of TCR clone 171662 (TRBV12-5, TRBJ2-5)
CASGPRTSRNQETQYF

SEQ ID NO: 343325 - protein, 17 aa, Homo sapiens
  CDR3 for alpha chain variable domain of TCR clone 171663 (TRAV13-1, TRAJ28)
CAASPPYSGAGSHQLTF

SEQ ID NO: 343326 - protein, 12 aa, Homo sapiens
  CDR3 for beta chain variable domain of TCR clone 171663 (TRBV5-1, TRBJ1-2)
CASSQDTYGYTF

SEQ ID NO: 343327 - protein, 14 aa, Homo sapiens
  CDR3 for alpha chain variable domain of TCR clone 171664 (TRAV26-1, TRAJ5)
CIVRVRFNRRALTF

SEQ ID NO: 343328 - protein, 13 aa, Homo sapiens
  CDR3 for beta chain variable domain of TCR clone 171664 (TRBV7-9, TRBJ1-2)
CASSLKPNYGYTF

SEQ ID NO: 343329 - protein, 10 aa, Homo sapiens
  CDR3 for alpha chain variable domain of TCR clone 171665 (TRAV8-4, TRAJ43)
CAVSADDMRF

SEQ ID NO: 343330 - protein, 15 aa, Homo sapiens
  CDR3 for beta chain variable domain of TCR clone 171665 (TRBV5-1, TRBJ2-3)
CASSVSSGSTDTQYF

SEQ ID NO: 343331 - protein, 15 aa, Homo sapiens
  CDR3 for alpha chain variable domain of TCR clone 171666 (TRAV8-1, TRAJ34)
CAGNSRTYNTDKLIF

SEQ ID NO: 343332 - protein, 14 aa, Homo sapiens
  CDR3 for beta chain variable domain of TCR clone 171666 (TRBV11-2, TRBJ2-3)
CASSRLARTDTQYF

SEQ ID NO: 343333 - protein, 18 aa, Homo sapiens
  CDR3 for alpha chain variable domain of TCR clone 171667 (TRAV1-2, TRAJ52)
CAVRPSPAGGTSYGKLTF

SEQ ID NO: 343334 - protein, 17 aa, Homo sapiens
  CDR3 for beta chain variable domain of TCR clone 171667 (TRBV13, TRBJ2-3)
CASSLSRVAGGRNTQYF

SEQ ID NO: 343335 - protein, 14 aa, Homo sapiens
  CDR3 for alpha chain variable domain of TCR clone 171668 (TRAV40, TRAJ41)
CLLGPTNSGYALNF

SEQ ID NO: 343336 - protein, 11 aa, Homo sapiens
  CDR3 for beta chain variable domain of TCR clone 171668 (TRBV19, TRBJ2-7)
CASSILGEQYF

SEQ ID NO: 343337 - protein, 16 aa, Homo sapiens
  CDR3 for alpha chain variable domain of TCR clone 171669 (TRAV3, TRAJ10)
CAVRDMRAGGGNKLTF

SEQ ID NO: 343338 - protein, 14 aa, Homo sapiens
  CDR3 for beta chain variable domain of TCR clone 171669 (TRBV7-9, TRBJ2-2)
CASRPMGYTGELFF

SEQ ID NO: 343339 - protein, 13 aa, Homo sapiens
  CDR3 for alpha chain variable domain of TCR clone 171670 (TRAV20, TRAJ49)
CAVQARAGNQFYF

SEQ ID NO: 343340 - protein, 14 aa, Homo sapiens
  CDR3 for beta chain variable domain of TCR clone 171670 (TRBV5-1, TRBJ1-1)
CASSLQGASTEAFF

SEQ ID NO: 343341 - protein, 13 aa, Homo sapiens
  CDR3 for alpha chain variable domain of TCR clone 171671 (TRAV9-2, TRAJ53)
CALSGGSNYNLTF

SEQ ID NO: 343342 - protein, 17 aa, Homo sapiens
  CDR3 for beta chain variable domain of TCR clone 171671 (TRBV11-2, TRBJ2-1)
CASSLCPPGVEYNEQFF

SEQ ID NO: 343343 - protein, 11 aa, Homo sapiens
  CDR3 for alpha chain variable domain of TCR clone 171672 (TRAV35, TRAJ34)
CWARNTDKLIF

SEQ ID NO: 343344 - protein, 13 aa, Homo sapiens
  CDR3 for beta chain variable domain of TCR clone 171672 (TRBV19, TRBJ2-7)
CASSVDRTYEQYF

SEQ ID NO: 343345 - protein, 14 aa, Homo sapiens
  CDR3 for alpha chain variable domain of TCR clone 171673 (TRAV35, TRAJ22)
CAGLRPGSARQLTF

SEQ ID NO: 343346 - protein, 12 aa, Homo sapiens
  CDR3 for beta chain variable domain of TCR clone 171673 (TRBV7-8, TRBJ2-7)
CASSLGDREQYV

SEQ ID NO: 343347 - protein, 17 aa, Homo sapiens
  CDR3 for alpha chain variable domain of TCR clone 171674 (TRAV26-1, TRAJ58)
CIVRVGAEETSGSRLTF

SEQ ID NO: 343348 - protein, 15 aa, Homo sapiens
  CDR3 for beta chain variable domain of TCR clone 171674 (TRBV7-2, TRBJ2-7)
CASSTPGLTRGEQYF

SEQ ID NO: 343349 - protein, 14 aa, Homo sapiens
  CDR3 for alpha chain variable domain of TCR clone 171675 (TRAV10, TRAJ15)
CVVSASQAGTALIF

SEQ ID NO: 343350 - protein, 13 aa, Homo sapiens
  CDR3 for beta chain variable domain of TCR clone 171675 (TRBV7-2, TRBJ2-7)
CASSSPGSYEQYF

SEQ ID NO: 343351 - protein, 13 aa, Homo sapiens
  CDR3 for alpha chain variable domain of TCR clone 171676 (TRAV12-3, TRAJ33)
CAMSVNSNYQLIW

SEQ ID NO: 343352 - protein, 15 aa, Homo sapiens
  CDR3 for beta chain variable domain of TCR clone 171676 (TRBV11-3, TRBJ2-2)
CASILGGRPTGELFF

SEQ ID NO: 343353 - protein, 18 aa, Homo sapiens
  CDR3 for alpha chain variable domain of TCR clone 171677 (TRAV13-1, TRAJ52)
CAAKNPNAGGTSYGKLTF

SEQ ID NO: 343354 - protein, 15 aa, Homo sapiens
  CDR3 for beta chain variable domain of TCR clone 171677 (TRBV6-1, TRBJ2-3)
CASSERGGITDRQYF

SEQ ID NO: 343355 - protein, 16 aa, Homo sapiens
  CDR3 for alpha chain variable domain of TCR clone 171678 (TRAV14/DV4, TRAJ54)
CAMREGRIQGAQKLVF

SEQ ID NO: 343356 - protein, 13 aa, Homo sapiens
  CDR3 for beta chain variable domain of TCR clone 171678 (TRBV4-1, TRBJ1-1)
CASSRKMNTEAFF

SEQ ID NO: 343357 - protein, 20 aa, Homo sapiens
  CDR3 for alpha chain variable domain of TCR clone 171679 (TRAV12-2, TRAJ52)
SPVIQPPARAGGTSYGKLTF

SEQ ID NO: 343358 - protein, 16 aa, Homo sapiens
  CDR3 for beta chain variable domain of TCR clone 171679 (TRBV15, TRBJ1-2)
CATSRGPSTGGGGYTF

SEQ ID NO: 343359 - protein, 11 aa, Homo sapiens
  CDR3 for alpha chain variable domain of TCR clone 171680 (TRAV21, TRAJ39)
LLVNAGNMLTF

SEQ ID NO: 343360 - protein, 15 aa, Homo sapiens
  CDR3 for beta chain variable domain of TCR clone 171680 (TRBV29-1, TRBJ2-1)
CSGRDRKSSHNEQFF

SEQ ID NO: 343361 - protein, 14 aa, Homo sapiens
  CDR3 for alpha chain variable domain of TCR clone 171681 (TRAV17, TRAJ16)
CATANFSDGQKLLF

SEQ ID NO: 343362 - protein, 12 aa, Homo sapiens
  CDR3 for beta chain variable domain of TCR clone 171681 (TRBV24-1, TRBJ1-1)
CATLYPDTEAFF

SEQ ID NO: 343363 - protein, 13 aa, Homo sapiens
  CDR3 for alpha chain variable domain of TCR clone 171682 (TRAV4, TRAJ33)
CLVGDMNNYQLIW

SEQ ID NO: 343364 - protein, 17 aa, Homo sapiens
  CDR3 for beta chain variable domain of TCR clone 171682 (TRBV5-5, TRBJ1-2)
CASSLGSLDGQSEGYTF

SEQ ID NO: 343365 - protein, 13 aa, Homo sapiens
  CDR3 for alpha chain variable domain of TCR clone 171683 (TRAV14/DV4, TRAJ22)
CAMSDPSARQLTF

SEQ ID NO: 343366 - protein, 18 aa, Homo sapiens
  CDR3 for beta chain variable domain of TCR clone 171683 (TRBV19, TRBJ1-5)
CASSKGQVSIHSNQPQHF

SEQ ID NO: 343367 - protein, 13 aa, Homo sapiens
  CDR3 for alpha chain variable domain of TCR clone 171684 (TRAV12-2, TRAJ9)
CAVLETGGFKAIF

SEQ ID NO: 343368 - protein, 15 aa, Homo sapiens
  CDR3 for beta chain variable domain of TCR clone 171684 (TRBV6-3, TRBJ2-7)
CASSRTGVNLYEQYF

SEQ ID NO: 343369 - protein, 13 aa, Homo sapiens
  CDR3 for alpha chain variable domain of TCR clone 171685 (TRAV17, TRAJ9)
CATFLTGGFKTIF

SEQ ID NO: 343370 - protein, 16 aa, Homo sapiens
  CDR3 for beta chain variable domain of TCR clone 171685 (TRBV5-6, TRBJ1-4)
CASSASGGLKTETLFF

SEQ ID NO: 343371 - protein, 10 aa, Homo sapiens
  CDR3 for alpha chain variable domain of TCR clone 171686 (TRAV17, TRAJ43)
CATGNNDMRF

SEQ ID NO: 343372 - protein, 15 aa, Homo sapiens
  CDR3 for beta chain variable domain of TCR clone 171686 (TRBV5-4, TRBJ2-2)
CASSYGTSVAGELFF

SEQ ID NO: 343373 - protein, 15 aa, Homo sapiens
  CDR3 for alpha chain variable domain of TCR clone 171687 (TRAV8-3, TRAJ27)
CAVGPSKTNAGKSTF

SEQ ID NO: 343374 - protein, 15 aa, Homo sapiens
  CDR3 for beta chain variable domain of TCR clone 171687 (TRBV7-2, TRBJ2-1)
CAGSAGLAGGNEQFF

SEQ ID NO: 343375 - protein, 16 aa, Homo sapiens
  CDR3 for alpha chain variable domain of TCR clone 171688 (TRAV26-1, TRAJ32)
CIVRTNYGGATNKLIF

SEQ ID NO: 343376 - protein, 13 aa, Homo sapiens
  CDR3 for beta chain variable domain of TCR clone 171688 (TRBV7-9, TRBJ1-2)
CASSLKQNYGYTF

SEQ ID NO: 343377 - protein, 18 aa, Homo sapiens
  CDR3 for alpha chain variable domain of TCR clone 171689 (TRAV12-1, )
CVVNNIQNPDPAVYQLRD

SEQ ID NO: 343378 - protein, 16 aa, Homo sapiens
  CDR3 for beta chain variable domain of TCR clone 171689 (TRBV15, TRBJ2-5)
CATSPTTGQGMETQYF

SEQ ID NO: 343379 - protein, 14 aa, Homo sapiens
  CDR3 for alpha chain variable domain of TCR clone 171690 (TRAV12-2, TRAJ13)
CAVKKTGGYQKVTF

SEQ ID NO: 343380 - protein, 13 aa, Homo sapiens
  CDR3 for beta chain variable domain of TCR clone 171690 (TRBV20-1, TRBJ1-1)
CSARGGGNTEAVF

SEQ ID NO: 343381 - protein, 13 aa, Homo sapiens
  CDR3 for alpha chain variable domain of TCR clone 171691 (TRAV13-1, TRAJ21)
CAASIYNFNKFYF

SEQ ID NO: 343382 - protein, 14 aa, Homo sapiens
  CDR3 for beta chain variable domain of TCR clone 171691 (TRBV7-6, TRBJ2-3)
CASSLGTVTDTQYF

SEQ ID NO: 343383 - protein, 15 aa, Homo sapiens
  CDR3 for alpha chain variable domain of TCR clone 171692 (TRAV25, TRAJ10)
CAWPLLTGGGNKLTF

SEQ ID NO: 343384 - protein, 15 aa, Homo sapiens
  CDR3 for beta chain variable domain of TCR clone 171692 (TRBV12-5, TRBJ2-2)
CASGRLGGNTGELFF

SEQ ID NO: 343385 - protein, 14 aa, Homo sapiens
  CDR3 for alpha chain variable domain of TCR clone 171693 (TRAV12-2, TRAJ13)
RAVKQTGGDQKVTF

SEQ ID NO: 343386 - protein, 15 aa, Homo sapiens
  CDR3 for beta chain variable domain of TCR clone 171693 (TRBV27, TRBJ2-1)
CASSNGGGSSNEQFF

SEQ ID NO: 343387 - protein, 14 aa, Homo sapiens
  CDR3 for alpha chain variable domain of TCR clone 171694 (TRAV26-1, TRAJ38)
CIADNAGNNRKLSW

SEQ ID NO: 343388 - protein, 13 aa, Homo sapiens
  CDR3 for beta chain variable domain of TCR clone 171694 (TRBV20-1, TRBJ1-1)
CSARGGENTEAFF

SEQ ID NO: 343389 - protein, 12 aa, Homo sapiens
  CDR3 for alpha chain variable domain of TCR clone 171695 (TRAV29/DV5, TRAJ49)
CAATDTGNQFYF

SEQ ID NO: 343390 - protein, 19 aa, Homo sapiens
  CDR3 for beta chain variable domain of TCR clone 171695 (TRBV25-1, TRBJ2-2)
CPILVYRVDRGRKTGELFF

SEQ ID NO: 343391 - protein, 21 aa, Homo sapiens
  CDR3 for alpha chain variable domain of TCR clone 171696 (TRAV27, TRAJ3)
TAASLVIQASLRGSSASKIIF

SEQ ID NO: 343392 - protein, 14 aa, Homo sapiens
  CDR3 for beta chain variable domain of TCR clone 171696 (TRBV28, TRBJ1-5)
CASSLFPGVQPQHF

SEQ ID NO: 343393 - protein, 11 aa, Homo sapiens
  CDR3 for alpha chain variable domain of TCR clone 171697 (TRAV1-1, TRAJ23)
CAVRQGGKLIF

SEQ ID NO: 343394 - protein, 18 aa, Homo sapiens
  CDR3 for beta chain variable domain of TCR clone 171697 (TRBV6-5, TRBJ1-1)
CASSYSAPGVTGGTEAFF

SEQ ID NO: 343395 - protein, 14 aa, Homo sapiens
  CDR3 for alpha chain variable domain of TCR clone 171698 (TRAV2, TRAJ29)
CAVTPPSGNTPLVF

SEQ ID NO: 343396 - protein, 13 aa, Homo sapiens
  CDR3 for beta chain variable domain of TCR clone 171698 (TRBV11-2, TRBJ2-1)
CASNLGLAGGRFF

SEQ ID NO: 343397 - protein, 14 aa, Homo sapiens
  CDR3 for alpha chain variable domain of TCR clone 171699 (TRAV12-3, TRAJ10)
SHLPLTGGGNKLTF

SEQ ID NO: 343398 - protein, 15 aa, Homo sapiens
  CDR3 for beta chain variable domain of TCR clone 171699 (TRBV7-3, TRBJ2-1)
CTSSPTGGGEVEQFF

SEQ ID NO: 343399 - protein, 11 aa, Homo sapiens
  CDR3 for alpha chain variable domain of TCR clone 171700 (TRAV2, TRAJ13)
CASGGYQKVTF

SEQ ID NO: 343400 - protein, 13 aa, Homo sapiens
  CDR3 for beta chain variable domain of TCR clone 171700 (TRBV20-1, TRBJ1-1)
CSARVGENTEAFF

SEQ ID NO: 343401 - protein, 15 aa, Homo sapiens
  CDR3 for alpha chain variable domain of TCR clone 171701 (TRAV23/DV6, TRAJ30)
CAASSQESRDDKIIF

SEQ ID NO: 343402 - protein, 17 aa, Homo sapiens
  CDR3 for beta chain variable domain of TCR clone 171701 (TRBV4-3, TRBJ2-1)
CASSPISSGRASGEQFF

SEQ ID NO: 343403 - protein, 14 aa, Homo sapiens
  CDR3 for alpha chain variable domain of TCR clone 171702 (TRAV17, TRAJ54)
CATDANQGAQKLVF

SEQ ID NO: 343404 - protein, 13 aa, Homo sapiens
  CDR3 for beta chain variable domain of TCR clone 171702 (TRBV14, TRBJ2-7)
CASSPRRPYEQYF

SEQ ID NO: 343405 - protein, 12 aa, Homo sapiens
  CDR3 for alpha chain variable domain of TCR clone 171703 (TRAV12-3, TRAJ17)
CAMTLTGNKLTF

SEQ ID NO: 343406 - protein, 16 aa, Homo sapiens
  CDR3 for beta chain variable domain of TCR clone 171703 (TRBV29-1, TRBJ2-7)
CSVEDAEDGTACEQYF

SEQ ID NO: 343407 - protein, 17 aa, Homo sapiens
  CDR3 for alpha chain variable domain of TCR clone 171704 (TRAV12-3, TRAJ6)
CAMSARGGAGGSYIPTF

SEQ ID NO: 343408 - protein, 12 aa, Homo sapiens
  CDR3 for beta chain variable domain of TCR clone 171704 (TRBV12-4, TRBJ2-3)
CASSTLPETQYF

SEQ ID NO: 343409 - protein, 13 aa, Homo sapiens
  CDR3 for alpha chain variable domain of TCR clone 171705 (TRAV3, TRAJ20)
CCVAFCNDYKLSF

SEQ ID NO: 343410 - protein, 16 aa, Homo sapiens
  CDR3 for beta chain variable domain of TCR clone 171705 (TRBV12-5, TRBJ2-5)
CASGPRTSGNQETQYF

SEQ ID NO: 343411 - protein, 12 aa, Homo sapiens
  CDR3 for alpha chain variable domain of TCR clone 171706 (TRAV13-1, TRAJ15)
CAASQAGTALIF

SEQ ID NO: 343412 - protein, 14 aa, Homo sapiens
  CDR3 for beta chain variable domain of TCR clone 171706 (TRBV5-4, TRBJ2-1)
CASSLDQGLNEQFF

SEQ ID NO: 343413 - protein, 14 aa, Homo sapiens
  CDR3 for alpha chain variable domain of TCR clone 171707 (TRAV1-2, TRAJ16)
CAVNRFSDGQNLLF

SEQ ID NO: 343414 - protein, 14 aa, Homo sapiens
  CDR3 for beta chain variable domain of TCR clone 171707 (TRBV7-2, TRBJ1-1)
CASSFLTGTTEAFF

SEQ ID NO: 343415 - protein, 23 aa, Homo sapiens
  CDR3 for alpha chain variable domain of TCR clone 171708 (TRAV26-1, )
CIADSAGNNHIQNPDPAVYQLRD

SEQ ID NO: 343416 - protein, 16 aa, Homo sapiens
  CDR3 for beta chain variable domain of TCR clone 171708 (TRBV19, TRBJ2-3)
CASSPGAASRTDTQYF

SEQ ID NO: 343417 - protein, 15 aa, Homo sapiens
  CDR3 for alpha chain variable domain of TCR clone 171709 (TRAV21, TRAJ13)
CALRPTSGGYQKVTF

SEQ ID NO: 343418 - protein, 18 aa, Homo sapiens
  CDR3 for beta chain variable domain of TCR clone 171709 (TRBV11-3, TRBJ2-1)
CASSSYPGGRDSYNEQFF

SEQ ID NO: 343419 - protein, 11 aa, Homo sapiens
  CDR3 for alpha chain variable domain of TCR clone 171710 (TRAV1-2, TRAJ20)
CAVANDYKLSF

SEQ ID NO: 343420 - protein, 13 aa, Homo sapiens
  CDR3 for beta chain variable domain of TCR clone 171710 (TRBV7-3, TRBJ1-1)
CASSRDWGAEAFF

SEQ ID NO: 343421 - protein, 14 aa, Homo sapiens
  CDR3 for alpha chain variable domain of TCR clone 171711 (TRAV12-2, TRAJ13)
CAVKKTWGYQKATF

SEQ ID NO: 343422 - protein, 15 aa, Homo sapiens
  CDR3 for beta chain variable domain of TCR clone 171711 (TRBV27, TRBJ2-1)
CASSNGGGSSNEQFF

SEQ ID NO: 343423 - protein, 15 aa, Homo sapiens
  CDR3 for alpha chain variable domain of TCR clone 171712 (TRAV13-1, TRAJ50)
CAASISGTSYDKVIF

SEQ ID NO: 343424 - protein, 12 aa, Homo sapiens
  CDR3 for beta chain variable domain of TCR clone 171712 (TRBV11-2, TRBJ2-2)
CASSLGGGELFF

SEQ ID NO: 343425 - protein, 12 aa, Homo sapiens
  CDR3 for alpha chain variable domain of TCR clone 171713 (TRAV1-1, TRAJ15)
CAVGQAGTALIF

SEQ ID NO: 343426 - protein, 13 aa, Homo sapiens
  CDR3 for beta chain variable domain of TCR clone 171713 (TRBV27, TRBJ1-4)
CASSLMGDEKLFF

SEQ ID NO: 343427 - protein, 17 aa, Homo sapiens
  CDR3 for alpha chain variable domain of TCR clone 171714 (TRAV36/DV7, TRAJ52)
CAVAQRAGGTSYGKLTF

SEQ ID NO: 343428 - protein, 16 aa, Homo sapiens
  CDR3 for beta chain variable domain of TCR clone 171714 (TRBV7-9, TRBJ1-2)
CASSLGFSSGEDGYTF

SEQ ID NO: 343429 - protein, 16 aa, Homo sapiens
  CDR3 for alpha chain variable domain of TCR clone 171715 (TRAV8-2, TRAJ7)
CVVSEGPYYGNNRLAF

SEQ ID NO: 343430 - protein, 15 aa, Homo sapiens
  CDR3 for beta chain variable domain of TCR clone 171715 (TRBV27, TRBJ2-3)
CASSWGLAATDTQYF

SEQ ID NO: 343431 - protein, 16 aa, Homo sapiens
  CDR3 for alpha chain variable domain of TCR clone 171716 (TRAV3, TRAJ21)
CAVRDRSASTNFTLDL

SEQ ID NO: 343432 - protein, 12 aa, Homo sapiens
  CDR3 for beta chain variable domain of TCR clone 171716 (TRBV5-5, TRBJ2-5)
CASSYFGETQYF

SEQ ID NO: 343433 - protein, 11 aa, Homo sapiens
  CDR3 for alpha chain variable domain of TCR clone 171717 (TRAV3, TRAJ21)
CAVGHFNKFYF

SEQ ID NO: 343434 - protein, 18 aa, Homo sapiens
  CDR3 for beta chain variable domain of TCR clone 171717 (TRBV12-4, TRBJ2-2)
CASSLVAGTRGRTGELFF

SEQ ID NO: 343435 - protein, 13 aa, Homo sapiens
  CDR3 for alpha chain variable domain of TCR clone 171718 (TRAV21, TRAJ27)
CAARPGNAGKSTF

SEQ ID NO: 343436 - protein, 14 aa, Homo sapiens
  CDR3 for beta chain variable domain of TCR clone 171718 (TRBV7-6, TRBJ2-3)
CASSLGTVTGTHYF

SEQ ID NO: 343437 - protein, 14 aa, Homo sapiens
  CDR3 for alpha chain variable domain of TCR clone 171719 (TRAV38-2/DV8, TRAJ30)
CAYRSADRDDKIIF

SEQ ID NO: 343438 - protein, 16 aa, Homo sapiens
  CDR3 for beta chain variable domain of TCR clone 171719 (TRBV15, TRBJ1-3)
CATSSPIGFSGNTKYF

SEQ ID NO: 343439 - protein, 14 aa, Homo sapiens
  CDR3 for alpha chain variable domain of TCR clone 171720 (TRAV12-2, TRAJ13)
CAVKKTGGYQKVTF

SEQ ID NO: 343440 - protein, 14 aa, Homo sapiens
  CDR3 for beta chain variable domain of TCR clone 171720 (TRBV13, TRBJ1-1)
CASTVITVNTEAFF

SEQ ID NO: 343441 - protein, 16 aa, Homo sapiens
  CDR3 for alpha chain variable domain of TCR clone 171721 (TRAV12-1, TRAJ4)
CLVNPGISGGYNKLIF

SEQ ID NO: 343442 - protein, 13 aa, Homo sapiens
  CDR3 for beta chain variable domain of TCR clone 171721 (TRBV5-7, TRBJ2-3)
CQPTSGGTDTQYF

SEQ ID NO: 343443 - protein, 13 aa, Homo sapiens
  CDR3 for alpha chain variable domain of TCR clone 171722 (TRAV1-2, TRAJ9)
CAVLNTGGFKTIF

SEQ ID NO: 343444 - protein, 15 aa, Homo sapiens
  CDR3 for beta chain variable domain of TCR clone 171722 (TRBV7-2, TRBJ2-7)
CASSTPGLTRGEQYF

SEQ ID NO: 343445 - protein, 14 aa, Homo sapiens
  CDR3 for alpha chain variable domain of TCR clone 171723 (TRAV38-1, TRAJ29)
CAFITPSGNTPLVF

SEQ ID NO: 343446 - protein, 15 aa, Homo sapiens
  CDR3 for beta chain variable domain of TCR clone 171723 (TRBV11-3, TRBJ2-2)
CASSLGGRPTGELFF

SEQ ID NO: 343447 - protein, 14 aa, Homo sapiens
  CDR3 for alpha chain variable domain of TCR clone 171724 (TRAV23/DV6, TRAJ37)
CAASTSSNTGKLIF

SEQ ID NO: 343448 - protein, 15 aa, Homo sapiens
  CDR3 for beta chain variable domain of TCR clone 171724 (TRBV7-9, TRBJ2-7)
CATSPGGGLTYEQYF

SEQ ID NO: 343449 - protein, 22 aa, Homo sapiens
  CDR3 for alpha chain variable domain of TCR clone 171725 (TRAV13-1, TRAJ35)
CAASKGGFGNVLHCVSGPQVIV

SEQ ID NO: 343450 - protein, 13 aa, Homo sapiens
  CDR3 for beta chain variable domain of TCR clone 171725 (TRBV7-3, TRBJ1-1)
CASSQDWGAEAFF

SEQ ID NO: 343451 - protein, 15 aa, Homo sapiens
  CDR3 for alpha chain variable domain of TCR clone 171726 (TRAV8-3, TRAJ11)
CAVGLLNSGYSTLTF

SEQ ID NO: 343452 - protein, 16 aa, Homo sapiens
  CDR3 for beta chain variable domain of TCR clone 171726 (TRBV7-9, TRBJ1-2)
CASTLGFSSGEDGYTF

SEQ ID NO: 343453 - protein, 23 aa, Homo sapiens
  CDR3 for alpha chain variable domain of TCR clone 171727 (TRAV30, TRAJ43)
CTLRPPSPVTKEPTSAALSDMRF

SEQ ID NO: 343454 - protein, 13 aa, Homo sapiens
  CDR3 for beta chain variable domain of TCR clone 171727 (TRBV12-4, TRBJ2-2)
CASSITGSGELFF

SEQ ID NO: 343455 - protein, 13 aa, Homo sapiens
  CDR3 for alpha chain variable domain of TCR clone 171728 (TRAV3, TRAJ15)
CAVRVQAGTALIF

SEQ ID NO: 343456 - protein, 15 aa, Homo sapiens
  CDR3 for beta chain variable domain of TCR clone 171728 (TRBV11-1, TRBJ2-7)
CASSLNYGASYEQYF

SEQ ID NO: 343457 - protein, 14 aa, Homo sapiens
  CDR3 for alpha chain variable domain of TCR clone 171729 (TRAV35, TRAJ13)
CAGRSPGGYQNVTF

SEQ ID NO: 343458 - protein, 14 aa, Homo sapiens
  CDR3 for beta chain variable domain of TCR clone 171729 (TRBV19, TRBJ2-2)
CASSMVGLSGELFF

SEQ ID NO: 343459 - protein, 14 aa, Homo sapiens
  CDR3 for alpha chain variable domain of TCR clone 171730 (TRAV12-2, TRAJ13)
CAVKKTGGYQKVTF

SEQ ID NO: 343460 - protein, 14 aa, Homo sapiens
  CDR3 for beta chain variable domain of TCR clone 171730 (TRBV7-9, TRBJ2-5)
CASSRWAVSETQYF

SEQ ID NO: 343461 - protein, 14 aa, Homo sapiens
  CDR3 for alpha chain variable domain of TCR clone 171731 (TRAV13-1, TRAJ31)
CAASSRPYNARLMF

SEQ ID NO: 343462 - protein, 15 aa, Homo sapiens
  CDR3 for beta chain variable domain of TCR clone 171731 (TRBV4-2, TRBJ2-4)
CASSPLGAAKNIQYF

SEQ ID NO: 343463 - protein, 13 aa, Homo sapiens
  CDR3 for alpha chain variable domain of TCR clone 171732 (TRAV30, TRAJ16)
CGTFGGDGQKLLF

SEQ ID NO: 343464 - protein, 13 aa, Homo sapiens
  CDR3 for beta chain variable domain of TCR clone 171732 (TRBV7-2, TRBJ2-7)
CASSSPSGSEQYF

SEQ ID NO: 343465 - protein, 15 aa, Homo sapiens
  CDR3 for alpha chain variable domain of TCR clone 171733 (TRAV16, TRAJ4)
CALEDPSGGYDKLIF

SEQ ID NO: 343466 - protein, 13 aa, Homo sapiens
  CDR3 for beta chain variable domain of TCR clone 171733 (TRBV7-3, TRBJ2-7)
CASSQAGGYEQYF

SEQ ID NO: 343467 - protein, 11 aa, Homo sapiens
  CDR3 for alpha chain variable domain of TCR clone 171734 (TRAV1-1, TRAJ23)
CAVRPGGTLIF

SEQ ID NO: 343468 - protein, 20 aa, Homo sapiens
  CDR3 for beta chain variable domain of TCR clone 171734 (TRBV7-8, TRBJ2-2)
CASSHLFPGPTIHITGELFF

SEQ ID NO: 343469 - protein, 13 aa, Homo sapiens
  CDR3 for alpha chain variable domain of TCR clone 171735 (TRAV8-3, TRAJ43)
CAVVPYNNNDMRF

SEQ ID NO: 343470 - protein, 16 aa, Homo sapiens
  CDR3 for beta chain variable domain of TCR clone 171735 (TRBV7-3, TRBJ2-2)
CASSLKRGTLSGELFF

SEQ ID NO: 343471 - protein, 12 aa, Homo sapiens
  CDR3 for alpha chain variable domain of TCR clone 171736 (TRAV13-1, TRAJ21)
CAAKEGCNKFYF

SEQ ID NO: 343472 - protein, 13 aa, Homo sapiens
  CDR3 for beta chain variable domain of TCR clone 171736 (TRBV7-9, TRBJ2-1)
CASSLGTVNEQFF

SEQ ID NO: 343473 - protein, 15 aa, Homo sapiens
  CDR3 for alpha chain variable domain of TCR clone 171737 (TRAV26-1, TRAJ44)
CIVRANTGTASKLTF

SEQ ID NO: 343474 - protein, 15 aa, Homo sapiens
  CDR3 for beta chain variable domain of TCR clone 171737 (TRBV15, TRBJ1-5)
CATSREQGGKQPQHF

SEQ ID NO: 343475 - protein, 18 aa, Homo sapiens
  CDR3 for alpha chain variable domain of TCR clone 171738 (TRAV21, TRAJ52)
CAVRPSPAGGTRYGKLTF

SEQ ID NO: 343476 - protein, 17 aa, Homo sapiens
  CDR3 for beta chain variable domain of TCR clone 171738 (TRBV13, TRBJ2-3)
CASSLSRVAGGGNTQYF

SEQ ID NO: 343477 - protein, 13 aa, Homo sapiens
  CDR3 for alpha chain variable domain of TCR clone 171739 (TRAV8-1, TRAJ13)
CAVSKGGYQKVTL

SEQ ID NO: 343478 - protein, 18 aa, Homo sapiens
  CDR3 for beta chain variable domain of TCR clone 171739 (TRBV11-2, TRBJ2-7)
CARSWRTVQTGQSYEQYF

SEQ ID NO: 343479 - protein, 12 aa, Homo sapiens
  CDR3 for alpha chain variable domain of TCR clone 171740 (TRAV16, TRAJ49)
CALNEGGNQFSF

SEQ ID NO: 343480 - protein, 14 aa, Homo sapiens
  CDR3 for beta chain variable domain of TCR clone 171740 (TRBV7-9, TRBJ2-1)
CASRPTGLRNEQFF

SEQ ID NO: 343481 - protein, 15 aa, Homo sapiens
  CDR3 for alpha chain variable domain of TCR clone 171741 (TRAV4, TRAJ36)
CLVGDRQTGANNLFV

SEQ ID NO: 343482 - protein, 15 aa, Homo sapiens
  CDR3 for beta chain variable domain of TCR clone 171741 (TRBV7-6, TRBJ2-1)
CASSSLAGEGNEQFF

SEQ ID NO: 343483 - protein, 14 aa, Homo sapiens
  CDR3 for alpha chain variable domain of TCR clone 171742 (TRAV16, TRAJ17)
CALSEGAAGNKLTF

SEQ ID NO: 343484 - protein, 18 aa, Homo sapiens
  CDR3 for beta chain variable domain of TCR clone 171742 (TRBV6-6, TRBJ1-3)
CASSYSKWDSISGNTIYF

SEQ ID NO: 343485 - protein, 11 aa, Homo sapiens
  CDR3 for alpha chain variable domain of TCR clone 171743 (TRAV29/DV5, TRAJ49)
CAAVPGNQFYF

SEQ ID NO: 343486 - protein, 16 aa, Homo sapiens
  CDR3 for beta chain variable domain of TCR clone 171743 (TRBV12-4, TRBJ1-5)
CASSRPVGGSNQPQHF

SEQ ID NO: 343487 - protein, 15 aa, Homo sapiens
  CDR3 for alpha chain variable domain of TCR clone 171744 (TRAV35, TRAJ58)
CAGRRQETSGSRLTF

SEQ ID NO: 343488 - protein, 17 aa, Homo sapiens
  CDR3 for beta chain variable domain of TCR clone 171744 (TRBV7-9, TRBJ1-4)
CASSSGQLGGRSEKLFF

SEQ ID NO: 343489 - protein, 16 aa, Homo sapiens
  CDR3 for alpha chain variable domain of TCR clone 171745 (TRAV20, TRAJ52)
CAVLPDGGTSYGKLTF

SEQ ID NO: 343490 - protein, 12 aa, Homo sapiens
  CDR3 for beta chain variable domain of TCR clone 171745 (TRBV19, TRBJ2-1)
CASSQISNVQFF

SEQ ID NO: 343491 - protein, 15 aa, Homo sapiens
  CDR3 for alpha chain variable domain of TCR clone 171746 (TRAV12-3, TRAJ49)
CAMAVTANTGNQFYF

SEQ ID NO: 343492 - protein, 18 aa, Homo sapiens
  CDR3 for beta chain variable domain of TCR clone 171746 (TRBV4-1, TRBJ1-5)
CASSQDPRGQGLNQPQHF

SEQ ID NO: 343493 - protein, 15 aa, Homo sapiens
  CDR3 for alpha chain variable domain of TCR clone 171747 (TRAV20, TRAJ53)
CAVQASGGSNYQLTL

SEQ ID NO: 343494 - protein, 12 aa, Homo sapiens
  CDR3 for beta chain variable domain of TCR clone 171747 (TRBV7-8, TRBJ2-7)
CASSLGDREQYF

SEQ ID NO: 343495 - protein, 22 aa, Homo sapiens
  CDR3 for alpha chain variable domain of TCR clone 171748 (TRAV27, )
CAARRNASNNHIQNPDPAVYQL

SEQ ID NO: 343496 - protein, 13 aa, Homo sapiens
  CDR3 for beta chain variable domain of TCR clone 171748 (TRBV12-5, TRBJ2-3)
CASGDRQSDTQYF

SEQ ID NO: 343497 - protein, 18 aa, Homo sapiens
  CDR3 for alpha chain variable domain of TCR clone 171749 (TRAV21, TRAJ52)
CSVRPSPAGVTSYGKLTF

SEQ ID NO: 343498 - protein, 17 aa, Homo sapiens
  CDR3 for beta chain variable domain of TCR clone 171749 (TRBV13, TRBJ2-3)
CASSLSRVAGGRNTQYF

SEQ ID NO: 343499 - protein, 11 aa, Homo sapiens
  CDR3 for alpha chain variable domain of TCR clone 171750 (TRAV13-1, TRAJ52)
PGGTSYGKLTF

SEQ ID NO: 343500 - protein, 16 aa, Homo sapiens
  CDR3 for beta chain variable domain of TCR clone 171750 (TRBV28, TRBJ2-7)
CASSAWVATGDLSQYF

SEQ ID NO: 343501 - protein, 16 aa, Homo sapiens
  CDR3 for alpha chain variable domain of TCR clone 171751 (TRAV38-2/DV8, TRAJ45)
CAFRGNSGGGADGLTF

SEQ ID NO: 343502 - protein, 17 aa, Homo sapiens
  CDR3 for beta chain variable domain of TCR clone 171751 (TRBV5-1, TRBJ2-7)
FAPAADNPGQIPYEQYF

SEQ ID NO: 343503 - protein, 18 aa, Homo sapiens
  CDR3 for alpha chain variable domain of TCR clone 171752 (TRAV21, TRAJ52)
CAVRPSPAGGTSYGKVTF

SEQ ID NO: 343504 - protein, 17 aa, Homo sapiens
  CDR3 for beta chain variable domain of TCR clone 171752 (TRBV13, TRBJ2-3)
CASSLSRIAGGRNTQYF

SEQ ID NO: 343505 - protein, 18 aa, Homo sapiens
  CDR3 for alpha chain variable domain of TCR clone 171753 (TRAV12-3, TRAJ52)
CAMSAGGAGGTSYGKLTF

SEQ ID NO: 343506 - protein, 15 aa, Homo sapiens
  CDR3 for beta chain variable domain of TCR clone 171753 (TRBV2, TRBJ2-2)
CASSRETVGTGELFF

SEQ ID NO: 343507 - protein, 12 aa, Homo sapiens
  CDR3 for alpha chain variable domain of TCR clone 171754 (TRAV12-3, TRAJ42)
CAPGGSQGNLIF

SEQ ID NO: 343508 - protein, 12 aa, Homo sapiens
  CDR3 for beta chain variable domain of TCR clone 171754 (TRBV11-2, TRBJ2-2)
CASSLGGGELFF

SEQ ID NO: 343509 - protein, 12 aa, Homo sapiens
  CDR3 for alpha chain variable domain of TCR clone 171755 (TRAV8-3, TRAJ26)
CAGDNYGQNFVF

SEQ ID NO: 343510 - protein, 15 aa, Homo sapiens
  CDR3 for beta chain variable domain of TCR clone 171755 (TRBV9, TRBJ2-1)
CASSLAGSAYKEQFF

SEQ ID NO: 343511 - protein, 14 aa, Homo sapiens
  CDR3 for alpha chain variable domain of TCR clone 171756 (TRAV21, TRAJ15)
CAVSLNQAGTALNF

SEQ ID NO: 343512 - protein, 11 aa, Homo sapiens
  CDR3 for beta chain variable domain of TCR clone 171756 (TRBV20-1, TRBJ2-7)
CSARTSYEQYF

SEQ ID NO: 343513 - protein, 13 aa, Homo sapiens
  CDR3 for alpha chain variable domain of TCR clone 171757 (TRAV35, TRAJ36)
CAGPRIGANNPFF

SEQ ID NO: 343514 - protein, 15 aa, Homo sapiens
  CDR3 for beta chain variable domain of TCR clone 171757 (TRBV28, TRBJ2-5)
CASSPPWSYQEAQYF

SEQ ID NO: 343515 - protein, 16 aa, Homo sapiens
  CDR3 for alpha chain variable domain of TCR clone 171758 (TRAV21, TRAJ52)
CAVTNAGGTNYGKLTF

SEQ ID NO: 343516 - protein, 12 aa, Homo sapiens
  CDR3 for beta chain variable domain of TCR clone 171758 (TRBV20-1, TRBJ2-3)
HARLAGTDTQYF

SEQ ID NO: 343517 - protein, 12 aa, Homo sapiens
  CDR3 for alpha chain variable domain of TCR clone 171759 (TRAV13-1, TRAJ5)
CAAKAGRRALTF

SEQ ID NO: 343518 - protein, 13 aa, Homo sapiens
  CDR3 for beta chain variable domain of TCR clone 171759 (TRBV7-9, TRBJ1-2)
CASSLKQNYGYTV

SEQ ID NO: 343519 - protein, 14 aa, Homo sapiens
  CDR3 for alpha chain variable domain of TCR clone 171760 (TRAV13-1, TRAJ45)
HSLYSGGGADGLTF

SEQ ID NO: 343520 - protein, 12 aa, Homo sapiens
  CDR3 for beta chain variable domain of TCR clone 171760 (TRBV24-1, TRBJ1-1)
CATLYPDTEAFF

SEQ ID NO: 343521 - protein, 15 aa, Homo sapiens
  CDR3 for alpha chain variable domain of TCR clone 171761 (TRAV1-2, TRAJ12)
CAVIPAVDSSYKLIF

SEQ ID NO: 343522 - protein, 12 aa, Homo sapiens
  CDR3 for beta chain variable domain of TCR clone 171761 (TRBV20-1, TRBJ1-2)
CSASHPSGGYTF

SEQ ID NO: 343523 - protein, 17 aa, Homo sapiens
  CDR3 for alpha chain variable domain of TCR clone 171762 (TRAV3, TRAJ6)
CAVRDGPRAGGSYLPTF

SEQ ID NO: 343524 - protein, 15 aa, Homo sapiens
  CDR3 for beta chain variable domain of TCR clone 171762 (TRBV20-1, TRBJ1-1)
CSASWDRFLNTEAFF

SEQ ID NO: 343525 - protein, 12 aa, Homo sapiens
  CDR3 for alpha chain variable domain of TCR clone 171763 (TRAV13-2, TRAJ23)
CSERHRGGKLIF

SEQ ID NO: 343526 - protein, 14 aa, Homo sapiens
  CDR3 for beta chain variable domain of TCR clone 171763 (TRBV6-1, TRBJ1-3)
CASVQGGGGNTIYF

SEQ ID NO: 343527 - protein, 10 aa, Homo sapiens
  CDR3 for alpha chain variable domain of TCR clone 171764 (TRAV36/DV7, TRAJ38)
CAANNLKLIW

SEQ ID NO: 343528 - protein, 15 aa, Homo sapiens
  CDR3 for beta chain variable domain of TCR clone 171764 (TRBV20-1, TRBJ2-7)
CSARDRVSGMDEQYF

SEQ ID NO: 343529 - protein, 12 aa, Homo sapiens
  CDR3 for alpha chain variable domain of TCR clone 171765 (TRAV3, TRAJ43)
CAVRDPNNDMRI

SEQ ID NO: 343530 - protein, 15 aa, Homo sapiens
  CDR3 for beta chain variable domain of TCR clone 171765 (TRBV27, TRBJ1-5)
CASSLGTGFGQPQHF

SEQ ID NO: 343531 - protein, 11 aa, Homo sapiens
  CDR3 for alpha chain variable domain of TCR clone 171766 (TRAV17, TRAJ43)
CVTPRSNDMRF

SEQ ID NO: 343532 - protein, 15 aa, Homo sapiens
  CDR3 for beta chain variable domain of TCR clone 171766 (TRBV11-2, TRBJ2-1)
CASSLGTSGLNEQFF

SEQ ID NO: 343533 - protein, 15 aa, Homo sapiens
  CDR3 for alpha chain variable domain of TCR clone 171767 (TRAV17, TRAJ57)
CATGPSQGGSDKLVF

SEQ ID NO: 343534 - protein, 13 aa, Homo sapiens
  CDR3 for beta chain variable domain of TCR clone 171767 (TRBV27, TRBJ1-4)
CASSLMGDEKLFF

SEQ ID NO: 343535 - protein, 15 aa, Homo sapiens
  CDR3 for alpha chain variable domain of TCR clone 171768 (TRAV3, TRAJ5)
CAVRDLGTGRRALPF

SEQ ID NO: 343536 - protein, 13 aa, Homo sapiens
  CDR3 for beta chain variable domain of TCR clone 171768 (TRBV12-4, TRBJ2-7)
CASSPTETYEQYF

SEQ ID NO: 343537 - protein, 15 aa, Homo sapiens
  CDR3 for alpha chain variable domain of TCR clone 171769 (TRAV20, TRAJ28)
CAVQYSLAGSYQLTF

SEQ ID NO: 343538 - protein, 12 aa, Homo sapiens
  CDR3 for beta chain variable domain of TCR clone 171769 (TRBV12-4, TRBJ1-3)
CASRASGNTIYF

SEQ ID NO: 343539 - protein, 15 aa, Homo sapiens
  CDR3 for alpha chain variable domain of TCR clone 171770 (TRAV21, TRAJ53)
CATLNSGSSNYKLTF

SEQ ID NO: 343540 - protein, 13 aa, Homo sapiens
  CDR3 for beta chain variable domain of TCR clone 171770 (TRBV7-9, TRBJ2-3)
CASSPGSTDTQYF

SEQ ID NO: 343541 - protein, 11 aa, Homo sapiens
  CDR3 for alpha chain variable domain of TCR clone 171771 (TRAV16, TRAJ31)
CALFNNARLMI

SEQ ID NO: 343542 - protein, 15 aa, Homo sapiens
  CDR3 for beta chain variable domain of TCR clone 171771 (TRBV7-3, TRBJ2-1)
CASSPTGGGEVEQFF

SEQ ID NO: 343543 - protein, 16 aa, Homo sapiens
  CDR3 for alpha chain variable domain of TCR clone 171772 (TRAV3, TRAJ37)
CAVRGKGSGNTGKLIL

SEQ ID NO: 343544 - protein, 21 aa, Homo sapiens
  CDR3 for beta chain variable domain of TCR clone 171772 (TRBV15, TRBJ2-1)
AWGTQPCTCVPPAEVDTARFF

SEQ ID NO: 343545 - protein, 12 aa, Homo sapiens
  CDR3 for alpha chain variable domain of TCR clone 171773 (TRAV21, TRAJ11)
CAATSGYSTLTF

SEQ ID NO: 343546 - protein, 13 aa, Homo sapiens
  CDR3 for beta chain variable domain of TCR clone 171773 (TRBV7-3, TRBJ2-5)
CASSVRGGETQYF

SEQ ID NO: 343547 - protein, 13 aa, Homo sapiens
  CDR3 for alpha chain variable domain of TCR clone 171774 (TRAV3, TRAJ27)
CAVRPLGAGKSTF

SEQ ID NO: 343548 - protein, 13 aa, Homo sapiens
  CDR3 for beta chain variable domain of TCR clone 171774 (TRBV4-1, TRBJ2-1)
CASSQAGGDEQFF

SEQ ID NO: 343549 - protein, 15 aa, Homo sapiens
  CDR3 for alpha chain variable domain of TCR clone 171775 (TRAV3, TRAJ13)
CAVRVYSGGYQNVTF

SEQ ID NO: 343550 - protein, 15 aa, Homo sapiens
  CDR3 for beta chain variable domain of TCR clone 171775 (TRBV5-7, TRBJ1-2)
CASSLGVAANYGYTF

SEQ ID NO: 343551 - protein, 14 aa, Homo sapiens
  CDR3 for alpha chain variable domain of TCR clone 171776 (TRAV23/DV6, TRAJ36)
CAASLQTGANNLFF

SEQ ID NO: 343552 - protein, 14 aa, Homo sapiens
  CDR3 for beta chain variable domain of TCR clone 171776 (TRBV7-2, TRBJ2-7)
CASSLPPGQGPQYF

SEQ ID NO: 343553 - protein, 13 aa, Homo sapiens
  CDR3 for alpha chain variable domain of TCR clone 171777 (TRAV26-2, TRAJ57)
CILSRGGSDKLVF

SEQ ID NO: 343554 - protein, 16 aa, Homo sapiens
  CDR3 for beta chain variable domain of TCR clone 171777 (TRBV18, TRBJ1-5)
CASSPRTGGGNQPQHF

SEQ ID NO: 343555 - protein, 13 aa, Homo sapiens
  CDR3 for alpha chain variable domain of TCR clone 171778 (TRAV13-1, TRAJ5)
CAVRVTGRRALTF

SEQ ID NO: 343556 - protein, 15 aa, Homo sapiens
  CDR3 for beta chain variable domain of TCR clone 171778 (TRBV7-9, TRBJ2-7)
CASSPGGGLTYEQYF

SEQ ID NO: 343557 - protein, 13 aa, Homo sapiens
  CDR3 for alpha chain variable domain of TCR clone 171779 (TRAV21, TRAJ37)
CAVGSGNTGKLIF

SEQ ID NO: 343558 - protein, 17 aa, Homo sapiens
  CDR3 for beta chain variable domain of TCR clone 171779 (TRBV5-1, TRBJ2-5)
CASSRLGLAASQETQYF

SEQ ID NO: 343559 - protein, 14 aa, Homo sapiens
  CDR3 for alpha chain variable domain of TCR clone 171780 (TRAV17, TRAJ34)
CATDSLEGTDKLIF

SEQ ID NO: 343560 - protein, 17 aa, Homo sapiens
  CDR3 for beta chain variable domain of TCR clone 171780 (TRBV20-1, TRBJ2-1)
CSARDPLAGVWDNEQFI

SEQ ID NO: 343561 - protein, 16 aa, Homo sapiens
  CDR3 for alpha chain variable domain of TCR clone 171781 (TRAV12-3, TRAJ53)
CAMSPGSGGSNYKLTF

SEQ ID NO: 343562 - protein, 13 aa, Homo sapiens
  CDR3 for beta chain variable domain of TCR clone 171781 (TRBV12-4, TRBJ1-5)
CASSPRQYQPQHF

SEQ ID NO: 343563 - protein, 12 aa, Homo sapiens
  CDR3 for alpha chain variable domain of TCR clone 171782 (TRAV12-3, TRAJ17)
CAMTLTGNKLTF

SEQ ID NO: 343564 - protein, 15 aa, Homo sapiens
  CDR3 for beta chain variable domain of TCR clone 171782 (TRBV7-9, TRBJ1-1)
CASSPELGGGTEAFF

SEQ ID NO: 343565 - protein, 15 aa, Homo sapiens
  CDR3 for alpha chain variable domain of TCR clone 171783 (TRAV25, TRAJ52)
CAGTSGGTSYGKLTF

SEQ ID NO: 343566 - protein, 16 aa, Homo sapiens
  CDR3 for beta chain variable domain of TCR clone 171783 (TRBV15, TRBJ1-2)
CASSRGPRTGGGGYTF

SEQ ID NO: 343567 - protein, 15 aa, Homo sapiens
  CDR3 for alpha chain variable domain of TCR clone 171784 (TRAV17, TRAJ22)
CATAPISGSARQLTF

SEQ ID NO: 343568 - protein, 14 aa, Homo sapiens
  CDR3 for beta chain variable domain of TCR clone 171784 (TRBV7-2, TRBJ2-7)
CASSPKTSFYEQYF

SEQ ID NO: 343569 - protein, 15 aa, Homo sapiens
  CDR3 for alpha chain variable domain of TCR clone 171785 (TRAV10, TRAJ18)
CVVREEGSTLGRLYF

SEQ ID NO: 343570 - protein, 15 aa, Homo sapiens
  CDR3 for beta chain variable domain of TCR clone 171785 (TRBV19, TRBJ2-7)
CASSIASGGFYEQYF

SEQ ID NO: 343571 - protein, 12 aa, Homo sapiens
  CDR3 for alpha chain variable domain of TCR clone 171786 (TRAV26-1, TRAJ48)
CIVSWGNEKLTF

SEQ ID NO: 343572 - protein, 13 aa, Homo sapiens
  CDR3 for beta chain variable domain of TCR clone 171786 (TRBV18, TRBJ2-7)
CASFRDSAYEQYF

SEQ ID NO: 343573 - protein, 14 aa, Homo sapiens
  CDR3 for alpha chain variable domain of TCR clone 171787 (TRAV26-1, TRAJ39)
CIVRARSAGNMLTF

SEQ ID NO: 343574 - protein, 13 aa, Homo sapiens
  CDR3 for beta chain variable domain of TCR clone 171787 (TRBV10-3, TRBJ2-7)
CASKLAVNYEQYF

SEQ ID NO: 343575 - protein, 12 aa, Homo sapiens
  CDR3 for alpha chain variable domain of TCR clone 171788 (TRAV12-3, TRAJ17)
CATTLTGNKLTF

SEQ ID NO: 343576 - protein, 15 aa, Homo sapiens
  CDR3 for beta chain variable domain of TCR clone 171788 (TRBV20-1, TRBJ2-7)
CSARDRVSGMDVQYF

SEQ ID NO: 343577 - protein, 15 aa, Homo sapiens
  CDR3 for alpha chain variable domain of TCR clone 171789 (TRAV12-3, TRAJ23)
CAMILIYNQGGKLIF

SEQ ID NO: 343578 - protein, 14 aa, Homo sapiens
  CDR3 for beta chain variable domain of TCR clone 171789 (TRBV19, TRBJ2-1)
CASPTFVLSGEQFF

SEQ ID NO: 343579 - protein, 14 aa, Homo sapiens
  CDR3 for alpha chain variable domain of TCR clone 171790 (TRAV23/DV6, TRAJ4)
CAANLSDGYNKLIF

SEQ ID NO: 343580 - protein, 11 aa, Homo sapiens
  CDR3 for beta chain variable domain of TCR clone 171790 (TRBV7-9, TRBJ2-3)
CASSPTDTQYF

SEQ ID NO: 343581 - protein, 12 aa, Homo sapiens
  CDR3 for alpha chain variable domain of TCR clone 171791 (TRAV13-1, TRAJ49)
CAASPMGNQFYF

SEQ ID NO: 343582 - protein, 15 aa, Homo sapiens
  CDR3 for beta chain variable domain of TCR clone 171791 (TRBV27, TRBJ2-1)
CASSNGGGSSNEQFF

SEQ ID NO: 343583 - protein, 13 aa, Homo sapiens
  CDR3 for alpha chain variable domain of TCR clone 171792 (TRAV2, TRAJ12)
CAVGADSSYKLIF

SEQ ID NO: 343584 - protein, 13 aa, Homo sapiens
  CDR3 for beta chain variable domain of TCR clone 171792 (TRBV20-1, TRBJ2-1)
CSARSGPRDEQFF

SEQ ID NO: 343585 - protein, 11 aa, Homo sapiens
  CDR3 for alpha chain variable domain of TCR clone 171793 (TRAV4, TRAJ31)
CLVGDNARLMF

SEQ ID NO: 343586 - protein, 16 aa, Homo sapiens
  CDR3 for beta chain variable domain of TCR clone 171793 (TRBV11-2, TRBJ2-3)
CASSSRTSGGAGTQYF

SEQ ID NO: 343587 - protein, 13 aa, Homo sapiens
  CDR3 for alpha chain variable domain of TCR clone 171794 (TRAV35, TRAJ36)
CAGPRIGANNLFF

SEQ ID NO: 343588 - protein, 15 aa, Homo sapiens
  CDR3 for beta chain variable domain of TCR clone 171794 (TRBV28, TRBJ2-5)
CASSPSWSYQETQYV

SEQ ID NO: 343589 - protein, 13 aa, Homo sapiens
  CDR3 for alpha chain variable domain of TCR clone 171795 (TRAV12-1, TRAJ26)
CVVRRNYGQNFVF

SEQ ID NO: 343590 - protein, 13 aa, Homo sapiens
  CDR3 for beta chain variable domain of TCR clone 171795 (TRBV11-2, TRBJ2-5)
CASSFSSQETQYF

SEQ ID NO: 343591 - protein, 16 aa, Homo sapiens
  CDR3 for alpha chain variable domain of TCR clone 171796 (TRAV30, TRAJ24)
CGTEIGDADSWGKFQF

SEQ ID NO: 343592 - protein, 13 aa, Homo sapiens
  CDR3 for beta chain variable domain of TCR clone 171796 (TRBV3-1, TRBJ2-2)
CASLARGSGELFF

SEQ ID NO: 343593 - protein, 18 aa, Homo sapiens
  CDR3 for alpha chain variable domain of TCR clone 171797 (TRAV13-1, TRAJ52)
CAARKRSAGGTSYGKMTF

SEQ ID NO: 343594 - protein, 12 aa, Homo sapiens
  CDR3 for beta chain variable domain of TCR clone 171797 (TRBV29-1, TRBJ2-3)
CSVTGGADTQYF

SEQ ID NO: 343595 - protein, 14 aa, Homo sapiens
  CDR3 for alpha chain variable domain of TCR clone 171798 (TRAV38-1, TRAJ40)
CALRPTSGTYKYIF

SEQ ID NO: 343596 - protein, 14 aa, Homo sapiens
  CDR3 for beta chain variable domain of TCR clone 171798 (TRBV13, TRBJ2-5)
CASSLERVGETQYF

SEQ ID NO: 343597 - protein, 14 aa, Homo sapiens
  CDR3 for alpha chain variable domain of TCR clone 171799 (TRAV12-2, TRAJ44)
CAVNPAGTASKLTF

SEQ ID NO: 343598 - protein, 15 aa, Homo sapiens
  CDR3 for beta chain variable domain of TCR clone 171799 (TRBV20-1, TRBJ1-6)
CGAPWGLDHPSSLGM

SEQ ID NO: 343599 - protein, 18 aa, Homo sapiens
  CDR3 for alpha chain variable domain of TCR clone 171800 (TRAV12-3, TRAJ52)
CAMSVGGAGGTSYGKLTF

SEQ ID NO: 343600 - protein, 15 aa, Homo sapiens
  CDR3 for beta chain variable domain of TCR clone 171800 (TRBV2, TRBJ2-7)
CASSEGLARSYEQYF

SEQ ID NO: 343601 - protein, 13 aa, Homo sapiens
  CDR3 for alpha chain variable domain of TCR clone 171801 (TRAV8-6, TRAJ9)
CAVWATGGFKTIF

SEQ ID NO: 343602 - protein, 13 aa, Homo sapiens
  CDR3 for beta chain variable domain of TCR clone 171801 (TRBV27, TRBJ1-1)
CASSLSIGAEAFF

SEQ ID NO: 343603 - protein, 12 aa, Homo sapiens
  CDR3 for alpha chain variable domain of TCR clone 171802 (TRAV21, TRAJ33)
CAKMDSNYQLIW

SEQ ID NO: 343604 - protein, 11 aa, Homo sapiens
  CDR3 for beta chain variable domain of TCR clone 171802 (TRBV6-3, TRBJ2-3)
CATGQADTQYF

SEQ ID NO: 343605 - protein, 15 aa, Homo sapiens
  CDR3 for alpha chain variable domain of TCR clone 171803 (TRAV26-1, TRAJ56)
CIVRVATGAYSKLTF

SEQ ID NO: 343606 - protein, 15 aa, Homo sapiens
  CDR3 for beta chain variable domain of TCR clone 171803 (TRBV27, TRBJ2-7)
CASSPQREGQRGQYF

SEQ ID NO: 343607 - protein, 14 aa, Homo sapiens
  CDR3 for alpha chain variable domain of TCR clone 171804 (TRAV1-2, TRAJ15)
CAVRDRQAGTDLIF

SEQ ID NO: 343608 - protein, 15 aa, Homo sapiens
  CDR3 for beta chain variable domain of TCR clone 171804 (TRBV7-2, TRBJ2-1)
CASSLASGRVNGQFF

SEQ ID NO: 343609 - protein, 12 aa, Homo sapiens
  CDR3 for alpha chain variable domain of TCR clone 171805 (TRAV8-6, TRAJ43)
CAESHNNNDMRF

SEQ ID NO: 343610 - protein, 13 aa, Homo sapiens
  CDR3 for beta chain variable domain of TCR clone 171805 (TRBV7-3, TRBJ1-1)
CASSQDWGAEAFF

SEQ ID NO: 343611 - protein, 15 aa, Homo sapiens
  CDR3 for alpha chain variable domain of TCR clone 171806 (TRAV21, TRAJ52)
CAVDAGGTSYGKLTF

SEQ ID NO: 343612 - protein, 13 aa, Homo sapiens
  CDR3 for beta chain variable domain of TCR clone 171806 (TRBV19, TRBJ1-2)
CASSVPGQDGYTF

SEQ ID NO: 343613 - protein, 10 aa, Homo sapiens
  CDR3 for alpha chain variable domain of TCR clone 171807 (TRAV1-2, TRAJ20)
YALNDYKLSF

SEQ ID NO: 343614 - protein, 16 aa, Homo sapiens
  CDR3 for beta chain variable domain of TCR clone 171807 (TRBV20-1, TRBJ1-1)
CSARALTQGMNTEAFF

SEQ ID NO: 343615 - protein, 16 aa, Homo sapiens
  CDR3 for alpha chain variable domain of TCR clone 171808 (TRAV12-2, TRAJ40)
CAVIRGGTAGTYKYIF

SEQ ID NO: 343616 - protein, 14 aa, Homo sapiens
  CDR3 for beta chain variable domain of TCR clone 171808 (TRBV20-1, TRBJ2-5)
CSARDGRAGETQYF

SEQ ID NO: 343617 - protein, 23 aa, Homo sapiens
  CDR3 for alpha chain variable domain of TCR clone 171809 (TRAV26-1, TRAJ38)
CIVDNAGNNHIQNPDPAVYHLRD

SEQ ID NO: 343618 - protein, 13 aa, Homo sapiens
  CDR3 for beta chain variable domain of TCR clone 171809 (TRBV20-1, TRBJ1-1)
CSARGGGNTEAFF

SEQ ID NO: 343619 - protein, 15 aa, Homo sapiens
  CDR3 for alpha chain variable domain of TCR clone 171810 (TRAV12-2, TRAJ53)
CAVNGGGGSNYKLTF

SEQ ID NO: 343620 - protein, 13 aa, Homo sapiens
  CDR3 for beta chain variable domain of TCR clone 171810 (TRBV9, TRBJ2-1)
CTSSPSGGNEQFF

SEQ ID NO: 343621 - protein, 17 aa, Homo sapiens
  CDR3 for alpha chain variable domain of TCR clone 171811 (TRAV13-1, TRAJ28)
CAASPPYSGAGSSQLTF

SEQ ID NO: 343622 - protein, 15 aa, Homo sapiens
  CDR3 for beta chain variable domain of TCR clone 171811 (TRBV6-3, TRBJ2-2)
CASSFLATLTGELFF

SEQ ID NO: 343623 - protein, 12 aa, Homo sapiens
  CDR3 for alpha chain variable domain of TCR clone 171812 (TRAV16, TRAJ10)
CSRTGGGNKLTF

SEQ ID NO: 343624 - protein, 16 aa, Homo sapiens
  CDR3 for beta chain variable domain of TCR clone 171812 (TRBV7-3, TRBJ2-2)
CASSLKRRTLSGELFF

SEQ ID NO: 343625 - protein, 14 aa, Homo sapiens
  CDR3 for alpha chain variable domain of TCR clone 171813 (TRAV35, TRAJ33)
CAGSSQDSNYQLIW

SEQ ID NO: 343626 - protein, 15 aa, Homo sapiens
  CDR3 for beta chain variable domain of TCR clone 171813 (TRBV5-1, TRBJ1-4)
FAPAACKDGNEKLFF

SEQ ID NO: 343627 - protein, 12 aa, Homo sapiens
  CDR3 for alpha chain variable domain of TCR clone 171814 (TRAV1-1, TRAJ30)
CAVRGRDDEIIF

SEQ ID NO: 343628 - protein, 14 aa, Homo sapiens
  CDR3 for beta chain variable domain of TCR clone 171814 (TRBV11-3, TRBJ2-7)
CASSLTSGGYEQYF

SEQ ID NO: 343629 - protein, 11 aa, Homo sapiens
  CDR3 for alpha chain variable domain of TCR clone 171815 (TRAV8-3, TRAJ18)
CAVGGRQRLNP

SEQ ID NO: 343630 - protein, 12 aa, Homo sapiens
  CDR3 for beta chain variable domain of TCR clone 171815 (TRBV28, TRBJ2-6)
CATQAGANVLTF

SEQ ID NO: 343631 - protein, 15 aa, Homo sapiens
  CDR3 for alpha chain variable domain of TCR clone 171816 (TRAV35, TRAJ58)
CAGRRQETSGSRLTF

SEQ ID NO: 343632 - protein, 12 aa, Homo sapiens
  CDR3 for beta chain variable domain of TCR clone 171816 (TRBV11-2, TRBJ2-4)
CASSSASGSEYF

SEQ ID NO: 343633 - protein, 12 aa, Homo sapiens
  CDR3 for alpha chain variable domain of TCR clone 171817 (TRAV1-2, TRAJ9)
CAGYTGGFKTIF

SEQ ID NO: 343634 - protein, 15 aa, Homo sapiens
  CDR3 for beta chain variable domain of TCR clone 171817 (TRBV11-2, TRBJ2-1)
CASSPAGQSLNEQFY

SEQ ID NO: 343635 - protein, 13 aa, Homo sapiens
  CDR3 for alpha chain variable domain of TCR clone 171818 (TRAV1-1, TRAJ16)
CAVMFSDGQKLLF

SEQ ID NO: 343636 - protein, 13 aa, Homo sapiens
  CDR3 for beta chain variable domain of TCR clone 171818 (TRBV7-2, TRBJ2-7)
CASSSPSGSEQYF

SEQ ID NO: 343637 - protein, 12 aa, Homo sapiens
  CDR3 for alpha chain variable domain of TCR clone 171819 (TRAV2, TRAJ37)
CAVTMNTGKLIF

SEQ ID NO: 343638 - protein, 15 aa, Homo sapiens
  CDR3 for beta chain variable domain of TCR clone 171819 (TRBV5-1, TRBJ2-5)
CASSFGEPPQETQYF

SEQ ID NO: 343639 - protein, 14 aa, Homo sapiens
  CDR3 for alpha chain variable domain of TCR clone 171820 (TRAV12-1, TRAJ6)
CVVPTSGGSYIPTF

SEQ ID NO: 343640 - protein, 16 aa, Homo sapiens
  CDR3 for beta chain variable domain of TCR clone 171820 (TRBV2, TRBJ2-7)
CASSEPWTGPSDEQYF

SEQ ID NO: 343641 - protein, 16 aa, Homo sapiens
  CDR3 for alpha chain variable domain of TCR clone 171821 (TRAV29/DV5, TRAJ36)
CAASAHYQSGANNLFF

SEQ ID NO: 343642 - protein, 16 aa, Homo sapiens
  CDR3 for beta chain variable domain of TCR clone 171821 (TRBV11-2, TRBJ2-7)
CASSPTTGGVSYEQYF

SEQ ID NO: 343643 - protein, 15 aa, Homo sapiens
  CDR3 for alpha chain variable domain of TCR clone 171822 (TRAV3, TRAJ3)
SAVRDRDSSASKIIF

SEQ ID NO: 343644 - protein, 15 aa, Homo sapiens
  CDR3 for beta chain variable domain of TCR clone 171822 (TRBV29-1, TRBJ2-7)
CSVEFFDRGSYEQYF

SEQ ID NO: 343645 - protein, 15 aa, Homo sapiens
  CDR3 for alpha chain variable domain of TCR clone 171823 (TRAV8-3, TRAJ6)
CAVGSLGGGSYIPTF

SEQ ID NO: 343646 - protein, 14 aa, Homo sapiens
  CDR3 for beta chain variable domain of TCR clone 171823 (TRBV19, TRBJ2-2)
CASSTGQGAGELFF

SEQ ID NO: 343647 - protein, 13 aa, Homo sapiens
  CDR3 for alpha chain variable domain of TCR clone 171824 (TRAV17, TRAJ33)
CARDADSNYQLIW

SEQ ID NO: 343648 - protein, 17 aa, Homo sapiens
  CDR3 for beta chain variable domain of TCR clone 171824 (TRBV20-1, TRBJ2-3)
CSAVSPGLAGGQDTQYF

SEQ ID NO: 343649 - protein, 17 aa, Homo sapiens
  CDR3 for alpha chain variable domain of TCR clone 171825 (TRAV23/DV6, TRAJ9)
CAASLSPPNTGVFKTIF

SEQ ID NO: 343650 - protein, 14 aa, Homo sapiens
  CDR3 for beta chain variable domain of TCR clone 171825 (TRBV11-2, TRBJ2-5)
CASSRTGGIETQYF

SEQ ID NO: 343651 - protein, 17 aa, Homo sapiens
  CDR3 for alpha chain variable domain of TCR clone 171826 (TRAV3, TRAJ38)
CAVRDCLNAGNNRKLIW

SEQ ID NO: 343652 - protein, 15 aa, Homo sapiens
  CDR3 for beta chain variable domain of TCR clone 171826 (TRBV27, TRBJ2-1)
CASSNGGGASNEQFF

SEQ ID NO: 343653 - protein, 15 aa, Homo sapiens
  CDR3 for alpha chain variable domain of TCR clone 171827 (TRAV3, TRAJ23)
CAVRDRGNQGGKLIF

SEQ ID NO: 343654 - protein, 15 aa, Homo sapiens
  CDR3 for beta chain variable domain of TCR clone 171827 (TRBV7-3, TRBJ2-1)
CQQLAPSGSYNEQFS

SEQ ID NO: 343655 - protein, 16 aa, Homo sapiens
  CDR3 for alpha chain variable domain of TCR clone 171828 (TRAV30, TRAJ24)
CGTEIVDADSWGKFQF

SEQ ID NO: 343656 - protein, 16 aa, Homo sapiens
  CDR3 for beta chain variable domain of TCR clone 171828 (TRBV5-1, TRBJ1-1)
CASSLGGNSLNTEAFF

SEQ ID NO: 343657 - protein, 14 aa, Homo sapiens
  CDR3 for alpha chain variable domain of TCR clone 171829 (TRAV26-1, TRAJ40)
CIVRLLSGTYKYIF

SEQ ID NO: 343658 - protein, 16 aa, Homo sapiens
  CDR3 for beta chain variable domain of TCR clone 171829 (TRBV19, TRBJ2-1)
CASSKAGPSSYNEQFF

SEQ ID NO: 343659 - protein, 14 aa, Homo sapiens
  CDR3 for alpha chain variable domain of TCR clone 171830 (TRAV21, TRAJ38)
CAVMGAGNNRKLIG

SEQ ID NO: 343660 - protein, 13 aa, Homo sapiens
  CDR3 for beta chain variable domain of TCR clone 171830 (TRBV7-3, TRBJ2-5)
CASSIGFFETQYF

SEQ ID NO: 343661 - protein, 14 aa, Homo sapiens
  CDR3 for alpha chain variable domain of TCR clone 171831 (TRAV17, TRAJ40)
CATALTSGTYKYIF

SEQ ID NO: 343662 - protein, 13 aa, Homo sapiens
  CDR3 for beta chain variable domain of TCR clone 171831 (TRBV27, TRBJ2-1)
CASSSGAYNEQFF

SEQ ID NO: 343663 - protein, 13 aa, Homo sapiens
  CDR3 for alpha chain variable domain of TCR clone 171832 (TRAV13-1, TRAJ43)
CAASLSNNNDMRF

SEQ ID NO: 343664 - protein, 16 aa, Homo sapiens
  CDR3 for beta chain variable domain of TCR clone 171832 (TRBV12-5, TRBJ2-5)
CASGPRTSGNQETQYF

SEQ ID NO: 343665 - protein, 14 aa, Homo sapiens
  CDR3 for alpha chain variable domain of TCR clone 171833 (TRAV12-2, TRAJ13)
CAVKKTGGYQKVTF

SEQ ID NO: 343666 - protein, 13 aa, Homo sapiens
  CDR3 for beta chain variable domain of TCR clone 171833 (TRBV25-1, TRBJ1-1)
SSTHLGGNTEAFF

SEQ ID NO: 343667 - protein, 13 aa, Homo sapiens
  CDR3 for alpha chain variable domain of TCR clone 171834 (TRAV17, TRAJ6)
CATGFGGSYITTF

SEQ ID NO: 343668 - protein, 14 aa, Homo sapiens
  CDR3 for beta chain variable domain of TCR clone 171834 (TRBV5-1, TRBJ2-5)
CASSFGGSQETQYF

SEQ ID NO: 343669 - protein, 17 aa, Homo sapiens
  CDR3 for alpha chain variable domain of TCR clone 171835 (TRAV3, TRAJ6)
CAVRDGPRAGGSFIPPF

SEQ ID NO: 343670 - protein, 20 aa, Homo sapiens
  CDR3 for beta chain variable domain of TCR clone 171835 (TRBV28, TRBJ2-1)
CASTPIGRSPGLAGGNEQFF

SEQ ID NO: 343671 - protein, 17 aa, Homo sapiens
  CDR3 for alpha chain variable domain of TCR clone 171836 (TRAV4, TRAJ13)
CLVGVQGASGGYPKVTF

SEQ ID NO: 343672 - protein, 18 aa, Homo sapiens
  CDR3 for beta chain variable domain of TCR clone 171836 (TRBV15, TRBJ2-3)
CATSRDGARSWDTDTQYF

SEQ ID NO: 343673 - protein, 13 aa, Homo sapiens
  CDR3 for alpha chain variable domain of TCR clone 171837 (TRAV8-3, TRAJ36)
CAVGATGANNLFF

SEQ ID NO: 343674 - protein, 14 aa, Homo sapiens
  CDR3 for beta chain variable domain of TCR clone 171837 (TRBV7-2, TRBJ1-2)
CASSRGGTNYGYTF

SEQ ID NO: 343675 - protein, 14 aa, Homo sapiens
  CDR3 for alpha chain variable domain of TCR clone 171838 (TRAV12-2, TRAJ13)
CAVKKTGGYHKVTF

SEQ ID NO: 343676 - protein, 15 aa, Homo sapiens
  CDR3 for beta chain variable domain of TCR clone 171838 (TRBV28, TRBJ2-5)
CASSPPWSYQETQYF

SEQ ID NO: 343677 - protein, 14 aa, Homo sapiens
  CDR3 for alpha chain variable domain of TCR clone 171839 (TRAV12-1, TRAJ10)
CVAILTGGGNKLNF

SEQ ID NO: 343678 - protein, 15 aa, Homo sapiens
  CDR3 for beta chain variable domain of TCR clone 171839 (TRBV20-1, TRBJ2-7)
CSARGFRPQTYEQYF

SEQ ID NO: 343679 - protein, 14 aa, Homo sapiens
  CDR3 for alpha chain variable domain of TCR clone 171840 (TRAV1-1, TRAJ27)
CAVIYNTNAGKSTF

SEQ ID NO: 343680 - protein, 16 aa, Homo sapiens
  CDR3 for beta chain variable domain of TCR clone 171840 (TRBV20-1, TRBJ2-2)
CSASASGIPGAGELFF

SEQ ID NO: 343681 - protein, 13 aa, Homo sapiens
  CDR3 for alpha chain variable domain of TCR clone 171841 (TRAV21, TRAJ37)
CAVSSGNTGKLIF

SEQ ID NO: 343682 - protein, 12 aa, Homo sapiens
  CDR3 for beta chain variable domain of TCR clone 171841 (TRBV19, TRBJ2-1)
CASSQISNEQFF

SEQ ID NO: 343683 - protein, 13 aa, Homo sapiens
  CDR3 for alpha chain variable domain of TCR clone 171842 (TRAV13-2, TRAJ13)
CADLSGGYQKVAF

SEQ ID NO: 343684 - protein, 15 aa, Homo sapiens
  CDR3 for beta chain variable domain of TCR clone 171842 (TRBV19, TRBJ1-1)
CVSSIGGGRNTEAFF

SEQ ID NO: 343685 - protein, 13 aa, Homo sapiens
  CDR3 for alpha chain variable domain of TCR clone 171843 (TRAV13-1, TRAJ5)
CAARVTGRRALTF

SEQ ID NO: 343686 - protein, 15 aa, Homo sapiens
  CDR3 for beta chain variable domain of TCR clone 171843 (TRBV20-1, TRBJ2-7)
CSAESGTSGAYEQYF

SEQ ID NO: 343687 - protein, 14 aa, Homo sapiens
  CDR3 for alpha chain variable domain of TCR clone 171844 (TRAV1-2, TRAJ16)
CAVNRFSDGQKLLF

SEQ ID NO: 343688 - protein, 14 aa, Homo sapiens
  CDR3 for beta chain variable domain of TCR clone 171844 (TRBV19, TRBJ2-2)
CASTVTANTGELFF

SEQ ID NO: 343689 - protein, 17 aa, Homo sapiens
  CDR3 for alpha chain variable domain of TCR clone 171845 (TRAV16, TRAJ26)
CALSGPEFCLCSRNQIV

SEQ ID NO: 343690 - protein, 12 aa, Homo sapiens
  CDR3 for beta chain variable domain of TCR clone 171845 (TRBV11-2, TRBJ2-1)
CASSPGNNEQFF

SEQ ID NO: 343691 - protein, 13 aa, Homo sapiens
  CDR3 for alpha chain variable domain of TCR clone 171846 (TRAV23/DV6, TRAJ47)
CAASMTRGNKLVF

SEQ ID NO: 343692 - protein, 12 aa, Homo sapiens
  CDR3 for beta chain variable domain of TCR clone 171846 (TRBV28, TRBJ2-7)
CASSCSSYEQYF

SEQ ID NO: 343693 - protein, 11 aa, Homo sapiens
  CDR3 for alpha chain variable domain of TCR clone 171847 (TRAV2, TRAJ13)
CASGGYQKVTF

SEQ ID NO: 343694 - protein, 20 aa, Homo sapiens
  CDR3 for beta chain variable domain of TCR clone 171847 (TRBV7-8, TRBJ2-2)
CASSLLFPGPTIHITGELFF

SEQ ID NO: 343695 - protein, 12 aa, Homo sapiens
  CDR3 for alpha chain variable domain of TCR clone 171848 (TRAV12-3, TRAJ17)
CAMTLTGNKLTF

SEQ ID NO: 343696 - protein, 15 aa, Homo sapiens
  CDR3 for beta chain variable domain of TCR clone 171848 (TRBV7-8, TRBJ2-2)
CASSDRGPNTGELFS

SEQ ID NO: 343697 - protein, 13 aa, Homo sapiens
  CDR3 for alpha chain variable domain of TCR clone 171849 (TRAV26-1, TRAJ34)
CIVRPCITDKLIF

SEQ ID NO: 343698 - protein, 14 aa, Homo sapiens
  CDR3 for beta chain variable domain of TCR clone 171849 (TRBV7-2, TRBJ2-7)
CASRSQGAAYEQYF

SEQ ID NO: 343699 - protein, 14 aa, Homo sapiens
  CDR3 for alpha chain variable domain of TCR clone 171850 (TRAV8-3, TRAJ45)
CALNSGGGADGLTF

SEQ ID NO: 343700 - protein, 16 aa, Homo sapiens
  CDR3 for beta chain variable domain of TCR clone 171850 (TRBV9, TRBJ2-2)
CASSAMGKGNTGELFF

SEQ ID NO: 343701 - protein, 16 aa, Homo sapiens
  CDR3 for alpha chain variable domain of TCR clone 171851 (TRAV16, TRAJ42)
SARKMNYGGSQGNLIF

SEQ ID NO: 343702 - protein, 15 aa, Homo sapiens
  CDR3 for beta chain variable domain of TCR clone 171851 (TRBV20-1, TRBJ2-7)
CSAREGRDSLYEQYF

SEQ ID NO: 343703 - protein, 12 aa, Homo sapiens
  CDR3 for alpha chain variable domain of TCR clone 171852 (TRAV27, TRAJ35)
CAGADFGNVLHC

SEQ ID NO: 343704 - protein, 17 aa, Homo sapiens
  CDR3 for beta chain variable domain of TCR clone 171852 (TRBV28, TRBJ2-5)
CASSTPEGDALQETQYF

SEQ ID NO: 343705 - protein, 14 aa, Homo sapiens
  CDR3 for alpha chain variable domain of TCR clone 171853 (TRAV1-1, TRAJ23)
CAVSIYNQGGKLIF

SEQ ID NO: 343706 - protein, 16 aa, Homo sapiens
  CDR3 for beta chain variable domain of TCR clone 171853 (TRBV4-3, TRBJ2-3)
CASSQGGLAGTDTQYF

SEQ ID NO: 343707 - protein, 14 aa, Homo sapiens
  CDR3 for alpha chain variable domain of TCR clone 171854 (TRAV13-1, TRAJ9)
CAASALTGGFKTII

SEQ ID NO: 343708 - protein, 13 aa, Homo sapiens
  CDR3 for beta chain variable domain of TCR clone 171854 (TRBV20-1, TRBJ1-1)
CSAGTVGNTEAFF

SEQ ID NO: 343709 - protein, 13 aa, Homo sapiens
  CDR3 for alpha chain variable domain of TCR clone 171855 (TRAV17, TRAJ5)
CATGDTGRRALTF

SEQ ID NO: 343710 - protein, 15 aa, Homo sapiens
  CDR3 for beta chain variable domain of TCR clone 171855 (TRBV20-1, TRBJ2-7)
CSARDRVSGMDEQYF

SEQ ID NO: 343711 - protein, 15 aa, Homo sapiens
  CDR3 for alpha chain variable domain of TCR clone 171856 (TRAV23/DV6, TRAJ27)
CAASKPMQANKPLVM

SEQ ID NO: 343712 - protein, 14 aa, Homo sapiens
  CDR3 for beta chain variable domain of TCR clone 171856 (TRBV5-4, TRBJ1-1)
CASSLDSRRDEAFF

SEQ ID NO: 343713 - protein, 13 aa, Homo sapiens
  CDR3 for alpha chain variable domain of TCR clone 171857 (TRAV21, TRAJ27)
CAALNTNAGKSTF

SEQ ID NO: 343714 - protein, 14 aa, Homo sapiens
  CDR3 for beta chain variable domain of TCR clone 171857 (TRBV27, TRBJ1-1)
CASSLLSGLCEAFF

SEQ ID NO: 343715 - protein, 13 aa, Homo sapiens
  CDR3 for alpha chain variable domain of TCR clone 171858 (TRAV17, TRAJ22)
CAGRRVSARQLTF

SEQ ID NO: 343716 - protein, 14 aa, Homo sapiens
  CDR3 for beta chain variable domain of TCR clone 171858 (TRBV19, TRBJ1-1)
CASSITGWETEAFF

SEQ ID NO: 343717 - protein, 13 aa, Homo sapiens
  CDR3 for alpha chain variable domain of TCR clone 171859 (TRAV23/DV6, TRAJ22)
CAPYSGSARQLTF

SEQ ID NO: 343718 - protein, 13 aa, Homo sapiens
  CDR3 for beta chain variable domain of TCR clone 171859 (TRBV6-1, TRBJ1-1)
CASSLQGNTEAFF

SEQ ID NO: 343719 - protein, 16 aa, Homo sapiens
  CDR3 for alpha chain variable domain of TCR clone 171860 (TRAV12-2, TRAJ40)
CAVIRGGTSGTYKYIF

SEQ ID NO: 343720 - protein, 16 aa, Homo sapiens
  CDR3 for beta chain variable domain of TCR clone 171860 (TRBV7-9, TRBJ2-1)
CASSDVAGGSYKEQFF

SEQ ID NO: 343721 - protein, 12 aa, Homo sapiens
  CDR3 for alpha chain variable domain of TCR clone 171861 (TRAV4, TRAJ26)
CLVGDYGQNFVF

SEQ ID NO: 343722 - protein, 19 aa, Homo sapiens
  CDR3 for beta chain variable domain of TCR clone 171861 (TRBV7-2, TRBJ2-3)
CASSFLSRNWGGGTDTQYF

SEQ ID NO: 343723 - protein, 12 aa, Homo sapiens
  CDR3 for alpha chain variable domain of TCR clone 171862 (TRAV17, TRAJ20)
CATDGDDYKLSF

SEQ ID NO: 343724 - protein, 17 aa, Homo sapiens
  CDR3 for beta chain variable domain of TCR clone 171862 (TRBV7-8, TRBJ2-6)
CASSAGTGGAGANVLTF

SEQ ID NO: 343725 - protein, 13 aa, Homo sapiens
  CDR3 for alpha chain variable domain of TCR clone 171863 (TRAV13-1, TRAJ53)
QAAIGGSNYKLTF

SEQ ID NO: 343726 - protein, 15 aa, Homo sapiens
  CDR3 for beta chain variable domain of TCR clone 171863 (TRBV5-1, TRBJ2-1)
CASSPPRAPYNEQFF

SEQ ID NO: 343727 - protein, 12 aa, Homo sapiens
  CDR3 for alpha chain variable domain of TCR clone 171864 (TRAV23/DV6, TRAJ49)
CAAPYTGNQFYF

SEQ ID NO: 343728 - protein, 17 aa, Homo sapiens
  CDR3 for beta chain variable domain of TCR clone 171864 (TRBV4-1, TRBJ2-3)
CASSQVLQGGGTDTQYF

SEQ ID NO: 343729 - protein, 12 aa, Homo sapiens
  CDR3 for alpha chain variable domain of TCR clone 171865 (TRAV12-1, TRAJ20)
CVVNPDDYKLSF

SEQ ID NO: 343730 - protein, 14 aa, Homo sapiens
  CDR3 for beta chain variable domain of TCR clone 171865 (TRBV7-2, TRBJ1-6)
CASSLQGANSPLHF

SEQ ID NO: 343731 - protein, 15 aa, Homo sapiens
  CDR3 for alpha chain variable domain of TCR clone 171866 (TRAV26-1, TRAJ3)
CIVRSGYSSASKIIF

SEQ ID NO: 343732 - protein, 14 aa, Homo sapiens
  CDR3 for beta chain variable domain of TCR clone 171866 (TRBV13, TRBJ2-5)
CASYRRLAEETQCF

SEQ ID NO: 343733 - protein, 14 aa, Homo sapiens
  CDR3 for alpha chain variable domain of TCR clone 171867 (TRAV8-2, TRAJ4)
CVVSPSGGYNKLIF

SEQ ID NO: 343734 - protein, 15 aa, Homo sapiens
  CDR3 for beta chain variable domain of TCR clone 171867 (TRBV4-1, TRBJ1-4)
CASRDTGGTNEKLFF

SEQ ID NO: 343735 - protein, 15 aa, Homo sapiens
  CDR3 for alpha chain variable domain of TCR clone 171868 (TRAV19, TRAJ9)
CALSEEGTGGFKTIF

SEQ ID NO: 343736 - protein, 13 aa, Homo sapiens
  CDR3 for beta chain variable domain of TCR clone 171868 (TRBV7-3, TRBJ1-1)
CASSQDWGAEAFF

SEQ ID NO: 343737 - protein, 14 aa, Homo sapiens
  CDR3 for alpha chain variable domain of TCR clone 171869 (TRAV4, TRAJ26)
CLVGPPNYGQNFVF

SEQ ID NO: 343738 - protein, 17 aa, Homo sapiens
  CDR3 for beta chain variable domain of TCR clone 171869 (TRBV20-1, TRBJ2-1)
CSASSSGLAGSYNEQFL

SEQ ID NO: 343739 - protein, 13 aa, Homo sapiens
  CDR3 for alpha chain variable domain of TCR clone 171870 (TRAV38-1, TRAJ52)
CAFRGTSCGKLTF

SEQ ID NO: 343740 - protein, 15 aa, Homo sapiens
  CDR3 for beta chain variable domain of TCR clone 171870 (TRBV7-8, TRBJ2-5)
CASSDAAGSQETQYF

SEQ ID NO: 343741 - protein, 10 aa, Homo sapiens
  CDR3 for alpha chain variable domain of TCR clone 171871 (TRAV8-1, TRAJ43)
CAVNGDDMRF

SEQ ID NO: 343742 - protein, 12 aa, Homo sapiens
  CDR3 for beta chain variable domain of TCR clone 171871 (TRBV11-2, TRBJ2-1)
CASSPGNNEQFF

SEQ ID NO: 343743 - protein, 13 aa, Homo sapiens
  CDR3 for alpha chain variable domain of TCR clone 171872 (TRAV13-2, TRAJ48)
CAEMDFGNEKLTY

SEQ ID NO: 343744 - protein, 15 aa, Homo sapiens
  CDR3 for beta chain variable domain of TCR clone 171872 (TRBV7-9, TRBJ1-6)
CASSSPGRGNSPLHF

SEQ ID NO: 343745 - protein, 12 aa, Homo sapiens
  CDR3 for alpha chain variable domain of TCR clone 171873 (TRAV30, TRAJ39)
CGRGNAGNMLTF

SEQ ID NO: 343746 - protein, 15 aa, Homo sapiens
  CDR3 for beta chain variable domain of TCR clone 171873 (TRBV7-9, TRBJ1-5)
CASSQGHQPNQPQHF

SEQ ID NO: 343747 - protein, 13 aa, Homo sapiens
  CDR3 for alpha chain variable domain of TCR clone 171874 (TRAV13-1, TRAJ37)
CAARSGNTGKLIF

SEQ ID NO: 343748 - protein, 13 aa, Homo sapiens
  CDR3 for beta chain variable domain of TCR clone 171874 (TRBV7-2, TRBJ1-6)
CASSLKFDSPLHF

SEQ ID NO: 343749 - protein, 14 aa, Homo sapiens
  CDR3 for alpha chain variable domain of TCR clone 171875 (TRAV2, TRAJ9)
CAVEDRSGGFKTIF

SEQ ID NO: 343750 - protein, 15 aa, Homo sapiens
  CDR3 for beta chain variable domain of TCR clone 171875 (TRBV27, TRBJ1-6)
CASSFDRGLGSPLHF

SEQ ID NO: 343751 - protein, 12 aa, Homo sapiens
  CDR3 for alpha chain variable domain of TCR clone 171876 (TRAV13-1, TRAJ53)
CAAGGSNYKLTL

SEQ ID NO: 343752 - protein, 11 aa, Homo sapiens
  CDR3 for beta chain variable domain of TCR clone 171876 (TRBV2, TRBJ1-1)
CASREGTEAFF

SEQ ID NO: 343753 - protein, 14 aa, Homo sapiens
  CDR3 for alpha chain variable domain of TCR clone 171877 (TRAV27, TRAJ23)
GAGLSYNQGGKLIF

SEQ ID NO: 343754 - protein, 15 aa, Homo sapiens
  CDR3 for beta chain variable domain of TCR clone 171877 (TRBV19, TRBJ2-2)
CASSLNRGVTGELFF

SEQ ID NO: 343755 - protein, 16 aa, Homo sapiens
  CDR3 for alpha chain variable domain of TCR clone 171878 (TRAV30, TRAJ24)
CGTEIVDADSWGKFQF

SEQ ID NO: 343756 - protein, 14 aa, Homo sapiens
  CDR3 for beta chain variable domain of TCR clone 171878 (TRBV7-9, TRBJ2-4)
CASSLAIGGSRQYF

SEQ ID NO: 343757 - protein, 15 aa, Homo sapiens
  CDR3 for alpha chain variable domain of TCR clone 171879 (TRAV17, TRAJ35)
CATAFVIGFGNVLHR

SEQ ID NO: 343758 - protein, 16 aa, Homo sapiens
  CDR3 for beta chain variable domain of TCR clone 171879 (TRBV11-2, TRBJ2-7)
CASSPLAGGPRYEQYF

SEQ ID NO: 343759 - protein, 15 aa, Homo sapiens
  CDR3 for alpha chain variable domain of TCR clone 171880 (TRAV21, TRAJ53)
CATLNSGGSNYKLTF

SEQ ID NO: 343760 - protein, 18 aa, Homo sapiens
  CDR3 for beta chain variable domain of TCR clone 171880 (TRBV6-6, TRBJ1-3)
CASSYSKWDSIAGNTIYF

SEQ ID NO: 343761 - protein, 20 aa, Homo sapiens
  CDR3 for alpha chain variable domain of TCR clone 171881 (TRAV2, TRAJ29)
CAVSEFRKHTSCLWKGHKTF

SEQ ID NO: 343762 - protein, 14 aa, Homo sapiens
  CDR3 for beta chain variable domain of TCR clone 171881 (TRBV20-1, TRBJ2-3)
CSAGGRRGTDTQYF

SEQ ID NO: 343763 - protein, 13 aa, Homo sapiens
  CDR3 for alpha chain variable domain of TCR clone 171882 (TRAV36/DV7, TRAJ57)
CAVVLGGSEKLVF

SEQ ID NO: 343764 - protein, 14 aa, Homo sapiens
  CDR3 for beta chain variable domain of TCR clone 171882 (TRBV4-1, TRBJ1-2)
CASSQDGQVRGYTF

SEQ ID NO: 343765 - protein, 21 aa, Homo sapiens
  CDR3 for alpha chain variable domain of TCR clone 171883 (TRAV1-1, TRAJ6)
CLLLLRCERLERTGGSYIPTF

SEQ ID NO: 343766 - protein, 15 aa, Homo sapiens
  CDR3 for beta chain variable domain of TCR clone 171883 (TRBV7-2, TRBJ2-1)
CASTHGTGIYNEQFF

SEQ ID NO: 343767 - protein, 14 aa, Homo sapiens
  CDR3 for alpha chain variable domain of TCR clone 171884 (TRAV8-6, TRAJ54)
CAVTEGRGAQKLLF

SEQ ID NO: 343768 - protein, 14 aa, Homo sapiens
  CDR3 for beta chain variable domain of TCR clone 171884 (TRBV27, TRBJ2-7)
CASSIGQGAQKQYF

SEQ ID NO: 343769 - protein, 13 aa, Homo sapiens
  CDR3 for alpha chain variable domain of TCR clone 171885 (TRAV1-1, TRAJ23)
CAVVANQGGKLIF

SEQ ID NO: 343770 - protein, 17 aa, Homo sapiens
  CDR3 for beta chain variable domain of TCR clone 171885 (TRBV7-9, TRBJ2-6)
CASSFGAGYSGANVLTF

SEQ ID NO: 343771 - protein, 11 aa, Homo sapiens
  CDR3 for alpha chain variable domain of TCR clone 171886 (TRAV22, TRAJ47)
CAVLYGNKLVF

SEQ ID NO: 343772 - protein, 13 aa, Homo sapiens
  CDR3 for beta chain variable domain of TCR clone 171886 (TRBV4-1, TRBJ2-7)
CASSQGQAYEQYF

SEQ ID NO: 343773 - protein, 12 aa, Homo sapiens
  CDR3 for alpha chain variable domain of TCR clone 171887 (TRAV21, TRAJ33)
CAKMDSNYQLIW

SEQ ID NO: 343774 - protein, 15 aa, Homo sapiens
  CDR3 for beta chain variable domain of TCR clone 171887 (TRBV19, TRBJ2-7)
CASSPAGSGEALRYF

SEQ ID NO: 343775 - protein, 14 aa, Homo sapiens
  CDR3 for alpha chain variable domain of TCR clone 171888 (TRAV1-2, TRAJ16)
CAVNRFSDGQKLLF

SEQ ID NO: 343776 - protein, 17 aa, Homo sapiens
  CDR3 for beta chain variable domain of TCR clone 171888 (TRBV9, TRBJ1-6)
CASGVAGTGDSPLTLGT

SEQ ID NO: 343777 - protein, 16 aa, Homo sapiens
  CDR3 for alpha chain variable domain of TCR clone 171889 (TRAV30, TRAJ24)
CGTEIVDADSWGKFQF

SEQ ID NO: 343778 - protein, 19 aa, Homo sapiens
  CDR3 for beta chain variable domain of TCR clone 171889 (TRBV4-3, TRBJ2-7)
CASSQEFIGWQVSPYEQYF

SEQ ID NO: 343779 - protein, 11 aa, Homo sapiens
  CDR3 for alpha chain variable domain of TCR clone 171890 (TRAV1-1, TRAJ23)
CAVRQGGKLIF

SEQ ID NO: 343780 - protein, 14 aa, Homo sapiens
  CDR3 for beta chain variable domain of TCR clone 171890 (TRBV25-1, TRBJ2-5)
CASSESTGRETQYF

SEQ ID NO: 343781 - protein, 18 aa, Homo sapiens
  CDR3 for alpha chain variable domain of TCR clone 171891 (TRAV13-1, TRAJ52)
CAAKNPDAGGTSYGKLTF

SEQ ID NO: 343782 - protein, 18 aa, Homo sapiens
  CDR3 for beta chain variable domain of TCR clone 171891 (TRBV12-4, TRBJ2-4)
CASSRTGAVDVAKNIQYF

SEQ ID NO: 343783 - protein, 11 aa, Homo sapiens
  CDR3 for alpha chain variable domain of TCR clone 171892 (TRAV12-2, TRAJ33)
CAVTSNYQLIW

SEQ ID NO: 343784 - protein, 14 aa, Homo sapiens
  CDR3 for beta chain variable domain of TCR clone 171892 (TRBV12-4, TRBJ2-2)
CASNQGANTGQLFF

SEQ ID NO: 343785 - protein, 13 aa, Homo sapiens
  CDR3 for alpha chain variable domain of TCR clone 171893 (TRAV1-2, TRAJ9)
CAALNTGGFKTIF

SEQ ID NO: 343786 - protein, 16 aa, Homo sapiens
  CDR3 for beta chain variable domain of TCR clone 171893 (TRBV28, TRBJ2-2)
CASSLEGGSNAGELFF

SEQ ID NO: 343787 - protein, 12 aa, Homo sapiens
  CDR3 for alpha chain variable domain of TCR clone 171894 (TRAV16, TRAJ27)
CALNHQCRQINI

SEQ ID NO: 343788 - protein, 14 aa, Homo sapiens
  CDR3 for beta chain variable domain of TCR clone 171894 (TRBV11-2, TRBJ1-5)
CASSLDRGRQPQHF

SEQ ID NO: 343789 - protein, 14 aa, Homo sapiens
  CDR3 for alpha chain variable domain of TCR clone 171895 (TRAV30, TRAJ26)
CGTEIVSYGQNFVF

SEQ ID NO: 343790 - protein, 13 aa, Homo sapiens
  CDR3 for beta chain variable domain of TCR clone 171895 (TRBV24-1, TRBJ2-2)
CATSDWFTGELFF

SEQ ID NO: 343791 - protein, 16 aa, Homo sapiens
  CDR3 for alpha chain variable domain of TCR clone 171896 (TRAV3, TRAJ10)
CAVRDMRAGGGNKLTF

SEQ ID NO: 343792 - protein, 15 aa, Homo sapiens
  CDR3 for beta chain variable domain of TCR clone 171896 (TRBV7-9, TRBJ1-4)
CASSRTGGFNEKLFF

SEQ ID NO: 343793 - protein, 11 aa, Homo sapiens
  CDR3 for alpha chain variable domain of TCR clone 171897 (TRAV2, TRAJ33)
CAVESNYQLIW

SEQ ID NO: 343794 - protein, 15 aa, Homo sapiens
  CDR3 for beta chain variable domain of TCR clone 171897 (TRBV19, TRBJ1-1)
CANTSGQIQNTGAFF

SEQ ID NO: 343795 - protein, 17 aa, Homo sapiens
  CDR3 for alpha chain variable domain of TCR clone 171898 (TRAV3, TRAJ6)
CVVRDGPRAGGSYIPTF

SEQ ID NO: 343796 - protein, 14 aa, Homo sapiens
  CDR3 for beta chain variable domain of TCR clone 171898 (TRBV7-2, TRBJ2-7)
CARSPKTSFYEQYF

SEQ ID NO: 343797 - protein, 16 aa, Homo sapiens
  CDR3 for alpha chain variable domain of TCR clone 171899 (TRAV30, TRAJ24)
CGTEIVDADSWGKFQF

SEQ ID NO: 343798 - protein, 14 aa, Homo sapiens
  CDR3 for beta chain variable domain of TCR clone 171899 (TRBV28, TRBJ1-5)
CASSGQALYQPQHF

SEQ ID NO: 343799 - protein, 14 aa, Homo sapiens
  CDR3 for alpha chain variable domain of TCR clone 171900 (TRAV12-3, TRAJ29)
CAMSFYSGNTPLVF

SEQ ID NO: 343800 - protein, 14 aa, Homo sapiens
  CDR3 for beta chain variable domain of TCR clone 171900 (TRBV19, TRBJ2-1)
CASPTCVLSGEQFF

SEQ ID NO: 343801 - protein, 18 aa, Homo sapiens
  CDR3 for alpha chain variable domain of TCR clone 171901 (TRAV12-3, TRAJ52)
CAMSRTNAGGTSYGKLTF

SEQ ID NO: 343802 - protein, 13 aa, Homo sapiens
  CDR3 for beta chain variable domain of TCR clone 171901 (TRBV12-4, TRBJ2-7)
CASSPTETYEQYF

SEQ ID NO: 343803 - protein, 23 aa, Homo sapiens
  CDR3 for alpha chain variable domain of TCR clone 171902 (TRAV12-2, TRAJ43)
SLLIRDSQPSDSATYLCAFDMRF

SEQ ID NO: 343804 - protein, 17 aa, Homo sapiens
  CDR3 for beta chain variable domain of TCR clone 171902 (TRBV13, TRBJ2-3)
CASSPSRVAGGRNTQYF

SEQ ID NO: 343805 - protein, 12 aa, Homo sapiens
  CDR3 for alpha chain variable domain of TCR clone 171903 (TRAV13-2, TRAJ8)
CAERTGFQKLVF

SEQ ID NO: 343806 - protein, 19 aa, Homo sapiens
  CDR3 for beta chain variable domain of TCR clone 171903 (TRBV28, TRBJ2-4)
CASSFQPGGPAHSKNIQYF

SEQ ID NO: 343807 - protein, 17 aa, Homo sapiens
  CDR3 for alpha chain variable domain of TCR clone 171904 (TRAV3, TRAJ42)
CAVRDRAYGGSQGNLIF

SEQ ID NO: 343808 - protein, 15 aa, Homo sapiens
  CDR3 for beta chain variable domain of TCR clone 171904 (TRBV6-5, TRBJ2-1)
CASSYDAGAGNEQFF

SEQ ID NO: 343809 - protein, 14 aa, Homo sapiens
  CDR3 for alpha chain variable domain of TCR clone 171905 (TRAV8-3, TRAJ47)
CAVGAQGYGNKLVF

SEQ ID NO: 343810 - protein, 15 aa, Homo sapiens
  CDR3 for beta chain variable domain of TCR clone 171905 (TRBV20-1, TRBJ2-7)
CSARDRVSGMDEQYF

SEQ ID NO: 343811 - protein, 14 aa, Homo sapiens
  CDR3 for alpha chain variable domain of TCR clone 171906 (TRAV25, TRAJ12)
CAGCDMDSSYKLIF

SEQ ID NO: 343812 - protein, 12 aa, Homo sapiens
  CDR3 for beta chain variable domain of TCR clone 171906 (TRBV7-2, TRBJ1-5)
CASSLWSQPQHF

SEQ ID NO: 343813 - protein, 13 aa, Homo sapiens
  CDR3 for alpha chain variable domain of TCR clone 171907 (TRAV1-1, TRAJ9)
CAAKNTGGFKTIF

SEQ ID NO: 343814 - protein, 16 aa, Homo sapiens
  CDR3 for beta chain variable domain of TCR clone 171907 (TRBV19, TRBJ1-1)
CASSPTRFWPGTEAFF

SEQ ID NO: 343815 - protein, 15 aa, Homo sapiens
  CDR3 for alpha chain variable domain of TCR clone 171908 (TRAV26-1, TRAJ22)
CIVRVSFWLCKATDL

SEQ ID NO: 343816 - protein, 14 aa, Homo sapiens
  CDR3 for beta chain variable domain of TCR clone 171908 (TRBV11-2, TRBJ2-5)
CASRPLAGRETQYF

SEQ ID NO: 343817 - protein, 14 aa, Homo sapiens
  CDR3 for alpha chain variable domain of TCR clone 171909 (TRAV12-1, TRAJ17)
CVVNYKAAGNKLTI

SEQ ID NO: 343818 - protein, 17 aa, Homo sapiens
  CDR3 for beta chain variable domain of TCR clone 171909 (TRBV11-2, TRBJ2-1)
CASSLYPPGVEYNEQFF

SEQ ID NO: 343819 - protein, 14 aa, Homo sapiens
  CDR3 for alpha chain variable domain of TCR clone 171910 (TRAV12-3, TRAJ10)
SHLPLTGGGNILTF

SEQ ID NO: 343820 - protein, 12 aa, Homo sapiens
  CDR3 for beta chain variable domain of TCR clone 171910 (TRBV7-9, TRBJ2-7)
CATRTDAYEQYF

SEQ ID NO: 343821 - protein, 16 aa, Homo sapiens
  CDR3 for alpha chain variable domain of TCR clone 171911 (TRAV26-1, TRAJ36)
CIVRVPDQTGANNLFF

SEQ ID NO: 343822 - protein, 11 aa, Homo sapiens
  CDR3 for beta chain variable domain of TCR clone 171911 (TRBV11-2, TRBJ1-1)
CASSINTEAFF

SEQ ID NO: 343823 - protein, 13 aa, Homo sapiens
  CDR3 for alpha chain variable domain of TCR clone 171912 (TRAV27, TRAJ41)
CAGEGNSGYALNF

SEQ ID NO: 343824 - protein, 15 aa, Homo sapiens
  CDR3 for beta chain variable domain of TCR clone 171912 (TRBV6-3, TRBJ2-7)
CASSSPGTVFYEQYC

SEQ ID NO: 343825 - protein, 14 aa, Homo sapiens
  CDR3 for alpha chain variable domain of TCR clone 171913 (TRAV1-2, TRAJ8)
CAVREYTGFQKLVF

SEQ ID NO: 343826 - protein, 14 aa, Homo sapiens
  CDR3 for beta chain variable domain of TCR clone 171913 (TRBV11-2, TRBJ2-3)
CASSRLARTDTQYF

SEQ ID NO: 343827 - protein, 14 aa, Homo sapiens
  CDR3 for alpha chain variable domain of TCR clone 171914 (TRAV12-2, TRAJ13)
CAVKKTGGYQKVTF

SEQ ID NO: 343828 - protein, 16 aa, Homo sapiens
  CDR3 for beta chain variable domain of TCR clone 171914 (TRBV27, TRBJ2-5)
CASSFGPGGTKETQYF

SEQ ID NO: 343829 - protein, 13 aa, Homo sapiens
  CDR3 for alpha chain variable domain of TCR clone 171915 (TRAV1-2, TRAJ9)
CAALNTGGFKTIF

SEQ ID NO: 343830 - protein, 15 aa, Homo sapiens
  CDR3 for beta chain variable domain of TCR clone 171915 (TRBV4-1, TRBJ2-3)
CASSRGQGIPDTQYF

SEQ ID NO: 343831 - protein, 10 aa, Homo sapiens
  CDR3 for alpha chain variable domain of TCR clone 171916 (TRAV23/DV6, TRAJ57)
CAASSTLSQG

SEQ ID NO: 343832 - protein, 14 aa, Homo sapiens
  CDR3 for beta chain variable domain of TCR clone 171916 (TRBV20-1, TRBJ2-3)
CSARGGTSTDTQYF

SEQ ID NO: 343833 - protein, 13 aa, Homo sapiens
  CDR3 for alpha chain variable domain of TCR clone 171917 (TRAV8-3, TRAJ36)
CAVGATGANNLFF

SEQ ID NO: 343834 - protein, 14 aa, Homo sapiens
  CDR3 for beta chain variable domain of TCR clone 171917 (TRBV4-1, TRBJ2-7)
CASSPVAGGDEQYF

SEQ ID NO: 343835 - protein, 13 aa, Homo sapiens
  CDR3 for alpha chain variable domain of TCR clone 171918 (TRAV35, TRAJ42)
CAGFPGSHGNLIF

SEQ ID NO: 343836 - protein, 14 aa, Homo sapiens
  CDR3 for beta chain variable domain of TCR clone 171918 (TRBV29-1, TRBJ2-2)
CSVLAETNTGELFF

SEQ ID NO: 343837 - protein, 15 aa, Homo sapiens
  CDR3 for alpha chain variable domain of TCR clone 171919 (TRAV38-1, TRAJ37)
CAFIHGSGNTGKLIL

SEQ ID NO: 343838 - protein, 14 aa, Homo sapiens
  CDR3 for beta chain variable domain of TCR clone 171919 (TRBV29-1, TRBJ2-7)
CSVETSGSGETQYF

SEQ ID NO: 343839 - protein, 14 aa, Homo sapiens
  CDR3 for alpha chain variable domain of TCR clone 171920 (TRAV16, TRAJ15)
CALSFNQAGTALIF

SEQ ID NO: 343840 - protein, 16 aa, Homo sapiens
  CDR3 for beta chain variable domain of TCR clone 171920 (TRBV9, TRBJ2-7)
CASSAGPDRSPYEQFF

SEQ ID NO: 343841 - protein, 14 aa, Homo sapiens
  CDR3 for alpha chain variable domain of TCR clone 171921 (TRAV38-1, TRAJ29)
CAFITPSGNTPLVF

SEQ ID NO: 343842 - protein, 14 aa, Homo sapiens
  CDR3 for beta chain variable domain of TCR clone 171921 (TRBV18, TRBJ2-7)
CASSPRGGAYERYF

SEQ ID NO: 343843 - protein, 12 aa, Homo sapiens
  CDR3 for alpha chain variable domain of TCR clone 171922 (TRAV21, TRAJ42)
CAVGGSQGNLIF

SEQ ID NO: 343844 - protein, 19 aa, Homo sapiens
  CDR3 for beta chain variable domain of TCR clone 171922 (TRBV5-1, TRBJ2-3)
CASSFTRIAADWSTDTQYF

SEQ ID NO: 343845 - protein, 13 aa, Homo sapiens
  CDR3 for alpha chain variable domain of TCR clone 171923 (TRAV36/DV7, TRAJ21)
CAVEAYNFNKFYF

SEQ ID NO: 343846 - protein, 13 aa, Homo sapiens
  CDR3 for beta chain variable domain of TCR clone 171923 (TRBV24-1, TRBJ2-1)
CATSAGPYNEQFF

SEQ ID NO: 343847 - protein, 15 aa, Homo sapiens
  CDR3 for alpha chain variable domain of TCR clone 171924 (TRAV23/DV6, TRAJ18)
CAPRYRGSTLGRLYF

SEQ ID NO: 343848 - protein, 13 aa, Homo sapiens
  CDR3 for beta chain variable domain of TCR clone 171924 (TRBV7-2, TRBJ2-7)
CASSSPSGSEQYF

SEQ ID NO: 343849 - protein, 12 aa, Homo sapiens
  CDR3 for alpha chain variable domain of TCR clone 171925 (TRAV3, TRAJ20)
CAVRDPDYKLSF

SEQ ID NO: 343850 - protein, 14 aa, Homo sapiens
  CDR3 for beta chain variable domain of TCR clone 171925 (TRBV11-1, TRBJ2-7)
CASSSTGEGYEQYF

SEQ ID NO: 343851 - protein, 13 aa, Homo sapiens
  CDR3 for alpha chain variable domain of TCR clone 171926 (TRAV30, TRAJ39)
CGTEKNAGNMLTF

SEQ ID NO: 343852 - protein, 13 aa, Homo sapiens
  CDR3 for beta chain variable domain of TCR clone 171926 (TRBV15, TRBJ2-7)
CATSTTGHYEQYF

SEQ ID NO: 343853 - protein, 16 aa, Homo sapiens
  CDR3 for alpha chain variable domain of TCR clone 171927 (TRAV16, TRAJ52)
CAISAAGGTSYGKLTF

SEQ ID NO: 343854 - protein, 16 aa, Homo sapiens
  CDR3 for beta chain variable domain of TCR clone 171927 (TRBV12-4, TRBJ1-5)
CASSRPVGGSNQPQHF

SEQ ID NO: 343855 - protein, 14 aa, Homo sapiens
  CDR3 for alpha chain variable domain of TCR clone 171928 (TRAV12-2, TRAJ44)
CAVNPAGTTSKLTF

SEQ ID NO: 343856 - protein, 15 aa, Homo sapiens
  CDR3 for beta chain variable domain of TCR clone 171928 (TRBV19, TRBJ2-7)
CASSPAGSGEALRYF

SEQ ID NO: 343857 - protein, 13 aa, Homo sapiens
  CDR3 for alpha chain variable domain of TCR clone 171929 (TRAV1-2, TRAJ9)
CAALNTGGFNTIF

SEQ ID NO: 343858 - protein, 16 aa, Homo sapiens
  CDR3 for beta chain variable domain of TCR clone 171929 (TRBV28, TRBJ2-2)
CASSLEGGSNTGELFF

SEQ ID NO: 343859 - protein, 11 aa, Homo sapiens
  CDR3 for alpha chain variable domain of TCR clone 171930 (TRAV1-2, TRAJ20)
CAVANAYKLSF

SEQ ID NO: 343860 - protein, 15 aa, Homo sapiens
  CDR3 for beta chain variable domain of TCR clone 171930 (TRBV2, TRBJ2-1)
CASSELAGSYNEQFF

SEQ ID NO: 343861 - protein, 12 aa, Homo sapiens
  CDR3 for alpha chain variable domain of TCR clone 171931 (TRAV1-2, TRAJ24)
CAVGGSWGKFPF

SEQ ID NO: 343862 - protein, 13 aa, Homo sapiens
  CDR3 for beta chain variable domain of TCR clone 171931 (TRBV12-4, TRBJ1-2)
CASSLRQGKGYTF

SEQ ID NO: 343863 - protein, 12 aa, Homo sapiens
  CDR3 for alpha chain variable domain of TCR clone 171932 (TRAV12-3, TRAJ17)
CAMTLTGNKLTF

SEQ ID NO: 343864 - protein, 20 aa, Homo sapiens
  CDR3 for beta chain variable domain of TCR clone 171932 (TRBV7-8, TRBJ2-2)
CDSSHLFPGPTIHITGELFF

SEQ ID NO: 343865 - protein, 14 aa, Homo sapiens
  CDR3 for alpha chain variable domain of TCR clone 171933 (TRAV2, TRAJ37)
CAVDFTSSTGKLIF

SEQ ID NO: 343866 - protein, 15 aa, Homo sapiens
  CDR3 for beta chain variable domain of TCR clone 171933 (TRBV20-1, TRBJ1-1)
CSASRGVTGNTEAVF

SEQ ID NO: 343867 - protein, 18 aa, Homo sapiens
  CDR3 for alpha chain variable domain of TCR clone 171934 (TRAV12-2, )
CAVEDIQNPDPAVYQLRD

SEQ ID NO: 343868 - protein, 14 aa, Homo sapiens
  CDR3 for beta chain variable domain of TCR clone 171934 (TRBV7-3, TRBJ2-2)
CASSLNSNTGELFF

SEQ ID NO: 343869 - protein, 14 aa, Homo sapiens
  CDR3 for alpha chain variable domain of TCR clone 171935 (TRAV36/DV7, TRAJ37)
CAVVVWSNTGKLIF

SEQ ID NO: 343870 - protein, 15 aa, Homo sapiens
  CDR3 for beta chain variable domain of TCR clone 171935 (TRBV7-2, TRBJ2-2)
CASIRPGQNTGELFF

SEQ ID NO: 343871 - protein, 13 aa, Homo sapiens
  CDR3 for alpha chain variable domain of TCR clone 171936 (TRAV1-2, TRAJ31)
CAVRPNNNARLMF

SEQ ID NO: 343872 - protein, 14 aa, Homo sapiens
  CDR3 for beta chain variable domain of TCR clone 171936 (TRBV11-2, TRBJ2-1)
CASSLSGPYSEQFF

SEQ ID NO: 343873 - protein, 16 aa, Homo sapiens
  CDR3 for alpha chain variable domain of TCR clone 171937 (TRAV12-3, TRAJ53)
CAMSPGSGGSNYKLTF

SEQ ID NO: 343874 - protein, 16 aa, Homo sapiens
  CDR3 for beta chain variable domain of TCR clone 171937 (TRBV4-1, TRBJ1-4)
CASSQDLRRGGEKLFF

SEQ ID NO: 343875 - protein, 13 aa, Homo sapiens
  CDR3 for alpha chain variable domain of TCR clone 171938 (TRAV8-2, TRAJ47)
CVASEREGNKLVF

SEQ ID NO: 343876 - protein, 16 aa, Homo sapiens
  CDR3 for beta chain variable domain of TCR clone 171938 (TRBV5-1, TRBJ1-1)
CASSKTGTEVGTEAFF

SEQ ID NO: 343877 - protein, 11 aa, Homo sapiens
  CDR3 for alpha chain variable domain of TCR clone 171939 (TRAV35, TRAJ30)
CAPGGDDKIIF

SEQ ID NO: 343878 - protein, 17 aa, Homo sapiens
  CDR3 for beta chain variable domain of TCR clone 171939 (TRBV9, TRBJ1-6)
CASSVAGTGDSPLHLGT

SEQ ID NO: 343879 - protein, 15 aa, Homo sapiens
  CDR3 for alpha chain variable domain of TCR clone 171940 (TRAV3, TRAJ17)
CAVRDTGAAGNNLTF

SEQ ID NO: 343880 - protein, 14 aa, Homo sapiens
  CDR3 for beta chain variable domain of TCR clone 171940 (TRBV6-3, TRBJ1-1)
CASSNLLPGAEAFF

SEQ ID NO: 343881 - protein, 14 aa, Homo sapiens
  CDR3 for alpha chain variable domain of TCR clone 171941 (TRAV1-2, TRAJ16)
CAVNRFSDGQKLRF

SEQ ID NO: 343882 - protein, 13 aa, Homo sapiens
  CDR3 for beta chain variable domain of TCR clone 171941 (TRBV18, TRBJ2-5)
CASSPAGKETQYF

SEQ ID NO: 343883 - protein, 11 aa, Homo sapiens
  CDR3 for alpha chain variable domain of TCR clone 171942 (TRAV2, TRAJ33)
CAVDSNYQLIG

SEQ ID NO: 343884 - protein, 15 aa, Homo sapiens
  CDR3 for beta chain variable domain of TCR clone 171942 (TRBV19, TRBJ1-1)
CASTSGQIQNTEAFF

SEQ ID NO: 343885 - protein, 15 aa, Homo sapiens
  CDR3 for alpha chain variable domain of TCR clone 171943 (TRAV3, TRAJ47)
CAVRDIGEYGNKLVF

SEQ ID NO: 343886 - protein, 17 aa, Homo sapiens
  CDR3 for beta chain variable domain of TCR clone 171943 (TRBV7-9, TRBJ2-5)
CASSPGLAGGGREPQYF

SEQ ID NO: 343887 - protein, 11 aa, Homo sapiens
  CDR3 for alpha chain variable domain of TCR clone 171944 (TRAV13-2, TRAJ54)
CAESGSGSPEA

SEQ ID NO: 343888 - protein, 16 aa, Homo sapiens
  CDR3 for beta chain variable domain of TCR clone 171944 (TRBV7-3, TRBJ2-2)
CASSLKRGTLSGELFF

SEQ ID NO: 343889 - protein, 14 aa, Homo sapiens
  CDR3 for alpha chain variable domain of TCR clone 171945 (TRAV13-1, TRAJ40)
CAASMTSATYKYIF

SEQ ID NO: 343890 - protein, 15 aa, Homo sapiens
  CDR3 for beta chain variable domain of TCR clone 171945 (TRBV7-3, TRBJ2-1)
CASSPTGGGEVEQFF

SEQ ID NO: 343891 - protein, 16 aa, Homo sapiens
  CDR3 for alpha chain variable domain of TCR clone 171946 (TRAV3, TRAJ37)
CAVRGKGSGNTGKLIF

SEQ ID NO: 343892 - protein, 15 aa, Homo sapiens
  CDR3 for beta chain variable domain of TCR clone 171946 (TRBV20-1, TRBJ2-7)
CSARVPAAYFYEQYF

SEQ ID NO: 343893 - protein, 13 aa, Homo sapiens
  CDR3 for alpha chain variable domain of TCR clone 171947 (TRAV35, TRAJ43)
CAGYPYNNNDMCF

SEQ ID NO: 343894 - protein, 15 aa, Homo sapiens
  CDR3 for beta chain variable domain of TCR clone 171947 (TRBV25-1, TRBJ1-4)
CASSKRIATNEKLFF

SEQ ID NO: 343895 - protein, 17 aa, Homo sapiens
  CDR3 for alpha chain variable domain of TCR clone 171948 (TRAV3, TRAJ42)
CAVRRLAEAKEIPSLEK

SEQ ID NO: 343896 - protein, 14 aa, Homo sapiens
  CDR3 for beta chain variable domain of TCR clone 171948 (TRBV19, TRBJ2-5)
CASSSSGIQETQYF

SEQ ID NO: 343897 - protein, 16 aa, Homo sapiens
  CDR3 for alpha chain variable domain of TCR clone 171949 (TRAV1-1, TRAJ29)
CAVRSTRNSGNTPPVF

SEQ ID NO: 343898 - protein, 15 aa, Homo sapiens
  CDR3 for beta chain variable domain of TCR clone 171949 (TRBV27, TRBJ1-1)
CSSSRGRTGYTEAFF

SEQ ID NO: 343899 - protein, 17 aa, Homo sapiens
  CDR3 for alpha chain variable domain of TCR clone 171950 (TRAV23/DV6, TRAJ12)
CAAIDLGAMDSSYKLIF

SEQ ID NO: 343900 - protein, 13 aa, Homo sapiens
  CDR3 for beta chain variable domain of TCR clone 171950 (TRBV5-8, TRBJ1-2)
CASSLGGNYGYTF

SEQ ID NO: 343901 - protein, 13 aa, Homo sapiens
  CDR3 for alpha chain variable domain of TCR clone 171951 (TRAV21, TRAJ27)
CAARHGNAGKSTF

SEQ ID NO: 343902 - protein, 14 aa, Homo sapiens
  CDR3 for beta chain variable domain of TCR clone 171951 (TRBV7-6, TRBJ2-3)
CASSIGTVTDTQYF

SEQ ID NO: 343903 - protein, 14 aa, Homo sapiens
  CDR3 for alpha chain variable domain of TCR clone 171952 (TRAV35, TRAJ10)
CAGILTGGGNKLTF

SEQ ID NO: 343904 - protein, 16 aa, Homo sapiens
  CDR3 for beta chain variable domain of TCR clone 171952 (TRBV12-5, TRBJ2-5)
CASGPRTSGHQETQYF

SEQ ID NO: 343905 - protein, 14 aa, Homo sapiens
  CDR3 for alpha chain variable domain of TCR clone 171953 (TRAV2, TRAJ29)
CAGPFQYGNTPLVF

SEQ ID NO: 343906 - protein, 18 aa, Homo sapiens
  CDR3 for beta chain variable domain of TCR clone 171953 (TRBV11-2, TRBJ2-3)
CASSLGGASRGAPNTQYF

SEQ ID NO: 343907 - protein, 18 aa, Homo sapiens
  CDR3 for alpha chain variable domain of TCR clone 171954 (TRAV26-2, TRAJ45)
CILRVDKYSGGGADGLTF

SEQ ID NO: 343908 - protein, 16 aa, Homo sapiens
  CDR3 for beta chain variable domain of TCR clone 171954 (TRBV7-9, TRBJ1-2)
CASSLGFSSGEDGYTF

SEQ ID NO: 343909 - protein, 15 aa, Homo sapiens
  CDR3 for alpha chain variable domain of TCR clone 171955 (TRAV2, TRAJ9)
CAVEDRGTGGFKTIF

SEQ ID NO: 343910 - protein, 14 aa, Homo sapiens
  CDR3 for beta chain variable domain of TCR clone 171955 (TRBV12-4, TRBJ1-1)
CASRQGQEYTEAFF

SEQ ID NO: 343911 - protein, 15 aa, Homo sapiens
  CDR3 for alpha chain variable domain of TCR clone 171956 (TRAV35, TRAJ41)
CAGQLFSNSGNALNF

SEQ ID NO: 343912 - protein, 14 aa, Homo sapiens
  CDR3 for beta chain variable domain of TCR clone 171956 (TRBV7-2, TRBJ1-2)
CASSRGGTNYGYTF

SEQ ID NO: 343913 - protein, 12 aa, Homo sapiens
  CDR3 for alpha chain variable domain of TCR clone 171957 (TRAV13-1, TRAJ27)
CAAHTNAGKSTF

SEQ ID NO: 343914 - protein, 11 aa, Homo sapiens
  CDR3 for beta chain variable domain of TCR clone 171957 (TRBV12-4, TRBJ2-3)
CASTATDTQYF

SEQ ID NO: 343915 - protein, 14 aa, Homo sapiens
  CDR3 for alpha chain variable domain of TCR clone 171958 (TRAV4, TRAJ10)
CLVGDTGGGNKLIF

SEQ ID NO: 343916 - protein, 13 aa, Homo sapiens
  CDR3 for beta chain variable domain of TCR clone 171958 (TRBV10-2, TRBJ2-5)
CASSVGPQETQCF

SEQ ID NO: 343917 - protein, 12 aa, Homo sapiens
  CDR3 for alpha chain variable domain of TCR clone 171959 (TRAV13-1, TRAJ15)
CAASKAGTARIF

SEQ ID NO: 343918 - protein, 15 aa, Homo sapiens
  CDR3 for beta chain variable domain of TCR clone 171959 (TRBV11-3, TRBJ2-3)
CASLKDGREGDTQYF

SEQ ID NO: 343919 - protein, 13 aa, Homo sapiens
  CDR3 for alpha chain variable domain of TCR clone 171960 (TRAV3, TRAJ21)
CAVREPYFNKFYF

SEQ ID NO: 343920 - protein, 14 aa, Homo sapiens
  CDR3 for beta chain variable domain of TCR clone 171960 (TRBV4-2, TRBJ2-1)
CASGLDRAYNEQFF

SEQ ID NO: 343921 - protein, 12 aa, Homo sapiens
  CDR3 for alpha chain variable domain of TCR clone 171961 (TRAV12-3, TRAJ20)
CAMVRGDYKLSF

SEQ ID NO: 343922 - protein, 16 aa, Homo sapiens
  CDR3 for beta chain variable domain of TCR clone 171961 (TRBV28, TRBJ2-1)
CASSSPEYPRDNEQFF

SEQ ID NO: 343923 - protein, 15 aa, Homo sapiens
  CDR3 for alpha chain variable domain of TCR clone 171962 (TRAV3, TRAJ20)
CAVRDIKLSDYKLSF

SEQ ID NO: 343924 - protein, 20 aa, Homo sapiens
  CDR3 for beta chain variable domain of TCR clone 171962 (TRBV7-8, TRBJ2-2)
CASSHLFPGPTIHITGELFF

SEQ ID NO: 343925 - protein, 14 aa, Homo sapiens
  CDR3 for alpha chain variable domain of TCR clone 171963 (TRAV13-1, TRAJ13)
CAASRVGGYKNVTF

SEQ ID NO: 343926 - protein, 17 aa, Homo sapiens
  CDR3 for beta chain variable domain of TCR clone 171963 (TRBV15, TRBJ1-5)
CATSRAPPGTRNQPQHF

SEQ ID NO: 343927 - protein, 12 aa, Homo sapiens
  CDR3 for alpha chain variable domain of TCR clone 171964 (TRAV1-2, TRAJ26)
CAVRYYGQNFVF

SEQ ID NO: 343928 - protein, 14 aa, Homo sapiens
  CDR3 for beta chain variable domain of TCR clone 171964 (TRBV11-1, TRBJ2-7)
SASSFRQGSYEQYF

SEQ ID NO: 343929 - protein, 14 aa, Homo sapiens
  CDR3 for alpha chain variable domain of TCR clone 171965 (TRAV12-1, TRAJ9)
CVVNRRTGGFKTIF

SEQ ID NO: 343930 - protein, 17 aa, Homo sapiens
  CDR3 for beta chain variable domain of TCR clone 171965 (TRBV11-2, TRBJ2-1)
CASSLYPPGVEYNEQFF

SEQ ID NO: 343931 - protein, 16 aa, Homo sapiens
  CDR3 for alpha chain variable domain of TCR clone 171966 (TRAV3, TRAJ37)
CAVRPHGSGNTGKLII

SEQ ID NO: 343932 - protein, 16 aa, Homo sapiens
  CDR3 for beta chain variable domain of TCR clone 171966 (TRBV28, TRBJ2-7)
CASSLFFETGGPEQYF

SEQ ID NO: 343933 - protein, 13 aa, Homo sapiens
  CDR3 for alpha chain variable domain of TCR clone 171967 (TRAV17, TRAJ26)
CATVDNYGQNFVF

SEQ ID NO: 343934 - protein, 14 aa, Homo sapiens
  CDR3 for beta chain variable domain of TCR clone 171967 (TRBV6-1, TRBJ1-3)
CPSVQGGGGNTIYF

SEQ ID NO: 343935 - protein, 13 aa, Homo sapiens
  CDR3 for alpha chain variable domain of TCR clone 171968 (TRAV20, TRAJ37)
CAGCSSNTGKLIF

SEQ ID NO: 343936 - protein, 10 aa, Homo sapiens
  CDR3 for beta chain variable domain of TCR clone 171968 (TRBV4-2, TRBJ2-3)
CASSTRYALF

SEQ ID NO: 343937 - protein, 18 aa, Homo sapiens
  CDR3 for alpha chain variable domain of TCR clone 171969 (TRAV13-1, TRAJ52)
CVVKNPNAGGTSYGKLTF

SEQ ID NO: 343938 - protein, 15 aa, Homo sapiens
  CDR3 for beta chain variable domain of TCR clone 171969 (TRBV7-9, TRBJ1-2)
CASSLDREPNYGYTF

SEQ ID NO: 343939 - protein, 17 aa, Homo sapiens
  CDR3 for alpha chain variable domain of TCR clone 171970 (TRAV3, TRAJ42)
CAVRDRDYGGSQGNHIF

SEQ ID NO: 343940 - protein, 14 aa, Homo sapiens
  CDR3 for beta chain variable domain of TCR clone 171970 (TRBV19, TRBJ2-5)
CASSMTGQQETQYF

SEQ ID NO: 343941 - protein, 16 aa, Homo sapiens
  CDR3 for alpha chain variable domain of TCR clone 171971 (TRAV1-2, TRAJ10)
CALRGVLTGGGNKLPF

SEQ ID NO: 343942 - protein, 12 aa, Homo sapiens
  CDR3 for beta chain variable domain of TCR clone 171971 (TRBV7-8, TRBJ2-7)
CASSLGDREQYF

SEQ ID NO: 343943 - protein, 14 aa, Homo sapiens
  CDR3 for alpha chain variable domain of TCR clone 171972 (TRAV12-2, TRAJ45)
CAVNKGGGADGLTF

SEQ ID NO: 343944 - protein, 19 aa, Homo sapiens
  CDR3 for beta chain variable domain of TCR clone 171972 (TRBV7-2, TRBJ2-3)
CASSLVLSAYVSRPDTQYF

SEQ ID NO: 343945 - protein, 15 aa, Homo sapiens
  CDR3 for alpha chain variable domain of TCR clone 171973 (TRAV26-1, TRAJ22)
CIAGVSFWFCKATDL

SEQ ID NO: 343946 - protein, 13 aa, Homo sapiens
  CDR3 for beta chain variable domain of TCR clone 171973 (TRBV7-9, TRBJ1-2)
CASSLKQNYGYTF

SEQ ID NO: 343947 - protein, 14 aa, Homo sapiens
  CDR3 for alpha chain variable domain of TCR clone 171974 (TRAV2, TRAJ37)
CAVDFTSNTGKLIV

SEQ ID NO: 343948 - protein, 14 aa, Homo sapiens
  CDR3 for beta chain variable domain of TCR clone 171974 (TRBV7-7, TRBJ2-7)
CASSLGRGVGEQYF

SEQ ID NO: 343949 - protein, 11 aa, Homo sapiens
  CDR3 for alpha chain variable domain of TCR clone 171975 (TRAV25, TRAJ47)
CAGLYGNKLFF

SEQ ID NO: 343950 - protein, 14 aa, Homo sapiens
  CDR3 for beta chain variable domain of TCR clone 171975 (TRBV19, TRBJ2-1)
CASKEGVQVNEQFF

SEQ ID NO: 343951 - protein, 13 aa, Homo sapiens
  CDR3 for alpha chain variable domain of TCR clone 171976 (TRAV1-2, TRAJ20)
CAVRDGNDYKLSF

SEQ ID NO: 343952 - protein, 14 aa, Homo sapiens
  CDR3 for beta chain variable domain of TCR clone 171976 (TRBV7-2, TRBJ2-3)
CQELRGGGRDTQYF

SEQ ID NO: 343953 - protein, 15 aa, Homo sapiens
  CDR3 for alpha chain variable domain of TCR clone 171977 (TRAV26-2, TRAJ21)
CILSNTTSTNFTLDL

SEQ ID NO: 343954 - protein, 15 aa, Homo sapiens
  CDR3 for beta chain variable domain of TCR clone 171977 (TRBV19, TRBJ1-2)
CASSVGQVLNYGYTI

SEQ ID NO: 343955 - protein, 13 aa, Homo sapiens
  CDR3 for alpha chain variable domain of TCR clone 171978 (TRAV38-1, TRAJ42)
CARWGGSQGNLIF

SEQ ID NO: 343956 - protein, 17 aa, Homo sapiens
  CDR3 for beta chain variable domain of TCR clone 171978 (TRBV20-1, TRBJ2-1)
CSASDPLAGVWYNEQFF

SEQ ID NO: 343957 - protein, 14 aa, Homo sapiens
  CDR3 for alpha chain variable domain of TCR clone 171979 (TRAV13-1, TRAJ21)
CAARGVYNFNKFYF

SEQ ID NO: 343958 - protein, 14 aa, Homo sapiens
  CDR3 for beta chain variable domain of TCR clone 171979 (TRBV7-8, TRBJ2-5)
CASSDTGGQETQYF

SEQ ID NO: 343959 - protein, 14 aa, Homo sapiens
  CDR3 for alpha chain variable domain of TCR clone 171980 (TRAV17, TRAJ39)
CATDPVRAGNMLTF

SEQ ID NO: 343960 - protein, 15 aa, Homo sapiens
  CDR3 for beta chain variable domain of TCR clone 171980 (TRBV5-1, TRBJ2-6)
CASSLDPSGANVLTF

SEQ ID NO: 343961 - protein, 15 aa, Homo sapiens
  CDR3 for alpha chain variable domain of TCR clone 171981 (TRAV12-3, TRAJ27)
CAMRAYNTNAGTSTF

SEQ ID NO: 343962 - protein, 13 aa, Homo sapiens
  CDR3 for beta chain variable domain of TCR clone 171981 (TRBV11-2, TRBJ2-5)
CASSRGPSETQYF

SEQ ID NO: 343963 - protein, 12 aa, Homo sapiens
  CDR3 for alpha chain variable domain of TCR clone 171982 (TRAV12-3, TRAJ17)
CAMTLTGNKLTF

SEQ ID NO: 343964 - protein, 15 aa, Homo sapiens
  CDR3 for beta chain variable domain of TCR clone 171982 (TRBV11-3, TRBJ2-3)
YASMKDGREGDTQYF

SEQ ID NO: 343965 - protein, 15 aa, Homo sapiens
  CDR3 for alpha chain variable domain of TCR clone 171983 (TRAV8-3, TRAJ48)
CAVGFINFGNEKLTF

SEQ ID NO: 343966 - protein, 14 aa, Homo sapiens
  CDR3 for beta chain variable domain of TCR clone 171983 (TRBV6-1, TRBJ1-3)
CASVQGGGRNTIYF

SEQ ID NO: 343967 - protein, 14 aa, Homo sapiens
  CDR3 for alpha chain variable domain of TCR clone 171984 (TRAV23/DV6, TRAJ27)
CAASRDTNAGKSTF

SEQ ID NO: 343968 - protein, 15 aa, Homo sapiens
  CDR3 for beta chain variable domain of TCR clone 171984 (TRBV4-1, TRBJ1-6)
CASSAGQGYNSPLHF

SEQ ID NO: 343969 - protein, 14 aa, Homo sapiens
  CDR3 for alpha chain variable domain of TCR clone 171985 (TRAV35, TRAJ33)
CAGSSQDSNYQLIW

SEQ ID NO: 343970 - protein, 17 aa, Homo sapiens
  CDR3 for beta chain variable domain of TCR clone 171985 (TRBV7-9, TRBJ1-5)
CASSASQGGYSNQPQHF

SEQ ID NO: 343971 - protein, 12 aa, Homo sapiens
  CDR3 for alpha chain variable domain of TCR clone 171986 (TRAV2, TRAJ9)
CAVGAGGFKTIF

SEQ ID NO: 343972 - protein, 13 aa, Homo sapiens
  CDR3 for beta chain variable domain of TCR clone 171986 (TRBV7-3, TRBJ1-1)
CASSQDWGAESFF

SEQ ID NO: 343973 - protein, 19 aa, Homo sapiens
  CDR3 for alpha chain variable domain of TCR clone 171987 (TRAV12-3, TRAJ40)
SPVIQPPTSVQDRTYKYIF

SEQ ID NO: 343974 - protein, 16 aa, Homo sapiens
  CDR3 for beta chain variable domain of TCR clone 171987 (TRBV4-1, TRBJ1-4)
CASSRGGTASNEKLFF

SEQ ID NO: 343975 - protein, 11 aa, Homo sapiens
  CDR3 for alpha chain variable domain of TCR clone 171988 (TRAV12-1, TRAJ30)
CVVNGQDKIIF

SEQ ID NO: 343976 - protein, 15 aa, Homo sapiens
  CDR3 for beta chain variable domain of TCR clone 171988 (TRBV4-1, TRBJ2-7)
CASSQQGQGFDEQYF

SEQ ID NO: 343977 - protein, 13 aa, Homo sapiens
  CDR3 for alpha chain variable domain of TCR clone 171989 (TRAV1-1, TRAJ11)
CAVHSSPGSTLTL

SEQ ID NO: 343978 - protein, 14 aa, Homo sapiens
  CDR3 for beta chain variable domain of TCR clone 171989 (TRBV6-1, TRBJ2-7)
CASSEGGGQYEQYF

SEQ ID NO: 343979 - protein, 13 aa, Homo sapiens
  CDR3 for alpha chain variable domain of TCR clone 171990 (TRAV16, TRAJ28)
CALTGAGSYQMTF

SEQ ID NO: 343980 - protein, 16 aa, Homo sapiens
  CDR3 for beta chain variable domain of TCR clone 171990 (TRBV28, TRBJ1-5)
CASSLTGQGWNQPQHF

SEQ ID NO: 343981 - protein, 13 aa, Homo sapiens
  CDR3 for alpha chain variable domain of TCR clone 171991 (TRAV24, TRAJ37)
CAFSPGNTGKLIF

SEQ ID NO: 343982 - protein, 15 aa, Homo sapiens
  CDR3 for beta chain variable domain of TCR clone 171991 (TRBV7-6, TRBJ2-5)
CASSKPTGPKETQYF

SEQ ID NO: 343983 - protein, 15 aa, Homo sapiens
  CDR3 for alpha chain variable domain of TCR clone 171992 (TRAV12-3, TRAJ11)
CAMSEENSGYSTLTF

SEQ ID NO: 343984 - protein, 14 aa, Homo sapiens
  CDR3 for beta chain variable domain of TCR clone 171992 (TRBV12-4, TRBJ1-1)
CASTWTGHDTEAFF

SEQ ID NO: 343985 - protein, 14 aa, Homo sapiens
  CDR3 for alpha chain variable domain of TCR clone 171993 (TRAV17, TRAJ12)
CATDEKDSSCKLIF

SEQ ID NO: 343986 - protein, 16 aa, Homo sapiens
  CDR3 for beta chain variable domain of TCR clone 171993 (TRBV11-2, TRBJ2-1)
CASSPRLAGVYNEQFF

SEQ ID NO: 343987 - protein, 16 aa, Homo sapiens
  CDR3 for alpha chain variable domain of TCR clone 171994 (TRAV13-1, TRAJ40)
CAASIATTSGTYKYIF

SEQ ID NO: 343988 - protein, 16 aa, Homo sapiens
  CDR3 for beta chain variable domain of TCR clone 171994 (TRBV6-1, TRBJ1-3)
CASVQGGVETPYILER

SEQ ID NO: 343989 - protein, 18 aa, Homo sapiens
  CDR3 for alpha chain variable domain of TCR clone 171995 (TRAV13-1, TRAJ52)
CAAKNHNAGGTSYGKLTF

SEQ ID NO: 343990 - protein, 14 aa, Homo sapiens
  CDR3 for beta chain variable domain of TCR clone 171995 (TRBV7-3, TRBJ2-1)
CASSLAGGTNEQFF

SEQ ID NO: 343991 - protein, 16 aa, Homo sapiens
  CDR3 for alpha chain variable domain of TCR clone 171996 (TRAV12-1, TRAJ13)
CVVNLEVSGGYQKVTF

SEQ ID NO: 343992 - protein, 16 aa, Homo sapiens
  CDR3 for beta chain variable domain of TCR clone 171996 (TRBV24-1, TRBJ2-6)
CPTSDRRASGANVLTF

SEQ ID NO: 343993 - protein, 13 aa, Homo sapiens
  CDR3 for alpha chain variable domain of TCR clone 171997 (TRAV36/DV7, TRAJ49)
CAVEANTGNQCYF

SEQ ID NO: 343994 - protein, 14 aa, Homo sapiens
  CDR3 for beta chain variable domain of TCR clone 171997 (TRBV20-1, TRBJ2-5)
CSASSGRAAETQYF

SEQ ID NO: 343995 - protein, 12 aa, Homo sapiens
  CDR3 for alpha chain variable domain of TCR clone 171998 (TRAV12-3, TRAJ42)
CAPGGSQGNLIF

SEQ ID NO: 343996 - protein, 13 aa, Homo sapiens
  CDR3 for beta chain variable domain of TCR clone 171998 (TRBV5-7, TRBJ2-6)
GASTSSGANVLAF

SEQ ID NO: 343997 - protein, 12 aa, Homo sapiens
  CDR3 for alpha chain variable domain of TCR clone 171999 (TRAV1-2, TRAJ33)
CAALDSNYQLIW

SEQ ID NO: 343998 - protein, 16 aa, Homo sapiens
  CDR3 for beta chain variable domain of TCR clone 171999 (TRBV6-4, TRBJ1-2)
CASIEAVGDPNYGYTF

SEQ ID NO: 343999 - protein, 15 aa, Homo sapiens
  CDR3 for alpha chain variable domain of TCR clone 172000 (TRAV26-2, TRAJ26)
CILRDFDNYGQNFVF

SEQ ID NO: 344000 - protein, 11 aa, Homo sapiens
  CDR3 for beta chain variable domain of TCR clone 172000 (TRBV27, TRBJ2-7)
CASSLGYEQYF

SEQ ID NO: 344001 - protein, 16 aa, Homo sapiens
  CDR3 for alpha chain variable domain of TCR clone 172001 (TRAV30, TRAJ24)
CGTEIVDADSWGKFQF

SEQ ID NO: 344002 - protein, 14 aa, Homo sapiens
  CDR3 for beta chain variable domain of TCR clone 172001 (TRBV7-2, TRBJ2-7)
CASSPKTSFYGQYF

SEQ ID NO: 344003 - protein, 16 aa, Homo sapiens
  CDR3 for alpha chain variable domain of TCR clone 172002 (TRAV8-1, TRAJ4)
CAVKFSGGYNKLILEQ

SEQ ID NO: 344004 - protein, 22 aa, Homo sapiens
  CDR3 for beta chain variable domain of TCR clone 172002 (TRBV7-3, TRBJ2-5)
CASARDRVILRPRDPVLRARHA

SEQ ID NO: 344005 - protein, 16 aa, Homo sapiens
  CDR3 for alpha chain variable domain of TCR clone 172003 (TRAV3, TRAJ37)
CAVRVRGSGNTGKLIF

SEQ ID NO: 344006 - protein, 17 aa, Homo sapiens
  CDR3 for beta chain variable domain of TCR clone 172003 (TRBV7-9, TRBJ2-1)
CASSLVASYPSYNEQFF

SEQ ID NO: 344007 - protein, 11 aa, Homo sapiens
  CDR3 for alpha chain variable domain of TCR clone 172004 (TRAV13-1, TRAJ16)
CAALDGQKLLF

SEQ ID NO: 344008 - protein, 16 aa, Homo sapiens
  CDR3 for beta chain variable domain of TCR clone 172004 (TRBV28, TRBJ1-4)
CASRPGQGTTREKLLF

SEQ ID NO: 344009 - protein, 14 aa, Homo sapiens
  CDR3 for alpha chain variable domain of TCR clone 172005 (TRAV1-1, TRAJ30)
CAVRSLNRDDKIIF

SEQ ID NO: 344010 - protein, 15 aa, Homo sapiens
  CDR3 for beta chain variable domain of TCR clone 172005 (TRBV27, TRBJ1-4)
CASGAQQDLNEKLFF

SEQ ID NO: 344011 - protein, 13 aa, Homo sapiens
  CDR3 for alpha chain variable domain of TCR clone 172006 (TRAV26-2, TRAJ57)
CILSRGGSEKLVF

SEQ ID NO: 344012 - protein, 16 aa, Homo sapiens
  CDR3 for beta chain variable domain of TCR clone 172006 (TRBV18, TRBJ1-5)
CASSPRTGGGNQSQHF

SEQ ID NO: 344013 - protein, 13 aa, Homo sapiens
  CDR3 for alpha chain variable domain of TCR clone 172007 (TRAV8-2, TRAJ15)
CVVRNQAGTALIF

SEQ ID NO: 344014 - protein, 15 aa, Homo sapiens
  CDR3 for beta chain variable domain of TCR clone 172007 (TRBV4-1, TRBJ1-4)
CASSDTGGTNEKLFF

SEQ ID NO: 344015 - protein, 16 aa, Homo sapiens
  CDR3 for alpha chain variable domain of TCR clone 172008 (TRAV3, TRAJ37)
CAVRGKGSGNTGKLIF

SEQ ID NO: 344016 - protein, 13 aa, Homo sapiens
  CDR3 for beta chain variable domain of TCR clone 172008 (TRBV19, TRBJ1-5)
CASSMRGYQPQHV

SEQ ID NO: 344017 - protein, 14 aa, Homo sapiens
  CDR3 for alpha chain variable domain of TCR clone 172009 (TRAV38-1, TRAJ45)
CASHSGGGADGLTF

SEQ ID NO: 344018 - protein, 13 aa, Homo sapiens
  CDR3 for beta chain variable domain of TCR clone 172009 (TRBV10-3, TRBJ1-2)
CAISERDSYGYTI

SEQ ID NO: 344019 - protein, 15 aa, Homo sapiens
  CDR3 for alpha chain variable domain of TCR clone 172010 (TRAV10, TRAJ6)
CVVRPRTGGSYIPTF

SEQ ID NO: 344020 - protein, 15 aa, Homo sapiens
  CDR3 for beta chain variable domain of TCR clone 172010 (TRBV20-1, TRBJ2-7)
CSARDRVSGMDEQYF

SEQ ID NO: 344021 - protein, 17 aa, Homo sapiens
  CDR3 for alpha chain variable domain of TCR clone 172011 (TRAV36/DV7, TRAJ42)
CAGGGMNYGGSQGNPIF

SEQ ID NO: 344022 - protein, 13 aa, Homo sapiens
  CDR3 for beta chain variable domain of TCR clone 172011 (TRBV19, TRBJ2-5)
CASSIHSQETQYF

SEQ ID NO: 344023 - protein, 16 aa, Homo sapiens
  CDR3 for alpha chain variable domain of TCR clone 172012 (TRAV14/DV4, TRAJ10)
CAMREGRAGGGNKLTF

SEQ ID NO: 344024 - protein, 16 aa, Homo sapiens
  CDR3 for beta chain variable domain of TCR clone 172012 (TRBV28, TRBJ2-7)
CASSFPDRRLTYEQYF

SEQ ID NO: 344025 - protein, 12 aa, Homo sapiens
  CDR3 for alpha chain variable domain of TCR clone 172013 (TRAV12-3, TRAJ17)
FAMTLTGNKLTF

SEQ ID NO: 344026 - protein, 15 aa, Homo sapiens
  CDR3 for beta chain variable domain of TCR clone 172013 (TRBV20-1, TRBJ2-7)
CSARDRVSGMDEQNF

SEQ ID NO: 344027 - protein, 13 aa, Homo sapiens
  CDR3 for alpha chain variable domain of TCR clone 172014 (TRAV27, TRAJ11)
CAGARSGSSTLTF

SEQ ID NO: 344028 - protein, 16 aa, Homo sapiens
  CDR3 for beta chain variable domain of TCR clone 172014 (TRBV10-2, TRBJ2-2)
CASSESRDRGSGELFF

SEQ ID NO: 344029 - protein, 13 aa, Homo sapiens
  CDR3 for alpha chain variable domain of TCR clone 172015 (TRAV21, TRAJ57)
CAVTQGGSEKLVF

SEQ ID NO: 344030 - protein, 13 aa, Homo sapiens
  CDR3 for beta chain variable domain of TCR clone 172015 (TRBV24-1, TRBJ2-2)
CATRVDNTGELFF

SEQ ID NO: 344031 - protein, 13 aa, Homo sapiens
  CDR3 for alpha chain variable domain of TCR clone 172016 (TRAV13-1, TRAJ5)
CAARVTGRRALTF

SEQ ID NO: 344032 - protein, 15 aa, Homo sapiens
  CDR3 for beta chain variable domain of TCR clone 172016 (TRBV7-2, TRBJ1-2)
CASSPGAGWNYGYTF

SEQ ID NO: 344033 - protein, 15 aa, Homo sapiens
  CDR3 for alpha chain variable domain of TCR clone 172017 (TRAV9-2, TRAJ49)
CALSPPDHTGNQCYF

SEQ ID NO: 344034 - protein, 10 aa, Homo sapiens
  CDR3 for beta chain variable domain of TCR clone 172017 (TRBV15, TRBJ2-7)
AETGGYEQYF

SEQ ID NO: 344035 - protein, 14 aa, Homo sapiens
  CDR3 for alpha chain variable domain of TCR clone 172018 (TRAV26-1, TRAJ39)
CIVRGARAGNMLTF

SEQ ID NO: 344036 - protein, 15 aa, Homo sapiens
  CDR3 for beta chain variable domain of TCR clone 172018 (TRBV7-9, TRBJ1-5)
CASSHGHQPNQPQHF

SEQ ID NO: 344037 - protein, 14 aa, Homo sapiens
  CDR3 for alpha chain variable domain of TCR clone 172019 (TRAV1-2, TRAJ16)
CAVNRFSDGQKLLF

SEQ ID NO: 344038 - protein, 15 aa, Homo sapiens
  CDR3 for beta chain variable domain of TCR clone 172019 (TRBV7-9, TRBJ1-4)
RASSARTGGNEKLFF

SEQ ID NO: 344039 - protein, 17 aa, Homo sapiens
  CDR3 for alpha chain variable domain of TCR clone 172020 (TRAV3, TRAJ42)
WSVRDRDYGGSQGNLIF

SEQ ID NO: 344040 - protein, 12 aa, Homo sapiens
  CDR3 for beta chain variable domain of TCR clone 172020 (TRBV11-2, TRBJ2-1)
CASSPGNNEQFF

SEQ ID NO: 344041 - protein, 10 aa, Homo sapiens
  CDR3 for alpha chain variable domain of TCR clone 172021 (TRAV30, TRAJ32)
CGTEKDMVVL

SEQ ID NO: 344042 - protein, 13 aa, Homo sapiens
  CDR3 for beta chain variable domain of TCR clone 172021 (TRBV10-3, TRBJ2-7)
CASKIAVNYEQYF

SEQ ID NO: 344043 - protein, 14 aa, Homo sapiens
  CDR3 for alpha chain variable domain of TCR clone 172022 (TRAV20, TRAJ22)
CAVQVSGSARQLTF

SEQ ID NO: 344044 - protein, 13 aa, Homo sapiens
  CDR3 for beta chain variable domain of TCR clone 172022 (TRBV20-1, TRBJ2-5)
RSAREGGKETQYF

SEQ ID NO: 344045 - protein, 18 aa, Homo sapiens
  CDR3 for alpha chain variable domain of TCR clone 172023 (TRAV26-1, TRAJ22)
CIVRVALISSCSARQLTF

SEQ ID NO: 344046 - protein, 14 aa, Homo sapiens
  CDR3 for beta chain variable domain of TCR clone 172023 (TRBV6-1, TRBJ1-3)
CASVQGGGGNTIYF

SEQ ID NO: 344047 - protein, 12 aa, Homo sapiens
  CDR3 for alpha chain variable domain of TCR clone 172024 (TRAV36/DV7, TRAJ37)
CACYGNTVKPIF

SEQ ID NO: 344048 - protein, 14 aa, Homo sapiens
  CDR3 for beta chain variable domain of TCR clone 172024 (TRBV6-3, TRBJ1-4)
CASSGQNLNEKLFF

SEQ ID NO: 344049 - protein, 14 aa, Homo sapiens
  CDR3 for alpha chain variable domain of TCR clone 172025 (TRAV12-3, TRAJ10)
SHLPLTGGGNKLTF

SEQ ID NO: 344050 - protein, 15 aa, Homo sapiens
  CDR3 for beta chain variable domain of TCR clone 172025 (TRBV5-4, TRBJ2-1)
CASSPTSGGDVGQFF

SEQ ID NO: 344051 - protein, 17 aa, Homo sapiens
  CDR3 for alpha chain variable domain of TCR clone 172026 (TRAV16, TRAJ58)
CITVLSNGETSGSRLTV

SEQ ID NO: 344052 - protein, 13 aa, Homo sapiens
  CDR3 for beta chain variable domain of TCR clone 172026 (TRBV20-1, TRBJ2-2)
CSASAAGTGELFF

SEQ ID NO: 344053 - protein, 17 aa, Homo sapiens
  CDR3 for alpha chain variable domain of TCR clone 172027 (TRAV3, TRAJ6)
CAVRDGPMAGGSYIPTF

SEQ ID NO: 344054 - protein, 12 aa, Homo sapiens
  CDR3 for beta chain variable domain of TCR clone 172027 (TRBV11-2, TRBJ2-2)
CASSLGGGELFF

SEQ ID NO: 344055 - protein, 13 aa, Homo sapiens
  CDR3 for alpha chain variable domain of TCR clone 172028 (TRAV29/DV5, TRAJ47)
CAASAEYGNKLVF

SEQ ID NO: 344056 - protein, 15 aa, Homo sapiens
  CDR3 for beta chain variable domain of TCR clone 172028 (TRBV7-9, TRBJ1-4)
CAGSARTGGNEKLSF

SEQ ID NO: 344057 - protein, 13 aa, Homo sapiens
  CDR3 for alpha chain variable domain of TCR clone 172029 (TRAV12-3, TRAJ33)
CAMSVNSNYQLIW

SEQ ID NO: 344058 - protein, 16 aa, Homo sapiens
  CDR3 for beta chain variable domain of TCR clone 172029 (TRBV13, TRBJ2-5)
CASSLRTGGSGETQYF

SEQ ID NO: 344059 - protein, 22 aa, Homo sapiens
  CDR3 for alpha chain variable domain of TCR clone 172030 (TRAV12-2, TRAJ32)
CSSETPSPVIQPPKSATNKLIF

SEQ ID NO: 344060 - protein, 15 aa, Homo sapiens
  CDR3 for beta chain variable domain of TCR clone 172030 (TRBV12-5, TRBJ2-2)
CASGFQGSGTGELFF

SEQ ID NO: 344061 - protein, 15 aa, Homo sapiens
  CDR3 for alpha chain variable domain of TCR clone 172031 (TRAV26-1, TRAJ52)
CIVGEGGTSYGKLPF

SEQ ID NO: 344062 - protein, 16 aa, Homo sapiens
  CDR3 for beta chain variable domain of TCR clone 172031 (TRBV6-5, TRBJ2-7)
CASSSLAGTFSYEQYF

SEQ ID NO: 344063 - protein, 13 aa, Homo sapiens
  CDR3 for alpha chain variable domain of TCR clone 172032 (TRAV17, TRAJ33)
CATDADSNYQLIW

SEQ ID NO: 344064 - protein, 17 aa, Homo sapiens
  CDR3 for beta chain variable domain of TCR clone 172032 (TRBV20-1, TRBJ2-3)
CSAVSPGLAGGEDTQYF

SEQ ID NO: 344065 - protein, 16 aa, Homo sapiens
  CDR3 for alpha chain variable domain of TCR clone 172033 (TRAV3, TRAJ37)
CAVRPHGSGNTGKLIF

SEQ ID NO: 344066 - protein, 15 aa, Homo sapiens
  CDR3 for beta chain variable domain of TCR clone 172033 (TRBV20-1, TRBJ2-7)
GSARDRVSGMDEQYF

SEQ ID NO: 344067 - protein, 13 aa, Homo sapiens
  CDR3 for alpha chain variable domain of TCR clone 172034 (TRAV27, TRAJ11)
CAGGGSGYSTLTF

SEQ ID NO: 344068 - protein, 15 aa, Homo sapiens
  CDR3 for beta chain variable domain of TCR clone 172034 (TRBV5-1, TRBJ1-1)
CASSRGQGRFAEAFF

SEQ ID NO: 344069 - protein, 13 aa, Homo sapiens
  CDR3 for alpha chain variable domain of TCR clone 172035 (TRAV29/DV5, TRAJ31)
CAASRNNNARLMF

SEQ ID NO: 344070 - protein, 14 aa, Homo sapiens
  CDR3 for beta chain variable domain of TCR clone 172035 (TRBV7-2, TRBJ2-7)
CASSPKTSFYGQYF

SEQ ID NO: 344071 - protein, 15 aa, Homo sapiens
  CDR3 for alpha chain variable domain of TCR clone 172036 (TRAV21, TRAJ52)
CAARGGGTSYVKLTF

SEQ ID NO: 344072 - protein, 15 aa, Homo sapiens
  CDR3 for beta chain variable domain of TCR clone 172036 (TRBV18, TRBJ1-5)
CASSPSDRSNQPQHF

SEQ ID NO: 344073 - protein, 15 aa, Homo sapiens
  CDR3 for alpha chain variable domain of TCR clone 172037 (TRAV3, TRAJ17)
CAVSPKEAAGNKLTF

SEQ ID NO: 344074 - protein, 13 aa, Homo sapiens
  CDR3 for beta chain variable domain of TCR clone 172037 (TRBV12-4, TRBJ1-2)
CASSLRQGKGYTF

SEQ ID NO: 344075 - protein, 10 aa, Homo sapiens
  CDR3 for alpha chain variable domain of TCR clone 172038 (TRAV12-3, TRAJ49)
CAMNDDQFYF

SEQ ID NO: 344076 - protein, 11 aa, Homo sapiens
  CDR3 for beta chain variable domain of TCR clone 172038 (TRBV12-4, TRBJ2-5)
CASSFQGAQYF

SEQ ID NO: 344077 - protein, 13 aa, Homo sapiens
  CDR3 for alpha chain variable domain of TCR clone 172039 (TRAV16, TRAJ48)
CSTLNFGNEKLTF

SEQ ID NO: 344078 - protein, 11 aa, Homo sapiens
  CDR3 for beta chain variable domain of TCR clone 172039 (TRBV7-9, TRBJ2-3)
CASSPTDTQYF

SEQ ID NO: 344079 - protein, 11 aa, Homo sapiens
  CDR3 for alpha chain variable domain of TCR clone 172040 (TRAV12-2, TRAJ54)
CAVEGAQTLVF

SEQ ID NO: 344080 - protein, 17 aa, Homo sapiens
  CDR3 for beta chain variable domain of TCR clone 172040 (TRBV18, TRBJ1-3)
CASSPYPTGPSGNTIYF

SEQ ID NO: 344081 - protein, 15 aa, Homo sapiens
  CDR3 for alpha chain variable domain of TCR clone 172041 (TRAV17, TRAJ56)
CATEPFTGANSKLTF

SEQ ID NO: 344082 - protein, 15 aa, Homo sapiens
  CDR3 for beta chain variable domain of TCR clone 172041 (TRBV20-1, TRBJ2-1)
CSASGRGSSYNEQFF

SEQ ID NO: 344083 - protein, 12 aa, Homo sapiens
  CDR3 for alpha chain variable domain of TCR clone 172042 (TRAV13-2, TRAJ23)
CAERHRGGKIIF

SEQ ID NO: 344084 - protein, 13 aa, Homo sapiens
  CDR3 for beta chain variable domain of TCR clone 172042 (TRBV7-9, TRBJ2-3)
CASSPGSTDTQYF

SEQ ID NO: 344085 - protein, 13 aa, Homo sapiens
  CDR3 for alpha chain variable domain of TCR clone 172043 (TRAV3, TRAJ30)
CAVRDMGDDKIIF

SEQ ID NO: 344086 - protein, 14 aa, Homo sapiens
  CDR3 for beta chain variable domain of TCR clone 172043 (TRBV5-1, TRBJ1-1)
CASSRTTRDTEAFF

SEQ ID NO: 344087 - protein, 11 aa, Homo sapiens
  CDR3 for alpha chain variable domain of TCR clone 172044 (TRAV2, TRAJ23)
CAVETRGKLIF

SEQ ID NO: 344088 - protein, 17 aa, Homo sapiens
  CDR3 for beta chain variable domain of TCR clone 172044 (TRBV20-1, TRBJ2-1)
CSASSSGLAGSYNEQYF

SEQ ID NO: 344089 - protein, 15 aa, Homo sapiens
  CDR3 for alpha chain variable domain of TCR clone 172045 (TRAV8-3, TRAJ45)
CASSYSGGGADGLTF

SEQ ID NO: 344090 - protein, 10 aa, Homo sapiens
  CDR3 for beta chain variable domain of TCR clone 172045 (TRBV20-1, TRBJ2-5)
CSARFETQYF

SEQ ID NO: 344091 - protein, 15 aa, Homo sapiens
  CDR3 for alpha chain variable domain of TCR clone 172046 (TRAV12-2, TRAJ8)
CAVREENTGFQKLVF

SEQ ID NO: 344092 - protein, 15 aa, Homo sapiens
  CDR3 for beta chain variable domain of TCR clone 172046 (TRBV28, TRBJ2-4)
CAAGSGTLLMGVQYF

SEQ ID NO: 344093 - protein, 15 aa, Homo sapiens
  CDR3 for alpha chain variable domain of TCR clone 172047 (TRAV21, TRAJ13)
CAVRPTSGCYQKVTF

SEQ ID NO: 344094 - protein, 15 aa, Homo sapiens
  CDR3 for beta chain variable domain of TCR clone 172047 (TRBV28, TRBJ2-7)
CASSPGGRGFYEQYF

SEQ ID NO: 344095 - protein, 15 aa, Homo sapiens
  CDR3 for alpha chain variable domain of TCR clone 172048 (TRAV3, TRAJ5)
CAVRDRKTGRRALTF

SEQ ID NO: 344096 - protein, 18 aa, Homo sapiens
  CDR3 for beta chain variable domain of TCR clone 172048 (TRBV11-2, TRBJ2-3)
CASSLGGASRGAPNTQYF

SEQ ID NO: 344097 - protein, 14 aa, Homo sapiens
  CDR3 for alpha chain variable domain of TCR clone 172049 (TRAV3, TRAJ37)
CAVKESGNTGKLIF

SEQ ID NO: 344098 - protein, 15 aa, Homo sapiens
  CDR3 for beta chain variable domain of TCR clone 172049 (TRBV28, TRBJ2-7)
CASSVRQVSSYEQYF

SEQ ID NO: 344099 - protein, 16 aa, Homo sapiens
  CDR3 for alpha chain variable domain of TCR clone 172050 (TRAV38-2/DV8, TRAJ45)
CAYRGNSGGGADGVTF

SEQ ID NO: 344100 - protein, 17 aa, Homo sapiens
  CDR3 for beta chain variable domain of TCR clone 172050 (TRBV11-3, TRBJ2-5)
CASRLPGVRGGKETQYF

SEQ ID NO: 344101 - protein, 13 aa, Homo sapiens
  CDR3 for alpha chain variable domain of TCR clone 172051 (TRAV16, TRAJ31)
CALSAHNNARLMF

SEQ ID NO: 344102 - protein, 12 aa, Homo sapiens
  CDR3 for beta chain variable domain of TCR clone 172051 (TRBV12-5, TRBJ2-5)
CASGQGVETQYF

SEQ ID NO: 344103 - protein, 12 aa, Homo sapiens
  CDR3 for alpha chain variable domain of TCR clone 172052 (TRAV1-1, TRAJ8)
CAGGTGFQKLVF

SEQ ID NO: 344104 - protein, 15 aa, Homo sapiens
  CDR3 for beta chain variable domain of TCR clone 172052 (TRBV20-1, TRBJ2-7)
CSARDRVSGMNEQYF

SEQ ID NO: 344105 - protein, 14 aa, Homo sapiens
  CDR3 for alpha chain variable domain of TCR clone 172053 (TRAV2, TRAJ9)
CAVEDRSGGFKTIF

SEQ ID NO: 344106 - protein, 11 aa, Homo sapiens
  CDR3 for beta chain variable domain of TCR clone 172053 (TRBV7-9, TRBJ2-5)
CASSFGETQYF

SEQ ID NO: 344107 - protein, 13 aa, Homo sapiens
  CDR3 for alpha chain variable domain of TCR clone 172054 (TRAV17, TRAJ5)
CAPMDTGRRALTL

SEQ ID NO: 344108 - protein, 14 aa, Homo sapiens
  CDR3 for beta chain variable domain of TCR clone 172054 (TRBV19, TRBJ2-1)
CASPTFVLSGEQFF

SEQ ID NO: 344109 - protein, 15 aa, Homo sapiens
  CDR3 for alpha chain variable domain of TCR clone 172055 (TRAV8-6, TRAJ38)
CAVSSNAGNNRKRIW

SEQ ID NO: 344110 - protein, 14 aa, Homo sapiens
  CDR3 for beta chain variable domain of TCR clone 172055 (TRBV14, TRBJ2-1)
CASSQVQGKGEQFF

SEQ ID NO: 344111 - protein, 19 aa, Homo sapiens
  CDR3 for alpha chain variable domain of TCR clone 172056 (TRAV26-1, TRAJ52)
CIVRVANNAGGTSYGKLTF

SEQ ID NO: 344112 - protein, 13 aa, Homo sapiens
  CDR3 for beta chain variable domain of TCR clone 172056 (TRBV13, TRBJ2-5)
CASSPEVGETQYF

SEQ ID NO: 344113 - protein, 12 aa, Homo sapiens
  CDR3 for alpha chain variable domain of TCR clone 172057 (TRAV2, TRAJ9)
CAVGAGGFKTTF

SEQ ID NO: 344114 - protein, 14 aa, Homo sapiens
  CDR3 for beta chain variable domain of TCR clone 172057 (TRBV7-2, TRBJ1-2)
CASSQTGSTYGYTF

SEQ ID NO: 344115 - protein, 16 aa, Homo sapiens
  CDR3 for alpha chain variable domain of TCR clone 172058 (TRAV23/DV6, TRAJ9)
FAASIGGNTGGFKTIF

SEQ ID NO: 344116 - protein, 11 aa, Homo sapiens
  CDR3 for beta chain variable domain of TCR clone 172058 (TRBV11-2, TRBJ2-2)
CASSLPGELFF

SEQ ID NO: 344117 - protein, 15 aa, Homo sapiens
  CDR3 for alpha chain variable domain of TCR clone 172059 (TRAV13-1, TRAJ39)
CAASPLNNAGNMLTF

SEQ ID NO: 344118 - protein, 15 aa, Homo sapiens
  CDR3 for beta chain variable domain of TCR clone 172059 (TRBV7-6, TRBJ2-1)
CASSSRAGEGNEQFF

SEQ ID NO: 344119 - protein, 14 aa, Homo sapiens
  CDR3 for alpha chain variable domain of TCR clone 172060 (TRAV2, TRAJ9)
RAVEDRSGGFKTIF

SEQ ID NO: 344120 - protein, 11 aa, Homo sapiens
  CDR3 for beta chain variable domain of TCR clone 172060 (TRBV7-9, TRBJ2-5)
CASSLGETQYF

SEQ ID NO: 344121 - protein, 14 aa, Homo sapiens
  CDR3 for alpha chain variable domain of TCR clone 172061 (TRAV29/DV5, TRAJ36)
CAARRKTGANNLFF

SEQ ID NO: 344122 - protein, 15 aa, Homo sapiens
  CDR3 for beta chain variable domain of TCR clone 172061 (TRBV28, TRBJ2-1)
CASRVGLDEYNEQFF

SEQ ID NO: 344123 - protein, 14 aa, Homo sapiens
  CDR3 for alpha chain variable domain of TCR clone 172062 (TRAV13-1, TRAJ35)
CAASKGGFGNVLHC

SEQ ID NO: 344124 - protein, 16 aa, Homo sapiens
  CDR3 for beta chain variable domain of TCR clone 172062 (TRBV11-2, TRBJ1-2)
CASSLDTGGADYGYTF

SEQ ID NO: 344125 - protein, 18 aa, Homo sapiens
  CDR3 for alpha chain variable domain of TCR clone 172063 (TRAV13-1, TRAJ52)
CAASIRSAGGTSYGKLTF

SEQ ID NO: 344126 - protein, 12 aa, Homo sapiens
  CDR3 for beta chain variable domain of TCR clone 172063 (TRBV20-1, TRBJ2-3)
CSARVGTDTQYF

SEQ ID NO: 344127 - protein, 13 aa, Homo sapiens
  CDR3 for alpha chain variable domain of TCR clone 172064 (TRAV8-2, TRAJ47)
CVVSEREGNKLVF

SEQ ID NO: 344128 - protein, 15 aa, Homo sapiens
  CDR3 for beta chain variable domain of TCR clone 172064 (TRBV6-3, TRBJ2-7)
CVSSSPGTVFYEQYF

SEQ ID NO: 344129 - protein, 14 aa, Homo sapiens
  CDR3 for alpha chain variable domain of TCR clone 172065 (TRAV2, TRAJ9)
CAVEDRSGGFKTIF

SEQ ID NO: 344130 - protein, 13 aa, Homo sapiens
  CDR3 for beta chain variable domain of TCR clone 172065 (TRBV12-4, TRBJ1-5)
CASSPDRAQPQHV

SEQ ID NO: 344131 - protein, 13 aa, Homo sapiens
  CDR3 for alpha chain variable domain of TCR clone 172066 (TRAV26-1, TRAJ39)
CIVRVVAGNMLTF

SEQ ID NO: 344132 - protein, 14 aa, Homo sapiens
  CDR3 for beta chain variable domain of TCR clone 172066 (TRBV20-1, TRBJ2-5)
CRARRQGIRETQYF

SEQ ID NO: 344133 - protein, 15 aa, Homo sapiens
  CDR3 for alpha chain variable domain of TCR clone 172067 (TRAV20, TRAJ53)
CAVQASGGSNYQLTL

SEQ ID NO: 344134 - protein, 12 aa, Homo sapiens
  CDR3 for beta chain variable domain of TCR clone 172067 (TRBV7-6, TRBJ2-5)
CASSLSQETQYF

SEQ ID NO: 344135 - protein, 14 aa, Homo sapiens
  CDR3 for alpha chain variable domain of TCR clone 172068 (TRAV13-1, TRAJ35)
CAASKGGFGNVLPC

SEQ ID NO: 344136 - protein, 13 aa, Homo sapiens
  CDR3 for beta chain variable domain of TCR clone 172068 (TRBV7-3, TRBJ1-1)
CASSQDWGAEAFC

SEQ ID NO: 344137 - protein, 14 aa, Homo sapiens
  CDR3 for alpha chain variable domain of TCR clone 172069 (TRAV16, TRAJ33)
CALSAMDSNHQLIW

SEQ ID NO: 344138 - protein, 16 aa, Homo sapiens
  CDR3 for beta chain variable domain of TCR clone 172069 (TRBV25-1, TRBJ2-7)
CASSELTGGGIYEQYF

SEQ ID NO: 344139 - protein, 14 aa, Homo sapiens
  CDR3 for alpha chain variable domain of TCR clone 172070 (TRAV1-2, TRAJ16)
CAVNRFSDGQKLLF

SEQ ID NO: 344140 - protein, 15 aa, Homo sapiens
  CDR3 for beta chain variable domain of TCR clone 172070 (TRBV5-8, TRBJ1-1)
CASSFSGTSLKGDFF

SEQ ID NO: 344141 - protein, 13 aa, Homo sapiens
  CDR3 for alpha chain variable domain of TCR clone 172071 (TRAV21, TRAJ27)
CAARPGNAGKSTF

SEQ ID NO: 344142 - protein, 12 aa, Homo sapiens
  CDR3 for beta chain variable domain of TCR clone 172071 (TRBV5-7, TRBJ2-7)
CASSVQGGEQYF

SEQ ID NO: 344143 - protein, 12 aa, Homo sapiens
  CDR3 for alpha chain variable domain of TCR clone 172072 (TRAV25, TRAJ20)
CAGRCNDYKLSF

SEQ ID NO: 344144 - protein, 15 aa, Homo sapiens
  CDR3 for beta chain variable domain of TCR clone 172072 (TRBV7-6, TRBJ2-7)
CASSGRRDTFGEQYF

SEQ ID NO: 344145 - protein, 13 aa, Homo sapiens
  CDR3 for alpha chain variable domain of TCR clone 172073 (TRAV13-2, TRAJ48)
CAEMDFGNEKLTF

SEQ ID NO: 344146 - protein, 12 aa, Homo sapiens
  CDR3 for beta chain variable domain of TCR clone 172073 (TRBV11-2, TRBJ2-2)
CASSLGGGELFF

SEQ ID NO: 344147 - protein, 13 aa, Homo sapiens
  CDR3 for alpha chain variable domain of TCR clone 172074 (TRAV13-1, TRAJ6)
CAASSGGSYIPTF

SEQ ID NO: 344148 - protein, 14 aa, Homo sapiens
  CDR3 for beta chain variable domain of TCR clone 172074 (TRBV20-1, TRBJ2-4)
CRAVAGGPGNIQYF

SEQ ID NO: 344149 - protein, 13 aa, Homo sapiens
  CDR3 for alpha chain variable domain of TCR clone 172075 (TRAV21, TRAJ20)
CAVGLRVDYKLSF

SEQ ID NO: 344150 - protein, 14 aa, Homo sapiens
  CDR3 for beta chain variable domain of TCR clone 172075 (TRBV7-7, TRBJ2-7)
CASSPGGATYEQYF

SEQ ID NO: 344151 - protein, 13 aa, Homo sapiens
  CDR3 for alpha chain variable domain of TCR clone 172076 (TRAV17, TRAJ26)
CATVDSYGQNFVF

SEQ ID NO: 344152 - protein, 16 aa, Homo sapiens
  CDR3 for beta chain variable domain of TCR clone 172076 (TRBV2, TRBJ2-1)
CASSVGGSLSYNEQFV

SEQ ID NO: 344153 - protein, 12 aa, Homo sapiens
  CDR3 for alpha chain variable domain of TCR clone 172077 (TRAV13-1, TRAJ21)
CAAKEGFNKFYY

SEQ ID NO: 344154 - protein, 15 aa, Homo sapiens
  CDR3 for beta chain variable domain of TCR clone 172077 (TRBV2, TRBJ2-1)
CASSELAGSYNEQFF

SEQ ID NO: 344155 - protein, 14 aa, Homo sapiens
  CDR3 for alpha chain variable domain of TCR clone 172078 (TRAV17, TRAJ57)
CATDPQGGSEKLVF

SEQ ID NO: 344156 - protein, 13 aa, Homo sapiens
  CDR3 for beta chain variable domain of TCR clone 172078 (TRBV7-9, TRBJ2-7)
CASSFAGAYEQYF

SEQ ID NO: 344157 - protein, 14 aa, Homo sapiens
  CDR3 for alpha chain variable domain of TCR clone 172079 (TRAV12-1, TRAJ23)
CVVIVYNQGGKLIF

SEQ ID NO: 344158 - protein, 12 aa, Homo sapiens
  CDR3 for beta chain variable domain of TCR clone 172079 (TRBV12-5, TRBJ2-5)
CASGQGVETQYF

SEQ ID NO: 344159 - protein, 14 aa, Homo sapiens
  CDR3 for alpha chain variable domain of TCR clone 172080 (TRAV38-1, TRAJ40)
CALRSTSGTYKYIS

SEQ ID NO: 344160 - protein, 14 aa, Homo sapiens
  CDR3 for beta chain variable domain of TCR clone 172080 (TRBV25-1, TRBJ1-1)
CASTHLGGNTEAFF

SEQ ID NO: 344161 - protein, 14 aa, Homo sapiens
  CDR3 for alpha chain variable domain of TCR clone 172081 (TRAV12-3, TRAJ9)
CAMSPNTGGFKTIF

SEQ ID NO: 344162 - protein, 15 aa, Homo sapiens
  CDR3 for beta chain variable domain of TCR clone 172081 (TRBV7-2, TRBJ2-1)
CASSSGLAGGSEQFF

SEQ ID NO: 344163 - protein, 16 aa, Homo sapiens
  CDR3 for alpha chain variable domain of TCR clone 172082 (TRAV20, TRAJ10)
CAVLRGLTGGGNKLTF

SEQ ID NO: 344164 - protein, 13 aa, Homo sapiens
  CDR3 for beta chain variable domain of TCR clone 172082 (TRBV7-3, TRBJ1-1)
CASSQDWGAEAFF

SEQ ID NO: 344165 - protein, 13 aa, Homo sapiens
  CDR3 for alpha chain variable domain of TCR clone 172083 (TRAV26-1, TRAJ40)
CIVRGTGTYKYIF

SEQ ID NO: 344166 - protein, 14 aa, Homo sapiens
  CDR3 for beta chain variable domain of TCR clone 172083 (TRBV19, TRBJ2-7)
CASSIFAGTYEQYF

SEQ ID NO: 344167 - protein, 15 aa, Homo sapiens
  CDR3 for alpha chain variable domain of TCR clone 172084 (TRAV3, TRAJ4)
CAVRDGTGGYNKLIV

SEQ ID NO: 344168 - protein, 13 aa, Homo sapiens
  CDR3 for beta chain variable domain of TCR clone 172084 (TRBV10-3, TRBJ2-7)
CASKLAVNYEQYF

SEQ ID NO: 344169 - protein, 16 aa, Homo sapiens
  CDR3 for alpha chain variable domain of TCR clone 172085 (TRAV13-1, TRAJ13)
CTAFFLGVTRKLPLEL

SEQ ID NO: 344170 - protein, 15 aa, Homo sapiens
  CDR3 for beta chain variable domain of TCR clone 172085 (TRBV7-8, TRBJ1-2)
CASSLVRDGGLGYTF

SEQ ID NO: 344171 - protein, 14 aa, Homo sapiens
  CDR3 for alpha chain variable domain of TCR clone 172086 (TRAV8-4, TRAJ47)
GAVSIMDYGNKLVF

SEQ ID NO: 344172 - protein, 16 aa, Homo sapiens
  CDR3 for beta chain variable domain of TCR clone 172086 (TRBV14, TRBJ1-2)
CASSQGPTTANYGYTF

SEQ ID NO: 344173 - protein, 14 aa, Homo sapiens
  CDR3 for alpha chain variable domain of TCR clone 172087 (TRAV38-1, TRAJ45)
CAYYSGGGADGLTF

SEQ ID NO: 344174 - protein, 14 aa, Homo sapiens
  CDR3 for beta chain variable domain of TCR clone 172087 (TRBV25-1, TRBJ1-1)
CASTHLGGDTEAFF

SEQ ID NO: 344175 - protein, 11 aa, Homo sapiens
  CDR3 for alpha chain variable domain of TCR clone 172088 (TRAV1-2, TRAJ11)
CAVRGYSTPTF

SEQ ID NO: 344176 - protein, 13 aa, Homo sapiens
  CDR3 for beta chain variable domain of TCR clone 172088 (TRBV10-3, TRBJ2-7)
CASKLAVNYEQYF

SEQ ID NO: 344177 - protein, 15 aa, Homo sapiens
  CDR3 for alpha chain variable domain of TCR clone 172089 (TRAV14/DV4, TRAJ10)
CAMRELTGGGNKITF

SEQ ID NO: 344178 - protein, 17 aa, Homo sapiens
  CDR3 for beta chain variable domain of TCR clone 172089 (TRBV15, TRBJ1-2)
CATSGREIDVVNYGYTF

SEQ ID NO: 344179 - protein, 18 aa, Homo sapiens
  CDR3 for alpha chain variable domain of TCR clone 172090 (TRAV2, TRAJ32)
CCLLRCFHYGGATNKLIF

SEQ ID NO: 344180 - protein, 16 aa, Homo sapiens
  CDR3 for beta chain variable domain of TCR clone 172090 (TRBV7-9, TRBJ2-7)
CASSYPDRDGGYEQYF

SEQ ID NO: 344181 - protein, 15 aa, Homo sapiens
  CDR3 for alpha chain variable domain of TCR clone 172091 (TRAV8-3, TRAJ32)
CALGPYGGATNKLIF

SEQ ID NO: 344182 - protein, 14 aa, Homo sapiens
  CDR3 for beta chain variable domain of TCR clone 172091 (TRBV29-1, TRBJ2-2)
CSVLAETNTGELFF

SEQ ID NO: 344183 - protein, 15 aa, Homo sapiens
  CDR3 for alpha chain variable domain of TCR clone 172092 (TRAV8-3, TRAJ45)
GASSYSGGGADGLTF

SEQ ID NO: 344184 - protein, 13 aa, Homo sapiens
  CDR3 for beta chain variable domain of TCR clone 172092 (TRBV10-3, TRBJ2-7)
CDSKLAVNYEQYF

SEQ ID NO: 344185 - protein, 12 aa, Homo sapiens
  CDR3 for alpha chain variable domain of TCR clone 172093 (TRAV21, TRAJ37)
CAVRGNTGKLIF

SEQ ID NO: 344186 - protein, 14 aa, Homo sapiens
  CDR3 for beta chain variable domain of TCR clone 172093 (TRBV19, TRBJ2-1)
CAGEVTGARNEQFF

SEQ ID NO: 344187 - protein, 17 aa, Homo sapiens
  CDR3 for alpha chain variable domain of TCR clone 172094 (TRAV5, TRAJ5)
CAESMEQGGTGRRALTF

SEQ ID NO: 344188 - protein, 15 aa, Homo sapiens
  CDR3 for beta chain variable domain of TCR clone 172094 (TRBV20-1, TRBJ2-7)
CSARDRVSGMDEQYF

SEQ ID NO: 344189 - protein, 13 aa, Homo sapiens
  CDR3 for alpha chain variable domain of TCR clone 172095 (TRAV12-1, TRAJ40)
CVVPTSGTYKYIF

SEQ ID NO: 344190 - protein, 16 aa, Homo sapiens
  CDR3 for beta chain variable domain of TCR clone 172095 (TRBV27, TRBJ2-2)
CASSFRGLVRTGELFF

SEQ ID NO: 344191 - protein, 14 aa, Homo sapiens
  CDR3 for alpha chain variable domain of TCR clone 172096 (TRAV3, TRAJ17)
CAVRDAAAGNKLTF

SEQ ID NO: 344192 - protein, 16 aa, Homo sapiens
  CDR3 for beta chain variable domain of TCR clone 172096 (TRBV19, TRBJ2-1)
CASSKAGPSSYNEQFF

SEQ ID NO: 344193 - protein, 16 aa, Homo sapiens
  CDR3 for alpha chain variable domain of TCR clone 172097 (TRAV8-2, TRAJ7)
CVVSEGPYYVKNRLAF

SEQ ID NO: 344194 - protein, 15 aa, Homo sapiens
  CDR3 for beta chain variable domain of TCR clone 172097 (TRBV27, TRBJ2-3)
CASSLGLAATDTQYF

SEQ ID NO: 344195 - protein, 15 aa, Homo sapiens
  CDR3 for alpha chain variable domain of TCR clone 172098 (TRAV26-2, TRAJ13)
CILRDLSGGYQKVTF

SEQ ID NO: 344196 - protein, 16 aa, Homo sapiens
  CDR3 for beta chain variable domain of TCR clone 172098 (TRBV7-9, TRBJ1-2)
CASSLGFSSGEDGYTF

SEQ ID NO: 344197 - protein, 14 aa, Homo sapiens
  CDR3 for alpha chain variable domain of TCR clone 172099 (TRAV12-2, TRAJ17)
CAVLFKAAGNKLTF

SEQ ID NO: 344198 - protein, 14 aa, Homo sapiens
  CDR3 for beta chain variable domain of TCR clone 172099 (TRBV7-2, TRBJ2-7)
CASRSQGAAYGQYL

SEQ ID NO: 344199 - protein, 23 aa, Homo sapiens
  CDR3 for alpha chain variable domain of TCR clone 172100 (TRAV26-1, TRAJ38)
CIADNAGNNHIQNPDPAVYQLRD

SEQ ID NO: 344200 - protein, 12 aa, Homo sapiens
  CDR3 for beta chain variable domain of TCR clone 172100 (TRBV11-2, TRBJ2-2)
CASSLEGGELFF

SEQ ID NO: 344201 - protein, 13 aa, Homo sapiens
  CDR3 for alpha chain variable domain of TCR clone 172101 (TRAV20, TRAJ35)
CAVQEGFGNVLHC

SEQ ID NO: 344202 - protein, 14 aa, Homo sapiens
  CDR3 for beta chain variable domain of TCR clone 172101 (TRBV5-1, TRBJ1-1)
CASSSATGGAEAFF

SEQ ID NO: 344203 - protein, 15 aa, Homo sapiens
  CDR3 for alpha chain variable domain of TCR clone 172102 (TRAV2, TRAJ9)
CAVEDRGTGGFKTIF

SEQ ID NO: 344204 - protein, 16 aa, Homo sapiens
  CDR3 for beta chain variable domain of TCR clone 172102 (TRBV24-1, TRBJ2-3)
CAAGVPGTGATDTQYF

SEQ ID NO: 344205 - protein, 20 aa, Homo sapiens
  CDR3 for alpha chain variable domain of TCR clone 172103 (TRAV26-1, TRAJ52)
CCVLFIVSNAGGTSYGKLTF

SEQ ID NO: 344206 - protein, 15 aa, Homo sapiens
  CDR3 for beta chain variable domain of TCR clone 172103 (TRBV7-3, TRBJ2-1)
CASSPTGGGEVEQFF

SEQ ID NO: 344207 - protein, 12 aa, Homo sapiens
  CDR3 for alpha chain variable domain of TCR clone 172104 (TRAV12-3, TRAJ17)
CAMTLTGNKLTL

SEQ ID NO: 344208 - protein, 15 aa, Homo sapiens
  CDR3 for beta chain variable domain of TCR clone 172104 (TRBV6-3, TRBJ2-7)
CASSSPGTVFYEQYF

SEQ ID NO: 344209 - protein, 14 aa, Homo sapiens
  CDR3 for alpha chain variable domain of TCR clone 172105 (TRAV13-1, TRAJ13)
CAAIPLVGYQKVTF

SEQ ID NO: 344210 - protein, 17 aa, Homo sapiens
  CDR3 for beta chain variable domain of TCR clone 172105 (TRBV20-1, TRBJ2-2)
CSASGSGQGGLTGELFF

SEQ ID NO: 344211 - protein, 13 aa, Homo sapiens
  CDR3 for alpha chain variable domain of TCR clone 172106 (TRAV8-3, TRAJ28)
CAVGAVGSYQLPF

SEQ ID NO: 344212 - protein, 15 aa, Homo sapiens
  CDR3 for beta chain variable domain of TCR clone 172106 (TRBV6-1, TRBJ2-3)
CASSERGGITDTQYF

SEQ ID NO: 344213 - protein, 14 aa, Homo sapiens
  CDR3 for alpha chain variable domain of TCR clone 172107 (TRAV26-1, TRAJ21)
CIVRVVYNFNKFYF

SEQ ID NO: 344214 - protein, 13 aa, Homo sapiens
  CDR3 for beta chain variable domain of TCR clone 172107 (TRBV24-1, TRBJ2-1)
CATSAGPYNEQFF

SEQ ID NO: 344215 - protein, 14 aa, Homo sapiens
  CDR3 for alpha chain variable domain of TCR clone 172108 (TRAV17, TRAJ35)
CATDRPGFGNVLHC

SEQ ID NO: 344216 - protein, 14 aa, Homo sapiens
  CDR3 for beta chain variable domain of TCR clone 172108 (TRBV7-9, TRBJ2-1)
CASSPRDSLYEQFF

SEQ ID NO: 344217 - protein, 16 aa, Homo sapiens
  CDR3 for alpha chain variable domain of TCR clone 172109 (TRAV16, TRAJ4)
CARSRMISGGYNKRIF

SEQ ID NO: 344218 - protein, 16 aa, Homo sapiens
  CDR3 for beta chain variable domain of TCR clone 172109 (TRBV24-1, TRBJ2-3)
CATSDPGTGATDTQYF

SEQ ID NO: 344219 - protein, 13 aa, Homo sapiens
  CDR3 for alpha chain variable domain of TCR clone 172110 (TRAV8-6, TRAJ54)
CAGGIQGAQKLVF

SEQ ID NO: 344220 - protein, 15 aa, Homo sapiens
  CDR3 for beta chain variable domain of TCR clone 172110 (TRBV27, TRBJ2-3)
CASSLGLAGPDTQYF

SEQ ID NO: 344221 - protein, 14 aa, Homo sapiens
  CDR3 for alpha chain variable domain of TCR clone 172111 (TRAV12-1, TRAJ12)
CVVNRPDSSYKLIF

SEQ ID NO: 344222 - protein, 17 aa, Homo sapiens
  CDR3 for beta chain variable domain of TCR clone 172111 (TRBV13, TRBJ2-3)
CASSLSRVAGGRNTQYF

SEQ ID NO: 344223 - protein, 12 aa, Homo sapiens
  CDR3 for alpha chain variable domain of TCR clone 172112 (TRAV4, TRAJ26)
CLVGDYGQNFVF

SEQ ID NO: 344224 - protein, 16 aa, Homo sapiens
  CDR3 for beta chain variable domain of TCR clone 172112 (TRBV5-1, TRBJ2-7)
CASSLILAGGTYEQYF

SEQ ID NO: 344225 - protein, 16 aa, Homo sapiens
  CDR3 for alpha chain variable domain of TCR clone 172113 (TRAV12-2, TRAJ50)
CAVGTATKTSYDKVIF

SEQ ID NO: 344226 - protein, 12 aa, Homo sapiens
  CDR3 for beta chain variable domain of TCR clone 172113 (TRBV12-4, TRBJ1-5)
CASSLGRQPQHC

SEQ ID NO: 344227 - protein, 14 aa, Homo sapiens
  CDR3 for alpha chain variable domain of TCR clone 172114 (TRAV13-1, TRAJ13)
CAASRGGGYQKGTF

SEQ ID NO: 344228 - protein, 17 aa, Homo sapiens
  CDR3 for beta chain variable domain of TCR clone 172114 (TRBV15, TRBJ1-5)
CATSRAPPGTRNQPQHF

SEQ ID NO: 344229 - protein, 15 aa, Homo sapiens
  CDR3 for alpha chain variable domain of TCR clone 172115 (TRAV13-1, TRAJ20)
CAASTVRSNDYKLSF

SEQ ID NO: 344230 - protein, 12 aa, Homo sapiens
  CDR3 for beta chain variable domain of TCR clone 172115 (TRBV11-2, TRBJ2-1)
CASSPGNNEQFF

SEQ ID NO: 344231 - protein, 15 aa, Homo sapiens
  CDR3 for alpha chain variable domain of TCR clone 172116 (TRAV2, TRAJ9)
CAVEDRGTGGFKTIF

SEQ ID NO: 344232 - protein, 13 aa, Homo sapiens
  CDR3 for beta chain variable domain of TCR clone 172116 (TRBV19, TRBJ1-2)
CASSVPGQDGNTF

SEQ ID NO: 344233 - protein, 14 aa, Homo sapiens
  CDR3 for alpha chain variable domain of TCR clone 172117 (TRAV12-2, TRAJ40)
CAVKIPSGTYKYIF

SEQ ID NO: 344234 - protein, 13 aa, Homo sapiens
  CDR3 for beta chain variable domain of TCR clone 172117 (TRBV28, TRBJ1-1)
CASSKQGWTEAFF

SEQ ID NO: 344235 - protein, 19 aa, Homo sapiens
  CDR3 for alpha chain variable domain of TCR clone 172118 (TRAV17, TRAJ17)
CATDGRPGVIKAAGNKLTF

SEQ ID NO: 344236 - protein, 16 aa, Homo sapiens
  CDR3 for beta chain variable domain of TCR clone 172118 (TRBV5-1, TRBJ2-2)
CASSLWDTTNTGELVF

SEQ ID NO: 344237 - protein, 17 aa, Homo sapiens
  CDR3 for alpha chain variable domain of TCR clone 172119 (TRAV8-6, TRAJ58)
CAVSSWVGETSGSRLTF

SEQ ID NO: 344238 - protein, 15 aa, Homo sapiens
  CDR3 for beta chain variable domain of TCR clone 172119 (TRBV4-1, TRBJ2-5)
CASSQWDLYQETQYF

SEQ ID NO: 344239 - protein, 19 aa, Homo sapiens
  CDR3 for alpha chain variable domain of TCR clone 172120 (TRAV8-2, TRAJ48)
CVVSDLPSGSNFGNEKLTF

SEQ ID NO: 344240 - protein, 15 aa, Homo sapiens
  CDR3 for beta chain variable domain of TCR clone 172120 (TRBV9, TRBJ1-6)
CASSVAGTGDSPLHF

SEQ ID NO: 344241 - protein, 11 aa, Homo sapiens
  CDR3 for alpha chain variable domain of TCR clone 172121 (TRAV23/DV6, TRAJ21)
CAANNFNKFYF

SEQ ID NO: 344242 - protein, 14 aa, Homo sapiens
  CDR3 for beta chain variable domain of TCR clone 172121 (TRBV6-1, TRBJ1-3)
CASVQGGGGNTIYF

SEQ ID NO: 344243 - protein, 15 aa, Homo sapiens
  CDR3 for alpha chain variable domain of TCR clone 172122 (TRAV3, TRAJ11)
CAVRDRGSGYSTLTF

SEQ ID NO: 344244 - protein, 13 aa, Homo sapiens
  CDR3 for beta chain variable domain of TCR clone 172122 (TRBV29-1, TRBJ2-1)
CSVEGGRVNEQFF

SEQ ID NO: 344245 - protein, 14 aa, Homo sapiens
  CDR3 for alpha chain variable domain of TCR clone 172123 (TRAV12-1, TRAJ9)
CVVNKGTGGFKTIF

SEQ ID NO: 344246 - protein, 16 aa, Homo sapiens
  CDR3 for beta chain variable domain of TCR clone 172123 (TRBV12-4, TRBJ1-5)
CASSRPVGGSNQPQHF

SEQ ID NO: 344247 - protein, 15 aa, Homo sapiens
  CDR3 for alpha chain variable domain of TCR clone 172124 (TRAV26-2, TRAJ57)
CILRDIRCGSEKLVF

SEQ ID NO: 344248 - protein, 15 aa, Homo sapiens
  CDR3 for beta chain variable domain of TCR clone 172124 (TRBV2, TRBJ2-1)
CASDIGLAGEGEQFF

SEQ ID NO: 344249 - protein, 14 aa, Homo sapiens
  CDR3 for alpha chain variable domain of TCR clone 172125 (TRAV17, TRAJ6)
CATDASGGSYIPTF

SEQ ID NO: 344250 - protein, 15 aa, Homo sapiens
  CDR3 for beta chain variable domain of TCR clone 172125 (TRBV20-1, TRBJ1-1)
CSASWDRFLNTEAFF

SEQ ID NO: 344251 - protein, 13 aa, Homo sapiens
  CDR3 for alpha chain variable domain of TCR clone 172126 (TRAV29/DV5, TRAJ44)
CAASTGTASTLTF

SEQ ID NO: 344252 - protein, 13 aa, Homo sapiens
  CDR3 for beta chain variable domain of TCR clone 172126 (TRBV19, TRBJ2-7)
CASRKAGGNEQYF

SEQ ID NO: 344253 - protein, 15 aa, Homo sapiens
  CDR3 for alpha chain variable domain of TCR clone 172127 (TRAV41, TRAJ45)
CAASYSAGGADGLTF

SEQ ID NO: 344254 - protein, 14 aa, Homo sapiens
  CDR3 for beta chain variable domain of TCR clone 172127 (TRBV12-5, TRBJ2-5)
CASGSRTHQETQYF

SEQ ID NO: 344255 - protein, 13 aa, Homo sapiens
  CDR3 for alpha chain variable domain of TCR clone 172128 (TRAV17, TRAJ7)
CATDNYGNNILAF

SEQ ID NO: 344256 - protein, 16 aa, Homo sapiens
  CDR3 for beta chain variable domain of TCR clone 172128 (TRBV4-1, TRBJ2-5)
CASSQAIAASSATQYF

SEQ ID NO: 344257 - protein, 13 aa, Homo sapiens
  CDR3 for alpha chain variable domain of TCR clone 172129 (TRAV12-3, TRAJ49)
CAMSRNTGNQFYF

SEQ ID NO: 344258 - protein, 16 aa, Homo sapiens
  CDR3 for beta chain variable domain of TCR clone 172129 (TRBV5-8, TRBJ2-2)
CASSLINPGGAGELLF

SEQ ID NO: 344259 - protein, 14 aa, Homo sapiens
  CDR3 for alpha chain variable domain of TCR clone 172130 (TRAV23/DV6, TRAJ27)
CAASRDTSARKSTF

SEQ ID NO: 344260 - protein, 14 aa, Homo sapiens
  CDR3 for beta chain variable domain of TCR clone 172130 (TRBV19, TRBJ2-1)
CASPTFVLSGEQFF

SEQ ID NO: 344261 - protein, 12 aa, Homo sapiens
  CDR3 for alpha chain variable domain of TCR clone 172131 (TRAV16, TRAJ56)
CAPTGANSKLTF

SEQ ID NO: 344262 - protein, 16 aa, Homo sapiens
  CDR3 for beta chain variable domain of TCR clone 172131 (TRBV7-3, TRBJ2-2)
CASSLKRGTLSGELFF

SEQ ID NO: 344263 - protein, 11 aa, Homo sapiens
  CDR3 for alpha chain variable domain of TCR clone 172132 (TRAV12-2, TRAJ33)
CAVGSNYQLIW

SEQ ID NO: 344264 - protein, 15 aa, Homo sapiens
  CDR3 for beta chain variable domain of TCR clone 172132 (TRBV9, TRBJ1-6)
CASSVAGTGDSPLHF

SEQ ID NO: 344265 - protein, 14 aa, Homo sapiens
  CDR3 for alpha chain variable domain of TCR clone 172133 (TRAV4, TRAJ17)
CLVGPQAAGTKLTL

SEQ ID NO: 344266 - protein, 15 aa, Homo sapiens
  CDR3 for beta chain variable domain of TCR clone 172133 (TRBV9, TRBJ2-1)
CASSLAGSSYNEQFF

SEQ ID NO: 344267 - protein, 12 aa, Homo sapiens
  CDR3 for alpha chain variable domain of TCR clone 172134 (TRAV8-6, TRAJ4)
CAVSDHPNKLIF

SEQ ID NO: 344268 - protein, 13 aa, Homo sapiens
  CDR3 for beta chain variable domain of TCR clone 172134 (TRBV7-9, TRBJ1-2)
CASSLKQNYGYTF

SEQ ID NO: 344269 - protein, 13 aa, Homo sapiens
  CDR3 for alpha chain variable domain of TCR clone 172135 (TRAV13-1, TRAJ39)
CAASIWAGNMLTF

SEQ ID NO: 344270 - protein, 14 aa, Homo sapiens
  CDR3 for beta chain variable domain of TCR clone 172135 (TRBV7-3, TRBJ2-7)
CASSLKADSYEQYF

SEQ ID NO: 344271 - protein, 11 aa, Homo sapiens
  CDR3 for alpha chain variable domain of TCR clone 172136 (TRAV17, TRAJ9)
CATTGGFKTIF

SEQ ID NO: 344272 - protein, 13 aa, Homo sapiens
  CDR3 for beta chain variable domain of TCR clone 172136 (TRBV5-4, TRBJ1-1)
CASSFQVNTEAFF

SEQ ID NO: 344273 - protein, 12 aa, Homo sapiens
  CDR3 for alpha chain variable domain of TCR clone 172137 (TRAV17, TRAJ4)
CASDGGYNKLIF

SEQ ID NO: 344274 - protein, 13 aa, Homo sapiens
  CDR3 for beta chain variable domain of TCR clone 172137 (TRBV29-1, TRBJ2-2)
CSTTGVDTGELFF

SEQ ID NO: 344275 - protein, 11 aa, Homo sapiens
  CDR3 for alpha chain variable domain of TCR clone 172138 (TRAV3, TRAJ21)
CDVGNFTKFYF

SEQ ID NO: 344276 - protein, 16 aa, Homo sapiens
  CDR3 for beta chain variable domain of TCR clone 172138 (TRBV19, TRBJ2-1)
CASSKAGPSSYNEQFF

SEQ ID NO: 344277 - protein, 14 aa, Homo sapiens
  CDR3 for alpha chain variable domain of TCR clone 172139 (TRAV13-1, TRAJ44)
CAAKATGTASKRTF

SEQ ID NO: 344278 - protein, 16 aa, Homo sapiens
  CDR3 for beta chain variable domain of TCR clone 172139 (TRBV7-9, TRBJ2-6)
CASSLKGPLRANVLTF

SEQ ID NO: 344279 - protein, 13 aa, Homo sapiens
  CDR3 for alpha chain variable domain of TCR clone 172140 (TRAV12-2, TRAJ37)
CAGGSGNTGKLFF

SEQ ID NO: 344280 - protein, 17 aa, Homo sapiens
  CDR3 for beta chain variable domain of TCR clone 172140 (TRBV11-2, TRBJ2-1)
CASSLYPPGVEYNGQFF

SEQ ID NO: 344281 - protein, 17 aa, Homo sapiens
  CDR3 for alpha chain variable domain of TCR clone 172141 (TRAV13-1, TRAJ28)
CAASPPYSGAGSYQLTF

SEQ ID NO: 344282 - protein, 15 aa, Homo sapiens
  CDR3 for beta chain variable domain of TCR clone 172141 (TRBV6-3, TRBJ2-2)
CASSFLATLIGELFF

SEQ ID NO: 344283 - protein, 11 aa, Homo sapiens
  CDR3 for alpha chain variable domain of TCR clone 172142 (TRAV12-3, TRAJ43)
CAMSVSNDMRF

SEQ ID NO: 344284 - protein, 15 aa, Homo sapiens
  CDR3 for beta chain variable domain of TCR clone 172142 (TRBV7-2, TRBJ2-1)
CASSSGLAGGNEQFF

SEQ ID NO: 344285 - protein, 15 aa, Homo sapiens
  CDR3 for alpha chain variable domain of TCR clone 172143 (TRAV27, TRAJ38)
CAARRNAGNNRKLIL

SEQ ID NO: 344286 - protein, 13 aa, Homo sapiens
  CDR3 for beta chain variable domain of TCR clone 172143 (TRBV12-5, TRBJ2-3)
CASGDRRSDTQYF

SEQ ID NO: 344287 - protein, 15 aa, Homo sapiens
  CDR3 for alpha chain variable domain of TCR clone 172144 (TRAV8-2, TRAJ27)
CVVSDRGTNAGKSTF

SEQ ID NO: 344288 - protein, 16 aa, Homo sapiens
  CDR3 for beta chain variable domain of TCR clone 172144 (TRBV19, TRBJ2-1)
CASSKAGPSSYNEQFF

SEQ ID NO: 344289 - protein, 13 aa, Homo sapiens
  CDR3 for alpha chain variable domain of TCR clone 172145 (TRAV17, TRAJ5)
CAPMDTGRRALTF

SEQ ID NO: 344290 - protein, 15 aa, Homo sapiens
  CDR3 for beta chain variable domain of TCR clone 172145 (TRBV6-6, TRBJ2-5)
CASSPGGGSEETQYF

SEQ ID NO: 344291 - protein, 12 aa, Homo sapiens
  CDR3 for alpha chain variable domain of TCR clone 172146 (TRAV12-1, TRAJ40)
CVVPSGTYKYIF

SEQ ID NO: 344292 - protein, 15 aa, Homo sapiens
  CDR3 for beta chain variable domain of TCR clone 172146 (TRBV12-4, TRBJ2-1)
CAGSPLSERNSEQFF

SEQ ID NO: 344293 - protein, 15 aa, Homo sapiens
  CDR3 for alpha chain variable domain of TCR clone 172147 (TRAV12-3, TRAJ6)
CAMSATTGGSYIPTF

SEQ ID NO: 344294 - protein, 16 aa, Homo sapiens
  CDR3 for beta chain variable domain of TCR clone 172147 (TRBV20-1, TRBJ1-2)
CSASMGQGVANYGHAF

SEQ ID NO: 344295 - protein, 15 aa, Homo sapiens
  CDR3 for alpha chain variable domain of TCR clone 172148 (TRAV2, TRAJ15)
CAVGGPNQAGTALIF

SEQ ID NO: 344296 - protein, 13 aa, Homo sapiens
  CDR3 for beta chain variable domain of TCR clone 172148 (TRBV2, TRBJ1-5)
CATAGPGNQHQHF

SEQ ID NO: 344297 - protein, 14 aa, Homo sapiens
  CDR3 for alpha chain variable domain of TCR clone 172149 (TRAV13-1, TRAJ35)
CAASKGGFGNVLHC

SEQ ID NO: 344298 - protein, 14 aa, Homo sapiens
  CDR3 for beta chain variable domain of TCR clone 172149 (TRBV4-1, TRBJ2-7)
CASRLTSGSYEQYF

SEQ ID NO: 344299 - protein, 18 aa, Homo sapiens
  CDR3 for alpha chain variable domain of TCR clone 172150 (TRAV9-2, TRAJ52)
FALSRHNAGGTSYGKLTF

SEQ ID NO: 344300 - protein, 16 aa, Homo sapiens
  CDR3 for beta chain variable domain of TCR clone 172150 (TRBV19, TRBJ2-1)
CASSKAGPSSYNEQFF

SEQ ID NO: 344301 - protein, 23 aa, Homo sapiens
  CDR3 for alpha chain variable domain of TCR clone 172151 (TRAV41, TRAJ32)
CAVRIMVVLQTSSSLELPLCLLS

SEQ ID NO: 344302 - protein, 15 aa, Homo sapiens
  CDR3 for beta chain variable domain of TCR clone 172151 (TRBV11-2, TRBJ2-1)
CASSKNRGLIYEQFF

SEQ ID NO: 344303 - protein, 15 aa, Homo sapiens
  CDR3 for alpha chain variable domain of TCR clone 172152 (TRAV16, TRAJ4)
CALEDPSGGYNKLIF

SEQ ID NO: 344304 - protein, 13 aa, Homo sapiens
  CDR3 for beta chain variable domain of TCR clone 172152 (TRBV7-3, TRBJ2-7)
CTSSQAGGYEQYF

SEQ ID NO: 344305 - protein, 16 aa, Homo sapiens
  CDR3 for alpha chain variable domain of TCR clone 172153 (TRAV35, TRAJ28)
CAGQRYSGAGSYQLTF

SEQ ID NO: 344306 - protein, 13 aa, Homo sapiens
  CDR3 for beta chain variable domain of TCR clone 172153 (TRBV19, TRBJ1-2)
CASSQGQVCGYTF

SEQ ID NO: 344307 - protein, 11 aa, Homo sapiens
  CDR3 for alpha chain variable domain of TCR clone 172154 (TRAV21, TRAJ39)
LLVNAGNMLTF

SEQ ID NO: 344308 - protein, 14 aa, Homo sapiens
  CDR3 for beta chain variable domain of TCR clone 172154 (TRBV18, TRBJ2-7)
CASSPRGGAYEQYF

SEQ ID NO: 344309 - protein, 15 aa, Homo sapiens
  CDR3 for alpha chain variable domain of TCR clone 172155 (TRAV29/DV5, TRAJ42)
CAAKTDGGSQGNLLF

SEQ ID NO: 344310 - protein, 12 aa, Homo sapiens
  CDR3 for beta chain variable domain of TCR clone 172155 (TRBV11-2, TRBJ2-1)
CASSPGNNEQFF

SEQ ID NO: 344311 - protein, 14 aa, Homo sapiens
  CDR3 for alpha chain variable domain of TCR clone 172156 (TRAV17, TRAJ6)
CATDASGGSYIPTF

SEQ ID NO: 344312 - protein, 19 aa, Homo sapiens
  CDR3 for beta chain variable domain of TCR clone 172156 (TRBV4-3, TRBJ2-7)
GASSQEFIGWQVTPYEQYF

SEQ ID NO: 344313 - protein, 16 aa, Homo sapiens
  CDR3 for alpha chain variable domain of TCR clone 172157 (TRAV30, TRAJ24)
CGTEIVDADSRGKFQF

SEQ ID NO: 344314 - protein, 14 aa, Homo sapiens
  CDR3 for beta chain variable domain of TCR clone 172157 (TRBV7-9, TRBJ2-4)
CASSLAMGGNIQYF

SEQ ID NO: 344315 - protein, 14 aa, Homo sapiens
  CDR3 for alpha chain variable domain of TCR clone 172158 (TRAV12-2, TRAJ40)
CAVKIPSGTYKYIF

SEQ ID NO: 344316 - protein, 17 aa, Homo sapiens
  CDR3 for beta chain variable domain of TCR clone 172158 (TRBV7-8, TRBJ2-1)
CASSPPTGTLAYNEQFF

SEQ ID NO: 344317 - protein, 13 aa, Homo sapiens
  CDR3 for alpha chain variable domain of TCR clone 172159 (TRAV16, TRAJ52)
CALRGTSYGKLTF

SEQ ID NO: 344318 - protein, 18 aa, Homo sapiens
  CDR3 for beta chain variable domain of TCR clone 172159 (TRBV13, TRBJ2-6)
CASSPMTSGGCGANVLTF

SEQ ID NO: 344319 - protein, 12 aa, Homo sapiens
  CDR3 for alpha chain variable domain of TCR clone 172160 (TRAV2, TRAJ9)
CAVGAGGFKTIF

SEQ ID NO: 344320 - protein, 14 aa, Homo sapiens
  CDR3 for beta chain variable domain of TCR clone 172160 (TRBV2, TRBJ2-1)
CASRAYGIYNEQFF

SEQ ID NO: 344321 - protein, 15 aa, Homo sapiens
  CDR3 for alpha chain variable domain of TCR clone 172161 (TRAV3, TRAJ22)
CAVRDRGGSARQLTF

SEQ ID NO: 344322 - protein, 12 aa, Homo sapiens
  CDR3 for beta chain variable domain of TCR clone 172161 (TRBV27, TRBJ2-2)
CASKLFTGELFF

SEQ ID NO: 344323 - protein, 13 aa, Homo sapiens
  CDR3 for alpha chain variable domain of TCR clone 172162 (TRAV2, TRAJ40)
CAVVTSGTYKYNF

SEQ ID NO: 344324 - protein, 14 aa, Homo sapiens
  CDR3 for beta chain variable domain of TCR clone 172162 (TRBV7-9, TRBJ1-1)
CASTPLQSYTEAFF

SEQ ID NO: 344325 - protein, 13 aa, Homo sapiens
  CDR3 for alpha chain variable domain of TCR clone 172163 (TRAV2, TRAJ16)
CAVEFGGGQKRLF

SEQ ID NO: 344326 - protein, 14 aa, Homo sapiens
  CDR3 for beta chain variable domain of TCR clone 172163 (TRBV6-3, TRBJ2-5)
CASSYSLREKTQYF

SEQ ID NO: 344327 - protein, 14 aa, Homo sapiens
  CDR3 for alpha chain variable domain of TCR clone 172164 (TRAV12-2, TRAJ13)
CAVKKTGGYQKVTF

SEQ ID NO: 344328 - protein, 15 aa, Homo sapiens
  CDR3 for beta chain variable domain of TCR clone 172164 (TRBV20-1, TRBJ2-7)
CSARDRVSGKDEQYF

SEQ ID NO: 344329 - protein, 12 aa, Homo sapiens
  CDR3 for alpha chain variable domain of TCR clone 172165 (TRAV22, TRAJ22)
CAPGGSARQLTF

SEQ ID NO: 344330 - protein, 16 aa, Homo sapiens
  CDR3 for beta chain variable domain of TCR clone 172165 (TRBV28, TRBJ2-7)
CASSLFFETGGPEQYF

SEQ ID NO: 344331 - protein, 14 aa, Homo sapiens
  CDR3 for alpha chain variable domain of TCR clone 172166 (TRAV25, TRAJ45)
CARESGGGADGLTF

SEQ ID NO: 344332 - protein, 14 aa, Homo sapiens
  CDR3 for beta chain variable domain of TCR clone 172166 (TRBV20-1, TRBJ2-2)
CSAPDTANTGELFF

SEQ ID NO: 344333 - protein, 14 aa, Homo sapiens
  CDR3 for alpha chain variable domain of TCR clone 172167 (TRAV14/DV4, TRAJ41)
CARGVPDSGYALNF

SEQ ID NO: 344334 - protein, 15 aa, Homo sapiens
  CDR3 for beta chain variable domain of TCR clone 172167 (TRBV19, TRBJ2-1)
CASSIQATSYNEQFF

SEQ ID NO: 344335 - protein, 11 aa, Homo sapiens
  CDR3 for alpha chain variable domain of TCR clone 172168 (TRAV12-1, TRAJ31)
CVADNNARLMF

SEQ ID NO: 344336 - protein, 13 aa, Homo sapiens
  CDR3 for beta chain variable domain of TCR clone 172168 (TRBV20-1, TRBJ1-1)
CSAPLGGGTEAFF

SEQ ID NO: 344337 - protein, 12 aa, Homo sapiens
  CDR3 for alpha chain variable domain of TCR clone 172169 (TRAV1-1, TRAJ39)
CAVPEVGNMLTF

SEQ ID NO: 344338 - protein, 15 aa, Homo sapiens
  CDR3 for beta chain variable domain of TCR clone 172169 (TRBV19, TRBJ1-6)
CASSTQGAVGSPLHF

SEQ ID NO: 344339 - protein, 14 aa, Homo sapiens
  CDR3 for alpha chain variable domain of TCR clone 172170 (TRAV21, TRAJ38)
CAVANAGNNRKLIW

SEQ ID NO: 344340 - protein, 15 aa, Homo sapiens
  CDR3 for beta chain variable domain of TCR clone 172170 (TRBV28, TRBJ1-3)
CASSMGWASGNTIYF

SEQ ID NO: 344341 - protein, 15 aa, Homo sapiens
  CDR3 for alpha chain variable domain of TCR clone 172171 (TRAV3, TRAJ13)
CAVRDIAGGCQKVTF

SEQ ID NO: 344342 - protein, 13 aa, Homo sapiens
  CDR3 for beta chain variable domain of TCR clone 172171 (TRBV2, TRBJ2-2)
CASSKKNTGELFF

SEQ ID NO: 344343 - protein, 16 aa, Homo sapiens
  CDR3 for alpha chain variable domain of TCR clone 172172 (TRAV30, TRAJ24)
CGTEIVDADSWGKFQF

SEQ ID NO: 344344 - protein, 11 aa, Homo sapiens
  CDR3 for beta chain variable domain of TCR clone 172172 (TRBV11-2, TRBJ2-2)
CASSLPGELVF

SEQ ID NO: 344345 - protein, 18 aa, Homo sapiens
  CDR3 for alpha chain variable domain of TCR clone 172173 (TRAV8-4, TRAJ52)
CAVTRANAGGTSYGKLTF

SEQ ID NO: 344346 - protein, 15 aa, Homo sapiens
  CDR3 for beta chain variable domain of TCR clone 172173 (TRBV5-1, TRBJ2-1)
CASSLVANSYNEQFF

SEQ ID NO: 344347 - protein, 18 aa, Homo sapiens
  CDR3 for alpha chain variable domain of TCR clone 172174 (TRAV21, TRAJ52)
CAVRPSPAGGTSYGKLTF

SEQ ID NO: 344348 - protein, 12 aa, Homo sapiens
  CDR3 for beta chain variable domain of TCR clone 172174 (TRBV20-1, TRBJ2-7)
CSAGRRQSEQYF

SEQ ID NO: 344349 - protein, 15 aa, Homo sapiens
  CDR3 for alpha chain variable domain of TCR clone 172175 (TRAV12-3, TRAJ6)
CAMSAASGGSYIPTF

SEQ ID NO: 344350 - protein, 13 aa, Homo sapiens
  CDR3 for beta chain variable domain of TCR clone 172175 (TRBV20-1, TRBJ1-2)
CSASAERIYGYTF

SEQ ID NO: 344351 - protein, 16 aa, Homo sapiens
  CDR3 for alpha chain variable domain of TCR clone 172176 (TRAV21, TRAJ37)
CAVRTAGSGNTGKLIF

SEQ ID NO: 344352 - protein, 13 aa, Homo sapiens
  CDR3 for beta chain variable domain of TCR clone 172176 (TRBV7-9, TRBJ2-5)
CASLTSGRETQYF

SEQ ID NO: 344353 - protein, 12 aa, Homo sapiens
  CDR3 for alpha chain variable domain of TCR clone 172177 (TRAV26-1, TRAJ43)
CIVRSAGNKLTF

SEQ ID NO: 344354 - protein, 15 aa, Homo sapiens
  CDR3 for beta chain variable domain of TCR clone 172177 (TRBV7-6, TRBJ1-2)
CASSSGGRGGYGYTF

SEQ ID NO: 344355 - protein, 17 aa, Homo sapiens
  CDR3 for alpha chain variable domain of TCR clone 172178 (TRAV23/DV6, TRAJ57)
CAASPTLSQGGSEKLVF

SEQ ID NO: 344356 - protein, 17 aa, Homo sapiens
  CDR3 for beta chain variable domain of TCR clone 172178 (TRBV10-3, TRBJ2-6)
CAISESTAPSGANVLTF

SEQ ID NO: 344357 - protein, 12 aa, Homo sapiens
  CDR3 for alpha chain variable domain of TCR clone 172179 (TRAV12-3, TRAJ17)
CAMTLTGNKLTI

SEQ ID NO: 344358 - protein, 13 aa, Homo sapiens
  CDR3 for beta chain variable domain of TCR clone 172179 (TRBV7-9, TRBJ1-2)
CASSLKQNYGYTF

SEQ ID NO: 344359 - protein, 17 aa, Homo sapiens
  CDR3 for alpha chain variable domain of TCR clone 172180 (TRAV8-6, TRAJ58)
CAVSSWVGETSGSRLTF

SEQ ID NO: 344360 - protein, 14 aa, Homo sapiens
  CDR3 for beta chain variable domain of TCR clone 172180 (TRBV4-2, TRBJ2-1)
CASGLDTTYNEQFF

SEQ ID NO: 344361 - protein, 12 aa, Homo sapiens
  CDR3 for alpha chain variable domain of TCR clone 172181 (TRAV12-3, TRAJ17)
CAMTLTGNKLTF

SEQ ID NO: 344362 - protein, 15 aa, Homo sapiens
  CDR3 for beta chain variable domain of TCR clone 172181 (TRBV12-4, TRBJ1-2)
CASRLGVAGNYGYTF

SEQ ID NO: 344363 - protein, 16 aa, Homo sapiens
  CDR3 for alpha chain variable domain of TCR clone 172182 (TRAV30, TRAJ24)
CGTEIVDADSWWKFQF

SEQ ID NO: 344364 - protein, 14 aa, Homo sapiens
  CDR3 for beta chain variable domain of TCR clone 172182 (TRBV7-9, TRBJ2-4)
CASSLAMGGNIQYF

SEQ ID NO: 344365 - protein, 13 aa, Homo sapiens
  CDR3 for alpha chain variable domain of TCR clone 172183 (TRAV21, TRAJ12)
CAVQMDSSYKLIF

SEQ ID NO: 344366 - protein, 15 aa, Homo sapiens
  CDR3 for beta chain variable domain of TCR clone 172183 (TRBV28, TRBJ1-1)
CASSLGGSGNTEAFF

SEQ ID NO: 344367 - protein, 14 aa, Homo sapiens
  CDR3 for alpha chain variable domain of TCR clone 172184 (TRAV8-6, TRAJ49)
CAGSDPGTGNQFYF

SEQ ID NO: 344368 - protein, 16 aa, Homo sapiens
  CDR3 for beta chain variable domain of TCR clone 172184 (TRBV24-1, TRBJ2-1)
CATSGVAGANYNEQFF

SEQ ID NO: 344369 - protein, 12 aa, Homo sapiens
  CDR3 for alpha chain variable domain of TCR clone 172185 (TRAV23/DV6, TRAJ33)
CAAEDSNHQLIW

SEQ ID NO: 344370 - protein, 11 aa, Homo sapiens
  CDR3 for beta chain variable domain of TCR clone 172185 (TRBV7-2, TRBJ2-7)
CASSSGLWQYF

SEQ ID NO: 344371 - protein, 15 aa, Homo sapiens
  CDR3 for alpha chain variable domain of TCR clone 172186 (TRAV23/DV6, TRAJ15)
CAALPAGRNCSDLVE

SEQ ID NO: 344372 - protein, 14 aa, Homo sapiens
  CDR3 for beta chain variable domain of TCR clone 172186 (TRBV7-9, TRBJ1-2)
CASSRQGANYGYTF

SEQ ID NO: 344373 - protein, 13 aa, Homo sapiens
  CDR3 for alpha chain variable domain of TCR clone 172187 (TRAV12-3, TRAJ40)
CAMSDSGTYKNIF

SEQ ID NO: 344374 - protein, 14 aa, Homo sapiens
  CDR3 for beta chain variable domain of TCR clone 172187 (TRBV7-2, TRBJ1-5)
CASSTQGAGQPQHF

SEQ ID NO: 344375 - protein, 14 aa, Homo sapiens
  CDR3 for alpha chain variable domain of TCR clone 172188 (TRAV17, TRAJ34)
CATDSLEGTDKLLF

SEQ ID NO: 344376 - protein, 13 aa, Homo sapiens
  CDR3 for beta chain variable domain of TCR clone 172188 (TRBV11-2, TRBJ2-7)
CASSGTRPYEQYF

SEQ ID NO: 344377 - protein, 17 aa, Homo sapiens
  CDR3 for alpha chain variable domain of TCR clone 172189 (TRAV23/DV6, TRAJ57)
CAASSTPSQGGSEKLFF

SEQ ID NO: 344378 - protein, 14 aa, Homo sapiens
  CDR3 for beta chain variable domain of TCR clone 172189 (TRBV25-1, TRBJ1-1)
CASTHLGGNTEAFF

SEQ ID NO: 344379 - protein, 17 aa, Homo sapiens
  CDR3 for alpha chain variable domain of TCR clone 172190 (TRAV8-6, TRAJ58)
CTVSSWVGETSGSRLTF

SEQ ID NO: 344380 - protein, 13 aa, Homo sapiens
  CDR3 for beta chain variable domain of TCR clone 172190 (TRBV4-2, TRBJ1-1)
CASSQAGNTEAFF

SEQ ID NO: 344381 - protein, 13 aa, Homo sapiens
  CDR3 for alpha chain variable domain of TCR clone 172191 (TRAV27, TRAJ29)
CAGDHSGNTPLVF

SEQ ID NO: 344382 - protein, 14 aa, Homo sapiens
  CDR3 for beta chain variable domain of TCR clone 172191 (TRBV7-9, TRBJ2-7)
CASSIGQGAGEQYF

SEQ ID NO: 344383 - protein, 15 aa, Homo sapiens
  CDR3 for alpha chain variable domain of TCR clone 172192 (TRAV26-1, TRAJ29)
CIVRVEGSGNTPLFF

SEQ ID NO: 344384 - protein, 15 aa, Homo sapiens
  CDR3 for beta chain variable domain of TCR clone 172192 (TRBV28, TRBJ2-5)
CASSPGQGSIETQYF

SEQ ID NO: 344385 - protein, 12 aa, Homo sapiens
  CDR3 for alpha chain variable domain of TCR clone 172193 (TRAV13-1, TRAJ21)
CAAKEGFNKFYF

SEQ ID NO: 344386 - protein, 16 aa, Homo sapiens
  CDR3 for beta chain variable domain of TCR clone 172193 (TRBV6-1, TRBJ2-5)
CASSETLGRGAETQYF

SEQ ID NO: 344387 - protein, 13 aa, Homo sapiens
  CDR3 for alpha chain variable domain of TCR clone 172194 (TRAV29/DV5, TRAJ33)
CAASAESNYQLIW

SEQ ID NO: 344388 - protein, 14 aa, Homo sapiens
  CDR3 for beta chain variable domain of TCR clone 172194 (TRBV5-7, TRBJ1-1)
CASSLAGDWTEAFF

SEQ ID NO: 344389 - protein, 14 aa, Homo sapiens
  CDR3 for alpha chain variable domain of TCR clone 172195 (TRAV26-1, TRAJ21)
CIVRVGHNFNKFYF

SEQ ID NO: 344390 - protein, 17 aa, Homo sapiens
  CDR3 for beta chain variable domain of TCR clone 172195 (TRBV28, TRBJ2-5)
CASSTPEGDALQETQYF

SEQ ID NO: 344391 - protein, 16 aa, Homo sapiens
  CDR3 for alpha chain variable domain of TCR clone 172196 (TRAV3, TRAJ32)
CAVREYYGVATNKLIF

SEQ ID NO: 344392 - protein, 12 aa, Homo sapiens
  CDR3 for beta chain variable domain of TCR clone 172196 (TRBV20-1, TRBJ1-2)
CSVTPEGYGYTF

SEQ ID NO: 344393 - protein, 13 aa, Homo sapiens
  CDR3 for alpha chain variable domain of TCR clone 172197 (TRAV8-6, TRAJ16)
CAASRWVGQKLLF

SEQ ID NO: 344394 - protein, 15 aa, Homo sapiens
  CDR3 for beta chain variable domain of TCR clone 172197 (TRBV12-4, TRBJ2-1)
CASSLSTGVSNEQFF

SEQ ID NO: 344395 - protein, 16 aa, Homo sapiens
  CDR3 for alpha chain variable domain of TCR clone 172198 (TRAV1-2, TRAJ18)
CAVRVERGSTLGRLYF

SEQ ID NO: 344396 - protein, 15 aa, Homo sapiens
  CDR3 for beta chain variable domain of TCR clone 172198 (TRBV5-1, TRBJ2-3)
CASSVTSGSTDTQYF

SEQ ID NO: 344397 - protein, 13 aa, Homo sapiens
  CDR3 for alpha chain variable domain of TCR clone 172199 (TRAV17, TRAJ9)
CATDYTGGFKTIF

SEQ ID NO: 344398 - protein, 15 aa, Homo sapiens
  CDR3 for beta chain variable domain of TCR clone 172199 (TRBV10-3, TRBJ2-3)
CAISLTSGGTDTQYV

SEQ ID NO: 344399 - protein, 14 aa, Homo sapiens
  CDR3 for alpha chain variable domain of TCR clone 172200 (TRAV13-1, TRAJ35)
CAASKGGFGNVLHC

SEQ ID NO: 344400 - protein, 13 aa, Homo sapiens
  CDR3 for beta chain variable domain of TCR clone 172200 (TRBV7-3, TRBJ1-5)
CASSQGENQPQHF

SEQ ID NO: 344401 - protein, 12 aa, Homo sapiens
  CDR3 for alpha chain variable domain of TCR clone 172201 (TRAV25, TRAJ11)
CVGASGYSTLTF

SEQ ID NO: 344402 - protein, 14 aa, Homo sapiens
  CDR3 for beta chain variable domain of TCR clone 172201 (TRBV5-8, TRBJ2-3)
CAGSLGQGTDTQYF

SEQ ID NO: 344403 - protein, 17 aa, Homo sapiens
  CDR3 for alpha chain variable domain of TCR clone 172202 (TRAV12-3, TRAJ6)
CAMSARGGAGGIYIPTF

SEQ ID NO: 344404 - protein, 12 aa, Homo sapiens
  CDR3 for beta chain variable domain of TCR clone 172202 (TRBV12-4, TRBJ2-3)
CASSTLPDTQYF

SEQ ID NO: 344405 - protein, 13 aa, Homo sapiens
  CDR3 for alpha chain variable domain of TCR clone 172203 (TRAV8-3, TRAJ48)
CAVEPFGNEKLTF

SEQ ID NO: 344406 - protein, 14 aa, Homo sapiens
  CDR3 for beta chain variable domain of TCR clone 172203 (TRBV19, TRBJ2-7)
CASSMGQGAIEQYF

SEQ ID NO: 344407 - protein, 12 aa, Homo sapiens
  CDR3 for alpha chain variable domain of TCR clone 172204 (TRAV26-1, TRAJ48)
CIVSGGNEKLTF

SEQ ID NO: 344408 - protein, 13 aa, Homo sapiens
  CDR3 for beta chain variable domain of TCR clone 172204 (TRBV18, TRBJ2-7)
CASFRASAYEQYF

SEQ ID NO: 344409 - protein, 13 aa, Homo sapiens
  CDR3 for alpha chain variable domain of TCR clone 172205 (TRAV8-3, TRAJ36)
CAVGATGANNLFF

SEQ ID NO: 344410 - protein, 13 aa, Homo sapiens
  CDR3 for beta chain variable domain of TCR clone 172205 (TRBV4-2, TRBJ2-1)
CTSSPGTYNEQFF

SEQ ID NO: 344411 - protein, 10 aa, Homo sapiens
  CDR3 for alpha chain variable domain of TCR clone 172206 (TRAV1-2, TRAJ34)
CAVNTDKLIF

SEQ ID NO: 344412 - protein, 14 aa, Homo sapiens
  CDR3 for beta chain variable domain of TCR clone 172206 (TRBV6-6, TRBJ2-7)
CASSDSGAGYEQYF

SEQ ID NO: 344413 - protein, 21 aa, Homo sapiens
  CDR3 for alpha chain variable domain of TCR clone 172207 (TRAV1-1, TRAJ6)
CLLLLRCERLKRTGGSYIPTF

SEQ ID NO: 344414 - protein, 13 aa, Homo sapiens
  CDR3 for beta chain variable domain of TCR clone 172207 (TRBV10-2, TRBJ2-7)
CASGASGGYEQYF

SEQ ID NO: 344415 - protein, 19 aa, Homo sapiens
  CDR3 for alpha chain variable domain of TCR clone 172208 (TRAV12-2, TRAJ52)
PAIQPPTSFRSTSYGKLTF

SEQ ID NO: 344416 - protein, 11 aa, Homo sapiens
  CDR3 for beta chain variable domain of TCR clone 172208 (TRBV11-2, TRBJ2-2)
CASSLPGELFF

SEQ ID NO: 344417 - protein, 14 aa, Homo sapiens
  CDR3 for alpha chain variable domain of TCR clone 172209 (TRAV16, TRAJ15)
CALSGPQAGTALIF

SEQ ID NO: 344418 - protein, 12 aa, Homo sapiens
  CDR3 for beta chain variable domain of TCR clone 172209 (TRBV18, TRBJ2-5)
CASSPPKETQYF

SEQ ID NO: 344419 - protein, 16 aa, Homo sapiens
  CDR3 for alpha chain variable domain of TCR clone 172210 (TRAV16, TRAJ37)
CSKWPDGSSNTGKLIF

SEQ ID NO: 344420 - protein, 13 aa, Homo sapiens
  CDR3 for beta chain variable domain of TCR clone 172210 (TRBV2, TRBJ2-1)
CASSGTSGGEQFF

SEQ ID NO: 344421 - protein, 15 aa, Homo sapiens
  CDR3 for alpha chain variable domain of TCR clone 172211 (TRAV8-1, TRAJ6)
CAVNANPGGSYIPTF

SEQ ID NO: 344422 - protein, 14 aa, Homo sapiens
  CDR3 for beta chain variable domain of TCR clone 172211 (TRBV7-3, TRBJ2-1)
CASSLAGGTNEQFF

SEQ ID NO: 344423 - protein, 15 aa, Homo sapiens
  CDR3 for alpha chain variable domain of TCR clone 172212 (TRAV8-3, TRAJ13)
CALAPNSGGYQKVTF

SEQ ID NO: 344424 - protein, 12 aa, Homo sapiens
  CDR3 for beta chain variable domain of TCR clone 172212 (TRBV19, TRBJ2-7)
CASTDRDYEQYF

SEQ ID NO: 344425 - protein, 12 aa, Homo sapiens
  CDR3 for alpha chain variable domain of TCR clone 172213 (TRAV3, TRAJ20)
CAVRDGDYKLSF

SEQ ID NO: 344426 - protein, 12 aa, Homo sapiens
  CDR3 for beta chain variable domain of TCR clone 172213 (TRBV6-5, TRBJ2-7)
CASSDRQNEQYF

SEQ ID NO: 344427 - protein, 15 aa, Homo sapiens
  CDR3 for alpha chain variable domain of TCR clone 172214 (TRAV8-4, TRAJ37)
CAVTYGSSNTGKLIF

SEQ ID NO: 344428 - protein, 13 aa, Homo sapiens
  CDR3 for beta chain variable domain of TCR clone 172214 (TRBV12-4, TRBJ2-5)
CASSLGGSRTQHF

SEQ ID NO: 344429 - protein, 12 aa, Homo sapiens
  CDR3 for alpha chain variable domain of TCR clone 172215 (TRAV21, TRAJ11)
CAVRGGNSTLTF

SEQ ID NO: 344430 - protein, 15 aa, Homo sapiens
  CDR3 for beta chain variable domain of TCR clone 172215 (TRBV6-1, TRBJ2-7)
CASSEPIAATREQYF

SEQ ID NO: 344431 - protein, 13 aa, Homo sapiens
  CDR3 for alpha chain variable domain of TCR clone 172216 (TRAV2, TRAJ40)
CAVVTSGTYKYIF

SEQ ID NO: 344432 - protein, 11 aa, Homo sapiens
  CDR3 for beta chain variable domain of TCR clone 172216 (TRBV6-3, TRBJ2-3)
CATGQADTQYF

SEQ ID NO: 344433 - protein, 16 aa, Homo sapiens
  CDR3 for alpha chain variable domain of TCR clone 172217 (TRAV14/DV4, TRAJ53)
CAMREGGGGSNYKLTF

SEQ ID NO: 344434 - protein, 10 aa, Homo sapiens
  CDR3 for beta chain variable domain of TCR clone 172217 (TRBV2, TRBJ2-5)
CASSAATQYF

SEQ ID NO: 344435 - protein, 13 aa, Homo sapiens
  CDR3 for alpha chain variable domain of TCR clone 172218 (TRAV9-2, TRAJ53)
CALSGGSNYKLTI

SEQ ID NO: 344436 - protein, 17 aa, Homo sapiens
  CDR3 for beta chain variable domain of TCR clone 172218 (TRBV11-2, TRBJ2-1)
CASSLYPPGVEYNEQFF

SEQ ID NO: 344437 - protein, 12 aa, Homo sapiens
  CDR3 for alpha chain variable domain of TCR clone 172219 (TRAV13-1, TRAJ15)
CAASQAGTALIF

SEQ ID NO: 344438 - protein, 16 aa, Homo sapiens
  CDR3 for beta chain variable domain of TCR clone 172219 (TRBV9, TRBJ2-1)
CASSVGGGGNYNEQFF

SEQ ID NO: 344439 - protein, 12 aa, Homo sapiens
  CDR3 for alpha chain variable domain of TCR clone 172220 (TRAV13-1, TRAJ21)
CAAKEGFNKFYF

SEQ ID NO: 344440 - protein, 18 aa, Homo sapiens
  CDR3 for beta chain variable domain of TCR clone 172220 (TRBV20-1, TRBJ2-6)
CGAETTPTRGSGANVLTF

SEQ ID NO: 344441 - protein, 16 aa, Homo sapiens
  CDR3 for alpha chain variable domain of TCR clone 172221 (TRAV26-1, TRAJ31)
CIVRPPVLNNNARLMF

SEQ ID NO: 344442 - protein, 15 aa, Homo sapiens
  CDR3 for beta chain variable domain of TCR clone 172221 (TRBV4-1, TRBJ1-4)
CASSDTGGTNEKLFF

SEQ ID NO: 344443 - protein, 11 aa, Homo sapiens
  CDR3 for alpha chain variable domain of TCR clone 172222 (TRAV1-2, TRAJ20)
CAVSNDYKLSF

SEQ ID NO: 344444 - protein, 17 aa, Homo sapiens
  CDR3 for beta chain variable domain of TCR clone 172222 (TRBV20-1, TRBJ2-2)
CSASGSGQGVLTGELFF

SEQ ID NO: 344445 - protein, 14 aa, Homo sapiens
  CDR3 for alpha chain variable domain of TCR clone 172223 (TRAV8-2, TRAJ4)
CVLSPSGGYNKLIL

SEQ ID NO: 344446 - protein, 16 aa, Homo sapiens
  CDR3 for beta chain variable domain of TCR clone 172223 (TRBV15, TRBJ2-7)
CATSARQARSSYEQYF

SEQ ID NO: 344447 - protein, 13 aa, Homo sapiens
  CDR3 for alpha chain variable domain of TCR clone 172224 (TRAV12-1, TRAJ21)
CVVTDYNFNKFYF

SEQ ID NO: 344448 - protein, 15 aa, Homo sapiens
  CDR3 for beta chain variable domain of TCR clone 172224 (TRBV20-1, TRBJ2-7)
CSARDRVSGMDEQYF

SEQ ID NO: 344449 - protein, 16 aa, Homo sapiens
  CDR3 for alpha chain variable domain of TCR clone 172225 (TRAV30, TRAJ24)
CGTEIVDADSWGKFQF

SEQ ID NO: 344450 - protein, 15 aa, Homo sapiens
  CDR3 for beta chain variable domain of TCR clone 172225 (TRBV5-8, TRBJ2-7)
CASSYTGTGPREQYF

SEQ ID NO: 344451 - protein, 11 aa, Homo sapiens
  CDR3 for alpha chain variable domain of TCR clone 172226 (TRAV17, TRAJ9)
CGFTGGFKTIF

SEQ ID NO: 344452 - protein, 11 aa, Homo sapiens
  CDR3 for beta chain variable domain of TCR clone 172226 (TRBV7-9, TRBJ2-3)
CASSGPDTQYF

SEQ ID NO: 344453 - protein, 12 aa, Homo sapiens
  CDR3 for alpha chain variable domain of TCR clone 172227 (TRAV8-4, TRAJ37)
CAKSSNTGKLIF

SEQ ID NO: 344454 - protein, 13 aa, Homo sapiens
  CDR3 for beta chain variable domain of TCR clone 172227 (TRBV7-9, TRBJ1-2)
CASSLKQNYGYTF

SEQ ID NO: 344455 - protein, 15 aa, Homo sapiens
  CDR3 for alpha chain variable domain of TCR clone 172228 (TRAV36/DV7, TRAJ44)
CAVCRNTGTASKLTF

SEQ ID NO: 344456 - protein, 13 aa, Homo sapiens
  CDR3 for beta chain variable domain of TCR clone 172228 (TRBV10-1, TRBJ2-1)
CASSAGPDNEQFF

SEQ ID NO: 344457 - protein, 15 aa, Homo sapiens
  CDR3 for alpha chain variable domain of TCR clone 172229 (TRAV8-3, TRAJ11)
CAVGLLNSVSSTLTF

SEQ ID NO: 344458 - protein, 16 aa, Homo sapiens
  CDR3 for beta chain variable domain of TCR clone 172229 (TRBV7-9, TRBJ1-2)
CASSLGFSSGEDGYTF

SEQ ID NO: 344459 - protein, 13 aa, Homo sapiens
  CDR3 for alpha chain variable domain of TCR clone 172230 (TRAV12-1, TRAJ6)
CVVFPGGCYIPTF

SEQ ID NO: 344460 - protein, 14 aa, Homo sapiens
  CDR3 for beta chain variable domain of TCR clone 172230 (TRBV20-1, TRBJ1-3)
CSASPTGAGNTIYF

SEQ ID NO: 344461 - protein, 16 aa, Homo sapiens
  CDR3 for alpha chain variable domain of TCR clone 172231 (TRAV30, TRAJ24)
CGTEIVDADSWGKFQF

SEQ ID NO: 344462 - protein, 14 aa, Homo sapiens
  CDR3 for beta chain variable domain of TCR clone 172231 (TRBV12-5, TRBJ2-5)
CASASRTRQETQYF

SEQ ID NO: 344463 - protein, 11 aa, Homo sapiens
  CDR3 for alpha chain variable domain of TCR clone 172232 (TRAV21, TRAJ34)
CAHYNTDKLIF

SEQ ID NO: 344464 - protein, 14 aa, Homo sapiens
  CDR3 for beta chain variable domain of TCR clone 172232 (TRBV7-3, TRBJ1-1)
CASSLKGGNTEAFF

SEQ ID NO: 344465 - protein, 13 aa, Homo sapiens
  CDR3 for alpha chain variable domain of TCR clone 172233 (TRAV20, TRAJ37)
CAGCSSNTGKLIF

SEQ ID NO: 344466 - protein, 17 aa, Homo sapiens
  CDR3 for beta chain variable domain of TCR clone 172233 (TRBV7-7, TRBJ1-1)
CASIGDRPNLGVTEAFF

SEQ ID NO: 344467 - protein, 15 aa, Homo sapiens
  CDR3 for alpha chain variable domain of TCR clone 172234 (TRAV8-3, TRAJ44)
CAVGAGASTASKLPF

SEQ ID NO: 344468 - protein, 12 aa, Homo sapiens
  CDR3 for beta chain variable domain of TCR clone 172234 (TRBV7-8, TRBJ2-4)
CASSLGGNMQYF

SEQ ID NO: 344469 - protein, 14 aa, Homo sapiens
  CDR3 for alpha chain variable domain of TCR clone 172235 (TRAV38-1, TRAJ45)
CAYYSRGGADGLTF

SEQ ID NO: 344470 - protein, 15 aa, Homo sapiens
  CDR3 for beta chain variable domain of TCR clone 172235 (TRBV7-6, TRBJ2-1)
CASSLGGQSHNEQFF

SEQ ID NO: 344471 - protein, 12 aa, Homo sapiens
  CDR3 for alpha chain variable domain of TCR clone 172236 (TRAV13-1, TRAJ21)
CAAKEGFNKFYF

SEQ ID NO: 344472 - protein, 12 aa, Homo sapiens
  CDR3 for beta chain variable domain of TCR clone 172236 (TRBV7-9, TRBJ2-7)
CASSRSGYEQYF

SEQ ID NO: 344473 - protein, 15 aa, Homo sapiens
  CDR3 for alpha chain variable domain of TCR clone 172237 (TRAV26-1, TRAJ29)
CIVKVEGSGNTPRVF

SEQ ID NO: 344474 - protein, 14 aa, Homo sapiens
  CDR3 for beta chain variable domain of TCR clone 172237 (TRBV18, TRBJ2-5)
CASSPGVSQETQYF

SEQ ID NO: 344475 - protein, 15 aa, Homo sapiens
  CDR3 for alpha chain variable domain of TCR clone 172238 (TRAV12-2, TRAJ32)
CAVNHYGGATNKLIF

SEQ ID NO: 344476 - protein, 11 aa, Homo sapiens
  CDR3 for beta chain variable domain of TCR clone 172238 (TRBV12-4, TRBJ2-2)
CASSSAGELFF

SEQ ID NO: 344477 - protein, 16 aa, Homo sapiens
  CDR3 for alpha chain variable domain of TCR clone 172239 (TRAV26-1, )
CIDIQNPDPAGYQLRD

SEQ ID NO: 344478 - protein, 17 aa, Homo sapiens
  CDR3 for beta chain variable domain of TCR clone 172239 (TRBV18, TRBJ2-3)
CASSAAGTSGSTDTQYF

SEQ ID NO: 344479 - protein, 14 aa, Homo sapiens
  CDR3 for alpha chain variable domain of TCR clone 172240 (TRAV13-1, TRAJ24)
CAASRTDSWGKLQF

SEQ ID NO: 344480 - protein, 15 aa, Homo sapiens
  CDR3 for beta chain variable domain of TCR clone 172240 (TRBV7-9, TRBJ1-5)
CASCQGHQPNQTQHF

SEQ ID NO: 344481 - protein, 16 aa, Homo sapiens
  CDR3 for alpha chain variable domain of TCR clone 172241 (TRAV21, TRAJ52)
CAVTNAGGTSYGKLTF

SEQ ID NO: 344482 - protein, 13 aa, Homo sapiens
  CDR3 for beta chain variable domain of TCR clone 172241 (TRBV20-1, TRBJ2-3)
FSARLAGTDTQYF

SEQ ID NO: 344483 - protein, 13 aa, Homo sapiens
  CDR3 for alpha chain variable domain of TCR clone 172242 (TRAV2, TRAJ40)
CAVVPSGTYKYIF

SEQ ID NO: 344484 - protein, 18 aa, Homo sapiens
  CDR3 for beta chain variable domain of TCR clone 172242 (TRBV11-2, TRBJ2-3)
CASSLGGASRGAPNTQYF

SEQ ID NO: 344485 - protein, 14 aa, Homo sapiens
  CDR3 for alpha chain variable domain of TCR clone 172243 (TRAV12-2, TRAJ40)
CAVKIPSGTYKYIL

SEQ ID NO: 344486 - protein, 15 aa, Homo sapiens
  CDR3 for beta chain variable domain of TCR clone 172243 (TRBV28, TRBJ1-2)
CASSSPRRGNYGYTF

SEQ ID NO: 344487 - protein, 14 aa, Homo sapiens
  CDR3 for alpha chain variable domain of TCR clone 172244 (TRAV12-1, TRAJ42)
CVVIYVGSQGNLIF

SEQ ID NO: 344488 - protein, 15 aa, Homo sapiens
  CDR3 for beta chain variable domain of TCR clone 172244 (TRBV7-9, TRBJ1-5)
CASSQGHQSNQPQHF

SEQ ID NO: 344489 - protein, 15 aa, Homo sapiens
  CDR3 for alpha chain variable domain of TCR clone 172245 (TRAV2, TRAJ37)
CAVEDGSSNTGKLIF

SEQ ID NO: 344490 - protein, 13 aa, Homo sapiens
  CDR3 for beta chain variable domain of TCR clone 172245 (TRBV20-1, TRBJ1-6)
CSTFREGNSPLYF

SEQ ID NO: 344491 - protein, 14 aa, Homo sapiens
  CDR3 for alpha chain variable domain of TCR clone 172246 (TRAV8-3, TRAJ4)
CAVGAAGGNNKLIF

SEQ ID NO: 344492 - protein, 15 aa, Homo sapiens
  CDR3 for beta chain variable domain of TCR clone 172246 (TRBV6-5, TRBJ2-1)
CASSYDAGAGNEQFF

SEQ ID NO: 344493 - protein, 12 aa, Homo sapiens
  CDR3 for alpha chain variable domain of TCR clone 172247 (TRAV20, TRAJ56)
CAVTGANSKLTF

SEQ ID NO: 344494 - protein, 14 aa, Homo sapiens
  CDR3 for beta chain variable domain of TCR clone 172247 (TRBV20-1, TRBJ2-5)
CSALVPGYQETQYI

SEQ ID NO: 344495 - protein, 12 aa, Homo sapiens
  CDR3 for alpha chain variable domain of TCR clone 172248 (TRAV23/DV6, TRAJ30)
CSASKGDDKIIF

SEQ ID NO: 344496 - protein, 13 aa, Homo sapiens
  CDR3 for beta chain variable domain of TCR clone 172248 (TRBV19, TRBJ1-2)
CASSVPGQDGYTF

SEQ ID NO: 344497 - protein, 14 aa, Homo sapiens
  CDR3 for alpha chain variable domain of TCR clone 172249 (TRAV3, TRAJ21)
CALESQANFNTFYF

SEQ ID NO: 344498 - protein, 18 aa, Homo sapiens
  CDR3 for beta chain variable domain of TCR clone 172249 (TRBV7-9, TRBJ2-1)
CASSLAVSGTSGRNEQFF

SEQ ID NO: 344499 - protein, 14 aa, Homo sapiens
  CDR3 for alpha chain variable domain of TCR clone 172250 (TRAV12-1, TRAJ34)
CVVNLDYNTDKLIF

SEQ ID NO: 344500 - protein, 17 aa, Homo sapiens
  CDR3 for beta chain variable domain of TCR clone 172250 (TRBV7-3, TRBJ2-3)
CASSLMKRMRGADTQYF

SEQ ID NO: 344501 - protein, 14 aa, Homo sapiens
  CDR3 for alpha chain variable domain of TCR clone 172251 (TRAV23/DV6, TRAJ27)
CAASRATNAGKSTF

SEQ ID NO: 344502 - protein, 13 aa, Homo sapiens
  CDR3 for beta chain variable domain of TCR clone 172251 (TRBV20-1, TRBJ1-5)
CSASGRGNQPQHF

SEQ ID NO: 344503 - protein, 14 aa, Homo sapiens
  CDR3 for alpha chain variable domain of TCR clone 172252 (TRAV14/DV4, TRAJ20)
CAMRESLNDYKLSF

SEQ ID NO: 344504 - protein, 13 aa, Homo sapiens
  CDR3 for beta chain variable domain of TCR clone 172252 (TRBV12-4, TRBJ2-7)
CASSLNSAYEQYF

SEQ ID NO: 344505 - protein, 16 aa, Homo sapiens
  CDR3 for alpha chain variable domain of TCR clone 172253 (TRAV12-3, TRAJ53)
CAISPGSGGSNYKLTF

SEQ ID NO: 344506 - protein, 11 aa, Homo sapiens
  CDR3 for beta chain variable domain of TCR clone 172253 (TRBV29-1, TRBJ2-5)
CSEDRTGTQYF

SEQ ID NO: 344507 - protein, 18 aa, Homo sapiens
  CDR3 for alpha chain variable domain of TCR clone 172254 (TRAV26-1, TRAJ37)
CIVRVDMHGTSNTGKLIF

SEQ ID NO: 344508 - protein, 15 aa, Homo sapiens
  CDR3 for beta chain variable domain of TCR clone 172254 (TRBV20-1, TRBJ2-7)
CSARVLASPLYEQYF

SEQ ID NO: 344509 - protein, 13 aa, Homo sapiens
  CDR3 for alpha chain variable domain of TCR clone 172255 (TRAV26-1, TRAJ54)
CFVRVKGAQKLVF

SEQ ID NO: 344510 - protein, 15 aa, Homo sapiens
  CDR3 for beta chain variable domain of TCR clone 172255 (TRBV20-1, TRBJ2-1)
CSAQPGGGPYNEQFF

SEQ ID NO: 344511 - protein, 14 aa, Homo sapiens
  CDR3 for alpha chain variable domain of TCR clone 172256 (TRAV12-2, TRAJ13)
CAVKKTGGYKKVTF

SEQ ID NO: 344512 - protein, 13 aa, Homo sapiens
  CDR3 for beta chain variable domain of TCR clone 172256 (TRBV19, TRBJ2-7)
CASRKAGGSEQYF

SEQ ID NO: 344513 - protein, 17 aa, Homo sapiens
  CDR3 for alpha chain variable domain of TCR clone 172257 (TRAV17, TRAJ28)
CATDPRRGGAGSFQLTF

SEQ ID NO: 344514 - protein, 16 aa, Homo sapiens
  CDR3 for beta chain variable domain of TCR clone 172257 (TRBV25-1, TRBJ1-1)
CASSGDRDGGRIEAFF

SEQ ID NO: 344515 - protein, 15 aa, Homo sapiens
  CDR3 for alpha chain variable domain of TCR clone 172258 (TRAV2, TRAJ22)
CAVPSRGGSARQLTF

SEQ ID NO: 344516 - protein, 16 aa, Homo sapiens
  CDR3 for beta chain variable domain of TCR clone 172258 (TRBV13, TRBJ2-2)
CASSPRTGEHTGELFF

SEQ ID NO: 344517 - protein, 17 aa, Homo sapiens
  CDR3 for alpha chain variable domain of TCR clone 172259 (TRAV8-6, TRAJ58)
CAVSSWVGETSGSRLTF

SEQ ID NO: 344518 - protein, 15 aa, Homo sapiens
  CDR3 for beta chain variable domain of TCR clone 172259 (TRBV19, TRBJ1-5)
CASSIVWADNQPQHF

SEQ ID NO: 344519 - protein, 14 aa, Homo sapiens
  CDR3 for alpha chain variable domain of TCR clone 172260 (TRAV12-2, TRAJ17)
CAVLFKAEGNKLTF

SEQ ID NO: 344520 - protein, 17 aa, Homo sapiens
  CDR3 for beta chain variable domain of TCR clone 172260 (TRBV20-1, TRBJ2-2)
CSASGSGQGGLTGDLFF

SEQ ID NO: 344521 - protein, 10 aa, Homo sapiens
  CDR3 for alpha chain variable domain of TCR clone 172261 (TRAV23/DV6, TRAJ57)
CAASSTLSQC

SEQ ID NO: 344522 - protein, 14 aa, Homo sapiens
  CDR3 for beta chain variable domain of TCR clone 172261 (TRBV13, TRBJ2-5)
CASSLGQGKETQYF

SEQ ID NO: 344523 - protein, 14 aa, Homo sapiens
  CDR3 for alpha chain variable domain of TCR clone 172262 (TRAV12-2, TRAJ13)
CAVKKTGGYQKVTF

SEQ ID NO: 344524 - protein, 16 aa, Homo sapiens
  CDR3 for beta chain variable domain of TCR clone 172262 (TRBV20-1, TRBJ1-4)
CGAPGQGLLTNEKLFF

SEQ ID NO: 344525 - protein, 12 aa, Homo sapiens
  CDR3 for alpha chain variable domain of TCR clone 172263 (TRAV1-2, TRAJ33)
CAALDSNYQLIW

SEQ ID NO: 344526 - protein, 15 aa, Homo sapiens
  CDR3 for beta chain variable domain of TCR clone 172263 (TRBV11-2, TRBJ2-2)
CASSPSGGGTGELFF

SEQ ID NO: 344527 - protein, 14 aa, Homo sapiens
  CDR3 for alpha chain variable domain of TCR clone 172264 (TRAV4, TRAJ20)
FLVGDFINDYKLSF

SEQ ID NO: 344528 - protein, 15 aa, Homo sapiens
  CDR3 for beta chain variable domain of TCR clone 172264 (TRBV6-5, TRBJ1-1)
CASSYLRGSVPEAFF

SEQ ID NO: 344529 - protein, 10 aa, Homo sapiens
  CDR3 for alpha chain variable domain of TCR clone 172265 (TRAV8-4, TRAJ43)
CAVSADDMRF

SEQ ID NO: 344530 - protein, 15 aa, Homo sapiens
  CDR3 for beta chain variable domain of TCR clone 172265 (TRBV5-1, TRBJ2-3)
CASSVTSGSTDTRYF

SEQ ID NO: 344531 - protein, 16 aa, Homo sapiens
  CDR3 for alpha chain variable domain of TCR clone 172266 (TRAV23/DV6, TRAJ9)
CAASIGGNTGGFKTIF

SEQ ID NO: 344532 - protein, 12 aa, Homo sapiens
  CDR3 for beta chain variable domain of TCR clone 172266 (TRBV11-2, TRBJ2-5)
CASSLVGETQYF

SEQ ID NO: 344533 - protein, 12 aa, Homo sapiens
  CDR3 for alpha chain variable domain of TCR clone 172267 (TRAV1-2, TRAJ33)
CAALDSNYQLIW

SEQ ID NO: 344534 - protein, 11 aa, Homo sapiens
  CDR3 for beta chain variable domain of TCR clone 172267 (TRBV7-6, TRBJ2-1)
CASSNYGEQFF

SEQ ID NO: 344535 - protein, 14 aa, Homo sapiens
  CDR3 for alpha chain variable domain of TCR clone 172268 (TRAV12-2, TRAJ53)
CAVKGGGSNYKLTF

SEQ ID NO: 344536 - protein, 15 aa, Homo sapiens
  CDR3 for beta chain variable domain of TCR clone 172268 (TRBV11-2, TRBJ2-2)
CASSSDRVDAGELFF

SEQ ID NO: 344537 - protein, 22 aa, Homo sapiens
  CDR3 for alpha chain variable domain of TCR clone 172269 (TRAV2, TRAJ10)
ILQVREADAAVYYTGGGNKLTF

SEQ ID NO: 344538 - protein, 17 aa, Homo sapiens
  CDR3 for beta chain variable domain of TCR clone 172269 (TRBV20-1, TRBJ2-2)
CSASGSGQGGLTGELFF

SEQ ID NO: 344539 - protein, 15 aa, Homo sapiens
  CDR3 for alpha chain variable domain of TCR clone 172270 (TRAV23/DV6, TRAJ18)
CAASHAGSTLGRLYF

SEQ ID NO: 344540 - protein, 14 aa, Homo sapiens
  CDR3 for beta chain variable domain of TCR clone 172270 (TRBV20-1, TRBJ2-1)
CSASGLASYNEQFF

SEQ ID NO: 344541 - protein, 11 aa, Homo sapiens
  CDR3 for alpha chain variable domain of TCR clone 172271 (TRAV12-1, TRAJ43)
CVEYDNNDLRF

SEQ ID NO: 344542 - protein, 15 aa, Homo sapiens
  CDR3 for beta chain variable domain of TCR clone 172271 (TRBV18, TRBJ2-5)
CASSPRASEAETQYF

SEQ ID NO: 344543 - protein, 16 aa, Homo sapiens
  CDR3 for alpha chain variable domain of TCR clone 172272 (TRAV4, TRAJ22)
CLVGDLYSGSARQLTF

SEQ ID NO: 344544 - protein, 14 aa, Homo sapiens
  CDR3 for beta chain variable domain of TCR clone 172272 (TRBV19, TRBJ1-5)
CASSFTGSNQPQHF

SEQ ID NO: 344545 - protein, 15 aa, Homo sapiens
  CDR3 for alpha chain variable domain of TCR clone 172273 (TRAV12-1, TRAJ22)
CVVRISSGSARQLTF

SEQ ID NO: 344546 - protein, 15 aa, Homo sapiens
  CDR3 for beta chain variable domain of TCR clone 172273 (TRBV5-1, TRBJ2-3)
CASSVTSGSTDTQYF

SEQ ID NO: 344547 - protein, 13 aa, Homo sapiens
  CDR3 for alpha chain variable domain of TCR clone 172274 (TRAV23/DV6, TRAJ27)
CAASRPMQANQPL

SEQ ID NO: 344548 - protein, 14 aa, Homo sapiens
  CDR3 for beta chain variable domain of TCR clone 172274 (TRBV5-4, TRBJ1-1)
CASSLDSRRDEAFF

SEQ ID NO: 344549 - protein, 14 aa, Homo sapiens
  CDR3 for alpha chain variable domain of TCR clone 172275 (TRAV1-2, TRAJ6)
CAVSLSGGSYIPTF

SEQ ID NO: 344550 - protein, 14 aa, Homo sapiens
  CDR3 for beta chain variable domain of TCR clone 172275 (TRBV15, TRBJ2-5)
CATSIGGLGETQYF

SEQ ID NO: 344551 - protein, 10 aa, Homo sapiens
  CDR3 for alpha chain variable domain of TCR clone 172276 (TRAV23/DV6, TRAJ57)
CAASSTLSQG

SEQ ID NO: 344552 - protein, 13 aa, Homo sapiens
  CDR3 for beta chain variable domain of TCR clone 172276 (TRBV11-3, TRBJ2-3)
CASSHDTKDTQYL

SEQ ID NO: 344553 - protein, 15 aa, Homo sapiens
  CDR3 for alpha chain variable domain of TCR clone 172277 (TRAV17, TRAJ42)
CATDHYGGSQGNLIF

SEQ ID NO: 344554 - protein, 14 aa, Homo sapiens
  CDR3 for beta chain variable domain of TCR clone 172277 (TRBV25-1, TRBJ1-1)
CASTHLGGNTEAFF

SEQ ID NO: 344555 - protein, 13 aa, Homo sapiens
  CDR3 for alpha chain variable domain of TCR clone 172278 (TRAV2, TRAJ15)
CAVASQAGTALIF

SEQ ID NO: 344556 - protein, 13 aa, Homo sapiens
  CDR3 for beta chain variable domain of TCR clone 172278 (TRBV6-6, TRBJ2-3)
CASSQGGRDTQYF

SEQ ID NO: 344557 - protein, 10 aa, Homo sapiens
  CDR3 for alpha chain variable domain of TCR clone 172279 (TRAV16, TRAJ22)
SAMYLRQLTF

SEQ ID NO: 344558 - protein, 15 aa, Homo sapiens
  CDR3 for beta chain variable domain of TCR clone 172279 (TRBV7-9, TRBJ1-6)
CASSSPGRGNSTLLF

SEQ ID NO: 344559 - protein, 14 aa, Homo sapiens
  CDR3 for alpha chain variable domain of TCR clone 172280 (TRAV12-1, TRAJ17)
CVVNHKAAGNKLTF

SEQ ID NO: 344560 - protein, 17 aa, Homo sapiens
  CDR3 for beta chain variable domain of TCR clone 172280 (TRBV20-1, TRBJ2-1)
CSASSSGLAGSYNEQCF

SEQ ID NO: 344561 - protein, 13 aa, Homo sapiens
  CDR3 for alpha chain variable domain of TCR clone 172281 (TRAV20, TRAJ11)
CAVQARGYSTLTF

SEQ ID NO: 344562 - protein, 15 aa, Homo sapiens
  CDR3 for beta chain variable domain of TCR clone 172281 (TRBV9, TRBJ1-6)
CASSVAGTGDSPLHF

SEQ ID NO: 344563 - protein, 17 aa, Homo sapiens
  CDR3 for alpha chain variable domain of TCR clone 172282 (TRAV3, TRAJ6)
CAVRDGPRAGGSYIPTF

SEQ ID NO: 344564 - protein, 15 aa, Homo sapiens
  CDR3 for beta chain variable domain of TCR clone 172282 (TRBV28, TRBJ2-1)
CASRVGLDEYNEQFF

SEQ ID NO: 344565 - protein, 18 aa, Homo sapiens
  CDR3 for alpha chain variable domain of TCR clone 172283 (TRAV20, TRAJ4)
CAVQPYYMFSGGYDKLIF

SEQ ID NO: 344566 - protein, 13 aa, Homo sapiens
  CDR3 for beta chain variable domain of TCR clone 172283 (TRBV19, TRBJ2-3)
CATWDKITDTQYF

SEQ ID NO: 344567 - protein, 14 aa, Homo sapiens
  CDR3 for alpha chain variable domain of TCR clone 172284 (TRAV12-2, TRAJ5)
CAVNRSTGSRALTF

SEQ ID NO: 344568 - protein, 12 aa, Homo sapiens
  CDR3 for beta chain variable domain of TCR clone 172284 (TRBV19, TRBJ1-5)
CASSIAQQPQRF

SEQ ID NO: 344569 - protein, 18 aa, Homo sapiens
  CDR3 for alpha chain variable domain of TCR clone 172285 (TRAV12-3, TRAJ52)
RAMSVGGAGGTSYGKLTF

SEQ ID NO: 344570 - protein, 15 aa, Homo sapiens
  CDR3 for beta chain variable domain of TCR clone 172285 (TRBV27, TRBJ1-6)
CASSFDRGLGSPPHF

SEQ ID NO: 344571 - protein, 17 aa, Homo sapiens
  CDR3 for alpha chain variable domain of TCR clone 172286 (TRAV21, TRAJ24)
CAGIRLRSTDSWGKLQF

SEQ ID NO: 344572 - protein, 13 aa, Homo sapiens
  CDR3 for beta chain variable domain of TCR clone 172286 (TRBV7-3, TRBJ1-1)
CASSQDWGAEAFF

SEQ ID NO: 344573 - protein, 16 aa, Homo sapiens
  CDR3 for alpha chain variable domain of TCR clone 172287 (TRAV30, TRAJ24)
CGTEIVDADSWGKFQF

SEQ ID NO: 344574 - protein, 12 aa, Homo sapiens
  CDR3 for beta chain variable domain of TCR clone 172287 (TRBV19, TRBJ2-1)
CASMMQDTEQFF

SEQ ID NO: 344575 - protein, 15 aa, Homo sapiens
  CDR3 for alpha chain variable domain of TCR clone 172288 (TRAV16, TRAJ10)
FALMELTGGGNKLTF

SEQ ID NO: 344576 - protein, 14 aa, Homo sapiens
  CDR3 for beta chain variable domain of TCR clone 172288 (TRBV5-5, TRBJ2-7)
CASSLGQGTYEQYF

SEQ ID NO: 344577 - protein, 13 aa, Homo sapiens
  CDR3 for alpha chain variable domain of TCR clone 172289 (TRAV21, TRAJ57)
CVVTQGGSEKLVF

SEQ ID NO: 344578 - protein, 16 aa, Homo sapiens
  CDR3 for beta chain variable domain of TCR clone 172289 (TRBV29-1, TRBJ2-7)
CSVEDAEDGTAYEQYF

SEQ ID NO: 344579 - protein, 14 aa, Homo sapiens
  CDR3 for alpha chain variable domain of TCR clone 172290 (TRAV8-3, TRAJ4)
CAVGAAGGYNKLFF

SEQ ID NO: 344580 - protein, 15 aa, Homo sapiens
  CDR3 for beta chain variable domain of TCR clone 172290 (TRBV6-5, TRBJ2-1)
CASSYDAGAGNEQLF

SEQ ID NO: 344581 - protein, 15 aa, Homo sapiens
  CDR3 for alpha chain variable domain of TCR clone 172291 (TRAV12-2, TRAJ53)
CAVNGGGGSNYKLTF

SEQ ID NO: 344582 - protein, 12 aa, Homo sapiens
  CDR3 for beta chain variable domain of TCR clone 172291 (TRBV27, TRBJ1-6)
CASKLFQGPLRF

SEQ ID NO: 344583 - protein, 15 aa, Homo sapiens
  CDR3 for alpha chain variable domain of TCR clone 172292 (TRAV29/DV5, TRAJ42)
CAAKTDGGSQGNLIF

SEQ ID NO: 344584 - protein, 12 aa, Homo sapiens
  CDR3 for beta chain variable domain of TCR clone 172292 (TRBV11-2, TRBJ2-7)
CASSFGSYEQYF

SEQ ID NO: 344585 - protein, 14 aa, Homo sapiens
  CDR3 for alpha chain variable domain of TCR clone 172293 (TRAV35, TRAJ22)
CAGLRPGSARQLTF

SEQ ID NO: 344586 - protein, 17 aa, Homo sapiens
  CDR3 for beta chain variable domain of TCR clone 172293 (TRBV4-1, TRBJ1-4)
CASSQEGPRGVEEKLFF

SEQ ID NO: 344587 - protein, 13 aa, Homo sapiens
  CDR3 for alpha chain variable domain of TCR clone 172294 (TRAV3, TRAJ20)
CAVRDTGDYKLTF

SEQ ID NO: 344588 - protein, 15 aa, Homo sapiens
  CDR3 for beta chain variable domain of TCR clone 172294 (TRBV6-1, TRBJ2-7)
CASSEGGGVSYEQYF

SEQ ID NO: 344589 - protein, 12 aa, Homo sapiens
  CDR3 for alpha chain variable domain of TCR clone 172295 (TRAV27, TRAJ35)
CAGADFGNVLHC

SEQ ID NO: 344590 - protein, 16 aa, Homo sapiens
  CDR3 for beta chain variable domain of TCR clone 172295 (TRBV6-1, TRBJ2-1)
CSSISRQGSSYNEQFF

SEQ ID NO: 344591 - protein, 12 aa, Homo sapiens
  CDR3 for alpha chain variable domain of TCR clone 172296 (TRAV20, TRAJ39)
CAVGNAGNMLTF

SEQ ID NO: 344592 - protein, 16 aa, Homo sapiens
  CDR3 for beta chain variable domain of TCR clone 172296 (TRBV18, TRBJ1-1)
CASSPGVGGRGGEAFF

SEQ ID NO: 344593 - protein, 15 aa, Homo sapiens
  CDR3 for alpha chain variable domain of TCR clone 172297 (TRAV26-1, TRAJ56)
CIVRVDNGANSKLTF

SEQ ID NO: 344594 - protein, 14 aa, Homo sapiens
  CDR3 for beta chain variable domain of TCR clone 172297 (TRBV19, TRBJ2-2)
CASSTLHRSGELFF

SEQ ID NO: 344595 - protein, 15 aa, Homo sapiens
  CDR3 for alpha chain variable domain of TCR clone 172298 (TRAV20, TRAJ6)
CAVRLQSGGSYIPTF

SEQ ID NO: 344596 - protein, 13 aa, Homo sapiens
  CDR3 for beta chain variable domain of TCR clone 172298 (TRBV10-2, TRBJ2-7)
CASGASGGYEQYF

SEQ ID NO: 344597 - protein, 13 aa, Homo sapiens
  CDR3 for alpha chain variable domain of TCR clone 172299 (TRAV13-1, TRAJ5)
CAAGSRAGEHLLL

SEQ ID NO: 344598 - protein, 15 aa, Homo sapiens
  CDR3 for beta chain variable domain of TCR clone 172299 (TRBV7-9, TRBJ2-7)
CASSPGGGLTYEQYF

SEQ ID NO: 344599 - protein, 13 aa, Homo sapiens
  CDR3 for alpha chain variable domain of TCR clone 172300 (TRAV13-2, TRAJ13)
CAERPGGYQKVTF

SEQ ID NO: 344600 - protein, 17 aa, Homo sapiens
  CDR3 for beta chain variable domain of TCR clone 172300 (TRBV7-9, TRBJ2-6)
CASSFGAGYSGANVLTF

SEQ ID NO: 344601 - protein, 11 aa, Homo sapiens
  CDR3 for alpha chain variable domain of TCR clone 172301 (TRAV12-2, TRAJ49)
CAVNTGNQFYF

SEQ ID NO: 344602 - protein, 15 aa, Homo sapiens
  CDR3 for beta chain variable domain of TCR clone 172301 (TRBV7-2, TRBJ2-1)
CASSLVAGRYNEQFF

SEQ ID NO: 344603 - protein, 12 aa, Homo sapiens
  CDR3 for alpha chain variable domain of TCR clone 172302 (TRAV12-2, TRAJ10)
WGVTGGGNKLTF

SEQ ID NO: 344604 - protein, 14 aa, Homo sapiens
  CDR3 for beta chain variable domain of TCR clone 172302 (TRBV19, TRBJ2-3)
CVSSAPRGTDTQYF

SEQ ID NO: 344605 - protein, 10 aa, Homo sapiens
  CDR3 for alpha chain variable domain of TCR clone 172303 (TRAV12-1, TRAJ43)
CVVHNNNMRF

SEQ ID NO: 344606 - protein, 13 aa, Homo sapiens
  CDR3 for beta chain variable domain of TCR clone 172303 (TRBV12-4, TRBJ1-2)
CASSSGLTVISTF

SEQ ID NO: 344607 - protein, 13 aa, Homo sapiens
  CDR3 for alpha chain variable domain of TCR clone 172304 (TRAV36/DV7, TRAJ57)
CAVVLGGSEKLVF

SEQ ID NO: 344608 - protein, 14 aa, Homo sapiens
  CDR3 for beta chain variable domain of TCR clone 172304 (TRBV4-1, TRBJ1-2)
CASSQDGQVLGYTF

SEQ ID NO: 344609 - protein, 15 aa, Homo sapiens
  CDR3 for alpha chain variable domain of TCR clone 172305 (TRAV12-1, TRAJ45)
CVVLSGGGGADGLTF

SEQ ID NO: 344610 - protein, 15 aa, Homo sapiens
  CDR3 for beta chain variable domain of TCR clone 172305 (TRBV20-1, TRBJ2-7)
CSASDRVSGMDEQYF

SEQ ID NO: 344611 - protein, 13 aa, Homo sapiens
  CDR3 for alpha chain variable domain of TCR clone 172306 (TRAV3, TRAJ27)
CAERPLAQANQPL

SEQ ID NO: 344612 - protein, 13 aa, Homo sapiens
  CDR3 for beta chain variable domain of TCR clone 172306 (TRBV7-9, TRBJ2-3)
CASSPGSTDTQYF

SEQ ID NO: 344613 - protein, 12 aa, Homo sapiens
  CDR3 for alpha chain variable domain of TCR clone 172307 (TRAV8-3, TRAJ20)
CAVGANDYKLSF

SEQ ID NO: 344614 - protein, 11 aa, Homo sapiens
  CDR3 for beta chain variable domain of TCR clone 172307 (TRBV18, TRBJ2-5)
CASSPRETQYF

SEQ ID NO: 344615 - protein, 13 aa, Homo sapiens
  CDR3 for alpha chain variable domain of TCR clone 172308 (TRAV17, TRAJ40)
CATAPGGNYKYIF

SEQ ID NO: 344616 - protein, 12 aa, Homo sapiens
  CDR3 for beta chain variable domain of TCR clone 172308 (TRBV2, TRBJ1-5)
CASSENRTPQHF

SEQ ID NO: 344617 - protein, 14 aa, Homo sapiens
  CDR3 for alpha chain variable domain of TCR clone 172309 (TRAV12-3, TRAJ43)
CAMSLGGAGTRLTE

SEQ ID NO: 344618 - protein, 16 aa, Homo sapiens
  CDR3 for beta chain variable domain of TCR clone 172309 (TRBV24-1, TRBJ2-1)
CATSGVTGANYNEQFF

SEQ ID NO: 344619 - protein, 14 aa, Homo sapiens
  CDR3 for alpha chain variable domain of TCR clone 172310 (TRAV29/DV5, TRAJ22)
CAASVTGSARQLTF

SEQ ID NO: 344620 - protein, 14 aa, Homo sapiens
  CDR3 for beta chain variable domain of TCR clone 172310 (TRBV19, TRBJ2-1)
CASSPGLAPNEQFF

SEQ ID NO: 344621 - protein, 12 aa, Homo sapiens
  CDR3 for alpha chain variable domain of TCR clone 172311 (TRAV26-1, TRAJ31)
CIVRNNNARLMF

SEQ ID NO: 344622 - protein, 14 aa, Homo sapiens
  CDR3 for beta chain variable domain of TCR clone 172311 (TRBV13, TRBJ2-5)
CASSLGRGQETQYF

SEQ ID NO: 344623 - protein, 15 aa, Homo sapiens
  CDR3 for alpha chain variable domain of TCR clone 172312 (TRAV12-1, TRAJ15)
CVVTRANQAVTALIF

SEQ ID NO: 344624 - protein, 14 aa, Homo sapiens
  CDR3 for beta chain variable domain of TCR clone 172312 (TRBV5-1, TRBJ1-1)
CASSLVSINTEAFF

SEQ ID NO: 344625 - protein, 14 aa, Homo sapiens
  CDR3 for alpha chain variable domain of TCR clone 172313 (TRAV8-3, TRAJ39)
CAVGANNAGNMLTF

SEQ ID NO: 344626 - protein, 18 aa, Homo sapiens
  CDR3 for beta chain variable domain of TCR clone 172313 (TRBV20-1, TRBJ2-3)
CSASGLAGGPGTTDTQYF

SEQ ID NO: 344627 - protein, 14 aa, Homo sapiens
  CDR3 for alpha chain variable domain of TCR clone 172314 (TRAV21, TRAJ35)
CAVMPIGFGNVLHF

SEQ ID NO: 344628 - protein, 12 aa, Homo sapiens
  CDR3 for beta chain variable domain of TCR clone 172314 (TRBV7-9, TRBJ2-7)
RASSIKREEQYF

SEQ ID NO: 344629 - protein, 14 aa, Homo sapiens
  CDR3 for alpha chain variable domain of TCR clone 172315 (TRAV1-2, TRAJ8)
CAVREDTGFQKLVF

SEQ ID NO: 344630 - protein, 16 aa, Homo sapiens
  CDR3 for beta chain variable domain of TCR clone 172315 (TRBV12-4, TRBJ1-5)
CASSRPVGGSNQSQHF

SEQ ID NO: 344631 - protein, 14 aa, Homo sapiens
  CDR3 for alpha chain variable domain of TCR clone 172316 (TRAV3, TRAJ8)
CAVSLNTGFQKLVF

SEQ ID NO: 344632 - protein, 19 aa, Homo sapiens
  CDR3 for beta chain variable domain of TCR clone 172316 (TRBV25-1, TRBJ2-2)
CAILVYRVDRGRKAGELFF

SEQ ID NO: 344633 - protein, 11 aa, Homo sapiens
  CDR3 for alpha chain variable domain of TCR clone 172317 (TRAV21, TRAJ48)
CAVDGNEKLTF

SEQ ID NO: 344634 - protein, 15 aa, Homo sapiens
  CDR3 for beta chain variable domain of TCR clone 172317 (TRBV6-1, TRBJ2-3)
CASSERGGITDTQYF

SEQ ID NO: 344635 - protein, 14 aa, Homo sapiens
  CDR3 for alpha chain variable domain of TCR clone 172318 (TRAV12-2, TRAJ40)
CAVKIPSGASKYIF

SEQ ID NO: 344636 - protein, 14 aa, Homo sapiens
  CDR3 for beta chain variable domain of TCR clone 172318 (TRBV20-1, TRBJ1-1)
CSAQTLIGGTEAFF

SEQ ID NO: 344637 - protein, 16 aa, Homo sapiens
  CDR3 for alpha chain variable domain of TCR clone 172319 (TRAV12-2, TRAJ10)
CAVNRVLTGGGNKLTF

SEQ ID NO: 344638 - protein, 14 aa, Homo sapiens
  CDR3 for beta chain variable domain of TCR clone 172319 (TRBV9, TRBJ2-4)
CASSPSGTSGFQYF

SEQ ID NO: 344639 - protein, 16 aa, Homo sapiens
  CDR3 for alpha chain variable domain of TCR clone 172320 (TRAV4, TRAJ5)
CLVGPDHGHGQESTYF

SEQ ID NO: 344640 - protein, 15 aa, Homo sapiens
  CDR3 for beta chain variable domain of TCR clone 172320 (TRBV27, TRBJ2-5)
CASRLIPSGGETQYF

SEQ ID NO: 344641 - protein, 13 aa, Homo sapiens
  CDR3 for alpha chain variable domain of TCR clone 172321 (TRAV12-2, TRAJ52)
CAAHGTGYGKLTF

SEQ ID NO: 344642 - protein, 15 aa, Homo sapiens
  CDR3 for beta chain variable domain of TCR clone 172321 (TRBV10-3, TRBJ2-7)
CAISTFSGVKGEQYF

SEQ ID NO: 344643 - protein, 14 aa, Homo sapiens
  CDR3 for alpha chain variable domain of TCR clone 172322 (TRAV1-1, TRAJ23)
CAVSIYNQGGKLIF

SEQ ID NO: 344644 - protein, 15 aa, Homo sapiens
  CDR3 for beta chain variable domain of TCR clone 172322 (TRBV19, TRBJ1-2)
CASSVGQVLNYGYAF

SEQ ID NO: 344645 - protein, 15 aa, Homo sapiens
  CDR3 for alpha chain variable domain of TCR clone 172323 (TRAV26-1, TRAJ15)
CIVRTANQAGTALIF

SEQ ID NO: 344646 - protein, 15 aa, Homo sapiens
  CDR3 for beta chain variable domain of TCR clone 172323 (TRBV20-1, TRBJ1-1)
CSARSAATSNTEAFF

SEQ ID NO: 344647 - protein, 16 aa, Homo sapiens
  CDR3 for alpha chain variable domain of TCR clone 172324 (TRAV35, TRAJ29)
CAGPIRGISGNTPLVF

SEQ ID NO: 344648 - protein, 17 aa, Homo sapiens
  CDR3 for beta chain variable domain of TCR clone 172324 (TRBV13, TRBJ2-3)
CASSLSRVAGGRNTQYF

SEQ ID NO: 344649 - protein, 13 aa, Homo sapiens
  CDR3 for alpha chain variable domain of TCR clone 172325 (TRAV12-3, TRAJ36)
CAMRRPGANNLFF

SEQ ID NO: 344650 - protein, 18 aa, Homo sapiens
  CDR3 for beta chain variable domain of TCR clone 172325 (TRBV11-1, TRBJ2-2)
CASSREAGGPGYTGELFF

SEQ ID NO: 344651 - protein, 15 aa, Homo sapiens
  CDR3 for alpha chain variable domain of TCR clone 172326 (TRAV26-1, TRAJ29)
CIVRVEGSGKTPLVF

SEQ ID NO: 344652 - protein, 14 aa, Homo sapiens
  CDR3 for beta chain variable domain of TCR clone 172326 (TRBV25-1, TRBJ1-1)
CASTHLGGNTEAFF

SEQ ID NO: 344653 - protein, 14 aa, Homo sapiens
  CDR3 for alpha chain variable domain of TCR clone 172327 (TRAV12-2, TRAJ5)
CAVNRSTGRRALTF

SEQ ID NO: 344654 - protein, 16 aa, Homo sapiens
  CDR3 for beta chain variable domain of TCR clone 172327 (TRBV20-1, TRBJ1-2)
CSASMGQGVANYGYTF

SEQ ID NO: 344655 - protein, 15 aa, Homo sapiens
  CDR3 for alpha chain variable domain of TCR clone 172328 (TRAV8-3, TRAJ45)
CASSYSGGGADGLLF

SEQ ID NO: 344656 - protein, 13 aa, Homo sapiens
  CDR3 for beta chain variable domain of TCR clone 172328 (TRBV10-3, TRBJ2-7)
CASKLAVNYEQYF

SEQ ID NO: 344657 - protein, 16 aa, Homo sapiens
  CDR3 for alpha chain variable domain of TCR clone 172329 (TRAV20, TRAJ26)
CAVQHRRDNYGQNFVF

SEQ ID NO: 344658 - protein, 14 aa, Homo sapiens
  CDR3 for beta chain variable domain of TCR clone 172329 (TRBV12-5, TRBJ2-5)
CASGSRTHQETQYF

SEQ ID NO: 344659 - protein, 14 aa, Homo sapiens
  CDR3 for alpha chain variable domain of TCR clone 172330 (TRAV12-2, TRAJ53)
CRERGGGSNYKLTF

SEQ ID NO: 344660 - protein, 16 aa, Homo sapiens
  CDR3 for beta chain variable domain of TCR clone 172330 (TRBV3-1, TRBJ2-7)
CASSQGATGVAYEQYF

SEQ ID NO: 344661 - protein, 14 aa, Homo sapiens
  CDR3 for alpha chain variable domain of TCR clone 172331 (TRAV17, TRAJ12)
CATDEKDSSYKLIF

SEQ ID NO: 344662 - protein, 16 aa, Homo sapiens
  CDR3 for beta chain variable domain of TCR clone 172331 (TRBV11-2, TRBJ2-1)
CASSPRLVGVYDEQFF

SEQ ID NO: 344663 - protein, 11 aa, Homo sapiens
  CDR3 for alpha chain variable domain of TCR clone 172332 (TRAV1-2, TRAJ40)
CAVPGTYKYIY

SEQ ID NO: 344664 - protein, 15 aa, Homo sapiens
  CDR3 for beta chain variable domain of TCR clone 172332 (TRBV5-7, TRBJ1-5)
CASSYGKLWDQPQHF

SEQ ID NO: 344665 - protein, 15 aa, Homo sapiens
  CDR3 for alpha chain variable domain of TCR clone 172333 (TRAV8-3, TRAJ11)
CAVGLVNSGYSTLTF

SEQ ID NO: 344666 - protein, 15 aa, Homo sapiens
  CDR3 for beta chain variable domain of TCR clone 172333 (TRBV13, TRBJ2-1)
CASSLLSGLNNEQFF

SEQ ID NO: 344667 - protein, 11 aa, Homo sapiens
  CDR3 for alpha chain variable domain of TCR clone 172334 (TRAV35, TRAJ34)
CWARNTDKLIF

SEQ ID NO: 344668 - protein, 14 aa, Homo sapiens
  CDR3 for beta chain variable domain of TCR clone 172334 (TRBV5-1, TRBJ2-7)
CASSRWESLYEQYF

SEQ ID NO: 344669 - protein, 14 aa, Homo sapiens
  CDR3 for alpha chain variable domain of TCR clone 172335 (TRAV12-2, TRAJ13)
CAVKKTGGYQKVTF

SEQ ID NO: 344670 - protein, 13 aa, Homo sapiens
  CDR3 for beta chain variable domain of TCR clone 172335 (TRBV19, TRBJ1-2)
CASSVPGQDGYAF

SEQ ID NO: 344671 - protein, 15 aa, Homo sapiens
  CDR3 for alpha chain variable domain of TCR clone 172336 (TRAV12-2, TRAJ43)
CAFDMRFGAGTRLIV

SEQ ID NO: 344672 - protein, 18 aa, Homo sapiens
  CDR3 for beta chain variable domain of TCR clone 172336 (TRBV20-1, TRBJ2-3)
CSASGLAGGPGTTDAQYF

SEQ ID NO: 344673 - protein, 13 aa, Homo sapiens
  CDR3 for alpha chain variable domain of TCR clone 172337 (TRAV16, TRAJ28)
CALTGAGSYQLTF

SEQ ID NO: 344674 - protein, 16 aa, Homo sapiens
  CDR3 for beta chain variable domain of TCR clone 172337 (TRBV27, TRBJ2-2)
CASSFRGLVRTGELFF

SEQ ID NO: 344675 - protein, 10 aa, Homo sapiens
  CDR3 for alpha chain variable domain of TCR clone 172338 (TRAV1-2, TRAJ26)
CAVRGQNFVF

SEQ ID NO: 344676 - protein, 13 aa, Homo sapiens
  CDR3 for beta chain variable domain of TCR clone 172338 (TRBV12-4, TRBJ2-1)
CASSLADYNEQFF

SEQ ID NO: 344677 - protein, 15 aa, Homo sapiens
  CDR3 for alpha chain variable domain of TCR clone 172339 (TRAV1-1, TRAJ23)
CAVRVCYNQVGKLIF

SEQ ID NO: 344678 - protein, 13 aa, Homo sapiens
  CDR3 for beta chain variable domain of TCR clone 172339 (TRBV7-2, TRBJ1-1)
CASSLTENTEAFF

SEQ ID NO: 344679 - protein, 18 aa, Homo sapiens
  CDR3 for alpha chain variable domain of TCR clone 172340 (TRAV12-3, TRAJ52)
CAMSVGGAGGTSYGKLTF

SEQ ID NO: 344680 - protein, 15 aa, Homo sapiens
  CDR3 for beta chain variable domain of TCR clone 172340 (TRBV12-4, TRBJ2-5)
CASSPPTGLQETQYF

SEQ ID NO: 344681 - protein, 15 aa, Homo sapiens
  CDR3 for alpha chain variable domain of TCR clone 172341 (TRAV26-1, TRAJ28)
CIVRVAGAGSYQLTF

SEQ ID NO: 344682 - protein, 19 aa, Homo sapiens
  CDR3 for beta chain variable domain of TCR clone 172341 (TRBV7-3, TRBJ2-7)
CDSSLTGVAGGWPSYEQYF

SEQ ID NO: 344683 - protein, 16 aa, Homo sapiens
  CDR3 for alpha chain variable domain of TCR clone 172342 (TRAV16, TRAJ4)
CALSRMFSGGYNKVIF

SEQ ID NO: 344684 - protein, 16 aa, Homo sapiens
  CDR3 for beta chain variable domain of TCR clone 172342 (TRBV24-1, TRBJ2-3)
CATSDPGTGATDTQYF

SEQ ID NO: 344685 - protein, 14 aa, Homo sapiens
  CDR3 for alpha chain variable domain of TCR clone 172343 (TRAV23/DV6, TRAJ11)
CAALIGGGYSTLTF

SEQ ID NO: 344686 - protein, 18 aa, Homo sapiens
  CDR3 for beta chain variable domain of TCR clone 172343 (TRBV2, TRBJ2-5)
CASSGDPQGRGAQETQYF

SEQ ID NO: 344687 - protein, 16 aa, Homo sapiens
  CDR3 for alpha chain variable domain of TCR clone 172344 (TRAV3, TRAJ10)
CAVRDMRAGGGNKLTF

SEQ ID NO: 344688 - protein, 15 aa, Homo sapiens
  CDR3 for beta chain variable domain of TCR clone 172344 (TRBV19, TRBJ1-2)
CASSVGQVLNYGYTF

SEQ ID NO: 344689 - protein, 11 aa, Homo sapiens
  CDR3 for alpha chain variable domain of TCR clone 172345 (TRAV21, TRAJ4)
HVSGGYNKLIF

SEQ ID NO: 344690 - protein, 16 aa, Homo sapiens
  CDR3 for beta chain variable domain of TCR clone 172345 (TRBV12-4, TRBJ2-5)
CASSFFVRGRQETQYF

SEQ ID NO: 344691 - protein, 16 aa, Homo sapiens
  CDR3 for alpha chain variable domain of TCR clone 172346 (TRAV30, TRAJ57)
CGTGWAPQGGSEKLVF

SEQ ID NO: 344692 - protein, 16 aa, Homo sapiens
  CDR3 for beta chain variable domain of TCR clone 172346 (TRBV7-9, TRBJ1-2)
CASSLGFSSGEDGDTF

SEQ ID NO: 344693 - protein, 13 aa, Homo sapiens
  CDR3 for alpha chain variable domain of TCR clone 172347 (TRAV36/DV7, TRAJ38)
CVANAGNNRKLIW

SEQ ID NO: 344694 - protein, 14 aa, Homo sapiens
  CDR3 for beta chain variable domain of TCR clone 172347 (TRBV7-2, TRBJ2-7)
CASSLRWEDNEQYF

SEQ ID NO: 344695 - protein, 14 aa, Homo sapiens
  CDR3 for alpha chain variable domain of TCR clone 172348 (TRAV12-1, TRAJ8)
CVVNSNTGFQKLVF

SEQ ID NO: 344696 - protein, 17 aa, Homo sapiens
  CDR3 for beta chain variable domain of TCR clone 172348 (TRBV7-8, TRBJ2-6)
WASSAGTGGAGANVLTF

SEQ ID NO: 344697 - protein, 17 aa, Homo sapiens
  CDR3 for alpha chain variable domain of TCR clone 172349 (TRAV8-6, TRAJ58)
CAVISWVGETSGSRLTF

SEQ ID NO: 344698 - protein, 14 aa, Homo sapiens
  CDR3 for beta chain variable domain of TCR clone 172349 (TRBV4-2, TRBJ2-1)
CASGLDRAYNEQFF

SEQ ID NO: 344699 - protein, 12 aa, Homo sapiens
  CDR3 for alpha chain variable domain of TCR clone 172350 (TRAV21, TRAJ40)
CAVRPGTYKYLF

SEQ ID NO: 344700 - protein, 14 aa, Homo sapiens
  CDR3 for beta chain variable domain of TCR clone 172350 (TRBV28, TRBJ2-7)
CASSFRGAGYEQYF

SEQ ID NO: 344701 - protein, 14 aa, Homo sapiens
  CDR3 for alpha chain variable domain of TCR clone 172351 (TRAV9-2, TRAJ39)
CALYIYNAGNMLTF

SEQ ID NO: 344702 - protein, 16 aa, Homo sapiens
  CDR3 for beta chain variable domain of TCR clone 172351 (TRBV24-1, TRBJ2-3)
CATSDRRQDLTDTQYF

SEQ ID NO: 344703 - protein, 16 aa, Homo sapiens
  CDR3 for alpha chain variable domain of TCR clone 172352 (TRAV30, TRAJ49)
SAAQRVGPNTGNLFYF

SEQ ID NO: 344704 - protein, 15 aa, Homo sapiens
  CDR3 for beta chain variable domain of TCR clone 172352 (TRBV2, TRBJ2-1)
CASSELAGSYNEQFF

SEQ ID NO: 344705 - protein, 14 aa, Homo sapiens
  CDR3 for alpha chain variable domain of TCR clone 172353 (TRAV8-3, TRAJ36)
CAAVGNNGANNLFF

SEQ ID NO: 344706 - protein, 16 aa, Homo sapiens
  CDR3 for beta chain variable domain of TCR clone 172353 (TRBV12-5, TRBJ2-5)
CASGPRTSGNQETQYF

SEQ ID NO: 344707 - protein, 13 aa, Homo sapiens
  CDR3 for alpha chain variable domain of TCR clone 172354 (TRAV12-1, TRAJ16)
CVVNGPDGQKLLF

SEQ ID NO: 344708 - protein, 15 aa, Homo sapiens
  CDR3 for beta chain variable domain of TCR clone 172354 (TRBV6-3, TRBJ2-7)
CASSSPGTVFYEHYF

SEQ ID NO: 344709 - protein, 14 aa, Homo sapiens
  CDR3 for alpha chain variable domain of TCR clone 172355 (TRAV12-3, TRAJ12)
CAMSEVASSYKLIF

SEQ ID NO: 344710 - protein, 12 aa, Homo sapiens
  CDR3 for beta chain variable domain of TCR clone 172355 (TRBV18, TRBJ1-4)
CASSPSREKLFF

SEQ ID NO: 344711 - protein, 13 aa, Homo sapiens
  CDR3 for alpha chain variable domain of TCR clone 172356 (TRAV14/DV4, TRAJ20)
CAMREGRDYKPSF

SEQ ID NO: 344712 - protein, 13 aa, Homo sapiens
  CDR3 for beta chain variable domain of TCR clone 172356 (TRBV19, TRBJ2-2)
CASSIWSTGELFF

SEQ ID NO: 344713 - protein, 22 aa, Homo sapiens
  CDR3 for alpha chain variable domain of TCR clone 172357 (TRAV12-2, TRAJ53)
SPVIQPPTSVPPILSSNYKLTF

SEQ ID NO: 344714 - protein, 16 aa, Homo sapiens
  CDR3 for beta chain variable domain of TCR clone 172357 (TRBV7-8, TRBJ2-6)
CASRVGDSSGANVLTF

SEQ ID NO: 344715 - protein, 14 aa, Homo sapiens
  CDR3 for alpha chain variable domain of TCR clone 172358 (TRAV20, TRAJ22)
CAVQVSGSARQLTF

SEQ ID NO: 344716 - protein, 13 aa, Homo sapiens
  CDR3 for beta chain variable domain of TCR clone 172358 (TRBV7-9, TRBJ2-7)
CASSFAGAYEQYF

SEQ ID NO: 344717 - protein, 12 aa, Homo sapiens
  CDR3 for alpha chain variable domain of TCR clone 172359 (TRAV12-3, TRAJ17)
CAMTLTGNKLTF

SEQ ID NO: 344718 - protein, 15 aa, Homo sapiens
  CDR3 for beta chain variable domain of TCR clone 172359 (TRBV20-1, TRBJ2-7)
CSARGRVPGMDEQYF

SEQ ID NO: 344719 - protein, 14 aa, Homo sapiens
  CDR3 for alpha chain variable domain of TCR clone 172360 (TRAV1-2, TRAJ8)
YAVREDTGFQKLVF

SEQ ID NO: 344720 - protein, 16 aa, Homo sapiens
  CDR3 for beta chain variable domain of TCR clone 172360 (TRBV4-1, TRBJ2-3)
CASSQSTSGAEDTQYF

SEQ ID NO: 344721 - protein, 12 aa, Homo sapiens
  CDR3 for alpha chain variable domain of TCR clone 172361 (TRAV17, TRAJ12)
CAGGESSYKLIF

SEQ ID NO: 344722 - protein, 12 aa, Homo sapiens
  CDR3 for beta chain variable domain of TCR clone 172361 (TRBV29-1, TRBJ1-1)
CSESDGNTEAFF

SEQ ID NO: 344723 - protein, 13 aa, Homo sapiens
  CDR3 for alpha chain variable domain of TCR clone 172362 (TRAV8-4, TRAJ9)
CAVSDTRGFKTIF

SEQ ID NO: 344724 - protein, 16 aa, Homo sapiens
  CDR3 for beta chain variable domain of TCR clone 172362 (TRBV7-9, TRBJ1-2)
CASSLGFSSGEDGYTF

SEQ ID NO: 344725 - protein, 15 aa, Homo sapiens
  CDR3 for alpha chain variable domain of TCR clone 172363 (TRAV17, TRAJ57)
CATGPSQGGSDNLVF

SEQ ID NO: 344726 - protein, 16 aa, Homo sapiens
  CDR3 for beta chain variable domain of TCR clone 172363 (TRBV12-4, TRBJ1-5)
CASSRPVGGSNQPQHF

SEQ ID NO: 344727 - protein, 15 aa, Homo sapiens
  CDR3 for alpha chain variable domain of TCR clone 172364 (TRAV25, TRAJ52)
CAGRPGGTSYGKLTF

SEQ ID NO: 344728 - protein, 14 aa, Homo sapiens
  CDR3 for beta chain variable domain of TCR clone 172364 (TRBV7-2, TRBJ2-5)
CASSPRGSSETQYF

SEQ ID NO: 344729 - protein, 10 aa, Homo sapiens
  CDR3 for alpha chain variable domain of TCR clone 172365 (TRAV30, TRAJ16)
CGTGGQKLLF

SEQ ID NO: 344730 - protein, 11 aa, Homo sapiens
  CDR3 for beta chain variable domain of TCR clone 172365 (TRBV6-1, TRBJ1-2)
CASSTGWTPLA

SEQ ID NO: 344731 - protein, 16 aa, Homo sapiens
  CDR3 for alpha chain variable domain of TCR clone 172366 (TRAV26-1, TRAJ38)
CIVRAYNAGNNRKLIW

SEQ ID NO: 344732 - protein, 12 aa, Homo sapiens
  CDR3 for beta chain variable domain of TCR clone 172366 (TRBV7-6, TRBJ2-3)
CASSTGTDTQYF

SEQ ID NO: 344733 - protein, 15 aa, Homo sapiens
  CDR3 for alpha chain variable domain of TCR clone 172367 (TRAV8-4, TRAJ15)
CAVSDPVQAGTALTF

SEQ ID NO: 344734 - protein, 15 aa, Homo sapiens
  CDR3 for beta chain variable domain of TCR clone 172367 (TRBV7-6, TRBJ2-7)
CASSLGGAEPYEQYF

SEQ ID NO: 344735 - protein, 12 aa, Homo sapiens
  CDR3 for alpha chain variable domain of TCR clone 172368 (TRAV1-1, TRAJ8)
CAGGTDFQKLVL

SEQ ID NO: 344736 - protein, 15 aa, Homo sapiens
  CDR3 for beta chain variable domain of TCR clone 172368 (TRBV7-2, TRBJ2-3)
CASSLEQGGTDTQYF

SEQ ID NO: 344737 - protein, 14 aa, Homo sapiens
  CDR3 for alpha chain variable domain of TCR clone 172369 (TRAV12-2, TRAJ15)
CAPHTGQAGTALIF

SEQ ID NO: 344738 - protein, 15 aa, Homo sapiens
  CDR3 for beta chain variable domain of TCR clone 172369 (TRBV28, TRBJ1-5)
CASSPPGQFNQPQHF

SEQ ID NO: 344739 - protein, 14 aa, Homo sapiens
  CDR3 for alpha chain variable domain of TCR clone 172370 (TRAV12-2, TRAJ13)
CAVKKTGGYQKVTF

SEQ ID NO: 344740 - protein, 16 aa, Homo sapiens
  CDR3 for beta chain variable domain of TCR clone 172370 (TRBV2, TRBJ2-1)
CASSANPRDWQAEQFF

SEQ ID NO: 344741 - protein, 13 aa, Homo sapiens
  CDR3 for alpha chain variable domain of TCR clone 172371 (TRAV23/DV6, TRAJ47)
CAASMTRGNKLVF

SEQ ID NO: 344742 - protein, 15 aa, Homo sapiens
  CDR3 for beta chain variable domain of TCR clone 172371 (TRBV11-3, TRBJ2-1)
CASSLAGQTYNEQFF

SEQ ID NO: 344743 - protein, 14 aa, Homo sapiens
  CDR3 for alpha chain variable domain of TCR clone 172372 (TRAV1-2, TRAJ16)
CAVNRLSDGQKLLF

SEQ ID NO: 344744 - protein, 19 aa, Homo sapiens
  CDR3 for beta chain variable domain of TCR clone 172372 (TRBV25-1, TRBJ2-2)
CAILVYRVDRGRKTGELFF

SEQ ID NO: 344745 - protein, 16 aa, Homo sapiens
  CDR3 for alpha chain variable domain of TCR clone 172373 (TRAV16, TRAJ42)
CALSGLLGGSQGNLIF

SEQ ID NO: 344746 - protein, 16 aa, Homo sapiens
  CDR3 for beta chain variable domain of TCR clone 172373 (TRBV15, TRBJ2-1)
CATSRKTPGLRNEQFF

SEQ ID NO: 344747 - protein, 13 aa, Homo sapiens
  CDR3 for alpha chain variable domain of TCR clone 172374 (TRAV36/DV7, TRAJ49)
CAGDSNTGNRFYF

SEQ ID NO: 344748 - protein, 16 aa, Homo sapiens
  CDR3 for beta chain variable domain of TCR clone 172374 (TRBV5-1, TRBJ1-1)
CASSKTGTEVGTEAFF

SEQ ID NO: 344749 - protein, 14 aa, Homo sapiens
  CDR3 for alpha chain variable domain of TCR clone 172375 (TRAV13-1, TRAJ13)
CAASRAGGYQKVTF

SEQ ID NO: 344750 - protein, 17 aa, Homo sapiens
  CDR3 for beta chain variable domain of TCR clone 172375 (TRBV15, TRBJ1-5)
CATSSAPPGTRNQPQHF

SEQ ID NO: 344751 - protein, 14 aa, Homo sapiens
  CDR3 for alpha chain variable domain of TCR clone 172376 (TRAV1-2, TRAJ8)
CAVREDTGFQKLVF

SEQ ID NO: 344752 - protein, 16 aa, Homo sapiens
  CDR3 for beta chain variable domain of TCR clone 172376 (TRBV12-5, TRBJ2-5)
WASGPRTSGNQETQYF

SEQ ID NO: 344753 - protein, 14 aa, Homo sapiens
  CDR3 for alpha chain variable domain of TCR clone 172377 (TRAV26-1, TRAJ38)
CIADNAGNNRKPIW

SEQ ID NO: 344754 - protein, 15 aa, Homo sapiens
  CDR3 for beta chain variable domain of TCR clone 172377 (TRBV20-1, TRBJ1-1)
CSARGGGTLKLSLDK

SEQ ID NO: 344755 - protein, 14 aa, Homo sapiens
  CDR3 for alpha chain variable domain of TCR clone 172378 (TRAV35, TRAJ13)
CAGRSPGGYQKVTF

SEQ ID NO: 344756 - protein, 14 aa, Homo sapiens
  CDR3 for beta chain variable domain of TCR clone 172378 (TRBV19, TRBJ2-2)
CASSMVRLSGELFF

SEQ ID NO: 344757 - protein, 13 aa, Homo sapiens
  CDR3 for alpha chain variable domain of TCR clone 172379 (TRAV12-1, TRAJ6)
CVVFPGGSYIPTF

SEQ ID NO: 344758 - protein, 15 aa, Homo sapiens
  CDR3 for beta chain variable domain of TCR clone 172379 (TRBV7-2, TRBJ2-1)
CASTHGTGIYNEQFF

SEQ ID NO: 344759 - protein, 10 aa, Homo sapiens
  CDR3 for alpha chain variable domain of TCR clone 172380 (TRAV23/DV6, TRAJ57)
FAANSTLSQG

SEQ ID NO: 344760 - protein, 14 aa, Homo sapiens
  CDR3 for beta chain variable domain of TCR clone 172380 (TRBV25-1, TRBJ1-1)
CASTHLGGNTEAFF

SEQ ID NO: 344761 - protein, 13 aa, Homo sapiens
  CDR3 for alpha chain variable domain of TCR clone 172381 (TRAV30, TRAJ34)
CGKVGYNTDKLIF

SEQ ID NO: 344762 - protein, 16 aa, Homo sapiens
  CDR3 for beta chain variable domain of TCR clone 172381 (TRBV7-9, TRBJ1-2)
CASSLGLSSGEDGYAF

SEQ ID NO: 344763 - protein, 14 aa, Homo sapiens
  CDR3 for alpha chain variable domain of TCR clone 172382 (TRAV26-1, TRAJ40)
CIVRVARGTYKYIF

SEQ ID NO: 344764 - protein, 14 aa, Homo sapiens
  CDR3 for beta chain variable domain of TCR clone 172382 (TRBV7-3, TRBJ2-7)
CASSLKADSDEQYF

SEQ ID NO: 344765 - protein, 17 aa, Homo sapiens
  CDR3 for alpha chain variable domain of TCR clone 172383 (TRAV3, TRAJ12)
CAVRDGGRMDSSYKLIF

SEQ ID NO: 344766 - protein, 14 aa, Homo sapiens
  CDR3 for beta chain variable domain of TCR clone 172383 (TRBV7-9, TRBJ1-2)
CASSRPGANYGYTF

SEQ ID NO: 344767 - protein, 14 aa, Homo sapiens
  CDR3 for alpha chain variable domain of TCR clone 172384 (TRAV13-1, TRAJ48)
CAASRSFGNEKLTF

SEQ ID NO: 344768 - protein, 17 aa, Homo sapiens
  CDR3 for beta chain variable domain of TCR clone 172384 (TRBV7-7, TRBJ1-1)
CASIGDRPNLGVTEAFF

SEQ ID NO: 344769 - protein, 13 aa, Homo sapiens
  CDR3 for alpha chain variable domain of TCR clone 172385 (TRAV30, TRAJ20)
CGTEDRSDYKLSF

SEQ ID NO: 344770 - protein, 12 aa, Homo sapiens
  CDR3 for beta chain variable domain of TCR clone 172385 (TRBV11-2, TRBJ2-1)
CASSPGNNEQFF

SEQ ID NO: 344771 - protein, 10 aa, Homo sapiens
  CDR3 for alpha chain variable domain of TCR clone 172386 (TRAV26-1, TRAJ40)
CIAGTYKYIF

SEQ ID NO: 344772 - protein, 18 aa, Homo sapiens
  CDR3 for beta chain variable domain of TCR clone 172386 (TRBV7-9, TRBJ2-7)
CASSLTTSGSRTWYEQYF

SEQ ID NO: 344773 - protein, 14 aa, Homo sapiens
  CDR3 for alpha chain variable domain of TCR clone 172387 (TRAV8-4, TRAJ9)
CAVRINTGGFKTIF

SEQ ID NO: 344774 - protein, 15 aa, Homo sapiens
  CDR3 for beta chain variable domain of TCR clone 172387 (TRBV10-2, TRBJ2-6)
CPSSEQGTGANVLTF

SEQ ID NO: 344775 - protein, 13 aa, Homo sapiens
  CDR3 for alpha chain variable domain of TCR clone 172388 (TRAV8-6, TRAJ49)
CAVITNTGNQFYF

SEQ ID NO: 344776 - protein, 14 aa, Homo sapiens
  CDR3 for beta chain variable domain of TCR clone 172388 (TRBV7-3, TRBJ1-1)
CASSLKGGNTEAFF

SEQ ID NO: 344777 - protein, 14 aa, Homo sapiens
  CDR3 for alpha chain variable domain of TCR clone 172389 (TRAV1-2, TRAJ8)
CAVREDTGFEKLVF

SEQ ID NO: 344778 - protein, 14 aa, Homo sapiens
  CDR3 for beta chain variable domain of TCR clone 172389 (TRBV29-1, TRBJ2-3)
CSAGAGVGADTQYF

SEQ ID NO: 344779 - protein, 14 aa, Homo sapiens
  CDR3 for alpha chain variable domain of TCR clone 172390 (TRAV8-3, TRAJ28)
CAVAPGAGSYQLTF

SEQ ID NO: 344780 - protein, 15 aa, Homo sapiens
  CDR3 for beta chain variable domain of TCR clone 172390 (TRBV6-3, TRBJ2-2)
CASRGMTVDTGELFF

SEQ ID NO: 344781 - protein, 13 aa, Homo sapiens
  CDR3 for alpha chain variable domain of TCR clone 172391 (TRAV8-6, TRAJ49)
CAVITNTGNQFYF

SEQ ID NO: 344782 - protein, 16 aa, Homo sapiens
  CDR3 for beta chain variable domain of TCR clone 172391 (TRBV28, TRBJ1-5)
CASSLSGIHGNQPQHF

SEQ ID NO: 344783 - protein, 14 aa, Homo sapiens
  CDR3 for alpha chain variable domain of TCR clone 172392 (TRAV1-2, TRAJ16)
CAVNRFSDGQKLLF

SEQ ID NO: 344784 - protein, 13 aa, Homo sapiens
  CDR3 for beta chain variable domain of TCR clone 172392 (TRBV7-2, TRBJ1-1)
CASSSQGVTEAFF

SEQ ID NO: 344785 - protein, 12 aa, Homo sapiens
  CDR3 for alpha chain variable domain of TCR clone 172393 (TRAV22, TRAJ45)
CAVGGGADGLTF

SEQ ID NO: 344786 - protein, 13 aa, Homo sapiens
  CDR3 for beta chain variable domain of TCR clone 172393 (TRBV6-1, TRBJ1-1)
CASSRQGNTEAFF

SEQ ID NO: 344787 - protein, 14 aa, Homo sapiens
  CDR3 for alpha chain variable domain of TCR clone 172394 (TRAV35, TRAJ10)
CAGILTGGGNKLTF

SEQ ID NO: 344788 - protein, 15 aa, Homo sapiens
  CDR3 for beta chain variable domain of TCR clone 172394 (TRBV11-3, TRBJ2-3)
CASLKDGREGDTQYF

SEQ ID NO: 344789 - protein, 13 aa, Homo sapiens
  CDR3 for alpha chain variable domain of TCR clone 172395 (TRAV21, TRAJ27)
RAARPGNAGKSPF

SEQ ID NO: 344790 - protein, 14 aa, Homo sapiens
  CDR3 for beta chain variable domain of TCR clone 172395 (TRBV7-6, TRBJ2-3)
CASSLGTVTDTQYF

SEQ ID NO: 344791 - protein, 16 aa, Homo sapiens
  CDR3 for alpha chain variable domain of TCR clone 172396 (TRAV30, TRAJ24)
CGTEIVDVDSWGKFQF

SEQ ID NO: 344792 - protein, 17 aa, Homo sapiens
  CDR3 for beta chain variable domain of TCR clone 172396 (TRBV20-1, TRBJ2-1)
CSARDRRRASSYNEQFF

SEQ ID NO: 344793 - protein, 14 aa, Homo sapiens
  CDR3 for alpha chain variable domain of TCR clone 172397 (TRAV2, TRAJ41)
CAVGTSNSWYALNF

SEQ ID NO: 344794 - protein, 13 aa, Homo sapiens
  CDR3 for beta chain variable domain of TCR clone 172397 (TRBV4-1, TRBJ2-1)
CASSQEVQYEQFF

SEQ ID NO: 344795 - protein, 12 aa, Homo sapiens
  CDR3 for alpha chain variable domain of TCR clone 172398 (TRAV12-3, TRAJ17)
CAMTLTGNKLTF

SEQ ID NO: 344796 - protein, 15 aa, Homo sapiens
  CDR3 for beta chain variable domain of TCR clone 172398 (TRBV20-1, TRBJ2-7)
CSARDRVSGRDEQCF

SEQ ID NO: 344797 - protein, 13 aa, Homo sapiens
  CDR3 for alpha chain variable domain of TCR clone 172399 (TRAV12-2, TRAJ12)
CAVNWDSSYKLIF

SEQ ID NO: 344798 - protein, 15 aa, Homo sapiens
  CDR3 for beta chain variable domain of TCR clone 172399 (TRBV4-1, TRBJ1-4)
CASSDTGGTNEKLFF

SEQ ID NO: 344799 - protein, 13 aa, Homo sapiens
  CDR3 for alpha chain variable domain of TCR clone 172400 (TRAV13-1, TRAJ20)
CAARVPNDYKLSF

SEQ ID NO: 344800 - protein, 15 aa, Homo sapiens
  CDR3 for beta chain variable domain of TCR clone 172400 (TRBV20-1, TRBJ2-7)
CSARDRVSGMDEQYF

SEQ ID NO: 344801 - protein, 11 aa, Homo sapiens
  CDR3 for alpha chain variable domain of TCR clone 172401 (TRAV35, TRAJ30)
CAGPGDDKLIF

SEQ ID NO: 344802 - protein, 12 aa, Homo sapiens
  CDR3 for beta chain variable domain of TCR clone 172401 (TRBV27, TRBJ2-1)
CASRGFYNEQFF

SEQ ID NO: 344803 - protein, 12 aa, Homo sapiens
  CDR3 for alpha chain variable domain of TCR clone 172402 (TRAV1-2, TRAJ7)
CAVAYGNNRLAF

SEQ ID NO: 344804 - protein, 16 aa, Homo sapiens
  CDR3 for beta chain variable domain of TCR clone 172402 (TRBV5-1, TRBJ2-7)
CANSPMIGALSYEQYF

SEQ ID NO: 344805 - protein, 11 aa, Homo sapiens
  CDR3 for alpha chain variable domain of TCR clone 172403 (TRAV3, TRAJ21)
CAVGNFNKFYF

SEQ ID NO: 344806 - protein, 14 aa, Homo sapiens
  CDR3 for beta chain variable domain of TCR clone 172403 (TRBV19, TRBJ2-1)
CASGKSTQYNEQFF

SEQ ID NO: 344807 - protein, 15 aa, Homo sapiens
  CDR3 for alpha chain variable domain of TCR clone 172404 (TRAV17, TRAJ13)
CATDAGSGGYQKVTF

SEQ ID NO: 344808 - protein, 17 aa, Homo sapiens
  CDR3 for beta chain variable domain of TCR clone 172404 (TRBV11-2, TRBJ2-1)
CASSLYPPGVEYNEHFF

SEQ ID NO: 344809 - protein, 13 aa, Homo sapiens
  CDR3 for alpha chain variable domain of TCR clone 172405 (TRAV21, TRAJ20)
CAVGLRVDYKLSF

SEQ ID NO: 344810 - protein, 15 aa, Homo sapiens
  CDR3 for beta chain variable domain of TCR clone 172405 (TRBV19, TRBJ1-2)
CASSVGQVLNYGYTF

SEQ ID NO: 344811 - protein, 15 aa, Homo sapiens
  CDR3 for alpha chain variable domain of TCR clone 172406 (TRAV12-1, TRAJ44)
CVVFVNTGTASKLTF

SEQ ID NO: 344812 - protein, 15 aa, Homo sapiens
  CDR3 for beta chain variable domain of TCR clone 172406 (TRBV18, TRBJ2-1)
CASLPDRGRDNEQFF

SEQ ID NO: 344813 - protein, 14 aa, Homo sapiens
  CDR3 for alpha chain variable domain of TCR clone 172407 (TRAV16, TRAJ37)
CALDISGNTGKLIF

SEQ ID NO: 344814 - protein, 12 aa, Homo sapiens
  CDR3 for beta chain variable domain of TCR clone 172407 (TRBV14, TRBJ2-7)
CASSLYKDEQYF

SEQ ID NO: 344815 - protein, 15 aa, Homo sapiens
  CDR3 for alpha chain variable domain of TCR clone 172408 (TRAV26-1, TRAJ29)
CIVRVEGSGNTPLVF

SEQ ID NO: 344816 - protein, 16 aa, Homo sapiens
  CDR3 for beta chain variable domain of TCR clone 172408 (TRBV15, TRBJ1-4)
CATSRDSPPGREKLFF

SEQ ID NO: 344817 - protein, 14 aa, Homo sapiens
  CDR3 for alpha chain variable domain of TCR clone 172409 (TRAV26-1, TRAJ45)
CIEVTGGGAHGLTF

SEQ ID NO: 344818 - protein, 13 aa, Homo sapiens
  CDR3 for beta chain variable domain of TCR clone 172409 (TRBV7-6, TRBJ1-2)
CARSLVADYGYTF

SEQ ID NO: 344819 - protein, 13 aa, Homo sapiens
  CDR3 for alpha chain variable domain of TCR clone 172410 (TRAV21, TRAJ20)
CAVGLRVDYKRSF

SEQ ID NO: 344820 - protein, 15 aa, Homo sapiens
  CDR3 for beta chain variable domain of TCR clone 172410 (TRBV29-1, TRBJ2-1)
CSVPTGLALYNEQFF

SEQ ID NO: 344821 - protein, 11 aa, Homo sapiens
  CDR3 for alpha chain variable domain of TCR clone 172411 (TRAV12-1, TRAJ30)
CVVNGQDKIIF

SEQ ID NO: 344822 - protein, 13 aa, Homo sapiens
  CDR3 for beta chain variable domain of TCR clone 172411 (TRBV2, TRBJ2-3)
CASGRGRTDTQYF

SEQ ID NO: 344823 - protein, 14 aa, Homo sapiens
  CDR3 for alpha chain variable domain of TCR clone 172412 (TRAV35, TRAJ22)
CAGLRPGSARQLTF

SEQ ID NO: 344824 - protein, 15 aa, Homo sapiens
  CDR3 for beta chain variable domain of TCR clone 172412 (TRBV12-4, TRBJ2-5)
CASSPPTGVQENQYF

SEQ ID NO: 344825 - protein, 11 aa, Homo sapiens
  CDR3 for alpha chain variable domain of TCR clone 172413 (TRAV21, TRAJ34)
CAPLDTDKLIF

SEQ ID NO: 344826 - protein, 16 aa, Homo sapiens
  CDR3 for beta chain variable domain of TCR clone 172413 (TRBV5-1, TRBJ2-3)
CASSWAGDRGTDTQYL

SEQ ID NO: 344827 - protein, 19 aa, Homo sapiens
  CDR3 for alpha chain variable domain of TCR clone 172414 (TRAV26-1, TRAJ52)
CIVRAHRNAGGTSYGKLTF

SEQ ID NO: 344828 - protein, 16 aa, Homo sapiens
  CDR3 for beta chain variable domain of TCR clone 172414 (TRBV19, TRBJ2-2)
CASRSPGTGATGELFF

SEQ ID NO: 344829 - protein, 12 aa, Homo sapiens
  CDR3 for alpha chain variable domain of TCR clone 172415 (TRAV16, TRAJ10)
WSRTGGGNKLTF

SEQ ID NO: 344830 - protein, 15 aa, Homo sapiens
  CDR3 for beta chain variable domain of TCR clone 172415 (TRBV6-3, TRBJ2-7)
CASSSPGTVFYEQYF

SEQ ID NO: 344831 - protein, 12 aa, Homo sapiens
  CDR3 for alpha chain variable domain of TCR clone 172416 (TRAV8-6, TRAJ8)
CAVTPGFQKLVF

SEQ ID NO: 344832 - protein, 16 aa, Homo sapiens
  CDR3 for beta chain variable domain of TCR clone 172416 (TRBV7-3, TRBJ2-2)
CASSVKRGTLSGELFF

SEQ ID NO: 344833 - protein, 13 aa, Homo sapiens
  CDR3 for alpha chain variable domain of TCR clone 172417 (TRAV35, TRAJ13)
CAGRAGGYQKVTF

SEQ ID NO: 344834 - protein, 18 aa, Homo sapiens
  CDR3 for beta chain variable domain of TCR clone 172417 (TRBV7-3, TRBJ2-3)
CASSSTGTYPGSTDTQYF

SEQ ID NO: 344835 - protein, 18 aa, Homo sapiens
  CDR3 for alpha chain variable domain of TCR clone 172418 (TRAV1-2, TRAJ10)
CAVRALTPVTGGGHKLTF

SEQ ID NO: 344836 - protein, 14 aa, Homo sapiens
  CDR3 for beta chain variable domain of TCR clone 172418 (TRBV4-1, TRBJ1-1)
CASSQQGNGNEAFF

SEQ ID NO: 344837 - protein, 16 aa, Homo sapiens
  CDR3 for alpha chain variable domain of TCR clone 172419 (TRAV13-1, TRAJ48)
CAASIFGNFGTEKLTF

SEQ ID NO: 344838 - protein, 15 aa, Homo sapiens
  CDR3 for beta chain variable domain of TCR clone 172419 (TRBV11-2, TRBJ2-2)
CASSSDRVNAGELFF

SEQ ID NO: 344839 - protein, 13 aa, Homo sapiens
  CDR3 for alpha chain variable domain of TCR clone 172420 (TRAV1-1, TRAJ9)
CAAKNTGGFKTIF

SEQ ID NO: 344840 - protein, 15 aa, Homo sapiens
  CDR3 for beta chain variable domain of TCR clone 172420 (TRBV5-1, TRBJ2-1)
CASTGSGRTYYEQFF

SEQ ID NO: 344841 - protein, 13 aa, Homo sapiens
  CDR3 for alpha chain variable domain of TCR clone 172421 (TRAV17, TRAJ9)
CATFLTGGFKTIF

SEQ ID NO: 344842 - protein, 16 aa, Homo sapiens
  CDR3 for beta chain variable domain of TCR clone 172421 (TRBV5-7, TRBJ1-4)
CASRPSGGLKTEKLFF

SEQ ID NO: 344843 - protein, 14 aa, Homo sapiens
  CDR3 for alpha chain variable domain of TCR clone 172422 (TRAV17, TRAJ57)
CATDASGGSEKLVF

SEQ ID NO: 344844 - protein, 14 aa, Homo sapiens
  CDR3 for beta chain variable domain of TCR clone 172422 (TRBV4-2, TRBJ2-1)
CASGLDRAYNEQYF

SEQ ID NO: 344845 - protein, 15 aa, Homo sapiens
  CDR3 for alpha chain variable domain of TCR clone 172423 (TRAV23/DV6, TRAJ57)
CAASSTLSQGGSEQL

SEQ ID NO: 344846 - protein, 14 aa, Homo sapiens
  CDR3 for beta chain variable domain of TCR clone 172423 (TRBV25-1, TRBJ1-1)
CASTHLGGNTEAFF

SEQ ID NO: 344847 - protein, 15 aa, Homo sapiens
  CDR3 for alpha chain variable domain of TCR clone 172424 (TRAV12-3, TRAJ6)
CAMSATTGGSYIPPF

SEQ ID NO: 344848 - protein, 16 aa, Homo sapiens
  CDR3 for beta chain variable domain of TCR clone 172424 (TRBV20-1, TRBJ1-2)
CGASMGQGVANYGYTF

SEQ ID NO: 344849 - protein, 14 aa, Homo sapiens
  CDR3 for alpha chain variable domain of TCR clone 172425 (TRAV30, TRAJ26)
CGTEIVSYGQNFVF

SEQ ID NO: 344850 - protein, 18 aa, Homo sapiens
  CDR3 for beta chain variable domain of TCR clone 172425 (TRBV20-1, TRBJ2-3)
CSASGLAGGPGTTDTQYF

SEQ ID NO: 344851 - protein, 12 aa, Homo sapiens
  CDR3 for alpha chain variable domain of TCR clone 172426 (TRAV2, TRAJ15)
CCGLQAGTALIF

SEQ ID NO: 344852 - protein, 15 aa, Homo sapiens
  CDR3 for beta chain variable domain of TCR clone 172426 (TRBV5-1, TRBJ2-7)
CASSLNGGPAREQYF

SEQ ID NO: 344853 - protein, 17 aa, Homo sapiens
  CDR3 for alpha chain variable domain of TCR clone 172427 (TRAV20, TRAJ52)
CAVQANAGGTSYGKLTF

SEQ ID NO: 344854 - protein, 13 aa, Homo sapiens
  CDR3 for beta chain variable domain of TCR clone 172427 (TRBV7-3, TRBJ1-1)
CASSQDWGAEAFF

SEQ ID NO: 344855 - protein, 14 aa, Homo sapiens
  CDR3 for alpha chain variable domain of TCR clone 172428 (TRAV26-1, TRAJ45)
CIEVTGGGADGLTF

SEQ ID NO: 344856 - protein, 13 aa, Homo sapiens
  CDR3 for beta chain variable domain of TCR clone 172428 (TRBV7-6, TRBJ1-2)
CASSLGADYGYTV

SEQ ID NO: 344857 - protein, 13 aa, Homo sapiens
  CDR3 for alpha chain variable domain of TCR clone 172429 (TRAV3, TRAJ21)
CAVREPDFNKFYF

SEQ ID NO: 344858 - protein, 16 aa, Homo sapiens
  CDR3 for beta chain variable domain of TCR clone 172429 (TRBV9, TRBJ2-2)
CASSPSGGLNTGELFF

SEQ ID NO: 344859 - protein, 13 aa, Homo sapiens
  CDR3 for alpha chain variable domain of TCR clone 172430 (TRAV8-3, TRAJ47)
CAVSMKYGNKLVF

SEQ ID NO: 344860 - protein, 14 aa, Homo sapiens
  CDR3 for beta chain variable domain of TCR clone 172430 (TRBV2, TRBJ1-5)
CASSGTGFNQPQHF

SEQ ID NO: 344861 - protein, 17 aa, Homo sapiens
  CDR3 for alpha chain variable domain of TCR clone 172431 (TRAV26-2, TRAJ37)
CIRRDRGGSSNTGKLIF

SEQ ID NO: 344862 - protein, 13 aa, Homo sapiens
  CDR3 for beta chain variable domain of TCR clone 172431 (TRBV23-1, TRBJ1-4)
CASRGKFNEKLFF

SEQ ID NO: 344863 - protein, 16 aa, Homo sapiens
  CDR3 for alpha chain variable domain of TCR clone 172432 (TRAV1-1, TRAJ45)
CAVRAYSVGGADGLTF

SEQ ID NO: 344864 - protein, 13 aa, Homo sapiens
  CDR3 for beta chain variable domain of TCR clone 172432 (TRBV20-1, TRBJ1-2)
CSARGTADYGYTF

SEQ ID NO: 344865 - protein, 11 aa, Homo sapiens
  CDR3 for alpha chain variable domain of TCR clone 172433 (TRAV4, TRAJ18)
IGVSTLGRLYF

SEQ ID NO: 344866 - protein, 12 aa, Homo sapiens
  CDR3 for beta chain variable domain of TCR clone 172433 (TRBV6-3, TRBJ2-7)
CASSLTPYEQYF

SEQ ID NO: 344867 - protein, 17 aa, Homo sapiens
  CDR3 for alpha chain variable domain of TCR clone 172434 (TRAV3, TRAJ28)
CAVREAYSGAGSYQLTF

SEQ ID NO: 344868 - protein, 12 aa, Homo sapiens
  CDR3 for beta chain variable domain of TCR clone 172434 (TRBV7-9, TRBJ1-5)
CASSPQGQPQHF

SEQ ID NO: 344869 - protein, 17 aa, Homo sapiens
  CDR3 for alpha chain variable domain of TCR clone 172435 (TRAV4, TRAJ13)
CLVGVHVSSGGHQKVTF

SEQ ID NO: 344870 - protein, 18 aa, Homo sapiens
  CDR3 for beta chain variable domain of TCR clone 172435 (TRBV15, TRBJ2-3)
CATSRDGARSWDTDTQYF

SEQ ID NO: 344871 - protein, 14 aa, Homo sapiens
  CDR3 for alpha chain variable domain of TCR clone 172436 (TRAV8-3, TRAJ4)
CAVGAAGGYNKLIF

SEQ ID NO: 344872 - protein, 12 aa, Homo sapiens
  CDR3 for beta chain variable domain of TCR clone 172436 (TRBV11-2, TRBJ2-5)
CASSLVGETQYF

SEQ ID NO: 344873 - protein, 14 aa, Homo sapiens
  CDR3 for alpha chain variable domain of TCR clone 172437 (TRAV13-1, TRAJ44)
CAAKATGTASQLTF

SEQ ID NO: 344874 - protein, 14 aa, Homo sapiens
  CDR3 for beta chain variable domain of TCR clone 172437 (TRBV19, TRBJ2-2)
CASSTLHRSGELFF

SEQ ID NO: 344875 - protein, 14 aa, Homo sapiens
  CDR3 for alpha chain variable domain of TCR clone 172438 (TRAV17, TRAJ22)
CATSPSGPARQLTF

SEQ ID NO: 344876 - protein, 15 aa, Homo sapiens
  CDR3 for beta chain variable domain of TCR clone 172438 (TRBV4-1, TRBJ2-5)
CASSQWDLYQETQYF

SEQ ID NO: 344877 - protein, 14 aa, Homo sapiens
  CDR3 for alpha chain variable domain of TCR clone 172439 (TRAV1-2, TRAJ16)
YAVNRFSDGQKLLF

SEQ ID NO: 344878 - protein, 17 aa, Homo sapiens
  CDR3 for beta chain variable domain of TCR clone 172439 (TRBV27, TRBJ2-5)
CASSFSLLGNYQETQYF

SEQ ID NO: 344879 - protein, 14 aa, Homo sapiens
  CDR3 for alpha chain variable domain of TCR clone 172440 (TRAV20, TRAJ29)
CAVQAWVGNQPLVF

SEQ ID NO: 344880 - protein, 15 aa, Homo sapiens
  CDR3 for beta chain variable domain of TCR clone 172440 (TRBV29-1, TRBJ2-7)
CSVEFFDRGSYEQYF

SEQ ID NO: 344881 - protein, 13 aa, Homo sapiens
  CDR3 for alpha chain variable domain of TCR clone 172441 (TRAV8-3, TRAJ9)
CAVGITGGFKTIF

SEQ ID NO: 344882 - protein, 12 aa, Homo sapiens
  CDR3 for beta chain variable domain of TCR clone 172441 (TRBV19, TRBJ2-1)
CASSMQDTEQFF

SEQ ID NO: 344883 - protein, 14 aa, Homo sapiens
  CDR3 for alpha chain variable domain of TCR clone 172442 (TRAV12-2, TRAJ44)
CAVNPAGTSSKLPF

SEQ ID NO: 344884 - protein, 13 aa, Homo sapiens
  CDR3 for beta chain variable domain of TCR clone 172442 (TRBV20-1, TRBJ1-6)
CSAPLGVGSPLHF

SEQ ID NO: 344885 - protein, 16 aa, Homo sapiens
  CDR3 for alpha chain variable domain of TCR clone 172443 (TRAV12-3, TRAJ18)
CAMRGSRGSTLGRLYF

SEQ ID NO: 344886 - protein, 19 aa, Homo sapiens
  CDR3 for beta chain variable domain of TCR clone 172443 (TRBV6-3, TRBJ2-7)
CASSYWTGLAGGVSGEQYF

SEQ ID NO: 344887 - protein, 16 aa, Homo sapiens
  CDR3 for alpha chain variable domain of TCR clone 172444 (TRAV8-3, TRAJ13)
CAVGAYRSGGYQKVTF

SEQ ID NO: 344888 - protein, 15 aa, Homo sapiens
  CDR3 for beta chain variable domain of TCR clone 172444 (TRBV19, TRBJ1-5)
CASSIVWADNQPQHF

SEQ ID NO: 344889 - protein, 14 aa, Homo sapiens
  CDR3 for alpha chain variable domain of TCR clone 172445 (TRAV23/DV6, TRAJ4)
CAANLSGGYNKLIF

SEQ ID NO: 344890 - protein, 13 aa, Homo sapiens
  CDR3 for beta chain variable domain of TCR clone 172445 (TRBV11-1, TRBJ1-1)
CASSLARGSQAFF

SEQ ID NO: 344891 - protein, 17 aa, Homo sapiens
  CDR3 for alpha chain variable domain of TCR clone 172446 (TRAV13-1, TRAJ52)
CAASSGAGGTSYGKLTF

SEQ ID NO: 344892 - protein, 15 aa, Homo sapiens
  CDR3 for beta chain variable domain of TCR clone 172446 (TRBV11-2, TRBJ2-2)
CASSSDRVNAGELFF

SEQ ID NO: 344893 - protein, 16 aa, Homo sapiens
  CDR3 for alpha chain variable domain of TCR clone 172447 (TRAV13-2, TRAJ53)
CAENANSGGSNNKLTF

SEQ ID NO: 344894 - protein, 19 aa, Homo sapiens
  CDR3 for beta chain variable domain of TCR clone 172447 (TRBV28, TRBJ2-7)
CASSYSGTSRLGWVYEQYF

SEQ ID NO: 344895 - protein, 14 aa, Homo sapiens
  CDR3 for alpha chain variable domain of TCR clone 172448 (TRAV16, TRAJ33)
CALSAMDSNYQLIL

SEQ ID NO: 344896 - protein, 14 aa, Homo sapiens
  CDR3 for beta chain variable domain of TCR clone 172448 (TRBV4-2, TRBJ2-1)
CASGLDRAYNEQFF

SEQ ID NO: 344897 - protein, 13 aa, Homo sapiens
  CDR3 for alpha chain variable domain of TCR clone 172449 (TRAV13-1, TRAJ12)
CAASPDSSYKLIF

SEQ ID NO: 344898 - protein, 17 aa, Homo sapiens
  CDR3 for beta chain variable domain of TCR clone 172449 (TRBV24-1, TRBJ2-1)
CATSDVSTSGTYNEQFF

SEQ ID NO: 344899 - protein, 15 aa, Homo sapiens
  CDR3 for alpha chain variable domain of TCR clone 172450 (TRAV13-1, TRAJ17)
CAASIERAARNKLTF

SEQ ID NO: 344900 - protein, 12 aa, Homo sapiens
  CDR3 for beta chain variable domain of TCR clone 172450 (TRBV5-7, TRBJ1-1)
CASSLGRGKAFF

SEQ ID NO: 344901 - protein, 14 aa, Homo sapiens
  CDR3 for alpha chain variable domain of TCR clone 172451 (TRAV1-2, TRAJ16)
CAVNRFSDGQKLLF

SEQ ID NO: 344902 - protein, 17 aa, Homo sapiens
  CDR3 for beta chain variable domain of TCR clone 172451 (TRBV7-9, TRBJ2-1)
CSSSLVASYPSYNEQFF

SEQ ID NO: 344903 - protein, 12 aa, Homo sapiens
  CDR3 for alpha chain variable domain of TCR clone 172452 (TRAV13-2, TRAJ23)
CAERHRGGKLIF

SEQ ID NO: 344904 - protein, 18 aa, Homo sapiens
  CDR3 for beta chain variable domain of TCR clone 172452 (TRBV11-2, TRBJ2-3)
GASSLGGASRGAPNTQYF

SEQ ID NO: 344905 - protein, 14 aa, Homo sapiens
  CDR3 for alpha chain variable domain of TCR clone 172453 (TRAV12-2, TRAJ53)
CAVKGGGSNYKLTF

SEQ ID NO: 344906 - protein, 15 aa, Homo sapiens
  CDR3 for beta chain variable domain of TCR clone 172453 (TRBV5-1, TRBJ2-1)
CASTGSGRTYNEQFF

SEQ ID NO: 344907 - protein, 16 aa, Homo sapiens
  CDR3 for alpha chain variable domain of TCR clone 172454 (TRAV3, TRAJ10)
CAVRAMRAGGGNKLTF

SEQ ID NO: 344908 - protein, 15 aa, Homo sapiens
  CDR3 for beta chain variable domain of TCR clone 172454 (TRBV9, TRBJ1-6)
CASSVAGTGDSTLDF

SEQ ID NO: 344909 - protein, 13 aa, Homo sapiens
  CDR3 for alpha chain variable domain of TCR clone 172455 (TRAV12-3, TRAJ31)
CAMSANNNARLTF

SEQ ID NO: 344910 - protein, 16 aa, Homo sapiens
  CDR3 for beta chain variable domain of TCR clone 172455 (TRBV7-9, TRBJ1-2)
CASSLGFSSGEDGYTF

SEQ ID NO: 344911 - protein, 15 aa, Homo sapiens
  CDR3 for alpha chain variable domain of TCR clone 172456 (TRAV1-2, TRAJ32)
CAVRGYGGATNKLIF

SEQ ID NO: 344912 - protein, 15 aa, Homo sapiens
  CDR3 for beta chain variable domain of TCR clone 172456 (TRBV25-1, TRBJ2-7)
CASSDTGTHQETQYF

SEQ ID NO: 344913 - protein, 14 aa, Homo sapiens
  CDR3 for alpha chain variable domain of TCR clone 172457 (TRAV12-1, TRAJ22)
CVVTTSGSARRLTF

SEQ ID NO: 344914 - protein, 13 aa, Homo sapiens
  CDR3 for beta chain variable domain of TCR clone 172457 (TRBV7-3, TRBJ1-1)
CASSQDWGAEAFF

SEQ ID NO: 344915 - protein, 13 aa, Homo sapiens
  CDR3 for alpha chain variable domain of TCR clone 172458 (TRAV12-3, TRAJ13)
CAMSSGCYQEVTF

SEQ ID NO: 344916 - protein, 13 aa, Homo sapiens
  CDR3 for beta chain variable domain of TCR clone 172458 (TRBV20-1, TRBJ1-1)
CSAPPGGHTEAFF

SEQ ID NO: 344917 - protein, 13 aa, Homo sapiens
  CDR3 for alpha chain variable domain of TCR clone 172459 (TRAV2, TRAJ15)
CAVASQAGTALIF

SEQ ID NO: 344918 - protein, 15 aa, Homo sapiens
  CDR3 for beta chain variable domain of TCR clone 172459 (TRBV19, TRBJ2-1)
CASSSPGVPLDEQFF

SEQ ID NO: 344919 - protein, 15 aa, Homo sapiens
  CDR3 for alpha chain variable domain of TCR clone 172460 (TRAV2, TRAJ15)
CAVEDRKKAGTALIF

SEQ ID NO: 344920 - protein, 16 aa, Homo sapiens
  CDR3 for beta chain variable domain of TCR clone 172460 (TRBV19, TRBJ2-1)
CASSKAGPSSYNEQFF

SEQ ID NO: 344921 - protein, 14 aa, Homo sapiens
  CDR3 for alpha chain variable domain of TCR clone 172461 (TRAV35, TRAJ22)
CAGLRPGSARQLTF

SEQ ID NO: 344922 - protein, 13 aa, Homo sapiens
  CDR3 for beta chain variable domain of TCR clone 172461 (TRBV20-1, TRBJ1-1)
CSARVGGNTEAFF

SEQ ID NO: 344923 - protein, 14 aa, Homo sapiens
  CDR3 for alpha chain variable domain of TCR clone 172462 (TRAV38-1, TRAJ40)
CALRPTSGTYKYIF

SEQ ID NO: 344924 - protein, 14 aa, Homo sapiens
  CDR3 for beta chain variable domain of TCR clone 172462 (TRBV25-1, TRBJ1-1)
CASTHLGGNTKAFF

SEQ ID NO: 344925 - protein, 12 aa, Homo sapiens
  CDR3 for alpha chain variable domain of TCR clone 172463 (TRAV13-1, TRAJ21)
CAAKEGFNKFYF

SEQ ID NO: 344926 - protein, 14 aa, Homo sapiens
  CDR3 for beta chain variable domain of TCR clone 172463 (TRBV7-2, TRBJ1-2)
CASSQTGSTYGYTF

SEQ ID NO: 344927 - protein, 14 aa, Homo sapiens
  CDR3 for alpha chain variable domain of TCR clone 172464 (TRAV26-1, TRAJ44)
CIVKSTGTASKLTF

SEQ ID NO: 344928 - protein, 16 aa, Homo sapiens
  CDR3 for beta chain variable domain of TCR clone 172464 (TRBV11-3, TRBJ2-5)
CASSSVVAGSTETQYF

SEQ ID NO: 344929 - protein, 15 aa, Homo sapiens
  CDR3 for alpha chain variable domain of TCR clone 172465 (TRAV17, TRAJ57)
CATGPSQGRSEKLVF

SEQ ID NO: 344930 - protein, 15 aa, Homo sapiens
  CDR3 for beta chain variable domain of TCR clone 172465 (TRBV25-1, TRBJ1-4)
CASSPGDSTNEKLFF

SEQ ID NO: 344931 - protein, 13 aa, Homo sapiens
  CDR3 for alpha chain variable domain of TCR clone 172466 (TRAV21, TRAJ57)
CTVTQGGSEKLVF

SEQ ID NO: 344932 - protein, 16 aa, Homo sapiens
  CDR3 for beta chain variable domain of TCR clone 172466 (TRBV29-1, TRBJ2-7)
CCVEDAEDGTAYEQYF

SEQ ID NO: 344933 - protein, 12 aa, Homo sapiens
  CDR3 for alpha chain variable domain of TCR clone 172467 (TRAV38-1, TRAJ47)
CAFETYGNKLVF

SEQ ID NO: 344934 - protein, 15 aa, Homo sapiens
  CDR3 for beta chain variable domain of TCR clone 172467 (TRBV20-1, TRBJ1-1)
CSASRGVTGNTEAFF

SEQ ID NO: 344935 - protein, 14 aa, Homo sapiens
  CDR3 for alpha chain variable domain of TCR clone 172468 (TRAV13-1, TRAJ4)
CAATLPSGYNKMIF

SEQ ID NO: 344936 - protein, 14 aa, Homo sapiens
  CDR3 for beta chain variable domain of TCR clone 172468 (TRBV19, TRBJ2-1)
CASPTFVLSGEQFF

SEQ ID NO: 344937 - protein, 14 aa, Homo sapiens
  CDR3 for alpha chain variable domain of TCR clone 172469 (TRAV12-2, TRAJ36)
CAVKISTGANNLFF

SEQ ID NO: 344938 - protein, 14 aa, Homo sapiens
  CDR3 for beta chain variable domain of TCR clone 172469 (TRBV25-1, TRBJ1-2)
CASSNTTGVVGYTF

SEQ ID NO: 344939 - protein, 14 aa, Homo sapiens
  CDR3 for alpha chain variable domain of TCR clone 172470 (TRAV4, TRAJ6)
CLGPASGGSYIPTF

SEQ ID NO: 344940 - protein, 12 aa, Homo sapiens
  CDR3 for beta chain variable domain of TCR clone 172470 (TRBV6-5, TRBJ2-3)
CASSPSTETQYF

SEQ ID NO: 344941 - protein, 17 aa, Homo sapiens
  CDR3 for alpha chain variable domain of TCR clone 172471 (TRAV38-2/DV8, TRAJ38)
CAYRSARGAGNNRKLIW

SEQ ID NO: 344942 - protein, 17 aa, Homo sapiens
  CDR3 for beta chain variable domain of TCR clone 172471 (TRBV19, TRBJ1-2)
CARHQWSFRITFYGYTF

SEQ ID NO: 344943 - protein, 18 aa, Homo sapiens
  CDR3 for alpha chain variable domain of TCR clone 172472 (TRAV12-3, TRAJ52)
CSMSVGGAGGTSYGKLTF

SEQ ID NO: 344944 - protein, 14 aa, Homo sapiens
  CDR3 for beta chain variable domain of TCR clone 172472 (TRBV9, TRBJ2-5)
CASSVVPYQETQYF

SEQ ID NO: 344945 - protein, 15 aa, Homo sapiens
  CDR3 for alpha chain variable domain of TCR clone 172473 (TRAV12-3, TRAJ49)
CAMPLPRTPVTSSIL

SEQ ID NO: 344946 - protein, 18 aa, Homo sapiens
  CDR3 for beta chain variable domain of TCR clone 172473 (TRBV4-1, TRBJ1-5)
CASSQDPRGQGLNQPQHF

SEQ ID NO: 344947 - protein, 16 aa, Homo sapiens
  CDR3 for alpha chain variable domain of TCR clone 172474 (TRAV3, TRAJ37)
CAVRPHGSGNTGKLIF

SEQ ID NO: 344948 - protein, 14 aa, Homo sapiens
  CDR3 for beta chain variable domain of TCR clone 172474 (TRBV6-6, TRBJ2-7)
CASSDSGAGYEQYF

SEQ ID NO: 344949 - protein, 13 aa, Homo sapiens
  CDR3 for alpha chain variable domain of TCR clone 172475 (TRAV8-6, TRAJ21)
CAVSPSSLNTFSF

SEQ ID NO: 344950 - protein, 14 aa, Homo sapiens
  CDR3 for beta chain variable domain of TCR clone 172475 (TRBV7-9, TRBJ2-5)
CASSLDTAQETQYF

SEQ ID NO: 344951 - protein, 14 aa, Homo sapiens
  CDR3 for alpha chain variable domain of TCR clone 172476 (TRAV17, TRAJ37)
CATDGSSNTGKLIF

SEQ ID NO: 344952 - protein, 11 aa, Homo sapiens
  CDR3 for beta chain variable domain of TCR clone 172476 (TRBV27, TRBJ2-3)
CASSLGDTQYF

SEQ ID NO: 344953 - protein, 15 aa, Homo sapiens
  CDR3 for alpha chain variable domain of TCR clone 172477 (TRAV2, TRAJ28)
CAVPYSGSGSYQLTF

SEQ ID NO: 344954 - protein, 17 aa, Homo sapiens
  CDR3 for beta chain variable domain of TCR clone 172477 (TRBV20-1, TRBJ2-4)
CSARDWASGGRENIQYF

SEQ ID NO: 344955 - protein, 14 aa, Homo sapiens
  CDR3 for alpha chain variable domain of TCR clone 172478 (TRAV35, TRAJ22)
CAGLRPGSARQLTF

SEQ ID NO: 344956 - protein, 15 aa, Homo sapiens
  CDR3 for beta chain variable domain of TCR clone 172478 (TRBV7-2, TRBJ2-1)
CASSLASGRVNEQFF

SEQ ID NO: 344957 - protein, 13 aa, Homo sapiens
  CDR3 for alpha chain variable domain of TCR clone 172479 (TRAV13-2, TRAJ15)
CAERPQAGTALIF

SEQ ID NO: 344958 - protein, 22 aa, Homo sapiens
  CDR3 for beta chain variable domain of TCR clone 172479 (TRBV11-2, TRBJ2-7)
LRTRPCISVPADSGTGGYEQYF

SEQ ID NO: 344959 - protein, 11 aa, Homo sapiens
  CDR3 for alpha chain variable domain of TCR clone 172480 (TRAV12-1, TRAJ43)
CVEYDNNDMRF

SEQ ID NO: 344960 - protein, 15 aa, Homo sapiens
  CDR3 for beta chain variable domain of TCR clone 172480 (TRBV11-2, TRBJ2-2)
CASSSDRVNAGELFF

SEQ ID NO: 344961 - protein, 18 aa, Homo sapiens
  CDR3 for alpha chain variable domain of TCR clone 172481 (TRAV13-1, TRAJ52)
CAAKNPNAGGTSYGKLTF

SEQ ID NO: 344962 - protein, 13 aa, Homo sapiens
  CDR3 for beta chain variable domain of TCR clone 172481 (TRBV12-4, TRBJ1-1)
CASSPGTGFEAFF

SEQ ID NO: 344963 - protein, 13 aa, Homo sapiens
  CDR3 for alpha chain variable domain of TCR clone 172482 (TRAV17, TRAJ4)
CATKSGGYNKLIF

SEQ ID NO: 344964 - protein, 14 aa, Homo sapiens
  CDR3 for beta chain variable domain of TCR clone 172482 (TRBV7-2, TRBJ2-7)
CASSPKTSFYEQYF

SEQ ID NO: 344965 - protein, 14 aa, Homo sapiens
  CDR3 for alpha chain variable domain of TCR clone 172483 (TRAV3, TRAJ22)
CAVRDSGSARKLTF

SEQ ID NO: 344966 - protein, 15 aa, Homo sapiens
  CDR3 for beta chain variable domain of TCR clone 172483 (TRBV11-2, TRBJ2-5)
CASSLASYSGETQYF

SEQ ID NO: 344967 - protein, 16 aa, Homo sapiens
  CDR3 for alpha chain variable domain of TCR clone 172484 (TRAV27, TRAJ56)
CAGVSRKDGANSKRTF

SEQ ID NO: 344968 - protein, 15 aa, Homo sapiens
  CDR3 for beta chain variable domain of TCR clone 172484 (TRBV4-1, TRBJ2-5)
CASSQLAGGQETQYF

SEQ ID NO: 344969 - protein, 14 aa, Homo sapiens
  CDR3 for alpha chain variable domain of TCR clone 172485 (TRAV25, TRAJ45)
CARESGGGADGLTF

SEQ ID NO: 344970 - protein, 12 aa, Homo sapiens
  CDR3 for beta chain variable domain of TCR clone 172485 (TRBV7-9, TRBJ2-7)
CASSFDSYGQCF

SEQ ID NO: 344971 - protein, 14 aa, Homo sapiens
  CDR3 for alpha chain variable domain of TCR clone 172486 (TRAV12-1, TRAJ17)
CVVNPKAAGNKLTF

SEQ ID NO: 344972 - protein, 13 aa, Homo sapiens
  CDR3 for beta chain variable domain of TCR clone 172486 (TRBV12-4, TRBJ2-7)
CASSPTETYEQYF

SEQ ID NO: 344973 - protein, 16 aa, Homo sapiens
  CDR3 for alpha chain variable domain of TCR clone 172487 (TRAV30, TRAJ24)
CGTEIVDADSWGKFQF

SEQ ID NO: 344974 - protein, 14 aa, Homo sapiens
  CDR3 for beta chain variable domain of TCR clone 172487 (TRBV7-9, TRBJ2-7)
CASSLEAVGDEQYF

SEQ ID NO: 344975 - protein, 13 aa, Homo sapiens
  CDR3 for alpha chain variable domain of TCR clone 172488 (TRAV12-1, TRAJ9)
CVVLNIGGFKTIF

SEQ ID NO: 344976 - protein, 13 aa, Homo sapiens
  CDR3 for beta chain variable domain of TCR clone 172488 (TRBV20-1, TRBJ1-1)
CSARGGGNTEAFF

SEQ ID NO: 344977 - protein, 14 aa, Homo sapiens
  CDR3 for alpha chain variable domain of TCR clone 172489 (TRAV12-2, TRAJ13)
CSVKKTGGYQKVTF

SEQ ID NO: 344978 - protein, 14 aa, Homo sapiens
  CDR3 for beta chain variable domain of TCR clone 172489 (TRBV12-5, TRBJ2-5)
CASGSRTHQETQYF

SEQ ID NO: 344979 - protein, 14 aa, Homo sapiens
  CDR3 for alpha chain variable domain of TCR clone 172490 (TRAV12-2, TRAJ13)
CAVKKPGGYQKVTF

SEQ ID NO: 344980 - protein, 13 aa, Homo sapiens
  CDR3 for beta chain variable domain of TCR clone 172490 (TRBV20-1, TRBJ1-1)
CSARGGGNTEAFF

SEQ ID NO: 344981 - protein, 15 aa, Homo sapiens
  CDR3 for alpha chain variable domain of TCR clone 172491 (TRAV8-6, TRAJ6)
CAVSFTSGGSYIPTF

SEQ ID NO: 344982 - protein, 16 aa, Homo sapiens
  CDR3 for beta chain variable domain of TCR clone 172491 (TRBV19, TRBJ2-2)
CASRSPGTGATGELFF

SEQ ID NO: 344983 - protein, 15 aa, Homo sapiens
  CDR3 for alpha chain variable domain of TCR clone 172492 (TRAV26-1, TRAJ29)
CIVRVEGSGNTPLVF

SEQ ID NO: 344984 - protein, 15 aa, Homo sapiens
  CDR3 for beta chain variable domain of TCR clone 172492 (TRBV7-9, TRBJ1-5)
CASSQGHQPRQPQHF

SEQ ID NO: 344985 - protein, 13 aa, Homo sapiens
  CDR3 for alpha chain variable domain of TCR clone 172493 (TRAV8-3, TRAJ42)
CARYGGSQGNLIF

SEQ ID NO: 344986 - protein, 13 aa, Homo sapiens
  CDR3 for beta chain variable domain of TCR clone 172493 (TRBV7-9, TRBJ1-2)
CASSLKQNYGYTF

SEQ ID NO: 344987 - protein, 14 aa, Homo sapiens
  CDR3 for alpha chain variable domain of TCR clone 172494 (TRAV17, TRAJ37)
CATDGSSNTGKLIF

SEQ ID NO: 344988 - protein, 13 aa, Homo sapiens
  CDR3 for beta chain variable domain of TCR clone 172494 (TRBV11-2, TRBJ2-1)
CASSLDMVNEQFF

SEQ ID NO: 344989 - protein, 22 aa, Homo sapiens
  CDR3 for alpha chain variable domain of TCR clone 172495 (TRAV8-6, TRAJ32)
CAVSALWWCYKQAHLWNWHSAF

SEQ ID NO: 344990 - protein, 13 aa, Homo sapiens
  CDR3 for beta chain variable domain of TCR clone 172495 (TRBV11-2, TRBJ2-5)
CASGHGAKETQYF

SEQ ID NO: 344991 - protein, 15 aa, Homo sapiens
  CDR3 for alpha chain variable domain of TCR clone 172496 (TRAV12-1, TRAJ44)
CVADLPTGTASKPTF

SEQ ID NO: 344992 - protein, 13 aa, Homo sapiens
  CDR3 for beta chain variable domain of TCR clone 172496 (TRBV6-5, TRBJ2-5)
CASSPPGGETQYF

SEQ ID NO: 344993 - protein, 15 aa, Homo sapiens
  CDR3 for alpha chain variable domain of TCR clone 172497 (TRAV12-3, TRAJ6)
CAMSATTGGSYIPPF

SEQ ID NO: 344994 - protein, 16 aa, Homo sapiens
  CDR3 for beta chain variable domain of TCR clone 172497 (TRBV20-1, TRBJ1-2)
CSASMGQGVANYGYAF

SEQ ID NO: 344995 - protein, 15 aa, Homo sapiens
  CDR3 for alpha chain variable domain of TCR clone 172498 (TRAV26-1, TRAJ56)
CIVRVDNGANSKLTF

SEQ ID NO: 344996 - protein, 15 aa, Homo sapiens
  CDR3 for beta chain variable domain of TCR clone 172498 (TRBV20-1, TRBJ2-7)
CSARDPTEVGHEHYF

SEQ ID NO: 344997 - protein, 14 aa, Homo sapiens
  CDR3 for alpha chain variable domain of TCR clone 172499 (TRAV1-2, TRAJ15)
CAVRDRQAGTALIF

SEQ ID NO: 344998 - protein, 14 aa, Homo sapiens
  CDR3 for beta chain variable domain of TCR clone 172499 (TRBV7-8, TRBJ2-7)
CASSPRDRFYEQYF

SEQ ID NO: 344999 - protein, 16 aa, Homo sapiens
  CDR3 for alpha chain variable domain of TCR clone 172500 (TRAV12-1, TRAJ22)
CVVNTISSGSAMQLTF

SEQ ID NO: 345000 - protein, 13 aa, Homo sapiens
  CDR3 for beta chain variable domain of TCR clone 172500 (TRBV19, TRBJ2-1)
RASNGGVFSEQFF

SEQ ID NO: 345001 - protein, 12 aa, Homo sapiens
  CDR3 for alpha chain variable domain of TCR clone 172501 (TRAV20, TRAJ54)
CAVQEGAQKLVF

SEQ ID NO: 345002 - protein, 17 aa, Homo sapiens
  CDR3 for beta chain variable domain of TCR clone 172501 (TRBV13, TRBJ2-3)
CAISLSRVAGGRNTQYF

SEQ ID NO: 345003 - protein, 13 aa, Homo sapiens
  CDR3 for alpha chain variable domain of TCR clone 172502 (TRAV13-1, TRAJ6)
CAASSGGSYIPRF

SEQ ID NO: 345004 - protein, 15 aa, Homo sapiens
  CDR3 for beta chain variable domain of TCR clone 172502 (TRBV12-4, TRBJ2-5)
CASSPPTGLQETQYF

SEQ ID NO: 345005 - protein, 13 aa, Homo sapiens
  CDR3 for alpha chain variable domain of TCR clone 172503 (TRAV8-3, TRAJ28)
CALGAVGSYQLTF

SEQ ID NO: 345006 - protein, 14 aa, Homo sapiens
  CDR3 for beta chain variable domain of TCR clone 172503 (TRBV7-2, TRBJ2-7)
CASRSQGAAYKQYF

SEQ ID NO: 345007 - protein, 13 aa, Homo sapiens
  CDR3 for alpha chain variable domain of TCR clone 172504 (TRAV1-2, TRAJ9)
CAALNNGGFKTIF

SEQ ID NO: 345008 - protein, 20 aa, Homo sapiens
  CDR3 for beta chain variable domain of TCR clone 172504 (TRBV28, TRBJ2-1)
CASTPIGRSPGLAGGNEQFF

SEQ ID NO: 345009 - protein, 13 aa, Homo sapiens
  CDR3 for alpha chain variable domain of TCR clone 172505 (TRAV17, TRAJ5)
CALRGTGRRALTF

SEQ ID NO: 345010 - protein, 14 aa, Homo sapiens
  CDR3 for beta chain variable domain of TCR clone 172505 (TRBV18, TRBJ1-4)
CASTQDRRDEKLFF

SEQ ID NO: 345011 - protein, 14 aa, Homo sapiens
  CDR3 for alpha chain variable domain of TCR clone 172506 (TRAV8-2, TRAJ11)
CVVSEKSGYSTLTF

SEQ ID NO: 345012 - protein, 15 aa, Homo sapiens
  CDR3 for beta chain variable domain of TCR clone 172506 (TRBV7-2, TRBJ2-3)
CASSLAGAFIDTQYF

SEQ ID NO: 345013 - protein, 13 aa, Homo sapiens
  CDR3 for alpha chain variable domain of TCR clone 172507 (TRAV8-1, TRAJ15)
CAVKNQAGTAFIF

SEQ ID NO: 345014 - protein, 15 aa, Homo sapiens
  CDR3 for beta chain variable domain of TCR clone 172507 (TRBV7-3, TRBJ2-7)
CASSLTPTGYDEQYF

SEQ ID NO: 345015 - protein, 17 aa, Homo sapiens
  CDR3 for alpha chain variable domain of TCR clone 172508 (TRAV3, TRAJ6)
CAVRDGPRAGGSYIPTF

SEQ ID NO: 345016 - protein, 13 aa, Homo sapiens
  CDR3 for beta chain variable domain of TCR clone 172508 (TRBV11-2, TRBJ2-7)
CASSPLGSYEQYF

SEQ ID NO: 345017 - protein, 11 aa, Homo sapiens
  CDR3 for alpha chain variable domain of TCR clone 172509 (TRAV3, TRAJ21)
CSVGNFNKFHF

SEQ ID NO: 345018 - protein, 16 aa, Homo sapiens
  CDR3 for beta chain variable domain of TCR clone 172509 (TRBV19, TRBJ2-1)
CASSKAGPSSYNEQFF

SEQ ID NO: 345019 - protein, 15 aa, Homo sapiens
  CDR3 for alpha chain variable domain of TCR clone 172510 (TRAV23/DV6, TRAJ38)
CAARSNAGNNRKRIW

SEQ ID NO: 345020 - protein, 16 aa, Homo sapiens
  CDR3 for beta chain variable domain of TCR clone 172510 (TRBV10-2, TRBJ1-5)
CASSRDRDYSNQPQHF

SEQ ID NO: 345021 - protein, 18 aa, Homo sapiens
  CDR3 for alpha chain variable domain of TCR clone 172511 (TRAV13-1, TRAJ52)
CAATNPNAGGTSYGKLTF

SEQ ID NO: 345022 - protein, 18 aa, Homo sapiens
  CDR3 for beta chain variable domain of TCR clone 172511 (TRBV12-4, TRBJ2-4)
CASSRTGAVDVAKNIQYF

SEQ ID NO: 345023 - protein, 14 aa, Homo sapiens
  CDR3 for alpha chain variable domain of TCR clone 172512 (TRAV1-2, TRAJ16)
CAVNRFSDDQKLLF

SEQ ID NO: 345024 - protein, 16 aa, Homo sapiens
  CDR3 for beta chain variable domain of TCR clone 172512 (TRBV19, TRBJ2-1)
CASSKAGPSSYNEQFF

SEQ ID NO: 345025 - protein, 15 aa, Homo sapiens
  CDR3 for alpha chain variable domain of TCR clone 172513 (TRAV21, TRAJ24)
CAARSSTDSWGKLQF

SEQ ID NO: 345026 - protein, 13 aa, Homo sapiens
  CDR3 for beta chain variable domain of TCR clone 172513 (TRBV28, TRBJ2-7)
CASKAGGVYEQYF

SEQ ID NO: 345027 - protein, 12 aa, Homo sapiens
  CDR3 for alpha chain variable domain of TCR clone 172514 (TRAV17, TRAJ4)
CAVSGGYNKLIF

SEQ ID NO: 345028 - protein, 13 aa, Homo sapiens
  CDR3 for beta chain variable domain of TCR clone 172514 (TRBV6-1, TRBJ1-1)
CASSEGWGTEALF

SEQ ID NO: 345029 - protein, 15 aa, Homo sapiens
  CDR3 for alpha chain variable domain of TCR clone 172515 (TRAV8-2, TRAJ24)
CVVSDRTDRWGKLQF

SEQ ID NO: 345030 - protein, 11 aa, Homo sapiens
  CDR3 for beta chain variable domain of TCR clone 172515 (TRBV20-1, TRBJ1-2)
CSVQGAGGYTF

SEQ ID NO: 345031 - protein, 15 aa, Homo sapiens
  CDR3 for alpha chain variable domain of TCR clone 172516 (TRAV35, TRAJ24)
CAGQSAQGSWGKLQF

SEQ ID NO: 345032 - protein, 14 aa, Homo sapiens
  CDR3 for beta chain variable domain of TCR clone 172516 (TRBV19, TRBJ2-1)
CASPTFVLSGEQFF

SEQ ID NO: 345033 - protein, 17 aa, Homo sapiens
  CDR3 for alpha chain variable domain of TCR clone 172517 (TRAV3, TRAJ6)
CAVRDGPRAGGSYIPTF

SEQ ID NO: 345034 - protein, 15 aa, Homo sapiens
  CDR3 for beta chain variable domain of TCR clone 172517 (TRBV7-9, TRBJ1-6)
CASSSPGRGNSPLLF

SEQ ID NO: 345035 - protein, 16 aa, Homo sapiens
  CDR3 for alpha chain variable domain of TCR clone 172518 (TRAV35, TRAJ20)
CCADPSSGFNDYKLSF

SEQ ID NO: 345036 - protein, 16 aa, Homo sapiens
  CDR3 for beta chain variable domain of TCR clone 172518 (TRBV4-3, TRBJ1-6)
CASSTQPGGEGSPLHF

SEQ ID NO: 345037 - protein, 16 aa, Homo sapiens
  CDR3 for alpha chain variable domain of TCR clone 172519 (TRAV3, TRAJ37)
CAVRPHGSGKTGKLIF

SEQ ID NO: 345038 - protein, 20 aa, Homo sapiens
  CDR3 for beta chain variable domain of TCR clone 172519 (TRBV28, TRBJ2-1)
CASTPIGRSPGLAGGNEQFF

SEQ ID NO: 345039 - protein, 13 aa, Homo sapiens
  CDR3 for alpha chain variable domain of TCR clone 172520 (TRAV27, TRAJ8)
CAGGPTGFQKLVF

SEQ ID NO: 345040 - protein, 17 aa, Homo sapiens
  CDR3 for beta chain variable domain of TCR clone 172520 (TRBV6-1, TRBJ2-7)
CASSESMGISTSSTSGR

SEQ ID NO: 345041 - protein, 16 aa, Homo sapiens
  CDR3 for alpha chain variable domain of TCR clone 172521 (TRAV3, TRAJ6)
CAVRDGMGRRKLHTYI

SEQ ID NO: 345042 - protein, 18 aa, Homo sapiens
  CDR3 for beta chain variable domain of TCR clone 172521 (TRBV11-2, TRBJ2-3)
CASSLGGASRGAPNTQYF

SEQ ID NO: 345043 - protein, 17 aa, Homo sapiens
  CDR3 for alpha chain variable domain of TCR clone 172522 (TRAV1-1, TRAJ32)
CAVRVDELWWCYKQAHL

SEQ ID NO: 345044 - protein, 13 aa, Homo sapiens
  CDR3 for beta chain variable domain of TCR clone 172522 (TRBV10-2, TRBJ2-5)
CASGRLARETQYF

SEQ ID NO: 345045 - protein, 14 aa, Homo sapiens
  CDR3 for alpha chain variable domain of TCR clone 172523 (TRAV12-2, TRAJ40)
CAVKIPSGTYKYIF

SEQ ID NO: 345046 - protein, 14 aa, Homo sapiens
  CDR3 for beta chain variable domain of TCR clone 172523 (TRBV11-1, TRBJ2-7)
CASSFRQGSYEQYF

SEQ ID NO: 345047 - protein, 14 aa, Homo sapiens
  CDR3 for alpha chain variable domain of TCR clone 172524 (TRAV12-2, TRAJ17)
CAVNIKAAGNKLTF

SEQ ID NO: 345048 - protein, 16 aa, Homo sapiens
  CDR3 for beta chain variable domain of TCR clone 172524 (TRBV10-3, TRBJ2-7)
CAISADFADRPYEQYF

SEQ ID NO: 345049 - protein, 14 aa, Homo sapiens
  CDR3 for alpha chain variable domain of TCR clone 172525 (TRAV2, TRAJ9)
CAVEDRSGGFKTIF

SEQ ID NO: 345050 - protein, 15 aa, Homo sapiens
  CDR3 for beta chain variable domain of TCR clone 172525 (TRBV28, TRBJ1-3)
CASSMGWASGTTIYF

SEQ ID NO: 345051 - protein, 14 aa, Homo sapiens
  CDR3 for alpha chain variable domain of TCR clone 172526 (TRAV9-2, TRAJ39)
CALYIYNAGNMLTF

SEQ ID NO: 345052 - protein, 18 aa, Homo sapiens
  CDR3 for beta chain variable domain of TCR clone 172526 (TRBV7-2, TRBJ2-3)
CASSLKREGSGITDTQYF

SEQ ID NO: 345053 - protein, 13 aa, Homo sapiens
  CDR3 for alpha chain variable domain of TCR clone 172527 (TRAV26-1, TRAJ30)
CIVNMNREDKIIF

SEQ ID NO: 345054 - protein, 16 aa, Homo sapiens
  CDR3 for beta chain variable domain of TCR clone 172527 (TRBV16, TRBJ2-7)
CASSRPAGESSYEQYF

SEQ ID NO: 345055 - protein, 14 aa, Homo sapiens
  CDR3 for alpha chain variable domain of TCR clone 172528 (TRAV26-1, TRAJ38)
CIADNAGNNRKLIW

SEQ ID NO: 345056 - protein, 16 aa, Homo sapiens
  CDR3 for beta chain variable domain of TCR clone 172528 (TRBV4-2, TRBJ2-1)
CASSQETATPYNEQFF

SEQ ID NO: 345057 - protein, 13 aa, Homo sapiens
  CDR3 for alpha chain variable domain of TCR clone 172529 (TRAV2, TRAJ15)
CAVASQAGTALIF

SEQ ID NO: 345058 - protein, 16 aa, Homo sapiens
  CDR3 for beta chain variable domain of TCR clone 172529 (TRBV20-1, TRBJ1-4)
CSAPGQGLLTNENLFF

SEQ ID NO: 345059 - protein, 15 aa, Homo sapiens
  CDR3 for alpha chain variable domain of TCR clone 172530 (TRAV23/DV6, TRAJ53)
CAASFGGGSNYKLTF

SEQ ID NO: 345060 - protein, 15 aa, Homo sapiens
  CDR3 for beta chain variable domain of TCR clone 172530 (TRBV4-1, TRBJ1-1)
CASSQEWGHYTEAFF

SEQ ID NO: 345061 - protein, 14 aa, Homo sapiens
  CDR3 for alpha chain variable domain of TCR clone 172531 (TRAV8-2, TRAJ4)
CVVGPSGGYNKLIF

SEQ ID NO: 345062 - protein, 15 aa, Homo sapiens
  CDR3 for beta chain variable domain of TCR clone 172531 (TRBV4-1, TRBJ1-4)
CASSDTGGTNENLFF

SEQ ID NO: 345063 - protein, 14 aa, Homo sapiens
  CDR3 for alpha chain variable domain of TCR clone 172532 (TRAV3, TRAJ21)
CAVRDAYNFNKFYF

SEQ ID NO: 345064 - protein, 16 aa, Homo sapiens
  CDR3 for beta chain variable domain of TCR clone 172532 (TRBV19, TRBJ2-2)
CASRSPGTGATGELFF

SEQ ID NO: 345065 - protein, 11 aa, Homo sapiens
  CDR3 for alpha chain variable domain of TCR clone 172533 (TRAV1-2, TRAJ20)
CAVANDYKLSF

SEQ ID NO: 345066 - protein, 16 aa, Homo sapiens
  CDR3 for beta chain variable domain of TCR clone 172533 (TRBV4-3, TRBJ1-6)
CASSQDPGVYNSPHHF

SEQ ID NO: 345067 - protein, 14 aa, Homo sapiens
  CDR3 for alpha chain variable domain of TCR clone 172534 (TRAV12-1, TRAJ17)
CVVNFKAEGNKLTF

SEQ ID NO: 345068 - protein, 17 aa, Homo sapiens
  CDR3 for beta chain variable domain of TCR clone 172534 (TRBV20-1, TRBJ2-1)
CSASASGLAGSYNKQFF

SEQ ID NO: 345069 - protein, 10 aa, Homo sapiens
  CDR3 for alpha chain variable domain of TCR clone 172535 (TRAV25, TRAJ17)
CQDAGNKLTF

SEQ ID NO: 345070 - protein, 13 aa, Homo sapiens
  CDR3 for beta chain variable domain of TCR clone 172535 (TRBV6-5, TRBJ2-2)
CASSLPGVGELFF

SEQ ID NO: 345071 - protein, 20 aa, Homo sapiens
  CDR3 for alpha chain variable domain of TCR clone 172536 (TRAV12-2, TRAJ52)
SPVIQPPARAGGTSYGKLTF

SEQ ID NO: 345072 - protein, 17 aa, Homo sapiens
  CDR3 for beta chain variable domain of TCR clone 172536 (TRBV7-9, TRBJ2-1)
CASSLVASYPSYNEQFF

SEQ ID NO: 345073 - protein, 13 aa, Homo sapiens
  CDR3 for alpha chain variable domain of TCR clone 172537 (TRAV36/DV7, TRAJ49)
CAGDSNTGNQFSF

SEQ ID NO: 345074 - protein, 16 aa, Homo sapiens
  CDR3 for beta chain variable domain of TCR clone 172537 (TRBV5-1, TRBJ1-1)
CASSKTGTEVGTEAFF

SEQ ID NO: 345075 - protein, 13 aa, Homo sapiens
  CDR3 for alpha chain variable domain of TCR clone 172538 (TRAV12-2, TRAJ4)
CAARSGGYNKLIF

SEQ ID NO: 345076 - protein, 15 aa, Homo sapiens
  CDR3 for beta chain variable domain of TCR clone 172538 (TRBV10-3, TRBJ2-1)
CAISDVQDRAYEQFF

SEQ ID NO: 345077 - protein, 10 aa, Homo sapiens
  CDR3 for alpha chain variable domain of TCR clone 172539 (TRAV12-2, TRAJ10)
CAAWTGVETH

SEQ ID NO: 345078 - protein, 17 aa, Homo sapiens
  CDR3 for beta chain variable domain of TCR clone 172539 (TRBV13, TRBJ2-3)
CASSLTRVAGGRNTQYF

SEQ ID NO: 345079 - protein, 11 aa, Homo sapiens
  CDR3 for alpha chain variable domain of TCR clone 172540 (TRAV3, TRAJ21)
CAVGNFNKFYF

SEQ ID NO: 345080 - protein, 16 aa, Homo sapiens
  CDR3 for beta chain variable domain of TCR clone 172540 (TRBV10-3, TRBJ2-2)
CAINSRASGSGGELFF

SEQ ID NO: 345081 - protein, 16 aa, Homo sapiens
  CDR3 for alpha chain variable domain of TCR clone 172541 (TRAV3, TRAJ37)
CAVRGKGSGNTGKIIF

SEQ ID NO: 345082 - protein, 21 aa, Homo sapiens
  CDR3 for beta chain variable domain of TCR clone 172541 (TRBV15, TRBJ2-1)
AWGTQPCTCVPPAEVDTARFF

SEQ ID NO: 345083 - protein, 15 aa, Homo sapiens
  CDR3 for alpha chain variable domain of TCR clone 172542 (TRAV3, TRAJ30)
CAVRDEYGRDDKIIF

SEQ ID NO: 345084 - protein, 13 aa, Homo sapiens
  CDR3 for beta chain variable domain of TCR clone 172542 (TRBV7-2, TRBJ2-5)
CASSRGGLETQYF

SEQ ID NO: 345085 - protein, 13 aa, Homo sapiens
  CDR3 for alpha chain variable domain of TCR clone 172543 (TRAV8-3, TRAJ48)
CAVWPFGNEKLTF

SEQ ID NO: 345086 - protein, 15 aa, Homo sapiens
  CDR3 for beta chain variable domain of TCR clone 172543 (TRBV11-2, TRBJ2-1)
CASSSPSTRYNEQFF

SEQ ID NO: 345087 - protein, 13 aa, Homo sapiens
  CDR3 for alpha chain variable domain of TCR clone 172544 (TRAV21, TRAJ20)
CAVGLRVDYKLSF

SEQ ID NO: 345088 - protein, 12 aa, Homo sapiens
  CDR3 for beta chain variable domain of TCR clone 172544 (TRBV7-9, TRBJ2-7)
CASSIKREEQYF

SEQ ID NO: 345089 - protein, 19 aa, Homo sapiens
  CDR3 for alpha chain variable domain of TCR clone 172545 (TRAV29/DV5, TRAJ49)
CSVLLCSKLTVDTGNKFYF

SEQ ID NO: 345090 - protein, 17 aa, Homo sapiens
  CDR3 for beta chain variable domain of TCR clone 172545 (TRBV13, TRBJ2-3)
CASSLSRVAGGRNTQYF

SEQ ID NO: 345091 - protein, 14 aa, Homo sapiens
  CDR3 for alpha chain variable domain of TCR clone 172546 (TRAV12-2, TRAJ3)
CAVSLYSSASKIIF

SEQ ID NO: 345092 - protein, 14 aa, Homo sapiens
  CDR3 for beta chain variable domain of TCR clone 172546 (TRBV27, TRBJ2-1)
CAGSIAETYYEQFF

SEQ ID NO: 345093 - protein, 16 aa, Homo sapiens
  CDR3 for alpha chain variable domain of TCR clone 172547 (TRAV30, TRAJ24)
CGTEIVDADRRGKFQF

SEQ ID NO: 345094 - protein, 17 aa, Homo sapiens
  CDR3 for beta chain variable domain of TCR clone 172547 (TRBV20-1, TRBJ2-2)
CSASGSGQGGLTGELFF

SEQ ID NO: 345095 - protein, 13 aa, Homo sapiens
  CDR3 for alpha chain variable domain of TCR clone 172548 (TRAV12-2, TRAJ48)
CAAPNFGNEKLTF

SEQ ID NO: 345096 - protein, 16 aa, Homo sapiens
  CDR3 for beta chain variable domain of TCR clone 172548 (TRBV6-1, TRBJ2-5)
CASSETLDRGAETQYF

SEQ ID NO: 345097 - protein, 16 aa, Homo sapiens
  CDR3 for alpha chain variable domain of TCR clone 172549 (TRAV4, TRAJ18)
CCVLLIGDSTLGRLYF

SEQ ID NO: 345098 - protein, 13 aa, Homo sapiens
  CDR3 for beta chain variable domain of TCR clone 172549 (TRBV19, TRBJ2-7)
CASSIDRTYEQYF

SEQ ID NO: 345099 - protein, 16 aa, Homo sapiens
  CDR3 for alpha chain variable domain of TCR clone 172550 (TRAV12-2, TRAJ43)
CAGDDMRFGAGTRLTV

SEQ ID NO: 345100 - protein, 16 aa, Homo sapiens
  CDR3 for beta chain variable domain of TCR clone 172550 (TRBV2, TRBJ2-4)
CASSEAPGVEQNRQYF

SEQ ID NO: 345101 - protein, 14 aa, Homo sapiens
  CDR3 for alpha chain variable domain of TCR clone 172551 (TRAV12-3, TRAJ10)
SHLPLPGGGNKLTF

SEQ ID NO: 345102 - protein, 22 aa, Homo sapiens
  CDR3 for beta chain variable domain of TCR clone 172551 (TRBV6-1, TRBJ1-3)
CASVQGGGWKHHIFWRGKLAHC

SEQ ID NO: 345103 - protein, 13 aa, Homo sapiens
  CDR3 for alpha chain variable domain of TCR clone 172552 (TRAV12-3, TRAJ7)
CAMTPYGNNRLAF

SEQ ID NO: 345104 - protein, 16 aa, Homo sapiens
  CDR3 for beta chain variable domain of TCR clone 172552 (TRBV20-1, TRBJ1-4)
CSARPYGGELNAKLFF

SEQ ID NO: 345105 - protein, 12 aa, Homo sapiens
  CDR3 for alpha chain variable domain of TCR clone 172553 (TRAV12-3, TRAJ17)
CAMTLTGNKLPF

SEQ ID NO: 345106 - protein, 13 aa, Homo sapiens
  CDR3 for beta chain variable domain of TCR clone 172553 (TRBV10-3, TRBJ2-7)
CASKLAVNYEQYF

SEQ ID NO: 345107 - protein, 17 aa, Homo sapiens
  CDR3 for alpha chain variable domain of TCR clone 172554 (TRAV3, TRAJ38)
CAVRDCLNAGNNRKLIW

SEQ ID NO: 345108 - protein, 12 aa, Homo sapiens
  CDR3 for beta chain variable domain of TCR clone 172554 (TRBV4-2, TRBJ1-4)
CASSKLGEKLFF

SEQ ID NO: 345109 - protein, 11 aa, Homo sapiens
  CDR3 for alpha chain variable domain of TCR clone 172555 (TRAV13-1, TRAJ6)
CATLGSYIPTC

SEQ ID NO: 345110 - protein, 12 aa, Homo sapiens
  CDR3 for beta chain variable domain of TCR clone 172555 (TRBV11-2, TRBJ2-1)
CASSPGNNEQFF

SEQ ID NO: 345111 - protein, 12 aa, Homo sapiens
  CDR3 for alpha chain variable domain of TCR clone 172556 (TRAV13-1, TRAJ15)
CAASQAGTALIF

SEQ ID NO: 345112 - protein, 18 aa, Homo sapiens
  CDR3 for beta chain variable domain of TCR clone 172556 (TRBV7-9, TRBJ2-3)
CASSLPINGQTSTDTQYF

SEQ ID NO: 345113 - protein, 11 aa, Homo sapiens
  CDR3 for alpha chain variable domain of TCR clone 172557 (TRAV13-1, TRAJ39)
CASHAGNMLTF

SEQ ID NO: 345114 - protein, 16 aa, Homo sapiens
  CDR3 for beta chain variable domain of TCR clone 172557 (TRBV11-2, TRBJ2-1)
CASSVTADFSYNEQFF

SEQ ID NO: 345115 - protein, 14 aa, Homo sapiens
  CDR3 for alpha chain variable domain of TCR clone 172558 (TRAV26-1, TRAJ30)
CIVRPRNRDDKIIF

SEQ ID NO: 345116 - protein, 15 aa, Homo sapiens
  CDR3 for beta chain variable domain of TCR clone 172558 (TRBV4-1, TRBJ1-2)
CASSQGQGAAYGYTF

SEQ ID NO: 345117 - protein, 14 aa, Homo sapiens
  CDR3 for alpha chain variable domain of TCR clone 172559 (TRAV12-1, TRAJ6)
CVVPTSGGSYIPTF

SEQ ID NO: 345118 - protein, 14 aa, Homo sapiens
  CDR3 for beta chain variable domain of TCR clone 172559 (TRBV7-7, TRBJ2-2)
CASSPDRNTGELFF

SEQ ID NO: 345119 - protein, 14 aa, Homo sapiens
  CDR3 for alpha chain variable domain of TCR clone 172560 (TRAV14/DV4, TRAJ9)
CAMRPNTGGFTTIF

SEQ ID NO: 345120 - protein, 15 aa, Homo sapiens
  CDR3 for beta chain variable domain of TCR clone 172560 (TRBV6-1, TRBJ1-5)
CASSVNRATGQPQHF

SEQ ID NO: 345121 - protein, 14 aa, Homo sapiens
  CDR3 for alpha chain variable domain of TCR clone 172561 (TRAV2, TRAJ11)
CAVVPNSGYSTLTF

SEQ ID NO: 345122 - protein, 15 aa, Homo sapiens
  CDR3 for beta chain variable domain of TCR clone 172561 (TRBV4-1, TRBJ1-3)
CASSQDLRVGDTIYF

SEQ ID NO: 345123 - protein, 15 aa, Homo sapiens
  CDR3 for alpha chain variable domain of TCR clone 172562 (TRAV17, TRAJ56)
CVTDANTGANSKLTF

SEQ ID NO: 345124 - protein, 12 aa, Homo sapiens
  CDR3 for beta chain variable domain of TCR clone 172562 (TRBV7-8, TRBJ2-7)
CASSLGDREQYF

SEQ ID NO: 345125 - protein, 13 aa, Homo sapiens
  CDR3 for alpha chain variable domain of TCR clone 172563 (TRAV27, TRAJ57)
CRSAQGGSEKLVF

SEQ ID NO: 345126 - protein, 11 aa, Homo sapiens
  CDR3 for beta chain variable domain of TCR clone 172563 (TRBV11-2, TRBJ1-1)
CASSIKTEAFF

SEQ ID NO: 345127 - protein, 21 aa, Homo sapiens
  CDR3 for alpha chain variable domain of TCR clone 172564 (TRAV1-1, TRAJ6)
CLLPLRCERLERTGGSYIPTF

SEQ ID NO: 345128 - protein, 17 aa, Homo sapiens
  CDR3 for beta chain variable domain of TCR clone 172564 (TRBV20-1, TRBJ2-3)
CSARGTGGPTGTDTQYF

SEQ ID NO: 345129 - protein, 11 aa, Homo sapiens
  CDR3 for alpha chain variable domain of TCR clone 172565 (TRAV21, TRAJ11)
CAVNGYSTLTF

SEQ ID NO: 345130 - protein, 12 aa, Homo sapiens
  CDR3 for beta chain variable domain of TCR clone 172565 (TRBV12-4, TRBJ2-7)
CASSLGGYERYF

SEQ ID NO: 345131 - protein, 13 aa, Homo sapiens
  CDR3 for alpha chain variable domain of TCR clone 172566 (TRAV27, TRAJ41)
CAGEGNSGYALNF

SEQ ID NO: 345132 - protein, 14 aa, Homo sapiens
  CDR3 for beta chain variable domain of TCR clone 172566 (TRBV25-1, TRBJ1-1)
CASTRLGGNTEAFF

SEQ ID NO: 345133 - protein, 14 aa, Homo sapiens
  CDR3 for alpha chain variable domain of TCR clone 172567 (TRAV20, TRAJ29)
CAVQDWVGNTPLVF

SEQ ID NO: 345134 - protein, 15 aa, Homo sapiens
  CDR3 for beta chain variable domain of TCR clone 172567 (TRBV29-1, TRBJ2-7)
CSVEFFDRGSYEQYF

SEQ ID NO: 345135 - protein, 14 aa, Homo sapiens
  CDR3 for alpha chain variable domain of TCR clone 172568 (TRAV12-3, TRAJ56)
CAMSVTGANIKLTL

SEQ ID NO: 345136 - protein, 17 aa, Homo sapiens
  CDR3 for beta chain variable domain of TCR clone 172568 (TRBV20-1, TRBJ2-3)
CSASLLGRGGSADTQYF

SEQ ID NO: 345137 - protein, 14 aa, Homo sapiens
  CDR3 for alpha chain variable domain of TCR clone 172569 (TRAV34, TRAJ22)
CGADTSGSARQLTF

SEQ ID NO: 345138 - protein, 15 aa, Homo sapiens
  CDR3 for beta chain variable domain of TCR clone 172569 (TRBV12-4, TRBJ2-5)
CQQFFVRGRQETQYF

SEQ ID NO: 345139 - protein, 15 aa, Homo sapiens
  CDR3 for alpha chain variable domain of TCR clone 172570 (TRAV12-2, TRAJ50)
CAVGTATKTSYKVIF

SEQ ID NO: 345140 - protein, 12 aa, Homo sapiens
  CDR3 for beta chain variable domain of TCR clone 172570 (TRBV12-4, TRBJ1-5)
CASSLGGQPQHF

SEQ ID NO: 345141 - protein, 11 aa, Homo sapiens
  CDR3 for alpha chain variable domain of TCR clone 172571 (TRAV17, TRAJ9)
RATTGGFKTNF

SEQ ID NO: 345142 - protein, 14 aa, Homo sapiens
  CDR3 for beta chain variable domain of TCR clone 172571 (TRBV7-9, TRBJ2-2)
CASSGLADTGELFF

SEQ ID NO: 345143 - protein, 12 aa, Homo sapiens
  CDR3 for alpha chain variable domain of TCR clone 172572 (TRAV35, TRAJ30)
CAGLKRDDKIIF

SEQ ID NO: 345144 - protein, 15 aa, Homo sapiens
  CDR3 for beta chain variable domain of TCR clone 172572 (TRBV18, TRBJ2-3)
CASSPLAGETDTQYF

SEQ ID NO: 345145 - protein, 15 aa, Homo sapiens
  CDR3 for alpha chain variable domain of TCR clone 172573 (TRAV26-1, TRAJ37)
CIVRVATGNTGKLIF

SEQ ID NO: 345146 - protein, 15 aa, Homo sapiens
  CDR3 for beta chain variable domain of TCR clone 172573 (TRBV29-1, TRBJ2-6)
CSVGDRGSGANVLTF

SEQ ID NO: 345147 - protein, 15 aa, Homo sapiens
  CDR3 for alpha chain variable domain of TCR clone 172574 (TRAV8-2, TRAJ24)
CVVSDRTDSWGTLQF

SEQ ID NO: 345148 - protein, 14 aa, Homo sapiens
  CDR3 for beta chain variable domain of TCR clone 172574 (TRBV19, TRBJ2-7)
CASSIEASSYEQYF

SEQ ID NO: 345149 - protein, 17 aa, Homo sapiens
  CDR3 for alpha chain variable domain of TCR clone 172575 (TRAV8-1, TRAJ42)
CAVKWGNYGGSQGNLIF

SEQ ID NO: 345150 - protein, 15 aa, Homo sapiens
  CDR3 for beta chain variable domain of TCR clone 172575 (TRBV9, TRBJ1-6)
CASSVAGPGDSPLHF

SEQ ID NO: 345151 - protein, 15 aa, Homo sapiens
  CDR3 for alpha chain variable domain of TCR clone 172576 (TRAV3, TRAJ22)
CAVRDRGGSARQLNF

SEQ ID NO: 345152 - protein, 16 aa, Homo sapiens
  CDR3 for beta chain variable domain of TCR clone 172576 (TRBV5-4, TRBJ2-3)
CASQQPGAGGADTQYC

SEQ ID NO: 345153 - protein, 15 aa, Homo sapiens
  CDR3 for alpha chain variable domain of TCR clone 172577 (TRAV21, TRAJ53)
CATLNSGGSNYKLTF

SEQ ID NO: 345154 - protein, 14 aa, Homo sapiens
  CDR3 for beta chain variable domain of TCR clone 172577 (TRBV6-6, TRBJ1-6)
CASSFEGTTSPLHF

SEQ ID NO: 345155 - protein, 13 aa, Homo sapiens
  CDR3 for alpha chain variable domain of TCR clone 172578 (TRAV13-1, TRAJ6)
CAASSGGSYIPTF

SEQ ID NO: 345156 - protein, 15 aa, Homo sapiens
  CDR3 for beta chain variable domain of TCR clone 172578 (TRBV12-4, TRBJ2-7)
CASSPPTGLQETQYF

SEQ ID NO: 345157 - protein, 14 aa, Homo sapiens
  CDR3 for alpha chain variable domain of TCR clone 172579 (TRAV3, TRAJ48)
CAVKSNFGNEKLTF

SEQ ID NO: 345158 - protein, 15 aa, Homo sapiens
  CDR3 for beta chain variable domain of TCR clone 172579 (TRBV4-1, TRBJ2-7)
CASSQQGQGFDEQYF

SEQ ID NO: 345159 - protein, 14 aa, Homo sapiens
  CDR3 for alpha chain variable domain of TCR clone 172580 (TRAV16, TRAJ54)
CALSLIQGAQKLVF

SEQ ID NO: 345160 - protein, 16 aa, Homo sapiens
  CDR3 for beta chain variable domain of TCR clone 172580 (TRBV7-3, TRBJ2-1)
CASSLEGYRSYNEQFF

SEQ ID NO: 345161 - protein, 16 aa, Homo sapiens
  CDR3 for alpha chain variable domain of TCR clone 172581 (TRAV26-1, TRAJ33)
CIVPFWGEDSNYQLIW

SEQ ID NO: 345162 - protein, 13 aa, Homo sapiens
  CDR3 for beta chain variable domain of TCR clone 172581 (TRBV19, TRBJ1-2)
CASSQGQVYGYTF

SEQ ID NO: 345163 - protein, 11 aa, Homo sapiens
  CDR3 for alpha chain variable domain of TCR clone 172582 (TRAV27, TRAJ45)
CAGAQEEVLTD

SEQ ID NO: 345164 - protein, 14 aa, Homo sapiens
  CDR3 for beta chain variable domain of TCR clone 172582 (TRBV7-9, TRBJ2-1)
CASGSMVGFGEQFF

SEQ ID NO: 345165 - protein, 16 aa, Homo sapiens
  CDR3 for alpha chain variable domain of TCR clone 172583 (TRAV16, TRAJ4)
CALSRMFSGGYNKLIF

SEQ ID NO: 345166 - protein, 12 aa, Homo sapiens
  CDR3 for beta chain variable domain of TCR clone 172583 (TRBV5-5, TRBJ2-5)
CASSYFGETQYF

SEQ ID NO: 345167 - protein, 18 aa, Homo sapiens
  CDR3 for alpha chain variable domain of TCR clone 172584 (TRAV4, TRAJ5)
CLVGPDPGHGQESTYLGV

SEQ ID NO: 345168 - protein, 15 aa, Homo sapiens
  CDR3 for beta chain variable domain of TCR clone 172584 (TRBV27, TRBJ2-5)
CASSLIPSGGETQYF

SEQ ID NO: 345169 - protein, 14 aa, Homo sapiens
  CDR3 for alpha chain variable domain of TCR clone 172585 (TRAV35, TRAJ24)
CAGPRRDSWGKLQF

SEQ ID NO: 345170 - protein, 14 aa, Homo sapiens
  CDR3 for beta chain variable domain of TCR clone 172585 (TRBV12-5, TRBJ2-5)
CASGSRTHQETQYF

SEQ ID NO: 345171 - protein, 11 aa, Homo sapiens
  CDR3 for alpha chain variable domain of TCR clone 172586 (TRAV13-1, TRAJ40)
CAVSGTYKYIF

SEQ ID NO: 345172 - protein, 15 aa, Homo sapiens
  CDR3 for beta chain variable domain of TCR clone 172586 (TRBV7-9, TRBJ1-4)
CASSARTGGNEKLFF

SEQ ID NO: 345173 - protein, 14 aa, Homo sapiens
  CDR3 for alpha chain variable domain of TCR clone 172587 (TRAV12-2, TRAJ13)
CAVKKTGGYQKVTF

SEQ ID NO: 345174 - protein, 16 aa, Homo sapiens
  CDR3 for beta chain variable domain of TCR clone 172587 (TRBV13, TRBJ2-2)
CASSTRTGEHTGELFF

SEQ ID NO: 345175 - protein, 11 aa, Homo sapiens
  CDR3 for alpha chain variable domain of TCR clone 172588 (TRAV21, TRAJ20)
CAVSDDYKLSF

SEQ ID NO: 345176 - protein, 15 aa, Homo sapiens
  CDR3 for beta chain variable domain of TCR clone 172588 (TRBV12-3, TRBJ1-6)
CASSFQAGGGSPLHF

SEQ ID NO: 345177 - protein, 14 aa, Homo sapiens
  CDR3 for alpha chain variable domain of TCR clone 172589 (TRAV8-2, TRAJ4)
CVVSPSGGYNKLIF

SEQ ID NO: 345178 - protein, 15 aa, Homo sapiens
  CDR3 for beta chain variable domain of TCR clone 172589 (TRBV12-4, TRBJ2-5)
CASRPPTGLQETQYF

SEQ ID NO: 345179 - protein, 21 aa, Homo sapiens
  CDR3 for alpha chain variable domain of TCR clone 172590 (TRAV1-1, TRAJ6)
CLLLLRCERLESTGGSYIPTF

SEQ ID NO: 345180 - protein, 14 aa, Homo sapiens
  CDR3 for beta chain variable domain of TCR clone 172590 (TRBV4-1, TRBJ1-6)
CASSPGSDSSPLHF

SEQ ID NO: 345181 - protein, 14 aa, Homo sapiens
  CDR3 for alpha chain variable domain of TCR clone 172591 (TRAV21, TRAJ35)
CAVMPIGLGNVLHC

SEQ ID NO: 345182 - protein, 13 aa, Homo sapiens
  CDR3 for beta chain variable domain of TCR clone 172591 (TRBV23-1, TRBJ1-4)
CASRGKFNEKLFF

SEQ ID NO: 345183 - protein, 15 aa, Homo sapiens
  CDR3 for alpha chain variable domain of TCR clone 172592 (TRAV17, TRAJ42)
CATDHYGGSQGNLIF

SEQ ID NO: 345184 - protein, 15 aa, Homo sapiens
  CDR3 for beta chain variable domain of TCR clone 172592 (TRBV5-1, TRBJ2-2)
CASSSHGGNTGELFF

SEQ ID NO: 345185 - protein, 17 aa, Homo sapiens
  CDR3 for alpha chain variable domain of TCR clone 172593 (TRAV12-2, TRAJ48)
CASNERLTFETGTRLTI

SEQ ID NO: 345186 - protein, 12 aa, Homo sapiens
  CDR3 for beta chain variable domain of TCR clone 172593 (TRBV7-8, TRBJ2-7)
CASSLGDREQYF

SEQ ID NO: 345187 - protein, 12 aa, Homo sapiens
  CDR3 for alpha chain variable domain of TCR clone 172594 (TRAV8-3, TRAJ20)
CAVGANDYELSF

SEQ ID NO: 345188 - protein, 16 aa, Homo sapiens
  CDR3 for beta chain variable domain of TCR clone 172594 (TRBV19, TRBJ2-2)
CASRSPGTGATGELFI

SEQ ID NO: 345189 - protein, 16 aa, Homo sapiens
  CDR3 for alpha chain variable domain of TCR clone 172595 (TRAV30, TRAJ24)
CGAEIVDADSWGKFQF

SEQ ID NO: 345190 - protein, 12 aa, Homo sapiens
  CDR3 for beta chain variable domain of TCR clone 172595 (TRBV11-2, TRBJ2-2)
CASSLPTGELFF

SEQ ID NO: 345191 - protein, 12 aa, Homo sapiens
  CDR3 for alpha chain variable domain of TCR clone 172596 (TRAV27, TRAJ37)
CADSGNTCKLIF

SEQ ID NO: 345192 - protein, 18 aa, Homo sapiens
  CDR3 for beta chain variable domain of TCR clone 172596 (TRBV7-9, TRBJ1-1)
CASSKPWDTMGMNNEAFF

SEQ ID NO: 345193 - protein, 14 aa, Homo sapiens
  CDR3 for alpha chain variable domain of TCR clone 172597 (TRAV1-2, TRAJ16)
CAVNRFSNGQKLLF

SEQ ID NO: 345194 - protein, 15 aa, Homo sapiens
  CDR3 for beta chain variable domain of TCR clone 172597 (TRBV5-1, TRBJ2-7)
CASSLNGGPAREQYF

SEQ ID NO: 345195 - protein, 15 aa, Homo sapiens
  CDR3 for alpha chain variable domain of TCR clone 172598 (TRAV3, TRAJ22)
CAVRDRGGSARQLTF

SEQ ID NO: 345196 - protein, 16 aa, Homo sapiens
  CDR3 for beta chain variable domain of TCR clone 172598 (TRBV7-8, TRBJ2-6)
CASRVGDSSGANVLTF

SEQ ID NO: 345197 - protein, 15 aa, Homo sapiens
  CDR3 for alpha chain variable domain of TCR clone 172599 (TRAV1-2, TRAJ16)
CAVRARFSDGQKLLF

SEQ ID NO: 345198 - protein, 13 aa, Homo sapiens
  CDR3 for beta chain variable domain of TCR clone 172599 (TRBV15, TRBJ1-6)
CATSGGLNSPLHF

SEQ ID NO: 345199 - protein, 14 aa, Homo sapiens
  CDR3 for alpha chain variable domain of TCR clone 172600 (TRAV9-2, TRAJ39)
CALYIYNAGNMLTF

SEQ ID NO: 345200 - protein, 15 aa, Homo sapiens
  CDR3 for beta chain variable domain of TCR clone 172600 (TRBV7-9, TRBJ2-3)
CASSSSGGATDTQYF

SEQ ID NO: 345201 - protein, 14 aa, Homo sapiens
  CDR3 for alpha chain variable domain of TCR clone 172601 (TRAV1-2, TRAJ16)
FAVNRFSDGQKLLF

SEQ ID NO: 345202 - protein, 14 aa, Homo sapiens
  CDR3 for beta chain variable domain of TCR clone 172601 (TRBV7-3, TRBJ1-1)
CASSLKGGNTEAFF

SEQ ID NO: 345203 - protein, 15 aa, Homo sapiens
  CDR3 for alpha chain variable domain of TCR clone 172602 (TRAV8-3, TRAJ45)
CASSYSGGGADGLTF

SEQ ID NO: 345204 - protein, 13 aa, Homo sapiens
  CDR3 for beta chain variable domain of TCR clone 172602 (TRBV19, TRBJ1-2)
CASSQGQVYGYSF

SEQ ID NO: 345205 - protein, 13 aa, Homo sapiens
  CDR3 for alpha chain variable domain of TCR clone 172603 (TRAV1-2, TRAJ9)
CAALNTGGFKTIF

SEQ ID NO: 345206 - protein, 14 aa, Homo sapiens
  CDR3 for beta chain variable domain of TCR clone 172603 (TRBV13, TRBJ2-5)
CASSLGTAQETQYF

SEQ ID NO: 345207 - protein, 16 aa, Homo sapiens
  CDR3 for alpha chain variable domain of TCR clone 172604 (TRAV30, TRAJ24)
CGTEIVDADSWGKFQF

SEQ ID NO: 345208 - protein, 13 aa, Homo sapiens
  CDR3 for beta chain variable domain of TCR clone 172604 (TRBV20-1, TRBJ1-1)
CSAPEGGNTEAFF

SEQ ID NO: 345209 - protein, 13 aa, Homo sapiens
  CDR3 for alpha chain variable domain of TCR clone 172605 (TRAV2, TRAJ29)
CAAGHSRNTPLVF

SEQ ID NO: 345210 - protein, 16 aa, Homo sapiens
  CDR3 for beta chain variable domain of TCR clone 172605 (TRBV7-9, TRBJ1-2)
CASSPGGGAINYGYTF

SEQ ID NO: 345211 - protein, 15 aa, Homo sapiens
  CDR3 for alpha chain variable domain of TCR clone 172606 (TRAV12-2, TRAJ5)
CAVNGKDTGRRALTF

SEQ ID NO: 345212 - protein, 17 aa, Homo sapiens
  CDR3 for beta chain variable domain of TCR clone 172606 (TRBV13, TRBJ2-3)
CASSLSRVAGGRNTQYF

SEQ ID NO: 345213 - protein, 13 aa, Homo sapiens
  CDR3 for alpha chain variable domain of TCR clone 172607 (TRAV13-1, TRAJ49)
CATMLYTGNQFYF

SEQ ID NO: 345214 - protein, 15 aa, Homo sapiens
  CDR3 for beta chain variable domain of TCR clone 172607 (TRBV12-4, TRBJ1-5)
CASTRGSGFGQPQHF

SEQ ID NO: 345215 - protein, 15 aa, Homo sapiens
  CDR3 for alpha chain variable domain of TCR clone 172608 (TRAV4, TRAJ10)
CLVVDEEGGGNKLTF

SEQ ID NO: 345216 - protein, 15 aa, Homo sapiens
  CDR3 for beta chain variable domain of TCR clone 172608 (TRBV7-2, TRBJ2-7)
CASSLTGQGTYEQYF

SEQ ID NO: 345217 - protein, 15 aa, Homo sapiens
  CDR3 for alpha chain variable domain of TCR clone 172609 (TRAV12-3, TRAJ6)
CAMSATTGGSYIPTF

SEQ ID NO: 345218 - protein, 18 aa, Homo sapiens
  CDR3 for beta chain variable domain of TCR clone 172609 (TRBV7-9, TRBJ2-1)
CASSPPRGERGPYNEQFF

SEQ ID NO: 345219 - protein, 11 aa, Homo sapiens
  CDR3 for alpha chain variable domain of TCR clone 172610 (TRAV1-2, TRAJ31)
CAVKNNARLMF

SEQ ID NO: 345220 - protein, 17 aa, Homo sapiens
  CDR3 for beta chain variable domain of TCR clone 172610 (TRBV7-3, TRBJ2-3)
CASSLMKRMRGADTQYF

SEQ ID NO: 345221 - protein, 11 aa, Homo sapiens
  CDR3 for alpha chain variable domain of TCR clone 172611 (TRAV4, TRAJ31)
CLVGDNARLMF

SEQ ID NO: 345222 - protein, 15 aa, Homo sapiens
  CDR3 for beta chain variable domain of TCR clone 172611 (TRBV6-1, TRBJ2-3)
CASSERGGITDTQYF

SEQ ID NO: 345223 - protein, 14 aa, Homo sapiens
  CDR3 for alpha chain variable domain of TCR clone 172612 (TRAV17, TRAJ54)
CATDANQAAQKLVF

SEQ ID NO: 345224 - protein, 12 aa, Homo sapiens
  CDR3 for beta chain variable domain of TCR clone 172612 (TRBV6-3, TRBJ2-1)
CASSGSYNEQFF

SEQ ID NO: 345225 - protein, 16 aa, Homo sapiens
  CDR3 for alpha chain variable domain of TCR clone 172613 (TRAV1-2, TRAJ16)
CAVNRFSDGRSCSLQG

SEQ ID NO: 345226 - protein, 14 aa, Homo sapiens
  CDR3 for beta chain variable domain of TCR clone 172613 (TRBV7-2, TRBJ1-2)
CASSQTGSTYGYTF

SEQ ID NO: 345227 - protein, 14 aa, Homo sapiens
  CDR3 for alpha chain variable domain of TCR clone 172614 (TRAV13-1, TRAJ35)
CAASKGGFGNVLHC

SEQ ID NO: 345228 - protein, 12 aa, Homo sapiens
  CDR3 for beta chain variable domain of TCR clone 172614 (TRBV18, TRBJ1-4)
CASSPSREKLFF

SEQ ID NO: 345229 - protein, 13 aa, Homo sapiens
  CDR3 for alpha chain variable domain of TCR clone 172615 (TRAV1-1, TRAJ9)
CAAKNTGGFKTIF

SEQ ID NO: 345230 - protein, 15 aa, Homo sapiens
  CDR3 for beta chain variable domain of TCR clone 172615 (TRBV20-1, TRBJ2-7)
CSAASGTSGAYEQYF

SEQ ID NO: 345231 - protein, 14 aa, Homo sapiens
  CDR3 for alpha chain variable domain of TCR clone 172616 (TRAV1-2, TRAJ16)
CAVNRFLDGQKLLF

SEQ ID NO: 345232 - protein, 17 aa, Homo sapiens
  CDR3 for beta chain variable domain of TCR clone 172616 (TRBV4-1, TRBJ1-4)
CASSQEGPRGVEEKLFF

SEQ ID NO: 345233 - protein, 12 aa, Homo sapiens
  CDR3 for alpha chain variable domain of TCR clone 172617 (TRAV12-3, TRAJ17)
CAMKLTGNKLTF

SEQ ID NO: 345234 - protein, 15 aa, Homo sapiens
  CDR3 for beta chain variable domain of TCR clone 172617 (TRBV20-1, TRBJ2-7)
CSARDRVSGMDEQYC

SEQ ID NO: 345235 - protein, 16 aa, Homo sapiens
  CDR3 for alpha chain variable domain of TCR clone 172618 (TRAV25, TRAJ53)
CAGPKGSGGSNYKLTF

SEQ ID NO: 345236 - protein, 17 aa, Homo sapiens
  CDR3 for beta chain variable domain of TCR clone 172618 (TRBV11-3, TRBJ2-6)
CGSKWGQGLSGANVLTF

SEQ ID NO: 345237 - protein, 12 aa, Homo sapiens
  CDR3 for alpha chain variable domain of TCR clone 172619 (TRAV8-3, TRAJ20)
CAVDFNDYKLSF

SEQ ID NO: 345238 - protein, 12 aa, Homo sapiens
  CDR3 for beta chain variable domain of TCR clone 172619 (TRBV12-4, TRBJ1-3)
CASSFSGNTTYF

SEQ ID NO: 345239 - protein, 14 aa, Homo sapiens
  CDR3 for alpha chain variable domain of TCR clone 172620 (TRAV12-1, TRAJ6)
CVVAPSGGSYIPTF

SEQ ID NO: 345240 - protein, 15 aa, Homo sapiens
  CDR3 for beta chain variable domain of TCR clone 172620 (TRBV7-3, TRBJ2-1)
CASSLKASEYNERFF

SEQ ID NO: 345241 - protein, 15 aa, Homo sapiens
  CDR3 for alpha chain variable domain of TCR clone 172621 (TRAV21, TRAJ53)
CATLNSGGSNHKLTF

SEQ ID NO: 345242 - protein, 15 aa, Homo sapiens
  CDR3 for beta chain variable domain of TCR clone 172621 (TRBV11-3, TRBJ2-3)
CASSAGTVVTNTQYF

SEQ ID NO: 345243 - protein, 14 aa, Homo sapiens
  CDR3 for alpha chain variable domain of TCR clone 172622 (TRAV8-3, TRAJ4)
CAVVAAGGYNKLIF

SEQ ID NO: 345244 - protein, 12 aa, Homo sapiens
  CDR3 for beta chain variable domain of TCR clone 172622 (TRBV7-9, TRBJ2-7)
CASSIKREEQYF

SEQ ID NO: 345245 - protein, 14 aa, Homo sapiens
  CDR3 for alpha chain variable domain of TCR clone 172623 (TRAV13-1, TRAJ13)
CAASRVGGYHKVTF

SEQ ID NO: 345246 - protein, 17 aa, Homo sapiens
  CDR3 for beta chain variable domain of TCR clone 172623 (TRBV15, TRBJ1-5)
CATSRAPPGTRNQPQHF

SEQ ID NO: 345247 - protein, 16 aa, Homo sapiens
  CDR3 for alpha chain variable domain of TCR clone 172624 (TRAV30, TRAJ24)
CGTEIVDADSCGKFQF

SEQ ID NO: 345248 - protein, 15 aa, Homo sapiens
  CDR3 for beta chain variable domain of TCR clone 172624 (TRBV12-4, TRBJ2-7)
CASSQRTSGNYEQYF

SEQ ID NO: 345249 - protein, 13 aa, Homo sapiens
  CDR3 for alpha chain variable domain of TCR clone 172625 (TRAV13-2, TRAJ13)
CAERPGGNQKVTF

SEQ ID NO: 345250 - protein, 15 aa, Homo sapiens
  CDR3 for beta chain variable domain of TCR clone 172625 (TRBV11-3, TRBJ2-7)
CASSPGPASSYEQYF

SEQ ID NO: 345251 - protein, 12 aa, Homo sapiens
  CDR3 for alpha chain variable domain of TCR clone 172626 (TRAV13-1, TRAJ21)
CAAKEGFNKFYF

SEQ ID NO: 345252 - protein, 15 aa, Homo sapiens
  CDR3 for beta chain variable domain of TCR clone 172626 (TRBV12-4, TRBJ1-2)
CASSPITGGGYGYTF

SEQ ID NO: 345253 - protein, 11 aa, Homo sapiens
  CDR3 for alpha chain variable domain of TCR clone 172627 (TRAV12-1, TRAJ20)
SLLIRDYKLSF

SEQ ID NO: 345254 - protein, 15 aa, Homo sapiens
  CDR3 for beta chain variable domain of TCR clone 172627 (TRBV5-1, TRBJ2-2)
CASSSQGGNTGELFF

SEQ ID NO: 345255 - protein, 17 aa, Homo sapiens
  CDR3 for alpha chain variable domain of TCR clone 172628 (TRAV8-6, TRAJ58)
CAVSSWVGDTSGSRLTF

SEQ ID NO: 345256 - protein, 15 aa, Homo sapiens
  CDR3 for beta chain variable domain of TCR clone 172628 (TRBV20-1, TRBJ2-7)
CSARDRVSGMDEQYF

SEQ ID NO: 345257 - protein, 18 aa, Homo sapiens
  CDR3 for alpha chain variable domain of TCR clone 172629 (TRAV29/DV5, TRAJ26)
CSLLLCSKHKPEGQNFVF

SEQ ID NO: 345258 - protein, 17 aa, Homo sapiens
  CDR3 for beta chain variable domain of TCR clone 172629 (TRBV20-1, TRBJ2-2)
CSASGSGQGGLTGELFF

SEQ ID NO: 345259 - protein, 17 aa, Homo sapiens
  CDR3 for alpha chain variable domain of TCR clone 172630 (TRAV27, TRAJ26)
CAGARAPLDNYGQNFVF

SEQ ID NO: 345260 - protein, 15 aa, Homo sapiens
  CDR3 for beta chain variable domain of TCR clone 172630 (TRBV11-2, TRBJ2-5)
CASGPRSGGLETQYF

SEQ ID NO: 345261 - protein, 16 aa, Homo sapiens
  CDR3 for alpha chain variable domain of TCR clone 172631 (TRAV30, TRAJ24)
CGTAIVDADSWGKFQF

SEQ ID NO: 345262 - protein, 14 aa, Homo sapiens
  CDR3 for beta chain variable domain of TCR clone 172631 (TRBV5-1, TRBJ1-2)
CASSLEPVNYGYTF

SEQ ID NO: 345263 - protein, 14 aa, Homo sapiens
  CDR3 for alpha chain variable domain of TCR clone 172632 (TRAV13-2, TRAJ45)
CAEMSGGGADGLTF

SEQ ID NO: 345264 - protein, 11 aa, Homo sapiens
  CDR3 for beta chain variable domain of TCR clone 172632 (TRBV7-3, TRBJ2-5)
CGSSLSETQYF

SEQ ID NO: 345265 - protein, 14 aa, Homo sapiens
  CDR3 for alpha chain variable domain of TCR clone 172633 (TRAV26-1, TRAJ34)
CIVRVAYNTDKLIF

SEQ ID NO: 345266 - protein, 13 aa, Homo sapiens
  CDR3 for beta chain variable domain of TCR clone 172633 (TRBV19, TRBJ1-2)
CASSQGQVYGYTF

SEQ ID NO: 345267 - protein, 17 aa, Homo sapiens
  CDR3 for alpha chain variable domain of TCR clone 172634 (TRAV36/DV7, TRAJ52)
CAVAQRAGGTSYGKLTF

SEQ ID NO: 345268 - protein, 16 aa, Homo sapiens
  CDR3 for beta chain variable domain of TCR clone 172634 (TRBV20-1, TRBJ2-1)
CSGRDLKQGMNNEQFF

SEQ ID NO: 345269 - protein, 18 aa, Homo sapiens
  CDR3 for alpha chain variable domain of TCR clone 172635 (TRAV26-2, TRAJ45)
CILRVDKYSGGGADGLTF

SEQ ID NO: 345270 - protein, 14 aa, Homo sapiens
  CDR3 for beta chain variable domain of TCR clone 172635 (TRBV7-2, TRBJ2-7)
CASGSQGAAYEQYF

SEQ ID NO: 345271 - protein, 15 aa, Homo sapiens
  CDR3 for alpha chain variable domain of TCR clone 172636 (TRAV3, TRAJ22)
CAARDRGGSARQLTF

SEQ ID NO: 345272 - protein, 16 aa, Homo sapiens
  CDR3 for beta chain variable domain of TCR clone 172636 (TRBV12-5, TRBJ2-5)
CASGPRTSGNQETQYF

SEQ ID NO: 345273 - protein, 12 aa, Homo sapiens
  CDR3 for alpha chain variable domain of TCR clone 172637 (TRAV12-3, TRAJ34)
CAMGYNTDKLIF

SEQ ID NO: 345274 - protein, 15 aa, Homo sapiens
  CDR3 for beta chain variable domain of TCR clone 172637 (TRBV28, TRBJ2-1)
CASSIIAGGKSEQFF

SEQ ID NO: 345275 - protein, 14 aa, Homo sapiens
  CDR3 for alpha chain variable domain of TCR clone 172638 (TRAV12-3, TRAJ43)
CAMSLGGAGTRLTV

SEQ ID NO: 345276 - protein, 16 aa, Homo sapiens
  CDR3 for beta chain variable domain of TCR clone 172638 (TRBV24-1, TRBJ2-1)
CATSGVTGANYNEQSF

SEQ ID NO: 345277 - protein, 12 aa, Homo sapiens
  CDR3 for alpha chain variable domain of TCR clone 172639 (TRAV12-3, TRAJ17)
CAMTLTGNKLTL

SEQ ID NO: 345278 - protein, 17 aa, Homo sapiens
  CDR3 for beta chain variable domain of TCR clone 172639 (TRBV7-8, TRBJ2-6)
CASSAGTGGAGANVLTF

SEQ ID NO: 345279 - protein, 14 aa, Homo sapiens
  CDR3 for alpha chain variable domain of TCR clone 172640 (TRAV38-1, TRAJ45)
CAYYSGGGADGLTF

SEQ ID NO: 345280 - protein, 15 aa, Homo sapiens
  CDR3 for beta chain variable domain of TCR clone 172640 (TRBV2, TRBJ2-1)
CATQARLVMIGEQFF

SEQ ID NO: 345281 - protein, 12 aa, Homo sapiens
  CDR3 for alpha chain variable domain of TCR clone 172641 (TRAV12-1, TRAJ40)
CVFYSGTYKYIF

SEQ ID NO: 345282 - protein, 14 aa, Homo sapiens
  CDR3 for beta chain variable domain of TCR clone 172641 (TRBV7-9, TRBJ2-1)
CASSPRDSLYEQFF

SEQ ID NO: 345283 - protein, 22 aa, Homo sapiens
  CDR3 for alpha chain variable domain of TCR clone 172642 (TRAV13-1, TRAJ35)
CAASKGGFGNVLHCGSGPQLIF

SEQ ID NO: 345284 - protein, 13 aa, Homo sapiens
  CDR3 for beta chain variable domain of TCR clone 172642 (TRBV7-3, TRBJ1-1)
CASSQDWGAEAFF

SEQ ID NO: 345285 - protein, 15 aa, Homo sapiens
  CDR3 for alpha chain variable domain of TCR clone 172643 (TRAV3, TRAJ4)
CAVRDGTGGYNKLIL

SEQ ID NO: 345286 - protein, 15 aa, Homo sapiens
  CDR3 for beta chain variable domain of TCR clone 172643 (TRBV27, TRBJ2-7)
CASSPDQGRLYEQYF

SEQ ID NO: 345287 - protein, 12 aa, Homo sapiens
  CDR3 for alpha chain variable domain of TCR clone 172644 (TRAV13-1, TRAJ21)
CAAKEGFNKFYF

SEQ ID NO: 345288 - protein, 12 aa, Homo sapiens
  CDR3 for beta chain variable domain of TCR clone 172644 (TRBV7-2, TRBJ2-1)
CASSPQDIEQFF

SEQ ID NO: 345289 - protein, 12 aa, Homo sapiens
  CDR3 for alpha chain variable domain of TCR clone 172645 (TRAV1-1, TRAJ23)
CAVTNHGGKLIF

SEQ ID NO: 345290 - protein, 15 aa, Homo sapiens
  CDR3 for beta chain variable domain of TCR clone 172645 (TRBV6-6, TRBJ2-7)
CASSYSYGGSYEQYF

SEQ ID NO: 345291 - protein, 14 aa, Homo sapiens
  CDR3 for alpha chain variable domain of TCR clone 172646 (TRAV12-2, TRAJ6)
CAVIASGGGYIPTF

SEQ ID NO: 345292 - protein, 16 aa, Homo sapiens
  CDR3 for beta chain variable domain of TCR clone 172646 (TRBV7-2, TRBJ2-3)
CASSLAGAGSGDTQYF

SEQ ID NO: 345293 - protein, 13 aa, Homo sapiens
  CDR3 for alpha chain variable domain of TCR clone 172647 (TRAV3, TRAJ27)
CAVRPLGAGKSTF

SEQ ID NO: 345294 - protein, 15 aa, Homo sapiens
  CDR3 for beta chain variable domain of TCR clone 172647 (TRBV5-1, TRBJ2-2)
CASSSQGGNTGELFF

SEQ ID NO: 345295 - protein, 17 aa, Homo sapiens
  CDR3 for alpha chain variable domain of TCR clone 172648 (TRAV3, TRAJ6)
CAVRDGPRAGGSYIPTF

SEQ ID NO: 345296 - protein, 12 aa, Homo sapiens
  CDR3 for beta chain variable domain of TCR clone 172648 (TRBV24-1, TRBJ2-7)
CATGTGTYEQYF

SEQ ID NO: 345297 - protein, 12 aa, Homo sapiens
  CDR3 for alpha chain variable domain of TCR clone 172649 (TRAV36/DV7, TRAJ54)
CAVVRGAQKQVF

SEQ ID NO: 345298 - protein, 13 aa, Homo sapiens
  CDR3 for beta chain variable domain of TCR clone 172649 (TRBV7-9, TRBJ1-2)
CASSLKQNYGYTF

SEQ ID NO: 345299 - protein, 11 aa, Homo sapiens
  CDR3 for alpha chain variable domain of TCR clone 172650 (TRAV1-2, TRAJ20)
CAVANDYKLSF

SEQ ID NO: 345300 - protein, 14 aa, Homo sapiens
  CDR3 for beta chain variable domain of TCR clone 172650 (TRBV11-2, TRBJ2-5)
CASSRTGGIETQYF

SEQ ID NO: 345301 - protein, 14 aa, Homo sapiens
  CDR3 for alpha chain variable domain of TCR clone 172651 (TRAV2, TRAJ37)
CAVEDQGNTGKLIF

SEQ ID NO: 345302 - protein, 14 aa, Homo sapiens
  CDR3 for beta chain variable domain of TCR clone 172651 (TRBV12-5, TRBJ2-5)
CASGSRTHQETQYF

SEQ ID NO: 345303 - protein, 15 aa, Homo sapiens
  CDR3 for alpha chain variable domain of TCR clone 172652 (TRAV3, TRAJ5)
FAVRDLDTGRRAFTF

SEQ ID NO: 345304 - protein, 13 aa, Homo sapiens
  CDR3 for beta chain variable domain of TCR clone 172652 (TRBV12-4, TRBJ2-7)
CASSPTETYEQYF

SEQ ID NO: 345305 - protein, 12 aa, Homo sapiens
  CDR3 for alpha chain variable domain of TCR clone 172653 (TRAV1-1, TRAJ9)
CAVDTGGFKTIF

SEQ ID NO: 345306 - protein, 12 aa, Homo sapiens
  CDR3 for beta chain variable domain of TCR clone 172653 (TRBV25-1, TRBJ1-1)
CASSQTRTEAFF

SEQ ID NO: 345307 - protein, 14 aa, Homo sapiens
  CDR3 for alpha chain variable domain of TCR clone 172654 (TRAV35, TRAJ33)
CAGSSQDSNYQLIW

SEQ ID NO: 345308 - protein, 15 aa, Homo sapiens
  CDR3 for beta chain variable domain of TCR clone 172654 (TRBV5-1, TRBJ2-7)
CASSLNGGPAREQYF

SEQ ID NO: 345309 - protein, 16 aa, Homo sapiens
  CDR3 for alpha chain variable domain of TCR clone 172655 (TRAV17, TRAJ53)
CASDALSGGSNYKLTF

SEQ ID NO: 345310 - protein, 12 aa, Homo sapiens
  CDR3 for beta chain variable domain of TCR clone 172655 (TRBV5-1, TRBJ2-7)
CASSFRGYEQYF

SEQ ID NO: 345311 - protein, 12 aa, Homo sapiens
  CDR3 for alpha chain variable domain of TCR clone 172656 (TRAV26-1, TRAJ13)
CIVSRGYQKVTF

SEQ ID NO: 345312 - protein, 14 aa, Homo sapiens
  CDR3 for beta chain variable domain of TCR clone 172656 (TRBV7-2, TRBJ2-7)
CASSPKTSVYEQYF

SEQ ID NO: 345313 - protein, 14 aa, Homo sapiens
  CDR3 for alpha chain variable domain of TCR clone 172657 (TRAV8-6, TRAJ39)
CAVSDHSAGNMLAF

SEQ ID NO: 345314 - protein, 18 aa, Homo sapiens
  CDR3 for beta chain variable domain of TCR clone 172657 (TRBV11-2, TRBJ2-6)
CASSLNPFLGTGANVLTF

SEQ ID NO: 345315 - protein, 14 aa, Homo sapiens
  CDR3 for alpha chain variable domain of TCR clone 172658 (TRAV12-2, TRAJ40)
CAVKIHSGTYKYIF

SEQ ID NO: 345316 - protein, 14 aa, Homo sapiens
  CDR3 for beta chain variable domain of TCR clone 172658 (TRBV7-8, TRBJ2-7)
CASSPRDRVYEQYF

SEQ ID NO: 345317 - protein, 16 aa, Homo sapiens
  CDR3 for alpha chain variable domain of TCR clone 172659 (TRAV30, TRAJ24)
CGTEIVDADSWGKFQF

SEQ ID NO: 345318 - protein, 15 aa, Homo sapiens
  CDR3 for beta chain variable domain of TCR clone 172659 (TRBV20-1, TRBJ2-6)
CSARDRGPGANFLTF

SEQ ID NO: 345319 - protein, 13 aa, Homo sapiens
  CDR3 for alpha chain variable domain of TCR clone 172660 (TRAV13-1, TRAJ39)
CSKYSDAGNMLTF

SEQ ID NO: 345320 - protein, 13 aa, Homo sapiens
  CDR3 for beta chain variable domain of TCR clone 172660 (TRBV20-1, TRBJ1-1)
CSARGGGNTEAFL

SEQ ID NO: 345321 - protein, 10 aa, Homo sapiens
  CDR3 for alpha chain variable domain of TCR clone 172661 (TRAV12-2, TRAJ43)
CAVKVLSMRF

SEQ ID NO: 345322 - protein, 14 aa, Homo sapiens
  CDR3 for beta chain variable domain of TCR clone 172661 (TRBV11-2, TRBJ2-7)
CASSLVNSLYEQYF

SEQ ID NO: 345323 - protein, 16 aa, Homo sapiens
  CDR3 for alpha chain variable domain of TCR clone 172662 (TRAV16, TRAJ4)
CALSRMFSGGYNKLIF

SEQ ID NO: 345324 - protein, 16 aa, Homo sapiens
  CDR3 for beta chain variable domain of TCR clone 172662 (TRBV24-1, TRBJ2-3)
CGTSDPGTGATDTQYF

SEQ ID NO: 345325 - protein, 12 aa, Homo sapiens
  CDR3 for alpha chain variable domain of TCR clone 172663 (TRAV12-3, TRAJ17)
CAMTITGNKLTF

SEQ ID NO: 345326 - protein, 15 aa, Homo sapiens
  CDR3 for beta chain variable domain of TCR clone 172663 (TRBV20-1, TRBJ2-7)
SAVLDRVSGMDEQYF

SEQ ID NO: 345327 - protein, 18 aa, Homo sapiens
  CDR3 for alpha chain variable domain of TCR clone 172664 (TRAV13-1, TRAJ52)
CAAKNPNAGGTSYGKLTF

SEQ ID NO: 345328 - protein, 16 aa, Homo sapiens
  CDR3 for beta chain variable domain of TCR clone 172664 (TRBV5-1, TRBJ2-2)
CASSLWDTTNTGELFF

SEQ ID NO: 345329 - protein, 12 aa, Homo sapiens
  CDR3 for alpha chain variable domain of TCR clone 172665 (TRAV16, TRAJ56)
CAPTGANSKLTF

SEQ ID NO: 345330 - protein, 17 aa, Homo sapiens
  CDR3 for beta chain variable domain of TCR clone 172665 (TRBV27, TRBJ2-6)
CDSSLTGFASGANVLTF

SEQ ID NO: 345331 - protein, 14 aa, Homo sapiens
  CDR3 for alpha chain variable domain of TCR clone 172666 (TRAV13-2, TRAJ16)
CAENNWEDGQKLFF

SEQ ID NO: 345332 - protein, 14 aa, Homo sapiens
  CDR3 for beta chain variable domain of TCR clone 172666 (TRBV7-9, TRBJ1-1)
CASSLGGLKTEAFF

SEQ ID NO: 345333 - protein, 14 aa, Homo sapiens
  CDR3 for alpha chain variable domain of TCR clone 172667 (TRAV30, TRAJ33)
CGTVAPRSNYQLIW

SEQ ID NO: 345334 - protein, 16 aa, Homo sapiens
  CDR3 for beta chain variable domain of TCR clone 172667 (TRBV3-1, TRBJ2-5)
CASSPGQFNGFGTQYC

SEQ ID NO: 345335 - protein, 14 aa, Homo sapiens
  CDR3 for alpha chain variable domain of TCR clone 172668 (TRAV2, TRAJ37)
CAVDFTSNTGKLIF

SEQ ID NO: 345336 - protein, 13 aa, Homo sapiens
  CDR3 for beta chain variable domain of TCR clone 172668 (TRBV20-1, TRBJ1-1)
CSAPRGGGTEAFF

SEQ ID NO: 345337 - protein, 15 aa, Homo sapiens
  CDR3 for alpha chain variable domain of TCR clone 172669 (TRAV12-3, TRAJ49)
CAMAVTPNTGNQFYF

SEQ ID NO: 345338 - protein, 18 aa, Homo sapiens
  CDR3 for beta chain variable domain of TCR clone 172669 (TRBV4-1, TRBJ1-5)
CASSQDPRGQGLNEPQHF

SEQ ID NO: 345339 - protein, 13 aa, Homo sapiens
  CDR3 for alpha chain variable domain of TCR clone 172670 (TRAV3, TRAJ20)
CCEAFCNDYKLSF

SEQ ID NO: 345340 - protein, 12 aa, Homo sapiens
  CDR3 for beta chain variable domain of TCR clone 172670 (TRBV7-2, TRBJ1-6)
CASSLSSSPLHF

SEQ ID NO: 345341 - protein, 13 aa, Homo sapiens
  CDR3 for alpha chain variable domain of TCR clone 172671 (TRAV21, TRAJ27)
CAARPGNAGQSNF

SEQ ID NO: 345342 - protein, 14 aa, Homo sapiens
  CDR3 for beta chain variable domain of TCR clone 172671 (TRBV7-6, TRBJ2-3)
CASSLGTVTDTQYF

SEQ ID NO: 345343 - protein, 15 aa, Homo sapiens
  CDR3 for alpha chain variable domain of TCR clone 172672 (TRAV26-1, TRAJ29)
CIVRVEGSGNTPLVF

SEQ ID NO: 345344 - protein, 14 aa, Homo sapiens
  CDR3 for beta chain variable domain of TCR clone 172672 (TRBV19, TRBJ1-5)
CASSLVLIGQHQHF

SEQ ID NO: 345345 - protein, 14 aa, Homo sapiens
  CDR3 for alpha chain variable domain of TCR clone 172673 (TRAV12-2, TRAJ24)
CAVTPADSWGKLQF

SEQ ID NO: 345346 - protein, 14 aa, Homo sapiens
  CDR3 for beta chain variable domain of TCR clone 172673 (TRBV19, TRBJ2-1)
CASSPGLAPNEQFF

SEQ ID NO: 345347 - protein, 11 aa, Homo sapiens
  CDR3 for alpha chain variable domain of TCR clone 172674 (TRAV12-1, TRAJ3)
CVVSSASKIIF

SEQ ID NO: 345348 - protein, 16 aa, Homo sapiens
  CDR3 for beta chain variable domain of TCR clone 172674 (TRBV20-1, TRBJ2-5)
SAVLVGLGGGGETQYF

SEQ ID NO: 345349 - protein, 15 aa, Homo sapiens
  CDR3 for alpha chain variable domain of TCR clone 172675 (TRAV2, TRAJ9)
CAVEDRGTGVFKTIF

SEQ ID NO: 345350 - protein, 13 aa, Homo sapiens
  CDR3 for beta chain variable domain of TCR clone 172675 (TRBV20-1, TRBJ1-1)
CSARGGGNTEAFF

SEQ ID NO: 345351 - protein, 16 aa, Homo sapiens
  CDR3 for alpha chain variable domain of TCR clone 172676 (TRAV1-2, TRAJ10)
CSVRGVLAGGGNKLTF

SEQ ID NO: 345352 - protein, 12 aa, Homo sapiens
  CDR3 for beta chain variable domain of TCR clone 172676 (TRBV12-4, TRBJ2-7)
CASSLGGYEQYF

SEQ ID NO: 345353 - protein, 14 aa, Homo sapiens
  CDR3 for alpha chain variable domain of TCR clone 172677 (TRAV8-3, TRAJ26)
CAVAPGNYGQNFVF

SEQ ID NO: 345354 - protein, 16 aa, Homo sapiens
  CDR3 for beta chain variable domain of TCR clone 172677 (TRBV6-1, TRBJ1-2)
CASSGAWQGRSHGDTF

SEQ ID NO: 345355 - protein, 12 aa, Homo sapiens
  CDR3 for alpha chain variable domain of TCR clone 172678 (TRAV3, TRAJ43)
CAVRDPNNDMRF

SEQ ID NO: 345356 - protein, 13 aa, Homo sapiens
  CDR3 for beta chain variable domain of TCR clone 172678 (TRBV27, TRBJ2-3)
CASSWGRTDTQYF

SEQ ID NO: 345357 - protein, 14 aa, Homo sapiens
  CDR3 for alpha chain variable domain of TCR clone 172679 (TRAV1-2, TRAJ16)
CAVNRFSDGQKLLF

SEQ ID NO: 345358 - protein, 12 aa, Homo sapiens
  CDR3 for beta chain variable domain of TCR clone 172679 (TRBV11-2, TRBJ2-2)
CASSVGGGELFF

SEQ ID NO: 345359 - protein, 15 aa, Homo sapiens
  CDR3 for alpha chain variable domain of TCR clone 172680 (TRAV26-1, TRAJ29)
CIVRVEGSGNTPLVF

SEQ ID NO: 345360 - protein, 15 aa, Homo sapiens
  CDR3 for beta chain variable domain of TCR clone 172680 (TRBV7-9, TRBJ1-5)
CASGQGHQPNQTQHF

SEQ ID NO: 345361 - protein, 14 aa, Homo sapiens
  CDR3 for alpha chain variable domain of TCR clone 172681 (TRAV8-2, TRAJ37)
CVVSLTGNTGKLIF

SEQ ID NO: 345362 - protein, 17 aa, Homo sapiens
  CDR3 for beta chain variable domain of TCR clone 172681 (TRBV7-8, TRBJ2-6)
CASSAGTGGAGANVLTF

SEQ ID NO: 345363 - protein, 14 aa, Homo sapiens
  CDR3 for alpha chain variable domain of TCR clone 172682 (TRAV1-2, TRAJ33)
CAVRALDSNYQLIW

SEQ ID NO: 345364 - protein, 16 aa, Homo sapiens
  CDR3 for beta chain variable domain of TCR clone 172682 (TRBV6-5, TRBJ2-1)
CASSYSLSGGYSEQFF

SEQ ID NO: 345365 - protein, 18 aa, Homo sapiens
  CDR3 for alpha chain variable domain of TCR clone 172683 (TRAV13-1, TRAJ52)
CAAKNPNAGGTSYGKLTF

SEQ ID NO: 345366 - protein, 15 aa, Homo sapiens
  CDR3 for beta chain variable domain of TCR clone 172683 (TRBV19, TRBJ2-2)
CASSPRTGWTGELFF

SEQ ID NO: 345367 - protein, 13 aa, Homo sapiens
  CDR3 for alpha chain variable domain of TCR clone 172684 (TRAV12-2, TRAJ52)
CAAHGTSYGELTF

SEQ ID NO: 345368 - protein, 15 aa, Homo sapiens
  CDR3 for beta chain variable domain of TCR clone 172684 (TRBV10-3, TRBJ2-7)
CAISTFSGVKGEQYF

SEQ ID NO: 345369 - protein, 17 aa, Homo sapiens
  CDR3 for alpha chain variable domain of TCR clone 172685 (TRAV3, TRAJ6)
CAVRVGPRAGGSYIPTF

SEQ ID NO: 345370 - protein, 13 aa, Homo sapiens
  CDR3 for beta chain variable domain of TCR clone 172685 (TRBV7-2, TRBJ1-1)
CASNLKGAKVAFF

SEQ ID NO: 345371 - protein, 12 aa, Homo sapiens
  CDR3 for alpha chain variable domain of TCR clone 172686 (TRAV22, TRAJ22)
CAPGGSARQLTF

SEQ ID NO: 345372 - protein, 15 aa, Homo sapiens
  CDR3 for beta chain variable domain of TCR clone 172686 (TRBV19, TRBJ1-1)
CASMGFRDVNTEAFF

SEQ ID NO: 345373 - protein, 14 aa, Homo sapiens
  CDR3 for alpha chain variable domain of TCR clone 172687 (TRAV13-1, TRAJ21)
CAAKKASTNFTLDL

SEQ ID NO: 345374 - protein, 12 aa, Homo sapiens
  CDR3 for beta chain variable domain of TCR clone 172687 (TRBV11-2, TRBJ2-2)
CASSLGGGELFF

SEQ ID NO: 345375 - protein, 12 aa, Homo sapiens
  CDR3 for alpha chain variable domain of TCR clone 172688 (TRAV30, TRAJ43)
CGTEERGNDMRF

SEQ ID NO: 345376 - protein, 14 aa, Homo sapiens
  CDR3 for beta chain variable domain of TCR clone 172688 (TRBV11-2, TRBJ2-7)
CASSLGAGAYERYF

SEQ ID NO: 345377 - protein, 12 aa, Homo sapiens
  CDR3 for alpha chain variable domain of TCR clone 172689 (TRAV27, TRAJ42)
CAGGGSQGNLIF

SEQ ID NO: 345378 - protein, 16 aa, Homo sapiens
  CDR3 for beta chain variable domain of TCR clone 172689 (TRBV24-1, TRBJ2-3)
CATSDPGTGATDTQYF

SEQ ID NO: 345379 - protein, 20 aa, Homo sapiens
  CDR3 for alpha chain variable domain of TCR clone 172690 (TRAV21, TRAJ13)
CAVPRSFWGLPESYLWNLNK

SEQ ID NO: 345380 - protein, 13 aa, Homo sapiens
  CDR3 for beta chain variable domain of TCR clone 172690 (TRBV7-9, TRBJ1-2)
CASSLKQNYGYTF

SEQ ID NO: 345381 - protein, 10 aa, Homo sapiens
  CDR3 for alpha chain variable domain of TCR clone 172691 (TRAV23/DV6, TRAJ57)
CAASPTLSQG

SEQ ID NO: 345382 - protein, 13 aa, Homo sapiens
  CDR3 for beta chain variable domain of TCR clone 172691 (TRBV25-1, TRBJ1-1)
CQHHLGGNTKAFF

SEQ ID NO: 345383 - protein, 13 aa, Homo sapiens
  CDR3 for alpha chain variable domain of TCR clone 172692 (TRAV2, TRAJ40)
CAVVTSGTYKYIF

SEQ ID NO: 345384 - protein, 14 aa, Homo sapiens
  CDR3 for beta chain variable domain of TCR clone 172692 (TRBV6-1, TRBJ1-3)
CASVQGGGGNTMYF

SEQ ID NO: 345385 - protein, 13 aa, Homo sapiens
  CDR3 for alpha chain variable domain of TCR clone 172693 (TRAV21, TRAJ27)
CAARPGNAGKSTF

SEQ ID NO: 345386 - protein, 15 aa, Homo sapiens
  CDR3 for beta chain variable domain of TCR clone 172693 (TRBV6-3, TRBJ2-7)
CARSSPGTVFYEQYF

SEQ ID NO: 345387 - protein, 10 aa, Homo sapiens
  CDR3 for alpha chain variable domain of TCR clone 172694 (TRAV30, TRAJ48)
CGIGNEKLTF

SEQ ID NO: 345388 - protein, 16 aa, Homo sapiens
  CDR3 for beta chain variable domain of TCR clone 172694 (TRBV27, TRBJ2-1)
SMDVEPGTSGDNEQFF

SEQ ID NO: 345389 - protein, 11 aa, Homo sapiens
  CDR3 for alpha chain variable domain of TCR clone 172695 (TRAV2, TRAJ13)
CAAGGYQKVTF

SEQ ID NO: 345390 - protein, 13 aa, Homo sapiens
  CDR3 for beta chain variable domain of TCR clone 172695 (TRBV6-1, TRBJ2-5)
CASGYQSVETQYF

SEQ ID NO: 345391 - protein, 15 aa, Homo sapiens
  CDR3 for alpha chain variable domain of TCR clone 172696 (TRAV29/DV5, TRAJ57)
CAASLLRGGSEKLVF

SEQ ID NO: 345392 - protein, 15 aa, Homo sapiens
  CDR3 for beta chain variable domain of TCR clone 172696 (TRBV5-1, TRBJ1-3)
YASSLEGGSGNTIYF

SEQ ID NO: 345393 - protein, 15 aa, Homo sapiens
  CDR3 for alpha chain variable domain of TCR clone 172697 (TRAV8-2, TRAJ40)
CVVLGTTSGTYKYIF

SEQ ID NO: 345394 - protein, 14 aa, Homo sapiens
  CDR3 for beta chain variable domain of TCR clone 172697 (TRBV2, TRBJ2-3)
CASSEGQNTDTQYF

SEQ ID NO: 345395 - protein, 12 aa, Homo sapiens
  CDR3 for alpha chain variable domain of TCR clone 172698 (TRAV12-3, TRAJ17)
CAMTLTGNKLLL

SEQ ID NO: 345396 - protein, 15 aa, Homo sapiens
  CDR3 for beta chain variable domain of TCR clone 172698 (TRBV20-1, TRBJ2-7)
CSARDRVSGMDEQYF

SEQ ID NO: 345397 - protein, 13 aa, Homo sapiens
  CDR3 for alpha chain variable domain of TCR clone 172699 (TRAV13-2, TRAJ16)
CADARTDGQKLLF

SEQ ID NO: 345398 - protein, 16 aa, Homo sapiens
  CDR3 for beta chain variable domain of TCR clone 172699 (TRBV11-2, TRBJ2-1)
CASSPRLAGVYNEQFF

SEQ ID NO: 345399 - protein, 15 aa, Homo sapiens
  CDR3 for alpha chain variable domain of TCR clone 172700 (TRAV17, TRAJ54)
CAATRSEQGAQKLVF

SEQ ID NO: 345400 - protein, 16 aa, Homo sapiens
  CDR3 for beta chain variable domain of TCR clone 172700 (TRBV12-4, TRBJ2-3)
CASSLRLAETTDTQYF

SEQ ID NO: 345401 - protein, 14 aa, Homo sapiens
  CDR3 for alpha chain variable domain of TCR clone 172701 (TRAV26-1, TRAJ49)
CIVRLTNTGNQFYF

SEQ ID NO: 345402 - protein, 19 aa, Homo sapiens
  CDR3 for beta chain variable domain of TCR clone 172701 (TRBV25-1, TRBJ2-2)
CAILVYGVDRGRKTGEPFF

SEQ ID NO: 345403 - protein, 13 aa, Homo sapiens
  CDR3 for alpha chain variable domain of TCR clone 172702 (TRAV1-1, TRAJ9)
CAAKNTGGFKTIF

SEQ ID NO: 345404 - protein, 17 aa, Homo sapiens
  CDR3 for beta chain variable domain of TCR clone 172702 (TRBV13, TRBJ2-3)
CASSPSRVAGGRNTQYF

SEQ ID NO: 345405 - protein, 12 aa, Homo sapiens
  CDR3 for alpha chain variable domain of TCR clone 172703 (TRAV30, TRAJ15)
CGTNQAGTALIF

SEQ ID NO: 345406 - protein, 16 aa, Homo sapiens
  CDR3 for beta chain variable domain of TCR clone 172703 (TRBV27, TRBJ2-2)
CASSFRGLVRTGELFF

SEQ ID NO: 345407 - protein, 12 aa, Homo sapiens
  CDR3 for alpha chain variable domain of TCR clone 172704 (TRAV1-2, TRAJ7)
CAVAYGNNRLAF

SEQ ID NO: 345408 - protein, 14 aa, Homo sapiens
  CDR3 for beta chain variable domain of TCR clone 172704 (TRBV19, TRBJ2-3)
CASSIRQGADTQYF

SEQ ID NO: 345409 - protein, 15 aa, Homo sapiens
  CDR3 for alpha chain variable domain of TCR clone 172705 (TRAV26-1, TRAJ29)
CIVRVEGSGNTPLVL

SEQ ID NO: 345410 - protein, 13 aa, Homo sapiens
  CDR3 for beta chain variable domain of TCR clone 172705 (TRBV28, TRBJ1-1)
CASSKQGWTEAFF

SEQ ID NO: 345411 - protein, 13 aa, Homo sapiens
  CDR3 for alpha chain variable domain of TCR clone 172706 (TRAV12-2, TRAJ34)
CALSKGDTDKLIF

SEQ ID NO: 345412 - protein, 15 aa, Homo sapiens
  CDR3 for beta chain variable domain of TCR clone 172706 (TRBV27, TRBJ2-1)
CASSNGGGSSNEQFF

SEQ ID NO: 345413 - protein, 12 aa, Homo sapiens
  CDR3 for alpha chain variable domain of TCR clone 172707 (TRAV12-3, TRAJ17)
CAMTLTGNKLTF

SEQ ID NO: 345414 - protein, 14 aa, Homo sapiens
  CDR3 for beta chain variable domain of TCR clone 172707 (TRBV9, TRBJ2-1)
CASSVDLRGKEQFF

SEQ ID NO: 345415 - protein, 15 aa, Homo sapiens
  CDR3 for alpha chain variable domain of TCR clone 172708 (TRAV21, TRAJ53)
CATLNSGGRNYKLTF

SEQ ID NO: 345416 - protein, 13 aa, Homo sapiens
  CDR3 for beta chain variable domain of TCR clone 172708 (TRBV4-1, TRBJ2-2)
CASSQENTGELFF

SEQ ID NO: 345417 - protein, 12 aa, Homo sapiens
  CDR3 for alpha chain variable domain of TCR clone 172709 (TRAV3, TRAJ26)
CAVSDYGQYFVF

SEQ ID NO: 345418 - protein, 16 aa, Homo sapiens
  CDR3 for beta chain variable domain of TCR clone 172709 (TRBV11-2, TRBJ1-2)
CASSPSGREANYGYTF

SEQ ID NO: 345419 - protein, 14 aa, Homo sapiens
  CDR3 for alpha chain variable domain of TCR clone 172710 (TRAV12-2, TRAJ13)
CPVKKTGGYQKVTF

SEQ ID NO: 345420 - protein, 15 aa, Homo sapiens
  CDR3 for beta chain variable domain of TCR clone 172710 (TRBV27, TRBJ2-1)
CASSNGGGSSNEKFF

SEQ ID NO: 345421 - protein, 14 aa, Homo sapiens
  CDR3 for alpha chain variable domain of TCR clone 172711 (TRAV1-2, TRAJ16)
CAVNRLSAGQKLLF

SEQ ID NO: 345422 - protein, 16 aa, Homo sapiens
  CDR3 for beta chain variable domain of TCR clone 172711 (TRBV6-6, TRBJ1-5)
CASSYSTLVGNQPQHF

SEQ ID NO: 345423 - protein, 14 aa, Homo sapiens
  CDR3 for alpha chain variable domain of TCR clone 172712 (TRAV12-1, TRAJ17)
CMVNYKAAGNKLTF

SEQ ID NO: 345424 - protein, 14 aa, Homo sapiens
  CDR3 for beta chain variable domain of TCR clone 172712 (TRBV28, TRBJ2-1)
CASSPSTGYNEQFF

SEQ ID NO: 345425 - protein, 13 aa, Homo sapiens
  CDR3 for alpha chain variable domain of TCR clone 172713 (TRAV13-2, TRAJ40)
CAEFTSGTYKYIF

SEQ ID NO: 345426 - protein, 14 aa, Homo sapiens
  CDR3 for beta chain variable domain of TCR clone 172713 (TRBV11-2, TRBJ2-7)
CASSLGAGAYEQYF

SEQ ID NO: 345427 - protein, 12 aa, Homo sapiens
  CDR3 for alpha chain variable domain of TCR clone 172714 (TRAV20, TRAJ54)
CAVQEGAQKLVF

SEQ ID NO: 345428 - protein, 17 aa, Homo sapiens
  CDR3 for beta chain variable domain of TCR clone 172714 (TRBV13, TRBJ2-3)
CASSLSRVAGGRNTQDF

SEQ ID NO: 345429 - protein, 13 aa, Homo sapiens
  CDR3 for alpha chain variable domain of TCR clone 172715 (TRAV13-1, TRAJ24)
CSASDGSWGKLQF

SEQ ID NO: 345430 - protein, 13 aa, Homo sapiens
  CDR3 for beta chain variable domain of TCR clone 172715 (TRBV4-3, TRBJ2-5)
CASSQGGGETQYF

SEQ ID NO: 345431 - protein, 15 aa, Homo sapiens
  CDR3 for alpha chain variable domain of TCR clone 172716 (TRAV14/DV4, TRAJ12)
CAMREGRDGSYKLIL

SEQ ID NO: 345432 - protein, 16 aa, Homo sapiens
  CDR3 for beta chain variable domain of TCR clone 172716 (TRBV4-2, TRBJ1-5)
CASSQGQGASNQPQHF

SEQ ID NO: 345433 - protein, 14 aa, Homo sapiens
  CDR3 for alpha chain variable domain of TCR clone 172717 (TRAV12-2, TRAJ45)
CDVNIGGGADGLTF

SEQ ID NO: 345434 - protein, 13 aa, Homo sapiens
  CDR3 for beta chain variable domain of TCR clone 172717 (TRBV19, TRBJ2-2)
CASGIWSTGELFF

SEQ ID NO: 345435 - protein, 15 aa, Homo sapiens
  CDR3 for alpha chain variable domain of TCR clone 172718 (TRAV38-1, TRAJ37)
CVFIFGSGNTGKLIF

SEQ ID NO: 345436 - protein, 14 aa, Homo sapiens
  CDR3 for beta chain variable domain of TCR clone 172718 (TRBV13, TRBJ2-5)
CASSLGPRGETQYF

SEQ ID NO: 345437 - protein, 14 aa, Homo sapiens
  CDR3 for alpha chain variable domain of TCR clone 172719 (TRAV38-1, TRAJ54)
CAFMSPSVAQKLVF

SEQ ID NO: 345438 - protein, 16 aa, Homo sapiens
  CDR3 for beta chain variable domain of TCR clone 172719 (TRBV28, TRBJ2-1)
CASSLGGSGSYNEQFF

SEQ ID NO: 345439 - protein, 13 aa, Homo sapiens
  CDR3 for alpha chain variable domain of TCR clone 172720 (TRAV27, TRAJ39)
CAGVNNAGNMLTF

SEQ ID NO: 345440 - protein, 13 aa, Homo sapiens
  CDR3 for beta chain variable domain of TCR clone 172720 (TRBV7-2, TRBJ2-4)
CASSREHANIQYF

SEQ ID NO: 345441 - protein, 16 aa, Homo sapiens
  CDR3 for alpha chain variable domain of TCR clone 172721 (TRAV20, TRAJ10)
CAVLRGLTGGGNKLTF

SEQ ID NO: 345442 - protein, 12 aa, Homo sapiens
  CDR3 for beta chain variable domain of TCR clone 172721 (TRBV27, TRBJ2-7)
CASSGGFYEQYF

SEQ ID NO: 345443 - protein, 15 aa, Homo sapiens
  CDR3 for alpha chain variable domain of TCR clone 172722 (TRAV20, TRAJ4)
CAVQVFSGGYNTLIF

SEQ ID NO: 345444 - protein, 14 aa, Homo sapiens
  CDR3 for beta chain variable domain of TCR clone 172722 (TRBV7-6, TRBJ2-3)
CASNSGGDANTQYF

SEQ ID NO: 345445 - protein, 11 aa, Homo sapiens
  CDR3 for alpha chain variable domain of TCR clone 172723 (TRAV13-1, TRAJ30)
CAASRDDKIIF

SEQ ID NO: 345446 - protein, 16 aa, Homo sapiens
  CDR3 for beta chain variable domain of TCR clone 172723 (TRBV12-4, TRBJ2-5)
CDSSFFVRGRQETQYF

SEQ ID NO: 345447 - protein, 16 aa, Homo sapiens
  CDR3 for alpha chain variable domain of TCR clone 172724 (TRAV30, TRAJ24)
CGTGIVDADSWGKFQF

SEQ ID NO: 345448 - protein, 14 aa, Homo sapiens
  CDR3 for beta chain variable domain of TCR clone 172724 (TRBV12-5, TRBJ2-5)
CASGPRTHQETQYF

SEQ ID NO: 345449 - protein, 19 aa, Homo sapiens
  CDR3 for alpha chain variable domain of TCR clone 172725 (TRAV26-1, TRAJ52)
CIVRAHRNAGGTSYGKLTF

SEQ ID NO: 345450 - protein, 15 aa, Homo sapiens
  CDR3 for beta chain variable domain of TCR clone 172725 (TRBV29-1, TRBJ2-1)
CSGSDRKSSYNDQFF

SEQ ID NO: 345451 - protein, 14 aa, Homo sapiens
  CDR3 for alpha chain variable domain of TCR clone 172726 (TRAV23/DV6, TRAJ17)
CAASVQAAGNKLTL

SEQ ID NO: 345452 - protein, 18 aa, Homo sapiens
  CDR3 for beta chain variable domain of TCR clone 172726 (TRBV20-1, TRBJ2-7)
CSAGLPPRSGGSPYEQYF

SEQ ID NO: 345453 - protein, 14 aa, Homo sapiens
  CDR3 for alpha chain variable domain of TCR clone 172727 (TRAV12-2, TRAJ5)
CAVNRSTGRRALTF

SEQ ID NO: 345454 - protein, 12 aa, Homo sapiens
  CDR3 for beta chain variable domain of TCR clone 172727 (TRBV28, TRBJ2-6)
CAIQAGANDLTF

SEQ ID NO: 345455 - protein, 18 aa, Homo sapiens
  CDR3 for alpha chain variable domain of TCR clone 172728 (TRAV13-1, TRAJ52)
CAASKRSAGGTSYGKLQF

SEQ ID NO: 345456 - protein, 13 aa, Homo sapiens
  CDR3 for beta chain variable domain of TCR clone 172728 (TRBV12-4, TRBJ1-2)
CASSLRQGKGYTF

SEQ ID NO: 345457 - protein, 14 aa, Homo sapiens
  CDR3 for alpha chain variable domain of TCR clone 172729 (TRAV16, TRAJ37)
CALDISGNTGKLIF

SEQ ID NO: 345458 - protein, 14 aa, Homo sapiens
  CDR3 for beta chain variable domain of TCR clone 172729 (TRBV7-6, TRBJ2-7)
CASIFRQGADEQYF

SEQ ID NO: 345459 - protein, 12 aa, Homo sapiens
  CDR3 for alpha chain variable domain of TCR clone 172730 (TRAV1-2, TRAJ33)
CAALDSNYQLIW

SEQ ID NO: 345460 - protein, 14 aa, Homo sapiens
  CDR3 for beta chain variable domain of TCR clone 172730 (TRBV7-2, TRBJ2-7)
CASSLPPGQGPQYF

SEQ ID NO: 345461 - protein, 14 aa, Homo sapiens
  CDR3 for alpha chain variable domain of TCR clone 172731 (TRAV35, TRAJ22)
CAGLRPGSARQLTC

SEQ ID NO: 345462 - protein, 13 aa, Homo sapiens
  CDR3 for beta chain variable domain of TCR clone 172731 (TRBV20-1, TRBJ2-7)
CSATHTSGYEQYF

SEQ ID NO: 345463 - protein, 15 aa, Homo sapiens
  CDR3 for alpha chain variable domain of TCR clone 172732 (TRAV29/DV5, TRAJ53)
CAASASGGSNYKLTF

SEQ ID NO: 345464 - protein, 17 aa, Homo sapiens
  CDR3 for beta chain variable domain of TCR clone 172732 (TRBV7-8, TRBJ2-6)
CASSGGTGGAGANVLTF

SEQ ID NO: 345465 - protein, 15 aa, Homo sapiens
  CDR3 for alpha chain variable domain of TCR clone 172733 (TRAV16, TRAJ23)
CALSGPYNQGGKLIF

SEQ ID NO: 345466 - protein, 16 aa, Homo sapiens
  CDR3 for beta chain variable domain of TCR clone 172733 (TRBV12-4, TRBJ1-5)
CASSRPVGGSNQPQHF

SEQ ID NO: 345467 - protein, 12 aa, Homo sapiens
  CDR3 for alpha chain variable domain of TCR clone 172734 (TRAV12-2, TRAJ53)
TGGGGSNYKLTF

SEQ ID NO: 345468 - protein, 12 aa, Homo sapiens
  CDR3 for beta chain variable domain of TCR clone 172734 (TRBV7-6, TRBJ2-5)
CASSLSQETQYF

SEQ ID NO: 345469 - protein, 12 aa, Homo sapiens
  CDR3 for alpha chain variable domain of TCR clone 172735 (TRAV13-1, TRAJ21)
CAAKEGFNKFYF

SEQ ID NO: 345470 - protein, 15 aa, Homo sapiens
  CDR3 for beta chain variable domain of TCR clone 172735 (TRBV7-2, TRBJ1-2)
CASSPRAGWNYGYTF

SEQ ID NO: 345471 - protein, 15 aa, Homo sapiens
  CDR3 for alpha chain variable domain of TCR clone 172736 (TRAV13-1, TRAJ32)
CAARIDGGATNKLIF

SEQ ID NO: 345472 - protein, 14 aa, Homo sapiens
  CDR3 for beta chain variable domain of TCR clone 172736 (TRBV7-9, TRBJ2-1)
CASSLASGSNEQFF

SEQ ID NO: 345473 - protein, 14 aa, Homo sapiens
  CDR3 for alpha chain variable domain of TCR clone 172737 (TRAV1-2, TRAJ16)
CAVNRFSDGQKLLF

SEQ ID NO: 345474 - protein, 15 aa, Homo sapiens
  CDR3 for beta chain variable domain of TCR clone 172737 (TRBV12-4, TRBJ2-5)
CASSLGGQGRETQYF

SEQ ID NO: 345475 - protein, 13 aa, Homo sapiens
  CDR3 for alpha chain variable domain of TCR clone 172738 (TRAV4, TRAJ34)
CLVGDYNTDKLIF

SEQ ID NO: 345476 - protein, 23 aa, Homo sapiens
  CDR3 for beta chain variable domain of TCR clone 172738 (TRBV4-2, TRBJ2-3)
CAGSQDPPRASSISGGRGDTQYF

SEQ ID NO: 345477 - protein, 13 aa, Homo sapiens
  CDR3 for alpha chain variable domain of TCR clone 172739 (TRAV12-1, TRAJ16)
CVVNGPDGQKLLF

SEQ ID NO: 345478 - protein, 13 aa, Homo sapiens
  CDR3 for beta chain variable domain of TCR clone 172739 (TRBV2, TRBJ1-1)
CARIPTGGFHAFF

SEQ ID NO: 345479 - protein, 14 aa, Homo sapiens
  CDR3 for alpha chain variable domain of TCR clone 172740 (TRAV1-2, TRAJ16)
CAVNRISDGQKLLF

SEQ ID NO: 345480 - protein, 13 aa, Homo sapiens
  CDR3 for beta chain variable domain of TCR clone 172740 (TRBV4-1, TRBJ2-1)
CASSQAGGDEQFF

SEQ ID NO: 345481 - protein, 14 aa, Homo sapiens
  CDR3 for alpha chain variable domain of TCR clone 172741 (TRAV2, TRAJ41)
CAVGTSNSGYALNI

SEQ ID NO: 345482 - protein, 13 aa, Homo sapiens
  CDR3 for beta chain variable domain of TCR clone 172741 (TRBV4-1, TRBJ2-1)
CASSQEVQYEQFF

SEQ ID NO: 345483 - protein, 13 aa, Homo sapiens
  CDR3 for alpha chain variable domain of TCR clone 172742 (TRAV35, TRAJ20)
CAVPLSNDYKLSF

SEQ ID NO: 345484 - protein, 14 aa, Homo sapiens
  CDR3 for beta chain variable domain of TCR clone 172742 (TRBV9, TRBJ2-7)
CASSVGVGSYEQYF

SEQ ID NO: 345485 - protein, 12 aa, Homo sapiens
  CDR3 for alpha chain variable domain of TCR clone 172743 (TRAV3, TRAJ34)
CAVLGNTDKLIF

SEQ ID NO: 345486 - protein, 17 aa, Homo sapiens
  CDR3 for beta chain variable domain of TCR clone 172743 (TRBV10-2, TRBJ1-6)
CASSENRGSSYNSPLHF

SEQ ID NO: 345487 - protein, 18 aa, Homo sapiens
  CDR3 for alpha chain variable domain of TCR clone 172744 (TRAV17, TRAJ45)
CATSLDLYSGGGADGLTF

SEQ ID NO: 345488 - protein, 13 aa, Homo sapiens
  CDR3 for beta chain variable domain of TCR clone 172744 (TRBV10-3, TRBJ2-7)
CASKLAVNHEQYF

SEQ ID NO: 345489 - protein, 16 aa, Homo sapiens
  CDR3 for alpha chain variable domain of TCR clone 172745 (TRAV8-3, TRAJ13)
CAVGAYPSGGYPTVTF

SEQ ID NO: 345490 - protein, 15 aa, Homo sapiens
  CDR3 for beta chain variable domain of TCR clone 172745 (TRBV19, TRBJ1-5)
CASSIVWADNQPQHF

SEQ ID NO: 345491 - protein, 15 aa, Homo sapiens
  CDR3 for alpha chain variable domain of TCR clone 172746 (TRAV13-1, TRAJ17)
CAASIERAAGDKLTF

SEQ ID NO: 345492 - protein, 14 aa, Homo sapiens
  CDR3 for beta chain variable domain of TCR clone 172746 (TRBV7-9, TRBJ2-1)
CASSPRDSLYEQFF

SEQ ID NO: 345493 - protein, 12 aa, Homo sapiens
  CDR3 for alpha chain variable domain of TCR clone 172747 (TRAV8-3, TRAJ26)
CAGDNYGQNFVF

SEQ ID NO: 345494 - protein, 15 aa, Homo sapiens
  CDR3 for beta chain variable domain of TCR clone 172747 (TRBV11-2, TRBJ2-1)
CASSLRTSGLNEQFF

SEQ ID NO: 345495 - protein, 13 aa, Homo sapiens
  CDR3 for alpha chain variable domain of TCR clone 172748 (TRAV13-1, TRAJ5)
CAASDTGRRALTF

SEQ ID NO: 345496 - protein, 14 aa, Homo sapiens
  CDR3 for beta chain variable domain of TCR clone 172748 (TRBV4-3, TRBJ1-4)
CASSPLQRNEKLFF

SEQ ID NO: 345497 - protein, 13 aa, Homo sapiens
  CDR3 for alpha chain variable domain of TCR clone 172749 (TRAV3, TRAJ36)
CAVKRTGANNLFF

SEQ ID NO: 345498 - protein, 15 aa, Homo sapiens
  CDR3 for beta chain variable domain of TCR clone 172749 (TRBV6-3, TRBJ2-7)
CASSSPGAVFYEQYF

SEQ ID NO: 345499 - protein, 12 aa, Homo sapiens
  CDR3 for alpha chain variable domain of TCR clone 172750 (TRAV8-3, TRAJ20)
CAVGANDYKLSF

SEQ ID NO: 345500 - protein, 15 aa, Homo sapiens
  CDR3 for beta chain variable domain of TCR clone 172750 (TRBV19, TRBJ2-2)
PADLPGQGPPGSCFF

SEQ ID NO: 345501 - protein, 13 aa, Homo sapiens
  CDR3 for alpha chain variable domain of TCR clone 172751 (TRAV12-1, TRAJ40)
CVVPTSGTYKYIF

SEQ ID NO: 345502 - protein, 14 aa, Homo sapiens
  CDR3 for beta chain variable domain of TCR clone 172751 (TRBV6-1, TRBJ1-3)
CASVQGGGWKHHIF

SEQ ID NO: 345503 - protein, 15 aa, Homo sapiens
  CDR3 for alpha chain variable domain of TCR clone 172752 (TRAV23/DV6, TRAJ28)
CAALLAYPGAGSYQL

SEQ ID NO: 345504 - protein, 12 aa, Homo sapiens
  CDR3 for beta chain variable domain of TCR clone 172752 (TRBV4-1, TRBJ2-3)
CASSQGTDTQYF

SEQ ID NO: 345505 - protein, 14 aa, Homo sapiens
  CDR3 for alpha chain variable domain of TCR clone 172753 (TRAV12-2, TRAJ13)
CAVKKTGGYQKVTF

SEQ ID NO: 345506 - protein, 17 aa, Homo sapiens
  CDR3 for beta chain variable domain of TCR clone 172753 (TRBV11-3, TRBJ2-3)
CASSLGLTGGGTDTQYF

SEQ ID NO: 345507 - protein, 13 aa, Homo sapiens
  CDR3 for alpha chain variable domain of TCR clone 172754 (TRAV12-1, TRAJ16)
CVVNGPDGQKLLY

SEQ ID NO: 345508 - protein, 12 aa, Homo sapiens
  CDR3 for beta chain variable domain of TCR clone 172754 (TRBV24-1, TRBJ2-2)
CATSDPGLTGLQ

SEQ ID NO: 345509 - protein, 14 aa, Homo sapiens
  CDR3 for alpha chain variable domain of TCR clone 172755 (TRAV26-1, TRAJ38)
CIADNAGNNRKLIW

SEQ ID NO: 345510 - protein, 17 aa, Homo sapiens
  CDR3 for beta chain variable domain of TCR clone 172755 (TRBV7-9, TRBJ2-3)
CASSPTGAGDLTDTQYF

SEQ ID NO: 345511 - protein, 15 aa, Homo sapiens
  CDR3 for alpha chain variable domain of TCR clone 172756 (TRAV26-1, TRAJ56)
CIVRVATGANSKRTF

SEQ ID NO: 345512 - protein, 15 aa, Homo sapiens
  CDR3 for beta chain variable domain of TCR clone 172756 (TRBV27, TRBJ2-7)
CASSPQRAGQREQYF

SEQ ID NO: 345513 - protein, 15 aa, Homo sapiens
  CDR3 for alpha chain variable domain of TCR clone 172757 (TRAV3, TRAJ20)
FAVRDIKLSDYKLSF

SEQ ID NO: 345514 - protein, 16 aa, Homo sapiens
  CDR3 for beta chain variable domain of TCR clone 172757 (TRBV20-1, TRBJ1-4)
CSAPGQGLLTNEKLFF

SEQ ID NO: 345515 - protein, 13 aa, Homo sapiens
  CDR3 for alpha chain variable domain of TCR clone 172758 (TRAV21, TRAJ27)
CAARPGTAGKSTL

SEQ ID NO: 345516 - protein, 15 aa, Homo sapiens
  CDR3 for beta chain variable domain of TCR clone 172758 (TRBV11-3, TRBJ2-7)
CASSPGPASSYEQYF

SEQ ID NO: 345517 - protein, 15 aa, Homo sapiens
  CDR3 for alpha chain variable domain of TCR clone 172759 (TRAV4, TRAJ39)
CLVGPNNNAGNMLTF

SEQ ID NO: 345518 - protein, 15 aa, Homo sapiens
  CDR3 for beta chain variable domain of TCR clone 172759 (TRBV7-9, TRBJ1-5)
CASSQGHQPNQPEHF

SEQ ID NO: 345519 - protein, 12 aa, Homo sapiens
  CDR3 for alpha chain variable domain of TCR clone 172760 (TRAV27, TRAJ9)
CAGESGGFKPIF

SEQ ID NO: 345520 - protein, 14 aa, Homo sapiens
  CDR3 for beta chain variable domain of TCR clone 172760 (TRBV7-2, TRBJ2-7)
CASSPKTSFYEQYF

SEQ ID NO: 345521 - protein, 15 aa, Homo sapiens
  CDR3 for alpha chain variable domain of TCR clone 172761 (TRAV23/DV6, TRAJ18)
CAARYRGSTLGRLYF

SEQ ID NO: 345522 - protein, 14 aa, Homo sapiens
  CDR3 for beta chain variable domain of TCR clone 172761 (TRBV19, TRBJ2-1)
CASPTFVSSGEQFF

SEQ ID NO: 345523 - protein, 14 aa, Homo sapiens
  CDR3 for alpha chain variable domain of TCR clone 172762 (TRAV12-2, TRAJ9)
CAVNMEGGGFKTIF

SEQ ID NO: 345524 - protein, 15 aa, Homo sapiens
  CDR3 for beta chain variable domain of TCR clone 172762 (TRBV12-4, TRBJ2-1)
CASRHRDRVNNEQFF

SEQ ID NO: 345525 - protein, 16 aa, Homo sapiens
  CDR3 for alpha chain variable domain of TCR clone 172763 (TRAV30, TRAJ24)
CGTEIVDADSWGKFQF

SEQ ID NO: 345526 - protein, 17 aa, Homo sapiens
  CDR3 for beta chain variable domain of TCR clone 172763 (TRBV20-1, TRBJ2-2)
GSASGSGQGGLTGELFF

SEQ ID NO: 345527 - protein, 13 aa, Homo sapiens
  CDR3 for alpha chain variable domain of TCR clone 172764 (TRAV14/DV4, TRAJ4)
CAMKAGGYNKLIF

SEQ ID NO: 345528 - protein, 15 aa, Homo sapiens
  CDR3 for beta chain variable domain of TCR clone 172764 (TRBV11-3, TRBJ1-1)
CVSSLGGPGDSEAFF

SEQ ID NO: 345529 - protein, 15 aa, Homo sapiens
  CDR3 for alpha chain variable domain of TCR clone 172765 (TRAV9-2, TRAJ42)
CALSDPGGSQGNLIF

SEQ ID NO: 345530 - protein, 17 aa, Homo sapiens
  CDR3 for beta chain variable domain of TCR clone 172765 (TRBV2, TRBJ1-4)
CASSKRELTQGEEKLFF

SEQ ID NO: 345531 - protein, 14 aa, Homo sapiens
  CDR3 for alpha chain variable domain of TCR clone 172766 (TRAV12-2, TRAJ13)
CAVKKTGGYQKVTF

SEQ ID NO: 345532 - protein, 13 aa, Homo sapiens
  CDR3 for beta chain variable domain of TCR clone 172766 (TRBV12-5, TRBJ2-7)
CSWFSRSSYEQYF

SEQ ID NO: 345533 - protein, 14 aa, Homo sapiens
  CDR3 for alpha chain variable domain of TCR clone 172767 (TRAV2, TRAJ8)
CAGRGTTGFQKLVF

SEQ ID NO: 345534 - protein, 14 aa, Homo sapiens
  CDR3 for beta chain variable domain of TCR clone 172767 (TRBV20-1, TRBJ1-1)
CSAQTRIGGTEAFF

SEQ ID NO: 345535 - protein, 11 aa, Homo sapiens
  CDR3 for alpha chain variable domain of TCR clone 172768 (TRAV23/DV6, TRAJ48)
CAPRWGEKLTF

SEQ ID NO: 345536 - protein, 13 aa, Homo sapiens
  CDR3 for beta chain variable domain of TCR clone 172768 (TRBV12-4, TRBJ2-5)
CVSSPGTEETQYF

SEQ ID NO: 345537 - protein, 14 aa, Homo sapiens
  CDR3 for alpha chain variable domain of TCR clone 172769 (TRAV1-2, TRAJ16)
CAVDRFSDGQKLLF

SEQ ID NO: 345538 - protein, 13 aa, Homo sapiens
  CDR3 for beta chain variable domain of TCR clone 172769 (TRBV20-1, TRBJ1-1)
CSARGGGNTEAFF

SEQ ID NO: 345539 - protein, 18 aa, Homo sapiens
  CDR3 for alpha chain variable domain of TCR clone 172770 (TRAV21, TRAJ52)
CAVRPSPAGGTSYGKLPF

SEQ ID NO: 345540 - protein, 13 aa, Homo sapiens
  CDR3 for beta chain variable domain of TCR clone 172770 (TRBV10-3, TRBJ2-1)
CAISEFSGREQFF

SEQ ID NO: 345541 - protein, 14 aa, Homo sapiens
  CDR3 for alpha chain variable domain of TCR clone 172771 (TRAV1-2, TRAJ16)
CAVNRFSDGQKLFF

SEQ ID NO: 345542 - protein, 15 aa, Homo sapiens
  CDR3 for beta chain variable domain of TCR clone 172771 (TRBV9, TRBJ1-6)
FASSVAGTGDSPLHF

SEQ ID NO: 345543 - protein, 11 aa, Homo sapiens
  CDR3 for alpha chain variable domain of TCR clone 172772 (TRAV12-1, TRAJ33)
CVVNMNYQLIW

SEQ ID NO: 345544 - protein, 14 aa, Homo sapiens
  CDR3 for beta chain variable domain of TCR clone 172772 (TRBV18, TRBJ2-5)
CASSPGVSQETQYF

SEQ ID NO: 345545 - protein, 15 aa, Homo sapiens
  CDR3 for alpha chain variable domain of TCR clone 172773 (TRAV3, TRAJ22)
CAVRDRGGSARQLTF

SEQ ID NO: 345546 - protein, 16 aa, Homo sapiens
  CDR3 for beta chain variable domain of TCR clone 172773 (TRBV5-4, TRBJ2-3)
CASQQPGAGGAVTQYF

SEQ ID NO: 345547 - protein, 13 aa, Homo sapiens
  CDR3 for alpha chain variable domain of TCR clone 172774 (TRAV2, TRAJ40)
CAVVTSGTYKYTF

SEQ ID NO: 345548 - protein, 17 aa, Homo sapiens
  CDR3 for beta chain variable domain of TCR clone 172774 (TRBV7-3, TRBJ2-3)
CASSLMKRMRGADTQYF

SEQ ID NO: 345549 - protein, 14 aa, Homo sapiens
  CDR3 for alpha chain variable domain of TCR clone 172775 (TRAV2, TRAJ42)
CAVVGGGSQGNLIS

SEQ ID NO: 345550 - protein, 15 aa, Homo sapiens
  CDR3 for beta chain variable domain of TCR clone 172775 (TRBV11-3, TRBJ2-3)
CASSFRAAFPDTQYF

SEQ ID NO: 345551 - protein, 13 aa, Homo sapiens
  CDR3 for alpha chain variable domain of TCR clone 172776 (TRAV13-2, TRAJ32)
CRELWWCYKQLIF

SEQ ID NO: 345552 - protein, 15 aa, Homo sapiens
  CDR3 for beta chain variable domain of TCR clone 172776 (TRBV12-4, TRBJ2-5)
CASTLNSGRGETQYF

SEQ ID NO: 345553 - protein, 12 aa, Homo sapiens
  CDR3 for alpha chain variable domain of TCR clone 172777 (TRAV27, TRAJ9)
CAGESGGLKTIF

SEQ ID NO: 345554 - protein, 15 aa, Homo sapiens
  CDR3 for beta chain variable domain of TCR clone 172777 (TRBV27, TRBJ2-1)
CASSKGGGSSNEQFF

SEQ ID NO: 345555 - protein, 14 aa, Homo sapiens
  CDR3 for alpha chain variable domain of TCR clone 172778 (TRAV9-2, TRAJ39)
CALYIYNAGNMLTF

SEQ ID NO: 345556 - protein, 17 aa, Homo sapiens
  CDR3 for beta chain variable domain of TCR clone 172778 (TRBV19, TRBJ2-7)
CASSISFYDSYPYEQYF

SEQ ID NO: 345557 - protein, 13 aa, Homo sapiens
  CDR3 for alpha chain variable domain of TCR clone 172779 (TRAV1-2, TRAJ9)
CAALNTVGFKTIF

SEQ ID NO: 345558 - protein, 15 aa, Homo sapiens
  CDR3 for beta chain variable domain of TCR clone 172779 (TRBV9, TRBJ1-6)
CASSVAGTGDSPLHF

SEQ ID NO: 345559 - protein, 15 aa, Homo sapiens
  CDR3 for alpha chain variable domain of TCR clone 172780 (TRAV35, TRAJ40)
CAGQLGTSGTYKYIF

SEQ ID NO: 345560 - protein, 13 aa, Homo sapiens
  CDR3 for beta chain variable domain of TCR clone 172780 (TRBV7-3, TRBJ2-1)
CQQLSGGTNERFF

SEQ ID NO: 345561 - protein, 15 aa, Homo sapiens
  CDR3 for alpha chain variable domain of TCR clone 172781 (TRAV12-2, TRAJ9)
CAVNNERTGGFKTIF

SEQ ID NO: 345562 - protein, 21 aa, Homo sapiens
  CDR3 for beta chain variable domain of TCR clone 172781 (TRBV4-1, TRBJ1-4)
CASSQERKNEKTVFWQWNPAL

SEQ ID NO: 345563 - protein, 12 aa, Homo sapiens
  CDR3 for alpha chain variable domain of TCR clone 172782 (TRAV21, TRAJ49)
CAVTNTGNQFYF

SEQ ID NO: 345564 - protein, 14 aa, Homo sapiens
  CDR3 for beta chain variable domain of TCR clone 172782 (TRBV5-4, TRBJ1-1)
CASSLDSRRDEAFF

SEQ ID NO: 345565 - protein, 17 aa, Homo sapiens
  CDR3 for alpha chain variable domain of TCR clone 172783 (TRAV27, TRAJ42)
CAERVIYYGGSQGNLIF

SEQ ID NO: 345566 - protein, 14 aa, Homo sapiens
  CDR3 for beta chain variable domain of TCR clone 172783 (TRBV6-6, TRBJ2-3)
CAGRLQREADTQYF

SEQ ID NO: 345567 - protein, 14 aa, Homo sapiens
  CDR3 for alpha chain variable domain of TCR clone 172784 (TRAV12-3, TRAJ58)
CAMSTETSGSRLTF

SEQ ID NO: 345568 - protein, 13 aa, Homo sapiens
  CDR3 for beta chain variable domain of TCR clone 172784 (TRBV27, TRBJ2-3)
CAGSWDRTDTQYF

SEQ ID NO: 345569 - protein, 13 aa, Homo sapiens
  CDR3 for alpha chain variable domain of TCR clone 172785 (TRAV8-3, TRAJ40)
CAVGASGTYKYIF

SEQ ID NO: 345570 - protein, 12 aa, Homo sapiens
  CDR3 for beta chain variable domain of TCR clone 172785 (TRBV24-1, TRBJ2-3)
CATSDSTDTQYF

SEQ ID NO: 345571 - protein, 13 aa, Homo sapiens
  CDR3 for alpha chain variable domain of TCR clone 172786 (TRAV12-2, TRAJ18)
CAVRGSTLGRLYF

SEQ ID NO: 345572 - protein, 15 aa, Homo sapiens
  CDR3 for beta chain variable domain of TCR clone 172786 (TRBV20-1, TRBJ2-7)
CSARDPVKGEGEQYF

SEQ ID NO: 345573 - protein, 18 aa, Homo sapiens
  CDR3 for alpha chain variable domain of TCR clone 172787 (TRAV26-1, TRAJ23)
CIVRVGLEVWTQGGKLIF

SEQ ID NO: 345574 - protein, 15 aa, Homo sapiens
  CDR3 for beta chain variable domain of TCR clone 172787 (TRBV2, TRBJ2-1)
CASSELAGSYNEQFF

SEQ ID NO: 345575 - protein, 14 aa, Homo sapiens
  CDR3 for alpha chain variable domain of TCR clone 172788 (TRAV38-1, TRAJ45)
CASHSGGGADGLTF

SEQ ID NO: 345576 - protein, 15 aa, Homo sapiens
  CDR3 for beta chain variable domain of TCR clone 172788 (TRBV28, TRBJ1-3)
CASSMGWASGNTIYF

SEQ ID NO: 345577 - protein, 13 aa, Homo sapiens
  CDR3 for alpha chain variable domain of TCR clone 172789 (TRAV8-6, TRAJ34)
CAVSDQGTDRLIF

SEQ ID NO: 345578 - protein, 14 aa, Homo sapiens
  CDR3 for beta chain variable domain of TCR clone 172789 (TRBV12-4, TRBJ1-1)
CASTWTGHDTEAFF

SEQ ID NO: 345579 - protein, 12 aa, Homo sapiens
  CDR3 for alpha chain variable domain of TCR clone 172790 (TRAV29/DV5, TRAJ49)
CAATDTGNHFSF

SEQ ID NO: 345580 - protein, 19 aa, Homo sapiens
  CDR3 for beta chain variable domain of TCR clone 172790 (TRBV25-1, TRBJ2-2)
CAILVYRVDRGRKTGELFF

SEQ ID NO: 345581 - protein, 13 aa, Homo sapiens
  CDR3 for alpha chain variable domain of TCR clone 172791 (TRAV8-2, TRAJ4)
CCESFWCYNKLIF

SEQ ID NO: 345582 - protein, 17 aa, Homo sapiens
  CDR3 for beta chain variable domain of TCR clone 172791 (TRBV4-1, TRBJ1-4)
CASSDTGGTNENCFLAV

SEQ ID NO: 345583 - protein, 13 aa, Homo sapiens
  CDR3 for alpha chain variable domain of TCR clone 172792 (TRAV9-2, TRAJ49)
CALIQIGGNQFYF

SEQ ID NO: 345584 - protein, 15 aa, Homo sapiens
  CDR3 for beta chain variable domain of TCR clone 172792 (TRBV7-3, TRBJ2-2)
CASKANGANTGELFF

SEQ ID NO: 345585 - protein, 19 aa, Homo sapiens
  CDR3 for alpha chain variable domain of TCR clone 172793 (TRAV1-2, TRAJ26)
CLLPLCCERPDNYGQNFVF

SEQ ID NO: 345586 - protein, 11 aa, Homo sapiens
  CDR3 for beta chain variable domain of TCR clone 172793 (TRBV7-9, TRBJ2-3)
CASSPTDTQYF

SEQ ID NO: 345587 - protein, 12 aa, Homo sapiens
  CDR3 for alpha chain variable domain of TCR clone 172794 (TRAV8-3, TRAJ40)
CAVTSGTYKYIF

SEQ ID NO: 345588 - protein, 14 aa, Homo sapiens
  CDR3 for beta chain variable domain of TCR clone 172794 (TRBV12-4, TRBJ2-3)
CASSGEGSTDTQYF

SEQ ID NO: 345589 - protein, 17 aa, Homo sapiens
  CDR3 for alpha chain variable domain of TCR clone 172795 (TRAV3, TRAJ12)
CAVRDGGRMDSSYKLIF

SEQ ID NO: 345590 - protein, 12 aa, Homo sapiens
  CDR3 for beta chain variable domain of TCR clone 172795 (TRBV5-8, TRBJ2-5)
CASSLLRETQYF

SEQ ID NO: 345591 - protein, 13 aa, Homo sapiens
  CDR3 for alpha chain variable domain of TCR clone 172796 (TRAV12-2, TRAJ9)
CGVLETGGFKTIF

SEQ ID NO: 345592 - protein, 15 aa, Homo sapiens
  CDR3 for beta chain variable domain of TCR clone 172796 (TRBV6-3, TRBJ2-7)
CASSRTGVNLYEQYF

SEQ ID NO: 345593 - protein, 15 aa, Homo sapiens
  CDR3 for alpha chain variable domain of TCR clone 172797 (TRAV1-2, TRAJ30)
CAVRPHGNRDDKIIF

SEQ ID NO: 345594 - protein, 13 aa, Homo sapiens
  CDR3 for beta chain variable domain of TCR clone 172797 (TRBV4-1, TRBJ2-7)
CASSQGQAYEQYG

SEQ ID NO: 345595 - protein, 12 aa, Homo sapiens
  CDR3 for alpha chain variable domain of TCR clone 172798 (TRAV3, TRAJ20)
CAVRGPDYKLSF

SEQ ID NO: 345596 - protein, 14 aa, Homo sapiens
  CDR3 for beta chain variable domain of TCR clone 172798 (TRBV4-2, TRBJ2-1)
CASGLDRAYNEQFF

SEQ ID NO: 345597 - protein, 17 aa, Homo sapiens
  CDR3 for alpha chain variable domain of TCR clone 172799 (TRAV26-1, TRAJ37)
CIVRVITVSSNTGKLIF

SEQ ID NO: 345598 - protein, 14 aa, Homo sapiens
  CDR3 for beta chain variable domain of TCR clone 172799 (TRBV19, TRBJ2-1)
CASPTLVLSGEQFF

SEQ ID NO: 345599 - protein, 11 aa, Homo sapiens
  CDR3 for alpha chain variable domain of TCR clone 172800 (TRAV13-1, TRAJ6)
CATLGSYITKF

SEQ ID NO: 345600 - protein, 12 aa, Homo sapiens
  CDR3 for beta chain variable domain of TCR clone 172800 (TRBV11-2, TRBJ2-1)
CASSPGNNEQFF

SEQ ID NO: 345601 - protein, 18 aa, Homo sapiens
  CDR3 for alpha chain variable domain of TCR clone 172801 (TRAV13-1, TRAJ52)
CAASKRSAGGTSYGKLTF

SEQ ID NO: 345602 - protein, 12 aa, Homo sapiens
  CDR3 for beta chain variable domain of TCR clone 172801 (TRBV12-4, TRBJ2-1)
CASTYVLNEQFF

SEQ ID NO: 345603 - protein, 11 aa, Homo sapiens
  CDR3 for alpha chain variable domain of TCR clone 172802 (TRAV13-2, TRAJ26)
CAEIPGQNFVF

SEQ ID NO: 345604 - protein, 19 aa, Homo sapiens
  CDR3 for beta chain variable domain of TCR clone 172802 (TRBV19, TRBJ2-2)
CASTRPGLAGGRVTGELVF

SEQ ID NO: 345605 - protein, 15 aa, Homo sapiens
  CDR3 for alpha chain variable domain of TCR clone 172803 (TRAV20, TRAJ43)
CAVQAGKSSNNDMRF

SEQ ID NO: 345606 - protein, 14 aa, Homo sapiens
  CDR3 for beta chain variable domain of TCR clone 172803 (TRBV28, TRBJ2-5)
CASTGAGGVETQYF

SEQ ID NO: 345607 - protein, 23 aa, Homo sapiens
  CDR3 for alpha chain variable domain of TCR clone 172804 (TRAV26-1, )
CIADNAGNNHIQNPDPAVYQLRD

SEQ ID NO: 345608 - protein, 17 aa, Homo sapiens
  CDR3 for beta chain variable domain of TCR clone 172804 (TRBV11-2, TRBJ2-6)
CASSQRDIFSGANVLTF

SEQ ID NO: 345609 - protein, 15 aa, Homo sapiens
  CDR3 for alpha chain variable domain of TCR clone 172805 (TRAV21, TRAJ13)
CAVPRSFWGYQKVTF

SEQ ID NO: 345610 - protein, 13 aa, Homo sapiens
  CDR3 for beta chain variable domain of TCR clone 172805 (TRBV7-9, TRBJ1-2)
CASSLKQNYGYTF

SEQ ID NO: 345611 - protein, 14 aa, Homo sapiens
  CDR3 for alpha chain variable domain of TCR clone 172806 (TRAV13-1, TRAJ13)
CAAIPLVGYQKVTF

SEQ ID NO: 345612 - protein, 16 aa, Homo sapiens
  CDR3 for beta chain variable domain of TCR clone 172806 (TRBV7-3, TRBJ2-2)
CASSLKRGTLSGELFF

SEQ ID NO: 345613 - protein, 14 aa, Homo sapiens
  CDR3 for alpha chain variable domain of TCR clone 172807 (TRAV22, TRAJ6)
CAGAGPGGSYIPTF

SEQ ID NO: 345614 - protein, 11 aa, Homo sapiens
  CDR3 for beta chain variable domain of TCR clone 172807 (TRBV20-1, TRBJ2-1)
CSLSSGSEQFF

SEQ ID NO: 345615 - protein, 14 aa, Homo sapiens
  CDR3 for alpha chain variable domain of TCR clone 172808 (TRAV35, TRAJ13)
CAGSPSGGYQKVTF

SEQ ID NO: 345616 - protein, 15 aa, Homo sapiens
  CDR3 for beta chain variable domain of TCR clone 172808 (TRBV28, TRBJ2-3)
CASSPDRQGANTQYF

SEQ ID NO: 345617 - protein, 14 aa, Homo sapiens
  CDR3 for alpha chain variable domain of TCR clone 172809 (TRAV17, TRAJ39)
CATVVNNAGNMLTF

SEQ ID NO: 345618 - protein, 17 aa, Homo sapiens
  CDR3 for beta chain variable domain of TCR clone 172809 (TRBV28, TRBJ2-5)
CASSTPEGDALQETQYF

SEQ ID NO: 345619 - protein, 11 aa, Homo sapiens
  CDR3 for alpha chain variable domain of TCR clone 172810 (TRAV35, TRAJ30)
CAGERDDKIIF

SEQ ID NO: 345620 - protein, 15 aa, Homo sapiens
  CDR3 for beta chain variable domain of TCR clone 172810 (TRBV5-1, TRBJ2-5)
CASSLGTGEQETQYF

SEQ ID NO: 345621 - protein, 13 aa, Homo sapiens
  CDR3 for alpha chain variable domain of TCR clone 172811 (TRAV8-6, TRAJ49)
CAVITNTGNQFYL

SEQ ID NO: 345622 - protein, 12 aa, Homo sapiens
  CDR3 for beta chain variable domain of TCR clone 172811 (TRBV11-2, TRBJ2-2)
CASSLGAGELFF

SEQ ID NO: 345623 - protein, 14 aa, Homo sapiens
  CDR3 for alpha chain variable domain of TCR clone 172812 (TRAV26-1, TRAJ38)
CIADNAVNNRKLIW

SEQ ID NO: 345624 - protein, 13 aa, Homo sapiens
  CDR3 for beta chain variable domain of TCR clone 172812 (TRBV20-1, TRBJ1-1)
GSARGGGNTEAFF

SEQ ID NO: 345625 - protein, 12 aa, Homo sapiens
  CDR3 for alpha chain variable domain of TCR clone 172813 (TRAV21, TRAJ30)
CAVMNRDDKIIF

SEQ ID NO: 345626 - protein, 17 aa, Homo sapiens
  CDR3 for beta chain variable domain of TCR clone 172813 (TRBV5-1, TRBJ1-1)
CASRPIRTGGVNTDAFF

SEQ ID NO: 345627 - protein, 14 aa, Homo sapiens
  CDR3 for alpha chain variable domain of TCR clone 172814 (TRAV17, TRAJ11)
CATDTSRGYSTLTF

SEQ ID NO: 345628 - protein, 13 aa, Homo sapiens
  CDR3 for beta chain variable domain of TCR clone 172814 (TRBV19, TRBJ2-5)
CASRDSRRESQYF

SEQ ID NO: 345629 - protein, 11 aa, Homo sapiens
  CDR3 for alpha chain variable domain of TCR clone 172815 (TRAV1-1, TRAJ3)
CAVRSVSKIIF

SEQ ID NO: 345630 - protein, 14 aa, Homo sapiens
  CDR3 for beta chain variable domain of TCR clone 172815 (TRBV2, TRBJ1-6)
CALSPSDPRSPLHF

SEQ ID NO: 345631 - protein, 13 aa, Homo sapiens
  CDR3 for alpha chain variable domain of TCR clone 172816 (TRAV2, TRAJ40)
CAVFTSGTYKYIF

SEQ ID NO: 345632 - protein, 17 aa, Homo sapiens
  CDR3 for beta chain variable domain of TCR clone 172816 (TRBV11-2, TRBJ2-1)
CASSLYPPGVEYNEQFF

SEQ ID NO: 345633 - protein, 12 aa, Homo sapiens
  CDR3 for alpha chain variable domain of TCR clone 172817 (TRAV12-3, TRAJ17)
RAMTLTGNKLTF

SEQ ID NO: 345634 - protein, 15 aa, Homo sapiens
  CDR3 for beta chain variable domain of TCR clone 172817 (TRBV20-1, TRBJ2-7)
CSARDRVSGMDEQCF

SEQ ID NO: 345635 - protein, 17 aa, Homo sapiens
  CDR3 for alpha chain variable domain of TCR clone 172818 (TRAV3, TRAJ6)
CAVRDGPRAGGGDIPTF

SEQ ID NO: 345636 - protein, 14 aa, Homo sapiens
  CDR3 for beta chain variable domain of TCR clone 172818 (TRBV19, TRBJ2-1)
CASPTFVLSGEQFF

SEQ ID NO: 345637 - protein, 17 aa, Homo sapiens
  CDR3 for alpha chain variable domain of TCR clone 172819 (TRAV1-2, TRAJ8)
CAVRDPDENTGFQKLVF

SEQ ID NO: 345638 - protein, 13 aa, Homo sapiens
  CDR3 for beta chain variable domain of TCR clone 172819 (TRBV12-4, TRBJ2-7)
CASSPTETYEQYF

SEQ ID NO: 345639 - protein, 16 aa, Homo sapiens
  CDR3 for alpha chain variable domain of TCR clone 172820 (TRAV13-1, TRAJ48)
CAAIIFGNFGNEKLTF

SEQ ID NO: 345640 - protein, 11 aa, Homo sapiens
  CDR3 for beta chain variable domain of TCR clone 172820 (TRBV27, TRBJ2-3)
CASSLGDTQYF

SEQ ID NO: 345641 - protein, 15 aa, Homo sapiens
  CDR3 for alpha chain variable domain of TCR clone 172821 (TRAV19, TRAJ53)
CALSSSGGSNYKLTF

SEQ ID NO: 345642 - protein, 13 aa, Homo sapiens
  CDR3 for beta chain variable domain of TCR clone 172821 (TRBV7-6, TRBJ2-7)
CASSLDHAHEQYF

SEQ ID NO: 345643 - protein, 16 aa, Homo sapiens
  CDR3 for alpha chain variable domain of TCR clone 172822 (TRAV3, TRAJ28)
CAFLPRSGAGSYQLTF

SEQ ID NO: 345644 - protein, 13 aa, Homo sapiens
  CDR3 for beta chain variable domain of TCR clone 172822 (TRBV12-4, TRBJ2-5)
CASRLAVQETQYF

SEQ ID NO: 345645 - protein, 15 aa, Homo sapiens
  CDR3 for alpha chain variable domain of TCR clone 172823 (TRAV12-3, TRAJ6)
CAMRATKGGSYIPTF

SEQ ID NO: 345646 - protein, 16 aa, Homo sapiens
  CDR3 for beta chain variable domain of TCR clone 172823 (TRBV20-1, TRBJ1-2)
CSASMGQGVANYGYTF

SEQ ID NO: 345647 - protein, 13 aa, Homo sapiens
  CDR3 for alpha chain variable domain of TCR clone 172824 (TRAV3, TRAJ3)
CAVADSSASKIIF

SEQ ID NO: 345648 - protein, 14 aa, Homo sapiens
  CDR3 for beta chain variable domain of TCR clone 172824 (TRBV11-1, TRBJ2-7)
CASTFAVPSYEQYF

SEQ ID NO: 345649 - protein, 15 aa, Homo sapiens
  CDR3 for alpha chain variable domain of TCR clone 172825 (TRAV3, TRAJ11)
CAVRARGSGYSTLTF

SEQ ID NO: 345650 - protein, 13 aa, Homo sapiens
  CDR3 for beta chain variable domain of TCR clone 172825 (TRBV7-9, TRBJ1-2)
CASSLKQNYGYTF

SEQ ID NO: 345651 - protein, 16 aa, Homo sapiens
  CDR3 for alpha chain variable domain of TCR clone 172826 (TRAV3, TRAJ10)
CAVRDMRAGGGNKLTF

SEQ ID NO: 345652 - protein, 17 aa, Homo sapiens
  CDR3 for beta chain variable domain of TCR clone 172826 (TRBV7-2, TRBJ2-3)
CASSLAGGLAGTAGQYF

SEQ ID NO: 345653 - protein, 15 aa, Homo sapiens
  CDR3 for alpha chain variable domain of TCR clone 172827 (TRAV17, TRAJ23)
SATDAEDNQGGKLIF

SEQ ID NO: 345654 - protein, 12 aa, Homo sapiens
  CDR3 for beta chain variable domain of TCR clone 172827 (TRBV2, TRBJ2-1)
CAKREGYNEQFF

SEQ ID NO: 345655 - protein, 13 aa, Homo sapiens
  CDR3 for alpha chain variable domain of TCR clone 172828 (TRAV20, TRAJ49)
CAVQARTGNQFYF

SEQ ID NO: 345656 - protein, 13 aa, Homo sapiens
  CDR3 for beta chain variable domain of TCR clone 172828 (TRBV7-2, TRBJ1-4)
CASSLAGLEKLFF

SEQ ID NO: 345657 - protein, 13 aa, Homo sapiens
  CDR3 for alpha chain variable domain of TCR clone 172829 (TRAV13-1, TRAJ17)
CAASRAAGNKLTF

SEQ ID NO: 345658 - protein, 17 aa, Homo sapiens
  CDR3 for beta chain variable domain of TCR clone 172829 (TRBV20-1, TRBJ2-1)
CSAPPRLAGTRYNEQFF

SEQ ID NO: 345659 - protein, 17 aa, Homo sapiens
  CDR3 for alpha chain variable domain of TCR clone 172830 (TRAV3, TRAJ38)
CAVRGCLNAGNNRKLFW

SEQ ID NO: 345660 - protein, 16 aa, Homo sapiens
  CDR3 for beta chain variable domain of TCR clone 172830 (TRBV20-1, TRBJ1-4)
CSDPGQGLLTNEKLFF

SEQ ID NO: 345661 - protein, 14 aa, Homo sapiens
  CDR3 for alpha chain variable domain of TCR clone 172831 (TRAV6, TRAJ6)
CALPTHGGSYIPTF

SEQ ID NO: 345662 - protein, 17 aa, Homo sapiens
  CDR3 for beta chain variable domain of TCR clone 172831 (TRBV5-1, TRBJ2-5)
CASSPVALGQNQETQYF

SEQ ID NO: 345663 - protein, 15 aa, Homo sapiens
  CDR3 for alpha chain variable domain of TCR clone 172832 (TRAV12-2, TRAJ56)
CAVNPFTGANSELTF

SEQ ID NO: 345664 - protein, 13 aa, Homo sapiens
  CDR3 for beta chain variable domain of TCR clone 172832 (TRBV20-1, TRBJ1-2)
CSARDRVYGGYTF

SEQ ID NO: 345665 - protein, 15 aa, Homo sapiens
  CDR3 for alpha chain variable domain of TCR clone 172833 (TRAV26-1, TRAJ23)
CIVRVLNNQGGKRIF

SEQ ID NO: 345666 - protein, 15 aa, Homo sapiens
  CDR3 for beta chain variable domain of TCR clone 172833 (TRBV11-3, TRBJ2-1)
CASSLAGQTYNEQFF

SEQ ID NO: 345667 - protein, 12 aa, Homo sapiens
  CDR3 for alpha chain variable domain of TCR clone 172834 (TRAV13-1, TRAJ17)
CATTLTGNKLTF

SEQ ID NO: 345668 - protein, 15 aa, Homo sapiens
  CDR3 for beta chain variable domain of TCR clone 172834 (TRBV20-1, TRBJ2-7)
CSARDRVSGMDEQYF

SEQ ID NO: 345669 - protein, 14 aa, Homo sapiens
  CDR3 for alpha chain variable domain of TCR clone 172835 (TRAV1-2, TRAJ8)
CAVREDTGFQTLVF

SEQ ID NO: 345670 - protein, 13 aa, Homo sapiens
  CDR3 for beta chain variable domain of TCR clone 172835 (TRBV12-5, TRBJ2-3)
CASGDRQSDTQYF

SEQ ID NO: 345671 - protein, 14 aa, Homo sapiens
  CDR3 for alpha chain variable domain of TCR clone 172836 (TRAV17, TRAJ35)
CATDRPGFGIVLHC

SEQ ID NO: 345672 - protein, 15 aa, Homo sapiens
  CDR3 for beta chain variable domain of TCR clone 172836 (TRBV28, TRBJ2-5)
CASSSGRVIQETQYF

SEQ ID NO: 345673 - protein, 13 aa, Homo sapiens
  CDR3 for alpha chain variable domain of TCR clone 172837 (TRAV21, TRAJ27)
CAARPGNAGKSTF

SEQ ID NO: 345674 - protein, 14 aa, Homo sapiens
  CDR3 for beta chain variable domain of TCR clone 172837 (TRBV7-9, TRBJ2-5)
CASSLDTAQETKYF

SEQ ID NO: 345675 - protein, 12 aa, Homo sapiens
  CDR3 for alpha chain variable domain of TCR clone 172838 (TRAV1-2, TRAJ33)
CAALDSNYQLIW

SEQ ID NO: 345676 - protein, 11 aa, Homo sapiens
  CDR3 for beta chain variable domain of TCR clone 172838 (TRBV19, TRBJ2-7)
CASGNSYEQYF

SEQ ID NO: 345677 - protein, 12 aa, Homo sapiens
  CDR3 for alpha chain variable domain of TCR clone 172839 (TRAV30, TRAJ43)
CGTEERGNDMRF

SEQ ID NO: 345678 - protein, 14 aa, Homo sapiens
  CDR3 for beta chain variable domain of TCR clone 172839 (TRBV5-5, TRBJ1-5)
CASSGQGVDQPQHF

SEQ ID NO: 345679 - protein, 17 aa, Homo sapiens
  CDR3 for alpha chain variable domain of TCR clone 172840 (TRAV38-2/DV8, TRAJ57)
CAYRSALTQGGSEKLVF

SEQ ID NO: 345680 - protein, 16 aa, Homo sapiens
  CDR3 for beta chain variable domain of TCR clone 172840 (TRBV7-3, TRBJ2-2)
CASSLKRGTLSGELFF

SEQ ID NO: 345681 - protein, 14 aa, Homo sapiens
  CDR3 for alpha chain variable domain of TCR clone 172841 (TRAV3, TRAJ21)
CAVRYAYNFNKFYF

SEQ ID NO: 345682 - protein, 15 aa, Homo sapiens
  CDR3 for beta chain variable domain of TCR clone 172841 (TRBV6-5, TRBJ1-5)
CASSYSWDSNQPQHF

SEQ ID NO: 345683 - protein, 18 aa, Homo sapiens
  CDR3 for alpha chain variable domain of TCR clone 172842 (TRAV26-2, TRAJ45)
CILRVDKYSGGDADGLTF

SEQ ID NO: 345684 - protein, 11 aa, Homo sapiens
  CDR3 for beta chain variable domain of TCR clone 172842 (TRBV29-1, TRBJ2-5)
CSEDRTGTQYF

SEQ ID NO: 345685 - protein, 12 aa, Homo sapiens
  CDR3 for alpha chain variable domain of TCR clone 172843 (TRAV2, TRAJ32)
CAVGGATNKLIF

SEQ ID NO: 345686 - protein, 15 aa, Homo sapiens
  CDR3 for beta chain variable domain of TCR clone 172843 (TRBV28, TRBJ2-3)
CASGFGTRLADTQYF

SEQ ID NO: 345687 - protein, 13 aa, Homo sapiens
  CDR3 for alpha chain variable domain of TCR clone 172844 (TRAV17, TRAJ9)
CATDYTGGFKAIF

SEQ ID NO: 345688 - protein, 14 aa, Homo sapiens
  CDR3 for beta chain variable domain of TCR clone 172844 (TRBV19, TRBJ2-5)
CASSMTGQQEAQYF

SEQ ID NO: 345689 - protein, 13 aa, Homo sapiens
  CDR3 for alpha chain variable domain of TCR clone 172845 (TRAV3, TRAJ4)
CAVRDGGYNKLIF

SEQ ID NO: 345690 - protein, 15 aa, Homo sapiens
  CDR3 for beta chain variable domain of TCR clone 172845 (TRBV5-1, TRBJ2-1)
CASSPPGAPYNEQFF

SEQ ID NO: 345691 - protein, 14 aa, Homo sapiens
  CDR3 for alpha chain variable domain of TCR clone 172846 (TRAV26-1, TRAJ40)
CTVRVARGTYKYIF

SEQ ID NO: 345692 - protein, 14 aa, Homo sapiens
  CDR3 for beta chain variable domain of TCR clone 172846 (TRBV7-3, TRBJ2-7)
CASSLKADSYEQYF

SEQ ID NO: 345693 - protein, 14 aa, Homo sapiens
  CDR3 for alpha chain variable domain of TCR clone 172847 (TRAV8-3, TRAJ44)
CAVGNTGTASKLTF

SEQ ID NO: 345694 - protein, 15 aa, Homo sapiens
  CDR3 for beta chain variable domain of TCR clone 172847 (TRBV28, TRBJ2-7)
CASSFRGQGRYEQYF

SEQ ID NO: 345695 - protein, 18 aa, Homo sapiens
  CDR3 for alpha chain variable domain of TCR clone 172848 (TRAV12-3, TRAJ52)
CAMSVGGAGGTSYGKLTF

SEQ ID NO: 345696 - protein, 15 aa, Homo sapiens
  CDR3 for beta chain variable domain of TCR clone 172848 (TRBV27, TRBJ1-6)
CASNFDRGLGSPLHF

SEQ ID NO: 345697 - protein, 17 aa, Homo sapiens
  CDR3 for alpha chain variable domain of TCR clone 172849 (TRAV3, TRAJ6)
CSVRDGPRAGGSYIPTF

SEQ ID NO: 345698 - protein, 15 aa, Homo sapiens
  CDR3 for beta chain variable domain of TCR clone 172849 (TRBV27, TRBJ2-1)
CASSNGGGSSNEQFF

SEQ ID NO: 345699 - protein, 16 aa, Homo sapiens
  CDR3 for alpha chain variable domain of TCR clone 172850 (TRAV12-2, TRAJ40)
CAVISGGTSVTSKYIF

SEQ ID NO: 345700 - protein, 14 aa, Homo sapiens
  CDR3 for beta chain variable domain of TCR clone 172850 (TRBV20-1, TRBJ2-5)
CSARDGRAGETQYF

SEQ ID NO: 345701 - protein, 21 aa, Homo sapiens
  CDR3 for alpha chain variable domain of TCR clone 172851 (TRAV30, TRAJ43)
GLPAQLLGNLLPIIELNDMRF

SEQ ID NO: 345702 - protein, 14 aa, Homo sapiens
  CDR3 for beta chain variable domain of TCR clone 172851 (TRBV27, TRBJ2-1)
CASRHLGGGKEQFF

SEQ ID NO: 345703 - protein, 14 aa, Homo sapiens
  CDR3 for alpha chain variable domain of TCR clone 172852 (TRAV8-2, TRAJ4)
CVVIPSGGYNKLIF

SEQ ID NO: 345704 - protein, 14 aa, Homo sapiens
  CDR3 for beta chain variable domain of TCR clone 172852 (TRBV10-3, TRBJ2-2)
CAISEVSHSGELFF

SEQ ID NO: 345705 - protein, 13 aa, Homo sapiens
  CDR3 for alpha chain variable domain of TCR clone 172853 (TRAV13-2, TRAJ48)
SAEMDFGNEKLTF

SEQ ID NO: 345706 - protein, 15 aa, Homo sapiens
  CDR3 for beta chain variable domain of TCR clone 172853 (TRBV7-9, TRBJ1-6)
CASSSPGRGNSPLHF

SEQ ID NO: 345707 - protein, 13 aa, Homo sapiens
  CDR3 for alpha chain variable domain of TCR clone 172854 (TRAV1-2, TRAJ9)
CAALNTGGFNTIF

SEQ ID NO: 345708 - protein, 17 aa, Homo sapiens
  CDR3 for beta chain variable domain of TCR clone 172854 (TRBV5-5, TRBJ2-1)
CASSFRGGASSYNEQFF

SEQ ID NO: 345709 - protein, 13 aa, Homo sapiens
  CDR3 for alpha chain variable domain of TCR clone 172855 (TRAV21, TRAJ27)
CAARPGNAGKSTF

SEQ ID NO: 345710 - protein, 15 aa, Homo sapiens
  CDR3 for beta chain variable domain of TCR clone 172855 (TRBV20-1, TRBJ1-2)
CSAIRTGAFNYGYTF

SEQ ID NO: 345711 - protein, 13 aa, Homo sapiens
  CDR3 for alpha chain variable domain of TCR clone 172856 (TRAV3, TRAJ21)
CAVREPDLNKFYF

SEQ ID NO: 345712 - protein, 15 aa, Homo sapiens
  CDR3 for beta chain variable domain of TCR clone 172856 (TRBV20-1, TRBJ1-1)
CSASRGVTGNTEAFF

SEQ ID NO: 345713 - protein, 12 aa, Homo sapiens
  CDR3 for alpha chain variable domain of TCR clone 172857 (TRAV12-2, TRAJ16)
WAVNLDGQKLLF

SEQ ID NO: 345714 - protein, 12 aa, Homo sapiens
  CDR3 for beta chain variable domain of TCR clone 172857 (TRBV5-7, TRBJ2-7)
CASSVQGGEQYF

SEQ ID NO: 345715 - protein, 12 aa, Homo sapiens
  CDR3 for alpha chain variable domain of TCR clone 172858 (TRAV2, TRAJ33)
CAFMDSNYQLIW

SEQ ID NO: 345716 - protein, 16 aa, Homo sapiens
  CDR3 for beta chain variable domain of TCR clone 172858 (TRBV12-5, TRBJ2-5)
CASGPRTSGNQETQYF

SEQ ID NO: 345717 - protein, 14 aa, Homo sapiens
  CDR3 for alpha chain variable domain of TCR clone 172859 (TRAV1-2, TRAJ16)
CAVNRFSDGQKLLF

SEQ ID NO: 345718 - protein, 16 aa, Homo sapiens
  CDR3 for beta chain variable domain of TCR clone 172859 (TRBV12-4, TRBJ2-5)
CDSSFFVRGRQETQYF

SEQ ID NO: 345719 - protein, 13 aa, Homo sapiens
  CDR3 for alpha chain variable domain of TCR clone 172860 (TRAV12-2, TRAJ30)
CAVNLNRDDKIIF

SEQ ID NO: 345720 - protein, 20 aa, Homo sapiens
  CDR3 for beta chain variable domain of TCR clone 172860 (TRBV28, TRBJ2-1)
CASTPIGRSPGLAGGNEQFF

SEQ ID NO: 345721 - protein, 16 aa, Homo sapiens
  CDR3 for alpha chain variable domain of TCR clone 172861 (TRAV26-1, TRAJ37)
CIVRGDGSGNTGKLIF

SEQ ID NO: 345722 - protein, 17 aa, Homo sapiens
  CDR3 for beta chain variable domain of TCR clone 172861 (TRBV5-1, TRBJ2-3)
CASSLGASTSGTDTQYF

SEQ ID NO: 345723 - protein, 13 aa, Homo sapiens
  CDR3 for alpha chain variable domain of TCR clone 172862 (TRAV23/DV6, TRAJ9)
CAASIDRKGLVIL

SEQ ID NO: 345724 - protein, 15 aa, Homo sapiens
  CDR3 for beta chain variable domain of TCR clone 172862 (TRBV6-3, TRBJ2-1)
CASSYASDSYNEQFF

SEQ ID NO: 345725 - protein, 23 aa, Homo sapiens
  CDR3 for alpha chain variable domain of TCR clone 172863 (TRAV16, )
CALSGDIQNPDPAVYPLRDSTSS

SEQ ID NO: 345726 - protein, 16 aa, Homo sapiens
  CDR3 for beta chain variable domain of TCR clone 172863 (TRBV12-5, TRBJ2-5)
CASGPRTSGNQETQYF

SEQ ID NO: 345727 - protein, 15 aa, Homo sapiens
  CDR3 for alpha chain variable domain of TCR clone 172864 (TRAV38-1, TRAJ37)
CAFIHGSGNTGKLIF

SEQ ID NO: 345728 - protein, 12 aa, Homo sapiens
  CDR3 for beta chain variable domain of TCR clone 172864 (TRBV19, TRBJ2-1)
CASSRQGAEQFF

SEQ ID NO: 345729 - protein, 11 aa, Homo sapiens
  CDR3 for alpha chain variable domain of TCR clone 172865 (TRAV1-1, TRAJ23)
CAVRQGGKLIF

SEQ ID NO: 345730 - protein, 16 aa, Homo sapiens
  CDR3 for beta chain variable domain of TCR clone 172865 (TRBV7-8, TRBJ2-6)
CASRVGDSSGANVLTF

SEQ ID NO: 345731 - protein, 14 aa, Homo sapiens
  CDR3 for alpha chain variable domain of TCR clone 172866 (TRAV1-2, TRAJ16)
CAVNRFSDGQELLF

SEQ ID NO: 345732 - protein, 15 aa, Homo sapiens
  CDR3 for beta chain variable domain of TCR clone 172866 (TRBV20-1, TRBJ2-7)
CSARKGLAESYEQYF

SEQ ID NO: 345733 - protein, 16 aa, Homo sapiens
  CDR3 for alpha chain variable domain of TCR clone 172867 (TRAV3, TRAJ10)
CAVRDMRVGGGNKLTF

SEQ ID NO: 345734 - protein, 15 aa, Homo sapiens
  CDR3 for beta chain variable domain of TCR clone 172867 (TRBV11-2, TRBJ1-6)
CASTGFGTAVSPLHF

SEQ ID NO: 345735 - protein, 16 aa, Homo sapiens
  CDR3 for alpha chain variable domain of TCR clone 172868 (TRAV13-1, TRAJ48)
CAASIFGNFGNEKLTF

SEQ ID NO: 345736 - protein, 16 aa, Homo sapiens
  CDR3 for beta chain variable domain of TCR clone 172868 (TRBV15, TRBJ2-7)
CATSRDRGRRRGEQYF

SEQ ID NO: 345737 - protein, 11 aa, Homo sapiens
  CDR3 for alpha chain variable domain of TCR clone 172869 (TRAV2, TRAJ13)
CASGGYQKVTF

SEQ ID NO: 345738 - protein, 14 aa, Homo sapiens
  CDR3 for beta chain variable domain of TCR clone 172869 (TRBV20-1, TRBJ1-1)
SAVLHLGGGTEAFF

SEQ ID NO: 345739 - protein, 14 aa, Homo sapiens
  CDR3 for alpha chain variable domain of TCR clone 172870 (TRAV16, TRAJ32)
CALKSGGATNKLIF

SEQ ID NO: 345740 - protein, 13 aa, Homo sapiens
  CDR3 for beta chain variable domain of TCR clone 172870 (TRBV18, TRBJ1-1)
CASSGGRNTEAFF

SEQ ID NO: 345741 - protein, 13 aa, Homo sapiens
  CDR3 for alpha chain variable domain of TCR clone 172871 (TRAV13-1, TRAJ5)
CAASDTGRRGITF

SEQ ID NO: 345742 - protein, 12 aa, Homo sapiens
  CDR3 for beta chain variable domain of TCR clone 172871 (TRBV28, TRBJ2-3)
CASSLYRDTQYF

SEQ ID NO: 345743 - protein, 12 aa, Homo sapiens
  CDR3 for alpha chain variable domain of TCR clone 172872 (TRAV6, TRAJ10)
CALERGGNKLTF

SEQ ID NO: 345744 - protein, 15 aa, Homo sapiens
  CDR3 for beta chain variable domain of TCR clone 172872 (TRBV12-4, TRBJ1-5)
CASSLPGRSNQTQHF

SEQ ID NO: 345745 - protein, 14 aa, Homo sapiens
  CDR3 for alpha chain variable domain of TCR clone 172873 (TRAV4, TRAJ9)
CLVGSGTGGFKTIF

SEQ ID NO: 345746 - protein, 15 aa, Homo sapiens
  CDR3 for beta chain variable domain of TCR clone 172873 (TRBV10-3, TRBJ1-3)
CAISDSQGAGNTIYF

SEQ ID NO: 345747 - protein, 11 aa, Homo sapiens
  CDR3 for alpha chain variable domain of TCR clone 172874 (TRAV2, TRAJ13)
CASGGYQKGTF

SEQ ID NO: 345748 - protein, 14 aa, Homo sapiens
  CDR3 for beta chain variable domain of TCR clone 172874 (TRBV7-3, TRBJ2-1)
CASSLAGGTNEQFF

SEQ ID NO: 345749 - protein, 16 aa, Homo sapiens
  CDR3 for alpha chain variable domain of TCR clone 172875 (TRAV12-3, TRAJ53)
CAMSPGSGGSNYKLTF

SEQ ID NO: 345750 - protein, 17 aa, Homo sapiens
  CDR3 for beta chain variable domain of TCR clone 172875 (TRBV7-2, TRBJ2-3)
CASSLEARGTSTDTQYF

SEQ ID NO: 345751 - protein, 19 aa, Homo sapiens
  CDR3 for alpha chain variable domain of TCR clone 172876 (TRAV38-1, TRAJ53)
CAFMKHGLERGGSNYKLTF

SEQ ID NO: 345752 - protein, 13 aa, Homo sapiens
  CDR3 for beta chain variable domain of TCR clone 172876 (TRBV19, TRBJ2-7)
CVSSPRQSYEQYF

SEQ ID NO: 345753 - protein, 13 aa, Homo sapiens
  CDR3 for alpha chain variable domain of TCR clone 172877 (TRAV3, TRAJ20)
CCEAFCTDYKLSF

SEQ ID NO: 345754 - protein, 15 aa, Homo sapiens
  CDR3 for beta chain variable domain of TCR clone 172877 (TRBV19, TRBJ2-6)
CASVRRDSGANVLTF

SEQ ID NO: 345755 - protein, 14 aa, Homo sapiens
  CDR3 for alpha chain variable domain of TCR clone 172878 (TRAV1-2, TRAJ16)
CAVNRFSDGQKLLF

SEQ ID NO: 345756 - protein, 14 aa, Homo sapiens
  CDR3 for beta chain variable domain of TCR clone 172878 (TRBV27, TRBJ1-5)
CASSLDPRNQPQHF

SEQ ID NO: 345757 - protein, 14 aa, Homo sapiens
  CDR3 for alpha chain variable domain of TCR clone 172879 (TRAV1-2, TRAJ16)
CAVNRFSDGQKLHF

SEQ ID NO: 345758 - protein, 12 aa, Homo sapiens
  CDR3 for beta chain variable domain of TCR clone 172879 (TRBV11-2, TRBJ2-2)
CASSLGGGELFF

SEQ ID NO: 345759 - protein, 12 aa, Homo sapiens
  CDR3 for alpha chain variable domain of TCR clone 172880 (TRAV12-1, TRAJ40)
CVFYSGTYKYIF

SEQ ID NO: 345760 - protein, 18 aa, Homo sapiens
  CDR3 for beta chain variable domain of TCR clone 172880 (TRBV12-4, TRBJ2-2)
CASSSVACTRGRTGELFF

SEQ ID NO: 345761 - protein, 13 aa, Homo sapiens
  CDR3 for alpha chain variable domain of TCR clone 172881 (TRAV12-2, TRAJ13)
CREEDWGYQKVTF

SEQ ID NO: 345762 - protein, 16 aa, Homo sapiens
  CDR3 for beta chain variable domain of TCR clone 172881 (TRBV6-1, TRBJ2-5)
CASSFFVRGRQETQYF

SEQ ID NO: 345763 - protein, 13 aa, Homo sapiens
  CDR3 for alpha chain variable domain of TCR clone 172882 (TRAV29/DV5, TRAJ29)
CAASAAGNTPLVL

SEQ ID NO: 345764 - protein, 14 aa, Homo sapiens
  CDR3 for beta chain variable domain of TCR clone 172882 (TRBV19, TRBJ2-3)
CASSAPRGTDTQYF

SEQ ID NO: 345765 - protein, 11 aa, Homo sapiens
  CDR3 for alpha chain variable domain of TCR clone 172883 (TRAV4, TRAJ31)
GLVGDNARLMF

SEQ ID NO: 345766 - protein, 16 aa, Homo sapiens
  CDR3 for beta chain variable domain of TCR clone 172883 (TRBV7-2, TRBJ2-5)
CASSSKWLSAQETQYF

SEQ ID NO: 345767 - protein, 17 aa, Homo sapiens
  CDR3 for alpha chain variable domain of TCR clone 172884 (TRAV3, TRAJ6)
CAVRDGPRAGGSYIPTF

SEQ ID NO: 345768 - protein, 12 aa, Homo sapiens
  CDR3 for beta chain variable domain of TCR clone 172884 (TRBV11-2, TRBJ2-1)
CASSPGNNEQFF

SEQ ID NO: 345769 - protein, 12 aa, Homo sapiens
  CDR3 for alpha chain variable domain of TCR clone 172885 (TRAV12-3, TRAJ40)
CAMRSGTYKYIF

SEQ ID NO: 345770 - protein, 15 aa, Homo sapiens
  CDR3 for beta chain variable domain of TCR clone 172885 (TRBV7-3, TRBJ2-2)
CASSETGQGTGELFF

SEQ ID NO: 345771 - protein, 14 aa, Homo sapiens
  CDR3 for alpha chain variable domain of TCR clone 172886 (TRAV1-2, TRAJ16)
CAVNRFSDGQKLLF

SEQ ID NO: 345772 - protein, 13 aa, Homo sapiens
  CDR3 for beta chain variable domain of TCR clone 172886 (TRBV12-4, TRBJ1-1)
CASTPRMNTEAFF

SEQ ID NO: 345773 - protein, 14 aa, Homo sapiens
  CDR3 for alpha chain variable domain of TCR clone 172887 (TRAV27, TRAJ40)
CAGSLLRGTYKYIF

SEQ ID NO: 345774 - protein, 15 aa, Homo sapiens
  CDR3 for beta chain variable domain of TCR clone 172887 (TRBV6-3, TRBJ1-4)
CASRSPGQENEKLFF

SEQ ID NO: 345775 - protein, 13 aa, Homo sapiens
  CDR3 for alpha chain variable domain of TCR clone 172888 (TRAV21, TRAJ27)
CAALNTNAGKSTF

SEQ ID NO: 345776 - protein, 14 aa, Homo sapiens
  CDR3 for beta chain variable domain of TCR clone 172888 (TRBV27, TRBJ1-1)
CASSLLSGLSEAFY

SEQ ID NO: 345777 - protein, 16 aa, Homo sapiens
  CDR3 for alpha chain variable domain of TCR clone 172889 (TRAV8-3, TRAJ10)
CAVGPIITGGGNKLTF

SEQ ID NO: 345778 - protein, 16 aa, Homo sapiens
  CDR3 for beta chain variable domain of TCR clone 172889 (TRBV7-2, TRBJ2-5)
CASSSKWLSGQETQYF

SEQ ID NO: 345779 - protein, 16 aa, Homo sapiens
  CDR3 for alpha chain variable domain of TCR clone 172890 (TRAV30, TRAJ24)
CGTDIVDADSWGKFQF

SEQ ID NO: 345780 - protein, 16 aa, Homo sapiens
  CDR3 for beta chain variable domain of TCR clone 172890 (TRBV20-1, TRBJ1-4)
CSAPGQGLLTNEKLFF

SEQ ID NO: 345781 - protein, 13 aa, Homo sapiens
  CDR3 for alpha chain variable domain of TCR clone 172891 (TRAV21, TRAJ56)
CAVRTRANSKLTF

SEQ ID NO: 345782 - protein, 15 aa, Homo sapiens
  CDR3 for beta chain variable domain of TCR clone 172891 (TRBV7-9, TRBJ1-1)
CASSHRGTVNTEAFF

SEQ ID NO: 345783 - protein, 12 aa, Homo sapiens
  CDR3 for alpha chain variable domain of TCR clone 172892 (TRAV12-3, TRAJ17)
CAMTLTGNKLTF

SEQ ID NO: 345784 - protein, 16 aa, Homo sapiens
  CDR3 for beta chain variable domain of TCR clone 172892 (TRBV19, TRBJ2-2)
CASTIGARAGAGELFF

SEQ ID NO: 345785 - protein, 15 aa, Homo sapiens
  CDR3 for alpha chain variable domain of TCR clone 172893 (TRAV27, TRAJ38)
CAARRNAGNNRKLIW

SEQ ID NO: 345786 - protein, 14 aa, Homo sapiens
  CDR3 for beta chain variable domain of TCR clone 172893 (TRBV6-1, TRBJ1-3)
CASVQGGGGNTMYF

SEQ ID NO: 345787 - protein, 14 aa, Homo sapiens
  CDR3 for alpha chain variable domain of TCR clone 172894 (TRAV8-4, TRAJ13)
CAVTLSAGYQKVTF

SEQ ID NO: 345788 - protein, 14 aa, Homo sapiens
  CDR3 for beta chain variable domain of TCR clone 172894 (TRBV7-2, TRBJ1-2)
CASSQTGSTYGYTF

SEQ ID NO: 345789 - protein, 11 aa, Homo sapiens
  CDR3 for alpha chain variable domain of TCR clone 172895 (TRAV22, TRAJ30)
CAGNRDDKIIF

SEQ ID NO: 345790 - protein, 17 aa, Homo sapiens
  CDR3 for beta chain variable domain of TCR clone 172895 (TRBV4-1, TRBJ2-3)
CASSQSATGGPVDTQYF

SEQ ID NO: 345791 - protein, 12 aa, Homo sapiens
  CDR3 for alpha chain variable domain of TCR clone 172896 (TRAV10, TRAJ43)
CVVVRVGNDMLF

SEQ ID NO: 345792 - protein, 15 aa, Homo sapiens
  CDR3 for beta chain variable domain of TCR clone 172896 (TRBV2, TRBJ2-7)
CASSEGLARSYEQYF

SEQ ID NO: 345793 - protein, 18 aa, Homo sapiens
  CDR3 for alpha chain variable domain of TCR clone 172897 (TRAV21, TRAJ53)
RAVKGGENSGGSNYKLTF

SEQ ID NO: 345794 - protein, 12 aa, Homo sapiens
  CDR3 for beta chain variable domain of TCR clone 172897 (TRBV12-4, TRBJ2-7)
CASSLGGYEQYF

SEQ ID NO: 345795 - protein, 16 aa, Homo sapiens
  CDR3 for alpha chain variable domain of TCR clone 172898 (TRAV12-2, TRAJ40)
CAVIRGGTSGTYKYIF

SEQ ID NO: 345796 - protein, 16 aa, Homo sapiens
  CDR3 for beta chain variable domain of TCR clone 172898 (TRBV7-9, TRBJ2-1)
CASSAVAGGSYNEQFF

SEQ ID NO: 345797 - protein, 11 aa, Homo sapiens
  CDR3 for alpha chain variable domain of TCR clone 172899 (TRAV3, TRAJ21)
CAVGNFNKFYF

SEQ ID NO: 345798 - protein, 12 aa, Homo sapiens
  CDR3 for beta chain variable domain of TCR clone 172899 (TRBV11-2, TRBJ2-4)
CASSAASGSKYF

SEQ ID NO: 345799 - protein, 17 aa, Homo sapiens
  CDR3 for alpha chain variable domain of TCR clone 172900 (TRAV26-1, TRAJ37)
CIVRVITVSSNTGNLIF

SEQ ID NO: 345800 - protein, 14 aa, Homo sapiens
  CDR3 for beta chain variable domain of TCR clone 172900 (TRBV19, TRBJ2-1)
CASPTFVLSGEQFF

SEQ ID NO: 345801 - protein, 12 aa, Homo sapiens
  CDR3 for alpha chain variable domain of TCR clone 172901 (TRAV3, TRAJ26)
CAVRDYGQNFVF

SEQ ID NO: 345802 - protein, 12 aa, Homo sapiens
  CDR3 for beta chain variable domain of TCR clone 172901 (TRBV7-9, TRBJ2-7)
CASSFGSYEQYL

SEQ ID NO: 345803 - protein, 17 aa, Homo sapiens
  CDR3 for alpha chain variable domain of TCR clone 172902 (TRAV29/DV5, TRAJ40)
CAASGIYTTSGTYKYIF

SEQ ID NO: 345804 - protein, 13 aa, Homo sapiens
  CDR3 for beta chain variable domain of TCR clone 172902 (TRBV6-1, TRBJ2-1)
CASSHDRNNEQFF

SEQ ID NO: 345805 - protein, 15 aa, Homo sapiens
  CDR3 for alpha chain variable domain of TCR clone 172903 (TRAV4, TRAJ39)
CLVGPNNNAGNMLTF

SEQ ID NO: 345806 - protein, 15 aa, Homo sapiens
  CDR3 for beta chain variable domain of TCR clone 172903 (TRBV20-1, TRBJ2-7)
CSARKGLAESYEQYF

SEQ ID NO: 345807 - protein, 14 aa, Homo sapiens
  CDR3 for alpha chain variable domain of TCR clone 172904 (TRAV13-1, TRAJ40)
CAASMTSGTYKYIF

SEQ ID NO: 345808 - protein, 15 aa, Homo sapiens
  CDR3 for beta chain variable domain of TCR clone 172904 (TRBV28, TRBJ1-3)
CASSMGWASGNTIYF

SEQ ID NO: 345809 - protein, 13 aa, Homo sapiens
  CDR3 for alpha chain variable domain of TCR clone 172905 (TRAV17, TRAJ9)
CATGSTGGFKTIF

SEQ ID NO: 345810 - protein, 14 aa, Homo sapiens
  CDR3 for beta chain variable domain of TCR clone 172905 (TRBV7-8, TRBJ2-7)
CASTFRGGPNEHYF

SEQ ID NO: 345811 - protein, 13 aa, Homo sapiens
  CDR3 for alpha chain variable domain of TCR clone 172906 (TRAV3, TRAJ20)
CAVRDIGDYKLSF

SEQ ID NO: 345812 - protein, 14 aa, Homo sapiens
  CDR3 for beta chain variable domain of TCR clone 172906 (TRBV18, TRBJ2-7)
CASSPRGGAYEQYF

SEQ ID NO: 345813 - protein, 15 aa, Homo sapiens
  CDR3 for alpha chain variable domain of TCR clone 172907 (TRAV39, TRAJ42)
LAVVNYGGSQGNLIF

SEQ ID NO: 345814 - protein, 15 aa, Homo sapiens
  CDR3 for beta chain variable domain of TCR clone 172907 (TRBV10-3, TRBJ1-1)
CAISDLGRANTEAFF

SEQ ID NO: 345815 - protein, 11 aa, Homo sapiens
  CDR3 for alpha chain variable domain of TCR clone 172908 (TRAV17, TRAJ43)
SATPRSNDMRF

SEQ ID NO: 345816 - protein, 15 aa, Homo sapiens
  CDR3 for beta chain variable domain of TCR clone 172908 (TRBV2, TRBJ2-7)
CASTLLGSGATEQYF

SEQ ID NO: 345817 - protein, 16 aa, Homo sapiens
  CDR3 for alpha chain variable domain of TCR clone 172909 (TRAV13-1, TRAJ39)
CAASIVMQATCSPLEG

SEQ ID NO: 345818 - protein, 16 aa, Homo sapiens
  CDR3 for beta chain variable domain of TCR clone 172909 (TRBV20-1, TRBJ1-4)
CSALGQGLLTNEKLFF

SEQ ID NO: 345819 - protein, 14 aa, Homo sapiens
  CDR3 for alpha chain variable domain of TCR clone 172910 (TRAV17, TRAJ12)
CAILPMDSIYKLIF

SEQ ID NO: 345820 - protein, 11 aa, Homo sapiens
  CDR3 for beta chain variable domain of TCR clone 172910 (TRBV19, TRBJ1-1)
CASSIGSEAFF

SEQ ID NO: 345821 - protein, 14 aa, Homo sapiens
  CDR3 for alpha chain variable domain of TCR clone 172911 (TRAV8-4, TRAJ54)
CAVNSIQGAQKLVF

SEQ ID NO: 345822 - protein, 15 aa, Homo sapiens
  CDR3 for beta chain variable domain of TCR clone 172911 (TRBV5-1, TRBJ2-1)
CASSLVANTYNEQFF

SEQ ID NO: 345823 - protein, 14 aa, Homo sapiens
  CDR3 for alpha chain variable domain of TCR clone 172912 (TRAV8-1, TRAJ5)
CAVRTDTGRRALTF

SEQ ID NO: 345824 - protein, 14 aa, Homo sapiens
  CDR3 for beta chain variable domain of TCR clone 172912 (TRBV19, TRBJ2-1)
CASPTFVLSGEQFF

SEQ ID NO: 345825 - protein, 16 aa, Homo sapiens
  CDR3 for alpha chain variable domain of TCR clone 172913 (TRAV3, TRAJ37)
CAVRPHGSGNTGKLIF

SEQ ID NO: 345826 - protein, 11 aa, Homo sapiens
  CDR3 for beta chain variable domain of TCR clone 172913 (TRBV11-2, TRBJ2-2)
CASSLPGELFF

SEQ ID NO: 345827 - protein, 14 aa, Homo sapiens
  CDR3 for alpha chain variable domain of TCR clone 172914 (TRAV26-1, TRAJ34)
CTVRVAYNTDKLIF

SEQ ID NO: 345828 - protein, 19 aa, Homo sapiens
  CDR3 for beta chain variable domain of TCR clone 172914 (TRBV25-1, TRBJ2-2)
CAILVYRVDRGRKTGELFL

SEQ ID NO: 345829 - protein, 13 aa, Homo sapiens
  CDR3 for alpha chain variable domain of TCR clone 172915 (TRAV24, TRAJ42)
CAFSTGSQGNLIF

SEQ ID NO: 345830 - protein, 20 aa, Homo sapiens
  CDR3 for beta chain variable domain of TCR clone 172915 (TRBV28, TRBJ2-1)
CASTPIGRSTGLAGGNEQFF

SEQ ID NO: 345831 - protein, 15 aa, Homo sapiens
  CDR3 for alpha chain variable domain of TCR clone 172916 (TRAV20, TRAJ41)
CAVQANSNSGYALNF

SEQ ID NO: 345832 - protein, 18 aa, Homo sapiens
  CDR3 for beta chain variable domain of TCR clone 172916 (TRBV7-9, TRBJ2-7)
CAISLTTSGSRTWYEQYF

SEQ ID NO: 345833 - protein, 14 aa, Homo sapiens
  CDR3 for alpha chain variable domain of TCR clone 172917 (TRAV30, TRAJ33)
SGTVAPRSNYQLIW

SEQ ID NO: 345834 - protein, 14 aa, Homo sapiens
  CDR3 for beta chain variable domain of TCR clone 172917 (TRBV19, TRBJ2-1)
CASPTFVLSGEQFF

SEQ ID NO: 345835 - protein, 15 aa, Homo sapiens
  CDR3 for alpha chain variable domain of TCR clone 172918 (TRAV16, TRAJ12)
CSKWPLRDSSYKLLF

SEQ ID NO: 345836 - protein, 13 aa, Homo sapiens
  CDR3 for beta chain variable domain of TCR clone 172918 (TRBV4-2, TRBJ1-1)
CASSQAGNTEAFF

SEQ ID NO: 345837 - protein, 15 aa, Homo sapiens
  CDR3 for alpha chain variable domain of TCR clone 172919 (TRAV38-1, TRAJ37)
CAFLFGSGNTGKLIF

SEQ ID NO: 345838 - protein, 13 aa, Homo sapiens
  CDR3 for beta chain variable domain of TCR clone 172919 (TRBV4-2, TRBJ1-1)
CASSQAGNTEAFF

SEQ ID NO: 345839 - protein, 16 aa, Homo sapiens
  CDR3 for alpha chain variable domain of TCR clone 172920 (TRAV23/DV6, TRAJ9)
CSASIGGNTEGFKTIF

SEQ ID NO: 345840 - protein, 14 aa, Homo sapiens
  CDR3 for beta chain variable domain of TCR clone 172920 (TRBV9, TRBJ2-7)
CASSVGVGSYEQYF

SEQ ID NO: 345841 - protein, 12 aa, Homo sapiens
  CDR3 for alpha chain variable domain of TCR clone 172921 (TRAV13-1, TRAJ49)
CAASTWGNQFYF

SEQ ID NO: 345842 - protein, 14 aa, Homo sapiens
  CDR3 for beta chain variable domain of TCR clone 172921 (TRBV12-4, TRBJ1-1)
CASSLDGLNTEAFF

SEQ ID NO: 345843 - protein, 11 aa, Homo sapiens
  CDR3 for alpha chain variable domain of TCR clone 172922 (TRAV1-1, TRAJ23)
CAVRQGGKLIF

SEQ ID NO: 345844 - protein, 20 aa, Homo sapiens
  CDR3 for beta chain variable domain of TCR clone 172922 (TRBV7-8, TRBJ2-2)
CACSHLFPGPTVHITGELFF

SEQ ID NO: 345845 - protein, 17 aa, Homo sapiens
  CDR3 for alpha chain variable domain of TCR clone 172923 (TRAV3, TRAJ6)
CAARDGPRAGGSYIPTF

SEQ ID NO: 345846 - protein, 15 aa, Homo sapiens
  CDR3 for beta chain variable domain of TCR clone 172923 (TRBV11-3, TRBJ2-7)
CASSPGPASSYEQYF

SEQ ID NO: 345847 - protein, 15 aa, Homo sapiens
  CDR3 for alpha chain variable domain of TCR clone 172924 (TRAV8-2, TRAJ40)
CVGLGTTSGTYKYIF

SEQ ID NO: 345848 - protein, 16 aa, Homo sapiens
  CDR3 for beta chain variable domain of TCR clone 172924 (TRBV7-3, TRBJ2-1)
CASSIEGYRSYNEQFF

SEQ ID NO: 345849 - protein, 11 aa, Homo sapiens
  CDR3 for alpha chain variable domain of TCR clone 172925 (TRAV17, TRAJ9)
CGFTGGFKTIF

SEQ ID NO: 345850 - protein, 14 aa, Homo sapiens
  CDR3 for beta chain variable domain of TCR clone 172925 (TRBV4-1, TRBJ2-2)
CASSQAVNTGELFF

SEQ ID NO: 345851 - protein, 13 aa, Homo sapiens
  CDR3 for alpha chain variable domain of TCR clone 172926 (TRAV13-1, TRAJ21)
CAASIYDFNKFYF

SEQ ID NO: 345852 - protein, 16 aa, Homo sapiens
  CDR3 for beta chain variable domain of TCR clone 172926 (TRBV12-4, TRBJ1-5)
CASSRPVGGSNQTQHF

SEQ ID NO: 345853 - protein, 14 aa, Homo sapiens
  CDR3 for alpha chain variable domain of TCR clone 172927 (TRAV35, TRAJ22)
CAGLRPGSARQLSF

SEQ ID NO: 345854 - protein, 16 aa, Homo sapiens
  CDR3 for beta chain variable domain of TCR clone 172927 (TRBV13, TRBJ2-2)
CASSPRTGEHTGELFF

SEQ ID NO: 345855 - protein, 15 aa, Homo sapiens
  CDR3 for alpha chain variable domain of TCR clone 172928 (TRAV20, TRAJ53)
CALQERGGSNYKLTF

SEQ ID NO: 345856 - protein, 13 aa, Homo sapiens
  CDR3 for beta chain variable domain of TCR clone 172928 (TRBV4-2, TRBJ1-1)
CASSQAGNTEAFF

SEQ ID NO: 345857 - protein, 15 aa, Homo sapiens
  CDR3 for alpha chain variable domain of TCR clone 172929 (TRAV38-2/DV8, TRAJ57)
CASARAQGGSEKLLF

SEQ ID NO: 345858 - protein, 17 aa, Homo sapiens
  CDR3 for beta chain variable domain of TCR clone 172929 (TRBV18, TRBJ1-5)
CASSPTMGQGTNQPQHF

SEQ ID NO: 345859 - protein, 17 aa, Homo sapiens
  CDR3 for alpha chain variable domain of TCR clone 172930 (TRAV3, TRAJ38)
CAVRDCLNAGNNRKLIW

SEQ ID NO: 345860 - protein, 13 aa, Homo sapiens
  CDR3 for beta chain variable domain of TCR clone 172930 (TRBV27, TRBJ1-4)
CASSLMGDEKLFF

SEQ ID NO: 345861 - protein, 14 aa, Homo sapiens
  CDR3 for alpha chain variable domain of TCR clone 172931 (TRAV17, TRAJ35)
CATDRPDFGNVLHC

SEQ ID NO: 345862 - protein, 15 aa, Homo sapiens
  CDR3 for beta chain variable domain of TCR clone 172931 (TRBV28, TRBJ2-5)
CASSSGRVIQETQYF

SEQ ID NO: 345863 - protein, 13 aa, Homo sapiens
  CDR3 for alpha chain variable domain of TCR clone 172932 (TRAV17, TRAJ26)
CATVDNYGQNFVF

SEQ ID NO: 345864 - protein, 16 aa, Homo sapiens
  CDR3 for beta chain variable domain of TCR clone 172932 (TRBV2, TRBJ2-1)
CASSVGRSLSCNEQFF

SEQ ID NO: 345865 - protein, 15 aa, Homo sapiens
  CDR3 for alpha chain variable domain of TCR clone 172933 (TRAV38-1, TRAJ45)
CAFMKGGGGADGLTL

SEQ ID NO: 345866 - protein, 13 aa, Homo sapiens
  CDR3 for beta chain variable domain of TCR clone 172933 (TRBV7-9, TRBJ1-2)
CASSLKQNYGYTF

SEQ ID NO: 345867 - protein, 12 aa, Homo sapiens
  CDR3 for alpha chain variable domain of TCR clone 172934 (TRAV12-3, TRAJ17)
CAMTLTGNKLNF

SEQ ID NO: 345868 - protein, 15 aa, Homo sapiens
  CDR3 for beta chain variable domain of TCR clone 172934 (TRBV20-1, TRBJ2-7)
CSARDRVSGMDEQSF

SEQ ID NO: 345869 - protein, 13 aa, Homo sapiens
  CDR3 for alpha chain variable domain of TCR clone 172935 (TRAV17, TRAJ5)
CAPMDTGRRALTF

SEQ ID NO: 345870 - protein, 11 aa, Homo sapiens
  CDR3 for beta chain variable domain of TCR clone 172935 (TRBV19, TRBJ1-1)
CASSIGSEALF

SEQ ID NO: 345871 - protein, 15 aa, Homo sapiens
  CDR3 for alpha chain variable domain of TCR clone 172936 (TRAV12-1, TRAJ42)
CVVTRDGGSQGNLIF

SEQ ID NO: 345872 - protein, 19 aa, Homo sapiens
  CDR3 for beta chain variable domain of TCR clone 172936 (TRBV5-1, TRBJ2-3)
CASSLWTSGGITTPDTQYF

SEQ ID NO: 345873 - protein, 17 aa, Homo sapiens
  CDR3 for alpha chain variable domain of TCR clone 172937 (TRAV12-2, TRAJ6)
CAPQGPPRARGSYIPTF

SEQ ID NO: 345874 - protein, 16 aa, Homo sapiens
  CDR3 for beta chain variable domain of TCR clone 172937 (TRBV19, TRBJ2-2)
CASSTARASNTGELFF

SEQ ID NO: 345875 - protein, 12 aa, Homo sapiens
  CDR3 for alpha chain variable domain of TCR clone 172938 (TRAV13-1, TRAJ21)
CAAKEGFNKFYF

SEQ ID NO: 345876 - protein, 13 aa, Homo sapiens
  CDR3 for beta chain variable domain of TCR clone 172938 (TRBV20-1, TRBJ1-1)
CSAPLGGGTEAFV

SEQ ID NO: 345877 - protein, 19 aa, Homo sapiens
  CDR3 for alpha chain variable domain of TCR clone 172939 (TRAV13-1, TRAJ13)
CTAFFLGVTRKLPLELEQS

SEQ ID NO: 345878 - protein, 14 aa, Homo sapiens
  CDR3 for beta chain variable domain of TCR clone 172939 (TRBV7-8, TRBJ2-3)
CASSLEAGTDTQYF

SEQ ID NO: 345879 - protein, 16 aa, Homo sapiens
  CDR3 for alpha chain variable domain of TCR clone 172940 (TRAV30, TRAJ24)
CGTEIVDADSWGKFQF

SEQ ID NO: 345880 - protein, 16 aa, Homo sapiens
  CDR3 for beta chain variable domain of TCR clone 172940 (TRBV13, TRBJ2-2)
CASSPRTGEHAGELFF

SEQ ID NO: 345881 - protein, 17 aa, Homo sapiens
  CDR3 for alpha chain variable domain of TCR clone 172941 (TRAV3, TRAJ6)
CAVRDGPRAGGSYIPTF

SEQ ID NO: 345882 - protein, 11 aa, Homo sapiens
  CDR3 for beta chain variable domain of TCR clone 172941 (TRBV7-9, TRBJ2-3)
CASSPTDTQYF

SEQ ID NO: 345883 - protein, 14 aa, Homo sapiens
  CDR3 for alpha chain variable domain of TCR clone 172942 (TRAV12-2, TRAJ13)
CAVKKTGGYQKVTL

SEQ ID NO: 345884 - protein, 17 aa, Homo sapiens
  CDR3 for beta chain variable domain of TCR clone 172942 (TRBV15, TRBJ2-4)
CATSRDNPQTGLDIQYF

SEQ ID NO: 345885 - protein, 15 aa, Homo sapiens
  CDR3 for alpha chain variable domain of TCR clone 172943 (TRAV12-1, TRAJ37)
CVVNLPTSNTGKLIF

SEQ ID NO: 345886 - protein, 15 aa, Homo sapiens
  CDR3 for beta chain variable domain of TCR clone 172943 (TRBV20-1, TRBJ2-7)
CSARDPTEVGHEQYF

SEQ ID NO: 345887 - protein, 14 aa, Homo sapiens
  CDR3 for alpha chain variable domain of TCR clone 172944 (TRAV2, TRAJ9)
CAVEDRSGGFKAIF

SEQ ID NO: 345888 - protein, 14 aa, Homo sapiens
  CDR3 for beta chain variable domain of TCR clone 172944 (TRBV7-2, TRBJ1-3)
CASSRLRSGNTIYF

SEQ ID NO: 345889 - protein, 14 aa, Homo sapiens
  CDR3 for alpha chain variable domain of TCR clone 172945 (TRAV12-2, TRAJ40)
CAVKIPSGTYKYIF

SEQ ID NO: 345890 - protein, 14 aa, Homo sapiens
  CDR3 for beta chain variable domain of TCR clone 172945 (TRBV7-8, TRBJ2-7)
CASGPRDRVYEQYF

SEQ ID NO: 345891 - protein, 15 aa, Homo sapiens
  CDR3 for alpha chain variable domain of TCR clone 172946 (TRAV8-3, TRAJ23)
CAVGDRYNQGGKLIF

SEQ ID NO: 345892 - protein, 20 aa, Homo sapiens
  CDR3 for beta chain variable domain of TCR clone 172946 (TRBV29-1, TRBJ2-5)
GNMSPEDSSIYLCSAGTQYF

SEQ ID NO: 345893 - protein, 16 aa, Homo sapiens
  CDR3 for alpha chain variable domain of TCR clone 172947 (TRAV12-1, TRAJ43)
CVVKPHRFGAGTRLTV

SEQ ID NO: 345894 - protein, 16 aa, Homo sapiens
  CDR3 for beta chain variable domain of TCR clone 172947 (TRBV27, TRBJ2-2)
CASSSTGGGDTGELFF

SEQ ID NO: 345895 - protein, 13 aa, Homo sapiens
  CDR3 for alpha chain variable domain of TCR clone 172948 (TRAV12-2, TRAJ34)
CAVRGYNTDKLIF

SEQ ID NO: 345896 - protein, 15 aa, Homo sapiens
  CDR3 for beta chain variable domain of TCR clone 172948 (TRBV28, TRBJ2-1)
CASRTGAGVIARQFV

SEQ ID NO: 345897 - protein, 12 aa, Homo sapiens
  CDR3 for alpha chain variable domain of TCR clone 172949 (TRAV12-1, TRAJ40)
CVVYSGTYKYIF

SEQ ID NO: 345898 - protein, 18 aa, Homo sapiens
  CDR3 for beta chain variable domain of TCR clone 172949 (TRBV11-2, TRBJ2-3)
CASSVGWASRGAPNTQYF

SEQ ID NO: 345899 - protein, 11 aa, Homo sapiens
  CDR3 for alpha chain variable domain of TCR clone 172950 (TRAV17, TRAJ9)
CATTGGFKTIF

SEQ ID NO: 345900 - protein, 13 aa, Homo sapiens
  CDR3 for beta chain variable domain of TCR clone 172950 (TRBV7-9, TRBJ2-1)
CASSLDVGNEQFF

SEQ ID NO: 345901 - protein, 15 aa, Homo sapiens
  CDR3 for alpha chain variable domain of TCR clone 172951 (TRAV3, TRAJ5)
CAVRDRATGRRALTF

SEQ ID NO: 345902 - protein, 13 aa, Homo sapiens
  CDR3 for beta chain variable domain of TCR clone 172951 (TRBV12-4, TRBJ2-7)
CASSPTEAYEQYF

SEQ ID NO: 345903 - protein, 17 aa, Homo sapiens
  CDR3 for alpha chain variable domain of TCR clone 172952 (TRAV3, TRAJ6)
CSVRDGPRAGGSYIPTI

SEQ ID NO: 345904 - protein, 14 aa, Homo sapiens
  CDR3 for beta chain variable domain of TCR clone 172952 (TRBV7-2, TRBJ2-7)
CASSPKTSFYEQYF

SEQ ID NO: 345905 - protein, 14 aa, Homo sapiens
  CDR3 for alpha chain variable domain of TCR clone 172953 (TRAV26-1, TRAJ21)
CIVRVGHNFKKFYF

SEQ ID NO: 345906 - protein, 15 aa, Homo sapiens
  CDR3 for beta chain variable domain of TCR clone 172953 (TRBV4-3, TRBJ2-1)
CASSQGLAGSNEQFF

SEQ ID NO: 345907 - protein, 17 aa, Homo sapiens
  CDR3 for alpha chain variable domain of TCR clone 172954 (TRAV13-1, TRAJ52)
CAAGRNAVGTSYVKLTF

SEQ ID NO: 345908 - protein, 13 aa, Homo sapiens
  CDR3 for beta chain variable domain of TCR clone 172954 (TRBV7-2, TRBJ1-1)
CASNLKGAKVAFF

SEQ ID NO: 345909 - protein, 17 aa, Homo sapiens
  CDR3 for alpha chain variable domain of TCR clone 172955 (TRAV3, TRAJ38)
CAVRDCLNAGNNRKLIW

SEQ ID NO: 345910 - protein, 15 aa, Homo sapiens
  CDR3 for beta chain variable domain of TCR clone 172955 (TRBV27, TRBJ2-1)
CASSNGGGSSNEQYF

SEQ ID NO: 345911 - protein, 15 aa, Homo sapiens
  CDR3 for alpha chain variable domain of TCR clone 172956 (TRAV12-3, TRAJ22)
CAMRSSSGSARQLTF

SEQ ID NO: 345912 - protein, 14 aa, Homo sapiens
  CDR3 for beta chain variable domain of TCR clone 172956 (TRBV7-9, TRBJ2-2)
CASSLVQDTGELFF

SEQ ID NO: 345913 - protein, 13 aa, Homo sapiens
  CDR3 for alpha chain variable domain of TCR clone 172957 (TRAV12-1, TRAJ26)
CMVRRNYGQNFVF

SEQ ID NO: 345914 - protein, 14 aa, Homo sapiens
  CDR3 for beta chain variable domain of TCR clone 172957 (TRBV7-9, TRBJ2-1)
CASSPRDSLYEQFF

SEQ ID NO: 345915 - protein, 12 aa, Homo sapiens
  CDR3 for alpha chain variable domain of TCR clone 172958 (TRAV4, TRAJ21)
FLVGDNFNKFYF

SEQ ID NO: 345916 - protein, 17 aa, Homo sapiens
  CDR3 for beta chain variable domain of TCR clone 172958 (TRBV3-1, TRBJ2-7)
CASSQDLTGLSSYEQYF

SEQ ID NO: 345917 - protein, 12 aa, Homo sapiens
  CDR3 for alpha chain variable domain of TCR clone 172959 (TRAV12-2, TRAJ42)
CAVGGSQGNLIF

SEQ ID NO: 345918 - protein, 15 aa, Homo sapiens
  CDR3 for beta chain variable domain of TCR clone 172959 (TRBV9, TRBJ1-6)
CASSVAGTGDSTLLF

SEQ ID NO: 345919 - protein, 14 aa, Homo sapiens
  CDR3 for alpha chain variable domain of TCR clone 172960 (TRAV1-2, TRAJ16)
SAVNRLSDGQKLLF

SEQ ID NO: 345920 - protein, 13 aa, Homo sapiens
  CDR3 for beta chain variable domain of TCR clone 172960 (TRBV11-2, TRBJ2-1)
CASSLGLAGGRFF

SEQ ID NO: 345921 - protein, 14 aa, Homo sapiens
  CDR3 for alpha chain variable domain of TCR clone 172961 (TRAV13-2, TRAJ42)
CGEWVGGSQGNLIF

SEQ ID NO: 345922 - protein, 13 aa, Homo sapiens
  CDR3 for beta chain variable domain of TCR clone 172961 (TRBV5-1, TRBJ2-2)
CASIVARTGELFF

SEQ ID NO: 345923 - protein, 17 aa, Homo sapiens
  CDR3 for alpha chain variable domain of TCR clone 172962 (TRAV13-1, TRAJ31)
CAPRDRLMFGDGTQLVV

SEQ ID NO: 345924 - protein, 13 aa, Homo sapiens
  CDR3 for beta chain variable domain of TCR clone 172962 (TRBV20-1, TRBJ1-6)
CSAPLGVGSPLHF

SEQ ID NO: 345925 - protein, 13 aa, Homo sapiens
  CDR3 for alpha chain variable domain of TCR clone 172963 (TRAV12-3, TRAJ13)
CAMSSGGYQKVTF

SEQ ID NO: 345926 - protein, 13 aa, Homo sapiens
  CDR3 for beta chain variable domain of TCR clone 172963 (TRBV7-3, TRBJ1-1)
CASSQDGGAEAFF

SEQ ID NO: 345927 - protein, 15 aa, Homo sapiens
  CDR3 for alpha chain variable domain of TCR clone 172964 (TRAV2, TRAJ28)
CAVPYSGAGSYQLTF

SEQ ID NO: 345928 - protein, 10 aa, Homo sapiens
  CDR3 for beta chain variable domain of TCR clone 172964 (TRBV23-1, TRBJ2-1)
KGSSYNEQFF

SEQ ID NO: 345929 - protein, 15 aa, Homo sapiens
  CDR3 for alpha chain variable domain of TCR clone 172965 (TRAV20, TRAJ4)
CAVEGSSGGYNKLMF

SEQ ID NO: 345930 - protein, 14 aa, Homo sapiens
  CDR3 for beta chain variable domain of TCR clone 172965 (TRBV7-8, TRBJ2-7)
CASTLGGALGEQYF

SEQ ID NO: 345931 - protein, 12 aa, Homo sapiens
  CDR3 for alpha chain variable domain of TCR clone 172966 (TRAV12-3, TRAJ17)
CAMTLTGNKLTF

SEQ ID NO: 345932 - protein, 11 aa, Homo sapiens
  CDR3 for beta chain variable domain of TCR clone 172966 (TRBV11-2, TRBJ1-1)
CASSINTEAFC

SEQ ID NO: 345933 - protein, 12 aa, Homo sapiens
  CDR3 for alpha chain variable domain of TCR clone 172967 (TRAV12-2, TRAJ40)
CAVTPGTYKYIF

SEQ ID NO: 345934 - protein, 16 aa, Homo sapiens
  CDR3 for beta chain variable domain of TCR clone 172967 (TRBV15, TRBJ2-6)
CATSVNGGFLANVLTF

SEQ ID NO: 345935 - protein, 15 aa, Homo sapiens
  CDR3 for alpha chain variable domain of TCR clone 172968 (TRAV26-1, TRAJ39)
CIVRVASNAGNMLTF

SEQ ID NO: 345936 - protein, 14 aa, Homo sapiens
  CDR3 for beta chain variable domain of TCR clone 172968 (TRBV7-6, TRBJ2-3)
CDSSVAGGTDTQYF

SEQ ID NO: 345937 - protein, 14 aa, Homo sapiens
  CDR3 for alpha chain variable domain of TCR clone 172969 (TRAV13-2, TRAJ43)
CEEIPTYNNNDMRF

SEQ ID NO: 345938 - protein, 15 aa, Homo sapiens
  CDR3 for beta chain variable domain of TCR clone 172969 (TRBV7-9, TRBJ2-2)
CASGPLDTFPGELFF

SEQ ID NO: 345939 - protein, 10 aa, Homo sapiens
  CDR3 for alpha chain variable domain of TCR clone 172970 (TRAV30, TRAJ48)
CGIGNEKLTF

SEQ ID NO: 345940 - protein, 16 aa, Homo sapiens
  CDR3 for beta chain variable domain of TCR clone 172970 (TRBV6-1, TRBJ1-3)
CASVQGGVETPYILER

SEQ ID NO: 345941 - protein, 13 aa, Homo sapiens
  CDR3 for alpha chain variable domain of TCR clone 172971 (TRAV27, TRAJ53)
CAGQGGSNYKLTF

SEQ ID NO: 345942 - protein, 15 aa, Homo sapiens
  CDR3 for beta chain variable domain of TCR clone 172971 (TRBV18, TRBJ2-1)
CASLPDRGRDNEQFF

SEQ ID NO: 345943 - protein, 13 aa, Homo sapiens
  CDR3 for alpha chain variable domain of TCR clone 172972 (TRAV13-1, TRAJ39)
CSKYSNAGNMLTF

SEQ ID NO: 345944 - protein, 13 aa, Homo sapiens
  CDR3 for beta chain variable domain of TCR clone 172972 (TRBV20-1, TRBJ2-7)
CSARTGAGYEQYF

SEQ ID NO: 345945 - protein, 15 aa, Homo sapiens
  CDR3 for alpha chain variable domain of TCR clone 172973 (TRAV25, TRAJ52)
CAGRPGGTSYGKLTF

SEQ ID NO: 345946 - protein, 19 aa, Homo sapiens
  CDR3 for beta chain variable domain of TCR clone 172973 (TRBV4-3, TRBJ2-7)
CASSQEFIGWQVTPYEQYF

SEQ ID NO: 345947 - protein, 14 aa, Homo sapiens
  CDR3 for alpha chain variable domain of TCR clone 172974 (TRAV1-2, TRAJ8)
CAVREDTGFQKLVF

SEQ ID NO: 345948 - protein, 15 aa, Homo sapiens
  CDR3 for beta chain variable domain of TCR clone 172974 (TRBV7-9, TRBJ2-7)
CASSPGGGLAYEQYF

SEQ ID NO: 345949 - protein, 13 aa, Homo sapiens
  CDR3 for alpha chain variable domain of TCR clone 172975 (TRAV21, TRAJ13)
CAVNSGGYQKVTF

SEQ ID NO: 345950 - protein, 17 aa, Homo sapiens
  CDR3 for beta chain variable domain of TCR clone 172975 (TRBV9, TRBJ2-5)
CASGVAGQGPSIETQYF

SEQ ID NO: 345951 - protein, 16 aa, Homo sapiens
  CDR3 for alpha chain variable domain of TCR clone 172976 (TRAV8-6, TRAJ37)
CAVSGLGSSNTGTLIF

SEQ ID NO: 345952 - protein, 15 aa, Homo sapiens
  CDR3 for beta chain variable domain of TCR clone 172976 (TRBV20-1, TRBJ1-5)
CSARSGPSMNQPQHF

SEQ ID NO: 345953 - protein, 14 aa, Homo sapiens
  CDR3 for alpha chain variable domain of TCR clone 172977 (TRAV8-6, TRAJ54)
CSVTEGRGAQKLVF

SEQ ID NO: 345954 - protein, 14 aa, Homo sapiens
  CDR3 for beta chain variable domain of TCR clone 172977 (TRBV27, TRBJ2-7)
CASSIGQGAQKQYF

SEQ ID NO: 345955 - protein, 15 aa, Homo sapiens
  CDR3 for alpha chain variable domain of TCR clone 172978 (TRAV17, TRAJ23)
CATDAEDIQGGKLIF

SEQ ID NO: 345956 - protein, 12 aa, Homo sapiens
  CDR3 for beta chain variable domain of TCR clone 172978 (TRBV2, TRBJ2-1)
CAKREGYNEQFF

SEQ ID NO: 345957 - protein, 12 aa, Homo sapiens
  CDR3 for alpha chain variable domain of TCR clone 172979 (TRAV21, TRAJ12)
CAVMDSSYKLIF

SEQ ID NO: 345958 - protein, 16 aa, Homo sapiens
  CDR3 for beta chain variable domain of TCR clone 172979 (TRBV7-9, TRBJ1-1)
CASSLTQVRSNTEAFF

SEQ ID NO: 345959 - protein, 13 aa, Homo sapiens
  CDR3 for alpha chain variable domain of TCR clone 172980 (TRAV8-3, TRAJ36)
CAVGATGANNLFF

SEQ ID NO: 345960 - protein, 16 aa, Homo sapiens
  CDR3 for beta chain variable domain of TCR clone 172980 (TRBV7-3, TRBJ2-2)
CASSSRGGTSTGELFF

SEQ ID NO: 345961 - protein, 16 aa, Homo sapiens
  CDR3 for alpha chain variable domain of TCR clone 172981 (TRAV12-1, TRAJ43)
CVVNPHRFGAGTRLTV

SEQ ID NO: 345962 - protein, 15 aa, Homo sapiens
  CDR3 for beta chain variable domain of TCR clone 172981 (TRBV27, TRBJ2-2)
CQQFDRGRDTGELFF

SEQ ID NO: 345963 - protein, 12 aa, Homo sapiens
  CDR3 for alpha chain variable domain of TCR clone 172982 (TRAV35, TRAJ12)
CAGMDGSYKLIF

SEQ ID NO: 345964 - protein, 14 aa, Homo sapiens
  CDR3 for beta chain variable domain of TCR clone 172982 (TRBV28, TRBJ2-5)
CASSLYRGTETQYF

SEQ ID NO: 345965 - protein, 16 aa, Homo sapiens
  CDR3 for alpha chain variable domain of TCR clone 172983 (TRAV26-1, TRAJ32)
CIIRTNYGGATNKLIF

SEQ ID NO: 345966 - protein, 14 aa, Homo sapiens
  CDR3 for beta chain variable domain of TCR clone 172983 (TRBV27, TRBJ1-1)
CASSLLSGLSEAFF

SEQ ID NO: 345967 - protein, 12 aa, Homo sapiens
  CDR3 for alpha chain variable domain of TCR clone 172984 (TRAV12-3, TRAJ20)
CAMVRGDYKLSF

SEQ ID NO: 345968 - protein, 13 aa, Homo sapiens
  CDR3 for beta chain variable domain of TCR clone 172984 (TRBV7-9, TRBJ1-6)
CASSLASLSPLHF

SEQ ID NO: 345969 - protein, 16 aa, Homo sapiens
  CDR3 for alpha chain variable domain of TCR clone 172985 (TRAV30, TRAJ24)
CGTEIVDADSWGKFQL

SEQ ID NO: 345970 - protein, 13 aa, Homo sapiens
  CDR3 for beta chain variable domain of TCR clone 172985 (TRBV12-4, TRBJ2-5)
CASSPGTEETQYF

SEQ ID NO: 345971 - protein, 14 aa, Homo sapiens
  CDR3 for alpha chain variable domain of TCR clone 172986 (TRAV3, TRAJ27)
CAVRDDTNACKSTF

SEQ ID NO: 345972 - protein, 15 aa, Homo sapiens
  CDR3 for beta chain variable domain of TCR clone 172986 (TRBV7-7, TRBJ2-2)
CATSKLAKNTGELFF

SEQ ID NO: 345973 - protein, 15 aa, Homo sapiens
  CDR3 for alpha chain variable domain of TCR clone 172987 (TRAV21, TRAJ24)
CAARSSTDSWGKLQF

SEQ ID NO: 345974 - protein, 13 aa, Homo sapiens
  CDR3 for beta chain variable domain of TCR clone 172987 (TRBV11-2, TRBJ2-5)
CASSSTGEETQYY

SEQ ID NO: 345975 - protein, 15 aa, Homo sapiens
  CDR3 for alpha chain variable domain of TCR clone 172988 (TRAV12-1, TRAJ8)
CVVNVENTGFQKPVC

SEQ ID NO: 345976 - protein, 16 aa, Homo sapiens
  CDR3 for beta chain variable domain of TCR clone 172988 (TRBV7-2, TRBJ2-7)
CASSLEAGGPWYEQYF

SEQ ID NO: 345977 - protein, 20 aa, Homo sapiens
  CDR3 for alpha chain variable domain of TCR clone 172989 (TRAV17, TRAJ35)
CATAFVIGFGNVALRVRHSS

SEQ ID NO: 345978 - protein, 16 aa, Homo sapiens
  CDR3 for beta chain variable domain of TCR clone 172989 (TRBV11-2, TRBJ2-7)
CASSPLAGGPRYEQYF

SEQ ID NO: 345979 - protein, 12 aa, Homo sapiens
  CDR3 for alpha chain variable domain of TCR clone 172990 (TRAV1-1, TRAJ9)
CAVDTGGFKTIF

SEQ ID NO: 345980 - protein, 14 aa, Homo sapiens
  CDR3 for beta chain variable domain of TCR clone 172990 (TRBV7-8, TRBJ2-5)
CASSATWGQETQYF

SEQ ID NO: 345981 - protein, 12 aa, Homo sapiens
  CDR3 for alpha chain variable domain of TCR clone 172991 (TRAV3, TRAJ26)
CAVRDDGQNFVF

SEQ ID NO: 345982 - protein, 16 aa, Homo sapiens
  CDR3 for beta chain variable domain of TCR clone 172991 (TRBV11-2, TRBJ1-2)
CASSPSGREANYGYTF

SEQ ID NO: 345983 - protein, 11 aa, Homo sapiens
  CDR3 for alpha chain variable domain of TCR clone 172992 (TRAV21, TRAJ11)
CAVNGYSTLTF

SEQ ID NO: 345984 - protein, 14 aa, Homo sapiens
  CDR3 for beta chain variable domain of TCR clone 172992 (TRBV19, TRBJ2-7)
CASTVQGRPYEQYF

SEQ ID NO: 345985 - protein, 12 aa, Homo sapiens
  CDR3 for alpha chain variable domain of TCR clone 172993 (TRAV13-1, TRAJ16)
CAAVSDGQKLLF

SEQ ID NO: 345986 - protein, 14 aa, Homo sapiens
  CDR3 for beta chain variable domain of TCR clone 172993 (TRBV19, TRBJ2-7)
CASSMGQGAIEQYF

SEQ ID NO: 345987 - protein, 14 aa, Homo sapiens
  CDR3 for alpha chain variable domain of TCR clone 172994 (TRAV1-2, TRAJ8)
CAVREDTGFRKLVF

SEQ ID NO: 345988 - protein, 16 aa, Homo sapiens
  CDR3 for beta chain variable domain of TCR clone 172994 (TRBV7-9, TRBJ2-1)
CASSDVAGGSYNEQFF

SEQ ID NO: 345989 - protein, 14 aa, Homo sapiens
  CDR3 for alpha chain variable domain of TCR clone 172995 (TRAV13-1, TRAJ44)
CAAKATGTASKLTF

SEQ ID NO: 345990 - protein, 16 aa, Homo sapiens
  CDR3 for beta chain variable domain of TCR clone 172995 (TRBV12-4, TRBJ1-5)
CASSRPVGGSNQPQHY

SEQ ID NO: 345991 - protein, 14 aa, Homo sapiens
  CDR3 for alpha chain variable domain of TCR clone 172996 (TRAV27, TRAJ45)
CAGAQEEGLTDSPF

SEQ ID NO: 345992 - protein, 13 aa, Homo sapiens
  CDR3 for beta chain variable domain of TCR clone 172996 (TRBV7-7, TRBJ2-5)
CASSRSGQETQYF

SEQ ID NO: 345993 - protein, 13 aa, Homo sapiens
  CDR3 for alpha chain variable domain of TCR clone 172997 (TRAV13-1, TRAJ6)
CAASSGGSYIPTF

SEQ ID NO: 345994 - protein, 14 aa, Homo sapiens
  CDR3 for beta chain variable domain of TCR clone 172997 (TRBV7-2, TRBJ2-7)
CASRSQGAAYEQYF

SEQ ID NO: 345995 - protein, 13 aa, Homo sapiens
  CDR3 for alpha chain variable domain of TCR clone 172998 (TRAV12-1, TRAJ11)
CVVTLGGYSTLTF

SEQ ID NO: 345996 - protein, 13 aa, Homo sapiens
  CDR3 for beta chain variable domain of TCR clone 172998 (TRBV20-1, TRBJ1-2)
CSARDQGAYGYSF

SEQ ID NO: 345997 - protein, 14 aa, Homo sapiens
  CDR3 for alpha chain variable domain of TCR clone 172999 (TRAV1-2, TRAJ8)
CAVREDTGFQELVF

SEQ ID NO: 345998 - protein, 12 aa, Homo sapiens
  CDR3 for beta chain variable domain of TCR clone 172999 (TRBV11-2, TRBJ2-2)
CASSLPTGELFF

SEQ ID NO: 345999 - protein, 18 aa, Homo sapiens
  CDR3 for alpha chain variable domain of TCR clone 173000 (TRAV8-4, TRAJ52)
CAVTRANSGGTSYGKLTF

SEQ ID NO: 346000 - protein, 20 aa, Homo sapiens
  CDR3 for beta chain variable domain of TCR clone 173000 (TRBV19, TRBJ2-1)
CASSISRTVTSTRLNNEQFF

SEQ ID NO: 346001 - protein, 12 aa, Homo sapiens
  CDR3 for alpha chain variable domain of TCR clone 173001 (TRAV1-1, TRAJ30)
CAVRGRDDKIIF

SEQ ID NO: 346002 - protein, 13 aa, Homo sapiens
  CDR3 for beta chain variable domain of TCR clone 173001 (TRBV11-3, TRBJ2-7)
CASSLDKLYEQYC

SEQ ID NO: 346003 - protein, 15 aa, Homo sapiens
  CDR3 for alpha chain variable domain of TCR clone 173002 (TRAV12-3, TRAJ6)
CAMSATTGGSYIPTF

SEQ ID NO: 346004 - protein, 15 aa, Homo sapiens
  CDR3 for beta chain variable domain of TCR clone 173002 (TRBV7-3, TRBJ2-7)
CASSLTPTGYDEQYF

SEQ ID NO: 346005 - protein, 13 aa, Homo sapiens
  CDR3 for alpha chain variable domain of TCR clone 173003 (TRAV8-3, TRAJ48)
CAVVPFGNEKLTF

SEQ ID NO: 346006 - protein, 19 aa, Homo sapiens
  CDR3 for beta chain variable domain of TCR clone 173003 (TRBV25-1, TRBJ2-2)
CAILVYGVDRGRKTGELFF

SEQ ID NO: 346007 - protein, 14 aa, Homo sapiens
  CDR3 for alpha chain variable domain of TCR clone 173004 (TRAV16, TRAJ8)
CALILNTGFQKLVF

SEQ ID NO: 346008 - protein, 15 aa, Homo sapiens
  CDR3 for beta chain variable domain of TCR clone 173004 (TRBV7-7, TRBJ2-2)
CATSKLAKNTGELFF

SEQ ID NO: 346009 - protein, 11 aa, Homo sapiens
  CDR3 for alpha chain variable domain of TCR clone 173005 (TRAV12-3, TRAJ43)
CAMSVSNDMRF

SEQ ID NO: 346010 - protein, 15 aa, Homo sapiens
  CDR3 for beta chain variable domain of TCR clone 173005 (TRBV27, TRBJ2-1)
CGSSNGGGSSNEQFF

SEQ ID NO: 346011 - protein, 15 aa, Homo sapiens
  CDR3 for alpha chain variable domain of TCR clone 173006 (TRAV2, TRAJ9)
CAVEDRGTGGVKTIF

SEQ ID NO: 346012 - protein, 14 aa, Homo sapiens
  CDR3 for beta chain variable domain of TCR clone 173006 (TRBV4-1, TRBJ2-2)
CASSQAVNTGELFF

SEQ ID NO: 346013 - protein, 17 aa, Homo sapiens
  CDR3 for alpha chain variable domain of TCR clone 173007 (TRAV3, TRAJ12)
CAVRDGGRMDSSYKLIF

SEQ ID NO: 346014 - protein, 13 aa, Homo sapiens
  CDR3 for beta chain variable domain of TCR clone 173007 (TRBV20-1, TRBJ1-1)
CSAPLGGDTEAFF

SEQ ID NO: 346015 - protein, 15 aa, Homo sapiens
  CDR3 for alpha chain variable domain of TCR clone 173008 (TRAV25, TRAJ52)
CAGRPGGTSYGKLTF

SEQ ID NO: 346016 - protein, 12 aa, Homo sapiens
  CDR3 for beta chain variable domain of TCR clone 173008 (TRBV7-8, TRBJ2-7)
SASSLGDREQYF

SEQ ID NO: 346017 - protein, 15 aa, Homo sapiens
  CDR3 for alpha chain variable domain of TCR clone 173009 (TRAV3, TRAJ47)
CAVRDIGEYGNKLVC

SEQ ID NO: 346018 - protein, 14 aa, Homo sapiens
  CDR3 for beta chain variable domain of TCR clone 173009 (TRBV13, TRBJ2-5)
CASSLERVGENQYF

SEQ ID NO: 346019 - protein, 15 aa, Homo sapiens
  CDR3 for alpha chain variable domain of TCR clone 173010 (TRAV3, TRAJ22)
CAVRARGGSTRQLTF

SEQ ID NO: 346020 - protein, 16 aa, Homo sapiens
  CDR3 for beta chain variable domain of TCR clone 173010 (TRBV5-4, TRBJ2-3)
CASQQPGAGGADTQYF

SEQ ID NO: 346021 - protein, 11 aa, Homo sapiens
  CDR3 for alpha chain variable domain of TCR clone 173011 (TRAV4, TRAJ28)
CLVGDNRAETL

SEQ ID NO: 346022 - protein, 16 aa, Homo sapiens
  CDR3 for beta chain variable domain of TCR clone 173011 (TRBV2, TRBJ2-3)
CASSTSVEGVTDTQYF

SEQ ID NO: 346023 - protein, 13 aa, Homo sapiens
  CDR3 for alpha chain variable domain of TCR clone 173012 (TRAV13-2, TRAJ40)
CAEFTSGTYKCIF

SEQ ID NO: 346024 - protein, 14 aa, Homo sapiens
  CDR3 for beta chain variable domain of TCR clone 173012 (TRBV10-2, TRBJ1-5)
RASSSTGRNQPQHF

SEQ ID NO: 346025 - protein, 21 aa, Homo sapiens
  CDR3 for alpha chain variable domain of TCR clone 173013 (TRAV12-1, TRAJ37)
CVVNGGLWQHTQTNLWARDNF

SEQ ID NO: 346026 - protein, 12 aa, Homo sapiens
  CDR3 for beta chain variable domain of TCR clone 173013 (TRBV20-1, TRBJ1-2)
CSAPGFNYGYTF

SEQ ID NO: 346027 - protein, 14 aa, Homo sapiens
  CDR3 for alpha chain variable domain of TCR clone 173014 (TRAV1-2, TRAJ16)
CAVNRVSDGQKLLF

SEQ ID NO: 346028 - protein, 15 aa, Homo sapiens
  CDR3 for beta chain variable domain of TCR clone 173014 (TRBV9, TRBJ1-6)
CASSSAGTGDSPLHF

SEQ ID NO: 346029 - protein, 17 aa, Homo sapiens
  CDR3 for alpha chain variable domain of TCR clone 173015 (TRAV36/DV7, TRAJ42)
CAGGGMNYGGSQGNLIF

SEQ ID NO: 346030 - protein, 15 aa, Homo sapiens
  CDR3 for beta chain variable domain of TCR clone 173015 (TRBV6-3, TRBJ2-7)
CASSSPGTVFYEQYF

SEQ ID NO: 346031 - protein, 13 aa, Homo sapiens
  CDR3 for alpha chain variable domain of TCR clone 173016 (TRAV21, TRAJ37)
CAVSPGNTGKLIF

SEQ ID NO: 346032 - protein, 17 aa, Homo sapiens
  CDR3 for beta chain variable domain of TCR clone 173016 (TRBV5-1, TRBJ2-5)
CASSLRGLAANQETQYF

SEQ ID NO: 346033 - protein, 17 aa, Homo sapiens
  CDR3 for alpha chain variable domain of TCR clone 173017 (TRAV3, TRAJ6)
CAVRDGPRAGGSYLPTL

SEQ ID NO: 346034 - protein, 14 aa, Homo sapiens
  CDR3 for beta chain variable domain of TCR clone 173017 (TRBV7-2, TRBJ2-7)
CASSPKTSFYEQYF

SEQ ID NO: 346035 - protein, 12 aa, Homo sapiens
  CDR3 for alpha chain variable domain of TCR clone 173018 (TRAV23/DV6, TRAJ17)
CARGSCRQQANF

SEQ ID NO: 346036 - protein, 14 aa, Homo sapiens
  CDR3 for beta chain variable domain of TCR clone 173018 (TRBV7-2, TRBJ1-2)
CASSQTGSTYGYIF

SEQ ID NO: 346037 - protein, 14 aa, Homo sapiens
  CDR3 for alpha chain variable domain of TCR clone 173019 (TRAV3, TRAJ32)
CCERRAGATNKLIF

SEQ ID NO: 346038 - protein, 13 aa, Homo sapiens
  CDR3 for beta chain variable domain of TCR clone 173019 (TRBV12-5, TRBJ2-3)
CASGDRQSDTQYF

SEQ ID NO: 346039 - protein, 15 aa, Homo sapiens
  CDR3 for alpha chain variable domain of TCR clone 173020 (TRAV3, TRAJ29)
CIVRVEGSGNTPLVF

SEQ ID NO: 346040 - protein, 15 aa, Homo sapiens
  CDR3 for beta chain variable domain of TCR clone 173020 (TRBV7-9, TRBJ1-5)
CASSQGHQPNQPQHF

SEQ ID NO: 346041 - protein, 17 aa, Homo sapiens
  CDR3 for alpha chain variable domain of TCR clone 173021 (TRAV3, TRAJ42)
CAVRDRDYGGSQGNLSF

SEQ ID NO: 346042 - protein, 13 aa, Homo sapiens
  CDR3 for beta chain variable domain of TCR clone 173021 (TRBV4-1, TRBJ2-3)
CASSQPPTDTQYF

SEQ ID NO: 346043 - protein, 16 aa, Homo sapiens
  CDR3 for alpha chain variable domain of TCR clone 173022 (TRAV3, TRAJ18)
CAVRDGRGSTLGRLYF

SEQ ID NO: 346044 - protein, 15 aa, Homo sapiens
  CDR3 for beta chain variable domain of TCR clone 173022 (TRBV7-9, TRBJ1-6)
CASSSPGRGNSPIHF

SEQ ID NO: 346045 - protein, 13 aa, Homo sapiens
  CDR3 for alpha chain variable domain of TCR clone 173023 (TRAV27, TRAJ41)
CAGEGNSGYALNF

SEQ ID NO: 346046 - protein, 14 aa, Homo sapiens
  CDR3 for beta chain variable domain of TCR clone 173023 (TRBV7-2, TRBJ2-5)
CASSFTQGQETQYF

SEQ ID NO: 346047 - protein, 21 aa, Homo sapiens
  CDR3 for alpha chain variable domain of TCR clone 173024 (TRAV13-1, TRAJ6)
CAASRGGATYLHLEEEPALLF

SEQ ID NO: 346048 - protein, 14 aa, Homo sapiens
  CDR3 for beta chain variable domain of TCR clone 173024 (TRBV7-2, TRBJ2-5)
CASSFGGAQETQYF

SEQ ID NO: 346049 - protein, 12 aa, Homo sapiens
  CDR3 for alpha chain variable domain of TCR clone 173025 (TRAV12-1, TRAJ40)
CVVYSGTYKYIF

SEQ ID NO: 346050 - protein, 17 aa, Homo sapiens
  CDR3 for beta chain variable domain of TCR clone 173025 (TRBV19, TRBJ2-7)
CASSISFYDSYPYEQYF

SEQ ID NO: 346051 - protein, 14 aa, Homo sapiens
  CDR3 for alpha chain variable domain of TCR clone 173026 (TRAV12-1, TRAJ30)
CVVNIGGRDDKIIF

SEQ ID NO: 346052 - protein, 12 aa, Homo sapiens
  CDR3 for beta chain variable domain of TCR clone 173026 (TRBV7-9, TRBJ2-7)
CASSLEGYEQYF

SEQ ID NO: 346053 - protein, 12 aa, Homo sapiens
  CDR3 for alpha chain variable domain of TCR clone 173027 (TRAV4, TRAJ22)
CLVGDINYFFWF

SEQ ID NO: 346054 - protein, 13 aa, Homo sapiens
  CDR3 for beta chain variable domain of TCR clone 173027 (TRBV19, TRBJ1-2)
CASSVPGQDGYTF

SEQ ID NO: 346055 - protein, 15 aa, Homo sapiens
  CDR3 for alpha chain variable domain of TCR clone 173028 (TRAV1-2, TRAJ18)
CAVRDRGSTLGRLYF

SEQ ID NO: 346056 - protein, 15 aa, Homo sapiens
  CDR3 for beta chain variable domain of TCR clone 173028 (TRBV10-2, TRBJ2-6)
CASSEQGTGANVLTF

SEQ ID NO: 346057 - protein, 23 aa, Homo sapiens
  CDR3 for alpha chain variable domain of TCR clone 173029 (TRAV8-3, TRAJ32)
CAVGPYGGATTSSSLELALCLLS

SEQ ID NO: 346058 - protein, 14 aa, Homo sapiens
  CDR3 for beta chain variable domain of TCR clone 173029 (TRBV29-1, TRBJ2-2)
CSVLAETNTGELFF

SEQ ID NO: 346059 - protein, 11 aa, Homo sapiens
  CDR3 for alpha chain variable domain of TCR clone 173030 (TRAV6, TRAJ32)
CASRCYNKAHL

SEQ ID NO: 346060 - protein, 14 aa, Homo sapiens
  CDR3 for beta chain variable domain of TCR clone 173030 (TRBV5-5, TRBJ1-2)
CASSLDPYNYGYTF

SEQ ID NO: 346061 - protein, 18 aa, Homo sapiens
  CDR3 for alpha chain variable domain of TCR clone 173031 (TRAV21, TRAJ52)
CAVRPSPAGGTSYGKLTF

SEQ ID NO: 346062 - protein, 15 aa, Homo sapiens
  CDR3 for beta chain variable domain of TCR clone 173031 (TRBV27, TRBJ1-4)
CASSAQQDLNEKLFF

SEQ ID NO: 346063 - protein, 14 aa, Homo sapiens
  CDR3 for alpha chain variable domain of TCR clone 173032 (TRAV12-2, TRAJ13)
CAVKKTGGYQKVTF

SEQ ID NO: 346064 - protein, 16 aa, Homo sapiens
  CDR3 for beta chain variable domain of TCR clone 173032 (TRBV4-1, TRBJ2-3)
CASSQSTSGAEDKQYF

SEQ ID NO: 346065 - protein, 14 aa, Homo sapiens
  CDR3 for alpha chain variable domain of TCR clone 173033 (TRAV13-1, TRAJ35)
FAASKGGLGNVLHC

SEQ ID NO: 346066 - protein, 13 aa, Homo sapiens
  CDR3 for beta chain variable domain of TCR clone 173033 (TRBV7-3, TRBJ1-1)
CASSQDWGAEAFF

SEQ ID NO: 346067 - protein, 13 aa, Homo sapiens
  CDR3 for alpha chain variable domain of TCR clone 173034 (TRAV13-1, TRAJ11)
CAASIRGYSTLTF

SEQ ID NO: 346068 - protein, 13 aa, Homo sapiens
  CDR3 for beta chain variable domain of TCR clone 173034 (TRBV7-9, TRBJ1-2)
CASSLKQNYGYTF

SEQ ID NO: 346069 - protein, 16 aa, Homo sapiens
  CDR3 for alpha chain variable domain of TCR clone 173035 (TRAV12-3, TRAJ58)
CAMTDTEETSGSRLTF

SEQ ID NO: 346070 - protein, 14 aa, Homo sapiens
  CDR3 for beta chain variable domain of TCR clone 173035 (TRBV23-1, TRBJ2-7)
CASSRRLDSGQGYV

SEQ ID NO: 346071 - protein, 13 aa, Homo sapiens
  CDR3 for alpha chain variable domain of TCR clone 173036 (TRAV8-3, TRAJ36)
CAVGATGSNNLSF

SEQ ID NO: 346072 - protein, 16 aa, Homo sapiens
  CDR3 for beta chain variable domain of TCR clone 173036 (TRBV20-1, TRBJ1-4)
CSAPGQGLLTNEKLFF

SEQ ID NO: 346073 - protein, 15 aa, Homo sapiens
  CDR3 for alpha chain variable domain of TCR clone 173037 (TRAV27, TRAJ34)
CRGGLGDYNTDKLIF

SEQ ID NO: 346074 - protein, 14 aa, Homo sapiens
  CDR3 for beta chain variable domain of TCR clone 173037 (TRBV7-2, TRBJ2-7)
CASSPKTSFYEHYF

SEQ ID NO: 346075 - protein, 14 aa, Homo sapiens
  CDR3 for alpha chain variable domain of TCR clone 173038 (TRAV1-2, TRAJ8)
CAVREDTGVQKLVF

SEQ ID NO: 346076 - protein, 15 aa, Homo sapiens
  CDR3 for beta chain variable domain of TCR clone 173038 (TRBV6-3, TRBJ2-7)
CASSAPGTVFYEQYF

SEQ ID NO: 346077 - protein, 12 aa, Homo sapiens
  CDR3 for alpha chain variable domain of TCR clone 173039 (TRAV26-1, TRAJ53)
CIEGGSNYKLTF

SEQ ID NO: 346078 - protein, 12 aa, Homo sapiens
  CDR3 for beta chain variable domain of TCR clone 173039 (TRBV2, TRBJ2-7)
CASTYRTDEQYF

SEQ ID NO: 346079 - protein, 15 aa, Homo sapiens
  CDR3 for alpha chain variable domain of TCR clone 173040 (TRAV23/DV6, TRAJ18)
CTARYRGSTLGRLYF

SEQ ID NO: 346080 - protein, 13 aa, Homo sapiens
  CDR3 for beta chain variable domain of TCR clone 173040 (TRBV7-2, TRBJ2-7)
CASSSPSGSEQYL

SEQ ID NO: 346081 - protein, 14 aa, Homo sapiens
  CDR3 for alpha chain variable domain of TCR clone 173041 (TRAV12-2, TRAJ40)
CAVKIPSGTYKYIF

SEQ ID NO: 346082 - protein, 15 aa, Homo sapiens
  CDR3 for beta chain variable domain of TCR clone 173041 (TRBV2, TRBJ2-7)
CASSEGLARPYEQYF

SEQ ID NO: 346083 - protein, 13 aa, Homo sapiens
  CDR3 for alpha chain variable domain of TCR clone 173042 (TRAV2, TRAJ16)
CAVEFGDGQKLLF

SEQ ID NO: 346084 - protein, 14 aa, Homo sapiens
  CDR3 for beta chain variable domain of TCR clone 173042 (TRBV20-1, TRBJ1-1)
CSAMGGTANTEAFF

SEQ ID NO: 346085 - protein, 19 aa, Homo sapiens
  CDR3 for alpha chain variable domain of TCR clone 173043 (TRAV21, TRAJ20)
SLVTPPPTSVLPNDYKLSF

SEQ ID NO: 346086 - protein, 14 aa, Homo sapiens
  CDR3 for beta chain variable domain of TCR clone 173043 (TRBV7-2, TRBJ1-3)
CASSRLRSGNTMYF

SEQ ID NO: 346087 - protein, 14 aa, Homo sapiens
  CDR3 for alpha chain variable domain of TCR clone 173044 (TRAV1-2, TRAJ16)
CAVNRFSDGQKLLF

SEQ ID NO: 346088 - protein, 15 aa, Homo sapiens
  CDR3 for beta chain variable domain of TCR clone 173044 (TRBV6-1, TRBJ1-2)
CASSDGGAANYGYTF

SEQ ID NO: 346089 - protein, 15 aa, Homo sapiens
  CDR3 for alpha chain variable domain of TCR clone 173045 (TRAV3, TRAJ9)
CAVRARHTGGFKTIL

SEQ ID NO: 346090 - protein, 12 aa, Homo sapiens
  CDR3 for beta chain variable domain of TCR clone 173045 (TRBV11-2, TRBJ2-7)
CASSLPTYEQYF

SEQ ID NO: 346091 - protein, 16 aa, Homo sapiens
  CDR3 for alpha chain variable domain of TCR clone 173046 (TRAV3, TRAJ18)
CAARDGRGSTRGRLYF

SEQ ID NO: 346092 - protein, 15 aa, Homo sapiens
  CDR3 for beta chain variable domain of TCR clone 173046 (TRBV7-9, TRBJ1-6)
CASSSPGRGNSPLHF

SEQ ID NO: 346093 - protein, 16 aa, Homo sapiens
  CDR3 for alpha chain variable domain of TCR clone 173047 (TRAV12-3, TRAJ53)
CAMSPGSGGSNYKLTF

SEQ ID NO: 346094 - protein, 17 aa, Homo sapiens
  CDR3 for beta chain variable domain of TCR clone 173047 (TRBV11-2, TRBJ2-3)
CQQRRGASRGAPNTQYF

SEQ ID NO: 346095 - protein, 13 aa, Homo sapiens
  CDR3 for alpha chain variable domain of TCR clone 173048 (TRAV8-3, TRAJ28)
CAVGAVGSYQLTL

SEQ ID NO: 346096 - protein, 14 aa, Homo sapiens
  CDR3 for beta chain variable domain of TCR clone 173048 (TRBV7-2, TRBJ2-7)
CASRSQVAAYEQYF

SEQ ID NO: 346097 - protein, 14 aa, Homo sapiens
  CDR3 for alpha chain variable domain of TCR clone 173049 (TRAV12-3, TRAJ15)
CAMIPPQAGTALIL

SEQ ID NO: 346098 - protein, 14 aa, Homo sapiens
  CDR3 for beta chain variable domain of TCR clone 173049 (TRBV20-1, TRBJ2-2)
CSARRRLATGELFF

SEQ ID NO: 346099 - protein, 10 aa, Homo sapiens
  CDR3 for alpha chain variable domain of TCR clone 173050 (TRAV23/DV6, TRAJ57)
CAASSTLSRG

SEQ ID NO: 346100 - protein, 14 aa, Homo sapiens
  CDR3 for beta chain variable domain of TCR clone 173050 (TRBV25-1, TRBJ1-1)
CASTHLGGNTEALF

SEQ ID NO: 346101 - protein, 12 aa, Homo sapiens
  CDR3 for alpha chain variable domain of TCR clone 173051 (TRAV16, TRAJ10)
CSRTGGGNKLTF

SEQ ID NO: 346102 - protein, 11 aa, Homo sapiens
  CDR3 for beta chain variable domain of TCR clone 173051 (TRBV20-1, TRBJ2-5)
CSADRAETQYF

SEQ ID NO: 346103 - protein, 18 aa, Homo sapiens
  CDR3 for alpha chain variable domain of TCR clone 173052 (TRAV17, TRAJ39)
CFLLLSTDPVRAGNMLTF

SEQ ID NO: 346104 - protein, 15 aa, Homo sapiens
  CDR3 for beta chain variable domain of TCR clone 173052 (TRBV13, TRBJ1-5)
CASSFGQGGVQPQHF

SEQ ID NO: 346105 - protein, 14 aa, Homo sapiens
  CDR3 for alpha chain variable domain of TCR clone 173053 (TRAV17, TRAJ54)
CATDANQGAQKLVF

SEQ ID NO: 346106 - protein, 11 aa, Homo sapiens
  CDR3 for beta chain variable domain of TCR clone 173053 (TRBV6-3, TRBJ2-1)
CSSGSYNEQFF

SEQ ID NO: 346107 - protein, 15 aa, Homo sapiens
  CDR3 for alpha chain variable domain of TCR clone 173054 (TRAV8-3, TRAJ27)
CAVGPSKTNAGKSTF

SEQ ID NO: 346108 - protein, 14 aa, Homo sapiens
  CDR3 for beta chain variable domain of TCR clone 173054 (TRBV11-2, TRBJ2-3)
CASSRLVRTDTQYF

SEQ ID NO: 346109 - protein, 14 aa, Homo sapiens
  CDR3 for alpha chain variable domain of TCR clone 173055 (TRAV26-1, TRAJ34)
CIVRVAYNTDKLIF

SEQ ID NO: 346110 - protein, 14 aa, Homo sapiens
  CDR3 for beta chain variable domain of TCR clone 173055 (TRBV20-1, TRBJ1-1)
CSAQTRIGGTEAFF

SEQ ID NO: 346111 - protein, 12 aa, Homo sapiens
  CDR3 for alpha chain variable domain of TCR clone 173056 (TRAV12-3, TRAJ17)
CAMTLTGNKLTF

SEQ ID NO: 346112 - protein, 15 aa, Homo sapiens
  CDR3 for beta chain variable domain of TCR clone 173056 (TRBV12-4, TRBJ1-2)
CASSLAHRDGQAYTF

SEQ ID NO: 346113 - protein, 14 aa, Homo sapiens
  CDR3 for alpha chain variable domain of TCR clone 173057 (TRAV2, TRAJ41)
CAVGTSNSGYAFNF

SEQ ID NO: 346114 - protein, 13 aa, Homo sapiens
  CDR3 for beta chain variable domain of TCR clone 173057 (TRBV4-1, TRBJ2-1)
CASSQEVQYEQFF

SEQ ID NO: 346115 - protein, 11 aa, Homo sapiens
  CDR3 for alpha chain variable domain of TCR clone 173058 (TRAV27, TRAJ9)
CRRVWGFKTIF

SEQ ID NO: 346116 - protein, 18 aa, Homo sapiens
  CDR3 for beta chain variable domain of TCR clone 173058 (TRBV10-2, TRBJ2-2)
CISAPAVHRQADAGELFF

SEQ ID NO: 346117 - protein, 15 aa, Homo sapiens
  CDR3 for alpha chain variable domain of TCR clone 173059 (TRAV20, TRAJ53)
CAVQASGGSNYKLTF

SEQ ID NO: 346118 - protein, 17 aa, Homo sapiens
  CDR3 for beta chain variable domain of TCR clone 173059 (TRBV4-1, TRBJ1-4)
CASSQEGPRGVEEKLFF

SEQ ID NO: 346119 - protein, 13 aa, Homo sapiens
  CDR3 for alpha chain variable domain of TCR clone 173060 (TRAV27, TRAJ37)
CAGGPRNTGKLIF

SEQ ID NO: 346120 - protein, 14 aa, Homo sapiens
  CDR3 for beta chain variable domain of TCR clone 173060 (TRBV7-8, TRBJ1-5)
CASSLGAFNQPQHF

SEQ ID NO: 346121 - protein, 15 aa, Homo sapiens
  CDR3 for alpha chain variable domain of TCR clone 173061 (TRAV35, TRAJ23)
CAGQRGYNQGGKLIF

SEQ ID NO: 346122 - protein, 16 aa, Homo sapiens
  CDR3 for beta chain variable domain of TCR clone 173061 (TRBV27, TRBJ2-1)
CASSSRLAGNYNEQLF

SEQ ID NO: 346123 - protein, 13 aa, Homo sapiens
  CDR3 for alpha chain variable domain of TCR clone 173062 (TRAV12-2, TRAJ9)
CAVLETGGFKTIL

SEQ ID NO: 346124 - protein, 15 aa, Homo sapiens
  CDR3 for beta chain variable domain of TCR clone 173062 (TRBV6-3, TRBJ2-7)
CASSRTGVNLYEQYF

SEQ ID NO: 346125 - protein, 18 aa, Homo sapiens
  CDR3 for alpha chain variable domain of TCR clone 173063 (TRAV8-6, TRAJ36)
CAVSDGPREWGKQPLLWD

SEQ ID NO: 346126 - protein, 16 aa, Homo sapiens
  CDR3 for beta chain variable domain of TCR clone 173063 (TRBV28, TRBJ2-1)
CASSSPEYPRDNEQFF

SEQ ID NO: 346127 - protein, 14 aa, Homo sapiens
  CDR3 for alpha chain variable domain of TCR clone 173064 (TRAV26-1, TRAJ40)
CIVRVARGNYKYNF

SEQ ID NO: 346128 - protein, 14 aa, Homo sapiens
  CDR3 for beta chain variable domain of TCR clone 173064 (TRBV7-3, TRBJ2-7)
CASSLKADSYEQYF

SEQ ID NO: 346129 - protein, 13 aa, Homo sapiens
  CDR3 for alpha chain variable domain of TCR clone 173065 (TRAV13-2, TRAJ13)
CAERPGGYQKVTF

SEQ ID NO: 346130 - protein, 15 aa, Homo sapiens
  CDR3 for beta chain variable domain of TCR clone 173065 (TRBV20-1, TRBJ2-7)
CSARVPAAYFYEQYF

SEQ ID NO: 346131 - protein, 17 aa, Homo sapiens
  CDR3 for alpha chain variable domain of TCR clone 173066 (TRAV27, TRAJ42)
CAERVIYYGGSQGNVIF

SEQ ID NO: 346132 - protein, 14 aa, Homo sapiens
  CDR3 for beta chain variable domain of TCR clone 173066 (TRBV6-6, TRBJ2-3)
CASRLQREADTQYF

SEQ ID NO: 346133 - protein, 16 aa, Homo sapiens
  CDR3 for alpha chain variable domain of TCR clone 173067 (TRAV4, TRAJ22)
CLVGDLYSGSSRQLTF

SEQ ID NO: 346134 - protein, 16 aa, Homo sapiens
  CDR3 for beta chain variable domain of TCR clone 173067 (TRBV20-1, TRBJ1-4)
CSAPGQGLLTNEKLFF

SEQ ID NO: 346135 - protein, 16 aa, Homo sapiens
  CDR3 for alpha chain variable domain of TCR clone 173068 (TRAV14/DV4, TRAJ53)
CAMREGGGGSNYKLTF

SEQ ID NO: 346136 - protein, 16 aa, Homo sapiens
  CDR3 for beta chain variable domain of TCR clone 173068 (TRBV4-1, TRBJ2-3)
CASSQSTSGAEDTQYF

SEQ ID NO: 346137 - protein, 11 aa, Homo sapiens
  CDR3 for alpha chain variable domain of TCR clone 173069 (TRAV3, TRAJ21)
CALGNFNKFYF

SEQ ID NO: 346138 - protein, 16 aa, Homo sapiens
  CDR3 for beta chain variable domain of TCR clone 173069 (TRBV19, TRBJ2-1)
CASSKARPSSYNEQFF

SEQ ID NO: 346139 - protein, 16 aa, Homo sapiens
  CDR3 for alpha chain variable domain of TCR clone 173070 (TRAV14/DV4, TRAJ15)
CAMREGPAQAGTALIF

SEQ ID NO: 346140 - protein, 12 aa, Homo sapiens
  CDR3 for beta chain variable domain of TCR clone 173070 (TRBV28, TRBJ2-6)
CAIQAGADVLTF

SEQ ID NO: 346141 - protein, 12 aa, Homo sapiens
  CDR3 for alpha chain variable domain of TCR clone 173071 (TRAV27, TRAJ33)
CAGDGSNYQLIW

SEQ ID NO: 346142 - protein, 15 aa, Homo sapiens
  CDR3 for beta chain variable domain of TCR clone 173071 (TRBV6-5, TRBJ2-7)
CASSYSTSGNYEQHF

SEQ ID NO: 346143 - protein, 15 aa, Homo sapiens
  CDR3 for alpha chain variable domain of TCR clone 173072 (TRAV8-6, TRAJ23)
CAVREFYNQGGKLIS

SEQ ID NO: 346144 - protein, 15 aa, Homo sapiens
  CDR3 for beta chain variable domain of TCR clone 173072 (TRBV20-1, TRBJ2-1)
CSAITGTSGSNEQFF

SEQ ID NO: 346145 - protein, 12 aa, Homo sapiens
  CDR3 for alpha chain variable domain of TCR clone 173073 (TRAV13-1, TRAJ34)
CAASKGTGKLIF

SEQ ID NO: 346146 - protein, 15 aa, Homo sapiens
  CDR3 for beta chain variable domain of TCR clone 173073 (TRBV7-3, TRBJ2-1)
CQQLQTSGRYNEQFF

SEQ ID NO: 346147 - protein, 12 aa, Homo sapiens
  CDR3 for alpha chain variable domain of TCR clone 173074 (TRAV17, TRAJ57)
CATDGGSEKLVF

SEQ ID NO: 346148 - protein, 13 aa, Homo sapiens
  CDR3 for beta chain variable domain of TCR clone 173074 (TRBV19, TRBJ2-7)
CASSPRQSYEQYF

SEQ ID NO: 346149 - protein, 13 aa, Homo sapiens
  CDR3 for alpha chain variable domain of TCR clone 173075 (TRAV21, TRAJ26)
CAVLDNYGQNFVF

SEQ ID NO: 346150 - protein, 16 aa, Homo sapiens
  CDR3 for beta chain variable domain of TCR clone 173075 (TRBV29-1, TRBJ2-2)
CSVETRASGNTWELFF

SEQ ID NO: 346151 - protein, 12 aa, Homo sapiens
  CDR3 for alpha chain variable domain of TCR clone 173076 (TRAV21, TRAJ12)
CAVMDSSYKLIF

SEQ ID NO: 346152 - protein, 16 aa, Homo sapiens
  CDR3 for beta chain variable domain of TCR clone 173076 (TRBV7-9, TRBJ2-5)
GASRLEIGTRKETQYF

SEQ ID NO: 346153 - protein, 16 aa, Homo sapiens
  CDR3 for alpha chain variable domain of TCR clone 173077 (TRAV12-1, TRAJ42)
CVVTPYYGGSQGNLIF

SEQ ID NO: 346154 - protein, 14 aa, Homo sapiens
  CDR3 for beta chain variable domain of TCR clone 173077 (TRBV19, TRBJ2-5)
CASSMTGQQETQYF

SEQ ID NO: 346155 - protein, 13 aa, Homo sapiens
  CDR3 for alpha chain variable domain of TCR clone 173078 (TRAV16, TRAJ26)
CITVLCLGQNFVF

SEQ ID NO: 346156 - protein, 12 aa, Homo sapiens
  CDR3 for beta chain variable domain of TCR clone 173078 (TRBV11-2, TRBJ2-1)
YASSPGNNEQFF

SEQ ID NO: 346157 - protein, 16 aa, Homo sapiens
  CDR3 for alpha chain variable domain of TCR clone 173079 (TRAV3, TRAJ37)
CAARPHGSGNTGKLIF

SEQ ID NO: 346158 - protein, 14 aa, Homo sapiens
  CDR3 for beta chain variable domain of TCR clone 173079 (TRBV18, TRBJ2-5)
CASSPGVSQETQYF

SEQ ID NO: 346159 - protein, 12 aa, Homo sapiens
  CDR3 for alpha chain variable domain of TCR clone 173080 (TRAV4, TRAJ9)
CLVPTGGFKTIF

SEQ ID NO: 346160 - protein, 12 aa, Homo sapiens
  CDR3 for beta chain variable domain of TCR clone 173080 (TRBV6-5, TRBJ2-2)
CASRQITGELFF

SEQ ID NO: 346161 - protein, 15 aa, Homo sapiens
  CDR3 for alpha chain variable domain of TCR clone 173081 (TRAV29/DV5, TRAJ8)
CAASGRNTGFQKLVF

SEQ ID NO: 346162 - protein, 14 aa, Homo sapiens
  CDR3 for beta chain variable domain of TCR clone 173081 (TRBV12-5, TRBJ2-5)
CASGSRTHQETQYF

SEQ ID NO: 346163 - protein, 17 aa, Homo sapiens
  CDR3 for alpha chain variable domain of TCR clone 173082 (TRAV3, TRAJ6)
CAVRDGPRAGGSYIPTF

SEQ ID NO: 346164 - protein, 19 aa, Homo sapiens
  CDR3 for beta chain variable domain of TCR clone 173082 (TRBV4-1, TRBJ2-1)
CASSQGPLPGLGSRNEQFF

SEQ ID NO: 346165 - protein, 15 aa, Homo sapiens
  CDR3 for alpha chain variable domain of TCR clone 173083 (TRAV35, TRAJ40)
CAGQLGTSGTYKYIF

SEQ ID NO: 346166 - protein, 17 aa, Homo sapiens
  CDR3 for beta chain variable domain of TCR clone 173083 (TRBV20-1, TRBJ2-1)
CSAPPRLAGTRYNEQFF

SEQ ID NO: 346167 - protein, 15 aa, Homo sapiens
  CDR3 for alpha chain variable domain of TCR clone 173084 (TRAV13-2, TRAJ45)
CAENNSGGGADGLTF

SEQ ID NO: 346168 - protein, 13 aa, Homo sapiens
  CDR3 for beta chain variable domain of TCR clone 173084 (TRBV25-1, TRBJ2-6)
CASRGPEANVLTF

SEQ ID NO: 346169 - protein, 14 aa, Homo sapiens
  CDR3 for alpha chain variable domain of TCR clone 173085 (TRAV21, TRAJ28)
CALGSGAGSYQLTF

SEQ ID NO: 346170 - protein, 14 aa, Homo sapiens
  CDR3 for beta chain variable domain of TCR clone 173085 (TRBV18, TRBJ1-4)
CASSPGPNGEKLFF

SEQ ID NO: 346171 - protein, 16 aa, Homo sapiens
  CDR3 for alpha chain variable domain of TCR clone 173086 (TRAV3, TRAJ21)
CAVRDIERGNFNKFYF

SEQ ID NO: 346172 - protein, 13 aa, Homo sapiens
  CDR3 for beta chain variable domain of TCR clone 173086 (TRBV27, TRBJ2-7)
CACSLTTGYEQYF

SEQ ID NO: 346173 - protein, 13 aa, Homo sapiens
  CDR3 for alpha chain variable domain of TCR clone 173087 (TRAV20, TRAJ20)
CAVQALNDYKLSF

SEQ ID NO: 346174 - protein, 14 aa, Homo sapiens
  CDR3 for beta chain variable domain of TCR clone 173087 (TRBV25-1, TRBJ1-1)
CASTHLGGNTEAFF

SEQ ID NO: 346175 - protein, 15 aa, Homo sapiens
  CDR3 for alpha chain variable domain of TCR clone 173088 (TRAV27, TRAJ20)
CAGSSVRSNDYKLSF

SEQ ID NO: 346176 - protein, 17 aa, Homo sapiens
  CDR3 for beta chain variable domain of TCR clone 173088 (TRBV11-2, TRBJ2-1)
CASSLYPPGVEYNEQFF

SEQ ID NO: 346177 - protein, 16 aa, Homo sapiens
  CDR3 for alpha chain variable domain of TCR clone 173089 (TRAV3, TRAJ37)
CAVRVRGSGNTGKLIF

SEQ ID NO: 346178 - protein, 16 aa, Homo sapiens
  CDR3 for beta chain variable domain of TCR clone 173089 (TRBV2, TRBJ2-3)
CASSTSVEGVTDTQYF

SEQ ID NO: 346179 - protein, 10 aa, Homo sapiens
  CDR3 for alpha chain variable domain of TCR clone 173090 (TRAV12-3, TRAJ49)
CAMNDDQFYF

SEQ ID NO: 346180 - protein, 13 aa, Homo sapiens
  CDR3 for beta chain variable domain of TCR clone 173090 (TRBV7-2, TRBJ2-2)
CASSLAVTGELFF

SEQ ID NO: 346181 - protein, 14 aa, Homo sapiens
  CDR3 for alpha chain variable domain of TCR clone 173091 (TRAV12-2, TRAJ13)
CAVKKTGGYQKVTF

SEQ ID NO: 346182 - protein, 16 aa, Homo sapiens
  CDR3 for beta chain variable domain of TCR clone 173091 (TRBV4-1, TRBJ2-3)
CASSPSTSGAEDTQYF

SEQ ID NO: 346183 - protein, 16 aa, Homo sapiens
  CDR3 for alpha chain variable domain of TCR clone 173092 (TRAV12-3, TRAJ53)
CAMSPGGGGSNNKLTF

SEQ ID NO: 346184 - protein, 17 aa, Homo sapiens
  CDR3 for beta chain variable domain of TCR clone 173092 (TRBV28, TRBJ2-5)
CASSTPEGDALQETQYF

SEQ ID NO: 346185 - protein, 15 aa, Homo sapiens
  CDR3 for alpha chain variable domain of TCR clone 173093 (TRAV25, TRAJ53)
CPTSNSGGSNYKLTF

SEQ ID NO: 346186 - protein, 13 aa, Homo sapiens
  CDR3 for beta chain variable domain of TCR clone 173093 (TRBV20-1, TRBJ1-1)
CSAGTVGNAEAFF

SEQ ID NO: 346187 - protein, 16 aa, Homo sapiens
  CDR3 for alpha chain variable domain of TCR clone 173094 (TRAV27, TRAJ52)
CAGAPAGGTGYGKLTF

SEQ ID NO: 346188 - protein, 12 aa, Homo sapiens
  CDR3 for beta chain variable domain of TCR clone 173094 (TRBV27, TRBJ2-1)
CASRGFYNEQFF

SEQ ID NO: 346189 - protein, 14 aa, Homo sapiens
  CDR3 for alpha chain variable domain of TCR clone 173095 (TRAV29/DV5, TRAJ36)
CAARRKTGANNLFF

SEQ ID NO: 346190 - protein, 14 aa, Homo sapiens
  CDR3 for beta chain variable domain of TCR clone 173095 (TRBV12-5, TRBJ2-5)
CASGSRRHQETQYF

SEQ ID NO: 346191 - protein, 13 aa, Homo sapiens
  CDR3 for alpha chain variable domain of TCR clone 173096 (TRAV17, TRAJ9)
CATDYTGGFKTYF

SEQ ID NO: 346192 - protein, 14 aa, Homo sapiens
  CDR3 for beta chain variable domain of TCR clone 173096 (TRBV19, TRBJ2-5)
CASSMTGQQETQYF

SEQ ID NO: 346193 - protein, 15 aa, Homo sapiens
  CDR3 for alpha chain variable domain of TCR clone 173097 (TRAV12-2, TRAJ53)
CAVNGGGGSNYKLTF

SEQ ID NO: 346194 - protein, 17 aa, Homo sapiens
  CDR3 for beta chain variable domain of TCR clone 173097 (TRBV18, TRBJ2-1)
CASSPRVAGGSYNEQFF

SEQ ID NO: 346195 - protein, 15 aa, Homo sapiens
  CDR3 for alpha chain variable domain of TCR clone 173098 (TRAV17, TRAJ57)
CATGPSQGGSEKLVF

SEQ ID NO: 346196 - protein, 15 aa, Homo sapiens
  CDR3 for beta chain variable domain of TCR clone 173098 (TRBV12-4, TRBJ1-5)
CQQQPVGGSNQPQHF

SEQ ID NO: 346197 - protein, 13 aa, Homo sapiens
  CDR3 for alpha chain variable domain of TCR clone 173099 (TRAV13-1, TRAJ48)
CAAASFGDEKLTF

SEQ ID NO: 346198 - protein, 14 aa, Homo sapiens
  CDR3 for beta chain variable domain of TCR clone 173099 (TRBV18, TRBJ2-1)
CASSPGTSETEQFF

SEQ ID NO: 346199 - protein, 12 aa, Homo sapiens
  CDR3 for alpha chain variable domain of TCR clone 173100 (TRAV17, TRAJ49)
CATVTTGNQFYF

SEQ ID NO: 346200 - protein, 17 aa, Homo sapiens
  CDR3 for beta chain variable domain of TCR clone 173100 (TRBV7-8, TRBJ2-6)
CASSAGTGGAGANVLTF

SEQ ID NO: 346201 - protein, 13 aa, Homo sapiens
  CDR3 for alpha chain variable domain of TCR clone 173101 (TRAV17, TRAJ9)
CATDYTEGFKTIF

SEQ ID NO: 346202 - protein, 14 aa, Homo sapiens
  CDR3 for beta chain variable domain of TCR clone 173101 (TRBV19, TRBJ2-5)
CASSMTGQQETQYF

SEQ ID NO: 346203 - protein, 18 aa, Homo sapiens
  CDR3 for alpha chain variable domain of TCR clone 173102 (TRAV26-1, TRAJ30)
CCELLHRQSTNRDDKIIF

SEQ ID NO: 346204 - protein, 18 aa, Homo sapiens
  CDR3 for beta chain variable domain of TCR clone 173102 (TRBV4-1, TRBJ1-5)
CASSQDPRGQGLNQPQHF

SEQ ID NO: 346205 - protein, 15 aa, Homo sapiens
  CDR3 for alpha chain variable domain of TCR clone 173103 (TRAV26-2, TRAJ50)
CILRDEETSYEKGIF

SEQ ID NO: 346206 - protein, 17 aa, Homo sapiens
  CDR3 for beta chain variable domain of TCR clone 173103 (TRBV5-7, TRBJ1-6)
CASSLAPGDTYNSPLHF

SEQ ID NO: 346207 - protein, 18 aa, Homo sapiens
  CDR3 for alpha chain variable domain of TCR clone 173104 (TRAV13-1, TRAJ52)
CAASKRSAGGTSYGKLTF

SEQ ID NO: 346208 - protein, 13 aa, Homo sapiens
  CDR3 for beta chain variable domain of TCR clone 173104 (TRBV7-2, TRBJ2-1)
CASSLGVYNEQFF

SEQ ID NO: 346209 - protein, 12 aa, Homo sapiens
  CDR3 for alpha chain variable domain of TCR clone 173105 (TRAV12-3, TRAJ17)
CAMTLAGNKLTF

SEQ ID NO: 346210 - protein, 15 aa, Homo sapiens
  CDR3 for beta chain variable domain of TCR clone 173105 (TRBV4-3, TRBJ2-5)
CASSQGTGHRETQYF

SEQ ID NO: 346211 - protein, 15 aa, Homo sapiens
  CDR3 for alpha chain variable domain of TCR clone 173106 (TRAV17, TRAJ23)
CATDAEDNQGGKLIF

SEQ ID NO: 346212 - protein, 13 aa, Homo sapiens
  CDR3 for beta chain variable domain of TCR clone 173106 (TRBV18, TRBJ1-1)
CASSPGRNTEAFF

SEQ ID NO: 346213 - protein, 23 aa, Homo sapiens
  CDR3 for alpha chain variable domain of TCR clone 173107 (TRAV30, TRAJ43)
CTLRPPSSVTQEPTSAALSNMRF

SEQ ID NO: 346214 - protein, 13 aa, Homo sapiens
  CDR3 for beta chain variable domain of TCR clone 173107 (TRBV12-4, TRBJ2-2)
CTSSITGSGELFF

SEQ ID NO: 346215 - protein, 12 aa, Homo sapiens
  CDR3 for alpha chain variable domain of TCR clone 173108 (TRAV13-1, TRAJ27)
CAAHTNASKSTF

SEQ ID NO: 346216 - protein, 14 aa, Homo sapiens
  CDR3 for beta chain variable domain of TCR clone 173108 (TRBV19, TRBJ2-2)
CASSGQGIAGELFF

SEQ ID NO: 346217 - protein, 11 aa, Homo sapiens
  CDR3 for alpha chain variable domain of TCR clone 173109 (TRAV17, TRAJ31)
CATSNNARLMF

SEQ ID NO: 346218 - protein, 16 aa, Homo sapiens
  CDR3 for beta chain variable domain of TCR clone 173109 (TRBV7-8, TRBJ2-4)
CASIAERTLAKNIQYF

SEQ ID NO: 346219 - protein, 14 aa, Homo sapiens
  CDR3 for alpha chain variable domain of TCR clone 173110 (TRAV4, TRAJ9)
CLVGSGTGGFKTIF

SEQ ID NO: 346220 - protein, 15 aa, Homo sapiens
  CDR3 for beta chain variable domain of TCR clone 173110 (TRBV7-2, TRBJ2-1)
CASSLASGRVNEHFF

SEQ ID NO: 346221 - protein, 11 aa, Homo sapiens
  CDR3 for alpha chain variable domain of TCR clone 173111 (TRAV2, TRAJ13)
CASGGYQKVTF

SEQ ID NO: 346222 - protein, 13 aa, Homo sapiens
  CDR3 for beta chain variable domain of TCR clone 173111 (TRBV7-2, TRBJ1-1)
CASNLKGAKVAFF

SEQ ID NO: 346223 - protein, 14 aa, Homo sapiens
  CDR3 for alpha chain variable domain of TCR clone 173112 (TRAV4, TRAJ12)
CLVGDMDSSYKLIF

SEQ ID NO: 346224 - protein, 14 aa, Homo sapiens
  CDR3 for beta chain variable domain of TCR clone 173112 (TRBV27, TRBJ1-1)
CASSPGGGATEAFF

SEQ ID NO: 346225 - protein, 18 aa, Homo sapiens
  CDR3 for alpha chain variable domain of TCR clone 173113 (TRAV21, TRAJ52)
CAVRPSPAGGTSYGKLPF

SEQ ID NO: 346226 - protein, 15 aa, Homo sapiens
  CDR3 for beta chain variable domain of TCR clone 173113 (TRBV19, TRBJ1-1)
CASTSGQIQNTEAFF

SEQ ID NO: 346227 - protein, 17 aa, Homo sapiens
  CDR3 for alpha chain variable domain of TCR clone 173114 (TRAV36/DV7, TRAJ52)
CAVAQRAGGTSYGKLTF

SEQ ID NO: 346228 - protein, 14 aa, Homo sapiens
  CDR3 for beta chain variable domain of TCR clone 173114 (TRBV7-9, TRBJ2-5)
CASSLDTAQETQYF

SEQ ID NO: 346229 - protein, 13 aa, Homo sapiens
  CDR3 for alpha chain variable domain of TCR clone 173115 (TRAV27, TRAJ53)
CAGQGGSNYKLTF

SEQ ID NO: 346230 - protein, 14 aa, Homo sapiens
  CDR3 for beta chain variable domain of TCR clone 173115 (TRBV10-2, TRBJ1-3)
CASTRTDTGNTMYF

SEQ ID NO: 346231 - protein, 14 aa, Homo sapiens
  CDR3 for alpha chain variable domain of TCR clone 173116 (TRAV34, TRAJ44)
CGADGTGTASKLTF

SEQ ID NO: 346232 - protein, 16 aa, Homo sapiens
  CDR3 for beta chain variable domain of TCR clone 173116 (TRBV7-2, TRBJ2-5)
CASSPFPTGGEETQYF

SEQ ID NO: 346233 - protein, 16 aa, Homo sapiens
  CDR3 for alpha chain variable domain of TCR clone 173117 (TRAV12-3, TRAJ53)
CAITPGSGGSNYKLTF

SEQ ID NO: 346234 - protein, 11 aa, Homo sapiens
  CDR3 for beta chain variable domain of TCR clone 173117 (TRBV29-1, TRBJ2-5)
CSEDRTGTQYF

SEQ ID NO: 346235 - protein, 14 aa, Homo sapiens
  CDR3 for alpha chain variable domain of TCR clone 173118 (TRAV38-1, TRAJ39)
CAFAYNNAGNMLTF

SEQ ID NO: 346236 - protein, 15 aa, Homo sapiens
  CDR3 for beta chain variable domain of TCR clone 173118 (TRBV19, TRBJ2-6)
CASSIGPSGANVLNF

SEQ ID NO: 346237 - protein, 16 aa, Homo sapiens
  CDR3 for alpha chain variable domain of TCR clone 173119 (TRAV12-3, TRAJ53)
CAMSPGSGGSNYNLTF

SEQ ID NO: 346238 - protein, 16 aa, Homo sapiens
  CDR3 for beta chain variable domain of TCR clone 173119 (TRBV4-2, TRBJ1-1)
CAISQAGFGMNTEAFF

SEQ ID NO: 346239 - protein, 13 aa, Homo sapiens
  CDR3 for alpha chain variable domain of TCR clone 173120 (TRAV1-2, TRAJ9)
CAALNTRGFKTIF

SEQ ID NO: 346240 - protein, 15 aa, Homo sapiens
  CDR3 for beta chain variable domain of TCR clone 173120 (TRBV7-9, TRBJ1-5)
CASSQGHQPNQPQHF

SEQ ID NO: 346241 - protein, 17 aa, Homo sapiens
  CDR3 for alpha chain variable domain of TCR clone 173121 (TRAV13-1, TRAJ52)
CAASSGAGGTSYGKLTF

SEQ ID NO: 346242 - protein, 15 aa, Homo sapiens
  CDR3 for beta chain variable domain of TCR clone 173121 (TRBV9, TRBJ1-6)
CASSVSDTGDSPLHF

SEQ ID NO: 346243 - protein, 17 aa, Homo sapiens
  CDR3 for alpha chain variable domain of TCR clone 173122 (TRAV3, TRAJ6)
CAVRDGPMAGGSYIPKF

SEQ ID NO: 346244 - protein, 14 aa, Homo sapiens
  CDR3 for beta chain variable domain of TCR clone 173122 (TRBV7-2, TRBJ2-7)
CASSPKTSFYEQYF

SEQ ID NO: 346245 - protein, 11 aa, Homo sapiens
  CDR3 for alpha chain variable domain of TCR clone 173123 (TRAV21, TRAJ48)
CAVDGNEKLTF

SEQ ID NO: 346246 - protein, 16 aa, Homo sapiens
  CDR3 for beta chain variable domain of TCR clone 173123 (TRBV19, TRBJ2-1)
CASSSKGTRSYNVQFF

SEQ ID NO: 346247 - protein, 13 aa, Homo sapiens
  CDR3 for alpha chain variable domain of TCR clone 173124 (TRAV17, TRAJ5)
CAPMDTGRRALTF

SEQ ID NO: 346248 - protein, 16 aa, Homo sapiens
  CDR3 for beta chain variable domain of TCR clone 173124 (TRBV27, TRBJ2-2)
CASSFRGLVRTGELFF

SEQ ID NO: 346249 - protein, 12 aa, Homo sapiens
  CDR3 for alpha chain variable domain of TCR clone 173125 (TRAV12-3, TRAJ17)
CAMTLTGNKLTF

SEQ ID NO: 346250 - protein, 14 aa, Homo sapiens
  CDR3 for beta chain variable domain of TCR clone 173125 (TRBV19, TRBJ2-1)
CASEVTGARNEQFF

SEQ ID NO: 346251 - protein, 15 aa, Homo sapiens
  CDR3 for alpha chain variable domain of TCR clone 173126 (TRAV2, TRAJ15)
CAAGVPNQAGTALIF

SEQ ID NO: 346252 - protein, 13 aa, Homo sapiens
  CDR3 for beta chain variable domain of TCR clone 173126 (TRBV2, TRBJ1-5)
CATAGPGNQPQHF

SEQ ID NO: 346253 - protein, 11 aa, Homo sapiens
  CDR3 for alpha chain variable domain of TCR clone 173127 (TRAV3, TRAJ21)
CAVGNFNKFYF

SEQ ID NO: 346254 - protein, 17 aa, Homo sapiens
  CDR3 for beta chain variable domain of TCR clone 173127 (TRBV7-2, TRBJ2-4)
CASSFRLAGGPVNIQYF

SEQ ID NO: 346255 - protein, 14 aa, Homo sapiens
  CDR3 for alpha chain variable domain of TCR clone 173128 (TRAV1-2, TRAJ16)
CAVNRFSDGQKLLF

SEQ ID NO: 346256 - protein, 16 aa, Homo sapiens
  CDR3 for beta chain variable domain of TCR clone 173128 (TRBV7-3, TRBJ2-2)
CGSSLKRGTLSGELFF

SEQ ID NO: 346257 - protein, 16 aa, Homo sapiens
  CDR3 for alpha chain variable domain of TCR clone 173129 (TRAV26-1, TRAJ40)
CIVRGYPTSGTSKYIF

SEQ ID NO: 346258 - protein, 14 aa, Homo sapiens
  CDR3 for beta chain variable domain of TCR clone 173129 (TRBV5-1, TRBJ1-4)
CASSSGQGGEKLFF

SEQ ID NO: 346259 - protein, 14 aa, Homo sapiens
  CDR3 for alpha chain variable domain of TCR clone 173130 (TRAV2, TRAJ9)
CAVEDRSGGFKTIL

SEQ ID NO: 346260 - protein, 14 aa, Homo sapiens
  CDR3 for beta chain variable domain of TCR clone 173130 (TRBV7-9, TRBJ2-7)
CASSPSGGQNEQYF

SEQ ID NO: 346261 - protein, 13 aa, Homo sapiens
  CDR3 for alpha chain variable domain of TCR clone 173131 (TRAV8-3, TRAJ43)
CAVVPYNNNDMRF

SEQ ID NO: 346262 - protein, 16 aa, Homo sapiens
  CDR3 for beta chain variable domain of TCR clone 173131 (TRBV7-2, TRBJ2-7)
CASSPFPTGGEETQYF

SEQ ID NO: 346263 - protein, 15 aa, Homo sapiens
  CDR3 for alpha chain variable domain of TCR clone 173132 (TRAV3, TRAJ4)
CAVRDGTGGYNKLIF

SEQ ID NO: 346264 - protein, 16 aa, Homo sapiens
  CDR3 for beta chain variable domain of TCR clone 173132 (TRBV27, TRBJ2-2)
YASSSSGVSSTGELFF

SEQ ID NO: 346265 - protein, 12 aa, Homo sapiens
  CDR3 for alpha chain variable domain of TCR clone 173133 (TRAV13-1, TRAJ40)
CAASWATYKYIF

SEQ ID NO: 346266 - protein, 15 aa, Homo sapiens
  CDR3 for beta chain variable domain of TCR clone 173133 (TRBV7-8, TRBJ2-1)
CASGSRLAAYNEQFF

SEQ ID NO: 346267 - protein, 19 aa, Homo sapiens
  CDR3 for alpha chain variable domain of TCR clone 173134 (TRAV26-1, TRAJ52)
CIVRVANNAGGTSYGKLTV

SEQ ID NO: 346268 - protein, 14 aa, Homo sapiens
  CDR3 for beta chain variable domain of TCR clone 173134 (TRBV19, TRBJ1-2)
CASSIGAGSYGYTF

SEQ ID NO: 346269 - protein, 15 aa, Homo sapiens
  CDR3 for alpha chain variable domain of TCR clone 173135 (TRAV26-2, TRAJ13)
CILRDLSGGYQQVTF

SEQ ID NO: 346270 - protein, 11 aa, Homo sapiens
  CDR3 for beta chain variable domain of TCR clone 173135 (TRBV7-9, TRBJ2-3)
CASSYTDTQYF

SEQ ID NO: 346271 - protein, 13 aa, Homo sapiens
  CDR3 for alpha chain variable domain of TCR clone 173136 (TRAV27, TRAJ29)
CAGAHSGNTPLVF

SEQ ID NO: 346272 - protein, 15 aa, Homo sapiens
  CDR3 for beta chain variable domain of TCR clone 173136 (TRBV15, TRBJ1-4)
CATSRDMGSYEKLFS

SEQ ID NO: 346273 - protein, 12 aa, Homo sapiens
  CDR3 for alpha chain variable domain of TCR clone 173137 (TRAV13-1, TRAJ21)
CAAKEGFNKFYF

SEQ ID NO: 346274 - protein, 19 aa, Homo sapiens
  CDR3 for beta chain variable domain of TCR clone 173137 (TRBV2, TRBJ2-7)
CASSDDENSGRANDYEQYF

SEQ ID NO: 346275 - protein, 12 aa, Homo sapiens
  CDR3 for alpha chain variable domain of TCR clone 173138 (TRAV21, TRAJ11)
CAATSGYSTLTF

SEQ ID NO: 346276 - protein, 16 aa, Homo sapiens
  CDR3 for beta chain variable domain of TCR clone 173138 (TRBV12-4, TRBJ1-5)
CASSRPVGGSKQPQHF

SEQ ID NO: 346277 - protein, 13 aa, Homo sapiens
  CDR3 for alpha chain variable domain of TCR clone 173139 (TRAV1-2, TRAJ12)
CAVSMDSSYKLIF

SEQ ID NO: 346278 - protein, 15 aa, Homo sapiens
  CDR3 for beta chain variable domain of TCR clone 173139 (TRBV7-3, TRBJ2-1)
CASSQRGGALIEQFF

SEQ ID NO: 346279 - protein, 13 aa, Homo sapiens
  CDR3 for alpha chain variable domain of TCR clone 173140 (TRAV12-2, TRAJ20)
CAVYPSNDYKLSF

SEQ ID NO: 346280 - protein, 14 aa, Homo sapiens
  CDR3 for beta chain variable domain of TCR clone 173140 (TRBV5-5, TRBJ1-2)
CASSLDPYNYGYTF

SEQ ID NO: 346281 - protein, 16 aa, Homo sapiens
  CDR3 for alpha chain variable domain of TCR clone 173141 (TRAV4, TRAJ9)
CLVGDPNRPGGFKTIF

SEQ ID NO: 346282 - protein, 15 aa, Homo sapiens
  CDR3 for beta chain variable domain of TCR clone 173141 (TRBV7-9, TRBJ1-6)
CASSSPGRGNSPLHF

SEQ ID NO: 346283 - protein, 15 aa, Homo sapiens
  CDR3 for alpha chain variable domain of TCR clone 173142 (TRAV35, TRAJ41)
CAGQLFSNSGYALNF

SEQ ID NO: 346284 - protein, 14 aa, Homo sapiens
  CDR3 for beta chain variable domain of TCR clone 173142 (TRBV13, TRBJ2-7)
CASSLKGASYEQYF

SEQ ID NO: 346285 - protein, 12 aa, Homo sapiens
  CDR3 for alpha chain variable domain of TCR clone 173143 (TRAV9-2, TRAJ26)
CALRGYGQNFVF

SEQ ID NO: 346286 - protein, 15 aa, Homo sapiens
  CDR3 for beta chain variable domain of TCR clone 173143 (TRBV7-3, TRBJ2-1)
CASSPTGGGEVEQFF

SEQ ID NO: 346287 - protein, 23 aa, Homo sapiens
  CDR3 for alpha chain variable domain of TCR clone 173144 (TRAV26-1, TRAJ38)
CIAGNAGNNHIQNPDPAVYQLRD

SEQ ID NO: 346288 - protein, 12 aa, Homo sapiens
  CDR3 for beta chain variable domain of TCR clone 173144 (TRBV11-2, TRBJ2-2)
CASSLGGGELFF

SEQ ID NO: 346289 - protein, 15 aa, Homo sapiens
  CDR3 for alpha chain variable domain of TCR clone 173145 (TRAV2, TRAJ45)
CAVDGPGGGADGLTF

SEQ ID NO: 346290 - protein, 16 aa, Homo sapiens
  CDR3 for beta chain variable domain of TCR clone 173145 (TRBV6-5, TRBJ2-1)
CASSYSLSGGYNEQFF

SEQ ID NO: 346291 - protein, 14 aa, Homo sapiens
  CDR3 for alpha chain variable domain of TCR clone 173146 (TRAV12-2, TRAJ17)
CAVLFKAAGNKLNF

SEQ ID NO: 346292 - protein, 14 aa, Homo sapiens
  CDR3 for beta chain variable domain of TCR clone 173146 (TRBV19, TRBJ2-1)
CASPTFVLSGEQFF

SEQ ID NO: 346293 - protein, 12 aa, Homo sapiens
  CDR3 for alpha chain variable domain of TCR clone 173147 (TRAV13-1, TRAJ21)
CVAKEGFNKFYF

SEQ ID NO: 346294 - protein, 14 aa, Homo sapiens
  CDR3 for beta chain variable domain of TCR clone 173147 (TRBV18, TRBJ2-7)
CASSPRGGAYEQYF

SEQ ID NO: 346295 - protein, 11 aa, Homo sapiens
  CDR3 for alpha chain variable domain of TCR clone 173148 (TRAV17, TRAJ31)
CATSNNARLMF

SEQ ID NO: 346296 - protein, 14 aa, Homo sapiens
  CDR3 for beta chain variable domain of TCR clone 173148 (TRBV7-8, TRBJ2-7)
CASSPTVTSSTSGR

SEQ ID NO: 346297 - protein, 17 aa, Homo sapiens
  CDR3 for alpha chain variable domain of TCR clone 173149 (TRAV3, TRAJ6)
CAVRDGPRAGGSDIPTF

SEQ ID NO: 346298 - protein, 11 aa, Homo sapiens
  CDR3 for beta chain variable domain of TCR clone 173149 (TRBV12-4, TRBJ2-3)
CASTATDTQYF

SEQ ID NO: 346299 - protein, 18 aa, Homo sapiens
  CDR3 for alpha chain variable domain of TCR clone 173150 (TRAV21, TRAJ52)
CAVSPSPAGGTSCGKLTF

SEQ ID NO: 346300 - protein, 17 aa, Homo sapiens
  CDR3 for beta chain variable domain of TCR clone 173150 (TRBV13, TRBJ2-3)
CASSLSRVAGGRNTQYF

SEQ ID NO: 346301 - protein, 14 aa, Homo sapiens
  CDR3 for alpha chain variable domain of TCR clone 173151 (TRAV27, TRAJ45)
CAGAQEEVLTDPPL

SEQ ID NO: 346302 - protein, 14 aa, Homo sapiens
  CDR3 for beta chain variable domain of TCR clone 173151 (TRBV7-9, TRBJ2-1)
CASSSMVGFGEQFF

SEQ ID NO: 346303 - protein, 15 aa, Homo sapiens
  CDR3 for alpha chain variable domain of TCR clone 173152 (TRAV26-1, TRAJ40)
CIVRVTTSGTYKYIF

SEQ ID NO: 346304 - protein, 14 aa, Homo sapiens
  CDR3 for beta chain variable domain of TCR clone 173152 (TRBV12-4, TRBJ2-3)
CASTIAGWGDTQYF

SEQ ID NO: 346305 - protein, 14 aa, Homo sapiens
  CDR3 for alpha chain variable domain of TCR clone 173153 (TRAV16, TRAJ33)
CALSAMDSNYQLIW

SEQ ID NO: 346306 - protein, 11 aa, Homo sapiens
  CDR3 for beta chain variable domain of TCR clone 173153 (TRBV5-1, TRBJ1-2)
CASSQDTWLHL

SEQ ID NO: 346307 - protein, 15 aa, Homo sapiens
  CDR3 for alpha chain variable domain of TCR clone 173154 (TRAV21, TRAJ53)
CATLNSGGSSYKLTF

SEQ ID NO: 346308 - protein, 16 aa, Homo sapiens
  CDR3 for beta chain variable domain of TCR clone 173154 (TRBV7-3, TRBJ2-2)
CASSLKRGTLSGELFF

SEQ ID NO: 346309 - protein, 18 aa, Homo sapiens
  CDR3 for alpha chain variable domain of TCR clone 173155 (TRAV21, TRAJ52)
CAVRPSPAGGTSYGKLTF

SEQ ID NO: 346310 - protein, 16 aa, Homo sapiens
  CDR3 for beta chain variable domain of TCR clone 173155 (TRBV20-1, TRBJ2-3)
CSAVRDRGPIADTQYF

SEQ ID NO: 346311 - protein, 12 aa, Homo sapiens
  CDR3 for alpha chain variable domain of TCR clone 173156 (TRAV17, TRAJ12)
CATLRSSYKLIF

SEQ ID NO: 346312 - protein, 16 aa, Homo sapiens
  CDR3 for beta chain variable domain of TCR clone 173156 (TRBV28, TRBJ2-7)
CASSFFFETGGPEQYF

SEQ ID NO: 346313 - protein, 11 aa, Homo sapiens
  CDR3 for alpha chain variable domain of TCR clone 173157 (TRAV2, TRAJ13)
CASGGYQKVTF

SEQ ID NO: 346314 - protein, 14 aa, Homo sapiens
  CDR3 for beta chain variable domain of TCR clone 173157 (TRBV20-1, TRBJ2-3)
CSARDGGSTDTQYF

SEQ ID NO: 346315 - protein, 14 aa, Homo sapiens
  CDR3 for alpha chain variable domain of TCR clone 173158 (TRAV12-2, TRAJ13)
CAVKKTGGYQKVTF

SEQ ID NO: 346316 - protein, 16 aa, Homo sapiens
  CDR3 for beta chain variable domain of TCR clone 173158 (TRBV27, TRBJ2-2)
CASSLSGFWVTGELFF

SEQ ID NO: 346317 - protein, 11 aa, Homo sapiens
  CDR3 for alpha chain variable domain of TCR clone 173159 (TRAV23/DV6, TRAJ49)
CAVAPVTSSIL

SEQ ID NO: 346318 - protein, 13 aa, Homo sapiens
  CDR3 for beta chain variable domain of TCR clone 173159 (TRBV6-1, TRBJ1-1)
CASSRQGNNEAFF

SEQ ID NO: 346319 - protein, 12 aa, Homo sapiens
  CDR3 for alpha chain variable domain of TCR clone 173160 (TRAV12-3, TRAJ39)
CAMTQAGNMLTF

SEQ ID NO: 346320 - protein, 15 aa, Homo sapiens
  CDR3 for beta chain variable domain of TCR clone 173160 (TRBV7-9, TRBJ1-4)
CASSARTGGNEKLFF

SEQ ID NO: 346321 - protein, 12 aa, Homo sapiens
  CDR3 for alpha chain variable domain of TCR clone 173161 (TRAV3, TRAJ26)
CAVRDYGQNFVF

SEQ ID NO: 346322 - protein, 16 aa, Homo sapiens
  CDR3 for beta chain variable domain of TCR clone 173161 (TRBV11-2, TRBJ1-2)
CDSSPSGREANYGYTF

SEQ ID NO: 346323 - protein, 15 aa, Homo sapiens
  CDR3 for alpha chain variable domain of TCR clone 173162 (TRAV3, TRAJ9)
CAVRDSNTGGFKTIF

SEQ ID NO: 346324 - protein, 16 aa, Homo sapiens
  CDR3 for beta chain variable domain of TCR clone 173162 (TRBV15, TRBJ2-5)
CATSPNTGQGMETQYF

SEQ ID NO: 346325 - protein, 14 aa, Homo sapiens
  CDR3 for alpha chain variable domain of TCR clone 173163 (TRAV23/DV6, TRAJ37)
CAASTSSNTGKLIF

SEQ ID NO: 346326 - protein, 13 aa, Homo sapiens
  CDR3 for beta chain variable domain of TCR clone 173163 (TRBV13, TRBJ2-7)
CASSQGVSYEQYF

SEQ ID NO: 346327 - protein, 14 aa, Homo sapiens
  CDR3 for alpha chain variable domain of TCR clone 173164 (TRAV1-2, TRAJ8)
CSVREDTGFQKLVF

SEQ ID NO: 346328 - protein, 15 aa, Homo sapiens
  CDR3 for beta chain variable domain of TCR clone 173164 (TRBV6-3, TRBJ2-7)
CASGSPGTVFYEQYF

SEQ ID NO: 346329 - protein, 19 aa, Homo sapiens
  CDR3 for alpha chain variable domain of TCR clone 173165 (TRAV2, TRAJ20)
ILQVREADAAVYRDCKLSC

SEQ ID NO: 346330 - protein, 13 aa, Homo sapiens
  CDR3 for beta chain variable domain of TCR clone 173165 (TRBV7-3, TRBJ1-1)
CASSQDWGAEAFF

SEQ ID NO: 346331 - protein, 16 aa, Homo sapiens
  CDR3 for alpha chain variable domain of TCR clone 173166 (TRAV30, TRAJ24)
CGTEMVDACSWGKFQF

SEQ ID NO: 346332 - protein, 14 aa, Homo sapiens
  CDR3 for beta chain variable domain of TCR clone 173166 (TRBV12-5, TRBJ2-5)
CASGSRTHQETQYF

SEQ ID NO: 346333 - protein, 14 aa, Homo sapiens
  CDR3 for alpha chain variable domain of TCR clone 173167 (TRAV12-2, TRAJ40)
CAVKIPSGTYKYIF

SEQ ID NO: 346334 - protein, 15 aa, Homo sapiens
  CDR3 for beta chain variable domain of TCR clone 173167 (TRBV7-9, TRBJ1-4)
RASSARTGGNEKLFF

SEQ ID NO: 346335 - protein, 17 aa, Homo sapiens
  CDR3 for alpha chain variable domain of TCR clone 173168 (TRAV3, TRAJ42)
CAVRDRDYGGSQGNLIF

SEQ ID NO: 346336 - protein, 14 aa, Homo sapiens
  CDR3 for beta chain variable domain of TCR clone 173168 (TRBV7-3, TRBJ2-2)
CASSLNSNAGELFF

SEQ ID NO: 346337 - protein, 14 aa, Homo sapiens
  CDR3 for alpha chain variable domain of TCR clone 173169 (TRAV34, TRAJ44)
CGADGTGTASKLTF

SEQ ID NO: 346338 - protein, 17 aa, Homo sapiens
  CDR3 for beta chain variable domain of TCR clone 173169 (TRBV11-2, TRBJ2-1)
CASSLHPPGVEYNEQFF

SEQ ID NO: 346339 - protein, 15 aa, Homo sapiens
  CDR3 for alpha chain variable domain of TCR clone 173170 (TRAV8-3, TRAJ27)
CAVGPSKTKAGKSTF

SEQ ID NO: 346340 - protein, 15 aa, Homo sapiens
  CDR3 for beta chain variable domain of TCR clone 173170 (TRBV27, TRBJ2-1)
CASSNGGGSSNEQFF

SEQ ID NO: 346341 - protein, 18 aa, Homo sapiens
  CDR3 for alpha chain variable domain of TCR clone 173171 (TRAV21, TRAJ52)
CAVRPSTAGGTSYGKLTF

SEQ ID NO: 346342 - protein, 14 aa, Homo sapiens
  CDR3 for beta chain variable domain of TCR clone 173171 (TRBV6-1, TRBJ1-3)
CASVQGGGGNTIYF

SEQ ID NO: 346343 - protein, 15 aa, Homo sapiens
  CDR3 for alpha chain variable domain of TCR clone 173172 (TRAV26-1, TRAJ23)
CIVRVLNNQGGKLII

SEQ ID NO: 346344 - protein, 15 aa, Homo sapiens
  CDR3 for beta chain variable domain of TCR clone 173172 (TRBV7-3, TRBJ2-1)
CASSFGQSNYNEQFF

SEQ ID NO: 346345 - protein, 12 aa, Homo sapiens
  CDR3 for alpha chain variable domain of TCR clone 173173 (TRAV30, TRAJ43)
CGTEERGNDSRF

SEQ ID NO: 346346 - protein, 13 aa, Homo sapiens
  CDR3 for beta chain variable domain of TCR clone 173173 (TRBV27, TRBJ2-7)
CASSFSQGYEQYF

SEQ ID NO: 346347 - protein, 16 aa, Homo sapiens
  CDR3 for alpha chain variable domain of TCR clone 173174 (TRAV12-2, TRAJ40)
CAVMRGGTSGTYKYIF

SEQ ID NO: 346348 - protein, 14 aa, Homo sapiens
  CDR3 for beta chain variable domain of TCR clone 173174 (TRBV7-8, TRBJ2-7)
CASSPGLADYEQYF

SEQ ID NO: 346349 - protein, 16 aa, Homo sapiens
  CDR3 for alpha chain variable domain of TCR clone 173175 (TRAV3, TRAJ37)
CAVSVRGSGNTGKLIF

SEQ ID NO: 346350 - protein, 15 aa, Homo sapiens
  CDR3 for beta chain variable domain of TCR clone 173175 (TRBV3-1, TRBJ2-1)
CASSPRDSGFNEQFF

SEQ ID NO: 346351 - protein, 15 aa, Homo sapiens
  CDR3 for alpha chain variable domain of TCR clone 173176 (TRAV27, TRAJ38)
CAARRNAGNNRNLIW

SEQ ID NO: 346352 - protein, 13 aa, Homo sapiens
  CDR3 for beta chain variable domain of TCR clone 173176 (TRBV12-5, TRBJ2-3)
CAIGDRQSDTQYF

SEQ ID NO: 346353 - protein, 18 aa, Homo sapiens
  CDR3 for alpha chain variable domain of TCR clone 173177 (TRAV21, TRAJ52)
CAVRPSSAGGTSYGKPTF

SEQ ID NO: 346354 - protein, 15 aa, Homo sapiens
  CDR3 for beta chain variable domain of TCR clone 173177 (TRBV6-6, TRBJ2-7)
CASSCSYGGAYEQYF

SEQ ID NO: 346355 - protein, 13 aa, Homo sapiens
  CDR3 for alpha chain variable domain of TCR clone 173178 (TRAV21, TRAJ57)
CAVTQGGSEKLVF

SEQ ID NO: 346356 - protein, 14 aa, Homo sapiens
  CDR3 for beta chain variable domain of TCR clone 173178 (TRBV6-5, TRBJ1-5)
CASSFRQFNQPQHF

SEQ ID NO: 346357 - protein, 14 aa, Homo sapiens
  CDR3 for alpha chain variable domain of TCR clone 173179 (TRAV3, TRAJ21)
CALGRGSTNFTLDL

SEQ ID NO: 346358 - protein, 16 aa, Homo sapiens
  CDR3 for beta chain variable domain of TCR clone 173179 (TRBV7-9, TRBJ2-4)
CASSERWGVTFSTSAP

SEQ ID NO: 346359 - protein, 15 aa, Homo sapiens
  CDR3 for alpha chain variable domain of TCR clone 173180 (TRAV8-3, TRAJ15)
CAVGAPNHAGTALIF

SEQ ID NO: 346360 - protein, 14 aa, Homo sapiens
  CDR3 for beta chain variable domain of TCR clone 173180 (TRBV20-1, TRBJ2-1)
CSPNNEASYNEQFF

SEQ ID NO: 346361 - protein, 14 aa, Homo sapiens
  CDR3 for alpha chain variable domain of TCR clone 173181 (TRAV26-1, TRAJ45)
CIEVTGGGADGLTF

SEQ ID NO: 346362 - protein, 16 aa, Homo sapiens
  CDR3 for beta chain variable domain of TCR clone 173181 (TRBV6-3, TRBJ1-2)
CASSYSRRASNCGYTF

SEQ ID NO: 346363 - protein, 14 aa, Homo sapiens
  CDR3 for alpha chain variable domain of TCR clone 173182 (TRAV1-2, TRAJ16)
CAVNRFSDGQKLLF

SEQ ID NO: 346364 - protein, 14 aa, Homo sapiens
  CDR3 for beta chain variable domain of TCR clone 173182 (TRBV12-4, TRBJ1-1)
CASSLGAGGTEAFF

SEQ ID NO: 346365 - protein, 20 aa, Homo sapiens
  CDR3 for alpha chain variable domain of TCR clone 173183 (TRAV1-2, TRAJ34)
LLKELQMKDSASPNTDKLIF

SEQ ID NO: 346366 - protein, 16 aa, Homo sapiens
  CDR3 for beta chain variable domain of TCR clone 173183 (TRBV3-1, TRBJ2-7)
CASSQGATGVAYEQYF

SEQ ID NO: 346367 - protein, 15 aa, Homo sapiens
  CDR3 for alpha chain variable domain of TCR clone 173184 (TRAV3, TRAJ3)
CAVRDRDSSASKIIF

SEQ ID NO: 346368 - protein, 12 aa, Homo sapiens
  CDR3 for beta chain variable domain of TCR clone 173184 (TRBV11-2, TRBJ2-2)
CASSLGGGELFF

SEQ ID NO: 346369 - protein, 14 aa, Homo sapiens
  CDR3 for alpha chain variable domain of TCR clone 173185 (TRAV1-2, TRAJ16)
CAVNRFSDGQKLLF

SEQ ID NO: 346370 - protein, 16 aa, Homo sapiens
  CDR3 for beta chain variable domain of TCR clone 173185 (TRBV19, TRBJ2-5)
CASSIEGLAGAETQYF

SEQ ID NO: 346371 - protein, 12 aa, Homo sapiens
  CDR3 for alpha chain variable domain of TCR clone 173186 (TRAV27, TRAJ21)
CAGVRQLQQILL

SEQ ID NO: 346372 - protein, 14 aa, Homo sapiens
  CDR3 for beta chain variable domain of TCR clone 173186 (TRBV7-9, TRBJ1-4)
CDSSLEGQSEKLFF

SEQ ID NO: 346373 - protein, 15 aa, Homo sapiens
  CDR3 for alpha chain variable domain of TCR clone 173187 (TRAV27, TRAJ38)
CAARRNAGNNRTLIW

SEQ ID NO: 346374 - protein, 13 aa, Homo sapiens
  CDR3 for beta chain variable domain of TCR clone 173187 (TRBV12-5, TRBJ2-3)
CASGDRQSHTQYF

SEQ ID NO: 346375 - protein, 13 aa, Homo sapiens
  CDR3 for alpha chain variable domain of TCR clone 173188 (TRAV35, TRAJ53)
CAGQESSNYKLTF

SEQ ID NO: 346376 - protein, 13 aa, Homo sapiens
  CDR3 for beta chain variable domain of TCR clone 173188 (TRBV10-3, TRBJ1-2)
CAISERDSYGYTF

SEQ ID NO: 346377 - protein, 14 aa, Homo sapiens
  CDR3 for alpha chain variable domain of TCR clone 173189 (TRAV3, TRAJ20)
CAVLPAPNDYKLSF

SEQ ID NO: 346378 - protein, 13 aa, Homo sapiens
  CDR3 for beta chain variable domain of TCR clone 173189 (TRBV15, TRBJ1-2)
CATSRVDARSPVF

SEQ ID NO: 346379 - protein, 11 aa, Homo sapiens
  CDR3 for alpha chain variable domain of TCR clone 173190 (TRAV35, TRAJ30)
CAGLRDDKIIF

SEQ ID NO: 346380 - protein, 15 aa, Homo sapiens
  CDR3 for beta chain variable domain of TCR clone 173190 (TRBV2, TRBJ1-3)
CASSISPRSGNTIYV

SEQ ID NO: 346381 - protein, 12 aa, Homo sapiens
  CDR3 for alpha chain variable domain of TCR clone 173191 (TRAV13-2, TRAJ8)
CAPWLGFQKLVF

SEQ ID NO: 346382 - protein, 14 aa, Homo sapiens
  CDR3 for beta chain variable domain of TCR clone 173191 (TRBV18, TRBJ1-5)
CASLRQQRNQPQHF

SEQ ID NO: 346383 - protein, 13 aa, Homo sapiens
  CDR3 for alpha chain variable domain of TCR clone 173192 (TRAV2, TRAJ40)
CAVVTSGNSKYIF

SEQ ID NO: 346384 - protein, 16 aa, Homo sapiens
  CDR3 for beta chain variable domain of TCR clone 173192 (TRBV29-1, TRBJ2-6)
CSVEDITYSGANVLSF

SEQ ID NO: 346385 - protein, 16 aa, Homo sapiens
  CDR3 for alpha chain variable domain of TCR clone 173193 (TRAV30, TRAJ24)
CDTEIVDADSWGKFQF

SEQ ID NO: 346386 - protein, 16 aa, Homo sapiens
  CDR3 for beta chain variable domain of TCR clone 173193 (TRBV12-5, TRBJ2-5)
CASGPRTSGNQETQYF

SEQ ID NO: 346387 - protein, 14 aa, Homo sapiens
  CDR3 for alpha chain variable domain of TCR clone 173194 (TRAV26-1, TRAJ39)
CIVRAYNAGNMLTL

SEQ ID NO: 346388 - protein, 16 aa, Homo sapiens
  CDR3 for beta chain variable domain of TCR clone 173194 (TRBV15, TRBJ2-7)
CATSRDFGAAVYEQYF

SEQ ID NO: 346389 - protein, 14 aa, Homo sapiens
  CDR3 for alpha chain variable domain of TCR clone 173195 (TRAV1-1, TRAJ35)
CAVRSIGFVNVLHC

SEQ ID NO: 346390 - protein, 14 aa, Homo sapiens
  CDR3 for beta chain variable domain of TCR clone 173195 (TRBV19, TRBJ2-1)
CASPTFVLSGEQFF

SEQ ID NO: 346391 - protein, 15 aa, Homo sapiens
  CDR3 for alpha chain variable domain of TCR clone 173196 (TRAV8-6, TRAJ6)
CAVSFTSGGSYIPTF

SEQ ID NO: 346392 - protein, 12 aa, Homo sapiens
  CDR3 for beta chain variable domain of TCR clone 173196 (TRBV27, TRBJ2-2)
CASKLFTGELFF

SEQ ID NO: 346393 - protein, 16 aa, Homo sapiens
  CDR3 for alpha chain variable domain of TCR clone 173197 (TRAV27, TRAJ53)
CAAPAGSGGSNYKLKF

SEQ ID NO: 346394 - protein, 15 aa, Homo sapiens
  CDR3 for beta chain variable domain of TCR clone 173197 (TRBV20-1, TRBJ1-1)
CSASRGVTGNTEAFF

SEQ ID NO: 346395 - protein, 14 aa, Homo sapiens
  CDR3 for alpha chain variable domain of TCR clone 173198 (TRAV12-3, TRAJ10)
SHLPLTGGGNKLTF

SEQ ID NO: 346396 - protein, 16 aa, Homo sapiens
  CDR3 for beta chain variable domain of TCR clone 173198 (TRBV15, TRBJ2-7)
CATSRDRGRRRGEQYF

SEQ ID NO: 346397 - protein, 10 aa, Homo sapiens
  CDR3 for alpha chain variable domain of TCR clone 173199 (TRAV12-2, TRAJ52)
CAANRWRYEL

SEQ ID NO: 346398 - protein, 13 aa, Homo sapiens
  CDR3 for beta chain variable domain of TCR clone 173199 (TRBV15, TRBJ2-7)
CATSTTGHYEQYF

SEQ ID NO: 346399 - protein, 15 aa, Homo sapiens
  CDR3 for alpha chain variable domain of TCR clone 173200 (TRAV8-3, TRAJ45)
CASSYSGGGADGLTF

SEQ ID NO: 346400 - protein, 11 aa, Homo sapiens
  CDR3 for beta chain variable domain of TCR clone 173200 (TRBV7-9, TRBJ2-2)
CASSLPGELFF

SEQ ID NO: 346401 - protein, 12 aa, Homo sapiens
  CDR3 for alpha chain variable domain of TCR clone 173201 (TRAV8-3, TRAJ26)
CAGDNYGQNFVF

SEQ ID NO: 346402 - protein, 15 aa, Homo sapiens
  CDR3 for beta chain variable domain of TCR clone 173201 (TRBV12-4, TRBJ2-1)
CASSVSGGASNEQFF

SEQ ID NO: 346403 - protein, 15 aa, Homo sapiens
  CDR3 for alpha chain variable domain of TCR clone 173202 (TRAV3, TRAJ22)
CAVRDRGGYARQLTF

SEQ ID NO: 346404 - protein, 16 aa, Homo sapiens
  CDR3 for beta chain variable domain of TCR clone 173202 (TRBV11-2, TRBJ2-1)
CASARGSYSHHNEQFF

SEQ ID NO: 346405 - protein, 16 aa, Homo sapiens
  CDR3 for alpha chain variable domain of TCR clone 173203 (TRAV3, TRAJ37)
CAVRVRGSGNTGKLIF

SEQ ID NO: 346406 - protein, 15 aa, Homo sapiens
  CDR3 for beta chain variable domain of TCR clone 173203 (TRBV3-1, TRBJ2-1)
CASSPRDSGFNEQLF

SEQ ID NO: 346407 - protein, 13 aa, Homo sapiens
  CDR3 for alpha chain variable domain of TCR clone 173204 (TRAV21, TRAJ57)
CAVLEGGSEKLVF

SEQ ID NO: 346408 - protein, 15 aa, Homo sapiens
  CDR3 for beta chain variable domain of TCR clone 173204 (TRBV10-3, TRBJ2-5)
CAISEFGRGQETQYF

SEQ ID NO: 346409 - protein, 14 aa, Homo sapiens
  CDR3 for alpha chain variable domain of TCR clone 173205 (TRAV4, TRAJ20)
CLVGDFINDYKRSF

SEQ ID NO: 346410 - protein, 15 aa, Homo sapiens
  CDR3 for beta chain variable domain of TCR clone 173205 (TRBV9, TRBJ1-6)
CASSVAGTGDSPLHF

SEQ ID NO: 346411 - protein, 13 aa, Homo sapiens
  CDR3 for alpha chain variable domain of TCR clone 173206 (TRAV23/DV6, TRAJ16)
CAASISDGQKLLF

SEQ ID NO: 346412 - protein, 11 aa, Homo sapiens
  CDR3 for beta chain variable domain of TCR clone 173206 (TRBV29-1, TRBJ2-5)
CSEDRTGTQYF

SEQ ID NO: 346413 - protein, 14 aa, Homo sapiens
  CDR3 for alpha chain variable domain of TCR clone 173207 (TRAV20, TRAJ44)
CAVQDTGTASKLTF

SEQ ID NO: 346414 - protein, 13 aa, Homo sapiens
  CDR3 for beta chain variable domain of TCR clone 173207 (TRBV29-1, TRBJ1-3)
CSAGTGRGNTLYF

SEQ ID NO: 346415 - protein, 13 aa, Homo sapiens
  CDR3 for alpha chain variable domain of TCR clone 173208 (TRAV1-1, TRAJ13)
CAVNSGGYQKVTF

SEQ ID NO: 346416 - protein, 12 aa, Homo sapiens
  CDR3 for beta chain variable domain of TCR clone 173208 (TRBV28, TRBJ2-1)
CASSVQRNEQFF

SEQ ID NO: 346417 - protein, 13 aa, Homo sapiens
  CDR3 for alpha chain variable domain of TCR clone 173209 (TRAV12-2, TRAJ37)
CAGGSGNTGKLIF

SEQ ID NO: 346418 - protein, 14 aa, Homo sapiens
  CDR3 for beta chain variable domain of TCR clone 173209 (TRBV6-1, TRBJ2-6)
CAGQQGAGANVLTF

SEQ ID NO: 346419 - protein, 13 aa, Homo sapiens
  CDR3 for alpha chain variable domain of TCR clone 173210 (TRAV12-1, TRAJ29)
CVVRHSGNTPLVF

SEQ ID NO: 346420 - protein, 14 aa, Homo sapiens
  CDR3 for beta chain variable domain of TCR clone 173210 (TRBV7-2, TRBJ2-7)
CASRSQGAAYEQYF

SEQ ID NO: 346421 - protein, 17 aa, Homo sapiens
  CDR3 for alpha chain variable domain of TCR clone 173211 (TRAV2, TRAJ36)
CAVEDRGNWGKQPLLWD

SEQ ID NO: 346422 - protein, 16 aa, Homo sapiens
  CDR3 for beta chain variable domain of TCR clone 173211 (TRBV12-5, TRBJ2-5)
CASGPRTSGNQETQYF

SEQ ID NO: 346423 - protein, 15 aa, Homo sapiens
  CDR3 for alpha chain variable domain of TCR clone 173212 (TRAV17, TRAJ57)
CATGPSQGGSEELVF

SEQ ID NO: 346424 - protein, 13 aa, Homo sapiens
  CDR3 for beta chain variable domain of TCR clone 173212 (TRBV6-3, TRBJ2-5)
CASRRGIQETQYF

SEQ ID NO: 346425 - protein, 16 aa, Homo sapiens
  CDR3 for alpha chain variable domain of TCR clone 173213 (TRAV12-1, TRAJ13)
CVVNLEVSGGYQRVTF

SEQ ID NO: 346426 - protein, 16 aa, Homo sapiens
  CDR3 for beta chain variable domain of TCR clone 173213 (TRBV24-1, TRBJ2-6)
CATSDRRASGANVLTF

SEQ ID NO: 346427 - protein, 10 aa, Homo sapiens
  CDR3 for alpha chain variable domain of TCR clone 173214 (TRAV21, TRAJ31)
RAVDNARLMF

SEQ ID NO: 346428 - protein, 13 aa, Homo sapiens
  CDR3 for beta chain variable domain of TCR clone 173214 (TRBV4-1, TRBJ1-1)
CASSRKMNTEAFF

SEQ ID NO: 346429 - protein, 16 aa, Homo sapiens
  CDR3 for alpha chain variable domain of TCR clone 173215 (TRAV12-3, TRAJ53)
CAMSPGSGGNNYKLTF

SEQ ID NO: 346430 - protein, 17 aa, Homo sapiens
  CDR3 for beta chain variable domain of TCR clone 173215 (TRBV11-2, TRBJ2-1)
CASSLYPPGVEYNEQFF

SEQ ID NO: 346431 - protein, 15 aa, Homo sapiens
  CDR3 for alpha chain variable domain of TCR clone 173216 (TRAV3, TRAJ20)
CAVRDIKLSNYKLSF

SEQ ID NO: 346432 - protein, 18 aa, Homo sapiens
  CDR3 for beta chain variable domain of TCR clone 173216 (TRBV20-1, TRBJ2-5)
CSQTGDSGRLGGKETQYF

SEQ ID NO: 346433 - protein, 14 aa, Homo sapiens
  CDR3 for alpha chain variable domain of TCR clone 173217 (TRAV29/DV5, TRAJ32)
CAAAYGGATNKLIF

SEQ ID NO: 346434 - protein, 15 aa, Homo sapiens
  CDR3 for beta chain variable domain of TCR clone 173217 (TRBV27, TRBJ2-7)
CASSTAGTGFYEQYF

SEQ ID NO: 346435 - protein, 12 aa, Homo sapiens
  CDR3 for alpha chain variable domain of TCR clone 173218 (TRAV8-3, TRAJ20)
CAVDFNDNKLSF

SEQ ID NO: 346436 - protein, 12 aa, Homo sapiens
  CDR3 for beta chain variable domain of TCR clone 173218 (TRBV29-1, TRBJ2-3)
CSVTGGADTQYF

SEQ ID NO: 346437 - protein, 14 aa, Homo sapiens
  CDR3 for alpha chain variable domain of TCR clone 173219 (TRAV26-1, TRAJ45)
CIEVTGGGAGGLTF

SEQ ID NO: 346438 - protein, 13 aa, Homo sapiens
  CDR3 for beta chain variable domain of TCR clone 173219 (TRBV7-6, TRBJ1-2)
CASSLVADYGYTF

SEQ ID NO: 346439 - protein, 13 aa, Homo sapiens
  CDR3 for alpha chain variable domain of TCR clone 173220 (TRAV12-2, TRAJ7)
CAGLIYGNNRIAF

SEQ ID NO: 346440 - protein, 14 aa, Homo sapiens
  CDR3 for beta chain variable domain of TCR clone 173220 (TRBV6-1, TRBJ2-1)
CATFTSGQNNEQFF

SEQ ID NO: 346441 - protein, 14 aa, Homo sapiens
  CDR3 for alpha chain variable domain of TCR clone 173221 (TRAV21, TRAJ35)
CAVMPIGFGNVLHC

SEQ ID NO: 346442 - protein, 20 aa, Homo sapiens
  CDR3 for beta chain variable domain of TCR clone 173221 (TRBV7-9, TRBJ2-2)
CASSHLFPGPTIHITGELFF

SEQ ID NO: 346443 - protein, 14 aa, Homo sapiens
  CDR3 for alpha chain variable domain of TCR clone 173222 (TRAV26-1, TRAJ38)
CIADNAGNNRKLIW

SEQ ID NO: 346444 - protein, 14 aa, Homo sapiens
  CDR3 for beta chain variable domain of TCR clone 173222 (TRBV4-2, TRBJ2-1)
CASGLDRAYNKQFF

SEQ ID NO: 346445 - protein, 11 aa, Homo sapiens
  CDR3 for alpha chain variable domain of TCR clone 173223 (TRAV2, TRAJ13)
CASGGYQKVTF

SEQ ID NO: 346446 - protein, 13 aa, Homo sapiens
  CDR3 for beta chain variable domain of TCR clone 173223 (TRBV24-1, TRBJ2-3)
CDTSTGGTDTQYF

SEQ ID NO: 346447 - protein, 12 aa, Homo sapiens
  CDR3 for alpha chain variable domain of TCR clone 173224 (TRAV13-2, TRAJ8)
CAPWLGFQKLVF

SEQ ID NO: 346448 - protein, 13 aa, Homo sapiens
  CDR3 for beta chain variable domain of TCR clone 173224 (TRBV2, TRBJ1-5)
CATAGPGNQPQHF

SEQ ID NO: 346449 - protein, 15 aa, Homo sapiens
  CDR3 for alpha chain variable domain of TCR clone 173225 (TRAV26-1, TRAJ44)
CIVRANTGTASKLTF

SEQ ID NO: 346450 - protein, 15 aa, Homo sapiens
  CDR3 for beta chain variable domain of TCR clone 173225 (TRBV19, TRBJ1-2)
CAISVGQVLNYGYTF

SEQ ID NO: 346451 - protein, 18 aa, Homo sapiens
  CDR3 for alpha chain variable domain of TCR clone 173226 (TRAV1-2, TRAJ10)
CAVRAVTPVTGGGNKLTF

SEQ ID NO: 346452 - protein, 14 aa, Homo sapiens
  CDR3 for beta chain variable domain of TCR clone 173226 (TRBV4-1, TRBJ1-1)
CASSQQGNGNEAFF

SEQ ID NO: 346453 - protein, 11 aa, Homo sapiens
  CDR3 for alpha chain variable domain of TCR clone 173227 (TRAV4, TRAJ31)
CLVGDNARLMF

SEQ ID NO: 346454 - protein, 16 aa, Homo sapiens
  CDR3 for beta chain variable domain of TCR clone 173227 (TRBV7-2, TRBJ2-5)
CASSSNWWSGQETQYF

SEQ ID NO: 346455 - protein, 14 aa, Homo sapiens
  CDR3 for alpha chain variable domain of TCR clone 173228 (TRAV20, TRAJ26)
CAVQAAIYGQNFVF

SEQ ID NO: 346456 - protein, 14 aa, Homo sapiens
  CDR3 for beta chain variable domain of TCR clone 173228 (TRBV27, TRBJ2-2)
CASNLGDTTGELFF

SEQ ID NO: 346457 - protein, 14 aa, Homo sapiens
  CDR3 for alpha chain variable domain of TCR clone 173229 (TRAV17, TRAJ15)
CATDRGQAGTALTF

SEQ ID NO: 346458 - protein, 17 aa, Homo sapiens
  CDR3 for beta chain variable domain of TCR clone 173229 (TRBV29-1, TRBJ2-1)
CSVVGLAGAYSYNEQFF

SEQ ID NO: 346459 - protein, 12 aa, Homo sapiens
  CDR3 for alpha chain variable domain of TCR clone 173230 (TRAV1-1, TRAJ20)
CAVREDDYKLSF

SEQ ID NO: 346460 - protein, 12 aa, Homo sapiens
  CDR3 for beta chain variable domain of TCR clone 173230 (TRBV7-8, TRBJ2-7)
CASSLGDREQYF

SEQ ID NO: 346461 - protein, 15 aa, Homo sapiens
  CDR3 for alpha chain variable domain of TCR clone 173231 (TRAV26-1, TRAJ44)
CIARVPFGTASKLTF

SEQ ID NO: 346462 - protein, 17 aa, Homo sapiens
  CDR3 for beta chain variable domain of TCR clone 173231 (TRBV24-1, TRBJ2-4)
CATSDTEARGVRNIQYF

SEQ ID NO: 346463 - protein, 15 aa, Homo sapiens
  CDR3 for alpha chain variable domain of TCR clone 173232 (TRAV35, TRAJ58)
SAGRRQETSGSRLTF

SEQ ID NO: 346464 - protein, 11 aa, Homo sapiens
  CDR3 for beta chain variable domain of TCR clone 173232 (TRBV11-2, TRBJ1-1)
CASSINAEAFF

SEQ ID NO: 346465 - protein, 12 aa, Homo sapiens
  CDR3 for alpha chain variable domain of TCR clone 173233 (TRAV17, TRAJ39)
CATGGAGNMLTF

SEQ ID NO: 346466 - protein, 13 aa, Homo sapiens
  CDR3 for beta chain variable domain of TCR clone 173233 (TRBV7-9, TRBJ1-2)
CASSLKQNYGYTF

SEQ ID NO: 346467 - protein, 14 aa, Homo sapiens
  CDR3 for alpha chain variable domain of TCR clone 173234 (TRAV12-2, TRAJ45)
CAVNIGGGADGLTF

SEQ ID NO: 346468 - protein, 15 aa, Homo sapiens
  CDR3 for beta chain variable domain of TCR clone 173234 (TRBV10-3, TRBJ2-3)
CTISLTSGGTDTQYF

SEQ ID NO: 346469 - protein, 14 aa, Homo sapiens
  CDR3 for alpha chain variable domain of TCR clone 173235 (TRAV1-2, TRAJ16)
CAVNRFSDGQKLLF

SEQ ID NO: 346470 - protein, 16 aa, Homo sapiens
  CDR3 for beta chain variable domain of TCR clone 173235 (TRBV18, TRBJ1-5)
CASSPYRVEGNQPQHF

SEQ ID NO: 346471 - protein, 15 aa, Homo sapiens
  CDR3 for alpha chain variable domain of TCR clone 173236 (TRAV35, TRAJ23)
CAAPLGNNQGGKLIF

SEQ ID NO: 346472 - protein, 14 aa, Homo sapiens
  CDR3 for beta chain variable domain of TCR clone 173236 (TRBV7-9, TRBJ1-1)
CASTPLQSYTEAFF

SEQ ID NO: 346473 - protein, 15 aa, Homo sapiens
  CDR3 for alpha chain variable domain of TCR clone 173237 (TRAV8-4, TRAJ36)
CAVRKSWTGENNLFF

SEQ ID NO: 346474 - protein, 17 aa, Homo sapiens
  CDR3 for beta chain variable domain of TCR clone 173237 (TRBV3-1, TRBJ2-2)
CASSQDSQGPNTGELFF

SEQ ID NO: 346475 - protein, 15 aa, Homo sapiens
  CDR3 for alpha chain variable domain of TCR clone 173238 (TRAV8-3, TRAJ27)
CAVGPSKTNAGKSTF

SEQ ID NO: 346476 - protein, 14 aa, Homo sapiens
  CDR3 for beta chain variable domain of TCR clone 173238 (TRBV7-2, TRBJ2-1)
CASSRGGARNEQFF

SEQ ID NO: 346477 - protein, 14 aa, Homo sapiens
  CDR3 for alpha chain variable domain of TCR clone 173239 (TRAV8-4, TRAJ5)
CAVSTDTGRRALTF

SEQ ID NO: 346478 - protein, 14 aa, Homo sapiens
  CDR3 for beta chain variable domain of TCR clone 173239 (TRBV20-1, TRBJ2-1)
CSAQIGGSANEQFF

SEQ ID NO: 346479 - protein, 12 aa, Homo sapiens
  CDR3 for alpha chain variable domain of TCR clone 173240 (TRAV22, TRAJ22)
CAPGGSARQLTF

SEQ ID NO: 346480 - protein, 15 aa, Homo sapiens
  CDR3 for beta chain variable domain of TCR clone 173240 (TRBV27, TRBJ2-1)
CASSNGGGSSNEQFF

SEQ ID NO: 346481 - protein, 15 aa, Homo sapiens
  CDR3 for alpha chain variable domain of TCR clone 173241 (TRAV3, TRAJ5)
CAVRELDTGRRALTC

SEQ ID NO: 346482 - protein, 14 aa, Homo sapiens
  CDR3 for beta chain variable domain of TCR clone 173241 (TRBV25-1, TRBJ1-4)
CASSGGGQPEKLFF

SEQ ID NO: 346483 - protein, 14 aa, Homo sapiens
  CDR3 for alpha chain variable domain of TCR clone 173242 (TRAV21, TRAJ57)
CAVSRGGGSERLVF

SEQ ID NO: 346484 - protein, 13 aa, Homo sapiens
  CDR3 for beta chain variable domain of TCR clone 173242 (TRBV7-2, TRBJ2-2)
CASSLAVTGELFF

SEQ ID NO: 346485 - protein, 13 aa, Homo sapiens
  CDR3 for alpha chain variable domain of TCR clone 173243 (TRAV26-1, TRAJ30)
CIVRVESNDKIIF

SEQ ID NO: 346486 - protein, 18 aa, Homo sapiens
  CDR3 for beta chain variable domain of TCR clone 173243 (TRBV4-3, TRBJ2-6)
CASSQDIQGGPGANVLTF

SEQ ID NO: 346487 - protein, 12 aa, Homo sapiens
  CDR3 for alpha chain variable domain of TCR clone 173244 (TRAV29/DV5, TRAJ49)
CAATDPGNPFYF

SEQ ID NO: 346488 - protein, 12 aa, Homo sapiens
  CDR3 for beta chain variable domain of TCR clone 173244 (TRBV12-4, TRBJ2-7)
CASSLGGYEQYF

SEQ ID NO: 346489 - protein, 16 aa, Homo sapiens
  CDR3 for alpha chain variable domain of TCR clone 173245 (TRAV3, TRAJ4)
CAVRPSPSGAYNKLIF

SEQ ID NO: 346490 - protein, 12 aa, Homo sapiens
  CDR3 for beta chain variable domain of TCR clone 173245 (TRBV7-9, TRBJ2-7)
CASSQGVYEQYF

SEQ ID NO: 346491 - protein, 14 aa, Homo sapiens
  CDR3 for alpha chain variable domain of TCR clone 173246 (TRAV30, TRAJ33)
CGTVAPRSNYQLIW

SEQ ID NO: 346492 - protein, 14 aa, Homo sapiens
  CDR3 for beta chain variable domain of TCR clone 173246 (TRBV19, TRBJ2-1)
CASPTFVLSGEQYF

SEQ ID NO: 346493 - protein, 14 aa, Homo sapiens
  CDR3 for alpha chain variable domain of TCR clone 173247 (TRAV13-2, TRAJ23)
CAENIGPVGGKLIF

SEQ ID NO: 346494 - protein, 12 aa, Homo sapiens
  CDR3 for beta chain variable domain of TCR clone 173247 (TRBV5-7, TRBJ2-7)
CASSVQGGEQYF

SEQ ID NO: 346495 - protein, 13 aa, Homo sapiens
  CDR3 for alpha chain variable domain of TCR clone 173248 (TRAV13-1, TRAJ5)
CAAEHTGRRALTF

SEQ ID NO: 346496 - protein, 13 aa, Homo sapiens
  CDR3 for beta chain variable domain of TCR clone 173248 (TRBV2, TRBJ1-4)
CASNRGTNEKMFF

SEQ ID NO: 346497 - protein, 17 aa, Homo sapiens
  CDR3 for alpha chain variable domain of TCR clone 173249 (TRAV3, TRAJ12)
CAVRDGGRMDSSDKLIF

SEQ ID NO: 346498 - protein, 12 aa, Homo sapiens
  CDR3 for beta chain variable domain of TCR clone 173249 (TRBV11-2, TRBJ2-2)
CASSLGGGELFF

SEQ ID NO: 346499 - protein, 12 aa, Homo sapiens
  CDR3 for alpha chain variable domain of TCR clone 173250 (TRAV12-3, TRAJ17)
CAMTLIGNKLTF

SEQ ID NO: 346500 - protein, 15 aa, Homo sapiens
  CDR3 for beta chain variable domain of TCR clone 173250 (TRBV11-2, TRBJ2-2)
CASSSDRVNAGELFF

SEQ ID NO: 346501 - protein, 22 aa, Homo sapiens
  CDR3 for alpha chain variable domain of TCR clone 173251 (TRAV2, TRAJ10)
ILQVREADAAVYYTGGGNKLTF

SEQ ID NO: 346502 - protein, 13 aa, Homo sapiens
  CDR3 for beta chain variable domain of TCR clone 173251 (TRBV7-3, TRBJ1-1)
CASSQDWGAEAFF

SEQ ID NO: 346503 - protein, 18 aa, Homo sapiens
  CDR3 for alpha chain variable domain of TCR clone 173252 (TRAV12-3, TRAJ52)
CAMSRTNAGGTSYGKLTF

SEQ ID NO: 346504 - protein, 17 aa, Homo sapiens
  CDR3 for beta chain variable domain of TCR clone 173252 (TRBV7-3, TRBJ2-3)
CASSVRKRMRGADTQYF

SEQ ID NO: 346505 - protein, 13 aa, Homo sapiens
  CDR3 for alpha chain variable domain of TCR clone 173253 (TRAV8-3, TRAJ43)
CAVGPDNNNDMRF

SEQ ID NO: 346506 - protein, 12 aa, Homo sapiens
  CDR3 for beta chain variable domain of TCR clone 173253 (TRBV7-2, TRBJ1-6)
CASSVASSPLHF

SEQ ID NO: 346507 - protein, 14 aa, Homo sapiens
  CDR3 for alpha chain variable domain of TCR clone 173254 (TRAV12-2, TRAJ24)
CAVTPADSWGKLPF

SEQ ID NO: 346508 - protein, 15 aa, Homo sapiens
  CDR3 for beta chain variable domain of TCR clone 173254 (TRBV9, TRBJ2-1)
CASSLAGSSYNEQFF

SEQ ID NO: 346509 - protein, 15 aa, Homo sapiens
  CDR3 for alpha chain variable domain of TCR clone 173255 (TRAV12-2, TRAJ53)
CAVNGGGGSNYKLTF

SEQ ID NO: 346510 - protein, 15 aa, Homo sapiens
  CDR3 for beta chain variable domain of TCR clone 173255 (TRBV28, TRBJ2-5)
CASSPPWSYQETQYF

SEQ ID NO: 346511 - protein, 15 aa, Homo sapiens
  CDR3 for alpha chain variable domain of TCR clone 173256 (TRAV12-3, TRAJ49)
CAMAVTPNTGNQFYF

SEQ ID NO: 346512 - protein, 17 aa, Homo sapiens
  CDR3 for beta chain variable domain of TCR clone 173256 (TRBV4-1, TRBJ2-3)
CASSQGYVSGGTDTQYF

SEQ ID NO: 346513 - protein, 19 aa, Homo sapiens
  CDR3 for alpha chain variable domain of TCR clone 173257 (TRAV2, TRAJ20)
ILQVREADAAVYRDCKLSF

SEQ ID NO: 346514 - protein, 13 aa, Homo sapiens
  CDR3 for beta chain variable domain of TCR clone 173257 (TRBV20-1, TRBJ2-7)
CSARTGAGYEQYF

SEQ ID NO: 346515 - protein, 19 aa, Homo sapiens
  CDR3 for alpha chain variable domain of TCR clone 173258 (TRAV26-1, TRAJ22)
CCVLLHRWVFSGSARQLTF

SEQ ID NO: 346516 - protein, 12 aa, Homo sapiens
  CDR3 for beta chain variable domain of TCR clone 173258 (TRBV18, TRBJ2-1)
CASSSDEDEQFF

SEQ ID NO: 346517 - protein, 12 aa, Homo sapiens
  CDR3 for alpha chain variable domain of TCR clone 173259 (TRAV8-6, TRAJ43)
CAVSNNNNDIRF

SEQ ID NO: 346518 - protein, 15 aa, Homo sapiens
  CDR3 for beta chain variable domain of TCR clone 173259 (TRBV7-3, TRBJ2-6)
CASSLGGSGANVPTF

SEQ ID NO: 346519 - protein, 11 aa, Homo sapiens
  CDR3 for alpha chain variable domain of TCR clone 173260 (TRAV12-2, TRAJ49)
CAVNTGNQFYF

SEQ ID NO: 346520 - protein, 13 aa, Homo sapiens
  CDR3 for beta chain variable domain of TCR clone 173260 (TRBV12-4, TRBJ2-5)
CASSPGTEETQYF

SEQ ID NO: 346521 - protein, 14 aa, Homo sapiens
  CDR3 for alpha chain variable domain of TCR clone 173261 (TRAV29/DV5, TRAJ36)
CAARRNTGAHNIFF

SEQ ID NO: 346522 - protein, 14 aa, Homo sapiens
  CDR3 for beta chain variable domain of TCR clone 173261 (TRBV12-5, TRBJ2-5)
CASGSRTHQETQYF

SEQ ID NO: 346523 - protein, 14 aa, Homo sapiens
  CDR3 for alpha chain variable domain of TCR clone 173262 (TRAV12-2, TRAJ15)
CAPHTGQAGTALIF

SEQ ID NO: 346524 - protein, 17 aa, Homo sapiens
  CDR3 for beta chain variable domain of TCR clone 173262 (TRBV5-5, TRBJ1-2)
CASSLGSLDGQSEGYTV

SEQ ID NO: 346525 - protein, 17 aa, Homo sapiens
  CDR3 for alpha chain variable domain of TCR clone 173263 (TRAV3, TRAJ42)
CTVRDRDYGGSQGNLIF

SEQ ID NO: 346526 - protein, 12 aa, Homo sapiens
  CDR3 for beta chain variable domain of TCR clone 173263 (TRBV11-2, TRBJ2-1)
CASSPGNNEQFF

SEQ ID NO: 346527 - protein, 13 aa, Homo sapiens
  CDR3 for alpha chain variable domain of TCR clone 173264 (TRAV26-1, TRAJ40)
CIVRVEGTYKYIF

SEQ ID NO: 346528 - protein, 15 aa, Homo sapiens
  CDR3 for beta chain variable domain of TCR clone 173264 (TRBV12-4, TRBJ1-2)
CASSLAHRDGQAYTL

SEQ ID NO: 346529 - protein, 13 aa, Homo sapiens
  CDR3 for alpha chain variable domain of TCR clone 173265 (TRAV12-3, TRAJ33)
CAMSVNSNYQLIW

SEQ ID NO: 346530 - protein, 16 aa, Homo sapiens
  CDR3 for beta chain variable domain of TCR clone 173265 (TRBV7-2, TRBJ1-4)
CASSPVGRFDREKLFF

SEQ ID NO: 346531 - protein, 13 aa, Homo sapiens
  CDR3 for alpha chain variable domain of TCR clone 173266 (TRAV8-3, TRAJ28)
CAVGAVGSYQLTF

SEQ ID NO: 346532 - protein, 15 aa, Homo sapiens
  CDR3 for beta chain variable domain of TCR clone 173266 (TRBV6-3, TRBJ1-4)
CASSPGPGEKLFLAV

SEQ ID NO: 346533 - protein, 13 aa, Homo sapiens
  CDR3 for alpha chain variable domain of TCR clone 173267 (TRAV12-2, TRAJ42)
CAVKRGSQGNLIF

SEQ ID NO: 346534 - protein, 12 aa, Homo sapiens
  CDR3 for beta chain variable domain of TCR clone 173267 (TRBV5-7, TRBJ1-2)
CASSMVQNGYTF

SEQ ID NO: 346535 - protein, 13 aa, Homo sapiens
  CDR3 for alpha chain variable domain of TCR clone 173268 (TRAV1-1, TRAJ9)
CAAKNTGGLKTIF

SEQ ID NO: 346536 - protein, 11 aa, Homo sapiens
  CDR3 for beta chain variable domain of TCR clone 173268 (TRBV7-2, TRBJ2-5)
CASSFGETQYF

SEQ ID NO: 346537 - protein, 14 aa, Homo sapiens
  CDR3 for alpha chain variable domain of TCR clone 173269 (TRAV13-1, TRAJ40)
CAASMTSGTYKYIF

SEQ ID NO: 346538 - protein, 15 aa, Homo sapiens
  CDR3 for beta chain variable domain of TCR clone 173269 (TRBV7-3, TRBJ2-1)
CAISPTGGGEVEQFF

SEQ ID NO: 346539 - protein, 13 aa, Homo sapiens
  CDR3 for alpha chain variable domain of TCR clone 173270 (TRAV8-3, TRAJ43)
CAAGPDNNNDMRF

SEQ ID NO: 346540 - protein, 19 aa, Homo sapiens
  CDR3 for beta chain variable domain of TCR clone 173270 (TRBV7-2, TRBJ2-3)
CASSFLSRNWGGGTDTQYF

SEQ ID NO: 346541 - protein, 11 aa, Homo sapiens
  CDR3 for alpha chain variable domain of TCR clone 173271 (TRAV2, TRAJ21)
CAVFNFNKFYF

SEQ ID NO: 346542 - protein, 14 aa, Homo sapiens
  CDR3 for beta chain variable domain of TCR clone 173271 (TRBV15, TRBJ2-3)
CATRSGTSTDTQYC

SEQ ID NO: 346543 - protein, 13 aa, Homo sapiens
  CDR3 for alpha chain variable domain of TCR clone 173272 (TRAV27, TRAJ56)
CAGKPGAKSKLTF

SEQ ID NO: 346544 - protein, 15 aa, Homo sapiens
  CDR3 for beta chain variable domain of TCR clone 173272 (TRBV6-1, TRBJ2-3)
CASSERWDSTDTQYF

SEQ ID NO: 346545 - protein, 15 aa, Homo sapiens
  CDR3 for alpha chain variable domain of TCR clone 173273 (TRAV9-2, TRAJ53)
CALTDSGGSNYKLTF

SEQ ID NO: 346546 - protein, 16 aa, Homo sapiens
  CDR3 for beta chain variable domain of TCR clone 173273 (TRBV5-4, TRBJ2-1)
CASSLVGSGQDNEQFF

SEQ ID NO: 346547 - protein, 16 aa, Homo sapiens
  CDR3 for alpha chain variable domain of TCR clone 173274 (TRAV13-2, TRAJ52)
CREPPTGGTSYGKLTF

SEQ ID NO: 346548 - protein, 16 aa, Homo sapiens
  CDR3 for beta chain variable domain of TCR clone 173274 (TRBV20-1, TRBJ2-7)
CSARGSVVADIYEQYF

SEQ ID NO: 346549 - protein, 14 aa, Homo sapiens
  CDR3 for alpha chain variable domain of TCR clone 173275 (TRAV1-2, TRAJ8)
CAVREDTGFQKLVF

SEQ ID NO: 346550 - protein, 13 aa, Homo sapiens
  CDR3 for beta chain variable domain of TCR clone 173275 (TRBV24-1, TRBJ2-2)
CATSDWSTGELFL

SEQ ID NO: 346551 - protein, 11 aa, Homo sapiens
  CDR3 for alpha chain variable domain of TCR clone 173276 (TRAV35, TRAJ30)
CWQLADDKIIF

SEQ ID NO: 346552 - protein, 17 aa, Homo sapiens
  CDR3 for beta chain variable domain of TCR clone 173276 (TRBV4-2, TRBJ2-5)
CASSPGRWRNFQETQYF

SEQ ID NO: 346553 - protein, 16 aa, Homo sapiens
  CDR3 for alpha chain variable domain of TCR clone 173277 (TRAV1-2, TRAJ10)
CAVRGVLTGGGNKLTF

SEQ ID NO: 346554 - protein, 16 aa, Homo sapiens
  CDR3 for beta chain variable domain of TCR clone 173277 (TRBV7-9, TRBJ2-6)
CASSLKGPLRANVLTF

SEQ ID NO: 346555 - protein, 14 aa, Homo sapiens
  CDR3 for alpha chain variable domain of TCR clone 173278 (TRAV12-2, TRAJ17)
CAGLFKAAGNKQTF

SEQ ID NO: 346556 - protein, 17 aa, Homo sapiens
  CDR3 for beta chain variable domain of TCR clone 173278 (TRBV20-1, TRBJ2-2)
CSASGSGQGGLTGELFF

SEQ ID NO: 346557 - protein, 14 aa, Homo sapiens
  CDR3 for alpha chain variable domain of TCR clone 173279 (TRAV12-3, TRAJ10)
SHLPLTGGGNKLTF

SEQ ID NO: 346558 - protein, 16 aa, Homo sapiens
  CDR3 for beta chain variable domain of TCR clone 173279 (TRBV28, TRBJ1-5)
CASSFRGGYSNQPQHF

SEQ ID NO: 346559 - protein, 14 aa, Homo sapiens
  CDR3 for alpha chain variable domain of TCR clone 173280 (TRAV12-3, TRAJ10)
SHLPLTGGGNKLTF

SEQ ID NO: 346560 - protein, 15 aa, Homo sapiens
  CDR3 for beta chain variable domain of TCR clone 173280 (TRBV18, TRBJ2-6)
CASSPSYAGANDLTF

SEQ ID NO: 346561 - protein, 13 aa, Homo sapiens
  CDR3 for alpha chain variable domain of TCR clone 173281 (TRAV8-1, TRAJ9)
CAVNSVGAFKTIF

SEQ ID NO: 346562 - protein, 15 aa, Homo sapiens
  CDR3 for beta chain variable domain of TCR clone 173281 (TRBV11-2, TRBJ2-3)
CASSGRDVLTDTQYF

SEQ ID NO: 346563 - protein, 14 aa, Homo sapiens
  CDR3 for alpha chain variable domain of TCR clone 173282 (TRAV17, TRAJ37)
CATDGSSNTGKLIF

SEQ ID NO: 346564 - protein, 15 aa, Homo sapiens
  CDR3 for beta chain variable domain of TCR clone 173282 (TRBV5-1, TRBJ2-3)
CASSVTSGSTDTQYF

SEQ ID NO: 346565 - protein, 14 aa, Homo sapiens
  CDR3 for alpha chain variable domain of TCR clone 173283 (TRAV35, TRAJ10)
CAGILTGGGNKLTF

SEQ ID NO: 346566 - protein, 15 aa, Homo sapiens
  CDR3 for beta chain variable domain of TCR clone 173283 (TRBV5-1, TRBJ2-7)
CASSFRLAGVHEQYF

SEQ ID NO: 346567 - protein, 11 aa, Homo sapiens
  CDR3 for alpha chain variable domain of TCR clone 173284 (TRAV3, TRAJ21)
CAVGNFNKFYF

SEQ ID NO: 346568 - protein, 15 aa, Homo sapiens
  CDR3 for beta chain variable domain of TCR clone 173284 (TRBV25-1, TRBJ1-6)
CASSGDRGLNSPLHF

SEQ ID NO: 346569 - protein, 14 aa, Homo sapiens
  CDR3 for alpha chain variable domain of TCR clone 173285 (TRAV16, TRAJ54)
CALSLIQGAQKLES

SEQ ID NO: 346570 - protein, 15 aa, Homo sapiens
  CDR3 for beta chain variable domain of TCR clone 173285 (TRBV20-1, TRBJ2-7)
CSARDRVSGMDEQYF

SEQ ID NO: 346571 - protein, 15 aa, Homo sapiens
  CDR3 for alpha chain variable domain of TCR clone 173286 (TRAV13-1, TRAJ32)
CAASNGWWCYEQAHL

SEQ ID NO: 346572 - protein, 17 aa, Homo sapiens
  CDR3 for beta chain variable domain of TCR clone 173286 (TRBV15, TRBJ1-2)
CATSGREIDVVNYGYTF

SEQ ID NO: 346573 - protein, 16 aa, Homo sapiens
  CDR3 for alpha chain variable domain of TCR clone 173287 (TRAV8-6, TRAJ39)
CAVMPMNNNAGNMLTF

SEQ ID NO: 346574 - protein, 16 aa, Homo sapiens
  CDR3 for beta chain variable domain of TCR clone 173287 (TRBV15, TRBJ2-5)
CATSRYLVAAQETQYF

SEQ ID NO: 346575 - protein, 18 aa, Homo sapiens
  CDR3 for alpha chain variable domain of TCR clone 173288 (TRAV21, TRAJ52)
CAVRPSPAGGTSYGKLTF

SEQ ID NO: 346576 - protein, 15 aa, Homo sapiens
  CDR3 for beta chain variable domain of TCR clone 173288 (TRBV7-9, TRBJ2-7)
CASSSPGLAAYEQYF

SEQ ID NO: 346577 - protein, 13 aa, Homo sapiens
  CDR3 for alpha chain variable domain of TCR clone 173289 (TRAV12-1, TRAJ21)
CVVTQYNFNKFYF

SEQ ID NO: 346578 - protein, 20 aa, Homo sapiens
  CDR3 for beta chain variable domain of TCR clone 173289 (TRBV7-8, TRBJ2-1)
CASSLAHRLAGVRSYNEQFF

SEQ ID NO: 346579 - protein, 16 aa, Homo sapiens
  CDR3 for alpha chain variable domain of TCR clone 173290 (TRAV12-1, TRAJ42)
CVVTPYDGGSQGNLIF

SEQ ID NO: 346580 - protein, 20 aa, Homo sapiens
  CDR3 for beta chain variable domain of TCR clone 173290 (TRBV28, TRBJ2-1)
CASTPIGRSPGLAGGNEQFF

SEQ ID NO: 346581 - protein, 14 aa, Homo sapiens
  CDR3 for alpha chain variable domain of TCR clone 173291 (TRAV26-1, TRAJ38)
CIADNAGNNRRRIW

SEQ ID NO: 346582 - protein, 15 aa, Homo sapiens
  CDR3 for beta chain variable domain of TCR clone 173291 (TRBV7-6, TRBJ1-4)
CASSLGAGAGEKLFF

SEQ ID NO: 346583 - protein, 18 aa, Homo sapiens
  CDR3 for alpha chain variable domain of TCR clone 173292 (TRAV1-2, TRAJ18)
CAVRDMGDRGSTLGRLYF

SEQ ID NO: 346584 - protein, 15 aa, Homo sapiens
  CDR3 for beta chain variable domain of TCR clone 173292 (TRBV7-9, TRBJ1-4)
CASSARTGGNEKLFF

SEQ ID NO: 346585 - protein, 14 aa, Homo sapiens
  CDR3 for alpha chain variable domain of TCR clone 173293 (TRAV13-2, TRAJ17)
CAENSKAAGNKLTF

SEQ ID NO: 346586 - protein, 16 aa, Homo sapiens
  CDR3 for beta chain variable domain of TCR clone 173293 (TRBV2, TRBJ2-1)
CASSVGGSLSYNEQFF

SEQ ID NO: 346587 - protein, 16 aa, Homo sapiens
  CDR3 for alpha chain variable domain of TCR clone 173294 (TRAV3, TRAJ10)
CAVRDMRAGGGNKLTF

SEQ ID NO: 346588 - protein, 16 aa, Homo sapiens
  CDR3 for beta chain variable domain of TCR clone 173294 (TRBV20-1, TRBJ1-4)
CSAPGQGLLTNDKLFF

SEQ ID NO: 346589 - protein, 14 aa, Homo sapiens
  CDR3 for alpha chain variable domain of TCR clone 173295 (TRAV26-1, TRAJ26)
CIVRATFLGQHFVF

SEQ ID NO: 346590 - protein, 16 aa, Homo sapiens
  CDR3 for beta chain variable domain of TCR clone 173295 (TRBV12-4, TRBJ2-7)
CASRATGTGPSYEQYF

SEQ ID NO: 346591 - protein, 14 aa, Homo sapiens
  CDR3 for alpha chain variable domain of TCR clone 173296 (TRAV1-2, TRAJ16)
CAVNRFSDGQKLLF

SEQ ID NO: 346592 - protein, 14 aa, Homo sapiens
  CDR3 for beta chain variable domain of TCR clone 173296 (TRBV7-9, TRBJ2-3)
CASSLEDGTDTRYF

SEQ ID NO: 346593 - protein, 14 aa, Homo sapiens
  CDR3 for alpha chain variable domain of TCR clone 173297 (TRAV8-2, TRAJ4)
CVVSPSRSYNKLIF

SEQ ID NO: 346594 - protein, 15 aa, Homo sapiens
  CDR3 for beta chain variable domain of TCR clone 173297 (TRBV4-1, TRBJ1-4)
CASSDTGGTNEKLFF

SEQ ID NO: 346595 - protein, 14 aa, Homo sapiens
  CDR3 for alpha chain variable domain of TCR clone 173298 (TRAV17, TRAJ32)
CATDPGGATNKLIF

SEQ ID NO: 346596 - protein, 15 aa, Homo sapiens
  CDR3 for beta chain variable domain of TCR clone 173298 (TRBV28, TRBJ1-3)
CASSMGWASGNTIYF

SEQ ID NO: 346597 - protein, 10 aa, Homo sapiens
  CDR3 for alpha chain variable domain of TCR clone 173299 (TRAV1-2, TRAJ20)
CALNDYKLSV

SEQ ID NO: 346598 - protein, 16 aa, Homo sapiens
  CDR3 for beta chain variable domain of TCR clone 173299 (TRBV20-1, TRBJ1-1)
CSARALTQGMNTEAFF

SEQ ID NO: 346599 - protein, 16 aa, Homo sapiens
  CDR3 for alpha chain variable domain of TCR clone 173300 (TRAV8-3, TRAJ22)
CAVDLLGPGSARQLTF

SEQ ID NO: 346600 - protein, 14 aa, Homo sapiens
  CDR3 for beta chain variable domain of TCR clone 173300 (TRBV11-2, TRBJ2-7)
CASSLDLEGYEQYF

SEQ ID NO: 346601 - protein, 15 aa, Homo sapiens
  CDR3 for alpha chain variable domain of TCR clone 173301 (TRAV12-2, TRAJ53)
CAVNGGGGSNYKLKF

SEQ ID NO: 346602 - protein, 14 aa, Homo sapiens
  CDR3 for beta chain variable domain of TCR clone 173301 (TRBV18, TRBJ2-7)
CASSPRGGAYEQYF

SEQ ID NO: 346603 - protein, 15 aa, Homo sapiens
  CDR3 for alpha chain variable domain of TCR clone 173302 (TRAV27, TRAJ38)
CAARRNAGKNRELIW

SEQ ID NO: 346604 - protein, 13 aa, Homo sapiens
  CDR3 for beta chain variable domain of TCR clone 173302 (TRBV20-1, TRBJ1-1)
CSARAGGNTEAFF

SEQ ID NO: 346605 - protein, 12 aa, Homo sapiens
  CDR3 for alpha chain variable domain of TCR clone 173303 (TRAV9-2, TRAJ34)
CALITGTDKLIF

SEQ ID NO: 346606 - protein, 13 aa, Homo sapiens
  CDR3 for beta chain variable domain of TCR clone 173303 (TRBV10-2, TRBJ1-1)
CASNDQMNTEAFF

SEQ ID NO: 346607 - protein, 14 aa, Homo sapiens
  CDR3 for alpha chain variable domain of TCR clone 173304 (TRAV12-2, TRAJ17)
CAVLFKAACNKLTF

SEQ ID NO: 346608 - protein, 13 aa, Homo sapiens
  CDR3 for beta chain variable domain of TCR clone 173304 (TRBV19, TRBJ1-2)
CASSQGQVYGYTF

SEQ ID NO: 346609 - protein, 13 aa, Homo sapiens
  CDR3 for alpha chain variable domain of TCR clone 173305 (TRAV24, TRAJ42)
CAFSTGSQGNLIF

SEQ ID NO: 346610 - protein, 19 aa, Homo sapiens
  CDR3 for beta chain variable domain of TCR clone 173305 (TRBV19, TRBJ2-5)
CASSIGQVTDFFLRETQYF

SEQ ID NO: 346611 - protein, 13 aa, Homo sapiens
  CDR3 for alpha chain variable domain of TCR clone 173306 (TRAV3, TRAJ41)
CAVSSNSGFALNF

SEQ ID NO: 346612 - protein, 13 aa, Homo sapiens
  CDR3 for beta chain variable domain of TCR clone 173306 (TRBV20-1, TRBJ2-2)
CSALSGGAGELFF

SEQ ID NO: 346613 - protein, 16 aa, Homo sapiens
  CDR3 for alpha chain variable domain of TCR clone 173307 (TRAV16, TRAJ4)
CALSRMFSGGYNKLIF

SEQ ID NO: 346614 - protein, 16 aa, Homo sapiens
  CDR3 for beta chain variable domain of TCR clone 173307 (TRBV15, TRBJ2-3)
CATSRDLGIVTDTQYF

SEQ ID NO: 346615 - protein, 13 aa, Homo sapiens
  CDR3 for alpha chain variable domain of TCR clone 173308 (TRAV21, TRAJ44)
CAAYTGTASKLTF

SEQ ID NO: 346616 - protein, 15 aa, Homo sapiens
  CDR3 for beta chain variable domain of TCR clone 173308 (TRBV28, TRBJ2-7)
CASSRWDRGSYEQYF

SEQ ID NO: 346617 - protein, 11 aa, Homo sapiens
  CDR3 for alpha chain variable domain of TCR clone 173309 (TRAV2, TRAJ33)
CAVESNYQLIW

SEQ ID NO: 346618 - protein, 15 aa, Homo sapiens
  CDR3 for beta chain variable domain of TCR clone 173309 (TRBV19, TRBJ1-1)
CPSTSGQIQNTEAFF

SEQ ID NO: 346619 - protein, 14 aa, Homo sapiens
  CDR3 for alpha chain variable domain of TCR clone 173310 (TRAV12-3, TRAJ15)
CAMIPPQAGTALIF

SEQ ID NO: 346620 - protein, 17 aa, Homo sapiens
  CDR3 for beta chain variable domain of TCR clone 173310 (TRBV11-2, TRBJ2-1)
CASSLYPPGVEYNEQFF

SEQ ID NO: 346621 - protein, 15 aa, Homo sapiens
  CDR3 for alpha chain variable domain of TCR clone 173311 (TRAV8-4, TRAJ7)
CAVRGGNYGNNRLAL

SEQ ID NO: 346622 - protein, 11 aa, Homo sapiens
  CDR3 for beta chain variable domain of TCR clone 173311 (TRBV20-1, TRBJ2-1)
CSLSSGSEQFF

SEQ ID NO: 346623 - protein, 14 aa, Homo sapiens
  CDR3 for alpha chain variable domain of TCR clone 173312 (TRAV17, TRAJ57)
CATDPQGGSEKLVF

SEQ ID NO: 346624 - protein, 16 aa, Homo sapiens
  CDR3 for beta chain variable domain of TCR clone 173312 (TRBV7-2, TRBJ2-6)
CASSERRASGANVLTF

SEQ ID NO: 346625 - protein, 13 aa, Homo sapiens
  CDR3 for alpha chain variable domain of TCR clone 173313 (TRAV2, TRAJ29)
CAAGNSGTTPLVL

SEQ ID NO: 346626 - protein, 16 aa, Homo sapiens
  CDR3 for beta chain variable domain of TCR clone 173313 (TRBV7-9, TRBJ1-2)
CASSPGGGAINYGYTF

SEQ ID NO: 346627 - protein, 13 aa, Homo sapiens
  CDR3 for alpha chain variable domain of TCR clone 173314 (TRAV13-1, TRAJ5)
CAASDTGRRALTF

SEQ ID NO: 346628 - protein, 16 aa, Homo sapiens
  CDR3 for beta chain variable domain of TCR clone 173314 (TRBV28, TRBJ2-3)
CATSDPGTGATDTQYF

SEQ ID NO: 346629 - protein, 15 aa, Homo sapiens
  CDR3 for alpha chain variable domain of TCR clone 173315 (TRAV12-2, TRAJ53)
CAVNGGGGWNYKLTF

SEQ ID NO: 346630 - protein, 13 aa, Homo sapiens
  CDR3 for beta chain variable domain of TCR clone 173315 (TRBV3-1, TRBJ1-1)
CASSPGVITEAFF

SEQ ID NO: 346631 - protein, 15 aa, Homo sapiens
  CDR3 for alpha chain variable domain of TCR clone 173316 (TRAV25, TRAJ52)
CAGTSGGTSYGKLTF

SEQ ID NO: 346632 - protein, 16 aa, Homo sapiens
  CDR3 for beta chain variable domain of TCR clone 173316 (TRBV15, TRBJ1-2)
CAISRGPRTGGGGYTF

SEQ ID NO: 346633 - protein, 12 aa, Homo sapiens
  CDR3 for alpha chain variable domain of TCR clone 173317 (TRAV27, TRAJ42)
CAGGGSQGNLIF

SEQ ID NO: 346634 - protein, 13 aa, Homo sapiens
  CDR3 for beta chain variable domain of TCR clone 173317 (TRBV19, TRBJ2-7)
CASSIRRSYEQYF

SEQ ID NO: 346635 - protein, 13 aa, Homo sapiens
  CDR3 for alpha chain variable domain of TCR clone 173318 (TRAV17, TRAJ9)
CATDYTGGFKPIF

SEQ ID NO: 346636 - protein, 16 aa, Homo sapiens
  CDR3 for beta chain variable domain of TCR clone 173318 (TRBV7-7, TRBJ2-1)
CASSLASGTAYNEQFF

SEQ ID NO: 346637 - protein, 13 aa, Homo sapiens
  CDR3 for alpha chain variable domain of TCR clone 173319 (TRAV2, TRAJ29)
CAAGNSGTTPLVF

SEQ ID NO: 346638 - protein, 16 aa, Homo sapiens
  CDR3 for beta chain variable domain of TCR clone 173319 (TRBV7-9, TRBJ1-2)
CASSPGGGAINYGYTF

SEQ ID NO: 346639 - protein, 14 aa, Homo sapiens
  CDR3 for alpha chain variable domain of TCR clone 173320 (TRAV1-2, TRAJ16)
CAVNRFSDGQKLLF

SEQ ID NO: 346640 - protein, 16 aa, Homo sapiens
  CDR3 for beta chain variable domain of TCR clone 173320 (TRBV12-4, TRBJ2-3)
CASSFPSNTNTDTQYF

SEQ ID NO: 346641 - protein, 14 aa, Homo sapiens
  CDR3 for alpha chain variable domain of TCR clone 173321 (TRAV30, TRAJ26)
CGTEIVSYGQNFVF

SEQ ID NO: 346642 - protein, 13 aa, Homo sapiens
  CDR3 for beta chain variable domain of TCR clone 173321 (TRBV10-3, TRBJ2-7)
CASKLAVNYEQNF

SEQ ID NO: 346643 - protein, 17 aa, Homo sapiens
  CDR3 for alpha chain variable domain of TCR clone 173322 (TRAV4, TRAJ18)
CLVVAGGRGSTMGRLYF

SEQ ID NO: 346644 - protein, 17 aa, Homo sapiens
  CDR3 for beta chain variable domain of TCR clone 173322 (TRBV28, TRBJ2-2)
CASSLATGMGDAGELFF

SEQ ID NO: 346645 - protein, 13 aa, Homo sapiens
  CDR3 for alpha chain variable domain of TCR clone 173323 (TRAV35, TRAJ44)
CAGLSGTASKLTF

SEQ ID NO: 346646 - protein, 19 aa, Homo sapiens
  CDR3 for beta chain variable domain of TCR clone 173323 (TRBV28, TRBJ2-4)
CASSFQPGGPAHSKNSQYF

SEQ ID NO: 346647 - protein, 14 aa, Homo sapiens
  CDR3 for alpha chain variable domain of TCR clone 173324 (TRAV8-4, TRAJ27)
CAVSKGTNAGISTF

SEQ ID NO: 346648 - protein, 16 aa, Homo sapiens
  CDR3 for beta chain variable domain of TCR clone 173324 (TRBV2, TRBJ2-7)
CASSSTRRGSSYEQYF

SEQ ID NO: 346649 - protein, 14 aa, Homo sapiens
  CDR3 for alpha chain variable domain of TCR clone 173325 (TRAV2, TRAJ16)
CAVERGSDGQMLLF

SEQ ID NO: 346650 - protein, 12 aa, Homo sapiens
  CDR3 for beta chain variable domain of TCR clone 173325 (TRBV6-5, TRBJ2-7)
CASYIYGYEQYF

SEQ ID NO: 346651 - protein, 15 aa, Homo sapiens
  CDR3 for alpha chain variable domain of TCR clone 173326 (TRAV1-2, TRAJ20)
CLLPLCCGYDYKLSF

SEQ ID NO: 346652 - protein, 18 aa, Homo sapiens
  CDR3 for beta chain variable domain of TCR clone 173326 (TRBV20-1, TRBJ2-6)
CSAETTPTHGSGANVLTF

SEQ ID NO: 346653 - protein, 15 aa, Homo sapiens
  CDR3 for alpha chain variable domain of TCR clone 173327 (TRAV26-1, TRAJ39)
CIVRVARNASNMLTF

SEQ ID NO: 346654 - protein, 16 aa, Homo sapiens
  CDR3 for beta chain variable domain of TCR clone 173327 (TRBV5-1, TRBJ2-1)
CASSLTLAGGRNEQFF

SEQ ID NO: 346655 - protein, 18 aa, Homo sapiens
  CDR3 for alpha chain variable domain of TCR clone 173328 (TRAV21, TRAJ52)
CAVRPSPAGGTSYGKLTF

SEQ ID NO: 346656 - protein, 17 aa, Homo sapiens
  CDR3 for beta chain variable domain of TCR clone 173328 (TRBV13, TRBJ2-3)
CARSLSRVAGGEEYAVF

SEQ ID NO: 346657 - protein, 13 aa, Homo sapiens
  CDR3 for alpha chain variable domain of TCR clone 173329 (TRAV2, TRAJ5)
CAVPDTGRRALTF

SEQ ID NO: 346658 - protein, 13 aa, Homo sapiens
  CDR3 for beta chain variable domain of TCR clone 173329 (TRBV9, TRBJ2-1)
CASSPSGGSEQFF

SEQ ID NO: 346659 - protein, 13 aa, Homo sapiens
  CDR3 for alpha chain variable domain of TCR clone 173330 (TRAV29/DV5, TRAJ31)
CAASRNTNARLMF

SEQ ID NO: 346660 - protein, 12 aa, Homo sapiens
  CDR3 for beta chain variable domain of TCR clone 173330 (TRBV14, TRBJ2-7)
CASSLYKDEQYF

SEQ ID NO: 346661 - protein, 13 aa, Homo sapiens
  CDR3 for alpha chain variable domain of TCR clone 173331 (TRAV1-1, TRAJ9)
CAAKNTGGFKTMF

SEQ ID NO: 346662 - protein, 13 aa, Homo sapiens
  CDR3 for beta chain variable domain of TCR clone 173331 (TRBV7-9, TRBJ1-2)
CASSLKQNYGYTF

SEQ ID NO: 346663 - protein, 13 aa, Homo sapiens
  CDR3 for alpha chain variable domain of TCR clone 173332 (TRAV2, TRAJ15)
CAVASQAGTALIF

SEQ ID NO: 346664 - protein, 15 aa, Homo sapiens
  CDR3 for beta chain variable domain of TCR clone 173332 (TRBV7-3, TRBJ2-2)
CASSETGQGIGELFF

SEQ ID NO: 346665 - protein, 12 aa, Homo sapiens
  CDR3 for alpha chain variable domain of TCR clone 173333 (TRAV13-2, TRAJ23)
CAERHRGGKLIF

SEQ ID NO: 346666 - protein, 16 aa, Homo sapiens
  CDR3 for beta chain variable domain of TCR clone 173333 (TRBV20-1, TRBJ1-4)
CSAPGQSLLTNEKLFC

SEQ ID NO: 346667 - protein, 16 aa, Homo sapiens
  CDR3 for alpha chain variable domain of TCR clone 173334 (TRAV3, TRAJ21)
CAVRDIERGNFNKFYF

SEQ ID NO: 346668 - protein, 16 aa, Homo sapiens
  CDR3 for beta chain variable domain of TCR clone 173334 (TRBV12-4, TRBJ1-5)
CASSRPIGGSNQPQHF

SEQ ID NO: 346669 - protein, 13 aa, Homo sapiens
  CDR3 for alpha chain variable domain of TCR clone 173335 (TRAV16, TRAJ34)
CALTGYNTDKLIF

SEQ ID NO: 346670 - protein, 13 aa, Homo sapiens
  CDR3 for beta chain variable domain of TCR clone 173335 (TRBV6-1, TRBJ2-1)
CASREDGGYEQFF

SEQ ID NO: 346671 - protein, 13 aa, Homo sapiens
  CDR3 for alpha chain variable domain of TCR clone 173336 (TRAV13-1, TRAJ45)
CADSGGGADGRTF

SEQ ID NO: 346672 - protein, 14 aa, Homo sapiens
  CDR3 for beta chain variable domain of TCR clone 173336 (TRBV5-1, TRBJ2-7)
CASSRGESLYEQYF

SEQ ID NO: 346673 - protein, 12 aa, Homo sapiens
  CDR3 for alpha chain variable domain of TCR clone 173337 (TRAV8-3, TRAJ26)
CAGDNYGQNFVF

SEQ ID NO: 346674 - protein, 16 aa, Homo sapiens
  CDR3 for beta chain variable domain of TCR clone 173337 (TRBV5-1, TRBJ1-1)
CASSSTTGNSNTEAFF

SEQ ID NO: 346675 - protein, 10 aa, Homo sapiens
  CDR3 for alpha chain variable domain of TCR clone 173338 (TRAV23/DV6, TRAJ57)
CAASSTLPQD

SEQ ID NO: 346676 - protein, 14 aa, Homo sapiens
  CDR3 for beta chain variable domain of TCR clone 173338 (TRBV25-1, TRBJ1-1)
CASTHLGGNTEAFF

SEQ ID NO: 346677 - protein, 14 aa, Homo sapiens
  CDR3 for alpha chain variable domain of TCR clone 173339 (TRAV34, TRAJ44)
CGADGTGTASKLTF

SEQ ID NO: 346678 - protein, 15 aa, Homo sapiens
  CDR3 for beta chain variable domain of TCR clone 173339 (TRBV7-9, TRBJ1-6)
CASSSPGRGNSPLHF

SEQ ID NO: 346679 - protein, 11 aa, Homo sapiens
  CDR3 for alpha chain variable domain of TCR clone 173340 (TRAV12-2, TRAJ29)
CAVTLRSPLVF

SEQ ID NO: 346680 - protein, 16 aa, Homo sapiens
  CDR3 for beta chain variable domain of TCR clone 173340 (TRBV2, TRBJ2-1)
CASSVGGSLSYNEQFF

SEQ ID NO: 346681 - protein, 16 aa, Homo sapiens
  CDR3 for alpha chain variable domain of TCR clone 173341 (TRAV26-1, TRAJ47)
CIVRVVLSQYGNKMVF

SEQ ID NO: 346682 - protein, 16 aa, Homo sapiens
  CDR3 for beta chain variable domain of TCR clone 173341 (TRBV5-1, TRBJ2-1)
CASSFGVSGSYNEQFF

SEQ ID NO: 346683 - protein, 13 aa, Homo sapiens
  CDR3 for alpha chain variable domain of TCR clone 173342 (TRAV22, TRAJ26)
CAVEHNYGQNFVF

SEQ ID NO: 346684 - protein, 16 aa, Homo sapiens
  CDR3 for beta chain variable domain of TCR clone 173342 (TRBV7-2, TRBJ2-6)
GASSERRASGANVLTF

SEQ ID NO: 346685 - protein, 15 aa, Homo sapiens
  CDR3 for alpha chain variable domain of TCR clone 173343 (TRAV12-1, TRAJ5)
CVVNMLETGRRALTF

SEQ ID NO: 346686 - protein, 16 aa, Homo sapiens
  CDR3 for beta chain variable domain of TCR clone 173343 (TRBV19, TRBJ1-1)
CASSPTRFWPGTEAFF

SEQ ID NO: 346687 - protein, 13 aa, Homo sapiens
  CDR3 for alpha chain variable domain of TCR clone 173344 (TRAV12-3, TRAJ21)
CAPGPHTFNKFYF

SEQ ID NO: 346688 - protein, 16 aa, Homo sapiens
  CDR3 for beta chain variable domain of TCR clone 173344 (TRBV5-1, TRBJ2-2)
CASSSYREGDTGELFF

SEQ ID NO: 346689 - protein, 12 aa, Homo sapiens
  CDR3 for alpha chain variable domain of TCR clone 173345 (TRAV25, TRAJ38)
CAGTGNNRKLIW

SEQ ID NO: 346690 - protein, 14 aa, Homo sapiens
  CDR3 for beta chain variable domain of TCR clone 173345 (TRBV19, TRBJ1-5)
RASSKMTGPQPQHF

SEQ ID NO: 346691 - protein, 17 aa, Homo sapiens
  CDR3 for alpha chain variable domain of TCR clone 173346 (TRAV26-2, TRAJ42)
CILRDVGYGGSQGNLIF

SEQ ID NO: 346692 - protein, 14 aa, Homo sapiens
  CDR3 for beta chain variable domain of TCR clone 173346 (TRBV7-2, TRBJ1-2)
CASSSQGAHYGYTF

SEQ ID NO: 346693 - protein, 14 aa, Homo sapiens
  CDR3 for alpha chain variable domain of TCR clone 173347 (TRAV1-2, TRAJ16)
CAVNRFSDGQKLLF

SEQ ID NO: 346694 - protein, 15 aa, Homo sapiens
  CDR3 for beta chain variable domain of TCR clone 173347 (TRBV27, TRBJ2-1)
CASSNGGGSSNEQVF

SEQ ID NO: 346695 - protein, 17 aa, Homo sapiens
  CDR3 for alpha chain variable domain of TCR clone 173348 (TRAV3, TRAJ6)
CAVRDGPRAGGSYIPTL

SEQ ID NO: 346696 - protein, 11 aa, Homo sapiens
  CDR3 for beta chain variable domain of TCR clone 173348 (TRBV27, TRBJ2-3)
CASSLGDTQYF

SEQ ID NO: 346697 - protein, 16 aa, Homo sapiens
  CDR3 for alpha chain variable domain of TCR clone 173349 (TRAV36/DV7, TRAJ30)
CAVETYGLDRDDKIIF

SEQ ID NO: 346698 - protein, 15 aa, Homo sapiens
  CDR3 for beta chain variable domain of TCR clone 173349 (TRBV18, TRBJ2-5)
CASSPDPGLQETQYF

SEQ ID NO: 346699 - protein, 13 aa, Homo sapiens
  CDR3 for alpha chain variable domain of TCR clone 173350 (TRAV21, TRAJ27)
CAARPGNAGKSTL

SEQ ID NO: 346700 - protein, 14 aa, Homo sapiens
  CDR3 for beta chain variable domain of TCR clone 173350 (TRBV7-6, TRBJ2-3)
CASSLGTATDTQYF

SEQ ID NO: 346701 - protein, 14 aa, Homo sapiens
  CDR3 for alpha chain variable domain of TCR clone 173351 (TRAV1-2, TRAJ15)
CAVRDRQAGTALIF

SEQ ID NO: 346702 - protein, 14 aa, Homo sapiens
  CDR3 for beta chain variable domain of TCR clone 173351 (TRBV12-5, TRBJ2-5)
CASGSRTHPETQYF

SEQ ID NO: 346703 - protein, 14 aa, Homo sapiens
  CDR3 for alpha chain variable domain of TCR clone 173352 (TRAV14/DV4, TRAJ15)
CAMRWDQAGTALIF

SEQ ID NO: 346704 - protein, 16 aa, Homo sapiens
  CDR3 for beta chain variable domain of TCR clone 173352 (TRBV15, TRBJ2-3)
CATSRDLGIVADTQYF

SEQ ID NO: 346705 - protein, 13 aa, Homo sapiens
  CDR3 for alpha chain variable domain of TCR clone 173353 (TRAV8-6, TRAJ49)
CAVITNTGNQFYF

SEQ ID NO: 346706 - protein, 15 aa, Homo sapiens
  CDR3 for beta chain variable domain of TCR clone 173353 (TRBV7-2, TRBJ2-3)
CASSLAGAFIDTQYF

SEQ ID NO: 346707 - protein, 14 aa, Homo sapiens
  CDR3 for alpha chain variable domain of TCR clone 173354 (TRAV3, TRAJ34)
CAVRAPGNTDKLIF

SEQ ID NO: 346708 - protein, 14 aa, Homo sapiens
  CDR3 for beta chain variable domain of TCR clone 173354 (TRBV6-1, TRBJ1-3)
CASVQGGGGNTIYF

SEQ ID NO: 346709 - protein, 15 aa, Homo sapiens
  CDR3 for alpha chain variable domain of TCR clone 173355 (TRAV38-1, TRAJ57)
CAFMDSQGGSEKLVF

SEQ ID NO: 346710 - protein, 12 aa, Homo sapiens
  CDR3 for beta chain variable domain of TCR clone 173355 (TRBV11-2, TRBJ2-2)
CASSLGGGELFF

SEQ ID NO: 346711 - protein, 16 aa, Homo sapiens
  CDR3 for alpha chain variable domain of TCR clone 173356 (TRAV13-1, TRAJ10)
CAAGYILTGGGNKITF

SEQ ID NO: 346712 - protein, 15 aa, Homo sapiens
  CDR3 for beta chain variable domain of TCR clone 173356 (TRBV12-4, TRBJ2-7)
CASSQTGAISYEQYF

SEQ ID NO: 346713 - protein, 12 aa, Homo sapiens
  CDR3 for alpha chain variable domain of TCR clone 173357 (TRAV1-2, TRAJ29)
CAVPSGNTPLVF

SEQ ID NO: 346714 - protein, 16 aa, Homo sapiens
  CDR3 for beta chain variable domain of TCR clone 173357 (TRBV6-6, TRBJ1-5)
CASSYSTLVGNRPQHF

SEQ ID NO: 346715 - protein, 15 aa, Homo sapiens
  CDR3 for alpha chain variable domain of TCR clone 173358 (TRAV2, TRAJ15)
CAVEDREQAGTALIF

SEQ ID NO: 346716 - protein, 13 aa, Homo sapiens
  CDR3 for beta chain variable domain of TCR clone 173358 (TRBV10-2, TRBJ2-3)
CAGSESGDHTQYF

SEQ ID NO: 346717 - protein, 14 aa, Homo sapiens
  CDR3 for alpha chain variable domain of TCR clone 173359 (TRAV8-4, TRAJ54)
SAVSEVLGAQKLVF

SEQ ID NO: 346718 - protein, 15 aa, Homo sapiens
  CDR3 for beta chain variable domain of TCR clone 173359 (TRBV6-1, TRBJ2-6)
CASSSRPSGANVLTF

SEQ ID NO: 346719 - protein, 16 aa, Homo sapiens
  CDR3 for alpha chain variable domain of TCR clone 173360 (TRAV26-1, TRAJ36)
CIVRAIGRSGANNHFF

SEQ ID NO: 346720 - protein, 14 aa, Homo sapiens
  CDR3 for beta chain variable domain of TCR clone 173360 (TRBV25-1, TRBJ2-1)
CASSKTGGYNEQFF

SEQ ID NO: 346721 - protein, 15 aa, Homo sapiens
  CDR3 for alpha chain variable domain of TCR clone 173361 (TRAV25, TRAJ52)
CSGRPGGTSYGKLTF

SEQ ID NO: 346722 - protein, 14 aa, Homo sapiens
  CDR3 for beta chain variable domain of TCR clone 173361 (TRBV11-2, TRBJ2-1)
CASSLEPSGRGKFF

SEQ ID NO: 346723 - protein, 13 aa, Homo sapiens
  CDR3 for alpha chain variable domain of TCR clone 173362 (TRAV12-1, TRAJ6)
CVVFPGGSYIPTF

SEQ ID NO: 346724 - protein, 13 aa, Homo sapiens
  CDR3 for beta chain variable domain of TCR clone 173362 (TRBV13, TRBJ2-5)
CASSPEVGETQYF

SEQ ID NO: 346725 - protein, 10 aa, Homo sapiens
  CDR3 for alpha chain variable domain of TCR clone 173363 (TRAV20, TRAJ22)
CAAPARQQTF

SEQ ID NO: 346726 - protein, 11 aa, Homo sapiens
  CDR3 for beta chain variable domain of TCR clone 173363 (TRBV29-1, TRBJ2-5)
CSEDRTGTQYF

SEQ ID NO: 346727 - protein, 14 aa, Homo sapiens
  CDR3 for alpha chain variable domain of TCR clone 173364 (TRAV3, TRAJ21)
CAVESQANFNKFYF

SEQ ID NO: 346728 - protein, 18 aa, Homo sapiens
  CDR3 for beta chain variable domain of TCR clone 173364 (TRBV7-9, TRBJ2-1)
CASSLAVSGTNGRNEQFF

SEQ ID NO: 346729 - protein, 14 aa, Homo sapiens
  CDR3 for alpha chain variable domain of TCR clone 173365 (TRAV13-1, TRAJ39)
CAASYNNAGNMLTF

SEQ ID NO: 346730 - protein, 17 aa, Homo sapiens
  CDR3 for beta chain variable domain of TCR clone 173365 (TRBV12-4, TRBJ2-3)
CASSGPGLAGGADTQYF

SEQ ID NO: 346731 - protein, 14 aa, Homo sapiens
  CDR3 for alpha chain variable domain of TCR clone 173366 (TRAV38-1, TRAJ45)
CAYYSGGGADGINF

SEQ ID NO: 346732 - protein, 20 aa, Homo sapiens
  CDR3 for beta chain variable domain of TCR clone 173366 (TRBV28, TRBJ2-1)
CASTPIGRSPGLAGGNEQFF

SEQ ID NO: 346733 - protein, 12 aa, Homo sapiens
  CDR3 for alpha chain variable domain of TCR clone 173367 (TRAV4, TRAJ5)
RTMDTGSRALTF

SEQ ID NO: 346734 - protein, 15 aa, Homo sapiens
  CDR3 for beta chain variable domain of TCR clone 173367 (TRBV27, TRBJ2-5)
CASSLMPSGGETQYF

SEQ ID NO: 346735 - protein, 13 aa, Homo sapiens
  CDR3 for alpha chain variable domain of TCR clone 173368 (TRAV21, TRAJ27)
CAARPGNAGKSTF

SEQ ID NO: 346736 - protein, 14 aa, Homo sapiens
  CDR3 for beta chain variable domain of TCR clone 173368 (TRBV11-2, TRBJ2-1)
CASRLGAGAYEQYF

SEQ ID NO: 346737 - protein, 15 aa, Homo sapiens
  CDR3 for alpha chain variable domain of TCR clone 173369 (TRAV21, TRAJ24)
CAARSSTDSWGKLQF

SEQ ID NO: 346738 - protein, 13 aa, Homo sapiens
  CDR3 for beta chain variable domain of TCR clone 173369 (TRBV10-3, TRBJ2-7)
CASKRAVSYEQYF

SEQ ID NO: 346739 - protein, 15 aa, Homo sapiens
  CDR3 for alpha chain variable domain of TCR clone 173370 (TRAV3, TRAJ3)
CAVRDRRRGASKIIF

SEQ ID NO: 346740 - protein, 17 aa, Homo sapiens
  CDR3 for beta chain variable domain of TCR clone 173370 (TRBV5-7, TRBJ2-5)
CQQHARFGQLYQETQYF

SEQ ID NO: 346741 - protein, 15 aa, Homo sapiens
  CDR3 for alpha chain variable domain of TCR clone 173371 (TRAV8-3, TRAJ11)
CAVGLLNSGYSTLPF

SEQ ID NO: 346742 - protein, 14 aa, Homo sapiens
  CDR3 for beta chain variable domain of TCR clone 173371 (TRBV4-1, TRBJ2-5)
CASSRSGGGETQYF

SEQ ID NO: 346743 - protein, 16 aa, Homo sapiens
  CDR3 for alpha chain variable domain of TCR clone 173372 (TRAV3, TRAJ10)
CAVRDMRAGGGNKLTF

SEQ ID NO: 346744 - protein, 16 aa, Homo sapiens
  CDR3 for beta chain variable domain of TCR clone 173372 (TRBV7-2, TRBJ1-1)
CASSSNGGVMNTEAFF

SEQ ID NO: 346745 - protein, 10 aa, Homo sapiens
  CDR3 for alpha chain variable domain of TCR clone 173373 (TRAV23/DV6, TRAJ57)
CAANSTLSQG

SEQ ID NO: 346746 - protein, 14 aa, Homo sapiens
  CDR3 for beta chain variable domain of TCR clone 173373 (TRBV7-8, TRBJ2-5)
CASSATGGQETQYF

SEQ ID NO: 346747 - protein, 16 aa, Homo sapiens
  CDR3 for alpha chain variable domain of TCR clone 173374 (TRAV12-3, TRAJ53)
CAMSPGSGGSNYKLTF

SEQ ID NO: 346748 - protein, 16 aa, Homo sapiens
  CDR3 for beta chain variable domain of TCR clone 173374 (TRBV4-2, TRBJ1-1)
CASSQAGFGMNTEAFF

SEQ ID NO: 346749 - protein, 12 aa, Homo sapiens
  CDR3 for alpha chain variable domain of TCR clone 173375 (TRAV12-3, TRAJ17)
CAMTLTGNKLTC

SEQ ID NO: 346750 - protein, 14 aa, Homo sapiens
  CDR3 for beta chain variable domain of TCR clone 173375 (TRBV12-5, TRBJ2-5)
CASGSRTHQETQYF

SEQ ID NO: 346751 - protein, 15 aa, Homo sapiens
  CDR3 for alpha chain variable domain of TCR clone 173376 (TRAV35, TRAJ58)
CAGPRQETSGSRLTF

SEQ ID NO: 346752 - protein, 16 aa, Homo sapiens
  CDR3 for beta chain variable domain of TCR clone 173376 (TRBV2, TRBJ2-1)
CASSVGGSLSYNEQFF

SEQ ID NO: 346753 - protein, 17 aa, Homo sapiens
  CDR3 for alpha chain variable domain of TCR clone 173377 (TRAV13-1, TRAJ31)
CTPRDRLVFGDGTQLVV

SEQ ID NO: 346754 - protein, 12 aa, Homo sapiens
  CDR3 for beta chain variable domain of TCR clone 173377 (TRBV7-9, TRBJ2-7)
CASSLEGYEQYF

SEQ ID NO: 346755 - protein, 13 aa, Homo sapiens
  CDR3 for alpha chain variable domain of TCR clone 173378 (TRAV21, TRAJ49)
CAVRQSTGNQFHF

SEQ ID NO: 346756 - protein, 13 aa, Homo sapiens
  CDR3 for beta chain variable domain of TCR clone 173378 (TRBV6-6, TRBJ1-5)
CASRAYQDQPQHF

SEQ ID NO: 346757 - protein, 15 aa, Homo sapiens
  CDR3 for alpha chain variable domain of TCR clone 173379 (TRAV1-2, TRAJ28)
CAVQYSGAGTYQLTF

SEQ ID NO: 346758 - protein, 15 aa, Homo sapiens
  CDR3 for beta chain variable domain of TCR clone 173379 (TRBV9, TRBJ1-6)
CASSVAGTGDSPLHF

SEQ ID NO: 346759 - protein, 16 aa, Homo sapiens
  CDR3 for alpha chain variable domain of TCR clone 173380 (TRAV23/DV6, )
CADIQSPDPAVYQLRD

SEQ ID NO: 346760 - protein, 13 aa, Homo sapiens
  CDR3 for beta chain variable domain of TCR clone 173380 (TRBV28, TRBJ2-7)
CASRSSGVYEQYF

SEQ ID NO: 346761 - protein, 19 aa, Homo sapiens
  CDR3 for alpha chain variable domain of TCR clone 173381 (TRAV10, TRAJ43)
TASQLSDSASYPAPNDMRF

SEQ ID NO: 346762 - protein, 13 aa, Homo sapiens
  CDR3 for beta chain variable domain of TCR clone 173381 (TRBV20-1, TRBJ2-7)
CSASPSTNYEQYF

SEQ ID NO: 346763 - protein, 12 aa, Homo sapiens
  CDR3 for alpha chain variable domain of TCR clone 173382 (TRAV27, TRAJ20)
CAGASNDYKLSF

SEQ ID NO: 346764 - protein, 14 aa, Homo sapiens
  CDR3 for beta chain variable domain of TCR clone 173382 (TRBV7-9, TRBJ1-4)
CAITEGEANEKLFF

SEQ ID NO: 346765 - protein, 12 aa, Homo sapiens
  CDR3 for alpha chain variable domain of TCR clone 173383 (TRAV1-2, TRAJ33)
CAALDSNYQLIW

SEQ ID NO: 346766 - protein, 13 aa, Homo sapiens
  CDR3 for beta chain variable domain of TCR clone 173383 (TRBV7-2, TRBJ2-7)
CASSVGQEKEQYF

SEQ ID NO: 346767 - protein, 17 aa, Homo sapiens
  CDR3 for alpha chain variable domain of TCR clone 173384 (TRAV3, TRAJ42)
CAVRDGDYGGSQGNLIF

SEQ ID NO: 346768 - protein, 15 aa, Homo sapiens
  CDR3 for beta chain variable domain of TCR clone 173384 (TRBV19, TRBJ2-7)
CASSPAGSGEALRYF

SEQ ID NO: 346769 - protein, 13 aa, Homo sapiens
  CDR3 for alpha chain variable domain of TCR clone 173385 (TRAV8-3, TRAJ28)
CAVGAVGSYQLTF

SEQ ID NO: 346770 - protein, 14 aa, Homo sapiens
  CDR3 for beta chain variable domain of TCR clone 173385 (TRBV4-1, TRBJ1-6)
CASSPGSDSSPLHF

SEQ ID NO: 346771 - protein, 13 aa, Homo sapiens
  CDR3 for alpha chain variable domain of TCR clone 173386 (TRAV21, TRAJ36)
CAVIKTGANNLFF

SEQ ID NO: 346772 - protein, 13 aa, Homo sapiens
  CDR3 for beta chain variable domain of TCR clone 173386 (TRBV29-1, TRBJ2-3)
CSATRGCRDTQYF

SEQ ID NO: 346773 - protein, 12 aa, Homo sapiens
  CDR3 for alpha chain variable domain of TCR clone 173387 (TRAV12-3, TRAJ17)
CAMTLTGNKLTF

SEQ ID NO: 346774 - protein, 15 aa, Homo sapiens
  CDR3 for beta chain variable domain of TCR clone 173387 (TRBV7-2, TRBJ2-1)
CASSFQADEYNEQFF

SEQ ID NO: 346775 - protein, 11 aa, Homo sapiens
  CDR3 for alpha chain variable domain of TCR clone 173388 (TRAV26-1, TRAJ41)
CIARLSIALNF

SEQ ID NO: 346776 - protein, 20 aa, Homo sapiens
  CDR3 for beta chain variable domain of TCR clone 173388 (TRBV28, TRBJ2-1)
CASTPIGRSPGLAGGNEQFF

SEQ ID NO: 346777 - protein, 15 aa, Homo sapiens
  CDR3 for alpha chain variable domain of TCR clone 173389 (TRAV35, TRAJ40)
CAGVPGASGTYKYIF

SEQ ID NO: 346778 - protein, 15 aa, Homo sapiens
  CDR3 for beta chain variable domain of TCR clone 173389 (TRBV9, TRBJ1-6)
CASSVAGTGDSPLHF

SEQ ID NO: 346779 - protein, 13 aa, Homo sapiens
  CDR3 for alpha chain variable domain of TCR clone 173390 (TRAV3, TRAJ21)
CAVREPDFSKFYF

SEQ ID NO: 346780 - protein, 15 aa, Homo sapiens
  CDR3 for beta chain variable domain of TCR clone 173390 (TRBV20-1, TRBJ1-1)
CSASRGVTGNTEAFF

SEQ ID NO: 346781 - protein, 22 aa, Homo sapiens
  CDR3 for alpha chain variable domain of TCR clone 173391 (TRAV1-1, TRAJ30)
CAVRDQTEMTRSSLEKGHDFIF

SEQ ID NO: 346782 - protein, 13 aa, Homo sapiens
  CDR3 for beta chain variable domain of TCR clone 173391 (TRBV28, TRBJ2-7)
CASSPSGTYEQYF

SEQ ID NO: 346783 - protein, 14 aa, Homo sapiens
  CDR3 for alpha chain variable domain of TCR clone 173392 (TRAV12-2, TRAJ17)
CAALFKAAGNKLTF

SEQ ID NO: 346784 - protein, 15 aa, Homo sapiens
  CDR3 for beta chain variable domain of TCR clone 173392 (TRBV13, TRBJ1-5)
CASSFGQGGVQPQHF

SEQ ID NO: 346785 - protein, 13 aa, Homo sapiens
  CDR3 for alpha chain variable domain of TCR clone 173393 (TRAV21, TRAJ20)
CAVGLRVDYKLSF

SEQ ID NO: 346786 - protein, 14 aa, Homo sapiens
  CDR3 for beta chain variable domain of TCR clone 173393 (TRBV4-1, TRBJ1-1)
CASSRSGQSFEAFI

SEQ ID NO: 346787 - protein, 12 aa, Homo sapiens
  CDR3 for alpha chain variable domain of TCR clone 173394 (TRAV21, TRAJ13)
TGPSGGYQKVTF

SEQ ID NO: 346788 - protein, 15 aa, Homo sapiens
  CDR3 for beta chain variable domain of TCR clone 173394 (TRBV7-9, TRBJ1-6)
CASSSPGRGDSPLHF

SEQ ID NO: 346789 - protein, 15 aa, Homo sapiens
  CDR3 for alpha chain variable domain of TCR clone 173395 (TRAV12-2, TRAJ43)
CAFDMRFGAGTRLTV

SEQ ID NO: 346790 - protein, 15 aa, Homo sapiens
  CDR3 for beta chain variable domain of TCR clone 173395 (TRBV20-1, TRBJ2-3)
CSASPPQVSTDTQYF

SEQ ID NO: 346791 - protein, 15 aa, Homo sapiens
  CDR3 for alpha chain variable domain of TCR clone 173396 (TRAV13-1, TRAJ4)
CSASLISGGYNKLIF

SEQ ID NO: 346792 - protein, 15 aa, Homo sapiens
  CDR3 for beta chain variable domain of TCR clone 173396 (TRBV28, TRBJ2-3)
RASTPRGENTDTQYF

SEQ ID NO: 346793 - protein, 20 aa, Homo sapiens
  CDR3 for alpha chain variable domain of TCR clone 173397 (TRAV26-1, TRAJ42)
CCVLFHRQTYYGGSQGNLIF

SEQ ID NO: 346794 - protein, 16 aa, Homo sapiens
  CDR3 for beta chain variable domain of TCR clone 173397 (TRBV7-3, TRBJ2-2)
CASSLERGTLSGELFF

SEQ ID NO: 346795 - protein, 17 aa, Homo sapiens
  CDR3 for alpha chain variable domain of TCR clone 173398 (TRAV12-2, TRAJ4)
CAVNVRPVSGGYHKLIF

SEQ ID NO: 346796 - protein, 17 aa, Homo sapiens
  CDR3 for beta chain variable domain of TCR clone 173398 (TRBV6-3, TRBJ2-1)
CASSYSSGTRGLDEQFF

SEQ ID NO: 346797 - protein, 12 aa, Homo sapiens
  CDR3 for alpha chain variable domain of TCR clone 173399 (TRAV23/DV6, TRAJ27)
CAASKSAGKSTS

SEQ ID NO: 346798 - protein, 13 aa, Homo sapiens
  CDR3 for beta chain variable domain of TCR clone 173399 (TRBV6-3, TRBJ1-2)
CASSRQGGYGYTF

SEQ ID NO: 346799 - protein, 15 aa, Homo sapiens
  CDR3 for alpha chain variable domain of TCR clone 173400 (TRAV3, TRAJ22)
CAVRDRGGPARQLTF

SEQ ID NO: 346800 - protein, 13 aa, Homo sapiens
  CDR3 for beta chain variable domain of TCR clone 173400 (TRBV2, TRBJ1-5)
CATAGPGNQPQHF

SEQ ID NO: 346801 - protein, 16 aa, Homo sapiens
  CDR3 for alpha chain variable domain of TCR clone 173401 (TRAV12-3, TRAJ53)
CAMSLGSGGSNYKLTF

SEQ ID NO: 346802 - protein, 12 aa, Homo sapiens
  CDR3 for beta chain variable domain of TCR clone 173401 (TRBV29-1, TRBJ2-3)
CSVTGGADTQYF

SEQ ID NO: 346803 - protein, 11 aa, Homo sapiens
  CDR3 for alpha chain variable domain of TCR clone 173402 (TRAV4, TRAJ23)
CLVAPGGKLIF

SEQ ID NO: 346804 - protein, 12 aa, Homo sapiens
  CDR3 for beta chain variable domain of TCR clone 173402 (TRBV12-4, TRBJ2-7)
CASSLGGYEQYF

SEQ ID NO: 346805 - protein, 12 aa, Homo sapiens
  CDR3 for alpha chain variable domain of TCR clone 173403 (TRAV35, TRAJ30)
CAGLNRDDKIIF

SEQ ID NO: 346806 - protein, 15 aa, Homo sapiens
  CDR3 for beta chain variable domain of TCR clone 173403 (TRBV18, TRBJ2-3)
CASSPLAGEIDTQYF

SEQ ID NO: 346807 - protein, 13 aa, Homo sapiens
  CDR3 for alpha chain variable domain of TCR clone 173404 (TRAV12-1, TRAJ29)
CVVNGPGNTPLVF

SEQ ID NO: 346808 - protein, 13 aa, Homo sapiens
  CDR3 for beta chain variable domain of TCR clone 173404 (TRBV7-2, TRBJ2-5)
CASSRGGLETQYY

SEQ ID NO: 346809 - protein, 12 aa, Homo sapiens
  CDR3 for alpha chain variable domain of TCR clone 173405 (TRAV21, TRAJ49)
CAVRNTGNQFYF

SEQ ID NO: 346810 - protein, 14 aa, Homo sapiens
  CDR3 for beta chain variable domain of TCR clone 173405 (TRBV7-9, TRBJ2-1)
CASSPRDSLYEQFF

SEQ ID NO: 346811 - protein, 14 aa, Homo sapiens
  CDR3 for alpha chain variable domain of TCR clone 173406 (TRAV12-2, TRAJ13)
CAVKKTGGNQKVTL

SEQ ID NO: 346812 - protein, 15 aa, Homo sapiens
  CDR3 for beta chain variable domain of TCR clone 173406 (TRBV27, TRBJ2-1)
CASSNGGGSSNEQFF

SEQ ID NO: 346813 - protein, 14 aa, Homo sapiens
  CDR3 for alpha chain variable domain of TCR clone 173407 (TRAV1-2, TRAJ16)
CAVNRFSDGQKLLF

SEQ ID NO: 346814 - protein, 14 aa, Homo sapiens
  CDR3 for beta chain variable domain of TCR clone 173407 (TRBV7-9, TRBJ2-1)
CASSPRDSLDEQFF

SEQ ID NO: 346815 - protein, 14 aa, Homo sapiens
  CDR3 for alpha chain variable domain of TCR clone 173408 (TRAV8-3, TRAJ39)
CAVGANNAGNMLTF

SEQ ID NO: 346816 - protein, 12 aa, Homo sapiens
  CDR3 for beta chain variable domain of TCR clone 173408 (TRBV11-3, TRBJ1-1)
CVSSHRQGEAFF

SEQ ID NO: 346817 - protein, 14 aa, Homo sapiens
  CDR3 for alpha chain variable domain of TCR clone 173409 (TRAV12-2, TRAJ17)
CAVLFKAAGHKLTF

SEQ ID NO: 346818 - protein, 13 aa, Homo sapiens
  CDR3 for beta chain variable domain of TCR clone 173409 (TRBV19, TRBJ1-2)
CASSQGQVYGYTF

SEQ ID NO: 346819 - protein, 13 aa, Homo sapiens
  CDR3 for alpha chain variable domain of TCR clone 173410 (TRAV38-2/DV8, TRAJ34)
CAYRTWNTDKLIF

SEQ ID NO: 346820 - protein, 15 aa, Homo sapiens
  CDR3 for beta chain variable domain of TCR clone 173410 (TRBV19, TRBJ2-7)
CASSIGGGLVNEQYF

SEQ ID NO: 346821 - protein, 14 aa, Homo sapiens
  CDR3 for alpha chain variable domain of TCR clone 173411 (TRAV12-2, TRAJ17)
CAVLFKSAGNKLTF

SEQ ID NO: 346822 - protein, 14 aa, Homo sapiens
  CDR3 for beta chain variable domain of TCR clone 173411 (TRBV7-3, TRBJ1-1)
CASSLKGGNTEAFF

SEQ ID NO: 346823 - protein, 13 aa, Homo sapiens
  CDR3 for alpha chain variable domain of TCR clone 173412 (TRAV35, TRAJ21)
CAGQLSNFNNFYF

SEQ ID NO: 346824 - protein, 16 aa, Homo sapiens
  CDR3 for beta chain variable domain of TCR clone 173412 (TRBV4-3, TRBJ2-2)
CASSHLQGSGTGELFF

SEQ ID NO: 346825 - protein, 14 aa, Homo sapiens
  CDR3 for alpha chain variable domain of TCR clone 173413 (TRAV26-1, TRAJ38)
CIADNAGNNRKLIW

SEQ ID NO: 346826 - protein, 18 aa, Homo sapiens
  CDR3 for beta chain variable domain of TCR clone 173413 (TRBV25-1, TRBJ1-2)
CASSGLQNGQGLIFGYTF

SEQ ID NO: 346827 - protein, 13 aa, Homo sapiens
  CDR3 for alpha chain variable domain of TCR clone 173414 (TRAV3, TRAJ35)
CGMRKCFGNVLHC

SEQ ID NO: 346828 - protein, 14 aa, Homo sapiens
  CDR3 for beta chain variable domain of TCR clone 173414 (TRBV6-5, TRBJ1-4)
CASSYRAAEEKLFF

SEQ ID NO: 346829 - protein, 10 aa, Homo sapiens
  CDR3 for alpha chain variable domain of TCR clone 173415 (TRAV23/DV6, TRAJ57)
CAASSTLSQG

SEQ ID NO: 346830 - protein, 15 aa, Homo sapiens
  CDR3 for beta chain variable domain of TCR clone 173415 (TRBV7-2, TRBJ2-1)
CASTHGTGIYNEQFF

SEQ ID NO: 346831 - protein, 11 aa, Homo sapiens
  CDR3 for alpha chain variable domain of TCR clone 173416 (TRAV12-2, TRAJ36)
CAVDGANNLFF

SEQ ID NO: 346832 - protein, 13 aa, Homo sapiens
  CDR3 for beta chain variable domain of TCR clone 173416 (TRBV7-2, TRBJ2-7)
CASSSPSGSEQYC

SEQ ID NO: 346833 - protein, 14 aa, Homo sapiens
  CDR3 for alpha chain variable domain of TCR clone 173417 (TRAV25, TRAJ9)
CAGPGNTGGFKTIF

SEQ ID NO: 346834 - protein, 15 aa, Homo sapiens
  CDR3 for beta chain variable domain of TCR clone 173417 (TRBV11-2, TRBJ1-2)
CASSLEGLQRNGYTF

SEQ ID NO: 346835 - protein, 13 aa, Homo sapiens
  CDR3 for alpha chain variable domain of TCR clone 173418 (TRAV8-1, TRAJ32)
CAADDGATNKLIF

SEQ ID NO: 346836 - protein, 15 aa, Homo sapiens
  CDR3 for beta chain variable domain of TCR clone 173418 (TRBV7-9, TRBJ2-7)
CASSLALAEAYEQYF

SEQ ID NO: 346837 - protein, 15 aa, Homo sapiens
  CDR3 for alpha chain variable domain of TCR clone 173419 (TRAV12-2, TRAJ57)
CAVSRGQGGSDKLVF

SEQ ID NO: 346838 - protein, 15 aa, Homo sapiens
  CDR3 for beta chain variable domain of TCR clone 173419 (TRBV5-1, TRBJ2-1)
CASSPPRAPYNEQFF

SEQ ID NO: 346839 - protein, 13 aa, Homo sapiens
  CDR3 for alpha chain variable domain of TCR clone 173420 (TRAV20, TRAJ37)
CAGCSSNTGKLIF

SEQ ID NO: 346840 - protein, 16 aa, Homo sapiens
  CDR3 for beta chain variable domain of TCR clone 173420 (TRBV20-1, TRBJ1-2)
CSASMGQGVANYGYTF

SEQ ID NO: 346841 - protein, 12 aa, Homo sapiens
  CDR3 for alpha chain variable domain of TCR clone 173421 (TRAV25, TRAJ29)
CAGHSGNTPLVF

SEQ ID NO: 346842 - protein, 12 aa, Homo sapiens
  CDR3 for beta chain variable domain of TCR clone 173421 (TRBV11-2, TRBJ2-2)
CASSLPTGELFF

SEQ ID NO: 346843 - protein, 14 aa, Homo sapiens
  CDR3 for alpha chain variable domain of TCR clone 173422 (TRAV23/DV6, TRAJ13)
CAASETGGYQKVTF

SEQ ID NO: 346844 - protein, 16 aa, Homo sapiens
  CDR3 for beta chain variable domain of TCR clone 173422 (TRBV5-1, TRBJ1-3)
CASSPWAPSSGNTMYL

SEQ ID NO: 346845 - protein, 10 aa, Homo sapiens
  CDR3 for alpha chain variable domain of TCR clone 173423 (TRAV16, TRAJ22)
SAMYLRQLTF

SEQ ID NO: 346846 - protein, 15 aa, Homo sapiens
  CDR3 for beta chain variable domain of TCR clone 173423 (TRBV7-9, TRBJ1-6)
CASSSPGRANSPLHF

SEQ ID NO: 346847 - protein, 11 aa, Homo sapiens
  CDR3 for alpha chain variable domain of TCR clone 173424 (TRAV13-1, TRAJ30)
CVASRDDKIIF

SEQ ID NO: 346848 - protein, 15 aa, Homo sapiens
  CDR3 for beta chain variable domain of TCR clone 173424 (TRBV18, TRBJ1-1)
CASSPSSWVNTEAFF

SEQ ID NO: 346849 - protein, 15 aa, Homo sapiens
  CDR3 for alpha chain variable domain of TCR clone 173425 (TRAV26-2, TRAJ28)
CILVESGAGSYQLTF

SEQ ID NO: 346850 - protein, 14 aa, Homo sapiens
  CDR3 for beta chain variable domain of TCR clone 173425 (TRBV7-6, TRBJ2-3)
CASSLGTVTDTQYF

SEQ ID NO: 346851 - protein, 13 aa, Homo sapiens
  CDR3 for alpha chain variable domain of TCR clone 173426 (TRAV39, TRAJ58)
CAGEEISGSRLTF

SEQ ID NO: 346852 - protein, 13 aa, Homo sapiens
  CDR3 for beta chain variable domain of TCR clone 173426 (TRBV15, TRBJ2-7)
CASSTTGHYEQYF

SEQ ID NO: 346853 - protein, 11 aa, Homo sapiens
  CDR3 for alpha chain variable domain of TCR clone 173427 (TRAV1-2, TRAJ40)
CAVPGTYKYIF

SEQ ID NO: 346854 - protein, 17 aa, Homo sapiens
  CDR3 for beta chain variable domain of TCR clone 173427 (TRBV24-1, TRBJ2-1)
CATSDVSTSGTYNEQFF

SEQ ID NO: 346855 - protein, 17 aa, Homo sapiens
  CDR3 for alpha chain variable domain of TCR clone 173428 (TRAV13-1, TRAJ28)
CAASPPYSGAGSYQLTF

SEQ ID NO: 346856 - protein, 12 aa, Homo sapiens
  CDR3 for beta chain variable domain of TCR clone 173428 (TRBV11-2, TRBJ2-2)
CASSLPTGELLF

SEQ ID NO: 346857 - protein, 13 aa, Homo sapiens
  CDR3 for alpha chain variable domain of TCR clone 173429 (TRAV1-2, TRAJ9)
CAALNTGGFKTIF

SEQ ID NO: 346858 - protein, 14 aa, Homo sapiens
  CDR3 for beta chain variable domain of TCR clone 173429 (TRBV13, TRBJ2-3)
CASSSGSPTDTHYF

SEQ ID NO: 346859 - protein, 18 aa, Homo sapiens
  CDR3 for alpha chain variable domain of TCR clone 173430 (TRAV21, TRAJ52)
CAVRPSPAGGTSYGKLTF

SEQ ID NO: 346860 - protein, 17 aa, Homo sapiens
  CDR3 for beta chain variable domain of TCR clone 173430 (TRBV4-1, TRBJ2-1)
CASSHRDSGSSYNEQFF

SEQ ID NO: 346861 - protein, 13 aa, Homo sapiens
  CDR3 for alpha chain variable domain of TCR clone 173431 (TRAV38-1, TRAJ42)
CAQWGGSQGNLIF

SEQ ID NO: 346862 - protein, 17 aa, Homo sapiens
  CDR3 for beta chain variable domain of TCR clone 173431 (TRBV20-1, TRBJ2-1)
CSARDPLAGVWDNEQFF

SEQ ID NO: 346863 - protein, 11 aa, Homo sapiens
  CDR3 for alpha chain variable domain of TCR clone 173432 (TRAV27, TRAJ49)
CAGVPPNQFYF

SEQ ID NO: 346864 - protein, 15 aa, Homo sapiens
  CDR3 for beta chain variable domain of TCR clone 173432 (TRBV7-9, TRBJ1-4)
CASSARTGGNEKLFF

SEQ ID NO: 346865 - protein, 14 aa, Homo sapiens
  CDR3 for alpha chain variable domain of TCR clone 173433 (TRAV12-3, TRAJ10)
SHLPLTGGGNKLTF

SEQ ID NO: 346866 - protein, 15 aa, Homo sapiens
  CDR3 for beta chain variable domain of TCR clone 173433 (TRBV25-1, TRBJ2-4)
CASSETESAKNKQYF

SEQ ID NO: 346867 - protein, 15 aa, Homo sapiens
  CDR3 for alpha chain variable domain of TCR clone 173434 (TRAV26-1, TRAJ22)
CIVRVSFWFCQSTDL

SEQ ID NO: 346868 - protein, 13 aa, Homo sapiens
  CDR3 for beta chain variable domain of TCR clone 173434 (TRBV7-9, TRBJ1-2)
CASSLKQNYGYTF

SEQ ID NO: 346869 - protein, 19 aa, Homo sapiens
  CDR3 for alpha chain variable domain of TCR clone 173435 (TRAV26-1, TRAJ28)
CIVRVAHAYSGAGSYQITF

SEQ ID NO: 346870 - protein, 17 aa, Homo sapiens
  CDR3 for beta chain variable domain of TCR clone 173435 (TRBV9, TRBJ2-2)
CASSVGGQGTDTGELFF

SEQ ID NO: 346871 - protein, 14 aa, Homo sapiens
  CDR3 for alpha chain variable domain of TCR clone 173436 (TRAV1-2, TRAJ8)
CAVREDTGFQKLVF

SEQ ID NO: 346872 - protein, 15 aa, Homo sapiens
  CDR3 for beta chain variable domain of TCR clone 173436 (TRBV20-1, TRBJ2-7)
CSARDRVSGMDEQNF

SEQ ID NO: 346873 - protein, 10 aa, Homo sapiens
  CDR3 for alpha chain variable domain of TCR clone 173437 (TRAV12-2, TRAJ22)
CAVNEAQLTF

SEQ ID NO: 346874 - protein, 15 aa, Homo sapiens
  CDR3 for beta chain variable domain of TCR clone 173437 (TRBV27, TRBJ2-1)
CASSNGGGSSNEQFF

SEQ ID NO: 346875 - protein, 12 aa, Homo sapiens
  CDR3 for alpha chain variable domain of TCR clone 173438 (TRAV26-1, TRAJ13)
CIVSRGYQKVTF

SEQ ID NO: 346876 - protein, 15 aa, Homo sapiens
  CDR3 for beta chain variable domain of TCR clone 173438 (TRBV7-2, TRBJ2-7)
CASSLSSGRTYEQYF

SEQ ID NO: 346877 - protein, 16 aa, Homo sapiens
  CDR3 for alpha chain variable domain of TCR clone 173439 (TRAV30, TRAJ24)
CGTEIVDAGSWGKFQF

SEQ ID NO: 346878 - protein, 13 aa, Homo sapiens
  CDR3 for beta chain variable domain of TCR clone 173439 (TRBV7-3, TRBJ1-1)
CASSQDWGAESFF

SEQ ID NO: 346879 - protein, 14 aa, Homo sapiens
  CDR3 for alpha chain variable domain of TCR clone 173440 (TRAV35, TRAJ50)
CAGHRKNSYDKVIF

SEQ ID NO: 346880 - protein, 13 aa, Homo sapiens
  CDR3 for beta chain variable domain of TCR clone 173440 (TRBV7-7, TRBJ2-3)
CASSLSRADTQDF

SEQ ID NO: 346881 - protein, 13 aa, Homo sapiens
  CDR3 for alpha chain variable domain of TCR clone 173441 (TRAV3, TRAJ21)
CAVREPDFNTFYF

SEQ ID NO: 346882 - protein, 14 aa, Homo sapiens
  CDR3 for beta chain variable domain of TCR clone 173441 (TRBV20-1, TRBJ2-3)
CSARGGTSTDTQYF

SEQ ID NO: 346883 - protein, 12 aa, Homo sapiens
  CDR3 for alpha chain variable domain of TCR clone 173442 (TRAV25, TRAJ38)
CAGTGNNRKLLW

SEQ ID NO: 346884 - protein, 14 aa, Homo sapiens
  CDR3 for beta chain variable domain of TCR clone 173442 (TRBV19, TRBJ1-5)
CASSKMTGPQPQHF

SEQ ID NO: 346885 - protein, 13 aa, Homo sapiens
  CDR3 for alpha chain variable domain of TCR clone 173443 (TRAV21, TRAJ10)
CAVPTGGGNTLTF

SEQ ID NO: 346886 - protein, 22 aa, Homo sapiens
  CDR3 for beta chain variable domain of TCR clone 173443 (TRBV19, TRBJ2-1)
CASSVRDRVTGTSGRIYNEQFF

SEQ ID NO: 346887 - protein, 11 aa, Homo sapiens
  CDR3 for alpha chain variable domain of TCR clone 173444 (TRAV2, TRAJ13)
CASGGYQKVTF

SEQ ID NO: 346888 - protein, 13 aa, Homo sapiens
  CDR3 for beta chain variable domain of TCR clone 173444 (TRBV12-4, TRBJ1-2)
CASSLRQGKGYTV

SEQ ID NO: 346889 - protein, 11 aa, Homo sapiens
  CDR3 for alpha chain variable domain of TCR clone 173445 (TRAV13-1, TRAJ39)
CASHAGNMLTF

SEQ ID NO: 346890 - protein, 17 aa, Homo sapiens
  CDR3 for beta chain variable domain of TCR clone 173445 (TRBV20-1, TRBJ2-7)
CSARETKTGYLSYEQYF

SEQ ID NO: 346891 - protein, 12 aa, Homo sapiens
  CDR3 for alpha chain variable domain of TCR clone 173446 (TRAV13-1, TRAJ21)
CAAKEGFTKFYF

SEQ ID NO: 346892 - protein, 18 aa, Homo sapiens
  CDR3 for beta chain variable domain of TCR clone 173446 (TRBV20-1, TRBJ2-6)
CSAETTPTHGSGANVLTF

SEQ ID NO: 346893 - protein, 13 aa, Homo sapiens
  CDR3 for alpha chain variable domain of TCR clone 173447 (TRAV12-3, TRAJ7)
CAMTPYGNNRLAF

SEQ ID NO: 346894 - protein, 16 aa, Homo sapiens
  CDR3 for beta chain variable domain of TCR clone 173447 (TRBV20-1, TRBJ1-4)
CSARSYGGELNEKLFF

SEQ ID NO: 346895 - protein, 13 aa, Homo sapiens
  CDR3 for alpha chain variable domain of TCR clone 173448 (TRAV8-3, TRAJ4)
WVFYSGGYNKLIF

SEQ ID NO: 346896 - protein, 12 aa, Homo sapiens
  CDR3 for beta chain variable domain of TCR clone 173448 (TRBV19, TRBJ2-7)
CASTSGTYEQYF

SEQ ID NO: 346897 - protein, 14 aa, Homo sapiens
  CDR3 for alpha chain variable domain of TCR clone 173449 (TRAV8-4, TRAJ48)
CAVSETFGNEKLTF

SEQ ID NO: 346898 - protein, 16 aa, Homo sapiens
  CDR3 for beta chain variable domain of TCR clone 173449 (TRBV4-1, TRBJ2-7)
CASSQEWTSGPLEQYF

SEQ ID NO: 346899 - protein, 15 aa, Homo sapiens
  CDR3 for alpha chain variable domain of TCR clone 173450 (TRAV23/DV6, TRAJ44)
CAARLLTGTASNLTF

SEQ ID NO: 346900 - protein, 15 aa, Homo sapiens
  CDR3 for beta chain variable domain of TCR clone 173450 (TRBV12-4, TRBJ1-5)
CASTLNRVSNQPQHF

SEQ ID NO: 346901 - protein, 15 aa, Homo sapiens
  CDR3 for alpha chain variable domain of TCR clone 173451 (TRAV13-1, TRAJ50)
CAAKGSETAYDKVIF

SEQ ID NO: 346902 - protein, 18 aa, Homo sapiens
  CDR3 for beta chain variable domain of TCR clone 173451 (TRBV10-3, TRBJ2-1)
CTSVPSVSLRGGVDEQFF

SEQ ID NO: 346903 - protein, 14 aa, Homo sapiens
  CDR3 for alpha chain variable domain of TCR clone 173452 (TRAV35, TRAJ22)
CAGLRPGSARQLTF

SEQ ID NO: 346904 - protein, 15 aa, Homo sapiens
  CDR3 for beta chain variable domain of TCR clone 173452 (TRBV10-3, TRBJ2-2)
CAIYTGGTGTGELFF

SEQ ID NO: 346905 - protein, 14 aa, Homo sapiens
  CDR3 for alpha chain variable domain of TCR clone 173453 (TRAV17, TRAJ34)
CATDSPEGTDKLIF

SEQ ID NO: 346906 - protein, 13 aa, Homo sapiens
  CDR3 for beta chain variable domain of TCR clone 173453 (TRBV11-2, TRBJ2-7)
CASSGTRPYEQYF

SEQ ID NO: 346907 - protein, 14 aa, Homo sapiens
  CDR3 for alpha chain variable domain of TCR clone 173454 (TRAV1-2, TRAJ16)
CAVNRFSDGQKLLL

SEQ ID NO: 346908 - protein, 13 aa, Homo sapiens
  CDR3 for beta chain variable domain of TCR clone 173454 (TRBV10-3, TRBJ1-2)
CAISERDSYGYTF

SEQ ID NO: 346909 - protein, 14 aa, Homo sapiens
  CDR3 for alpha chain variable domain of TCR clone 173455 (TRAV1-2, TRAJ8)
CAVREDTGFQNLVF

SEQ ID NO: 346910 - protein, 17 aa, Homo sapiens
  CDR3 for beta chain variable domain of TCR clone 173455 (TRBV20-1, TRBJ2-2)
CSASGSGQGGLTGELFF

SEQ ID NO: 346911 - protein, 13 aa, Homo sapiens
  CDR3 for alpha chain variable domain of TCR clone 173456 (TRAV3, TRAJ20)
CAVRDTPRYKLSF

SEQ ID NO: 346912 - protein, 15 aa, Homo sapiens
  CDR3 for beta chain variable domain of TCR clone 173456 (TRBV10-2, TRBJ2-6)
CASSEQGTGANDLSF

SEQ ID NO: 346913 - protein, 17 aa, Homo sapiens
  CDR3 for alpha chain variable domain of TCR clone 173457 (TRAV29/DV5, TRAJ45)
CAADGPFSGGGADGLNF

SEQ ID NO: 346914 - protein, 13 aa, Homo sapiens
  CDR3 for beta chain variable domain of TCR clone 173457 (TRBV19, TRBJ1-5)
CASSMRGYQTQHF

SEQ ID NO: 346915 - protein, 14 aa, Homo sapiens
  CDR3 for alpha chain variable domain of TCR clone 173458 (TRAV26-1, TRAJ34)
CIVRVAYNTDKLIF

SEQ ID NO: 346916 - protein, 19 aa, Homo sapiens
  CDR3 for beta chain variable domain of TCR clone 173458 (TRBV25-1, TRBJ2-2)
CAILVSRVDRGRKTGELFF

SEQ ID NO: 346917 - protein, 13 aa, Homo sapiens
  CDR3 for alpha chain variable domain of TCR clone 173459 (TRAV13-2, TRAJ48)
CAEMDFGNEQLTF

SEQ ID NO: 346918 - protein, 15 aa, Homo sapiens
  CDR3 for beta chain variable domain of TCR clone 173459 (TRBV7-9, TRBJ1-6)
FASSSPGRGNSPLHF

SEQ ID NO: 346919 - protein, 15 aa, Homo sapiens
  CDR3 for alpha chain variable domain of TCR clone 173460 (TRAV26-1, TRAJ29)
CIVRVEGSGNTPLAF

SEQ ID NO: 346920 - protein, 15 aa, Homo sapiens
  CDR3 for beta chain variable domain of TCR clone 173460 (TRBV7-9, TRBJ1-5)
CASSQGHHPNQPQHF

SEQ ID NO: 346921 - protein, 18 aa, Homo sapiens
  CDR3 for alpha chain variable domain of TCR clone 173461 (TRAV8-3, TRAJ6)
CAVGAEHQEEATYLHLEE

SEQ ID NO: 346922 - protein, 14 aa, Homo sapiens
  CDR3 for beta chain variable domain of TCR clone 173461 (TRBV6-6, TRBJ2-7)
CASSNSGAGYEQYF

SEQ ID NO: 346923 - protein, 13 aa, Homo sapiens
  CDR3 for alpha chain variable domain of TCR clone 173462 (TRAV2, TRAJ16)
CAVERSDGQKLPF

SEQ ID NO: 346924 - protein, 15 aa, Homo sapiens
  CDR3 for beta chain variable domain of TCR clone 173462 (TRBV20-1, TRBJ2-5)
CSAIKGQGSQETQYF

SEQ ID NO: 346925 - protein, 17 aa, Homo sapiens
  CDR3 for alpha chain variable domain of TCR clone 173463 (TRAV38-2/DV8, TRAJ38)
CAYRSARGDGNNRKLIW

SEQ ID NO: 346926 - protein, 13 aa, Homo sapiens
  CDR3 for beta chain variable domain of TCR clone 173463 (TRBV6-5, TRBJ2-1)
CASRGRVGNEQFF

SEQ ID NO: 346927 - protein, 16 aa, Homo sapiens
  CDR3 for alpha chain variable domain of TCR clone 173464 (TRAV8-3, TRAJ42)
CAVAGDYGGSQGNLIF

SEQ ID NO: 346928 - protein, 15 aa, Homo sapiens
  CDR3 for beta chain variable domain of TCR clone 173464 (TRBV12-4, TRBJ2-7)
CASSQTGAISYEQYF

SEQ ID NO: 346929 - protein, 13 aa, Homo sapiens
  CDR3 for alpha chain variable domain of TCR clone 173465 (TRAV12-2, TRAJ7)
CAVNLYGNNRLAF

SEQ ID NO: 346930 - protein, 14 aa, Homo sapiens
  CDR3 for beta chain variable domain of TCR clone 173465 (TRBV19, TRBJ2-5)
CASSMTGQQETQYF

SEQ ID NO: 346931 - protein, 14 aa, Homo sapiens
  CDR3 for alpha chain variable domain of TCR clone 173466 (TRAV21, TRAJ38)
CAVANAGNNRKLIC

SEQ ID NO: 346932 - protein, 16 aa, Homo sapiens
  CDR3 for beta chain variable domain of TCR clone 173466 (TRBV5-4, TRBJ2-1)
CASSLALAGAYNEQFF

SEQ ID NO: 346933 - protein, 13 aa, Homo sapiens
  CDR3 for alpha chain variable domain of TCR clone 173467 (TRAV12-1, TRAJ33)
CGDAPDSNYQLIW

SEQ ID NO: 346934 - protein, 12 aa, Homo sapiens
  CDR3 for beta chain variable domain of TCR clone 173467 (TRBV11-2, TRBJ2-2)
CASSLGGGEPFF

SEQ ID NO: 346935 - protein, 12 aa, Homo sapiens
  CDR3 for alpha chain variable domain of TCR clone 173468 (TRAV3, TRAJ20)
CAVRDPDYKLSF

SEQ ID NO: 346936 - protein, 13 aa, Homo sapiens
  CDR3 for beta chain variable domain of TCR clone 173468 (TRBV9, TRBJ2-1)
CVSSVGQGGEQFF

SEQ ID NO: 346937 - protein, 13 aa, Homo sapiens
  CDR3 for alpha chain variable domain of TCR clone 173469 (TRAV2, TRAJ40)
CAVVTSGTYKYIF

SEQ ID NO: 346938 - protein, 12 aa, Homo sapiens
  CDR3 for beta chain variable domain of TCR clone 173469 (TRBV7-3, TRBJ2-1)
CASSLGFNEQFF

SEQ ID NO: 346939 - protein, 14 aa, Homo sapiens
  CDR3 for alpha chain variable domain of TCR clone 173470 (TRAV12-2, TRAJ13)
CAVAGSGGNQKVTF

SEQ ID NO: 346940 - protein, 14 aa, Homo sapiens
  CDR3 for beta chain variable domain of TCR clone 173470 (TRBV6-5, TRBJ2-7)
CASSYGVGEAEQYF

SEQ ID NO: 346941 - protein, 14 aa, Homo sapiens
  CDR3 for alpha chain variable domain of TCR clone 173471 (TRAV13-1, TRAJ35)
CAASKGGFGNVLHC

SEQ ID NO: 346942 - protein, 19 aa, Homo sapiens
  CDR3 for beta chain variable domain of TCR clone 173471 (TRBV7-9, TRBJ2-6)
CASSLESATVLPGANVLTF

SEQ ID NO: 346943 - protein, 20 aa, Homo sapiens
  CDR3 for alpha chain variable domain of TCR clone 173472 (TRAV12-1, TRAJ42)
SSVIQPPTSVKGGSQGNLIF

SEQ ID NO: 346944 - protein, 18 aa, Homo sapiens
  CDR3 for beta chain variable domain of TCR clone 173472 (TRBV11-2, TRBJ2-3)
CAISLGGASRGAPNTQYF

SEQ ID NO: 346945 - protein, 13 aa, Homo sapiens
  CDR3 for alpha chain variable domain of TCR clone 173473 (TRAV12-1, TRAJ34)
CGEPLRNTDKLIF

SEQ ID NO: 346946 - protein, 20 aa, Homo sapiens
  CDR3 for beta chain variable domain of TCR clone 173473 (TRBV19, TRBJ2-1)
CASSISRTVTSTQLNNEQFF

SEQ ID NO: 346947 - protein, 12 aa, Homo sapiens
  CDR3 for alpha chain variable domain of TCR clone 173474 (TRAV12-2, TRAJ52)
IGGGTSYGKLTF

SEQ ID NO: 346948 - protein, 13 aa, Homo sapiens
  CDR3 for beta chain variable domain of TCR clone 173474 (TRBV12-4, TRBJ1-1)
CASSPVTGFEAFF

SEQ ID NO: 346949 - protein, 14 aa, Homo sapiens
  CDR3 for alpha chain variable domain of TCR clone 173475 (TRAV8-2, TRAJ23)
CVVSDDNQGGKLIF

SEQ ID NO: 346950 - protein, 13 aa, Homo sapiens
  CDR3 for beta chain variable domain of TCR clone 173475 (TRBV7-7, TRBJ2-2)
CASSLTSAGELFF

SEQ ID NO: 346951 - protein, 15 aa, Homo sapiens
  CDR3 for alpha chain variable domain of TCR clone 173476 (TRAV17, TRAJ22)
CAAVAPSGSARQLTF

SEQ ID NO: 346952 - protein, 16 aa, Homo sapiens
  CDR3 for beta chain variable domain of TCR clone 173476 (TRBV10-3, TRBJ2-7)
CAISADFADRPYEQYF

SEQ ID NO: 346953 - protein, 13 aa, Homo sapiens
  CDR3 for alpha chain variable domain of TCR clone 173477 (TRAV35, TRAJ42)
CAGFPGSQGNLIF

SEQ ID NO: 346954 - protein, 14 aa, Homo sapiens
  CDR3 for beta chain variable domain of TCR clone 173477 (TRBV19, TRBJ2-1)
CASTTFVLSGEQFF

SEQ ID NO: 346955 - protein, 12 aa, Homo sapiens
  CDR3 for alpha chain variable domain of TCR clone 173478 (TRAV1-2, TRAJ42)
CVAGGSQGNLIF

SEQ ID NO: 346956 - protein, 12 aa, Homo sapiens
  CDR3 for beta chain variable domain of TCR clone 173478 (TRBV24-1, TRBJ1-1)
CATSNSDRGAFF

SEQ ID NO: 346957 - protein, 12 aa, Homo sapiens
  CDR3 for alpha chain variable domain of TCR clone 173479 (TRAV16, TRAJ10)
CSRTGGGNKLTF

SEQ ID NO: 346958 - protein, 15 aa, Homo sapiens
  CDR3 for beta chain variable domain of TCR clone 173479 (TRBV6-3, TRBJ2-7)
CGSSSPGTVFYEQYF

SEQ ID NO: 346959 - protein, 20 aa, Homo sapiens
  CDR3 for alpha chain variable domain of TCR clone 173480 (TRAV1-2, TRAJ34)
LLKELQMKDSASPNTDKLIF

SEQ ID NO: 346960 - protein, 18 aa, Homo sapiens
  CDR3 for beta chain variable domain of TCR clone 173480 (TRBV3-1, TRBJ2-5)
CASSHAGTSGGGRETQYF

SEQ ID NO: 346961 - protein, 10 aa, Homo sapiens
  CDR3 for alpha chain variable domain of TCR clone 173481 (TRAV13-1, TRAJ30)
CAARDDKIIF

SEQ ID NO: 346962 - protein, 17 aa, Homo sapiens
  CDR3 for beta chain variable domain of TCR clone 173481 (TRBV20-1, TRBJ2-1)
CSAPPRLAGTRYNEQFF

SEQ ID NO: 346963 - protein, 16 aa, Homo sapiens
  CDR3 for alpha chain variable domain of TCR clone 173482 (TRAV30, TRAJ24)
CGTEIVVADSWGKFQF

SEQ ID NO: 346964 - protein, 14 aa, Homo sapiens
  CDR3 for beta chain variable domain of TCR clone 173482 (TRBV12-5, TRBJ2-5)
CASGSRTHQGTQYF

SEQ ID NO: 346965 - protein, 14 aa, Homo sapiens
  CDR3 for alpha chain variable domain of TCR clone 173483 (TRAV35, TRAJ33)
CAGSSQDSNYQLIC

SEQ ID NO: 346966 - protein, 15 aa, Homo sapiens
  CDR3 for beta chain variable domain of TCR clone 173483 (TRBV20-1, TRBJ2-7)
CSAEAGTSGAYEQYF

SEQ ID NO: 346967 - protein, 14 aa, Homo sapiens
  CDR3 for alpha chain variable domain of TCR clone 173484 (TRAV4, TRAJ17)
CLVGDPLVGNKLTL

SEQ ID NO: 346968 - protein, 20 aa, Homo sapiens
  CDR3 for beta chain variable domain of TCR clone 173484 (TRBV20-1, TRBJ2-1)
CSARPYSVAGGPSYYNEQFF

SEQ ID NO: 346969 - protein, 17 aa, Homo sapiens
  CDR3 for alpha chain variable domain of TCR clone 173485 (TRAV3, TRAJ6)
CAVRDGPRAGGSYIPTF

SEQ ID NO: 346970 - protein, 15 aa, Homo sapiens
  CDR3 for beta chain variable domain of TCR clone 173485 (TRBV7-2, TRBJ1-5)
CASSQGHQPNQPQHF

SEQ ID NO: 346971 - protein, 16 aa, Homo sapiens
  CDR3 for alpha chain variable domain of TCR clone 173486 (TRAV26-1, TRAJ32)
CIVRTNNGGATNKLIF

SEQ ID NO: 346972 - protein, 20 aa, Homo sapiens
  CDR3 for beta chain variable domain of TCR clone 173486 (TRBV7-8, TRBJ2-2)
CASSHLFPGPTIHITGELFF

SEQ ID NO: 346973 - protein, 13 aa, Homo sapiens
  CDR3 for alpha chain variable domain of TCR clone 173487 (TRAV13-2, TRAJ48)
CAEMDFGNGKLTF

SEQ ID NO: 346974 - protein, 15 aa, Homo sapiens
  CDR3 for beta chain variable domain of TCR clone 173487 (TRBV7-9, TRBJ1-6)
CASSSPGRGSSPLHF

SEQ ID NO: 346975 - protein, 13 aa, Homo sapiens
  CDR3 for alpha chain variable domain of TCR clone 173488 (TRAV2, TRAJ40)
CAVVTSGTYKYIF

SEQ ID NO: 346976 - protein, 20 aa, Homo sapiens
  CDR3 for beta chain variable domain of TCR clone 173488 (TRBV28, TRBJ2-1)
SASTSIGRSPGLAGGNEQFF

SEQ ID NO: 346977 - protein, 13 aa, Homo sapiens
  CDR3 for alpha chain variable domain of TCR clone 173489 (TRAV27, TRAJ29)
CAGAHSGNTPLVF

SEQ ID NO: 346978 - protein, 16 aa, Homo sapiens
  CDR3 for beta chain variable domain of TCR clone 173489 (TRBV4-1, TRBJ1-2)
CASSQDAGQVLYGYAF

SEQ ID NO: 346979 - protein, 17 aa, Homo sapiens
  CDR3 for alpha chain variable domain of TCR clone 173490 (TRAV3, TRAJ28)
CAVREAYSGAGSYQLPF

SEQ ID NO: 346980 - protein, 18 aa, Homo sapiens
  CDR3 for beta chain variable domain of TCR clone 173490 (TRBV27, TRBJ2-1)
CASGNRAVGVGSKNEQLF

SEQ ID NO: 346981 - protein, 14 aa, Homo sapiens
  CDR3 for alpha chain variable domain of TCR clone 173491 (TRAV12-2, TRAJ13)
CAVQKTGGYQKVTF

SEQ ID NO: 346982 - protein, 16 aa, Homo sapiens
  CDR3 for beta chain variable domain of TCR clone 173491 (TRBV20-1, TRBJ1-2)
CSASMGQGVANYGYTF

SEQ ID NO: 346983 - protein, 13 aa, Homo sapiens
  CDR3 for alpha chain variable domain of TCR clone 173492 (TRAV8-3, TRAJ44)
CAVVPGNASKLTF

SEQ ID NO: 346984 - protein, 11 aa, Homo sapiens
  CDR3 for beta chain variable domain of TCR clone 173492 (TRBV29-1, TRBJ2-5)
CSEDRTGTQYF

SEQ ID NO: 346985 - protein, 16 aa, Homo sapiens
  CDR3 for alpha chain variable domain of TCR clone 173493 (TRAV30, TRAJ24)
CGTEIVDAHSWGKFQF

SEQ ID NO: 346986 - protein, 13 aa, Homo sapiens
  CDR3 for beta chain variable domain of TCR clone 173493 (TRBV7-3, TRBJ1-1)
CASSQDWGAEAFF

SEQ ID NO: 346987 - protein, 16 aa, Homo sapiens
  CDR3 for alpha chain variable domain of TCR clone 173494 (TRAV8-3, TRAJ8)
CAVPRDGNTGFQKLVF

SEQ ID NO: 346988 - protein, 14 aa, Homo sapiens
  CDR3 for beta chain variable domain of TCR clone 173494 (TRBV4-1, TRBJ2-2)
CASSQAVKTGELFF

SEQ ID NO: 346989 - protein, 12 aa, Homo sapiens
  CDR3 for alpha chain variable domain of TCR clone 173495 (TRAV3, TRAJ39)
CAVIEWSNMLTF

SEQ ID NO: 346990 - protein, 14 aa, Homo sapiens
  CDR3 for beta chain variable domain of TCR clone 173495 (TRBV12-4, TRBJ1-1)
CASSLGTGGTEAFF

SEQ ID NO: 346991 - protein, 14 aa, Homo sapiens
  CDR3 for alpha chain variable domain of TCR clone 173496 (TRAV8-6, TRAJ54)
CAVSGLQGAQKLVF

SEQ ID NO: 346992 - protein, 15 aa, Homo sapiens
  CDR3 for beta chain variable domain of TCR clone 173496 (TRBV7-3, TRBJ2-1)
CASSLGQGPFGEQFF

SEQ ID NO: 346993 - protein, 15 aa, Homo sapiens
  CDR3 for alpha chain variable domain of TCR clone 173497 (TRAV8-3, TRAJ11)
CAVGLLNSGYSTLTF

SEQ ID NO: 346994 - protein, 13 aa, Homo sapiens
  CDR3 for beta chain variable domain of TCR clone 173497 (TRBV4-2, TRBJ2-5)
CASSRAGGETQYL

SEQ ID NO: 346995 - protein, 11 aa, Homo sapiens
  CDR3 for alpha chain variable domain of TCR clone 173498 (TRAV3, TRAJ21)
CAVGTFNKFYF

SEQ ID NO: 346996 - protein, 14 aa, Homo sapiens
  CDR3 for beta chain variable domain of TCR clone 173498 (TRBV19, TRBJ2-1)
CASPTFVLSGEQFF

SEQ ID NO: 346997 - protein, 13 aa, Homo sapiens
  CDR3 for alpha chain variable domain of TCR clone 173499 (TRAV12-1, TRAJ20)
CVVNVPNDYKLSF

SEQ ID NO: 346998 - protein, 16 aa, Homo sapiens
  CDR3 for beta chain variable domain of TCR clone 173499 (TRBV7-8, TRBJ2-4)
CASSAERTLAKNIQYF

SEQ ID NO: 346999 - protein, 18 aa, Homo sapiens
  CDR3 for alpha chain variable domain of TCR clone 173500 (TRAV1-2, TRAJ8)
CLLPLCCERGHRLSETLF

SEQ ID NO: 347000 - protein, 16 aa, Homo sapiens
  CDR3 for beta chain variable domain of TCR clone 173500 (TRBV29-1, TRBJ2-6)
CSVEDITYSGANVLTF

SEQ ID NO: 347001 - protein, 14 aa, Homo sapiens
  CDR3 for alpha chain variable domain of TCR clone 173501 (TRAV38-1, TRAJ29)
CAFITPSGNTPLVF

SEQ ID NO: 347002 - protein, 13 aa, Homo sapiens
  CDR3 for beta chain variable domain of TCR clone 173501 (TRBV11-2, TRBJ1-1)
CASGPQTNTEAFF

SEQ ID NO: 347003 - protein, 15 aa, Homo sapiens
  CDR3 for alpha chain variable domain of TCR clone 173502 (TRAV21, TRAJ53)
YATLNSGGSNYKLTF

SEQ ID NO: 347004 - protein, 12 aa, Homo sapiens
  CDR3 for beta chain variable domain of TCR clone 173502 (TRBV5-4, TRBJ2-7)
CASSLEAYEQYF

SEQ ID NO: 347005 - protein, 15 aa, Homo sapiens
  CDR3 for alpha chain variable domain of TCR clone 173503 (TRAV25, TRAJ52)
CAGTSGGTSYGKLTF

SEQ ID NO: 347006 - protein, 15 aa, Homo sapiens
  CDR3 for beta chain variable domain of TCR clone 173503 (TRBV19, TRBJ1-5)
CASSIVWADNQPQHF

SEQ ID NO: 347007 - protein, 23 aa, Homo sapiens
  CDR3 for alpha chain variable domain of TCR clone 173504 (TRAV26-1, TRAJ38)
CIADNAGNNHIQNPDPAVSQLRD

SEQ ID NO: 347008 - protein, 15 aa, Homo sapiens
  CDR3 for beta chain variable domain of TCR clone 173504 (TRBV27, TRBJ2-1)
CASSNGGGSSNEQFF

SEQ ID NO: 347009 - protein, 12 aa, Homo sapiens
  CDR3 for alpha chain variable domain of TCR clone 173505 (TRAV13-1, TRAJ21)
CAAKEGFNKFYF

SEQ ID NO: 347010 - protein, 13 aa, Homo sapiens
  CDR3 for beta chain variable domain of TCR clone 173505 (TRBV18, TRBJ1-1)
CASSPNGDTEAFF

SEQ ID NO: 347011 - protein, 14 aa, Homo sapiens
  CDR3 for alpha chain variable domain of TCR clone 173506 (TRAV1-2, TRAJ16)
CAVNRFSDGQKLLF

SEQ ID NO: 347012 - protein, 14 aa, Homo sapiens
  CDR3 for beta chain variable domain of TCR clone 173506 (TRBV7-2, TRBJ2-3)
CPQLRGGGRDTQYF

SEQ ID NO: 347013 - protein, 16 aa, Homo sapiens
  CDR3 for alpha chain variable domain of TCR clone 173507 (TRAV17, TRAJ9)
CATGEWGGTGGFKTIF

SEQ ID NO: 347014 - protein, 13 aa, Homo sapiens
  CDR3 for beta chain variable domain of TCR clone 173507 (TRBV20-1, TRBJ1-1)
CSAPLGGGTEAFF

SEQ ID NO: 347015 - protein, 14 aa, Homo sapiens
  CDR3 for alpha chain variable domain of TCR clone 173508 (TRAV1-2, TRAJ8)
CAVREDTGFQKLGF

SEQ ID NO: 347016 - protein, 15 aa, Homo sapiens
  CDR3 for beta chain variable domain of TCR clone 173508 (TRBV28, TRBJ1-2)
CASIPQGSDDYGYTF

SEQ ID NO: 347017 - protein, 12 aa, Homo sapiens
  CDR3 for alpha chain variable domain of TCR clone 173509 (TRAV27, TRAJ9)
CAGESGGFKTIF

SEQ ID NO: 347018 - protein, 14 aa, Homo sapiens
  CDR3 for beta chain variable domain of TCR clone 173509 (TRBV7-9, TRBJ1-2)
CASSRHGANYGYTF

SEQ ID NO: 347019 - protein, 16 aa, Homo sapiens
  CDR3 for alpha chain variable domain of TCR clone 173510 (TRAV3, TRAJ21)
CAVRDIERGNFNKFYF

SEQ ID NO: 347020 - protein, 16 aa, Homo sapiens
  CDR3 for beta chain variable domain of TCR clone 173510 (TRBV4-1, TRBJ2-7)
CASSQEWTSGPLEQYF

SEQ ID NO: 347021 - protein, 12 aa, Homo sapiens
  CDR3 for alpha chain variable domain of TCR clone 173511 (TRAV8-3, TRAJ26)
CAGDNYGQNFVF

SEQ ID NO: 347022 - protein, 12 aa, Homo sapiens
  CDR3 for beta chain variable domain of TCR clone 173511 (TRBV9, TRBJ2-1)
CASSPGNNEQFF

SEQ ID NO: 347023 - protein, 14 aa, Homo sapiens
  CDR3 for alpha chain variable domain of TCR clone 173512 (TRAV1-2, TRAJ16)
CAVSRFSDGQKLLF

SEQ ID NO: 347024 - protein, 16 aa, Homo sapiens
  CDR3 for beta chain variable domain of TCR clone 173512 (TRBV29-1, TRBJ2-7)
CSVEVVGTSGSYEQYF

SEQ ID NO: 347025 - protein, 14 aa, Homo sapiens
  CDR3 for alpha chain variable domain of TCR clone 173513 (TRAV17, TRAJ22)
CATSPSGSARQLTF

SEQ ID NO: 347026 - protein, 13 aa, Homo sapiens
  CDR3 for beta chain variable domain of TCR clone 173513 (TRBV12-4, TRBJ1-2)
CASSLRQGKGCTF

SEQ ID NO: 347027 - protein, 14 aa, Homo sapiens
  CDR3 for alpha chain variable domain of TCR clone 173514 (TRAV3, TRAJ34)
CAVRDINNTDKLIL

SEQ ID NO: 347028 - protein, 15 aa, Homo sapiens
  CDR3 for beta chain variable domain of TCR clone 173514 (TRBV20-1, TRBJ2-7)
CSARDRVSRMDEQYF

SEQ ID NO: 347029 - protein, 14 aa, Homo sapiens
  CDR3 for alpha chain variable domain of TCR clone 173515 (TRAV12-2, TRAJ11)
CSVEGGSGYSTLTF

SEQ ID NO: 347030 - protein, 16 aa, Homo sapiens
  CDR3 for beta chain variable domain of TCR clone 173515 (TRBV6-1, TRBJ1-2)
CASSGAWQGRSHGYTF

SEQ ID NO: 347031 - protein, 17 aa, Homo sapiens
  CDR3 for alpha chain variable domain of TCR clone 173516 (TRAV3, TRAJ38)
CAVRDCLNAGNNRKLIW

SEQ ID NO: 347032 - protein, 13 aa, Homo sapiens
  CDR3 for beta chain variable domain of TCR clone 173516 (TRBV23-1, TRBJ1-4)
CASREKFNEKLFF

SEQ ID NO: 347033 - protein, 17 aa, Homo sapiens
  CDR3 for alpha chain variable domain of TCR clone 173517 (TRAV8-1, TRAJ42)
CAVKWGNYGGSQGNLIF

SEQ ID NO: 347034 - protein, 15 aa, Homo sapiens
  CDR3 for beta chain variable domain of TCR clone 173517 (TRBV9, TRBJ1-6)
CASSVAGTGDSTLHF

SEQ ID NO: 347035 - protein, 13 aa, Homo sapiens
  CDR3 for alpha chain variable domain of TCR clone 173518 (TRAV23/DV6, TRAJ21)
CAASIGNFNKFYF

SEQ ID NO: 347036 - protein, 17 aa, Homo sapiens
  CDR3 for beta chain variable domain of TCR clone 173518 (TRBV6-5, TRBJ2-1)
CASRKIPRTGGHNEQFF

SEQ ID NO: 347037 - protein, 14 aa, Homo sapiens
  CDR3 for alpha chain variable domain of TCR clone 173519 (TRAV1-2, TRAJ8)
CAVREDTGFQKLVF

SEQ ID NO: 347038 - protein, 14 aa, Homo sapiens
  CDR3 for beta chain variable domain of TCR clone 173519 (TRBV2, TRBJ2-3)
CASSEGQNTDTQYF

SEQ ID NO: 347039 - protein, 15 aa, Homo sapiens
  CDR3 for alpha chain variable domain of TCR clone 173520 (TRAV8-3, TRAJ45)
CASSYSGGGADGLTL

SEQ ID NO: 347040 - protein, 12 aa, Homo sapiens
  CDR3 for beta chain variable domain of TCR clone 173520 (TRBV11-2, TRBJ2-3)
CASRPGTDTQYF

SEQ ID NO: 347041 - protein, 10 aa, Homo sapiens
  CDR3 for alpha chain variable domain of TCR clone 173521 (TRAV38-2/DV8, TRAJ21)
GAYRSNKFYF

SEQ ID NO: 347042 - protein, 12 aa, Homo sapiens
  CDR3 for beta chain variable domain of TCR clone 173521 (TRBV11-3, TRBJ2-3)
CASSLWEDTQYF

SEQ ID NO: 347043 - protein, 14 aa, Homo sapiens
  CDR3 for alpha chain variable domain of TCR clone 173522 (TRAV13-2, TRAJ15)
CAENPNQAGTSLIF

SEQ ID NO: 347044 - protein, 16 aa, Homo sapiens
  CDR3 for beta chain variable domain of TCR clone 173522 (TRBV12-4, TRBJ1-2)
CASSPTATGKTRGYTF

SEQ ID NO: 347045 - protein, 15 aa, Homo sapiens
  CDR3 for alpha chain variable domain of TCR clone 173523 (TRAV12-1, TRAJ44)
CVADLPTGTASKLTF

SEQ ID NO: 347046 - protein, 16 aa, Homo sapiens
  CDR3 for beta chain variable domain of TCR clone 173523 (TRBV7-8, TRBJ2-4)
CASSAERTLAKNIQYF

SEQ ID NO: 347047 - protein, 14 aa, Homo sapiens
  CDR3 for alpha chain variable domain of TCR clone 173524 (TRAV8-3, TRAJ27)
CAGGRNTNAGKPTF

SEQ ID NO: 347048 - protein, 15 aa, Homo sapiens
  CDR3 for beta chain variable domain of TCR clone 173524 (TRBV11-3, TRBJ2-5)
CASSLRGRVQETQYF

SEQ ID NO: 347049 - protein, 17 aa, Homo sapiens
  CDR3 for alpha chain variable domain of TCR clone 173525 (TRAV4, TRAJ18)
CLVGQRSGGSTLGRLYF

SEQ ID NO: 347050 - protein, 18 aa, Homo sapiens
  CDR3 for beta chain variable domain of TCR clone 173525 (TRBV11-2, TRBJ2-3)
CASSLGGASRGAPNTQYF

SEQ ID NO: 347051 - protein, 17 aa, Homo sapiens
  CDR3 for alpha chain variable domain of TCR clone 173526 (TRAV23/DV6, TRAJ57)
CAASSTLSQGGSEKLVF

SEQ ID NO: 347052 - protein, 16 aa, Homo sapiens
  CDR3 for beta chain variable domain of TCR clone 173526 (TRBV11-2, TRBJ1-1)
CASSLRQGGEHSKAFF

SEQ ID NO: 347053 - protein, 15 aa, Homo sapiens
  CDR3 for alpha chain variable domain of TCR clone 173527 (TRAV25, TRAJ53)
CPTSNSGGSNYKVTF

SEQ ID NO: 347054 - protein, 14 aa, Homo sapiens
  CDR3 for beta chain variable domain of TCR clone 173527 (TRBV11-2, TRBJ2-3)
CASSRLARTDTQYF

SEQ ID NO: 347055 - protein, 12 aa, Homo sapiens
  CDR3 for alpha chain variable domain of TCR clone 173528 (TRAV25, TRAJ17)
CAGEAAGNKLTF

SEQ ID NO: 347056 - protein, 13 aa, Homo sapiens
  CDR3 for beta chain variable domain of TCR clone 173528 (TRBV11-3, TRBJ2-3)
CASRETGRDTQYF

SEQ ID NO: 347057 - protein, 14 aa, Homo sapiens
  CDR3 for alpha chain variable domain of TCR clone 173529 (TRAV12-3, TRAJ10)
SHLPLTGGGNKLTF

SEQ ID NO: 347058 - protein, 13 aa, Homo sapiens
  CDR3 for beta chain variable domain of TCR clone 173529 (TRBV11-3, TRBJ1-1)
CASSSNRDTEAFF

SEQ ID NO: 347059 - protein, 12 aa, Homo sapiens
  CDR3 for alpha chain variable domain of TCR clone 173530 (TRAV12-1, TRAJ34)
CVVAGATGKLIF

SEQ ID NO: 347060 - protein, 15 aa, Homo sapiens
  CDR3 for beta chain variable domain of TCR clone 173530 (TRBV20-1, TRBJ2-5)
CSAPPRTGFGETQYF

SEQ ID NO: 347061 - protein, 12 aa, Homo sapiens
  CDR3 for alpha chain variable domain of TCR clone 173531 (TRAV3, TRAJ31)
CAVRDGNARLMF

SEQ ID NO: 347062 - protein, 18 aa, Homo sapiens
  CDR3 for beta chain variable domain of TCR clone 173531 (TRBV7-2, TRBJ2-3)
CASSLKRDGSGITDTQYF

SEQ ID NO: 347063 - protein, 17 aa, Homo sapiens
  CDR3 for alpha chain variable domain of TCR clone 173532 (TRAV3, TRAJ42)
CAGGDRDYGGSQGNLIF

SEQ ID NO: 347064 - protein, 15 aa, Homo sapiens
  CDR3 for beta chain variable domain of TCR clone 173532 (TRBV6-6, TRBJ2-7)
CASSYSYGGSYEQYF

SEQ ID NO: 347065 - protein, 13 aa, Homo sapiens
  CDR3 for alpha chain variable domain of TCR clone 173533 (TRAV8-1, TRAJ28)
CAVSGAGSYQLTF

SEQ ID NO: 347066 - protein, 14 aa, Homo sapiens
  CDR3 for beta chain variable domain of TCR clone 173533 (TRBV19, TRBJ2-5)
CSSSMTGQQETQYF

SEQ ID NO: 347067 - protein, 12 aa, Homo sapiens
  CDR3 for alpha chain variable domain of TCR clone 173534 (TRAV8-6, TRAJ57)
CAVQGGSEKLVF

SEQ ID NO: 347068 - protein, 11 aa, Homo sapiens
  CDR3 for beta chain variable domain of TCR clone 173534 (TRBV19, TRBJ1-1)
CASSSGSEAFF

SEQ ID NO: 347069 - protein, 12 aa, Homo sapiens
  CDR3 for alpha chain variable domain of TCR clone 173535 (TRAV13-2, TRAJ39)
CAESRPGNMLTF

SEQ ID NO: 347070 - protein, 14 aa, Homo sapiens
  CDR3 for beta chain variable domain of TCR clone 173535 (TRBV7-7, TRBJ2-2)
CASSRDRSTGELFF

SEQ ID NO: 347071 - protein, 14 aa, Homo sapiens
  CDR3 for alpha chain variable domain of TCR clone 173536 (TRAV26-1, TRAJ48)
CIVSSNFGNERLTF

SEQ ID NO: 347072 - protein, 13 aa, Homo sapiens
  CDR3 for beta chain variable domain of TCR clone 173536 (TRBV3-1, TRBJ2-5)
CASSLGLVGTQYF

SEQ ID NO: 347073 - protein, 14 aa, Homo sapiens
  CDR3 for alpha chain variable domain of TCR clone 173537 (TRAV1-2, TRAJ8)
CAVREDTGFQKLVF

SEQ ID NO: 347074 - protein, 17 aa, Homo sapiens
  CDR3 for beta chain variable domain of TCR clone 173537 (TRBV11-2, TRBJ2-1)
CASSLYPPGVEYNVQFF

SEQ ID NO: 347075 - protein, 15 aa, Homo sapiens
  CDR3 for alpha chain variable domain of TCR clone 173538 (TRAV17, TRAJ57)
CAAGPSQGGAEKLVF

SEQ ID NO: 347076 - protein, 14 aa, Homo sapiens
  CDR3 for beta chain variable domain of TCR clone 173538 (TRBV12-5, TRBJ2-5)
CASGSRTHQETQYF

SEQ ID NO: 347077 - protein, 17 aa, Homo sapiens
  CDR3 for alpha chain variable domain of TCR clone 173539 (TRAV8-2, )
CVLNIQNPDPAVYQLRD

SEQ ID NO: 347078 - protein, 14 aa, Homo sapiens
  CDR3 for beta chain variable domain of TCR clone 173539 (TRBV7-9, TRBJ2-5)
CASSLVGGEETQYF

SEQ ID NO: 347079 - protein, 13 aa, Homo sapiens
  CDR3 for alpha chain variable domain of TCR clone 173540 (TRAV17, TRAJ5)
CAPMDTGRRALTF

SEQ ID NO: 347080 - protein, 14 aa, Homo sapiens
  CDR3 for beta chain variable domain of TCR clone 173540 (TRBV6-6, TRBJ2-5)
CQRSRGGLEETQYF

SEQ ID NO: 347081 - protein, 13 aa, Homo sapiens
  CDR3 for alpha chain variable domain of TCR clone 173541 (TRAV8-3, TRAJ4)
CCGASGGYNKLIF

SEQ ID NO: 347082 - protein, 16 aa, Homo sapiens
  CDR3 for beta chain variable domain of TCR clone 173541 (TRBV4-3, TRBJ2-2)
CASSHLQGSGTGELFF

SEQ ID NO: 347083 - protein, 19 aa, Homo sapiens
  CDR3 for alpha chain variable domain of TCR clone 173542 (TRAV21, TRAJ20)
SLVIQPPTSVLPNDYKLSF

SEQ ID NO: 347084 - protein, 14 aa, Homo sapiens
  CDR3 for beta chain variable domain of TCR clone 173542 (TRBV7-2, TRBJ1-3)
CASSRLRSGNTIYF

SEQ ID NO: 347085 - protein, 12 aa, Homo sapiens
  CDR3 for alpha chain variable domain of TCR clone 173543 (TRAV12-3, TRAJ17)
CAMTLTANKLTF

SEQ ID NO: 347086 - protein, 13 aa, Homo sapiens
  CDR3 for beta chain variable domain of TCR clone 173543 (TRBV10-3, TRBJ2-7)
RASKLAVNYEQYF

SEQ ID NO: 347087 - protein, 13 aa, Homo sapiens
  CDR3 for alpha chain variable domain of TCR clone 173544 (TRAV13-1, TRAJ5)
GAASDTGRRALTF

SEQ ID NO: 347088 - protein, 12 aa, Homo sapiens
  CDR3 for beta chain variable domain of TCR clone 173544 (TRBV28, TRBJ2-3)
CASSLYRDTQYF

SEQ ID NO: 347089 - protein, 14 aa, Homo sapiens
  CDR3 for alpha chain variable domain of TCR clone 173545 (TRAV1-2, TRAJ16)
CAVNRFSDGQKLLF

SEQ ID NO: 347090 - protein, 18 aa, Homo sapiens
  CDR3 for beta chain variable domain of TCR clone 173545 (TRBV28, TRBJ2-6)
CASSLAGRAVSGANVLTF

SEQ ID NO: 347091 - protein, 20 aa, Homo sapiens
  CDR3 for alpha chain variable domain of TCR clone 173546 (TRAV12-1, TRAJ42)
SSVIQPPTSVNGGSQGNLIF

SEQ ID NO: 347092 - protein, 18 aa, Homo sapiens
  CDR3 for beta chain variable domain of TCR clone 173546 (TRBV11-2, TRBJ2-3)
CASSLGGAPRGAPNTQYF

SEQ ID NO: 347093 - protein, 14 aa, Homo sapiens
  CDR3 for alpha chain variable domain of TCR clone 173547 (TRAV21, TRAJ35)
CAVMPLGFGNVLHC

SEQ ID NO: 347094 - protein, 12 aa, Homo sapiens
  CDR3 for beta chain variable domain of TCR clone 173547 (TRBV7-9, TRBJ2-7)
CASSSKREEQYF

SEQ ID NO: 347095 - protein, 12 aa, Homo sapiens
  CDR3 for alpha chain variable domain of TCR clone 173548 (TRAV13-2, TRAJ23)
CAERHRGGKRIF

SEQ ID NO: 347096 - protein, 12 aa, Homo sapiens
  CDR3 for beta chain variable domain of TCR clone 173548 (TRBV11-2, TRBJ2-2)
CASSLGGGELFF

SEQ ID NO: 347097 - protein, 16 aa, Homo sapiens
  CDR3 for alpha chain variable domain of TCR clone 173549 (TRAV12-3, TRAJ53)
RAMSTGSGGSNYKLTF

SEQ ID NO: 347098 - protein, 16 aa, Homo sapiens
  CDR3 for beta chain variable domain of TCR clone 173549 (TRBV4-2, TRBJ1-1)
CASSQAGFGMNTEAFF

SEQ ID NO: 347099 - protein, 16 aa, Homo sapiens
  CDR3 for alpha chain variable domain of TCR clone 173550 (TRAV8-3, TRAJ13)
CAVVPMNSGGYQKVTF

SEQ ID NO: 347100 - protein, 15 aa, Homo sapiens
  CDR3 for beta chain variable domain of TCR clone 173550 (TRBV5-4, TRBJ2-5)
CASSLAGGAKETQYF

SEQ ID NO: 347101 - protein, 14 aa, Homo sapiens
  CDR3 for alpha chain variable domain of TCR clone 173551 (TRAV23/DV6, TRAJ8)
CAASKATGFQKLVF

SEQ ID NO: 347102 - protein, 18 aa, Homo sapiens
  CDR3 for beta chain variable domain of TCR clone 173551 (TRBV11-2, TRBJ2-3)
CASSLGGASRGAPNTQYF

SEQ ID NO: 347103 - protein, 11 aa, Homo sapiens
  CDR3 for alpha chain variable domain of TCR clone 173552 (TRAV35, TRAJ34)
CWARNTDKLIF

SEQ ID NO: 347104 - protein, 16 aa, Homo sapiens
  CDR3 for beta chain variable domain of TCR clone 173552 (TRBV28, TRBJ2-1)
CASSLGGSGSYNEQFF

SEQ ID NO: 347105 - protein, 12 aa, Homo sapiens
  CDR3 for alpha chain variable domain of TCR clone 173553 (TRAV23/DV6, TRAJ17)
CAAKAAGNKVTF

SEQ ID NO: 347106 - protein, 17 aa, Homo sapiens
  CDR3 for beta chain variable domain of TCR clone 173553 (TRBV5-5, TRBJ1-1)
CASSLRFRGIMNTEAFF

SEQ ID NO: 347107 - protein, 12 aa, Homo sapiens
  CDR3 for alpha chain variable domain of TCR clone 173554 (TRAV4, TRAJ30)
CLVVNRDDKIIF

SEQ ID NO: 347108 - protein, 12 aa, Homo sapiens
  CDR3 for beta chain variable domain of TCR clone 173554 (TRBV11-2, TRBJ2-2)
CASSLGGGELFF

SEQ ID NO: 347109 - protein, 13 aa, Homo sapiens
  CDR3 for alpha chain variable domain of TCR clone 173555 (TRAV12-2, TRAJ39)
CAVNNNAANMLPF

SEQ ID NO: 347110 - protein, 13 aa, Homo sapiens
  CDR3 for beta chain variable domain of TCR clone 173555 (TRBV2, TRBJ1-5)
CATAGPGNQPQHF

SEQ ID NO: 347111 - protein, 15 aa, Homo sapiens
  CDR3 for alpha chain variable domain of TCR clone 173556 (TRAV27, TRAJ38)
CAGRCNAGNNRKLIW

SEQ ID NO: 347112 - protein, 13 aa, Homo sapiens
  CDR3 for beta chain variable domain of TCR clone 173556 (TRBV20-1, TRBJ1-1)
CSARVGGNTEAFF

SEQ ID NO: 347113 - protein, 15 aa, Homo sapiens
  CDR3 for alpha chain variable domain of TCR clone 173557 (TRAV21, TRAJ24)
CAARSSTDSWGKLQF

SEQ ID NO: 347114 - protein, 19 aa, Homo sapiens
  CDR3 for beta chain variable domain of TCR clone 173557 (TRBV14, TRBJ2-1)
CASSQDHLWEAPEYNEQFF

SEQ ID NO: 347115 - protein, 14 aa, Homo sapiens
  CDR3 for alpha chain variable domain of TCR clone 173558 (TRAV3, TRAJ7)
CAVREEKREQQTRF

SEQ ID NO: 347116 - protein, 13 aa, Homo sapiens
  CDR3 for beta chain variable domain of TCR clone 173558 (TRBV20-1, TRBJ2-7)
CSARTGAGYEQYF

SEQ ID NO: 347117 - protein, 12 aa, Homo sapiens
  CDR3 for alpha chain variable domain of TCR clone 173559 (TRAV12-3, TRAJ17)
CAMTLTGNKLTF

SEQ ID NO: 347118 - protein, 15 aa, Homo sapiens
  CDR3 for beta chain variable domain of TCR clone 173559 (TRBV20-1, TRBJ2-7)
CSARDRVSGMDAQCF

SEQ ID NO: 347119 - protein, 14 aa, Homo sapiens
  CDR3 for alpha chain variable domain of TCR clone 173560 (TRAV12-2, TRAJ17)
CAVLFQAAGNKLTF

SEQ ID NO: 347120 - protein, 14 aa, Homo sapiens
  CDR3 for beta chain variable domain of TCR clone 173560 (TRBV12-5, TRBJ2-5)
CASGSRTHQETQYF

SEQ ID NO: 347121 - protein, 14 aa, Homo sapiens
  CDR3 for alpha chain variable domain of TCR clone 173561 (TRAV1-2, TRAJ8)
CAVREDTGFQKLVF

SEQ ID NO: 347122 - protein, 16 aa, Homo sapiens
  CDR3 for beta chain variable domain of TCR clone 173561 (TRBV5-7, TRBJ2-5)
CASSLAPAGGRETQYF

SEQ ID NO: 347123 - protein, 14 aa, Homo sapiens
  CDR3 for alpha chain variable domain of TCR clone 173562 (TRAV13-2, TRAJ17)
CAENSKAAGNKLTF

SEQ ID NO: 347124 - protein, 13 aa, Homo sapiens
  CDR3 for beta chain variable domain of TCR clone 173562 (TRBV7-8, TRBJ2-7)
CASSLTGGREQYF

SEQ ID NO: 347125 - protein, 14 aa, Homo sapiens
  CDR3 for alpha chain variable domain of TCR clone 173563 (TRAV23/DV6, TRAJ22)
CADISSGSARQLPF

SEQ ID NO: 347126 - protein, 16 aa, Homo sapiens
  CDR3 for beta chain variable domain of TCR clone 173563 (TRBV5-7, TRBJ2-5)
CASIRGQTGYQETQYF

SEQ ID NO: 347127 - protein, 11 aa, Homo sapiens
  CDR3 for alpha chain variable domain of TCR clone 173564 (TRAV2, TRAJ13)
CASGGYQNVTF

SEQ ID NO: 347128 - protein, 20 aa, Homo sapiens
  CDR3 for beta chain variable domain of TCR clone 173564 (TRBV28, TRBJ2-1)
CASTPIGRSPGLAGGNEQFF

SEQ ID NO: 347129 - protein, 14 aa, Homo sapiens
  CDR3 for alpha chain variable domain of TCR clone 173565 (TRAV8-3, TRAJ23)
CAVIIYNQGGKLIF

SEQ ID NO: 347130 - protein, 14 aa, Homo sapiens
  CDR3 for beta chain variable domain of TCR clone 173565 (TRBV19, TRBJ2-1)
CASPTFVLSGEQFF

SEQ ID NO: 347131 - protein, 12 aa, Homo sapiens
  CDR3 for alpha chain variable domain of TCR clone 173566 (TRAV16, TRAJ26)
CSLRSYGQNFVF

SEQ ID NO: 347132 - protein, 13 aa, Homo sapiens
  CDR3 for beta chain variable domain of TCR clone 173566 (TRBV12-4, TRBJ1-1)
CASSPGTSFEAFF

SEQ ID NO: 347133 - protein, 13 aa, Homo sapiens
  CDR3 for alpha chain variable domain of TCR clone 173567 (TRAV13-2, TRAJ13)
CADLSGGYQKVTF

SEQ ID NO: 347134 - protein, 15 aa, Homo sapiens
  CDR3 for beta chain variable domain of TCR clone 173567 (TRBV19, TRBJ1-1)
CASSIGGGRDTEAFF

SEQ ID NO: 347135 - protein, 15 aa, Homo sapiens
  CDR3 for alpha chain variable domain of TCR clone 173568 (TRAV29/DV5, TRAJ29)
CTVSERSSGNTPLVF

SEQ ID NO: 347136 - protein, 17 aa, Homo sapiens
  CDR3 for beta chain variable domain of TCR clone 173568 (TRBV4-1, TRBJ1-4)
CASSQEGPRGVEEKLFF

SEQ ID NO: 347137 - protein, 13 aa, Homo sapiens
  CDR3 for alpha chain variable domain of TCR clone 173569 (TRAV2, TRAJ24)
CAVTTDCWGKLQF

SEQ ID NO: 347138 - protein, 14 aa, Homo sapiens
  CDR3 for beta chain variable domain of TCR clone 173569 (TRBV13, TRBJ2-5)
CASSLGRGQETQYF

SEQ ID NO: 347139 - protein, 14 aa, Homo sapiens
  CDR3 for alpha chain variable domain of TCR clone 173570 (TRAV8-3, TRAJ43)
CAVGSEFFNNDMRF

SEQ ID NO: 347140 - protein, 14 aa, Homo sapiens
  CDR3 for beta chain variable domain of TCR clone 173570 (TRBV7-2, TRBJ1-1)
CASSFLTGTTEAFF

SEQ ID NO: 347141 - protein, 13 aa, Homo sapiens
  CDR3 for alpha chain variable domain of TCR clone 173571 (TRAV26-1, TRAJ34)
CIVRPWITDKLIF

SEQ ID NO: 347142 - protein, 14 aa, Homo sapiens
  CDR3 for beta chain variable domain of TCR clone 173571 (TRBV12-4, TRBJ1-4)
CASSRQRANEKLFF

SEQ ID NO: 347143 - protein, 13 aa, Homo sapiens
  CDR3 for alpha chain variable domain of TCR clone 173572 (TRAV26-2, TRAJ43)
CILRAVNNNDMRF

SEQ ID NO: 347144 - protein, 13 aa, Homo sapiens
  CDR3 for beta chain variable domain of TCR clone 173572 (TRBV12-4, TRBJ1-1)
CASSPGTGFEAFF

SEQ ID NO: 347145 - protein, 18 aa, Homo sapiens
  CDR3 for alpha chain variable domain of TCR clone 173573 (TRAV26-1, TRAJ52)
CIVRVAGAGGTSYGKLTF

SEQ ID NO: 347146 - protein, 18 aa, Homo sapiens
  CDR3 for beta chain variable domain of TCR clone 173573 (TRBV6-5, TRBJ1-4)
CASSYGAGGARTNEKLFF

SEQ ID NO: 347147 - protein, 16 aa, Homo sapiens
  CDR3 for alpha chain variable domain of TCR clone 173574 (TRAV17, TRAJ36)
CATVSLNWSKQPLLWD

SEQ ID NO: 347148 - protein, 13 aa, Homo sapiens
  CDR3 for beta chain variable domain of TCR clone 173574 (TRBV4-1, TRBJ1-1)
CASSQLGTGEAFF

SEQ ID NO: 347149 - protein, 13 aa, Homo sapiens
  CDR3 for alpha chain variable domain of TCR clone 173575 (TRAV2, TRAJ15)
CAVASQAGTALIF

SEQ ID NO: 347150 - protein, 16 aa, Homo sapiens
  CDR3 for beta chain variable domain of TCR clone 173575 (TRBV5-1, TRBJ1-1)
CASSSGGNSLNTEACF

SEQ ID NO: 347151 - protein, 19 aa, Homo sapiens
  CDR3 for alpha chain variable domain of TCR clone 173576 (TRAV1-2, TRAJ26)
CLLPLCCERPDNYGQSFVF

SEQ ID NO: 347152 - protein, 12 aa, Homo sapiens
  CDR3 for beta chain variable domain of TCR clone 173576 (TRBV7-8, TRBJ2-7)
CASSLGDREQYF

SEQ ID NO: 347153 - protein, 16 aa, Homo sapiens
  CDR3 for alpha chain variable domain of TCR clone 173577 (TRAV21, TRAJ45)
CAVSWGSGGGADGLTF

SEQ ID NO: 347154 - protein, 14 aa, Homo sapiens
  CDR3 for beta chain variable domain of TCR clone 173577 (TRBV4-2, TRBJ1-2)
CASSPGGSNYGYTR

SEQ ID NO: 347155 - protein, 14 aa, Homo sapiens
  CDR3 for alpha chain variable domain of TCR clone 173578 (TRAV1-2, TRAJ16)
CAVNRFSDGQKLLF

SEQ ID NO: 347156 - protein, 13 aa, Homo sapiens
  CDR3 for beta chain variable domain of TCR clone 173578 (TRBV27, TRBJ1-1)
YASSLSIGAEAFF

SEQ ID NO: 347157 - protein, 13 aa, Homo sapiens
  CDR3 for alpha chain variable domain of TCR clone 173579 (TRAV8-3, TRAJ36)
CSVGATGANNLFF

SEQ ID NO: 347158 - protein, 15 aa, Homo sapiens
  CDR3 for beta chain variable domain of TCR clone 173579 (TRBV7-2, TRBJ1-2)
CASSQRAGWNYGYTF

SEQ ID NO: 347159 - protein, 23 aa, Homo sapiens
  CDR3 for alpha chain variable domain of TCR clone 173580 (TRAV26-1, TRAJ38)
CIADNAGNNHIQNPEPAVYQLRD

SEQ ID NO: 347160 - protein, 13 aa, Homo sapiens
  CDR3 for beta chain variable domain of TCR clone 173580 (TRBV4-1, TRBJ2-1)
CASSQAGGDEQFF

SEQ ID NO: 347161 - protein, 12 aa, Homo sapiens
  CDR3 for alpha chain variable domain of TCR clone 173581 (TRAV13-1, TRAJ9)
CASHTGGFKTIF

SEQ ID NO: 347162 - protein, 18 aa, Homo sapiens
  CDR3 for beta chain variable domain of TCR clone 173581 (TRBV11-2, TRBJ2-3)
CASSLGGASRGAPKTQYF

SEQ ID NO: 347163 - protein, 12 aa, Homo sapiens
  CDR3 for alpha chain variable domain of TCR clone 173582 (TRAV3, TRAJ26)
CAVKDYGQNFVF

SEQ ID NO: 347164 - protein, 16 aa, Homo sapiens
  CDR3 for beta chain variable domain of TCR clone 173582 (TRBV11-2, TRBJ1-2)
CASSPSGREANYGYTF

SEQ ID NO: 347165 - protein, 23 aa, Homo sapiens
  CDR3 for alpha chain variable domain of TCR clone 173583 (TRAV9-2, TRAJ4)
CQTQRCTSVLWVIRSGGYNKLLF

SEQ ID NO: 347166 - protein, 12 aa, Homo sapiens
  CDR3 for beta chain variable domain of TCR clone 173583 (TRBV11-2, TRBJ2-2)
CASSLGGGELFF

SEQ ID NO: 347167 - protein, 16 aa, Homo sapiens
  CDR3 for alpha chain variable domain of TCR clone 173584 (TRAV12-3, TRAJ53)
CAMSTGSGGSNYKLTF

SEQ ID NO: 347168 - protein, 16 aa, Homo sapiens
  CDR3 for beta chain variable domain of TCR clone 173584 (TRBV12-5, TRBJ2-5)
CASGPRTSGNQETQYF

SEQ ID NO: 347169 - protein, 14 aa, Homo sapiens
  CDR3 for alpha chain variable domain of TCR clone 173585 (TRAV9-2, TRAJ39)
CALYIYNAGNMLTF

SEQ ID NO: 347170 - protein, 13 aa, Homo sapiens
  CDR3 for beta chain variable domain of TCR clone 173585 (TRBV20-1, TRBJ1-1)
CSARAGGNTEAFF

SEQ ID NO: 347171 - protein, 16 aa, Homo sapiens
  CDR3 for alpha chain variable domain of TCR clone 173586 (TRAV30, TRAJ24)
CGTEIVDADSWWKFQF

SEQ ID NO: 347172 - protein, 18 aa, Homo sapiens
  CDR3 for beta chain variable domain of TCR clone 173586 (TRBV7-9, TRBJ2-7)
CTSSLTTSGSRTWYEQYF

SEQ ID NO: 347173 - protein, 14 aa, Homo sapiens
  CDR3 for alpha chain variable domain of TCR clone 173587 (TRAV20, TRDJ1)
CAVQAGGRQGKLIF

SEQ ID NO: 347174 - protein, 14 aa, Homo sapiens
  CDR3 for beta chain variable domain of TCR clone 173587 (TRBV28, TRBJ1-2)
CASRIQGANYGYTF

SEQ ID NO: 347175 - protein, 17 aa, Homo sapiens
  CDR3 for alpha chain variable domain of TCR clone 173588 (TRAV4, TRAJ42)
CLVGVLNYGGSQGNLIF

SEQ ID NO: 347176 - protein, 12 aa, Homo sapiens
  CDR3 for beta chain variable domain of TCR clone 173588 (TRBV20-1, TRBJ2-1)
CSAQYTDNEQFF

SEQ ID NO: 347177 - protein, 14 aa, Homo sapiens
  CDR3 for alpha chain variable domain of TCR clone 173589 (TRAV38-1, TRAJ29)
CAFITPSVNTPLVF

SEQ ID NO: 347178 - protein, 15 aa, Homo sapiens
  CDR3 for beta chain variable domain of TCR clone 173589 (TRBV5-1, TRBJ2-1)
CASSPPRAPYNEQFF

SEQ ID NO: 347179 - protein, 14 aa, Homo sapiens
  CDR3 for alpha chain variable domain of TCR clone 173590 (TRAV12-3, TRAJ10)
SHLPLTGGGNKLTF

SEQ ID NO: 347180 - protein, 15 aa, Homo sapiens
  CDR3 for beta chain variable domain of TCR clone 173590 (TRBV7-9, TRBJ1-4)
CASSRTGGFSEKLFF

SEQ ID NO: 347181 - protein, 11 aa, Homo sapiens
  CDR3 for alpha chain variable domain of TCR clone 173591 (TRAV25, TRAJ52)
VMVVLDGKLTF

SEQ ID NO: 347182 - protein, 17 aa, Homo sapiens
  CDR3 for beta chain variable domain of TCR clone 173591 (TRBV7-8, TRBJ2-6)
CASSAGTGGAGANVLTF

SEQ ID NO: 347183 - protein, 12 aa, Homo sapiens
  CDR3 for alpha chain variable domain of TCR clone 173592 (TRAV12-3, TRAJ17)
CVMTLTGNKLTF

SEQ ID NO: 347184 - protein, 13 aa, Homo sapiens
  CDR3 for beta chain variable domain of TCR clone 173592 (TRBV5-1, TRBJ1-1)
CASSADWDTEAFF

SEQ ID NO: 347185 - protein, 15 aa, Homo sapiens
  CDR3 for alpha chain variable domain of TCR clone 173593 (TRAV21, TRAJ53)
CATLNSGGINYKLTF

SEQ ID NO: 347186 - protein, 14 aa, Homo sapiens
  CDR3 for beta chain variable domain of TCR clone 173593 (TRBV7-2, TRBJ2-7)
CASSLPPGQGPQYF

SEQ ID NO: 347187 - protein, 11 aa, Homo sapiens
  CDR3 for alpha chain variable domain of TCR clone 173594 (TRAV8-6, TRAJ27)
CAVLKEANQPL

SEQ ID NO: 347188 - protein, 14 aa, Homo sapiens
  CDR3 for beta chain variable domain of TCR clone 173594 (TRBV12-4, TRBJ1-1)
CASSFSQMNTEAFF

SEQ ID NO: 347189 - protein, 17 aa, Homo sapiens
  CDR3 for alpha chain variable domain of TCR clone 173595 (TRAV8-6, TRAJ58)
CAVSSWVGETSGSRLTF

SEQ ID NO: 347190 - protein, 13 aa, Homo sapiens
  CDR3 for beta chain variable domain of TCR clone 173595 (TRBV14, TRBJ2-7)
CASSQDRRHEQYF

SEQ ID NO: 347191 - protein, 13 aa, Homo sapiens
  CDR3 for alpha chain variable domain of TCR clone 173596 (TRAV13-1, TRAJ39)
CAASIWAGNMLTL

SEQ ID NO: 347192 - protein, 15 aa, Homo sapiens
  CDR3 for beta chain variable domain of TCR clone 173596 (TRBV7-9, TRBJ1-1)
CASSLLEQGGTGAFF

SEQ ID NO: 347193 - protein, 13 aa, Homo sapiens
  CDR3 for alpha chain variable domain of TCR clone 173597 (TRAV27, TRAJ45)
CRSSGGGADGLTF

SEQ ID NO: 347194 - protein, 11 aa, Homo sapiens
  CDR3 for beta chain variable domain of TCR clone 173597 (TRBV19, TRBJ1-1)
CSSSIGSEAFF

SEQ ID NO: 347195 - protein, 14 aa, Homo sapiens
  CDR3 for alpha chain variable domain of TCR clone 173598 (TRAV12-2, TRAJ17)
CAVLFKAAGHKLTF

SEQ ID NO: 347196 - protein, 14 aa, Homo sapiens
  CDR3 for beta chain variable domain of TCR clone 173598 (TRBV7-3, TRBJ1-1)
CASSLKGGNTEAFF

SEQ ID NO: 347197 - protein, 14 aa, Homo sapiens
  CDR3 for alpha chain variable domain of TCR clone 173599 (TRAV1-2, TRAJ16)
CAVNRFSDGQKLLF

SEQ ID NO: 347198 - protein, 13 aa, Homo sapiens
  CDR3 for beta chain variable domain of TCR clone 173599 (TRBV20-1, TRBJ1-1)
CSARPVMNTEAFF

SEQ ID NO: 347199 - protein, 11 aa, Homo sapiens
  CDR3 for alpha chain variable domain of TCR clone 173600 (TRAV21, TRAJ48)
CAVDGNEKLTF

SEQ ID NO: 347200 - protein, 16 aa, Homo sapiens
  CDR3 for beta chain variable domain of TCR clone 173600 (TRBV12-4, TRBJ1-5)
CASSSGPRGSNQPQLF

SEQ ID NO: 347201 - protein, 17 aa, Homo sapiens
  CDR3 for alpha chain variable domain of TCR clone 173601 (TRAV12-2, TRAJ6)
CAPQGPPRAGGSYIPTF

SEQ ID NO: 347202 - protein, 16 aa, Homo sapiens
  CDR3 for beta chain variable domain of TCR clone 173601 (TRBV19, TRBJ2-2)
CASSTARASNSGELFF

SEQ ID NO: 347203 - protein, 15 aa, Homo sapiens
  CDR3 for alpha chain variable domain of TCR clone 173602 (TRAV35, TRAJ50)
CAGQLRKTTYDKVIF

SEQ ID NO: 347204 - protein, 12 aa, Homo sapiens
  CDR3 for beta chain variable domain of TCR clone 173602 (TRBV5-1, TRBJ2-5)
CASSLGLETQYV

SEQ ID NO: 347205 - protein, 20 aa, Homo sapiens
  CDR3 for alpha chain variable domain of TCR clone 173603 (TRAV21, TRAJ22)
SLVTQPPTLKSSGSARQLTF

SEQ ID NO: 347206 - protein, 16 aa, Homo sapiens
  CDR3 for beta chain variable domain of TCR clone 173603 (TRBV19, TRBJ2-1)
CASSKAGPSSYNEQFF

SEQ ID NO: 347207 - protein, 15 aa, Homo sapiens
  CDR3 for alpha chain variable domain of TCR clone 173604 (TRAV2, TRAJ13)
CATPSYSGGYQKVTF

SEQ ID NO: 347208 - protein, 14 aa, Homo sapiens
  CDR3 for beta chain variable domain of TCR clone 173604 (TRBV11-2, TRBJ2-3)
CASSRLARTDTQYS

SEQ ID NO: 347209 - protein, 16 aa, Homo sapiens
  CDR3 for alpha chain variable domain of TCR clone 173605 (TRAV12-3, TRAJ53)
CAMSPGSGGSNYKLTF

SEQ ID NO: 347210 - protein, 17 aa, Homo sapiens
  CDR3 for beta chain variable domain of TCR clone 173605 (TRBV11-3, TRBJ2-1)
CASSLYPPGVEYNEQFF

SEQ ID NO: 347211 - protein, 14 aa, Homo sapiens
  CDR3 for alpha chain variable domain of TCR clone 173606 (TRAV12-2, TRAJ13)
CAVKKTGGYQEVTF

SEQ ID NO: 347212 - protein, 15 aa, Homo sapiens
  CDR3 for beta chain variable domain of TCR clone 173606 (TRBV6-6, TRBJ1-1)
CASSYPTAMNTEDFF

SEQ ID NO: 347213 - protein, 14 aa, Homo sapiens
  CDR3 for alpha chain variable domain of TCR clone 173607 (TRAV2, TRAJ9)
CAVEDRSGGSKTIF

SEQ ID NO: 347214 - protein, 15 aa, Homo sapiens
  CDR3 for beta chain variable domain of TCR clone 173607 (TRBV27, TRBJ2-1)
CASSNGGGSSNEQFF

SEQ ID NO: 347215 - protein, 16 aa, Homo sapiens
  CDR3 for alpha chain variable domain of TCR clone 173608 (TRAV12-2, TRAJ10)
CAVNRVLTGGGNKLTF

SEQ ID NO: 347216 - protein, 12 aa, Homo sapiens
  CDR3 for beta chain variable domain of TCR clone 173608 (TRBV7-3, TRBJ1-2)
CASSKKGVPVTF

SEQ ID NO: 347217 - protein, 14 aa, Homo sapiens
  CDR3 for alpha chain variable domain of TCR clone 173609 (TRAV9-2, TRAJ39)
CALYIYNAGNMLTF

SEQ ID NO: 347218 - protein, 14 aa, Homo sapiens
  CDR3 for beta chain variable domain of TCR clone 173609 (TRBV7-2, TRBJ2-7)
CASSPKTSFYEQYV

SEQ ID NO: 347219 - protein, 12 aa, Homo sapiens
  CDR3 for alpha chain variable domain of TCR clone 173610 (TRAV8-3, TRAJ26)
RAGDKYGQNFVF

SEQ ID NO: 347220 - protein, 13 aa, Homo sapiens
  CDR3 for beta chain variable domain of TCR clone 173610 (TRBV10-3, TRBJ2-7)
CASKLAVNYEQYF

SEQ ID NO: 347221 - protein, 15 aa, Homo sapiens
  CDR3 for alpha chain variable domain of TCR clone 173611 (TRAV14/DV4, TRAJ10)
CAMRELTGGGNKLTF

SEQ ID NO: 347222 - protein, 14 aa, Homo sapiens
  CDR3 for beta chain variable domain of TCR clone 173611 (TRBV5-4, TRBJ1-1)
CASSLDSRRDEAFF

SEQ ID NO: 347223 - protein, 13 aa, Homo sapiens
  CDR3 for alpha chain variable domain of TCR clone 173612 (TRAV8-3, TRAJ4)
WVFYSGGYNKLIF

SEQ ID NO: 347224 - protein, 14 aa, Homo sapiens
  CDR3 for beta chain variable domain of TCR clone 173612 (TRBV7-9, TRBJ2-3)
CASSLEDGTDTQYL

SEQ ID NO: 347225 - protein, 11 aa, Homo sapiens
  CDR3 for alpha chain variable domain of TCR clone 173613 (TRAV1-1, TRAJ23)
CAVRQGGKLIF

SEQ ID NO: 347226 - protein, 15 aa, Homo sapiens
  CDR3 for beta chain variable domain of TCR clone 173613 (TRBV5-1, TRBJ2-1)
CASRPPRAPYNEQFF

SEQ ID NO: 347227 - protein, 12 aa, Homo sapiens
  CDR3 for alpha chain variable domain of TCR clone 173614 (TRAV12-3, TRAJ34)
CALGYNTDKLIF

SEQ ID NO: 347228 - protein, 14 aa, Homo sapiens
  CDR3 for beta chain variable domain of TCR clone 173614 (TRBV4-1, TRBJ2-2)
CASSQAVNTGELFF

SEQ ID NO: 347229 - protein, 17 aa, Homo sapiens
  CDR3 for alpha chain variable domain of TCR clone 173615 (TRAV8-6, TRAJ58)
CAVSSWVGETRGSRFTF

SEQ ID NO: 347230 - protein, 14 aa, Homo sapiens
  CDR3 for beta chain variable domain of TCR clone 173615 (TRBV4-2, TRBJ2-1)
CASGLDRAYNEQFF

SEQ ID NO: 347231 - protein, 14 aa, Homo sapiens
  CDR3 for alpha chain variable domain of TCR clone 173616 (TRAV20, TRAJ40)
CAVSSTSGTYKYIF

SEQ ID NO: 347232 - protein, 12 aa, Homo sapiens
  CDR3 for beta chain variable domain of TCR clone 173616 (TRBV7-8, TRBJ2-7)
CASSLGDREQYF

SEQ ID NO: 347233 - protein, 20 aa, Homo sapiens
  CDR3 for alpha chain variable domain of TCR clone 173617 (TRAV12-1, TRAJ42)
SSVIQPPTSVKGGSQGNLIF

SEQ ID NO: 347234 - protein, 16 aa, Homo sapiens
  CDR3 for beta chain variable domain of TCR clone 173617 (TRBV15, TRBJ2-5)
CATSRYLEAAQETQYF

SEQ ID NO: 347235 - protein, 18 aa, Homo sapiens
  CDR3 for alpha chain variable domain of TCR clone 173618 (TRAV21, TRAJ52)
CAVRPSPAGGTSYGKLTF

SEQ ID NO: 347236 - protein, 12 aa, Homo sapiens
  CDR3 for beta chain variable domain of TCR clone 173618 (TRBV2, TRBJ2-1)
GRGLPSYNEQFF

SEQ ID NO: 347237 - protein, 12 aa, Homo sapiens
  CDR3 for alpha chain variable domain of TCR clone 173619 (TRAV13-1, TRAJ21)
CAAKEGFNKFYF

SEQ ID NO: 347238 - protein, 15 aa, Homo sapiens
  CDR3 for beta chain variable domain of TCR clone 173619 (TRBV28, TRBJ1-3)
CASSMGWASGNTIYF

SEQ ID NO: 347239 - protein, 15 aa, Homo sapiens
  CDR3 for alpha chain variable domain of TCR clone 173620 (TRAV12-3, TRAJ6)
CAMSATTGRSYIPTF

SEQ ID NO: 347240 - protein, 15 aa, Homo sapiens
  CDR3 for beta chain variable domain of TCR clone 173620 (TRBV7-2, TRBJ2-5)
CASSGILAGAETQYF

SEQ ID NO: 347241 - protein, 14 aa, Homo sapiens
  CDR3 for alpha chain variable domain of TCR clone 173621 (TRAV12-2, TRAJ3)
CAMSLYSSASKIIF

SEQ ID NO: 347242 - protein, 14 aa, Homo sapiens
  CDR3 for beta chain variable domain of TCR clone 173621 (TRBV27, TRBJ2-1)
CAGSIAETYNEQFF

SEQ ID NO: 347243 - protein, 14 aa, Homo sapiens
  CDR3 for alpha chain variable domain of TCR clone 173622 (TRAV12-2, TRAJ17)
CAVLFKAAVNKLTF

SEQ ID NO: 347244 - protein, 14 aa, Homo sapiens
  CDR3 for beta chain variable domain of TCR clone 173622 (TRBV12-5, TRBJ2-5)
CASGSRTHQETQYF

SEQ ID NO: 347245 - protein, 13 aa, Homo sapiens
  CDR3 for alpha chain variable domain of TCR clone 173623 (TRAV12-1, TRAJ40)
CVVPTSGTYKYIF

SEQ ID NO: 347246 - protein, 18 aa, Homo sapiens
  CDR3 for beta chain variable domain of TCR clone 173623 (TRBV7-6, TRBJ2-1)
CASSARTSGRSSYNEQFF

SEQ ID NO: 347247 - protein, 17 aa, Homo sapiens
  CDR3 for alpha chain variable domain of TCR clone 173624 (TRAV8-6, TRAJ58)
CAVSSWVGETSGSRLTF

SEQ ID NO: 347248 - protein, 13 aa, Homo sapiens
  CDR3 for beta chain variable domain of TCR clone 173624 (TRBV19, TRBJ1-5)
CASSIGGEQPQHF

SEQ ID NO: 347249 - protein, 17 aa, Homo sapiens
  CDR3 for alpha chain variable domain of TCR clone 173625 (TRAV3, TRAJ42)
CAVRDRDYGGSQGNIIF

SEQ ID NO: 347250 - protein, 12 aa, Homo sapiens
  CDR3 for beta chain variable domain of TCR clone 173625 (TRBV29-1, TRBJ2-2)
CSVDKYTGELFF

SEQ ID NO: 347251 - protein, 14 aa, Homo sapiens
  CDR3 for alpha chain variable domain of TCR clone 173626 (TRAV3, TRAJ9)
CAVRLNTGGFKTIF

SEQ ID NO: 347252 - protein, 13 aa, Homo sapiens
  CDR3 for beta chain variable domain of TCR clone 173626 (TRBV7-2, TRBJ2-7)
CASSSPSGSEQYF

SEQ ID NO: 347253 - protein, 13 aa, Homo sapiens
  CDR3 for alpha chain variable domain of TCR clone 173627 (TRAV8-3, TRAJ28)
CAVGAVGSYELTF

SEQ ID NO: 347254 - protein, 12 aa, Homo sapiens
  CDR3 for beta chain variable domain of TCR clone 173627 (TRBV7-8, TRBJ2-7)
RASSLGDREQYF

SEQ ID NO: 347255 - protein, 12 aa, Homo sapiens
  CDR3 for alpha chain variable domain of TCR clone 173628 (TRAV26-1, TRAJ53)
CIEGGSNYKLTF

SEQ ID NO: 347256 - protein, 15 aa, Homo sapiens
  CDR3 for beta chain variable domain of TCR clone 173628 (TRBV20-1, TRBJ2-1)
CSARGIGGTYNEQFF

SEQ ID NO: 347257 - protein, 15 aa, Homo sapiens
  CDR3 for alpha chain variable domain of TCR clone 173629 (TRAV25, TRAJ52)
CAGTSGGTSYGKLTF

SEQ ID NO: 347258 - protein, 15 aa, Homo sapiens
  CDR3 for beta chain variable domain of TCR clone 173629 (TRBV19, TRBJ2-3)
CAAGDTNAPNDTQYF

SEQ ID NO: 347259 - protein, 13 aa, Homo sapiens
  CDR3 for alpha chain variable domain of TCR clone 173630 (TRAV3, TRAJ15)
CAVRDQAGTALIF

SEQ ID NO: 347260 - protein, 15 aa, Homo sapiens
  CDR3 for beta chain variable domain of TCR clone 173630 (TRBV11-1, TRBJ2-7)
CASSLDYGASYEQYF

SEQ ID NO: 347261 - protein, 15 aa, Homo sapiens
  CDR3 for alpha chain variable domain of TCR clone 173631 (TRAV3, TRAJ17)
CAVSPKEAAGNKLTF

SEQ ID NO: 347262 - protein, 12 aa, Homo sapiens
  CDR3 for beta chain variable domain of TCR clone 173631 (TRBV7-9, TRBJ1-6)
CASSVMTSHLHF

SEQ ID NO: 347263 - protein, 14 aa, Homo sapiens
  CDR3 for alpha chain variable domain of TCR clone 173632 (TRAV8-4, TRAJ8)
CAVSVGTGFQKLVF

SEQ ID NO: 347264 - protein, 15 aa, Homo sapiens
  CDR3 for beta chain variable domain of TCR clone 173632 (TRBV2, TRBJ2-3)
CASSGGGTGTDTQYF

SEQ ID NO: 347265 - protein, 12 aa, Homo sapiens
  CDR3 for alpha chain variable domain of TCR clone 173633 (TRAV21, TRAJ11)
CAVRGGNSTLTF

SEQ ID NO: 347266 - protein, 15 aa, Homo sapiens
  CDR3 for beta chain variable domain of TCR clone 173633 (TRBV19, TRBJ1-5)
CASSIVWADNQPQHF

SEQ ID NO: 347267 - protein, 15 aa, Homo sapiens
  CDR3 for alpha chain variable domain of TCR clone 173634 (TRAV3, TRAJ4)
CAQNRFSGGYNKLIF

SEQ ID NO: 347268 - protein, 16 aa, Homo sapiens
  CDR3 for beta chain variable domain of TCR clone 173634 (TRBV3-1, TRBJ1-6)
CASSQEFQGSYSPLHF

SEQ ID NO: 347269 - protein, 17 aa, Homo sapiens
  CDR3 for alpha chain variable domain of TCR clone 173635 (TRAV3, TRAJ6)
CAVRDGPSAGGSYIPTF

SEQ ID NO: 347270 - protein, 13 aa, Homo sapiens
  CDR3 for beta chain variable domain of TCR clone 173635 (TRBV20-1, TRBJ2-5)
CSAATELQETQYF

SEQ ID NO: 347271 - protein, 14 aa, Homo sapiens
  CDR3 for alpha chain variable domain of TCR clone 173636 (TRAV13-2, TRAJ17)
CAENSKAAGNKLTF

SEQ ID NO: 347272 - protein, 16 aa, Homo sapiens
  CDR3 for beta chain variable domain of TCR clone 173636 (TRBV7-6, TRBJ2-3)
CASSPLAGGSTDTQYF

SEQ ID NO: 347273 - protein, 15 aa, Homo sapiens
  CDR3 for alpha chain variable domain of TCR clone 173637 (TRAV16, TRAJ16)
CALQGGGSDGQKMLF

SEQ ID NO: 347274 - protein, 15 aa, Homo sapiens
  CDR3 for beta chain variable domain of TCR clone 173637 (TRBV20-1, TRBJ2-7)
CSARDRVSGMDEQYF

SEQ ID NO: 347275 - protein, 14 aa, Homo sapiens
  CDR3 for alpha chain variable domain of TCR clone 173638 (TRAV16, TRAJ17)
CALSGRAAGNKLTF

SEQ ID NO: 347276 - protein, 15 aa, Homo sapiens
  CDR3 for beta chain variable domain of TCR clone 173638 (TRBV27, TRBJ1-6)
CASSFDRGLGSPLHF

SEQ ID NO: 347277 - protein, 16 aa, Homo sapiens
  CDR3 for alpha chain variable domain of TCR clone 173639 (TRAV12-1, TRAJ48)
CVVNMVSNFGNEKLTF

SEQ ID NO: 347278 - protein, 18 aa, Homo sapiens
  CDR3 for beta chain variable domain of TCR clone 173639 (TRBV11-2, TRBJ2-6)
CAISLNPFLGTGANVLTF

SEQ ID NO: 347279 - protein, 13 aa, Homo sapiens
  CDR3 for alpha chain variable domain of TCR clone 173640 (TRAV20, TRAJ37)
CAGCSSNTGKLIF

SEQ ID NO: 347280 - protein, 16 aa, Homo sapiens
  CDR3 for beta chain variable domain of TCR clone 173640 (TRBV15, TRBJ2-5)
CATSRYLEAAQETQYF

SEQ ID NO: 347281 - protein, 17 aa, Homo sapiens
  CDR3 for alpha chain variable domain of TCR clone 173641 (TRAV12-1, TRAJ8)
CVVNPKRGNTGFQKLVF

SEQ ID NO: 347282 - protein, 14 aa, Homo sapiens
  CDR3 for beta chain variable domain of TCR clone 173641 (TRBV3-1, TRBJ2-7)
CASSRTSGKEEQYF

SEQ ID NO: 347283 - protein, 15 aa, Homo sapiens
  CDR3 for alpha chain variable domain of TCR clone 173642 (TRAV13-1, TRAJ17)
CAASIERAAGNKLTF

SEQ ID NO: 347284 - protein, 13 aa, Homo sapiens
  CDR3 for beta chain variable domain of TCR clone 173642 (TRBV7-7, TRBJ2-3)
CASSFSRADTQYF

SEQ ID NO: 347285 - protein, 13 aa, Homo sapiens
  CDR3 for alpha chain variable domain of TCR clone 173643 (TRAV12-3, TRAJ33)
CAMSVNSNYQLIW

SEQ ID NO: 347286 - protein, 14 aa, Homo sapiens
  CDR3 for beta chain variable domain of TCR clone 173643 (TRBV19, TRBJ2-5)
CASSMTGQQETQYF

SEQ ID NO: 347287 - protein, 14 aa, Homo sapiens
  CDR3 for alpha chain variable domain of TCR clone 173644 (TRAV29/DV5, TRAJ45)
CAARFRGGAAGLTF

SEQ ID NO: 347288 - protein, 11 aa, Homo sapiens
  CDR3 for beta chain variable domain of TCR clone 173644 (TRBV11-2, TRBJ2-2)
CASSLPGELFF

SEQ ID NO: 347289 - protein, 18 aa, Homo sapiens
  CDR3 for alpha chain variable domain of TCR clone 173645 (TRAV21, TRAJ52)
CAVRPSPAGGTSYGKLTF

SEQ ID NO: 347290 - protein, 15 aa, Homo sapiens
  CDR3 for beta chain variable domain of TCR clone 173645 (TRBV7-3, TRBJ2-1)
CASSQRGGALIEQFF

SEQ ID NO: 347291 - protein, 16 aa, Homo sapiens
  CDR3 for alpha chain variable domain of TCR clone 173646 (TRAV1-2, TRAJ16)
NVLDGLEEKDGQKLLF

SEQ ID NO: 347292 - protein, 16 aa, Homo sapiens
  CDR3 for beta chain variable domain of TCR clone 173646 (TRBV20-1, TRBJ1-4)
CSAPGQGLLTNEKLFF

SEQ ID NO: 347293 - protein, 15 aa, Homo sapiens
  CDR3 for alpha chain variable domain of TCR clone 173647 (TRAV12-1, TRAJ44)
CVADLPTGTASKLTF

SEQ ID NO: 347294 - protein, 14 aa, Homo sapiens
  CDR3 for beta chain variable domain of TCR clone 173647 (TRBV7-8, TRBJ2-3)
CASSLEAGTDTQYF

SEQ ID NO: 347295 - protein, 10 aa, Homo sapiens
  CDR3 for alpha chain variable domain of TCR clone 173648 (TRAV13-1, TRAJ52)
CAAKTPMLVV

SEQ ID NO: 347296 - protein, 14 aa, Homo sapiens
  CDR3 for beta chain variable domain of TCR clone 173648 (TRBV6-5, TRBJ1-1)
CASSFGQVLTEAFF

SEQ ID NO: 347297 - protein, 18 aa, Homo sapiens
  CDR3 for alpha chain variable domain of TCR clone 173649 (TRAV4, TRAJ22)
CLVGDINYFFWLCKATDL

SEQ ID NO: 347298 - protein, 13 aa, Homo sapiens
  CDR3 for beta chain variable domain of TCR clone 173649 (TRBV19, TRBJ1-5)
CASSEGSNQPQHF

SEQ ID NO: 347299 - protein, 14 aa, Homo sapiens
  CDR3 for alpha chain variable domain of TCR clone 173650 (TRAV8-2, TRAJ37)
CVVSSSGNTGKLIF

SEQ ID NO: 347300 - protein, 11 aa, Homo sapiens
  CDR3 for beta chain variable domain of TCR clone 173650 (TRBV18, TRBJ2-5)
CASSPRETQYF

SEQ ID NO: 347301 - protein, 14 aa, Homo sapiens
  CDR3 for alpha chain variable domain of TCR clone 173651 (TRAV21, TRAJ52)
FGRAGGTSYGKLTF

SEQ ID NO: 347302 - protein, 14 aa, Homo sapiens
  CDR3 for beta chain variable domain of TCR clone 173651 (TRBV19, TRBJ1-2)
CASSVLGYNYGYTF

SEQ ID NO: 347303 - protein, 13 aa, Homo sapiens
  CDR3 for alpha chain variable domain of TCR clone 173652 (TRAV23/DV6, TRAJ22)
RAPWGGSARQLTF

SEQ ID NO: 347304 - protein, 14 aa, Homo sapiens
  CDR3 for beta chain variable domain of TCR clone 173652 (TRBV18, TRBJ2-7)
CASSPTSGGYEQYF

SEQ ID NO: 347305 - protein, 14 aa, Homo sapiens
  CDR3 for alpha chain variable domain of TCR clone 173653 (TRAV36/DV7, TRAJ32)
CAVGHVGATNKLIF

SEQ ID NO: 347306 - protein, 15 aa, Homo sapiens
  CDR3 for beta chain variable domain of TCR clone 173653 (TRBV5-1, TRBJ2-7)
CASSLDLTSSYEQYF

SEQ ID NO: 347307 - protein, 16 aa, Homo sapiens
  CDR3 for alpha chain variable domain of TCR clone 173654 (TRAV13-1, TRAJ17)
CAASKGVKAAGNKLTF

SEQ ID NO: 347308 - protein, 15 aa, Homo sapiens
  CDR3 for beta chain variable domain of TCR clone 173654 (TRBV12-4, TRBJ2-5)
CASSPPTGLQETQYF

SEQ ID NO: 347309 - protein, 15 aa, Homo sapiens
  CDR3 for alpha chain variable domain of TCR clone 173655 (TRAV2, TRAJ11)
CAVGGRNAGYSTLTF

SEQ ID NO: 347310 - protein, 12 aa, Homo sapiens
  CDR3 for beta chain variable domain of TCR clone 173655 (TRBV5-4, TRBJ2-7)
CASSLEAYEQYF

SEQ ID NO: 347311 - protein, 11 aa, Homo sapiens
  CDR3 for alpha chain variable domain of TCR clone 173656 (TRAV23/DV6, TRAJ58)
CAARLLRGETS

SEQ ID NO: 347312 - protein, 13 aa, Homo sapiens
  CDR3 for beta chain variable domain of TCR clone 173656 (TRBV9, TRBJ2-1)
CASSPSGGSEQFF

SEQ ID NO: 347313 - protein, 14 aa, Homo sapiens
  CDR3 for alpha chain variable domain of TCR clone 173657 (TRAV12-1, TRAJ12)
CVVTRMDSSYKLIF

SEQ ID NO: 347314 - protein, 14 aa, Homo sapiens
  CDR3 for beta chain variable domain of TCR clone 173657 (TRBV4-1, TRBJ2-7)
CDSSPVAGGDEQYF

SEQ ID NO: 347315 - protein, 15 aa, Homo sapiens
  CDR3 for alpha chain variable domain of TCR clone 173658 (TRAV26-2, TRAJ39)
CSLRGNNNAGNMLAF

SEQ ID NO: 347316 - protein, 15 aa, Homo sapiens
  CDR3 for beta chain variable domain of TCR clone 173658 (TRBV5-4, TRBJ1-1)
CASSSLGWANTEAFF

SEQ ID NO: 347317 - protein, 13 aa, Homo sapiens
  CDR3 for alpha chain variable domain of TCR clone 173659 (TRAV1-2, TRAJ20)
CAVRDGNDYKLSF

SEQ ID NO: 347318 - protein, 19 aa, Homo sapiens
  CDR3 for beta chain variable domain of TCR clone 173659 (TRBV7-2, TRBJ2-3)
CASSLGGGERYAVLWPRHP

SEQ ID NO: 347319 - protein, 16 aa, Homo sapiens
  CDR3 for alpha chain variable domain of TCR clone 173660 (TRAV12-1, TRAJ53)
CVVTSVAGGSNYKLTF

SEQ ID NO: 347320 - protein, 16 aa, Homo sapiens
  CDR3 for beta chain variable domain of TCR clone 173660 (TRBV6-6, TRBJ2-3)
CASSCSRAGSTDTQYF

SEQ ID NO: 347321 - protein, 14 aa, Homo sapiens
  CDR3 for alpha chain variable domain of TCR clone 173661 (TRAV12-2, TRAJ36)
CAVKPPTGANNLFF

SEQ ID NO: 347322 - protein, 13 aa, Homo sapiens
  CDR3 for beta chain variable domain of TCR clone 173661 (TRBV20-1, TRBJ1-6)
CSAPTGLGSPLHF

SEQ ID NO: 347323 - protein, 13 aa, Homo sapiens
  CDR3 for alpha chain variable domain of TCR clone 173662 (TRAV30, TRAJ6)
CGFIEGGSYIPTF

SEQ ID NO: 347324 - protein, 13 aa, Homo sapiens
  CDR3 for beta chain variable domain of TCR clone 173662 (TRBV5-4, TRBJ2-5)
CASSAVSQETQYF

SEQ ID NO: 347325 - protein, 15 aa, Homo sapiens
  CDR3 for alpha chain variable domain of TCR clone 173663 (TRAV38-1, TRAJ37)
CAFIFGSGNTGKLIF

SEQ ID NO: 347326 - protein, 17 aa, Homo sapiens
  CDR3 for beta chain variable domain of TCR clone 173663 (TRBV20-1, TRBJ2-1)
FSARDPLAGVWDNEQFF

SEQ ID NO: 347327 - protein, 12 aa, Homo sapiens
  CDR3 for alpha chain variable domain of TCR clone 173664 (TRAV12-1, TRAJ40)
CVVYSGTYKYIF

SEQ ID NO: 347328 - protein, 14 aa, Homo sapiens
  CDR3 for beta chain variable domain of TCR clone 173664 (TRBV12-5, TRBJ2-5)
CASGSRTHQESQYF

SEQ ID NO: 347329 - protein, 18 aa, Homo sapiens
  CDR3 for alpha chain variable domain of TCR clone 173665 (TRAV21, TRAJ52)
CAVRPSPAGGTSHGKLTF

SEQ ID NO: 347330 - protein, 18 aa, Homo sapiens
  CDR3 for beta chain variable domain of TCR clone 173665 (TRBV7-2, TRBJ2-3)
CASSLETSRGRKADTQYF

SEQ ID NO: 347331 - protein, 15 aa, Homo sapiens
  CDR3 for alpha chain variable domain of TCR clone 173666 (TRAV26-1, TRAJ22)
CIVRVSFWFCKATDL

SEQ ID NO: 347332 - protein, 17 aa, Homo sapiens
  CDR3 for beta chain variable domain of TCR clone 173666 (TRBV11-2, TRBJ2-1)
CASSLYPPGVEYNERFF

SEQ ID NO: 347333 - protein, 12 aa, Homo sapiens
  CDR3 for alpha chain variable domain of TCR clone 173667 (TRAV27, TRAJ13)
CAGAGGYQKVTF

SEQ ID NO: 347334 - protein, 13 aa, Homo sapiens
  CDR3 for beta chain variable domain of TCR clone 173667 (TRBV10-3, TRBJ2-7)
CVSKLAVNYEQYF

SEQ ID NO: 347335 - protein, 16 aa, Homo sapiens
  CDR3 for alpha chain variable domain of TCR clone 173668 (TRAV20, TRAJ22)
CAVQAPSSGSARQLTF

SEQ ID NO: 347336 - protein, 13 aa, Homo sapiens
  CDR3 for beta chain variable domain of TCR clone 173668 (TRBV7-2, TRBJ2-5)
CASSQTSVESQYF

SEQ ID NO: 347337 - protein, 10 aa, Homo sapiens
  CDR3 for alpha chain variable domain of TCR clone 173669 (TRAV1-2, TRAJ31)
CAFFDASLMF

SEQ ID NO: 347338 - protein, 11 aa, Homo sapiens
  CDR3 for beta chain variable domain of TCR clone 173669 (TRBV29-1, TRBJ2-5)
CSEDRTGTQYF

SEQ ID NO: 347339 - protein, 11 aa, Homo sapiens
  CDR3 for alpha chain variable domain of TCR clone 173670 (TRAV13-2, TRAJ54)
RAVQGAQKLVF

SEQ ID NO: 347340 - protein, 16 aa, Homo sapiens
  CDR3 for beta chain variable domain of TCR clone 173670 (TRBV28, TRBJ2-6)
CASSFRTYSGANVLTF

SEQ ID NO: 347341 - protein, 14 aa, Homo sapiens
  CDR3 for alpha chain variable domain of TCR clone 173671 (TRAV2, TRAJ29)
CAVTPPSGNTPLVF

SEQ ID NO: 347342 - protein, 15 aa, Homo sapiens
  CDR3 for beta chain variable domain of TCR clone 173671 (TRBV11-3, TRBJ2-3)
CASLKDGREGDTQYF

SEQ ID NO: 347343 - protein, 18 aa, Homo sapiens
  CDR3 for alpha chain variable domain of TCR clone 173672 (TRAV13-1, TRAJ52)
CAAKNPNAGGTSYGKLPF

SEQ ID NO: 347344 - protein, 13 aa, Homo sapiens
  CDR3 for beta chain variable domain of TCR clone 173672 (TRBV27, TRBJ1-1)
CASSLSIGAEAFF

SEQ ID NO: 347345 - protein, 14 aa, Homo sapiens
  CDR3 for alpha chain variable domain of TCR clone 173673 (TRAV21, TRAJ15)
CAVSLNQAGTARIF

SEQ ID NO: 347346 - protein, 11 aa, Homo sapiens
  CDR3 for beta chain variable domain of TCR clone 173673 (TRBV20-1, TRBJ2-7)
CSARTSYEQYF

SEQ ID NO: 347347 - protein, 17 aa, Homo sapiens
  CDR3 for alpha chain variable domain of TCR clone 173674 (TRAV36/DV7, TRAJ52)
CAVAQRAGGTSYGKLTF

SEQ ID NO: 347348 - protein, 15 aa, Homo sapiens
  CDR3 for beta chain variable domain of TCR clone 173674 (TRBV19, TRBJ2-1)
CASSSPGVPLDEQFF

SEQ ID NO: 347349 - protein, 14 aa, Homo sapiens
  CDR3 for alpha chain variable domain of TCR clone 173675 (TRAV16, TRAJ8)
RALLLNTGFQKLVF

SEQ ID NO: 347350 - protein, 15 aa, Homo sapiens
  CDR3 for beta chain variable domain of TCR clone 173675 (TRBV7-7, TRBJ2-2)
CATSKLPKNTGELFF

SEQ ID NO: 347351 - protein, 17 aa, Homo sapiens
  CDR3 for alpha chain variable domain of TCR clone 173676 (TRAV8-6, TRAJ58)
CDVSSWVGETSGSRLTF

SEQ ID NO: 347352 - protein, 17 aa, Homo sapiens
  CDR3 for beta chain variable domain of TCR clone 173676 (TRBV4-3, TRBJ1-2)
CASSSRLQAGGSVGYTF

SEQ ID NO: 347353 - protein, 13 aa, Homo sapiens
  CDR3 for alpha chain variable domain of TCR clone 173677 (TRAV8-6, TRAJ49)
CAVITNTGNQFYF

SEQ ID NO: 347354 - protein, 14 aa, Homo sapiens
  CDR3 for beta chain variable domain of TCR clone 173677 (TRBV15, TRBJ2-4)
CATEGGQGANIQYF

SEQ ID NO: 347355 - protein, 13 aa, Homo sapiens
  CDR3 for alpha chain variable domain of TCR clone 173678 (TRAV12-3, TRAJ39)
CAMIDNAGNMLTF

SEQ ID NO: 347356 - protein, 18 aa, Homo sapiens
  CDR3 for beta chain variable domain of TCR clone 173678 (TRBV9, TRBJ2-5)
CASSLAEGTNAFGETQYF

SEQ ID NO: 347357 - protein, 14 aa, Homo sapiens
  CDR3 for alpha chain variable domain of TCR clone 173679 (TRAV1-2, TRAJ16)
CAVNRFSDGQTLLF

SEQ ID NO: 347358 - protein, 12 aa, Homo sapiens
  CDR3 for beta chain variable domain of TCR clone 173679 (TRBV5-5, TRBJ2-5)
CASSYFGETQYF

SEQ ID NO: 347359 - protein, 13 aa, Homo sapiens
  CDR3 for alpha chain variable domain of TCR clone 173680 (TRAV8-6, TRAJ13)
CAVSSGGDQKVTF

SEQ ID NO: 347360 - protein, 15 aa, Homo sapiens
  CDR3 for beta chain variable domain of TCR clone 173680 (TRBV7-9, TRBJ2-7)
CASSLPMGQANEQYF

SEQ ID NO: 347361 - protein, 15 aa, Homo sapiens
  CDR3 for alpha chain variable domain of TCR clone 173681 (TRAV13-1, TRAJ17)
CAASIERAAGNKLTF

SEQ ID NO: 347362 - protein, 22 aa, Homo sapiens
  CDR3 for beta chain variable domain of TCR clone 173681 (TRBV6-4, TRBJ2-6)
CASSETGRGGQRPDFRGRQQAD

SEQ ID NO: 347363 - protein, 16 aa, Homo sapiens
  CDR3 for alpha chain variable domain of TCR clone 173682 (TRAV3, TRAJ10)
CAVRDMRAGGGNKLTF

SEQ ID NO: 347364 - protein, 12 aa, Homo sapiens
  CDR3 for beta chain variable domain of TCR clone 173682 (TRBV18, TRBJ2-1)
CASSSGEDEQFF

SEQ ID NO: 347365 - protein, 11 aa, Homo sapiens
  CDR3 for alpha chain variable domain of TCR clone 173683 (TRAV17, TRAJ9)
CGFTGGFKTIF

SEQ ID NO: 347366 - protein, 13 aa, Homo sapiens
  CDR3 for beta chain variable domain of TCR clone 173683 (TRBV19, TRBJ2-7)
CASRKAGGSEQYF

SEQ ID NO: 347367 - protein, 14 aa, Homo sapiens
  CDR3 for alpha chain variable domain of TCR clone 173684 (TRAV12-2, TRAJ40)
CAVKIPSGTYKYIL

SEQ ID NO: 347368 - protein, 13 aa, Homo sapiens
  CDR3 for beta chain variable domain of TCR clone 173684 (TRBV11-3, TRBJ1-1)
CASSLALGTEAFF

SEQ ID NO: 347369 - protein, 13 aa, Homo sapiens
  CDR3 for alpha chain variable domain of TCR clone 173685 (TRAV8-3, TRAJ28)
CAVGAVVSYQLTF

SEQ ID NO: 347370 - protein, 15 aa, Homo sapiens
  CDR3 for beta chain variable domain of TCR clone 173685 (TRBV7-9, TRBJ1-5)
CASSQGRQPNQPQHF

SEQ ID NO: 347371 - protein, 15 aa, Homo sapiens
  CDR3 for alpha chain variable domain of TCR clone 173686 (TRAV27, TRAJ50)
CARVGRGTSYDKVIF

SEQ ID NO: 347372 - protein, 14 aa, Homo sapiens
  CDR3 for beta chain variable domain of TCR clone 173686 (TRBV7-2, TRBJ1-1)
CASSFYDLNTEAFF

SEQ ID NO: 347373 - protein, 12 aa, Homo sapiens
  CDR3 for alpha chain variable domain of TCR clone 173687 (TRAV16, TRAJ27)
CALNHQWRQINL

SEQ ID NO: 347374 - protein, 14 aa, Homo sapiens
  CDR3 for beta chain variable domain of TCR clone 173687 (TRBV11-2, TRBJ1-5)
CASSLDRGRQPQHF

SEQ ID NO: 347375 - protein, 23 aa, Homo sapiens
  CDR3 for alpha chain variable domain of TCR clone 173688 (TRAV4, TRAJ26)
IPADRKSSTLSLPRVYYGQNFVF

SEQ ID NO: 347376 - protein, 16 aa, Homo sapiens
  CDR3 for beta chain variable domain of TCR clone 173688 (TRBV7-2, TRBJ1-2)
CASSSNQDRRGHGCTF

SEQ ID NO: 347377 - protein, 15 aa, Homo sapiens
  CDR3 for alpha chain variable domain of TCR clone 173689 (TRAV3, TRAJ29)
CAVRDSISGNTPLVF

SEQ ID NO: 347378 - protein, 14 aa, Homo sapiens
  CDR3 for beta chain variable domain of TCR clone 173689 (TRBV19, TRBJ2-5)
CASSMTGQQETQYF

SEQ ID NO: 347379 - protein, 15 aa, Homo sapiens
  CDR3 for alpha chain variable domain of TCR clone 173690 (TRAV13-1, TRAJ57)
CAASNTQGGSEKLVF

SEQ ID NO: 347380 - protein, 13 aa, Homo sapiens
  CDR3 for beta chain variable domain of TCR clone 173690 (TRBV7-6, TRBJ1-5)
CASSQGPNLPQHF

SEQ ID NO: 347381 - protein, 11 aa, Homo sapiens
  CDR3 for alpha chain variable domain of TCR clone 173691 (TRAV38-1, TRAJ35)
CAFMSLDRLWE

SEQ ID NO: 347382 - protein, 13 aa, Homo sapiens
  CDR3 for beta chain variable domain of TCR clone 173691 (TRBV4-1, TRBJ2-5)
CASSQEVQETQYL

SEQ ID NO: 347383 - protein, 14 aa, Homo sapiens
  CDR3 for alpha chain variable domain of TCR clone 173692 (TRAV8-1, TRAJ5)
CAVRTDTGRRALTL

SEQ ID NO: 347384 - protein, 14 aa, Homo sapiens
  CDR3 for beta chain variable domain of TCR clone 173692 (TRBV5-5, TRBJ1-2)
CASSLDPYNYGYTF

SEQ ID NO: 347385 - protein, 16 aa, Homo sapiens
  CDR3 for alpha chain variable domain of TCR clone 173693 (TRAV23/DV6, TRAJ9)
CAASIGGNTGGFKTIF

SEQ ID NO: 347386 - protein, 19 aa, Homo sapiens
  CDR3 for beta chain variable domain of TCR clone 173693 (TRBV12-4, TRBJ2-1)
CASTLAFDPRDKEANEQFF

SEQ ID NO: 347387 - protein, 18 aa, Homo sapiens
  CDR3 for alpha chain variable domain of TCR clone 173694 (TRAV13-1, TRAJ52)
CSASKRSAGGTSYGKLTF

SEQ ID NO: 347388 - protein, 13 aa, Homo sapiens
  CDR3 for beta chain variable domain of TCR clone 173694 (TRBV10-3, TRBJ2-7)
CASKLAVNYEQYF

SEQ ID NO: 347389 - protein, 14 aa, Homo sapiens
  CDR3 for alpha chain variable domain of TCR clone 173695 (TRAV38-1, TRAJ45)
CANYSGGGADGLTF

SEQ ID NO: 347390 - protein, 20 aa, Homo sapiens
  CDR3 for beta chain variable domain of TCR clone 173695 (TRBV28, TRBJ2-1)
CASTPIGRSPGLVGGNEQFF

SEQ ID NO: 347391 - protein, 13 aa, Homo sapiens
  CDR3 for alpha chain variable domain of TCR clone 173696 (TRAV23/DV6, TRAJ26)
CAASPLSGQNSVF

SEQ ID NO: 347392 - protein, 15 aa, Homo sapiens
  CDR3 for beta chain variable domain of TCR clone 173696 (TRBV7-3, TRBJ2-1)
CASILDGNSYNEQFF

SEQ ID NO: 347393 - protein, 14 aa, Homo sapiens
  CDR3 for alpha chain variable domain of TCR clone 173697 (TRAV12-3, TRAJ13)
CAMRNSGGYQKVTF

SEQ ID NO: 347394 - protein, 14 aa, Homo sapiens
  CDR3 for beta chain variable domain of TCR clone 173697 (TRBV4-1, TRBJ1-6)
CASSPGSDSSPLQF

SEQ ID NO: 347395 - protein, 14 aa, Homo sapiens
  CDR3 for alpha chain variable domain of TCR clone 173698 (TRAV20, TRAJ35)
CAASKGGFGNVLHC

SEQ ID NO: 347396 - protein, 13 aa, Homo sapiens
  CDR3 for beta chain variable domain of TCR clone 173698 (TRBV7-3, TRBJ1-1)
CASSQDWGAEAFF

SEQ ID NO: 347397 - protein, 14 aa, Homo sapiens
  CDR3 for alpha chain variable domain of TCR clone 173699 (TRAV12-3, TRAJ10)
SHLPLTGGGNKLTF

SEQ ID NO: 347398 - protein, 14 aa, Homo sapiens
  CDR3 for beta chain variable domain of TCR clone 173699 (TRBV6-1, TRBJ1-3)
GARVQGGGGNTIYF

SEQ ID NO: 347399 - protein, 15 aa, Homo sapiens
  CDR3 for alpha chain variable domain of TCR clone 173700 (TRAV3, TRAJ45)
CAERTPWGGADGLTF

SEQ ID NO: 347400 - protein, 16 aa, Homo sapiens
  CDR3 for beta chain variable domain of TCR clone 173700 (TRBV6-1, TRBJ2-2)
CASSFGQGANTGELFF

SEQ ID NO: 347401 - protein, 17 aa, Homo sapiens
  CDR3 for alpha chain variable domain of TCR clone 173701 (TRAV3, TRAJ42)
CAVRDRDYGGSQGNLIF

SEQ ID NO: 347402 - protein, 19 aa, Homo sapiens
  CDR3 for beta chain variable domain of TCR clone 173701 (TRBV28, TRBJ2-1)
CQHPYWTVTGLAGGNEQFF

SEQ ID NO: 347403 - protein, 15 aa, Homo sapiens
  CDR3 for alpha chain variable domain of TCR clone 173702 (TRAV23/DV6, TRAJ16)
CAASPWFSDGQKLLF

SEQ ID NO: 347404 - protein, 11 aa, Homo sapiens
  CDR3 for beta chain variable domain of TCR clone 173702 (TRBV19, TRBJ2-5)
CASSIKETQYF

SEQ ID NO: 347405 - protein, 15 aa, Homo sapiens
  CDR3 for alpha chain variable domain of TCR clone 173703 (TRAV17, TRAJ57)
CATGPSQGGSGKLGF

SEQ ID NO: 347406 - protein, 16 aa, Homo sapiens
  CDR3 for beta chain variable domain of TCR clone 173703 (TRBV12-4, TRBJ1-5)
CASSRPVGGSNQPQHF

SEQ ID NO: 347407 - protein, 12 aa, Homo sapiens
  CDR3 for alpha chain variable domain of TCR clone 173704 (TRAV38-1, TRAJ57)
CAFMKLSPTLVF

SEQ ID NO: 347408 - protein, 13 aa, Homo sapiens
  CDR3 for beta chain variable domain of TCR clone 173704 (TRBV19, TRBJ2-7)
CASSTSGSYEQYF

SEQ ID NO: 347409 - protein, 12 aa, Homo sapiens
  CDR3 for alpha chain variable domain of TCR clone 173705 (TRAV6, TRAJ15)
CVRNQAGTALIF

SEQ ID NO: 347410 - protein, 15 aa, Homo sapiens
  CDR3 for beta chain variable domain of TCR clone 173705 (TRBV10-3, TRBJ1-3)
CAISDSQGAGNTIYF

SEQ ID NO: 347411 - protein, 14 aa, Homo sapiens
  CDR3 for alpha chain variable domain of TCR clone 173706 (TRAV2, TRAJ37)
CAVEGSSNTGKLIF

SEQ ID NO: 347412 - protein, 14 aa, Homo sapiens
  CDR3 for beta chain variable domain of TCR clone 173706 (TRBV25-1, TRBJ1-1)
CASTHLGGNTEAFF

SEQ ID NO: 347413 - protein, 14 aa, Homo sapiens
  CDR3 for alpha chain variable domain of TCR clone 173707 (TRAV13-1, TRAJ23)
CAASRLGRGGKLIF

SEQ ID NO: 347414 - protein, 16 aa, Homo sapiens
  CDR3 for beta chain variable domain of TCR clone 173707 (TRBV4-1, TRBJ2-3)
CASSQSTSGAEDTQYF

SEQ ID NO: 347415 - protein, 18 aa, Homo sapiens
  CDR3 for alpha chain variable domain of TCR clone 173708 (TRAV21, TRAJ52)
CAVTPSPAGGTSYGTLTF

SEQ ID NO: 347416 - protein, 13 aa, Homo sapiens
  CDR3 for beta chain variable domain of TCR clone 173708 (TRBV7-3, TRBJ1-1)
CASSQDWGAEAFF

SEQ ID NO: 347417 - protein, 15 aa, Homo sapiens
  CDR3 for alpha chain variable domain of TCR clone 173709 (TRAV12-3, TRAJ49)
CAMAVTPNTGNQFYF

SEQ ID NO: 347418 - protein, 18 aa, Homo sapiens
  CDR3 for beta chain variable domain of TCR clone 173709 (TRBV4-1, TRBJ1-5)
CASSQDPRGKGLNQPQHF

SEQ ID NO: 347419 - protein, 12 aa, Homo sapiens
  CDR3 for alpha chain variable domain of TCR clone 173710 (TRAV23/DV6, TRAJ30)
CAASKGDDKIIF

SEQ ID NO: 347420 - protein, 13 aa, Homo sapiens
  CDR3 for beta chain variable domain of TCR clone 173710 (TRBV12-4, TRBJ1-2)
CASSSGLTVISTF

SEQ ID NO: 347421 - protein, 15 aa, Homo sapiens
  CDR3 for alpha chain variable domain of TCR clone 173711 (TRAV12-1, TRAJ9)
CVVSFGDTGSFKTIF

SEQ ID NO: 347422 - protein, 19 aa, Homo sapiens
  CDR3 for beta chain variable domain of TCR clone 173711 (TRBV25-1, TRBJ2-2)
CAILVYRVDRGRKTGELFF

SEQ ID NO: 347423 - protein, 12 aa, Homo sapiens
  CDR3 for alpha chain variable domain of TCR clone 173712 (TRAV3, TRAJ27)
CAVRDGAGKSTF

SEQ ID NO: 347424 - protein, 20 aa, Homo sapiens
  CDR3 for beta chain variable domain of TCR clone 173712 (TRBV7-8, TRBJ2-2)
CASSHLFPGPTIHITGELFF

SEQ ID NO: 347425 - protein, 16 aa, Homo sapiens
  CDR3 for alpha chain variable domain of TCR clone 173713 (TRAV30, TRAJ24)
CGTEIVDADSWGKFQF

SEQ ID NO: 347426 - protein, 14 aa, Homo sapiens
  CDR3 for beta chain variable domain of TCR clone 173713 (TRBV18, TRBJ2-3)
CASSRRTSTDTQYF

SEQ ID NO: 347427 - protein, 15 aa, Homo sapiens
  CDR3 for alpha chain variable domain of TCR clone 173714 (TRAV13-1, TRAJ18)
CAASGGGSTLGRLYF

SEQ ID NO: 347428 - protein, 12 aa, Homo sapiens
  CDR3 for beta chain variable domain of TCR clone 173714 (TRBV29-1, TRBJ2-3)
CSVTGGADTQYF

SEQ ID NO: 347429 - protein, 15 aa, Homo sapiens
  CDR3 for alpha chain variable domain of TCR clone 173715 (TRAV26-1, TRAJ44)
CIVRIGTGTASKLTF

SEQ ID NO: 347430 - protein, 14 aa, Homo sapiens
  CDR3 for beta chain variable domain of TCR clone 173715 (TRBV7-3, TRBJ2-1)
CASSLAGGTNEQFF

SEQ ID NO: 347431 - protein, 14 aa, Homo sapiens
  CDR3 for alpha chain variable domain of TCR clone 173716 (TRAV13-1, TRAJ48)
CAAIRSFGNEKLTL

SEQ ID NO: 347432 - protein, 12 aa, Homo sapiens
  CDR3 for beta chain variable domain of TCR clone 173716 (TRBV6-6, TRBJ2-5)
CASNRQSGTQYF

SEQ ID NO: 347433 - protein, 15 aa, Homo sapiens
  CDR3 for alpha chain variable domain of TCR clone 173717 (TRAV23/DV6, TRAJ30)
CAASSQESRDDKIIF

SEQ ID NO: 347434 - protein, 16 aa, Homo sapiens
  CDR3 for beta chain variable domain of TCR clone 173717 (TRBV7-3, TRBJ2-2)
CASSLKRGTLSGELFF

SEQ ID NO: 347435 - protein, 14 aa, Homo sapiens
  CDR3 for alpha chain variable domain of TCR clone 173718 (TRAV12-3, TRAJ10)
SHLPLPGGGNKLTF

SEQ ID NO: 347436 - protein, 15 aa, Homo sapiens
  CDR3 for beta chain variable domain of TCR clone 173718 (TRBV11-3, TRBJ2-3)
CASLKDGREGDTQYF

SEQ ID NO: 347437 - protein, 13 aa, Homo sapiens
  CDR3 for alpha chain variable domain of TCR clone 173719 (TRAV2, TRAJ40)
CAVVTSGTYTYIF

SEQ ID NO: 347438 - protein, 14 aa, Homo sapiens
  CDR3 for beta chain variable domain of TCR clone 173719 (TRBV19, TRBJ2-1)
CASPTFVLSGEQFF

SEQ ID NO: 347439 - protein, 12 aa, Homo sapiens
  CDR3 for alpha chain variable domain of TCR clone 173720 (TRAV8-4, TRAJ43)
CAVSVNNNDMSF

SEQ ID NO: 347440 - protein, 15 aa, Homo sapiens
  CDR3 for beta chain variable domain of TCR clone 173720 (TRBV20-1, TRBJ2-7)
CSARDPVKGEGEQYF

SEQ ID NO: 347441 - protein, 17 aa, Homo sapiens
  CDR3 for alpha chain variable domain of TCR clone 173721 (TRAV3, TRAJ6)
CAVRDGPRAGGSYIPTF

SEQ ID NO: 347442 - protein, 11 aa, Homo sapiens
  CDR3 for beta chain variable domain of TCR clone 173721 (TRBV7-9, TRBJ2-3)
CASSGPDTQYF

SEQ ID NO: 347443 - protein, 12 aa, Homo sapiens
  CDR3 for alpha chain variable domain of TCR clone 173722 (TRAV12-3, TRAJ40)
CAVSSGAYKYIF

SEQ ID NO: 347444 - protein, 15 aa, Homo sapiens
  CDR3 for beta chain variable domain of TCR clone 173722 (TRBV7-9, TRBJ2-7)
CASSPGGGLTYEQYF

SEQ ID NO: 347445 - protein, 13 aa, Homo sapiens
  CDR3 for alpha chain variable domain of TCR clone 173723 (TRAV21, TRAJ27)
CAARPGNAGTSTF

SEQ ID NO: 347446 - protein, 13 aa, Homo sapiens
  CDR3 for beta chain variable domain of TCR clone 173723 (TRBV18, TRBJ2-7)
CASQSGGGYEQYF

SEQ ID NO: 347447 - protein, 17 aa, Homo sapiens
  CDR3 for alpha chain variable domain of TCR clone 173724 (TRAV16, TRAJ58)
CITVLSNGETSGSRLTF

SEQ ID NO: 347448 - protein, 17 aa, Homo sapiens
  CDR3 for beta chain variable domain of TCR clone 173724 (TRBV18, TRBJ2-1)
CAISKGLSGGADNEQFF

SEQ ID NO: 347449 - protein, 14 aa, Homo sapiens
  CDR3 for alpha chain variable domain of TCR clone 173725 (TRAV12-3, TRAJ10)
SHLPLTGGGNKLTF

SEQ ID NO: 347450 - protein, 15 aa, Homo sapiens
  CDR3 for beta chain variable domain of TCR clone 173725 (TRBV2, TRBJ2-1)
CASSETGGNYNEQFF

SEQ ID NO: 347451 - protein, 15 aa, Homo sapiens
  CDR3 for alpha chain variable domain of TCR clone 173726 (TRAV8-3, TRAJ45)
CAVEGSGGGSDGLTF

SEQ ID NO: 347452 - protein, 16 aa, Homo sapiens
  CDR3 for beta chain variable domain of TCR clone 173726 (TRBV6-5, TRBJ2-6)
CASSYPLSSGANVLTF

SEQ ID NO: 347453 - protein, 13 aa, Homo sapiens
  CDR3 for alpha chain variable domain of TCR clone 173727 (TRAV13-2, TRAJ48)
CAEMDFGNEKLTF

SEQ ID NO: 347454 - protein, 13 aa, Homo sapiens
  CDR3 for beta chain variable domain of TCR clone 173727 (TRBV19, TRBJ1-2)
CASSQGQVYGYTF

SEQ ID NO: 347455 - protein, 13 aa, Homo sapiens
  CDR3 for alpha chain variable domain of TCR clone 173728 (TRAV12-3, TRAJ57)
CAMVGAGSEKLVF

SEQ ID NO: 347456 - protein, 15 aa, Homo sapiens
  CDR3 for beta chain variable domain of TCR clone 173728 (TRBV7-2, TRBJ1-3)
CASSWGGSTGNTIYF

SEQ ID NO: 347457 - protein, 13 aa, Homo sapiens
  CDR3 for alpha chain variable domain of TCR clone 173729 (TRAV9-2, TRAJ9)
CALSDRGGFKTIF

SEQ ID NO: 347458 - protein, 14 aa, Homo sapiens
  CDR3 for beta chain variable domain of TCR clone 173729 (TRBV20-1, TRBJ2-2)
CSAPDKANTGELFF

SEQ ID NO: 347459 - protein, 14 aa, Homo sapiens
  CDR3 for alpha chain variable domain of TCR clone 173730 (TRAV9-2, TRAJ39)
CALYIYNAGNMLTF

SEQ ID NO: 347460 - protein, 15 aa, Homo sapiens
  CDR3 for beta chain variable domain of TCR clone 173730 (TRBV7-2, TRBJ2-6)
CASSLQEAGANVLTF

SEQ ID NO: 347461 - protein, 18 aa, Homo sapiens
  CDR3 for alpha chain variable domain of TCR clone 173731 (TRAV21, TRAJ52)
CAVRPSPAGCTSYGKLTF

SEQ ID NO: 347462 - protein, 14 aa, Homo sapiens
  CDR3 for beta chain variable domain of TCR clone 173731 (TRBV20-1, TRBJ2-1)
CSAQIGWSANEQFF

SEQ ID NO: 347463 - protein, 15 aa, Homo sapiens
  CDR3 for alpha chain variable domain of TCR clone 173732 (TRAV8-2, TRAJ40)
RVVLGTTSGTYKYIF

SEQ ID NO: 347464 - protein, 14 aa, Homo sapiens
  CDR3 for beta chain variable domain of TCR clone 173732 (TRBV19, TRBJ2-1)
CASPTFVLSGEQFF

SEQ ID NO: 347465 - protein, 14 aa, Homo sapiens
  CDR3 for alpha chain variable domain of TCR clone 173733 (TRAV12-2, TRAJ3)
CAVNGYSSASKIIF

SEQ ID NO: 347466 - protein, 14 aa, Homo sapiens
  CDR3 for beta chain variable domain of TCR clone 173733 (TRBV7-8, TRBJ2-3)
CASSFPDGQDTQYF

SEQ ID NO: 347467 - protein, 12 aa, Homo sapiens
  CDR3 for alpha chain variable domain of TCR clone 173734 (TRAV26-1, TRAJ26)
CIVFIYGQNFVF

SEQ ID NO: 347468 - protein, 15 aa, Homo sapiens
  CDR3 for beta chain variable domain of TCR clone 173734 (TRBV7-8, TRBJ2-7)
CASSLRHFEAYEQYF

SEQ ID NO: 347469 - protein, 13 aa, Homo sapiens
  CDR3 for alpha chain variable domain of TCR clone 173735 (TRAV27, TRAJ11)
CAGARSGYSTLTF

SEQ ID NO: 347470 - protein, 14 aa, Homo sapiens
  CDR3 for beta chain variable domain of TCR clone 173735 (TRBV7-8, TRBJ1-2)
CASSPDSLSYGYTF

SEQ ID NO: 347471 - protein, 14 aa, Homo sapiens
  CDR3 for alpha chain variable domain of TCR clone 173736 (TRAV25, TRAJ35)
CARRMESFGNVLHC

SEQ ID NO: 347472 - protein, 13 aa, Homo sapiens
  CDR3 for beta chain variable domain of TCR clone 173736 (TRBV7-2, TRBJ1-4)
CASSLAGLEKLFF

SEQ ID NO: 347473 - protein, 13 aa, Homo sapiens
  CDR3 for alpha chain variable domain of TCR clone 173737 (TRAV2, TRAJ40)
CAVVNSGTYKYIF

SEQ ID NO: 347474 - protein, 15 aa, Homo sapiens
  CDR3 for beta chain variable domain of TCR clone 173737 (TRBV5-1, TRBJ2-1)
CASSLVANSYNEQFF

SEQ ID NO: 347475 - protein, 16 aa, Homo sapiens
  CDR3 for alpha chain variable domain of TCR clone 173738 (TRAV12-3, TRAJ53)
CAMSPGSGGRNYKLTF

SEQ ID NO: 347476 - protein, 14 aa, Homo sapiens
  CDR3 for beta chain variable domain of TCR clone 173738 (TRBV4-2, TRBJ2-1)
CASSLDRAYNEQFF

SEQ ID NO: 347477 - protein, 11 aa, Homo sapiens
  CDR3 for alpha chain variable domain of TCR clone 173739 (TRAV13-2, TRAJ31)
CAENMDARLMF

SEQ ID NO: 347478 - protein, 15 aa, Homo sapiens
  CDR3 for beta chain variable domain of TCR clone 173739 (TRBV7-8, TRBJ1-2)
CASSLVRDGGLGYTV

SEQ ID NO: 347479 - protein, 12 aa, Homo sapiens
  CDR3 for alpha chain variable domain of TCR clone 173740 (TRAV20, TRAJ33)
CAVRGSNYQLSW

SEQ ID NO: 347480 - protein, 13 aa, Homo sapiens
  CDR3 for beta chain variable domain of TCR clone 173740 (TRBV4-3, TRBJ1-1)
CASSPTGNTEAFF

SEQ ID NO: 347481 - protein, 11 aa, Homo sapiens
  CDR3 for alpha chain variable domain of TCR clone 173741 (TRAV1-2, TRAJ11)
CAVRGYSTLTF

SEQ ID NO: 347482 - protein, 15 aa, Homo sapiens
  CDR3 for beta chain variable domain of TCR clone 173741 (TRBV7-9, TRBJ1-6)
CASSAPGRGNSPLHF

SEQ ID NO: 347483 - protein, 16 aa, Homo sapiens
  CDR3 for alpha chain variable domain of TCR clone 173742 (TRAV12-3, TRAJ53)
CAMSPGSGRSNYKLTF

SEQ ID NO: 347484 - protein, 13 aa, Homo sapiens
  CDR3 for beta chain variable domain of TCR clone 173742 (TRBV7-2, TRBJ2-5)
CASSQTSVETQYF

SEQ ID NO: 347485 - protein, 14 aa, Homo sapiens
  CDR3 for alpha chain variable domain of TCR clone 173743 (TRAV16, TRAJ17)
CALSGRAAGNKRTF

SEQ ID NO: 347486 - protein, 15 aa, Homo sapiens
  CDR3 for beta chain variable domain of TCR clone 173743 (TRBV3-1, TRBJ1-2)
CASSPTRLPEGGYTF

SEQ ID NO: 347487 - protein, 15 aa, Homo sapiens
  CDR3 for alpha chain variable domain of TCR clone 173744 (TRAV26-1, TRAJ48)
CIARWSWFGNEKLTL

SEQ ID NO: 347488 - protein, 12 aa, Homo sapiens
  CDR3 for beta chain variable domain of TCR clone 173744 (TRBV19, TRBJ2-5)
CASSISEETQHF

SEQ ID NO: 347489 - protein, 12 aa, Homo sapiens
  CDR3 for alpha chain variable domain of TCR clone 173745 (TRAV13-1, TRAJ20)
CAARQNDYKLSF

SEQ ID NO: 347490 - protein, 14 aa, Homo sapiens
  CDR3 for beta chain variable domain of TCR clone 173745 (TRBV25-1, TRBJ1-1)
CASTHLGGNTEAFF

SEQ ID NO: 347491 - protein, 14 aa, Homo sapiens
  CDR3 for alpha chain variable domain of TCR clone 173746 (TRAV20, TRAJ22)
CAVALGGSARQLTF

SEQ ID NO: 347492 - protein, 15 aa, Homo sapiens
  CDR3 for beta chain variable domain of TCR clone 173746 (TRBV27, TRBJ2-1)
CASSNGGGSSNEQFF

SEQ ID NO: 347493 - protein, 13 aa, Homo sapiens
  CDR3 for alpha chain variable domain of TCR clone 173747 (TRAV36/DV7, TRAJ33)
CAVDMDSNYQLIW

SEQ ID NO: 347494 - protein, 14 aa, Homo sapiens
  CDR3 for beta chain variable domain of TCR clone 173747 (TRBV12-5, TRBJ2-5)
CASGSRSHQETQYF

SEQ ID NO: 347495 - protein, 15 aa, Homo sapiens
  CDR3 for alpha chain variable domain of TCR clone 173748 (TRAV38-2/DV8, TRAJ47)
CAYRSAKGYGNKLVF

SEQ ID NO: 347496 - protein, 15 aa, Homo sapiens
  CDR3 for beta chain variable domain of TCR clone 173748 (TRBV6-6, TRBJ2-7)
CASSYAYGGSYEQYF

SEQ ID NO: 347497 - protein, 12 aa, Homo sapiens
  CDR3 for alpha chain variable domain of TCR clone 173749 (TRAV1-1, TRAJ8)
CAGGTGFQKLVF

SEQ ID NO: 347498 - protein, 15 aa, Homo sapiens
  CDR3 for beta chain variable domain of TCR clone 173749 (TRBV7-9, TRBJ1-4)
CASSRTGGFNENLFC

SEQ ID NO: 347499 - protein, 10 aa, Homo sapiens
  CDR3 for alpha chain variable domain of TCR clone 173750 (TRAV4, TRAJ15)
CPPFWTALIF

SEQ ID NO: 347500 - protein, 15 aa, Homo sapiens
  CDR3 for beta chain variable domain of TCR clone 173750 (TRBV5-1, TRBJ2-1)
CASSFSGTGYNEQFF

SEQ ID NO: 347501 - protein, 15 aa, Homo sapiens
  CDR3 for alpha chain variable domain of TCR clone 173751 (TRAV26-1, TRAJ15)
CIVRAANQAGTALVF

SEQ ID NO: 347502 - protein, 15 aa, Homo sapiens
  CDR3 for beta chain variable domain of TCR clone 173751 (TRBV20-1, TRBJ1-1)
CSARSAATSNTEAFF

SEQ ID NO: 347503 - protein, 13 aa, Homo sapiens
  CDR3 for alpha chain variable domain of TCR clone 173752 (TRAV8-6, TRAJ24)
CAVSSDSWGKLPF

SEQ ID NO: 347504 - protein, 15 aa, Homo sapiens
  CDR3 for beta chain variable domain of TCR clone 173752 (TRBV6-1, TRBJ1-3)
CASSDFGFSGNTIYF

SEQ ID NO: 347505 - protein, 13 aa, Homo sapiens
  CDR3 for alpha chain variable domain of TCR clone 173753 (TRAV21, TRAJ27)
CAARPGNAGKSTF

SEQ ID NO: 347506 - protein, 13 aa, Homo sapiens
  CDR3 for beta chain variable domain of TCR clone 173753 (TRBV18, TRBJ2-7)
CASQPGGGYEQYF

SEQ ID NO: 347507 - protein, 18 aa, Homo sapiens
  CDR3 for alpha chain variable domain of TCR clone 173754 (TRAV2, TRAJ45)
TTVLWRIRSGGGADGLTF

SEQ ID NO: 347508 - protein, 16 aa, Homo sapiens
  CDR3 for beta chain variable domain of TCR clone 173754 (TRBV27, TRBJ2-2)
CASSFRGLVRTGELFF

SEQ ID NO: 347509 - protein, 12 aa, Homo sapiens
  CDR3 for alpha chain variable domain of TCR clone 173755 (TRAV1-1, TRAJ8)
CAGGTGFQKLLF

SEQ ID NO: 347510 - protein, 15 aa, Homo sapiens
  CDR3 for beta chain variable domain of TCR clone 173755 (TRBV5-1, TRBJ1-1)
CASSLSDLGGTEAFF

SEQ ID NO: 347511 - protein, 11 aa, Homo sapiens
  CDR3 for alpha chain variable domain of TCR clone 173756 (TRAV8-4, TRAJ20)
CAVTNVLTTTS

SEQ ID NO: 347512 - protein, 16 aa, Homo sapiens
  CDR3 for beta chain variable domain of TCR clone 173756 (TRBV6-1, TRBJ1-2)
CASSGAWEGRSHGYTF

SEQ ID NO: 347513 - protein, 14 aa, Homo sapiens
  CDR3 for alpha chain variable domain of TCR clone 173757 (TRAV38-1, TRAJ29)
CAFITPSGNTPLVF

SEQ ID NO: 347514 - protein, 14 aa, Homo sapiens
  CDR3 for beta chain variable domain of TCR clone 173757 (TRBV6-3, TRBJ2-2)
CASTYTPDTGELFF

SEQ ID NO: 347515 - protein, 15 aa, Homo sapiens
  CDR3 for alpha chain variable domain of TCR clone 173758 (TRAV13-1, TRAJ17)
CAASIEGAAGNKLTF

SEQ ID NO: 347516 - protein, 12 aa, Homo sapiens
  CDR3 for beta chain variable domain of TCR clone 173758 (TRBV5-7, TRBJ1-1)
CASSLGRGKAFF

SEQ ID NO: 347517 - protein, 17 aa, Homo sapiens
  CDR3 for alpha chain variable domain of TCR clone 173759 (TRAV16, TRAJ42)
CALSPKLYGGSQGNLIF

SEQ ID NO: 347518 - protein, 13 aa, Homo sapiens
  CDR3 for beta chain variable domain of TCR clone 173759 (TRBV19, TRBJ1-5)
CASSARRDQPQHF

SEQ ID NO: 347519 - protein, 14 aa, Homo sapiens
  CDR3 for alpha chain variable domain of TCR clone 173760 (TRAV26-1, TRAJ39)
CIVRGSRAGNMLTF

SEQ ID NO: 347520 - protein, 15 aa, Homo sapiens
  CDR3 for beta chain variable domain of TCR clone 173760 (TRBV28, TRBJ2-5)
CASSPGQGCIETQYF

SEQ ID NO: 347521 - protein, 13 aa, Homo sapiens
  CDR3 for alpha chain variable domain of TCR clone 173761 (TRAV2, TRAJ13)
CAVESGGYQKVTF

SEQ ID NO: 347522 - protein, 16 aa, Homo sapiens
  CDR3 for beta chain variable domain of TCR clone 173761 (TRBV19, TRBJ2-1)
CASSKAGPSSYNEQFF

SEQ ID NO: 347523 - protein, 15 aa, Homo sapiens
  CDR3 for alpha chain variable domain of TCR clone 173762 (TRAV25, TRAJ52)
CAGRPCGTSYGKLTF

SEQ ID NO: 347524 - protein, 17 aa, Homo sapiens
  CDR3 for beta chain variable domain of TCR clone 173762 (TRBV7-8, TRBJ2-6)
CASSAGTGGAGANVLTF

SEQ ID NO: 347525 - protein, 14 aa, Homo sapiens
  CDR3 for alpha chain variable domain of TCR clone 173763 (TRAV12-2, TRAJ44)
CALNPAGTASKLTF

SEQ ID NO: 347526 - protein, 13 aa, Homo sapiens
  CDR3 for beta chain variable domain of TCR clone 173763 (TRBV20-1, TRBJ1-6)
CSAPLGVGSPLHF

SEQ ID NO: 347527 - protein, 15 aa, Homo sapiens
  CDR3 for alpha chain variable domain of TCR clone 173764 (TRAV3, TRAJ3)
CCERPRYSSAFKIIF

SEQ ID NO: 347528 - protein, 16 aa, Homo sapiens
  CDR3 for beta chain variable domain of TCR clone 173764 (TRBV19, TRBJ1-5)
CASSIDRGGPRQPQHF

SEQ ID NO: 347529 - protein, 14 aa, Homo sapiens
  CDR3 for alpha chain variable domain of TCR clone 173765 (TRAV2, TRAJ37)
CAVDFTSNTGNLIF

SEQ ID NO: 347530 - protein, 15 aa, Homo sapiens
  CDR3 for beta chain variable domain of TCR clone 173765 (TRBV20-1, TRBJ1-1)
CSASRGVTGNTEAFV

SEQ ID NO: 347531 - protein, 10 aa, Homo sapiens
  CDR3 for alpha chain variable domain of TCR clone 173766 (TRAV16, TRAJ26)
CAPEGLWSEF

SEQ ID NO: 347532 - protein, 15 aa, Homo sapiens
  CDR3 for beta chain variable domain of TCR clone 173766 (TRBV7-2, TRBJ2-3)
CASSLTGTSTDTQYF

SEQ ID NO: 347533 - protein, 14 aa, Homo sapiens
  CDR3 for alpha chain variable domain of TCR clone 173767 (TRAV13-1, TRAJ23)
CAASRLVRGGKLIF

SEQ ID NO: 347534 - protein, 15 aa, Homo sapiens
  CDR3 for beta chain variable domain of TCR clone 173767 (TRBV7-2, TRBJ2-1)
CASSLVAGRYNEQFF

SEQ ID NO: 347535 - protein, 12 aa, Homo sapiens
  CDR3 for alpha chain variable domain of TCR clone 173768 (TRAV12-3, TRAJ17)
CAMTLTGNQLTF

SEQ ID NO: 347536 - protein, 15 aa, Homo sapiens
  CDR3 for beta chain variable domain of TCR clone 173768 (TRBV10-2, TRBJ2-6)
CASSEQGTGANVLTF

SEQ ID NO: 347537 - protein, 16 aa, Homo sapiens
  CDR3 for alpha chain variable domain of TCR clone 173769 (TRAV30, TRAJ24)
CGTEIVDADGWGKFQF

SEQ ID NO: 347538 - protein, 12 aa, Homo sapiens
  CDR3 for beta chain variable domain of TCR clone 173769 (TRBV11-2, TRBJ2-2)
CASSLPTGELFF

SEQ ID NO: 347539 - protein, 15 aa, Homo sapiens
  CDR3 for alpha chain variable domain of TCR clone 173770 (TRAV12-1, TRAJ9)
CVVSFGDTGGVKTIF

SEQ ID NO: 347540 - protein, 19 aa, Homo sapiens
  CDR3 for beta chain variable domain of TCR clone 173770 (TRBV25-1, TRBJ2-2)
CAILVYRVDRGRKTGELFF

SEQ ID NO: 347541 - protein, 11 aa, Homo sapiens
  CDR3 for alpha chain variable domain of TCR clone 173771 (TRAV21, TRAJ11)
CAVNGYSTLTF

SEQ ID NO: 347542 - protein, 15 aa, Homo sapiens
  CDR3 for beta chain variable domain of TCR clone 173771 (TRBV7-9, TRBJ1-1)
CASSLLEQGGTEAFF

SEQ ID NO: 347543 - protein, 15 aa, Homo sapiens
  CDR3 for alpha chain variable domain of TCR clone 173772 (TRAV3, TRAJ16)
CAVRDGFSDGQKRPF

SEQ ID NO: 347544 - protein, 17 aa, Homo sapiens
  CDR3 for beta chain variable domain of TCR clone 173772 (TRBV6-1, TRBJ2-3)
CASRTRGLAQSTDTQYF

SEQ ID NO: 347545 - protein, 14 aa, Homo sapiens
  CDR3 for alpha chain variable domain of TCR clone 173773 (TRAV12-1, TRAJ6)
CGEHFAGGSYIPTF

SEQ ID NO: 347546 - protein, 15 aa, Homo sapiens
  CDR3 for beta chain variable domain of TCR clone 173773 (TRBV18, TRBJ1-1)
CASSDRGTGDTEAFF

SEQ ID NO: 347547 - protein, 16 aa, Homo sapiens
  CDR3 for alpha chain variable domain of TCR clone 173774 (TRAV14/DV4, TRAJ54)
CAMREGRIQGAQKRVF

SEQ ID NO: 347548 - protein, 18 aa, Homo sapiens
  CDR3 for beta chain variable domain of TCR clone 173774 (TRBV20-1, TRBJ2-1)
CSARGDRGPLGIQNEQFF

SEQ ID NO: 347549 - protein, 14 aa, Homo sapiens
  CDR3 for alpha chain variable domain of TCR clone 173775 (TRAV12-2, TRAJ40)
CAVKIPSGTYKYIF

SEQ ID NO: 347550 - protein, 14 aa, Homo sapiens
  CDR3 for beta chain variable domain of TCR clone 173775 (TRBV11-2, TRBJ1-5)
CASSLDRGRQHQHF

SEQ ID NO: 347551 - protein, 13 aa, Homo sapiens
  CDR3 for alpha chain variable domain of TCR clone 173776 (TRAV35, TRAJ42)
CAGFPGSQGNLIF

SEQ ID NO: 347552 - protein, 14 aa, Homo sapiens
  CDR3 for beta chain variable domain of TCR clone 173776 (TRBV4-1, TRBJ2-2)
CASSQAVNPGELFF

SEQ ID NO: 347553 - protein, 11 aa, Homo sapiens
  CDR3 for alpha chain variable domain of TCR clone 173777 (TRAV40, TRAJ53)
TSGGSNYKLTF

SEQ ID NO: 347554 - protein, 15 aa, Homo sapiens
  CDR3 for beta chain variable domain of TCR clone 173777 (TRBV6-3, TRBJ2-7)
CASSSPGAVFYEQYF

SEQ ID NO: 347555 - protein, 14 aa, Homo sapiens
  CDR3 for alpha chain variable domain of TCR clone 173778 (TRAV1-2, TRAJ16)
CAVNRFSDGQKLLF

SEQ ID NO: 347556 - protein, 14 aa, Homo sapiens
  CDR3 for beta chain variable domain of TCR clone 173778 (TRBV12-4, TRBJ2-1)
CASSLGQGASEQFF

SEQ ID NO: 347557 - protein, 11 aa, Homo sapiens
  CDR3 for alpha chain variable domain of TCR clone 173779 (TRAV21, TRAJ20)
CAVRDDYKLSF

SEQ ID NO: 347558 - protein, 14 aa, Homo sapiens
  CDR3 for beta chain variable domain of TCR clone 173779 (TRBV4-2, TRBJ2-1)
CASGLDRAYNEQFF

SEQ ID NO: 347559 - protein, 14 aa, Homo sapiens
  CDR3 for alpha chain variable domain of TCR clone 173780 (TRAV1-2, TRAJ16)
CAVNRFSDGQKLLF

SEQ ID NO: 347560 - protein, 13 aa, Homo sapiens
  CDR3 for beta chain variable domain of TCR clone 173780 (TRBV18, TRBJ2-5)
CASAPAGKETQYF

SEQ ID NO: 347561 - protein, 12 aa, Homo sapiens
  CDR3 for alpha chain variable domain of TCR clone 173781 (TRAV13-2, TRAJ8)
WAPWLGFQKLVF

SEQ ID NO: 347562 - protein, 14 aa, Homo sapiens
  CDR3 for beta chain variable domain of TCR clone 173781 (TRBV18, TRBJ1-5)
CASSRQQRNQPQHF

SEQ ID NO: 347563 - protein, 13 aa, Homo sapiens
  CDR3 for alpha chain variable domain of TCR clone 173782 (TRAV17, TRAJ9)
CATDYTGGFKTIF

SEQ ID NO: 347564 - protein, 15 aa, Homo sapiens
  CDR3 for beta chain variable domain of TCR clone 173782 (TRBV7-2, TRBJ1-5)
CASSLDRGQDQPQHF

SEQ ID NO: 347565 - protein, 12 aa, Homo sapiens
  CDR3 for alpha chain variable domain of TCR clone 173783 (TRAV17, TRAJ39)
CAINNAGNMLTF

SEQ ID NO: 347566 - protein, 13 aa, Homo sapiens
  CDR3 for beta chain variable domain of TCR clone 173783 (TRBV19, TRBJ2-7)
CASSIRSSYEQYF

SEQ ID NO: 347567 - protein, 14 aa, Homo sapiens
  CDR3 for alpha chain variable domain of TCR clone 173784 (TRAV12-3, TRAJ10)
SHLPLTGGGNKLTF

SEQ ID NO: 347568 - protein, 11 aa, Homo sapiens
  CDR3 for beta chain variable domain of TCR clone 173784 (TRBV3-1, TRBJ2-7)
CASTSLGEQYF

SEQ ID NO: 347569 - protein, 14 aa, Homo sapiens
  CDR3 for alpha chain variable domain of TCR clone 173785 (TRAV13-1, TRAJ35)
CAASKGGFGNVLHC

SEQ ID NO: 347570 - protein, 16 aa, Homo sapiens
  CDR3 for beta chain variable domain of TCR clone 173785 (TRBV15, TRBJ2-6)
CATSVNGGFLANVLTF

SEQ ID NO: 347571 - protein, 14 aa, Homo sapiens
  CDR3 for alpha chain variable domain of TCR clone 173786 (TRAV38-1, TRAJ45)
WAYYSGGGADGLTF

SEQ ID NO: 347572 - protein, 14 aa, Homo sapiens
  CDR3 for beta chain variable domain of TCR clone 173786 (TRBV25-1, TRBJ1-1)
CASTHLGGNTEAFF

SEQ ID NO: 347573 - protein, 15 aa, Homo sapiens
  CDR3 for alpha chain variable domain of TCR clone 173787 (TRAV12-2, TRAJ20)
CAVKGGFGAGTTVTV

SEQ ID NO: 347574 - protein, 15 aa, Homo sapiens
  CDR3 for beta chain variable domain of TCR clone 173787 (TRBV4-1, TRBJ1-4)
CASSDTGGTNEKLFF

SEQ ID NO: 347575 - protein, 13 aa, Homo sapiens
  CDR3 for alpha chain variable domain of TCR clone 173788 (TRAV17, TRAJ13)
CATDSGGYQKVTF

SEQ ID NO: 347576 - protein, 14 aa, Homo sapiens
  CDR3 for beta chain variable domain of TCR clone 173788 (TRBV6-1, TRBJ1-1)
CASTPLQRNTEAFF

SEQ ID NO: 347577 - protein, 12 aa, Homo sapiens
  CDR3 for alpha chain variable domain of TCR clone 173789 (TRAV3, TRAJ20)
CAVRDTDYKLSF

SEQ ID NO: 347578 - protein, 15 aa, Homo sapiens
  CDR3 for beta chain variable domain of TCR clone 173789 (TRBV15, TRBJ1-1)
CATSLQGGRNTEAFF

SEQ ID NO: 347579 - protein, 14 aa, Homo sapiens
  CDR3 for alpha chain variable domain of TCR clone 173790 (TRAV1-2, TRAJ16)
CAVNRFSDGQNLLF

SEQ ID NO: 347580 - protein, 13 aa, Homo sapiens
  CDR3 for beta chain variable domain of TCR clone 173790 (TRBV10-2, TRBJ2-7)
CASGASGGYEQYF

SEQ ID NO: 347581 - protein, 14 aa, Homo sapiens
  CDR3 for alpha chain variable domain of TCR clone 173791 (TRAV13-1, TRAJ35)
CAASKGGIGNVLHS

SEQ ID NO: 347582 - protein, 13 aa, Homo sapiens
  CDR3 for beta chain variable domain of TCR clone 173791 (TRBV7-3, TRBJ1-1)
CASSQDWGAEAFF

SEQ ID NO: 347583 - protein, 20 aa, Homo sapiens
  CDR3 for alpha chain variable domain of TCR clone 173792 (TRAV26-2, TRAJ29)
CILRDRSSTQRNSGNTPLVF

SEQ ID NO: 347584 - protein, 14 aa, Homo sapiens
  CDR3 for beta chain variable domain of TCR clone 173792 (TRBV5-8, TRBJ2-3)
CASSLGQGTDTQYF

SEQ ID NO: 347585 - protein, 15 aa, Homo sapiens
  CDR3 for alpha chain variable domain of TCR clone 173793 (TRAV13-1, TRAJ57)
CAASNTQGGSEKLVF

SEQ ID NO: 347586 - protein, 16 aa, Homo sapiens
  CDR3 for beta chain variable domain of TCR clone 173793 (TRBV19, TRBJ2-1)
CASSKAGPSSYNAQFF

SEQ ID NO: 347587 - protein, 14 aa, Homo sapiens
  CDR3 for alpha chain variable domain of TCR clone 173794 (TRAV35, TRAJ46)
CAGPQKSSGDKLTF

SEQ ID NO: 347588 - protein, 13 aa, Homo sapiens
  CDR3 for beta chain variable domain of TCR clone 173794 (TRBV19, TRBJ1-2)
CASSQGQVYGYTF

SEQ ID NO: 347589 - protein, 12 aa, Homo sapiens
  CDR3 for alpha chain variable domain of TCR clone 173795 (TRAV12-3, TRAJ17)
CAMTLTGNKLTL

SEQ ID NO: 347590 - protein, 15 aa, Homo sapiens
  CDR3 for beta chain variable domain of TCR clone 173795 (TRBV20-1, TRBJ2-7)
CSARDRVSGMEEQYF

SEQ ID NO: 347591 - protein, 17 aa, Homo sapiens
  CDR3 for alpha chain variable domain of TCR clone 173796 (TRAV36/DV7, TRAJ52)
CAVAQRAGGTSYGKLTF

SEQ ID NO: 347592 - protein, 19 aa, Homo sapiens
  CDR3 for beta chain variable domain of TCR clone 173796 (TRBV25-1, TRBJ2-2)
CAILVYRVDRGRKTGELFF

SEQ ID NO: 347593 - protein, 15 aa, Homo sapiens
  CDR3 for alpha chain variable domain of TCR clone 173797 (TRAV12-2, TRAJ43)
CAFDMRFGAGTRLTV

SEQ ID NO: 347594 - protein, 15 aa, Homo sapiens
  CDR3 for beta chain variable domain of TCR clone 173797 (TRBV11-3, TRBJ2-7)
CASSPGPASSYEQYF

SEQ ID NO: 347595 - protein, 15 aa, Homo sapiens
  CDR3 for alpha chain variable domain of TCR clone 173798 (TRAV19, TRAJ45)
CALSEAGRGADGLTF

SEQ ID NO: 347596 - protein, 13 aa, Homo sapiens
  CDR3 for beta chain variable domain of TCR clone 173798 (TRBV11-2, TRBJ2-2)
CAGGRDREEELFF

SEQ ID NO: 347597 - protein, 18 aa, Homo sapiens
  CDR3 for alpha chain variable domain of TCR clone 173799 (TRAV29/DV5, TRAJ52)
CAAGFRGAGGTSYGQLTL

SEQ ID NO: 347598 - protein, 16 aa, Homo sapiens
  CDR3 for beta chain variable domain of TCR clone 173799 (TRBV7-3, TRBJ2-2)
CASSLKRGTLSGELFF

SEQ ID NO: 347599 - protein, 16 aa, Homo sapiens
  CDR3 for alpha chain variable domain of TCR clone 173800 (TRAV16, TRAJ52)
FALSGVGGTSYGKLTF

SEQ ID NO: 347600 - protein, 11 aa, Homo sapiens
  CDR3 for beta chain variable domain of TCR clone 173800 (TRBV19, TRBJ1-2)
CASSLQGRPMA

SEQ ID NO: 347601 - protein, 13 aa, Homo sapiens
  CDR3 for alpha chain variable domain of TCR clone 173801 (TRAV17, TRAJ5)
CATGDTGRGALTF

SEQ ID NO: 347602 - protein, 17 aa, Homo sapiens
  CDR3 for beta chain variable domain of TCR clone 173801 (TRBV11-2, TRBJ2-1)
CASSLYPPGVKYNEQFF

SEQ ID NO: 347603 - protein, 12 aa, Homo sapiens
  CDR3 for alpha chain variable domain of TCR clone 173802 (TRAV21, TRAJ33)
CAKMDSNYQLIW

SEQ ID NO: 347604 - protein, 14 aa, Homo sapiens
  CDR3 for beta chain variable domain of TCR clone 173802 (TRBV2, TRBJ2-1)
CASSVGRSGNEQFF

SEQ ID NO: 347605 - protein, 13 aa, Homo sapiens
  CDR3 for alpha chain variable domain of TCR clone 173803 (TRAV8-3, TRAJ36)
CAVGATGANNPFF

SEQ ID NO: 347606 - protein, 15 aa, Homo sapiens
  CDR3 for beta chain variable domain of TCR clone 173803 (TRBV7-2, TRBJ1-2)
CASSPRAGWNYGYIF

SEQ ID NO: 347607 - protein, 15 aa, Homo sapiens
  CDR3 for alpha chain variable domain of TCR clone 173804 (TRAV8-4, TRAJ12)
CAVSDRVDSSYKLIF

SEQ ID NO: 347608 - protein, 13 aa, Homo sapiens
  CDR3 for beta chain variable domain of TCR clone 173804 (TRBV19, TRBJ1-2)
CASSIGQVYGYTF

SEQ ID NO: 347609 - protein, 20 aa, Homo sapiens
  CDR3 for alpha chain variable domain of TCR clone 173805 (TRAV25, TRAJ21)
TATQTTDVGTYPLSFNKFYF

SEQ ID NO: 347610 - protein, 13 aa, Homo sapiens
  CDR3 for beta chain variable domain of TCR clone 173805 (TRBV9, TRBJ2-1)
CASSPSGGSEQFF

SEQ ID NO: 347611 - protein, 16 aa, Homo sapiens
  CDR3 for alpha chain variable domain of TCR clone 173806 (TRAV27, TRAJ13)
CAGAKSDSGDYQNVTF

SEQ ID NO: 347612 - protein, 15 aa, Homo sapiens
  CDR3 for beta chain variable domain of TCR clone 173806 (TRBV29-1, TRBJ2-1)
CSVGRHALFYNEQFF

SEQ ID NO: 347613 - protein, 13 aa, Homo sapiens
  CDR3 for alpha chain variable domain of TCR clone 173807 (TRAV20, TRAJ26)
CDVPTSYGQNFVF

SEQ ID NO: 347614 - protein, 16 aa, Homo sapiens
  CDR3 for beta chain variable domain of TCR clone 173807 (TRBV28, TRBJ2-7)
CASSSPQGRDVYEQYF

SEQ ID NO: 347615 - protein, 12 aa, Homo sapiens
  CDR3 for alpha chain variable domain of TCR clone 173808 (TRAV27, TRAJ9)
CAGESGGFKTIS

SEQ ID NO: 347616 - protein, 12 aa, Homo sapiens
  CDR3 for beta chain variable domain of TCR clone 173808 (TRBV11-2, TRBJ2-2)
CASSLGGGELFF

SEQ ID NO: 347617 - protein, 13 aa, Homo sapiens
  CDR3 for alpha chain variable domain of TCR clone 173809 (TRAV8-3, TRAJ4)
WVFYSRGYNKLIF

SEQ ID NO: 347618 - protein, 14 aa, Homo sapiens
  CDR3 for beta chain variable domain of TCR clone 173809 (TRBV7-9, TRBJ2-3)
CASSLEDGTDTQYF

SEQ ID NO: 347619 - protein, 16 aa, Homo sapiens
  CDR3 for alpha chain variable domain of TCR clone 173810 (TRAV4, TRAJ9)
CLVGDPNRPGGFKTIF

SEQ ID NO: 347620 - protein, 15 aa, Homo sapiens
  CDR3 for beta chain variable domain of TCR clone 173810 (TRBV5-7, TRBJ1-5)
CAGSYGKLWDQPQHF

SEQ ID NO: 347621 - protein, 15 aa, Homo sapiens
  CDR3 for alpha chain variable domain of TCR clone 173811 (TRAV8-3, TRAJ15)
CAVGAPNQAGTALIS

SEQ ID NO: 347622 - protein, 14 aa, Homo sapiens
  CDR3 for beta chain variable domain of TCR clone 173811 (TRBV20-1, TRBJ2-1)
CSPDDEASYNEQFF

SEQ ID NO: 347623 - protein, 13 aa, Homo sapiens
  CDR3 for alpha chain variable domain of TCR clone 173812 (TRAV36/DV7, TRAJ33)
CAVDMDSNYQLIW

SEQ ID NO: 347624 - protein, 16 aa, Homo sapiens
  CDR3 for beta chain variable domain of TCR clone 173812 (TRBV15, TRBJ2-3)
CATRLSGERAPDTQYF

SEQ ID NO: 347625 - protein, 15 aa, Homo sapiens
  CDR3 for alpha chain variable domain of TCR clone 173813 (TRAV16, TRAJ16)
CALQGGGSDVQKLRF

SEQ ID NO: 347626 - protein, 15 aa, Homo sapiens
  CDR3 for beta chain variable domain of TCR clone 173813 (TRBV20-1, TRBJ2-7)
CSARDRVSGMDEQYF

SEQ ID NO: 347627 - protein, 15 aa, Homo sapiens
  CDR3 for alpha chain variable domain of TCR clone 173814 (TRAV21, TRAJ53)
CATLNSGGSNYKLTF

SEQ ID NO: 347628 - protein, 16 aa, Homo sapiens
  CDR3 for beta chain variable domain of TCR clone 173814 (TRBV24-1, TRBJ2-3)
CATSGYRDRDTDTQYF

SEQ ID NO: 347629 - protein, 17 aa, Homo sapiens
  CDR3 for alpha chain variable domain of TCR clone 173815 (TRAV3, TRAJ6)
CAVRDGPRAGGSYIPTF

SEQ ID NO: 347630 - protein, 14 aa, Homo sapiens
  CDR3 for beta chain variable domain of TCR clone 173815 (TRBV11-2, TRBJ2-1)
CASTTGQGNNEQFF

SEQ ID NO: 347631 - protein, 14 aa, Homo sapiens
  CDR3 for alpha chain variable domain of TCR clone 173816 (TRAV8-4, TRAJ9)
CAVRINTGGFKNNF

SEQ ID NO: 347632 - protein, 15 aa, Homo sapiens
  CDR3 for beta chain variable domain of TCR clone 173816 (TRBV10-2, TRBJ2-6)
CASSEQGTGANVLTF

SEQ ID NO: 347633 - protein, 12 aa, Homo sapiens
  CDR3 for alpha chain variable domain of TCR clone 173817 (TRAV1-1, TRAJ12)
CAVGDSSYNLIF

SEQ ID NO: 347634 - protein, 14 aa, Homo sapiens
  CDR3 for beta chain variable domain of TCR clone 173817 (TRBV15, TRBJ2-3)
CATARDGGGDTQYF

SEQ ID NO: 347635 - protein, 12 aa, Homo sapiens
  CDR3 for alpha chain variable domain of TCR clone 173818 (TRAV3, TRAJ26)
CAVRDYGQNFVF

SEQ ID NO: 347636 - protein, 14 aa, Homo sapiens
  CDR3 for beta chain variable domain of TCR clone 173818 (TRBV4-1, TRBJ2-2)
CASSQAVNTGELFF

SEQ ID NO: 347637 - protein, 10 aa, Homo sapiens
  CDR3 for alpha chain variable domain of TCR clone 173819 (TRAV1-2, TRAJ20)
CACNDYKPSF

SEQ ID NO: 347638 - protein, 16 aa, Homo sapiens
  CDR3 for beta chain variable domain of TCR clone 173819 (TRBV20-1, TRBJ2-1)
CSARDLKQGMNNERFF

SEQ ID NO: 347639 - protein, 14 aa, Homo sapiens
  CDR3 for alpha chain variable domain of TCR clone 173820 (TRAV25, TRAJ6)
CAGRESGGSYIPTF

SEQ ID NO: 347640 - protein, 14 aa, Homo sapiens
  CDR3 for beta chain variable domain of TCR clone 173820 (TRBV4-2, TRBJ2-3)
CASSQERGTDTQYF

SEQ ID NO: 347641 - protein, 18 aa, Homo sapiens
  CDR3 for alpha chain variable domain of TCR clone 173821 (TRAV9-2, TRAJ52)
CALSRHNAGGTSYGKLTF

SEQ ID NO: 347642 - protein, 15 aa, Homo sapiens
  CDR3 for beta chain variable domain of TCR clone 173821 (TRBV20-1, TRBJ2-7)
CSARDRVSGMDEQYF

SEQ ID NO: 347643 - protein, 15 aa, Homo sapiens
  CDR3 for alpha chain variable domain of TCR clone 173822 (TRAV8-1, TRAJ13)
CAVNPRSGGYQKVTF

SEQ ID NO: 347644 - protein, 15 aa, Homo sapiens
  CDR3 for beta chain variable domain of TCR clone 173822 (TRBV15, TRBJ1-4)
CATSRDMGSYEKLFF

SEQ ID NO: 347645 - protein, 14 aa, Homo sapiens
  CDR3 for alpha chain variable domain of TCR clone 173823 (TRAV12-1, TRAJ17)
CVVNYKAAGNKLTF

SEQ ID NO: 347646 - protein, 17 aa, Homo sapiens
  CDR3 for beta chain variable domain of TCR clone 173823 (TRBV24-1, TRBJ2-1)
CATSDVSTSGTYNEQFF

SEQ ID NO: 347647 - protein, 15 aa, Homo sapiens
  CDR3 for alpha chain variable domain of TCR clone 173824 (TRAV26-2, TRAJ45)
CILRDRVDQEEVLTD

SEQ ID NO: 347648 - protein, 15 aa, Homo sapiens
  CDR3 for beta chain variable domain of TCR clone 173824 (TRBV7-6, TRBJ2-5)
CASGKPTGPQETQYF

SEQ ID NO: 347649 - protein, 12 aa, Homo sapiens
  CDR3 for alpha chain variable domain of TCR clone 173825 (TRAV3, TRAJ20)
CAVRDGDYKLSF

SEQ ID NO: 347650 - protein, 14 aa, Homo sapiens
  CDR3 for beta chain variable domain of TCR clone 173825 (TRBV27, TRBJ2-5)
CASSTLKGWETQYF

SEQ ID NO: 347651 - protein, 13 aa, Homo sapiens
  CDR3 for alpha chain variable domain of TCR clone 173826 (TRAV1-2, TRAJ9)
CAALNTGGFKTIF

SEQ ID NO: 347652 - protein, 15 aa, Homo sapiens
  CDR3 for beta chain variable domain of TCR clone 173826 (TRBV15, TRBJ1-6)
CATSGALIHPSTLGT

SEQ ID NO: 347653 - protein, 18 aa, Homo sapiens
  CDR3 for alpha chain variable domain of TCR clone 173827 (TRAV21, TRAJ52)
CAVRPSPAGGTSYGKLTF

SEQ ID NO: 347654 - protein, 19 aa, Homo sapiens
  CDR3 for beta chain variable domain of TCR clone 173827 (TRBV7-2, TRBJ2-3)
CASSFLSRNWGRGTDTQYF

SEQ ID NO: 347655 - protein, 12 aa, Homo sapiens
  CDR3 for alpha chain variable domain of TCR clone 173828 (TRAV38-1, TRAJ32)
CAPLGATNKLIF

SEQ ID NO: 347656 - protein, 16 aa, Homo sapiens
  CDR3 for beta chain variable domain of TCR clone 173828 (TRBV29-1, TRBJ1-2)
CSVEANRDIANYGYTF

SEQ ID NO: 347657 - protein, 11 aa, Homo sapiens
  CDR3 for alpha chain variable domain of TCR clone 173829 (TRAV1-1, TRAJ23)
CAVRQGGKLIF

SEQ ID NO: 347658 - protein, 15 aa, Homo sapiens
  CDR3 for beta chain variable domain of TCR clone 173829 (TRBV19, TRBJ2-3)
CASSIEAGEADTQYF

SEQ ID NO: 347659 - protein, 13 aa, Homo sapiens
  CDR3 for alpha chain variable domain of TCR clone 173830 (TRAV23/DV6, TRAJ6)
CAAKTGGSYIPTF

SEQ ID NO: 347660 - protein, 15 aa, Homo sapiens
  CDR3 for beta chain variable domain of TCR clone 173830 (TRBV5-5, TRBJ1-1)
CASSLVGKDNTEAFF

SEQ ID NO: 347661 - protein, 14 aa, Homo sapiens
  CDR3 for alpha chain variable domain of TCR clone 173831 (TRAV1-2, TRAJ8)
CAVREDTGFQNLVF

SEQ ID NO: 347662 - protein, 14 aa, Homo sapiens
  CDR3 for beta chain variable domain of TCR clone 173831 (TRBV6-3, TRBJ2-7)
SSSSPGTVFYEQYF

SEQ ID NO: 347663 - protein, 15 aa, Homo sapiens
  CDR3 for alpha chain variable domain of TCR clone 173832 (TRAV3, TRAJ5)
CAGSDRKTGRRALTF

SEQ ID NO: 347664 - protein, 15 aa, Homo sapiens
  CDR3 for beta chain variable domain of TCR clone 173832 (TRBV7-8, TRBJ2-1)
CASSLADSLYNEQFF

SEQ ID NO: 347665 - protein, 15 aa, Homo sapiens
  CDR3 for alpha chain variable domain of TCR clone 173833 (TRAV8-3, TRAJ7)
CAVGSISYGNNRLAF

SEQ ID NO: 347666 - protein, 13 aa, Homo sapiens
  CDR3 for beta chain variable domain of TCR clone 173833 (TRBV19, TRBJ1-2)
CASSVPGQDGYTF

SEQ ID NO: 347667 - protein, 13 aa, Homo sapiens
  CDR3 for alpha chain variable domain of TCR clone 173834 (TRAV3, TRAJ27)
CAVRPLGAGKSTF

SEQ ID NO: 347668 - protein, 13 aa, Homo sapiens
  CDR3 for beta chain variable domain of TCR clone 173834 (TRBV6-3, TRBJ2-5)
CASLLAGTETQYF

SEQ ID NO: 347669 - protein, 13 aa, Homo sapiens
  CDR3 for alpha chain variable domain of TCR clone 173835 (TRAV21, TRAJ6)
CAGGSGGSYIPTF

SEQ ID NO: 347670 - protein, 13 aa, Homo sapiens
  CDR3 for beta chain variable domain of TCR clone 173835 (TRBV7-3, TRBJ2-5)
CASSEGVLETQYF

SEQ ID NO: 347671 - protein, 16 aa, Homo sapiens
  CDR3 for alpha chain variable domain of TCR clone 173836 (TRAV12-3, TRAJ53)
CAMSPGSGGSNYKLTF

SEQ ID NO: 347672 - protein, 15 aa, Homo sapiens
  CDR3 for beta chain variable domain of TCR clone 173836 (TRBV7-2, TRBJ2-3)
CASSSTGQETDTQYF

SEQ ID NO: 347673 - protein, 17 aa, Homo sapiens
  CDR3 for alpha chain variable domain of TCR clone 173837 (TRAV13-1, TRAJ28)
CAASPPYSGAGSYQLTF

SEQ ID NO: 347674 - protein, 14 aa, Homo sapiens
  CDR3 for beta chain variable domain of TCR clone 173837 (TRBV19, TRBJ2-2)
CASSGQGIAGELFF

SEQ ID NO: 347675 - protein, 14 aa, Homo sapiens
  CDR3 for alpha chain variable domain of TCR clone 173838 (TRAV3, TRAJ21)
CAVRDWENFNKFYF

SEQ ID NO: 347676 - protein, 17 aa, Homo sapiens
  CDR3 for beta chain variable domain of TCR clone 173838 (TRBV7-8, TRBJ1-5)
CASSLLGQGGSNQPQHF

SEQ ID NO: 347677 - protein, 13 aa, Homo sapiens
  CDR3 for alpha chain variable domain of TCR clone 173839 (TRAV8-4, TRAJ10)
CAAFTGGGNKLTF

SEQ ID NO: 347678 - protein, 19 aa, Homo sapiens
  CDR3 for beta chain variable domain of TCR clone 173839 (TRBV25-1, TRBJ2-2)
CAILVYRVDRGRKTGELFF

SEQ ID NO: 347679 - protein, 16 aa, Homo sapiens
  CDR3 for alpha chain variable domain of TCR clone 173840 (TRAV3, TRAJ37)
CAVRGKWSGNTGKLIF

SEQ ID NO: 347680 - protein, 15 aa, Homo sapiens
  CDR3 for beta chain variable domain of TCR clone 173840 (TRBV5-1, TRBJ2-7)
CASSLNGGPAREQYF

SEQ ID NO: 347681 - protein, 12 aa, Homo sapiens
  CDR3 for alpha chain variable domain of TCR clone 173841 (TRAV8-3, TRAJ41)
CAVAFSGYALNF

SEQ ID NO: 347682 - protein, 16 aa, Homo sapiens
  CDR3 for beta chain variable domain of TCR clone 173841 (TRBV27, TRBJ2-7)
CASSSERKDSAYEQYF

SEQ ID NO: 347683 - protein, 16 aa, Homo sapiens
  CDR3 for alpha chain variable domain of TCR clone 173842 (TRAV8-1, TRAJ18)
CAVNAGRGSTLGRPYF

SEQ ID NO: 347684 - protein, 15 aa, Homo sapiens
  CDR3 for beta chain variable domain of TCR clone 173842 (TRBV7-2, TRBJ2-5)
CASTPRGASGETQYF

SEQ ID NO: 347685 - protein, 15 aa, Homo sapiens
  CDR3 for alpha chain variable domain of TCR clone 173843 (TRAV26-1, TRAJ27)
CIVRVVTPMQANQPL

SEQ ID NO: 347686 - protein, 13 aa, Homo sapiens
  CDR3 for beta chain variable domain of TCR clone 173843 (TRBV20-1, TRBJ2-7)
CSATHTSGYEQYF

SEQ ID NO: 347687 - protein, 13 aa, Homo sapiens
  CDR3 for alpha chain variable domain of TCR clone 173844 (TRAV17, TRAJ9)
CATDYTGGFKTIF

SEQ ID NO: 347688 - protein, 16 aa, Homo sapiens
  CDR3 for beta chain variable domain of TCR clone 173844 (TRBV7-7, TRBJ2-1)
CASSLASGTSTMSSSS

SEQ ID NO: 347689 - protein, 13 aa, Homo sapiens
  CDR3 for alpha chain variable domain of TCR clone 173845 (TRAV29/DV5, TRAJ48)
CASSSFGNEKLTF

SEQ ID NO: 347690 - protein, 14 aa, Homo sapiens
  CDR3 for beta chain variable domain of TCR clone 173845 (TRBV3-1, TRBJ2-2)
CASSQDWVQGELFF

SEQ ID NO: 347691 - protein, 16 aa, Homo sapiens
  CDR3 for alpha chain variable domain of TCR clone 173846 (TRAV21, TRAJ37)
CAVRPRGSSNTGKLIF

SEQ ID NO: 347692 - protein, 15 aa, Homo sapiens
  CDR3 for beta chain variable domain of TCR clone 173846 (TRBV10-3, TRBJ2-1)
CAIRNGTSGHNEQFF

SEQ ID NO: 347693 - protein, 15 aa, Homo sapiens
  CDR3 for alpha chain variable domain of TCR clone 173847 (TRAV12-3, TRAJ49)
CAMAVTPNTGNQFSF

SEQ ID NO: 347694 - protein, 14 aa, Homo sapiens
  CDR3 for beta chain variable domain of TCR clone 173847 (TRBV7-8, TRBJ2-3)
CASSLEAGTDTQYF

SEQ ID NO: 347695 - protein, 14 aa, Homo sapiens
  CDR3 for alpha chain variable domain of TCR clone 173848 (TRAV14/DV4, TRAJ58)
CAMRARTSGSRLPF

SEQ ID NO: 347696 - protein, 18 aa, Homo sapiens
  CDR3 for beta chain variable domain of TCR clone 173848 (TRBV12-4, TRBJ1-5)
CASSLFLVGVGAYQPQHF

SEQ ID NO: 347697 - protein, 14 aa, Homo sapiens
  CDR3 for alpha chain variable domain of TCR clone 173849 (TRAV12-1, TRAJ12)
CVVTRMDSSYKLIF

SEQ ID NO: 347698 - protein, 13 aa, Homo sapiens
  CDR3 for beta chain variable domain of TCR clone 173849 (TRBV20-1, TRBJ1-1)
CSARGGGNNEASF

SEQ ID NO: 347699 - protein, 15 aa, Homo sapiens
  CDR3 for alpha chain variable domain of TCR clone 173850 (TRAV38-2/DV8, TRAJ45)
CAYWDSRGGADGLTF

SEQ ID NO: 347700 - protein, 15 aa, Homo sapiens
  CDR3 for beta chain variable domain of TCR clone 173850 (TRBV20-1, TRBJ2-7)
CSARDRVSGMDEQYF

SEQ ID NO: 347701 - protein, 14 aa, Homo sapiens
  CDR3 for alpha chain variable domain of TCR clone 173851 (TRAV13-1, TRAJ44)
CAAKATGTASKLTF

SEQ ID NO: 347702 - protein, 16 aa, Homo sapiens
  CDR3 for beta chain variable domain of TCR clone 173851 (TRBV15, TRBJ1-2)
CATSRGPRTGGGVYTF

SEQ ID NO: 347703 - protein, 12 aa, Homo sapiens
  CDR3 for alpha chain variable domain of TCR clone 173852 (TRAV25, TRAJ11)
CAGYSGYSTLTF

SEQ ID NO: 347704 - protein, 13 aa, Homo sapiens
  CDR3 for beta chain variable domain of TCR clone 173852 (TRBV7-9, TRBJ1-2)
CASSLKQNYGYSF

SEQ ID NO: 347705 - protein, 15 aa, Homo sapiens
  CDR3 for alpha chain variable domain of TCR clone 173853 (TRAV27, TRAJ38)
CAARRNAGNNRKLIW

SEQ ID NO: 347706 - protein, 13 aa, Homo sapiens
  CDR3 for beta chain variable domain of TCR clone 173853 (TRBV12-5, TRBJ2-3)
CASGERQSDKQYF

SEQ ID NO: 347707 - protein, 17 aa, Homo sapiens
  CDR3 for alpha chain variable domain of TCR clone 173854 (TRAV3, TRAJ42)
CAVRDRDYGGSQGNPIF

SEQ ID NO: 347708 - protein, 15 aa, Homo sapiens
  CDR3 for beta chain variable domain of TCR clone 173854 (TRBV29-1, TRBJ1-2)
CSVVLEAGSNYGYTF

SEQ ID NO: 347709 - protein, 18 aa, Homo sapiens
  CDR3 for alpha chain variable domain of TCR clone 173855 (TRAV13-1, TRAJ52)
CAAKNPNAGGTSYGKLTF

SEQ ID NO: 347710 - protein, 17 aa, Homo sapiens
  CDR3 for beta chain variable domain of TCR clone 173855 (TRBV11-3, TRBJ1-5)
CASSPLTGLRGNQPQHF

SEQ ID NO: 347711 - protein, 18 aa, Homo sapiens
  CDR3 for alpha chain variable domain of TCR clone 173856 (TRAV26-1, TRAJ22)
CIVRVSFWFCKANDLLIW

SEQ ID NO: 347712 - protein, 13 aa, Homo sapiens
  CDR3 for beta chain variable domain of TCR clone 173856 (TRBV7-9, TRBJ1-2)
CASSLKQNYGYTF

SEQ ID NO: 347713 - protein, 10 aa, Homo sapiens
  CDR3 for alpha chain variable domain of TCR clone 173857 (TRAV13-2, TRAJ49)
CADTGNQFYF

SEQ ID NO: 347714 - protein, 13 aa, Homo sapiens
  CDR3 for beta chain variable domain of TCR clone 173857 (TRBV15, TRBJ2-7)
CATSTTGHYEQYF

SEQ ID NO: 347715 - protein, 11 aa, Homo sapiens
  CDR3 for alpha chain variable domain of TCR clone 173858 (TRAV17, TRAJ9)
CATTGGFKTIF

SEQ ID NO: 347716 - protein, 15 aa, Homo sapiens
  CDR3 for beta chain variable domain of TCR clone 173858 (TRBV7-9, TRBJ2-7)
CASSPTGLRTYEQYF

SEQ ID NO: 347717 - protein, 14 aa, Homo sapiens
  CDR3 for alpha chain variable domain of TCR clone 173859 (TRAV12-2, TRAJ11)
CAVNRESGYSTLTF

SEQ ID NO: 347718 - protein, 10 aa, Homo sapiens
  CDR3 for beta chain variable domain of TCR clone 173859 (TRBV20-1, TRBJ2-5)
CGARFETQYF

SEQ ID NO: 347719 - protein, 14 aa, Homo sapiens
  CDR3 for alpha chain variable domain of TCR clone 173860 (TRAV13-1, TRAJ35)
CAASKGGFGNVLHC

SEQ ID NO: 347720 - protein, 16 aa, Homo sapiens
  CDR3 for beta chain variable domain of TCR clone 173860 (TRBV18, TRBJ1-1)
CASSPGVGGRGGEAFF

SEQ ID NO: 347721 - protein, 15 aa, Homo sapiens
  CDR3 for alpha chain variable domain of TCR clone 173861 (TRAV21, TRAJ53)
CATLNSGGSNYNLTF

SEQ ID NO: 347722 - protein, 16 aa, Homo sapiens
  CDR3 for beta chain variable domain of TCR clone 173861 (TRBV29-1, TRBJ1-2)
CSVEANRDIANYGYTF

SEQ ID NO: 347723 - protein, 12 aa, Homo sapiens
  CDR3 for alpha chain variable domain of TCR clone 173862 (TRAV20, TRAJ39)
CAVGNAGNMLTF

SEQ ID NO: 347724 - protein, 13 aa, Homo sapiens
  CDR3 for beta chain variable domain of TCR clone 173862 (TRBV13, TRBJ2-1)
CASILGGRGEQFF

SEQ ID NO: 347725 - protein, 11 aa, Homo sapiens
  CDR3 for alpha chain variable domain of TCR clone 173863 (TRAV12-1, TRAJ21)
CVVNNVNKFYF

SEQ ID NO: 347726 - protein, 14 aa, Homo sapiens
  CDR3 for beta chain variable domain of TCR clone 173863 (TRBV15, TRBJ1-5)
CATSREQSNQPQHF

SEQ ID NO: 347727 - protein, 14 aa, Homo sapiens
  CDR3 for alpha chain variable domain of TCR clone 173864 (TRAV1-2, TRAJ8)
CAVREDTGFHKLVF

SEQ ID NO: 347728 - protein, 11 aa, Homo sapiens
  CDR3 for beta chain variable domain of TCR clone 173864 (TRBV27, TRBJ2-3)
CASSLGDTQYF

SEQ ID NO: 347729 - protein, 14 aa, Homo sapiens
  CDR3 for alpha chain variable domain of TCR clone 173865 (TRAV39, TRAJ29)
CAVPRNSGNTPLVF

SEQ ID NO: 347730 - protein, 13 aa, Homo sapiens
  CDR3 for beta chain variable domain of TCR clone 173865 (TRBV7-9, TRBJ1-2)
CSSSLKQNYGYTF

SEQ ID NO: 347731 - protein, 14 aa, Homo sapiens
  CDR3 for alpha chain variable domain of TCR clone 173866 (TRAV1-2, TRAJ16)
CAVNRFSVGQKLLF

SEQ ID NO: 347732 - protein, 15 aa, Homo sapiens
  CDR3 for beta chain variable domain of TCR clone 173866 (TRBV9, TRBJ1-6)
CASSVAGTGDSTLHF

SEQ ID NO: 347733 - protein, 12 aa, Homo sapiens
  CDR3 for alpha chain variable domain of TCR clone 173867 (TRAV13-2, TRAJ23)
CAERHRGGRLIF

SEQ ID NO: 347734 - protein, 16 aa, Homo sapiens
  CDR3 for beta chain variable domain of TCR clone 173867 (TRBV20-1, TRBJ1-4)
CSAPGQDLLTNEKLFF

SEQ ID NO: 347735 - protein, 13 aa, Homo sapiens
  CDR3 for alpha chain variable domain of TCR clone 173868 (TRAV21, TRAJ27)
CAARPGNAGKSTF

SEQ ID NO: 347736 - protein, 13 aa, Homo sapiens
  CDR3 for beta chain variable domain of TCR clone 173868 (TRBV7-8, TRBJ2-7)
CASSLTGGREQYF

SEQ ID NO: 347737 - protein, 11 aa, Homo sapiens
  CDR3 for alpha chain variable domain of TCR clone 173869 (TRAV4, TRAJ23)
CLVAPGGKLIF

SEQ ID NO: 347738 - protein, 13 aa, Homo sapiens
  CDR3 for beta chain variable domain of TCR clone 173869 (TRBV7-9, TRBJ1-2)
CASSLRQNYGYTF

SEQ ID NO: 347739 - protein, 16 aa, Homo sapiens
  CDR3 for alpha chain variable domain of TCR clone 173870 (TRAV30, TRAJ24)
CGTGIVDADSWGKFQF

SEQ ID NO: 347740 - protein, 14 aa, Homo sapiens
  CDR3 for beta chain variable domain of TCR clone 173870 (TRBV7-9, TRBJ2-4)
CASSLAMGGNIQYF

SEQ ID NO: 347741 - protein, 14 aa, Homo sapiens
  CDR3 for alpha chain variable domain of TCR clone 173871 (TRAV12-2, TRAJ13)
CAVKKTGGYQQVTF

SEQ ID NO: 347742 - protein, 17 aa, Homo sapiens
  CDR3 for beta chain variable domain of TCR clone 173871 (TRBV20-1, TRBJ2-2)
CSASGSGQGGLTGELFF

SEQ ID NO: 347743 - protein, 17 aa, Homo sapiens
  CDR3 for alpha chain variable domain of TCR clone 173872 (TRAV36/DV7, TRAJ52)
CAVAQRAGGTSYGKLTF

SEQ ID NO: 347744 - protein, 13 aa, Homo sapiens
  CDR3 for beta chain variable domain of TCR clone 173872 (TRBV7-2, TRBJ2-2)
CASSSVRAGELFF

SEQ ID NO: 347745 - protein, 16 aa, Homo sapiens
  CDR3 for alpha chain variable domain of TCR clone 173873 (TRAV4, TRAJ5)
CLVGPDPGHGQEGTYF

SEQ ID NO: 347746 - protein, 13 aa, Homo sapiens
  CDR3 for beta chain variable domain of TCR clone 173873 (TRBV4-2, TRBJ1-2)
CASSLSASGGYTF

SEQ ID NO: 347747 - protein, 16 aa, Homo sapiens
  CDR3 for alpha chain variable domain of TCR clone 173874 (TRAV23/DV6, TRAJ52)
CAARPSGGTSYGKLTF

SEQ ID NO: 347748 - protein, 14 aa, Homo sapiens
  CDR3 for beta chain variable domain of TCR clone 173874 (TRBV20-1, TRBJ2-3)
CSARDAYSTDTQYF

SEQ ID NO: 347749 - protein, 14 aa, Homo sapiens
  CDR3 for alpha chain variable domain of TCR clone 173875 (TRAV12-3, TRAJ10)
SHLPLTGGGNKLTF

SEQ ID NO: 347750 - protein, 15 aa, Homo sapiens
  CDR3 for beta chain variable domain of TCR clone 173875 (TRBV11-3, TRBJ2-3)
CASRKDGREGDTQYF

SEQ ID NO: 347751 - protein, 13 aa, Homo sapiens
  CDR3 for alpha chain variable domain of TCR clone 173876 (TRAV13-2, TRAJ53)
CVENMGSNYKLTF

SEQ ID NO: 347752 - protein, 13 aa, Homo sapiens
  CDR3 for beta chain variable domain of TCR clone 173876 (TRBV4-1, TRBJ2-2)
CASSQENTGELFF

SEQ ID NO: 347753 - protein, 11 aa, Homo sapiens
  CDR3 for alpha chain variable domain of TCR clone 173877 (TRAV17, TRAJ9)
CGFTAGFKTIF

SEQ ID NO: 347754 - protein, 18 aa, Homo sapiens
  CDR3 for beta chain variable domain of TCR clone 173877 (TRBV12-4, TRBJ2-2)
CASSLVAGTRGRTGELFF

SEQ ID NO: 347755 - protein, 14 aa, Homo sapiens
  CDR3 for alpha chain variable domain of TCR clone 173878 (TRAV16, TRAJ17)
CALSGRAAGNKLTF

SEQ ID NO: 347756 - protein, 14 aa, Homo sapiens
  CDR3 for beta chain variable domain of TCR clone 173878 (TRBV18, TRBJ2-5)
CASSPGVSQETQYF

SEQ ID NO: 347757 - protein, 15 aa, Homo sapiens
  CDR3 for alpha chain variable domain of TCR clone 173879 (TRAV14/DV4, TRAJ26)
CAMSEGQNYGQNFVF

SEQ ID NO: 347758 - protein, 13 aa, Homo sapiens
  CDR3 for beta chain variable domain of TCR clone 173879 (TRBV24-1, TRBJ2-2)
CATSDWSTGELFF

SEQ ID NO: 347759 - protein, 14 aa, Homo sapiens
  CDR3 for alpha chain variable domain of TCR clone 173880 (TRAV30, TRAJ26)
CGTEIVSYGQNFVF

SEQ ID NO: 347760 - protein, 16 aa, Homo sapiens
  CDR3 for beta chain variable domain of TCR clone 173880 (TRBV7-2, TRBJ2-7)
CASSLEAGGPWYEQYF

SEQ ID NO: 347761 - protein, 14 aa, Homo sapiens
  CDR3 for alpha chain variable domain of TCR clone 173881 (TRAV38-1, TRAJ45)
CAYYSGGGADGLTF

SEQ ID NO: 347762 - protein, 13 aa, Homo sapiens
  CDR3 for beta chain variable domain of TCR clone 173881 (TRBV2, TRBJ1-4)
CASSERAGEKLFF

SEQ ID NO: 347763 - protein, 17 aa, Homo sapiens
  CDR3 for alpha chain variable domain of TCR clone 173882 (TRAV38-1, TRAJ45)
CAFMRSHSGGGADGLTF

SEQ ID NO: 347764 - protein, 14 aa, Homo sapiens
  CDR3 for beta chain variable domain of TCR clone 173882 (TRBV6-1, TRBJ1-3)
CASVQGGGGNTIYF

SEQ ID NO: 347765 - protein, 15 aa, Homo sapiens
  CDR3 for alpha chain variable domain of TCR clone 173883 (TRAV8-6, TRAJ6)
CAVSFTSGGSYIPTF

SEQ ID NO: 347766 - protein, 20 aa, Homo sapiens
  CDR3 for beta chain variable domain of TCR clone 173883 (TRBV11-3, TRBJ2-3)
LGTRPCISVPAAPITDTQYF

SEQ ID NO: 347767 - protein, 16 aa, Homo sapiens
  CDR3 for alpha chain variable domain of TCR clone 173884 (TRAV3, TRAJ10)
FAVRDMRAGGGNKLTF

SEQ ID NO: 347768 - protein, 13 aa, Homo sapiens
  CDR3 for beta chain variable domain of TCR clone 173884 (TRBV6-4, TRBJ1-5)
CASSADLNQPQHF

SEQ ID NO: 347769 - protein, 14 aa, Homo sapiens
  CDR3 for alpha chain variable domain of TCR clone 173885 (TRAV23/DV6, TRAJ8)
CAASKATVFQKLVF

SEQ ID NO: 347770 - protein, 15 aa, Homo sapiens
  CDR3 for beta chain variable domain of TCR clone 173885 (TRBV28, TRBJ2-3)
CASSPDRQGANTQYF

SEQ ID NO: 347771 - protein, 14 aa, Homo sapiens
  CDR3 for alpha chain variable domain of TCR clone 173886 (TRAV38-1, TRAJ29)
CAFITPSGNTPLVF

SEQ ID NO: 347772 - protein, 14 aa, Homo sapiens
  CDR3 for beta chain variable domain of TCR clone 173886 (TRBV12-5, TRBJ2-5)
CASGSRTHQETQYF

SEQ ID NO: 347773 - protein, 17 aa, Homo sapiens
  CDR3 for alpha chain variable domain of TCR clone 173887 (TRAV3, TRAJ12)
CAVRDGGRMVSSYKLIF

SEQ ID NO: 347774 - protein, 16 aa, Homo sapiens
  CDR3 for beta chain variable domain of TCR clone 173887 (TRBV9, TRBJ2-2)
CASSAMGKGNTGELFF

SEQ ID NO: 347775 - protein, 17 aa, Homo sapiens
  CDR3 for alpha chain variable domain of TCR clone 173888 (TRAV17, TRAJ7)
CATLGRLAFGKGNQVVV

SEQ ID NO: 347776 - protein, 13 aa, Homo sapiens
  CDR3 for beta chain variable domain of TCR clone 173888 (TRBV12-4, TRBJ2-7)
CVSSLERVREQYF

SEQ ID NO: 347777 - protein, 14 aa, Homo sapiens
  CDR3 for alpha chain variable domain of TCR clone 173889 (TRAV16, TRAJ33)
CALSAMDSNYQLIW

SEQ ID NO: 347778 - protein, 16 aa, Homo sapiens
  CDR3 for beta chain variable domain of TCR clone 173889 (TRBV12-4, TRBJ2-3)
CTSSFPSNTNTDTQYF

SEQ ID NO: 347779 - protein, 15 aa, Homo sapiens
  CDR3 for alpha chain variable domain of TCR clone 173890 (TRAV27, TRAJ45)
CAVRYSGGGADGLTF

SEQ ID NO: 347780 - protein, 13 aa, Homo sapiens
  CDR3 for beta chain variable domain of TCR clone 173890 (TRBV7-9, TRBJ1-2)
CASSLKQNYGYTF

SEQ ID NO: 347781 - protein, 15 aa, Homo sapiens
  CDR3 for alpha chain variable domain of TCR clone 173891 (TRAV2, TRAJ9)
CAVADRGTRGFKTIF

SEQ ID NO: 347782 - protein, 16 aa, Homo sapiens
  CDR3 for beta chain variable domain of TCR clone 173891 (TRBV24-1, TRBJ2-3)
CATSDPGTGATDTQYF

SEQ ID NO: 347783 - protein, 18 aa, Homo sapiens
  CDR3 for alpha chain variable domain of TCR clone 173892 (TRAV13-1, TRAJ52)
CAAKNPNAGGTSHGKLTF

SEQ ID NO: 347784 - protein, 15 aa, Homo sapiens
  CDR3 for beta chain variable domain of TCR clone 173892 (TRBV2, TRBJ2-2)
CASSRETVGTGELFF

SEQ ID NO: 347785 - protein, 14 aa, Homo sapiens
  CDR3 for alpha chain variable domain of TCR clone 173893 (TRAV12-1, TRAJ38)
CVVNNAGNNRKLIW

SEQ ID NO: 347786 - protein, 19 aa, Homo sapiens
  CDR3 for beta chain variable domain of TCR clone 173893 (TRBV7-2, TRBJ2-3)
CASSFLSRNWGGGTDTQYF

SEQ ID NO: 347787 - protein, 11 aa, Homo sapiens
  CDR3 for alpha chain variable domain of TCR clone 173894 (TRAV13-2, TRAJ20)
CAENMIYKLSF

SEQ ID NO: 347788 - protein, 15 aa, Homo sapiens
  CDR3 for beta chain variable domain of TCR clone 173894 (TRBV28, TRBJ2-3)
CAPTFRDWSTDTQYF

SEQ ID NO: 347789 - protein, 13 aa, Homo sapiens
  CDR3 for alpha chain variable domain of TCR clone 173895 (TRAV12-1, TRAJ16)
CVVNGPDGQKLLF

SEQ ID NO: 347790 - protein, 15 aa, Homo sapiens
  CDR3 for beta chain variable domain of TCR clone 173895 (TRBV7-3, TRBJ2-1)
CASSPTGGGEVEQFF

SEQ ID NO: 347791 - protein, 12 aa, Homo sapiens
  CDR3 for alpha chain variable domain of TCR clone 173896 (TRAV8-4, TRAJ37)
CAKSSNIGKLIF

SEQ ID NO: 347792 - protein, 15 aa, Homo sapiens
  CDR3 for beta chain variable domain of TCR clone 173896 (TRBV20-1, TRBJ2-7)
CSARDRVSGMDEQYF

SEQ ID NO: 347793 - protein, 14 aa, Homo sapiens
  CDR3 for alpha chain variable domain of TCR clone 173897 (TRAV13-2, TRAJ45)
CAEMPGGGSDGLTF

SEQ ID NO: 347794 - protein, 11 aa, Homo sapiens
  CDR3 for beta chain variable domain of TCR clone 173897 (TRBV7-3, TRBJ2-5)
CASSLSETQYF

SEQ ID NO: 347795 - protein, 14 aa, Homo sapiens
  CDR3 for alpha chain variable domain of TCR clone 173898 (TRAV17, TRAJ31)
CATVPLSGNARLMF

SEQ ID NO: 347796 - protein, 15 aa, Homo sapiens
  CDR3 for beta chain variable domain of TCR clone 173898 (TRBV15, TRBJ2-2)
CATSVTGGRVGELFF

SEQ ID NO: 347797 - protein, 12 aa, Homo sapiens
  CDR3 for alpha chain variable domain of TCR clone 173899 (TRAV21, TRAJ3)
CCFYSSASTIIF

SEQ ID NO: 347798 - protein, 11 aa, Homo sapiens
  CDR3 for beta chain variable domain of TCR clone 173899 (TRBV12-4, TRBJ2-3)
CASTATDTQYF

SEQ ID NO: 347799 - protein, 18 aa, Homo sapiens
  CDR3 for alpha chain variable domain of TCR clone 173900 (TRAV13-1, TRAJ52)
CAAKNPNAGGTSYGKLTF

SEQ ID NO: 347800 - protein, 15 aa, Homo sapiens
  CDR3 for beta chain variable domain of TCR clone 173900 (TRBV28, TRBJ2-3)
CASSPDRQGANTPYF

SEQ ID NO: 347801 - protein, 16 aa, Homo sapiens
  CDR3 for alpha chain variable domain of TCR clone 173901 (TRAV16, TRAJ52)
CALSAAGGTSYGKLTF

SEQ ID NO: 347802 - protein, 13 aa, Homo sapiens
  CDR3 for beta chain variable domain of TCR clone 173901 (TRBV4-1, TRBJ2-2)
CASSQENTGELVF

SEQ ID NO: 347803 - protein, 12 aa, Homo sapiens
  CDR3 for alpha chain variable domain of TCR clone 173902 (TRAV13-2, TRAJ23)
CAERHRGGKLIF

SEQ ID NO: 347804 - protein, 13 aa, Homo sapiens
  CDR3 for beta chain variable domain of TCR clone 173902 (TRBV19, TRBJ1-1)
CASSITGESEAFF

SEQ ID NO: 347805 - protein, 16 aa, Homo sapiens
  CDR3 for alpha chain variable domain of TCR clone 173903 (TRAV8-3, TRAJ13)
CAVGAYPSGGYQKVTF

SEQ ID NO: 347806 - protein, 15 aa, Homo sapiens
  CDR3 for beta chain variable domain of TCR clone 173903 (TRBV19, TRBJ1-5)
CASSIGWADNQPQHF

SEQ ID NO: 347807 - protein, 15 aa, Homo sapiens
  CDR3 for alpha chain variable domain of TCR clone 173904 (TRAV36/DV7, TRAJ54)
CAVEKPVQGAQKLVF

SEQ ID NO: 347808 - protein, 17 aa, Homo sapiens
  CDR3 for beta chain variable domain of TCR clone 173904 (TRBV6-5, TRBJ1-2)
CASSSTWEGACDYGYTF

SEQ ID NO: 347809 - protein, 10 aa, Homo sapiens
  CDR3 for alpha chain variable domain of TCR clone 173905 (TRAV38-1, TRAJ34)
CALMDDKLIF

SEQ ID NO: 347810 - protein, 14 aa, Homo sapiens
  CDR3 for beta chain variable domain of TCR clone 173905 (TRBV7-2, TRBJ2-2)
CASSLNSNTGELFF

SEQ ID NO: 347811 - protein, 11 aa, Homo sapiens
  CDR3 for alpha chain variable domain of TCR clone 173906 (TRAV35, TRAJ34)
CWARNTDKLIF

SEQ ID NO: 347812 - protein, 14 aa, Homo sapiens
  CDR3 for beta chain variable domain of TCR clone 173906 (TRBV5-1, TRBJ2-7)
CASSRGKSLYEQYF

SEQ ID NO: 347813 - protein, 13 aa, Homo sapiens
  CDR3 for alpha chain variable domain of TCR clone 173907 (TRAV8-3, TRAJ36)
CAVGATGANNLFF

SEQ ID NO: 347814 - protein, 13 aa, Homo sapiens
  CDR3 for beta chain variable domain of TCR clone 173907 (TRBV12-4, TRBJ1-2)
CASSLRQGKGDAF

SEQ ID NO: 347815 - protein, 16 aa, Homo sapiens
  CDR3 for alpha chain variable domain of TCR clone 173908 (TRAV12-1, TRAJ12)
CVVNTLRMDSSYKLIF

SEQ ID NO: 347816 - protein, 13 aa, Homo sapiens
  CDR3 for beta chain variable domain of TCR clone 173908 (TRBV14, TRBJ2-7)
CASSQDRRYEQYF

SEQ ID NO: 347817 - protein, 14 aa, Homo sapiens
  CDR3 for alpha chain variable domain of TCR clone 173909 (TRAV12-3, TRAJ22)
CAMSLFGSARQLTF

SEQ ID NO: 347818 - protein, 11 aa, Homo sapiens
  CDR3 for beta chain variable domain of TCR clone 173909 (TRBV12-4, TRBJ2-2)
CASRSAGELFF

SEQ ID NO: 347819 - protein, 14 aa, Homo sapiens
  CDR3 for alpha chain variable domain of TCR clone 173910 (TRAV13-1, TRAJ44)
CAAKATDTASKLTF

SEQ ID NO: 347820 - protein, 17 aa, Homo sapiens
  CDR3 for beta chain variable domain of TCR clone 173910 (TRBV7-3, TRBJ2-3)
CASSLRKRMRGADTQYF

SEQ ID NO: 347821 - protein, 13 aa, Homo sapiens
  CDR3 for alpha chain variable domain of TCR clone 173911 (TRAV8-6, TRAJ8)
CAFMNTGFQKLVF

SEQ ID NO: 347822 - protein, 15 aa, Homo sapiens
  CDR3 for beta chain variable domain of TCR clone 173911 (TRBV28, TRBJ2-5)
CASSSGRVIQETHYF

SEQ ID NO: 347823 - protein, 11 aa, Homo sapiens
  CDR3 for alpha chain variable domain of TCR clone 173912 (TRAV12-2, TRAJ43)
CAAYTNNDMRF

SEQ ID NO: 347824 - protein, 14 aa, Homo sapiens
  CDR3 for beta chain variable domain of TCR clone 173912 (TRBV7-8, TRBJ1-2)
CASSAGTAIYGYTF

SEQ ID NO: 347825 - protein, 14 aa, Homo sapiens
  CDR3 for alpha chain variable domain of TCR clone 173913 (TRAV17, TRAJ57)
CATDPQGGSERLVF

SEQ ID NO: 347826 - protein, 15 aa, Homo sapiens
  CDR3 for beta chain variable domain of TCR clone 173913 (TRBV5-1, TRBJ2-7)
CASSLDLTSSYEQYF

SEQ ID NO: 347827 - protein, 16 aa, Homo sapiens
  CDR3 for alpha chain variable domain of TCR clone 173914 (TRAV30, TRAJ24)
CGTEIVDADSWGKFQF

SEQ ID NO: 347828 - protein, 18 aa, Homo sapiens
  CDR3 for beta chain variable domain of TCR clone 173914 (TRBV20-1, TRBJ2-6)
CSAETTPTHGSGANVLTL

SEQ ID NO: 347829 - protein, 13 aa, Homo sapiens
  CDR3 for alpha chain variable domain of TCR clone 173915 (TRAV26-1, TRAJ36)
CIGVGTGANNLFF

SEQ ID NO: 347830 - protein, 16 aa, Homo sapiens
  CDR3 for beta chain variable domain of TCR clone 173915 (TRBV10-3, TRBJ2-1)
CAISGVGDGGGGEQFF

SEQ ID NO: 347831 - protein, 16 aa, Homo sapiens
  CDR3 for alpha chain variable domain of TCR clone 173916 (TRAV3, TRAJ10)
CSVRDMRAGGGNKPTF

SEQ ID NO: 347832 - protein, 14 aa, Homo sapiens
  CDR3 for beta chain variable domain of TCR clone 173916 (TRBV6-1, TRBJ1-3)
CASVQGGGGNTIYF

SEQ ID NO: 347833 - protein, 12 aa, Homo sapiens
  CDR3 for alpha chain variable domain of TCR clone 173917 (TRAV12-3, TRAJ17)
CAMTLTGNKLTF

SEQ ID NO: 347834 - protein, 11 aa, Homo sapiens
  CDR3 for beta chain variable domain of TCR clone 173917 (TRBV28, TRBJ2-7)
CASGPLPEQYF

SEQ ID NO: 347835 - protein, 14 aa, Homo sapiens
  CDR3 for alpha chain variable domain of TCR clone 173918 (TRAV17, TRAJ57)
CATDPQGGSEKLVF

SEQ ID NO: 347836 - protein, 18 aa, Homo sapiens
  CDR3 for beta chain variable domain of TCR clone 173918 (TRBV6-6, TRBJ1-3)
CASSYSKWDSITGNTIYF

SEQ ID NO: 347837 - protein, 13 aa, Homo sapiens
  CDR3 for alpha chain variable domain of TCR clone 173919 (TRAV35, TRAJ37)
CSGSSGNTGKLIF

SEQ ID NO: 347838 - protein, 16 aa, Homo sapiens
  CDR3 for beta chain variable domain of TCR clone 173919 (TRBV10-3, TRBJ2-1)
CAISLTSGNSYNEQFF

SEQ ID NO: 347839 - protein, 21 aa, Homo sapiens
  CDR3 for alpha chain variable domain of TCR clone 173920 (TRAV3, TRAJ17)
CAVRARRGGRSCRQQANIWRR

SEQ ID NO: 347840 - protein, 14 aa, Homo sapiens
  CDR3 for beta chain variable domain of TCR clone 173920 (TRBV4-1, TRBJ2-2)
CASSQAVNTGELFF

SEQ ID NO: 347841 - protein, 16 aa, Homo sapiens
  CDR3 for alpha chain variable domain of TCR clone 173921 (TRAV20, TRAJ22)
CAVQASSSGSARQLTF

SEQ ID NO: 347842 - protein, 14 aa, Homo sapiens
  CDR3 for beta chain variable domain of TCR clone 173921 (TRBV7-2, TRBJ2-2)
CASRGQGAAGELFF

SEQ ID NO: 347843 - protein, 12 aa, Homo sapiens
  CDR3 for alpha chain variable domain of TCR clone 173922 (TRAV26-2, TRAJ21)
CILKGNFNKFYF

SEQ ID NO: 347844 - protein, 14 aa, Homo sapiens
  CDR3 for beta chain variable domain of TCR clone 173922 (TRBV11-2, TRBJ2-5)
CASRPLAGRETQYF

SEQ ID NO: 347845 - protein, 14 aa, Homo sapiens
  CDR3 for alpha chain variable domain of TCR clone 173923 (TRAV20, TRAJ10)
CAVRVEGGGNQLTF

SEQ ID NO: 347846 - protein, 18 aa, Homo sapiens
  CDR3 for beta chain variable domain of TCR clone 173923 (TRBV24-1, TRBJ2-1)
CATSDLMFLGRGVHEQFF

SEQ ID NO: 347847 - protein, 13 aa, Homo sapiens
  CDR3 for alpha chain variable domain of TCR clone 173924 (TRAV12-1, TRAJ3)
CAVNPRGASKIIF

SEQ ID NO: 347848 - protein, 13 aa, Homo sapiens
  CDR3 for beta chain variable domain of TCR clone 173924 (TRBV28, TRBJ1-5)
CASSDRGNQPQHF

SEQ ID NO: 347849 - protein, 16 aa, Homo sapiens
  CDR3 for alpha chain variable domain of TCR clone 173925 (TRAV30, TRAJ24)
CGTEIVDADSWGKFQF

SEQ ID NO: 347850 - protein, 15 aa, Homo sapiens
  CDR3 for beta chain variable domain of TCR clone 173925 (TRBV28, TRBJ2-1)
CASSIITGGRSEQFF

SEQ ID NO: 347851 - protein, 15 aa, Homo sapiens
  CDR3 for alpha chain variable domain of TCR clone 173926 (TRAV8-2, TRAJ16)
CVVSDGFSGGQKLLF

SEQ ID NO: 347852 - protein, 14 aa, Homo sapiens
  CDR3 for beta chain variable domain of TCR clone 173926 (TRBV7-3, TRBJ1-1)
CASSLGTGYTEAFF

SEQ ID NO: 347853 - protein, 14 aa, Homo sapiens
  CDR3 for alpha chain variable domain of TCR clone 173927 (TRAV12-2, TRAJ53)
CAVKGGGSNYKLTF

SEQ ID NO: 347854 - protein, 14 aa, Homo sapiens
  CDR3 for beta chain variable domain of TCR clone 173927 (TRBV7-7, TRBJ2-2)
CVTRQDSDTGELFF

SEQ ID NO: 347855 - protein, 11 aa, Homo sapiens
  CDR3 for alpha chain variable domain of TCR clone 173928 (TRAV21, TRAJ11)
CAVIGYSTLTF

SEQ ID NO: 347856 - protein, 12 aa, Homo sapiens
  CDR3 for beta chain variable domain of TCR clone 173928 (TRBV5-4, TRBJ2-5)
CASSSTRETQYF

SEQ ID NO: 347857 - protein, 15 aa, Homo sapiens
  CDR3 for alpha chain variable domain of TCR clone 173929 (TRAV12-3, TRAJ5)
CAMSGLGTGRRALPF

SEQ ID NO: 347858 - protein, 15 aa, Homo sapiens
  CDR3 for beta chain variable domain of TCR clone 173929 (TRBV19, TRBJ1-1)
CASTSGQIQNTEAFF

SEQ ID NO: 347859 - protein, 14 aa, Homo sapiens
  CDR3 for alpha chain variable domain of TCR clone 173930 (TRAV21, TRAJ8)
CALQRDTGFQKLVF

SEQ ID NO: 347860 - protein, 13 aa, Homo sapiens
  CDR3 for beta chain variable domain of TCR clone 173930 (TRBV4-3, TRBJ2-1)
CASSFWDYNEQFF

SEQ ID NO: 347861 - protein, 15 aa, Homo sapiens
  CDR3 for alpha chain variable domain of TCR clone 173931 (TRAV1-2, TRAJ45)
CAVRDSGGGADGLTF

SEQ ID NO: 347862 - protein, 16 aa, Homo sapiens
  CDR3 for beta chain variable domain of TCR clone 173931 (TRBV20-1, TRBJ1-2)
CSASMGQGVANYGYTF

SEQ ID NO: 347863 - protein, 13 aa, Homo sapiens
  CDR3 for alpha chain variable domain of TCR clone 173932 (TRAV12-3, TRAJ33)
CAMSVNSNYQLIW

SEQ ID NO: 347864 - protein, 13 aa, Homo sapiens
  CDR3 for beta chain variable domain of TCR clone 173932 (TRBV7-3, TRBJ1-1)
FASSQDWGAEAFF

SEQ ID NO: 347865 - protein, 11 aa, Homo sapiens
  CDR3 for alpha chain variable domain of TCR clone 173933 (TRAV35, TRAJ30)
CAGERDDKIIF

SEQ ID NO: 347866 - protein, 14 aa, Homo sapiens
  CDR3 for beta chain variable domain of TCR clone 173933 (TRBV11-2, TRBJ2-3)
CASSRLARTDTQYF

SEQ ID NO: 347867 - protein, 14 aa, Homo sapiens
  CDR3 for alpha chain variable domain of TCR clone 173934 (TRAV8-3, TRAJ44)
CAVGNTGTASKLTF

SEQ ID NO: 347868 - protein, 15 aa, Homo sapiens
  CDR3 for beta chain variable domain of TCR clone 173934 (TRBV28, TRBJ2-7)
CASSFWGQGRYEQYF

SEQ ID NO: 347869 - protein, 14 aa, Homo sapiens
  CDR3 for alpha chain variable domain of TCR clone 173935 (TRAV8-1, TRAJ5)
CAVRTDTGRRALTF

SEQ ID NO: 347870 - protein, 18 aa, Homo sapiens
  CDR3 for beta chain variable domain of TCR clone 173935 (TRBV7-9, TRBJ2-7)
CASSLTTSGSRTWYEQYF

SEQ ID NO: 347871 - protein, 14 aa, Homo sapiens
  CDR3 for alpha chain variable domain of TCR clone 173936 (TRAV29/DV5, TRAJ36)
CAARRKTGANTLFF

SEQ ID NO: 347872 - protein, 15 aa, Homo sapiens
  CDR3 for beta chain variable domain of TCR clone 173936 (TRBV19, TRBJ1-6)
CASSTQGAVGSPLHF

SEQ ID NO: 347873 - protein, 12 aa, Homo sapiens
  CDR3 for alpha chain variable domain of TCR clone 173937 (TRAV35, TRAJ49)
CAGWNTGKQLYF

SEQ ID NO: 347874 - protein, 16 aa, Homo sapiens
  CDR3 for beta chain variable domain of TCR clone 173937 (TRBV5-1, TRBJ2-2)
CASSLWDTTSTGELFF

SEQ ID NO: 347875 - protein, 14 aa, Homo sapiens
  CDR3 for alpha chain variable domain of TCR clone 173938 (TRAV2, TRAJ29)
CAGPFQSGNRPLVF

SEQ ID NO: 347876 - protein, 11 aa, Homo sapiens
  CDR3 for beta chain variable domain of TCR clone 173938 (TRBV29-1, TRBJ2-5)
CSEDRTGTQYF

SEQ ID NO: 347877 - protein, 13 aa, Homo sapiens
  CDR3 for alpha chain variable domain of TCR clone 173939 (TRAV27, TRAJ56)
CAGKPGANSKLTF

SEQ ID NO: 347878 - protein, 17 aa, Homo sapiens
  CDR3 for beta chain variable domain of TCR clone 173939 (TRBV6-1, TRBJ2-3)
CASSLSRVAGGRNTQYF

SEQ ID NO: 347879 - protein, 14 aa, Homo sapiens
  CDR3 for alpha chain variable domain of TCR clone 173940 (TRAV9-2, TRAJ39)
CALYIYNEGNMLTF

SEQ ID NO: 347880 - protein, 14 aa, Homo sapiens
  CDR3 for beta chain variable domain of TCR clone 173940 (TRBV12-4, TRBJ2-2)
CASSSGGNTGELFF

SEQ ID NO: 347881 - protein, 14 aa, Homo sapiens
  CDR3 for alpha chain variable domain of TCR clone 173941 (TRAV14/DV4, TRAJ57)
CAMREEGGSEKLVF

SEQ ID NO: 347882 - protein, 16 aa, Homo sapiens
  CDR3 for beta chain variable domain of TCR clone 173941 (TRBV6-6, TRBJ2-6)
CASNPGAGNGANVLTF

SEQ ID NO: 347883 - protein, 14 aa, Homo sapiens
  CDR3 for alpha chain variable domain of TCR clone 173942 (TRAV17, TRAJ42)
CAQNYGGSQGNLIF

SEQ ID NO: 347884 - protein, 13 aa, Homo sapiens
  CDR3 for beta chain variable domain of TCR clone 173942 (TRBV20-1, TRBJ1-2)
CSAPRSGRYVYTF

SEQ ID NO: 347885 - protein, 11 aa, Homo sapiens
  CDR3 for alpha chain variable domain of TCR clone 173943 (TRAV35, TRAJ30)
CAGPGDDKIIF

SEQ ID NO: 347886 - protein, 14 aa, Homo sapiens
  CDR3 for beta chain variable domain of TCR clone 173943 (TRBV7-6, TRBJ1-6)
CASSQAGGGSPLNF

SEQ ID NO: 347887 - protein, 15 aa, Homo sapiens
  CDR3 for alpha chain variable domain of TCR clone 173944 (TRAV29/DV5, TRAJ42)
CAAKTDGGNQGNLIF

SEQ ID NO: 347888 - protein, 15 aa, Homo sapiens
  CDR3 for beta chain variable domain of TCR clone 173944 (TRBV5-1, TRBJ2-2)
CASSSQGGNTGELFF

SEQ ID NO: 347889 - protein, 11 aa, Homo sapiens
  CDR3 for alpha chain variable domain of TCR clone 173945 (TRAV3, TRAJ49)
CAPITGNQFYF

SEQ ID NO: 347890 - protein, 16 aa, Homo sapiens
  CDR3 for beta chain variable domain of TCR clone 173945 (TRBV5-1, TRBJ2-1)
CARSLSSLRESNEQFF

SEQ ID NO: 347891 - protein, 12 aa, Homo sapiens
  CDR3 for alpha chain variable domain of TCR clone 173946 (TRAV13-2, TRAJ23)
CAERHRGGKLIF

SEQ ID NO: 347892 - protein, 15 aa, Homo sapiens
  CDR3 for beta chain variable domain of TCR clone 173946 (TRBV7-9, TRBJ1-6)
CASSSRGRGNSPLHF

SEQ ID NO: 347893 - protein, 15 aa, Homo sapiens
  CDR3 for alpha chain variable domain of TCR clone 173947 (TRAV8-4, TRAJ37)
CAVSTRSGNTGKLIF

SEQ ID NO: 347894 - protein, 14 aa, Homo sapiens
  CDR3 for beta chain variable domain of TCR clone 173947 (TRBV7-3, TRBJ2-1)
CASSLSGPYNEQFF

SEQ ID NO: 347895 - protein, 17 aa, Homo sapiens
  CDR3 for alpha chain variable domain of TCR clone 173948 (TRAV23/DV6, TRAJ28)
CAALLAYSGAGSYQLTF

SEQ ID NO: 347896 - protein, 13 aa, Homo sapiens
  CDR3 for beta chain variable domain of TCR clone 173948 (TRBV4-2, TRBJ2-3)
CTSSQGNTDTQYF

SEQ ID NO: 347897 - protein, 17 aa, Homo sapiens
  CDR3 for alpha chain variable domain of TCR clone 173949 (TRAV26-2, TRAJ32)
GRCCCVGYGGATNKLIF

SEQ ID NO: 347898 - protein, 13 aa, Homo sapiens
  CDR3 for beta chain variable domain of TCR clone 173949 (TRBV12-5, TRBJ2-3)
CASGDRQSDTQYF

SEQ ID NO: 347899 - protein, 15 aa, Homo sapiens
  CDR3 for alpha chain variable domain of TCR clone 173950 (TRAV35, TRAJ40)
CAGVPGASGTYKYIF

SEQ ID NO: 347900 - protein, 14 aa, Homo sapiens
  CDR3 for beta chain variable domain of TCR clone 173950 (TRBV4-1, TRBJ2-2)
CASSQAVNTGELFF

SEQ ID NO: 347901 - protein, 14 aa, Homo sapiens
  CDR3 for alpha chain variable domain of TCR clone 173951 (TRAV17, TRAJ42)
CAQNYGGSQGNLIF

SEQ ID NO: 347902 - protein, 13 aa, Homo sapiens
  CDR3 for beta chain variable domain of TCR clone 173951 (TRBV20-1, TRBJ1-2)
CSAPRAGRYGYTF

SEQ ID NO: 347903 - protein, 12 aa, Homo sapiens
  CDR3 for alpha chain variable domain of TCR clone 173952 (TRAV8-1, TRAJ40)
CAAVSGTYKYIF

SEQ ID NO: 347904 - protein, 15 aa, Homo sapiens
  CDR3 for beta chain variable domain of TCR clone 173952 (TRBV9, TRBJ2-1)
CASSLAGSSYNEQFF

SEQ ID NO: 347905 - protein, 12 aa, Homo sapiens
  CDR3 for alpha chain variable domain of TCR clone 173953 (TRAV36/DV7, TRAJ40)
CAVGTGTYKYIF

SEQ ID NO: 347906 - protein, 14 aa, Homo sapiens
  CDR3 for beta chain variable domain of TCR clone 173953 (TRBV19, TRBJ2-3)
CASSIGLGGDTQYF

SEQ ID NO: 347907 - protein, 15 aa, Homo sapiens
  CDR3 for alpha chain variable domain of TCR clone 173954 (TRAV16, TRAJ10)
CALEGRTGGGNKLTF

SEQ ID NO: 347908 - protein, 14 aa, Homo sapiens
  CDR3 for beta chain variable domain of TCR clone 173954 (TRBV7-6, TRBJ2-3)
CASSLGTVTDTQYF

SEQ ID NO: 347909 - protein, 17 aa, Homo sapiens
  CDR3 for alpha chain variable domain of TCR clone 173955 (TRAV26-1, TRAJ27)
CIVSTPWINTNAGKSTF

SEQ ID NO: 347910 - protein, 16 aa, Homo sapiens
  CDR3 for beta chain variable domain of TCR clone 173955 (TRBV7-9, TRBJ2-5)
CASSLDPGLAIDEQYF

SEQ ID NO: 347911 - protein, 14 aa, Homo sapiens
  CDR3 for alpha chain variable domain of TCR clone 173956 (TRAV20, TRAJ22)
CAVALGGSARQLTI

SEQ ID NO: 347912 - protein, 15 aa, Homo sapiens
  CDR3 for beta chain variable domain of TCR clone 173956 (TRBV7-2, TRBJ1-1)
CASSFAGDRDTEAFF

SEQ ID NO: 347913 - protein, 13 aa, Homo sapiens
  CDR3 for alpha chain variable domain of TCR clone 173957 (TRAV9-2, TRAJ58)
CSATGTSGSRLTF

SEQ ID NO: 347914 - protein, 14 aa, Homo sapiens
  CDR3 for beta chain variable domain of TCR clone 173957 (TRBV7-9, TRBJ2-1)
CASSPRYSLYEQFF

SEQ ID NO: 347915 - protein, 14 aa, Homo sapiens
  CDR3 for alpha chain variable domain of TCR clone 173958 (TRAV12-1, TRAJ23)
CVVIVYNQGGKHIF

SEQ ID NO: 347916 - protein, 13 aa, Homo sapiens
  CDR3 for beta chain variable domain of TCR clone 173958 (TRBV11-2, TRBJ2-5)
CASSFSSQETQYF

SEQ ID NO: 347917 - protein, 14 aa, Homo sapiens
  CDR3 for alpha chain variable domain of TCR clone 173959 (TRAV2, TRAJ9)
CAVEDRSGGFKSIF

SEQ ID NO: 347918 - protein, 14 aa, Homo sapiens
  CDR3 for beta chain variable domain of TCR clone 173959 (TRBV7-3, TRBJ2-1)
CASSLAGGTNEQFF

SEQ ID NO: 347919 - protein, 14 aa, Homo sapiens
  CDR3 for alpha chain variable domain of TCR clone 173960 (TRAV10, TRAJ48)
CVGVFHFGNEKLTF

SEQ ID NO: 347920 - protein, 13 aa, Homo sapiens
  CDR3 for beta chain variable domain of TCR clone 173960 (TRBV4-1, TRBJ2-7)
CARSQGQAYEQYF

SEQ ID NO: 347921 - protein, 14 aa, Homo sapiens
  CDR3 for alpha chain variable domain of TCR clone 173961 (TRAV20, TRAJ56)
CAVQFGGANSKLTF

SEQ ID NO: 347922 - protein, 13 aa, Homo sapiens
  CDR3 for beta chain variable domain of TCR clone 173961 (TRBV7-3, TRBJ1-2)
CASSLKRGYGYTF

SEQ ID NO: 347923 - protein, 14 aa, Homo sapiens
  CDR3 for alpha chain variable domain of TCR clone 173962 (TRAV12-3, TRAJ10)
SHLPLTGEGNKLTF

SEQ ID NO: 347924 - protein, 14 aa, Homo sapiens
  CDR3 for beta chain variable domain of TCR clone 173962 (TRBV25-1, TRBJ1-1)
CASTHLGGNTEAFF

SEQ ID NO: 347925 - protein, 12 aa, Homo sapiens
  CDR3 for alpha chain variable domain of TCR clone 173963 (TRAV20, TRAJ33)
CAVRGSNYQLIW

SEQ ID NO: 347926 - protein, 13 aa, Homo sapiens
  CDR3 for beta chain variable domain of TCR clone 173963 (TRBV4-3, TRBJ1-1)
CASSPTGSTEAFF

SEQ ID NO: 347927 - protein, 17 aa, Homo sapiens
  CDR3 for alpha chain variable domain of TCR clone 173964 (TRAV12-2, TRAJ52)
CAVNKGAGGTSYGKLTF

SEQ ID NO: 347928 - protein, 13 aa, Homo sapiens
  CDR3 for beta chain variable domain of TCR clone 173964 (TRBV20-1, TRBJ1-1)
CSARGGGSTEAFF

SEQ ID NO: 347929 - protein, 15 aa, Homo sapiens
  CDR3 for alpha chain variable domain of TCR clone 173965 (TRAV9-2, TRAJ49)
CALSPPDHTGNQFYF

SEQ ID NO: 347930 - protein, 14 aa, Homo sapiens
  CDR3 for beta chain variable domain of TCR clone 173965 (TRBV20-1, TRBJ1-1)
CSAQTRIGGTEAFF

SEQ ID NO: 347931 - protein, 13 aa, Homo sapiens
  CDR3 for alpha chain variable domain of TCR clone 173966 (TRAV21, TRAJ27)
CAARPGNAGTSTF

SEQ ID NO: 347932 - protein, 14 aa, Homo sapiens
  CDR3 for beta chain variable domain of TCR clone 173966 (TRBV7-6, TRBJ2-3)
CASSLETVTDTQYF

SEQ ID NO: 347933 - protein, 14 aa, Homo sapiens
  CDR3 for alpha chain variable domain of TCR clone 173967 (TRAV12-1, TRAJ30)
CVVNIGGRDDKIIF

SEQ ID NO: 347934 - protein, 13 aa, Homo sapiens
  CDR3 for beta chain variable domain of TCR clone 173967 (TRBV10-3, TRBJ1-2)
CAISERDSYGYTF

SEQ ID NO: 347935 - protein, 16 aa, Homo sapiens
  CDR3 for alpha chain variable domain of TCR clone 173968 (TRAV38-1, TRAJ42)
CAFRLVRGGSQGNLIF

SEQ ID NO: 347936 - protein, 15 aa, Homo sapiens
  CDR3 for beta chain variable domain of TCR clone 173968 (TRBV7-9, TRBJ1-6)
CASSSPGRGNSPLHF

SEQ ID NO: 347937 - protein, 20 aa, Homo sapiens
  CDR3 for alpha chain variable domain of TCR clone 173969 (TRAV21, TRAJ4)
AASQPGDSATLAGGYNKLIF

SEQ ID NO: 347938 - protein, 19 aa, Homo sapiens
  CDR3 for beta chain variable domain of TCR clone 173969 (TRBV18, TRBJ1-3)
CASSPLSRTGMSSGNTIYF

SEQ ID NO: 347939 - protein, 16 aa, Homo sapiens
  CDR3 for alpha chain variable domain of TCR clone 173970 (TRAV23/DV6, TRAJ9)
CAASIGGNTGGFKTIF

SEQ ID NO: 347940 - protein, 15 aa, Homo sapiens
  CDR3 for beta chain variable domain of TCR clone 173970 (TRBV12-4, TRBJ2-5)
CASSGTGQAQETQYF

SEQ ID NO: 347941 - protein, 11 aa, Homo sapiens
  CDR3 for alpha chain variable domain of TCR clone 173971 (TRAV12-1, TRAJ30)
CVVNGQDKIIF

SEQ ID NO: 347942 - protein, 17 aa, Homo sapiens
  CDR3 for beta chain variable domain of TCR clone 173971 (TRBV15, TRBJ1-2)
CATSGREIDVVNYGYTF

SEQ ID NO: 347943 - protein, 12 aa, Homo sapiens
  CDR3 for alpha chain variable domain of TCR clone 173972 (TRAV12-3, TRAJ17)
CAMTLTGNKRTF

SEQ ID NO: 347944 - protein, 15 aa, Homo sapiens
  CDR3 for beta chain variable domain of TCR clone 173972 (TRBV20-1, TRBJ2-7)
CSARDRVAGMDEQYF

SEQ ID NO: 347945 - protein, 14 aa, Homo sapiens
  CDR3 for alpha chain variable domain of TCR clone 173973 (TRAV27, TRAJ49)
CAGRPEGTGNQFYF

SEQ ID NO: 347946 - protein, 16 aa, Homo sapiens
  CDR3 for beta chain variable domain of TCR clone 173973 (TRBV12-5, TRBJ2-5)
CASGPRTSGNQETQCF

SEQ ID NO: 347947 - protein, 18 aa, Homo sapiens
  CDR3 for alpha chain variable domain of TCR clone 173974 (TRAV8-6, TRAJ52)
CAASRGGAGGTSYGKLTF

SEQ ID NO: 347948 - protein, 14 aa, Homo sapiens
  CDR3 for beta chain variable domain of TCR clone 173974 (TRBV7-2, TRBJ1-4)
CASSHSKTNEKLFF

SEQ ID NO: 347949 - protein, 13 aa, Homo sapiens
  CDR3 for alpha chain variable domain of TCR clone 173975 (TRAV8-6, TRAJ32)
CAVSDRATNKPIF

SEQ ID NO: 347950 - protein, 13 aa, Homo sapiens
  CDR3 for beta chain variable domain of TCR clone 173975 (TRBV11-2, TRBJ2-7)
CASSLDLGYEQYF

SEQ ID NO: 347951 - protein, 14 aa, Homo sapiens
  CDR3 for alpha chain variable domain of TCR clone 173976 (TRAV1-1, TRAJ23)
CAVKAYNQGGKLIF

SEQ ID NO: 347952 - protein, 12 aa, Homo sapiens
  CDR3 for beta chain variable domain of TCR clone 173976 (TRBV11-2, TRBJ2-1)
CASSPGNNEQFF

SEQ ID NO: 347953 - protein, 15 aa, Homo sapiens
  CDR3 for alpha chain variable domain of TCR clone 173977 (TRAV13-1, TRAJ32)
CAASIYGGATNKLIF

SEQ ID NO: 347954 - protein, 17 aa, Homo sapiens
  CDR3 for beta chain variable domain of TCR clone 173977 (TRBV7-6, TRBJ2-5)
CASSLGSGRSGSETQYF

SEQ ID NO: 347955 - protein, 14 aa, Homo sapiens
  CDR3 for alpha chain variable domain of TCR clone 173978 (TRAV8-3, TRAJ22)
CAVVVSGSARQLTF

SEQ ID NO: 347956 - protein, 13 aa, Homo sapiens
  CDR3 for beta chain variable domain of TCR clone 173978 (TRBV4-2, TRBJ2-4)
CASSQGGWQTQYF

SEQ ID NO: 347957 - protein, 11 aa, Homo sapiens
  CDR3 for alpha chain variable domain of TCR clone 173979 (TRAV1-2, TRAJ40)
CAVPGTYKYIF

SEQ ID NO: 347958 - protein, 15 aa, Homo sapiens
  CDR3 for beta chain variable domain of TCR clone 173979 (TRBV25-1, TRBJ1-4)
CASSPEDSTNEKLFF

SEQ ID NO: 347959 - protein, 14 aa, Homo sapiens
  CDR3 for alpha chain variable domain of TCR clone 173980 (TRAV12-1, TRAJ17)
CVVNHKAAGNQLTF

SEQ ID NO: 347960 - protein, 17 aa, Homo sapiens
  CDR3 for beta chain variable domain of TCR clone 173980 (TRBV20-1, TRBJ2-1)
CSASSSGLAGSYNEQFF

SEQ ID NO: 347961 - protein, 14 aa, Homo sapiens
  CDR3 for alpha chain variable domain of TCR clone 173981 (TRAV29/DV5, TRAJ36)
CAARRKTGANNLFF

SEQ ID NO: 347962 - protein, 19 aa, Homo sapiens
  CDR3 for beta chain variable domain of TCR clone 173981 (TRBV7-2, TRBJ2-3)
CASSFLSRNWGGGTDQQYF

SEQ ID NO: 347963 - protein, 13 aa, Homo sapiens
  CDR3 for alpha chain variable domain of TCR clone 173982 (TRAV27, TRAJ39)
CAGVNNAGNMLTF

SEQ ID NO: 347964 - protein, 13 aa, Homo sapiens
  CDR3 for beta chain variable domain of TCR clone 173982 (TRBV12-5, TRBJ2-3)
CASGERQSDTQYF

SEQ ID NO: 347965 - protein, 11 aa, Homo sapiens
  CDR3 for alpha chain variable domain of TCR clone 173983 (TRAV2, TRAJ33)
CAVESNYLLIW

SEQ ID NO: 347966 - protein, 15 aa, Homo sapiens
  CDR3 for beta chain variable domain of TCR clone 173983 (TRBV19, TRBJ1-1)
CASTSGQIQNTEAFF

SEQ ID NO: 347967 - protein, 10 aa, Homo sapiens
  CDR3 for alpha chain variable domain of TCR clone 173984 (TRAV2, TRAJ43)
CCGNNNDMRF

SEQ ID NO: 347968 - protein, 15 aa, Homo sapiens
  CDR3 for beta chain variable domain of TCR clone 173984 (TRBV2, TRBJ2-2)
CASSRETVGTGELFF

SEQ ID NO: 347969 - protein, 12 aa, Homo sapiens
  CDR3 for alpha chain variable domain of TCR clone 173985 (TRAV36/DV7, TRAJ40)
CAVGTGTYKYIF

SEQ ID NO: 347970 - protein, 14 aa, Homo sapiens
  CDR3 for beta chain variable domain of TCR clone 173985 (TRBV4-1, TRBJ1-1)
CASSRSGQSFEAFF

SEQ ID NO: 347971 - protein, 16 aa, Homo sapiens
  CDR3 for alpha chain variable domain of TCR clone 173986 (TRAV30, TRAJ24)
CGTEIVDADSWGKFQF

SEQ ID NO: 347972 - protein, 15 aa, Homo sapiens
  CDR3 for beta chain variable domain of TCR clone 173986 (TRBV6-3, TRBJ2-7)
CASSSPGTVGYEQYF

SEQ ID NO: 347973 - protein, 15 aa, Homo sapiens
  CDR3 for alpha chain variable domain of TCR clone 173987 (TRAV25, TRAJ41)
CAGPWNSNSVYALNF

SEQ ID NO: 347974 - protein, 13 aa, Homo sapiens
  CDR3 for beta chain variable domain of TCR clone 173987 (TRBV15, TRBJ1-1)
CATSRVIQARAFF

SEQ ID NO: 347975 - protein, 13 aa, Homo sapiens
  CDR3 for alpha chain variable domain of TCR clone 173988 (TRAV17, TRAJ9)
CATAITGGSKTIF

SEQ ID NO: 347976 - protein, 16 aa, Homo sapiens
  CDR3 for beta chain variable domain of TCR clone 173988 (TRBV15, TRBJ2-1)
CATSRNLAGGYNEQFF

SEQ ID NO: 347977 - protein, 14 aa, Homo sapiens
  CDR3 for alpha chain variable domain of TCR clone 173989 (TRAV17, TRAJ35)
CATDRPGFGNVLHC

SEQ ID NO: 347978 - protein, 14 aa, Homo sapiens
  CDR3 for beta chain variable domain of TCR clone 173989 (TRBV2, TRBJ2-7)
CASSLTSGGYEQYF

SEQ ID NO: 347979 - protein, 13 aa, Homo sapiens
  CDR3 for alpha chain variable domain of TCR clone 173990 (TRAV1-2, TRAJ9)
CAALNTGGFRTIF

SEQ ID NO: 347980 - protein, 13 aa, Homo sapiens
  CDR3 for beta chain variable domain of TCR clone 173990 (TRBV7-9, TRBJ1-2)
CASSLKQNYGYTF

SEQ ID NO: 347981 - protein, 14 aa, Homo sapiens
  CDR3 for alpha chain variable domain of TCR clone 173991 (TRAV13-1, TRAJ5)
CAASGGTGRRALTF

SEQ ID NO: 347982 - protein, 15 aa, Homo sapiens
  CDR3 for beta chain variable domain of TCR clone 173991 (TRBV7-9, TRBJ1-4)
CASSARTGGNEKLFF

SEQ ID NO: 347983 - protein, 13 aa, Homo sapiens
  CDR3 for alpha chain variable domain of TCR clone 173992 (TRAV8-6, TRAJ50)
CAVIKTSYDKVIF

SEQ ID NO: 347984 - protein, 15 aa, Homo sapiens
  CDR3 for beta chain variable domain of TCR clone 173992 (TRBV7-2, TRBJ2-2)
CASRRPGQNTGELFF

SEQ ID NO: 347985 - protein, 14 aa, Homo sapiens
  CDR3 for alpha chain variable domain of TCR clone 173993 (TRAV12-1, TRAJ42)
CMVIYGGSQGNLIF

SEQ ID NO: 347986 - protein, 13 aa, Homo sapiens
  CDR3 for beta chain variable domain of TCR clone 173993 (TRBV18, TRBJ2-5)
CASSPPGKETQYF

SEQ ID NO: 347987 - protein, 20 aa, Homo sapiens
  CDR3 for alpha chain variable domain of TCR clone 173994 (TRAV13-1, )
CAASPMDIQNHDPAVYQLRD

SEQ ID NO: 347988 - protein, 13 aa, Homo sapiens
  CDR3 for beta chain variable domain of TCR clone 173994 (TRBV20-1, TRBJ2-2)
CSASAAGTGELFF

SEQ ID NO: 347989 - protein, 13 aa, Homo sapiens
  CDR3 for alpha chain variable domain of TCR clone 173995 (TRAV21, TRAJ57)
CAVTQGGSEKLVF

SEQ ID NO: 347990 - protein, 14 aa, Homo sapiens
  CDR3 for beta chain variable domain of TCR clone 173995 (TRBV5-5, TRBJ2-7)
CASSLGQGTYEQYF

SEQ ID NO: 347991 - protein, 12 aa, Homo sapiens
  CDR3 for alpha chain variable domain of TCR clone 173996 (TRAV26-2, TRAJ48)
CILRKGDEKITF

SEQ ID NO: 347992 - protein, 14 aa, Homo sapiens
  CDR3 for beta chain variable domain of TCR clone 173996 (TRBV28, TRBJ2-7)
CASSTLRGRFEQYF

SEQ ID NO: 347993 - protein, 17 aa, Homo sapiens
  CDR3 for alpha chain variable domain of TCR clone 173997 (TRAV3, TRAJ6)
FAVRDGPRAGGSYIPTF

SEQ ID NO: 347994 - protein, 12 aa, Homo sapiens
  CDR3 for beta chain variable domain of TCR clone 173997 (TRBV11-2, TRBJ2-2)
CASSLGGGELFF

SEQ ID NO: 347995 - protein, 14 aa, Homo sapiens
  CDR3 for alpha chain variable domain of TCR clone 173998 (TRAV1-2, TRAJ8)
CAVREATGFQKLVF

SEQ ID NO: 347996 - protein, 16 aa, Homo sapiens
  CDR3 for beta chain variable domain of TCR clone 173998 (TRBV4-1, TRBJ1-4)
CASSQDLRRGGEKLFF

SEQ ID NO: 347997 - protein, 14 aa, Homo sapiens
  CDR3 for alpha chain variable domain of TCR clone 173999 (TRAV16, TRAJ33)
CALSAMDRNYQLIW

SEQ ID NO: 347998 - protein, 15 aa, Homo sapiens
  CDR3 for beta chain variable domain of TCR clone 173999 (TRBV28, TRBJ2-7)
CASSLEAYPIYEQYF

SEQ ID NO: 347999 - protein, 15 aa, Homo sapiens
  CDR3 for alpha chain variable domain of TCR clone 174000 (TRAV4, TRAJ39)
CLVGPNNNAGNMLTF

SEQ ID NO: 348000 - protein, 16 aa, Homo sapiens
  CDR3 for beta chain variable domain of TCR clone 174000 (TRBV7-9, TRBJ2-1)
CASSSLRQPDYNEQFF

SEQ ID NO: 348001 - protein, 17 aa, Homo sapiens
  CDR3 for alpha chain variable domain of TCR clone 174001 (TRAV3, TRAJ42)
CAVRDRDYGGSQGNLIV

SEQ ID NO: 348002 - protein, 13 aa, Homo sapiens
  CDR3 for beta chain variable domain of TCR clone 174001 (TRBV20-1, TRBJ2-5)
CSARRGTGATQYF

SEQ ID NO: 348003 - protein, 15 aa, Homo sapiens
  CDR3 for alpha chain variable domain of TCR clone 174002 (TRAV3, TRAJ11)
CAVRDRGSGYSTLTF

SEQ ID NO: 348004 - protein, 13 aa, Homo sapiens
  CDR3 for beta chain variable domain of TCR clone 174002 (TRBV10-3, TRBJ2-7)
CASKLAVNYEQYF

SEQ ID NO: 348005 - protein, 15 aa, Homo sapiens
  CDR3 for alpha chain variable domain of TCR clone 174003 (TRAV2, TRAJ15)
CAVEDREQAGTALIF

SEQ ID NO: 348006 - protein, 18 aa, Homo sapiens
  CDR3 for beta chain variable domain of TCR clone 174003 (TRBV12-4, TRBJ2-2)
CASSLVAGTRGRTGELFF

SEQ ID NO: 348007 - protein, 15 aa, Homo sapiens
  CDR3 for alpha chain variable domain of TCR clone 174004 (TRAV3, TRAJ9)
CAVRDSITGGFKTIF

SEQ ID NO: 348008 - protein, 14 aa, Homo sapiens
  CDR3 for beta chain variable domain of TCR clone 174004 (TRBV19, TRBJ2-1)
CASPTFVLSGEQFF

SEQ ID NO: 348009 - protein, 14 aa, Homo sapiens
  CDR3 for alpha chain variable domain of TCR clone 174005 (TRAV12-3, TRAJ57)
CAMSAWGGSEKLVF

SEQ ID NO: 348010 - protein, 15 aa, Homo sapiens
  CDR3 for beta chain variable domain of TCR clone 174005 (TRBV7-9, TRBJ1-6)
CASSSPGRGNSPLHF

SEQ ID NO: 348011 - protein, 13 aa, Homo sapiens
  CDR3 for alpha chain variable domain of TCR clone 174006 (TRAV12-3, TRAJ33)
CAMSVNSNDQLIW

SEQ ID NO: 348012 - protein, 14 aa, Homo sapiens
  CDR3 for beta chain variable domain of TCR clone 174006 (TRBV12-5, TRBJ2-5)
CASGSRTHQETQYF

SEQ ID NO: 348013 - protein, 14 aa, Homo sapiens
  CDR3 for alpha chain variable domain of TCR clone 174007 (TRAV12-2, TRAJ13)
CAVKKTGGYQKVTF

SEQ ID NO: 348014 - protein, 13 aa, Homo sapiens
  CDR3 for beta chain variable domain of TCR clone 174007 (TRBV20-1, TRBJ1-1)
CSAGLGQGTEAFF

SEQ ID NO: 348015 - protein, 13 aa, Homo sapiens
  CDR3 for alpha chain variable domain of TCR clone 174008 (TRAV2, TRAJ24)
CAVPTDSWGKLQF

SEQ ID NO: 348016 - protein, 15 aa, Homo sapiens
  CDR3 for beta chain variable domain of TCR clone 174008 (TRBV5-1, TRBJ2-3)
CASSVTSGSTDTQYF

SEQ ID NO: 348017 - protein, 15 aa, Homo sapiens
  CDR3 for alpha chain variable domain of TCR clone 174009 (TRAV17, TRAJ57)
CATGPSQGGSEKLVF

SEQ ID NO: 348018 - protein, 12 aa, Homo sapiens
  CDR3 for beta chain variable domain of TCR clone 174009 (TRBV20-1, TRBJ1-1)
CSARGGNTEAFF

SEQ ID NO: 348019 - protein, 13 aa, Homo sapiens
  CDR3 for alpha chain variable domain of TCR clone 174010 (TRAV16, TRAJ52)
CALRGTSYGKLTF

SEQ ID NO: 348020 - protein, 16 aa, Homo sapiens
  CDR3 for beta chain variable domain of TCR clone 174010 (TRBV13, TRBJ2-2)
CASSPRTGEHTGELFF

SEQ ID NO: 348021 - protein, 14 aa, Homo sapiens
  CDR3 for alpha chain variable domain of TCR clone 174011 (TRAV4, TRAJ12)
CLVGYMDSSYKLIF

SEQ ID NO: 348022 - protein, 18 aa, Homo sapiens
  CDR3 for beta chain variable domain of TCR clone 174011 (TRBV25-1, TRBJ1-2)
CASSGLQNGQGLIFGYTF

SEQ ID NO: 348023 - protein, 14 aa, Homo sapiens
  CDR3 for alpha chain variable domain of TCR clone 174012 (TRAV26-1, TRAJ38)
CISDNAGNNRKLIW

SEQ ID NO: 348024 - protein, 15 aa, Homo sapiens
  CDR3 for beta chain variable domain of TCR clone 174012 (TRBV7-6, TRBJ1-4)
CASSLGAGAGEKLFF

SEQ ID NO: 348025 - protein, 14 aa, Homo sapiens
  CDR3 for alpha chain variable domain of TCR clone 174013 (TRAV13-1, TRAJ35)
CAASKGGFGNVLHC

SEQ ID NO: 348026 - protein, 13 aa, Homo sapiens
  CDR3 for beta chain variable domain of TCR clone 174013 (TRBV7-3, TRBJ1-1)
CASSQNWGAEAFF

SEQ ID NO: 348027 - protein, 14 aa, Homo sapiens
  CDR3 for alpha chain variable domain of TCR clone 174014 (TRAV26-1, TRAJ38)
CIADNAGNNRKLIW

SEQ ID NO: 348028 - protein, 15 aa, Homo sapiens
  CDR3 for beta chain variable domain of TCR clone 174014 (TRBV12-4, TRBJ2-5)
CASSGTGQAQETQYF

SEQ ID NO: 348029 - protein, 13 aa, Homo sapiens
  CDR3 for alpha chain variable domain of TCR clone 174015 (TRAV13-1, TRAJ39)
CSKYSNAGDMLTF

SEQ ID NO: 348030 - protein, 14 aa, Homo sapiens
  CDR3 for beta chain variable domain of TCR clone 174015 (TRBV6-1, TRBJ1-3)
CASVQGGGGNTIYF

SEQ ID NO: 348031 - protein, 14 aa, Homo sapiens
  CDR3 for alpha chain variable domain of TCR clone 174016 (TRAV12-2, TRAJ40)
CAVKIPSGTYKYIF

SEQ ID NO: 348032 - protein, 13 aa, Homo sapiens
  CDR3 for beta chain variable domain of TCR clone 174016 (TRBV7-2, TRBJ1-2)
CASSSRGAYGYTF

SEQ ID NO: 348033 - protein, 14 aa, Homo sapiens
  CDR3 for alpha chain variable domain of TCR clone 174017 (TRAV22, TRAJ29)
CAVTRNSGNTPLAF

SEQ ID NO: 348034 - protein, 13 aa, Homo sapiens
  CDR3 for beta chain variable domain of TCR clone 174017 (TRBV18, TRBJ1-1)
CASSPETKPEAFF

SEQ ID NO: 348035 - protein, 18 aa, Homo sapiens
  CDR3 for alpha chain variable domain of TCR clone 174018 (TRAV12-2, )
CAVEDIQNPDPAVYQLRD

SEQ ID NO: 348036 - protein, 16 aa, Homo sapiens
  CDR3 for beta chain variable domain of TCR clone 174018 (TRBV12-4, TRBJ2-1)
CASSLSTSGSYNEQFF

SEQ ID NO: 348037 - protein, 17 aa, Homo sapiens
  CDR3 for alpha chain variable domain of TCR clone 174019 (TRAV21, TRAJ52)
CCEAFPAGGTSYGKLKF

SEQ ID NO: 348038 - protein, 13 aa, Homo sapiens
  CDR3 for beta chain variable domain of TCR clone 174019 (TRBV7-3, TRBJ1-1)
CASSQDWGAEAFF

SEQ ID NO: 348039 - protein, 13 aa, Homo sapiens
  CDR3 for alpha chain variable domain of TCR clone 174020 (TRAV3, TRAJ29)
CAVSDWGNTPLVF

SEQ ID NO: 348040 - protein, 15 aa, Homo sapiens
  CDR3 for beta chain variable domain of TCR clone 174020 (TRBV12-4, TRBJ2-5)
CASIGRTGEGETQYF

SEQ ID NO: 348041 - protein, 11 aa, Homo sapiens
  CDR3 for alpha chain variable domain of TCR clone 174021 (TRAV12-1, TRAJ30)
CMVNGQDKIIF

SEQ ID NO: 348042 - protein, 12 aa, Homo sapiens
  CDR3 for beta chain variable domain of TCR clone 174021 (TRBV27, TRBJ2-2)
CASKLFTGELFF

SEQ ID NO: 348043 - protein, 14 aa, Homo sapiens
  CDR3 for alpha chain variable domain of TCR clone 174022 (TRAV1-2, TRAJ8)
CSVREDTGCQKLVF

SEQ ID NO: 348044 - protein, 15 aa, Homo sapiens
  CDR3 for beta chain variable domain of TCR clone 174022 (TRBV6-3, TRBJ2-7)
CASSSPGTVFYEQYF

SEQ ID NO: 348045 - protein, 14 aa, Homo sapiens
  CDR3 for alpha chain variable domain of TCR clone 174023 (TRAV26-1, TRAJ45)
CIEVTGGGADGLTF

SEQ ID NO: 348046 - protein, 12 aa, Homo sapiens
  CDR3 for beta chain variable domain of TCR clone 174023 (TRBV12-4, TRBJ2-7)
CASSLVGYEQYF

SEQ ID NO: 348047 - protein, 13 aa, Homo sapiens
  CDR3 for alpha chain variable domain of TCR clone 174024 (TRAV23/DV6, TRAJ9)
CAASIDCKGLVIM

SEQ ID NO: 348048 - protein, 15 aa, Homo sapiens
  CDR3 for beta chain variable domain of TCR clone 174024 (TRBV6-3, TRBJ2-1)
CASSYASDSYNEQFF

SEQ ID NO: 348049 - protein, 14 aa, Homo sapiens
  CDR3 for alpha chain variable domain of TCR clone 174025 (TRAV26-1, TRAJ38)
CIADNSGNNRKLIW

SEQ ID NO: 348050 - protein, 16 aa, Homo sapiens
  CDR3 for beta chain variable domain of TCR clone 174025 (TRBV20-1, TRBJ2-7)
CSASTSGRLSSYEQYF

SEQ ID NO: 348051 - protein, 18 aa, Homo sapiens
  CDR3 for alpha chain variable domain of TCR clone 174026 (TRAV21, TRAJ52)
CAVRPSPAGGTSYVKLTF

SEQ ID NO: 348052 - protein, 17 aa, Homo sapiens
  CDR3 for beta chain variable domain of TCR clone 174026 (TRBV13, TRBJ2-3)
CASSLSKVGGGRNTQYF

SEQ ID NO: 348053 - protein, 18 aa, Homo sapiens
  CDR3 for alpha chain variable domain of TCR clone 174027 (TRAV21, TRAJ52)
CAVRPSPAGGTCYGKLTF

SEQ ID NO: 348054 - protein, 16 aa, Homo sapiens
  CDR3 for beta chain variable domain of TCR clone 174027 (TRBV7-3, TRBJ2-1)
CASSLEGYRSHNEQFF

SEQ ID NO: 348055 - protein, 12 aa, Homo sapiens
  CDR3 for alpha chain variable domain of TCR clone 174028 (TRAV21, TRAJ33)
CAKMDSNYQLIW

SEQ ID NO: 348056 - protein, 11 aa, Homo sapiens
  CDR3 for beta chain variable domain of TCR clone 174028 (TRBV7-9, TRBJ2-5)
CASSLGETQYF

SEQ ID NO: 348057 - protein, 13 aa, Homo sapiens
  CDR3 for alpha chain variable domain of TCR clone 174029 (TRAV21, TRAJ27)
CAALNTNAGKSTF

SEQ ID NO: 348058 - protein, 12 aa, Homo sapiens
  CDR3 for beta chain variable domain of TCR clone 174029 (TRBV27, TRBJ2-7)
CASSGGFYEQYF

SEQ ID NO: 348059 - protein, 12 aa, Homo sapiens
  CDR3 for alpha chain variable domain of TCR clone 174030 (TRAV2, TRAJ36)
CAELTGANNLFF

SEQ ID NO: 348060 - protein, 12 aa, Homo sapiens
  CDR3 for beta chain variable domain of TCR clone 174030 (TRBV11-2, TRBJ2-2)
CASSLGGGELFF

SEQ ID NO: 348061 - protein, 14 aa, Homo sapiens
  CDR3 for alpha chain variable domain of TCR clone 174031 (TRAV12-3, TRAJ21)
CAATDLYNFNKFSF

SEQ ID NO: 348062 - protein, 13 aa, Homo sapiens
  CDR3 for beta chain variable domain of TCR clone 174031 (TRBV19, TRBJ2-2)
CASSSKNTGELFF

SEQ ID NO: 348063 - protein, 17 aa, Homo sapiens
  CDR3 for alpha chain variable domain of TCR clone 174032 (TRAV23/DV6, TRAJ58)
CAARLLRGETSGSRLTF

SEQ ID NO: 348064 - protein, 16 aa, Homo sapiens
  CDR3 for beta chain variable domain of TCR clone 174032 (TRBV7-3, TRBJ2-2)
CASSLKRGTLSGELFF

SEQ ID NO: 348065 - protein, 14 aa, Homo sapiens
  CDR3 for alpha chain variable domain of TCR clone 174033 (TRAV17, TRAJ57)
CATDPQGGSEKLVF

SEQ ID NO: 348066 - protein, 14 aa, Homo sapiens
  CDR3 for beta chain variable domain of TCR clone 174033 (TRBV2, TRBJ2-7)
CASSLTSGGYEQYF

SEQ ID NO: 348067 - protein, 14 aa, Homo sapiens
  CDR3 for alpha chain variable domain of TCR clone 174034 (TRAV12-1, TRAJ17)
CVVNFKAAGNKLTF

SEQ ID NO: 348068 - protein, 17 aa, Homo sapiens
  CDR3 for beta chain variable domain of TCR clone 174034 (TRBV20-1, TRBJ2-1)
CSASASGLAGSYNEQFF

SEQ ID NO: 348069 - protein, 14 aa, Homo sapiens
  CDR3 for alpha chain variable domain of TCR clone 174035 (TRAV29/DV5, TRAJ49)
CAASLSNPGNQFYF

SEQ ID NO: 348070 - protein, 16 aa, Homo sapiens
  CDR3 for beta chain variable domain of TCR clone 174035 (TRBV9, TRBJ2-5)
CASRGRLGEGRKTQYF

SEQ ID NO: 348071 - protein, 17 aa, Homo sapiens
  CDR3 for alpha chain variable domain of TCR clone 174036 (TRAV26-1, TRAJ37)
CIVRVITVSSNTGKLIF

SEQ ID NO: 348072 - protein, 14 aa, Homo sapiens
  CDR3 for beta chain variable domain of TCR clone 174036 (TRBV19, TRBJ2-1)
CASPTCVLSGEQFF

SEQ ID NO: 348073 - protein, 11 aa, Homo sapiens
  CDR3 for alpha chain variable domain of TCR clone 174037 (TRAV12-3, TRAJ20)
CNGRGDYKLSF

SEQ ID NO: 348074 - protein, 14 aa, Homo sapiens
  CDR3 for beta chain variable domain of TCR clone 174037 (TRBV5-5, TRBJ1-5)
CASSGQGVDQPQHF

SEQ ID NO: 348075 - protein, 14 aa, Homo sapiens
  CDR3 for alpha chain variable domain of TCR clone 174038 (TRAV1-2, TRAJ16)
CAVNRFSDDQKLLF

SEQ ID NO: 348076 - protein, 11 aa, Homo sapiens
  CDR3 for beta chain variable domain of TCR clone 174038 (TRBV11-2, TRBJ2-2)
CASSLPGELFF

SEQ ID NO: 348077 - protein, 20 aa, Homo sapiens
  CDR3 for alpha chain variable domain of TCR clone 174039 (TRAV26-2, TRAJ43)
CCVLLHPETRALYNNNDMRF

SEQ ID NO: 348078 - protein, 16 aa, Homo sapiens
  CDR3 for beta chain variable domain of TCR clone 174039 (TRBV19, TRBJ2-2)
CASRSPGTGATGELFF

SEQ ID NO: 348079 - protein, 12 aa, Homo sapiens
  CDR3 for alpha chain variable domain of TCR clone 174040 (TRAV12-3, TRAJ4)
CAMSGAGTRLAV

SEQ ID NO: 348080 - protein, 14 aa, Homo sapiens
  CDR3 for beta chain variable domain of TCR clone 174040 (TRBV10-3, TRBJ1-1)
CAISDTDRGVEAFF

SEQ ID NO: 348081 - protein, 12 aa, Homo sapiens
  CDR3 for alpha chain variable domain of TCR clone 174041 (TRAV17, TRAJ12)
CATLRSSYKLIF

SEQ ID NO: 348082 - protein, 12 aa, Homo sapiens
  CDR3 for beta chain variable domain of TCR clone 174041 (TRBV11-2, TRBJ2-1)
CASSPGNNEQFF

SEQ ID NO: 348083 - protein, 12 aa, Homo sapiens
  CDR3 for alpha chain variable domain of TCR clone 174042 (TRAV13-1, TRAJ21)
CAAKEGFDKFYF

SEQ ID NO: 348084 - protein, 14 aa, Homo sapiens
  CDR3 for beta chain variable domain of TCR clone 174042 (TRBV18, TRBJ2-7)
CASSPRGGAYEQYF

SEQ ID NO: 348085 - protein, 16 aa, Homo sapiens
  CDR3 for alpha chain variable domain of TCR clone 174043 (TRAV21, TRAJ33)
CAVSPASLDSNYQLIW

SEQ ID NO: 348086 - protein, 17 aa, Homo sapiens
  CDR3 for beta chain variable domain of TCR clone 174043 (TRBV2, TRBJ1-4)
CASSKRELTQGEEKLFF

SEQ ID NO: 348087 - protein, 16 aa, Homo sapiens
  CDR3 for alpha chain variable domain of TCR clone 174044 (TRAV3, TRAJ10)
CAVRDMRAGRGNKLTF

SEQ ID NO: 348088 - protein, 15 aa, Homo sapiens
  CDR3 for beta chain variable domain of TCR clone 174044 (TRBV11-2, TRBJ1-6)
CASTGFGTAVSPLHF

SEQ ID NO: 348089 - protein, 17 aa, Homo sapiens
  CDR3 for alpha chain variable domain of TCR clone 174045 (TRAV13-1, TRAJ28)
CAASPPYSGAGSYQLTF

SEQ ID NO: 348090 - protein, 15 aa, Homo sapiens
  CDR3 for beta chain variable domain of TCR clone 174045 (TRBV28, TRBJ2-1)
CASSIIAGGRSEQFF

SEQ ID NO: 348091 - protein, 11 aa, Homo sapiens
  CDR3 for alpha chain variable domain of TCR clone 174046 (TRAV12-1, TRAJ43)
CVEYDNNDMRF

SEQ ID NO: 348092 - protein, 13 aa, Homo sapiens
  CDR3 for beta chain variable domain of TCR clone 174046 (TRBV19, TRBJ1-1)
CASKLPLNTEAFF

SEQ ID NO: 348093 - protein, 12 aa, Homo sapiens
  CDR3 for alpha chain variable domain of TCR clone 174047 (TRAV17, TRAJ57)
CATDGGSEKLVF

SEQ ID NO: 348094 - protein, 14 aa, Homo sapiens
  CDR3 for beta chain variable domain of TCR clone 174047 (TRBV7-9, TRBJ2-7)
CASSLGGSSYEQYF

SEQ ID NO: 348095 - protein, 15 aa, Homo sapiens
  CDR3 for alpha chain variable domain of TCR clone 174048 (TRAV13-2, TRAJ23)
CAERGFYNQGRKLIF

SEQ ID NO: 348096 - protein, 14 aa, Homo sapiens
  CDR3 for beta chain variable domain of TCR clone 174048 (TRBV4-1, TRBJ2-3)
CASSQDWSTDTQYF

SEQ ID NO: 348097 - protein, 16 aa, Homo sapiens
  CDR3 for alpha chain variable domain of TCR clone 174049 (TRAV1-2, TRAJ10)
CAVRGVLTGGGNKLTF

SEQ ID NO: 348098 - protein, 20 aa, Homo sapiens
  CDR3 for beta chain variable domain of TCR clone 174049 (TRBV7-8, TRBJ2-2)
CASSHLFPRPTIHITGELFF

SEQ ID NO: 348099 - protein, 15 aa, Homo sapiens
  CDR3 for alpha chain variable domain of TCR clone 174050 (TRAV8-3, TRAJ27)
CSVGPSKTNAGKSTF

SEQ ID NO: 348100 - protein, 15 aa, Homo sapiens
  CDR3 for beta chain variable domain of TCR clone 174050 (TRBV7-2, TRBJ2-1)
CASSSGLAEGNEQFF

SEQ ID NO: 348101 - protein, 14 aa, Homo sapiens
  CDR3 for alpha chain variable domain of TCR clone 174051 (TRAV26-1, TRAJ21)
CIVRVLGNFNKFYF

SEQ ID NO: 348102 - protein, 15 aa, Homo sapiens
  CDR3 for beta chain variable domain of TCR clone 174051 (TRBV6-1, TRBJ2-7)
CASSEAVAGVAGQYF

SEQ ID NO: 348103 - protein, 14 aa, Homo sapiens
  CDR3 for alpha chain variable domain of TCR clone 174052 (TRAV12-2, TRAJ40)
CAVKIPSGTYKYIF

SEQ ID NO: 348104 - protein, 14 aa, Homo sapiens
  CDR3 for beta chain variable domain of TCR clone 174052 (TRBV18, TRBJ2-5)
CASSPLSVQETQYF

SEQ ID NO: 348105 - protein, 13 aa, Homo sapiens
  CDR3 for alpha chain variable domain of TCR clone 174053 (TRAV17, TRAJ40)
CATDEGGTYKSIF

SEQ ID NO: 348106 - protein, 13 aa, Homo sapiens
  CDR3 for beta chain variable domain of TCR clone 174053 (TRBV6-3, TRBJ2-5)
CASSYRMTETQYF

SEQ ID NO: 348107 - protein, 14 aa, Homo sapiens
  CDR3 for alpha chain variable domain of TCR clone 174054 (TRAV2, TRAJ37)
CAVDFTSNTGKLIF

SEQ ID NO: 348108 - protein, 14 aa, Homo sapiens
  CDR3 for beta chain variable domain of TCR clone 174054 (TRBV7-2, TRBJ2-7)
CASSPETSFYEQYF

SEQ ID NO: 348109 - protein, 14 aa, Homo sapiens
  CDR3 for alpha chain variable domain of TCR clone 174055 (TRAV8-4, TRAJ8)
CAVSEDTGFQKLVF

SEQ ID NO: 348110 - protein, 14 aa, Homo sapiens
  CDR3 for beta chain variable domain of TCR clone 174055 (TRBV7-3, TRBJ1-1)
CASSLKGGNTEAFF

SEQ ID NO: 348111 - protein, 14 aa, Homo sapiens
  CDR3 for alpha chain variable domain of TCR clone 174056 (TRAV17, TRAJ6)
CATNPAGGSYIPTF

SEQ ID NO: 348112 - protein, 14 aa, Homo sapiens
  CDR3 for beta chain variable domain of TCR clone 174056 (TRBV7-2, TRBJ1-2)
CASSQTGSTYGYTF

SEQ ID NO: 348113 - protein, 14 aa, Homo sapiens
  CDR3 for alpha chain variable domain of TCR clone 174057 (TRAV12-3, TRAJ20)
CAMSARRGDYKLSF

SEQ ID NO: 348114 - protein, 14 aa, Homo sapiens
  CDR3 for beta chain variable domain of TCR clone 174057 (TRBV7-3, TRBJ2-3)
CASSPSARTDTHYF

SEQ ID NO: 348115 - protein, 14 aa, Homo sapiens
  CDR3 for alpha chain variable domain of TCR clone 174058 (TRAV13-1, TRAJ26)
CAAPKGPDGQTFVF

SEQ ID NO: 348116 - protein, 15 aa, Homo sapiens
  CDR3 for beta chain variable domain of TCR clone 174058 (TRBV28, TRBJ2-5)
CASSFRQGALETQYF

SEQ ID NO: 348117 - protein, 14 aa, Homo sapiens
  CDR3 for alpha chain variable domain of TCR clone 174059 (TRAV1-2, TRAJ15)
CAVRDRQAGTALIF

SEQ ID NO: 348118 - protein, 14 aa, Homo sapiens
  CDR3 for beta chain variable domain of TCR clone 174059 (TRBV7-8, TRBJ2-7)
CASSPRDRVYEQYL

SEQ ID NO: 348119 - protein, 14 aa, Homo sapiens
  CDR3 for alpha chain variable domain of TCR clone 174060 (TRAV8-2, TRAJ37)
CVVSISGNPGKLIF

SEQ ID NO: 348120 - protein, 13 aa, Homo sapiens
  CDR3 for beta chain variable domain of TCR clone 174060 (TRBV7-8, TRBJ2-7)
RRVRLTEMGEQYF

SEQ ID NO: 348121 - protein, 13 aa, Homo sapiens
  CDR3 for alpha chain variable domain of TCR clone 174061 (TRAV21, TRAJ27)
CAALNTNAGKSIF

SEQ ID NO: 348122 - protein, 14 aa, Homo sapiens
  CDR3 for beta chain variable domain of TCR clone 174061 (TRBV27, TRBJ1-1)
CASSLLSGLSEAFF

SEQ ID NO: 348123 - protein, 15 aa, Homo sapiens
  CDR3 for alpha chain variable domain of TCR clone 174062 (TRAV8-3, TRAJ11)
CAVGLLNSGYSTLTF

SEQ ID NO: 348124 - protein, 20 aa, Homo sapiens
  CDR3 for beta chain variable domain of TCR clone 174062 (TRBV7-9, TRBJ1-5)
CISVSEAGQGAPYSNQPQHF

SEQ ID NO: 348125 - protein, 15 aa, Homo sapiens
  CDR3 for alpha chain variable domain of TCR clone 174063 (TRAV26-1, TRAJ29)
CIVRVEGSGNTPLFF

SEQ ID NO: 348126 - protein, 13 aa, Homo sapiens
  CDR3 for beta chain variable domain of TCR clone 174063 (TRBV6-1, TRBJ2-1)
CASSETGVSEQFF

SEQ ID NO: 348127 - protein, 18 aa, Homo sapiens
  CDR3 for alpha chain variable domain of TCR clone 174064 (TRAV13-1, TRAJ52)
CAAKNPYAGGTSYGKLTF

SEQ ID NO: 348128 - protein, 14 aa, Homo sapiens
  CDR3 for beta chain variable domain of TCR clone 174064 (TRBV7-8, TRBJ2-3)
CASSLEAGTDTQYF

SEQ ID NO: 348129 - protein, 14 aa, Homo sapiens
  CDR3 for alpha chain variable domain of TCR clone 174065 (TRAV12-2, TRAJ11)
CAVEGGSGYSTLTF

SEQ ID NO: 348130 - protein, 15 aa, Homo sapiens
  CDR3 for beta chain variable domain of TCR clone 174065 (TRBV28, TRBJ2-3)
CAPTFRDWSTDTQYF

SEQ ID NO: 348131 - protein, 13 aa, Homo sapiens
  CDR3 for alpha chain variable domain of TCR clone 174066 (TRAV8-1, TRAJ34)
CAVWPYNTDKLIF

SEQ ID NO: 348132 - protein, 15 aa, Homo sapiens
  CDR3 for beta chain variable domain of TCR clone 174066 (TRBV7-9, TRBJ1-3)
CASSLRSGSGNTIYF

SEQ ID NO: 348133 - protein, 18 aa, Homo sapiens
  CDR3 for alpha chain variable domain of TCR clone 174067 (TRAV9-2, TRAJ52)
CALSRHNAGVTSYVKLTF

SEQ ID NO: 348134 - protein, 13 aa, Homo sapiens
  CDR3 for beta chain variable domain of TCR clone 174067 (TRBV7-9, TRBJ1-2)
CASSLKQNYGYTF

SEQ ID NO: 348135 - protein, 23 aa, Homo sapiens
  CDR3 for alpha chain variable domain of TCR clone 174068 (TRAV26-1, TRAJ38)
CIVRPLNAGNNHIQNPDPAVYQL

SEQ ID NO: 348136 - protein, 13 aa, Homo sapiens
  CDR3 for beta chain variable domain of TCR clone 174068 (TRBV18, TRBJ1-1)
CASSPNGDTEAFF

SEQ ID NO: 348137 - protein, 13 aa, Homo sapiens
  CDR3 for alpha chain variable domain of TCR clone 174069 (TRAV13-1, TRAJ39)
CSKYSNAGNMLTF

SEQ ID NO: 348138 - protein, 15 aa, Homo sapiens
  CDR3 for beta chain variable domain of TCR clone 174069 (TRBV5-1, TRBJ2-1)
CASSPPRAPYNEQFF

SEQ ID NO: 348139 - protein, 18 aa, Homo sapiens
  CDR3 for alpha chain variable domain of TCR clone 174070 (TRAV13-1, TRAJ52)
CAAKNPNAGGTSYGKLTF

SEQ ID NO: 348140 - protein, 12 aa, Homo sapiens
  CDR3 for beta chain variable domain of TCR clone 174070 (TRBV3-1, TRBJ1-1)
CASSQDPTEAFF

SEQ ID NO: 348141 - protein, 12 aa, Homo sapiens
  CDR3 for alpha chain variable domain of TCR clone 174071 (TRAV13-2, TRAJ23)
CAERHRGGKLIF

SEQ ID NO: 348142 - protein, 15 aa, Homo sapiens
  CDR3 for beta chain variable domain of TCR clone 174071 (TRBV5-1, TRBJ2-7)
CASSTSGGPTYEQYF

SEQ ID NO: 348143 - protein, 13 aa, Homo sapiens
  CDR3 for alpha chain variable domain of TCR clone 174072 (TRAV1-1, TRAJ23)
CAVVANQGGKLIF

SEQ ID NO: 348144 - protein, 16 aa, Homo sapiens
  CDR3 for beta chain variable domain of TCR clone 174072 (TRBV5-5, TRBJ1-2)
CASSPTWGRALYGYTF

SEQ ID NO: 348145 - protein, 12 aa, Homo sapiens
  CDR3 for alpha chain variable domain of TCR clone 174073 (TRAV12-3, TRAJ5)
CAMDTGRRALTF

SEQ ID NO: 348146 - protein, 14 aa, Homo sapiens
  CDR3 for beta chain variable domain of TCR clone 174073 (TRBV6-1, TRBJ1-3)
CASVQGGGGNTIYF

SEQ ID NO: 348147 - protein, 14 aa, Homo sapiens
  CDR3 for alpha chain variable domain of TCR clone 174074 (TRAV12-3, TRAJ10)
SHLPLTGGGDKLTF

SEQ ID NO: 348148 - protein, 16 aa, Homo sapiens
  CDR3 for beta chain variable domain of TCR clone 174074 (TRBV19, TRBJ2-1)
CASSKAGPSSYNEQFF

SEQ ID NO: 348149 - protein, 15 aa, Homo sapiens
  CDR3 for alpha chain variable domain of TCR clone 174075 (TRAV26-1, TRAJ29)
CIVRVEGSGNTPLVF

SEQ ID NO: 348150 - protein, 15 aa, Homo sapiens
  CDR3 for beta chain variable domain of TCR clone 174075 (TRBV12-4, TRBJ1-1)
CQQQDRVVANTDAFF

SEQ ID NO: 348151 - protein, 18 aa, Homo sapiens
  CDR3 for alpha chain variable domain of TCR clone 174076 (TRAV1-2, TRAJ18)
CAVIDMGDRGSTLGRLYF

SEQ ID NO: 348152 - protein, 16 aa, Homo sapiens
  CDR3 for beta chain variable domain of TCR clone 174076 (TRBV29-1, TRBJ1-2)
CSVEANRDIANYGYTF

SEQ ID NO: 348153 - protein, 13 aa, Homo sapiens
  CDR3 for alpha chain variable domain of TCR clone 174077 (TRAV8-3, TRAJ43)
CAVGPDNNNDMRF

SEQ ID NO: 348154 - protein, 12 aa, Homo sapiens
  CDR3 for beta chain variable domain of TCR clone 174077 (TRBV7-2, TRBJ1-6)
CASRLSSSPLHF

SEQ ID NO: 348155 - protein, 14 aa, Homo sapiens
  CDR3 for alpha chain variable domain of TCR clone 174078 (TRAV4, TRAJ17)
CLVGPRAAGNKLTF

SEQ ID NO: 348156 - protein, 13 aa, Homo sapiens
  CDR3 for beta chain variable domain of TCR clone 174078 (TRBV7-9, TRBJ1-2)
CASSLKQNYGYTF

SEQ ID NO: 348157 - protein, 18 aa, Homo sapiens
  CDR3 for alpha chain variable domain of TCR clone 174079 (TRAV21, TRAJ52)
RAVRPSPAGGTSYRKLTF

SEQ ID NO: 348158 - protein, 15 aa, Homo sapiens
  CDR3 for beta chain variable domain of TCR clone 174079 (TRBV19, TRBJ1-1)
CASTSGQIQNTEAFF

SEQ ID NO: 348159 - protein, 16 aa, Homo sapiens
  CDR3 for alpha chain variable domain of TCR clone 174080 (TRAV17, TRAJ52)
CATGILGGTSYGKLTF

SEQ ID NO: 348160 - protein, 14 aa, Homo sapiens
  CDR3 for beta chain variable domain of TCR clone 174080 (TRBV7-3, TRBJ2-2)
CASSSGGYTGELFF

SEQ ID NO: 348161 - protein, 15 aa, Homo sapiens
  CDR3 for alpha chain variable domain of TCR clone 174081 (TRAV12-3, TRAJ27)
CAMRAYNTNAGKSTF

SEQ ID NO: 348162 - protein, 13 aa, Homo sapiens
  CDR3 for beta chain variable domain of TCR clone 174081 (TRBV15, TRBJ1-6)
CATSGGLNSPLHF

SEQ ID NO: 348163 - protein, 15 aa, Homo sapiens
  CDR3 for alpha chain variable domain of TCR clone 174082 (TRAV20, TRAJ53)
CAVQASGVSNYKLTF

SEQ ID NO: 348164 - protein, 12 aa, Homo sapiens
  CDR3 for beta chain variable domain of TCR clone 174082 (TRBV7-8, TRBJ2-7)
CASSLGDREQYF

SEQ ID NO: 348165 - protein, 13 aa, Homo sapiens
  CDR3 for alpha chain variable domain of TCR clone 174083 (TRAV3, TRAJ20)
CAVRSLNDYKLSF

SEQ ID NO: 348166 - protein, 13 aa, Homo sapiens
  CDR3 for beta chain variable domain of TCR clone 174083 (TRBV7-3, TRBJ1-1)
CAGSQDWGAEAFF

SEQ ID NO: 348167 - protein, 14 aa, Homo sapiens
  CDR3 for alpha chain variable domain of TCR clone 174084 (TRAV21, TRAJ12)
CAVRNGDSSYKLFF

SEQ ID NO: 348168 - protein, 14 aa, Homo sapiens
  CDR3 for beta chain variable domain of TCR clone 174084 (TRBV7-6, TRBJ2-7)
CASSLTGTGNEQYF

SEQ ID NO: 348169 - protein, 13 aa, Homo sapiens
  CDR3 for alpha chain variable domain of TCR clone 174085 (TRAV26-2, TRAJ57)
CILSRGGSEKLVF

SEQ ID NO: 348170 - protein, 17 aa, Homo sapiens
  CDR3 for beta chain variable domain of TCR clone 174085 (TRBV4-1, TRBJ1-4)
CASSQEGPRGVEEKLFF

SEQ ID NO: 348171 - protein, 12 aa, Homo sapiens
  CDR3 for alpha chain variable domain of TCR clone 174086 (TRAV21, TRAJ33)
CAVQDSDYQLIW

SEQ ID NO: 348172 - protein, 14 aa, Homo sapiens
  CDR3 for beta chain variable domain of TCR clone 174086 (TRBV28, TRBJ2-1)
CASSAGEGGNEQFF

SEQ ID NO: 348173 - protein, 12 aa, Homo sapiens
  CDR3 for alpha chain variable domain of TCR clone 174087 (TRAV4, TRAJ26)
CLVGDSGQNFVF

SEQ ID NO: 348174 - protein, 16 aa, Homo sapiens
  CDR3 for beta chain variable domain of TCR clone 174087 (TRBV7-2, TRBJ1-2)
CASSSNQDRRGYGYTF

SEQ ID NO: 348175 - protein, 13 aa, Homo sapiens
  CDR3 for alpha chain variable domain of TCR clone 174088 (TRAV13-2, TRAJ48)
CPEMDFGNEKLTF

SEQ ID NO: 348176 - protein, 14 aa, Homo sapiens
  CDR3 for beta chain variable domain of TCR clone 174088 (TRBV19, TRBJ2-7)
CASSMGQGAIEQYF

SEQ ID NO: 348177 - protein, 13 aa, Homo sapiens
  CDR3 for alpha chain variable domain of TCR clone 174089 (TRAV3, TRAJ21)
CAVREPDFNKFYF

SEQ ID NO: 348178 - protein, 16 aa, Homo sapiens
  CDR3 for beta chain variable domain of TCR clone 174089 (TRBV11-2, TRBJ2-3)
CASSSRTSGGAGTQYF

SEQ ID NO: 348179 - protein, 16 aa, Homo sapiens
  CDR3 for alpha chain variable domain of TCR clone 174090 (TRAV3, TRAJ37)
CAVRVRGPGNTGKLIF

SEQ ID NO: 348180 - protein, 13 aa, Homo sapiens
  CDR3 for beta chain variable domain of TCR clone 174090 (TRBV7-9, TRBJ1-2)
CASSLKQNYGYTF

SEQ ID NO: 348181 - protein, 15 aa, Homo sapiens
  CDR3 for alpha chain variable domain of TCR clone 174091 (TRAV26-2, TRAJ16)
CILSLRFSYGQKLLF

SEQ ID NO: 348182 - protein, 13 aa, Homo sapiens
  CDR3 for beta chain variable domain of TCR clone 174091 (TRBV10-3, TRBJ2-7)
CAIRPTEAYEQYF

SEQ ID NO: 348183 - protein, 13 aa, Homo sapiens
  CDR3 for alpha chain variable domain of TCR clone 174092 (TRAV27, TRAJ6)
CAGGTRGSYIPTF

SEQ ID NO: 348184 - protein, 13 aa, Homo sapiens
  CDR3 for beta chain variable domain of TCR clone 174092 (TRBV4-1, TRBJ2-2)
CASRQENTGELFF

SEQ ID NO: 348185 - protein, 15 aa, Homo sapiens
  CDR3 for alpha chain variable domain of TCR clone 174093 (TRAV21, TRAJ53)
CATLNSGGSNYKLTF

SEQ ID NO: 348186 - protein, 16 aa, Homo sapiens
  CDR3 for beta chain variable domain of TCR clone 174093 (TRBV15, TRBJ1-2)
CATSRGPRTGGGGYTF

SEQ ID NO: 348187 - protein, 12 aa, Homo sapiens
  CDR3 for alpha chain variable domain of TCR clone 174094 (TRAV1-2, TRAJ24)
CALGGSWGKFQF

SEQ ID NO: 348188 - protein, 12 aa, Homo sapiens
  CDR3 for beta chain variable domain of TCR clone 174094 (TRBV11-2, TRBJ2-2)
CASSLGGGELFF

SEQ ID NO: 348189 - protein, 13 aa, Homo sapiens
  CDR3 for alpha chain variable domain of TCR clone 174095 (TRAV26-1, TRAJ30)
CIVNMNGDDKIIF

SEQ ID NO: 348190 - protein, 16 aa, Homo sapiens
  CDR3 for beta chain variable domain of TCR clone 174095 (TRBV16, TRBJ2-7)
CASSRPAGGSSYEQYF

SEQ ID NO: 348191 - protein, 16 aa, Homo sapiens
  CDR3 for alpha chain variable domain of TCR clone 174096 (TRAV20, TRAJ28)
CAVRDPSGAGSYQLTF

SEQ ID NO: 348192 - protein, 13 aa, Homo sapiens
  CDR3 for beta chain variable domain of TCR clone 174096 (TRBV12-4, TRBJ1-2)
CASSLRQGKGYTF

SEQ ID NO: 348193 - protein, 16 aa, Homo sapiens
  CDR3 for alpha chain variable domain of TCR clone 174097 (TRAV25, TRAJ53)
CAGPKGSGGSNYKLTF

SEQ ID NO: 348194 - protein, 15 aa, Homo sapiens
  CDR3 for beta chain variable domain of TCR clone 174097 (TRBV20-1, TRBJ2-7)
CSARDRVSGMDEQYF

SEQ ID NO: 348195 - protein, 14 aa, Homo sapiens
  CDR3 for alpha chain variable domain of TCR clone 174098 (TRAV1-2, TRAJ8)
CAVRDDTGFQKLVF

SEQ ID NO: 348196 - protein, 15 aa, Homo sapiens
  CDR3 for beta chain variable domain of TCR clone 174098 (TRBV6-3, TRBJ2-7)
CASSSPGTVLYEQYF

SEQ ID NO: 348197 - protein, 13 aa, Homo sapiens
  CDR3 for alpha chain variable domain of TCR clone 174099 (TRAV17, TRAJ15)
CATDARAGTALIF

SEQ ID NO: 348198 - protein, 16 aa, Homo sapiens
  CDR3 for beta chain variable domain of TCR clone 174099 (TRBV7-3, TRBJ2-2)
CASSLKRGTLSGELFF

SEQ ID NO: 348199 - protein, 13 aa, Homo sapiens
  CDR3 for alpha chain variable domain of TCR clone 174100 (TRAV30, TRAJ34)
CGTVGYNTDKLIF

SEQ ID NO: 348200 - protein, 13 aa, Homo sapiens
  CDR3 for beta chain variable domain of TCR clone 174100 (TRBV7-9, TRBJ2-7)
CASSSYPPYEQYF

SEQ ID NO: 348201 - protein, 18 aa, Homo sapiens
  CDR3 for alpha chain variable domain of TCR clone 174101 (TRAV26-1, TRAJ37)
CIVRVDMHGSSNTGKRIF

SEQ ID NO: 348202 - protein, 15 aa, Homo sapiens
  CDR3 for beta chain variable domain of TCR clone 174101 (TRBV20-1, TRBJ2-7)
CSARVLASPLYEQYF

SEQ ID NO: 348203 - protein, 13 aa, Homo sapiens
  CDR3 for alpha chain variable domain of TCR clone 174102 (TRAV12-2, TRAJ4)
CAVLSGCYNKLIF

SEQ ID NO: 348204 - protein, 15 aa, Homo sapiens
  CDR3 for beta chain variable domain of TCR clone 174102 (TRBV10-3, TRBJ2-1)
CDISDVQDRAYEQFF

SEQ ID NO: 348205 - protein, 12 aa, Homo sapiens
  CDR3 for alpha chain variable domain of TCR clone 174103 (TRAV20, TRAJ39)
CAVGNAGNMLTF

SEQ ID NO: 348206 - protein, 14 aa, Homo sapiens
  CDR3 for beta chain variable domain of TCR clone 174103 (TRBV18, TRBJ2-5)
CASSPGVSQETQYF

SEQ ID NO: 348207 - protein, 13 aa, Homo sapiens
  CDR3 for alpha chain variable domain of TCR clone 174104 (TRAV23/DV6, TRAJ58)
CAARLILGSSLTF

SEQ ID NO: 348208 - protein, 13 aa, Homo sapiens
  CDR3 for beta chain variable domain of TCR clone 174104 (TRBV2, TRBJ1-6)
CADSGSYNSPLHF

SEQ ID NO: 348209 - protein, 13 aa, Homo sapiens
  CDR3 for alpha chain variable domain of TCR clone 174105 (TRAV27, TRAJ45)
CRSSGGGADGLTF

SEQ ID NO: 348210 - protein, 14 aa, Homo sapiens
  CDR3 for beta chain variable domain of TCR clone 174105 (TRBV7-8, TRBJ2-7)
CASSFGTGGREQYF

SEQ ID NO: 348211 - protein, 14 aa, Homo sapiens
  CDR3 for alpha chain variable domain of TCR clone 174106 (TRAV8-3, TRAJ4)
CAVGASGGYNKLIF

SEQ ID NO: 348212 - protein, 14 aa, Homo sapiens
  CDR3 for beta chain variable domain of TCR clone 174106 (TRBV28, TRBJ2-1)
CASSLNGRNNEQFF

SEQ ID NO: 348213 - protein, 12 aa, Homo sapiens
  CDR3 for alpha chain variable domain of TCR clone 174107 (TRAV21, TRAJ49)
CAVNDGGNQFYF

SEQ ID NO: 348214 - protein, 13 aa, Homo sapiens
  CDR3 for beta chain variable domain of TCR clone 174107 (TRBV7-3, TRBJ2-5)
CASSFRGGETQYF

SEQ ID NO: 348215 - protein, 14 aa, Homo sapiens
  CDR3 for alpha chain variable domain of TCR clone 174108 (TRAV23/DV6, TRAJ24)
CAASLSDSWGKLPF

SEQ ID NO: 348216 - protein, 15 aa, Homo sapiens
  CDR3 for beta chain variable domain of TCR clone 174108 (TRBV9, TRBJ1-6)
CASSVAGTGDSPLHF

SEQ ID NO: 348217 - protein, 13 aa, Homo sapiens
  CDR3 for alpha chain variable domain of TCR clone 174109 (TRAV3, TRAJ20)
CAVRDTPRYKLSF

SEQ ID NO: 348218 - protein, 15 aa, Homo sapiens
  CDR3 for beta chain variable domain of TCR clone 174109 (TRBV18, TRBJ2-7)
CASSPSPGDRVEQYF

SEQ ID NO: 348219 - protein, 12 aa, Homo sapiens
  CDR3 for alpha chain variable domain of TCR clone 174110 (TRAV1-2, TRAJ17)
CAVRASGNQLTF

SEQ ID NO: 348220 - protein, 16 aa, Homo sapiens
  CDR3 for beta chain variable domain of TCR clone 174110 (TRBV20-1, TRBJ2-1)
CSAPGLAGSYSDEQFF

SEQ ID NO: 348221 - protein, 15 aa, Homo sapiens
  CDR3 for alpha chain variable domain of TCR clone 174111 (TRAV12-1, TRAJ40)
CVVNRDTSGTYKYIF

SEQ ID NO: 348222 - protein, 13 aa, Homo sapiens
  CDR3 for beta chain variable domain of TCR clone 174111 (TRBV12-4, TRBJ1-1)
CASSPGTGFEAFF

SEQ ID NO: 348223 - protein, 12 aa, Homo sapiens
  CDR3 for alpha chain variable domain of TCR clone 174112 (TRAV8-2, TRAJ6)
CVVSKGSYIHTF

SEQ ID NO: 348224 - protein, 18 aa, Homo sapiens
  CDR3 for beta chain variable domain of TCR clone 174112 (TRBV4-1, TRBJ2-3)
CASSQGGASGGATDTQYF

SEQ ID NO: 348225 - protein, 13 aa, Homo sapiens
  CDR3 for alpha chain variable domain of TCR clone 174113 (TRAV27, TRAJ3)
ASLRGSSASKIIF

SEQ ID NO: 348226 - protein, 15 aa, Homo sapiens
  CDR3 for beta chain variable domain of TCR clone 174113 (TRBV10-3, TRBJ2-3)
CAISLTSGGTDTQYF

SEQ ID NO: 348227 - protein, 15 aa, Homo sapiens
  CDR3 for alpha chain variable domain of TCR clone 174114 (TRAV8-3, TRAJ45)
CASSYSGGGADGLTF

SEQ ID NO: 348228 - protein, 14 aa, Homo sapiens
  CDR3 for beta chain variable domain of TCR clone 174114 (TRBV19, TRBJ2-1)
CARGARSFQWEHFF

SEQ ID NO: 348229 - protein, 12 aa, Homo sapiens
  CDR3 for alpha chain variable domain of TCR clone 174115 (TRAV3, TRAJ20)
CAVRDPDYKLSF

SEQ ID NO: 348230 - protein, 16 aa, Homo sapiens
  CDR3 for beta chain variable domain of TCR clone 174115 (TRBV11-2, TRBJ2-2)
CASSLRTGNLIGELFF

SEQ ID NO: 348231 - protein, 15 aa, Homo sapiens
  CDR3 for alpha chain variable domain of TCR clone 174116 (TRAV27, TRAJ38)
CAARRNACNNRKLIW

SEQ ID NO: 348232 - protein, 14 aa, Homo sapiens
  CDR3 for beta chain variable domain of TCR clone 174116 (TRBV6-1, TRBJ1-3)
CASVQGGGGNTIYF

SEQ ID NO: 348233 - protein, 16 aa, Homo sapiens
  CDR3 for alpha chain variable domain of TCR clone 174117 (TRAV26-2, TRAJ57)
CILRDVGSGGSEKLVF

SEQ ID NO: 348234 - protein, 13 aa, Homo sapiens
  CDR3 for beta chain variable domain of TCR clone 174117 (TRBV18, TRBJ2-3)
CASAPGVRDTQYF

SEQ ID NO: 348235 - protein, 15 aa, Homo sapiens
  CDR3 for alpha chain variable domain of TCR clone 174118 (TRAV3, TRAJ22)
CAVRDRGGSARQLPF

SEQ ID NO: 348236 - protein, 14 aa, Homo sapiens
  CDR3 for beta chain variable domain of TCR clone 174118 (TRBV19, TRBJ2-1)
RASSRLASINEQFF

SEQ ID NO: 348237 - protein, 11 aa, Homo sapiens
  CDR3 for alpha chain variable domain of TCR clone 174119 (TRAV21, TRAJ11)
CAVNGYSTFPF

SEQ ID NO: 348238 - protein, 11 aa, Homo sapiens
  CDR3 for beta chain variable domain of TCR clone 174119 (TRBV19, TRBJ1-1)
CASSIGSEAFF

SEQ ID NO: 348239 - protein, 12 aa, Homo sapiens
  CDR3 for alpha chain variable domain of TCR clone 174120 (TRAV12-3, TRAJ17)
CAMTLTGNKLTF

SEQ ID NO: 348240 - protein, 15 aa, Homo sapiens
  CDR3 for beta chain variable domain of TCR clone 174120 (TRBV6-3, TRBJ2-7)
WASSSPGTVFYEQYF

SEQ ID NO: 348241 - protein, 14 aa, Homo sapiens
  CDR3 for alpha chain variable domain of TCR clone 174121 (TRAV12-1, TRAJ30)
CVVNIGGRDDKIIF

SEQ ID NO: 348242 - protein, 13 aa, Homo sapiens
  CDR3 for beta chain variable domain of TCR clone 174121 (TRBV12-5, TRBJ2-1)
CASGWAGGMSSSS

SEQ ID NO: 348243 - protein, 16 aa, Homo sapiens
  CDR3 for alpha chain variable domain of TCR clone 174122 (TRAV3, TRAJ37)
CAVRGKGSGNTGKLII

SEQ ID NO: 348244 - protein, 20 aa, Homo sapiens
  CDR3 for beta chain variable domain of TCR clone 174122 (TRBV7-8, TRBJ2-2)
CASSHLFPGPTIHITGELFF

SEQ ID NO: 348245 - protein, 16 aa, Homo sapiens
  CDR3 for alpha chain variable domain of TCR clone 174123 (TRAV4, TRAJ22)
CLVGDLYSGSARQLTF

SEQ ID NO: 348246 - protein, 16 aa, Homo sapiens
  CDR3 for beta chain variable domain of TCR clone 174123 (TRBV13, TRBJ2-2)
CASSPRTGEHTGELFF

SEQ ID NO: 348247 - protein, 11 aa, Homo sapiens
  CDR3 for alpha chain variable domain of TCR clone 174124 (TRAV2, TRAJ13)
CASGGYQKVTF

SEQ ID NO: 348248 - protein, 15 aa, Homo sapiens
  CDR3 for beta chain variable domain of TCR clone 174124 (TRBV7-2, TRBJ1-2)
CASSLERGRSYGYTF

SEQ ID NO: 348249 - protein, 13 aa, Homo sapiens
  CDR3 for alpha chain variable domain of TCR clone 174125 (TRAV21, TRAJ15)
CAVPNQSGTALIF

SEQ ID NO: 348250 - protein, 15 aa, Homo sapiens
  CDR3 for beta chain variable domain of TCR clone 174125 (TRBV12-4, TRBJ2-7)
CASSRGLAGTYEQYF

SEQ ID NO: 348251 - protein, 14 aa, Homo sapiens
  CDR3 for alpha chain variable domain of TCR clone 174126 (TRAV1-2, TRAJ16)
CAVNRFSDGQKLLF

SEQ ID NO: 348252 - protein, 14 aa, Homo sapiens
  CDR3 for beta chain variable domain of TCR clone 174126 (TRBV7-9, TRBJ2-3)
CASSLEDVTDTQYF

SEQ ID NO: 348253 - protein, 16 aa, Homo sapiens
  CDR3 for alpha chain variable domain of TCR clone 174127 (TRAV21, TRAJ17)
CAVRPGEEAAGNKLTF

SEQ ID NO: 348254 - protein, 16 aa, Homo sapiens
  CDR3 for beta chain variable domain of TCR clone 174127 (TRBV27, TRBJ2-5)
CASSFGPGGTKETQYF

SEQ ID NO: 348255 - protein, 18 aa, Homo sapiens
  CDR3 for alpha chain variable domain of TCR clone 174128 (TRAV8-3, TRAJ6)
CAVGAEHQEEATYLHLEE

SEQ ID NO: 348256 - protein, 14 aa, Homo sapiens
  CDR3 for beta chain variable domain of TCR clone 174128 (TRBV20-1, TRBJ2-1)
CSAQIGGSANEQFF

SEQ ID NO: 348257 - protein, 12 aa, Homo sapiens
  CDR3 for alpha chain variable domain of TCR clone 174129 (TRAV12-3, TRAJ42)
CAPGGSQGTLIF

SEQ ID NO: 348258 - protein, 15 aa, Homo sapiens
  CDR3 for beta chain variable domain of TCR clone 174129 (TRBV19, TRBJ1-6)
CASSTQGAVGSPLHF

SEQ ID NO: 348259 - protein, 18 aa, Homo sapiens
  CDR3 for alpha chain variable domain of TCR clone 174130 (TRAV21, TRAJ52)
CAVRPSPSGGTSYGKLTF

SEQ ID NO: 348260 - protein, 19 aa, Homo sapiens
  CDR3 for beta chain variable domain of TCR clone 174130 (TRBV7-2, TRBJ2-3)
CASSFLSRNWGGGTETQYF

SEQ ID NO: 348261 - protein, 17 aa, Homo sapiens
  CDR3 for alpha chain variable domain of TCR clone 174131 (TRAV1-1, TRAJ15)
CLLLLCCPNQAGTALIF

SEQ ID NO: 348262 - protein, 15 aa, Homo sapiens
  CDR3 for beta chain variable domain of TCR clone 174131 (TRBV27, TRBJ2-3)
CASSLGLAGPDTQYF

SEQ ID NO: 348263 - protein, 11 aa, Homo sapiens
  CDR3 for alpha chain variable domain of TCR clone 174132 (TRAV21, TRAJ11)
CAVNGYSTLTF

SEQ ID NO: 348264 - protein, 14 aa, Homo sapiens
  CDR3 for beta chain variable domain of TCR clone 174132 (TRBV11-2, TRBJ1-2)
CASSLGTANYGYTF

SEQ ID NO: 348265 - protein, 14 aa, Homo sapiens
  CDR3 for alpha chain variable domain of TCR clone 174133 (TRAV3, TRAJ21)
CAVESQANFNKSYF

SEQ ID NO: 348266 - protein, 18 aa, Homo sapiens
  CDR3 for beta chain variable domain of TCR clone 174133 (TRBV7-9, TRBJ2-1)
CASSLAVSGTSGRNEQFF

SEQ ID NO: 348267 - protein, 14 aa, Homo sapiens
  CDR3 for alpha chain variable domain of TCR clone 174134 (TRAV27, TRAJ23)
PHIGAKDQGGKLIF

SEQ ID NO: 348268 - protein, 16 aa, Homo sapiens
  CDR3 for beta chain variable domain of TCR clone 174134 (TRBV7-3, TRBJ2-2)
CASSLKRGTLSGELFF

SEQ ID NO: 348269 - protein, 13 aa, Homo sapiens
  CDR3 for alpha chain variable domain of TCR clone 174135 (TRAV1-2, TRAJ27)
CAVFNTNAGKSTF

SEQ ID NO: 348270 - protein, 17 aa, Homo sapiens
  CDR3 for beta chain variable domain of TCR clone 174135 (TRBV11-2, TRBJ2-4)
CASSLGEGGGGKNIQYF

SEQ ID NO: 348271 - protein, 14 aa, Homo sapiens
  CDR3 for alpha chain variable domain of TCR clone 174136 (TRAV27, TRAJ22)
CAGVSVLGKRQLTF

SEQ ID NO: 348272 - protein, 17 aa, Homo sapiens
  CDR3 for beta chain variable domain of TCR clone 174136 (TRBV14, TRBJ2-1)
CASSRDRRVTSYNEQFF

SEQ ID NO: 348273 - protein, 12 aa, Homo sapiens
  CDR3 for alpha chain variable domain of TCR clone 174137 (TRAV13-1, TRAJ15)
CAASQAGTALIF

SEQ ID NO: 348274 - protein, 14 aa, Homo sapiens
  CDR3 for beta chain variable domain of TCR clone 174137 (TRBV25-1, TRBJ2-7)
CASSEYRAPHEQYF

SEQ ID NO: 348275 - protein, 12 aa, Homo sapiens
  CDR3 for alpha chain variable domain of TCR clone 174138 (TRAV17, TRAJ4)
CATDGGYNKLIF

SEQ ID NO: 348276 - protein, 14 aa, Homo sapiens
  CDR3 for beta chain variable domain of TCR clone 174138 (TRBV19, TRBJ2-7)
CASSIFAGTYEQYF

SEQ ID NO: 348277 - protein, 11 aa, Homo sapiens
  CDR3 for alpha chain variable domain of TCR clone 174139 (TRAV3, TRAJ17)
PRGAAGNKLTF

SEQ ID NO: 348278 - protein, 15 aa, Homo sapiens
  CDR3 for beta chain variable domain of TCR clone 174139 (TRBV7-6, TRBJ1-5)
CASSQSSGINQPQHF

SEQ ID NO: 348279 - protein, 17 aa, Homo sapiens
  CDR3 for alpha chain variable domain of TCR clone 174140 (TRAV12-3, TRAJ26)
CAMSGGRWDNYGQNFVF

SEQ ID NO: 348280 - protein, 12 aa, Homo sapiens
  CDR3 for beta chain variable domain of TCR clone 174140 (TRBV19, TRBJ1-1)
CASSTAGIEAFF

SEQ ID NO: 348281 - protein, 14 aa, Homo sapiens
  CDR3 for alpha chain variable domain of TCR clone 174141 (TRAV12-2, TRAJ17)
FAVLFKAAGNKLTF

SEQ ID NO: 348282 - protein, 14 aa, Homo sapiens
  CDR3 for beta chain variable domain of TCR clone 174141 (TRBV15, TRBJ1-2)
CATSRDFDRVGYTF

SEQ ID NO: 348283 - protein, 14 aa, Homo sapiens
  CDR3 for alpha chain variable domain of TCR clone 174142 (TRAV12-3, TRAJ10)
SHLPLTGGGNKLTF

SEQ ID NO: 348284 - protein, 13 aa, Homo sapiens
  CDR3 for beta chain variable domain of TCR clone 174142 (TRBV2, TRBJ1-6)
CAGSGSYNSPLHF

SEQ ID NO: 348285 - protein, 11 aa, Homo sapiens
  CDR3 for alpha chain variable domain of TCR clone 174143 (TRAV13-1, TRAJ20)
CAASNDYELSF

SEQ ID NO: 348286 - protein, 14 aa, Homo sapiens
  CDR3 for beta chain variable domain of TCR clone 174143 (TRBV7-2, TRBJ2-7)
CASSPKTSFYEQYF

SEQ ID NO: 348287 - protein, 13 aa, Homo sapiens
  CDR3 for alpha chain variable domain of TCR clone 174144 (TRAV21, TRAJ57)
CAVIEGGPEKLVF

SEQ ID NO: 348288 - protein, 15 aa, Homo sapiens
  CDR3 for beta chain variable domain of TCR clone 174144 (TRBV10-3, TRBJ2-5)
CAISEFGRGQETQYF

SEQ ID NO: 348289 - protein, 17 aa, Homo sapiens
  CDR3 for alpha chain variable domain of TCR clone 174145 (TRAV3, TRAJ6)
CPARDGPRAGGSSIPTF

SEQ ID NO: 348290 - protein, 20 aa, Homo sapiens
  CDR3 for beta chain variable domain of TCR clone 174145 (TRBV28, TRBJ2-1)
CASTPIGRSPGLAGGNEQFF

SEQ ID NO: 348291 - protein, 14 aa, Homo sapiens
  CDR3 for alpha chain variable domain of TCR clone 174146 (TRAV12-2, TRAJ13)
CAVKKTGGYKKATF

SEQ ID NO: 348292 - protein, 16 aa, Homo sapiens
  CDR3 for beta chain variable domain of TCR clone 174146 (TRBV2, TRBJ2-1)
CASRSPAGGKYNEQFF

SEQ ID NO: 348293 - protein, 15 aa, Homo sapiens
  CDR3 for alpha chain variable domain of TCR clone 174147 (TRAV13-1, TRAJ5)
CAVYTRDTGRRALTF

SEQ ID NO: 348294 - protein, 16 aa, Homo sapiens
  CDR3 for beta chain variable domain of TCR clone 174147 (TRBV12-4, TRBJ2-1)
CASTEQGMERSNEQFF

SEQ ID NO: 348295 - protein, 13 aa, Homo sapiens
  CDR3 for alpha chain variable domain of TCR clone 174148 (TRAV13-2, TRAJ48)
CAEMDFGNEKLTF

SEQ ID NO: 348296 - protein, 15 aa, Homo sapiens
  CDR3 for beta chain variable domain of TCR clone 174148 (TRBV11-2, TRBJ2-1)
CASSLGTSGLNEQFF

SEQ ID NO: 348297 - protein, 15 aa, Homo sapiens
  CDR3 for alpha chain variable domain of TCR clone 174149 (TRAV8-3, TRAJ27)
CAVGPSKTNAGKSTF

SEQ ID NO: 348298 - protein, 18 aa, Homo sapiens
  CDR3 for beta chain variable domain of TCR clone 174149 (TRBV11-2, TRBJ2-3)
CASSLGGASRGAPNTQYF

SEQ ID NO: 348299 - protein, 11 aa, Homo sapiens
  CDR3 for alpha chain variable domain of TCR clone 174150 (TRAV16, TRAJ49)
CSLNTGNQFYF

SEQ ID NO: 348300 - protein, 12 aa, Homo sapiens
  CDR3 for beta chain variable domain of TCR clone 174150 (TRBV7-9, TRBJ1-4)
CAGSTDREKLFF

SEQ ID NO: 348301 - protein, 14 aa, Homo sapiens
  CDR3 for alpha chain variable domain of TCR clone 174151 (TRAV12-2, TRAJ11)
CAVEGGSGYSTLTF

SEQ ID NO: 348302 - protein, 15 aa, Homo sapiens
  CDR3 for beta chain variable domain of TCR clone 174151 (TRBV5-1, TRBJ2-1)
CASSPPRAPYNEQFF

SEQ ID NO: 348303 - protein, 12 aa, Homo sapiens
  CDR3 for alpha chain variable domain of TCR clone 174152 (TRAV13-2, TRAJ8)
CAPWLGFQKLVF

SEQ ID NO: 348304 - protein, 15 aa, Homo sapiens
  CDR3 for beta chain variable domain of TCR clone 174152 (TRBV12-4, TRBJ2-5)
CASSLSGAFQETQSF

SEQ ID NO: 348305 - protein, 12 aa, Homo sapiens
  CDR3 for alpha chain variable domain of TCR clone 174153 (TRAV30, TRAJ43)
CGTEERGNDMRF

SEQ ID NO: 348306 - protein, 18 aa, Homo sapiens
  CDR3 for beta chain variable domain of TCR clone 174153 (TRBV12-4, TRBJ2-2)
CASSRSGGAIPNTGELFF

SEQ ID NO: 348307 - protein, 15 aa, Homo sapiens
  CDR3 for alpha chain variable domain of TCR clone 174154 (TRAV8-2, TRAJ42)
CVVLGYGGSQGNLIF

SEQ ID NO: 348308 - protein, 12 aa, Homo sapiens
  CDR3 for beta chain variable domain of TCR clone 174154 (TRBV5-1, TRBJ1-5)
CASRPDNQPQHL

SEQ ID NO: 348309 - protein, 15 aa, Homo sapiens
  CDR3 for alpha chain variable domain of TCR clone 174155 (TRAV27, TRAJ38)
CAARRNAGNNRKLIW

SEQ ID NO: 348310 - protein, 13 aa, Homo sapiens
  CDR3 for beta chain variable domain of TCR clone 174155 (TRBV12-5, TRBJ2-3)
CASGDRQSDTQSL

SEQ ID NO: 348311 - protein, 11 aa, Homo sapiens
  CDR3 for alpha chain variable domain of TCR clone 174156 (TRAV3, TRAJ21)
CAVGNFNKFYF

SEQ ID NO: 348312 - protein, 17 aa, Homo sapiens
  CDR3 for beta chain variable domain of TCR clone 174156 (TRBV7-3, TRBJ2-5)
CASSLGSGRSGSETQYF

SEQ ID NO: 348313 - protein, 16 aa, Homo sapiens
  CDR3 for alpha chain variable domain of TCR clone 174157 (TRAV3, TRAJ42)
CAVRDIEGGSQGNLIF

SEQ ID NO: 348314 - protein, 17 aa, Homo sapiens
  CDR3 for beta chain variable domain of TCR clone 174157 (TRBV7-3, TRBJ2-3)
RASSLMKRMRGADTQYF

SEQ ID NO: 348315 - protein, 11 aa, Homo sapiens
  CDR3 for alpha chain variable domain of TCR clone 174158 (TRAV3, TRAJ21)
CAVGNFNKFSF

SEQ ID NO: 348316 - protein, 14 aa, Homo sapiens
  CDR3 for beta chain variable domain of TCR clone 174158 (TRBV5-4, TRBJ1-1)
CASSLDSRRDEAFF

SEQ ID NO: 348317 - protein, 14 aa, Homo sapiens
  CDR3 for alpha chain variable domain of TCR clone 174159 (TRAV9-2, TRAJ39)
CALYIYNAGNMLTF

SEQ ID NO: 348318 - protein, 13 aa, Homo sapiens
  CDR3 for beta chain variable domain of TCR clone 174159 (TRBV7-3, TRBJ2-7)
CASSSGANYEQYF

SEQ ID NO: 348319 - protein, 19 aa, Homo sapiens
  CDR3 for alpha chain variable domain of TCR clone 174160 (TRAV3, )
CAVRPTPDIQNPDPAVYQL

SEQ ID NO: 348320 - protein, 12 aa, Homo sapiens
  CDR3 for beta chain variable domain of TCR clone 174160 (TRBV7-8, TRBJ2-7)
CASSLGDREQYF

SEQ ID NO: 348321 - protein, 13 aa, Homo sapiens
  CDR3 for alpha chain variable domain of TCR clone 174161 (TRAV12-1, TRAJ7)
CVVNMRGNNRLAL

SEQ ID NO: 348322 - protein, 16 aa, Homo sapiens
  CDR3 for beta chain variable domain of TCR clone 174161 (TRBV19, TRBJ2-1)
CASSKAGPSSYNEQFF

SEQ ID NO: 348323 - protein, 14 aa, Homo sapiens
  CDR3 for alpha chain variable domain of TCR clone 174162 (TRAV1-2, TRAJ8)
CAVREDTGFQKLVF

SEQ ID NO: 348324 - protein, 15 aa, Homo sapiens
  CDR3 for beta chain variable domain of TCR clone 174162 (TRBV6-3, TRBJ2-7)
WGSSSPGTVFYEQYF

SEQ ID NO: 348325 - protein, 14 aa, Homo sapiens
  CDR3 for alpha chain variable domain of TCR clone 174163 (TRAV13-1, TRAJ4)
CAATLPSGYNKLIF

SEQ ID NO: 348326 - protein, 14 aa, Homo sapiens
  CDR3 for beta chain variable domain of TCR clone 174163 (TRBV19, TRBJ2-1)
CASPTFVLIGEQFF

SEQ ID NO: 348327 - protein, 23 aa, Homo sapiens
  CDR3 for alpha chain variable domain of TCR clone 174164 (TRAV13-1, )
CAASTRRAQIPDIQNPDPAVYQL

SEQ ID NO: 348328 - protein, 15 aa, Homo sapiens
  CDR3 for beta chain variable domain of TCR clone 174164 (TRBV20-1, TRBJ2-1)
CSARGIGGTYNEQFF

SEQ ID NO: 348329 - protein, 14 aa, Homo sapiens
  CDR3 for alpha chain variable domain of TCR clone 174165 (TRAV2, TRAJ37)
CAVDFTSNTGKIIF

SEQ ID NO: 348330 - protein, 13 aa, Homo sapiens
  CDR3 for beta chain variable domain of TCR clone 174165 (TRBV20-1, TRBJ1-1)
CSAPLGGGTEAFF

SEQ ID NO: 348331 - protein, 14 aa, Homo sapiens
  CDR3 for alpha chain variable domain of TCR clone 174166 (TRAV4, TRAJ10)
CLVGDTGGGNKLTF

SEQ ID NO: 348332 - protein, 14 aa, Homo sapiens
  CDR3 for beta chain variable domain of TCR clone 174166 (TRBV4-2, TRBJ2-1)
CASGLDRAYNEQFF

SEQ ID NO: 348333 - protein, 15 aa, Homo sapiens
  CDR3 for alpha chain variable domain of TCR clone 174167 (TRAV12-2, TRAJ43)
CAFDMRFGAGTRLTV

SEQ ID NO: 348334 - protein, 14 aa, Homo sapiens
  CDR3 for beta chain variable domain of TCR clone 174167 (TRBV25-1, TRBJ1-1)
CASTHLGGNTEAFF

SEQ ID NO: 348335 - protein, 13 aa, Homo sapiens
  CDR3 for alpha chain variable domain of TCR clone 174168 (TRAV3, TRAJ3)
CVVADSSASKIIF

SEQ ID NO: 348336 - protein, 16 aa, Homo sapiens
  CDR3 for beta chain variable domain of TCR clone 174168 (TRBV5-1, TRBJ2-3)
CVSSLGLAVYTDTQYF

SEQ ID NO: 348337 - protein, 14 aa, Homo sapiens
  CDR3 for alpha chain variable domain of TCR clone 174169 (TRAV21, TRAJ52)
CGRAGGTSYGKLTF

SEQ ID NO: 348338 - protein, 15 aa, Homo sapiens
  CDR3 for beta chain variable domain of TCR clone 174169 (TRBV28, TRBJ2-7)
CASSPGGRGFYEQYF

SEQ ID NO: 348339 - protein, 12 aa, Homo sapiens
  CDR3 for alpha chain variable domain of TCR clone 174170 (TRAV16, TRAJ10)
CSRTGGGNKLTF

SEQ ID NO: 348340 - protein, 19 aa, Homo sapiens
  CDR3 for beta chain variable domain of TCR clone 174170 (TRBV25-1, TRBJ2-2)
CVILVYRVDRGRKTGELFF

SEQ ID NO: 348341 - protein, 15 aa, Homo sapiens
  CDR3 for alpha chain variable domain of TCR clone 174171 (TRAV27, TRAJ38)
CAGRVNAGNNRKLIW

SEQ ID NO: 348342 - protein, 13 aa, Homo sapiens
  CDR3 for beta chain variable domain of TCR clone 174171 (TRBV12-5, TRBJ2-3)
CASQNRGTDTQYF

SEQ ID NO: 348343 - protein, 14 aa, Homo sapiens
  CDR3 for alpha chain variable domain of TCR clone 174172 (TRAV1-2, TRAJ8)
CAVREDTGFQKLVF

SEQ ID NO: 348344 - protein, 13 aa, Homo sapiens
  CDR3 for beta chain variable domain of TCR clone 174172 (TRBV19, TRBJ1-2)
CASSVPGQVGYTF

SEQ ID NO: 348345 - protein, 15 aa, Homo sapiens
  CDR3 for alpha chain variable domain of TCR clone 174173 (TRAV23/DV6, TRAJ53)
CAASKLGSGGSNYQL

SEQ ID NO: 348346 - protein, 18 aa, Homo sapiens
  CDR3 for beta chain variable domain of TCR clone 174173 (TRBV11-2, TRBJ2-3)
CASSLGGASRGAPNTQYF

SEQ ID NO: 348347 - protein, 13 aa, Homo sapiens
  CDR3 for alpha chain variable domain of TCR clone 174174 (TRAV21, TRAJ3)
CAVTGSSASKIIF

SEQ ID NO: 348348 - protein, 14 aa, Homo sapiens
  CDR3 for beta chain variable domain of TCR clone 174174 (TRBV12-5, TRBJ2-5)
CASGSRTHQETQYF

SEQ ID NO: 348349 - protein, 14 aa, Homo sapiens
  CDR3 for alpha chain variable domain of TCR clone 174175 (TRAV26-1, TRAJ45)
CIEVTGGGADELTF

SEQ ID NO: 348350 - protein, 13 aa, Homo sapiens
  CDR3 for beta chain variable domain of TCR clone 174175 (TRBV7-6, TRBJ1-2)
CASSLVADYGYTF

SEQ ID NO: 348351 - protein, 12 aa, Homo sapiens
  CDR3 for alpha chain variable domain of TCR clone 174176 (TRAV12-1, TRAJ40)
CVVYSGTYKYIF

SEQ ID NO: 348352 - protein, 18 aa, Homo sapiens
  CDR3 for beta chain variable domain of TCR clone 174176 (TRBV11-3, TRBJ2-3)
CASSLEGASRGAPNTQYF

SEQ ID NO: 348353 - protein, 12 aa, Homo sapiens
  CDR3 for alpha chain variable domain of TCR clone 174177 (TRAV21, TRAJ10)
WTARGGGNKLTF

SEQ ID NO: 348354 - protein, 14 aa, Homo sapiens
  CDR3 for beta chain variable domain of TCR clone 174177 (TRBV4-1, TRBJ2-2)
CASSQAVNTGELFF

SEQ ID NO: 348355 - protein, 14 aa, Homo sapiens
  CDR3 for alpha chain variable domain of TCR clone 174178 (TRAV26-1, TRAJ39)
CIVFTNNAGNMLTF

SEQ ID NO: 348356 - protein, 14 aa, Homo sapiens
  CDR3 for beta chain variable domain of TCR clone 174178 (TRBV19, TRBJ2-3)
CASSAPRGTDTQYF

SEQ ID NO: 348357 - protein, 13 aa, Homo sapiens
  CDR3 for alpha chain variable domain of TCR clone 174179 (TRAV17, TRAJ7)
CATDNYGNNRLAL

SEQ ID NO: 348358 - protein, 16 aa, Homo sapiens
  CDR3 for beta chain variable domain of TCR clone 174179 (TRBV4-1, TRBJ2-5)
CASSQAIAASSATQYF

SEQ ID NO: 348359 - protein, 12 aa, Homo sapiens
  CDR3 for alpha chain variable domain of TCR clone 174180 (TRAV12-1, TRAJ31)
CVVSLLRARLMF

SEQ ID NO: 348360 - protein, 15 aa, Homo sapiens
  CDR3 for beta chain variable domain of TCR clone 174180 (TRBV3-1, TRBJ1-2)
CANSHTGQGGYGYTF

SEQ ID NO: 348361 - protein, 15 aa, Homo sapiens
  CDR3 for alpha chain variable domain of TCR clone 174181 (TRAV8-1, TRAJ6)
CAVNTRPGGSYIPTF

SEQ ID NO: 348362 - protein, 14 aa, Homo sapiens
  CDR3 for beta chain variable domain of TCR clone 174181 (TRBV12-4, TRBJ2-1)
CASSLGQGASEQFF

SEQ ID NO: 348363 - protein, 14 aa, Homo sapiens
  CDR3 for alpha chain variable domain of TCR clone 174182 (TRAV12-3, TRAJ10)
SHLPLTGGANKLTF

SEQ ID NO: 348364 - protein, 14 aa, Homo sapiens
  CDR3 for beta chain variable domain of TCR clone 174182 (TRBV4-2, TRBJ2-1)
CASGLDRAYDEQFF

SEQ ID NO: 348365 - protein, 14 aa, Homo sapiens
  CDR3 for alpha chain variable domain of TCR clone 174183 (TRAV13-1, TRAJ24)
CAASRTDSWGKLQF

SEQ ID NO: 348366 - protein, 15 aa, Homo sapiens
  CDR3 for beta chain variable domain of TCR clone 174183 (TRBV7-9, TRBJ1-5)
CASSQGHQLNQPQHF

SEQ ID NO: 348367 - protein, 12 aa, Homo sapiens
  CDR3 for alpha chain variable domain of TCR clone 174184 (TRAV13-1, TRAJ49)
CAASPMGNQFYF

SEQ ID NO: 348368 - protein, 13 aa, Homo sapiens
  CDR3 for beta chain variable domain of TCR clone 174184 (TRBV20-1, TRBJ2-2)
CSASAGGTGELFF

SEQ ID NO: 348369 - protein, 12 aa, Homo sapiens
  CDR3 for alpha chain variable domain of TCR clone 174185 (TRAV13-2, TRAJ8)
CAPWLGFQKLVF

SEQ ID NO: 348370 - protein, 13 aa, Homo sapiens
  CDR3 for beta chain variable domain of TCR clone 174185 (TRBV12-5, TRBJ2-3)
CASGDRQSDTQYF

SEQ ID NO: 348371 - protein, 14 aa, Homo sapiens
  CDR3 for alpha chain variable domain of TCR clone 174186 (TRAV17, TRAJ16)
CATVDFSDGQKLLF

SEQ ID NO: 348372 - protein, 15 aa, Homo sapiens
  CDR3 for beta chain variable domain of TCR clone 174186 (TRBV18, TRBJ2-1)
CASSPPSASHNEQFF

SEQ ID NO: 348373 - protein, 18 aa, Homo sapiens
  CDR3 for alpha chain variable domain of TCR clone 174187 (TRAV9-2, TRAJ52)
CALSRHNAGGTSHGKLPF

SEQ ID NO: 348374 - protein, 13 aa, Homo sapiens
  CDR3 for beta chain variable domain of TCR clone 174187 (TRBV7-9, TRBJ1-2)
CASSLKQNYGYTF

SEQ ID NO: 348375 - protein, 12 aa, Homo sapiens
  CDR3 for alpha chain variable domain of TCR clone 174188 (TRAV13-1, TRAJ53)
AASGGSNYKLTF

SEQ ID NO: 348376 - protein, 14 aa, Homo sapiens
  CDR3 for beta chain variable domain of TCR clone 174188 (TRBV7-7, TRBJ2-2)
CASSRDRSTGELFF

SEQ ID NO: 348377 - protein, 13 aa, Homo sapiens
  CDR3 for alpha chain variable domain of TCR clone 174189 (TRAV21, TRAJ56)
CAGWVGANSKLTF

SEQ ID NO: 348378 - protein, 13 aa, Homo sapiens
  CDR3 for beta chain variable domain of TCR clone 174189 (TRBV7-6, TRBJ1-2)
CASSLVADYGYTF

SEQ ID NO: 348379 - protein, 11 aa, Homo sapiens
  CDR3 for alpha chain variable domain of TCR clone 174190 (TRAV21, TRAJ41)
CAVRSGYALNF

SEQ ID NO: 348380 - protein, 19 aa, Homo sapiens
  CDR3 for beta chain variable domain of TCR clone 174190 (TRBV25-1, TRBJ2-2)
CAILVYRVDRGRKTGELFF

SEQ ID NO: 348381 - protein, 12 aa, Homo sapiens
  CDR3 for alpha chain variable domain of TCR clone 174191 (TRAV13-1, TRAJ27)
CAAKSDAGKSTF

SEQ ID NO: 348382 - protein, 14 aa, Homo sapiens
  CDR3 for beta chain variable domain of TCR clone 174191 (TRBV20-1, TRBJ2-3)
CSARGGNSTDTQYF

SEQ ID NO: 348383 - protein, 17 aa, Homo sapiens
  CDR3 for alpha chain variable domain of TCR clone 174192 (TRAV12-1, TRAJ42)
RVVMRMNYGGSQGNLIF

SEQ ID NO: 348384 - protein, 13 aa, Homo sapiens
  CDR3 for beta chain variable domain of TCR clone 174192 (TRBV7-2, TRBJ1-1)
CASSLARPAEAFF

SEQ ID NO: 348385 - protein, 15 aa, Homo sapiens
  CDR3 for alpha chain variable domain of TCR clone 174193 (TRAV26-1, TRAJ17)
CIVRVVKAAGNKLTF

SEQ ID NO: 348386 - protein, 16 aa, Homo sapiens
  CDR3 for beta chain variable domain of TCR clone 174193 (TRBV7-9, TRBJ2-1)
CASSLVTGPSYNEQFF

SEQ ID NO: 348387 - protein, 11 aa, Homo sapiens
  CDR3 for alpha chain variable domain of TCR clone 174194 (TRAV1-2, TRAJ20)
CAVSDDYKLSF

SEQ ID NO: 348388 - protein, 13 aa, Homo sapiens
  CDR3 for beta chain variable domain of TCR clone 174194 (TRBV7-9, TRBJ1-2)
CASSLKQNYGYTF

SEQ ID NO: 348389 - protein, 14 aa, Homo sapiens
  CDR3 for alpha chain variable domain of TCR clone 174195 (TRAV25, TRAJ35)
CARRMEGFGNVLHC

SEQ ID NO: 348390 - protein, 13 aa, Homo sapiens
  CDR3 for beta chain variable domain of TCR clone 174195 (TRBV7-2, TRBJ1-4)
CASSLAGLENLFF

SEQ ID NO: 348391 - protein, 15 aa, Homo sapiens
  CDR3 for alpha chain variable domain of TCR clone 174196 (TRAV8-2, TRAJ16)
CVVSDGFSDVQKLLF

SEQ ID NO: 348392 - protein, 13 aa, Homo sapiens
  CDR3 for beta chain variable domain of TCR clone 174196 (TRBV20-1, TRBJ1-1)
CSAPPGGHTEAFF

SEQ ID NO: 348393 - protein, 16 aa, Homo sapiens
  CDR3 for alpha chain variable domain of TCR clone 174197 (TRAV4, TRAJ18)
CCVLLIGGSTLGRLYF

SEQ ID NO: 348394 - protein, 15 aa, Homo sapiens
  CDR3 for beta chain variable domain of TCR clone 174197 (TRBV19, TRBJ2-1)
CASSGGGTLYNEQFF

SEQ ID NO: 348395 - protein, 15 aa, Homo sapiens
  CDR3 for alpha chain variable domain of TCR clone 174198 (TRAV8-3, TRAJ45)
CASSFSGGGADGLTF

SEQ ID NO: 348396 - protein, 15 aa, Homo sapiens
  CDR3 for beta chain variable domain of TCR clone 174198 (TRBV27, TRBJ1-4)
CASSPRHATNEKLFF

SEQ ID NO: 348397 - protein, 12 aa, Homo sapiens
  CDR3 for alpha chain variable domain of TCR clone 174199 (TRAV1-1, TRAJ8)
CAGGTGFQKLVV

SEQ ID NO: 348398 - protein, 16 aa, Homo sapiens
  CDR3 for beta chain variable domain of TCR clone 174199 (TRBV7-3, TRBJ2-1)
CASSLEGYRSYNEQFF

SEQ ID NO: 348399 - protein, 14 aa, Homo sapiens
  CDR3 for alpha chain variable domain of TCR clone 174200 (TRAV12-2, TRAJ24)
CAVTPADSWGKLQF

SEQ ID NO: 348400 - protein, 13 aa, Homo sapiens
  CDR3 for beta chain variable domain of TCR clone 174200 (TRBV6-4, TRBJ1-5)
CASSAVLNQPQHF

SEQ ID NO: 348401 - protein, 14 aa, Homo sapiens
  CDR3 for alpha chain variable domain of TCR clone 174201 (TRAV6, TRAJ8)
CALARGTGFQKLVF

SEQ ID NO: 348402 - protein, 15 aa, Homo sapiens
  CDR3 for beta chain variable domain of TCR clone 174201 (TRBV7-9, TRBJ2-7)
CASSLALAEAYEQYF

SEQ ID NO: 348403 - protein, 14 aa, Homo sapiens
  CDR3 for alpha chain variable domain of TCR clone 174202 (TRAV1-2, TRAJ29)
CAVRTDSGNTPLLF

SEQ ID NO: 348404 - protein, 14 aa, Homo sapiens
  CDR3 for beta chain variable domain of TCR clone 174202 (TRBV7-2, TRBJ2-7)
CASSPKTSFYEQYF

SEQ ID NO: 348405 - protein, 15 aa, Homo sapiens
  CDR3 for alpha chain variable domain of TCR clone 174203 (TRAV3, TRAJ20)
CAVRDSRSNDYKLGF

SEQ ID NO: 348406 - protein, 14 aa, Homo sapiens
  CDR3 for beta chain variable domain of TCR clone 174203 (TRBV20-1, TRBJ2-7)
CSARRGNGIYEQYF

SEQ ID NO: 348407 - protein, 13 aa, Homo sapiens
  CDR3 for alpha chain variable domain of TCR clone 174204 (TRAV12-1, TRAJ39)
CVVPQRAGNTLTF

SEQ ID NO: 348408 - protein, 14 aa, Homo sapiens
  CDR3 for beta chain variable domain of TCR clone 174204 (TRBV13, TRBJ2-5)
CASSLERVGETQYF

SEQ ID NO: 348409 - protein, 13 aa, Homo sapiens
  CDR3 for alpha chain variable domain of TCR clone 174205 (TRAV13-1, TRAJ10)
CAPSREEETNSPL

SEQ ID NO: 348410 - protein, 14 aa, Homo sapiens
  CDR3 for beta chain variable domain of TCR clone 174205 (TRBV25-1, TRBJ1-1)
CASTHLGGNTEAFF

SEQ ID NO: 348411 - protein, 12 aa, Homo sapiens
  CDR3 for alpha chain variable domain of TCR clone 174206 (TRAV12-3, TRAJ17)
YAMTLTVNKLTF

SEQ ID NO: 348412 - protein, 15 aa, Homo sapiens
  CDR3 for beta chain variable domain of TCR clone 174206 (TRBV20-1, TRBJ2-7)
CSARDRVSGMDEQYF

SEQ ID NO: 348413 - protein, 14 aa, Homo sapiens
  CDR3 for alpha chain variable domain of TCR clone 174207 (TRAV38-2/DV8, TRAJ54)
AAMYQIQGAQKLVF

SEQ ID NO: 348414 - protein, 17 aa, Homo sapiens
  CDR3 for beta chain variable domain of TCR clone 174207 (TRBV6-1, TRBJ2-3)
CASSDALRLLSTDTQYF

SEQ ID NO: 348415 - protein, 13 aa, Homo sapiens
  CDR3 for alpha chain variable domain of TCR clone 174208 (TRAV17, TRAJ39)
CATDYGAGNMLTF

SEQ ID NO: 348416 - protein, 12 aa, Homo sapiens
  CDR3 for beta chain variable domain of TCR clone 174208 (TRBV7-9, TRBJ1-5)
CASSPQGQAQHF

SEQ ID NO: 348417 - protein, 18 aa, Homo sapiens
  CDR3 for alpha chain variable domain of TCR clone 174209 (TRAV26-2, TRAJ45)
CILRVDKYSGGGADGLTF

SEQ ID NO: 348418 - protein, 16 aa, Homo sapiens
  CDR3 for beta chain variable domain of TCR clone 174209 (TRBV2, TRBJ1-4)
CASNLLQGATHEKLFF

SEQ ID NO: 348419 - protein, 14 aa, Homo sapiens
  CDR3 for alpha chain variable domain of TCR clone 174210 (TRAV2, TRAJ37)
CSVDFTSNTGKLIF

SEQ ID NO: 348420 - protein, 13 aa, Homo sapiens
  CDR3 for beta chain variable domain of TCR clone 174210 (TRBV4-1, TRBJ2-2)
CASSQENTGELFF

SEQ ID NO: 348421 - protein, 17 aa, Homo sapiens
  CDR3 for alpha chain variable domain of TCR clone 174211 (TRAV3, TRAJ42)
CAVRDKDYGGSQGNLIF

SEQ ID NO: 348422 - protein, 18 aa, Homo sapiens
  CDR3 for beta chain variable domain of TCR clone 174211 (TRBV20-1, TRBJ2-3)
CSASGLAGGPGTTDTQYF

SEQ ID NO: 348423 - protein, 17 aa, Homo sapiens
  CDR3 for alpha chain variable domain of TCR clone 174212 (TRAV3, TRAJ38)
CAVRDCLNAGNNRKLIW

SEQ ID NO: 348424 - protein, 13 aa, Homo sapiens
  CDR3 for beta chain variable domain of TCR clone 174212 (TRBV23-1, TRBJ1-4)
CASRGKLNEKLFF

SEQ ID NO: 348425 - protein, 11 aa, Homo sapiens
  CDR3 for alpha chain variable domain of TCR clone 174213 (TRAV1-2, TRAJ31)
CAVNNNARLMF

SEQ ID NO: 348426 - protein, 14 aa, Homo sapiens
  CDR3 for beta chain variable domain of TCR clone 174213 (TRBV7-9, TRBJ2-1)
CASSPRDSLYEQFF

SEQ ID NO: 348427 - protein, 13 aa, Homo sapiens
  CDR3 for alpha chain variable domain of TCR clone 174214 (TRAV30, TRAJ24)
RGTVTDSWGKLQF

SEQ ID NO: 348428 - protein, 15 aa, Homo sapiens
  CDR3 for beta chain variable domain of TCR clone 174214 (TRBV20-1, TRBJ2-7)
CSARDRVSGMDEQYF

SEQ ID NO: 348429 - protein, 11 aa, Homo sapiens
  CDR3 for alpha chain variable domain of TCR clone 174215 (TRAV4, TRAJ31)
CLVGDNARLMF

SEQ ID NO: 348430 - protein, 16 aa, Homo sapiens
  CDR3 for beta chain variable domain of TCR clone 174215 (TRBV7-2, TRBJ2-5)
CASSSKWLSGQEIQYF

SEQ ID NO: 348431 - protein, 15 aa, Homo sapiens
  CDR3 for alpha chain variable domain of TCR clone 174216 (TRAV13-2, TRAJ42)
CAGLNYGGSQGNLIF

SEQ ID NO: 348432 - protein, 14 aa, Homo sapiens
  CDR3 for beta chain variable domain of TCR clone 174216 (TRBV5-8, TRBJ2-3)
CASSLSPSTDTQYF

SEQ ID NO: 348433 - protein, 14 aa, Homo sapiens
  CDR3 for alpha chain variable domain of TCR clone 174217 (TRAV26-1, TRAJ26)
CTVIVASYGQNFVF

SEQ ID NO: 348434 - protein, 13 aa, Homo sapiens
  CDR3 for beta chain variable domain of TCR clone 174217 (TRBV4-1, TRBJ2-2)
CASSQENTGELFF

SEQ ID NO: 348435 - protein, 10 aa, Homo sapiens
  CDR3 for alpha chain variable domain of TCR clone 174218 (TRAV1-2, TRAJ23)
FAGQGGKLIF

SEQ ID NO: 348436 - protein, 14 aa, Homo sapiens
  CDR3 for beta chain variable domain of TCR clone 174218 (TRBV6-1, TRBJ1-3)
CASVQGGGGNTIYF

SEQ ID NO: 348437 - protein, 12 aa, Homo sapiens
  CDR3 for alpha chain variable domain of TCR clone 174219 (TRAV13-1, TRAJ53)
CAAGGSNYKLTF

SEQ ID NO: 348438 - protein, 11 aa, Homo sapiens
  CDR3 for beta chain variable domain of TCR clone 174219 (TRBV2, TRBJ1-1)
CASRGGTEAFF

SEQ ID NO: 348439 - protein, 14 aa, Homo sapiens
  CDR3 for alpha chain variable domain of TCR clone 174220 (TRAV8-4, TRAJ13)
CAVTLSGGYQKVTF

SEQ ID NO: 348440 - protein, 16 aa, Homo sapiens
  CDR3 for beta chain variable domain of TCR clone 174220 (TRBV19, TRBJ2-2)
CASRFPGTGATGELFF

SEQ ID NO: 348441 - protein, 14 aa, Homo sapiens
  CDR3 for alpha chain variable domain of TCR clone 174221 (TRAV12-1, TRAJ36)
CVVNYWGKKPLLWD

SEQ ID NO: 348442 - protein, 13 aa, Homo sapiens
  CDR3 for beta chain variable domain of TCR clone 174221 (TRBV14, TRBJ1-1)
CASSREFGTEAFF

SEQ ID NO: 348443 - protein, 14 aa, Homo sapiens
  CDR3 for alpha chain variable domain of TCR clone 174222 (TRAV1-2, TRAJ8)
CAVRQDTGFQKLVF

SEQ ID NO: 348444 - protein, 12 aa, Homo sapiens
  CDR3 for beta chain variable domain of TCR clone 174222 (TRBV11-2, TRBJ2-2)
CASSLPTGELFF

SEQ ID NO: 348445 - protein, 12 aa, Homo sapiens
  CDR3 for alpha chain variable domain of TCR clone 174223 (TRAV8-3, TRAJ26)
CAGDNYGQNLSL

SEQ ID NO: 348446 - protein, 15 aa, Homo sapiens
  CDR3 for beta chain variable domain of TCR clone 174223 (TRBV9, TRBJ2-1)
CASSLAGSSYNEQFF

SEQ ID NO: 348447 - protein, 19 aa, Homo sapiens
  CDR3 for alpha chain variable domain of TCR clone 174224 (TRAV26-1, TRAJ27)
CWVRLHRQSVNTNAGKSTF

SEQ ID NO: 348448 - protein, 13 aa, Homo sapiens
  CDR3 for beta chain variable domain of TCR clone 174224 (TRBV20-1, TRBJ2-7)
CSATHTSGYEQYF

SEQ ID NO: 348449 - protein, 15 aa, Homo sapiens
  CDR3 for alpha chain variable domain of TCR clone 174225 (TRAV16, TRAJ4)
CALEDPSGGYNKLIF

SEQ ID NO: 348450 - protein, 13 aa, Homo sapiens
  CDR3 for beta chain variable domain of TCR clone 174225 (TRBV7-3, TRBJ2-7)
CASSQAGGYEHYF

SEQ ID NO: 348451 - protein, 13 aa, Homo sapiens
  CDR3 for alpha chain variable domain of TCR clone 174226 (TRAV13-2, TRAJ13)
CAERPGGYQKVTF

SEQ ID NO: 348452 - protein, 15 aa, Homo sapiens
  CDR3 for beta chain variable domain of TCR clone 174226 (TRBV5-1, TRBJ2-1)
CASSPPRAPYNEQFF

SEQ ID NO: 348453 - protein, 16 aa, Homo sapiens
  CDR3 for alpha chain variable domain of TCR clone 174227 (TRAV30, TRAJ44)
CGTEDKRTGTASKLTF

SEQ ID NO: 348454 - protein, 16 aa, Homo sapiens
  CDR3 for beta chain variable domain of TCR clone 174227 (TRBV10-2, TRBJ2-7)
CASSESPGPSGFEQFF

SEQ ID NO: 348455 - protein, 14 aa, Homo sapiens
  CDR3 for alpha chain variable domain of TCR clone 174228 (TRAV13-1, TRAJ44)
CAAKATGTASKLTF

SEQ ID NO: 348456 - protein, 19 aa, Homo sapiens
  CDR3 for beta chain variable domain of TCR clone 174228 (TRBV25-1, TRBJ2-2)
CAILVYRVDRGRKTGELFF

SEQ ID NO: 348457 - protein, 14 aa, Homo sapiens
  CDR3 for alpha chain variable domain of TCR clone 174229 (TRAV26-1, TRAJ34)
CIVRVAYNTDKLIF

SEQ ID NO: 348458 - protein, 16 aa, Homo sapiens
  CDR3 for beta chain variable domain of TCR clone 174229 (TRBV7-3, TRBJ2-2)
CACSLKRGTLSGELFF

SEQ ID NO: 348459 - protein, 13 aa, Homo sapiens
  CDR3 for alpha chain variable domain of TCR clone 174230 (TRAV12-3, TRAJ9)
CAMRNTGCFKTIF

SEQ ID NO: 348460 - protein, 13 aa, Homo sapiens
  CDR3 for beta chain variable domain of TCR clone 174230 (TRBV27, TRBJ2-1)
CASRTLGVGEQFF

SEQ ID NO: 348461 - protein, 11 aa, Homo sapiens
  CDR3 for alpha chain variable domain of TCR clone 174231 (TRAV13-2, TRAJ23)
CAESPRGKLSF

SEQ ID NO: 348462 - protein, 15 aa, Homo sapiens
  CDR3 for beta chain variable domain of TCR clone 174231 (TRBV28, TRBJ2-1)
CASSGLAEVDNEQFF

SEQ ID NO: 348463 - protein, 23 aa, Homo sapiens
  CDR3 for alpha chain variable domain of TCR clone 174232 (TRAV8-3, )
CAVGASNAANNHIQNPDPAVYQL

SEQ ID NO: 348464 - protein, 15 aa, Homo sapiens
  CDR3 for beta chain variable domain of TCR clone 174232 (TRBV11-3, TRBJ1-3)
CASSLFGPSGNTIYF

SEQ ID NO: 348465 - protein, 15 aa, Homo sapiens
  CDR3 for alpha chain variable domain of TCR clone 174233 (TRAV27, TRAJ38)
CAARRNAGNNRKLIW

SEQ ID NO: 348466 - protein, 11 aa, Homo sapiens
  CDR3 for beta chain variable domain of TCR clone 174233 (TRBV6-1, TRBJ2-5)
CASTGVETQYF

SEQ ID NO: 348467 - protein, 13 aa, Homo sapiens
  CDR3 for alpha chain variable domain of TCR clone 174234 (TRAV21, TRAJ27)
CSARPGNAGKSTF

SEQ ID NO: 348468 - protein, 15 aa, Homo sapiens
  CDR3 for beta chain variable domain of TCR clone 174234 (TRBV11-3, TRBJ2-7)
CASSPGPASSYEQYF

SEQ ID NO: 348469 - protein, 14 aa, Homo sapiens
  CDR3 for alpha chain variable domain of TCR clone 174235 (TRAV1-2, TRAJ8)
CAVREDTGFQKLVF

SEQ ID NO: 348470 - protein, 16 aa, Homo sapiens
  CDR3 for beta chain variable domain of TCR clone 174235 (TRBV13, TRBJ2-1)
CASSLAIAGGPGEQFF

SEQ ID NO: 348471 - protein, 13 aa, Homo sapiens
  CDR3 for alpha chain variable domain of TCR clone 174236 (TRAV16, TRAJ28)
CALTGAGSYQLTF

SEQ ID NO: 348472 - protein, 16 aa, Homo sapiens
  CDR3 for beta chain variable domain of TCR clone 174236 (TRBV28, TRBJ1-5)
CACSLTGQGWNQPQHF

SEQ ID NO: 348473 - protein, 13 aa, Homo sapiens
  CDR3 for alpha chain variable domain of TCR clone 174237 (TRAV23/DV6, TRAJ58)
CAASEIGCSRLTF

SEQ ID NO: 348474 - protein, 15 aa, Homo sapiens
  CDR3 for beta chain variable domain of TCR clone 174237 (TRBV19, TRBJ1-1)
CASTSGQIQNTEAFF

SEQ ID NO: 348475 - protein, 16 aa, Homo sapiens
  CDR3 for alpha chain variable domain of TCR clone 174238 (TRAV27, TRAJ52)
CAGAGAGGTSYVKLTF

SEQ ID NO: 348476 - protein, 17 aa, Homo sapiens
  CDR3 for beta chain variable domain of TCR clone 174238 (TRBV24-1, TRBJ2-3)
CATSDLPSGEDTDTQYF

SEQ ID NO: 348477 - protein, 16 aa, Homo sapiens
  CDR3 for alpha chain variable domain of TCR clone 174239 (TRAV3, TRAJ10)
CAGRDMRAGGGNKLTF

SEQ ID NO: 348478 - protein, 20 aa, Homo sapiens
  CDR3 for beta chain variable domain of TCR clone 174239 (TRBV11-3, TRBJ2-7)
CASSQRTSGSLRAVLRAGHQ

SEQ ID NO: 348479 - protein, 16 aa, Homo sapiens
  CDR3 for alpha chain variable domain of TCR clone 174240 (TRAV23/DV6, TRAJ9)
CAASIGGNTGGFKTIF

SEQ ID NO: 348480 - protein, 14 aa, Homo sapiens
  CDR3 for beta chain variable domain of TCR clone 174240 (TRBV9, TRBJ2-7)
CTSSVGVGSYEQYF

SEQ ID NO: 348481 - protein, 14 aa, Homo sapiens
  CDR3 for alpha chain variable domain of TCR clone 174241 (TRAV12-2, TRAJ17)
CAVNNKAAGNKLTF

SEQ ID NO: 348482 - protein, 16 aa, Homo sapiens
  CDR3 for beta chain variable domain of TCR clone 174241 (TRBV20-1, TRBJ2-6)
CSASSQGYDGANVLTF

SEQ ID NO: 348483 - protein, 15 aa, Homo sapiens
  CDR3 for alpha chain variable domain of TCR clone 174242 (TRAV8-3, TRAJ15)
GAVGAPNQAGTALSF

SEQ ID NO: 348484 - protein, 14 aa, Homo sapiens
  CDR3 for beta chain variable domain of TCR clone 174242 (TRBV20-1, TRBJ2-1)
CSPNDEASYNEQFF

SEQ ID NO: 348485 - protein, 12 aa, Homo sapiens
  CDR3 for alpha chain variable domain of TCR clone 174243 (TRAV13-2, TRAJ23)
CAERHRGGKLIF

SEQ ID NO: 348486 - protein, 15 aa, Homo sapiens
  CDR3 for beta chain variable domain of TCR clone 174243 (TRBV20-1, TRBJ2-5)
CSAPPRTGFGETQYF

SEQ ID NO: 348487 - protein, 14 aa, Homo sapiens
  CDR3 for alpha chain variable domain of TCR clone 174244 (TRAV17, TRAJ56)
SATVPAGANSKLTF

SEQ ID NO: 348488 - protein, 13 aa, Homo sapiens
  CDR3 for beta chain variable domain of TCR clone 174244 (TRBV12-4, TRBJ2-2)
CASSITGSGELFF

SEQ ID NO: 348489 - protein, 15 aa, Homo sapiens
  CDR3 for alpha chain variable domain of TCR clone 174245 (TRAV23/DV6, TRAJ37)
CAASRGSSNTGKLIF

SEQ ID NO: 348490 - protein, 15 aa, Homo sapiens
  CDR3 for beta chain variable domain of TCR clone 174245 (TRBV6-5, TRBJ2-7)
CASSARLGSDNEQYF

SEQ ID NO: 348491 - protein, 14 aa, Homo sapiens
  CDR3 for alpha chain variable domain of TCR clone 174246 (TRAV17, TRAJ34)
CATVPIYNTDKLIF

SEQ ID NO: 348492 - protein, 18 aa, Homo sapiens
  CDR3 for beta chain variable domain of TCR clone 174246 (TRBV23-1, TRBJ2-1)
TVSLRQRSEKWLKNEQFF

SEQ ID NO: 348493 - protein, 15 aa, Homo sapiens
  CDR3 for alpha chain variable domain of TCR clone 174247 (TRAV8-3, TRAJ45)
CASSYSGGVADGLTF

SEQ ID NO: 348494 - protein, 10 aa, Homo sapiens
  CDR3 for beta chain variable domain of TCR clone 174247 (TRBV20-1, TRBJ2-5)
CSARFETQYF

SEQ ID NO: 348495 - protein, 15 aa, Homo sapiens
  CDR3 for alpha chain variable domain of TCR clone 174248 (TRAV13-1, TRAJ32)
CAASIYGGTTNKLIF

SEQ ID NO: 348496 - protein, 17 aa, Homo sapiens
  CDR3 for beta chain variable domain of TCR clone 174248 (TRBV7-3, TRBJ2-5)
CASSLGSGRSGSETQYF

SEQ ID NO: 348497 - protein, 14 aa, Homo sapiens
  CDR3 for alpha chain variable domain of TCR clone 174249 (TRAV8-4, TRAJ13)
CAVTLSGGYQKVTF

SEQ ID NO: 348498 - protein, 16 aa, Homo sapiens
  CDR3 for beta chain variable domain of TCR clone 174249 (TRBV24-1, TRBJ2-3)
CATSDAISGITDTQYF

SEQ ID NO: 348499 - protein, 13 aa, Homo sapiens
  CDR3 for alpha chain variable domain of TCR clone 174250 (TRAV13-2, TRAJ53)
CAENMGSNYKLTF

SEQ ID NO: 348500 - protein, 13 aa, Homo sapiens
  CDR3 for beta chain variable domain of TCR clone 174250 (TRBV4-1, TRBJ2-2)
YASSQENTGELFF

SEQ ID NO: 348501 - protein, 14 aa, Homo sapiens
  CDR3 for alpha chain variable domain of TCR clone 174251 (TRAV12-3, TRAJ28)
CATNSGAGSYQLTF

SEQ ID NO: 348502 - protein, 15 aa, Homo sapiens
  CDR3 for beta chain variable domain of TCR clone 174251 (TRBV10-3, TRBJ2-1)
CAIRNGTSGHNEQFF

SEQ ID NO: 348503 - protein, 16 aa, Homo sapiens
  CDR3 for alpha chain variable domain of TCR clone 174252 (TRAV30, TRAJ24)
CGTEIVDADSWGKFQF

SEQ ID NO: 348504 - protein, 15 aa, Homo sapiens
  CDR3 for beta chain variable domain of TCR clone 174252 (TRBV12-4, TRBJ2-1)
CASSVLGRTYNEQFF

SEQ ID NO: 348505 - protein, 14 aa, Homo sapiens
  CDR3 for alpha chain variable domain of TCR clone 174253 (TRAV12-1, TRAJ17)
CVVNYKAAGNKLTF

SEQ ID NO: 348506 - protein, 15 aa, Homo sapiens
  CDR3 for beta chain variable domain of TCR clone 174253 (TRBV7-9, TRBJ2-7)
CASSSSGLAVYEQYF

SEQ ID NO: 348507 - protein, 16 aa, Homo sapiens
  CDR3 for alpha chain variable domain of TCR clone 174254 (TRAV12-2, TRAJ28)
CAVITDSGAGSYQLTF

SEQ ID NO: 348508 - protein, 15 aa, Homo sapiens
  CDR3 for beta chain variable domain of TCR clone 174254 (TRBV25-1, TRBJ2-4)
CASSETESAKNIQYF

SEQ ID NO: 348509 - protein, 15 aa, Homo sapiens
  CDR3 for alpha chain variable domain of TCR clone 174255 (TRAV4, TRAJ15)
CLVGDIRRAGTAVIF

SEQ ID NO: 348510 - protein, 16 aa, Homo sapiens
  CDR3 for beta chain variable domain of TCR clone 174255 (TRBV12-5, TRBJ2-5)
CASGPRTSGNQETQYF

SEQ ID NO: 348511 - protein, 12 aa, Homo sapiens
  CDR3 for alpha chain variable domain of TCR clone 174256 (TRAV12-2, TRAJ43)
CAVNVNNNDMRF

SEQ ID NO: 348512 - protein, 13 aa, Homo sapiens
  CDR3 for beta chain variable domain of TCR clone 174256 (TRBV7-9, TRBJ1-2)
CASSLKQNYGYTF

SEQ ID NO: 348513 - protein, 14 aa, Homo sapiens
  CDR3 for alpha chain variable domain of TCR clone 174257 (TRAV12-3, TRAJ10)
SHLPLAGGGNKLTF

SEQ ID NO: 348514 - protein, 14 aa, Homo sapiens
  CDR3 for beta chain variable domain of TCR clone 174257 (TRBV6-1, TRBJ1-3)
CASVQGGGGNTIYL

SEQ ID NO: 348515 - protein, 14 aa, Homo sapiens
  CDR3 for alpha chain variable domain of TCR clone 174258 (TRAV1-2, TRAJ16)
CAVNRFSDGQKLLF

SEQ ID NO: 348516 - protein, 15 aa, Homo sapiens
  CDR3 for beta chain variable domain of TCR clone 174258 (TRBV19, TRBJ2-1)
CASSTGTSSYNEQFF

SEQ ID NO: 348517 - protein, 12 aa, Homo sapiens
  CDR3 for alpha chain variable domain of TCR clone 174259 (TRAV21, TRAJ31)
CVLAGNNARLMF

SEQ ID NO: 348518 - protein, 15 aa, Homo sapiens
  CDR3 for beta chain variable domain of TCR clone 174259 (TRBV7-6, TRBJ1-5)
CASSQSSGINQPQHF

SEQ ID NO: 348519 - protein, 14 aa, Homo sapiens
  CDR3 for alpha chain variable domain of TCR clone 174260 (TRAV12-3, TRAJ58)
CAMSTETSGSRLTF

SEQ ID NO: 348520 - protein, 13 aa, Homo sapiens
  CDR3 for beta chain variable domain of TCR clone 174260 (TRBV19, TRBJ2-2)
CASSIWSTGELFF

SEQ ID NO: 348521 - protein, 15 aa, Homo sapiens
  CDR3 for alpha chain variable domain of TCR clone 174261 (TRAV3, TRAJ20)
CAVRAIKLSDYKLSF

SEQ ID NO: 348522 - protein, 15 aa, Homo sapiens
  CDR3 for beta chain variable domain of TCR clone 174261 (TRBV7-9, TRBJ1-6)
CASSSPGRGNSPLLF

SEQ ID NO: 348523 - protein, 18 aa, Homo sapiens
  CDR3 for alpha chain variable domain of TCR clone 174262 (TRAV29/DV5, TRAJ52)
CAAGFRGAGGTSYGKPTF

SEQ ID NO: 348524 - protein, 16 aa, Homo sapiens
  CDR3 for beta chain variable domain of TCR clone 174262 (TRBV7-3, TRBJ2-2)
CACSLKRGTLSGELFF

SEQ ID NO: 348525 - protein, 14 aa, Homo sapiens
  CDR3 for alpha chain variable domain of TCR clone 174263 (TRAV16, TRAJ33)
CALSAMDSNYQLIW

SEQ ID NO: 348526 - protein, 14 aa, Homo sapiens
  CDR3 for beta chain variable domain of TCR clone 174263 (TRBV7-2, TRBJ2-7)
CASSGLAGRGEQYF

SEQ ID NO: 348527 - protein, 13 aa, Homo sapiens
  CDR3 for alpha chain variable domain of TCR clone 174264 (TRAV2, TRAJ15)
CAVASQAGTALIF

SEQ ID NO: 348528 - protein, 16 aa, Homo sapiens
  CDR3 for beta chain variable domain of TCR clone 174264 (TRBV18, TRBJ1-5)
CASSPYRVEGNKPQHF

SEQ ID NO: 348529 - protein, 16 aa, Homo sapiens
  CDR3 for alpha chain variable domain of TCR clone 174265 (TRAV3, TRAJ10)
CAVRDMRAGGGHKLTF

SEQ ID NO: 348530 - protein, 19 aa, Homo sapiens
  CDR3 for beta chain variable domain of TCR clone 174265 (TRBV6-3, TRBJ1-2)
CASSYSKGRTGPPNYGYTF

SEQ ID NO: 348531 - protein, 21 aa, Homo sapiens
  CDR3 for alpha chain variable domain of TCR clone 174266 (TRAV21, )
CAVRQDAGNNHIRNPDPAVYQ

SEQ ID NO: 348532 - protein, 16 aa, Homo sapiens
  CDR3 for beta chain variable domain of TCR clone 174266 (TRBV4-2, TRBJ1-1)
CASRPLDGGGDTEAFF

SEQ ID NO: 348533 - protein, 15 aa, Homo sapiens
  CDR3 for alpha chain variable domain of TCR clone 174267 (TRAV12-3, TRAJ11)
CAMSEENSGYSTLTF

SEQ ID NO: 348534 - protein, 16 aa, Homo sapiens
  CDR3 for beta chain variable domain of TCR clone 174267 (TRBV7-3, TRBJ2-2)
CASSLKRGTLSGELFF

SEQ ID NO: 348535 - protein, 13 aa, Homo sapiens
  CDR3 for alpha chain variable domain of TCR clone 174268 (TRAV13-2, TRAJ15)
CAESNQAGTALIF

SEQ ID NO: 348536 - protein, 14 aa, Homo sapiens
  CDR3 for beta chain variable domain of TCR clone 174268 (TRBV5-7, TRBJ1-5)
RASSLNRLNQPQHF

SEQ ID NO: 348537 - protein, 16 aa, Homo sapiens
  CDR3 for alpha chain variable domain of TCR clone 174269 (TRAV3, TRAJ28)
CAVREAYSGAGSYTHF

SEQ ID NO: 348538 - protein, 18 aa, Homo sapiens
  CDR3 for beta chain variable domain of TCR clone 174269 (TRBV27, TRBJ2-1)
CASGNRAVGVGSKNEQFF

SEQ ID NO: 348539 - protein, 14 aa, Homo sapiens
  CDR3 for alpha chain variable domain of TCR clone 174270 (TRAV1-2, TRAJ8)
CAVREDTGFQKLVL

SEQ ID NO: 348540 - protein, 16 aa, Homo sapiens
  CDR3 for beta chain variable domain of TCR clone 174270 (TRBV29-1, TRBJ2-6)
CSVEDITYSGANVLTF

SEQ ID NO: 348541 - protein, 13 aa, Homo sapiens
  CDR3 for alpha chain variable domain of TCR clone 174271 (TRAV4, TRAJ42)
CLVGGGSQGNPIF

SEQ ID NO: 348542 - protein, 15 aa, Homo sapiens
  CDR3 for beta chain variable domain of TCR clone 174271 (TRBV29-1, TRBJ2-7)
CSVEFFDRGSYEQYF

SEQ ID NO: 348543 - protein, 15 aa, Homo sapiens
  CDR3 for alpha chain variable domain of TCR clone 174272 (TRAV4, TRAJ38)
CLVGTNAGNNRKLIW

SEQ ID NO: 348544 - protein, 17 aa, Homo sapiens
  CDR3 for beta chain variable domain of TCR clone 174272 (TRBV7-8, TRBJ2-6)
CASSAGTGGAGANVLTF

SEQ ID NO: 348545 - protein, 12 aa, Homo sapiens
  CDR3 for alpha chain variable domain of TCR clone 174273 (TRAV12-2, TRAJ10)
WGVTGGGNKLTF

SEQ ID NO: 348546 - protein, 16 aa, Homo sapiens
  CDR3 for beta chain variable domain of TCR clone 174273 (TRBV7-3, TRBJ2-1)
CASSFTGRRSYNEQFF

SEQ ID NO: 348547 - protein, 11 aa, Homo sapiens
  CDR3 for alpha chain variable domain of TCR clone 174274 (TRAV13-1, TRAJ23)
RAASSRGKLIF

SEQ ID NO: 348548 - protein, 13 aa, Homo sapiens
  CDR3 for beta chain variable domain of TCR clone 174274 (TRBV7-3, TRBJ2-5)
CASSFRGGETQYF

SEQ ID NO: 348549 - protein, 14 aa, Homo sapiens
  CDR3 for alpha chain variable domain of TCR clone 174275 (TRAV8-3, TRAJ43)
CAVGSEFFNNDMRF

SEQ ID NO: 348550 - protein, 14 aa, Homo sapiens
  CDR3 for beta chain variable domain of TCR clone 174275 (TRBV3-1, TRBJ2-7)
CASSQSGAHYEQYF

SEQ ID NO: 348551 - protein, 12 aa, Homo sapiens
  CDR3 for alpha chain variable domain of TCR clone 174276 (TRAV13-2, TRAJ8)
CALWLGFQKLVF

SEQ ID NO: 348552 - protein, 16 aa, Homo sapiens
  CDR3 for beta chain variable domain of TCR clone 174276 (TRBV28, TRBJ1-5)
CASLPGGQGSAQPQHF

SEQ ID NO: 348553 - protein, 16 aa, Homo sapiens
  CDR3 for alpha chain variable domain of TCR clone 174277 (TRAV16, TRAJ4)
CALSRMFSGGYNKLIF

SEQ ID NO: 348554 - protein, 13 aa, Homo sapiens
  CDR3 for beta chain variable domain of TCR clone 174277 (TRBV28, TRBJ1-1)
CASSKQGWTEAFF

SEQ ID NO: 348555 - protein, 15 aa, Homo sapiens
  CDR3 for alpha chain variable domain of TCR clone 174278 (TRAV21, TRAJ40)
CAVRPQTSGTYKYIF

SEQ ID NO: 348556 - protein, 13 aa, Homo sapiens
  CDR3 for beta chain variable domain of TCR clone 174278 (TRBV7-2, TRBJ2-2)
CASSSVRAWELFF

SEQ ID NO: 348557 - protein, 14 aa, Homo sapiens
  CDR3 for alpha chain variable domain of TCR clone 174279 (TRAV38-2/DV8, TRAJ23)
CAYRKPNQGGKLIF

SEQ ID NO: 348558 - protein, 15 aa, Homo sapiens
  CDR3 for beta chain variable domain of TCR clone 174279 (TRBV2, TRBJ2-3)
CASSDFEKATDTQYF

SEQ ID NO: 348559 - protein, 11 aa, Homo sapiens
  CDR3 for alpha chain variable domain of TCR clone 174280 (TRAV12-1, TRAJ30)
CVVNVLGKIIF

SEQ ID NO: 348560 - protein, 16 aa, Homo sapiens
  CDR3 for beta chain variable domain of TCR clone 174280 (TRBV15, TRBJ2-3)
CATSRDLGIVTDTQYF

SEQ ID NO: 348561 - protein, 13 aa, Homo sapiens
  CDR3 for alpha chain variable domain of TCR clone 174281 (TRAV12-1, TRAJ53)
CVVNAESNYKLTF

SEQ ID NO: 348562 - protein, 15 aa, Homo sapiens
  CDR3 for beta chain variable domain of TCR clone 174281 (TRBV20-1, TRBJ2-5)
CSANPPGRGGETQYF

SEQ ID NO: 348563 - protein, 14 aa, Homo sapiens
  CDR3 for alpha chain variable domain of TCR clone 174282 (TRAV8-1, TRAJ17)
CAVNDNNAGNMFTF

SEQ ID NO: 348564 - protein, 17 aa, Homo sapiens
  CDR3 for beta chain variable domain of TCR clone 174282 (TRBV20-1, TRBJ2-1)
CSASSSGLAGSYNEQFF

SEQ ID NO: 348565 - protein, 13 aa, Homo sapiens
  CDR3 for alpha chain variable domain of TCR clone 174283 (TRAV13-2, TRAJ8)
CAFMNTGFQKLVF

SEQ ID NO: 348566 - protein, 17 aa, Homo sapiens
  CDR3 for beta chain variable domain of TCR clone 174283 (TRBV28, TRBJ2-1)
CASSSAKQALTYNEQFF

SEQ ID NO: 348567 - protein, 14 aa, Homo sapiens
  CDR3 for alpha chain variable domain of TCR clone 174284 (TRAV26-1, TRAJ38)
CIADNAGNNRKLIW

SEQ ID NO: 348568 - protein, 19 aa, Homo sapiens
  CDR3 for beta chain variable domain of TCR clone 174284 (TRBV25-1, TRBJ2-2)
CSILVYRVDRGRKTGELFF

SEQ ID NO: 348569 - protein, 13 aa, Homo sapiens
  CDR3 for alpha chain variable domain of TCR clone 174285 (TRAV3, TRAJ20)
CAVRSLNDYKISF

SEQ ID NO: 348570 - protein, 12 aa, Homo sapiens
  CDR3 for beta chain variable domain of TCR clone 174285 (TRBV6-1, TRBJ2-1)
CASYSTYNEQFF

SEQ ID NO: 348571 - protein, 12 aa, Homo sapiens
  CDR3 for alpha chain variable domain of TCR clone 174286 (TRAV35, TRAJ34)
CWAFYNTDKLIF

SEQ ID NO: 348572 - protein, 14 aa, Homo sapiens
  CDR3 for beta chain variable domain of TCR clone 174286 (TRBV18, TRBJ2-5)
CASSPGVSQETQYF

SEQ ID NO: 348573 - protein, 16 aa, Homo sapiens
  CDR3 for alpha chain variable domain of TCR clone 174287 (TRAV9-2, TRAJ10)
CALSEGGTVGGNKLTF

SEQ ID NO: 348574 - protein, 16 aa, Homo sapiens
  CDR3 for beta chain variable domain of TCR clone 174287 (TRBV7-2, TRBJ1-4)
CASSPVGRFDREKLFF

SEQ ID NO: 348575 - protein, 13 aa, Homo sapiens
  CDR3 for alpha chain variable domain of TCR clone 174288 (TRAV8-3, TRAJ28)
CAVGAVGSYQLTF

SEQ ID NO: 348576 - protein, 15 aa, Homo sapiens
  CDR3 for beta chain variable domain of TCR clone 174288 (TRBV7-3, TRBJ2-1)
CASSLGQGPFGEQFF

SEQ ID NO: 348577 - protein, 16 aa, Homo sapiens
  CDR3 for alpha chain variable domain of TCR clone 174289 (TRAV30, TRAJ24)
CGTELVDADSWGKFQF

SEQ ID NO: 348578 - protein, 14 aa, Homo sapiens
  CDR3 for beta chain variable domain of TCR clone 174289 (TRBV12-5, TRBJ2-5)
CASGSRAHQETQYF

SEQ ID NO: 348579 - protein, 17 aa, Homo sapiens
  CDR3 for alpha chain variable domain of TCR clone 174290 (TRAV35, TRAJ28)
CAGLQVYSGAGSYQLTF

SEQ ID NO: 348580 - protein, 12 aa, Homo sapiens
  CDR3 for beta chain variable domain of TCR clone 174290 (TRBV7-9, TRBJ2-7)
CASSFGSYEQYF

SEQ ID NO: 348581 - protein, 16 aa, Homo sapiens
  CDR3 for alpha chain variable domain of TCR clone 174291 (TRAV12-1, TRAJ43)
CVVNPHRFGAGTRLTV

SEQ ID NO: 348582 - protein, 13 aa, Homo sapiens
  CDR3 for beta chain variable domain of TCR clone 174291 (TRBV12-4, TRBJ1-2)
CASSSGPNCGYTF

SEQ ID NO: 348583 - protein, 12 aa, Homo sapiens
  CDR3 for alpha chain variable domain of TCR clone 174292 (TRAV12-3, TRAJ17)
CAMTLTGNKLTF

SEQ ID NO: 348584 - protein, 12 aa, Homo sapiens
  CDR3 for beta chain variable domain of TCR clone 174292 (TRBV11-2, TRBJ2-5)
WASSLGQETQYF

SEQ ID NO: 348585 - protein, 21 aa, Homo sapiens
  CDR3 for alpha chain variable domain of TCR clone 174293 (TRAV25, TRAJ47)
TATQTTDVGTYFWVYGNKLVF

SEQ ID NO: 348586 - protein, 16 aa, Homo sapiens
  CDR3 for beta chain variable domain of TCR clone 174293 (TRBV6-6, TRBJ2-1)
CASSWGGQGPYNEQFF

SEQ ID NO: 348587 - protein, 14 aa, Homo sapiens
  CDR3 for alpha chain variable domain of TCR clone 174294 (TRAV14/DV4, TRAJ34)
CAMREGRPRRHAHL

SEQ ID NO: 348588 - protein, 14 aa, Homo sapiens
  CDR3 for beta chain variable domain of TCR clone 174294 (TRBV19, TRBJ2-1)
CASPTFVLSGEQFF

SEQ ID NO: 348589 - protein, 17 aa, Homo sapiens
  CDR3 for alpha chain variable domain of TCR clone 174295 (TRAV17, TRAJ52)
CATERPSGGTSYGKLTF

SEQ ID NO: 348590 - protein, 13 aa, Homo sapiens
  CDR3 for beta chain variable domain of TCR clone 174295 (TRBV20-1, TRBJ1-1)
CSARGGGNTEAFF

SEQ ID NO: 348591 - protein, 13 aa, Homo sapiens
  CDR3 for alpha chain variable domain of TCR clone 174296 (TRAV12-3, TRAJ54)
CAMSVQGAQKLVF

SEQ ID NO: 348592 - protein, 14 aa, Homo sapiens
  CDR3 for beta chain variable domain of TCR clone 174296 (TRBV19, TRBJ2-1)
CASPTFVLSGEQFF

SEQ ID NO: 348593 - protein, 14 aa, Homo sapiens
  CDR3 for alpha chain variable domain of TCR clone 174297 (TRAV17, TRAJ22)
CATSPYGSARQLTF

SEQ ID NO: 348594 - protein, 14 aa, Homo sapiens
  CDR3 for beta chain variable domain of TCR clone 174297 (TRBV4-2, TRBJ2-1)
CASGLDRAYNEQFF

SEQ ID NO: 348595 - protein, 14 aa, Homo sapiens
  CDR3 for alpha chain variable domain of TCR clone 174298 (TRAV12-2, TRAJ5)
CAVNRSTSRRELTF

SEQ ID NO: 348596 - protein, 12 aa, Homo sapiens
  CDR3 for beta chain variable domain of TCR clone 174298 (TRBV19, TRBJ1-5)
CASSIAQQTQHF

SEQ ID NO: 348597 - protein, 14 aa, Homo sapiens
  CDR3 for alpha chain variable domain of TCR clone 174299 (TRAV26-1, TRAJ34)
CIVRVAYNTEKLSF

SEQ ID NO: 348598 - protein, 15 aa, Homo sapiens
  CDR3 for beta chain variable domain of TCR clone 174299 (TRBV7-9, TRBJ1-4)
CAGSRTGGFNEKLFF

SEQ ID NO: 348599 - protein, 21 aa, Homo sapiens
  CDR3 for alpha chain variable domain of TCR clone 174300 (TRAV1-2, TRAJ37)
CLLPLCCERFHGSGNTGKLIF

SEQ ID NO: 348600 - protein, 14 aa, Homo sapiens
  CDR3 for beta chain variable domain of TCR clone 174300 (TRBV2, TRBJ2-5)
CASSEVLAQESQYF

SEQ ID NO: 348601 - protein, 11 aa, Homo sapiens
  CDR3 for alpha chain variable domain of TCR clone 174301 (TRAV12-1, TRAJ21)
CVVYNFNKFYF

SEQ ID NO: 348602 - protein, 16 aa, Homo sapiens
  CDR3 for beta chain variable domain of TCR clone 174301 (TRBV29-1, TRBJ2-7)
CSVEDAEDGTAHEQYF

SEQ ID NO: 348603 - protein, 14 aa, Homo sapiens
  CDR3 for alpha chain variable domain of TCR clone 174302 (TRAV3, TRAJ22)
CAVRDYGSARQLTF

SEQ ID NO: 348604 - protein, 13 aa, Homo sapiens
  CDR3 for beta chain variable domain of TCR clone 174302 (TRBV11-2, TRBJ2-5)
CASGHWAKETQYF

SEQ ID NO: 348605 - protein, 15 aa, Homo sapiens
  CDR3 for alpha chain variable domain of TCR clone 174303 (TRAV3, TRAJ29)
CALRAPLSGNTPLAF

SEQ ID NO: 348606 - protein, 15 aa, Homo sapiens
  CDR3 for beta chain variable domain of TCR clone 174303 (TRBV28, TRBJ1-1)
CASRIKGGLNTEAFF

SEQ ID NO: 348607 - protein, 16 aa, Homo sapiens
  CDR3 for alpha chain variable domain of TCR clone 174304 (TRAV3, TRAJ34)
CAVRARGTPTRSSLGL

SEQ ID NO: 348608 - protein, 15 aa, Homo sapiens
  CDR3 for beta chain variable domain of TCR clone 174304 (TRBV6-3, TRBJ2-7)
CASSSPGTVFYEQYF

SEQ ID NO: 348609 - protein, 14 aa, Homo sapiens
  CDR3 for alpha chain variable domain of TCR clone 174305 (TRAV27, TRAJ40)
CAGSLLRGAYKYIF

SEQ ID NO: 348610 - protein, 15 aa, Homo sapiens
  CDR3 for beta chain variable domain of TCR clone 174305 (TRBV6-3, TRBJ1-4)
CASSSPGQENEKLFF

SEQ ID NO: 348611 - protein, 14 aa, Homo sapiens
  CDR3 for alpha chain variable domain of TCR clone 174306 (TRAV20, TRAJ42)
CAVEAGGSQGNLIF

SEQ ID NO: 348612 - protein, 14 aa, Homo sapiens
  CDR3 for beta chain variable domain of TCR clone 174306 (TRBV28, TRBJ1-2)
CASRIQGANYGYTF

SEQ ID NO: 348613 - protein, 15 aa, Homo sapiens
  CDR3 for alpha chain variable domain of TCR clone 174307 (TRAV26-1, TRAJ22)
CIVRVSFWFCKATDL

SEQ ID NO: 348614 - protein, 13 aa, Homo sapiens
  CDR3 for beta chain variable domain of TCR clone 174307 (TRBV7-9, TRBJ1-2)
CASSLKQNYGYTI

SEQ ID NO: 348615 - protein, 12 aa, Homo sapiens
  CDR3 for alpha chain variable domain of TCR clone 174308 (TRAV3, TRAJ43)
CAVRDPNNDMRF

SEQ ID NO: 348616 - protein, 14 aa, Homo sapiens
  CDR3 for beta chain variable domain of TCR clone 174308 (TRBV2, TRBJ1-5)
CASSGTVSNQPQHF

SEQ ID NO: 348617 - protein, 15 aa, Homo sapiens
  CDR3 for alpha chain variable domain of TCR clone 174309 (TRAV3, TRAJ20)
CAVSDIKLSEYKLSF

SEQ ID NO: 348618 - protein, 15 aa, Homo sapiens
  CDR3 for beta chain variable domain of TCR clone 174309 (TRBV7-9, TRBJ1-6)
CASSSPGRGNSPLHF

SEQ ID NO: 348619 - protein, 15 aa, Homo sapiens
  CDR3 for alpha chain variable domain of TCR clone 174310 (TRAV12-3, TRAJ6)
CAMSATSGGSYIPTF

SEQ ID NO: 348620 - protein, 14 aa, Homo sapiens
  CDR3 for beta chain variable domain of TCR clone 174310 (TRBV4-2, TRBJ1-1)
CASSRKSPNTEAFF

SEQ ID NO: 348621 - protein, 18 aa, Homo sapiens
  CDR3 for alpha chain variable domain of TCR clone 174311 (TRAV21, TRAJ52)
CAVRPSPAGGTSYGKLTF

SEQ ID NO: 348622 - protein, 13 aa, Homo sapiens
  CDR3 for beta chain variable domain of TCR clone 174311 (TRBV2, TRBJ1-1)
CASSVSGYTEAFF

SEQ ID NO: 348623 - protein, 12 aa, Homo sapiens
  CDR3 for alpha chain variable domain of TCR clone 174312 (TRAV12-1, TRAJ50)
CVGRTSYDKVLF

SEQ ID NO: 348624 - protein, 12 aa, Homo sapiens
  CDR3 for beta chain variable domain of TCR clone 174312 (TRBV5-7, TRBJ1-1)
CASSLVGTEAFF

SEQ ID NO: 348625 - protein, 15 aa, Homo sapiens
  CDR3 for alpha chain variable domain of TCR clone 174313 (TRAV2, TRAJ44)
CAVEAYTGTSSKLTF

SEQ ID NO: 348626 - protein, 14 aa, Homo sapiens
  CDR3 for beta chain variable domain of TCR clone 174313 (TRBV11-2, TRBJ2-1)
CASSPGSRDNEQFF

SEQ ID NO: 348627 - protein, 13 aa, Homo sapiens
  CDR3 for alpha chain variable domain of TCR clone 174314 (TRAV1-2, TRAJ9)
CAVLNTGGFKTIF

SEQ ID NO: 348628 - protein, 14 aa, Homo sapiens
  CDR3 for beta chain variable domain of TCR clone 174314 (TRBV25-1, TRBJ1-1)
CASTHLGGNTEAFF

SEQ ID NO: 348629 - protein, 14 aa, Homo sapiens
  CDR3 for alpha chain variable domain of TCR clone 174315 (TRAV12-2, TRAJ6)
CVPLRPGGSYIPTF

SEQ ID NO: 348630 - protein, 18 aa, Homo sapiens
  CDR3 for beta chain variable domain of TCR clone 174315 (TRBV28, TRBJ2-1)
CASSSTSGRANSYNEQFF

SEQ ID NO: 348631 - protein, 12 aa, Homo sapiens
  CDR3 for alpha chain variable domain of TCR clone 174316 (TRAV13-1, TRAJ27)
CAAHTNAGKSTF

SEQ ID NO: 348632 - protein, 15 aa, Homo sapiens
  CDR3 for beta chain variable domain of TCR clone 174316 (TRBV11-3, TRBJ2-2)
CASSLGGRPTGELFF

SEQ ID NO: 348633 - protein, 14 aa, Homo sapiens
  CDR3 for alpha chain variable domain of TCR clone 174317 (TRAV8-4, TRAJ9)
CAVILNTGGFKTIF

SEQ ID NO: 348634 - protein, 15 aa, Homo sapiens
  CDR3 for beta chain variable domain of TCR clone 174317 (TRBV18, TRBJ2-1)
CASSPPSASYNEQFF

SEQ ID NO: 348635 - protein, 13 aa, Homo sapiens
  CDR3 for alpha chain variable domain of TCR clone 174318 (TRAV2, TRAJ40)
CAVVTSGTYKYIF

SEQ ID NO: 348636 - protein, 16 aa, Homo sapiens
  CDR3 for beta chain variable domain of TCR clone 174318 (TRBV19, TRBJ2-1)
CPSSKAGPSSYNEQFF

SEQ ID NO: 348637 - protein, 15 aa, Homo sapiens
  CDR3 for alpha chain variable domain of TCR clone 174319 (TRAV3, TRAJ22)
CAVRDRGGSARQPTL

SEQ ID NO: 348638 - protein, 14 aa, Homo sapiens
  CDR3 for beta chain variable domain of TCR clone 174319 (TRBV19, TRBJ2-1)
CASPTFVLSGEQFF

SEQ ID NO: 348639 - protein, 14 aa, Homo sapiens
  CDR3 for alpha chain variable domain of TCR clone 174320 (TRAV13-1, TRAJ5)
CAASGGTGRRALTF

SEQ ID NO: 348640 - protein, 16 aa, Homo sapiens
  CDR3 for beta chain variable domain of TCR clone 174320 (TRBV6-1, TRBJ1-6)
CASSSDGAPRNSPLHF

SEQ ID NO: 348641 - protein, 16 aa, Homo sapiens
  CDR3 for alpha chain variable domain of TCR clone 174321 (TRAV12-3, TRAJ53)
CAMSPGSGGSNYKLQF

SEQ ID NO: 348642 - protein, 11 aa, Homo sapiens
  CDR3 for beta chain variable domain of TCR clone 174321 (TRBV29-1, TRBJ2-5)
CSEDRTGTQYF

SEQ ID NO: 348643 - protein, 14 aa, Homo sapiens
  CDR3 for alpha chain variable domain of TCR clone 174322 (TRAV8-1, TRAJ5)
CAVSMDTGRRALTF

SEQ ID NO: 348644 - protein, 11 aa, Homo sapiens
  CDR3 for beta chain variable domain of TCR clone 174322 (TRBV11-2, TRBJ2-2)
CASSLPGELFF

SEQ ID NO: 348645 - protein, 14 aa, Homo sapiens
  CDR3 for alpha chain variable domain of TCR clone 174323 (TRAV17, TRAJ57)
CATDPQGGSEKLVF

SEQ ID NO: 348646 - protein, 16 aa, Homo sapiens
  CDR3 for beta chain variable domain of TCR clone 174323 (TRBV4-1, TRBJ2-5)
CASSSGLAGVLGTQYF

SEQ ID NO: 348647 - protein, 13 aa, Homo sapiens
  CDR3 for alpha chain variable domain of TCR clone 174324 (TRAV12-3, TRAJ53)
CAMRGGSNYKLTL

SEQ ID NO: 348648 - protein, 15 aa, Homo sapiens
  CDR3 for beta chain variable domain of TCR clone 174324 (TRBV2, TRBJ2-1)
CATQARLVMIGEQFF

SEQ ID NO: 348649 - protein, 13 aa, Homo sapiens
  CDR3 for alpha chain variable domain of TCR clone 174325 (TRAV2, TRAJ29)
CAEQNSGNTPLGF

SEQ ID NO: 348650 - protein, 13 aa, Homo sapiens
  CDR3 for beta chain variable domain of TCR clone 174325 (TRBV28, TRBJ1-2)
CASSPGNRNGYTF

SEQ ID NO: 348651 - protein, 12 aa, Homo sapiens
  CDR3 for alpha chain variable domain of TCR clone 174326 (TRAV8-3, TRAJ4)
PAFSGGYNKLIF

SEQ ID NO: 348652 - protein, 13 aa, Homo sapiens
  CDR3 for beta chain variable domain of TCR clone 174326 (TRBV20-1, TRBJ1-3)
CSAEAYSGNTIYF

SEQ ID NO: 348653 - protein, 14 aa, Homo sapiens
  CDR3 for alpha chain variable domain of TCR clone 174327 (TRAV1-2, TRAJ16)
CAVNRFSDVQKLLF

SEQ ID NO: 348654 - protein, 15 aa, Homo sapiens
  CDR3 for beta chain variable domain of TCR clone 174327 (TRBV27, TRBJ2-1)
CASSNGGGSSNEQFF

SEQ ID NO: 348655 - protein, 11 aa, Homo sapiens
  CDR3 for alpha chain variable domain of TCR clone 174328 (TRAV23/DV6, TRAJ48)
CAPRWGEKLTF

SEQ ID NO: 348656 - protein, 13 aa, Homo sapiens
  CDR3 for beta chain variable domain of TCR clone 174328 (TRBV12-4, TRBJ2-5)
CASSPGTEKTQYF

SEQ ID NO: 348657 - protein, 14 aa, Homo sapiens
  CDR3 for alpha chain variable domain of TCR clone 174329 (TRAV8-4, TRAJ9)
CAVRINTGGFKTIF

SEQ ID NO: 348658 - protein, 13 aa, Homo sapiens
  CDR3 for beta chain variable domain of TCR clone 174329 (TRBV19, TRBJ1-2)
CASSVPGQDGYTF

SEQ ID NO: 348659 - protein, 14 aa, Homo sapiens
  CDR3 for alpha chain variable domain of TCR clone 174330 (TRAV13-1, TRAJ20)
CAARPGSNDYKPSF

SEQ ID NO: 348660 - protein, 12 aa, Homo sapiens
  CDR3 for beta chain variable domain of TCR clone 174330 (TRBV7-8, TRBJ2-7)
CASSLGDREQYF

SEQ ID NO: 348661 - protein, 15 aa, Homo sapiens
  CDR3 for alpha chain variable domain of TCR clone 174331 (TRAV3, TRAJ13)
CAVRVYFVGYQKVTF

SEQ ID NO: 348662 - protein, 15 aa, Homo sapiens
  CDR3 for beta chain variable domain of TCR clone 174331 (TRBV5-7, TRBJ1-2)
CASSLGVAANYGYTF

SEQ ID NO: 348663 - protein, 14 aa, Homo sapiens
  CDR3 for alpha chain variable domain of TCR clone 174332 (TRAV1-2, TRAJ16)
CAVNRFSDGQKLLF

SEQ ID NO: 348664 - protein, 12 aa, Homo sapiens
  CDR3 for beta chain variable domain of TCR clone 174332 (TRBV14, TRBJ1-1)
CASSQLKGLAYF

SEQ ID NO: 348665 - protein, 16 aa, Homo sapiens
  CDR3 for alpha chain variable domain of TCR clone 174333 (TRAV3, TRAJ37)
CDVRGKGSGNTGKLIF

SEQ ID NO: 348666 - protein, 15 aa, Homo sapiens
  CDR3 for beta chain variable domain of TCR clone 174333 (TRBV2, TRBJ2-2)
CASSRETVGTGELFF

SEQ ID NO: 348667 - protein, 13 aa, Homo sapiens
  CDR3 for alpha chain variable domain of TCR clone 174334 (TRAV8-2, TRAJ5)
CVVSGAARRALTF

SEQ ID NO: 348668 - protein, 15 aa, Homo sapiens
  CDR3 for beta chain variable domain of TCR clone 174334 (TRBV11-1, TRBJ2-1)
CASHTGLAGSNDQFF

SEQ ID NO: 348669 - protein, 14 aa, Homo sapiens
  CDR3 for alpha chain variable domain of TCR clone 174335 (TRAV1-2, TRAJ16)
CAVNRFSDGQKLPF

SEQ ID NO: 348670 - protein, 13 aa, Homo sapiens
  CDR3 for beta chain variable domain of TCR clone 174335 (TRBV3-1, TRBJ2-5)
CASSPVLSETQYF

SEQ ID NO: 348671 - protein, 12 aa, Homo sapiens
  CDR3 for alpha chain variable domain of TCR clone 174336 (TRAV13-1, TRAJ21)
CAAKEGFNKFYC

SEQ ID NO: 348672 - protein, 17 aa, Homo sapiens
  CDR3 for beta chain variable domain of TCR clone 174336 (TRBV19, TRBJ2-7)
CAGSISFYDSYPYEQYF

SEQ ID NO: 348673 - protein, 15 aa, Homo sapiens
  CDR3 for alpha chain variable domain of TCR clone 174337 (TRAV2, TRAJ9)
CAVEDRGTGGFKTIF

SEQ ID NO: 348674 - protein, 13 aa, Homo sapiens
  CDR3 for beta chain variable domain of TCR clone 174337 (TRBV20-1, TRBJ1-1)
CSARGGGNTDAFF

SEQ ID NO: 348675 - protein, 11 aa, Homo sapiens
  CDR3 for alpha chain variable domain of TCR clone 174338 (TRAV13-2, TRAJ20)
CADSNDYKLSF

SEQ ID NO: 348676 - protein, 14 aa, Homo sapiens
  CDR3 for beta chain variable domain of TCR clone 174338 (TRBV12-5, TRBJ2-5)
CASGSRTHQETQYF

SEQ ID NO: 348677 - protein, 11 aa, Homo sapiens
  CDR3 for alpha chain variable domain of TCR clone 174339 (TRAV35, TRAJ30)
CAGLRDDKIIF

SEQ ID NO: 348678 - protein, 19 aa, Homo sapiens
  CDR3 for beta chain variable domain of TCR clone 174339 (TRBV7-2, TRBJ2-3)
CASSFLSRNWGGGTDTQYF

SEQ ID NO: 348679 - protein, 12 aa, Homo sapiens
  CDR3 for alpha chain variable domain of TCR clone 174340 (TRAV17, TRAJ12)
CATLRSSYKLIF

SEQ ID NO: 348680 - protein, 14 aa, Homo sapiens
  CDR3 for beta chain variable domain of TCR clone 174340 (TRBV6-1, TRBJ1-3)
CASVQGGGGNTIYF

SEQ ID NO: 348681 - protein, 13 aa, Homo sapiens
  CDR3 for alpha chain variable domain of TCR clone 174341 (TRAV2, TRAJ39)
TTVHNNAGNMLTF

SEQ ID NO: 348682 - protein, 16 aa, Homo sapiens
  CDR3 for beta chain variable domain of TCR clone 174341 (TRBV24-1, TRBJ2-3)
CATSGYRDRDTDTHYF

SEQ ID NO: 348683 - protein, 12 aa, Homo sapiens
  CDR3 for alpha chain variable domain of TCR clone 174342 (TRAV21, TRAJ12)
CAVMDSSYKLIF

SEQ ID NO: 348684 - protein, 16 aa, Homo sapiens
  CDR3 for beta chain variable domain of TCR clone 174342 (TRBV7-9, TRBJ2-5)
CASRLEIGTRKETKYF

SEQ ID NO: 348685 - protein, 13 aa, Homo sapiens
  CDR3 for alpha chain variable domain of TCR clone 174343 (TRAV3, TRAJ30)
SAVRDRGDDKIFF

SEQ ID NO: 348686 - protein, 14 aa, Homo sapiens
  CDR3 for beta chain variable domain of TCR clone 174343 (TRBV5-1, TRBJ1-1)
CASSRTTGDTEAFF

SEQ ID NO: 348687 - protein, 16 aa, Homo sapiens
  CDR3 for alpha chain variable domain of TCR clone 174344 (TRAV12-2, TRAJ56)
CAVRRVDTGANSKLTF

SEQ ID NO: 348688 - protein, 11 aa, Homo sapiens
  CDR3 for beta chain variable domain of TCR clone 174344 (TRBV3-1, TRBJ2-7)
CASSQVREQYL

SEQ ID NO: 348689 - protein, 14 aa, Homo sapiens
  CDR3 for alpha chain variable domain of TCR clone 174345 (TRAV1-2, TRAJ16)
CAVNRFSDGQKLLF

SEQ ID NO: 348690 - protein, 16 aa, Homo sapiens
  CDR3 for beta chain variable domain of TCR clone 174345 (TRBV19, TRBJ2-1)
CASSEILAGDGNERFF

SEQ ID NO: 348691 - protein, 14 aa, Homo sapiens
  CDR3 for alpha chain variable domain of TCR clone 174346 (TRAV16, TRAJ54)
CALSGVQGAQKLVF

SEQ ID NO: 348692 - protein, 15 aa, Homo sapiens
  CDR3 for beta chain variable domain of TCR clone 174346 (TRBV18, TRBJ2-2)
CASSTSGLHTGELVF

SEQ ID NO: 348693 - protein, 12 aa, Homo sapiens
  CDR3 for alpha chain variable domain of TCR clone 174347 (TRAV13-1, TRAJ48)
CAANFGNEKLTF

SEQ ID NO: 348694 - protein, 13 aa, Homo sapiens
  CDR3 for beta chain variable domain of TCR clone 174347 (TRBV19, TRBJ1-2)
CASSVPGQDGYTF

SEQ ID NO: 348695 - protein, 18 aa, Homo sapiens
  CDR3 for alpha chain variable domain of TCR clone 174348 (TRAV1-2, TRAJ8)
CLLPLCCERDTGFQKLVF

SEQ ID NO: 348696 - protein, 12 aa, Homo sapiens
  CDR3 for beta chain variable domain of TCR clone 174348 (TRBV29-1, TRBJ2-3)
CSVTGGADTQYF

SEQ ID NO: 348697 - protein, 16 aa, Homo sapiens
  CDR3 for alpha chain variable domain of TCR clone 174349 (TRAV30, TRAJ24)
CGTEIVDADSWGQFQF

SEQ ID NO: 348698 - protein, 18 aa, Homo sapiens
  CDR3 for beta chain variable domain of TCR clone 174349 (TRBV11-2, TRBJ2-3)
CASSLGGASRGAPNTQYF

SEQ ID NO: 348699 - protein, 15 aa, Homo sapiens
  CDR3 for alpha chain variable domain of TCR clone 174350 (TRAV27, TRAJ38)
CAARRNAGNNRKLNR

SEQ ID NO: 348700 - protein, 13 aa, Homo sapiens
  CDR3 for beta chain variable domain of TCR clone 174350 (TRBV12-5, TRBJ2-3)
CASGDRQSDTQYF

SEQ ID NO: 348701 - protein, 11 aa, Homo sapiens
  CDR3 for alpha chain variable domain of TCR clone 174351 (TRAV26-1, TRAJ37)
CIVRVGRKLIF

SEQ ID NO: 348702 - protein, 15 aa, Homo sapiens
  CDR3 for beta chain variable domain of TCR clone 174351 (TRBV6-5, TRBJ2-3)
CASSRSGGARDTQYF

SEQ ID NO: 348703 - protein, 12 aa, Homo sapiens
  CDR3 for alpha chain variable domain of TCR clone 174352 (TRAV8-4, TRAJ43)
CAVSVNNNDMRF

SEQ ID NO: 348704 - protein, 15 aa, Homo sapiens
  CDR3 for beta chain variable domain of TCR clone 174352 (TRBV20-1, TRBJ2-7)
CSARDPVKGEGEQYC

SEQ ID NO: 348705 - protein, 12 aa, Homo sapiens
  CDR3 for alpha chain variable domain of TCR clone 174353 (TRAV12-3, TRAJ17)
CAMTLTGNKLTF

SEQ ID NO: 348706 - protein, 15 aa, Homo sapiens
  CDR3 for beta chain variable domain of TCR clone 174353 (TRBV20-1, TRBJ2-7)
GSARDRVYGMDEQYF

SEQ ID NO: 348707 - protein, 14 aa, Homo sapiens
  CDR3 for alpha chain variable domain of TCR clone 174354 (TRAV17, TRAJ57)
CATDPQGGSEKLVF

SEQ ID NO: 348708 - protein, 13 aa, Homo sapiens
  CDR3 for beta chain variable domain of TCR clone 174354 (TRBV12-4, TRBJ2-5)
CASSPGTEETQYF

SEQ ID NO: 348709 - protein, 14 aa, Homo sapiens
  CDR3 for alpha chain variable domain of TCR clone 174355 (TRAV38-1, TRAJ40)
CALRPTSGTYKYIF

SEQ ID NO: 348710 - protein, 14 aa, Homo sapiens
  CDR3 for beta chain variable domain of TCR clone 174355 (TRBV5-4, TRBJ1-1)
CASSLDSRSDEAFF

SEQ ID NO: 348711 - protein, 14 aa, Homo sapiens
  CDR3 for alpha chain variable domain of TCR clone 174356 (TRAV8-1, TRAJ6)
CAVNASGGSYIPTF

SEQ ID NO: 348712 - protein, 15 aa, Homo sapiens
  CDR3 for beta chain variable domain of TCR clone 174356 (TRBV28, TRBJ2-1)
CASRVGLDEYNEQFF

SEQ ID NO: 348713 - protein, 14 aa, Homo sapiens
  CDR3 for alpha chain variable domain of TCR clone 174357 (TRAV26-1, TRAJ21)
CIVRVGHNFNKFYF

SEQ ID NO: 348714 - protein, 14 aa, Homo sapiens
  CDR3 for beta chain variable domain of TCR clone 174357 (TRBV28, TRBJ2-3)
CASSWRGRADTQYF

SEQ ID NO: 348715 - protein, 12 aa, Homo sapiens
  CDR3 for alpha chain variable domain of TCR clone 174358 (TRAV13-2, TRAJ23)
CAERHRGGKLIF

SEQ ID NO: 348716 - protein, 11 aa, Homo sapiens
  CDR3 for beta chain variable domain of TCR clone 174358 (TRBV11-2, TRBJ2-2)
CQQPWRRELFF

SEQ ID NO: 348717 - protein, 15 aa, Homo sapiens
  CDR3 for alpha chain variable domain of TCR clone 174359 (TRAV3, TRAJ3)
CAVRDRDSSASKTIF

SEQ ID NO: 348718 - protein, 18 aa, Homo sapiens
  CDR3 for beta chain variable domain of TCR clone 174359 (TRBV25-1, TRBJ1-2)
CASSGLQNGQGLIFGYTF

SEQ ID NO: 348719 - protein, 13 aa, Homo sapiens
  CDR3 for alpha chain variable domain of TCR clone 174360 (TRAV27, TRAJ17)
WAGAATAGNKLTF

SEQ ID NO: 348720 - protein, 15 aa, Homo sapiens
  CDR3 for beta chain variable domain of TCR clone 174360 (TRBV5-1, TRBJ2-3)
CASRNQAGSTDTQYF

SEQ ID NO: 348721 - protein, 15 aa, Homo sapiens
  CDR3 for alpha chain variable domain of TCR clone 174361 (TRAV23/DV6, TRAJ37)
CAAGEGSGNTGKLNF

SEQ ID NO: 348722 - protein, 17 aa, Homo sapiens
  CDR3 for beta chain variable domain of TCR clone 174361 (TRBV20-1, TRBJ2-7)
CSATRAGGVAGVEEQYF

SEQ ID NO: 348723 - protein, 13 aa, Homo sapiens
  CDR3 for alpha chain variable domain of TCR clone 174362 (TRAV12-3, TRAJ40)
CAMSARGTYKYIF

SEQ ID NO: 348724 - protein, 16 aa, Homo sapiens
  CDR3 for beta chain variable domain of TCR clone 174362 (TRBV20-1, TRBJ2-3)
CSGEAGLAGGQDTLYF

SEQ ID NO: 348725 - protein, 15 aa, Homo sapiens
  CDR3 for alpha chain variable domain of TCR clone 174363 (TRAV35, TRAJ23)
CAGPLGNNQGGKLIF

SEQ ID NO: 348726 - protein, 14 aa, Homo sapiens
  CDR3 for beta chain variable domain of TCR clone 174363 (TRBV7-9, TRBJ1-1)
CASTPLQSYPEAFF

SEQ ID NO: 348727 - protein, 12 aa, Homo sapiens
  CDR3 for alpha chain variable domain of TCR clone 174364 (TRAV21, TRAJ56)
CAVGVNRSKLTF

SEQ ID NO: 348728 - protein, 13 aa, Homo sapiens
  CDR3 for beta chain variable domain of TCR clone 174364 (TRBV12-5, TRBJ2-3)
CASGDRQSDTQYF

SEQ ID NO: 348729 - protein, 12 aa, Homo sapiens
  CDR3 for alpha chain variable domain of TCR clone 174365 (TRAV12-3, TRAJ17)
CAMTPTGNKLTF

SEQ ID NO: 348730 - protein, 15 aa, Homo sapiens
  CDR3 for beta chain variable domain of TCR clone 174365 (TRBV20-1, TRBJ2-7)
CSARYRVSGMDEQYF

SEQ ID NO: 348731 - protein, 14 aa, Homo sapiens
  CDR3 for alpha chain variable domain of TCR clone 174366 (TRAV12-3, TRAJ57)
CARALEGGSENLVF

SEQ ID NO: 348732 - protein, 14 aa, Homo sapiens
  CDR3 for beta chain variable domain of TCR clone 174366 (TRBV19, TRBJ2-1)
CASGKSTQYNEQFF

SEQ ID NO: 348733 - protein, 12 aa, Homo sapiens
  CDR3 for alpha chain variable domain of TCR clone 174367 (TRAV1-1, TRAJ8)
CAGGTGFQKLVF

SEQ ID NO: 348734 - protein, 16 aa, Homo sapiens
  CDR3 for beta chain variable domain of TCR clone 174367 (TRBV12-5, TRBJ2-5)
CASGPRTSGNQEAQYF

SEQ ID NO: 348735 - protein, 11 aa, Homo sapiens
  CDR3 for alpha chain variable domain of TCR clone 174368 (TRAV2, TRAJ33)
CAVDSNYQLIW

SEQ ID NO: 348736 - protein, 16 aa, Homo sapiens
  CDR3 for beta chain variable domain of TCR clone 174368 (TRBV2, TRBJ2-5)
CASSETQGVGEETQYF

SEQ ID NO: 348737 - protein, 12 aa, Homo sapiens
  CDR3 for alpha chain variable domain of TCR clone 174369 (TRAV21, TRAJ29)
CAVTSGNTPLVF

SEQ ID NO: 348738 - protein, 18 aa, Homo sapiens
  CDR3 for beta chain variable domain of TCR clone 174369 (TRBV12-4, TRBJ2-2)
CASRPFGAGALNTGELFF

SEQ ID NO: 348739 - protein, 12 aa, Homo sapiens
  CDR3 for alpha chain variable domain of TCR clone 174370 (TRAV1-1, TRAJ8)
CAGGTGFQKLVF

SEQ ID NO: 348740 - protein, 15 aa, Homo sapiens
  CDR3 for beta chain variable domain of TCR clone 174370 (TRBV7-9, TRBJ1-4)
CAGSRSGGFNEKLFF

SEQ ID NO: 348741 - protein, 18 aa, Homo sapiens
  CDR3 for alpha chain variable domain of TCR clone 174371 (TRAV12-3, TRAJ52)
CAMSVGGAGGTSYGNLTF

SEQ ID NO: 348742 - protein, 15 aa, Homo sapiens
  CDR3 for beta chain variable domain of TCR clone 174371 (TRBV27, TRBJ1-6)
CASSFDRGLGSTLHF

SEQ ID NO: 348743 - protein, 15 aa, Homo sapiens
  CDR3 for alpha chain variable domain of TCR clone 174372 (TRAV26-2, TRAJ54)
CILRDVGQGAQKLVF

SEQ ID NO: 348744 - protein, 18 aa, Homo sapiens
  CDR3 for beta chain variable domain of TCR clone 174372 (TRBV7-9, TRBJ2-7)
CASSLTTSGSRTWYEQYF

SEQ ID NO: 348745 - protein, 14 aa, Homo sapiens
  CDR3 for alpha chain variable domain of TCR clone 174373 (TRAV13-1, TRAJ40)
CAASMTSGTYKYIF

SEQ ID NO: 348746 - protein, 15 aa, Homo sapiens
  CDR3 for beta chain variable domain of TCR clone 174373 (TRBV11-3, TRBJ2-3)
CASLKDGREGDTQYF

SEQ ID NO: 348747 - protein, 14 aa, Homo sapiens
  CDR3 for alpha chain variable domain of TCR clone 174374 (TRAV41, TRAJ48)
FAVISNFGNEKLTF

SEQ ID NO: 348748 - protein, 15 aa, Homo sapiens
  CDR3 for beta chain variable domain of TCR clone 174374 (TRBV11-3, TRBJ2-2)
CASSYFSTGTGELFF

SEQ ID NO: 348749 - protein, 13 aa, Homo sapiens
  CDR3 for alpha chain variable domain of TCR clone 174375 (TRAV2, TRAJ9)
CAVESTGGFKTIF

SEQ ID NO: 348750 - protein, 15 aa, Homo sapiens
  CDR3 for beta chain variable domain of TCR clone 174375 (TRBV10-3, TRBJ2-1)
CAITFGGGKDNEQFF

SEQ ID NO: 348751 - protein, 23 aa, Homo sapiens
  CDR3 for alpha chain variable domain of TCR clone 174376 (TRAV26-1, TRAJ38)
CIADNAGNNHIQNPDPAVYQLRD

SEQ ID NO: 348752 - protein, 12 aa, Homo sapiens
  CDR3 for beta chain variable domain of TCR clone 174376 (TRBV5-1, TRBJ2-5)
CASSLGLETQYF

SEQ ID NO: 348753 - protein, 17 aa, Homo sapiens
  CDR3 for alpha chain variable domain of TCR clone 174377 (TRAV26-1, TRAJ28)
CIIRALYSGAGSYQLTF

SEQ ID NO: 348754 - protein, 12 aa, Homo sapiens
  CDR3 for beta chain variable domain of TCR clone 174377 (TRBV12-4, TRBJ2-1)
CASRQTENEQFF

SEQ ID NO: 348755 - protein, 13 aa, Homo sapiens
  CDR3 for alpha chain variable domain of TCR clone 174378 (TRAV13-1, TRAJ5)
CAAEHTGRRALTF

SEQ ID NO: 348756 - protein, 13 aa, Homo sapiens
  CDR3 for beta chain variable domain of TCR clone 174378 (TRBV6-1, TRBJ2-1)
CASREDGGHEQFF

SEQ ID NO: 348757 - protein, 11 aa, Homo sapiens
  CDR3 for alpha chain variable domain of TCR clone 174379 (TRAV16, TRAJ49)
CSLNTGNQFYF

SEQ ID NO: 348758 - protein, 12 aa, Homo sapiens
  CDR3 for beta chain variable domain of TCR clone 174379 (TRBV7-9, TRBJ1-4)
CASSTDREKLFL

SEQ ID NO: 348759 - protein, 14 aa, Homo sapiens
  CDR3 for alpha chain variable domain of TCR clone 174380 (TRAV12-3, TRAJ7)
CAMSAIGGNNRLAF

SEQ ID NO: 348760 - protein, 13 aa, Homo sapiens
  CDR3 for beta chain variable domain of TCR clone 174380 (TRBV9, TRBJ1-1)
CASSVARNPEAFF

SEQ ID NO: 348761 - protein, 14 aa, Homo sapiens
  CDR3 for alpha chain variable domain of TCR clone 174381 (TRAV3, TRAJ8)
CAVSLNTGFQKLVF

SEQ ID NO: 348762 - protein, 16 aa, Homo sapiens
  CDR3 for beta chain variable domain of TCR clone 174381 (TRBV11-3, TRBJ2-5)
CASSSVVAGSTETQYF

SEQ ID NO: 348763 - protein, 13 aa, Homo sapiens
  CDR3 for alpha chain variable domain of TCR clone 174382 (TRAV13-1, TRAJ23)
CAASGRGGGKLIF

SEQ ID NO: 348764 - protein, 15 aa, Homo sapiens
  CDR3 for beta chain variable domain of TCR clone 174382 (TRBV7-9, TRBJ2-7)
CASSLALAEAYEQYF

SEQ ID NO: 348765 - protein, 14 aa, Homo sapiens
  CDR3 for alpha chain variable domain of TCR clone 174383 (TRAV12-3, TRAJ10)
SHLPLTGGGNKLTF

SEQ ID NO: 348766 - protein, 19 aa, Homo sapiens
  CDR3 for beta chain variable domain of TCR clone 174383 (TRBV24-1, TRBJ2-2)
CATSAGIVLAGANTGELFF

SEQ ID NO: 348767 - protein, 12 aa, Homo sapiens
  CDR3 for alpha chain variable domain of TCR clone 174384 (TRAV29/DV5, TRAJ34)
CAARHNTDKLIF

SEQ ID NO: 348768 - protein, 15 aa, Homo sapiens
  CDR3 for beta chain variable domain of TCR clone 174384 (TRBV12-4, TRBJ1-1)
CASSLAVSRGAEAFF

SEQ ID NO: 348769 - protein, 15 aa, Homo sapiens
  CDR3 for alpha chain variable domain of TCR clone 174385 (TRAV26-1, TRAJ44)
CIVRANTGTASKLTF

SEQ ID NO: 348770 - protein, 16 aa, Homo sapiens
  CDR3 for beta chain variable domain of TCR clone 174385 (TRBV7-7, TRBJ2-1)
CASSFASGPSYNEQFF

SEQ ID NO: 348771 - protein, 19 aa, Homo sapiens
  CDR3 for alpha chain variable domain of TCR clone 174386 (TRAV1-1, TRAJ30)
CAGSEMTRSSLEKGHDFIF

SEQ ID NO: 348772 - protein, 12 aa, Homo sapiens
  CDR3 for beta chain variable domain of TCR clone 174386 (TRBV19, TRBJ2-1)
CASSRQGSEQFF

SEQ ID NO: 348773 - protein, 13 aa, Homo sapiens
  CDR3 for alpha chain variable domain of TCR clone 174387 (TRAV38-1, TRAJ42)
GARWGGSQGNLIF

SEQ ID NO: 348774 - protein, 17 aa, Homo sapiens
  CDR3 for beta chain variable domain of TCR clone 174387 (TRBV20-1, TRBJ2-1)
CSARDPLAGAWDNEQFF

SEQ ID NO: 348775 - protein, 11 aa, Homo sapiens
  CDR3 for alpha chain variable domain of TCR clone 174388 (TRAV16, TRAJ30)
CSMNRDDKIIF

SEQ ID NO: 348776 - protein, 15 aa, Homo sapiens
  CDR3 for beta chain variable domain of TCR clone 174388 (TRBV28, TRBJ2-5)
CASSPPWSYQETQYF

SEQ ID NO: 348777 - protein, 13 aa, Homo sapiens
  CDR3 for alpha chain variable domain of TCR clone 174389 (TRAV3, TRAJ27)
CAVRPLGAGKSTF

SEQ ID NO: 348778 - protein, 15 aa, Homo sapiens
  CDR3 for beta chain variable domain of TCR clone 174389 (TRBV7-9, TRBJ1-5)
CASSQGHQPNQPQHL

SEQ ID NO: 348779 - protein, 13 aa, Homo sapiens
  CDR3 for alpha chain variable domain of TCR clone 174390 (TRAV27, TRAJ57)
CRSAQGGSEKLVF

SEQ ID NO: 348780 - protein, 15 aa, Homo sapiens
  CDR3 for beta chain variable domain of TCR clone 174390 (TRBV7-2, TRBJ1-2)
CASSPRAGWNYGYTF

SEQ ID NO: 348781 - protein, 14 aa, Homo sapiens
  CDR3 for alpha chain variable domain of TCR clone 174391 (TRAV21, TRAJ48)
CAVIAHFGNEKLTF

SEQ ID NO: 348782 - protein, 12 aa, Homo sapiens
  CDR3 for beta chain variable domain of TCR clone 174391 (TRBV11-2, TRBJ2-2)
CASSLGGGELFF

SEQ ID NO: 348783 - protein, 15 aa, Homo sapiens
  CDR3 for alpha chain variable domain of TCR clone 174392 (TRAV13-1, TRAJ5)
CAVSPIDTGRRALTF

SEQ ID NO: 348784 - protein, 18 aa, Homo sapiens
  CDR3 for beta chain variable domain of TCR clone 174392 (TRBV4-1, TRBJ2-2)
CASSFRTSGGEGPRELFF

SEQ ID NO: 348785 - protein, 12 aa, Homo sapiens
  CDR3 for alpha chain variable domain of TCR clone 174393 (TRAV2, TRAJ9)
CAVGAEGFKTIF

SEQ ID NO: 348786 - protein, 16 aa, Homo sapiens
  CDR3 for beta chain variable domain of TCR clone 174393 (TRBV13, TRBJ2-2)
CASSPRTGEHTGQLFF

SEQ ID NO: 348787 - protein, 14 aa, Homo sapiens
  CDR3 for alpha chain variable domain of TCR clone 174394 (TRAV1-2, TRAJ8)
CAVREGTGFQKLVF

SEQ ID NO: 348788 - protein, 17 aa, Homo sapiens
  CDR3 for beta chain variable domain of TCR clone 174394 (TRBV12-4, TRBJ2-3)
CASSGPGLAGGADTQYF

SEQ ID NO: 348789 - protein, 15 aa, Homo sapiens
  CDR3 for alpha chain variable domain of TCR clone 174395 (TRAV34, TRAJ38)
CGADFTPGNNRKLIW

SEQ ID NO: 348790 - protein, 12 aa, Homo sapiens
  CDR3 for beta chain variable domain of TCR clone 174395 (TRBV27, TRBJ2-7)
CASSGGFYEQYF

SEQ ID NO: 348791 - protein, 12 aa, Homo sapiens
  CDR3 for alpha chain variable domain of TCR clone 174396 (TRAV25, TRAJ11)
CAGASGYSTLTF

SEQ ID NO: 348792 - protein, 15 aa, Homo sapiens
  CDR3 for beta chain variable domain of TCR clone 174396 (TRBV10-3, TRBJ2-7)
CAISAQAGGPYEQYF

SEQ ID NO: 348793 - protein, 16 aa, Homo sapiens
  CDR3 for alpha chain variable domain of TCR clone 174397 (TRAV30, TRAJ24)
CGTEIVDADSWGKFQF

SEQ ID NO: 348794 - protein, 13 aa, Homo sapiens
  CDR3 for beta chain variable domain of TCR clone 174397 (TRBV12-4, TRBJ2-5)
CASSLFRRETQYF

SEQ ID NO: 348795 - protein, 11 aa, Homo sapiens
  CDR3 for alpha chain variable domain of TCR clone 174398 (TRAV1-1, TRAJ23)
CAVRQGGQLIF

SEQ ID NO: 348796 - protein, 20 aa, Homo sapiens
  CDR3 for beta chain variable domain of TCR clone 174398 (TRBV7-8, TRBJ2-2)
CASSHLFPGPTVHITGELFF

SEQ ID NO: 348797 - protein, 15 aa, Homo sapiens
  CDR3 for alpha chain variable domain of TCR clone 174399 (TRAV8-3, TRAJ27)
CAVGPSKTNAGKSTF

SEQ ID NO: 348798 - protein, 15 aa, Homo sapiens
  CDR3 for beta chain variable domain of TCR clone 174399 (TRBV7-2, TRBJ2-1)
CGSSSGLAGGNEQFF

SEQ ID NO: 348799 - protein, 12 aa, Homo sapiens
  CDR3 for alpha chain variable domain of TCR clone 174400 (TRAV13-1, TRAJ27)
CAAHTNAGKSTF

SEQ ID NO: 348800 - protein, 15 aa, Homo sapiens
  CDR3 for beta chain variable domain of TCR clone 174400 (TRBV7-9, TRBJ1-4)
CASSARTGGNEKLFF

SEQ ID NO: 348801 - protein, 15 aa, Homo sapiens
  CDR3 for alpha chain variable domain of TCR clone 174401 (TRAV12-1, TRAJ44)
CVVDEYTGTASKLTF

SEQ ID NO: 348802 - protein, 13 aa, Homo sapiens
  CDR3 for beta chain variable domain of TCR clone 174401 (TRBV3-1, TRBJ1-1)
CASSPGVITEAFF

SEQ ID NO: 348803 - protein, 11 aa, Homo sapiens
  CDR3 for alpha chain variable domain of TCR clone 174402 (TRAV2, TRAJ13)
CASGGYQEVTF

SEQ ID NO: 348804 - protein, 14 aa, Homo sapiens
  CDR3 for beta chain variable domain of TCR clone 174402 (TRBV19, TRBJ2-1)
CASPTFVLSGEQFF

SEQ ID NO: 348805 - protein, 10 aa, Homo sapiens
  CDR3 for alpha chain variable domain of TCR clone 174403 (TRAV30, TRAJ24)
CGTEIVELTA

SEQ ID NO: 348806 - protein, 14 aa, Homo sapiens
  CDR3 for beta chain variable domain of TCR clone 174403 (TRBV12-5, TRBJ2-5)
CASGSRTHQETQYF

SEQ ID NO: 348807 - protein, 14 aa, Homo sapiens
  CDR3 for alpha chain variable domain of TCR clone 174404 (TRAV12-3, TRAJ10)
SHLPLTGGGNKLTF

SEQ ID NO: 348808 - protein, 11 aa, Homo sapiens
  CDR3 for beta chain variable domain of TCR clone 174404 (TRBV25-1, TRBJ2-4)
CQSRDQNMQYF

SEQ ID NO: 348809 - protein, 14 aa, Homo sapiens
  CDR3 for alpha chain variable domain of TCR clone 174405 (TRAV12-1, TRAJ54)
CVVNIYQGAQKLVF

SEQ ID NO: 348810 - protein, 13 aa, Homo sapiens
  CDR3 for beta chain variable domain of TCR clone 174405 (TRBV11-2, TRBJ2-5)
CASSSTGEETQYF

SEQ ID NO: 348811 - protein, 15 aa, Homo sapiens
  CDR3 for alpha chain variable domain of TCR clone 174406 (TRAV23/DV6, TRAJ10)
CAASRLLYSREDETN

SEQ ID NO: 348812 - protein, 15 aa, Homo sapiens
  CDR3 for beta chain variable domain of TCR clone 174406 (TRBV20-1, TRBJ2-1)
CSAEGGLLAGDEQFF

SEQ ID NO: 348813 - protein, 14 aa, Homo sapiens
  CDR3 for alpha chain variable domain of TCR clone 174407 (TRAV12-2, TRAJ17)
CAVLFKAAGNKLTF

SEQ ID NO: 348814 - protein, 14 aa, Homo sapiens
  CDR3 for beta chain variable domain of TCR clone 174407 (TRBV7-2, TRBJ2-5)
CASSLSGGGETQYF

SEQ ID NO: 348815 - protein, 17 aa, Homo sapiens
  CDR3 for alpha chain variable domain of TCR clone 174408 (TRAV3, TRAJ6)
CAVRDGPRAGGSYIPTF

SEQ ID NO: 348816 - protein, 13 aa, Homo sapiens
  CDR3 for beta chain variable domain of TCR clone 174408 (TRBV2, TRBJ1-5)
CATAGPGNQPQHF

SEQ ID NO: 348817 - protein, 14 aa, Homo sapiens
  CDR3 for alpha chain variable domain of TCR clone 174409 (TRAV23/DV6, TRAJ6)
CAASRSGGSYIPKF

SEQ ID NO: 348818 - protein, 17 aa, Homo sapiens
  CDR3 for beta chain variable domain of TCR clone 174409 (TRBV20-1, TRBJ2-1)
CSASASRLAGSYNEQFF

SEQ ID NO: 348819 - protein, 16 aa, Homo sapiens
  CDR3 for alpha chain variable domain of TCR clone 174410 (TRAV13-1, TRAJ48)
CAASIFGNFGNEKLTF

SEQ ID NO: 348820 - protein, 11 aa, Homo sapiens
  CDR3 for beta chain variable domain of TCR clone 174410 (TRBV7-3, TRBJ2-5)
CASSLSETQYF

SEQ ID NO: 348821 - protein, 16 aa, Homo sapiens
  CDR3 for alpha chain variable domain of TCR clone 174411 (TRAV3, TRAJ37)
CAVRDSGSGNTSKLIF

SEQ ID NO: 348822 - protein, 12 aa, Homo sapiens
  CDR3 for beta chain variable domain of TCR clone 174411 (TRBV7-2, TRBJ2-5)
CASSLYQETQYF

SEQ ID NO: 348823 - protein, 16 aa, Homo sapiens
  CDR3 for alpha chain variable domain of TCR clone 174412 (TRAV26-1, TRAJ48)
IASSDLSNFGNEKLTF

SEQ ID NO: 348824 - protein, 14 aa, Homo sapiens
  CDR3 for beta chain variable domain of TCR clone 174412 (TRBV13, TRBJ2-7)
CASSLKGASYEQFF

SEQ ID NO: 348825 - protein, 14 aa, Homo sapiens
  CDR3 for alpha chain variable domain of TCR clone 174413 (TRAV12-3, TRAJ12)
CAMSRMDSSYKLIF

SEQ ID NO: 348826 - protein, 14 aa, Homo sapiens
  CDR3 for beta chain variable domain of TCR clone 174413 (TRBV20-1, TRBJ1-4)
CSARPGQSNEKLFF

SEQ ID NO: 348827 - protein, 17 aa, Homo sapiens
  CDR3 for alpha chain variable domain of TCR clone 174414 (TRAV17, TRAJ52)
CATERPSGGTSYGKLTF

SEQ ID NO: 348828 - protein, 19 aa, Homo sapiens
  CDR3 for beta chain variable domain of TCR clone 174414 (TRBV25-1, TRBJ2-2)
CAILVYRVDRGRKTGELFF

SEQ ID NO: 348829 - protein, 13 aa, Homo sapiens
  CDR3 for alpha chain variable domain of TCR clone 174415 (TRAV13-2, TRAJ48)
CAEMDFRNEKLTF

SEQ ID NO: 348830 - protein, 13 aa, Homo sapiens
  CDR3 for beta chain variable domain of TCR clone 174415 (TRBV7-9, TRBJ1-2)
CASSLKQNYGYTF

SEQ ID NO: 348831 - protein, 18 aa, Homo sapiens
  CDR3 for alpha chain variable domain of TCR clone 174416 (TRAV21, TRAJ52)
CAVRPSPAGGISYGKLTF

SEQ ID NO: 348832 - protein, 15 aa, Homo sapiens
  CDR3 for beta chain variable domain of TCR clone 174416 (TRBV20-1, TRBJ2-7)
CSARDRVSGMDEQYF

SEQ ID NO: 348833 - protein, 16 aa, Homo sapiens
  CDR3 for alpha chain variable domain of TCR clone 174417 (TRAV35, TRAJ28)
CAGQKYSGAGSYQLTF

SEQ ID NO: 348834 - protein, 16 aa, Homo sapiens
  CDR3 for beta chain variable domain of TCR clone 174417 (TRBV7-3, TRBJ2-2)
CASSLKRGALSGELFF

SEQ ID NO: 348835 - protein, 12 aa, Homo sapiens
  CDR3 for alpha chain variable domain of TCR clone 174418 (TRAV2, TRAJ33)
CAFMDSNYQLVW

SEQ ID NO: 348836 - protein, 16 aa, Homo sapiens
  CDR3 for beta chain variable domain of TCR clone 174418 (TRBV2, TRBJ2-7)
CASSEPWTGPSYEQYF

SEQ ID NO: 348837 - protein, 14 aa, Homo sapiens
  CDR3 for alpha chain variable domain of TCR clone 174419 (TRAV12-2, TRAJ17)
CAVLFKAAGNKLTF

SEQ ID NO: 348838 - protein, 16 aa, Homo sapiens
  CDR3 for beta chain variable domain of TCR clone 174419 (TRBV7-3, TRBJ2-1)
CASSLVSGSSNNEQFF

SEQ ID NO: 348839 - protein, 16 aa, Homo sapiens
  CDR3 for alpha chain variable domain of TCR clone 174420 (TRAV30, TRAJ24)
CGTEIVDADSWVKFQF

SEQ ID NO: 348840 - protein, 14 aa, Homo sapiens
  CDR3 for beta chain variable domain of TCR clone 174420 (TRBV7-8, TRBJ2-3)
CASSLEAGTDTQYF

SEQ ID NO: 348841 - protein, 16 aa, Homo sapiens
  CDR3 for alpha chain variable domain of TCR clone 174421 (TRAV1-2, TRAJ6)
CAVRDQGTGGSYIPPF

SEQ ID NO: 348842 - protein, 13 aa, Homo sapiens
  CDR3 for beta chain variable domain of TCR clone 174421 (TRBV28, TRBJ2-7)
CASTPGLAGEQYF

SEQ ID NO: 348843 - protein, 11 aa, Homo sapiens
  CDR3 for alpha chain variable domain of TCR clone 174422 (TRAV9-2, TRAJ13)
CAQGGYKKVTF

SEQ ID NO: 348844 - protein, 13 aa, Homo sapiens
  CDR3 for beta chain variable domain of TCR clone 174422 (TRBV5-1, TRBJ1-2)
CASSSTGVYGYTF

SEQ ID NO: 348845 - protein, 12 aa, Homo sapiens
  CDR3 for alpha chain variable domain of TCR clone 174423 (TRAV12-3, TRAJ29)
CAAAKGNTPLVF

SEQ ID NO: 348846 - protein, 15 aa, Homo sapiens
  CDR3 for beta chain variable domain of TCR clone 174423 (TRBV2, TRBJ2-7)
CASSEGLARSYEQYF

SEQ ID NO: 348847 - protein, 16 aa, Homo sapiens
  CDR3 for alpha chain variable domain of TCR clone 174424 (TRAV26-2, TRAJ48)
CILRPPFNFGNEKLTF

SEQ ID NO: 348848 - protein, 15 aa, Homo sapiens
  CDR3 for beta chain variable domain of TCR clone 174424 (TRBV20-1, TRBJ2-3)
CSARVEGTYTETQYF

SEQ ID NO: 348849 - protein, 16 aa, Homo sapiens
  CDR3 for alpha chain variable domain of TCR clone 174425 (TRAV12-2, TRAJ18)
CAVTTDRGSTLGRLNF

SEQ ID NO: 348850 - protein, 14 aa, Homo sapiens
  CDR3 for beta chain variable domain of TCR clone 174425 (TRBV4-2, TRBJ1-5)
CASSQDSINQPQHF

SEQ ID NO: 348851 - protein, 12 aa, Homo sapiens
  CDR3 for alpha chain variable domain of TCR clone 174426 (TRAV29/DV5, TRAJ49)
CAATDTGNQFYF

SEQ ID NO: 348852 - protein, 19 aa, Homo sapiens
  CDR3 for beta chain variable domain of TCR clone 174426 (TRBV25-1, TRBJ2-2)
CAILVYRVDRGRKTGQLFF

SEQ ID NO: 348853 - protein, 16 aa, Homo sapiens
  CDR3 for alpha chain variable domain of TCR clone 174427 (TRAV3, TRAJ18)
CAVRDGRGSALGRLYF

SEQ ID NO: 348854 - protein, 17 aa, Homo sapiens
  CDR3 for beta chain variable domain of TCR clone 174427 (TRBV5-1, TRBJ2-3)
CASSKIGLVDRTDTQYF

SEQ ID NO: 348855 - protein, 11 aa, Homo sapiens
  CDR3 for alpha chain variable domain of TCR clone 174428 (TRAV12-1, TRAJ8)
CVVTGFQKLVF

SEQ ID NO: 348856 - protein, 16 aa, Homo sapiens
  CDR3 for beta chain variable domain of TCR clone 174428 (TRBV19, TRBJ1-1)
CASRFGGPVTGTEAFF

SEQ ID NO: 348857 - protein, 14 aa, Homo sapiens
  CDR3 for alpha chain variable domain of TCR clone 174429 (TRAV12-1, TRAJ9)
CVVTGDTGGFKTIF

SEQ ID NO: 348858 - protein, 16 aa, Homo sapiens
  CDR3 for beta chain variable domain of TCR clone 174429 (TRBV29-1, TRBJ1-2)
CSVEANRDIANYGYTV

SEQ ID NO: 348859 - protein, 12 aa, Homo sapiens
  CDR3 for alpha chain variable domain of TCR clone 174430 (TRAV12-1, TRAJ40)
CVFYSGTYKYIF

SEQ ID NO: 348860 - protein, 15 aa, Homo sapiens
  CDR3 for beta chain variable domain of TCR clone 174430 (TRBV11-3, TRBJ2-3)
CASLKDGREGDTQYF

SEQ ID NO: 348861 - protein, 15 aa, Homo sapiens
  CDR3 for alpha chain variable domain of TCR clone 174431 (TRAV8-6, TRAJ10)
CAVSDQAGGGNKLTL

SEQ ID NO: 348862 - protein, 14 aa, Homo sapiens
  CDR3 for beta chain variable domain of TCR clone 174431 (TRBV7-6, TRBJ2-3)
CASSLGTVTDTQYF

SEQ ID NO: 348863 - protein, 16 aa, Homo sapiens
  CDR3 for alpha chain variable domain of TCR clone 174432 (TRAV16, TRAJ54)
CALSPPLIQGAQKLVF

SEQ ID NO: 348864 - protein, 14 aa, Homo sapiens
  CDR3 for beta chain variable domain of TCR clone 174432 (TRBV25-1, TRBJ2-5)
CASSESTGRETQYF

SEQ ID NO: 348865 - protein, 14 aa, Homo sapiens
  CDR3 for alpha chain variable domain of TCR clone 174433 (TRAV17, TRAJ56)
CDTVPAGANSKLTF

SEQ ID NO: 348866 - protein, 13 aa, Homo sapiens
  CDR3 for beta chain variable domain of TCR clone 174433 (TRBV12-4, TRBJ2-2)
CASSITGSGELFF

SEQ ID NO: 348867 - protein, 10 aa, Homo sapiens
  CDR3 for alpha chain variable domain of TCR clone 174434 (TRAV1-2, TRAJ23)
CAGQGGKLIF

SEQ ID NO: 348868 - protein, 14 aa, Homo sapiens
  CDR3 for beta chain variable domain of TCR clone 174434 (TRBV6-1, TRBJ1-3)
CASVPGGGGNTIYF

SEQ ID NO: 348869 - protein, 16 aa, Homo sapiens
  CDR3 for alpha chain variable domain of TCR clone 174435 (TRAV16, TRAJ4)
CALSRMFSGGYNKLIF

SEQ ID NO: 348870 - protein, 13 aa, Homo sapiens
  CDR3 for beta chain variable domain of TCR clone 174435 (TRBV7-3, TRBJ1-2)
CASSLKRGYGYTF

SEQ ID NO: 348871 - protein, 14 aa, Homo sapiens
  CDR3 for alpha chain variable domain of TCR clone 174436 (TRAV30, TRAJ33)
CVTVAPRSNYQLIW

SEQ ID NO: 348872 - protein, 15 aa, Homo sapiens
  CDR3 for beta chain variable domain of TCR clone 174436 (TRBV7-9, TRBJ2-2)
CASGPLDTFPGELFF

SEQ ID NO: 348873 - protein, 16 aa, Homo sapiens
  CDR3 for alpha chain variable domain of TCR clone 174437 (TRAV30, TRAJ24)
CGTEIVDADSWGKFQF

SEQ ID NO: 348874 - protein, 15 aa, Homo sapiens
  CDR3 for beta chain variable domain of TCR clone 174437 (TRBV7-9, TRBJ1-4)
CASSARTGGNEKLCF

SEQ ID NO: 348875 - protein, 15 aa, Homo sapiens
  CDR3 for alpha chain variable domain of TCR clone 174438 (TRAV27, TRAJ38)
CAARRNAGNNRKPIW

SEQ ID NO: 348876 - protein, 13 aa, Homo sapiens
  CDR3 for beta chain variable domain of TCR clone 174438 (TRBV7-3, TRBJ1-1)
CASSQDWGAEAFF

SEQ ID NO: 348877 - protein, 17 aa, Homo sapiens
  CDR3 for alpha chain variable domain of TCR clone 174439 (TRAV3, TRAJ6)
CAVRDGPRAGGRYIPTF

SEQ ID NO: 348878 - protein, 20 aa, Homo sapiens
  CDR3 for beta chain variable domain of TCR clone 174439 (TRBV7-8, TRBJ2-2)
CASSHLFPGPTIHITGELFF

SEQ ID NO: 348879 - protein, 15 aa, Homo sapiens
  CDR3 for alpha chain variable domain of TCR clone 174440 (TRAV26-1, TRAJ22)
CIVRVSFWSCKATDL

SEQ ID NO: 348880 - protein, 13 aa, Homo sapiens
  CDR3 for beta chain variable domain of TCR clone 174440 (TRBV7-9, TRBJ1-2)
CASSLKQNYGYAF

SEQ ID NO: 348881 - protein, 16 aa, Homo sapiens
  CDR3 for alpha chain variable domain of TCR clone 174441 (TRAV12-3, TRAJ53)
CAMSPGSGGSNYKLTL

SEQ ID NO: 348882 - protein, 11 aa, Homo sapiens
  CDR3 for beta chain variable domain of TCR clone 174441 (TRBV29-1, TRBJ2-5)
CSEDRTGTQYS

SEQ ID NO: 348883 - protein, 18 aa, Homo sapiens
  CDR3 for alpha chain variable domain of TCR clone 174442 (TRAV26-1, TRAJ32)
CIVRANYGGATNKPILEL

SEQ ID NO: 348884 - protein, 14 aa, Homo sapiens
  CDR3 for beta chain variable domain of TCR clone 174442 (TRBV27, TRBJ1-1)
CASSLLSGLSEAFF

SEQ ID NO: 348885 - protein, 16 aa, Homo sapiens
  CDR3 for alpha chain variable domain of TCR clone 174443 (TRAV30, TRAJ24)
CGTEIVDADSWGKFHF

SEQ ID NO: 348886 - protein, 15 aa, Homo sapiens
  CDR3 for beta chain variable domain of TCR clone 174443 (TRBV5-1, TRBJ2-7)
CASSLNGGPAREQYF

SEQ ID NO: 348887 - protein, 15 aa, Homo sapiens
  CDR3 for alpha chain variable domain of TCR clone 174444 (TRAV35, TRAJ58)
CAGRRQETSGSRLTF

SEQ ID NO: 348888 - protein, 14 aa, Homo sapiens
  CDR3 for beta chain variable domain of TCR clone 174444 (TRBV19, TRBJ2-1)
CASPTFVLSGEQFF

SEQ ID NO: 348889 - protein, 12 aa, Homo sapiens
  CDR3 for alpha chain variable domain of TCR clone 174445 (TRAV1-1, TRAJ39)
CAVPVVGNMLTF

SEQ ID NO: 348890 - protein, 13 aa, Homo sapiens
  CDR3 for beta chain variable domain of TCR clone 174445 (TRBV4-1, TRBJ2-2)
CASSQENTGELFF

SEQ ID NO: 348891 - protein, 16 aa, Homo sapiens
  CDR3 for alpha chain variable domain of TCR clone 174446 (TRAV17, TRAJ17)
CATALQEEAAGNKQTF

SEQ ID NO: 348892 - protein, 12 aa, Homo sapiens
  CDR3 for beta chain variable domain of TCR clone 174446 (TRBV4-2, TRBJ2-5)
CASGGAQETQYF

SEQ ID NO: 348893 - protein, 12 aa, Homo sapiens
  CDR3 for alpha chain variable domain of TCR clone 174447 (TRAV12-3, TRAJ17)
CAMTLTGNKLTF

SEQ ID NO: 348894 - protein, 15 aa, Homo sapiens
  CDR3 for beta chain variable domain of TCR clone 174447 (TRBV29-1, TRBJ2-6)
CSFTGGRSGANVLSF

SEQ ID NO: 348895 - protein, 13 aa, Homo sapiens
  CDR3 for alpha chain variable domain of TCR clone 174448 (TRAV2, TRAJ15)
CAVASQAGTALVF

SEQ ID NO: 348896 - protein, 16 aa, Homo sapiens
  CDR3 for beta chain variable domain of TCR clone 174448 (TRBV20-1, TRBJ1-4)
CSAPGQGLLTNEKLFF

SEQ ID NO: 348897 - protein, 16 aa, Homo sapiens
  CDR3 for alpha chain variable domain of TCR clone 174449 (TRAV3, TRAJ10)
CAVRDMRAGGGNKLTF

SEQ ID NO: 348898 - protein, 13 aa, Homo sapiens
  CDR3 for beta chain variable domain of TCR clone 174449 (TRBV4-1, TRBJ2-1)
CASSQEVQYEQFF

SEQ ID NO: 348899 - protein, 21 aa, Homo sapiens
  CDR3 for alpha chain variable domain of TCR clone 174450 (TRAV3, TRAJ17)
CAVRARRGGRTCRQQANFCRR

SEQ ID NO: 348900 - protein, 14 aa, Homo sapiens
  CDR3 for beta chain variable domain of TCR clone 174450 (TRBV4-1, TRBJ2-2)
CASSQAVNTGELFL

SEQ ID NO: 348901 - protein, 12 aa, Homo sapiens
  CDR3 for alpha chain variable domain of TCR clone 174451 (TRAV3, TRAJ39)
CAVIEWSNMLTF

SEQ ID NO: 348902 - protein, 13 aa, Homo sapiens
  CDR3 for beta chain variable domain of TCR clone 174451 (TRBV7-9, TRBJ1-2)
CASSLKQNYGYTF

SEQ ID NO: 348903 - protein, 11 aa, Homo sapiens
  CDR3 for alpha chain variable domain of TCR clone 174452 (TRAV12-3, TRAJ49)
CAMSSGNQFYF

SEQ ID NO: 348904 - protein, 17 aa, Homo sapiens
  CDR3 for beta chain variable domain of TCR clone 174452 (TRBV5-7, TRBJ2-7)
CASSLWRVLAGSYEHYF

SEQ ID NO: 348905 - protein, 15 aa, Homo sapiens
  CDR3 for alpha chain variable domain of TCR clone 174453 (TRAV2, TRAJ9)
CAVEDRGTGGFKTIF

SEQ ID NO: 348906 - protein, 18 aa, Homo sapiens
  CDR3 for beta chain variable domain of TCR clone 174453 (TRBV25-1, TRBJ1-2)
CASSGLQNGQGLIFGYTF

SEQ ID NO: 348907 - protein, 16 aa, Homo sapiens
  CDR3 for alpha chain variable domain of TCR clone 174454 (TRAV3, TRAJ18)
CAVRDGRGSTLGRLYF

SEQ ID NO: 348908 - protein, 13 aa, Homo sapiens
  CDR3 for beta chain variable domain of TCR clone 174454 (TRBV19, TRBJ1-2)
CASSQGQVYGYTF

SEQ ID NO: 348909 - protein, 14 aa, Homo sapiens
  CDR3 for alpha chain variable domain of TCR clone 174455 (TRAV14/DV4, TRAJ32)
SNVLPLTPTIKLIF

SEQ ID NO: 348910 - protein, 17 aa, Homo sapiens
  CDR3 for beta chain variable domain of TCR clone 174455 (TRBV20-1, TRBJ2-1)
CSASSSGLAGSYNEQFF

SEQ ID NO: 348911 - protein, 13 aa, Homo sapiens
  CDR3 for alpha chain variable domain of TCR clone 174456 (TRAV12-3, TRAJ13)
CAMGTVGYQKVTF

SEQ ID NO: 348912 - protein, 14 aa, Homo sapiens
  CDR3 for beta chain variable domain of TCR clone 174456 (TRBV7-2, TRBJ2-5)
CASSTGGELKTQYF

SEQ ID NO: 348913 - protein, 10 aa, Homo sapiens
  CDR3 for alpha chain variable domain of TCR clone 174457 (TRAV16, TRAJ22)
SATYLRQLTF

SEQ ID NO: 348914 - protein, 15 aa, Homo sapiens
  CDR3 for beta chain variable domain of TCR clone 174457 (TRBV7-9, TRBJ1-6)
CASSSPGRGNSPRHF

SEQ ID NO: 348915 - protein, 14 aa, Homo sapiens
  CDR3 for alpha chain variable domain of TCR clone 174458 (TRAV9-2, TRAJ39)
WALYIYNAGNMLTF

SEQ ID NO: 348916 - protein, 17 aa, Homo sapiens
  CDR3 for beta chain variable domain of TCR clone 174458 (TRBV28, TRBJ2-5)
CASSTPEGDALQETQYF

SEQ ID NO: 348917 - protein, 13 aa, Homo sapiens
  CDR3 for alpha chain variable domain of TCR clone 174459 (TRAV29/DV5, TRAJ34)
CAARVDNTDKLIF

SEQ ID NO: 348918 - protein, 17 aa, Homo sapiens
  CDR3 for beta chain variable domain of TCR clone 174459 (TRBV18, TRBJ2-1)
CASSKGLSGGADNEQFF

SEQ ID NO: 348919 - protein, 16 aa, Homo sapiens
  CDR3 for alpha chain variable domain of TCR clone 174460 (TRAV30, TRAJ24)
CGTEIVDADSWGKFQF

SEQ ID NO: 348920 - protein, 14 aa, Homo sapiens
  CDR3 for beta chain variable domain of TCR clone 174460 (TRBV4-2, TRBJ1-5)
CASSRDRGNQPQHF

SEQ ID NO: 348921 - protein, 12 aa, Homo sapiens
  CDR3 for alpha chain variable domain of TCR clone 174461 (TRAV23/DV6, TRAJ30)
CAASKGEDKNIF

SEQ ID NO: 348922 - protein, 13 aa, Homo sapiens
  CDR3 for beta chain variable domain of TCR clone 174461 (TRBV19, TRBJ1-2)
CASSVPGQDGYTF

SEQ ID NO: 348923 - protein, 16 aa, Homo sapiens
  CDR3 for alpha chain variable domain of TCR clone 174462 (TRAV8-3, TRAJ42)
WAVGEGNGGSQGNLIF

SEQ ID NO: 348924 - protein, 14 aa, Homo sapiens
  CDR3 for beta chain variable domain of TCR clone 174462 (TRBV7-2, TRBJ2-1)
CASSRGGARNEQFF

SEQ ID NO: 348925 - protein, 13 aa, Homo sapiens
  CDR3 for alpha chain variable domain of TCR clone 174463 (TRAV17, TRAJ26)
CATVDNYGQNFVL

SEQ ID NO: 348926 - protein, 14 aa, Homo sapiens
  CDR3 for beta chain variable domain of TCR clone 174463 (TRBV7-2, TRBJ1-1)
CASSFLTGTTEAFF

SEQ ID NO: 348927 - protein, 11 aa, Homo sapiens
  CDR3 for alpha chain variable domain of TCR clone 174464 (TRAV12-2, TRAJ34)
CAHYNTDKLIF

SEQ ID NO: 348928 - protein, 16 aa, Homo sapiens
  CDR3 for beta chain variable domain of TCR clone 174464 (TRBV11-2, TRBJ2-7)
CASSPTTGGVSYEQYF

SEQ ID NO: 348929 - protein, 16 aa, Homo sapiens
  CDR3 for alpha chain variable domain of TCR clone 174465 (TRAV21, TRAJ52)
CAVTNAGGTSYGKLTI

SEQ ID NO: 348930 - protein, 11 aa, Homo sapiens
  CDR3 for beta chain variable domain of TCR clone 174465 (TRBV2, TRBJ1-1)
CASREGTEAFF

SEQ ID NO: 348931 - protein, 12 aa, Homo sapiens
  CDR3 for alpha chain variable domain of TCR clone 174466 (TRAV17, TRAJ4)
CATDGGYHKLLF

SEQ ID NO: 348932 - protein, 13 aa, Homo sapiens
  CDR3 for beta chain variable domain of TCR clone 174466 (TRBV29-1, TRBJ2-2)
CSTTGVNTGELFF

SEQ ID NO: 348933 - protein, 10 aa, Homo sapiens
  CDR3 for alpha chain variable domain of TCR clone 174467 (TRAV26-1, TRAJ22)
CIAGSRQLTF

SEQ ID NO: 348934 - protein, 14 aa, Homo sapiens
  CDR3 for beta chain variable domain of TCR clone 174467 (TRBV7-2, TRBJ1-1)
CASSFLTGTTEAFF

SEQ ID NO: 348935 - protein, 16 aa, Homo sapiens
  CDR3 for alpha chain variable domain of TCR clone 174468 (TRAV2, TRAJ4)
CAVEDRFSGGYYKLIF

SEQ ID NO: 348936 - protein, 13 aa, Homo sapiens
  CDR3 for beta chain variable domain of TCR clone 174468 (TRBV7-7, TRBJ2-5)
CASSRSGQETQYF

SEQ ID NO: 348937 - protein, 14 aa, Homo sapiens
  CDR3 for alpha chain variable domain of TCR clone 174469 (TRAV36/DV7, TRAJ48)
WSQRRDVGNEKLTF

SEQ ID NO: 348938 - protein, 14 aa, Homo sapiens
  CDR3 for beta chain variable domain of TCR clone 174469 (TRBV28, TRBJ2-4)
CASTQVTGVNIQYF

SEQ ID NO: 348939 - protein, 14 aa, Homo sapiens
  CDR3 for alpha chain variable domain of TCR clone 174470 (TRAV12-3, TRAJ42)
CAMNYGGSQGNLIF

SEQ ID NO: 348940 - protein, 17 aa, Homo sapiens
  CDR3 for beta chain variable domain of TCR clone 174470 (TRBV7-8, TRBJ2-6)
CSSSAGTGGAGANVLTF

SEQ ID NO: 348941 - protein, 12 aa, Homo sapiens
  CDR3 for alpha chain variable domain of TCR clone 174471 (TRAV13-2, TRAJ23)
CAERHRGGKLIF

SEQ ID NO: 348942 - protein, 16 aa, Homo sapiens
  CDR3 for beta chain variable domain of TCR clone 174471 (TRBV2, TRBJ2-5)
CASSETQGVGEETQYF

SEQ ID NO: 348943 - protein, 14 aa, Homo sapiens
  CDR3 for alpha chain variable domain of TCR clone 174472 (TRAV8-6, TRAJ12)
CAVKAADSSYRLIF

SEQ ID NO: 348944 - protein, 15 aa, Homo sapiens
  CDR3 for beta chain variable domain of TCR clone 174472 (TRBV5-1, TRBJ2-5)
CASSLGLAEQETQYF

SEQ ID NO: 348945 - protein, 13 aa, Homo sapiens
  CDR3 for alpha chain variable domain of TCR clone 174473 (TRAV8-1, TRAJ34)
CAVRPYNTEKLIF

SEQ ID NO: 348946 - protein, 15 aa, Homo sapiens
  CDR3 for beta chain variable domain of TCR clone 174473 (TRBV7-9, TRBJ1-3)
CASSLRSGSGNTIYF

SEQ ID NO: 348947 - protein, 16 aa, Homo sapiens
  CDR3 for alpha chain variable domain of TCR clone 174474 (TRAV13-2, TRAJ37)
CAENIRGSSNTGKLIF

SEQ ID NO: 348948 - protein, 15 aa, Homo sapiens
  CDR3 for beta chain variable domain of TCR clone 174474 (TRBV5-1, TRBJ2-7)
CASGPQGRPLDEQYF

SEQ ID NO: 348949 - protein, 14 aa, Homo sapiens
  CDR3 for alpha chain variable domain of TCR clone 174475 (TRAV8-3, TRAJ35)
CAVVPQGFGNVLHC

SEQ ID NO: 348950 - protein, 10 aa, Homo sapiens
  CDR3 for beta chain variable domain of TCR clone 174475 (TRBV6-1, TRBJ2-2)
CASSAGQGYT

SEQ ID NO: 348951 - protein, 14 aa, Homo sapiens
  CDR3 for alpha chain variable domain of TCR clone 174476 (TRAV16, TRAJ16)
CALSVLSDGQKLLF

SEQ ID NO: 348952 - protein, 15 aa, Homo sapiens
  CDR3 for beta chain variable domain of TCR clone 174476 (TRBV7-9, TRBJ1-6)
CASSSPGRGNSPLHF

SEQ ID NO: 348953 - protein, 16 aa, Homo sapiens
  CDR3 for alpha chain variable domain of TCR clone 174477 (TRAV3, TRAJ3)
CAVRDKAKSSASKITF

SEQ ID NO: 348954 - protein, 16 aa, Homo sapiens
  CDR3 for beta chain variable domain of TCR clone 174477 (TRBV20-1, TRBJ2-4)
CSATSLAELAKNIQYF

SEQ ID NO: 348955 - protein, 16 aa, Homo sapiens
  CDR3 for alpha chain variable domain of TCR clone 174478 (TRAV4, TRAJ22)
CLVGDLYSGSARQLTF

SEQ ID NO: 348956 - protein, 14 aa, Homo sapiens
  CDR3 for beta chain variable domain of TCR clone 174478 (TRBV4-1, TRBJ2-2)
CASSQAVNTGELFF

SEQ ID NO: 348957 - protein, 10 aa, Homo sapiens
  CDR3 for alpha chain variable domain of TCR clone 174479 (TRAV12-1, TRAJ43)
CVVHNNDMRI

SEQ ID NO: 348958 - protein, 15 aa, Homo sapiens
  CDR3 for beta chain variable domain of TCR clone 174479 (TRBV4-3, TRBJ2-7)
CASSQGGRGIYEQYF

SEQ ID NO: 348959 - protein, 14 aa, Homo sapiens
  CDR3 for alpha chain variable domain of TCR clone 174480 (TRAV10, TRAJ48)
CVGVFHFGNEKLTF

SEQ ID NO: 348960 - protein, 16 aa, Homo sapiens
  CDR3 for beta chain variable domain of TCR clone 174480 (TRBV7-9, TRBJ1-2)
CASSLGFSSGEDGYTF

SEQ ID NO: 348961 - protein, 15 aa, Homo sapiens
  CDR3 for alpha chain variable domain of TCR clone 174481 (TRAV27, TRAJ38)
CAGRFNAGNNRKLIW

SEQ ID NO: 348962 - protein, 13 aa, Homo sapiens
  CDR3 for beta chain variable domain of TCR clone 174481 (TRBV12-5, TRBJ2-3)
CASHNRGTDTQYF

SEQ ID NO: 348963 - protein, 14 aa, Homo sapiens
  CDR3 for alpha chain variable domain of TCR clone 174482 (TRAV12-2, TRAJ11)
CAVEGGSGYSTLTF

SEQ ID NO: 348964 - protein, 16 aa, Homo sapiens
  CDR3 for beta chain variable domain of TCR clone 174482 (TRBV6-1, TRBJ1-2)
CACSGAWQGRSHGDTF

SEQ ID NO: 348965 - protein, 15 aa, Homo sapiens
  CDR3 for alpha chain variable domain of TCR clone 174483 (TRAV26-2, TRAJ28)
CLLVESGAGSYQLTF

SEQ ID NO: 348966 - protein, 11 aa, Homo sapiens
  CDR3 for beta chain variable domain of TCR clone 174483 (TRBV25-1, TRBJ2-7)
CASSTSYEQYF

SEQ ID NO: 348967 - protein, 13 aa, Homo sapiens
  CDR3 for alpha chain variable domain of TCR clone 174484 (TRAV13-2, TRAJ48)
CAELDFGNEKLTF

SEQ ID NO: 348968 - protein, 12 aa, Homo sapiens
  CDR3 for beta chain variable domain of TCR clone 174484 (TRBV5-1, TRBJ1-2)
CASSQDTYGYTF

SEQ ID NO: 348969 - protein, 14 aa, Homo sapiens
  CDR3 for alpha chain variable domain of TCR clone 174485 (TRAV26-2, TRAJ31)
CILIPGNNNARPMF

SEQ ID NO: 348970 - protein, 16 aa, Homo sapiens
  CDR3 for beta chain variable domain of TCR clone 174485 (TRBV7-3, TRBJ2-1)
CASSLVSGSSNKEQFF

SEQ ID NO: 348971 - protein, 12 aa, Homo sapiens
  CDR3 for alpha chain variable domain of TCR clone 174486 (TRAV21, TRAJ11)
CAATSGYSTLTF

SEQ ID NO: 348972 - protein, 16 aa, Homo sapiens
  CDR3 for beta chain variable domain of TCR clone 174486 (TRBV7-7, TRBJ2-1)
CASSLASGTSYNEQFF

SEQ ID NO: 348973 - protein, 14 aa, Homo sapiens
  CDR3 for alpha chain variable domain of TCR clone 174487 (TRAV13-1, TRAJ44)
CAAKATGTASKLTF

SEQ ID NO: 348974 - protein, 13 aa, Homo sapiens
  CDR3 for beta chain variable domain of TCR clone 174487 (TRBV5-5, TRBJ1-2)
CASSFWRGEDYIF

SEQ ID NO: 348975 - protein, 13 aa, Homo sapiens
  CDR3 for alpha chain variable domain of TCR clone 174488 (TRAV12-2, TRAJ48)
CAAPNFGNEKLTF

SEQ ID NO: 348976 - protein, 18 aa, Homo sapiens
  CDR3 for beta chain variable domain of TCR clone 174488 (TRBV3-1, TRBJ2-7)
CASSRISAGGRSSYEQYF

SEQ ID NO: 348977 - protein, 15 aa, Homo sapiens
  CDR3 for alpha chain variable domain of TCR clone 174489 (TRAV29/DV5, TRAJ29)
CAASERSSGNTPLVF

SEQ ID NO: 348978 - protein, 14 aa, Homo sapiens
  CDR3 for beta chain variable domain of TCR clone 174489 (TRBV5-7, TRBJ2-4)
CASTLSGVKNIQYF

SEQ ID NO: 348979 - protein, 13 aa, Homo sapiens
  CDR3 for alpha chain variable domain of TCR clone 174490 (TRAV12-1, TRAJ22)
CVASGGSARQLTF

SEQ ID NO: 348980 - protein, 12 aa, Homo sapiens
  CDR3 for beta chain variable domain of TCR clone 174490 (TRBV2, TRBJ2-7)
CASTYRTDEQYF

SEQ ID NO: 348981 - protein, 12 aa, Homo sapiens
  CDR3 for alpha chain variable domain of TCR clone 174491 (TRAV8-3, TRAJ5)
CAVGGGLRALTF

SEQ ID NO: 348982 - protein, 11 aa, Homo sapiens
  CDR3 for beta chain variable domain of TCR clone 174491 (TRBV6-3, TRBJ2-3)
CATGQADTQYF

SEQ ID NO: 348983 - protein, 15 aa, Homo sapiens
  CDR3 for alpha chain variable domain of TCR clone 174492 (TRAV13-2, TRAJ6)
CAEKVLAGGSYIPTF

SEQ ID NO: 348984 - protein, 13 aa, Homo sapiens
  CDR3 for beta chain variable domain of TCR clone 174492 (TRBV20-1, TRBJ1-1)
SAVLGGANTEAFF

SEQ ID NO: 348985 - protein, 13 aa, Homo sapiens
  CDR3 for alpha chain variable domain of TCR clone 174493 (TRAV12-1, TRAJ3)
CLVNPRGASKIIF

SEQ ID NO: 348986 - protein, 13 aa, Homo sapiens
  CDR3 for beta chain variable domain of TCR clone 174493 (TRBV28, TRBJ1-5)
CASSDRGNQPQHF

SEQ ID NO: 348987 - protein, 16 aa, Homo sapiens
  CDR3 for alpha chain variable domain of TCR clone 174494 (TRAV12-2, TRAJ13)
CAVDSAGAGGYQKVTF

SEQ ID NO: 348988 - protein, 13 aa, Homo sapiens
  CDR3 for beta chain variable domain of TCR clone 174494 (TRBV20-1, TRBJ2-7)
CSARPSTKYEQYF

SEQ ID NO: 348989 - protein, 15 aa, Homo sapiens
  CDR3 for alpha chain variable domain of TCR clone 174495 (TRAV12-2, TRAJ43)
CAFDMRFGAGTRLTV

SEQ ID NO: 348990 - protein, 14 aa, Homo sapiens
  CDR3 for beta chain variable domain of TCR clone 174495 (TRBV19, TRBJ2-7)
CASSMGQGAIEQYF

SEQ ID NO: 348991 - protein, 14 aa, Homo sapiens
  CDR3 for alpha chain variable domain of TCR clone 174496 (TRAV27, TRAJ36)
CAGPPKRGANNLFF

SEQ ID NO: 348992 - protein, 15 aa, Homo sapiens
  CDR3 for beta chain variable domain of TCR clone 174496 (TRBV18, TRBJ2-7)
CASSPASTPNYKQYF

SEQ ID NO: 348993 - protein, 13 aa, Homo sapiens
  CDR3 for alpha chain variable domain of TCR clone 174497 (TRAV2, TRAJ15)
CAVASQAGTALTF

SEQ ID NO: 348994 - protein, 17 aa, Homo sapiens
  CDR3 for beta chain variable domain of TCR clone 174497 (TRBV20-1, TRBJ2-2)
CSAGGSGQGGLTGELFF

SEQ ID NO: 348995 - protein, 23 aa, Homo sapiens
  CDR3 for alpha chain variable domain of TCR clone 174498 (TRAV8-4, TRAJ38)
CAVRNAGNNHIQNPDPAVYQLRD

SEQ ID NO: 348996 - protein, 12 aa, Homo sapiens
  CDR3 for beta chain variable domain of TCR clone 174498 (TRBV11-2, TRBJ2-2)
CASSLGGGELFF

SEQ ID NO: 348997 - protein, 13 aa, Homo sapiens
  CDR3 for alpha chain variable domain of TCR clone 174499 (TRAV12-1, TRAJ26)
SATYPYYGQNFVF

SEQ ID NO: 348998 - protein, 15 aa, Homo sapiens
  CDR3 for beta chain variable domain of TCR clone 174499 (TRBV5-1, TRBJ2-6)
CVSSLDPSGANVLTF

SEQ ID NO: 348999 - protein, 15 aa, Homo sapiens
  CDR3 for alpha chain variable domain of TCR clone 174500 (TRAV2, TRAJ22)
CAVPSRGGSARQLTF

SEQ ID NO: 349000 - protein, 18 aa, Homo sapiens
  CDR3 for beta chain variable domain of TCR clone 174500 (TRBV11-2, TRBJ2-3)
CASSLGGASRGAPNTQYS

SEQ ID NO: 349001 - protein, 12 aa, Homo sapiens
  CDR3 for alpha chain variable domain of TCR clone 174501 (TRAV3, TRAJ4)
CAVSGGYNKLIF

SEQ ID NO: 349002 - protein, 17 aa, Homo sapiens
  CDR3 for beta chain variable domain of TCR clone 174501 (TRBV6-5, TRBJ2-6)
CASSSATRGPGANVLTF

SEQ ID NO: 349003 - protein, 14 aa, Homo sapiens
  CDR3 for alpha chain variable domain of TCR clone 174502 (TRAV12-1, TRAJ27)
CGEHIRTNAGKSTF

SEQ ID NO: 349004 - protein, 14 aa, Homo sapiens
  CDR3 for beta chain variable domain of TCR clone 174502 (TRBV20-1, TRBJ1-3)
CSASPTGAGNTIYF

SEQ ID NO: 349005 - protein, 13 aa, Homo sapiens
  CDR3 for alpha chain variable domain of TCR clone 174503 (TRAV17, TRAJ7)
CATDNYGNNRLAF

SEQ ID NO: 349006 - protein, 16 aa, Homo sapiens
  CDR3 for beta chain variable domain of TCR clone 174503 (TRBV4-1, TRBJ2-5)
CASGQAIAASSATQYF

SEQ ID NO: 349007 - protein, 15 aa, Homo sapiens
  CDR3 for alpha chain variable domain of TCR clone 174504 (TRAV21, TRAJ53)
CATLNSGGSNYKLTF

SEQ ID NO: 349008 - protein, 16 aa, Homo sapiens
  CDR3 for beta chain variable domain of TCR clone 174504 (TRBV24-1, TRBJ2-3)
CATSAPGTGATDTQYF

SEQ ID NO: 349009 - protein, 12 aa, Homo sapiens
  CDR3 for alpha chain variable domain of TCR clone 174505 (TRAV8-3, TRAJ22)
FSGQSSARQLTF

SEQ ID NO: 349010 - protein, 15 aa, Homo sapiens
  CDR3 for beta chain variable domain of TCR clone 174505 (TRBV20-1, TRBJ1-1)
CSASRGVTGNTEAFF

SEQ ID NO: 349011 - protein, 17 aa, Homo sapiens
  CDR3 for alpha chain variable domain of TCR clone 174506 (TRAV1-2, TRAJ6)
CAVRDTTRRGGSYIPTF

SEQ ID NO: 349012 - protein, 12 aa, Homo sapiens
  CDR3 for beta chain variable domain of TCR clone 174506 (TRBV24-1, TRBJ2-3)
CATSSGGDTQYF

SEQ ID NO: 349013 - protein, 11 aa, Homo sapiens
  CDR3 for alpha chain variable domain of TCR clone 174507 (TRAV21, TRAJ11)
CAVNGYSTLTF

SEQ ID NO: 349014 - protein, 11 aa, Homo sapiens
  CDR3 for beta chain variable domain of TCR clone 174507 (TRBV27, TRBJ2-3)
CASSLGDTQYF

SEQ ID NO: 349015 - protein, 13 aa, Homo sapiens
  CDR3 for alpha chain variable domain of TCR clone 174508 (TRAV29/DV5, TRAJ31)
CAASRNNNARLMF

SEQ ID NO: 349016 - protein, 13 aa, Homo sapiens
  CDR3 for beta chain variable domain of TCR clone 174508 (TRBV20-1, TRBJ1-1)
CSAPLGGGTEAFF

SEQ ID NO: 349017 - protein, 14 aa, Homo sapiens
  CDR3 for alpha chain variable domain of TCR clone 174509 (TRAV27, TRAJ13)
CRSSNSGGYQKVTF

SEQ ID NO: 349018 - protein, 15 aa, Homo sapiens
  CDR3 for beta chain variable domain of TCR clone 174509 (TRBV20-1, TRBJ1-1)
CSASRGVTGNTEAFF

SEQ ID NO: 349019 - protein, 19 aa, Homo sapiens
  CDR3 for alpha chain variable domain of TCR clone 174510 (TRAV1-2, TRAJ26)
CILPLCCERPDNYGQNFVF

SEQ ID NO: 349020 - protein, 15 aa, Homo sapiens
  CDR3 for beta chain variable domain of TCR clone 174510 (TRBV9, TRBJ1-6)
CASSVAGTGDSPLHF

SEQ ID NO: 349021 - protein, 14 aa, Homo sapiens
  CDR3 for alpha chain variable domain of TCR clone 174511 (TRAV35, TRAJ42)
CCVPYGGSQGNHIF

SEQ ID NO: 349022 - protein, 18 aa, Homo sapiens
  CDR3 for beta chain variable domain of TCR clone 174511 (TRBV13, TRBJ2-6)
CASSPMTSGGSGANVLTF

SEQ ID NO: 349023 - protein, 14 aa, Homo sapiens
  CDR3 for alpha chain variable domain of TCR clone 174512 (TRAV2, TRAJ22)
CAVGRGGSARQRTF

SEQ ID NO: 349024 - protein, 12 aa, Homo sapiens
  CDR3 for beta chain variable domain of TCR clone 174512 (TRBV19, TRBJ2-1)
CASSMQDTEQFF

SEQ ID NO: 349025 - protein, 14 aa, Homo sapiens
  CDR3 for alpha chain variable domain of TCR clone 174513 (TRAV12-1, TRAJ17)
CVVNYKAAGNKLTF

SEQ ID NO: 349026 - protein, 14 aa, Homo sapiens
  CDR3 for beta chain variable domain of TCR clone 174513 (TRBV11-2, TRBJ2-3)
CASSRLARTDTQYF

SEQ ID NO: 349027 - protein, 15 aa, Homo sapiens
  CDR3 for alpha chain variable domain of TCR clone 174514 (TRAV13-1, TRAJ4)
CAASLISGGYNKLNF

SEQ ID NO: 349028 - protein, 15 aa, Homo sapiens
  CDR3 for beta chain variable domain of TCR clone 174514 (TRBV28, TRBJ2-3)
CASTPRGENTDTQYF

SEQ ID NO: 349029 - protein, 11 aa, Homo sapiens
  CDR3 for alpha chain variable domain of TCR clone 174515 (TRAV35, TRAJ30)
CAGERGDKIIF

SEQ ID NO: 349030 - protein, 14 aa, Homo sapiens
  CDR3 for beta chain variable domain of TCR clone 174515 (TRBV15, TRBJ2-5)
CATSGDRGQETQYF

SEQ ID NO: 349031 - protein, 15 aa, Homo sapiens
  CDR3 for alpha chain variable domain of TCR clone 174516 (TRAV8-4, TRAJ47)
CAVSDPEEYGNKLVF

SEQ ID NO: 349032 - protein, 16 aa, Homo sapiens
  CDR3 for beta chain variable domain of TCR clone 174516 (TRBV7-9, TRBJ2-1)
CASSDVAGGSYNEQFF

SEQ ID NO: 349033 - protein, 11 aa, Homo sapiens
  CDR3 for alpha chain variable domain of TCR clone 174517 (TRAV13-2, TRAJ20)
CADSNDYKLSF

SEQ ID NO: 349034 - protein, 14 aa, Homo sapiens
  CDR3 for beta chain variable domain of TCR clone 174517 (TRBV11-2, TRBJ1-5)
CASILDRGRQPQHF

SEQ ID NO: 349035 - protein, 13 aa, Homo sapiens
  CDR3 for alpha chain variable domain of TCR clone 174518 (TRAV3, TRAJ21)
CAVREPDFNKFYF

SEQ ID NO: 349036 - protein, 18 aa, Homo sapiens
  CDR3 for beta chain variable domain of TCR clone 174518 (TRBV11-2, TRBJ2-3)
CASSLGGASGGAPNTQYF

SEQ ID NO: 349037 - protein, 13 aa, Homo sapiens
  CDR3 for alpha chain variable domain of TCR clone 174519 (TRAV38-1, TRAJ42)
CARWGGSQGNLIF

SEQ ID NO: 349038 - protein, 13 aa, Homo sapiens
  CDR3 for beta chain variable domain of TCR clone 174519 (TRBV10-3, TRBJ2-1)
CAISEFSGREQFF

SEQ ID NO: 349039 - protein, 12 aa, Homo sapiens
  CDR3 for alpha chain variable domain of TCR clone 174520 (TRAV3, TRAJ31)
CAVRPRGPRLMF

SEQ ID NO: 349040 - protein, 17 aa, Homo sapiens
  CDR3 for beta chain variable domain of TCR clone 174520 (TRBV7-9, TRBJ1-5)
CASSPSQGGYSNQPQHF

SEQ ID NO: 349041 - protein, 12 aa, Homo sapiens
  CDR3 for alpha chain variable domain of TCR clone 174521 (TRAV13-2, TRAJ39)
CAENNAGNMLTF

SEQ ID NO: 349042 - protein, 14 aa, Homo sapiens
  CDR3 for beta chain variable domain of TCR clone 174521 (TRBV5-1, TRBJ2-7)
CASSRGESLYEQYF

SEQ ID NO: 349043 - protein, 17 aa, Homo sapiens
  CDR3 for alpha chain variable domain of TCR clone 174522 (TRAV3, TRAJ37)
CAVRDMRTPGNTGKLIF

SEQ ID NO: 349044 - protein, 17 aa, Homo sapiens
  CDR3 for beta chain variable domain of TCR clone 174522 (TRBV28, TRBJ2-7)
CASSPLHRASGVYEQYF

SEQ ID NO: 349045 - protein, 14 aa, Homo sapiens
  CDR3 for alpha chain variable domain of TCR clone 174523 (TRAV35, TRAJ33)
RAGSFQDSNYQLIW

SEQ ID NO: 349046 - protein, 15 aa, Homo sapiens
  CDR3 for beta chain variable domain of TCR clone 174523 (TRBV5-1, TRBJ1-4)
FAPAAWKDGNEKLFF

SEQ ID NO: 349047 - protein, 14 aa, Homo sapiens
  CDR3 for alpha chain variable domain of TCR clone 174524 (TRAV3, TRAJ9)
CAVRLNTGGFKTIF

SEQ ID NO: 349048 - protein, 16 aa, Homo sapiens
  CDR3 for beta chain variable domain of TCR clone 174524 (TRBV12-5, TRBJ2-5)
CASGPRTSGNQETQYF

SEQ ID NO: 349049 - protein, 14 aa, Homo sapiens
  CDR3 for alpha chain variable domain of TCR clone 174525 (TRAV1-2, TRAJ16)
CVVNRFSDSQKLLF

SEQ ID NO: 349050 - protein, 15 aa, Homo sapiens
  CDR3 for beta chain variable domain of TCR clone 174525 (TRBV9, TRBJ1-6)
CASSVAGTGDSPLHF

SEQ ID NO: 349051 - protein, 13 aa, Homo sapiens
  CDR3 for alpha chain variable domain of TCR clone 174526 (TRAV12-3, TRAJ47)
CAMKKEYGNKLVF

SEQ ID NO: 349052 - protein, 14 aa, Homo sapiens
  CDR3 for beta chain variable domain of TCR clone 174526 (TRBV25-1, TRBJ1-1)
CASTHLGGNTEAFF

SEQ ID NO: 349053 - protein, 13 aa, Homo sapiens
  CDR3 for alpha chain variable domain of TCR clone 174527 (TRAV12-1, TRAJ34)
CVVTGYHTDKLIF

SEQ ID NO: 349054 - protein, 13 aa, Homo sapiens
  CDR3 for beta chain variable domain of TCR clone 174527 (TRBV28, TRBJ2-7)
CASKAGGVYEQYF

SEQ ID NO: 349055 - protein, 13 aa, Homo sapiens
  CDR3 for alpha chain variable domain of TCR clone 174528 (TRAV12-2, TRAJ20)
CAVNRFDDYKLSF

SEQ ID NO: 349056 - protein, 17 aa, Homo sapiens
  CDR3 for beta chain variable domain of TCR clone 174528 (TRBV4-1, TRBJ2-7)
CASSQGRGLQTSYEQYF

SEQ ID NO: 349057 - protein, 13 aa, Homo sapiens
  CDR3 for alpha chain variable domain of TCR clone 174529 (TRAV2, TRAJ40)
CAVVTSGTYNYIF

SEQ ID NO: 349058 - protein, 13 aa, Homo sapiens
  CDR3 for beta chain variable domain of TCR clone 174529 (TRBV4-2, TRBJ1-1)
CASSQAGNTEAFF

SEQ ID NO: 349059 - protein, 14 aa, Homo sapiens
  CDR3 for alpha chain variable domain of TCR clone 174530 (TRAV1-2, TRAJ16)
CAVNRFSDGQKLLF

SEQ ID NO: 349060 - protein, 17 aa, Homo sapiens
  CDR3 for beta chain variable domain of TCR clone 174530 (TRBV10-3, TRBJ2-6)
CAISESTAPSGANVLTF

SEQ ID NO: 349061 - protein, 14 aa, Homo sapiens
  CDR3 for alpha chain variable domain of TCR clone 174531 (TRAV1-2, TRAJ16)
CAVNRFSDGQKLLF

SEQ ID NO: 349062 - protein, 19 aa, Homo sapiens
  CDR3 for beta chain variable domain of TCR clone 174531 (TRBV11-2, TRBJ2-7)
LRTRPCISVPAAQTYEQYF

SEQ ID NO: 349063 - protein, 13 aa, Homo sapiens
  CDR3 for alpha chain variable domain of TCR clone 174532 (TRAV8-4, TRAJ10)
CAAFTGGGTNLTF

SEQ ID NO: 349064 - protein, 15 aa, Homo sapiens
  CDR3 for beta chain variable domain of TCR clone 174532 (TRBV2, TRBJ2-3)
CASSDFEKATDTQYF

SEQ ID NO: 349065 - protein, 15 aa, Homo sapiens
  CDR3 for alpha chain variable domain of TCR clone 174533 (TRAV26-1, TRAJ48)
CIVRVGDFGNEKLTF

SEQ ID NO: 349066 - protein, 14 aa, Homo sapiens
  CDR3 for beta chain variable domain of TCR clone 174533 (TRBV7-3, TRBJ2-1)
CASSLAGGTNEQFF

SEQ ID NO: 349067 - protein, 13 aa, Homo sapiens
  CDR3 for alpha chain variable domain of TCR clone 174534 (TRAV13-1, TRAJ10)
CAATAGGGNKLTF

SEQ ID NO: 349068 - protein, 15 aa, Homo sapiens
  CDR3 for beta chain variable domain of TCR clone 174534 (TRBV19, TRBJ2-1)
CASSIQATSYNEQFF

SEQ ID NO: 349069 - protein, 12 aa, Homo sapiens
  CDR3 for alpha chain variable domain of TCR clone 174535 (TRAV26-1, TRAJ13)
CIVSRGYQKVTF

SEQ ID NO: 349070 - protein, 16 aa, Homo sapiens
  CDR3 for beta chain variable domain of TCR clone 174535 (TRBV27, TRBJ2-1)
CASSLAKGFGIDEQFF

SEQ ID NO: 349071 - protein, 12 aa, Homo sapiens
  CDR3 for alpha chain variable domain of TCR clone 174536 (TRAV23/DV6, TRAJ16)
CAARGRGQKLLF

SEQ ID NO: 349072 - protein, 15 aa, Homo sapiens
  CDR3 for beta chain variable domain of TCR clone 174536 (TRBV15, TRBJ2-1)
CATSRPGQGLHKQFF

SEQ ID NO: 349073 - protein, 12 aa, Homo sapiens
  CDR3 for alpha chain variable domain of TCR clone 174537 (TRAV12-1, TRAJ31)
CVVRGNNARLMF

SEQ ID NO: 349074 - protein, 14 aa, Homo sapiens
  CDR3 for beta chain variable domain of TCR clone 174537 (TRBV19, TRBJ2-7)
CASNFRDTFTGMYF

SEQ ID NO: 349075 - protein, 13 aa, Homo sapiens
  CDR3 for alpha chain variable domain of TCR clone 174538 (TRAV36/DV7, TRAJ49)
GAGDSNTGNQFYL

SEQ ID NO: 349076 - protein, 16 aa, Homo sapiens
  CDR3 for beta chain variable domain of TCR clone 174538 (TRBV29-1, TRBJ2-6)
CSVEDITYSGANVLTF

SEQ ID NO: 349077 - protein, 14 aa, Homo sapiens
  CDR3 for alpha chain variable domain of TCR clone 174539 (TRAV1-2, TRAJ8)
CAVREDTGFQKLVF

SEQ ID NO: 349078 - protein, 12 aa, Homo sapiens
  CDR3 for beta chain variable domain of TCR clone 174539 (TRBV7-9, TRBJ2-7)
CASSFGRYEQYF

SEQ ID NO: 349079 - protein, 11 aa, Homo sapiens
  CDR3 for alpha chain variable domain of TCR clone 174540 (TRAV12-3, TRAJ16)
LTGGDGQKLLF

SEQ ID NO: 349080 - protein, 17 aa, Homo sapiens
  CDR3 for beta chain variable domain of TCR clone 174540 (TRBV24-1, TRBJ2-4)
CATSDAEARGVRNIQYF

SEQ ID NO: 349081 - protein, 15 aa, Homo sapiens
  CDR3 for alpha chain variable domain of TCR clone 174541 (TRAV41, TRAJ45)
CAASYSVGGADGLTF

SEQ ID NO: 349082 - protein, 14 aa, Homo sapiens
  CDR3 for beta chain variable domain of TCR clone 174541 (TRBV12-5, TRBJ2-5)
CASGSRTHQETQYF

SEQ ID NO: 349083 - protein, 16 aa, Homo sapiens
  CDR3 for alpha chain variable domain of TCR clone 174542 (TRAV20, TRAJ10)
CAVLRGLTGGGNKLTF

SEQ ID NO: 349084 - protein, 14 aa, Homo sapiens
  CDR3 for beta chain variable domain of TCR clone 174542 (TRBV19, TRBJ1-5)
CSSRAPDSFLSQHF

SEQ ID NO: 349085 - protein, 13 aa, Homo sapiens
  CDR3 for alpha chain variable domain of TCR clone 174543 (TRAV2, TRAJ32)
CCVVGGATNKLIF

SEQ ID NO: 349086 - protein, 15 aa, Homo sapiens
  CDR3 for beta chain variable domain of TCR clone 174543 (TRBV20-1, TRBJ2-5)
CSAPPRTGFGETQYF

SEQ ID NO: 349087 - protein, 11 aa, Homo sapiens
  CDR3 for alpha chain variable domain of TCR clone 174544 (TRAV13-1, TRAJ20)
CAARNDYKLSF

SEQ ID NO: 349088 - protein, 15 aa, Homo sapiens
  CDR3 for beta chain variable domain of TCR clone 174544 (TRBV6-3, TRBJ2-7)
CASSSPGTVFYEQYF

SEQ ID NO: 349089 - protein, 12 aa, Homo sapiens
  CDR3 for alpha chain variable domain of TCR clone 174545 (TRAV13-1, TRAJ21)
CAAKEGFNKSYF

SEQ ID NO: 349090 - protein, 17 aa, Homo sapiens
  CDR3 for beta chain variable domain of TCR clone 174545 (TRBV19, TRBJ2-7)
CASSISFYDSYPYEQYF

SEQ ID NO: 349091 - protein, 13 aa, Homo sapiens
  CDR3 for alpha chain variable domain of TCR clone 174546 (TRAV8-1, TRAJ30)
CAVIMNRDYKVIF

SEQ ID NO: 349092 - protein, 14 aa, Homo sapiens
  CDR3 for beta chain variable domain of TCR clone 174546 (TRBV7-2, TRBJ1-6)
CASSLQGANSPLHF

SEQ ID NO: 349093 - protein, 16 aa, Homo sapiens
  CDR3 for alpha chain variable domain of TCR clone 174547 (TRAV12-3, TRAJ53)
CAMSPGSGGSNYKLTF

SEQ ID NO: 349094 - protein, 14 aa, Homo sapiens
  CDR3 for beta chain variable domain of TCR clone 174547 (TRBV27, TRBJ2-2)
CASRPGVNTGELFF

SEQ ID NO: 349095 - protein, 13 aa, Homo sapiens
  CDR3 for alpha chain variable domain of TCR clone 174548 (TRAV17, TRAJ37)
CATDPGNTGKLLF

SEQ ID NO: 349096 - protein, 13 aa, Homo sapiens
  CDR3 for beta chain variable domain of TCR clone 174548 (TRBV5-5, TRBJ2-5)
CASSSLGQETQYF

SEQ ID NO: 349097 - protein, 14 aa, Homo sapiens
  CDR3 for alpha chain variable domain of TCR clone 174549 (TRAV1-2, TRAJ8)
CAVREDTGCQKLVF

SEQ ID NO: 349098 - protein, 12 aa, Homo sapiens
  CDR3 for beta chain variable domain of TCR clone 174549 (TRBV29-1, TRBJ2-3)
CSVTGGADTQYF

SEQ ID NO: 349099 - protein, 15 aa, Homo sapiens
  CDR3 for alpha chain variable domain of TCR clone 174550 (TRAV8-3, TRAJ45)
CASSYSGAGADGLTF

SEQ ID NO: 349100 - protein, 16 aa, Homo sapiens
  CDR3 for beta chain variable domain of TCR clone 174550 (TRBV20-1, TRBJ2-2)
CSASASGIPGAGELFF

SEQ ID NO: 349101 - protein, 16 aa, Homo sapiens
  CDR3 for alpha chain variable domain of TCR clone 174551 (TRAV3, TRAJ3)
CAVRDRAKSSASKIIF

SEQ ID NO: 349102 - protein, 15 aa, Homo sapiens
  CDR3 for beta chain variable domain of TCR clone 174551 (TRBV28, TRBJ2-1)
CASSIIAGGRSEQFF

SEQ ID NO: 349103 - protein, 12 aa, Homo sapiens
  CDR3 for alpha chain variable domain of TCR clone 174552 (TRAV14/DV4, TRAJ11)
CAMSLYDSTLTI

SEQ ID NO: 349104 - protein, 19 aa, Homo sapiens
  CDR3 for beta chain variable domain of TCR clone 174552 (TRBV28, TRBJ2-4)
CASSLQPGGPAHSKNIQYF

SEQ ID NO: 349105 - protein, 13 aa, Homo sapiens
  CDR3 for alpha chain variable domain of TCR clone 174553 (TRAV21, TRAJ20)
CAVGLRVDYKLSF

SEQ ID NO: 349106 - protein, 14 aa, Homo sapiens
  CDR3 for beta chain variable domain of TCR clone 174553 (TRBV5-5, TRBJ1-4)
CASSLEGEAEKLFF

SEQ ID NO: 349107 - protein, 15 aa, Homo sapiens
  CDR3 for alpha chain variable domain of TCR clone 174554 (TRAV8-3, TRAJ27)
CAVGPSKTNAGKSTF

SEQ ID NO: 349108 - protein, 15 aa, Homo sapiens
  CDR3 for beta chain variable domain of TCR clone 174554 (TRBV7-2, TRBJ2-5)
CASSSGLAGGNEQFF

SEQ ID NO: 349109 - protein, 15 aa, Homo sapiens
  CDR3 for alpha chain variable domain of TCR clone 174555 (TRAV26-1, TRAJ44)
CIVRANTGTASKLTF

SEQ ID NO: 349110 - protein, 15 aa, Homo sapiens
  CDR3 for beta chain variable domain of TCR clone 174555 (TRBV11-2, TRBJ2-1)
CASSLGTSGLNEQFF

SEQ ID NO: 349111 - protein, 14 aa, Homo sapiens
  CDR3 for alpha chain variable domain of TCR clone 174556 (TRAV35, TRAJ33)
CAGSSQDSNYQLIW

SEQ ID NO: 349112 - protein, 15 aa, Homo sapiens
  CDR3 for beta chain variable domain of TCR clone 174556 (TRBV6-5, TRBJ2-1)
CASSYDSGAGNEQFF

SEQ ID NO: 349113 - protein, 17 aa, Homo sapiens
  CDR3 for alpha chain variable domain of TCR clone 174557 (TRAV8-6, TRAJ58)
CAVSSWVGETSGSRLTF

SEQ ID NO: 349114 - protein, 17 aa, Homo sapiens
  CDR3 for beta chain variable domain of TCR clone 174557 (TRBV4-3, TRBJ1-2)
CASSSRLQAGVSVGYTF

SEQ ID NO: 349115 - protein, 16 aa, Homo sapiens
  CDR3 for alpha chain variable domain of TCR clone 174558 (TRAV3, TRAJ5)
RAVRNLMDTGRRALTF

SEQ ID NO: 349116 - protein, 16 aa, Homo sapiens
  CDR3 for beta chain variable domain of TCR clone 174558 (TRBV4-2, TRBJ2-7)
CASSQEGLANSYEQYF

SEQ ID NO: 349117 - protein, 11 aa, Homo sapiens
  CDR3 for alpha chain variable domain of TCR clone 174559 (TRAV16, TRAJ31)
CALFNNARLRF

SEQ ID NO: 349118 - protein, 15 aa, Homo sapiens
  CDR3 for beta chain variable domain of TCR clone 174559 (TRBV18, TRBJ1-1)
CASSPRQGENTEAFF

SEQ ID NO: 349119 - protein, 13 aa, Homo sapiens
  CDR3 for alpha chain variable domain of TCR clone 174560 (TRAV36/DV7, TRAJ57)
CAPLQGGSEKLVF

SEQ ID NO: 349120 - protein, 16 aa, Homo sapiens
  CDR3 for beta chain variable domain of TCR clone 174560 (TRBV11-3, TRBJ2-3)
CASSPGGLLGTDTQYF

SEQ ID NO: 349121 - protein, 16 aa, Homo sapiens
  CDR3 for alpha chain variable domain of TCR clone 174561 (TRAV12-2, TRAJ10)
CAVNRVLTGGGNKLTF

SEQ ID NO: 349122 - protein, 12 aa, Homo sapiens
  CDR3 for beta chain variable domain of TCR clone 174561 (TRBV28, TRBJ2-7)
SASSFSSYEQYF

SEQ ID NO: 349123 - protein, 13 aa, Homo sapiens
  CDR3 for alpha chain variable domain of TCR clone 174562 (TRAV27, TRAJ8)
CAGGPTGFQKLVF

SEQ ID NO: 349124 - protein, 15 aa, Homo sapiens
  CDR3 for beta chain variable domain of TCR clone 174562 (TRBV6-3, TRBJ2-7)
CASSSPGTVFYEQYF

SEQ ID NO: 349125 - protein, 15 aa, Homo sapiens
  CDR3 for alpha chain variable domain of TCR clone 174563 (TRAV12-3, TRAJ27)
CAIRAYNTNAGKSTV

SEQ ID NO: 349126 - protein, 13 aa, Homo sapiens
  CDR3 for beta chain variable domain of TCR clone 174563 (TRBV11-2, TRBJ2-5)
CASSRGPSETQYF

SEQ ID NO: 349127 - protein, 17 aa, Homo sapiens
  CDR3 for alpha chain variable domain of TCR clone 174564 (TRAV29/DV5, TRAJ10)
CSVLLGRATGGGNKLTF

SEQ ID NO: 349128 - protein, 17 aa, Homo sapiens
  CDR3 for beta chain variable domain of TCR clone 174564 (TRBV13, TRBJ2-3)
CASSLSRVAGGRNTQYF

SEQ ID NO: 349129 - protein, 16 aa, Homo sapiens
  CDR3 for alpha chain variable domain of TCR clone 174565 (TRAV36/DV7, TRAJ33)
WRPGNKVQDSNYQLIW

SEQ ID NO: 349130 - protein, 15 aa, Homo sapiens
  CDR3 for beta chain variable domain of TCR clone 174565 (TRBV29-1, TRBJ2-1)
CSVGRHALFYNELFF

SEQ ID NO: 349131 - protein, 14 aa, Homo sapiens
  CDR3 for alpha chain variable domain of TCR clone 174566 (TRAV12-1, TRAJ45)
CVVNVGGGADGLTF

SEQ ID NO: 349132 - protein, 14 aa, Homo sapiens
  CDR3 for beta chain variable domain of TCR clone 174566 (TRBV29-1, TRBJ2-3)
CSVEPGTRPDTQYF

SEQ ID NO: 349133 - protein, 20 aa, Homo sapiens
  CDR3 for alpha chain variable domain of TCR clone 174567 (TRAV25, TRAJ21)
TATQTTDVGTYPLSFNKFYF

SEQ ID NO: 349134 - protein, 12 aa, Homo sapiens
  CDR3 for beta chain variable domain of TCR clone 174567 (TRBV7-9, TRBJ2-7)
CASSLEGYEQYF

SEQ ID NO: 349135 - protein, 14 aa, Homo sapiens
  CDR3 for alpha chain variable domain of TCR clone 174568 (TRAV12-1, TRAJ9)
CVVNRRTGGFKTIF

SEQ ID NO: 349136 - protein, 13 aa, Homo sapiens
  CDR3 for beta chain variable domain of TCR clone 174568 (TRBV7-3, TRBJ1-1)
CASSQDWGAEAFF

SEQ ID NO: 349137 - protein, 14 aa, Homo sapiens
  CDR3 for alpha chain variable domain of TCR clone 174569 (TRAV12-3, TRAJ10)
SHLPLTGGGNKLTF

SEQ ID NO: 349138 - protein, 12 aa, Homo sapiens
  CDR3 for beta chain variable domain of TCR clone 174569 (TRBV7-8, TRBJ2-7)
CASILGDREQYF

SEQ ID NO: 349139 - protein, 16 aa, Homo sapiens
  CDR3 for alpha chain variable domain of TCR clone 174570 (TRAV30, TRAJ24)
CGTEIVDADSWGKFQF

SEQ ID NO: 349140 - protein, 13 aa, Homo sapiens
  CDR3 for beta chain variable domain of TCR clone 174570 (TRBV28, TRBJ1-1)
CASSKQGWTEAFF

SEQ ID NO: 349141 - protein, 14 aa, Homo sapiens
  CDR3 for alpha chain variable domain of TCR clone 174571 (TRAV35, TRAJ22)
CAGLRPGSARQLTF

SEQ ID NO: 349142 - protein, 15 aa, Homo sapiens
  CDR3 for beta chain variable domain of TCR clone 174571 (TRBV18, TRBJ2-6)
CASSPSYAGANVLTF

SEQ ID NO: 349143 - protein, 13 aa, Homo sapiens
  CDR3 for alpha chain variable domain of TCR clone 174572 (TRAV13-1, TRAJ39)
CAASIWAGNMLTF

SEQ ID NO: 349144 - protein, 16 aa, Homo sapiens
  CDR3 for beta chain variable domain of TCR clone 174572 (TRBV4-2, TRBJ1-1)
CASSQAGFGMNTEAFF

SEQ ID NO: 349145 - protein, 18 aa, Homo sapiens
  CDR3 for alpha chain variable domain of TCR clone 174573 (TRAV21, TRAJ52)
CAVRPSPAGGTSYGKLTC

SEQ ID NO: 349146 - protein, 14 aa, Homo sapiens
  CDR3 for beta chain variable domain of TCR clone 174573 (TRBV4-1, TRBJ2-2)
CASSQAVNTGELFF

SEQ ID NO: 349147 - protein, 16 aa, Homo sapiens
  CDR3 for alpha chain variable domain of TCR clone 174574 (TRAV3, TRAJ28)
CAVLPRSGAGSYQLTF

SEQ ID NO: 349148 - protein, 13 aa, Homo sapiens
  CDR3 for beta chain variable domain of TCR clone 174574 (TRBV12-4, TRBJ2-5)
CASRLAIQETQYF

SEQ ID NO: 349149 - protein, 15 aa, Homo sapiens
  CDR3 for alpha chain variable domain of TCR clone 174575 (TRAV8-6, TRAJ10)
CAVSDQAGGGNKLTF

SEQ ID NO: 349150 - protein, 12 aa, Homo sapiens
  CDR3 for beta chain variable domain of TCR clone 174575 (TRBV28, TRBJ2-1)
CASSVQINEQFF

SEQ ID NO: 349151 - protein, 11 aa, Homo sapiens
  CDR3 for alpha chain variable domain of TCR clone 174576 (TRAV21, TRAJ39)
LLVNAGNMLTF

SEQ ID NO: 349152 - protein, 16 aa, Homo sapiens
  CDR3 for beta chain variable domain of TCR clone 174576 (TRBV28, TRBJ2-1)
CASSSRVRDSYNEQFF

SEQ ID NO: 349153 - protein, 11 aa, Homo sapiens
  CDR3 for alpha chain variable domain of TCR clone 174577 (TRAV17, TRAJ49)
CATDAGNQVYF

SEQ ID NO: 349154 - protein, 16 aa, Homo sapiens
  CDR3 for beta chain variable domain of TCR clone 174577 (TRBV7-2, TRBJ1-2)
CASSPTPGTSLGGYTF

SEQ ID NO: 349155 - protein, 12 aa, Homo sapiens
  CDR3 for alpha chain variable domain of TCR clone 174578 (TRAV12-2, TRAJ16)
CAVNLDGQKLLF

SEQ ID NO: 349156 - protein, 18 aa, Homo sapiens
  CDR3 for beta chain variable domain of TCR clone 174578 (TRBV7-9, TRBJ2-7)
CASSLTTSGSRTWYEQYF

SEQ ID NO: 349157 - protein, 15 aa, Homo sapiens
  CDR3 for alpha chain variable domain of TCR clone 174579 (TRAV30, TRAJ57)
CGTAIPQGGSEKLFF

SEQ ID NO: 349158 - protein, 13 aa, Homo sapiens
  CDR3 for beta chain variable domain of TCR clone 174579 (TRBV7-9, TRBJ1-2)
CASSPSNFWGYTF

SEQ ID NO: 349159 - protein, 16 aa, Homo sapiens
  CDR3 for alpha chain variable domain of TCR clone 174580 (TRAV16, TRAJ21)
SACGWATTSTNFTLDL

SEQ ID NO: 349160 - protein, 15 aa, Homo sapiens
  CDR3 for beta chain variable domain of TCR clone 174580 (TRBV19, TRBJ2-1)
CASSIQATSYNEQFF

SEQ ID NO: 349161 - protein, 15 aa, Homo sapiens
  CDR3 for alpha chain variable domain of TCR clone 174581 (TRAV23/DV6, TRAJ12)
CAAIELGAMDSSYKL

SEQ ID NO: 349162 - protein, 12 aa, Homo sapiens
  CDR3 for beta chain variable domain of TCR clone 174581 (TRBV10-3, TRBJ2-2)
CAIRENTGELFF

SEQ ID NO: 349163 - protein, 11 aa, Homo sapiens
  CDR3 for alpha chain variable domain of TCR clone 174582 (TRAV2, TRAJ33)
CAVDSNYQLIW

SEQ ID NO: 349164 - protein, 17 aa, Homo sapiens
  CDR3 for beta chain variable domain of TCR clone 174582 (TRBV4-3, TRBJ1-5)
CASSQWGDGGPNQPQHF

SEQ ID NO: 349165 - protein, 14 aa, Homo sapiens
  CDR3 for alpha chain variable domain of TCR clone 174583 (TRAV12-1, TRAJ17)
CVVNPKAAGNKLTF

SEQ ID NO: 349166 - protein, 12 aa, Homo sapiens
  CDR3 for beta chain variable domain of TCR clone 174583 (TRBV7-9, TRBJ2-3)
CASSSITDTQYF

SEQ ID NO: 349167 - protein, 15 aa, Homo sapiens
  CDR3 for alpha chain variable domain of TCR clone 174584 (TRAV23/DV6, TRAJ18)
CAARYRGSTLGRLYV

SEQ ID NO: 349168 - protein, 13 aa, Homo sapiens
  CDR3 for beta chain variable domain of TCR clone 174584 (TRBV7-2, TRBJ2-7)
CASSSPSGSEQYF

SEQ ID NO: 349169 - protein, 17 aa, Homo sapiens
  CDR3 for alpha chain variable domain of TCR clone 174585 (TRAV1-1, TRAJ32)
CAVRVDELWWCYKQAHL

SEQ ID NO: 349170 - protein, 16 aa, Homo sapiens
  CDR3 for beta chain variable domain of TCR clone 174585 (TRBV5-1, TRBJ2-3)
CASSLGLAVYTDTQYF

SEQ ID NO: 349171 - protein, 12 aa, Homo sapiens
  CDR3 for alpha chain variable domain of TCR clone 174586 (TRAV12-3, TRAJ17)
CAMTLTGKKLTF

SEQ ID NO: 349172 - protein, 15 aa, Homo sapiens
  CDR3 for beta chain variable domain of TCR clone 174586 (TRBV20-1, TRBJ2-7)
CSARDWVSGMDEQYF

SEQ ID NO: 349173 - protein, 15 aa, Homo sapiens
  CDR3 for alpha chain variable domain of TCR clone 174587 (TRAV4, TRAJ10)
CLVGDEEGGGNKLTF

SEQ ID NO: 349174 - protein, 15 aa, Homo sapiens
  CDR3 for beta chain variable domain of TCR clone 174587 (TRBV7-2, TRBJ2-7)
CASSLTRQGTYEQYF

SEQ ID NO: 349175 - protein, 13 aa, Homo sapiens
  CDR3 for alpha chain variable domain of TCR clone 174588 (TRAV35, TRAJ44)
CAGLSGTASKLTF

SEQ ID NO: 349176 - protein, 17 aa, Homo sapiens
  CDR3 for beta chain variable domain of TCR clone 174588 (TRBV7-8, TRBJ1-2)
CACSFRPLQGHLYGYTF

SEQ ID NO: 349177 - protein, 16 aa, Homo sapiens
  CDR3 for alpha chain variable domain of TCR clone 174589 (TRAV30, TRAJ57)
CGTGWAPQCGSEKLVF

SEQ ID NO: 349178 - protein, 14 aa, Homo sapiens
  CDR3 for beta chain variable domain of TCR clone 174589 (TRBV18, TRBJ1-1)
CASSPGFQGVEAFF

SEQ ID NO: 349179 - protein, 13 aa, Homo sapiens
  CDR3 for alpha chain variable domain of TCR clone 174590 (TRAV27, TRAJ42)
CAGARGSQGNLIF

SEQ ID NO: 349180 - protein, 14 aa, Homo sapiens
  CDR3 for beta chain variable domain of TCR clone 174590 (TRBV20-1, TRBJ1-1)
CSAQTRIGGTEAFF

SEQ ID NO: 349181 - protein, 11 aa, Homo sapiens
  CDR3 for alpha chain variable domain of TCR clone 174591 (TRAV21, TRAJ9)
CAVPGGFKTIF

SEQ ID NO: 349182 - protein, 12 aa, Homo sapiens
  CDR3 for beta chain variable domain of TCR clone 174591 (TRBV20-1, TRBJ2-3)
CSARVGTDTRYF

SEQ ID NO: 349183 - protein, 12 aa, Homo sapiens
  CDR3 for alpha chain variable domain of TCR clone 174592 (TRAV3, TRAJ20)
CAVRDPDYKLSF

SEQ ID NO: 349184 - protein, 15 aa, Homo sapiens
  CDR3 for beta chain variable domain of TCR clone 174592 (TRBV24-1, TRBJ2-1)
CATSGSGGFYNEQFF

SEQ ID NO: 349185 - protein, 13 aa, Homo sapiens
  CDR3 for alpha chain variable domain of TCR clone 174593 (TRAV8-3, TRAJ43)
CAVVPYNNNDMRF

SEQ ID NO: 349186 - protein, 11 aa, Homo sapiens
  CDR3 for beta chain variable domain of TCR clone 174593 (TRBV4-1, TRBJ1-1)
CASSRRQEAFF

SEQ ID NO: 349187 - protein, 16 aa, Homo sapiens
  CDR3 for alpha chain variable domain of TCR clone 174594 (TRAV30, TRAJ24)
CGTEIVDADSWGKFQF

SEQ ID NO: 349188 - protein, 13 aa, Homo sapiens
  CDR3 for beta chain variable domain of TCR clone 174594 (TRBV11-2, TRBJ2-5)
CASSSTGEDTQYF

SEQ ID NO: 349189 - protein, 14 aa, Homo sapiens
  CDR3 for alpha chain variable domain of TCR clone 174595 (TRAV14/DV4, TRAJ42)
CPRGSLRSQGNLIF

SEQ ID NO: 349190 - protein, 13 aa, Homo sapiens
  CDR3 for beta chain variable domain of TCR clone 174595 (TRBV12-4, TRBJ1-1)
CASSLIGDTEAFF

SEQ ID NO: 349191 - protein, 15 aa, Homo sapiens
  CDR3 for alpha chain variable domain of TCR clone 174596 (TRAV26-1, TRAJ47)
CIVRVGWGYGKKLVF

SEQ ID NO: 349192 - protein, 13 aa, Homo sapiens
  CDR3 for beta chain variable domain of TCR clone 174596 (TRBV20-1, TRBJ2-7)
CSARGDTQDEQYF

SEQ ID NO: 349193 - protein, 16 aa, Homo sapiens
  CDR3 for alpha chain variable domain of TCR clone 174597 (TRAV12-3, TRAJ53)
CVMSQGSGGSNYKLTF

SEQ ID NO: 349194 - protein, 11 aa, Homo sapiens
  CDR3 for beta chain variable domain of TCR clone 174597 (TRBV29-1, TRBJ2-5)
CSEDRTGTQYF

SEQ ID NO: 349195 - protein, 13 aa, Homo sapiens
  CDR3 for alpha chain variable domain of TCR clone 174598 (TRAV27, TRAJ45)
CRSAGGGADGLTF

SEQ ID NO: 349196 - protein, 17 aa, Homo sapiens
  CDR3 for beta chain variable domain of TCR clone 174598 (TRBV10-3, TRBJ2-4)
CTSVPSVNKGSKNIQYF

SEQ ID NO: 349197 - protein, 16 aa, Homo sapiens
  CDR3 for alpha chain variable domain of TCR clone 174599 (TRAV16, TRAJ24)
CTLSGGSTDSWGKLQF

SEQ ID NO: 349198 - protein, 15 aa, Homo sapiens
  CDR3 for beta chain variable domain of TCR clone 174599 (TRBV27, TRBJ2-1)
CASSNGGGSSNEQFF

SEQ ID NO: 349199 - protein, 16 aa, Homo sapiens
  CDR3 for alpha chain variable domain of TCR clone 174600 (TRAV38-2/DV8, TRAJ47)
CAYRSAIMEYGNKLVF

SEQ ID NO: 349200 - protein, 16 aa, Homo sapiens
  CDR3 for beta chain variable domain of TCR clone 174600 (TRBV2, TRBJ2-1)
CASRSPAGGKYNEQFF

SEQ ID NO: 349201 - protein, 18 aa, Homo sapiens
  CDR3 for alpha chain variable domain of TCR clone 174601 (TRAV21, TRAJ52)
CAVRPSPAGGTSYGKLAF

SEQ ID NO: 349202 - protein, 19 aa, Homo sapiens
  CDR3 for beta chain variable domain of TCR clone 174601 (TRBV25-1, TRBJ2-2)
CAILVYRVDRGRKTGELFF

SEQ ID NO: 349203 - protein, 14 aa, Homo sapiens
  CDR3 for alpha chain variable domain of TCR clone 174602 (TRAV9-2, TRAJ39)
CALSIYNAGNMLTF

SEQ ID NO: 349204 - protein, 14 aa, Homo sapiens
  CDR3 for beta chain variable domain of TCR clone 174602 (TRBV6-1, TRBJ1-3)
CASVQGGGGNTMYF

SEQ ID NO: 349205 - protein, 11 aa, Homo sapiens
  CDR3 for alpha chain variable domain of TCR clone 174603 (TRAV21, TRAJ34)
CAVTNTVKLIF

SEQ ID NO: 349206 - protein, 12 aa, Homo sapiens
  CDR3 for beta chain variable domain of TCR clone 174603 (TRBV7-9, TRBJ1-1)
CASSLVRGEAFF

SEQ ID NO: 349207 - protein, 12 aa, Homo sapiens
  CDR3 for alpha chain variable domain of TCR clone 174604 (TRAV35, TRAJ40)
CAGRAGTYKYIF

SEQ ID NO: 349208 - protein, 14 aa, Homo sapiens
  CDR3 for beta chain variable domain of TCR clone 174604 (TRBV7-2, TRBJ1-3)
CASSRGGTGNTIYF

SEQ ID NO: 349209 - protein, 18 aa, Homo sapiens
  CDR3 for alpha chain variable domain of TCR clone 174605 (TRAV26-1, TRAJ52)
CIVRVAGAGGTSYGKLTF

SEQ ID NO: 349210 - protein, 13 aa, Homo sapiens
  CDR3 for beta chain variable domain of TCR clone 174605 (TRBV7-8, TRBJ1-2)
YASSAQSYYGYTF

SEQ ID NO: 349211 - protein, 11 aa, Homo sapiens
  CDR3 for alpha chain variable domain of TCR clone 174606 (TRAV3, TRAJ21)
CAVGNFNKFYF

SEQ ID NO: 349212 - protein, 17 aa, Homo sapiens
  CDR3 for beta chain variable domain of TCR clone 174606 (TRBV20-1, TRBJ2-1)
CSASSSGVAGSYNEQFF

SEQ ID NO: 349213 - protein, 15 aa, Homo sapiens
  CDR3 for alpha chain variable domain of TCR clone 174607 (TRAV8-4, TRAJ29)
CAVSEDFRGNTPLVF

SEQ ID NO: 349214 - protein, 14 aa, Homo sapiens
  CDR3 for beta chain variable domain of TCR clone 174607 (TRBV7-2, TRBJ1-1)
CASSYLTGTTEAFF

SEQ ID NO: 349215 - protein, 17 aa, Homo sapiens
  CDR3 for alpha chain variable domain of TCR clone 174608 (TRAV3, TRAJ12)
CAVSDGGRMVSSYKLIF

SEQ ID NO: 349216 - protein, 13 aa, Homo sapiens
  CDR3 for beta chain variable domain of TCR clone 174608 (TRBV4-2, TRBJ1-1)
CASSQAGNTEAFF

SEQ ID NO: 349217 - protein, 13 aa, Homo sapiens
  CDR3 for alpha chain variable domain of TCR clone 174609 (TRAV17, TRAJ5)
CAPMDTSRRALTF

SEQ ID NO: 349218 - protein, 14 aa, Homo sapiens
  CDR3 for beta chain variable domain of TCR clone 174609 (TRBV29-1, TRBJ2-7)
CSVDQRQASYEQYF

SEQ ID NO: 349219 - protein, 13 aa, Homo sapiens
  CDR3 for alpha chain variable domain of TCR clone 174610 (TRAV8-2, TRAJ22)
CVVSEGSARQLTF

SEQ ID NO: 349220 - protein, 16 aa, Homo sapiens
  CDR3 for beta chain variable domain of TCR clone 174610 (TRBV13, TRBJ2-2)
CASSPRTGEHTGELFF

SEQ ID NO: 349221 - protein, 13 aa, Homo sapiens
  CDR3 for alpha chain variable domain of TCR clone 174611 (TRAV3, TRAJ21)
CAVGNFNKFTLDL

SEQ ID NO: 349222 - protein, 14 aa, Homo sapiens
  CDR3 for beta chain variable domain of TCR clone 174611 (TRBV19, TRBJ2-1)
CASPTFVLSGEQFF

SEQ ID NO: 349223 - protein, 17 aa, Homo sapiens
  CDR3 for alpha chain variable domain of TCR clone 174612 (TRAV12-2, TRAJ48)
CASNEKLTFGTGTRLTI

SEQ ID NO: 349224 - protein, 16 aa, Homo sapiens
  CDR3 for beta chain variable domain of TCR clone 174612 (TRBV7-3, TRBJ2-2)
CASSLKRGTVSGELFF

SEQ ID NO: 349225 - protein, 12 aa, Homo sapiens
  CDR3 for alpha chain variable domain of TCR clone 174613 (TRAV25, TRAJ54)
CAGGWGAQKLVF

SEQ ID NO: 349226 - protein, 12 aa, Homo sapiens
  CDR3 for beta chain variable domain of TCR clone 174613 (TRBV7-8, TRBJ2-7)
CASSLGDREQYV

SEQ ID NO: 349227 - protein, 14 aa, Homo sapiens
  CDR3 for alpha chain variable domain of TCR clone 174614 (TRAV12-1, TRAJ12)
CVVTRMDSSYKLIL

SEQ ID NO: 349228 - protein, 14 aa, Homo sapiens
  CDR3 for beta chain variable domain of TCR clone 174614 (TRBV4-1, TRBJ2-7)
CASSPVAGGDEQYF

SEQ ID NO: 349229 - protein, 17 aa, Homo sapiens
  CDR3 for alpha chain variable domain of TCR clone 174615 (TRAV26-1, TRAJ53)
CIVRVDDSGGSKYKLTF

SEQ ID NO: 349230 - protein, 17 aa, Homo sapiens
  CDR3 for beta chain variable domain of TCR clone 174615 (TRBV7-3, TRBJ2-5)
CASSLGSGRSGSETQYF

SEQ ID NO: 349231 - protein, 14 aa, Homo sapiens
  CDR3 for alpha chain variable domain of TCR clone 174616 (TRAV1-2, TRAJ16)
CAVNRFSDGQKLLF

SEQ ID NO: 349232 - protein, 13 aa, Homo sapiens
  CDR3 for beta chain variable domain of TCR clone 174616 (TRBV7-2, TRBJ2-2)
CASSSVRAGDLFF

SEQ ID NO: 349233 - protein, 16 aa, Homo sapiens
  CDR3 for alpha chain variable domain of TCR clone 174617 (TRAV12-2, TRAJ28)
CAVITDSGAGSYQLTF

SEQ ID NO: 349234 - protein, 14 aa, Homo sapiens
  CDR3 for beta chain variable domain of TCR clone 174617 (TRBV7-2, TRBJ1-1)
CASSFLTGTTEAFF

SEQ ID NO: 349235 - protein, 18 aa, Homo sapiens
  CDR3 for alpha chain variable domain of TCR clone 174618 (TRAV1-2, TRAJ18)
CAVRDMGDRGSTLGRLYF

SEQ ID NO: 349236 - protein, 16 aa, Homo sapiens
  CDR3 for beta chain variable domain of TCR clone 174618 (TRBV29-1, TRBJ1-2)
CSAEANRNIANYGDTF

SEQ ID NO: 349237 - protein, 14 aa, Homo sapiens
  CDR3 for alpha chain variable domain of TCR clone 174619 (TRAV8-2, TRAJ11)
CVVSEKSGYSTLTF

SEQ ID NO: 349238 - protein, 16 aa, Homo sapiens
  CDR3 for beta chain variable domain of TCR clone 174619 (TRBV27, TRBJ2-7)
CASSSERRDSAYEQYF

SEQ ID NO: 349239 - protein, 13 aa, Homo sapiens
  CDR3 for alpha chain variable domain of TCR clone 174620 (TRAV21, TRAJ36)
CAVIKTGANNLFF

SEQ ID NO: 349240 - protein, 13 aa, Homo sapiens
  CDR3 for beta chain variable domain of TCR clone 174620 (TRBV29-1, TRBJ2-3)
CSATRGGSDTQYF

SEQ ID NO: 349241 - protein, 16 aa, Homo sapiens
  CDR3 for alpha chain variable domain of TCR clone 174621 (TRAV12-2, TRAJ6)
CAAPLAGSGGSYIPTF

SEQ ID NO: 349242 - protein, 15 aa, Homo sapiens
  CDR3 for beta chain variable domain of TCR clone 174621 (TRBV28, TRBJ2-3)
CASRGLAGVTDTQYF

SEQ ID NO: 349243 - protein, 13 aa, Homo sapiens
  CDR3 for alpha chain variable domain of TCR clone 174622 (TRAV21, TRAJ27)
CAARPGNSGKSTF

SEQ ID NO: 349244 - protein, 14 aa, Homo sapiens
  CDR3 for beta chain variable domain of TCR clone 174622 (TRBV5-1, TRBJ2-7)
CASSRGESLYEQYF

SEQ ID NO: 349245 - protein, 21 aa, Homo sapiens
  CDR3 for alpha chain variable domain of TCR clone 174623 (TRAV36/DV7, TRAJ39)
TATQTGDSAIYLPNAGNMLTF

SEQ ID NO: 349246 - protein, 13 aa, Homo sapiens
  CDR3 for beta chain variable domain of TCR clone 174623 (TRBV19, TRBJ2-7)
CASSIDRTYEQYF

SEQ ID NO: 349247 - protein, 14 aa, Homo sapiens
  CDR3 for alpha chain variable domain of TCR clone 174624 (TRAV38-1, TRAJ45)
CAYYSGGGADGLPF

SEQ ID NO: 349248 - protein, 15 aa, Homo sapiens
  CDR3 for beta chain variable domain of TCR clone 174624 (TRBV15, TRBJ1-4)
CATSRDMGSYEKLFF

SEQ ID NO: 349249 - protein, 10 aa, Homo sapiens
  CDR3 for alpha chain variable domain of TCR clone 174625 (TRAV16, TRAJ26)
CAPEEIWSEF

SEQ ID NO: 349250 - protein, 15 aa, Homo sapiens
  CDR3 for beta chain variable domain of TCR clone 174625 (TRBV7-2, TRBJ2-3)
CASSLTGTSTDTQYF

SEQ ID NO: 349251 - protein, 12 aa, Homo sapiens
  CDR3 for alpha chain variable domain of TCR clone 174626 (TRAV12-3, TRAJ5)
CAMDTGRRALTF

SEQ ID NO: 349252 - protein, 14 aa, Homo sapiens
  CDR3 for beta chain variable domain of TCR clone 174626 (TRBV20-1, TRBJ2-1)
CSARIGGSANEQFF

SEQ ID NO: 349253 - protein, 16 aa, Homo sapiens
  CDR3 for alpha chain variable domain of TCR clone 174627 (TRAV4, TRAJ22)
CLVGDLYSGSARQLTF

SEQ ID NO: 349254 - protein, 17 aa, Homo sapiens
  CDR3 for beta chain variable domain of TCR clone 174627 (TRBV28, TRBJ2-5)
CASSRQGGLAGAETQYF

SEQ ID NO: 349255 - protein, 15 aa, Homo sapiens
  CDR3 for alpha chain variable domain of TCR clone 174628 (TRAV4, TRAJ39)
CLVGPNNNAGNMLTF

SEQ ID NO: 349256 - protein, 14 aa, Homo sapiens
  CDR3 for beta chain variable domain of TCR clone 174628 (TRBV18, TRBJ2-1)
CASSPQGRFNEQFF

SEQ ID NO: 349257 - protein, 14 aa, Homo sapiens
  CDR3 for alpha chain variable domain of TCR clone 174629 (TRAV40, TRAJ41)
CLLGPPNSVYALNF

SEQ ID NO: 349258 - protein, 11 aa, Homo sapiens
  CDR3 for beta chain variable domain of TCR clone 174629 (TRBV19, TRBJ2-7)
CASSILGEQYF

SEQ ID NO: 349259 - protein, 10 aa, Homo sapiens
  CDR3 for alpha chain variable domain of TCR clone 174630 (TRAV36/DV7, TRAJ48)
CAVGNEKLTF

SEQ ID NO: 349260 - protein, 11 aa, Homo sapiens
  CDR3 for beta chain variable domain of TCR clone 174630 (TRBV29-1, TRBJ2-5)
CSEDRTGTQYF

SEQ ID NO: 349261 - protein, 13 aa, Homo sapiens
  CDR3 for alpha chain variable domain of TCR clone 174631 (TRAV8-3, TRAJ36)
CAVGATGANNLFF

SEQ ID NO: 349262 - protein, 16 aa, Homo sapiens
  CDR3 for beta chain variable domain of TCR clone 174631 (TRBV20-1, TRBJ1-4)
CSATGQGLLTNEKLFF

SEQ ID NO: 349263 - protein, 13 aa, Homo sapiens
  CDR3 for alpha chain variable domain of TCR clone 174632 (TRAV8-6, TRAJ21)
CAVSPPSLNKFYF

SEQ ID NO: 349264 - protein, 14 aa, Homo sapiens
  CDR3 for beta chain variable domain of TCR clone 174632 (TRBV7-9, TRBJ2-5)
CASSLDTAQETQYF

SEQ ID NO: 349265 - protein, 15 aa, Homo sapiens
  CDR3 for alpha chain variable domain of TCR clone 174633 (TRAV8-1, TRAJ6)
CAVNTPPGGSYIPTF

SEQ ID NO: 349266 - protein, 14 aa, Homo sapiens
  CDR3 for beta chain variable domain of TCR clone 174633 (TRBV7-3, TRBJ2-7)
CASSLKADSYEQYF

SEQ ID NO: 349267 - protein, 10 aa, Homo sapiens
  CDR3 for alpha chain variable domain of TCR clone 174634 (TRAV9-2, TRAJ34)
CALSDDKLIF

SEQ ID NO: 349268 - protein, 14 aa, Homo sapiens
  CDR3 for beta chain variable domain of TCR clone 174634 (TRBV7-8, TRBJ2-7)
CASSVGEGAYEQYF

SEQ ID NO: 349269 - protein, 14 aa, Homo sapiens
  CDR3 for alpha chain variable domain of TCR clone 174635 (TRAV9-2, TRAJ39)
CALYIYNAGNMLTF

SEQ ID NO: 349270 - protein, 14 aa, Homo sapiens
  CDR3 for beta chain variable domain of TCR clone 174635 (TRBV11-2, TRBJ2-5)
SASSRTGGIETQYF

SEQ ID NO: 349271 - protein, 14 aa, Homo sapiens
  CDR3 for alpha chain variable domain of TCR clone 174636 (TRAV8-3, TRAJ4)
CGVGAAGGDNKLIF

SEQ ID NO: 349272 - protein, 15 aa, Homo sapiens
  CDR3 for beta chain variable domain of TCR clone 174636 (TRBV6-5, TRBJ2-1)
CASSYDAGAGNEQFF

SEQ ID NO: 349273 - protein, 11 aa, Homo sapiens
  CDR3 for alpha chain variable domain of TCR clone 174637 (TRAV2, TRAJ13)
CASGGYQKVTF

SEQ ID NO: 349274 - protein, 15 aa, Homo sapiens
  CDR3 for beta chain variable domain of TCR clone 174637 (TRBV5-4, TRBJ2-7)
CASSRFGTGSYEKYF

SEQ ID NO: 349275 - protein, 12 aa, Homo sapiens
  CDR3 for alpha chain variable domain of TCR clone 174638 (TRAV12-1, TRAJ40)
CVFYSGTNKYIF

SEQ ID NO: 349276 - protein, 18 aa, Homo sapiens
  CDR3 for beta chain variable domain of TCR clone 174638 (TRBV12-4, TRBJ2-2)
CASSLVAGTRGRTGELFF

SEQ ID NO: 349277 - protein, 19 aa, Homo sapiens
  CDR3 for alpha chain variable domain of TCR clone 174639 (TRAV3, TRAJ6)
CVVRDRNPSRSGGCYIPTF

SEQ ID NO: 349278 - protein, 15 aa, Homo sapiens
  CDR3 for beta chain variable domain of TCR clone 174639 (TRBV18, TRBJ2-7)
CASSPTFMDSYEQYF

SEQ ID NO: 349279 - protein, 13 aa, Homo sapiens
  CDR3 for alpha chain variable domain of TCR clone 174640 (TRAV8-6, TRAJ16)
CAVSLWVGQKLLF

SEQ ID NO: 349280 - protein, 15 aa, Homo sapiens
  CDR3 for beta chain variable domain of TCR clone 174640 (TRBV12-4, TRBJ2-1)
CASSLSTGVSNEQFF

SEQ ID NO: 349281 - protein, 14 aa, Homo sapiens
  CDR3 for alpha chain variable domain of TCR clone 174641 (TRAV3, TRAJ21)
CAVESQANFNKFYF

SEQ ID NO: 349282 - protein, 13 aa, Homo sapiens
  CDR3 for beta chain variable domain of TCR clone 174641 (TRBV19, TRBJ1-2)
CASSVPGQDGYTF

SEQ ID NO: 349283 - protein, 12 aa, Homo sapiens
  CDR3 for alpha chain variable domain of TCR clone 174642 (TRAV8-3, TRAJ20)
CAVGANDYKLSF

SEQ ID NO: 349284 - protein, 13 aa, Homo sapiens
  CDR3 for beta chain variable domain of TCR clone 174642 (TRBV5-5, TRBJ1-5)
CASSLGIGGDQHF

SEQ ID NO: 349285 - protein, 14 aa, Homo sapiens
  CDR3 for alpha chain variable domain of TCR clone 174643 (TRAV27, TRAJ22)
CAGLPSGSARQLTF

SEQ ID NO: 349286 - protein, 16 aa, Homo sapiens
  CDR3 for beta chain variable domain of TCR clone 174643 (TRBV4-1, TRBJ2-3)
CASSQRAGGLTDTQYF

SEQ ID NO: 349287 - protein, 15 aa, Homo sapiens
  CDR3 for alpha chain variable domain of TCR clone 174644 (TRAV17, TRAJ52)
CATEAGGTSYGKLTF

SEQ ID NO: 349288 - protein, 16 aa, Homo sapiens
  CDR3 for beta chain variable domain of TCR clone 174644 (TRBV20-1, TRBJ2-1)
CSAGRPAGGPYNDQFF

SEQ ID NO: 349289 - protein, 15 aa, Homo sapiens
  CDR3 for alpha chain variable domain of TCR clone 174645 (TRAV1-2, TRAJ39)
CAVEGVDNAGNMLTF

SEQ ID NO: 349290 - protein, 12 aa, Homo sapiens
  CDR3 for beta chain variable domain of TCR clone 174645 (TRBV5-1, TRBJ2-7)
CASSLDSYEQYF

SEQ ID NO: 349291 - protein, 11 aa, Homo sapiens
  CDR3 for alpha chain variable domain of TCR clone 174646 (TRAV17, TRAJ31)
CATDRTARLMF

SEQ ID NO: 349292 - protein, 14 aa, Homo sapiens
  CDR3 for beta chain variable domain of TCR clone 174646 (TRBV4-1, TRBJ2-2)
CSSSQAVNTGELFF

SEQ ID NO: 349293 - protein, 14 aa, Homo sapiens
  CDR3 for alpha chain variable domain of TCR clone 174647 (TRAV23/DV6, TRAJ40)
CAASNPSGTYKYIF

SEQ ID NO: 349294 - protein, 15 aa, Homo sapiens
  CDR3 for beta chain variable domain of TCR clone 174647 (TRBV2, TRBJ1-2)
CASSEIGGANYGYTF

SEQ ID NO: 349295 - protein, 15 aa, Homo sapiens
  CDR3 for alpha chain variable domain of TCR clone 174648 (TRAV20, TRAJ58)
CAVQDLETSGSRFTF

SEQ ID NO: 349296 - protein, 16 aa, Homo sapiens
  CDR3 for beta chain variable domain of TCR clone 174648 (TRBV19, TRBJ2-1)
CASSKAGPSSYNEQFF

SEQ ID NO: 349297 - protein, 15 aa, Homo sapiens
  CDR3 for alpha chain variable domain of TCR clone 174649 (TRAV8-3, TRAJ45)
CASSYSVGGADGPTF

SEQ ID NO: 349298 - protein, 13 aa, Homo sapiens
  CDR3 for beta chain variable domain of TCR clone 174649 (TRBV10-3, TRBJ2-7)
CASKLAVNYEQYF

SEQ ID NO: 349299 - protein, 13 aa, Homo sapiens
  CDR3 for alpha chain variable domain of TCR clone 174650 (TRAV12-2, TRAJ20)
CAANRFDDYKLSF

SEQ ID NO: 349300 - protein, 12 aa, Homo sapiens
  CDR3 for beta chain variable domain of TCR clone 174650 (TRBV28, TRBJ2-3)
CASSLYRDTQYF

SEQ ID NO: 349301 - protein, 14 aa, Homo sapiens
  CDR3 for alpha chain variable domain of TCR clone 174651 (TRAV12-3, TRAJ41)
CAMSAGNSGYALNF

SEQ ID NO: 349302 - protein, 10 aa, Homo sapiens
  CDR3 for beta chain variable domain of TCR clone 174651 (TRBV28, TRBJ1-2)
CASSSDRAVF

SEQ ID NO: 349303 - protein, 16 aa, Homo sapiens
  CDR3 for alpha chain variable domain of TCR clone 174652 (TRAV20, TRAJ22)
CAVQASSSGSARQLTF

SEQ ID NO: 349304 - protein, 18 aa, Homo sapiens
  CDR3 for beta chain variable domain of TCR clone 174652 (TRBV11-2, TRBJ2-3)
CASSLGGASRGAPNTQYF

SEQ ID NO: 349305 - protein, 19 aa, Homo sapiens
  CDR3 for alpha chain variable domain of TCR clone 174653 (TRAV13-1, TRAJ52)
CAASPYPNAGGTSYGKLTF

SEQ ID NO: 349306 - protein, 14 aa, Homo sapiens
  CDR3 for beta chain variable domain of TCR clone 174653 (TRBV19, TRBJ2-7)
CASTVQGRPYEQYF

SEQ ID NO: 349307 - protein, 15 aa, Homo sapiens
  CDR3 for alpha chain variable domain of TCR clone 174654 (TRAV21, TRAJ32)
CAVNSYGGDTNKLIF

SEQ ID NO: 349308 - protein, 18 aa, Homo sapiens
  CDR3 for beta chain variable domain of TCR clone 174654 (TRBV7-9, TRBJ2-1)
CASSTGLAEGSSYNEQFF

SEQ ID NO: 349309 - protein, 10 aa, Homo sapiens
  CDR3 for alpha chain variable domain of TCR clone 174655 (TRAV16, TRAJ26)
CAPEELWSEF

SEQ ID NO: 349310 - protein, 15 aa, Homo sapiens
  CDR3 for beta chain variable domain of TCR clone 174655 (TRBV7-2, TRBJ2-3)
CASSLTGTSTDTQNF

SEQ ID NO: 349311 - protein, 14 aa, Homo sapiens
  CDR3 for alpha chain variable domain of TCR clone 174656 (TRAV4, TRAJ43)
CLVGPMYNNNDMRF

SEQ ID NO: 349312 - protein, 21 aa, Homo sapiens
  CDR3 for beta chain variable domain of TCR clone 174656 (TRBV11-1, TRBJ2-1)
CASSARERLRPEGPSYNGQFF

SEQ ID NO: 349313 - protein, 15 aa, Homo sapiens
  CDR3 for alpha chain variable domain of TCR clone 174657 (TRAV16, TRAJ12)
CSKWPPRDSSYKLIF

SEQ ID NO: 349314 - protein, 13 aa, Homo sapiens
  CDR3 for beta chain variable domain of TCR clone 174657 (TRBV4-2, TRBJ1-1)
CAGSQAGNTEAFF

SEQ ID NO: 349315 - protein, 15 aa, Homo sapiens
  CDR3 for alpha chain variable domain of TCR clone 174658 (TRAV27, TRAJ38)
CAARRNAGNNRKRIW

SEQ ID NO: 349316 - protein, 13 aa, Homo sapiens
  CDR3 for beta chain variable domain of TCR clone 174658 (TRBV20-1, TRBJ1-1)
CSARGGGNTEAFF

SEQ ID NO: 349317 - protein, 19 aa, Homo sapiens
  CDR3 for alpha chain variable domain of TCR clone 174659 (TRAV25, TRAJ20)
TATQTTDVGILPHDYKLSF

SEQ ID NO: 349318 - protein, 13 aa, Homo sapiens
  CDR3 for beta chain variable domain of TCR clone 174659 (TRBV7-2, TRBJ2-2)
CASSLAVTGELFF

SEQ ID NO: 349319 - protein, 16 aa, Homo sapiens
  CDR3 for alpha chain variable domain of TCR clone 174660 (TRAV23/DV6, TRAJ57)
CSKLYPFSGRSEKLVF

SEQ ID NO: 349320 - protein, 14 aa, Homo sapiens
  CDR3 for beta chain variable domain of TCR clone 174660 (TRBV25-1, TRBJ1-1)
CASTHLGGNTEAFF

SEQ ID NO: 349321 - protein, 12 aa, Homo sapiens
  CDR3 for alpha chain variable domain of TCR clone 174661 (TRAV8-3, TRAJ41)
CAVALSGYALNF

SEQ ID NO: 349322 - protein, 14 aa, Homo sapiens
  CDR3 for beta chain variable domain of TCR clone 174661 (TRBV25-1, TRBJ1-1)
CASTHLGGNTEAFF

SEQ ID NO: 349323 - protein, 18 aa, Homo sapiens
  CDR3 for alpha chain variable domain of TCR clone 174662 (TRAV21, TRAJ52)
CAVRPSPAGGTSYGKLTL

SEQ ID NO: 349324 - protein, 15 aa, Homo sapiens
  CDR3 for beta chain variable domain of TCR clone 174662 (TRBV28, TRBJ2-5)
CASSSGRTIQETQYF

SEQ ID NO: 349325 - protein, 11 aa, Homo sapiens
  CDR3 for alpha chain variable domain of TCR clone 174663 (TRAV2, TRAJ33)
CAVESNYQLIW

SEQ ID NO: 349326 - protein, 14 aa, Homo sapiens
  CDR3 for beta chain variable domain of TCR clone 174663 (TRBV7-2, TRBJ2-5)
CASSSSGHQETQYF

SEQ ID NO: 349327 - protein, 16 aa, Homo sapiens
  CDR3 for alpha chain variable domain of TCR clone 174664 (TRAV30, TRAJ24)
CGTEIEDADSWGKFQL

SEQ ID NO: 349328 - protein, 14 aa, Homo sapiens
  CDR3 for beta chain variable domain of TCR clone 174664 (TRBV12-5, TRBJ2-5)
CASGSRTHQETQYF

SEQ ID NO: 349329 - protein, 16 aa, Homo sapiens
  CDR3 for alpha chain variable domain of TCR clone 174665 (TRAV1-2, TRAJ10)
CAVRGVLTGGGNKLTF

SEQ ID NO: 349330 - protein, 17 aa, Homo sapiens
  CDR3 for beta chain variable domain of TCR clone 174665 (TRBV11-2, TRBJ2-6)
CASSQRDIFSGANVLTF

SEQ ID NO: 349331 - protein, 11 aa, Homo sapiens
  CDR3 for alpha chain variable domain of TCR clone 174666 (TRAV16, TRAJ42)
CALASQGNLIF

SEQ ID NO: 349332 - protein, 13 aa, Homo sapiens
  CDR3 for beta chain variable domain of TCR clone 174666 (TRBV7-7, TRBJ2-3)
CASSLSRADTQYF

SEQ ID NO: 349333 - protein, 17 aa, Homo sapiens
  CDR3 for alpha chain variable domain of TCR clone 174667 (TRAV3, TRAJ6)
CAVRDGPRAGGGYIPKF

SEQ ID NO: 349334 - protein, 14 aa, Homo sapiens
  CDR3 for beta chain variable domain of TCR clone 174667 (TRBV7-2, TRBJ2-7)
CASSPKTSFYEQYF

SEQ ID NO: 349335 - protein, 11 aa, Homo sapiens
  CDR3 for alpha chain variable domain of TCR clone 174668 (TRAV1-1, TRAJ23)
CAVRQGGKLIF

SEQ ID NO: 349336 - protein, 20 aa, Homo sapiens
  CDR3 for beta chain variable domain of TCR clone 174668 (TRBV7-8, TRBJ2-2)
CASSHLFPGPTLHITGELFF

SEQ ID NO: 349337 - protein, 15 aa, Homo sapiens
  CDR3 for alpha chain variable domain of TCR clone 174669 (TRAV26-1, TRAJ24)
CIVREDTDSWGKLQF

SEQ ID NO: 349338 - protein, 14 aa, Homo sapiens
  CDR3 for beta chain variable domain of TCR clone 174669 (TRBV7-9, TRBJ2-5)
CASSPAQDQETQYF

SEQ ID NO: 349339 - protein, 13 aa, Homo sapiens
  CDR3 for alpha chain variable domain of TCR clone 174670 (TRAV27, TRAJ45)
CRSSGGGADGLTF

SEQ ID NO: 349340 - protein, 15 aa, Homo sapiens
  CDR3 for beta chain variable domain of TCR clone 174670 (TRBV11-2, TRBJ2-1)
CASSPTGGGEVEQFF

SEQ ID NO: 349341 - protein, 14 aa, Homo sapiens
  CDR3 for alpha chain variable domain of TCR clone 174671 (TRAV13-1, TRAJ35)
CAASKGGFGNVLHC

SEQ ID NO: 349342 - protein, 16 aa, Homo sapiens
  CDR3 for beta chain variable domain of TCR clone 174671 (TRBV5-1, TRBJ2-2)
CTSSSRTGGRTGELFF

SEQ ID NO: 349343 - protein, 16 aa, Homo sapiens
  CDR3 for alpha chain variable domain of TCR clone 174672 (TRAV13-1, TRAJ10)
CAASSHFTGGGNKLTF

SEQ ID NO: 349344 - protein, 15 aa, Homo sapiens
  CDR3 for beta chain variable domain of TCR clone 174672 (TRBV4-1, TRBJ1-1)
CASSQEWGHYTEAFF

SEQ ID NO: 349345 - protein, 15 aa, Homo sapiens
  CDR3 for alpha chain variable domain of TCR clone 174673 (TRAV3, TRAJ17)
CAGRDTGAAGNKLTF

SEQ ID NO: 349346 - protein, 14 aa, Homo sapiens
  CDR3 for beta chain variable domain of TCR clone 174673 (TRBV6-3, TRBJ1-1)
CASSNLLPGAEAFF

SEQ ID NO: 349347 - protein, 18 aa, Homo sapiens
  CDR3 for alpha chain variable domain of TCR clone 174674 (TRAV35, TRAJ28)
CAGRNYPLSGAGSYQLTF

SEQ ID NO: 349348 - protein, 12 aa, Homo sapiens
  CDR3 for beta chain variable domain of TCR clone 174674 (TRBV7-9, TRBJ1-1)
CASSLEGTEAFF

SEQ ID NO: 349349 - protein, 14 aa, Homo sapiens
  CDR3 for alpha chain variable domain of TCR clone 174675 (TRAV4, )
CLVGPHNYDIQNPA

SEQ ID NO: 349350 - protein, 17 aa, Homo sapiens
  CDR3 for beta chain variable domain of TCR clone 174675 (TRBV24-1, TRBJ2-1)
CATSDVSTSGTYNEQFF

SEQ ID NO: 349351 - protein, 13 aa, Homo sapiens
  CDR3 for alpha chain variable domain of TCR clone 174676 (TRAV36/DV7, TRAJ41)
CAVEANSGYALNF

SEQ ID NO: 349352 - protein, 13 aa, Homo sapiens
  CDR3 for beta chain variable domain of TCR clone 174676 (TRBV11-2, TRBJ2-5)
CVSSFSSQETQYF

SEQ ID NO: 349353 - protein, 13 aa, Homo sapiens
  CDR3 for alpha chain variable domain of TCR clone 174677 (TRAV29/DV5, TRAJ31)
CAASRNNNARLMF

SEQ ID NO: 349354 - protein, 14 aa, Homo sapiens
  CDR3 for beta chain variable domain of TCR clone 174677 (TRBV28, TRBJ1-5)
CASSRTGLNQPQHF

SEQ ID NO: 349355 - protein, 15 aa, Homo sapiens
  CDR3 for alpha chain variable domain of TCR clone 174678 (TRAV26-1, TRAJ22)
CIVRVSFWFCKATDL

SEQ ID NO: 349356 - protein, 14 aa, Homo sapiens
  CDR3 for beta chain variable domain of TCR clone 174678 (TRBV10-3, TRBJ1-2)
CAIRAGTGDYGDTF

SEQ ID NO: 349357 - protein, 11 aa, Homo sapiens
  CDR3 for alpha chain variable domain of TCR clone 174679 (TRAV13-1, TRAJ39)
CASHAGNMLTF

SEQ ID NO: 349358 - protein, 14 aa, Homo sapiens
  CDR3 for beta chain variable domain of TCR clone 174679 (TRBV11-2, TRBJ1-5)
CASSLDRGRQPEHF

SEQ ID NO: 349359 - protein, 14 aa, Homo sapiens
  CDR3 for alpha chain variable domain of TCR clone 174680 (TRAV12-2, TRAJ13)
CAVKKTGGYQKVTF

SEQ ID NO: 349360 - protein, 15 aa, Homo sapiens
  CDR3 for beta chain variable domain of TCR clone 174680 (TRBV20-1, TRBJ2-5)
CSAPPRTGFGETQYF

SEQ ID NO: 349361 - protein, 14 aa, Homo sapiens
  CDR3 for alpha chain variable domain of TCR clone 174681 (TRAV8-2, TRAJ4)
CVVSPSGGYNKLIF

SEQ ID NO: 349362 - protein, 15 aa, Homo sapiens
  CDR3 for beta chain variable domain of TCR clone 174681 (TRBV11-3, TRBJ2-1)
CASSNGGGSSNEQFF

SEQ ID NO: 349363 - protein, 11 aa, Homo sapiens
  CDR3 for alpha chain variable domain of TCR clone 174682 (TRAV17, TRAJ43)
CATPRSNDMRF

SEQ ID NO: 349364 - protein, 16 aa, Homo sapiens
  CDR3 for beta chain variable domain of TCR clone 174682 (TRBV7-3, TRBJ2-1)
CASSLEGYRSYNEQFF

SEQ ID NO: 349365 - protein, 13 aa, Homo sapiens
  CDR3 for alpha chain variable domain of TCR clone 174683 (TRAV2, TRAJ15)
CAVASQAGTGLIF

SEQ ID NO: 349366 - protein, 16 aa, Homo sapiens
  CDR3 for beta chain variable domain of TCR clone 174683 (TRBV5-1, TRBJ1-1)
CASSSGGNSLNTEAFF

SEQ ID NO: 349367 - protein, 11 aa, Homo sapiens
  CDR3 for alpha chain variable domain of TCR clone 174684 (TRAV3, TRAJ21)
CAVGNFNKFYF

SEQ ID NO: 349368 - protein, 15 aa, Homo sapiens
  CDR3 for beta chain variable domain of TCR clone 174684 (TRBV5-1, TRBJ1-1)
CASSWTGRGNTEAFF

SEQ ID NO: 349369 - protein, 12 aa, Homo sapiens
  CDR3 for alpha chain variable domain of TCR clone 174685 (TRAV3, TRAJ26)
CAVRDYGHNFFF

SEQ ID NO: 349370 - protein, 16 aa, Homo sapiens
  CDR3 for beta chain variable domain of TCR clone 174685 (TRBV11-2, TRBJ1-2)
CASSPSGREANYGYTF

SEQ ID NO: 349371 - protein, 12 aa, Homo sapiens
  CDR3 for alpha chain variable domain of TCR clone 174686 (TRAV8-1, TRAJ23)
CAVGNQGGKLIF

SEQ ID NO: 349372 - protein, 16 aa, Homo sapiens
  CDR3 for beta chain variable domain of TCR clone 174686 (TRBV7-3, TRBJ2-2)
CASSLKRGTVSGELFF

SEQ ID NO: 349373 - protein, 13 aa, Homo sapiens
  CDR3 for alpha chain variable domain of TCR clone 174687 (TRAV21, TRAJ45)
CAVMGGGADGLTF

SEQ ID NO: 349374 - protein, 16 aa, Homo sapiens
  CDR3 for beta chain variable domain of TCR clone 174687 (TRBV12-4, TRBJ1-5)
CASSRPVGGSNQPQHF

SEQ ID NO: 349375 - protein, 14 aa, Homo sapiens
  CDR3 for alpha chain variable domain of TCR clone 174688 (TRAV1-2, TRAJ16)
CAVNRFSDGQKLLF

SEQ ID NO: 349376 - protein, 16 aa, Homo sapiens
  CDR3 for beta chain variable domain of TCR clone 174688 (TRBV7-3, TRBJ2-2)
CASSSKRGTLSGELFF

SEQ ID NO: 349377 - protein, 14 aa, Homo sapiens
  CDR3 for alpha chain variable domain of TCR clone 174689 (TRAV8-4, TRAJ9)
CAERRNTGGFKTIF

SEQ ID NO: 349378 - protein, 15 aa, Homo sapiens
  CDR3 for beta chain variable domain of TCR clone 174689 (TRBV10-2, TRBJ2-6)
CASSEQGTGANVLTF

SEQ ID NO: 349379 - protein, 14 aa, Homo sapiens
  CDR3 for alpha chain variable domain of TCR clone 174690 (TRAV12-2, TRAJ13)
CAVKKTGGYQKVTF

SEQ ID NO: 349380 - protein, 15 aa, Homo sapiens
  CDR3 for beta chain variable domain of TCR clone 174690 (TRBV27, TRBJ2-1)
CASSSGGGSANEQFF

SEQ ID NO: 349381 - protein, 14 aa, Homo sapiens
  CDR3 for alpha chain variable domain of TCR clone 174691 (TRAV36/DV7, TRAJ13)
CGSGENGGYQKVTF

SEQ ID NO: 349382 - protein, 15 aa, Homo sapiens
  CDR3 for beta chain variable domain of TCR clone 174691 (TRBV19, TRBJ2-1)
CASSTGTSSYNEQFF

SEQ ID NO: 349383 - protein, 14 aa, Homo sapiens
  CDR3 for alpha chain variable domain of TCR clone 174692 (TRAV1-2, TRAJ8)
CSVGEDTGFQKLVF

SEQ ID NO: 349384 - protein, 15 aa, Homo sapiens
  CDR3 for beta chain variable domain of TCR clone 174692 (TRBV27, TRBJ2-1)
CASSNGGGSSNEQFF

SEQ ID NO: 349385 - protein, 13 aa, Homo sapiens
  CDR3 for alpha chain variable domain of TCR clone 174693 (TRAV8-3, TRAJ4)
WVFYSGGYNKRIF

SEQ ID NO: 349386 - protein, 14 aa, Homo sapiens
  CDR3 for beta chain variable domain of TCR clone 174693 (TRBV7-9, TRBJ2-3)
CASSLEDGTDTQYF

SEQ ID NO: 349387 - protein, 15 aa, Homo sapiens
  CDR3 for alpha chain variable domain of TCR clone 174694 (TRAV8-3, TRAJ27)
CAVGPSKTNAGKSTF

SEQ ID NO: 349388 - protein, 12 aa, Homo sapiens
  CDR3 for beta chain variable domain of TCR clone 174694 (TRBV11-2, TRBJ2-2)
CASSRGGRELFF

SEQ ID NO: 349389 - protein, 12 aa, Homo sapiens
  CDR3 for alpha chain variable domain of TCR clone 174695 (TRAV12-3, TRAJ17)
CAMTLTGNKLTF

SEQ ID NO: 349390 - protein, 14 aa, Homo sapiens
  CDR3 for beta chain variable domain of TCR clone 174695 (TRBV4-1, TRBJ2-7)
CASIQDREHVEQYF

SEQ ID NO: 349391 - protein, 13 aa, Homo sapiens
  CDR3 for alpha chain variable domain of TCR clone 174696 (TRAV35, TRAJ48)
CAGHEFGNEKLTF

SEQ ID NO: 349392 - protein, 14 aa, Homo sapiens
  CDR3 for beta chain variable domain of TCR clone 174696 (TRBV19, TRBJ2-1)
CTSPTFVLSGEQFF

SEQ ID NO: 349393 - protein, 15 aa, Homo sapiens
  CDR3 for alpha chain variable domain of TCR clone 174697 (TRAV30, TRAJ32)
CGTEILGGATNKLIF

SEQ ID NO: 349394 - protein, 17 aa, Homo sapiens
  CDR3 for beta chain variable domain of TCR clone 174697 (TRBV5-4, TRBJ2-1)
CASSSAGGRGPCNEQFF

SEQ ID NO: 349395 - protein, 17 aa, Homo sapiens
  CDR3 for alpha chain variable domain of TCR clone 174698 (TRAV24, TRAJ42)
CAFRVKNYGGSQGNLIL

SEQ ID NO: 349396 - protein, 15 aa, Homo sapiens
  CDR3 for beta chain variable domain of TCR clone 174698 (TRBV4-3, TRBJ2-7)
CASSQGDWGDYEQYF

SEQ ID NO: 349397 - protein, 12 aa, Homo sapiens
  CDR3 for alpha chain variable domain of TCR clone 174699 (TRAV8-6, TRAJ11)
CAVSSGYSTLTF

SEQ ID NO: 349398 - protein, 11 aa, Homo sapiens
  CDR3 for beta chain variable domain of TCR clone 174699 (TRBV20-1, TRBJ1-5)
GSAQGDQPQHF

SEQ ID NO: 349399 - protein, 14 aa, Homo sapiens
  CDR3 for alpha chain variable domain of TCR clone 174700 (TRAV3, TRAJ21)
CAVESQANFNKFYF

SEQ ID NO: 349400 - protein, 12 aa, Homo sapiens
  CDR3 for beta chain variable domain of TCR clone 174700 (TRBV7-9, TRBJ1-4)
CASSTDREKLFF

SEQ ID NO: 349401 - protein, 11 aa, Homo sapiens
  CDR3 for alpha chain variable domain of TCR clone 174701 (TRAV2, TRAJ33)
CAVDSNYQLIW

SEQ ID NO: 349402 - protein, 14 aa, Homo sapiens
  CDR3 for beta chain variable domain of TCR clone 174701 (TRBV11-2, TRBJ2-3)
CASSRLARTYTQYF

SEQ ID NO: 349403 - protein, 15 aa, Homo sapiens
  CDR3 for alpha chain variable domain of TCR clone 174702 (TRAV20, TRAJ39)
CAVQALLLAGNMLTF

SEQ ID NO: 349404 - protein, 20 aa, Homo sapiens
  CDR3 for beta chain variable domain of TCR clone 174702 (TRBV9, TRBJ2-2)
CASSAKPGTQKGQNTGELFF

SEQ ID NO: 349405 - protein, 12 aa, Homo sapiens
  CDR3 for alpha chain variable domain of TCR clone 174703 (TRAV30, TRAJ43)
CGTEERGNDMRF

SEQ ID NO: 349406 - protein, 15 aa, Homo sapiens
  CDR3 for beta chain variable domain of TCR clone 174703 (TRBV7-3, TRBJ2-7)
CASSLNAQGAYEQYF

SEQ ID NO: 349407 - protein, 12 aa, Homo sapiens
  CDR3 for alpha chain variable domain of TCR clone 174704 (TRAV13-1, TRAJ9)
CASHTGGCKTIF

SEQ ID NO: 349408 - protein, 18 aa, Homo sapiens
  CDR3 for beta chain variable domain of TCR clone 174704 (TRBV11-2, TRBJ2-3)
CASSLGGASRGAPKTQYF

SEQ ID NO: 349409 - protein, 13 aa, Homo sapiens
  CDR3 for alpha chain variable domain of TCR clone 174705 (TRAV1-2, TRAJ9)
CAALNTGGFKTIF

SEQ ID NO: 349410 - protein, 14 aa, Homo sapiens
  CDR3 for beta chain variable domain of TCR clone 174705 (TRBV7-8, TRBJ2-3)
CASSLEAGTDTQYF

SEQ ID NO: 349411 - protein, 12 aa, Homo sapiens
  CDR3 for alpha chain variable domain of TCR clone 174706 (TRAV16, TRAJ10)
CSRTGGGNKLTF

SEQ ID NO: 349412 - protein, 16 aa, Homo sapiens
  CDR3 for beta chain variable domain of TCR clone 174706 (TRBV20-1, TRBJ1-2)
CSASMGQGVANYGYTF

SEQ ID NO: 349413 - protein, 14 aa, Homo sapiens
  CDR3 for alpha chain variable domain of TCR clone 174707 (TRAV13-1, TRAJ35)
CAASKGGFGNVLHC

SEQ ID NO: 349414 - protein, 15 aa, Homo sapiens
  CDR3 for beta chain variable domain of TCR clone 174707 (TRBV12-4, TRBJ2-2)
CASLRRGDLTGELFF

SEQ ID NO: 349415 - protein, 15 aa, Homo sapiens
  CDR3 for alpha chain variable domain of TCR clone 174708 (TRAV25, TRAJ52)
CAGTSGGSSYGKLTF

SEQ ID NO: 349416 - protein, 16 aa, Homo sapiens
  CDR3 for beta chain variable domain of TCR clone 174708 (TRBV15, TRBJ1-2)
CATSRGPRTGGGGYTF

SEQ ID NO: 349417 - protein, 14 aa, Homo sapiens
  CDR3 for alpha chain variable domain of TCR clone 174709 (TRAV12-3, TRAJ13)
CAMKNSGGYQKVTF

SEQ ID NO: 349418 - protein, 15 aa, Homo sapiens
  CDR3 for beta chain variable domain of TCR clone 174709 (TRBV7-2, TRBJ2-1)
CASSLVGSSYNEQFF

SEQ ID NO: 349419 - protein, 17 aa, Homo sapiens
  CDR3 for alpha chain variable domain of TCR clone 174710 (TRAV1-2, TRAJ27)
CAARDKTGDTNAGKSTF

SEQ ID NO: 349420 - protein, 13 aa, Homo sapiens
  CDR3 for beta chain variable domain of TCR clone 174710 (TRBV7-9, TRBJ1-2)
CASSLKQNYGYTF

SEQ ID NO: 349421 - protein, 15 aa, Homo sapiens
  CDR3 for alpha chain variable domain of TCR clone 174711 (TRAV8-3, TRAJ45)
CASSYLGGGADGLPF

SEQ ID NO: 349422 - protein, 13 aa, Homo sapiens
  CDR3 for beta chain variable domain of TCR clone 174711 (TRBV10-3, TRBJ2-7)
CASKLAVNYEQYF

SEQ ID NO: 349423 - protein, 13 aa, Homo sapiens
  CDR3 for alpha chain variable domain of TCR clone 174712 (TRAV12-2, TRAJ20)
CAVYPSNDYKLIF

SEQ ID NO: 349424 - protein, 15 aa, Homo sapiens
  CDR3 for beta chain variable domain of TCR clone 174712 (TRBV18, TRBJ1-2)
CASSPGNGLGYGYTF

SEQ ID NO: 349425 - protein, 11 aa, Homo sapiens
  CDR3 for alpha chain variable domain of TCR clone 174713 (TRAV8-3, TRAJ49)
CAVNTGNQFYF

SEQ ID NO: 349426 - protein, 12 aa, Homo sapiens
  CDR3 for beta chain variable domain of TCR clone 174713 (TRBV11-2, TRBJ2-2)
CASSLGGGELFF

SEQ ID NO: 349427 - protein, 15 aa, Homo sapiens
  CDR3 for alpha chain variable domain of TCR clone 174714 (TRAV17, TRAJ57)
CATCPSQGGSEKLVF

SEQ ID NO: 349428 - protein, 17 aa, Homo sapiens
  CDR3 for beta chain variable domain of TCR clone 174714 (TRBV7-8, TRBJ2-6)
CASSAGTGGAGANVLTF

SEQ ID NO: 349429 - protein, 12 aa, Homo sapiens
  CDR3 for alpha chain variable domain of TCR clone 174715 (TRAV38-2/DV8, TRAJ48)
CALLSGNEKLSF

SEQ ID NO: 349430 - protein, 15 aa, Homo sapiens
  CDR3 for beta chain variable domain of TCR clone 174715 (TRBV6-1, TRBJ2-1)
CASSELRGQYNEQFF

SEQ ID NO: 349431 - protein, 13 aa, Homo sapiens
  CDR3 for alpha chain variable domain of TCR clone 174716 (TRAV8-3, TRAJ21)
CAVGPLNFNKFYF

SEQ ID NO: 349432 - protein, 14 aa, Homo sapiens
  CDR3 for beta chain variable domain of TCR clone 174716 (TRBV11-2, TRBJ2-5)
CASSFTGRRETQYF

SEQ ID NO: 349433 - protein, 15 aa, Homo sapiens
  CDR3 for alpha chain variable domain of TCR clone 174717 (TRAV20, TRAJ58)
CAVQDLETSGPRLTF

SEQ ID NO: 349434 - protein, 13 aa, Homo sapiens
  CDR3 for beta chain variable domain of TCR clone 174717 (TRBV20-1, TRBJ1-1)
CSARGGGNTEAFF

SEQ ID NO: 349435 - protein, 11 aa, Homo sapiens
  CDR3 for alpha chain variable domain of TCR clone 174718 (TRAV13-1, TRAJ9)
CAASEGWRLQN

SEQ ID NO: 349436 - protein, 14 aa, Homo sapiens
  CDR3 for beta chain variable domain of TCR clone 174718 (TRBV4-2, TRBJ2-1)
CASGLDRAYNEQFF

SEQ ID NO: 349437 - protein, 14 aa, Homo sapiens
  CDR3 for alpha chain variable domain of TCR clone 174719 (TRAV26-1, TRAJ6)
CIVSPVGGSYIPSF

SEQ ID NO: 349438 - protein, 16 aa, Homo sapiens
  CDR3 for beta chain variable domain of TCR clone 174719 (TRBV4-1, TRBJ2-5)
CASSSGLAGVLGTQYF

SEQ ID NO: 349439 - protein, 14 aa, Homo sapiens
  CDR3 for alpha chain variable domain of TCR clone 174720 (TRAV12-2, TRAJ4)
CAEDLSGGYNKLIF

SEQ ID NO: 349440 - protein, 14 aa, Homo sapiens
  CDR3 for beta chain variable domain of TCR clone 174720 (TRBV7-3, TRBJ1-5)
RASSFSGCNQPQHF

SEQ ID NO: 349441 - protein, 13 aa, Homo sapiens
  CDR3 for alpha chain variable domain of TCR clone 174721 (TRAV13-1, TRAJ43)
CAASKNNNNDMRF

SEQ ID NO: 349442 - protein, 13 aa, Homo sapiens
  CDR3 for beta chain variable domain of TCR clone 174721 (TRBV3-1, TRBJ1-1)
CASSPGVITEAFF

SEQ ID NO: 349443 - protein, 19 aa, Homo sapiens
  CDR3 for alpha chain variable domain of TCR clone 174722 (TRAV26-1, TRAJ28)
CIVRVAHAYSGAGSYQLTF

SEQ ID NO: 349444 - protein, 15 aa, Homo sapiens
  CDR3 for beta chain variable domain of TCR clone 174722 (TRBV4-1, TRBJ1-4)
CASSDTGGTNEKLFF

SEQ ID NO: 349445 - protein, 16 aa, Homo sapiens
  CDR3 for alpha chain variable domain of TCR clone 174723 (TRAV3, TRAJ23)
CAVEPLIYNQGGKLIF

SEQ ID NO: 349446 - protein, 14 aa, Homo sapiens
  CDR3 for beta chain variable domain of TCR clone 174723 (TRBV19, TRBJ2-1)
CASPTFVLSGEQFF

SEQ ID NO: 349447 - protein, 11 aa, Homo sapiens
  CDR3 for alpha chain variable domain of TCR clone 174724 (TRAV3, TRAJ21)
CAVGNFNKFSF

SEQ ID NO: 349448 - protein, 16 aa, Homo sapiens
  CDR3 for beta chain variable domain of TCR clone 174724 (TRBV19, TRBJ2-1)
CANSKAGPSSYNEQFF

SEQ ID NO: 349449 - protein, 14 aa, Homo sapiens
  CDR3 for alpha chain variable domain of TCR clone 174725 (TRAV29/DV5, TRAJ12)
CAATRMDSSYKLIF

SEQ ID NO: 349450 - protein, 13 aa, Homo sapiens
  CDR3 for beta chain variable domain of TCR clone 174725 (TRBV7-2, TRBJ2-5)
CASSYWTGETQYV

SEQ ID NO: 349451 - protein, 22 aa, Homo sapiens
  CDR3 for alpha chain variable domain of TCR clone 174726 (TRAV25, TRAJ13)
TATQTTDVGTFLDSGGHQKVTF

SEQ ID NO: 349452 - protein, 17 aa, Homo sapiens
  CDR3 for beta chain variable domain of TCR clone 174726 (TRBV2, TRBJ1-6)
CASSLRSEGLMTSPLHF

SEQ ID NO: 349453 - protein, 16 aa, Homo sapiens
  CDR3 for alpha chain variable domain of TCR clone 174727 (TRAV4, TRAJ22)
CLVGDLYSGSARPLTF

SEQ ID NO: 349454 - protein, 14 aa, Homo sapiens
  CDR3 for beta chain variable domain of TCR clone 174727 (TRBV28, TRBJ2-3)
CASRWRGRADTQYF

SEQ ID NO: 349455 - protein, 11 aa, Homo sapiens
  CDR3 for alpha chain variable domain of TCR clone 174728 (TRAV12-2, TRAJ49)
CAVNTGNQFYF

SEQ ID NO: 349456 - protein, 12 aa, Homo sapiens
  CDR3 for beta chain variable domain of TCR clone 174728 (TRBV11-2, TRBJ2-4)
CASSSASGSEYF

SEQ ID NO: 349457 - protein, 16 aa, Homo sapiens
  CDR3 for alpha chain variable domain of TCR clone 174729 (TRAV3, TRAJ40)
CAVRDRIASGTSKYIF

SEQ ID NO: 349458 - protein, 16 aa, Homo sapiens
  CDR3 for beta chain variable domain of TCR clone 174729 (TRBV6-1, TRBJ1-2)
CASSEANSIINYGYTF

SEQ ID NO: 349459 - protein, 14 aa, Homo sapiens
  CDR3 for alpha chain variable domain of TCR clone 174730 (TRAV12-3, TRAJ58)
CAMSTETSGSRLTF

SEQ ID NO: 349460 - protein, 15 aa, Homo sapiens
  CDR3 for beta chain variable domain of TCR clone 174730 (TRBV4-1, TRBJ1-4)
CASSDTGGTNEKLSF

SEQ ID NO: 349461 - protein, 15 aa, Homo sapiens
  CDR3 for alpha chain variable domain of TCR clone 174731 (TRAV12-3, TRAJ6)
CALSATTVGSYIPTF

SEQ ID NO: 349462 - protein, 15 aa, Homo sapiens
  CDR3 for beta chain variable domain of TCR clone 174731 (TRBV7-6, TRBJ1-5)
CASSQSSGINQPQHF

SEQ ID NO: 349463 - protein, 12 aa, Homo sapiens
  CDR3 for alpha chain variable domain of TCR clone 174732 (TRAV20, TRAJ34)
SAVKDNTDKLIF

SEQ ID NO: 349464 - protein, 14 aa, Homo sapiens
  CDR3 for beta chain variable domain of TCR clone 174732 (TRBV7-9, TRBJ2-7)
CASSRPGGPYEQYF

SEQ ID NO: 349465 - protein, 13 aa, Homo sapiens
  CDR3 for alpha chain variable domain of TCR clone 174733 (TRAV16, TRAJ26)
CALLDNYGQNFVF

SEQ ID NO: 349466 - protein, 12 aa, Homo sapiens
  CDR3 for beta chain variable domain of TCR clone 174733 (TRBV29-1, TRBJ2-3)
CSVTGGADTQYF

SEQ ID NO: 349467 - protein, 15 aa, Homo sapiens
  CDR3 for alpha chain variable domain of TCR clone 174734 (TRAV8-4, TRAJ37)
CAVTYCSSNTGKLIF

SEQ ID NO: 349468 - protein, 13 aa, Homo sapiens
  CDR3 for beta chain variable domain of TCR clone 174734 (TRBV12-4, TRBJ2-5)
CASSLGGSRTQYF

SEQ ID NO: 349469 - protein, 16 aa, Homo sapiens
  CDR3 for alpha chain variable domain of TCR clone 174735 (TRAV3, TRAJ37)
CAVRGKGSGNTGKLIF

SEQ ID NO: 349470 - protein, 17 aa, Homo sapiens
  CDR3 for beta chain variable domain of TCR clone 174735 (TRBV28, TRBJ2-3)
CASSPTPAGGRVDTQYF

SEQ ID NO: 349471 - protein, 21 aa, Homo sapiens
  CDR3 for alpha chain variable domain of TCR clone 174736 (TRAV29/DV5, TRAJ52)
CSVLLCSKREAGGTSYGKLTF

SEQ ID NO: 349472 - protein, 13 aa, Homo sapiens
  CDR3 for beta chain variable domain of TCR clone 174736 (TRBV7-9, TRBJ1-2)
CASSLKQNYGDTF

SEQ ID NO: 349473 - protein, 14 aa, Homo sapiens
  CDR3 for alpha chain variable domain of TCR clone 174737 (TRAV8-6, TRAJ12)
CAVKAADSSYKLIF

SEQ ID NO: 349474 - protein, 17 aa, Homo sapiens
  CDR3 for beta chain variable domain of TCR clone 174737 (TRBV20-1, TRBJ2-1)
CSASSSGLAGSYNEQFF

SEQ ID NO: 349475 - protein, 14 aa, Homo sapiens
  CDR3 for alpha chain variable domain of TCR clone 174738 (TRAV35, TRAJ41)
CAGQASVRRNALHF

SEQ ID NO: 349476 - protein, 14 aa, Homo sapiens
  CDR3 for beta chain variable domain of TCR clone 174738 (TRBV20-1, TRBJ1-2)
CSASEQGAVYGYAF

SEQ ID NO: 349477 - protein, 15 aa, Homo sapiens
  CDR3 for alpha chain variable domain of TCR clone 174739 (TRAV12-3, TRAJ6)
CAMSATTGGSYIPPF

SEQ ID NO: 349478 - protein, 14 aa, Homo sapiens
  CDR3 for beta chain variable domain of TCR clone 174739 (TRBV2, TRBJ2-7)
CASSLTSGGYEQYF

SEQ ID NO: 349479 - protein, 12 aa, Homo sapiens
  CDR3 for alpha chain variable domain of TCR clone 174740 (TRAV1-1, TRAJ20)
CAVREDDYTLSF

SEQ ID NO: 349480 - protein, 18 aa, Homo sapiens
  CDR3 for beta chain variable domain of TCR clone 174740 (TRBV20-1, TRBJ2-3)
CSASGLAGGPGTTDTQYF

SEQ ID NO: 349481 - protein, 16 aa, Homo sapiens
  CDR3 for alpha chain variable domain of TCR clone 174741 (TRAV12-3, TRAJ53)
CAMSPGSGGSNYKLTF

SEQ ID NO: 349482 - protein, 16 aa, Homo sapiens
  CDR3 for beta chain variable domain of TCR clone 174741 (TRBV5-1, TRBJ1-1)
CASSKTGTEVGTEAFF

SEQ ID NO: 349483 - protein, 12 aa, Homo sapiens
  CDR3 for alpha chain variable domain of TCR clone 174742 (TRAV23/DV6, TRAJ32)
CSMPGATNKLIF

SEQ ID NO: 349484 - protein, 17 aa, Homo sapiens
  CDR3 for beta chain variable domain of TCR clone 174742 (TRBV13, TRBJ2-3)
CASSSLGTRGLTDTQYF

SEQ ID NO: 349485 - protein, 17 aa, Homo sapiens
  CDR3 for alpha chain variable domain of TCR clone 174743 (TRAV1-1, TRAJ11)
CAGYSTLTFWKGTMLLV

SEQ ID NO: 349486 - protein, 15 aa, Homo sapiens
  CDR3 for beta chain variable domain of TCR clone 174743 (TRBV6-5, TRBJ2-1)
CASRGDFDSYNEQFF

SEQ ID NO: 349487 - protein, 14 aa, Homo sapiens
  CDR3 for alpha chain variable domain of TCR clone 174744 (TRAV29/DV5, TRAJ45)
CAASFRGGADGLTF

SEQ ID NO: 349488 - protein, 13 aa, Homo sapiens
  CDR3 for beta chain variable domain of TCR clone 174744 (TRBV11-2, TRBJ1-3)
CASSLEPVNTIYF

SEQ ID NO: 349489 - protein, 14 aa, Homo sapiens
  CDR3 for alpha chain variable domain of TCR clone 174745 (TRAV13-2, TRAJ43)
CAEIPTYNNNDMRF

SEQ ID NO: 349490 - protein, 14 aa, Homo sapiens
  CDR3 for beta chain variable domain of TCR clone 174745 (TRBV19, TRBJ2-1)
CASPTFVLSGEQFF

SEQ ID NO: 349491 - protein, 11 aa, Homo sapiens
  CDR3 for alpha chain variable domain of TCR clone 174746 (TRAV21, TRAJ34)
CAVTNTDKLIF

SEQ ID NO: 349492 - protein, 13 aa, Homo sapiens
  CDR3 for beta chain variable domain of TCR clone 174746 (TRBV7-3, TRBJ1-2)
CASSLKRGYGYTF

SEQ ID NO: 349493 - protein, 14 aa, Homo sapiens
  CDR3 for alpha chain variable domain of TCR clone 174747 (TRAV23/DV6, TRAJ40)
CAANLTSGTYKYIF

SEQ ID NO: 349494 - protein, 14 aa, Homo sapiens
  CDR3 for beta chain variable domain of TCR clone 174747 (TRBV5-1, TRBJ2-3)
CASSRGQGGGTQYF

SEQ ID NO: 349495 - protein, 16 aa, Homo sapiens
  CDR3 for alpha chain variable domain of TCR clone 174748 (TRAV17, TRAJ28)
CVTASVSGAGSYQLTF

SEQ ID NO: 349496 - protein, 11 aa, Homo sapiens
  CDR3 for beta chain variable domain of TCR clone 174748 (TRBV7-9, TRBJ2-5)
CASSLGETQYF

SEQ ID NO: 349497 - protein, 15 aa, Homo sapiens
  CDR3 for alpha chain variable domain of TCR clone 174749 (TRAV13-1, TRAJ45)
CAAPYSGGGADGLTF

SEQ ID NO: 349498 - protein, 13 aa, Homo sapiens
  CDR3 for beta chain variable domain of TCR clone 174749 (TRBV28, TRBJ2-7)
CPSSFGQVYEQYF

SEQ ID NO: 349499 - protein, 12 aa, Homo sapiens
  CDR3 for alpha chain variable domain of TCR clone 174750 (TRAV8-1, TRAJ9)
CAVGTGGFKTIF

SEQ ID NO: 349500 - protein, 14 aa, Homo sapiens
  CDR3 for beta chain variable domain of TCR clone 174750 (TRBV28, TRBJ2-7)
CASRAAGLGYEQYF

SEQ ID NO: 349501 - protein, 14 aa, Homo sapiens
  CDR3 for alpha chain variable domain of TCR clone 174751 (TRAV14/DV4, TRAJ41)
CARRGPDSGYALNF

SEQ ID NO: 349502 - protein, 15 aa, Homo sapiens
  CDR3 for beta chain variable domain of TCR clone 174751 (TRBV19, TRBJ2-1)
CASSIQATSYNEQFF

SEQ ID NO: 349503 - protein, 13 aa, Homo sapiens
  CDR3 for alpha chain variable domain of TCR clone 174752 (TRAV13-1, TRAJ43)
CAASKNNNNDMRF

SEQ ID NO: 349504 - protein, 16 aa, Homo sapiens
  CDR3 for beta chain variable domain of TCR clone 174752 (TRBV7-9, TRBJ1-2)
CASSLGFSSGEDGYTF

SEQ ID NO: 349505 - protein, 16 aa, Homo sapiens
  CDR3 for alpha chain variable domain of TCR clone 174753 (TRAV2, TRAJ4)
CSVVDRFSGGYNKLIF

SEQ ID NO: 349506 - protein, 13 aa, Homo sapiens
  CDR3 for beta chain variable domain of TCR clone 174753 (TRBV7-7, TRBJ2-5)
CASSRSGQETQYF

SEQ ID NO: 349507 - protein, 14 aa, Homo sapiens
  CDR3 for alpha chain variable domain of TCR clone 174754 (TRAV9-2, TRAJ39)
CALYIYNAGNMLTF

SEQ ID NO: 349508 - protein, 14 aa, Homo sapiens
  CDR3 for beta chain variable domain of TCR clone 174754 (TRBV6-1, TRBJ1-3)
CASVQGGGGNTIYC

SEQ ID NO: 349509 - protein, 13 aa, Homo sapiens
  CDR3 for alpha chain variable domain of TCR clone 174755 (TRAV30, TRAJ24)
CGTVTDSWGKLQF

SEQ ID NO: 349510 - protein, 14 aa, Homo sapiens
  CDR3 for beta chain variable domain of TCR clone 174755 (TRBV13, TRBJ2-7)
CASSLKGASYEQYF

SEQ ID NO: 349511 - protein, 15 aa, Homo sapiens
  CDR3 for alpha chain variable domain of TCR clone 174756 (TRAV20, TRAJ28)
CAVQYSWAGSYQLTF

SEQ ID NO: 349512 - protein, 12 aa, Homo sapiens
  CDR3 for beta chain variable domain of TCR clone 174756 (TRBV12-4, TRBJ1-3)
CASRASGNTLYF

SEQ ID NO: 349513 - protein, 11 aa, Homo sapiens
  CDR3 for alpha chain variable domain of TCR clone 174757 (TRAV21, TRAJ39)
LLVNAGNMITF

SEQ ID NO: 349514 - protein, 18 aa, Homo sapiens
  CDR3 for beta chain variable domain of TCR clone 174757 (TRBV7-2, TRBJ2-7)
WASSLSGRGLAGGYEQYF

SEQ ID NO: 349515 - protein, 14 aa, Homo sapiens
  CDR3 for alpha chain variable domain of TCR clone 174758 (TRAV29/DV5, TRAJ44)
CAAFLVGTASKLTI

SEQ ID NO: 349516 - protein, 15 aa, Homo sapiens
  CDR3 for beta chain variable domain of TCR clone 174758 (TRBV7-3, TRBJ2-2)
CASSETGQGTGELFF

SEQ ID NO: 349517 - protein, 17 aa, Homo sapiens
  CDR3 for alpha chain variable domain of TCR clone 174759 (TRAV3, TRAJ42)
CAVRDRDYGGSQGNLIF

SEQ ID NO: 349518 - protein, 13 aa, Homo sapiens
  CDR3 for beta chain variable domain of TCR clone 174759 (TRBV25-1, TRBJ2-5)
CASSESGRETQYF

SEQ ID NO: 349519 - protein, 16 aa, Homo sapiens
  CDR3 for alpha chain variable domain of TCR clone 174760 (TRAV4, TRAJ9)
CLVGDPNRPGGFKTIF

SEQ ID NO: 349520 - protein, 18 aa, Homo sapiens
  CDR3 for beta chain variable domain of TCR clone 174760 (TRBV28, TRBJ1-4)
CASSPPYRGEVKNCFLAV

SEQ ID NO: 349521 - protein, 15 aa, Homo sapiens
  CDR3 for alpha chain variable domain of TCR clone 174761 (TRAV12-1, TRAJ42)
CVVKTGGGSQGNLIF

SEQ ID NO: 349522 - protein, 13 aa, Homo sapiens
  CDR3 for beta chain variable domain of TCR clone 174761 (TRBV10-3, TRBJ2-7)
CASKLAVNYEQYF

SEQ ID NO: 349523 - protein, 14 aa, Homo sapiens
  CDR3 for alpha chain variable domain of TCR clone 174762 (TRAV4, TRAJ31)
CLVGDRDNNARLMF

SEQ ID NO: 349524 - protein, 14 aa, Homo sapiens
  CDR3 for beta chain variable domain of TCR clone 174762 (TRBV25-1, TRBJ1-1)
CASTHLGGNTEAFF

SEQ ID NO: 349525 - protein, 13 aa, Homo sapiens
  CDR3 for alpha chain variable domain of TCR clone 174763 (TRAV3, TRAJ43)
CAVRDMRGGDMRF

SEQ ID NO: 349526 - protein, 15 aa, Homo sapiens
  CDR3 for beta chain variable domain of TCR clone 174763 (TRBV6-5, TRBJ1-5)
CASSYSRRSNQPQHF

SEQ ID NO: 349527 - protein, 14 aa, Homo sapiens
  CDR3 for alpha chain variable domain of TCR clone 174764 (TRAV12-2, TRAJ13)
CAVKKTGGYQKVTF

SEQ ID NO: 349528 - protein, 15 aa, Homo sapiens
  CDR3 for beta chain variable domain of TCR clone 174764 (TRBV5-1, TRBJ2-5)
CASSLGLAEQETQYC

SEQ ID NO: 349529 - protein, 13 aa, Homo sapiens
  CDR3 for alpha chain variable domain of TCR clone 174765 (TRAV12-1, TRAJ40)
CVVPTSGTYKYIF

SEQ ID NO: 349530 - protein, 14 aa, Homo sapiens
  CDR3 for beta chain variable domain of TCR clone 174765 (TRBV11-2, TRBJ2-7)
CASSSTGEGYEQYF

SEQ ID NO: 349531 - protein, 10 aa, Homo sapiens
  CDR3 for alpha chain variable domain of TCR clone 174766 (TRAV8-4, TRAJ43)
CAVSADDMRF

SEQ ID NO: 349532 - protein, 16 aa, Homo sapiens
  CDR3 for beta chain variable domain of TCR clone 174766 (TRBV2, TRBJ2-3)
CASSTSVEGVTDTQYF

SEQ ID NO: 349533 - protein, 13 aa, Homo sapiens
  CDR3 for alpha chain variable domain of TCR clone 174767 (TRAV17, TRAJ33)
CATDADSNYQLIW

SEQ ID NO: 349534 - protein, 15 aa, Homo sapiens
  CDR3 for beta chain variable domain of TCR clone 174767 (TRBV7-9, TRBJ2-3)
CASNQGGRVTDTQYF

SEQ ID NO: 349535 - protein, 14 aa, Homo sapiens
  CDR3 for alpha chain variable domain of TCR clone 174768 (TRAV2, TRAJ9)
CAVEDRSGGFKTIF

SEQ ID NO: 349536 - protein, 16 aa, Homo sapiens
  CDR3 for beta chain variable domain of TCR clone 174768 (TRBV7-8, TRBJ2-3)
CASSLAVSRAMDTQYF

SEQ ID NO: 349537 - protein, 16 aa, Homo sapiens
  CDR3 for alpha chain variable domain of TCR clone 174769 (TRAV4, TRAJ22)
CLVGDLYSGSARQLTF

SEQ ID NO: 349538 - protein, 19 aa, Homo sapiens
  CDR3 for beta chain variable domain of TCR clone 174769 (TRBV7-9, TRBJ2-1)
CASSHNRGALLRSYNEQFF

SEQ ID NO: 349539 - protein, 14 aa, Homo sapiens
  CDR3 for alpha chain variable domain of TCR clone 174770 (TRAV1-2, TRAJ16)
CAVNRFSDGQTLLF

SEQ ID NO: 349540 - protein, 16 aa, Homo sapiens
  CDR3 for beta chain variable domain of TCR clone 174770 (TRBV7-3, TRBJ2-2)
CASSLKRGTMSGELFF

SEQ ID NO: 349541 - protein, 13 aa, Homo sapiens
  CDR3 for alpha chain variable domain of TCR clone 174771 (TRAV1-2, TRAJ9)
CAALNTVGFKTIF

SEQ ID NO: 349542 - protein, 15 aa, Homo sapiens
  CDR3 for beta chain variable domain of TCR clone 174771 (TRBV24-1, TRBJ2-1)
CATSGSGGFYNEQFF

SEQ ID NO: 349543 - protein, 15 aa, Homo sapiens
  CDR3 for alpha chain variable domain of TCR clone 174772 (TRAV17, TRAJ57)
CATGPCQGGSEKLVF

SEQ ID NO: 349544 - protein, 16 aa, Homo sapiens
  CDR3 for beta chain variable domain of TCR clone 174772 (TRBV12-4, TRBJ1-5)
CASSRPVGGSNQPQHF

SEQ ID NO: 349545 - protein, 10 aa, Homo sapiens
  CDR3 for alpha chain variable domain of TCR clone 174773 (TRAV12-3, TRAJ49)
WAMNDDQFYF

SEQ ID NO: 349546 - protein, 16 aa, Homo sapiens
  CDR3 for beta chain variable domain of TCR clone 174773 (TRBV27, TRBJ2-2)
CASSFRGLVRTGELFF

SEQ ID NO: 349547 - protein, 18 aa, Homo sapiens
  CDR3 for alpha chain variable domain of TCR clone 174774 (TRAV26-1, TRAJ28)
CIVRVGLWGWELPTHFRA

SEQ ID NO: 349548 - protein, 16 aa, Homo sapiens
  CDR3 for beta chain variable domain of TCR clone 174774 (TRBV20-1, TRBJ1-2)
CSASMGQGVANYGYTF

SEQ ID NO: 349549 - protein, 15 aa, Homo sapiens
  CDR3 for alpha chain variable domain of TCR clone 174775 (TRAV12-1, TRAJ4)
CVVNGFSGGYNKLIF

SEQ ID NO: 349550 - protein, 15 aa, Homo sapiens
  CDR3 for beta chain variable domain of TCR clone 174775 (TRBV6-4, TRBJ2-1)
CASSDSTGGYNEQFF

SEQ ID NO: 349551 - protein, 13 aa, Homo sapiens
  CDR3 for alpha chain variable domain of TCR clone 174776 (TRAV1-1, TRAJ15)
CAVVDQAGTALIF

SEQ ID NO: 349552 - protein, 14 aa, Homo sapiens
  CDR3 for beta chain variable domain of TCR clone 174776 (TRBV5-4, TRBJ1-6)
CASSLCSDNSPLHF

SEQ ID NO: 349553 - protein, 14 aa, Homo sapiens
  CDR3 for alpha chain variable domain of TCR clone 174777 (TRAV17, TRAJ57)
CATDHQGGSEKLVF

SEQ ID NO: 349554 - protein, 14 aa, Homo sapiens
  CDR3 for beta chain variable domain of TCR clone 174777 (TRBV5-8, TRBJ2-3)
CASSLGQGTDTQYF

SEQ ID NO: 349555 - protein, 12 aa, Homo sapiens
  CDR3 for alpha chain variable domain of TCR clone 174778 (TRAV8-3, TRAJ26)
CAGDNYGQNFVF

SEQ ID NO: 349556 - protein, 18 aa, Homo sapiens
  CDR3 for beta chain variable domain of TCR clone 174778 (TRBV7-8, TRBJ2-1)
CASSPAEGLAGGLNEQFF

SEQ ID NO: 349557 - protein, 10 aa, Homo sapiens
  CDR3 for alpha chain variable domain of TCR clone 174779 (TRAV12-2, TRAJ41)
CAVTGYALNL

SEQ ID NO: 349558 - protein, 15 aa, Homo sapiens
  CDR3 for beta chain variable domain of TCR clone 174779 (TRBV4-2, TRBJ2-1)
CASSQDVGLAGEQFF

SEQ ID NO: 349559 - protein, 14 aa, Homo sapiens
  CDR3 for alpha chain variable domain of TCR clone 174780 (TRAV12-1, TRAJ17)
CVANYKAAGNKLTF

SEQ ID NO: 349560 - protein, 14 aa, Homo sapiens
  CDR3 for beta chain variable domain of TCR clone 174780 (TRBV7-8, TRBJ2-3)
CASSLEAGTDTQYF

SEQ ID NO: 349561 - protein, 14 aa, Homo sapiens
  CDR3 for alpha chain variable domain of TCR clone 174781 (TRAV1-2, TRAJ8)
CAVREDTGFQKLVF

SEQ ID NO: 349562 - protein, 14 aa, Homo sapiens
  CDR3 for beta chain variable domain of TCR clone 174781 (TRBV10-1, TRBJ1-5)
CASRARGAIQPQHF

SEQ ID NO: 349563 - protein, 12 aa, Homo sapiens
  CDR3 for alpha chain variable domain of TCR clone 174782 (TRAV23/DV6, TRAJ43)
CAALYNNNDMRF

SEQ ID NO: 349564 - protein, 14 aa, Homo sapiens
  CDR3 for beta chain variable domain of TCR clone 174782 (TRBV5-1, TRBJ1-1)
CASSLQGASTEAFF

SEQ ID NO: 349565 - protein, 13 aa, Homo sapiens
  CDR3 for alpha chain variable domain of TCR clone 174783 (TRAV13-1, TRAJ20)
CAARVSNDYKLSF

SEQ ID NO: 349566 - protein, 12 aa, Homo sapiens
  CDR3 for beta chain variable domain of TCR clone 174783 (TRBV20-1, TRBJ2-1)
FSARLGTDEQFF

SEQ ID NO: 349567 - protein, 21 aa, Homo sapiens
  CDR3 for alpha chain variable domain of TCR clone 174784 (TRAV26-1, TRAJ37)
CCVLLHRQSLHGSSNTGKLII

SEQ ID NO: 349568 - protein, 17 aa, Homo sapiens
  CDR3 for beta chain variable domain of TCR clone 174784 (TRBV12-4, TRBJ2-1)
CASSPTPRGGSNNEQFF

SEQ ID NO: 349569 - protein, 17 aa, Homo sapiens
  CDR3 for alpha chain variable domain of TCR clone 174785 (TRAV3, TRAJ42)
CAVRDRDYGGSQGNLIF

SEQ ID NO: 349570 - protein, 15 aa, Homo sapiens
  CDR3 for beta chain variable domain of TCR clone 174785 (TRBV6-6, TRBJ2-7)
CASSYSHGGSYEQYF

SEQ ID NO: 349571 - protein, 13 aa, Homo sapiens
  CDR3 for alpha chain variable domain of TCR clone 174786 (TRAV1-2, TRAJ24)
SAVRADSWGKFQF

SEQ ID NO: 349572 - protein, 13 aa, Homo sapiens
  CDR3 for beta chain variable domain of TCR clone 174786 (TRBV20-1, TRBJ2-1)
CSATGLAGDEQFF

SEQ ID NO: 349573 - protein, 16 aa, Homo sapiens
  CDR3 for alpha chain variable domain of TCR clone 174787 (TRAV23/DV6, TRAJ48)
CAASGVVNFGNENLTF

SEQ ID NO: 349574 - protein, 15 aa, Homo sapiens
  CDR3 for beta chain variable domain of TCR clone 174787 (TRBV20-1, TRBJ2-5)
CSAGLAGVSQETQYF

SEQ ID NO: 349575 - protein, 14 aa, Homo sapiens
  CDR3 for alpha chain variable domain of TCR clone 174788 (TRAV16, TRAJ33)
CALSAMDSNYQLIW

SEQ ID NO: 349576 - protein, 12 aa, Homo sapiens
  CDR3 for beta chain variable domain of TCR clone 174788 (TRBV11-3, TRBJ2-2)
CASSLGGGELFF

SEQ ID NO: 349577 - protein, 14 aa, Homo sapiens
  CDR3 for alpha chain variable domain of TCR clone 174789 (TRAV12-3, TRAJ10)
SHLPLTGGGNKLTF

SEQ ID NO: 349578 - protein, 16 aa, Homo sapiens
  CDR3 for beta chain variable domain of TCR clone 174789 (TRBV4-1, TRBJ2-3)
CASSQRAGGLTDTQYF

SEQ ID NO: 349579 - protein, 14 aa, Homo sapiens
  CDR3 for alpha chain variable domain of TCR clone 174790 (TRAV12-1, TRAJ17)
CVVDERAAGNKLTF

SEQ ID NO: 349580 - protein, 13 aa, Homo sapiens
  CDR3 for beta chain variable domain of TCR clone 174790 (TRBV19, TRBJ2-1)
SATSRGVYNEQFF

SEQ ID NO: 349581 - protein, 13 aa, Homo sapiens
  CDR3 for alpha chain variable domain of TCR clone 174791 (TRAV13-1, TRAJ11)
CAASIRGYSTLTF

SEQ ID NO: 349582 - protein, 12 aa, Homo sapiens
  CDR3 for beta chain variable domain of TCR clone 174791 (TRBV19, TRBJ1-5)
CASSIAQQPQHF

SEQ ID NO: 349583 - protein, 13 aa, Homo sapiens
  CDR3 for alpha chain variable domain of TCR clone 174792 (TRAV12-2, TRAJ38)
CAVNAGNNRKLIW

SEQ ID NO: 349584 - protein, 11 aa, Homo sapiens
  CDR3 for beta chain variable domain of TCR clone 174792 (TRBV29-1, TRBJ2-5)
CSEDRTGTQYF

SEQ ID NO: 349585 - protein, 17 aa, Homo sapiens
  CDR3 for alpha chain variable domain of TCR clone 174793 (TRAV35, TRAJ40)
CAGQLGTSGTYKYILEQ

SEQ ID NO: 349586 - protein, 14 aa, Homo sapiens
  CDR3 for beta chain variable domain of TCR clone 174793 (TRBV7-3, TRBJ2-1)
CASSLAGGTNEQFF

SEQ ID NO: 349587 - protein, 16 aa, Homo sapiens
  CDR3 for alpha chain variable domain of TCR clone 174794 (TRAV20, TRAJ38)
CAVQASNAGNNRKPIW

SEQ ID NO: 349588 - protein, 16 aa, Homo sapiens
  CDR3 for beta chain variable domain of TCR clone 174794 (TRBV7-8, TRBJ2-6)
CASRVGDSSGANVLSF

SEQ ID NO: 349589 - protein, 12 aa, Homo sapiens
  CDR3 for alpha chain variable domain of TCR clone 174795 (TRAV36/DV7, TRAJ54)
CAVVRGAQKLVS

SEQ ID NO: 349590 - protein, 13 aa, Homo sapiens
  CDR3 for beta chain variable domain of TCR clone 174795 (TRBV7-3, TRBJ1-2)
CASSLKQNYGYTF

SEQ ID NO: 349591 - protein, 13 aa, Homo sapiens
  CDR3 for alpha chain variable domain of TCR clone 174796 (TRAV8-4, TRAJ49)
CAVRTLTGNQFYF

SEQ ID NO: 349592 - protein, 15 aa, Homo sapiens
  CDR3 for beta chain variable domain of TCR clone 174796 (TRBV25-1, TRBJ1-4)
CASSPGDSTNEKLFF

SEQ ID NO: 349593 - protein, 14 aa, Homo sapiens
  CDR3 for alpha chain variable domain of TCR clone 174797 (TRAV25, TRAJ48)
CAGPGGFGNEKLTF

SEQ ID NO: 349594 - protein, 17 aa, Homo sapiens
  CDR3 for beta chain variable domain of TCR clone 174797 (TRBV13, TRBJ2-3)
CASSLSRVAGGRNTQYF

SEQ ID NO: 349595 - protein, 16 aa, Homo sapiens
  CDR3 for alpha chain variable domain of TCR clone 174798 (TRAV22, TRAJ45)
CAVERGKRGGADGLTF

SEQ ID NO: 349596 - protein, 16 aa, Homo sapiens
  CDR3 for beta chain variable domain of TCR clone 174798 (TRBV7-3, TRBJ2-1)
CASSPGAGTYYNEQFF

SEQ ID NO: 349597 - protein, 15 aa, Homo sapiens
  CDR3 for alpha chain variable domain of TCR clone 174799 (TRAV2, TRAJ15)
CAVEDRNQAGTALIF

SEQ ID NO: 349598 - protein, 15 aa, Homo sapiens
  CDR3 for beta chain variable domain of TCR clone 174799 (TRBV28, TRBJ2-1)
CASSIIAGGRSEQFF

SEQ ID NO: 349599 - protein, 11 aa, Homo sapiens
  CDR3 for alpha chain variable domain of TCR clone 174800 (TRAV2, TRAJ13)
CASGGYQKVTF

SEQ ID NO: 349600 - protein, 19 aa, Homo sapiens
  CDR3 for beta chain variable domain of TCR clone 174800 (TRBV11-3, TRBJ2-2)
CASSTRPGAKTTNTGELFF

SEQ ID NO: 349601 - protein, 18 aa, Homo sapiens
  CDR3 for alpha chain variable domain of TCR clone 174801 (TRAV21, TRAJ52)
CAVRPSPAGGTSYGKLTF

SEQ ID NO: 349602 - protein, 15 aa, Homo sapiens
  CDR3 for beta chain variable domain of TCR clone 174801 (TRBV5-7, TRBJ2-1)
CASSRRLAGDNEQFF

SEQ ID NO: 349603 - protein, 15 aa, Homo sapiens
  CDR3 for alpha chain variable domain of TCR clone 174802 (TRAV38-1, TRAJ37)
CAFIFGSSNTGKLIF

SEQ ID NO: 349604 - protein, 13 aa, Homo sapiens
  CDR3 for beta chain variable domain of TCR clone 174802 (TRBV19, TRBJ1-2)
CASSVPGQDGYTF

SEQ ID NO: 349605 - protein, 13 aa, Homo sapiens
  CDR3 for alpha chain variable domain of TCR clone 174803 (TRAV20, TRAJ37)
CAGCSSNTGKLIF

SEQ ID NO: 349606 - protein, 14 aa, Homo sapiens
  CDR3 for beta chain variable domain of TCR clone 174803 (TRBV20-1, TRBJ2-5)
RSARDGRAGETQYF

SEQ ID NO: 349607 - protein, 14 aa, Homo sapiens
  CDR3 for alpha chain variable domain of TCR clone 174804 (TRAV1-2, TRAJ16)
CAVNRFSDGQKLLF

SEQ ID NO: 349608 - protein, 13 aa, Homo sapiens
  CDR3 for beta chain variable domain of TCR clone 174804 (TRBV7-9, TRBJ2-3)
CAGSPGSTDTQYF

SEQ ID NO: 349609 - protein, 15 aa, Homo sapiens
  CDR3 for alpha chain variable domain of TCR clone 174805 (TRAV27, TRAJ38)
CAARRNAGNNRKLIW

SEQ ID NO: 349610 - protein, 13 aa, Homo sapiens
  CDR3 for beta chain variable domain of TCR clone 174805 (TRBV12-5, TRBJ2-3)
CASGERRSDTQYF

SEQ ID NO: 349611 - protein, 11 aa, Homo sapiens
  CDR3 for alpha chain variable domain of TCR clone 174806 (TRAV1-1, TRAJ23)
CAVRQGGKLIF

SEQ ID NO: 349612 - protein, 16 aa, Homo sapiens
  CDR3 for beta chain variable domain of TCR clone 174806 (TRBV12-4, TRBJ2-7)
CASSPEGQGSSYEQYF

SEQ ID NO: 349613 - protein, 12 aa, Homo sapiens
  CDR3 for alpha chain variable domain of TCR clone 174807 (TRAV21, TRAJ31)
CAVWGNNARLMF

SEQ ID NO: 349614 - protein, 15 aa, Homo sapiens
  CDR3 for beta chain variable domain of TCR clone 174807 (TRBV2, TRBJ1-2)
CASSEIGGANYGYTF

SEQ ID NO: 349615 - protein, 19 aa, Homo sapiens
  CDR3 for alpha chain variable domain of TCR clone 174808 (TRAV1-1, TRAJ27)
CAGSEMTRSSLEKGHDFIF

SEQ ID NO: 349616 - protein, 14 aa, Homo sapiens
  CDR3 for beta chain variable domain of TCR clone 174808 (TRBV11-3, TRBJ1-6)
CASSFPGGDPPLHF

SEQ ID NO: 349617 - protein, 16 aa, Homo sapiens
  CDR3 for alpha chain variable domain of TCR clone 174809 (TRAV3, TRAJ37)
CALRGKGPGNTGKLIF

SEQ ID NO: 349618 - protein, 14 aa, Homo sapiens
  CDR3 for beta chain variable domain of TCR clone 174809 (TRBV7-2, TRBJ2-7)
CASSPKTSFYEQYF

SEQ ID NO: 349619 - protein, 14 aa, Homo sapiens
  CDR3 for alpha chain variable domain of TCR clone 174810 (TRAV12-3, TRAJ10)
SHLPLTGGGNKLTF

SEQ ID NO: 349620 - protein, 15 aa, Homo sapiens
  CDR3 for beta chain variable domain of TCR clone 174810 (TRBV11-2, TRBJ1-3)
WASSLDGTVGNTIYF

SEQ ID NO: 349621 - protein, 11 aa, Homo sapiens
  CDR3 for alpha chain variable domain of TCR clone 174811 (TRAV21, TRAJ34)
CAVTNTDKLIF

SEQ ID NO: 349622 - protein, 15 aa, Homo sapiens
  CDR3 for beta chain variable domain of TCR clone 174811 (TRBV5-7, TRBJ1-5)
CAGSYGKLWDQPQHF

SEQ ID NO: 349623 - protein, 15 aa, Homo sapiens
  CDR3 for alpha chain variable domain of TCR clone 174812 (TRAV26-1, TRAJ29)
CIVRVEGSGNKHLVF

SEQ ID NO: 349624 - protein, 14 aa, Homo sapiens
  CDR3 for beta chain variable domain of TCR clone 174812 (TRBV18, TRBJ2-5)
CASSHGVSQETQYF

SEQ ID NO: 349625 - protein, 12 aa, Homo sapiens
  CDR3 for alpha chain variable domain of TCR clone 174813 (TRAV21, TRAJ31)
CAVWGNNARLMV

SEQ ID NO: 349626 - protein, 16 aa, Homo sapiens
  CDR3 for beta chain variable domain of TCR clone 174813 (TRBV27, TRBJ2-5)
CASSYGPGGQKETQYF

SEQ ID NO: 349627 - protein, 13 aa, Homo sapiens
  CDR3 for alpha chain variable domain of TCR clone 174814 (TRAV23/DV6, TRAJ58)
CAATGTSGSRLTF

SEQ ID NO: 349628 - protein, 13 aa, Homo sapiens
  CDR3 for beta chain variable domain of TCR clone 174814 (TRBV5-5, TRBJ1-2)
CASSFWRGEDYTF

SEQ ID NO: 349629 - protein, 13 aa, Homo sapiens
  CDR3 for alpha chain variable domain of TCR clone 174815 (TRAV27, TRAJ45)
CRSSGGGADGLTF

SEQ ID NO: 349630 - protein, 17 aa, Homo sapiens
  CDR3 for beta chain variable domain of TCR clone 174815 (TRBV20-1, TRBJ2-1)
CSASSSGLAGSCNEQFF

SEQ ID NO: 349631 - protein, 18 aa, Homo sapiens
  CDR3 for alpha chain variable domain of TCR clone 174816 (TRAV21, TRAJ52)
CAVRPSPAGGTSYGKLTF

SEQ ID NO: 349632 - protein, 13 aa, Homo sapiens
  CDR3 for beta chain variable domain of TCR clone 174816 (TRBV20-1, TRBJ1-2)
CSARDRVYGGYTF

SEQ ID NO: 349633 - protein, 12 aa, Homo sapiens
  CDR3 for alpha chain variable domain of TCR clone 174817 (TRAV3, TRAJ43)
CAVRDPNNDMRF

SEQ ID NO: 349634 - protein, 12 aa, Homo sapiens
  CDR3 for beta chain variable domain of TCR clone 174817 (TRBV5-4, TRBJ2-7)
CASSLEAYEQYF

SEQ ID NO: 349635 - protein, 10 aa, Homo sapiens
  CDR3 for alpha chain variable domain of TCR clone 174818 (TRAV1-2, TRAJ31)
CVSEDARLMF

SEQ ID NO: 349636 - protein, 14 aa, Homo sapiens
  CDR3 for beta chain variable domain of TCR clone 174818 (TRBV19, TRBJ2-1)
CASPTFVLSGSSSS

SEQ ID NO: 349637 - protein, 18 aa, Homo sapiens
  CDR3 for alpha chain variable domain of TCR clone 174819 (TRAV21, TRAJ52)
CAVRPSPAGGTSYGKLTF

SEQ ID NO: 349638 - protein, 13 aa, Homo sapiens
  CDR3 for beta chain variable domain of TCR clone 174819 (TRBV7-8, TRBJ2-7)
RRVRLTEMGEQYF

SEQ ID NO: 349639 - protein, 16 aa, Homo sapiens
  CDR3 for alpha chain variable domain of TCR clone 174820 (TRAV12-1, TRAJ48)
WVVNMVSNFGNEKLTF

SEQ ID NO: 349640 - protein, 18 aa, Homo sapiens
  CDR3 for beta chain variable domain of TCR clone 174820 (TRBV11-2, TRBJ2-6)
CASSLNPFLGTGANGLTF

SEQ ID NO: 349641 - protein, 12 aa, Homo sapiens
  CDR3 for alpha chain variable domain of TCR clone 174821 (TRAV13-1, TRAJ21)
CAAKEGFNKFYF

SEQ ID NO: 349642 - protein, 14 aa, Homo sapiens
  CDR3 for beta chain variable domain of TCR clone 174821 (TRBV4-1, TRBJ2-7)
CASSPVAGGDEQYF
